United States Patent Application Publication US 2007/0042381 A1 - sequence listing, part 21

SEQ ID NO: 907264 - RNA, 22 nt, Human
cagaugugcaugaugggaaggg

SEQ ID NO: 907265 - RNA, 22 nt, Human
ugagaaaaguacauggagaagc

SEQ ID NO: 907266 - RNA, 22 nt, Human
ugagaaccaugaaaagcuguca

SEQ ID NO: 907267 - RNA, 22 nt, Human
ccagagugacgugaagugugaa

SEQ ID NO: 907268 - RNA, 22 nt, Human
uuggaaguaaugaagagguggg

SEQ ID NO: 907269 - RNA, 22 nt, Human
guggccuggauagacuccaucu

SEQ ID NO: 907270 - RNA, 22 nt, Human
ugcaguguggccaugucagcua

SEQ ID NO: 907271 - RNA, 22 nt, Human
ccuuccuugagaagcaauuccu

SEQ ID NO: 907272 - RNA, 22 nt, Human
guucacagcugggacaagacug

SEQ ID NO: 907273 - RNA, 22 nt, Human
ccugugucaccggaacggagga

SEQ ID NO: 907274 - RNA, 22 nt, Human
uaccuagacaugaacacagaug

SEQ ID NO: 907275 - RNA, 22 nt, Human
cugccucuccccagaguggccc

SEQ ID NO: 907276 - RNA, 22 nt, Human
ucuccaggugcuaagugugccu

SEQ ID NO: 907277 - RNA, 20 nt, Human
cuuugcaggagaacagagaa

SEQ ID NO: 907278 - RNA, 22 nt, Human
ggagcugcauuuagggagccuu

SEQ ID NO: 907279 - RNA, 22 nt, Human
agccucugggggagcugggagc

SEQ ID NO: 907280 - RNA, 23 nt, Human
uggauaaagcugugcugcauagg

SEQ ID NO: 907281 - RNA, 22 nt, Human
uggcuuucucccccagcuucuc

SEQ ID NO: 907282 - RNA, 22 nt, Human
cuacaagaggaauggaggucug

SEQ ID NO: 907283 - RNA, 22 nt, Human
ugauuuccacgugcacccaggu

SEQ ID NO: 907284 - RNA, 23 nt, Human
aaugggugcaacuauccaugaca

SEQ ID NO: 907285 - RNA, 22 nt, Human
aucagcugcuacauuggccucu

SEQ ID NO: 907286 - RNA, 22 nt, Human
cgcagcugaccuuuuacaaaac

SEQ ID NO: 907287 - RNA, 22 nt, Human
uauacaaguaaugcugaaugau

SEQ ID NO: 907288 - RNA, 22 nt, Human
aaggguugaagauaaauaaggu

SEQ ID NO: 907289 - RNA, 22 nt, Human
aagaugcuuauugcuccugcag

SEQ ID NO: 907290 - RNA, 22 nt, Human
gcugcucuugaggggcucacug

SEQ ID NO: 907291 - RNA, 22 nt, Human
acacagaugcauuacacaucua

SEQ ID NO: 907292 - RNA, 22 nt, Human
ugccaguguggaacuaggaaga

SEQ ID NO: 907293 - RNA, 22 nt, Human
cuggaaaguucaagauaaagcu

SEQ ID NO: 907294 - RNA, 22 nt, Human
aagucuguuugagugucacacu

SEQ ID NO: 907295 - RNA, 22 nt, Human
gcacccagcccagggcgugaug

SEQ ID NO: 907296 - RNA, 22 nt, Human
aggcuagucaagucaagcagug

SEQ ID NO: 907297 - RNA, 22 nt, Human
aggagguggcugaacuugaggg

SEQ ID NO: 907298 - RNA, 22 nt, Human
gcaguaggagaagaggaugcuu

SEQ ID NO: 907299 - RNA, 22 nt, Human
cacauuuaagugcuuguucaga

SEQ ID NO: 907300 - RNA, 22 nt, Human
augaaacaaggguauuuucucu

SEQ ID NO: 907301 - RNA, 22 nt, Human
gaacaguacaguugaguaguug

SEQ ID NO: 907302 - RNA, 22 nt, Human
gacagggacgaggcuucaggca

SEQ ID NO: 907303 - RNA, 22 nt, Human
gccugccagccacaguggcagc

SEQ ID NO: 907304 - RNA, 22 nt, Human
ucuauuagauuauucucaagga

SEQ ID NO: 907305 - RNA, 22 nt, Human
ugaucugguccuacugugggca

SEQ ID NO: 907306 - RNA, 22 nt, Human
gcuccuggagagauugagaaag

SEQ ID NO: 907307 - RNA, 22 nt, Human
aggcagugaugagucaugaaua

SEQ ID NO: 907308 - RNA, 22 nt, Human
cuucaacaguuuuagaacacug

SEQ ID NO: 907309 - RNA, 22 nt, Human
uguccuuuguguaucuauagua

SEQ ID NO: 907310 - RNA, 22 nt, Human
acugaagcugggcgaugccucc

SEQ ID NO: 907311 - RNA, 22 nt, Human
agcuucuugaccaagccuguaa

SEQ ID NO: 907312 - RNA, 22 nt, Human
ucaggagggcuaagacuguagc

SEQ ID NO: 907313 - RNA, 22 nt, Human
agcacaggaacauggagauggg

SEQ ID NO: 907314 - RNA, 23 nt, Human
gggagaugggaaaugaaggcucu

SEQ ID NO: 907315 - RNA, 22 nt, Human
agaaaugaagcaggaguuauua

SEQ ID NO: 907316 - RNA, 22 nt, Human
ucugcuggccuuagcaggucua

SEQ ID NO: 907317 - RNA, 22 nt, Human
gggcgcagccaauccuggcccu

SEQ ID NO: 907318 - RNA, 22 nt, Human
aagugucuuuauauuugagaaa

SEQ ID NO: 907319 - RNA, 22 nt, Human
gugcugcucaagggacaggaca

SEQ ID NO: 907320 - RNA, 18 nt, Human
uuccaguagcuguaucac

SEQ ID NO: 907321 - RNA, 22 nt, Human
gcagcugggucugugugggcug

SEQ ID NO: 907322 - RNA, 22 nt, Human
cagcauccguucucaggacuga

SEQ ID NO: 907323 - RNA, 22 nt, Human
cuugccucccucagcucacagc

SEQ ID NO: 907324 - RNA, 22 nt, Human
ucagcccugggacccagggaug

SEQ ID NO: 907325 - RNA, 22 nt, Human
acagugaaaagaauauuagaau

SEQ ID NO: 907326 - RNA, 22 nt, Human
acaaauuugaauccugacuucu

SEQ ID NO: 907327 - RNA, 22 nt, Human
ucucuguguugcaggaaaaucu

SEQ ID NO: 907328 - RNA, 22 nt, Human
aagcagaggguauggccagguu

SEQ ID NO: 907329 - RNA, 22 nt, Human
uuacagaacugcccuaguuggc

SEQ ID NO: 907330 - RNA, 22 nt, Human
cacauuuagguuccuauagcca

SEQ ID NO: 907331 - RNA, 22 nt, Human
ucugaaauggggcugaagcacu

SEQ ID NO: 907332 - RNA, 20 nt, Human
ucacuucuuccuuuugucua

SEQ ID NO: 907333 - RNA, 22 nt, Human
uauacagauggaaagauacaca

SEQ ID NO: 907334 - RNA, 22 nt, Human
auuuggaaacaugcugaccaug

SEQ ID NO: 907335 - RNA, 22 nt, Human
cuacacaguucugccuaauggc

SEQ ID NO: 907336 - RNA, 22 nt, Human
acagccuggccugaguuaaggc

SEQ ID NO: 907337 - RNA, 22 nt, Human
ggugcagccuccccagugacag

SEQ ID NO: 907338 - RNA, 22 nt, Human
ucaguguccggagccugagugc

SEQ ID NO: 907339 - RNA, 22 nt, Human
uugauguacagaauuguucaca

SEQ ID NO: 907340 - RNA, 22 nt, Human
gcugcugucuggucugagggcu

SEQ ID NO: 907341 - RNA, 22 nt, Human
cccugagaugccucacccuagu

SEQ ID NO: 907342 - RNA, 22 nt, Human
auccaggguguggagagagcuc

SEQ ID NO: 907343 - RNA, 20 nt, Human
gccucagccaacccaugggg

SEQ ID NO: 907344 - RNA, 22 nt, Human
gaggcacaccagggagucuugu

SEQ ID NO: 907345 - RNA, 22 nt, Human
cuguggcuuugcagggcuuguu

SEQ ID NO: 907346 - RNA, 22 nt, Human
caggaaaugcguaguugaacuu

SEQ ID NO: 907347 - RNA, 22 nt, Human
cugcccugagucaugccagaug

SEQ ID NO: 907348 - RNA, 22 nt, Human
acagaggguuucuaaggauuug

SEQ ID NO: 907349 - RNA, 20 nt, Human
ugcugcugccuccgccucug

SEQ ID NO: 907350 - RNA, 22 nt, Human
caggggcaggugugagaucauc

SEQ ID NO: 907351 - RNA, 22 nt, Human
aucucaggaggacccugaugcu

SEQ ID NO: 907352 - RNA, 22 nt, Human
uuaggaagcacacaguaaauau

SEQ ID NO: 907353 - RNA, 22 nt, Human
agccugcuggaccaagcucaug

SEQ ID NO: 907354 - RNA, 22 nt, Human
agggcucuguccccagaggccc

SEQ ID NO: 907355 - RNA, 22 nt, Human
gauucuugggccuucugaaguu

SEQ ID NO: 907356 - RNA, 22 nt, Human
gugcaucaggaucugaccagau

SEQ ID NO: 907357 - RNA, 22 nt, Human
aagucagcacuccaggaagcca

SEQ ID NO: 907358 - RNA, 22 nt, Human
ugagcaggacucacugcagccu

SEQ ID NO: 907359 - RNA, 22 nt, Human
cccugagcauucaugugagcuu

SEQ ID NO: 907360 - RNA, 22 nt, Human
cugccaggugccagggcgcggc

SEQ ID NO: 907361 - RNA, 22 nt, Human
cccuggaggcggagcuugcagu

SEQ ID NO: 907362 - RNA, 22 nt, Human
aaauccaugguaaucuguuaca

SEQ ID NO: 907363 - RNA, 22 nt, Human
ugagccagucucucagaacccu

SEQ ID NO: 907364 - RNA, 22 nt, Human
aagguacaaaguauuauuuaaa

SEQ ID NO: 907365 - RNA, 19 nt, Human
aguggcugggcagaagcaa

SEQ ID NO: 907366 - RNA, 22 nt, Human
guuaaaugcacuauugaaagcu

SEQ ID NO: 907367 - RNA, 22 nt, Human
ucugaggccugaagcagcagag

SEQ ID NO: 907368 - RNA, 22 nt, Human
uacacauguccaaggugucacc

SEQ ID NO: 907369 - RNA, 22 nt, Human
uucuauguguugacaagccuga

SEQ ID NO: 907370 - RNA, 22 nt, Human
acuuucauuuguaauaaacuuc

SEQ ID NO: 907371 - RNA, 22 nt, Human
ggcucgagcagcuguguaggau

SEQ ID NO: 907372 - RNA, 19 nt, Human
aucagugcaugagugcugu

SEQ ID NO: 907373 - RNA, 21 nt, Human
cuuuuacauucagucaugaug

SEQ ID NO: 907374 - RNA, 22 nt, Human
aaauuaucaugggggagaaaca

SEQ ID NO: 907375 - RNA, 22 nt, Human
uucagugugugauaccugcugu

SEQ ID NO: 907376 - RNA, 21 nt, Human
ugggaugggucugggaccagc

SEQ ID NO: 907377 - RNA, 22 nt, Human
cucuagcaggugccuuguaaca

SEQ ID NO: 907378 - RNA, 22 nt, Human
ucugugcaggauuugaggaacc

SEQ ID NO: 907379 - RNA, 22 nt, Human
uucuucagauccuacaagucug

SEQ ID NO: 907380 - RNA, 22 nt, Human
ugaggucugcucaagucccugg

SEQ ID NO: 907381 - RNA, 22 nt, Human
gggcccaggccuccuuccuucc

SEQ ID NO: 907382 - RNA, 22 nt, Human
auaucauucugauguauaucuu

SEQ ID NO: 907383 - RNA, 22 nt, Human
aauggcuucugaagcacacuuu

SEQ ID NO: 907384 - RNA, 22 nt, Human
auuaaggagguaaacuaugguu

SEQ ID NO: 907385 - RNA, 21 nt, Human
agaaaaaccagcauguuuuca

SEQ ID NO: 907386 - RNA, 22 nt, Human
gaauacauuugccgugguucuc

SEQ ID NO: 907387 - RNA, 22 nt, Human
gagucccaugaugauagccaca

SEQ ID NO: 907388 - RNA, 22 nt, Human
cacuguaauagcauuauaagug

SEQ ID NO: 907389 - RNA, 22 nt, Human
cagcaguguacaaggugucaga

SEQ ID NO: 907390 - RNA, 20 nt, Human
cagugaggaggugcuggggg

SEQ ID NO: 907391 - RNA, 22 nt, Human
aguggccaauaugucaugcucu

SEQ ID NO: 907392 - RNA, 22 nt, Human
gauguaaacugggacuuccuag

SEQ ID NO: 907393 - RNA, 22 nt, Human
aggagcugucagagugccagag

SEQ ID NO: 907394 - RNA, 22 nt, Human
acauuugguugagcuguuguca

SEQ ID NO: 907395 - RNA, 22 nt, Human
ggcagcagaacuggcccuguau

SEQ ID NO: 907396 - RNA, 22 nt, Human
gcccuguuuugaaacuugcaua

SEQ ID NO: 907397 - RNA, 22 nt, Human
cuuugaagaucacauguugcuc

SEQ ID NO: 907398 - RNA, 22 nt, Human
uuucacauguggaaugccaggu

SEQ ID NO: 907399 - RNA, 22 nt, Human
aacagguugaggucaaaugcaa

SEQ ID NO: 907400 - RNA, 22 nt, Human
ggcagccagagggcagcuggau

SEQ ID NO: 907401 - RNA, 22 nt, Human
uuguugucauuguagaggauuu

SEQ ID NO: 907402 - RNA, 22 nt, Human
gggggacuaacuggauccugga

SEQ ID NO: 907403 - RNA, 22 nt, Human
acagaauuaucaggaaauguua

SEQ ID NO: 907404 - RNA, 18 nt, Human
aaggacacagucccugcu

SEQ ID NO: 907405 - RNA, 22 nt, Human
uaaaugauuuauguaugugaaa

SEQ ID NO: 907406 - RNA, 22 nt, Human
ucugucucaaguucuugcacuc

SEQ ID NO: 907407 - RNA, 22 nt, Human
ggaugcuggggaccaaucucug

SEQ ID NO: 907408 - RNA, 22 nt, Human
gggcagcaugaggacccucauc

SEQ ID NO: 907409 - RNA, 22 nt, Human
uuauagaucuaaaugugaaggg

SEQ ID NO: 907410 - RNA, 22 nt, Human
acacauuucucuuuuuguaagu

SEQ ID NO: 907411 - RNA, 22 nt, Human
gauuucaaggaguuuucacagu

SEQ ID NO: 907412 - RNA, 21 nt, Human
accuuuggguguuuauaauag

SEQ ID NO: 907413 - RNA, 22 nt, Human
ucucuggagcugcagauccagg

SEQ ID NO: 907414 - RNA, 22 nt, Human
gcauccucugagagcucuagau

SEQ ID NO: 907415 - RNA, 22 nt, Human
agaaugugugcaagcaagugug

SEQ ID NO: 907416 - RNA, 22 nt, Human
agcccagcggagcgggcccggg

SEQ ID NO: 907417 - RNA, 22 nt, Human
aacuggaaccuuuuauucaguc

SEQ ID NO: 907418 - RNA, 22 nt, Human
cccaggaacuccagagcuccuc

SEQ ID NO: 907419 - RNA, 22 nt, Human
uauuugcucaacccugccucca

SEQ ID NO: 907420 - RNA, 22 nt, Human
cuguauguagaauagcugacaa

SEQ ID NO: 907421 - RNA, 22 nt, Human
gguggccauucuaccgccuucu

SEQ ID NO: 907422 - RNA, 22 nt, Human
gaauuucagaucagagaccauu

SEQ ID NO: 907423 - RNA, 22 nt, Human
auacaauccagccauugccaca

SEQ ID NO: 907424 - RNA, 22 nt, Human
ccugaccuccaaguggcucugg

SEQ ID NO: 907425 - RNA, 18 nt, Human
uguagagccagguuugcc

SEQ ID NO: 907426 - RNA, 16 nt, Human
gaggcuggcagauguc

SEQ ID NO: 907427 - RNA, 22 nt, Human
acacauuucucccagucuccau

SEQ ID NO: 907428 - RNA, 22 nt, Human
aaggauuuguccaaagucacac

SEQ ID NO: 907429 - RNA, 22 nt, Human
ucuuccagaaguguuuucagaa

SEQ ID NO: 907430 - RNA, 22 nt, Human
ugugugucuuugccuccucuca

SEQ ID NO: 907431 - RNA, 20 nt, Human
agcagcuguguuuucauccu

SEQ ID NO: 907432 - RNA, 22 nt, Human
cacagugaguauuuaguaccua

SEQ ID NO: 907433 - RNA, 22 nt, Human
aaaaguguucaggaagaauaau

SEQ ID NO: 907434 - RNA, 22 nt, Human
uagaaacauguucuguucuguu

SEQ ID NO: 907435 - RNA, 22 nt, Human
uucuccucacugcagccuuuca

SEQ ID NO: 907436 - RNA, 22 nt, Human
ugaggguggcacaggcacaaag

SEQ ID NO: 907437 - RNA, 22 nt, Human
ugccugggaucugugcccuuug

SEQ ID NO: 907438 - RNA, 22 nt, Human
gcaauaaauaacauggaagaca

SEQ ID NO: 907439 - RNA, 22 nt, Human
aacaauuagacugacgguauua

SEQ ID NO: 907440 - RNA, 22 nt, Human
gaaacacugguaaagacugccg

SEQ ID NO: 907441 - RNA, 22 nt, Human
acaguguggaaagucaacuuga

SEQ ID NO: 907442 - RNA, 22 nt, Human
cuguaaaaugaaccuagucauc

SEQ ID NO: 907443 - RNA, 22 nt, Human
uacuaaauaguuuaauuccuca

SEQ ID NO: 907444 - RNA, 22 nt, Human
uagcugugugaugggaaaccuu

SEQ ID NO: 907445 - RNA, 22 nt, Human
agauacaaaagauaagauuuag

SEQ ID NO: 907446 - RNA, 22 nt, Human
ggcagugcaaggcagccuggau

SEQ ID NO: 907447 - RNA, 22 nt, Human
uaucaaaggcuaugugauuuuu

SEQ ID NO: 907448 - RNA, 22 nt, Human
cuuauucagaaggagaaaugga

SEQ ID NO: 907449 - RNA, 22 nt, Human
accuuuuacggugugacuagca

SEQ ID NO: 907450 - RNA, 22 nt, Human
caaggaaaacagaugaucaaca

SEQ ID NO: 907451 - RNA, 22 nt, Human
uccagacugcccugcacaugug

SEQ ID NO: 907452 - RNA, 22 nt, Human
caccauguauucaguuuggcac

SEQ ID NO: 907453 - RNA, 22 nt, Human
caguggccuuuccugcugcuca

SEQ ID NO: 907454 - RNA, 22 nt, Human
uuucuuuccagagugauuggca

SEQ ID NO: 907455 - RNA, 22 nt, Human
uuuauucaucaucuguucauau

SEQ ID NO: 907456 - RNA, 22 nt, Human
cucaggcugcccugacagcccc

SEQ ID NO: 907457 - RNA, 22 nt, Human
auacaucaccuauauauucaca

SEQ ID NO: 907458 - RNA, 19 nt, Human
gagguggguccccgcagcc

SEQ ID NO: 907459 - RNA, 20 nt, Human
uuuccuuucauuuuaguacc

SEQ ID NO: 907460 - RNA, 22 nt, Human
guaccaugggaucuagggccca

SEQ ID NO: 907461 - RNA, 22 nt, Human
cagagggugugaaggggaugaa

SEQ ID NO: 907462 - RNA, 22 nt, Human
aaagucaagguuuagacuagag

SEQ ID NO: 907463 - RNA, 22 nt, Human
uaacuucucugcuaucauagga

SEQ ID NO: 907464 - RNA, 22 nt, Human
guuaauuugcagcuuucgagcu

SEQ ID NO: 907465 - RNA, 22 nt, Human
ucacauuucuuuauguagucuu

SEQ ID NO: 907466 - RNA, 22 nt, Human
uagcugucagcugcaggcaggc

SEQ ID NO: 907467 - RNA, 22 nt, Human
ucccagaagagaugccacuuga

SEQ ID NO: 907468 - RNA, 22 nt, Human
uguuuuuacugugauccagaaa

SEQ ID NO: 907469 - RNA, 22 nt, Human
uccugcaggccagaggggugag

SEQ ID NO: 907470 - RNA, 22 nt, Human
cuggagaagagguaguauguag

SEQ ID NO: 907471 - RNA, 20 nt, Human
guauuacaggcuuagaacca

SEQ ID NO: 907472 - RNA, 17 nt, Human
agaugcuggccacaugu

SEQ ID NO: 907473 - RNA, 22 nt, Human
gagcucagaggcgucuuugucc

SEQ ID NO: 907474 - RNA, 22 nt, Human
gacagacaggugugguaggcac

SEQ ID NO: 907475 - RNA, 22 nt, Human
ugaaguuucuugaaucuuggag

SEQ ID NO: 907476 - RNA, 22 nt, Human
aaauuuaaggaggugcucacuu

SEQ ID NO: 907477 - RNA, 22 nt, Human
cuaaaugugacucaccaucuca

SEQ ID NO: 907478 - RNA, 22 nt, Human
cuggaaucuuuggagaaugugg

SEQ ID NO: 907479 - RNA, 22 nt, Human
auuacaaucgagagaaacaaau

SEQ ID NO: 907480 - RNA, 22 nt, Human
gcaggcaguuauuuaguagaau

SEQ ID NO: 907481 - RNA, 19 nt, Human
agcugugcagacacuucgc

SEQ ID NO: 907482 - RNA, 22 nt, Human
agaggacaaaaugagaagugcu

SEQ ID NO: 907483 - RNA, 22 nt, Human
uauccaaacauauagucucucu

SEQ ID NO: 907484 - RNA, 22 nt, Human
aaacagucgucuuaauaguauu

SEQ ID NO: 907485 - RNA, 22 nt, Human
ccaccugcugguuuugcucucc

SEQ ID NO: 907486 - RNA, 22 nt, Human
ccugggagccgacugacugugc

SEQ ID NO: 907487 - RNA, 22 nt, Human
aaauauuauugcuuaaggggag

SEQ ID NO: 907488 - RNA, 22 nt, Human
gaagccacagagauuguggggg

SEQ ID NO: 907489 - RNA, 22 nt, Human
uaaaugaguaauauagcuguuu

SEQ ID NO: 907490 - RNA, 22 nt, Human
gacugagaaucauagaaggcaa

SEQ ID NO: 907491 - RNA, 22 nt, Human
aauuuccagaucagaugacuca

SEQ ID NO: 907492 - RNA, 22 nt, Human
agccaggauuggcugagccuua

SEQ ID NO: 907493 - RNA, 22 nt, Human
agcuggccucacugcagaaugc

SEQ ID NO: 907494 - RNA, 22 nt, Human
aaaaggaggacaugguuacaga

SEQ ID NO: 907495 - RNA, 22 nt, Human
agcugccaucagccuuuggaug

SEQ ID NO: 907496 - RNA, 22 nt, Human
uccagagacuugcaugugcuug

SEQ ID NO: 907497 - RNA, 22 nt, Human
acacugaauauacaaugaauau

SEQ ID NO: 907498 - RNA, 22 nt, Human
agggccugucagcgguguccug

SEQ ID NO: 907499 - RNA, 22 nt, Human
uccuucagggggccgccugcac

SEQ ID NO: 907500 - RNA, 22 nt, Human
auguuuguugaucauuuaugaa

SEQ ID NO: 907501 - RNA, 22 nt, Human
cugccaggacugacgucuucag

SEQ ID NO: 907502 - RNA, 22 nt, Human
aaaagccaugcauaccuaagag

SEQ ID NO: 907503 - RNA, 22 nt, Human
ccuguguuuagauaugaugcug

SEQ ID NO: 907504 - RNA, 22 nt, Human
gccuaggguuggccugagaauc

SEQ ID NO: 907505 - RNA, 22 nt, Human
gagaggcuccgccacugcucag

SEQ ID NO: 907506 - RNA, 22 nt, Human
uuuucaagggcagggaaaucau

SEQ ID NO: 907507 - RNA, 22 nt, Human
auuauuauaaagugcaugaccu

SEQ ID NO: 907508 - RNA, 23 nt, Human
agugccauugacccuaugucuau

SEQ ID NO: 907509 - RNA, 22 nt, Human
ccacagaguuacaaaacaguca

SEQ ID NO: 907510 - RNA, 22 nt, Human
agugcugucuccuucccccggg

SEQ ID NO: 907511 - RNA, 22 nt, Human
agaggaaauggauaaaggguga

SEQ ID NO: 907512 - RNA, 22 nt, Human
ucuuugugccaugcagugaggc

SEQ ID NO: 907513 - RNA, 22 nt, Human
agcaagcugucaagagagcuga

SEQ ID NO: 907514 - RNA, 22 nt, Human
agggaggaaggaacuccuucua

SEQ ID NO: 907515 - RNA, 22 nt, Human
acagcugcuuucucuuacuaug

SEQ ID NO: 907516 - RNA, 22 nt, Human
agcaggaguuugaugcuuuuau

SEQ ID NO: 907517 - RNA, 22 nt, Human
gaaaaugugccuuuggguauug

SEQ ID NO: 907518 - RNA, 22 nt, Human
uuauagaugccuugaguaaaug

SEQ ID NO: 907519 - RNA, 22 nt, Human
accugcaggggugcucucuggg

SEQ ID NO: 907520 - RNA, 22 nt, Human
ucccagaggcuccagucucuau

SEQ ID NO: 907521 - RNA, 22 nt, Human
cugacacacugagcauuugaua

SEQ ID NO: 907522 - RNA, 22 nt, Human
ucuguacaguaccagauaguaa

SEQ ID NO: 907523 - RNA, 22 nt, Human
uaauaauuaguuauugaucgug

SEQ ID NO: 907524 - RNA, 19 nt, Human
gagguuucugaagugggcu

SEQ ID NO: 907525 - RNA, 22 nt, Human
uagaacuucuuacagcuaaguu

SEQ ID NO: 907526 - RNA, 22 nt, Human
ugcacacauguuuacaagcauc

SEQ ID NO: 907527 - RNA, 22 nt, Human
aaagucaucuguccuaggcucu

SEQ ID NO: 907528 - RNA, 23 nt, Human
ucuucaugcccaggccuuggugc

SEQ ID NO: 907529 - RNA, 22 nt, Human
uguuuuaucaagauggcauguc

SEQ ID NO: 907530 - RNA, 22 nt, Human
acauuucuggaguuucucaaca

SEQ ID NO: 907531 - RNA, 22 nt, Human
caggaagccacaggacagguag

SEQ ID NO: 907532 - RNA, 22 nt, Human
cagcuucuaccaucaggaaauu

SEQ ID NO: 907533 - RNA, 22 nt, Human
auuguuaauguugcacuaaggu

SEQ ID NO: 907534 - RNA, 22 nt, Human
ugucauguuuuccuacaaggua

SEQ ID NO: 907535 - RNA, 22 nt, Human
uguuccuugaauauaucagacg

SEQ ID NO: 907536 - RNA, 18 nt, Human
augugagagaaucuucuu

SEQ ID NO: 907537 - RNA, 22 nt, Human
aagccacugagauuucacugca

SEQ ID NO: 907538 - RNA, 22 nt, Human
caguaauagguaacauugcccu

SEQ ID NO: 907539 - RNA, 21 nt, Human
uauuugcugccaucuuugagg

SEQ ID NO: 907540 - RNA, 22 nt, Human
aguuucacagucugucauuguu

SEQ ID NO: 907541 - RNA, 22 nt, Human
auuuguuuaucgucgauuguag

SEQ ID NO: 907542 - RNA, 22 nt, Human
aggagguguugauagaagguuu

SEQ ID NO: 907543 - RNA, 22 nt, Human
guauuagaagaaauuauaggua

SEQ ID NO: 907544 - RNA, 22 nt, Human
aagagcaguguuuuacucagcu

SEQ ID NO: 907545 - RNA, 22 nt, Human
caagucaacucaaauuguuauc

SEQ ID NO: 907546 - RNA, 22 nt, Human
uagcaaaguuuuguggugauua

SEQ ID NO: 907547 - RNA, 22 nt, Human
uagucagggaugcaauuaugug

SEQ ID NO: 907548 - RNA, 22 nt, Human
augguaacaguugaguagaaac

SEQ ID NO: 907549 - RNA, 22 nt, Human
cugggcuuugaagccaggcugc

SEQ ID NO: 907550 - RNA, 23 nt, Human
gugauucucucugugugggcagg

SEQ ID NO: 907551 - RNA, 22 nt, Human
uguuggagcccgagucagggag

SEQ ID NO: 907552 - RNA, 22 nt, Human
cagcuccaucuugcuuauacca

SEQ ID NO: 907553 - RNA, 22 nt, Human
ccagucuccuaagagccccuga

SEQ ID NO: 907554 - RNA, 22 nt, Human
acaugaacacugcuugccacau

SEQ ID NO: 907555 - RNA, 22 nt, Human
gggcuggaggagauccagaggc

SEQ ID NO: 907556 - RNA, 22 nt, Human
guuuccauauuuuuagugccaa

SEQ ID NO: 907557 - RNA, 22 nt, Human
uagagcuugauuggauucaggg

SEQ ID NO: 907558 - RNA, 22 nt, Human
cauccaagaaaauuuucucucu

SEQ ID NO: 907559 - RNA, 22 nt, Human
ggugacgaauccauagcaucga

SEQ ID NO: 907560 - RNA, 22 nt, Human
ucaaguuaccuggucauuacua

SEQ ID NO: 907561 - RNA, 22 nt, Human
uggggugugagaaguagaggga

SEQ ID NO: 907562 - RNA, 22 nt, Human
acuugucuaugguuacauccua

SEQ ID NO: 907563 - RNA, 22 nt, Human
auuacaaguagacuaacuuuca

SEQ ID NO: 907564 - RNA, 22 nt, Human
acaaaugauuaucacagaggag

SEQ ID NO: 907565 - RNA, 22 nt, Human
cuguggcugcagaccuuaaaca

SEQ ID NO: 907566 - RNA, 22 nt, Human
uucugcaugaaaagaacugaac

SEQ ID NO: 907567 - RNA, 22 nt, Human
acauuucugucuuagggacugu

SEQ ID NO: 907568 - RNA, 22 nt, Human
uuccugguaaauuauguccagg

SEQ ID NO: 907569 - RNA, 22 nt, Human
gcuggcugggucccugagaggc

SEQ ID NO: 907570 - RNA, 22 nt, Human
auacaucucuuugaagugcuuu

SEQ ID NO: 907571 - RNA, 22 nt, Human
gugauucugccuggaagguccu

SEQ ID NO: 907572 - RNA, 22 nt, Human
ggcacacauggugguuggugaa

SEQ ID NO: 907573 - RNA, 22 nt, Human
cugcaguuuguaaacauuuuaa

SEQ ID NO: 907574 - RNA, 22 nt, Human
gagcacagugcaguuucugcua

SEQ ID NO: 907575 - RNA, 20 nt, Human
uggaggccaggauacuuugu

SEQ ID NO: 907576 - RNA, 22 nt, Human
ucaguguagcagacuuguagcc

SEQ ID NO: 907577 - RNA, 21 nt, Human
augccaagucuuaaugagggc

SEQ ID NO: 907578 - RNA, 22 nt, Human
agagacuguguccaucgugccu

SEQ ID NO: 907579 - RNA, 22 nt, Human
gaggucugccuucaggagaguu

SEQ ID NO: 907580 - RNA, 21 nt, Human
ccuucuccauuacaguaagcu

SEQ ID NO: 907581 - RNA, 22 nt, Human
gcagcugccaguccccuuccag

SEQ ID NO: 907582 - RNA, 22 nt, Human
caagugacugugcuggcaacau

SEQ ID NO: 907583 - RNA, 22 nt, Human
uccgggagcugaacgucuugcg

SEQ ID NO: 907584 - RNA, 22 nt, Human
uccaaauauaggaugugauaua

SEQ ID NO: 907585 - RNA, 22 nt, Human
uauuacagaaucaggcauaacu

SEQ ID NO: 907586 - RNA, 22 nt, Human
uacugagcugguccacugaggu

SEQ ID NO: 907587 - RNA, 22 nt, Human
acauucuuccagcuggcuguug

SEQ ID NO: 907588 - RNA, 22 nt, Human
aacaggcaauuuaggacucuuu

SEQ ID NO: 907589 - RNA, 22 nt, Human
uacuuagacucuaucuagagau

SEQ ID NO: 907590 - RNA, 22 nt, Human
uuugugaauagguuggcuucca

SEQ ID NO: 907591 - RNA, 22 nt, Human
uuguauucuuuaugacuucccu

SEQ ID NO: 907592 - RNA, 19 nt, Human
ccuggcucugagcccagcc

SEQ ID NO: 907593 - RNA, 22 nt, Human
ggcaggcacauuugggggccgu

SEQ ID NO: 907594 - RNA, 22 nt, Human
gccuguguuuuuaacucuagga

SEQ ID NO: 907595 - RNA, 22 nt, Human
uggcagugaaagacaauugggc

SEQ ID NO: 907596 - RNA, 19 nt, Human
uuuaugucauugaggucau

SEQ ID NO: 907597 - RNA, 22 nt, Human
gagggaggcaucaugaauccag

SEQ ID NO: 907598 - RNA, 22 nt, Human
uaagaaguguugccuaaugcaa

SEQ ID NO: 907599 - RNA, 22 nt, Human
uuucuacaugucaguaacugau

SEQ ID NO: 907600 - RNA, 22 nt, Human
uaaaaggcacuuggaugcugag

SEQ ID NO: 907601 - RNA, 20 nt, Human
cagggccuaugauugagcuu

SEQ ID NO: 907602 - RNA, 22 nt, Human
uuccugagcuuuuaaccuaguc

SEQ ID NO: 907603 - RNA, 22 nt, Human
aucugucuuccaccacacaucc

SEQ ID NO: 907604 - RNA, 22 nt, Human
cugcugugcaacauugcaccua

SEQ ID NO: 907605 - RNA, 22 nt, Human
gagugcguguuuggggaugugg

SEQ ID NO: 907606 - RNA, 22 nt, Human
augucugucuuuguacuccaca

SEQ ID NO: 907607 - RNA, 22 nt, Human
ugucucaucucuuaaccccacu

SEQ ID NO: 907608 - RNA, 22 nt, Human
ugucauguaaccuuucugagcc

SEQ ID NO: 907609 - RNA, 22 nt, Human
ccagggcauguccaagacuuag

SEQ ID NO: 907610 - RNA, 22 nt, Human
ccacaggcugcugcaggucccg

SEQ ID NO: 907611 - RNA, 18 nt, Human
gugcugugggcaguggcc

SEQ ID NO: 907612 - RNA, 22 nt, Human
gagauuuagcugcuuaacuccu

SEQ ID NO: 907613 - RNA, 22 nt, Human
gagcuguggucaacaggaaauu

SEQ ID NO: 907614 - RNA, 21 nt, Human
agagucugcauuucugacaag

SEQ ID NO: 907615 - RNA, 22 nt, Human
aguguccccuccaagggccugg

SEQ ID NO: 907616 - RNA, 21 nt, Human
aguuuagaccaagccuuucca

SEQ ID NO: 907617 - RNA, 23 nt, Human
auaucacacccaguacagucucc

SEQ ID NO: 907618 - RNA, 22 nt, Human
ccugaggacacacgcugcagga

SEQ ID NO: 907619 - RNA, 22 nt, Human
aggucacguccugugaugucau

SEQ ID NO: 907620 - RNA, 22 nt, Human
gaggggcuugaggcccugaugg

SEQ ID NO: 907621 - RNA, 22 nt, Human
gcacagaggaugaggcagcucu

SEQ ID NO: 907622 - RNA, 22 nt, Human
caagaaauucuguucagauagc

SEQ ID NO: 907623 - RNA, 22 nt, Human
agcccagcaguaagauuagaga

SEQ ID NO: 907624 - RNA, 22 nt, Human
agcugggucuugggccaggaga

SEQ ID NO: 907625 - RNA, 22 nt, Human
uuacacaaaaauaagauauggc

SEQ ID NO: 907626 - RNA, 22 nt, Human
uaagguuugaagaagacugagc

SEQ ID NO: 907627 - RNA, 22 nt, Human
augcacauaggccaaaucauuu

SEQ ID NO: 907628 - RNA, 22 nt, Human
aauacaguaauuuugaugaguu

SEQ ID NO: 907629 - RNA, 22 nt, Human
gccuggucucugggguugggua

SEQ ID NO: 907630 - RNA, 22 nt, Human
auguuucucacuguuucucuau

SEQ ID NO: 907631 - RNA, 22 nt, Human
augcacauguaucuauauacaa

SEQ ID NO: 907632 - RNA, 22 nt, Human
acuucucugcuaccugcaaaga

SEQ ID NO: 907633 - RNA, 22 nt, Human
ggcccagaauacuuuguaaaau

SEQ ID NO: 907634 - RNA, 22 nt, Human
cauguggcuuuggcaugugccc

SEQ ID NO: 907635 - RNA, 22 nt, Human
uucacagguucuuuuuaaggcu

SEQ ID NO: 907636 - RNA, 22 nt, Human
ggugaggaaagauggugacagu

SEQ ID NO: 907637 - RNA, 22 nt, Human
agccugggggcgcagaaaccgg

SEQ ID NO: 907638 - RNA, 22 nt, Human
uuacacaguugguaggggcaga

SEQ ID NO: 907639 - RNA, 22 nt, Human
ugcaggagacauaauagggacu

SEQ ID NO: 907640 - RNA, 22 nt, Human
uguaauauauauaacugugugc

SEQ ID NO: 907641 - RNA, 22 nt, Human
gagaaagaugaagaguggcguu

SEQ ID NO: 907642 - RNA, 22 nt, Human
uccuagggauucaacacugaac

SEQ ID NO: 907643 - RNA, 22 nt, Human
agaggcucuuugagcugggaga

SEQ ID NO: 907644 - RNA, 22 nt, Human
agaauaaauguuggacuuagga

SEQ ID NO: 907645 - RNA, 22 nt, Human
uguucacacacggaggccacag

SEQ ID NO: 907646 - RNA, 22 nt, Human
gucuccuguccugcaggaugga

SEQ ID NO: 907647 - RNA, 22 nt, Human
acacauaugucauugaaaaauc

SEQ ID NO: 907648 - RNA, 22 nt, Human
gggaacagcauaucugaagggu

SEQ ID NO: 907649 - RNA, 22 nt, Human
augcuguguggucaaguuaauu

SEQ ID NO: 907650 - RNA, 22 nt, Human
auggcagcggagcuggaaauga

SEQ ID NO: 907651 - RNA, 18 nt, Human
guaagcaaagacuuuaua

SEQ ID NO: 907652 - RNA, 17 nt, Human
agaguuuuaagaaauuu

SEQ ID NO: 907653 - RNA, 17 nt, Human
cucuccuuccucugagg

SEQ ID NO: 907654 - RNA, 22 nt, Human
gucacaaaggugagggacauga

SEQ ID NO: 907655 - RNA, 22 nt, Human
uuauauuaguuagacuugcugu

SEQ ID NO: 907656 - RNA, 22 nt, Human
ggaccaggcugagcaccugccu

SEQ ID NO: 907657 - RNA, 21 nt, Human
acaaaagaagcugccuuuuaa

SEQ ID NO: 907658 - RNA, 22 nt, Human
ugggaacuggggcauuguuucu

SEQ ID NO: 907659 - RNA, 22 nt, Human
ggcugccccagugcucauggcu

SEQ ID NO: 907660 - RNA, 22 nt, Human
cugagcuuggcuuaucuccagc

SEQ ID NO: 907661 - RNA, 22 nt, Human
acugaauagaaaugcucauagg

SEQ ID NO: 907662 - RNA, 22 nt, Human
uguccacaucacucacuuguca

SEQ ID NO: 907663 - RNA, 22 nt, Human
gggcuucaaaauuggcacucuu

SEQ ID NO: 907664 - RNA, 20 nt, Human
caugcugccuccauugaugc

SEQ ID NO: 907665 - RNA, 22 nt, Human
acacuauaagacagauacagca

SEQ ID NO: 907666 - RNA, 22 nt, Human
gcugcugucagcaggccuuguu

SEQ ID NO: 907667 - RNA, 22 nt, Human
ucauugaauacauauuugggau

SEQ ID NO: 907668 - RNA, 22 nt, Human
ggacagcagccucuuacaugaa

SEQ ID NO: 907669 - RNA, 22 nt, Human
accauuuuggguauuuucagag

SEQ ID NO: 907670 - RNA, 22 nt, Human
ugaugacagcaaaaaaugcuag

SEQ ID NO: 907671 - RNA, 22 nt, Human
gagggugggccagauaugaggg

SEQ ID NO: 907672 - RNA, 22 nt, Human
agcuggugcugaagcucuugag

SEQ ID NO: 907673 - RNA, 22 nt, Human
gacagcaaugacggggcagcug

SEQ ID NO: 907674 - RNA, 22 nt, Human
aaggagaaaugguagaugugca

SEQ ID NO: 907675 - RNA, 21 nt, Human
ugcaguuuugcuugaucucug

SEQ ID NO: 907676 - RNA, 22 nt, Human
acugagggugcacaggcaggca

SEQ ID NO: 907677 - RNA, 17 nt, Human
aucugcugacauucugu

SEQ ID NO: 907678 - RNA, 22 nt, Human
uuauuuuuaaaaguucacacag

SEQ ID NO: 907679 - RNA, 22 nt, Human
caucuucagguguuuuccauca

SEQ ID NO: 907680 - RNA, 22 nt, Human
caaauacuggguaaguuaauuu

SEQ ID NO: 907681 - RNA, 22 nt, Human
gccacaggucggcuagaggguc

SEQ ID NO: 907682 - RNA, 22 nt, Human
guuuguucauggcugaugcuug

SEQ ID NO: 907683 - RNA, 22 nt, Human
caaugucugaccguuuugccca

SEQ ID NO: 907684 - RNA, 23 nt, Human
aggcagagccaaggucaaaaccc

SEQ ID NO: 907685 - RNA, 22 nt, Human
acauucuguuuccccaaagaga

SEQ ID NO: 907686 - RNA, 22 nt, Human
agggauguugucaaggaugugg

SEQ ID NO: 907687 - RNA, 22 nt, Human
cagcaagaaucagacaaccuca

SEQ ID NO: 907688 - RNA, 22 nt, Human
uuucauugaugggugauagaaa

SEQ ID NO: 907689 - RNA, 22 nt, Human
cuagagaaaccccaugagcuuu

SEQ ID NO: 907690 - RNA, 22 nt, Human
cauuuaguccuugacuucucuc

SEQ ID NO: 907691 - RNA, 22 nt, Human
gcucuugaccuuggagaacucg

SEQ ID NO: 907692 - RNA, 22 nt, Human
gcaggggcuacucugagcuucc

SEQ ID NO: 907693 - RNA, 22 nt, Human
gggcagguauuuaucuucuauu

SEQ ID NO: 907694 - RNA, 22 nt, Human
acagggcagugucuugaaaaau

SEQ ID NO: 907695 - RNA, 22 nt, Human
ugggcugcccaagguggccaug

SEQ ID NO: 907696 - RNA, 22 nt, Human
uagaaaugaauguuuaaaaguc

SEQ ID NO: 907697 - RNA, 22 nt, Human
cccucagggaccacugacuuca

SEQ ID NO: 907698 - RNA, 22 nt, Human
auucucucauuuaucuguccua

SEQ ID NO: 907699 - RNA, 22 nt, Human
gccuguuuacuuugccgcagga

SEQ ID NO: 907700 - RNA, 22 nt, Human
ggggccagauaucacuaagguu

SEQ ID NO: 907701 - RNA, 22 nt, Human
ucucuacaaaaauuagcaugca

SEQ ID NO: 907702 - RNA, 22 nt, Human
uaacugaacagccuaauucuuu

SEQ ID NO: 907703 - RNA, 22 nt, Human
uucuucagauggugagaccucc

SEQ ID NO: 907704 - RNA, 23 nt, Human
ucuggcugcuccuuucaaugcuc

SEQ ID NO: 907705 - RNA, 21 nt, Human
uuggaauuugggagcuaugug

SEQ ID NO: 907706 - RNA, 22 nt, Human
gaccauuucuaggaaucagacu

SEQ ID NO: 907707 - RNA, 22 nt, Human
agccuauuccaggaugagcuca

SEQ ID NO: 907708 - RNA, 22 nt, Human
auaaggaaaugaaacucuaaua

SEQ ID NO: 907709 - RNA, 22 nt, Human
aaugcuuucuuauaaccacugc

SEQ ID NO: 907710 - RNA, 22 nt, Human
gaguggagcaaaagagguagau

SEQ ID NO: 907711 - RNA, 22 nt, Human
uagucagcaugaaauaagcagc

SEQ ID NO: 907712 - RNA, 22 nt, Human
uuugacucaagccuuucuuuag

SEQ ID NO: 907713 - RNA, 22 nt, Human
aggcaguggaaggagaaagcaa

SEQ ID NO: 907714 - RNA, 22 nt, Human
aucaugcagcuaauccaauuca

SEQ ID NO: 907715 - RNA, 22 nt, Human
guaaguuauauuaaaauuucag

SEQ ID NO: 907716 - RNA, 22 nt, Human
aguggcaaugggaguggagaca

SEQ ID NO: 907717 - RNA, 22 nt, Human
aacaaaccuggguggagaaagg

SEQ ID NO: 907718 - RNA, 23 nt, Human
cuucggaauaugauaagggaccu

SEQ ID NO: 907719 - RNA, 22 nt, Human
gaugcagggggaacgacgcccu

SEQ ID NO: 907720 - RNA, 21 nt, Human
uguaaucuaaagaagcucuuu

SEQ ID NO: 907721 - RNA, 22 nt, Human
ugcuucuguuuguuucugucau

SEQ ID NO: 907722 - RNA, 19 nt, Human
ucuaugggcuuuuuguagu

SEQ ID NO: 907723 - RNA, 22 nt, Human
gggcggggcuuccguccuccac

SEQ ID NO: 907724 - RNA, 22 nt, Human
gccucccuggcccacagcagcg

SEQ ID NO: 907725 - RNA, 21 nt, Human
aaauuuucuuggcuguagugu

SEQ ID NO: 907726 - RNA, 22 nt, Human
gagcugaguaucccacugaagu

SEQ ID NO: 907727 - RNA, 22 nt, Human
uagggacugugugagggacuug

SEQ ID NO: 907728 - RNA, 22 nt, Human
aagugcauuagauagaaugaug

SEQ ID NO: 907729 - RNA, 22 nt, Human
uagaggcuuucagcgguagguc

SEQ ID NO: 907730 - RNA, 22 nt, Human
acauaauaaaaauaacagcuca

SEQ ID NO: 907731 - RNA, 22 nt, Human
aaaugcagauugucauucagga

SEQ ID NO: 907732 - RNA, 22 nt, Human
gagagaaaugugcaguuugggc

SEQ ID NO: 907733 - RNA, 22 nt, Human
aaauguacaacauccauauaua

SEQ ID NO: 907734 - RNA, 22 nt, Human
cucuucaggaauaugucaguca

SEQ ID NO: 907735 - RNA, 22 nt, Human
ccuuucucuaucgacccaucgc

SEQ ID NO: 907736 - RNA, 22 nt, Human
uccacccccagacagcugguga

SEQ ID NO: 907737 - RNA, 21 nt, Human
ugaauaaagcugcugucgaua

SEQ ID NO: 907738 - RNA, 22 nt, Human
ggcgcucaguguugccccagag

SEQ ID NO: 907739 - RNA, 22 nt, Human
agcagagugugaaggcagggcu

SEQ ID NO: 907740 - RNA, 22 nt, Human
gccagcuuccauggccacguca

SEQ ID NO: 907741 - RNA, 22 nt, Human
uacaguagaaucuuauagccca

SEQ ID NO: 907742 - RNA, 22 nt, Human
cagggcaggaugcugugauuau

SEQ ID NO: 907743 - RNA, 22 nt, Human
cacauguuucaggccauauuug

SEQ ID NO: 907744 - RNA, 21 nt, Human
agcugcuuucagcuccuagag

SEQ ID NO: 907745 - RNA, 22 nt, Human
aggagcugcagauucugccuug

SEQ ID NO: 907746 - RNA, 22 nt, Human
gucagugugguugcuggcuugg

SEQ ID NO: 907747 - RNA, 22 nt, Human
aaaggcuuugagaaguccugca

SEQ ID NO: 907748 - RNA, 23 nt, Human
ugacacccucauugugugucgca

SEQ ID NO: 907749 - RNA, 22 nt, Human
aggguccaguaacagaugccag

SEQ ID NO: 907750 - RNA, 22 nt, Human
acaacugucuucuucaugcucc

SEQ ID NO: 907751 - RNA, 22 nt, Human
caggaagccuuccuugucugcu

SEQ ID NO: 907752 - RNA, 22 nt, Human
auucuuuuaaauggcaguagua

SEQ ID NO: 907753 - RNA, 18 nt, Human
ugucaucuguuuaaaacc

SEQ ID NO: 907754 - RNA, 22 nt, Human
acaugcaugucuaugggcaggu

SEQ ID NO: 907755 - RNA, 22 nt, Human
ccuccuggguucaagcgauucu

SEQ ID NO: 907756 - RNA, 22 nt, Human
gcacaggcacagagggccacug

SEQ ID NO: 907757 - RNA, 22 nt, Human
uucugcaguguuaacaauguca

SEQ ID NO: 907758 - RNA, 20 nt, Human
gaaauguacacauuaccaca

SEQ ID NO: 907759 - RNA, 22 nt, Human
uggcagcagggaggccaguguu

SEQ ID NO: 907760 - RNA, 22 nt, Human
ccagcucccugaagccuggucu

SEQ ID NO: 907761 - RNA, 22 nt, Human
uccaggcccgagaugggcugga

SEQ ID NO: 907762 - RNA, 22 nt, Human
cugggcuugaguuccugcucgu

SEQ ID NO: 907763 - RNA, 22 nt, Human
cuccaggccccuggccuucugc

SEQ ID NO: 907764 - RNA, 22 nt, Human
ccaggugcucuugccagggcug

SEQ ID NO: 907765 - RNA, 22 nt, Human
ggaacugaaugucucgguauaa

SEQ ID NO: 907766 - RNA, 21 nt, Human
ccccucauacacucuccuugc

SEQ ID NO: 907767 - RNA, 22 nt, Human
acauucuaugguugaugaguug

SEQ ID NO: 907768 - RNA, 22 nt, Human
uacagauuuugugaagaagugu

SEQ ID NO: 907769 - RNA, 17 nt, Human
cuuugcagcagacaugu

SEQ ID NO: 907770 - RNA, 22 nt, Human
gaagcccagcaaacugugauca

SEQ ID NO: 907771 - RNA, 22 nt, Human
acuuuacacaucuuuucucauu

SEQ ID NO: 907772 - RNA, 22 nt, Human
ucagcuggcaucggcucaccca

SEQ ID NO: 907773 - RNA, 22 nt, Human
ggcagcuccuccuagucugccc

SEQ ID NO: 907774 - RNA, 22 nt, Human
cuaggcagggugcugugccaug

SEQ ID NO: 907775 - RNA, 22 nt, Human
ggucccaggagaauaggugcaa

SEQ ID NO: 907776 - RNA, 22 nt, Human
caggaaagccgagugccauagg

SEQ ID NO: 907777 - RNA, 22 nt, Human
aucuuuuacuacaaaucaggug

SEQ ID NO: 907778 - RNA, 22 nt, Human
acacuuuacucuuacaccauug

SEQ ID NO: 907779 - RNA, 22 nt, Human
cugaagucagauggcacaaggu

SEQ ID NO: 907780 - RNA, 22 nt, Human
cugggugaguauaggaaaggga

SEQ ID NO: 907781 - RNA, 22 nt, Human
aagaacauggacugugggguua

SEQ ID NO: 907782 - RNA, 22 nt, Human
uguuucuuauccaaguggucug

SEQ ID NO: 907783 - RNA, 22 nt, Human
uaucauguugaauuucugagaa

SEQ ID NO: 907784 - RNA, 18 nt, Human
cuuugcuauaaauuguau

SEQ ID NO: 907785 - RNA, 20 nt, Human
aggaugcagggagucugcag

SEQ ID NO: 907786 - RNA, 22 nt, Human
ucccacccauccugcaucucuu

SEQ ID NO: 907787 - RNA, 19 nt, Human
gagcacagcggcauuuggu

SEQ ID NO: 907788 - RNA, 22 nt, Human
ugcugggcugcacccccagagu

SEQ ID NO: 907789 - RNA, 22 nt, Human
auguacaguggaaacuaacaaa

SEQ ID NO: 907790 - RNA, 22 nt, Human
cugugugcagggcacaauggaa

SEQ ID NO: 907791 - RNA, 22 nt, Human
uaguauauuuuguugcaauuca

SEQ ID NO: 907792 - RNA, 22 nt, Human
ggaggugcuggcggccagcucu

SEQ ID NO: 907793 - RNA, 22 nt, Human
augcacaacaguggcugccuug

SEQ ID NO: 907794 - RNA, 22 nt, Human
caaauucacaugauugcuucug

SEQ ID NO: 907795 - RNA, 22 nt, Human
augagguaagcacugggcccaa

SEQ ID NO: 907796 - RNA, 22 nt, Human
gucacuguuuccuauuauauuu

SEQ ID NO: 907797 - RNA, 22 nt, Human
aucuuuacaguguaagugcaga

SEQ ID NO: 907798 - RNA, 22 nt, Human
ucauauuuaguucacgcucaau

SEQ ID NO: 907799 - RNA, 22 nt, Human
ucagugugaauucaggagccua

SEQ ID NO: 907800 - RNA, 22 nt, Human
caggcauaaguaauguuuuaug

SEQ ID NO: 907801 - RNA, 22 nt, Human
agcagugaaacagcugcauaug

SEQ ID NO: 907802 - RNA, 22 nt, Human
acauuucuccuugcaggaguca

SEQ ID NO: 907803 - RNA, 22 nt, Human
accacaguaugaaaucugaaau

SEQ ID NO: 907804 - RNA, 22 nt, Human
augcaggggccgccuggccagg

SEQ ID NO: 907805 - RNA, 22 nt, Human
ugacaaauguuaauucagugga

SEQ ID NO: 907806 - RNA, 22 nt, Human
gcugucccgaaccccugguaau

SEQ ID NO: 907807 - RNA, 22 nt, Human
cagcuauagauggacugaagag

SEQ ID NO: 907808 - RNA, 22 nt, Human
uguuuauaauaugcagugagca

SEQ ID NO: 907809 - RNA, 22 nt, Human
uguguccuuuggaggaucagcg

SEQ ID NO: 907810 - RNA, 22 nt, Human
auucaaguccagcuucucuaca

SEQ ID NO: 907811 - RNA, 19 nt, Human
ugcuauuuagaacgccugg

SEQ ID NO: 907812 - RNA, 22 nt, Human
caaauguauucucacuucaggg

SEQ ID NO: 907813 - RNA, 22 nt, Human
gggcuggucuggcuuagucagg

SEQ ID NO: 907814 - RNA, 22 nt, Human
aaguacaucaaauguuuggcua

SEQ ID NO: 907815 - RNA, 22 nt, Human
uggcugaauucaucaagaaaau

SEQ ID NO: 907816 - RNA, 22 nt, Human
cuuuccuggcuggcaguugugg

SEQ ID NO: 907817 - RNA, 22 nt, Human
acaaugucaccucucauguuuu

SEQ ID NO: 907818 - RNA, 22 nt, Human
agggcaguucagccacaggcuc

SEQ ID NO: 907819 - RNA, 22 nt, Human
caaagaauagcauggcauuugu

SEQ ID NO: 907820 - RNA, 22 nt, Human
gauuuccuaauguggaucucug

SEQ ID NO: 907821 - RNA, 22 nt, Human
ucuuccucucuaauugaucaga

SEQ ID NO: 907822 - RNA, 22 nt, Human
uugagaaaauaguucgaauguu

SEQ ID NO: 907823 - RNA, 22 nt, Human
cuggaaagugcuuuucugagag

SEQ ID NO: 907824 - RNA, 22 nt, Human
ugccaggcauauggccucuuug

SEQ ID NO: 907825 - RNA, 22 nt, Human
ggcaggcauggggucugccauu

SEQ ID NO: 907826 - RNA, 22 nt, Human
guucauaauuugaaggaauagg

SEQ ID NO: 907827 - RNA, 22 nt, Human
augguacagauaauacaugcug

SEQ ID NO: 907828 - RNA, 22 nt, Human
acacugugucuagcauuuuaca

SEQ ID NO: 907829 - RNA, 22 nt, Human
gcgcagaguagcagagugcuga

SEQ ID NO: 907830 - RNA, 22 nt, Human
cucuguagaaacagggcagaag

SEQ ID NO: 907831 - RNA, 20 nt, Human
gggugggagagucugagggu

SEQ ID NO: 907832 - RNA, 22 nt, Human
uucuaguucugaaagccugaca

SEQ ID NO: 907833 - RNA, 22 nt, Human
uccccugcagcgccugcuucua

SEQ ID NO: 907834 - RNA, 20 nt, Human
agacugaagccaugugacua

SEQ ID NO: 907835 - RNA, 22 nt, Human
ucacauauuuaagaaaguuaaa

SEQ ID NO: 907836 - RNA, 22 nt, Human
ucaguguguuauucuacuuuca

SEQ ID NO: 907837 - RNA, 22 nt, Human
uccuggcugccgucguccugcg

SEQ ID NO: 907838 - RNA, 22 nt, Human
cccagccugucuuucccaauga

SEQ ID NO: 907839 - RNA, 22 nt, Human
ccaggaagccugugucucugga

SEQ ID NO: 907840 - RNA, 22 nt, Human
uuucuagaaacauuaucucuau

SEQ ID NO: 907841 - RNA, 22 nt, Human
cuggcacuuggcacccaugaaa

SEQ ID NO: 907842 - RNA, 22 nt, Human
ucucaaauguaaagcaugauuu

SEQ ID NO: 907843 - RNA, 22 nt, Human
ggcugggagccccacagaguca

SEQ ID NO: 907844 - RNA, 22 nt, Human
aauugcaauuuucuuaaggucu

SEQ ID NO: 907845 - RNA, 23 nt, Human
ugccuauucagcagagugauagc

SEQ ID NO: 907846 - RNA, 22 nt, Human
aggcuacagauacagaggcuac

SEQ ID NO: 907847 - RNA, 18 nt, Human
guccugagcucugcugua

SEQ ID NO: 907848 - RNA, 22 nt, Human
agugaaauacugucguuuuuag

SEQ ID NO: 907849 - RNA, 22 nt, Human
ugguggcaucagugaaguacac

SEQ ID NO: 907850 - RNA, 22 nt, Human
cauguguggagggcaugcaugg

SEQ ID NO: 907851 - RNA, 22 nt, Human
ccugucagcugauggcuaugua

SEQ ID NO: 907852 - RNA, 22 nt, Human
uucugagccuuucuaagaaaca

SEQ ID NO: 907853 - RNA, 22 nt, Human
gagugguuagaaguaguguggc

SEQ ID NO: 907854 - RNA, 21 nt, Human
ucucuuugggaacauuaauca

SEQ ID NO: 907855 - RNA, 19 nt, Human
ccaccccuuugcugggccc

SEQ ID NO: 907856 - RNA, 22 nt, Human
ugaacccugaccucuggaagga

SEQ ID NO: 907857 - RNA, 22 nt, Human
auauagaguaauuauuuggugu

SEQ ID NO: 907858 - RNA, 22 nt, Human
caucauuguuagggacucuaac

SEQ ID NO: 907859 - RNA, 22 nt, Human
cuggaaugggaaucaggaaaga

SEQ ID NO: 907860 - RNA, 22 nt, Human
gaagggugugugugagggacac

SEQ ID NO: 907861 - RNA, 22 nt, Human
ugaccauggcacauguuugccu

SEQ ID NO: 907862 - RNA, 22 nt, Human
cuguggcucucagaggcugcug

SEQ ID NO: 907863 - RNA, 22 nt, Human
ucaauacacaugccgcuguucu

SEQ ID NO: 907864 - RNA, 22 nt, Human
uggugucuuggaaguaggugcu

SEQ ID NO: 907865 - RNA, 22 nt, Human
guccuuggagucaggcaaggcu

SEQ ID NO: 907866 - RNA, 22 nt, Human
uggccaggcauucagauaagac

SEQ ID NO: 907867 - RNA, 22 nt, Human
uagcaggguaaauguagaugga

SEQ ID NO: 907868 - RNA, 22 nt, Human
cacuguguaagaagaugggcuu

SEQ ID NO: 907869 - RNA, 22 nt, Human
uccugggauuaagguggugauu

SEQ ID NO: 907870 - RNA, 22 nt, Human
cacagaggagugcacacucucu

SEQ ID NO: 907871 - RNA, 22 nt, Human
uuuaauuagcaagccagagagc

SEQ ID NO: 907872 - RNA, 23 nt, Human
cugcagucgccggccugggugcc

SEQ ID NO: 907873 - RNA, 22 nt, Human
gugcucuguguauuaggauguc

SEQ ID NO: 907874 - RNA, 22 nt, Human
caguauguuugggagacaugac

SEQ ID NO: 907875 - RNA, 22 nt, Human
cagggcucacucggcuggcguc

SEQ ID NO: 907876 - RNA, 22 nt, Human
agucuucagcagccuucucagg

SEQ ID NO: 907877 - RNA, 22 nt, Human
cuguacaaguccuucaucaggg

SEQ ID NO: 907878 - RNA, 23 nt, Human
uccaauucaauugggucaggaag

SEQ ID NO: 907879 - RNA, 22 nt, Human
uggguucccugacagcgaugcu

SEQ ID NO: 907880 - RNA, 22 nt, Human
agagacaggauaucugcucaug

SEQ ID NO: 907881 - RNA, 22 nt, Human
uucuuuaccacuacucuuccaa

SEQ ID NO: 907882 - RNA, 22 nt, Human
cugggagugaaaggagggcugc

SEQ ID NO: 907883 - RNA, 21 nt, Human
ugucagagcuuguaggacauu

SEQ ID NO: 907884 - RNA, 22 nt, Human
uuuggucuuuuauuuaaagcag

SEQ ID NO: 907885 - RNA, 22 nt, Human
gaccugggguggaaggaaggca

SEQ ID NO: 907886 - RNA, 22 nt, Human
cccugggcaagcccuauuuucc

SEQ ID NO: 907887 - RNA, 22 nt, Human
ucuacaaguuuaauuccacuua

SEQ ID NO: 907888 - RNA, 22 nt, Human
guccuuaguuacuuuucauguc

SEQ ID NO: 907889 - RNA, 22 nt, Human
agguuuauuauguagcauuauu

SEQ ID NO: 907890 - RNA, 22 nt, Human
gacagcaaagcagagccaaggc

SEQ ID NO: 907891 - RNA, 22 nt, Human
ccagcacucugucccagcuucc

SEQ ID NO: 907892 - RNA, 22 nt, Human
gggagcuggaguuguguugccu

SEQ ID NO: 907893 - RNA, 22 nt, Human
uuagaaagcuuuccauagucaa

SEQ ID NO: 907894 - RNA, 22 nt, Human
uucagaauguacugauagaaca

SEQ ID NO: 907895 - RNA, 22 nt, Human
ucugggccggagccgacggcag

SEQ ID NO: 907896 - RNA, 22 nt, Human
gaggcuggggucugccuuucug

SEQ ID NO: 907897 - RNA, 22 nt, Human
cuuacagugaucaacacaaaga

SEQ ID NO: 907898 - RNA, 22 nt, Human
agggagcuuucagguagcuuaa

SEQ ID NO: 907899 - RNA, 22 nt, Human
gggugggaugccgcugucucca

SEQ ID NO: 907900 - RNA, 22 nt, Human
ugugaaauuacuuaaaggaaau

SEQ ID NO: 907901 - RNA, 22 nt, Human
gacauuuagcuguuuugcauuu

SEQ ID NO: 907902 - RNA, 22 nt, Human
ucaaggaaggucuguugcucca

SEQ ID NO: 907903 - RNA, 22 nt, Human
uucuucuucuggcugcaccugg

SEQ ID NO: 907904 - RNA, 22 nt, Human
ucuugcagaaauaaguuuaaau

SEQ ID NO: 907905 - RNA, 22 nt, Human
aauuaagaaaauguuuuaugau

SEQ ID NO: 907906 - RNA, 22 nt, Human
ucugugaaaucacccagguuua

SEQ ID NO: 907907 - RNA, 22 nt, Human
agagcucugcagcuggccucag

SEQ ID NO: 907908 - RNA, 20 nt, Human
cagagccaggguuuuguuuu

SEQ ID NO: 907909 - RNA, 22 nt, Human
uguugccuaacugcccucugaa

SEQ ID NO: 907910 - RNA, 22 nt, Human
ggagaggugaauggcugcucua

SEQ ID NO: 907911 - RNA, 22 nt, Human
ccaggcagccaagugugugugu

SEQ ID NO: 907912 - RNA, 22 nt, Human
ucuauuaugguacuuaucauga

SEQ ID NO: 907913 - RNA, 22 nt, Human
gcccaagaucaguggggcagau

SEQ ID NO: 907914 - RNA, 22 nt, Human
ucuaaagagaguggguacaugu

SEQ ID NO: 907915 - RNA, 22 nt, Human
ggaccugaacauaaaacgaggc

SEQ ID NO: 907916 - RNA, 22 nt, Human
ggcugccucuggaagcuggaga

SEQ ID NO: 907917 - RNA, 22 nt, Human
uguauacaaauuggaaucagau

SEQ ID NO: 907918 - RNA, 22 nt, Human
ccugcagguuucccccggacgg

SEQ ID NO: 907919 - RNA, 22 nt, Human
uauuucuguaugcauaaaagga

SEQ ID NO: 907920 - RNA, 20 nt, Human
cauuucauugugucuucacu

SEQ ID NO: 907921 - RNA, 22 nt, Human
ucuuaugucaagaaugaauauu

SEQ ID NO: 907922 - RNA, 22 nt, Human
uuuaccauccucuuuuagaauu

SEQ ID NO: 907923 - RNA, 22 nt, Human
gagccuggccuccugccucagc

SEQ ID NO: 907924 - RNA, 22 nt, Human
agccaggcgggucuuugcuccu

SEQ ID NO: 907925 - RNA, 22 nt, Human
gcagcagaaguagaaguacagg

SEQ ID NO: 907926 - RNA, 22 nt, Human
uaacuuucacaucacacugacu

SEQ ID NO: 907927 - RNA, 22 nt, Human
aggcauggcuuuaggcaggcgu

SEQ ID NO: 907928 - RNA, 22 nt, Human
cagauauauuuuccuuauuagg

SEQ ID NO: 907929 - RNA, 22 nt, Human
ccuggaaaugucgcguguagaa

SEQ ID NO: 907930 - RNA, 22 nt, Human
ccugggcuggaguacagcagug

SEQ ID NO: 907931 - RNA, 23 nt, Human
agaaaaguucauaccuuuuuaac

SEQ ID NO: 907932 - RNA, 22 nt, Human
ucaaccuugugagaacugaguc

SEQ ID NO: 907933 - RNA, 23 nt, Human
ggcagcuuauacuuucauagaca

SEQ ID NO: 907934 - RNA, 22 nt, Human
agccaaggagugcagguggcuu

SEQ ID NO: 907935 - RNA, 22 nt, Human
gcaguccucucauuggccuccu

SEQ ID NO: 907936 - RNA, 22 nt, Human
ccuccuggcccugggccuggaa

SEQ ID NO: 907937 - RNA, 22 nt, Human
uaaguuuaagucauguuugaug

SEQ ID NO: 907938 - RNA, 22 nt, Human
aucaaaguucguaacugauaac

SEQ ID NO: 907939 - RNA, 22 nt, Human
uaauuuacucagauguucaauc

SEQ ID NO: 907940 - RNA, 22 nt, Human
uuugucuucccccuuuaaucag

SEQ ID NO: 907941 - RNA, 22 nt, Human
ucucugccacagcuucugccuu

SEQ ID NO: 907942 - RNA, 22 nt, Human
gagugcaggccugagcaccauc

SEQ ID NO: 907943 - RNA, 20 nt, Human
ugggacugacccaucugagc

SEQ ID NO: 907944 - RNA, 22 nt, Human
cuacauuuacacaguuaggcuu

SEQ ID NO: 907945 - RNA, 22 nt, Human
auauacacucaccaugguauuu

SEQ ID NO: 907946 - RNA, 22 nt, Human
auugucuuggcauucaaauuag

SEQ ID NO: 907947 - RNA, 22 nt, Human
gaggcucagagggagcaugguc

SEQ ID NO: 907948 - RNA, 22 nt, Human
ucagcacugucuauuagugaga

SEQ ID NO: 907949 - RNA, 23 nt, Human
agguagguuauugcugcuaccug

SEQ ID NO: 907950 - RNA, 22 nt, Human
uagaaguuaugauaauaauagu

SEQ ID NO: 907951 - RNA, 22 nt, Human
aggggagguggcagaaaugugc

SEQ ID NO: 907952 - RNA, 22 nt, Human
aagccgggccugagaaaugaca

SEQ ID NO: 907953 - RNA, 22 nt, Human
guuuagaaaauagugaagcaag

SEQ ID NO: 907954 - RNA, 22 nt, Human
uaggcacaagaccaugcaaagg

SEQ ID NO: 907955 - RNA, 22 nt, Human
uuagaacaaagccaccagguga

SEQ ID NO: 907956 - RNA, 22 nt, Human
uuuauuaaaacuguuggcucug

SEQ ID NO: 907957 - RNA, 22 nt, Human
agacaugaaaauuccaaacauc

SEQ ID NO: 907958 - RNA, 22 nt, Human
ucagacaguuugcagugugccu

SEQ ID NO: 907959 - RNA, 22 nt, Human
ggccaagcucucauuccagcac

SEQ ID NO: 907960 - RNA, 18 nt, Human
gccagagggcccaagguc

SEQ ID NO: 907961 - RNA, 22 nt, Human
gagguggcaauuuaaugcaguc

SEQ ID NO: 907962 - RNA, 18 nt, Human
gugaagcuuuauugaaug

SEQ ID NO: 907963 - RNA, 22 nt, Human
aagucagaaauaucugccauca

SEQ ID NO: 907964 - RNA, 19 nt, Human
uugagaaaugggaaaagca

SEQ ID NO: 907965 - RNA, 21 nt, Human
cagcuucuucugugaccuggu

SEQ ID NO: 907966 - RNA, 22 nt, Human
aaaguugagugcugaucugauu

SEQ ID NO: 907967 - RNA, 22 nt, Human
augggcugugagguccggcagg

SEQ ID NO: 907968 - RNA, 22 nt, Human
cuggagccccagacagggagag

SEQ ID NO: 907969 - RNA, 22 nt, Human
agcuccugcacccagccuugag

SEQ ID NO: 907970 - RNA, 22 nt, Human
gagguccauacagcuauucuac

SEQ ID NO: 907971 - RNA, 22 nt, Human
aggucugaguagagaaaaggca

SEQ ID NO: 907972 - RNA, 22 nt, Human
aucucuaaagucuguucagcuc

SEQ ID NO: 907973 - RNA, 22 nt, Human
agaauacaguaugcaaaaagau

SEQ ID NO: 907974 - RNA, 22 nt, Human
ggcagcucaccucugguccagg

SEQ ID NO: 907975 - RNA, 22 nt, Human
augccuguaaucccagugcuuu

SEQ ID NO: 907976 - RNA, 22 nt, Human
gcuuccaaugcuucuaucacau

SEQ ID NO: 907977 - RNA, 22 nt, Human
gagaaaaucuugggucaagaau

SEQ ID NO: 907978 - RNA, 22 nt, Human
ugcaaagaaggggaggaggauu

SEQ ID NO: 907979 - RNA, 22 nt, Human
uucaagaagcccaaagacuagc

SEQ ID NO: 907980 - RNA, 22 nt, Human
guuuugcucauuugguccaagg

SEQ ID NO: 907981 - RNA, 19 nt, Human
uuuuggaaaugugaacagc

SEQ ID NO: 907982 - RNA, 22 nt, Human
agaauaaaugcuaccuaucaca

SEQ ID NO: 907983 - RNA, 22 nt, Human
ugagcagagucgcuccagagug

SEQ ID NO: 907984 - RNA, 22 nt, Human
gauagucaccucccuuaacuuu

SEQ ID NO: 907985 - RNA, 22 nt, Human
cucuauauucugaaacaguuag

SEQ ID NO: 907986 - RNA, 22 nt, Human
gccagcugguaggcaccuagcc

SEQ ID NO: 907987 - RNA, 22 nt, Human
uuaggaaaaucaugagagauga

SEQ ID NO: 907988 - RNA, 22 nt, Human
auaugauuccacuauuguaugg

SEQ ID NO: 907989 - RNA, 22 nt, Human
cagccccauggugugcuccagc

SEQ ID NO: 907990 - RNA, 23 nt, Human
cuuccaguacugcacacucaagg

SEQ ID NO: 907991 - RNA, 22 nt, Human
ugggugucaaugucacacgauu

SEQ ID NO: 907992 - RNA, 22 nt, Human
cagagcugucauuugccaguga

SEQ ID NO: 907993 - RNA, 22 nt, Human
uuuauaugguugacuaugaguu

SEQ ID NO: 907994 - RNA, 22 nt, Human
auacagagcaguaauagaggag

SEQ ID NO: 907995 - RNA, 23 nt, Human
ggauaaaucucagcuucuuccau

SEQ ID NO: 907996 - RNA, 22 nt, Human
augacacaagcagaggcucuaa

SEQ ID NO: 907997 - RNA, 22 nt, Human
uccccagcauugagggucucuc

SEQ ID NO: 907998 - RNA, 22 nt, Human
uagauucagauauuuaggacaa

SEQ ID NO: 907999 - RNA, 21 nt, Human
uuacaaagcuacagauguugc

SEQ ID NO: 908000 - RNA, 22 nt, Human
cagaaaauagaguuucucugag

SEQ ID NO: 908001 - RNA, 22 nt, Human
aaacuaggaaguucaucuuauu

SEQ ID NO: 908002 - RNA, 22 nt, Human
ucuggccucuugggaugcuccc

SEQ ID NO: 908003 - RNA, 22 nt, Human
guauaguuccaagcauauuuug

SEQ ID NO: 908004 - RNA, 22 nt, Human
uguguucuccaacuguagauuu

SEQ ID NO: 908005 - RNA, 22 nt, Human
gugcauauauaugggagggagc

SEQ ID NO: 908006 - RNA, 22 nt, Human
uagcuuugacaguugcaggcag

SEQ ID NO: 908007 - RNA, 22 nt, Human
gagagggcaagguagaugcuac

SEQ ID NO: 908008 - RNA, 22 nt, Human
aguugcucaauguggcugugga

SEQ ID NO: 908009 - RNA, 22 nt, Human
gugggcugaggggacaccaagg

SEQ ID NO: 908010 - RNA, 22 nt, Human
ccaggaggugaaacuucaccag

SEQ ID NO: 908011 - RNA, 22 nt, Human
uucauguuuccucuugugcugc

SEQ ID NO: 908012 - RNA, 21 nt, Human
cacugcagccuugaccugggc

SEQ ID NO: 908013 - RNA, 22 nt, Human
cauguauaagcgcuaggagugc

SEQ ID NO: 908014 - RNA, 22 nt, Human
uaguuucugaggauugaaagau

SEQ ID NO: 908015 - RNA, 22 nt, Human
ucuagacaaugcacuguaagga

SEQ ID NO: 908016 - RNA, 22 nt, Human
agggccugugcugaguagacga

SEQ ID NO: 908017 - RNA, 22 nt, Human
gaagagcugcaguuuccugggc

SEQ ID NO: 908018 - RNA, 22 nt, Human
agauuuguugugagcaggaaua

SEQ ID NO: 908019 - RNA, 22 nt, Human
auggagcuaaauuguaaucaua

SEQ ID NO: 908020 - RNA, 20 nt, Human
gggguuggcuggcacaggga

SEQ ID NO: 908021 - RNA, 22 nt, Human
uggcccaaagcagcccagcagg

SEQ ID NO: 908022 - RNA, 22 nt, Human
auccucaguguuucugacaucu

SEQ ID NO: 908023 - RNA, 22 nt, Human
uugggaaacaguauagcuaaca

SEQ ID NO: 908024 - RNA, 22 nt, Human
gcuuggaaguaggauugggaga

SEQ ID NO: 908025 - RNA, 22 nt, Human
agugucugcaaaaugaaagagc

SEQ ID NO: 908026 - RNA, 18 nt, Human
uggcuccugccuccugca

SEQ ID NO: 908027 - RNA, 22 nt, Human
aagacuuucuguaaagcuacag

SEQ ID NO: 908028 - RNA, 22 nt, Human
aaacugcaauuacuuuugcagc

SEQ ID NO: 908029 - RNA, 22 nt, Human
auuuguacaaauuuauguuagu

SEQ ID NO: 908030 - RNA, 22 nt, Human
cauuuaauagaugcuguuucag

SEQ ID NO: 908031 - RNA, 22 nt, Human
gcugauuuugagaagcacaguc

SEQ ID NO: 908032 - RNA, 22 nt, Human
cacacagaaccgcucgccacuu

SEQ ID NO: 908033 - RNA, 22 nt, Human
acagaagacagaguguucaucu

SEQ ID NO: 908034 - RNA, 22 nt, Human
aguggcagacacaaugugggca

SEQ ID NO: 908035 - RNA, 22 nt, Human
ccugucucccuggcauggcuca

SEQ ID NO: 908036 - RNA, 22 nt, Human
gucaguguuauaaguuuagcca

SEQ ID NO: 908037 - RNA, 22 nt, Human
cuggcuguguccacagaguaag

SEQ ID NO: 908038 - RNA, 22 nt, Human
caaacuauuuacaauggaauca

SEQ ID NO: 908039 - RNA, 19 nt, Human
aggcuaaagagucuugcgu

SEQ ID NO: 908040 - RNA, 22 nt, Human
guagaauuaccucucuaugucc

SEQ ID NO: 908041 - RNA, 22 nt, Human
gagcuucucaacaguuaucucu

SEQ ID NO: 908042 - RNA, 22 nt, Human
auauccuugagacguggcuacu

SEQ ID NO: 908043 - RNA, 22 nt, Human
aggcauggcauggggcagaugu

SEQ ID NO: 908044 - RNA, 22 nt, Human
cagcaguggccaucuguguggu

SEQ ID NO: 908045 - RNA, 22 nt, Human
caauaaagaagauuuuugcaau

SEQ ID NO: 908046 - RNA, 22 nt, Human
gagcaagauuaaaaggcugggu

SEQ ID NO: 908047 - RNA, 22 nt, Human
auuucaguguugguuagcaagc

SEQ ID NO: 908048 - RNA, 20 nt, Human
uucuagaaugcccagggaca

SEQ ID NO: 908049 - RNA, 22 nt, Human
uucuuuagcaacuuggauuuag

SEQ ID NO: 908050 - RNA, 22 nt, Human
aacaauguguucagcacugugg

SEQ ID NO: 908051 - RNA, 20 nt, Human
auugacagaaaguguucacc

SEQ ID NO: 908052 - RNA, 22 nt, Human
uacauaugaacuuuauaacuug

SEQ ID NO: 908053 - RNA, 22 nt, Human
aaucuuacuuaugauuuuucgg

SEQ ID NO: 908054 - RNA, 22 nt, Human
augucaccuucgguggcacggu

SEQ ID NO: 908055 - RNA, 22 nt, Human
ugucuuucugacccaagguagu

SEQ ID NO: 908056 - RNA, 21 nt, Human
ggaguuuuucuggaagggacu

SEQ ID NO: 908057 - RNA, 22 nt, Human
uuacagaagugaaggccuuuaa

SEQ ID NO: 908058 - RNA, 20 nt, Human
uaugaguauuacuuucagga

SEQ ID NO: 908059 - RNA, 22 nt, Human
uggcacaggaucucagcggcca

SEQ ID NO: 908060 - RNA, 22 nt, Human
cugucuguguggacacggcugc

SEQ ID NO: 908061 - RNA, 22 nt, Human
uggcuggcuuucuuguauuuac

SEQ ID NO: 908062 - RNA, 22 nt, Human
cugggaagaauccaagggcccu

SEQ ID NO: 908063 - RNA, 22 nt, Human
cauuuccuuccugcugcuccuc

SEQ ID NO: 908064 - RNA, 22 nt, Human
uagugaaacaguuaucaaucug

SEQ ID NO: 908065 - RNA, 22 nt, Human
ucucugccaccaugagaugggc

SEQ ID NO: 908066 - RNA, 22 nt, Human
uacugugaauacaaaauaaauu

SEQ ID NO: 908067 - RNA, 22 nt, Human
ugguugugagcgauggauggag

SEQ ID NO: 908068 - RNA, 22 nt, Human
aaacuaucaaguguugggggag

SEQ ID NO: 908069 - RNA, 22 nt, Human
ugcagaagauggucugagcacc

SEQ ID NO: 908070 - RNA, 22 nt, Human
agucucagccacacagaccuau

SEQ ID NO: 908071 - RNA, 19 nt, Human
ccuuuggauuuguuuaguc

SEQ ID NO: 908072 - RNA, 22 nt, Human
gccaggcuggucuugaacuccu

SEQ ID NO: 908073 - RNA, 22 nt, Human
ucuagaucugcacuguuggaca

SEQ ID NO: 908074 - RNA, 22 nt, Human
ucacaaugcaaguguucagugg

SEQ ID NO: 908075 - RNA, 22 nt, Human
ggcucagguuuccuucccagcu

SEQ ID NO: 908076 - RNA, 22 nt, Human
cuuuuucuucuaggugugccug

SEQ ID NO: 908077 - RNA, 22 nt, Human
uccaucauguucacagcuauau

SEQ ID NO: 908078 - RNA, 22 nt, Human
gccaggucuggguagcagagga

SEQ ID NO: 908079 - RNA, 22 nt, Human
gagaguggauggagcugcgaag

SEQ ID NO: 908080 - RNA, 21 nt, Human
ggcugggucaugcagcuggcc

SEQ ID NO: 908081 - RNA, 22 nt, Human
aaagcagucucagacuuaagca

SEQ ID NO: 908082 - RNA, 22 nt, Human
uagcaccugcaggaugugcaca

SEQ ID NO: 908083 - RNA, 22 nt, Human
agaagccaccagcugaggaaga

SEQ ID NO: 908084 - RNA, 22 nt, Human
auuuuguuauagaacucuguga

SEQ ID NO: 908085 - RNA, 22 nt, Human
uggauuucagcaagggugggug

SEQ ID NO: 908086 - RNA, 21 nt, Human
ucuuccaagggcugcugagac

SEQ ID NO: 908087 - RNA, 22 nt, Human
gguuuauuaaugugaacuguau

SEQ ID NO: 908088 - RNA, 22 nt, Human
agguuuacugagggugcugguu

SEQ ID NO: 908089 - RNA, 22 nt, Human
aauaucaacaguguccuucuaa

SEQ ID NO: 908090 - RNA, 23 nt, Human
agcugaggcagaggggcauucuc

SEQ ID NO: 908091 - RNA, 22 nt, Human
agaaagguggaugcucuggaau

SEQ ID NO: 908092 - RNA, 22 nt, Human
ucaaaugcaggucuggucuugg

SEQ ID NO: 908093 - RNA, 22 nt, Human
gugugcagggcugccugugccg

SEQ ID NO: 908094 - RNA, 22 nt, Human
uucaucauugccagucuuuaaa

SEQ ID NO: 908095 - RNA, 22 nt, Human
ucugaaaucuguaagcacuagc

SEQ ID NO: 908096 - RNA, 22 nt, Human
uuucccaucuuagcagauuaaa

SEQ ID NO: 908097 - RNA, 22 nt, Human
aauguacaaaccuucuuuguag

SEQ ID NO: 908098 - RNA, 19 nt, Human
uccuggggaggggcauggc

SEQ ID NO: 908099 - RNA, 22 nt, Human
uugcuuuauucacaucuauauu

SEQ ID NO: 908100 - RNA, 22 nt, Human
uaaagacaugcaaagucuaauu

SEQ ID NO: 908101 - RNA, 19 nt, Human
acucaggcuuccucugagg

SEQ ID NO: 908102 - RNA, 22 nt, Human
gcucugccuccccuaguguuac

SEQ ID NO: 908103 - RNA, 22 nt, Human
auuucucucauuguuagcuagg

SEQ ID NO: 908104 - RNA, 22 nt, Human
aagauuuuuuuccacagacuca

SEQ ID NO: 908105 - RNA, 22 nt, Human
gccuccggagucacagugucuu

SEQ ID NO: 908106 - RNA, 22 nt, Human
gguucacauauugagaguauuc

SEQ ID NO: 908107 - RNA, 22 nt, Human
uuuaagacagugcaagcugaau

SEQ ID NO: 908108 - RNA, 22 nt, Human
acacauuagugcucugucucau

SEQ ID NO: 908109 - RNA, 22 nt, Human
gcugucacaaauauuucucagc

SEQ ID NO: 908110 - RNA, 22 nt, Human
cccaggucuccugcuucccagg

SEQ ID NO: 908111 - RNA, 22 nt, Human
guuacaaaggacugggggccac

SEQ ID NO: 908112 - RNA, 22 nt, Human
ugaggaaguugaucucaucagu

SEQ ID NO: 908113 - RNA, 22 nt, Human
ggagguggccugaaaauguggc

SEQ ID NO: 908114 - RNA, 22 nt, Human
ucuguuuaaugggaaugauacu

SEQ ID NO: 908115 - RNA, 22 nt, Human
cagggcuuucccuuguagaaau

SEQ ID NO: 908116 - RNA, 20 nt, Human
uuugagaccagucugcccaa

SEQ ID NO: 908117 - RNA, 22 nt, Human
uccaggccugacuauaaaugua

SEQ ID NO: 908118 - RNA, 22 nt, Human
uacuuuggauccuuacaauagc

SEQ ID NO: 908119 - RNA, 22 nt, Human
cauauauuauggacugcagaau

SEQ ID NO: 908120 - RNA, 22 nt, Human
gcagggcucauucuaguacaau

SEQ ID NO: 908121 - RNA, 22 nt, Human
uucacacagcaacuguaugaau

SEQ ID NO: 908122 - RNA, 22 nt, Human
acaaaugcaaguuuuaugucaa

SEQ ID NO: 908123 - RNA, 22 nt, Human
uacccaguucaguguuuaaaaa

SEQ ID NO: 908124 - RNA, 22 nt, Human
cuccuggcuuucccagaccagg

SEQ ID NO: 908125 - RNA, 22 nt, Human
ucugcaagagcuucaagguaga

SEQ ID NO: 908126 - RNA, 22 nt, Human
caugcacaacauacucaagagg

SEQ ID NO: 908127 - RNA, 22 nt, Human
ccagagguuacuuugccuugga

SEQ ID NO: 908128 - RNA, 22 nt, Human
ucugauuagcuccauuugcuaa

SEQ ID NO: 908129 - RNA, 22 nt, Human
uguagaaacuacacaugcaaca

SEQ ID NO: 908130 - RNA, 22 nt, Human
agcaugcaugaagauucagcaa

SEQ ID NO: 908131 - RNA, 22 nt, Human
gccugggagagggauagugcag

SEQ ID NO: 908132 - RNA, 20 nt, Human
caguccugcaggcgggagaa

SEQ ID NO: 908133 - RNA, 22 nt, Human
gaacaugauggcuguuauuuug

SEQ ID NO: 908134 - RNA, 22 nt, Human
gugcccagcuccaccucacaga

SEQ ID NO: 908135 - RNA, 22 nt, Human
agucuucuugaucuuuucagug

SEQ ID NO: 908136 - RNA, 21 nt, Human
ugcagaggcacaaacaagccc

SEQ ID NO: 908137 - RNA, 17 nt, Human
gccuuccuuccuccaca

SEQ ID NO: 908138 - RNA, 21 nt, Human
caggaaagaaaacguacauau

SEQ ID NO: 908139 - RNA, 22 nt, Human
acauucaaccaauguuugcuau

SEQ ID NO: 908140 - RNA, 22 nt, Human
cagaggcucagauggcccuggc

SEQ ID NO: 908141 - RNA, 22 nt, Human
uucuacaucacuuaacaugcua

SEQ ID NO: 908142 - RNA, 22 nt, Human
ucaggcagguggcuggcuaugg

SEQ ID NO: 908143 - RNA, 22 nt, Human
aauuuguauaaaaugguguuuu

SEQ ID NO: 908144 - RNA, 22 nt, Human
gaggcagcggcucacagagaaa

SEQ ID NO: 908145 - RNA, 22 nt, Human
ucucuggggccuuucuacauca

SEQ ID NO: 908146 - RNA, 22 nt, Human
gcacacugugaauuugcauaug

SEQ ID NO: 908147 - RNA, 22 nt, Human
ggggugagugcucagccccgga

SEQ ID NO: 908148 - RNA, 22 nt, Human
aguggggcggacaggaccagga

SEQ ID NO: 908149 - RNA, 22 nt, Human
uagcaaaugucugaaggaauag

SEQ ID NO: 908150 - RNA, 22 nt, Human
gccucccuguagaggccagccu

SEQ ID NO: 908151 - RNA, 22 nt, Human
aggaauguaaaucuagauuuua

SEQ ID NO: 908152 - RNA, 22 nt, Human
ggagcuguaacgagccauugcu

SEQ ID NO: 908153 - RNA, 22 nt, Human
uagggcuuagaaaagaauuuac

SEQ ID NO: 908154 - RNA, 23 nt, Human
agcagggccagaauacuugcugu

SEQ ID NO: 908155 - RNA, 22 nt, Human
aauccauaauguugugggguuu

SEQ ID NO: 908156 - RNA, 22 nt, Human
gggcuguaggagcuggaauggg

SEQ ID NO: 908157 - RNA, 22 nt, Human
cauuucucacuccagcaacuuu

SEQ ID NO: 908158 - RNA, 22 nt, Human
ggcagcugaccuagcaccaucc

SEQ ID NO: 908159 - RNA, 22 nt, Human
gugauucuggcaggcagaaggg

SEQ ID NO: 908160 - RNA, 22 nt, Human
cuugcaggauuuugcugcugua

SEQ ID NO: 908161 - RNA, 23 nt, Human
auccacauuacaguaucauacaa

SEQ ID NO: 908162 - RNA, 22 nt, Human
gcagccagccccucugaccucu

SEQ ID NO: 908163 - RNA, 22 nt, Human
agacauaagugcuaugacauug

SEQ ID NO: 908164 - RNA, 22 nt, Human
acaguucuccagugccuuugag

SEQ ID NO: 908165 - RNA, 22 nt, Human
gguucuaggauuaggaggccca

SEQ ID NO: 908166 - RNA, 23 nt, Human
ggcucugaggauggagcuggugg

SEQ ID NO: 908167 - RNA, 22 nt, Human
gggagaugaaucagaagugauc

SEQ ID NO: 908168 - RNA, 22 nt, Human
uguuauuuaucugagcauuuau

SEQ ID NO: 908169 - RNA, 21 nt, Human
agcuuguguguaucacagugu

SEQ ID NO: 908170 - RNA, 22 nt, Human
auucuggccuuggcucugucac

SEQ ID NO: 908171 - RNA, 22 nt, Human
uuaaaugugauuucauuuaugu

SEQ ID NO: 908172 - RNA, 22 nt, Human
agcuguggaagacugucagggu

SEQ ID NO: 908173 - RNA, 19 nt, Human
ucuuuggcuaaauugggug

SEQ ID NO: 908174 - RNA, 22 nt, Human
cagcugaauucuucagacucca

SEQ ID NO: 908175 - RNA, 22 nt, Human
ucucagaaaugacaggagguac

SEQ ID NO: 908176 - RNA, 22 nt, Human
caggagagcccggguccgggcu

SEQ ID NO: 908177 - RNA, 22 nt, Human
cuugucaguguacuuucuuuug

SEQ ID NO: 908178 - RNA, 22 nt, Human
acacacuguaaggacuaucacu

SEQ ID NO: 908179 - RNA, 22 nt, Human
aagagauuccucacucagaaug

SEQ ID NO: 908180 - RNA, 22 nt, Human
ugccuuaggguaccuggugcuu

SEQ ID NO: 908181 - RNA, 22 nt, Human
cagggagaucuuggcuccuggu

SEQ ID NO: 908182 - RNA, 22 nt, Human
uuucagagaugcagaauucagg

SEQ ID NO: 908183 - RNA, 22 nt, Human
aaauguaccuugauaguuuggu

SEQ ID NO: 908184 - RNA, 22 nt, Human
gccuuggcugccaagcugcuga

SEQ ID NO: 908185 - RNA, 22 nt, Human
aguguuaaggcugguugcuaua

SEQ ID NO: 908186 - RNA, 22 nt, Human
uuguauuaguaagucagcugcu

SEQ ID NO: 908187 - RNA, 22 nt, Human
cauuucaauuauuugcucuucu

SEQ ID NO: 908188 - RNA, 18 nt, Human
uccagggcuuccuccucu

SEQ ID NO: 908189 - RNA, 22 nt, Human
ugcugagacaguggauaggggc

SEQ ID NO: 908190 - RNA, 22 nt, Human
aggcugaguuucucauucucgc

SEQ ID NO: 908191 - RNA, 22 nt, Human
cuugggccaccuggagggacug

SEQ ID NO: 908192 - RNA, 22 nt, Human
agcagcuggcagcuucuucucu

SEQ ID NO: 908193 - RNA, 22 nt, Human
ugcagggagcucuggggugcag

SEQ ID NO: 908194 - RNA, 22 nt, Human
auagcaaagccuggcacaauga

SEQ ID NO: 908195 - RNA, 19 nt, Human
uccugggcugggccagguc

SEQ ID NO: 908196 - RNA, 22 nt, Human
ucucagaauaaauuccuaacuu

SEQ ID NO: 908197 - RNA, 22 nt, Human
ucuuucuugcaaggaugcagga

SEQ ID NO: 908198 - RNA, 22 nt, Human
uaauccaaaacugaaucugugg

SEQ ID NO: 908199 - RNA, 22 nt, Human
cugggccuggcguuccaggcug

SEQ ID NO: 908200 - RNA, 22 nt, Human
gaaaguaugccaucuaccucuu

SEQ ID NO: 908201 - RNA, 22 nt, Human
ucugggucucagagugaccaug

SEQ ID NO: 908202 - RNA, 19 nt, Human
uuccaccaucacucuguuu

SEQ ID NO: 908203 - RNA, 22 nt, Human
acuggggagugguuuugggaag

SEQ ID NO: 908204 - RNA, 22 nt, Human
gcccaugguccaggaagacaga

SEQ ID NO: 908205 - RNA, 19 nt, Human
ugguggaggugcaccugac

SEQ ID NO: 908206 - RNA, 22 nt, Human
cagaaaugugauguacacacac

SEQ ID NO: 908207 - RNA, 22 nt, Human
aaacagcucaagaaguuacucu

SEQ ID NO: 908208 - RNA, 22 nt, Human
ucaggaguaaguuauaaguauu

SEQ ID NO: 908209 - RNA, 22 nt, Human
gcauuagauuugccuuugaagc

SEQ ID NO: 908210 - RNA, 22 nt, Human
caugggggucuggacaacaggc

SEQ ID NO: 908211 - RNA, 22 nt, Human
cagaaccugagagcacaauccu

SEQ ID NO: 908212 - RNA, 22 nt, Human
gaaguacaguuuuaucuagcca

SEQ ID NO: 908213 - RNA, 23 nt, Human
ucucuuucaagagcuuaaugugc

SEQ ID NO: 908214 - RNA, 22 nt, Human
caggaaugaguucuggugcucu

SEQ ID NO: 908215 - RNA, 23 nt, Human
ugcagggcaaguuagagacccca

SEQ ID NO: 908216 - RNA, 21 nt, Human
ucacagacuggucagugaggc

SEQ ID NO: 908217 - RNA, 22 nt, Human
agaaaggucacuuagccucagc

SEQ ID NO: 908218 - RNA, 22 nt, Human
ccagcugugccuaggagcaggg

SEQ ID NO: 908219 - RNA, 22 nt, Human
ccagggguuggagguugcagug

SEQ ID NO: 908220 - RNA, 22 nt, Human
ggugggccaggaaggccgccag

SEQ ID NO: 908221 - RNA, 22 nt, Human
ugcaaaguugcaucaaaaccca

SEQ ID NO: 908222 - RNA, 22 nt, Human
ucugcuuucuugcgcagaugug

SEQ ID NO: 908223 - RNA, 22 nt, Human
cagaggccaccuguggccacug

SEQ ID NO: 908224 - RNA, 16 nt, Human
uggcugagagaggguu

SEQ ID NO: 908225 - RNA, 22 nt, Human
augagguaagguauucagggaa

SEQ ID NO: 908226 - RNA, 22 nt, Human
gcacugaaauuauaugcauuug

SEQ ID NO: 908227 - RNA, 22 nt, Human
ucacaguuauagucuguagaau

SEQ ID NO: 908228 - RNA, 23 nt, Human
agguucucuuaucaucucugccc

SEQ ID NO: 908229 - RNA, 22 nt, Human
ccacugucugcaggccucagca

SEQ ID NO: 908230 - RNA, 22 nt, Human
uaaaguuuguagcaauugauau

SEQ ID NO: 908231 - RNA, 22 nt, Human
aggcucagaggugagcaucugc

SEQ ID NO: 908232 - RNA, 22 nt, Human
cuucaucuuucugagccucagu

SEQ ID NO: 908233 - RNA, 22 nt, Human
caauguuuuguugaaugaauag

SEQ ID NO: 908234 - RNA, 22 nt, Human
aaugguuucaaacacacuaagu

SEQ ID NO: 908235 - RNA, 22 nt, Human
gacuggggcucuagccaggccu

SEQ ID NO: 908236 - RNA, 22 nt, Human
ucuggauguugcggaguacaga

SEQ ID NO: 908237 - RNA, 22 nt, Human
gcccaggaaagauagggccuca

SEQ ID NO: 908238 - RNA, 22 nt, Human
uggcagggaauacagauguuua

SEQ ID NO: 908239 - RNA, 18 nt, Human
cuucauuuguagaguucc

SEQ ID NO: 908240 - RNA, 22 nt, Human
agucacugggcugcuuccuaua

SEQ ID NO: 908241 - RNA, 18 nt, Human
ccuucagcucugccagua

SEQ ID NO: 908242 - RNA, 22 nt, Human
augggcugacaagacaugcaua

SEQ ID NO: 908243 - RNA, 22 nt, Human
ucugcaggcauuuuugguuguc

SEQ ID NO: 908244 - RNA, 22 nt, Human
ccaggcaggcuagaauguaaau

SEQ ID NO: 908245 - RNA, 22 nt, Human
uuuacaaggaucaagggaucuc

SEQ ID NO: 908246 - RNA, 21 nt, Human
acauacauaccuuaccaccuu

SEQ ID NO: 908247 - RNA, 22 nt, Human
aaugucauugagcuccaauccu

SEQ ID NO: 908248 - RNA, 22 nt, Human
cccagcuguaacgggucugcac

SEQ ID NO: 908249 - RNA, 22 nt, Human
aaucgguugaacccaggaagug

SEQ ID NO: 908250 - RNA, 22 nt, Human
aggcugccagaagccuucagga

SEQ ID NO: 908251 - RNA, 22 nt, Human
aacagcuuuuuuggucagcauu

SEQ ID NO: 908252 - RNA, 22 nt, Human
gccuucaggaaaucaguccuug

SEQ ID NO: 908253 - RNA, 22 nt, Human
gaauggcugaaugucuuaaauu

SEQ ID NO: 908254 - RNA, 22 nt, Human
aggcggagcucaguguguccaa

SEQ ID NO: 908255 - RNA, 22 nt, Human
cugucauuuaagacauucugga

SEQ ID NO: 908256 - RNA, 22 nt, Human
aaugcuuugacuauaucuauaa

SEQ ID NO: 908257 - RNA, 21 nt, Human
cucuagaaaucgaauaaccuu

SEQ ID NO: 908258 - RNA, 22 nt, Human
uuuauguaaguggaaugaugcc

SEQ ID NO: 908259 - RNA, 22 nt, Human
ugcucuggggagcuccucugcg

SEQ ID NO: 908260 - RNA, 22 nt, Human
cugagcugggcaacucuuagau

SEQ ID NO: 908261 - RNA, 22 nt, Human
ugcugcuguuuccuacaucuca

SEQ ID NO: 908262 - RNA, 22 nt, Human
aaaugcacucugcuucugugac

SEQ ID NO: 908263 - RNA, 22 nt, Human
gcugaaguguggagugacaguu

SEQ ID NO: 908264 - RNA, 22 nt, Human
uuagaaacccagacucuuaggu

SEQ ID NO: 908265 - RNA, 22 nt, Human
auguguguaaacaaguauaauu

SEQ ID NO: 908266 - RNA, 19 nt, Human
ucgcagaccugaguucuaa

SEQ ID NO: 908267 - RNA, 22 nt, Human
ucucuucacaugcuugcuccaa

SEQ ID NO: 908268 - RNA, 22 nt, Human
cccuuuccauggcucuccuagg

SEQ ID NO: 908269 - RNA, 20 nt, Human
ccuggcugcauucaggacgg

SEQ ID NO: 908270 - RNA, 22 nt, Human
ugaccugucacauuuugaugaa

SEQ ID NO: 908271 - RNA, 22 nt, Human
gaagcuucgaaagagugauuuc

SEQ ID NO: 908272 - RNA, 23 nt, Human
ugcugccaagcacgaguugaguu

SEQ ID NO: 908273 - RNA, 22 nt, Human
caguacuugggggguucuaagu

SEQ ID NO: 908274 - RNA, 22 nt, Human
agagcugugcuuugcaccacgu

SEQ ID NO: 908275 - RNA, 22 nt, Human
uggcaaggaaauuaguucuccu

SEQ ID NO: 908276 - RNA, 22 nt, Human
guuccaggcaguggcaacagcu

SEQ ID NO: 908277 - RNA, 22 nt, Human
acuguucuccagcauggcugua

SEQ ID NO: 908278 - RNA, 22 nt, Human
gcuggggcugggcugaggaaga

SEQ ID NO: 908279 - RNA, 22 nt, Human
uuaaauucauuccaacuuuuga

SEQ ID NO: 908280 - RNA, 22 nt, Human
guacuacaguuucucauuaaau

SEQ ID NO: 908281 - RNA, 22 nt, Human
aggucagaagugccagggaauu

SEQ ID NO: 908282 - RNA, 22 nt, Human
aaagggaaguugcacauguucc

SEQ ID NO: 908283 - RNA, 22 nt, Human
caaguuaucagaaggcacuuuu

SEQ ID NO: 908284 - RNA, 22 nt, Human
aaaugcagauucaugagcccca

SEQ ID NO: 908285 - RNA, 19 nt, Human
ugucccuggucaccagacu

SEQ ID NO: 908286 - RNA, 22 nt, Human
cuggcaccuccagcucauggcc

SEQ ID NO: 908287 - RNA, 22 nt, Human
ucaguaacuucaugaccaagca

SEQ ID NO: 908288 - RNA, 22 nt, Human
uucauaaacaacugaugguaau

SEQ ID NO: 908289 - RNA, 22 nt, Human
gucucuuguuaucauuucugag

SEQ ID NO: 908290 - RNA, 22 nt, Human
cccuggcugcuaccagguagcu

SEQ ID NO: 908291 - RNA, 22 nt, Human
aucaggaacguucauggacugu

SEQ ID NO: 908292 - RNA, 22 nt, Human
cagagggacaguguaaugcaua

SEQ ID NO: 908293 - RNA, 22 nt, Human
ggaggccaccauggagucacuu

SEQ ID NO: 908294 - RNA, 22 nt, Human
agaggaggccaggcccacaccu

SEQ ID NO: 908295 - RNA, 22 nt, Human
ggccagcuacccaucugcguca

SEQ ID NO: 908296 - RNA, 20 nt, Human
gcaucaagguacgcucucca

SEQ ID NO: 908297 - RNA, 22 nt, Human
ucuuuauguuugaaaguacaau

SEQ ID NO: 908298 - RNA, 19 nt, Human
agcugcugauugguggagg

SEQ ID NO: 908299 - RNA, 22 nt, Human
acaguuaaucaaauggcauaug

SEQ ID NO: 908300 - RNA, 22 nt, Human
uuucagagcucagcagcuagag

SEQ ID NO: 908301 - RNA, 22 nt, Human
guuuaauuuuagguugucaagc

SEQ ID NO: 908302 - RNA, 22 nt, Human
uuauuccaauuucuccuacaaa

SEQ ID NO: 908303 - RNA, 19 nt, Human
gugucaggaugugcagggg

SEQ ID NO: 908304 - RNA, 22 nt, Human
uauuaguagcuugaaauuggug

SEQ ID NO: 908305 - RNA, 22 nt, Human
cagcagaacaggcagggaagcu

SEQ ID NO: 908306 - RNA, 19 nt, Human
uggucagcauuaggauuug

SEQ ID NO: 908307 - RNA, 22 nt, Human
ggcugccugaggcugaggcccg

SEQ ID NO: 908308 - RNA, 22 nt, Human
ucagguccuuacugugcucccu

SEQ ID NO: 908309 - RNA, 22 nt, Human
ucaguguguaauucuuuguuuc

SEQ ID NO: 908310 - RNA, 22 nt, Human
aaggacugucuaaggccuccaa

SEQ ID NO: 908311 - RNA, 23 nt, Human
agugcucagggcauuaggcuaga

SEQ ID NO: 908312 - RNA, 19 nt, Human
aggauggagcaggcgguga

SEQ ID NO: 908313 - RNA, 19 nt, Human
cucuggccucuggaugcug

SEQ ID NO: 908314 - RNA, 22 nt, Human
cuguuauuuaugcugcuccauu

SEQ ID NO: 908315 - RNA, 22 nt, Human
aaaaggcagugcaagagagggu

SEQ ID NO: 908316 - RNA, 22 nt, Human
agggcagaggcggacacggaag

SEQ ID NO: 908317 - RNA, 22 nt, Human
uuccucagagagacagaaacua

SEQ ID NO: 908318 - RNA, 22 nt, Human
uaggaagcauuuaaagagaugg

SEQ ID NO: 908319 - RNA, 22 nt, Human
gcagcagcagcaauuuucuguc

SEQ ID NO: 908320 - RNA, 22 nt, Human
acagggaagcucaggggcucug

SEQ ID NO: 908321 - RNA, 23 nt, Human
uggagcugggcagcugggaaagu

SEQ ID NO: 908322 - RNA, 22 nt, Human
gaaggccuaggaaggaagccuu

SEQ ID NO: 908323 - RNA, 22 nt, Human
ccaggccucccuuuuccagcca

SEQ ID NO: 908324 - RNA, 22 nt, Human
uauuaauuuaaucuccauggua

SEQ ID NO: 908325 - RNA, 22 nt, Human
ccugcauguggucagcacuccu

SEQ ID NO: 908326 - RNA, 22 nt, Human
gggauggggagcuggaaagggg

SEQ ID NO: 908327 - RNA, 22 nt, Human
cagcaggacauggaggaguaaa

SEQ ID NO: 908328 - RNA, 22 nt, Human
agcagcaugaugacagagucuc

SEQ ID NO: 908329 - RNA, 22 nt, Human
gucuagaaauagguuucagaaa

SEQ ID NO: 908330 - RNA, 22 nt, Human
augaggcagguggaggcugcca

SEQ ID NO: 908331 - RNA, 22 nt, Human
cauaaagucaugaucugaguau

SEQ ID NO: 908332 - RNA, 22 nt, Human
aaacuuuaagacaguccucaag

SEQ ID NO: 908333 - RNA, 22 nt, Human
gacacagaugaucaggugugga

SEQ ID NO: 908334 - RNA, 22 nt, Human
ugguuugagagugugagcuuuu

SEQ ID NO: 908335 - RNA, 22 nt, Human
ggaaaagacagaauucuagaau

SEQ ID NO: 908336 - RNA, 22 nt, Human
uguuugcuguuuucuccaauga

SEQ ID NO: 908337 - RNA, 22 nt, Human
aguacaguggucauaauauaaa

SEQ ID NO: 908338 - RNA, 22 nt, Human
gcugaagauaagugaagaggcu

SEQ ID NO: 908339 - RNA, 22 nt, Human
gacacugaagucacuaagcagg

SEQ ID NO: 908340 - RNA, 22 nt, Human
aaagacaguggauucaaaaucc

SEQ ID NO: 908341 - RNA, 21 nt, Human
cacuauuuauauaugccagcu

SEQ ID NO: 908342 - RNA, 22 nt, Human
aaagauacuuaauaguugucug

SEQ ID NO: 908343 - RNA, 22 nt, Human
caugggcuuuggaggcuggagg

SEQ ID NO: 908344 - RNA, 22 nt, Human
auaaauagugugucauaaaguc

SEQ ID NO: 908345 - RNA, 22 nt, Human
uagcaagaccaauauguagaua

SEQ ID NO: 908346 - RNA, 22 nt, Human
agcuggaggauaacucacuucu

SEQ ID NO: 908347 - RNA, 19 nt, Human
acaaaugauguugcacuga

SEQ ID NO: 908348 - RNA, 22 nt, Human
ugacacaauugagugguacuau

SEQ ID NO: 908349 - RNA, 23 nt, Human
acagagacugccaagauauucuc

SEQ ID NO: 908350 - RNA, 22 nt, Human
agaaucagugcuggcuauuagc

SEQ ID NO: 908351 - RNA, 21 nt, Human
gugugaguagcaugugucuca

SEQ ID NO: 908352 - RNA, 22 nt, Human
ucagcugcgacaggggccugag

SEQ ID NO: 908353 - RNA, 22 nt, Human
cugaggcacugucagcugaggc

SEQ ID NO: 908354 - RNA, 22 nt, Human
aucccauaggguuaucauaggg

SEQ ID NO: 908355 - RNA, 22 nt, Human
uucaugaaaaggucuauuucuu

SEQ ID NO: 908356 - RNA, 22 nt, Human
aggcagagcuggguuuugaaau

SEQ ID NO: 908357 - RNA, 22 nt, Human
cuccugggggacagcggcaggg

SEQ ID NO: 908358 - RNA, 22 nt, Human
agucagugaaaacuagaauguu

SEQ ID NO: 908359 - RNA, 23 nt, Human
aggcauggcauggaugguggcuc

SEQ ID NO: 908360 - RNA, 23 nt, Human
ucugggaauuggcuguccacagg

SEQ ID NO: 908361 - RNA, 22 nt, Human
uccugcagccauuagaggucaa

SEQ ID NO: 908362 - RNA, 22 nt, Human
cacccagccuucacacaggagu

SEQ ID NO: 908363 - RNA, 22 nt, Human
auauggaaauagcaauaugguu

SEQ ID NO: 908364 - RNA, 22 nt, Human
aaacugaaacaucaucauguug

SEQ ID NO: 908365 - RNA, 22 nt, Human
cccaggccuggucugggccagu

SEQ ID NO: 908366 - RNA, 22 nt, Human
ugagcccaggaguuggaggcug

SEQ ID NO: 908367 - RNA, 22 nt, Human
acuacacagggaugugacuacc

SEQ ID NO: 908368 - RNA, 22 nt, Human
agcaaauggguuuauauuugac

SEQ ID NO: 908369 - RNA, 22 nt, Human
cucagaggucaagagcagagcu

SEQ ID NO: 908370 - RNA, 22 nt, Human
uaagguuucuucagauacuagu

SEQ ID NO: 908371 - RNA, 22 nt, Human
agccaggacagggcagcucgcu

SEQ ID NO: 908372 - RNA, 22 nt, Human
uaggucucucuucuugauggga

SEQ ID NO: 908373 - RNA, 20 nt, Human
agaaccuaaguuaaaacaca

SEQ ID NO: 908374 - RNA, 22 nt, Human
ucugccagcucugugggucucg

SEQ ID NO: 908375 - RNA, 22 nt, Human
uuaaaggaauugaguuucuugu

SEQ ID NO: 908376 - RNA, 22 nt, Human
ugugugucuggaagcucaggga

SEQ ID NO: 908377 - RNA, 22 nt, Human
caguacaguaaagcaagcugaa

SEQ ID NO: 908378 - RNA, 22 nt, Human
caacaagcgcucagagcaaagc

SEQ ID NO: 908379 - RNA, 22 nt, Human
gugugccaccacugacaggauu

SEQ ID NO: 908380 - RNA, 22 nt, Human
aaugcauugauugcuggaaaua

SEQ ID NO: 908381 - RNA, 22 nt, Human
acugcacacauguuuaagugga

SEQ ID NO: 908382 - RNA, 22 nt, Human
caggcuggagugcaauggugcu

SEQ ID NO: 908383 - RNA, 22 nt, Human
cuucuucaauagcaagcgcaua

SEQ ID NO: 908384 - RNA, 22 nt, Human
gaaauacaauuuugucccagcu

SEQ ID NO: 908385 - RNA, 21 nt, Human
uuucaguguaugacagugaaa

SEQ ID NO: 908386 - RNA, 22 nt, Human
uagaaacaaagaccugggugcu

SEQ ID NO: 908387 - RNA, 22 nt, Human
uagaaaucagguuuuuagaaag

SEQ ID NO: 908388 - RNA, 22 nt, Human
cccaggcugaguuagagguguc

SEQ ID NO: 908389 - RNA, 22 nt, Human
aguguuucccaguaggaugaaa

SEQ ID NO: 908390 - RNA, 22 nt, Human
aguucacagaauggccagaacu

SEQ ID NO: 908391 - RNA, 22 nt, Human
caugugugguuaccuacuugac

SEQ ID NO: 908392 - RNA, 21 nt, Human
ggcccugguuacgccuccucu

SEQ ID NO: 908393 - RNA, 21 nt, Human
cauuuacaugacagauugguu

SEQ ID NO: 908394 - RNA, 22 nt, Human
uuucuaagaugugguuucaagg

SEQ ID NO: 908395 - RNA, 19 nt, Human
agccagggugagaaggagc

SEQ ID NO: 908396 - RNA, 22 nt, Human
gaguaacauaccaaaauucaca

SEQ ID NO: 908397 - RNA, 22 nt, Human
aacauguaaauaucauuguacu

SEQ ID NO: 908398 - RNA, 22 nt, Human
agggagcuauuucaggguuauu

SEQ ID NO: 908399 - RNA, 22 nt, Human
ggcuggacuugguccuguuuug

SEQ ID NO: 908400 - RNA, 22 nt, Human
uucccagucccaagaaaagcca

SEQ ID NO: 908401 - RNA, 22 nt, Human
cagguuaguaaggucuacauaa

SEQ ID NO: 908402 - RNA, 22 nt, Human
ugaggcugacaaaagaugaggu

SEQ ID NO: 908403 - RNA, 22 nt, Human
ugcugggggcuuucuggauacc

SEQ ID NO: 908404 - RNA, 22 nt, Human
agcccccaggagucuccacgcc

SEQ ID NO: 908405 - RNA, 22 nt, Human
aagggccaucccagaacagaaa

SEQ ID NO: 908406 - RNA, 22 nt, Human
acagucuggaggcugcuucauu

SEQ ID NO: 908407 - RNA, 22 nt, Human
guauuuccuauagugagggccu

SEQ ID NO: 908408 - RNA, 20 nt, Human
caaaucacagguaauugcaa

SEQ ID NO: 908409 - RNA, 22 nt, Human
ucugggccagaucuagggaucu

SEQ ID NO: 908410 - RNA, 22 nt, Human
ugauauguaacuacuccuuaua

SEQ ID NO: 908411 - RNA, 22 nt, Human
gggagcuucuggaaggcaggaa

SEQ ID NO: 908412 - RNA, 21 nt, Human
uggcauggagguagcagugug

SEQ ID NO: 908413 - RNA, 22 nt, Human
uucuucagugccccucuaguag

SEQ ID NO: 908414 - RNA, 22 nt, Human
caaggccuaaucauacugcuaa

SEQ ID NO: 908415 - RNA, 22 nt, Human
auuucuguaguccacauucuuu

SEQ ID NO: 908416 - RNA, 22 nt, Human
agccaaauacaaacuggggugg

SEQ ID NO: 908417 - RNA, 22 nt, Human
uucagcuugcugacugcggcag

SEQ ID NO: 908418 - RNA, 22 nt, Human
uggcucagagcagggacucugg

SEQ ID NO: 908419 - RNA, 18 nt, Human
ggaaaaggagugucuagc

SEQ ID NO: 908420 - RNA, 22 nt, Human
aacccacucuaccuggcuccau

SEQ ID NO: 908421 - RNA, 22 nt, Human
gucacacucuucccuccacaug

SEQ ID NO: 908422 - RNA, 22 nt, Human
auagcaaauucuuuaggugcuu

SEQ ID NO: 908423 - RNA, 22 nt, Human
auuucuagacuuagaacucuua

SEQ ID NO: 908424 - RNA, 22 nt, Human
ccaggccuggacggguggccug

SEQ ID NO: 908425 - RNA, 21 nt, Human
ggcacugagccagauggacuc

SEQ ID NO: 908426 - RNA, 22 nt, Human
auucuaggcuugaaacaugaag

SEQ ID NO: 908427 - RNA, 21 nt, Human
ugaucacaugaaaaccaugca

SEQ ID NO: 908428 - RNA, 22 nt, Human
guggcauuuuagaacagcugac

SEQ ID NO: 908429 - RNA, 22 nt, Human
uggggccagggaggaccagaca

SEQ ID NO: 908430 - RNA, 22 nt, Human
aggaaggacugcagcauuuggu

SEQ ID NO: 908431 - RNA, 22 nt, Human
gcagcaugugccuuaaaucauu

SEQ ID NO: 908432 - RNA, 22 nt, Human
aguauacauagagauggcuguu

SEQ ID NO: 908433 - RNA, 22 nt, Human
ugcaaguaugacagccccaugg

SEQ ID NO: 908434 - RNA, 22 nt, Human
gaccuugguugagcuuccuaau

SEQ ID NO: 908435 - RNA, 22 nt, Human
acuccagacacagacacuauga

SEQ ID NO: 908436 - RNA, 22 nt, Human
gcagccacuaguuuuccuguuu

SEQ ID NO: 908437 - RNA, 22 nt, Human
uggucagagaaguagggacaau

SEQ ID NO: 908438 - RNA, 22 nt, Human
ucauuacacaguucaguggaaa

SEQ ID NO: 908439 - RNA, 22 nt, Human
uguuuucaugguuaugugucua

SEQ ID NO: 908440 - RNA, 22 nt, Human
uccucucugcacuggcccugcc

SEQ ID NO: 908441 - RNA, 22 nt, Human
cacauuuaaagguugaagcuga

SEQ ID NO: 908442 - RNA, 22 nt, Human
agaugcauguuuaugucuuucc

SEQ ID NO: 908443 - RNA, 22 nt, Human
ugcuccagcaccaagagcucca

SEQ ID NO: 908444 - RNA, 22 nt, Human
aggcagguuuacucuuauuugg

SEQ ID NO: 908445 - RNA, 20 nt, Human
ccuccaggcacacccaugug

SEQ ID NO: 908446 - RNA, 22 nt, Human
gcccugugugaucacaugaaca

SEQ ID NO: 908447 - RNA, 22 nt, Human
ugacuauguggccuugaccaag

SEQ ID NO: 908448 - RNA, 22 nt, Human
gggcacuguggggcccaugcug

SEQ ID NO: 908449 - RNA, 23 nt, Human
uuguaaaacagugugacgguucc

SEQ ID NO: 908450 - RNA, 23 nt, Human
uuugcaaauuuuccugacuacuc

SEQ ID NO: 908451 - RNA, 22 nt, Human
aaugucaagggaagcaggaaau

SEQ ID NO: 908452 - RNA, 22 nt, Human
gcaagcuggcuguuagaggaug

SEQ ID NO: 908453 - RNA, 22 nt, Human
uuauuauagauuaugcaagauu

SEQ ID NO: 908454 - RNA, 20 nt, Human
ggcugcaggacucauuggcu

SEQ ID NO: 908455 - RNA, 22 nt, Human
caucaaagggccuguggugcag

SEQ ID NO: 908456 - RNA, 22 nt, Human
gcuggagcugaguucccugggc

SEQ ID NO: 908457 - RNA, 22 nt, Human
acacauuaucucauuaaauacu

SEQ ID NO: 908458 - RNA, 22 nt, Human
accugaaaauuauuauuuccgc

SEQ ID NO: 908459 - RNA, 22 nt, Human
augaaaugugaaugcuuuucau

SEQ ID NO: 908460 - RNA, 22 nt, Human
uuggagucagaugacuguagga

SEQ ID NO: 908461 - RNA, 22 nt, Human
ggagcuggagaguacagaguuu

SEQ ID NO: 908462 - RNA, 22 nt, Human
ugcagugagaagcaguuaugau

SEQ ID NO: 908463 - RNA, 22 nt, Human
ugaaggcuugguggcagccucu

SEQ ID NO: 908464 - RNA, 22 nt, Human
cuguuuccaccuucauggcuaa

SEQ ID NO: 908465 - RNA, 22 nt, Human
uucuuucuuagcaaucuauggu

SEQ ID NO: 908466 - RNA, 22 nt, Human
acuaucaacaucauugcucuag

SEQ ID NO: 908467 - RNA, 22 nt, Human
acagaaaaaugagggagcugga

SEQ ID NO: 908468 - RNA, 22 nt, Human
gccaggucaccucacucaucca

SEQ ID NO: 908469 - RNA, 22 nt, Human
uguuuucuuccuaauugcucau

SEQ ID NO: 908470 - RNA, 21 nt, Human
ucaggaguggagagaauuggu

SEQ ID NO: 908471 - RNA, 22 nt, Human
gcagggcuguuuagugaauagg

SEQ ID NO: 908472 - RNA, 23 nt, Human
ucacaggggccagcgcucugugg

SEQ ID NO: 908473 - RNA, 22 nt, Human
acuuggcaaacaacguggauau

SEQ ID NO: 908474 - RNA, 22 nt, Human
uauuuuaaagugaagggucuug

SEQ ID NO: 908475 - RNA, 22 nt, Human
gaacacugagagagaugggcag

SEQ ID NO: 908476 - RNA, 22 nt, Human
aagcagauuggggauuuccaug

SEQ ID NO: 908477 - RNA, 22 nt, Human
cgugugcgugcauaugcacaag

SEQ ID NO: 908478 - RNA, 22 nt, Human
acagaaugggauuugaauauuu

SEQ ID NO: 908479 - RNA, 22 nt, Human
gagaacuucaggauuauucaag

SEQ ID NO: 908480 - RNA, 22 nt, Human
gaaguuuauuucaaucuauuca

SEQ ID NO: 908481 - RNA, 22 nt, Human
auguccaugcuuugcuccagaa

SEQ ID NO: 908482 - RNA, 22 nt, Human
ugucauguuucauguuuguagg

SEQ ID NO: 908483 - RNA, 22 nt, Human
uacugaaauagcacucugaugc

SEQ ID NO: 908484 - RNA, 22 nt, Human
gcccaggauggagaauaguggu

SEQ ID NO: 908485 - RNA, 22 nt, Human
uucuggacuugccuugcugaug

SEQ ID NO: 908486 - RNA, 22 nt, Human
cccagaaggcuugccaggaagc

SEQ ID NO: 908487 - RNA, 19 nt, Human
uuuuguguagcugcugguu

SEQ ID NO: 908488 - RNA, 22 nt, Human
ucaggggcuugaggugcauguc

SEQ ID NO: 908489 - RNA, 22 nt, Human
agagugaaaagcuagagcagua

SEQ ID NO: 908490 - RNA, 22 nt, Human
aagucugaucauuucuucuaua

SEQ ID NO: 908491 - RNA, 22 nt, Human
uaacaaugauuagugacuacag

SEQ ID NO: 908492 - RNA, 22 nt, Human
caugugugacaaacugccugca

SEQ ID NO: 908493 - RNA, 22 nt, Human
ccuguacuagggucucauugcc

SEQ ID NO: 908494 - RNA, 19 nt, Human
acuccagggaugacagaag

SEQ ID NO: 908495 - RNA, 19 nt, Human
ucauuuguuaguagaaguu

SEQ ID NO: 908496 - RNA, 22 nt, Human
ggcaggguuucuccauucugcc

SEQ ID NO: 908497 - RNA, 22 nt, Human
ggcucuucuguuucacaggcca

SEQ ID NO: 908498 - RNA, 22 nt, Human
ugucucagggcagcagcagggg

SEQ ID NO: 908499 - RNA, 22 nt, Human
aaagugcaccugcuucuucuug

SEQ ID NO: 908500 - RNA, 22 nt, Human
uacuaguucucauaugaaauaa

SEQ ID NO: 908501 - RNA, 22 nt, Human
uuucaguggagugacaugaucu

SEQ ID NO: 908502 - RNA, 22 nt, Human
aacuaguaaaagcaacaguaua

SEQ ID NO: 908503 - RNA, 22 nt, Human
augucagauuccuaaauaucuu

SEQ ID NO: 908504 - RNA, 22 nt, Human
ugagaaagacagacauuccuaa

SEQ ID NO: 908505 - RNA, 22 nt, Human
ugcccccugguggccagagccg

SEQ ID NO: 908506 - RNA, 22 nt, Human
accaucuuuuccucugccuccu

SEQ ID NO: 908507 - RNA, 22 nt, Human
aauuucucgguuuugauauugu

SEQ ID NO: 908508 - RNA, 18 nt, Human
agggcugaugaguuuggg

SEQ ID NO: 908509 - RNA, 22 nt, Human
uaugcugcaauaucauuuugcu

SEQ ID NO: 908510 - RNA, 18 nt, Human
ugcuuuaugcuuauauaa

SEQ ID NO: 908511 - RNA, 22 nt, Human
cuaaaugugcuaauagcaugaa

SEQ ID NO: 908512 - RNA, 22 nt, Human
ucacagaauaaauugagaagac

SEQ ID NO: 908513 - RNA, 22 nt, Human
ugaggcucuccaagcagaugag

SEQ ID NO: 908514 - RNA, 22 nt, Human
cuauuuauuguggguauccagg

SEQ ID NO: 908515 - RNA, 22 nt, Human
aggcucagauucacauuugguu

SEQ ID NO: 908516 - RNA, 22 nt, Human
gacacagacaguuagagguaau

SEQ ID NO: 908517 - RNA, 22 nt, Human
acaaaugucuccucuuuuguua

SEQ ID NO: 908518 - RNA, 22 nt, Human
cuguggaguggggaguacuggu

SEQ ID NO: 908519 - RNA, 22 nt, Human
ucugcugugauucuacuagugu

SEQ ID NO: 908520 - RNA, 22 nt, Human
agaaagggagagccagcacacg

SEQ ID NO: 908521 - RNA, 22 nt, Human
gagcugagaucauguacacuag

SEQ ID NO: 908522 - RNA, 22 nt, Human
ccugcagacacuuguccagcaa

SEQ ID NO: 908523 - RNA, 22 nt, Human
aaaguccuuuuugccaugcaag

SEQ ID NO: 908524 - RNA, 22 nt, Human
uugaauuauaagugugucuacu

SEQ ID NO: 908525 - RNA, 22 nt, Human
uccugggauucugcauuucuaa

SEQ ID NO: 908526 - RNA, 22 nt, Human
cacaguacccagcacuacugag

SEQ ID NO: 908527 - RNA, 21 nt, Human
auaucuucuucaaaccacuca

SEQ ID NO: 908528 - RNA, 22 nt, Human
uagaauccaccuacacaagaga

SEQ ID NO: 908529 - RNA, 22 nt, Human
uuguuuauggauuguagaaacu

SEQ ID NO: 908530 - RNA, 19 nt, Human
auggaagcugggaucaaug

SEQ ID NO: 908531 - RNA, 22 nt, Human
ccucaggcaggaaacugucccg

SEQ ID NO: 908532 - RNA, 22 nt, Human
gcagggaaacaggugcuaagga

SEQ ID NO: 908533 - RNA, 22 nt, Human
aaaugcuguagaucagugaguu

SEQ ID NO: 908534 - RNA, 22 nt, Human
auuccuuggaacagaugcgaag

SEQ ID NO: 908535 - RNA, 18 nt, Human
agaggggagguaagucug

SEQ ID NO: 908536 - RNA, 22 nt, Human
ugguggcagcugggacagaggu

SEQ ID NO: 908537 - RNA, 22 nt, Human
uaaguacaaauguauacauaag

SEQ ID NO: 908538 - RNA, 17 nt, Human
ggugagaccucccacuc

SEQ ID NO: 908539 - RNA, 22 nt, Human
gccugagauucugcauuucuaa

SEQ ID NO: 908540 - RNA, 22 nt, Human
uagaaaagauaacauucugugc

SEQ ID NO: 908541 - RNA, 22 nt, Human
cuucagauccuaauuugucuuu

SEQ ID NO: 908542 - RNA, 22 nt, Human
uaggaccccugugguagauggg

SEQ ID NO: 908543 - RNA, 22 nt, Human
gagcagccugaggagcgugggc

SEQ ID NO: 908544 - RNA, 22 nt, Human
gggcuugguggagagaaugcug

SEQ ID NO: 908545 - RNA, 22 nt, Human
aaaugccucugcuguacacaau

SEQ ID NO: 908546 - RNA, 22 nt, Human
auuucauacuaaggcucaaaaa

SEQ ID NO: 908547 - RNA, 22 nt, Human
gugagagggcugggcucaugau

SEQ ID NO: 908548 - RNA, 22 nt, Human
aaagcuucuauucacuuacuug

SEQ ID NO: 908549 - RNA, 22 nt, Human
ugaguccaccuuaguauauggg

SEQ ID NO: 908550 - RNA, 22 nt, Human
cuuguuaucugaaccaaaauua

SEQ ID NO: 908551 - RNA, 22 nt, Human
cagccugcagggcugccuguug

SEQ ID NO: 908552 - RNA, 22 nt, Human
aaauugcauugagcugcuuauu

SEQ ID NO: 908553 - RNA, 20 nt, Human
aguggcaggcgaucauuacu

SEQ ID NO: 908554 - RNA, 22 nt, Human
gugugcagggaugagugcaggu

SEQ ID NO: 908555 - RNA, 22 nt, Human
guggaaggugaaggagcagcga

SEQ ID NO: 908556 - RNA, 22 nt, Human
ggaggugguuugauuucuauau

SEQ ID NO: 908557 - RNA, 23 nt, Human
gccugggucuagagauaagagcc

SEQ ID NO: 908558 - RNA, 22 nt, Human
agggagcugacuggcugccauu

SEQ ID NO: 908559 - RNA, 22 nt, Human
agggaugugacauuacagaagc

SEQ ID NO: 908560 - RNA, 22 nt, Human
uggcccgccggaagaagauguc

SEQ ID NO: 908561 - RNA, 21 nt, Human
uucaaaaugguguguuugucu

SEQ ID NO: 908562 - RNA, 22 nt, Human
agaaccaugaguuugaguaucu

SEQ ID NO: 908563 - RNA, 22 nt, Human
aggaagcucauuuugacauauc

SEQ ID NO: 908564 - RNA, 22 nt, Human
guauaugagcucuauguaaugg

SEQ ID NO: 908565 - RNA, 22 nt, Human
ggcagggaaacagcugauccca

SEQ ID NO: 908566 - RNA, 22 nt, Human
guauuuuauggccuggggccua

SEQ ID NO: 908567 - RNA, 22 nt, Human
ugaacgcagguccacauggcuc

SEQ ID NO: 908568 - RNA, 20 nt, Human
aguuauaguaucuagccaug

SEQ ID NO: 908569 - RNA, 22 nt, Human
cagacugacuuucuguggcuau

SEQ ID NO: 908570 - RNA, 22 nt, Human
caggcuggagugcaauggcaca

SEQ ID NO: 908571 - RNA, 22 nt, Human
cagcucugagacugaggcuaug

SEQ ID NO: 908572 - RNA, 22 nt, Human
cugcugugcuuguggccacccg

SEQ ID NO: 908573 - RNA, 23 nt, Human
gggaaaggauaugauccuagggg

SEQ ID NO: 908574 - RNA, 22 nt, Human
acaccagggccuagccagggcg

SEQ ID NO: 908575 - RNA, 22 nt, Human
acuugcagcagcagcuauuggc

SEQ ID NO: 908576 - RNA, 22 nt, Human
ccuggcaggcaagaggaaggga

SEQ ID NO: 908577 - RNA, 22 nt, Human
acauuuacagugcuagacaauc

SEQ ID NO: 908578 - RNA, 22 nt, Human
auuuugaagggaauugaaguuc

SEQ ID NO: 908579 - RNA, 22 nt, Human
aaggucuaugaggccagaacau

SEQ ID NO: 908580 - RNA, 22 nt, Human
aggggccucagccuccugguca

SEQ ID NO: 908581 - RNA, 22 nt, Human
uaggcgacagcuugauggugcg

SEQ ID NO: 908582 - RNA, 22 nt, Human
auuaggcauauaugcuuuuaau

SEQ ID NO: 908583 - RNA, 20 nt, Human
acauuuuggcauacucucaa

SEQ ID NO: 908584 - RNA, 22 nt, Human
ggagagagagcucauuagcugc

SEQ ID NO: 908585 - RNA, 22 nt, Human
aagacgggagucaggugagcuc

SEQ ID NO: 908586 - RNA, 22 nt, Human
aacauucagcuggguggagcag

SEQ ID NO: 908587 - RNA, 22 nt, Human
uguacaguacauguguagugau

SEQ ID NO: 908588 - RNA, 22 nt, Human
ucuuucuucuuucauaguguga

SEQ ID NO: 908589 - RNA, 22 nt, Human
auggaucacagugccgugggug

SEQ ID NO: 908590 - RNA, 22 nt, Human
gcugcagccuucuugccauuaa

SEQ ID NO: 908591 - RNA, 22 nt, Human
gcugaaauuagacugcagaagu

SEQ ID NO: 908592 - RNA, 22 nt, Human
cugcccugcuuguuuccagugg

SEQ ID NO: 908593 - RNA, 22 nt, Human
ugagagcaacacgcaguaguau

SEQ ID NO: 908594 - RNA, 22 nt, Human
uauaaauuauuaggcugcuaaa

SEQ ID NO: 908595 - RNA, 22 nt, Human
ugucuuuugccaaagaucaguu

SEQ ID NO: 908596 - RNA, 22 nt, Human
agcuggcagggguucacacugc

SEQ ID NO: 908597 - RNA, 23 nt, Human
ucagaggaucaucaaacguuuuc

SEQ ID NO: 908598 - RNA, 22 nt, Human
cacaugcaugccaggcucacag

SEQ ID NO: 908599 - RNA, 22 nt, Human
caagggaguugcugcaugcagg

SEQ ID NO: 908600 - RNA, 22 nt, Human
cuggaaggcucugcugccuguc

SEQ ID NO: 908601 - RNA, 22 nt, Human
caguccagccaguagggugugg

SEQ ID NO: 908602 - RNA, 22 nt, Human
uuuuuuauaucaacugaagucu

SEQ ID NO: 908603 - RNA, 21 nt, Human
agcugcaagagcaacaucuuu

SEQ ID NO: 908604 - RNA, 22 nt, Human
acuauacugucucuuauagaua

SEQ ID NO: 908605 - RNA, 22 nt, Human
gacaagacaugugaugacauca

SEQ ID NO: 908606 - RNA, 22 nt, Human
augucauuaaaauugugcugca

SEQ ID NO: 908607 - RNA, 22 nt, Human
acacaguaugacauuggcagag

SEQ ID NO: 908608 - RNA, 22 nt, Human
agggguuggacauaagacagaa

SEQ ID NO: 908609 - RNA, 22 nt, Human
gugggcuguuguucccuguucu

SEQ ID NO: 908610 - RNA, 22 nt, Human
ggccccaggaccuccacggucc

SEQ ID NO: 908611 - RNA, 21 nt, Human
uaaaagaugacaagacagcuc

SEQ ID NO: 908612 - RNA, 22 nt, Human
ugcaggaauagcuacagagcug

SEQ ID NO: 908613 - RNA, 22 nt, Human
cagggcccauggcucagguagg

SEQ ID NO: 908614 - RNA, 22 nt, Human
caucccugcccucaugccuaua

SEQ ID NO: 908615 - RNA, 18 nt, Human
ugaggaaggggaaguauu

SEQ ID NO: 908616 - RNA, 22 nt, Human
uccaggagcauccaggugaagc

SEQ ID NO: 908617 - RNA, 22 nt, Human
uaguauuugcagauuuguguca

SEQ ID NO: 908618 - RNA, 22 nt, Human
ugcuacaggcgauccucaacua

SEQ ID NO: 908619 - RNA, 22 nt, Human
aaugaucacugcaguugaugag

SEQ ID NO: 908620 - RNA, 22 nt, Human
caggucuguuuucaaggucagu

SEQ ID NO: 908621 - RNA, 22 nt, Human
acagaaagaccuuguaacacuu

SEQ ID NO: 908622 - RNA, 22 nt, Human
cuuuuaaugggagcaguauuug

SEQ ID NO: 908623 - RNA, 22 nt, Human
ggugugugaggagucacuuagu

SEQ ID NO: 908624 - RNA, 22 nt, Human
aaaagaguguuucaacuuuggc

SEQ ID NO: 908625 - RNA, 22 nt, Human
caggaugugaggaggccauuug

SEQ ID NO: 908626 - RNA, 22 nt, Human
ccaagggcuauuuacagaacag

SEQ ID NO: 908627 - RNA, 22 nt, Human
auucuacaccucucucauuuag

SEQ ID NO: 908628 - RNA, 22 nt, Human
cuuugucauuuugucucucagu

SEQ ID NO: 908629 - RNA, 22 nt, Human
ugcucugggcuaucugagaaag

SEQ ID NO: 908630 - RNA, 22 nt, Human
uuggcagagggaccagccuaca

SEQ ID NO: 908631 - RNA, 22 nt, Human
uuugggaauagcagggacugag

SEQ ID NO: 908632 - RNA, 22 nt, Human
agggaaugcuccguauaaaucu

SEQ ID NO: 908633 - RNA, 21 nt, Human
aaaugaaugugguagugcaag

SEQ ID NO: 908634 - RNA, 22 nt, Human
aaguguuuccgggagacuuggu

SEQ ID NO: 908635 - RNA, 22 nt, Human
agccaggcuacuccuugcugac

SEQ ID NO: 908636 - RNA, 22 nt, Human
caacaguauugugggccaggua

SEQ ID NO: 908637 - RNA, 22 nt, Human
uuauuauugugguugcauuauc

SEQ ID NO: 908638 - RNA, 22 nt, Human
agcuggcugccuucuccuuagg

SEQ ID NO: 908639 - RNA, 22 nt, Human
aauucaguuggcaaacaugcug

SEQ ID NO: 908640 - RNA, 22 nt, Human
gaaaauaggcugcaucuccuuc

SEQ ID NO: 908641 - RNA, 22 nt, Human
gccuuuugaucuauaacugugu

SEQ ID NO: 908642 - RNA, 22 nt, Human
gcugcaagugcauguugcaacu

SEQ ID NO: 908643 - RNA, 22 nt, Human
auccuuagguggugcaucaggg

SEQ ID NO: 908644 - RNA, 19 nt, Human
uggaggccaggacacaggu

SEQ ID NO: 908645 - RNA, 22 nt, Human
uggcuucuugacuucuuggcug

SEQ ID NO: 908646 - RNA, 22 nt, Human
uuacaaagaaaauuaggcauuu

SEQ ID NO: 908647 - RNA, 22 nt, Human
uaaccuuuguucaauguaagau

SEQ ID NO: 908648 - RNA, 22 nt, Human
cagugcugcaucuccaugccag

SEQ ID NO: 908649 - RNA, 22 nt, Human
uggagcaggcaucuuucucucu

SEQ ID NO: 908650 - RNA, 22 nt, Human
ucagagaaaauggaaacuuuua

SEQ ID NO: 908651 - RNA, 22 nt, Human
cacuguuauuacuacuauacau

SEQ ID NO: 908652 - RNA, 22 nt, Human
acauuuacccuggaacauugga

SEQ ID NO: 908653 - RNA, 18 nt, Human
uucuuuucaugugaucuc

SEQ ID NO: 908654 - RNA, 22 nt, Human
auuuguucagcauugaauuugg

SEQ ID NO: 908655 - RNA, 22 nt, Human
uggugagagcugaccgugcgag

SEQ ID NO: 908656 - RNA, 22 nt, Human
uacauauuugucuuuguacugu

SEQ ID NO: 908657 - RNA, 22 nt, Human
uccaggccccugccugggccug

SEQ ID NO: 908658 - RNA, 22 nt, Human
ucaaagacuauauauuuuauuu

SEQ ID NO: 908659 - RNA, 22 nt, Human
cagcaaggacugggcaugugaa

SEQ ID NO: 908660 - RNA, 22 nt, Human
uggaaucuuuaggaagcacaua

SEQ ID NO: 908661 - RNA, 22 nt, Human
auugagcaccuacuuugugcca

SEQ ID NO: 908662 - RNA, 22 nt, Human
agagacagaucugagggaccuc

SEQ ID NO: 908663 - RNA, 22 nt, Human
guguggggucuucucuuggccu

SEQ ID NO: 908664 - RNA, 22 nt, Human
gacaaagagaaguaacaguacc

SEQ ID NO: 908665 - RNA, 22 nt, Human
aacugcaacuuguuugauucuu

SEQ ID NO: 908666 - RNA, 22 nt, Human
uaguuucuucaccuguaaaaug

SEQ ID NO: 908667 - RNA, 20 nt, Human
ccuagggcaagugggugggc

SEQ ID NO: 908668 - RNA, 22 nt, Human
cuucauuucaggcugaagaaua

SEQ ID NO: 908669 - RNA, 22 nt, Human
uugaucuuuauaauaguuuuga

SEQ ID NO: 908670 - RNA, 22 nt, Human
aguguuccuugcuuucccagag

SEQ ID NO: 908671 - RNA, 22 nt, Human
acaaaugauuuuccaagccagu

SEQ ID NO: 908672 - RNA, 22 nt, Human
uuucacagauccuacagcuugu

SEQ ID NO: 908673 - RNA, 22 nt, Human
gaauacauccagagcagggcug

SEQ ID NO: 908674 - RNA, 22 nt, Human
ugggcugcacccucagccucug

SEQ ID NO: 908675 - RNA, 22 nt, Human
agagcacaggcucuggagucua

SEQ ID NO: 908676 - RNA, 22 nt, Human
uggcacagggcuuggucgcuca

SEQ ID NO: 908677 - RNA, 22 nt, Human
gagguauugacuaugggauggc

SEQ ID NO: 908678 - RNA, 22 nt, Human
cauucauuagaauagauaugua

SEQ ID NO: 908679 - RNA, 18 nt, Human
augcuccuaucucugagc

SEQ ID NO: 908680 - RNA, 22 nt, Human
gccuggcuccuaagagcacaac

SEQ ID NO: 908681 - RNA, 22 nt, Human
uccagugcuggaccagagcacc

SEQ ID NO: 908682 - RNA, 20 nt, Human
uuucagagugucuuuccauu

SEQ ID NO: 908683 - RNA, 22 nt, Human
gaggagagaugguagauugggu

SEQ ID NO: 908684 - RNA, 22 nt, Human
uuucugauaauuuugugaaauc

SEQ ID NO: 908685 - RNA, 22 nt, Human
accaccaggggauuuucagaac

SEQ ID NO: 908686 - RNA, 23 nt, Human
aaauaggaguaucuggaucauga

SEQ ID NO: 908687 - RNA, 18 nt, Human
ucugcaggaccucagggc

SEQ ID NO: 908688 - RNA, 22 nt, Human
uucaugugaauauauuugucuu

SEQ ID NO: 908689 - RNA, 22 nt, Human
aggcugagccugggcguggugg

SEQ ID NO: 908690 - RNA, 22 nt, Human
agguauuuccuuuaaagaaacu

SEQ ID NO: 908691 - RNA, 22 nt, Human
uuucauguggcgaugucucugg

SEQ ID NO: 908692 - RNA, 22 nt, Human
gcucagcuugggagcgcccggu

SEQ ID NO: 908693 - RNA, 22 nt, Human
ugucuccuacugccuguggauc

SEQ ID NO: 908694 - RNA, 22 nt, Human
aaacaggcuugcaacauguuuu

SEQ ID NO: 908695 - RNA, 22 nt, Human
aucuucaacuugaucauuugaa

SEQ ID NO: 908696 - RNA, 22 nt, Human
gagggugggcuccuaucugggu

SEQ ID NO: 908697 - RNA, 22 nt, Human
uggcuucauggcugugcaaucu

SEQ ID NO: 908698 - RNA, 22 nt, Human
ugugguggcuauucuggucuca

SEQ ID NO: 908699 - RNA, 22 nt, Human
aaaugguccauccuaaagaagu

SEQ ID NO: 908700 - RNA, 22 nt, Human
aguacaaguauuagaguuauuc

SEQ ID NO: 908701 - RNA, 19 nt, Human
gcgaggaagucacuguggc

SEQ ID NO: 908702 - RNA, 22 nt, Human
ggcauuuaguuuucauauucug

SEQ ID NO: 908703 - RNA, 22 nt, Human
agggcagcccuucugggagggc

SEQ ID NO: 908704 - RNA, 22 nt, Human
cagggcuggguuaaaagcaggg

SEQ ID NO: 908705 - RNA, 19 nt, Human
ugaggggaggagaggccug

SEQ ID NO: 908706 - RNA, 22 nt, Human
gcuucugcuguugaagccacca

SEQ ID NO: 908707 - RNA, 22 nt, Human
ccagggaagauuagaagccacu

SEQ ID NO: 908708 - RNA, 22 nt, Human
aauuucucacucucuugaucac

SEQ ID NO: 908709 - RNA, 22 nt, Human
ugcagcugccuccuucccuugu

SEQ ID NO: 908710 - RNA, 22 nt, Human
ggcccuguccccuucaguuuug

SEQ ID NO: 908711 - RNA, 22 nt, Human
cagugccaagccacagaucacu

SEQ ID NO: 908712 - RNA, 22 nt, Human
agaaaguuaucacaaaauugag

SEQ ID NO: 908713 - RNA, 22 nt, Human
acauucaaaauauuucugaugu

SEQ ID NO: 908714 - RNA, 20 nt, Human
uucauucacguagcuguuga

SEQ ID NO: 908715 - RNA, 22 nt, Human
ugacagcauaacacuggucuug

SEQ ID NO: 908716 - RNA, 22 nt, Human
acuggaaaguauucuuucacug

SEQ ID NO: 908717 - RNA, 22 nt, Human
cuucaaaucccccugaguuuga

SEQ ID NO: 908718 - RNA, 20 nt, Human
gccugccucagcuagcugag

SEQ ID NO: 908719 - RNA, 22 nt, Human
ccugugaccacucugguucugc

SEQ ID NO: 908720 - RNA, 22 nt, Human
uaauaguuucauaaugugcuuc

SEQ ID NO: 908721 - RNA, 22 nt, Human
guggggugcagcaguacugugu

SEQ ID NO: 908722 - RNA, 22 nt, Human
guauugcauuuugaaugcaugg

SEQ ID NO: 908723 - RNA, 22 nt, Human
agcugccccaugagaggcaggu

SEQ ID NO: 908724 - RNA, 22 nt, Human
uagaggaaauuuccaaggugag

SEQ ID NO: 908725 - RNA, 22 nt, Human
caaggaaggagagaugaugggu

SEQ ID NO: 908726 - RNA, 22 nt, Human
aggaggaaggcuucauuagguu

SEQ ID NO: 908727 - RNA, 22 nt, Human
uguauguguauguacauaugca

SEQ ID NO: 908728 - RNA, 22 nt, Human
uuuggaauccucaguaugauca

SEQ ID NO: 908729 - RNA, 22 nt, Human
acugugugaaacaucaaugugu

SEQ ID NO: 908730 - RNA, 22 nt, Human
ggcacugagcgggcucugagcg

SEQ ID NO: 908731 - RNA, 22 nt, Human
ggaaggcucuguuccuugacuu

SEQ ID NO: 908732 - RNA, 22 nt, Human
cacagcuggaaugggguaccug

SEQ ID NO: 908733 - RNA, 22 nt, Human
acaggaggagcagcugugugcc

SEQ ID NO: 908734 - RNA, 22 nt, Human
ccuuccccaggugcucacuguc

SEQ ID NO: 908735 - RNA, 18 nt, Human
cugggacucaaugcuacu

SEQ ID NO: 908736 - RNA, 19 nt, Human
aggaaaggaucaaaauagc

SEQ ID NO: 908737 - RNA, 22 nt, Human
aaguaggaauccgaaugaguag

SEQ ID NO: 908738 - RNA, 22 nt, Human
ccaaaggcggaacugagucucu

SEQ ID NO: 908739 - RNA, 22 nt, Human
cugggagcaagaggcugcaaau

SEQ ID NO: 908740 - RNA, 22 nt, Human
ugucauauguaauauguucauu

SEQ ID NO: 908741 - RNA, 22 nt, Human
auuuucaugacuaccuuaaaua

SEQ ID NO: 908742 - RNA, 22 nt, Human
gggcaugagagggcagcuggca

SEQ ID NO: 908743 - RNA, 22 nt, Human
uguauuugaugagaggaggguc

SEQ ID NO: 908744 - RNA, 22 nt, Human
ucugugacucauaucuguagau

SEQ ID NO: 908745 - RNA, 22 nt, Human
aacaagaagggaaggcaugauu

SEQ ID NO: 908746 - RNA, 22 nt, Human
cuuacaaaggagaggagauagg

SEQ ID NO: 908747 - RNA, 17 nt, Human
uuuagaauacaauguuu

SEQ ID NO: 908748 - RNA, 22 nt, Human
cuauuacaaucugcuacuauga

SEQ ID NO: 908749 - RNA, 22 nt, Human
guuccauaucacagcagacgaa

SEQ ID NO: 908750 - RNA, 22 nt, Human
ucuacuuucacucauacuuauu

SEQ ID NO: 908751 - RNA, 22 nt, Human
guucuucagaggggaaagaacc

SEQ ID NO: 908752 - RNA, 22 nt, Human
ggcucacgcaauuaucccggcc

SEQ ID NO: 908753 - RNA, 22 nt, Human
gggcauggugagggauaugaag

SEQ ID NO: 908754 - RNA, 22 nt, Human
aaucuagagaacuguggggcag

SEQ ID NO: 908755 - RNA, 22 nt, Human
uauuuggaaaagggaagggaca

SEQ ID NO: 908756 - RNA, 22 nt, Human
gaugggguuuugccaggcuggu

SEQ ID NO: 908757 - RNA, 22 nt, Human
acuuuaugacacccuuuaguga

SEQ ID NO: 908758 - RNA, 22 nt, Human
agcugcagaaaggacaacuaau

SEQ ID NO: 908759 - RNA, 22 nt, Human
gaaagcaaguugacugcagaau

SEQ ID NO: 908760 - RNA, 22 nt, Human
uugcauuuugguuguaaauaug

SEQ ID NO: 908761 - RNA, 22 nt, Human
gagggcacgaaacaaccacuuc

SEQ ID NO: 908762 - RNA, 22 nt, Human
uuaaaugucuguagaugugcug

SEQ ID NO: 908763 - RNA, 22 nt, Human
aaguaacacauguuacuucugc

SEQ ID NO: 908764 - RNA, 22 nt, Human
cugaccugcggggaggagggcc

SEQ ID NO: 908765 - RNA, 22 nt, Human
aucauccuauugugccccaggu

SEQ ID NO: 908766 - RNA, 22 nt, Human
cugucccacaagcagugugcac

SEQ ID NO: 908767 - RNA, 22 nt, Human
uuauuaagugccuacaauaaag

SEQ ID NO: 908768 - RNA, 22 nt, Human
auacauguugagaaaauaucug

SEQ ID NO: 908769 - RNA, 22 nt, Human
acauuuuacaguugucuggcua

SEQ ID NO: 908770 - RNA, 22 nt, Human
ccacauuuacuggaugcucagg

SEQ ID NO: 908771 - RNA, 22 nt, Human
uggcaggcauugaugcgaguuc

SEQ ID NO: 908772 - RNA, 22 nt, Human
guaaauaacugguaauuggggu

SEQ ID NO: 908773 - RNA, 22 nt, Human
uacacugugacaaucaugacag

SEQ ID NO: 908774 - RNA, 22 nt, Human
ccugaggacaucagcaucaccu

SEQ ID NO: 908775 - RNA, 22 nt, Human
uucaaugcuuauauggacuaau

SEQ ID NO: 908776 - RNA, 22 nt, Human
ccacagcuagggcaaucugauu

SEQ ID NO: 908777 - RNA, 22 nt, Human
uuacaaagauuauauucaguua

SEQ ID NO: 908778 - RNA, 19 nt, Human
gaguccugugcuccuuguu

SEQ ID NO: 908779 - RNA, 22 nt, Human
uggugcugugauacgaggcacu

SEQ ID NO: 908780 - RNA, 22 nt, Human
gcucagagcccgaggcuugcau

SEQ ID NO: 908781 - RNA, 22 nt, Human
uuacaagauugauuugcuuggc

SEQ ID NO: 908782 - RNA, 22 nt, Human
gccaggccugcaagugcuggug

SEQ ID NO: 908783 - RNA, 22 nt, Human
uacuuaaauaauugcugcuauu

SEQ ID NO: 908784 - RNA, 22 nt, Human
aucuaaagugucauaaguagcu

SEQ ID NO: 908785 - RNA, 22 nt, Human
cuccugggaauuuaguugugag

SEQ ID NO: 908786 - RNA, 22 nt, Human
gcagcugcuggaaguuccugcc

SEQ ID NO: 908787 - RNA, 22 nt, Human
aaaugcagaaucucagacccca

SEQ ID NO: 908788 - RNA, 22 nt, Human
uacaacagacaggaauaagauu

SEQ ID NO: 908789 - RNA, 22 nt, Human
agggaggagaauggacuccuuc

SEQ ID NO: 908790 - RNA, 22 nt, Human
uuguuuuaaccuaguguuuaug

SEQ ID NO: 908791 - RNA, 22 nt, Human
uuggaauagggaggcuggcaua

SEQ ID NO: 908792 - RNA, 22 nt, Human
cugcuggggaggcgccucgacg

SEQ ID NO: 908793 - RNA, 22 nt, Human
ucuuacaagaaggaaaagggag

SEQ ID NO: 908794 - RNA, 23 nt, Human
cacaccaggagccgucugggcca

SEQ ID NO: 908795 - RNA, 22 nt, Human
ggcggggccucgcgaacggccu

SEQ ID NO: 908796 - RNA, 22 nt, Human
uugggaaggcguggaagcagaa

SEQ ID NO: 908797 - RNA, 22 nt, Human
agaggcuccaccuucucugucc

SEQ ID NO: 908798 - RNA, 22 nt, Human
cagcuaccaugguuuguuccag

SEQ ID NO: 908799 - RNA, 22 nt, Human
auuucuugauuccaccagugaa

SEQ ID NO: 908800 - RNA, 22 nt, Human
ucuacacuguagaauuauaagg

SEQ ID NO: 908801 - RNA, 22 nt, Human
ucagggaauaaguagaugagug

SEQ ID NO: 908802 - RNA, 22 nt, Human
uucacaguggcugacaggcugg

SEQ ID NO: 908803 - RNA, 22 nt, Human
cuauuuuucuguacccuaauuu

SEQ ID NO: 908804 - RNA, 22 nt, Human
gugugcauauguguggcucucc

SEQ ID NO: 908805 - RNA, 22 nt, Human
agauacauugaguuuccuccug

SEQ ID NO: 908806 - RNA, 22 nt, Human
caucaaaugccauauaugguug

SEQ ID NO: 908807 - RNA, 22 nt, Human
guuuccaugcaguagagcuuag

SEQ ID NO: 908808 - RNA, 22 nt, Human
ugcuuugugacagauuaguuuu

SEQ ID NO: 908809 - RNA, 22 nt, Human
ccacagugauucacuuuugaag

SEQ ID NO: 908810 - RNA, 17 nt, Human
uucucuuccuggauagu

SEQ ID NO: 908811 - RNA, 22 nt, Human
uaacacugauuuguucucaggg

SEQ ID NO: 908812 - RNA, 22 nt, Human
augauauuugcaaugugcuugc

SEQ ID NO: 908813 - RNA, 22 nt, Human
uuucuagacauuucuauguaca

SEQ ID NO: 908814 - RNA, 22 nt, Human
agaaguauucugcauguacuga

SEQ ID NO: 908815 - RNA, 22 nt, Human
gaauagcuuagauuccuuagug

SEQ ID NO: 908816 - RNA, 22 nt, Human
gaaaucuugcucauugugacaa

SEQ ID NO: 908817 - RNA, 22 nt, Human
auuuuccucugguuuccccaga

SEQ ID NO: 908818 - RNA, 22 nt, Human
ugagccuguggggugacaacca

SEQ ID NO: 908819 - RNA, 22 nt, Human
gcaggagccacuucagggaugc

SEQ ID NO: 908820 - RNA, 22 nt, Human
ccauuauccacgggcuuccuga

SEQ ID NO: 908821 - RNA, 22 nt, Human
gcuccuguuuucuuccagaaau

SEQ ID NO: 908822 - RNA, 22 nt, Human
ccuggcuuagagguugccuuuc

SEQ ID NO: 908823 - RNA, 22 nt, Human
acccugagaaagucacaugcau

SEQ ID NO: 908824 - RNA, 22 nt, Human
uacauucugguggagaaaguaa

SEQ ID NO: 908825 - RNA, 22 nt, Human
uggccagcccucuucccacacu

SEQ ID NO: 908826 - RNA, 22 nt, Human
ucuaacagaaauucugacaaaa

SEQ ID NO: 908827 - RNA, 22 nt, Human
agacagacaaaauuccugccug

SEQ ID NO: 908828 - RNA, 22 nt, Human
gaaagguuguaacaagacucuu

SEQ ID NO: 908829 - RNA, 22 nt, Human
gaaguucuuuauagcaguguga

SEQ ID NO: 908830 - RNA, 22 nt, Human
cacacaguggaguauuacucag

SEQ ID NO: 908831 - RNA, 22 nt, Human
agaggccuaauugcuacccuuu

SEQ ID NO: 908832 - RNA, 22 nt, Human
cauuaugugggaaaauguucuu

SEQ ID NO: 908833 - RNA, 20 nt, Human
gggcagcaagacauuugaca

SEQ ID NO: 908834 - RNA, 21 nt, Human
cagugagguccccagccuagg

SEQ ID NO: 908835 - RNA, 18 nt, Human
aaaugcuaggcuacauga

SEQ ID NO: 908836 - RNA, 22 nt, Human
ccaggaggugcuggaagaaagc

SEQ ID NO: 908837 - RNA, 22 nt, Human
caugugugggacccuuagguug

SEQ ID NO: 908838 - RNA, 22 nt, Human
ucccagggugcgccugcccucg

SEQ ID NO: 908839 - RNA, 22 nt, Human
gccacagcuccagucaggugac

SEQ ID NO: 908840 - RNA, 22 nt, Human
augguucauauuaugcaucuga

SEQ ID NO: 908841 - RNA, 22 nt, Human
uuggcacacaguaagcccuaag

SEQ ID NO: 908842 - RNA, 22 nt, Human
aaggccuuaaagcucucuccag

SEQ ID NO: 908843 - RNA, 22 nt, Human
agcugcagaucaauaggcucac

SEQ ID NO: 908844 - RNA, 22 nt, Human
acccaggcuggagugcaguggu

SEQ ID NO: 908845 - RNA, 21 nt, Human
ucuggcaggaagacggauggg

SEQ ID NO: 908846 - RNA, 22 nt, Human
gaguguccgugcagccccagac

SEQ ID NO: 908847 - RNA, 22 nt, Human
gccgugucaucugcggguggca

SEQ ID NO: 908848 - RNA, 22 nt, Human
uuuuccagagcugucucuugca

SEQ ID NO: 908849 - RNA, 22 nt, Human
agucucuuuugcgaagaguguu

SEQ ID NO: 908850 - RNA, 22 nt, Human
ccagagaaccaucugcuugagg

SEQ ID NO: 908851 - RNA, 22 nt, Human
cuguccugauggugccacuggu

SEQ ID NO: 908852 - RNA, 22 nt, Human
uuguguuucuggccaagaugga

SEQ ID NO: 908853 - RNA, 23 nt, Human
aaagugcaguugaggaaucauag

SEQ ID NO: 908854 - RNA, 22 nt, Human
ccacuucaucccagcucagaua

SEQ ID NO: 908855 - RNA, 22 nt, Human
guacauuuugagguuaaaacaa

SEQ ID NO: 908856 - RNA, 22 nt, Human
ugauaauguucgagaaugaaga

SEQ ID NO: 908857 - RNA, 22 nt, Human
gaacagaugggcucagauccug

SEQ ID NO: 908858 - RNA, 22 nt, Human
aaguacauuauaugagcagaau

SEQ ID NO: 908859 - RNA, 18 nt, Human
ugcugggguagaauccac

SEQ ID NO: 908860 - RNA, 23 nt, Human
caucaaguacuuuugacaagugu

SEQ ID NO: 908861 - RNA, 22 nt, Human
aaaguguuaugcaaaacucugu

SEQ ID NO: 908862 - RNA, 22 nt, Human
aguuuuguaauucucaaaaaua

SEQ ID NO: 908863 - RNA, 22 nt, Human
uccauguggcaauaggagacag

SEQ ID NO: 908864 - RNA, 22 nt, Human
ucauugaguaauacuguagugu

SEQ ID NO: 908865 - RNA, 20 nt, Human
ggagcuagagcugaaagacu

SEQ ID NO: 908866 - RNA, 22 nt, Human
ucagauaugaauucauaucucu

SEQ ID NO: 908867 - RNA, 22 nt, Human
gcagggaagacccggagcagcg

SEQ ID NO: 908868 - RNA, 18 nt, Human
guccacagcccucacagc

SEQ ID NO: 908869 - RNA, 22 nt, Human
uuacauaccucauagacucagg

SEQ ID NO: 908870 - RNA, 22 nt, Human
aaccacagagcccccucagaug

SEQ ID NO: 908871 - RNA, 22 nt, Human
ucacaagauaaacauagcucca

SEQ ID NO: 908872 - RNA, 22 nt, Human
ucagcauuguggcagagaaugg

SEQ ID NO: 908873 - RNA, 22 nt, Human
ggcuucacauagcaaugugagc

SEQ ID NO: 908874 - RNA, 21 nt, Human
gcauucuucaugugauucaga

SEQ ID NO: 908875 - RNA, 22 nt, Human
uugacaaugcacugugcuaagu

SEQ ID NO: 908876 - RNA, 22 nt, Human
uauaggaacagcuagcacagaa

SEQ ID NO: 908877 - RNA, 22 nt, Human
ugucuguggcaauuguggguaa

SEQ ID NO: 908878 - RNA, 22 nt, Human
aggucacauggauaaugaucag

SEQ ID NO: 908879 - RNA, 20 nt, Human
agacuuaggcaauuuaggcu

SEQ ID NO: 908880 - RNA, 22 nt, Human
cuuuggucagagggauggaguu

SEQ ID NO: 908881 - RNA, 22 nt, Human
aggaagcuuagugaaaggacca

SEQ ID NO: 908882 - RNA, 22 nt, Human
acagcugggugucccacuucug

SEQ ID NO: 908883 - RNA, 20 nt, Human
cccuggacuccugagcaaac

SEQ ID NO: 908884 - RNA, 16 nt, Human
ccuuggcaucagcugu

SEQ ID NO: 908885 - RNA, 22 nt, Human
ucauggcauuguuaaggguuuu

SEQ ID NO: 908886 - RNA, 22 nt, Human
agcuggaagauccugguuuugu

SEQ ID NO: 908887 - RNA, 22 nt, Human
uuaaaggcaugguuagacaugg

SEQ ID NO: 908888 - RNA, 22 nt, Human
gcuuucuugguucugcaggggc

SEQ ID NO: 908889 - RNA, 22 nt, Human
guccucagaagccugcuuagcu

SEQ ID NO: 908890 - RNA, 22 nt, Human
cugaagcuuaguuuacgcucca

SEQ ID NO: 908891 - RNA, 22 nt, Human
ucugaaggucugagaaccagga

SEQ ID NO: 908892 - RNA, 22 nt, Human
ugagagccaggaucugcucuau

SEQ ID NO: 908893 - RNA, 22 nt, Human
auggauaaauacuuggugguau

SEQ ID NO: 908894 - RNA, 22 nt, Human
gcuuggcagggccugcuggagc

SEQ ID NO: 908895 - RNA, 23 nt, Human
agggugagcaagcuauggagacc

SEQ ID NO: 908896 - RNA, 22 nt, Human
ccagugccugugggcauggugc

SEQ ID NO: 908897 - RNA, 22 nt, Human
uggggugagauucagauauuca

SEQ ID NO: 908898 - RNA, 22 nt, Human
agcaccuggagggcugggaccu

SEQ ID NO: 908899 - RNA, 22 nt, Human
uuauuaaaaugcggauuuggcu

SEQ ID NO: 908900 - RNA, 22 nt, Human
ccugggaaggggaagagaauuc

SEQ ID NO: 908901 - RNA, 22 nt, Human
acacaguaugcaucuagaaauu

SEQ ID NO: 908902 - RNA, 22 nt, Human
cuuuacacaaugauuuucuuua

SEQ ID NO: 908903 - RNA, 22 nt, Human
gugccugggguugagcuaugaa

SEQ ID NO: 908904 - RNA, 22 nt, Human
aagagacaagaauuccaacgcu

SEQ ID NO: 908905 - RNA, 22 nt, Human
uguaaacagccccauggagagc

SEQ ID NO: 908906 - RNA, 22 nt, Human
gccagggcugugcagguuuguu

SEQ ID NO: 908907 - RNA, 19 nt, Human
cugcagggaugugcagagu

SEQ ID NO: 908908 - RNA, 22 nt, Human
agucagugaaggcauugcucaa

SEQ ID NO: 908909 - RNA, 22 nt, Human
gcugggcuccacccucaacugu

SEQ ID NO: 908910 - RNA, 22 nt, Human
uccagcucuaacaugcugggcc

SEQ ID NO: 908911 - RNA, 22 nt, Human
gcagaggugcucaguggcagaa

SEQ ID NO: 908912 - RNA, 19 nt, Human
uccaggccauucccagagc

SEQ ID NO: 908913 - RNA, 22 nt, Human
aucacauauuuaagaaacaugu

SEQ ID NO: 908914 - RNA, 22 nt, Human
auuugcuuuuacuauguuaaaa

SEQ ID NO: 908915 - RNA, 22 nt, Human
ugagacagcagucagggaaaua

SEQ ID NO: 908916 - RNA, 16 nt, Human
acaguaaagcuggaca

SEQ ID NO: 908917 - RNA, 22 nt, Human
uguggcugcucaggugcagacc

SEQ ID NO: 908918 - RNA, 22 nt, Human
augacacugagaauaacaggua

SEQ ID NO: 908919 - RNA, 22 nt, Human
agcuccugugugcccaccugcu

SEQ ID NO: 908920 - RNA, 22 nt, Human
gggcugcaucagcaggacccgg

SEQ ID NO: 908921 - RNA, 19 nt, Human
aaggcagcaguagcaucca

SEQ ID NO: 908922 - RNA, 22 nt, Human
uucugcuccaccacuuccagca

SEQ ID NO: 908923 - RNA, 22 nt, Human
aagguccaugacucggcauagu

SEQ ID NO: 908924 - RNA, 22 nt, Human
cacaaaguuggacaacgcaccc

SEQ ID NO: 908925 - RNA, 22 nt, Human
ggaaacaugccugcuggacagu

SEQ ID NO: 908926 - RNA, 22 nt, Human
gcauuucaugccguggaagucc

SEQ ID NO: 908927 - RNA, 22 nt, Human
gaauuuaaggaccaagcauuuu

SEQ ID NO: 908928 - RNA, 22 nt, Human
aggaauugguucaagguuuauc

SEQ ID NO: 908929 - RNA, 22 nt, Human
uucuagaaccaugacuucaggg

SEQ ID NO: 908930 - RNA, 22 nt, Human
cuuagaauuuuaauccagaaag

SEQ ID NO: 908931 - RNA, 22 nt, Human
ugcuacaauucacaucuggaua

SEQ ID NO: 908932 - RNA, 22 nt, Human
cagaaacuauguaagaaaguga

SEQ ID NO: 908933 - RNA, 22 nt, Human
augcagggucuccgugugacga

SEQ ID NO: 908934 - RNA, 22 nt, Human
aggacagggauucaaacuccca

SEQ ID NO: 908935 - RNA, 22 nt, Human
ucagugucucauaugagguuuc

SEQ ID NO: 908936 - RNA, 22 nt, Human
uccuuuucccugaagguauuua

SEQ ID NO: 908937 - RNA, 22 nt, Human
gcccagcccagaaagguucgga

SEQ ID NO: 908938 - RNA, 22 nt, Human
gaggacagcuuagggcuuccug

SEQ ID NO: 908939 - RNA, 22 nt, Human
cuguuucucccaacgcccuagu

SEQ ID NO: 908940 - RNA, 22 nt, Human
agcugcuccuuggcugugguuc

SEQ ID NO: 908941 - RNA, 22 nt, Human
cagagcugggaucccaugggcg

SEQ ID NO: 908942 - RNA, 22 nt, Human
cugugggcucccagcuucucuc

SEQ ID NO: 908943 - RNA, 22 nt, Human
aaggaugauugguaaugacacu

SEQ ID NO: 908944 - RNA, 22 nt, Human
guauuauugucaugaaauaaua

SEQ ID NO: 908945 - RNA, 22 nt, Human
cuggagcagguuuaggaguccc

SEQ ID NO: 908946 - RNA, 22 nt, Human
cuggcuccucaguauuccacuu

SEQ ID NO: 908947 - RNA, 20 nt, Human
gccugagcuccgccuccugu

SEQ ID NO: 908948 - RNA, 22 nt, Human
uauguacaagcacacaugugac

SEQ ID NO: 908949 - RNA, 22 nt, Human
ucauuuacauagaaacaauaua

SEQ ID NO: 908950 - RNA, 20 nt, Human
aggcuucaaccauacaccuu

SEQ ID NO: 908951 - RNA, 22 nt, Human
gugccaggugcuaagcugugcu

SEQ ID NO: 908952 - RNA, 22 nt, Human
cccuuucauuggcagagcucuc

SEQ ID NO: 908953 - RNA, 22 nt, Human
aaacaacaugguggguguguag

SEQ ID NO: 908954 - RNA, 22 nt, Human
uuagaacaccauucuauauuac

SEQ ID NO: 908955 - RNA, 22 nt, Human
gagcucugcuuggguucuuagg

SEQ ID NO: 908956 - RNA, 22 nt, Human
gcccacagguccuaccucuuuc

SEQ ID NO: 908957 - RNA, 22 nt, Human
ugaggcucaaggucugguggag

SEQ ID NO: 908958 - RNA, 18 nt, Human
caauagaaacaguaggaa

SEQ ID NO: 908959 - RNA, 22 nt, Human
gcagacaauuuauuagcagauu

SEQ ID NO: 908960 - RNA, 22 nt, Human
ugcauauaucuuauuuuucugu

SEQ ID NO: 908961 - RNA, 22 nt, Human
uccauacauauccaaagagaag

SEQ ID NO: 908962 - RNA, 23 nt, Human
gcauugaacaaaagaggggagua

SEQ ID NO: 908963 - RNA, 22 nt, Human
ugcuucuuuacuauaggcaauu

SEQ ID NO: 908964 - RNA, 22 nt, Human
caucucuucauuagcauuauug

SEQ ID NO: 908965 - RNA, 22 nt, Human
uucccagaccuguaggaucaga

SEQ ID NO: 908966 - RNA, 21 nt, Human
acauuuucuguuuuaggaagu

SEQ ID NO: 908967 - RNA, 22 nt, Human
cccagagggaagggaaugaggu

SEQ ID NO: 908968 - RNA, 22 nt, Human
aaaucagaguagaauugagcca

SEQ ID NO: 908969 - RNA, 22 nt, Human
uuucuugucuuuaguaucuggc

SEQ ID NO: 908970 - RNA, 22 nt, Human
uugcuuuguuacugcaguuucc

SEQ ID NO: 908971 - RNA, 22 nt, Human
agcuggccuuagugagcaccug

SEQ ID NO: 908972 - RNA, 22 nt, Human
ucucuuccaguaagagucuuua

SEQ ID NO: 908973 - RNA, 22 nt, Human
agccagaggucaugagcacagg

SEQ ID NO: 908974 - RNA, 23 nt, Human
uggcagugcccagggagaugauc

SEQ ID NO: 908975 - RNA, 20 nt, Human
ucugccuuaugaccuucgcc

SEQ ID NO: 908976 - RNA, 21 nt, Human
uggcagaguugaguaguuaug

SEQ ID NO: 908977 - RNA, 20 nt, Human
gugcuggaguuaggaaaggu

SEQ ID NO: 908978 - RNA, 20 nt, Human
auguagaugaaagcaaaggc

SEQ ID NO: 908979 - RNA, 22 nt, Human
acacaugaaauaauauuaugca

SEQ ID NO: 908980 - RNA, 22 nt, Human
cagcaagaaaauucacaugcuc

SEQ ID NO: 908981 - RNA, 22 nt, Human
cugcaggggcaguccacuuccu

SEQ ID NO: 908982 - RNA, 22 nt, Human
uggaauguugcucugccuugcg

SEQ ID NO: 908983 - RNA, 22 nt, Human
agcuggggcugcagagaacagg

SEQ ID NO: 908984 - RNA, 22 nt, Human
uagucacaggaaguuucaaugu

SEQ ID NO: 908985 - RNA, 22 nt, Human
agagucagacuaagccauggug

SEQ ID NO: 908986 - RNA, 22 nt, Human
aaucuagaauuuuagggguaua

SEQ ID NO: 908987 - RNA, 22 nt, Human
guucaaauggcugcaguuacca

SEQ ID NO: 908988 - RNA, 22 nt, Human
cuucaguguugguucauuacga

SEQ ID NO: 908989 - RNA, 22 nt, Human
uagagcaguggguaccauggca

SEQ ID NO: 908990 - RNA, 23 nt, Human
uguuacaagcaccacagguggcu

SEQ ID NO: 908991 - RNA, 22 nt, Human
uuggcagcauacaguuggauug

SEQ ID NO: 908992 - RNA, 22 nt, Human
ucacaguuuuaagugugaucca

SEQ ID NO: 908993 - RNA, 22 nt, Human
aaagacuaaccaguugucaaaa

SEQ ID NO: 908994 - RNA, 22 nt, Human
cuggccgcaguguggaguugug

SEQ ID NO: 908995 - RNA, 22 nt, Human
ggcaagagggcagauggagugc

SEQ ID NO: 908996 - RNA, 22 nt, Human
cacaguaacuggcguguaguaa

SEQ ID NO: 908997 - RNA, 22 nt, Human
agucagaauucgaucccagguc

SEQ ID NO: 908998 - RNA, 22 nt, Human
acuucaugaacuaagggaucgg

SEQ ID NO: 908999 - RNA, 22 nt, Human
gucucugcucuagagucuguga

SEQ ID NO: 909000 - RNA, 22 nt, Human
uuaggaacuucugucucagugu

SEQ ID NO: 909001 - RNA, 22 nt, Human
caucagugucucucugguacuu

SEQ ID NO: 909002 - RNA, 22 nt, Human
ugaggggccagaccccaccuag

SEQ ID NO: 909003 - RNA, 22 nt, Human
aaggaagaugcuggccugggga

SEQ ID NO: 909004 - RNA, 19 nt, Human
ucagcucuggggucagugg

SEQ ID NO: 909005 - RNA, 22 nt, Human
cuuuaaauaauacaagguccag

SEQ ID NO: 909006 - RNA, 22 nt, Human
aggcuaggguaacagauguggc

SEQ ID NO: 909007 - RNA, 22 nt, Human
gcccugagacugaagaacuguc

SEQ ID NO: 909008 - RNA, 22 nt, Human
ccuggcagcuccguggccuucc

SEQ ID NO: 909009 - RNA, 22 nt, Human
ccagagccggcucccucagcuu

SEQ ID NO: 909010 - RNA, 22 nt, Human
cuggcacucauaggccaguuca

SEQ ID NO: 909011 - RNA, 22 nt, Human
ucuuugggagauguuauuuaua

SEQ ID NO: 909012 - RNA, 22 nt, Human
aaccuuugaggggagcucuuuc

SEQ ID NO: 909013 - RNA, 22 nt, Human
ggcugugauugguggaugugaa

SEQ ID NO: 909014 - RNA, 22 nt, Human
ugcccucugccuccucugcaga

SEQ ID NO: 909015 - RNA, 22 nt, Human
aagugaguggccuggagaggug

SEQ ID NO: 909016 - RNA, 18 nt, Human
aucuuguuuuuggauuaa

SEQ ID NO: 909017 - RNA, 22 nt, Human
uucccucuccuacucaggaaag

SEQ ID NO: 909018 - RNA, 22 nt, Human
uuuauuauucucuggagaaugu

SEQ ID NO: 909019 - RNA, 22 nt, Human
auagaacacagaugggcguggc

SEQ ID NO: 909020 - RNA, 22 nt, Human
ucaaugaaagagcaugcauuuu

SEQ ID NO: 909021 - RNA, 22 nt, Human
cugggggcaagcagacagcugu

SEQ ID NO: 909022 - RNA, 22 nt, Human
caguaacaggcucugugguaua

SEQ ID NO: 909023 - RNA, 22 nt, Human
auaugaaaagaagucaccauug

SEQ ID NO: 909024 - RNA, 22 nt, Human
aggcuggucuauacggagacga

SEQ ID NO: 909025 - RNA, 22 nt, Human
cacaggagguuaggaagugguc

SEQ ID NO: 909026 - RNA, 22 nt, Human
aagcaaggcaaccuauguccag

SEQ ID NO: 909027 - RNA, 22 nt, Human
uaaagacaaacccacuaggguu

SEQ ID NO: 909028 - RNA, 22 nt, Human
uccaggcacuauauauacuuuu

SEQ ID NO: 909029 - RNA, 20 nt, Human
guauauaaccauagugacua

SEQ ID NO: 909030 - RNA, 22 nt, Human
agcuucuuaaguuccugcagca

SEQ ID NO: 909031 - RNA, 22 nt, Human
ccucugagccugugugcggcac

SEQ ID NO: 909032 - RNA, 20 nt, Human
uagcugcacagcccuaggag

SEQ ID NO: 909033 - RNA, 22 nt, Human
uuuggaaugcccauggacuggu

SEQ ID NO: 909034 - RNA, 22 nt, Human
uaucacacuagccuauagugga

SEQ ID NO: 909035 - RNA, 20 nt, Human
gggugugugcagggccuggu

SEQ ID NO: 909036 - RNA, 20 nt, Human
uuucacuggcuugauaaggu

SEQ ID NO: 909037 - RNA, 22 nt, Human
ucuuagaauugaagucagaggg

SEQ ID NO: 909038 - RNA, 21 nt, Human
ugcuggaggacaggguuucau

SEQ ID NO: 909039 - RNA, 22 nt, Human
cuguacaggugaggagggggcu

SEQ ID NO: 909040 - RNA, 22 nt, Human
agcucccaggcagucaugagga

SEQ ID NO: 909041 - RNA, 22 nt, Human
gcugagggauagcugcucacug

SEQ ID NO: 909042 - RNA, 22 nt, Human
acuugucuaccaugaauauuua

SEQ ID NO: 909043 - RNA, 22 nt, Human
uaucuagaaacagaguuuuacu

SEQ ID NO: 909044 - RNA, 22 nt, Human
agagccuggucugagauaggac

SEQ ID NO: 909045 - RNA, 22 nt, Human
agcuaggacagguagagauggg

SEQ ID NO: 909046 - RNA, 22 nt, Human
ucaagaaaaugccugcuggugu

SEQ ID NO: 909047 - RNA, 22 nt, Human
gaggcugcccaacuggagugga

SEQ ID NO: 909048 - RNA, 22 nt, Human
gagcuguggaaggcagggacca

SEQ ID NO: 909049 - RNA, 22 nt, Human
uccauccauggauggaaaugug

SEQ ID NO: 909050 - RNA, 22 nt, Human
auacuacacauugacuauauuu

SEQ ID NO: 909051 - RNA, 22 nt, Human
acucagcuuccuacagcuagaa

SEQ ID NO: 909052 - RNA, 22 nt, Human
gagcagcucgagaaggaagcag

SEQ ID NO: 909053 - RNA, 22 nt, Human
uucaaagauaauuaccaaacau

SEQ ID NO: 909054 - RNA, 22 nt, Human
uucugugugcuuacugguguuc

SEQ ID NO: 909055 - RNA, 22 nt, Human
ggccugugguuucuaguagguu

SEQ ID NO: 909056 - RNA, 22 nt, Human
auuucuguugcuuauaaauuac

SEQ ID NO: 909057 - RNA, 22 nt, Human
ggguaauuggggccuugcagug

SEQ ID NO: 909058 - RNA, 22 nt, Human
uauuucuugagacucgucuucc

SEQ ID NO: 909059 - RNA, 21 nt, Human
gaguaacauuuccucuccaca

SEQ ID NO: 909060 - RNA, 22 nt, Human
cugcuguguggugaaacucagu

SEQ ID NO: 909061 - RNA, 22 nt, Human
gagaaccuacuguauacuauau

SEQ ID NO: 909062 - RNA, 22 nt, Human
uuguuacuguucuacauacagu

SEQ ID NO: 909063 - RNA, 22 nt, Human
uuguuucuccagucuaggaaaa

SEQ ID NO: 909064 - RNA, 22 nt, Human
ugcucuggguccugggccuccu

SEQ ID NO: 909065 - RNA, 22 nt, Human
guaguaaagcagguuuugcugu

SEQ ID NO: 909066 - RNA, 22 nt, Human
auaguucuggauguacuuauag

SEQ ID NO: 909067 - RNA, 22 nt, Human
aggcaggugagucaaaacagac

SEQ ID NO: 909068 - RNA, 23 nt, Human
uacagcaaggacaacauaggugg

SEQ ID NO: 909069 - RNA, 22 nt, Human
cagacucuugagcugauuguau

SEQ ID NO: 909070 - RNA, 22 nt, Human
auucuucacaccuguuccuguu

SEQ ID NO: 909071 - RNA, 22 nt, Human
ugcaaauugcgauuuuuauuag

SEQ ID NO: 909072 - RNA, 22 nt, Human
gaggggggcgcccugcagugca

SEQ ID NO: 909073 - RNA, 22 nt, Human
uuccuucuccagaacuucuagg

SEQ ID NO: 909074 - RNA, 22 nt, Human
cuggccauguugccucugagac

SEQ ID NO: 909075 - RNA, 22 nt, Human
uagagggcaggaguguccuacu

SEQ ID NO: 909076 - RNA, 22 nt, Human
aauauuucuguagcuauguucu

SEQ ID NO: 909077 - RNA, 22 nt, Human
augcucuacuuacggcuuucag

SEQ ID NO: 909078 - RNA, 22 nt, Human
caguuucucucaauaagcaucg

SEQ ID NO: 909079 - RNA, 22 nt, Human
augugugcauauucugccaccu

SEQ ID NO: 909080 - RNA, 22 nt, Human
ggucagcaauuuggacugggcu

SEQ ID NO: 909081 - RNA, 22 nt, Human
accuuuucaucugaaacuuuua

SEQ ID NO: 909082 - RNA, 22 nt, Human
cagcaacauauaugaaacugug

SEQ ID NO: 909083 - RNA, 22 nt, Human
guuuggauagugagagauacuu

SEQ ID NO: 909084 - RNA, 22 nt, Human
ucccucagggugcaguugcuuu

SEQ ID NO: 909085 - RNA, 22 nt, Human
aggaagcccaagucucaucuuc

SEQ ID NO: 909086 - RNA, 18 nt, Human
cuucagugacagucuggc

SEQ ID NO: 909087 - RNA, 22 nt, Human
aaggacugacaaaugucuuccu

SEQ ID NO: 909088 - RNA, 22 nt, Human
auacuuaugauaaauaauugcu

SEQ ID NO: 909089 - RNA, 22 nt, Human
aucauuugugcauaguaacaga

SEQ ID NO: 909090 - RNA, 22 nt, Human
gugcauauguaccugugaucau

SEQ ID NO: 909091 - RNA, 22 nt, Human
uuaaguguagugcuaagggcag

SEQ ID NO: 909092 - RNA, 21 nt, Human
gcucucagcugccugcugguu

SEQ ID NO: 909093 - RNA, 22 nt, Human
acagcagagugugagauagcca

SEQ ID NO: 909094 - RNA, 22 nt, Human
agguccuggugaccauggaguu

SEQ ID NO: 909095 - RNA, 22 nt, Human
cuuuuacacucaucugggaggg

SEQ ID NO: 909096 - RNA, 22 nt, Human
cucauagauuuagauagaucga

SEQ ID NO: 909097 - RNA, 22 nt, Human
uuugagaaugguaaguggaucg

SEQ ID NO: 909098 - RNA, 22 nt, Human
gacuuugguuugagcaagucag

SEQ ID NO: 909099 - RNA, 22 nt, Human
ggcaccaggcugggcauaggcc

SEQ ID NO: 909100 - RNA, 22 nt, Human
uuguugcauaaaguaggaaaua

SEQ ID NO: 909101 - RNA, 22 nt, Human
uaaacagccuccccuuucacuc

SEQ ID NO: 909102 - RNA, 23 nt, Human
auacaaaccuugcaggacauguu

SEQ ID NO: 909103 - RNA, 22 nt, Human
acccagggcucaagcguaggca

SEQ ID NO: 909104 - RNA, 22 nt, Human
agcagggccaacaguaaacacc

SEQ ID NO: 909105 - RNA, 23 nt, Human
acagaggcuuaaaugaguggcag

SEQ ID NO: 909106 - RNA, 22 nt, Human
guacaguggaggucuguguuca

SEQ ID NO: 909107 - RNA, 22 nt, Human
ugcucuggggcuccccaccaga

SEQ ID NO: 909108 - RNA, 22 nt, Human
aucauucagccuaagcaaguac

SEQ ID NO: 909109 - RNA, 22 nt, Human
aagugucuuaacuccuuuuggg

SEQ ID NO: 909110 - RNA, 22 nt, Human
cugugcauggccaucagugccc

SEQ ID NO: 909111 - RNA, 22 nt, Human
aaucuucagcacuccagagacu

SEQ ID NO: 909112 - RNA, 22 nt, Human
gcugccuggauuugcaauccuc

SEQ ID NO: 909113 - RNA, 22 nt, Human
agagcugggugaagugccauca

SEQ ID NO: 909114 - RNA, 22 nt, Human
gccccagcccuguggaccaugg

SEQ ID NO: 909115 - RNA, 22 nt, Human
ugucucugugacuccuuccgcc

SEQ ID NO: 909116 - RNA, 22 nt, Human
uaauccacaauagagauuaucu

SEQ ID NO: 909117 - RNA, 22 nt, Human
gcagggcagcucacugugguuc

SEQ ID NO: 909118 - RNA, 22 nt, Human
aaaugucugucucaugaggaaa

SEQ ID NO: 909119 - RNA, 22 nt, Human
gaaggaaaacagaucugccuga

SEQ ID NO: 909120 - RNA, 22 nt, Human
caagcaggaggagaaguuucug

SEQ ID NO: 909121 - RNA, 22 nt, Human
cugggagagaagcgaagcuggg

SEQ ID NO: 909122 - RNA, 22 nt, Human
gugcaugugucuuuauaguaga

SEQ ID NO: 909123 - RNA, 17 nt, Human
uguuucacuuggggaaa

SEQ ID NO: 909124 - RNA, 22 nt, Human
uagcagcauccuguggugaugg

SEQ ID NO: 909125 - RNA, 22 nt, Human
ggggaagaauggcagaaaacau

SEQ ID NO: 909126 - RNA, 22 nt, Human
uuaauacaagcauaugcacaca

SEQ ID NO: 909127 - RNA, 22 nt, Human
uggaagagaaaauccacccuua

SEQ ID NO: 909128 - RNA, 19 nt, Human
uccagcagugcuugaaauc

SEQ ID NO: 909129 - RNA, 22 nt, Human
gccagcucagaugcaggaagga

SEQ ID NO: 909130 - RNA, 22 nt, Human
aaguaaaauucaaucuucacug

SEQ ID NO: 909131 - RNA, 22 nt, Human
ugucaccuugcagggcuggggc

SEQ ID NO: 909132 - RNA, 20 nt, Human
uuuuccucguguuuguucua

SEQ ID NO: 909133 - RNA, 22 nt, Human
guuaacuuuuuacagaaaugaa

SEQ ID NO: 909134 - RNA, 23 nt, Human
uguaacuucuuaaauucuucacu

SEQ ID NO: 909135 - RNA, 22 nt, Human
cuggagcucuguguguuccuga

SEQ ID NO: 909136 - RNA, 18 nt, Human
augcagcaaucagaaaua

SEQ ID NO: 909137 - RNA, 22 nt, Human
uggagggcuaagcugagggaua

SEQ ID NO: 909138 - RNA, 22 nt, Human
uuucaguucauguauuccgagu

SEQ ID NO: 909139 - RNA, 22 nt, Human
acaggcauccaggacuaggccu

SEQ ID NO: 909140 - RNA, 22 nt, Human
acuugaaacccugagaugauaa

SEQ ID NO: 909141 - RNA, 22 nt, Human
ugccaggcuaaguggaggacuu

SEQ ID NO: 909142 - RNA, 22 nt, Human
cugucuggucaacaacugagug

SEQ ID NO: 909143 - RNA, 22 nt, Human
caugucaagcuuaucucugugg

SEQ ID NO: 909144 - RNA, 22 nt, Human
ugugaacuuuggaugguucuga

SEQ ID NO: 909145 - RNA, 22 nt, Human
ccaggcugcuguugguguccgc

SEQ ID NO: 909146 - RNA, 22 nt, Human
uaagauuauacuuaaagagaaa

SEQ ID NO: 909147 - RNA, 22 nt, Human
auacacacugcuauccuuuuuu

SEQ ID NO: 909148 - RNA, 22 nt, Human
guggaauuuuuaccuaugaaug

SEQ ID NO: 909149 - RNA, 22 nt, Human
cugggaaguggugagggccuga

SEQ ID NO: 909150 - RNA, 23 nt, Human
agcuccuguaagguggucgucac

SEQ ID NO: 909151 - RNA, 23 nt, Human
agcucuggcguuggggagguagu

SEQ ID NO: 909152 - RNA, 22 nt, Human
ugugaaauugaaugcccauugc

SEQ ID NO: 909153 - RNA, 22 nt, Human
uucuauaagacucauauuucuu

SEQ ID NO: 909154 - RNA, 22 nt, Human
ggacugaacacuuaaaugucca

SEQ ID NO: 909155 - RNA, 16 nt, Human
ccuggcccggcuuccu

SEQ ID NO: 909156 - RNA, 22 nt, Human
gggucaggaagaauucugccaa

SEQ ID NO: 909157 - RNA, 22 nt, Human
cugcccugcuugaugacagcga

SEQ ID NO: 909158 - RNA, 22 nt, Human
gcaggugauucacccugggccu

SEQ ID NO: 909159 - RNA, 22 nt, Human
ucuucacauuuuaagaaguucu

SEQ ID NO: 909160 - RNA, 22 nt, Human
gaaucccuugcaaguuguugua

SEQ ID NO: 909161 - RNA, 22 nt, Human
uuugaugaaccuauauaauuug

SEQ ID NO: 909162 - RNA, 22 nt, Human
acucagagaauaucuagaagga

SEQ ID NO: 909163 - RNA, 22 nt, Human
cagcaggaagguuuccccugca

SEQ ID NO: 909164 - RNA, 22 nt, Human
auggacaaauguaaggcauaau

SEQ ID NO: 909165 - RNA, 22 nt, Human
guuucucaguuuggucugcaga

SEQ ID NO: 909166 - RNA, 22 nt, Human
aaauagcuacaugaucucuagg

SEQ ID NO: 909167 - RNA, 22 nt, Human
ucauucuugaucacuaguuagu

SEQ ID NO: 909168 - RNA, 22 nt, Human
uuucaguuuuauaacuuuggcc

SEQ ID NO: 909169 - RNA, 23 nt, Human
ugggauggauucaccagugugcu

SEQ ID NO: 909170 - RNA, 22 nt, Human
agcacagagauuauuuacaaga

SEQ ID NO: 909171 - RNA, 22 nt, Human
ccugaggcccuggcugugcuga

SEQ ID NO: 909172 - RNA, 22 nt, Human
uguccugugucuaggggucuuc

SEQ ID NO: 909173 - RNA, 22 nt, Human
cucagagcucagcuuuguuagu

SEQ ID NO: 909174 - RNA, 22 nt, Human
auggccauagccuuauagcagg

SEQ ID NO: 909175 - RNA, 17 nt, Human
uguagcuucuccuucuc

SEQ ID NO: 909176 - RNA, 22 nt, Human
agcuuguuguuacugaugcauu

SEQ ID NO: 909177 - RNA, 22 nt, Human
caggaguucaagguugcaguga

SEQ ID NO: 909178 - RNA, 22 nt, Human
agaggggacagccaccugcccg

SEQ ID NO: 909179 - RNA, 22 nt, Human
cugccaggcacgugcagcauca

SEQ ID NO: 909180 - RNA, 22 nt, Human
cuguguguuuauaucauuuccu

SEQ ID NO: 909181 - RNA, 22 nt, Human
uaagcccaggaaugcacuucag

SEQ ID NO: 909182 - RNA, 22 nt, Human
cucaggagacaguguccacaug

SEQ ID NO: 909183 - RNA, 22 nt, Human
ucugugcucaaguucugccucu

SEQ ID NO: 909184 - RNA, 22 nt, Human
gaaccuuuuuccaaguaaacaa

SEQ ID NO: 909185 - RNA, 22 nt, Human
aucauuguaaauaaugcugcca

SEQ ID NO: 909186 - RNA, 22 nt, Human
agcugaagcaacaacaggaugg

SEQ ID NO: 909187 - RNA, 21 nt, Human
gagacagacuuucguccccug

SEQ ID NO: 909188 - RNA, 22 nt, Human
caggguagggcaagggaaccug

SEQ ID NO: 909189 - RNA, 22 nt, Human
cagguagcugcuggccauguac

SEQ ID NO: 909190 - RNA, 22 nt, Human
cucuuccauuucuacuucacag

SEQ ID NO: 909191 - RNA, 20 nt, Human
ugcacagggugggaagcaac

SEQ ID NO: 909192 - RNA, 22 nt, Human
ugaagacagaccaaggagaaug

SEQ ID NO: 909193 - RNA, 22 nt, Human
uuuucaugaggaaauacugccc

SEQ ID NO: 909194 - RNA, 22 nt, Human
caagcagggauacugcagggag

SEQ ID NO: 909195 - RNA, 22 nt, Human
aauuuacaguugcugaugguac

SEQ ID NO: 909196 - RNA, 22 nt, Human
agcaggagcccuuaucaccagg

SEQ ID NO: 909197 - RNA, 22 nt, Human
caucacagaaauaaacauaccu

SEQ ID NO: 909198 - RNA, 19 nt, Human
ucugagggagcacgaaggc

SEQ ID NO: 909199 - RNA, 22 nt, Human
cuugccugggacugaggcauuu

SEQ ID NO: 909200 - RNA, 22 nt, Human
auacauaauuacuuccgauguu

SEQ ID NO: 909201 - RNA, 22 nt, Human
uuaggaaucaccugcagaucuu

SEQ ID NO: 909202 - RNA, 22 nt, Human
agguggaguuaagugugaacug

SEQ ID NO: 909203 - RNA, 22 nt, Human
gagcugggauuugaaccuggga

SEQ ID NO: 909204 - RNA, 22 nt, Human
aaauguguuccuuugcuacaga

SEQ ID NO: 909205 - RNA, 22 nt, Human
auuucaaggcuacagaaaccuu

SEQ ID NO: 909206 - RNA, 22 nt, Human
caggguccggcugccuggcugu

SEQ ID NO: 909207 - RNA, 22 nt, Human
agcauuaauaagaaauggcucc

SEQ ID NO: 909208 - RNA, 22 nt, Human
cccagaggugacaucccauucu

SEQ ID NO: 909209 - RNA, 22 nt, Human
cuuuggaaggcagagcucugug

SEQ ID NO: 909210 - RNA, 22 nt, Human
gcaccugcuggguguagaggcu

SEQ ID NO: 909211 - RNA, 22 nt, Human
uucuucuuucccccugugguac

SEQ ID NO: 909212 - RNA, 22 nt, Human
uguuucaaagaaagaaaauaua

SEQ ID NO: 909213 - RNA, 22 nt, Human
cacagagauuagaauuagacua

SEQ ID NO: 909214 - RNA, 22 nt, Human
agggggguggaucaccugaggu

SEQ ID NO: 909215 - RNA, 22 nt, Human
auuucaugaauuccagaagcuu

SEQ ID NO: 909216 - RNA, 22 nt, Human
uagcaaauacaugauguaauuu

SEQ ID NO: 909217 - RNA, 20 nt, Human
aggaacuggaagggaggaaa

SEQ ID NO: 909218 - RNA, 22 nt, Human
uuucacaggccuuuuguagccc

SEQ ID NO: 909219 - RNA, 22 nt, Human
gcugcagagccuggagcccugg

SEQ ID NO: 909220 - RNA, 22 nt, Human
auuugcaugaccuuugcaagug

SEQ ID NO: 909221 - RNA, 22 nt, Human
ggcuccaggaaccuccucuccu

SEQ ID NO: 909222 - RNA, 20 nt, Human
ugccaggcacggagugcaug

SEQ ID NO: 909223 - RNA, 22 nt, Human
cucagaaguucagccuagagua

SEQ ID NO: 909224 - RNA, 22 nt, Human
ucuagagcuuuuuccucuugua

SEQ ID NO: 909225 - RNA, 22 nt, Human
uguaccaggugauggagucaua

SEQ ID NO: 909226 - RNA, 22 nt, Human
uuccuggucugugccauucaga

SEQ ID NO: 909227 - RNA, 22 nt, Human
auuaaaauuccaagguaugcca

SEQ ID NO: 909228 - RNA, 22 nt, Human
uaacauucuuaacuuagaaaca

SEQ ID NO: 909229 - RNA, 22 nt, Human
ugcugcacagauugccuuuuac

SEQ ID NO: 909230 - RNA, 22 nt, Human
uggcuuuauccaucaucgccaa

SEQ ID NO: 909231 - RNA, 22 nt, Human
uuuagcagcugguguuaccaua

SEQ ID NO: 909232 - RNA, 17 nt, Human
gcucuggcacaggauug

SEQ ID NO: 909233 - RNA, 22 nt, Human
cuggcuggccggaggcaucccu

SEQ ID NO: 909234 - RNA, 22 nt, Human
agcuccugcucuuugucccuaa

SEQ ID NO: 909235 - RNA, 22 nt, Human
cuggguaaaggcugcuuuucua

SEQ ID NO: 909236 - RNA, 22 nt, Human
uccuggggcucugagcgagaca

SEQ ID NO: 909237 - RNA, 22 nt, Human
cuugcugucuugcauuuagagc

SEQ ID NO: 909238 - RNA, 22 nt, Human
uuaacaaagcucuguuccuuuu

SEQ ID NO: 909239 - RNA, 22 nt, Human
uuccacauuccuuacauucaua

SEQ ID NO: 909240 - RNA, 22 nt, Human
ugagccaguggaagauggcagu

SEQ ID NO: 909241 - RNA, 23 nt, Human
uggaauguuucuuguacugaaug

SEQ ID NO: 909242 - RNA, 22 nt, Human
aaacugcacuuuauuuugucaa

SEQ ID NO: 909243 - RNA, 22 nt, Human
ugugaggauguuaaggggauga

SEQ ID NO: 909244 - RNA, 22 nt, Human
aaguucuuugccagacacgugu

SEQ ID NO: 909245 - RNA, 22 nt, Human
agcugcugguuuaagggauggg

SEQ ID NO: 909246 - RNA, 22 nt, Human
cuuucucuuacccaaggaucug

SEQ ID NO: 909247 - RNA, 22 nt, Human
ggagcacagccuugccaguacc

SEQ ID NO: 909248 - RNA, 22 nt, Human
cacaagauggucacauaagugc

SEQ ID NO: 909249 - RNA, 22 nt, Human
ggcagcacugcagcuuguuggg

SEQ ID NO: 909250 - RNA, 22 nt, Human
cuacccuuaaguuucugugggg

SEQ ID NO: 909251 - RNA, 22 nt, Human
uugacuuuucuuggucacauga

SEQ ID NO: 909252 - RNA, 22 nt, Human
gaggaaggauuuaguuugaggg

SEQ ID NO: 909253 - RNA, 22 nt, Human
auucuucacaaauauauagaag

SEQ ID NO: 909254 - RNA, 22 nt, Human
aguuacacaacuuaucacaucu

SEQ ID NO: 909255 - RNA, 22 nt, Human
guaaaauucuagcaucugaaag

SEQ ID NO: 909256 - RNA, 22 nt, Human
gcucuggcuacuguggcuaccg

SEQ ID NO: 909257 - RNA, 22 nt, Human
gcaaaacucgcaauuacuuuug

SEQ ID NO: 909258 - RNA, 22 nt, Human
ccucuucugagugagacucccu

SEQ ID NO: 909259 - RNA, 22 nt, Human
ccagaaaagcaucugguucuuu

SEQ ID NO: 909260 - RNA, 22 nt, Human
uucagaaaggauaauuggaagg

SEQ ID NO: 909261 - RNA, 22 nt, Human
accuagaauuuaaaacauugcu

SEQ ID NO: 909262 - RNA, 22 nt, Human
uguguggauucaucucaaagag

SEQ ID NO: 909263 - RNA, 22 nt, Human
cugcagagaugaagaagguggc

SEQ ID NO: 909264 - RNA, 22 nt, Human
cccaguuucaacuuuccagugg

SEQ ID NO: 909265 - RNA, 22 nt, Human
aucaacagagcaaagccugaac

SEQ ID NO: 909266 - RNA, 22 nt, Human
gccagucugcucccacaaguuc

SEQ ID NO: 909267 - RNA, 22 nt, Human
uugauuuuuccagcuucuagag

SEQ ID NO: 909268 - RNA, 23 nt, Human
ugcuggcuuuuaucuggucccua

SEQ ID NO: 909269 - RNA, 22 nt, Human
auggaaugcucccuggggacau

SEQ ID NO: 909270 - RNA, 22 nt, Human
ucuguucuuguccccacuucag

SEQ ID NO: 909271 - RNA, 22 nt, Human
agagcuuuucuguaauaacauc

SEQ ID NO: 909272 - RNA, 22 nt, Human
gcuuccuggaacaacuguugcu

SEQ ID NO: 909273 - RNA, 21 nt, Human
gccuucacucccagaguuugu

SEQ ID NO: 909274 - RNA, 18 nt, Human
agcuccaucugucagcau

SEQ ID NO: 909275 - RNA, 22 nt, Human
cagaaguaagauuacugugagu

SEQ ID NO: 909276 - RNA, 22 nt, Human
aggcuaauauuuaugaaaccaa

SEQ ID NO: 909277 - RNA, 22 nt, Human
cagcccugaguuagcccacgga

SEQ ID NO: 909278 - RNA, 22 nt, Human
aguuuccuuggauucaauuugg

SEQ ID NO: 909279 - RNA, 22 nt, Human
aaaagccaagguccucuucaga

SEQ ID NO: 909280 - RNA, 22 nt, Human
ucaucugaggcaccagagcaua

SEQ ID NO: 909281 - RNA, 22 nt, Human
ugcugucaguuggcaggaugag

SEQ ID NO: 909282 - RNA, 22 nt, Human
auucuaauggcagagacuccug

SEQ ID NO: 909283 - RNA, 22 nt, Human
cugugccagagggugaccaagg

SEQ ID NO: 909284 - RNA, 22 nt, Human
ucaaaugcaccucucauuuguu

SEQ ID NO: 909285 - RNA, 22 nt, Human
ggaaucuuugaaggauuuuaag

SEQ ID NO: 909286 - RNA, 22 nt, Human
uauuauccaaagagcugggagc

SEQ ID NO: 909287 - RNA, 20 nt, Human
auuucaguguuugcaauuuc

SEQ ID NO: 909288 - RNA, 22 nt, Human
cuugaaauccagauuucagagg

SEQ ID NO: 909289 - RNA, 21 nt, Human
ucuauaauaugcaggucauca

SEQ ID NO: 909290 - RNA, 22 nt, Human
uauccauuaggucuauggucaa

SEQ ID NO: 909291 - RNA, 21 nt, Human
cugcuguggcccccgacaugc

SEQ ID NO: 909292 - RNA, 22 nt, Human
acagcugugaaaauccacagga

SEQ ID NO: 909293 - RNA, 22 nt, Human
gcuuugcuggcuugaaaugcug

SEQ ID NO: 909294 - RNA, 22 nt, Human
gggcuagggccugcuaugguuu

SEQ ID NO: 909295 - RNA, 21 nt, Human
cacagaauauacauuuuaguu

SEQ ID NO: 909296 - RNA, 22 nt, Human
augcauauugucauuuaguccu

SEQ ID NO: 909297 - RNA, 22 nt, Human
aauuccacagaugucuaucugu

SEQ ID NO: 909298 - RNA, 22 nt, Human
agggucuaucucucugccuuug

SEQ ID NO: 909299 - RNA, 22 nt, Human
agaggggagagcuaagcaauuc

SEQ ID NO: 909300 - RNA, 19 nt, Human
ucuguggccuucccugaug

SEQ ID NO: 909301 - RNA, 22 nt, Human
ugccaaggagcuggaucagggc

SEQ ID NO: 909302 - RNA, 22 nt, Human
ugccagcuguucccacccaaaa

SEQ ID NO: 909303 - RNA, 22 nt, Human
ggaauguuuuccagaccuagau

SEQ ID NO: 909304 - RNA, 22 nt, Human
uccaggcaaagugcugggcugc

SEQ ID NO: 909305 - RNA, 23 nt, Human
agcuaaggaagcugaggcacagu

SEQ ID NO: 909306 - RNA, 22 nt, Human
uccuggucagugccaaacuggu

SEQ ID NO: 909307 - RNA, 22 nt, Human
ucuguuuuagauaagaaaggcu

SEQ ID NO: 909308 - RNA, 22 nt, Human
ggugugcuugggcuucgcaggg

SEQ ID NO: 909309 - RNA, 22 nt, Human
aaaaguaauugugguuuuugcc

SEQ ID NO: 909310 - RNA, 22 nt, Human
agacuacagaauggcauuguuu

SEQ ID NO: 909311 - RNA, 22 nt, Human
agcuguggaguaggggguugga

SEQ ID NO: 909312 - RNA, 22 nt, Human
cuggcugggguaccaguugaac

SEQ ID NO: 909313 - RNA, 21 nt, Human
auaauguacaaaaacugucuu

SEQ ID NO: 909314 - RNA, 22 nt, Human
uuuucaccauagacacuggucc

SEQ ID NO: 909315 - RNA, 19 nt, Human
ggauucugcaguuuucaca

SEQ ID NO: 909316 - RNA, 22 nt, Human
cuggaagguuccucccagcucc

SEQ ID NO: 909317 - RNA, 19 nt, Human
gggcagaauggcaucucag

SEQ ID NO: 909318 - RNA, 20 nt, Human
ccccacacuauugagcacuu

SEQ ID NO: 909319 - RNA, 22 nt, Human
uggagcaggucggcaccauuug

SEQ ID NO: 909320 - RNA, 22 nt, Human
ucuuugcaaaauacaacaaugg

SEQ ID NO: 909321 - RNA, 22 nt, Human
agcaccuguggcucaugcucgu

SEQ ID NO: 909322 - RNA, 22 nt, Human
gccagccugugggggcucugug

SEQ ID NO: 909323 - RNA, 22 nt, Human
ccugccaugguagacuuccagg

SEQ ID NO: 909324 - RNA, 22 nt, Human
caggcauggagaggcagagacu

SEQ ID NO: 909325 - RNA, 22 nt, Human
gggagggguugcauguuugagu

SEQ ID NO: 909326 - RNA, 22 nt, Human
agcugcagcacuccaguagccg

SEQ ID NO: 909327 - RNA, 22 nt, Human
gcuauucauggagcauguacug

SEQ ID NO: 909328 - RNA, 18 nt, Human
ucucugaauauuuuaugu

SEQ ID NO: 909329 - RNA, 22 nt, Human
aagauacacggucaacucucaa

SEQ ID NO: 909330 - RNA, 22 nt, Human
gcccugagcacugcugcugggg

SEQ ID NO: 909331 - RNA, 22 nt, Human
cacaggaccaauucacauucca

SEQ ID NO: 909332 - RNA, 16 nt, Human
cuuuuucuccccucuu

SEQ ID NO: 909333 - RNA, 22 nt, Human
gcaaagcaagcugucagccuca

SEQ ID NO: 909334 - RNA, 22 nt, Human
agcagcagcauugagcgcuugu

SEQ ID NO: 909335 - RNA, 22 nt, Human
gucaggaugcuauuguuauuaa

SEQ ID NO: 909336 - RNA, 22 nt, Human
ucagaggcuuccuuccucggag

SEQ ID NO: 909337 - RNA, 22 nt, Human
guuucauacagauuauucaugg

SEQ ID NO: 909338 - RNA, 22 nt, Human
ucucucuucaugcuuuuagaau

SEQ ID NO: 909339 - RNA, 22 nt, Human
agccacauuuuucugcuccuga

SEQ ID NO: 909340 - RNA, 22 nt, Human
ucaccccuggcccagucuugga

SEQ ID NO: 909341 - RNA, 22 nt, Human
aggcuaagaggccuucagauac

SEQ ID NO: 909342 - RNA, 18 nt, Human
auguggcuagugcaacug

SEQ ID NO: 909343 - RNA, 22 nt, Human
aucuacaaaaacugucucagga

SEQ ID NO: 909344 - RNA, 22 nt, Human
gagaggggcgcgcagcucgcga

SEQ ID NO: 909345 - RNA, 22 nt, Human
ggagccuguuaguugagugcuc

SEQ ID NO: 909346 - RNA, 22 nt, Human
uuugguuuuuaccugcugagag

SEQ ID NO: 909347 - RNA, 22 nt, Human
guccuucaagaguccccuacug

SEQ ID NO: 909348 - RNA, 22 nt, Human
ugccuggguccaggccaagccu

SEQ ID NO: 909349 - RNA, 23 nt, Human
cugugugugccgaggguggccac

SEQ ID NO: 909350 - RNA, 17 nt, Human
uuucaaagcagucagga

SEQ ID NO: 909351 - RNA, 22 nt, Human
aagagccauauaugcagcuaga

SEQ ID NO: 909352 - RNA, 22 nt, Human
ucucagaguuccucuggagucc

SEQ ID NO: 909353 - RNA, 22 nt, Human
cuguguccugcgucaagccaau

SEQ ID NO: 909354 - RNA, 22 nt, Human
uuacaauaccacaucaccucau

SEQ ID NO: 909355 - RNA, 22 nt, Human
ggggcuuuugcacgugggaggc

SEQ ID NO: 909356 - RNA, 22 nt, Human
cagguaggauggaagggcucaa

SEQ ID NO: 909357 - RNA, 18 nt, Human
cauguaugcaaauaagca

SEQ ID NO: 909358 - RNA, 22 nt, Human
gcaaauggagugaagagcugga

SEQ ID NO: 909359 - RNA, 22 nt, Human
aguggcaauugacaacaaagga

SEQ ID NO: 909360 - RNA, 22 nt, Human
ccagagucuaugaguccucauu

SEQ ID NO: 909361 - RNA, 22 nt, Human
auaagacacgcaaauagguacg

SEQ ID NO: 909362 - RNA, 22 nt, Human
ccuggcuucagcauugcccucu

SEQ ID NO: 909363 - RNA, 22 nt, Human
aguauuucugcucaugaaagag

SEQ ID NO: 909364 - RNA, 22 nt, Human
gcuggcaggagaccauacccua

SEQ ID NO: 909365 - RNA, 22 nt, Human
agcugcugugugcucaggcagg

SEQ ID NO: 909366 - RNA, 22 nt, Human
ucuuccaaaauuagucucaguu

SEQ ID NO: 909367 - RNA, 22 nt, Human
agcuagcaggaagcaguuuagu

SEQ ID NO: 909368 - RNA, 22 nt, Human
ucagccucagguguucagauuu

SEQ ID NO: 909369 - RNA, 22 nt, Human
ugauuuccucuacuagcaauua

SEQ ID NO: 909370 - RNA, 22 nt, Human
cugacagauuagaugugcauau

SEQ ID NO: 909371 - RNA, 19 nt, Human
aaccuuagcuucucaggcc

SEQ ID NO: 909372 - RNA, 22 nt, Human
aauacagaggaaacauuuaaua

SEQ ID NO: 909373 - RNA, 22 nt, Human
uacaaaggacagcagaaaaaua

SEQ ID NO: 909374 - RNA, 18 nt, Human
cucugggagaggcauaca

SEQ ID NO: 909375 - RNA, 22 nt, Human
uauuuauucuuuguacugccuu

SEQ ID NO: 909376 - RNA, 19 nt, Human
gcuggggccugaccagaca

SEQ ID NO: 909377 - RNA, 22 nt, Human
acuuuaguaaacuuauguuacu

SEQ ID NO: 909378 - RNA, 22 nt, Human
ucucuagcuuccuuaggaacac

SEQ ID NO: 909379 - RNA, 22 nt, Human
agauucaugggaaagcuuuagg

SEQ ID NO: 909380 - RNA, 22 nt, Human
ucugggcucugucagcaccucu

SEQ ID NO: 909381 - RNA, 22 nt, Human
aaacacugugucaaacuggggc

SEQ ID NO: 909382 - RNA, 22 nt, Human
caugcaaagcguuuugaccagc

SEQ ID NO: 909383 - RNA, 22 nt, Human
aaguugauuaaucuuucgagaa

SEQ ID NO: 909384 - RNA, 22 nt, Human
gguguggggagguucugcuucu

SEQ ID NO: 909385 - RNA, 23 nt, Human
aacuaccacaacucuugagaugc

SEQ ID NO: 909386 - RNA, 22 nt, Human
auguuuaaaggguugagaaaua

SEQ ID NO: 909387 - RNA, 22 nt, Human
cucaggagcuuccucagcccau

SEQ ID NO: 909388 - RNA, 22 nt, Human
cuuucagagguuacucaggaaa

SEQ ID NO: 909389 - RNA, 22 nt, Human
gguauggagucugaguuucuag

SEQ ID NO: 909390 - RNA, 22 nt, Human
ucuguccauuuggaguuggaag

SEQ ID NO: 909391 - RNA, 22 nt, Human
cuguuugucucucuccugaccc

SEQ ID NO: 909392 - RNA, 22 nt, Human
uuuuuguagucauuagaagagg

SEQ ID NO: 909393 - RNA, 22 nt, Human
uaguuuuuaaguguacaauuuc

SEQ ID NO: 909394 - RNA, 22 nt, Human
ucacagugcacagcaggcgugg

SEQ ID NO: 909395 - RNA, 17 nt, Human
agugaaauuuacauugc

SEQ ID NO: 909396 - RNA, 22 nt, Human
agcaucugcauauugggagacc

SEQ ID NO: 909397 - RNA, 22 nt, Human
ggagaaggguauguguggcgga

SEQ ID NO: 909398 - RNA, 22 nt, Human
guguggccaauuaugggcauuc

SEQ ID NO: 909399 - RNA, 23 nt, Human
gcugauaaugcauucuguuuaau

SEQ ID NO: 909400 - RNA, 22 nt, Human
ucuggucccugugucaccucuc

SEQ ID NO: 909401 - RNA, 22 nt, Human
ugcaauuuuaauacauuagagg

SEQ ID NO: 909402 - RNA, 22 nt, Human
acuuguucauugaguacauaug

SEQ ID NO: 909403 - RNA, 22 nt, Human
auggacagagcugagcuccacc

SEQ ID NO: 909404 - RNA, 22 nt, Human
gacaccagcaaggcugugagga

SEQ ID NO: 909405 - RNA, 22 nt, Human
ugaggccugcuuggaauugaau

SEQ ID NO: 909406 - RNA, 22 nt, Human
auuccagagaaaggccuggcug

SEQ ID NO: 909407 - RNA, 22 nt, Human
gcuagcuuuauaaugcugggcg

SEQ ID NO: 909408 - RNA, 22 nt, Human
ucacaugccuuuuacucugcac

SEQ ID NO: 909409 - RNA, 22 nt, Human
cugucacagcccgcgucuccuc

SEQ ID NO: 909410 - RNA, 22 nt, Human
aggcggcuucugaggaggcugc

SEQ ID NO: 909411 - RNA, 22 nt, Human
ggcaggagggcggacaaugacc

SEQ ID NO: 909412 - RNA, 22 nt, Human
gcucucuguuauuaagaucuuu

SEQ ID NO: 909413 - RNA, 22 nt, Human
aacaaagaugggugggaaagag

SEQ ID NO: 909414 - RNA, 22 nt, Human
uacacauuucucuuagagacac

SEQ ID NO: 909415 - RNA, 22 nt, Human
ucugugugcccuaaagccugcu

SEQ ID NO: 909416 - RNA, 22 nt, Human
ucacaggacccugaggguggcg

SEQ ID NO: 909417 - RNA, 22 nt, Human
uugugcaagaagccagcaccaa

SEQ ID NO: 909418 - RNA, 21 nt, Human
acugaacuuguguucuagagg

SEQ ID NO: 909419 - RNA, 22 nt, Human
ucuggcagaaggcagaaauuca

SEQ ID NO: 909420 - RNA, 22 nt, Human
auucugggcaagccuucuuaua

SEQ ID NO: 909421 - RNA, 22 nt, Human
agugaagaggaaguggggcaca

SEQ ID NO: 909422 - RNA, 22 nt, Human
gcucaaagcauaagacaucuaa

SEQ ID NO: 909423 - RNA, 22 nt, Human
uuggcuuuuaugcagcuuaggu

SEQ ID NO: 909424 - RNA, 22 nt, Human
uucuaguuaauguagcaucuug

SEQ ID NO: 909425 - RNA, 23 nt, Human
gggaccugguaggaggugauugg

SEQ ID NO: 909426 - RNA, 22 nt, Human
aaagggaggggcgauaagccgg

SEQ ID NO: 909427 - RNA, 22 nt, Human
guuuggcaauauuuguggaaca

SEQ ID NO: 909428 - RNA, 22 nt, Human
uuguuaaagaugcagauuccau

SEQ ID NO: 909429 - RNA, 23 nt, Human
uccaaauaccugucaccuugucu

SEQ ID NO: 909430 - RNA, 22 nt, Human
uggccagauucaugcauguauc

SEQ ID NO: 909431 - RNA, 22 nt, Human
uuccuguggccuuacaucugug

SEQ ID NO: 909432 - RNA, 22 nt, Human
gguggcagagacauaggacaua

SEQ ID NO: 909433 - RNA, 22 nt, Human
uugcaucagaaaauaugggaag

SEQ ID NO: 909434 - RNA, 22 nt, Human
uagaaauguugguauuaacauu

SEQ ID NO: 909435 - RNA, 22 nt, Human
acucugugugaguagagccugu

SEQ ID NO: 909436 - RNA, 22 nt, Human
aaacaugauauugaggcugggc

SEQ ID NO: 909437 - RNA, 22 nt, Human
ggcuggccucaggguccucgcu

SEQ ID NO: 909438 - RNA, 22 nt, Human
uucucugcauuguaaagagcca

SEQ ID NO: 909439 - RNA, 22 nt, Human
ggcuggcaggcacaguaugcaa

SEQ ID NO: 909440 - RNA, 22 nt, Human
aggccacaggaguacugucggu

SEQ ID NO: 909441 - RNA, 22 nt, Human
agauaaauuccuaagauuucag

SEQ ID NO: 909442 - RNA, 19 nt, Human
agugaacacaaagagaagg

SEQ ID NO: 909443 - RNA, 22 nt, Human
aaagaucacgucccaggacucg

SEQ ID NO: 909444 - RNA, 20 nt, Human
cccugugauuggcaaguguc

SEQ ID NO: 909445 - RNA, 22 nt, Human
uagaaacagagcagguggccca

SEQ ID NO: 909446 - RNA, 17 nt, Human
agcagcuggcacaggag

SEQ ID NO: 909447 - RNA, 22 nt, Human
uaaaugacauucuuaagucuug

SEQ ID NO: 909448 - RNA, 22 nt, Human
uggauuugcuaccuucugauau

SEQ ID NO: 909449 - RNA, 22 nt, Human
cagcccagugcauuuguguacu

SEQ ID NO: 909450 - RNA, 22 nt, Human
ugacaucauuaguaacauagcu

SEQ ID NO: 909451 - RNA, 22 nt, Human
gccagcugccaaguugugagau

SEQ ID NO: 909452 - RNA, 22 nt, Human
aaacaugaugucauauaugcca

SEQ ID NO: 909453 - RNA, 22 nt, Human
gucuauguguaauagcaugugu

SEQ ID NO: 909454 - RNA, 22 nt, Human
uauuugcaacauaaaacucuga

SEQ ID NO: 909455 - RNA, 22 nt, Human
cagcaucucauuugacuucugc

SEQ ID NO: 909456 - RNA, 14 nt, Human
caggaagacucagc

SEQ ID NO: 909457 - RNA, 22 nt, Human
ugucauuuugucucacugcuau

SEQ ID NO: 909458 - RNA, 17 nt, Human
ucaaaguauucugaugc

SEQ ID NO: 909459 - RNA, 22 nt, Human
ccucacagaggggcagccaucu

SEQ ID NO: 909460 - RNA, 22 nt, Human
aggucacacuuggaucauagaa

SEQ ID NO: 909461 - RNA, 22 nt, Human
ggcagggucuggacugaaagcu

SEQ ID NO: 909462 - RNA, 22 nt, Human
gcuguagguuuuuccaggaguu

SEQ ID NO: 909463 - RNA, 22 nt, Human
uuggcccagcaugcgggucugu

SEQ ID NO: 909464 - RNA, 22 nt, Human
cuggaaugagcagggcuuaugg

SEQ ID NO: 909465 - RNA, 22 nt, Human
agggccagggaaacgaucagca

SEQ ID NO: 909466 - RNA, 22 nt, Human
agggccaguggguugaaaggca

SEQ ID NO: 909467 - RNA, 22 nt, Human
uagcauuuggcaccaguuauuu

SEQ ID NO: 909468 - RNA, 17 nt, Human
uuaguguaucuguuuug

SEQ ID NO: 909469 - RNA, 22 nt, Human
gacagguugaaguaucaaaggu

SEQ ID NO: 909470 - RNA, 22 nt, Human
guugagaguuaagcgggcuaau

SEQ ID NO: 909471 - RNA, 20 nt, Human
cagaugcuggaucuuggucc

SEQ ID NO: 909472 - RNA, 19 nt, Human
uuugaaagaguuuuauugg

SEQ ID NO: 909473 - RNA, 22 nt, Human
uuucaaaccacugagguucuga

SEQ ID NO: 909474 - RNA, 21 nt, Human
auauuuuuguuuggacuguca

SEQ ID NO: 909475 - RNA, 22 nt, Human
gcuucuauccuaccaugucuug

SEQ ID NO: 909476 - RNA, 21 nt, Human
gcugcaucaaucuacccaggg

SEQ ID NO: 909477 - RNA, 19 nt, Human
ucaggaaguugaugaggug

SEQ ID NO: 909478 - RNA, 22 nt, Human
cagcugccugucuggaggcaau

SEQ ID NO: 909479 - RNA, 22 nt, Human
ggucuccaaagcuuaggacuac

SEQ ID NO: 909480 - RNA, 22 nt, Human
agcacauuaguaucuaagaaca

SEQ ID NO: 909481 - RNA, 22 nt, Human
uucugugugcugucuuggcuuu

SEQ ID NO: 909482 - RNA, 22 nt, Human
uguguuggcuugccuguuaggc

SEQ ID NO: 909483 - RNA, 22 nt, Human
gugcaucagaguguccuagaca

SEQ ID NO: 909484 - RNA, 22 nt, Human
ccugggauuugcgccagaccuu

SEQ ID NO: 909485 - RNA, 22 nt, Human
cugugccuucuacuucacucua

SEQ ID NO: 909486 - RNA, 22 nt, Human
uuguauuaauugaaaugaaugc

SEQ ID NO: 909487 - RNA, 22 nt, Human
ggcucccugccuguccucaguc

SEQ ID NO: 909488 - RNA, 21 nt, Human
cagagguggccugaccucuga

SEQ ID NO: 909489 - RNA, 22 nt, Human
ucauuauaaacauaugcuaaag

SEQ ID NO: 909490 - RNA, 22 nt, Human
uucuuuuaauguucugaaguuu

SEQ ID NO: 909491 - RNA, 22 nt, Human
ggcucugcccagguggacagca

SEQ ID NO: 909492 - RNA, 22 nt, Human
gcucuugucagagaggccagcu

SEQ ID NO: 909493 - RNA, 22 nt, Human
gcucagagauggggaaugaaaa

SEQ ID NO: 909494 - RNA, 22 nt, Human
uggugaggccaaagccaugaca

SEQ ID NO: 909495 - RNA, 22 nt, Human
gcaagcaagcagguagagcuga

SEQ ID NO: 909496 - RNA, 22 nt, Human
gucaagcagaagauaauuuaaa

SEQ ID NO: 909497 - RNA, 22 nt, Human
acauugauacugagauacaaag

SEQ ID NO: 909498 - RNA, 22 nt, Human
aggcucugggaagcagugaguu

SEQ ID NO: 909499 - RNA, 23 nt, Human
acacuucacccauugugauagga

SEQ ID NO: 909500 - RNA, 22 nt, Human
agauugaauauagagauucuug

SEQ ID NO: 909501 - RNA, 22 nt, Human
uguucacaaggugaugcuuuga

SEQ ID NO: 909502 - RNA, 22 nt, Human
aggcucuguuugcugugguacc

SEQ ID NO: 909503 - RNA, 22 nt, Human
acucucucacacacgccuauau

SEQ ID NO: 909504 - RNA, 22 nt, Human
uuuauauuguaaaaaugguucu

SEQ ID NO: 909505 - RNA, 22 nt, Human
ucaaauaccagcaauuucaugu

SEQ ID NO: 909506 - RNA, 22 nt, Human
acaggcaguugagguuugugug

SEQ ID NO: 909507 - RNA, 22 nt, Human
aaagagacaccaaagacucuag

SEQ ID NO: 909508 - RNA, 22 nt, Human
ccugugugguagccagcggugc

SEQ ID NO: 909509 - RNA, 22 nt, Human
ugaacucuccaggcaaaugauc

SEQ ID NO: 909510 - RNA, 22 nt, Human
auucauguuuucuugcuucaag

SEQ ID NO: 909511 - RNA, 22 nt, Human
aggcagaugguaacugugauau

SEQ ID NO: 909512 - RNA, 22 nt, Human
cugggccugugggcacacggac

SEQ ID NO: 909513 - RNA, 20 nt, Human
ucugugcauugccugcuggu

SEQ ID NO: 909514 - RNA, 22 nt, Human
aggcucaucugagcagaaaccu

SEQ ID NO: 909515 - RNA, 18 nt, Human
uaagucauuugaaaugcc

SEQ ID NO: 909516 - RNA, 17 nt, Human
aggcugcugggccaggg

SEQ ID NO: 909517 - RNA, 22 nt, Human
acagcagcuggguucccaccau

SEQ ID NO: 909518 - RNA, 22 nt, Human
ugagccuggagcccagauguuu

SEQ ID NO: 909519 - RNA, 20 nt, Human
ugagccaggcuaggaagggc

SEQ ID NO: 909520 - RNA, 22 nt, Human
agaagaguaguaacagaaauua

SEQ ID NO: 909521 - RNA, 22 nt, Human
ccaggcucaggugcgagagaca

SEQ ID NO: 909522 - RNA, 22 nt, Human
uccuaacuaauuuguagcaaaa

SEQ ID NO: 909523 - RNA, 22 nt, Human
aaugucaaaugagaggggagaa

SEQ ID NO: 909524 - RNA, 20 nt, Human
uucgcugggaguggccaggc

SEQ ID NO: 909525 - RNA, 22 nt, Human
aggccacaagaaaaugcuucau

SEQ ID NO: 909526 - RNA, 22 nt, Human
cugugcccuguggcuggcaccu

SEQ ID NO: 909527 - RNA, 22 nt, Human
acagugaauccaaauuccuacc

SEQ ID NO: 909528 - RNA, 22 nt, Human
gggugggguguaucggauccua

SEQ ID NO: 909529 - RNA, 22 nt, Human
gaaauacaguugggaggaggua

SEQ ID NO: 909530 - RNA, 22 nt, Human
auguuauuuauugaaacacuuu

SEQ ID NO: 909531 - RNA, 22 nt, Human
acagggcagagggcaguuggua

SEQ ID NO: 909532 - RNA, 22 nt, Human
uaugacaagguggaguaugagu

SEQ ID NO: 909533 - RNA, 22 nt, Human
ccugcugucugcuguguuaagc

SEQ ID NO: 909534 - RNA, 19 nt, Human
cugucugguucauguguuc

SEQ ID NO: 909535 - RNA, 22 nt, Human
cggcuucaaagggagcgagauc

SEQ ID NO: 909536 - RNA, 22 nt, Human
acauuaaacuugcuuggcugua

SEQ ID NO: 909537 - RNA, 20 nt, Human
uuccuggcucuaggaccuug

SEQ ID NO: 909538 - RNA, 22 nt, Human
acacauuuauuacaugcaugug

SEQ ID NO: 909539 - RNA, 22 nt, Human
ccagcaggguugguuucuucug

SEQ ID NO: 909540 - RNA, 22 nt, Human
cagugcccaagaugugccaugc

SEQ ID NO: 909541 - RNA, 22 nt, Human
cuuuguauucauccguaauaau

SEQ ID NO: 909542 - RNA, 22 nt, Human
uaaguccaccucauucuucagc

SEQ ID NO: 909543 - RNA, 22 nt, Human
gugggcagacagugcuuugcag

SEQ ID NO: 909544 - RNA, 22 nt, Human
uaauuucacaguucaacgcaca

SEQ ID NO: 909545 - RNA, 21 nt, Human
cagugcugccuaauagggagu

SEQ ID NO: 909546 - RNA, 22 nt, Human
gggaggugauuaggaccaugua

SEQ ID NO: 909547 - RNA, 22 nt, Human
aagauggaguaguguaaugguu

SEQ ID NO: 909548 - RNA, 19 nt, Human
agcagagcaaaguggcuga

SEQ ID NO: 909549 - RNA, 22 nt, Human
caugaaauauuaguaacuguuu

SEQ ID NO: 909550 - RNA, 22 nt, Human
uuuguacacugucuacuaugaa

SEQ ID NO: 909551 - RNA, 22 nt, Human
auucagugcuguaauacgcuaa

SEQ ID NO: 909552 - RNA, 22 nt, Human
uuauuuggauuuagcuuaucaa

SEQ ID NO: 909553 - RNA, 22 nt, Human
ggcagggcaggaaagucaggaa

SEQ ID NO: 909554 - RNA, 22 nt, Human
caagcccaggauuccccaguua

SEQ ID NO: 909555 - RNA, 22 nt, Human
aagaauacguaucaacaauggu

SEQ ID NO: 909556 - RNA, 22 nt, Human
uuuaccaagcuuuaauuacaua

SEQ ID NO: 909557 - RNA, 22 nt, Human
guucacaguguuuucuuugcau

SEQ ID NO: 909558 - RNA, 22 nt, Human
uuugauuuacuauaagcagcac

SEQ ID NO: 909559 - RNA, 23 nt, Human
acugucugauauguuuuccauca

SEQ ID NO: 909560 - RNA, 22 nt, Human
agcagcaaaguauugggcaaga

SEQ ID NO: 909561 - RNA, 22 nt, Human
agcagcugcagggagggucugc

SEQ ID NO: 909562 - RNA, 22 nt, Human
cauggaaugugaguuguuuagu

SEQ ID NO: 909563 - RNA, 22 nt, Human
cuucagggugacgcaggcugca

SEQ ID NO: 909564 - RNA, 22 nt, Human
aucuacaggauuuuacagaguu

SEQ ID NO: 909565 - RNA, 22 nt, Human
aggcagucagcccugcuagggu

SEQ ID NO: 909566 - RNA, 19 nt, Human
auuguacauugaguuuggc

SEQ ID NO: 909567 - RNA, 22 nt, Human
gagggaagaggccugacauuuu

SEQ ID NO: 909568 - RNA, 22 nt, Human
uucaacuuuggagauuuaauaa

SEQ ID NO: 909569 - RNA, 22 nt, Human
aguuuggacaaaagacuccuua

SEQ ID NO: 909570 - RNA, 22 nt, Human
gcuuugcacagugcuguguuaa

SEQ ID NO: 909571 - RNA, 23 nt, Human
augcaggguuacagggcugacuu

SEQ ID NO: 909572 - RNA, 22 nt, Human
aucuggaagccagauacucagu

SEQ ID NO: 909573 - RNA, 22 nt, Human
aauuguacauaaaccauuuggc

SEQ ID NO: 909574 - RNA, 22 nt, Human
uacaaugauuagcuaacuugcc

SEQ ID NO: 909575 - RNA, 22 nt, Human
uuuguacacaggauguuauaau

SEQ ID NO: 909576 - RNA, 22 nt, Human
ucgcuugaacccaggaagugga

SEQ ID NO: 909577 - RNA, 22 nt, Human
ugcugcuuccugguagauagga

SEQ ID NO: 909578 - RNA, 22 nt, Human
gaggaagggcugccugccgggc

SEQ ID NO: 909579 - RNA, 22 nt, Human
uccaggcagggcagccaucaag

SEQ ID NO: 909580 - RNA, 23 nt, Human
ccugggcauuggcugcagcuucu

SEQ ID NO: 909581 - RNA, 22 nt, Human
cugagccaaccacagcaggagc

SEQ ID NO: 909582 - RNA, 22 nt, Human
uggaaugugaacauacaaggua

SEQ ID NO: 909583 - RNA, 22 nt, Human
uugagacuccugguguagaaua

SEQ ID NO: 909584 - RNA, 22 nt, Human
ggcugccuagacuuggaauuuc

SEQ ID NO: 909585 - RNA, 22 nt, Human
aaagucuuguuacguuccauug

SEQ ID NO: 909586 - RNA, 22 nt, Human
ucagaaguuucaaucccagcug

SEQ ID NO: 909587 - RNA, 22 nt, Human
aaucagcuaaauaaacuaguca

SEQ ID NO: 909588 - RNA, 22 nt, Human
uagggacuaguuucaaggcuaa

SEQ ID NO: 909589 - RNA, 22 nt, Human
gugugagagaagcugccaugga

SEQ ID NO: 909590 - RNA, 22 nt, Human
auuguguuugaaugaggcucca

SEQ ID NO: 909591 - RNA, 22 nt, Human
agcagcuccccucaugcuccac

SEQ ID NO: 909592 - RNA, 22 nt, Human
uuguuuugcuaaagggucauca

SEQ ID NO: 909593 - RNA, 19 nt, Human
ggucaggaauuugacaaua

SEQ ID NO: 909594 - RNA, 22 nt, Human
ugccugugugaccacgggcaag

SEQ ID NO: 909595 - RNA, 22 nt, Human
gaaggugucagcaagucaaagc

SEQ ID NO: 909596 - RNA, 22 nt, Human
auucugaguggaaacuaucaau

SEQ ID NO: 909597 - RNA, 22 nt, Human
ugguaaaugcuccaagcaguac

SEQ ID NO: 909598 - RNA, 22 nt, Human
uguggugguaaugagccagaug

SEQ ID NO: 909599 - RNA, 23 nt, Human
aaacuucaguagugucaucagcc

SEQ ID NO: 909600 - RNA, 22 nt, Human
ugcagggcagcuagggagcuuu

SEQ ID NO: 909601 - RNA, 22 nt, Human
ugcagaagaauguaggcauaag

SEQ ID NO: 909602 - RNA, 22 nt, Human
uaccugaaccaagcccagcucu

SEQ ID NO: 909603 - RNA, 22 nt, Human
cagagcagagugauuguucugg

SEQ ID NO: 909604 - RNA, 22 nt, Human
cagggccucauccucagagauu

SEQ ID NO: 909605 - RNA, 19 nt, Human
guacaagaaugacugagca

SEQ ID NO: 909606 - RNA, 22 nt, Human
agagagcucuggcugggugacc

SEQ ID NO: 909607 - RNA, 22 nt, Human
acaaaugucuacauugagaaua

SEQ ID NO: 909608 - RNA, 19 nt, Human
aggucuaaucauaagacaa

SEQ ID NO: 909609 - RNA, 22 nt, Human
ggugagcacugcccugggucuc

SEQ ID NO: 909610 - RNA, 22 nt, Human
ucugagccccuagaacugagcg

SEQ ID NO: 909611 - RNA, 22 nt, Human
ucucaccauggugcuugcuuau

SEQ ID NO: 909612 - RNA, 22 nt, Human
aaagaaauagauggcauuuaaa

SEQ ID NO: 909613 - RNA, 22 nt, Human
uuguaaacuggauagaccuauu

SEQ ID NO: 909614 - RNA, 22 nt, Human
gcugugcccagccauucuagau

SEQ ID NO: 909615 - RNA, 22 nt, Human
ccaggcaauguucuaagugauu

SEQ ID NO: 909616 - RNA, 22 nt, Human
aacuauguuaauaaguuucauu

SEQ ID NO: 909617 - RNA, 19 nt, Human
auacagagcuuccuaauuu

SEQ ID NO: 909618 - RNA, 22 nt, Human
ccauggccgccgcugcucagga

SEQ ID NO: 909619 - RNA, 22 nt, Human
agagcugaggauccagcugagc

SEQ ID NO: 909620 - RNA, 22 nt, Human
accagugaguauuuguaacaga

SEQ ID NO: 909621 - RNA, 22 nt, Human
ugucuucaucuccaugcacaga

SEQ ID NO: 909622 - RNA, 22 nt, Human
acagcuucuccucgaugucaug

SEQ ID NO: 909623 - RNA, 22 nt, Human
cugccaggccucaucccagcca

SEQ ID NO: 909624 - RNA, 19 nt, Human
uuccugugcugcugugucc

SEQ ID NO: 909625 - RNA, 22 nt, Human
ucucagggcuuuucuuuugaau

SEQ ID NO: 909626 - RNA, 19 nt, Human
aggagccuugagcagugag

SEQ ID NO: 909627 - RNA, 22 nt, Human
ugcacaucuuucagcaucauac

SEQ ID NO: 909628 - RNA, 20 nt, Human
ucagagcugcaggagagaaa

SEQ ID NO: 909629 - RNA, 22 nt, Human
gagcugagggucuaggaggguu

SEQ ID NO: 909630 - RNA, 22 nt, Human
agcagcagugacagccgaaagc

SEQ ID NO: 909631 - RNA, 22 nt, Human
aagcugaaauuccuccugaaau

SEQ ID NO: 909632 - RNA, 22 nt, Human
uauuucugucagccagauaugg

SEQ ID NO: 909633 - RNA, 22 nt, Human
cuguagcuccagccugucuaca

SEQ ID NO: 909634 - RNA, 21 nt, Human
caucacauuacucaaaguccu

SEQ ID NO: 909635 - RNA, 22 nt, Human
aacuugguaaauugugucagau

SEQ ID NO: 909636 - RNA, 22 nt, Human
uauuggaugaagaaaggaagga

SEQ ID NO: 909637 - RNA, 19 nt, Human
auccuggguccuccagcug

SEQ ID NO: 909638 - RNA, 22 nt, Human
gcugaagucugagaauuugcaa

SEQ ID NO: 909639 - RNA, 22 nt, Human
uuuccuugggucucuuaguggc

SEQ ID NO: 909640 - RNA, 22 nt, Human
cacuggugacuucugagcugga

SEQ ID NO: 909641 - RNA, 22 nt, Human
agugacuuggcaugaugagaag

SEQ ID NO: 909642 - RNA, 22 nt, Human
caggaaauggcugaauaaauuc

SEQ ID NO: 909643 - RNA, 22 nt, Human
uuccccuuauaagucuggcuuc

SEQ ID NO: 909644 - RNA, 22 nt, Human
uauuucugggaguucagaaauu

SEQ ID NO: 909645 - RNA, 22 nt, Human
gcuggcuguguuucaucucuga

SEQ ID NO: 909646 - RNA, 20 nt, Human
uuucagauuuacagaaaugu

SEQ ID NO: 909647 - RNA, 20 nt, Human
ucuggccccuuccuguccug

SEQ ID NO: 909648 - RNA, 22 nt, Human
ugagaacugaggauuugaauuc

SEQ ID NO: 909649 - RNA, 22 nt, Human
uuguuuuaguagguacacugag

SEQ ID NO: 909650 - RNA, 22 nt, Human
agggugaaucucacaacucuua

SEQ ID NO: 909651 - RNA, 22 nt, Human
cuuuagaauuucauguuugguc

SEQ ID NO: 909652 - RNA, 22 nt, Human
ccagggccaguaagauuggcau

SEQ ID NO: 909653 - RNA, 22 nt, Human
ugaauacuauuucauaaugugg

SEQ ID NO: 909654 - RNA, 22 nt, Human
ccaaggccccuguggucuagcc

SEQ ID NO: 909655 - RNA, 23 nt, Human
agacucugagagugugcuuugca

SEQ ID NO: 909656 - RNA, 22 nt, Human
ggcgagggagcagugcgguggg

SEQ ID NO: 909657 - RNA, 22 nt, Human
ccacagugaguucuguacucug

SEQ ID NO: 909658 - RNA, 22 nt, Human
aggccuggguguucaccagaag

SEQ ID NO: 909659 - RNA, 22 nt, Human
cuguguccucccgcugcaccca

SEQ ID NO: 909660 - RNA, 22 nt, Human
caugucaagaaagagauuugaa

SEQ ID NO: 909661 - RNA, 22 nt, Human
ugcuuuauggagcccaucucau

SEQ ID NO: 909662 - RNA, 22 nt, Human
uccuagaauaaguaacaggaca

SEQ ID NO: 909663 - RNA, 22 nt, Human
auguggcugccaccugccugaa

SEQ ID NO: 909664 - RNA, 22 nt, Human
uucacaaugccagcaaccacuu

SEQ ID NO: 909665 - RNA, 22 nt, Human
ucuauacaugugcacacacauc

SEQ ID NO: 909666 - RNA, 22 nt, Human
aguggcuguacuauuuuuucau

SEQ ID NO: 909667 - RNA, 22 nt, Human
gcuccuggcaggcagugugugu

SEQ ID NO: 909668 - RNA, 22 nt, Human
gaagcacauggcuauagcuauu

SEQ ID NO: 909669 - RNA, 22 nt, Human
gcuggcugcgucaucacagggc

SEQ ID NO: 909670 - RNA, 22 nt, Human
ggccagcugccaccagcccuau

SEQ ID NO: 909671 - RNA, 22 nt, Human
aaggaagaggcagguuuugcug

SEQ ID NO: 909672 - RNA, 22 nt, Human
aguacauuuaguuuaugaacau

SEQ ID NO: 909673 - RNA, 17 nt, Human
uccuucagggccucaca

SEQ ID NO: 909674 - RNA, 22 nt, Human
ucacugcuauauuggauacuga

SEQ ID NO: 909675 - RNA, 22 nt, Human
ugaacaaaugaaucaguguagc

SEQ ID NO: 909676 - RNA, 22 nt, Human
ugugacagaucucuauacauga

SEQ ID NO: 909677 - RNA, 23 nt, Human
uacuacagggucuugcuaugaau

SEQ ID NO: 909678 - RNA, 22 nt, Human
gaaaguauuuaaguccauauuu

SEQ ID NO: 909679 - RNA, 22 nt, Human
uucucuccuacccaguauccau

SEQ ID NO: 909680 - RNA, 22 nt, Human
gccaggcagccacccucugcga

SEQ ID NO: 909681 - RNA, 22 nt, Human
aaacauucacauuugcuaguaa

SEQ ID NO: 909682 - RNA, 22 nt, Human
aaugaaauguagcuuauccaua

SEQ ID NO: 909683 - RNA, 19 nt, Human
cuuuagacacaccuggaca

SEQ ID NO: 909684 - RNA, 22 nt, Human
uuucuucuaugugugauauuuu

SEQ ID NO: 909685 - RNA, 22 nt, Human
aauguuuucauuauccuaacug

SEQ ID NO: 909686 - RNA, 22 nt, Human
gaggggcuggguagggcaaccc

SEQ ID NO: 909687 - RNA, 22 nt, Human
cugccguccaucuacgucucag

SEQ ID NO: 909688 - RNA, 22 nt, Human
aaaagagaaaguggcaggcuuu

SEQ ID NO: 909689 - RNA, 22 nt, Human
gacaauaagaacagauacugug

SEQ ID NO: 909690 - RNA, 22 nt, Human
uccauuuucucuuccggaggug

SEQ ID NO: 909691 - RNA, 23 nt, Human
ugaacaaaggcaggagaaggcgg

SEQ ID NO: 909692 - RNA, 22 nt, Human
caggcacaggggaaugucuuuu

SEQ ID NO: 909693 - RNA, 22 nt, Human
aaucaagagcugacuauauuuu

SEQ ID NO: 909694 - RNA, 22 nt, Human
uccuggcccggccgggccugcu

SEQ ID NO: 909695 - RNA, 22 nt, Human
uccagggcgugugugaaggaaa

SEQ ID NO: 909696 - RNA, 22 nt, Human
uccugggcuugcuccuccagcu

SEQ ID NO: 909697 - RNA, 22 nt, Human
ccauuuaacacagaguuuucca

SEQ ID NO: 909698 - RNA, 22 nt, Human
aagagguuauuguucccagcuu

SEQ ID NO: 909699 - RNA, 20 nt, Human
gaaucuuacuacauucucuc

SEQ ID NO: 909700 - RNA, 22 nt, Human
agugcagcaugcuggggaggcu

SEQ ID NO: 909701 - RNA, 22 nt, Human
ugacaggugauugugaacuaag

SEQ ID NO: 909702 - RNA, 23 nt, Human
aggaaagcauucauuuuuaccau

SEQ ID NO: 909703 - RNA, 22 nt, Human
ccccacucucggccagauaggc

SEQ ID NO: 909704 - RNA, 23 nt, Human
ugcuggcuuccagcugcucccuc

SEQ ID NO: 909705 - RNA, 22 nt, Human
ccagcucuaaacggcucugugg

SEQ ID NO: 909706 - RNA, 22 nt, Human
ucgcucaggcuugaguguagug

SEQ ID NO: 909707 - RNA, 22 nt, Human
ugcacacacucguguauaugag

SEQ ID NO: 909708 - RNA, 19 nt, Human
ccuggcugcugugggaugc

SEQ ID NO: 909709 - RNA, 22 nt, Human
ucuggaaugaaugagguucugu

SEQ ID NO: 909710 - RNA, 22 nt, Human
ugccaggccaaugaaggcaggg

SEQ ID NO: 909711 - RNA, 22 nt, Human
gcauuagacccaagguauuuug

SEQ ID NO: 909712 - RNA, 22 nt, Human
caugccagguuugaguaucuug

SEQ ID NO: 909713 - RNA, 22 nt, Human
auuguucuggauauuuacauug

SEQ ID NO: 909714 - RNA, 22 nt, Human
cccagggcccuggacagcuaca

SEQ ID NO: 909715 - RNA, 22 nt, Human
uggaagaaggcagagaggcauu

SEQ ID NO: 909716 - RNA, 19 nt, Human
ggcaggcuggauagagagg

SEQ ID NO: 909717 - RNA, 22 nt, Human
guacacauacuauucaaagaga

SEQ ID NO: 909718 - RNA, 22 nt, Human
acauguauugacauuauauucu

SEQ ID NO: 909719 - RNA, 21 nt, Human
agaugaggauacugaggccua

SEQ ID NO: 909720 - RNA, 22 nt, Human
agaaaugucaggaaagaagucc

SEQ ID NO: 909721 - RNA, 22 nt, Human
ggcucuggugaggguaggagau

SEQ ID NO: 909722 - RNA, 22 nt, Human
uguuuguccccaucccucagca

SEQ ID NO: 909723 - RNA, 22 nt, Human
acacuuaaucuuacugaggauc

SEQ ID NO: 909724 - RNA, 22 nt, Human
caauuucuuguuaauucucagg

SEQ ID NO: 909725 - RNA, 22 nt, Human
uggcagcagacaucugaggucu

SEQ ID NO: 909726 - RNA, 22 nt, Human
ucuccagggcccccgagcguug

SEQ ID NO: 909727 - RNA, 22 nt, Human
uggagcugaacuuugaggccag

SEQ ID NO: 909728 - RNA, 22 nt, Human
gagagucuaggaaccucauaua

SEQ ID NO: 909729 - RNA, 22 nt, Human
ggacccugcguguauccacacu

SEQ ID NO: 909730 - RNA, 19 nt, Human
agucuguggauuugugggu

SEQ ID NO: 909731 - RNA, 17 nt, Human
agagagagcaugccacc

SEQ ID NO: 909732 - RNA, 22 nt, Human
ugucaguguuuuaugugcccuu

SEQ ID NO: 909733 - RNA, 20 nt, Human
ucucuggguucucacucagc

SEQ ID NO: 909734 - RNA, 22 nt, Human
cagaggcuuauaccugauuagg

SEQ ID NO: 909735 - RNA, 22 nt, Human
uguuauugauaucuaaugcucu

SEQ ID NO: 909736 - RNA, 17 nt, Human
gcuggcugacccaugcc

SEQ ID NO: 909737 - RNA, 22 nt, Human
ucaggagguugaccacggggca

SEQ ID NO: 909738 - RNA, 22 nt, Human
uugcaaagagucauguaaguca

SEQ ID NO: 909739 - RNA, 22 nt, Human
aggauggcuugcaggaggcugu

SEQ ID NO: 909740 - RNA, 22 nt, Human
ggcucugaggcagaucgauggg

SEQ ID NO: 909741 - RNA, 22 nt, Human
ucagaggagccaaaguucugag

SEQ ID NO: 909742 - RNA, 22 nt, Human
auguuuauguugggcuauauuu

SEQ ID NO: 909743 - RNA, 22 nt, Human
caaggccuccugggcccagaga

SEQ ID NO: 909744 - RNA, 21 nt, Human
cucuggaggcaagggagagug

SEQ ID NO: 909745 - RNA, 22 nt, Human
acucugaguuccuacuugcucc

SEQ ID NO: 909746 - RNA, 22 nt, Human
ucugauaucgcacuaaacucug

SEQ ID NO: 909747 - RNA, 22 nt, Human
ccaggggaaacagggagcacuc

SEQ ID NO: 909748 - RNA, 22 nt, Human
uggagcuggaagaauguagacg

SEQ ID NO: 909749 - RNA, 22 nt, Human
aagcagugaugcauacagcugu

SEQ ID NO: 909750 - RNA, 22 nt, Human
ggccaggaagggaagaucagca

SEQ ID NO: 909751 - RNA, 22 nt, Human
gaagucuuuucuuccacccaaa

SEQ ID NO: 909752 - RNA, 22 nt, Human
uuucaaacauaucuucauuacu

SEQ ID NO: 909753 - RNA, 22 nt, Human
auugaaaaaugacuauugcuua

SEQ ID NO: 909754 - RNA, 22 nt, Human
gcuccaggugucccagguaaaa

SEQ ID NO: 909755 - RNA, 17 nt, Human
uggcuucagauguacau

SEQ ID NO: 909756 - RNA, 22 nt, Human
aggucaagguucacaggggauc

SEQ ID NO: 909757 - RNA, 22 nt, Human
gagcucuguacacagagggugu

SEQ ID NO: 909758 - RNA, 22 nt, Human
gcuggaguuagaacuagccugg

SEQ ID NO: 909759 - RNA, 22 nt, Human
aacagaaaucauuuagggcucu

SEQ ID NO: 909760 - RNA, 22 nt, Human
ccucugcucugguccaugugcu

SEQ ID NO: 909761 - RNA, 22 nt, Human
caagcugcuuauucucugcucu

SEQ ID NO: 909762 - RNA, 22 nt, Human
ggcugagaaggagugggugagg

SEQ ID NO: 909763 - RNA, 22 nt, Human
uaaagcaagacacacccauagc

SEQ ID NO: 909764 - RNA, 22 nt, Human
ugagcagaacacgggauccaug

SEQ ID NO: 909765 - RNA, 22 nt, Human
aaucauaauuguauacauucau

SEQ ID NO: 909766 - RNA, 22 nt, Human
uuguaacaggcacucugugcca

SEQ ID NO: 909767 - RNA, 22 nt, Human
uuagaacuuaaacuucagaaag

SEQ ID NO: 909768 - RNA, 22 nt, Human
cacaucucagggcuacaggcag

SEQ ID NO: 909769 - RNA, 22 nt, Human
ucagaacagaagaaggaacacg

SEQ ID NO: 909770 - RNA, 22 nt, Human
uaggaaugagaaagaauuagau

SEQ ID NO: 909771 - RNA, 22 nt, Human
acauuaaauuucauagugauua

SEQ ID NO: 909772 - RNA, 22 nt, Human
ggagggggaaacuuuggcugcc

SEQ ID NO: 909773 - RNA, 22 nt, Human
gaagauacaaaugugggcuuuc

SEQ ID NO: 909774 - RNA, 22 nt, Human
gcucuugucaaaaauuaguuga

SEQ ID NO: 909775 - RNA, 22 nt, Human
augcaacagagaaaauauugag

SEQ ID NO: 909776 - RNA, 22 nt, Human
uugcugagagcgugucaacaag

SEQ ID NO: 909777 - RNA, 22 nt, Human
agaggccuaaccaagauguccu

SEQ ID NO: 909778 - RNA, 22 nt, Human
accuagaauccaucugcuuauu

SEQ ID NO: 909779 - RNA, 22 nt, Human
cuggcuggagcuguuguaggcu

SEQ ID NO: 909780 - RNA, 22 nt, Human
ucugccuguucaagucuucuag

SEQ ID NO: 909781 - RNA, 22 nt, Human
aaauuacagccuuggguagcuu

SEQ ID NO: 909782 - RNA, 22 nt, Human
uacauaugaguucguucuaugc

SEQ ID NO: 909783 - RNA, 22 nt, Human
ggcaggaagcauuaaaacgauu

SEQ ID NO: 909784 - RNA, 22 nt, Human
ucagaauauauucauguuguca

SEQ ID NO: 909785 - RNA, 22 nt, Human
aguaaaauuguauuggaaaaca

SEQ ID NO: 909786 - RNA, 22 nt, Human
uuugacaugcaaagcacuuuag

SEQ ID NO: 909787 - RNA, 22 nt, Human
cagcagcugcaaauggaaacag

SEQ ID NO: 909788 - RNA, 22 nt, Human
uggagcagcaucacuuugagcu

SEQ ID NO: 909789 - RNA, 22 nt, Human
auuuagagugaaacauuaugca

SEQ ID NO: 909790 - RNA, 22 nt, Human
uuccaagaguaaauucaaauug

SEQ ID NO: 909791 - RNA, 22 nt, Human
aaaacaguuuuugcuaacugcu

SEQ ID NO: 909792 - RNA, 22 nt, Human
aaagagcuucauuuccauuuau

SEQ ID NO: 909793 - RNA, 22 nt, Human
gccaucuucaacaucagaaguu

SEQ ID NO: 909794 - RNA, 22 nt, Human
guacauaagaaauuacuacaga

SEQ ID NO: 909795 - RNA, 18 nt, Human
uccugguauugcaagcac

SEQ ID NO: 909796 - RNA, 22 nt, Human
ggaaaaaugacacauaucucaa

SEQ ID NO: 909797 - RNA, 22 nt, Human
ugaguccaggugcuuaccugga

SEQ ID NO: 909798 - RNA, 22 nt, Human
uggagcaugagagucuuuagcu

SEQ ID NO: 909799 - RNA, 22 nt, Human
gugugcguuccuaguaaacgug

SEQ ID NO: 909800 - RNA, 22 nt, Human
uuuucaguuuuccagguagccg

SEQ ID NO: 909801 - RNA, 22 nt, Human
gcuggcucgggaagcaggggau

SEQ ID NO: 909802 - RNA, 22 nt, Human
auguuuauuuugcagaguaggg

SEQ ID NO: 909803 - RNA, 22 nt, Human
agacagugugaguucagggugg

SEQ ID NO: 909804 - RNA, 22 nt, Human
agaguuuuauggcuuuaauucu

SEQ ID NO: 909805 - RNA, 22 nt, Human
auacuauauuaccuucucaacu

SEQ ID NO: 909806 - RNA, 22 nt, Human
cacaugcauuggcaaaagugua

SEQ ID NO: 909807 - RNA, 22 nt, Human
aaucacaugugcucaauuuuaa

SEQ ID NO: 909808 - RNA, 22 nt, Human
uguggggguacacguacacaug

SEQ ID NO: 909809 - RNA, 22 nt, Human
ggucugugcucuggagccucug

SEQ ID NO: 909810 - RNA, 22 nt, Human
cugggcucuguguuucaguuuc

SEQ ID NO: 909811 - RNA, 22 nt, Human
uggcccagcugcagauggugga

SEQ ID NO: 909812 - RNA, 19 nt, Human
ugacagagagcaggguggu

SEQ ID NO: 909813 - RNA, 22 nt, Human
caacagugauucugcaugagga

SEQ ID NO: 909814 - RNA, 22 nt, Human
gucacaauuauaggaacucaga

SEQ ID NO: 909815 - RNA, 22 nt, Human
guguccuuauuucugucucuca

SEQ ID NO: 909816 - RNA, 22 nt, Human
uuguguggauaauauuacuuga

SEQ ID NO: 909817 - RNA, 22 nt, Human
uccagggccaagucauggaacc

SEQ ID NO: 909818 - RNA, 22 nt, Human
ccccagagaaagucagcagcau

SEQ ID NO: 909819 - RNA, 23 nt, Human
cucuggguccgauguccugacag

SEQ ID NO: 909820 - RNA, 22 nt, Human
ucugacagucucuucuuuagcu

SEQ ID NO: 909821 - RNA, 22 nt, Human
ucucccaguccucugugcuuac

SEQ ID NO: 909822 - RNA, 22 nt, Human
ugacccuuagugaacauuagaa

SEQ ID NO: 909823 - RNA, 22 nt, Human
gaaagugccagaauaggaggcc

SEQ ID NO: 909824 - RNA, 22 nt, Human
caucaaaguugauauccaauua

SEQ ID NO: 909825 - RNA, 19 nt, Human
gccaggcuccauagccggc

SEQ ID NO: 909826 - RNA, 22 nt, Human
aucuucaaagaauuucuugucc

SEQ ID NO: 909827 - RNA, 22 nt, Human
agcugagcugcagaugacugua

SEQ ID NO: 909828 - RNA, 21 nt, Human
agcuggcuauaguuagugaug

SEQ ID NO: 909829 - RNA, 22 nt, Human
aacacagcuaauuucugucaau

SEQ ID NO: 909830 - RNA, 22 nt, Human
cagagccagcccacuguucccg

SEQ ID NO: 909831 - RNA, 22 nt, Human
acuguaaagaaguaaguauggg

SEQ ID NO: 909832 - RNA, 22 nt, Human
gaggagcugucaccgugacuca

SEQ ID NO: 909833 - RNA, 22 nt, Human
uuucagaggaaaucucauugag

SEQ ID NO: 909834 - RNA, 22 nt, Human
uauguguggcagcugggagugu

SEQ ID NO: 909835 - RNA, 22 nt, Human
cagaggugcauacaggucauua

SEQ ID NO: 909836 - RNA, 22 nt, Human
agagugaaguuuuugaaaguga

SEQ ID NO: 909837 - RNA, 21 nt, Human
agcggcagacccugcauuuga

SEQ ID NO: 909838 - RNA, 22 nt, Human
auguggcuaguggcuaugaucu

SEQ ID NO: 909839 - RNA, 22 nt, Human
gacccuuucugagugagcaguu

SEQ ID NO: 909840 - RNA, 22 nt, Human
uuguuucuccuggugccugaua

SEQ ID NO: 909841 - RNA, 22 nt, Human
ggaaaagacagguuaacuguga

SEQ ID NO: 909842 - RNA, 22 nt, Human
uggcagcucuguucaacaugag

SEQ ID NO: 909843 - RNA, 19 nt, Human
ucaguuuuagucaucaguu

SEQ ID NO: 909844 - RNA, 22 nt, Human
guuuccauggaagcaaaggugg

SEQ ID NO: 909845 - RNA, 22 nt, Human
uuuauucaagaugagguucaug

SEQ ID NO: 909846 - RNA, 22 nt, Human
ucacacuaggauguuguuucua

SEQ ID NO: 909847 - RNA, 22 nt, Human
ugaagccacuuuccagaaucac

SEQ ID NO: 909848 - RNA, 19 nt, Human
ccaggccucuggggccugu

SEQ ID NO: 909849 - RNA, 22 nt, Human
accccagcucugagccacacca

SEQ ID NO: 909850 - RNA, 21 nt, Human
uuugacagcucagagggcauu

SEQ ID NO: 909851 - RNA, 22 nt, Human
aaaugcauuucacuaauguuuc

SEQ ID NO: 909852 - RNA, 22 nt, Human
gaggagggagaauuaggcuuaa

SEQ ID NO: 909853 - RNA, 22 nt, Human
gagcuggcaagucuguccuugg

SEQ ID NO: 909854 - RNA, 22 nt, Human
aaguauucuacaaagaaauuga

SEQ ID NO: 909855 - RNA, 22 nt, Human
uaguacaguacugggcucuagu

SEQ ID NO: 909856 - RNA, 22 nt, Human
ucuucacauggagaagcaacuc

SEQ ID NO: 909857 - RNA, 22 nt, Human
acaaagucacaauaauuaaccu

SEQ ID NO: 909858 - RNA, 22 nt, Human
uuugcacuagcauuuguccaug

SEQ ID NO: 909859 - RNA, 22 nt, Human
ucugggcuuuguaaugggaggu

SEQ ID NO: 909860 - RNA, 22 nt, Human
gcuuuacugagaugacacaggg

SEQ ID NO: 909861 - RNA, 23 nt, Human
ucugaggaugaaggauagcaagu

SEQ ID NO: 909862 - RNA, 22 nt, Human
gagagcaggaggcagcgggacg

SEQ ID NO: 909863 - RNA, 20 nt, Human
ucccucaguccuggcuuugu

SEQ ID NO: 909864 - RNA, 22 nt, Human
uggugcaagucucugaggaggg

SEQ ID NO: 909865 - RNA, 22 nt, Human
gcagaugguggggcaggaaaau

SEQ ID NO: 909866 - RNA, 22 nt, Human
aaugccaaugggcagaacuaga

SEQ ID NO: 909867 - RNA, 22 nt, Human
gaauucuuugaucuuaaucuug

SEQ ID NO: 909868 - RNA, 22 nt, Human
acuaugauguauuuugcaucua

SEQ ID NO: 909869 - RNA, 22 nt, Human
ccagggcaaaugagaucauagc

SEQ ID NO: 909870 - RNA, 22 nt, Human
acuuucaugcucugagcacugg

SEQ ID NO: 909871 - RNA, 22 nt, Human
cauacuuuugcccugacauucu

SEQ ID NO: 909872 - RNA, 22 nt, Human
gcacuucacaugccuuuuccug

SEQ ID NO: 909873 - RNA, 22 nt, Human
ggcucugggccuccaaggucug

SEQ ID NO: 909874 - RNA, 22 nt, Human
cuggucccagcagagcucugag

SEQ ID NO: 909875 - RNA, 22 nt, Human
uuggaauugugaacuaagugau

SEQ ID NO: 909876 - RNA, 22 nt, Human
ugcuggaaagugaggugaauga

SEQ ID NO: 909877 - RNA, 22 nt, Human
acccagagcagagcuuggcuuc

SEQ ID NO: 909878 - RNA, 22 nt, Human
ccauggccugaaggagugcauc

SEQ ID NO: 909879 - RNA, 22 nt, Human
ucucugagccccugccucuuuc

SEQ ID NO: 909880 - RNA, 22 nt, Human
cuauuuauguccaaguguuuua

SEQ ID NO: 909881 - RNA, 22 nt, Human
gcagggcuccccaggcccgagg

SEQ ID NO: 909882 - RNA, 22 nt, Human
uuccucagggcggaugggcagg

SEQ ID NO: 909883 - RNA, 22 nt, Human
caaugucuaguuucccaaaucc

SEQ ID NO: 909884 - RNA, 22 nt, Human
uacagaaaaacaucuggagccg

SEQ ID NO: 909885 - RNA, 22 nt, Human
gcucccuguucucagccaugau

SEQ ID NO: 909886 - RNA, 22 nt, Human
gcugggucccaagccuggggag

SEQ ID NO: 909887 - RNA, 22 nt, Human
acaaguggguccuacauaaagc

SEQ ID NO: 909888 - RNA, 23 nt, Human
uaacuuacaucauucugcacaag

SEQ ID NO: 909889 - RNA, 22 nt, Human
cuacagaaguuucccuugcuua

SEQ ID NO: 909890 - RNA, 22 nt, Human
uagauuuaagacccugaauuug

SEQ ID NO: 909891 - RNA, 22 nt, Human
ugccaggcccugcgggguccca

SEQ ID NO: 909892 - RNA, 22 nt, Human
aacaaugugaagugcuguucag

SEQ ID NO: 909893 - RNA, 22 nt, Human
aagaauguuaguuucugauaca

SEQ ID NO: 909894 - RNA, 22 nt, Human
aucugaaauagucuuaucugag

SEQ ID NO: 909895 - RNA, 22 nt, Human
agcaaugacuggcuauaugauu

SEQ ID NO: 909896 - RNA, 22 nt, Human
gcagggcuguucaggagggugg

SEQ ID NO: 909897 - RNA, 21 nt, Human
uacauugacuacaaauaaagc

SEQ ID NO: 909898 - RNA, 22 nt, Human
auguaagagucuaagauuguag

SEQ ID NO: 909899 - RNA, 22 nt, Human
gcauggcauuaacaagauggaa

SEQ ID NO: 909900 - RNA, 22 nt, Human
uaaaucacaucgaaaucugggu

SEQ ID NO: 909901 - RNA, 22 nt, Human
agguggcaaggggcgccucucu

SEQ ID NO: 909902 - RNA, 22 nt, Human
uuuauuuggcaucucugccaag

SEQ ID NO: 909903 - RNA, 22 nt, Human
guaggaagcucugaggcuaguu

SEQ ID NO: 909904 - RNA, 20 nt, Human
acacaaagcaauggaguaca

SEQ ID NO: 909905 - RNA, 22 nt, Human
aaauugucagaauucagaaagu

SEQ ID NO: 909906 - RNA, 22 nt, Human
cagcaagacuucagggcuuggu

SEQ ID NO: 909907 - RNA, 22 nt, Human
gucuccagagguuacauccugu

SEQ ID NO: 909908 - RNA, 22 nt, Human
ugcuggagcaacauuauugugc

SEQ ID NO: 909909 - RNA, 22 nt, Human
gccccagaaaguucaaggcaca

SEQ ID NO: 909910 - RNA, 22 nt, Human
acacuacagggagaagacucac

SEQ ID NO: 909911 - RNA, 22 nt, Human
aggcuggagagugcaguggcgu

SEQ ID NO: 909912 - RNA, 23 nt, Human
gcucacaggguguaacuccuagu

SEQ ID NO: 909913 - RNA, 22 nt, Human
cucagggacaaggggagacccc

SEQ ID NO: 909914 - RNA, 16 nt, Human
cuguggcucccagguu

SEQ ID NO: 909915 - RNA, 22 nt, Human
gcucucugucguuaugcuucau

SEQ ID NO: 909916 - RNA, 22 nt, Human
acacagguaaugguuuuggaag

SEQ ID NO: 909917 - RNA, 22 nt, Human
aggccacaguacuuugcagacc

SEQ ID NO: 909918 - RNA, 22 nt, Human
ucauugaauuugguucaauaug

SEQ ID NO: 909919 - RNA, 22 nt, Human
aggacuccauguguccuggaga

SEQ ID NO: 909920 - RNA, 22 nt, Human
uuuaaucauaagaaggaaaaua

SEQ ID NO: 909921 - RNA, 22 nt, Human
uuacuuuugcaccaaacuaaua

SEQ ID NO: 909922 - RNA, 22 nt, Human
ugauagaaucagauaaaaggau

SEQ ID NO: 909923 - RNA, 22 nt, Human
uuaguguuuaaagguuucagag

SEQ ID NO: 909924 - RNA, 22 nt, Human
cagugcugagagccuggccagg

SEQ ID NO: 909925 - RNA, 22 nt, Human
aggccacacaacucuuagagau

SEQ ID NO: 909926 - RNA, 22 nt, Human
cagcuggccccacaguagaggc

SEQ ID NO: 909927 - RNA, 22 nt, Human
cugucaucacaguugagcagcc

SEQ ID NO: 909928 - RNA, 22 nt, Human
ggcacaggagcuagucaaagcc

SEQ ID NO: 909929 - RNA, 22 nt, Human
caaggcugugcaggguccauau

SEQ ID NO: 909930 - RNA, 22 nt, Human
caggaaaaucugcccacacaag

SEQ ID NO: 909931 - RNA, 22 nt, Human
ugcagcuccugugcugagugug

SEQ ID NO: 909932 - RNA, 22 nt, Human
ugaaaucaugagauagugucac

SEQ ID NO: 909933 - RNA, 22 nt, Human
auauauuacaaaagaggaagga

SEQ ID NO: 909934 - RNA, 22 nt, Human
cuucuuaaucccuuauauauuu

SEQ ID NO: 909935 - RNA, 22 nt, Human
ccaggcaaggucuccuagagag

SEQ ID NO: 909936 - RNA, 19 nt, Human
ggggugcuagggagggauc

SEQ ID NO: 909937 - RNA, 22 nt, Human
ccacagagagugucagccuuug

SEQ ID NO: 909938 - RNA, 22 nt, Human
gcugccucuccugaguugacag

SEQ ID NO: 909939 - RNA, 22 nt, Human
ugcugagguuguggagugcauu

SEQ ID NO: 909940 - RNA, 22 nt, Human
gagaaugaugauuuccaauuuc

SEQ ID NO: 909941 - RNA, 22 nt, Human
gggcuccacagcagugagugga

SEQ ID NO: 909942 - RNA, 21 nt, Human
ccacauggugaaacccuaucu

SEQ ID NO: 909943 - RNA, 22 nt, Human
caguccagcucaucaguggcac

SEQ ID NO: 909944 - RNA, 22 nt, Human
ucuuagaaguuuauggcacgga

SEQ ID NO: 909945 - RNA, 22 nt, Human
aguauacauauauuagccuucg

SEQ ID NO: 909946 - RNA, 22 nt, Human
ggggcuaacuuucugaggguag

SEQ ID NO: 909947 - RNA, 22 nt, Human
ucuauucaggcagagugcagca

SEQ ID NO: 909948 - RNA, 22 nt, Human
aaguuuaucuuugcuggguacu

SEQ ID NO: 909949 - RNA, 22 nt, Human
ccagguggcuucugcccgaugu

SEQ ID NO: 909950 - RNA, 22 nt, Human
gcuggagugcuggagugcagug

SEQ ID NO: 909951 - RNA, 22 nt, Human
aggcuucagcagcccucucuug

SEQ ID NO: 909952 - RNA, 22 nt, Human
agggcagauggaacuuccccga

SEQ ID NO: 909953 - RNA, 22 nt, Human
uggcuucaagucuagguucuac

SEQ ID NO: 909954 - RNA, 22 nt, Human
cagggcaugaggugugcuucuc

SEQ ID NO: 909955 - RNA, 20 nt, Human
acccugaggcuccccagccu

SEQ ID NO: 909956 - RNA, 21 nt, Human
ggcagccugacccccagagag

SEQ ID NO: 909957 - RNA, 22 nt, Human
uaaaguuuauuugaacaucucu

SEQ ID NO: 909958 - RNA, 22 nt, Human
caaggcauuguguaagcacuug

SEQ ID NO: 909959 - RNA, 22 nt, Human
ucccacagugaaguucaugaua

SEQ ID NO: 909960 - RNA, 22 nt, Human
gacaggcaguuuuccagaucag

SEQ ID NO: 909961 - RNA, 22 nt, Human
uuggaagccuaguuaagaugaa

SEQ ID NO: 909962 - RNA, 22 nt, Human
acaaaguguuuucugaaggccu

SEQ ID NO: 909963 - RNA, 22 nt, Human
uacaguuagccugucuacuccc

SEQ ID NO: 909964 - RNA, 22 nt, Human
aaaguccagagggcacacugaa

SEQ ID NO: 909965 - RNA, 22 nt, Human
uaggcaggugugcacugcccac

SEQ ID NO: 909966 - RNA, 20 nt, Human
gcagugauuugucuauguuu

SEQ ID NO: 909967 - RNA, 22 nt, Human
agguccuggacugcucuuguua

SEQ ID NO: 909968 - RNA, 22 nt, Human
caucuuuaguuauugaauauag

SEQ ID NO: 909969 - RNA, 22 nt, Human
ucagaauucuacaauagaucag

SEQ ID NO: 909970 - RNA, 22 nt, Human
ugcagggauuagaggccgggga

SEQ ID NO: 909971 - RNA, 22 nt, Human
ggucaucugccuccaaagcacu

SEQ ID NO: 909972 - RNA, 22 nt, Human
uguguggugaagcagagaugcu

SEQ ID NO: 909973 - RNA, 22 nt, Human
cccuccucaacucuggcuucca

SEQ ID NO: 909974 - RNA, 22 nt, Human
caggcagcaggagcccugcucg

SEQ ID NO: 909975 - RNA, 22 nt, Human
aguccaugcugucuacagaauc

SEQ ID NO: 909976 - RNA, 22 nt, Human
caaggcuggcucacaauaauga

SEQ ID NO: 909977 - RNA, 22 nt, Human
ugccauuucucacauauguaug

SEQ ID NO: 909978 - RNA, 23 nt, Human
aagaaucucagaauuagaaauac

SEQ ID NO: 909979 - RNA, 17 nt, Human
uaucuguaugauggaua

SEQ ID NO: 909980 - RNA, 22 nt, Human
caggcgggacgugggaggauca

SEQ ID NO: 909981 - RNA, 21 nt, Human
gucagcagauccagcacuugu

SEQ ID NO: 909982 - RNA, 22 nt, Human
aaaccuuuucagcugaauggag

SEQ ID NO: 909983 - RNA, 22 nt, Human
cagggccagccauccugcuggg

SEQ ID NO: 909984 - RNA, 22 nt, Human
cccaggcugauguucagcgggu

SEQ ID NO: 909985 - RNA, 20 nt, Human
uaagcauaguugucaggguc

SEQ ID NO: 909986 - RNA, 22 nt, Human
cugcauccauguugcugcaaag

SEQ ID NO: 909987 - RNA, 22 nt, Human
uuacaguacagaaaauaacaga

SEQ ID NO: 909988 - RNA, 18 nt, Human
guguaaacagccauugag

SEQ ID NO: 909989 - RNA, 22 nt, Human
cuuuuguuaggagaaaacauca

SEQ ID NO: 909990 - RNA, 22 nt, Human
cagagcugcgcuuuuuccuggu

SEQ ID NO: 909991 - RNA, 22 nt, Human
gauuuccaggacgggagguggg

SEQ ID NO: 909992 - RNA, 22 nt, Human
gcucagcucuauggacacaaag

SEQ ID NO: 909993 - RNA, 22 nt, Human
ugcagugauuuguacaauuaga

SEQ ID NO: 909994 - RNA, 22 nt, Human
cccuuagagauucugucagagu

SEQ ID NO: 909995 - RNA, 23 nt, Human
gccugugccuaugcccagcucug

SEQ ID NO: 909996 - RNA, 22 nt, Human
cucucccuggccagcugugcag

SEQ ID NO: 909997 - RNA, 22 nt, Human
cugagcugggagccuggcacca

SEQ ID NO: 909998 - RNA, 20 nt, Human
gcucugugcuggcggaggcu

SEQ ID NO: 909999 - RNA, 22 nt, Human
gauggugucccaggcucaggcu

SEQ ID NO: 910000 - RNA, 16 nt, Human
ggugucagauguccag

SEQ ID NO: 910001 - RNA, 22 nt, Human
aauacaagauuuauaguuguuu

SEQ ID NO: 910002 - RNA, 22 nt, Human
uccucaggagagcuccuaugcc

SEQ ID NO: 910003 - RNA, 19 nt, Human
aguguauuuuuuucuguag

SEQ ID NO: 910004 - RNA, 20 nt, Human
ccagaggcugacagacuuug

SEQ ID NO: 910005 - RNA, 22 nt, Human
caggcaagcaaggggucuugaa

SEQ ID NO: 910006 - RNA, 22 nt, Human
uaggcugggccugccuuccagg

SEQ ID NO: 910007 - RNA, 22 nt, Human
agcugcccugguaagauugaug

SEQ ID NO: 910008 - RNA, 22 nt, Human
caauagcaggucuacagagaga

SEQ ID NO: 910009 - RNA, 22 nt, Human
cauuuuguaagucucucuuguu

SEQ ID NO: 910010 - RNA, 22 nt, Human
gggggaagaggcaugaaguccu

SEQ ID NO: 910011 - RNA, 22 nt, Human
gguuggacacuagguaggagcg

SEQ ID NO: 910012 - RNA, 20 nt, Human
cagaacagucugagaggcca

SEQ ID NO: 910013 - RNA, 22 nt, Human
uauuugcuuugcuuuauagaga

SEQ ID NO: 910014 - RNA, 22 nt, Human
acagcaagaccccuagcauggu

SEQ ID NO: 910015 - RNA, 22 nt, Human
ccauccugucuguggccucagg

SEQ ID NO: 910016 - RNA, 22 nt, Human
aaacuugagccaagggcuuggg

SEQ ID NO: 910017 - RNA, 22 nt, Human
ugacauguccugagaagauggc

SEQ ID NO: 910018 - RNA, 22 nt, Human
agcaggagcauuuccaugauuc

SEQ ID NO: 910019 - RNA, 22 nt, Human
gcagagucugggcagccuccau

SEQ ID NO: 910020 - RNA, 22 nt, Human
uuugcaaaaugaggugaagagu

SEQ ID NO: 910021 - RNA, 22 nt, Human
aaggcuggggugcagacggccu

SEQ ID NO: 910022 - RNA, 17 nt, Human
ucucuuucccuuucugc

SEQ ID NO: 910023 - RNA, 21 nt, Human
cuguccaguaauuccuggcac

SEQ ID NO: 910024 - RNA, 22 nt, Human
cugguggaagccugggcucaga

SEQ ID NO: 910025 - RNA, 22 nt, Human
cauuucaaggaccacccuggga

SEQ ID NO: 910026 - RNA, 22 nt, Human
agcuccuggcuuuccucucacc

SEQ ID NO: 910027 - RNA, 22 nt, Human
gaauguaaaauugccuacaaga

SEQ ID NO: 910028 - RNA, 17 nt, Human
aauguggaaguacaugc

SEQ ID NO: 910029 - RNA, 22 nt, Human
gcucccagggaccgcagggcag

SEQ ID NO: 910030 - RNA, 22 nt, Human
caggccuuucuuggggcuuaga

SEQ ID NO: 910031 - RNA, 22 nt, Human
ucuccaaaucaaucaauaugaa

SEQ ID NO: 910032 - RNA, 22 nt, Human
uucaggagaauuccaagaagua

SEQ ID NO: 910033 - RNA, 22 nt, Human
cagacucucuuccaugcaucac

SEQ ID NO: 910034 - RNA, 22 nt, Human
uucuuucugucaugguguacug

SEQ ID NO: 910035 - RNA, 22 nt, Human
ggugcaggagcggggugcucgg

SEQ ID NO: 910036 - RNA, 22 nt, Human
cuggguauaggaaacaguuaag

SEQ ID NO: 910037 - RNA, 22 nt, Human
guggcuggaguaugaggaaagg

SEQ ID NO: 910038 - RNA, 22 nt, Human
cccagguggguuggccucuguc

SEQ ID NO: 910039 - RNA, 22 nt, Human
ucaaguguaguggugucagguc

SEQ ID NO: 910040 - RNA, 22 nt, Human
ugaaggugauuaugaauguaua

SEQ ID NO: 910041 - RNA, 22 nt, Human
cugagacacggagaggcugugu

SEQ ID NO: 910042 - RNA, 22 nt, Human
cagcagcugggaaggaggcuga

SEQ ID NO: 910043 - RNA, 22 nt, Human
agccaagcugaucuccugcuga

SEQ ID NO: 910044 - RNA, 19 nt, Human
uccccagcaccucugaguc

SEQ ID NO: 910045 - RNA, 22 nt, Human
auauggaaguuaccugacuuca

SEQ ID NO: 910046 - RNA, 22 nt, Human
cugucuguuuuguauacaggcc

SEQ ID NO: 910047 - RNA, 22 nt, Human
guugcagacacuccacagucga

SEQ ID NO: 910048 - RNA, 22 nt, Human
uccucuggauauaagccucacc

SEQ ID NO: 910049 - RNA, 22 nt, Human
cuggcugguccucggggacagc

SEQ ID NO: 910050 - RNA, 20 nt, Human
uaagugagaacaugugguau

SEQ ID NO: 910051 - RNA, 22 nt, Human
ugcaggugcguuuucaagccuc

SEQ ID NO: 910052 - RNA, 22 nt, Human
acugccuugucucuugccuguu

SEQ ID NO: 910053 - RNA, 22 nt, Human
ugugcgcgugcacgcauacuug

SEQ ID NO: 910054 - RNA, 22 nt, Human
caggugcuguccugcacauguc

SEQ ID NO: 910055 - RNA, 22 nt, Human
uauuucaggcuauauuucuugu

SEQ ID NO: 910056 - RNA, 22 nt, Human
aaguacaugcuguaaugauugg

SEQ ID NO: 910057 - RNA, 22 nt, Human
caguguugcuaaguucugaacu

SEQ ID NO: 910058 - RNA, 22 nt, Human
ucuuuagcuaacuggaugccaa

SEQ ID NO: 910059 - RNA, 22 nt, Human
ugugucagagguagagauggca

SEQ ID NO: 910060 - RNA, 22 nt, Human
aggaaggcugaucacugcuugu

SEQ ID NO: 910061 - RNA, 22 nt, Human
cagagcccauccuauacucucc

SEQ ID NO: 910062 - RNA, 22 nt, Human
uaguuuuauaauguuaacaucu

SEQ ID NO: 910063 - RNA, 22 nt, Human
accagugcuuccugcuggagcu

SEQ ID NO: 910064 - RNA, 22 nt, Human
auuuucaaaacaucugcugugu

SEQ ID NO: 910065 - RNA, 22 nt, Human
uguguacacacagauauauaca

SEQ ID NO: 910066 - RNA, 22 nt, Human
guaauuaggaauaaaaugggaa

SEQ ID NO: 910067 - RNA, 22 nt, Human
ugcugccaggucuugcugucca

SEQ ID NO: 910068 - RNA, 16 nt, Human
ccuuucucugccuucc

SEQ ID NO: 910069 - RNA, 22 nt, Human
caucagugcggcaucugucauc

SEQ ID NO: 910070 - RNA, 22 nt, Human
gacuuuccagguccugggcuau

SEQ ID NO: 910071 - RNA, 22 nt, Human
agcucaggccggagcuacaggc

SEQ ID NO: 910072 - RNA, 22 nt, Human
aaaggcaugccuccauuucuau

SEQ ID NO: 910073 - RNA, 19 nt, Human
uccaggggcuccaccuccu

SEQ ID NO: 910074 - RNA, 22 nt, Human
aaugcaaggccuguaucugauu

SEQ ID NO: 910075 - RNA, 22 nt, Human
auguauguaguguacauauaca

SEQ ID NO: 910076 - RNA, 22 nt, Human
ucuccagaguaaccuuggagca

SEQ ID NO: 910077 - RNA, 22 nt, Human
cuucuucucuacauccuuugau

SEQ ID NO: 910078 - RNA, 22 nt, Human
uucuccuuuuccaguucccagu

SEQ ID NO: 910079 - RNA, 22 nt, Human
acaguugguuaacacaaauauu

SEQ ID NO: 910080 - RNA, 18 nt, Human
uccagucuuauuaccauu

SEQ ID NO: 910081 - RNA, 22 nt, Human
accaggagccauagagucaggc

SEQ ID NO: 910082 - RNA, 22 nt, Human
uuaucauugucgcagucuaauu

SEQ ID NO: 910083 - RNA, 22 nt, Human
guggaguggccuggcccugaga

SEQ ID NO: 910084 - RNA, 22 nt, Human
cuguccuguagcuccaucaguc

SEQ ID NO: 910085 - RNA, 22 nt, Human
uguguuguuuuaagcugcugca

SEQ ID NO: 910086 - RNA, 22 nt, Human
cccuccaccaagcagggcgcca

SEQ ID NO: 910087 - RNA, 22 nt, Human
ucuuaugaaaagcacuuagaac

SEQ ID NO: 910088 - RNA, 22 nt, Human
agaucuggaacugagguuuauu

SEQ ID NO: 910089 - RNA, 22 nt, Human
cauuugaaaccuggaaucuacc

SEQ ID NO: 910090 - RNA, 22 nt, Human
acaugaaguggucagaucaaac

SEQ ID NO: 910091 - RNA, 22 nt, Human
gugaggggccaagaguagggca

SEQ ID NO: 910092 - RNA, 22 nt, Human
ucacaguuuuagcuguuaaaua

SEQ ID NO: 910093 - RNA, 22 nt, Human
caggaaugggugacagucagcu

SEQ ID NO: 910094 - RNA, 22 nt, Human
acugcagccuuugggcucauaa

SEQ ID NO: 910095 - RNA, 22 nt, Human
ccaucagcaugggagcaugggc

SEQ ID NO: 910096 - RNA, 19 nt, Human
caguggccuggaggucucu

SEQ ID NO: 910097 - RNA, 22 nt, Human
aggcuuccuggaggaagaggua

SEQ ID NO: 910098 - RNA, 22 nt, Human
uaccucaaguuccaggaaagcg

SEQ ID NO: 910099 - RNA, 22 nt, Human
uugugucuaugguuugagcauc

SEQ ID NO: 910100 - RNA, 22 nt, Human
uuuucuuuaaucugguggggug

SEQ ID NO: 910101 - RNA, 22 nt, Human
acugccuuuuccauuacuuaau

SEQ ID NO: 910102 - RNA, 22 nt, Human
cugagcccaggcgggagcugag

SEQ ID NO: 910103 - RNA, 22 nt, Human
uacauugaaagucauuuaaucc

SEQ ID NO: 910104 - RNA, 22 nt, Human
aaagcauagaauuagaguuagg

SEQ ID NO: 910105 - RNA, 22 nt, Human
caggagcccagaguccucagcu

SEQ ID NO: 910106 - RNA, 22 nt, Human
agagaagggggaaagaucucac

SEQ ID NO: 910107 - RNA, 22 nt, Human
cuaggcagacugagcucuaggg

SEQ ID NO: 910108 - RNA, 22 nt, Human
gaaaguucaaauuauagaaggu

SEQ ID NO: 910109 - RNA, 22 nt, Human
gucuagaauugcuuggcagaug

SEQ ID NO: 910110 - RNA, 22 nt, Human
uugugcuccuaugagaaucuaa

SEQ ID NO: 910111 - RNA, 22 nt, Human
gcccuggaaucucuccauggga

SEQ ID NO: 910112 - RNA, 18 nt, Human
cuaacagggaaaauagaa

SEQ ID NO: 910113 - RNA, 19 nt, Human
aggguuucuugacuuugcu

SEQ ID NO: 910114 - RNA, 22 nt, Human
aggacccacgcacaggaacccc

SEQ ID NO: 910115 - RNA, 22 nt, Human
aggcacugugcugaugucuuau

SEQ ID NO: 910116 - RNA, 22 nt, Human
agacauuuuagacauaaaagau

SEQ ID NO: 910117 - RNA, 22 nt, Human
ggcugcauguucagaugacacu

SEQ ID NO: 910118 - RNA, 22 nt, Human
acauaggcagagcuuuaaagcu

SEQ ID NO: 910119 - RNA, 22 nt, Human
ucauuuuggccaugauacagac

SEQ ID NO: 910120 - RNA, 22 nt, Human
ucacagugacuuacagagauug

SEQ ID NO: 910121 - RNA, 22 nt, Human
ugggcugcugucugcacaugcu

SEQ ID NO: 910122 - RNA, 22 nt, Human
cuuuccaaugcauuuccaaugu

SEQ ID NO: 910123 - RNA, 22 nt, Human
cugaaguuauuguacaaauuug

SEQ ID NO: 910124 - RNA, 22 nt, Human
ucacaagaguaaguucaugccu

SEQ ID NO: 910125 - RNA, 22 nt, Human
cucaggauuuaaaggggcacuc

SEQ ID NO: 910126 - RNA, 22 nt, Human
gccagcuggagugagagugggc

SEQ ID NO: 910127 - RNA, 22 nt, Human
aggaggccuacgcacaugucua

SEQ ID NO: 910128 - RNA, 22 nt, Human
auuaaagugaaguucucagaug

SEQ ID NO: 910129 - RNA, 22 nt, Human
caggaguugguaauauugugga

SEQ ID NO: 910130 - RNA, 17 nt, Human
ggugaguguccaggugg

SEQ ID NO: 910131 - RNA, 22 nt, Human
ugccagggugucaggagagcua

SEQ ID NO: 910132 - RNA, 22 nt, Human
auguacaggauggugcucaucu

SEQ ID NO: 910133 - RNA, 22 nt, Human
cucugcagaggcccaaggcuga

SEQ ID NO: 910134 - RNA, 22 nt, Human
gagacucuugcuuuaauagccc

SEQ ID NO: 910135 - RNA, 22 nt, Human
gcagagucugggcuaccucuug

SEQ ID NO: 910136 - RNA, 20 nt, Human
ccugucugcaauggagguca

SEQ ID NO: 910137 - RNA, 22 nt, Human
uuucucuccccaaguggaauug

SEQ ID NO: 910138 - RNA, 22 nt, Human
auuaaagacagcagauggaugg

SEQ ID NO: 910139 - RNA, 22 nt, Human
gucagaugauacacuguuguca

SEQ ID NO: 910140 - RNA, 20 nt, Human
ccagggcuggcuccugggau

SEQ ID NO: 910141 - RNA, 22 nt, Human
uagcacaaguaucugcuuuucc

SEQ ID NO: 910142 - RNA, 22 nt, Human
ugugccagaaaauaugcugagg

SEQ ID NO: 910143 - RNA, 22 nt, Human
uuaggaagagcuuucaaucacu

SEQ ID NO: 910144 - RNA, 19 nt, Human
uguggccaugguucagcug

SEQ ID NO: 910145 - RNA, 22 nt, Human
aguagaauagauggauacuauu

SEQ ID NO: 910146 - RNA, 22 nt, Human
gauuucuuggcccacucucaga

SEQ ID NO: 910147 - RNA, 22 nt, Human
gcucccagguucuugggccuug

SEQ ID NO: 910148 - RNA, 22 nt, Human
agcagcaauuuucacugucaau

SEQ ID NO: 910149 - RNA, 22 nt, Human
ucccuggccuggaaggauauca

SEQ ID NO: 910150 - RNA, 19 nt, Human
ggcuggagaaaggaaucag

SEQ ID NO: 910151 - RNA, 22 nt, Human
gagccaggcaccuucuguguug

SEQ ID NO: 910152 - RNA, 22 nt, Human
ggagcuguugauuguuugagga

SEQ ID NO: 910153 - RNA, 22 nt, Human
auguggcuguggacaccuuuca

SEQ ID NO: 910154 - RNA, 22 nt, Human
gaagcaauguguuuucaacauu

SEQ ID NO: 910155 - RNA, 22 nt, Human
uucucuugagcuggucauguuu

SEQ ID NO: 910156 - RNA, 22 nt, Human
agccacagcgaaccucucuucc

SEQ ID NO: 910157 - RNA, 22 nt, Human
ccagcgcuucccaucagggagg

SEQ ID NO: 910158 - RNA, 22 nt, Human
aguuacacagugucacuucuac

SEQ ID NO: 910159 - RNA, 22 nt, Human
cugccauccacggcccacucau

SEQ ID NO: 910160 - RNA, 19 nt, Human
ucuagacaccaaaguuguc

SEQ ID NO: 910161 - RNA, 22 nt, Human
gaaggcuggggcaucagugaaa

SEQ ID NO: 910162 - RNA, 22 nt, Human
augcaggguucugggcuagaga

SEQ ID NO: 910163 - RNA, 22 nt, Human
ucugccuucuuuuagucaucuu

SEQ ID NO: 910164 - RNA, 22 nt, Human
cuggaagaguaauauaaauuag

SEQ ID NO: 910165 - RNA, 23 nt, Human
aggcagguuugggcucuucuugu

SEQ ID NO: 910166 - RNA, 22 nt, Human
aacuacauuuuacagaagauga

SEQ ID NO: 910167 - RNA, 22 nt, Human
ucuuacaagucacccgcuuucu

SEQ ID NO: 910168 - RNA, 22 nt, Human
aagcaaaagguuacacuucugg

SEQ ID NO: 910169 - RNA, 22 nt, Human
ugcagggauuauguagggguug

SEQ ID NO: 910170 - RNA, 22 nt, Human
gucucuagauugggagagagaa

SEQ ID NO: 910171 - RNA, 22 nt, Human
aagauauuuuagaacauucacu

SEQ ID NO: 910172 - RNA, 22 nt, Human
caggcugccuggaagaggacug

SEQ ID NO: 910173 - RNA, 22 nt, Human
gaggcccagcagcgcaggucuu

SEQ ID NO: 910174 - RNA, 22 nt, Human
ccugagggcucagcccccagcc

SEQ ID NO: 910175 - RNA, 21 nt, Human
uuacuaaacaaaacaugcagg

SEQ ID NO: 910176 - RNA, 22 nt, Human
ggccccaggccuuuggucuggc

SEQ ID NO: 910177 - RNA, 22 nt, Human
gaagaagcaggaguguguagca

SEQ ID NO: 910178 - RNA, 22 nt, Human
cuguaguugggcauuauaauag

SEQ ID NO: 910179 - RNA, 22 nt, Human
cugguagcagugaagcuguuga

SEQ ID NO: 910180 - RNA, 22 nt, Human
cugaggcuaguauaaagagcau

SEQ ID NO: 910181 - RNA, 22 nt, Human
caauucaaaugcauaguucaca

SEQ ID NO: 910182 - RNA, 18 nt, Human
gcacagagcccaggcucu

SEQ ID NO: 910183 - RNA, 22 nt, Human
uuuaugcagccucaguaucaga

SEQ ID NO: 910184 - RNA, 22 nt, Human
aauggcuuagcucagcgcucag

SEQ ID NO: 910185 - RNA, 20 nt, Human
agacaggagcccccauucag

SEQ ID NO: 910186 - RNA, 23 nt, Human
aucauucuccaaucuggagcagg

SEQ ID NO: 910187 - RNA, 22 nt, Human
agucugacuuggccaggagcug

SEQ ID NO: 910188 - RNA, 22 nt, Human
cuggcuuucauucauucaggcc

SEQ ID NO: 910189 - RNA, 22 nt, Human
uacagagagauaaguguaaaag

SEQ ID NO: 910190 - RNA, 22 nt, Human
uagacauuauguauuaaguucu

SEQ ID NO: 910191 - RNA, 22 nt, Human
gguuuguugggguccaggccca

SEQ ID NO: 910192 - RNA, 22 nt, Human
acccagcuggaugcauggaggc

SEQ ID NO: 910193 - RNA, 22 nt, Human
aggccugaggaccagauaaaug

SEQ ID NO: 910194 - RNA, 22 nt, Human
ggguccaguuucaucugagguu

SEQ ID NO: 910195 - RNA, 22 nt, Human
ugcaggcauaaccgauguugau

SEQ ID NO: 910196 - RNA, 22 nt, Human
acagaaauugcuaauagcucau

SEQ ID NO: 910197 - RNA, 22 nt, Human
acugaggcuuaaagagauuagg

SEQ ID NO: 910198 - RNA, 22 nt, Human
agacagcaggggagucugguuu

SEQ ID NO: 910199 - RNA, 22 nt, Human
agcagccacacgccuccuucuc

SEQ ID NO: 910200 - RNA, 22 nt, Human
aggcucucacuauccuccuagc

SEQ ID NO: 910201 - RNA, 22 nt, Human
ccuccuucuggggccuucugcu

SEQ ID NO: 910202 - RNA, 23 nt, Human
caugcaaacacuauugcauuugg

SEQ ID NO: 910203 - RNA, 23 nt, Human
gcaggacaacagagugggaaggc

SEQ ID NO: 910204 - RNA, 22 nt, Human
ucguauccugcuucaugcccag

SEQ ID NO: 910205 - RNA, 21 nt, Human
ucuuuucucugcaggauuccu

SEQ ID NO: 910206 - RNA, 23 nt, Human
gagaacagccacagagagcugug

SEQ ID NO: 910207 - RNA, 22 nt, Human
ucuguugcuuucuuccugugug

SEQ ID NO: 910208 - RNA, 22 nt, Human
caggaggaggugagguagaacu

SEQ ID NO: 910209 - RNA, 22 nt, Human
auguaucacagcaauguaguca

SEQ ID NO: 910210 - RNA, 20 nt, Human
guccagaguaaugugcugac

SEQ ID NO: 910211 - RNA, 22 nt, Human
cuauuuuguccuuagugcaggg

SEQ ID NO: 910212 - RNA, 22 nt, Human
aggcagugccuggaccccagcu

SEQ ID NO: 910213 - RNA, 20 nt, Human
auguaaaagacagggaguag

SEQ ID NO: 910214 - RNA, 22 nt, Human
aauguucauuagcauuguugac

SEQ ID NO: 910215 - RNA, 22 nt, Human
uuccccaguaacauacauguga

SEQ ID NO: 910216 - RNA, 22 nt, Human
acagggcccugugggccccacu

SEQ ID NO: 910217 - RNA, 22 nt, Human
ggggaagauggcccuccaugug

SEQ ID NO: 910218 - RNA, 22 nt, Human
auuccagguuguagaaaaguuu

SEQ ID NO: 910219 - RNA, 22 nt, Human
ggcaagaguugaagcuccagga

SEQ ID NO: 910220 - RNA, 22 nt, Human
gucucugaagucaguuuuucua

SEQ ID NO: 910221 - RNA, 22 nt, Human
aggagccaagauggggcaagua

SEQ ID NO: 910222 - RNA, 22 nt, Human
ggcuucugcucagccugcacgc

SEQ ID NO: 910223 - RNA, 22 nt, Human
agucuucauuuaguugauccag

SEQ ID NO: 910224 - RNA, 22 nt, Human
cucuggcuaucuguuucuaugu

SEQ ID NO: 910225 - RNA, 19 nt, Human
aggcuucuacccuguccag

SEQ ID NO: 910226 - RNA, 22 nt, Human
aaagccaguucuuuuauauugg

SEQ ID NO: 910227 - RNA, 22 nt, Human
ugaggccagaguuuuuaauucc

SEQ ID NO: 910228 - RNA, 22 nt, Human
acaggaggagcuguuucaggga

SEQ ID NO: 910229 - RNA, 22 nt, Human
uacagugacuggacuuugucau

SEQ ID NO: 910230 - RNA, 22 nt, Human
cucucaaaugucauuccucuau

SEQ ID NO: 910231 - RNA, 22 nt, Human
ugcuggaaauaggcauuguagc

SEQ ID NO: 910232 - RNA, 22 nt, Human
aucguuaaucuugugugucaac

SEQ ID NO: 910233 - RNA, 22 nt, Human
uguguauacaacuuauaggagc

SEQ ID NO: 910234 - RNA, 22 nt, Human
agcagcaguguucuggaauucu

SEQ ID NO: 910235 - RNA, 22 nt, Human
aauagaaaggaggggcucuugu

SEQ ID NO: 910236 - RNA, 22 nt, Human
ccaggaggcucuugucccuggu

SEQ ID NO: 910237 - RNA, 22 nt, Human
agucccagcuucccccaugcag

SEQ ID NO: 910238 - RNA, 16 nt, Human
uggcagagguucagcc

SEQ ID NO: 910239 - RNA, 22 nt, Human
agggccugggccagcacccuuu

SEQ ID NO: 910240 - RNA, 23 nt, Human
uuguccuucugaaauauaucugg

SEQ ID NO: 910241 - RNA, 23 nt, Human
aaguuguuuuuggccagggaaag

SEQ ID NO: 910242 - RNA, 22 nt, Human
uuguaaacaucuguugcuuaga

SEQ ID NO: 910243 - RNA, 22 nt, Human
uguuacaaggaagaauguaggu

SEQ ID NO: 910244 - RNA, 22 nt, Human
gagguggcugcuugcugggaaa

SEQ ID NO: 910245 - RNA, 22 nt, Human
cagagcuguccaaacccugaca

SEQ ID NO: 910246 - RNA, 20 nt, Human
uagaaucuguucugauucau

SEQ ID NO: 910247 - RNA, 21 nt, Human
cagaaugcauucuuugaagga

SEQ ID NO: 910248 - RNA, 22 nt, Human
caguuucccugcuugaaaacgu

SEQ ID NO: 910249 - RNA, 22 nt, Human
gugauucuuccugcuggcauac

SEQ ID NO: 910250 - RNA, 18 nt, Human
gugccaggaggcgcagcc

SEQ ID NO: 910251 - RNA, 22 nt, Human
acaaacagaguugaaaaauagg

SEQ ID NO: 910252 - RNA, 22 nt, Human
ccagggcagcagaauuggggca

SEQ ID NO: 910253 - RNA, 21 nt, Human
ggaagcaguggcggcaacucc

SEQ ID NO: 910254 - RNA, 22 nt, Human
uguuucuucucacacaaacuca

SEQ ID NO: 910255 - RNA, 22 nt, Human
gagguccugucugagaauggag

SEQ ID NO: 910256 - RNA, 22 nt, Human
uuugaagagccacagugaaauu

SEQ ID NO: 910257 - RNA, 20 nt, Human
agcauuuuaugguaggaaac

SEQ ID NO: 910258 - RNA, 22 nt, Human
cauguguagugaaauaagcagu

SEQ ID NO: 910259 - RNA, 22 nt, Human
uacaggcacugaaaugcuuauu

SEQ ID NO: 910260 - RNA, 22 nt, Human
ccuccccacgggcagccggcgc

SEQ ID NO: 910261 - RNA, 22 nt, Human
cgaggccaugcaugcugaggac

SEQ ID NO: 910262 - RNA, 22 nt, Human
acacuuuuguuugaagucucca

SEQ ID NO: 910263 - RNA, 22 nt, Human
uucuaacucuguuauguguuuc

SEQ ID NO: 910264 - RNA, 22 nt, Human
uucuuuggaauaagucaagcug

SEQ ID NO: 910265 - RNA, 22 nt, Human
cuucaacauacacagagagagg

SEQ ID NO: 910266 - RNA, 22 nt, Human
ggcacagggugauguugcaguu

SEQ ID NO: 910267 - RNA, 22 nt, Human
aaugcuuugagggaagaugaaa

SEQ ID NO: 910268 - RNA, 22 nt, Human
acacauauaugucgaaguccuc

SEQ ID NO: 910269 - RNA, 22 nt, Human
gcugccugccuaguuccacagu

SEQ ID NO: 910270 - RNA, 22 nt, Human
auucuuuucccaacugcuuuaa

SEQ ID NO: 910271 - RNA, 22 nt, Human
cagaaauucccauuucagauuc

SEQ ID NO: 910272 - RNA, 22 nt, Human
gcaggaggaucacuugagccca

SEQ ID NO: 910273 - RNA, 22 nt, Human
guucuggguucaaaccccggcc

SEQ ID NO: 910274 - RNA, 16 nt, Human
auuucaugggcaguga

SEQ ID NO: 910275 - RNA, 22 nt, Human
cuuggaggaaaggcagggagac

SEQ ID NO: 910276 - RNA, 22 nt, Human
cacaagaugguuuccagaugcu

SEQ ID NO: 910277 - RNA, 22 nt, Human
gagcugcuggcuccucagguua

SEQ ID NO: 910278 - RNA, 22 nt, Human
uauuacaaauuauaaugggaga

SEQ ID NO: 910279 - RNA, 22 nt, Human
ugcagcugggacauuuuugaua

SEQ ID NO: 910280 - RNA, 22 nt, Human
agacauuuauguuucucuagga

SEQ ID NO: 910281 - RNA, 22 nt, Human
gggagcugccaccaccccuggg

SEQ ID NO: 910282 - RNA, 21 nt, Human
ugcuacauugcugguuauguu

SEQ ID NO: 910283 - RNA, 22 nt, Human
acugucaugaucgaagauguca

SEQ ID NO: 910284 - RNA, 22 nt, Human
uguacuguauucaucuuuaacu

SEQ ID NO: 910285 - RNA, 23 nt, Human
ugcagaggcaugaucacugcuca

SEQ ID NO: 910286 - RNA, 22 nt, Human
cagaauuauaguugcuuuuuaa

SEQ ID NO: 910287 - RNA, 22 nt, Human
guucauauuacuuugagugcag

SEQ ID NO: 910288 - RNA, 22 nt, Human
acuuagaauuaguguagaauga

SEQ ID NO: 910289 - RNA, 22 nt, Human
cuguucucuggcgguggcuguu

SEQ ID NO: 910290 - RNA, 22 nt, Human
aaccacagacccagacuagaga

SEQ ID NO: 910291 - RNA, 22 nt, Human
uccaggcuccccugcgugcucc

SEQ ID NO: 910292 - RNA, 22 nt, Human
acauuaacaccgugaguuuggu

SEQ ID NO: 910293 - RNA, 22 nt, Human
aauaugcagcaugaugaaguaa

SEQ ID NO: 910294 - RNA, 22 nt, Human
auguacauagcaucaucuagga

SEQ ID NO: 910295 - RNA, 22 nt, Human
uugaggccccauggaugagaac

SEQ ID NO: 910296 - RNA, 22 nt, Human
acucucccugcuauccacuucc

SEQ ID NO: 910297 - RNA, 22 nt, Human
agucugaaggauggaagguacc

SEQ ID NO: 910298 - RNA, 22 nt, Human
augcuccuuggcuucaaagcca

SEQ ID NO: 910299 - RNA, 20 nt, Human
ucucccaggcucagggaaga

SEQ ID NO: 910300 - RNA, 22 nt, Human
acagacuggagugagagaaaua

SEQ ID NO: 910301 - RNA, 22 nt, Human
ugcugcugaugcauagucugcu

SEQ ID NO: 910302 - RNA, 22 nt, Human
ugagguauccagugaagcagcc

SEQ ID NO: 910303 - RNA, 22 nt, Human
caggcucccgcuccacugggca

SEQ ID NO: 910304 - RNA, 22 nt, Human
uggcugagguuaugcugguugu

SEQ ID NO: 910305 - RNA, 22 nt, Human
ccuguucuguagugaguuugag

SEQ ID NO: 910306 - RNA, 22 nt, Human
uuccuaacaaacuucagugaau

SEQ ID NO: 910307 - RNA, 22 nt, Human
cugugggacucugaggaaaagc

SEQ ID NO: 910308 - RNA, 22 nt, Human
uugugaauagugccgcaauaaa

SEQ ID NO: 910309 - RNA, 22 nt, Human
auuacccagucugugguauucu

SEQ ID NO: 910310 - RNA, 22 nt, Human
augagguaacagcuuaucaaca

SEQ ID NO: 910311 - RNA, 23 nt, Human
auuagacacuuuggguugucuuc

SEQ ID NO: 910312 - RNA, 22 nt, Human
ugcugcagugggauuagccuga

SEQ ID NO: 910313 - RNA, 21 nt, Human
agcuguuugaagcuauauugg

SEQ ID NO: 910314 - RNA, 22 nt, Human
aggcuguggcaucacaucagga

SEQ ID NO: 910315 - RNA, 22 nt, Human
aagugaugcuacgacuuugaca

SEQ ID NO: 910316 - RNA, 22 nt, Human
uuguugcagagaugaaugacau

SEQ ID NO: 910317 - RNA, 19 nt, Human
uagauacugaugaacucca

SEQ ID NO: 910318 - RNA, 22 nt, Human
ccucccugcgcuccugcggcgg

SEQ ID NO: 910319 - RNA, 22 nt, Human
uuguugaauggauaaauaaauu

SEQ ID NO: 910320 - RNA, 22 nt, Human
cucagaguucuccugggaggug

SEQ ID NO: 910321 - RNA, 22 nt, Human
auuuccagcagcauauuugucu

SEQ ID NO: 910322 - RNA, 22 nt, Human
uagugaaagucaaagacagcua

SEQ ID NO: 910323 - RNA, 22 nt, Human
aucuuuuaugagcguucugaca

SEQ ID NO: 910324 - RNA, 21 nt, Human
aaguaaaucagagaaauaacc

SEQ ID NO: 910325 - RNA, 22 nt, Human
agacucuaacucaugccauugc

SEQ ID NO: 910326 - RNA, 22 nt, Human
aagggcugaaugaaggguugaa

SEQ ID NO: 910327 - RNA, 22 nt, Human
aaagggaacucuaauuaucuuc

SEQ ID NO: 910328 - RNA, 22 nt, Human
cuggcuguuuucaauguugaug

SEQ ID NO: 910329 - RNA, 22 nt, Human
caggagguacauagauucagau

SEQ ID NO: 910330 - RNA, 21 nt, Human
uguauacacacauauauguac

SEQ ID NO: 910331 - RNA, 22 nt, Human
auggcagauccacaguuugaag

SEQ ID NO: 910332 - RNA, 22 nt, Human
ugugccagucauccagaugugu

SEQ ID NO: 910333 - RNA, 22 nt, Human
agcuuacucuucaagaacaagc

SEQ ID NO: 910334 - RNA, 21 nt, Human
agugucugagcgcugcuucug

SEQ ID NO: 910335 - RNA, 22 nt, Human
caguccagagcccaccagagga

SEQ ID NO: 910336 - RNA, 22 nt, Human
uugaaucuggguacuuguaaua

SEQ ID NO: 910337 - RNA, 22 nt, Human
aucccauuuuauaccauaagag

SEQ ID NO: 910338 - RNA, 22 nt, Human
uugccuccuuuuaaggaaauca

SEQ ID NO: 910339 - RNA, 22 nt, Human
ggaguaggccccgggagagagu

SEQ ID NO: 910340 - RNA, 22 nt, Human
uugacuguuaagacuuggcucu

SEQ ID NO: 910341 - RNA, 22 nt, Human
agccuggaauuaaggaaaugca

SEQ ID NO: 910342 - RNA, 22 nt, Human
gagaggcugugugccauuguug

SEQ ID NO: 910343 - RNA, 22 nt, Human
gaguggagaucgugccacugca

SEQ ID NO: 910344 - RNA, 22 nt, Human
agcuaacauggaggaaaaaguu

SEQ ID NO: 910345 - RNA, 22 nt, Human
gggagggaggugaugcuuggcu

SEQ ID NO: 910346 - RNA, 22 nt, Human
auugugcaaauauuaucuguag

SEQ ID NO: 910347 - RNA, 22 nt, Human
ugucaacacaccuaucucaauu

SEQ ID NO: 910348 - RNA, 18 nt, Human
agugucuggauauuuggg

SEQ ID NO: 910349 - RNA, 22 nt, Human
uuccaucacaucacugaagaca

SEQ ID NO: 910350 - RNA, 22 nt, Human
aaggcugugguucuauacagaa

SEQ ID NO: 910351 - RNA, 22 nt, Human
ggagcugggacccugucaucug

SEQ ID NO: 910352 - RNA, 22 nt, Human
cugccugcaugcugccauagcu

SEQ ID NO: 910353 - RNA, 22 nt, Human
aagucacagaacccauuguaac

SEQ ID NO: 910354 - RNA, 22 nt, Human
uacugaaaaagaauccagaccu

SEQ ID NO: 910355 - RNA, 22 nt, Human
gccaccuguuucgcuugcccag

SEQ ID NO: 910356 - RNA, 22 nt, Human
agaacagccaacuguguaggag

SEQ ID NO: 910357 - RNA, 22 nt, Human
aaaguuuaguguccucuaccac

SEQ ID NO: 910358 - RNA, 22 nt, Human
cugcaggguuuuaacaauggac

SEQ ID NO: 910359 - RNA, 22 nt, Human
uuuaaccaguuuacaaagaauu

SEQ ID NO: 910360 - RNA, 22 nt, Human
gggcaggcugagcaugucaccu

SEQ ID NO: 910361 - RNA, 22 nt, Human
ccuggagcccaaggcagugaga

SEQ ID NO: 910362 - RNA, 22 nt, Human
guguacaaaaugucuccaugga

SEQ ID NO: 910363 - RNA, 22 nt, Human
cuuuaguuaguagauaauggca

SEQ ID NO: 910364 - RNA, 22 nt, Human
aggccaguuuuuggagggaaac

SEQ ID NO: 910365 - RNA, 22 nt, Human
agucuuuauacagaaauauaug

SEQ ID NO: 910366 - RNA, 22 nt, Human
ugcccagguuugagugcccaag

SEQ ID NO: 910367 - RNA, 22 nt, Human
ucacccagacuugugaaugugu

SEQ ID NO: 910368 - RNA, 22 nt, Human
uuccugggagcuagccacaucu

SEQ ID NO: 910369 - RNA, 22 nt, Human
ucucuguagagacagcacugug

SEQ ID NO: 910370 - RNA, 22 nt, Human
ucugcccaaggcugucacuaga

SEQ ID NO: 910371 - RNA, 22 nt, Human
cugagguagaggaaauguagcu

SEQ ID NO: 910372 - RNA, 22 nt, Human
ccaggagggaggaguuccugag

SEQ ID NO: 910373 - RNA, 22 nt, Human
cacgcacgcuggguggaggcgc

SEQ ID NO: 910374 - RNA, 22 nt, Human
aagaguuugucagaucugcacg

SEQ ID NO: 910375 - RNA, 22 nt, Human
ucuuagcaaauuuucuuugccu

SEQ ID NO: 910376 - RNA, 22 nt, Human
agucccagacuccaguuuucug

SEQ ID NO: 910377 - RNA, 22 nt, Human
ccuuaaaagaacuaucucuucu

SEQ ID NO: 910378 - RNA, 22 nt, Human
caaggagauaaaauguugagcu

SEQ ID NO: 910379 - RNA, 22 nt, Human
uauccuguuuugcacaauuaua

SEQ ID NO: 910380 - RNA, 22 nt, Human
cucccagccuucgccagucuga

SEQ ID NO: 910381 - RNA, 22 nt, Human
ggcucugggcauagaaggaagc

SEQ ID NO: 910382 - RNA, 22 nt, Human
gccuggagccucagcaaggagg

SEQ ID NO: 910383 - RNA, 22 nt, Human
uugcuaauaaaguuuuuaugug

SEQ ID NO: 910384 - RNA, 22 nt, Human
uauuucaucuggaacaagguaa

SEQ ID NO: 910385 - RNA, 20 nt, Human
cagggcucugggccuggccu

SEQ ID NO: 910386 - RNA, 22 nt, Human
uuuauugcuguguuagggacag

SEQ ID NO: 910387 - RNA, 22 nt, Human
auauacacauguguauacauuu

SEQ ID NO: 910388 - RNA, 22 nt, Human
ucccagcagcauagcucagaau

SEQ ID NO: 910389 - RNA, 22 nt, Human
gaggagaggcuggacgcgguga

SEQ ID NO: 910390 - RNA, 22 nt, Human
uuacacagaaauuuuauugccu

SEQ ID NO: 910391 - RNA, 22 nt, Human
uucauugaagcacaagugaucu

SEQ ID NO: 910392 - RNA, 22 nt, Human
aaguuucuuuauuagcuugucc

SEQ ID NO: 910393 - RNA, 22 nt, Human
gcugcuguguucucuugaccca

SEQ ID NO: 910394 - RNA, 22 nt, Human
gugcuuggaccaggucaucuuc

SEQ ID NO: 910395 - RNA, 22 nt, Human
aagcugcccaagacugaagcau

SEQ ID NO: 910396 - RNA, 17 nt, Human
aaacuucauucucagga

SEQ ID NO: 910397 - RNA, 22 nt, Human
caggccuugaguuuugggcuuu

SEQ ID NO: 910398 - RNA, 22 nt, Human
gccaggucacagggauaaaugg

SEQ ID NO: 910399 - RNA, 17 nt, Human
ugcuucaucccgauccu

SEQ ID NO: 910400 - RNA, 22 nt, Human
caacuuuucugugaauuuaagu

SEQ ID NO: 910401 - RNA, 22 nt, Human
cugcagugccugccacugagcc

SEQ ID NO: 910402 - RNA, 22 nt, Human
gaaauagacacuuucuaugaau

SEQ ID NO: 910403 - RNA, 22 nt, Human
uggcagugugggaggaagguac

SEQ ID NO: 910404 - RNA, 22 nt, Human
acacaaugaggaggggcuuuuc

SEQ ID NO: 910405 - RNA, 22 nt, Human
gucauuccuauccauuugauac

SEQ ID NO: 910406 - RNA, 22 nt, Human
ggcagagguagcuggaaccagg

SEQ ID NO: 910407 - RNA, 21 nt, Human
gaucuagacuugggcccagua

SEQ ID NO: 910408 - RNA, 22 nt, Human
gggcugagaaguugaucccaag

SEQ ID NO: 910409 - RNA, 22 nt, Human
gagcagugaagacagaaguaca

SEQ ID NO: 910410 - RNA, 22 nt, Human
cucagaguccccacaucugggu

SEQ ID NO: 910411 - RNA, 22 nt, Human
guguccuugcaguuugaagaaa

SEQ ID NO: 910412 - RNA, 22 nt, Human
aaaaauagaaggauugacugag

SEQ ID NO: 910413 - RNA, 17 nt, Human
agucugucuuuccuugu

SEQ ID NO: 910414 - RNA, 22 nt, Human
caguaaacaguuacuaagaaga

SEQ ID NO: 910415 - RNA, 22 nt, Human
uaagaacaagcuggggguucca

SEQ ID NO: 910416 - RNA, 22 nt, Human
gaggugugaggaaugaaugggg

SEQ ID NO: 910417 - RNA, 22 nt, Human
uggaagaccagacuucccgaac

SEQ ID NO: 910418 - RNA, 22 nt, Human
uggcaaaaguuuuagguuauuu

SEQ ID NO: 910419 - RNA, 22 nt, Human
aaagguuuccgagcuuuaauuu

SEQ ID NO: 910420 - RNA, 21 nt, Human
aaauuagcuucaaguucugca

SEQ ID NO: 910421 - RNA, 22 nt, Human
uuucuucuugauuuaaacaggg

SEQ ID NO: 910422 - RNA, 22 nt, Human
gcaguguugugauccaggucuu

SEQ ID NO: 910423 - RNA, 20 nt, Human
agagguucagucuggagaag

SEQ ID NO: 910424 - RNA, 22 nt, Human
uggaguaagagccaccagccaa

SEQ ID NO: 910425 - RNA, 22 nt, Human
aguggugucgugggaguggaag

SEQ ID NO: 910426 - RNA, 22 nt, Human
aggagucagauuguuugaaugu

SEQ ID NO: 910427 - RNA, 22 nt, Human
cuaaauuaucaugagaauuaug

SEQ ID NO: 910428 - RNA, 22 nt, Human
cucuuuccucgaugggcuccug

SEQ ID NO: 910429 - RNA, 22 nt, Human
gggaagacuuagucgguucaau

SEQ ID NO: 910430 - RNA, 22 nt, Human
uauguguacucguuaaauauuu

SEQ ID NO: 910431 - RNA, 22 nt, Human
auugcugacaccaaguaguagc

SEQ ID NO: 910432 - RNA, 22 nt, Human
ucuuuggauggaaaauguauuc

SEQ ID NO: 910433 - RNA, 22 nt, Human
acaaucauuccguucacaacag

SEQ ID NO: 910434 - RNA, 22 nt, Human
uuauguguguacaugcauaugu

SEQ ID NO: 910435 - RNA, 22 nt, Human
aguggcagagcugggauuuggg

SEQ ID NO: 910436 - RNA, 19 nt, Human
auuugaaagcugugcuugc

SEQ ID NO: 910437 - RNA, 22 nt, Human
gcuuccucccugcugcucacua

SEQ ID NO: 910438 - RNA, 22 nt, Human
cuggcuuguuuuaagaauacaa

SEQ ID NO: 910439 - RNA, 22 nt, Human
caucaguguucacuauuccuuc

SEQ ID NO: 910440 - RNA, 22 nt, Human
caugaagauccuguauguuuuu

SEQ ID NO: 910441 - RNA, 22 nt, Human
acagucaaucagaacagcaugu

SEQ ID NO: 910442 - RNA, 22 nt, Human
cuguagaggaacaagagcucuu

SEQ ID NO: 910443 - RNA, 22 nt, Human
guacauuuauuuuugcagcaua

SEQ ID NO: 910444 - RNA, 22 nt, Human
acugccugcucauaacauugcu

SEQ ID NO: 910445 - RNA, 22 nt, Human
auaccauggcaguuuauucacg

SEQ ID NO: 910446 - RNA, 22 nt, Human
ucuguuaaccuggucuuggcuu

SEQ ID NO: 910447 - RNA, 22 nt, Human
caauauauaggaacaacuuagg

SEQ ID NO: 910448 - RNA, 22 nt, Human
ugggcugccagcucuccagaug

SEQ ID NO: 910449 - RNA, 22 nt, Human
ugaaauggaugagagcagaggu

SEQ ID NO: 910450 - RNA, 22 nt, Human
cacauuuacuuuuaucccuugg

SEQ ID NO: 910451 - RNA, 22 nt, Human
auauauuuugaauagccucugu

SEQ ID NO: 910452 - RNA, 23 nt, Human
auuuaaugcugaguugaauguua

SEQ ID NO: 910453 - RNA, 22 nt, Human
uacaggacauugugcauuuguc

SEQ ID NO: 910454 - RNA, 19 nt, Human
accuucagaguggcacaaa

SEQ ID NO: 910455 - RNA, 22 nt, Human
uucuuaaagaggcaaaacacag

SEQ ID NO: 910456 - RNA, 20 nt, Human
uaaaugcaugaauguaaggc

SEQ ID NO: 910457 - RNA, 22 nt, Human
gagcugcagaguaaccuuugca

SEQ ID NO: 910458 - RNA, 22 nt, Human
ucagaagggaaacacaagugac

SEQ ID NO: 910459 - RNA, 22 nt, Human
acccaggggcgaagcuggccac

SEQ ID NO: 910460 - RNA, 22 nt, Human
uaacauugucaguucaacugcu

SEQ ID NO: 910461 - RNA, 22 nt, Human
uucuggaaguggaauuuuugua

SEQ ID NO: 910462 - RNA, 22 nt, Human
acaaaggcagccaaucaucugc

SEQ ID NO: 910463 - RNA, 21 nt, Human
gcacccagccgguucucccag

SEQ ID NO: 910464 - RNA, 22 nt, Human
gaaaauguuuguccggagcuga

SEQ ID NO: 910465 - RNA, 22 nt, Human
agcugcccuucucuugcccuug

SEQ ID NO: 910466 - RNA, 22 nt, Human
aaccauuagucaaucagcaaga

SEQ ID NO: 910467 - RNA, 22 nt, Human
ugauucucuuagaugauguguu

SEQ ID NO: 910468 - RNA, 22 nt, Human
uuaauuuucucaucugugaaau

SEQ ID NO: 910469 - RNA, 22 nt, Human
agugacagccaaauccauccau

SEQ ID NO: 910470 - RNA, 22 nt, Human
gcacugggugggagaucugaau

SEQ ID NO: 910471 - RNA, 22 nt, Human
gauucacucauauuuuacguuu

SEQ ID NO: 910472 - RNA, 22 nt, Human
gccuggagaauuaaaaggaagg

SEQ ID NO: 910473 - RNA, 22 nt, Human
uuccaguucagaugcaacaggg

SEQ ID NO: 910474 - RNA, 19 nt, Human
uuagaaacuguugacacug

SEQ ID NO: 910475 - RNA, 22 nt, Human
uuucuguauuuaggacaggugg

SEQ ID NO: 910476 - RNA, 22 nt, Human
aaacugaagagcuuuuugacac

SEQ ID NO: 910477 - RNA, 22 nt, Human
cccuagggcuaagcaggacugc

SEQ ID NO: 910478 - RNA, 22 nt, Human
uaggccuggaucucugggagca

SEQ ID NO: 910479 - RNA, 22 nt, Human
cuucagaacuauaaaaaguacu

SEQ ID NO: 910480 - RNA, 22 nt, Human
aagcucuuuucauaagagcaaa

SEQ ID NO: 910481 - RNA, 22 nt, Human
gacaucauguucugcuaauagu

SEQ ID NO: 910482 - RNA, 20 nt, Human
uccugagaggcucuuggaga

SEQ ID NO: 910483 - RNA, 22 nt, Human
cugucuggaugugagucaccua

SEQ ID NO: 910484 - RNA, 23 nt, Human
ugcaugugaauucauacuuguuu

SEQ ID NO: 910485 - RNA, 22 nt, Human
cugcuggguuugccuuucacca

SEQ ID NO: 910486 - RNA, 21 nt, Human
cagcccagcuucuuccccagu

SEQ ID NO: 910487 - RNA, 22 nt, Human
uguggcugccacccugaagccg

SEQ ID NO: 910488 - RNA, 22 nt, Human
uggcaaggccacaggugcaguu

SEQ ID NO: 910489 - RNA, 22 nt, Human
augugaaagagguguucagugg

SEQ ID NO: 910490 - RNA, 22 nt, Human
uauuuacuguauuugaaguuga

SEQ ID NO: 910491 - RNA, 22 nt, Human
gucagaggggacaagacacaga

SEQ ID NO: 910492 - RNA, 21 nt, Human
ugcaucuucaagguuggcagg

SEQ ID NO: 910493 - RNA, 22 nt, Human
ggggaagagcauugcacggugu

SEQ ID NO: 910494 - RNA, 22 nt, Human
guuagaaacgcaggcucuccgg

SEQ ID NO: 910495 - RNA, 22 nt, Human
gaaugaguuaauauuugcuugg

SEQ ID NO: 910496 - RNA, 22 nt, Human
uaagacaaauacuauuucaaga

SEQ ID NO: 910497 - RNA, 22 nt, Human
aaugaaacuguauauagacugu

SEQ ID NO: 910498 - RNA, 22 nt, Human
gaagagcugucagaaaagcuaa

SEQ ID NO: 910499 - RNA, 22 nt, Human
ugcccuguucacuucaugguuc

SEQ ID NO: 910500 - RNA, 22 nt, Human
uuuagaaguucacacauuuaaa

SEQ ID NO: 910501 - RNA, 21 nt, Human
ucaggaggcucagacuccugc

SEQ ID NO: 910502 - RNA, 22 nt, Human
gugcccugaguggguaggagag

SEQ ID NO: 910503 - RNA, 22 nt, Human
uaacaaugggaaggacugauga

SEQ ID NO: 910504 - RNA, 22 nt, Human
cuggagugcaaugaacaagguc

SEQ ID NO: 910505 - RNA, 22 nt, Human
gaggaaaagagacagguuauug

SEQ ID NO: 910506 - RNA, 17 nt, Human
agcaaaaguaucaaagc

SEQ ID NO: 910507 - RNA, 22 nt, Human
ccagcuucucucugaugcagcu

SEQ ID NO: 910508 - RNA, 22 nt, Human
caagccaggaaggauccagcac

SEQ ID NO: 910509 - RNA, 22 nt, Human
uagaaaagccccagcuggaggg

SEQ ID NO: 910510 - RNA, 22 nt, Human
cugccuggguucaaguccuguu

SEQ ID NO: 910511 - RNA, 22 nt, Human
aguuccagaacuggaaaaggac

SEQ ID NO: 910512 - RNA, 22 nt, Human
cacuuugaagagcuuuuugaca

SEQ ID NO: 910513 - RNA, 22 nt, Human
uccucagcauuagcacagacau

SEQ ID NO: 910514 - RNA, 22 nt, Human
ccuggcuccagcugccuguccu

SEQ ID NO: 910515 - RNA, 22 nt, Human
ugaagaaaauaugauuacccca

SEQ ID NO: 910516 - RNA, 22 nt, Human
caaaguaucaacucccacacug

SEQ ID NO: 910517 - RNA, 22 nt, Human
aguuuauuguauaugguaguuu

SEQ ID NO: 910518 - RNA, 22 nt, Human
cuggaguguaaagagcauagaa

SEQ ID NO: 910519 - RNA, 22 nt, Human
caaggccaguucaccaagggca

SEQ ID NO: 910520 - RNA, 22 nt, Human
caugugugaguauaucuuaucc

SEQ ID NO: 910521 - RNA, 18 nt, Human
ggagcugggccccacucc

SEQ ID NO: 910522 - RNA, 22 nt, Human
aaccaggagauuaaagaaaggu

SEQ ID NO: 910523 - RNA, 21 nt, Human
uuuucccacugaaagcuccca

SEQ ID NO: 910524 - RNA, 22 nt, Human
ucuguuaucucaagucacaaga

SEQ ID NO: 910525 - RNA, 22 nt, Human
cgcagcugcacggggcugagcc

SEQ ID NO: 910526 - RNA, 22 nt, Human
uguauaaacuuaagcaggaacc

SEQ ID NO: 910527 - RNA, 22 nt, Human
acccugagggaugagaguugca

SEQ ID NO: 910528 - RNA, 22 nt, Human
cugccuggcauagucuggucga

SEQ ID NO: 910529 - RNA, 22 nt, Human
ucuuuuuauauugacaaaaggu

SEQ ID NO: 910530 - RNA, 20 nt, Human
augugucugccucuguguuc

SEQ ID NO: 910531 - RNA, 22 nt, Human
aauucugaugauacugcauugu

SEQ ID NO: 910532 - RNA, 22 nt, Human
cccaggagguagagguugcagu

SEQ ID NO: 910533 - RNA, 22 nt, Human
agccucugaugaucacaggggg

SEQ ID NO: 910534 - RNA, 22 nt, Human
auguuuauuguuuuaagcugcu

SEQ ID NO: 910535 - RNA, 22 nt, Human
acuguugaagugccagcuugau

SEQ ID NO: 910536 - RNA, 22 nt, Human
acaugaaaugcagccuguaacc

SEQ ID NO: 910537 - RNA, 22 nt, Human
gcucugccuucucacuggguuc

SEQ ID NO: 910538 - RNA, 22 nt, Human
gggcaagcucuucagaagcucu

SEQ ID NO: 910539 - RNA, 22 nt, Human
cuccagccucaucuccuggcug

SEQ ID NO: 910540 - RNA, 22 nt, Human
uuccuggcugucaugcccuagu

SEQ ID NO: 910541 - RNA, 22 nt, Human
ucccuggagguguuugcucagg

SEQ ID NO: 910542 - RNA, 22 nt, Human
gugggcagccccuucaaggcca

SEQ ID NO: 910543 - RNA, 22 nt, Human
uacaugaagaaaauuaagcagu

SEQ ID NO: 910544 - RNA, 22 nt, Human
gcucugcuugcaucaugacugc

SEQ ID NO: 910545 - RNA, 22 nt, Human
gcucuuuucacaguccaaaaug

SEQ ID NO: 910546 - RNA, 22 nt, Human
ucuuuaaggugauuucugcuac

SEQ ID NO: 910547 - RNA, 22 nt, Human
ggaauuuagauguuucucaacu

SEQ ID NO: 910548 - RNA, 22 nt, Human
aauguauguguauaucaaauca

SEQ ID NO: 910549 - RNA, 22 nt, Human
cacaaggcccugggucaccaca

SEQ ID NO: 910550 - RNA, 22 nt, Human
augaagacaaacuggguagaaa

SEQ ID NO: 910551 - RNA, 22 nt, Human
gacuaggggcagcgugggagcu

SEQ ID NO: 910552 - RNA, 22 nt, Human
auggacagggcacaggcgcaga

SEQ ID NO: 910553 - RNA, 22 nt, Human
ucuuguuucuguauauaaugac

SEQ ID NO: 910554 - RNA, 23 nt, Human
ccucucucccuguuuggcaaaua

SEQ ID NO: 910555 - RNA, 22 nt, Human
uuucacaacacaaucucguuaa

SEQ ID NO: 910556 - RNA, 22 nt, Human
cugugccuuaguauucucauuu

SEQ ID NO: 910557 - RNA, 22 nt, Human
cagcugagcugccagacuacug

SEQ ID NO: 910558 - RNA, 22 nt, Human
augugucauuauccagaauaac

SEQ ID NO: 910559 - RNA, 22 nt, Human
gcuacagguauauagaugaaac

SEQ ID NO: 910560 - RNA, 22 nt, Human
caugauuuugucuuguguuaau

SEQ ID NO: 910561 - RNA, 22 nt, Human
uuuccagugggccccuugaaau

SEQ ID NO: 910562 - RNA, 22 nt, Human
guuucauauaccaagcacuuga

SEQ ID NO: 910563 - RNA, 22 nt, Human
aucugcuugaguuugaagucag

SEQ ID NO: 910564 - RNA, 22 nt, Human
agcaguguucuaaucuggcuag

SEQ ID NO: 910565 - RNA, 22 nt, Human
auugagaaauauaaucuggaaa

SEQ ID NO: 910566 - RNA, 22 nt, Human
uucugaauucaugagauuuggg

SEQ ID NO: 910567 - RNA, 22 nt, Human
gaacagaagaggcuggugccac

SEQ ID NO: 910568 - RNA, 22 nt, Human
uacuuacacugaagcaaagaua

SEQ ID NO: 910569 - RNA, 23 nt, Human
cuacaaaguaugagaagaccccu

SEQ ID NO: 910570 - RNA, 22 nt, Human
ugugcuuugguuuuacaggaug

SEQ ID NO: 910571 - RNA, 22 nt, Human
uuuaggaaauacuguccuauga

SEQ ID NO: 910572 - RNA, 22 nt, Human
ccaggggggcguagaugcuggg

SEQ ID NO: 910573 - RNA, 22 nt, Human
ugguuccucaagcgcuggcggc

SEQ ID NO: 910574 - RNA, 22 nt, Human
uacaccagauuauuuauaacau

SEQ ID NO: 910575 - RNA, 22 nt, Human
uauguauauauguuggguagaa

SEQ ID NO: 910576 - RNA, 22 nt, Human
uuugccugggaauucuagugua

SEQ ID NO: 910577 - RNA, 22 nt, Human
cccugcucuuagugccugugug

SEQ ID NO: 910578 - RNA, 22 nt, Human
ugagcagcaggaucuucuggua

SEQ ID NO: 910579 - RNA, 22 nt, Human
gcaaagauauuagaauagagua

SEQ ID NO: 910580 - RNA, 22 nt, Human
agacagugacuuagugaccaga

SEQ ID NO: 910581 - RNA, 22 nt, Human
uugacaaaaaccucauuucacc

SEQ ID NO: 910582 - RNA, 22 nt, Human
ugcgaauugaugucaacucagg

SEQ ID NO: 910583 - RNA, 22 nt, Human
uuuugccugagauccgagucug

SEQ ID NO: 910584 - RNA, 22 nt, Human
gacacuuuuuuaaagcucauua

SEQ ID NO: 910585 - RNA, 22 nt, Human
acccucaacaaauucacucuau

SEQ ID NO: 910586 - RNA, 18 nt, Human
uguuuauuuuucucuuac

SEQ ID NO: 910587 - RNA, 22 nt, Human
auucuuugaacaguuuuccugu

SEQ ID NO: 910588 - RNA, 19 nt, Human
gagauauagaaguagaugu

SEQ ID NO: 910589 - RNA, 22 nt, Human
ggcagggaguggagacucccua

SEQ ID NO: 910590 - RNA, 20 nt, Human
accagagauagcaauagugc

SEQ ID NO: 910591 - RNA, 22 nt, Human
uguucauucgcuauugucuaug

SEQ ID NO: 910592 - RNA, 22 nt, Human
ggugugggaacuacagguuuuu

SEQ ID NO: 910593 - RNA, 22 nt, Human
acacauagaaaauaaauaguua

SEQ ID NO: 910594 - RNA, 22 nt, Human
aaauaguuguuuggaucaauaa

SEQ ID NO: 910595 - RNA, 22 nt, Human
cucuauguuaugcagaauuaag

SEQ ID NO: 910596 - RNA, 22 nt, Human
uaaagauguucucauuucauag

SEQ ID NO: 910597 - RNA, 23 nt, Human
ccuggcuguggauuugggccugc

SEQ ID NO: 910598 - RNA, 22 nt, Human
acugcagagcuuuucaguugag

SEQ ID NO: 910599 - RNA, 22 nt, Human
caugcacaaagguaagaugcgu

SEQ ID NO: 910600 - RNA, 19 nt, Human
aagcuuucccauuaacccc

SEQ ID NO: 910601 - RNA, 22 nt, Human
aacuguuuuuuacuagaggacu

SEQ ID NO: 910602 - RNA, 22 nt, Human
uaaguuuccagauuguaagucc

SEQ ID NO: 910603 - RNA, 22 nt, Human
auuauuguugcggcuguuaccg

SEQ ID NO: 910604 - RNA, 22 nt, Human
aaaguucacuauguagcagcgu

SEQ ID NO: 910605 - RNA, 22 nt, Human
agaagagaacugccaaacacuu

SEQ ID NO: 910606 - RNA, 22 nt, Human
uaggcagagguaugguaaggac

SEQ ID NO: 910607 - RNA, 22 nt, Human
aacauuuaggaaggaccuccuc

SEQ ID NO: 910608 - RNA, 22 nt, Human
cacugaaaggcaaugcugacag

SEQ ID NO: 910609 - RNA, 19 nt, Human
agacauaaagaguuugcaa

SEQ ID NO: 910610 - RNA, 22 nt, Human
ucuucccauuaguaaugaagug

SEQ ID NO: 910611 - RNA, 22 nt, Human
uaguguaugucuaacauacacu

SEQ ID NO: 910612 - RNA, 22 nt, Human
gcugcugggauccugggucuca

SEQ ID NO: 910613 - RNA, 22 nt, Human
gagaagggauaugccacucucg

SEQ ID NO: 910614 - RNA, 22 nt, Human
acaauuuauccauuguauaguu

SEQ ID NO: 910615 - RNA, 22 nt, Human
uaacauuacggacaucugucag

SEQ ID NO: 910616 - RNA, 22 nt, Human
ccugagaggcccucucacuguc

SEQ ID NO: 910617 - RNA, 22 nt, Human
uccagcucugcuucacagucuc

SEQ ID NO: 910618 - RNA, 22 nt, Human
cucugacagccacauagaggcu

SEQ ID NO: 910619 - RNA, 19 nt, Human
uugaauaugcaaacugaag

SEQ ID NO: 910620 - RNA, 22 nt, Human
aacagacaacuccuguggcuca

SEQ ID NO: 910621 - RNA, 19 nt, Human
acaaagugcgugcucuuuu

SEQ ID NO: 910622 - RNA, 22 nt, Human
cugagcagucugacucaagcua

SEQ ID NO: 910623 - RNA, 22 nt, Human
gauguacacucagaaaagucau

SEQ ID NO: 910624 - RNA, 20 nt, Human
guacacauauauguaugugu

SEQ ID NO: 910625 - RNA, 22 nt, Human
agcaaauacauuuuuagcauaa

SEQ ID NO: 910626 - RNA, 22 nt, Human
uacacagauuuaaaagcaggga

SEQ ID NO: 910627 - RNA, 22 nt, Human
agcauuuaaggguggauacagg

SEQ ID NO: 910628 - RNA, 22 nt, Human
gacugggccaaggucagcagcu

SEQ ID NO: 910629 - RNA, 22 nt, Human
gggcucagaggaguggccuggg

SEQ ID NO: 910630 - RNA, 22 nt, Human
uuucauguuuucuuaaauggca

SEQ ID NO: 910631 - RNA, 19 nt, Human
ucucagaauuaagagugcu

SEQ ID NO: 910632 - RNA, 22 nt, Human
accuaagagaucuucuggucca

SEQ ID NO: 910633 - RNA, 22 nt, Human
gggaggaaagagaaguggucca

SEQ ID NO: 910634 - RNA, 22 nt, Human
ucagccagagguggaugaguca

SEQ ID NO: 910635 - RNA, 22 nt, Human
ucacauuucugauuauaccaaa

SEQ ID NO: 910636 - RNA, 22 nt, Human
ccagugugcauuaucauguguc

SEQ ID NO: 910637 - RNA, 22 nt, Human
guuauuuaacuuuguagcaugg

SEQ ID NO: 910638 - RNA, 23 nt, Human
ccagugauugccuggaaggaggu

SEQ ID NO: 910639 - RNA, 22 nt, Human
cccccaggcucugacacaggag

SEQ ID NO: 910640 - RNA, 22 nt, Human
acauuugacuguagauacuugc

SEQ ID NO: 910641 - RNA, 22 nt, Human
aagggaaaauaguugaugacca

SEQ ID NO: 910642 - RNA, 22 nt, Human
cuguccagucagaacgucauua

SEQ ID NO: 910643 - RNA, 22 nt, Human
gggcuggaagacaggaaaugcu

SEQ ID NO: 910644 - RNA, 22 nt, Human
ggcuccuggaggcaccacuggu

SEQ ID NO: 910645 - RNA, 22 nt, Human
gauguaaagcuucagagccggc

SEQ ID NO: 910646 - RNA, 22 nt, Human
uaaauguacugaggcaacagga

SEQ ID NO: 910647 - RNA, 22 nt, Human
ugcaguggaagagguggagauc

SEQ ID NO: 910648 - RNA, 22 nt, Human
uccugucuuaaugaucucgugc

SEQ ID NO: 910649 - RNA, 22 nt, Human
gggcugagcuguucugaguuua

SEQ ID NO: 910650 - RNA, 22 nt, Human
uguuuuuaaauaaugauagaaa

SEQ ID NO: 910651 - RNA, 22 nt, Human
uucacauugugcagauuauggu

SEQ ID NO: 910652 - RNA, 22 nt, Human
uacccaggagaaacagcagggc

SEQ ID NO: 910653 - RNA, 23 nt, Human
aaacuacauuuauaguuuuucuc

SEQ ID NO: 910654 - RNA, 23 nt, Human
ccuccugggcacaggccugaugg

SEQ ID NO: 910655 - RNA, 22 nt, Human
auagaauagcauagaaaauuga

SEQ ID NO: 910656 - RNA, 22 nt, Human
uggcauuauguagcagggagca

SEQ ID NO: 910657 - RNA, 19 nt, Human
cacuaagaugagauauagc

SEQ ID NO: 910658 - RNA, 22 nt, Human
ggaagccacccagcuuugauag

SEQ ID NO: 910659 - RNA, 22 nt, Human
ugggcagggaucucuuuugcaa

SEQ ID NO: 910660 - RNA, 21 nt, Human
agaauccauucagaccuucuc

SEQ ID NO: 910661 - RNA, 22 nt, Human
uuugacaugaaguagcuuauaa

SEQ ID NO: 910662 - RNA, 22 nt, Human
ucuagauuuggggcaugaaguu

SEQ ID NO: 910663 - RNA, 22 nt, Human
cacacaugugggauccgcaggg

SEQ ID NO: 910664 - RNA, 21 nt, Human
gcagagccggggcgagaaggc

SEQ ID NO: 910665 - RNA, 22 nt, Human
agauggggcagaauggagccau

SEQ ID NO: 910666 - RNA, 22 nt, Human
cugcuguguuagcagguuuagu

SEQ ID NO: 910667 - RNA, 20 nt, Human
aguaggggaaugcaagagca

SEQ ID NO: 910668 - RNA, 22 nt, Human
gccugcucugaguguggggggu

SEQ ID NO: 910669 - RNA, 22 nt, Human
aaguugguaggagacagaaggu

SEQ ID NO: 910670 - RNA, 22 nt, Human
uuuguuuacucauucauugaug

SEQ ID NO: 910671 - RNA, 22 nt, Human
aagcaggguuuuuccaccgcag

SEQ ID NO: 910672 - RNA, 22 nt, Human
acuucuguauguccugcauuca

SEQ ID NO: 910673 - RNA, 22 nt, Human
acccuggaggucuacagugcag

SEQ ID NO: 910674 - RNA, 22 nt, Human
ccaaugcauugaauuagguuuu

SEQ ID NO: 910675 - RNA, 22 nt, Human
guauuugucuuguuggucucca

SEQ ID NO: 910676 - RNA, 22 nt, Human
caaagcuguaccccaaccuaug

SEQ ID NO: 910677 - RNA, 22 nt, Human
aauuuacaggugcacucgccau

SEQ ID NO: 910678 - RNA, 22 nt, Human
uccagggcuacaaggcaccaga

SEQ ID NO: 910679 - RNA, 22 nt, Human
acuugguuggucucacccuguu

SEQ ID NO: 910680 - RNA, 22 nt, Human
ugaccuuucaacccuucuuggc

SEQ ID NO: 910681 - RNA, 22 nt, Human
uagucuggacuucuuaguguca

SEQ ID NO: 910682 - RNA, 22 nt, Human
aguucucuucucaucacccagg

SEQ ID NO: 910683 - RNA, 22 nt, Human
agggccacaguggggccugaga

SEQ ID NO: 910684 - RNA, 22 nt, Human
gccuggagagcacugugcgcuu

SEQ ID NO: 910685 - RNA, 22 nt, Human
gcugcagugagccaagaucgug

SEQ ID NO: 910686 - RNA, 22 nt, Human
aggacagcccccaacagcaaca

SEQ ID NO: 910687 - RNA, 19 nt, Human
cugggucuuauucugugaa

SEQ ID NO: 910688 - RNA, 22 nt, Human
gccagcugcucgcguaggguag

SEQ ID NO: 910689 - RNA, 22 nt, Human
gaacacaacucagaaugcuggu

SEQ ID NO: 910690 - RNA, 22 nt, Human
caacagagagaccagaaacagg

SEQ ID NO: 910691 - RNA, 22 nt, Human
cgcugccaggauccccugccgg

SEQ ID NO: 910692 - RNA, 22 nt, Human
uaauaauuggcaauguugagca

SEQ ID NO: 910693 - RNA, 18 nt, Human
ggccugcagugaagcaag

SEQ ID NO: 910694 - RNA, 22 nt, Human
uccaaggaggcuuugacgucca

SEQ ID NO: 910695 - RNA, 22 nt, Human
acugagacaacuguguuucuaa

SEQ ID NO: 910696 - RNA, 22 nt, Human
cccuggaggucagaggccuggg

SEQ ID NO: 910697 - RNA, 22 nt, Human
uugcccugucaguagaagugca

SEQ ID NO: 910698 - RNA, 22 nt, Human
ucugggucuaugaucucacuuc

SEQ ID NO: 910699 - RNA, 22 nt, Human
guaaaguacauacaugaacuca

SEQ ID NO: 910700 - RNA, 22 nt, Human
acaauagauacugggcacauau

SEQ ID NO: 910701 - RNA, 22 nt, Human
ccagccuggggaggcagcuucu

SEQ ID NO: 910702 - RNA, 22 nt, Human
uauauaagauggguaggcuugu

SEQ ID NO: 910703 - RNA, 22 nt, Human
gggcuagaaauucugcagugga

SEQ ID NO: 910704 - RNA, 23 nt, Human
cugaaauaccagaaaaucagugu

SEQ ID NO: 910705 - RNA, 22 nt, Human
uuucuaagaaaguaaugguuau

SEQ ID NO: 910706 - RNA, 22 nt, Human
aaauuauuaguuaaguugggca

SEQ ID NO: 910707 - RNA, 22 nt, Human
augaacaaguauuugcaugagc

SEQ ID NO: 910708 - RNA, 22 nt, Human
ucuuagaaauuccccaguggcu

SEQ ID NO: 910709 - RNA, 22 nt, Human
aaagaucagaggauagcugagu

SEQ ID NO: 910710 - RNA, 22 nt, Human
ugccuguguggggucugccgcc

SEQ ID NO: 910711 - RNA, 22 nt, Human
uucuaauugcaaguuuuaguau

SEQ ID NO: 910712 - RNA, 22 nt, Human
caggauggccccggggcugugc

SEQ ID NO: 910713 - RNA, 22 nt, Human
cuggaucugucuuuuggauccc

SEQ ID NO: 910714 - RNA, 22 nt, Human
uugaaagcuccauauuguagag

SEQ ID NO: 910715 - RNA, 22 nt, Human
agggaugauuucagugucugcc

SEQ ID NO: 910716 - RNA, 22 nt, Human
cucccaggcacagggaggagcc

SEQ ID NO: 910717 - RNA, 22 nt, Human
augauauauguguugagcuugc

SEQ ID NO: 910718 - RNA, 22 nt, Human
ccugugcucccuauguaucugg

SEQ ID NO: 910719 - RNA, 22 nt, Human
ucuuugcaucccuuccauaguu

SEQ ID NO: 910720 - RNA, 16 nt, Human
ggugggaggugaggug

SEQ ID NO: 910721 - RNA, 22 nt, Human
ggagaugcuuuccaguggggau

SEQ ID NO: 910722 - RNA, 22 nt, Human
aagauucucccugagauauuua

SEQ ID NO: 910723 - RNA, 22 nt, Human
uugaagcaugguacuuguucaa

SEQ ID NO: 910724 - RNA, 19 nt, Human
caagauuuguucacacaug

SEQ ID NO: 910725 - RNA, 22 nt, Human
caagaaucaacauuauuuagug

SEQ ID NO: 910726 - RNA, 22 nt, Human
aucaagcacuucuacaugacau

SEQ ID NO: 910727 - RNA, 22 nt, Human
uagaaucugaauguagagcuga

SEQ ID NO: 910728 - RNA, 21 nt, Human
ccuuuaugcaaggacuggcau

SEQ ID NO: 910729 - RNA, 22 nt, Human
ucacugcaaggaggcuucucaa

SEQ ID NO: 910730 - RNA, 22 nt, Human
aguuuccaaaaggagacaggga

SEQ ID NO: 910731 - RNA, 22 nt, Human
uauacagaaagaauucaagucu

SEQ ID NO: 910732 - RNA, 22 nt, Human
agaggccgggugccugcucaga

SEQ ID NO: 910733 - RNA, 22 nt, Human
ugagacaacagcuugugcugcu

SEQ ID NO: 910734 - RNA, 22 nt, Human
uuucaacaggaugauaauaggc

SEQ ID NO: 910735 - RNA, 22 nt, Human
aggcacuguggaagacaugguu

SEQ ID NO: 910736 - RNA, 22 nt, Human
ucuggaaauuucaguuuuagag

SEQ ID NO: 910737 - RNA, 18 nt, Human
uucaccagugugaugggu

SEQ ID NO: 910738 - RNA, 21 nt, Human
agcucuggagcagcaaucaag

SEQ ID NO: 910739 - RNA, 22 nt, Human
acagagguguuccagaccuagg

SEQ ID NO: 910740 - RNA, 22 nt, Human
ucuucaaauacagucauauuga

SEQ ID NO: 910741 - RNA, 22 nt, Human
agucagggccuggccugcugaa

SEQ ID NO: 910742 - RNA, 22 nt, Human
acaaaugagaauguagacagag

SEQ ID NO: 910743 - RNA, 22 nt, Human
cugucacucuggcaacccagua

SEQ ID NO: 910744 - RNA, 22 nt, Human
cucaggaugcaauuccaucaag

SEQ ID NO: 910745 - RNA, 22 nt, Human
ugugaaaucacaggcuauuuag

SEQ ID NO: 910746 - RNA, 22 nt, Human
gguugacagauauacauuguag

SEQ ID NO: 910747 - RNA, 22 nt, Human
cccaggccccagggcuugucag

SEQ ID NO: 910748 - RNA, 22 nt, Human
cuguccccgcgaguccagagcu

SEQ ID NO: 910749 - RNA, 22 nt, Human
ucaucugaacaugcagccugug

SEQ ID NO: 910750 - RNA, 19 nt, Human
uccugcccaccagccaggg

SEQ ID NO: 910751 - RNA, 22 nt, Human
uuggccuuguacaucauauuaa

SEQ ID NO: 910752 - RNA, 22 nt, Human
uuggucagaugugucuccuccu

SEQ ID NO: 910753 - RNA, 20 nt, Human
ucaagacagacauggaguuu

SEQ ID NO: 910754 - RNA, 18 nt, Human
ucucauaaaggggugugu

SEQ ID NO: 910755 - RNA, 22 nt, Human
aggaggcacucacucucagggu

SEQ ID NO: 910756 - RNA, 22 nt, Human
ucaguccaggggcugugauguc

SEQ ID NO: 910757 - RNA, 22 nt, Human
gaacagugccagcacacaauaa

SEQ ID NO: 910758 - RNA, 22 nt, Human
ucucccacgguacaggauaaac

SEQ ID NO: 910759 - RNA, 22 nt, Human
uggcaccugaacuuagaggugu

SEQ ID NO: 910760 - RNA, 22 nt, Human
uggagcugggguuugaaucugg

SEQ ID NO: 910761 - RNA, 21 nt, Human
uuucaauuugccuugagucau

SEQ ID NO: 910762 - RNA, 22 nt, Human
ugaaaacuugacaagugaggua

SEQ ID NO: 910763 - RNA, 22 nt, Human
uggcugggggugcuauagcugc

SEQ ID NO: 910764 - RNA, 22 nt, Human
auggcauuccaagucuucuuuu

SEQ ID NO: 910765 - RNA, 22 nt, Human
aagcuuuucucaguguccuugg

SEQ ID NO: 910766 - RNA, 22 nt, Human
uggcuucaguuccuguguuguu

SEQ ID NO: 910767 - RNA, 22 nt, Human
aaguuuuugauucuaagagaga

SEQ ID NO: 910768 - RNA, 22 nt, Human
gagucacaaaagaugcccaggg

SEQ ID NO: 910769 - RNA, 22 nt, Human
cugauucucugacucuuggcuu

SEQ ID NO: 910770 - RNA, 22 nt, Human
aaacagcaggaacaucuugcca

SEQ ID NO: 910771 - RNA, 22 nt, Human
ucagccuggcaggauggccugg

SEQ ID NO: 910772 - RNA, 22 nt, Human
gaaacguuguggaaaauccucu

SEQ ID NO: 910773 - RNA, 22 nt, Human
gugagucaauguauugcagcaa

SEQ ID NO: 910774 - RNA, 22 nt, Human
aaaaguuugugcaaacacucag

SEQ ID NO: 910775 - RNA, 22 nt, Human
agcacauuuuauuuaagaaaau

SEQ ID NO: 910776 - RNA, 22 nt, Human
uucaugaaacuuaacuguuggg

SEQ ID NO: 910777 - RNA, 22 nt, Human
uuagacauguuugcuaaaauga

SEQ ID NO: 910778 - RNA, 22 nt, Human
cuuauaaaguccaucugaacaa

SEQ ID NO: 910779 - RNA, 22 nt, Human
ucugaaaauguugacuuuguuu

SEQ ID NO: 910780 - RNA, 22 nt, Human
aaguauacuuaggcauaauggu

SEQ ID NO: 910781 - RNA, 22 nt, Human
uacaggauaucacuucauuucu

SEQ ID NO: 910782 - RNA, 22 nt, Human
aagcagcuuaaauuagagccug

SEQ ID NO: 910783 - RNA, 22 nt, Human
agguggccccaggccucugcca

SEQ ID NO: 910784 - RNA, 22 nt, Human
auuggaaaauaugguuucugga

SEQ ID NO: 910785 - RNA, 22 nt, Human
caagacaauggguaaguguaac

SEQ ID NO: 910786 - RNA, 22 nt, Human
ccagagagggcgccaccuggag

SEQ ID NO: 910787 - RNA, 22 nt, Human
caaauguugcuguaauguuugu

SEQ ID NO: 910788 - RNA, 22 nt, Human
ucucccauucagcuugcaguca

SEQ ID NO: 910789 - RNA, 22 nt, Human
ugagguagugcuugucauguuu

SEQ ID NO: 910790 - RNA, 18 nt, Human
aggggcagcuugugugga

SEQ ID NO: 910791 - RNA, 22 nt, Human
uuugaaauaugaggcauuauga

SEQ ID NO: 910792 - RNA, 23 nt, Human
uuagagaugauuaaaaaaucuug

SEQ ID NO: 910793 - RNA, 22 nt, Human
guucuagccuggggcuccuugg

SEQ ID NO: 910794 - RNA, 22 nt, Human
uuugagaaaaagugaugaugau

SEQ ID NO: 910795 - RNA, 22 nt, Human
ucuuuaugccuaccugggaaga

SEQ ID NO: 910796 - RNA, 20 nt, Human
ccacauuuuacuguuugcca

SEQ ID NO: 910797 - RNA, 22 nt, Human
uagcugcacaggaaguaagauu

SEQ ID NO: 910798 - RNA, 22 nt, Human
cugucccuucccaagcccagcc

SEQ ID NO: 910799 - RNA, 22 nt, Human
ggcaguggcuccucucuacucc

SEQ ID NO: 910800 - RNA, 22 nt, Human
uccugaccauuccuugucucca

SEQ ID NO: 910801 - RNA, 22 nt, Human
ucaguguagggcagaccccugg

SEQ ID NO: 910802 - RNA, 22 nt, Human
auggcagccugaacacuuccug

SEQ ID NO: 910803 - RNA, 22 nt, Human
aaaggaggaauggagagaugcu

SEQ ID NO: 910804 - RNA, 22 nt, Human
uagcauuaucugucuuaucauu

SEQ ID NO: 910805 - RNA, 22 nt, Human
augaaagugaagguuuacuaag

SEQ ID NO: 910806 - RNA, 22 nt, Human
gugauaagacaguaggcacaag

SEQ ID NO: 910807 - RNA, 22 nt, Human
auucuacacaaagcaagaagac

SEQ ID NO: 910808 - RNA, 22 nt, Human
auaaagcaucuagucugucacu

SEQ ID NO: 910809 - RNA, 22 nt, Human
gcuguguaggauccuguuguau

SEQ ID NO: 910810 - RNA, 22 nt, Human
aaacucuaaucaaauauagcau

SEQ ID NO: 910811 - RNA, 22 nt, Human
ucuaaauuacuuugggcaguau

SEQ ID NO: 910812 - RNA, 22 nt, Human
caggccacacggcggcucccug

SEQ ID NO: 910813 - RNA, 22 nt, Human
acuuuagaaguaaggaugaguu

SEQ ID NO: 910814 - RNA, 22 nt, Human
gcuggcccagggucaccuagga

SEQ ID NO: 910815 - RNA, 22 nt, Human
aaagauaugucuccaaagagau

SEQ ID NO: 910816 - RNA, 22 nt, Human
ugggagugcaccugggacacga

SEQ ID NO: 910817 - RNA, 22 nt, Human
gcuuuagagaagaaagguugcu

SEQ ID NO: 910818 - RNA, 22 nt, Human
uggcuuccagagcugcuccacc

SEQ ID NO: 910819 - RNA, 22 nt, Human
ugcagcugaggccagcuaugcc

SEQ ID NO: 910820 - RNA, 22 nt, Human
acucugagaaucccuggacuuu

SEQ ID NO: 910821 - RNA, 22 nt, Human
cacuaguggccccaugugguug

SEQ ID NO: 910822 - RNA, 22 nt, Human
gguaccaccaauucagcugcca

SEQ ID NO: 910823 - RNA, 22 nt, Human
agcuggcaucgagcauuugaac

SEQ ID NO: 910824 - RNA, 20 nt, Human
ugccuuuuauaccuuuaaac

SEQ ID NO: 910825 - RNA, 22 nt, Human
ggcagugccacuaagcucugcu

SEQ ID NO: 910826 - RNA, 22 nt, Human
ugcuuaaaauuuuccaaggauu

SEQ ID NO: 910827 - RNA, 22 nt, Human
ggcaguguuccagaccuucacc

SEQ ID NO: 910828 - RNA, 20 nt, Human
ccaggcaacuauccugucuc

SEQ ID NO: 910829 - RNA, 22 nt, Human
acuaaguuguagucacacaucc

SEQ ID NO: 910830 - RNA, 18 nt, Human
aaauuauucuuccuuuuc

SEQ ID NO: 910831 - RNA, 22 nt, Human
cccuggagcaucucugcugucu

SEQ ID NO: 910832 - RNA, 22 nt, Human
gugcaggaguaggagagggcuu

SEQ ID NO: 910833 - RNA, 22 nt, Human
uuuaacagaugaggaggugagg

SEQ ID NO: 910834 - RNA, 22 nt, Human
auacacuuguacauuuuuuaau

SEQ ID NO: 910835 - RNA, 21 nt, Human
cuacacagcuuucuauaggaa

SEQ ID NO: 910836 - RNA, 23 nt, Human
ugacccuugaugguugacgugca

SEQ ID NO: 910837 - RNA, 22 nt, Human
acauuuuucuaggaggcaaggu

SEQ ID NO: 910838 - RNA, 22 nt, Human
acuucaugaacauguggccugu

SEQ ID NO: 910839 - RNA, 22 nt, Human
gcaguguuaggaauaaaaauga

SEQ ID NO: 910840 - RNA, 19 nt, Human
gcugccugucuuagccagu

SEQ ID NO: 910841 - RNA, 22 nt, Human
cugggccagggaggugucugua

SEQ ID NO: 910842 - RNA, 22 nt, Human
uucuucugugaggugugugccu

SEQ ID NO: 910843 - RNA, 22 nt, Human
agugacagggaaggauaggauu

SEQ ID NO: 910844 - RNA, 22 nt, Human
ggaagaaaguagaaaaccgugg

SEQ ID NO: 910845 - RNA, 22 nt, Human
caggggcgguggcucacgccug

SEQ ID NO: 910846 - RNA, 22 nt, Human
auauaauuuuugguuagcucaa

SEQ ID NO: 910847 - RNA, 22 nt, Human
uucagugagugaaugaaugaau

SEQ ID NO: 910848 - RNA, 22 nt, Human
gcagcuguaucacuuuuaaaca

SEQ ID NO: 910849 - RNA, 22 nt, Human
cucuggguguuaaugucagugu

SEQ ID NO: 910850 - RNA, 22 nt, Human
ggcagaggugaaguucacaagg

SEQ ID NO: 910851 - RNA, 22 nt, Human
uucaacaaugcacuugaguaua

SEQ ID NO: 910852 - RNA, 22 nt, Human
uucuucuuuccaauuacauggu

SEQ ID NO: 910853 - RNA, 22 nt, Human
aagcagugcgcucaucuaaggg

SEQ ID NO: 910854 - RNA, 22 nt, Human
uaauuucaauagcuugcauaau

SEQ ID NO: 910855 - RNA, 22 nt, Human
gagucuccuacuggcuguccuu

SEQ ID NO: 910856 - RNA, 22 nt, Human
caagguuucuaugcucaaagga

SEQ ID NO: 910857 - RNA, 22 nt, Human
ucacuuuuugauaucauucugc

SEQ ID NO: 910858 - RNA, 22 nt, Human
auucaaacaggaagaaaucauu

SEQ ID NO: 910859 - RNA, 22 nt, Human
uagcccagaaagcaaaugucuc

SEQ ID NO: 910860 - RNA, 22 nt, Human
uguaaacuagggcugauaaggg

SEQ ID NO: 910861 - RNA, 20 nt, Human
gccuggaggcagagauaaag

SEQ ID NO: 910862 - RNA, 22 nt, Human
ggcagcuccucucagcaaaaga

SEQ ID NO: 910863 - RNA, 22 nt, Human
uggcacuggcgcaggauggcgg

SEQ ID NO: 910864 - RNA, 21 nt, Human
uuccuuuuuauggcuuagugg

SEQ ID NO: 910865 - RNA, 19 nt, Human
ccugucugucuucagcuag

SEQ ID NO: 910866 - RNA, 22 nt, Human
guaaccugucggaaagccuugu

SEQ ID NO: 910867 - RNA, 22 nt, Human
uaaauguaaauggcgucuugcg

SEQ ID NO: 910868 - RNA, 23 nt, Human
agggcugaaugcagagaagcaga

SEQ ID NO: 910869 - RNA, 22 nt, Human
agugucacaaaccugccuugua

SEQ ID NO: 910870 - RNA, 22 nt, Human
aggcuggugccugcagugaauc

SEQ ID NO: 910871 - RNA, 22 nt, Human
uuuuaugaagauaauuuucuga

SEQ ID NO: 910872 - RNA, 20 nt, Human
agugcaagaaagcacagcug

SEQ ID NO: 910873 - RNA, 22 nt, Human
cccaacacucaccuccggauua

SEQ ID NO: 910874 - RNA, 22 nt, Human
ugcuuugugauaugcugugucu

SEQ ID NO: 910875 - RNA, 22 nt, Human
aaguacauguugcucaacagcc

SEQ ID NO: 910876 - RNA, 22 nt, Human
uagcaccaugauggaagagcug

SEQ ID NO: 910877 - RNA, 22 nt, Human
agcagcucaacagugucucuau

SEQ ID NO: 910878 - RNA, 22 nt, Human
ccccagcccacaagcauauuaa

SEQ ID NO: 910879 - RNA, 22 nt, Human
aagcagcagaccugauuuugaa

SEQ ID NO: 910880 - RNA, 22 nt, Human
uggcaguguugugccacauucc

SEQ ID NO: 910881 - RNA, 22 nt, Human
ugaggcucuuccuccccugcuc

SEQ ID NO: 910882 - RNA, 22 nt, Human
caaaaguaauuaugguuuuugc

SEQ ID NO: 910883 - RNA, 22 nt, Human
uuuccuuccuugcuagccugag

SEQ ID NO: 910884 - RNA, 22 nt, Human
cuguccauugguauauuagggu

SEQ ID NO: 910885 - RNA, 22 nt, Human
auagacaaacacgaagaugaca

SEQ ID NO: 910886 - RNA, 22 nt, Human
ugacccuucccuucaguuggcu

SEQ ID NO: 910887 - RNA, 22 nt, Human
gaaggcugccaguggcccucuu

SEQ ID NO: 910888 - RNA, 22 nt, Human
uauuaucauguuaauuaguggg

SEQ ID NO: 910889 - RNA, 22 nt, Human
acugugaugaugaagcaugguu

SEQ ID NO: 910890 - RNA, 22 nt, Human
acauuuccuaacguauacacug

SEQ ID NO: 910891 - RNA, 23 nt, Human
auuuacagguuaaaugaaaucag

SEQ ID NO: 910892 - RNA, 22 nt, Human
agcaggaaagaaaaaucugugu

SEQ ID NO: 910893 - RNA, 22 nt, Human
acaguguuuuagaaaagcuuga

SEQ ID NO: 910894 - RNA, 18 nt, Human
agggccagcugugaguag

SEQ ID NO: 910895 - RNA, 22 nt, Human
ucacccaggcugguaugcagug

SEQ ID NO: 910896 - RNA, 22 nt, Human
cguuaauaggugcaagguaagg

SEQ ID NO: 910897 - RNA, 22 nt, Human
uggguguguccauauuuugacu

SEQ ID NO: 910898 - RNA, 22 nt, Human
gcaaauguggcuuccuuucuag

SEQ ID NO: 910899 - RNA, 22 nt, Human
acaauagaaggaaacugacaua

SEQ ID NO: 910900 - RNA, 21 nt, Human
aagaaguuuggauuuuguccu

SEQ ID NO: 910901 - RNA, 22 nt, Human
augcccugaggaaugucacgcu

SEQ ID NO: 910902 - RNA, 21 nt, Human
ggccaguggaauuuuauguca

SEQ ID NO: 910903 - RNA, 22 nt, Human
gccaguaagugguagagacuua

SEQ ID NO: 910904 - RNA, 22 nt, Human
cugcuugaccuguuguucucac

SEQ ID NO: 910905 - RNA, 22 nt, Human
gcauagaauuuagagacaaaag

SEQ ID NO: 910906 - RNA, 22 nt, Human
ccugggaugcuguccucaucua

SEQ ID NO: 910907 - RNA, 22 nt, Human
aacuguaauuuuuacauaguaa

SEQ ID NO: 910908 - RNA, 22 nt, Human
gccugucugcgucacgcuuauu

SEQ ID NO: 910909 - RNA, 22 nt, Human
agugucugcgggcagaggagcg

SEQ ID NO: 910910 - RNA, 22 nt, Human
ugaaggagggaagaaggcucug

SEQ ID NO: 910911 - RNA, 22 nt, Human
accuacuaauugagauaauagg

SEQ ID NO: 910912 - RNA, 22 nt, Human
auucuuucaaggaauaguuauu

SEQ ID NO: 910913 - RNA, 23 nt, Human
uccagcagccaagaaggguagaa

SEQ ID NO: 910914 - RNA, 22 nt, Human
cugcacacauauggcuucucuc

SEQ ID NO: 910915 - RNA, 22 nt, Human
gcuacagauuuaucauguuaua

SEQ ID NO: 910916 - RNA, 22 nt, Human
gcagagcucaugccugcaccuc

SEQ ID NO: 910917 - RNA, 21 nt, Human
ucugggugcuaguguuugcuu

SEQ ID NO: 910918 - RNA, 20 nt, Human
gcaaggcagguugaccaaga

SEQ ID NO: 910919 - RNA, 22 nt, Human
ucuccugguauguaugcaccug

SEQ ID NO: 910920 - RNA, 22 nt, Human
cuggcagcuuccuuugcaucug

SEQ ID NO: 910921 - RNA, 22 nt, Human
gcugaguguaaugauggcagag

SEQ ID NO: 910922 - RNA, 22 nt, Human
uguauuccaaaaugcugaggau

SEQ ID NO: 910923 - RNA, 22 nt, Human
uuucuguaaagaccaagccagc

SEQ ID NO: 910924 - RNA, 22 nt, Human
gugcugggugcugcagacaggu

SEQ ID NO: 910925 - RNA, 22 nt, Human
uuccuucucagcccucgaggau

SEQ ID NO: 910926 - RNA, 22 nt, Human
gagagaagaauguuccgaggcc

SEQ ID NO: 910927 - RNA, 22 nt, Human
cuggcccaggcuccuggggcac

SEQ ID NO: 910928 - RNA, 22 nt, Human
ucaaacaucuaaacuacccacu

SEQ ID NO: 910929 - RNA, 22 nt, Human
ucagugaaaugcauauucuucg

SEQ ID NO: 910930 - RNA, 22 nt, Human
uugguuaaaaucaaauuaauca

SEQ ID NO: 910931 - RNA, 22 nt, Human
cagcacauaagccgaagacugu

SEQ ID NO: 910932 - RNA, 22 nt, Human
uggucaaaagcuacuaugaaug

SEQ ID NO: 910933 - RNA, 19 nt, Human
auuagcagacuuccuuuca

SEQ ID NO: 910934 - RNA, 22 nt, Human
cuguccugcaguugggggcagg

SEQ ID NO: 910935 - RNA, 20 nt, Human
uccaggagaacugggagccg

SEQ ID NO: 910936 - RNA, 22 nt, Human
gcucuguguuuugcccaggaga

SEQ ID NO: 910937 - RNA, 22 nt, Human
agacaauggcuaaguaaccugu

SEQ ID NO: 910938 - RNA, 22 nt, Human
auacaucauuuauggaauaagg

SEQ ID NO: 910939 - RNA, 22 nt, Human
uaacuucugcacagaaaauuug

SEQ ID NO: 910940 - RNA, 22 nt, Human
auucuuuccagacacugauugc

SEQ ID NO: 910941 - RNA, 19 nt, Human
agaguuuaggucuaucagg

SEQ ID NO: 910942 - RNA, 22 nt, Human
agcuugcacagagaauacagua

SEQ ID NO: 910943 - RNA, 22 nt, Human
ucagaggcuucuggccagucug

SEQ ID NO: 910944 - RNA, 22 nt, Human
gcaauagauuaugaucuacagu

SEQ ID NO: 910945 - RNA, 22 nt, Human
acugaauagcccuucugucucc

SEQ ID NO: 910946 - RNA, 22 nt, Human
uucuacauugugaaguucuuua

SEQ ID NO: 910947 - RNA, 22 nt, Human
agaaucugcauuuuuaauaaca

SEQ ID NO: 910948 - RNA, 22 nt, Human
uauuucuuguuauucucguuga

SEQ ID NO: 910949 - RNA, 22 nt, Human
uagcagaggaaaagagaacauu

SEQ ID NO: 910950 - RNA, 22 nt, Human
aaggcuauguguuaaggcagau

SEQ ID NO: 910951 - RNA, 22 nt, Human
cauuaugaagcaucaucuuauu

SEQ ID NO: 910952 - RNA, 23 nt, Human
gaaaucuagucauuuuuagucug

SEQ ID NO: 910953 - RNA, 22 nt, Human
gcaggagaaaugaagauugggu

SEQ ID NO: 910954 - RNA, 22 nt, Human
aagaguuaagcaacagauacca

SEQ ID NO: 910955 - RNA, 22 nt, Human
uuuauucucuaguuggucagau

SEQ ID NO: 910956 - RNA, 22 nt, Human
uuguuacaucuuauguaagugg

SEQ ID NO: 910957 - RNA, 22 nt, Human
gaguggcuaaaguaugucaugg

SEQ ID NO: 910958 - RNA, 22 nt, Human
ugucugaacaaacucugccucc

SEQ ID NO: 910959 - RNA, 23 nt, Human
uggccugcagaguuucugcuggg

SEQ ID NO: 910960 - RNA, 22 nt, Human
ggcugccuucccugagccccgg

SEQ ID NO: 910961 - RNA, 22 nt, Human
ugcagggccccucugcaugagu

SEQ ID NO: 910962 - RNA, 17 nt, Human
caggcuccuuccagauu

SEQ ID NO: 910963 - RNA, 22 nt, Human
ugucacacugaccacaucugua

SEQ ID NO: 910964 - RNA, 22 nt, Human
ugccucagucagcuucccuggg

SEQ ID NO: 910965 - RNA, 22 nt, Human
auuucuuaucugaggucuacau

SEQ ID NO: 910966 - RNA, 22 nt, Human
cucugcauuuuaacagaugauu

SEQ ID NO: 910967 - RNA, 18 nt, Human
ggacccagggccucaccc

SEQ ID NO: 910968 - RNA, 22 nt, Human
agcugucugugaacacagcauu

SEQ ID NO: 910969 - RNA, 22 nt, Human
uguccaggcucccuuggugcug

SEQ ID NO: 910970 - RNA, 22 nt, Human
ucuccacaaguguugagaguac

SEQ ID NO: 910971 - RNA, 22 nt, Human
ucugccacacugguucagugga

SEQ ID NO: 910972 - RNA, 21 nt, Human
gccagcugcagggcuuccuug

SEQ ID NO: 910973 - RNA, 22 nt, Human
gccuaagauuguguuuuccuga

SEQ ID NO: 910974 - RNA, 22 nt, Human
aaaaguaauugcaguuuuugcc

SEQ ID NO: 910975 - RNA, 19 nt, Human
aauagauuaauuauccucu

SEQ ID NO: 910976 - RNA, 22 nt, Human
ucucagaaaaaggagaaacugg

SEQ ID NO: 910977 - RNA, 22 nt, Human
aucuuaugagacccauaaagau

SEQ ID NO: 910978 - RNA, 22 nt, Human
cagagcuucugacagcugcugc

SEQ ID NO: 910979 - RNA, 22 nt, Human
ggcugaguugagaggauuacuu

SEQ ID NO: 910980 - RNA, 22 nt, Human
cacaggcucuccagggccugga

SEQ ID NO: 910981 - RNA, 22 nt, Human
cagauauuaggagcucaauaau

SEQ ID NO: 910982 - RNA, 22 nt, Human
agagacagaggcaauauagcuu

SEQ ID NO: 910983 - RNA, 22 nt, Human
agguauuucauggagcaagcag

SEQ ID NO: 910984 - RNA, 22 nt, Human
ugugucaggccuuaucgguggc

SEQ ID NO: 910985 - RNA, 22 nt, Human
cugcccacuuggccaccuucua

SEQ ID NO: 910986 - RNA, 22 nt, Human
ggugcugauauuguuuugguga

SEQ ID NO: 910987 - RNA, 20 nt, Human
uggagcugugguaaggagca

SEQ ID NO: 910988 - RNA, 22 nt, Human
uagauuuguuuccuucucucca

SEQ ID NO: 910989 - RNA, 22 nt, Human
uuuccaaauaaggucacacuca

SEQ ID NO: 910990 - RNA, 21 nt, Human
ggugcagguaaugaugauaua

SEQ ID NO: 910991 - RNA, 22 nt, Human
gaaggcauuucagagaucucug

SEQ ID NO: 910992 - RNA, 22 nt, Human
agaaucaaagagaaauacuuug

SEQ ID NO: 910993 - RNA, 22 nt, Human
uuucaguugcagugguugucua

SEQ ID NO: 910994 - RNA, 22 nt, Human
ugacagggggcagagguggcug

SEQ ID NO: 910995 - RNA, 20 nt, Human
ucuuuagauuuaucuuaugu

SEQ ID NO: 910996 - RNA, 22 nt, Human
ugagguagcugcuauuuguagu

SEQ ID NO: 910997 - RNA, 22 nt, Human
aagggaaacuuucacaaugucc

SEQ ID NO: 910998 - RNA, 19 nt, Human
uugaaauuguuugauaugg

SEQ ID NO: 910999 - RNA, 22 nt, Human
cuagcaucucacugauuuacug

SEQ ID NO: 911000 - RNA, 21 nt, Human
uacaacagguuuuauuucgau

SEQ ID NO: 911001 - RNA, 19 nt, Human
uacaggcaguuucuacaau

SEQ ID NO: 911002 - RNA, 22 nt, Human
auccaauggggagugaguucuu

SEQ ID NO: 911003 - RNA, 22 nt, Human
aauagccaaagugcauuuauga

SEQ ID NO: 911004 - RNA, 22 nt, Human
gucuuucuaugaugaacuguug

SEQ ID NO: 911005 - RNA, 22 nt, Human
agagauauggaugucagaaacu

SEQ ID NO: 911006 - RNA, 22 nt, Human
guauggaucaccugaggucagc

SEQ ID NO: 911007 - RNA, 22 nt, Human
ucaaauggguaugcuuuauaau

SEQ ID NO: 911008 - RNA, 22 nt, Human
ucagucacuuuugccugcuaca

SEQ ID NO: 911009 - RNA, 22 nt, Human
gagggcacaaaggcaacauuca

SEQ ID NO: 911010 - RNA, 22 nt, Human
ugggaagggucaguuucuucau

SEQ ID NO: 911011 - RNA, 22 nt, Human
acagccuguuugaucuggugcu

SEQ ID NO: 911012 - RNA, 22 nt, Human
uacaggaaguaaguaaugaaau

SEQ ID NO: 911013 - RNA, 22 nt, Human
uucuacacaccucugaggacau

SEQ ID NO: 911014 - RNA, 22 nt, Human
guggcagggcaaugcucccucu

SEQ ID NO: 911015 - RNA, 23 nt, Human
gcagagguuuuucaguaugguuu

SEQ ID NO: 911016 - RNA, 22 nt, Human
acaggcugacuuccugccaugu

SEQ ID NO: 911017 - RNA, 22 nt, Human
ucaggcaggcagagggcaaaug

SEQ ID NO: 911018 - RNA, 22 nt, Human
uuuagaaauucaucuauggccu

SEQ ID NO: 911019 - RNA, 22 nt, Human
agggagaggagggucuuguuga

SEQ ID NO: 911020 - RNA, 22 nt, Human
aaccauugauacaugcaacaau

SEQ ID NO: 911021 - RNA, 22 nt, Human
uguuaaaaaugcagauuccuau

SEQ ID NO: 911022 - RNA, 22 nt, Human
gccugccugaaggcuguaccag

SEQ ID NO: 911023 - RNA, 22 nt, Human
cugccugggccaugcccagucc

SEQ ID NO: 911024 - RNA, 22 nt, Human
ugaaggcauuugaguuggugag

SEQ ID NO: 911025 - RNA, 18 nt, Human
uuacuacagcacuuucuu

SEQ ID NO: 911026 - RNA, 23 nt, Human
agcuccagcugacgugggcagcc

SEQ ID NO: 911027 - RNA, 22 nt, Human
cuguuguucaucaucugucauu

SEQ ID NO: 911028 - RNA, 22 nt, Human
cuuaaacugaaagcuacaagau

SEQ ID NO: 911029 - RNA, 22 nt, Human
ucgcagaccgcggugcacgugg

SEQ ID NO: 911030 - RNA, 22 nt, Human
cucugccaucaguuuuucuuug

SEQ ID NO: 911031 - RNA, 22 nt, Human
ugugugugaaccauugagggcu

SEQ ID NO: 911032 - RNA, 22 nt, Human
cagcagcuaccugcucuugugg

SEQ ID NO: 911033 - RNA, 22 nt, Human
ugguauauuuugcucuauggug

SEQ ID NO: 911034 - RNA, 21 nt, Human
uagaaugcuauugucuuuucu

SEQ ID NO: 911035 - RNA, 22 nt, Human
acaagcuuauuaaguuaucugu

SEQ ID NO: 911036 - RNA, 22 nt, Human
gagccaggggucagcuccgagg

SEQ ID NO: 911037 - RNA, 22 nt, Human
cccuggagaggacucaccccug

SEQ ID NO: 911038 - RNA, 19 nt, Human
aggcaaccaaugaggcaaa

SEQ ID NO: 911039 - RNA, 22 nt, Human
uaacaguacauccuuuucucuu

SEQ ID NO: 911040 - RNA, 22 nt, Human
auacaaauccucugggauggua

SEQ ID NO: 911041 - RNA, 22 nt, Human
auuaugucuuuagauauuuggu

SEQ ID NO: 911042 - RNA, 22 nt, Human
cugggccacuccagaugcccac

SEQ ID NO: 911043 - RNA, 22 nt, Human
gaggccaggggccuggagauga

SEQ ID NO: 911044 - RNA, 22 nt, Human
aagauauagauaaaacuaugca

SEQ ID NO: 911045 - RNA, 22 nt, Human
ggcugcucugccuuccagcugg

SEQ ID NO: 911046 - RNA, 22 nt, Human
gggagggccaggcucacccagg

SEQ ID NO: 911047 - RNA, 22 nt, Human
cugggcucccucaugugucugc

SEQ ID NO: 911048 - RNA, 22 nt, Human
gaggccaggaggaucucucuaa

SEQ ID NO: 911049 - RNA, 22 nt, Human
uagcagcucacagccucccauu

SEQ ID NO: 911050 - RNA, 22 nt, Human
cccaggcuccugacucauucua

SEQ ID NO: 911051 - RNA, 22 nt, Human
ggugccuguauuuggggcacag

SEQ ID NO: 911052 - RNA, 22 nt, Human
gcagagccaggcuggggcaggu

SEQ ID NO: 911053 - RNA, 22 nt, Human
cuguaggagugggaauuuauug

SEQ ID NO: 911054 - RNA, 22 nt, Human
uuggcagcagggaguuggccgc

SEQ ID NO: 911055 - RNA, 22 nt, Human
gaaacuucuugucucacaguuc

SEQ ID NO: 911056 - RNA, 22 nt, Human
ugccugagggaguaagaguccu

SEQ ID NO: 911057 - RNA, 22 nt, Human
uaguuucuuucacguaguaaua

SEQ ID NO: 911058 - RNA, 22 nt, Human
ccaggagcccugccacaauggu

SEQ ID NO: 911059 - RNA, 22 nt, Human
cagagcccugcaugcuccaucu

SEQ ID NO: 911060 - RNA, 22 nt, Human
aaauaauuauagcgagucuauc

SEQ ID NO: 911061 - RNA, 22 nt, Human
ggagacagugacuuagagacug

SEQ ID NO: 911062 - RNA, 23 nt, Human
ugacaacagcucucagccauguc

SEQ ID NO: 911063 - RNA, 22 nt, Human
aucaaaaccuugacuuuuaaug

SEQ ID NO: 911064 - RNA, 22 nt, Human
gcuguggguaaacgcugagggu

SEQ ID NO: 911065 - RNA, 22 nt, Human
auugcuuuguacaugccuagca

SEQ ID NO: 911066 - RNA, 22 nt, Human
ucugggcugggagcguguggac

SEQ ID NO: 911067 - RNA, 22 nt, Human
cacuuagagccagaugcauagu

SEQ ID NO: 911068 - RNA, 22 nt, Human
ggacugggagaauggaggcaag

SEQ ID NO: 911069 - RNA, 22 nt, Human
cucuggguggucucacugagug

SEQ ID NO: 911070 - RNA, 22 nt, Human
cugcugggcagaggcugcauga

SEQ ID NO: 911071 - RNA, 22 nt, Human
aggaaacagagugaagcuuggg

SEQ ID NO: 911072 - RNA, 22 nt, Human
cuguuuuaugaagggaaugaga

SEQ ID NO: 911073 - RNA, 22 nt, Human
aggccuggcaugagaccugaga

SEQ ID NO: 911074 - RNA, 22 nt, Human
ugugacuguggacuuuuguggg

SEQ ID NO: 911075 - RNA, 22 nt, Human
guaucacacuagaaugcauuca

SEQ ID NO: 911076 - RNA, 22 nt, Human
uagagguguucauucucuccau

SEQ ID NO: 911077 - RNA, 22 nt, Human
ucagggcacguuucugcaaugc

SEQ ID NO: 911078 - RNA, 22 nt, Human
ugugggcaaaggguagcugggu

SEQ ID NO: 911079 - RNA, 22 nt, Human
gaggaaggucccaucagaauuu

SEQ ID NO: 911080 - RNA, 22 nt, Human
cugggcagagcuaacaccugag

SEQ ID NO: 911081 - RNA, 22 nt, Human
agcccucugagcuagucaccau

SEQ ID NO: 911082 - RNA, 22 nt, Human
agagcuguucaacguagcaaug

SEQ ID NO: 911083 - RNA, 22 nt, Human
uaacagaaauagaaaugagagu

SEQ ID NO: 911084 - RNA, 23 nt, Human
uggacccugcacaccagcucuac

SEQ ID NO: 911085 - RNA, 22 nt, Human
aaguaucuuucuagcaacuaaa

SEQ ID NO: 911086 - RNA, 22 nt, Human
aacagauuugugaagcuacuca

SEQ ID NO: 911087 - RNA, 22 nt, Human
ccagccagcugguuggacgccu

SEQ ID NO: 911088 - RNA, 22 nt, Human
gcgcgcuaccgccagggcugca

SEQ ID NO: 911089 - RNA, 22 nt, Human
uggcagagacaaggccgggccu

SEQ ID NO: 911090 - RNA, 22 nt, Human
ggcaguggugggaggcucgcuc

SEQ ID NO: 911091 - RNA, 22 nt, Human
aaagcaucagaucugacacuuc

SEQ ID NO: 911092 - RNA, 22 nt, Human
caggcacugugcugagcucugc

SEQ ID NO: 911093 - RNA, 22 nt, Human
cuggcuccacucccugccugac

SEQ ID NO: 911094 - RNA, 22 nt, Human
aagccacaaucugcaucagcau

SEQ ID NO: 911095 - RNA, 22 nt, Human
guguuuaacaucugguuuauac

SEQ ID NO: 911096 - RNA, 22 nt, Human
ucaaagcaucagucaauuuagg

SEQ ID NO: 911097 - RNA, 22 nt, Human
cugaggaggggccugagugaga

SEQ ID NO: 911098 - RNA, 22 nt, Human
uugcccagagucacccagcuca

SEQ ID NO: 911099 - RNA, 22 nt, Human
ucucuguaaggaagaauuagau

SEQ ID NO: 911100 - RNA, 22 nt, Human
agaggaagcugagaugccucuu

SEQ ID NO: 911101 - RNA, 22 nt, Human
acugaaauggggacaguccuua

SEQ ID NO: 911102 - RNA, 22 nt, Human
cccaggacucggcacucuccuu

SEQ ID NO: 911103 - RNA, 22 nt, Human
auucucaauggcuacuuucaua

SEQ ID NO: 911104 - RNA, 22 nt, Human
gagcugagauuugaagcaaguu

SEQ ID NO: 911105 - RNA, 22 nt, Human
uuucuuccuggauuccuacuuc

SEQ ID NO: 911106 - RNA, 22 nt, Human
gaacacugggguaucauugagc

SEQ ID NO: 911107 - RNA, 22 nt, Human
auguauaugcaugcauucaaag

SEQ ID NO: 911108 - RNA, 22 nt, Human
uuccugugguccagagucaucc

SEQ ID NO: 911109 - RNA, 22 nt, Human
ucccuguggaagacugccagag

SEQ ID NO: 911110 - RNA, 22 nt, Human
auacucaagguuaaugauugaa

SEQ ID NO: 911111 - RNA, 22 nt, Human
uucugauaacaaacaccaauuu

SEQ ID NO: 911112 - RNA, 22 nt, Human
guuucacagucugcagaauuuu

SEQ ID NO: 911113 - RNA, 22 nt, Human
gcccaauaguggggauauaccu

SEQ ID NO: 911114 - RNA, 22 nt, Human
caguguuuagaucaagaaggcc

SEQ ID NO: 911115 - RNA, 22 nt, Human
ccugugugauuggaagcugaga

SEQ ID NO: 911116 - RNA, 22 nt, Human
uggaugaguucaaugaggcaga

SEQ ID NO: 911117 - RNA, 22 nt, Human
guccaggcugcccaggguccug

SEQ ID NO: 911118 - RNA, 23 nt, Human
caggacaugggaggaaguauggc

SEQ ID NO: 911119 - RNA, 22 nt, Human
aaaggcuccuucucccaugacc

SEQ ID NO: 911120 - RNA, 22 nt, Human
agcagcaagcagugcacggguu

SEQ ID NO: 911121 - RNA, 22 nt, Human
gcuggcuccucuguccucacgg

SEQ ID NO: 911122 - RNA, 22 nt, Human
uccaacuccaccuuugucuccc

SEQ ID NO: 911123 - RNA, 22 nt, Human
ugaucuuugguaaucuggcaca

SEQ ID NO: 911124 - RNA, 18 nt, Human
agccugggcucugccugg

SEQ ID NO: 911125 - RNA, 22 nt, Human
uucaugugauaaaugugugacu

SEQ ID NO: 911126 - RNA, 22 nt, Human
cacacaugugagcagagaggcg

SEQ ID NO: 911127 - RNA, 22 nt, Human
agcagcagucaugccuaugcuc

SEQ ID NO: 911128 - RNA, 22 nt, Human
uacaguaccugccacguuguug

SEQ ID NO: 911129 - RNA, 22 nt, Human
ucaugauacccaaguaccuaga

SEQ ID NO: 911130 - RNA, 22 nt, Human
uuaggaauauuuucugaguagu

SEQ ID NO: 911131 - RNA, 22 nt, Human
gugugucuugaccaggaucgga

SEQ ID NO: 911132 - RNA, 22 nt, Human
gugccugcugcagagucgcugu

SEQ ID NO: 911133 - RNA, 22 nt, Human
aucacugggcuucuaaucacug

SEQ ID NO: 911134 - RNA, 22 nt, Human
uaaggcuuuauuuuuacaaugc

SEQ ID NO: 911135 - RNA, 22 nt, Human
ucugucacuauuggccagaaca

SEQ ID NO: 911136 - RNA, 22 nt, Human
auucaaagaucaugaucucuac

SEQ ID NO: 911137 - RNA, 22 nt, Human
agaggcugcacuugcucaugau

SEQ ID NO: 911138 - RNA, 22 nt, Human
caaagugcugagauuacaggua

SEQ ID NO: 911139 - RNA, 22 nt, Human
ccagcucugccaagcgucagcu

SEQ ID NO: 911140 - RNA, 22 nt, Human
ugguggcaaaguacaaagugac

SEQ ID NO: 911141 - RNA, 22 nt, Human
uaucaguuuauucuauaaauag

SEQ ID NO: 911142 - RNA, 22 nt, Human
gccucccuuggugucucccggg

SEQ ID NO: 911143 - RNA, 22 nt, Human
ccucacagagcccagaugucua

SEQ ID NO: 911144 - RNA, 22 nt, Human
ucaggcagcauuaaacuucagc

SEQ ID NO: 911145 - RNA, 22 nt, Human
guuuccuggagguuauuuuuga

SEQ ID NO: 911146 - RNA, 21 nt, Human
aaaaggaggcaggugaacagc

SEQ ID NO: 911147 - RNA, 22 nt, Human
cugugcuucgcaacuccaaggu

SEQ ID NO: 911148 - RNA, 22 nt, Human
aggcagcaaaugucuggaacag

SEQ ID NO: 911149 - RNA, 17 nt, Human
guuugcaugguguuaac

SEQ ID NO: 911150 - RNA, 22 nt, Human
aaaagcaguaaauguaugaccu

SEQ ID NO: 911151 - RNA, 22 nt, Human
uuucaaagucaauaucauuacc

SEQ ID NO: 911152 - RNA, 22 nt, Human
ucaaacugaauuaaacacuugu

SEQ ID NO: 911153 - RNA, 22 nt, Human
agcacagagaagauuucaauua

SEQ ID NO: 911154 - RNA, 22 nt, Human
caggcugucugaauggaggccc

SEQ ID NO: 911155 - RNA, 22 nt, Human
gugcucuagggucauuauggua

SEQ ID NO: 911156 - RNA, 22 nt, Human
uagagaaaagcagggaucagga

SEQ ID NO: 911157 - RNA, 22 nt, Human
ucugggagguacugggaggugu

SEQ ID NO: 911158 - RNA, 22 nt, Human
ugcacuccaggcugggugacag

SEQ ID NO: 911159 - RNA, 21 nt, Human
ugcaccuguucacugcaguuc

SEQ ID NO: 911160 - RNA, 22 nt, Human
gugugccuuaagcucuauagac

SEQ ID NO: 911161 - RNA, 22 nt, Human
ugaaacuucuaauaugaauagu

SEQ ID NO: 911162 - RNA, 22 nt, Human
agucuucacaucagucuaaaga

SEQ ID NO: 911163 - RNA, 22 nt, Human
uuuaagaaguuauguuauaaau

SEQ ID NO: 911164 - RNA, 22 nt, Human
uuucuaggauacucuaaaugua

SEQ ID NO: 911165 - RNA, 22 nt, Human
guaugugugcaaauguaaauau

SEQ ID NO: 911166 - RNA, 17 nt, Human
cuccucucuggguuacu

SEQ ID NO: 911167 - RNA, 22 nt, Human
aauaauguugacgauagucuua

SEQ ID NO: 911168 - RNA, 22 nt, Human
auucuagcccuggaacggcgac

SEQ ID NO: 911169 - RNA, 22 nt, Human
ugaauuaucuuguaauuuugaa

SEQ ID NO: 911170 - RNA, 22 nt, Human
acuagaacuucuaacuaagguc

SEQ ID NO: 911171 - RNA, 22 nt, Human
gagaggcaggaauccuggguga

SEQ ID NO: 911172 - RNA, 22 nt, Human
ccucugaggugagcccagcugg

SEQ ID NO: 911173 - RNA, 22 nt, Human
gacaggcaugcuuucaggacua

SEQ ID NO: 911174 - RNA, 22 nt, Human
ugagacaaccuaauuaaacacc

SEQ ID NO: 911175 - RNA, 22 nt, Human
uaaaggucaagagaugcugucu

SEQ ID NO: 911176 - RNA, 22 nt, Human
ucgucaacuguagugacuuaga

SEQ ID NO: 911177 - RNA, 17 nt, Human
aggccagaugaggcaag

SEQ ID NO: 911178 - RNA, 22 nt, Human
ccacauucaguccaggcuugga

SEQ ID NO: 911179 - RNA, 22 nt, Human
ucuaggaauguucuuagggauu

SEQ ID NO: 911180 - RNA, 22 nt, Human
aagccaggaauggagucuucgc

SEQ ID NO: 911181 - RNA, 22 nt, Human
gccagaaagaggaggaccuggg

SEQ ID NO: 911182 - RNA, 22 nt, Human
gggcagguuggcaucccgggca

SEQ ID NO: 911183 - RNA, 22 nt, Human
aaguuguagucagaugucaguu

SEQ ID NO: 911184 - RNA, 22 nt, Human
gaggcagugucgguggcaggau

SEQ ID NO: 911185 - RNA, 20 nt, Human
cagaaagcauguuccagggc

SEQ ID NO: 911186 - RNA, 22 nt, Human
gcuggaguaucuggggaaggag

SEQ ID NO: 911187 - RNA, 22 nt, Human
ggugaaggcacaagagggcaag

SEQ ID NO: 911188 - RNA, 22 nt, Human
acagucaaugagugagugaaug

SEQ ID NO: 911189 - RNA, 22 nt, Human
aucuugaaauacuuucuagaau

SEQ ID NO: 911190 - RNA, 22 nt, Human
aguucuugcuauaaaaacaaau

SEQ ID NO: 911191 - RNA, 22 nt, Human
agagggugggcacgugauggau

SEQ ID NO: 911192 - RNA, 22 nt, Human
uggucccugccugccaagugcu

SEQ ID NO: 911193 - RNA, 22 nt, Human
aaaccuuucugcucucagcgua

SEQ ID NO: 911194 - RNA, 22 nt, Human
cugggcagcuguaucagggagu

SEQ ID NO: 911195 - RNA, 22 nt, Human
guacaguaguaaaagugaauga

SEQ ID NO: 911196 - RNA, 22 nt, Human
cuugacaacuggcagauauaua

SEQ ID NO: 911197 - RNA, 22 nt, Human
ugcugugcuggcggcagaggcc

SEQ ID NO: 911198 - RNA, 22 nt, Human
aaggcauucaagauggaaguug

SEQ ID NO: 911199 - RNA, 22 nt, Human
uuacuucagauuguggaaggca

SEQ ID NO: 911200 - RNA, 22 nt, Human
uuuauuguguugaaacugaauu

SEQ ID NO: 911201 - RNA, 22 nt, Human
ucuguggcuguuaucuuuauau

SEQ ID NO: 911202 - RNA, 22 nt, Human
ggccuugguucugucacagccg

SEQ ID NO: 911203 - RNA, 18 nt, Human
cuggucagggcaaugggc

SEQ ID NO: 911204 - RNA, 22 nt, Human
ugcaggcugccuucacagagcc

SEQ ID NO: 911205 - RNA, 22 nt, Human
ggcagcacgacaggaguggaag

SEQ ID NO: 911206 - RNA, 17 nt, Human
acccaggcucuaucuug

SEQ ID NO: 911207 - RNA, 22 nt, Human
uccagacuggggccaugucugc

SEQ ID NO: 911208 - RNA, 22 nt, Human
gauguagacacuuggaggcuua

SEQ ID NO: 911209 - RNA, 22 nt, Human
aguuuggaaaaugagacaagga

SEQ ID NO: 911210 - RNA, 22 nt, Human
uauguguauguacauacauaca

SEQ ID NO: 911211 - RNA, 22 nt, Human
gcacagagucacuagcuaagca

SEQ ID NO: 911212 - RNA, 22 nt, Human
uuacucagucucccauacauug

SEQ ID NO: 911213 - RNA, 22 nt, Human
uucaaagugugaccugacaagc

SEQ ID NO: 911214 - RNA, 19 nt, Human
augauacaggugaaaauug

SEQ ID NO: 911215 - RNA, 22 nt, Human
cauaaaguguauaagugaagaa

SEQ ID NO: 911216 - RNA, 22 nt, Human
aaugguuuggacuauucaauag

SEQ ID NO: 911217 - RNA, 22 nt, Human
uaccaaaaagugagccccagag

SEQ ID NO: 911218 - RNA, 22 nt, Human
guaaauauuaaaggcugcuaga

SEQ ID NO: 911219 - RNA, 22 nt, Human
gugugcaugcauagacaccaca

SEQ ID NO: 911220 - RNA, 22 nt, Human
gcaaacauuccacagaaggaag

SEQ ID NO: 911221 - RNA, 22 nt, Human
auacagaucccacagcauguga

SEQ ID NO: 911222 - RNA, 22 nt, Human
auaaggaaugauguaucaguuu

SEQ ID NO: 911223 - RNA, 20 nt, Human
agaaaugugaaaggcugagu

SEQ ID NO: 911224 - RNA, 17 nt, Human
gcugccugcaacugacu

SEQ ID NO: 911225 - RNA, 22 nt, Human
uuggaggaugcaaugagggagu

SEQ ID NO: 911226 - RNA, 22 nt, Human
guggcaggggcgggcuguuccg

SEQ ID NO: 911227 - RNA, 19 nt, Human
gacuccaacuuuaagcaug

SEQ ID NO: 911228 - RNA, 18 nt, Human
acauuucuaggugaaagc

SEQ ID NO: 911229 - RNA, 22 nt, Human
cucccccuuagcucuugucuuu

SEQ ID NO: 911230 - RNA, 23 nt, Human
cacauggaggaccguucuuauaa

SEQ ID NO: 911231 - RNA, 22 nt, Human
cagacaggguccuguccgucac

SEQ ID NO: 911232 - RNA, 22 nt, Human
gacauaaaccuugagauauuaa

SEQ ID NO: 911233 - RNA, 22 nt, Human
cauccagaguccaaggcugggc

SEQ ID NO: 911234 - RNA, 22 nt, Human
aacauuucugagaauaucaguu

SEQ ID NO: 911235 - RNA, 22 nt, Human
cugauccuccuuuaaguagcug

SEQ ID NO: 911236 - RNA, 22 nt, Human
cauggcagugauucagccuuug

SEQ ID NO: 911237 - RNA, 22 nt, Human
cauuguuaauugguaucuuaca

SEQ ID NO: 911238 - RNA, 22 nt, Human
caaaggagguaaugggugugag

SEQ ID NO: 911239 - RNA, 22 nt, Human
aacuagaaaacaagaugcugau

SEQ ID NO: 911240 - RNA, 22 nt, Human
ugagcccagcgucccguucugu

SEQ ID NO: 911241 - RNA, 22 nt, Human
caaauaagaaccacaggggagu

SEQ ID NO: 911242 - RNA, 22 nt, Human
aauaacuuuuaaaagacccugg

SEQ ID NO: 911243 - RNA, 22 nt, Human
aggcgcagaaggccaggggccu

SEQ ID NO: 911244 - RNA, 22 nt, Human
uugauguaaaagccuugguggc

SEQ ID NO: 911245 - RNA, 22 nt, Human
ucuacaguguuugguuugagga

SEQ ID NO: 911246 - RNA, 22 nt, Human
gcaaggagacuguagggccaag

SEQ ID NO: 911247 - RNA, 22 nt, Human
gugaggcagcaggagccucugu

SEQ ID NO: 911248 - RNA, 22 nt, Human
auauuguacuaggguuacaugu

SEQ ID NO: 911249 - RNA, 22 nt, Human
uucuaugaagguaagauguacg

SEQ ID NO: 911250 - RNA, 22 nt, Human
gacacagaaggucacauguuca

SEQ ID NO: 911251 - RNA, 15 nt, Human
cucucaggcaggcag

SEQ ID NO: 911252 - RNA, 22 nt, Human
aggcccugaagucggccccuca

SEQ ID NO: 911253 - RNA, 22 nt, Human
ucucucugugacagcuuugcug

SEQ ID NO: 911254 - RNA, 22 nt, Human
gccagcucccaagugagccccu

SEQ ID NO: 911255 - RNA, 22 nt, Human
ugccaggcgauugcuaucagca

SEQ ID NO: 911256 - RNA, 22 nt, Human
agguggggcccaccaauuugca

SEQ ID NO: 911257 - RNA, 22 nt, Human
cuggaagacguuugaagccaug

SEQ ID NO: 911258 - RNA, 22 nt, Human
ucugaagguugagaagggcuga

SEQ ID NO: 911259 - RNA, 22 nt, Human
ucaauuaagaggcuaaguuacu

SEQ ID NO: 911260 - RNA, 22 nt, Human
gccaggcaauguguuagaagcg

SEQ ID NO: 911261 - RNA, 22 nt, Human
acuugcaugucaggaaauuaac

SEQ ID NO: 911262 - RNA, 22 nt, Human
acaaaguaggaagauuagcuga

SEQ ID NO: 911263 - RNA, 23 nt, Human
ccagggcuacgggcaccguccug

SEQ ID NO: 911264 - RNA, 22 nt, Human
accugagagcuauaagguuuua

SEQ ID NO: 911265 - RNA, 22 nt, Human
uagauguaagcagaagaacagc

SEQ ID NO: 911266 - RNA, 22 nt, Human
uuacaagcuaauuguuucagcu

SEQ ID NO: 911267 - RNA, 22 nt, Human
auacacagccauuaugaauuag

SEQ ID NO: 911268 - RNA, 22 nt, Human
augcugugucuagcaggaacac

SEQ ID NO: 911269 - RNA, 19 nt, Human
gcauuucauuuaaccauca

SEQ ID NO: 911270 - RNA, 22 nt, Human
uggcugagaaaaaagagcuaua

SEQ ID NO: 911271 - RNA, 22 nt, Human
cugcuucuagcaccaagucccu

SEQ ID NO: 911272 - RNA, 21 nt, Human
gccaaggaggcuagagaacau

SEQ ID NO: 911273 - RNA, 22 nt, Human
ugccuucaagacccauccucca

SEQ ID NO: 911274 - RNA, 22 nt, Human
ggggacagucgaucuagugauu

SEQ ID NO: 911275 - RNA, 22 nt, Human
ugucuugauugaagagauagaa

SEQ ID NO: 911276 - RNA, 22 nt, Human
acaggcacugucaagucaugaa

SEQ ID NO: 911277 - RNA, 19 nt, Human
ggcagcuugggaagguagc

SEQ ID NO: 911278 - RNA, 19 nt, Human
agcugcuggcccagggacc

SEQ ID NO: 911279 - RNA, 22 nt, Human
gccagagaaugaaaaucagauu

SEQ ID NO: 911280 - RNA, 22 nt, Human
auccuuggcacaguggaauuca

SEQ ID NO: 911281 - RNA, 22 nt, Human
caggccugggcuggguaucagg

SEQ ID NO: 911282 - RNA, 22 nt, Human
uguuuacuuuccuucucacagg

SEQ ID NO: 911283 - RNA, 22 nt, Human
uuggcaggaugauagcuuugug

SEQ ID NO: 911284 - RNA, 22 nt, Human
agucccagccuaggcugugcug

SEQ ID NO: 911285 - RNA, 22 nt, Human
ucaaaaauguuuuauauuggua

SEQ ID NO: 911286 - RNA, 22 nt, Human
aggaggcugcaacccugaggcc

SEQ ID NO: 911287 - RNA, 22 nt, Human
aaggcaacuguaaaacaugcac

SEQ ID NO: 911288 - RNA, 22 nt, Human
auacaugugucccugauuuauu

SEQ ID NO: 911289 - RNA, 22 nt, Human
ucagcuccucaugcaggggaua

SEQ ID NO: 911290 - RNA, 23 nt, Human
ugcuggagaagcaaaguucugag

SEQ ID NO: 911291 - RNA, 22 nt, Human
cugugucggacgugggcagcag

SEQ ID NO: 911292 - RNA, 22 nt, Human
aacuguauacaauugucagaca

SEQ ID NO: 911293 - RNA, 22 nt, Human
uuagggaaauauuuauauacuu

SEQ ID NO: 911294 - RNA, 22 nt, Human
ucgucugugaaauugggauaag

SEQ ID NO: 911295 - RNA, 22 nt, Human
aaagacugaggggaaagugaug

SEQ ID NO: 911296 - RNA, 22 nt, Human
ggcugcuucacuuuuuugagcc

SEQ ID NO: 911297 - RNA, 22 nt, Human
uaaucuagaacauaugagagca

SEQ ID NO: 911298 - RNA, 23 nt, Human
ucagagagcuguugagagcugcc

SEQ ID NO: 911299 - RNA, 22 nt, Human
guauuccauuaguguuaauauc

SEQ ID NO: 911300 - RNA, 22 nt, Human
acgcagcacaaaggaaaggauc

SEQ ID NO: 911301 - RNA, 22 nt, Human
ugcaaauggagcauguauaaga

SEQ ID NO: 911302 - RNA, 22 nt, Human
guuuucuaccagggaagagagu

SEQ ID NO: 911303 - RNA, 22 nt, Human
uaauuuacaguucgccaugucu

SEQ ID NO: 911304 - RNA, 22 nt, Human
uuagguauuuuguuaugucagc

SEQ ID NO: 911305 - RNA, 22 nt, Human
uggagaauauuuccaaaucuaa

SEQ ID NO: 911306 - RNA, 22 nt, Human
gcacagagagggaagguaacuu

SEQ ID NO: 911307 - RNA, 22 nt, Human
gcuggccagcccucuuccucca

SEQ ID NO: 911308 - RNA, 22 nt, Human
uguucuuugcuguugauguaga

SEQ ID NO: 911309 - RNA, 22 nt, Human
acagagacugggagcaagaggc

SEQ ID NO: 911310 - RNA, 22 nt, Human
guaggagcauugaggguaugga

SEQ ID NO: 911311 - RNA, 22 nt, Human
cagcucugguuccugggcccag

SEQ ID NO: 911312 - RNA, 17 nt, Human
uucagaagcauuuuggc

SEQ ID NO: 911313 - RNA, 22 nt, Human
cauuuguugggacaaugaaaag

SEQ ID NO: 911314 - RNA, 22 nt, Human
gagccagacugccugaagcuca

SEQ ID NO: 911315 - RNA, 22 nt, Human
auuugcuugacuauggcuugca

SEQ ID NO: 911316 - RNA, 22 nt, Human
gcugccauccccugcugggcug

SEQ ID NO: 911317 - RNA, 22 nt, Human
aaaggcaugcauggucugcucc

SEQ ID NO: 911318 - RNA, 22 nt, Human
agaaagaacgcacuugugcugc

SEQ ID NO: 911319 - RNA, 22 nt, Human
cuggccccaggcagccugcugg

SEQ ID NO: 911320 - RNA, 22 nt, Human
ccuagaacacaaccuauauuag

SEQ ID NO: 911321 - RNA, 22 nt, Human
guauuuuaagugacuacuaggu

SEQ ID NO: 911322 - RNA, 22 nt, Human
agacuuagugaguucuaaguuu

SEQ ID NO: 911323 - RNA, 22 nt, Human
cagagaaagaagcccauucauu

SEQ ID NO: 911324 - RNA, 22 nt, Human
gggccagugaacaaugagggaa

SEQ ID NO: 911325 - RNA, 22 nt, Human
gaauaucccgcuaugcaaagua

SEQ ID NO: 911326 - RNA, 20 nt, Human
aaaagagugcuucaacugcu

SEQ ID NO: 911327 - RNA, 22 nt, Human
gaguccaguuguucacagaggc

SEQ ID NO: 911328 - RNA, 22 nt, Human
augucaguugcugcuugaggua

SEQ ID NO: 911329 - RNA, 22 nt, Human
uaagugcaucugaucuuucaug

SEQ ID NO: 911330 - RNA, 22 nt, Human
ggucucagugaaggagugugcu

SEQ ID NO: 911331 - RNA, 22 nt, Human
gugucuguuauacagaggagac

SEQ ID NO: 911332 - RNA, 22 nt, Human
uucauuuuauaaacccugcuga

SEQ ID NO: 911333 - RNA, 22 nt, Human
gaggaacuucaucucuaugcca

SEQ ID NO: 911334 - RNA, 22 nt, Human
uggaaggcagugauauuguuga

SEQ ID NO: 911335 - RNA, 22 nt, Human
caugugugcaccaacccuaugu

SEQ ID NO: 911336 - RNA, 19 nt, Human
ggcuggaguggccaucugu

SEQ ID NO: 911337 - RNA, 22 nt, Human
uucuggagaaucaccaccaggc

SEQ ID NO: 911338 - RNA, 22 nt, Human
agcaggugacagggcuguggug

SEQ ID NO: 911339 - RNA, 22 nt, Human
cgugcaugauauaugaguuguu

SEQ ID NO: 911340 - RNA, 22 nt, Human
uuuucaguuccaucucugcucu

SEQ ID NO: 911341 - RNA, 22 nt, Human
gcagguggugggggagccguuc

SEQ ID NO: 911342 - RNA, 22 nt, Human
ccaaggcagaagauggcucuug

SEQ ID NO: 911343 - RNA, 22 nt, Human
aaggaagacucgcaggucuaug

SEQ ID NO: 911344 - RNA, 22 nt, Human
agggcuuguggucguggcugug

SEQ ID NO: 911345 - RNA, 22 nt, Human
ccaaugcauaaugauccccuaa

SEQ ID NO: 911346 - RNA, 22 nt, Human
gaagcuuugucuugucuccugg

SEQ ID NO: 911347 - RNA, 22 nt, Human
ggcaggaggaagaguuagcacc

SEQ ID NO: 911348 - RNA, 22 nt, Human
uuaagugucauaauuuccaaga

SEQ ID NO: 911349 - RNA, 22 nt, Human
ggugcauggaaagaguaaguaa

SEQ ID NO: 911350 - RNA, 22 nt, Human
aacacaggaaauugguaaaugg

SEQ ID NO: 911351 - RNA, 22 nt, Human
caccagcccccucacgcuguca

SEQ ID NO: 911352 - RNA, 22 nt, Human
ggccuuagguucccugccucca

SEQ ID NO: 911353 - RNA, 22 nt, Human
agcuggggguuggauaagggua

SEQ ID NO: 911354 - RNA, 22 nt, Human
cagaaagccaacuccaacuguc

SEQ ID NO: 911355 - RNA, 22 nt, Human
ucaguuagcguaaucacugggg

SEQ ID NO: 911356 - RNA, 22 nt, Human
aaggcagaaagggaugugagug

SEQ ID NO: 911357 - RNA, 22 nt, Human
ggugugugguuuugauacaguc

SEQ ID NO: 911358 - RNA, 22 nt, Human
agguuuggguucauugcuggcu

SEQ ID NO: 911359 - RNA, 22 nt, Human
cccaggcuggaauuccaggccu

SEQ ID NO: 911360 - RNA, 22 nt, Human
ggcauucuaggccaaaaucagg

SEQ ID NO: 911361 - RNA, 22 nt, Human
cagcaguggcugcaggcagcug

SEQ ID NO: 911362 - RNA, 22 nt, Human
gccuuaauugcagagcaauaua

SEQ ID NO: 911363 - RNA, 22 nt, Human
agugugaguaauucagggaggg

SEQ ID NO: 911364 - RNA, 22 nt, Human
ucaggaggccggcaggauuuga

SEQ ID NO: 911365 - RNA, 22 nt, Human
uaaaguagcgccuaacuaaugu

SEQ ID NO: 911366 - RNA, 22 nt, Human
gcucugcuggaaguucucugga

SEQ ID NO: 911367 - RNA, 22 nt, Human
ggaggugcugaucccagucaac

SEQ ID NO: 911368 - RNA, 22 nt, Human
ggaaaggagauauuggagagug

SEQ ID NO: 911369 - RNA, 22 nt, Human
aaagcaugcuacuuuauauagg

SEQ ID NO: 911370 - RNA, 22 nt, Human
gcugcaaguuaguauacauucu

SEQ ID NO: 911371 - RNA, 19 nt, Human
aaugguuugaugaaguaua

SEQ ID NO: 911372 - RNA, 22 nt, Human
gggagcuccacugccucucauu

SEQ ID NO: 911373 - RNA, 22 nt, Human
agacagugauucuucacauuuc

SEQ ID NO: 911374 - RNA, 22 nt, Human
uguauuuaagcuuuaccuaaaa

SEQ ID NO: 911375 - RNA, 22 nt, Human
auacauguuguaccauauguuu

SEQ ID NO: 911376 - RNA, 20 nt, Human
uaaagcagccguggagggua

SEQ ID NO: 911377 - RNA, 22 nt, Human
cugaagcagggagugaugaagu

SEQ ID NO: 911378 - RNA, 22 nt, Human
guacaagaggagaaaauggagu

SEQ ID NO: 911379 - RNA, 22 nt, Human
gcaggugguggggcuaugaucu

SEQ ID NO: 911380 - RNA, 22 nt, Human
auuuccaggcuguuuugugaau

SEQ ID NO: 911381 - RNA, 22 nt, Human
cagcccuguccaaugucugcuc

SEQ ID NO: 911382 - RNA, 22 nt, Human
acucuaacuaauuaauaaagcc

SEQ ID NO: 911383 - RNA, 22 nt, Human
caggggcucugggugaugugag

SEQ ID NO: 911384 - RNA, 18 nt, Human
gggagcugggaagcuggu

SEQ ID NO: 911385 - RNA, 22 nt, Human
gagagugauucccucccauaga

SEQ ID NO: 911386 - RNA, 22 nt, Human
gcaggcuggaggcuguucuggg

SEQ ID NO: 911387 - RNA, 22 nt, Human
gcuuucaugaaaauaaucuacu

SEQ ID NO: 911388 - RNA, 22 nt, Human
gaaagggucuuugauuucccuc

SEQ ID NO: 911389 - RNA, 22 nt, Human
gugcaggugguuggcccagccg

SEQ ID NO: 911390 - RNA, 22 nt, Human
agagcugcaauuucauguggug

SEQ ID NO: 911391 - RNA, 22 nt, Human
uuguccuggagguuaauagagu

SEQ ID NO: 911392 - RNA, 22 nt, Human
ugagggagagggcgaaaaugaa

SEQ ID NO: 911393 - RNA, 22 nt, Human
cuggcccaguucugcguuuugc

SEQ ID NO: 911394 - RNA, 22 nt, Human
uuccauaauaggcuuaagugaa

SEQ ID NO: 911395 - RNA, 22 nt, Human
uacauguacaugcauagguaga

SEQ ID NO: 911396 - RNA, 22 nt, Human
augcuuaacuuccuagucuaua

SEQ ID NO: 911397 - RNA, 20 nt, Human
agguguccacguggcagggu

SEQ ID NO: 911398 - RNA, 22 nt, Human
ugggccugccccaggcuucagc

SEQ ID NO: 911399 - RNA, 22 nt, Human
uccuuuguggaaauacuugugg

SEQ ID NO: 911400 - RNA, 22 nt, Human
cuggagugaggucugggagccu

SEQ ID NO: 911401 - RNA, 22 nt, Human
cacuguuuuauuccaacauagg

SEQ ID NO: 911402 - RNA, 22 nt, Human
uuucacauucagauauagacuu

SEQ ID NO: 911403 - RNA, 22 nt, Human
aaaucgcuugaacccaggaagu

SEQ ID NO: 911404 - RNA, 22 nt, Human
ggcagcuggggcagugcccugu

SEQ ID NO: 911405 - RNA, 22 nt, Human
caauuucaugccauguauugcu

SEQ ID NO: 911406 - RNA, 22 nt, Human
agaagucuggaauuccugcagg

SEQ ID NO: 911407 - RNA, 22 nt, Human
ccagaggagcaggcuggcucca

SEQ ID NO: 911408 - RNA, 23 nt, Human
uggagcugggauuugauuugauu

SEQ ID NO: 911409 - RNA, 22 nt, Human
uucugggcucacagagcagcag

SEQ ID NO: 911410 - RNA, 22 nt, Human
augaaauguuggucccaaucgc

SEQ ID NO: 911411 - RNA, 22 nt, Human
uccacuuuagcaaugauugaau

SEQ ID NO: 911412 - RNA, 22 nt, Human
auuuuaugacacgauucuucca

SEQ ID NO: 911413 - RNA, 22 nt, Human
gggcugccaagccugccugccu

SEQ ID NO: 911414 - RNA, 22 nt, Human
gguuuccaccuugcuaugagaa

SEQ ID NO: 911415 - RNA, 22 nt, Human
uagguauacagagauuucuggg

SEQ ID NO: 911416 - RNA, 22 nt, Human
ugcugugacgccucaggaaucc

SEQ ID NO: 911417 - RNA, 22 nt, Human
ggccacagcagaugcuucagau

SEQ ID NO: 911418 - RNA, 22 nt, Human
ugccagaguuacaugaggguca

SEQ ID NO: 911419 - RNA, 22 nt, Human
ucaagcagagucaaaaguacca

SEQ ID NO: 911420 - RNA, 22 nt, Human
ggagggaaccuuggcuggauug

SEQ ID NO: 911421 - RNA, 22 nt, Human
ucugugcaccagaaugauauuu

SEQ ID NO: 911422 - RNA, 22 nt, Human
gcuuccuguaggcagguccaag

SEQ ID NO: 911423 - RNA, 21 nt, Human
ugacauuuggauucauaguaa

SEQ ID NO: 911424 - RNA, 18 nt, Human
auugcuuuuguaccaacc

SEQ ID NO: 911425 - RNA, 22 nt, Human
auauuacuuccugguauaaaau

SEQ ID NO: 911426 - RNA, 22 nt, Human
auucuuggagcagucaaagaag

SEQ ID NO: 911427 - RNA, 22 nt, Human
uggggcugugagacuacaggau

SEQ ID NO: 911428 - RNA, 22 nt, Human
cucccaggguagggagagacua

SEQ ID NO: 911429 - RNA, 22 nt, Human
accugggaggcggagguugcag

SEQ ID NO: 911430 - RNA, 22 nt, Human
gcugaggccccagggugauggg

SEQ ID NO: 911431 - RNA, 22 nt, Human
ccacugaaaaauuugagaugga

SEQ ID NO: 911432 - RNA, 22 nt, Human
ugagaacauuccucuuccuggc

SEQ ID NO: 911433 - RNA, 22 nt, Human
gcaguggugggacaguggaaaa

SEQ ID NO: 911434 - RNA, 22 nt, Human
ugagaaagguauuucaugcacu

SEQ ID NO: 911435 - RNA, 22 nt, Human
aauuuagaauucgcuagcuaau

SEQ ID NO: 911436 - RNA, 20 nt, Human
uguguccaucaucugggcac

SEQ ID NO: 911437 - RNA, 22 nt, Human
ugcagcaccuauggacacuugu

SEQ ID NO: 911438 - RNA, 20 nt, Human
gagcugugcucucaggagcc

SEQ ID NO: 911439 - RNA, 22 nt, Human
aaugcuuugauugauuaaaaca

SEQ ID NO: 911440 - RNA, 22 nt, Human
gugccugggacuugcuccggau

SEQ ID NO: 911441 - RNA, 22 nt, Human
uuucuguaaguggcaaauaaug

SEQ ID NO: 911442 - RNA, 22 nt, Human
augacaguacuggugacaauac

SEQ ID NO: 911443 - RNA, 22 nt, Human
ucuccccagcugagcugcccuu

SEQ ID NO: 911444 - RNA, 22 nt, Human
ucaauacauacaauguauagug

SEQ ID NO: 911445 - RNA, 22 nt, Human
cacauuuuuacugccaacuuaa

SEQ ID NO: 911446 - RNA, 22 nt, Human
aucuagcaguguuauaauugga

SEQ ID NO: 911447 - RNA, 22 nt, Human
acagggcauuuccucuaugugu

SEQ ID NO: 911448 - RNA, 22 nt, Human
acuaguauucuuggucuuguau

SEQ ID NO: 911449 - RNA, 22 nt, Human
guguucugcagaccagcaucau

SEQ ID NO: 911450 - RNA, 22 nt, Human
guagaaaaagcaguaagucuca

SEQ ID NO: 911451 - RNA, 22 nt, Human
aagcaauugguuuuaguaaaau

SEQ ID NO: 911452 - RNA, 22 nt, Human
acaggaaauuggcauaucaguu

SEQ ID NO: 911453 - RNA, 22 nt, Human
agcugaagggaggauauguaca

SEQ ID NO: 911454 - RNA, 22 nt, Human
auauaaaguguuuagaaagcug

SEQ ID NO: 911455 - RNA, 22 nt, Human
cagucacuggaauagcugagga

SEQ ID NO: 911456 - RNA, 22 nt, Human
ucuaaggacaaggucuuggaga

SEQ ID NO: 911457 - RNA, 19 nt, Human
aggucccugucaccucuca

SEQ ID NO: 911458 - RNA, 22 nt, Human
cggggcugacagcaggugugcu

SEQ ID NO: 911459 - RNA, 22 nt, Human
aagcccagcaucccugcaccag

SEQ ID NO: 911460 - RNA, 18 nt, Human
ugucucuucuuauguggg

SEQ ID NO: 911461 - RNA, 22 nt, Human
uacaacauuuacguuaggcugu

SEQ ID NO: 911462 - RNA, 23 nt, Human
uguuccagauacgccuuuuccuc

SEQ ID NO: 911463 - RNA, 22 nt, Human
gggagcuggagcuggaagacuc

SEQ ID NO: 911464 - RNA, 22 nt, Human
ucaaaauucuagggagaauggu

SEQ ID NO: 911465 - RNA, 22 nt, Human
caaaggcuuugcuaugaugcau

SEQ ID NO: 911466 - RNA, 22 nt, Human
ccacaguguucuuuuuaaaauu

SEQ ID NO: 911467 - RNA, 22 nt, Human
caccagggacaaugcuaggggu

SEQ ID NO: 911468 - RNA, 17 nt, Human
ggagacagggucuuuaa

SEQ ID NO: 911469 - RNA, 22 nt, Human
ugaaauauuuagagaguaaguu

SEQ ID NO: 911470 - RNA, 22 nt, Human
uuacugaacccuacuuuuacag

SEQ ID NO: 911471 - RNA, 22 nt, Human
uccugaccacacugccuucugc

SEQ ID NO: 911472 - RNA, 22 nt, Human
ucugaggcauaaccuguucugc

SEQ ID NO: 911473 - RNA, 22 nt, Human
uuuauagaugucuguauuauaa

SEQ ID NO: 911474 - RNA, 22 nt, Human
guaacgaauaaacaagugauaa

SEQ ID NO: 911475 - RNA, 17 nt, Human
cuuuggcaggagggagg

SEQ ID NO: 911476 - RNA, 22 nt, Human
auugugaauagugccgcaguaa

SEQ ID NO: 911477 - RNA, 18 nt, Human
ggagcccacggcguccca

SEQ ID NO: 911478 - RNA, 20 nt, Human
ugagccagucaagcuacauu

SEQ ID NO: 911479 - RNA, 22 nt, Human
aaaccauuugaauuauuacuga

SEQ ID NO: 911480 - RNA, 22 nt, Human
cagacauauguuuuaacagauu

SEQ ID NO: 911481 - RNA, 22 nt, Human
gcccugugcgacucuagagguu

SEQ ID NO: 911482 - RNA, 22 nt, Human
aggagccauugcaggauggcag

SEQ ID NO: 911483 - RNA, 22 nt, Human
gcaaagcaaaugccugaaggcg

SEQ ID NO: 911484 - RNA, 17 nt, Human
acaagcaguggccaugg

SEQ ID NO: 911485 - RNA, 22 nt, Human
uggccugcaaagucuucuugcu

SEQ ID NO: 911486 - RNA, 22 nt, Human
guauuuauaggggaaugagagu

SEQ ID NO: 911487 - RNA, 22 nt, Human
gaggcugaacagguucucauga

SEQ ID NO: 911488 - RNA, 22 nt, Human
ucccauugccauagauaggaca

SEQ ID NO: 911489 - RNA, 22 nt, Human
ucugggagauccaagcagaacu

SEQ ID NO: 911490 - RNA, 22 nt, Human
cauacauacugaguggacugau

SEQ ID NO: 911491 - RNA, 21 nt, Human
uuaaaaugaggaagugguggc

SEQ ID NO: 911492 - RNA, 22 nt, Human
uucugugugccagaguugugcu

SEQ ID NO: 911493 - RNA, 22 nt, Human
ugaaauggcccaaacacccagu

SEQ ID NO: 911494 - RNA, 22 nt, Human
uucuuuccuugccucagugaag

SEQ ID NO: 911495 - RNA, 22 nt, Human
auguaugucugaugcacaugca

SEQ ID NO: 911496 - RNA, 22 nt, Human
aaagggaaaauauuuagacaua

SEQ ID NO: 911497 - RNA, 22 nt, Human
agcugggagcugaaggcugauu

SEQ ID NO: 911498 - RNA, 22 nt, Human
ucagaaagcuuuuacuuaaaca

SEQ ID NO: 911499 - RNA, 18 nt, Human
gcucugugaccuugagca

SEQ ID NO: 911500 - RNA, 22 nt, Human
aaauaugugaucagugaauaaa

SEQ ID NO: 911501 - RNA, 22 nt, Human
aagguuucuccgaggcuauuuu

SEQ ID NO: 911502 - RNA, 22 nt, Human
uggcucuguugcucgcaguuuu

SEQ ID NO: 911503 - RNA, 22 nt, Human
cagcugccccuccagggcuggg

SEQ ID NO: 911504 - RNA, 22 nt, Human
uggcagcaaguucuugggaggu

SEQ ID NO: 911505 - RNA, 22 nt, Human
uaagauguacaaccacuucucu

SEQ ID NO: 911506 - RNA, 22 nt, Human
ggcuagcaagguagcagaaugc

SEQ ID NO: 911507 - RNA, 22 nt, Human
ggcuucucugucuaguuucuac

SEQ ID NO: 911508 - RNA, 21 nt, Human
uacaccaguuuacacuuccuc

SEQ ID NO: 911509 - RNA, 22 nt, Human
uaaaugcucaauaaauguugcu

SEQ ID NO: 911510 - RNA, 22 nt, Human
guuugaaagaccaauuagauuu

SEQ ID NO: 911511 - RNA, 20 nt, Human
acagauaccagggacauggg

SEQ ID NO: 911512 - RNA, 22 nt, Human
ucagacaggcuggacagcuugc

SEQ ID NO: 911513 - RNA, 22 nt, Human
aggcuggaguguagcagugcag

SEQ ID NO: 911514 - RNA, 22 nt, Human
gccucagugauaugugggacaa

SEQ ID NO: 911515 - RNA, 23 nt, Human
agcuucauugaccuccgcagggg

SEQ ID NO: 911516 - RNA, 22 nt, Human
ucugaaauccuuuaucuuggcu

SEQ ID NO: 911517 - RNA, 22 nt, Human
acugucuuguguuaaagaacca

SEQ ID NO: 911518 - RNA, 22 nt, Human
ugauuuccuaggucuggagaag

SEQ ID NO: 911519 - RNA, 22 nt, Human
caguggucugugcuucuguaca

SEQ ID NO: 911520 - RNA, 22 nt, Human
cggcuucaucuuuacuucaaga

SEQ ID NO: 911521 - RNA, 22 nt, Human
ugagacaguucugcagcugggu

SEQ ID NO: 911522 - RNA, 22 nt, Human
agauacaugucaagagacuuau

SEQ ID NO: 911523 - RNA, 22 nt, Human
gucauucagagaugcagguaga

SEQ ID NO: 911524 - RNA, 22 nt, Human
ccuggcucagaguaugucaucg

SEQ ID NO: 911525 - RNA, 19 nt, Human
gcagccaggugcucuaccu

SEQ ID NO: 911526 - RNA, 22 nt, Human
ccugagcagggcucugcagggc

SEQ ID NO: 911527 - RNA, 22 nt, Human
uuccucaucuagcacagaaauu

SEQ ID NO: 911528 - RNA, 22 nt, Human
uuuaacagguaaaguaaaugug

SEQ ID NO: 911529 - RNA, 22 nt, Human
caguuuauuuccaagaugacaa

SEQ ID NO: 911530 - RNA, 22 nt, Human
acugggccuugccauggcagcc

SEQ ID NO: 911531 - RNA, 22 nt, Human
guacgugcaugcacgugugccu

SEQ ID NO: 911532 - RNA, 22 nt, Human
ccaggaggcggaagguacagug

SEQ ID NO: 911533 - RNA, 22 nt, Human
ucaccuguauuaauacagaacu

SEQ ID NO: 911534 - RNA, 22 nt, Human
aagagguuuaacugacucacag

SEQ ID NO: 911535 - RNA, 22 nt, Human
ugagcaucaaauugaugggacu

SEQ ID NO: 911536 - RNA, 22 nt, Human
caggagcucaagaccacccugg

SEQ ID NO: 911537 - RNA, 20 nt, Human
cugugggccucacuuggggu

SEQ ID NO: 911538 - RNA, 22 nt, Human
agacccagagggcugcugggag

SEQ ID NO: 911539 - RNA, 22 nt, Human
ugacaacagccaucacuuuuag

SEQ ID NO: 911540 - RNA, 22 nt, Human
gaaagccagagagaaagggcuc

SEQ ID NO: 911541 - RNA, 22 nt, Human
auaaaacuuggguaugaucccu

SEQ ID NO: 911542 - RNA, 22 nt, Human
ugguccugagcaccagccugac

SEQ ID NO: 911543 - RNA, 21 nt, Human
ucugggacagggccugaggag

SEQ ID NO: 911544 - RNA, 22 nt, Human
cugcaucucugugccagagggc

SEQ ID NO: 911545 - RNA, 22 nt, Human
agggcuuguuaacauagagauu

SEQ ID NO: 911546 - RNA, 22 nt, Human
cagcugcuguaacagaauacuu

SEQ ID NO: 911547 - RNA, 22 nt, Human
cugugcagugugggguaggccu

SEQ ID NO: 911548 - RNA, 22 nt, Human
guccucaggaaggcuuucugac

SEQ ID NO: 911549 - RNA, 22 nt, Human
ucugggcacugcugagccugua

SEQ ID NO: 911550 - RNA, 22 nt, Human
gugccuuugugucuaaaacagc

SEQ ID NO: 911551 - RNA, 22 nt, Human
uuacagaaaggaaggacugacu

SEQ ID NO: 911552 - RNA, 22 nt, Human
gucauucaacugcacauuaggu

SEQ ID NO: 911553 - RNA, 22 nt, Human
auauguguacgugcaguauaua

SEQ ID NO: 911554 - RNA, 22 nt, Human
uuagaacugaagaagauuaagg

SEQ ID NO: 911555 - RNA, 22 nt, Human
cacaaggcuuucaucuggcaua

SEQ ID NO: 911556 - RNA, 22 nt, Human
agaggccagcuagcgggccauc

SEQ ID NO: 911557 - RNA, 22 nt, Human
aauauauuugaaucaggaacaa

SEQ ID NO: 911558 - RNA, 22 nt, Human
auuauauugaguauaaccagag

SEQ ID NO: 911559 - RNA, 21 nt, Human
aucuagaaucucucuccccac

SEQ ID NO: 911560 - RNA, 22 nt, Human
ggcagcagaccccuaagucuac

SEQ ID NO: 911561 - RNA, 23 nt, Human
gccagccuugcucuccugcagcc

SEQ ID NO: 911562 - RNA, 22 nt, Human
cuguaaccuccucuuuccauuc

SEQ ID NO: 911563 - RNA, 22 nt, Human
ucuacuagguguacuacugcag

SEQ ID NO: 911564 - RNA, 22 nt, Human
cuggaggcaaagcagaggcaug

SEQ ID NO: 911565 - RNA, 22 nt, Human
cuagaaucugggauuucugacu

SEQ ID NO: 911566 - RNA, 22 nt, Human
ccuaggagagguaaugaaguuc

SEQ ID NO: 911567 - RNA, 22 nt, Human
aaaguuuaucauagccggggac

SEQ ID NO: 911568 - RNA, 22 nt, Human
aguccaaggccauacaguugug

SEQ ID NO: 911569 - RNA, 20 nt, Human
ggggcagguuuuuauggcua

SEQ ID NO: 911570 - RNA, 22 nt, Human
cagguuggggacuuaggaugac

SEQ ID NO: 911571 - RNA, 22 nt, Human
ucaaacuguuagauuucagcuc

SEQ ID NO: 911572 - RNA, 22 nt, Human
aagaacugugcuccaggcucca

SEQ ID NO: 911573 - RNA, 21 nt, Human
cugcaggaugcugaagccagg

SEQ ID NO: 911574 - RNA, 23 nt, Human
auugaacagagagaaaaacaucc

SEQ ID NO: 911575 - RNA, 22 nt, Human
cacccugcccacuagcaaucug

SEQ ID NO: 911576 - RNA, 22 nt, Human
ccucugggcagguagcagcagc

SEQ ID NO: 911577 - RNA, 22 nt, Human
guacaaauugauacagguuuuc

SEQ ID NO: 911578 - RNA, 22 nt, Human
aguguauuaucagaaacugugg

SEQ ID NO: 911579 - RNA, 22 nt, Human
ccggucccaggugccccgguga

SEQ ID NO: 911580 - RNA, 19 nt, Human
aagauuuggucauugauaa

SEQ ID NO: 911581 - RNA, 22 nt, Human
auagagcucuucuucuuuuaac

SEQ ID NO: 911582 - RNA, 22 nt, Human
uaaucuguuguuaauauugacu

SEQ ID NO: 911583 - RNA, 22 nt, Human
agucaucucagguagcauuuac

SEQ ID NO: 911584 - RNA, 22 nt, Human
caaaauaccacgacuuguuuua

SEQ ID NO: 911585 - RNA, 22 nt, Human
gugugagccaugauguguccag

SEQ ID NO: 911586 - RNA, 22 nt, Human
acagagcauaaugucuagcaca

SEQ ID NO: 911587 - RNA, 22 nt, Human
ucacagcaccaggaucucucca

SEQ ID NO: 911588 - RNA, 22 nt, Human
cuaaacacuauguaagcaagaa

SEQ ID NO: 911589 - RNA, 22 nt, Human
uagucacuuuuuuaccaugugc

SEQ ID NO: 911590 - RNA, 22 nt, Human
ugcagccaucgcagagucugua

SEQ ID NO: 911591 - RNA, 22 nt, Human
uggaaugaaaauggagaucuug

SEQ ID NO: 911592 - RNA, 22 nt, Human
gcuguagggugucauaugaagc

SEQ ID NO: 911593 - RNA, 20 nt, Human
acuguguaaacaugauucau

SEQ ID NO: 911594 - RNA, 22 nt, Human
gaagccuuugccuaaaacauua

SEQ ID NO: 911595 - RNA, 22 nt, Human
uagaggugagccaucaaggggc

SEQ ID NO: 911596 - RNA, 22 nt, Human
agcugccugcauuuauauccug

SEQ ID NO: 911597 - RNA, 22 nt, Human
gcagcugccuucagcuggaugg

SEQ ID NO: 911598 - RNA, 22 nt, Human
ugauaaacauuuuaggaacuaa

SEQ ID NO: 911599 - RNA, 22 nt, Human
ccagggcuuaacuuuucaggag

SEQ ID NO: 911600 - RNA, 22 nt, Human
gcuuccagaccccagucccuca

SEQ ID NO: 911601 - RNA, 22 nt, Human
agggugccugcugcagguucag

SEQ ID NO: 911602 - RNA, 22 nt, Human
agaaaugacacacaugagacau

SEQ ID NO: 911603 - RNA, 21 nt, Human
uaucagagacauugagaggca

SEQ ID NO: 911604 - RNA, 22 nt, Human
ccuuagaggcaggaagaauugc

SEQ ID NO: 911605 - RNA, 22 nt, Human
cuccagggaaaggggcguccgc

SEQ ID NO: 911606 - RNA, 22 nt, Human
ggaagccaugagggacaguucu

SEQ ID NO: 911607 - RNA, 21 nt, Human
agcaccuuacagcuauaaugg

SEQ ID NO: 911608 - RNA, 22 nt, Human
ucuauguaaagccauauugaua

SEQ ID NO: 911609 - RNA, 22 nt, Human
gugcaucaauuucccauguguc

SEQ ID NO: 911610 - RNA, 23 nt, Human
acagcaagaggaccagaugugag

SEQ ID NO: 911611 - RNA, 22 nt, Human
uuuugcuguuauaugcuauuau

SEQ ID NO: 911612 - RNA, 22 nt, Human
aguacaaaaugcagcaucauca

SEQ ID NO: 911613 - RNA, 22 nt, Human
ucuuuugagggccagaggaaga

SEQ ID NO: 911614 - RNA, 22 nt, Human
auucugcuaguuaauaucucuc

SEQ ID NO: 911615 - RNA, 22 nt, Human
gaaacuguuucuggcuuuggug

SEQ ID NO: 911616 - RNA, 22 nt, Human
gacuagggaaucauucuuggau

SEQ ID NO: 911617 - RNA, 23 nt, Human
ccauuuuguguuuuggagaaaca

SEQ ID NO: 911618 - RNA, 22 nt, Human
ucccagacaaucauuggccacc

SEQ ID NO: 911619 - RNA, 22 nt, Human
guauucauauuaaacauaucaa

SEQ ID NO: 911620 - RNA, 22 nt, Human
uagaugaaauguguguuauuau

SEQ ID NO: 911621 - RNA, 22 nt, Human
cuguggcuuugugucuauugua

SEQ ID NO: 911622 - RNA, 22 nt, Human
gguggguauugaauacaggugu

SEQ ID NO: 911623 - RNA, 22 nt, Human
aacauugagaaacauugggaua

SEQ ID NO: 911624 - RNA, 22 nt, Human
ccaggcaguggaagcuaaaauu

SEQ ID NO: 911625 - RNA, 22 nt, Human
ugguccagugacagauaggcac

SEQ ID NO: 911626 - RNA, 22 nt, Human
aacacaggggguuacaaauugu

SEQ ID NO: 911627 - RNA, 22 nt, Human
acagagcucccagccaucuccu

SEQ ID NO: 911628 - RNA, 22 nt, Human
aggguagggcccggagacagac

SEQ ID NO: 911629 - RNA, 22 nt, Human
ccugagcuggaagagcuugugc

SEQ ID NO: 911630 - RNA, 22 nt, Human
gauaacauacuugcauguguau

SEQ ID NO: 911631 - RNA, 22 nt, Human
aggcaacaaggguagucaguga

SEQ ID NO: 911632 - RNA, 19 nt, Human
ucagcagcacugugauuuc

SEQ ID NO: 911633 - RNA, 22 nt, Human
aaguaugucuuuggguauuauu

SEQ ID NO: 911634 - RNA, 22 nt, Human
agcauccuccuucccagagaug

SEQ ID NO: 911635 - RNA, 22 nt, Human
augugucugauggcccugaauu

SEQ ID NO: 911636 - RNA, 22 nt, Human
gcagaggugucaccuuccagga

SEQ ID NO: 911637 - RNA, 22 nt, Human
aauguacaucucaguguaguac

SEQ ID NO: 911638 - RNA, 22 nt, Human
uggcuccagaucugucuccugu

SEQ ID NO: 911639 - RNA, 22 nt, Human
ucacaaauagcuauauuaagga

SEQ ID NO: 911640 - RNA, 22 nt, Human
acaguuuaugccucugagccug

SEQ ID NO: 911641 - RNA, 22 nt, Human
uggcugggugcuauccaguacu

SEQ ID NO: 911642 - RNA, 22 nt, Human
ucauugaguugcacuuuuacua

SEQ ID NO: 911643 - RNA, 22 nt, Human
ggcagugucaaaauaggcagaa

SEQ ID NO: 911644 - RNA, 22 nt, Human
gucaugugaaauuuggcaggcc

SEQ ID NO: 911645 - RNA, 22 nt, Human
auacaacugccuuagaaggaaa

SEQ ID NO: 911646 - RNA, 22 nt, Human
augcuuccucccuuccacucaa

SEQ ID NO: 911647 - RNA, 22 nt, Human
caggcagggagccacuguauaa

SEQ ID NO: 911648 - RNA, 22 nt, Human
uagaauaugauuaauuuucuua

SEQ ID NO: 911649 - RNA, 21 nt, Human
aaagauguuucaucugagaaa

SEQ ID NO: 911650 - RNA, 17 nt, Human
gcaguggagggguaguu

SEQ ID NO: 911651 - RNA, 22 nt, Human
gguccagguccugugacagcag

SEQ ID NO: 911652 - RNA, 22 nt, Human
ccaccauuauaucucccaugcc

SEQ ID NO: 911653 - RNA, 22 nt, Human
aagguuuauuaaaaguugaugg

SEQ ID NO: 911654 - RNA, 22 nt, Human
aaugucaaaggcuauacauuca

SEQ ID NO: 911655 - RNA, 22 nt, Human
gacccuuagaaugugaucuuau

SEQ ID NO: 911656 - RNA, 22 nt, Human
uggggcaagaagugcccugaag

SEQ ID NO: 911657 - RNA, 22 nt, Human
cacauugaaaugacccaauaau

SEQ ID NO: 911658 - RNA, 22 nt, Human
aaagcaagacaggaguuucaga

SEQ ID NO: 911659 - RNA, 22 nt, Human
ugggccuggacaaggccacuag

SEQ ID NO: 911660 - RNA, 22 nt, Human
uuugcaagaagaauggcacaaa

SEQ ID NO: 911661 - RNA, 22 nt, Human
agcauuagguguguuucagagg

SEQ ID NO: 911662 - RNA, 22 nt, Human
gcagcuucagccagagggccag

SEQ ID NO: 911663 - RNA, 22 nt, Human
gaggggaaagugugaggcugcg

SEQ ID NO: 911664 - RNA, 22 nt, Human
guguacaguuagccaccaaauu

SEQ ID NO: 911665 - RNA, 22 nt, Human
agcugcaguaaagcucuccagg

SEQ ID NO: 911666 - RNA, 22 nt, Human
ccugggagugugccaucucugu

SEQ ID NO: 911667 - RNA, 22 nt, Human
cuggccugaggccgccuucaga

SEQ ID NO: 911668 - RNA, 22 nt, Human
cucuacagcugcugccccuggu

SEQ ID NO: 911669 - RNA, 22 nt, Human
ucacaggcuccagggccuggau

SEQ ID NO: 911670 - RNA, 22 nt, Human
cagauuuugaugaauguggaaa

SEQ ID NO: 911671 - RNA, 22 nt, Human
gcucacagucugcugagugcag

SEQ ID NO: 911672 - RNA, 22 nt, Human
aguccagggcuuagucagcggg

SEQ ID NO: 911673 - RNA, 22 nt, Human
uuuacuuuugguaaggucauuu

SEQ ID NO: 911674 - RNA, 22 nt, Human
aaggaagagaauccuucucaga

SEQ ID NO: 911675 - RNA, 23 nt, Human
ugcaguaggauggggcugggccu

SEQ ID NO: 911676 - RNA, 22 nt, Human
gcugggacugagacagugaccu

SEQ ID NO: 911677 - RNA, 22 nt, Human
cacuguaagaugagcuuuuuua

SEQ ID NO: 911678 - RNA, 19 nt, Human
agcaggcuaggcugccucu

SEQ ID NO: 911679 - RNA, 22 nt, Human
gcugugugcugggcauggcacu

SEQ ID NO: 911680 - RNA, 22 nt, Human
aaacaugagcaucucuucaagc

SEQ ID NO: 911681 - RNA, 22 nt, Human
cugggccuugccaggggugucu

SEQ ID NO: 911682 - RNA, 22 nt, Human
gagccacagcaaccucaaagga

SEQ ID NO: 911683 - RNA, 22 nt, Human
gcugcuggggucacaugguaag

SEQ ID NO: 911684 - RNA, 21 nt, Human
ucagcuuugcaacugcacauc

SEQ ID NO: 911685 - RNA, 22 nt, Human
gccuggguuccaugaucuccag

SEQ ID NO: 911686 - RNA, 22 nt, Human
cucugugugguaugauugucau

SEQ ID NO: 911687 - RNA, 22 nt, Human
cuggaagugggguuggcuugaa

SEQ ID NO: 911688 - RNA, 22 nt, Human
agcugcaguuagccccagauga

SEQ ID NO: 911689 - RNA, 22 nt, Human
agcuucugagaauaguaaaugc

SEQ ID NO: 911690 - RNA, 22 nt, Human
uaccuagaccaguuacaaugca

SEQ ID NO: 911691 - RNA, 22 nt, Human
ugaauagacaucuggccauaga

SEQ ID NO: 911692 - RNA, 21 nt, Human
gcagccagccgagaccaugcc

SEQ ID NO: 911693 - RNA, 22 nt, Human
uuucagagaggcuucaaaucuu

SEQ ID NO: 911694 - RNA, 22 nt, Human
uagaaacauauguuugagacau

SEQ ID NO: 911695 - RNA, 22 nt, Human
aaacucagacacaguaucuguu

SEQ ID NO: 911696 - RNA, 22 nt, Human
gucucccaugucccuguccagu

SEQ ID NO: 911697 - RNA, 22 nt, Human
uuuguucacauuuaggacucuc

SEQ ID NO: 911698 - RNA, 22 nt, Human
uucuuuuacauuaagauuucag

SEQ ID NO: 911699 - RNA, 22 nt, Human
uuccacagauguaugaaguggu

SEQ ID NO: 911700 - RNA, 22 nt, Human
gucuuucuaugcauagagcaga

SEQ ID NO: 911701 - RNA, 22 nt, Human
cauucuuacacaauauuuuaau

SEQ ID NO: 911702 - RNA, 22 nt, Human
aaggucauuuuuuccucuguug

SEQ ID NO: 911703 - RNA, 22 nt, Human
uugaaaguuaucuagauucuga

SEQ ID NO: 911704 - RNA, 22 nt, Human
accuugaacccagcuugcugca

SEQ ID NO: 911705 - RNA, 22 nt, Human
aagaggucacacuagguccuag

SEQ ID NO: 911706 - RNA, 22 nt, Human
ugggaggaucgcuugagcccag

SEQ ID NO: 911707 - RNA, 22 nt, Human
uucugugauugacauguggcuu

SEQ ID NO: 911708 - RNA, 22 nt, Human
auuuagccucauuuuugacaua

SEQ ID NO: 911709 - RNA, 22 nt, Human
aagaaucuccaucugauucacu

SEQ ID NO: 911710 - RNA, 22 nt, Human
ggugaagguggaacgcagagca

SEQ ID NO: 911711 - RNA, 22 nt, Human
auggggugcaugcagauuggga

SEQ ID NO: 911712 - RNA, 22 nt, Human
ugcuggugagguccuugcugga

SEQ ID NO: 911713 - RNA, 22 nt, Human
uuugaaaggaauuaggaugaca

SEQ ID NO: 911714 - RNA, 22 nt, Human
aucagaguguaaguucuuuccu

SEQ ID NO: 911715 - RNA, 22 nt, Human
aaaggcuuuaaagaaccagaac

SEQ ID NO: 911716 - RNA, 22 nt, Human
uauugucuguccgggucaaagc

SEQ ID NO: 911717 - RNA, 20 nt, Human
ggaaacauuuuuauuuccau

SEQ ID NO: 911718 - RNA, 22 nt, Human
ucaaggugcugugcugugcuag

SEQ ID NO: 911719 - RNA, 22 nt, Human
aguagaaauguaguguagagaa

SEQ ID NO: 911720 - RNA, 20 nt, Human
auagaaguauuauguaaugu

SEQ ID NO: 911721 - RNA, 22 nt, Human
guccugggaacuggacagcuaa

SEQ ID NO: 911722 - RNA, 22 nt, Human
auguguccacaggugugagaga

SEQ ID NO: 911723 - RNA, 22 nt, Human
uuggaauccugagaugagaauu

SEQ ID NO: 911724 - RNA, 22 nt, Human
gagagcugucagcguagcaccg

SEQ ID NO: 911725 - RNA, 22 nt, Human
uuccaaguagaagcauuugcau

SEQ ID NO: 911726 - RNA, 22 nt, Human
cuuaagaaauugcauucuaauc

SEQ ID NO: 911727 - RNA, 22 nt, Human
ugcaaaggcaucugggaagguu

SEQ ID NO: 911728 - RNA, 22 nt, Human
guggggcucccaucuccuggcu

SEQ ID NO: 911729 - RNA, 22 nt, Human
aaagcuguaaugcaugcuuucu

SEQ ID NO: 911730 - RNA, 22 nt, Human
caauucugaggccugcuuuguu

SEQ ID NO: 911731 - RNA, 22 nt, Human
gaaaggagucagucuuacugaa

SEQ ID NO: 911732 - RNA, 22 nt, Human
uacaagaaggaaaacuagcaau

SEQ ID NO: 911733 - RNA, 22 nt, Human
ugauuaaguugcauuuuaauau

SEQ ID NO: 911734 - RNA, 22 nt, Human
acauucugaauaggcauuuuau

SEQ ID NO: 911735 - RNA, 23 nt, Human
cauguacagaguuugauaaagug

SEQ ID NO: 911736 - RNA, 22 nt, Human
agaacagcaguuaugguucauu

SEQ ID NO: 911737 - RNA, 22 nt, Human
aaucucuucccaguaaaaaugg

SEQ ID NO: 911738 - RNA, 22 nt, Human
auggcccaagugcccugaccug

SEQ ID NO: 911739 - RNA, 22 nt, Human
cauuggaagacauaucaugcua

SEQ ID NO: 911740 - RNA, 22 nt, Human
cacacaugucucuccaugcucu

SEQ ID NO: 911741 - RNA, 22 nt, Human
auuagcuuugguggaaaggagu

SEQ ID NO: 911742 - RNA, 22 nt, Human
aagccagccagugccagucuua

SEQ ID NO: 911743 - RNA, 22 nt, Human
uggcucaggcuugaaaauagau

SEQ ID NO: 911744 - RNA, 22 nt, Human
gagugagggcagcaggggcugc

SEQ ID NO: 911745 - RNA, 22 nt, Human
gucugugugcacagagcuuugg

SEQ ID NO: 911746 - RNA, 22 nt, Human
acauuagaacauuaauauuggg

SEQ ID NO: 911747 - RNA, 23 nt, Human
auaugucaugcaccagcacuuua

SEQ ID NO: 911748 - RNA, 22 nt, Human
agauaaaaugguucaaaggcua

SEQ ID NO: 911749 - RNA, 22 nt, Human
uacaagaauuucuuucugguug

SEQ ID NO: 911750 - RNA, 22 nt, Human
ggagggagggcuagaccaaaga

SEQ ID NO: 911751 - RNA, 17 nt, Human
uuauugcagugcugaag

SEQ ID NO: 911752 - RNA, 22 nt, Human
uuccucuguaguugcugaugaa

SEQ ID NO: 911753 - RNA, 20 nt, Human
gaggcugcggacugcuggac

SEQ ID NO: 911754 - RNA, 22 nt, Human
aauuucaaacucuugcccucag

SEQ ID NO: 911755 - RNA, 22 nt, Human
acccucaagauggaagcaguuu

SEQ ID NO: 911756 - RNA, 22 nt, Human
cagagcagcagagcuuccaugg

SEQ ID NO: 911757 - RNA, 20 nt, Human
gggugugggcccggccaggc

SEQ ID NO: 911758 - RNA, 20 nt, Human
agugugucucggagguaagu

SEQ ID NO: 911759 - RNA, 20 nt, Human
uuccauagcacccugugggu

SEQ ID NO: 911760 - RNA, 22 nt, Human
uggagaaggacagccugagaaa

SEQ ID NO: 911761 - RNA, 22 nt, Human
gaggaagaagggauuagaacuc

SEQ ID NO: 911762 - RNA, 22 nt, Human
aaggagaaggcaucauucaagu

SEQ ID NO: 911763 - RNA, 22 nt, Human
agacugaaacaaucugcaggca

SEQ ID NO: 911764 - RNA, 22 nt, Human
ugcauaacuagaguaauuacag

SEQ ID NO: 911765 - RNA, 22 nt, Human
aagcagcugugugacauaaucu

SEQ ID NO: 911766 - RNA, 23 nt, Human
ugcuuugccagagcaaaagucua

SEQ ID NO: 911767 - RNA, 22 nt, Human
gagcagcucagaggacuagugu

SEQ ID NO: 911768 - RNA, 22 nt, Human
gaaguucuuaugaaaacuugag

SEQ ID NO: 911769 - RNA, 22 nt, Human
acuguuaacgguaugaugcucg

SEQ ID NO: 911770 - RNA, 22 nt, Human
ccucugggugacagacucuugg

SEQ ID NO: 911771 - RNA, 18 nt, Human
gggcauggaugcagcauc

SEQ ID NO: 911772 - RNA, 22 nt, Human
aauacuuaugugaccucauuuu

SEQ ID NO: 911773 - RNA, 22 nt, Human
gagugcugaaugcgagaacaga

SEQ ID NO: 911774 - RNA, 22 nt, Human
cugaaguuauucagugggcuga

SEQ ID NO: 911775 - RNA, 22 nt, Human
aacccaggagacagguugcagu

SEQ ID NO: 911776 - RNA, 21 nt, Human
ucaggcagugcaaauacaugg

SEQ ID NO: 911777 - RNA, 22 nt, Human
gugagcugggugaaugguaggg

SEQ ID NO: 911778 - RNA, 22 nt, Human
gccaccucuuugucucugccgc

SEQ ID NO: 911779 - RNA, 19 nt, Human
aagcguuucccacuugcuu

SEQ ID NO: 911780 - RNA, 20 nt, Human
cuuuaguuauuaacagcacu

SEQ ID NO: 911781 - RNA, 22 nt, Human
acacaguucaggaucaaauagc

SEQ ID NO: 911782 - RNA, 22 nt, Human
agccuguccagaggacagggcu

SEQ ID NO: 911783 - RNA, 22 nt, Human
ccagagcaauucucacagaacu

SEQ ID NO: 911784 - RNA, 19 nt, Human
ugcucucuggugcuucaug

SEQ ID NO: 911785 - RNA, 22 nt, Human
aggcagcaagauuauuuaaucc

SEQ ID NO: 911786 - RNA, 19 nt, Human
gggcccagcauggaggguu

SEQ ID NO: 911787 - RNA, 22 nt, Human
aucagcaggaagggcaccuuua

SEQ ID NO: 911788 - RNA, 21 nt, Human
aaugaaguggcuauuuugagg

SEQ ID NO: 911789 - RNA, 22 nt, Human
gagcuuccagagacaucagagu

SEQ ID NO: 911790 - RNA, 22 nt, Human
caguucuuuguggggaguucuc

SEQ ID NO: 911791 - RNA, 22 nt, Human
acagcaggauuuggcgauguug

SEQ ID NO: 911792 - RNA, 22 nt, Human
gaggcugcuuuccuccuauccu

SEQ ID NO: 911793 - RNA, 22 nt, Human
accccaaaagaguaauagaauu

SEQ ID NO: 911794 - RNA, 22 nt, Human
uggcaguugaguuacuggguga

SEQ ID NO: 911795 - RNA, 22 nt, Human
acagaaauugggcaaauggaag

SEQ ID NO: 911796 - RNA, 20 nt, Human
ccucucugcaugcucccuga

SEQ ID NO: 911797 - RNA, 22 nt, Human
gaagguuuacugaagauuuaaa

SEQ ID NO: 911798 - RNA, 22 nt, Human
cuuccugcaggacagccaucug

SEQ ID NO: 911799 - RNA, 22 nt, Human
uguuugcuaggguugguauuua

SEQ ID NO: 911800 - RNA, 22 nt, Human
cuuucaaugugccugccuuggg

SEQ ID NO: 911801 - RNA, 22 nt, Human
gaaaucuuuuaaccauucauuu

SEQ ID NO: 911802 - RNA, 22 nt, Human
auguuuuccugggagagcacuc

SEQ ID NO: 911803 - RNA, 22 nt, Human
ucuuugcauggacauguguuuu

SEQ ID NO: 911804 - RNA, 22 nt, Human
ucagaguuggcaguaaaacaca

SEQ ID NO: 911805 - RNA, 21 nt, Human
ugcagcuggguucugguuugc

SEQ ID NO: 911806 - RNA, 22 nt, Human
aacaguaucuuuuaucagaaau

SEQ ID NO: 911807 - RNA, 22 nt, Human
uggcugagggggcucugcucag

SEQ ID NO: 911808 - RNA, 22 nt, Human
uccaggacagaguagaagcagc

SEQ ID NO: 911809 - RNA, 22 nt, Human
guuagacaugcagaaucucagg

SEQ ID NO: 911810 - RNA, 22 nt, Human
augugucugguuauugacaugc

SEQ ID NO: 911811 - RNA, 22 nt, Human
ccagcucucagcgggagacuca

SEQ ID NO: 911812 - RNA, 16 nt, Human
cuucacagaggagagu

SEQ ID NO: 911813 - RNA, 22 nt, Human
cacaggagagguuaaugggggc

SEQ ID NO: 911814 - RNA, 21 nt, Human
gggcuaagagugaccaggcag

SEQ ID NO: 911815 - RNA, 22 nt, Human
aucuuugggauauuugugauua

SEQ ID NO: 911816 - RNA, 22 nt, Human
ggagccuuagacaucugauccu

SEQ ID NO: 911817 - RNA, 22 nt, Human
uuacuagcugagggaacuuggg

SEQ ID NO: 911818 - RNA, 22 nt, Human
uuccagaggggagguggcagcc

SEQ ID NO: 911819 - RNA, 22 nt, Human
gcagggauugucaaugcugcuc

SEQ ID NO: 911820 - RNA, 22 nt, Human
acuaaagcucacagaguugaac

SEQ ID NO: 911821 - RNA, 18 nt, Human
cagcugccagcucaugga

SEQ ID NO: 911822 - RNA, 22 nt, Human
gagggagcuaugaauagaagaa

SEQ ID NO: 911823 - RNA, 22 nt, Human
agcagcccgaggaucauguguc

SEQ ID NO: 911824 - RNA, 22 nt, Human
uucccaagucuccaauguggga

SEQ ID NO: 911825 - RNA, 22 nt, Human
ucaggaguaaagacagaguucc

SEQ ID NO: 911826 - RNA, 22 nt, Human
uccugcaggccuguucccagua

SEQ ID NO: 911827 - RNA, 22 nt, Human
uacacaggggagcaugguugac

SEQ ID NO: 911828 - RNA, 22 nt, Human
aggaaagcaauggcugagaaca

SEQ ID NO: 911829 - RNA, 22 nt, Human
ccugagccgagcgcucuuucuc

SEQ ID NO: 911830 - RNA, 23 nt, Human
acucagagaccccgggaagugac

SEQ ID NO: 911831 - RNA, 22 nt, Human
caaggccugccucuggcagaaa

SEQ ID NO: 911832 - RNA, 22 nt, Human
agcagggcagcugaugcgcacg

SEQ ID NO: 911833 - RNA, 22 nt, Human
gagcaggaugggagcuggggcc

SEQ ID NO: 911834 - RNA, 22 nt, Human
uuuagcauauuuaaggaaugau

SEQ ID NO: 911835 - RNA, 22 nt, Human
gauuucuaguaagucaugaagg

SEQ ID NO: 911836 - RNA, 23 nt, Human
aaagaucaaaguggcaggccugu

SEQ ID NO: 911837 - RNA, 22 nt, Human
acacauuugcuaaaaugagcuc

SEQ ID NO: 911838 - RNA, 22 nt, Human
guuccuaagcuguggcccugga

SEQ ID NO: 911839 - RNA, 20 nt, Human
auaauuuacccugcaccacu

SEQ ID NO: 911840 - RNA, 22 nt, Human
agggcucauaauuccugacuuc

SEQ ID NO: 911841 - RNA, 22 nt, Human
augcuauuuaccacacaucauu

SEQ ID NO: 911842 - RNA, 22 nt, Human
uuuuucugccauucaaagagga

SEQ ID NO: 911843 - RNA, 22 nt, Human
ccaggagccacucaggcccaca

SEQ ID NO: 911844 - RNA, 22 nt, Human
cagauaacacaaagaaaugggc

SEQ ID NO: 911845 - RNA, 19 nt, Human
ggauaagguuggagugauc

SEQ ID NO: 911846 - RNA, 22 nt, Human
aagauagaugucaucagcauau

SEQ ID NO: 911847 - RNA, 22 nt, Human
uuaguuuauaauucauuucugu

SEQ ID NO: 911848 - RNA, 22 nt, Human
aaggcagcacagcaacugcuca

SEQ ID NO: 911849 - RNA, 22 nt, Human
aaaggcuuaacagaagaccuuu

SEQ ID NO: 911850 - RNA, 22 nt, Human
aggaggaggugggacacaguga

SEQ ID NO: 911851 - RNA, 22 nt, Human
caggcagagugagguggucuaa

SEQ ID NO: 911852 - RNA, 22 nt, Human
agugaucagcuugaaguaguuu

SEQ ID NO: 911853 - RNA, 22 nt, Human
agugucuguuguucagaacucu

SEQ ID NO: 911854 - RNA, 22 nt, Human
agacacauaggaccacacugug

SEQ ID NO: 911855 - RNA, 20 nt, Human
ggaggguggaagaaagcaag

SEQ ID NO: 911856 - RNA, 22 nt, Human
aggcccuguaagguguggagau

SEQ ID NO: 911857 - RNA, 22 nt, Human
uugggggguugaggaguagaua

SEQ ID NO: 911858 - RNA, 22 nt, Human
augaaagcaacuuauuugagau

SEQ ID NO: 911859 - RNA, 21 nt, Human
ucucacaauaugaugccagau

SEQ ID NO: 911860 - RNA, 22 nt, Human
cugugcauuguugaguguuuag

SEQ ID NO: 911861 - RNA, 22 nt, Human
acuagaaaauuccuagaaacua

SEQ ID NO: 911862 - RNA, 22 nt, Human
ggccagggccuggggacugucc

SEQ ID NO: 911863 - RNA, 22 nt, Human
ccaggugucuguggccagcccu

SEQ ID NO: 911864 - RNA, 22 nt, Human
acucaggcuucaggcacagcug

SEQ ID NO: 911865 - RNA, 22 nt, Human
cugugaauugaauaugacuaug

SEQ ID NO: 911866 - RNA, 22 nt, Human
gagaaaauagcauguguaguau

SEQ ID NO: 911867 - RNA, 22 nt, Human
guacacagaugcuugagaaucu

SEQ ID NO: 911868 - RNA, 22 nt, Human
gaagcagccacggggagacaga

SEQ ID NO: 911869 - RNA, 22 nt, Human
aggcuucuucucuauguacaag

SEQ ID NO: 911870 - RNA, 22 nt, Human
ugggauggcauccugggccuug

SEQ ID NO: 911871 - RNA, 22 nt, Human
cuggaaggcagagguugcagug

SEQ ID NO: 911872 - RNA, 19 nt, Human
ucuuuggcuucuggaucag

SEQ ID NO: 911873 - RNA, 22 nt, Human
gacugaaggucucagcauguga

SEQ ID NO: 911874 - RNA, 22 nt, Human
ugcagcaaggggcccugauagg

SEQ ID NO: 911875 - RNA, 22 nt, Human
aaacugucauuuuauauaguua

SEQ ID NO: 911876 - RNA, 22 nt, Human
uuauguaauuuguuugcucuuc

SEQ ID NO: 911877 - RNA, 23 nt, Human
acagaaaguucugcuggacagag

SEQ ID NO: 911878 - RNA, 22 nt, Human
agcuccugauacaugcaggaau

SEQ ID NO: 911879 - RNA, 22 nt, Human
ugggcugccggcaggcucugcc

SEQ ID NO: 911880 - RNA, 22 nt, Human
cuccugagcucugaggaagcuu

SEQ ID NO: 911881 - RNA, 17 nt, Human
gagccccuuuccaaguu

SEQ ID NO: 911882 - RNA, 19 nt, Human
ucaaagcaagcauguucug

SEQ ID NO: 911883 - RNA, 22 nt, Human
ggcauuuagagggcuuuucuga

SEQ ID NO: 911884 - RNA, 22 nt, Human
cucagugcugaggaaaguugaa

SEQ ID NO: 911885 - RNA, 20 nt, Human
uucaugggagcaaagaggcc

SEQ ID NO: 911886 - RNA, 22 nt, Human
ggccuguguccuccuugcccug

SEQ ID NO: 911887 - RNA, 22 nt, Human
aggugggcacaccucccuucuc

SEQ ID NO: 911888 - RNA, 20 nt, Human
uaggaaauauguuuuuaccc

SEQ ID NO: 911889 - RNA, 23 nt, Human
agaggccagccuuuggagacacc

SEQ ID NO: 911890 - RNA, 22 nt, Human
caugggcugcugacaggggcuc

SEQ ID NO: 911891 - RNA, 22 nt, Human
cuuucuuucgaagacgugauua

SEQ ID NO: 911892 - RNA, 22 nt, Human
uauacagucuuuugcuauauuc

SEQ ID NO: 911893 - RNA, 22 nt, Human
agagagaauuggauaaauuggu

SEQ ID NO: 911894 - RNA, 22 nt, Human
gcugaaguugccuauuuuaaua

SEQ ID NO: 911895 - RNA, 22 nt, Human
gcagaugaggaagcuaaugcug

SEQ ID NO: 911896 - RNA, 19 nt, Human
auggccaguuuagagguuu

SEQ ID NO: 911897 - RNA, 22 nt, Human
ucuuucuugguauaaagcaggg

SEQ ID NO: 911898 - RNA, 22 nt, Human
ugcuuccugcuaaggcugccug

SEQ ID NO: 911899 - RNA, 22 nt, Human
uaacaacucaguuuguuccuug

SEQ ID NO: 911900 - RNA, 19 nt, Human
ucaugcauuucuaagugca

SEQ ID NO: 911901 - RNA, 22 nt, Human
uccagagcuaauucagcagcug

SEQ ID NO: 911902 - RNA, 22 nt, Human
ccccagcacaggcuccucagau

SEQ ID NO: 911903 - RNA, 22 nt, Human
uugggcuggagaugaucugcug

SEQ ID NO: 911904 - RNA, 22 nt, Human
guccagcauuuaggcuugcuga

SEQ ID NO: 911905 - RNA, 22 nt, Human
aaagcuagaaggaaauuuuaug

SEQ ID NO: 911906 - RNA, 22 nt, Human
aggggcucugagugggccagga

SEQ ID NO: 911907 - RNA, 22 nt, Human
gcggugggggaaaggagcgguu

SEQ ID NO: 911908 - RNA, 22 nt, Human
caaccccacuacacguuggaga

SEQ ID NO: 911909 - RNA, 22 nt, Human
auguagauuugcuucuccugcc

SEQ ID NO: 911910 - RNA, 19 nt, Human
gaucagagugucagcuugu

SEQ ID NO: 911911 - RNA, 22 nt, Human
guguccacggcugagaaugauu

SEQ ID NO: 911912 - RNA, 22 nt, Human
aaggccagagcagacuggaguu

SEQ ID NO: 911913 - RNA, 22 nt, Human
aaaguacccaagaacagaguga

SEQ ID NO: 911914 - RNA, 22 nt, Human
gggguagggcgauugcugcuuu

SEQ ID NO: 911915 - RNA, 22 nt, Human
cagcagagacgguaagcagaac

SEQ ID NO: 911916 - RNA, 22 nt, Human
ggcacaggaaucugugaagugc

SEQ ID NO: 911917 - RNA, 22 nt, Human
agaaaugcucuuccugaccaga

SEQ ID NO: 911918 - RNA, 22 nt, Human
ggaggaggcaaguaccagaugc

SEQ ID NO: 911919 - RNA, 22 nt, Human
guauuuaauuccauuaaguuag

SEQ ID NO: 911920 - RNA, 22 nt, Human
uuucuuugagucucaguuugcu

SEQ ID NO: 911921 - RNA, 22 nt, Human
ggugcugaggccuuggcaggga

SEQ ID NO: 911922 - RNA, 22 nt, Human
ucuuuggcacuucuguuuuaag

SEQ ID NO: 911923 - RNA, 22 nt, Human
uguucauugcccccuguguaaa

SEQ ID NO: 911924 - RNA, 22 nt, Human
acagucucuguugcugcuguuu

SEQ ID NO: 911925 - RNA, 22 nt, Human
aucuuacacgauaacuguuagu

SEQ ID NO: 911926 - RNA, 22 nt, Human
uagaggagaguugcuggaugga

SEQ ID NO: 911927 - RNA, 22 nt, Human
agagaacaugacguaauagugg

SEQ ID NO: 911928 - RNA, 22 nt, Human
gucuccugagacugcagucacc

SEQ ID NO: 911929 - RNA, 22 nt, Human
ccagcagggcagugcccuggac

SEQ ID NO: 911930 - RNA, 22 nt, Human
aaacauguaaguucagaucacc

SEQ ID NO: 911931 - RNA, 22 nt, Human
ugcugggcuggggccucagacc

SEQ ID NO: 911932 - RNA, 22 nt, Human
uuacugcuaauucuguagguuu

SEQ ID NO: 911933 - RNA, 22 nt, Human
ggccccaggucugaacacgcug

SEQ ID NO: 911934 - RNA, 22 nt, Human
ccuccaaguuugacucaggaca

SEQ ID NO: 911935 - RNA, 22 nt, Human
cccugagccgccugccgugucc

SEQ ID NO: 911936 - RNA, 22 nt, Human
uccagcucugauucucacuagc

SEQ ID NO: 911937 - RNA, 22 nt, Human
ucauaaauuaucuauuuggcua

SEQ ID NO: 911938 - RNA, 20 nt, Human
uugcaauaaaugaaagacca

SEQ ID NO: 911939 - RNA, 22 nt, Human
gagcuaggcuagggggagucgc

SEQ ID NO: 911940 - RNA, 22 nt, Human
guguuuaauagguagcugaauc

SEQ ID NO: 911941 - RNA, 22 nt, Human
acagugugguuguuucugguua

SEQ ID NO: 911942 - RNA, 22 nt, Human
ccacagcaugcaggccugacac

SEQ ID NO: 911943 - RNA, 21 nt, Human
ugacagguuuaggauuaaaau

SEQ ID NO: 911944 - RNA, 22 nt, Human
acugggaggcaaagagcaagga

SEQ ID NO: 911945 - RNA, 22 nt, Human
cucagcugcagccuggcuggca

SEQ ID NO: 911946 - RNA, 22 nt, Human
uggggacauucaugcagguugu

SEQ ID NO: 911947 - RNA, 22 nt, Human
uccacagggaugccugcggcuu

SEQ ID NO: 911948 - RNA, 22 nt, Human
ggagauuuauagcacacuucag

SEQ ID NO: 911949 - RNA, 22 nt, Human
acacagaguuauuaugugaacu

SEQ ID NO: 911950 - RNA, 22 nt, Human
cacaaaggagaaugucagcaua

SEQ ID NO: 911951 - RNA, 22 nt, Human
auuguacauaugauguauguaa

SEQ ID NO: 911952 - RNA, 22 nt, Human
cuggaucaugcauugcuugucc

SEQ ID NO: 911953 - RNA, 22 nt, Human
gugugccugacaugaugguuaa

SEQ ID NO: 911954 - RNA, 22 nt, Human
uacauugaggcaguagcuggag

SEQ ID NO: 911955 - RNA, 22 nt, Human
ugaaggccaaaagacgggcuuc

SEQ ID NO: 911956 - RNA, 22 nt, Human
ucuucuuuuugucccacagaau

SEQ ID NO: 911957 - RNA, 22 nt, Human
agccuuagauuugggcaagaac

SEQ ID NO: 911958 - RNA, 22 nt, Human
aaucagaaauugagggucuggu

SEQ ID NO: 911959 - RNA, 22 nt, Human
auggcagacacaggcaggcaga

SEQ ID NO: 911960 - RNA, 22 nt, Human
aaggcaaugagggagauagagu

SEQ ID NO: 911961 - RNA, 22 nt, Human
cuuuugauggaguucaagaagc

SEQ ID NO: 911962 - RNA, 17 nt, Human
acaugacugcacaaagu

SEQ ID NO: 911963 - RNA, 22 nt, Human
agccccaggaugggccgcagga

SEQ ID NO: 911964 - RNA, 22 nt, Human
ggaaucuuaauggcauggaguu

SEQ ID NO: 911965 - RNA, 22 nt, Human
acauugagaguuuugaagagua

SEQ ID NO: 911966 - RNA, 22 nt, Human
cugggugagcuggccagagggu

SEQ ID NO: 911967 - RNA, 22 nt, Human
uguccuccaggaccugcagggc

SEQ ID NO: 911968 - RNA, 22 nt, Human
cuagagaaaauguuaauacagu

SEQ ID NO: 911969 - RNA, 22 nt, Human
ugucugccugucucugugcaaa

SEQ ID NO: 911970 - RNA, 22 nt, Human
gaugucuuguugauuucauucu

SEQ ID NO: 911971 - RNA, 22 nt, Human
cagugggaagaaugcagccucc

SEQ ID NO: 911972 - RNA, 22 nt, Human
cacacaugaaucccuaguaccu

SEQ ID NO: 911973 - RNA, 22 nt, Human
gucuccugccacacucaguccc

SEQ ID NO: 911974 - RNA, 22 nt, Human
gacuguguccaugugcuggauu

SEQ ID NO: 911975 - RNA, 22 nt, Human
uuaauuuauguccaaaccagau

SEQ ID NO: 911976 - RNA, 22 nt, Human
cuggagcaaaagugacuccucu

SEQ ID NO: 911977 - RNA, 22 nt, Human
cagcccaggucucucuuccagu

SEQ ID NO: 911978 - RNA, 22 nt, Human
aguguuguaauaaauaucaucu

SEQ ID NO: 911979 - RNA, 23 nt, Human
cugcauauggagguuagcaacuc

SEQ ID NO: 911980 - RNA, 22 nt, Human
guggcccaggcuuggcgcuggc

SEQ ID NO: 911981 - RNA, 22 nt, Human
aagcagagcaagcguauuuauu

SEQ ID NO: 911982 - RNA, 22 nt, Human
ucaggaaagaguguauccauca

SEQ ID NO: 911983 - RNA, 22 nt, Human
cucuuucucauugucagcagaa

SEQ ID NO: 911984 - RNA, 22 nt, Human
gucuuguuugggauguggaugg

SEQ ID NO: 911985 - RNA, 22 nt, Human
ucccagccuuccagucugguuu

SEQ ID NO: 911986 - RNA, 22 nt, Human
uggaggauuaaucuggaaagau

SEQ ID NO: 911987 - RNA, 22 nt, Human
ugcagcuguaacagaggccuca

SEQ ID NO: 911988 - RNA, 22 nt, Human
ucuggguggcagugauggcgug

SEQ ID NO: 911989 - RNA, 23 nt, Human
agggcugaugccauugcagcucu

SEQ ID NO: 911990 - RNA, 22 nt, Human
cauacauugcucauucaguauc

SEQ ID NO: 911991 - RNA, 20 nt, Human
agcugaggcaccugagguua

SEQ ID NO: 911992 - RNA, 22 nt, Human
ggccggggccuccccgcgucgc

SEQ ID NO: 911993 - RNA, 22 nt, Human
ucccacuggacgucugugcugg

SEQ ID NO: 911994 - RNA, 22 nt, Human
acaguauauaugguuaucugau

SEQ ID NO: 911995 - RNA, 22 nt, Human
cguguacacgcacacguguccu

SEQ ID NO: 911996 - RNA, 22 nt, Human
auuucuacaguacacaugcauu

SEQ ID NO: 911997 - RNA, 22 nt, Human
acaaauggaagguguucucuuc

SEQ ID NO: 911998 - RNA, 22 nt, Human
auuuuuccauucucuguuagua

SEQ ID NO: 911999 - RNA, 22 nt, Human
cucuuagagaguuguugaucag

SEQ ID NO: 912000 - RNA, 22 nt, Human
cugagccagggccacacaugga

SEQ ID NO: 912001 - RNA, 22 nt, Human
auaucuuuuagagcaagcuugu

SEQ ID NO: 912002 - RNA, 20 nt, Human
uccagcacccucacagagaa

SEQ ID NO: 912003 - RNA, 22 nt, Human
uuguuuuauucugcaauuuccc

SEQ ID NO: 912004 - RNA, 22 nt, Human
cagcuccccucuguggggcagu

SEQ ID NO: 912005 - RNA, 22 nt, Human
cuuuacuaucaggaauaaacaa

SEQ ID NO: 912006 - RNA, 22 nt, Human
uuucuggcagcgggacaggggu

SEQ ID NO: 912007 - RNA, 22 nt, Human
auugagcaggcaaaguaucaua

SEQ ID NO: 912008 - RNA, 22 nt, Human
ucucugggaaauggagaauuuu

SEQ ID NO: 912009 - RNA, 22 nt, Human
cuuuaauuaggaaguauaauga

SEQ ID NO: 912010 - RNA, 22 nt, Human
ucugcucugggccagcuauuaa

SEQ ID NO: 912011 - RNA, 21 nt, Human
agaaacaugaucaaaggaacc

SEQ ID NO: 912012 - RNA, 22 nt, Human
uggaaaacauaaagcuuuuccu

SEQ ID NO: 912013 - RNA, 22 nt, Human
gucuccugaggcauccauugaa

SEQ ID NO: 912014 - RNA, 22 nt, Human
aaaggcucacgcaguuagugau

SEQ ID NO: 912015 - RNA, 21 nt, Human
ucucacugucugcuuuguuua

SEQ ID NO: 912016 - RNA, 22 nt, Human
agccacagucaaccuguccaua

SEQ ID NO: 912017 - RNA, 22 nt, Human
gaaauguagaguaucugaggau

SEQ ID NO: 912018 - RNA, 22 nt, Human
auuauuauuguugauguuaggg

SEQ ID NO: 912019 - RNA, 22 nt, Human
ugccugggaaccaauccuggcu

SEQ ID NO: 912020 - RNA, 22 nt, Human
agccagaugugagaaagaacac

SEQ ID NO: 912021 - RNA, 22 nt, Human
aguaaacaguuucuuagaagaa

SEQ ID NO: 912022 - RNA, 22 nt, Human
ucuuucucucuaaucaagcaca

SEQ ID NO: 912023 - RNA, 22 nt, Human
gacagggcgagacucagucuca

SEQ ID NO: 912024 - RNA, 22 nt, Human
guuuagcaauaaaaacacauga

SEQ ID NO: 912025 - RNA, 22 nt, Human
cacugugucagaguaugaugau

SEQ ID NO: 912026 - RNA, 22 nt, Human
cugcugugccucuuuucacgug

SEQ ID NO: 912027 - RNA, 19 nt, Human
gucaggcacgugagagcau

SEQ ID NO: 912028 - RNA, 22 nt, Human
ggcugggacgaugaggauuagu

SEQ ID NO: 912029 - RNA, 22 nt, Human
uucauucccaagaguaaacaua

SEQ ID NO: 912030 - RNA, 22 nt, Human
auauuuauaagcaagcaggacu

SEQ ID NO: 912031 - RNA, 22 nt, Human
agcagacaauugccuggaugga

SEQ ID NO: 912032 - RNA, 22 nt, Human
cucucagugccacacagccauu

SEQ ID NO: 912033 - RNA, 22 nt, Human
ucaggcuggaaugcaguggggc

SEQ ID NO: 912034 - RNA, 22 nt, Human
acauuuguacauuggcaugucu

SEQ ID NO: 912035 - RNA, 22 nt, Human
gucaauauauucugucucuuug

SEQ ID NO: 912036 - RNA, 22 nt, Human
cuuauuuccugacauggaaaga

SEQ ID NO: 912037 - RNA, 22 nt, Human
ggggagaauaaaucagauuuua

SEQ ID NO: 912038 - RNA, 22 nt, Human
ucuucagagugagcagugucau

SEQ ID NO: 912039 - RNA, 18 nt, Human
uaaauauauuucccccuu

SEQ ID NO: 912040 - RNA, 18 nt, Human
auccuagaccauacacag

SEQ ID NO: 912041 - RNA, 22 nt, Human
aaauuucaguuggaaugagcuc

SEQ ID NO: 912042 - RNA, 22 nt, Human
aaugcugcaagaggugaaaaga

SEQ ID NO: 912043 - RNA, 22 nt, Human
aagugugggaaguagguggcga

SEQ ID NO: 912044 - RNA, 22 nt, Human
uuucaagaauugaagaggauuu

SEQ ID NO: 912045 - RNA, 22 nt, Human
agcaguuuuccugagcuccuca

SEQ ID NO: 912046 - RNA, 22 nt, Human
uggcuucucccgacacccuggc

SEQ ID NO: 912047 - RNA, 22 nt, Human
ugugccugcuagaugguugucg

SEQ ID NO: 912048 - RNA, 21 nt, Human
gacaggacuagaccagagcuc

SEQ ID NO: 912049 - RNA, 22 nt, Human
uucccacaaucugcguguguau

SEQ ID NO: 912050 - RNA, 22 nt, Human
gcucugguaccagcuacuccua

SEQ ID NO: 912051 - RNA, 22 nt, Human
cccagcuccaagggacagcgaa

SEQ ID NO: 912052 - RNA, 22 nt, Human
ucuggagucugagaucugagga

SEQ ID NO: 912053 - RNA, 22 nt, Human
gcucugcccagugcccugagac

SEQ ID NO: 912054 - RNA, 22 nt, Human
uccaggcuggagugcaguggca

SEQ ID NO: 912055 - RNA, 22 nt, Human
uuccuuagcagaccugguaucc

SEQ ID NO: 912056 - RNA, 19 nt, Human
uccauaagcuuguguucau

SEQ ID NO: 912057 - RNA, 22 nt, Human
ugggagcaguugugaagcucag

SEQ ID NO: 912058 - RNA, 22 nt, Human
gucuccuuguggaucucaagga

SEQ ID NO: 912059 - RNA, 22 nt, Human
uuacaagacacugcugacacag

SEQ ID NO: 912060 - RNA, 20 nt, Human
uacaacaaguagagacauac

SEQ ID NO: 912061 - RNA, 22 nt, Human
cagggcugucuccaaaggcccc

SEQ ID NO: 912062 - RNA, 20 nt, Human
uuacaagccuuguuaaaucu

SEQ ID NO: 912063 - RNA, 22 nt, Human
aacaauguucuuuuagcuugaa

SEQ ID NO: 912064 - RNA, 22 nt, Human
agugacagucugauuucucaaa

SEQ ID NO: 912065 - RNA, 22 nt, Human
ugcuggagaggaaggugggguc

SEQ ID NO: 912066 - RNA, 22 nt, Human
acaggacagguaggauucgcag

SEQ ID NO: 912067 - RNA, 21 nt, Human
agcugcuguggccagaaucca

SEQ ID NO: 912068 - RNA, 22 nt, Human
caggcacacccacuggugcaga

SEQ ID NO: 912069 - RNA, 22 nt, Human
ggcuggcuugcggagucacaga

SEQ ID NO: 912070 - RNA, 22 nt, Human
uuucuaggacaugauaggauau

SEQ ID NO: 912071 - RNA, 17 nt, Human
agagauaaggcggagaa

SEQ ID NO: 912072 - RNA, 22 nt, Human
cacagguugggggaguugauaa

SEQ ID NO: 912073 - RNA, 22 nt, Human
aggggcaaaugugagccuggaa

SEQ ID NO: 912074 - RNA, 23 nt, Human
cccugagcugguccaggcucaac

SEQ ID NO: 912075 - RNA, 22 nt, Human
uugaucuuacaguguucuucca

SEQ ID NO: 912076 - RNA, 22 nt, Human
uuucagacugcccauguuugcc

SEQ ID NO: 912077 - RNA, 22 nt, Human
uggaagugaugcugaggugacg

SEQ ID NO: 912078 - RNA, 22 nt, Human
gggucugagcugaggggaaauc

SEQ ID NO: 912079 - RNA, 22 nt, Human
uugauuuguauugcaggccccu

SEQ ID NO: 912080 - RNA, 22 nt, Human
acccaggcuggaaugcaguggu

SEQ ID NO: 912081 - RNA, 22 nt, Human
aggcuggcucggcuuuucuguc

SEQ ID NO: 912082 - RNA, 22 nt, Human
guaguguguaggcacugugcuc

SEQ ID NO: 912083 - RNA, 21 nt, Human
agucuguuaggaugacucuga

SEQ ID NO: 912084 - RNA, 22 nt, Human
ggcagagacuggguuggcagag

SEQ ID NO: 912085 - RNA, 22 nt, Human
gcagcuguagaggggagaaaga

SEQ ID NO: 912086 - RNA, 22 nt, Human
uuucacacccacuaggacuguu

SEQ ID NO: 912087 - RNA, 22 nt, Human
agaaaggguucucugaggugcu

SEQ ID NO: 912088 - RNA, 22 nt, Human
uugauuugcagaagguguagag

SEQ ID NO: 912089 - RNA, 22 nt, Human
uagugugguaaauaaauguuuu

SEQ ID NO: 912090 - RNA, 22 nt, Human
ugggccagaaguaugcauguuu

SEQ ID NO: 912091 - RNA, 22 nt, Human
ccuuccagauguaagagcugau

SEQ ID NO: 912092 - RNA, 22 nt, Human
aguguccaacucagcuugucaa

SEQ ID NO: 912093 - RNA, 22 nt, Human
aauauuucaaaaggaaacacag

SEQ ID NO: 912094 - RNA, 22 nt, Human
gaagagaugacaaaggagcaug

SEQ ID NO: 912095 - RNA, 22 nt, Human
gcucccugccuacacggaccuu

SEQ ID NO: 912096 - RNA, 22 nt, Human
gagagaaaggauaacagcucaa

SEQ ID NO: 912097 - RNA, 22 nt, Human
cucugggguuagaucugaugcu

SEQ ID NO: 912098 - RNA, 22 nt, Human
acccaggcagcaggagcuaaag

SEQ ID NO: 912099 - RNA, 22 nt, Human
aggagucuguugaaaugucuau

SEQ ID NO: 912100 - RNA, 22 nt, Human
aggcacagagaaugcccuccau

SEQ ID NO: 912101 - RNA, 17 nt, Human
uuucugcaugauuggac

SEQ ID NO: 912102 - RNA, 22 nt, Human
agguacauggggugugugcacg

SEQ ID NO: 912103 - RNA, 22 nt, Human
auggcaguugcccagccaaucc

SEQ ID NO: 912104 - RNA, 22 nt, Human
uagaaaguagggaagguaggau

SEQ ID NO: 912105 - RNA, 22 nt, Human
gcacacaugcaugcacaggagu

SEQ ID NO: 912106 - RNA, 22 nt, Human
ccacagaguccgcauuugaggc

SEQ ID NO: 912107 - RNA, 22 nt, Human
uuccaaguguugagauuagagg

SEQ ID NO: 912108 - RNA, 22 nt, Human
ccaagcaaggcuaauucacuug

SEQ ID NO: 912109 - RNA, 22 nt, Human
uaaacauggauucugaucacag

SEQ ID NO: 912110 - RNA, 22 nt, Human
ucugagacuuuaaccuggggcc

SEQ ID NO: 912111 - RNA, 22 nt, Human
aggaagccuggggcugcccucg

SEQ ID NO: 912112 - RNA, 22 nt, Human
ucucaugugauucccgugcaug

SEQ ID NO: 912113 - RNA, 22 nt, Human
gucaggauuuuaaaaucccagu

SEQ ID NO: 912114 - RNA, 22 nt, Human
auggcccaaaaccuccucccuc

SEQ ID NO: 912115 - RNA, 22 nt, Human
agucuuauguuugugaagaacu

SEQ ID NO: 912116 - RNA, 22 nt, Human
aggcugagacugugcauuagug

SEQ ID NO: 912117 - RNA, 22 nt, Human
cccaguggaaggaguagaagac

SEQ ID NO: 912118 - RNA, 22 nt, Human
ggccuggccucccuuccuagcg

SEQ ID NO: 912119 - RNA, 22 nt, Human
gaagcugcguguagccauacuu

SEQ ID NO: 912120 - RNA, 22 nt, Human
aaguguuuaaauuauuugcagg

SEQ ID NO: 912121 - RNA, 22 nt, Human
aaggggugggcauuagagcagu

SEQ ID NO: 912122 - RNA, 21 nt, Human
uaguuucuacccaguuaaugg

SEQ ID NO: 912123 - RNA, 22 nt, Human
uucuggaaaagaaaguuaagau

SEQ ID NO: 912124 - RNA, 21 nt, Human
augggcagaggcagagaggcu

SEQ ID NO: 912125 - RNA, 22 nt, Human
uaguuuccuaggcuguauuguu

SEQ ID NO: 912126 - RNA, 21 nt, Human
auguuauucuguuccuccagc

SEQ ID NO: 912127 - RNA, 22 nt, Human
uucuguuaucauuaagcauuau

SEQ ID NO: 912128 - RNA, 22 nt, Human
cuggcacagccacugcaggcag

SEQ ID NO: 912129 - RNA, 22 nt, Human
uuucauuuugguuaugccauaa

SEQ ID NO: 912130 - RNA, 22 nt, Human
ggccaggcuggucucagacuuc

SEQ ID NO: 912131 - RNA, 22 nt, Human
cauggcuggugcaccucuggga

SEQ ID NO: 912132 - RNA, 21 nt, Human
uagagauguuugcuaaguagc

SEQ ID NO: 912133 - RNA, 22 nt, Human
auguccugguccuccaccaugg

SEQ ID NO: 912134 - RNA, 22 nt, Human
gcucaaagcacuuugcaaauau

SEQ ID NO: 912135 - RNA, 17 nt, Human
cucagagcaggacagaa

SEQ ID NO: 912136 - RNA, 22 nt, Human
gcugagggggaaggaaagcuga

SEQ ID NO: 912137 - RNA, 22 nt, Human
ugucuguccccugccuugaggg

SEQ ID NO: 912138 - RNA, 21 nt, Human
cauuucaaagagcuggaaauc

SEQ ID NO: 912139 - RNA, 22 nt, Human
ggcagcucugcuccuuggcucc

SEQ ID NO: 912140 - RNA, 23 nt, Human
uauccaguagggcccagagcuga

SEQ ID NO: 912141 - RNA, 22 nt, Human
cucaggucacaggauggccagg

SEQ ID NO: 912142 - RNA, 22 nt, Human
caggagcuacucagguuggguu

SEQ ID NO: 912143 - RNA, 22 nt, Human
aaacacugucucugguauugaa

SEQ ID NO: 912144 - RNA, 22 nt, Human
aggcuccagucuccucuggcag

SEQ ID NO: 912145 - RNA, 19 nt, Human
augaaggcacugaguggga

SEQ ID NO: 912146 - RNA, 22 nt, Human
ugcuccacuugggcacccccca

SEQ ID NO: 912147 - RNA, 22 nt, Human
agcauuugaaaacuauuuaauu

SEQ ID NO: 912148 - RNA, 22 nt, Human
gcuggccugggcagccugucgg

SEQ ID NO: 912149 - RNA, 22 nt, Human
uggaaagguguaaagcagaacc

SEQ ID NO: 912150 - RNA, 22 nt, Human
uuacacagaaacacuguucaga

SEQ ID NO: 912151 - RNA, 22 nt, Human
aggcugugggugauuuacugug

SEQ ID NO: 912152 - RNA, 22 nt, Human
ccaggugguucaggucaccaua

SEQ ID NO: 912153 - RNA, 22 nt, Human
uucugagguccaugcaguacug

SEQ ID NO: 912154 - RNA, 19 nt, Human
ugagaaggcaguggggagc

SEQ ID NO: 912155 - RNA, 22 nt, Human
uucaaaugcaaguuacuacuuu

SEQ ID NO: 912156 - RNA, 22 nt, Human
agccacagagguugaugugguu

SEQ ID NO: 912157 - RNA, 19 nt, Human
agcuggagauuggagggca

SEQ ID NO: 912158 - RNA, 22 nt, Human
uacagaguggugagaucuuuug

SEQ ID NO: 912159 - RNA, 22 nt, Human
uuacaaugagaaaugguuggca

SEQ ID NO: 912160 - RNA, 22 nt, Human
ugcugcuggaucuuacucaucu

SEQ ID NO: 912161 - RNA, 23 nt, Human
augugugggaggucagagagcca

SEQ ID NO: 912162 - RNA, 22 nt, Human
acugucaccaucagagcgggaa

SEQ ID NO: 912163 - RNA, 22 nt, Human
agaagccaaucagcucucugcu

SEQ ID NO: 912164 - RNA, 22 nt, Human
aaaauagcuauggaaugucacu

SEQ ID NO: 912165 - RNA, 22 nt, Human
uggaaggggccaggcgcggagu

SEQ ID NO: 912166 - RNA, 20 nt, Human
aaaugcugagaaguccuuaa

SEQ ID NO: 912167 - RNA, 22 nt, Human
uuggauucacuguugguagagu

SEQ ID NO: 912168 - RNA, 22 nt, Human
gccuuuauuuucaacggagugu

SEQ ID NO: 912169 - RNA, 22 nt, Human
cccagcucaucaggagccgccc

SEQ ID NO: 912170 - RNA, 22 nt, Human
ucugacccucagaucaugucca

SEQ ID NO: 912171 - RNA, 22 nt, Human
uuaguuauacuacugaauggag

SEQ ID NO: 912172 - RNA, 22 nt, Human
acugggcuuaugcuguggagua

SEQ ID NO: 912173 - RNA, 23 nt, Human
uguguacauacauauguacacac

SEQ ID NO: 912174 - RNA, 22 nt, Human
auauauaauacuugcugugggc

SEQ ID NO: 912175 - RNA, 22 nt, Human
ggcagggguucauuuugucuua

SEQ ID NO: 912176 - RNA, 18 nt, Human
ggcaggcucucuggguca

SEQ ID NO: 912177 - RNA, 22 nt, Human
gaacauaauuaaauguccuggg

SEQ ID NO: 912178 - RNA, 22 nt, Human
aaagguaugauacugugacaug

SEQ ID NO: 912179 - RNA, 22 nt, Human
ccacuuuuucagugugcaugca

SEQ ID NO: 912180 - RNA, 22 nt, Human
cauauggacaagaacauuuaug

SEQ ID NO: 912181 - RNA, 22 nt, Human
aggagaaauccaucgagaaugg

SEQ ID NO: 912182 - RNA, 22 nt, Human
acauggaauguguacuaaguua

SEQ ID NO: 912183 - RNA, 22 nt, Human
uguggggcugugguguucuucu

SEQ ID NO: 912184 - RNA, 22 nt, Human
gagcagagacaguacaacuggc

SEQ ID NO: 912185 - RNA, 22 nt, Human
acacaggagauauguaauggcu

SEQ ID NO: 912186 - RNA, 22 nt, Human
uaucaaauugaggcagcugggg

SEQ ID NO: 912187 - RNA, 22 nt, Human
uggaaccuggcauuagggacac

SEQ ID NO: 912188 - RNA, 22 nt, Human
aaggggccucacagaugggcuu

SEQ ID NO: 912189 - RNA, 22 nt, Human
ucuuuguaaguuauauguagua

SEQ ID NO: 912190 - RNA, 22 nt, Human
uacacaugaucauuuaguagca

SEQ ID NO: 912191 - RNA, 22 nt, Human
aagaaaucauaucauuucuugg

SEQ ID NO: 912192 - RNA, 22 nt, Human
guuacaaaggucauaaaagugu

SEQ ID NO: 912193 - RNA, 22 nt, Human
aggcuggaguacaguggcuauu

SEQ ID NO: 912194 - RNA, 19 nt, Human
gagaaucucuuugauguuu

SEQ ID NO: 912195 - RNA, 22 nt, Human
ugugaaauguguguauaauuaa

SEQ ID NO: 912196 - RNA, 22 nt, Human
cuucccugauaagagccucaga

SEQ ID NO: 912197 - RNA, 22 nt, Human
uaaaguguguauauacauaugg

SEQ ID NO: 912198 - RNA, 22 nt, Human
uaaguauguuagaaaaucaagu

SEQ ID NO: 912199 - RNA, 19 nt, Human
guguauguaaguugugagg

SEQ ID NO: 912200 - RNA, 22 nt, Human
gaauuagguaauagaacuagua

SEQ ID NO: 912201 - RNA, 19 nt, Human
ggcuucaguuuagcaggcu

SEQ ID NO: 912202 - RNA, 22 nt, Human
ccucucucuccugcacacacac

SEQ ID NO: 912203 - RNA, 23 nt, Human
gaggucaaggcugcagugauugc

SEQ ID NO: 912204 - RNA, 22 nt, Human
accagugucuuauugaccaucu

SEQ ID NO: 912205 - RNA, 19 nt, Human
ugugugguuggugaaacuc

SEQ ID NO: 912206 - RNA, 22 nt, Human
guaaaguacaagccucauuaca

SEQ ID NO: 912207 - RNA, 22 nt, Human
cggcugugucuucacaggagcc

SEQ ID NO: 912208 - RNA, 22 nt, Human
ccagagguuacacccucagccc

SEQ ID NO: 912209 - RNA, 20 nt, Human
cugacagaaaauauuucauc

SEQ ID NO: 912210 - RNA, 22 nt, Human
augaggcaggagugcaguggca

SEQ ID NO: 912211 - RNA, 22 nt, Human
ugggaguuaguuauacugugac

SEQ ID NO: 912212 - RNA, 22 nt, Human
aguucucauuucacaggcagug

SEQ ID NO: 912213 - RNA, 19 nt, Human
acuguucuguauguugauu

SEQ ID NO: 912214 - RNA, 22 nt, Human
cugcuccucugagguagccaca

SEQ ID NO: 912215 - RNA, 19 nt, Human
ugaggccagcuggcauuuu

SEQ ID NO: 912216 - RNA, 22 nt, Human
aacaggaaugaggagaaaaggu

SEQ ID NO: 912217 - RNA, 22 nt, Human
ucuggcccagccccugauccca

SEQ ID NO: 912218 - RNA, 22 nt, Human
uaguuaauucuuuaagaacaag

SEQ ID NO: 912219 - RNA, 22 nt, Human
cuagcaguguacucaacaaggg

SEQ ID NO: 912220 - RNA, 22 nt, Human
uguauaaauuuaaauuccugcu

SEQ ID NO: 912221 - RNA, 19 nt, Human
uccugaaaacuucuggaau

SEQ ID NO: 912222 - RNA, 22 nt, Human
cugaagcaauugagagauguuu

SEQ ID NO: 912223 - RNA, 22 nt, Human
cagagccuuccuagcagacucu

SEQ ID NO: 912224 - RNA, 22 nt, Human
cuggcagcuucaggacacucgg

SEQ ID NO: 912225 - RNA, 22 nt, Human
aagcuguaugaccuaaaucuug

SEQ ID NO: 912226 - RNA, 22 nt, Human
uuuaauguagcgugaaaugauu

SEQ ID NO: 912227 - RNA, 22 nt, Human
agcagagcggggccuccggaag

SEQ ID NO: 912228 - RNA, 22 nt, Human
uggaaguggcagaaaaugaaca

SEQ ID NO: 912229 - RNA, 22 nt, Human
ggaauguuuuagcuugacuuuu

SEQ ID NO: 912230 - RNA, 22 nt, Human
ggcuccagaggccuuaccugca

SEQ ID NO: 912231 - RNA, 22 nt, Human
acuuuugaagaauuaugcaaaa

SEQ ID NO: 912232 - RNA, 22 nt, Human
auguguauacuugugcuuacuc

SEQ ID NO: 912233 - RNA, 22 nt, Human
uugugcauggcuacuuuuuaug

SEQ ID NO: 912234 - RNA, 22 nt, Human
gcaggacacagaugcaaggcca

SEQ ID NO: 912235 - RNA, 22 nt, Human
aagcagcugcagguucaaagga

SEQ ID NO: 912236 - RNA, 22 nt, Human
uugcacaaaaaauuguugaaua

SEQ ID NO: 912237 - RNA, 22 nt, Human
acaguaauugugaacuuaacgu

SEQ ID NO: 912238 - RNA, 22 nt, Human
cuggccagggugcgaucguggu

SEQ ID NO: 912239 - RNA, 22 nt, Human
ugagagaugaaguuaguuguuc

SEQ ID NO: 912240 - RNA, 22 nt, Human
accugcugaggagggggaauua

SEQ ID NO: 912241 - RNA, 22 nt, Human
cagacacagauaugcauauggc

SEQ ID NO: 912242 - RNA, 22 nt, Human
ucuuccuuucauucauguguua

SEQ ID NO: 912243 - RNA, 22 nt, Human
agugauuaaagcuaggauaaaa

SEQ ID NO: 912244 - RNA, 22 nt, Human
caggcagacauuuuugacauag

SEQ ID NO: 912245 - RNA, 22 nt, Human
uauguucugucuguacagauuu

SEQ ID NO: 912246 - RNA, 22 nt, Human
gcuucuguauuuauuguccuuu

SEQ ID NO: 912247 - RNA, 22 nt, Human
uugcagggaaaucagugaggau

SEQ ID NO: 912248 - RNA, 22 nt, Human
gugcaugcacacaugugugagg

SEQ ID NO: 912249 - RNA, 22 nt, Human
cugacagaaucauuaagaccau

SEQ ID NO: 912250 - RNA, 23 nt, Human
uaagugauaaagaguagagaugg

SEQ ID NO: 912251 - RNA, 22 nt, Human
acuuggccuuauuuccacagaa

SEQ ID NO: 912252 - RNA, 22 nt, Human
ggcagguggaaggucuccauuc

SEQ ID NO: 912253 - RNA, 22 nt, Human
uguaucagaucaaauacuggcu

SEQ ID NO: 912254 - RNA, 22 nt, Human
ucuguggcuuccuauuucuugg

SEQ ID NO: 912255 - RNA, 22 nt, Human
cacauccuucauacucagcucu

SEQ ID NO: 912256 - RNA, 22 nt, Human
cuggcuuuguucugauugcuuc

SEQ ID NO: 912257 - RNA, 16 nt, Human
uagcuuuuuccuaugu

SEQ ID NO: 912258 - RNA, 22 nt, Human
gcuccagguauuugcccuuuua

SEQ ID NO: 912259 - RNA, 21 nt, Human
cuggcucuguugucacccggc

SEQ ID NO: 912260 - RNA, 22 nt, Human
aaaaccauguaucuauuuccuu

SEQ ID NO: 912261 - RNA, 22 nt, Human
uuagguauucauuuacauguuc

SEQ ID NO: 912262 - RNA, 22 nt, Human
agcagggcugugcuccuuccga

SEQ ID NO: 912263 - RNA, 21 nt, Human
uggccagcuggagucuccaca

SEQ ID NO: 912264 - RNA, 22 nt, Human
caggcagagacgucaguguagg

SEQ ID NO: 912265 - RNA, 22 nt, Human
ucucuaacaguggcugcugccu

SEQ ID NO: 912266 - RNA, 22 nt, Human
ggugaaauguagucuugugaga

SEQ ID NO: 912267 - RNA, 22 nt, Human
uuugcuaaaagugaugaagaca

SEQ ID NO: 912268 - RNA, 22 nt, Human
ucugggcacacaccaugcccac

SEQ ID NO: 912269 - RNA, 22 nt, Human
uggggccugagguggagcugca

SEQ ID NO: 912270 - RNA, 22 nt, Human
aacuacagaaaagguaagcucu

SEQ ID NO: 912271 - RNA, 22 nt, Human
cuuccuggaugagcaggcugau

SEQ ID NO: 912272 - RNA, 22 nt, Human
aaaaguucccugguuagaaaag

SEQ ID NO: 912273 - RNA, 22 nt, Human
uaguacagugcucuguaaguuu

SEQ ID NO: 912274 - RNA, 22 nt, Human
uggcagcagacaaaaggccauu

SEQ ID NO: 912275 - RNA, 22 nt, Human
uggcccuggguggaauguccca

SEQ ID NO: 912276 - RNA, 22 nt, Human
gccuuagaaaaauaagauuuua

SEQ ID NO: 912277 - RNA, 22 nt, Human
gauuucaaggauguuagaggug

SEQ ID NO: 912278 - RNA, 22 nt, Human
uuaaguauauccauuugacugg

SEQ ID NO: 912279 - RNA, 20 nt, Human
auuugcuuaccuuguuucua

SEQ ID NO: 912280 - RNA, 22 nt, Human
ucucaaguuauguaacagcugu

SEQ ID NO: 912281 - RNA, 22 nt, Human
ugauauuugcugacugcauugu

SEQ ID NO: 912282 - RNA, 22 nt, Human
uggcagaccaucuuauuaacaa

SEQ ID NO: 912283 - RNA, 22 nt, Human
caaguuuacaauguguaugugu

SEQ ID NO: 912284 - RNA, 22 nt, Human
acacaguggugagucuggaccu

SEQ ID NO: 912285 - RNA, 22 nt, Human
acaaauguuggauuugucuucc

SEQ ID NO: 912286 - RNA, 22 nt, Human
ugcuggaggccgagaagcagca

SEQ ID NO: 912287 - RNA, 19 nt, Human
guuuccuuggguguaggga

SEQ ID NO: 912288 - RNA, 22 nt, Human
agcagguguagggcucuuugua

SEQ ID NO: 912289 - RNA, 22 nt, Human
caggagugcagguggugaggca

SEQ ID NO: 912290 - RNA, 22 nt, Human
auguguaugauaccuuugcuga

SEQ ID NO: 912291 - RNA, 22 nt, Human
aaguagcagggauuacaggugu

SEQ ID NO: 912292 - RNA, 22 nt, Human
ccuguguucuaauccaucucag

SEQ ID NO: 912293 - RNA, 23 nt, Human
uguuuucuuguccugguauaauu

SEQ ID NO: 912294 - RNA, 22 nt, Human
cucucuccuuagcugcagacca

SEQ ID NO: 912295 - RNA, 22 nt, Human
gagacagcacaggccacuggga

SEQ ID NO: 912296 - RNA, 22 nt, Human
ccugcacuaccuggggcugcug

SEQ ID NO: 912297 - RNA, 22 nt, Human
aagggacauagacuguacaucu

SEQ ID NO: 912298 - RNA, 18 nt, Human
gagaaagcagggaauguu

SEQ ID NO: 912299 - RNA, 22 nt, Human
ggaugugaaucugggcugagac

SEQ ID NO: 912300 - RNA, 22 nt, Human
ccccagggaagcuuugcuuacu

SEQ ID NO: 912301 - RNA, 18 nt, Human
cuggcauucuucccugga

SEQ ID NO: 912302 - RNA, 22 nt, Human
agggaggaccaaugugugguua

SEQ ID NO: 912303 - RNA, 22 nt, Human
ugagcccuaauuuacaacaucu

SEQ ID NO: 912304 - RNA, 22 nt, Human
guggcagaacuaugugauugcu

SEQ ID NO: 912305 - RNA, 22 nt, Human
cacagggcuucucauggggugc

SEQ ID NO: 912306 - RNA, 22 nt, Human
uuuauguuugacaaugaucugg

SEQ ID NO: 912307 - RNA, 22 nt, Human
auccuugggucucuggaaauug

SEQ ID NO: 912308 - RNA, 18 nt, Human
ugcuccaggcccaugggc

SEQ ID NO: 912309 - RNA, 22 nt, Human
caggcuggagugaguguagugg

SEQ ID NO: 912310 - RNA, 22 nt, Human
agacacugaaucagagggacau

SEQ ID NO: 912311 - RNA, 23 nt, Human
cccagcgcugagcccugcaggca

SEQ ID NO: 912312 - RNA, 18 nt, Human
cuguugagauguggcuga

SEQ ID NO: 912313 - RNA, 22 nt, Human
cagcugucugaagcaggagucc

SEQ ID NO: 912314 - RNA, 22 nt, Human
auaagugagaacaaaaauuaga

SEQ ID NO: 912315 - RNA, 22 nt, Human
ccugaguggccaggcagcugug

SEQ ID NO: 912316 - RNA, 22 nt, Human
aauugucaaacacaaauaagag

SEQ ID NO: 912317 - RNA, 22 nt, Human
cuggagggggaaauguucauug

SEQ ID NO: 912318 - RNA, 19 nt, Human
aaaauugcguauuuugagg

SEQ ID NO: 912319 - RNA, 22 nt, Human
accuguuuuagucuuuaaucau

SEQ ID NO: 912320 - RNA, 22 nt, Human
gaaggcaagcagcauaaauguc

SEQ ID NO: 912321 - RNA, 22 nt, Human
uagaaucugaauauucuuauuu

SEQ ID NO: 912322 - RNA, 22 nt, Human
gaacaaauuggagaaaucagga

SEQ ID NO: 912323 - RNA, 22 nt, Human
agcuacaguggacaagugaacu

SEQ ID NO: 912324 - RNA, 22 nt, Human
uuuaugagccucaaaucugagu

SEQ ID NO: 912325 - RNA, 22 nt, Human
ccagcuccaaguuugggcauca

SEQ ID NO: 912326 - RNA, 22 nt, Human
gagcuguccgccccugggccga

SEQ ID NO: 912327 - RNA, 21 nt, Human
ggcaguaagccaaauccauuu

SEQ ID NO: 912328 - RNA, 22 nt, Human
ucucagggagagcugcuggcau

SEQ ID NO: 912329 - RNA, 21 nt, Human
gcucuguuauuuucuaugcag

SEQ ID NO: 912330 - RNA, 22 nt, Human
agcaccuggucuccuggcgcug

SEQ ID NO: 912331 - RNA, 20 nt, Human
aggaagccaaaggcugucuu

SEQ ID NO: 912332 - RNA, 22 nt, Human
aauagaacaauaauuguaaacu

SEQ ID NO: 912333 - RNA, 22 nt, Human
ugacaaagccucauccuucaga

SEQ ID NO: 912334 - RNA, 22 nt, Human
agggccagaggcaccuugcagc

SEQ ID NO: 912335 - RNA, 19 nt, Human
uggcagaggcaguuuguac

SEQ ID NO: 912336 - RNA, 22 nt, Human
gauguaaaaccuauggagcuga

SEQ ID NO: 912337 - RNA, 22 nt, Human
uucuuucaauagcuggcauaug

SEQ ID NO: 912338 - RNA, 22 nt, Human
uuccagaguccauguuggcuca

SEQ ID NO: 912339 - RNA, 22 nt, Human
gaugacaaaacuuuugccagca

SEQ ID NO: 912340 - RNA, 23 nt, Human
auuuccuaaaagauaaucauuac

SEQ ID NO: 912341 - RNA, 22 nt, Human
acuuccaacuucaguccugagc

SEQ ID NO: 912342 - RNA, 22 nt, Human
agucagugggagaagugugaag

SEQ ID NO: 912343 - RNA, 22 nt, Human
ucuuggcaugcaugggcaauca

SEQ ID NO: 912344 - RNA, 22 nt, Human
ucuguuucuauaaagacaagag

SEQ ID NO: 912345 - RNA, 22 nt, Human
agugucaauucucaaaucucgg

SEQ ID NO: 912346 - RNA, 22 nt, Human
gcaauaaaguagcagcucauca

SEQ ID NO: 912347 - RNA, 22 nt, Human
uuccuguuucauagaaaacuga

SEQ ID NO: 912348 - RNA, 22 nt, Human
gcaggaguuaggcgucguggau

SEQ ID NO: 912349 - RNA, 22 nt, Human
aucuauuucugcuaauaacaau

SEQ ID NO: 912350 - RNA, 19 nt, Human
ggcagguagagggccaguc

SEQ ID NO: 912351 - RNA, 22 nt, Human
agcuuucaggauaaugaaaaag

SEQ ID NO: 912352 - RNA, 22 nt, Human
gccagguggcugagcagcugca

SEQ ID NO: 912353 - RNA, 19 nt, Human
agcuggcagcuuccacuuc

SEQ ID NO: 912354 - RNA, 22 nt, Human
aagcagagugauauaaacaugg

SEQ ID NO: 912355 - RNA, 22 nt, Human
auguauauacuuacaugugugg

SEQ ID NO: 912356 - RNA, 22 nt, Human
cugucaauuuauguugacaugc

SEQ ID NO: 912357 - RNA, 18 nt, Human
gccugcaggcacgggggu

SEQ ID NO: 912358 - RNA, 22 nt, Human
aaggcuucuggagcuugcuggc

SEQ ID NO: 912359 - RNA, 22 nt, Human
aucaggaagaauuggaugcuac

SEQ ID NO: 912360 - RNA, 22 nt, Human
gauuuguaguuuuaugugucag

SEQ ID NO: 912361 - RNA, 22 nt, Human
ucacacagcugacagagccuuu

SEQ ID NO: 912362 - RNA, 22 nt, Human
uuagauacauucucauuuguuu

SEQ ID NO: 912363 - RNA, 22 nt, Human
ggagagucugagccugcuggag

SEQ ID NO: 912364 - RNA, 22 nt, Human
uuaguaaauaaagucuacuuuc

SEQ ID NO: 912365 - RNA, 22 nt, Human
cugcuguagccacugggcucag

SEQ ID NO: 912366 - RNA, 22 nt, Human
agcugcuguuucuugcacguau

SEQ ID NO: 912367 - RNA, 22 nt, Human
cugggacuugggcuaugcucug

SEQ ID NO: 912368 - RNA, 22 nt, Human
cccugugucuucuugccuuugu

SEQ ID NO: 912369 - RNA, 23 nt, Human
uggcaaggaaugggauggagacu

SEQ ID NO: 912370 - RNA, 22 nt, Human
ugugacuggaguccagcccacu

SEQ ID NO: 912371 - RNA, 22 nt, Human
caggcccucaggcaagggcucu

SEQ ID NO: 912372 - RNA, 22 nt, Human
uagggaggcuacuucuuguagg

SEQ ID NO: 912373 - RNA, 22 nt, Human
ucccuccuggugagcaggggcu

SEQ ID NO: 912374 - RNA, 22 nt, Human
ggagggguggaaggagugccug

SEQ ID NO: 912375 - RNA, 22 nt, Human
cguguguguaccugcgcauuua

SEQ ID NO: 912376 - RNA, 22 nt, Human
gagacugauggggcucccagaa

SEQ ID NO: 912377 - RNA, 22 nt, Human
caaagauaaucacagaauaccc

SEQ ID NO: 912378 - RNA, 22 nt, Human
ccaggaagcucugcuccacggg

SEQ ID NO: 912379 - RNA, 22 nt, Human
auguguauauuuggugucaaua

SEQ ID NO: 912380 - RNA, 22 nt, Human
acccaggaggugacacagggcu

SEQ ID NO: 912381 - RNA, 22 nt, Human
uucacagggcagaucauuucug

SEQ ID NO: 912382 - RNA, 22 nt, Human
auacacuggacaucauugcauu

SEQ ID NO: 912383 - RNA, 22 nt, Human
aggagccaaauuuuagacucug

SEQ ID NO: 912384 - RNA, 22 nt, Human
agaaaguuaaacagugauaaga

SEQ ID NO: 912385 - RNA, 22 nt, Human
ugaguguggggaaugucaugag

SEQ ID NO: 912386 - RNA, 22 nt, Human
agcccagcacugggggcccagc

SEQ ID NO: 912387 - RNA, 22 nt, Human
agggaacagugaaaggcaucag

SEQ ID NO: 912388 - RNA, 22 nt, Human
ucuagcaggcaaaagcucggca

SEQ ID NO: 912389 - RNA, 22 nt, Human
aucugccuguauuuaccaucau

SEQ ID NO: 912390 - RNA, 22 nt, Human
aaagcaaucagauucagauguc

SEQ ID NO: 912391 - RNA, 19 nt, Human
cuugaaaugagacugaagg

SEQ ID NO: 912392 - RNA, 22 nt, Human
uucacauugugguucaugugaa

SEQ ID NO: 912393 - RNA, 22 nt, Human
uacaugaauguuucaauauugu

SEQ ID NO: 912394 - RNA, 22 nt, Human
caaauaguuuuucauguauuau

SEQ ID NO: 912395 - RNA, 22 nt, Human
acaagguacaaaacagagcaca

SEQ ID NO: 912396 - RNA, 22 nt, Human
caacacugacaauggacugauu

SEQ ID NO: 912397 - RNA, 22 nt, Human
ugugugucauuuaggguggagc

SEQ ID NO: 912398 - RNA, 22 nt, Human
agaggcaacauggggaacagau

SEQ ID NO: 912399 - RNA, 22 nt, Human
cucugcuguucuuauguguccu

SEQ ID NO: 912400 - RNA, 22 nt, Human
acguugaauguccauuugagau

SEQ ID NO: 912401 - RNA, 22 nt, Human
gcuuaggaaaaugguggaguug

SEQ ID NO: 912402 - RNA, 22 nt, Human
aguauacauagugcuuccucuu

SEQ ID NO: 912403 - RNA, 22 nt, Human
agcugcagagguuugugcaaca

SEQ ID NO: 912404 - RNA, 22 nt, Human
ucaaaggcuugugguucuggga

SEQ ID NO: 912405 - RNA, 21 nt, Human
ugcagcagaguaagcagggga

SEQ ID NO: 912406 - RNA, 22 nt, Human
guuccaggcaagugggauagga

SEQ ID NO: 912407 - RNA, 22 nt, Human
auguguuaguuugugauuauac

SEQ ID NO: 912408 - RNA, 22 nt, Human
gugguuuuacaaagagaaagau

SEQ ID NO: 912409 - RNA, 22 nt, Human
agccagcugcucgggggaaaca

SEQ ID NO: 912410 - RNA, 22 nt, Human
acagugcagggugggaagaagg

SEQ ID NO: 912411 - RNA, 22 nt, Human
uucugcaucucacagccagugc

SEQ ID NO: 912412 - RNA, 22 nt, Human
acaaaugaacauauaagcuuga

SEQ ID NO: 912413 - RNA, 22 nt, Human
ccaggcccaggguacugaccaa

SEQ ID NO: 912414 - RNA, 22 nt, Human
guggcagcauggcuuuuagcug

SEQ ID NO: 912415 - RNA, 22 nt, Human
agauuuauguggucacacucag

SEQ ID NO: 912416 - RNA, 22 nt, Human
aacuuuucauugaaucauguca

SEQ ID NO: 912417 - RNA, 22 nt, Human
ggcuccaggguaccccuggaug

SEQ ID NO: 912418 - RNA, 22 nt, Human
aauuugauucagcaaauguuca

SEQ ID NO: 912419 - RNA, 18 nt, Human
agaaggagcuaugggcag

SEQ ID NO: 912420 - RNA, 22 nt, Human
gauuuacagcuauacccaaugg

SEQ ID NO: 912421 - RNA, 19 nt, Human
uuggaugcuaccagguacc

SEQ ID NO: 912422 - RNA, 22 nt, Human
ggacaggguaaguacuagugug

SEQ ID NO: 912423 - RNA, 22 nt, Human
uuucacaggaugcuguuuuaua

SEQ ID NO: 912424 - RNA, 22 nt, Human
auagauacuuauaacaauugug

SEQ ID NO: 912425 - RNA, 22 nt, Human
aaagagcucacaguccacugga

SEQ ID NO: 912426 - RNA, 22 nt, Human
uagagcuggaauuugcagcaag

SEQ ID NO: 912427 - RNA, 21 nt, Human
cccaggagaagaaaagaugca

SEQ ID NO: 912428 - RNA, 22 nt, Human
accacaggacccaugagucagu

SEQ ID NO: 912429 - RNA, 22 nt, Human
auucuuauuauaguaaaacagu

SEQ ID NO: 912430 - RNA, 22 nt, Human
aacuacagcaucuauacaaaua

SEQ ID NO: 912431 - RNA, 22 nt, Human
augcauauaaggcacauguauu

SEQ ID NO: 912432 - RNA, 22 nt, Human
gcuggccauucucuuugagaug

SEQ ID NO: 912433 - RNA, 22 nt, Human
gauccaaauuauuuuuuagagg

SEQ ID NO: 912434 - RNA, 22 nt, Human
ugucugugaccucuuaggcaag

SEQ ID NO: 912435 - RNA, 22 nt, Human
agcagagguguuuauuauggga

SEQ ID NO: 912436 - RNA, 18 nt, Human
cccggcuaauuuuuggua

SEQ ID NO: 912437 - RNA, 22 nt, Human
uccugcagcucugagaagcauc

SEQ ID NO: 912438 - RNA, 22 nt, Human
auauguauagccagucuuuagg

SEQ ID NO: 912439 - RNA, 22 nt, Human
aggccaggauagcauggaucag

SEQ ID NO: 912440 - RNA, 18 nt, Human
gcagagcagaagcucaag

SEQ ID NO: 912441 - RNA, 22 nt, Human
aucuggagugggacacagaaau

SEQ ID NO: 912442 - RNA, 22 nt, Human
agacuacaggagaaacucacuc

SEQ ID NO: 912443 - RNA, 22 nt, Human
uggguaggggacguggaagaaa

SEQ ID NO: 912444 - RNA, 22 nt, Human
auauucaaauuacauuuacuaa

SEQ ID NO: 912445 - RNA, 22 nt, Human
gcucucuggaggccauggacag

SEQ ID NO: 912446 - RNA, 22 nt, Human
ccugcucugccaaguccucuuu

SEQ ID NO: 912447 - RNA, 22 nt, Human
gcaagaacaggugcuuggcaag

SEQ ID NO: 912448 - RNA, 22 nt, Human
uaugaagugauguugaauuuug

SEQ ID NO: 912449 - RNA, 22 nt, Human
acauucaugucccacuucuagc

SEQ ID NO: 912450 - RNA, 22 nt, Human
acauuuuuauccugagugccag

SEQ ID NO: 912451 - RNA, 22 nt, Human
gaugaugugucccaagaaguag

SEQ ID NO: 912452 - RNA, 22 nt, Human
aguaacaagugccaacguuaga

SEQ ID NO: 912453 - RNA, 22 nt, Human
ggcuggcaagugucugcucaug

SEQ ID NO: 912454 - RNA, 22 nt, Human
gcaggccucuguugagggccuu

SEQ ID NO: 912455 - RNA, 22 nt, Human
gcucuguggcaggaggucuugu

SEQ ID NO: 912456 - RNA, 22 nt, Human
ggcagagugcucugggcagggg

SEQ ID NO: 912457 - RNA, 20 nt, Human
uggcacagaacccuugccua

SEQ ID NO: 912458 - RNA, 22 nt, Human
gagacacaguuaucaggcauac

SEQ ID NO: 912459 - RNA, 21 nt, Human
ugccugccuccuuuggcuagg

SEQ ID NO: 912460 - RNA, 22 nt, Human
ugcagcagacauaauguggauu

SEQ ID NO: 912461 - RNA, 22 nt, Human
ggcuucagaggggagguagugc

SEQ ID NO: 912462 - RNA, 22 nt, Human
ucucauaauuguuucccagcua

SEQ ID NO: 912463 - RNA, 22 nt, Human
ucuccagggugagcuaggccag

SEQ ID NO: 912464 - RNA, 22 nt, Human
agccacagucugaugccugaga

SEQ ID NO: 912465 - RNA, 22 nt, Human
agcugccagaugacagugcuau

SEQ ID NO: 912466 - RNA, 22 nt, Human
auucaguuguaaucuuuguuag

SEQ ID NO: 912467 - RNA, 22 nt, Human
uuucuucuuucccagugauggg

SEQ ID NO: 912468 - RNA, 22 nt, Human
auaccugcaguauuuuauuguu

SEQ ID NO: 912469 - RNA, 22 nt, Human
cucaggauugugccuagggaga

SEQ ID NO: 912470 - RNA, 22 nt, Human
cagcaaaguaagcugacaugua

SEQ ID NO: 912471 - RNA, 22 nt, Human
augguuuuauuucucuauagcu

SEQ ID NO: 912472 - RNA, 22 nt, Human
uacagauauguuccaugcaucg

SEQ ID NO: 912473 - RNA, 22 nt, Human
cuugauauuuuaaacauacagu

SEQ ID NO: 912474 - RNA, 22 nt, Human
uuucccaauugagagguucugu

SEQ ID NO: 912475 - RNA, 22 nt, Human
uacuuugguugaauauguaaug

SEQ ID NO: 912476 - RNA, 17 nt, Human
agccaggcauaugaagu

SEQ ID NO: 912477 - RNA, 20 nt, Human
ugcuuuaugcuauacuuugu

SEQ ID NO: 912478 - RNA, 22 nt, Human
cugcuguguaucauuuuagaug

SEQ ID NO: 912479 - RNA, 22 nt, Human
caagggcauugcuugggaccuu

SEQ ID NO: 912480 - RNA, 23 nt, Human
cccugcagucagggugagauggu

SEQ ID NO: 912481 - RNA, 22 nt, Human
ucuucaugcaccucacagcuag

SEQ ID NO: 912482 - RNA, 22 nt, Human
aggcugugggacaguuaggaga

SEQ ID NO: 912483 - RNA, 22 nt, Human
augcauaugccguagaauaagu

SEQ ID NO: 912484 - RNA, 22 nt, Human
cugagguauugggaaguggacu

SEQ ID NO: 912485 - RNA, 22 nt, Human
gcuggagccaagcugcucuugg

SEQ ID NO: 912486 - RNA, 22 nt, Human
agcaaucagcuucuuuguguuu

SEQ ID NO: 912487 - RNA, 22 nt, Human
aguggcagguguguaguauccc

SEQ ID NO: 912488 - RNA, 22 nt, Human
gcagagccccauugcuggcggg

SEQ ID NO: 912489 - RNA, 22 nt, Human
uuacaguaccuguauggccacu

SEQ ID NO: 912490 - RNA, 22 nt, Human
cguccuuugaauugaggucuuu

SEQ ID NO: 912491 - RNA, 22 nt, Human
cucuggaccucagcuacagacu

SEQ ID NO: 912492 - RNA, 22 nt, Human
uauguauucugaguacaaguuc

SEQ ID NO: 912493 - RNA, 22 nt, Human
aggcuucagaggaagugcggcc

SEQ ID NO: 912494 - RNA, 22 nt, Human
caaauacucuggauguguuugu

SEQ ID NO: 912495 - RNA, 21 nt, Human
cuacagaggagagggaaaggc

SEQ ID NO: 912496 - RNA, 22 nt, Human
gccaggcugcuggcugcugucc

SEQ ID NO: 912497 - RNA, 22 nt, Human
agacagagauacuauguuguca

SEQ ID NO: 912498 - RNA, 22 nt, Human
ugacacaggcagcucccagcac

SEQ ID NO: 912499 - RNA, 22 nt, Human
ucagcagaaguauagaggccau

SEQ ID NO: 912500 - RNA, 22 nt, Human
ucugcagaagaauuaaggacag

SEQ ID NO: 912501 - RNA, 22 nt, Human
uugaaauaaggaagcucgaaau

SEQ ID NO: 912502 - RNA, 22 nt, Human
acacauauguaugcaucaugug

SEQ ID NO: 912503 - RNA, 22 nt, Human
agaguggagagaaacaacucug

SEQ ID NO: 912504 - RNA, 22 nt, Human
augugcuucaggaugucagugu

SEQ ID NO: 912505 - RNA, 22 nt, Human
cccugacccuaucagagggcca

SEQ ID NO: 912506 - RNA, 22 nt, Human
agggaaaggcugaugcuguggg

SEQ ID NO: 912507 - RNA, 22 nt, Human
ggcagaguugguggagucaguu

SEQ ID NO: 912508 - RNA, 22 nt, Human
uuaauccaauauccuggcuauu

SEQ ID NO: 912509 - RNA, 21 nt, Human
acagaugugauaugcagucuu

SEQ ID NO: 912510 - RNA, 22 nt, Human
uuuuccucugagcuuugaauaa

SEQ ID NO: 912511 - RNA, 22 nt, Human
aaaugcagacagcuucacacac

SEQ ID NO: 912512 - RNA, 22 nt, Human
aggacagguguagugggcucug

SEQ ID NO: 912513 - RNA, 18 nt, Human
ccccaaaagucacccugg

SEQ ID NO: 912514 - RNA, 22 nt, Human
acaguuuacagggauuugagcu

SEQ ID NO: 912515 - RNA, 22 nt, Human
augcugaagagugcacaggcua

SEQ ID NO: 912516 - RNA, 22 nt, Human
agcaacauuuuucaauuaacau

SEQ ID NO: 912517 - RNA, 22 nt, Human
uguuccagauuuagccaaccga

SEQ ID NO: 912518 - RNA, 22 nt, Human
agcuauuucaaaguuugagaca

SEQ ID NO: 912519 - RNA, 22 nt, Human
ucagaggcuggaagagccuccu

SEQ ID NO: 912520 - RNA, 22 nt, Human
uccugggcugugugccacucug

SEQ ID NO: 912521 - RNA, 22 nt, Human
aacagauauaggcagaacuuug

SEQ ID NO: 912522 - RNA, 20 nt, Human
ugucagugccugaggcacag

SEQ ID NO: 912523 - RNA, 22 nt, Human
gggcuccagcuguuugccauga

SEQ ID NO: 912524 - RNA, 22 nt, Human
gagcugaagcgcuacagcaucc

SEQ ID NO: 912525 - RNA, 22 nt, Human
cugccaucgggggccccacugc

SEQ ID NO: 912526 - RNA, 22 nt, Human
ugauuuccccagucuugcugcu

SEQ ID NO: 912527 - RNA, 22 nt, Human
uuugucagggaucagaucggua

SEQ ID NO: 912528 - RNA, 22 nt, Human
caaccucauagaaagaaaaugu

SEQ ID NO: 912529 - RNA, 22 nt, Human
ccucgugugcuaggauccaggu

SEQ ID NO: 912530 - RNA, 22 nt, Human
ggcugccugugcccaggcacac

SEQ ID NO: 912531 - RNA, 22 nt, Human
ucacucagagauagccucauuu

SEQ ID NO: 912532 - RNA, 22 nt, Human
cacacaggaugaagcagcagaa

SEQ ID NO: 912533 - RNA, 22 nt, Human
uuaaguccuugguaauuuucuu

SEQ ID NO: 912534 - RNA, 22 nt, Human
ccucugggaagccaguccugcu

SEQ ID NO: 912535 - RNA, 22 nt, Human
gcagggcagaaggugcugagga

SEQ ID NO: 912536 - RNA, 22 nt, Human
ucuuauuugcaacuggcucaga

SEQ ID NO: 912537 - RNA, 16 nt, Human
gaggggagcaguaggc

SEQ ID NO: 912538 - RNA, 22 nt, Human
uucaguguauauuuuuugagua

SEQ ID NO: 912539 - RNA, 22 nt, Human
augguaaacauuuaacaacuag

SEQ ID NO: 912540 - RNA, 22 nt, Human
ucccuggcagcuaagggugguc

SEQ ID NO: 912541 - RNA, 21 nt, Human
augauacugaagcacaacuau

SEQ ID NO: 912542 - RNA, 19 nt, Human
uccuuccccccagcacaga

SEQ ID NO: 912543 - RNA, 22 nt, Human
ucaaaugaggcugaugaaugug

SEQ ID NO: 912544 - RNA, 22 nt, Human
uggcacagacugggccaaggaa

SEQ ID NO: 912545 - RNA, 22 nt, Human
cccuugcuugcccagucacagg

SEQ ID NO: 912546 - RNA, 22 nt, Human
ucagugcugccauggcagggcc

SEQ ID NO: 912547 - RNA, 22 nt, Human
ucuggagaaaguugaguuugug

SEQ ID NO: 912548 - RNA, 22 nt, Human
cucaggaggaggaaguucauug

SEQ ID NO: 912549 - RNA, 22 nt, Human
aguuuauucugcuuggcccucc

SEQ ID NO: 912550 - RNA, 23 nt, Human
gugagucuugccuuugcugugga

SEQ ID NO: 912551 - RNA, 22 nt, Human
uucugucuggaaaaggacauag

SEQ ID NO: 912552 - RNA, 22 nt, Human
guggcgcagaggguggcagaga

SEQ ID NO: 912553 - RNA, 22 nt, Human
uccuguggcguuaucaugugau

SEQ ID NO: 912554 - RNA, 22 nt, Human
guuuggugacacauaguuugau

SEQ ID NO: 912555 - RNA, 22 nt, Human
guuccugagaaauaaagagaga

SEQ ID NO: 912556 - RNA, 22 nt, Human
agccccacacucucucugagaa

SEQ ID NO: 912557 - RNA, 22 nt, Human
gucuuauuaaaaugcaguuucu

SEQ ID NO: 912558 - RNA, 21 nt, Human
agggccugugcucuccagguc

SEQ ID NO: 912559 - RNA, 22 nt, Human
cuccugggcugggaacucagcc

SEQ ID NO: 912560 - RNA, 22 nt, Human
gaaaggggcauguagggaucac

SEQ ID NO: 912561 - RNA, 22 nt, Human
uccacagguaugaggccccacc

SEQ ID NO: 912562 - RNA, 22 nt, Human
ucacaugcccuaccuaaucuua

SEQ ID NO: 912563 - RNA, 22 nt, Human
auuucucaaaggaauagaguga

SEQ ID NO: 912564 - RNA, 22 nt, Human
auagaauuugcacuaaaucugc

SEQ ID NO: 912565 - RNA, 22 nt, Human
aagcuuuuauuaaaaucuugcc

SEQ ID NO: 912566 - RNA, 22 nt, Human
ggguggcauagggugauggcuu

SEQ ID NO: 912567 - RNA, 22 nt, Human
auuuccaugccuuagcuuaagg

SEQ ID NO: 912568 - RNA, 22 nt, Human
agggcugucagacugaggaggc

SEQ ID NO: 912569 - RNA, 22 nt, Human
gaaagggagugaagaugguaua

SEQ ID NO: 912570 - RNA, 22 nt, Human
uuuacauugcauuagguauuau

SEQ ID NO: 912571 - RNA, 19 nt, Human
gaaggagagcugaguuagg

SEQ ID NO: 912572 - RNA, 22 nt, Human
auuacuaugauuugaucauuac

SEQ ID NO: 912573 - RNA, 22 nt, Human
ggagaagggcaugguaguuuua

SEQ ID NO: 912574 - RNA, 22 nt, Human
aaauguuucuacuugugagcau

SEQ ID NO: 912575 - RNA, 22 nt, Human
uagaacaugcucauguauaaau

SEQ ID NO: 912576 - RNA, 22 nt, Human
auuuggaagaaaucugucacag

SEQ ID NO: 912577 - RNA, 22 nt, Human
uucaguuucaaauccugugaag

SEQ ID NO: 912578 - RNA, 22 nt, Human
agcagcaguugcugacguucua

SEQ ID NO: 912579 - RNA, 22 nt, Human
uggccuggaaaaaugcagaugg

SEQ ID NO: 912580 - RNA, 22 nt, Human
gcuuuggaguuaggacucggcc

SEQ ID NO: 912581 - RNA, 19 nt, Human
ccuuccccuucagccucug

SEQ ID NO: 912582 - RNA, 22 nt, Human
ugaucacaagucugaagaauga

SEQ ID NO: 912583 - RNA, 22 nt, Human
agcuggcugggugccagucucc

SEQ ID NO: 912584 - RNA, 22 nt, Human
cgcugccaggucaccaggggua

SEQ ID NO: 912585 - RNA, 22 nt, Human
gaggggcagagguagagaacaa

SEQ ID NO: 912586 - RNA, 22 nt, Human
caugaacauucagaaauacagc

SEQ ID NO: 912587 - RNA, 22 nt, Human
guucucauauggcagagagagu

SEQ ID NO: 912588 - RNA, 22 nt, Human
uuccugugucccgggcacccug

SEQ ID NO: 912589 - RNA, 22 nt, Human
gcaugcacggggcauaugggac

SEQ ID NO: 912590 - RNA, 22 nt, Human
gaaggcauuuuaugccuuauag

SEQ ID NO: 912591 - RNA, 22 nt, Human
ucuuccucuucugcugagaagu

SEQ ID NO: 912592 - RNA, 22 nt, Human
agcugaggguucgguguccaca

SEQ ID NO: 912593 - RNA, 22 nt, Human
agauaagauaguccagcacaau

SEQ ID NO: 912594 - RNA, 22 nt, Human
auuucucuuagcaagacauuac

SEQ ID NO: 912595 - RNA, 22 nt, Human
agcaacagcccugagguucaug

SEQ ID NO: 912596 - RNA, 22 nt, Human
gggcucugggauucagagcaag

SEQ ID NO: 912597 - RNA, 22 nt, Human
agcuuuaugcuuccuacaagcu

SEQ ID NO: 912598 - RNA, 22 nt, Human
uggucccauuguucugcccagg

SEQ ID NO: 912599 - RNA, 22 nt, Human
augaaauuugaccaauuauuua

SEQ ID NO: 912600 - RNA, 22 nt, Human
caggacagcugggccaccacca

SEQ ID NO: 912601 - RNA, 22 nt, Human
auuuuucucucacacuuaccag

SEQ ID NO: 912602 - RNA, 22 nt, Human
ccucaggcccugucccugcgcc

SEQ ID NO: 912603 - RNA, 22 nt, Human
cugggaagccacaggguguggg

SEQ ID NO: 912604 - RNA, 22 nt, Human
uuaugucugugaauuggcaagc

SEQ ID NO: 912605 - RNA, 22 nt, Human
ugcugggcacacaguaggugcu

SEQ ID NO: 912606 - RNA, 22 nt, Human
cugggccuccagcucugccagc

SEQ ID NO: 912607 - RNA, 22 nt, Human
aaaguuguuguucacagguuau

SEQ ID NO: 912608 - RNA, 22 nt, Human
cagcugcagaucauguuuacag

SEQ ID NO: 912609 - RNA, 22 nt, Human
agccugggcaacaacacagcga

SEQ ID NO: 912610 - RNA, 21 nt, Human
uuuauuuauauaggacacaug

SEQ ID NO: 912611 - RNA, 17 nt, Human
aacaauaggauguguau

SEQ ID NO: 912612 - RNA, 22 nt, Human
ucagaaauuuucucaguaguuc

SEQ ID NO: 912613 - RNA, 22 nt, Human
uacaacuuacuugaauggcuuu

SEQ ID NO: 912614 - RNA, 22 nt, Human
acagcuggcaggggggcaugaa

SEQ ID NO: 912615 - RNA, 22 nt, Human
gaugcuuuucuuuucagcaaga

SEQ ID NO: 912616 - RNA, 22 nt, Human
ggguuggggcccagcagucugc

SEQ ID NO: 912617 - RNA, 22 nt, Human
cccagcaguuugcuuagaguga

SEQ ID NO: 912618 - RNA, 22 nt, Human
aacaggcuaaguauuugguagc

SEQ ID NO: 912619 - RNA, 22 nt, Human
gcugugugaccugggcaagucu

SEQ ID NO: 912620 - RNA, 22 nt, Human
uuaggaauauguauuuuaaagu

SEQ ID NO: 912621 - RNA, 22 nt, Human
uuuaugacuucuaaucugaagc

SEQ ID NO: 912622 - RNA, 22 nt, Human
ugucagugcacagaugguugau

SEQ ID NO: 912623 - RNA, 22 nt, Human
uuucuucucaucccugaaauca

SEQ ID NO: 912624 - RNA, 22 nt, Human
uggcaggucaugaguggccacc

SEQ ID NO: 912625 - RNA, 22 nt, Human
acauagaaccuggcacauagua

SEQ ID NO: 912626 - RNA, 22 nt, Human
agcagccagaaagggcagucga

SEQ ID NO: 912627 - RNA, 22 nt, Human
gagagugaggcaucaggggcag

SEQ ID NO: 912628 - RNA, 22 nt, Human
augacagaugcuguggggaggu

SEQ ID NO: 912629 - RNA, 22 nt, Human
caggcacugugcuagauccuug

SEQ ID NO: 912630 - RNA, 22 nt, Human
uguggcagucucacuggagggc

SEQ ID NO: 912631 - RNA, 19 nt, Human
gaaggggaagguggguacc

SEQ ID NO: 912632 - RNA, 22 nt, Human
uaagaaacaugauacuuuuccu

SEQ ID NO: 912633 - RNA, 22 nt, Human
cuguuucuccacacucuuccca

SEQ ID NO: 912634 - RNA, 22 nt, Human
uuucaaagagaggcagaaggaa

SEQ ID NO: 912635 - RNA, 22 nt, Human
cccaggaguuugaguucagcau

SEQ ID NO: 912636 - RNA, 22 nt, Human
aaacugcagccuugaguucagg

SEQ ID NO: 912637 - RNA, 23 nt, Human
aaaugucuucuagcucuugagaa

SEQ ID NO: 912638 - RNA, 22 nt, Human
uauugagacuuccaguauauga

SEQ ID NO: 912639 - RNA, 23 nt, Human
ugcaucaauaaagccaggguuug

SEQ ID NO: 912640 - RNA, 22 nt, Human
ucuguccaugcuuuucucucac

SEQ ID NO: 912641 - RNA, 22 nt, Human
caggcacuucugcugcuugucu

SEQ ID NO: 912642 - RNA, 22 nt, Human
gccacagggcgagcggaggcca

SEQ ID NO: 912643 - RNA, 22 nt, Human
caggcucagcucuggccagugc

SEQ ID NO: 912644 - RNA, 22 nt, Human
aagaagcauucuuucauugguu

SEQ ID NO: 912645 - RNA, 22 nt, Human
cacagucaauguagaaauauga

SEQ ID NO: 912646 - RNA, 21 nt, Human
uccagaggaggacagacucag

SEQ ID NO: 912647 - RNA, 22 nt, Human
aaugguuuguaccuguccuugg

SEQ ID NO: 912648 - RNA, 22 nt, Human
cugggggcagcaagaagccaug

SEQ ID NO: 912649 - RNA, 22 nt, Human
gacacugugcuagcugggcuua

SEQ ID NO: 912650 - RNA, 22 nt, Human
aggcuccaaauuaccaagcucu

SEQ ID NO: 912651 - RNA, 22 nt, Human
gcugagggcuguaacagcagag

SEQ ID NO: 912652 - RNA, 22 nt, Human
gaaguacagggguucuuaggua

SEQ ID NO: 912653 - RNA, 22 nt, Human
caaagcugacgaggucagcauc

SEQ ID NO: 912654 - RNA, 22 nt, Human
cccugcagggaggauucugaag

SEQ ID NO: 912655 - RNA, 22 nt, Human
caggcucuuuugguggcaagga

SEQ ID NO: 912656 - RNA, 22 nt, Human
uuucauucagcacccugaggug

SEQ ID NO: 912657 - RNA, 22 nt, Human
ggucugagugccagggagagaa

SEQ ID NO: 912658 - RNA, 22 nt, Human
acagugauucugcaaaccauau

SEQ ID NO: 912659 - RNA, 22 nt, Human
caugcaggugaccagguguggg

SEQ ID NO: 912660 - RNA, 22 nt, Human
gcuugcagugguuggcaugacc

SEQ ID NO: 912661 - RNA, 22 nt, Human
uuuuauguaauaaacuguacac

SEQ ID NO: 912662 - RNA, 22 nt, Human
gguuuuauuaccccuuaaacac

SEQ ID NO: 912663 - RNA, 22 nt, Human
uauuuaagaugugucauaaaga

SEQ ID NO: 912664 - RNA, 22 nt, Human
ccugcccuagagaugacacaau

SEQ ID NO: 912665 - RNA, 23 nt, Human
auagaagauuauugcaacagucc

SEQ ID NO: 912666 - RNA, 22 nt, Human
cagagccucccuccucugccau

SEQ ID NO: 912667 - RNA, 22 nt, Human
augcagaacguuugugaaacuu

SEQ ID NO: 912668 - RNA, 22 nt, Human
gaccuggaagaacugaggccuu

SEQ ID NO: 912669 - RNA, 23 nt, Human
acaggcaggcauggccaaaugug

SEQ ID NO: 912670 - RNA, 22 nt, Human
gcugaugcaggguugagaggag

SEQ ID NO: 912671 - RNA, 22 nt, Human
cagcagcugguuauaccugugg

SEQ ID NO: 912672 - RNA, 22 nt, Human
ggagaagaggagcuggaagccu

SEQ ID NO: 912673 - RNA, 22 nt, Human
agugcaggagccuggccagagc

SEQ ID NO: 912674 - RNA, 22 nt, Human
agcacugauuuuguugcacuua

SEQ ID NO: 912675 - RNA, 22 nt, Human
agugcugacucugggcacagug

SEQ ID NO: 912676 - RNA, 22 nt, Human
aauguuccacagauauagcaug

SEQ ID NO: 912677 - RNA, 20 nt, Human
ucuaaaguacaguuugugug

SEQ ID NO: 912678 - RNA, 22 nt, Human
aaaugcacagguuuuaaauccu

SEQ ID NO: 912679 - RNA, 22 nt, Human
ucugccuggauuuuggaaagcu

SEQ ID NO: 912680 - RNA, 22 nt, Human
acccaggacaugggcacccgug

SEQ ID NO: 912681 - RNA, 22 nt, Human
uaugaacugcucuuguguuuug

SEQ ID NO: 912682 - RNA, 22 nt, Human
uucaaauccugcuuaugcuacc

SEQ ID NO: 912683 - RNA, 22 nt, Human
ugcccuggaaccaucuacaguc

SEQ ID NO: 912684 - RNA, 22 nt, Human
cagcuggcagcccuggcccugc

SEQ ID NO: 912685 - RNA, 22 nt, Human
cucuggagagguucccauggga

SEQ ID NO: 912686 - RNA, 22 nt, Human
ggccccacgggggaguccuagu

SEQ ID NO: 912687 - RNA, 22 nt, Human
auguuuccuguuggauuggccc

SEQ ID NO: 912688 - RNA, 22 nt, Human
cuguggagcuuguggcaguggg

SEQ ID NO: 912689 - RNA, 22 nt, Human
gcugccuguccugaggaguccg

SEQ ID NO: 912690 - RNA, 22 nt, Human
uggaaauauuugcucauuaucu

SEQ ID NO: 912691 - RNA, 22 nt, Human
gcugcacagaacagucauuggc

SEQ ID NO: 912692 - RNA, 22 nt, Human
ccacuuuguaauguguuauguu

SEQ ID NO: 912693 - RNA, 20 nt, Human
gucuacacgggcaguguaga

SEQ ID NO: 912694 - RNA, 22 nt, Human
gggagggaaggaggcgccgugu

SEQ ID NO: 912695 - RNA, 17 nt, Human
cuggccaguguacuugg

SEQ ID NO: 912696 - RNA, 22 nt, Human
ccagaagacaagaauguucuua

SEQ ID NO: 912697 - RNA, 22 nt, Human
gagccuuugaagcccucagaga

SEQ ID NO: 912698 - RNA, 22 nt, Human
ucuugauuuguaaaagaaggau

SEQ ID NO: 912699 - RNA, 22 nt, Human
cauuucagugucuugugaugaa

SEQ ID NO: 912700 - RNA, 22 nt, Human
uguguccacgcacuggcaugau

SEQ ID NO: 912701 - RNA, 19 nt, Human
acccagagcccuuugcagg

SEQ ID NO: 912702 - RNA, 23 nt, Human
uauuugucucuuaccacugcugu

SEQ ID NO: 912703 - RNA, 22 nt, Human
caggaacgccugguguuggccu

SEQ ID NO: 912704 - RNA, 22 nt, Human
caaggaaguuuuaggagaggaa

SEQ ID NO: 912705 - RNA, 22 nt, Human
uugcauauauuucuaaggaggu

SEQ ID NO: 912706 - RNA, 22 nt, Human
auuagaaaccaagaggcaggcu

SEQ ID NO: 912707 - RNA, 22 nt, Human
ugagggaguguggauacaguag

SEQ ID NO: 912708 - RNA, 17 nt, Human
agccugcugaucucaca

SEQ ID NO: 912709 - RNA, 21 nt, Human
uuucccagcagagauagcugg

SEQ ID NO: 912710 - RNA, 22 nt, Human
agcugaguuaauucaucacuua

SEQ ID NO: 912711 - RNA, 22 nt, Human
uguacaguuuuaacucugaggg

SEQ ID NO: 912712 - RNA, 22 nt, Human
ugagggggguaaucacuggguu

SEQ ID NO: 912713 - RNA, 19 nt, Human
aaguucucagaguucaaag

SEQ ID NO: 912714 - RNA, 22 nt, Human
gcaugcaauguaucagugauag

SEQ ID NO: 912715 - RNA, 22 nt, Human
gccaggccacucccggguccug

SEQ ID NO: 912716 - RNA, 22 nt, Human
acaguuuagaaugccacauagu

SEQ ID NO: 912717 - RNA, 21 nt, Human
uacaaagggaaauucuggcuc

SEQ ID NO: 912718 - RNA, 22 nt, Human
cccccauccaugucaggagagg

SEQ ID NO: 912719 - RNA, 20 nt, Human
uuccacaucuuugcacaugc

SEQ ID NO: 912720 - RNA, 22 nt, Human
uucaaggagauuggagucuacu

SEQ ID NO: 912721 - RNA, 22 nt, Human
agugucaaugcucuguuaaaaa

SEQ ID NO: 912722 - RNA, 22 nt, Human
aagguaauccauaauaguuacu

SEQ ID NO: 912723 - RNA, 22 nt, Human
cagagcuggagaaguggauuua

SEQ ID NO: 912724 - RNA, 22 nt, Human
acacaaacugcuagaaaauugg

SEQ ID NO: 912725 - RNA, 21 nt, Human
ugugugggcauaucugcugca

SEQ ID NO: 912726 - RNA, 22 nt, Human
ugacaguauugauggcaggauu

SEQ ID NO: 912727 - RNA, 22 nt, Human
ugucauaaaacacaagcuguug

SEQ ID NO: 912728 - RNA, 22 nt, Human
cagccuggacagcgaccagagu

SEQ ID NO: 912729 - RNA, 22 nt, Human
ucagaggacuaccuucuccagu

SEQ ID NO: 912730 - RNA, 22 nt, Human
caaagaugccaaaaggaagaca

SEQ ID NO: 912731 - RNA, 22 nt, Human
cucuuuggggugccccacuggu

SEQ ID NO: 912732 - RNA, 22 nt, Human
ucugaggccccugggcaggaug

SEQ ID NO: 912733 - RNA, 18 nt, Human
uuccuaggaacuaagcuu

SEQ ID NO: 912734 - RNA, 22 nt, Human
agccacagagagggagcugcaa

SEQ ID NO: 912735 - RNA, 22 nt, Human
ccacagugaucccugccugcga

SEQ ID NO: 912736 - RNA, 22 nt, Human
agggccagccgacuuccagccu

SEQ ID NO: 912737 - RNA, 22 nt, Human
ggccagcuguggggccgagccu

SEQ ID NO: 912738 - RNA, 22 nt, Human
caggaacaacucccagcaucuc

SEQ ID NO: 912739 - RNA, 22 nt, Human
ugagugccugaacauagaguag

SEQ ID NO: 912740 - RNA, 22 nt, Human
ugcccagcagggagcuaccugg

SEQ ID NO: 912741 - RNA, 22 nt, Human
guuaacacaggacucucugccu

SEQ ID NO: 912742 - RNA, 22 nt, Human
auaauaucgcuccuuuuuuuga

SEQ ID NO: 912743 - RNA, 22 nt, Human
uaggcugggagccugaggcuag

SEQ ID NO: 912744 - RNA, 23 nt, Human
ccucaugaaggucugcuuccugg

SEQ ID NO: 912745 - RNA, 22 nt, Human
agaggcaguauacaauccgagc

SEQ ID NO: 912746 - RNA, 22 nt, Human
aaagaugaucuacaaguucauu

SEQ ID NO: 912747 - RNA, 22 nt, Human
uguuugcauuguuaauucaguc

SEQ ID NO: 912748 - RNA, 22 nt, Human
gcuuggcauuugcugggagcug

SEQ ID NO: 912749 - RNA, 22 nt, Human
ggaucuucagccagcaggugcc

SEQ ID NO: 912750 - RNA, 22 nt, Human
acuagggagaagcacuuacaca

SEQ ID NO: 912751 - RNA, 22 nt, Human
caagaaggcuauaugggccagg

SEQ ID NO: 912752 - RNA, 22 nt, Human
acuccaggauguagaaucagag

SEQ ID NO: 912753 - RNA, 22 nt, Human
ccuauuuguaggcugggccagu

SEQ ID NO: 912754 - RNA, 22 nt, Human
uuaacuuuuauuucugcucgcc

SEQ ID NO: 912755 - RNA, 17 nt, Human
gcuguuucuccagaagu

SEQ ID NO: 912756 - RNA, 22 nt, Human
ugagaauuuucaguuucacuuu

SEQ ID NO: 912757 - RNA, 19 nt, Human
uccuuucuguuccugagau

SEQ ID NO: 912758 - RNA, 22 nt, Human
ccuccuuccugggacagagcug

SEQ ID NO: 912759 - RNA, 17 nt, Human
cagucacaggucuuuuc

SEQ ID NO: 912760 - RNA, 22 nt, Human
gaacuacagugcauuuucuuaa

SEQ ID NO: 912761 - RNA, 21 nt, Human
uggcuucauuugcaacccacu

SEQ ID NO: 912762 - RNA, 20 nt, Human
ggcagcucacuacuuucugu

SEQ ID NO: 912763 - RNA, 22 nt, Human
cauugacaguucuuuaaguugc

SEQ ID NO: 912764 - RNA, 22 nt, Human
cugaggcagagggcagaccaga

SEQ ID NO: 912765 - RNA, 22 nt, Human
ucagaauaaguuaugaaaugaa

SEQ ID NO: 912766 - RNA, 22 nt, Human
uggcagggucuugcuguguugc

SEQ ID NO: 912767 - RNA, 22 nt, Human
agggaggucuggcugcccugag

SEQ ID NO: 912768 - RNA, 22 nt, Human
cccugaugacacgggcaucagg

SEQ ID NO: 912769 - RNA, 22 nt, Human
aauagcuuuggucaccaucugg

SEQ ID NO: 912770 - RNA, 22 nt, Human
guagcuucaaguacucucccug

SEQ ID NO: 912771 - RNA, 23 nt, Human
cagaaaacccagagcucaguccc

SEQ ID NO: 912772 - RNA, 22 nt, Human
ugagcaggugagucuagggcag

SEQ ID NO: 912773 - RNA, 22 nt, Human
aaagaacuuaagaaauuaggcu

SEQ ID NO: 912774 - RNA, 22 nt, Human
acaaggacgucacuuccacggu

SEQ ID NO: 912775 - RNA, 22 nt, Human
aggcccagcugggccaggaaca

SEQ ID NO: 912776 - RNA, 22 nt, Human
aaauugcagaugcuaaaugacu

SEQ ID NO: 912777 - RNA, 22 nt, Human
uccugucugcucacagagcugg

SEQ ID NO: 912778 - RNA, 19 nt, Human
uucauucuuucuacuuacc

SEQ ID NO: 912779 - RNA, 22 nt, Human
ccucugugccucguguccucug

SEQ ID NO: 912780 - RNA, 22 nt, Human
acagcagcuugcgugucugguc

SEQ ID NO: 912781 - RNA, 22 nt, Human
uaacaaguuucauuuauagaau

SEQ ID NO: 912782 - RNA, 22 nt, Human
guagaaucccaguggcuauauu

SEQ ID NO: 912783 - RNA, 22 nt, Human
cacuaaaacuacauuggaaaca

SEQ ID NO: 912784 - RNA, 22 nt, Human
uuauaguaugugcauaugugug

SEQ ID NO: 912785 - RNA, 22 nt, Human
agcuggguggugcugagccuug

SEQ ID NO: 912786 - RNA, 22 nt, Human
agauacaagaggccugacgugu

SEQ ID NO: 912787 - RNA, 22 nt, Human
gagauuucuuuugaugccuguc

SEQ ID NO: 912788 - RNA, 19 nt, Human
caauauauagugaguggau

SEQ ID NO: 912789 - RNA, 22 nt, Human
aaggaggagcggaggcuuguug

SEQ ID NO: 912790 - RNA, 22 nt, Human
ugucuuuagcccauauagacuu

SEQ ID NO: 912791 - RNA, 23 nt, Human
uuuagucaguugacagccauaua

SEQ ID NO: 912792 - RNA, 19 nt, Human
ucagcccaucagacucaca

SEQ ID NO: 912793 - RNA, 22 nt, Human
caaagaaucacucaucuuuagc

SEQ ID NO: 912794 - RNA, 20 nt, Human
ggccucaguguccuuguuug

SEQ ID NO: 912795 - RNA, 22 nt, Human
agcagggcucacauuaguggau

SEQ ID NO: 912796 - RNA, 16 nt, Human
ucccaggccaggugga

SEQ ID NO: 912797 - RNA, 22 nt, Human
cagaacagaaucguguggugag

SEQ ID NO: 912798 - RNA, 22 nt, Human
caguguccucagccagcagcua

SEQ ID NO: 912799 - RNA, 22 nt, Human
ugcagccaucuuucuuggagga

SEQ ID NO: 912800 - RNA, 22 nt, Human
gggggaaguaauuauaaaccaa

SEQ ID NO: 912801 - RNA, 19 nt, Human
agacaugagacacaggaug

SEQ ID NO: 912802 - RNA, 21 nt, Human
cagaggggcuagccuggcugc

SEQ ID NO: 912803 - RNA, 22 nt, Human
gugcccaggcccaaggcaccac

SEQ ID NO: 912804 - RNA, 20 nt, Human
ccugucucacguuccgcccc

SEQ ID NO: 912805 - RNA, 22 nt, Human
uggcaauacauaaucuuaaugg

SEQ ID NO: 912806 - RNA, 22 nt, Human
auuuauguaucuguguagauca

SEQ ID NO: 912807 - RNA, 22 nt, Human
gcagcaaucuucacagugucau

SEQ ID NO: 912808 - RNA, 22 nt, Human
ggcacacaaaggcagcauuuga

SEQ ID NO: 912809 - RNA, 23 nt, Human
aagaaucaguaaguaaggagacc

SEQ ID NO: 912810 - RNA, 22 nt, Human
augggcuguccuaguccagccc

SEQ ID NO: 912811 - RNA, 22 nt, Human
caccagagugaguggacugucg

SEQ ID NO: 912812 - RNA, 21 nt, Human
agcagcagcaguggggcuucu

SEQ ID NO: 912813 - RNA, 22 nt, Human
agaagcacuagaggguauggaa

SEQ ID NO: 912814 - RNA, 22 nt, Human
cagaggccuggcuuggacaccu

SEQ ID NO: 912815 - RNA, 17 nt, Human
aggcuggccuucacagu

SEQ ID NO: 912816 - RNA, 22 nt, Human
auuagaagauagugauuucugc

SEQ ID NO: 912817 - RNA, 22 nt, Human
accuugauggggcuguuggagu

SEQ ID NO: 912818 - RNA, 22 nt, Human
aaagaggauggaguagucagcu

SEQ ID NO: 912819 - RNA, 22 nt, Human
cagccagaaccuaggaugagcu

SEQ ID NO: 912820 - RNA, 22 nt, Human
uguaucuuagugugaaaauauu

SEQ ID NO: 912821 - RNA, 22 nt, Human
acagcucugggugcaggaggug

SEQ ID NO: 912822 - RNA, 22 nt, Human
cauucacaauggauugcuucaa

SEQ ID NO: 912823 - RNA, 22 nt, Human
caugaaacaucagagauuucuc

SEQ ID NO: 912824 - RNA, 22 nt, Human
uuguguacuacaguaugccaca

SEQ ID NO: 912825 - RNA, 22 nt, Human
ccaggccugcaucugcugcgca

SEQ ID NO: 912826 - RNA, 22 nt, Human
ccauuguuuauuuagacuuaau

SEQ ID NO: 912827 - RNA, 22 nt, Human
uccaggagugcugguuagagua

SEQ ID NO: 912828 - RNA, 22 nt, Human
aaagcaaacagaaccccaagcu

SEQ ID NO: 912829 - RNA, 22 nt, Human
caaucuguuagaaaugcagaca

SEQ ID NO: 912830 - RNA, 22 nt, Human
caguugaauggucagacaaggc

SEQ ID NO: 912831 - RNA, 22 nt, Human
uuacacagcuucuauccuugaa

SEQ ID NO: 912832 - RNA, 22 nt, Human
aucuuugcuauuguaaaucacg

SEQ ID NO: 912833 - RNA, 22 nt, Human
cuaagaaauguugugaaugcca

SEQ ID NO: 912834 - RNA, 22 nt, Human
ggugagggaguggaacgaggug

SEQ ID NO: 912835 - RNA, 19 nt, Human
uuagaagccauagguacag

SEQ ID NO: 912836 - RNA, 20 nt, Human
agcccaggccugugugaguc

SEQ ID NO: 912837 - RNA, 22 nt, Human
ucaggagacuuaugucacagug

SEQ ID NO: 912838 - RNA, 22 nt, Human
ccugaccuauuuuucucagcug

SEQ ID NO: 912839 - RNA, 22 nt, Human
guguggggaggagagagcccuu

SEQ ID NO: 912840 - RNA, 19 nt, Human
ccagccuuuccagugauug

SEQ ID NO: 912841 - RNA, 21 nt, Human
ugggccagaucugaguuucua

SEQ ID NO: 912842 - RNA, 23 nt, Human
cuugcagggcuggaggcuuagaa

SEQ ID NO: 912843 - RNA, 22 nt, Human
guuuuccacuggauuguuugga

SEQ ID NO: 912844 - RNA, 22 nt, Human
uuugacagaaaguuauuauuuu

SEQ ID NO: 912845 - RNA, 22 nt, Human
ugcaagaaaugugaagcuacaa

SEQ ID NO: 912846 - RNA, 22 nt, Human
ucccaggcuaccagugagguca

SEQ ID NO: 912847 - RNA, 21 nt, Human
gugcaucagaucaguggaguc

SEQ ID NO: 912848 - RNA, 22 nt, Human
aaguaguuaguccgccugcucu

SEQ ID NO: 912849 - RNA, 20 nt, Human
acaaagacuggaaaagcaag

SEQ ID NO: 912850 - RNA, 22 nt, Human
uuccuucugaagccuuuguguu

SEQ ID NO: 912851 - RNA, 17 nt, Human
uccugugggugcagcag

SEQ ID NO: 912852 - RNA, 22 nt, Human
gccaggcuggccagcaccuucu

SEQ ID NO: 912853 - RNA, 22 nt, Human
cugagcagcuguuacagagugu

SEQ ID NO: 912854 - RNA, 22 nt, Human
acaauaauguauugccaaaagu

SEQ ID NO: 912855 - RNA, 22 nt, Human
agucaggagcugcugcauugua

SEQ ID NO: 912856 - RNA, 22 nt, Human
ggaaaagaaagggacugauugg

SEQ ID NO: 912857 - RNA, 22 nt, Human
gccacucaugggaggugugcaa

SEQ ID NO: 912858 - RNA, 22 nt, Human
agagccacaguggauaggagcc

SEQ ID NO: 912859 - RNA, 22 nt, Human
uuuggucaggguaggacaguug

SEQ ID NO: 912860 - RNA, 22 nt, Human
ggcugcaggcuucccuccagca

SEQ ID NO: 912861 - RNA, 22 nt, Human
agggagcucacaguccaguaga

SEQ ID NO: 912862 - RNA, 22 nt, Human
cuuggaaucaaguuuuuggaga

SEQ ID NO: 912863 - RNA, 21 nt, Human
aauuacagauggaauuacaga

SEQ ID NO: 912864 - RNA, 22 nt, Human
caggaaugaaaggucaggguug

SEQ ID NO: 912865 - RNA, 22 nt, Human
cugggccagucucggccgcucu

SEQ ID NO: 912866 - RNA, 22 nt, Human
ccuccagcauuacuggcccaug

SEQ ID NO: 912867 - RNA, 22 nt, Human
ucuucugagacuucucuuuggu

SEQ ID NO: 912868 - RNA, 22 nt, Human
gcggagggagauaggccuugcu

SEQ ID NO: 912869 - RNA, 22 nt, Human
uuaauuaacuagccaaccacua

SEQ ID NO: 912870 - RNA, 18 nt, Human
uaaguaaggucauauggg

SEQ ID NO: 912871 - RNA, 22 nt, Human
ucugcacauuuuaccaauacuc

SEQ ID NO: 912872 - RNA, 22 nt, Human
gagguggugguggaggcauagc

SEQ ID NO: 912873 - RNA, 22 nt, Human
aacagcuauuagaacuucaugg

SEQ ID NO: 912874 - RNA, 22 nt, Human
cugcuguguuccuccugcaucu

SEQ ID NO: 912875 - RNA, 22 nt, Human
ugucucuagggcaaugugaacu

SEQ ID NO: 912876 - RNA, 22 nt, Human
ugccugagguggucugcaaaug

SEQ ID NO: 912877 - RNA, 23 nt, Human
aggguccagggaucaccaggugu

SEQ ID NO: 912878 - RNA, 22 nt, Human
aguuuuuccugauuuuacagaa

SEQ ID NO: 912879 - RNA, 22 nt, Human
uucaaacacuggcuuagccaau

SEQ ID NO: 912880 - RNA, 22 nt, Human
uacagaaugauguguuuaaaua

SEQ ID NO: 912881 - RNA, 22 nt, Human
gcaggcuaugaguuucucacca

SEQ ID NO: 912882 - RNA, 22 nt, Human
auauuugcugagaaggagggag

SEQ ID NO: 912883 - RNA, 19 nt, Human
ucacagacagagcaaucac

SEQ ID NO: 912884 - RNA, 17 nt, Human
aaacuucacggucagcc

SEQ ID NO: 912885 - RNA, 22 nt, Human
cccagccuacucugccauagca

SEQ ID NO: 912886 - RNA, 20 nt, Human
aggcccagugaauauauugc

SEQ ID NO: 912887 - RNA, 19 nt, Human
agcagcuggagguggagug

SEQ ID NO: 912888 - RNA, 22 nt, Human
uugagaggcuguugacauucug

SEQ ID NO: 912889 - RNA, 22 nt, Human
uucauaaguugguguugacuuu

SEQ ID NO: 912890 - RNA, 22 nt, Human
gugugagcagaaaccaugagua

SEQ ID NO: 912891 - RNA, 22 nt, Human
aagggcuggaauaucucuuaga

SEQ ID NO: 912892 - RNA, 22 nt, Human
ccagaaccaaaagcauggagua

SEQ ID NO: 912893 - RNA, 22 nt, Human
guuuaaucagaggaauuauaga

SEQ ID NO: 912894 - RNA, 22 nt, Human
acaguguggugauggcacuugc

SEQ ID NO: 912895 - RNA, 22 nt, Human
ggcaggcaaugaggaugggaag

SEQ ID NO: 912896 - RNA, 22 nt, Human
gagcaagauccuguuuuucuau

SEQ ID NO: 912897 - RNA, 22 nt, Human
caggagcugggucuggaagcag

SEQ ID NO: 912898 - RNA, 22 nt, Human
aguuauuuuacauggaaguuug

SEQ ID NO: 912899 - RNA, 22 nt, Human
gaaggaggcguuagcccuagga

SEQ ID NO: 912900 - RNA, 22 nt, Human
gcauucauguccuuccugaacg

SEQ ID NO: 912901 - RNA, 22 nt, Human
uuacauaaaaguucacguaggc

SEQ ID NO: 912902 - RNA, 22 nt, Human
cagcagcaaggugaggguggag

SEQ ID NO: 912903 - RNA, 22 nt, Human
ucucacaguuguccacugaaaa

SEQ ID NO: 912904 - RNA, 22 nt, Human
cagcaggcagccauuucacugu

SEQ ID NO: 912905 - RNA, 22 nt, Human
uggagcugguucuggggaagcu

SEQ ID NO: 912906 - RNA, 22 nt, Human
ggcaggcagauggcugcaccaa

SEQ ID NO: 912907 - RNA, 22 nt, Human
cgagguauagggaggguaucuc

SEQ ID NO: 912908 - RNA, 22 nt, Human
acagugauugguuuggggguga

SEQ ID NO: 912909 - RNA, 22 nt, Human
gaggggagcaugaucuagauug

SEQ ID NO: 912910 - RNA, 22 nt, Human
ucuucaaaaacugcaccuugcu

SEQ ID NO: 912911 - RNA, 22 nt, Human
gggcugcuugcuggagacagac

SEQ ID NO: 912912 - RNA, 22 nt, Human
auguucuuugugauucugagcu

SEQ ID NO: 912913 - RNA, 22 nt, Human
agaccucugcucccuucauggu

SEQ ID NO: 912914 - RNA, 22 nt, Human
acagugcuucugauaugaugcc

SEQ ID NO: 912915 - RNA, 22 nt, Human
ggaauguucuggucugguucau

SEQ ID NO: 912916 - RNA, 22 nt, Human
cuagucacgucuuucaguuacc

SEQ ID NO: 912917 - RNA, 22 nt, Human
aaagagaaaaugaucuguacau

SEQ ID NO: 912918 - RNA, 22 nt, Human
ggaaggcuugaguucccagguc

SEQ ID NO: 912919 - RNA, 22 nt, Human
auccauuuucucucuguggggu

SEQ ID NO: 912920 - RNA, 22 nt, Human
ucuuugcaggccaaauuguuaa

SEQ ID NO: 912921 - RNA, 22 nt, Human
cacaggaagcaagccuggggcc

SEQ ID NO: 912922 - RNA, 22 nt, Human
cugaaaggguuacauaguaagu

SEQ ID NO: 912923 - RNA, 22 nt, Human
uguacagaaggcacuaagguca

SEQ ID NO: 912924 - RNA, 22 nt, Human
ugcagcugcugguggcugaaag

SEQ ID NO: 912925 - RNA, 22 nt, Human
uacacauaaaaugcucauggua

SEQ ID NO: 912926 - RNA, 22 nt, Human
acaggcaagucacacaacuugu

SEQ ID NO: 912927 - RNA, 22 nt, Human
accagagcuuacaugcuagaaa

SEQ ID NO: 912928 - RNA, 22 nt, Human
ugcauauuugauugagauaccu

SEQ ID NO: 912929 - RNA, 22 nt, Human
accagaggcucugccaccucca

SEQ ID NO: 912930 - RNA, 21 nt, Human
ugcucacagaugugcucagug

SEQ ID NO: 912931 - RNA, 22 nt, Human
cuuggaaaguuaucauuuuccu

SEQ ID NO: 912932 - RNA, 22 nt, Human
acaaggcucuaauuucauugaa

SEQ ID NO: 912933 - RNA, 20 nt, Human
cccuccagcaaccaggacuu

SEQ ID NO: 912934 - RNA, 22 nt, Human
ugcuucuguuucauugaucuua

SEQ ID NO: 912935 - RNA, 22 nt, Human
ugaggaugguuaaagaacauug

SEQ ID NO: 912936 - RNA, 22 nt, Human
uuuguucaacaggugaaauaga

SEQ ID NO: 912937 - RNA, 22 nt, Human
uucacaagucuggaauaugcua

SEQ ID NO: 912938 - RNA, 22 nt, Human
cagcagagguuggaacaguucu

SEQ ID NO: 912939 - RNA, 22 nt, Human
cugugucugccugggauccauu

SEQ ID NO: 912940 - RNA, 22 nt, Human
agggacaguuacaucaucagac

SEQ ID NO: 912941 - RNA, 22 nt, Human
auacaucuugucagauucaugu

SEQ ID NO: 912942 - RNA, 22 nt, Human
uggcccagugcuuaugcucuga

SEQ ID NO: 912943 - RNA, 22 nt, Human
aguaugaagaauacauagauga

SEQ ID NO: 912944 - RNA, 22 nt, Human
gcuggucacucugggagcugcu

SEQ ID NO: 912945 - RNA, 22 nt, Human
cacagaaaaaggcuugaaaauc

SEQ ID NO: 912946 - RNA, 22 nt, Human
agugggggcuggcucugucugu

SEQ ID NO: 912947 - RNA, 22 nt, Human
aaugaacaaauggugcugcuug

SEQ ID NO: 912948 - RNA, 22 nt, Human
uggccugggccugccggugcaa

SEQ ID NO: 912949 - RNA, 22 nt, Human
gauaaagcaaggaugacugaag

SEQ ID NO: 912950 - RNA, 20 nt, Human
ugagccuugaggagugacug

SEQ ID NO: 912951 - RNA, 20 nt, Human
ccuuccccacccgcugaggu

SEQ ID NO: 912952 - RNA, 22 nt, Human
ugggagagcuucaugccuucag

SEQ ID NO: 912953 - RNA, 22 nt, Human
aguggggagguccaggccaccc

SEQ ID NO: 912954 - RNA, 22 nt, Human
acacuuaacuucugagaauaaa

SEQ ID NO: 912955 - RNA, 17 nt, Human
ucaauacacugcuuuua

SEQ ID NO: 912956 - RNA, 22 nt, Human
guuuccucugcugguuuucauu

SEQ ID NO: 912957 - RNA, 22 nt, Human
ccacugucagaggggcugugcc

SEQ ID NO: 912958 - RNA, 22 nt, Human
ugcagcaauggucccugcccuc

SEQ ID NO: 912959 - RNA, 22 nt, Human
ucuccugacaugucuggaggaa

SEQ ID NO: 912960 - RNA, 22 nt, Human
aucuacagcugucugcacagua

SEQ ID NO: 912961 - RNA, 22 nt, Human
agcagacauaucucaugucaca

SEQ ID NO: 912962 - RNA, 22 nt, Human
gucauuuugcugcauauuuaga

SEQ ID NO: 912963 - RNA, 22 nt, Human
gucucaguccgugcuguucagg

SEQ ID NO: 912964 - RNA, 22 nt, Human
ucauggauuaaauuauuaaguu

SEQ ID NO: 912965 - RNA, 22 nt, Human
gucuguguuuucaggccuuugu

SEQ ID NO: 912966 - RNA, 22 nt, Human
ucugaagcagaaaauggggaua

SEQ ID NO: 912967 - RNA, 22 nt, Human
gcugagcagccuaagcaaauuu

SEQ ID NO: 912968 - RNA, 22 nt, Human
uaagauaauaaguaugucuaug

SEQ ID NO: 912969 - RNA, 22 nt, Human
cccugggacccgcugcagaggc

SEQ ID NO: 912970 - RNA, 22 nt, Human
aucuguguaugugaccuuaucu

SEQ ID NO: 912971 - RNA, 22 nt, Human
gcuguguggcaaagggauuaca

SEQ ID NO: 912972 - RNA, 22 nt, Human
accaggagcauuuuuuauuagu

SEQ ID NO: 912973 - RNA, 23 nt, Human
uggacaggguaacuggugguuuu

SEQ ID NO: 912974 - RNA, 22 nt, Human
uuugacuucugggcauuuuggu

SEQ ID NO: 912975 - RNA, 22 nt, Human
cuacccaggcuuagagggcugg

SEQ ID NO: 912976 - RNA, 22 nt, Human
agugucuguguuuucuauugcu

SEQ ID NO: 912977 - RNA, 19 nt, Human
ucucucuguacauuagaua

SEQ ID NO: 912978 - RNA, 21 nt, Human
ugcuuuaugggaaaaauguca

SEQ ID NO: 912979 - RNA, 22 nt, Human
acagauaaauuuauaggagugu

SEQ ID NO: 912980 - RNA, 22 nt, Human
aaugcuucaaccucccacaugu

SEQ ID NO: 912981 - RNA, 22 nt, Human
auucuucaccauggauaauuug

SEQ ID NO: 912982 - RNA, 22 nt, Human
gaaaugucauagucuucaagcc

SEQ ID NO: 912983 - RNA, 21 nt, Human
caggccaaaagguucaacauu

SEQ ID NO: 912984 - RNA, 22 nt, Human
uuuacagagagagaacuggacu

SEQ ID NO: 912985 - RNA, 22 nt, Human
ucuuucagcucuucaggaccca

SEQ ID NO: 912986 - RNA, 22 nt, Human
cuggauaagaguuuuacuuccu

SEQ ID NO: 912987 - RNA, 22 nt, Human
aggcugcguuagccucacuccc

SEQ ID NO: 912988 - RNA, 22 nt, Human
cagggccuccuaaggcaucuaa

SEQ ID NO: 912989 - RNA, 19 nt, Human
ugccugucaguagaucuca

SEQ ID NO: 912990 - RNA, 22 nt, Human
ugacagcugaggcccagaguac

SEQ ID NO: 912991 - RNA, 22 nt, Human
gccucugauggaggccagcgcu

SEQ ID NO: 912992 - RNA, 22 nt, Human
aucacauugccagugauuaccc

SEQ ID NO: 912993 - RNA, 22 nt, Human
ugcucaugcuggggacagaugu

SEQ ID NO: 912994 - RNA, 22 nt, Human
agccaggaagagaggccucacc

SEQ ID NO: 912995 - RNA, 20 nt, Human
gcucugugguuugagucucc

SEQ ID NO: 912996 - RNA, 22 nt, Human
gggcuggaaaaacaacauacaa

SEQ ID NO: 912997 - RNA, 22 nt, Human
uuggaagaccagaggccuuguc

SEQ ID NO: 912998 - RNA, 22 nt, Human
auuauauaaaauucuggaagcu

SEQ ID NO: 912999 - RNA, 22 nt, Human
aacuguggcauguugaauuugu

SEQ ID NO: 913000 - RNA, 22 nt, Human
aaucuucacagagaaaauuagg

SEQ ID NO: 913001 - RNA, 22 nt, Human
gagaaagcuucagaaauggccu

SEQ ID NO: 913002 - RNA, 22 nt, Human
uaggacuuagaacuggaagaca

SEQ ID NO: 913003 - RNA, 19 nt, Human
ugcaggaggacugagcaga

SEQ ID NO: 913004 - RNA, 22 nt, Human
uuauguguguguauacauacaa

SEQ ID NO: 913005 - RNA, 22 nt, Human
uuagaaacuuuggaggauagau

SEQ ID NO: 913006 - RNA, 22 nt, Human
ucuggucccuuuuccugcaguc

SEQ ID NO: 913007 - RNA, 22 nt, Human
uacuuuuagccuauuugauucu

SEQ ID NO: 913008 - RNA, 22 nt, Human
aaggcacuugcccagagcugca

SEQ ID NO: 913009 - RNA, 22 nt, Human
ucccagaguucaaugggaaggu

SEQ ID NO: 913010 - RNA, 22 nt, Human
gcgguggggaaaggaggugcug

SEQ ID NO: 913011 - RNA, 22 nt, Human
ggagaugccagaauugcaaauu

SEQ ID NO: 913012 - RNA, 22 nt, Human
agucaggagauauuuugauaug

SEQ ID NO: 913013 - RNA, 22 nt, Human
ggccugcuucucagugagcuug

SEQ ID NO: 913014 - RNA, 22 nt, Human
ccauggagcgggugagugagug

SEQ ID NO: 913015 - RNA, 22 nt, Human
uggggagagguaucauugagau

SEQ ID NO: 913016 - RNA, 22 nt, Human
caggcacugcacuaccacuuuu

SEQ ID NO: 913017 - RNA, 18 nt, Human
ucaggagacacagacgca

SEQ ID NO: 913018 - RNA, 22 nt, Human
gagcugcugugaggggagcuuc

SEQ ID NO: 913019 - RNA, 19 nt, Human
uucuugaacauguuucuca

SEQ ID NO: 913020 - RNA, 22 nt, Human
acaugucuccacccaucuuaaa

SEQ ID NO: 913021 - RNA, 22 nt, Human
gcucagcuggagagggacgggu

SEQ ID NO: 913022 - RNA, 22 nt, Human
ccagggcacuuaggcccagccc

SEQ ID NO: 913023 - RNA, 22 nt, Human
uagggaggaggguuuucaaauc

SEQ ID NO: 913024 - RNA, 22 nt, Human
guggcaggagacuggaagaugg

SEQ ID NO: 913025 - RNA, 22 nt, Human
cucuggagggaggcugagcugg

SEQ ID NO: 913026 - RNA, 22 nt, Human
aaguuuuaacaaguacuuacua

SEQ ID NO: 913027 - RNA, 23 nt, Human
ccugccuguucuaacuccauuuc

SEQ ID NO: 913028 - RNA, 22 nt, Human
uggcucugaccagguagaggag

SEQ ID NO: 913029 - RNA, 22 nt, Human
aggcuuggagguucuguagcca

SEQ ID NO: 913030 - RNA, 22 nt, Human
aaggagcucccggcagaccagg

SEQ ID NO: 913031 - RNA, 22 nt, Human
acugucaugcauuauggcaugu

SEQ ID NO: 913032 - RNA, 22 nt, Human
gcuagcuggguuucacugugga

SEQ ID NO: 913033 - RNA, 22 nt, Human
aacacaguuuuccaaaauagag

SEQ ID NO: 913034 - RNA, 22 nt, Human
gccuguguccuucccagugggg

SEQ ID NO: 913035 - RNA, 22 nt, Human
uuuccuucccuggaugagaagu

SEQ ID NO: 913036 - RNA, 22 nt, Human
cuagagaauggcaaagauuaga

SEQ ID NO: 913037 - RNA, 22 nt, Human
uuucuucuguuuguaguuacac

SEQ ID NO: 913038 - RNA, 22 nt, Human
gagcugcugguugcuggugccu

SEQ ID NO: 913039 - RNA, 22 nt, Human
uaagguuuguggggagcaaaag

SEQ ID NO: 913040 - RNA, 22 nt, Human
agggggcaucagguccuggcuc

SEQ ID NO: 913041 - RNA, 22 nt, Human
aucaucuugcuuucuguuuacu

SEQ ID NO: 913042 - RNA, 22 nt, Human
cacuaaauguuucaauguggga

SEQ ID NO: 913043 - RNA, 22 nt, Human
agugggcagugcgcucggaugc

SEQ ID NO: 913044 - RNA, 22 nt, Human
cugggcucugcaguugauguuu

SEQ ID NO: 913045 - RNA, 22 nt, Human
ugggcucuccuggaggacaaca

SEQ ID NO: 913046 - RNA, 22 nt, Human
aacaaaugauaccaguucucaa

SEQ ID NO: 913047 - RNA, 22 nt, Human
aggcaggcaaguucauaugagg

SEQ ID NO: 913048 - RNA, 20 nt, Human
acacaguagcaauuagugca

SEQ ID NO: 913049 - RNA, 22 nt, Human
ucucugggaucagguggcccag

SEQ ID NO: 913050 - RNA, 22 nt, Human
gagcuuuuauaccuucucucag

SEQ ID NO: 913051 - RNA, 20 nt, Human
aaauguauaggacccuucua

SEQ ID NO: 913052 - RNA, 20 nt, Human
guggaaugcacucugugcug

SEQ ID NO: 913053 - RNA, 21 nt, Human
cccuguguuccacagcagaca

SEQ ID NO: 913054 - RNA, 18 nt, Human
gggcugugagaugggaag

SEQ ID NO: 913055 - RNA, 22 nt, Human
auaaugugaagauaaugcaaga

SEQ ID NO: 913056 - RNA, 22 nt, Human
gguucucuaacuuugacuggag

SEQ ID NO: 913057 - RNA, 22 nt, Human
caaaugaagggagcugaagucu

SEQ ID NO: 913058 - RNA, 22 nt, Human
agcuaucucaggcacucacauu

SEQ ID NO: 913059 - RNA, 22 nt, Human
auuagcaaucacgcagucauuu

SEQ ID NO: 913060 - RNA, 22 nt, Human
acagccaggcccagcacgcagg

SEQ ID NO: 913061 - RNA, 22 nt, Human
uaucaaaaggaguugaaagggg

SEQ ID NO: 913062 - RNA, 22 nt, Human
uaguggagguggucugugaacu

SEQ ID NO: 913063 - RNA, 22 nt, Human
aagacacuaagcuuucaggaua

SEQ ID NO: 913064 - RNA, 22 nt, Human
acaggggcuccgaaggugaggg

SEQ ID NO: 913065 - RNA, 22 nt, Human
ccugcacaugugugcgccugua

SEQ ID NO: 913066 - RNA, 22 nt, Human
gaggguggguuucuugcacguc

SEQ ID NO: 913067 - RNA, 22 nt, Human
gggucacuuuugcuauguuggc

SEQ ID NO: 913068 - RNA, 22 nt, Human
agcccugccucuccaaugccca

SEQ ID NO: 913069 - RNA, 22 nt, Human
ucccagcagggccgaccagccu

SEQ ID NO: 913070 - RNA, 22 nt, Human
gggcuccaucggacuuggguuu

SEQ ID NO: 913071 - RNA, 22 nt, Human
uuagaaccaggguuacgauucu

SEQ ID NO: 913072 - RNA, 22 nt, Human
cagcugcuuucagcaggaggga

SEQ ID NO: 913073 - RNA, 22 nt, Human
ggaggccaaagugugggcggcu

SEQ ID NO: 913074 - RNA, 22 nt, Human
uuaaucaaauuuacaacccagu

SEQ ID NO: 913075 - RNA, 21 nt, Human
cucaggcuggcagcaggcuag

SEQ ID NO: 913076 - RNA, 22 nt, Human
auaaggaauuuagaauagggaa

SEQ ID NO: 913077 - RNA, 22 nt, Human
ccccaggaagccucagauuugc

SEQ ID NO: 913078 - RNA, 22 nt, Human
caggggcuguuugccucaggcc

SEQ ID NO: 913079 - RNA, 22 nt, Human
acagaauacucauaagaagggg

SEQ ID NO: 913080 - RNA, 22 nt, Human
aacuguaagugguuggaagaag

SEQ ID NO: 913081 - RNA, 22 nt, Human
ucauaaaaugcuccugauauug

SEQ ID NO: 913082 - RNA, 22 nt, Human
ugucaccuugcucauccucgga

SEQ ID NO: 913083 - RNA, 19 nt, Human
acagggcuuggccugacau

SEQ ID NO: 913084 - RNA, 22 nt, Human
ucaagaacuuaggagcaagcca

SEQ ID NO: 913085 - RNA, 22 nt, Human
cuauucugcuugaaauuauucu

SEQ ID NO: 913086 - RNA, 22 nt, Human
gcuuuggaugugugccugaggu

SEQ ID NO: 913087 - RNA, 17 nt, Human
cauccgugagcucggca

SEQ ID NO: 913088 - RNA, 22 nt, Human
gaaggcauucuauucuacauau

SEQ ID NO: 913089 - RNA, 22 nt, Human
auuauucaacacuugagaaauu

SEQ ID NO: 913090 - RNA, 18 nt, Human
cucugaccgccacuugcu

SEQ ID NO: 913091 - RNA, 22 nt, Human
gcugccugcuucaugugggaga

SEQ ID NO: 913092 - RNA, 22 nt, Human
ggccagaguugauggcaucuug

SEQ ID NO: 913093 - RNA, 22 nt, Human
cagacauggcgccaagugcuag

SEQ ID NO: 913094 - RNA, 22 nt, Human
agaggccagcaaccacaguaaa

SEQ ID NO: 913095 - RNA, 22 nt, Human
cagaggccuuucuacagugaua

SEQ ID NO: 913096 - RNA, 22 nt, Human
ucaugcaguuucuuaucugcca

SEQ ID NO: 913097 - RNA, 22 nt, Human
uugcuguaguguucugauguca

SEQ ID NO: 913098 - RNA, 17 nt, Human
gugcagggaugaaggau

SEQ ID NO: 913099 - RNA, 22 nt, Human
uucuaugcuaguggaaagcuuc

SEQ ID NO: 913100 - RNA, 22 nt, Human
agcccaaggcuucccugcuggc

SEQ ID NO: 913101 - RNA, 22 nt, Human
augagguaguuuggagaagagc

SEQ ID NO: 913102 - RNA, 22 nt, Human
uaaagugcucauaaaaauggau

SEQ ID NO: 913103 - RNA, 22 nt, Human
cuggcucccagcuuucagggag

SEQ ID NO: 913104 - RNA, 22 nt, Human
ccccagagugagggauugagug

SEQ ID NO: 913105 - RNA, 22 nt, Human
ugacaaguacauaauuucaugu

SEQ ID NO: 913106 - RNA, 22 nt, Human
cauauuucagucuaagaugugu

SEQ ID NO: 913107 - RNA, 22 nt, Human
ggcucaggacugcagcguagag

SEQ ID NO: 913108 - RNA, 22 nt, Human
uucuuaagaggguuaagugaag

SEQ ID NO: 913109 - RNA, 22 nt, Human
ucaguguuuaccguauguuguu

SEQ ID NO: 913110 - RNA, 22 nt, Human
agagccuguuuugugggagaug

SEQ ID NO: 913111 - RNA, 22 nt, Human
acuuuccugccaaggccagagu

SEQ ID NO: 913112 - RNA, 22 nt, Human
agcuguggauuggguacuuucu

SEQ ID NO: 913113 - RNA, 22 nt, Human
cagcugcugaggaagggguugg

SEQ ID NO: 913114 - RNA, 22 nt, Human
uguggggacugaguggaggcuu

SEQ ID NO: 913115 - RNA, 22 nt, Human
aacugcuuugugagcuuucugg

SEQ ID NO: 913116 - RNA, 22 nt, Human
uuaacauuuaguguaccccugu

SEQ ID NO: 913117 - RNA, 22 nt, Human
ucauguacauguaagucagaaa

SEQ ID NO: 913118 - RNA, 22 nt, Human
aauucuagcccaggcaaaacua

SEQ ID NO: 913119 - RNA, 22 nt, Human
aaguuuagaacuauaagaguga

SEQ ID NO: 913120 - RNA, 22 nt, Human
aucagaauggagcccacauggu

SEQ ID NO: 913121 - RNA, 22 nt, Human
caaauagaagguacucagagaa

SEQ ID NO: 913122 - RNA, 22 nt, Human
gcagacacuugaggugggcuuu

SEQ ID NO: 913123 - RNA, 22 nt, Human
ggaagcugaacuuagcaaggaa

SEQ ID NO: 913124 - RNA, 22 nt, Human
aaauggguuugauucucagcca

SEQ ID NO: 913125 - RNA, 22 nt, Human
acaucaucgugcacauacauaa

SEQ ID NO: 913126 - RNA, 19 nt, Human
aggcuggagacaccaggcc

SEQ ID NO: 913127 - RNA, 22 nt, Human
auggggagagaagggcugagcu

SEQ ID NO: 913128 - RNA, 22 nt, Human
ggcucccacccauagggcgagu

SEQ ID NO: 913129 - RNA, 22 nt, Human
uugcucuccagaggcucacagc

SEQ ID NO: 913130 - RNA, 22 nt, Human
ugacagcugagccccaggcaag

SEQ ID NO: 913131 - RNA, 22 nt, Human
agguuaggaaugggagguaaug

SEQ ID NO: 913132 - RNA, 22 nt, Human
cagaggccaggcugccugacug

SEQ ID NO: 913133 - RNA, 22 nt, Human
uggaaugucauaccauaaaaga

SEQ ID NO: 913134 - RNA, 22 nt, Human
aaacagugcaggaaguuaagca

SEQ ID NO: 913135 - RNA, 22 nt, Human
gguggcagaggugcaucagccc

SEQ ID NO: 913136 - RNA, 22 nt, Human
gugugcauggagggggcaguga

SEQ ID NO: 913137 - RNA, 22 nt, Human
agugaggaaauccauuaucaag

SEQ ID NO: 913138 - RNA, 22 nt, Human
auguacaaucuaucacaagaag

SEQ ID NO: 913139 - RNA, 22 nt, Human
uucuacaaauauuuacuguucc

SEQ ID NO: 913140 - RNA, 23 nt, Human
ucucaagccagaccaggccucgc

SEQ ID NO: 913141 - RNA, 22 nt, Human
uuuaguuauugcacagaauuag

SEQ ID NO: 913142 - RNA, 20 nt, Human
uacagaaacaggacuuuugg

SEQ ID NO: 913143 - RNA, 21 nt, Human
cugauaauuguuaaauuauuu

SEQ ID NO: 913144 - RNA, 22 nt, Human
cuguccauggcaaugaugcaga

SEQ ID NO: 913145 - RNA, 22 nt, Human
caugugggacaaucucagguau

SEQ ID NO: 913146 - RNA, 22 nt, Human
ugaacagucauuuagaaugugc

SEQ ID NO: 913147 - RNA, 22 nt, Human
aauccacggcaacacugggccc

SEQ ID NO: 913148 - RNA, 22 nt, Human
aaaguucuaaaacucuuuguga

SEQ ID NO: 913149 - RNA, 23 nt, Human
aggcagcuggguagcaucuuucu

SEQ ID NO: 913150 - RNA, 22 nt, Human
ugcacacauuaaggauacacag

SEQ ID NO: 913151 - RNA, 22 nt, Human
uacuuguucuuucaagagauag

SEQ ID NO: 913152 - RNA, 22 nt, Human
uggcuucacaauuucauaacua

SEQ ID NO: 913153 - RNA, 22 nt, Human
agacccugcauuuuccaggguu

SEQ ID NO: 913154 - RNA, 22 nt, Human
ucagccagguaauguggagaug

SEQ ID NO: 913155 - RNA, 22 nt, Human
aggugcuggaguagaagaaaaa

SEQ ID NO: 913156 - RNA, 22 nt, Human
cuggcugcuuguagacucgacu

SEQ ID NO: 913157 - RNA, 22 nt, Human
guuuccuacacuguaguauuau

SEQ ID NO: 913158 - RNA, 22 nt, Human
uaagaacaucuguccccagauu

SEQ ID NO: 913159 - RNA, 22 nt, Human
caaaauguucuggcaccuuuaa

SEQ ID NO: 913160 - RNA, 22 nt, Human
ucugucuuugagaucucagccu

SEQ ID NO: 913161 - RNA, 22 nt, Human
ucaggacacuuggcacaagguc

SEQ ID NO: 913162 - RNA, 22 nt, Human
uuguagaaucauuauuucuagu

SEQ ID NO: 913163 - RNA, 22 nt, Human
uagguuuuccuaaaauucuggu

SEQ ID NO: 913164 - RNA, 22 nt, Human
aauguuuugcauuaguuuucua

SEQ ID NO: 913165 - RNA, 22 nt, Human
ugagaugguucacagagaaggc

SEQ ID NO: 913166 - RNA, 22 nt, Human
auucacaaaaugauauagauac

SEQ ID NO: 913167 - RNA, 16 nt, Human
gcugaagugaguauag

SEQ ID NO: 913168 - RNA, 22 nt, Human
aggcuuuaagcaagcauauugu

SEQ ID NO: 913169 - RNA, 20 nt, Human
augauucugggcuacacugg

SEQ ID NO: 913170 - RNA, 22 nt, Human
cagcaccuccgcaguucaccug

SEQ ID NO: 913171 - RNA, 22 nt, Human
uacauucccccaauuaccaaug

SEQ ID NO: 913172 - RNA, 22 nt, Human
cuucagggaggagcauggguuc

SEQ ID NO: 913173 - RNA, 22 nt, Human
ucagaaauagcucuaagcuccu

SEQ ID NO: 913174 - RNA, 22 nt, Human
ugaucauccaguuucuugucca

SEQ ID NO: 913175 - RNA, 22 nt, Human
ccaggcugccgaggaaagaaag

SEQ ID NO: 913176 - RNA, 22 nt, Human
gaggggcaaugagggaaagagu

SEQ ID NO: 913177 - RNA, 22 nt, Human
gcucggagucccaccugggaaa

SEQ ID NO: 913178 - RNA, 22 nt, Human
gugcauauguguguauacaaac

SEQ ID NO: 913179 - RNA, 22 nt, Human
uccaggccuggcuccauucagu

SEQ ID NO: 913180 - RNA, 22 nt, Human
ugcauacugaaucugccaucac

SEQ ID NO: 913181 - RNA, 22 nt, Human
cugaucccauuggcaguccagu

SEQ ID NO: 913182 - RNA, 20 nt, Human
uacuugaauguugcagcagu

SEQ ID NO: 913183 - RNA, 22 nt, Human
agucaggacacagcaugaacau

SEQ ID NO: 913184 - RNA, 22 nt, Human
auuucuguggcuucauucuccu

SEQ ID NO: 913185 - RNA, 22 nt, Human
uuuguucugaaaaucuucccuu

SEQ ID NO: 913186 - RNA, 22 nt, Human
uagcaaggacaacauaugagag

SEQ ID NO: 913187 - RNA, 22 nt, Human
gacugccuuuuugagcaaaaug

SEQ ID NO: 913188 - RNA, 22 nt, Human
ucugcccuuggcucucuuguug

SEQ ID NO: 913189 - RNA, 22 nt, Human
cagguauaacgugcauguugua

SEQ ID NO: 913190 - RNA, 22 nt, Human
cagaggaaggcucugggaaugu

SEQ ID NO: 913191 - RNA, 22 nt, Human
ggccacauguggcugcucguau

SEQ ID NO: 913192 - RNA, 22 nt, Human
ugguaaauauguccauucucuu

SEQ ID NO: 913193 - RNA, 22 nt, Human
uacacccacaugccuaggaggg

SEQ ID NO: 913194 - RNA, 22 nt, Human
agaaaaagaaaguggauuuguc

SEQ ID NO: 913195 - RNA, 22 nt, Human
acauucugaaauccaugugggu

SEQ ID NO: 913196 - RNA, 22 nt, Human
gacaggugagaugaggaacacc

SEQ ID NO: 913197 - RNA, 22 nt, Human
ggguaggagaggugucugugug

SEQ ID NO: 913198 - RNA, 22 nt, Human
caaguucacuugucuacaaggg

SEQ ID NO: 913199 - RNA, 23 nt, Human
ccagcgcucacucagagcauguu

SEQ ID NO: 913200 - RNA, 21 nt, Human
agggaaaaggcugagugaggg

SEQ ID NO: 913201 - RNA, 22 nt, Human
ggccucugcaggccucgacaag

SEQ ID NO: 913202 - RNA, 22 nt, Human
gauguacuugccuuaucuaucc

SEQ ID NO: 913203 - RNA, 22 nt, Human
uuaaaagaauccuguuauccuc

SEQ ID NO: 913204 - RNA, 22 nt, Human
uuugagucugcuuccauuuuca

SEQ ID NO: 913205 - RNA, 20 nt, Human
ugggucccugcaguuugaag

SEQ ID NO: 913206 - RNA, 22 nt, Human
caggcagcagccacucugguau

SEQ ID NO: 913207 - RNA, 22 nt, Human
ggcuccagggucucuccuugug

SEQ ID NO: 913208 - RNA, 22 nt, Human
ugaggcuuagagaauuaaguga

SEQ ID NO: 913209 - RNA, 20 nt, Human
uuucagugguuugugccuag

SEQ ID NO: 913210 - RNA, 22 nt, Human
cugaggcucagcgugaggaaag

SEQ ID NO: 913211 - RNA, 22 nt, Human
uggggccagguggcugcagguc

SEQ ID NO: 913212 - RNA, 20 nt, Human
aggcccugugcaucuuguuu

SEQ ID NO: 913213 - RNA, 22 nt, Human
acaguuaauccuaaaggcggua

SEQ ID NO: 913214 - RNA, 18 nt, Human
gccuguguucagccuuuc

SEQ ID NO: 913215 - RNA, 22 nt, Human
ggcugccagugagugcagaccg

SEQ ID NO: 913216 - RNA, 22 nt, Human
uacuuacauaaaaacugaaugu

SEQ ID NO: 913217 - RNA, 22 nt, Human
aucugaaaguuuagaauucuug

SEQ ID NO: 913218 - RNA, 22 nt, Human
gcauggcagugaggauggugcu

SEQ ID NO: 913219 - RNA, 20 nt, Human
cacaacuguccacaugcucc

SEQ ID NO: 913220 - RNA, 22 nt, Human
gagcuucacgggggacagcauu

SEQ ID NO: 913221 - RNA, 22 nt, Human
caggcugaucagggcugggaug

SEQ ID NO: 913222 - RNA, 22 nt, Human
ggaggggcauaguucaccauca

SEQ ID NO: 913223 - RNA, 22 nt, Human
gcccgugucuccugcucugugg

SEQ ID NO: 913224 - RNA, 22 nt, Human
uagggggcuguccugugcauua

SEQ ID NO: 913225 - RNA, 23 nt, Human
uguucucuuguccaggccuuaac

SEQ ID NO: 913226 - RNA, 22 nt, Human
cagcauuuuccauagaaagaag

SEQ ID NO: 913227 - RNA, 22 nt, Human
uccugggccuguacuccauccg

SEQ ID NO: 913228 - RNA, 22 nt, Human
ucauauaccagagaguuuauau

SEQ ID NO: 913229 - RNA, 22 nt, Human
auucugagaggcacaaugugga

SEQ ID NO: 913230 - RNA, 22 nt, Human
uugauuugauugaugaacuaag

SEQ ID NO: 913231 - RNA, 17 nt, Human
ggcaccagacggagagu

SEQ ID NO: 913232 - RNA, 22 nt, Human
uucuaggacccugcgugagaac

SEQ ID NO: 913233 - RNA, 22 nt, Human
aaugggcucacaagaccugaau

SEQ ID NO: 913234 - RNA, 22 nt, Human
agauaauuauuuacuucaaagu

SEQ ID NO: 913235 - RNA, 22 nt, Human
uagcaaauaaaacaguauugaa

SEQ ID NO: 913236 - RNA, 22 nt, Human
aggugucuuugcggcccgccgc

SEQ ID NO: 913237 - RNA, 22 nt, Human
aaauguuagguuguacugaguc

SEQ ID NO: 913238 - RNA, 22 nt, Human
ccucucuccaauuuucaccuca

SEQ ID NO: 913239 - RNA, 17 nt, Human
ucuagagcacuuugaga

SEQ ID NO: 913240 - RNA, 22 nt, Human
uacuuuggggacaauauggaau

SEQ ID NO: 913241 - RNA, 22 nt, Human
gucuuguuaagauuuuggaaua

SEQ ID NO: 913242 - RNA, 22 nt, Human
gcauguggccuucaggcuggaa

SEQ ID NO: 913243 - RNA, 22 nt, Human
cagcugcccugccuugcccuua

SEQ ID NO: 913244 - RNA, 22 nt, Human
cugggccuagaggaagcugaca

SEQ ID NO: 913245 - RNA, 22 nt, Human
cagccuuuauggaaaggccugg

SEQ ID NO: 913246 - RNA, 22 nt, Human
agacauuuugcaauggguagcu

SEQ ID NO: 913247 - RNA, 22 nt, Human
uuaaagcugcugaauccuauuu

SEQ ID NO: 913248 - RNA, 21 nt, Human
ucaaagacuggggcugugugc

SEQ ID NO: 913249 - RNA, 22 nt, Human
guuuccaagaugcugccaucag

SEQ ID NO: 913250 - RNA, 19 nt, Human
uuaagaguaggcauugugc

SEQ ID NO: 913251 - RNA, 22 nt, Human
acaggcugaggaugauugcauc

SEQ ID NO: 913252 - RNA, 17 nt, Human
aggaagcgagcuggccu

SEQ ID NO: 913253 - RNA, 17 nt, Human
cagcuuuaugcuacugu

SEQ ID NO: 913254 - RNA, 22 nt, Human
aggcagagcuaggaagaauugu

SEQ ID NO: 913255 - RNA, 22 nt, Human
agucauuacagcaggcagaagg

SEQ ID NO: 913256 - RNA, 23 nt, Human
ggggaaagaccaugcuugaggac

SEQ ID NO: 913257 - RNA, 22 nt, Human
ggccuuagcugucuuuccuuug

SEQ ID NO: 913258 - RNA, 22 nt, Human
gcugacugauggacacagcacc

SEQ ID NO: 913259 - RNA, 22 nt, Human
aggggaggagcuuuucuugccu

SEQ ID NO: 913260 - RNA, 22 nt, Human
caggagcaaauccaaaagaauu

SEQ ID NO: 913261 - RNA, 22 nt, Human
uauuguuucuggcuguggcagc

SEQ ID NO: 913262 - RNA, 15 nt, Human
gcagguggaucacuu

SEQ ID NO: 913263 - RNA, 22 nt, Human
uuugcauuuugauaagaucacu

SEQ ID NO: 913264 - RNA, 19 nt, Human
aacaucuguaacuauuuuc

SEQ ID NO: 913265 - RNA, 22 nt, Human
ucuucagauugcacugagcaag

SEQ ID NO: 913266 - RNA, 17 nt, Human
auugucucuucacuuau

SEQ ID NO: 913267 - RNA, 22 nt, Human
ugcaggugguuuggacacugcu

SEQ ID NO: 913268 - RNA, 19 nt, Human
augagcaggcaagacaagc

SEQ ID NO: 913269 - RNA, 17 nt, Human
gcaagggaugggagauu

SEQ ID NO: 913270 - RNA, 22 nt, Human
uggcagcuacagacagagguga

SEQ ID NO: 913271 - RNA, 22 nt, Human
uauuggaaggaagcaagagagg

SEQ ID NO: 913272 - RNA, 22 nt, Human
aggaggccaggcccucaagccu

SEQ ID NO: 913273 - RNA, 22 nt, Human
uucuuuuggacucaaagagaac

SEQ ID NO: 913274 - RNA, 22 nt, Human
aggaggccuguuuucuccugga

SEQ ID NO: 913275 - RNA, 23 nt, Human
agacauuuuaauaaggacuuuuu

SEQ ID NO: 913276 - RNA, 21 nt, Human
gggcuccagagauguagcuuc

SEQ ID NO: 913277 - RNA, 22 nt, Human
uuggcucccacuaacuccagca

SEQ ID NO: 913278 - RNA, 22 nt, Human
cuucagaaccagccagaagagg

SEQ ID NO: 913279 - RNA, 22 nt, Human
gcugggugucacggggcucgug

SEQ ID NO: 913280 - RNA, 22 nt, Human
gccagggcaggggagcaucugc

SEQ ID NO: 913281 - RNA, 23 nt, Human
acacauuuuucccguucugaggu

SEQ ID NO: 913282 - RNA, 22 nt, Human
ucuucuuugaaucauagugacc

SEQ ID NO: 913283 - RNA, 19 nt, Human
ugcagcugucucuauauua

SEQ ID NO: 913284 - RNA, 22 nt, Human
ggcagugaugucaaacagugaa

SEQ ID NO: 913285 - RNA, 18 nt, Human
uccagcucugccacuuac

SEQ ID NO: 913286 - RNA, 18 nt, Human
gcuggcugcacuucugcu

SEQ ID NO: 913287 - RNA, 22 nt, Human
auuagaagcgugaauccuuuca

SEQ ID NO: 913288 - RNA, 22 nt, Human
acuuuccuagacuucagugaca

SEQ ID NO: 913289 - RNA, 22 nt, Human
cagaacaugauauaaacagaag

SEQ ID NO: 913290 - RNA, 22 nt, Human
gagcugagacacacuuuggcaa

SEQ ID NO: 913291 - RNA, 20 nt, Human
ccagcacccucucagcugaa

SEQ ID NO: 913292 - RNA, 22 nt, Human
cugcaggacugaaagaugaggu

SEQ ID NO: 913293 - RNA, 22 nt, Human
cuguauuuaguuaaaaugcuaa

SEQ ID NO: 913294 - RNA, 22 nt, Human
uccagggcaggugcugggcucu

SEQ ID NO: 913295 - RNA, 22 nt, Human
caugugugugagggaaacaugu

SEQ ID NO: 913296 - RNA, 22 nt, Human
ugugucugcccuuaguacaucu

SEQ ID NO: 913297 - RNA, 22 nt, Human
cacaggaggcaaugguaagauu

SEQ ID NO: 913298 - RNA, 22 nt, Human
uuauggaauuugcaaaagguua

SEQ ID NO: 913299 - RNA, 22 nt, Human
aggcuggugucucuguccuguc

SEQ ID NO: 913300 - RNA, 22 nt, Human
gcugcaaguccuucccucucuu

SEQ ID NO: 913301 - RNA, 22 nt, Human
ugaucagcaucuucccagcucg

SEQ ID NO: 913302 - RNA, 22 nt, Human
uggcucccaaggagcuccugcc

SEQ ID NO: 913303 - RNA, 23 nt, Human
cacaggcugcgcauaagcuucuc

SEQ ID NO: 913304 - RNA, 22 nt, Human
guuagugcuuauuaaauaguau

SEQ ID NO: 913305 - RNA, 22 nt, Human
aaguguacaugaacacaugaca

SEQ ID NO: 913306 - RNA, 22 nt, Human
uaugugcaguuugcucuuaaca

SEQ ID NO: 913307 - RNA, 22 nt, Human
uggaaucuugcgggcacauggc

SEQ ID NO: 913308 - RNA, 22 nt, Human
aaaguggccauccucugcaucg

SEQ ID NO: 913309 - RNA, 22 nt, Human
acagagagggagugauaaaucc

SEQ ID NO: 913310 - RNA, 22 nt, Human
ggagggcaacuuuucaguaggu

SEQ ID NO: 913311 - RNA, 22 nt, Human
uguucauuauucuucaucugcc

SEQ ID NO: 913312 - RNA, 22 nt, Human
gaugauuuugaugcaguaaaga

SEQ ID NO: 913313 - RNA, 22 nt, Human
cuggguggcagagccugcagug

SEQ ID NO: 913314 - RNA, 22 nt, Human
gaauaauuuugaucagaaggga

SEQ ID NO: 913315 - RNA, 23 nt, Human
cauaugaauuuuagaggcaguuu

SEQ ID NO: 913316 - RNA, 22 nt, Human
ucagccaggccaggcauucaca

SEQ ID NO: 913317 - RNA, 22 nt, Human
aaugagcuucuauaaucuuguc

SEQ ID NO: 913318 - RNA, 22 nt, Human
aguguuucaauccuagggguug

SEQ ID NO: 913319 - RNA, 22 nt, Human
agauacauggaacgucaaaccu

SEQ ID NO: 913320 - RNA, 22 nt, Human
uacugugacagaguacuuaaac

SEQ ID NO: 913321 - RNA, 22 nt, Human
acuucacauuugcaagucuugg

SEQ ID NO: 913322 - RNA, 20 nt, Human
ugacacaaauugcuuucuca

SEQ ID NO: 913323 - RNA, 22 nt, Human
cuuuguccauugauucguucaa

SEQ ID NO: 913324 - RNA, 22 nt, Human
ggcuccaggcuccuauuucacu

SEQ ID NO: 913325 - RNA, 22 nt, Human
aauccaauccuacucagaaagu

SEQ ID NO: 913326 - RNA, 22 nt, Human
gggcugagagugacuguucugu

SEQ ID NO: 913327 - RNA, 22 nt, Human
acgaaauacuuugcacaguuuu

SEQ ID NO: 913328 - RNA, 22 nt, Human
auuuccaacuaccccuccauuu

SEQ ID NO: 913329 - RNA, 22 nt, Human
uauuuugugccaugcacugccu

SEQ ID NO: 913330 - RNA, 22 nt, Human
caggacagagcccagacugugu

SEQ ID NO: 913331 - RNA, 22 nt, Human
augcagcagcuacuugggaagg

SEQ ID NO: 913332 - RNA, 22 nt, Human
cagccaggagccucugcaacua

SEQ ID NO: 913333 - RNA, 22 nt, Human
ucuucaaacccuggcucuuccu

SEQ ID NO: 913334 - RNA, 22 nt, Human
uugcaucaaauauguaccacag

SEQ ID NO: 913335 - RNA, 22 nt, Human
agccagcaggugggaaacugga

SEQ ID NO: 913336 - RNA, 22 nt, Human
uuguucuuaguaugcauuguuu

SEQ ID NO: 913337 - RNA, 22 nt, Human
gagauaacucuaggucuucgag

SEQ ID NO: 913338 - RNA, 22 nt, Human
ggccugcugcuaugacuuccug

SEQ ID NO: 913339 - RNA, 22 nt, Human
cuauuuuaacuugauuaccucu

SEQ ID NO: 913340 - RNA, 22 nt, Human
guuucuuaccacuuggaccucu

SEQ ID NO: 913341 - RNA, 22 nt, Human
agagaguuuaagugacuugccg

SEQ ID NO: 913342 - RNA, 22 nt, Human
uucuggaauucuugcagccacu

SEQ ID NO: 913343 - RNA, 22 nt, Human
gaacuauucauucucauuagcg

SEQ ID NO: 913344 - RNA, 22 nt, Human
uaaguucugaguaaauacuguu

SEQ ID NO: 913345 - RNA, 22 nt, Human
uaaagcaggccacauaugugau

SEQ ID NO: 913346 - RNA, 22 nt, Human
aacacuccguggaggcaugcag

SEQ ID NO: 913347 - RNA, 22 nt, Human
acaaggauuuguuccuaauguu

SEQ ID NO: 913348 - RNA, 22 nt, Human
gcagcucucuggccugcccugg

SEQ ID NO: 913349 - RNA, 22 nt, Human
aaguuuaugaagucuaagccaa

SEQ ID NO: 913350 - RNA, 22 nt, Human
uccuuuguuguacaauuauuuu

SEQ ID NO: 913351 - RNA, 22 nt, Human
gaugcugaagugaagugaucuu

SEQ ID NO: 913352 - RNA, 22 nt, Human
gcaugcaaaaaauguauuuguu

SEQ ID NO: 913353 - RNA, 22 nt, Human
uuggaaggagccuaaaagagac

SEQ ID NO: 913354 - RNA, 22 nt, Human
cacaugcaggagccaauguaca

SEQ ID NO: 913355 - RNA, 22 nt, Human
aggugggcuuggugccaacaug

SEQ ID NO: 913356 - RNA, 20 nt, Human
acauuugaguaucaucuacu

SEQ ID NO: 913357 - RNA, 20 nt, Human
aacacugcuucuauauuuuc

SEQ ID NO: 913358 - RNA, 22 nt, Human
cugcuuccacacaagcaaagcu

SEQ ID NO: 913359 - RNA, 22 nt, Human
cagugauggauauggagaaguc

SEQ ID NO: 913360 - RNA, 22 nt, Human
acuagcagucagcgguuggcaa

SEQ ID NO: 913361 - RNA, 22 nt, Human
gcauucaucaaaaauguuccuc

SEQ ID NO: 913362 - RNA, 22 nt, Human
gagugagugcugggcugaggcu

SEQ ID NO: 913363 - RNA, 22 nt, Human
auuagcauaaguguucggugca

SEQ ID NO: 913364 - RNA, 22 nt, Human
uagaaucuccagcauugguugu

SEQ ID NO: 913365 - RNA, 22 nt, Human
gcagggccuuggucaucuuuuu

SEQ ID NO: 913366 - RNA, 22 nt, Human
cacagcaauagcuaacugauac

SEQ ID NO: 913367 - RNA, 22 nt, Human
agcaauuucccaucucuucugc

SEQ ID NO: 913368 - RNA, 22 nt, Human
acuucuguaaagggaagacagu

SEQ ID NO: 913369 - RNA, 22 nt, Human
acuuucuaggucucaguccuuu

SEQ ID NO: 913370 - RNA, 22 nt, Human
agccugcuuccucagggaacaa

SEQ ID NO: 913371 - RNA, 22 nt, Human
gccaaggccucugcaggaugag

SEQ ID NO: 913372 - RNA, 22 nt, Human
uugaucaaaucagcuacugagg

SEQ ID NO: 913373 - RNA, 21 nt, Human
cuacuuaaguaggggauuagg

SEQ ID NO: 913374 - RNA, 22 nt, Human
uggcccugugacugaguucuag

SEQ ID NO: 913375 - RNA, 22 nt, Human
auaagacacgccccacucacuc

SEQ ID NO: 913376 - RNA, 22 nt, Human
agagagaggggcgagcaaacac

SEQ ID NO: 913377 - RNA, 21 nt, Human
ccugugccaaaguguguuagg

SEQ ID NO: 913378 - RNA, 22 nt, Human
uuucagaugaaauguguauauu

SEQ ID NO: 913379 - RNA, 22 nt, Human
ugucuuacagcaaucuguucug

SEQ ID NO: 913380 - RNA, 22 nt, Human
agacaggagagggaacugccgg

SEQ ID NO: 913381 - RNA, 20 nt, Human
cuucuucagccuaugcuuca

SEQ ID NO: 913382 - RNA, 22 nt, Human
guuuuuucaugaguaguuaucu

SEQ ID NO: 913383 - RNA, 22 nt, Human
gauguauacuuuucuuucucug

SEQ ID NO: 913384 - RNA, 22 nt, Human
aucaaaaugcuccagugauggu

SEQ ID NO: 913385 - RNA, 22 nt, Human
aagcugugagcuggaugcucca

SEQ ID NO: 913386 - RNA, 22 nt, Human
gaaggaggugucaguuggacug

SEQ ID NO: 913387 - RNA, 22 nt, Human
cugggguggauggguccaaguu

SEQ ID NO: 913388 - RNA, 22 nt, Human
cagcagagcuuauuaacuaaaa

SEQ ID NO: 913389 - RNA, 22 nt, Human
cagcauuuagaauuugaagugu

SEQ ID NO: 913390 - RNA, 22 nt, Human
ggacagagggcaggagcccaga

SEQ ID NO: 913391 - RNA, 22 nt, Human
aucaggaaugaauacuuuugga

SEQ ID NO: 913392 - RNA, 22 nt, Human
aaguugcuaaugauguguuugc

SEQ ID NO: 913393 - RNA, 22 nt, Human
uggucagaacucagcgugcuug

SEQ ID NO: 913394 - RNA, 23 nt, Human
uggucugaagccucagguuccuc

SEQ ID NO: 913395 - RNA, 22 nt, Human
aagacaauccuggacagucagc

SEQ ID NO: 913396 - RNA, 19 nt, Human
gcuggccacgccccaguug

SEQ ID NO: 913397 - RNA, 22 nt, Human
auggaauguuuauacacaguug

SEQ ID NO: 913398 - RNA, 21 nt, Human
ugcugccauagaccugaggga

SEQ ID NO: 913399 - RNA, 22 nt, Human
caacagaccuggauucaaaaac

SEQ ID NO: 913400 - RNA, 21 nt, Human
ugugugcauaugcauguacau

SEQ ID NO: 913401 - RNA, 22 nt, Human
ucucuucugaccuagccuugga

SEQ ID NO: 913402 - RNA, 22 nt, Human
caaucuguacuugaaaaauuau

SEQ ID NO: 913403 - RNA, 18 nt, Human
cugugggaaggcuuucua

SEQ ID NO: 913404 - RNA, 22 nt, Human
ugagaugaauaacuccugcuaa

SEQ ID NO: 913405 - RNA, 22 nt, Human
aggugcagcugacaccaugugg

SEQ ID NO: 913406 - RNA, 22 nt, Human
uuucaguguaagguuuccagga

SEQ ID NO: 913407 - RNA, 22 nt, Human
uguagaaauuaguaagaucaac

SEQ ID NO: 913408 - RNA, 22 nt, Human
aagcagcacgcuuugccaacaa

SEQ ID NO: 913409 - RNA, 17 nt, Human
cuggucccaccaagccc

SEQ ID NO: 913410 - RNA, 22 nt, Human
uugggagauggggagauaauau

SEQ ID NO: 913411 - RNA, 23 nt, Human
ccaggaagaggccauccacaguc

SEQ ID NO: 913412 - RNA, 21 nt, Human
uaauuagcaaagcugagauuc

SEQ ID NO: 913413 - RNA, 22 nt, Human
ucuugcagagggcccuucugcu

SEQ ID NO: 913414 - RNA, 22 nt, Human
ugguugaauaagauaguuuuau

SEQ ID NO: 913415 - RNA, 22 nt, Human
uaagcuaacguccauggaaaug

SEQ ID NO: 913416 - RNA, 22 nt, Human
acauguacauacacauauguaa

SEQ ID NO: 913417 - RNA, 22 nt, Human
aaagcagcagcacguggaagag

SEQ ID NO: 913418 - RNA, 22 nt, Human
cccugugauguagcuagaguag

SEQ ID NO: 913419 - RNA, 22 nt, Human
caguccuguuccuggaguaguu

SEQ ID NO: 913420 - RNA, 22 nt, Human
guuuggaauagcaguaaacauu

SEQ ID NO: 913421 - RNA, 20 nt, Human
gaaaggagugucccugugag

SEQ ID NO: 913422 - RNA, 22 nt, Human
uagaggaacugccuuucuucug

SEQ ID NO: 913423 - RNA, 22 nt, Human
agcucucaagauaagaaagaac

SEQ ID NO: 913424 - RNA, 22 nt, Human
gcagauuucuaauaagcaaugu

SEQ ID NO: 913425 - RNA, 22 nt, Human
cagcuguugcagcacugagaga

SEQ ID NO: 913426 - RNA, 22 nt, Human
gaggggcugggguugacuccaa

SEQ ID NO: 913427 - RNA, 22 nt, Human
ucuaaugaaagauguaggaacu

SEQ ID NO: 913428 - RNA, 22 nt, Human
aguaguggggccaggguuugaa

SEQ ID NO: 913429 - RNA, 22 nt, Human
ggccagcggcacagccuggccc

SEQ ID NO: 913430 - RNA, 22 nt, Human
ccugccugucaucgccugcgcc

SEQ ID NO: 913431 - RNA, 21 nt, Human
aguuuuuacucuuaacugugg

SEQ ID NO: 913432 - RNA, 22 nt, Human
cuguggcucuccaauggaggga

SEQ ID NO: 913433 - RNA, 22 nt, Human
uuuggaauuaugcuuaaaguuu

SEQ ID NO: 913434 - RNA, 22 nt, Human
ccaaaauguuugaaugcaugug

SEQ ID NO: 913435 - RNA, 22 nt, Human
uguaugaagccagaaucuguuu

SEQ ID NO: 913436 - RNA, 22 nt, Human
ucuagagauacauuggucauuu

SEQ ID NO: 913437 - RNA, 22 nt, Human
ugcaaggcuugcaauggugauc

SEQ ID NO: 913438 - RNA, 22 nt, Human
acuguguauuccuauauaguaa

SEQ ID NO: 913439 - RNA, 20 nt, Human
ucucuguaaaucuucuuuua

SEQ ID NO: 913440 - RNA, 22 nt, Human
cagagcugacccaaggauugaa

SEQ ID NO: 913441 - RNA, 23 nt, Human
uguguucucacacagaugcagua

SEQ ID NO: 913442 - RNA, 22 nt, Human
uaagaugggggaaagaaauagu

SEQ ID NO: 913443 - RNA, 22 nt, Human
uuugugugcaacgcauggaguc

SEQ ID NO: 913444 - RNA, 22 nt, Human
uggccagugugugcugccggcu

SEQ ID NO: 913445 - RNA, 22 nt, Human
uuugaugaguuuaauaacagcc

SEQ ID NO: 913446 - RNA, 22 nt, Human
caucaaguagguccuuucaaga

SEQ ID NO: 913447 - RNA, 22 nt, Human
agaagcagaaaagggcacuuuu

SEQ ID NO: 913448 - RNA, 22 nt, Human
gugaaggaggggccacagauau

SEQ ID NO: 913449 - RNA, 22 nt, Human
uucucagggucuugugcaaggg

SEQ ID NO: 913450 - RNA, 22 nt, Human
ucucacaucugcccugugcugg

SEQ ID NO: 913451 - RNA, 22 nt, Human
uauaaacuauauguuagccaga

SEQ ID NO: 913452 - RNA, 22 nt, Human
ccaggccauucccagaguugcu

SEQ ID NO: 913453 - RNA, 22 nt, Human
uuguucuauggugaggcagcca

SEQ ID NO: 913454 - RNA, 22 nt, Human
ucugaugcaauguaagucuugg

SEQ ID NO: 913455 - RNA, 22 nt, Human
acuuaaaaccagacagcgucau

SEQ ID NO: 913456 - RNA, 22 nt, Human
uaaacagaauucaggcaagaua

SEQ ID NO: 913457 - RNA, 22 nt, Human
guuccacaaaaggucuaguuua

SEQ ID NO: 913458 - RNA, 22 nt, Human
aaggagcuuucauuacagccuu

SEQ ID NO: 913459 - RNA, 20 nt, Human
cccaggagcugugccccauc

SEQ ID NO: 913460 - RNA, 22 nt, Human
aucuucccaggcuggggagagg

SEQ ID NO: 913461 - RNA, 22 nt, Human
gggacagacccaugggccaggu

SEQ ID NO: 913462 - RNA, 22 nt, Human
uggaggacguguccaccaugaa

SEQ ID NO: 913463 - RNA, 22 nt, Human
aucuuaaucgaguccaugaaaa

SEQ ID NO: 913464 - RNA, 22 nt, Human
aaacaaugaaauucauucuuca

SEQ ID NO: 913465 - RNA, 22 nt, Human
ccucuggggcaucagacaaagg

SEQ ID NO: 913466 - RNA, 18 nt, Human
uuccuucugauguauaug

SEQ ID NO: 913467 - RNA, 22 nt, Human
aggagggcuaggaaaaccagga

SEQ ID NO: 913468 - RNA, 22 nt, Human
ucucagugacacucuucauaca

SEQ ID NO: 913469 - RNA, 22 nt, Human
ggugaggggcuccucugcccgg

SEQ ID NO: 913470 - RNA, 22 nt, Human
gcgcugaggcuggaggcgcacg

SEQ ID NO: 913471 - RNA, 22 nt, Human
aguuuaauccuccagcccaacu

SEQ ID NO: 913472 - RNA, 22 nt, Human
acugggaguucuccaugucccu

SEQ ID NO: 913473 - RNA, 22 nt, Human
acaguguuuuaugagaauuguu

SEQ ID NO: 913474 - RNA, 22 nt, Human
cugguuugcccacaccagccac

SEQ ID NO: 913475 - RNA, 22 nt, Human
ucuggcucugaauucacuucug

SEQ ID NO: 913476 - RNA, 22 nt, Human
cagagguggggaguauuucaag

SEQ ID NO: 913477 - RNA, 23 nt, Human
ugauuuuaaaaaguaaguuauca

SEQ ID NO: 913478 - RNA, 22 nt, Human
cggcuggguagaggugccgggu

SEQ ID NO: 913479 - RNA, 22 nt, Human
ucugcaaguuuaucacuuggga

SEQ ID NO: 913480 - RNA, 22 nt, Human
agcugccuggccggagccacug

SEQ ID NO: 913481 - RNA, 22 nt, Human
uagaaagcuggaggaauucuuu

SEQ ID NO: 913482 - RNA, 22 nt, Human
ucugaaauguucucuuguuuug

SEQ ID NO: 913483 - RNA, 22 nt, Human
auuuccuaauuuagggauagac

SEQ ID NO: 913484 - RNA, 22 nt, Human
gaggugugcacagcgugcugac

SEQ ID NO: 913485 - RNA, 23 nt, Human
agcaacagugggugaguguugcu

SEQ ID NO: 913486 - RNA, 22 nt, Human
agcagcaguacauauaagacua

SEQ ID NO: 913487 - RNA, 22 nt, Human
agggcuccaggggcugggugac

SEQ ID NO: 913488 - RNA, 22 nt, Human
ucuuguauuugauuccuuccaa

SEQ ID NO: 913489 - RNA, 22 nt, Human
cucuggaagaugaccuggguaa

SEQ ID NO: 913490 - RNA, 22 nt, Human
uucuucaaaacaacacuggccu

SEQ ID NO: 913491 - RNA, 22 nt, Human
caucagaagauggcucuggaaa

SEQ ID NO: 913492 - RNA, 22 nt, Human
aucagugcuucauagcccuggu

SEQ ID NO: 913493 - RNA, 22 nt, Human
gccaggcucuugguuauguuuu

SEQ ID NO: 913494 - RNA, 22 nt, Human
uaaaagaucacuggcugcuuua

SEQ ID NO: 913495 - RNA, 22 nt, Human
ucaguuuucucauuuaugagau

SEQ ID NO: 913496 - RNA, 22 nt, Human
ugugcauguucucauuucuaac

SEQ ID NO: 913497 - RNA, 22 nt, Human
gcaguaagaaagucaagcaguu

SEQ ID NO: 913498 - RNA, 22 nt, Human
aaaggcucagaaucggcagacc

SEQ ID NO: 913499 - RNA, 22 nt, Human
uccugaggcucacuuugaaugu

SEQ ID NO: 913500 - RNA, 22 nt, Human
caagauuugacuucgugguuug

SEQ ID NO: 913501 - RNA, 22 nt, Human
agaggaggcuggguccagauaa

SEQ ID NO: 913502 - RNA, 22 nt, Human
caguggagugggacuggucuga

SEQ ID NO: 913503 - RNA, 22 nt, Human
auuauaaagaacaugugugugg

SEQ ID NO: 913504 - RNA, 22 nt, Human
auguuaaauagccauuuguuug

SEQ ID NO: 913505 - RNA, 22 nt, Human
ugagguagaaaaagcuuguagu

SEQ ID NO: 913506 - RNA, 22 nt, Human
cucccaggcagggcugcccacu

SEQ ID NO: 913507 - RNA, 22 nt, Human
ucauggauggccgggaggugau

SEQ ID NO: 913508 - RNA, 22 nt, Human
cuugugauugagaaagucuaaa

SEQ ID NO: 913509 - RNA, 22 nt, Human
ucuagaaugacaugcaagagua

SEQ ID NO: 913510 - RNA, 22 nt, Human
ugaggucaccuggaggcagccu

SEQ ID NO: 913511 - RNA, 22 nt, Human
ucacuaaguuacauuuaguauu

SEQ ID NO: 913512 - RNA, 22 nt, Human
uuuacaugaguagcagauguuc

SEQ ID NO: 913513 - RNA, 22 nt, Human
cacuccuauaauuaaagaugca

SEQ ID NO: 913514 - RNA, 19 nt, Human
uuucuguuagaaggauaca

SEQ ID NO: 913515 - RNA, 22 nt, Human
gccgugcgugcgcaggugcugu

SEQ ID NO: 913516 - RNA, 19 nt, Human
ccucccacggauuccuucc

SEQ ID NO: 913517 - RNA, 22 nt, Human
uccagcaccaccacagggaaga

SEQ ID NO: 913518 - RNA, 22 nt, Human
ggcugcaggaacgacggagggg

SEQ ID NO: 913519 - RNA, 22 nt, Human
aauauuuauauuucucuucccu

SEQ ID NO: 913520 - RNA, 17 nt, Human
uacauguguaucugauu

SEQ ID NO: 913521 - RNA, 22 nt, Human
aauguguaaaagguuuucuuca

SEQ ID NO: 913522 - RNA, 22 nt, Human
guccccucagccacccaugggg

SEQ ID NO: 913523 - RNA, 22 nt, Human
guuuauuccagcaaucugcuua

SEQ ID NO: 913524 - RNA, 22 nt, Human
aaggugugaacugauucauugg

SEQ ID NO: 913525 - RNA, 22 nt, Human
uaggcagauguuaacaggaaaa

SEQ ID NO: 913526 - RNA, 22 nt, Human
aaaagagugacugauaaguaua

SEQ ID NO: 913527 - RNA, 22 nt, Human
gacuuugcugugucagcuucag

SEQ ID NO: 913528 - RNA, 22 nt, Human
uauguucuuggaaaugaagcuu

SEQ ID NO: 913529 - RNA, 19 nt, Human
ucauggaucagguaguuua

SEQ ID NO: 913530 - RNA, 22 nt, Human
cccuggcucuucaccaccugcc

SEQ ID NO: 913531 - RNA, 22 nt, Human
aguaggaugcuuuauaugaaag

SEQ ID NO: 913532 - RNA, 22 nt, Human
gccucugcggagcuguacauca

SEQ ID NO: 913533 - RNA, 22 nt, Human
ugggguggaacccuucugcugg

SEQ ID NO: 913534 - RNA, 22 nt, Human
guuuauugauaaaagcuggaca

SEQ ID NO: 913535 - RNA, 22 nt, Human
cauuuucaugaguuucuguuca

SEQ ID NO: 913536 - RNA, 20 nt, Human
ugaaaggugggaauuguggg

SEQ ID NO: 913537 - RNA, 22 nt, Human
ucauagaaauggaaaguauauu

SEQ ID NO: 913538 - RNA, 17 nt, Human
cagugaggccuuuccuc

SEQ ID NO: 913539 - RNA, 22 nt, Human
uuacacaauuacucacuccugg

SEQ ID NO: 913540 - RNA, 22 nt, Human
cuaaagagaguucaagacuccu

SEQ ID NO: 913541 - RNA, 22 nt, Human
ucauaaaacacaccagguaguu

SEQ ID NO: 913542 - RNA, 21 nt, Human
gucuuggcaccaggagagaga

SEQ ID NO: 913543 - RNA, 22 nt, Human
ucagauggauucauuacaugac

SEQ ID NO: 913544 - RNA, 22 nt, Human
gcuggcauuacaggagagaacc

SEQ ID NO: 913545 - RNA, 22 nt, Human
uggagagaaaaaagacaguucu

SEQ ID NO: 913546 - RNA, 22 nt, Human
aaccagcacugcuggggccugc

SEQ ID NO: 913547 - RNA, 23 nt, Human
aaauauucuuuuuuaguaagugc

SEQ ID NO: 913548 - RNA, 22 nt, Human
agagcacagugcaggauccccg

SEQ ID NO: 913549 - RNA, 22 nt, Human
acuguccugaauacugcaugac

SEQ ID NO: 913550 - RNA, 22 nt, Human
uuccaggguuaauuuauauggu

SEQ ID NO: 913551 - RNA, 17 nt, Human
cuggagccaagagggcc

SEQ ID NO: 913552 - RNA, 22 nt, Human
aacugcaauaacuugugcacca

SEQ ID NO: 913553 - RNA, 22 nt, Human
gagugagggccaacauccagcu

SEQ ID NO: 913554 - RNA, 21 nt, Human
gcucuaucaggccaaaauguc

SEQ ID NO: 913555 - RNA, 22 nt, Human
ggaagaggcugguagugcccgu

SEQ ID NO: 913556 - RNA, 23 nt, Human
gaaucaguggcuaacaaggaaac

SEQ ID NO: 913557 - RNA, 22 nt, Human
cagaauuuagaaaacaacauaa

SEQ ID NO: 913558 - RNA, 22 nt, Human
ugagcugugaggguacagauau

SEQ ID NO: 913559 - RNA, 22 nt, Human
cccaguggggaaauagcuagcu

SEQ ID NO: 913560 - RNA, 22 nt, Human
auacagaagaccccuccgucau

SEQ ID NO: 913561 - RNA, 22 nt, Human
aaaaguaauugcaguuuugcca

SEQ ID NO: 913562 - RNA, 22 nt, Human
uccugcccagagcucuccacuc

SEQ ID NO: 913563 - RNA, 22 nt, Human
agggggcuccuccggugcuucc

SEQ ID NO: 913564 - RNA, 22 nt, Human
agggcagcagcccauggcucug

SEQ ID NO: 913565 - RNA, 22 nt, Human
cagcccugcuuccccgcuaguu

SEQ ID NO: 913566 - RNA, 22 nt, Human
uguguuaaguauuugauacacu

SEQ ID NO: 913567 - RNA, 17 nt, Human
aagaacacucaauagca

SEQ ID NO: 913568 - RNA, 22 nt, Human
acuucuucuucagcugggggau

SEQ ID NO: 913569 - RNA, 22 nt, Human
gagguagguguaggaggccugc

SEQ ID NO: 913570 - RNA, 22 nt, Human
aggauuuaaucaguuggcauuu

SEQ ID NO: 913571 - RNA, 22 nt, Human
gugugugucuccgcggccguag

SEQ ID NO: 913572 - RNA, 22 nt, Human
aaagauuugaguucugcuuaua

SEQ ID NO: 913573 - RNA, 23 nt, Human
cauggcagcaagagcucauggcc

SEQ ID NO: 913574 - RNA, 22 nt, Human
ugccugugcccuuugcugggag

SEQ ID NO: 913575 - RNA, 22 nt, Human
ggugacaguuccggagguacag

SEQ ID NO: 913576 - RNA, 22 nt, Human
uucauacaguggcugcacucca

SEQ ID NO: 913577 - RNA, 22 nt, Human
ucauuuuuagcgcgcaaaaguu

SEQ ID NO: 913578 - RNA, 22 nt, Human
uaggcuucacuuccaguuauuc

SEQ ID NO: 913579 - RNA, 22 nt, Human
uguguaugcauacacacauaga

SEQ ID NO: 913580 - RNA, 22 nt, Human
cugggccuugccuugcccacag

SEQ ID NO: 913581 - RNA, 22 nt, Human
gucaggcuggggcugcugccag

SEQ ID NO: 913582 - RNA, 22 nt, Human
uagcaagagugggcuuuguggg

SEQ ID NO: 913583 - RNA, 22 nt, Human
aaugauauagcagacauagccu

SEQ ID NO: 913584 - RNA, 22 nt, Human
auuuuguuauaggagcugaaau

SEQ ID NO: 913585 - RNA, 22 nt, Human
ugggccugggcuggacagccug

SEQ ID NO: 913586 - RNA, 23 nt, Human
uucuacagcuucuucaguuaagg

SEQ ID NO: 913587 - RNA, 18 nt, Human
ccuguguguguugcaggc

SEQ ID NO: 913588 - RNA, 22 nt, Human
gcauuucaugcuccuuggaacc

SEQ ID NO: 913589 - RNA, 22 nt, Human
ggaaaggagaugaauaggauua

SEQ ID NO: 913590 - RNA, 22 nt, Human
cagcaggcuguggaaauccugg

SEQ ID NO: 913591 - RNA, 22 nt, Human
gcagcacuaaugggccccagaa

SEQ ID NO: 913592 - RNA, 22 nt, Human
uucucuuuucaccaguugcuaa

SEQ ID NO: 913593 - RNA, 19 nt, Human
gcuugggagagggagcuaa

SEQ ID NO: 913594 - RNA, 22 nt, Human
ucaggagagaaagaauacaauu

SEQ ID NO: 913595 - RNA, 22 nt, Human
aguacuuuuuguucaauugugc

SEQ ID NO: 913596 - RNA, 22 nt, Human
uccaggcuaauuuugcauuguu

SEQ ID NO: 913597 - RNA, 22 nt, Human
gccaggcugcuccagggaggcc

SEQ ID NO: 913598 - RNA, 22 nt, Human
ggugagugucaaugguuagagu

SEQ ID NO: 913599 - RNA, 22 nt, Human
cuucuuaucugaaaguaauauu

SEQ ID NO: 913600 - RNA, 22 nt, Human
gcuggcuguaucaccuggccag

SEQ ID NO: 913601 - RNA, 22 nt, Human
ucuucaggaagggaaaucaucc

SEQ ID NO: 913602 - RNA, 22 nt, Human
uggcagcuccuggggccagcac

SEQ ID NO: 913603 - RNA, 20 nt, Human
uguggcaggaugagggcgga

SEQ ID NO: 913604 - RNA, 19 nt, Human
acuggcaaaaaagguuaau

SEQ ID NO: 913605 - RNA, 21 nt, Human
uacaagauagagguaauauau

SEQ ID NO: 913606 - RNA, 22 nt, Human
ccugaggcuccaccuccagaga

SEQ ID NO: 913607 - RNA, 22 nt, Human
acaggaucgcccuguugcccag

SEQ ID NO: 913608 - RNA, 20 nt, Human
cccaggaguuugcucuuacu

SEQ ID NO: 913609 - RNA, 22 nt, Human
gugcuucucuucacacccaacu

SEQ ID NO: 913610 - RNA, 16 nt, Human
ucuuccuuuugauuuu

SEQ ID NO: 913611 - RNA, 21 nt, Human
uugcucuacagugagggcagc

SEQ ID NO: 913612 - RNA, 22 nt, Human
cuguggcugcgcccugggggag

SEQ ID NO: 913613 - RNA, 22 nt, Human
caagcagacaguaggccuagaa

SEQ ID NO: 913614 - RNA, 22 nt, Human
uguguguauaugcauuuaucua

SEQ ID NO: 913615 - RNA, 22 nt, Human
uuuacaauugguuuucucuaau

SEQ ID NO: 913616 - RNA, 22 nt, Human
uaggaaugaagaaguaugauau

SEQ ID NO: 913617 - RNA, 22 nt, Human
aaagaaggaugggagaaauccu

SEQ ID NO: 913618 - RNA, 22 nt, Human
ugagaggcagaauggugccugc

SEQ ID NO: 913619 - RNA, 19 nt, Human
uagggcuggccgggcggug

SEQ ID NO: 913620 - RNA, 19 nt, Human
gugcuuuuuaagagcucag

SEQ ID NO: 913621 - RNA, 22 nt, Human
ggcugaggcucaugccaucuug

SEQ ID NO: 913622 - RNA, 22 nt, Human
aaguucuagguagugcucuuuc

SEQ ID NO: 913623 - RNA, 22 nt, Human
uucaaagcaauagaaagaguga

SEQ ID NO: 913624 - RNA, 22 nt, Human
uuaaauuaggacucuaguucug

SEQ ID NO: 913625 - RNA, 22 nt, Human
ugugugcaugcuuggggcagca

SEQ ID NO: 913626 - RNA, 22 nt, Human
ucagggauugcaaaauucaucc

SEQ ID NO: 913627 - RNA, 22 nt, Human
ccacuuuuuucuccaucucuga

SEQ ID NO: 913628 - RNA, 22 nt, Human
agcucuccaucuaucugugaug

SEQ ID NO: 913629 - RNA, 22 nt, Human
ucagaagcugggucucagaagc

SEQ ID NO: 913630 - RNA, 22 nt, Human
gcuggcugugggcuccacgcuc

SEQ ID NO: 913631 - RNA, 22 nt, Human
cucuuccuuaagacuauaaaga

SEQ ID NO: 913632 - RNA, 22 nt, Human
ugcauauuauaaagagaauuag

SEQ ID NO: 913633 - RNA, 22 nt, Human
aaggcagugguugugauacugu

SEQ ID NO: 913634 - RNA, 22 nt, Human
cgugggucgggacuccgccucg

SEQ ID NO: 913635 - RNA, 22 nt, Human
uacauugugucucuaucuaguc

SEQ ID NO: 913636 - RNA, 22 nt, Human
cagcugcaggagaaacagaggc

SEQ ID NO: 913637 - RNA, 19 nt, Human
uggcuuggcugcagaugcu

SEQ ID NO: 913638 - RNA, 22 nt, Human
ucacaggaggaaccuggccugg

SEQ ID NO: 913639 - RNA, 22 nt, Human
uucuuguauauaaaaaucauuu

SEQ ID NO: 913640 - RNA, 22 nt, Human
uccaggcccagacggggugagg

SEQ ID NO: 913641 - RNA, 22 nt, Human
ucugcucuaguugcuuccugcc

SEQ ID NO: 913642 - RNA, 22 nt, Human
gaaguggaauuacugggucaua

SEQ ID NO: 913643 - RNA, 22 nt, Human
uauacacauguguguauucaua

SEQ ID NO: 913644 - RNA, 22 nt, Human
ucaguguuagacaaguuuggaa

SEQ ID NO: 913645 - RNA, 22 nt, Human
uggcagagcccagacuccaguc

SEQ ID NO: 913646 - RNA, 22 nt, Human
ggugcccagcaagcuuucaaug

SEQ ID NO: 913647 - RNA, 22 nt, Human
cugggccaucagaggggcugga

SEQ ID NO: 913648 - RNA, 22 nt, Human
gugauguggggaccguccuggc

SEQ ID NO: 913649 - RNA, 22 nt, Human
cuggcccagagcucuggccuuu

SEQ ID NO: 913650 - RNA, 22 nt, Human
aucuccagugaggcagauucug

SEQ ID NO: 913651 - RNA, 22 nt, Human
uucacacagaaucugaggagcu

SEQ ID NO: 913652 - RNA, 22 nt, Human
caauacaucaggucaaaaugug

SEQ ID NO: 913653 - RNA, 22 nt, Human
acauauauuacuaguaaagaca

SEQ ID NO: 913654 - RNA, 22 nt, Human
ugugucagcaggggagggaacu

SEQ ID NO: 913655 - RNA, 21 nt, Human
uuccaguuuuaauuaaauugu

SEQ ID NO: 913656 - RNA, 22 nt, Human
auggcagaccuccuggccacaa

SEQ ID NO: 913657 - RNA, 21 nt, Human
caauuacagauggcucagggg

SEQ ID NO: 913658 - RNA, 17 nt, Human
uagcacaaagcaggauu

SEQ ID NO: 913659 - RNA, 22 nt, Human
gcuuggggucaugaggcugcug

SEQ ID NO: 913660 - RNA, 22 nt, Human
gggaguggagagcaauggauga

SEQ ID NO: 913661 - RNA, 22 nt, Human
auggcaguagaaugggggaaaa

SEQ ID NO: 913662 - RNA, 22 nt, Human
cugugagaccugauuucuucau

SEQ ID NO: 913663 - RNA, 22 nt, Human
ugcccagcaauaaaccagaaga

SEQ ID NO: 913664 - RNA, 22 nt, Human
gugcccugcaugccccggguau

SEQ ID NO: 913665 - RNA, 22 nt, Human
aacaaacaaacauuuugucauc

SEQ ID NO: 913666 - RNA, 22 nt, Human
uguggaaugcuccuaagugaau

SEQ ID NO: 913667 - RNA, 22 nt, Human
agaaaucuuggagucuguggua

SEQ ID NO: 913668 - RNA, 22 nt, Human
ucagcuggcagguucugggaag

SEQ ID NO: 913669 - RNA, 22 nt, Human
agaugcuggauggaaaaugauc

SEQ ID NO: 913670 - RNA, 23 nt, Human
aaaguuugaagcaacaguaguug

SEQ ID NO: 913671 - RNA, 22 nt, Human
agcuggaacccgggugggcagc

SEQ ID NO: 913672 - RNA, 22 nt, Human
aaagaaggggucuacauccaau

SEQ ID NO: 913673 - RNA, 22 nt, Human
ggagcagaugucuucauggccu

SEQ ID NO: 913674 - RNA, 22 nt, Human
caucucaguguacagggagucu

SEQ ID NO: 913675 - RNA, 22 nt, Human
gaggagaagggcacggagaaaa

SEQ ID NO: 913676 - RNA, 22 nt, Human
cccaggggagguccucagggaa

SEQ ID NO: 913677 - RNA, 22 nt, Human
ugguguuuaaugggcuguuuau

SEQ ID NO: 913678 - RNA, 20 nt, Human
acagauggcaguuauuacau

SEQ ID NO: 913679 - RNA, 22 nt, Human
uuccuggugagauuucguucug

SEQ ID NO: 913680 - RNA, 22 nt, Human
aaacacagguacugcagaagug

SEQ ID NO: 913681 - RNA, 20 nt, Human
cacaggcuauaugagagcca

SEQ ID NO: 913682 - RNA, 22 nt, Human
guugugaauagugccgcaauaa

SEQ ID NO: 913683 - RNA, 22 nt, Human
agcugugggagaaucucugggu

SEQ ID NO: 913684 - RNA, 22 nt, Human
ucuucuggaucgaucacauugu

SEQ ID NO: 913685 - RNA, 22 nt, Human
aaucaucacgaacacaacagcg

SEQ ID NO: 913686 - RNA, 22 nt, Human
cugaggucuagacaccccaggg

SEQ ID NO: 913687 - RNA, 22 nt, Human
gaggaagaaagcauaggugggg

SEQ ID NO: 913688 - RNA, 22 nt, Human
auuuugcuggucugaauuacuu

SEQ ID NO: 913689 - RNA, 22 nt, Human
agagacaggaauggcauuaaga

SEQ ID NO: 913690 - RNA, 22 nt, Human
ccaggaggaugauuuuaagagg

SEQ ID NO: 913691 - RNA, 22 nt, Human
cagccaggagcucccccugcuc

SEQ ID NO: 913692 - RNA, 22 nt, Human
cacccagagccugagagggaua

SEQ ID NO: 913693 - RNA, 22 nt, Human
cuggcuuugcuggacugggagu

SEQ ID NO: 913694 - RNA, 22 nt, Human
ucaguauuccuggaaauacaag

SEQ ID NO: 913695 - RNA, 22 nt, Human
ucuggugucaguauucuuugaa

SEQ ID NO: 913696 - RNA, 22 nt, Human
gcccagguuucaucugcuccgu

SEQ ID NO: 913697 - RNA, 22 nt, Human
cuguaucugucagcuggucucg

SEQ ID NO: 913698 - RNA, 20 nt, Human
agggaggugcugggccugag

SEQ ID NO: 913699 - RNA, 22 nt, Human
aucugucuugccuugcauauuu

SEQ ID NO: 913700 - RNA, 22 nt, Human
ugguaaggucuucacucagauu

SEQ ID NO: 913701 - RNA, 22 nt, Human
gggcucagacaucccuccugga

SEQ ID NO: 913702 - RNA, 22 nt, Human
cacucugguucugaacaggauc

SEQ ID NO: 913703 - RNA, 22 nt, Human
gugugggcugcagaggcacagc

SEQ ID NO: 913704 - RNA, 22 nt, Human
ucagugauuucuggggugaggg

SEQ ID NO: 913705 - RNA, 22 nt, Human
agguggcaguuguggaaccauc

SEQ ID NO: 913706 - RNA, 22 nt, Human
cagacacacaagcaaucuaagu

SEQ ID NO: 913707 - RNA, 19 nt, Human
guacaacaaugcugagcau

SEQ ID NO: 913708 - RNA, 22 nt, Human
ucaaucuagagauuaaaauagg

SEQ ID NO: 913709 - RNA, 22 nt, Human
aucuggugcuaacaaaugugga

SEQ ID NO: 913710 - RNA, 22 nt, Human
uagauuucaggagacaaaaugg

SEQ ID NO: 913711 - RNA, 22 nt, Human
aggcugugaaauguggcaagga

SEQ ID NO: 913712 - RNA, 22 nt, Human
gcugccagcgucagaccugggg

SEQ ID NO: 913713 - RNA, 20 nt, Human
gugcugagugaaaugagauu

SEQ ID NO: 913714 - RNA, 22 nt, Human
auacaguguacuauuuagcagu

SEQ ID NO: 913715 - RNA, 22 nt, Human
agguuauuuuugcuuagaaaga

SEQ ID NO: 913716 - RNA, 22 nt, Human
gaugcaaagaggaccuucagua

SEQ ID NO: 913717 - RNA, 22 nt, Human
ggaagggguuaggggucccuga

SEQ ID NO: 913718 - RNA, 19 nt, Human
ggcugccuggagcgagggc

SEQ ID NO: 913719 - RNA, 19 nt, Human
ucagggccaugagcgccac

SEQ ID NO: 913720 - RNA, 22 nt, Human
ucagguucuggugagggcccuu

SEQ ID NO: 913721 - RNA, 22 nt, Human
aauacuauguugugacacauga

SEQ ID NO: 913722 - RNA, 22 nt, Human
agcagcuguuagaaacaggaag

SEQ ID NO: 913723 - RNA, 22 nt, Human
cagcaucucguggcuggauaga

SEQ ID NO: 913724 - RNA, 22 nt, Human
cucccuggcuuuguccugaggc

SEQ ID NO: 913725 - RNA, 22 nt, Human
uucaaaccuaucuaagaaauag

SEQ ID NO: 913726 - RNA, 22 nt, Human
auaucuucuuuauuuugugagg

SEQ ID NO: 913727 - RNA, 22 nt, Human
aauaaaugaacaaagcagguug

SEQ ID NO: 913728 - RNA, 22 nt, Human
caauauagagagaaaauuaugu

SEQ ID NO: 913729 - RNA, 22 nt, Human
uuuccugugcuuaacaaauauu

SEQ ID NO: 913730 - RNA, 22 nt, Human
uugcuguagcucauuucacucu

SEQ ID NO: 913731 - RNA, 22 nt, Human
uuuuauugguaaugauaaaagu

SEQ ID NO: 913732 - RNA, 22 nt, Human
agcaggguuccuuaaggccaua

SEQ ID NO: 913733 - RNA, 20 nt, Human
ggacugaaaacacaaaccug

SEQ ID NO: 913734 - RNA, 22 nt, Human
gaucuuuauacuguaauaauga

SEQ ID NO: 913735 - RNA, 22 nt, Human
uccugggaugaggaaacaagga

SEQ ID NO: 913736 - RNA, 22 nt, Human
cugaacacugagucuaccuccc

SEQ ID NO: 913737 - RNA, 22 nt, Human
ugcuggcuacugauggcaggcc

SEQ ID NO: 913738 - RNA, 22 nt, Human
cuggccugcagaucccaggguc

SEQ ID NO: 913739 - RNA, 22 nt, Human
ucugaagcacagcaggaagggu

SEQ ID NO: 913740 - RNA, 22 nt, Human
gcagacugcgagcgugcuggug

SEQ ID NO: 913741 - RNA, 22 nt, Human
caaguuuuagaaauaucuggau

SEQ ID NO: 913742 - RNA, 22 nt, Human
ccaucccuucucuggccagcag

SEQ ID NO: 913743 - RNA, 22 nt, Human
ggaggccaaggcgggcggauca

SEQ ID NO: 913744 - RNA, 22 nt, Human
gcaaagacugcaauuacuuuug

SEQ ID NO: 913745 - RNA, 22 nt, Human
uguucuugagccuuuagaccua

SEQ ID NO: 913746 - RNA, 22 nt, Human
cugggccaggaccaggguugaa

SEQ ID NO: 913747 - RNA, 22 nt, Human
augucugucuauagccaugaga

SEQ ID NO: 913748 - RNA, 22 nt, Human
caucagagugguggccuggugu

SEQ ID NO: 913749 - RNA, 21 nt, Human
uggcaggcagcuggaagcuug

SEQ ID NO: 913750 - RNA, 22 nt, Human
uucucuuaguauugcuaguuua

SEQ ID NO: 913751 - RNA, 23 nt, Human
uauugcacaaagagaugcacagg

SEQ ID NO: 913752 - RNA, 22 nt, Human
gccuggaggaauguagcugagg

SEQ ID NO: 913753 - RNA, 22 nt, Human
acuaaaguccuguuguagcaua

SEQ ID NO: 913754 - RNA, 22 nt, Human
cccauucauccucgcuuccuuc

SEQ ID NO: 913755 - RNA, 16 nt, Human
gcuaggcaacaggcug

SEQ ID NO: 913756 - RNA, 22 nt, Human
cacagcaagagcuaaaugacca

SEQ ID NO: 913757 - RNA, 22 nt, Human
ugaguuauggagaauaaaguca

SEQ ID NO: 913758 - RNA, 22 nt, Human
guuaacauuucuaggugcaggg

SEQ ID NO: 913759 - RNA, 22 nt, Human
aucauaaaccacuuuguaaucu

SEQ ID NO: 913760 - RNA, 22 nt, Human
uuacagaaaauguguuuuaacu

SEQ ID NO: 913761 - RNA, 22 nt, Human
ugugaggauaaaaaggaaggag

SEQ ID NO: 913762 - RNA, 22 nt, Human
agcacagagaaacuaagacauu

SEQ ID NO: 913763 - RNA, 22 nt, Human
ugaagccagcuuuggaagacac

SEQ ID NO: 913764 - RNA, 22 nt, Human
cagaauuugaaguaauauucca

SEQ ID NO: 913765 - RNA, 22 nt, Human
auggccaggguggcacuguggu

SEQ ID NO: 913766 - RNA, 22 nt, Human
uacuuaaaacugauagaaucuc

SEQ ID NO: 913767 - RNA, 22 nt, Human
ucugagaaauuucuuugugaug

SEQ ID NO: 913768 - RNA, 22 nt, Human
acauaaugagcucuuuauaaau

SEQ ID NO: 913769 - RNA, 22 nt, Human
ugagacgaagucuugcucuguu

SEQ ID NO: 913770 - RNA, 22 nt, Human
aggaaagacuggggccccagaa

SEQ ID NO: 913771 - RNA, 22 nt, Human
cccacaggugugagcuugcugg

SEQ ID NO: 913772 - RNA, 22 nt, Human
agcuucauaauuccuugacuca

SEQ ID NO: 913773 - RNA, 22 nt, Human
ggcugaagaacugggagucuca

SEQ ID NO: 913774 - RNA, 22 nt, Human
cugucugucaaguucaucucca

SEQ ID NO: 913775 - RNA, 22 nt, Human
acaccuuucagguccagacagu

SEQ ID NO: 913776 - RNA, 18 nt, Human
auguucauauuuuuaggg

SEQ ID NO: 913777 - RNA, 22 nt, Human
aaacaggcgcuuacuaagaaaa

SEQ ID NO: 913778 - RNA, 22 nt, Human
ucuggcucuguguccucaccca

SEQ ID NO: 913779 - RNA, 22 nt, Human
caguggguccugcgucugccag

SEQ ID NO: 913780 - RNA, 22 nt, Human
uucuagucuauggcuagauagu

SEQ ID NO: 913781 - RNA, 22 nt, Human
ugcuccugagcgguuuccauga

SEQ ID NO: 913782 - RNA, 22 nt, Human
aaggcugaggagggccugcagg

SEQ ID NO: 913783 - RNA, 22 nt, Human
aagccaaaggcuccagugaccu

SEQ ID NO: 913784 - RNA, 19 nt, Human
gagcugagaguagcacugg

SEQ ID NO: 913785 - RNA, 22 nt, Human
ccugcuguccccugagccugga

SEQ ID NO: 913786 - RNA, 22 nt, Human
aacaucuuugccaaauugcuau

SEQ ID NO: 913787 - RNA, 22 nt, Human
aggcuucacauuuucuaggccu

SEQ ID NO: 913788 - RNA, 22 nt, Human
guuauuuuaucucugagagguu

SEQ ID NO: 913789 - RNA, 22 nt, Human
auacguaaguugaacaucagaa

SEQ ID NO: 913790 - RNA, 22 nt, Human
ugacaggcuaggaggcugaagg

SEQ ID NO: 913791 - RNA, 22 nt, Human
accuucaggugagcacacagau

SEQ ID NO: 913792 - RNA, 22 nt, Human
augugugugaugggcgccgcca

SEQ ID NO: 913793 - RNA, 22 nt, Human
ucuucuguuuuagauugcauac

SEQ ID NO: 913794 - RNA, 22 nt, Human
caagauuuccaacccuggguaa

SEQ ID NO: 913795 - RNA, 22 nt, Human
uacugaaagaauacauaauuuc

SEQ ID NO: 913796 - RNA, 22 nt, Human
acuucaugcagaagagagcugu

SEQ ID NO: 913797 - RNA, 22 nt, Human
ccugggaggcggagguugcagu

SEQ ID NO: 913798 - RNA, 22 nt, Human
cccaggaggcggagguuguggu

SEQ ID NO: 913799 - RNA, 22 nt, Human
aauugacaaaucauacuuguau

SEQ ID NO: 913800 - RNA, 22 nt, Human
cugccacuagcuuucacaucuu

SEQ ID NO: 913801 - RNA, 22 nt, Human
agcuccugggccaagcccaugc

SEQ ID NO: 913802 - RNA, 22 nt, Human
aaggcccacagaacugucucca

SEQ ID NO: 913803 - RNA, 22 nt, Human
ccuggcuccgguucaagggaaa

SEQ ID NO: 913804 - RNA, 22 nt, Human
cagggucugaugguccucacuu

SEQ ID NO: 913805 - RNA, 22 nt, Human
uuuuguguagagauggggucuu

SEQ ID NO: 913806 - RNA, 22 nt, Human
uguuuugucuaaucuaaauucu

SEQ ID NO: 913807 - RNA, 22 nt, Human
agcucaauuuaaggcuuggcuu

SEQ ID NO: 913808 - RNA, 22 nt, Human
gguccuugcuucgguccaguac

SEQ ID NO: 913809 - RNA, 22 nt, Human
agcaggggcuccuccacagcca

SEQ ID NO: 913810 - RNA, 22 nt, Human
ucucuuaauaaguaaauacuga

SEQ ID NO: 913811 - RNA, 22 nt, Human
agcccuggcccggcugugcuuu

SEQ ID NO: 913812 - RNA, 22 nt, Human
ugugcauggcaucauugcagcc

SEQ ID NO: 913813 - RNA, 18 nt, Human
aucuuaacuugauggagu

SEQ ID NO: 913814 - RNA, 22 nt, Human
aguaacaaaugcaucugggcau

SEQ ID NO: 913815 - RNA, 22 nt, Human
agggccagaugaagccacaagc

SEQ ID NO: 913816 - RNA, 22 nt, Human
gauguauaguauguaauuucug

SEQ ID NO: 913817 - RNA, 22 nt, Human
uccauaaauuuuaugaacauau

SEQ ID NO: 913818 - RNA, 22 nt, Human
uucaggauuauacucucuuccc

SEQ ID NO: 913819 - RNA, 22 nt, Human
ugggagugauacaguauggaau

SEQ ID NO: 913820 - RNA, 22 nt, Human
ugcuucugcugauauuuuguga

SEQ ID NO: 913821 - RNA, 22 nt, Human
ugugcucuggaguugccuucac

SEQ ID NO: 913822 - RNA, 22 nt, Human
uuguacuagaaaggaugucaaa

SEQ ID NO: 913823 - RNA, 22 nt, Human
ucagcaaaauguggcuagugcu

SEQ ID NO: 913824 - RNA, 22 nt, Human
caugauuuacuaaaauuuguuu

SEQ ID NO: 913825 - RNA, 22 nt, Human
caucuuuaguagguucuggaga

SEQ ID NO: 913826 - RNA, 22 nt, Human
uggcaugauaggaggugcagaa

SEQ ID NO: 913827 - RNA, 22 nt, Human
auguaaacaagguuauugucca

SEQ ID NO: 913828 - RNA, 22 nt, Human
aacugcagagaacaucuggguu

SEQ ID NO: 913829 - RNA, 22 nt, Human
cccaggcugguccugaacuccu

SEQ ID NO: 913830 - RNA, 22 nt, Human
uggaaaaaacccagacucuaga

SEQ ID NO: 913831 - RNA, 22 nt, Human
aggagcugcaaauauuaguaau

SEQ ID NO: 913832 - RNA, 22 nt, Human
cuacauaaucuggauuugucug

SEQ ID NO: 913833 - RNA, 22 nt, Human
ugggcagaggcucugaagucca

SEQ ID NO: 913834 - RNA, 18 nt, Human
gaggaucagaaaucugua

SEQ ID NO: 913835 - RNA, 22 nt, Human
cuauacaguaaccacagugauu

SEQ ID NO: 913836 - RNA, 19 nt, Human
ugcugacacuagaugugca

SEQ ID NO: 913837 - RNA, 22 nt, Human
cauaaguuggguaauauaauga

SEQ ID NO: 913838 - RNA, 22 nt, Human
gaaauucaggacaaagacucuu

SEQ ID NO: 913839 - RNA, 22 nt, Human
ucuaauccuugcuaccugggug

SEQ ID NO: 913840 - RNA, 18 nt, Human
gcacauguaagaguaaag

SEQ ID NO: 913841 - RNA, 18 nt, Human
ugagaaccauguucauuc

SEQ ID NO: 913842 - RNA, 22 nt, Human
cauugaaauauggaaacugaug

SEQ ID NO: 913843 - RNA, 22 nt, Human
gacagcuggcaguggaaaggug

SEQ ID NO: 913844 - RNA, 22 nt, Human
uugauucuauguuguugucuca

SEQ ID NO: 913845 - RNA, 22 nt, Human
ggcagccagcaaugagaaguuu

SEQ ID NO: 913846 - RNA, 22 nt, Human
aagaaucuccauuccuguuuua

SEQ ID NO: 913847 - RNA, 22 nt, Human
cugggcucaguggcucauggcu

SEQ ID NO: 913848 - RNA, 22 nt, Human
ugaaaugucaguguuuuauaag

SEQ ID NO: 913849 - RNA, 22 nt, Human
uccagaggcucugagggagagu

SEQ ID NO: 913850 - RNA, 22 nt, Human
cacaggagaacccacagauucu

SEQ ID NO: 913851 - RNA, 22 nt, Human
ugaggcagugugagauaauaaa

SEQ ID NO: 913852 - RNA, 22 nt, Human
cuucuuuacuuucuagaaauaa

SEQ ID NO: 913853 - RNA, 21 nt, Human
agagggcgaaggcgggguccg

SEQ ID NO: 913854 - RNA, 22 nt, Human
gagacacacacaggagguggca

SEQ ID NO: 913855 - RNA, 22 nt, Human
gccuccugagaagccacaggcu

SEQ ID NO: 913856 - RNA, 22 nt, Human
cugugucuucuguuuugaaguu

SEQ ID NO: 913857 - RNA, 22 nt, Human
cacccaggcuggagugcauugg

SEQ ID NO: 913858 - RNA, 22 nt, Human
ucucuucauagugacacccauc

SEQ ID NO: 913859 - RNA, 22 nt, Human
gcuguguguucaauaaugugau

SEQ ID NO: 913860 - RNA, 22 nt, Human
ucucagggcaauucucagcgac

SEQ ID NO: 913861 - RNA, 22 nt, Human
uuuaguucucccagucuugauu

SEQ ID NO: 913862 - RNA, 22 nt, Human
augucacugugaggcagcuguc

SEQ ID NO: 913863 - RNA, 22 nt, Human
uaagaaacaugauuaauggcag

SEQ ID NO: 913864 - RNA, 22 nt, Human
ucacacagauugguagagcuga

SEQ ID NO: 913865 - RNA, 22 nt, Human
cuagaacagucaaagugagcuc

SEQ ID NO: 913866 - RNA, 22 nt, Human
gcucacuaaauaacaggaagaa

SEQ ID NO: 913867 - RNA, 22 nt, Human
uggaggagggcuggugucugua

SEQ ID NO: 913868 - RNA, 22 nt, Human
gcuggccaggugcuuugguucu

SEQ ID NO: 913869 - RNA, 22 nt, Human
aggcugagccacggggcuggcu

SEQ ID NO: 913870 - RNA, 22 nt, Human
acuaggaaggcauaugggcaga

SEQ ID NO: 913871 - RNA, 23 nt, Human
auggacaggguuucagggucaca

SEQ ID NO: 913872 - RNA, 19 nt, Human
cauaaauguacaagauaca

SEQ ID NO: 913873 - RNA, 20 nt, Human
ccugggguacacuggcaugu

SEQ ID NO: 913874 - RNA, 21 nt, Human
ccaaaggcuauguaucuucug

SEQ ID NO: 913875 - RNA, 22 nt, Human
uucucaaagggugguuugcaaa

SEQ ID NO: 913876 - RNA, 22 nt, Human
uuucauugcagagucugugugc

SEQ ID NO: 913877 - RNA, 22 nt, Human
gaguggcuccuuacaaguucca

SEQ ID NO: 913878 - RNA, 22 nt, Human
cagagcuguugcggggcuuggc

SEQ ID NO: 913879 - RNA, 22 nt, Human
gugucauguagaaauugaugaa

SEQ ID NO: 913880 - RNA, 22 nt, Human
ccugggcuguugcaucauccuu

SEQ ID NO: 913881 - RNA, 22 nt, Human
ugaaaauauaguuuuccagacu

SEQ ID NO: 913882 - RNA, 20 nt, Human
gcagcagacagacaggggac

SEQ ID NO: 913883 - RNA, 22 nt, Human
uguuaugaacuucuagaaaaca

SEQ ID NO: 913884 - RNA, 22 nt, Human
gugcugagugcagagugcagag

SEQ ID NO: 913885 - RNA, 22 nt, Human
ggcucauguaugaaagggugug

SEQ ID NO: 913886 - RNA, 22 nt, Human
cugagaaaauuucaggaagugu

SEQ ID NO: 913887 - RNA, 21 nt, Human
ggcauggcaccucugggcagg

SEQ ID NO: 913888 - RNA, 22 nt, Human
gauaaaauauguggccuuuagu

SEQ ID NO: 913889 - RNA, 22 nt, Human
uaggcuaggcugaagguuuugg

SEQ ID NO: 913890 - RNA, 22 nt, Human
agcucccugagaugccacagca

SEQ ID NO: 913891 - RNA, 22 nt, Human
caucuacacugauuaggugaac

SEQ ID NO: 913892 - RNA, 22 nt, Human
cauagaaucauagcacauuuga

SEQ ID NO: 913893 - RNA, 18 nt, Human
gagacacaagggccugga

SEQ ID NO: 913894 - RNA, 22 nt, Human
aauguucucaacaaaaggaagc

SEQ ID NO: 913895 - RNA, 23 nt, Human
uggcaguuuucuuuugugccagc

SEQ ID NO: 913896 - RNA, 22 nt, Human
augguauagagccacauguauu

SEQ ID NO: 913897 - RNA, 22 nt, Human
gcuggcagguaaagccccgggg

SEQ ID NO: 913898 - RNA, 22 nt, Human
uucuuaaaauucaagcuagguu

SEQ ID NO: 913899 - RNA, 22 nt, Human
ggcugaggcggcgaugcccuug

SEQ ID NO: 913900 - RNA, 22 nt, Human
gaggcagcuuggggcugugggu

SEQ ID NO: 913901 - RNA, 22 nt, Human
cagugcaguugguggcaggggu

SEQ ID NO: 913902 - RNA, 22 nt, Human
ucuagagaaguuuccuuuugaa

SEQ ID NO: 913903 - RNA, 22 nt, Human
cugccucugcgucccacagagu

SEQ ID NO: 913904 - RNA, 22 nt, Human
uagcaaggacguccaaagaacu

SEQ ID NO: 913905 - RNA, 22 nt, Human
augcaguguuuggaagcuuaag

SEQ ID NO: 913906 - RNA, 22 nt, Human
gaauacaagccaggcacaaggc

SEQ ID NO: 913907 - RNA, 22 nt, Human
aguuuuauugucccagagguga

SEQ ID NO: 913908 - RNA, 22 nt, Human
auuccagagagguucuggaggu

SEQ ID NO: 913909 - RNA, 21 nt, Human
aaaaugugagcgugaugcuua

SEQ ID NO: 913910 - RNA, 22 nt, Human
gaggcagugaacaauuccugug

SEQ ID NO: 913911 - RNA, 22 nt, Human
uggagagcaagucgcagacaug

SEQ ID NO: 913912 - RNA, 22 nt, Human
ggaugagguagaugaacaaggg

SEQ ID NO: 913913 - RNA, 22 nt, Human
ucucucuucagagauaccuugc

SEQ ID NO: 913914 - RNA, 22 nt, Human
acaaggcuucacacaguaugaa

SEQ ID NO: 913915 - RNA, 22 nt, Human
ugguccaggguguaguacagag

SEQ ID NO: 913916 - RNA, 22 nt, Human
gaggcugguaggaaaggaaaca

SEQ ID NO: 913917 - RNA, 22 nt, Human
uuaguaagcacucacacauucc

SEQ ID NO: 913918 - RNA, 21 nt, Human
uuuggugcuggaaaugccauu

SEQ ID NO: 913919 - RNA, 22 nt, Human
agcagcuagacuucagaaucug

SEQ ID NO: 913920 - RNA, 22 nt, Human
auuacaagaugcauccauauuu

SEQ ID NO: 913921 - RNA, 22 nt, Human
agccuguggaucccugcacugg

SEQ ID NO: 913922 - RNA, 22 nt, Human
gcuauuucuauauuauaaagaa

SEQ ID NO: 913923 - RNA, 22 nt, Human
ucauguuucucuuacagcagcu

SEQ ID NO: 913924 - RNA, 22 nt, Human
uacauugauggaguaccuagcu

SEQ ID NO: 913925 - RNA, 22 nt, Human
ccagagaggggaagggcuugcc

SEQ ID NO: 913926 - RNA, 22 nt, Human
ugacuucaaaggcucuacuccu

SEQ ID NO: 913927 - RNA, 22 nt, Human
agaaaucacuuagaggaaguga

SEQ ID NO: 913928 - RNA, 22 nt, Human
gaaaguuucuucauuaagaugu

SEQ ID NO: 913929 - RNA, 22 nt, Human
ccaggcucacugacuaccacau

SEQ ID NO: 913930 - RNA, 22 nt, Human
uguagugugacauaggugucca

SEQ ID NO: 913931 - RNA, 19 nt, Human
ugccuggcaccagcuccac

SEQ ID NO: 913932 - RNA, 22 nt, Human
aaguuccucaaauaaaacauga

SEQ ID NO: 913933 - RNA, 22 nt, Human
gcaggugguuaaggucccaugu

SEQ ID NO: 913934 - RNA, 22 nt, Human
ugccuaggaaaccucaugcuuc

SEQ ID NO: 913935 - RNA, 22 nt, Human
gggcuuggcucauaaguggaug

SEQ ID NO: 913936 - RNA, 22 nt, Human
ugucugaaucgcuuccuagagg

SEQ ID NO: 913937 - RNA, 22 nt, Human
aggucagguaucagcagguauu

SEQ ID NO: 913938 - RNA, 22 nt, Human
ugugcgcuccggcgagucagcg

SEQ ID NO: 913939 - RNA, 22 nt, Human
cagcagaucaauguagaauauu

SEQ ID NO: 913940 - RNA, 22 nt, Human
auacuucuuugauguucacagg

SEQ ID NO: 913941 - RNA, 22 nt, Human
ugcaggcugcuggcaguagcuu

SEQ ID NO: 913942 - RNA, 22 nt, Human
gggcucuguuuagaccagagau

SEQ ID NO: 913943 - RNA, 22 nt, Human
caaugguggugucagaagagau

SEQ ID NO: 913944 - RNA, 22 nt, Human
auggcuuuuuagacuuugguac

SEQ ID NO: 913945 - RNA, 22 nt, Human
augucucugcugugguuagcuu

SEQ ID NO: 913946 - RNA, 22 nt, Human
caugaauauacauccugauggc

SEQ ID NO: 913947 - RNA, 22 nt, Human
agcacugauuuaaacuggauuu

SEQ ID NO: 913948 - RNA, 23 nt, Human
ugagaagccaggggagcgugagg

SEQ ID NO: 913949 - RNA, 22 nt, Human
ucacagcaaaagugugcagagc

SEQ ID NO: 913950 - RNA, 19 nt, Human
uucuaugauuaacaugaga

SEQ ID NO: 913951 - RNA, 22 nt, Human
caugugguauugugagauccac

SEQ ID NO: 913952 - RNA, 22 nt, Human
agagccccugguggagugagaa

SEQ ID NO: 913953 - RNA, 22 nt, Human
aggggccaccaccaaggaaggu

SEQ ID NO: 913954 - RNA, 22 nt, Human
uggcuugucauguaucugaggc

SEQ ID NO: 913955 - RNA, 21 nt, Human
acuuuacaauuuacauaguga

SEQ ID NO: 913956 - RNA, 22 nt, Human
ccauucugagucuuaugucuuu

SEQ ID NO: 913957 - RNA, 22 nt, Human
acaaaagcacugcagaguaagc

SEQ ID NO: 913958 - RNA, 22 nt, Human
cacauagauaggcagaagaaca

SEQ ID NO: 913959 - RNA, 22 nt, Human
cagggccaugaggcacaggguc

SEQ ID NO: 913960 - RNA, 22 nt, Human
gagguggcuggcucagagccag

SEQ ID NO: 913961 - RNA, 22 nt, Human
cccuccagggagccaugcuggg

SEQ ID NO: 913962 - RNA, 22 nt, Human
caggcucugcugcuacagcugu

SEQ ID NO: 913963 - RNA, 22 nt, Human
agcagcagcucaguucucagcu

SEQ ID NO: 913964 - RNA, 22 nt, Human
ugggccucaugcccagccaccc

SEQ ID NO: 913965 - RNA, 22 nt, Human
uuacaguaauguauuauuuaac

SEQ ID NO: 913966 - RNA, 20 nt, Human
uagcuaccuugauccccugg

SEQ ID NO: 913967 - RNA, 22 nt, Human
aauguguaaaugaggagucuug

SEQ ID NO: 913968 - RNA, 22 nt, Human
cuuguagaauugaaauggucuc

SEQ ID NO: 913969 - RNA, 22 nt, Human
guuuuauaggugaaauauuacu

SEQ ID NO: 913970 - RNA, 20 nt, Human
ugcugcuuugccacuaguug

SEQ ID NO: 913971 - RNA, 22 nt, Human
uugggcagauguuuccugugga

SEQ ID NO: 913972 - RNA, 22 nt, Human
uguauacaugucugugugcaca

SEQ ID NO: 913973 - RNA, 22 nt, Human
cuucuguguuuuacuauaugua

SEQ ID NO: 913974 - RNA, 22 nt, Human
cccaggcuggagugcaauggug

SEQ ID NO: 913975 - RNA, 22 nt, Human
gcagagaggaaugaagccaucc

SEQ ID NO: 913976 - RNA, 22 nt, Human
uuuggcagagucauuucagaaa

SEQ ID NO: 913977 - RNA, 22 nt, Human
caggccacagcuaaagaggauu

SEQ ID NO: 913978 - RNA, 21 nt, Human
cuacagaaucgagcauucugg

SEQ ID NO: 913979 - RNA, 22 nt, Human
aaugucuucaguguauacaugg

SEQ ID NO: 913980 - RNA, 22 nt, Human
acugugugaggcugggugaguc

SEQ ID NO: 913981 - RNA, 22 nt, Human
ccucccaccguaucucaguggc

SEQ ID NO: 913982 - RNA, 22 nt, Human
guguuguggagcuugucagggg

SEQ ID NO: 913983 - RNA, 22 nt, Human
aaguucuagagguugauuuggu

SEQ ID NO: 913984 - RNA, 21 nt, Human
gcacagugccaggcacacagu

SEQ ID NO: 913985 - RNA, 22 nt, Human
cagguccacagcccaucacugc

SEQ ID NO: 913986 - RNA, 22 nt, Human
cccaacuacucucaggcagcuu

SEQ ID NO: 913987 - RNA, 21 nt, Human
uugaccaagggugcgugcucc

SEQ ID NO: 913988 - RNA, 22 nt, Human
aaguaaaagcuuuaccaugcgc

SEQ ID NO: 913989 - RNA, 22 nt, Human
agcuuuauauaaaagaguacau

SEQ ID NO: 913990 - RNA, 22 nt, Human
gugggcagugccugacggauga

SEQ ID NO: 913991 - RNA, 22 nt, Human
auacacuuuagaaaaacgcugc

SEQ ID NO: 913992 - RNA, 22 nt, Human
agagacuguggcucuuugaagg

SEQ ID NO: 913993 - RNA, 22 nt, Human
aagauacauguuaggagcaacc

SEQ ID NO: 913994 - RNA, 18 nt, Human
ugcagccuguagucuugu

SEQ ID NO: 913995 - RNA, 22 nt, Human
aucuguggcgcaaacaaaggcu

SEQ ID NO: 913996 - RNA, 22 nt, Human
augcacaugaggcaagcaaaau

SEQ ID NO: 913997 - RNA, 22 nt, Human
aucaggaagaagaauguguugg

SEQ ID NO: 913998 - RNA, 22 nt, Human
gaagggaaauucagaucuucag

SEQ ID NO: 913999 - RNA, 22 nt, Human
uauaaauuaaugugcccaugag

SEQ ID NO: 914000 - RNA, 22 nt, Human
uagauucucccaucaugagaug

SEQ ID NO: 914001 - RNA, 22 nt, Human
ugucagugaaaaauugugauag

SEQ ID NO: 914002 - RNA, 22 nt, Human
uccaggcauaaugcccaguggu

SEQ ID NO: 914003 - RNA, 22 nt, Human
auauauagagcuagauguuaaa

SEQ ID NO: 914004 - RNA, 22 nt, Human
ccuggccaggcucucagcacug

SEQ ID NO: 914005 - RNA, 22 nt, Human
cuuggggcugucacucuggcau

SEQ ID NO: 914006 - RNA, 22 nt, Human
gcaggcaguugcaguuuucuag

SEQ ID NO: 914007 - RNA, 22 nt, Human
gagcugugagggacacauugcu

SEQ ID NO: 914008 - RNA, 22 nt, Human
ugucacuuuggccaagccauug

SEQ ID NO: 914009 - RNA, 22 nt, Human
ugaaugaauccuaacaaagaca

SEQ ID NO: 914010 - RNA, 22 nt, Human
ugggacaggaggccucuggaga

SEQ ID NO: 914011 - RNA, 23 nt, Human
cacuguguuacauguugaagaug

SEQ ID NO: 914012 - RNA, 22 nt, Human
cugucuguggagcuucugaugu

SEQ ID NO: 914013 - RNA, 22 nt, Human
ugaggcuccagccaggccagca

SEQ ID NO: 914014 - RNA, 22 nt, Human
ucacaaacaaugcuuuggaauu

SEQ ID NO: 914015 - RNA, 20 nt, Human
uuucugugcccaggucuguu

SEQ ID NO: 914016 - RNA, 22 nt, Human
ggagagguuauccguguuaugu

SEQ ID NO: 914017 - RNA, 22 nt, Human
cacaucugaaaagaugcacaag

SEQ ID NO: 914018 - RNA, 22 nt, Human
cacagggcagaggguccguggc

SEQ ID NO: 914019 - RNA, 22 nt, Human
agccuuagagacuuaaaacagg

SEQ ID NO: 914020 - RNA, 22 nt, Human
agggccagccaggcccuacaaa

SEQ ID NO: 914021 - RNA, 22 nt, Human
aguuaacacaaguaagauucca

SEQ ID NO: 914022 - RNA, 22 nt, Human
ccaggagaauaauggcagauua

SEQ ID NO: 914023 - RNA, 22 nt, Human
gccugggacugcagauccccag

SEQ ID NO: 914024 - RNA, 22 nt, Human
caggucagcuggugccccaggu

SEQ ID NO: 914025 - RNA, 22 nt, Human
aauuucacuggaaaagauaauu

SEQ ID NO: 914026 - RNA, 22 nt, Human
agcccaggugagggguucgaaa

SEQ ID NO: 914027 - RNA, 22 nt, Human
gcugcagagggucuuagagagg

SEQ ID NO: 914028 - RNA, 22 nt, Human
gugcauuuggugacucucaccc

SEQ ID NO: 914029 - RNA, 23 nt, Human
ucuuuccuaaugaaacagugaaa

SEQ ID NO: 914030 - RNA, 22 nt, Human
uggguccuugccaucuuggagu

SEQ ID NO: 914031 - RNA, 22 nt, Human
auauaucuucauuaggucgaga

SEQ ID NO: 914032 - RNA, 22 nt, Human
uguggaacaccuagaaugggua

SEQ ID NO: 914033 - RNA, 22 nt, Human
aggccugcugucuugaggccaa

SEQ ID NO: 914034 - RNA, 22 nt, Human
uacagaagcugagacacugaga

SEQ ID NO: 914035 - RNA, 22 nt, Human
gggagggauuaguucugccugg

SEQ ID NO: 914036 - RNA, 22 nt, Human
ugagcaagagaaacugacugua

SEQ ID NO: 914037 - RNA, 22 nt, Human
ucaggcuguagggccccuggag

SEQ ID NO: 914038 - RNA, 22 nt, Human
ucagggugaaccaggcaggaau

SEQ ID NO: 914039 - RNA, 22 nt, Human
ggccuaggauucugcauuucua

SEQ ID NO: 914040 - RNA, 22 nt, Human
ugcaggugucucugucuagcgu

SEQ ID NO: 914041 - RNA, 22 nt, Human
uagcuucuauacaacuucagca

SEQ ID NO: 914042 - RNA, 22 nt, Human
cuuaaucucaccugcaaagucc

SEQ ID NO: 914043 - RNA, 22 nt, Human
uucuuuuaaugucuggcuuuca

SEQ ID NO: 914044 - RNA, 22 nt, Human
auggaaugggaagaguguguga

SEQ ID NO: 914045 - RNA, 22 nt, Human
cucucuuugauguauaaauaau

SEQ ID NO: 914046 - RNA, 19 nt, Human
aagcccaguguaugcucuu

SEQ ID NO: 914047 - RNA, 23 nt, Human
ccuuaaauaucuacccuguggca

SEQ ID NO: 914048 - RNA, 22 nt, Human
ugggccuggcccuguggaggag

SEQ ID NO: 914049 - RNA, 22 nt, Human
gaagcuccguacuaugacuuuu

SEQ ID NO: 914050 - RNA, 22 nt, Human
gagagcuguccggcugagcagc

SEQ ID NO: 914051 - RNA, 22 nt, Human
guacagugccagacuucuaggu

SEQ ID NO: 914052 - RNA, 22 nt, Human
aagguauagcuugcauacagaa

SEQ ID NO: 914053 - RNA, 22 nt, Human
uggcccugucccuggagccugg

SEQ ID NO: 914054 - RNA, 22 nt, Human
cuccccagcauucugacuuccu

SEQ ID NO: 914055 - RNA, 22 nt, Human
cuggcugguuggggagaagaca

SEQ ID NO: 914056 - RNA, 22 nt, Human
aagggugaagggugguggccua

SEQ ID NO: 914057 - RNA, 22 nt, Human
ugucuucacucaagucucuugg

SEQ ID NO: 914058 - RNA, 22 nt, Human
aaaaagguugauccagauuagg

SEQ ID NO: 914059 - RNA, 22 nt, Human
cggcagagacggcgcuuugaac

SEQ ID NO: 914060 - RNA, 22 nt, Human
ggugcugagagccuaggagggc

SEQ ID NO: 914061 - RNA, 22 nt, Human
uuccuaacaagggguauucauc

SEQ ID NO: 914062 - RNA, 22 nt, Human
uaguuacaauggguucugugac

SEQ ID NO: 914063 - RNA, 22 nt, Human
auuuacagaaacuuaaucauag

SEQ ID NO: 914064 - RNA, 22 nt, Human
aggaggaauugacacagaagcc

SEQ ID NO: 914065 - RNA, 22 nt, Human
auauaacauacauacagaaaag

SEQ ID NO: 914066 - RNA, 22 nt, Human
aaauguguuucuuugugaaugg

SEQ ID NO: 914067 - RNA, 22 nt, Human
gggcuggugaggcugcccugca

SEQ ID NO: 914068 - RNA, 22 nt, Human
auuguugaucuucugguaagcc

SEQ ID NO: 914069 - RNA, 22 nt, Human
aacaguaauuugcgguuuuugc

SEQ ID NO: 914070 - RNA, 22 nt, Human
gcuguggaaaugccuaacauga

SEQ ID NO: 914071 - RNA, 22 nt, Human
auggacagguacugcagugggu

SEQ ID NO: 914072 - RNA, 22 nt, Human
aaguccuaaacacacacaaggc

SEQ ID NO: 914073 - RNA, 23 nt, Human
aaaguucucuugcgugugggaaa

SEQ ID NO: 914074 - RNA, 22 nt, Human
aguuugacaaaguaaaaugaca

SEQ ID NO: 914075 - RNA, 22 nt, Human
ccauggagcaccucacagaggc

SEQ ID NO: 914076 - RNA, 22 nt, Human
caguaaacacuagcauucuugg

SEQ ID NO: 914077 - RNA, 22 nt, Human
gaggccugguuuccagcauccu

SEQ ID NO: 914078 - RNA, 22 nt, Human
uuaacuggggaagcauuucaug

SEQ ID NO: 914079 - RNA, 18 nt, Human
ugguuugucaugagaauu

SEQ ID NO: 914080 - RNA, 21 nt, Human
gagagggcauuauaggaagug

SEQ ID NO: 914081 - RNA, 22 nt, Human
guccaggccugccucugaggag

SEQ ID NO: 914082 - RNA, 23 nt, Human
agacaucaggaugguggcuggga

SEQ ID NO: 914083 - RNA, 22 nt, Human
cacugaaaauuagcuuuccuga

SEQ ID NO: 914084 - RNA, 22 nt, Human
agaagaaaugaggccguucugc

SEQ ID NO: 914085 - RNA, 22 nt, Human
cucacaguguaauauugaaccc

SEQ ID NO: 914086 - RNA, 22 nt, Human
ccacugaaggucaacauagagc

SEQ ID NO: 914087 - RNA, 22 nt, Human
ucagaggcuugaagcccaagcc

SEQ ID NO: 914088 - RNA, 22 nt, Human
aacaucuaguuccuauauaaua

SEQ ID NO: 914089 - RNA, 18 nt, Human
uguuaaaugaagauuugc

SEQ ID NO: 914090 - RNA, 22 nt, Human
gcucugguggugaucagacgcu

SEQ ID NO: 914091 - RNA, 22 nt, Human
uguugaaucagaaguccuggcu

SEQ ID NO: 914092 - RNA, 22 nt, Human
uuuaauauccaguggauacaaa

SEQ ID NO: 914093 - RNA, 22 nt, Human
caugcaaaauguauuuuauuag

SEQ ID NO: 914094 - RNA, 19 nt, Human
ucaggaguuaguugugcuc

SEQ ID NO: 914095 - RNA, 18 nt, Human
cugugcagcaaacugagc

SEQ ID NO: 914096 - RNA, 21 nt, Human
ugccagcauguaggcuaguug

SEQ ID NO: 914097 - RNA, 22 nt, Human
ucauuucagccauuuuuaaaug

SEQ ID NO: 914098 - RNA, 22 nt, Human
aaaguguagagugccucaaaau

SEQ ID NO: 914099 - RNA, 22 nt, Human
auauucuugaaagauccuggua

SEQ ID NO: 914100 - RNA, 17 nt, Human
uaguggcaggaaaugaa

SEQ ID NO: 914101 - RNA, 22 nt, Human
aaggcccuuuagcagaggaggg

SEQ ID NO: 914102 - RNA, 22 nt, Human
acaauuccacauggcaugcagg

SEQ ID NO: 914103 - RNA, 22 nt, Human
uucuuuauguuaaugaaucuau

SEQ ID NO: 914104 - RNA, 22 nt, Human
agaaguuuccagucuaguaagg

SEQ ID NO: 914105 - RNA, 22 nt, Human
uacuccaggacuccauuugaaa

SEQ ID NO: 914106 - RNA, 22 nt, Human
gaggcuguuagggccugaggua

SEQ ID NO: 914107 - RNA, 22 nt, Human
cauagauucuuauuuccaucuu

SEQ ID NO: 914108 - RNA, 22 nt, Human
uugugcugagcuucuagcugug

SEQ ID NO: 914109 - RNA, 22 nt, Human
uugagguaguacuuauuauugg

SEQ ID NO: 914110 - RNA, 17 nt, Human
uuuuguucaucuucaaa

SEQ ID NO: 914111 - RNA, 22 nt, Human
uagaaacccauguuuauucagu

SEQ ID NO: 914112 - RNA, 20 nt, Human
agagcugggaagcucccuau

SEQ ID NO: 914113 - RNA, 21 nt, Human
auaucacaaacauauggucug

SEQ ID NO: 914114 - RNA, 22 nt, Human
guguagcauauagcaagagcau

SEQ ID NO: 914115 - RNA, 22 nt, Human
aaauggcaggcucuuugcuagu

SEQ ID NO: 914116 - RNA, 22 nt, Human
gugagaauaccagcagugagaa

SEQ ID NO: 914117 - RNA, 22 nt, Human
aaucacaaauuuagacagagcu

SEQ ID NO: 914118 - RNA, 22 nt, Human
uugagaaauacuuuuguagccu

SEQ ID NO: 914119 - RNA, 22 nt, Human
acaaggcgugacggagagagga

SEQ ID NO: 914120 - RNA, 19 nt, Human
agguccuuggcuggaaguu

SEQ ID NO: 914121 - RNA, 22 nt, Human
ucugcagacuugauaaccacug

SEQ ID NO: 914122 - RNA, 22 nt, Human
cuaaaugucagaguagcuugca

SEQ ID NO: 914123 - RNA, 18 nt, Human
gcuccuggagucugacuc

SEQ ID NO: 914124 - RNA, 22 nt, Human
agcuccagagccacauccauca

SEQ ID NO: 914125 - RNA, 22 nt, Human
uugcucauuccgugagaagauc

SEQ ID NO: 914126 - RNA, 22 nt, Human
acauuucagauucaugaaguga

SEQ ID NO: 914127 - RNA, 22 nt, Human
uucuaguuuugccuuaucaaca

SEQ ID NO: 914128 - RNA, 23 nt, Human
acagacauuccauaauguacacc

SEQ ID NO: 914129 - RNA, 22 nt, Human
acuaaaguucacggucagcuuu

SEQ ID NO: 914130 - RNA, 22 nt, Human
acuccgggagccaggagaggcu

SEQ ID NO: 914131 - RNA, 22 nt, Human
uacauagaggguaauagcauca

SEQ ID NO: 914132 - RNA, 22 nt, Human
ucauuuauauuguauucuguag

SEQ ID NO: 914133 - RNA, 23 nt, Human
aaagagacugauacggaaguucc

SEQ ID NO: 914134 - RNA, 22 nt, Human
ccacugagugagcagagcaggg

SEQ ID NO: 914135 - RNA, 22 nt, Human
ucaggauaccucaguuuuagcu

SEQ ID NO: 914136 - RNA, 22 nt, Human
caguugaaaagauuuuauucug

SEQ ID NO: 914137 - RNA, 22 nt, Human
cuggaaaguagauguacuaagg

SEQ ID NO: 914138 - RNA, 23 nt, Human
ugacagcaggaacugauuaugua

SEQ ID NO: 914139 - RNA, 22 nt, Human
aauggcucugauguuguuguga

SEQ ID NO: 914140 - RNA, 21 nt, Human
ucacugaagccuaagauguuu

SEQ ID NO: 914141 - RNA, 22 nt, Human
agugacuuuaguugaaucuugu

SEQ ID NO: 914142 - RNA, 22 nt, Human
uuagaacauagcaacagaauua

SEQ ID NO: 914143 - RNA, 20 nt, Human
caaggcagaccagagugagu

SEQ ID NO: 914144 - RNA, 21 nt, Human
cuuaagauggcauaguacgaa

SEQ ID NO: 914145 - RNA, 22 nt, Human
aaaguuuguugcuuacaaagaa

SEQ ID NO: 914146 - RNA, 22 nt, Human
uacugugcagcugugcuuuggg

SEQ ID NO: 914147 - RNA, 22 nt, Human
caucuuuguucuguaaacuuuu

SEQ ID NO: 914148 - RNA, 22 nt, Human
uuauguaccugaauuaguaaag

SEQ ID NO: 914149 - RNA, 22 nt, Human
aaagcuauagggucaagcauuu

SEQ ID NO: 914150 - RNA, 22 nt, Human
ccugguccccaucggcccagcg

SEQ ID NO: 914151 - RNA, 22 nt, Human
gguggcccuaaccgcagccucc

SEQ ID NO: 914152 - RNA, 22 nt, Human
cucuucauguguuuaauuuuua

SEQ ID NO: 914153 - RNA, 22 nt, Human
gcagugugcauggcuuuuggcc

SEQ ID NO: 914154 - RNA, 22 nt, Human
gcaggaguguggugggacaucc

SEQ ID NO: 914155 - RNA, 22 nt, Human
uuauacagcauugcuagugaug

SEQ ID NO: 914156 - RNA, 22 nt, Human
uccagagaauucuacgcagugc

SEQ ID NO: 914157 - RNA, 22 nt, Human
uccaucuguuuacuauaaagau

SEQ ID NO: 914158 - RNA, 22 nt, Human
ucuuucaauccauucauauguc

SEQ ID NO: 914159 - RNA, 22 nt, Human
ggccagcccagugguccucucu

SEQ ID NO: 914160 - RNA, 22 nt, Human
uagcacaaagagucuuucagag

SEQ ID NO: 914161 - RNA, 22 nt, Human
ucuguaggguaguaguggagau

SEQ ID NO: 914162 - RNA, 22 nt, Human
aaaguccuguuaacuguuaaca

SEQ ID NO: 914163 - RNA, 22 nt, Human
ugggccacauuccaaaccagcu

SEQ ID NO: 914164 - RNA, 22 nt, Human
gacauuuagaagucuaauggcc

SEQ ID NO: 914165 - RNA, 22 nt, Human
uagcaagaaguagcucuggauu

SEQ ID NO: 914166 - RNA, 22 nt, Human
uugaagaaguaauuuuaagucu

SEQ ID NO: 914167 - RNA, 22 nt, Human
uguaacaaaauaccuuggauug

SEQ ID NO: 914168 - RNA, 22 nt, Human
cauucucuacacuccugcccug

SEQ ID NO: 914169 - RNA, 22 nt, Human
ugaaaucugcaugcaaaguccu

SEQ ID NO: 914170 - RNA, 22 nt, Human
cagggccugagggcugcucugc

SEQ ID NO: 914171 - RNA, 22 nt, Human
caggcaagauccagaggcugcu

SEQ ID NO: 914172 - RNA, 22 nt, Human
cuuugcaaaaguuaauuguuga

SEQ ID NO: 914173 - RNA, 22 nt, Human
acaucgagucugaguugcuaug

SEQ ID NO: 914174 - RNA, 22 nt, Human
aguggcuagaucaugagugagc

SEQ ID NO: 914175 - RNA, 22 nt, Human
aggcuucauuguggcaucagga

SEQ ID NO: 914176 - RNA, 22 nt, Human
caucaaauuaugugucaaagca

SEQ ID NO: 914177 - RNA, 22 nt, Human
caaguauauuugaacauguaaa

SEQ ID NO: 914178 - RNA, 22 nt, Human
gaaauacagaaagggcugaaug

SEQ ID NO: 914179 - RNA, 22 nt, Human
uccaggagugugugcuaauggg

SEQ ID NO: 914180 - RNA, 22 nt, Human
ucagggcauucaagaggccugg

SEQ ID NO: 914181 - RNA, 22 nt, Human
auuucacaucuaucucagauuu

SEQ ID NO: 914182 - RNA, 18 nt, Human
ucugucucuguccuugcu

SEQ ID NO: 914183 - RNA, 22 nt, Human
cacauugauucaguccugugug

SEQ ID NO: 914184 - RNA, 20 nt, Human
aagcaauauagugcaaaugu

SEQ ID NO: 914185 - RNA, 22 nt, Human
ggguggcaggauuggcaggagu

SEQ ID NO: 914186 - RNA, 22 nt, Human
uguucccauuuucugcauaauc

SEQ ID NO: 914187 - RNA, 22 nt, Human
cuuccugggucuggagacugga

SEQ ID NO: 914188 - RNA, 22 nt, Human
augagcucauccgagucacacu

SEQ ID NO: 914189 - RNA, 22 nt, Human
uauuugaauccugguucuucag

SEQ ID NO: 914190 - RNA, 22 nt, Human
gucauaaucacaguuuuaugca

SEQ ID NO: 914191 - RNA, 22 nt, Human
gaagauaccucaauucuuugaa

SEQ ID NO: 914192 - RNA, 22 nt, Human
cagcauacugcaucaaaugagg

SEQ ID NO: 914193 - RNA, 22 nt, Human
guugucuuagucagaaauaugc

SEQ ID NO: 914194 - RNA, 22 nt, Human
agacauuuggaagauacacaua

SEQ ID NO: 914195 - RNA, 22 nt, Human
cuuuggcugacagguuucuggu

SEQ ID NO: 914196 - RNA, 22 nt, Human
uccuggcuggaauuucucacuc

SEQ ID NO: 914197 - RNA, 22 nt, Human
ugucuuauuccuucuguucagc

SEQ ID NO: 914198 - RNA, 22 nt, Human
gugcaugucuuuggaggccucc

SEQ ID NO: 914199 - RNA, 22 nt, Human
agacacuggugaagaaaucagg

SEQ ID NO: 914200 - RNA, 22 nt, Human
cacccaggcuggagugcagggg

SEQ ID NO: 914201 - RNA, 22 nt, Human
uucuuacacucuuaaaaaucau

SEQ ID NO: 914202 - RNA, 22 nt, Human
aacauaagggagcuucaaaacu

SEQ ID NO: 914203 - RNA, 20 nt, Human
agccaggguucuggaugcac

SEQ ID NO: 914204 - RNA, 22 nt, Human
auguagaagcugacagugcugu

SEQ ID NO: 914205 - RNA, 22 nt, Human
uacagaaguaaauaccaaaagc

SEQ ID NO: 914206 - RNA, 22 nt, Human
gucaaaacaaaguuaagaauuc

SEQ ID NO: 914207 - RNA, 22 nt, Human
ucuccugggaggacaaggaagg

SEQ ID NO: 914208 - RNA, 22 nt, Human
ucuccuuuaagauuuccucagg

SEQ ID NO: 914209 - RNA, 22 nt, Human
acaaaugugauuguuucugaaa

SEQ ID NO: 914210 - RNA, 22 nt, Human
uuuuaugcaaguuaugauuaaa

SEQ ID NO: 914211 - RNA, 22 nt, Human
ucugucaucaaauaugcuuucu

SEQ ID NO: 914212 - RNA, 22 nt, Human
agcugccuggagucauuuccug

SEQ ID NO: 914213 - RNA, 22 nt, Human
cuuuuuuccuaaggcaacauga

SEQ ID NO: 914214 - RNA, 22 nt, Human
ggcuccagcuaaugguuucuau

SEQ ID NO: 914215 - RNA, 22 nt, Human
gcuggccucgcaggcaggaugu

SEQ ID NO: 914216 - RNA, 22 nt, Human
acaugcauacguguguuuaaaa

SEQ ID NO: 914217 - RNA, 22 nt, Human
gcucaggggaaugggcugccgu

SEQ ID NO: 914218 - RNA, 22 nt, Human
gagaaggaggcgaagcgugugc

SEQ ID NO: 914219 - RNA, 22 nt, Human
uagaaacuacuagaauaagaga

SEQ ID NO: 914220 - RNA, 22 nt, Human
ggaagaaagacauuuauuuuga

SEQ ID NO: 914221 - RNA, 22 nt, Human
caaagcuauaaauucagacaga

SEQ ID NO: 914222 - RNA, 22 nt, Human
cagcaucucccaggcauuugcc

SEQ ID NO: 914223 - RNA, 22 nt, Human
cacuuuauaaaauuggugugag

SEQ ID NO: 914224 - RNA, 20 nt, Human
agggccugcucugugguguc

SEQ ID NO: 914225 - RNA, 22 nt, Human
gcuccagggaacagaauguacu

SEQ ID NO: 914226 - RNA, 22 nt, Human
agaugcugauugaauagauuuc

SEQ ID NO: 914227 - RNA, 22 nt, Human
aacuccagguccuuugaaucug

SEQ ID NO: 914228 - RNA, 22 nt, Human
auguuuguugaacaucuacugc

SEQ ID NO: 914229 - RNA, 22 nt, Human
ucugacagcuccaggcagcaau

SEQ ID NO: 914230 - RNA, 22 nt, Human
ucuauaaaugcagauaugugug

SEQ ID NO: 914231 - RNA, 22 nt, Human
cuuuucagagcugagaucaccg

SEQ ID NO: 914232 - RNA, 22 nt, Human
cagcucaggaaggaaggccggc

SEQ ID NO: 914233 - RNA, 22 nt, Human
aucagaaauagucauguuacuu

SEQ ID NO: 914234 - RNA, 22 nt, Human
guacuaaaaaaugaucaguuug

SEQ ID NO: 914235 - RNA, 22 nt, Human
gcacagaaccagacaugaggca

SEQ ID NO: 914236 - RNA, 22 nt, Human
cucaggauucucgacacucaca

SEQ ID NO: 914237 - RNA, 22 nt, Human
agcaaacacaagagguaauuuc

SEQ ID NO: 914238 - RNA, 22 nt, Human
ggcaccagggcaagggucuuuc

SEQ ID NO: 914239 - RNA, 22 nt, Human
aggcugagucaaguuaggguga

SEQ ID NO: 914240 - RNA, 22 nt, Human
ucuaggggugcagaagggaucc

SEQ ID NO: 914241 - RNA, 22 nt, Human
uuggaauuuaguaaaauaaugc

SEQ ID NO: 914242 - RNA, 22 nt, Human
aaugaagacacaucuuucucau

SEQ ID NO: 914243 - RNA, 22 nt, Human
aaucugagggaacuugaacucc

SEQ ID NO: 914244 - RNA, 22 nt, Human
ucaaaggcauugccaauaagua

SEQ ID NO: 914245 - RNA, 22 nt, Human
agaagccauucccuguaggcuc

SEQ ID NO: 914246 - RNA, 22 nt, Human
uccaaggacgcuggaccccugc

SEQ ID NO: 914247 - RNA, 20 nt, Human
uggcuagcauuaaaaugacu

SEQ ID NO: 914248 - RNA, 22 nt, Human
guuuuccuguugaguaguauuc

SEQ ID NO: 914249 - RNA, 22 nt, Human
ggaagaggcucucauugagggc

SEQ ID NO: 914250 - RNA, 16 nt, Human
gaagaaggaaaacuac

SEQ ID NO: 914251 - RNA, 22 nt, Human
gaggcagagaccuucaggaccu

SEQ ID NO: 914252 - RNA, 18 nt, Human
cuucaguggcugcucugc

SEQ ID NO: 914253 - RNA, 22 nt, Human
gcuucuguucaaggauauaagg

SEQ ID NO: 914254 - RNA, 22 nt, Human
aaagaaucuauauaucaccacc

SEQ ID NO: 914255 - RNA, 22 nt, Human
auuccaaagguuaaugcccauu

SEQ ID NO: 914256 - RNA, 22 nt, Human
ucuagaauguuccaccuuguuu

SEQ ID NO: 914257 - RNA, 22 nt, Human
uccccaggggccugggcacagu

SEQ ID NO: 914258 - RNA, 22 nt, Human
uuccagggcuagguaaugggua

SEQ ID NO: 914259 - RNA, 22 nt, Human
cuacauuuugugauuaugaaau

SEQ ID NO: 914260 - RNA, 22 nt, Human
cagguucuuguuucaaacagac

SEQ ID NO: 914261 - RNA, 22 nt, Human
gcccugcagugcggagguggca

SEQ ID NO: 914262 - RNA, 22 nt, Human
agggugggcuagacucuucccc

SEQ ID NO: 914263 - RNA, 21 nt, Human
agaccagugggauaaauaggu

SEQ ID NO: 914264 - RNA, 22 nt, Human
auaaguaggaaaauuugaauau

SEQ ID NO: 914265 - RNA, 22 nt, Human
ugcagcuccucuggcugccuga

SEQ ID NO: 914266 - RNA, 22 nt, Human
guacagaaugcuugguaaggca

SEQ ID NO: 914267 - RNA, 22 nt, Human
ucugggaugagaucagagacac

SEQ ID NO: 914268 - RNA, 22 nt, Human
ggugucuggacagugagccagg

SEQ ID NO: 914269 - RNA, 22 nt, Human
ccaggaggaugguuguuaggug

SEQ ID NO: 914270 - RNA, 22 nt, Human
acaguacaaaacccaccagagg

SEQ ID NO: 914271 - RNA, 20 nt, Human
ugcugaagaaucacagaugg

SEQ ID NO: 914272 - RNA, 22 nt, Human
aaaguuuuguugauuguggaau

SEQ ID NO: 914273 - RNA, 22 nt, Human
aacuagaacgucuaguugcugg

SEQ ID NO: 914274 - RNA, 22 nt, Human
uuuguuucgcagccucucucug

SEQ ID NO: 914275 - RNA, 22 nt, Human
ucaucuuccucauuucuccagg

SEQ ID NO: 914276 - RNA, 20 nt, Human
aggcacuggggauagguaag

SEQ ID NO: 914277 - RNA, 22 nt, Human
caccaggcacagcucuccugcu

SEQ ID NO: 914278 - RNA, 22 nt, Human
ucaccaggcuggaaugcagugg

SEQ ID NO: 914279 - RNA, 22 nt, Human
cagagaagagucuggccucucu

SEQ ID NO: 914280 - RNA, 22 nt, Human
ucaaagauagauguugagaaau

SEQ ID NO: 914281 - RNA, 22 nt, Human
ccaaggcaacguuggugucagg

SEQ ID NO: 914282 - RNA, 22 nt, Human
ucuggaagaacggggcaugcug

SEQ ID NO: 914283 - RNA, 22 nt, Human
aagggcugagcacagugagcca

SEQ ID NO: 914284 - RNA, 22 nt, Human
ugcuguggauucagagaugaaa

SEQ ID NO: 914285 - RNA, 22 nt, Human
ggguggagcuuggacaccagua

SEQ ID NO: 914286 - RNA, 22 nt, Human
aggaagcucucugcuuuuaaga

SEQ ID NO: 914287 - RNA, 22 nt, Human
uuuagcaucgaaguaaauuuag

SEQ ID NO: 914288 - RNA, 21 nt, Human
acagcuggugcagggcgggga

SEQ ID NO: 914289 - RNA, 22 nt, Human
uagggcugcugcagaugacagg

SEQ ID NO: 914290 - RNA, 22 nt, Human
uucuggcaugagagaugggggu

SEQ ID NO: 914291 - RNA, 19 nt, Human
ggccagcugucuccugcua

SEQ ID NO: 914292 - RNA, 22 nt, Human
caacaguucucauagcagauuc

SEQ ID NO: 914293 - RNA, 21 nt, Human
ugagcaggugcagggaagugg

SEQ ID NO: 914294 - RNA, 22 nt, Human
ccaugggaauugggagguccca

SEQ ID NO: 914295 - RNA, 18 nt, Human
gcacucugacugcagagc

SEQ ID NO: 914296 - RNA, 22 nt, Human
gccuggcugcuuagccuacuuc

SEQ ID NO: 914297 - RNA, 19 nt, Human
agagaccacagagcugccu

SEQ ID NO: 914298 - RNA, 22 nt, Human
cagcugagaguagaaauggagg

SEQ ID NO: 914299 - RNA, 22 nt, Human
cagaagaggacuggguagcuca

SEQ ID NO: 914300 - RNA, 22 nt, Human
ugcagugguguccagguguacu

SEQ ID NO: 914301 - RNA, 21 nt, Human
uggcucaguugcugggcacag

SEQ ID NO: 914302 - RNA, 22 nt, Human
agaguggcagcaaaaagugugc

SEQ ID NO: 914303 - RNA, 22 nt, Human
uucagugcuuacagguuucuuu

SEQ ID NO: 914304 - RNA, 23 nt, Human
uggcugagauccuacuguuugcu

SEQ ID NO: 914305 - RNA, 22 nt, Human
auuagcaauugugcaucuagua

SEQ ID NO: 914306 - RNA, 22 nt, Human
auuucauggacaucuuuggagg

SEQ ID NO: 914307 - RNA, 22 nt, Human
aauuaguucaauggaugauaga

SEQ ID NO: 914308 - RNA, 22 nt, Human
gugggcugcccuugaggucagc

SEQ ID NO: 914309 - RNA, 22 nt, Human
agccuggaggaggaguugagca

SEQ ID NO: 914310 - RNA, 22 nt, Human
auuuuaucugcuuacuuucagg

SEQ ID NO: 914311 - RNA, 22 nt, Human
ugggaggaagugcuaaugggag

SEQ ID NO: 914312 - RNA, 22 nt, Human
ggccacuguuuccugggcaguu

SEQ ID NO: 914313 - RNA, 20 nt, Human
ggggcaguggcucaugccug

SEQ ID NO: 914314 - RNA, 22 nt, Human
gugcucuaugaggauauagggu

SEQ ID NO: 914315 - RNA, 22 nt, Human
gucuacaaagcuucaagucucu

SEQ ID NO: 914316 - RNA, 22 nt, Human
gcaaacaaggacauacauccug

SEQ ID NO: 914317 - RNA, 22 nt, Human
ucugaaauggcagcgggaauga

SEQ ID NO: 914318 - RNA, 22 nt, Human
cauccaaagcaaauaucuuaaa

SEQ ID NO: 914319 - RNA, 22 nt, Human
aacaacaacggagaaaggguug

SEQ ID NO: 914320 - RNA, 22 nt, Human
ugcuauaaguagacauucaaca

SEQ ID NO: 914321 - RNA, 16 nt, Human
acagacaugagugagc

SEQ ID NO: 914322 - RNA, 22 nt, Human
gcuccagggucagcucagaacu

SEQ ID NO: 914323 - RNA, 22 nt, Human
uaccauuucuacauaucuuguc

SEQ ID NO: 914324 - RNA, 22 nt, Human
agucauuucuguagucauguuu

SEQ ID NO: 914325 - RNA, 22 nt, Human
gccaggaauuucaagagccacu

SEQ ID NO: 914326 - RNA, 22 nt, Human
auuaucuauguagaaugauuuu

SEQ ID NO: 914327 - RNA, 22 nt, Human
gcgcucaggugccaggccugcg

SEQ ID NO: 914328 - RNA, 22 nt, Human
gaggcucacgacgggacgaacu

SEQ ID NO: 914329 - RNA, 22 nt, Human
auacagauauaagauugaggag

SEQ ID NO: 914330 - RNA, 22 nt, Human
cacagagaaugaugagucacug

SEQ ID NO: 914331 - RNA, 22 nt, Human
aaugggaaagagacuagaugcu

SEQ ID NO: 914332 - RNA, 21 nt, Human
agacagacugccugacccacg

SEQ ID NO: 914333 - RNA, 22 nt, Human
cuucuuaaauuggauugcuauu

SEQ ID NO: 914334 - RNA, 22 nt, Human
cagcacaucugauuauaugacu

SEQ ID NO: 914335 - RNA, 20 nt, Human
ggccagcuggaggcgccggg

SEQ ID NO: 914336 - RNA, 22 nt, Human
acugggcuguggacacccagcg

SEQ ID NO: 914337 - RNA, 22 nt, Human
aaguuucuauuauuacauucgu

SEQ ID NO: 914338 - RNA, 22 nt, Human
gaggucaucaccaauauaugcc

SEQ ID NO: 914339 - RNA, 22 nt, Human
uccauccauguaggaagauggu

SEQ ID NO: 914340 - RNA, 21 nt, Human
ucuugugugcugcccugcuac

SEQ ID NO: 914341 - RNA, 22 nt, Human
guuccuaagcacugugcauucu

SEQ ID NO: 914342 - RNA, 22 nt, Human
auucuaaaucagagagcucugu

SEQ ID NO: 914343 - RNA, 22 nt, Human
cugggagaucuguugggacugg

SEQ ID NO: 914344 - RNA, 22 nt, Human
auuuugcacacuaugcagcuuu

SEQ ID NO: 914345 - RNA, 22 nt, Human
gcccagugcugagggugcugcu

SEQ ID NO: 914346 - RNA, 22 nt, Human
aagggcuguaagccaaguaaag

SEQ ID NO: 914347 - RNA, 22 nt, Human
ccagcugcaggggagcagugga

SEQ ID NO: 914348 - RNA, 22 nt, Human
gccacagacagagagucuagug

SEQ ID NO: 914349 - RNA, 22 nt, Human
caggaggugacuuccagggguu

SEQ ID NO: 914350 - RNA, 22 nt, Human
cuguuauuuagaacauggaauc

SEQ ID NO: 914351 - RNA, 21 nt, Human
gacuucaugggucaaccaauu

SEQ ID NO: 914352 - RNA, 22 nt, Human
ucugagcuuacucagggauaca

SEQ ID NO: 914353 - RNA, 22 nt, Human
ugccuaaaccauuccccuuccu

SEQ ID NO: 914354 - RNA, 22 nt, Human
uuauuuccugacacagcugauu

SEQ ID NO: 914355 - RNA, 20 nt, Human
uuuauagugaucaauuuaua

SEQ ID NO: 914356 - RNA, 22 nt, Human
agaugaaagauuuuuauagaga

SEQ ID NO: 914357 - RNA, 22 nt, Human
aggcaguuucugggacagcaua

SEQ ID NO: 914358 - RNA, 22 nt, Human
cucugcuuucucaaacccugug

SEQ ID NO: 914359 - RNA, 22 nt, Human
gaggacgggcuucauggggccu

SEQ ID NO: 914360 - RNA, 22 nt, Human
acaguucugccuguuugagaag

SEQ ID NO: 914361 - RNA, 22 nt, Human
caugaaauuugaaguacagcaa

SEQ ID NO: 914362 - RNA, 23 nt, Human
ugcaauggcaugauuucagcuca

SEQ ID NO: 914363 - RNA, 22 nt, Human
uucauuccuucccuaagcaacu

SEQ ID NO: 914364 - RNA, 22 nt, Human
agguacagggugaaaguuuaug

SEQ ID NO: 914365 - RNA, 22 nt, Human
gcugccguuggcucuucaggcc

SEQ ID NO: 914366 - RNA, 21 nt, Human
ugugucacuaacuagaggcua

SEQ ID NO: 914367 - RNA, 22 nt, Human
cacuuuguuuauugugcaguua

SEQ ID NO: 914368 - RNA, 22 nt, Human
cacuggcaugugaggcgguggc

SEQ ID NO: 914369 - RNA, 22 nt, Human
acagaugaauuuauggauggaa

SEQ ID NO: 914370 - RNA, 22 nt, Human
ucugagcagcuuuguuuugugu

SEQ ID NO: 914371 - RNA, 22 nt, Human
ucuggcccaugauccugcuaac

SEQ ID NO: 914372 - RNA, 22 nt, Human
uauuuaaaauaagccccagugg

SEQ ID NO: 914373 - RNA, 22 nt, Human
ggcucuggggggaagucuguug

SEQ ID NO: 914374 - RNA, 22 nt, Human
aggacuggcagugugagggguc

SEQ ID NO: 914375 - RNA, 22 nt, Human
ccuuuucuacaagcaaaugugc

SEQ ID NO: 914376 - RNA, 20 nt, Human
ucuaauuaaaauugucuagu

SEQ ID NO: 914377 - RNA, 23 nt, Human
ucuggaggggacacugcagaugc

SEQ ID NO: 914378 - RNA, 22 nt, Human
caugugugaaucuugugaucau

SEQ ID NO: 914379 - RNA, 22 nt, Human
ucaacauauaggcaaccuguaa

SEQ ID NO: 914380 - RNA, 22 nt, Human
aaucucaagcuguaaauaccuc

SEQ ID NO: 914381 - RNA, 21 nt, Human
agauuaaaaucugugagaagg

SEQ ID NO: 914382 - RNA, 22 nt, Human
aguauauaguggcgcuguaugc

SEQ ID NO: 914383 - RNA, 22 nt, Human
uuggcagcggggacccuggcug

SEQ ID NO: 914384 - RNA, 20 nt, Human
gccacaguuuucucacugca

SEQ ID NO: 914385 - RNA, 22 nt, Human
gcagcacugucuugucuuagga

SEQ ID NO: 914386 - RNA, 22 nt, Human
uguacaaugccagggaacacca

SEQ ID NO: 914387 - RNA, 22 nt, Human
cauuuuguagcaaugacuguug

SEQ ID NO: 914388 - RNA, 22 nt, Human
ucuaaagauuuggauucauuug

SEQ ID NO: 914389 - RNA, 21 nt, Human
aucccagcacccaggagugca

SEQ ID NO: 914390 - RNA, 22 nt, Human
caguccugggcaggucaggcca

SEQ ID NO: 914391 - RNA, 22 nt, Human
agcuggccauugugaguggccu

SEQ ID NO: 914392 - RNA, 22 nt, Human
uuagauauguuuuugcuaaugc

SEQ ID NO: 914393 - RNA, 22 nt, Human
uaagaauauugggaauggaugg

SEQ ID NO: 914394 - RNA, 22 nt, Human
gccugggagcacaucggggucc

SEQ ID NO: 914395 - RNA, 22 nt, Human
aguguggcugcguagggcucuc

SEQ ID NO: 914396 - RNA, 22 nt, Human
cucuuugaaauccaucacugcu

SEQ ID NO: 914397 - RNA, 22 nt, Human
aaauacaauuucaggcuguaau

SEQ ID NO: 914398 - RNA, 22 nt, Human
cuuuucuuacucccgcaaggca

SEQ ID NO: 914399 - RNA, 22 nt, Human
agucacaggcaagagggcucca

SEQ ID NO: 914400 - RNA, 22 nt, Human
ggccaggugcgguggcucacac

SEQ ID NO: 914401 - RNA, 22 nt, Human
ggcauguuguuuauguuucugg

SEQ ID NO: 914402 - RNA, 22 nt, Human
acagcugcucaccugugagccc

SEQ ID NO: 914403 - RNA, 22 nt, Human
cugcaugucacucugcuguccc

SEQ ID NO: 914404 - RNA, 22 nt, Human
uugaagcaggaaaauuucuauu

SEQ ID NO: 914405 - RNA, 22 nt, Human
uauuguaucuuaccacauguau

SEQ ID NO: 914406 - RNA, 22 nt, Human
aagagcaucuauuucacagugg

SEQ ID NO: 914407 - RNA, 22 nt, Human
gaugacagcagcuguggcucac

SEQ ID NO: 914408 - RNA, 21 nt, Human
gggcuggaggaugggaagccc

SEQ ID NO: 914409 - RNA, 22 nt, Human
auuucuguaacuuaugaaaguu

SEQ ID NO: 914410 - RNA, 22 nt, Human
cugcaguguucuggaaugcauu

SEQ ID NO: 914411 - RNA, 22 nt, Human
gacaggugcuaagggaccuggc

SEQ ID NO: 914412 - RNA, 22 nt, Human
cagguggguacaucacagagac

SEQ ID NO: 914413 - RNA, 20 nt, Human
aaguauauguccguguacuu

SEQ ID NO: 914414 - RNA, 22 nt, Human
auuuggugagguagccauuguu

SEQ ID NO: 914415 - RNA, 22 nt, Human
uacagagagagggguuaccagg

SEQ ID NO: 914416 - RNA, 22 nt, Human
cuuagaagugggcuauaauuag

SEQ ID NO: 914417 - RNA, 22 nt, Human
ucaguggauuguagaaggcuua

SEQ ID NO: 914418 - RNA, 22 nt, Human
guggaagggacugccuagagga

SEQ ID NO: 914419 - RNA, 20 nt, Human
aggcaagguagaugucugcu

SEQ ID NO: 914420 - RNA, 22 nt, Human
uucagaaauaaaauaucccaac

SEQ ID NO: 914421 - RNA, 22 nt, Human
auguauuuugccagacugucuc

SEQ ID NO: 914422 - RNA, 22 nt, Human
agaagccauucucaguuccuga

SEQ ID NO: 914423 - RNA, 22 nt, Human
uucugggacaucuggacaguuu

SEQ ID NO: 914424 - RNA, 22 nt, Human
uauuccugucaagaucuuacaa

SEQ ID NO: 914425 - RNA, 22 nt, Human
uuuacgaauggggugacaacuu

SEQ ID NO: 914426 - RNA, 22 nt, Human
gcucacagccggcuggcagggg

SEQ ID NO: 914427 - RNA, 22 nt, Human
uaaguuaacccuguuaauagau

SEQ ID NO: 914428 - RNA, 22 nt, Human
ggcaggcaucauguggucauua

SEQ ID NO: 914429 - RNA, 22 nt, Human
caggccaacugcauggugacca

SEQ ID NO: 914430 - RNA, 22 nt, Human
acugccuucugcucaggguuca

SEQ ID NO: 914431 - RNA, 22 nt, Human
acagauuuauugaagcugcugc

SEQ ID NO: 914432 - RNA, 22 nt, Human
gagaggugaaggcugcccuggg

SEQ ID NO: 914433 - RNA, 22 nt, Human
ucucugugucucauguuccuau

SEQ ID NO: 914434 - RNA, 22 nt, Human
ugagaagcugcuugugcuguau

SEQ ID NO: 914435 - RNA, 22 nt, Human
cccagcucucgcacuuacuagc

SEQ ID NO: 914436 - RNA, 22 nt, Human
caggucucggguucagcaguga

SEQ ID NO: 914437 - RNA, 22 nt, Human
gagagagaggugcugccaggca

SEQ ID NO: 914438 - RNA, 18 nt, Human
cucagggugaccaaugca

SEQ ID NO: 914439 - RNA, 22 nt, Human
uuuaucacagaauaagaaguca

SEQ ID NO: 914440 - RNA, 23 nt, Human
ugcaggggaggcuuaaagcaggu

SEQ ID NO: 914441 - RNA, 22 nt, Human
uuguguguacugguuaugggca

SEQ ID NO: 914442 - RNA, 22 nt, Human
ccaaaaauuagauacacauaua

SEQ ID NO: 914443 - RNA, 22 nt, Human
acacaguaguguggaaaaacau

SEQ ID NO: 914444 - RNA, 22 nt, Human
gucuucuggggccaggcccgcu

SEQ ID NO: 914445 - RNA, 22 nt, Human
aaggcugagagucacaguccua

SEQ ID NO: 914446 - RNA, 22 nt, Human
ggccuuagcggucauagcaaag

SEQ ID NO: 914447 - RNA, 22 nt, Human
aucauucuauuguugagcugcc

SEQ ID NO: 914448 - RNA, 22 nt, Human
ccuugaaagccaggcagaggaa

SEQ ID NO: 914449 - RNA, 21 nt, Human
gcucugucccugcuguguguc

SEQ ID NO: 914450 - RNA, 22 nt, Human
agcgugugugcgggucuucuuu

SEQ ID NO: 914451 - RNA, 22 nt, Human
caggcacacaggcucccugggc

SEQ ID NO: 914452 - RNA, 22 nt, Human
uggcuucuugaucuuggacuug

SEQ ID NO: 914453 - RNA, 22 nt, Human
cacagugcucaaacacaagugc

SEQ ID NO: 914454 - RNA, 22 nt, Human
ggccaaauuuggccaugagcau

SEQ ID NO: 914455 - RNA, 22 nt, Human
uggagcaggacggggaguggua

SEQ ID NO: 914456 - RNA, 21 nt, Human
gcuuuagauuuagugagccag

SEQ ID NO: 914457 - RNA, 22 nt, Human
augcacuacuuggcuuuacuga

SEQ ID NO: 914458 - RNA, 20 nt, Human
uauuaugaccuguguucugg

SEQ ID NO: 914459 - RNA, 22 nt, Human
ucuuuacaaucuaagcauaguu

SEQ ID NO: 914460 - RNA, 22 nt, Human
uuuacccauucagacucacuug

SEQ ID NO: 914461 - RNA, 22 nt, Human
cuugucuugcacacgguugcca

SEQ ID NO: 914462 - RNA, 22 nt, Human
uuguuuccuuucuauacaggau

SEQ ID NO: 914463 - RNA, 22 nt, Human
gcaucucuuacccacgagccag

SEQ ID NO: 914464 - RNA, 22 nt, Human
ccagacucaucugccauugcug

SEQ ID NO: 914465 - RNA, 22 nt, Human
gauacaguauuuaaagagcaac

SEQ ID NO: 914466 - RNA, 22 nt, Human
caggaagcuggucagauccugu

SEQ ID NO: 914467 - RNA, 22 nt, Human
agaaaucuuaucaagaaaugcc

SEQ ID NO: 914468 - RNA, 22 nt, Human
uagcccagcaugagcagagcug

SEQ ID NO: 914469 - RNA, 22 nt, Human
cugugggcgccugucagccuca

SEQ ID NO: 914470 - RNA, 23 nt, Human
ccuggggcacuugaguccucauc

SEQ ID NO: 914471 - RNA, 22 nt, Human
uggcaguuggggaugaagugag

SEQ ID NO: 914472 - RNA, 22 nt, Human
agagggcagucucagauuggga

SEQ ID NO: 914473 - RNA, 22 nt, Human
cuuggacuggacccgaggaaug

SEQ ID NO: 914474 - RNA, 22 nt, Human
aaggaaaugagguugauggaug

SEQ ID NO: 914475 - RNA, 22 nt, Human
acaguguucugaaaguugaggg

SEQ ID NO: 914476 - RNA, 22 nt, Human
uggaaacuuaucugacacgaac

SEQ ID NO: 914477 - RNA, 22 nt, Human
uucacauaaauagaucacauca

SEQ ID NO: 914478 - RNA, 22 nt, Human
aguaguuuuuaagagguauaaa

SEQ ID NO: 914479 - RNA, 18 nt, Human
gcaaggcagcucucuggg

SEQ ID NO: 914480 - RNA, 19 nt, Human
gauauaaagagauggugaa

SEQ ID NO: 914481 - RNA, 22 nt, Human
uuuacacaaaauguuaguagau

SEQ ID NO: 914482 - RNA, 22 nt, Human
agccuguguccucaucugcagc

SEQ ID NO: 914483 - RNA, 22 nt, Human
ugaggcaggaaguuauauaaug

SEQ ID NO: 914484 - RNA, 22 nt, Human
uucacauugaaggugcuuucuu

SEQ ID NO: 914485 - RNA, 22 nt, Human
uauguguaaucaaacacaugcu

SEQ ID NO: 914486 - RNA, 22 nt, Human
aaagauuuaagaauaauuugug

SEQ ID NO: 914487 - RNA, 22 nt, Human
aauggaauaccuagguggccca

SEQ ID NO: 914488 - RNA, 22 nt, Human
agaauagagaaaaagguuauuu

SEQ ID NO: 914489 - RNA, 22 nt, Human
gauauuuauuaagugguuggua

SEQ ID NO: 914490 - RNA, 19 nt, Human
cagaacagcugggaagaga

SEQ ID NO: 914491 - RNA, 22 nt, Human
ucuccacacuuucucucccagg

SEQ ID NO: 914492 - RNA, 22 nt, Human
caaagggaaacgcagugucaag

SEQ ID NO: 914493 - RNA, 22 nt, Human
gaaucuuaccucucuauuguug

SEQ ID NO: 914494 - RNA, 22 nt, Human
uuauuuauaucucugcaguuua

SEQ ID NO: 914495 - RNA, 17 nt, Human
cuguuuguucugggagc

SEQ ID NO: 914496 - RNA, 19 nt, Human
agaggccucagcagcuggc

SEQ ID NO: 914497 - RNA, 22 nt, Human
uccagggcauccacgcgugggg

SEQ ID NO: 914498 - RNA, 22 nt, Human
uggaccagcagccccagugccu

SEQ ID NO: 914499 - RNA, 22 nt, Human
aggcaucuaacagagaucuuua

SEQ ID NO: 914500 - RNA, 22 nt, Human
aggguagcuacccaacuccaga

SEQ ID NO: 914501 - RNA, 22 nt, Human
ucugcuguugccaugaguaaua

SEQ ID NO: 914502 - RNA, 22 nt, Human
gugcugaacuauaaaaagcuuu

SEQ ID NO: 914503 - RNA, 22 nt, Human
cacugagaaagugaccugccaa

SEQ ID NO: 914504 - RNA, 22 nt, Human
cugaggcaugaaugugggcuuu

SEQ ID NO: 914505 - RNA, 22 nt, Human
uucuccagaccacugccucugu

SEQ ID NO: 914506 - RNA, 22 nt, Human
uggcccugugugcaggcugcac

SEQ ID NO: 914507 - RNA, 22 nt, Human
gucaggagagaccuguucuccu

SEQ ID NO: 914508 - RNA, 22 nt, Human
ugcuguguucuccugacucacc

SEQ ID NO: 914509 - RNA, 22 nt, Human
uucaaguaugagaaaggggacu

SEQ ID NO: 914510 - RNA, 22 nt, Human
uccaucucaccugcacucugcg

SEQ ID NO: 914511 - RNA, 22 nt, Human
ucuuuugugauucuuuaguuac

SEQ ID NO: 914512 - RNA, 18 nt, Human
ccucagggagauccagug

SEQ ID NO: 914513 - RNA, 22 nt, Human
gggaggugauggcaagcagcgg

SEQ ID NO: 914514 - RNA, 22 nt, Human
uuuguucaauccagacaauagc

SEQ ID NO: 914515 - RNA, 20 nt, Human
gccugauggacauuucaguu

SEQ ID NO: 914516 - RNA, 22 nt, Human
gcuccuccaauauggacuccuc

SEQ ID NO: 914517 - RNA, 18 nt, Human
uccgaggcaccauaaaaa

SEQ ID NO: 914518 - RNA, 22 nt, Human
agaaaggagaccagcucugccc

SEQ ID NO: 914519 - RNA, 20 nt, Human
gugcauuucaccuguacugu

SEQ ID NO: 914520 - RNA, 18 nt, Human
uuuccuuguaugaacaua

SEQ ID NO: 914521 - RNA, 22 nt, Human
gagaaguuucuuccuagguuug

SEQ ID NO: 914522 - RNA, 22 nt, Human
agaaggcuaaagaaacagauug

SEQ ID NO: 914523 - RNA, 22 nt, Human
aucaaaguaucucaauauggua

SEQ ID NO: 914524 - RNA, 22 nt, Human
gugugcucccucugucgucaua

SEQ ID NO: 914525 - RNA, 22 nt, Human
gauacuuucucauuuacccaag

SEQ ID NO: 914526 - RNA, 22 nt, Human
uuuuuuccaacuuaagacuuca

SEQ ID NO: 914527 - RNA, 22 nt, Human
gauggcagguaguggucucauc

SEQ ID NO: 914528 - RNA, 22 nt, Human
cuucuggguugcaggucuuggc

SEQ ID NO: 914529 - RNA, 22 nt, Human
aaauugcaaaaguacuuuuagg

SEQ ID NO: 914530 - RNA, 21 nt, Human
cccaggcugaauuaaaaauau

SEQ ID NO: 914531 - RNA, 22 nt, Human
ggacugaauggaagauauaugg

SEQ ID NO: 914532 - RNA, 22 nt, Human
cccagcuccuuacagggccgaa

SEQ ID NO: 914533 - RNA, 22 nt, Human
cugccuuggcccuaguucaugg

SEQ ID NO: 914534 - RNA, 22 nt, Human
auuaaggcguuggcgugcuuau

SEQ ID NO: 914535 - RNA, 22 nt, Human
auaugcuugacucuuucacauc

SEQ ID NO: 914536 - RNA, 22 nt, Human
cuccacagagaugcugauugua

SEQ ID NO: 914537 - RNA, 23 nt, Human
uaugucaugagcauauugaaugu

SEQ ID NO: 914538 - RNA, 22 nt, Human
cucugugucugaguuauggucu

SEQ ID NO: 914539 - RNA, 22 nt, Human
ugaggugggugucaggucagag

SEQ ID NO: 914540 - RNA, 22 nt, Human
ucugagguggggcuggagcauu

SEQ ID NO: 914541 - RNA, 22 nt, Human
uuuugccuaggguugacccguu

SEQ ID NO: 914542 - RNA, 22 nt, Human
ugaggcagucacccccuccugc

SEQ ID NO: 914543 - RNA, 23 nt, Human
aagugcuuugggauggagucugg

SEQ ID NO: 914544 - RNA, 20 nt, Human
ugucagcaauuaggagaaaa

SEQ ID NO: 914545 - RNA, 22 nt, Human
acaggcuuuauguagugacuua

SEQ ID NO: 914546 - RNA, 22 nt, Human
uauaagccucgaugguaagccu

SEQ ID NO: 914547 - RNA, 18 nt, Human
acuccccacaggcucugu

SEQ ID NO: 914548 - RNA, 22 nt, Human
ucccaggacuuccaguuggagg

SEQ ID NO: 914549 - RNA, 22 nt, Human
gcacugagcaccagccacagau

SEQ ID NO: 914550 - RNA, 22 nt, Human
gcuggggagggcgucaaggcca

SEQ ID NO: 914551 - RNA, 23 nt, Human
ccuggcagcaaacgaggagguua

SEQ ID NO: 914552 - RNA, 22 nt, Human
gugcugggcuccaccccagagg

SEQ ID NO: 914553 - RNA, 22 nt, Human
aggagguggcaacugucgacag

SEQ ID NO: 914554 - RNA, 22 nt, Human
gcaagcaauggacggugacuuu

SEQ ID NO: 914555 - RNA, 22 nt, Human
caaguuauuccuuuacacuaua

SEQ ID NO: 914556 - RNA, 22 nt, Human
agggaauucacuggaacgcccu

SEQ ID NO: 914557 - RNA, 22 nt, Human
acagagcaauaacagggagagg

SEQ ID NO: 914558 - RNA, 22 nt, Human
cuaggaggcgggggcugcagua

SEQ ID NO: 914559 - RNA, 22 nt, Human
auguguguacacacgugacucu

SEQ ID NO: 914560 - RNA, 22 nt, Human
aaauugugucucaggcaguggu

SEQ ID NO: 914561 - RNA, 22 nt, Human
gaaguucuggcucagagaggaa

SEQ ID NO: 914562 - RNA, 22 nt, Human
ucuguccagcucuggggcucac

SEQ ID NO: 914563 - RNA, 22 nt, Human
uaucuguuggcuuuggaaauaa

SEQ ID NO: 914564 - RNA, 20 nt, Human
cgcuccagucgcuggugugu

SEQ ID NO: 914565 - RNA, 22 nt, Human
uggcacuguagccacuacugcc

SEQ ID NO: 914566 - RNA, 20 nt, Human
gagugcuuuggcuugcucuc

SEQ ID NO: 914567 - RNA, 18 nt, Human
uucaagaguuucucuagg

SEQ ID NO: 914568 - RNA, 22 nt, Human
ucugaaguucuuaaauuaguuu

SEQ ID NO: 914569 - RNA, 16 nt, Human
ccacaguaagaaauac

SEQ ID NO: 914570 - RNA, 22 nt, Human
ucugauaaaugccaucuuuuug

SEQ ID NO: 914571 - RNA, 22 nt, Human
agcugccuggagccagaguuga

SEQ ID NO: 914572 - RNA, 22 nt, Human
gugugccaagagauaguugcug

SEQ ID NO: 914573 - RNA, 22 nt, Human
ucccagccugacagugcaucaa

SEQ ID NO: 914574 - RNA, 22 nt, Human
ggcagguacagcaagaggacaa

SEQ ID NO: 914575 - RNA, 22 nt, Human
acugcagggcauccuggccaag

SEQ ID NO: 914576 - RNA, 22 nt, Human
gggagggacacaaagaguuccc

SEQ ID NO: 914577 - RNA, 22 nt, Human
cugcuaggguucagcagugccu

SEQ ID NO: 914578 - RNA, 22 nt, Human
gcacuggauuuugaucugcaag

SEQ ID NO: 914579 - RNA, 22 nt, Human
gcugaaggagccugggguggga

SEQ ID NO: 914580 - RNA, 18 nt, Human
ucaggcugcccugugucu

SEQ ID NO: 914581 - RNA, 22 nt, Human
agggucugacaaugugacuuag

SEQ ID NO: 914582 - RNA, 22 nt, Human
uaagaaguacaaaaauuuucug

SEQ ID NO: 914583 - RNA, 22 nt, Human
cagauguggaaugcagcaggcu

SEQ ID NO: 914584 - RNA, 22 nt, Human
uggcuccagcccugagcaagcu

SEQ ID NO: 914585 - RNA, 22 nt, Human
aggugagggugccagugcaugg

SEQ ID NO: 914586 - RNA, 22 nt, Human
agccugugugcuuuggacaggg

SEQ ID NO: 914587 - RNA, 22 nt, Human
uccuggcuuccacaccugucau

SEQ ID NO: 914588 - RNA, 22 nt, Human
agcuagcaaauagcauguagga

SEQ ID NO: 914589 - RNA, 22 nt, Human
cugccaggugagcuccaggccu

SEQ ID NO: 914590 - RNA, 22 nt, Human
gggaaggcaggccucuguugga

SEQ ID NO: 914591 - RNA, 22 nt, Human
ugagagcuugaguaucacuggc

SEQ ID NO: 914592 - RNA, 22 nt, Human
uugcaagggauaccauacuaag

SEQ ID NO: 914593 - RNA, 19 nt, Human
ugccagcucacaggagcuc

SEQ ID NO: 914594 - RNA, 22 nt, Human
aucugaaaaaucuccuuuguca

SEQ ID NO: 914595 - RNA, 22 nt, Human
agggacacgagguccugcuggg

SEQ ID NO: 914596 - RNA, 22 nt, Human
uccaggcugcagucuugcccuc

SEQ ID NO: 914597 - RNA, 20 nt, Human
caugccaugucuacugaggc

SEQ ID NO: 914598 - RNA, 17 nt, Human
uuuguacaacauuuuaa

SEQ ID NO: 914599 - RNA, 22 nt, Human
gcugaggcaaaccaagaaugua

SEQ ID NO: 914600 - RNA, 21 nt, Human
ucacacacguuuccaagggca

SEQ ID NO: 914601 - RNA, 22 nt, Human
gggcagugguccaggcuacagc

SEQ ID NO: 914602 - RNA, 22 nt, Human
aacagagaggccaccucagcag

SEQ ID NO: 914603 - RNA, 20 nt, Human
aucuuuggcucagaagccuu

SEQ ID NO: 914604 - RNA, 22 nt, Human
agauguggcugcacccaccgcu

SEQ ID NO: 914605 - RNA, 22 nt, Human
uaggaagaucaaguuuaucuca

SEQ ID NO: 914606 - RNA, 22 nt, Human
uggggaagggcacccuggagac

SEQ ID NO: 914607 - RNA, 22 nt, Human
aaaaguuauugaugcaggacaa

SEQ ID NO: 914608 - RNA, 22 nt, Human
uuugcaaguaucaaacauguca

SEQ ID NO: 914609 - RNA, 22 nt, Human
gcauaacaaauaugcuuuaaau

SEQ ID NO: 914610 - RNA, 22 nt, Human
uucacaaacaccagaauggcua

SEQ ID NO: 914611 - RNA, 22 nt, Human
ucagcaggcugucagcaggggc

SEQ ID NO: 914612 - RNA, 22 nt, Human
cauuucaaaagaauugccagaa

SEQ ID NO: 914613 - RNA, 22 nt, Human
acagaguagcucaagaagauug

SEQ ID NO: 914614 - RNA, 22 nt, Human
uccagggagucaaaugaacuac

SEQ ID NO: 914615 - RNA, 22 nt, Human
aagcaaggcccagagcaucagc

SEQ ID NO: 914616 - RNA, 22 nt, Human
gccugaaguuucaugccucuau

SEQ ID NO: 914617 - RNA, 22 nt, Human
aauguguaugaggaagagagaa

SEQ ID NO: 914618 - RNA, 22 nt, Human
guuaaacaagcuggacacugaa

SEQ ID NO: 914619 - RNA, 22 nt, Human
caggaugggauguagugggccc

SEQ ID NO: 914620 - RNA, 22 nt, Human
cugcuguaauaggagcguuuug

SEQ ID NO: 914621 - RNA, 17 nt, Human
agacacugagccaagua

SEQ ID NO: 914622 - RNA, 21 nt, Human
ggcugccugggaagaagaaga

SEQ ID NO: 914623 - RNA, 22 nt, Human
gcuucucccuacagaugucagu

SEQ ID NO: 914624 - RNA, 22 nt, Human
aaggcuguuugagcacuggagc

SEQ ID NO: 914625 - RNA, 22 nt, Human
cuucauuacuugcucguagcac

SEQ ID NO: 914626 - RNA, 22 nt, Human
acuaaguaguuuguuccucuuu

SEQ ID NO: 914627 - RNA, 17 nt, Human
agacagaccucugcauc

SEQ ID NO: 914628 - RNA, 22 nt, Human
ugugugaccuggggugagauag

SEQ ID NO: 914629 - RNA, 22 nt, Human
cugggaccagugaagcaacuca

SEQ ID NO: 914630 - RNA, 22 nt, Human
aacaagaagagagggacguaau

SEQ ID NO: 914631 - RNA, 22 nt, Human
ucucugucacacaaucuacaca

SEQ ID NO: 914632 - RNA, 22 nt, Human
aauaauaguugcaaaguguuua

SEQ ID NO: 914633 - RNA, 22 nt, Human
cacauguaguaagcaggcaaug

SEQ ID NO: 914634 - RNA, 22 nt, Human
aggcucagcaucugauucauau

SEQ ID NO: 914635 - RNA, 22 nt, Human
cuaaauacuagccuucagauuu

SEQ ID NO: 914636 - RNA, 22 nt, Human
auguucaucuacaaggcauugu

SEQ ID NO: 914637 - RNA, 22 nt, Human
uguuucuuuguagauauucuuu

SEQ ID NO: 914638 - RNA, 23 nt, Human
agcagcuguggaguuuugcauuu

SEQ ID NO: 914639 - RNA, 22 nt, Human
aacuuaguguaaugcaguacag

SEQ ID NO: 914640 - RNA, 22 nt, Human
gacuuagacccugucuuuauuc

SEQ ID NO: 914641 - RNA, 22 nt, Human
aaggggauuuaagguaagaaga

SEQ ID NO: 914642 - RNA, 22 nt, Human
cccagcagggucucugugucua

SEQ ID NO: 914643 - RNA, 23 nt, Human
uuacaguaggaguuggaaaacca

SEQ ID NO: 914644 - RNA, 22 nt, Human
gacccugaggaugcaccagcag

SEQ ID NO: 914645 - RNA, 23 nt, Human
aguccuuuuuauaaaauugagga

SEQ ID NO: 914646 - RNA, 18 nt, Human
cugucccauccucagguu

SEQ ID NO: 914647 - RNA, 20 nt, Human
cuggggagcugcucccacga

SEQ ID NO: 914648 - RNA, 22 nt, Human
uguauauuguucugucucuuca

SEQ ID NO: 914649 - RNA, 19 nt, Human
gccaggcucuuauucugug

SEQ ID NO: 914650 - RNA, 22 nt, Human
agucugugagugauguaccugc

SEQ ID NO: 914651 - RNA, 22 nt, Human
aacaguaacgagauguccuaac

SEQ ID NO: 914652 - RNA, 18 nt, Human
uaaaccagaugacaguug

SEQ ID NO: 914653 - RNA, 22 nt, Human
gcauggccuccagccaacagca

SEQ ID NO: 914654 - RNA, 22 nt, Human
ugaaacaaaaguauguagcuug

SEQ ID NO: 914655 - RNA, 22 nt, Human
gagauguacaauguguauuaau

SEQ ID NO: 914656 - RNA, 22 nt, Human
gagaagcuggacuuuccaaacu

SEQ ID NO: 914657 - RNA, 16 nt, Human
gcacacacaucaauga

SEQ ID NO: 914658 - RNA, 22 nt, Human
gguuccaccuggcgagggguau

SEQ ID NO: 914659 - RNA, 22 nt, Human
ugcaugcguuaguuggcguguu

SEQ ID NO: 914660 - RNA, 22 nt, Human
gugcagaggacguggcggccuc

SEQ ID NO: 914661 - RNA, 21 nt, Human
uugugaaaguccaggaacaac

SEQ ID NO: 914662 - RNA, 22 nt, Human
cauuguuuugagaacaaccuga

SEQ ID NO: 914663 - RNA, 22 nt, Human
cugaaggauuagagagcacuua

SEQ ID NO: 914664 - RNA, 22 nt, Human
aggcuugggacugcuuaggagc

SEQ ID NO: 914665 - RNA, 22 nt, Human
uuggaaggcugaauggccucuc

SEQ ID NO: 914666 - RNA, 22 nt, Human
cugccuugguucccagccagca

SEQ ID NO: 914667 - RNA, 22 nt, Human
ugguaaaaacugcaauuacuuu

SEQ ID NO: 914668 - RNA, 22 nt, Human
cuagaaauauuuuacagucaag

SEQ ID NO: 914669 - RNA, 22 nt, Human
agcagcagcucuguugcccuac

SEQ ID NO: 914670 - RNA, 22 nt, Human
acauugaccugauuuugaagac

SEQ ID NO: 914671 - RNA, 22 nt, Human
guguuucccuggcacaagaacc

SEQ ID NO: 914672 - RNA, 22 nt, Human
ucuguuauucugcucaguauag

SEQ ID NO: 914673 - RNA, 22 nt, Human
ggcuaggcaggcucagagccua

SEQ ID NO: 914674 - RNA, 22 nt, Human
ccugcugucagcauccucgcga

SEQ ID NO: 914675 - RNA, 22 nt, Human
gaggaagcagggcuuggcugag

SEQ ID NO: 914676 - RNA, 19 nt, Human
ucuagucagucagucauuc

SEQ ID NO: 914677 - RNA, 22 nt, Human
uccucaggauguggaguagaau

SEQ ID NO: 914678 - RNA, 20 nt, Human
aaaggaauauaugaaguaua

SEQ ID NO: 914679 - RNA, 22 nt, Human
gagacacagagaggcuguguga

SEQ ID NO: 914680 - RNA, 19 nt, Human
cagguggcgcucuacaggg

SEQ ID NO: 914681 - RNA, 21 nt, Human
acagaugggaugagcacacug

SEQ ID NO: 914682 - RNA, 19 nt, Human
uuacaugacauaugaagga

SEQ ID NO: 914683 - RNA, 22 nt, Human
auuccaauuguacuugcuuuua

SEQ ID NO: 914684 - RNA, 22 nt, Human
caguuguccuuuguaccaaguu

SEQ ID NO: 914685 - RNA, 22 nt, Human
gcagaugagugagauagacuuc

SEQ ID NO: 914686 - RNA, 21 nt, Human
ugcugccaucaugcagagaug

SEQ ID NO: 914687 - RNA, 22 nt, Human
acagaugguagcauuauguugg

SEQ ID NO: 914688 - RNA, 22 nt, Human
cagaugugccuccagggcuuug

SEQ ID NO: 914689 - RNA, 22 nt, Human
ugaaauauccagcccagcagga

SEQ ID NO: 914690 - RNA, 23 nt, Human
gcucugcucuguuucauagacag

SEQ ID NO: 914691 - RNA, 22 nt, Human
aguuaaaucauuacugacagag

SEQ ID NO: 914692 - RNA, 22 nt, Human
augagguagcuuggcccagggg

SEQ ID NO: 914693 - RNA, 20 nt, Human
uguucacaguaguugcugcu

SEQ ID NO: 914694 - RNA, 23 nt, Human
uggaaugagcugggaagcugagc

SEQ ID NO: 914695 - RNA, 22 nt, Human
cagaaauauuccaaguacugca

SEQ ID NO: 914696 - RNA, 22 nt, Human
uuucugcaaguguagauaccca

SEQ ID NO: 914697 - RNA, 22 nt, Human
ugugacugaggcuccaagcuag

SEQ ID NO: 914698 - RNA, 22 nt, Human
cccaggaggcagagauagcagu

SEQ ID NO: 914699 - RNA, 22 nt, Human
augaggcaaggaucagguaagg

SEQ ID NO: 914700 - RNA, 22 nt, Human
cacaguuugggucuccggggca

SEQ ID NO: 914701 - RNA, 22 nt, Human
ggcugugccucaaggcuacuca

SEQ ID NO: 914702 - RNA, 22 nt, Human
cuguggcuccagugaaccaaug

SEQ ID NO: 914703 - RNA, 22 nt, Human
gaagauuuauaggagccuauua

SEQ ID NO: 914704 - RNA, 22 nt, Human
ccugccugucuuuauccccugu

SEQ ID NO: 914705 - RNA, 22 nt, Human
guccugagggcccaggcauucu

SEQ ID NO: 914706 - RNA, 22 nt, Human
acagacgggacaacgugcagcu

SEQ ID NO: 914707 - RNA, 23 nt, Human
uuauuuugucagaagggacuuuu

SEQ ID NO: 914708 - RNA, 22 nt, Human
aaagaggaaccaagagcacgug

SEQ ID NO: 914709 - RNA, 22 nt, Human
uuauuccauucaguucaacaag

SEQ ID NO: 914710 - RNA, 22 nt, Human
uuugaauauacuucaaacaaag

SEQ ID NO: 914711 - RNA, 22 nt, Human
cugcccugcuucugagggaagc

SEQ ID NO: 914712 - RNA, 22 nt, Human
ucugccucgcuaacagcagcca

SEQ ID NO: 914713 - RNA, 22 nt, Human
uggaagggaacagguggguguu

SEQ ID NO: 914714 - RNA, 22 nt, Human
uuuguguuggaagaaaugcuac

SEQ ID NO: 914715 - RNA, 22 nt, Human
gcagucuugccacaggguuuca

SEQ ID NO: 914716 - RNA, 22 nt, Human
ggcaggugcucugugggccugg

SEQ ID NO: 914717 - RNA, 22 nt, Human
ucugaaauuuuaguuauagaaa

SEQ ID NO: 914718 - RNA, 17 nt, Human
ggaacaaauacuaugca

SEQ ID NO: 914719 - RNA, 22 nt, Human
augagcugugggauuccagagg

SEQ ID NO: 914720 - RNA, 22 nt, Human
ucagugacuggguauuaaauca

SEQ ID NO: 914721 - RNA, 22 nt, Human
guugaaagaugucuugguuccc

SEQ ID NO: 914722 - RNA, 22 nt, Human
ggagagcaggguccugagauac

SEQ ID NO: 914723 - RNA, 22 nt, Human
ucaccaggcuccuguuaagaug

SEQ ID NO: 914724 - RNA, 22 nt, Human
aggggcaggugcugcacuuaga

SEQ ID NO: 914725 - RNA, 19 nt, Human
aacuguaaagaucuguagc

SEQ ID NO: 914726 - RNA, 22 nt, Human
cagcucuccacccuccugguuc

SEQ ID NO: 914727 - RNA, 22 nt, Human
acagguuugcugcuguuuuagg

SEQ ID NO: 914728 - RNA, 17 nt, Human
agcagcugaagcagcca

SEQ ID NO: 914729 - RNA, 22 nt, Human
ucuaaacucucuuugaauuaug

SEQ ID NO: 914730 - RNA, 22 nt, Human
uccuggcuccagcagcucuucc

SEQ ID NO: 914731 - RNA, 22 nt, Human
gcuuuugucauggugacucagu

SEQ ID NO: 914732 - RNA, 22 nt, Human
ugugucagaauuuuuguggcaa

SEQ ID NO: 914733 - RNA, 22 nt, Human
cuggcuccaaggaagagguuuu

SEQ ID NO: 914734 - RNA, 22 nt, Human
ggugcugacugaggauggcuug

SEQ ID NO: 914735 - RNA, 22 nt, Human
ggguuaggucccucccuucugg

SEQ ID NO: 914736 - RNA, 22 nt, Human
uggcugggccgggccuugugcc

SEQ ID NO: 914737 - RNA, 22 nt, Human
aacuacaucacccuauuucugu

SEQ ID NO: 914738 - RNA, 21 nt, Human
cuggaagaagcagcaggauuc

SEQ ID NO: 914739 - RNA, 22 nt, Human
aaagaagggacagacugccucu

SEQ ID NO: 914740 - RNA, 22 nt, Human
aggccagaguuaaggagaacag

SEQ ID NO: 914741 - RNA, 22 nt, Human
aagagcaggacagaaucagaac

SEQ ID NO: 914742 - RNA, 22 nt, Human
aaauuugccagaucaauucuga

SEQ ID NO: 914743 - RNA, 22 nt, Human
agagaacauauuuuguaugauu

SEQ ID NO: 914744 - RNA, 22 nt, Human
caaugguucucaaacuaucaug

SEQ ID NO: 914745 - RNA, 22 nt, Human
ccuccagggccccucucacugg

SEQ ID NO: 914746 - RNA, 22 nt, Human
uaaggcagaaauaugagcaggg

SEQ ID NO: 914747 - RNA, 22 nt, Human
auuaaaagcuucccaagaguua

SEQ ID NO: 914748 - RNA, 22 nt, Human
uguuuaucaggguaaaguguag

SEQ ID NO: 914749 - RNA, 22 nt, Human
ggaagagccuggggugucaggc

SEQ ID NO: 914750 - RNA, 22 nt, Human
aaguaaaagcaggugugcuggg

SEQ ID NO: 914751 - RNA, 22 nt, Human
gucuucuaaguaucaaagcaga

SEQ ID NO: 914752 - RNA, 22 nt, Human
aggcagcuuucagugucucuca

SEQ ID NO: 914753 - RNA, 22 nt, Human
gccagcugaagggaagcuccug

SEQ ID NO: 914754 - RNA, 22 nt, Human
ccacugccgauguuccaucuug

SEQ ID NO: 914755 - RNA, 23 nt, Human
acagaauaccauugacuaggugu

SEQ ID NO: 914756 - RNA, 23 nt, Human
ugcagagggacugaagccagcuu

SEQ ID NO: 914757 - RNA, 22 nt, Human
cagagucagcuagucuugggau

SEQ ID NO: 914758 - RNA, 22 nt, Human
gcuccucuuauuucaucagggc

SEQ ID NO: 914759 - RNA, 22 nt, Human
gcagggguggaggcuguccugu

SEQ ID NO: 914760 - RNA, 22 nt, Human
aguaacuaugcuugagaaucag

SEQ ID NO: 914761 - RNA, 22 nt, Human
cuugauggaggggccaggcuuu

SEQ ID NO: 914762 - RNA, 22 nt, Human
cuuaggauuuaauuucagacuc

SEQ ID NO: 914763 - RNA, 22 nt, Human
ugggaaccauguagcugagaug

SEQ ID NO: 914764 - RNA, 22 nt, Human
ggcuucauggaggaggugaguc

SEQ ID NO: 914765 - RNA, 22 nt, Human
uaguucuagaccaguuaauagu

SEQ ID NO: 914766 - RNA, 22 nt, Human
cuggcagcgguuugcagccugg

SEQ ID NO: 914767 - RNA, 18 nt, Human
agcagagcccaugcauuc

SEQ ID NO: 914768 - RNA, 22 nt, Human
ugaugcuguguaccucauggga

SEQ ID NO: 914769 - RNA, 22 nt, Human
aaggacagagagccauuccaga

SEQ ID NO: 914770 - RNA, 22 nt, Human
uucugcauugacuuuuauuucc

SEQ ID NO: 914771 - RNA, 22 nt, Human
uuuggaaaguguacaaauuuga

SEQ ID NO: 914772 - RNA, 22 nt, Human
cuggagugauacucagaaugug

SEQ ID NO: 914773 - RNA, 18 nt, Human
cugaggccaacuacacug

SEQ ID NO: 914774 - RNA, 19 nt, Human
cugcuuccuucccucacug

SEQ ID NO: 914775 - RNA, 22 nt, Human
cacaagggagcuuagaaaacau

SEQ ID NO: 914776 - RNA, 22 nt, Human
cagcucugaggaacacuccuuu

SEQ ID NO: 914777 - RNA, 22 nt, Human
agagcaaauagagaagccagcu

SEQ ID NO: 914778 - RNA, 22 nt, Human
ugucucuugguguccagaggag

SEQ ID NO: 914779 - RNA, 21 nt, Human
ccaugucagaugugggcugug

SEQ ID NO: 914780 - RNA, 22 nt, Human
uggagcccacggaugucgcuuu

SEQ ID NO: 914781 - RNA, 19 nt, Human
cccagagcauccugaacuu

SEQ ID NO: 914782 - RNA, 22 nt, Human
aaguucaucaaagaguaaauau

SEQ ID NO: 914783 - RNA, 22 nt, Human
ucagugcuuccuggaggaagcc

SEQ ID NO: 914784 - RNA, 22 nt, Human
ggggcagaaagcccacagagug

SEQ ID NO: 914785 - RNA, 22 nt, Human
cccugcuguguagcggaggaac

SEQ ID NO: 914786 - RNA, 22 nt, Human
aggcuggcccaccucuugucuu

SEQ ID NO: 914787 - RNA, 22 nt, Human
gaggccacuuccuacuggagga

SEQ ID NO: 914788 - RNA, 22 nt, Human
aggaggcugggcacaguggccu

SEQ ID NO: 914789 - RNA, 22 nt, Human
aaaaccucaguucugcucuuaa

SEQ ID NO: 914790 - RNA, 22 nt, Human
uugagcuguauaccuaugacug

SEQ ID NO: 914791 - RNA, 22 nt, Human
aaauugcugacacuugaccauu

SEQ ID NO: 914792 - RNA, 22 nt, Human
ucucagggccccaaaggcuagu

SEQ ID NO: 914793 - RNA, 22 nt, Human
gccagcaguauguccuggcagu

SEQ ID NO: 914794 - RNA, 22 nt, Human
ucagaacagcgagaauauucac

SEQ ID NO: 914795 - RNA, 22 nt, Human
cugugucucuccuuacaagacu

SEQ ID NO: 914796 - RNA, 22 nt, Human
uaucauaaguuaauuaaacagu

SEQ ID NO: 914797 - RNA, 20 nt, Human
cauuugggaucaugagguuu

SEQ ID NO: 914798 - RNA, 22 nt, Human
gagcugaggugauguggucguu

SEQ ID NO: 914799 - RNA, 22 nt, Human
cuucagagaguccagggacugc

SEQ ID NO: 914800 - RNA, 22 nt, Human
uauuccuaauuugcagggcaug

SEQ ID NO: 914801 - RNA, 22 nt, Human
gucagagacaaacuuccucucu

SEQ ID NO: 914802 - RNA, 22 nt, Human
gcugcagaccucaugcaggugg

SEQ ID NO: 914803 - RNA, 22 nt, Human
uugucaucaagaugcauugguc

SEQ ID NO: 914804 - RNA, 22 nt, Human
ugguuccucagggcagcuguac

SEQ ID NO: 914805 - RNA, 22 nt, Human
agcacccuuugugagcauaagu

SEQ ID NO: 914806 - RNA, 22 nt, Human
ugaggaggugggcacacagagu

SEQ ID NO: 914807 - RNA, 22 nt, Human
cacaaacaucaauccuguuuuc

SEQ ID NO: 914808 - RNA, 22 nt, Human
ugcagcugguuuagaacuagau

SEQ ID NO: 914809 - RNA, 22 nt, Human
ugaaguuuaauuuuggacauga

SEQ ID NO: 914810 - RNA, 22 nt, Human
ugcaaauauuagcauucgauau

SEQ ID NO: 914811 - RNA, 22 nt, Human
auaaugcauuuagaauaauuca

SEQ ID NO: 914812 - RNA, 22 nt, Human
aucaaagugauuuguaaacagg

SEQ ID NO: 914813 - RNA, 22 nt, Human
uuucuuuaggcuguguugccaa

SEQ ID NO: 914814 - RNA, 22 nt, Human
cugggccaucucucugcaagug

SEQ ID NO: 914815 - RNA, 22 nt, Human
guagaguugaguagugguaaca

SEQ ID NO: 914816 - RNA, 22 nt, Human
gugagcagggcaggacugggga

SEQ ID NO: 914817 - RNA, 18 nt, Human
guucaucuuuuucuaaag

SEQ ID NO: 914818 - RNA, 22 nt, Human
ugggugaguggagggcauucua

SEQ ID NO: 914819 - RNA, 17 nt, Human
agggacagcaguuuagg

SEQ ID NO: 914820 - RNA, 22 nt, Human
ccucucucuuguagucccugcc

SEQ ID NO: 914821 - RNA, 22 nt, Human
acagugcacauccugagugauu

SEQ ID NO: 914822 - RNA, 22 nt, Human
ugagauggcaacaccagcuuug

SEQ ID NO: 914823 - RNA, 22 nt, Human
ucuugggaaauaaacagauuga

SEQ ID NO: 914824 - RNA, 21 nt, Human
uagcaauuauagaugucuaaa

SEQ ID NO: 914825 - RNA, 22 nt, Human
guggcacauugguagggucugu

SEQ ID NO: 914826 - RNA, 20 nt, Human
acaaauuggcagaaugacaa

SEQ ID NO: 914827 - RNA, 22 nt, Human
cucagugucacguuuugccuua

SEQ ID NO: 914828 - RNA, 22 nt, Human
aagccacuguuuuggagugcuu

SEQ ID NO: 914829 - RNA, 22 nt, Human
uggcuguggacucagauggcuc

SEQ ID NO: 914830 - RNA, 23 nt, Human
agcagcagugagaggugucuuac

SEQ ID NO: 914831 - RNA, 22 nt, Human
ugcacagagcaggcaccagcgg

SEQ ID NO: 914832 - RNA, 23 nt, Human
aaggugucauugaugggauucua

SEQ ID NO: 914833 - RNA, 22 nt, Human
cugaagccaugugcucacuggu

SEQ ID NO: 914834 - RNA, 18 nt, Human
uauauuucacacauauuc

SEQ ID NO: 914835 - RNA, 22 nt, Human
ugaggcagggaguuuaauuguc

SEQ ID NO: 914836 - RNA, 22 nt, Human
agcgcugugggcgugcgaggag

SEQ ID NO: 914837 - RNA, 22 nt, Human
acuauuuacucaaaugagguug

SEQ ID NO: 914838 - RNA, 22 nt, Human
aucaucaucaacaagaaacauu

SEQ ID NO: 914839 - RNA, 22 nt, Human
gugcagagaggaccuuggggag

SEQ ID NO: 914840 - RNA, 22 nt, Human
auaguaaauuaucguggagaga

SEQ ID NO: 914841 - RNA, 22 nt, Human
ucugugucguucugugcucugg

SEQ ID NO: 914842 - RNA, 22 nt, Human
ucucugcucaggcaccagcccu

SEQ ID NO: 914843 - RNA, 22 nt, Human
gcccccagaagggccacagauu

SEQ ID NO: 914844 - RNA, 22 nt, Human
uucuuuucggccugugagaagg

SEQ ID NO: 914845 - RNA, 22 nt, Human
agacccucuccucauggacaug

SEQ ID NO: 914846 - RNA, 22 nt, Human
cccucacucugccuccuggggu

SEQ ID NO: 914847 - RNA, 22 nt, Human
aauacuguaaauggagcagcca

SEQ ID NO: 914848 - RNA, 22 nt, Human
cugaaacauugcaauaacaaag

SEQ ID NO: 914849 - RNA, 22 nt, Human
uuuccuaacucaucggauguac

SEQ ID NO: 914850 - RNA, 19 nt, Human
cuuuuucaccuucuagaag

SEQ ID NO: 914851 - RNA, 21 nt, Human
uucaaagagugggcauuguca

SEQ ID NO: 914852 - RNA, 22 nt, Human
gugagcaggauuucauggugua

SEQ ID NO: 914853 - RNA, 21 nt, Human
guccuguuccugaaccuuccc

SEQ ID NO: 914854 - RNA, 22 nt, Human
cauuacaacaaucugccauggc

SEQ ID NO: 914855 - RNA, 22 nt, Human
gcccucuguguaacaauccaga

SEQ ID NO: 914856 - RNA, 22 nt, Human
gucaaauauaugcaaaacuauu

SEQ ID NO: 914857 - RNA, 22 nt, Human
ggagcagacauaaccuuacaga

SEQ ID NO: 914858 - RNA, 22 nt, Human
gagaaggauguggcucauagcu

SEQ ID NO: 914859 - RNA, 22 nt, Human
agcagccagagucugaacauua

SEQ ID NO: 914860 - RNA, 22 nt, Human
ccagcccaaacaagccgccuuc

SEQ ID NO: 914861 - RNA, 22 nt, Human
acaguguucucuuccuguauag

SEQ ID NO: 914862 - RNA, 22 nt, Human
guggauggagcuggaagccauu

SEQ ID NO: 914863 - RNA, 18 nt, Human
agcccagcggagugaauc

SEQ ID NO: 914864 - RNA, 22 nt, Human
cacaggaaucugcauuuugacc

SEQ ID NO: 914865 - RNA, 22 nt, Human
uccaggccauugacugcauccu

SEQ ID NO: 914866 - RNA, 22 nt, Human
auaaagcuaagacuuacaugaa

SEQ ID NO: 914867 - RNA, 22 nt, Human
ccaggcagggagcuguuuggcc

SEQ ID NO: 914868 - RNA, 22 nt, Human
cauuuuaccuagaagcugaaag

SEQ ID NO: 914869 - RNA, 22 nt, Human
augucacauggccuguacuuug

SEQ ID NO: 914870 - RNA, 20 nt, Human
uuucacuguggugcuggaga

SEQ ID NO: 914871 - RNA, 20 nt, Human
uucaaaguguaugauaugca

SEQ ID NO: 914872 - RNA, 22 nt, Human
ucccagcagaugagcugaccua

SEQ ID NO: 914873 - RNA, 22 nt, Human
ugcccaugcaugacagauggcu

SEQ ID NO: 914874 - RNA, 22 nt, Human
caauaauuuacauuggauacca

SEQ ID NO: 914875 - RNA, 22 nt, Human
uguggggaccuggcugccaccc

SEQ ID NO: 914876 - RNA, 22 nt, Human
aaguacuagaaauagcagugcc

SEQ ID NO: 914877 - RNA, 22 nt, Human
uagaaaaguaugggacugacau

SEQ ID NO: 914878 - RNA, 22 nt, Human
ccagggcuucaguuagugguga

SEQ ID NO: 914879 - RNA, 22 nt, Human
gcacugccuguguucaggguaa

SEQ ID NO: 914880 - RNA, 18 nt, Human
ugggcugccuggccucug

SEQ ID NO: 914881 - RNA, 22 nt, Human
auguuuuucauaccaguguugg

SEQ ID NO: 914882 - RNA, 22 nt, Human
uaacaauggaguuuugagaaag

SEQ ID NO: 914883 - RNA, 22 nt, Human
uauuuugagccccugacaucua

SEQ ID NO: 914884 - RNA, 22 nt, Human
gaaacguuaaaccauauguaau

SEQ ID NO: 914885 - RNA, 22 nt, Human
ugcuauuagaagccaugcuguu

SEQ ID NO: 914886 - RNA, 22 nt, Human
guacauuuacugaugaaaagua

SEQ ID NO: 914887 - RNA, 22 nt, Human
gcagaggggguacuucggcccu

SEQ ID NO: 914888 - RNA, 22 nt, Human
guguggcccugcguccugaguc

SEQ ID NO: 914889 - RNA, 22 nt, Human
accaguuuguaaccuguuuuca

SEQ ID NO: 914890 - RNA, 22 nt, Human
ugggccaguccugccuaaggug

SEQ ID NO: 914891 - RNA, 22 nt, Human
gugugugcuccccaggagagcu

SEQ ID NO: 914892 - RNA, 22 nt, Human
ccagaaagacuuuuuagguacg

SEQ ID NO: 914893 - RNA, 22 nt, Human
ugucuuuucuacuguaagcaua

SEQ ID NO: 914894 - RNA, 22 nt, Human
ccucaggcuagcuacugucccu

SEQ ID NO: 914895 - RNA, 22 nt, Human
uccaaagaaccuggcuacuguc

SEQ ID NO: 914896 - RNA, 23 nt, Human
ugaguguggggacagugguuugc

SEQ ID NO: 914897 - RNA, 22 nt, Human
aagaaauuaaugugccauuacu

SEQ ID NO: 914898 - RNA, 22 nt, Human
aacaaaguuucaggaagauaga

SEQ ID NO: 914899 - RNA, 22 nt, Human
gccagaggcucagguugccaug

SEQ ID NO: 914900 - RNA, 22 nt, Human
gaugacaagcauaugacacguc

SEQ ID NO: 914901 - RNA, 22 nt, Human
cagucccagacccagaaggugg

SEQ ID NO: 914902 - RNA, 18 nt, Human
ucacucauagacaucuau

SEQ ID NO: 914903 - RNA, 22 nt, Human
uguuuucuguguagagaucaca

SEQ ID NO: 914904 - RNA, 18 nt, Human
gcccaugguaaaugcugu

SEQ ID NO: 914905 - RNA, 20 nt, Human
auccaugagagucuggauuc

SEQ ID NO: 914906 - RNA, 22 nt, Human
cagggauggcugucaggaugua

SEQ ID NO: 914907 - RNA, 22 nt, Human
augaaugcugggacaaauauau

SEQ ID NO: 914908 - RNA, 22 nt, Human
auuuauugagacuuaacaaccc

SEQ ID NO: 914909 - RNA, 22 nt, Human
caguacuaagacuccaccuagc

SEQ ID NO: 914910 - RNA, 18 nt, Human
agcaacagaaacauaugg

SEQ ID NO: 914911 - RNA, 22 nt, Human
gagcugugccaaucugucuggg

SEQ ID NO: 914912 - RNA, 22 nt, Human
gagcagcugcagugcagacccu

SEQ ID NO: 914913 - RNA, 22 nt, Human
uuucaucuuccuuggcauaggu

SEQ ID NO: 914914 - RNA, 22 nt, Human
aggcacacagaccccagcaagu

SEQ ID NO: 914915 - RNA, 22 nt, Human
cuguggcuaggauuauuccuga

SEQ ID NO: 914916 - RNA, 22 nt, Human
ugcuuccuauccacacaaugcc

SEQ ID NO: 914917 - RNA, 23 nt, Human
uggaagcagaaguuucaauaucc

SEQ ID NO: 914918 - RNA, 22 nt, Human
ugggggugguucuugccuccag

SEQ ID NO: 914919 - RNA, 22 nt, Human
gugagguccuaauagacaucga

SEQ ID NO: 914920 - RNA, 22 nt, Human
ccagacuggggcuccuugaggg

SEQ ID NO: 914921 - RNA, 22 nt, Human
augacacauuugugcuguugaa

SEQ ID NO: 914922 - RNA, 22 nt, Human
gagucgagcagaaagccgucgg

SEQ ID NO: 914923 - RNA, 22 nt, Human
ucagugcaggaaucucuagcca

SEQ ID NO: 914924 - RNA, 22 nt, Human
ugggggcugugcacaggcucac

SEQ ID NO: 914925 - RNA, 22 nt, Human
uggggaggauaugugaguuauu

SEQ ID NO: 914926 - RNA, 22 nt, Human
auuauuuccuugcuuugaggaa

SEQ ID NO: 914927 - RNA, 22 nt, Human
aaucuguagggaacaacuguac

SEQ ID NO: 914928 - RNA, 22 nt, Human
caauagugucugcuuguuucua

SEQ ID NO: 914929 - RNA, 22 nt, Human
aagcuguucucuaaguuucaug

SEQ ID NO: 914930 - RNA, 22 nt, Human
aaacuggauuaccaggcuggug

SEQ ID NO: 914931 - RNA, 22 nt, Human
ccccaggacguggcccucauag

SEQ ID NO: 914932 - RNA, 22 nt, Human
acacauucaugagugcaugcac

SEQ ID NO: 914933 - RNA, 22 nt, Human
uggccagucuuagcugugccug

SEQ ID NO: 914934 - RNA, 22 nt, Human
aggacagagggaccagagccca

SEQ ID NO: 914935 - RNA, 22 nt, Human
agugaggauaccaauguguaga

SEQ ID NO: 914936 - RNA, 22 nt, Human
ggcuaaggaacgcaggcuucuc

SEQ ID NO: 914937 - RNA, 18 nt, Human
uuaggaaguuucuccguc

SEQ ID NO: 914938 - RNA, 22 nt, Human
augaaauuuuaauuauaccucu

SEQ ID NO: 914939 - RNA, 22 nt, Human
gcacuguagugggggagaaaug

SEQ ID NO: 914940 - RNA, 22 nt, Human
cccauuuaucccaagguuacuc

SEQ ID NO: 914941 - RNA, 22 nt, Human
cugagcagaggucaagauacuu

SEQ ID NO: 914942 - RNA, 22 nt, Human
aacaguaaaaaucauuuaguug

SEQ ID NO: 914943 - RNA, 22 nt, Human
agcugcccccagggcugugcuu

SEQ ID NO: 914944 - RNA, 23 nt, Human
cugagguggagagugagguaagu

SEQ ID NO: 914945 - RNA, 22 nt, Human
caucuguucuauccacguugcu

SEQ ID NO: 914946 - RNA, 22 nt, Human
gaggcugcugagagcccuguuu

SEQ ID NO: 914947 - RNA, 22 nt, Human
uaggucugauuuccauucaguc

SEQ ID NO: 914948 - RNA, 22 nt, Human
uauauuuaaauccagguugaaa

SEQ ID NO: 914949 - RNA, 22 nt, Human
cucagccccaauucuccccauu

SEQ ID NO: 914950 - RNA, 18 nt, Human
uccaggacucugcguggc

SEQ ID NO: 914951 - RNA, 22 nt, Human
ggcugaggguauagcuguccca

SEQ ID NO: 914952 - RNA, 20 nt, Human
ucugggcuucccccagcucc

SEQ ID NO: 914953 - RNA, 22 nt, Human
caggccuugaaggccugcggga

SEQ ID NO: 914954 - RNA, 20 nt, Human
ggcacuggaagcacacagga

SEQ ID NO: 914955 - RNA, 22 nt, Human
ggcaguguggcauaacauguag

SEQ ID NO: 914956 - RNA, 22 nt, Human
caguuuugguccuuucuaggua

SEQ ID NO: 914957 - RNA, 22 nt, Human
cugcaucacuggccaagggugu

SEQ ID NO: 914958 - RNA, 22 nt, Human
uuguaacaucaccaucaaaauc

SEQ ID NO: 914959 - RNA, 22 nt, Human
guccucuuagccacuuaauuau

SEQ ID NO: 914960 - RNA, 20 nt, Human
ucagcucugugccugggaug

SEQ ID NO: 914961 - RNA, 21 nt, Human
acagcaagccuucacaugagu

SEQ ID NO: 914962 - RNA, 22 nt, Human
ucugggaagugagaugcugugu

SEQ ID NO: 914963 - RNA, 22 nt, Human
cugggaugcuccggccuggaug

SEQ ID NO: 914964 - RNA, 22 nt, Human
uuuuucuacugguguuggugua

SEQ ID NO: 914965 - RNA, 22 nt, Human
cccagagccgcuccccuacuuc

SEQ ID NO: 914966 - RNA, 22 nt, Human
auacacaugcacacaugugugu

SEQ ID NO: 914967 - RNA, 22 nt, Human
ugugccugucacccucagagag

SEQ ID NO: 914968 - RNA, 22 nt, Human
ugucugugcccaaggcucccgg

SEQ ID NO: 914969 - RNA, 18 nt, Human
ugugguggagcugccuuc

SEQ ID NO: 914970 - RNA, 22 nt, Human
caggagcuggauaggaccacaa

SEQ ID NO: 914971 - RNA, 22 nt, Human
aagcagcuuucuuuccugugaa

SEQ ID NO: 914972 - RNA, 22 nt, Human
guaacauuuugagcaguaggcu

SEQ ID NO: 914973 - RNA, 22 nt, Human
caggagaagucucuagggggug

SEQ ID NO: 914974 - RNA, 22 nt, Human
ccuggugccacuagagaauguc

SEQ ID NO: 914975 - RNA, 22 nt, Human
uuauguuugaguauaugacuca

SEQ ID NO: 914976 - RNA, 22 nt, Human
cagucccaaggaggaagcaguc

SEQ ID NO: 914977 - RNA, 22 nt, Human
auacagagacacuugagacugg

SEQ ID NO: 914978 - RNA, 22 nt, Human
uuuacaaguuuacagaaugaug

SEQ ID NO: 914979 - RNA, 22 nt, Human
ucuuugaugcuucugaaggugu

SEQ ID NO: 914980 - RNA, 22 nt, Human
cauggcugaggcagaggacuga

SEQ ID NO: 914981 - RNA, 22 nt, Human
gucuagaaaugccauacgugcc

SEQ ID NO: 914982 - RNA, 22 nt, Human
aagaaugauuacaaagcaacga

SEQ ID NO: 914983 - RNA, 19 nt, Human
ucacccaggcugcuggcuc

SEQ ID NO: 914984 - RNA, 22 nt, Human
uuuacagucugucuagcaaugu

SEQ ID NO: 914985 - RNA, 22 nt, Human
uugcuuuugggaaaacaugccu

SEQ ID NO: 914986 - RNA, 20 nt, Human
cuuuagaagaacccaagcau

SEQ ID NO: 914987 - RNA, 22 nt, Human
acccugggaccuggagguggau

SEQ ID NO: 914988 - RNA, 22 nt, Human
aggagcucugggcagggccucc

SEQ ID NO: 914989 - RNA, 22 nt, Human
gagaaucauuuacagaaugauu

SEQ ID NO: 914990 - RNA, 22 nt, Human
acacauaagccuaaucaucucc

SEQ ID NO: 914991 - RNA, 22 nt, Human
uuaaauuucuacgugauccagg

SEQ ID NO: 914992 - RNA, 21 nt, Human
ugaggccucuccugggcuggc

SEQ ID NO: 914993 - RNA, 21 nt, Human
auucugagucuuggggucuca

SEQ ID NO: 914994 - RNA, 21 nt, Human
gagacagcccagugccagggc

SEQ ID NO: 914995 - RNA, 20 nt, Human
agcaggugacggggccugcu

SEQ ID NO: 914996 - RNA, 22 nt, Human
ucacagaagcuugaagauuuuc

SEQ ID NO: 914997 - RNA, 22 nt, Human
gccugggauagaggcaaugcau

SEQ ID NO: 914998 - RNA, 22 nt, Human
uuugucuuaaaucuuguuacug

SEQ ID NO: 914999 - RNA, 22 nt, Human
acagcagcgugaaguguguuau

SEQ ID NO: 915000 - RNA, 22 nt, Human
uaaagacacccagggagggacu

SEQ ID NO: 915001 - RNA, 22 nt, Human
auuagaaaauacaugggcuguc

SEQ ID NO: 915002 - RNA, 20 nt, Human
ugcagagcuggcuggcuccu

SEQ ID NO: 915003 - RNA, 22 nt, Human
acaggggcaggcaggacccuuu

SEQ ID NO: 915004 - RNA, 22 nt, Human
uuuacagagguguccugcauug

SEQ ID NO: 915005 - RNA, 22 nt, Human
uucugagacagcaaagauucuu

SEQ ID NO: 915006 - RNA, 22 nt, Human
ucagaggagaugguuaccaggg

SEQ ID NO: 915007 - RNA, 22 nt, Human
uacauagcuccuagugaugcau

SEQ ID NO: 915008 - RNA, 19 nt, Human
uuuuccuucuccucuuaau

SEQ ID NO: 915009 - RNA, 22 nt, Human
aaacuucagacuccccacuucu

SEQ ID NO: 915010 - RNA, 22 nt, Human
agugggagccagcagcuugggg

SEQ ID NO: 915011 - RNA, 22 nt, Human
ugcaaauagccugaugaaagaa

SEQ ID NO: 915012 - RNA, 22 nt, Human
acagaacaggcugagaaaaaca

SEQ ID NO: 915013 - RNA, 22 nt, Human
ugcauguguguuaagaugcuuu

SEQ ID NO: 915014 - RNA, 19 nt, Human
guguggcagagagugacca

SEQ ID NO: 915015 - RNA, 22 nt, Human
auuucucauuaagaucuuccaa

SEQ ID NO: 915016 - RNA, 22 nt, Human
agcaguuuagcuauacugcuug

SEQ ID NO: 915017 - RNA, 22 nt, Human
agucaguguucuccggagaggc

SEQ ID NO: 915018 - RNA, 23 nt, Human
cacaaagguuccauucucucacc

SEQ ID NO: 915019 - RNA, 22 nt, Human
agacagcacuuuuguauggggg

SEQ ID NO: 915020 - RNA, 22 nt, Human
ggcugccucugaugugcagacg

SEQ ID NO: 915021 - RNA, 22 nt, Human
ggcugccucagauuugcugacu

SEQ ID NO: 915022 - RNA, 22 nt, Human
aggaggccgggauucuggagau

SEQ ID NO: 915023 - RNA, 22 nt, Human
gcucuguaugagggugagagau

SEQ ID NO: 915024 - RNA, 19 nt, Human
agcuggggcgguguguguu

SEQ ID NO: 915025 - RNA, 19 nt, Human
gcaucugcaugaugggguu

SEQ ID NO: 915026 - RNA, 22 nt, Human
ggcugagacaaccugggaccca

SEQ ID NO: 915027 - RNA, 22 nt, Human
gcuuuaaaccucuacucugucc

SEQ ID NO: 915028 - RNA, 22 nt, Human
ucuuuauuucugaaucccccau

SEQ ID NO: 915029 - RNA, 22 nt, Human
uaacaaaguaccauagacugga

SEQ ID NO: 915030 - RNA, 22 nt, Human
uuuuuauacuuugcucaagauu

SEQ ID NO: 915031 - RNA, 21 nt, Human
gccaccucaaucuucuagcgc

SEQ ID NO: 915032 - RNA, 22 nt, Human
aauucucuccaggguaacauca

SEQ ID NO: 915033 - RNA, 22 nt, Human
acaguguagugugaugucaaaa

SEQ ID NO: 915034 - RNA, 22 nt, Human
cccagcauggagugaggacuca

SEQ ID NO: 915035 - RNA, 22 nt, Human
ucugaggcccaguucaacucuu

SEQ ID NO: 915036 - RNA, 22 nt, Human
gccaggucugcaggcauccuga

SEQ ID NO: 915037 - RNA, 22 nt, Human
caggaagcucuuagcagucacc

SEQ ID NO: 915038 - RNA, 22 nt, Human
uuucuauaugaggagcuaaagu

SEQ ID NO: 915039 - RNA, 22 nt, Human
agggcagagaucugagugggca

SEQ ID NO: 915040 - RNA, 22 nt, Human
uccaggggacacuguuucucca

SEQ ID NO: 915041 - RNA, 21 nt, Human
uggaccaggaaggugguggug

SEQ ID NO: 915042 - RNA, 22 nt, Human
cuuggcuccaaucccagcucug

SEQ ID NO: 915043 - RNA, 22 nt, Human
cagagugauggcaccugcuggg

SEQ ID NO: 915044 - RNA, 22 nt, Human
ggcagaagauaggacagggaau

SEQ ID NO: 915045 - RNA, 22 nt, Human
ggugugucugccaggaacugca

SEQ ID NO: 915046 - RNA, 22 nt, Human
agauaucuccagugaugcucgu

SEQ ID NO: 915047 - RNA, 22 nt, Human
uagcgcaacugcagagaaguag

SEQ ID NO: 915048 - RNA, 22 nt, Human
uauuuagugauagaagcaagga

SEQ ID NO: 915049 - RNA, 22 nt, Human
acauguguuuuccuacuuauga

SEQ ID NO: 915050 - RNA, 22 nt, Human
acagagcaguaagaacacagcu

SEQ ID NO: 915051 - RNA, 22 nt, Human
uccucugcuccaggcuggacuu

SEQ ID NO: 915052 - RNA, 22 nt, Human
auugacaauguauuuguaucug

SEQ ID NO: 915053 - RNA, 21 nt, Human
ccauaauuuuguuucagaagu

SEQ ID NO: 915054 - RNA, 22 nt, Human
uccaggccacgaccuccuggau

SEQ ID NO: 915055 - RNA, 23 nt, Human
aaaugugagggaaaaucuuucug

SEQ ID NO: 915056 - RNA, 22 nt, Human
cauucacaaagcugauugaugg

SEQ ID NO: 915057 - RNA, 22 nt, Human
gagacagaguuucacucuuguu

SEQ ID NO: 915058 - RNA, 22 nt, Human
guacacauauauuaaaaauugu

SEQ ID NO: 915059 - RNA, 22 nt, Human
ucugccuggaugauggcagggc

SEQ ID NO: 915060 - RNA, 22 nt, Human
acugaggauggauaggucauau

SEQ ID NO: 915061 - RNA, 23 nt, Human
ucauguggaaaaggaucuggucu

SEQ ID NO: 915062 - RNA, 22 nt, Human
ggcuucuuccugugaacauguu

SEQ ID NO: 915063 - RNA, 22 nt, Human
cauggcagaaaccugagcugcu

SEQ ID NO: 915064 - RNA, 22 nt, Human
ccagggcagggaccacgugucu

SEQ ID NO: 915065 - RNA, 22 nt, Human
aggccacaagaacuaccccauc

SEQ ID NO: 915066 - RNA, 22 nt, Human
aaauucaauuaacuuucaugcu

SEQ ID NO: 915067 - RNA, 22 nt, Human
cucagaaagugacaggggggug

SEQ ID NO: 915068 - RNA, 22 nt, Human
gauuugucuaggucaugacuuu

SEQ ID NO: 915069 - RNA, 22 nt, Human
uccaugggaagauuuugagugg

SEQ ID NO: 915070 - RNA, 22 nt, Human
gcagugcucugccuauaaugga

SEQ ID NO: 915071 - RNA, 22 nt, Human
ucugccuggguguggagcagag

SEQ ID NO: 915072 - RNA, 22 nt, Human
uucuggagucccacagccaggg

SEQ ID NO: 915073 - RNA, 22 nt, Human
uggcugccaugacgccugggga

SEQ ID NO: 915074 - RNA, 22 nt, Human
acuuagaauuaaauauuuuugg

SEQ ID NO: 915075 - RNA, 22 nt, Human
augaggcauucacagaaggcac

SEQ ID NO: 915076 - RNA, 22 nt, Human
ugggaagggccgauggagccuc

SEQ ID NO: 915077 - RNA, 22 nt, Human
cacaggguuguucugaggauuc

SEQ ID NO: 915078 - RNA, 22 nt, Human
uguauuuucugaggagcauuag

SEQ ID NO: 915079 - RNA, 22 nt, Human
uuucaaaauuuugcagugguaa

SEQ ID NO: 915080 - RNA, 22 nt, Human
ucucuuugacccuuuagcucca

SEQ ID NO: 915081 - RNA, 22 nt, Human
gccaccagcagaaaaggggcca

SEQ ID NO: 915082 - RNA, 22 nt, Human
uuuuccaccuucuagagauugu

SEQ ID NO: 915083 - RNA, 22 nt, Human
guggcagauugcucaccauggu

SEQ ID NO: 915084 - RNA, 22 nt, Human
gacccuuuggagguagucacca

SEQ ID NO: 915085 - RNA, 22 nt, Human
agcuuguguuuuucuaaguauc

SEQ ID NO: 915086 - RNA, 22 nt, Human
ggagggugcagacccuuugcaa

SEQ ID NO: 915087 - RNA, 22 nt, Human
uuuucuauuaacucauuuugca

SEQ ID NO: 915088 - RNA, 22 nt, Human
aauuagcauuucccauauaaau

SEQ ID NO: 915089 - RNA, 21 nt, Human
uuagaagcuaaugcagcuggu

SEQ ID NO: 915090 - RNA, 22 nt, Human
aacacagaucaaaauauuuccu

SEQ ID NO: 915091 - RNA, 22 nt, Human
ugggccuguggggaucuugaag

SEQ ID NO: 915092 - RNA, 22 nt, Human
ucuugcagaggcacugugucag

SEQ ID NO: 915093 - RNA, 22 nt, Human
agggucaguucugugagguguu

SEQ ID NO: 915094 - RNA, 22 nt, Human
aaagguuuugcccuggguauuc

SEQ ID NO: 915095 - RNA, 22 nt, Human
caucaaauaggaauauuuggca

SEQ ID NO: 915096 - RNA, 21 nt, Human
gaaguucaugaucuuucugcu

SEQ ID NO: 915097 - RNA, 22 nt, Human
ucuucucuacaccagcagcccc

SEQ ID NO: 915098 - RNA, 22 nt, Human
uguugguuuaaaaugcugauuu

SEQ ID NO: 915099 - RNA, 22 nt, Human
cuggaggaccacagaagcuggu

SEQ ID NO: 915100 - RNA, 22 nt, Human
guuuauuggguauuguggagcc

SEQ ID NO: 915101 - RNA, 22 nt, Human
aggagaguaccauugggccgca

SEQ ID NO: 915102 - RNA, 22 nt, Human
cugcuugucuucgaggggugca

SEQ ID NO: 915103 - RNA, 22 nt, Human
caggggcagucugugugcgugg

SEQ ID NO: 915104 - RNA, 23 nt, Human
uuccagaggaagaagucaugacu

SEQ ID NO: 915105 - RNA, 22 nt, Human
ugucucuuguuaaugauuacua

SEQ ID NO: 915106 - RNA, 18 nt, Human
uggcagggaggaaauaua

SEQ ID NO: 915107 - RNA, 22 nt, Human
aggcagcuggaggcagagacua

SEQ ID NO: 915108 - RNA, 22 nt, Human
cagaccagaaggaagccgacaa

SEQ ID NO: 915109 - RNA, 22 nt, Human
uuucauuaaagucaaaucuggu

SEQ ID NO: 915110 - RNA, 22 nt, Human
aagccacuauggugauucucaa

SEQ ID NO: 915111 - RNA, 22 nt, Human
aaugaucauuauaaagugcucu

SEQ ID NO: 915112 - RNA, 22 nt, Human
ggccugagcuugggcagcguau

SEQ ID NO: 915113 - RNA, 22 nt, Human
ucaguguccaaaaagaggcaag

SEQ ID NO: 915114 - RNA, 22 nt, Human
uuggcuucaaugucagagacag

SEQ ID NO: 915115 - RNA, 22 nt, Human
aguuuucaguaaauauuaguga

SEQ ID NO: 915116 - RNA, 21 nt, Human
uuuaauuugcauguaugacgc

SEQ ID NO: 915117 - RNA, 22 nt, Human
cagacaguggacuugauaaagg

SEQ ID NO: 915118 - RNA, 22 nt, Human
ccugggcuuugcuggcaaggcc

SEQ ID NO: 915119 - RNA, 22 nt, Human
cccagccuggugcacugugggg

SEQ ID NO: 915120 - RNA, 22 nt, Human
ugucaucucacugauauagaug

SEQ ID NO: 915121 - RNA, 22 nt, Human
uacaccauucccagguggauuu

SEQ ID NO: 915122 - RNA, 22 nt, Human
ucuccagguaaauggcauccug

SEQ ID NO: 915123 - RNA, 22 nt, Human
ccagggcaauuauuuggagggu

SEQ ID NO: 915124 - RNA, 22 nt, Human
aaagguuaauguugucauguua

SEQ ID NO: 915125 - RNA, 22 nt, Human
uacacaguuccauuuaagccag

SEQ ID NO: 915126 - RNA, 22 nt, Human
uuuacccauauuagcaucaagu

SEQ ID NO: 915127 - RNA, 22 nt, Human
ugucaaaggguaagcuggauaa

SEQ ID NO: 915128 - RNA, 22 nt, Human
aguucuaauugcguuuucuugc

SEQ ID NO: 915129 - RNA, 22 nt, Human
uccugggauuugcccuuuucuc

SEQ ID NO: 915130 - RNA, 22 nt, Human
ggaaagaguuuugguauauuug

SEQ ID NO: 915131 - RNA, 22 nt, Human
uuuuccucuguaugcgugagau

SEQ ID NO: 915132 - RNA, 22 nt, Human
aaaugucuuucaauagagaaau

SEQ ID NO: 915133 - RNA, 20 nt, Human
ugggcucugcuuccuggagu

SEQ ID NO: 915134 - RNA, 23 nt, Human
ucagccucuuaggacuucucacc

SEQ ID NO: 915135 - RNA, 22 nt, Human
ccuggcucauuaugugccccca

SEQ ID NO: 915136 - RNA, 22 nt, Human
uggcaguucagguuggacucuu

SEQ ID NO: 915137 - RNA, 22 nt, Human
ccaggcuggagugcaauggugc

SEQ ID NO: 915138 - RNA, 22 nt, Human
caggggcuuuuccucuauaagg

SEQ ID NO: 915139 - RNA, 22 nt, Human
uaaacugaagcucaacucaaau

SEQ ID NO: 915140 - RNA, 22 nt, Human
cugggaccugugugccugggcc

SEQ ID NO: 915141 - RNA, 20 nt, Human
aacagugaaugaggccagag

SEQ ID NO: 915142 - RNA, 22 nt, Human
auuaauuuuaccuuuguaaaca

SEQ ID NO: 915143 - RNA, 22 nt, Human
acauuugucuucuuucagauua

SEQ ID NO: 915144 - RNA, 22 nt, Human
uuagcagcuaagucaugcugca

SEQ ID NO: 915145 - RNA, 22 nt, Human
ugguggagaccucgcuaacccc

SEQ ID NO: 915146 - RNA, 22 nt, Human
ugcuuaaagcugcucaguugua

SEQ ID NO: 915147 - RNA, 22 nt, Human
uugcucauuugccuuuagguuu

SEQ ID NO: 915148 - RNA, 22 nt, Human
auggcagcuuucauuguccaca

SEQ ID NO: 915149 - RNA, 22 nt, Human
cuagcuagcagcauuacaacaa

SEQ ID NO: 915150 - RNA, 23 nt, Human
ugcuccagccucuuugauagugu

SEQ ID NO: 915151 - RNA, 22 nt, Human
agcagggaggcggugugcuggc

SEQ ID NO: 915152 - RNA, 22 nt, Human
uuugggcucacuaugcugaaga

SEQ ID NO: 915153 - RNA, 22 nt, Human
ugcaguggaggccgugagacag

SEQ ID NO: 915154 - RNA, 22 nt, Human
gccaaaguccacuugcuuucug

SEQ ID NO: 915155 - RNA, 22 nt, Human
cagugcuuuucaaaguucuaug

SEQ ID NO: 915156 - RNA, 22 nt, Human
agggcuccuccccggccuccac

SEQ ID NO: 915157 - RNA, 22 nt, Human
acaaugcaauuguaaggugugu

SEQ ID NO: 915158 - RNA, 21 nt, Human
uggcagcacccacacccucug

SEQ ID NO: 915159 - RNA, 22 nt, Human
ucuagaaaaacaaaguaucuga

SEQ ID NO: 915160 - RNA, 22 nt, Human
ucggagcuguagaugaaacccu

SEQ ID NO: 915161 - RNA, 22 nt, Human
cugugcccuggccaggccucuc

SEQ ID NO: 915162 - RNA, 22 nt, Human
uucaguuucuaaagauguuccu

SEQ ID NO: 915163 - RNA, 22 nt, Human
agggcagcaaugcagcugcugc

SEQ ID NO: 915164 - RNA, 22 nt, Human
ugagugugaggugggagcuugg

SEQ ID NO: 915165 - RNA, 22 nt, Human
gacauuuagaaguuagauucaa

SEQ ID NO: 915166 - RNA, 22 nt, Human
uagggcuguggucaguccucua

SEQ ID NO: 915167 - RNA, 17 nt, Human
ucaggcugggugcagug

SEQ ID NO: 915168 - RNA, 22 nt, Human
cuaaaguccuuaucaaguguaa

SEQ ID NO: 915169 - RNA, 22 nt, Human
uuuuuccuaagcaguggagcug

SEQ ID NO: 915170 - RNA, 22 nt, Human
guauuuaauucugugcuucuag

SEQ ID NO: 915171 - RNA, 22 nt, Human
uucugaaauucgacuauccaau

SEQ ID NO: 915172 - RNA, 21 nt, Human
acacugcuguagcauauuggg

SEQ ID NO: 915173 - RNA, 22 nt, Human
cuggggcauugggagaggccug

SEQ ID NO: 915174 - RNA, 22 nt, Human
gagaggugaauguggaugccac

SEQ ID NO: 915175 - RNA, 22 nt, Human
ccaguggguaggccauggugag

SEQ ID NO: 915176 - RNA, 22 nt, Human
ugaaaccauucucagguacacu

SEQ ID NO: 915177 - RNA, 22 nt, Human
gcuaggugcagcagacagcuua

SEQ ID NO: 915178 - RNA, 22 nt, Human
ugugaauagauugaagcuuugg

SEQ ID NO: 915179 - RNA, 22 nt, Human
cuguuacauagcuuuucuuaac

SEQ ID NO: 915180 - RNA, 22 nt, Human
gcuuuggagggcaagagcuguu

SEQ ID NO: 915181 - RNA, 22 nt, Human
ccauccaggcugugggugagcu

SEQ ID NO: 915182 - RNA, 22 nt, Human
agggagugguuaagaaggugca

SEQ ID NO: 915183 - RNA, 22 nt, Human
cacagugcuguuuguaaagaga

SEQ ID NO: 915184 - RNA, 22 nt, Human
ugggauucaccaugggcuucag

SEQ ID NO: 915185 - RNA, 22 nt, Human
ugucucuuuggccucccauaug

SEQ ID NO: 915186 - RNA, 22 nt, Human
auuauuuacagugugcucgaag

SEQ ID NO: 915187 - RNA, 22 nt, Human
aaaguucuauuggauagugcug

SEQ ID NO: 915188 - RNA, 22 nt, Human
uuagacaggauguaugaaagcu

SEQ ID NO: 915189 - RNA, 22 nt, Human
gugauucugaccuucagggagu

SEQ ID NO: 915190 - RNA, 22 nt, Human
ucuggcucucucaucacccaau

SEQ ID NO: 915191 - RNA, 22 nt, Human
ucuaacuugugaguauagauga

SEQ ID NO: 915192 - RNA, 22 nt, Human
ucuucaugccaaaugaguuuug

SEQ ID NO: 915193 - RNA, 20 nt, Human
cugggaggucuuccaaauca

SEQ ID NO: 915194 - RNA, 22 nt, Human
ccaggcugcuuuauuacucugu

SEQ ID NO: 915195 - RNA, 22 nt, Human
gaagugaagagauuagaaauca

SEQ ID NO: 915196 - RNA, 21 nt, Human
agaagccuggggaauguggcu

SEQ ID NO: 915197 - RNA, 22 nt, Human
gcagaauacugagagcugauug

SEQ ID NO: 915198 - RNA, 22 nt, Human
aggggcaguuccaaguuuugug

SEQ ID NO: 915199 - RNA, 22 nt, Human
uacaugcaugauacaaaguugc

SEQ ID NO: 915200 - RNA, 22 nt, Human
cucagggcuggaaagccaggaa

SEQ ID NO: 915201 - RNA, 22 nt, Human
ucucccaagggcacauucaagg

SEQ ID NO: 915202 - RNA, 22 nt, Human
uuacaguauuggucacguuugu

SEQ ID NO: 915203 - RNA, 20 nt, Human
uggcucucacccugugcgau

SEQ ID NO: 915204 - RNA, 22 nt, Human
gagagccuuugaagggaaguga

SEQ ID NO: 915205 - RNA, 22 nt, Human
ggcuugaucacauaggucuccc

SEQ ID NO: 915206 - RNA, 22 nt, Human
aagaaucaucugaacuuugagg

SEQ ID NO: 915207 - RNA, 22 nt, Human
ccaggccccagggcuggcuuuc

SEQ ID NO: 915208 - RNA, 20 nt, Human
ucugugugccaucaccuaac

SEQ ID NO: 915209 - RNA, 22 nt, Human
uacacagaaccugguguacagu

SEQ ID NO: 915210 - RNA, 22 nt, Human
agaggggcagggucuccggauu

SEQ ID NO: 915211 - RNA, 22 nt, Human
uaggaaugauuggaauuccagg

SEQ ID NO: 915212 - RNA, 20 nt, Human
gacauucauaguuauuacca

SEQ ID NO: 915213 - RNA, 23 nt, Human
gccuuggcgauccguggggcauc

SEQ ID NO: 915214 - RNA, 22 nt, Human
uacaauguucgcauucucucug

SEQ ID NO: 915215 - RNA, 22 nt, Human
gaacacauuagucugaguuggc

SEQ ID NO: 915216 - RNA, 22 nt, Human
uucaacauagcugaggcauaua

SEQ ID NO: 915217 - RNA, 22 nt, Human
uccugcuuugugccucacacuu

SEQ ID NO: 915218 - RNA, 22 nt, Human
ucacagaagggaaagaugccaa

SEQ ID NO: 915219 - RNA, 22 nt, Human
gcagugccuugcuucucugucu

SEQ ID NO: 915220 - RNA, 22 nt, Human
ucagugcuugccucuggaggag

SEQ ID NO: 915221 - RNA, 22 nt, Human
cucuuauagacacucuucuaua

SEQ ID NO: 915222 - RNA, 22 nt, Human
accacaggguaaaguuagauau

SEQ ID NO: 915223 - RNA, 22 nt, Human
guuuccuguggccacagaauaa

SEQ ID NO: 915224 - RNA, 22 nt, Human
agucagagaauguuuucaugga

SEQ ID NO: 915225 - RNA, 22 nt, Human
ccaucauuugauacagcugucu

SEQ ID NO: 915226 - RNA, 22 nt, Human
cuuuauggaaucaaagacugga

SEQ ID NO: 915227 - RNA, 22 nt, Human
aaaugucuacuucccaucugua

SEQ ID NO: 915228 - RNA, 22 nt, Human
guguguguaucugccuaucaca

SEQ ID NO: 915229 - RNA, 22 nt, Human
gcacagggagacagccguggcc

SEQ ID NO: 915230 - RNA, 22 nt, Human
aaaaugaugcuguaauuuggca

SEQ ID NO: 915231 - RNA, 22 nt, Human
gcuugcugaacaggaaccuggc

SEQ ID NO: 915232 - RNA, 22 nt, Human
uagcaucuguuucucuuuguga

SEQ ID NO: 915233 - RNA, 22 nt, Human
uuauagcaggugacuaaugagu

SEQ ID NO: 915234 - RNA, 22 nt, Human
cucugcaguguaacagcgcuug

SEQ ID NO: 915235 - RNA, 22 nt, Human
agcuuuauagaaaggaucagug

SEQ ID NO: 915236 - RNA, 22 nt, Human
caugucagggaagagagucagu

SEQ ID NO: 915237 - RNA, 20 nt, Human
uggccuuggggagcucacac

SEQ ID NO: 915238 - RNA, 22 nt, Human
uugcaaagaauuuuacauucua

SEQ ID NO: 915239 - RNA, 22 nt, Human
aagcauggccucuccgcucccc

SEQ ID NO: 915240 - RNA, 22 nt, Human
ugaguuaucuaaaauagucaaa

SEQ ID NO: 915241 - RNA, 18 nt, Human
guuaauuuugaaguucau

SEQ ID NO: 915242 - RNA, 22 nt, Human
uggaacaauucuugaagggaau

SEQ ID NO: 915243 - RNA, 22 nt, Human
ugcuggcuguguaccaucucaa

SEQ ID NO: 915244 - RNA, 21 nt, Human
ggccaacauggucucaucucu

SEQ ID NO: 915245 - RNA, 22 nt, Human
aguggcuuuucuugcuucuggc

SEQ ID NO: 915246 - RNA, 22 nt, Human
uuucacagguaagcaauacagg

SEQ ID NO: 915247 - RNA, 22 nt, Human
uggcagggccugaaucuuauac

SEQ ID NO: 915248 - RNA, 22 nt, Human
acagaggucauggagaguucuc

SEQ ID NO: 915249 - RNA, 22 nt, Human
gcugcuggcacuggagugagcc

SEQ ID NO: 915250 - RNA, 22 nt, Human
cucagggcuugaguguccagga

SEQ ID NO: 915251 - RNA, 22 nt, Human
aacagcuaccuucucacugugc

SEQ ID NO: 915252 - RNA, 22 nt, Human
caccaggaccccacgguggguu

SEQ ID NO: 915253 - RNA, 22 nt, Human
uuagaaccauaaugaaucaaug

SEQ ID NO: 915254 - RNA, 20 nt, Human
uguccaggggaucguuggcc

SEQ ID NO: 915255 - RNA, 22 nt, Human
caagcugguaucagcuagagcg

SEQ ID NO: 915256 - RNA, 22 nt, Human
caaggcugcugcgggucgcacc

SEQ ID NO: 915257 - RNA, 22 nt, Human
augucaguuucauuuuaaguca

SEQ ID NO: 915258 - RNA, 23 nt, Human
ugauucagcaaguccacuucugg

SEQ ID NO: 915259 - RNA, 22 nt, Human
cuuggcacuugggcagugagca

SEQ ID NO: 915260 - RNA, 22 nt, Human
guguguauguagaacuauguau

SEQ ID NO: 915261 - RNA, 19 nt, Human
cgguccauccgauuuuaca

SEQ ID NO: 915262 - RNA, 22 nt, Human
aauacauguuuucuacuauucu

SEQ ID NO: 915263 - RNA, 22 nt, Human
uauuuuguuuuguauccacugu

SEQ ID NO: 915264 - RNA, 22 nt, Human
agcuguuuuuccagucucugga

SEQ ID NO: 915265 - RNA, 22 nt, Human
guggccagaagacugcaaugcu

SEQ ID NO: 915266 - RNA, 17 nt, Human
caggcagacauguaagc

SEQ ID NO: 915267 - RNA, 22 nt, Human
ggaagaaaucugguuaagagau

SEQ ID NO: 915268 - RNA, 22 nt, Human
augcuauuccagaauguaaauu

SEQ ID NO: 915269 - RNA, 22 nt, Human
cuccaggaaaauagggaaugag

SEQ ID NO: 915270 - RNA, 22 nt, Human
ugcuucauuuugacuuagccag

SEQ ID NO: 915271 - RNA, 22 nt, Human
ugcagccugguggucacuggag

SEQ ID NO: 915272 - RNA, 22 nt, Human
ccugagcucaaagggugccugg

SEQ ID NO: 915273 - RNA, 22 nt, Human
ccauucugugucucuccacagc

SEQ ID NO: 915274 - RNA, 22 nt, Human
ugcagcuagcgugccuagugaa

SEQ ID NO: 915275 - RNA, 22 nt, Human
cagacugugagcuccuugaggg

SEQ ID NO: 915276 - RNA, 21 nt, Human
cugcaucugagucauuaugcc

SEQ ID NO: 915277 - RNA, 22 nt, Human
uuucuuuaauucucacagcaau

SEQ ID NO: 915278 - RNA, 22 nt, Human
auauggacuuaaaauuugaugu

SEQ ID NO: 915279 - RNA, 22 nt, Human
uuuguucuauuuuagagaugaa

SEQ ID NO: 915280 - RNA, 22 nt, Human
uucgcagccagugagcagagga

SEQ ID NO: 915281 - RNA, 20 nt, Human
ccauucugggugcagucugg

SEQ ID NO: 915282 - RNA, 20 nt, Human
cagcugccuggcucugggau

SEQ ID NO: 915283 - RNA, 22 nt, Human
auuuccaugaaguuuaguuaua

SEQ ID NO: 915284 - RNA, 22 nt, Human
uuuugcuuaaucuagauuuugc

SEQ ID NO: 915285 - RNA, 22 nt, Human
ccucaugaguucuucugcccau

SEQ ID NO: 915286 - RNA, 22 nt, Human
aaacucagaagguacagaaggg

SEQ ID NO: 915287 - RNA, 22 nt, Human
uauuucagaguuguuuucuguc

SEQ ID NO: 915288 - RNA, 22 nt, Human
cugccagcacugccuccugagg

SEQ ID NO: 915289 - RNA, 22 nt, Human
ugguggagcuguggccacgacc

SEQ ID NO: 915290 - RNA, 22 nt, Human
ucacccagguaauagcaguuug

SEQ ID NO: 915291 - RNA, 22 nt, Human
gaaaggcaggcaggguguccau

SEQ ID NO: 915292 - RNA, 20 nt, Human
gggcuagaccagggcagagg

SEQ ID NO: 915293 - RNA, 22 nt, Human
ucuucacaguccuggucagugg

SEQ ID NO: 915294 - RNA, 17 nt, Human
cagaggagcuuuggggg

SEQ ID NO: 915295 - RNA, 22 nt, Human
aagucuuuugcuaagaguaaug

SEQ ID NO: 915296 - RNA, 22 nt, Human
agugacaauaugugcuagguau

SEQ ID NO: 915297 - RNA, 22 nt, Human
ucccuggguuaccuuucaaggu

SEQ ID NO: 915298 - RNA, 22 nt, Human
aguaacaaagaaagccuuugga

SEQ ID NO: 915299 - RNA, 22 nt, Human
aggcuuccgaguagcugggacu

SEQ ID NO: 915300 - RNA, 23 nt, Human
auugagaaggauacauuguucuc

SEQ ID NO: 915301 - RNA, 22 nt, Human
ucauaacacuggugauuaagaa

SEQ ID NO: 915302 - RNA, 22 nt, Human
ugagcuggcacuuuuccuggga

SEQ ID NO: 915303 - RNA, 22 nt, Human
agucaccaacaugguucccagg

SEQ ID NO: 915304 - RNA, 22 nt, Human
aguuugaagauuaugccagagu

SEQ ID NO: 915305 - RNA, 22 nt, Human
ggcucugggaaauggucuuccu

SEQ ID NO: 915306 - RNA, 22 nt, Human
gccugggugcucuguguaaggg

SEQ ID NO: 915307 - RNA, 22 nt, Human
gaggcugugucuugggguggaa

SEQ ID NO: 915308 - RNA, 22 nt, Human
gccacagcuuuuaaccucgggg

SEQ ID NO: 915309 - RNA, 22 nt, Human
gcugcuguguuggagagggacu

SEQ ID NO: 915310 - RNA, 22 nt, Human
uggaagggggaagacagcucug

SEQ ID NO: 915311 - RNA, 20 nt, Human
ugacucuggucccaguauga

SEQ ID NO: 915312 - RNA, 22 nt, Human
gcuguggguuuccaauccugga

SEQ ID NO: 915313 - RNA, 22 nt, Human
aggcagguuacaaaaacuuuau

SEQ ID NO: 915314 - RNA, 22 nt, Human
uaggugugggcucaggaaugug

SEQ ID NO: 915315 - RNA, 22 nt, Human
cccaugagugcugcucagaggc

SEQ ID NO: 915316 - RNA, 22 nt, Human
caaauguauaaauguacuuucu

SEQ ID NO: 915317 - RNA, 22 nt, Human
auacaucaauuucuuaguuauc

SEQ ID NO: 915318 - RNA, 22 nt, Human
gggcccagcccucugcucacug

SEQ ID NO: 915319 - RNA, 22 nt, Human
uagacauuggccauuccugugg

SEQ ID NO: 915320 - RNA, 22 nt, Human
gggcuucaguaccaaaguuuga

SEQ ID NO: 915321 - RNA, 22 nt, Human
ggugcaggcgguggggcaagua

SEQ ID NO: 915322 - RNA, 22 nt, Human
augaagcagacucagguggugc

SEQ ID NO: 915323 - RNA, 22 nt, Human
gcacugcuccagguguggcuug

SEQ ID NO: 915324 - RNA, 22 nt, Human
aaggcuccuuuguaguucuuuu

SEQ ID NO: 915325 - RNA, 22 nt, Human
cauggccacaucuagcugcaag

SEQ ID NO: 915326 - RNA, 22 nt, Human
ugaaggugaccugacaguggcu

SEQ ID NO: 915327 - RNA, 22 nt, Human
ucugaaauaagggagaagggaa

SEQ ID NO: 915328 - RNA, 22 nt, Human
ggagagguguauucaguggguc

SEQ ID NO: 915329 - RNA, 22 nt, Human
gagcugugugccuggauggucu

SEQ ID NO: 915330 - RNA, 22 nt, Human
ucuauguauaucuuuccauuca

SEQ ID NO: 915331 - RNA, 22 nt, Human
uuuagcauccaagguuaugacu

SEQ ID NO: 915332 - RNA, 22 nt, Human
ccagccacagcuuccagcuccu

SEQ ID NO: 915333 - RNA, 19 nt, Human
aaggcagaaguuggauaug

SEQ ID NO: 915334 - RNA, 22 nt, Human
acagaggaagcauauagcacaa

SEQ ID NO: 915335 - RNA, 22 nt, Human
augcagagacagauguggcaug

SEQ ID NO: 915336 - RNA, 22 nt, Human
aacagugucaggauuacagaua

SEQ ID NO: 915337 - RNA, 22 nt, Human
ugggcccaagagagucuccaac

SEQ ID NO: 915338 - RNA, 22 nt, Human
acacauguuuguguagucaguu

SEQ ID NO: 915339 - RNA, 22 nt, Human
auuucccacucuacuacaugcu

SEQ ID NO: 915340 - RNA, 22 nt, Human
ugccucuguugagccuuggcug

SEQ ID NO: 915341 - RNA, 22 nt, Human
gcuuugcauuguuuaaucagga

SEQ ID NO: 915342 - RNA, 22 nt, Human
cuggcugcgcuaguccagaaga

SEQ ID NO: 915343 - RNA, 20 nt, Human
ucacagaguagccuugucug

SEQ ID NO: 915344 - RNA, 20 nt, Human
cugcugugugugccucagcc

SEQ ID NO: 915345 - RNA, 22 nt, Human
ucagaccuggccgccuccaucc

SEQ ID NO: 915346 - RNA, 22 nt, Human
uagagcugggcagugcucugag

SEQ ID NO: 915347 - RNA, 22 nt, Human
cacaguugucugauuucuuccu

SEQ ID NO: 915348 - RNA, 22 nt, Human
ccuggcagacagcacugaagcu

SEQ ID NO: 915349 - RNA, 22 nt, Human
cugggacuugaugaaaugacug

SEQ ID NO: 915350 - RNA, 22 nt, Human
uaagaggauauuuggccagaag

SEQ ID NO: 915351 - RNA, 22 nt, Human
uuaaagcuguagaguuacuugc

SEQ ID NO: 915352 - RNA, 22 nt, Human
ccugggcucuauccugacccag

SEQ ID NO: 915353 - RNA, 22 nt, Human
uaagacauuugacaaaccauuu

SEQ ID NO: 915354 - RNA, 22 nt, Human
ggcagccaugucccagggcuuc

SEQ ID NO: 915355 - RNA, 22 nt, Human
auuggugcauguaggugaugcu

SEQ ID NO: 915356 - RNA, 22 nt, Human
acaacuuuguagcaauuccacg

SEQ ID NO: 915357 - RNA, 22 nt, Human
ucccauuuaucuagaugucaga

SEQ ID NO: 915358 - RNA, 22 nt, Human
ccucugggagacugcuacugag

SEQ ID NO: 915359 - RNA, 22 nt, Human
ugguugaacaaguuggguauau

SEQ ID NO: 915360 - RNA, 22 nt, Human
aucacugaaauacugaaauuac

SEQ ID NO: 915361 - RNA, 22 nt, Human
cuggcagcagcuucuggaucga

SEQ ID NO: 915362 - RNA, 22 nt, Human
uccagagguauguagagaguau

SEQ ID NO: 915363 - RNA, 22 nt, Human
uguauacauguguguucacgca

SEQ ID NO: 915364 - RNA, 22 nt, Human
caaauguuugguggcauuuugu

SEQ ID NO: 915365 - RNA, 22 nt, Human
auuuucaguugaaaaaguuggu

SEQ ID NO: 915366 - RNA, 22 nt, Human
guauuucccccagacucccugg

SEQ ID NO: 915367 - RNA, 22 nt, Human
gggaaauuuuagguuugucucg

SEQ ID NO: 915368 - RNA, 22 nt, Human
ucacuccaaaccccaggcuugu

SEQ ID NO: 915369 - RNA, 22 nt, Human
aguacuuagaaaguuaauauaa

SEQ ID NO: 915370 - RNA, 22 nt, Human
caguuuaaccuauccauuaugu

SEQ ID NO: 915371 - RNA, 22 nt, Human
aaaacauucugugaacucucaa

SEQ ID NO: 915372 - RNA, 22 nt, Human
agagaagugagcuuguucacuc

SEQ ID NO: 915373 - RNA, 20 nt, Human
cucagaaaagcuaaggagaa

SEQ ID NO: 915374 - RNA, 22 nt, Human
gggaaggccgguccagucaggu

SEQ ID NO: 915375 - RNA, 22 nt, Human
ucagaggauagaaauacuuauu

SEQ ID NO: 915376 - RNA, 22 nt, Human
gcuggccauauauuuugcuguu

SEQ ID NO: 915377 - RNA, 22 nt, Human
auuuccuucaucagccuauccu

SEQ ID NO: 915378 - RNA, 22 nt, Human
uuacagaaugugccauuugguc

SEQ ID NO: 915379 - RNA, 22 nt, Human
guucuggguagauguaucuuuu

SEQ ID NO: 915380 - RNA, 22 nt, Human
uugagcaggaacuagaagauag

SEQ ID NO: 915381 - RNA, 22 nt, Human
ugucagcaccauggguagugau

SEQ ID NO: 915382 - RNA, 22 nt, Human
ugcaucacuuagcugcacaacu

SEQ ID NO: 915383 - RNA, 22 nt, Human
gccuucccucucauccugcugg

SEQ ID NO: 915384 - RNA, 22 nt, Human
guuuuucugugagcgguaaagg

SEQ ID NO: 915385 - RNA, 22 nt, Human
caguaacacaaccacuccguga

SEQ ID NO: 915386 - RNA, 22 nt, Human
ccauuugugguuuauuugcucu

SEQ ID NO: 915387 - RNA, 22 nt, Human
acuguucuucauuuagcaaaga

SEQ ID NO: 915388 - RNA, 22 nt, Human
ggugcccagagccaggaaugag

SEQ ID NO: 915389 - RNA, 22 nt, Human
cacauaaauggugccauguuuu

SEQ ID NO: 915390 - RNA, 22 nt, Human
gccagcuguuucagagcccagu

SEQ ID NO: 915391 - RNA, 20 nt, Human
ucugaggcugagcucuacuu

SEQ ID NO: 915392 - RNA, 22 nt, Human
ucaggcugaaaggacuccaguu

SEQ ID NO: 915393 - RNA, 22 nt, Human
cuugaaaauaagaaagacuuuc

SEQ ID NO: 915394 - RNA, 22 nt, Human
uucuucagugacaaaggcaaaa

SEQ ID NO: 915395 - RNA, 22 nt, Human
uauaaguaguuguugaagacuu

SEQ ID NO: 915396 - RNA, 22 nt, Human
cacauaaucaccaaguccuuuc

SEQ ID NO: 915397 - RNA, 19 nt, Human
aagggucacaagcagcaga

SEQ ID NO: 915398 - RNA, 22 nt, Human
ucacaacaggaaggaccagcug

SEQ ID NO: 915399 - RNA, 22 nt, Human
gggaaauugugugagaucuuug

SEQ ID NO: 915400 - RNA, 22 nt, Human
uguuugugcugccuggugggca

SEQ ID NO: 915401 - RNA, 22 nt, Human
uguuaccaaggcugcuucuagu

SEQ ID NO: 915402 - RNA, 22 nt, Human
uuucaguguaucuuccaaaagc

SEQ ID NO: 915403 - RNA, 22 nt, Human
aguuuucuuucgcaaagguaca

SEQ ID NO: 915404 - RNA, 22 nt, Human
uacaaagugcuuuagaaaugaa

SEQ ID NO: 915405 - RNA, 22 nt, Human
cucuuuccucagccacagucua

SEQ ID NO: 915406 - RNA, 22 nt, Human
gugccucagcaccgccugcagc

SEQ ID NO: 915407 - RNA, 22 nt, Human
aacugaggccaagugaggaaag

SEQ ID NO: 915408 - RNA, 22 nt, Human
caggcugugaaacugagaugcg

SEQ ID NO: 915409 - RNA, 22 nt, Human
uaaaguuuggcagacaauaaca

SEQ ID NO: 915410 - RNA, 22 nt, Human
cugcagcuguagaggacagugg

SEQ ID NO: 915411 - RNA, 22 nt, Human
cauaauccugguguagcccucu

SEQ ID NO: 915412 - RNA, 22 nt, Human
uuugaaacaggugauucagcua

SEQ ID NO: 915413 - RNA, 22 nt, Human
aacaguaguauuuaaacugaac

SEQ ID NO: 915414 - RNA, 22 nt, Human
augucucucucugagugccaga

SEQ ID NO: 915415 - RNA, 22 nt, Human
cagaagcaagagccggagcuag

SEQ ID NO: 915416 - RNA, 22 nt, Human
aggcagugagaaauagcaagau

SEQ ID NO: 915417 - RNA, 22 nt, Human
cuauuaaacacuacugugcacu

SEQ ID NO: 915418 - RNA, 22 nt, Human
agggaugggaacuccuccagca

SEQ ID NO: 915419 - RNA, 22 nt, Human
auuaucagaaauucaaagggug

SEQ ID NO: 915420 - RNA, 22 nt, Human
aguugagggugggagagaaaug

SEQ ID NO: 915421 - RNA, 22 nt, Human
uauagacaagcguaacaagaag

SEQ ID NO: 915422 - RNA, 22 nt, Human
cacaggccugggguugagcggg

SEQ ID NO: 915423 - RNA, 22 nt, Human
agcccccaaaagugcuuaugau

SEQ ID NO: 915424 - RNA, 22 nt, Human
ugggccagcacugggugcucau

SEQ ID NO: 915425 - RNA, 22 nt, Human
auccccagggagugagcugucu

SEQ ID NO: 915426 - RNA, 18 nt, Human
gcccugguggagcuggug

SEQ ID NO: 915427 - RNA, 22 nt, Human
caccucugcuguccacaggaug

SEQ ID NO: 915428 - RNA, 21 nt, Human
acacccacuuaugcccgcuug

SEQ ID NO: 915429 - RNA, 22 nt, Human
aauagcaaaugcucauuugaaa

SEQ ID NO: 915430 - RNA, 22 nt, Human
agugcauuugggguaguggaag

SEQ ID NO: 915431 - RNA, 22 nt, Human
gaccuucaagcaccauauuuau

SEQ ID NO: 915432 - RNA, 21 nt, Human
ucaggaaacaccucuuaagga

SEQ ID NO: 915433 - RNA, 22 nt, Human
agcguguggagaacuaagcaga

SEQ ID NO: 915434 - RNA, 22 nt, Human
ugucaauaacuggagucauuau

SEQ ID NO: 915435 - RNA, 22 nt, Human
agaaggaaacagcugugcuuug

SEQ ID NO: 915436 - RNA, 22 nt, Human
ugaggccagacugaaaccaaca

SEQ ID NO: 915437 - RNA, 22 nt, Human
aagauucucagagugaaagaau

SEQ ID NO: 915438 - RNA, 22 nt, Human
ugauugacuuuagaauagcacu

SEQ ID NO: 915439 - RNA, 22 nt, Human
uggcugccugaucgagcaggug

SEQ ID NO: 915440 - RNA, 22 nt, Human
gggcucugcgcucagcuccagc

SEQ ID NO: 915441 - RNA, 22 nt, Human
cagggacaugacuggucucugu

SEQ ID NO: 915442 - RNA, 22 nt, Human
gugcuggggagauaggaagaga

SEQ ID NO: 915443 - RNA, 21 nt, Human
auuuccaaauaaggucacauu

SEQ ID NO: 915444 - RNA, 22 nt, Human
accugcagccacuucucuccuu

SEQ ID NO: 915445 - RNA, 22 nt, Human
ucucuugaagauugaagacaaa

SEQ ID NO: 915446 - RNA, 22 nt, Human
auguagcaugcauguuguuuug

SEQ ID NO: 915447 - RNA, 23 nt, Human
aaucagugcaguuuuaugccaag

SEQ ID NO: 915448 - RNA, 22 nt, Human
auuucuuacauaacaaauuguu

SEQ ID NO: 915449 - RNA, 22 nt, Human
uuuagacaagauccuucugaau

SEQ ID NO: 915450 - RNA, 22 nt, Human
cugccaggggccucacaggcca

SEQ ID NO: 915451 - RNA, 22 nt, Human
aucuagaggcaaugaaggaggu

SEQ ID NO: 915452 - RNA, 22 nt, Human
cucuuuggcccccgaugauuca

SEQ ID NO: 915453 - RNA, 22 nt, Human
augcaaaaguaauugcaauuuu

SEQ ID NO: 915454 - RNA, 22 nt, Human
acuugccuguuacauuucuagu

SEQ ID NO: 915455 - RNA, 22 nt, Human
gagguggcugggaguagggaau

SEQ ID NO: 915456 - RNA, 23 nt, Human
caaauguaguguguccaccccug

SEQ ID NO: 915457 - RNA, 21 nt, Human
aggaaguggccagauugggaa

SEQ ID NO: 915458 - RNA, 22 nt, Human
ugggggagagaggcauucuuuc

SEQ ID NO: 915459 - RNA, 21 nt, Human
agcugcuccagggagcucagg

SEQ ID NO: 915460 - RNA, 22 nt, Human
acagcacuggucccgcaagccu

SEQ ID NO: 915461 - RNA, 22 nt, Human
aguaaaaauugaggugcaaaau

SEQ ID NO: 915462 - RNA, 22 nt, Human
uguccugggaaaucccuuaggc

SEQ ID NO: 915463 - RNA, 22 nt, Human
uggagagcgugcuuagcacucu

SEQ ID NO: 915464 - RNA, 20 nt, Human
uagagcuuagguuuuauucu

SEQ ID NO: 915465 - RNA, 22 nt, Human
acacaggacagggauguguuuu

SEQ ID NO: 915466 - RNA, 22 nt, Human
guaguacagugagacaauguuu

SEQ ID NO: 915467 - RNA, 23 nt, Human
aaccuagacuacuuacuaugugg

SEQ ID NO: 915468 - RNA, 22 nt, Human
uaucuuuguaucaaucuccauu

SEQ ID NO: 915469 - RNA, 22 nt, Human
agauaaaaugauuuucuggauc

SEQ ID NO: 915470 - RNA, 22 nt, Human
cccaggagguggagguugcagc

SEQ ID NO: 915471 - RNA, 22 nt, Human
uggagaaggggcagggucucca

SEQ ID NO: 915472 - RNA, 22 nt, Human
gcugcccagggcugaguguccu

SEQ ID NO: 915473 - RNA, 22 nt, Human
cuggcuggucaucagcaguacg

SEQ ID NO: 915474 - RNA, 22 nt, Human
ugaaacaaugugaaguugcuga

SEQ ID NO: 915475 - RNA, 22 nt, Human
cuucuccucugaguccugggag

SEQ ID NO: 915476 - RNA, 22 nt, Human
gaguucuauuaugguuagaagu

SEQ ID NO: 915477 - RNA, 22 nt, Human
aacauucaauugaggaaguuaa

SEQ ID NO: 915478 - RNA, 22 nt, Human
aucuguggcuggugagaggcag

SEQ ID NO: 915479 - RNA, 19 nt, Human
ucuguggcaccugggaggg

SEQ ID NO: 915480 - RNA, 22 nt, Human
cacaguugaggucugguuguuu

SEQ ID NO: 915481 - RNA, 22 nt, Human
ucuguuuaggcaaaauagcuac

SEQ ID NO: 915482 - RNA, 22 nt, Human
agagcugggaccgucuggaagu

SEQ ID NO: 915483 - RNA, 22 nt, Human
guugcugcaaaggaguguaggu

SEQ ID NO: 915484 - RNA, 18 nt, Human
gcugcgugggaugugacc

SEQ ID NO: 915485 - RNA, 22 nt, Human
uauaggaccgacuuguuuauag

SEQ ID NO: 915486 - RNA, 22 nt, Human
ccuccuggugggcgcuucuggc

SEQ ID NO: 915487 - RNA, 22 nt, Human
gauuuugucaaauuccaaaugu

SEQ ID NO: 915488 - RNA, 22 nt, Human
aagcugccuagaguugaauguc

SEQ ID NO: 915489 - RNA, 22 nt, Human
gucaugaaauucuagagcuuga

SEQ ID NO: 915490 - RNA, 23 nt, Human
auugagcuaguaauauagaccag

SEQ ID NO: 915491 - RNA, 22 nt, Human
acacagaagcuuuuucuauucc

SEQ ID NO: 915492 - RNA, 22 nt, Human
acacagaggcaugacaguggcu

SEQ ID NO: 915493 - RNA, 22 nt, Human
acucugcucuuauaguguuaua

SEQ ID NO: 915494 - RNA, 22 nt, Human
uaagugucuaaaaggcagaacu

SEQ ID NO: 915495 - RNA, 22 nt, Human
guacagagguugcuggaggcuc

SEQ ID NO: 915496 - RNA, 20 nt, Human
gcugaggggucuauggcaua

SEQ ID NO: 915497 - RNA, 22 nt, Human
gacagcagaugaagccugcaga

SEQ ID NO: 915498 - RNA, 22 nt, Human
auuacaguaacagcuacaaugc

SEQ ID NO: 915499 - RNA, 22 nt, Human
cagaggauucccuagugaccug

SEQ ID NO: 915500 - RNA, 22 nt, Human
ugagcagauuuguucuaggggu

SEQ ID NO: 915501 - RNA, 22 nt, Human
guuucaaaagucaggcuauucu

SEQ ID NO: 915502 - RNA, 22 nt, Human
cugcaagauuggaagaugcaau

SEQ ID NO: 915503 - RNA, 22 nt, Human
uacuucauuauucuaguuuuga

SEQ ID NO: 915504 - RNA, 22 nt, Human
aaaguguugaagaaaauguuca

SEQ ID NO: 915505 - RNA, 22 nt, Human
ucugggagcacacgcagugauc

SEQ ID NO: 915506 - RNA, 22 nt, Human
aaggcaauuuggaagaggcaga

SEQ ID NO: 915507 - RNA, 22 nt, Human
cugcguguuccugaagcgcgcu

SEQ ID NO: 915508 - RNA, 22 nt, Human
aguuacaagcuauuuuacuuaa

SEQ ID NO: 915509 - RNA, 22 nt, Human
acuuuggacgccaugcuguuug

SEQ ID NO: 915510 - RNA, 22 nt, Human
uaagagcauaggcuugaaaaua

SEQ ID NO: 915511 - RNA, 22 nt, Human
uucucaggugaggcugaggcug

SEQ ID NO: 915512 - RNA, 22 nt, Human
ucuguccauuuauaagccccca

SEQ ID NO: 915513 - RNA, 22 nt, Human
augcuacagagauagguugggu

SEQ ID NO: 915514 - RNA, 22 nt, Human
agucccagaugacccagcuacu

SEQ ID NO: 915515 - RNA, 22 nt, Human
gccuggagggcucuagagaggc

SEQ ID NO: 915516 - RNA, 22 nt, Human
gcuuuaugggccaugcgguguc

SEQ ID NO: 915517 - RNA, 22 nt, Human
caagguuuugcuuguaagggaa

SEQ ID NO: 915518 - RNA, 22 nt, Human
ggcuggcuccaccuagguagcu

SEQ ID NO: 915519 - RNA, 22 nt, Human
aaagccaugaauguuauagagg

SEQ ID NO: 915520 - RNA, 22 nt, Human
gagaggcauggaacagauucuu

SEQ ID NO: 915521 - RNA, 21 nt, Human
gcugucucuggcuccugggaa

SEQ ID NO: 915522 - RNA, 22 nt, Human
ucacagaaguugaauuugcaug

SEQ ID NO: 915523 - RNA, 22 nt, Human
ggaaccuugcuagaugcugagg

SEQ ID NO: 915524 - RNA, 22 nt, Human
gcuggcucaagugugcuuccca

SEQ ID NO: 915525 - RNA, 22 nt, Human
uuuguuuagaugguaaaucagu

SEQ ID NO: 915526 - RNA, 22 nt, Human
augucacaugagagcgcagcac

SEQ ID NO: 915527 - RNA, 22 nt, Human
gcccauggcagaacugugagca

SEQ ID NO: 915528 - RNA, 22 nt, Human
gacaguaagguggcuucuucuu

SEQ ID NO: 915529 - RNA, 22 nt, Human
ucuggguguagggccuggcaac

SEQ ID NO: 915530 - RNA, 22 nt, Human
ugaaccuuuguguuggaccugg

SEQ ID NO: 915531 - RNA, 22 nt, Human
gggagggaagguaccuguguga

SEQ ID NO: 915532 - RNA, 22 nt, Human
uucuauguggauauagaacugc

SEQ ID NO: 915533 - RNA, 22 nt, Human
cuggggcugugggagacaaggc

SEQ ID NO: 915534 - RNA, 22 nt, Human
caaggccaugagcagcgagugu

SEQ ID NO: 915535 - RNA, 22 nt, Human
ugcagccaccaccucugcugaa

SEQ ID NO: 915536 - RNA, 22 nt, Human
uuucagaaauuauauuagaugc

SEQ ID NO: 915537 - RNA, 20 nt, Human
gugggcagaugugugcaugg

SEQ ID NO: 915538 - RNA, 22 nt, Human
gcuggaacagucuuuaagcagg

SEQ ID NO: 915539 - RNA, 22 nt, Human
uuuauccauugguuagaaaauc

SEQ ID NO: 915540 - RNA, 22 nt, Human
guauuuuguuagggugugguau

SEQ ID NO: 915541 - RNA, 22 nt, Human
uggggaccagauuagaccaugg

SEQ ID NO: 915542 - RNA, 22 nt, Human
gagcagaacaggccggguggga

SEQ ID NO: 915543 - RNA, 22 nt, Human
cuuggggaggacgcaguguccu

SEQ ID NO: 915544 - RNA, 22 nt, Human
uuacacucauauugcacuuacc

SEQ ID NO: 915545 - RNA, 22 nt, Human
acucugaaccagagaucauacc

SEQ ID NO: 915546 - RNA, 22 nt, Human
cuguuuaaccagaucucauauc

SEQ ID NO: 915547 - RNA, 22 nt, Human
agcacagaguugcagagagcgu

SEQ ID NO: 915548 - RNA, 17 nt, Human
ccagcccucgcgcuuuu

SEQ ID NO: 915549 - RNA, 22 nt, Human
cgaaaauagaucuguuucccag

SEQ ID NO: 915550 - RNA, 22 nt, Human
agagagcccgggccagggcaca

SEQ ID NO: 915551 - RNA, 22 nt, Human
aagauacaucauucaggaguga

SEQ ID NO: 915552 - RNA, 22 nt, Human
aagagagagugcgcucacagaa

SEQ ID NO: 915553 - RNA, 22 nt, Human
uuucauaaggguuucuagacuu

SEQ ID NO: 915554 - RNA, 22 nt, Human
uuuauuauagugguggggacug

SEQ ID NO: 915555 - RNA, 22 nt, Human
uguccauggagaagcucagggc

SEQ ID NO: 915556 - RNA, 21 nt, Human
uaaucuucgaaaauguauuag

SEQ ID NO: 915557 - RNA, 22 nt, Human
gcuuccuguauccuccuguacc

SEQ ID NO: 915558 - RNA, 22 nt, Human
uacauuccacaagcauugcuuu

SEQ ID NO: 915559 - RNA, 22 nt, Human
ucuugcuaggagcuauggaaga

SEQ ID NO: 915560 - RNA, 23 nt, Human
gcacagagcaguuaggggaagau

SEQ ID NO: 915561 - RNA, 22 nt, Human
ugagggacuugcuaguucucug

SEQ ID NO: 915562 - RNA, 22 nt, Human
cuggugcccuguguggcaggag

SEQ ID NO: 915563 - RNA, 22 nt, Human
caggacagaaauaaggaauaua

SEQ ID NO: 915564 - RNA, 22 nt, Human
augcagcagccccuugaggugc

SEQ ID NO: 915565 - RNA, 22 nt, Human
ucaguuaagaggccacggcagu

SEQ ID NO: 915566 - RNA, 22 nt, Human
cuggcuccaggucaugcacuca

SEQ ID NO: 915567 - RNA, 22 nt, Human
acagaaacccagaaaaccucuc

SEQ ID NO: 915568 - RNA, 22 nt, Human
cagaguuuuauguaugcaugua

SEQ ID NO: 915569 - RNA, 22 nt, Human
ucugcucuguacugcacuggcc

SEQ ID NO: 915570 - RNA, 22 nt, Human
acaggcagggaccuuggcuaag

SEQ ID NO: 915571 - RNA, 22 nt, Human
acccaggaggcaagguugcagu

SEQ ID NO: 915572 - RNA, 22 nt, Human
aucaccaggcaaaaugucagag

SEQ ID NO: 915573 - RNA, 22 nt, Human
ugggguccagugccuggcaagg

SEQ ID NO: 915574 - RNA, 19 nt, Human
cugucaggggcuggauguu

SEQ ID NO: 915575 - RNA, 22 nt, Human
uaaaauugcggugaauauuucc

SEQ ID NO: 915576 - RNA, 22 nt, Human
gccuccucacaauguacccacg

SEQ ID NO: 915577 - RNA, 22 nt, Human
ucacaagguucacuauaaauug

SEQ ID NO: 915578 - RNA, 23 nt, Human
gcugagguccugcugaguggugg

SEQ ID NO: 915579 - RNA, 22 nt, Human
acuagggauuacacuguauuca

SEQ ID NO: 915580 - RNA, 22 nt, Human
uguuuccuuucuggugagcaua

SEQ ID NO: 915581 - RNA, 22 nt, Human
cagcaugagaaaaugaaucaga

SEQ ID NO: 915582 - RNA, 21 nt, Human
uucauaaaccauucucaugca

SEQ ID NO: 915583 - RNA, 22 nt, Human
acugugugcuggacaugauguu

SEQ ID NO: 915584 - RNA, 22 nt, Human
agacaaguucugugggucaccu

SEQ ID NO: 915585 - RNA, 22 nt, Human
cucugaccucuagccagcucug

SEQ ID NO: 915586 - RNA, 22 nt, Human
ggguaaggucagccagaaguuc

SEQ ID NO: 915587 - RNA, 22 nt, Human
ccaacaccaucugagcuccagc

SEQ ID NO: 915588 - RNA, 22 nt, Human
acauguaacauauauguagcau

SEQ ID NO: 915589 - RNA, 22 nt, Human
ugauuuaggaaacagcuacagg

SEQ ID NO: 915590 - RNA, 22 nt, Human
uuuacagcuacuguccuauuuc

SEQ ID NO: 915591 - RNA, 22 nt, Human
aaaugcuugcucuugauuauuu

SEQ ID NO: 915592 - RNA, 22 nt, Human
gcuccuucuggcucccuuuugg

SEQ ID NO: 915593 - RNA, 22 nt, Human
acagggcagagugaaaugcuau

SEQ ID NO: 915594 - RNA, 22 nt, Human
agcauguggcuaucuuuggggg

SEQ ID NO: 915595 - RNA, 22 nt, Human
uucuguaauucuguuaguuuca

SEQ ID NO: 915596 - RNA, 22 nt, Human
uucucugcagcuuaggcccagu

SEQ ID NO: 915597 - RNA, 22 nt, Human
cugcugugagcacuccagccug

SEQ ID NO: 915598 - RNA, 22 nt, Human
cuuggucuauaggagagauugu

SEQ ID NO: 915599 - RNA, 22 nt, Human
cccuaagaaucucccuuguagc

SEQ ID NO: 915600 - RNA, 22 nt, Human
agggcagcucucaccucuggcc

SEQ ID NO: 915601 - RNA, 22 nt, Human
ccugcagguaaggcuaacugcc

SEQ ID NO: 915602 - RNA, 22 nt, Human
ugugacacugacaucugcuccc

SEQ ID NO: 915603 - RNA, 22 nt, Human
ccauucaugugagcaagaacug

SEQ ID NO: 915604 - RNA, 22 nt, Human
cugaagcugaaaacuuccagca

SEQ ID NO: 915605 - RNA, 22 nt, Human
uacaguuuagaaccauagaugg

SEQ ID NO: 915606 - RNA, 22 nt, Human
gugcucuacaugcuccauguuu

SEQ ID NO: 915607 - RNA, 22 nt, Human
gugagauuugaguggggauaca

SEQ ID NO: 915608 - RNA, 22 nt, Human
aaagaaaccuaucagccacaug

SEQ ID NO: 915609 - RNA, 22 nt, Human
uccugcagugugucuccugcac

SEQ ID NO: 915610 - RNA, 17 nt, Human
aggcaaugacugugguu

SEQ ID NO: 915611 - RNA, 23 nt, Human
ugggccucuccacccuuuucugu

SEQ ID NO: 915612 - RNA, 22 nt, Human
agccacagccugacuuaacugu

SEQ ID NO: 915613 - RNA, 22 nt, Human
gaacccaguccaggugcagccu

SEQ ID NO: 915614 - RNA, 22 nt, Human
agcaacgagaagcacaaaauaa

SEQ ID NO: 915615 - RNA, 22 nt, Human
ggcugccugaggcagugagaga

SEQ ID NO: 915616 - RNA, 22 nt, Human
cacagguuagguauuauacuau

SEQ ID NO: 915617 - RNA, 22 nt, Human
uugcucauauuugcauguguuu

SEQ ID NO: 915618 - RNA, 22 nt, Human
uacaguaaccagucuacuuaga

SEQ ID NO: 915619 - RNA, 22 nt, Human
aggcugaggagggauguugcuu

SEQ ID NO: 915620 - RNA, 22 nt, Human
acuggggcaggaaaguaugcug

SEQ ID NO: 915621 - RNA, 22 nt, Human
uaugaacugugagugugauggg

SEQ ID NO: 915622 - RNA, 22 nt, Human
uggcugcaguucacaggagcaa

SEQ ID NO: 915623 - RNA, 22 nt, Human
augggcugaggaagcuccugag

SEQ ID NO: 915624 - RNA, 22 nt, Human
uucaagugaggcugucuuuaga

SEQ ID NO: 915625 - RNA, 22 nt, Human
aucuaaaaugugguuaguuggu

SEQ ID NO: 915626 - RNA, 22 nt, Human
gagauaaagcuaccauguugau

SEQ ID NO: 915627 - RNA, 22 nt, Human
ugaacauuccugaaugaagcau

SEQ ID NO: 915628 - RNA, 22 nt, Human
acacugaauaauugagaguuga

SEQ ID NO: 915629 - RNA, 22 nt, Human
uggcuggcuguccagcugggca

SEQ ID NO: 915630 - RNA, 22 nt, Human
cugggcaggagggcucuaugga

SEQ ID NO: 915631 - RNA, 22 nt, Human
caauuucaagauucuguucuuu

SEQ ID NO: 915632 - RNA, 22 nt, Human
gauuauuuugugcaauaaucgg

SEQ ID NO: 915633 - RNA, 21 nt, Human
uuagaacacuugcucuuggaa

SEQ ID NO: 915634 - RNA, 22 nt, Human
acaggagccaaacacaugccag

SEQ ID NO: 915635 - RNA, 22 nt, Human
uacaguauauacuguguguaga

SEQ ID NO: 915636 - RNA, 22 nt, Human
agaguucugaaauuaucuuuac

SEQ ID NO: 915637 - RNA, 22 nt, Human
ugucucuucugccuccagcugu

SEQ ID NO: 915638 - RNA, 22 nt, Human
uagcugagaggccaauugaacu

SEQ ID NO: 915639 - RNA, 22 nt, Human
ucagcaaugugauacugugcaa

SEQ ID NO: 915640 - RNA, 22 nt, Human
uugggcagggaaaggacaggca

SEQ ID NO: 915641 - RNA, 22 nt, Human
agcccugcaggaggugggagag

SEQ ID NO: 915642 - RNA, 22 nt, Human
caccugccugcuagagccugac

SEQ ID NO: 915643 - RNA, 22 nt, Human
aacaaugaguccucugagguua

SEQ ID NO: 915644 - RNA, 22 nt, Human
gcacagagcuggcccuccaggc

SEQ ID NO: 915645 - RNA, 22 nt, Human
aucuaagacaaugagugagacu

SEQ ID NO: 915646 - RNA, 22 nt, Human
acagggaaagggacagcagcag

SEQ ID NO: 915647 - RNA, 23 nt, Human
aaagcuuaacuggguaauaaagc

SEQ ID NO: 915648 - RNA, 20 nt, Human
aacuuuagacauaaucucuu

SEQ ID NO: 915649 - RNA, 22 nt, Human
gggcuuggccccagaagagcua

SEQ ID NO: 915650 - RNA, 22 nt, Human
ugggcacuggaagccugcugug

SEQ ID NO: 915651 - RNA, 22 nt, Human
ugcagcugccuagggcuggcuu

SEQ ID NO: 915652 - RNA, 22 nt, Human
agcacacaguauuagccauugu

SEQ ID NO: 915653 - RNA, 23 nt, Human
gggcagguuuuuauaggcuucag

SEQ ID NO: 915654 - RNA, 22 nt, Human
uuauuuccuagggaauuugccu

SEQ ID NO: 915655 - RNA, 22 nt, Human
ucuucuaguaggccaagaagcu

SEQ ID NO: 915656 - RNA, 22 nt, Human
uucaaucauuuuuacauagucc

SEQ ID NO: 915657 - RNA, 20 nt, Human
agccugccagcuggcccaga

SEQ ID NO: 915658 - RNA, 23 nt, Human
ucagagaacucgggcagaugacc

SEQ ID NO: 915659 - RNA, 22 nt, Human
ucacagcuaagcuuggucacug

SEQ ID NO: 915660 - RNA, 22 nt, Human
gagggaugucaggggaccuugg

SEQ ID NO: 915661 - RNA, 22 nt, Human
uuccuuccccuagcugagaaac

SEQ ID NO: 915662 - RNA, 22 nt, Human
ccugucuguucugacuggucag

SEQ ID NO: 915663 - RNA, 22 nt, Human
aggguguguucuccuaugagaa

SEQ ID NO: 915664 - RNA, 20 nt, Human
agaaucagaguggaaaggaa

SEQ ID NO: 915665 - RNA, 22 nt, Human
aaacaauuuccaccucuccuga

SEQ ID NO: 915666 - RNA, 22 nt, Human
gaccugaaauuugugguagaac

SEQ ID NO: 915667 - RNA, 20 nt, Human
agggaacaauggacgcuguc

SEQ ID NO: 915668 - RNA, 22 nt, Human
aucuucaucaaguucacagugg

SEQ ID NO: 915669 - RNA, 22 nt, Human
acuuugaaacuaaaauucauua

SEQ ID NO: 915670 - RNA, 22 nt, Human
ucacacagcuuggaguuauggu

SEQ ID NO: 915671 - RNA, 22 nt, Human
ugaggccagucucaucacaggc

SEQ ID NO: 915672 - RNA, 22 nt, Human
uccugacuuggcuguuggcccu

SEQ ID NO: 915673 - RNA, 22 nt, Human
ucacauuuuaucuauuuuaagu

SEQ ID NO: 915674 - RNA, 22 nt, Human
agugacaguauuuguugccaau

SEQ ID NO: 915675 - RNA, 22 nt, Human
auuaucaaguuuacugugugga

SEQ ID NO: 915676 - RNA, 22 nt, Human
cacauucagggcagaccacuca

SEQ ID NO: 915677 - RNA, 22 nt, Human
uaaguaaauuuauaaugugauu

SEQ ID NO: 915678 - RNA, 22 nt, Human
ugucugcuagcugguggcaauu

SEQ ID NO: 915679 - RNA, 22 nt, Human
uuggccagcgacgaccuucuua

SEQ ID NO: 915680 - RNA, 22 nt, Human
aaaucuaggcucauccuggucc

SEQ ID NO: 915681 - RNA, 22 nt, Human
gcacagacuuugauugcaguca

SEQ ID NO: 915682 - RNA, 22 nt, Human
gaguggcauaugugccugugaa

SEQ ID NO: 915683 - RNA, 18 nt, Human
gacaguaaacuuccccau

SEQ ID NO: 915684 - RNA, 22 nt, Human
gauaauccaagauugccucacu

SEQ ID NO: 915685 - RNA, 22 nt, Human
gaaauaauacagugcucuucuc

SEQ ID NO: 915686 - RNA, 22 nt, Human
caggccaaaauucaggcauucu

SEQ ID NO: 915687 - RNA, 22 nt, Human
acaguugaggacuuaaacaaaa

SEQ ID NO: 915688 - RNA, 22 nt, Human
ugucauacaugcuugagcuaca

SEQ ID NO: 915689 - RNA, 22 nt, Human
cugaggagaccaucaacuaauu

SEQ ID NO: 915690 - RNA, 16 nt, Human
gcagggguggguggag

SEQ ID NO: 915691 - RNA, 22 nt, Human
uggcucuguugugcugagccag

SEQ ID NO: 915692 - RNA, 22 nt, Human
agcuggcuuuugugaagguuuu

SEQ ID NO: 915693 - RNA, 22 nt, Human
gagcagaugugugccaggaugc

SEQ ID NO: 915694 - RNA, 22 nt, Human
gaggcucagagggacuuucaag

SEQ ID NO: 915695 - RNA, 22 nt, Human
uucagagaugacaccugguguu

SEQ ID NO: 915696 - RNA, 22 nt, Human
aauaagccagcccaugugaccc

SEQ ID NO: 915697 - RNA, 22 nt, Human
gcugccaguaguuggagcucca

SEQ ID NO: 915698 - RNA, 19 nt, Human
cagaccuguccagccugug

SEQ ID NO: 915699 - RNA, 22 nt, Human
auguaugggguguaugggauca

SEQ ID NO: 915700 - RNA, 21 nt, Human
ugaauuucccucuaucauucu

SEQ ID NO: 915701 - RNA, 22 nt, Human
acucugagcaucccaagucuua

SEQ ID NO: 915702 - RNA, 22 nt, Human
uuuaccaucugccacagauaug

SEQ ID NO: 915703 - RNA, 22 nt, Human
gggacuggauagauguggguga

SEQ ID NO: 915704 - RNA, 22 nt, Human
aacuguucuuguguuugcuaug

SEQ ID NO: 915705 - RNA, 22 nt, Human
augcacaguauguagggucuau

SEQ ID NO: 915706 - RNA, 22 nt, Human
uuuguucauuuugagcucauca

SEQ ID NO: 915707 - RNA, 22 nt, Human
gacuucaugacauucaggucag

SEQ ID NO: 915708 - RNA, 22 nt, Human
guacaaauugauacagauuuga

SEQ ID NO: 915709 - RNA, 22 nt, Human
ccugcagagggacuggcaggaa

SEQ ID NO: 915710 - RNA, 22 nt, Human
uuucuucacaggguauugggug

SEQ ID NO: 915711 - RNA, 22 nt, Human
ucuacagaaacuggcuacucuc

SEQ ID NO: 915712 - RNA, 22 nt, Human
gcagaggcuguagggaagguug

SEQ ID NO: 915713 - RNA, 22 nt, Human
cacaggaaaugauucugcagca

SEQ ID NO: 915714 - RNA, 22 nt, Human
ggcagagaugugggucagaauc

SEQ ID NO: 915715 - RNA, 18 nt, Human
agaauuauucuuguccuc

SEQ ID NO: 915716 - RNA, 22 nt, Human
gaggcuggcagaaaagcacagg

SEQ ID NO: 915717 - RNA, 22 nt, Human
cucugccucagugauuucuuua

SEQ ID NO: 915718 - RNA, 22 nt, Human
gcacccagggacuuggcuggcc

SEQ ID NO: 915719 - RNA, 20 nt, Human
uuguaucagugucucccaaa

SEQ ID NO: 915720 - RNA, 22 nt, Human
uagugucuguccaucaguaacu

SEQ ID NO: 915721 - RNA, 22 nt, Human
ccaggcaagcucugcugugccc

SEQ ID NO: 915722 - RNA, 22 nt, Human
uuuacugucucagagagacaaa

SEQ ID NO: 915723 - RNA, 19 nt, Human
ccuggguccacucagacua

SEQ ID NO: 915724 - RNA, 22 nt, Human
gcugaagagagaugcguccagc

SEQ ID NO: 915725 - RNA, 22 nt, Human
aaagaguuguuguauaacagga

SEQ ID NO: 915726 - RNA, 22 nt, Human
ccagggcaugggaagaacugaa

SEQ ID NO: 915727 - RNA, 22 nt, Human
cacgagggcacacgugggaggg

SEQ ID NO: 915728 - RNA, 22 nt, Human
acauugaagggcuauccaauag

SEQ ID NO: 915729 - RNA, 22 nt, Human
cagcccugcugguuuugggcaa

SEQ ID NO: 915730 - RNA, 22 nt, Human
aaugucauuuaggauuauguuu

SEQ ID NO: 915731 - RNA, 20 nt, Human
uugagcagcagugcuguguc

SEQ ID NO: 915732 - RNA, 22 nt, Human
aaggagcuaugcauaacugauc

SEQ ID NO: 915733 - RNA, 20 nt, Human
acucaaaucaccugccucaa

SEQ ID NO: 915734 - RNA, 22 nt, Human
uuccugaagucaaagaucuaaa

SEQ ID NO: 915735 - RNA, 20 nt, Human
guuuccaaauugugcauuuu

SEQ ID NO: 915736 - RNA, 22 nt, Human
ucacauuuggagaaagccugcc

SEQ ID NO: 915737 - RNA, 22 nt, Human
auaaaugugaauuagagcuuug

SEQ ID NO: 915738 - RNA, 22 nt, Human
ugucaaauaguagaaagauggc

SEQ ID NO: 915739 - RNA, 22 nt, Human
aacagcuguauacuguagcugu

SEQ ID NO: 915740 - RNA, 22 nt, Human
cccaggagguggagcuugcagu

SEQ ID NO: 915741 - RNA, 22 nt, Human
cuggccagccugucgaugcccu

SEQ ID NO: 915742 - RNA, 22 nt, Human
ucagauuucuagcguuuggcca

SEQ ID NO: 915743 - RNA, 22 nt, Human
ggugggggagacuuggucaaga

SEQ ID NO: 915744 - RNA, 22 nt, Human
aaaucugagaaauauuguccag

SEQ ID NO: 915745 - RNA, 22 nt, Human
gcagaggccuagguggaaggcc

SEQ ID NO: 915746 - RNA, 22 nt, Human
uucucuuucuacagugugauug

SEQ ID NO: 915747 - RNA, 20 nt, Human
gagcugaguguggucauggg

SEQ ID NO: 915748 - RNA, 23 nt, Human
uaucuguauuuguucacugcugu

SEQ ID NO: 915749 - RNA, 22 nt, Human
aggcaggcaaccaccugggaag

SEQ ID NO: 915750 - RNA, 23 nt, Human
cuugagcucaggaagagcugagu

SEQ ID NO: 915751 - RNA, 22 nt, Human
cagccauacugacaucaacaaa

SEQ ID NO: 915752 - RNA, 22 nt, Human
aguguuucugugccccaguguu

SEQ ID NO: 915753 - RNA, 22 nt, Human
uaguaaaucucagaaaaagauc

SEQ ID NO: 915754 - RNA, 22 nt, Human
aguugaaagccuuauuucucug

SEQ ID NO: 915755 - RNA, 22 nt, Human
uguaaacauaucagacuuucuu

SEQ ID NO: 915756 - RNA, 22 nt, Human
ugaggggagguuggggcacauc

SEQ ID NO: 915757 - RNA, 22 nt, Human
ccagggcauccucacaucgcag

SEQ ID NO: 915758 - RNA, 22 nt, Human
agaaacauuuagauuauauguc

SEQ ID NO: 915759 - RNA, 22 nt, Human
uguggguccuccugugugcccg

SEQ ID NO: 915760 - RNA, 22 nt, Human
uuucuagaaaguucauguguuu

SEQ ID NO: 915761 - RNA, 22 nt, Human
ucaucaucugcaagcucauguc

SEQ ID NO: 915762 - RNA, 22 nt, Human
acagagcccuuccuugcaccau

SEQ ID NO: 915763 - RNA, 22 nt, Human
ccaguguguuuaaugcauucca

SEQ ID NO: 915764 - RNA, 22 nt, Human
acgugcaggaucugguuggcga

SEQ ID NO: 915765 - RNA, 22 nt, Human
augcucuaagcuuagugaggca

SEQ ID NO: 915766 - RNA, 22 nt, Human
acaguguugaggugcuuguuuc

SEQ ID NO: 915767 - RNA, 20 nt, Human
uuuucugugccaagaaaacu

SEQ ID NO: 915768 - RNA, 22 nt, Human
gcaaacugauuuccaaguccgu

SEQ ID NO: 915769 - RNA, 22 nt, Human
aggucaggagguuaagagucuu

SEQ ID NO: 915770 - RNA, 22 nt, Human
aaacucuagggcuccacauucc

SEQ ID NO: 915771 - RNA, 22 nt, Human
gcugccugcacagagcugcuuu

SEQ ID NO: 915772 - RNA, 22 nt, Human
uccauuuucaucucauguauaa

SEQ ID NO: 915773 - RNA, 22 nt, Human
caguacaauguugaaaaggagu

SEQ ID NO: 915774 - RNA, 22 nt, Human
cuguccuguggaccugaggacg

SEQ ID NO: 915775 - RNA, 22 nt, Human
augaggcucucaggggagcugu

SEQ ID NO: 915776 - RNA, 22 nt, Human
uauuguacugaggaauaaagcu

SEQ ID NO: 915777 - RNA, 22 nt, Human
ugaagcaggaaacuucuuguuu

SEQ ID NO: 915778 - RNA, 22 nt, Human
auucuggacaaggcaagcuccu

SEQ ID NO: 915779 - RNA, 22 nt, Human
ucucucugccaacucacagcca

SEQ ID NO: 915780 - RNA, 22 nt, Human
agcaccugugugagcuagaugu

SEQ ID NO: 915781 - RNA, 22 nt, Human
uccuuccuuccugaaauuuuag

SEQ ID NO: 915782 - RNA, 22 nt, Human
ucugaggcauacccaggccccc

SEQ ID NO: 915783 - RNA, 22 nt, Human
gaccccaggcagaucagggggu

SEQ ID NO: 915784 - RNA, 22 nt, Human
aaugucauagcauuucuucaau

SEQ ID NO: 915785 - RNA, 22 nt, Human
cccaggcucagacuggcuuguu

SEQ ID NO: 915786 - RNA, 22 nt, Human
cugcucugugguccaugagaca

SEQ ID NO: 915787 - RNA, 22 nt, Human
ggccagcucagucuccaucagg

SEQ ID NO: 915788 - RNA, 22 nt, Human
cuugggcaggggaaacagcugc

SEQ ID NO: 915789 - RNA, 22 nt, Human
acagagucugacagguaggcgc

SEQ ID NO: 915790 - RNA, 22 nt, Human
cugcugacuuacacuguuuauu

SEQ ID NO: 915791 - RNA, 22 nt, Human
ccugccugaaggucagccaccc

SEQ ID NO: 915792 - RNA, 22 nt, Human
cccaggcuaguaugauaucagu

SEQ ID NO: 915793 - RNA, 22 nt, Human
acugaaaaagacaucuugguaa

SEQ ID NO: 915794 - RNA, 22 nt, Human
ggcacagaguuggcagagcugc

SEQ ID NO: 915795 - RNA, 22 nt, Human
cugcagagcuaggcugagugaa

SEQ ID NO: 915796 - RNA, 22 nt, Human
uacaaaaaauugauacugacga

SEQ ID NO: 915797 - RNA, 20 nt, Human
auauguguacguguauacau

SEQ ID NO: 915798 - RNA, 22 nt, Human
cugggcacacagugacucugca

SEQ ID NO: 915799 - RNA, 22 nt, Human
uauagguagccauauuugauag

SEQ ID NO: 915800 - RNA, 22 nt, Human
cacacauuagagccaaugucag

SEQ ID NO: 915801 - RNA, 22 nt, Human
auaauguuucaguacugucugu

SEQ ID NO: 915802 - RNA, 22 nt, Human
cagagggcucaguccugcugga

SEQ ID NO: 915803 - RNA, 22 nt, Human
ugggggcacuucgaggucgccu

SEQ ID NO: 915804 - RNA, 23 nt, Human
agccaaaucuuaacuucuguuac

SEQ ID NO: 915805 - RNA, 22 nt, Human
agagacccgcagccucggagcu

SEQ ID NO: 915806 - RNA, 22 nt, Human
agaaaacugcagaguagccuca

SEQ ID NO: 915807 - RNA, 21 nt, Human
ccagaagcugcuugcaggcua

SEQ ID NO: 915808 - RNA, 22 nt, Human
acuuagaacaggcagaauucca

SEQ ID NO: 915809 - RNA, 22 nt, Human
uccugggcgagguacuggggcu

SEQ ID NO: 915810 - RNA, 22 nt, Human
aagguggcgcuggagcuggucc

SEQ ID NO: 915811 - RNA, 22 nt, Human
aaaguugugaaaccgaacaugu

SEQ ID NO: 915812 - RNA, 22 nt, Human
cugugccugcaggccacaucaa

SEQ ID NO: 915813 - RNA, 22 nt, Human
gauuuauugucccuguccugcu

SEQ ID NO: 915814 - RNA, 22 nt, Human
aggccagcaagaaagagagucu

SEQ ID NO: 915815 - RNA, 22 nt, Human
ugaaagguguccaauauuucuc

SEQ ID NO: 915816 - RNA, 23 nt, Human
agcuccaggugauuguaaugugu

SEQ ID NO: 915817 - RNA, 22 nt, Human
uuucagggagccuagaagagcu

SEQ ID NO: 915818 - RNA, 22 nt, Human
uuucuagcaagaaagaggugga

SEQ ID NO: 915819 - RNA, 22 nt, Human
gcagggguagagauugcuggug

SEQ ID NO: 915820 - RNA, 22 nt, Human
gucuguccuguacccagcaucu

SEQ ID NO: 915821 - RNA, 22 nt, Human
cuauucugauuaccagauauug

SEQ ID NO: 915822 - RNA, 22 nt, Human
ugcuguagcccugcacagugca

SEQ ID NO: 915823 - RNA, 22 nt, Human
ugugugcuaauguaugcucuaa

SEQ ID NO: 915824 - RNA, 21 nt, Human
uggcacagcaagugggcucau

SEQ ID NO: 915825 - RNA, 22 nt, Human
cucugcuucauccaccacuggc

SEQ ID NO: 915826 - RNA, 22 nt, Human
aauucccaccuucucucuuuug

SEQ ID NO: 915827 - RNA, 22 nt, Human
aaaugccuagaaaucacgcaga

SEQ ID NO: 915828 - RNA, 22 nt, Human
caaacauuccgcuucucccagg

SEQ ID NO: 915829 - RNA, 22 nt, Human
agcagcaucugguucugaugug

SEQ ID NO: 915830 - RNA, 22 nt, Human
agugagguaauuagagcugcug

SEQ ID NO: 915831 - RNA, 19 nt, Human
auaacuacauuggcucagu

SEQ ID NO: 915832 - RNA, 22 nt, Human
uggcaggcaggcagccuucuga

SEQ ID NO: 915833 - RNA, 22 nt, Human
acacagugucagggcaggggcc

SEQ ID NO: 915834 - RNA, 22 nt, Human
auauauucuuaaagaaucugac

SEQ ID NO: 915835 - RNA, 22 nt, Human
guaaauguccugcuacagagug

SEQ ID NO: 915836 - RNA, 22 nt, Human
guggcacaggguuguuggucau

SEQ ID NO: 915837 - RNA, 22 nt, Human
uggagcagcuaagccucugaga

SEQ ID NO: 915838 - RNA, 22 nt, Human
aaaggcuucacuuauuuauuuu

SEQ ID NO: 915839 - RNA, 22 nt, Human
ugaaacaaauuuggaaaaucua

SEQ ID NO: 915840 - RNA, 22 nt, Human
aagacacuuucuaaauagaagu

SEQ ID NO: 915841 - RNA, 22 nt, Human
uguagaaaauuggagcauucau

SEQ ID NO: 915842 - RNA, 22 nt, Human
uucauucuguuuggaaaggugg

SEQ ID NO: 915843 - RNA, 22 nt, Human
gcugcuuuuuggauuuggcaca

SEQ ID NO: 915844 - RNA, 22 nt, Human
aauguacagcugucuuuccucc

SEQ ID NO: 915845 - RNA, 22 nt, Human
aaaacagacagccaguguagag

SEQ ID NO: 915846 - RNA, 22 nt, Human
ucaaauuauuuaggauagugcu

SEQ ID NO: 915847 - RNA, 22 nt, Human
agaacuuaggaacaacagcuua

SEQ ID NO: 915848 - RNA, 22 nt, Human
cuuagagcuuaggcuagccauu

SEQ ID NO: 915849 - RNA, 17 nt, Human
ugaggccauggcaccau

SEQ ID NO: 915850 - RNA, 22 nt, Human
auaguuguguggggauucuggu

SEQ ID NO: 915851 - RNA, 22 nt, Human
aaggcccuggcaggaagcagga

SEQ ID NO: 915852 - RNA, 22 nt, Human
agguaaagacagugaaagaggg

SEQ ID NO: 915853 - RNA, 22 nt, Human
caucauaauaacccagacacag

SEQ ID NO: 915854 - RNA, 22 nt, Human
augaggcaguacacacaaagcc

SEQ ID NO: 915855 - RNA, 22 nt, Human
ggcacagcaccuuuucacauug

SEQ ID NO: 915856 - RNA, 23 nt, Human
ccaagacuguuaggaguggggag

SEQ ID NO: 915857 - RNA, 22 nt, Human
cuggcagcuuauuagaaaugca

SEQ ID NO: 915858 - RNA, 22 nt, Human
uagcaucuaacaucuuaggacu

SEQ ID NO: 915859 - RNA, 22 nt, Human
uucauuugaguuuauaguugcu

SEQ ID NO: 915860 - RNA, 22 nt, Human
agugauggagcuuccucugcua

SEQ ID NO: 915861 - RNA, 22 nt, Human
uuucuuuauccuccuuugcaca

SEQ ID NO: 915862 - RNA, 22 nt, Human
aaggccagcgcagaccauuguc

SEQ ID NO: 915863 - RNA, 20 nt, Human
guuaggagguuggacaugga

SEQ ID NO: 915864 - RNA, 22 nt, Human
cugcagcuuuuugugcuuguaa

SEQ ID NO: 915865 - RNA, 22 nt, Human
uuaaagcaaccucagcccucuu

SEQ ID NO: 915866 - RNA, 22 nt, Human
aucugucugggugcagcagucc

SEQ ID NO: 915867 - RNA, 22 nt, Human
guggcugagcagcagagagcug

SEQ ID NO: 915868 - RNA, 22 nt, Human
uuuggaauaaucagauccuagu

SEQ ID NO: 915869 - RNA, 22 nt, Human
gugugccucgccaagcugucgg

SEQ ID NO: 915870 - RNA, 22 nt, Human
agauucucaacaaagaguagca

SEQ ID NO: 915871 - RNA, 22 nt, Human
cugaacuucucugagccucagu

SEQ ID NO: 915872 - RNA, 22 nt, Human
augucaaaugcugcaaacucau

SEQ ID NO: 915873 - RNA, 18 nt, Human
uuggggugaggccaggaa

SEQ ID NO: 915874 - RNA, 18 nt, Human
uucuuuaauucaguuuga

SEQ ID NO: 915875 - RNA, 22 nt, Human
aagaugauguuguguuuucacu

SEQ ID NO: 915876 - RNA, 22 nt, Human
cuggaaggagaaggaggcugug

SEQ ID NO: 915877 - RNA, 22 nt, Human
agcugaggacgugaagggcggc

SEQ ID NO: 915878 - RNA, 22 nt, Human
uggggcuggcacagucucuauu

SEQ ID NO: 915879 - RNA, 22 nt, Human
cagcugcagucaucuucuagaa

SEQ ID NO: 915880 - RNA, 18 nt, Human
cauucuuggcagcuuuug

SEQ ID NO: 915881 - RNA, 22 nt, Human
agaccauggccauccuaggaaa

SEQ ID NO: 915882 - RNA, 22 nt, Human
uaaagcaaaaaugaacugccau

SEQ ID NO: 915883 - RNA, 22 nt, Human
aagugcauacacuaguuaauug

SEQ ID NO: 915884 - RNA, 22 nt, Human
ucaaaagacacaggaggcuagu

SEQ ID NO: 915885 - RNA, 23 nt, Human
aguauucaaaaggcaagcuauau

SEQ ID NO: 915886 - RNA, 22 nt, Human
ucucuggcuggcaccccaggga

SEQ ID NO: 915887 - RNA, 22 nt, Human
auuaaaugguggucauucauuu

SEQ ID NO: 915888 - RNA, 22 nt, Human
gucuggacugcaaaauaaggau

SEQ ID NO: 915889 - RNA, 22 nt, Human
aaguucuaaggugcauuauucu

SEQ ID NO: 915890 - RNA, 22 nt, Human
agcauuaagccuggcucagagg

SEQ ID NO: 915891 - RNA, 19 nt, Human
ucuguggcuguggggagga

SEQ ID NO: 915892 - RNA, 22 nt, Human
uuucacaagacagcuacuguug

SEQ ID NO: 915893 - RNA, 22 nt, Human
uguuuacuccagcugauggaac

SEQ ID NO: 915894 - RNA, 22 nt, Human
aggcucugguucaucaugaugg

SEQ ID NO: 915895 - RNA, 22 nt, Human
ugaggaaaaugucuuauagauu

SEQ ID NO: 915896 - RNA, 22 nt, Human
uagaacuuauuuggcauuauuu

SEQ ID NO: 915897 - RNA, 22 nt, Human
uuaccaauucagacaucucuuc

SEQ ID NO: 915898 - RNA, 22 nt, Human
ucugccagaaguucugagagua

SEQ ID NO: 915899 - RNA, 17 nt, Human
ggaaaagaagaguagga

SEQ ID NO: 915900 - RNA, 22 nt, Human
ucagggagauuuggggacucaa

SEQ ID NO: 915901 - RNA, 21 nt, Human
ccacauucucauucugacugc

SEQ ID NO: 915902 - RNA, 22 nt, Human
aaggcuucuuuaguguccuaau

SEQ ID NO: 915903 - RNA, 22 nt, Human
caguuuaaagaaggaugggagu

SEQ ID NO: 915904 - RNA, 22 nt, Human
uagauacaguguuaagugugga

SEQ ID NO: 915905 - RNA, 22 nt, Human
gugagugucagucaaagguuuu

SEQ ID NO: 915906 - RNA, 17 nt, Human
ucugagaaaggagaauc

SEQ ID NO: 915907 - RNA, 22 nt, Human
guccagagaagggaggggacuc

SEQ ID NO: 915908 - RNA, 22 nt, Human
uucucuaagaguuauaugaauu

SEQ ID NO: 915909 - RNA, 22 nt, Human
uuauugcuagugucauuucaca

SEQ ID NO: 915910 - RNA, 19 nt, Human
accugcaguaauaauuccu

SEQ ID NO: 915911 - RNA, 22 nt, Human
aaauacuagaauucagaguuga

SEQ ID NO: 915912 - RNA, 22 nt, Human
agaggagcugggaggcccucgu

SEQ ID NO: 915913 - RNA, 22 nt, Human
ggccaagaaugauaggcucagu

SEQ ID NO: 915914 - RNA, 22 nt, Human
ugcauuuucuuccaccaauauc

SEQ ID NO: 915915 - RNA, 22 nt, Human
gugguccucuucuucuguuugg

SEQ ID NO: 915916 - RNA, 22 nt, Human
caggugggcugccucuccagcu

SEQ ID NO: 915917 - RNA, 22 nt, Human
gcugucucggggcuuucuccug

SEQ ID NO: 915918 - RNA, 22 nt, Human
gaguucuguuacgugucaccaa

SEQ ID NO: 915919 - RNA, 22 nt, Human
gcccuagggcuuuugggccugu

SEQ ID NO: 915920 - RNA, 22 nt, Human
auuugaaaucccuucuacugua

SEQ ID NO: 915921 - RNA, 22 nt, Human
uggcagcagggccccuggagga

SEQ ID NO: 915922 - RNA, 22 nt, Human
cagacacuaggugacagagugc

SEQ ID NO: 915923 - RNA, 22 nt, Human
cacaguguagacuaauaauaga

SEQ ID NO: 915924 - RNA, 22 nt, Human
guguauguucuacuuaauauua

SEQ ID NO: 915925 - RNA, 22 nt, Human
gagcugaagaugucagaaccgu

SEQ ID NO: 915926 - RNA, 22 nt, Human
uaacagaaguuguucauugugg

SEQ ID NO: 915927 - RNA, 22 nt, Human
ucacugaagucuucaaguagga

SEQ ID NO: 915928 - RNA, 22 nt, Human
gcccagccccuggguggacgug

SEQ ID NO: 915929 - RNA, 22 nt, Human
uccuagaacagcccaccuggaa

SEQ ID NO: 915930 - RNA, 22 nt, Human
ggggcagggagguuaucgccga

SEQ ID NO: 915931 - RNA, 22 nt, Human
auuucacagcugcuguucaggu

SEQ ID NO: 915932 - RNA, 22 nt, Human
acaggagggacaccuuccugcu

SEQ ID NO: 915933 - RNA, 22 nt, Human
gcagaauuuucuguuuucuaga

SEQ ID NO: 915934 - RNA, 22 nt, Human
uguacagaaauuccuacuacau

SEQ ID NO: 915935 - RNA, 22 nt, Human
ucuuccuugccuugcuucauca

SEQ ID NO: 915936 - RNA, 22 nt, Human
cugggcagugguggcccuuccc

SEQ ID NO: 915937 - RNA, 22 nt, Human
agaaaaggauugauggaucaga

SEQ ID NO: 915938 - RNA, 22 nt, Human
cauuucaaacaguuacagcugc

SEQ ID NO: 915939 - RNA, 22 nt, Human
agacaucuaccuuucauucaaa

SEQ ID NO: 915940 - RNA, 22 nt, Human
uggugcugagaugaagugcucc

SEQ ID NO: 915941 - RNA, 22 nt, Human
uucacauugguucuugauagcu

SEQ ID NO: 915942 - RNA, 22 nt, Human
aaugguuuugcagguuugugga

SEQ ID NO: 915943 - RNA, 22 nt, Human
uauuugcugacagugcuggagc

SEQ ID NO: 915944 - RNA, 22 nt, Human
auccauuuuugcaaaguuguuc

SEQ ID NO: 915945 - RNA, 22 nt, Human
cuauuuaucuauuucugaauga

SEQ ID NO: 915946 - RNA, 22 nt, Human
uugaggccugcuggaagguguu

SEQ ID NO: 915947 - RNA, 22 nt, Human
guaguaauaguacauuagaaug

SEQ ID NO: 915948 - RNA, 22 nt, Human
acaaagugcacaagaugagaac

SEQ ID NO: 915949 - RNA, 22 nt, Human
ccaggucccuggaauuuaugag

SEQ ID NO: 915950 - RNA, 20 nt, Human
gggcaguggcgcuaucucag

SEQ ID NO: 915951 - RNA, 22 nt, Human
auggcagcaaagaggccuucuu

SEQ ID NO: 915952 - RNA, 22 nt, Human
ccugcccagggucaccacagag

SEQ ID NO: 915953 - RNA, 22 nt, Human
aacagauuuaagaagccaaggu

SEQ ID NO: 915954 - RNA, 22 nt, Human
caggcacucauucagagaggug

SEQ ID NO: 915955 - RNA, 22 nt, Human
gacuccccugggccccauccag

SEQ ID NO: 915956 - RNA, 22 nt, Human
gcuauacacauuucuugguagu

SEQ ID NO: 915957 - RNA, 22 nt, Human
ccagagagaguacugggcucug

SEQ ID NO: 915958 - RNA, 22 nt, Human
uuauuucauguaaaauuuaugu

SEQ ID NO: 915959 - RNA, 22 nt, Human
cuggcugggagcgagcugcuca

SEQ ID NO: 915960 - RNA, 22 nt, Human
ugcuggcuuuuccuucaggcag

SEQ ID NO: 915961 - RNA, 22 nt, Human
cuccagcugcuggucugagacu

SEQ ID NO: 915962 - RNA, 22 nt, Human
augugaaaaauuucuuauuaca

SEQ ID NO: 915963 - RNA, 23 nt, Human
gugagcagcccacuaggaaugcc

SEQ ID NO: 915964 - RNA, 22 nt, Human
ucaaaguaagaauuuauuacaa

SEQ ID NO: 915965 - RNA, 22 nt, Human
ucacaggacagccuuccacccg

SEQ ID NO: 915966 - RNA, 22 nt, Human
uaauaauuaacagugauggguc

SEQ ID NO: 915967 - RNA, 19 nt, Human
cucuggagcagacacugga

SEQ ID NO: 915968 - RNA, 22 nt, Human
aucucuguaaaccauaaauuga

SEQ ID NO: 915969 - RNA, 22 nt, Human
uuugcaaauacagaggucuugc

SEQ ID NO: 915970 - RNA, 22 nt, Human
cagugccuggauagcaacauga

SEQ ID NO: 915971 - RNA, 22 nt, Human
guguguguguaaaaauccagag

SEQ ID NO: 915972 - RNA, 22 nt, Human
caagggcagaggcagggccccg

SEQ ID NO: 915973 - RNA, 19 nt, Human
aagagggaaagugcuaugc

SEQ ID NO: 915974 - RNA, 22 nt, Human
acuagaaccagaggaggcaggu

SEQ ID NO: 915975 - RNA, 22 nt, Human
ccugagccugaguggugcaggg

SEQ ID NO: 915976 - RNA, 22 nt, Human
cuggagaacagagcuguuuaga

SEQ ID NO: 915977 - RNA, 22 nt, Human
uggcugccuagucccucagccu

SEQ ID NO: 915978 - RNA, 22 nt, Human
aaaugcauggcuguuuuaaagc

SEQ ID NO: 915979 - RNA, 22 nt, Human
uagcagcuggggcuauucauca

SEQ ID NO: 915980 - RNA, 22 nt, Human
gaagggaacugggucuccuugu

SEQ ID NO: 915981 - RNA, 22 nt, Human
uguucauuugcaacaaccaaau

SEQ ID NO: 915982 - RNA, 22 nt, Human
agggcugcuccuccuucaggcc

SEQ ID NO: 915983 - RNA, 22 nt, Human
gcucucucuuggggauucagca

SEQ ID NO: 915984 - RNA, 22 nt, Human
aagaaaguguggagagccuagc

SEQ ID NO: 915985 - RNA, 22 nt, Human
aggcaacuguuugauaauguug

SEQ ID NO: 915986 - RNA, 22 nt, Human
auuuaacaagacagagaacugg

SEQ ID NO: 915987 - RNA, 22 nt, Human
ugaaucucgaggcuauagaagu

SEQ ID NO: 915988 - RNA, 21 nt, Human
uauaguguggauaugcugaug

SEQ ID NO: 915989 - RNA, 22 nt, Human
uguuuguggaauauucuuuaag

SEQ ID NO: 915990 - RNA, 19 nt, Human
gagacauguagauagaaga

SEQ ID NO: 915991 - RNA, 22 nt, Human
ugcuuuauguuaucagaagggu

SEQ ID NO: 915992 - RNA, 22 nt, Human
ccagcuggcccagcugugcucc

SEQ ID NO: 915993 - RNA, 22 nt, Human
ggagccuguggccgucacgacu

SEQ ID NO: 915994 - RNA, 22 nt, Human
uaagcauaacuaaaaaugauuu

SEQ ID NO: 915995 - RNA, 22 nt, Human
ucauggggugacagaagggagg

SEQ ID NO: 915996 - RNA, 18 nt, Human
cuuauuguuuaaauggcc

SEQ ID NO: 915997 - RNA, 20 nt, Human
ccuggcaggcggguuacuua

SEQ ID NO: 915998 - RNA, 22 nt, Human
agacuucucuuggcuauauuau

SEQ ID NO: 915999 - RNA, 22 nt, Human
ccaggagcuauguacacacuau

SEQ ID NO: 916000 - RNA, 22 nt, Human
cagagguuaccuagagcaagaa

SEQ ID NO: 916001 - RNA, 22 nt, Human
gcuggaucccugugggaguggu

SEQ ID NO: 916002 - RNA, 22 nt, Human
gggcuccaacggugagcaugga

SEQ ID NO: 916003 - RNA, 22 nt, Human
ugggccuuacuuggggcugacu

SEQ ID NO: 916004 - RNA, 22 nt, Human
ccacagcuccucagccucuuuc

SEQ ID NO: 916005 - RNA, 22 nt, Human
ggcugcucaaggacucugaucg

SEQ ID NO: 916006 - RNA, 22 nt, Human
uacacaacugacaaccauucug

SEQ ID NO: 916007 - RNA, 22 nt, Human
gaaacagucaacuuucuuuccc

SEQ ID NO: 916008 - RNA, 22 nt, Human
gcagcugguuaaugggagaauu

SEQ ID NO: 916009 - RNA, 22 nt, Human
agccaagacauuuagaaaagcu

SEQ ID NO: 916010 - RNA, 22 nt, Human
uacauucacuuguugaaggugg

SEQ ID NO: 916011 - RNA, 22 nt, Human
gggugagggaugagccuucuuc

SEQ ID NO: 916012 - RNA, 22 nt, Human
gacacauaugcguauaguuuag

SEQ ID NO: 916013 - RNA, 22 nt, Human
gcugugggccacacggcugagu

SEQ ID NO: 916014 - RNA, 22 nt, Human
gauggcagcagcagccagggau

SEQ ID NO: 916015 - RNA, 22 nt, Human
ucggccacgggguuuccuccaa

SEQ ID NO: 916016 - RNA, 22 nt, Human
uccagcagccacaccucuggac

SEQ ID NO: 916017 - RNA, 22 nt, Human
cucugggcacuguauggguucu

SEQ ID NO: 916018 - RNA, 22 nt, Human
ugugcaugugucuuuauaguag

SEQ ID NO: 916019 - RNA, 22 nt, Human
ucucuuucucaaaauguaagca

SEQ ID NO: 916020 - RNA, 22 nt, Human
gagaggagucccuaucacaguu

SEQ ID NO: 916021 - RNA, 22 nt, Human
auacauuauuguuaaagaacau

SEQ ID NO: 916022 - RNA, 22 nt, Human
guccucagggaauguggcgggu

SEQ ID NO: 916023 - RNA, 22 nt, Human
uggccaccccuuucucugcacu

SEQ ID NO: 916024 - RNA, 22 nt, Human
ugguaugaccguggugcaagca

SEQ ID NO: 916025 - RNA, 22 nt, Human
aacacagggcagcugcugggaa

SEQ ID NO: 916026 - RNA, 19 nt, Human
uaaguagucaaauaguaac

SEQ ID NO: 916027 - RNA, 22 nt, Human
agcgguggugucggcagcggcu

SEQ ID NO: 916028 - RNA, 22 nt, Human
ucugcaccuuucuuaaaaaucg

SEQ ID NO: 916029 - RNA, 19 nt, Human
auuuuucuuccucugugca

SEQ ID NO: 916030 - RNA, 22 nt, Human
ggaagauuucccguagcugugc

SEQ ID NO: 916031 - RNA, 23 nt, Human
cagaacaguaaaagaugccaugg

SEQ ID NO: 916032 - RNA, 22 nt, Human
cauuugaacuaauaacugugcu

SEQ ID NO: 916033 - RNA, 22 nt, Human
uuugcuauuuuucugugcagcu

SEQ ID NO: 916034 - RNA, 22 nt, Human
aggagcuguuuuguucagcaaa

SEQ ID NO: 916035 - RNA, 22 nt, Human
uuuuucuggauaacuguaucuc

SEQ ID NO: 916036 - RNA, 22 nt, Human
cucuagacaacuugcugugggu

SEQ ID NO: 916037 - RNA, 22 nt, Human
uuuccaauuuuuaaguggauga

SEQ ID NO: 916038 - RNA, 22 nt, Human
ugcagugaugcuucuggcucag

SEQ ID NO: 916039 - RNA, 22 nt, Human
cauuuacuguugaaucccuagc

SEQ ID NO: 916040 - RNA, 22 nt, Human
uuuaucagaggcuauguuucau

SEQ ID NO: 916041 - RNA, 22 nt, Human
acuguuuuccuaaugagcaaga

SEQ ID NO: 916042 - RNA, 22 nt, Human
ggaggccaguccuggccgggcu

SEQ ID NO: 916043 - RNA, 22 nt, Human
ccuacacaugaaugcgagaaau

SEQ ID NO: 916044 - RNA, 22 nt, Human
ucauuuguuacagccacauacc

SEQ ID NO: 916045 - RNA, 22 nt, Human
guggcccagcccuacagaggac

SEQ ID NO: 916046 - RNA, 18 nt, Human
aaugaaauguacaccuuu

SEQ ID NO: 916047 - RNA, 22 nt, Human
aggggccugguuggccucuguu

SEQ ID NO: 916048 - RNA, 22 nt, Human
cggcagugggcgccaggucucc

SEQ ID NO: 916049 - RNA, 19 nt, Human
uggccagguacugucugcu

SEQ ID NO: 916050 - RNA, 22 nt, Human
agcuaaggaacucuguaacacc

SEQ ID NO: 916051 - RNA, 22 nt, Human
ccucccacuucuugcugagguc

SEQ ID NO: 916052 - RNA, 22 nt, Human
uugaaacugucagcuuuuacgc

SEQ ID NO: 916053 - RNA, 22 nt, Human
ccuccuagaggaaccccagggc

SEQ ID NO: 916054 - RNA, 22 nt, Human
agagaacagcauugcagcuuug

SEQ ID NO: 916055 - RNA, 22 nt, Human
gggacacuggacccagugucca

SEQ ID NO: 916056 - RNA, 22 nt, Human
cuccucugucuggcccugagcc

SEQ ID NO: 916057 - RNA, 22 nt, Human
ucaguguuauuagaugagguuu

SEQ ID NO: 916058 - RNA, 22 nt, Human
uacauuauuucaucagucaucu

SEQ ID NO: 916059 - RNA, 20 nt, Human
cugccaugauugauagagug

SEQ ID NO: 916060 - RNA, 22 nt, Human
uggcaacaagaaaggcagaggg

SEQ ID NO: 916061 - RNA, 22 nt, Human
gagcuuggugcugccuguuguc

SEQ ID NO: 916062 - RNA, 18 nt, Human
ucagcccagagcccaguu

SEQ ID NO: 916063 - RNA, 22 nt, Human
agcagcuggggccugugacgau

SEQ ID NO: 916064 - RNA, 22 nt, Human
aaagcuauuugugaguuauaga

SEQ ID NO: 916065 - RNA, 22 nt, Human
uuauaggaaucugcauguguga

SEQ ID NO: 916066 - RNA, 21 nt, Human
uguggucuuuuaguuccauca

SEQ ID NO: 916067 - RNA, 22 nt, Human
cacugcuuuuucuccucacugg

SEQ ID NO: 916068 - RNA, 22 nt, Human
aacuacaggggguggcaggcgg

SEQ ID NO: 916069 - RNA, 22 nt, Human
cugcccguaaguuagaaaagca

SEQ ID NO: 916070 - RNA, 22 nt, Human
uugcagggaccugcagaaagcu

SEQ ID NO: 916071 - RNA, 22 nt, Human
gcugagguaggagguugcagug

SEQ ID NO: 916072 - RNA, 22 nt, Human
ggcagaggaggggugaauuugc

SEQ ID NO: 916073 - RNA, 22 nt, Human
uaagaaacuauugucucugaac

SEQ ID NO: 916074 - RNA, 22 nt, Human
gaaagaaugcugggagccaucu

SEQ ID NO: 916075 - RNA, 22 nt, Human
gucaauaucuugguuguacuau

SEQ ID NO: 916076 - RNA, 22 nt, Human
aucuuuagauuagaaacucuaa

SEQ ID NO: 916077 - RNA, 22 nt, Human
ccaguggccaugcacgagcagc

SEQ ID NO: 916078 - RNA, 22 nt, Human
cugaggccucucuccuuggcuu

SEQ ID NO: 916079 - RNA, 22 nt, Human
aagagcuggucacagguccauu

SEQ ID NO: 916080 - RNA, 22 nt, Human
ggauguggaccuugccugguga

SEQ ID NO: 916081 - RNA, 22 nt, Human
auggggagagccucugucccca

SEQ ID NO: 916082 - RNA, 22 nt, Human
uuuaguuuuaacugaaagcuau

SEQ ID NO: 916083 - RNA, 22 nt, Human
uuugucuuuccccuccucauug

SEQ ID NO: 916084 - RNA, 22 nt, Human
cucuuccaccuccuucaggaga

SEQ ID NO: 916085 - RNA, 20 nt, Human
gugaagggagucaggugugc

SEQ ID NO: 916086 - RNA, 22 nt, Human
cuccuccuggacacaggcugug

SEQ ID NO: 916087 - RNA, 22 nt, Human
uuuaagcuaaugucauaauuag

SEQ ID NO: 916088 - RNA, 22 nt, Human
cucugaaagaguuuaguauuau

SEQ ID NO: 916089 - RNA, 22 nt, Human
agcagcuggaacauaugaagaa

SEQ ID NO: 916090 - RNA, 22 nt, Human
uagucaagauuggaauaaugua

SEQ ID NO: 916091 - RNA, 22 nt, Human
cacaaaccuucugcagccugua

SEQ ID NO: 916092 - RNA, 22 nt, Human
gcuccagcucguggcucccagc

SEQ ID NO: 916093 - RNA, 22 nt, Human
cuauuucugccuaaugaccugu

SEQ ID NO: 916094 - RNA, 22 nt, Human
cugagccagcuggcaugugcua

SEQ ID NO: 916095 - RNA, 22 nt, Human
gcucccagucugauggaggaga

SEQ ID NO: 916096 - RNA, 20 nt, Human
acuccagguggcaugaggac

SEQ ID NO: 916097 - RNA, 21 nt, Human
ugcaguucaagucaaucuacu

SEQ ID NO: 916098 - RNA, 22 nt, Human
gguaacuuagcucauggcugug

SEQ ID NO: 916099 - RNA, 22 nt, Human
caucuuaauuucuaacaggcac

SEQ ID NO: 916100 - RNA, 22 nt, Human
uauuaguaauaccugucucaua

SEQ ID NO: 916101 - RNA, 22 nt, Human
gaggcuguaaguguggagccua

SEQ ID NO: 916102 - RNA, 22 nt, Human
uuccacaaaucaauucugcuga

SEQ ID NO: 916103 - RNA, 22 nt, Human
aucuuucucugcacuauacaau

SEQ ID NO: 916104 - RNA, 22 nt, Human
acagcuucucugaaauucaugu

SEQ ID NO: 916105 - RNA, 22 nt, Human
cccaggaggugugcccaacucg

SEQ ID NO: 916106 - RNA, 22 nt, Human
cagcagugcuucagugugagau

SEQ ID NO: 916107 - RNA, 22 nt, Human
cagagccauuauggagacuugc

SEQ ID NO: 916108 - RNA, 22 nt, Human
gccaggcagcagcgaggauggu

SEQ ID NO: 916109 - RNA, 22 nt, Human
cccagcaucccagugggcagca

SEQ ID NO: 916110 - RNA, 22 nt, Human
acuggggaauggaacugggaau

SEQ ID NO: 916111 - RNA, 22 nt, Human
cacagcugggaaaauuuguaca

SEQ ID NO: 916112 - RNA, 22 nt, Human
ucugacagucacaguggaggau

SEQ ID NO: 916113 - RNA, 22 nt, Human
ccugaccacccuuggacaaggu

SEQ ID NO: 916114 - RNA, 22 nt, Human
ggggacugaggcacugaaggug

SEQ ID NO: 916115 - RNA, 22 nt, Human
ugaacaguuacuuuguagaaga

SEQ ID NO: 916116 - RNA, 22 nt, Human
aauguggacucuuguauuuuuc

SEQ ID NO: 916117 - RNA, 22 nt, Human
ucucuacauaaccucaauacuc

SEQ ID NO: 916118 - RNA, 22 nt, Human
aggagcugggcugcugcuggga

SEQ ID NO: 916119 - RNA, 22 nt, Human
ugguaagauaagagccaggccu

SEQ ID NO: 916120 - RNA, 22 nt, Human
uggcccaggugcacccagaggc

SEQ ID NO: 916121 - RNA, 22 nt, Human
gccugagcaggcguggaccaug

SEQ ID NO: 916122 - RNA, 22 nt, Human
gcugcugucacggugcuaaggg

SEQ ID NO: 916123 - RNA, 22 nt, Human
ucccaggcucuucaaggaagac

SEQ ID NO: 916124 - RNA, 22 nt, Human
uuucagacugcugugugaaacu

SEQ ID NO: 916125 - RNA, 22 nt, Human
aauuccagcugauugacuuucc

SEQ ID NO: 916126 - RNA, 22 nt, Human
caggacugaagggcacagggaa

SEQ ID NO: 916127 - RNA, 22 nt, Human
uuuggaaaaagacagcuuauga

SEQ ID NO: 916128 - RNA, 22 nt, Human
gcuggggccucugugagguuaa

SEQ ID NO: 916129 - RNA, 22 nt, Human
cagagcuuuggcuagaugguug

SEQ ID NO: 916130 - RNA, 22 nt, Human
ucaggggaaaucucucagcgaa

SEQ ID NO: 916131 - RNA, 22 nt, Human
gugcugagauuacaggugugag

SEQ ID NO: 916132 - RNA, 22 nt, Human
aggguccuucuguuccugagca

SEQ ID NO: 916133 - RNA, 22 nt, Human
caauuucagguggauagguuuu

SEQ ID NO: 916134 - RNA, 22 nt, Human
gugaggcagagaugccaaaacu

SEQ ID NO: 916135 - RNA, 22 nt, Human
ccucacagucaguucuuagucu

SEQ ID NO: 916136 - RNA, 22 nt, Human
cagccagaggggccagagucgg

SEQ ID NO: 916137 - RNA, 22 nt, Human
ggagaggcuuggcccagccugg

SEQ ID NO: 916138 - RNA, 22 nt, Human
agggcacagccuaaagccuaug

SEQ ID NO: 916139 - RNA, 22 nt, Human
uguuaaucaaucaacaguauua

SEQ ID NO: 916140 - RNA, 23 nt, Human
aauuuaguuugagacauuagccu

SEQ ID NO: 916141 - RNA, 22 nt, Human
cucugccaucucacuggguccu

SEQ ID NO: 916142 - RNA, 22 nt, Human
caaccugaugaauugaauuuaa

SEQ ID NO: 916143 - RNA, 22 nt, Human
agaggcacuaagggaagagcag

SEQ ID NO: 916144 - RNA, 22 nt, Human
guugcuuuucuccaucacaugg

SEQ ID NO: 916145 - RNA, 22 nt, Human
augaaaguaccuguaauauguu

SEQ ID NO: 916146 - RNA, 22 nt, Human
aaguuacuuuauguagaagaaa

SEQ ID NO: 916147 - RNA, 22 nt, Human
ugaggacauugagacuggagac

SEQ ID NO: 916148 - RNA, 21 nt, Human
gcuauacagaauggccagagg

SEQ ID NO: 916149 - RNA, 22 nt, Human
uuagaaagaacuuuagauauca

SEQ ID NO: 916150 - RNA, 22 nt, Human
ugaggcuaaaggugaccagauu

SEQ ID NO: 916151 - RNA, 22 nt, Human
agacccacacuuugaguagcaa

SEQ ID NO: 916152 - RNA, 18 nt, Human
uccugccugugccccagg

SEQ ID NO: 916153 - RNA, 22 nt, Human
caacuuuaugauugguuuguca

SEQ ID NO: 916154 - RNA, 22 nt, Human
ggcagcaguuacaaaugugcag

SEQ ID NO: 916155 - RNA, 22 nt, Human
agaaguuugcucacuugggaca

SEQ ID NO: 916156 - RNA, 22 nt, Human
gcacccaggcuugggcagcaac

SEQ ID NO: 916157 - RNA, 22 nt, Human
ggagccugguauaguguugcau

SEQ ID NO: 916158 - RNA, 22 nt, Human
aacacagguuugugguaaauaa

SEQ ID NO: 916159 - RNA, 22 nt, Human
cugcaggggcuggaguuggcuu

SEQ ID NO: 916160 - RNA, 22 nt, Human
guuuguguaacaugaugaugau

SEQ ID NO: 916161 - RNA, 22 nt, Human
gccagccccagacauccuaucg

SEQ ID NO: 916162 - RNA, 22 nt, Human
guuuccuaggcuuauacagcug

SEQ ID NO: 916163 - RNA, 22 nt, Human
gccuggggucccuuguuggcac

SEQ ID NO: 916164 - RNA, 22 nt, Human
uuaguuuccuguggugugaagu

SEQ ID NO: 916165 - RNA, 22 nt, Human
ggcccugagcacagcuccucuc

SEQ ID NO: 916166 - RNA, 22 nt, Human
gggcucugcagugacuugaggg

SEQ ID NO: 916167 - RNA, 22 nt, Human
ugcuuuuauuuaauaucuugca

SEQ ID NO: 916168 - RNA, 22 nt, Human
accuuagaccagcaagauauuu

SEQ ID NO: 916169 - RNA, 22 nt, Human
gcacguggaaugcucaugagcc

SEQ ID NO: 916170 - RNA, 22 nt, Human
aaggacaaagcagagcuggaug

SEQ ID NO: 916171 - RNA, 22 nt, Human
ucagagaguuagugucuuagcu

SEQ ID NO: 916172 - RNA, 22 nt, Human
uggcaggauuugcccggaagga

SEQ ID NO: 916173 - RNA, 22 nt, Human
aggcugugauuccaccacucuc

SEQ ID NO: 916174 - RNA, 22 nt, Human
accucuuaauauugcaccuucu

SEQ ID NO: 916175 - RNA, 22 nt, Human
gugugccagacaugaugcuaug

SEQ ID NO: 916176 - RNA, 22 nt, Human
uuuccuuguucauuugcccuau

SEQ ID NO: 916177 - RNA, 20 nt, Human
ggggaagucacugcagucag

SEQ ID NO: 916178 - RNA, 22 nt, Human
caaggcccugcaaccugacuug

SEQ ID NO: 916179 - RNA, 22 nt, Human
agacacagaacacaaaagcaua

SEQ ID NO: 916180 - RNA, 22 nt, Human
uuccaacuuuaaaauucauucu

SEQ ID NO: 916181 - RNA, 22 nt, Human
aagauacucaguggauaugcau

SEQ ID NO: 916182 - RNA, 22 nt, Human
auggcuuuccggacuuuggcca

SEQ ID NO: 916183 - RNA, 22 nt, Human
aaccaaggacagcuagugaugc

SEQ ID NO: 916184 - RNA, 22 nt, Human
agcugcucucacuggacgccug

SEQ ID NO: 916185 - RNA, 22 nt, Human
uagugccaugcgagggguggga

SEQ ID NO: 916186 - RNA, 22 nt, Human
gccagcugaaauuucaguucug

SEQ ID NO: 916187 - RNA, 22 nt, Human
ugugugaggacucagugaaaca

SEQ ID NO: 916188 - RNA, 22 nt, Human
ccuaagagauuauugcuccugc

SEQ ID NO: 916189 - RNA, 22 nt, Human
ucaaagucauggcaggcucaga

SEQ ID NO: 916190 - RNA, 22 nt, Human
ugagccugcugucgcuggaccc

SEQ ID NO: 916191 - RNA, 22 nt, Human
gggagcugaaguagggguaaau

SEQ ID NO: 916192 - RNA, 22 nt, Human
uccugagguauaugcuuugcag

SEQ ID NO: 916193 - RNA, 22 nt, Human
agcuguuuuugucugcugaucc

SEQ ID NO: 916194 - RNA, 22 nt, Human
auucuacaggacuggcaauccc

SEQ ID NO: 916195 - RNA, 20 nt, Human
accagaggaaagagcaguga

SEQ ID NO: 916196 - RNA, 22 nt, Human
aacuuuggcaagucagacuucu

SEQ ID NO: 916197 - RNA, 22 nt, Human
uccagccuaauguucuucccac

SEQ ID NO: 916198 - RNA, 22 nt, Human
acugauucaaguuaugcaucuu

SEQ ID NO: 916199 - RNA, 22 nt, Human
aggcgcugaguaggcaaggagg

SEQ ID NO: 916200 - RNA, 22 nt, Human
ccuaaacagaacaaagaggcag

SEQ ID NO: 916201 - RNA, 22 nt, Human
acuagcagggauauuauauaag

SEQ ID NO: 916202 - RNA, 22 nt, Human
caauuucauuaauagauauaga

SEQ ID NO: 916203 - RNA, 22 nt, Human
cugggggcaauggucagagugu

SEQ ID NO: 916204 - RNA, 21 nt, Human
aggcccagcuuuccucuugcu

SEQ ID NO: 916205 - RNA, 22 nt, Human
uguuuauuuucaggauggauug

SEQ ID NO: 916206 - RNA, 22 nt, Human
gccaggcugacucccccggccu

SEQ ID NO: 916207 - RNA, 19 nt, Human
ugcaaaugcuguugagaau

SEQ ID NO: 916208 - RNA, 22 nt, Human
aucuaggauuugaaugcacagu

SEQ ID NO: 916209 - RNA, 22 nt, Human
ccuggccugugaaucugagagc

SEQ ID NO: 916210 - RNA, 22 nt, Human
agcuguguagggaaucagagaa

SEQ ID NO: 916211 - RNA, 22 nt, Human
uuucuucauugaugucaggugg

SEQ ID NO: 916212 - RNA, 22 nt, Human
ccugggugaaauaguccucaag

SEQ ID NO: 916213 - RNA, 22 nt, Human
ugugcguggauuccuguacuca

SEQ ID NO: 916214 - RNA, 22 nt, Human
agaggggcccgguucuccgucu

SEQ ID NO: 916215 - RNA, 22 nt, Human
agagggcuucccuaggagugag

SEQ ID NO: 916216 - RNA, 22 nt, Human
ucuaccacucaugcuacuuacu

SEQ ID NO: 916217 - RNA, 22 nt, Human
acauggauuguuuuaaaagaug

SEQ ID NO: 916218 - RNA, 22 nt, Human
acccaggacucucuuccaguag

SEQ ID NO: 916219 - RNA, 22 nt, Human
agccaagagaugaggcugcagg

SEQ ID NO: 916220 - RNA, 22 nt, Human
cuuuccuucucgugguucucac

SEQ ID NO: 916221 - RNA, 22 nt, Human
agcagcaggaggcuguccacca

SEQ ID NO: 916222 - RNA, 22 nt, Human
ggcugagcuuauauaugugcug

SEQ ID NO: 916223 - RNA, 21 nt, Human
ugccaggccugagcugggguc

SEQ ID NO: 916224 - RNA, 22 nt, Human
gcagauggugggggaggaguac

SEQ ID NO: 916225 - RNA, 22 nt, Human
aucugucuaugauauagucugu

SEQ ID NO: 916226 - RNA, 18 nt, Human
gcaaggcucaggccaggc

SEQ ID NO: 916227 - RNA, 22 nt, Human
cuggccaguugccuuccugggu

SEQ ID NO: 916228 - RNA, 22 nt, Human
cucuuugugcuauuaugauccu

SEQ ID NO: 916229 - RNA, 22 nt, Human
ucccggcgcugggagguggguc

SEQ ID NO: 916230 - RNA, 22 nt, Human
uccaggagggauugggcugugg

SEQ ID NO: 916231 - RNA, 22 nt, Human
aguaaagcagaguugcaguaca

SEQ ID NO: 916232 - RNA, 22 nt, Human
gaagaaagaucaaauaguuucc

SEQ ID NO: 916233 - RNA, 23 nt, Human
uaaagcaaagucaagugcacucc

SEQ ID NO: 916234 - RNA, 22 nt, Human
cagaucaugaaugacugacaga

SEQ ID NO: 916235 - RNA, 22 nt, Human
agcaccuugaucuuggacuucc

SEQ ID NO: 916236 - RNA, 22 nt, Human
cagaacauccccacugcuaccu

SEQ ID NO: 916237 - RNA, 22 nt, Human
gcuggcuggaggugaggaagaa

SEQ ID NO: 916238 - RNA, 22 nt, Human
cugcuguguuucugcuagaaaa

SEQ ID NO: 916239 - RNA, 22 nt, Human
uggcucuggagcuggcggcuga

SEQ ID NO: 916240 - RNA, 22 nt, Human
cuucucagcauuuugucagucu

SEQ ID NO: 916241 - RNA, 22 nt, Human
uucacauaaucugcagcaagcg

SEQ ID NO: 916242 - RNA, 20 nt, Human
gcccucugccucccucagcg

SEQ ID NO: 916243 - RNA, 22 nt, Human
uguuuuuuuauauaccugaagu

SEQ ID NO: 916244 - RNA, 22 nt, Human
aguaaacacugucuuuauauau

SEQ ID NO: 916245 - RNA, 22 nt, Human
gauuuccuagacauggggcaga

SEQ ID NO: 916246 - RNA, 22 nt, Human
acuggaaauaaauuuugaaugu

SEQ ID NO: 916247 - RNA, 22 nt, Human
gggcuucaguucugaccaucuu

SEQ ID NO: 916248 - RNA, 22 nt, Human
augcaagcaacauuuugcacau

SEQ ID NO: 916249 - RNA, 22 nt, Human
aauaagugaguuuagcaaguuu

SEQ ID NO: 916250 - RNA, 22 nt, Human
ucugggagcuggcuuugccuca

SEQ ID NO: 916251 - RNA, 22 nt, Human
acgcagaagggccuggcgugcc

SEQ ID NO: 916252 - RNA, 22 nt, Human
uucaaacaguugcacaacuuau

SEQ ID NO: 916253 - RNA, 22 nt, Human
cccugugacgagcacggccagu

SEQ ID NO: 916254 - RNA, 22 nt, Human
gccaggaaaaaggguggccaau

SEQ ID NO: 916255 - RNA, 22 nt, Human
uaauaauuuuaaagaaggcuag

SEQ ID NO: 916256 - RNA, 22 nt, Human
agccaggggagucagcugcugg

SEQ ID NO: 916257 - RNA, 22 nt, Human
gggccaggaguggagauauggg

SEQ ID NO: 916258 - RNA, 21 nt, Human
uccucugcagugagguggccu

SEQ ID NO: 916259 - RNA, 22 nt, Human
caggcaaggacucugguaauuu

SEQ ID NO: 916260 - RNA, 22 nt, Human
ggaauguaacgugaccaaguuc

SEQ ID NO: 916261 - RNA, 22 nt, Human
uggccagcuuugacuguaaacc

SEQ ID NO: 916262 - RNA, 22 nt, Human
uuuaagcacagggauaaaguua

SEQ ID NO: 916263 - RNA, 22 nt, Human
cuccagcuucccucagcugugg

SEQ ID NO: 916264 - RNA, 22 nt, Human
ugauuuccacagucaggggugc

SEQ ID NO: 916265 - RNA, 22 nt, Human
ggcucugaauuauuccugaguc

SEQ ID NO: 916266 - RNA, 22 nt, Human
ugucauuuaugcuucuucagug

SEQ ID NO: 916267 - RNA, 22 nt, Human
ccagcccugucaccaacuggag

SEQ ID NO: 916268 - RNA, 22 nt, Human
gaggcugggaaguccaagacca

SEQ ID NO: 916269 - RNA, 22 nt, Human
uccugaggucugaaaaaggagc

SEQ ID NO: 916270 - RNA, 22 nt, Human
agaaaucucuagcacaucgaau

SEQ ID NO: 916271 - RNA, 22 nt, Human
gggauggacugacgguagcgcg

SEQ ID NO: 916272 - RNA, 22 nt, Human
gccaauuuauagccaaaaauca

SEQ ID NO: 916273 - RNA, 21 nt, Human
agguacaggucuugugagucu

SEQ ID NO: 916274 - RNA, 22 nt, Human
acagacuggccugucucgcacc

SEQ ID NO: 916275 - RNA, 20 nt, Human
ucuugcagcuccuguaccau

SEQ ID NO: 916276 - RNA, 22 nt, Human
gaauuaaaauaguuuuggucga

SEQ ID NO: 916277 - RNA, 17 nt, Human
accaggcaacacgccca

SEQ ID NO: 916278 - RNA, 22 nt, Human
auauguauguguuuucuuugga

SEQ ID NO: 916279 - RNA, 22 nt, Human
gcuccaggccccagcguuccgc

SEQ ID NO: 916280 - RNA, 22 nt, Human
gcacugcagccucagauggugg

SEQ ID NO: 916281 - RNA, 20 nt, Human
gcugggcuuugacugacaca

SEQ ID NO: 916282 - RNA, 22 nt, Human
gagaaggcugauccuuggaguu

SEQ ID NO: 916283 - RNA, 22 nt, Human
gcuuuuauuucuucacaaaagu

SEQ ID NO: 916284 - RNA, 22 nt, Human
agcagggcaguuaaaggguccu

SEQ ID NO: 916285 - RNA, 22 nt, Human
ugcuagcacugugcagucuacg

SEQ ID NO: 916286 - RNA, 22 nt, Human
gcuguucuuugcaucucuggug

SEQ ID NO: 916287 - RNA, 22 nt, Human
agcagcacgaguccacaaaucc

SEQ ID NO: 916288 - RNA, 22 nt, Human
uucauugaguuacugccugggc

SEQ ID NO: 916289 - RNA, 22 nt, Human
guccccucaaaauucauauguu

SEQ ID NO: 916290 - RNA, 21 nt, Human
uaacaaagacuucuggucagg

SEQ ID NO: 916291 - RNA, 22 nt, Human
agaugggcgcccuggacugagg

SEQ ID NO: 916292 - RNA, 22 nt, Human
agacuuuagggccaugguaggu

SEQ ID NO: 916293 - RNA, 20 nt, Human
uuucuuguacuuggagaagg

SEQ ID NO: 916294 - RNA, 22 nt, Human
agucagugucaacaggaaguag

SEQ ID NO: 916295 - RNA, 22 nt, Human
ugugccuggaucucugugacaa

SEQ ID NO: 916296 - RNA, 22 nt, Human
gacaggcuuucucaggaugagc

SEQ ID NO: 916297 - RNA, 22 nt, Human
gcggaaaugcagggcuagggug

SEQ ID NO: 916298 - RNA, 22 nt, Human
uuagccauauagugcucuugua

SEQ ID NO: 916299 - RNA, 22 nt, Human
uuuaucuuuggaucuucagaaa

SEQ ID NO: 916300 - RNA, 22 nt, Human
cgccaguauguggcugucuuug

SEQ ID NO: 916301 - RNA, 22 nt, Human
agaaagcuuaugaaugggcaag

SEQ ID NO: 916302 - RNA, 22 nt, Human
gcugcuguccuucaagucugcg

SEQ ID NO: 916303 - RNA, 20 nt, Human
agcuggcccacagguguggg

SEQ ID NO: 916304 - RNA, 22 nt, Human
aguguucaggaucugaggccag

SEQ ID NO: 916305 - RNA, 22 nt, Human
uucuuuuuggauagcugaugaa

SEQ ID NO: 916306 - RNA, 22 nt, Human
augucauauuacuaaugcuggc

SEQ ID NO: 916307 - RNA, 22 nt, Human
uauaaagaaguguaaacaggaa

SEQ ID NO: 916308 - RNA, 21 nt, Human
uggcugaguggaugcaugaau

SEQ ID NO: 916309 - RNA, 22 nt, Human
gcuguggcggcagcagcuggug

SEQ ID NO: 916310 - RNA, 22 nt, Human
ggccccagguagaagauauaga

SEQ ID NO: 916311 - RNA, 22 nt, Human
cuuccugggcccugcuuaagca

SEQ ID NO: 916312 - RNA, 22 nt, Human
ggcucuggguaaggcguuugac

SEQ ID NO: 916313 - RNA, 22 nt, Human
uuggaaggagucuuuggggaug

SEQ ID NO: 916314 - RNA, 22 nt, Human
gccagcaaguaucaccaaagcc

SEQ ID NO: 916315 - RNA, 22 nt, Human
uuacaguuucuaguaauacuug

SEQ ID NO: 916316 - RNA, 22 nt, Human
aucuucaacuuuggggcugccu

SEQ ID NO: 916317 - RNA, 22 nt, Human
uuaaacagagucugaaauguaa

SEQ ID NO: 916318 - RNA, 22 nt, Human
ugcacacacgcggcacaucugu

SEQ ID NO: 916319 - RNA, 22 nt, Human
ggccagcucagacuccacuugc

SEQ ID NO: 916320 - RNA, 22 nt, Human
aagaguuucugauucaguaggu

SEQ ID NO: 916321 - RNA, 22 nt, Human
gcacaaggagcaguguaugaaa

SEQ ID NO: 916322 - RNA, 22 nt, Human
acugugaacggacugaagccca

SEQ ID NO: 916323 - RNA, 22 nt, Human
uuaggaaaauggaguccuuuua

SEQ ID NO: 916324 - RNA, 22 nt, Human
agguuuaucucauagaaagaau

SEQ ID NO: 916325 - RNA, 20 nt, Human
ccuuuagaaacucauaugua

SEQ ID NO: 916326 - RNA, 22 nt, Human
cauuugcauaugaagaaguaag

SEQ ID NO: 916327 - RNA, 22 nt, Human
acucugggccccagguggagcu

SEQ ID NO: 916328 - RNA, 22 nt, Human
cuggguuccauguagccaagag

SEQ ID NO: 916329 - RNA, 22 nt, Human
agauucauuguggauauuuucu

SEQ ID NO: 916330 - RNA, 22 nt, Human
agucuugucuugcaagggcuga

SEQ ID NO: 916331 - RNA, 22 nt, Human
cuggcuggccaugcagcgccag

SEQ ID NO: 916332 - RNA, 22 nt, Human
uuuguacaggugcaggcauuug

SEQ ID NO: 916333 - RNA, 22 nt, Human
ccugcagagcaggagaggcauc

SEQ ID NO: 916334 - RNA, 22 nt, Human
uguucccaagauaagauuauga

SEQ ID NO: 916335 - RNA, 22 nt, Human
uggacagguuugggugccuguu

SEQ ID NO: 916336 - RNA, 22 nt, Human
acaccccaccaguaacugaggg

SEQ ID NO: 916337 - RNA, 22 nt, Human
ugaugaaugucauacauaauga

SEQ ID NO: 916338 - RNA, 22 nt, Human
ggaaagagggacccagcuuggu

SEQ ID NO: 916339 - RNA, 22 nt, Human
cucuuagaaacuauagagauua

SEQ ID NO: 916340 - RNA, 22 nt, Human
aauucugauuagaugccuuugu

SEQ ID NO: 916341 - RNA, 22 nt, Human
gcaaacaucuuagccauagagu

SEQ ID NO: 916342 - RNA, 22 nt, Human
acagugugggacauuaggaaau

SEQ ID NO: 916343 - RNA, 22 nt, Human
cugaaugaaaucaaggacugag

SEQ ID NO: 916344 - RNA, 22 nt, Human
aacugauaauggacacauaaaa

SEQ ID NO: 916345 - RNA, 22 nt, Human
auuacucugucugccucugacc

SEQ ID NO: 916346 - RNA, 22 nt, Human
gccuggggucucugacucacag

SEQ ID NO: 916347 - RNA, 22 nt, Human
gucccagcuucccacuagcagc

SEQ ID NO: 916348 - RNA, 22 nt, Human
caagacauugauuuuguacaga

SEQ ID NO: 916349 - RNA, 22 nt, Human
ggcuccugauaggagaaugcgg

SEQ ID NO: 916350 - RNA, 20 nt, Human
cucagugcuuucauugccuc

SEQ ID NO: 916351 - RNA, 22 nt, Human
cagcagccuggccccuccucgg

SEQ ID NO: 916352 - RNA, 22 nt, Human
ucuuuccucugagcuccuguag

SEQ ID NO: 916353 - RNA, 22 nt, Human
aagcagcacagcaaugacucua

SEQ ID NO: 916354 - RNA, 22 nt, Human
cuggcauuuagacccacagcaa

SEQ ID NO: 916355 - RNA, 22 nt, Human
ggaaguguuugugcagauggcc

SEQ ID NO: 916356 - RNA, 22 nt, Human
cauugagaggcugccugccuga

SEQ ID NO: 916357 - RNA, 19 nt, Human
uagcagagaugacuccagc

SEQ ID NO: 916358 - RNA, 22 nt, Human
cuaggaagcugugcggacccug

SEQ ID NO: 916359 - RNA, 22 nt, Human
ucuucaggcucuggcugccuuu

SEQ ID NO: 916360 - RNA, 22 nt, Human
cccaggaagggaugccaaggaa

SEQ ID NO: 916361 - RNA, 22 nt, Human
uauuaacaugaacugacuuuuc

SEQ ID NO: 916362 - RNA, 22 nt, Human
acaguuauuuacugcauaaacu

SEQ ID NO: 916363 - RNA, 22 nt, Human
uggcuccaaaaacaaaugacau

SEQ ID NO: 916364 - RNA, 22 nt, Human
uccugggccaagggcugugagg

SEQ ID NO: 916365 - RNA, 21 nt, Human
agcagacagcccaagaaaauc

SEQ ID NO: 916366 - RNA, 22 nt, Human
cagcacagcugaggggcugucu

SEQ ID NO: 916367 - RNA, 19 nt, Human
ucugacacuuacacacccc

SEQ ID NO: 916368 - RNA, 22 nt, Human
caugugugagugagcagucuuc

SEQ ID NO: 916369 - RNA, 22 nt, Human
aaaguuuauuuucccugguuag

SEQ ID NO: 916370 - RNA, 22 nt, Human
aguucuauaauuaaaaugaagg

SEQ ID NO: 916371 - RNA, 21 nt, Human
auucuagacaacacugaaauc

SEQ ID NO: 916372 - RNA, 22 nt, Human
uuugagguuagcuagcagauca

SEQ ID NO: 916373 - RNA, 22 nt, Human
gaaaugucauugccuucagccc

SEQ ID NO: 916374 - RNA, 22 nt, Human
uguccagcugaaggcagccuca

SEQ ID NO: 916375 - RNA, 22 nt, Human
acaaauuauagaaaauugagcu

SEQ ID NO: 916376 - RNA, 22 nt, Human
aguuaacauuugagcuaaaagg

SEQ ID NO: 916377 - RNA, 22 nt, Human
ccuggggaaaagcaggcauuua

SEQ ID NO: 916378 - RNA, 22 nt, Human
cuucaaauucgaggaguagaug

SEQ ID NO: 916379 - RNA, 19 nt, Human
acaugcauauggacaguug

SEQ ID NO: 916380 - RNA, 22 nt, Human
gaccugcuccacgacaaguggu

SEQ ID NO: 916381 - RNA, 22 nt, Human
auguucugaaucaagcaacucu

SEQ ID NO: 916382 - RNA, 22 nt, Human
acagaugauuuuuaugaaaaca

SEQ ID NO: 916383 - RNA, 22 nt, Human
ucugggugaugaaaugcacugu

SEQ ID NO: 916384 - RNA, 22 nt, Human
uuauucacucauuaaagcagga

SEQ ID NO: 916385 - RNA, 22 nt, Human
gugagggcagcuuggucagugu

SEQ ID NO: 916386 - RNA, 22 nt, Human
uacaacugcacaucugaaucac

SEQ ID NO: 916387 - RNA, 22 nt, Human
cugcucuaggggcagggcccuu

SEQ ID NO: 916388 - RNA, 22 nt, Human
ucacagcaggguaacaggaaga

SEQ ID NO: 916389 - RNA, 22 nt, Human
ucaguguuuuaacugucuuuua

SEQ ID NO: 916390 - RNA, 23 nt, Human
gacaaagcacuugaaauguguac

SEQ ID NO: 916391 - RNA, 22 nt, Human
cagagguguuggugaauggaga

SEQ ID NO: 916392 - RNA, 22 nt, Human
caaugacacucugcacagugcu

SEQ ID NO: 916393 - RNA, 22 nt, Human
acaguggugagugacugauagg

SEQ ID NO: 916394 - RNA, 22 nt, Human
aggacccugagcgggcaugccg

SEQ ID NO: 916395 - RNA, 22 nt, Human
cucugagggucuaaggagucac

SEQ ID NO: 916396 - RNA, 22 nt, Human
guucugggaagguggaccuguu

SEQ ID NO: 916397 - RNA, 22 nt, Human
aggcacagagaaguaaaguauc

SEQ ID NO: 916398 - RNA, 22 nt, Human
gcucagagaaguugugccuggc

SEQ ID NO: 916399 - RNA, 22 nt, Human
ugcagcugauuaaagggcagac

SEQ ID NO: 916400 - RNA, 22 nt, Human
ggcccaguguggguggauguug

SEQ ID NO: 916401 - RNA, 22 nt, Human
ucuguuggacauucaucugcag

SEQ ID NO: 916402 - RNA, 22 nt, Human
cagaagagaugaaauaguauua

SEQ ID NO: 916403 - RNA, 22 nt, Human
acugucucucuagcaguucagg

SEQ ID NO: 916404 - RNA, 22 nt, Human
uauuccagaugaaaucauucag

SEQ ID NO: 916405 - RNA, 19 nt, Human
uggcagugugggguaugaa

SEQ ID NO: 916406 - RNA, 21 nt, Human
uaaagaagaugaaugugauca

SEQ ID NO: 916407 - RNA, 22 nt, Human
ugauuaaaauuuaacuuaguua

SEQ ID NO: 916408 - RNA, 22 nt, Human
gagcaauagcaccaauuaacuc

SEQ ID NO: 916409 - RNA, 18 nt, Human
ugugugcaccugccuuga

SEQ ID NO: 916410 - RNA, 22 nt, Human
auggaacugagcuugccaaacu

SEQ ID NO: 916411 - RNA, 22 nt, Human
acugucacugugauguuagaga

SEQ ID NO: 916412 - RNA, 19 nt, Human
ugcagaagacacaguggug

SEQ ID NO: 916413 - RNA, 21 nt, Human
ugcgugugcauggccuucggg

SEQ ID NO: 916414 - RNA, 19 nt, Human
agaagcugugaaaugaagg

SEQ ID NO: 916415 - RNA, 22 nt, Human
ugugggagaaggaagcaagcug

SEQ ID NO: 916416 - RNA, 22 nt, Human
uacacagaaauuguguagggau

SEQ ID NO: 916417 - RNA, 22 nt, Human
ccacccugagccgcaagagcag

SEQ ID NO: 916418 - RNA, 19 nt, Human
agauaagaguugacugugg

SEQ ID NO: 916419 - RNA, 22 nt, Human
gcucuagguuccuagccaaguc

SEQ ID NO: 916420 - RNA, 22 nt, Human
uggcugagaccaucagggugua

SEQ ID NO: 916421 - RNA, 22 nt, Human
ggcaccugguaagugcucagua

SEQ ID NO: 916422 - RNA, 22 nt, Human
ggcugagcucaggggcagcagg

SEQ ID NO: 916423 - RNA, 22 nt, Human
auguuaccuuguucuccaaaaa

SEQ ID NO: 916424 - RNA, 22 nt, Human
uagcagcuuaaguaauuagaau

SEQ ID NO: 916425 - RNA, 20 nt, Human
ugcuccaucuaaagugauua

SEQ ID NO: 916426 - RNA, 22 nt, Human
ggucaucuguguauccucagug

SEQ ID NO: 916427 - RNA, 19 nt, Human
aggucuugacucuguucuu

SEQ ID NO: 916428 - RNA, 18 nt, Human
gacacaggagagaguccc

SEQ ID NO: 916429 - RNA, 22 nt, Human
aucggggaaaagggaggcugug

SEQ ID NO: 916430 - RNA, 22 nt, Human
acuucaaaaauaagugagaggu

SEQ ID NO: 916431 - RNA, 22 nt, Human
ggcauuuauuugucucauucuu

SEQ ID NO: 916432 - RNA, 22 nt, Human
cccaggaggcagagguuggagc

SEQ ID NO: 916433 - RNA, 22 nt, Human
augucuguguuaucuguagaau

SEQ ID NO: 916434 - RNA, 22 nt, Human
ugacauuugagagagauauaca

SEQ ID NO: 916435 - RNA, 22 nt, Human
augcauauauacauacacaguc

SEQ ID NO: 916436 - RNA, 22 nt, Human
aguuuuauguucacagaaggau

SEQ ID NO: 916437 - RNA, 22 nt, Human
uuauugcuuuggaaaacacuca

SEQ ID NO: 916438 - RNA, 22 nt, Human
gacaaaaguguuuugaacaagg

SEQ ID NO: 916439 - RNA, 22 nt, Human
ucaaacugaacuaagauccaac

SEQ ID NO: 916440 - RNA, 22 nt, Human
gcugggcaacggaagagagaaa

SEQ ID NO: 916441 - RNA, 22 nt, Human
agcuucuggaagccuggcagca

SEQ ID NO: 916442 - RNA, 22 nt, Human
uggccagccacaauauaaagua

SEQ ID NO: 916443 - RNA, 22 nt, Human
cagucuagaugcuagaaaauau

SEQ ID NO: 916444 - RNA, 22 nt, Human
gaagaggcuuuccuagggcaag

SEQ ID NO: 916445 - RNA, 22 nt, Human
augccagacauuaacgacuaug

SEQ ID NO: 916446 - RNA, 22 nt, Human
gagaggcuggcagugccagguu

SEQ ID NO: 916447 - RNA, 22 nt, Human
ggguucagacuaaagcuaugca

SEQ ID NO: 916448 - RNA, 21 nt, Human
ucuagaauccuguauaagacu

SEQ ID NO: 916449 - RNA, 22 nt, Human
gagcugccuacauugccaagag

SEQ ID NO: 916450 - RNA, 22 nt, Human
ucccucagcaggaacuggccug

SEQ ID NO: 916451 - RNA, 22 nt, Human
aucugaaaagcuuuaaugagcu

SEQ ID NO: 916452 - RNA, 22 nt, Human
acauuaacaccauaaguguguu

SEQ ID NO: 916453 - RNA, 22 nt, Human
ucauaaaugcagugucauaaau

SEQ ID NO: 916454 - RNA, 22 nt, Human
ccuugaaacccugacacucugu

SEQ ID NO: 916455 - RNA, 18 nt, Human
ucucuucuuggcagucaa

SEQ ID NO: 916456 - RNA, 23 nt, Human
ugccucaguggaaugugagggug

SEQ ID NO: 916457 - RNA, 22 nt, Human
cagaaauaugugccaugccuua

SEQ ID NO: 916458 - RNA, 22 nt, Human
cacagacccagaagggaugaag

SEQ ID NO: 916459 - RNA, 22 nt, Human
uguguauauuaggacacauucu

SEQ ID NO: 916460 - RNA, 19 nt, Human
acagaaauuaguuauuuuc

SEQ ID NO: 916461 - RNA, 22 nt, Human
guagaggacauuugacaugaug

SEQ ID NO: 916462 - RNA, 17 nt, Human
gcuuuccuugccccucc

SEQ ID NO: 916463 - RNA, 22 nt, Human
agagcaggcauaaagcuuugaa

SEQ ID NO: 916464 - RNA, 22 nt, Human
uucaguuucuucccugugaaau

SEQ ID NO: 916465 - RNA, 22 nt, Human
ccaggguggaggcuggauggag

SEQ ID NO: 916466 - RNA, 22 nt, Human
aaaguucugggggagaagaacg

SEQ ID NO: 916467 - RNA, 20 nt, Human
ugguggacuuuggcauggcu

SEQ ID NO: 916468 - RNA, 22 nt, Human
uacagcaagacagaccgcucaa

SEQ ID NO: 916469 - RNA, 22 nt, Human
caaaguaacugccuuuccaauu

SEQ ID NO: 916470 - RNA, 22 nt, Human
augucuguacgaguuacaaugg

SEQ ID NO: 916471 - RNA, 19 nt, Human
uugcauuucauguuugauu

SEQ ID NO: 916472 - RNA, 22 nt, Human
ugcugccagggcucugcccaca

SEQ ID NO: 916473 - RNA, 22 nt, Human
acaguaacucuuuuacccuccu

SEQ ID NO: 916474 - RNA, 22 nt, Human
gagggcagagucuaaugaugca

SEQ ID NO: 916475 - RNA, 22 nt, Human
cagcagcaugaauucgagccac

SEQ ID NO: 916476 - RNA, 22 nt, Human
cauaacuggggacacuucucua

SEQ ID NO: 916477 - RNA, 22 nt, Human
uugcuuauagagaguuucauac

SEQ ID NO: 916478 - RNA, 22 nt, Human
cacugagaguagggcacaagug

SEQ ID NO: 916479 - RNA, 22 nt, Human
aaguacaugcuuuauucagagu

SEQ ID NO: 916480 - RNA, 22 nt, Human
ugcuauguugccuaguguaaua

SEQ ID NO: 916481 - RNA, 22 nt, Human
auuuccuauagauauggugagu

SEQ ID NO: 916482 - RNA, 22 nt, Human
guucuggaaagcaagaaagagu

SEQ ID NO: 916483 - RNA, 22 nt, Human
uguguguuggcuggagagggcu

SEQ ID NO: 916484 - RNA, 19 nt, Human
gacuaucucuggagaccau

SEQ ID NO: 916485 - RNA, 22 nt, Human
acagcauaaucacuucuuucuu

SEQ ID NO: 916486 - RNA, 22 nt, Human
ucaacaauuuugagaugagaca

SEQ ID NO: 916487 - RNA, 22 nt, Human
ugugggucuuccaaagaagggc

SEQ ID NO: 916488 - RNA, 22 nt, Human
aaguuacuggcaagggcugcag

SEQ ID NO: 916489 - RNA, 22 nt, Human
caaagcagaagguucuguggua

SEQ ID NO: 916490 - RNA, 22 nt, Human
accuauuuaugcaauuaugaaa

SEQ ID NO: 916491 - RNA, 22 nt, Human
uaggaaauuagaacuuggaaac

SEQ ID NO: 916492 - RNA, 22 nt, Human
augcacacaagcuuauguauua

SEQ ID NO: 916493 - RNA, 17 nt, Human
uguucucuucagaaauc

SEQ ID NO: 916494 - RNA, 22 nt, Human
uagcugagagcucacuugagga

SEQ ID NO: 916495 - RNA, 22 nt, Human
acauucugugagucauguuuua

SEQ ID NO: 916496 - RNA, 22 nt, Human
aggcugaggcagguggaucacc

SEQ ID NO: 916497 - RNA, 22 nt, Human
cccugccuucuuggccuuuaaa

SEQ ID NO: 916498 - RNA, 22 nt, Human
gaguggcuuuggagaaguaggg

SEQ ID NO: 916499 - RNA, 22 nt, Human
uaguguaaauaacugccuagac

SEQ ID NO: 916500 - RNA, 22 nt, Human
uaaccuacaugagaacuuuaaa

SEQ ID NO: 916501 - RNA, 22 nt, Human
uggcuucucugugugagggaga

SEQ ID NO: 916502 - RNA, 22 nt, Human
ucagaaaaugaaauggacucuc

SEQ ID NO: 916503 - RNA, 22 nt, Human
uguauaguuucuuaguuacuga

SEQ ID NO: 916504 - RNA, 22 nt, Human
gaacacauuucucugacuguag

SEQ ID NO: 916505 - RNA, 22 nt, Human
auuccaaagacagaagcagcug

SEQ ID NO: 916506 - RNA, 22 nt, Human
gccacagggaggcguuuucagg

SEQ ID NO: 916507 - RNA, 22 nt, Human
uauauuaccugccugaucuaua

SEQ ID NO: 916508 - RNA, 20 nt, Human
ccugcugugcuuuccaugga

SEQ ID NO: 916509 - RNA, 22 nt, Human
acagcaauuuugugcacaagug

SEQ ID NO: 916510 - RNA, 22 nt, Human
ccagccugaaaugccucauccu

SEQ ID NO: 916511 - RNA, 22 nt, Human
uccuggaggggacagcaugggc

SEQ ID NO: 916512 - RNA, 22 nt, Human
ccugccuuccagccuugggcuc

SEQ ID NO: 916513 - RNA, 22 nt, Human
agggagcaaagguuucaggguu

SEQ ID NO: 916514 - RNA, 22 nt, Human
gcacaaggagaauucauuagug

SEQ ID NO: 916515 - RNA, 22 nt, Human
aaaugcuuguaaauuuuccaug

SEQ ID NO: 916516 - RNA, 22 nt, Human
cauaugaagaugucuuuuugua

SEQ ID NO: 916517 - RNA, 22 nt, Human
acaugauuaaaagauuuuaaag

SEQ ID NO: 916518 - RNA, 22 nt, Human
gggaagagaccguacccuggcc

SEQ ID NO: 916519 - RNA, 22 nt, Human
ugcauuugcuggggaugugauu

SEQ ID NO: 916520 - RNA, 22 nt, Human
uggcaggaaaaagggccagagg

SEQ ID NO: 916521 - RNA, 20 nt, Human
guguuucaugugauacaaug

SEQ ID NO: 916522 - RNA, 22 nt, Human
ugcccacauucaaaaggugaug

SEQ ID NO: 916523 - RNA, 22 nt, Human
ggaagaugagaaguggggcucc

SEQ ID NO: 916524 - RNA, 22 nt, Human
gaggguggccuuuagagcccau

SEQ ID NO: 916525 - RNA, 22 nt, Human
gcuucagauucuuuucaugucu

SEQ ID NO: 916526 - RNA, 22 nt, Human
gcugugugaaaacugggccugg

SEQ ID NO: 916527 - RNA, 22 nt, Human
aaucuagagugcuaggucugug

SEQ ID NO: 916528 - RNA, 22 nt, Human
agcugacagugcauggagggac

SEQ ID NO: 916529 - RNA, 21 nt, Human
ucucugagcccaccaggaucu

SEQ ID NO: 916530 - RNA, 22 nt, Human
agccuuagaggaaaacauuagu

SEQ ID NO: 916531 - RNA, 19 nt, Human
augggaagcggccagcgga

SEQ ID NO: 916532 - RNA, 22 nt, Human
gguucacagguccgacugcugg

SEQ ID NO: 916533 - RNA, 22 nt, Human
cccucgggucgcggacugcgcu

SEQ ID NO: 916534 - RNA, 22 nt, Human
auaauuuaaauuaguaugugau

SEQ ID NO: 916535 - RNA, 22 nt, Human
gaacuuuaccauuuagguaacu

SEQ ID NO: 916536 - RNA, 22 nt, Human
aaaauggauagugcgucuucuc

SEQ ID NO: 916537 - RNA, 18 nt, Human
ucuucaucuccugagcug

SEQ ID NO: 916538 - RNA, 22 nt, Human
agacaaacccaguggcuguuuu

SEQ ID NO: 916539 - RNA, 22 nt, Human
uccuguggaagacaguguuggg

SEQ ID NO: 916540 - RNA, 22 nt, Human
cuucccacagaauucaaucagu

SEQ ID NO: 916541 - RNA, 22 nt, Human
uuucauguauuucccaaagcuu

SEQ ID NO: 916542 - RNA, 22 nt, Human
agaacauuugucaaaaagccaa

SEQ ID NO: 916543 - RNA, 22 nt, Human
ucauauuucaaaauggcuggag

SEQ ID NO: 916544 - RNA, 22 nt, Human
aaacaguuuuccuagcugucug

SEQ ID NO: 916545 - RNA, 22 nt, Human
agugucuuuauagacugacaau

SEQ ID NO: 916546 - RNA, 22 nt, Human
cagaaccugugaauguguuauc

SEQ ID NO: 916547 - RNA, 22 nt, Human
uggccagccuugucaucgcuuu

SEQ ID NO: 916548 - RNA, 22 nt, Human
ccaauccucauguucaacaacc

SEQ ID NO: 916549 - RNA, 22 nt, Human
gcaaaaugaucuucuucaggcu

SEQ ID NO: 916550 - RNA, 22 nt, Human
agggccugagaccguggcuuga

SEQ ID NO: 916551 - RNA, 22 nt, Human
uggaggucgcgcgggugcugca

SEQ ID NO: 916552 - RNA, 22 nt, Human
cuuuagaauuugauauaaucaa

SEQ ID NO: 916553 - RNA, 23 nt, Human
uaggguguuaagucagugauuga

SEQ ID NO: 916554 - RNA, 22 nt, Human
uggcagaauuuuaaagacagau

SEQ ID NO: 916555 - RNA, 22 nt, Human
cacugcuuaguugguaaaugug

SEQ ID NO: 916556 - RNA, 22 nt, Human
uaagagcucccuucuccuugca

SEQ ID NO: 916557 - RNA, 22 nt, Human
cccucucucuaucgggccccag

SEQ ID NO: 916558 - RNA, 22 nt, Human
uggaggcaguuuaagucugaga

SEQ ID NO: 916559 - RNA, 20 nt, Human
gcagcugcccccagucccug

SEQ ID NO: 916560 - RNA, 22 nt, Human
uacuaguuucuaccuuacagaa

SEQ ID NO: 916561 - RNA, 21 nt, Human
ucaaacaugaucugggucauc

SEQ ID NO: 916562 - RNA, 22 nt, Human
gcuaggaacauuuauauacaaa

SEQ ID NO: 916563 - RNA, 23 nt, Human
caugauguuaacuuuguuaugcu

SEQ ID NO: 916564 - RNA, 22 nt, Human
uuugacaguccccugauguuug

SEQ ID NO: 916565 - RNA, 22 nt, Human
auucacugucagcuugcauggg

SEQ ID NO: 916566 - RNA, 22 nt, Human
cgucacuggcgugaagugagga

SEQ ID NO: 916567 - RNA, 22 nt, Human
uacaccugcugagccuguccuc

SEQ ID NO: 916568 - RNA, 22 nt, Human
aagaggagaaaggcuggcuuug

SEQ ID NO: 916569 - RNA, 22 nt, Human
aucuguccuggagcuaggcuuc

SEQ ID NO: 916570 - RNA, 22 nt, Human
ggcaggugggaacccuccccac

SEQ ID NO: 916571 - RNA, 22 nt, Human
agcuccaggugcaagucauggu

SEQ ID NO: 916572 - RNA, 22 nt, Human
ggcuuuaucaaaugagacccug

SEQ ID NO: 916573 - RNA, 22 nt, Human
gaagaugugggaacugcugaaa

SEQ ID NO: 916574 - RNA, 22 nt, Human
ucagggcaagucucagaagguu

SEQ ID NO: 916575 - RNA, 22 nt, Human
uuccggggauaguguuucccau

SEQ ID NO: 916576 - RNA, 22 nt, Human
aguagacagacagaacacagcc

SEQ ID NO: 916577 - RNA, 22 nt, Human
ucaggcagaaaaaucacuaauu

SEQ ID NO: 916578 - RNA, 22 nt, Human
gagccaagaucgcaccacugca

SEQ ID NO: 916579 - RNA, 22 nt, Human
uuacaaguucagauuuucucau

SEQ ID NO: 916580 - RNA, 22 nt, Human
gccagccacuucccagacuggc

SEQ ID NO: 916581 - RNA, 22 nt, Human
uuggaagauuacuuaguuuucu

SEQ ID NO: 916582 - RNA, 19 nt, Human
uagcucugucuuauuccaa

SEQ ID NO: 916583 - RNA, 22 nt, Human
uucuuguuccaugaaagacaga

SEQ ID NO: 916584 - RNA, 22 nt, Human
cuccugggcugucggcgcucug

SEQ ID NO: 916585 - RNA, 22 nt, Human
gaggccugucgcuaggccucug

SEQ ID NO: 916586 - RNA, 22 nt, Human
ucacacagcugcucuguuuuau

SEQ ID NO: 916587 - RNA, 22 nt, Human
acucugcucuguauuucacugu

SEQ ID NO: 916588 - RNA, 22 nt, Human
uugacacagaucaauauucaac

SEQ ID NO: 916589 - RNA, 23 nt, Human
ggagugcaauggcgccaucucgg

SEQ ID NO: 916590 - RNA, 22 nt, Human
ccacugcuagagaugcaucccc

SEQ ID NO: 916591 - RNA, 22 nt, Human
uaaguccacaggaguuguguuc

SEQ ID NO: 916592 - RNA, 21 nt, Human
auucagaaagggaauaaacuc

SEQ ID NO: 916593 - RNA, 22 nt, Human
guuaaugugucugacacaaugg

SEQ ID NO: 916594 - RNA, 22 nt, Human
aucuuccaagcucccuggugua

SEQ ID NO: 916595 - RNA, 22 nt, Human
uguccuggccaaggccuugcuu

SEQ ID NO: 916596 - RNA, 22 nt, Human
guuuagaauucuaacuuuaagg

SEQ ID NO: 916597 - RNA, 22 nt, Human
cuggagguaauguuauuuuugu

SEQ ID NO: 916598 - RNA, 22 nt, Human
uggcagaguggaccauacucaa

SEQ ID NO: 916599 - RNA, 22 nt, Human
acuuugauaguuuaaucuagga

SEQ ID NO: 916600 - RNA, 22 nt, Human
auuggugcaauuaugagggugu

SEQ ID NO: 916601 - RNA, 22 nt, Human
ugugaaaggagccauagacagu

SEQ ID NO: 916602 - RNA, 22 nt, Human
cuggccaguuguccuggcuugg

SEQ ID NO: 916603 - RNA, 22 nt, Human
agcaggggucucugcuaaugaa

SEQ ID NO: 916604 - RNA, 22 nt, Human
cuguaggugauugcuauguuau

SEQ ID NO: 916605 - RNA, 22 nt, Human
gcucuggguagccacugccugg

SEQ ID NO: 916606 - RNA, 22 nt, Human
uuuucuauucauugucuauggu

SEQ ID NO: 916607 - RNA, 22 nt, Human
aagcugccagcugagcugaggc

SEQ ID NO: 916608 - RNA, 22 nt, Human
ugccuguggaaaggcuggugcu

SEQ ID NO: 916609 - RNA, 22 nt, Human
uugaaacuuagaaauugagcug

SEQ ID NO: 916610 - RNA, 22 nt, Human
ugcacagaucugguggcaagga

SEQ ID NO: 916611 - RNA, 22 nt, Human
ucagaggucacacagcaaguuu

SEQ ID NO: 916612 - RNA, 22 nt, Human
cuguaaauaugaagaauauaug

SEQ ID NO: 916613 - RNA, 22 nt, Human
aaucuucauaaaaaucuaguag

SEQ ID NO: 916614 - RNA, 22 nt, Human
cacaggcacgccucuggccagg

SEQ ID NO: 916615 - RNA, 22 nt, Human
gucugagacugggcacauaccu

SEQ ID NO: 916616 - RNA, 22 nt, Human
uacauacagagaugcuaguuaa

SEQ ID NO: 916617 - RNA, 22 nt, Human
ucuaggcccaggccugcggcug

SEQ ID NO: 916618 - RNA, 22 nt, Human
gcagagcauguccucaggacag

SEQ ID NO: 916619 - RNA, 22 nt, Human
auaaauagugaagggagccggu

SEQ ID NO: 916620 - RNA, 22 nt, Human
agguguccaauccugguuggau

SEQ ID NO: 916621 - RNA, 18 nt, Human
gaggaacauucaccuccu

SEQ ID NO: 916622 - RNA, 22 nt, Human
agaaucaauucacugcugcagc

SEQ ID NO: 916623 - RNA, 22 nt, Human
ggcaggugugagcuguaaagga

SEQ ID NO: 916624 - RNA, 22 nt, Human
caggggcuguggcacauggugu

SEQ ID NO: 916625 - RNA, 22 nt, Human
ggcagcucacgggcauggggug

SEQ ID NO: 916626 - RNA, 22 nt, Human
agaaugugauauagugauaugu

SEQ ID NO: 916627 - RNA, 18 nt, Human
auggcacagucuuucccu

SEQ ID NO: 916628 - RNA, 18 nt, Human
uuucauuauaaagcaggc

SEQ ID NO: 916629 - RNA, 22 nt, Human
uagaauucauguuacuguuagc

SEQ ID NO: 916630 - RNA, 22 nt, Human
ucucacugggucacagcagagg

SEQ ID NO: 916631 - RNA, 22 nt, Human
gcugaaguuuaugucuucuuuu

SEQ ID NO: 916632 - RNA, 22 nt, Human
aaacagugauguugaguguaaa

SEQ ID NO: 916633 - RNA, 22 nt, Human
gcugccugccuugccuggagga

SEQ ID NO: 916634 - RNA, 22 nt, Human
acacacaauuaguuuuaugcuu

SEQ ID NO: 916635 - RNA, 22 nt, Human
gcuacaaagugguaggagguca

SEQ ID NO: 916636 - RNA, 18 nt, Human
uacaggaagggguucucg

SEQ ID NO: 916637 - RNA, 22 nt, Human
aacaaagcccugcccaagagcu

SEQ ID NO: 916638 - RNA, 22 nt, Human
aaggcuggcaauauauuuguua

SEQ ID NO: 916639 - RNA, 22 nt, Human
ggccagcucugcacagcagcug

SEQ ID NO: 916640 - RNA, 22 nt, Human
agaccaaagaaaacacaucugg

SEQ ID NO: 916641 - RNA, 22 nt, Human
ucugucuccugccagugccucu

SEQ ID NO: 916642 - RNA, 16 nt, Human
ugguggggaggacagc

SEQ ID NO: 916643 - RNA, 22 nt, Human
ucagugugaggucuuccacccg

SEQ ID NO: 916644 - RNA, 22 nt, Human
ccucagcuugauuucugcagag

SEQ ID NO: 916645 - RNA, 22 nt, Human
gcucccaccuuugcuaucagua

SEQ ID NO: 916646 - RNA, 22 nt, Human
uuauaacuuuggauaugacaag

SEQ ID NO: 916647 - RNA, 22 nt, Human
gaaggcccugguauucuugagg

SEQ ID NO: 916648 - RNA, 22 nt, Human
ccagaggucuccugcacgggau

SEQ ID NO: 916649 - RNA, 22 nt, Human
cagaacauucuugccaguacau

SEQ ID NO: 916650 - RNA, 22 nt, Human
ggaagaaaaugggcaacaggug

SEQ ID NO: 916651 - RNA, 22 nt, Human
ccauggaguuccucuggucuau

SEQ ID NO: 916652 - RNA, 22 nt, Human
aacauucaaguucugguuuaug

SEQ ID NO: 916653 - RNA, 22 nt, Human
aagauguugcaagggacucuuc

SEQ ID NO: 916654 - RNA, 22 nt, Human
auucaaaccucauuuauuguuc

SEQ ID NO: 916655 - RNA, 22 nt, Human
uaugaggcacuucauuagcugg

SEQ ID NO: 916656 - RNA, 22 nt, Human
uagaauguagugcuucaagauu

SEQ ID NO: 916657 - RNA, 22 nt, Human
uggcuucagucucaucuuggaa

SEQ ID NO: 916658 - RNA, 22 nt, Human
gcacugggaaugcugaugggcu

SEQ ID NO: 916659 - RNA, 22 nt, Human
ccugggccugaaaacauuucuc

SEQ ID NO: 916660 - RNA, 22 nt, Human
agagggcuaacugggaagcagg

SEQ ID NO: 916661 - RNA, 22 nt, Human
agguggcugguccaggcugcag

SEQ ID NO: 916662 - RNA, 22 nt, Human
ccugggucuugguucaugcucu

SEQ ID NO: 916663 - RNA, 22 nt, Human
cugugcucuggcaucgcugcaa

SEQ ID NO: 916664 - RNA, 22 nt, Human
ccacauggagcaggaggugggg

SEQ ID NO: 916665 - RNA, 22 nt, Human
caggcuccagcuuccugcucag

SEQ ID NO: 916666 - RNA, 22 nt, Human
caguccuggggaccaggcugag

SEQ ID NO: 916667 - RNA, 22 nt, Human
cacagugagcugggcaucaguu

SEQ ID NO: 916668 - RNA, 22 nt, Human
ugccagggucagcugcagcucu

SEQ ID NO: 916669 - RNA, 22 nt, Human
uugugugacuccuagaguagag

SEQ ID NO: 916670 - RNA, 22 nt, Human
gaagccagcaguggagaaagga

SEQ ID NO: 916671 - RNA, 22 nt, Human
aacagacauauuuuuaauaugc

SEQ ID NO: 916672 - RNA, 22 nt, Human
uauauguagucagucagaguaa

SEQ ID NO: 916673 - RNA, 19 nt, Human
gugcauuccaaagcaccau

SEQ ID NO: 916674 - RNA, 22 nt, Human
cugucacuuaaauucaggcuga

SEQ ID NO: 916675 - RNA, 22 nt, Human
ucuuucuuuaucaccugauaug

SEQ ID NO: 916676 - RNA, 22 nt, Human
uucucugaucuugcuagacuga

SEQ ID NO: 916677 - RNA, 21 nt, Human
ccacagcuggucucugagccc

SEQ ID NO: 916678 - RNA, 22 nt, Human
gauuucuugauaaguaguguga

SEQ ID NO: 916679 - RNA, 22 nt, Human
ggcacagggaggcccuggugug

SEQ ID NO: 916680 - RNA, 22 nt, Human
ggccagcagucacagggucaga

SEQ ID NO: 916681 - RNA, 21 nt, Human
ucacauuucucauggguaaau

SEQ ID NO: 916682 - RNA, 22 nt, Human
guuuuauaauugcuucauaaga

SEQ ID NO: 916683 - RNA, 22 nt, Human
aaauuucuguuguuuugagcca

SEQ ID NO: 916684 - RNA, 22 nt, Human
ugaaucuggaucuaugaucaau

SEQ ID NO: 916685 - RNA, 22 nt, Human
gcauccagucuuggcuccugga

SEQ ID NO: 916686 - RNA, 22 nt, Human
cucgcaggacagugcuaggacu

SEQ ID NO: 916687 - RNA, 22 nt, Human
ugaggacauuaggaagugaagg

SEQ ID NO: 916688 - RNA, 22 nt, Human
ucagggcaccaaaaaagaugcc

SEQ ID NO: 916689 - RNA, 22 nt, Human
uccagggccacagaggaugcua

SEQ ID NO: 916690 - RNA, 22 nt, Human
acacaguaaauauguauugaau

SEQ ID NO: 916691 - RNA, 22 nt, Human
agauaagcuguuuuucaagaau

SEQ ID NO: 916692 - RNA, 22 nt, Human
ugugguugaagguuauuacuua

SEQ ID NO: 916693 - RNA, 22 nt, Human
cuuggagagggagaaaaauaac

SEQ ID NO: 916694 - RNA, 22 nt, Human
auucugaguagaaauuauucuu

SEQ ID NO: 916695 - RNA, 22 nt, Human
uucauucaucacaugcagcugg

SEQ ID NO: 916696 - RNA, 22 nt, Human
gcugccaguguggcaugaugca

SEQ ID NO: 916697 - RNA, 22 nt, Human
ggugcagaaggaagggagcugg

SEQ ID NO: 916698 - RNA, 22 nt, Human
aggaagcuccaugaaggcagag

SEQ ID NO: 916699 - RNA, 22 nt, Human
aguaguuuccauuucugaguuu

SEQ ID NO: 916700 - RNA, 22 nt, Human
ccagggcaucacauccaguguu

SEQ ID NO: 916701 - RNA, 22 nt, Human
ugguuuuugguuuaacacuaug

SEQ ID NO: 916702 - RNA, 22 nt, Human
ggacacagggcucacucucucu

SEQ ID NO: 916703 - RNA, 20 nt, Human
ugugcaugaacugagggauu

SEQ ID NO: 916704 - RNA, 22 nt, Human
gcucugcccaaagcuguggcug

SEQ ID NO: 916705 - RNA, 22 nt, Human
acagcauucccuuuggcugcuu

SEQ ID NO: 916706 - RNA, 22 nt, Human
gaucugggcuggagacugagaa

SEQ ID NO: 916707 - RNA, 22 nt, Human
caaagugagagaauggcagaaa

SEQ ID NO: 916708 - RNA, 22 nt, Human
acagugcuuggcacacaguaau

SEQ ID NO: 916709 - RNA, 22 nt, Human
cccacacauuuuucacuuaccg

SEQ ID NO: 916710 - RNA, 22 nt, Human
aagcagggcuagaccaagaaga

SEQ ID NO: 916711 - RNA, 22 nt, Human
aauuuuaugccuugcacguugg

SEQ ID NO: 916712 - RNA, 22 nt, Human
aagugugauuuguagaaugccu

SEQ ID NO: 916713 - RNA, 22 nt, Human
gaaacacuaugccaagacaggg

SEQ ID NO: 916714 - RNA, 22 nt, Human
ugucuccugggcccuggcccug

SEQ ID NO: 916715 - RNA, 22 nt, Human
aggagcagaacuguuguggagg

SEQ ID NO: 916716 - RNA, 22 nt, Human
aacaaugccacauuaaguguau

SEQ ID NO: 916717 - RNA, 22 nt, Human
uucucuucccacuuucuguauu

SEQ ID NO: 916718 - RNA, 22 nt, Human
aauuaggaauaaaugaguacuu

SEQ ID NO: 916719 - RNA, 22 nt, Human
agagcagaguggcuguagcuug

SEQ ID NO: 916720 - RNA, 22 nt, Human
ugcucgagguccccaccggcuc

SEQ ID NO: 916721 - RNA, 22 nt, Human
ugcuggggauccguaccaaccc

SEQ ID NO: 916722 - RNA, 22 nt, Human
ccagcugcgggcaucgagaguu

SEQ ID NO: 916723 - RNA, 22 nt, Human
cuguggcuucagcauucagagc

SEQ ID NO: 916724 - RNA, 22 nt, Human
ucugcauuuggaucuugagcug

SEQ ID NO: 916725 - RNA, 22 nt, Human
gagcccagucugcuccugcgcc

SEQ ID NO: 916726 - RNA, 22 nt, Human
cugcccccaggcugcauggcug

SEQ ID NO: 916727 - RNA, 22 nt, Human
uuuccaauuugguagucaucgg

SEQ ID NO: 916728 - RNA, 22 nt, Human
aacauucaaaacccaguucagu

SEQ ID NO: 916729 - RNA, 22 nt, Human
uggcagcaauuagcuagagcug

SEQ ID NO: 916730 - RNA, 22 nt, Human
cugguccuccuugccuucagau

SEQ ID NO: 916731 - RNA, 22 nt, Human
ucaaccauccggcuuauccugc

SEQ ID NO: 916732 - RNA, 22 nt, Human
augcuguggccagaguucaacu

SEQ ID NO: 916733 - RNA, 22 nt, Human
cagagcagugaggaguugugua

SEQ ID NO: 916734 - RNA, 22 nt, Human
ggcugcugggucaugaugcaga

SEQ ID NO: 916735 - RNA, 22 nt, Human
uacaauguuaaggaaagagaga

SEQ ID NO: 916736 - RNA, 22 nt, Human
gaaauuauugcuagagacugca

SEQ ID NO: 916737 - RNA, 22 nt, Human
aagaacuagucuuacagccuca

SEQ ID NO: 916738 - RNA, 22 nt, Human
aggccgaaguggaugggcaucu

SEQ ID NO: 916739 - RNA, 22 nt, Human
ugcaggcagcuaaaccauguaa

SEQ ID NO: 916740 - RNA, 22 nt, Human
accagagacucuuucuaguccu

SEQ ID NO: 916741 - RNA, 22 nt, Human
agcaguguuuugauucugggag

SEQ ID NO: 916742 - RNA, 22 nt, Human
auuugcuuagauucagcacuuu

SEQ ID NO: 916743 - RNA, 22 nt, Human
caagaauaaaauacauguugau

SEQ ID NO: 916744 - RNA, 22 nt, Human
ggcggggguccaggagccugca

SEQ ID NO: 916745 - RNA, 22 nt, Human
ggcagauauauucgugaaauag

SEQ ID NO: 916746 - RNA, 22 nt, Human
uuaaaugaugcauaucauuuag

SEQ ID NO: 916747 - RNA, 22 nt, Human
uaaugacauuguauccacagag

SEQ ID NO: 916748 - RNA, 22 nt, Human
ucuuuggcuuugccacacccaa

SEQ ID NO: 916749 - RNA, 22 nt, Human
gggaaugaggcagauagauaaa

SEQ ID NO: 916750 - RNA, 22 nt, Human
aggaggcuguggagcacuccau

SEQ ID NO: 916751 - RNA, 22 nt, Human
gaggagcugucuuugugaucuu

SEQ ID NO: 916752 - RNA, 22 nt, Human
cacuuaaauguuccuacagcag

SEQ ID NO: 916753 - RNA, 22 nt, Human
aacuguagcaaagaacagcucu

SEQ ID NO: 916754 - RNA, 22 nt, Human
cagaggguugucaggcgccuug

SEQ ID NO: 916755 - RNA, 22 nt, Human
uucuucugagagaaaaagcuca

SEQ ID NO: 916756 - RNA, 22 nt, Human
ccuccagaggguuucccaugaa

SEQ ID NO: 916757 - RNA, 22 nt, Human
gcuuacaaucauuucaguuuag

SEQ ID NO: 916758 - RNA, 22 nt, Human
ugggcagcaaagacugugugcu

SEQ ID NO: 916759 - RNA, 22 nt, Human
uuugcaguuucauugcugaaau

SEQ ID NO: 916760 - RNA, 22 nt, Human
ucucugggaguugagcagcagc

SEQ ID NO: 916761 - RNA, 22 nt, Human
ucagaggucagcagcuugccca

SEQ ID NO: 916762 - RNA, 22 nt, Human
gguguucuuaguggcacuggca

SEQ ID NO: 916763 - RNA, 20 nt, Human
aggcuggcacuccuggccag

SEQ ID NO: 916764 - RNA, 22 nt, Human
ggccugcugcugguuagauggg

SEQ ID NO: 916765 - RNA, 22 nt, Human
ucagcaaggcagaagggaggua

SEQ ID NO: 916766 - RNA, 22 nt, Human
uuguggcaugugagaacuagaa

SEQ ID NO: 916767 - RNA, 22 nt, Human
gaaacagcacguuuggagagau

SEQ ID NO: 916768 - RNA, 22 nt, Human
ucuggggagucaaagagaccug

SEQ ID NO: 916769 - RNA, 22 nt, Human
ugggcagacgggagcuugccuu

SEQ ID NO: 916770 - RNA, 22 nt, Human
ucauauuaacaaugaaacucag

SEQ ID NO: 916771 - RNA, 22 nt, Human
ugcugcaggccaggucguuguc

SEQ ID NO: 916772 - RNA, 22 nt, Human
uuuguguuuucccauacuauug

SEQ ID NO: 916773 - RNA, 18 nt, Human
aaaggcauauauagaagu

SEQ ID NO: 916774 - RNA, 22 nt, Human
agcagcagaagguuugcaccca

SEQ ID NO: 916775 - RNA, 22 nt, Human
gcugugcuuuugguagauccca

SEQ ID NO: 916776 - RNA, 22 nt, Human
ugcaggcuggggaggcagacuu

SEQ ID NO: 916777 - RNA, 22 nt, Human
uuguaacagguacuaaauaacu

SEQ ID NO: 916778 - RNA, 22 nt, Human
cccaggagaauauaauguucuu

SEQ ID NO: 916779 - RNA, 20 nt, Human
ugaagcagccuugauucugu

SEQ ID NO: 916780 - RNA, 22 nt, Human
uuuuccagauggauacuagaau

SEQ ID NO: 916781 - RNA, 22 nt, Human
acagcaguuaacgaucagacuc

SEQ ID NO: 916782 - RNA, 22 nt, Human
ucugaagauuaccagcuaaaug

SEQ ID NO: 916783 - RNA, 22 nt, Human
cagcuggcuggucagugcacaa

SEQ ID NO: 916784 - RNA, 22 nt, Human
gcuggcuggaggagggagguug

SEQ ID NO: 916785 - RNA, 22 nt, Human
guuacuagggacugagaguaaa

SEQ ID NO: 916786 - RNA, 22 nt, Human
gagaggaaugagguuaaggacu

SEQ ID NO: 916787 - RNA, 22 nt, Human
aagucuggaagucucaguuuuc

SEQ ID NO: 916788 - RNA, 22 nt, Human
gaaagacauaguugcaagaugg

SEQ ID NO: 916789 - RNA, 19 nt, Human
uuauucuuaaaguagcuua

SEQ ID NO: 916790 - RNA, 22 nt, Human
aagcccuguucuuucucucacc

SEQ ID NO: 916791 - RNA, 22 nt, Human
aagcaggugugagccagugggc

SEQ ID NO: 916792 - RNA, 22 nt, Human
uggaagaauguuugccuuauaa

SEQ ID NO: 916793 - RNA, 22 nt, Human
auaauguuuuuguauaagcaug

SEQ ID NO: 916794 - RNA, 22 nt, Human
cuguucuggagacacugaugaa

SEQ ID NO: 916795 - RNA, 22 nt, Human
ucacccaggguguuuggugucu

SEQ ID NO: 916796 - RNA, 22 nt, Human
aguaucaucuccauuucacuga

SEQ ID NO: 916797 - RNA, 22 nt, Human
ccagaggagggcucugaugagg

SEQ ID NO: 916798 - RNA, 19 nt, Human
acuaaaaaugauguuugag

SEQ ID NO: 916799 - RNA, 22 nt, Human
aauugcacauuucaguguucug

SEQ ID NO: 916800 - RNA, 22 nt, Human
cuggagaccucuccugagagug

SEQ ID NO: 916801 - RNA, 22 nt, Human
uuccuggccaagcagaguggaa

SEQ ID NO: 916802 - RNA, 23 nt, Human
auguuaccaauggaggaaauugg

SEQ ID NO: 916803 - RNA, 22 nt, Human
gaauuuaucuacguuaaguaug

SEQ ID NO: 916804 - RNA, 22 nt, Human
cauagaaacugagacaaggauu

SEQ ID NO: 916805 - RNA, 22 nt, Human
ccaguuuaagacuuaucucaau

SEQ ID NO: 916806 - RNA, 22 nt, Human
ccugggcuuccacgagcagagg

SEQ ID NO: 916807 - RNA, 22 nt, Human
gcagagcucuguucuuaucucc

SEQ ID NO: 916808 - RNA, 22 nt, Human
uucaugaaaguguaucuugugg

SEQ ID NO: 916809 - RNA, 22 nt, Human
agggccucuggaacacugaggg

SEQ ID NO: 916810 - RNA, 22 nt, Human
ugggucagagcagaccucugga

SEQ ID NO: 916811 - RNA, 22 nt, Human
cagcaucuccugugcagaggga

SEQ ID NO: 916812 - RNA, 22 nt, Human
cugcuguccaaccugcacucgc

SEQ ID NO: 916813 - RNA, 21 nt, Human
aaguuuuauguugccauuugu

SEQ ID NO: 916814 - RNA, 22 nt, Human
gacagcugugcaggagaagggg

SEQ ID NO: 916815 - RNA, 22 nt, Human
cugccuggagcauucugaaggu

SEQ ID NO: 916816 - RNA, 22 nt, Human
acuggaaaacacuacuacaugc

SEQ ID NO: 916817 - RNA, 22 nt, Human
ucuacacaagugaguggcacaa

SEQ ID NO: 916818 - RNA, 22 nt, Human
aaagguuaagguguucaagaaa

SEQ ID NO: 916819 - RNA, 22 nt, Human
ucccucagcuugucuccaugca

SEQ ID NO: 916820 - RNA, 22 nt, Human
cagcacucccaggagaaccagc

SEQ ID NO: 916821 - RNA, 22 nt, Human
auaacauuuugacaacugguga

SEQ ID NO: 916822 - RNA, 22 nt, Human
acaguguucuugauauuacagu

SEQ ID NO: 916823 - RNA, 22 nt, Human
uggcugagaaugggaugaugcc

SEQ ID NO: 916824 - RNA, 22 nt, Human
ggcuggguucugagaaagagua

SEQ ID NO: 916825 - RNA, 22 nt, Human
ugcaaaaaggcagacuggugau

SEQ ID NO: 916826 - RNA, 22 nt, Human
cccagcaucuccaggcauggcc

SEQ ID NO: 916827 - RNA, 22 nt, Human
ugcaaagugcuagcccacacca

SEQ ID NO: 916828 - RNA, 22 nt, Human
uuuggaaagugugauuucaagg

SEQ ID NO: 916829 - RNA, 21 nt, Human
ggaacuuucaugaaucuagca

SEQ ID NO: 916830 - RNA, 22 nt, Human
uuagaaccagcauuuguccugg

SEQ ID NO: 916831 - RNA, 22 nt, Human
uuugcauuguaauauuuaguuc

SEQ ID NO: 916832 - RNA, 22 nt, Human
cagcuucucagaaagcugaggu

SEQ ID NO: 916833 - RNA, 22 nt, Human
acacucacccucccacugccug

SEQ ID NO: 916834 - RNA, 22 nt, Human
ucuccaaggagcuccugugccg

SEQ ID NO: 916835 - RNA, 22 nt, Human
aaagauuaggcggcaacugggc

SEQ ID NO: 916836 - RNA, 22 nt, Human
uuccaagagucagcugauccca

SEQ ID NO: 916837 - RNA, 22 nt, Human
cagggcuccccagagagccucu

SEQ ID NO: 916838 - RNA, 23 nt, Human
aagcaaugcugagccaguucuga

SEQ ID NO: 916839 - RNA, 22 nt, Human
aagcauuucaauauaauauuca

SEQ ID NO: 916840 - RNA, 22 nt, Human
acaaguuuauuugauuagaaca

SEQ ID NO: 916841 - RNA, 22 nt, Human
uccuuggcuuucuggagcuucu

SEQ ID NO: 916842 - RNA, 20 nt, Human
gcccaagguccagaaggggg

SEQ ID NO: 916843 - RNA, 22 nt, Human
aggugggacccguggggugcga

SEQ ID NO: 916844 - RNA, 22 nt, Human
gaaauguauuugacaguccuug

SEQ ID NO: 916845 - RNA, 22 nt, Human
aagcacauuaaggaacauugaa

SEQ ID NO: 916846 - RNA, 22 nt, Human
cagcuggcgggcagagccgcca

SEQ ID NO: 916847 - RNA, 20 nt, Human
uggagcuguaaucuugucug

SEQ ID NO: 916848 - RNA, 22 nt, Human
ggucuagaucaagaacagaacu

SEQ ID NO: 916849 - RNA, 22 nt, Human
aggaaaauggaccagaguuguu

SEQ ID NO: 916850 - RNA, 22 nt, Human
aaaugucaggugguggauggcu

SEQ ID NO: 916851 - RNA, 22 nt, Human
uaaaucuuguggcaaugcuucu

SEQ ID NO: 916852 - RNA, 22 nt, Human
auaauauaauccuacuucccau

SEQ ID NO: 916853 - RNA, 20 nt, Human
agcuccugaggguuacuuuc

SEQ ID NO: 916854 - RNA, 22 nt, Human
cuuguuuuggcuaguaugaugu

SEQ ID NO: 916855 - RNA, 22 nt, Human
gcaguuuuaguggaucuggggc

SEQ ID NO: 916856 - RNA, 22 nt, Human
auuaggcaauucugggcaucuc

SEQ ID NO: 916857 - RNA, 22 nt, Human
gguaacaaggccgauagaaaca

SEQ ID NO: 916858 - RNA, 22 nt, Human
aaaggcuuguacagcagccuuc

SEQ ID NO: 916859 - RNA, 22 nt, Human
acagaugacuugucugcuguaa

SEQ ID NO: 916860 - RNA, 20 nt, Human
gagccugggaagucuaaggu

SEQ ID NO: 916861 - RNA, 22 nt, Human
gagguuuuaggcugccauuauu

SEQ ID NO: 916862 - RNA, 22 nt, Human
uuccacaaacacauccugagca

SEQ ID NO: 916863 - RNA, 22 nt, Human
ccugcuggcgcuugucugggag

SEQ ID NO: 916864 - RNA, 22 nt, Human
uaucuguuguccaugcagaaag

SEQ ID NO: 916865 - RNA, 22 nt, Human
cuggcccucgucaguuucacug

SEQ ID NO: 916866 - RNA, 22 nt, Human
acuggauugggaaaguacuuca

SEQ ID NO: 916867 - RNA, 22 nt, Human
uuguuaaaacuccauugguuug

SEQ ID NO: 916868 - RNA, 22 nt, Human
ugcgggucccagggucacaggc

SEQ ID NO: 916869 - RNA, 22 nt, Human
agcaggugacccaagcaggcug

SEQ ID NO: 916870 - RNA, 22 nt, Human
cuuaacaagcccaacuuucauu

SEQ ID NO: 916871 - RNA, 22 nt, Human
aaaggcucaugaaccaggcucg

SEQ ID NO: 916872 - RNA, 22 nt, Human
cagcugugacagccaguugaug

SEQ ID NO: 916873 - RNA, 19 nt, Human
gaacaauuuguuagcucuc

SEQ ID NO: 916874 - RNA, 22 nt, Human
uuccaugugaguacacugugau

SEQ ID NO: 916875 - RNA, 22 nt, Human
uuugucaucccuuuugaaacug

SEQ ID NO: 916876 - RNA, 22 nt, Human
ggcagugagcuggagggaagga

SEQ ID NO: 916877 - RNA, 21 nt, Human
gaggcugucugcugcuggccu

SEQ ID NO: 916878 - RNA, 22 nt, Human
aagcugugcaggaacugcuugc

SEQ ID NO: 916879 - RNA, 22 nt, Human
caaugucaugauuuuccauuag

SEQ ID NO: 916880 - RNA, 19 nt, Human
uagagcuuguuuuaggaag

SEQ ID NO: 916881 - RNA, 22 nt, Human
aagcaaaacgugcucuaggagg

SEQ ID NO: 916882 - RNA, 22 nt, Human
auguuauuucugaaagaucauu

SEQ ID NO: 916883 - RNA, 22 nt, Human
aaaaaccuuucauugcaaaugu

SEQ ID NO: 916884 - RNA, 22 nt, Human
cuguuauuucugccaggugagu

SEQ ID NO: 916885 - RNA, 22 nt, Human
acaggcagcaaaaucagccuca

SEQ ID NO: 916886 - RNA, 22 nt, Human
ugaaguuuaagguuagauaagu

SEQ ID NO: 916887 - RNA, 22 nt, Human
ccugcagaccacacucaguccu

SEQ ID NO: 916888 - RNA, 22 nt, Human
aaaguccuagcgauccacagaa

SEQ ID NO: 916889 - RNA, 22 nt, Human
cagcaagauuuuuaaagcaagg

SEQ ID NO: 916890 - RNA, 22 nt, Human
gcacacacuguuuuccucacau

SEQ ID NO: 916891 - RNA, 22 nt, Human
uggcugugugccaggcugucug

SEQ ID NO: 916892 - RNA, 22 nt, Human
guacaaauguacacuuguauaa

SEQ ID NO: 916893 - RNA, 22 nt, Human
cccuggggagcaggcgaaggag

SEQ ID NO: 916894 - RNA, 22 nt, Human
augggucaguucaguggccaac

SEQ ID NO: 916895 - RNA, 22 nt, Human
ugcccaggguggagugcagcgg

SEQ ID NO: 916896 - RNA, 22 nt, Human
cagggccugcuuccuucuuguu

SEQ ID NO: 916897 - RNA, 22 nt, Human
caucuccaggaguucuacucau

SEQ ID NO: 916898 - RNA, 22 nt, Human
ugucccagacauaaguggacau

SEQ ID NO: 916899 - RNA, 22 nt, Human
gcccuucacgaugguaucuuag

SEQ ID NO: 916900 - RNA, 22 nt, Human
ccugccugucccucaguccaca

SEQ ID NO: 916901 - RNA, 22 nt, Human
ugcucuucaccauuacaucaug

SEQ ID NO: 916902 - RNA, 22 nt, Human
auugacagaaaauuggauggca

SEQ ID NO: 916903 - RNA, 22 nt, Human
agcugaggaggaaugaugggua

SEQ ID NO: 916904 - RNA, 22 nt, Human
acuagaccaaggaauccuggaa

SEQ ID NO: 916905 - RNA, 22 nt, Human
augucuuguuaaucugaagcaa

SEQ ID NO: 916906 - RNA, 18 nt, Human
uaucuuuuccagugguau

SEQ ID NO: 916907 - RNA, 22 nt, Human
uucaaugcaagggaggucugaa

SEQ ID NO: 916908 - RNA, 22 nt, Human
ucagugcuuauauucugagccu

SEQ ID NO: 916909 - RNA, 22 nt, Human
ggcuuagauugacacugaucuc

SEQ ID NO: 916910 - RNA, 22 nt, Human
agggaucaguagggacggcagc

SEQ ID NO: 916911 - RNA, 22 nt, Human
uacccagcuucaagucaggacu

SEQ ID NO: 916912 - RNA, 22 nt, Human
ucagagcugugcuucaggaaag

SEQ ID NO: 916913 - RNA, 22 nt, Human
aagcugcagguugaauccaggu

SEQ ID NO: 916914 - RNA, 22 nt, Human
uacaaaaguaauuacgguuuuu

SEQ ID NO: 916915 - RNA, 22 nt, Human
auuuuccuagucaugugcuucu

SEQ ID NO: 916916 - RNA, 19 nt, Human
uccuucuccggccaccccg

SEQ ID NO: 916917 - RNA, 22 nt, Human
uaagguuuugagaccagaacgu

SEQ ID NO: 916918 - RNA, 22 nt, Human
uuuugacaaugcuaaucucaau

SEQ ID NO: 916919 - RNA, 22 nt, Human
cuuuccaccaacucacuucccu

SEQ ID NO: 916920 - RNA, 22 nt, Human
acagaauucucucugcagaggc

SEQ ID NO: 916921 - RNA, 22 nt, Human
caggccaccagauacaugcccc

SEQ ID NO: 916922 - RNA, 22 nt, Human
guuacaaacucaggugccaaaa

SEQ ID NO: 916923 - RNA, 22 nt, Human
acacagcuuucagucauuaucu

SEQ ID NO: 916924 - RNA, 22 nt, Human
cucacagguucugcagcucaca

SEQ ID NO: 916925 - RNA, 22 nt, Human
uuuaaacauaucuguugaggga

SEQ ID NO: 916926 - RNA, 22 nt, Human
cagugaaauaguggacaucaaa

SEQ ID NO: 916927 - RNA, 22 nt, Human
gacagcaaccucaugagaaacu

SEQ ID NO: 916928 - RNA, 22 nt, Human
cuuaggcagggcuggaagaucu

SEQ ID NO: 916929 - RNA, 22 nt, Human
ccuggcucuguccucgcgcaaa

SEQ ID NO: 916930 - RNA, 23 nt, Human
acagggcauugcuggccucgagg

SEQ ID NO: 916931 - RNA, 22 nt, Human
uugcuuagagccaaucuugauu

SEQ ID NO: 916932 - RNA, 22 nt, Human
cacucugagaaacacuaaacca

SEQ ID NO: 916933 - RNA, 22 nt, Human
uguauaguguggaaagaacagu

SEQ ID NO: 916934 - RNA, 22 nt, Human
uuccaaaacaguauggcaugug

SEQ ID NO: 916935 - RNA, 22 nt, Human
uguaugcacauggauaaguaug

SEQ ID NO: 916936 - RNA, 22 nt, Human
auucacaguauggacgaaauga

SEQ ID NO: 916937 - RNA, 22 nt, Human
ugaggaagggugugacggcacc

SEQ ID NO: 916938 - RNA, 22 nt, Human
cugugacaaaagcagccugccu

SEQ ID NO: 916939 - RNA, 22 nt, Human
ucagaaguaagguucucccaag

SEQ ID NO: 916940 - RNA, 22 nt, Human
ggagggagcagagaacccaacc

SEQ ID NO: 916941 - RNA, 19 nt, Human
aggugcaggucacagggga

SEQ ID NO: 916942 - RNA, 22 nt, Human
ugcugccacugguagucucauu

SEQ ID NO: 916943 - RNA, 22 nt, Human
acaugcauuaaaaauacuugug

SEQ ID NO: 916944 - RNA, 22 nt, Human
gagcuggaggaccaggacuggg

SEQ ID NO: 916945 - RNA, 22 nt, Human
cugcccacuauguugucauggg

SEQ ID NO: 916946 - RNA, 22 nt, Human
augucuguggcauuauauguuu

SEQ ID NO: 916947 - RNA, 22 nt, Human
gccuggguuccugcuuuuguga

SEQ ID NO: 916948 - RNA, 22 nt, Human
ucaggaagcucuugcugauucu

SEQ ID NO: 916949 - RNA, 22 nt, Human
gucucuaucauagcugaacccu

SEQ ID NO: 916950 - RNA, 22 nt, Human
gagaagggggcucgaguguccu

SEQ ID NO: 916951 - RNA, 22 nt, Human
aggucagcaugaguagaaggua

SEQ ID NO: 916952 - RNA, 22 nt, Human
uaaaagacauauaacuguagga

SEQ ID NO: 916953 - RNA, 22 nt, Human
uuuauguaguuacggacuauca

SEQ ID NO: 916954 - RNA, 22 nt, Human
cuguggcuuucucugccuccuu

SEQ ID NO: 916955 - RNA, 20 nt, Human
gugcagcacuuggggguagg

SEQ ID NO: 916956 - RNA, 17 nt, Human
aucuggcugcuucuaga

SEQ ID NO: 916957 - RNA, 22 nt, Human
aaaguugugguuugaugcaguu

SEQ ID NO: 916958 - RNA, 22 nt, Human
ggcaggcaggucuucauggccc

SEQ ID NO: 916959 - RNA, 22 nt, Human
guguuaaauuucuaauuuguga

SEQ ID NO: 916960 - RNA, 22 nt, Human
gugaaggcaaugauaagaguga

SEQ ID NO: 916961 - RNA, 22 nt, Human
agugcagcuuuuucuuuacaug

SEQ ID NO: 916962 - RNA, 22 nt, Human
ucaggaagugccuaggcuggcc

SEQ ID NO: 916963 - RNA, 22 nt, Human
agagcugggacuuggacucaau

SEQ ID NO: 916964 - RNA, 22 nt, Human
cucugcucaccagccaugugau

SEQ ID NO: 916965 - RNA, 22 nt, Human
ggccagcauggcaagaccaacu

SEQ ID NO: 916966 - RNA, 22 nt, Human
ugccaggcacgugagaguggcc

SEQ ID NO: 916967 - RNA, 22 nt, Human
gauuucaaccuaacaguaugac

SEQ ID NO: 916968 - RNA, 22 nt, Human
auagaauucuuugaaauuuaug

SEQ ID NO: 916969 - RNA, 22 nt, Human
aagucguggcaggcuugcacga

SEQ ID NO: 916970 - RNA, 20 nt, Human
gagauggacagaugaagggg

SEQ ID NO: 916971 - RNA, 22 nt, Human
cucugggugucauggccucagc

SEQ ID NO: 916972 - RNA, 22 nt, Human
gcagugcuagccucacaggguc

SEQ ID NO: 916973 - RNA, 22 nt, Human
uaacacugccaugcuggaguca

SEQ ID NO: 916974 - RNA, 22 nt, Human
gagcugggauucaucuaugucu

SEQ ID NO: 916975 - RNA, 22 nt, Human
ugagguccuagagagugugugg

SEQ ID NO: 916976 - RNA, 21 nt, Human
ugguggagugugcugagcaug

SEQ ID NO: 916977 - RNA, 22 nt, Human
cagguuuacaaaguaaagugug

SEQ ID NO: 916978 - RNA, 18 nt, Human
gcugagguggugucagag

SEQ ID NO: 916979 - RNA, 22 nt, Human
caagacaagaucuaagcaugcu

SEQ ID NO: 916980 - RNA, 22 nt, Human
ucugacaaugaacaaucuauag

SEQ ID NO: 916981 - RNA, 22 nt, Human
gccuggagugguccugcugccc

SEQ ID NO: 916982 - RNA, 22 nt, Human
augcaucaaagucugaaauuuc

SEQ ID NO: 916983 - RNA, 22 nt, Human
ugaaacaauuagaauguaauga

SEQ ID NO: 916984 - RNA, 22 nt, Human
acuuagaauauguucaagauuu

SEQ ID NO: 916985 - RNA, 22 nt, Human
ucagagaugcagugccaccuac

SEQ ID NO: 916986 - RNA, 22 nt, Human
cucugggaccacgugacucugc

SEQ ID NO: 916987 - RNA, 19 nt, Human
gagcgcagagggcagggga

SEQ ID NO: 916988 - RNA, 22 nt, Human
caugaggugauaaagcugggau

SEQ ID NO: 916989 - RNA, 22 nt, Human
acaguaauuguguacgaggaca

SEQ ID NO: 916990 - RNA, 22 nt, Human
aacuguagggaucugucuuagu

SEQ ID NO: 916991 - RNA, 22 nt, Human
cacaguacugcuuugggaugug

SEQ ID NO: 916992 - RNA, 22 nt, Human
cuccagagguccccgcggcacu

SEQ ID NO: 916993 - RNA, 22 nt, Human
aauaaacugcucaauugcauca

SEQ ID NO: 916994 - RNA, 22 nt, Human
caagauuuagccugcugccugu

SEQ ID NO: 916995 - RNA, 22 nt, Human
uaaagugucugccucagcucag

SEQ ID NO: 916996 - RNA, 22 nt, Human
ugggaaauuguauuucuauuuc

SEQ ID NO: 916997 - RNA, 22 nt, Human
gagcacccgucggugguaggaa

SEQ ID NO: 916998 - RNA, 22 nt, Human
uguuuucaagucaaggccaaau

SEQ ID NO: 916999 - RNA, 22 nt, Human
aaguaacagcaucaagucucaa

SEQ ID NO: 917000 - RNA, 21 nt, Human
caaaugcuggcuggaugagga

SEQ ID NO: 917001 - RNA, 22 nt, Human
ggggcccagcaccccuccucgc

SEQ ID NO: 917002 - RNA, 22 nt, Human
gcauuuuauaaagaguuauuug

SEQ ID NO: 917003 - RNA, 21 nt, Human
ugucugagugacugggucugc

SEQ ID NO: 917004 - RNA, 22 nt, Human
agcagagccagaauuggaccag

SEQ ID NO: 917005 - RNA, 22 nt, Human
caucaagugguucuccagguug

SEQ ID NO: 917006 - RNA, 22 nt, Human
uggagcagcacaagaaagggga

SEQ ID NO: 917007 - RNA, 22 nt, Human
gcuggggaggcagcagagaaca

SEQ ID NO: 917008 - RNA, 22 nt, Human
ccaguaacaccucgcagacucc

SEQ ID NO: 917009 - RNA, 22 nt, Human
cugugggagaagcuagcacagg

SEQ ID NO: 917010 - RNA, 22 nt, Human
uuugacagacauuuacuacauu

SEQ ID NO: 917011 - RNA, 22 nt, Human
ugcucuccggcuuccguggccu

SEQ ID NO: 917012 - RNA, 23 nt, Human
agacacauaggagcagcuauugg

SEQ ID NO: 917013 - RNA, 22 nt, Human
ugcguggcuggucccugugacc

SEQ ID NO: 917014 - RNA, 22 nt, Human
gacauucagacucacauggagg

SEQ ID NO: 917015 - RNA, 22 nt, Human
ccucccugggugacgggcuccu

SEQ ID NO: 917016 - RNA, 22 nt, Human
gaaucuaugccucauauagacc

SEQ ID NO: 917017 - RNA, 22 nt, Human
gcaugcaguaaaauucagcaac

SEQ ID NO: 917018 - RNA, 19 nt, Human
ugccugcuccuggcuucca

SEQ ID NO: 917019 - RNA, 22 nt, Human
aguauaucacauguaguaaugg

SEQ ID NO: 917020 - RNA, 22 nt, Human
agagcagugcugaagaguaggg

SEQ ID NO: 917021 - RNA, 18 nt, Human
uuucauugagugugauau

SEQ ID NO: 917022 - RNA, 22 nt, Human
uacauagcaaggaaaugacaga

SEQ ID NO: 917023 - RNA, 22 nt, Human
uaguggagaaguggagucugug

SEQ ID NO: 917024 - RNA, 22 nt, Human
gaguuuuaaccucagcucucug

SEQ ID NO: 917025 - RNA, 22 nt, Human
aaauacuguuuuauuccaugau

SEQ ID NO: 917026 - RNA, 22 nt, Human
cucuagaguacgggcuggcaug

SEQ ID NO: 917027 - RNA, 22 nt, Human
uugcagaggcaaaaaugaacuc

SEQ ID NO: 917028 - RNA, 22 nt, Human
gcccaagggcaucaaguucuac

SEQ ID NO: 917029 - RNA, 22 nt, Human
ggcacagcccucucuguggaca

SEQ ID NO: 917030 - RNA, 17 nt, Human
uuccccugaccaagccu

SEQ ID NO: 917031 - RNA, 22 nt, Human
aggugacugguuuaucuggcag

SEQ ID NO: 917032 - RNA, 22 nt, Human
auuuacacugguucucagagcu

SEQ ID NO: 917033 - RNA, 17 nt, Human
cugaggagaacagaaag

SEQ ID NO: 917034 - RNA, 22 nt, Human
agcccaugcagaccuucccaga

SEQ ID NO: 917035 - RNA, 22 nt, Human
ugauuuugucauguuucugaua

SEQ ID NO: 917036 - RNA, 22 nt, Human
caggugggauuuugcugcuuga

SEQ ID NO: 917037 - RNA, 22 nt, Human
cuucagugauauaggcuucucc

SEQ ID NO: 917038 - RNA, 22 nt, Human
ucaguuuccugguuuuaauauu

SEQ ID NO: 917039 - RNA, 22 nt, Human
ugugaggcuaccugccaggguc

SEQ ID NO: 917040 - RNA, 22 nt, Human
ugugccagccucuggcuguguc

SEQ ID NO: 917041 - RNA, 20 nt, Human
cuggcuggaaacuuagccuu

SEQ ID NO: 917042 - RNA, 17 nt, Human
ugugcgcuugugugagg

SEQ ID NO: 917043 - RNA, 22 nt, Human
agcaaagcaguggcuaagcuga

SEQ ID NO: 917044 - RNA, 22 nt, Human
cugggucuaaaaauucucagau

SEQ ID NO: 917045 - RNA, 22 nt, Human
guuucucuuaacacauaaagua

SEQ ID NO: 917046 - RNA, 23 nt, Human
acacaauagaguacuauucagcc

SEQ ID NO: 917047 - RNA, 22 nt, Human
gaaaugaacugauuaucauugc

SEQ ID NO: 917048 - RNA, 22 nt, Human
uuuauuuaaagucguguguuaa

SEQ ID NO: 917049 - RNA, 22 nt, Human
uggcccugaaggccuugagcau

SEQ ID NO: 917050 - RNA, 22 nt, Human
uggggauguaaaugaggugaua

SEQ ID NO: 917051 - RNA, 22 nt, Human
gcugccugggcaggaggcgcug

SEQ ID NO: 917052 - RNA, 22 nt, Human
auggaagugcaacuugcucauc

SEQ ID NO: 917053 - RNA, 22 nt, Human
acauguaaaagauaaauuaaca

SEQ ID NO: 917054 - RNA, 22 nt, Human
cacacauugagcagcuguuugu

SEQ ID NO: 917055 - RNA, 22 nt, Human
cccugcugcaggcuucaggagg

SEQ ID NO: 917056 - RNA, 22 nt, Human
aaucaguguggugacuugucug

SEQ ID NO: 917057 - RNA, 18 nt, Human
acacuuccugguggugug

SEQ ID NO: 917058 - RNA, 22 nt, Human
uccagccugaacuuuguccaga

SEQ ID NO: 917059 - RNA, 22 nt, Human
uuuuaaagagaugcugugcaua

SEQ ID NO: 917060 - RNA, 19 nt, Human
ggagccagcuguggaaggc

SEQ ID NO: 917061 - RNA, 22 nt, Human
gcacccaggcacuuuccuuucu

SEQ ID NO: 917062 - RNA, 22 nt, Human
aacauucugguucuaaaaaccu

SEQ ID NO: 917063 - RNA, 19 nt, Human
gggguggcuggggcuccag

SEQ ID NO: 917064 - RNA, 22 nt, Human
cauaauuuuuuuaagucagaac

SEQ ID NO: 917065 - RNA, 22 nt, Human
cugggccuaggauggaagggcc

SEQ ID NO: 917066 - RNA, 22 nt, Human
uauaggaaacauacgugacuag

SEQ ID NO: 917067 - RNA, 22 nt, Human
aguuuguaaccuaagauucagg

SEQ ID NO: 917068 - RNA, 22 nt, Human
ggcuggcuggcugguagacaag

SEQ ID NO: 917069 - RNA, 22 nt, Human
aggguggcugaguagauggaag

SEQ ID NO: 917070 - RNA, 22 nt, Human
aaccccaguaccccaggauaug

SEQ ID NO: 917071 - RNA, 22 nt, Human
gccaaauacaguagucauugcc

SEQ ID NO: 917072 - RNA, 22 nt, Human
caguguuuugagaagggcacgu

SEQ ID NO: 917073 - RNA, 22 nt, Human
gacaucaggaagacaugagagg

SEQ ID NO: 917074 - RNA, 22 nt, Human
uccuggagaauccugccaccug

SEQ ID NO: 917075 - RNA, 22 nt, Human
auacagaaguuuuccacuuauu

SEQ ID NO: 917076 - RNA, 20 nt, Human
cuuguacaugauaaagauuu

SEQ ID NO: 917077 - RNA, 22 nt, Human
aggcaacaggaaaccacaugau

SEQ ID NO: 917078 - RNA, 22 nt, Human
caugccuguaaucccagcucuu

SEQ ID NO: 917079 - RNA, 22 nt, Human
agagcccugaagcagagcuaaa

SEQ ID NO: 917080 - RNA, 22 nt, Human
cugaagcuugauaaacuauaaa

SEQ ID NO: 917081 - RNA, 22 nt, Human
ucugagagccacugaacagcaa

SEQ ID NO: 917082 - RNA, 22 nt, Human
cuuuuuaucucuuaaugauguu

SEQ ID NO: 917083 - RNA, 22 nt, Human
ucauuuaucgcugccuuuuaaa

SEQ ID NO: 917084 - RNA, 22 nt, Human
gggcugagucaucuggggccuc

SEQ ID NO: 917085 - RNA, 20 nt, Human
guccaggacccagcaggagg

SEQ ID NO: 917086 - RNA, 22 nt, Human
cauuaauuguauuuuucaaagu

SEQ ID NO: 917087 - RNA, 22 nt, Human
gacugcagugaaggcacauggg

SEQ ID NO: 917088 - RNA, 23 nt, Human
gaacccagcucugccacuugcca

SEQ ID NO: 917089 - RNA, 22 nt, Human
cuaauguaucauggcucucagc

SEQ ID NO: 917090 - RNA, 22 nt, Human
caccugcugagcugcugggggu

SEQ ID NO: 917091 - RNA, 22 nt, Human
ucaucacauaugucaugauuug

SEQ ID NO: 917092 - RNA, 17 nt, Human
caacuucacaaacuguc

SEQ ID NO: 917093 - RNA, 22 nt, Human
auaauccaugucuagaguaaag

SEQ ID NO: 917094 - RNA, 22 nt, Human
aguguacaguuuguaguacuac

SEQ ID NO: 917095 - RNA, 22 nt, Human
aacauuucauuggaagcuaugu

SEQ ID NO: 917096 - RNA, 17 nt, Human
aucaguagcauaucaga

SEQ ID NO: 917097 - RNA, 22 nt, Human
gcaggcugaaacucggggucua

SEQ ID NO: 917098 - RNA, 22 nt, Human
gaagagagcagcaaacuggagu

SEQ ID NO: 917099 - RNA, 22 nt, Human
agagcuccaggguuuuguagug

SEQ ID NO: 917100 - RNA, 22 nt, Human
ugucuucuguauucaagucuau

SEQ ID NO: 917101 - RNA, 22 nt, Human
aaacaagguccuucugugacau

SEQ ID NO: 917102 - RNA, 22 nt, Human
caugaaauguuagaauuagaca

SEQ ID NO: 917103 - RNA, 22 nt, Human
uucugcucaguaguaagagugc

SEQ ID NO: 917104 - RNA, 22 nt, Human
ccuggcagguggcgcccucggc

SEQ ID NO: 917105 - RNA, 22 nt, Human
uucuaacuccacuucccacucc

SEQ ID NO: 917106 - RNA, 22 nt, Human
ugagcugcagugagcugagaug

SEQ ID NO: 917107 - RNA, 22 nt, Human
aauuucacuguggagcacauuu

SEQ ID NO: 917108 - RNA, 22 nt, Human
aggauguguucauagcugacgc

SEQ ID NO: 917109 - RNA, 22 nt, Human
agucuauuucagucuuacuagu

SEQ ID NO: 917110 - RNA, 22 nt, Human
gucaggcugccagucuuuauug

SEQ ID NO: 917111 - RNA, 22 nt, Human
ucaguaaaugaaugaauauaug

SEQ ID NO: 917112 - RNA, 22 nt, Human
ucugucacccgagcaggcgaga

SEQ ID NO: 917113 - RNA, 19 nt, Human
gaaaggcugcugcuaccug

SEQ ID NO: 917114 - RNA, 22 nt, Human
aggaugagagauacauggagca

SEQ ID NO: 917115 - RNA, 22 nt, Human
augagguggucuucaguagguc

SEQ ID NO: 917116 - RNA, 22 nt, Human
uggacccaccccagggccugcu

SEQ ID NO: 917117 - RNA, 22 nt, Human
agucuacaguucccucaggucc

SEQ ID NO: 917118 - RNA, 18 nt, Human
agccuggaggguugaagu

SEQ ID NO: 917119 - RNA, 22 nt, Human
acagagaugucagauuggcagc

SEQ ID NO: 917120 - RNA, 22 nt, Human
uucugcauuucuaauaaguucc

SEQ ID NO: 917121 - RNA, 22 nt, Human
ugcagggccuugggucuuucuu

SEQ ID NO: 917122 - RNA, 22 nt, Human
cauuucuccgccgagaucacug

SEQ ID NO: 917123 - RNA, 22 nt, Human
gcuggagggguaauaggauggg

SEQ ID NO: 917124 - RNA, 22 nt, Human
aacugcaagcucuuuacugcua

SEQ ID NO: 917125 - RNA, 22 nt, Human
cggcagagcuuccugcucagcg

SEQ ID NO: 917126 - RNA, 22 nt, Human
agccaagcaccacuggcacucg

SEQ ID NO: 917127 - RNA, 22 nt, Human
augcaauauagggaagauagau

SEQ ID NO: 917128 - RNA, 22 nt, Human
uccaauguuccugcuuucagcu

SEQ ID NO: 917129 - RNA, 22 nt, Human
uuuugaauaauucagaaacagc

SEQ ID NO: 917130 - RNA, 22 nt, Human
ugagccagaggaggcugugugg

SEQ ID NO: 917131 - RNA, 22 nt, Human
aaggccaucuacuuacggaauu

SEQ ID NO: 917132 - RNA, 22 nt, Human
aucagcugaaaaacaggcagca

SEQ ID NO: 917133 - RNA, 22 nt, Human
acaggcaggcgggacagcccga

SEQ ID NO: 917134 - RNA, 22 nt, Human
ucccauuucacaacaaaacugg

SEQ ID NO: 917135 - RNA, 20 nt, Human
cgaggccaaggggcugggcc

SEQ ID NO: 917136 - RNA, 22 nt, Human
aacuugaaacuguuccagaaaa

SEQ ID NO: 917137 - RNA, 22 nt, Human
cucuucuugcuagacugagugc

SEQ ID NO: 917138 - RNA, 22 nt, Human
gaggggaugcagagaggcuuau

SEQ ID NO: 917139 - RNA, 23 nt, Human
ucuacaaagcugugucaggaccc

SEQ ID NO: 917140 - RNA, 22 nt, Human
caggccauuaccgcugagaccc

SEQ ID NO: 917141 - RNA, 22 nt, Human
guucuuccucauugcuuugaag

SEQ ID NO: 917142 - RNA, 22 nt, Human
caggggcugagaaggaacgucc

SEQ ID NO: 917143 - RNA, 21 nt, Human
uucuucaaagaagaaggcaca

SEQ ID NO: 917144 - RNA, 22 nt, Human
gggcagcacucauaccuauauu

SEQ ID NO: 917145 - RNA, 22 nt, Human
ccugaguggagggauucugcag

SEQ ID NO: 917146 - RNA, 22 nt, Human
ugcaggcaggggaugagcagcc

SEQ ID NO: 917147 - RNA, 22 nt, Human
ugacacccauuaucugugugac

SEQ ID NO: 917148 - RNA, 20 nt, Human
agcuccucaucacuggaggu

SEQ ID NO: 917149 - RNA, 22 nt, Human
ugcagaggaccauuguccugga

SEQ ID NO: 917150 - RNA, 22 nt, Human
auucuuauuuaaauagagucug

SEQ ID NO: 917151 - RNA, 23 nt, Human
ccaguucuccuuugaacagugac

SEQ ID NO: 917152 - RNA, 22 nt, Human
uuucaauugacuuuggaagaaa

SEQ ID NO: 917153 - RNA, 22 nt, Human
ugguccagacauuucugaggua

SEQ ID NO: 917154 - RNA, 22 nt, Human
uauauguuucuuacaaaauauu

SEQ ID NO: 917155 - RNA, 22 nt, Human
aggacaugaagaaagggcaagg

SEQ ID NO: 917156 - RNA, 21 nt, Human
gcagaggaaugguauacauaa

SEQ ID NO: 917157 - RNA, 22 nt, Human
ugucuguaaucaacugaguuuc

SEQ ID NO: 917158 - RNA, 22 nt, Human
cuguuacuucaaucuucucccg

SEQ ID NO: 917159 - RNA, 22 nt, Human
aauguucaaaagcaucagugaa

SEQ ID NO: 917160 - RNA, 22 nt, Human
acauguuagggacagaguaugu

SEQ ID NO: 917161 - RNA, 22 nt, Human
ggacacaagcuccggggcugca

SEQ ID NO: 917162 - RNA, 22 nt, Human
auauagcacuuguuuugcaugu

SEQ ID NO: 917163 - RNA, 22 nt, Human
guggcaggagggcaucacuugg

SEQ ID NO: 917164 - RNA, 18 nt, Human
ugagaggcagguagagga

SEQ ID NO: 917165 - RNA, 20 nt, Human
agggcagagggauuacaggc

SEQ ID NO: 917166 - RNA, 22 nt, Human
cagagacccuucucaguggcca

SEQ ID NO: 917167 - RNA, 22 nt, Human
uucuuaaaacuuauggacaggu

SEQ ID NO: 917168 - RNA, 22 nt, Human
uugaacaauuugguauacaaac

SEQ ID NO: 917169 - RNA, 22 nt, Human
gauuuugaauauuaaagaagag

SEQ ID NO: 917170 - RNA, 22 nt, Human
ugguggggauucccucccuggc

SEQ ID NO: 917171 - RNA, 21 nt, Human
uuucuaaguaacuggcagcau

SEQ ID NO: 917172 - RNA, 22 nt, Human
acaguaaccucuccucugaagg

SEQ ID NO: 917173 - RNA, 22 nt, Human
agagccuggggauuggcaaggg

SEQ ID NO: 917174 - RNA, 22 nt, Human
uagauucuacugucacuuaguu

SEQ ID NO: 917175 - RNA, 22 nt, Human
cuuuuuauaccgugccaguuga

SEQ ID NO: 917176 - RNA, 22 nt, Human
ugcaaauauuuccuuauagcca

SEQ ID NO: 917177 - RNA, 22 nt, Human
cauauuuuaguugcugaacagc

SEQ ID NO: 917178 - RNA, 22 nt, Human
agguaaggggcucccaaguacc

SEQ ID NO: 917179 - RNA, 22 nt, Human
agaauuuaugacaacgauagcc

SEQ ID NO: 917180 - RNA, 22 nt, Human
ucucaucuucauaucugaaaga

SEQ ID NO: 917181 - RNA, 18 nt, Human
ggcaugugagugcugagg

SEQ ID NO: 917182 - RNA, 22 nt, Human
aguuuggaagagaaaaauauuu

SEQ ID NO: 917183 - RNA, 22 nt, Human
ugccuggguugacucuuagcug

SEQ ID NO: 917184 - RNA, 22 nt, Human
uacugaaaguggucaacagugg

SEQ ID NO: 917185 - RNA, 22 nt, Human
gcacuuuauaguagaaagagca

SEQ ID NO: 917186 - RNA, 22 nt, Human
auggcaguguuucaguuuuugg

SEQ ID NO: 917187 - RNA, 22 nt, Human
ucagagucuuaacuauucagag

SEQ ID NO: 917188 - RNA, 22 nt, Human
aagaguauagcuuuaggauuga

SEQ ID NO: 917189 - RNA, 22 nt, Human
ccugaggauauucaccagcaug

SEQ ID NO: 917190 - RNA, 22 nt, Human
uggcauauaaagauguguucaa

SEQ ID NO: 917191 - RNA, 22 nt, Human
aagcucauuaauuagaagcuaa

SEQ ID NO: 917192 - RNA, 22 nt, Human
uaaugaaugagaauauaacaga

SEQ ID NO: 917193 - RNA, 22 nt, Human
cacacagguauauauauguaca

SEQ ID NO: 917194 - RNA, 22 nt, Human
agucaauuaucucuaggucauc

SEQ ID NO: 917195 - RNA, 22 nt, Human
cugagcccugccucuugucacu

SEQ ID NO: 917196 - RNA, 22 nt, Human
uccaaucagcuccuaugagaau

SEQ ID NO: 917197 - RNA, 22 nt, Human
cuccugugcaugcaucucccua

SEQ ID NO: 917198 - RNA, 22 nt, Human
cuucacagccaacaugggcaca

SEQ ID NO: 917199 - RNA, 22 nt, Human
auuugcuggugaauguauagcu

SEQ ID NO: 917200 - RNA, 22 nt, Human
aacacaaucuuccaguuugcug

SEQ ID NO: 917201 - RNA, 22 nt, Human
uguaugcaauaauaacuaugug

SEQ ID NO: 917202 - RNA, 22 nt, Human
gacagacuucauauccuuccuc

SEQ ID NO: 917203 - RNA, 22 nt, Human
aaagaauacccugggucauaaa

SEQ ID NO: 917204 - RNA, 22 nt, Human
cuucacagaugcugagagggcu

SEQ ID NO: 917205 - RNA, 22 nt, Human
cugugacaguuucucagacuuu

SEQ ID NO: 917206 - RNA, 22 nt, Human
ccaugcaugccugaaauugcug

SEQ ID NO: 917207 - RNA, 22 nt, Human
ggacgcagccgagggagcaggg

SEQ ID NO: 917208 - RNA, 22 nt, Human
cacaggaggaggccagagcgua

SEQ ID NO: 917209 - RNA, 22 nt, Human
aaaucucaguguucuaagcauu

SEQ ID NO: 917210 - RNA, 22 nt, Human
uggcaauguggcaucaacgaag

SEQ ID NO: 917211 - RNA, 22 nt, Human
cuguuaaagauaguuaagcuuc

SEQ ID NO: 917212 - RNA, 22 nt, Human
caggcagugugacgcuaggguu

SEQ ID NO: 917213 - RNA, 22 nt, Human
gcauugauucugaagugaaaug

SEQ ID NO: 917214 - RNA, 22 nt, Human
gccaggagcaugucauuguuga

SEQ ID NO: 917215 - RNA, 22 nt, Human
gucagugugaguugauuccaua

SEQ ID NO: 917216 - RNA, 21 nt, Human
agcaggugcuguuggaggaaa

SEQ ID NO: 917217 - RNA, 22 nt, Human
gccaguguuuauagcagugagg

SEQ ID NO: 917218 - RNA, 22 nt, Human
cuccugggcucauaucauucag

SEQ ID NO: 917219 - RNA, 21 nt, Human
aagcaauuaccuucccaugug

SEQ ID NO: 917220 - RNA, 22 nt, Human
auccuucaauuagaaccaauug

SEQ ID NO: 917221 - RNA, 22 nt, Human
ucucugcucugugccucaguuu

SEQ ID NO: 917222 - RNA, 22 nt, Human
cagcuccuaugaguaugauucc

SEQ ID NO: 917223 - RNA, 22 nt, Human
gagaugugauccuuugcugugu

SEQ ID NO: 917224 - RNA, 22 nt, Human
cagacaggcaggugagagcucc

SEQ ID NO: 917225 - RNA, 22 nt, Human
uguauuugggucacaagauggg

SEQ ID NO: 917226 - RNA, 22 nt, Human
accugcaggcacaggugugcgc

SEQ ID NO: 917227 - RNA, 16 nt, Human
ccuggaggucacuuca

SEQ ID NO: 917228 - RNA, 22 nt, Human
ucaugucccguugcuggcugcc

SEQ ID NO: 917229 - RNA, 22 nt, Human
agcugcccagcuaggaagaagg

SEQ ID NO: 917230 - RNA, 22 nt, Human
caguuuuaaauuuugaaugucu

SEQ ID NO: 917231 - RNA, 22 nt, Human
uccaggcugcaaggccacaggg

SEQ ID NO: 917232 - RNA, 22 nt, Human
uccacagaccaguaucugcagc

SEQ ID NO: 917233 - RNA, 22 nt, Human
guacauuuaggauucauugaaa

SEQ ID NO: 917234 - RNA, 22 nt, Human
uguauacauucucuuggguuug

SEQ ID NO: 917235 - RNA, 22 nt, Human
cucagugcuacgguuaccauau

SEQ ID NO: 917236 - RNA, 22 nt, Human
cugggauggcuccgcugcugcu

SEQ ID NO: 917237 - RNA, 22 nt, Human
ugcauguguguguauuuauaaa

SEQ ID NO: 917238 - RNA, 22 nt, Human
cauucuaugaaaacuaggcaau

SEQ ID NO: 917239 - RNA, 22 nt, Human
cucccaggccaugcucuagcca

SEQ ID NO: 917240 - RNA, 21 nt, Human
uuugcugaagauuuuaggcug

SEQ ID NO: 917241 - RNA, 22 nt, Human
ggccugagaauguaccagaucu

SEQ ID NO: 917242 - RNA, 22 nt, Human
agugucugccuauuuuucaagc

SEQ ID NO: 917243 - RNA, 22 nt, Human
ccccaggagcuuguuuuagaga

SEQ ID NO: 917244 - RNA, 22 nt, Human
uguguacauugccuuuuaaagg

SEQ ID NO: 917245 - RNA, 22 nt, Human
ccuaggcccucaaagagcauaa

SEQ ID NO: 917246 - RNA, 19 nt, Human
auacagauguauccaugau

SEQ ID NO: 917247 - RNA, 22 nt, Human
uuagauaaaaguguucaauaaa

SEQ ID NO: 917248 - RNA, 23 nt, Human
acauuucauauaaaagggaucag

SEQ ID NO: 917249 - RNA, 22 nt, Human
caauaauugcuuuccagaguua

SEQ ID NO: 917250 - RNA, 22 nt, Human
gcagaggccaucaacuuugcca

SEQ ID NO: 917251 - RNA, 22 nt, Human
auuuuacauaaggaagguuuaa

SEQ ID NO: 917252 - RNA, 22 nt, Human
agugucaaauuaaauaaucugg

SEQ ID NO: 917253 - RNA, 22 nt, Human
gaugaaauuugggcagguuaaa

SEQ ID NO: 917254 - RNA, 19 nt, Human
ucugggagagugaaucuga

SEQ ID NO: 917255 - RNA, 22 nt, Human
ucaauaacuuuguuuagcauug

SEQ ID NO: 917256 - RNA, 21 nt, Human
guuuucuuugauagagggaag

SEQ ID NO: 917257 - RNA, 22 nt, Human
ccaggcagccugcuccauucug

SEQ ID NO: 917258 - RNA, 19 nt, Human
acugcagggaggaggugug

SEQ ID NO: 917259 - RNA, 20 nt, Human
uacagaaugcaauaaaaugg

SEQ ID NO: 917260 - RNA, 22 nt, Human
gagaggccauggcugugcagug

SEQ ID NO: 917261 - RNA, 22 nt, Human
gaggcagcgggucaggaccgug

SEQ ID NO: 917262 - RNA, 22 nt, Human
gggagggccagugcucucuaga

SEQ ID NO: 917263 - RNA, 22 nt, Human
aguggcagagaccccagccagc

SEQ ID NO: 917264 - RNA, 22 nt, Human
agcagcuugggucucuccugcu

SEQ ID NO: 917265 - RNA, 22 nt, Human
ccuaggccuuacuuuccugugc

SEQ ID NO: 917266 - RNA, 21 nt, Human
gaaucuuugauuuacauggga

SEQ ID NO: 917267 - RNA, 23 nt, Human
uaacaauggacuccucuuagcua

SEQ ID NO: 917268 - RNA, 22 nt, Human
guggcucuccauugacauggaa

SEQ ID NO: 917269 - RNA, 22 nt, Human
uugcugauaccaugaauguuaa

SEQ ID NO: 917270 - RNA, 22 nt, Human
cguuguuugagauuuucagaau

SEQ ID NO: 917271 - RNA, 22 nt, Human
gcucagggucccuuggugcugg

SEQ ID NO: 917272 - RNA, 22 nt, Human
acagaccaaguuuccagcaggu

SEQ ID NO: 917273 - RNA, 22 nt, Human
aguuucucucaguauagaauag

SEQ ID NO: 917274 - RNA, 22 nt, Human
agacugaacccucugcugcacu

SEQ ID NO: 917275 - RNA, 22 nt, Human
caggaagcugaugucuagucau

SEQ ID NO: 917276 - RNA, 22 nt, Human
uugugcuccugugagaaucuag

SEQ ID NO: 917277 - RNA, 22 nt, Human
ucucccucuuugucugcuuugg

SEQ ID NO: 917278 - RNA, 22 nt, Human
ggagagucugcuggccacagug

SEQ ID NO: 917279 - RNA, 22 nt, Human
uccugggucugggugucugagg

SEQ ID NO: 917280 - RNA, 22 nt, Human
caauuugguuacuuccuuagaa

SEQ ID NO: 917281 - RNA, 22 nt, Human
gcacccuguuuauccugaguuc

SEQ ID NO: 917282 - RNA, 22 nt, Human
uuccuagcuauaaagcucuucc

SEQ ID NO: 917283 - RNA, 17 nt, Human
acacaguacuuuuuugc

SEQ ID NO: 917284 - RNA, 22 nt, Human
ggggaggaagcuggaacacggg

SEQ ID NO: 917285 - RNA, 22 nt, Human
ugcagcugagucacccagccau

SEQ ID NO: 917286 - RNA, 22 nt, Human
uagauacacacacagucaugug

SEQ ID NO: 917287 - RNA, 22 nt, Human
gaaucuaaaaacgggcuugguu

SEQ ID NO: 917288 - RNA, 22 nt, Human
uccuuggcuaguacuggccagc

SEQ ID NO: 917289 - RNA, 22 nt, Human
uuaauagauuugauuuuaaagg

SEQ ID NO: 917290 - RNA, 22 nt, Human
aaacucaagucuaugaacaagg

SEQ ID NO: 917291 - RNA, 22 nt, Human
ggaggccagggacccagucagc

SEQ ID NO: 917292 - RNA, 22 nt, Human
ucuggccacccgaggccccugc

SEQ ID NO: 917293 - RNA, 22 nt, Human
uacauguuuacuccaagucagg

SEQ ID NO: 917294 - RNA, 22 nt, Human
uacagagacuuuauggcacaaa

SEQ ID NO: 917295 - RNA, 22 nt, Human
uguauguguggauagauguaua

SEQ ID NO: 917296 - RNA, 22 nt, Human
auuuuaaggcuuauuuaaaggc

SEQ ID NO: 917297 - RNA, 22 nt, Human
uuuccucuuugugacacagcug

SEQ ID NO: 917298 - RNA, 22 nt, Human
uauuucugagaaccaacuuacc

SEQ ID NO: 917299 - RNA, 22 nt, Human
caguccugugucccuugguggg

SEQ ID NO: 917300 - RNA, 22 nt, Human
uggacugauuuucauuuuaaau

SEQ ID NO: 917301 - RNA, 20 nt, Human
uccaccaggaaggguaggga

SEQ ID NO: 917302 - RNA, 22 nt, Human
gccaggaugacuauacaacagc

SEQ ID NO: 917303 - RNA, 22 nt, Human
uugguuuaguaccugccagcgu

SEQ ID NO: 917304 - RNA, 22 nt, Human
cugugcaguggggcucuggguu

SEQ ID NO: 917305 - RNA, 17 nt, Human
gcaaaggugaggagaga

SEQ ID NO: 917306 - RNA, 22 nt, Human
acaguuaaauauuucuacuggg

SEQ ID NO: 917307 - RNA, 22 nt, Human
gcucugagaggugcagcaguaa

SEQ ID NO: 917308 - RNA, 22 nt, Human
ugguggcaacauugcuggagug

SEQ ID NO: 917309 - RNA, 22 nt, Human
auccauggcuaaguauauagag

SEQ ID NO: 917310 - RNA, 22 nt, Human
gcuggcucaagagguccagagg

SEQ ID NO: 917311 - RNA, 22 nt, Human
acaaugaaccaaauuuaccaau

SEQ ID NO: 917312 - RNA, 22 nt, Human
accagaguaauguguggaaauu

SEQ ID NO: 917313 - RNA, 22 nt, Human
uauuuccaagcugaauccaaug

SEQ ID NO: 917314 - RNA, 22 nt, Human
cagcucuuuuuugcagcagcug

SEQ ID NO: 917315 - RNA, 22 nt, Human
ccacugcuguuacuuacgcaaa

SEQ ID NO: 917316 - RNA, 22 nt, Human
acaguugggcuguagcaugcuu

SEQ ID NO: 917317 - RNA, 22 nt, Human
guuuuucuaaguagcgauauuu

SEQ ID NO: 917318 - RNA, 22 nt, Human
aaugaacaugggaguacuaaua

SEQ ID NO: 917319 - RNA, 22 nt, Human
guccucuggugaaagcauuccc

SEQ ID NO: 917320 - RNA, 22 nt, Human
cucaggcugguuuggguuguuu

SEQ ID NO: 917321 - RNA, 22 nt, Human
ucuggggagggagccacagguc

SEQ ID NO: 917322 - RNA, 22 nt, Human
ucacauucuuuauuugccaucc

SEQ ID NO: 917323 - RNA, 22 nt, Human
ucccacagggcuucucuguaca

SEQ ID NO: 917324 - RNA, 20 nt, Human
ugucuccagggcugagugga

SEQ ID NO: 917325 - RNA, 22 nt, Human
gccacaugcaauugcagcacgu

SEQ ID NO: 917326 - RNA, 23 nt, Human
acccaguuagagcccuuuaggaa

SEQ ID NO: 917327 - RNA, 22 nt, Human
cccagggucccugcucucugug

SEQ ID NO: 917328 - RNA, 18 nt, Human
ggugagggagcuggaagc

SEQ ID NO: 917329 - RNA, 22 nt, Human
aggcuggacccgacaccugccc

SEQ ID NO: 917330 - RNA, 22 nt, Human
uagaaucugaaaguggcuguga

SEQ ID NO: 917331 - RNA, 22 nt, Human
ugugccugucccgcauucuggu

SEQ ID NO: 917332 - RNA, 20 nt, Human
acucuaacucuuuacaacag

SEQ ID NO: 917333 - RNA, 22 nt, Human
cuccagacagaucuucuagcag

SEQ ID NO: 917334 - RNA, 23 nt, Human
uggaaugucugauucugcucuag

SEQ ID NO: 917335 - RNA, 22 nt, Human
uguaucaaaccaaauuaauucu

SEQ ID NO: 917336 - RNA, 22 nt, Human
aacacuggaagggacaucaagu

SEQ ID NO: 917337 - RNA, 22 nt, Human
aauauaugacuccacugcauga

SEQ ID NO: 917338 - RNA, 22 nt, Human
cgagcagagcagagacgucugg

SEQ ID NO: 917339 - RNA, 22 nt, Human
cuggcagcguguuuaugaacau

SEQ ID NO: 917340 - RNA, 22 nt, Human
aauuuuaagcauaugacugguu

SEQ ID NO: 917341 - RNA, 22 nt, Human
gucuggguuaaguccugauaau

SEQ ID NO: 917342 - RNA, 22 nt, Human
ucuucuguccuaagucaaagca

SEQ ID NO: 917343 - RNA, 22 nt, Human
ucacagagagugacuuguugcu

SEQ ID NO: 917344 - RNA, 22 nt, Human
cugagguguugaugaccuaugc

SEQ ID NO: 917345 - RNA, 22 nt, Human
ccaaggcuucccagagaugcuc

SEQ ID NO: 917346 - RNA, 22 nt, Human
uauucacaugaaaacaaauuuu

SEQ ID NO: 917347 - RNA, 22 nt, Human
cuauaaaucuacccagcauugg

SEQ ID NO: 917348 - RNA, 22 nt, Human
acagggaaggacaugacuuggc

SEQ ID NO: 917349 - RNA, 22 nt, Human
uuccaagugucagaucagauuu

SEQ ID NO: 917350 - RNA, 22 nt, Human
ugcuuccugaggccgucuucuc

SEQ ID NO: 917351 - RNA, 22 nt, Human
uuaagacacauuucucagacgg

SEQ ID NO: 917352 - RNA, 22 nt, Human
cuauauugguaauauuugcuca

SEQ ID NO: 917353 - RNA, 23 nt, Human
agucaguguaaguuuggaaugca

SEQ ID NO: 917354 - RNA, 22 nt, Human
cuguucuaucauuaaaagcuau

SEQ ID NO: 917355 - RNA, 22 nt, Human
aggcagcaauugaaaucauugu

SEQ ID NO: 917356 - RNA, 22 nt, Human
uaucuuuugaguucucaagaug

SEQ ID NO: 917357 - RNA, 22 nt, Human
cuuuacaaccuaaguugaagcu

SEQ ID NO: 917358 - RNA, 22 nt, Human
ucaggaagcugcucuggguggu

SEQ ID NO: 917359 - RNA, 22 nt, Human
ucaaaaucaaagauacuugaaa

SEQ ID NO: 917360 - RNA, 22 nt, Human
agccccuguacccugagugcuu

SEQ ID NO: 917361 - RNA, 22 nt, Human
gacuggcuuauuucacuuagca

SEQ ID NO: 917362 - RNA, 18 nt, Human
auggucucauacugggag

SEQ ID NO: 917363 - RNA, 22 nt, Human
ucuaucagaguagaaggcaacg

SEQ ID NO: 917364 - RNA, 22 nt, Human
uaacacaugucugggaugugaa

SEQ ID NO: 917365 - RNA, 22 nt, Human
uugagaacuacuuuauuauucu

SEQ ID NO: 917366 - RNA, 22 nt, Human
cugagcuggucuauggacuugg

SEQ ID NO: 917367 - RNA, 22 nt, Human
uucuaggggagaggaagaagug

SEQ ID NO: 917368 - RNA, 22 nt, Human
ggccuuagugagguccugaugc

SEQ ID NO: 917369 - RNA, 22 nt, Human
gaagaauugcccauuucugucu

SEQ ID NO: 917370 - RNA, 22 nt, Human
gaggcugcccacaccugcgccg

SEQ ID NO: 917371 - RNA, 22 nt, Human
auguggcuagugcagaugaaua

SEQ ID NO: 917372 - RNA, 22 nt, Human
uucagaaaucccucuucuaccc

SEQ ID NO: 917373 - RNA, 22 nt, Human
ugcggaggucggugcugcgggc

SEQ ID NO: 917374 - RNA, 22 nt, Human
cagugagguggaguaguuccca

SEQ ID NO: 917375 - RNA, 22 nt, Human
gauguacaaguaaaauaugugu

SEQ ID NO: 917376 - RNA, 22 nt, Human
aaugacauggagcaucuuuuca

SEQ ID NO: 917377 - RNA, 22 nt, Human
ugucacaaggccaugaaaagaa

SEQ ID NO: 917378 - RNA, 22 nt, Human
aucauagaacaccuaccuaccu

SEQ ID NO: 917379 - RNA, 22 nt, Human
ccuagagugauugagagcauca

SEQ ID NO: 917380 - RNA, 22 nt, Human
acaguguuuauguacagauugu

SEQ ID NO: 917381 - RNA, 22 nt, Human
aacaauguaaucuacucugcuc

SEQ ID NO: 917382 - RNA, 21 nt, Human
ucuugguuccguguguuugau

SEQ ID NO: 917383 - RNA, 22 nt, Human
ugacacuucuccaucaagucaa

SEQ ID NO: 917384 - RNA, 22 nt, Human
aagcugaagacacagcuccagu

SEQ ID NO: 917385 - RNA, 22 nt, Human
aaauuagucauguuguauuacu

SEQ ID NO: 917386 - RNA, 22 nt, Human
caaaaguaauguaugcucaucg

SEQ ID NO: 917387 - RNA, 22 nt, Human
ugaagaggccaaacuaucauug

SEQ ID NO: 917388 - RNA, 22 nt, Human
ugggcugaacuucaucugauga

SEQ ID NO: 917389 - RNA, 22 nt, Human
aggugucuggauggguguccuu

SEQ ID NO: 917390 - RNA, 22 nt, Human
cagggagaagucuggucagucc

SEQ ID NO: 917391 - RNA, 22 nt, Human
uuucuuuugcccuguggguuag

SEQ ID NO: 917392 - RNA, 22 nt, Human
ucagcagggagaggagaaugca

SEQ ID NO: 917393 - RNA, 22 nt, Human
ccucaggcuuacgggcaaugga

SEQ ID NO: 917394 - RNA, 22 nt, Human
ucugugccaugcccgucuacca

SEQ ID NO: 917395 - RNA, 22 nt, Human
ugugugcacaggaguguuugaa

SEQ ID NO: 917396 - RNA, 22 nt, Human
ucauugaauucuggggguugag

SEQ ID NO: 917397 - RNA, 22 nt, Human
acacuucucccaucuccuguug

SEQ ID NO: 917398 - RNA, 22 nt, Human
uugcuugacuuuguguaccugu

SEQ ID NO: 917399 - RNA, 22 nt, Human
auguacagugauaagagggcag

SEQ ID NO: 917400 - RNA, 22 nt, Human
gagagggagccagccaggaacc

SEQ ID NO: 917401 - RNA, 22 nt, Human
uaaagcaaggaauagaguaguc

SEQ ID NO: 917402 - RNA, 22 nt, Human
agcagcuugguuuuaggcaugg

SEQ ID NO: 917403 - RNA, 22 nt, Human
aaguccaaggucaccauucaca

SEQ ID NO: 917404 - RNA, 22 nt, Human
gugugcagaagacacaagacau

SEQ ID NO: 917405 - RNA, 22 nt, Human
ugcccauggaccaagcaagggg

SEQ ID NO: 917406 - RNA, 22 nt, Human
gggaaggcugccugagggaugg

SEQ ID NO: 917407 - RNA, 22 nt, Human
guuuuguugcugcagagcucaa

SEQ ID NO: 917408 - RNA, 22 nt, Human
gcuagaaaucgacuucagaauu

SEQ ID NO: 917409 - RNA, 22 nt, Human
ucugagcuggagcccaucaccu

SEQ ID NO: 917410 - RNA, 22 nt, Human
aagaguuuucucugauggcauu

SEQ ID NO: 917411 - RNA, 22 nt, Human
ccacagagacucugcaggacug

SEQ ID NO: 917412 - RNA, 22 nt, Human
caacugaaaagauucuacgcag

SEQ ID NO: 917413 - RNA, 22 nt, Human
aggcagcauuucugcuuaucca

SEQ ID NO: 917414 - RNA, 22 nt, Human
cagcagugucuccagcaucaca

SEQ ID NO: 917415 - RNA, 22 nt, Human
uagaggcugggaauuauuuuca

SEQ ID NO: 917416 - RNA, 22 nt, Human
cuggcccugccagagaucaaca

SEQ ID NO: 917417 - RNA, 22 nt, Human
ccaugcuggagucccuagcugu

SEQ ID NO: 917418 - RNA, 22 nt, Human
aaaaggcauuuugucaaccaua

SEQ ID NO: 917419 - RNA, 22 nt, Human
ggccagcuggaugugggugacg

SEQ ID NO: 917420 - RNA, 22 nt, Human
aguagaaagaaggcacugggcc

SEQ ID NO: 917421 - RNA, 22 nt, Human
uccucacagucaacacuuugag

SEQ ID NO: 917422 - RNA, 22 nt, Human
uggccaguuugcucaggcaguc

SEQ ID NO: 917423 - RNA, 22 nt, Human
gaaauggugugcugugcaauga

SEQ ID NO: 917424 - RNA, 22 nt, Human
gcagggcaaauguggaaaggag

SEQ ID NO: 917425 - RNA, 22 nt, Human
ugauuuguuacacaggugugug

SEQ ID NO: 917426 - RNA, 22 nt, Human
guggggcugaguggagccagaa

SEQ ID NO: 917427 - RNA, 22 nt, Human
acagggccaaguaaacccuacc

SEQ ID NO: 917428 - RNA, 22 nt, Human
ggagggccccuccagugggcag

SEQ ID NO: 917429 - RNA, 22 nt, Human
ugcuagggauguagcagugaag

SEQ ID NO: 917430 - RNA, 22 nt, Human
agcagcauacacaucauguuga

SEQ ID NO: 917431 - RNA, 22 nt, Human
cuggauaaauguuugcuuuaga

SEQ ID NO: 917432 - RNA, 22 nt, Human
ugcaauuuaugugcaagugguu

SEQ ID NO: 917433 - RNA, 22 nt, Human
uccaagaucuacagcaguuuag

SEQ ID NO: 917434 - RNA, 22 nt, Human
agcgcgcugucagacuggcucg

SEQ ID NO: 917435 - RNA, 23 nt, Human
agguacacauuauagaaauagac

SEQ ID NO: 917436 - RNA, 22 nt, Human
ugaggcagaaaauagcaguuca

SEQ ID NO: 917437 - RNA, 22 nt, Human
acauaauaccuaggacaguuug

SEQ ID NO: 917438 - RNA, 21 nt, Human
ugcuugggggcuucaggagcu

SEQ ID NO: 917439 - RNA, 22 nt, Human
gcuguccuggggagggagaaug

SEQ ID NO: 917440 - RNA, 22 nt, Human
ccacagaaagccugggaagugg

SEQ ID NO: 917441 - RNA, 22 nt, Human
gaggacagugugaucugccagc

SEQ ID NO: 917442 - RNA, 22 nt, Human
gcaaagacccaggugucuaucc

SEQ ID NO: 917443 - RNA, 22 nt, Human
ccagccucaucgccugccuguc

SEQ ID NO: 917444 - RNA, 22 nt, Human
auggagggaaaaguggagagcc

SEQ ID NO: 917445 - RNA, 22 nt, Human
augacacccaaaaccagugcag

SEQ ID NO: 917446 - RNA, 22 nt, Human
gcucugagcugucuugcagguc

SEQ ID NO: 917447 - RNA, 22 nt, Human
aaaugcuugcaacaucccaggu

SEQ ID NO: 917448 - RNA, 22 nt, Human
aaugaaugugauuaacuucaag

SEQ ID NO: 917449 - RNA, 22 nt, Human
ggggcaaagggagagucccuac

SEQ ID NO: 917450 - RNA, 22 nt, Human
uguuuaauugggccaacagcgg

SEQ ID NO: 917451 - RNA, 22 nt, Human
aggcugccuggcugugagugaa

SEQ ID NO: 917452 - RNA, 22 nt, Human
aauuccaagagcuuccuaagug

SEQ ID NO: 917453 - RNA, 22 nt, Human
ugaggcuugucucagauggggg

SEQ ID NO: 917454 - RNA, 22 nt, Human
cugcaugagcugucaguggagg

SEQ ID NO: 917455 - RNA, 22 nt, Human
accaggcccauguggauuacua

SEQ ID NO: 917456 - RNA, 22 nt, Human
gugguccugaguagcuuuagaa

SEQ ID NO: 917457 - RNA, 22 nt, Human
ugccugggacaugcuguggacu

SEQ ID NO: 917458 - RNA, 22 nt, Human
aggaagcugcuaagaaacaaug

SEQ ID NO: 917459 - RNA, 22 nt, Human
ggggcugaaccuggaggugguc

SEQ ID NO: 917460 - RNA, 22 nt, Human
auuguguccucauugaccuuca

SEQ ID NO: 917461 - RNA, 22 nt, Human
ucugugacauugaacaucuaca

SEQ ID NO: 917462 - RNA, 22 nt, Human
aaauaugagaguaggaguuugg

SEQ ID NO: 917463 - RNA, 21 nt, Human
caggcucugcuagaggagccu

SEQ ID NO: 917464 - RNA, 22 nt, Human
gagcaacagggcgaggagaacu

SEQ ID NO: 917465 - RNA, 22 nt, Human
uucaaaacagcuagauauugga

SEQ ID NO: 917466 - RNA, 22 nt, Human
cauguaguccuaaugcugguga

SEQ ID NO: 917467 - RNA, 22 nt, Human
auucacaaaugcugccccauuc

SEQ ID NO: 917468 - RNA, 22 nt, Human
caggcagaguuagugauuuagg

SEQ ID NO: 917469 - RNA, 22 nt, Human
uuugucuuguaaguuaaauuca

SEQ ID NO: 917470 - RNA, 22 nt, Human
aaaaguuaacuguguucaugca

SEQ ID NO: 917471 - RNA, 22 nt, Human
uucuaguuacucuuaaaugcug

SEQ ID NO: 917472 - RNA, 22 nt, Human
gaggaaggcuaaggggcuuaga

SEQ ID NO: 917473 - RNA, 22 nt, Human
uucugcugguguuuugugaggc

SEQ ID NO: 917474 - RNA, 22 nt, Human
acccaggaggcagagguugcag

SEQ ID NO: 917475 - RNA, 22 nt, Human
gccagcugcuggaacagcgcga

SEQ ID NO: 917476 - RNA, 22 nt, Human
uauugcugccaggacccuaucc

SEQ ID NO: 917477 - RNA, 22 nt, Human
aaaguuuuagaacuaggaagca

SEQ ID NO: 917478 - RNA, 22 nt, Human
gucacaggaagcagcaggcacu

SEQ ID NO: 917479 - RNA, 22 nt, Human
uggugagauguauggaggguug

SEQ ID NO: 917480 - RNA, 22 nt, Human
ugugugcagcugaaaagcgcug

SEQ ID NO: 917481 - RNA, 22 nt, Human
agccaagggucagcugcacaga

SEQ ID NO: 917482 - RNA, 22 nt, Human
ugguauuacuucuagacacaag

SEQ ID NO: 917483 - RNA, 22 nt, Human
auuccugagacuuaucuguuuc

SEQ ID NO: 917484 - RNA, 19 nt, Human
guucaugugaggaaggaac

SEQ ID NO: 917485 - RNA, 22 nt, Human
caggaauucauagcauuguucu

SEQ ID NO: 917486 - RNA, 22 nt, Human
gaacaguauuuccaggaauccc

SEQ ID NO: 917487 - RNA, 22 nt, Human
uuggcagcucuugauggcaccc

SEQ ID NO: 917488 - RNA, 22 nt, Human
ucagggcauacucuucaagguc

SEQ ID NO: 917489 - RNA, 18 nt, Human
ggcuccagucuucagugg

SEQ ID NO: 917490 - RNA, 22 nt, Human
uuuuaaaucuccaguugacccc

SEQ ID NO: 917491 - RNA, 22 nt, Human
auaauccugcuuuuucacuauu

SEQ ID NO: 917492 - RNA, 22 nt, Human
uagcagggguagauagagugug

SEQ ID NO: 917493 - RNA, 22 nt, Human
cuuccuaaaagcuucaagagaa

SEQ ID NO: 917494 - RNA, 22 nt, Human
uuugcuuucuugauucagauua

SEQ ID NO: 917495 - RNA, 22 nt, Human
ccuccugggacaggcuggcaca

SEQ ID NO: 917496 - RNA, 22 nt, Human
agaaggcagaaaguccagguau

SEQ ID NO: 917497 - RNA, 22 nt, Human
auaaguguuagguaaacaucuu

SEQ ID NO: 917498 - RNA, 22 nt, Human
ggcggccugugggucggccuca

SEQ ID NO: 917499 - RNA, 22 nt, Human
uaaagcaauuugagcaaguucu

SEQ ID NO: 917500 - RNA, 22 nt, Human
ugcaaggcacccacucugcuuu

SEQ ID NO: 917501 - RNA, 22 nt, Human
aauaagacacacaacugucaag

SEQ ID NO: 917502 - RNA, 23 nt, Human
uggcucugagagguucagaugcu

SEQ ID NO: 917503 - RNA, 22 nt, Human
agcuggaggggccagcaggugu

SEQ ID NO: 917504 - RNA, 22 nt, Human
cccaggguggaugcaagcagca

SEQ ID NO: 917505 - RNA, 22 nt, Human
uugucucuguguggcuucccua

SEQ ID NO: 917506 - RNA, 22 nt, Human
uauauacaagguagguuuaggu

SEQ ID NO: 917507 - RNA, 22 nt, Human
ggcucugggguuggcccaucuc

SEQ ID NO: 917508 - RNA, 19 nt, Human
cccaggaagcggagguugc

SEQ ID NO: 917509 - RNA, 22 nt, Human
uggcugaggcacagcugccgcc

SEQ ID NO: 917510 - RNA, 22 nt, Human
uuuucaguuauagaaugguaga

SEQ ID NO: 917511 - RNA, 22 nt, Human
agcuuucucccugacgcuuugg

SEQ ID NO: 917512 - RNA, 22 nt, Human
uaugucaaaaaagauuauguuu

SEQ ID NO: 917513 - RNA, 21 nt, Human
cugcaaauguaaugaguuugg

SEQ ID NO: 917514 - RNA, 22 nt, Human
aacagaacuguuguucuggagg

SEQ ID NO: 917515 - RNA, 22 nt, Human
acuguggcacuaggcaccuuac

SEQ ID NO: 917516 - RNA, 22 nt, Human
ucuguccagagguccuggagac

SEQ ID NO: 917517 - RNA, 22 nt, Human
uuucacaaacugaggagacaau

SEQ ID NO: 917518 - RNA, 22 nt, Human
agcacaggaccaaggaagcugu

SEQ ID NO: 917519 - RNA, 22 nt, Human
cacagggcagguacucucagag

SEQ ID NO: 917520 - RNA, 22 nt, Human
aaagagcuggcauuuauagucu

SEQ ID NO: 917521 - RNA, 22 nt, Human
cggcagagcccugagucagccu

SEQ ID NO: 917522 - RNA, 22 nt, Human
agguggcaggaggucagagaaa

SEQ ID NO: 917523 - RNA, 22 nt, Human
cuguggcugcgccaucgaaaac

SEQ ID NO: 917524 - RNA, 22 nt, Human
acauucauggguuuuacauuau

SEQ ID NO: 917525 - RNA, 22 nt, Human
guggcagggguauuccagcuga

SEQ ID NO: 917526 - RNA, 22 nt, Human
uccuguuuaucugugugacucg

SEQ ID NO: 917527 - RNA, 20 nt, Human
uacaaguacauuauaguuau

SEQ ID NO: 917528 - RNA, 22 nt, Human
ccugucugaaucaugauuuccu

SEQ ID NO: 917529 - RNA, 22 nt, Human
gugcuuuuaacuuuugaaagga

SEQ ID NO: 917530 - RNA, 22 nt, Human
ggggcuggcucacuaagagacu

SEQ ID NO: 917531 - RNA, 22 nt, Human
cagauggagucccguggaguuc

SEQ ID NO: 917532 - RNA, 22 nt, Human
ggacuuuagcagcuggagagga

SEQ ID NO: 917533 - RNA, 22 nt, Human
ugugaaauugagaaacuuucac

SEQ ID NO: 917534 - RNA, 22 nt, Human
agcuggaaagaagguggcagcc

SEQ ID NO: 917535 - RNA, 22 nt, Human
uucauguaguguaaugucuuca

SEQ ID NO: 917536 - RNA, 23 nt, Human
ugcuccagguacagaacuccagg

SEQ ID NO: 917537 - RNA, 23 nt, Human
ucagucccaacagcuucuccugg

SEQ ID NO: 917538 - RNA, 22 nt, Human
aguagaaucccuugcaaugucc

SEQ ID NO: 917539 - RNA, 22 nt, Human
uuggcugguuucaagaaggcau

SEQ ID NO: 917540 - RNA, 22 nt, Human
cuuuguuaucuguaaaugguua

SEQ ID NO: 917541 - RNA, 22 nt, Human
gccuucugauaucucuuggcau

SEQ ID NO: 917542 - RNA, 22 nt, Human
uggagggcgcuuagauggaggg

SEQ ID NO: 917543 - RNA, 22 nt, Human
aggacuggcccugaggggaggc

SEQ ID NO: 917544 - RNA, 22 nt, Human
caggcugcaagaaaggcauuca

SEQ ID NO: 917545 - RNA, 22 nt, Human
ugucaguggaccuggagaggcc

SEQ ID NO: 917546 - RNA, 22 nt, Human
gaagcagcaaguauaggacagg

SEQ ID NO: 917547 - RNA, 22 nt, Human
cugguccucuccagcaggcauu

SEQ ID NO: 917548 - RNA, 20 nt, Human
gugguauucaguaacaguga

SEQ ID NO: 917549 - RNA, 20 nt, Human
ucaaagaagauucagcucaa

SEQ ID NO: 917550 - RNA, 22 nt, Human
gcacuagaaguacgccuuguaa

SEQ ID NO: 917551 - RNA, 22 nt, Human
cuuccccaaccccgacugugug

SEQ ID NO: 917552 - RNA, 22 nt, Human
acagagaaagugggcugaagau

SEQ ID NO: 917553 - RNA, 22 nt, Human
agacaauuuuugguuuugcaag

SEQ ID NO: 917554 - RNA, 22 nt, Human
aagucacagcuaaauagcuaag

SEQ ID NO: 917555 - RNA, 22 nt, Human
aggaaaaauaaggcagcagggc

SEQ ID NO: 917556 - RNA, 17 nt, Human
cagguacauugcuacug

SEQ ID NO: 917557 - RNA, 22 nt, Human
ccucaaguuggaaauaaaaugu

SEQ ID NO: 917558 - RNA, 22 nt, Human
aguugcuaucgugaagcacgug

SEQ ID NO: 917559 - RNA, 22 nt, Human
augaaagcacgugggaagauaa

SEQ ID NO: 917560 - RNA, 21 nt, Human
ugaggaugugcagcagcagga

SEQ ID NO: 917561 - RNA, 22 nt, Human
ccaaggagcaaguuuacaccug

SEQ ID NO: 917562 - RNA, 22 nt, Human
cuggcuccugaggcuuggcccc

SEQ ID NO: 917563 - RNA, 22 nt, Human
uuuaaauguuuaaaacucguga

SEQ ID NO: 917564 - RNA, 22 nt, Human
ugaucuuuacugcuguuuauaa

SEQ ID NO: 917565 - RNA, 22 nt, Human
acugccuuauaauaugucaaca

SEQ ID NO: 917566 - RNA, 22 nt, Human
agaguuaagacguacaugagug

SEQ ID NO: 917567 - RNA, 22 nt, Human
gugaccagccagugcugucugu

SEQ ID NO: 917568 - RNA, 22 nt, Human
gguggcagcgucuaucugacau

SEQ ID NO: 917569 - RNA, 22 nt, Human
cccuggaggcaaagguugcagu

SEQ ID NO: 917570 - RNA, 22 nt, Human
uuugaaagcaccauuugaguag

SEQ ID NO: 917571 - RNA, 22 nt, Human
cagugcuauuuggacacaggga

SEQ ID NO: 917572 - RNA, 22 nt, Human
ugucaauauguaauaacugaau

SEQ ID NO: 917573 - RNA, 20 nt, Human
gaagcagcuucauguagaca

SEQ ID NO: 917574 - RNA, 19 nt, Human
cucagagaggggcagugcc

SEQ ID NO: 917575 - RNA, 22 nt, Human
aacaguaaugugguguuggguu

SEQ ID NO: 917576 - RNA, 22 nt, Human
aggacaagacaaggaccagaga

SEQ ID NO: 917577 - RNA, 22 nt, Human
gaugugagugguagcugggauu

SEQ ID NO: 917578 - RNA, 22 nt, Human
aauuuaaggaggccuucacucu

SEQ ID NO: 917579 - RNA, 22 nt, Human
ggacugaaagcgaagaauuugu

SEQ ID NO: 917580 - RNA, 22 nt, Human
aaaugucagaagcuuuacuucu

SEQ ID NO: 917581 - RNA, 22 nt, Human
ucugagccaccugagcccaugg

SEQ ID NO: 917582 - RNA, 20 nt, Human
ucaauguaaucauaucauca

SEQ ID NO: 917583 - RNA, 22 nt, Human
gucuguacccacguccugcuag

SEQ ID NO: 917584 - RNA, 22 nt, Human
ugcagaggugugcauucuuaag

SEQ ID NO: 917585 - RNA, 22 nt, Human
uacaguucuuugaaggaucuag

SEQ ID NO: 917586 - RNA, 22 nt, Human
ugucuuaaguagauuacagccu

SEQ ID NO: 917587 - RNA, 18 nt, Human
agcauggcacaggcuccc

SEQ ID NO: 917588 - RNA, 17 nt, Human
uucugugcuuccuggcu

SEQ ID NO: 917589 - RNA, 22 nt, Human
agaggccagggacacugcucaa

SEQ ID NO: 917590 - RNA, 22 nt, Human
uccuuucugggccucagugacu

SEQ ID NO: 917591 - RNA, 22 nt, Human
agagacugcuuuauauuguacu

SEQ ID NO: 917592 - RNA, 22 nt, Human
uguggagguuuaaguaauggga

SEQ ID NO: 917593 - RNA, 22 nt, Human
cuguagccagaagcagaaggcc

SEQ ID NO: 917594 - RNA, 22 nt, Human
ucugucacaaguaauccuuuuc

SEQ ID NO: 917595 - RNA, 22 nt, Human
gcagagcugagcggcugcccgg

SEQ ID NO: 917596 - RNA, 19 nt, Human
ccucagagcuagugaacau

SEQ ID NO: 917597 - RNA, 22 nt, Human
ucucagagggaaacaugaguga

SEQ ID NO: 917598 - RNA, 22 nt, Human
uuggcauccacuuugcaaguuu

SEQ ID NO: 917599 - RNA, 22 nt, Human
uagcuguguaacaugagaaugu

SEQ ID NO: 917600 - RNA, 22 nt, Human
cagugcugcaggcgccugcggu

SEQ ID NO: 917601 - RNA, 22 nt, Human
ucucugaagauauuuauuauua

SEQ ID NO: 917602 - RNA, 22 nt, Human
ugaggaagccaaacagcuacac

SEQ ID NO: 917603 - RNA, 22 nt, Human
ucagcugcauaagucaccuugc

SEQ ID NO: 917604 - RNA, 22 nt, Human
aagaguaaaugucuaauuagga

SEQ ID NO: 917605 - RNA, 22 nt, Human
cacagggaggcagccaugcucc

SEQ ID NO: 917606 - RNA, 22 nt, Human
ccucagaaggacaagagacaaa

SEQ ID NO: 917607 - RNA, 22 nt, Human
uggugcugacaguucugagugc

SEQ ID NO: 917608 - RNA, 22 nt, Human
cugguucccagcaggaguguag

SEQ ID NO: 917609 - RNA, 22 nt, Human
auggaaguuggaaccauucaua

SEQ ID NO: 917610 - RNA, 22 nt, Human
uggggacugacagccaggccuc

SEQ ID NO: 917611 - RNA, 16 nt, Human
gacacaugggggaaaa

SEQ ID NO: 917612 - RNA, 22 nt, Human
aaggcaguaucuguagagugcu

SEQ ID NO: 917613 - RNA, 22 nt, Human
ugauucucuuguaagcuauguu

SEQ ID NO: 917614 - RNA, 22 nt, Human
uuucuucuccauggcagguccu

SEQ ID NO: 917615 - RNA, 22 nt, Human
cagugacagcaagcagugcugg

SEQ ID NO: 917616 - RNA, 22 nt, Human
uguggcugacuccuggucccca

SEQ ID NO: 917617 - RNA, 22 nt, Human
guguggucgaaguucucccgga

SEQ ID NO: 917618 - RNA, 22 nt, Human
uuagcauucucugugugcauaa

SEQ ID NO: 917619 - RNA, 21 nt, Human
ucuuuuaacaccaggaauucc

SEQ ID NO: 917620 - RNA, 22 nt, Human
ccucuggccagagaaaggccag

SEQ ID NO: 917621 - RNA, 22 nt, Human
uuauaaagauuguuauguaucu

SEQ ID NO: 917622 - RNA, 22 nt, Human
gcccagugguaaaagcaggccu

SEQ ID NO: 917623 - RNA, 22 nt, Human
ucuucugugaucuauguguuuu

SEQ ID NO: 917624 - RNA, 22 nt, Human
ccugggagagucuguggucucc

SEQ ID NO: 917625 - RNA, 22 nt, Human
gcagggcacagacagugccaag

SEQ ID NO: 917626 - RNA, 21 nt, Human
aucucacagcccagagaagcc

SEQ ID NO: 917627 - RNA, 22 nt, Human
uuuugguggugggcuuggcagc

SEQ ID NO: 917628 - RNA, 22 nt, Human
ggaauucuuaaaauggugugua

SEQ ID NO: 917629 - RNA, 22 nt, Human
gaguggcucccuggguuuggca

SEQ ID NO: 917630 - RNA, 22 nt, Human
agcugagagcugugucaagaua

SEQ ID NO: 917631 - RNA, 22 nt, Human
uauacagauuaacagauuuaaa

SEQ ID NO: 917632 - RNA, 22 nt, Human
auacaguauguaggcuuuucag

SEQ ID NO: 917633 - RNA, 22 nt, Human
cugagggccuuggcuccugccc

SEQ ID NO: 917634 - RNA, 22 nt, Human
uaagcaagugguagaaggacaa

SEQ ID NO: 917635 - RNA, 22 nt, Human
acagugacacucaggugggaug

SEQ ID NO: 917636 - RNA, 22 nt, Human
gcugaggccucagaaggcugag

SEQ ID NO: 917637 - RNA, 17 nt, Human
uuguguguaguucugau

SEQ ID NO: 917638 - RNA, 22 nt, Human
guucucagcgugggaggcagag

SEQ ID NO: 917639 - RNA, 22 nt, Human
caucaagugccuuucaccucua

SEQ ID NO: 917640 - RNA, 19 nt, Human
uugaacacuuucuucaagg

SEQ ID NO: 917641 - RNA, 22 nt, Human
ccuuuggagcaacugagagcua

SEQ ID NO: 917642 - RNA, 22 nt, Human
uccugccucacaguugaaguuu

SEQ ID NO: 917643 - RNA, 22 nt, Human
uuguauucuguuacagcaacau

SEQ ID NO: 917644 - RNA, 22 nt, Human
ucucuggguuuuuguccuguac

SEQ ID NO: 917645 - RNA, 22 nt, Human
gcauauuuucacaagcucuugg

SEQ ID NO: 917646 - RNA, 22 nt, Human
uuucccaaagccuggggugagu

SEQ ID NO: 917647 - RNA, 22 nt, Human
auuucuucagguucuucuagga

SEQ ID NO: 917648 - RNA, 22 nt, Human
gccugguggugugcucaagugg

SEQ ID NO: 917649 - RNA, 23 nt, Human
aggaaggagguccuaacaguauc

SEQ ID NO: 917650 - RNA, 22 nt, Human
gauuucagggugucuuccagcu

SEQ ID NO: 917651 - RNA, 23 nt, Human
ugaagugaaauuucacaagggac

SEQ ID NO: 917652 - RNA, 22 nt, Human
caaauaucuuuggcaaagagaa

SEQ ID NO: 917653 - RNA, 20 nt, Human
uagcagcagaaagaacuuag

SEQ ID NO: 917654 - RNA, 22 nt, Human
agguuccagggauuaggaugug

SEQ ID NO: 917655 - RNA, 22 nt, Human
cacgaauggaagggucuuggcu

SEQ ID NO: 917656 - RNA, 22 nt, Human
cgccuggaaccucuaggaccag

SEQ ID NO: 917657 - RNA, 22 nt, Human
cuuuggaacaagaagaaauggc

SEQ ID NO: 917658 - RNA, 22 nt, Human
aaagcugccaaggagaauacua

SEQ ID NO: 917659 - RNA, 22 nt, Human
aauacugaaaguauuuucaaau

SEQ ID NO: 917660 - RNA, 22 nt, Human
ucuugcagacucacaagguacu

SEQ ID NO: 917661 - RNA, 21 nt, Human
aaaucacuguccaaucuuggu

SEQ ID NO: 917662 - RNA, 22 nt, Human
gugcugaguagaaugaaugccu

SEQ ID NO: 917663 - RNA, 22 nt, Human
ugaauggucacugagcaucugu

SEQ ID NO: 917664 - RNA, 22 nt, Human
gucucuggcuuuaugcugguuu

SEQ ID NO: 917665 - RNA, 22 nt, Human
ccuuugugaauaugcagaaaau

SEQ ID NO: 917666 - RNA, 22 nt, Human
gcagcagcucugaaugggcccc

SEQ ID NO: 917667 - RNA, 22 nt, Human
ucugucacauacacuuuucagg

SEQ ID NO: 917668 - RNA, 22 nt, Human
auuuggggcucaccagggcuga

SEQ ID NO: 917669 - RNA, 22 nt, Human
cagaggucagguuggacauuau

SEQ ID NO: 917670 - RNA, 21 nt, Human
gccagagcaguacaaugaggu

SEQ ID NO: 917671 - RNA, 22 nt, Human
cacauuuaauccuuuauaagua

SEQ ID NO: 917672 - RNA, 22 nt, Human
ucagaggaggcauuuaaacaga

SEQ ID NO: 917673 - RNA, 22 nt, Human
uugccaucccuuaccucaguca

SEQ ID NO: 917674 - RNA, 22 nt, Human
gcuccaggugaauccucucacc

SEQ ID NO: 917675 - RNA, 22 nt, Human
uacuuaggugagauauuuucuu

SEQ ID NO: 917676 - RNA, 20 nt, Human
ccuggcuuugcagcaugaga

SEQ ID NO: 917677 - RNA, 22 nt, Human
gcugccugaagugucuacacug

SEQ ID NO: 917678 - RNA, 22 nt, Human
gcugguccucaagggcacagcc

SEQ ID NO: 917679 - RNA, 22 nt, Human
cuuucucaguguuaauuacuuu

SEQ ID NO: 917680 - RNA, 22 nt, Human
ccugggagguggagguugcagc

SEQ ID NO: 917681 - RNA, 22 nt, Human
uguacauuuagagcucaauaga

SEQ ID NO: 917682 - RNA, 17 nt, Human
agaggcagauacuugga

SEQ ID NO: 917683 - RNA, 22 nt, Human
gucuggaaagguauuugucuca

SEQ ID NO: 917684 - RNA, 21 nt, Human
agcuuccagagcacauuccau

SEQ ID NO: 917685 - RNA, 22 nt, Human
guucuauucauugcuccacgag

SEQ ID NO: 917686 - RNA, 22 nt, Human
caaucuauccucugauuuugua

SEQ ID NO: 917687 - RNA, 22 nt, Human
uaagauguuuugguuugauaag

SEQ ID NO: 917688 - RNA, 22 nt, Human
uacacaaugacuuaagauguca

SEQ ID NO: 917689 - RNA, 22 nt, Human
cuccugagaaauaagcaaguaa

SEQ ID NO: 917690 - RNA, 22 nt, Human
uugaguguaaggaauguggggc

SEQ ID NO: 917691 - RNA, 22 nt, Human
gugccugggcaugagcuuguug

SEQ ID NO: 917692 - RNA, 22 nt, Human
uuguaaacugcugcaggagugc

SEQ ID NO: 917693 - RNA, 22 nt, Human
gaagggugcauggagggaaguc

SEQ ID NO: 917694 - RNA, 22 nt, Human
ucuucaaugcauucucuuguuu

SEQ ID NO: 917695 - RNA, 22 nt, Human
caugcuugcugccucauuguuc

SEQ ID NO: 917696 - RNA, 22 nt, Human
cuuucacagcugugcuuaugau

SEQ ID NO: 917697 - RNA, 22 nt, Human
uuuaaacaaauaggauugccua

SEQ ID NO: 917698 - RNA, 17 nt, Human
cuguuaauucauuuccc

SEQ ID NO: 917699 - RNA, 22 nt, Human
auuucuacugugagaaacauga

SEQ ID NO: 917700 - RNA, 22 nt, Human
auuuucaucauggguuuaacau

SEQ ID NO: 917701 - RNA, 22 nt, Human
aggcuggccuauuucuuuaucg

SEQ ID NO: 917702 - RNA, 21 nt, Human
cuguccacaucacagagccuc

SEQ ID NO: 917703 - RNA, 22 nt, Human
cagaacagagccugaaucucuc

SEQ ID NO: 917704 - RNA, 23 nt, Human
aggcaagaacggguuguucaccc

SEQ ID NO: 917705 - RNA, 20 nt, Human
aguagcaguaauauggaaga

SEQ ID NO: 917706 - RNA, 22 nt, Human
ggagaagggccaauuccaugua

SEQ ID NO: 917707 - RNA, 22 nt, Human
gaggaggcacuugagcagaugu

SEQ ID NO: 917708 - RNA, 22 nt, Human
ugggccuggaguuuguccagag

SEQ ID NO: 917709 - RNA, 22 nt, Human
ccuuugugagguccuguggggg

SEQ ID NO: 917710 - RNA, 22 nt, Human
acagcagcuuccugacuguacu

SEQ ID NO: 917711 - RNA, 19 nt, Human
cuuauacagauuuucucau

SEQ ID NO: 917712 - RNA, 22 nt, Human
caaugguugauuaaaauuuagc

SEQ ID NO: 917713 - RNA, 22 nt, Human
ugaaggcagugaguuuguguuu

SEQ ID NO: 917714 - RNA, 22 nt, Human
ucccaaaguauuagcauuucaa

SEQ ID NO: 917715 - RNA, 22 nt, Human
cagggcagagggaaacuccuuu

SEQ ID NO: 917716 - RNA, 22 nt, Human
gcaccugggguacacagcuaca

SEQ ID NO: 917717 - RNA, 20 nt, Human
agagccuggaaaaagacauc

SEQ ID NO: 917718 - RNA, 22 nt, Human
agggcucagggucaccaucugu

SEQ ID NO: 917719 - RNA, 22 nt, Human
ugcagaaggaggaggaaaucca

SEQ ID NO: 917720 - RNA, 20 nt, Human
agcaagaguaaggacagcga

SEQ ID NO: 917721 - RNA, 22 nt, Human
uauugcaugugauagaggcagg

SEQ ID NO: 917722 - RNA, 22 nt, Human
guuauuaucuugaggaaucugu

SEQ ID NO: 917723 - RNA, 22 nt, Human
ucacagaagagcauuaagauga

SEQ ID NO: 917724 - RNA, 22 nt, Human
agugcgugguuuacagcuaguu

SEQ ID NO: 917725 - RNA, 22 nt, Human
agugcauguaucuacagucaca

SEQ ID NO: 917726 - RNA, 21 nt, Human
acagcuggaaauuacuugccc

SEQ ID NO: 917727 - RNA, 22 nt, Human
ucucagaguuuagagcugagcc

SEQ ID NO: 917728 - RNA, 22 nt, Human
ggagaugguggaagcuggugca

SEQ ID NO: 917729 - RNA, 22 nt, Human
cuucacagagucccugauuguu

SEQ ID NO: 917730 - RNA, 22 nt, Human
auguuauuuuggaaaauacaaa

SEQ ID NO: 917731 - RNA, 20 nt, Human
uuauuucucauucuccuacu

SEQ ID NO: 917732 - RNA, 22 nt, Human
guuaaagaagaauaguuccuuu

SEQ ID NO: 917733 - RNA, 22 nt, Human
uggaccagcuccucgggagacg

SEQ ID NO: 917734 - RNA, 22 nt, Human
gccagaagacuggagucagcug

SEQ ID NO: 917735 - RNA, 22 nt, Human
ucacaagggcccugcaguccac

SEQ ID NO: 917736 - RNA, 22 nt, Human
aauucacagcauuugcccaucu

SEQ ID NO: 917737 - RNA, 22 nt, Human
acauuucauguuuuccagagca

SEQ ID NO: 917738 - RNA, 22 nt, Human
acacuacuuuucauaaaaguaa

SEQ ID NO: 917739 - RNA, 22 nt, Human
aaugccuucaaguaucugagga

SEQ ID NO: 917740 - RNA, 22 nt, Human
gggagcugaucagguggauuca

SEQ ID NO: 917741 - RNA, 22 nt, Human
gaaaguauucacaaaguucuug

SEQ ID NO: 917742 - RNA, 22 nt, Human
aucccccucuuggauggcggca

SEQ ID NO: 917743 - RNA, 19 nt, Human
gcaggcuugggucucccca

SEQ ID NO: 917744 - RNA, 22 nt, Human
aauacugucuuucacagauauu

SEQ ID NO: 917745 - RNA, 23 nt, Human
aacacaaagcugauuccaguggc

SEQ ID NO: 917746 - RNA, 22 nt, Human
ccuggcugugugaccuuggcaa

SEQ ID NO: 917747 - RNA, 22 nt, Human
ggcuccaggagaugcugggcag

SEQ ID NO: 917748 - RNA, 21 nt, Human
caauaaacugcacauugagac

SEQ ID NO: 917749 - RNA, 21 nt, Human
aucaccagcagaagcugcaga

SEQ ID NO: 917750 - RNA, 20 nt, Human
uccagccacuuccgcugguc

SEQ ID NO: 917751 - RNA, 22 nt, Human
acauuugaaauaaacucaagug

SEQ ID NO: 917752 - RNA, 22 nt, Human
uuugcaaggcagcaggugcagu

SEQ ID NO: 917753 - RNA, 22 nt, Human
ucugggcucuuaguguacccuc

SEQ ID NO: 917754 - RNA, 22 nt, Human
uagcagaggaaauccagaguaa

SEQ ID NO: 917755 - RNA, 22 nt, Human
uucuggggccaauugccacugc

SEQ ID NO: 917756 - RNA, 22 nt, Human
accaggagggacccugguggcc

SEQ ID NO: 917757 - RNA, 22 nt, Human
gagccugggacugggggucaug

SEQ ID NO: 917758 - RNA, 23 nt, Human
aggaagagagagugccucuuucu

SEQ ID NO: 917759 - RNA, 22 nt, Human
gcugcccucucuggccccacac

SEQ ID NO: 917760 - RNA, 22 nt, Human
gaggccacagucaguguucauc

SEQ ID NO: 917761 - RNA, 22 nt, Human
ugcccaagccgagcucucuguu

SEQ ID NO: 917762 - RNA, 22 nt, Human
cugggcugcaggaguggggcaa

SEQ ID NO: 917763 - RNA, 22 nt, Human
gcucagccgaacuucagagcag

SEQ ID NO: 917764 - RNA, 22 nt, Human
cuguggaacuuagugggagaca

SEQ ID NO: 917765 - RNA, 22 nt, Human
ucagaccauccugcuguuagug

SEQ ID NO: 917766 - RNA, 22 nt, Human
uccagccaugcaugacaaucac

SEQ ID NO: 917767 - RNA, 19 nt, Human
uuuuaaguccucucuauuc

SEQ ID NO: 917768 - RNA, 22 nt, Human
ccacagggcacaagggagguug

SEQ ID NO: 917769 - RNA, 22 nt, Human
cucacuggcaagacuacaggug

SEQ ID NO: 917770 - RNA, 22 nt, Human
gccaggcagcuagcaaccccug

SEQ ID NO: 917771 - RNA, 22 nt, Human
guuauguaugggggccuuauga

SEQ ID NO: 917772 - RNA, 22 nt, Human
auaaacagcauaaaauacgcuu

SEQ ID NO: 917773 - RNA, 22 nt, Human
aacaggcuuccaggagggacga

SEQ ID NO: 917774 - RNA, 22 nt, Human
uucucaaagugugcucccugga

SEQ ID NO: 917775 - RNA, 22 nt, Human
acaacuuuaauggguuucagcu

SEQ ID NO: 917776 - RNA, 17 nt, Human
ugacaaugacaagcacu

SEQ ID NO: 917777 - RNA, 22 nt, Human
uuccuuuuacaaauagccuccu

SEQ ID NO: 917778 - RNA, 22 nt, Human
ugggccaggugcagugcuuuag

SEQ ID NO: 917779 - RNA, 22 nt, Human
ugcacacaggucuaggacaugg

SEQ ID NO: 917780 - RNA, 22 nt, Human
auguuuuaugcuucagaugagg

SEQ ID NO: 917781 - RNA, 22 nt, Human
ugggacuuguguggcaguauuu

SEQ ID NO: 917782 - RNA, 22 nt, Human
uacaaggcuucagcucagcuau

SEQ ID NO: 917783 - RNA, 22 nt, Human
agccccaggcccggacgccucu

SEQ ID NO: 917784 - RNA, 22 nt, Human
gcagggcuguggacacuuuggu

SEQ ID NO: 917785 - RNA, 22 nt, Human
gugcagcaaacuagugcgaggg

SEQ ID NO: 917786 - RNA, 22 nt, Human
uaaggcucccuuugccacuugu

SEQ ID NO: 917787 - RNA, 22 nt, Human
acccacgaagaugagcggcaug

SEQ ID NO: 917788 - RNA, 22 nt, Human
ugucuugaggcgcaguguagau

SEQ ID NO: 917789 - RNA, 22 nt, Human
aucucuucugagcaauuccugu

SEQ ID NO: 917790 - RNA, 22 nt, Human
caggaagcugccggugagcgag

SEQ ID NO: 917791 - RNA, 22 nt, Human
auugagaauauugugacagugu

SEQ ID NO: 917792 - RNA, 22 nt, Human
agggccaggaucacagccaaga

SEQ ID NO: 917793 - RNA, 22 nt, Human
gcuacaggagcugucacaugcu

SEQ ID NO: 917794 - RNA, 22 nt, Human
ugaagcaucuggucugagaauu

SEQ ID NO: 917795 - RNA, 20 nt, Human
cauugcaaaguagcagacug

SEQ ID NO: 917796 - RNA, 22 nt, Human
uugggugguggggagaguucag

SEQ ID NO: 917797 - RNA, 22 nt, Human
uguacaauagcuauuaucucca

SEQ ID NO: 917798 - RNA, 22 nt, Human
gagaacagauuuuucugcuguc

SEQ ID NO: 917799 - RNA, 22 nt, Human
agcuccugaaaagcgcuugcuu

SEQ ID NO: 917800 - RNA, 22 nt, Human
agugggcaugaucuggugucug

SEQ ID NO: 917801 - RNA, 18 nt, Human
uggcaaguaaugacaaaa

SEQ ID NO: 917802 - RNA, 22 nt, Human
gugggagaagauuuggucaucu

SEQ ID NO: 917803 - RNA, 22 nt, Human
agaaguuugguccuauaaacuc

SEQ ID NO: 917804 - RNA, 18 nt, Human
aggccagcccugcuacug

SEQ ID NO: 917805 - RNA, 22 nt, Human
auuauacauuuuguguagagau

SEQ ID NO: 917806 - RNA, 22 nt, Human
cccuagaaaugaaagcauacgu

SEQ ID NO: 917807 - RNA, 22 nt, Human
ugguaaggacuuaguuaucaau

SEQ ID NO: 917808 - RNA, 22 nt, Human
cagaaguugauccugcguuucc

SEQ ID NO: 917809 - RNA, 22 nt, Human
ccuggggaccugccucagcccu

SEQ ID NO: 917810 - RNA, 22 nt, Human
gagcugagucugcagucgccau

SEQ ID NO: 917811 - RNA, 22 nt, Human
uccauguguuuuccuguccaca

SEQ ID NO: 917812 - RNA, 22 nt, Human
gagcacagcuggagguagcauu

SEQ ID NO: 917813 - RNA, 20 nt, Human
uggcuucauaaugguuucug

SEQ ID NO: 917814 - RNA, 22 nt, Human
aagagaaagcagacuuugucau

SEQ ID NO: 917815 - RNA, 22 nt, Human
uacugaaauggcagauauauaa

SEQ ID NO: 917816 - RNA, 22 nt, Human
augcaaauaagugcaggcgugg

SEQ ID NO: 917817 - RNA, 22 nt, Human
ugcuucuguuacauaccagaac

SEQ ID NO: 917818 - RNA, 22 nt, Human
ugccucugguuaucugguaccu

SEQ ID NO: 917819 - RNA, 22 nt, Human
gcuggcccagcgcccagggcag

SEQ ID NO: 917820 - RNA, 22 nt, Human
ccaggagcagccggcccaccug

SEQ ID NO: 917821 - RNA, 22 nt, Human
uugacacauuagagcuuguaaa

SEQ ID NO: 917822 - RNA, 22 nt, Human
aacgagcucuccuucuuucauu

SEQ ID NO: 917823 - RNA, 19 nt, Human
aggaauggaauuaauucug

SEQ ID NO: 917824 - RNA, 22 nt, Human
aacaugaaaguugcuaagugca

SEQ ID NO: 917825 - RNA, 22 nt, Human
cccugcugacaacuugauuuug

SEQ ID NO: 917826 - RNA, 22 nt, Human
auguuaaaugguuuauuauuaa

SEQ ID NO: 917827 - RNA, 22 nt, Human
acacucuguaaugucacacucc

SEQ ID NO: 917828 - RNA, 23 nt, Human
uccagggcuggccagaccucggu

SEQ ID NO: 917829 - RNA, 22 nt, Human
ccaggccucaccugcccaccua

SEQ ID NO: 917830 - RNA, 22 nt, Human
ucuucugugagaauucaagcaa

SEQ ID NO: 917831 - RNA, 22 nt, Human
ucauggcacuuagugucucaaa

SEQ ID NO: 917832 - RNA, 22 nt, Human
agaucagaucuccuuuugcauu

SEQ ID NO: 917833 - RNA, 20 nt, Human
augugaaagaucaguugucu

SEQ ID NO: 917834 - RNA, 23 nt, Human
uugggaaauaguuaagacaugag

SEQ ID NO: 917835 - RNA, 22 nt, Human
uacaaagugaaauaauucugag

SEQ ID NO: 917836 - RNA, 22 nt, Human
acacauguauggcacuuacauu

SEQ ID NO: 917837 - RNA, 22 nt, Human
ggaaagaacccuggauggcugg

SEQ ID NO: 917838 - RNA, 22 nt, Human
gucaggucuuggaagauaggcu

SEQ ID NO: 917839 - RNA, 22 nt, Human
accuuagaaaaucaaaauuaga

SEQ ID NO: 917840 - RNA, 22 nt, Human
uucuuguucugguucuguuagc

SEQ ID NO: 917841 - RNA, 22 nt, Human
cuggguuuuauuacagugagcu

SEQ ID NO: 917842 - RNA, 22 nt, Human
acaggggaauuuacugucauua

SEQ ID NO: 917843 - RNA, 22 nt, Human
ggcugcagggcagcuggugugg

SEQ ID NO: 917844 - RNA, 22 nt, Human
aaacuugggugacccugagcaa

SEQ ID NO: 917845 - RNA, 22 nt, Human
aagcugaaauaauaucuauguu

SEQ ID NO: 917846 - RNA, 22 nt, Human
ucuagaaucuaaacuauaguuu

SEQ ID NO: 917847 - RNA, 22 nt, Human
acccaggguuugagcucugcag

SEQ ID NO: 917848 - RNA, 22 nt, Human
ucaaggaagucuuauugcacag

SEQ ID NO: 917849 - RNA, 22 nt, Human
ugugagaagggugaggcuuuua

SEQ ID NO: 917850 - RNA, 22 nt, Human
ucccuggggaagggcaagcaag

SEQ ID NO: 917851 - RNA, 22 nt, Human
agcagggccugagugaccuaac

SEQ ID NO: 917852 - RNA, 22 nt, Human
ugucaaccagguauuuuggucu

SEQ ID NO: 917853 - RNA, 22 nt, Human
uaggcuggaggaagcagugccu

SEQ ID NO: 917854 - RNA, 22 nt, Human
uauguacaucguugaauucaaa

SEQ ID NO: 917855 - RNA, 22 nt, Human
gccaggaauggagagguggccu

SEQ ID NO: 917856 - RNA, 22 nt, Human
auucugggugacuacgugauca

SEQ ID NO: 917857 - RNA, 22 nt, Human
uuaagcaacacacauuaauuau

SEQ ID NO: 917858 - RNA, 22 nt, Human
uauuuugcguugagucagauuu

SEQ ID NO: 917859 - RNA, 22 nt, Human
gugcauggggagggaagcgcuc

SEQ ID NO: 917860 - RNA, 22 nt, Human
uuaauauguugaaauuuauuag

SEQ ID NO: 917861 - RNA, 22 nt, Human
uguguuaaggugcaucuagugc

SEQ ID NO: 917862 - RNA, 22 nt, Human
gcagggccagggcucaggcugu

SEQ ID NO: 917863 - RNA, 22 nt, Human
agagcugccgagcuggggccau

SEQ ID NO: 917864 - RNA, 22 nt, Human
ugaaugauguauaauauugaga

SEQ ID NO: 917865 - RNA, 22 nt, Human
gccuggaguucagccaaguccc

SEQ ID NO: 917866 - RNA, 22 nt, Human
aauguuucaauuaagucuuuua

SEQ ID NO: 917867 - RNA, 22 nt, Human
cagucccuaguggagcucacag

SEQ ID NO: 917868 - RNA, 19 nt, Human
uuucucucccucaucccga

SEQ ID NO: 917869 - RNA, 22 nt, Human
gggcuggaucucacgugagacc

SEQ ID NO: 917870 - RNA, 22 nt, Human
ugcagcauuauguagcuguuuu

SEQ ID NO: 917871 - RNA, 22 nt, Human
uccugggucccgcacaucuguc

SEQ ID NO: 917872 - RNA, 22 nt, Human
caggucagagucccccuguccu

SEQ ID NO: 917873 - RNA, 22 nt, Human
auguacacacaaguuugcacgc

SEQ ID NO: 917874 - RNA, 22 nt, Human
ccuacacaucucaccucacagg

SEQ ID NO: 917875 - RNA, 22 nt, Human
ugacagagcauguagugacagc

SEQ ID NO: 917876 - RNA, 18 nt, Human
ugacagaaccuggagccu

SEQ ID NO: 917877 - RNA, 22 nt, Human
acuuaaagaggcuacuuuuggu

SEQ ID NO: 917878 - RNA, 22 nt, Human
cacaggaauauaaguuugaguu

SEQ ID NO: 917879 - RNA, 22 nt, Human
uacaagucacuuccuuucuaaa

SEQ ID NO: 917880 - RNA, 19 nt, Human
agagccagacagcauagga

SEQ ID NO: 917881 - RNA, 22 nt, Human
caccuggaguagcaagguaauu

SEQ ID NO: 917882 - RNA, 22 nt, Human
aggagccuggcuggcccacagg

SEQ ID NO: 917883 - RNA, 17 nt, Human
uuuguucguuaguccgg

SEQ ID NO: 917884 - RNA, 22 nt, Human
gcugcucucagagcucaugcug

SEQ ID NO: 917885 - RNA, 22 nt, Human
gaacucuugguggucauuagau

SEQ ID NO: 917886 - RNA, 22 nt, Human
caguaauagaggcuuugagucu

SEQ ID NO: 917887 - RNA, 22 nt, Human
uucaaaccuucacuugcagagu

SEQ ID NO: 917888 - RNA, 22 nt, Human
uugaggccaaaaaguccuauga

SEQ ID NO: 917889 - RNA, 22 nt, Human
aagccaaggagaauggccucag

SEQ ID NO: 917890 - RNA, 20 nt, Human
agcaagaagguugugggagc

SEQ ID NO: 917891 - RNA, 22 nt, Human
ugcgcaggagcucugccaggag

SEQ ID NO: 917892 - RNA, 22 nt, Human
gcagcugcaggcaggcuugcug

SEQ ID NO: 917893 - RNA, 22 nt, Human
ggcucugaaauucucacuuuua

SEQ ID NO: 917894 - RNA, 22 nt, Human
ccccacaacucauguugaaacu

SEQ ID NO: 917895 - RNA, 17 nt, Human
agugugugaaauggugg

SEQ ID NO: 917896 - RNA, 22 nt, Human
uauuaaagagagaaucaucauc

SEQ ID NO: 917897 - RNA, 22 nt, Human
ugcugccagagagacagggacu

SEQ ID NO: 917898 - RNA, 22 nt, Human
aggaugaggcuggcaggucuug

SEQ ID NO: 917899 - RNA, 22 nt, Human
uggagagcgcgacgggaggaag

SEQ ID NO: 917900 - RNA, 22 nt, Human
uggggcacuuaugaugugccac

SEQ ID NO: 917901 - RNA, 21 nt, Human
agcuuuucuguuuuauaucua

SEQ ID NO: 917902 - RNA, 18 nt, Human
cagcagagacauucaaaa

SEQ ID NO: 917903 - RNA, 22 nt, Human
aggcaguggcuuuuguuguguu

SEQ ID NO: 917904 - RNA, 22 nt, Human
ugagguaugguaagguaaaauc

SEQ ID NO: 917905 - RNA, 22 nt, Human
gaaaguuugccucucucuugag

SEQ ID NO: 917906 - RNA, 22 nt, Human
gauuucuaguucauuaucuauu

SEQ ID NO: 917907 - RNA, 22 nt, Human
cugguuauuauucuuggaaugc

SEQ ID NO: 917908 - RNA, 22 nt, Human
uuuuacaguuccaugcaaagcg

SEQ ID NO: 917909 - RNA, 22 nt, Human
cacaggaaugaacagggaaaga

SEQ ID NO: 917910 - RNA, 22 nt, Human
ugucuuuuauaacugacauaua

SEQ ID NO: 917911 - RNA, 22 nt, Human
gcccaugucugacagggugggg

SEQ ID NO: 917912 - RNA, 22 nt, Human
auaagcuuugcuggagagaccu

SEQ ID NO: 917913 - RNA, 22 nt, Human
uuugaaagggaaauaaacuccu

SEQ ID NO: 917914 - RNA, 21 nt, Human
cacucucccaauccuugcuga

SEQ ID NO: 917915 - RNA, 19 nt, Human
acauguuuugcagaacagc

SEQ ID NO: 917916 - RNA, 22 nt, Human
cagaggaggcgguauacacugc

SEQ ID NO: 917917 - RNA, 22 nt, Human
agccucuagacccuggccugca

SEQ ID NO: 917918 - RNA, 22 nt, Human
acuaguuuaugcucagaugucu

SEQ ID NO: 917919 - RNA, 18 nt, Human
gccaggucucucugcuuc

SEQ ID NO: 917920 - RNA, 17 nt, Human
gcacaaaucaauuacua

SEQ ID NO: 917921 - RNA, 22 nt, Human
aguggcugagugacugugacuc

SEQ ID NO: 917922 - RNA, 22 nt, Human
ugggggagauagagucugaugg

SEQ ID NO: 917923 - RNA, 19 nt, Human
ugauuuagggauccggcac

SEQ ID NO: 917924 - RNA, 22 nt, Human
gcuggagguagggagguccugu

SEQ ID NO: 917925 - RNA, 22 nt, Human
cugccucuauucacugaggcag

SEQ ID NO: 917926 - RNA, 22 nt, Human
cagcagugaugugugaggguuc

SEQ ID NO: 917927 - RNA, 22 nt, Human
aguggaaggcugggaaaugcgg

SEQ ID NO: 917928 - RNA, 22 nt, Human
cauuaaauaucaaccuagacua

SEQ ID NO: 917929 - RNA, 22 nt, Human
aggggaugauccucccgcagcg

SEQ ID NO: 917930 - RNA, 22 nt, Human
cagggugacugcccuggccacu

SEQ ID NO: 917931 - RNA, 22 nt, Human
ucuugggaagcccauuuccacc

SEQ ID NO: 917932 - RNA, 22 nt, Human
agaugcagacuugguucaggca

SEQ ID NO: 917933 - RNA, 22 nt, Human
augguauuggaguaggacuugc

SEQ ID NO: 917934 - RNA, 22 nt, Human
gucacagguguggaggugcugg

SEQ ID NO: 917935 - RNA, 22 nt, Human
ggccauggcgggagccggcguc

SEQ ID NO: 917936 - RNA, 22 nt, Human
aaccuucuugugcagaacugua

SEQ ID NO: 917937 - RNA, 20 nt, Human
ucacaggagggaaggcaggu

SEQ ID NO: 917938 - RNA, 22 nt, Human
uucccagagauaagacgucuua

SEQ ID NO: 917939 - RNA, 22 nt, Human
ggucagcaucugguugagggca

SEQ ID NO: 917940 - RNA, 22 nt, Human
acauucaaaauuagguuaguug

SEQ ID NO: 917941 - RNA, 22 nt, Human
guucacagguucucuuucuaag

SEQ ID NO: 917942 - RNA, 22 nt, Human
augaguaagauaggcaaugugu

SEQ ID NO: 917943 - RNA, 22 nt, Human
aacauguugaguugaaaguagc

SEQ ID NO: 917944 - RNA, 22 nt, Human
gccaucaucaagaauguacagc

SEQ ID NO: 917945 - RNA, 22 nt, Human
uagcagcauguaagugaguaga

SEQ ID NO: 917946 - RNA, 22 nt, Human
cagggccacccucugcugggug

SEQ ID NO: 917947 - RNA, 20 nt, Human
uccagggcaaacucaucacc

SEQ ID NO: 917948 - RNA, 20 nt, Human
gcugcuuucaaaugacacgu

SEQ ID NO: 917949 - RNA, 22 nt, Human
cucagauucugaauaauaaaca

SEQ ID NO: 917950 - RNA, 22 nt, Human
uguguauaauuagaccauuuac

SEQ ID NO: 917951 - RNA, 18 nt, Human
cgaggcaggcggaucacg

SEQ ID NO: 917952 - RNA, 22 nt, Human
ucaggcagagcuguggagcucu

SEQ ID NO: 917953 - RNA, 22 nt, Human
ccuggccaaucuagggcuguua

SEQ ID NO: 917954 - RNA, 22 nt, Human
cuuauguaaaacggaaagggaa

SEQ ID NO: 917955 - RNA, 22 nt, Human
ccugaggagauuguggcugggg

SEQ ID NO: 917956 - RNA, 22 nt, Human
uacaaaaggaagagggaucuua

SEQ ID NO: 917957 - RNA, 21 nt, Human
agaguggcaaaguguccaaga

SEQ ID NO: 917958 - RNA, 22 nt, Human
gcuucugcagagccguccugag

SEQ ID NO: 917959 - RNA, 22 nt, Human
ugugugccugagccgugccugg

SEQ ID NO: 917960 - RNA, 23 nt, Human
agggcacuguuggguguugagga

SEQ ID NO: 917961 - RNA, 22 nt, Human
cccugcagagggaugggggcag

SEQ ID NO: 917962 - RNA, 22 nt, Human
uauauuaaccauaggguucuag

SEQ ID NO: 917963 - RNA, 22 nt, Human
augaggcagucuggccugaggg

SEQ ID NO: 917964 - RNA, 22 nt, Human
uagcacaaagucuugcccuuuu

SEQ ID NO: 917965 - RNA, 22 nt, Human
gaacaguaaauuuaugcagcac

SEQ ID NO: 917966 - RNA, 22 nt, Human
uuucacagauguuuuggagucu

SEQ ID NO: 917967 - RNA, 21 nt, Human
ucugcccuccaggagcucaua

SEQ ID NO: 917968 - RNA, 22 nt, Human
gaauuauagguuugcaugcuaa

SEQ ID NO: 917969 - RNA, 22 nt, Human
cucccuggcagccgcacuccug

SEQ ID NO: 917970 - RNA, 23 nt, Human
aaucaaguuuugaugaggaagcc

SEQ ID NO: 917971 - RNA, 22 nt, Human
aggugucauuucucugcaggug

SEQ ID NO: 917972 - RNA, 22 nt, Human
agcuccagagucugaacuauuc

SEQ ID NO: 917973 - RNA, 21 nt, Human
aaaguguguggggaagaagga

SEQ ID NO: 917974 - RNA, 22 nt, Human
cuggccgguauuugccucuggg

SEQ ID NO: 917975 - RNA, 22 nt, Human
ucagggcagguuaacuugggug

SEQ ID NO: 917976 - RNA, 22 nt, Human
ucugcucuccauacuuccgcac

SEQ ID NO: 917977 - RNA, 22 nt, Human
cuguucugaacugccugcaugc

SEQ ID NO: 917978 - RNA, 22 nt, Human
cccucuggcucuucucaggccg

SEQ ID NO: 917979 - RNA, 22 nt, Human
uggcuggggccacaguuuuccu

SEQ ID NO: 917980 - RNA, 20 nt, Human
cuuuuucuccagcucugagc

SEQ ID NO: 917981 - RNA, 22 nt, Human
uucucaggcucugagacccuau

SEQ ID NO: 917982 - RNA, 22 nt, Human
uugcuguuuuacuuacaagcuc

SEQ ID NO: 917983 - RNA, 22 nt, Human
ucuagaaguccaaaguuaaaua

SEQ ID NO: 917984 - RNA, 22 nt, Human
uuacagaguggucuggcuaugu

SEQ ID NO: 917985 - RNA, 22 nt, Human
uaggacuugguuugaagauuuu

SEQ ID NO: 917986 - RNA, 22 nt, Human
auauuucagcuuuacuuaggaa

SEQ ID NO: 917987 - RNA, 22 nt, Human
ucucgacagccuggcacagugg

SEQ ID NO: 917988 - RNA, 22 nt, Human
uugaucaagugggaaauaguaa

SEQ ID NO: 917989 - RNA, 22 nt, Human
ggccacugcccuggcuacaccg

SEQ ID NO: 917990 - RNA, 22 nt, Human
cagcugaagguaggaaccagga

SEQ ID NO: 917991 - RNA, 22 nt, Human
gacuguggcuaaugguguuagg

SEQ ID NO: 917992 - RNA, 22 nt, Human
cauuaaguauuucaguuacugu

SEQ ID NO: 917993 - RNA, 22 nt, Human
ucucaucauuccuucaaagccc

SEQ ID NO: 917994 - RNA, 22 nt, Human
agaggcucuaauccccuccaca

SEQ ID NO: 917995 - RNA, 22 nt, Human
uauuuacuuuuaaauugagaac

SEQ ID NO: 917996 - RNA, 22 nt, Human
gaugucuucccauguucaugug

SEQ ID NO: 917997 - RNA, 22 nt, Human
cccaagccagacccugacccug

SEQ ID NO: 917998 - RNA, 22 nt, Human
auucuuucauauaaaggcucag

SEQ ID NO: 917999 - RNA, 22 nt, Human
ugaccgucuucccacuuucugu

SEQ ID NO: 918000 - RNA, 22 nt, Human
uugaucuuggacuuuccagccu

SEQ ID NO: 918001 - RNA, 22 nt, Human
auuguccaucuccacauuaaug

SEQ ID NO: 918002 - RNA, 22 nt, Human
agaaugcuuuggauauauugga

SEQ ID NO: 918003 - RNA, 22 nt, Human
uugccucccagcaugggcagcu

SEQ ID NO: 918004 - RNA, 22 nt, Human
gcccugagccuaugagccucuc

SEQ ID NO: 918005 - RNA, 22 nt, Human
agcaacaggguggucuucagaa

SEQ ID NO: 918006 - RNA, 22 nt, Human
ugucaguguaacucuuauagca

SEQ ID NO: 918007 - RNA, 22 nt, Human
aggcucagacaggaaaaguaac

SEQ ID NO: 918008 - RNA, 21 nt, Human
gagcugaauauguucuagggg

SEQ ID NO: 918009 - RNA, 22 nt, Human
aggcugugacagggucauggag

SEQ ID NO: 918010 - RNA, 22 nt, Human
cugcuuccauggucuggagacu

SEQ ID NO: 918011 - RNA, 22 nt, Human
gcucucuuuuuccagugguggu

SEQ ID NO: 918012 - RNA, 21 nt, Human
uucuuccuaaauacagaucuc

SEQ ID NO: 918013 - RNA, 22 nt, Human
gccugagaaggacacagcaggu

SEQ ID NO: 918014 - RNA, 17 nt, Human
gagcagggaugcgguuc

SEQ ID NO: 918015 - RNA, 22 nt, Human
agcuccaguuacuuaccuagag

SEQ ID NO: 918016 - RNA, 22 nt, Human
acagggagucugaggggauagu

SEQ ID NO: 918017 - RNA, 22 nt, Human
cucugggcaaguuucuucauga

SEQ ID NO: 918018 - RNA, 22 nt, Human
aaagugauuaugcugucaaaga

SEQ ID NO: 918019 - RNA, 22 nt, Human
ugccagcacuucuggcugucug

SEQ ID NO: 918020 - RNA, 22 nt, Human
auuguucacugugaaucuugau

SEQ ID NO: 918021 - RNA, 22 nt, Human
gccugucaauuuuguguacaau

SEQ ID NO: 918022 - RNA, 22 nt, Human
cagacuugacggcagcugcuuu

SEQ ID NO: 918023 - RNA, 22 nt, Human
uacagcaaugguucuaagaguc

SEQ ID NO: 918024 - RNA, 22 nt, Human
aucauaaagugcuaucugauug

SEQ ID NO: 918025 - RNA, 22 nt, Human
auccuuucaucugguaauauau

SEQ ID NO: 918026 - RNA, 22 nt, Human
gacugaaagcuuggaauguucc

SEQ ID NO: 918027 - RNA, 22 nt, Human
gaagccaguacugugcucugca

SEQ ID NO: 918028 - RNA, 22 nt, Human
cuguggcucaaaaucccaugau

SEQ ID NO: 918029 - RNA, 22 nt, Human
caccugcaaggagcuuucauuu

SEQ ID NO: 918030 - RNA, 22 nt, Human
aaaugcucuggggauaagacug

SEQ ID NO: 918031 - RNA, 22 nt, Human
aggucacaggcuuugaaaucaa

SEQ ID NO: 918032 - RNA, 22 nt, Human
caugcuucaugcaaaauucuga

SEQ ID NO: 918033 - RNA, 22 nt, Human
uuuaugaacuacagauauaacu

SEQ ID NO: 918034 - RNA, 22 nt, Human
ccaaauauuaacaaaguaauuu

SEQ ID NO: 918035 - RNA, 22 nt, Human
aggcucagcugguggugaucgc

SEQ ID NO: 918036 - RNA, 22 nt, Human
uaucugagaaagaagcaccaga

SEQ ID NO: 918037 - RNA, 22 nt, Human
agcugugguuagauagaguccu

SEQ ID NO: 918038 - RNA, 22 nt, Human
ugucauaugcugucauagccau

SEQ ID NO: 918039 - RNA, 22 nt, Human
augcauauucuuagccccuccu

SEQ ID NO: 918040 - RNA, 22 nt, Human
uggaaugaauuuggcuuccucc

SEQ ID NO: 918041 - RNA, 22 nt, Human
uaaaaucgcacugcuguuguua

SEQ ID NO: 918042 - RNA, 19 nt, Human
gcaggcacagcccugggug

SEQ ID NO: 918043 - RNA, 22 nt, Human
uuccagaaaaaaauguauaucu

SEQ ID NO: 918044 - RNA, 22 nt, Human
acuuguuuggucucauguuuaa

SEQ ID NO: 918045 - RNA, 22 nt, Human
cacagugauugauuuuuacuuu

SEQ ID NO: 918046 - RNA, 22 nt, Human
aucaucugccucaucacugcau

SEQ ID NO: 918047 - RNA, 22 nt, Human
caggcccugcugcugagaccuu

SEQ ID NO: 918048 - RNA, 22 nt, Human
ucaguggauugacaugaaaaag

SEQ ID NO: 918049 - RNA, 22 nt, Human
uggucauguaguagagacagcu

SEQ ID NO: 918050 - RNA, 22 nt, Human
ggcugaggguuaagaucagaca

SEQ ID NO: 918051 - RNA, 22 nt, Human
cagugggaaagugaagagcauu

SEQ ID NO: 918052 - RNA, 22 nt, Human
uguuaaaccuaguacagguccu

SEQ ID NO: 918053 - RNA, 22 nt, Human
aggaucagugaauacucagggu

SEQ ID NO: 918054 - RNA, 22 nt, Human
aagcuuuugacuugguagggaa

SEQ ID NO: 918055 - RNA, 22 nt, Human
cacaggccaguaagacuguguu

SEQ ID NO: 918056 - RNA, 22 nt, Human
auucucaaaacauaacuucacu

SEQ ID NO: 918057 - RNA, 22 nt, Human
cacaaaccugccagcccugccc

SEQ ID NO: 918058 - RNA, 22 nt, Human
cugggacugccauucacagcca

SEQ ID NO: 918059 - RNA, 22 nt, Human
gauggcacacagacauccccgc

SEQ ID NO: 918060 - RNA, 22 nt, Human
cugcacacaucgcacugcccgu

SEQ ID NO: 918061 - RNA, 22 nt, Human
agugucugugcuuugcagcaaa

SEQ ID NO: 918062 - RNA, 22 nt, Human
agucagggguuggacggggcca

SEQ ID NO: 918063 - RNA, 22 nt, Human
acacagagauguaaaguuaggc

SEQ ID NO: 918064 - RNA, 23 nt, Human
agagagaguuugugucagguacc

SEQ ID NO: 918065 - RNA, 22 nt, Human
cccuaggggcaaugauggugcu

SEQ ID NO: 918066 - RNA, 19 nt, Human
gaaugucuccuacuucuga

SEQ ID NO: 918067 - RNA, 22 nt, Human
aggguggcaguuacuggagcaa

SEQ ID NO: 918068 - RNA, 22 nt, Human
auuuucuucucucccuggcugc

SEQ ID NO: 918069 - RNA, 22 nt, Human
agagggcugccucagucagcua

SEQ ID NO: 918070 - RNA, 19 nt, Human
uaaggcagcagugacaggc

SEQ ID NO: 918071 - RNA, 22 nt, Human
uuccuaaugucuacuuuaguuc

SEQ ID NO: 918072 - RNA, 22 nt, Human
uugcaggggagaggaacaaaca

SEQ ID NO: 918073 - RNA, 22 nt, Human
ggccugaggcgucccagcugug

SEQ ID NO: 918074 - RNA, 22 nt, Human
acagcagcauaaacugacuaag

SEQ ID NO: 918075 - RNA, 22 nt, Human
cgcugcagaugggagcugguug

SEQ ID NO: 918076 - RNA, 22 nt, Human
aaugucauugguaaagauuagg

SEQ ID NO: 918077 - RNA, 22 nt, Human
gcuggccuucugcagaguucug

SEQ ID NO: 918078 - RNA, 22 nt, Human
uggcuaacaguuaagauuucau

SEQ ID NO: 918079 - RNA, 22 nt, Human
ugcaaagggcuuugcauacaga

SEQ ID NO: 918080 - RNA, 22 nt, Human
aaaauguaugauggaggugcua

SEQ ID NO: 918081 - RNA, 22 nt, Human
gcagccaggaagcccaggacac

SEQ ID NO: 918082 - RNA, 22 nt, Human
uaggcuggaacuuaggcagagg

SEQ ID NO: 918083 - RNA, 22 nt, Human
uuacaguagauuuugaaugugg

SEQ ID NO: 918084 - RNA, 19 nt, Human
gcuuuuuguugucaaaggu

SEQ ID NO: 918085 - RNA, 22 nt, Human
uauggaaagcucuuuuugauug

SEQ ID NO: 918086 - RNA, 22 nt, Human
auuaccuaugcucuaguaauca

SEQ ID NO: 918087 - RNA, 20 nt, Human
ugaacacugggguguuucag

SEQ ID NO: 918088 - RNA, 22 nt, Human
uguauaugcacuuuccuuaucc

SEQ ID NO: 918089 - RNA, 22 nt, Human
agagcagguggcaacucuggga

SEQ ID NO: 918090 - RNA, 22 nt, Human
ggcagugugcaucuguguggcc

SEQ ID NO: 918091 - RNA, 22 nt, Human
uuagccaggggagcagcuuguc

SEQ ID NO: 918092 - RNA, 22 nt, Human
caucuuuaaaggggagacaccc

SEQ ID NO: 918093 - RNA, 22 nt, Human
cagggcucaccacugggauccu

SEQ ID NO: 918094 - RNA, 23 nt, Human
uaggcuucugcuguccccgacgc

SEQ ID NO: 918095 - RNA, 22 nt, Human
agugcaaagggaucagauuggg

SEQ ID NO: 918096 - RNA, 22 nt, Human
aagggugggcaccgccagguca

SEQ ID NO: 918097 - RNA, 22 nt, Human
aaacagauaagggacaauuuca

SEQ ID NO: 918098 - RNA, 22 nt, Human
cucaggauguacuacagaaggc

SEQ ID NO: 918099 - RNA, 20 nt, Human
cugcuguguuauuguagaac

SEQ ID NO: 918100 - RNA, 22 nt, Human
uacuuuuugucucuuugaaugu

SEQ ID NO: 918101 - RNA, 22 nt, Human
ugagguggcuggaucucagccu

SEQ ID NO: 918102 - RNA, 22 nt, Human
aaguacugacagagaagaauga

SEQ ID NO: 918103 - RNA, 22 nt, Human
uuuaguacucaggggagaaguu

SEQ ID NO: 918104 - RNA, 22 nt, Human
acauuguaaauaccuuuaucac

SEQ ID NO: 918105 - RNA, 22 nt, Human
uugaugagaccauugccgcguc

SEQ ID NO: 918106 - RNA, 22 nt, Human
ggccugggccuuuguguuuuga

SEQ ID NO: 918107 - RNA, 22 nt, Human
guuuauuagaguuuucugucug

SEQ ID NO: 918108 - RNA, 22 nt, Human
agaugcugugaggaagcuagga

SEQ ID NO: 918109 - RNA, 22 nt, Human
agaaauuaggaaaguaacacuu

SEQ ID NO: 918110 - RNA, 22 nt, Human
acugggcuggggcucauucucc

SEQ ID NO: 918111 - RNA, 17 nt, Human
uuucuccuuccaucuca

SEQ ID NO: 918112 - RNA, 22 nt, Human
cuuagacauggcagcuccaagu

SEQ ID NO: 918113 - RNA, 22 nt, Human
uuuccaaaaguuuguucugugc

SEQ ID NO: 918114 - RNA, 22 nt, Human
cuggcagucugguggaaggccu

SEQ ID NO: 918115 - RNA, 20 nt, Human
gacaggagaguuagguaggu

SEQ ID NO: 918116 - RNA, 22 nt, Human
ucaagaauagcugcaaacaggg

SEQ ID NO: 918117 - RNA, 22 nt, Human
gcaaggcuggugguggugaagu

SEQ ID NO: 918118 - RNA, 22 nt, Human
uaccaaagauuaaauagcaaca

SEQ ID NO: 918119 - RNA, 22 nt, Human
cugauucuuugaagaugcaccc

SEQ ID NO: 918120 - RNA, 22 nt, Human
gcuggccugucuagagccuuac

SEQ ID NO: 918121 - RNA, 22 nt, Human
uagcaagaagcugucacaggug

SEQ ID NO: 918122 - RNA, 22 nt, Human
cuugaucuacauagugaaaccc

SEQ ID NO: 918123 - RNA, 22 nt, Human
acuggcccgggagcagaggccu

SEQ ID NO: 918124 - RNA, 19 nt, Human
agugccuugcucucuaggu

SEQ ID NO: 918125 - RNA, 22 nt, Human
ucagguggcugguugcuggcua

SEQ ID NO: 918126 - RNA, 22 nt, Human
aagucaaucacaugcacacuga

SEQ ID NO: 918127 - RNA, 22 nt, Human
guuuuacacaccuaugaaagac

SEQ ID NO: 918128 - RNA, 22 nt, Human
ucauguauugaaaagcauuuua

SEQ ID NO: 918129 - RNA, 22 nt, Human
uuuggccuuaguccagaagaag

SEQ ID NO: 918130 - RNA, 22 nt, Human
ccugggaagcccauagcagcuu

SEQ ID NO: 918131 - RNA, 21 nt, Human
agaagccauuuguuaggacuu

SEQ ID NO: 918132 - RNA, 22 nt, Human
gugcagggcagccgaaugggcu

SEQ ID NO: 918133 - RNA, 19 nt, Human
uaugacaaguacuaguucu

SEQ ID NO: 918134 - RNA, 22 nt, Human
aaaauucucuugaucuugacag

SEQ ID NO: 918135 - RNA, 23 nt, Human
acagaaaucauuuguaagguacc

SEQ ID NO: 918136 - RNA, 22 nt, Human
agauauuaccagcagucuaugc

SEQ ID NO: 918137 - RNA, 22 nt, Human
gugugcacagagcuccaguguu

SEQ ID NO: 918138 - RNA, 22 nt, Human
aaacauuguaauuuuagcaugg

SEQ ID NO: 918139 - RNA, 22 nt, Human
uccccagggcugcagagggugu

SEQ ID NO: 918140 - RNA, 22 nt, Human
gagaaagggaacuuacagagug

SEQ ID NO: 918141 - RNA, 22 nt, Human
ugggcucucaaagugcggcuug

SEQ ID NO: 918142 - RNA, 22 nt, Human
ccacccugugcaggcgugggua

SEQ ID NO: 918143 - RNA, 22 nt, Human
aagacagaccacgugacagggc

SEQ ID NO: 918144 - RNA, 18 nt, Human
gaggaaacaggcucugug

SEQ ID NO: 918145 - RNA, 22 nt, Human
agcuuugggauucaggcaggaa

SEQ ID NO: 918146 - RNA, 22 nt, Human
gcugccucugcgacucugggcg

SEQ ID NO: 918147 - RNA, 22 nt, Human
gcuuuagauacucccaaugucc

SEQ ID NO: 918148 - RNA, 22 nt, Human
acaacagagcuggacugagagg

SEQ ID NO: 918149 - RNA, 22 nt, Human
ucuggcuuuccuggagcaagaa

SEQ ID NO: 918150 - RNA, 22 nt, Human
aagguauuggucuggucuuccu

SEQ ID NO: 918151 - RNA, 22 nt, Human
ucugucuccucugaggugccag

SEQ ID NO: 918152 - RNA, 22 nt, Human
cuggggcucacuuuggucaggc

SEQ ID NO: 918153 - RNA, 22 nt, Human
aguucagagguuaauuuauuug

SEQ ID NO: 918154 - RNA, 22 nt, Human
ucaggcuggagugcaguggcgc

SEQ ID NO: 918155 - RNA, 21 nt, Human
ugguacaccuugccugucaga

SEQ ID NO: 918156 - RNA, 22 nt, Human
ggcagaaggcaauuagagacug

SEQ ID NO: 918157 - RNA, 22 nt, Human
ugaggcagguaagcaaguuuug

SEQ ID NO: 918158 - RNA, 22 nt, Human
uccucugcucagcauuccucac

SEQ ID NO: 918159 - RNA, 22 nt, Human
gcucacaggucuguggcuauug

SEQ ID NO: 918160 - RNA, 22 nt, Human
aaugucaugagccugcucuugu

SEQ ID NO: 918161 - RNA, 22 nt, Human
ggcuguggucucaucuagccuu

SEQ ID NO: 918162 - RNA, 22 nt, Human
cuuccucuguguccugggcuug

SEQ ID NO: 918163 - RNA, 23 nt, Human
aucuaaaguguuaaauagcuggg

SEQ ID NO: 918164 - RNA, 22 nt, Human
cagggccagcgcccaggcccag

SEQ ID NO: 918165 - RNA, 22 nt, Human
aacaugagugauaaaauuaccu

SEQ ID NO: 918166 - RNA, 22 nt, Human
gcugggcucguucccacacgcg

SEQ ID NO: 918167 - RNA, 22 nt, Human
aacuuaguucaauaucagugcu

SEQ ID NO: 918168 - RNA, 22 nt, Human
guggagagagauaagccugguc

SEQ ID NO: 918169 - RNA, 22 nt, Human
uguguacuugcugaucuuaucu

SEQ ID NO: 918170 - RNA, 22 nt, Human
cuacccagauccaggauggcua

SEQ ID NO: 918171 - RNA, 22 nt, Human
agccuccuguagcccucaccca

SEQ ID NO: 918172 - RNA, 22 nt, Human
caggaggguguggaaaacuggg

SEQ ID NO: 918173 - RNA, 22 nt, Human
acagaaauauucguggugcuug

SEQ ID NO: 918174 - RNA, 22 nt, Human
cugagagacuguuuguaauauu

SEQ ID NO: 918175 - RNA, 22 nt, Human
auuuuucucuccacuccauuaa

SEQ ID NO: 918176 - RNA, 22 nt, Human
gcacaggaugauggguugaggg

SEQ ID NO: 918177 - RNA, 22 nt, Human
agucccagcucugccacuuacu

SEQ ID NO: 918178 - RNA, 22 nt, Human
agaaaaagucaaggaauuggac

SEQ ID NO: 918179 - RNA, 22 nt, Human
agagguauuagauuugcauagg

SEQ ID NO: 918180 - RNA, 22 nt, Human
acauaacacucuucucuaguga

SEQ ID NO: 918181 - RNA, 22 nt, Human
acacaggaacucugagaggugg

SEQ ID NO: 918182 - RNA, 22 nt, Human
acagugaauaagacaugugcuu

SEQ ID NO: 918183 - RNA, 22 nt, Human
ugcagggucccgaagggaagac

SEQ ID NO: 918184 - RNA, 20 nt, Human
uaacaguuguagaggguuuu

SEQ ID NO: 918185 - RNA, 22 nt, Human
agaaugcaguuugaaauaaggu

SEQ ID NO: 918186 - RNA, 22 nt, Human
cagaaucucugggaguggauca

SEQ ID NO: 918187 - RNA, 22 nt, Human
aaaugucuguaugagaaagaga

SEQ ID NO: 918188 - RNA, 22 nt, Human
agguuacagucaucucagaauc

SEQ ID NO: 918189 - RNA, 22 nt, Human
agaguuuguauuuuucagugaa

SEQ ID NO: 918190 - RNA, 22 nt, Human
gcaccugcucacacaugugacu

SEQ ID NO: 918191 - RNA, 22 nt, Human
agaguggggaagguguugagaa

SEQ ID NO: 918192 - RNA, 22 nt, Human
ggcucuggcaaggggaggcuac

SEQ ID NO: 918193 - RNA, 22 nt, Human
gcuggccuugugucugaggaag

SEQ ID NO: 918194 - RNA, 22 nt, Human
ccauuuguauuacugccccagg

SEQ ID NO: 918195 - RNA, 22 nt, Human
gaaagcaguaaaugggucccau

SEQ ID NO: 918196 - RNA, 22 nt, Human
uugaaagggauauaucuuucug

SEQ ID NO: 918197 - RNA, 22 nt, Human
cacgggagacgugaucuuggac

SEQ ID NO: 918198 - RNA, 22 nt, Human
aaauaguccugggaauaguacu

SEQ ID NO: 918199 - RNA, 22 nt, Human
ugauucuuugaccaaaaaauug

SEQ ID NO: 918200 - RNA, 22 nt, Human
acagauuugaucugagaacaaa

SEQ ID NO: 918201 - RNA, 22 nt, Human
uuuaauuuguauuucuagaggg

SEQ ID NO: 918202 - RNA, 22 nt, Human
ccuucaaaguacacaucuuuau

SEQ ID NO: 918203 - RNA, 22 nt, Human
ccucggaggcggaggcugcagu

SEQ ID NO: 918204 - RNA, 22 nt, Human
gaauacaugcacgacacggggg

SEQ ID NO: 918205 - RNA, 22 nt, Human
gaggcacaauacaugucucaag

SEQ ID NO: 918206 - RNA, 22 nt, Human
gagggauggugugagaggcuca

SEQ ID NO: 918207 - RNA, 22 nt, Human
ugcuuaaacccugaucaugugu

SEQ ID NO: 918208 - RNA, 22 nt, Human
ugcccuggugaagugcucuccu

SEQ ID NO: 918209 - RNA, 19 nt, Human
cuugccuguuccuacagcu

SEQ ID NO: 918210 - RNA, 22 nt, Human
acaggcaaacacagaaaguagg

SEQ ID NO: 918211 - RNA, 22 nt, Human
gagagccaugguggagaugggg

SEQ ID NO: 918212 - RNA, 22 nt, Human
ggcaugggccgaggugccuccu

SEQ ID NO: 918213 - RNA, 22 nt, Human
uucauugauuuaacaaacaagu

SEQ ID NO: 918214 - RNA, 22 nt, Human
gcccagaguuugaagauacagu

SEQ ID NO: 918215 - RNA, 22 nt, Human
acuuagaaagggauucuagauu

SEQ ID NO: 918216 - RNA, 22 nt, Human
cccuuucccuucuggcucaggg

SEQ ID NO: 918217 - RNA, 22 nt, Human
gauaauuucuccaucucaaggu

SEQ ID NO: 918218 - RNA, 22 nt, Human
aagacauuuaugaaaagugcug

SEQ ID NO: 918219 - RNA, 20 nt, Human
agcauacaucauaagaaacc

SEQ ID NO: 918220 - RNA, 22 nt, Human
uucuucaucuguaagauaagca

SEQ ID NO: 918221 - RNA, 22 nt, Human
ggcuggguacagggcagugugc

SEQ ID NO: 918222 - RNA, 22 nt, Human
agcugccaaguuggaguagcaa

SEQ ID NO: 918223 - RNA, 22 nt, Human
uaagacacaugcguacaagaua

SEQ ID NO: 918224 - RNA, 16 nt, Human
ccccaggacuuggcac

SEQ ID NO: 918225 - RNA, 22 nt, Human
ugucucuggcugcagccuguuc

SEQ ID NO: 918226 - RNA, 22 nt, Human
uggggaagcacuuugaacuuaa

SEQ ID NO: 918227 - RNA, 22 nt, Human
uguggacuuuggcauuggacuu

SEQ ID NO: 918228 - RNA, 22 nt, Human
aggaaagcuuggcaaacuaaau

SEQ ID NO: 918229 - RNA, 22 nt, Human
ucacugaauuucaagcuagugg

SEQ ID NO: 918230 - RNA, 22 nt, Human
aauagcuuaugggauagauguu

SEQ ID NO: 918231 - RNA, 20 nt, Human
cagccuccacucacucagcu

SEQ ID NO: 918232 - RNA, 22 nt, Human
aauguucauuguuuuccauaug

SEQ ID NO: 918233 - RNA, 22 nt, Human
agccaggccagacucacacccu

SEQ ID NO: 918234 - RNA, 20 nt, Human
gagacagcaaaagccucucc

SEQ ID NO: 918235 - RNA, 22 nt, Human
cugcuuuaaaacugauacauga

SEQ ID NO: 918236 - RNA, 22 nt, Human
uuuggcacuguucuaggugcaa

SEQ ID NO: 918237 - RNA, 22 nt, Human
guacugcuguaaauauucuuca

SEQ ID NO: 918238 - RNA, 22 nt, Human
agggccugggucuguacuccuc

SEQ ID NO: 918239 - RNA, 22 nt, Human
acauucugaaaaacaguguuuu

SEQ ID NO: 918240 - RNA, 22 nt, Human
cuggguccuggugcugaguucu

SEQ ID NO: 918241 - RNA, 22 nt, Human
uuuuuguucccagagaauuugu

SEQ ID NO: 918242 - RNA, 22 nt, Human
aacuuuguguguuuaauauggc

SEQ ID NO: 918243 - RNA, 22 nt, Human
ucagcagugucaguucccagag

SEQ ID NO: 918244 - RNA, 22 nt, Human
aggcaagaaacuuucugggaga

SEQ ID NO: 918245 - RNA, 22 nt, Human
gagcuggugugugcccaagcac

SEQ ID NO: 918246 - RNA, 22 nt, Human
uucuucugauugccuucugcaa

SEQ ID NO: 918247 - RNA, 22 nt, Human
guucucucugcuuccaagaugg

SEQ ID NO: 918248 - RNA, 22 nt, Human
ggaaggcugugcaguguuugca

SEQ ID NO: 918249 - RNA, 22 nt, Human
ucuugaaaggagauuggaggca

SEQ ID NO: 918250 - RNA, 22 nt, Human
uugcaacauuguaaguuuauau

SEQ ID NO: 918251 - RNA, 22 nt, Human
aagguaauauuuuucucucuaa

SEQ ID NO: 918252 - RNA, 22 nt, Human
acacaugcagguauacauguuc

SEQ ID NO: 918253 - RNA, 22 nt, Human
gagucuucuacgcucacacaaa

SEQ ID NO: 918254 - RNA, 22 nt, Human
acagugcugaacgacauggaag

SEQ ID NO: 918255 - RNA, 22 nt, Human
acugcuuccugagaaaucaaca

SEQ ID NO: 918256 - RNA, 22 nt, Human
ccaaagugcugggguuacaggc

SEQ ID NO: 918257 - RNA, 22 nt, Human
gcugaaaugaaaacacaggucg

SEQ ID NO: 918258 - RNA, 22 nt, Human
gcugacaaugagaaagagcaaa

SEQ ID NO: 918259 - RNA, 22 nt, Human
cacacucauuagucauuucucu

SEQ ID NO: 918260 - RNA, 22 nt, Human
uuuagaauguuagcguuaaagg

SEQ ID NO: 918261 - RNA, 22 nt, Human
guccagagcuggcacacuguca

SEQ ID NO: 918262 - RNA, 22 nt, Human
gcuggcagagagcuggugagga

SEQ ID NO: 918263 - RNA, 22 nt, Human
ggaaagaccugagauaggaaua

SEQ ID NO: 918264 - RNA, 22 nt, Human
uuagaaaggggugaaucaaugg

SEQ ID NO: 918265 - RNA, 19 nt, Human
ugggaacuuguuagacaug

SEQ ID NO: 918266 - RNA, 22 nt, Human
uuccaggggcagcagugauggu

SEQ ID NO: 918267 - RNA, 22 nt, Human
ggcaggagaauggcgugaacuc

SEQ ID NO: 918268 - RNA, 22 nt, Human
cagugccagcugcuuggccuac

SEQ ID NO: 918269 - RNA, 22 nt, Human
aaaugcaauuguauguacucca

SEQ ID NO: 918270 - RNA, 22 nt, Human
uggagcuggaagacagugauau

SEQ ID NO: 918271 - RNA, 22 nt, Human
ccugggugaaaucucuccugca

SEQ ID NO: 918272 - RNA, 22 nt, Human
auuagagagagcauauuacugg

SEQ ID NO: 918273 - RNA, 22 nt, Human
gugccagggaguggaggagcuu

SEQ ID NO: 918274 - RNA, 22 nt, Human
uuauuaugguauuucuuugcag

SEQ ID NO: 918275 - RNA, 22 nt, Human
ugaucccaaucuuuccugcucc

SEQ ID NO: 918276 - RNA, 22 nt, Human
auaagugauauuuagcuauaga

SEQ ID NO: 918277 - RNA, 21 nt, Human
agcugcagcccaaaggccugu

SEQ ID NO: 918278 - RNA, 22 nt, Human
agucucaaagucagugucaugg

SEQ ID NO: 918279 - RNA, 22 nt, Human
aaucuaguuucagacuuugagu

SEQ ID NO: 918280 - RNA, 19 nt, Human
uggcugagcuggacugagg

SEQ ID NO: 918281 - RNA, 20 nt, Human
cucuuuucacucucaguggu

SEQ ID NO: 918282 - RNA, 22 nt, Human
gacaucuggaggagaugaaugg

SEQ ID NO: 918283 - RNA, 22 nt, Human
auuggucucuagagucuauugu

SEQ ID NO: 918284 - RNA, 22 nt, Human
cugggaagcauggugaugguau

SEQ ID NO: 918285 - RNA, 22 nt, Human
auucauaacggcaaaugucacc

SEQ ID NO: 918286 - RNA, 22 nt, Human
cuggcucacuagcccugcccug

SEQ ID NO: 918287 - RNA, 22 nt, Human
ugaggcuggcaaggcugguauu

SEQ ID NO: 918288 - RNA, 22 nt, Human
uugcuuuauuuggcaugccacu

SEQ ID NO: 918289 - RNA, 22 nt, Human
aaaucgguugguucaagguaau

SEQ ID NO: 918290 - RNA, 22 nt, Human
ugcucuggagggugaagcuuuu

SEQ ID NO: 918291 - RNA, 20 nt, Human
gcauuagaguacuauaugcu

SEQ ID NO: 918292 - RNA, 22 nt, Human
guccaaggaugcaggaugcugu

SEQ ID NO: 918293 - RNA, 22 nt, Human
guagcuuccagaaagugucuuu

SEQ ID NO: 918294 - RNA, 22 nt, Human
auauaugugcaggcucacacau

SEQ ID NO: 918295 - RNA, 23 nt, Human
aagcaucuuuuccuagcuccauc

SEQ ID NO: 918296 - RNA, 18 nt, Human
gugauucuuauuuguaca

SEQ ID NO: 918297 - RNA, 22 nt, Human
ccacaugugcacugcuguaugg

SEQ ID NO: 918298 - RNA, 22 nt, Human
agagaaacccuucaguguuuug

SEQ ID NO: 918299 - RNA, 21 nt, Human
aucucgggcuucucgcccagc

SEQ ID NO: 918300 - RNA, 22 nt, Human
agccaggugcaguggcacacac

SEQ ID NO: 918301 - RNA, 22 nt, Human
uuuacacagaggacacugggcu

SEQ ID NO: 918302 - RNA, 22 nt, Human
uccagggcucauucccucugca

SEQ ID NO: 918303 - RNA, 22 nt, Human
gcucucuugacagcuugcuguu

SEQ ID NO: 918304 - RNA, 22 nt, Human
augagcaaggcuuugugauagu

SEQ ID NO: 918305 - RNA, 22 nt, Human
aggcagcuggcaaauucuagag

SEQ ID NO: 918306 - RNA, 22 nt, Human
gccagcugcaaaguauguugaa

SEQ ID NO: 918307 - RNA, 20 nt, Human
acauccuggugacuagaacu

SEQ ID NO: 918308 - RNA, 22 nt, Human
ucaagcaacugaauucuaaaag

SEQ ID NO: 918309 - RNA, 22 nt, Human
acugggccuggauuggcguguc

SEQ ID NO: 918310 - RNA, 22 nt, Human
uuuacuaagcccaguuauaugc

SEQ ID NO: 918311 - RNA, 22 nt, Human
ccuggcugugcauugccggccc

SEQ ID NO: 918312 - RNA, 22 nt, Human
ucuggcuccacaccucacugca

SEQ ID NO: 918313 - RNA, 22 nt, Human
acaguagacccuggauaaacau

SEQ ID NO: 918314 - RNA, 22 nt, Human
ggguggagagaaagaaacguga

SEQ ID NO: 918315 - RNA, 22 nt, Human
cagggccuuauccugccauuga

SEQ ID NO: 918316 - RNA, 22 nt, Human
ccucugugauuucugagccaau

SEQ ID NO: 918317 - RNA, 22 nt, Human
uggaagcucaaggcagggugag

SEQ ID NO: 918318 - RNA, 22 nt, Human
ggcucuggagcacagacgucug

SEQ ID NO: 918319 - RNA, 22 nt, Human
aaauuccaccagaaucaguaau

SEQ ID NO: 918320 - RNA, 22 nt, Human
ggugcccagcgaaguggcugug

SEQ ID NO: 918321 - RNA, 22 nt, Human
uuggggaagcuuugaaauacuu

SEQ ID NO: 918322 - RNA, 20 nt, Human
augcaaaucccaaaaucagg

SEQ ID NO: 918323 - RNA, 22 nt, Human
cagggagcuggcuggcugugcc

SEQ ID NO: 918324 - RNA, 22 nt, Human
gugcuuuaccuuauuggucucg

SEQ ID NO: 918325 - RNA, 21 nt, Human
uagagcuuggcacagaguaga

SEQ ID NO: 918326 - RNA, 22 nt, Human
gccauuuucugucuuguuuauu

SEQ ID NO: 918327 - RNA, 22 nt, Human
agguacagaugaaagucuaguu

SEQ ID NO: 918328 - RNA, 22 nt, Human
cugagaaaaguaugagcucugg

SEQ ID NO: 918329 - RNA, 22 nt, Human
aaucaguguguaaaguggcugc

SEQ ID NO: 918330 - RNA, 22 nt, Human
augucagagcuuccacaauagu

SEQ ID NO: 918331 - RNA, 22 nt, Human
cagugccacaggaauggccaau

SEQ ID NO: 918332 - RNA, 22 nt, Human
ucccaaagcuacucuucugacu

SEQ ID NO: 918333 - RNA, 22 nt, Human
cuccucagcugggaggaguccc

SEQ ID NO: 918334 - RNA, 22 nt, Human
gucugcuggcacgucacagaua

SEQ ID NO: 918335 - RNA, 22 nt, Human
aaauuuaaaaagcagcauugca

SEQ ID NO: 918336 - RNA, 22 nt, Human
gcugucagugaggugagacaug

SEQ ID NO: 918337 - RNA, 22 nt, Human
aaacagcuacuucuguauaaug

SEQ ID NO: 918338 - RNA, 22 nt, Human
aaagaauacuccuuuugccuug

SEQ ID NO: 918339 - RNA, 22 nt, Human
cucuggaggcagcaccagccag

SEQ ID NO: 918340 - RNA, 22 nt, Human
ucacauugaagaaauuuuaagu

SEQ ID NO: 918341 - RNA, 22 nt, Human
gcucccacaaccuucuugcucc

SEQ ID NO: 918342 - RNA, 22 nt, Human
acacaggaagagagauaauaau

SEQ ID NO: 918343 - RNA, 20 nt, Human
agcccuguuuccuggagaga

SEQ ID NO: 918344 - RNA, 20 nt, Human
acucagaugcucacaacagg

SEQ ID NO: 918345 - RNA, 19 nt, Human
uguggaaaaaggagacauu

SEQ ID NO: 918346 - RNA, 22 nt, Human
aagaaccuauaugcugaugaau

SEQ ID NO: 918347 - RNA, 19 nt, Human
gacuuuggaaaugcuguuu

SEQ ID NO: 918348 - RNA, 20 nt, Human
uucuuuguuccuuacauuug

SEQ ID NO: 918349 - RNA, 22 nt, Human
acacaguucguuguuuucuacu

SEQ ID NO: 918350 - RNA, 22 nt, Human
aaugaccugggugucauuucau

SEQ ID NO: 918351 - RNA, 22 nt, Human
gucugggcaccuggccugggaa

SEQ ID NO: 918352 - RNA, 22 nt, Human
ccagcaagugcagauggccaag

SEQ ID NO: 918353 - RNA, 22 nt, Human
gcucgcgccgcaccgguccacc

SEQ ID NO: 918354 - RNA, 22 nt, Human
aggagcugaagucucugcacuc

SEQ ID NO: 918355 - RNA, 22 nt, Human
cccacgucgaacuugcuccaga

SEQ ID NO: 918356 - RNA, 22 nt, Human
ccaggcauugugagugggcagg

SEQ ID NO: 918357 - RNA, 22 nt, Human
ucaggcagaggauggggagcgu

SEQ ID NO: 918358 - RNA, 22 nt, Human
guaauaauuugcuaccuggugg

SEQ ID NO: 918359 - RNA, 22 nt, Human
gguggccuccagggcauaggug

SEQ ID NO: 918360 - RNA, 22 nt, Human
augcaaaugcagccauugcaga

SEQ ID NO: 918361 - RNA, 22 nt, Human
gccacaggugggcucugggaaa

SEQ ID NO: 918362 - RNA, 22 nt, Human
caggccaauaaaugugauggcc

SEQ ID NO: 918363 - RNA, 22 nt, Human
gcuggcucugccccaccuguuc

SEQ ID NO: 918364 - RNA, 22 nt, Human
cugggcaguuuacauuccuacc

SEQ ID NO: 918365 - RNA, 22 nt, Human
aaagaguuuggagacaagauca

SEQ ID NO: 918366 - RNA, 22 nt, Human
caggaggcaucauggagcggac

SEQ ID NO: 918367 - RNA, 22 nt, Human
uaaaggcucguauuguugugug

SEQ ID NO: 918368 - RNA, 22 nt, Human
guaugcauuuggcauauugucc

SEQ ID NO: 918369 - RNA, 22 nt, Human
ucuccugcuucaacugauggac

SEQ ID NO: 918370 - RNA, 20 nt, Human
aggaaaaggguggugguaga

SEQ ID NO: 918371 - RNA, 22 nt, Human
uugguaggggacuagaguccag

SEQ ID NO: 918372 - RNA, 21 nt, Human
gucagugcugaaacaccuucc

SEQ ID NO: 918373 - RNA, 22 nt, Human
ucccauguuaccaaggagucac

SEQ ID NO: 918374 - RNA, 22 nt, Human
ugacaucuggagucugggcugu

SEQ ID NO: 918375 - RNA, 20 nt, Human
aaacacuggcuggggcacag

SEQ ID NO: 918376 - RNA, 18 nt, Human
gccuggcugccaacccag

SEQ ID NO: 918377 - RNA, 22 nt, Human
uacauauacugagugauuugcu

SEQ ID NO: 918378 - RNA, 22 nt, Human
agcaggcaggcccagcggcugg

SEQ ID NO: 918379 - RNA, 22 nt, Human
acagcucugcauggcaguuauu

SEQ ID NO: 918380 - RNA, 23 nt, Human
agggccugauggcucccgcuggc

SEQ ID NO: 918381 - RNA, 23 nt, Human
gguggcaggaguggaugcugagc

SEQ ID NO: 918382 - RNA, 22 nt, Human
ugggcucugguuuccuggcugg

SEQ ID NO: 918383 - RNA, 20 nt, Human
aggaaaaauggaaacuggag

SEQ ID NO: 918384 - RNA, 22 nt, Human
auacaaaguauuaauccuggau

SEQ ID NO: 918385 - RNA, 21 nt, Human
gcuucuguaucuagcaggaac

SEQ ID NO: 918386 - RNA, 22 nt, Human
uauucuuguaccuuaaaugauu

SEQ ID NO: 918387 - RNA, 22 nt, Human
caggaguuucuauuguuccaaa

SEQ ID NO: 918388 - RNA, 16 nt, Human
aaggagggaagagaau

SEQ ID NO: 918389 - RNA, 22 nt, Human
uucuggagccccaagaucugua

SEQ ID NO: 918390 - RNA, 22 nt, Human
ugaggauggcagugugcucagc

SEQ ID NO: 918391 - RNA, 22 nt, Human
acauguguauagccuguauaga

SEQ ID NO: 918392 - RNA, 22 nt, Human
uaggaaacucucagcuggucau

SEQ ID NO: 918393 - RNA, 22 nt, Human
guccuggugcuggucauugucg

SEQ ID NO: 918394 - RNA, 18 nt, Human
gaguguggcacugggccc

SEQ ID NO: 918395 - RNA, 22 nt, Human
ugcagccaauucauucauucuu

SEQ ID NO: 918396 - RNA, 22 nt, Human
ucauaaaucauacuccauuugc

SEQ ID NO: 918397 - RNA, 20 nt, Human
uuugucuguuaaguguuucu

SEQ ID NO: 918398 - RNA, 22 nt, Human
ccccagcucagugcagggacau

SEQ ID NO: 918399 - RNA, 22 nt, Human
auauuaauuauuuacacaugag

SEQ ID NO: 918400 - RNA, 22 nt, Human
ccaucuccaguuuauucuuccu

SEQ ID NO: 918401 - RNA, 22 nt, Human
auuaaagcuauccagucaugaa

SEQ ID NO: 918402 - RNA, 22 nt, Human
uccaaagaacauugcugagacc

SEQ ID NO: 918403 - RNA, 22 nt, Human
ugcugagaugaauagggcuguc

SEQ ID NO: 918404 - RNA, 22 nt, Human
gcuuccagcaccagcagagggg

SEQ ID NO: 918405 - RNA, 22 nt, Human
augcugugcuggcuaaccaugg

SEQ ID NO: 918406 - RNA, 22 nt, Human
gaacaaacacaucccagcagug

SEQ ID NO: 918407 - RNA, 22 nt, Human
gugacagugacagcuagauagu

SEQ ID NO: 918408 - RNA, 22 nt, Human
ugcuuaaaguguuaacccuguu

SEQ ID NO: 918409 - RNA, 22 nt, Human
gaaagacuuccuuugagaguac

SEQ ID NO: 918410 - RNA, 22 nt, Human
uagaacacuugaccacugcucc

SEQ ID NO: 918411 - RNA, 22 nt, Human
agaagccucauccucucuagug

SEQ ID NO: 918412 - RNA, 22 nt, Human
ucuagacacuacuaguaaccgg

SEQ ID NO: 918413 - RNA, 22 nt, Human
caacucaggcaccucauauaag

SEQ ID NO: 918414 - RNA, 22 nt, Human
cugccacuuacuaggcauggug

SEQ ID NO: 918415 - RNA, 18 nt, Human
agcagggcauuuugccau

SEQ ID NO: 918416 - RNA, 23 nt, Human
agugucugagugcaggcugugca

SEQ ID NO: 918417 - RNA, 21 nt, Human
gccucuccaaauccugccuuc

SEQ ID NO: 918418 - RNA, 22 nt, Human
cuacauuuggagaguauaggaa

SEQ ID NO: 918419 - RNA, 22 nt, Human
agaguccauaugugggaggagu

SEQ ID NO: 918420 - RNA, 22 nt, Human
gagcagcuaaaauucucaugca

SEQ ID NO: 918421 - RNA, 22 nt, Human
auaguugguccaugaaaaaagu

SEQ ID NO: 918422 - RNA, 22 nt, Human
uaaaugagauguacauaacuca

SEQ ID NO: 918423 - RNA, 22 nt, Human
gacauuucuagcccauaaaacu

SEQ ID NO: 918424 - RNA, 22 nt, Human
ugcagcuguuacggacccuguc

SEQ ID NO: 918425 - RNA, 22 nt, Human
aguaaaaucuuaagcacagugg

SEQ ID NO: 918426 - RNA, 22 nt, Human
caaagguuucacaguagcccau

SEQ ID NO: 918427 - RNA, 22 nt, Human
ucuuuauuuuaugcuugugcaa

SEQ ID NO: 918428 - RNA, 21 nt, Human
ugcagccauucagcccuaugc

SEQ ID NO: 918429 - RNA, 22 nt, Human
acaggaagcuggagacccuuga

SEQ ID NO: 918430 - RNA, 22 nt, Human
uccugagggcugcagucauagg

SEQ ID NO: 918431 - RNA, 22 nt, Human
auuucucagugaaaugacaggc

SEQ ID NO: 918432 - RNA, 22 nt, Human
aguucagcuucccaggucacug

SEQ ID NO: 918433 - RNA, 22 nt, Human
ucuaugcuugagacagaugggg

SEQ ID NO: 918434 - RNA, 22 nt, Human
ugcaagaaugacccaucuaccc

SEQ ID NO: 918435 - RNA, 22 nt, Human
gcugccugcucggcuccuggga

SEQ ID NO: 918436 - RNA, 20 nt, Human
gcacacauagaaaugcauau

SEQ ID NO: 918437 - RNA, 22 nt, Human
caacugcugacaccaucacucc

SEQ ID NO: 918438 - RNA, 22 nt, Human
ucaggcagaccaccgugggcag

SEQ ID NO: 918439 - RNA, 22 nt, Human
acuguauacuucuguauacaau

SEQ ID NO: 918440 - RNA, 22 nt, Human
gaggcuccauggaggaguaugg

SEQ ID NO: 918441 - RNA, 22 nt, Human
cagaagcagaacacuagauuua

SEQ ID NO: 918442 - RNA, 22 nt, Human
uaggaaacagugcauauauagu

SEQ ID NO: 918443 - RNA, 20 nt, Human
gaaauacuuacccaacuguu

SEQ ID NO: 918444 - RNA, 22 nt, Human
ugugauuucaucugaggccagg

SEQ ID NO: 918445 - RNA, 22 nt, Human
acagaaagaagguguauuugag

SEQ ID NO: 918446 - RNA, 22 nt, Human
cacccagagggcuugcugaaca

SEQ ID NO: 918447 - RNA, 22 nt, Human
aggcagcagacuguuaaucaga

SEQ ID NO: 918448 - RNA, 22 nt, Human
uacuuucaugucuauacauauu

SEQ ID NO: 918449 - RNA, 22 nt, Human
uaaacaugcccagugacaggga

SEQ ID NO: 918450 - RNA, 20 nt, Human
cugcaucaugguuaagaaca

SEQ ID NO: 918451 - RNA, 22 nt, Human
uagaagaacaugucaaacuaua

SEQ ID NO: 918452 - RNA, 22 nt, Human
aaaaguauuuugagcacuuuau

SEQ ID NO: 918453 - RNA, 22 nt, Human
ucugggagacguguguugucag

SEQ ID NO: 918454 - RNA, 22 nt, Human
auuuuguggguucugcugaugu

SEQ ID NO: 918455 - RNA, 22 nt, Human
augugugcgggaaggaaaguga

SEQ ID NO: 918456 - RNA, 22 nt, Human
uggcugcacuucaacacauccu

SEQ ID NO: 918457 - RNA, 22 nt, Human
ugucacaaaaaucaguaauugc

SEQ ID NO: 918458 - RNA, 18 nt, Human
aucccaaaagacaaggaa

SEQ ID NO: 918459 - RNA, 22 nt, Human
uguggccuggaaggggcugcuc

SEQ ID NO: 918460 - RNA, 22 nt, Human
gcugggcaccggagagacccca

SEQ ID NO: 918461 - RNA, 23 nt, Human
ugggcucagcuuccaguggggag

SEQ ID NO: 918462 - RNA, 22 nt, Human
aggagcacugagccagcauggg

SEQ ID NO: 918463 - RNA, 22 nt, Human
aaagacagauggcaaggaugau

SEQ ID NO: 918464 - RNA, 22 nt, Human
aguuccaugucuggguuuguga

SEQ ID NO: 918465 - RNA, 22 nt, Human
ucugggagccaugccuuggagu

SEQ ID NO: 918466 - RNA, 22 nt, Human
gcagcccucccugggugugucu

SEQ ID NO: 918467 - RNA, 22 nt, Human
agacgcgguggugcaugccugu

SEQ ID NO: 918468 - RNA, 22 nt, Human
acagccagcagagcuguuuccu

SEQ ID NO: 918469 - RNA, 22 nt, Human
ucacccagacugucugacucuu

SEQ ID NO: 918470 - RNA, 22 nt, Human
guuuccuggaaacauuaggaga

SEQ ID NO: 918471 - RNA, 22 nt, Human
acaugauuucagggaauucuca

SEQ ID NO: 918472 - RNA, 22 nt, Human
auuuguuccacacauauuuacu

SEQ ID NO: 918473 - RNA, 22 nt, Human
cugggcuguaauguggcacuga

SEQ ID NO: 918474 - RNA, 22 nt, Human
ggccuuccuucccagccuacug

SEQ ID NO: 918475 - RNA, 20 nt, Human
uggaaggucccagaggaauu

SEQ ID NO: 918476 - RNA, 22 nt, Human
aaguacauauauuuaugauucu

SEQ ID NO: 918477 - RNA, 22 nt, Human
uauggauguuuaucuacaggcu

SEQ ID NO: 918478 - RNA, 22 nt, Human
cccacacacauuuaugauagga

SEQ ID NO: 918479 - RNA, 22 nt, Human
uuuggaaauacgcguaggcaga

SEQ ID NO: 918480 - RNA, 22 nt, Human
caaggcaggccaguuucaaggc

SEQ ID NO: 918481 - RNA, 18 nt, Human
uggaaauugaaacagaaa

SEQ ID NO: 918482 - RNA, 21 nt, Human
uagcagaaacaguucaggcca

SEQ ID NO: 918483 - RNA, 22 nt, Human
gaggggcaggauuauugggauu

SEQ ID NO: 918484 - RNA, 22 nt, Human
uguguccuucugggagucccag

SEQ ID NO: 918485 - RNA, 22 nt, Human
uauuguccaauaggauguuccu

SEQ ID NO: 918486 - RNA, 22 nt, Human
cugaggagacagaagccaaaua

SEQ ID NO: 918487 - RNA, 22 nt, Human
uacauugugauaggaagucacc

SEQ ID NO: 918488 - RNA, 22 nt, Human
ggguagcaugugucagaguuug

SEQ ID NO: 918489 - RNA, 22 nt, Human
cauuucacgcacacucauuacu

SEQ ID NO: 918490 - RNA, 22 nt, Human
agagggggugucagcacugcag

SEQ ID NO: 918491 - RNA, 22 nt, Human
caaaucauggaauaacuagaga

SEQ ID NO: 918492 - RNA, 22 nt, Human
cugaggucaauuaaucaacaac

SEQ ID NO: 918493 - RNA, 22 nt, Human
cugacagcagcaaauggagaua

SEQ ID NO: 918494 - RNA, 22 nt, Human
uauugcaucaguaauuuagugu

SEQ ID NO: 918495 - RNA, 22 nt, Human
aucugucugagugcuuaggacc

SEQ ID NO: 918496 - RNA, 18 nt, Human
cuuuaugugcagagcuuu

SEQ ID NO: 918497 - RNA, 22 nt, Human
agaguguguggggcugagguca

SEQ ID NO: 918498 - RNA, 22 nt, Human
ggcagcgcccgaguccgcagcu

SEQ ID NO: 918499 - RNA, 22 nt, Human
aaagauguguaagaaauaaaca

SEQ ID NO: 918500 - RNA, 22 nt, Human
caugcagaugucaugaggcaug

SEQ ID NO: 918501 - RNA, 22 nt, Human
uaguccauugauuagcucauuu

SEQ ID NO: 918502 - RNA, 22 nt, Human
ccagcagcugcuaugugguuuu

SEQ ID NO: 918503 - RNA, 22 nt, Human
ugagauucccauuaauuuuaua

SEQ ID NO: 918504 - RNA, 22 nt, Human
ggccucugcccucacuccuguc

SEQ ID NO: 918505 - RNA, 22 nt, Human
gggcagguggcagggucucugg

SEQ ID NO: 918506 - RNA, 22 nt, Human
gcagaccagccccuggagcugc

SEQ ID NO: 918507 - RNA, 22 nt, Human
guccuuggcauucugagucuug

SEQ ID NO: 918508 - RNA, 22 nt, Human
uugagaaaccuggcaguagaga

SEQ ID NO: 918509 - RNA, 22 nt, Human
uucuggaagccccagagucaga

SEQ ID NO: 918510 - RNA, 22 nt, Human
uaaaagaagcuucaaggccggc

SEQ ID NO: 918511 - RNA, 22 nt, Human
uagauaaaagggcaaagggcau

SEQ ID NO: 918512 - RNA, 22 nt, Human
cacaaauccaauuuaauucugg

SEQ ID NO: 918513 - RNA, 22 nt, Human
cuggacucauccauagagguga

SEQ ID NO: 918514 - RNA, 22 nt, Human
uggcuguuacucuuuucauuuc

SEQ ID NO: 918515 - RNA, 22 nt, Human
uuucagaggaggaaggcaguua

SEQ ID NO: 918516 - RNA, 22 nt, Human
aagcacuggagaugccagagug

SEQ ID NO: 918517 - RNA, 22 nt, Human
ccugaagcucuuaagaccuuua

SEQ ID NO: 918518 - RNA, 22 nt, Human
ggaacaguagacgaucuccuuu

SEQ ID NO: 918519 - RNA, 22 nt, Human
ccaggccaguguuugguccagg

SEQ ID NO: 918520 - RNA, 22 nt, Human
gaaggcuguuucugguagugau

SEQ ID NO: 918521 - RNA, 22 nt, Human
uuccuugcccucugggaucuug

SEQ ID NO: 918522 - RNA, 22 nt, Human
caaagcuggaaaaggaggcugg

SEQ ID NO: 918523 - RNA, 22 nt, Human
cuaggccuucauaggcauggaa

SEQ ID NO: 918524 - RNA, 22 nt, Human
gcagcccucgcuagcucucccc

SEQ ID NO: 918525 - RNA, 22 nt, Human
acaaugucucauauucguguuc

SEQ ID NO: 918526 - RNA, 22 nt, Human
auaacaugaccugugcuucaca

SEQ ID NO: 918527 - RNA, 23 nt, Human
agaucacauaguuaucagaugac

SEQ ID NO: 918528 - RNA, 22 nt, Human
aaaugacacucauucaguguca

SEQ ID NO: 918529 - RNA, 22 nt, Human
uugugcaugacugugaauagcu

SEQ ID NO: 918530 - RNA, 22 nt, Human
gcucucugccuuucucaaugac

SEQ ID NO: 918531 - RNA, 22 nt, Human
ucaucaaaggauugcaugauuu

SEQ ID NO: 918532 - RNA, 22 nt, Human
agacuguacuuucugcagcucu

SEQ ID NO: 918533 - RNA, 22 nt, Human
cacugcccuuacaugcccugca

SEQ ID NO: 918534 - RNA, 22 nt, Human
aaaacaguuuaggcaucacagu

SEQ ID NO: 918535 - RNA, 22 nt, Human
ucaaggaauuuaguuuaguaaa

SEQ ID NO: 918536 - RNA, 22 nt, Human
aagaaaacguuuugaggaguuu

SEQ ID NO: 918537 - RNA, 22 nt, Human
ugcugcaggaacuuaagaagcu

SEQ ID NO: 918538 - RNA, 22 nt, Human
ccugagagagaagcgaccuggu

SEQ ID NO: 918539 - RNA, 22 nt, Human
uaacugcagaggaaaugcaucu

SEQ ID NO: 918540 - RNA, 22 nt, Human
ugucacauaauuuaucuguagg

SEQ ID NO: 918541 - RNA, 22 nt, Human
ugggaacaguagcugcugagcu

SEQ ID NO: 918542 - RNA, 22 nt, Human
uugugagagccaaacauguaag

SEQ ID NO: 918543 - RNA, 22 nt, Human
auguauguaugcugugcuugca

SEQ ID NO: 918544 - RNA, 22 nt, Human
cugagaggcggagguugcagug

SEQ ID NO: 918545 - RNA, 22 nt, Human
cuggcucuugcgacucagcuug

SEQ ID NO: 918546 - RNA, 22 nt, Human
uguguggaugcagcgugggucu

SEQ ID NO: 918547 - RNA, 22 nt, Human
cagaagcacauguuuacaugua

SEQ ID NO: 918548 - RNA, 22 nt, Human
gauucacagaacuuagucaagc

SEQ ID NO: 918549 - RNA, 22 nt, Human
aauuuagauugauaaacaugga

SEQ ID NO: 918550 - RNA, 22 nt, Human
aaagauuugaaauuaggcauca

SEQ ID NO: 918551 - RNA, 22 nt, Human
auucaucagcuaauggacauuu

SEQ ID NO: 918552 - RNA, 22 nt, Human
gcccuguggacagugagaagug

SEQ ID NO: 918553 - RNA, 22 nt, Human
uuugucaggaauugaaaaguuu

SEQ ID NO: 918554 - RNA, 22 nt, Human
auugguggugaggacaugccag

SEQ ID NO: 918555 - RNA, 22 nt, Human
acaaugcagccuauggauccag

SEQ ID NO: 918556 - RNA, 22 nt, Human
uuuccuuugugcaggccuuggg

SEQ ID NO: 918557 - RNA, 22 nt, Human
ugucaccuuuacccuuuuauag

SEQ ID NO: 918558 - RNA, 22 nt, Human
cagcaugcuugggggagggagc

SEQ ID NO: 918559 - RNA, 22 nt, Human
uuugagaaaggggauuuaauuc

SEQ ID NO: 918560 - RNA, 22 nt, Human
ugcuccagcgcugccaccaguu

SEQ ID NO: 918561 - RNA, 21 nt, Human
gauauuuaugacucauuccuu

SEQ ID NO: 918562 - RNA, 22 nt, Human
aguugaagguuggcugauccau

SEQ ID NO: 918563 - RNA, 22 nt, Human
auuuagaaauuccaaaaguauu

SEQ ID NO: 918564 - RNA, 18 nt, Human
cugcugugucgucugggc

SEQ ID NO: 918565 - RNA, 22 nt, Human
uuacauaacgguaugaaaaaug

SEQ ID NO: 918566 - RNA, 22 nt, Human
cccagcagaaucugaugagggc

SEQ ID NO: 918567 - RNA, 22 nt, Human
uaagcaaucuaaaagccuuacc

SEQ ID NO: 918568 - RNA, 22 nt, Human
aaagccaucaguaaaaugauuu

SEQ ID NO: 918569 - RNA, 22 nt, Human
cagacaggcuagccagacucac

SEQ ID NO: 918570 - RNA, 22 nt, Human
gauguuaaagguugguaaguca

SEQ ID NO: 918571 - RNA, 22 nt, Human
cauuucuagagucccaagaggu

SEQ ID NO: 918572 - RNA, 22 nt, Human
cugaaguuucgagauggaugug

SEQ ID NO: 918573 - RNA, 22 nt, Human
cccagcugauuuuugcagagau

SEQ ID NO: 918574 - RNA, 22 nt, Human
uccagcauucuuagaccucuau

SEQ ID NO: 918575 - RNA, 22 nt, Human
ugagauaauaaauagcuuucuu

SEQ ID NO: 918576 - RNA, 22 nt, Human
uugauguagggauuccuguaaa

SEQ ID NO: 918577 - RNA, 22 nt, Human
cugccgggcccuggauuuggca

SEQ ID NO: 918578 - RNA, 22 nt, Human
aaggcugaguaaaacagagaac

SEQ ID NO: 918579 - RNA, 22 nt, Human
uaaggaauaucauaagaaguag

SEQ ID NO: 918580 - RNA, 22 nt, Human
uagauuucucauucauagauug

SEQ ID NO: 918581 - RNA, 22 nt, Human
ucacaugcucaccuaagccaca

SEQ ID NO: 918582 - RNA, 22 nt, Human
uccccagucccggcggugggug

SEQ ID NO: 918583 - RNA, 22 nt, Human
ccuggcccacauggcuucuccc

SEQ ID NO: 918584 - RNA, 22 nt, Human
gaugucuuaagcccagaaguuc

SEQ ID NO: 918585 - RNA, 22 nt, Human
uaacuuuaguguaugagguaag

SEQ ID NO: 918586 - RNA, 22 nt, Human
cuguggcuggcucaucauaggu

SEQ ID NO: 918587 - RNA, 22 nt, Human
gccaggcucucagugacugccc

SEQ ID NO: 918588 - RNA, 22 nt, Human
ugcuggaagcuccugcaugucu

SEQ ID NO: 918589 - RNA, 22 nt, Human
ucugguccucucugugaugcua

SEQ ID NO: 918590 - RNA, 22 nt, Human
ucuguccagcucucaggagaca

SEQ ID NO: 918591 - RNA, 22 nt, Human
ggaggcggacacagguaguguu

SEQ ID NO: 918592 - RNA, 20 nt, Human
uauuuagauucaaguaugga

SEQ ID NO: 918593 - RNA, 22 nt, Human
ucccagccuuucuuuucugcug

SEQ ID NO: 918594 - RNA, 22 nt, Human
caucugcuguaauuaacaagcc

SEQ ID NO: 918595 - RNA, 22 nt, Human
aaaggagaaaacauacaggacu

SEQ ID NO: 918596 - RNA, 22 nt, Human
ccaggcaagagaggcucuggca

SEQ ID NO: 918597 - RNA, 22 nt, Human
ucuugaaaguaucuuauuuugu

SEQ ID NO: 918598 - RNA, 22 nt, Human
accaucuuaguggccagcucuc

SEQ ID NO: 918599 - RNA, 22 nt, Human
agagccaguuguuaagcacuua

SEQ ID NO: 918600 - RNA, 22 nt, Human
aucaauaucagaucagacagga

SEQ ID NO: 918601 - RNA, 22 nt, Human
agugauuuugucagcuucugca

SEQ ID NO: 918602 - RNA, 22 nt, Human
cccccaaaguuugcacggauaa

SEQ ID NO: 918603 - RNA, 16 nt, Human
aacauucauaugagug

SEQ ID NO: 918604 - RNA, 22 nt, Human
ggccugaggccaccagcagccc

SEQ ID NO: 918605 - RNA, 22 nt, Human
uggaagggaaaguuuggggucc

SEQ ID NO: 918606 - RNA, 22 nt, Human
aaagugggaacaauggagagug

SEQ ID NO: 918607 - RNA, 22 nt, Human
aacaucuagguucucaucgaua

SEQ ID NO: 918608 - RNA, 23 nt, Human
ggggccugcaccggucugcgcgg

SEQ ID NO: 918609 - RNA, 22 nt, Human
cugagagguaaucacacaaaau

SEQ ID NO: 918610 - RNA, 22 nt, Human
aacaauaauugcgguucucuau

SEQ ID NO: 918611 - RNA, 22 nt, Human
cuguauaugugcauacacacac

SEQ ID NO: 918612 - RNA, 22 nt, Human
aucagaaucuucugaacagugg

SEQ ID NO: 918613 - RNA, 22 nt, Human
uuuagaauuggcuagugggaau

SEQ ID NO: 918614 - RNA, 22 nt, Human
uccagugucugagcccuuagcu

SEQ ID NO: 918615 - RNA, 22 nt, Human
agacgagggcccccaggacagc

SEQ ID NO: 918616 - RNA, 23 nt, Human
ucucaguuccagaggcuacaagu

SEQ ID NO: 918617 - RNA, 22 nt, Human
uugucuguccaggcaccccaag

SEQ ID NO: 918618 - RNA, 22 nt, Human
ucaggaggacagauaaggauag

SEQ ID NO: 918619 - RNA, 23 nt, Human
ugaguguguucccugugagauuu

SEQ ID NO: 918620 - RNA, 19 nt, Human
gcuaggugaccagcuggau

SEQ ID NO: 918621 - RNA, 22 nt, Human
ucuagguuagaacccagaaaag

SEQ ID NO: 918622 - RNA, 22 nt, Human
gguccucugagcacgccaggca

SEQ ID NO: 918623 - RNA, 22 nt, Human
acuuuuaaggggccuugauuua

SEQ ID NO: 918624 - RNA, 22 nt, Human
uuggcagcuguuggaccuugac

SEQ ID NO: 918625 - RNA, 22 nt, Human
aggagccaguggaguuccugcc

SEQ ID NO: 918626 - RNA, 20 nt, Human
uuggcaguuaagaaucuuac

SEQ ID NO: 918627 - RNA, 22 nt, Human
uggcuuuauacuuaagcacaau

SEQ ID NO: 918628 - RNA, 22 nt, Human
auguuaugugcaagauacauaa

SEQ ID NO: 918629 - RNA, 22 nt, Human
uggcuccaccgccgcggagcuc

SEQ ID NO: 918630 - RNA, 22 nt, Human
gcugucaccaaagcaggcacug

SEQ ID NO: 918631 - RNA, 22 nt, Human
cuuuggucuguggcuugggucu

SEQ ID NO: 918632 - RNA, 22 nt, Human
ugcuggcuguauaugugagagu

SEQ ID NO: 918633 - RNA, 22 nt, Human
uuugucuucauccuucgagcug

SEQ ID NO: 918634 - RNA, 22 nt, Human
gcuguucuuuggucaaagguau

SEQ ID NO: 918635 - RNA, 22 nt, Human
ucugacccacaagcauccugga

SEQ ID NO: 918636 - RNA, 22 nt, Human
auuugucuuuggaccugugaga

SEQ ID NO: 918637 - RNA, 22 nt, Human
ucucugagggagauggccugcc

SEQ ID NO: 918638 - RNA, 22 nt, Human
ccacuuuugggaacagugagua

SEQ ID NO: 918639 - RNA, 22 nt, Human
ucagagucuaaauagaagaaua

SEQ ID NO: 918640 - RNA, 22 nt, Human
uagcucuggcauucuuuccaaa

SEQ ID NO: 918641 - RNA, 22 nt, Human
uccauucuaugcuuacauuuau

SEQ ID NO: 918642 - RNA, 22 nt, Human
ucucauugccuucacucuucag

SEQ ID NO: 918643 - RNA, 22 nt, Human
gcugugagcacugcugggugga

SEQ ID NO: 918644 - RNA, 22 nt, Human
aaagacauggcaagagaugggg

SEQ ID NO: 918645 - RNA, 22 nt, Human
uggacaguaagagaagauguag

SEQ ID NO: 918646 - RNA, 22 nt, Human
guccccagcuaaucucuuugcc

SEQ ID NO: 918647 - RNA, 22 nt, Human
uuucuaaggugagguagaaaau

SEQ ID NO: 918648 - RNA, 22 nt, Human
agaggaacccagacagggcuuu

SEQ ID NO: 918649 - RNA, 22 nt, Human
gaggaugguaugaggcaagcaa

SEQ ID NO: 918650 - RNA, 22 nt, Human
auuuauuggaugcuuacuuggg

SEQ ID NO: 918651 - RNA, 22 nt, Human
ccuggcuccugcacagaucuuu

SEQ ID NO: 918652 - RNA, 22 nt, Human
uuccaguuaaggaagcuauucu

SEQ ID NO: 918653 - RNA, 22 nt, Human
aacuuugggccuaaguacuguu

SEQ ID NO: 918654 - RNA, 22 nt, Human
uugaaaggaauacagaggccua

SEQ ID NO: 918655 - RNA, 22 nt, Human
uggcaguggcucagagugcaga

SEQ ID NO: 918656 - RNA, 22 nt, Human
caggaggcagagguugcaguga

SEQ ID NO: 918657 - RNA, 22 nt, Human
caguuuaaguguguugaaggua

SEQ ID NO: 918658 - RNA, 22 nt, Human
gagccuggagcuggaacgaagc

SEQ ID NO: 918659 - RNA, 22 nt, Human
aagaccagaggauauaaccaga

SEQ ID NO: 918660 - RNA, 22 nt, Human
agcugccucugcugguuuagaa

SEQ ID NO: 918661 - RNA, 22 nt, Human
aaguucuacagcuucgcaggca

SEQ ID NO: 918662 - RNA, 18 nt, Human
guauaucugcacauauac

SEQ ID NO: 918663 - RNA, 22 nt, Human
cugcaggcccccuuccuggagu

SEQ ID NO: 918664 - RNA, 22 nt, Human
ugaaauguggagaugguaagua

SEQ ID NO: 918665 - RNA, 22 nt, Human
uccaccagcagccugucagccu

SEQ ID NO: 918666 - RNA, 22 nt, Human
acuucauguugcucuuggcuau

SEQ ID NO: 918667 - RNA, 22 nt, Human
uagcagcugucaguuucacaua

SEQ ID NO: 918668 - RNA, 22 nt, Human
auucaguuaaaaacuguacuuc

SEQ ID NO: 918669 - RNA, 22 nt, Human
caaugacaucucccugcucuaa

SEQ ID NO: 918670 - RNA, 22 nt, Human
uuuccuaagggaugcggcucaa

SEQ ID NO: 918671 - RNA, 20 nt, Human
ucauggcugcugagagguuc

SEQ ID NO: 918672 - RNA, 22 nt, Human
cuucucuggcuccucagcgccc

SEQ ID NO: 918673 - RNA, 22 nt, Human
acagcagcgucaacuuaaaauu

SEQ ID NO: 918674 - RNA, 22 nt, Human
uuuauucacucauucagccagu

SEQ ID NO: 918675 - RNA, 21 nt, Human
uuugugugucacgugcacagg

SEQ ID NO: 918676 - RNA, 22 nt, Human
uucugagaguaaacauagccug

SEQ ID NO: 918677 - RNA, 22 nt, Human
ccuguguggaaaccgcaugacg

SEQ ID NO: 918678 - RNA, 22 nt, Human
cagggugugaacaguguaaaac

SEQ ID NO: 918679 - RNA, 22 nt, Human
ugcugcugacauuuggggcuug

SEQ ID NO: 918680 - RNA, 22 nt, Human
uugucugaauucuucuaggcag

SEQ ID NO: 918681 - RNA, 22 nt, Human
uuaaaugaacgagauaugcaac

SEQ ID NO: 918682 - RNA, 21 nt, Human
agcaaaggcaggagagguuuc

SEQ ID NO: 918683 - RNA, 22 nt, Human
ccugucuguccuuugcauucuu

SEQ ID NO: 918684 - RNA, 22 nt, Human
aagggggcccagcacuaaguug

SEQ ID NO: 918685 - RNA, 22 nt, Human
ccucugccuuuagugaaaguug

SEQ ID NO: 918686 - RNA, 22 nt, Human
cuccaggcuggauccaagucaa

SEQ ID NO: 918687 - RNA, 22 nt, Human
uagcagcaggggaaacagcugu

SEQ ID NO: 918688 - RNA, 23 nt, Human
cugggcugcuugagucccuggcu

SEQ ID NO: 918689 - RNA, 22 nt, Human
ugguaagggcucucuuucuggc

SEQ ID NO: 918690 - RNA, 22 nt, Human
guauagaaggaucuggugaauu

SEQ ID NO: 918691 - RNA, 22 nt, Human
cugggacuuuacccuguggccc

SEQ ID NO: 918692 - RNA, 22 nt, Human
gagaaaagcgaaggaccuggag

SEQ ID NO: 918693 - RNA, 22 nt, Human
aaguaaauaucuguuuauagca

SEQ ID NO: 918694 - RNA, 18 nt, Human
gcuuuuuagugcaucuuc

SEQ ID NO: 918695 - RNA, 22 nt, Human
uggcuuggugagcagaguguag

SEQ ID NO: 918696 - RNA, 22 nt, Human
ugaagccauuacuguguuaggg

SEQ ID NO: 918697 - RNA, 22 nt, Human
aagacaagcaucaaaucaggca

SEQ ID NO: 918698 - RNA, 22 nt, Human
caguccagcccccugcuaaaag

SEQ ID NO: 918699 - RNA, 22 nt, Human
aguguauuaaugcuccaggagu

SEQ ID NO: 918700 - RNA, 22 nt, Human
ucccagaaucuuuggaagagca

SEQ ID NO: 918701 - RNA, 22 nt, Human
ggccccucagcaucugagucag

SEQ ID NO: 918702 - RNA, 22 nt, Human
cuuggugccacagcagcuugcg

SEQ ID NO: 918703 - RNA, 22 nt, Human
auuuucugugugcagauaaaua

SEQ ID NO: 918704 - RNA, 22 nt, Human
cagcuucaugacaaacaguuuu

SEQ ID NO: 918705 - RNA, 22 nt, Human
uucauggccuacuuugcuucaa

SEQ ID NO: 918706 - RNA, 22 nt, Human
ucuggccaggggucccugaagg

SEQ ID NO: 918707 - RNA, 22 nt, Human
uguuccugguuccugcaugaug

SEQ ID NO: 918708 - RNA, 22 nt, Human
cugggagugucccucugguaau

SEQ ID NO: 918709 - RNA, 22 nt, Human
ucaaauacagaagauccuuucc

SEQ ID NO: 918710 - RNA, 20 nt, Human
cuuagaagggacauccuggg

SEQ ID NO: 918711 - RNA, 22 nt, Human
cugccuggcauggagaagagaa

SEQ ID NO: 918712 - RNA, 22 nt, Human
uauguacagggauagaacuuga

SEQ ID NO: 918713 - RNA, 22 nt, Human
uagcuggcuuauauaaaagggc

SEQ ID NO: 918714 - RNA, 22 nt, Human
ggcucuggagauguccgaccug

SEQ ID NO: 918715 - RNA, 22 nt, Human
uaacagaaaagaacugaguuug

SEQ ID NO: 918716 - RNA, 22 nt, Human
auacuucuuuaagaguaagucu

SEQ ID NO: 918717 - RNA, 20 nt, Human
aaguuggcuccuccuagcaa

SEQ ID NO: 918718 - RNA, 22 nt, Human
acaaacaucuugaccucagauu

SEQ ID NO: 918719 - RNA, 22 nt, Human
aauugugcccgugacauuucau

SEQ ID NO: 918720 - RNA, 19 nt, Human
ucugcaagugucagaggcg

SEQ ID NO: 918721 - RNA, 22 nt, Human
aaggagguuaucccaguggacu

SEQ ID NO: 918722 - RNA, 22 nt, Human
cucuggcuggcaccugaucuga

SEQ ID NO: 918723 - RNA, 22 nt, Human
ggcagauggaaugagcugucua

SEQ ID NO: 918724 - RNA, 22 nt, Human
gcccacugagugacucccucag

SEQ ID NO: 918725 - RNA, 19 nt, Human
ggacacagaaagcugcauu

SEQ ID NO: 918726 - RNA, 22 nt, Human
gagaaguuuggagugaagguuu

SEQ ID NO: 918727 - RNA, 18 nt, Human
cccagcuccacuucccuc

SEQ ID NO: 918728 - RNA, 22 nt, Human
uuuuuuccagcuucuagaggcc

SEQ ID NO: 918729 - RNA, 22 nt, Human
aggcugaggcagguggaucacu

SEQ ID NO: 918730 - RNA, 22 nt, Human
agauaagucuuccauauuucua

SEQ ID NO: 918731 - RNA, 22 nt, Human
ucccuguccugggcaaucccag

SEQ ID NO: 918732 - RNA, 22 nt, Human
agggcaugcuggaggagagaca

SEQ ID NO: 918733 - RNA, 22 nt, Human
cucuuuacugcuacuacaaaga

SEQ ID NO: 918734 - RNA, 21 nt, Human
uccaggcugaugaugucaacu

SEQ ID NO: 918735 - RNA, 22 nt, Human
uaguaacagauuuauacagucu

SEQ ID NO: 918736 - RNA, 22 nt, Human
uucccaggaagccucuccaagc

SEQ ID NO: 918737 - RNA, 22 nt, Human
acugaaaguccagcaugguaca

SEQ ID NO: 918738 - RNA, 22 nt, Human
ucuggugucaggcuguccucgg

SEQ ID NO: 918739 - RNA, 22 nt, Human
auaguuuuauagauauugugua

SEQ ID NO: 918740 - RNA, 21 nt, Human
ugacccuucuagcagaacaca

SEQ ID NO: 918741 - RNA, 22 nt, Human
aacuccuguucuaugacaagag

SEQ ID NO: 918742 - RNA, 22 nt, Human
auauaguuggguuucauucuac

SEQ ID NO: 918743 - RNA, 22 nt, Human
uucaacaucaagaaugcaugga

SEQ ID NO: 918744 - RNA, 19 nt, Human
cugugggcggaggaggggc

SEQ ID NO: 918745 - RNA, 22 nt, Human
agcugagcucaggcugauguaa

SEQ ID NO: 918746 - RNA, 22 nt, Human
uuuccaaauaaggucacauucu

SEQ ID NO: 918747 - RNA, 22 nt, Human
guaugugagguugguuuccagg

SEQ ID NO: 918748 - RNA, 22 nt, Human
cuguauuuguccucuauuuauu

SEQ ID NO: 918749 - RNA, 22 nt, Human
gaaauaauucugugucugaaca

SEQ ID NO: 918750 - RNA, 22 nt, Human
cugagcccuugaacccaagucc

SEQ ID NO: 918751 - RNA, 22 nt, Human
uccaggaccugacugggccugc

SEQ ID NO: 918752 - RNA, 20 nt, Human
ggcagcaggaguuuccucuu

SEQ ID NO: 918753 - RNA, 22 nt, Human
agugucuggaggcauucuuggu

SEQ ID NO: 918754 - RNA, 22 nt, Human
aacauugaacuuggcacaccca

SEQ ID NO: 918755 - RNA, 22 nt, Human
aguauauaugaggaaccacaaa

SEQ ID NO: 918756 - RNA, 22 nt, Human
uggaaugugcuacuguugauuu

SEQ ID NO: 918757 - RNA, 22 nt, Human
aagccacuuggggaaagaugga

SEQ ID NO: 918758 - RNA, 20 nt, Human
uuacagaaaugauguuauuu

SEQ ID NO: 918759 - RNA, 18 nt, Human
ggagcccagaggacagga

SEQ ID NO: 918760 - RNA, 17 nt, Human
aggaggaucagagagua

SEQ ID NO: 918761 - RNA, 22 nt, Human
uuuaaucuauucccuaaacacc

SEQ ID NO: 918762 - RNA, 22 nt, Human
agcaggcuaagggaccuguuua

SEQ ID NO: 918763 - RNA, 22 nt, Human
uccaauguuccaggguaaaugu

SEQ ID NO: 918764 - RNA, 22 nt, Human
agccacagguguuggccagugu

SEQ ID NO: 918765 - RNA, 23 nt, Human
ggcagcugggcagcacucauggg

SEQ ID NO: 918766 - RNA, 22 nt, Human
ccugggcugcucauggggauga

SEQ ID NO: 918767 - RNA, 22 nt, Human
agaaguuguucaagguggugag

SEQ ID NO: 918768 - RNA, 22 nt, Human
ggagaaggcgaagucauucuuu

SEQ ID NO: 918769 - RNA, 22 nt, Human
gaaaguauuagccuagaaguca

SEQ ID NO: 918770 - RNA, 23 nt, Human
caaaaguuagcccuucccaucuc

SEQ ID NO: 918771 - RNA, 22 nt, Human
cagaaaacaaaccuauccugag

SEQ ID NO: 918772 - RNA, 22 nt, Human
uguaugcauaaaauuauuuaca

SEQ ID NO: 918773 - RNA, 22 nt, Human
agagaagacuuacagccacagu

SEQ ID NO: 918774 - RNA, 22 nt, Human
gccaaacuacaaguuaaauuuu

SEQ ID NO: 918775 - RNA, 22 nt, Human
agaaaucuuuccugaaguguuu

SEQ ID NO: 918776 - RNA, 22 nt, Human
acccaggagacagguugcagug

SEQ ID NO: 918777 - RNA, 22 nt, Human
ugcagagguguugcugagauaa

SEQ ID NO: 918778 - RNA, 22 nt, Human
gcacacaugcaugugugcaucc

SEQ ID NO: 918779 - RNA, 22 nt, Human
guccagcccucugccuccaggu

SEQ ID NO: 918780 - RNA, 22 nt, Human
ugagaagcagcuuacagguguc

SEQ ID NO: 918781 - RNA, 22 nt, Human
acuuuguuuuauagcacauaag

SEQ ID NO: 918782 - RNA, 22 nt, Human
auauguacacuuacguuacaaa

SEQ ID NO: 918783 - RNA, 22 nt, Human
ggagugaguggccuugucacug

SEQ ID NO: 918784 - RNA, 22 nt, Human
uucagugguuugaugauguaua

SEQ ID NO: 918785 - RNA, 22 nt, Human
ucagcugccuuucccaugcuag

SEQ ID NO: 918786 - RNA, 21 nt, Human
caguuuaauaacaaagaagga

SEQ ID NO: 918787 - RNA, 22 nt, Human
aaaaugcuauuucauggaggag

SEQ ID NO: 918788 - RNA, 22 nt, Human
ugguccuggggaucugcaguga

SEQ ID NO: 918789 - RNA, 22 nt, Human
gcccugagaggcaaugacucuu

SEQ ID NO: 918790 - RNA, 22 nt, Human
cagaagcagauucuaaagcaag

SEQ ID NO: 918791 - RNA, 22 nt, Human
uaccaaauguaaucauucuaau

SEQ ID NO: 918792 - RNA, 22 nt, Human
ugcacuauuucgccaugguugu

SEQ ID NO: 918793 - RNA, 17 nt, Human
cccagcugcgucugagg

SEQ ID NO: 918794 - RNA, 22 nt, Human
aguucuauuggguagguucugu

SEQ ID NO: 918795 - RNA, 22 nt, Human
augugucuuugagacucugcua

SEQ ID NO: 918796 - RNA, 22 nt, Human
aggcacaggaggugguaagaag

SEQ ID NO: 918797 - RNA, 22 nt, Human
ggcuccacaauuacacacugga

SEQ ID NO: 918798 - RNA, 22 nt, Human
uucaucuggucuaguuuuuagu

SEQ ID NO: 918799 - RNA, 22 nt, Human
augagguaauagggcagugggg

SEQ ID NO: 918800 - RNA, 22 nt, Human
ucucccacugcaagcccaggcu

SEQ ID NO: 918801 - RNA, 22 nt, Human
cugcagggcauuguaacucuuu

SEQ ID NO: 918802 - RNA, 22 nt, Human
ugugggucauaguaucguguua

SEQ ID NO: 918803 - RNA, 22 nt, Human
uccauccacauuaacagauacg

SEQ ID NO: 918804 - RNA, 22 nt, Human
ucagcuguacugugccauagcu

SEQ ID NO: 918805 - RNA, 22 nt, Human
cccaggagaucuggaucucguc

SEQ ID NO: 918806 - RNA, 22 nt, Human
gguuauuuugguugucuaaggc

SEQ ID NO: 918807 - RNA, 22 nt, Human
cauaacauguacauauaaaugc

SEQ ID NO: 918808 - RNA, 22 nt, Human
gccaccagccccaugcgcugug

SEQ ID NO: 918809 - RNA, 22 nt, Human
uuggaauucagcuugcuuauaa

SEQ ID NO: 918810 - RNA, 22 nt, Human
acaguaagcgggguuggagggc

SEQ ID NO: 918811 - RNA, 22 nt, Human
ucucugucugcacccaaucaau

SEQ ID NO: 918812 - RNA, 22 nt, Human
cacccacauuccaucacucugc

SEQ ID NO: 918813 - RNA, 22 nt, Human
ucaauucuagagccuuacauug

SEQ ID NO: 918814 - RNA, 18 nt, Human
uggaaucauugucaccau

SEQ ID NO: 918815 - RNA, 22 nt, Human
uggucugauaccggauuccagu

SEQ ID NO: 918816 - RNA, 20 nt, Human
ucacagcuggcuaugacagg

SEQ ID NO: 918817 - RNA, 22 nt, Human
cugcucuaggucauggguacuu

SEQ ID NO: 918818 - RNA, 22 nt, Human
uccuggauucugcccugaaggc

SEQ ID NO: 918819 - RNA, 22 nt, Human
uauaguacacuuagguacuuca

SEQ ID NO: 918820 - RNA, 22 nt, Human
cuuuaguuauuuagacuacagu

SEQ ID NO: 918821 - RNA, 22 nt, Human
caggccagagcgcgugguuggg

SEQ ID NO: 918822 - RNA, 22 nt, Human
aagaugcacaauguggcaauua

SEQ ID NO: 918823 - RNA, 22 nt, Human
acagagagaggcccgaggcugc

SEQ ID NO: 918824 - RNA, 22 nt, Human
ucuagucauucaugcuaugauu

SEQ ID NO: 918825 - RNA, 22 nt, Human
augcacaucuuacagaugcaga

SEQ ID NO: 918826 - RNA, 22 nt, Human
uuuggggcucagcaggcuguuu

SEQ ID NO: 918827 - RNA, 22 nt, Human
ccuuuagaauacagacuuucua

SEQ ID NO: 918828 - RNA, 22 nt, Human
cuguuguauuauucaauauuau

SEQ ID NO: 918829 - RNA, 22 nt, Human
aagaugauuauguagauuggga

SEQ ID NO: 918830 - RNA, 22 nt, Human
cccuggaguccuggcaguugau

SEQ ID NO: 918831 - RNA, 22 nt, Human
aggcuggggaauugaauuugcu

SEQ ID NO: 918832 - RNA, 22 nt, Human
auggcauuaggaccaugagccu

SEQ ID NO: 918833 - RNA, 22 nt, Human
uggcagcaaaaccagaaucaga

SEQ ID NO: 918834 - RNA, 22 nt, Human
cagugaggugcccagccugccc

SEQ ID NO: 918835 - RNA, 22 nt, Human
uuuaggaaugugguuuuugagc

SEQ ID NO: 918836 - RNA, 17 nt, Human
agugucagggcccuucc

SEQ ID NO: 918837 - RNA, 22 nt, Human
cucuggcugccucucaggccug

SEQ ID NO: 918838 - RNA, 22 nt, Human
uuuuaguuacugcaguagcaaa

SEQ ID NO: 918839 - RNA, 21 nt, Human
cacacagugaucuauccacau

SEQ ID NO: 918840 - RNA, 20 nt, Human
ccagaagguaggauggaaca

SEQ ID NO: 918841 - RNA, 22 nt, Human
aaacaaagccagggaaguuaug

SEQ ID NO: 918842 - RNA, 22 nt, Human
ugggccuccuggaagaaugugg

SEQ ID NO: 918843 - RNA, 22 nt, Human
gcagagugaagggagaggugug

SEQ ID NO: 918844 - RNA, 22 nt, Human
ugagcuagggcuggugaggagc

SEQ ID NO: 918845 - RNA, 22 nt, Human
ugggggugcccuaugaggaagc

SEQ ID NO: 918846 - RNA, 22 nt, Human
auuauauuugaaagguuggaag

SEQ ID NO: 918847 - RNA, 22 nt, Human
ggaggccuagaaaagugguucu

SEQ ID NO: 918848 - RNA, 22 nt, Human
aguguggucgggagcgcggggc

SEQ ID NO: 918849 - RNA, 22 nt, Human
uccaagucuuccuucccaaacc

SEQ ID NO: 918850 - RNA, 20 nt, Human
uacaaagaaugagguucagg

SEQ ID NO: 918851 - RNA, 22 nt, Human
ggcccagucuggggcccuguga

SEQ ID NO: 918852 - RNA, 22 nt, Human
guaaaucauggucagaauaaau

SEQ ID NO: 918853 - RNA, 22 nt, Human
gucauauuauaaauguucuguu

SEQ ID NO: 918854 - RNA, 22 nt, Human
ucuuaagaaagugacaaauagg

SEQ ID NO: 918855 - RNA, 22 nt, Human
caggcucccugccagggccggc

SEQ ID NO: 918856 - RNA, 22 nt, Human
ugggcuacucugggagccuaac

SEQ ID NO: 918857 - RNA, 22 nt, Human
uagaaucuaguucauucauuug

SEQ ID NO: 918858 - RNA, 22 nt, Human
gagcuggccucaggcacaggag

SEQ ID NO: 918859 - RNA, 22 nt, Human
ugugugugaguccuggcuuucc

SEQ ID NO: 918860 - RNA, 22 nt, Human
cugcaucauaaaauuuagaguu

SEQ ID NO: 918861 - RNA, 22 nt, Human
ugcugcagacgaagcccaugcc

SEQ ID NO: 918862 - RNA, 22 nt, Human
cuggcuccaucacugggugaug

SEQ ID NO: 918863 - RNA, 22 nt, Human
gucaacauuuacugcccuggcc

SEQ ID NO: 918864 - RNA, 22 nt, Human
ucuggcccaucuucugccacca

SEQ ID NO: 918865 - RNA, 22 nt, Human
ggcugcagaggucacuuuauag

SEQ ID NO: 918866 - RNA, 22 nt, Human
ggguggagaggcuaaguccagu

SEQ ID NO: 918867 - RNA, 20 nt, Human
ugccagggccagcagaggcu

SEQ ID NO: 918868 - RNA, 22 nt, Human
agggaccucuucuugcagcuga

SEQ ID NO: 918869 - RNA, 22 nt, Human
auuuuagagcuccaaguacagc

SEQ ID NO: 918870 - RNA, 22 nt, Human
uaacauuagguagacauaagcc

SEQ ID NO: 918871 - RNA, 22 nt, Human
cuagagaagagguuaagcauga

SEQ ID NO: 918872 - RNA, 22 nt, Human
ugcaaacaccacagagacaauu

SEQ ID NO: 918873 - RNA, 22 nt, Human
acauaagugcacaauaaauauu

SEQ ID NO: 918874 - RNA, 22 nt, Human
ugggaauggaugcuaagugcua

SEQ ID NO: 918875 - RNA, 22 nt, Human
uaggggagcucgggugcaaucg

SEQ ID NO: 918876 - RNA, 20 nt, Human
ugcagcagaagcccaugcuc

SEQ ID NO: 918877 - RNA, 20 nt, Human
gaaacauuggcagcaacuga

SEQ ID NO: 918878 - RNA, 22 nt, Human
cuuugccuccuagagcacguuc

SEQ ID NO: 918879 - RNA, 19 nt, Human
auuuauuguaugauuccau

SEQ ID NO: 918880 - RNA, 21 nt, Human
agcauucaaaagaugccauaa

SEQ ID NO: 918881 - RNA, 22 nt, Human
gaacauuuccagaaaggaacua

SEQ ID NO: 918882 - RNA, 22 nt, Human
uuugcaaacauucagggcucca

SEQ ID NO: 918883 - RNA, 22 nt, Human
augcacaggaccacacauaaug

SEQ ID NO: 918884 - RNA, 22 nt, Human
guccuggguccccgcaggucag

SEQ ID NO: 918885 - RNA, 22 nt, Human
ccagcuuuauagcuucaaagga

SEQ ID NO: 918886 - RNA, 19 nt, Human
cauuacaaauuuguaggga

SEQ ID NO: 918887 - RNA, 23 nt, Human
uucauugagcuguucuugaggau

SEQ ID NO: 918888 - RNA, 22 nt, Human
cuccaggacugaggacagagcu

SEQ ID NO: 918889 - RNA, 22 nt, Human
ccucccucccugcagaagccac

SEQ ID NO: 918890 - RNA, 22 nt, Human
cacagaaauauugugucccuug

SEQ ID NO: 918891 - RNA, 22 nt, Human
caguuucugggcguucacaggu

SEQ ID NO: 918892 - RNA, 22 nt, Human
gagcuguccuaccaggaguccu

SEQ ID NO: 918893 - RNA, 19 nt, Human
cucucagccugucuccuug

SEQ ID NO: 918894 - RNA, 22 nt, Human
acagugugacaauugugucaga

SEQ ID NO: 918895 - RNA, 22 nt, Human
caaauaagcaauuccauucuuc

SEQ ID NO: 918896 - RNA, 22 nt, Human
ucagaggugcaagaaguucuga

SEQ ID NO: 918897 - RNA, 22 nt, Human
cuacaguagagaggauguagaa

SEQ ID NO: 918898 - RNA, 22 nt, Human
acuggcuggccgcgcucuucgc

SEQ ID NO: 918899 - RNA, 20 nt, Human
gauacacagcacagagggcc

SEQ ID NO: 918900 - RNA, 22 nt, Human
gaacaugaaaagucuuacacgc

SEQ ID NO: 918901 - RNA, 22 nt, Human
caaaguuuaaaguagauuucag

SEQ ID NO: 918902 - RNA, 22 nt, Human
gugugccuguaucaugguaacc

SEQ ID NO: 918903 - RNA, 22 nt, Human
aacauucugucaauugaugacc

SEQ ID NO: 918904 - RNA, 22 nt, Human
auucacagaauaguuuuaccag

SEQ ID NO: 918905 - RNA, 22 nt, Human
aacaauugacacuucauuguga

SEQ ID NO: 918906 - RNA, 22 nt, Human
caagcugccaccagaagagcau

SEQ ID NO: 918907 - RNA, 22 nt, Human
uauugugaauuuggaagcaaug

SEQ ID NO: 918908 - RNA, 22 nt, Human
ucacuuauaaaaugcaagaucu

SEQ ID NO: 918909 - RNA, 23 nt, Human
uaauuagauguugauuccugaga

SEQ ID NO: 918910 - RNA, 21 nt, Human
cacuugaaugguguuuuacaa

SEQ ID NO: 918911 - RNA, 22 nt, Human
gcugggcccagaucccaggauc

SEQ ID NO: 918912 - RNA, 22 nt, Human
ugaccaggauacugcagggaug

SEQ ID NO: 918913 - RNA, 20 nt, Human
auguucuucauuuaauguuc

SEQ ID NO: 918914 - RNA, 22 nt, Human
uggcagugaugcuuaugguuug

SEQ ID NO: 918915 - RNA, 22 nt, Human
acagccaggacuuggcccucuu

SEQ ID NO: 918916 - RNA, 22 nt, Human
acuccaggguuuugcaccugga

SEQ ID NO: 918917 - RNA, 22 nt, Human
uguccaagaacagacugccagg

SEQ ID NO: 918918 - RNA, 22 nt, Human
aacauuuauugagcaccuacug

SEQ ID NO: 918919 - RNA, 22 nt, Human
gagggcugcuggaaaaaugcag

SEQ ID NO: 918920 - RNA, 22 nt, Human
ugggucaggcugggaguccuga

SEQ ID NO: 918921 - RNA, 22 nt, Human
agcagccacccagcugcucauu

SEQ ID NO: 918922 - RNA, 22 nt, Human
ggaagaaagcacacaaacuuga

SEQ ID NO: 918923 - RNA, 22 nt, Human
gccauggcccauaccaggugca

SEQ ID NO: 918924 - RNA, 22 nt, Human
uucuuaggagcauuaguaauuu

SEQ ID NO: 918925 - RNA, 22 nt, Human
auauauuuuuugagacagaguc

SEQ ID NO: 918926 - RNA, 22 nt, Human
cucugggcuccuucagcccuuu

SEQ ID NO: 918927 - RNA, 22 nt, Human
gcagacaggcccaguggaggga

SEQ ID NO: 918928 - RNA, 22 nt, Human
uucaaauuugguaugcaagcca

SEQ ID NO: 918929 - RNA, 19 nt, Human
ccccaggguaggcuagggg

SEQ ID NO: 918930 - RNA, 22 nt, Human
aagauuuguggauuuaaggaua

SEQ ID NO: 918931 - RNA, 22 nt, Human
aaggaggcacucgcucucaggg

SEQ ID NO: 918932 - RNA, 22 nt, Human
cugggcacuuuggggagccuac

SEQ ID NO: 918933 - RNA, 22 nt, Human
gcugggcuugguuucccugcuu

SEQ ID NO: 918934 - RNA, 22 nt, Human
agagaauuacagaagaauguca

SEQ ID NO: 918935 - RNA, 22 nt, Human
ugucaggucucugugaugguaa

SEQ ID NO: 918936 - RNA, 22 nt, Human
ucacaaaagcuuuugaauuugg

SEQ ID NO: 918937 - RNA, 17 nt, Human
cccugggugaguucuca

SEQ ID NO: 918938 - RNA, 22 nt, Human
cagcugagagacaaugagucau

SEQ ID NO: 918939 - RNA, 22 nt, Human
cucccaagggguaagggagcug

SEQ ID NO: 918940 - RNA, 22 nt, Human
ucugcucuguggcuucagcuaa

SEQ ID NO: 918941 - RNA, 22 nt, Human
auucaguuuuuauuggaccagc

SEQ ID NO: 918942 - RNA, 22 nt, Human
uguuaacagaggucauuuuggg

SEQ ID NO: 918943 - RNA, 22 nt, Human
agggcuccaaggaaguguagcu

SEQ ID NO: 918944 - RNA, 22 nt, Human
cucggcagguggagguuguagu

SEQ ID NO: 918945 - RNA, 22 nt, Human
ugcauauugugaaaauguagau

SEQ ID NO: 918946 - RNA, 22 nt, Human
gaggggaagacuucuggacagu

SEQ ID NO: 918947 - RNA, 22 nt, Human
ucuggagccacaaaccucagcu

SEQ ID NO: 918948 - RNA, 22 nt, Human
auguuuaaucggcugccuuucc

SEQ ID NO: 918949 - RNA, 22 nt, Human
caagaucaaguguaguaucaaa

SEQ ID NO: 918950 - RNA, 23 nt, Human
ucuucacagggcuucccaugugc

SEQ ID NO: 918951 - RNA, 22 nt, Human
cacccagcagcacuuaagacua

SEQ ID NO: 918952 - RNA, 22 nt, Human
acaagucacucuaucauuuuca

SEQ ID NO: 918953 - RNA, 22 nt, Human
uagaauauacacuacagcuuaa

SEQ ID NO: 918954 - RNA, 23 nt, Human
agggcaugaagcagaggacgugg

SEQ ID NO: 918955 - RNA, 22 nt, Human
aauuacacagggaucacuuuuu

SEQ ID NO: 918956 - RNA, 22 nt, Human
ucauggacgucaccaugguccu

SEQ ID NO: 918957 - RNA, 22 nt, Human
gaaaauguuuccuguuauuugc

SEQ ID NO: 918958 - RNA, 20 nt, Human
ggaaaaaugcaugcucaaga

SEQ ID NO: 918959 - RNA, 22 nt, Human
uacaguagcugagguucucagg

SEQ ID NO: 918960 - RNA, 22 nt, Human
agauacagccugccagguucuu

SEQ ID NO: 918961 - RNA, 22 nt, Human
ugcacacaaaugugaacgugcc

SEQ ID NO: 918962 - RNA, 22 nt, Human
cccacauuuuugagucuucauc

SEQ ID NO: 918963 - RNA, 22 nt, Human
ucuuuacuggaauggaacuuuc

SEQ ID NO: 918964 - RNA, 17 nt, Human
gagugcagacacaagca

SEQ ID NO: 918965 - RNA, 22 nt, Human
gcagccagggagagaaccaggg

SEQ ID NO: 918966 - RNA, 22 nt, Human
acaguaaaucaacagaauaucu

SEQ ID NO: 918967 - RNA, 22 nt, Human
uggaaucucuuuggggacugaa

SEQ ID NO: 918968 - RNA, 22 nt, Human
ccugaaaauauccucuccuuug

SEQ ID NO: 918969 - RNA, 21 nt, Human
aggcagccagucaugcucccu

SEQ ID NO: 918970 - RNA, 22 nt, Human
uuucaguucuguacaaguccag

SEQ ID NO: 918971 - RNA, 20 nt, Human
uggugagagcaccugauggg

SEQ ID NO: 918972 - RNA, 22 nt, Human
acuccagggguugcuauuuaca

SEQ ID NO: 918973 - RNA, 22 nt, Human
augagcaagagcuauguacaga

SEQ ID NO: 918974 - RNA, 22 nt, Human
cuguggcuaauaauuaguauuu

SEQ ID NO: 918975 - RNA, 22 nt, Human
aaguggagcuauaggcucagau

SEQ ID NO: 918976 - RNA, 22 nt, Human
uccagaaaaaguaauuuauuug

SEQ ID NO: 918977 - RNA, 22 nt, Human
agaagauuauuagagacuuugu

SEQ ID NO: 918978 - RNA, 20 nt, Human
ggcauuuaugaaccaagccu

SEQ ID NO: 918979 - RNA, 22 nt, Human
ugacaguuuauuuugcagaaug

SEQ ID NO: 918980 - RNA, 22 nt, Human
aguggcuuggcugcacuacagg

SEQ ID NO: 918981 - RNA, 22 nt, Human
uagcugugagcacccaggcugu

SEQ ID NO: 918982 - RNA, 22 nt, Human
gcaagauagaguugcaaauauu

SEQ ID NO: 918983 - RNA, 22 nt, Human
gaggccagacugccuuuuauga

SEQ ID NO: 918984 - RNA, 22 nt, Human
aggagcugauagucuauggaga

SEQ ID NO: 918985 - RNA, 22 nt, Human
ucugucugacuaccaugaggca

SEQ ID NO: 918986 - RNA, 22 nt, Human
uauuccuaauacuuguuuuggg

SEQ ID NO: 918987 - RNA, 22 nt, Human
uucuccugcgcaggcccaggga

SEQ ID NO: 918988 - RNA, 22 nt, Human
acacauuaaaacgucuacaaug

SEQ ID NO: 918989 - RNA, 19 nt, Human
uaacaggggaaaaugauca

SEQ ID NO: 918990 - RNA, 22 nt, Human
gagcacagauccuggagccaca

SEQ ID NO: 918991 - RNA, 22 nt, Human
cuucuucucaaggggcaggugg

SEQ ID NO: 918992 - RNA, 22 nt, Human
cagcagguauguuuguucagca

SEQ ID NO: 918993 - RNA, 22 nt, Human
ugagaccucuggguucugagcu

SEQ ID NO: 918994 - RNA, 22 nt, Human
uccagacucacucaugugacua

SEQ ID NO: 918995 - RNA, 22 nt, Human
ucuugcugaaaacaaaucucuu

SEQ ID NO: 918996 - RNA, 22 nt, Human
ucuaguuuucucaaaugacuug

SEQ ID NO: 918997 - RNA, 23 nt, Human
ucacuaaaguguuuagugcagau

SEQ ID NO: 918998 - RNA, 20 nt, Human
ucuggugccccuuccugaga

SEQ ID NO: 918999 - RNA, 22 nt, Human
uguuaaacagauauugcccaca

SEQ ID NO: 919000 - RNA, 22 nt, Human
aguggcaggaucucgguucacu

SEQ ID NO: 919001 - RNA, 19 nt, Human
gggaccugacuaauuggca

SEQ ID NO: 919002 - RNA, 22 nt, Human
agaaagcuccccaugagaugau

SEQ ID NO: 919003 - RNA, 22 nt, Human
cagcuucccuuggcugagcaga

SEQ ID NO: 919004 - RNA, 21 nt, Human
uccaggaguucuaauaggugu

SEQ ID NO: 919005 - RNA, 18 nt, Human
augcuacaggcagguguc

SEQ ID NO: 919006 - RNA, 22 nt, Human
ucauuucugagccuuccaugau

SEQ ID NO: 919007 - RNA, 22 nt, Human
aguggcugugaaauacauggga

SEQ ID NO: 919008 - RNA, 22 nt, Human
gccuccuauuaaaauuuaccuu

SEQ ID NO: 919009 - RNA, 22 nt, Human
ucuguggcauguugcacuugua

SEQ ID NO: 919010 - RNA, 17 nt, Human
ucugggcuucagugguc

SEQ ID NO: 919011 - RNA, 22 nt, Human
caggagcuggaucuccuugcgg

SEQ ID NO: 919012 - RNA, 22 nt, Human
agguauaacuuuaugcauggaa

SEQ ID NO: 919013 - RNA, 22 nt, Human
ucuuuaugagaaaaagauugua

SEQ ID NO: 919014 - RNA, 19 nt, Human
cauuuucucauugugcccc

SEQ ID NO: 919015 - RNA, 22 nt, Human
aagguacaaaguuauacagcgu

SEQ ID NO: 919016 - RNA, 22 nt, Human
caaauagacuuaagcaucugua

SEQ ID NO: 919017 - RNA, 23 nt, Human
ccucccaccuauuucacuuucuu

SEQ ID NO: 919018 - RNA, 22 nt, Human
aaguuauaucaucucauugacg

SEQ ID NO: 919019 - RNA, 22 nt, Human
cagccagcuucagauccaagcc

SEQ ID NO: 919020 - RNA, 20 nt, Human
ucagccagcuaacaugggga

SEQ ID NO: 919021 - RNA, 22 nt, Human
ccuuuccuguguccuuuuaagg

SEQ ID NO: 919022 - RNA, 22 nt, Human
cuuugaaaaaugguuuccuaga

SEQ ID NO: 919023 - RNA, 22 nt, Human
cuucucuaugauguucuaaggu

SEQ ID NO: 919024 - RNA, 22 nt, Human
ugccugccucaggccgagugcu

SEQ ID NO: 919025 - RNA, 22 nt, Human
aagacauugcugcuuuuaauug

SEQ ID NO: 919026 - RNA, 22 nt, Human
ccacagcugaccgcaggugagc

SEQ ID NO: 919027 - RNA, 22 nt, Human
ucuguucaguugauuagacaga

SEQ ID NO: 919028 - RNA, 22 nt, Human
gacaauguaaaucaggauagca

SEQ ID NO: 919029 - RNA, 22 nt, Human
aucugcuuuugagaauuuacuu

SEQ ID NO: 919030 - RNA, 22 nt, Human
agugucuuucucucuccaagug

SEQ ID NO: 919031 - RNA, 22 nt, Human
ucaggagugccaguaccuuuug

SEQ ID NO: 919032 - RNA, 22 nt, Human
uaucuaagagagucaauauuua

SEQ ID NO: 919033 - RNA, 22 nt, Human
ggaggaggcggcagaaguuccu

SEQ ID NO: 919034 - RNA, 22 nt, Human
ggaugcaggggcagcagagccu

SEQ ID NO: 919035 - RNA, 22 nt, Human
gaauuauaggcaaagcagucau

SEQ ID NO: 919036 - RNA, 23 nt, Human
cugugcugggucccaucuugggc

SEQ ID NO: 919037 - RNA, 22 nt, Human
gcaggcugugguauguugggca

SEQ ID NO: 919038 - RNA, 22 nt, Human
gaaaucauuagcaaagauaugu

SEQ ID NO: 919039 - RNA, 22 nt, Human
cuggagaggcugggaacagguu

SEQ ID NO: 919040 - RNA, 22 nt, Human
auuucuuaaaacuucagggaga

SEQ ID NO: 919041 - RNA, 22 nt, Human
caaguaaagaaucacauuucuu

SEQ ID NO: 919042 - RNA, 22 nt, Human
ucuguucauaguaguguauaug

SEQ ID NO: 919043 - RNA, 22 nt, Human
gaggccuggaccagccacagag

SEQ ID NO: 919044 - RNA, 17 nt, Human
guguucacaaugacugu

SEQ ID NO: 919045 - RNA, 22 nt, Human
gggcuucagcuggggauggagc

SEQ ID NO: 919046 - RNA, 22 nt, Human
uguucucuucucauugaacaug

SEQ ID NO: 919047 - RNA, 20 nt, Human
uggaaguucuguugcauugg

SEQ ID NO: 919048 - RNA, 22 nt, Human
gcagggcacacaagaaugauaa

SEQ ID NO: 919049 - RNA, 22 nt, Human
cagccucugagccuuggcagau

SEQ ID NO: 919050 - RNA, 22 nt, Human
gguaacaacccuacaaauccac

SEQ ID NO: 919051 - RNA, 22 nt, Human
uaacagaaauaguaggugaggg

SEQ ID NO: 919052 - RNA, 22 nt, Human
guuaaacaauaacuggcacaca

SEQ ID NO: 919053 - RNA, 22 nt, Human
ccagagacaaggagcuggaguc

SEQ ID NO: 919054 - RNA, 22 nt, Human
auccauucuaugugaaaugucc

SEQ ID NO: 919055 - RNA, 22 nt, Human
cuccugugggucaccaauaggc

SEQ ID NO: 919056 - RNA, 22 nt, Human
uaaaccuuauuugaauaccaac

SEQ ID NO: 919057 - RNA, 14 nt, Human
gcagguggaucacu

SEQ ID NO: 919058 - RNA, 22 nt, Human
acagcuggagugaggauggagu

SEQ ID NO: 919059 - RNA, 22 nt, Human
agugacaggggaggcaggugug

SEQ ID NO: 919060 - RNA, 22 nt, Human
uaguaaguucucgcauuguuau

SEQ ID NO: 919061 - RNA, 22 nt, Human
ugagcagagacgggggccucca

SEQ ID NO: 919062 - RNA, 22 nt, Human
auaguauuuccagaaauagucu

SEQ ID NO: 919063 - RNA, 22 nt, Human
uauugacaauaggcaacugagg

SEQ ID NO: 919064 - RNA, 22 nt, Human
gaugcauucgggauguuuacuu

SEQ ID NO: 919065 - RNA, 22 nt, Human
uuuuuucagccugucugugcca

SEQ ID NO: 919066 - RNA, 22 nt, Human
ggagcugaaggggugggcucag

SEQ ID NO: 919067 - RNA, 22 nt, Human
aaacuucuggcuacaagcaaua

SEQ ID NO: 919068 - RNA, 22 nt, Human
aaacaaugacaacacagcugcg

SEQ ID NO: 919069 - RNA, 19 nt, Human
acucuacaguguguacaac

SEQ ID NO: 919070 - RNA, 22 nt, Human
cauggggaugaggcugagacuu

SEQ ID NO: 919071 - RNA, 22 nt, Human
uucucuuuuagaggcuccauga

SEQ ID NO: 919072 - RNA, 22 nt, Human
ggccagcucuuguccacggagg

SEQ ID NO: 919073 - RNA, 18 nt, Human
cuagggcuguggcucuca

SEQ ID NO: 919074 - RNA, 22 nt, Human
ggcuccagaaaucauagagcag

SEQ ID NO: 919075 - RNA, 22 nt, Human
gucugcugugccuuggggaaaa

SEQ ID NO: 919076 - RNA, 23 nt, Human
ucaagcaauaauugguaauagug

SEQ ID NO: 919077 - RNA, 22 nt, Human
aagcucuuguugaaucuuguca

SEQ ID NO: 919078 - RNA, 22 nt, Human
cucagccccaauuugcccucuu

SEQ ID NO: 919079 - RNA, 22 nt, Human
gggcagauggggcacaggcuga

SEQ ID NO: 919080 - RNA, 22 nt, Human
agcuguuuucuucuaggaagac

SEQ ID NO: 919081 - RNA, 21 nt, Human
acucauuugucugcaucuaau

SEQ ID NO: 919082 - RNA, 22 nt, Human
ucuccaucugucauucuugucc

SEQ ID NO: 919083 - RNA, 22 nt, Human
acaacuucucacagauaaauuu

SEQ ID NO: 919084 - RNA, 22 nt, Human
uacucauugauuccuuuacuca

SEQ ID NO: 919085 - RNA, 22 nt, Human
gacaaaacacauuaguuuaaaa

SEQ ID NO: 919086 - RNA, 22 nt, Human
uuugcaaacuuuccucuggacc

SEQ ID NO: 919087 - RNA, 22 nt, Human
cauugagaaucugggcuacagc

SEQ ID NO: 919088 - RNA, 22 nt, Human
cugagaguagcuggagaacauu

SEQ ID NO: 919089 - RNA, 22 nt, Human
gccaggcuggggggagaugucu

SEQ ID NO: 919090 - RNA, 22 nt, Human
ucucuauuaauugacaauggcu

SEQ ID NO: 919091 - RNA, 22 nt, Human
cugggccugggaggccaggucu

SEQ ID NO: 919092 - RNA, 18 nt, Human
aggcagcagcaucuucuc

SEQ ID NO: 919093 - RNA, 22 nt, Human
agcagcagggugauagugccca

SEQ ID NO: 919094 - RNA, 20 nt, Human
aggagccauugacugcagca

SEQ ID NO: 919095 - RNA, 22 nt, Human
aggugggguguuggauguuuau

SEQ ID NO: 919096 - RNA, 22 nt, Human
aauucaaucuguagauugugau

SEQ ID NO: 919097 - RNA, 22 nt, Human
agcagcuugagcuggggcuggc

SEQ ID NO: 919098 - RNA, 22 nt, Human
ucugcuggaaaaccagggaauu

SEQ ID NO: 919099 - RNA, 22 nt, Human
uggcuacaguggcauaucaaau

SEQ ID NO: 919100 - RNA, 22 nt, Human
ggaccugugucuacagcaugug

SEQ ID NO: 919101 - RNA, 22 nt, Human
ucauuuaguucuuucaugucca

SEQ ID NO: 919102 - RNA, 22 nt, Human
cauucacaucuuguuccaucac

SEQ ID NO: 919103 - RNA, 22 nt, Human
gcaggacuuuguggaugaugga

SEQ ID NO: 919104 - RNA, 22 nt, Human
auucaaaagaccaugcagacuc

SEQ ID NO: 919105 - RNA, 22 nt, Human
uggcuucuuuguagaaauugaa

SEQ ID NO: 919106 - RNA, 19 nt, Human
aguggcagaucuggaagua

SEQ ID NO: 919107 - RNA, 22 nt, Human
ugcccuggcgcugucucuaugg

SEQ ID NO: 919108 - RNA, 19 nt, Human
ccugugcuaggagcugacc

SEQ ID NO: 919109 - RNA, 22 nt, Human
uggaagaggcccaugacugccu

SEQ ID NO: 919110 - RNA, 22 nt, Human
gugcucuaggcuacagggaugc

SEQ ID NO: 919111 - RNA, 22 nt, Human
guccuuggcuguggcuguaaug

SEQ ID NO: 919112 - RNA, 22 nt, Human
aagcugccagauucagucugcu

SEQ ID NO: 919113 - RNA, 22 nt, Human
auuuacagugugccuacuauau

SEQ ID NO: 919114 - RNA, 22 nt, Human
ugcuggccugggcugcaccuug

SEQ ID NO: 919115 - RNA, 22 nt, Human
ugcugugauggagaauucugga

SEQ ID NO: 919116 - RNA, 22 nt, Human
cagaacagaaacguuguuccau

SEQ ID NO: 919117 - RNA, 22 nt, Human
uaaguuaucggaguguguuuca

SEQ ID NO: 919118 - RNA, 22 nt, Human
caggcagaggcuuuucauggcu

SEQ ID NO: 919119 - RNA, 22 nt, Human
aaaggcuaguggauucauugau

SEQ ID NO: 919120 - RNA, 22 nt, Human
agucacagguucuugggauuag

SEQ ID NO: 919121 - RNA, 22 nt, Human
uguccuuugggagggcacagcu

SEQ ID NO: 919122 - RNA, 22 nt, Human
ggcaccagcaggcaccgaugcc

SEQ ID NO: 919123 - RNA, 22 nt, Human
auacaauuauucugcagauauu

SEQ ID NO: 919124 - RNA, 22 nt, Human
acucagaggaaaguugagauug

SEQ ID NO: 919125 - RNA, 22 nt, Human
cucuuagauauggagaauuacc

SEQ ID NO: 919126 - RNA, 22 nt, Human
uuaauucugccuuucauguaac

SEQ ID NO: 919127 - RNA, 22 nt, Human
uuuuaucuaccuaugcucauuu

SEQ ID NO: 919128 - RNA, 22 nt, Human
uuauguuuuaaguguguaucuu

SEQ ID NO: 919129 - RNA, 22 nt, Human
cagcuucuccauucuucuggcu

SEQ ID NO: 919130 - RNA, 22 nt, Human
gaaucacacucguaagugaguu

SEQ ID NO: 919131 - RNA, 22 nt, Human
ccagugcccagucucccugguc

SEQ ID NO: 919132 - RNA, 22 nt, Human
uauaagcacauccuugacugau

SEQ ID NO: 919133 - RNA, 22 nt, Human
auuuacacauucauaagauuuc

SEQ ID NO: 919134 - RNA, 22 nt, Human
uuuucauguuccuuguuaagug

SEQ ID NO: 919135 - RNA, 22 nt, Human
gacauugaguauuucuuuucuc

SEQ ID NO: 919136 - RNA, 23 nt, Human
guguggcagcgcugugguuagcu

SEQ ID NO: 919137 - RNA, 22 nt, Human
ggcuuggaauugguaggaugua

SEQ ID NO: 919138 - RNA, 22 nt, Human
aaggcugagacagcacaggucc

SEQ ID NO: 919139 - RNA, 22 nt, Human
uaaacagagaagacuuugagca

SEQ ID NO: 919140 - RNA, 22 nt, Human
uuagauacgcaggcaguuuuaa

SEQ ID NO: 919141 - RNA, 22 nt, Human
ugcagggauccuagcugaagag

SEQ ID NO: 919142 - RNA, 22 nt, Human
acaaaaguguaggaauuccuua

SEQ ID NO: 919143 - RNA, 22 nt, Human
gugcauauaugugcagcaucaa

SEQ ID NO: 919144 - RNA, 22 nt, Human
ugcugucccccgugucugggcu

SEQ ID NO: 919145 - RNA, 19 nt, Human
ucuacaaaguggcaucagg

SEQ ID NO: 919146 - RNA, 22 nt, Human
ugauccuuccccuugaggaugg

SEQ ID NO: 919147 - RNA, 22 nt, Human
cacaaauaccaguuuccuaaca

SEQ ID NO: 919148 - RNA, 22 nt, Human
ccagagaccagaacauggggau

SEQ ID NO: 919149 - RNA, 22 nt, Human
gaagggcuuucugggagaagag

SEQ ID NO: 919150 - RNA, 23 nt, Human
aaaguacuuccacagcuaugauc

SEQ ID NO: 919151 - RNA, 22 nt, Human
caugcaggcgcaacuucuacaa

SEQ ID NO: 919152 - RNA, 22 nt, Human
uugaaaauaucacaggagcagc

SEQ ID NO: 919153 - RNA, 22 nt, Human
aaagcuauuuuauugcagcucu

SEQ ID NO: 919154 - RNA, 22 nt, Human
gcgagaaacuaagugcccuuug

SEQ ID NO: 919155 - RNA, 22 nt, Human
aaucuguuuaguucugcguaug

SEQ ID NO: 919156 - RNA, 22 nt, Human
ccuccaggaggaaauggaacac

SEQ ID NO: 919157 - RNA, 22 nt, Human
ucagagauucacgucaguccca

SEQ ID NO: 919158 - RNA, 22 nt, Human
ugucuguccugcuuccuuggac

SEQ ID NO: 919159 - RNA, 22 nt, Human
uaucuacaguuaauaugucauc

SEQ ID NO: 919160 - RNA, 22 nt, Human
cuguggccagauggugccaguu

SEQ ID NO: 919161 - RNA, 22 nt, Human
aaacauugagcacuugcuauuu

SEQ ID NO: 919162 - RNA, 22 nt, Human
uuaguucacugcuauaucauca

SEQ ID NO: 919163 - RNA, 22 nt, Human
uuuguguaccuuguacauuugu

SEQ ID NO: 919164 - RNA, 22 nt, Human
aacuguagugcuuauagacucu

SEQ ID NO: 919165 - RNA, 22 nt, Human
gaauacaaauaauaccaaggug

SEQ ID NO: 919166 - RNA, 20 nt, Human
uccugcagucgcuagcgccc

SEQ ID NO: 919167 - RNA, 19 nt, Human
gcagcaauagaagacaaau

SEQ ID NO: 919168 - RNA, 22 nt, Human
guagucugagcaagcagugugu

SEQ ID NO: 919169 - RNA, 22 nt, Human
ccuggagguggagguugcagug

SEQ ID NO: 919170 - RNA, 22 nt, Human
guuuuguucuuguccagggaaa

SEQ ID NO: 919171 - RNA, 23 nt, Human
gugugccuuuaucuucuguacuc

SEQ ID NO: 919172 - RNA, 22 nt, Human
aagagacaugaauacucgaagg

SEQ ID NO: 919173 - RNA, 22 nt, Human
uugcaaaugugaauaauuacac

SEQ ID NO: 919174 - RNA, 19 nt, Human
ucuucugacuucaagaaac

SEQ ID NO: 919175 - RNA, 22 nt, Human
uagcauuccaucuuggacuugu

SEQ ID NO: 919176 - RNA, 22 nt, Human
cugccucagcguuguggcccua

SEQ ID NO: 919177 - RNA, 22 nt, Human
gacccuggugggcacuggcacc

SEQ ID NO: 919178 - RNA, 22 nt, Human
uuggcagcacggggaacgucug

SEQ ID NO: 919179 - RNA, 20 nt, Human
acucuguagguaaugagacu

SEQ ID NO: 919180 - RNA, 22 nt, Human
ugccugaacaugaauaguuuau

SEQ ID NO: 919181 - RNA, 22 nt, Human
uuucacacugcagcaucagaga

SEQ ID NO: 919182 - RNA, 22 nt, Human
aacauuuauauggguucaugaa

SEQ ID NO: 919183 - RNA, 22 nt, Human
ucaauauuuuuaugagcauaga

SEQ ID NO: 919184 - RNA, 22 nt, Human
auccacagaaggaacuugaaag

SEQ ID NO: 919185 - RNA, 22 nt, Human
caguuaaacagauugaguguua

SEQ ID NO: 919186 - RNA, 23 nt, Human
agugacaaugggccagagguggc

SEQ ID NO: 919187 - RNA, 22 nt, Human
agugauauuagcaaaugguuau

SEQ ID NO: 919188 - RNA, 22 nt, Human
cucccagagaccaagcugagaa

SEQ ID NO: 919189 - RNA, 22 nt, Human
gggaagguauuuagcugcugaa

SEQ ID NO: 919190 - RNA, 22 nt, Human
ugacaucugucacccugcugac

SEQ ID NO: 919191 - RNA, 22 nt, Human
cagcagcaacaauagcggucac

SEQ ID NO: 919192 - RNA, 22 nt, Human
cugucuguggucucaguaggcc

SEQ ID NO: 919193 - RNA, 22 nt, Human
caagaagucauuuagccucuca

SEQ ID NO: 919194 - RNA, 22 nt, Human
uagaagauucauuuccucugaa

SEQ ID NO: 919195 - RNA, 22 nt, Human
uguacaguguagucaugagguu

SEQ ID NO: 919196 - RNA, 20 nt, Human
cagcaacuuuggacugaguu

SEQ ID NO: 919197 - RNA, 22 nt, Human
cuggcucugaguggcucuaauu

SEQ ID NO: 919198 - RNA, 22 nt, Human
aagaaauaagacuucucugucc

SEQ ID NO: 919199 - RNA, 22 nt, Human
ucagaagucuggacugcuucuc

SEQ ID NO: 919200 - RNA, 21 nt, Human
guucuugcaggauuuccuucc

SEQ ID NO: 919201 - RNA, 22 nt, Human
caaagauuuuagaauuugcaau

SEQ ID NO: 919202 - RNA, 22 nt, Human
cagugugacuucugagcugcca

SEQ ID NO: 919203 - RNA, 19 nt, Human
uucugggcauucauauuua

SEQ ID NO: 919204 - RNA, 22 nt, Human
gagcuuccugaugccgaccagu

SEQ ID NO: 919205 - RNA, 22 nt, Human
ggaggccaggaagagccgcccu

SEQ ID NO: 919206 - RNA, 22 nt, Human
gaaugcaaauauauggaucagu

SEQ ID NO: 919207 - RNA, 22 nt, Human
cccugauguuuucucugccuuu

SEQ ID NO: 919208 - RNA, 22 nt, Human
agcugguguccuccuggagcug

SEQ ID NO: 919209 - RNA, 22 nt, Human
gugggagcccucagggaggugc

SEQ ID NO: 919210 - RNA, 22 nt, Human
uuggagaacuggcauuuuuaau

SEQ ID NO: 919211 - RNA, 22 nt, Human
cagagccagcaguggggacagg

SEQ ID NO: 919212 - RNA, 22 nt, Human
caguuucucagacuucccuugu

SEQ ID NO: 919213 - RNA, 22 nt, Human
ugucagugaacuggaaggccug

SEQ ID NO: 919214 - RNA, 22 nt, Human
cagcccugugcuaagcacccuc

SEQ ID NO: 919215 - RNA, 22 nt, Human
gcucugucuucagcacacagua

SEQ ID NO: 919216 - RNA, 22 nt, Human
uaagaacagauaaaguuucccc

SEQ ID NO: 919217 - RNA, 22 nt, Human
aacugcauguguguggcaugau

SEQ ID NO: 919218 - RNA, 22 nt, Human
ugucauuuuauguauguggucu

SEQ ID NO: 919219 - RNA, 22 nt, Human
agaacgcuauucagaacacugg

SEQ ID NO: 919220 - RNA, 22 nt, Human
gcccaagcuggacugcaguggc

SEQ ID NO: 919221 - RNA, 22 nt, Human
aggccuuccucggagacaggga

SEQ ID NO: 919222 - RNA, 22 nt, Human
augauguaaaauaaguugugag

SEQ ID NO: 919223 - RNA, 22 nt, Human
cagcccuccuuucacucccagg

SEQ ID NO: 919224 - RNA, 22 nt, Human
gaggggcagaaugugaucaggg

SEQ ID NO: 919225 - RNA, 22 nt, Human
uagaacuugauagacaguacaa

SEQ ID NO: 919226 - RNA, 23 nt, Human
ugggccuggaaagccuuagagag

SEQ ID NO: 919227 - RNA, 22 nt, Human
augcuguguuuuaaauggaaau

SEQ ID NO: 919228 - RNA, 22 nt, Human
ugaaaguugcacauaagagaau

SEQ ID NO: 919229 - RNA, 20 nt, Human
acugccuuuagguauccuug

SEQ ID NO: 919230 - RNA, 22 nt, Human
cugagcagauguugcccagaag

SEQ ID NO: 919231 - RNA, 22 nt, Human
ugucuucagcagucaucugggg

SEQ ID NO: 919232 - RNA, 22 nt, Human
uucuuuauugagacuucauugu

SEQ ID NO: 919233 - RNA, 22 nt, Human
agcugcugaagugagagaauug

SEQ ID NO: 919234 - RNA, 22 nt, Human
ccaggccuggaccaugccaggg

SEQ ID NO: 919235 - RNA, 22 nt, Human
gcauuuagcuuuaaaauauuuc

SEQ ID NO: 919236 - RNA, 22 nt, Human
cugcugugugcuuacuuggguu

SEQ ID NO: 919237 - RNA, 22 nt, Human
gagaggcuugugugaagaacaa

SEQ ID NO: 919238 - RNA, 22 nt, Human
uggcuccaggggacacgcagua

SEQ ID NO: 919239 - RNA, 22 nt, Human
uaagaaacauuuuuaugacagu

SEQ ID NO: 919240 - RNA, 22 nt, Human
uuacaaacugucauauaguauu

SEQ ID NO: 919241 - RNA, 23 nt, Human
uugagaacaggugugagaauggc

SEQ ID NO: 919242 - RNA, 22 nt, Human
auccugggaagcugacauugaa

SEQ ID NO: 919243 - RNA, 22 nt, Human
acuuuguugaagaauauguuag

SEQ ID NO: 919244 - RNA, 22 nt, Human
ucaggaaauggcuucaugguuu

SEQ ID NO: 919245 - RNA, 22 nt, Human
ugggcucuggguggccugagca

SEQ ID NO: 919246 - RNA, 22 nt, Human
cacacugccacauucacucuuc

SEQ ID NO: 919247 - RNA, 22 nt, Human
aaaauagguacggauuagaaug

SEQ ID NO: 919248 - RNA, 22 nt, Human
cucuagaaggucucccugccag

SEQ ID NO: 919249 - RNA, 20 nt, Human
ucauccaggacaggaguggc

SEQ ID NO: 919250 - RNA, 22 nt, Human
agucauuuucugccuguaaucu

SEQ ID NO: 919251 - RNA, 22 nt, Human
ccaggagcagggcuggcugcac

SEQ ID NO: 919252 - RNA, 20 nt, Human
ggauggccggaccagagccu

SEQ ID NO: 919253 - RNA, 22 nt, Human
ugcacacaccgugcuucacuga

SEQ ID NO: 919254 - RNA, 22 nt, Human
aggggauggagcuggaaggcag

SEQ ID NO: 919255 - RNA, 22 nt, Human
acauuucucccugcaugccugc

SEQ ID NO: 919256 - RNA, 22 nt, Human
gccuggaguagcauggcaagcc

SEQ ID NO: 919257 - RNA, 22 nt, Human
ugagccagaguggagugugccu

SEQ ID NO: 919258 - RNA, 22 nt, Human
cuuuggcaacacaugugggaca

SEQ ID NO: 919259 - RNA, 22 nt, Human
gucuuuggagaggugccauuuc

SEQ ID NO: 919260 - RNA, 22 nt, Human
gcauggcagaacaccucgcccg

SEQ ID NO: 919261 - RNA, 22 nt, Human
ccucugaguccucccugguugc

SEQ ID NO: 919262 - RNA, 22 nt, Human
gcucucugguuccagucaggaa

SEQ ID NO: 919263 - RNA, 22 nt, Human
aaugucaauaacuuuaucccuc

SEQ ID NO: 919264 - RNA, 22 nt, Human
cagagccucagaauccugugga

SEQ ID NO: 919265 - RNA, 22 nt, Human
ggggagcaauaguugaggugug

SEQ ID NO: 919266 - RNA, 22 nt, Human
gccuggggaacuugauccuguc

SEQ ID NO: 919267 - RNA, 22 nt, Human
agcauccugccucuccucccaa

SEQ ID NO: 919268 - RNA, 22 nt, Human
ugacauuuacuauuccugguua

SEQ ID NO: 919269 - RNA, 22 nt, Human
agauuucccucuuguauuugca

SEQ ID NO: 919270 - RNA, 22 nt, Human
acugaauuagggaacacugaac

SEQ ID NO: 919271 - RNA, 22 nt, Human
uuggcagcauccaagucucggg

SEQ ID NO: 919272 - RNA, 22 nt, Human
gcguggcuuagagugggguacc

SEQ ID NO: 919273 - RNA, 22 nt, Human
auuugucacugagagaguuaga

SEQ ID NO: 919274 - RNA, 22 nt, Human
aggcuugguuuauagaaguaau

SEQ ID NO: 919275 - RNA, 22 nt, Human
uaugcuuuaacauuaaacaaca

SEQ ID NO: 919276 - RNA, 22 nt, Human
acacaaugucaucauaauguca

SEQ ID NO: 919277 - RNA, 22 nt, Human
cuucccagaacaauguaggcuu

SEQ ID NO: 919278 - RNA, 19 nt, Human
agugucagaauucauugaa

SEQ ID NO: 919279 - RNA, 22 nt, Human
cagggcuucgcuccuggugcac

SEQ ID NO: 919280 - RNA, 22 nt, Human
uucauguguauggaacauuuuu

SEQ ID NO: 919281 - RNA, 22 nt, Human
guguuuuauggagucauaacgu

SEQ ID NO: 919282 - RNA, 22 nt, Human
uuaaagcaggcaucauuccuca

SEQ ID NO: 919283 - RNA, 22 nt, Human
gacacaggaaaagcuccagccc

SEQ ID NO: 919284 - RNA, 22 nt, Human
gccuggugcuaugagggccagc

SEQ ID NO: 919285 - RNA, 22 nt, Human
gcuggcuuugucaagggcagca

SEQ ID NO: 919286 - RNA, 22 nt, Human
ggcagggguggccuuccuuugg

SEQ ID NO: 919287 - RNA, 20 nt, Human
gcuccccuucucugggccuc

SEQ ID NO: 919288 - RNA, 22 nt, Human
uagugaaaugauaacagagcag

SEQ ID NO: 919289 - RNA, 22 nt, Human
aacuuuagcuauuuaaucugau

SEQ ID NO: 919290 - RNA, 22 nt, Human
ucacaauacucacucaauggcu

SEQ ID NO: 919291 - RNA, 22 nt, Human
augccaaagcccaaguucauca

SEQ ID NO: 919292 - RNA, 22 nt, Human
aaaaugaauaaguuaacccagg

SEQ ID NO: 919293 - RNA, 22 nt, Human
gacacagcuugaugagggcuuu

SEQ ID NO: 919294 - RNA, 22 nt, Human
ccagcagcccucuuccaagacu

SEQ ID NO: 919295 - RNA, 22 nt, Human
uaugacaaagagaggcccaugc

SEQ ID NO: 919296 - RNA, 22 nt, Human
uaaaauuugucccugaguguug

SEQ ID NO: 919297 - RNA, 22 nt, Human
agcaggcuuuccacagaaggag

SEQ ID NO: 919298 - RNA, 22 nt, Human
gaaacacauaugaacaguugau

SEQ ID NO: 919299 - RNA, 22 nt, Human
uuucuucagccacuccaaacug

SEQ ID NO: 919300 - RNA, 22 nt, Human
acguggcggccgccgugagcgg

SEQ ID NO: 919301 - RNA, 22 nt, Human
gacaacacauguaugccacucu

SEQ ID NO: 919302 - RNA, 22 nt, Human
ucucagcucuuuuuucacagaa

SEQ ID NO: 919303 - RNA, 22 nt, Human
aguugugcugugaugcaggaua

SEQ ID NO: 919304 - RNA, 22 nt, Human
caugaaaucugaguauguuucc

SEQ ID NO: 919305 - RNA, 22 nt, Human
gccuggcuacccacugaaauau

SEQ ID NO: 919306 - RNA, 22 nt, Human
uugcuguguaacuccuggccug

SEQ ID NO: 919307 - RNA, 22 nt, Human
aucauucagucucugggacagu

SEQ ID NO: 919308 - RNA, 22 nt, Human
acauuagcccaucugguauuug

SEQ ID NO: 919309 - RNA, 22 nt, Human
gacauugaauuugaauguaugu

SEQ ID NO: 919310 - RNA, 22 nt, Human
cccaggagccaucugucuuggc

SEQ ID NO: 919311 - RNA, 22 nt, Human
ccugccagcugugggccagccu

SEQ ID NO: 919312 - RNA, 22 nt, Human
gagugcuggaggugugaguggg

SEQ ID NO: 919313 - RNA, 22 nt, Human
aaguacagccagcacccagacu

SEQ ID NO: 919314 - RNA, 22 nt, Human
gaaacauuguguucuacagauu

SEQ ID NO: 919315 - RNA, 22 nt, Human
uaaggcuuuuguucagcguggg

SEQ ID NO: 919316 - RNA, 22 nt, Human
uuucauugagaauauaagauuu

SEQ ID NO: 919317 - RNA, 22 nt, Human
uuucauugucaauaaacuguau

SEQ ID NO: 919318 - RNA, 22 nt, Human
ucuucagacuccaaauguuuua

SEQ ID NO: 919319 - RNA, 22 nt, Human
guggcaggaucacggcucacug

SEQ ID NO: 919320 - RNA, 22 nt, Human
cacagcagaacuuaauuucaaa

SEQ ID NO: 919321 - RNA, 22 nt, Human
gcagacagggcuacagagguac

SEQ ID NO: 919322 - RNA, 22 nt, Human
ugaaagagugcaagucaaggag

SEQ ID NO: 919323 - RNA, 22 nt, Human
gucccugcaucaccacgggacu

SEQ ID NO: 919324 - RNA, 22 nt, Human
agcugugccuugcugcacggug

SEQ ID NO: 919325 - RNA, 22 nt, Human
uccaucaggcucgugggcucuc

SEQ ID NO: 919326 - RNA, 22 nt, Human
gcugcaggggggucuggacuug

SEQ ID NO: 919327 - RNA, 22 nt, Human
uaggccagaggagcagcuuugg

SEQ ID NO: 919328 - RNA, 22 nt, Human
caucuucauuuuguccaguacu

SEQ ID NO: 919329 - RNA, 20 nt, Human
ccuucagaacuuacauagua

SEQ ID NO: 919330 - RNA, 22 nt, Human
cuguugucccugggagcucagc

SEQ ID NO: 919331 - RNA, 22 nt, Human
acacugcauuucaacaaggccc

SEQ ID NO: 919332 - RNA, 22 nt, Human
auuccacaggagcugguuuucu

SEQ ID NO: 919333 - RNA, 21 nt, Human
ugguuuauuucacucagcaua

SEQ ID NO: 919334 - RNA, 22 nt, Human
gaacaauacaggcuuuauuccu

SEQ ID NO: 919335 - RNA, 22 nt, Human
ugucugagugugccugggcauu

SEQ ID NO: 919336 - RNA, 22 nt, Human
gcuggccagggcugcucgcgga

SEQ ID NO: 919337 - RNA, 21 nt, Human
ggugggcacaggagagcagag

SEQ ID NO: 919338 - RNA, 22 nt, Human
cuuaaaaucuggcaguuagcua

SEQ ID NO: 919339 - RNA, 22 nt, Human
gaaauacugcacacccuguaag

SEQ ID NO: 919340 - RNA, 22 nt, Human
accauggaccauaguuccuauu

SEQ ID NO: 919341 - RNA, 22 nt, Human
uuuacuguucaacuugcaagua

SEQ ID NO: 919342 - RNA, 22 nt, Human
auuuuauccccacuggauuaca

SEQ ID NO: 919343 - RNA, 22 nt, Human
cuccaaggauucuggacccuug

SEQ ID NO: 919344 - RNA, 22 nt, Human
ugagaauaacagccuguguucc

SEQ ID NO: 919345 - RNA, 18 nt, Human
agacccucuaagggcagu

SEQ ID NO: 919346 - RNA, 22 nt, Human
aacagaaaagguagguggcuuu

SEQ ID NO: 919347 - RNA, 22 nt, Human
ggccaugcucguggcuggacug

SEQ ID NO: 919348 - RNA, 22 nt, Human
acaggauggagauaauagaaaa

SEQ ID NO: 919349 - RNA, 22 nt, Human
ucaggcuuggugcuccagugcc

SEQ ID NO: 919350 - RNA, 22 nt, Human
uggggacacagagguucguugg

SEQ ID NO: 919351 - RNA, 22 nt, Human
acaggagaaaucuggucaaaag

SEQ ID NO: 919352 - RNA, 22 nt, Human
uggcuucucuguuuuaguauuu

SEQ ID NO: 919353 - RNA, 22 nt, Human
cugggagggguagccaauccua

SEQ ID NO: 919354 - RNA, 22 nt, Human
acacuuucuggagcugcacaua

SEQ ID NO: 919355 - RNA, 22 nt, Human
guuucagauauauuuguacuua

SEQ ID NO: 919356 - RNA, 22 nt, Human
uacuuagagcgauaauuuauac

SEQ ID NO: 919357 - RNA, 22 nt, Human
ggcaggugcucaaaaauauuug

SEQ ID NO: 919358 - RNA, 22 nt, Human
ugaucuuuccucuuguuugucu

SEQ ID NO: 919359 - RNA, 22 nt, Human
acaguguguccuaaaggucugg

SEQ ID NO: 919360 - RNA, 22 nt, Human
ucuggguggugucuuccaagac

SEQ ID NO: 919361 - RNA, 22 nt, Human
gcauguguuauuucucuguggg

SEQ ID NO: 919362 - RNA, 22 nt, Human
acaaucuuauuaguaguauaga

SEQ ID NO: 919363 - RNA, 22 nt, Human
aaacaguuguuauuuuuauaug

SEQ ID NO: 919364 - RNA, 22 nt, Human
uccucaggcugccuggaagacu

SEQ ID NO: 919365 - RNA, 22 nt, Human
aaggcacacaguuagauagagc

SEQ ID NO: 919366 - RNA, 21 nt, Human
ggcagugaugugaagugcauc

SEQ ID NO: 919367 - RNA, 22 nt, Human
auguuuaugcaaacaugugagu

SEQ ID NO: 919368 - RNA, 22 nt, Human
uuaguguaaauugugcuugaga

SEQ ID NO: 919369 - RNA, 22 nt, Human
ggcuuguugaaacacagauugu

SEQ ID NO: 919370 - RNA, 22 nt, Human
cccagaugcagguucaagagua

SEQ ID NO: 919371 - RNA, 22 nt, Human
ugcuuuaaccaucuuguuugga

SEQ ID NO: 919372 - RNA, 22 nt, Human
acacuuuagaaaaaagaauggu

SEQ ID NO: 919373 - RNA, 22 nt, Human
uucaugugucuguagcacauau

SEQ ID NO: 919374 - RNA, 22 nt, Human
cauuguugaacaccugcuggau

SEQ ID NO: 919375 - RNA, 22 nt, Human
uuaaacauuuuugaugaucgau

SEQ ID NO: 919376 - RNA, 22 nt, Human
cccaaggccuucaagccagcuc

SEQ ID NO: 919377 - RNA, 22 nt, Human
gagagacagcacacaguguggg

SEQ ID NO: 919378 - RNA, 22 nt, Human
gaaagacuaacuagaaagugca

SEQ ID NO: 919379 - RNA, 22 nt, Human
acuuacaagcuagggaagcuug

SEQ ID NO: 919380 - RNA, 22 nt, Human
uugacacaauguauauuuucaa

SEQ ID NO: 919381 - RNA, 22 nt, Human
uccacagggauucacccaaaag

SEQ ID NO: 919382 - RNA, 22 nt, Human
uguaaagagaagaaacgugagc

SEQ ID NO: 919383 - RNA, 23 nt, Human
caugugugacaguaucacuguuu

SEQ ID NO: 919384 - RNA, 22 nt, Human
auacacagcuacauugaacaau

SEQ ID NO: 919385 - RNA, 22 nt, Human
ucuaaggacauuggcuuuggag

SEQ ID NO: 919386 - RNA, 22 nt, Human
cuuguuaucuccguguccuugu

SEQ ID NO: 919387 - RNA, 22 nt, Human
aaacucuaguuaugaaguuugu

SEQ ID NO: 919388 - RNA, 22 nt, Human
ccuccugguccagcaucucuuu

SEQ ID NO: 919389 - RNA, 22 nt, Human
cagucccaccaggaucgcucuu

SEQ ID NO: 919390 - RNA, 22 nt, Human
ugcauauucuccuuuauuuugu

SEQ ID NO: 919391 - RNA, 22 nt, Human
uggcugaguuucaugcaucaug

SEQ ID NO: 919392 - RNA, 22 nt, Human
ggugcugaauucuggaggaggc

SEQ ID NO: 919393 - RNA, 22 nt, Human
acuaaagaugucuaaauauauu

SEQ ID NO: 919394 - RNA, 22 nt, Human
uguggcugcaaaggaaggcugc

SEQ ID NO: 919395 - RNA, 22 nt, Human
cagcugcagaaagcaagcaggu

SEQ ID NO: 919396 - RNA, 22 nt, Human
ugcuccagugccugccccacag

SEQ ID NO: 919397 - RNA, 22 nt, Human
aggcuucuugagccccacaggc

SEQ ID NO: 919398 - RNA, 22 nt, Human
ugaaauucaaaacacauuuguc

SEQ ID NO: 919399 - RNA, 22 nt, Human
cagugccagagguacuagugga

SEQ ID NO: 919400 - RNA, 22 nt, Human
ccaggaggcagaaguugcagug

SEQ ID NO: 919401 - RNA, 22 nt, Human
agaacugugccaaaaauuuugu

SEQ ID NO: 919402 - RNA, 22 nt, Human
aaaaguaauugaugcaaucgua

SEQ ID NO: 919403 - RNA, 22 nt, Human
gcagccuucaguuuggcaggag

SEQ ID NO: 919404 - RNA, 22 nt, Human
ucuguguuuuacuccaauuaua

SEQ ID NO: 919405 - RNA, 22 nt, Human
ugagcaguaggucugaauagug

SEQ ID NO: 919406 - RNA, 22 nt, Human
uggcagcaguggagguagaaag

SEQ ID NO: 919407 - RNA, 22 nt, Human
agaucauacuacuuguacuaaa

SEQ ID NO: 919408 - RNA, 22 nt, Human
agcagguggccacgaggaggag

SEQ ID NO: 919409 - RNA, 22 nt, Human
ugcuuagaugaggcagcaggag

SEQ ID NO: 919410 - RNA, 22 nt, Human
aacuaauacauuaauacaugug

SEQ ID NO: 919411 - RNA, 22 nt, Human
ugggagcaagcuggugcuggag

SEQ ID NO: 919412 - RNA, 22 nt, Human
agucuguggggucccuggggca

SEQ ID NO: 919413 - RNA, 22 nt, Human
cagcacacagugacucgcaccu

SEQ ID NO: 919414 - RNA, 22 nt, Human
aguucuggaacucuacagcaac

SEQ ID NO: 919415 - RNA, 22 nt, Human
uguucaaaaauaucuucugcaa

SEQ ID NO: 919416 - RNA, 22 nt, Human
ugcagcauccauauauuauuag

SEQ ID NO: 919417 - RNA, 22 nt, Human
ccacaguuauucauuugugaca

SEQ ID NO: 919418 - RNA, 22 nt, Human
aaauaguaaagugguagccauc

SEQ ID NO: 919419 - RNA, 22 nt, Human
uugcaggguccuguggcucucc

SEQ ID NO: 919420 - RNA, 22 nt, Human
uggccaugaaggaggcagcaga

SEQ ID NO: 919421 - RNA, 22 nt, Human
caaagugcagaaggaacugggu

SEQ ID NO: 919422 - RNA, 22 nt, Human
aaugcaaauucuagggcccuau

SEQ ID NO: 919423 - RNA, 22 nt, Human
uuuucuuacugucugugauccu

SEQ ID NO: 919424 - RNA, 20 nt, Human
ugggauuguuuuuuagcuuc

SEQ ID NO: 919425 - RNA, 22 nt, Human
ggacccugcagccacccgacau

SEQ ID NO: 919426 - RNA, 22 nt, Human
ccaggcuguaaacaccuucaaa

SEQ ID NO: 919427 - RNA, 22 nt, Human
gccaccagugggggccugggca

SEQ ID NO: 919428 - RNA, 22 nt, Human
uuucuccuaacucaaauuuaag

SEQ ID NO: 919429 - RNA, 22 nt, Human
uuccaaaacaauauucugugaa

SEQ ID NO: 919430 - RNA, 22 nt, Human
uucuuuucccaauauuuugcug

SEQ ID NO: 919431 - RNA, 19 nt, Human
agcagccauagacaauaug

SEQ ID NO: 919432 - RNA, 22 nt, Human
guguuuggucagacguccgggg

SEQ ID NO: 919433 - RNA, 17 nt, Human
ggacugggcggggcagg

SEQ ID NO: 919434 - RNA, 22 nt, Human
ggugggcaacauuuggccugag

SEQ ID NO: 919435 - RNA, 22 nt, Human
caggccuccacuccacgcagac

SEQ ID NO: 919436 - RNA, 22 nt, Human
guggcacagugggagagcccca

SEQ ID NO: 919437 - RNA, 22 nt, Human
acuugccccagaauugcugcug

SEQ ID NO: 919438 - RNA, 22 nt, Human
cuuauguaugcuacuuuguggu

SEQ ID NO: 919439 - RNA, 22 nt, Human
ggugcagugcaggguaauuaua

SEQ ID NO: 919440 - RNA, 22 nt, Human
cccuccuuaccaccacagcucc

SEQ ID NO: 919441 - RNA, 23 nt, Human
uccaggcugaaggagcagauuuu

SEQ ID NO: 919442 - RNA, 22 nt, Human
acauauaugugcacaugugcag

SEQ ID NO: 919443 - RNA, 22 nt, Human
gaggccacagugucugggggcc

SEQ ID NO: 919444 - RNA, 22 nt, Human
cuccaggcuggggugcagguug

SEQ ID NO: 919445 - RNA, 22 nt, Human
cccaggcagagagcuggugagc

SEQ ID NO: 919446 - RNA, 22 nt, Human
agcuggcuggccccuuccugcc

SEQ ID NO: 919447 - RNA, 17 nt, Human
cugucacaauaccucgc

SEQ ID NO: 919448 - RNA, 22 nt, Human
gcugaggaggugugguuaggug

SEQ ID NO: 919449 - RNA, 21 nt, Human
auuuuguacauagaauuuguc

SEQ ID NO: 919450 - RNA, 21 nt, Human
ucuggucugcuguggaccugg

SEQ ID NO: 919451 - RNA, 22 nt, Human
gaugcagggcuggcaggagcuu

SEQ ID NO: 919452 - RNA, 22 nt, Human
cacagaaaggcucaaaucccaa

SEQ ID NO: 919453 - RNA, 22 nt, Human
uagaaaugagccaugguagagc

SEQ ID NO: 919454 - RNA, 22 nt, Human
ugggcucugcaucagugcccau

SEQ ID NO: 919455 - RNA, 22 nt, Human
cuguugucuccucucagauuau

SEQ ID NO: 919456 - RNA, 22 nt, Human
aaugaguuagaugagaaaauaa

SEQ ID NO: 919457 - RNA, 21 nt, Human
uucuccuucuugauccaagca

SEQ ID NO: 919458 - RNA, 22 nt, Human
cuguccauggugcuggacgguc

SEQ ID NO: 919459 - RNA, 20 nt, Human
augauagucagaaaacuagc

SEQ ID NO: 919460 - RNA, 22 nt, Human
acacugaguuuuaccaggcaca

SEQ ID NO: 919461 - RNA, 23 nt, Human
ugccucugccucccuagucugca

SEQ ID NO: 919462 - RNA, 22 nt, Human
uauuuccuugagacggagucuc

SEQ ID NO: 919463 - RNA, 22 nt, Human
caguucuacuuggaugucugca

SEQ ID NO: 919464 - RNA, 22 nt, Human
guuauucuacagucauugaagu

SEQ ID NO: 919465 - RNA, 22 nt, Human
uucuuucucuccacaaggcuug

SEQ ID NO: 919466 - RNA, 23 nt, Human
uuuaaaaguuguaauguaggcuu

SEQ ID NO: 919467 - RNA, 22 nt, Human
aggcuuuccugucacucaugcu

SEQ ID NO: 919468 - RNA, 22 nt, Human
guguguguauauauacacacac

SEQ ID NO: 919469 - RNA, 22 nt, Human
uugggagauauuguucuuuaca

SEQ ID NO: 919470 - RNA, 19 nt, Human
ugcaucuugcaugggugag

SEQ ID NO: 919471 - RNA, 23 nt, Human
aguuggcauauucaagcacaguc

SEQ ID NO: 919472 - RNA, 22 nt, Human
ugccaggggaccuagggauguc

SEQ ID NO: 919473 - RNA, 22 nt, Human
ggaggagucaguugggcugcuu

SEQ ID NO: 919474 - RNA, 22 nt, Human
auugcugguagucagugucccu

SEQ ID NO: 919475 - RNA, 22 nt, Human
uaagcaaaguuuauaaggcucu

SEQ ID NO: 919476 - RNA, 22 nt, Human
agaguccaggugggcuggaggc

SEQ ID NO: 919477 - RNA, 22 nt, Human
uccugccugcaaucccagcacu

SEQ ID NO: 919478 - RNA, 22 nt, Human
uuggaagggauauuggcauaug

SEQ ID NO: 919479 - RNA, 22 nt, Human
cauugcaacuucaaacuccugg

SEQ ID NO: 919480 - RNA, 22 nt, Human
caguggaggccuugggaccuuu

SEQ ID NO: 919481 - RNA, 22 nt, Human
aggaggcugguucaggccauau

SEQ ID NO: 919482 - RNA, 22 nt, Human
aagcagaacugggaaguagugg

SEQ ID NO: 919483 - RNA, 22 nt, Human
aauguuacacagguauaaucag

SEQ ID NO: 919484 - RNA, 20 nt, Human
aauaaaagaagccuucaccc

SEQ ID NO: 919485 - RNA, 22 nt, Human
cagaggaaaguauuucuggaag

SEQ ID NO: 919486 - RNA, 22 nt, Human
cagaaagaccugauuggcaguu

SEQ ID NO: 919487 - RNA, 22 nt, Human
aagugucuuuuagccacuuuua

SEQ ID NO: 919488 - RNA, 22 nt, Human
uguacauauucaagcacuucua

SEQ ID NO: 919489 - RNA, 22 nt, Human
gaccauuuuuacagagcauuca

SEQ ID NO: 919490 - RNA, 22 nt, Human
ggaaguguaguccgaaguugcg

SEQ ID NO: 919491 - RNA, 22 nt, Human
ccguauguucagauuugucaau

SEQ ID NO: 919492 - RNA, 22 nt, Human
uuauccaacaugacuuaugucc

SEQ ID NO: 919493 - RNA, 22 nt, Human
agauacaaggcagagaugugca

SEQ ID NO: 919494 - RNA, 22 nt, Human
gaaggcuccuugagggaaggac

SEQ ID NO: 919495 - RNA, 22 nt, Human
gucugagacuuuuucugugugg

SEQ ID NO: 919496 - RNA, 22 nt, Human
uggcagaaugaagacuggggcc

SEQ ID NO: 919497 - RNA, 22 nt, Human
agagugggacacgggcgcuguc

SEQ ID NO: 919498 - RNA, 22 nt, Human
uguguuugggggagaugcauuu

SEQ ID NO: 919499 - RNA, 21 nt, Human
ggaauagcuuaaagugagggg

SEQ ID NO: 919500 - RNA, 22 nt, Human
uuugcuuugggagguugucugg

SEQ ID NO: 919501 - RNA, 22 nt, Human
uuuggaauuggcauucuauucu

SEQ ID NO: 919502 - RNA, 22 nt, Human
cuagugaacgugguacuaugga

SEQ ID NO: 919503 - RNA, 22 nt, Human
uagcuccuccccauccagguuc

SEQ ID NO: 919504 - RNA, 22 nt, Human
aucaaaucauugcauuaauguu

SEQ ID NO: 919505 - RNA, 22 nt, Human
auccacagucuuagccaucaaa

SEQ ID NO: 919506 - RNA, 22 nt, Human
cagggaugaccagagggaugug

SEQ ID NO: 919507 - RNA, 22 nt, Human
agacauccuggggagggcaaug

SEQ ID NO: 919508 - RNA, 22 nt, Human
caggcaggagaggaggauuucu

SEQ ID NO: 919509 - RNA, 22 nt, Human
ggcaggguguggaguugggaca

SEQ ID NO: 919510 - RNA, 22 nt, Human
caggacaucuucuguguuuuua

SEQ ID NO: 919511 - RNA, 20 nt, Human
ggaagcuguggguccccagg

SEQ ID NO: 919512 - RNA, 22 nt, Human
ugcagcucuuacggagggcggg

SEQ ID NO: 919513 - RNA, 22 nt, Human
uggagaggagcaccauggccau

SEQ ID NO: 919514 - RNA, 22 nt, Human
uagaaucugccugcagcaaaga

SEQ ID NO: 919515 - RNA, 22 nt, Human
ccacauuggccucagagguuag

SEQ ID NO: 919516 - RNA, 22 nt, Human
ugcccaggcuccucgcagccuu

SEQ ID NO: 919517 - RNA, 19 nt, Human
caucaaguggaguaucucg

SEQ ID NO: 919518 - RNA, 22 nt, Human
cuucuuggcugcaagucucugu

SEQ ID NO: 919519 - RNA, 22 nt, Human
uagcagcugugaguaaaagcca

SEQ ID NO: 919520 - RNA, 22 nt, Human
aguguguguuugggcgguuuau

SEQ ID NO: 919521 - RNA, 22 nt, Human
uuugucauauagacuauuguga

SEQ ID NO: 919522 - RNA, 22 nt, Human
ggccuagccucuccugagagag

SEQ ID NO: 919523 - RNA, 22 nt, Human
cuuuauguccuugaagaguugu

SEQ ID NO: 919524 - RNA, 22 nt, Human
gggagccacagugaggugcaug

SEQ ID NO: 919525 - RNA, 21 nt, Human
cucuugaaugcuugauaagau

SEQ ID NO: 919526 - RNA, 22 nt, Human
aagaagugguccuuuucuuucu

SEQ ID NO: 919527 - RNA, 22 nt, Human
cccacucuggcucccuucuagu

SEQ ID NO: 919528 - RNA, 22 nt, Human
cagcagcaguggcugcagaaca

SEQ ID NO: 919529 - RNA, 22 nt, Human
caugcaucagaaucaccuagag

SEQ ID NO: 919530 - RNA, 22 nt, Human
aaggcacugaaaaauugugugu

SEQ ID NO: 919531 - RNA, 22 nt, Human
gaggaacugaguaccaugauuc

SEQ ID NO: 919532 - RNA, 22 nt, Human
uuacaacaccaggcaguauccu

SEQ ID NO: 919533 - RNA, 22 nt, Human
gcucacuggccugaagaggacg

SEQ ID NO: 919534 - RNA, 22 nt, Human
cagcaucuucaugugcaucucc

SEQ ID NO: 919535 - RNA, 22 nt, Human
uggcucagucuggguugacuga

SEQ ID NO: 919536 - RNA, 22 nt, Human
uaaagguagugugacauauugu

SEQ ID NO: 919537 - RNA, 22 nt, Human
gucacuuuauuaauuuugguga

SEQ ID NO: 919538 - RNA, 22 nt, Human
uuggaauguuuuaauauaaauu

SEQ ID NO: 919539 - RNA, 22 nt, Human
uagcacugaaucacaugcugcu

SEQ ID NO: 919540 - RNA, 22 nt, Human
ccucacagcuuuucaaagugga

SEQ ID NO: 919541 - RNA, 22 nt, Human
gugucccaaucuacuuuucccu

SEQ ID NO: 919542 - RNA, 22 nt, Human
ucugggugacccugggcaaggc

SEQ ID NO: 919543 - RNA, 22 nt, Human
cuucauuaacuauuggaaugca

SEQ ID NO: 919544 - RNA, 22 nt, Human
gggaaagagagguggacgcagg

SEQ ID NO: 919545 - RNA, 22 nt, Human
ucugggauaagaccacagauuu

SEQ ID NO: 919546 - RNA, 20 nt, Human
acauaucaugguagaguccu

SEQ ID NO: 919547 - RNA, 23 nt, Human
uccagccucuugcucucacaugc

SEQ ID NO: 919548 - RNA, 22 nt, Human
gugucuuuugaggcugaccagu

SEQ ID NO: 919549 - RNA, 22 nt, Human
aagaguuucugggucaaggauu

SEQ ID NO: 919550 - RNA, 22 nt, Human
cacugcaaccuccagcucucag

SEQ ID NO: 919551 - RNA, 22 nt, Human
gcucacugccauucucuagaug

SEQ ID NO: 919552 - RNA, 22 nt, Human
cagcuggacuuuugauagaagu

SEQ ID NO: 919553 - RNA, 22 nt, Human
agaaggcacucacacuggcacg

SEQ ID NO: 919554 - RNA, 22 nt, Human
uuuauguacauauccacaagga

SEQ ID NO: 919555 - RNA, 22 nt, Human
ugucccucauugacgcugugcc

SEQ ID NO: 919556 - RNA, 22 nt, Human
uugaaugaauaaaagaguaagg

SEQ ID NO: 919557 - RNA, 22 nt, Human
uggcagugugugagcuguuauu

SEQ ID NO: 919558 - RNA, 22 nt, Human
ggcuccugcaccugucccucug

SEQ ID NO: 919559 - RNA, 22 nt, Human
agaggucacuccaccuucuucu

SEQ ID NO: 919560 - RNA, 22 nt, Human
gggugggccugucuggccaugu

SEQ ID NO: 919561 - RNA, 22 nt, Human
ucugggaguaaggccuaggcau

SEQ ID NO: 919562 - RNA, 22 nt, Human
gguguccaucaggcugugcuuc

SEQ ID NO: 919563 - RNA, 22 nt, Human
ucucuaacaaaggagcugcugc

SEQ ID NO: 919564 - RNA, 22 nt, Human
uggccaguaauagcuucuggug

SEQ ID NO: 919565 - RNA, 21 nt, Human
uagguauuucuaucaugucuc

SEQ ID NO: 919566 - RNA, 22 nt, Human
acuuagaaauucaguuuuguca

SEQ ID NO: 919567 - RNA, 22 nt, Human
guuucucaagcuugaaugcaca

SEQ ID NO: 919568 - RNA, 22 nt, Human
gcucuguuucuccaugcugugg

SEQ ID NO: 919569 - RNA, 16 nt, Human
uuuauuuacuaguguu

SEQ ID NO: 919570 - RNA, 22 nt, Human
guuuguuuguagggaagccgug

SEQ ID NO: 919571 - RNA, 22 nt, Human
gaccugugcagugacugguggc

SEQ ID NO: 919572 - RNA, 22 nt, Human
ugaagagaagaaaauuaucuuu

SEQ ID NO: 919573 - RNA, 21 nt, Human
augacagaugcugcagaucgu

SEQ ID NO: 919574 - RNA, 22 nt, Human
agggcucuuccuuugccucuca

SEQ ID NO: 919575 - RNA, 22 nt, Human
aauuguacaagccuugugccau

SEQ ID NO: 919576 - RNA, 22 nt, Human
agagaagcagggagucaucugu

SEQ ID NO: 919577 - RNA, 22 nt, Human
ucugagagcaucacugggguac

SEQ ID NO: 919578 - RNA, 22 nt, Human
gcagacauguguucuaacagga

SEQ ID NO: 919579 - RNA, 22 nt, Human
cccuaggcugaggccagggugc

SEQ ID NO: 919580 - RNA, 22 nt, Human
auaguuuuaaaaccucaggaag

SEQ ID NO: 919581 - RNA, 22 nt, Human
aguuucaugagacagauuuuca

SEQ ID NO: 919582 - RNA, 22 nt, Human
gagaggaauaucauuauauuag

SEQ ID NO: 919583 - RNA, 18 nt, Human
gauauauaggaggaaagu

SEQ ID NO: 919584 - RNA, 18 nt, Human
ucauggcuugcagauggu

SEQ ID NO: 919585 - RNA, 22 nt, Human
ugaagaaaggugugggauacuc

SEQ ID NO: 919586 - RNA, 22 nt, Human
ucucugagcccagugucccccu

SEQ ID NO: 919587 - RNA, 22 nt, Human
uuuugugagaugcguaugaaug

SEQ ID NO: 919588 - RNA, 22 nt, Human
agucuuugguuauaagagacag

SEQ ID NO: 919589 - RNA, 22 nt, Human
uucaguguuaaauucaaagagu

SEQ ID NO: 919590 - RNA, 22 nt, Human
gacaguaaaugcagucuagcac

SEQ ID NO: 919591 - RNA, 22 nt, Human
aagcugcuggugacugggcuga

SEQ ID NO: 919592 - RNA, 22 nt, Human
gaggcaaggccgcacgucucag

SEQ ID NO: 919593 - RNA, 22 nt, Human
ggcuuguccuugggcugugcau

SEQ ID NO: 919594 - RNA, 22 nt, Human
ugaggccuggagggaggaguuu

SEQ ID NO: 919595 - RNA, 21 nt, Human
uuuuaugcauaggaaauauau

SEQ ID NO: 919596 - RNA, 22 nt, Human
gccuugcuaauuucuccucaac

SEQ ID NO: 919597 - RNA, 22 nt, Human
guuuaugaauguuacuauagag

SEQ ID NO: 919598 - RNA, 22 nt, Human
ucagaacaggacuggcugccau

SEQ ID NO: 919599 - RNA, 22 nt, Human
cuggaucuugcugcauugagaa

SEQ ID NO: 919600 - RNA, 22 nt, Human
aagagcaggcugcuguggagua

SEQ ID NO: 919601 - RNA, 22 nt, Human
agggagaaaauuggaugcacaa

SEQ ID NO: 919602 - RNA, 18 nt, Human
gccagagguacuacugau

SEQ ID NO: 919603 - RNA, 22 nt, Human
ugguucauaauuugcacuacug

SEQ ID NO: 919604 - RNA, 22 nt, Human
ggcaaaaaccacaauuacuuuu

SEQ ID NO: 919605 - RNA, 22 nt, Human
gugguuuuggaggccacuguuu

SEQ ID NO: 919606 - RNA, 18 nt, Human
gcaggagauggguggggu

SEQ ID NO: 919607 - RNA, 22 nt, Human
ggcucaccauggccucccugcu

SEQ ID NO: 919608 - RNA, 19 nt, Human
ccacaaaauuauuuuaguu

SEQ ID NO: 919609 - RNA, 22 nt, Human
uaagcccacauuuuucugaaga

SEQ ID NO: 919610 - RNA, 23 nt, Human
accuuggacuucccagcuuccag

SEQ ID NO: 919611 - RNA, 22 nt, Human
aacaguuucaguuacugaugag

SEQ ID NO: 919612 - RNA, 22 nt, Human
ccugggcucaggcuugggcagc

SEQ ID NO: 919613 - RNA, 22 nt, Human
uaaauuaugucacaugacucug

SEQ ID NO: 919614 - RNA, 22 nt, Human
uuuaaacaucuuguugccuuaa

SEQ ID NO: 919615 - RNA, 22 nt, Human
gaccugccugagcugccucugc

SEQ ID NO: 919616 - RNA, 22 nt, Human
cguguggucccggcaaggcaag

SEQ ID NO: 919617 - RNA, 22 nt, Human
ucacacaucucagguguuuaau

SEQ ID NO: 919618 - RNA, 22 nt, Human
aaguucaaguaguguuacaugg

SEQ ID NO: 919619 - RNA, 22 nt, Human
aggcucugagucuggugucugc

SEQ ID NO: 919620 - RNA, 22 nt, Human
cugaagaaauaugauugcuuaa

SEQ ID NO: 919621 - RNA, 22 nt, Human
cagacagguagggacagaacau

SEQ ID NO: 919622 - RNA, 22 nt, Human
auacuucuuuagcauauugaac

SEQ ID NO: 919623 - RNA, 22 nt, Human
uaugacauuauaaaggauuauu

SEQ ID NO: 919624 - RNA, 22 nt, Human
cugcugagcccuggcacaggug

SEQ ID NO: 919625 - RNA, 18 nt, Human
uaaaauucaaggcagggu

SEQ ID NO: 919626 - RNA, 22 nt, Human
cagcagagguuuugcuccauga

SEQ ID NO: 919627 - RNA, 22 nt, Human
aacacugagggaaaagagauag

SEQ ID NO: 919628 - RNA, 22 nt, Human
gcaguuuggaaaaugugccucu

SEQ ID NO: 919629 - RNA, 19 nt, Human
aaaugugcacuguuuucca

SEQ ID NO: 919630 - RNA, 22 nt, Human
agccccucuccgcccugagucg

SEQ ID NO: 919631 - RNA, 22 nt, Human
accugccagaaugcuaguccug

SEQ ID NO: 919632 - RNA, 22 nt, Human
uuacccagcccugcccagaugu

SEQ ID NO: 919633 - RNA, 22 nt, Human
cacaauuuguauuuugcaucca

SEQ ID NO: 919634 - RNA, 22 nt, Human
agucaaauaagacugucauaag

SEQ ID NO: 919635 - RNA, 22 nt, Human
agcugagacacuugagagacua

SEQ ID NO: 919636 - RNA, 23 nt, Human
agucuuacugucccagaacaggg

SEQ ID NO: 919637 - RNA, 22 nt, Human
aacaaguuguugaaaauaauua

SEQ ID NO: 919638 - RNA, 21 nt, Human
ugucaguucauguauaggcca

SEQ ID NO: 919639 - RNA, 22 nt, Human
ucugagggcuugaggggaagua

SEQ ID NO: 919640 - RNA, 22 nt, Human
gaugucuuacuaacuagccuuu

SEQ ID NO: 919641 - RNA, 22 nt, Human
uacacaguuuugcucccaugau

SEQ ID NO: 919642 - RNA, 22 nt, Human
gggaaugagagucagcccagga

SEQ ID NO: 919643 - RNA, 22 nt, Human
aaaggcuuguuugaggacuggu

SEQ ID NO: 919644 - RNA, 22 nt, Human
ucagcugccccaguggccccag

SEQ ID NO: 919645 - RNA, 22 nt, Human
gcagccugaugaucuggguugu

SEQ ID NO: 919646 - RNA, 22 nt, Human
gcugucacauuuggagcacugg

SEQ ID NO: 919647 - RNA, 22 nt, Human
ggaggugggauuaggaccuaaa

SEQ ID NO: 919648 - RNA, 22 nt, Human
acaaaagaauaagaugagucau

SEQ ID NO: 919649 - RNA, 19 nt, Human
cucuccagcuccaguagcu

SEQ ID NO: 919650 - RNA, 22 nt, Human
gggcgugaccaucugggagcuc

SEQ ID NO: 919651 - RNA, 22 nt, Human
cccagcauuucugggcugcacu

SEQ ID NO: 919652 - RNA, 22 nt, Human
ucauauaagagcuuuagaguca

SEQ ID NO: 919653 - RNA, 22 nt, Human
cuacagagaauugugugauuuu

SEQ ID NO: 919654 - RNA, 21 nt, Human
uuacaacauuuguguucuaug

SEQ ID NO: 919655 - RNA, 22 nt, Human
gcuguguaucagaugccacggg

SEQ ID NO: 919656 - RNA, 22 nt, Human
ugcagcagacugaguaugagaa

SEQ ID NO: 919657 - RNA, 22 nt, Human
gcagcagccacuauucuggcau

SEQ ID NO: 919658 - RNA, 22 nt, Human
aagauuuucucaacuguauuug

SEQ ID NO: 919659 - RNA, 22 nt, Human
gccaguaaaacaaaggccaugu

SEQ ID NO: 919660 - RNA, 22 nt, Human
aucucaggcccuagugaccuca

SEQ ID NO: 919661 - RNA, 22 nt, Human
uccugugugucagaugcacagu

SEQ ID NO: 919662 - RNA, 22 nt, Human
caaggcaaucucauggcuucuu

SEQ ID NO: 919663 - RNA, 22 nt, Human
uuccauuuggcacuucacugag

SEQ ID NO: 919664 - RNA, 22 nt, Human
aggcaguuguugcugagcagcu

SEQ ID NO: 919665 - RNA, 22 nt, Human
agaagccaauucugugugaguc

SEQ ID NO: 919666 - RNA, 22 nt, Human
agguuauaugacugucaugccu

SEQ ID NO: 919667 - RNA, 22 nt, Human
ugcaggugugggcaggggagca

SEQ ID NO: 919668 - RNA, 22 nt, Human
gacuguggcugcguguaaggaa

SEQ ID NO: 919669 - RNA, 22 nt, Human
ucaaagcagcacauucgcaagc

SEQ ID NO: 919670 - RNA, 22 nt, Human
ugguucuaggcuuugucuuuug

SEQ ID NO: 919671 - RNA, 22 nt, Human
acagcagcugccuucaggcucu

SEQ ID NO: 919672 - RNA, 22 nt, Human
caaguuuaaagugagguuugaa

SEQ ID NO: 919673 - RNA, 22 nt, Human
ugcagggcauaggguccaguuu

SEQ ID NO: 919674 - RNA, 23 nt, Human
auguuugcaguaacccauccugg

SEQ ID NO: 919675 - RNA, 22 nt, Human
ucuggcuucuccuagagcaaug

SEQ ID NO: 919676 - RNA, 22 nt, Human
agagccacugggagacagagca

SEQ ID NO: 919677 - RNA, 22 nt, Human
aacuuaggaaaauaaggcauga

SEQ ID NO: 919678 - RNA, 22 nt, Human
uaggaaauuuuacuggucuggg

SEQ ID NO: 919679 - RNA, 22 nt, Human
auuagaagaggcugacgaaugu

SEQ ID NO: 919680 - RNA, 22 nt, Human
ccugucugcaugagugagcaua

SEQ ID NO: 919681 - RNA, 22 nt, Human
ggagggcaucaaucaggccugg

SEQ ID NO: 919682 - RNA, 22 nt, Human
caggcagauuugcugcccucca

SEQ ID NO: 919683 - RNA, 22 nt, Human
agcugcugccucacuggucugu

SEQ ID NO: 919684 - RNA, 22 nt, Human
ggccccagcuucaaccccgugg

SEQ ID NO: 919685 - RNA, 22 nt, Human
gacugcaagucugggaaaggag

SEQ ID NO: 919686 - RNA, 22 nt, Human
ucugcuguuuacugugugauau

SEQ ID NO: 919687 - RNA, 22 nt, Human
ggugggaucaaagagucauucg

SEQ ID NO: 919688 - RNA, 22 nt, Human
ucugaaauucacaguugaguca

SEQ ID NO: 919689 - RNA, 22 nt, Human
guaaauauaaaugcuagcugcc

SEQ ID NO: 919690 - RNA, 23 nt, Human
agguggagcugugcagccggggc

SEQ ID NO: 919691 - RNA, 22 nt, Human
guagcccaccuggggagggcga

SEQ ID NO: 919692 - RNA, 22 nt, Human
cugucuguuuuaccuucuccag

SEQ ID NO: 919693 - RNA, 22 nt, Human
cuggaggccacuguacagauug

SEQ ID NO: 919694 - RNA, 22 nt, Human
ccacuugugaaauaaucaaaua

SEQ ID NO: 919695 - RNA, 21 nt, Human
uucuccuguuuugcaccacag

SEQ ID NO: 919696 - RNA, 22 nt, Human
uggcuucauucuguaguuaaaa

SEQ ID NO: 919697 - RNA, 22 nt, Human
cccauuuuugugugaguaauga

SEQ ID NO: 919698 - RNA, 22 nt, Human
ccaggcucugcgcuggacaugg

SEQ ID NO: 919699 - RNA, 22 nt, Human
cuagucacucagcacugacaaa

SEQ ID NO: 919700 - RNA, 22 nt, Human
uuacagguggagaaguaaggcu

SEQ ID NO: 919701 - RNA, 22 nt, Human
ucuucaaacccugguuuuguga

SEQ ID NO: 919702 - RNA, 22 nt, Human
caugaacaccaggcaugaacaa

SEQ ID NO: 919703 - RNA, 18 nt, Human
aagaggaggagcagguug

SEQ ID NO: 919704 - RNA, 19 nt, Human
cuggggcuuugguacugcc

SEQ ID NO: 919705 - RNA, 19 nt, Human
ucaguggagaaaggggaag

SEQ ID NO: 919706 - RNA, 22 nt, Human
cugucugucaccaaaacagacu

SEQ ID NO: 919707 - RNA, 22 nt, Human
ucucagagugacaaugagaauu

SEQ ID NO: 919708 - RNA, 22 nt, Human
aaguggcagaauaguggcagga

SEQ ID NO: 919709 - RNA, 22 nt, Human
accacaggaggauggcugcugg

SEQ ID NO: 919710 - RNA, 22 nt, Human
agucaucucugagauagaagcu

SEQ ID NO: 919711 - RNA, 22 nt, Human
uuucuggguuuaugucacagcu

SEQ ID NO: 919712 - RNA, 22 nt, Human
ggaggggagucucccaaagccg

SEQ ID NO: 919713 - RNA, 22 nt, Human
cagaggaagggugcugcgaaag

SEQ ID NO: 919714 - RNA, 22 nt, Human
uuuuuaucuacagauucucagc

SEQ ID NO: 919715 - RNA, 22 nt, Human
uaaacuguagcucucguaauuc

SEQ ID NO: 919716 - RNA, 22 nt, Human
caguagaagcuuguuuuucaga

SEQ ID NO: 919717 - RNA, 22 nt, Human
aaguugauugcuucaaauuucu

SEQ ID NO: 919718 - RNA, 22 nt, Human
acacggcacuuuaggaaggggc

SEQ ID NO: 919719 - RNA, 23 nt, Human
aaaugacauaugguuucugaagg

SEQ ID NO: 919720 - RNA, 22 nt, Human
gaggaggcugaacaaugcccug

SEQ ID NO: 919721 - RNA, 22 nt, Human
acagcaggcaugaaugacacug

SEQ ID NO: 919722 - RNA, 22 nt, Human
cauuacaugguccaggauauau

SEQ ID NO: 919723 - RNA, 22 nt, Human
augccaagcuucagcugaaacu

SEQ ID NO: 919724 - RNA, 22 nt, Human
guucuucaggcugagcagagag

SEQ ID NO: 919725 - RNA, 22 nt, Human
cagagaggaggcuauaugcaaa

SEQ ID NO: 919726 - RNA, 22 nt, Human
cucaggcccacagcagacccac

SEQ ID NO: 919727 - RNA, 22 nt, Human
gcuuuaugugaguagcacuguc

SEQ ID NO: 919728 - RNA, 22 nt, Human
gagcaagacucacugcaucuug

SEQ ID NO: 919729 - RNA, 22 nt, Human
auauguguauggauuucuaucu

SEQ ID NO: 919730 - RNA, 22 nt, Human
ugccuuuaacuuaaagcaugac

SEQ ID NO: 919731 - RNA, 22 nt, Human
aaggccaaaguuuucaggcuaa

SEQ ID NO: 919732 - RNA, 22 nt, Human
uaagaaucaguagauauagauu

SEQ ID NO: 919733 - RNA, 22 nt, Human
cacagaaguuucauagucucga

SEQ ID NO: 919734 - RNA, 22 nt, Human
cuggaagguucuuugugugccu

SEQ ID NO: 919735 - RNA, 22 nt, Human
gucaagucaugacucaaaggaa

SEQ ID NO: 919736 - RNA, 22 nt, Human
cuuaaacugggcauucagagaa

SEQ ID NO: 919737 - RNA, 22 nt, Human
agauuguagaaacuguagcauu

SEQ ID NO: 919738 - RNA, 22 nt, Human
gagacagugguugcagaagcuc

SEQ ID NO: 919739 - RNA, 22 nt, Human
cugccuggaccggcagcccucc

SEQ ID NO: 919740 - RNA, 22 nt, Human
agcccugugugcuuguguuccu

SEQ ID NO: 919741 - RNA, 22 nt, Human
auuagcaacugucuugaaaaca

SEQ ID NO: 919742 - RNA, 21 nt, Human
cucaaagaccaaaaguguaga

SEQ ID NO: 919743 - RNA, 22 nt, Human
gcacaggcuccggaggagagcu

SEQ ID NO: 919744 - RNA, 22 nt, Human
auucuucauuguugauucaugu

SEQ ID NO: 919745 - RNA, 22 nt, Human
agguauuuacccacuuuuguuu

SEQ ID NO: 919746 - RNA, 22 nt, Human
uucaaacuaguuaaaagucaga

SEQ ID NO: 919747 - RNA, 22 nt, Human
gguuagagggcaugcgaucuuu

SEQ ID NO: 919748 - RNA, 22 nt, Human
aaagaaggaccuggaggaggau

SEQ ID NO: 919749 - RNA, 22 nt, Human
agaugugguaguugaagggaag

SEQ ID NO: 919750 - RNA, 22 nt, Human
gccagcagcgagaguuuaaccu

SEQ ID NO: 919751 - RNA, 22 nt, Human
uggcuccagcucaaguauggca

SEQ ID NO: 919752 - RNA, 22 nt, Human
cugggugauuccuguccaggca

SEQ ID NO: 919753 - RNA, 22 nt, Human
agcagggcuuugucucugugaa

SEQ ID NO: 919754 - RNA, 22 nt, Human
auguauuuacugagaaggaaac

SEQ ID NO: 919755 - RNA, 22 nt, Human
cacuucaaccucugaguccugg

SEQ ID NO: 919756 - RNA, 22 nt, Human
cacaauuuggugcuaaagaaag

SEQ ID NO: 919757 - RNA, 21 nt, Human
gagcugcaccuugaccuguuu

SEQ ID NO: 919758 - RNA, 22 nt, Human
aauuucuaauugaaucucucuu

SEQ ID NO: 919759 - RNA, 22 nt, Human
gauuucaaguaucuugggcgag

SEQ ID NO: 919760 - RNA, 22 nt, Human
ucacccagguccaggcucuggc

SEQ ID NO: 919761 - RNA, 22 nt, Human
agugcugucccgacaacugagg

SEQ ID NO: 919762 - RNA, 22 nt, Human
aggcuugauuuguccugcuuaa

SEQ ID NO: 919763 - RNA, 22 nt, Human
cugugccugccuuguucacuga

SEQ ID NO: 919764 - RNA, 22 nt, Human
uguaacaguuauaacaaugugg

SEQ ID NO: 919765 - RNA, 22 nt, Human
uggaaacaaagucauaagcuca

SEQ ID NO: 919766 - RNA, 22 nt, Human
ucugccugaaccacucuuggag

SEQ ID NO: 919767 - RNA, 21 nt, Human
uagcacagcuguagacaguuu

SEQ ID NO: 919768 - RNA, 22 nt, Human
uucaaauacauucuuugccacu

SEQ ID NO: 919769 - RNA, 18 nt, Human
caauuucauccuuaagcc

SEQ ID NO: 919770 - RNA, 22 nt, Human
augcuguggaugccuugcccca

SEQ ID NO: 919771 - RNA, 22 nt, Human
cggcugagcagugcugauggaa

SEQ ID NO: 919772 - RNA, 22 nt, Human
ugcuggccgugagcucucggga

SEQ ID NO: 919773 - RNA, 21 nt, Human
ucuguggcggacucuaggccc

SEQ ID NO: 919774 - RNA, 22 nt, Human
aaucagugcaaaggagagggua

SEQ ID NO: 919775 - RNA, 22 nt, Human
uguggcaggcaagauguacaga

SEQ ID NO: 919776 - RNA, 22 nt, Human
agccagggcugcgagcagacag

SEQ ID NO: 919777 - RNA, 22 nt, Human
cuugccuuugucuucaaaggcu

SEQ ID NO: 919778 - RNA, 22 nt, Human
acauccauuuuguucaaaagca

SEQ ID NO: 919779 - RNA, 22 nt, Human
cuccugaggggacaggacucau

SEQ ID NO: 919780 - RNA, 22 nt, Human
acagugauaaaauuucacaugu

SEQ ID NO: 919781 - RNA, 22 nt, Human
uugcagaacuuaaagacagagu

SEQ ID NO: 919782 - RNA, 22 nt, Human
uacugaaauacuaagaaguuaa

SEQ ID NO: 919783 - RNA, 22 nt, Human
aggcugaggggcgagggacccu

SEQ ID NO: 919784 - RNA, 22 nt, Human
acacugaauguuuaagaacuug

SEQ ID NO: 919785 - RNA, 22 nt, Human
agggggcucagcaggcucugga

SEQ ID NO: 919786 - RNA, 22 nt, Human
gcuuuuccugacuuuccauuag

SEQ ID NO: 919787 - RNA, 22 nt, Human
uuacaaucaucuaggauaaaga

SEQ ID NO: 919788 - RNA, 22 nt, Human
ugggagcaguucagguguggcu

SEQ ID NO: 919789 - RNA, 22 nt, Human
cucugggugggcagcagaugga

SEQ ID NO: 919790 - RNA, 22 nt, Human
gcaaggcagcauccuuuugagg

SEQ ID NO: 919791 - RNA, 22 nt, Human
caacaaguguucguaaagugcc

SEQ ID NO: 919792 - RNA, 15 nt, Human
gaguggcuuucagaa

SEQ ID NO: 919793 - RNA, 22 nt, Human
ugauucaauaggaauugaguag

SEQ ID NO: 919794 - RNA, 22 nt, Human
guuuugcuucucauguuaagug

SEQ ID NO: 919795 - RNA, 20 nt, Human
uuacaaagaggcaucgcuuu

SEQ ID NO: 919796 - RNA, 22 nt, Human
ugcaugcucaaguuaguuguga

SEQ ID NO: 919797 - RNA, 22 nt, Human
aaauccagguaguuugguuuga

SEQ ID NO: 919798 - RNA, 22 nt, Human
auaguuuaccuuccagauggcu

SEQ ID NO: 919799 - RNA, 22 nt, Human
gucuauguaaacgucuacauua

SEQ ID NO: 919800 - RNA, 22 nt, Human
uaacuuuuacuuaccaucugag

SEQ ID NO: 919801 - RNA, 22 nt, Human
ugagcuggcaggggcucaggga

SEQ ID NO: 919802 - RNA, 22 nt, Human
aggccucacacaacagaugcau

SEQ ID NO: 919803 - RNA, 22 nt, Human
aauaaagaauggaugagaucgu

SEQ ID NO: 919804 - RNA, 22 nt, Human
ccaggccagcaggcacaccugc

SEQ ID NO: 919805 - RNA, 22 nt, Human
gucaggaaaaauugauaauuuu

SEQ ID NO: 919806 - RNA, 20 nt, Human
cugagguagggcagaucacc

SEQ ID NO: 919807 - RNA, 22 nt, Human
cuggaauggguuucaggcacug

SEQ ID NO: 919808 - RNA, 22 nt, Human
cauuugaaccuggauguucuua

SEQ ID NO: 919809 - RNA, 20 nt, Human
gaggccucagccucagcucc

SEQ ID NO: 919810 - RNA, 22 nt, Human
gugcuuuaguucuugcaacugg

SEQ ID NO: 919811 - RNA, 22 nt, Human
guauuuuucaguuaggagcuua

SEQ ID NO: 919812 - RNA, 22 nt, Human
auuuagacuucccagcacugug

SEQ ID NO: 919813 - RNA, 18 nt, Human
ucaugagguagaggcugg

SEQ ID NO: 919814 - RNA, 22 nt, Human
cacauacaaggcacacuggagg

SEQ ID NO: 919815 - RNA, 22 nt, Human
gagcagagcuucucaaaguaaa

SEQ ID NO: 919816 - RNA, 22 nt, Human
uacuacauacagaauuuagaga

SEQ ID NO: 919817 - RNA, 17 nt, Human
gagaaguuuugcuaccg

SEQ ID NO: 919818 - RNA, 22 nt, Human
ggauuuccagcuucauugucua

SEQ ID NO: 919819 - RNA, 22 nt, Human
uuuguaaaauuagggaauucaa

SEQ ID NO: 919820 - RNA, 22 nt, Human
ugcagcaucuccuugugccaug

SEQ ID NO: 919821 - RNA, 22 nt, Human
agcagccauccuuagagaaaga

SEQ ID NO: 919822 - RNA, 22 nt, Human
agcccucauggaacagcuccua

SEQ ID NO: 919823 - RNA, 22 nt, Human
aaaguguaaggaauuuaaguaa

SEQ ID NO: 919824 - RNA, 22 nt, Human
ucugaaaugcaaauuugacuga

SEQ ID NO: 919825 - RNA, 22 nt, Human
cauaaaguuuuauaggcucaaa

SEQ ID NO: 919826 - RNA, 22 nt, Human
ccugggcaacauagugagaccu

SEQ ID NO: 919827 - RNA, 22 nt, Human
uaaggaauagugcuaugaaaaa

SEQ ID NO: 919828 - RNA, 22 nt, Human
uccugggagcaugaagagggau

SEQ ID NO: 919829 - RNA, 22 nt, Human
acaguacuguguuaacugaacc

SEQ ID NO: 919830 - RNA, 22 nt, Human
acagccagggucucaggaggcg

SEQ ID NO: 919831 - RNA, 21 nt, Human
ccuggccaaucugauaggguu

SEQ ID NO: 919832 - RNA, 22 nt, Human
cacaguuaagggaugucauguu

SEQ ID NO: 919833 - RNA, 22 nt, Human
acagugaaaauucuauugauuu

SEQ ID NO: 919834 - RNA, 22 nt, Human
acugaaaaaguaugauucacug

SEQ ID NO: 919835 - RNA, 23 nt, Human
ccaguggcguaaacuagaggaua

SEQ ID NO: 919836 - RNA, 22 nt, Human
augucuuugccauaguucauau

SEQ ID NO: 919837 - RNA, 22 nt, Human
ucucuuagucuuauauguaaaa

SEQ ID NO: 919838 - RNA, 22 nt, Human
acugagaacuugccaaggacug

SEQ ID NO: 919839 - RNA, 22 nt, Human
gucuucugaucugguuagccau

SEQ ID NO: 919840 - RNA, 22 nt, Human
acuuccaaauaccaucacauug

SEQ ID NO: 919841 - RNA, 22 nt, Human
auuggcagggccagcaucuccc

SEQ ID NO: 919842 - RNA, 22 nt, Human
agcaggcacgcucccugcgcga

SEQ ID NO: 919843 - RNA, 22 nt, Human
auuagaauuaugcuugcuaaug

SEQ ID NO: 919844 - RNA, 22 nt, Human
cauguaaagaauuucacacaag

SEQ ID NO: 919845 - RNA, 22 nt, Human
caucuuaacaggucucugaggg

SEQ ID NO: 919846 - RNA, 22 nt, Human
gugcaggagccagggguaggaa

SEQ ID NO: 919847 - RNA, 22 nt, Human
cugaggccccucucuugagcuu

SEQ ID NO: 919848 - RNA, 22 nt, Human
uauugucucugcguuguucuau

SEQ ID NO: 919849 - RNA, 22 nt, Human
cuggaggggccauccacagucu

SEQ ID NO: 919850 - RNA, 22 nt, Human
uucuguucuuuauuuaccauau

SEQ ID NO: 919851 - RNA, 22 nt, Human
agugggaggcggcugacgggcg

SEQ ID NO: 919852 - RNA, 22 nt, Human
ucaaguauaucuagucauuagg

SEQ ID NO: 919853 - RNA, 22 nt, Human
caggcccuccugugaucugccu

SEQ ID NO: 919854 - RNA, 22 nt, Human
auguaguuagaagauucaaaca

SEQ ID NO: 919855 - RNA, 21 nt, Human
ugccagcugcugcaucugucu

SEQ ID NO: 919856 - RNA, 22 nt, Human
gcuuuaugcaaaccugguacuu

SEQ ID NO: 919857 - RNA, 23 nt, Human
ugcagcaaccuuggaagcauuuc

SEQ ID NO: 919858 - RNA, 22 nt, Human
gccugagggcuccuagcaggcu

SEQ ID NO: 919859 - RNA, 19 nt, Human
ccagcagacacagcugccc

SEQ ID NO: 919860 - RNA, 22 nt, Human
ucugagaggcaucugcacuucu

SEQ ID NO: 919861 - RNA, 22 nt, Human
agggcgacaauggagagcguuu

SEQ ID NO: 919862 - RNA, 22 nt, Human
ggcuccaggugcaugccaggcu

SEQ ID NO: 919863 - RNA, 22 nt, Human
guuuauaaggcccaauauuucu

SEQ ID NO: 919864 - RNA, 22 nt, Human
cugugugucauuugucaauccu

SEQ ID NO: 919865 - RNA, 22 nt, Human
cccugggucuagguuaugugcu

SEQ ID NO: 919866 - RNA, 22 nt, Human
ccucagcugcugcacagcuuuu

SEQ ID NO: 919867 - RNA, 22 nt, Human
auuagcaugccaagcuuuuaga

SEQ ID NO: 919868 - RNA, 22 nt, Human
cuccucagaagaggguaacaca

SEQ ID NO: 919869 - RNA, 22 nt, Human
aauguauuuugggaguuucuuu

SEQ ID NO: 919870 - RNA, 22 nt, Human
caggcaaggaggcacugaggga

SEQ ID NO: 919871 - RNA, 22 nt, Human
ccuggaaagaggaaggaagccu

SEQ ID NO: 919872 - RNA, 22 nt, Human
ucugccacuuaccuccauguac

SEQ ID NO: 919873 - RNA, 22 nt, Human
ucuuuagaaacuuuucuucaug

SEQ ID NO: 919874 - RNA, 22 nt, Human
cagugaugaucauuguaacauc

SEQ ID NO: 919875 - RNA, 22 nt, Human
gucugagauuagggaagauuuu

SEQ ID NO: 919876 - RNA, 22 nt, Human
aauagcaaaguuaucaaauuaa

SEQ ID NO: 919877 - RNA, 22 nt, Human
uuuucagugguaucuuuguaaa

SEQ ID NO: 919878 - RNA, 22 nt, Human
agaaguuucucugaacguguag

SEQ ID NO: 919879 - RNA, 22 nt, Human
ugugaccauaauuuguaaauaa

SEQ ID NO: 919880 - RNA, 22 nt, Human
ugucuggggguucugaaagcug

SEQ ID NO: 919881 - RNA, 22 nt, Human
uacauucagagaaaguuuccau

SEQ ID NO: 919882 - RNA, 22 nt, Human
acuccagagcucacaugucuaa

SEQ ID NO: 919883 - RNA, 22 nt, Human
ggaggucacaaggugaguaaag

SEQ ID NO: 919884 - RNA, 22 nt, Human
cauguacaaggaugcucagagu

SEQ ID NO: 919885 - RNA, 22 nt, Human
auggacaguacugaguggacua

SEQ ID NO: 919886 - RNA, 20 nt, Human
agaaacauuucuugagaacu

SEQ ID NO: 919887 - RNA, 22 nt, Human
uccuggccuccguucucugcau

SEQ ID NO: 919888 - RNA, 22 nt, Human
agcucccagcagagcuggccac

SEQ ID NO: 919889 - RNA, 22 nt, Human
gcugagcacagcaaagagacaa

SEQ ID NO: 919890 - RNA, 22 nt, Human
aaagucugaaagauaagaguga

SEQ ID NO: 919891 - RNA, 22 nt, Human
uuuacuaacaccauacaugcug

SEQ ID NO: 919892 - RNA, 22 nt, Human
uuaauacagucuccagaaguaa

SEQ ID NO: 919893 - RNA, 22 nt, Human
ggugucugcuucccuccagcug

SEQ ID NO: 919894 - RNA, 22 nt, Human
aggcugagagcaacgugucaga

SEQ ID NO: 919895 - RNA, 22 nt, Human
cacagggaggcggucacuggcu

SEQ ID NO: 919896 - RNA, 22 nt, Human
ccagcuucaugggcaugcacca

SEQ ID NO: 919897 - RNA, 22 nt, Human
acagaguuagcagaaaguugga

SEQ ID NO: 919898 - RNA, 22 nt, Human
ucacauuuguuccucugcacuu

SEQ ID NO: 919899 - RNA, 18 nt, Human
uuguuuuaagacucuguc

SEQ ID NO: 919900 - RNA, 22 nt, Human
uacacauaggucugaauaaaaa

SEQ ID NO: 919901 - RNA, 22 nt, Human
ucacaauuuggauacagcuaug

SEQ ID NO: 919902 - RNA, 22 nt, Human
gcuccugcaggacccaggagac

SEQ ID NO: 919903 - RNA, 22 nt, Human
ggcaagugauccuggagcaccg

SEQ ID NO: 919904 - RNA, 22 nt, Human
caguccucucacucaggccuuu

SEQ ID NO: 919905 - RNA, 22 nt, Human
agauggugauagagcugggauu

SEQ ID NO: 919906 - RNA, 22 nt, Human
caaggaaaagaaguauuucaga

SEQ ID NO: 919907 - RNA, 22 nt, Human
uccucacacuauagaugaggau

SEQ ID NO: 919908 - RNA, 22 nt, Human
ucaggaaguuuugaaucaacug

SEQ ID NO: 919909 - RNA, 22 nt, Human
uaaggaaaauggacaucaaaca

SEQ ID NO: 919910 - RNA, 17 nt, Human
cuaaauacuugcguuuc

SEQ ID NO: 919911 - RNA, 22 nt, Human
uaagaugaccuuauaaagagca

SEQ ID NO: 919912 - RNA, 22 nt, Human
gauacaaaauauaaauggagag

SEQ ID NO: 919913 - RNA, 22 nt, Human
cgcaggaagacaaggguggaaa

SEQ ID NO: 919914 - RNA, 22 nt, Human
aggggcuggcuuaucugagagu

SEQ ID NO: 919915 - RNA, 22 nt, Human
uggaagcgagacagagaucucc

SEQ ID NO: 919916 - RNA, 22 nt, Human
gguagcagggcugugagucaga

SEQ ID NO: 919917 - RNA, 22 nt, Human
ggcucuggcuccuggcuuugug

SEQ ID NO: 919918 - RNA, 20 nt, Human
acgugugugugcacgcgcgc

SEQ ID NO: 919919 - RNA, 22 nt, Human
cagcucuuggagaaaccagagc

SEQ ID NO: 919920 - RNA, 18 nt, Human
gcuccugguuggaaagaa

SEQ ID NO: 919921 - RNA, 23 nt, Human
acacuaaaugugaaggagcaaag

SEQ ID NO: 919922 - RNA, 22 nt, Human
ucuguacauuuguguugugaau

SEQ ID NO: 919923 - RNA, 22 nt, Human
cccuguuuuaaguugauauuga

SEQ ID NO: 919924 - RNA, 22 nt, Human
uccuggggaggguucuggcucc

SEQ ID NO: 919925 - RNA, 22 nt, Human
uggcaacauggacaggucugcc

SEQ ID NO: 919926 - RNA, 21 nt, Human
uacgugugugcauguuuauau

SEQ ID NO: 919927 - RNA, 22 nt, Human
cccaggcuuuuaaguuagacag

SEQ ID NO: 919928 - RNA, 21 nt, Human
augcaucuaucuucuacucca

SEQ ID NO: 919929 - RNA, 22 nt, Human
uucugcauuuaaaauauuacua

SEQ ID NO: 919930 - RNA, 22 nt, Human
uugucucucauuccugcaacuc

SEQ ID NO: 919931 - RNA, 22 nt, Human
ccaagaguaaauucaugaugcc

SEQ ID NO: 919932 - RNA, 22 nt, Human
ugggccugggcuccuguccucu

SEQ ID NO: 919933 - RNA, 21 nt, Human
uagcaaauggagaguaagaga

SEQ ID NO: 919934 - RNA, 22 nt, Human
aaugucuuucucauaacagaua

SEQ ID NO: 919935 - RNA, 22 nt, Human
aaggaaauuagguuauuuugcu

SEQ ID NO: 919936 - RNA, 20 nt, Human
agccagaagaaggcuggaga

SEQ ID NO: 919937 - RNA, 22 nt, Human
gagcuugguguuauuucugugg

SEQ ID NO: 919938 - RNA, 22 nt, Human
cacaaggccuuguagaccacgg

SEQ ID NO: 919939 - RNA, 22 nt, Human
gggucuucauuuauucuacacu

SEQ ID NO: 919940 - RNA, 18 nt, Human
uggcuucugcuagcugga

SEQ ID NO: 919941 - RNA, 22 nt, Human
gcuaggaguaaggagaccuuca

SEQ ID NO: 919942 - RNA, 22 nt, Human
cuggaggcacccuuagagaggc

SEQ ID NO: 919943 - RNA, 22 nt, Human
aucuuauguuguauucaaaauc

SEQ ID NO: 919944 - RNA, 22 nt, Human
auauuuaaacaggguaccaaua

SEQ ID NO: 919945 - RNA, 22 nt, Human
agagacugauggaucaccaaau

SEQ ID NO: 919946 - RNA, 23 nt, Human
caggcaggaugaggacuacacuc

SEQ ID NO: 919947 - RNA, 22 nt, Human
uuuccaaaguugccauaagcuu

SEQ ID NO: 919948 - RNA, 22 nt, Human
uucucucuuacugccaugcugu

SEQ ID NO: 919949 - RNA, 22 nt, Human
acagaacuuccugcuggagugg

SEQ ID NO: 919950 - RNA, 22 nt, Human
agugucugugaggggaauuccu

SEQ ID NO: 919951 - RNA, 17 nt, Human
ucuuugcaaugagacug

SEQ ID NO: 919952 - RNA, 22 nt, Human
gagcauuuuugucugcauuuua

SEQ ID NO: 919953 - RNA, 22 nt, Human
ucuuagcagugcugagaagaau

SEQ ID NO: 919954 - RNA, 22 nt, Human
ugucugaauuuuggaaucaagu

SEQ ID NO: 919955 - RNA, 22 nt, Human
ucagcuguccgcagcccacuuc

SEQ ID NO: 919956 - RNA, 22 nt, Human
uagaggcacccuggaggagacu

SEQ ID NO: 919957 - RNA, 22 nt, Human
auaaucuuguauuuccuaaagu

SEQ ID NO: 919958 - RNA, 22 nt, Human
uucaucuagugugcucguaacg

SEQ ID NO: 919959 - RNA, 22 nt, Human
ugcacaagucagaguaacauuu

SEQ ID NO: 919960 - RNA, 22 nt, Human
uucucucauucaaauuaaagug

SEQ ID NO: 919961 - RNA, 22 nt, Human
auaauggcuucugaguauuagg

SEQ ID NO: 919962 - RNA, 22 nt, Human
acuuguuugaaucucucuagag

SEQ ID NO: 919963 - RNA, 22 nt, Human
uuugagaaaaccagaaagaucu

SEQ ID NO: 919964 - RNA, 17 nt, Human
uuggcucuauugccucu

SEQ ID NO: 919965 - RNA, 22 nt, Human
gaaacuugauaauugaaacaga

SEQ ID NO: 919966 - RNA, 22 nt, Human
uguuuuauauaagcagagcggu

SEQ ID NO: 919967 - RNA, 22 nt, Human
gugccuggcacacagaaggcaa

SEQ ID NO: 919968 - RNA, 22 nt, Human
uuauuguaggccuauuguagaa

SEQ ID NO: 919969 - RNA, 22 nt, Human
cagguucugccauuuacuugua

SEQ ID NO: 919970 - RNA, 22 nt, Human
aagugacuauuugaguacauca

SEQ ID NO: 919971 - RNA, 22 nt, Human
guauucugggccgauuacaaaa

SEQ ID NO: 919972 - RNA, 22 nt, Human
aaugucuuuuaaccucuggacu

SEQ ID NO: 919973 - RNA, 22 nt, Human
uuuuaucagcagggauaacaag

SEQ ID NO: 919974 - RNA, 22 nt, Human
gccucuggguuggugacaggcu

SEQ ID NO: 919975 - RNA, 22 nt, Human
gagggccuagaagcuccauaug

SEQ ID NO: 919976 - RNA, 22 nt, Human
ucaagaacugugaagagucuga

SEQ ID NO: 919977 - RNA, 19 nt, Human
ugucuggaagagcugcagg

SEQ ID NO: 919978 - RNA, 22 nt, Human
auggccagucuguuggacagca

SEQ ID NO: 919979 - RNA, 22 nt, Human
aggcucagcccaagguggagag

SEQ ID NO: 919980 - RNA, 22 nt, Human
ucagcacuuacuaguggccuuu

SEQ ID NO: 919981 - RNA, 20 nt, Human
acaggcuuucugaggcuggc

SEQ ID NO: 919982 - RNA, 22 nt, Human
cacaauguauauguauaucaaa

SEQ ID NO: 919983 - RNA, 22 nt, Human
gcuggacuagaagcagggcuca

SEQ ID NO: 919984 - RNA, 22 nt, Human
aggaaaaugaaacagcaacugu

SEQ ID NO: 919985 - RNA, 22 nt, Human
ggaccgguggcuuccucggguc

SEQ ID NO: 919986 - RNA, 22 nt, Human
ucacagggcauuauggcuccag

SEQ ID NO: 919987 - RNA, 19 nt, Human
uugcagcaaaguuaggacc

SEQ ID NO: 919988 - RNA, 22 nt, Human
ggccaggagauggacaccacau

SEQ ID NO: 919989 - RNA, 22 nt, Human
acuguacauguaaacauuguca

SEQ ID NO: 919990 - RNA, 22 nt, Human
uguacacaugguguacacuccc

SEQ ID NO: 919991 - RNA, 22 nt, Human
ccugggcuuugagggcaggaug

SEQ ID NO: 919992 - RNA, 22 nt, Human
uggcaguguuucuaaggggcuc

SEQ ID NO: 919993 - RNA, 22 nt, Human
aaaucccagauaguaauguauu

SEQ ID NO: 919994 - RNA, 22 nt, Human
gcagaggugaccagcagcaggg

SEQ ID NO: 919995 - RNA, 21 nt, Human
acaggcaauuucauaugguuc

SEQ ID NO: 919996 - RNA, 22 nt, Human
agcugccuuaaauuacuuugug

SEQ ID NO: 919997 - RNA, 22 nt, Human
gagucaacaagucagaucucac

SEQ ID NO: 919998 - RNA, 22 nt, Human
agcuuguuagaaauguagacuc

SEQ ID NO: 919999 - RNA, 22 nt, Human
uacauacaugguggaaugguua

SEQ ID NO: 920000 - RNA, 19 nt, Human
gucuagaccaggcuccuua

SEQ ID NO: 920001 - RNA, 22 nt, Human
cacaauuauuaucucuuucuac

SEQ ID NO: 920002 - RNA, 22 nt, Human
ugagacagcagauuagcaauga

SEQ ID NO: 920003 - RNA, 22 nt, Human
aggcucuauaccgcugggaguu

SEQ ID NO: 920004 - RNA, 22 nt, Human
cgcugcagacgcgcuggcgaaa

SEQ ID NO: 920005 - RNA, 22 nt, Human
gcagggcucugcuguaguccua

SEQ ID NO: 920006 - RNA, 22 nt, Human
agcgcgcucgaugguuuccgcg

SEQ ID NO: 920007 - RNA, 22 nt, Human
uguucauuuugaaguacuucaa

SEQ ID NO: 920008 - RNA, 22 nt, Human
ggugacagugguuaaaauuugu

SEQ ID NO: 920009 - RNA, 22 nt, Human
gaggaggcuuccgggaggcacg

SEQ ID NO: 920010 - RNA, 22 nt, Human
caugaaaauaacauuguuguga

SEQ ID NO: 920011 - RNA, 22 nt, Human
uuacaagcagcuacauaucaca

SEQ ID NO: 920012 - RNA, 22 nt, Human
aagcuggggacucagaccccau

SEQ ID NO: 920013 - RNA, 22 nt, Human
uaacaugagagcuaagacauua

SEQ ID NO: 920014 - RNA, 22 nt, Human
acaggaagaaagugcaguagau

SEQ ID NO: 920015 - RNA, 22 nt, Human
auacuacauacuauguaaacau

SEQ ID NO: 920016 - RNA, 19 nt, Human
uauucuguuaaccuuuguc

SEQ ID NO: 920017 - RNA, 22 nt, Human
auucuaagcacgcugaagucuu

SEQ ID NO: 920018 - RNA, 22 nt, Human
aagagcagaaguccuuggaucc

SEQ ID NO: 920019 - RNA, 18 nt, Human
ucauagaagugaaucaga

SEQ ID NO: 920020 - RNA, 22 nt, Human
cagaaagugauuugcuauucca

SEQ ID NO: 920021 - RNA, 22 nt, Human
gaagaugggaaugaugaguggg

SEQ ID NO: 920022 - RNA, 21 nt, Human
acagaggcauacagcuuaagg

SEQ ID NO: 920023 - RNA, 22 nt, Human
aaguuguaugucuuagaaagua

SEQ ID NO: 920024 - RNA, 22 nt, Human
ccugaguagcuggaauuaaagg

SEQ ID NO: 920025 - RNA, 22 nt, Human
cugucuuugguccugucuguua

SEQ ID NO: 920026 - RNA, 22 nt, Human
aacauagaauaaaugaguuagg

SEQ ID NO: 920027 - RNA, 22 nt, Human
gcugggaguuacugucuccuuu

SEQ ID NO: 920028 - RNA, 22 nt, Human
uugggagaaauaguugauccgc

SEQ ID NO: 920029 - RNA, 22 nt, Human
caccuugagggggaaaauaauc

SEQ ID NO: 920030 - RNA, 22 nt, Human
aggcuucacgaugggugaggug

SEQ ID NO: 920031 - RNA, 22 nt, Human
caggcagccaggggaccugucc

SEQ ID NO: 920032 - RNA, 22 nt, Human
aaugauaccgccaauauuacca

SEQ ID NO: 920033 - RNA, 22 nt, Human
auguaugucugcauacacauac

SEQ ID NO: 920034 - RNA, 22 nt, Human
ugacaggauaguaggaagaucu

SEQ ID NO: 920035 - RNA, 21 nt, Human
uguaugcacgcacaugcacac

SEQ ID NO: 920036 - RNA, 22 nt, Human
guggcuccgcaggcuccauucu

SEQ ID NO: 920037 - RNA, 22 nt, Human
acaggcagcgucauugcugcuc

SEQ ID NO: 920038 - RNA, 22 nt, Human
aacaagaauaagugguuucugg

SEQ ID NO: 920039 - RNA, 22 nt, Human
aacaaacauuaccuggugcugg

SEQ ID NO: 920040 - RNA, 22 nt, Human
ggugagaggcagaggacagcuu

SEQ ID NO: 920041 - RNA, 22 nt, Human
gccaguaagugguagaguugag

SEQ ID NO: 920042 - RNA, 22 nt, Human
cagaaacauguauaaaguugua

SEQ ID NO: 920043 - RNA, 22 nt, Human
acucuggggcgcuacuccaacu

SEQ ID NO: 920044 - RNA, 22 nt, Human
cugcccuguaucuucucccaau

SEQ ID NO: 920045 - RNA, 22 nt, Human
uuuaugauuaauccaauucugu

SEQ ID NO: 920046 - RNA, 22 nt, Human
gcuucaaauuaaggugaauccc

SEQ ID NO: 920047 - RNA, 22 nt, Human
uacacugaaagagaggauugaa

SEQ ID NO: 920048 - RNA, 22 nt, Human
caucugucuccucaucgccugu

SEQ ID NO: 920049 - RNA, 22 nt, Human
aggcuucaguagggagcauguc

SEQ ID NO: 920050 - RNA, 22 nt, Human
uucuuacaaacaagaucauuga

SEQ ID NO: 920051 - RNA, 22 nt, Human
uucauugacugguucguuaagu

SEQ ID NO: 920052 - RNA, 22 nt, Human
cacagaugagcugaauagcuuu

SEQ ID NO: 920053 - RNA, 22 nt, Human
auuacaauaauacaugcucauu

SEQ ID NO: 920054 - RNA, 21 nt, Human
uggcucugaaagagugcugca

SEQ ID NO: 920055 - RNA, 22 nt, Human
acaucuguucuucucuuguccc

SEQ ID NO: 920056 - RNA, 22 nt, Human
accagcuguguccuggcugcag

SEQ ID NO: 920057 - RNA, 19 nt, Human
ucacuucuguuagcaugga

SEQ ID NO: 920058 - RNA, 22 nt, Human
aagcuguguaaguugcuugguu

SEQ ID NO: 920059 - RNA, 22 nt, Human
acucuucaccgcuacugaaaua

SEQ ID NO: 920060 - RNA, 22 nt, Human
cuaauguaaagcauuuguucag

SEQ ID NO: 920061 - RNA, 17 nt, Human
ucugagaacuugaagca

SEQ ID NO: 920062 - RNA, 22 nt, Human
ucagaaguugagauauucaggg

SEQ ID NO: 920063 - RNA, 20 nt, Human
cugcagggugagugggcgau

SEQ ID NO: 920064 - RNA, 20 nt, Human
uuuuggugaauuccagaaua

SEQ ID NO: 920065 - RNA, 22 nt, Human
auggcagaagucaagaugaguu

SEQ ID NO: 920066 - RNA, 22 nt, Human
gcacccagauauugccuugacc

SEQ ID NO: 920067 - RNA, 22 nt, Human
auugcuggaugagcucuuggau

SEQ ID NO: 920068 - RNA, 22 nt, Human
cauggccuugagugacugcacu

SEQ ID NO: 920069 - RNA, 22 nt, Human
gcagguggcagaggugggaucu

SEQ ID NO: 920070 - RNA, 22 nt, Human
cauuugaugacucaacucauaa

SEQ ID NO: 920071 - RNA, 22 nt, Human
cuggaagggggacagccacaca

SEQ ID NO: 920072 - RNA, 22 nt, Human
gccuccugacuuacacugagcu

SEQ ID NO: 920073 - RNA, 22 nt, Human
aaaguaaggguuaaucuacuuu

SEQ ID NO: 920074 - RNA, 22 nt, Human
ugaaggcauugaugaaggaauc

SEQ ID NO: 920075 - RNA, 22 nt, Human
cuggccaggccccuugcagggc

SEQ ID NO: 920076 - RNA, 22 nt, Human
aaacaagucacuuuaucuugaa

SEQ ID NO: 920077 - RNA, 22 nt, Human
augagguagcuguggcuggcug

SEQ ID NO: 920078 - RNA, 22 nt, Human
acuuuauguuugauaucuaugg

SEQ ID NO: 920079 - RNA, 22 nt, Human
gaaauguuguccugucucuuga

SEQ ID NO: 920080 - RNA, 22 nt, Human
aggaagcuaaccagggagugag

SEQ ID NO: 920081 - RNA, 22 nt, Human
uaacuucagcgaguucucuuaa

SEQ ID NO: 920082 - RNA, 22 nt, Human
uuucaaacugggagugagggga

SEQ ID NO: 920083 - RNA, 22 nt, Human
guuuuuccuugcugaggacccg

SEQ ID NO: 920084 - RNA, 22 nt, Human
gcagaggucuagcaccaagaau

SEQ ID NO: 920085 - RNA, 22 nt, Human
agcucacagaaauccugcagga

SEQ ID NO: 920086 - RNA, 22 nt, Human
cacugugggccugucgugggug

SEQ ID NO: 920087 - RNA, 22 nt, Human
cagagugggcugucagccacca

SEQ ID NO: 920088 - RNA, 22 nt, Human
gacaaauaggucaacaggaggg

SEQ ID NO: 920089 - RNA, 22 nt, Human
acacuacaaucucagaacuaua

SEQ ID NO: 920090 - RNA, 22 nt, Human
gcugcuggagagcgagacuguu

SEQ ID NO: 920091 - RNA, 17 nt, Human
gcagccagugcagcagg

SEQ ID NO: 920092 - RNA, 22 nt, Human
cucuuuggugcaccuugcaguc

SEQ ID NO: 920093 - RNA, 22 nt, Human
gaggggcgcugucgggucaccu

SEQ ID NO: 920094 - RNA, 23 nt, Human
ucucugguuaggggagauuggug

SEQ ID NO: 920095 - RNA, 22 nt, Human
cugggagcggcugucacugguu

SEQ ID NO: 920096 - RNA, 22 nt, Human
ugugaugguucacugggcauga

SEQ ID NO: 920097 - RNA, 22 nt, Human
agcuuucucuucuuuagaaagu

SEQ ID NO: 920098 - RNA, 22 nt, Human
uauacagaacugcacgugcacg

SEQ ID NO: 920099 - RNA, 22 nt, Human
gaggaggcacuaguuagugaca

SEQ ID NO: 920100 - RNA, 22 nt, Human
auuugucauguauguaaaguug

SEQ ID NO: 920101 - RNA, 22 nt, Human
gcccaggcuggagugcaguagc

SEQ ID NO: 920102 - RNA, 22 nt, Human
uacauauguaaacauguauaaa

SEQ ID NO: 920103 - RNA, 22 nt, Human
caguaggaaggaugcagaaaaa

SEQ ID NO: 920104 - RNA, 22 nt, Human
ugucagugaguuggguccugag

SEQ ID NO: 920105 - RNA, 22 nt, Human
aguauuuucgccaucacaagaa

SEQ ID NO: 920106 - RNA, 22 nt, Human
aauggucauuggugguuauugg

SEQ ID NO: 920107 - RNA, 22 nt, Human
uuuccaauaaggucaccuuccu

SEQ ID NO: 920108 - RNA, 22 nt, Human
gcuuucccugcccucagaagga

SEQ ID NO: 920109 - RNA, 22 nt, Human
uaugaguacaaggaaucuucca

SEQ ID NO: 920110 - RNA, 22 nt, Human
gccagcagccacagaagucacu

SEQ ID NO: 920111 - RNA, 20 nt, Human
accagagacuggggacaagu

SEQ ID NO: 920112 - RNA, 22 nt, Human
ucucuguggcaacuacuuagcu

SEQ ID NO: 920113 - RNA, 22 nt, Human
cuucugggauuuuugaagacuc

SEQ ID NO: 920114 - RNA, 22 nt, Human
accaugcaucaaagcuaauaua

SEQ ID NO: 920115 - RNA, 22 nt, Human
uugagggaacaugagaaucauc

SEQ ID NO: 920116 - RNA, 22 nt, Human
caggcagcugacugucagauau

SEQ ID NO: 920117 - RNA, 22 nt, Human
uccugagauccuuuuagggauc

SEQ ID NO: 920118 - RNA, 22 nt, Human
ugugcauguaccuuauucugga

SEQ ID NO: 920119 - RNA, 19 nt, Human
uccuggggauguggucacc

SEQ ID NO: 920120 - RNA, 22 nt, Human
ccuggguagacuuugaagcauu

SEQ ID NO: 920121 - RNA, 22 nt, Human
acuguacaaauauugcaaaaua

SEQ ID NO: 920122 - RNA, 22 nt, Human
ucuaaaaugcagaucuacuggu

SEQ ID NO: 920123 - RNA, 22 nt, Human
aagaggcuggaggauacugcgc

SEQ ID NO: 920124 - RNA, 22 nt, Human
aagcaaggccggaaggaaacuc

SEQ ID NO: 920125 - RNA, 22 nt, Human
ccagagcagggcagcagggcuc

SEQ ID NO: 920126 - RNA, 22 nt, Human
uuuuaucugcuucauuaguuga

SEQ ID NO: 920127 - RNA, 22 nt, Human
cugugcacuucucuuuauuugu

SEQ ID NO: 920128 - RNA, 22 nt, Human
agcagcuuuccucuggggucag

SEQ ID NO: 920129 - RNA, 22 nt, Human
acuugaaaagcucagcaguagu

SEQ ID NO: 920130 - RNA, 22 nt, Human
ggguucaucaaaggacagacuc

SEQ ID NO: 920131 - RNA, 22 nt, Human
acugauauuaaacacaauuuaa

SEQ ID NO: 920132 - RNA, 22 nt, Human
ugugaagagaguaauaaaguca

SEQ ID NO: 920133 - RNA, 22 nt, Human
cuugccuacuugucaaccagca

SEQ ID NO: 920134 - RNA, 22 nt, Human
auugaaaauauaauucuaggag

SEQ ID NO: 920135 - RNA, 22 nt, Human
cucaauacccagggacucuaga

SEQ ID NO: 920136 - RNA, 21 nt, Human
auggcuucucaggugcacuga

SEQ ID NO: 920137 - RNA, 22 nt, Human
gcacaauuccaugggacagccc

SEQ ID NO: 920138 - RNA, 22 nt, Human
cuuguuuuuaagagauguuuac

SEQ ID NO: 920139 - RNA, 22 nt, Human
ugagcaggcucccacuucagug

SEQ ID NO: 920140 - RNA, 22 nt, Human
ccagggagccuggugugucagc

SEQ ID NO: 920141 - RNA, 22 nt, Human
uggggaucauaaauugauggag

SEQ ID NO: 920142 - RNA, 22 nt, Human
acuuuuucucagaaggauuggu

SEQ ID NO: 920143 - RNA, 22 nt, Human
ucuuccugaaacccuguuccag

SEQ ID NO: 920144 - RNA, 22 nt, Human
uuucacagaaaggauaacauua

SEQ ID NO: 920145 - RNA, 22 nt, Human
augucagucuuucugucucaga

SEQ ID NO: 920146 - RNA, 22 nt, Human
uugucuuauuuuaucauaagca

SEQ ID NO: 920147 - RNA, 22 nt, Human
agcauucauugcuagaauguaa

SEQ ID NO: 920148 - RNA, 22 nt, Human
uucuuauugggagaccuuuucu

SEQ ID NO: 920149 - RNA, 22 nt, Human
gcucugccucuuugcugcguca

SEQ ID NO: 920150 - RNA, 22 nt, Human
uuucauguuacauuuaaaaugu

SEQ ID NO: 920151 - RNA, 22 nt, Human
agacugaagcuccuugaggaca

SEQ ID NO: 920152 - RNA, 22 nt, Human
accaaagggcagaacaugagca

SEQ ID NO: 920153 - RNA, 22 nt, Human
cuacaaaaguaauugugguuuu

SEQ ID NO: 920154 - RNA, 22 nt, Human
gcuuccaguaaguugcugccau

SEQ ID NO: 920155 - RNA, 22 nt, Human
accuagaacugcaggcuauuuu

SEQ ID NO: 920156 - RNA, 22 nt, Human
aacuguaaggcuuagaacagca

SEQ ID NO: 920157 - RNA, 19 nt, Human
ugagcaugcgagcugagaa

SEQ ID NO: 920158 - RNA, 22 nt, Human
ccagcauggcaccugagaugag

SEQ ID NO: 920159 - RNA, 20 nt, Human
gcucugggagggaugugaug

SEQ ID NO: 920160 - RNA, 22 nt, Human
ugccauggaaucaccuccagcu

SEQ ID NO: 920161 - RNA, 22 nt, Human
ugcugccuccaacuccugggcu

SEQ ID NO: 920162 - RNA, 22 nt, Human
uggcagucccucugguagcacc

SEQ ID NO: 920163 - RNA, 22 nt, Human
cuucaaguaauucugauggcua

SEQ ID NO: 920164 - RNA, 22 nt, Human
uucaauucugaugaaggcaaua

SEQ ID NO: 920165 - RNA, 22 nt, Human
ggcagcugauuagcaucaagga

SEQ ID NO: 920166 - RNA, 22 nt, Human
ucauuucuauugcuacugucug

SEQ ID NO: 920167 - RNA, 22 nt, Human
ggguccccucaucauggagacu

SEQ ID NO: 920168 - RNA, 22 nt, Human
gagcuguucaaggacaggcacg

SEQ ID NO: 920169 - RNA, 22 nt, Human
uuaaagauucugaggcugauua

SEQ ID NO: 920170 - RNA, 22 nt, Human
ugugucuuuggcgaugucugga

SEQ ID NO: 920171 - RNA, 22 nt, Human
aaaguauauaugcacuuuagaa

SEQ ID NO: 920172 - RNA, 22 nt, Human
cugaggcugggcauggggucca

SEQ ID NO: 920173 - RNA, 22 nt, Human
uacagacauucaauuuugaccc

SEQ ID NO: 920174 - RNA, 19 nt, Human
aggacuucugaacccgucc

SEQ ID NO: 920175 - RNA, 22 nt, Human
ucucuagguugauauaaauuau

SEQ ID NO: 920176 - RNA, 22 nt, Human
uaaagcaguguugggucggacg

SEQ ID NO: 920177 - RNA, 22 nt, Human
gcuggggucugugaggagggcu

SEQ ID NO: 920178 - RNA, 22 nt, Human
uauuuaauaaaacuauggcaug

SEQ ID NO: 920179 - RNA, 22 nt, Human
aacccaggguggagguugcagu

SEQ ID NO: 920180 - RNA, 22 nt, Human
gcauuugagcacauuuuaaaga

SEQ ID NO: 920181 - RNA, 22 nt, Human
ugagcagagcaauaggacucuc

SEQ ID NO: 920182 - RNA, 19 nt, Human
uauuauuuguagcaaggcc

SEQ ID NO: 920183 - RNA, 22 nt, Human
aacaugaaguuuucuauaguga

SEQ ID NO: 920184 - RNA, 22 nt, Human
ugggcccugguggccaugccuc

SEQ ID NO: 920185 - RNA, 22 nt, Human
ccagccuggguguuagaagaca

SEQ ID NO: 920186 - RNA, 22 nt, Human
gucacuuuacacuccuacuaaa

SEQ ID NO: 920187 - RNA, 22 nt, Human
ucaaugcacacaggacuuggug

SEQ ID NO: 920188 - RNA, 18 nt, Human
uccagcgugcuccagggc

SEQ ID NO: 920189 - RNA, 22 nt, Human
auguauguucaagcaaugauua

SEQ ID NO: 920190 - RNA, 22 nt, Human
cuguauuuuuuaagaauaucuc

SEQ ID NO: 920191 - RNA, 22 nt, Human
gcuguuauaauauucuguuugu

SEQ ID NO: 920192 - RNA, 22 nt, Human
agaggccaccacugucagggac

SEQ ID NO: 920193 - RNA, 22 nt, Human
acagauguacacucauauauaa

SEQ ID NO: 920194 - RNA, 22 nt, Human
uuucagaagucaacuagguaaa

SEQ ID NO: 920195 - RNA, 22 nt, Human
aaagguuuucuaggguugaggg

SEQ ID NO: 920196 - RNA, 22 nt, Human
cuacagaauucaacaaaugguu

SEQ ID NO: 920197 - RNA, 22 nt, Human
gccaagggggcagugcaugggu

SEQ ID NO: 920198 - RNA, 22 nt, Human
uggggcagcagaccuuucuugg

SEQ ID NO: 920199 - RNA, 22 nt, Human
ggcuguggucugggugcucccc

SEQ ID NO: 920200 - RNA, 22 nt, Human
aacagcaggcaccaaggcuaug

SEQ ID NO: 920201 - RNA, 22 nt, Human
gcacacaggcaguuuccagcca

SEQ ID NO: 920202 - RNA, 22 nt, Human
cugcagagggguugaagggucc

SEQ ID NO: 920203 - RNA, 22 nt, Human
uggagcaggaagucuauggcug

SEQ ID NO: 920204 - RNA, 22 nt, Human
cagagcaguagaaaacagccuu

SEQ ID NO: 920205 - RNA, 22 nt, Human
gacugguaagguauuggaauuc

SEQ ID NO: 920206 - RNA, 22 nt, Human
uuuuuagaguguuaccaguaua

SEQ ID NO: 920207 - RNA, 22 nt, Human
caguaucuugcuuauagacaca

SEQ ID NO: 920208 - RNA, 22 nt, Human
ucuuuuaguaauaaauauuugu

SEQ ID NO: 920209 - RNA, 22 nt, Human
auuugcaauuacucaugucauu

SEQ ID NO: 920210 - RNA, 22 nt, Human
uagcaagacaacuuuucucagu

SEQ ID NO: 920211 - RNA, 20 nt, Human
cuggaauggguguggguuag

SEQ ID NO: 920212 - RNA, 22 nt, Human
cagcugugcugauugcucagua

SEQ ID NO: 920213 - RNA, 22 nt, Human
ggucagcaguuucuuugaauuu

SEQ ID NO: 920214 - RNA, 22 nt, Human
uucuuucugggguccuucggcu

SEQ ID NO: 920215 - RNA, 22 nt, Human
cauaaaguaggcaagcauucca

SEQ ID NO: 920216 - RNA, 22 nt, Human
gauccccagggcaggccucccg

SEQ ID NO: 920217 - RNA, 22 nt, Human
augacagaggagugcaggugau

SEQ ID NO: 920218 - RNA, 22 nt, Human
ggacugaaugccagucuaugga

SEQ ID NO: 920219 - RNA, 22 nt, Human
cagagcccugggcacaugguag

SEQ ID NO: 920220 - RNA, 22 nt, Human
cuggugucugcucccucacagc

SEQ ID NO: 920221 - RNA, 22 nt, Human
guccuuggagcuccccucugua

SEQ ID NO: 920222 - RNA, 22 nt, Human
acaguguggggugagauggaac

SEQ ID NO: 920223 - RNA, 22 nt, Human
caaaguccuagaacagugcuug

SEQ ID NO: 920224 - RNA, 22 nt, Human
cuuggagguggaaguugcagug

SEQ ID NO: 920225 - RNA, 22 nt, Human
ccaagagguugugaggcaggca

SEQ ID NO: 920226 - RNA, 17 nt, Human
uaucuguguuccuggcu

SEQ ID NO: 920227 - RNA, 22 nt, Human
cugcuccaccuccgggucaggc

SEQ ID NO: 920228 - RNA, 22 nt, Human
ggccucagugggccgcugcagg

SEQ ID NO: 920229 - RNA, 22 nt, Human
uggcaauguaaauugaacuaga

SEQ ID NO: 920230 - RNA, 22 nt, Human
cuguuucuuugcugucagagag

SEQ ID NO: 920231 - RNA, 22 nt, Human
uuucagaaagcaucaucaaagu

SEQ ID NO: 920232 - RNA, 22 nt, Human
gcucaaagaauauucagaauga

SEQ ID NO: 920233 - RNA, 23 nt, Human
ccagauuugccacgagagaggcu

SEQ ID NO: 920234 - RNA, 22 nt, Human
ugagacagucaccaggcaggcc

SEQ ID NO: 920235 - RNA, 22 nt, Human
aguggggaagagcaugggcccu

SEQ ID NO: 920236 - RNA, 22 nt, Human
uuacuacauuguaacacaguac

SEQ ID NO: 920237 - RNA, 22 nt, Human
augcaacaccccuauggaugga

SEQ ID NO: 920238 - RNA, 22 nt, Human
uggugccuugggccuacagcgc

SEQ ID NO: 920239 - RNA, 22 nt, Human
ucuccgggugcaugugugugcc

SEQ ID NO: 920240 - RNA, 22 nt, Human
cugccaccaugccccagcagag

SEQ ID NO: 920241 - RNA, 22 nt, Human
cugaggccucucccacuccagc

SEQ ID NO: 920242 - RNA, 22 nt, Human
ucugugcagucagggcucaguc

SEQ ID NO: 920243 - RNA, 22 nt, Human
augugugguuuguaaaugauuu

SEQ ID NO: 920244 - RNA, 22 nt, Human
gaauccgggaggcaaaaguugc

SEQ ID NO: 920245 - RNA, 22 nt, Human
ccagcagagucuaggaaggagg

SEQ ID NO: 920246 - RNA, 22 nt, Human
ucuggcagguucccauguuaug

SEQ ID NO: 920247 - RNA, 22 nt, Human
ggcccagcaucuugugaaguuu

SEQ ID NO: 920248 - RNA, 22 nt, Human
uuucacauuagauaugucauuu

SEQ ID NO: 920249 - RNA, 22 nt, Human
gagcagcuuaugucaagccaga

SEQ ID NO: 920250 - RNA, 20 nt, Human
gcucugucuggccuacuuuu

SEQ ID NO: 920251 - RNA, 22 nt, Human
uucuuuucuuggcaggaguaga

SEQ ID NO: 920252 - RNA, 22 nt, Human
uauuugcaggcuuuugucaugg

SEQ ID NO: 920253 - RNA, 22 nt, Human
gaugaggucauguuuuacauau

SEQ ID NO: 920254 - RNA, 22 nt, Human
cuguggcuggaauaauaaaugu

SEQ ID NO: 920255 - RNA, 22 nt, Human
accccagaggcggaggcugcag

SEQ ID NO: 920256 - RNA, 22 nt, Human
uaugugugcuuuuuccaugcau

SEQ ID NO: 920257 - RNA, 22 nt, Human
auauaguauguccuccagaauu

SEQ ID NO: 920258 - RNA, 22 nt, Human
aucaaauacaaagggcauaagg

SEQ ID NO: 920259 - RNA, 22 nt, Human
cagcggaggacagaugggagcu

SEQ ID NO: 920260 - RNA, 22 nt, Human
agugugucugaucacuugugag

SEQ ID NO: 920261 - RNA, 22 nt, Human
uuccacaaugguuaagcucguu

SEQ ID NO: 920262 - RNA, 22 nt, Human
agcauuccacacugaagucugc

SEQ ID NO: 920263 - RNA, 22 nt, Human
guugcucaaugggaauaagaau

SEQ ID NO: 920264 - RNA, 20 nt, Human
gcuguggcaaagcuuugugu

SEQ ID NO: 920265 - RNA, 22 nt, Human
cugggcugccagguaggcacac

SEQ ID NO: 920266 - RNA, 22 nt, Human
gcugcugcuugaaggcucggag

SEQ ID NO: 920267 - RNA, 22 nt, Human
cacacaugaaguugcugagcua

SEQ ID NO: 920268 - RNA, 22 nt, Human
ugacagaaagaguauuaaagau

SEQ ID NO: 920269 - RNA, 22 nt, Human
cuagguuuaacuuucacagaaa

SEQ ID NO: 920270 - RNA, 22 nt, Human
aaaucaugugcagagaucagga

SEQ ID NO: 920271 - RNA, 22 nt, Human
ugcauuuguuaccuuauugcag

SEQ ID NO: 920272 - RNA, 22 nt, Human
aucuuuggccacuugugcugca

SEQ ID NO: 920273 - RNA, 22 nt, Human
cugcugagguauacuaugugac

SEQ ID NO: 920274 - RNA, 22 nt, Human
uucaacagggcaugaugagacg

SEQ ID NO: 920275 - RNA, 22 nt, Human
accagaaguucuccaaaaagau

SEQ ID NO: 920276 - RNA, 22 nt, Human
aguuucacagaggguuagacgc

SEQ ID NO: 920277 - RNA, 22 nt, Human
cagaggcugagcagucaguuug

SEQ ID NO: 920278 - RNA, 22 nt, Human
ucuucaaaauugauuggagaag

SEQ ID NO: 920279 - RNA, 22 nt, Human
gcucccagggcagcgcagaaga

SEQ ID NO: 920280 - RNA, 22 nt, Human
uggagaguguagacuucagagu

SEQ ID NO: 920281 - RNA, 22 nt, Human
uuaguuacuuauaggugauaga

SEQ ID NO: 920282 - RNA, 22 nt, Human
caucaagauggaagagcaaaua

SEQ ID NO: 920283 - RNA, 22 nt, Human
agccuggagaagauguguauug

SEQ ID NO: 920284 - RNA, 22 nt, Human
cuggccccaucuggagucugag

SEQ ID NO: 920285 - RNA, 22 nt, Human
caguggaaaucagagugagagu

SEQ ID NO: 920286 - RNA, 23 nt, Human
ggaggucagugccugagggugag

SEQ ID NO: 920287 - RNA, 22 nt, Human
uguauaugugauguacauguac

SEQ ID NO: 920288 - RNA, 22 nt, Human
cuccagcuuuuucccaguuggc

SEQ ID NO: 920289 - RNA, 22 nt, Human
gaguuauaaccuaguuuaacug

SEQ ID NO: 920290 - RNA, 22 nt, Human
auguaucaacugcaggcaaguu

SEQ ID NO: 920291 - RNA, 22 nt, Human
caaaaguaccuugugugcuuug

SEQ ID NO: 920292 - RNA, 22 nt, Human
ucugugugauuucagggaaguc

SEQ ID NO: 920293 - RNA, 22 nt, Human
uacccucucccgguccagcuuu

SEQ ID NO: 920294 - RNA, 19 nt, Human
ucaaaggcaaggaggaacu

SEQ ID NO: 920295 - RNA, 22 nt, Human
aagccaguguuuuugagaguug

SEQ ID NO: 920296 - RNA, 22 nt, Human
aagccaagugcuggccaugggc

SEQ ID NO: 920297 - RNA, 22 nt, Human
gcuggugcauuagcugcaguuc

SEQ ID NO: 920298 - RNA, 22 nt, Human
ucagggcugugguuccuuuucu

SEQ ID NO: 920299 - RNA, 22 nt, Human
cugauacauaguagcaugucau

SEQ ID NO: 920300 - RNA, 19 nt, Human
cagaacaggaccaggggcc

SEQ ID NO: 920301 - RNA, 22 nt, Human
uguguacagcaugguccagcag

SEQ ID NO: 920302 - RNA, 20 nt, Human
auacaagaugaguaauuucu

SEQ ID NO: 920303 - RNA, 22 nt, Human
gcaggaugggagcuucacuuug

SEQ ID NO: 920304 - RNA, 22 nt, Human
ugaggaggcccagguuggggcu

SEQ ID NO: 920305 - RNA, 21 nt, Human
aagcuacagaaaauaauuuga

SEQ ID NO: 920306 - RNA, 22 nt, Human
ucagggaaaggggagagucauu

SEQ ID NO: 920307 - RNA, 22 nt, Human
gcacagaacuucucuuaguagg

SEQ ID NO: 920308 - RNA, 22 nt, Human
aauaauagcagaguuuacaauc

SEQ ID NO: 920309 - RNA, 22 nt, Human
ccugugucagccccugccucca

SEQ ID NO: 920310 - RNA, 22 nt, Human
agugucuaaacuggcuuccugg

SEQ ID NO: 920311 - RNA, 22 nt, Human
gcuguccauccacuucccagcg

SEQ ID NO: 920312 - RNA, 22 nt, Human
cugucgccugguccucucugga

SEQ ID NO: 920313 - RNA, 22 nt, Human
agaaucaacugaaaauugguga

SEQ ID NO: 920314 - RNA, 22 nt, Human
ugguuagacacaugcaugucau

SEQ ID NO: 920315 - RNA, 22 nt, Human
uuaacacuaucugucauaauua

SEQ ID NO: 920316 - RNA, 22 nt, Human
uuauuauggcaguuuucuaggu

SEQ ID NO: 920317 - RNA, 20 nt, Human
gcaagcuuauuagugauauu

SEQ ID NO: 920318 - RNA, 22 nt, Human
ugcuccaggagcacuuuccauu

SEQ ID NO: 920319 - RNA, 22 nt, Human
augcugucaguauuaugugcag

SEQ ID NO: 920320 - RNA, 22 nt, Human
ucaguguuugaacccaggguua

SEQ ID NO: 920321 - RNA, 22 nt, Human
guauuuuuaguagagucggggu

SEQ ID NO: 920322 - RNA, 22 nt, Human
gaccacuggcgcugcgagaccc

SEQ ID NO: 920323 - RNA, 22 nt, Human
ggcuagggaucuagaccaggac

SEQ ID NO: 920324 - RNA, 22 nt, Human
gaguaacagcauaaauuuguga

SEQ ID NO: 920325 - RNA, 22 nt, Human
ccagaggugccacagaaagagc

SEQ ID NO: 920326 - RNA, 22 nt, Human
acacaagaaguuaaugggcaaa

SEQ ID NO: 920327 - RNA, 22 nt, Human
gcuguguccucacacagccuuu

SEQ ID NO: 920328 - RNA, 22 nt, Human
aucuuacauucccucaccauuu

SEQ ID NO: 920329 - RNA, 22 nt, Human
gacagcagacagaacuaccugc

SEQ ID NO: 920330 - RNA, 22 nt, Human
gcauuagauauccuugaaguua

SEQ ID NO: 920331 - RNA, 22 nt, Human
auggcagccaguguuggaggaa

SEQ ID NO: 920332 - RNA, 22 nt, Human
uaaguucugcugacggccagcc

SEQ ID NO: 920333 - RNA, 22 nt, Human
ggccucuggucaagacaagcau

SEQ ID NO: 920334 - RNA, 22 nt, Human
gcuccaggcgagcuggaccaga

SEQ ID NO: 920335 - RNA, 22 nt, Human
aggcuucauguagaugguuccc

SEQ ID NO: 920336 - RNA, 22 nt, Human
ucuauuaaugauucaauagugu

SEQ ID NO: 920337 - RNA, 22 nt, Human
aaaagcaauugcaguucuugcc

SEQ ID NO: 920338 - RNA, 22 nt, Human
ggcagcugguucuuuccauuaa

SEQ ID NO: 920339 - RNA, 22 nt, Human
ccugcaagagcggagaagccag

SEQ ID NO: 920340 - RNA, 22 nt, Human
ucugccugagcagagggaggcc

SEQ ID NO: 920341 - RNA, 22 nt, Human
augucauugccaagaugcuaau

SEQ ID NO: 920342 - RNA, 22 nt, Human
acaggcaggcuucggccagagc

SEQ ID NO: 920343 - RNA, 22 nt, Human
aucacaguuuugugccuugugg

SEQ ID NO: 920344 - RNA, 22 nt, Human
aaaugcacaggagaaccaauuc

SEQ ID NO: 920345 - RNA, 22 nt, Human
uucaauaucauuguuuagucuc

SEQ ID NO: 920346 - RNA, 22 nt, Human
agcugccuuuugagaaagcuca

SEQ ID NO: 920347 - RNA, 22 nt, Human
ccucuggggguccucagagucu

SEQ ID NO: 920348 - RNA, 22 nt, Human
aggcucugugcagccugcaucu

SEQ ID NO: 920349 - RNA, 22 nt, Human
cuauugcauuugcaucuucauc

SEQ ID NO: 920350 - RNA, 20 nt, Human
aaauggccucagauaagcag

SEQ ID NO: 920351 - RNA, 23 nt, Human
guuccuucauguggucauugguu

SEQ ID NO: 920352 - RNA, 22 nt, Human
ucucuucuaauuaggguccaug

SEQ ID NO: 920353 - RNA, 22 nt, Human
ucucacucauuuccuaggucuu

SEQ ID NO: 920354 - RNA, 22 nt, Human
cuguacaucucugaggacagua

SEQ ID NO: 920355 - RNA, 22 nt, Human
aggaaugauaguaaaagagaau

SEQ ID NO: 920356 - RNA, 17 nt, Human
acaaugcagucucuagu

SEQ ID NO: 920357 - RNA, 22 nt, Human
ugagaaaaguguggaggucaau

SEQ ID NO: 920358 - RNA, 22 nt, Human
gcuaagaaggccauaucagaga

SEQ ID NO: 920359 - RNA, 22 nt, Human
caggcacuucggcagcguggua

SEQ ID NO: 920360 - RNA, 22 nt, Human
uuaggaaggacuuggauucugg

SEQ ID NO: 920361 - RNA, 22 nt, Human
uugcccugucuuaagcuggcaa

SEQ ID NO: 920362 - RNA, 22 nt, Human
gugccugguuuggggaauguuc

SEQ ID NO: 920363 - RNA, 22 nt, Human
cguuccucuacuccagcuaccc

SEQ ID NO: 920364 - RNA, 22 nt, Human
ggagugagcaaauagagauuug

SEQ ID NO: 920365 - RNA, 22 nt, Human
cagcugggugaucuugggcagg

SEQ ID NO: 920366 - RNA, 22 nt, Human
uggcucaguuccaucaucugga

SEQ ID NO: 920367 - RNA, 22 nt, Human
uugauguagaaccaagaucuuu

SEQ ID NO: 920368 - RNA, 22 nt, Human
agcugcccuggcggagcugcuc

SEQ ID NO: 920369 - RNA, 22 nt, Human
caguaacaugucuguuaagaaa

SEQ ID NO: 920370 - RNA, 22 nt, Human
uuccuccuucccauuccugggg

SEQ ID NO: 920371 - RNA, 22 nt, Human
cauccacuagaaugacagaguu

SEQ ID NO: 920372 - RNA, 22 nt, Human
ugagauggagucuugcucuguu

SEQ ID NO: 920373 - RNA, 22 nt, Human
uugaaaggugaacaugaugcac

SEQ ID NO: 920374 - RNA, 22 nt, Human
uggcucuggauuaaucuaggaa

SEQ ID NO: 920375 - RNA, 22 nt, Human
agggucagagucaggugcagua

SEQ ID NO: 920376 - RNA, 22 nt, Human
gagaugagugggggaucucuca

SEQ ID NO: 920377 - RNA, 22 nt, Human
ucagcuggggcccccucugucc

SEQ ID NO: 920378 - RNA, 22 nt, Human
uccuguguaaauagaucugguu

SEQ ID NO: 920379 - RNA, 22 nt, Human
agaaaucuauguuuugguuaga

SEQ ID NO: 920380 - RNA, 22 nt, Human
aucucagaaggcauuuccaaga

SEQ ID NO: 920381 - RNA, 22 nt, Human
cauuagaagguuuuaaaggaau

SEQ ID NO: 920382 - RNA, 22 nt, Human
caucuuuaauuugugacaacua

SEQ ID NO: 920383 - RNA, 21 nt, Human
uaggggcuggggcuccagcug

SEQ ID NO: 920384 - RNA, 22 nt, Human
gcacagccagcaucugagggau

SEQ ID NO: 920385 - RNA, 22 nt, Human
ccauuguaaauucuguggaagu

SEQ ID NO: 920386 - RNA, 22 nt, Human
cagcaggugucuagcaaggguc

SEQ ID NO: 920387 - RNA, 22 nt, Human
gugcaaagugcauggggaaggg

SEQ ID NO: 920388 - RNA, 22 nt, Human
aaaggucaaaaucgugacauug

SEQ ID NO: 920389 - RNA, 22 nt, Human
accuacagagaucugcauuuuu

SEQ ID NO: 920390 - RNA, 22 nt, Human
uuuguguggauggaaggcagua

SEQ ID NO: 920391 - RNA, 22 nt, Human
uagaaagugaagguuaauuaau

SEQ ID NO: 920392 - RNA, 22 nt, Human
ggagcuggcuacagagaacucc

SEQ ID NO: 920393 - RNA, 22 nt, Human
aaggcagagauuagcagaauga

SEQ ID NO: 920394 - RNA, 21 nt, Human
aguggcugucaagggggccuu

SEQ ID NO: 920395 - RNA, 22 nt, Human
auacccagaguggguagaguua

SEQ ID NO: 920396 - RNA, 22 nt, Human
auccuguuugguugucugccuu

SEQ ID NO: 920397 - RNA, 22 nt, Human
ccagagacgucggucagggcgc

SEQ ID NO: 920398 - RNA, 22 nt, Human
gaguccaggcuguugcucaucu

SEQ ID NO: 920399 - RNA, 22 nt, Human
gagcccuggcagucugggaugg

SEQ ID NO: 920400 - RNA, 22 nt, Human
auguuauuaaaguacagauucu

SEQ ID NO: 920401 - RNA, 22 nt, Human
uuaauuaauuaguuaagcaugu

SEQ ID NO: 920402 - RNA, 22 nt, Human
ugacucacuuaauuuacaaguc

SEQ ID NO: 920403 - RNA, 22 nt, Human
cugaggugcuagggucccugcu

SEQ ID NO: 920404 - RNA, 22 nt, Human
agaaggaaggcugagugcugau

SEQ ID NO: 920405 - RNA, 22 nt, Human
ucuugcugugccccagcagggc

SEQ ID NO: 920406 - RNA, 22 nt, Human
gugggccacaucccagggcucu

SEQ ID NO: 920407 - RNA, 22 nt, Human
cuggagagaccgaaagaggcug

SEQ ID NO: 920408 - RNA, 22 nt, Human
aaaaacugcaauuacuuuuguc

SEQ ID NO: 920409 - RNA, 22 nt, Human
gcuuccuggagggagagagcug

SEQ ID NO: 920410 - RNA, 22 nt, Human
gcuucugcgcacgcuucuuccc

SEQ ID NO: 920411 - RNA, 22 nt, Human
aucuccaggauuuucacacuca

SEQ ID NO: 920412 - RNA, 22 nt, Human
caaggcauuaccauggcuagag

SEQ ID NO: 920413 - RNA, 22 nt, Human
aggcuuugcaaaaaagcucaua

SEQ ID NO: 920414 - RNA, 22 nt, Human
agagaggauuuguuuuucuccu

SEQ ID NO: 920415 - RNA, 22 nt, Human
gagaaucuggguuuuggcuauc

SEQ ID NO: 920416 - RNA, 22 nt, Human
ugguuuuaaaagauguuugaga

SEQ ID NO: 920417 - RNA, 22 nt, Human
ucaagggaggagacacagcccu

SEQ ID NO: 920418 - RNA, 22 nt, Human
agagucugcauuguaacaagau

SEQ ID NO: 920419 - RNA, 22 nt, Human
uacagaacugaaguagugaaaa

SEQ ID NO: 920420 - RNA, 22 nt, Human
ccuggagcaggagcugcagagg

SEQ ID NO: 920421 - RNA, 22 nt, Human
uauggauauaaucagacuggaa

SEQ ID NO: 920422 - RNA, 22 nt, Human
auacaaugggugcaaagaugug

SEQ ID NO: 920423 - RNA, 21 nt, Human
gugauucucugaguuuugggg

SEQ ID NO: 920424 - RNA, 22 nt, Human
uugcucuacccugaucaguuaa

SEQ ID NO: 920425 - RNA, 22 nt, Human
uagcaaggugaaguauggguga

SEQ ID NO: 920426 - RNA, 22 nt, Human
cagggccucauugucaguccug

SEQ ID NO: 920427 - RNA, 22 nt, Human
caaauuuuguguguucucuagu

SEQ ID NO: 920428 - RNA, 22 nt, Human
ucuuuugucgguguaucaugga

SEQ ID NO: 920429 - RNA, 22 nt, Human
auaaagcagguccccagacacu

SEQ ID NO: 920430 - RNA, 22 nt, Human
ccagaacacaguggaagaauau

SEQ ID NO: 920431 - RNA, 22 nt, Human
cuggaggcuggcuuccccuggc

SEQ ID NO: 920432 - RNA, 18 nt, Human
ggaaggaagaaugcauuu

SEQ ID NO: 920433 - RNA, 22 nt, Human
uuaucuugguguuuuaguaauu

SEQ ID NO: 920434 - RNA, 22 nt, Human
uccucaggugacuagguaucuu

SEQ ID NO: 920435 - RNA, 20 nt, Human
agcaagaacguucugaggga

SEQ ID NO: 920436 - RNA, 22 nt, Human
ugcagcaccacaccuggcuaau

SEQ ID NO: 920437 - RNA, 23 nt, Human
acaaugcacuuuaaaugguuccc

SEQ ID NO: 920438 - RNA, 22 nt, Human
aacacaaaaauucucaggggca

SEQ ID NO: 920439 - RNA, 22 nt, Human
uaaauaaguucuucauuguuug

SEQ ID NO: 920440 - RNA, 22 nt, Human
aagagccagugggaaagucuug

SEQ ID NO: 920441 - RNA, 22 nt, Human
uuuuauucuaaguaugauggga

SEQ ID NO: 920442 - RNA, 22 nt, Human
cucuuugucacucauacaguca

SEQ ID NO: 920443 - RNA, 22 nt, Human
aggcaggccccugagaauagac

SEQ ID NO: 920444 - RNA, 22 nt, Human
guccugucccccaaggcugugg

SEQ ID NO: 920445 - RNA, 22 nt, Human
uucaggcccagcacagcgcgug

SEQ ID NO: 920446 - RNA, 22 nt, Human
augcugugucaccuuaggauuu

SEQ ID NO: 920447 - RNA, 22 nt, Human
guuguuuuuguucucuauagcu

SEQ ID NO: 920448 - RNA, 22 nt, Human
aaugucuacagcaaaccccaca

SEQ ID NO: 920449 - RNA, 22 nt, Human
caggugaggcugaacagaugaa

SEQ ID NO: 920450 - RNA, 22 nt, Human
ugcaggugccaucgcugcucau

SEQ ID NO: 920451 - RNA, 20 nt, Human
gucuugaaggggucauggag

SEQ ID NO: 920452 - RNA, 22 nt, Human
agcagcaauggaaagcaacaca

SEQ ID NO: 920453 - RNA, 22 nt, Human
cucuccaucugugugaccuccc

SEQ ID NO: 920454 - RNA, 22 nt, Human
gaggcagcuuaggguacugacu

SEQ ID NO: 920455 - RNA, 22 nt, Human
cccuucucuuucacucacuauu

SEQ ID NO: 920456 - RNA, 18 nt, Human
gacccaggaaagaguccu

SEQ ID NO: 920457 - RNA, 22 nt, Human
aagugaauucauuguguuauau

SEQ ID NO: 920458 - RNA, 22 nt, Human
uacaacacuguucagccucuuc

SEQ ID NO: 920459 - RNA, 22 nt, Human
guggcagagccuugcggcuuug

SEQ ID NO: 920460 - RNA, 22 nt, Human
acaaauguggacauggauaaug

SEQ ID NO: 920461 - RNA, 19 nt, Human
guguacagcucagugaauu

SEQ ID NO: 920462 - RNA, 22 nt, Human
augaggccuaucuuggcagagg

SEQ ID NO: 920463 - RNA, 22 nt, Human
gcaaugaauaaauaauguuuag

SEQ ID NO: 920464 - RNA, 22 nt, Human
uuugaacaggaguaucuauagu

SEQ ID NO: 920465 - RNA, 19 nt, Human
ugucucugaaagaugagcu

SEQ ID NO: 920466 - RNA, 22 nt, Human
cauucucaauaguagaugagua

SEQ ID NO: 920467 - RNA, 22 nt, Human
cagaggccagggggcucacaaa

SEQ ID NO: 920468 - RNA, 22 nt, Human
ucagaggcuacagucugggagu

SEQ ID NO: 920469 - RNA, 17 nt, Human
ccuuccucaucuccuuc

SEQ ID NO: 920470 - RNA, 22 nt, Human
ccuucucccucugagaggaacc

SEQ ID NO: 920471 - RNA, 23 nt, Human
aauuaaauugcuagauccagggc

SEQ ID NO: 920472 - RNA, 22 nt, Human
auuccuaaggaaggcuggcaag

SEQ ID NO: 920473 - RNA, 22 nt, Human
ggauuaacagcuccuggguggu

SEQ ID NO: 920474 - RNA, 22 nt, Human
cugaugauagugauuuauugag

SEQ ID NO: 920475 - RNA, 22 nt, Human
acacauuuacauguuuacguau

SEQ ID NO: 920476 - RNA, 22 nt, Human
auagacacauguuauuauacuu

SEQ ID NO: 920477 - RNA, 22 nt, Human
cugcccacaccugagcugggcc

SEQ ID NO: 920478 - RNA, 22 nt, Human
uaagaugaaggcucaccuagaa

SEQ ID NO: 920479 - RNA, 22 nt, Human
cugggaggcccacguugggaag

SEQ ID NO: 920480 - RNA, 22 nt, Human
cagagggagcccuccaggagca

SEQ ID NO: 920481 - RNA, 22 nt, Human
caggagugaaaugaggcccagg

SEQ ID NO: 920482 - RNA, 22 nt, Human
aguaacaugaguuuuucuaaug

SEQ ID NO: 920483 - RNA, 22 nt, Human
acagguccucaagucagcuggg

SEQ ID NO: 920484 - RNA, 22 nt, Human
caugucuugcccugauuaguag

SEQ ID NO: 920485 - RNA, 22 nt, Human
cugaauaucauuuaucauuggc

SEQ ID NO: 920486 - RNA, 21 nt, Human
ggccccagcccauggguucuc

SEQ ID NO: 920487 - RNA, 22 nt, Human
aaggaagcuguuagacaugcau

SEQ ID NO: 920488 - RNA, 22 nt, Human
ugcaauauuuggcacugagaug

SEQ ID NO: 920489 - RNA, 22 nt, Human
caguguuuaaucauugugaauu

SEQ ID NO: 920490 - RNA, 22 nt, Human
uuuuuugucuugaagaaauggu

SEQ ID NO: 920491 - RNA, 22 nt, Human
caggccucaugguguguccuuc

SEQ ID NO: 920492 - RNA, 18 nt, Human
gacaccagccucugcccc

SEQ ID NO: 920493 - RNA, 22 nt, Human
ucuucacaccgggcagcaggaa

SEQ ID NO: 920494 - RNA, 22 nt, Human
gcccggcagucacacacccagg

SEQ ID NO: 920495 - RNA, 22 nt, Human
aggcuccacggcaggaugcugu

SEQ ID NO: 920496 - RNA, 22 nt, Human
cauccuucucaaagagugcaug

SEQ ID NO: 920497 - RNA, 20 nt, Human
cuucuuggagaugguguuuu

SEQ ID NO: 920498 - RNA, 22 nt, Human
gggaggcuggcucuggccacag

SEQ ID NO: 920499 - RNA, 22 nt, Human
auuuccuugcaacuuaggcaug

SEQ ID NO: 920500 - RNA, 22 nt, Human
uuacagacaaacuguguuaagu

SEQ ID NO: 920501 - RNA, 22 nt, Human
auucaauaaauaugcuacaugg

SEQ ID NO: 920502 - RNA, 22 nt, Human
cagggcuugaucugcauccugc

SEQ ID NO: 920503 - RNA, 22 nt, Human
acacuuggagcaacacuuaugg

SEQ ID NO: 920504 - RNA, 22 nt, Human
uguacacaugcccacuugaagc

SEQ ID NO: 920505 - RNA, 22 nt, Human
acaugcauggagggaaaauguc

SEQ ID NO: 920506 - RNA, 21 nt, Human
gagugcaggucugaugccauc

SEQ ID NO: 920507 - RNA, 22 nt, Human
ucccugggucauucucuggcac

SEQ ID NO: 920508 - RNA, 22 nt, Human
uuccacuuuucucucucaugcc

SEQ ID NO: 920509 - RNA, 22 nt, Human
cugugcuuccaggauggcagcu

SEQ ID NO: 920510 - RNA, 22 nt, Human
accugcagcugagaaaaugacu

SEQ ID NO: 920511 - RNA, 22 nt, Human
aggcugagaaagugggaagaug

SEQ ID NO: 920512 - RNA, 22 nt, Human
uucucuaagagaugcagaaguu

SEQ ID NO: 920513 - RNA, 22 nt, Human
ccacuuuucacuaagaugaauu

SEQ ID NO: 920514 - RNA, 22 nt, Human
gccuucccuggcuaggcaagca

SEQ ID NO: 920515 - RNA, 22 nt, Human
cuguacaaaguagcugcuggga

SEQ ID NO: 920516 - RNA, 22 nt, Human
augagcuuccagacaaaggcau

SEQ ID NO: 920517 - RNA, 22 nt, Human
ggugggcacccgagacuggauc

SEQ ID NO: 920518 - RNA, 19 nt, Human
agcuggcucuucuuugucu

SEQ ID NO: 920519 - RNA, 22 nt, Human
gucagcacuuuuccgaggcaga

SEQ ID NO: 920520 - RNA, 22 nt, Human
ugggccugaaauucccauuuua

SEQ ID NO: 920521 - RNA, 22 nt, Human
ugguuuuugguguucacagagg

SEQ ID NO: 920522 - RNA, 22 nt, Human
gcguuggggaccccgaagcugg

SEQ ID NO: 920523 - RNA, 22 nt, Human
acacaguaaauauugucuccuc

SEQ ID NO: 920524 - RNA, 22 nt, Human
cccagcacaggcaauuccauac

SEQ ID NO: 920525 - RNA, 22 nt, Human
uugagaaauguuuuuuaagcug

SEQ ID NO: 920526 - RNA, 22 nt, Human
aagcaaagagauaaccuuuugg

SEQ ID NO: 920527 - RNA, 22 nt, Human
gauucaaagacagacucauuuc

SEQ ID NO: 920528 - RNA, 22 nt, Human
augaggcaggauuaagcuauca

SEQ ID NO: 920529 - RNA, 22 nt, Human
gauauuuucagucuccuuucaa

SEQ ID NO: 920530 - RNA, 22 nt, Human
uucuagaggggagauacuagua

SEQ ID NO: 920531 - RNA, 22 nt, Human
auaaaaucuuuaugugcucugc

SEQ ID NO: 920532 - RNA, 17 nt, Human
gauguccucuggacuac

SEQ ID NO: 920533 - RNA, 22 nt, Human
caaacauuuuaaauaagggaua

SEQ ID NO: 920534 - RNA, 22 nt, Human
gauacacaaaagucuagugagg

SEQ ID NO: 920535 - RNA, 22 nt, Human
cagagccaaaccucagggcccg

SEQ ID NO: 920536 - RNA, 19 nt, Human
agcagcuguagauagacac

SEQ ID NO: 920537 - RNA, 22 nt, Human
uaaauugcauaaguacaaauga

SEQ ID NO: 920538 - RNA, 22 nt, Human
ccucacaugaauguaagcucca

SEQ ID NO: 920539 - RNA, 21 nt, Human
agaguucuugcugagcaagcc

SEQ ID NO: 920540 - RNA, 22 nt, Human
agugucuuugucaaauuacagg

SEQ ID NO: 920541 - RNA, 22 nt, Human
gguucauucugaagucuucagc

SEQ ID NO: 920542 - RNA, 22 nt, Human
auggucaagauccucuaguuua

SEQ ID NO: 920543 - RNA, 22 nt, Human
ggccagagagccgcuguuagga

SEQ ID NO: 920544 - RNA, 22 nt, Human
ugugugcauuagcauucuaggg

SEQ ID NO: 920545 - RNA, 22 nt, Human
agcaucuggucaugagugagaa

SEQ ID NO: 920546 - RNA, 22 nt, Human
aagguauauguacaauagacau

SEQ ID NO: 920547 - RNA, 22 nt, Human
cgcgguggcggccuccagcgcc

SEQ ID NO: 920548 - RNA, 19 nt, Human
ccaguagagacagcugcag

SEQ ID NO: 920549 - RNA, 22 nt, Human
cuccagagagaaaggaggccgc

SEQ ID NO: 920550 - RNA, 19 nt, Human
gcagacagguccagagagg

SEQ ID NO: 920551 - RNA, 22 nt, Human
uuuaaauguuuauagagaguac

SEQ ID NO: 920552 - RNA, 22 nt, Human
ggugcuggacacguggcacucc

SEQ ID NO: 920553 - RNA, 22 nt, Human
cggcuggugucgggcacagcaa

SEQ ID NO: 920554 - RNA, 22 nt, Human
uuauuaaugaguacaaguuauu

SEQ ID NO: 920555 - RNA, 22 nt, Human
ugaggaugacgauggcaauggc

SEQ ID NO: 920556 - RNA, 22 nt, Human
cauuuguagaguaggaaagagu

SEQ ID NO: 920557 - RNA, 23 nt, Human
uacuuaggguuuagaucugacug

SEQ ID NO: 920558 - RNA, 22 nt, Human
cuggguagaagauuccucagga

SEQ ID NO: 920559 - RNA, 22 nt, Human
agcuuuuaguacguuaaaauug

SEQ ID NO: 920560 - RNA, 22 nt, Human
ggcaggcuccguguuccauucc

SEQ ID NO: 920561 - RNA, 22 nt, Human
cugcaaucuccaugcuugauuu

SEQ ID NO: 920562 - RNA, 22 nt, Human
gcccuggagagggauauggcau

SEQ ID NO: 920563 - RNA, 22 nt, Human
guucauucugaaaagcagcuug

SEQ ID NO: 920564 - RNA, 22 nt, Human
ccaccauucaaggucuucacag

SEQ ID NO: 920565 - RNA, 22 nt, Human
uccagccacucagcagggauug

SEQ ID NO: 920566 - RNA, 22 nt, Human
gcagagucagccuccgagacag

SEQ ID NO: 920567 - RNA, 22 nt, Human
uaguuuauaguuagcgagcacg

SEQ ID NO: 920568 - RNA, 22 nt, Human
cacaauguaagaguuuguucau

SEQ ID NO: 920569 - RNA, 22 nt, Human
aacuccagggucaccauucaca

SEQ ID NO: 920570 - RNA, 22 nt, Human
acagggcccuuagauccuuuua

SEQ ID NO: 920571 - RNA, 22 nt, Human
aggccagacagcuagaaacagg

SEQ ID NO: 920572 - RNA, 16 nt, Human
ggagguggguaaggug

SEQ ID NO: 920573 - RNA, 22 nt, Human
gccuccccaaagugcugacagc

SEQ ID NO: 920574 - RNA, 22 nt, Human
ccaccagcuuugccacccugcu

SEQ ID NO: 920575 - RNA, 22 nt, Human
aagugaaacauguaucucuuua

SEQ ID NO: 920576 - RNA, 22 nt, Human
gugcaagaggacaguaagggug

SEQ ID NO: 920577 - RNA, 21 nt, Human
ccuccaggagcagagcccuga

SEQ ID NO: 920578 - RNA, 22 nt, Human
uagauacauacauuuuaaaaug

SEQ ID NO: 920579 - RNA, 22 nt, Human
cuuucaguuacaguuacacaca

SEQ ID NO: 920580 - RNA, 22 nt, Human
uucucuuuuugcaucucaaccu

SEQ ID NO: 920581 - RNA, 22 nt, Human
gcuuggcacacuuggaccugag

SEQ ID NO: 920582 - RNA, 22 nt, Human
gcugccuccgccggcuccacag

SEQ ID NO: 920583 - RNA, 22 nt, Human
gcugcagggggugggcgucucc

SEQ ID NO: 920584 - RNA, 22 nt, Human
auccugucuaugaguagauaau

SEQ ID NO: 920585 - RNA, 22 nt, Human
ucugcccaguuugugcucaggu

SEQ ID NO: 920586 - RNA, 22 nt, Human
ccaggaaggaagcagggguuuc

SEQ ID NO: 920587 - RNA, 20 nt, Human
uguuccaggaggccagggcu

SEQ ID NO: 920588 - RNA, 22 nt, Human
ucugagcagaugcucgcucucc

SEQ ID NO: 920589 - RNA, 22 nt, Human
ucugagccauaagaguacagga

SEQ ID NO: 920590 - RNA, 22 nt, Human
ucuccugguacccuuccuagca

SEQ ID NO: 920591 - RNA, 22 nt, Human
acacagauaaugcucauauagg

SEQ ID NO: 920592 - RNA, 22 nt, Human
cagggccaggcugauggccugg

SEQ ID NO: 920593 - RNA, 22 nt, Human
ucagaaacagaaacuaagaacc

SEQ ID NO: 920594 - RNA, 22 nt, Human
ggugucagccugggagccuagc

SEQ ID NO: 920595 - RNA, 22 nt, Human
gcucugggauuaccagccuuag

SEQ ID NO: 920596 - RNA, 22 nt, Human
auggcauuugaccgcuuugugg

SEQ ID NO: 920597 - RNA, 22 nt, Human
gccaguggcaugcggcagggac

SEQ ID NO: 920598 - RNA, 22 nt, Human
ucagagcugggugcuucuuccu

SEQ ID NO: 920599 - RNA, 22 nt, Human
uaaagcagugcaaaagcguuuu

SEQ ID NO: 920600 - RNA, 22 nt, Human
ggcuggaaccagagugaggcag

SEQ ID NO: 920601 - RNA, 22 nt, Human
uaugucuuuguccaugugcagu

SEQ ID NO: 920602 - RNA, 22 nt, Human
agaauacuaggcuucagaaagg

SEQ ID NO: 920603 - RNA, 22 nt, Human
ggguaguuuaauuaggaagaaa

SEQ ID NO: 920604 - RNA, 22 nt, Human
agcaacagggggauggccacug

SEQ ID NO: 920605 - RNA, 19 nt, Human
aggcaugggaagagaaguc

SEQ ID NO: 920606 - RNA, 21 nt, Human
cuccucaggaccagccacagg

SEQ ID NO: 920607 - RNA, 22 nt, Human
ugugaaauauuuauauacucaa

SEQ ID NO: 920608 - RNA, 22 nt, Human
ucauugcaguagggagagaccc

SEQ ID NO: 920609 - RNA, 18 nt, Human
ugggagugggaguggaua

SEQ ID NO: 920610 - RNA, 22 nt, Human
acacaguaugaaaagucuaguu

SEQ ID NO: 920611 - RNA, 22 nt, Human
caggggcuuaagugacagaagg

SEQ ID NO: 920612 - RNA, 21 nt, Human
uccucugcucucauaccacaa

SEQ ID NO: 920613 - RNA, 22 nt, Human
cagcuggguggcucuucugcuc

SEQ ID NO: 920614 - RNA, 22 nt, Human
acaggcacaccuuccugcaggc

SEQ ID NO: 920615 - RNA, 22 nt, Human
caguguguggauccucccagga

SEQ ID NO: 920616 - RNA, 22 nt, Human
caguggccugagccaggcuucc

SEQ ID NO: 920617 - RNA, 22 nt, Human
ucagggcccagagcucaggcaa

SEQ ID NO: 920618 - RNA, 22 nt, Human
ucacagagaaaagcuaucacaa

SEQ ID NO: 920619 - RNA, 22 nt, Human
cuguauauaauguaugcauggg

SEQ ID NO: 920620 - RNA, 20 nt, Human
uuucacagucccuguuuccu

SEQ ID NO: 920621 - RNA, 22 nt, Human
aauagaggaagaaaccugauug

SEQ ID NO: 920622 - RNA, 22 nt, Human
guuucccauaucuagggagagg

SEQ ID NO: 920623 - RNA, 22 nt, Human
gaggugagaagggggucagaug

SEQ ID NO: 920624 - RNA, 22 nt, Human
ucaucuguuauuuaugccugag

SEQ ID NO: 920625 - RNA, 22 nt, Human
uugucaccauauuucauuuuga

SEQ ID NO: 920626 - RNA, 22 nt, Human
uguguaaaaucugauuaauacu

SEQ ID NO: 920627 - RNA, 21 nt, Human
aggcagcgugagggccacuca

SEQ ID NO: 920628 - RNA, 22 nt, Human
gugcucaucguggagccugagg

SEQ ID NO: 920629 - RNA, 22 nt, Human
agaauucugacaauagaauugg

SEQ ID NO: 920630 - RNA, 22 nt, Human
aggucccaggcauagcuggucu

SEQ ID NO: 920631 - RNA, 22 nt, Human
aucuugggaauuuuccaggagu

SEQ ID NO: 920632 - RNA, 22 nt, Human
ccuuuagagcaaacgccaccua

SEQ ID NO: 920633 - RNA, 22 nt, Human
uacccagucuggagugcaguga

SEQ ID NO: 920634 - RNA, 22 nt, Human
cagccagcugucccaagugccu

SEQ ID NO: 920635 - RNA, 22 nt, Human
cccaggcugugcaaacuucaaa

SEQ ID NO: 920636 - RNA, 22 nt, Human
uguguuuuacaaauucucuuaa

SEQ ID NO: 920637 - RNA, 22 nt, Human
acuccagggcuccaccccagau

SEQ ID NO: 920638 - RNA, 22 nt, Human
ugccagccagggaagcucaccc

SEQ ID NO: 920639 - RNA, 22 nt, Human
aaagagcugagaccugguggag

SEQ ID NO: 920640 - RNA, 22 nt, Human
aagugcuuccauguuugagugu

SEQ ID NO: 920641 - RNA, 22 nt, Human
guugcacacuggcuauaacaag

SEQ ID NO: 920642 - RNA, 22 nt, Human
auguucugccuccauuuugagu

SEQ ID NO: 920643 - RNA, 22 nt, Human
acaguagauugguaugauguca

SEQ ID NO: 920644 - RNA, 21 nt, Human
uguuaugugcuucaagaagug

SEQ ID NO: 920645 - RNA, 22 nt, Human
cucucucuucuuuguaggggcc

SEQ ID NO: 920646 - RNA, 22 nt, Human
cagcaacggaaaauacacauag

SEQ ID NO: 920647 - RNA, 22 nt, Human
ugggagcacucuuugggaagca

SEQ ID NO: 920648 - RNA, 22 nt, Human
ucuggcaguggaugagggcagc

SEQ ID NO: 920649 - RNA, 22 nt, Human
agagacugcaaugagugguagg

SEQ ID NO: 920650 - RNA, 22 nt, Human
aaggaggaauuucagggugaau

SEQ ID NO: 920651 - RNA, 22 nt, Human
uagagcuggccgggacagcugg

SEQ ID NO: 920652 - RNA, 22 nt, Human
ucucuuggagguucuuccuguu

SEQ ID NO: 920653 - RNA, 22 nt, Human
aaaacugaaccuugagaucuuu

SEQ ID NO: 920654 - RNA, 22 nt, Human
gagggagugccagagggccagc

SEQ ID NO: 920655 - RNA, 22 nt, Human
aagagaauacaagcaggcagga

SEQ ID NO: 920656 - RNA, 22 nt, Human
ccugggcugcaugauggcauuu

SEQ ID NO: 920657 - RNA, 23 nt, Human
ucuguuuugcaacaugugacaag

SEQ ID NO: 920658 - RNA, 22 nt, Human
agggagagacauuuccuucuug

SEQ ID NO: 920659 - RNA, 22 nt, Human
aaugcuuuagaaaaccagcuuu

SEQ ID NO: 920660 - RNA, 22 nt, Human
ugcuggggagugauugaccauc

SEQ ID NO: 920661 - RNA, 22 nt, Human
ugacaaagaccuucaacaagau

SEQ ID NO: 920662 - RNA, 22 nt, Human
ccucuggggugagugggccacu

SEQ ID NO: 920663 - RNA, 22 nt, Human
guguguccaggcgggagucaag

SEQ ID NO: 920664 - RNA, 22 nt, Human
aaguacauggaggauagcugcu

SEQ ID NO: 920665 - RNA, 22 nt, Human
uaacugcacugacagugaguga

SEQ ID NO: 920666 - RNA, 22 nt, Human
agcauauuguaugucuauaugu

SEQ ID NO: 920667 - RNA, 22 nt, Human
gugcauguuaaugguguacaaa

SEQ ID NO: 920668 - RNA, 22 nt, Human
cccaggagauaacguucccaag

SEQ ID NO: 920669 - RNA, 22 nt, Human
gaaagugcaugugcccaccauu

SEQ ID NO: 920670 - RNA, 22 nt, Human
cugggcagcacaucaucguauc

SEQ ID NO: 920671 - RNA, 22 nt, Human
uaaaggcuucugcagggacuga

SEQ ID NO: 920672 - RNA, 22 nt, Human
agaaucucuacucaaguacuug

SEQ ID NO: 920673 - RNA, 22 nt, Human
aucacaguguagaccuuuuaaa

SEQ ID NO: 920674 - RNA, 22 nt, Human
ucucugggauaaacugggccag

SEQ ID NO: 920675 - RNA, 22 nt, Human
auuguacagguuggaggaagug

SEQ ID NO: 920676 - RNA, 22 nt, Human
cgaggcagggaagcugcaaaag

SEQ ID NO: 920677 - RNA, 22 nt, Human
aacuacagaaucauagaaaaua

SEQ ID NO: 920678 - RNA, 22 nt, Human
uuuagaagacagaugcacagcc

SEQ ID NO: 920679 - RNA, 22 nt, Human
gcuucaaagaacaaagggaggc

SEQ ID NO: 920680 - RNA, 22 nt, Human
ccucgcugugugaccuugggug

SEQ ID NO: 920681 - RNA, 22 nt, Human
gucaccagcaccaaugccacau

SEQ ID NO: 920682 - RNA, 18 nt, Human
ugagaaacugacacaugg

SEQ ID NO: 920683 - RNA, 22 nt, Human
uguggccuugcagccuggaggu

SEQ ID NO: 920684 - RNA, 22 nt, Human
aggcagcauccagaggagaaug

SEQ ID NO: 920685 - RNA, 22 nt, Human
auacuuaaugucaguuugaugu

SEQ ID NO: 920686 - RNA, 20 nt, Human
uaugacaacgcagcaaggca

SEQ ID NO: 920687 - RNA, 22 nt, Human
cugggagcaagucaggaaaggu

SEQ ID NO: 920688 - RNA, 22 nt, Human
acccagauaaaugacagggcuu

SEQ ID NO: 920689 - RNA, 22 nt, Human
uugcucuauguuuguaaacaga

SEQ ID NO: 920690 - RNA, 22 nt, Human
ugauucucacagugggaccuca

SEQ ID NO: 920691 - RNA, 22 nt, Human
uuugaaaaaggccuuugguaug

SEQ ID NO: 920692 - RNA, 22 nt, Human
caaugaaaaugaggacuccugu

SEQ ID NO: 920693 - RNA, 22 nt, Human
aagucacacugcugggaacucu

SEQ ID NO: 920694 - RNA, 22 nt, Human
aaaguguuaugagaacuaagug

SEQ ID NO: 920695 - RNA, 22 nt, Human
cugggagagacacuucugauua

SEQ ID NO: 920696 - RNA, 22 nt, Human
aaacauuugcaacucgguuugg

SEQ ID NO: 920697 - RNA, 22 nt, Human
aucauuucccuuuagaucacaa

SEQ ID NO: 920698 - RNA, 22 nt, Human
ccuggccacucagguguggggc

SEQ ID NO: 920699 - RNA, 22 nt, Human
cauacauuuauacacaucuaug

SEQ ID NO: 920700 - RNA, 21 nt, Human
uggcuucagccauuuucucug

SEQ ID NO: 920701 - RNA, 22 nt, Human
cucaggcuugggaggaggccca

SEQ ID NO: 920702 - RNA, 22 nt, Human
aaaguacauguuuggccauuug

SEQ ID NO: 920703 - RNA, 22 nt, Human
cacacauugguuuuacuccuuu

SEQ ID NO: 920704 - RNA, 22 nt, Human
aagaaucuuuccaguuuugaug

SEQ ID NO: 920705 - RNA, 22 nt, Human
gggcugcguguggaggauguaa

SEQ ID NO: 920706 - RNA, 22 nt, Human
gcugagguggcugccuuaguaa

SEQ ID NO: 920707 - RNA, 22 nt, Human
uccaggagauacacugcaccag

SEQ ID NO: 920708 - RNA, 21 nt, Human
aggcagcucaggcccagagag

SEQ ID NO: 920709 - RNA, 22 nt, Human
gcagagcauuggagggacccug

SEQ ID NO: 920710 - RNA, 22 nt, Human
cuggaaaaugaagaagcagagg

SEQ ID NO: 920711 - RNA, 22 nt, Human
cagcucacuuguuucaucuucu

SEQ ID NO: 920712 - RNA, 23 nt, Human
gcugucugucaucucugcgggag

SEQ ID NO: 920713 - RNA, 23 nt, Human
gggggccguccuggggauuauag

SEQ ID NO: 920714 - RNA, 22 nt, Human
gagcuccugcugcauccugccu

SEQ ID NO: 920715 - RNA, 22 nt, Human
uuuacagauucuggguauuagg

SEQ ID NO: 920716 - RNA, 22 nt, Human
gcuccaggagagggaagcagau

SEQ ID NO: 920717 - RNA, 22 nt, Human
ucaucuuuccucaaaagaucca

SEQ ID NO: 920718 - RNA, 22 nt, Human
acaugcaagccccugaacacau

SEQ ID NO: 920719 - RNA, 22 nt, Human
agcuguucccucacugcaguca

SEQ ID NO: 920720 - RNA, 22 nt, Human
aacagauggccaagugcauggg

SEQ ID NO: 920721 - RNA, 22 nt, Human
augaaugaugcaaaagacacug

SEQ ID NO: 920722 - RNA, 22 nt, Human
cuuagaaaucgaacucagguua

SEQ ID NO: 920723 - RNA, 22 nt, Human
cagagcaccugcucauugccag

SEQ ID NO: 920724 - RNA, 22 nt, Human
agucccuucucaaagugugcgg

SEQ ID NO: 920725 - RNA, 22 nt, Human
gaggcucacuuucauccucuuc

SEQ ID NO: 920726 - RNA, 22 nt, Human
uccuggcugaguucccaagucg

SEQ ID NO: 920727 - RNA, 22 nt, Human
uauuuaaaaagaggccagcugg

SEQ ID NO: 920728 - RNA, 22 nt, Human
auuccaaacagugcugcagacu

SEQ ID NO: 920729 - RNA, 22 nt, Human
ugcaagugauucuguuuucuca

SEQ ID NO: 920730 - RNA, 22 nt, Human
gcaguccuuaggagaggaagua

SEQ ID NO: 920731 - RNA, 22 nt, Human
guccuuggcaucaugauuuggu

SEQ ID NO: 920732 - RNA, 22 nt, Human
gugagaagauaaguauugcaaa

SEQ ID NO: 920733 - RNA, 22 nt, Human
agauaucuguauuguuuccaau

SEQ ID NO: 920734 - RNA, 22 nt, Human
uagggaugagccaguggguagu

SEQ ID NO: 920735 - RNA, 22 nt, Human
aauuuuacaaaauaccuccgau

SEQ ID NO: 920736 - RNA, 22 nt, Human
ugcaccuuuaaauucagcagua

SEQ ID NO: 920737 - RNA, 22 nt, Human
uuguuucccuggaucuagagcu

SEQ ID NO: 920738 - RNA, 22 nt, Human
ugggcucuggaauugaguggcc

SEQ ID NO: 920739 - RNA, 23 nt, Human
uggcuuuauucacauaucugacc

SEQ ID NO: 920740 - RNA, 22 nt, Human
uaaguucugaagauaggaaaug

SEQ ID NO: 920741 - RNA, 22 nt, Human
auugucuuuccacugagaaguu

SEQ ID NO: 920742 - RNA, 22 nt, Human
gaagacaucauggagaggauag

SEQ ID NO: 920743 - RNA, 22 nt, Human
gcacaggcuguuggccuucaga

SEQ ID NO: 920744 - RNA, 22 nt, Human
ugggagcucagaaagggagguc

SEQ ID NO: 920745 - RNA, 22 nt, Human
acauggaaaacuaacugcuuuu

SEQ ID NO: 920746 - RNA, 22 nt, Human
aaguuagagauuccaucaugcu

SEQ ID NO: 920747 - RNA, 22 nt, Human
agagucugccuuuuucuccugc

SEQ ID NO: 920748 - RNA, 22 nt, Human
ucucugaaggggagcuguuuaa

SEQ ID NO: 920749 - RNA, 22 nt, Human
ccaggucuggcacuggccaguc

SEQ ID NO: 920750 - RNA, 22 nt, Human
agaacagucguggugagagaaa

SEQ ID NO: 920751 - RNA, 22 nt, Human
caaauucaaugaacauguuuaa

SEQ ID NO: 920752 - RNA, 22 nt, Human
uuuccaacuguaccccaguguu

SEQ ID NO: 920753 - RNA, 22 nt, Human
cuuuguuagcagccaauuuguu

SEQ ID NO: 920754 - RNA, 22 nt, Human
gaauucaagugcaaugguauau

SEQ ID NO: 920755 - RNA, 22 nt, Human
uuagcuuucagccuuucucacc

SEQ ID NO: 920756 - RNA, 22 nt, Human
gaucaaauauauuaugccacag

SEQ ID NO: 920757 - RNA, 20 nt, Human
uuuuuccuucucuacaggca

SEQ ID NO: 920758 - RNA, 22 nt, Human
ugugugauugcaggagaugugg

SEQ ID NO: 920759 - RNA, 22 nt, Human
gagagcugcagccgagaggggg

SEQ ID NO: 920760 - RNA, 22 nt, Human
gugccuccuuaaauucugcacc

SEQ ID NO: 920761 - RNA, 22 nt, Human
agagaggucucaggagaaacca

SEQ ID NO: 920762 - RNA, 21 nt, Human
ucugucucuccacugcccugc

SEQ ID NO: 920763 - RNA, 22 nt, Human
uggagaggaaagugcaguuuug

SEQ ID NO: 920764 - RNA, 23 nt, Human
ucacaguuacuuuugcaucaacc

SEQ ID NO: 920765 - RNA, 22 nt, Human
gggcuacagacaugcucuaagc

SEQ ID NO: 920766 - RNA, 22 nt, Human
uuacaauaguuccuucuuuugu

SEQ ID NO: 920767 - RNA, 22 nt, Human
gcagugguccaguucacaccca

SEQ ID NO: 920768 - RNA, 23 nt, Human
uggcagugaucaaaagcuuacau

SEQ ID NO: 920769 - RNA, 17 nt, Human
agguauuuaaggagcug

SEQ ID NO: 920770 - RNA, 20 nt, Human
uccugguggauacugcuuaa

SEQ ID NO: 920771 - RNA, 22 nt, Human
cggggccucaguuuccccaccu

SEQ ID NO: 920772 - RNA, 22 nt, Human
gaggagggagcuggaagcucuu

SEQ ID NO: 920773 - RNA, 22 nt, Human
ccucacagcaaggauuucagug

SEQ ID NO: 920774 - RNA, 22 nt, Human
cacauuuaagcagauguggacc

SEQ ID NO: 920775 - RNA, 22 nt, Human
guuuccagagaucauuuacaua

SEQ ID NO: 920776 - RNA, 19 nt, Human
ugucuuuaacuggaaccac

SEQ ID NO: 920777 - RNA, 22 nt, Human
ugaggcucacaaaucugcauuu

SEQ ID NO: 920778 - RNA, 22 nt, Human
aaaguacacacagagccaagaa

SEQ ID NO: 920779 - RNA, 22 nt, Human
uuuccuuucugguuuggucaua

SEQ ID NO: 920780 - RNA, 22 nt, Human
cagcuuuggagugugagugcug

SEQ ID NO: 920781 - RNA, 22 nt, Human
cuggcucugaccgcgcuggccu

SEQ ID NO: 920782 - RNA, 22 nt, Human
uuucaaacuaugugucaggcag

SEQ ID NO: 920783 - RNA, 22 nt, Human
caaaacauucucugcagcaggg

SEQ ID NO: 920784 - RNA, 22 nt, Human
aaagggaauguguaggacaugu

SEQ ID NO: 920785 - RNA, 22 nt, Human
caaggacagcgucaggugcaac

SEQ ID NO: 920786 - RNA, 22 nt, Human
ucagggaaauagcagggcugaa

SEQ ID NO: 920787 - RNA, 22 nt, Human
uggagguguccaacucgugggu

SEQ ID NO: 920788 - RNA, 19 nt, Human
cagaguacaccagauagga

SEQ ID NO: 920789 - RNA, 22 nt, Human
uauccaaaguuucucagaaacu

SEQ ID NO: 920790 - RNA, 18 nt, Human
uggcuggcagugggcagc

SEQ ID NO: 920791 - RNA, 22 nt, Human
ugagaaaacucaaagacagauc

SEQ ID NO: 920792 - RNA, 22 nt, Human
caggcgggcaggugcggccccu

SEQ ID NO: 920793 - RNA, 22 nt, Human
aaaugcauucuguuuucacuag

SEQ ID NO: 920794 - RNA, 22 nt, Human
uugcaguuuucugccucauuuc

SEQ ID NO: 920795 - RNA, 22 nt, Human
uucucucccaugaagcuucuau

SEQ ID NO: 920796 - RNA, 16 nt, Human
ugcuggggcgccgucc

SEQ ID NO: 920797 - RNA, 22 nt, Human
gcugagguuucaggaguggcag

SEQ ID NO: 920798 - RNA, 22 nt, Human
uaguaacagcagcuucccugug

SEQ ID NO: 920799 - RNA, 22 nt, Human
gggcugggauugcuugcuguga

SEQ ID NO: 920800 - RNA, 22 nt, Human
uucucagauccaucagaagucc

SEQ ID NO: 920801 - RNA, 22 nt, Human
uuugaagggcacgacaauaguu

SEQ ID NO: 920802 - RNA, 22 nt, Human
guucugggagaucuugagcuuc

SEQ ID NO: 920803 - RNA, 22 nt, Human
ggcccagcuuucauuccuugcu

SEQ ID NO: 920804 - RNA, 22 nt, Human
cacagcaaaggcuucggcugau

SEQ ID NO: 920805 - RNA, 22 nt, Human
aacuuauugaacauucucgaau

SEQ ID NO: 920806 - RNA, 22 nt, Human
ucagaaaauaacuguuaguuug

SEQ ID NO: 920807 - RNA, 16 nt, Human
uccuggggauacugga

SEQ ID NO: 920808 - RNA, 22 nt, Human
gagcugcuucugugugccgggu

SEQ ID NO: 920809 - RNA, 22 nt, Human
cccagagagcauuuggacaaag

SEQ ID NO: 920810 - RNA, 22 nt, Human
uacauguauguuuaucuugaga

SEQ ID NO: 920811 - RNA, 22 nt, Human
aaagaggcaaucaauguagcaa

SEQ ID NO: 920812 - RNA, 22 nt, Human
ugccugggugcuggcuggucac

SEQ ID NO: 920813 - RNA, 21 nt, Human
ggcugguguuuagcugugaua

SEQ ID NO: 920814 - RNA, 22 nt, Human
cuggagggaguuaggacccgga

SEQ ID NO: 920815 - RNA, 22 nt, Human
gcagaggagaugaagauacuuu

SEQ ID NO: 920816 - RNA, 22 nt, Human
uaaauuaaagauuggagaagga

SEQ ID NO: 920817 - RNA, 22 nt, Human
ucauugaaaacucagcaucuac

SEQ ID NO: 920818 - RNA, 22 nt, Human
uuguaagacuguagaaugcaaa

SEQ ID NO: 920819 - RNA, 22 nt, Human
aucagcuuggaccaauaagaug

SEQ ID NO: 920820 - RNA, 22 nt, Human
agcacagggacaaugccaggug

SEQ ID NO: 920821 - RNA, 22 nt, Human
uccaggaguccugggagugauu

SEQ ID NO: 920822 - RNA, 19 nt, Human
aauguuuaagagaaaaagg

SEQ ID NO: 920823 - RNA, 21 nt, Human
auaaauucugagaggcucugc

SEQ ID NO: 920824 - RNA, 22 nt, Human
uuugcaaacacuuaagaagaga

SEQ ID NO: 920825 - RNA, 22 nt, Human
aaggcaagguucaccgugcuau

SEQ ID NO: 920826 - RNA, 22 nt, Human
gaagauuucuuuaugaaagaug

SEQ ID NO: 920827 - RNA, 22 nt, Human
aaugcuuccuccucaccucagg

SEQ ID NO: 920828 - RNA, 22 nt, Human
aggcuucauauuuaggcauaug

SEQ ID NO: 920829 - RNA, 22 nt, Human
ccugucagaugaaguaauugug

SEQ ID NO: 920830 - RNA, 20 nt, Human
aaaguguaaggcaaaguugu

SEQ ID NO: 920831 - RNA, 22 nt, Human
ucaguguguaguaaauuguagg

SEQ ID NO: 920832 - RNA, 22 nt, Human
aggcuggccagugcugcagugg

SEQ ID NO: 920833 - RNA, 22 nt, Human
ugacagggcuagaggcaaugca

SEQ ID NO: 920834 - RNA, 22 nt, Human
agcagugggugacagagcugag

SEQ ID NO: 920835 - RNA, 22 nt, Human
auugccaggaggguugagaaua

SEQ ID NO: 920836 - RNA, 22 nt, Human
aaguggcaguucaggaagcaga

SEQ ID NO: 920837 - RNA, 22 nt, Human
ucaggcaggaagggaggacuug

SEQ ID NO: 920838 - RNA, 20 nt, Human
uccaggccuuguucucagau

SEQ ID NO: 920839 - RNA, 22 nt, Human
aggcucugaagcaacccuuuga

SEQ ID NO: 920840 - RNA, 22 nt, Human
agaaauucaauucuaauuagcu

SEQ ID NO: 920841 - RNA, 23 nt, Human
uacauucauuugcacagccagua

SEQ ID NO: 920842 - RNA, 22 nt, Human
aaaauagauucuaggaugucuu

SEQ ID NO: 920843 - RNA, 22 nt, Human
augcguguaggaacagugucua

SEQ ID NO: 920844 - RNA, 22 nt, Human
agcccagggacagggcggaugu

SEQ ID NO: 920845 - RNA, 20 nt, Human
aggguggggacguucugacu

SEQ ID NO: 920846 - RNA, 22 nt, Human
ccauuauccauuuugagucuua

SEQ ID NO: 920847 - RNA, 22 nt, Human
gugcaggagguaacauagcaaa

SEQ ID NO: 920848 - RNA, 20 nt, Human
guguggccaggagcugcgcu

SEQ ID NO: 920849 - RNA, 22 nt, Human
ggcuagggaaaaugauuggaua

SEQ ID NO: 920850 - RNA, 22 nt, Human
uccaccagagccuucccaugcu

SEQ ID NO: 920851 - RNA, 22 nt, Human
aggccagaugucgggcuagaag

SEQ ID NO: 920852 - RNA, 22 nt, Human
acaguacugaguacugaguugg

SEQ ID NO: 920853 - RNA, 22 nt, Human
gacgcacugaaggcugguuacc

SEQ ID NO: 920854 - RNA, 22 nt, Human
uuauuuccaguccagaaauuua

SEQ ID NO: 920855 - RNA, 22 nt, Human
ggucucaggagacuggagagca

SEQ ID NO: 920856 - RNA, 22 nt, Human
ggcuuuggggugugcagagaug

SEQ ID NO: 920857 - RNA, 22 nt, Human
aguccagggagcccaggcuuug

SEQ ID NO: 920858 - RNA, 22 nt, Human
gaagcuggagaaugggucuagg

SEQ ID NO: 920859 - RNA, 22 nt, Human
uugaauuuagauuguauguuga

SEQ ID NO: 920860 - RNA, 22 nt, Human
uccaugugcuuccucaggggaa

SEQ ID NO: 920861 - RNA, 22 nt, Human
gcaaagaaagccaaggucuaac

SEQ ID NO: 920862 - RNA, 22 nt, Human
uuuucuuaugugcagcuauaug

SEQ ID NO: 920863 - RNA, 18 nt, Human
aagcugggaaggagacag

SEQ ID NO: 920864 - RNA, 22 nt, Human
agcagccaaccuuacauucauc

SEQ ID NO: 920865 - RNA, 22 nt, Human
ccugccugcaccuucucugggg

SEQ ID NO: 920866 - RNA, 18 nt, Human
acauuucuccuucugacc

SEQ ID NO: 920867 - RNA, 22 nt, Human
uuacuacagagagagcuccagu

SEQ ID NO: 920868 - RNA, 22 nt, Human
gaagagagaacauuacauaaac

SEQ ID NO: 920869 - RNA, 22 nt, Human
uggcuccucuucuggguguccc

SEQ ID NO: 920870 - RNA, 22 nt, Human
uacaguaacuggaauucuucuu

SEQ ID NO: 920871 - RNA, 22 nt, Human
acaugauuuuaguaucauaaua

SEQ ID NO: 920872 - RNA, 22 nt, Human
aggcagacuuccugcuuggauc

SEQ ID NO: 920873 - RNA, 22 nt, Human
agugucugaagccucagcccga

SEQ ID NO: 920874 - RNA, 22 nt, Human
aacuaaaggcuguugcagggaa

SEQ ID NO: 920875 - RNA, 22 nt, Human
agaaaaaucuuggcgcuugucu

SEQ ID NO: 920876 - RNA, 22 nt, Human
caucaucaaaacaaauggaguc

SEQ ID NO: 920877 - RNA, 22 nt, Human
uucugggcucucuuucugugug

SEQ ID NO: 920878 - RNA, 22 nt, Human
agcugucagugcugugccugua

SEQ ID NO: 920879 - RNA, 22 nt, Human
gggaccugccauugcucacagg

SEQ ID NO: 920880 - RNA, 22 nt, Human
caaaguauauuggauugaaugg

SEQ ID NO: 920881 - RNA, 22 nt, Human
ccaauguuuuauacagaaguac

SEQ ID NO: 920882 - RNA, 19 nt, Human
agacucugugugagacuuu

SEQ ID NO: 920883 - RNA, 23 nt, Human
gugagcagcaccaugaggcuaga

SEQ ID NO: 920884 - RNA, 19 nt, Human
aggcacaauucugagaagc

SEQ ID NO: 920885 - RNA, 22 nt, Human
gugggccucuugaggguggcua

SEQ ID NO: 920886 - RNA, 22 nt, Human
aaaaaugucauuauggaacuga

SEQ ID NO: 920887 - RNA, 22 nt, Human
cagagccugcucacgucucugu

SEQ ID NO: 920888 - RNA, 22 nt, Human
aagaggaaaugauugacuauau

SEQ ID NO: 920889 - RNA, 22 nt, Human
uauuagguagauuuuacugauu

SEQ ID NO: 920890 - RNA, 22 nt, Human
augcauauaauggccagaacaa

SEQ ID NO: 920891 - RNA, 22 nt, Human
uuccuggggggauagauuucac

SEQ ID NO: 920892 - RNA, 22 nt, Human
ugaagccucaccugcucaguau

SEQ ID NO: 920893 - RNA, 22 nt, Human
uacugucuaauaagauugaugg

SEQ ID NO: 920894 - RNA, 20 nt, Human
gugugugcuccaugcaugcu

SEQ ID NO: 920895 - RNA, 21 nt, Human
ccauucuuagucaagugucuc

SEQ ID NO: 920896 - RNA, 22 nt, Human
uuaccacagugcaugacuucug

SEQ ID NO: 920897 - RNA, 22 nt, Human
agcccagaggcugggcgugcau

SEQ ID NO: 920898 - RNA, 22 nt, Human
gacaguguuacaauuuaaugga

SEQ ID NO: 920899 - RNA, 22 nt, Human
uauauuaacuugugauccugga

SEQ ID NO: 920900 - RNA, 22 nt, Human
aaguacauccuagucucuuuca

SEQ ID NO: 920901 - RNA, 20 nt, Human
aaaguucauguuugcacuuu

SEQ ID NO: 920902 - RNA, 22 nt, Human
ucuccaggagcaagucacccag

SEQ ID NO: 920903 - RNA, 22 nt, Human
auugucuuaaacaaauguguuu

SEQ ID NO: 920904 - RNA, 22 nt, Human
gcaaggcugggagaugaggccu

SEQ ID NO: 920905 - RNA, 22 nt, Human
auauaucaugaguaaaacuuga

SEQ ID NO: 920906 - RNA, 19 nt, Human
cacagccacagccaaccuc

SEQ ID NO: 920907 - RNA, 22 nt, Human
cagguacaaagcuacugccuga

SEQ ID NO: 920908 - RNA, 22 nt, Human
auugugcagcucugcucuuauu

SEQ ID NO: 920909 - RNA, 22 nt, Human
gaagauuucaguuaaguaucua

SEQ ID NO: 920910 - RNA, 22 nt, Human
aguaaacauguaauuguucauu

SEQ ID NO: 920911 - RNA, 22 nt, Human
acccagucuggagugcagugac

SEQ ID NO: 920912 - RNA, 21 nt, Human
uucaaagacuugaugcugacc

SEQ ID NO: 920913 - RNA, 22 nt, Human
cccagcucuaggagugguggca

SEQ ID NO: 920914 - RNA, 19 nt, Human
uccaggaggcugccauuga

SEQ ID NO: 920915 - RNA, 22 nt, Human
gauacaaauucaugucugaauu

SEQ ID NO: 920916 - RNA, 22 nt, Human
cauucaaaggcauguccuauuu

SEQ ID NO: 920917 - RNA, 20 nt, Human
ucccugccuuuuacugcugg

SEQ ID NO: 920918 - RNA, 22 nt, Human
augccuccaagauucuuacguu

SEQ ID NO: 920919 - RNA, 22 nt, Human
agagacaccgcgcaucauggcu

SEQ ID NO: 920920 - RNA, 22 nt, Human
uccagggcuugacagggugccu

SEQ ID NO: 920921 - RNA, 22 nt, Human
ugaagaaacgcagagagguagg

SEQ ID NO: 920922 - RNA, 22 nt, Human
acaguauacauugauuaggacc

SEQ ID NO: 920923 - RNA, 22 nt, Human
ucucacauuucauugacagcug

SEQ ID NO: 920924 - RNA, 22 nt, Human
gggcccuggauuuaagcaugga

SEQ ID NO: 920925 - RNA, 22 nt, Human
auugcugaacuuauaaaugaau

SEQ ID NO: 920926 - RNA, 22 nt, Human
auugcacaaagagggaaacuga

SEQ ID NO: 920927 - RNA, 22 nt, Human
cccugcagaucagugagaacuu

SEQ ID NO: 920928 - RNA, 22 nt, Human
uagucccggaacuccuucaggu

SEQ ID NO: 920929 - RNA, 22 nt, Human
ggcuccagauguccccuggcaa

SEQ ID NO: 920930 - RNA, 22 nt, Human
aacuccagggggucaauauuua

SEQ ID NO: 920931 - RNA, 22 nt, Human
cucuaggcugcccaggagcuga

SEQ ID NO: 920932 - RNA, 19 nt, Human
aaaugugaugguacaauuc

SEQ ID NO: 920933 - RNA, 22 nt, Human
ccaggaggcucugcccauccca

SEQ ID NO: 920934 - RNA, 22 nt, Human
cccaggagauggugcguggucu

SEQ ID NO: 920935 - RNA, 20 nt, Human
ugagaaaguagagacucagg

SEQ ID NO: 920936 - RNA, 22 nt, Human
caaaaggccaguacuuuguuug

SEQ ID NO: 920937 - RNA, 22 nt, Human
gcugcuggggccuucccucggg

SEQ ID NO: 920938 - RNA, 22 nt, Human
uaagaacaguguuucaucucua

SEQ ID NO: 920939 - RNA, 22 nt, Human
uggcuucaucacucgggcugcc

SEQ ID NO: 920940 - RNA, 22 nt, Human
cucugaccauucccuugauuuu

SEQ ID NO: 920941 - RNA, 22 nt, Human
gcuguccaggagugcagagauu

SEQ ID NO: 920942 - RNA, 22 nt, Human
ggcugcagaggcccccaguggg

SEQ ID NO: 920943 - RNA, 22 nt, Human
auaguacuccaccaguacaugu

SEQ ID NO: 920944 - RNA, 20 nt, Human
accucccucuguggguggga

SEQ ID NO: 920945 - RNA, 22 nt, Human
cuguuuuucagaagguaaggga

SEQ ID NO: 920946 - RNA, 22 nt, Human
cugaggcauguuacaggacaua

SEQ ID NO: 920947 - RNA, 22 nt, Human
ggccaugcaggucagagguggg

SEQ ID NO: 920948 - RNA, 22 nt, Human
uuucuucuaggacuaauaagag

SEQ ID NO: 920949 - RNA, 22 nt, Human
aggacugaaaaugaguucuucu

SEQ ID NO: 920950 - RNA, 22 nt, Human
auucuggguuugcuguacaaag

SEQ ID NO: 920951 - RNA, 22 nt, Human
acaguguccuuguggucccugu

SEQ ID NO: 920952 - RNA, 21 nt, Human
cacuccacuuagaacaggguu

SEQ ID NO: 920953 - RNA, 22 nt, Human
aaagaguugaggcaguuaucca

SEQ ID NO: 920954 - RNA, 22 nt, Human
gaagagaaaggcaaggaguuuu

SEQ ID NO: 920955 - RNA, 22 nt, Human
cggcccugaccagaccuuaguu

SEQ ID NO: 920956 - RNA, 22 nt, Human
gagagagaagugggugucaccu

SEQ ID NO: 920957 - RNA, 22 nt, Human
cugagacccagacaccugagga

SEQ ID NO: 920958 - RNA, 22 nt, Human
aacaauaacuagacaugccaug

SEQ ID NO: 920959 - RNA, 22 nt, Human
uauaguuaguuucauaaucaug

SEQ ID NO: 920960 - RNA, 22 nt, Human
uccccaaagcuuuguggucagg

SEQ ID NO: 920961 - RNA, 20 nt, Human
aauaaacuacugagagaugu

SEQ ID NO: 920962 - RNA, 22 nt, Human
augaaacacacacgcgcauacu

SEQ ID NO: 920963 - RNA, 20 nt, Human
agggugugggccuuagccau

SEQ ID NO: 920964 - RNA, 22 nt, Human
acaggcagggaccucuugaguu

SEQ ID NO: 920965 - RNA, 22 nt, Human
ugucaauaacauuuacuucuau

SEQ ID NO: 920966 - RNA, 22 nt, Human
aguuuagaaaaucuguuucuuc

SEQ ID NO: 920967 - RNA, 22 nt, Human
ucacaguacuccccaaaguuuc

SEQ ID NO: 920968 - RNA, 20 nt, Human
uggcaggaauagggccagag

SEQ ID NO: 920969 - RNA, 20 nt, Human
aggcaguuucaauuuuguua

SEQ ID NO: 920970 - RNA, 22 nt, Human
cuuugauauaaguauacauagu

SEQ ID NO: 920971 - RNA, 22 nt, Human
gucuuauugcguauguauacaa

SEQ ID NO: 920972 - RNA, 22 nt, Human
uccagcucaggguuggcucaag

SEQ ID NO: 920973 - RNA, 22 nt, Human
agacaaaggauuaaugaugaug

SEQ ID NO: 920974 - RNA, 19 nt, Human
uguguucauucaucagagg

SEQ ID NO: 920975 - RNA, 22 nt, Human
auggcuucucgcuggcaccugu

SEQ ID NO: 920976 - RNA, 22 nt, Human
uccugggcuuuguuucucuccu

SEQ ID NO: 920977 - RNA, 22 nt, Human
auucuagcaguuacaggcugau

SEQ ID NO: 920978 - RNA, 22 nt, Human
uccaggcccugggaugggagca

SEQ ID NO: 920979 - RNA, 22 nt, Human
aaugacaauaaucauuaacuuu

SEQ ID NO: 920980 - RNA, 22 nt, Human
ggccugcucuggcuguggucag

SEQ ID NO: 920981 - RNA, 23 nt, Human
gacagggcugacuuggcagcugc

SEQ ID NO: 920982 - RNA, 22 nt, Human
ggcuggcagaggggagucugug

SEQ ID NO: 920983 - RNA, 22 nt, Human
cagacauggaaauuuaguguua

SEQ ID NO: 920984 - RNA, 22 nt, Human
auauacagggagaaacagcuua

SEQ ID NO: 920985 - RNA, 22 nt, Human
gugcuggggguuucuguagguc

SEQ ID NO: 920986 - RNA, 22 nt, Human
ugaggcaggaugcuugcacagg

SEQ ID NO: 920987 - RNA, 22 nt, Human
uguggagaagaaggccacugca

SEQ ID NO: 920988 - RNA, 22 nt, Human
aacaaagaagacugguuauuuu

SEQ ID NO: 920989 - RNA, 22 nt, Human
ccagaagaccggggagucaggg

SEQ ID NO: 920990 - RNA, 23 nt, Human
uacagcugcagaaucaggcuaag

SEQ ID NO: 920991 - RNA, 22 nt, Human
uagaaacagauguuuuugaaga

SEQ ID NO: 920992 - RNA, 22 nt, Human
caggccucgaggagacagcuac

SEQ ID NO: 920993 - RNA, 22 nt, Human
uuguuugaggucacugauauuu

SEQ ID NO: 920994 - RNA, 22 nt, Human
uuucucauggaacauagcuccu

SEQ ID NO: 920995 - RNA, 22 nt, Human
gcaugcaggaagggcuugggga

SEQ ID NO: 920996 - RNA, 19 nt, Human
auggcucugggaucacugc

SEQ ID NO: 920997 - RNA, 22 nt, Human
agguaaggagucccaaccaucc

SEQ ID NO: 920998 - RNA, 19 nt, Human
ucuugaugagguuucucca

SEQ ID NO: 920999 - RNA, 22 nt, Human
cuuguucaguugccucuccugc

SEQ ID NO: 921000 - RNA, 22 nt, Human
agaauucuccuucagggcagga

SEQ ID NO: 921001 - RNA, 22 nt, Human
ucuggaaguuagaggaggaaag

SEQ ID NO: 921002 - RNA, 22 nt, Human
gccaggcauucuagaaguagug

SEQ ID NO: 921003 - RNA, 22 nt, Human
aaacucagauguggugaagacc

SEQ ID NO: 921004 - RNA, 17 nt, Human
cucagcagggcucacuu

SEQ ID NO: 921005 - RNA, 22 nt, Human
uucagagacauguucuagauca

SEQ ID NO: 921006 - RNA, 22 nt, Human
aagguauuuucuaauguauacu

SEQ ID NO: 921007 - RNA, 22 nt, Human
ugccauggugacugcaggaggu

SEQ ID NO: 921008 - RNA, 22 nt, Human
aagcugauucuaaaauuuauua

SEQ ID NO: 921009 - RNA, 22 nt, Human
aaaauuaagugucugggaagcc

SEQ ID NO: 921010 - RNA, 22 nt, Human
ugacacuuccgguaaaaaaugc

SEQ ID NO: 921011 - RNA, 22 nt, Human
gggcuaagugaagauugcucca

SEQ ID NO: 921012 - RNA, 22 nt, Human
guccaaacaggucaaaauauua

SEQ ID NO: 921013 - RNA, 21 nt, Human
gcugcucgagauccagugcuu

SEQ ID NO: 921014 - RNA, 22 nt, Human
ggcagggguccugguguugacu

SEQ ID NO: 921015 - RNA, 21 nt, Human
aguaguuuagcacaggguuug

SEQ ID NO: 921016 - RNA, 22 nt, Human
ucugaggauagaggcaauagga

SEQ ID NO: 921017 - RNA, 22 nt, Human
gauguuuauaucuaacuuaagu

SEQ ID NO: 921018 - RNA, 22 nt, Human
agaauuucuggaagauugcaag

SEQ ID NO: 921019 - RNA, 17 nt, Human
ugggguguugaaggguu

SEQ ID NO: 921020 - RNA, 23 nt, Human
ccugugucuguugcugaauaaug

SEQ ID NO: 921021 - RNA, 22 nt, Human
auuuaugagcugaaccaugaaa

SEQ ID NO: 921022 - RNA, 22 nt, Human
caggccaaagaucccauugaca

SEQ ID NO: 921023 - RNA, 22 nt, Human
ccaggugggaggaaagcagaga

SEQ ID NO: 921024 - RNA, 22 nt, Human
uaauaagcguagaagguauauc

SEQ ID NO: 921025 - RNA, 20 nt, Human
cucuuaguacuguuccuggu

SEQ ID NO: 921026 - RNA, 20 nt, Human
uccaauguaggauaaaugug

SEQ ID NO: 921027 - RNA, 22 nt, Human
acauacauggauucauggauuc

SEQ ID NO: 921028 - RNA, 22 nt, Human
gcugggaugcgucuucccaggc

SEQ ID NO: 921029 - RNA, 18 nt, Human
acauuucucucugcguga

SEQ ID NO: 921030 - RNA, 22 nt, Human
aucuuucuccauauacaucuuu

SEQ ID NO: 921031 - RNA, 22 nt, Human
ugacaguucaggucagauuuau

SEQ ID NO: 921032 - RNA, 23 nt, Human
acagugugguggacaaggagcag

SEQ ID NO: 921033 - RNA, 22 nt, Human
uccugggguuuagagggaagug

SEQ ID NO: 921034 - RNA, 22 nt, Human
uggccagcacuuagcccuuacc

SEQ ID NO: 921035 - RNA, 21 nt, Human
accaggccaggaggcuggcac

SEQ ID NO: 921036 - RNA, 22 nt, Human
ucuuuguuggaguccaaggaua

SEQ ID NO: 921037 - RNA, 22 nt, Human
agcagugaguaacacagaccag

SEQ ID NO: 921038 - RNA, 22 nt, Human
uccuuggaagagcauucccagg

SEQ ID NO: 921039 - RNA, 22 nt, Human
aaaaggcuaauuaaguuuugga

SEQ ID NO: 921040 - RNA, 22 nt, Human
ucugagaggugaauucagcaaa

SEQ ID NO: 921041 - RNA, 22 nt, Human
ggugacagcgggucaagaggag

SEQ ID NO: 921042 - RNA, 22 nt, Human
uuuguaagcaguguuuuuacag

SEQ ID NO: 921043 - RNA, 22 nt, Human
agcucuuaucucuaagcacagc

SEQ ID NO: 921044 - RNA, 22 nt, Human
uaugcaaaguccuaagaaagaa

SEQ ID NO: 921045 - RNA, 22 nt, Human
ugaauaugugacuuugauuuca

SEQ ID NO: 921046 - RNA, 22 nt, Human
cagaaacuucuggugucaaaua

SEQ ID NO: 921047 - RNA, 22 nt, Human
aagguguucagguuuucccauu

SEQ ID NO: 921048 - RNA, 22 nt, Human
gguccuuugccaucucuccacc

SEQ ID NO: 921049 - RNA, 22 nt, Human
ggcauuuaucuaauauaguuua

SEQ ID NO: 921050 - RNA, 22 nt, Human
cucagagcacaguuuaugacag

SEQ ID NO: 921051 - RNA, 22 nt, Human
uucuagaagcucuaggggagaa

SEQ ID NO: 921052 - RNA, 21 nt, Human
agcagcugcaguuucuaucug

SEQ ID NO: 921053 - RNA, 23 nt, Human
aggcaaaccuauaaaauaggaau

SEQ ID NO: 921054 - RNA, 22 nt, Human
cuaggcugagcugggcugagcu

SEQ ID NO: 921055 - RNA, 22 nt, Human
cuggugcaaaaguaauuguggu

SEQ ID NO: 921056 - RNA, 22 nt, Human
aaguuucucaauggcaacuggg

SEQ ID NO: 921057 - RNA, 20 nt, Human
acuuuggggucuuucucaga

SEQ ID NO: 921058 - RNA, 22 nt, Human
cauaacaucugugaagcaggaa

SEQ ID NO: 921059 - RNA, 22 nt, Human
caguguggugugcacagcuuag

SEQ ID NO: 921060 - RNA, 22 nt, Human
guccuggggauacagaagugaa

SEQ ID NO: 921061 - RNA, 22 nt, Human
ggcuacuagacuuugauacuag

SEQ ID NO: 921062 - RNA, 22 nt, Human
aggcaccaguaagaguagaacu

SEQ ID NO: 921063 - RNA, 22 nt, Human
agagguauguucacuucccuuu

SEQ ID NO: 921064 - RNA, 22 nt, Human
acugggcuucacuuggcacauc

SEQ ID NO: 921065 - RNA, 20 nt, Human
aaagucucaacagcugagaa

SEQ ID NO: 921066 - RNA, 22 nt, Human
cagggcacaguuauggaggugg

SEQ ID NO: 921067 - RNA, 22 nt, Human
aggccagcugccacccgguccg

SEQ ID NO: 921068 - RNA, 22 nt, Human
aguuuaauuggaggcguggcuc

SEQ ID NO: 921069 - RNA, 22 nt, Human
ugacaagaagaccugguaauga

SEQ ID NO: 921070 - RNA, 22 nt, Human
ucuguggaagauuccaggcguu

SEQ ID NO: 921071 - RNA, 22 nt, Human
ucuuuagacauccaguuucucu

SEQ ID NO: 921072 - RNA, 22 nt, Human
aagccaggugugcccaggaucc

SEQ ID NO: 921073 - RNA, 22 nt, Human
guggccaggagagggugggaca

SEQ ID NO: 921074 - RNA, 22 nt, Human
agcacagagcuaggaguggagg

SEQ ID NO: 921075 - RNA, 22 nt, Human
cucugcuguuuuguauacaggc

SEQ ID NO: 921076 - RNA, 22 nt, Human
aguuuccuugggcauuuguuua

SEQ ID NO: 921077 - RNA, 22 nt, Human
uacagggaccaauaauaacuau

SEQ ID NO: 921078 - RNA, 22 nt, Human
ugagguaugugaugucuuuuag

SEQ ID NO: 921079 - RNA, 22 nt, Human
aguaggaggcgggagcaugaag

SEQ ID NO: 921080 - RNA, 22 nt, Human
aaugucuuuuaaauguugaggu

SEQ ID NO: 921081 - RNA, 22 nt, Human
gccaguggagcacauggugaag

SEQ ID NO: 921082 - RNA, 22 nt, Human
ugucuuuuuacuauguucaauc

SEQ ID NO: 921083 - RNA, 22 nt, Human
cccugagagguugagugucugc

SEQ ID NO: 921084 - RNA, 22 nt, Human
aagagaauaucgauagcacucu

SEQ ID NO: 921085 - RNA, 22 nt, Human
ggagguggagguugcaaugagc

SEQ ID NO: 921086 - RNA, 22 nt, Human
auagccaggucacagagcuagc

SEQ ID NO: 921087 - RNA, 22 nt, Human
uggcccagagcacugcugggca

SEQ ID NO: 921088 - RNA, 22 nt, Human
ccugcaggggagagacuucuag

SEQ ID NO: 921089 - RNA, 22 nt, Human
ggcagcugagaucaugcuguug

SEQ ID NO: 921090 - RNA, 22 nt, Human
cuggcaugaaauggcaucucau

SEQ ID NO: 921091 - RNA, 22 nt, Human
acaacaguccaguauagacugu

SEQ ID NO: 921092 - RNA, 22 nt, Human
ccagggcagaaaaagagggaau

SEQ ID NO: 921093 - RNA, 22 nt, Human
aauauucauuugcagaagaagu

SEQ ID NO: 921094 - RNA, 22 nt, Human
caggaaauguauaauuuuauaa

SEQ ID NO: 921095 - RNA, 19 nt, Human
auggcagcagcagcucucc

SEQ ID NO: 921096 - RNA, 23 nt, Human
gccuggagaaaagcugcaguuca

SEQ ID NO: 921097 - RNA, 22 nt, Human
ggcugccucuuucuuagugucu

SEQ ID NO: 921098 - RNA, 23 nt, Human
ugcuggcuguguuauugccaaca

SEQ ID NO: 921099 - RNA, 22 nt, Human
caauuucaaugaggccacaggg

SEQ ID NO: 921100 - RNA, 22 nt, Human
ucauuuugcagagcugaggaac

SEQ ID NO: 921101 - RNA, 22 nt, Human
ucuuagcaugcauguauaaaua

SEQ ID NO: 921102 - RNA, 19 nt, Human
uucuaggcuaugaagcagu

SEQ ID NO: 921103 - RNA, 22 nt, Human
gcacccaguuugucucaggguu

SEQ ID NO: 921104 - RNA, 22 nt, Human
agggccagucguguauuacugu

SEQ ID NO: 921105 - RNA, 22 nt, Human
auguagauguucacuugauuuu

SEQ ID NO: 921106 - RNA, 22 nt, Human
gacugaaauuauaccaaguggu

SEQ ID NO: 921107 - RNA, 22 nt, Human
agugacuuaaaggaacuuacug

SEQ ID NO: 921108 - RNA, 22 nt, Human
gcugccuguguggccacucacu

SEQ ID NO: 921109 - RNA, 20 nt, Human
aagcuggguaggagaggagc

SEQ ID NO: 921110 - RNA, 22 nt, Human
agcagccaaaugaagauuuuac

SEQ ID NO: 921111 - RNA, 22 nt, Human
ggugucacaggaggccgugugg

SEQ ID NO: 921112 - RNA, 21 nt, Human
ugcaggagucugugagucagg

SEQ ID NO: 921113 - RNA, 22 nt, Human
auagcacaucacuccagugagu

SEQ ID NO: 921114 - RNA, 19 nt, Human
ugggccucacaaugcuccc

SEQ ID NO: 921115 - RNA, 22 nt, Human
aggugcuagguguguaguggag

SEQ ID NO: 921116 - RNA, 22 nt, Human
ugcucccaggcucuguggucug

SEQ ID NO: 921117 - RNA, 22 nt, Human
agaauacaucuagugcugcaug

SEQ ID NO: 921118 - RNA, 22 nt, Human
cagcaagacaggauucccgugg

SEQ ID NO: 921119 - RNA, 22 nt, Human
auuugauuagcuguguaauuuu

SEQ ID NO: 921120 - RNA, 22 nt, Human
aaugguuuugcuuuaguauucu

SEQ ID NO: 921121 - RNA, 22 nt, Human
uuucagaaagcugaacauauga

SEQ ID NO: 921122 - RNA, 22 nt, Human
auggcauuuauguugacaaugg

SEQ ID NO: 921123 - RNA, 21 nt, Human
aaagaugagaacuggauggcu

SEQ ID NO: 921124 - RNA, 22 nt, Human
uccaggcugugcgcaccgugug

SEQ ID NO: 921125 - RNA, 22 nt, Human
uaaagugcuuccuaacccagag

SEQ ID NO: 921126 - RNA, 17 nt, Human
aauagcugcucagagag

SEQ ID NO: 921127 - RNA, 22 nt, Human
ucuauaaauuaugcagucucag

SEQ ID NO: 921128 - RNA, 22 nt, Human
acaugguauuucuauuauaauu

SEQ ID NO: 921129 - RNA, 22 nt, Human
ucagaucuggugaaguuauagu

SEQ ID NO: 921130 - RNA, 22 nt, Human
ccagguggacggcgaguacagg

SEQ ID NO: 921131 - RNA, 22 nt, Human
uuuuuacacuuagcauugagcg

SEQ ID NO: 921132 - RNA, 22 nt, Human
cucaccccuguaauuccagcac

SEQ ID NO: 921133 - RNA, 22 nt, Human
ggccugcuccgggggcugagcu

SEQ ID NO: 921134 - RNA, 22 nt, Human
agagcagcuggggcagagacca

SEQ ID NO: 921135 - RNA, 22 nt, Human
auuagaaugacagaaaugaggc

SEQ ID NO: 921136 - RNA, 22 nt, Human
aaguauuucuggccugugaaag

SEQ ID NO: 921137 - RNA, 22 nt, Human
uagcccaggcuggagggcagug

SEQ ID NO: 921138 - RNA, 22 nt, Human
aggcacagauuuggggaaagca

SEQ ID NO: 921139 - RNA, 22 nt, Human
uaacaguauugaagauaaacua

SEQ ID NO: 921140 - RNA, 22 nt, Human
ugcccacuucaaaaucuucauu

SEQ ID NO: 921141 - RNA, 22 nt, Human
cuguggcaggugucuggggcag

SEQ ID NO: 921142 - RNA, 22 nt, Human
acuacagucccucauauguugg

SEQ ID NO: 921143 - RNA, 22 nt, Human
gacacagguagaauaaaguacu

SEQ ID NO: 921144 - RNA, 22 nt, Human
gguguagcucugugucccacug

SEQ ID NO: 921145 - RNA, 22 nt, Human
uguuugcuuggucaguaaguag

SEQ ID NO: 921146 - RNA, 22 nt, Human
ucuuuguguucaggagccacgu

SEQ ID NO: 921147 - RNA, 22 nt, Human
uguggaagaacacuggccaggc

SEQ ID NO: 921148 - RNA, 22 nt, Human
ucuugcauuucagaguucagag

SEQ ID NO: 921149 - RNA, 22 nt, Human
ugcccugcugugccuggagcca

SEQ ID NO: 921150 - RNA, 22 nt, Human
uacacagagacucaaaagggca

SEQ ID NO: 921151 - RNA, 22 nt, Human
aauggcaauucagugaaauuau

SEQ ID NO: 921152 - RNA, 22 nt, Human
cuguauucugggcagggaagga

SEQ ID NO: 921153 - RNA, 22 nt, Human
gaagaggcaauugaauaagcua

SEQ ID NO: 921154 - RNA, 22 nt, Human
ggcaagagugaggagugucucu

SEQ ID NO: 921155 - RNA, 22 nt, Human
uuauacacguuuauggagcuac

SEQ ID NO: 921156 - RNA, 22 nt, Human
aagcagcauccugggcagaccu

SEQ ID NO: 921157 - RNA, 22 nt, Human
gugcugaauaacaguagaaauu

SEQ ID NO: 921158 - RNA, 22 nt, Human
caguuuuacccaagcuuauuuu

SEQ ID NO: 921159 - RNA, 22 nt, Human
agccuggauucgugcauccaca

SEQ ID NO: 921160 - RNA, 22 nt, Human
agagggugcuggagagacauug

SEQ ID NO: 921161 - RNA, 22 nt, Human
uaacuacauuucacugcaauua

SEQ ID NO: 921162 - RNA, 22 nt, Human
gaucaaccacgccggguugcca

SEQ ID NO: 921163 - RNA, 22 nt, Human
ggcuagggacacagcucugcuc

SEQ ID NO: 921164 - RNA, 22 nt, Human
gagcugcacuggggguggaaug

SEQ ID NO: 921165 - RNA, 22 nt, Human
agaccaugaccugccacuaagc

SEQ ID NO: 921166 - RNA, 22 nt, Human
cauauuagccuccacugggaca

SEQ ID NO: 921167 - RNA, 22 nt, Human
uaguuucuggguuggcuucuac

SEQ ID NO: 921168 - RNA, 22 nt, Human
cagagcugcagauugaaggcau

SEQ ID NO: 921169 - RNA, 22 nt, Human
agccaucucugaaaucaaagcu

SEQ ID NO: 921170 - RNA, 22 nt, Human
ucccuuguccugugggaagagc

SEQ ID NO: 921171 - RNA, 22 nt, Human
uggcaguugugagguucauauu

SEQ ID NO: 921172 - RNA, 22 nt, Human
ggagacacccacauugcugggu

SEQ ID NO: 921173 - RNA, 22 nt, Human
ugccagcuuguggucagaggcu

SEQ ID NO: 921174 - RNA, 22 nt, Human
ugcuaaggacugggaggcaggg

SEQ ID NO: 921175 - RNA, 22 nt, Human
aaaagaaccuagcuccucaguc

SEQ ID NO: 921176 - RNA, 22 nt, Human
ugacccuuguuuaucauuucug

SEQ ID NO: 921177 - RNA, 22 nt, Human
ucagcaaguauuuucugaaugc

SEQ ID NO: 921178 - RNA, 18 nt, Human
cugaauuaucucaucauu

SEQ ID NO: 921179 - RNA, 22 nt, Human
uuuauuuauaagccacuugcug

SEQ ID NO: 921180 - RNA, 22 nt, Human
augggaggaagagaagaugucu

SEQ ID NO: 921181 - RNA, 22 nt, Human
aggaagcgugggucuggcugga

SEQ ID NO: 921182 - RNA, 21 nt, Human
aggaauguguauauauacaau

SEQ ID NO: 921183 - RNA, 22 nt, Human
guaaaaucuuuccuauuugccu

SEQ ID NO: 921184 - RNA, 22 nt, Human
aaguuuuauuggcuauagcacu

SEQ ID NO: 921185 - RNA, 22 nt, Human
ggcuacuagguaccauuuagaa

SEQ ID NO: 921186 - RNA, 22 nt, Human
uucuagaaacuggagcaaacag

SEQ ID NO: 921187 - RNA, 20 nt, Human
uugcaagcuuucaagauagc

SEQ ID NO: 921188 - RNA, 21 nt, Human
ugggcagauggcaguguggcu

SEQ ID NO: 921189 - RNA, 22 nt, Human
gccacagcccgagcaccaugag

SEQ ID NO: 921190 - RNA, 22 nt, Human
uaacagaaaggggacagaaaua

SEQ ID NO: 921191 - RNA, 22 nt, Human
gcugaguugaaagcagaggaua

SEQ ID NO: 921192 - RNA, 21 nt, Human
aggaggggucuuucccacuga

SEQ ID NO: 921193 - RNA, 22 nt, Human
uccccacugggccuccucuuuc

SEQ ID NO: 921194 - RNA, 22 nt, Human
ugggagagaauaaucaauaggu

SEQ ID NO: 921195 - RNA, 22 nt, Human
uguacaaucugaugauguaugg

SEQ ID NO: 921196 - RNA, 22 nt, Human
ugcauggagauauacuauuuga

SEQ ID NO: 921197 - RNA, 22 nt, Human
aucuuguucucccuuguucuua

SEQ ID NO: 921198 - RNA, 22 nt, Human
aaggugucggcagagccgcuuc

SEQ ID NO: 921199 - RNA, 21 nt, Human
uuuccugcccuuugucaucac

SEQ ID NO: 921200 - RNA, 22 nt, Human
gacacagaauuccccuccaagu

SEQ ID NO: 921201 - RNA, 22 nt, Human
ccuguggguacaacagggucac

SEQ ID NO: 921202 - RNA, 22 nt, Human
uucugcaggcuguacaagaagc

SEQ ID NO: 921203 - RNA, 22 nt, Human
uauuucaagaacuucuauccau

SEQ ID NO: 921204 - RNA, 22 nt, Human
cucucccucauuggguuccauu

SEQ ID NO: 921205 - RNA, 22 nt, Human
gaguggggucugggcaucaguc

SEQ ID NO: 921206 - RNA, 21 nt, Human
aagcagggacugcccaggucc

SEQ ID NO: 921207 - RNA, 22 nt, Human
ugucucugaggugagggucagc

SEQ ID NO: 921208 - RNA, 22 nt, Human
ugagccuggagucguggagggg

SEQ ID NO: 921209 - RNA, 22 nt, Human
ugcuucauuuccuuauauugua

SEQ ID NO: 921210 - RNA, 23 nt, Human
aagaaguuaccuaaaguuguacu

SEQ ID NO: 921211 - RNA, 22 nt, Human
gaaugucuauguaaccgagggg

SEQ ID NO: 921212 - RNA, 20 nt, Human
cuucuucauuaacccuacug

SEQ ID NO: 921213 - RNA, 22 nt, Human
aggcucugaguagagcugccag

SEQ ID NO: 921214 - RNA, 22 nt, Human
uggcagaaguucacuaguagcu

SEQ ID NO: 921215 - RNA, 22 nt, Human
gugugccaggaacuggcugcug

SEQ ID NO: 921216 - RNA, 22 nt, Human
augugucuuucaagguauagaa

SEQ ID NO: 921217 - RNA, 22 nt, Human
aaguacaccuuuggaguccacg

SEQ ID NO: 921218 - RNA, 22 nt, Human
uucuggagauugagaaggcauu

SEQ ID NO: 921219 - RNA, 22 nt, Human
gaaguguuuaagucuucuuugu

SEQ ID NO: 921220 - RNA, 23 nt, Human
uggcuggcagaaacugaagcaug

SEQ ID NO: 921221 - RNA, 22 nt, Human
agggggugcuacuuccagaguu

SEQ ID NO: 921222 - RNA, 22 nt, Human
ucugcagacuugccuaagugug

SEQ ID NO: 921223 - RNA, 22 nt, Human
gaagacagaaaccuguuuggcu

SEQ ID NO: 921224 - RNA, 22 nt, Human
ggcuccagcccuggcucuucac

SEQ ID NO: 921225 - RNA, 22 nt, Human
agccagcaggugcagaauucca

SEQ ID NO: 921226 - RNA, 22 nt, Human
ccagaggggcugagcaggucac

SEQ ID NO: 921227 - RNA, 22 nt, Human
uucauggcaggagucagaagcu

SEQ ID NO: 921228 - RNA, 22 nt, Human
gcugagcugggacaguccuggg

SEQ ID NO: 921229 - RNA, 22 nt, Human
agcgagcacauugagugaagaa

SEQ ID NO: 921230 - RNA, 22 nt, Human
cugugucuaaucaggucaguca

SEQ ID NO: 921231 - RNA, 22 nt, Human
gggcagcagaggaucccuuaau

SEQ ID NO: 921232 - RNA, 22 nt, Human
gacccuuucagacccuuuagua

SEQ ID NO: 921233 - RNA, 22 nt, Human
uaaaggcagccacugagcucaa

SEQ ID NO: 921234 - RNA, 22 nt, Human
aaugagaaccuugaaaggaacu

SEQ ID NO: 921235 - RNA, 22 nt, Human
ucugucaccauucagcuugaau

SEQ ID NO: 921236 - RNA, 22 nt, Human
agaggggcaaguaaagagucuu

SEQ ID NO: 921237 - RNA, 22 nt, Human
ucuuugaugugguuaauuauga

SEQ ID NO: 921238 - RNA, 17 nt, Human
uggccaggccccgccag

SEQ ID NO: 921239 - RNA, 22 nt, Human
aaagccugucuggucauagcua

SEQ ID NO: 921240 - RNA, 22 nt, Human
gucucuggguuaagcagugcau

SEQ ID NO: 921241 - RNA, 22 nt, Human
uugaaguugguguggaaaguag

SEQ ID NO: 921242 - RNA, 21 nt, Human
gggcagcacgucauuccugug

SEQ ID NO: 921243 - RNA, 22 nt, Human
cugagacauuaugacaagugga

SEQ ID NO: 921244 - RNA, 22 nt, Human
guaccaaaucuguauuaggaaa

SEQ ID NO: 921245 - RNA, 19 nt, Human
cuggcagccugucuguguc

SEQ ID NO: 921246 - RNA, 22 nt, Human
uggagcugucacucagaaccaa

SEQ ID NO: 921247 - RNA, 22 nt, Human
ccaggcccuugcaagucccacc

SEQ ID NO: 921248 - RNA, 22 nt, Human
ucacauuucucagcacugauga

SEQ ID NO: 921249 - RNA, 22 nt, Human
ucucagcucauggcagccuuga

SEQ ID NO: 921250 - RNA, 22 nt, Human
aucagugcugagagacuaucaa

SEQ ID NO: 921251 - RNA, 22 nt, Human
ccugcagggaaucgaggcagaa

SEQ ID NO: 921252 - RNA, 22 nt, Human
gugagcagcucaggguggucuc

SEQ ID NO: 921253 - RNA, 22 nt, Human
aaagccacugcauguguaguau

SEQ ID NO: 921254 - RNA, 22 nt, Human
aaggcugggaaacaugcaggcc

SEQ ID NO: 921255 - RNA, 23 nt, Human
agcuccugaggccagccucuccu

SEQ ID NO: 921256 - RNA, 22 nt, Human
agcagcaggcuagggaacugcu

SEQ ID NO: 921257 - RNA, 22 nt, Human
gcuuccagggcucagucacugc

SEQ ID NO: 921258 - RNA, 22 nt, Human
ucaccauacauaaauuacauug

SEQ ID NO: 921259 - RNA, 22 nt, Human
gauauucuaccugcugaccaag

SEQ ID NO: 921260 - RNA, 22 nt, Human
agggccagcagcuuggccaacc

SEQ ID NO: 921261 - RNA, 22 nt, Human
auuaaaguugaaauugaacuga

SEQ ID NO: 921262 - RNA, 21 nt, Human
gacucucuagugcuguccagu

SEQ ID NO: 921263 - RNA, 22 nt, Human
auauacacaucuuuuuaaauau

SEQ ID NO: 921264 - RNA, 22 nt, Human
cacaggcuccggccuugcagcc

SEQ ID NO: 921265 - RNA, 22 nt, Human
uaacaauucucaaaagagggga

SEQ ID NO: 921266 - RNA, 22 nt, Human
augcuuugauuugguuucucua

SEQ ID NO: 921267 - RNA, 22 nt, Human
aacccauguuggaagcuuauca

SEQ ID NO: 921268 - RNA, 20 nt, Human
agggugagacaugagccucc

SEQ ID NO: 921269 - RNA, 22 nt, Human
uuauuagaucuguuagggaucc

SEQ ID NO: 921270 - RNA, 22 nt, Human
agccagugucgugugacaugag

SEQ ID NO: 921271 - RNA, 22 nt, Human
uaaggagagaauuuagagguuu

SEQ ID NO: 921272 - RNA, 20 nt, Human
gcaauggcgugcuaguucug

SEQ ID NO: 921273 - RNA, 22 nt, Human
auggaugcuucuuucuaguuuu

SEQ ID NO: 921274 - RNA, 22 nt, Human
ugucauguggcaauuaaagcag

SEQ ID NO: 921275 - RNA, 22 nt, Human
uagcaggaauaugagguuaaua

SEQ ID NO: 921276 - RNA, 22 nt, Human
uuucaacagcucucaaaugauc

SEQ ID NO: 921277 - RNA, 22 nt, Human
uguguacacaaugauugcagag

SEQ ID NO: 921278 - RNA, 22 nt, Human
agagcaaagggacauggaagag

SEQ ID NO: 921279 - RNA, 22 nt, Human
ccuuuuauaaaguuguauugaa

SEQ ID NO: 921280 - RNA, 22 nt, Human
caaaaagcuuagguaacaagcc

SEQ ID NO: 921281 - RNA, 22 nt, Human
cagguagcuuuugauauuaggg

SEQ ID NO: 921282 - RNA, 21 nt, Human
uacacucauccucucccaagg

SEQ ID NO: 921283 - RNA, 22 nt, Human
agcaauuuucccuuagucuuug

SEQ ID NO: 921284 - RNA, 22 nt, Human
gcacaggaaaugacucauguua

SEQ ID NO: 921285 - RNA, 22 nt, Human
cagaguggugcaagggcagugu

SEQ ID NO: 921286 - RNA, 22 nt, Human
gggccccacuggggcugccugc

SEQ ID NO: 921287 - RNA, 22 nt, Human
ucaauuacagcacaguacucca

SEQ ID NO: 921288 - RNA, 22 nt, Human
ccugacaggagaagcgcagcau

SEQ ID NO: 921289 - RNA, 22 nt, Human
ccugagcacacaucagaaucac

SEQ ID NO: 921290 - RNA, 22 nt, Human
cugggagguggagguugcauug

SEQ ID NO: 921291 - RNA, 23 nt, Human
caguacaauguggaaaaggagug

SEQ ID NO: 921292 - RNA, 22 nt, Human
ccagagguggucauagaaagca

SEQ ID NO: 921293 - RNA, 22 nt, Human
ucaggcugcccguucagggcuc

SEQ ID NO: 921294 - RNA, 22 nt, Human
uacaggcauguagcauggugau

SEQ ID NO: 921295 - RNA, 21 nt, Human
cauacucaguguauaacuucu

SEQ ID NO: 921296 - RNA, 22 nt, Human
gucaucuucucucagcccaggc

SEQ ID NO: 921297 - RNA, 22 nt, Human
ugcaucagaguuugcugcugcu

SEQ ID NO: 921298 - RNA, 22 nt, Human
cacacagguaagccucuuucaa

SEQ ID NO: 921299 - RNA, 22 nt, Human
uccaggcugugcaugaguuuag

SEQ ID NO: 921300 - RNA, 22 nt, Human
ugccagccuggccugagucuuu

SEQ ID NO: 921301 - RNA, 22 nt, Human
cccugggcaccaggccugguaa

SEQ ID NO: 921302 - RNA, 22 nt, Human
ugagcaccuacuguauuccagg

SEQ ID NO: 921303 - RNA, 22 nt, Human
cuuugcagaagaaaccuacaaa

SEQ ID NO: 921304 - RNA, 22 nt, Human
ugaggcuuuauguaagggugca

SEQ ID NO: 921305 - RNA, 22 nt, Human
gugggcagaauugaaucuuuaa

SEQ ID NO: 921306 - RNA, 22 nt, Human
uccagugccucacugaggauuc

SEQ ID NO: 921307 - RNA, 22 nt, Human
gacagcugcucccguuucugcu

SEQ ID NO: 921308 - RNA, 17 nt, Human
ugcccugugccuggugu

SEQ ID NO: 921309 - RNA, 22 nt, Human
guuuccuauaacucaggcacca

SEQ ID NO: 921310 - RNA, 18 nt, Human
cugucaccgccaccacac

SEQ ID NO: 921311 - RNA, 22 nt, Human
auucucugugcagauuuaagac

SEQ ID NO: 921312 - RNA, 22 nt, Human
ugggucagaaucagagaguugc

SEQ ID NO: 921313 - RNA, 22 nt, Human
cagcaggguauacagggaauuu

SEQ ID NO: 921314 - RNA, 22 nt, Human
aauauuaucaaaagcuuuuuca

SEQ ID NO: 921315 - RNA, 22 nt, Human
agucacugguucuguaauuaau

SEQ ID NO: 921316 - RNA, 22 nt, Human
aguuacaaacacuaucaguucu

SEQ ID NO: 921317 - RNA, 22 nt, Human
agaaagacgugaugaagaagua

SEQ ID NO: 921318 - RNA, 22 nt, Human
auggcaguauuuguaucacaga

SEQ ID NO: 921319 - RNA, 18 nt, Human
uccccugcucuggugcuc

SEQ ID NO: 921320 - RNA, 22 nt, Human
uggcuggagucuggugcuagcc

SEQ ID NO: 921321 - RNA, 22 nt, Human
ugcagggcacggugcgcguggg

SEQ ID NO: 921322 - RNA, 20 nt, Human
uuggaagguggagaagagga

SEQ ID NO: 921323 - RNA, 22 nt, Human
uucuccagaguuucucucacug

SEQ ID NO: 921324 - RNA, 22 nt, Human
caagauuuaagagucagccuug

SEQ ID NO: 921325 - RNA, 22 nt, Human
aaccucaaacucuugggcuuaa

SEQ ID NO: 921326 - RNA, 19 nt, Human
ucccucagucugccaggcc

SEQ ID NO: 921327 - RNA, 22 nt, Human
guccugaggaugcagagauaaa

SEQ ID NO: 921328 - RNA, 22 nt, Human
acaaucacacaugcaauuauac

SEQ ID NO: 921329 - RNA, 21 nt, Human
uuacaaagcaagugcuguguc

SEQ ID NO: 921330 - RNA, 22 nt, Human
cacugcaguaacucuaggacug

SEQ ID NO: 921331 - RNA, 22 nt, Human
uuggaaggguuucaguuagucu

SEQ ID NO: 921332 - RNA, 22 nt, Human
aaaaaguuucaacugccaacuc

SEQ ID NO: 921333 - RNA, 22 nt, Human
auucagcagccauggcuucuga

SEQ ID NO: 921334 - RNA, 22 nt, Human
ucccacccccuccaaggaggaa

SEQ ID NO: 921335 - RNA, 22 nt, Human
cuugguaaaacugucuuaaauu

SEQ ID NO: 921336 - RNA, 22 nt, Human
guguccauucacugcaacacuu

SEQ ID NO: 921337 - RNA, 22 nt, Human
cagggccacuguagaugaggag

SEQ ID NO: 921338 - RNA, 22 nt, Human
caagugacuucuuugagcccgu

SEQ ID NO: 921339 - RNA, 22 nt, Human
acaggcagguaauuuacauauu

SEQ ID NO: 921340 - RNA, 22 nt, Human
uaugucuugaaaugagaagcca

SEQ ID NO: 921341 - RNA, 22 nt, Human
auuacagauagacuuugaagcu

SEQ ID NO: 921342 - RNA, 22 nt, Human
ugaggugguuuguaucacuggg

SEQ ID NO: 921343 - RNA, 22 nt, Human
ggacaggugcaaagggcacaug

SEQ ID NO: 921344 - RNA, 22 nt, Human
gauggaaugaauggcagauaca

SEQ ID NO: 921345 - RNA, 22 nt, Human
caggcucuuccauccugcugag

SEQ ID NO: 921346 - RNA, 22 nt, Human
uuugaaacucaugaucaucacu

SEQ ID NO: 921347 - RNA, 22 nt, Human
auagaaucaucugugcacuagu

SEQ ID NO: 921348 - RNA, 19 nt, Human
agacacacuugauaugugu

SEQ ID NO: 921349 - RNA, 22 nt, Human
agauuuaaauuugcuacaauuc

SEQ ID NO: 921350 - RNA, 22 nt, Human
aggagcugagggagcgcccuug

SEQ ID NO: 921351 - RNA, 22 nt, Human
cuuucuaauucucccauagucu

SEQ ID NO: 921352 - RNA, 22 nt, Human
uccugggaccgagggaagagcu

SEQ ID NO: 921353 - RNA, 22 nt, Human
ugcccagggauaagccuagaga

SEQ ID NO: 921354 - RNA, 18 nt, Human
gggcccuggcguccgccc

SEQ ID NO: 921355 - RNA, 21 nt, Human
cgcagcugagaaauauacaga

SEQ ID NO: 921356 - RNA, 22 nt, Human
uaaagcauaaugaauaucuaga

SEQ ID NO: 921357 - RNA, 22 nt, Human
cuggaaugauugaaaaggaaug

SEQ ID NO: 921358 - RNA, 22 nt, Human
guugcuucucuuaaguccagcu

SEQ ID NO: 921359 - RNA, 22 nt, Human
ccaggaagcugugagauuccaa

SEQ ID NO: 921360 - RNA, 22 nt, Human
gcacauccaaugauuguuuuga

SEQ ID NO: 921361 - RNA, 23 nt, Human
ggcucccuccuagcuuucccaau

SEQ ID NO: 921362 - RNA, 22 nt, Human
aaaaguaauugugguuuuggcc

SEQ ID NO: 921363 - RNA, 22 nt, Human
uugcaaagacuggcuuaacagu

SEQ ID NO: 921364 - RNA, 22 nt, Human
uacauucacaguuguucaucuc

SEQ ID NO: 921365 - RNA, 22 nt, Human
auauuaaaacuaugguuuucag

SEQ ID NO: 921366 - RNA, 22 nt, Human
guucacagcaaaccuaugaacu

SEQ ID NO: 921367 - RNA, 22 nt, Human
cuucuaugaggagagacaugca

SEQ ID NO: 921368 - RNA, 22 nt, Human
acaguaacaccuacucuguccc

SEQ ID NO: 921369 - RNA, 22 nt, Human
gagaacaggcucuggagucaga

SEQ ID NO: 921370 - RNA, 22 nt, Human
acaaugaacacacaaggaauuc

SEQ ID NO: 921371 - RNA, 22 nt, Human
auauuucuggggguguguuucu

SEQ ID NO: 921372 - RNA, 22 nt, Human
aaacaugcuggauuuagaauau

SEQ ID NO: 921373 - RNA, 22 nt, Human
ccuuggcauccucugaagaaau

SEQ ID NO: 921374 - RNA, 22 nt, Human
uucauuccugagcccauauuua

SEQ ID NO: 921375 - RNA, 22 nt, Human
aggcaggaaaaucgcuugaacc

SEQ ID NO: 921376 - RNA, 22 nt, Human
ccaggaggaaauucuaaaggua

SEQ ID NO: 921377 - RNA, 22 nt, Human
cugcccaccccgaggcaggaag

SEQ ID NO: 921378 - RNA, 22 nt, Human
uucuaugugcuggagaauauuu

SEQ ID NO: 921379 - RNA, 22 nt, Human
ggagauaguccaggugaaggga

SEQ ID NO: 921380 - RNA, 22 nt, Human
guauacuagauagacaguauca

SEQ ID NO: 921381 - RNA, 22 nt, Human
ccagcugggauuaagggaaaau

SEQ ID NO: 921382 - RNA, 22 nt, Human
uauucugugugauauguaaaug

SEQ ID NO: 921383 - RNA, 22 nt, Human
caggcagcucgaugccuuguug

SEQ ID NO: 921384 - RNA, 22 nt, Human
acagugaucaguuacugucugu

SEQ ID NO: 921385 - RNA, 22 nt, Human
aggcuccugauccuggggucug

SEQ ID NO: 921386 - RNA, 22 nt, Human
acauugaaagcauauuaucucc

SEQ ID NO: 921387 - RNA, 22 nt, Human
aucuuugaagaggacuugaagu

SEQ ID NO: 921388 - RNA, 22 nt, Human
aacaggcuggccuugaagcagu

SEQ ID NO: 921389 - RNA, 22 nt, Human
gagggccagcagccucagcaug

SEQ ID NO: 921390 - RNA, 22 nt, Human
aguggcuguuuauaggugggua

SEQ ID NO: 921391 - RNA, 22 nt, Human
gacagaggcaagaccagaagcc

SEQ ID NO: 921392 - RNA, 22 nt, Human
uucugggaggcuggcugucaua

SEQ ID NO: 921393 - RNA, 22 nt, Human
gggcacagcccagugggguccc

SEQ ID NO: 921394 - RNA, 22 nt, Human
agcugugguguuuucaagcccu

SEQ ID NO: 921395 - RNA, 22 nt, Human
caacauguguuagacaauagac

SEQ ID NO: 921396 - RNA, 22 nt, Human
uccuguccugaggcuccaggcc

SEQ ID NO: 921397 - RNA, 22 nt, Human
uccugggagacccagcugugga

SEQ ID NO: 921398 - RNA, 22 nt, Human
gaggagcugagccacguccugg

SEQ ID NO: 921399 - RNA, 22 nt, Human
augaggcagauguugcaugagg

SEQ ID NO: 921400 - RNA, 22 nt, Human
cagcaagacaguuuccuaagug

SEQ ID NO: 921401 - RNA, 22 nt, Human
gggggaaaguggagguucguga

SEQ ID NO: 921402 - RNA, 22 nt, Human
ucagaggugagcaugugaccaa

SEQ ID NO: 921403 - RNA, 22 nt, Human
ccuuccuggagcccaugcagau

SEQ ID NO: 921404 - RNA, 22 nt, Human
cucaggaggccauucucaaggu

SEQ ID NO: 921405 - RNA, 20 nt, Human
ugcuggggacauacagggug

SEQ ID NO: 921406 - RNA, 22 nt, Human
ucuucaugucuugccugauaua

SEQ ID NO: 921407 - RNA, 21 nt, Human
acagugagaaauaaauggaaa

SEQ ID NO: 921408 - RNA, 22 nt, Human
ugacagauuuuuucugagcuaa

SEQ ID NO: 921409 - RNA, 22 nt, Human
caaggcaguuccccagagggcu

SEQ ID NO: 921410 - RNA, 20 nt, Human
uguguguguacuucuaaaua

SEQ ID NO: 921411 - RNA, 22 nt, Human
uuggcuuucucuguaucugaau

SEQ ID NO: 921412 - RNA, 22 nt, Human
aggccagugguucucugugucc

SEQ ID NO: 921413 - RNA, 22 nt, Human
cugugcguaaguagccaaaaua

SEQ ID NO: 921414 - RNA, 22 nt, Human
auuccuaaaguaauacacuaga

SEQ ID NO: 921415 - RNA, 22 nt, Human
ccuguguccuaauccaucaggc

SEQ ID NO: 921416 - RNA, 22 nt, Human
auagaguacagucuuugauuau

SEQ ID NO: 921417 - RNA, 19 nt, Human
gccaggucuuggguccagg

SEQ ID NO: 921418 - RNA, 22 nt, Human
aaugguuuaguuaagacugagu

SEQ ID NO: 921419 - RNA, 22 nt, Human
ucagugucuucucuuuccuacc

SEQ ID NO: 921420 - RNA, 22 nt, Human
acuucagaguuaguuauagacc

SEQ ID NO: 921421 - RNA, 22 nt, Human
ucuauagacuuggacauauagu

SEQ ID NO: 921422 - RNA, 22 nt, Human
acugucacuacuauguguuugu

SEQ ID NO: 921423 - RNA, 22 nt, Human
guuuggauguguagugagggga

SEQ ID NO: 921424 - RNA, 22 nt, Human
auucaagauuaauucuauguca

SEQ ID NO: 921425 - RNA, 22 nt, Human
uucucauaggagcgcaaacccu

SEQ ID NO: 921426 - RNA, 22 nt, Human
ugccaaauauucucuacgugcu

SEQ ID NO: 921427 - RNA, 22 nt, Human
auacaguaauugcccugcaaug

SEQ ID NO: 921428 - RNA, 22 nt, Human
uagucaacuagugagcauaugg

SEQ ID NO: 921429 - RNA, 22 nt, Human
aauacaaucaaauucacuagca

SEQ ID NO: 921430 - RNA, 22 nt, Human
aagguuuauuaaauguugcaug

SEQ ID NO: 921431 - RNA, 22 nt, Human
uauaagaaauugccaaccuguu

SEQ ID NO: 921432 - RNA, 22 nt, Human
ugcuguagggagaaagaguuga

SEQ ID NO: 921433 - RNA, 22 nt, Human
cugcugugucagaguccagggg

SEQ ID NO: 921434 - RNA, 22 nt, Human
aaaugcagcagcuaauugaaaa

SEQ ID NO: 921435 - RNA, 22 nt, Human
guuuuguuuugagucaacucca

SEQ ID NO: 921436 - RNA, 22 nt, Human
aaaauaugaaguugucaguaug

SEQ ID NO: 921437 - RNA, 22 nt, Human
agacucugauucccucauguca

SEQ ID NO: 921438 - RNA, 22 nt, Human
ggagccuuacuagaaugugagc

SEQ ID NO: 921439 - RNA, 22 nt, Human
ccccaaaacuuagugacuuaaa

SEQ ID NO: 921440 - RNA, 22 nt, Human
cuaggaaucaccaagauucuag

SEQ ID NO: 921441 - RNA, 22 nt, Human
gaggcagcagggcugguuccuu

SEQ ID NO: 921442 - RNA, 22 nt, Human
uggaagacacuauuuaccaggu

SEQ ID NO: 921443 - RNA, 22 nt, Human
ccugagcugcggggcagugcuc

SEQ ID NO: 921444 - RNA, 22 nt, Human
aggcuggagugcuggagugcug

SEQ ID NO: 921445 - RNA, 22 nt, Human
cuacaaauccacaaggcacuuu

SEQ ID NO: 921446 - RNA, 21 nt, Human
caaauacuuagaaacuuaaga

SEQ ID NO: 921447 - RNA, 22 nt, Human
caggacaggaguggggucaaag

SEQ ID NO: 921448 - RNA, 22 nt, Human
uuugugcaagacaugcuaagag

SEQ ID NO: 921449 - RNA, 22 nt, Human
agagacuaagccagcauagugc

SEQ ID NO: 921450 - RNA, 22 nt, Human
aucuuucuaugguacuuucucc

SEQ ID NO: 921451 - RNA, 22 nt, Human
uaaaauagccagugccccucug

SEQ ID NO: 921452 - RNA, 22 nt, Human
uggugcugauaauggcaggauu

SEQ ID NO: 921453 - RNA, 22 nt, Human
uuucacugggcuugcagaaauc

SEQ ID NO: 921454 - RNA, 22 nt, Human
caggacccaaccucccugcucu

SEQ ID NO: 921455 - RNA, 22 nt, Human
auacaugugggucuaaacauau

SEQ ID NO: 921456 - RNA, 22 nt, Human
aagcuguuugcaguggauggag

SEQ ID NO: 921457 - RNA, 22 nt, Human
ugcuuuauucccuucugaugug

SEQ ID NO: 921458 - RNA, 22 nt, Human
uuguguccugauuugacacaau

SEQ ID NO: 921459 - RNA, 22 nt, Human
aggagaaguaaggcuagaugau

SEQ ID NO: 921460 - RNA, 22 nt, Human
cacagcagucuuucacuaaaua

SEQ ID NO: 921461 - RNA, 22 nt, Human
gggcuccaguuuggccaggaag

SEQ ID NO: 921462 - RNA, 22 nt, Human
uaugugcauuauuaccagugga

SEQ ID NO: 921463 - RNA, 22 nt, Human
uaaaggaggaguuaaugagacu

SEQ ID NO: 921464 - RNA, 22 nt, Human
uuccagagguucucagcccugu

SEQ ID NO: 921465 - RNA, 22 nt, Human
gcagcuggggaggucgugggga

SEQ ID NO: 921466 - RNA, 22 nt, Human
uccuuggcaugccgucuucucc

SEQ ID NO: 921467 - RNA, 22 nt, Human
ccugcugugaccggggagcagg

SEQ ID NO: 921468 - RNA, 22 nt, Human
uuaugcaugagauaaaaauugg

SEQ ID NO: 921469 - RNA, 22 nt, Human
acuguacaugcaucuugucuau

SEQ ID NO: 921470 - RNA, 22 nt, Human
uauuuguccagguaaauuucag

SEQ ID NO: 921471 - RNA, 22 nt, Human
ucuguguauuugugaccuguau

SEQ ID NO: 921472 - RNA, 23 nt, Human
aaguaacagggauaauagcaguu

SEQ ID NO: 921473 - RNA, 17 nt, Human
acagaggcaggagugga

SEQ ID NO: 921474 - RNA, 22 nt, Human
ugggcuagauauuuuugggcug

SEQ ID NO: 921475 - RNA, 22 nt, Human
acagcugcaaauuguuagagga

SEQ ID NO: 921476 - RNA, 22 nt, Human
uggaaugucagcuacaagaggg

SEQ ID NO: 921477 - RNA, 22 nt, Human
gucuggacaggacuauuucuaa

SEQ ID NO: 921478 - RNA, 23 nt, Human
auuuuacaggucaguuccuugaa

SEQ ID NO: 921479 - RNA, 22 nt, Human
aggcugggaagguaaaguugua

SEQ ID NO: 921480 - RNA, 22 nt, Human
ucaaaucaccaaacucacuggc

SEQ ID NO: 921481 - RNA, 22 nt, Human
uaauuucuggagggagaaagag

SEQ ID NO: 921482 - RNA, 19 nt, Human
gccaggaaagaaucaggcg

SEQ ID NO: 921483 - RNA, 22 nt, Human
aaaucacagggucucuaaguau

SEQ ID NO: 921484 - RNA, 22 nt, Human
acaggugggcuuaagagucggc

SEQ ID NO: 921485 - RNA, 18 nt, Human
agcucuggcauacuugaa

SEQ ID NO: 921486 - RNA, 22 nt, Human
uugcuauguggguugugcacuc

SEQ ID NO: 921487 - RNA, 21 nt, Human
auaaaguuuuacaggaaugca

SEQ ID NO: 921488 - RNA, 22 nt, Human
gauggcaccuugaacgcugcgu

SEQ ID NO: 921489 - RNA, 22 nt, Human
ucuuugcuccacacucuagaga

SEQ ID NO: 921490 - RNA, 22 nt, Human
aaaguacaugagauucaagggg

SEQ ID NO: 921491 - RNA, 23 nt, Human
gcucugaggaaguugggcacggg

SEQ ID NO: 921492 - RNA, 22 nt, Human
aacuagagcuuccagcuucuug

SEQ ID NO: 921493 - RNA, 22 nt, Human
caauuucaauacaaaauacauu

SEQ ID NO: 921494 - RNA, 22 nt, Human
aagaugcaugcugaagcuggcu

SEQ ID NO: 921495 - RNA, 21 nt, Human
aggcuuggaucuagacaggcc

SEQ ID NO: 921496 - RNA, 23 nt, Human
ucauaaauauuagcacaguagga

SEQ ID NO: 921497 - RNA, 22 nt, Human
ucagggucagauuccagagccu

SEQ ID NO: 921498 - RNA, 22 nt, Human
aggugcagcugguggagucugg

SEQ ID NO: 921499 - RNA, 22 nt, Human
gaauuauaaacuagugacuuca

SEQ ID NO: 921500 - RNA, 22 nt, Human
aaaguguacuaugucaugaaca

SEQ ID NO: 921501 - RNA, 17 nt, Human
ugcaaacaaucacauau

SEQ ID NO: 921502 - RNA, 22 nt, Human
ccuugguucugccuggccugga

SEQ ID NO: 921503 - RNA, 22 nt, Human
uuccuacauuuguacaauaaga

SEQ ID NO: 921504 - RNA, 22 nt, Human
auaaaaacugacccauccuuug

SEQ ID NO: 921505 - RNA, 22 nt, Human
cacagguacauccuuaucccca

SEQ ID NO: 921506 - RNA, 22 nt, Human
cagugccaugaugcagagcaau

SEQ ID NO: 921507 - RNA, 22 nt, Human
guguaaguaucuuuguaucuuu

SEQ ID NO: 921508 - RNA, 22 nt, Human
cuggacagaaaccaguccuggg

SEQ ID NO: 921509 - RNA, 22 nt, Human
aaaguucuucauuuuuauugga

SEQ ID NO: 921510 - RNA, 22 nt, Human
uaaaucacuccuaauaaucagu

SEQ ID NO: 921511 - RNA, 22 nt, Human
agcaaugaaaugaaaucagucu

SEQ ID NO: 921512 - RNA, 22 nt, Human
caggcucccugggcaguggcag

SEQ ID NO: 921513 - RNA, 22 nt, Human
cagaguccugcaccagcuccag

SEQ ID NO: 921514 - RNA, 22 nt, Human
aaacaacaauccaaugggagcu

SEQ ID NO: 921515 - RNA, 22 nt, Human
guuuccugaaauagaguacugg

SEQ ID NO: 921516 - RNA, 22 nt, Human
gcuuuaguuugucacuggcauu

SEQ ID NO: 921517 - RNA, 22 nt, Human
uauguacauaacaugaaaugca

SEQ ID NO: 921518 - RNA, 22 nt, Human
uacauugaguauuauuuagcca

SEQ ID NO: 921519 - RNA, 22 nt, Human
uugauuuguaggaauggagacc

SEQ ID NO: 921520 - RNA, 22 nt, Human
ccagggcucaggcucccagugg

SEQ ID NO: 921521 - RNA, 22 nt, Human
uuggacaguaaauugugcuuaa

SEQ ID NO: 921522 - RNA, 22 nt, Human
aacaaagucguugccuagaaga

SEQ ID NO: 921523 - RNA, 22 nt, Human
auccauuuguuuacugauggac

SEQ ID NO: 921524 - RNA, 20 nt, Human
caauaauuuacuucccuauu

SEQ ID NO: 921525 - RNA, 20 nt, Human
guuuuucucucuugccacua

SEQ ID NO: 921526 - RNA, 22 nt, Human
ucucagagauguuagggaagag

SEQ ID NO: 921527 - RNA, 22 nt, Human
aggcugaggcuggcagcuccag

SEQ ID NO: 921528 - RNA, 22 nt, Human
gugaagcacaugggcguugggu

SEQ ID NO: 921529 - RNA, 22 nt, Human
aggggcggccugccugaagcag

SEQ ID NO: 921530 - RNA, 22 nt, Human
acagggagccccagcauuucca

SEQ ID NO: 921531 - RNA, 22 nt, Human
uauaucuaaguguauguaagag

SEQ ID NO: 921532 - RNA, 22 nt, Human
cugggccacaucagaugaagac

SEQ ID NO: 921533 - RNA, 22 nt, Human
gacaagcucuuguuucaugguu

SEQ ID NO: 921534 - RNA, 22 nt, Human
acccaggagacggaggugcagu

SEQ ID NO: 921535 - RNA, 22 nt, Human
uuguauucuuccuuagcaguac

SEQ ID NO: 921536 - RNA, 22 nt, Human
auuuguaucuucuaauauuauc

SEQ ID NO: 921537 - RNA, 22 nt, Human
gcagucuauaaaucagcuuugc

SEQ ID NO: 921538 - RNA, 22 nt, Human
ugaauugagauaggaucagucu

SEQ ID NO: 921539 - RNA, 22 nt, Human
uaggcagcuuagguuagaagug

SEQ ID NO: 921540 - RNA, 22 nt, Human
acuuucucccacccacccgucu

SEQ ID NO: 921541 - RNA, 22 nt, Human
uguaagaugcugggauagauga

SEQ ID NO: 921542 - RNA, 22 nt, Human
gaaggcugucagagaggagggc

SEQ ID NO: 921543 - RNA, 22 nt, Human
aggguaggaacugaguggaagg

SEQ ID NO: 921544 - RNA, 22 nt, Human
aauuuuaaucaguggugcugag

SEQ ID NO: 921545 - RNA, 22 nt, Human
uuagaaagaguauaccagaaac

SEQ ID NO: 921546 - RNA, 22 nt, Human
ucugccagugccagaguacaua

SEQ ID NO: 921547 - RNA, 22 nt, Human
aaaagguaguugccaaauaagg

SEQ ID NO: 921548 - RNA, 22 nt, Human
ggaacugagaagcagcuaugcc

SEQ ID NO: 921549 - RNA, 22 nt, Human
ucagggagaggugagagccugu

SEQ ID NO: 921550 - RNA, 22 nt, Human
uacaaagcuuguacugugugac

SEQ ID NO: 921551 - RNA, 22 nt, Human
gaucuggaaucugaaggcugag

SEQ ID NO: 921552 - RNA, 22 nt, Human
auucuaagugcuuguggugguu

SEQ ID NO: 921553 - RNA, 22 nt, Human
ugcagacaagugcaucuaaccc

SEQ ID NO: 921554 - RNA, 22 nt, Human
aaauccuguccauuuaccagau

SEQ ID NO: 921555 - RNA, 22 nt, Human
cugacccuggaggcauuucucu

SEQ ID NO: 921556 - RNA, 22 nt, Human
aauagcauagaguuaaaaugca

SEQ ID NO: 921557 - RNA, 22 nt, Human
ucuugaggucaucaucugaaac

SEQ ID NO: 921558 - RNA, 23 nt, Human
uuugacagcgugguuucuguggg

SEQ ID NO: 921559 - RNA, 22 nt, Human
uucauacuguguuuccaaguuu

SEQ ID NO: 921560 - RNA, 22 nt, Human
aggcagcagccacaaggccuga

SEQ ID NO: 921561 - RNA, 22 nt, Human
uuaauuuaagaaacggcaggcc

SEQ ID NO: 921562 - RNA, 23 nt, Human
ugccagaggcagucacaguggug

SEQ ID NO: 921563 - RNA, 22 nt, Human
gggcccugcguccggaagucug

SEQ ID NO: 921564 - RNA, 22 nt, Human
ucugccagguggggagaggcca

SEQ ID NO: 921565 - RNA, 22 nt, Human
uauucugcuaagugauuucuac

SEQ ID NO: 921566 - RNA, 22 nt, Human
ucugucugccuugugagggcac

SEQ ID NO: 921567 - RNA, 22 nt, Human
cauucauucagcaacuguuauu

SEQ ID NO: 921568 - RNA, 22 nt, Human
guggguggaucaugaggucagg

SEQ ID NO: 921569 - RNA, 22 nt, Human
acugaucacauagauauauucc

SEQ ID NO: 921570 - RNA, 22 nt, Human
aagugggaauagaaaugaaggu

SEQ ID NO: 921571 - RNA, 22 nt, Human
ugcagugugaccuguagcgagc

SEQ ID NO: 921572 - RNA, 22 nt, Human
aggcgugguugaggcgagcaua

SEQ ID NO: 921573 - RNA, 22 nt, Human
guggagcaggacuagcugagaa

SEQ ID NO: 921574 - RNA, 22 nt, Human
auucauaucauagaguuauuga

SEQ ID NO: 921575 - RNA, 22 nt, Human
ugaggccuggacucugcaugga

SEQ ID NO: 921576 - RNA, 22 nt, Human
cauucauucacauuuugucuau

SEQ ID NO: 921577 - RNA, 22 nt, Human
cagcaucucuuuuugcauuccu

SEQ ID NO: 921578 - RNA, 22 nt, Human
ucagcucuguuuugaguggaac

SEQ ID NO: 921579 - RNA, 22 nt, Human
cccagccaaggugcugguguug

SEQ ID NO: 921580 - RNA, 22 nt, Human
auccugggcagugugucacucu

SEQ ID NO: 921581 - RNA, 22 nt, Human
cugggccucaugcacagagaug

SEQ ID NO: 921582 - RNA, 22 nt, Human
aauuuucacagugcugugagau

SEQ ID NO: 921583 - RNA, 22 nt, Human
agggggcuggagacaccuccuc

SEQ ID NO: 921584 - RNA, 22 nt, Human
gauuuucuugggaaacaaugag

SEQ ID NO: 921585 - RNA, 22 nt, Human
gagguauuugauccucugcagu

SEQ ID NO: 921586 - RNA, 20 nt, Human
uuucuauggggccagcacau

SEQ ID NO: 921587 - RNA, 23 nt, Human
ggcagccucugacucugcuuugc

SEQ ID NO: 921588 - RNA, 23 nt, Human
uuuuccagaaucgacucuguaga

SEQ ID NO: 921589 - RNA, 22 nt, Human
uuuggccucaugaauuucuugc

SEQ ID NO: 921590 - RNA, 22 nt, Human
ugcugccuuuguggggucacug

SEQ ID NO: 921591 - RNA, 22 nt, Human
ggcuuugggauucagcaugaga

SEQ ID NO: 921592 - RNA, 22 nt, Human
cuggcccauggugagcucuggg

SEQ ID NO: 921593 - RNA, 22 nt, Human
aaaguguuaacacuggcuacuu

SEQ ID NO: 921594 - RNA, 22 nt, Human
acaguagaguaaaagggagccu

SEQ ID NO: 921595 - RNA, 23 nt, Human
ggcugcucuuuucaugcuguuuc

SEQ ID NO: 921596 - RNA, 22 nt, Human
cugaggcucugggugucacugu

SEQ ID NO: 921597 - RNA, 22 nt, Human
gcagcagcucagccgggcacug

SEQ ID NO: 921598 - RNA, 22 nt, Human
gguuuccacauccauggaaugg

SEQ ID NO: 921599 - RNA, 22 nt, Human
ugggcagagucauacaggagac

SEQ ID NO: 921600 - RNA, 22 nt, Human
acugguaacaauggaagcuucu

SEQ ID NO: 921601 - RNA, 22 nt, Human
cagcacauuuacucagcccuca

SEQ ID NO: 921602 - RNA, 22 nt, Human
acacacagaguuuauacaggca

SEQ ID NO: 921603 - RNA, 22 nt, Human
cagggcucccucuggcucccag

SEQ ID NO: 921604 - RNA, 22 nt, Human
cuucauaaacucagaaggcagc

SEQ ID NO: 921605 - RNA, 22 nt, Human
acaauuacccuggcuugauaaa

SEQ ID NO: 921606 - RNA, 22 nt, Human
aaaugcugucaguguuauugga

SEQ ID NO: 921607 - RNA, 22 nt, Human
cauuuaagagaaauauuuaguu

SEQ ID NO: 921608 - RNA, 22 nt, Human
acucuuuuauaaagcaucuuga

SEQ ID NO: 921609 - RNA, 22 nt, Human
agacucugguccucuugaauuu

SEQ ID NO: 921610 - RNA, 22 nt, Human
ccacagugccuggaauucugca

SEQ ID NO: 921611 - RNA, 22 nt, Human
ugucacauugaauaugauuuau

SEQ ID NO: 921612 - RNA, 22 nt, Human
ugucacauguguggcauuuuuc

SEQ ID NO: 921613 - RNA, 22 nt, Human
caccagggcagcagccuagucu

SEQ ID NO: 921614 - RNA, 22 nt, Human
uggugagcucuuuagacuggga

SEQ ID NO: 921615 - RNA, 22 nt, Human
cacaugcaaguccucaguucua

SEQ ID NO: 921616 - RNA, 22 nt, Human
gcugcagcaagcccuccagggg

SEQ ID NO: 921617 - RNA, 22 nt, Human
uguggcaugguugcaaggacaa

SEQ ID NO: 921618 - RNA, 22 nt, Human
agaagggccagcuggacaccug

SEQ ID NO: 921619 - RNA, 22 nt, Human
uguucucuuuuccugcugagcc

SEQ ID NO: 921620 - RNA, 22 nt, Human
ucacaagauauuucaguccuuu

SEQ ID NO: 921621 - RNA, 22 nt, Human
ccuggcccuggaauagggcagg

SEQ ID NO: 921622 - RNA, 22 nt, Human
aagcugugugacuauuucugag

SEQ ID NO: 921623 - RNA, 22 nt, Human
ggcuuuauuaacucauccguaa

SEQ ID NO: 921624 - RNA, 22 nt, Human
gacacagaaugggugcucagua

SEQ ID NO: 921625 - RNA, 22 nt, Human
ugucauuuauucucuuauucua

SEQ ID NO: 921626 - RNA, 22 nt, Human
gccaggggacgcggagcgacga

SEQ ID NO: 921627 - RNA, 22 nt, Human
aacaucuccaaccuacauccac

SEQ ID NO: 921628 - RNA, 22 nt, Human
augaaguuccaguauaugcagu

SEQ ID NO: 921629 - RNA, 22 nt, Human
ugccugaguuuaacccucagag

SEQ ID NO: 921630 - RNA, 22 nt, Human
uggaauguauuaaguauugagu

SEQ ID NO: 921631 - RNA, 18 nt, Human
auuuaaugaacugaaagc

SEQ ID NO: 921632 - RNA, 22 nt, Human
ccagggaaacagcccaguguga

SEQ ID NO: 921633 - RNA, 22 nt, Human
caggagcucucaucgucagggc

SEQ ID NO: 921634 - RNA, 22 nt, Human
gccagguggucuggcuccagag

SEQ ID NO: 921635 - RNA, 22 nt, Human
cuuauguauaauguuccacaua

SEQ ID NO: 921636 - RNA, 22 nt, Human
aagccucuggggccucaucugu

SEQ ID NO: 921637 - RNA, 22 nt, Human
ugucugucuuuagugagauugc

SEQ ID NO: 921638 - RNA, 22 nt, Human
ugcagcuucuuguccugugauu

SEQ ID NO: 921639 - RNA, 22 nt, Human
uccuggcugucacucggguuga

SEQ ID NO: 921640 - RNA, 22 nt, Human
cuguccugcccacccugcaggg

SEQ ID NO: 921641 - RNA, 23 nt, Human
uuucucauccagagagucagucc

SEQ ID NO: 921642 - RNA, 19 nt, Human
ccacagagacuagaagaca

SEQ ID NO: 921643 - RNA, 22 nt, Human
caaaugcaggucagcagguguc

SEQ ID NO: 921644 - RNA, 22 nt, Human
ugucccagggaaggcccagcac

SEQ ID NO: 921645 - RNA, 22 nt, Human
cugggcugcaguuccugguccu

SEQ ID NO: 921646 - RNA, 22 nt, Human
acagggccauuggaggauuaua

SEQ ID NO: 921647 - RNA, 22 nt, Human
acaggaaagagcuaggcauagg

SEQ ID NO: 921648 - RNA, 22 nt, Human
cugucuccagggcaggugcagg

SEQ ID NO: 921649 - RNA, 22 nt, Human
aaguauuauuuaacaaauuugu

SEQ ID NO: 921650 - RNA, 22 nt, Human
cagaagaguagcugaacaaguu

SEQ ID NO: 921651 - RNA, 22 nt, Human
gugcagugacccuggagagcug

SEQ ID NO: 921652 - RNA, 22 nt, Human
uuccacagaugaaaauuaaguu

SEQ ID NO: 921653 - RNA, 22 nt, Human
augcgagugaugcagaguggcu

SEQ ID NO: 921654 - RNA, 19 nt, Human
aacagugaggcccagccug

SEQ ID NO: 921655 - RNA, 22 nt, Human
gagcugaaguuuccauuuguac

SEQ ID NO: 921656 - RNA, 22 nt, Human
cauccuucaaaggcuacaauua

SEQ ID NO: 921657 - RNA, 22 nt, Human
uccagggagauggcagaggcug

SEQ ID NO: 921658 - RNA, 17 nt, Human
gaacuuguucacuguga

SEQ ID NO: 921659 - RNA, 22 nt, Human
gcagugggccugaggaagggug

SEQ ID NO: 921660 - RNA, 22 nt, Human
uggacaguuacugagcuugagu

SEQ ID NO: 921661 - RNA, 22 nt, Human
gcacuggagaauggcuguauuc

SEQ ID NO: 921662 - RNA, 22 nt, Human
uucugugucuucuuguucugug

SEQ ID NO: 921663 - RNA, 22 nt, Human
gcugugcagaggugagaaucca

SEQ ID NO: 921664 - RNA, 18 nt, Human
acacaggcugacagcacc

SEQ ID NO: 921665 - RNA, 22 nt, Human
uggccagaagguuuaaaagagg

SEQ ID NO: 921666 - RNA, 22 nt, Human
cuuuaagacuaaauuagaguuu

SEQ ID NO: 921667 - RNA, 22 nt, Human
gccagccauaggccagcacugg

SEQ ID NO: 921668 - RNA, 22 nt, Human
ucuacaaauaaauuacuaugua

SEQ ID NO: 921669 - RNA, 22 nt, Human
uggcucaagugauccuccugcc

SEQ ID NO: 921670 - RNA, 22 nt, Human
ucucaggcucuuggaaccuguu

SEQ ID NO: 921671 - RNA, 22 nt, Human
cacaggaaaaauggguccuuua

SEQ ID NO: 921672 - RNA, 22 nt, Human
gaaggaagauucuguuggaauc

SEQ ID NO: 921673 - RNA, 22 nt, Human
ucucugaacuuccuggaaaggc

SEQ ID NO: 921674 - RNA, 22 nt, Human
gcucuccugugcagaugcugcu

SEQ ID NO: 921675 - RNA, 22 nt, Human
gcagugugacgcuguucuccgu

SEQ ID NO: 921676 - RNA, 22 nt, Human
caguuaaagcugcaugugucag

SEQ ID NO: 921677 - RNA, 22 nt, Human
acaggcugccuaccaaguauca

SEQ ID NO: 921678 - RNA, 22 nt, Human
uaacaacugaggaagaggcaga

SEQ ID NO: 921679 - RNA, 22 nt, Human
acccuggcucucuggccaccgc

SEQ ID NO: 921680 - RNA, 22 nt, Human
cucccucucaccggagcccugg

SEQ ID NO: 921681 - RNA, 22 nt, Human
cagauuuauuuuacauccuuca

SEQ ID NO: 921682 - RNA, 16 nt, Human
cacauauauuuauaug

SEQ ID NO: 921683 - RNA, 22 nt, Human
cuuuuuauagcuauguccuaug

SEQ ID NO: 921684 - RNA, 22 nt, Human
gaaagauauuuauuggcaacag

SEQ ID NO: 921685 - RNA, 22 nt, Human
acaggcagagucagguuggguu

SEQ ID NO: 921686 - RNA, 22 nt, Human
aacuguaaugaauuguucauga

SEQ ID NO: 921687 - RNA, 22 nt, Human
auuucaugugaagaagagauaa

SEQ ID NO: 921688 - RNA, 22 nt, Human
auugaacagcccagguuuaccu

SEQ ID NO: 921689 - RNA, 22 nt, Human
acaagagagacacuaggaaugu

SEQ ID NO: 921690 - RNA, 22 nt, Human
uacaguuucuguccuuguggag

SEQ ID NO: 921691 - RNA, 22 nt, Human
ccagcagaagcucccgcugggu

SEQ ID NO: 921692 - RNA, 22 nt, Human
gugccuggcagggucagcugcu

SEQ ID NO: 921693 - RNA, 22 nt, Human
uggaauguugggauuuaagugu

SEQ ID NO: 921694 - RNA, 17 nt, Human
uuaaaccauaaagaagg

SEQ ID NO: 921695 - RNA, 19 nt, Human
ugcuagaaauucugugacu

SEQ ID NO: 921696 - RNA, 22 nt, Human
aaggaauucccuuucugacaga

SEQ ID NO: 921697 - RNA, 22 nt, Human
acaugaaaacugguuccuucag

SEQ ID NO: 921698 - RNA, 22 nt, Human
aagccaggguuuguggaucuau

SEQ ID NO: 921699 - RNA, 22 nt, Human
gugugaaaguuccuaagacuau

SEQ ID NO: 921700 - RNA, 22 nt, Human
auguucccaagggauagaaaga

SEQ ID NO: 921701 - RNA, 22 nt, Human
acugaggcagaaggguaagugg

SEQ ID NO: 921702 - RNA, 22 nt, Human
uacccacagccucucuucaaaa

SEQ ID NO: 921703 - RNA, 22 nt, Human
ccagccagccuugaucugagua

SEQ ID NO: 921704 - RNA, 22 nt, Human
gaugagaaauggacaggagugg

SEQ ID NO: 921705 - RNA, 22 nt, Human
cucaggaaggaagcagggagcc

SEQ ID NO: 921706 - RNA, 22 nt, Human
gcuuaaauuguuuguggauagu

SEQ ID NO: 921707 - RNA, 22 nt, Human
aagagcaaguggguagugaagc

SEQ ID NO: 921708 - RNA, 22 nt, Human
uuacacagugcacaagcagagu

SEQ ID NO: 921709 - RNA, 22 nt, Human
aaaacucugcaguuaguuucua

SEQ ID NO: 921710 - RNA, 22 nt, Human
uucagaggcuguaugacuagau

SEQ ID NO: 921711 - RNA, 22 nt, Human
gugggcaguggggucuucugcc

SEQ ID NO: 921712 - RNA, 22 nt, Human
uugcugugucugauggcugaga

SEQ ID NO: 921713 - RNA, 22 nt, Human
cugggccuucauugcucuccca

SEQ ID NO: 921714 - RNA, 22 nt, Human
agaaaucaugucuuauuucuau

SEQ ID NO: 921715 - RNA, 22 nt, Human
auucuuguuuaauuugcauccc

SEQ ID NO: 921716 - RNA, 22 nt, Human
uuacaacauaugauaggagucu

SEQ ID NO: 921717 - RNA, 22 nt, Human
aaacagcuccuuaguuuccauc

SEQ ID NO: 921718 - RNA, 22 nt, Human
ggaagagaaaugagucaagacu

SEQ ID NO: 921719 - RNA, 22 nt, Human
aguggcugaagcaucaaaggca

SEQ ID NO: 921720 - RNA, 22 nt, Human
uauguucaucuggugcaucagu

SEQ ID NO: 921721 - RNA, 22 nt, Human
gcagauggagauaaauggaacu

SEQ ID NO: 921722 - RNA, 23 nt, Human
cauggggagcagugcuccugacc

SEQ ID NO: 921723 - RNA, 19 nt, Human
uucuuuccacaucuucucu

SEQ ID NO: 921724 - RNA, 22 nt, Human
aacaaaugauuguugguuggag

SEQ ID NO: 921725 - RNA, 22 nt, Human
gcccagggcgauggucggggcc

SEQ ID NO: 921726 - RNA, 22 nt, Human
gucaauaauugauagauauugg

SEQ ID NO: 921727 - RNA, 22 nt, Human
agugaaaucagguuuugacugc

SEQ ID NO: 921728 - RNA, 22 nt, Human
cccaggcugggaacgauucuag

SEQ ID NO: 921729 - RNA, 22 nt, Human
gugccagcaguuauggugauuu

SEQ ID NO: 921730 - RNA, 22 nt, Human
uggggccuggucagagcugcac

SEQ ID NO: 921731 - RNA, 22 nt, Human
cccaggaggaggaaaaagcucg

SEQ ID NO: 921732 - RNA, 23 nt, Human
uguaacaauucccagccuuugcc

SEQ ID NO: 921733 - RNA, 22 nt, Human
augauguacuaguuaaauauua

SEQ ID NO: 921734 - RNA, 22 nt, Human
ugcguggcgcagcgugugggau

SEQ ID NO: 921735 - RNA, 22 nt, Human
uuauuuugguaaauguuugccu

SEQ ID NO: 921736 - RNA, 22 nt, Human
uauccacguaugauaaaacucu

SEQ ID NO: 921737 - RNA, 22 nt, Human
acacuuugggcuggauaauuau

SEQ ID NO: 921738 - RNA, 22 nt, Human
ccaaggcuccucagcuggucuu

SEQ ID NO: 921739 - RNA, 22 nt, Human
gauuugacaccuggggcauaua

SEQ ID NO: 921740 - RNA, 22 nt, Human
aggcuugaaaugaaaucuguaa

SEQ ID NO: 921741 - RNA, 19 nt, Human
agggcuaggcacauagggc

SEQ ID NO: 921742 - RNA, 22 nt, Human
uauuuuguaauuggucauagcu

SEQ ID NO: 921743 - RNA, 22 nt, Human
ggucaucuguauguccucagcu

SEQ ID NO: 921744 - RNA, 19 nt, Human
uccaaggcauggcccagug

SEQ ID NO: 921745 - RNA, 18 nt, Human
cgggcgggcgccuggccc

SEQ ID NO: 921746 - RNA, 22 nt, Human
agacccuggagaaugaaagugc

SEQ ID NO: 921747 - RNA, 23 nt, Human
uguaucuguacuauuccugccuc

SEQ ID NO: 921748 - RNA, 21 nt, Human
augcauggauuucagugagag

SEQ ID NO: 921749 - RNA, 22 nt, Human
uaguuuacuguucacuuugccc

SEQ ID NO: 921750 - RNA, 22 nt, Human
cugucuuuucauacuuucccuc

SEQ ID NO: 921751 - RNA, 22 nt, Human
gagccuggauugaagugggugg

SEQ ID NO: 921752 - RNA, 22 nt, Human
gcugcccauuccacuggauggu

SEQ ID NO: 921753 - RNA, 22 nt, Human
aaauacacguacauguguaaaa

SEQ ID NO: 921754 - RNA, 22 nt, Human
aauguuaaaaccuucagugcuu

SEQ ID NO: 921755 - RNA, 22 nt, Human
cagcugcccaggccaccuggag

SEQ ID NO: 921756 - RNA, 22 nt, Human
ucauaaguaauuuaaacauucc

SEQ ID NO: 921757 - RNA, 22 nt, Human
aagcugucaauguaucuagucu

SEQ ID NO: 921758 - RNA, 22 nt, Human
aaaugcuacacaggaauucuca

SEQ ID NO: 921759 - RNA, 22 nt, Human
aaacaagagucuugcuccaccu

SEQ ID NO: 921760 - RNA, 22 nt, Human
ucuggaauucucaaguccugga

SEQ ID NO: 921761 - RNA, 22 nt, Human
gcagcuuuaaacauuggaaaua

SEQ ID NO: 921762 - RNA, 22 nt, Human
aacaguacaacuccacaagacu

SEQ ID NO: 921763 - RNA, 19 nt, Human
gugggccaggcagaaggcu

SEQ ID NO: 921764 - RNA, 19 nt, Human
aaaaggaauauucuuuggg

SEQ ID NO: 921765 - RNA, 22 nt, Human
agugcuggauuacaggcgugag

SEQ ID NO: 921766 - RNA, 22 nt, Human
cgagugucccuaccauuuccua

SEQ ID NO: 921767 - RNA, 18 nt, Human
gagcccugggagaucucu

SEQ ID NO: 921768 - RNA, 22 nt, Human
uguguugugacauucuuggaug

SEQ ID NO: 921769 - RNA, 22 nt, Human
ucaauagcaaucaagccuucca

SEQ ID NO: 921770 - RNA, 22 nt, Human
ugcuggcuaauggaaaccagau

SEQ ID NO: 921771 - RNA, 22 nt, Human
uuuacacauaccucuuuaaagu

SEQ ID NO: 921772 - RNA, 22 nt, Human
cagaagccugccucagaugcac

SEQ ID NO: 921773 - RNA, 22 nt, Human
gccugcuggacauuggccggcc

SEQ ID NO: 921774 - RNA, 22 nt, Human
aagagugacuuuucagcuguga

SEQ ID NO: 921775 - RNA, 22 nt, Human
auggaauaggcugcucuuuaaa

SEQ ID NO: 921776 - RNA, 22 nt, Human
ucugaggccuugggacagaagu

SEQ ID NO: 921777 - RNA, 22 nt, Human
ggaggugguggcagugacaauu

SEQ ID NO: 921778 - RNA, 22 nt, Human
guggucccuucuggcccugguc

SEQ ID NO: 921779 - RNA, 22 nt, Human
cuggggggcuacugacagagga

SEQ ID NO: 921780 - RNA, 23 nt, Human
uucuaagguaugguuuauaccug

SEQ ID NO: 921781 - RNA, 22 nt, Human
caaaauucugcauuucuaauaa

SEQ ID NO: 921782 - RNA, 22 nt, Human
gcugggcagccuggccgcugcc

SEQ ID NO: 921783 - RNA, 22 nt, Human
agcucagaaaugccaguaggua

SEQ ID NO: 921784 - RNA, 19 nt, Human
cugauguuccagagaagcu

SEQ ID NO: 921785 - RNA, 22 nt, Human
gcagcugcgcugguguggggca

SEQ ID NO: 921786 - RNA, 22 nt, Human
uuuucauaguaauggugcaugu

SEQ ID NO: 921787 - RNA, 22 nt, Human
cuggaagggucuacuuagcaga

SEQ ID NO: 921788 - RNA, 22 nt, Human
aggcaguucucguguguguccc

SEQ ID NO: 921789 - RNA, 22 nt, Human
uuuccucuccaccaggaggucu

SEQ ID NO: 921790 - RNA, 22 nt, Human
gcaguguguagaguuuaggaaa

SEQ ID NO: 921791 - RNA, 22 nt, Human
caugaagcccucaucagucuga

SEQ ID NO: 921792 - RNA, 22 nt, Human
ccacugagaagggguugggguc

SEQ ID NO: 921793 - RNA, 22 nt, Human
gugcugugucuaucaggaauaa

SEQ ID NO: 921794 - RNA, 22 nt, Human
cuucagaagaaaagcagugugu

SEQ ID NO: 921795 - RNA, 22 nt, Human
uuucugaacuugguacuggagc

SEQ ID NO: 921796 - RNA, 22 nt, Human
gcacuuccaucugucaccaggu

SEQ ID NO: 921797 - RNA, 22 nt, Human
gacagugucccucuggggugga

SEQ ID NO: 921798 - RNA, 19 nt, Human
aaaagucuauucaauuaca

SEQ ID NO: 921799 - RNA, 21 nt, Human
agggccagaucaccaaggagc

SEQ ID NO: 921800 - RNA, 22 nt, Human
ccucagagacugcaucuucccu

SEQ ID NO: 921801 - RNA, 22 nt, Human
uguauauguuuguauguacaca

SEQ ID NO: 921802 - RNA, 22 nt, Human
aguuauaugugaaaacacguau

SEQ ID NO: 921803 - RNA, 22 nt, Human
cccuggaacuccuaggcaagca

SEQ ID NO: 921804 - RNA, 22 nt, Human
ugagacaauaaggcugagaagc

SEQ ID NO: 921805 - RNA, 22 nt, Human
ccuuggcaggcacguccugcgg

SEQ ID NO: 921806 - RNA, 21 nt, Human
guuuuucagcccugaggugag

SEQ ID NO: 921807 - RNA, 22 nt, Human
uucucaagaacauauguagggu

SEQ ID NO: 921808 - RNA, 22 nt, Human
ccugagugcuuccagagucaug

SEQ ID NO: 921809 - RNA, 22 nt, Human
cagagcugcucaugguggccag

SEQ ID NO: 921810 - RNA, 22 nt, Human
cugcagaaauauggaugugaua

SEQ ID NO: 921811 - RNA, 22 nt, Human
ggucccaggaagugcggcggcg

SEQ ID NO: 921812 - RNA, 22 nt, Human
aguuuaaaucauguuuuguaac

SEQ ID NO: 921813 - RNA, 22 nt, Human
uuccuucuuuuacaccauaaau

SEQ ID NO: 921814 - RNA, 18 nt, Human
gagggaguagcugagguu

SEQ ID NO: 921815 - RNA, 22 nt, Human
gcucuguuuaucccugacaauu

SEQ ID NO: 921816 - RNA, 19 nt, Human
agcuccugauugugccucg

SEQ ID NO: 921817 - RNA, 22 nt, Human
uggcagagaaccugggcuuugu

SEQ ID NO: 921818 - RNA, 20 nt, Human
cuaaacucugcagauuuagu

SEQ ID NO: 921819 - RNA, 22 nt, Human
auucaguguggacccauuuaaa

SEQ ID NO: 921820 - RNA, 19 nt, Human
gcugcagcagagaaacugg

SEQ ID NO: 921821 - RNA, 22 nt, Human
ccagggcucugcuucugccaug

SEQ ID NO: 921822 - RNA, 22 nt, Human
agaguccacccuggggucaggc

SEQ ID NO: 921823 - RNA, 22 nt, Human
gucuaaagcccuuagaauagua

SEQ ID NO: 921824 - RNA, 22 nt, Human
agcugcccugggucuugcugcu

SEQ ID NO: 921825 - RNA, 22 nt, Human
aaaguuggauuucauccucaug

SEQ ID NO: 921826 - RNA, 22 nt, Human
ggaagcugcuuagcuaauguag

SEQ ID NO: 921827 - RNA, 22 nt, Human
caacauauaauauuugaguucu

SEQ ID NO: 921828 - RNA, 22 nt, Human
cuugcuuuccaaaugacucacu

SEQ ID NO: 921829 - RNA, 19 nt, Human
auagaguagaguaucuguu

SEQ ID NO: 921830 - RNA, 22 nt, Human
auuguacauaaaauguaugucu

SEQ ID NO: 921831 - RNA, 22 nt, Human
agcagggcuggauuuggcaaga

SEQ ID NO: 921832 - RNA, 22 nt, Human
auauuugucaauucacuguuca

SEQ ID NO: 921833 - RNA, 22 nt, Human
ugucuuauuuugaaguguucac

SEQ ID NO: 921834 - RNA, 22 nt, Human
ugcggaaggcagcgcagggugg

SEQ ID NO: 921835 - RNA, 22 nt, Human
uagaaagaucuguaggcaagag

SEQ ID NO: 921836 - RNA, 22 nt, Human
uacacaguaaaugguaaauaca

SEQ ID NO: 921837 - RNA, 22 nt, Human
ggcagugacuguucagacgucc

SEQ ID NO: 921838 - RNA, 22 nt, Human
augucaaagcagacugagagcg

SEQ ID NO: 921839 - RNA, 22 nt, Human
gcucagcuacuuacagguggcu

SEQ ID NO: 921840 - RNA, 22 nt, Human
augccuuuaagagauacugagg

SEQ ID NO: 921841 - RNA, 22 nt, Human
uggaggaaguugcuggaaguca

SEQ ID NO: 921842 - RNA, 22 nt, Human
ccaggcugugcuuuucauaaau

SEQ ID NO: 921843 - RNA, 22 nt, Human
cagaggcugcucuggguggcau

SEQ ID NO: 921844 - RNA, 22 nt, Human
caguugcagaggcagagugcua

SEQ ID NO: 921845 - RNA, 17 nt, Human
caagagagaugacugga

SEQ ID NO: 921846 - RNA, 22 nt, Human
uuauuuacaacucuucucuucc

SEQ ID NO: 921847 - RNA, 19 nt, Human
ccuggcugugaagccugca

SEQ ID NO: 921848 - RNA, 22 nt, Human
uuggaagauucugugucuggug

SEQ ID NO: 921849 - RNA, 20 nt, Human
ugcguguguauuuauuuucu

SEQ ID NO: 921850 - RNA, 22 nt, Human
accugccuaucagcugccugcu

SEQ ID NO: 921851 - RNA, 22 nt, Human
gagaagaacuugggcaaaguca

SEQ ID NO: 921852 - RNA, 22 nt, Human
uggagaauucuauguugagggg

SEQ ID NO: 921853 - RNA, 22 nt, Human
gugaggagcugacacuggggug

SEQ ID NO: 921854 - RNA, 22 nt, Human
auuucucacucacaguccaugu

SEQ ID NO: 921855 - RNA, 22 nt, Human
aucucaacuaagccuaacuuuu

SEQ ID NO: 921856 - RNA, 22 nt, Human
cugggucuggccacaggaagua

SEQ ID NO: 921857 - RNA, 22 nt, Human
uucauugaguauagggguauac

SEQ ID NO: 921858 - RNA, 22 nt, Human
gcaaggcagcgcggaguagcua

SEQ ID NO: 921859 - RNA, 22 nt, Human
ccucuggcagccagccaguugu

SEQ ID NO: 921860 - RNA, 22 nt, Human
gggcuccaccuagggacacugg

SEQ ID NO: 921861 - RNA, 22 nt, Human
gugcucuaauaaagccugacau

SEQ ID NO: 921862 - RNA, 22 nt, Human
uggcugaguucuccaggaguag

SEQ ID NO: 921863 - RNA, 22 nt, Human
auuucaugagcuaauggaucuc

SEQ ID NO: 921864 - RNA, 22 nt, Human
ucuggauggucagcucuuccug

SEQ ID NO: 921865 - RNA, 22 nt, Human
gagcacaggcugcugugaacug

SEQ ID NO: 921866 - RNA, 22 nt, Human
gaccccaagggaugcgugugcu

SEQ ID NO: 921867 - RNA, 22 nt, Human
uuaaauguuuaaucuaacuuga

SEQ ID NO: 921868 - RNA, 20 nt, Human
uggcccaguggggcagggug

SEQ ID NO: 921869 - RNA, 22 nt, Human
agcugcucuucauuucccccca

SEQ ID NO: 921870 - RNA, 22 nt, Human
gugucuggaacgggugguacuc

SEQ ID NO: 921871 - RNA, 22 nt, Human
augacaugaggcaucuuuggag

SEQ ID NO: 921872 - RNA, 21 nt, Human
gcucaggcucuugacagagca

SEQ ID NO: 921873 - RNA, 22 nt, Human
uuguacaaguuuugagcuuaag

SEQ ID NO: 921874 - RNA, 22 nt, Human
cccaggcucccaggugggacaa

SEQ ID NO: 921875 - RNA, 22 nt, Human
uuaaaguauagaggacaaaaac

SEQ ID NO: 921876 - RNA, 22 nt, Human
acccugggcacaccauuucccc

SEQ ID NO: 921877 - RNA, 22 nt, Human
ucgcugaggcugcacggcugcc

SEQ ID NO: 921878 - RNA, 17 nt, Human
acacagggagagggagc

SEQ ID NO: 921879 - RNA, 22 nt, Human
cagcgucucguugugggccucg

SEQ ID NO: 921880 - RNA, 22 nt, Human
auaauuuaauuuucacaguggu

SEQ ID NO: 921881 - RNA, 22 nt, Human
auguuuuuggaaaugggaacau

SEQ ID NO: 921882 - RNA, 22 nt, Human
uauuaaauauaucuguuaguug

SEQ ID NO: 921883 - RNA, 20 nt, Human
agcuggccaauucuauuacu

SEQ ID NO: 921884 - RNA, 22 nt, Human
ucagaaucuaaauaggcuccag

SEQ ID NO: 921885 - RNA, 22 nt, Human
agagacauggagaggcaaaguu

SEQ ID NO: 921886 - RNA, 22 nt, Human
cccugccuacaggguuuucuuu

SEQ ID NO: 921887 - RNA, 22 nt, Human
augcuuguacuaaaaaaauauu

SEQ ID NO: 921888 - RNA, 18 nt, Human
cugaggcuggcaggagcc

SEQ ID NO: 921889 - RNA, 22 nt, Human
auugucuaauugacuuggugug

SEQ ID NO: 921890 - RNA, 22 nt, Human
ugagaacggauacuaagggcug

SEQ ID NO: 921891 - RNA, 22 nt, Human
ugagaccuguagcuucacagag

SEQ ID NO: 921892 - RNA, 22 nt, Human
ucaucuguggcugcuuuugugc

SEQ ID NO: 921893 - RNA, 22 nt, Human
uaaagugcugggauuauaggcc

SEQ ID NO: 921894 - RNA, 22 nt, Human
cauuaucucuucuauaugcuag

SEQ ID NO: 921895 - RNA, 23 nt, Human
uucaugaguuggacaagacuggg

SEQ ID NO: 921896 - RNA, 22 nt, Human
ggacaggggcguggggauuguu

SEQ ID NO: 921897 - RNA, 22 nt, Human
cugcuggagggagcugauagug

SEQ ID NO: 921898 - RNA, 22 nt, Human
cucaaaaugguuaauuuuaaua

SEQ ID NO: 921899 - RNA, 22 nt, Human
uagggcugccauuugcuuuucu

SEQ ID NO: 921900 - RNA, 22 nt, Human
ugcuugcauccaacauuaaggg

SEQ ID NO: 921901 - RNA, 22 nt, Human
gcugcugucagugguggcaguu

SEQ ID NO: 921902 - RNA, 22 nt, Human
augacaaauucagaccauagca

SEQ ID NO: 921903 - RNA, 22 nt, Human
uuccuugggagaaaaaauauau

SEQ ID NO: 921904 - RNA, 22 nt, Human
agaaaauaaauugaugguggaa

SEQ ID NO: 921905 - RNA, 21 nt, Human
aggaaaggccagcacguaggg

SEQ ID NO: 921906 - RNA, 22 nt, Human
ccaggagcauuaagagaacaua

SEQ ID NO: 921907 - RNA, 22 nt, Human
uagaaaugcaguguacuguguc

SEQ ID NO: 921908 - RNA, 22 nt, Human
agcaggugagcacagccaggcu

SEQ ID NO: 921909 - RNA, 22 nt, Human
aaagccuucugucuagcagaua

SEQ ID NO: 921910 - RNA, 22 nt, Human
auuucagcagcccauguuugga

SEQ ID NO: 921911 - RNA, 22 nt, Human
acaguguuuucuuaaggagaaa

SEQ ID NO: 921912 - RNA, 22 nt, Human
gcccaggaagccaccgggaagu

SEQ ID NO: 921913 - RNA, 22 nt, Human
gcauuuuucaucccucuugggu

SEQ ID NO: 921914 - RNA, 22 nt, Human
aaaguuuuagcuguccaguucc

SEQ ID NO: 921915 - RNA, 22 nt, Human
uuuccuccuagccuccagccgc

SEQ ID NO: 921916 - RNA, 22 nt, Human
ccacauuucuucacuuguccca

SEQ ID NO: 921917 - RNA, 22 nt, Human
gagaagcaauuuccaacugugc

SEQ ID NO: 921918 - RNA, 22 nt, Human
caugcuguugaauaugacauug

SEQ ID NO: 921919 - RNA, 22 nt, Human
agaaccucaauuauuuuugcac

SEQ ID NO: 921920 - RNA, 22 nt, Human
ucacaggguaucugggauggau

SEQ ID NO: 921921 - RNA, 22 nt, Human
cuggcuggaaguuagagaacuu

SEQ ID NO: 921922 - RNA, 22 nt, Human
uccauuaaugauuauuucugug

SEQ ID NO: 921923 - RNA, 22 nt, Human
uacaguacacagguaccaagcu

SEQ ID NO: 921924 - RNA, 17 nt, Human
acauggcaguucacgcu

SEQ ID NO: 921925 - RNA, 22 nt, Human
ggaagguuuuucuccugguggg

SEQ ID NO: 921926 - RNA, 20 nt, Human
cugaaagacguaacagugca

SEQ ID NO: 921927 - RNA, 22 nt, Human
cagaggcacaagaaagcaaggc

SEQ ID NO: 921928 - RNA, 22 nt, Human
agacacagcugcaggagguggg

SEQ ID NO: 921929 - RNA, 22 nt, Human
uggcagugucuugcuggggcag

SEQ ID NO: 921930 - RNA, 22 nt, Human
acaugaaugcagccauaacacu

SEQ ID NO: 921931 - RNA, 22 nt, Human
acagagucaugguagucaaagg

SEQ ID NO: 921932 - RNA, 22 nt, Human
gggaguggguuuggccuaggcc

SEQ ID NO: 921933 - RNA, 22 nt, Human
uuccuuacauucauauggcuuc

SEQ ID NO: 921934 - RNA, 22 nt, Human
ucuucaaaaaauauccaucagu

SEQ ID NO: 921935 - RNA, 22 nt, Human
uuguucaucguccuugcucugu

SEQ ID NO: 921936 - RNA, 18 nt, Human
cuaagaggucguuucuca

SEQ ID NO: 921937 - RNA, 22 nt, Human
gagcuuggaagcagauccucac

SEQ ID NO: 921938 - RNA, 22 nt, Human
guauauaugugugaacauguau

SEQ ID NO: 921939 - RNA, 20 nt, Human
gccugagcuauugccaggau

SEQ ID NO: 921940 - RNA, 19 nt, Human
gcugugggacagcagggug

SEQ ID NO: 921941 - RNA, 22 nt, Human
cuggggcugcggacgggagccc

SEQ ID NO: 921942 - RNA, 22 nt, Human
ccuggcucuucgggaguuuguu

SEQ ID NO: 921943 - RNA, 22 nt, Human
cuguccugaguucuuggagguc

SEQ ID NO: 921944 - RNA, 22 nt, Human
ucugccuggcucauggcaguga

SEQ ID NO: 921945 - RNA, 18 nt, Human
gucuuuucucccuuccuc

SEQ ID NO: 921946 - RNA, 22 nt, Human
uggaaaauuaguagugaaaggc

SEQ ID NO: 921947 - RNA, 20 nt, Human
augccaagcuaucuagaauc

SEQ ID NO: 921948 - RNA, 19 nt, Human
acagacauuugcaauuagc

SEQ ID NO: 921949 - RNA, 22 nt, Human
gcaggaagcauagaagaaugcc

SEQ ID NO: 921950 - RNA, 22 nt, Human
uguaaaaggaaaucaaagcacu

SEQ ID NO: 921951 - RNA, 22 nt, Human
uaugaauauaccacaauuuagg

SEQ ID NO: 921952 - RNA, 22 nt, Human
acccuggcagccuucuguccug

SEQ ID NO: 921953 - RNA, 22 nt, Human
augcauauguacccauguucug

SEQ ID NO: 921954 - RNA, 22 nt, Human
aaacuagauuaccacugcuaga

SEQ ID NO: 921955 - RNA, 22 nt, Human
aagaguuugaccugugccaucc

SEQ ID NO: 921956 - RNA, 22 nt, Human
cugaggccuggugaggugguga

SEQ ID NO: 921957 - RNA, 22 nt, Human
ugcacuuggcugugaucucuag

SEQ ID NO: 921958 - RNA, 22 nt, Human
ugcugcuguauccuuaguguca

SEQ ID NO: 921959 - RNA, 22 nt, Human
auuggucuaaaguuaagaagau

SEQ ID NO: 921960 - RNA, 22 nt, Human
uagaaagcguuaaaucuacaga

SEQ ID NO: 921961 - RNA, 23 nt, Human
cucccuggaguuucuggaagaug

SEQ ID NO: 921962 - RNA, 22 nt, Human
gacaaaugaaugaugaacacca

SEQ ID NO: 921963 - RNA, 22 nt, Human
agggggcugccaaggaauguaa

SEQ ID NO: 921964 - RNA, 22 nt, Human
agaggucagaacaggaaagugu

SEQ ID NO: 921965 - RNA, 22 nt, Human
agggccagaaucccucagucua

SEQ ID NO: 921966 - RNA, 22 nt, Human
uauuuaaccaguuaaauuucca

SEQ ID NO: 921967 - RNA, 22 nt, Human
agcucucccaccuucuucuuac

SEQ ID NO: 921968 - RNA, 22 nt, Human
agcaucugcauaaugccuuccc

SEQ ID NO: 921969 - RNA, 22 nt, Human
uuuggagagaguuaaauauguu

SEQ ID NO: 921970 - RNA, 22 nt, Human
uaaagcacauaucuuacaauaa

SEQ ID NO: 921971 - RNA, 22 nt, Human
aguauauugguguuauuccuca

SEQ ID NO: 921972 - RNA, 22 nt, Human
ggagagcagggaggcugcucug

SEQ ID NO: 921973 - RNA, 22 nt, Human
gacauuuaugaaggagauaugc

SEQ ID NO: 921974 - RNA, 22 nt, Human
uugcauuugagaaaguucuccu

SEQ ID NO: 921975 - RNA, 22 nt, Human
agcugagguuaguauaaaugug

SEQ ID NO: 921976 - RNA, 22 nt, Human
aggcaauagguuccucaucuuu

SEQ ID NO: 921977 - RNA, 23 nt, Human
ucuguacacaucagcaucuccca

SEQ ID NO: 921978 - RNA, 22 nt, Human
uucaaaugguuagacuguuagc

SEQ ID NO: 921979 - RNA, 22 nt, Human
ucaugcaaacucuaguccuuua

SEQ ID NO: 921980 - RNA, 22 nt, Human
uaaacuacuaggaugaauuuuu

SEQ ID NO: 921981 - RNA, 19 nt, Human
guuuuguuugcagaacuua

SEQ ID NO: 921982 - RNA, 22 nt, Human
uguaaggugcucauguauuucu

SEQ ID NO: 921983 - RNA, 22 nt, Human
ugucaacagauacuagagagcu

SEQ ID NO: 921984 - RNA, 22 nt, Human
ggucccagaauugguuagcaca

SEQ ID NO: 921985 - RNA, 22 nt, Human
gacacaguaauguguuucaucu

SEQ ID NO: 921986 - RNA, 22 nt, Human
cagauaaaggcuuacuaguagu

SEQ ID NO: 921987 - RNA, 22 nt, Human
ggacccugggcagcuggcugcu

SEQ ID NO: 921988 - RNA, 22 nt, Human
aaggguggauuucugagcucua

SEQ ID NO: 921989 - RNA, 22 nt, Human
uacuucaaacaaugguacaaac

SEQ ID NO: 921990 - RNA, 22 nt, Human
uugcuuuccgucaugugcuaau

SEQ ID NO: 921991 - RNA, 22 nt, Human
agugcagggggaaagggugucu

SEQ ID NO: 921992 - RNA, 22 nt, Human
ucuuuggaucccaacuggcugg

SEQ ID NO: 921993 - RNA, 22 nt, Human
cagcacaguuucccccaugagc

SEQ ID NO: 921994 - RNA, 22 nt, Human
uguuugacaccucaguguuucu

SEQ ID NO: 921995 - RNA, 20 nt, Human
agucccuuuggucagguauu

SEQ ID NO: 921996 - RNA, 22 nt, Human
aaaggagaguagguuacuccau

SEQ ID NO: 921997 - RNA, 22 nt, Human
ccacaaaguugcugaguuucug

SEQ ID NO: 921998 - RNA, 22 nt, Human
cgaggcagaggcugaaacggcu

SEQ ID NO: 921999 - RNA, 22 nt, Human
acacuuuaucucaucucagaca

SEQ ID NO: 922000 - RNA, 22 nt, Human
cauauuaaggucuguaaggggu

SEQ ID NO: 922001 - RNA, 22 nt, Human
acuuagaagaugcaguaaagca

SEQ ID NO: 922002 - RNA, 22 nt, Human
uagaaacaagggagaggauucu

SEQ ID NO: 922003 - RNA, 22 nt, Human
aggguugccucugagugcuccg

SEQ ID NO: 922004 - RNA, 22 nt, Human
guggggcaugcacgcugcuccu

SEQ ID NO: 922005 - RNA, 22 nt, Human
aggcugagcugguagugaguac

SEQ ID NO: 922006 - RNA, 22 nt, Human
gcuguggccuaguuuguuauau

SEQ ID NO: 922007 - RNA, 22 nt, Human
gcccagaaguugaggcugcagu

SEQ ID NO: 922008 - RNA, 19 nt, Human
aacaucuuuccaguagagg

SEQ ID NO: 922009 - RNA, 22 nt, Human
ugggaaggacgugucaguggca

SEQ ID NO: 922010 - RNA, 22 nt, Human
ggaugcaggaggucggggagca

SEQ ID NO: 922011 - RNA, 22 nt, Human
acugcagccuugaacucugggc

SEQ ID NO: 922012 - RNA, 22 nt, Human
gcagccuuccguggaccuggac

SEQ ID NO: 922013 - RNA, 22 nt, Human
aggagagaauguuccaggcuug

SEQ ID NO: 922014 - RNA, 22 nt, Human
acugagggagagucuuagguug

SEQ ID NO: 922015 - RNA, 22 nt, Human
aaucuaaggacuuagcauugcu

SEQ ID NO: 922016 - RNA, 22 nt, Human
uuagcagcuuagacugccuggg

SEQ ID NO: 922017 - RNA, 22 nt, Human
aguggcuucauuucugccagaa

SEQ ID NO: 922018 - RNA, 22 nt, Human
uauguguauugagcauuguuac

SEQ ID NO: 922019 - RNA, 16 nt, Human
auuuccuugugaguuu

SEQ ID NO: 922020 - RNA, 22 nt, Human
ggaaaggggccuggaucuuuug

SEQ ID NO: 922021 - RNA, 22 nt, Human
aauccuggaauacaagagugaa

SEQ ID NO: 922022 - RNA, 22 nt, Human
uggcccaggcgaggugggcaga

SEQ ID NO: 922023 - RNA, 22 nt, Human
ugucacaguuuguacuuuauag

SEQ ID NO: 922024 - RNA, 22 nt, Human
ccagggcaggggcuggaguuca

SEQ ID NO: 922025 - RNA, 22 nt, Human
ucacuuugacggccaacuucua

SEQ ID NO: 922026 - RNA, 22 nt, Human
agagucaccuuuuccucaggau

SEQ ID NO: 922027 - RNA, 22 nt, Human
uauuccaagucacuguguccug

SEQ ID NO: 922028 - RNA, 22 nt, Human
ugcagaccucccauggcugccu

SEQ ID NO: 922029 - RNA, 22 nt, Human
cugaggccucuccuuggcuugu

SEQ ID NO: 922030 - RNA, 22 nt, Human
cccagggacagaugggcagcua

SEQ ID NO: 922031 - RNA, 22 nt, Human
uuauaggaaauaguucaugcga

SEQ ID NO: 922032 - RNA, 22 nt, Human
ccagugggagggagcuaggcca

SEQ ID NO: 922033 - RNA, 22 nt, Human
agcugcagauucucuacuucau

SEQ ID NO: 922034 - RNA, 22 nt, Human
gcguggugcugcccugcacaca

SEQ ID NO: 922035 - RNA, 20 nt, Human
gccuggaggcaaugggaaga

SEQ ID NO: 922036 - RNA, 22 nt, Human
uacagcaaugccugaaauagua

SEQ ID NO: 922037 - RNA, 22 nt, Human
agauaauguucugauccauuuc

SEQ ID NO: 922038 - RNA, 22 nt, Human
cagugcaguuucccagaugcug

SEQ ID NO: 922039 - RNA, 22 nt, Human
ugcaggcagggccagcgugagg

SEQ ID NO: 922040 - RNA, 22 nt, Human
augacacauaaaacaaggacug

SEQ ID NO: 922041 - RNA, 22 nt, Human
aaaaccugauugaauucuauuu

SEQ ID NO: 922042 - RNA, 22 nt, Human
ucaggaagugcugaggcugcuu

SEQ ID NO: 922043 - RNA, 22 nt, Human
gagguccacugaggcaacaggg

SEQ ID NO: 922044 - RNA, 22 nt, Human
caccccaaguucuguccacugc

SEQ ID NO: 922045 - RNA, 22 nt, Human
gaaauauacaugaagucggcug

SEQ ID NO: 922046 - RNA, 23 nt, Human
agcagcaggagguauugauaagg

SEQ ID NO: 922047 - RNA, 22 nt, Human
caguucaaaguuaagcagcagu

SEQ ID NO: 922048 - RNA, 22 nt, Human
acagcuguauucaaguugcaag

SEQ ID NO: 922049 - RNA, 22 nt, Human
uggcuggagccccucaagagca

SEQ ID NO: 922050 - RNA, 22 nt, Human
agcacauuuaaguaugaaauau

SEQ ID NO: 922051 - RNA, 19 nt, Human
uccugcagaccagaccugu

SEQ ID NO: 922052 - RNA, 22 nt, Human
guucacaagcuggguuucugca

SEQ ID NO: 922053 - RNA, 22 nt, Human
agccagauccaggagacagcuc

SEQ ID NO: 922054 - RNA, 22 nt, Human
aacaguuugccugaaauguauu

SEQ ID NO: 922055 - RNA, 22 nt, Human
uggaagcggacguuguggggug

SEQ ID NO: 922056 - RNA, 22 nt, Human
gagugucuauguuuagucuuuc

SEQ ID NO: 922057 - RNA, 21 nt, Human
aucacauuggcuguuauuauu

SEQ ID NO: 922058 - RNA, 23 nt, Human
ucccagggaaggugagcgaggcu

SEQ ID NO: 922059 - RNA, 22 nt, Human
ggagacaguauggcuuguagcu

SEQ ID NO: 922060 - RNA, 22 nt, Human
gggcucugguacuuccuggcuc

SEQ ID NO: 922061 - RNA, 22 nt, Human
gcuuuaugcuacgauuucuagu

SEQ ID NO: 922062 - RNA, 22 nt, Human
cagugcagguuuagggcugggg

SEQ ID NO: 922063 - RNA, 22 nt, Human
uagcaaagaagauauuauugca

SEQ ID NO: 922064 - RNA, 22 nt, Human
ucuucauguugcuguagggaga

SEQ ID NO: 922065 - RNA, 22 nt, Human
uagcugucaccagaaauggcca

SEQ ID NO: 922066 - RNA, 22 nt, Human
agucagagugugcaggccggcu

SEQ ID NO: 922067 - RNA, 22 nt, Human
uccucagaugcucuuggacgcc

SEQ ID NO: 922068 - RNA, 22 nt, Human
cuuuaguucuagaaagugaaac

SEQ ID NO: 922069 - RNA, 22 nt, Human
aaaugcauguauguaauaugcu

SEQ ID NO: 922070 - RNA, 22 nt, Human
uagauucuggagagacagcagu

SEQ ID NO: 922071 - RNA, 22 nt, Human
gaaaugacaaggacauuccugu

SEQ ID NO: 922072 - RNA, 22 nt, Human
ucccaggguuacagccagggca

SEQ ID NO: 922073 - RNA, 22 nt, Human
ggggaagucggagccugagcac

SEQ ID NO: 922074 - RNA, 22 nt, Human
auuugaaguaaguaaugaguau

SEQ ID NO: 922075 - RNA, 22 nt, Human
aaucaggaugacugucauuuca

SEQ ID NO: 922076 - RNA, 22 nt, Human
cacuucucugauaaucucaguu

SEQ ID NO: 922077 - RNA, 22 nt, Human
uacuuuuaaaauucacagguau

SEQ ID NO: 922078 - RNA, 22 nt, Human
cacagaaauuauuaggaugcuu

SEQ ID NO: 922079 - RNA, 22 nt, Human
uuccacagucauccugggaauu

SEQ ID NO: 922080 - RNA, 22 nt, Human
gaaggugucuggcccagagucu

SEQ ID NO: 922081 - RNA, 22 nt, Human
caaauuuaagugaggucuuugu

SEQ ID NO: 922082 - RNA, 22 nt, Human
uagcagcaagaaugggaugugu

SEQ ID NO: 922083 - RNA, 19 nt, Human
ucuccaggcaggugagcga

SEQ ID NO: 922084 - RNA, 22 nt, Human
uucugugaaucuuuuuucccac

SEQ ID NO: 922085 - RNA, 22 nt, Human
aucauuagcaauuuucaauaag

SEQ ID NO: 922086 - RNA, 22 nt, Human
uggaauguaguguccauggaau

SEQ ID NO: 922087 - RNA, 22 nt, Human
acaugguaaauugguaaaggac

SEQ ID NO: 922088 - RNA, 23 nt, Human
aaaaucuucugccuaugaagaaa

SEQ ID NO: 922089 - RNA, 22 nt, Human
ggcagcuucucccaggcuguuu

SEQ ID NO: 922090 - RNA, 22 nt, Human
agcugcaacuguccuugccuug

SEQ ID NO: 922091 - RNA, 22 nt, Human
ggcagugaaaaaguauguuucc

SEQ ID NO: 922092 - RNA, 22 nt, Human
caauagcuaggcugguaaagga

SEQ ID NO: 922093 - RNA, 22 nt, Human
aggcacugacucaagggagcca

SEQ ID NO: 922094 - RNA, 22 nt, Human
gcugcaggcgccugcggucucu

SEQ ID NO: 922095 - RNA, 18 nt, Human
ccuggcuuccaucuuggu

SEQ ID NO: 922096 - RNA, 22 nt, Human
uggcucaucuaucagaaagucc

SEQ ID NO: 922097 - RNA, 17 nt, Human
cuuuuaauuuacuuccc

SEQ ID NO: 922098 - RNA, 20 nt, Human
ggagcuggcauccagccucu

SEQ ID NO: 922099 - RNA, 22 nt, Human
aggguagggccguagggccaug

SEQ ID NO: 922100 - RNA, 22 nt, Human
uucaggaagccuuucuuggucu

SEQ ID NO: 922101 - RNA, 22 nt, Human
uaaguucaguuggucgaaguag

SEQ ID NO: 922102 - RNA, 22 nt, Human
uucagugcagucggaacuacug

SEQ ID NO: 922103 - RNA, 22 nt, Human
ucugugucugguugggccagua

SEQ ID NO: 922104 - RNA, 23 nt, Human
agggccucaggagggcugcaugg

SEQ ID NO: 922105 - RNA, 22 nt, Human
ucaggugggaguagaaugcuag

SEQ ID NO: 922106 - RNA, 22 nt, Human
gaacacagguggcccggcaggg

SEQ ID NO: 922107 - RNA, 22 nt, Human
ggggccagcacugugccuuugu

SEQ ID NO: 922108 - RNA, 22 nt, Human
uguguauagaugcaugcauaua

SEQ ID NO: 922109 - RNA, 21 nt, Human
gccugccugcgugacccucuu

SEQ ID NO: 922110 - RNA, 23 nt, Human
cuuuccuuucuuugacacccagc

SEQ ID NO: 922111 - RNA, 22 nt, Human
aguuuagacaaagucuugcauu

SEQ ID NO: 922112 - RNA, 22 nt, Human
gcugggccgaccugggcugcag

SEQ ID NO: 922113 - RNA, 20 nt, Human
cagcagccauucuaguagua

SEQ ID NO: 922114 - RNA, 22 nt, Human
uacaguagcuacucaauaacua

SEQ ID NO: 922115 - RNA, 22 nt, Human
agaauuagaggccauguacuug

SEQ ID NO: 922116 - RNA, 23 nt, Human
ucauuucauccagccuugagagu

SEQ ID NO: 922117 - RNA, 22 nt, Human
agaggcuggguacgggccaccu

SEQ ID NO: 922118 - RNA, 22 nt, Human
gaacaucugccuuguggcugcc

SEQ ID NO: 922119 - RNA, 22 nt, Human
gcugagguggagauugcaguga

SEQ ID NO: 922120 - RNA, 19 nt, Human
ccucacccugcagaggagg

SEQ ID NO: 922121 - RNA, 22 nt, Human
agucuguggauggacuggcaga

SEQ ID NO: 922122 - RNA, 22 nt, Human
aaauugcauucaggaugcagga

SEQ ID NO: 922123 - RNA, 22 nt, Human
gcuuuuguuccacaguuuugaa

SEQ ID NO: 922124 - RNA, 22 nt, Human
uugugaauagugcugcaauaaa

SEQ ID NO: 922125 - RNA, 19 nt, Human
uuuuccacagaaauauguu

SEQ ID NO: 922126 - RNA, 22 nt, Human
ugcugcacaauuggaaaguauc

SEQ ID NO: 922127 - RNA, 17 nt, Human
uaucucugcuucauggu

SEQ ID NO: 922128 - RNA, 17 nt, Human
gccuucucugcccucac

SEQ ID NO: 922129 - RNA, 22 nt, Human
aucugcauguccccauggaucc

SEQ ID NO: 922130 - RNA, 22 nt, Human
gaauuucauuuguuuccuacca

SEQ ID NO: 922131 - RNA, 22 nt, Human
auggcacagauguucugauuau

SEQ ID NO: 922132 - RNA, 22 nt, Human
auaugacagcggauucacauau

SEQ ID NO: 922133 - RNA, 22 nt, Human
uuccuuggaaauucugacuuca

SEQ ID NO: 922134 - RNA, 22 nt, Human
cuggaagaggggaaaugccaug

SEQ ID NO: 922135 - RNA, 19 nt, Human
acacagggaucagaggguu

SEQ ID NO: 922136 - RNA, 22 nt, Human
caggauaaauaguaaauguaag

SEQ ID NO: 922137 - RNA, 22 nt, Human
gauauaguuggaauuauaaagg

SEQ ID NO: 922138 - RNA, 19 nt, Human
agugucaucagcuacucag

SEQ ID NO: 922139 - RNA, 22 nt, Human
cuugcuggcagucacuguugcg

SEQ ID NO: 922140 - RNA, 21 nt, Human
ucuguacaucauugagucccc

SEQ ID NO: 922141 - RNA, 22 nt, Human
aguucagaaaugucuuugcaaa

SEQ ID NO: 922142 - RNA, 19 nt, Human
agcuccaggccuggaugcu

SEQ ID NO: 922143 - RNA, 21 nt, Human
uauuaauaugucuaagcugau

SEQ ID NO: 922144 - RNA, 22 nt, Human
aucaguuuauacuuauaaaucu

SEQ ID NO: 922145 - RNA, 22 nt, Human
acauuuaaauaccuauguuucu

SEQ ID NO: 922146 - RNA, 22 nt, Human
cuggucaccagguagcauugua

SEQ ID NO: 922147 - RNA, 22 nt, Human
ucagaaucugcauuuaacaaaa

SEQ ID NO: 922148 - RNA, 22 nt, Human
ggccaggcugcugggaccccgc

SEQ ID NO: 922149 - RNA, 22 nt, Human
ccagcagaguugguuucuggua

SEQ ID NO: 922150 - RNA, 22 nt, Human
cuugacagucccaggaaaauag

SEQ ID NO: 922151 - RNA, 22 nt, Human
aucacaguuacucaaauaauga

SEQ ID NO: 922152 - RNA, 20 nt, Human
uucaaguugggucucuggcu

SEQ ID NO: 922153 - RNA, 22 nt, Human
aagucaggaagugcaaaaguug

SEQ ID NO: 922154 - RNA, 22 nt, Human
uucugccagugaaaauaaugau

SEQ ID NO: 922155 - RNA, 22 nt, Human
auguguauuaguuaguuuaaug

SEQ ID NO: 922156 - RNA, 22 nt, Human
ucuccugguuuguuaaauaauu

SEQ ID NO: 922157 - RNA, 22 nt, Human
uuggugugacuaaggcagugug

SEQ ID NO: 922158 - RNA, 22 nt, Human
uucacaaucuggcuuagcauug

SEQ ID NO: 922159 - RNA, 22 nt, Human
uggaagagcaggcagacaaugc

SEQ ID NO: 922160 - RNA, 19 nt, Human
uaguggagugacaaguucu

SEQ ID NO: 922161 - RNA, 22 nt, Human
auucuuuuaagccccagggauu

SEQ ID NO: 922162 - RNA, 22 nt, Human
acaguuaccacuuagcaguuac

SEQ ID NO: 922163 - RNA, 22 nt, Human
auuccaguuaguggcagcuuau

SEQ ID NO: 922164 - RNA, 20 nt, Human
ucugaggcugagcccagcgu

SEQ ID NO: 922165 - RNA, 22 nt, Human
cugcagagcaaguucucuguug

SEQ ID NO: 922166 - RNA, 22 nt, Human
uugauguaaacuuugauuucau

SEQ ID NO: 922167 - RNA, 22 nt, Human
uaugacaaugugggccuaaggg

SEQ ID NO: 922168 - RNA, 22 nt, Human
accaggcccuccagcugcgugg

SEQ ID NO: 922169 - RNA, 22 nt, Human
ugaguucugacugugaugccag

SEQ ID NO: 922170 - RNA, 22 nt, Human
acucacucuuaaucagacuccc

SEQ ID NO: 922171 - RNA, 22 nt, Human
accucuggacacugcauccuuc

SEQ ID NO: 922172 - RNA, 22 nt, Human
uaagaacaguagaacaguaggu

SEQ ID NO: 922173 - RNA, 22 nt, Human
ucuaacuauacaaagaaaacau

SEQ ID NO: 922174 - RNA, 22 nt, Human
uuuccuucaucaucugagagcu

SEQ ID NO: 922175 - RNA, 22 nt, Human
aguuagaauggauguugagagc

SEQ ID NO: 922176 - RNA, 22 nt, Human
aauccuggcaugugccuuggga

SEQ ID NO: 922177 - RNA, 19 nt, Human
gcugugccucucuccugcu

SEQ ID NO: 922178 - RNA, 22 nt, Human
gcugggagccguaccugucacg

SEQ ID NO: 922179 - RNA, 20 nt, Human
cauuggacuuggcuucaugg

SEQ ID NO: 922180 - RNA, 22 nt, Human
uguuuagaggaacuggaaucag

SEQ ID NO: 922181 - RNA, 22 nt, Human
uagaagauaagacaagugcugc

SEQ ID NO: 922182 - RNA, 22 nt, Human
cagcaacaugugguaguguagg

SEQ ID NO: 922183 - RNA, 22 nt, Human
ccagggcuucccacgugcccug

SEQ ID NO: 922184 - RNA, 22 nt, Human
uugcauuuuuacaaguagccag

SEQ ID NO: 922185 - RNA, 22 nt, Human
acauugaacuacuuguaaugag

SEQ ID NO: 922186 - RNA, 22 nt, Human
uuacacuaagcuacuucuauau

SEQ ID NO: 922187 - RNA, 22 nt, Human
aucuuuuuugucuuggucacug

SEQ ID NO: 922188 - RNA, 22 nt, Human
ggcuucacaguuguagcagcuc

SEQ ID NO: 922189 - RNA, 22 nt, Human
cuggcuggccggagcgaggcgg

SEQ ID NO: 922190 - RNA, 22 nt, Human
guggcagggugcucaucaugca

SEQ ID NO: 922191 - RNA, 22 nt, Human
uggagaguucuguagauaucua

SEQ ID NO: 922192 - RNA, 18 nt, Human
ccucagaggcaaauuguu

SEQ ID NO: 922193 - RNA, 22 nt, Human
ucuggagaggaggauguggaca

SEQ ID NO: 922194 - RNA, 18 nt, Human
uccagagguguuggagcc

SEQ ID NO: 922195 - RNA, 22 nt, Human
cuguuuucccuggaguucagca

SEQ ID NO: 922196 - RNA, 22 nt, Human
uggcagaguucgcugugccuuu

SEQ ID NO: 922197 - RNA, 22 nt, Human
ucacacauguaagggcuuugga

SEQ ID NO: 922198 - RNA, 22 nt, Human
ucacuuagauggggaucaucac

SEQ ID NO: 922199 - RNA, 22 nt, Human
cagcccaggacugcagguguuu

SEQ ID NO: 922200 - RNA, 22 nt, Human
guuagagggcugccuuuuguuu

SEQ ID NO: 922201 - RNA, 22 nt, Human
gccuuauuaccugcacuuugaa

SEQ ID NO: 922202 - RNA, 22 nt, Human
uucagaacaaccaugguuagau

SEQ ID NO: 922203 - RNA, 22 nt, Human
agacauccuucaagugauaugu

SEQ ID NO: 922204 - RNA, 21 nt, Human
ugcauaaagaaauacaaauac

SEQ ID NO: 922205 - RNA, 22 nt, Human
caaaugcuggcccugcuacuua

SEQ ID NO: 922206 - RNA, 22 nt, Human
ccagaaucaucaucugaagccu

SEQ ID NO: 922207 - RNA, 22 nt, Human
aggcacugugcagucccaagca

SEQ ID NO: 922208 - RNA, 22 nt, Human
aacaagauguuuugauauaugu

SEQ ID NO: 922209 - RNA, 22 nt, Human
ugcugggcuaggguggagcucu

SEQ ID NO: 922210 - RNA, 22 nt, Human
cagacucugaugcagccuugug

SEQ ID NO: 922211 - RNA, 22 nt, Human
gcugggagaggcccugaaguga

SEQ ID NO: 922212 - RNA, 22 nt, Human
gcaugcaggauagguugagcuc

SEQ ID NO: 922213 - RNA, 19 nt, Human
uaccaaucccuugguuuac

SEQ ID NO: 922214 - RNA, 23 nt, Human
gucagcuugaccaguggagaguc

SEQ ID NO: 922215 - RNA, 22 nt, Human
acagagacuuggagcaggcuga

SEQ ID NO: 922216 - RNA, 22 nt, Human
ucauucacuuugaaauaaacga

SEQ ID NO: 922217 - RNA, 22 nt, Human
aaccuguucccugguccuugac

SEQ ID NO: 922218 - RNA, 22 nt, Human
aaaaguauuggccaccauuucu

SEQ ID NO: 922219 - RNA, 22 nt, Human
uccuuuguugagauaaauuggg

SEQ ID NO: 922220 - RNA, 22 nt, Human
aagagguucuaauuuaacuauc

SEQ ID NO: 922221 - RNA, 22 nt, Human
caauuuuuaaacuaugaaguug

SEQ ID NO: 922222 - RNA, 23 nt, Human
uuucaaagacuuucccuuagagu

SEQ ID NO: 922223 - RNA, 22 nt, Human
cagcauggggcuuggagucagc

SEQ ID NO: 922224 - RNA, 22 nt, Human
cagaaauggaauuuuccaucac

SEQ ID NO: 922225 - RNA, 22 nt, Human
acuagugaagaagauuugacug

SEQ ID NO: 922226 - RNA, 22 nt, Human
ccaggaggcuucguccguggag

SEQ ID NO: 922227 - RNA, 22 nt, Human
gcaaaggccacuggggcgaugg

SEQ ID NO: 922228 - RNA, 18 nt, Human
uccucucuuuccccaggg

SEQ ID NO: 922229 - RNA, 22 nt, Human
cuguggcucauucuugguggca

SEQ ID NO: 922230 - RNA, 22 nt, Human
acauucaaggcagcacugagug

SEQ ID NO: 922231 - RNA, 22 nt, Human
uucuuaagcguaugauaaugaa

SEQ ID NO: 922232 - RNA, 22 nt, Human
aaugacugaagcaauugcagug

SEQ ID NO: 922233 - RNA, 22 nt, Human
aauugucaaaaauugcaauugu

SEQ ID NO: 922234 - RNA, 22 nt, Human
cagcaggggugucauuguaguu

SEQ ID NO: 922235 - RNA, 22 nt, Human
cacuuuaugggaagcaaaaauu

SEQ ID NO: 922236 - RNA, 22 nt, Human
uaggacaggcuaaaagggauaa

SEQ ID NO: 922237 - RNA, 22 nt, Human
aggcagcagaaaacaaaugguu

SEQ ID NO: 922238 - RNA, 22 nt, Human
gcuucuguggugaggucaccuu

SEQ ID NO: 922239 - RNA, 22 nt, Human
agggaggucuuugaggggcuua

SEQ ID NO: 922240 - RNA, 22 nt, Human
ggugggcaggcgaggcccaggu

SEQ ID NO: 922241 - RNA, 22 nt, Human
uauacaagaggugagaugagca

SEQ ID NO: 922242 - RNA, 22 nt, Human
ggcucuggaaaguguccuugau

SEQ ID NO: 922243 - RNA, 22 nt, Human
gacagacacagggccaugauug

SEQ ID NO: 922244 - RNA, 22 nt, Human
agaaaguuuggggcugggcacg

SEQ ID NO: 922245 - RNA, 22 nt, Human
auccauuucaguguuccacuug

SEQ ID NO: 922246 - RNA, 22 nt, Human
cugacaguguacacugacagcu

SEQ ID NO: 922247 - RNA, 22 nt, Human
acuuuguuccuuucacaaagaa

SEQ ID NO: 922248 - RNA, 22 nt, Human
auuuucugaguccagaauuuac

SEQ ID NO: 922249 - RNA, 22 nt, Human
gagugcaguaucuucugugucc

SEQ ID NO: 922250 - RNA, 22 nt, Human
guccguaguggcugaugcuuug

SEQ ID NO: 922251 - RNA, 22 nt, Human
ggagaaagaagacgaacauugu

SEQ ID NO: 922252 - RNA, 22 nt, Human
ggcagcuucuuaauauggagac

SEQ ID NO: 922253 - RNA, 22 nt, Human
agauauuaggaggauucauaau

SEQ ID NO: 922254 - RNA, 22 nt, Human
ugucugaaacuugguccuaugc

SEQ ID NO: 922255 - RNA, 22 nt, Human
aggggccuccucauuggagugu

SEQ ID NO: 922256 - RNA, 22 nt, Human
agcaucuggccugguuacuuuu

SEQ ID NO: 922257 - RNA, 22 nt, Human
acaucagauuaugcuuugcuua

SEQ ID NO: 922258 - RNA, 22 nt, Human
agagaaaagaguucaggcuuug

SEQ ID NO: 922259 - RNA, 20 nt, Human
ccagacagcaccugccuggu

SEQ ID NO: 922260 - RNA, 22 nt, Human
aaaaggaucagauuuugagcag

SEQ ID NO: 922261 - RNA, 22 nt, Human
uuuauucugugcuacaugaaga

SEQ ID NO: 922262 - RNA, 22 nt, Human
cagcaaggguuauaucaaagau

SEQ ID NO: 922263 - RNA, 22 nt, Human
uccccucuggaggcugcagggg

SEQ ID NO: 922264 - RNA, 22 nt, Human
auaaaauuugcuacuguuaaau

SEQ ID NO: 922265 - RNA, 22 nt, Human
uguucuuucaguuagacacagu

SEQ ID NO: 922266 - RNA, 18 nt, Human
gccagcugcacggcccuc

SEQ ID NO: 922267 - RNA, 22 nt, Human
aaaggucuuuuuucuaacacca

SEQ ID NO: 922268 - RNA, 22 nt, Human
uuacacaaaguuagcucuugca

SEQ ID NO: 922269 - RNA, 22 nt, Human
uucaugcacuauuucuucuagc

SEQ ID NO: 922270 - RNA, 22 nt, Human
gcacagagguggaggacaaaua

SEQ ID NO: 922271 - RNA, 22 nt, Human
guaaagcuggagaggucuuuua

SEQ ID NO: 922272 - RNA, 22 nt, Human
gcugucugcugugcacugagca

SEQ ID NO: 922273 - RNA, 22 nt, Human
ugugaaggcagagccagugaaa

SEQ ID NO: 922274 - RNA, 22 nt, Human
uuucagagucuggcugcagccu

SEQ ID NO: 922275 - RNA, 22 nt, Human
ucaaacagcaggucuuucauag

SEQ ID NO: 922276 - RNA, 22 nt, Human
agcuuuauauguuguuucucca

SEQ ID NO: 922277 - RNA, 20 nt, Human
auucucugacaccgcccccg

SEQ ID NO: 922278 - RNA, 22 nt, Human
ucagaaguacugugcuacaaua

SEQ ID NO: 922279 - RNA, 22 nt, Human
aaacagcuggucucaaauguuc

SEQ ID NO: 922280 - RNA, 20 nt, Human
uuucauugucagaaucuuau

SEQ ID NO: 922281 - RNA, 18 nt, Human
cagugcuguuaacaguga

SEQ ID NO: 922282 - RNA, 22 nt, Human
gacaaugugcaauugcagcuag

SEQ ID NO: 922283 - RNA, 23 nt, Human
agcaaucuguguuucagcaagcc

SEQ ID NO: 922284 - RNA, 19 nt, Human
cugcacugagaaaaggagg

SEQ ID NO: 922285 - RNA, 22 nt, Human
aaagagcauggaaaguucagga

SEQ ID NO: 922286 - RNA, 22 nt, Human
acaugaucuuauguagaagauc

SEQ ID NO: 922287 - RNA, 22 nt, Human
gucugugcaguuacuagcuggu

SEQ ID NO: 922288 - RNA, 21 nt, Human
uccagaaaagaggucauuagc

SEQ ID NO: 922289 - RNA, 22 nt, Human
ugagcagaagcccuccuggacu

SEQ ID NO: 922290 - RNA, 22 nt, Human
cuauuagacacaauuagugauu

SEQ ID NO: 922291 - RNA, 22 nt, Human
augagcugggccauccagugau

SEQ ID NO: 922292 - RNA, 19 nt, Human
uaccauguugacuuuccug

SEQ ID NO: 922293 - RNA, 22 nt, Human
gcucccagaaccaaggcugggg

SEQ ID NO: 922294 - RNA, 22 nt, Human
ucugugugggauaguuugagga

SEQ ID NO: 922295 - RNA, 22 nt, Human
cuagaaacuccaucucacuaca

SEQ ID NO: 922296 - RNA, 22 nt, Human
aggaagagcuggaccagaggac

SEQ ID NO: 922297 - RNA, 22 nt, Human
gucacaggccuggaugaggggc

SEQ ID NO: 922298 - RNA, 17 nt, Human
cucuuuugucuucuucc

SEQ ID NO: 922299 - RNA, 22 nt, Human
aggcccagagcaggaaaggguu

SEQ ID NO: 922300 - RNA, 22 nt, Human
uagcaauguguguguauaaauu

SEQ ID NO: 922301 - RNA, 22 nt, Human
ucaggagaaaauaucaggaagu

SEQ ID NO: 922302 - RNA, 22 nt, Human
agcaggagauggggcgugaugu

SEQ ID NO: 922303 - RNA, 22 nt, Human
cagcagcugauggggaagugau

SEQ ID NO: 922304 - RNA, 22 nt, Human
aaguccauaguuugcauuaggg

SEQ ID NO: 922305 - RNA, 22 nt, Human
cagccacugaacuccuggcuau

SEQ ID NO: 922306 - RNA, 22 nt, Human
gcuggccccgagugcuacgcuc

SEQ ID NO: 922307 - RNA, 22 nt, Human
cagcaggguagguuguaucagu

SEQ ID NO: 922308 - RNA, 22 nt, Human
ucugacccuacucagcacuuug

SEQ ID NO: 922309 - RNA, 22 nt, Human
ucaaagaugauaggaaaucaua

SEQ ID NO: 922310 - RNA, 22 nt, Human
gugccugguauguagguagcgg

SEQ ID NO: 922311 - RNA, 22 nt, Human
gggcugugagaguggggcugcu

SEQ ID NO: 922312 - RNA, 22 nt, Human
gcaggccacaguggagucucug

SEQ ID NO: 922313 - RNA, 22 nt, Human
acccuggacuggggcugaggcu

SEQ ID NO: 922314 - RNA, 22 nt, Human
cagagcugguaagugguagagg

SEQ ID NO: 922315 - RNA, 19 nt, Human
ccagagucaugucuccccc

SEQ ID NO: 922316 - RNA, 22 nt, Human
acuguucugcaugcugugaggg

SEQ ID NO: 922317 - RNA, 22 nt, Human
ccugggugacagagugagaccu

SEQ ID NO: 922318 - RNA, 22 nt, Human
uuguaacaaucugucauaaaug

SEQ ID NO: 922319 - RNA, 19 nt, Human
uacaagcuuuuuuggcagg

SEQ ID NO: 922320 - RNA, 22 nt, Human
cucuuuaagcuccuaacagcca

SEQ ID NO: 922321 - RNA, 22 nt, Human
ucuagaaagccaaauuaggaau

SEQ ID NO: 922322 - RNA, 22 nt, Human
agaggccaagccagacugugca

SEQ ID NO: 922323 - RNA, 22 nt, Human
uuuuuggcagcucagaaacuuc

SEQ ID NO: 922324 - RNA, 20 nt, Human
ggucaucuuccaaucccagg

SEQ ID NO: 922325 - RNA, 19 nt, Human
ugcccugcccgcagccuug

SEQ ID NO: 922326 - RNA, 22 nt, Human
ucaacccuggugggaauauuug

SEQ ID NO: 922327 - RNA, 22 nt, Human
uugaauaaaugagcagugaauu

SEQ ID NO: 922328 - RNA, 22 nt, Human
cuagagcuguucugugcacuca

SEQ ID NO: 922329 - RNA, 22 nt, Human
aacaggagucauugucauuauu

SEQ ID NO: 922330 - RNA, 22 nt, Human
ccugagcugaacuaagcaguuu

SEQ ID NO: 922331 - RNA, 22 nt, Human
uagauacaugaaauggcagaua

SEQ ID NO: 922332 - RNA, 22 nt, Human
ccuuuuauacucuguccucugg

SEQ ID NO: 922333 - RNA, 22 nt, Human
uggggcugaggagccucacucu

SEQ ID NO: 922334 - RNA, 18 nt, Human
ucacagacagcugucuuu

SEQ ID NO: 922335 - RNA, 22 nt, Human
acaaaguuucuucuaacaucug

SEQ ID NO: 922336 - RNA, 22 nt, Human
aauuauacauugaacaaucuag

SEQ ID NO: 922337 - RNA, 23 nt, Human
uguaaaaugggguaguguuacca

SEQ ID NO: 922338 - RNA, 22 nt, Human
cagcagaagugcauuugugauu

SEQ ID NO: 922339 - RNA, 22 nt, Human
aacauauucagaugccaagucc

SEQ ID NO: 922340 - RNA, 22 nt, Human
uuccugggguacuggagaaaau

SEQ ID NO: 922341 - RNA, 22 nt, Human
cagcaagagacuguucucuaag

SEQ ID NO: 922342 - RNA, 22 nt, Human
ugaauaguaagagaauauuugc

SEQ ID NO: 922343 - RNA, 22 nt, Human
agugucugaugcacaguugucc

SEQ ID NO: 922344 - RNA, 22 nt, Human
ucuuuagauguuuagaggaaga

SEQ ID NO: 922345 - RNA, 22 nt, Human
gggucuucugauauagguccag

SEQ ID NO: 922346 - RNA, 22 nt, Human
ccaguggacaauuucugaggaa

SEQ ID NO: 922347 - RNA, 22 nt, Human
gacauucaaguuugcaguuagg

SEQ ID NO: 922348 - RNA, 22 nt, Human
aagagcugcccaaggugaacag

SEQ ID NO: 922349 - RNA, 22 nt, Human
agucauaugacccuucacaaac

SEQ ID NO: 922350 - RNA, 22 nt, Human
aguacacaagacacauuuaaaa

SEQ ID NO: 922351 - RNA, 22 nt, Human
uaccugggaagugggaccugag

SEQ ID NO: 922352 - RNA, 22 nt, Human
uggaaauuaaaauuccucuuaa

SEQ ID NO: 922353 - RNA, 22 nt, Human
auaagcauguuagaauauuuga

SEQ ID NO: 922354 - RNA, 22 nt, Human
cuagcaagccuaccacgaaacu

SEQ ID NO: 922355 - RNA, 18 nt, Human
cacauuuaccuggcuccc

SEQ ID NO: 922356 - RNA, 22 nt, Human
uuucuugaccacuauguugaua

SEQ ID NO: 922357 - RNA, 22 nt, Human
uccugccuucauacugcuguau

SEQ ID NO: 922358 - RNA, 22 nt, Human
gaggccugaggcugccuggagc

SEQ ID NO: 922359 - RNA, 22 nt, Human
gugguuuguuuuauuccuggaa

SEQ ID NO: 922360 - RNA, 22 nt, Human
aauguuaugugguucaacuuaa

SEQ ID NO: 922361 - RNA, 22 nt, Human
cagcaucaccaacuugagcaau

SEQ ID NO: 922362 - RNA, 22 nt, Human
aacaggcaaacugugggauccc

SEQ ID NO: 922363 - RNA, 22 nt, Human
gugugucugaaguugaguagac

SEQ ID NO: 922364 - RNA, 22 nt, Human
uaaacagagagugcaguuauag

SEQ ID NO: 922365 - RNA, 19 nt, Human
aacuacagcgcacuguccu

SEQ ID NO: 922366 - RNA, 22 nt, Human
gcacaagaaaucauggacugaa

SEQ ID NO: 922367 - RNA, 22 nt, Human
cagcauggccauuucucgcugc

SEQ ID NO: 922368 - RNA, 22 nt, Human
aaggcaguucacucacgcagcc

SEQ ID NO: 922369 - RNA, 22 nt, Human
uggcuggcaguuaucuuuggau

SEQ ID NO: 922370 - RNA, 17 nt, Human
acaacagaaauguauuc

SEQ ID NO: 922371 - RNA, 22 nt, Human
cacuuuuaaauggguccguguu

SEQ ID NO: 922372 - RNA, 22 nt, Human
gcacagaacagagaaauagcca

SEQ ID NO: 922373 - RNA, 22 nt, Human
ucuuuuguugccuacuuauuaa

SEQ ID NO: 922374 - RNA, 22 nt, Human
gcugccugucugcugacccagg

SEQ ID NO: 922375 - RNA, 22 nt, Human
agcuucucggcugggaguauuu

SEQ ID NO: 922376 - RNA, 20 nt, Human
gcagccucaacaggcacagc

SEQ ID NO: 922377 - RNA, 22 nt, Human
cuguggcucagcacggggucag

SEQ ID NO: 922378 - RNA, 22 nt, Human
uucauacauuuuuacuaacagc

SEQ ID NO: 922379 - RNA, 22 nt, Human
uaugaguuuaaggcuaaaauag

SEQ ID NO: 922380 - RNA, 23 nt, Human
ggaauguuuaccugugaauguca

SEQ ID NO: 922381 - RNA, 22 nt, Human
auuaggcacuagaaugucaauu

SEQ ID NO: 922382 - RNA, 20 nt, Human
uggacagaauuagacacuuu

SEQ ID NO: 922383 - RNA, 22 nt, Human
aacaguuuaugauaaauucuua

SEQ ID NO: 922384 - RNA, 22 nt, Human
aauuuaagaacauuucaggacu

SEQ ID NO: 922385 - RNA, 22 nt, Human
gcugucacacaugggaucucag

SEQ ID NO: 922386 - RNA, 22 nt, Human
gcaagauuccgcucuagagccu

SEQ ID NO: 922387 - RNA, 22 nt, Human
aagccagaguuuuugagaacuu

SEQ ID NO: 922388 - RNA, 22 nt, Human
uuuaccaguguuaaacaccagc

SEQ ID NO: 922389 - RNA, 22 nt, Human
cugguucugauguucuuggcuu

SEQ ID NO: 922390 - RNA, 21 nt, Human
cauuacaugguuuuagugaac

SEQ ID NO: 922391 - RNA, 22 nt, Human
uuuuagauuauaagucuaauuc

SEQ ID NO: 922392 - RNA, 22 nt, Human
agacagacuugaaaauguucuu

SEQ ID NO: 922393 - RNA, 22 nt, Human
uuucuauaaaaagugcuaggau

SEQ ID NO: 922394 - RNA, 22 nt, Human
ccuccaggauaagucagggccu

SEQ ID NO: 922395 - RNA, 22 nt, Human
gcuuccuccuggaggucacuca

SEQ ID NO: 922396 - RNA, 22 nt, Human
uucaagguaaguaugagaaagc

SEQ ID NO: 922397 - RNA, 22 nt, Human
cgcagacacugaggguccgggg

SEQ ID NO: 922398 - RNA, 23 nt, Human
ucaucaaacagcugcucaagaaa

SEQ ID NO: 922399 - RNA, 22 nt, Human
uuacacacucugcccugcuguu

SEQ ID NO: 922400 - RNA, 22 nt, Human
acauuaaaaaauguugcaugaa

SEQ ID NO: 922401 - RNA, 19 nt, Human
uuagguauuauugcuuucc

SEQ ID NO: 922402 - RNA, 21 nt, Human
guggcccugccgcagugucca

SEQ ID NO: 922403 - RNA, 22 nt, Human
uucuuuggggucuccagcauag

SEQ ID NO: 922404 - RNA, 22 nt, Human
uagcagagaggggacaguggca

SEQ ID NO: 922405 - RNA, 22 nt, Human
uggcagccuucucugagaaggu

SEQ ID NO: 922406 - RNA, 22 nt, Human
uuugacagugcugcuaaaaugc

SEQ ID NO: 922407 - RNA, 22 nt, Human
ggcaugcaaaacaacucagaga

SEQ ID NO: 922408 - RNA, 22 nt, Human
acccugagaugccacagcauga

SEQ ID NO: 922409 - RNA, 22 nt, Human
agguucucacacgucuacaccc

SEQ ID NO: 922410 - RNA, 22 nt, Human
uguccucacaggaaugaacuuu

SEQ ID NO: 922411 - RNA, 22 nt, Human
aggaggcugaacuagggucugg

SEQ ID NO: 922412 - RNA, 22 nt, Human
aguuuucauuaccaugcugcaa

SEQ ID NO: 922413 - RNA, 23 nt, Human
ugucuggcucauggugggucuca

SEQ ID NO: 922414 - RNA, 22 nt, Human
uagcuguuuaucaaguucuuga

SEQ ID NO: 922415 - RNA, 21 nt, Human
agcugcagucaagccagaggu

SEQ ID NO: 922416 - RNA, 19 nt, Human
uuugccuugcagcugugug

SEQ ID NO: 922417 - RNA, 22 nt, Human
ggaagggccucgggcgugggac

SEQ ID NO: 922418 - RNA, 22 nt, Human
ugccagugucugcuaucugaga

SEQ ID NO: 922419 - RNA, 22 nt, Human
gaucuuugcaaacuuugucacu

SEQ ID NO: 922420 - RNA, 22 nt, Human
ucccaucagucauugguugagg

SEQ ID NO: 922421 - RNA, 22 nt, Human
cugggcagugguggcaucuuug

SEQ ID NO: 922422 - RNA, 22 nt, Human
augcacaauguuuugauuugag

SEQ ID NO: 922423 - RNA, 22 nt, Human
ggagagcuuggagugcgauuuu

SEQ ID NO: 922424 - RNA, 22 nt, Human
aguuaagagugugaaaauguua

SEQ ID NO: 922425 - RNA, 23 nt, Human
uggcagagacccagaaucuacau

SEQ ID NO: 922426 - RNA, 22 nt, Human
ucaguaacuggguugaagcuag

SEQ ID NO: 922427 - RNA, 22 nt, Human
uaaagugcuggauuugaguaaa

SEQ ID NO: 922428 - RNA, 22 nt, Human
gaggaaaaugcaacaggaaugc

SEQ ID NO: 922429 - RNA, 22 nt, Human
cuauuugucaguuuggcuuuaa

SEQ ID NO: 922430 - RNA, 22 nt, Human
ugggaaugugagcauucauuca

SEQ ID NO: 922431 - RNA, 22 nt, Human
acaguggaggccauaugguccu

SEQ ID NO: 922432 - RNA, 22 nt, Human
uccccacaucucugcaucaggc

SEQ ID NO: 922433 - RNA, 22 nt, Human
ccaugcccuaaaggacuggcag

SEQ ID NO: 922434 - RNA, 22 nt, Human
ggacacagauaaucacacagau

SEQ ID NO: 922435 - RNA, 22 nt, Human
gugcuccaggucgcucagagag

SEQ ID NO: 922436 - RNA, 21 nt, Human
augaaggcagugccaagggcu

SEQ ID NO: 922437 - RNA, 22 nt, Human
uuagaggggcugcugaauggga

SEQ ID NO: 922438 - RNA, 22 nt, Human
aaacacaagauggccucuucug

SEQ ID NO: 922439 - RNA, 19 nt, Human
ccuguucuuggcugaggcu

SEQ ID NO: 922440 - RNA, 22 nt, Human
agacacagcagugccugccuca

SEQ ID NO: 922441 - RNA, 22 nt, Human
uauuuuacuuuaaagcgagaga

SEQ ID NO: 922442 - RNA, 22 nt, Human
uagcaagaagggagaugggguu

SEQ ID NO: 922443 - RNA, 22 nt, Human
aagaagcaggucacagacaggg

SEQ ID NO: 922444 - RNA, 22 nt, Human
aagaaagagaucacuccuccau

SEQ ID NO: 922445 - RNA, 21 nt, Human
uuuaucaucacgagcuugagc

SEQ ID NO: 922446 - RNA, 22 nt, Human
aacuauaaugggguuaggaaau

SEQ ID NO: 922447 - RNA, 22 nt, Human
aggccagccuuguaaaugccuc

SEQ ID NO: 922448 - RNA, 22 nt, Human
ggagccuggcaaugcugcgucc

SEQ ID NO: 922449 - RNA, 22 nt, Human
ucuggacuugaaucagaguaga

SEQ ID NO: 922450 - RNA, 22 nt, Human
uguguuugaggcauguugcaga

SEQ ID NO: 922451 - RNA, 22 nt, Human
augaagcagccucuucccucug

SEQ ID NO: 922452 - RNA, 22 nt, Human
uccugugucucagcgugaagca

SEQ ID NO: 922453 - RNA, 22 nt, Human
caacauuuucauggccagggag

SEQ ID NO: 922454 - RNA, 22 nt, Human
uuaaggaauuuauaguuguacu

SEQ ID NO: 922455 - RNA, 22 nt, Human
uuuucuguauuauugugcuuca

SEQ ID NO: 922456 - RNA, 22 nt, Human
uaguuuuuucaacaaauggugc

SEQ ID NO: 922457 - RNA, 22 nt, Human
gcugugauccuugagagaaggu

SEQ ID NO: 922458 - RNA, 22 nt, Human
uuuaccaagaguugucacuguu

SEQ ID NO: 922459 - RNA, 22 nt, Human
cuucuucugguuuauguggcaa

SEQ ID NO: 922460 - RNA, 22 nt, Human
auaaaagaucccuucugagcuc

SEQ ID NO: 922461 - RNA, 18 nt, Human
cugucagcagcuucacga

SEQ ID NO: 922462 - RNA, 22 nt, Human
ggagggcugagacuggggucug

SEQ ID NO: 922463 - RNA, 22 nt, Human
ugggccaggauuucaagacccu

SEQ ID NO: 922464 - RNA, 22 nt, Human
auagaaauggcagcuggugcua

SEQ ID NO: 922465 - RNA, 22 nt, Human
gcugcagguuugucuagucugg

SEQ ID NO: 922466 - RNA, 22 nt, Human
uuuccacaauguuuuugcagga

SEQ ID NO: 922467 - RNA, 22 nt, Human
ucugucacuuuuauuuacugaa

SEQ ID NO: 922468 - RNA, 22 nt, Human
acaaguuuuugauagacuagaa

SEQ ID NO: 922469 - RNA, 22 nt, Human
uuggaaggugagucccuggguu

SEQ ID NO: 922470 - RNA, 22 nt, Human
aucauuccacauguaccacuag

SEQ ID NO: 922471 - RNA, 22 nt, Human
ugcaggugccucuugagcuugu

SEQ ID NO: 922472 - RNA, 22 nt, Human
auaaauuuauaauuguuuccug

SEQ ID NO: 922473 - RNA, 22 nt, Human
acaauggcaugcuagcaaaugg

SEQ ID NO: 922474 - RNA, 22 nt, Human
gcagcuccuuuaggcugcaaag

SEQ ID NO: 922475 - RNA, 22 nt, Human
uuucauucauguguuaaaggug

SEQ ID NO: 922476 - RNA, 22 nt, Human
caugucaagacugaagauccag

SEQ ID NO: 922477 - RNA, 22 nt, Human
uccagagagauaguggcuaaua

SEQ ID NO: 922478 - RNA, 22 nt, Human
agcucugguauuucuuuaaucc

SEQ ID NO: 922479 - RNA, 22 nt, Human
agcagggcuuuggcuggcuuuc

SEQ ID NO: 922480 - RNA, 17 nt, Human
uuucuagcugugaaccc

SEQ ID NO: 922481 - RNA, 22 nt, Human
ggggcuccagucuucacauuuu

SEQ ID NO: 922482 - RNA, 22 nt, Human
ggugaaggucagagcaggaaaa

SEQ ID NO: 922483 - RNA, 22 nt, Human
gacagggccaaaccggcugauc

SEQ ID NO: 922484 - RNA, 22 nt, Human
aagcagcaugauuguaauacua

SEQ ID NO: 922485 - RNA, 22 nt, Human
ccugauuauuguaaauauauuu

SEQ ID NO: 922486 - RNA, 22 nt, Human
gagacugcauuguccaaggguu

SEQ ID NO: 922487 - RNA, 22 nt, Human
aauguauucucuuuauaagaua

SEQ ID NO: 922488 - RNA, 22 nt, Human
ucugggcugugguuccacuccg

SEQ ID NO: 922489 - RNA, 22 nt, Human
agcuggcauugcagggagcugc

SEQ ID NO: 922490 - RNA, 22 nt, Human
auggaauaauuguuucacagaa

SEQ ID NO: 922491 - RNA, 22 nt, Human
aauauuguuucaagaucacaga

SEQ ID NO: 922492 - RNA, 22 nt, Human
auuggugcauuuuacaaaacuc

SEQ ID NO: 922493 - RNA, 22 nt, Human
gcugcagcuuuaggauccagug

SEQ ID NO: 922494 - RNA, 20 nt, Human
uucaauaugacccuggggag

SEQ ID NO: 922495 - RNA, 22 nt, Human
acugucuucaaaugaauauauu

SEQ ID NO: 922496 - RNA, 22 nt, Human
cuguggcugugaaacuucucag

SEQ ID NO: 922497 - RNA, 22 nt, Human
auaaacacuucuagggcacaca

SEQ ID NO: 922498 - RNA, 22 nt, Human
ucuucacaggagccugccugcc

SEQ ID NO: 922499 - RNA, 21 nt, Human
gguugguguguccaguggcca

SEQ ID NO: 922500 - RNA, 22 nt, Human
gcuucagaaguugggcucugac

SEQ ID NO: 922501 - RNA, 22 nt, Human
uagaaguucaugcgaauuauuu

SEQ ID NO: 922502 - RNA, 22 nt, Human
aggcugucucaccucaggaggg

SEQ ID NO: 922503 - RNA, 22 nt, Human
cugccugccuggagacagaugg

SEQ ID NO: 922504 - RNA, 22 nt, Human
aggcucugaucagguggcugug

SEQ ID NO: 922505 - RNA, 20 nt, Human
ugcagcugguuucacaggga

SEQ ID NO: 922506 - RNA, 19 nt, Human
acugucacauaaaggaagg

SEQ ID NO: 922507 - RNA, 22 nt, Human
uccugggaagacugugaggaca

SEQ ID NO: 922508 - RNA, 22 nt, Human
ucuguguuuuaaacaguagaaa

SEQ ID NO: 922509 - RNA, 22 nt, Human
ucagcugcucuguugagcugaa

SEQ ID NO: 922510 - RNA, 21 nt, Human
uguuuauggaaaagagacaaa

SEQ ID NO: 922511 - RNA, 22 nt, Human
aggguggccaugagggagagau

SEQ ID NO: 922512 - RNA, 22 nt, Human
auuuuaguuuuagcauccaugc

SEQ ID NO: 922513 - RNA, 22 nt, Human
ucacccaggcuggugcgcagug

SEQ ID NO: 922514 - RNA, 22 nt, Human
acugagaagcucgcagugaugc

SEQ ID NO: 922515 - RNA, 22 nt, Human
acaauguucuacauauacauaa

SEQ ID NO: 922516 - RNA, 20 nt, Human
guucucacugaucugcaggg

SEQ ID NO: 922517 - RNA, 22 nt, Human
uucacauuguuuuaaugugaau

SEQ ID NO: 922518 - RNA, 22 nt, Human
gaaggcauaaaaccaauuuugu

SEQ ID NO: 922519 - RNA, 22 nt, Human
ugggccaggcaugugaucagca

SEQ ID NO: 922520 - RNA, 22 nt, Human
uacaaagaggcagcuccauuuu

SEQ ID NO: 922521 - RNA, 22 nt, Human
accuccuggugcccaaguguuu

SEQ ID NO: 922522 - RNA, 22 nt, Human
auugaacugucuuugaagaaau

SEQ ID NO: 922523 - RNA, 22 nt, Human
ucuagaaauuuugccuuguauu

SEQ ID NO: 922524 - RNA, 22 nt, Human
gagaggcuaugagguucugugu

SEQ ID NO: 922525 - RNA, 22 nt, Human
aagacaauuuugaguaugcaca

SEQ ID NO: 922526 - RNA, 22 nt, Human
aaacuguuucccuccauaaccu

SEQ ID NO: 922527 - RNA, 22 nt, Human
caaauacuacgauucuugcagu

SEQ ID NO: 922528 - RNA, 22 nt, Human
gucccugggucuaaggcaguaa

SEQ ID NO: 922529 - RNA, 22 nt, Human
cagcagcucagucucucaguag

SEQ ID NO: 922530 - RNA, 21 nt, Human
ugagcaccagcugcaugcccc

SEQ ID NO: 922531 - RNA, 22 nt, Human
ugucucuuacuuugauucuugg

SEQ ID NO: 922532 - RNA, 22 nt, Human
uccuccagggggaucuucagcc

SEQ ID NO: 922533 - RNA, 22 nt, Human
uacaagagacaccagggaggcu

SEQ ID NO: 922534 - RNA, 22 nt, Human
gguuccuucugaggucccugua

SEQ ID NO: 922535 - RNA, 22 nt, Human
aaaguuugucacuuggcuagaa

SEQ ID NO: 922536 - RNA, 22 nt, Human
uuagcacaggcaacuccacaua

SEQ ID NO: 922537 - RNA, 22 nt, Human
uucccagugauugaacaucccu

SEQ ID NO: 922538 - RNA, 22 nt, Human
gccaggagaaaaggcgaaugau

SEQ ID NO: 922539 - RNA, 22 nt, Human
gcucccugacucaguuccugag

SEQ ID NO: 922540 - RNA, 22 nt, Human
gcugggagugggcaagaugaga

SEQ ID NO: 922541 - RNA, 22 nt, Human
cuggggcuggugaggcaggcuc

SEQ ID NO: 922542 - RNA, 22 nt, Human
gucuuucuuaauucaagugcuu

SEQ ID NO: 922543 - RNA, 22 nt, Human
cuugagguuuugacucagcuuu

SEQ ID NO: 922544 - RNA, 22 nt, Human
ccaaggagcaaggcucaacaag

SEQ ID NO: 922545 - RNA, 22 nt, Human
ggguaaaggucgcccucaaggu

SEQ ID NO: 922546 - RNA, 22 nt, Human
ugaauguuugaugagaaauaga

SEQ ID NO: 922547 - RNA, 22 nt, Human
gccaauuuaucuuacucgugcu

SEQ ID NO: 922548 - RNA, 22 nt, Human
uuucacagcuuccacuuaagga

SEQ ID NO: 922549 - RNA, 23 nt, Human
uacuugguuuugauagaaaucca

SEQ ID NO: 922550 - RNA, 22 nt, Human
agaggccagaaggcgcaccccg

SEQ ID NO: 922551 - RNA, 19 nt, Human
caauucugcaacacugucc

SEQ ID NO: 922552 - RNA, 22 nt, Human
aggggaauggguagacuguuga

SEQ ID NO: 922553 - RNA, 22 nt, Human
gacccugacucuaaugcuuggc

SEQ ID NO: 922554 - RNA, 22 nt, Human
uucccagagaaggaugaaaaag

SEQ ID NO: 922555 - RNA, 22 nt, Human
ccuuuagaauucugccccuccu

SEQ ID NO: 922556 - RNA, 22 nt, Human
ucagacagcuugggauaacuga

SEQ ID NO: 922557 - RNA, 22 nt, Human
ucagugcuuuugucacaugguc

SEQ ID NO: 922558 - RNA, 22 nt, Human
agguauucagagagaugcuuuu

SEQ ID NO: 922559 - RNA, 22 nt, Human
gugggcagugguuugcgcgguc

SEQ ID NO: 922560 - RNA, 22 nt, Human
uuaggaaggccuugaaugccag

SEQ ID NO: 922561 - RNA, 22 nt, Human
gcuuugugugaaguccauggcg

SEQ ID NO: 922562 - RNA, 22 nt, Human
ucaagucuggagaucuggaacu

SEQ ID NO: 922563 - RNA, 22 nt, Human
gaucugggagccucauggagac

SEQ ID NO: 922564 - RNA, 22 nt, Human
uuuagcuauggauaacaaccac

SEQ ID NO: 922565 - RNA, 16 nt, Human
cucuuugggcuuccag

SEQ ID NO: 922566 - RNA, 22 nt, Human
ucacacacauuugcugucugau

SEQ ID NO: 922567 - RNA, 22 nt, Human
uugaaagacauuauuuauauau

SEQ ID NO: 922568 - RNA, 22 nt, Human
cugggagcugaggcugacgcug

SEQ ID NO: 922569 - RNA, 19 nt, Human
uggugcuggccucccaugg

SEQ ID NO: 922570 - RNA, 22 nt, Human
auaggcagacucuuuuuggagg

SEQ ID NO: 922571 - RNA, 22 nt, Human
acacuucagcuccacaaacauu

SEQ ID NO: 922572 - RNA, 22 nt, Human
gucugcugacagagcauggacc

SEQ ID NO: 922573 - RNA, 22 nt, Human
auugaaagguuuugagcagaua

SEQ ID NO: 922574 - RNA, 22 nt, Human
ucugugcugcccaacuucucaa

SEQ ID NO: 922575 - RNA, 22 nt, Human
gcagccaagaccccaagaacug

SEQ ID NO: 922576 - RNA, 22 nt, Human
cauuuagaaacuguuuuuaaca

SEQ ID NO: 922577 - RNA, 22 nt, Human
cugggcuuaggaccuggugcgg

SEQ ID NO: 922578 - RNA, 22 nt, Human
caggccagcguccagaacaagc

SEQ ID NO: 922579 - RNA, 22 nt, Human
gaacagcagcucguucucgaug

SEQ ID NO: 922580 - RNA, 21 nt, Human
agagacagagaaaguaacauu

SEQ ID NO: 922581 - RNA, 21 nt, Human
aacauuucugggagaacucac

SEQ ID NO: 922582 - RNA, 22 nt, Human
ugcagcaguuuaaugcaggguu

SEQ ID NO: 922583 - RNA, 22 nt, Human
ugguaagguuccagaucuagaa

SEQ ID NO: 922584 - RNA, 22 nt, Human
caucacaaauguaauaaugucu

SEQ ID NO: 922585 - RNA, 22 nt, Human
ucugaaauuccuuccagacuuu

SEQ ID NO: 922586 - RNA, 22 nt, Human
auguuacaauccaacaaaauua

SEQ ID NO: 922587 - RNA, 22 nt, Human
cacagaggcucaaagccaggug

SEQ ID NO: 922588 - RNA, 22 nt, Human
aaaagaggaacucuuauauacu

SEQ ID NO: 922589 - RNA, 22 nt, Human
uaagguuugcuuaucuucgccu

SEQ ID NO: 922590 - RNA, 22 nt, Human
uuucaaggugcaggaggguuuu

SEQ ID NO: 922591 - RNA, 22 nt, Human
uuuguuuagagaauugaagcag

SEQ ID NO: 922592 - RNA, 22 nt, Human
cuuugauucagagagaauuagc

SEQ ID NO: 922593 - RNA, 22 nt, Human
aaugucaaaauaauugauuugu

SEQ ID NO: 922594 - RNA, 20 nt, Human
ugggccugagccugugggcu

SEQ ID NO: 922595 - RNA, 17 nt, Human
cagacagauauccuggg

SEQ ID NO: 922596 - RNA, 22 nt, Human
cagugucucccccagguucugu

SEQ ID NO: 922597 - RNA, 22 nt, Human
aaagagcacccucaaugucuga

SEQ ID NO: 922598 - RNA, 22 nt, Human
uuugggaaucuuugugcaugac

SEQ ID NO: 922599 - RNA, 22 nt, Human
cuuauuguguguauuuucuagu

SEQ ID NO: 922600 - RNA, 22 nt, Human
cucuuugggaugggcucugcug

SEQ ID NO: 922601 - RNA, 22 nt, Human
gguuauauaauucagugcuuuc

SEQ ID NO: 922602 - RNA, 22 nt, Human
gaagagcuaaaggcacaggcuu

SEQ ID NO: 922603 - RNA, 20 nt, Human
gcuggaagggcuagagggcu

SEQ ID NO: 922604 - RNA, 22 nt, Human
aaguuuauguugguaagauauc

SEQ ID NO: 922605 - RNA, 22 nt, Human
guguggcaaggugagaaguggg

SEQ ID NO: 922606 - RNA, 22 nt, Human
ucaaugcaacuuccaccuccca

SEQ ID NO: 922607 - RNA, 22 nt, Human
aguaaaugaaagcaauuuuaga

SEQ ID NO: 922608 - RNA, 22 nt, Human
agccaggccuuuucucaagguu

SEQ ID NO: 922609 - RNA, 22 nt, Human
gaacauuugaugaugacauugg

SEQ ID NO: 922610 - RNA, 22 nt, Human
gggucccaggaaggagcagugu

SEQ ID NO: 922611 - RNA, 22 nt, Human
ucauaaaguuguuuuaauggga

SEQ ID NO: 922612 - RNA, 22 nt, Human
augcuauguuugguguuggaga

SEQ ID NO: 922613 - RNA, 22 nt, Human
ucucuucugaaaccugucuuua

SEQ ID NO: 922614 - RNA, 22 nt, Human
guuccuugggaacaacgcugaa

SEQ ID NO: 922615 - RNA, 22 nt, Human
acagagguguguguaggacagu

SEQ ID NO: 922616 - RNA, 22 nt, Human
cugagggcuuccuugucccggg

SEQ ID NO: 922617 - RNA, 22 nt, Human
uguauacauuuggugcauauuu

SEQ ID NO: 922618 - RNA, 22 nt, Human
agagacaugcaguuguugugaa

SEQ ID NO: 922619 - RNA, 22 nt, Human
auacacuacuaagcacagauug

SEQ ID NO: 922620 - RNA, 19 nt, Human
caguggagauuggaggagg

SEQ ID NO: 922621 - RNA, 22 nt, Human
uucuguaagggauuuauucuga

SEQ ID NO: 922622 - RNA, 22 nt, Human
agaggccaccuucucuugagaa

SEQ ID NO: 922623 - RNA, 22 nt, Human
aaugaucccauuuagaaacaga

SEQ ID NO: 922624 - RNA, 22 nt, Human
cugacaggguagacagagggca

SEQ ID NO: 922625 - RNA, 22 nt, Human
agauuugucagcucagucuuua

SEQ ID NO: 922626 - RNA, 22 nt, Human
ucauugaaugagaugcaauaga

SEQ ID NO: 922627 - RNA, 20 nt, Human
auagaaucacaaguccugaa

SEQ ID NO: 922628 - RNA, 22 nt, Human
gcccugcugucuucagaguaua

SEQ ID NO: 922629 - RNA, 22 nt, Human
ccugggagaacugcuggguugg

SEQ ID NO: 922630 - RNA, 22 nt, Human
ucuuuagagcucagaaauacag

SEQ ID NO: 922631 - RNA, 22 nt, Human
gaaacccuuccuagagggcaag

SEQ ID NO: 922632 - RNA, 22 nt, Human
aucuccuuggaucacguuuagu

SEQ ID NO: 922633 - RNA, 22 nt, Human
uuccacaguggcuguaguucug

SEQ ID NO: 922634 - RNA, 22 nt, Human
uauuuauaaucugccaaagaga

SEQ ID NO: 922635 - RNA, 22 nt, Human
ggacugguggcuccuugggcag

SEQ ID NO: 922636 - RNA, 22 nt, Human
ugguccugaucaccgcugggca

SEQ ID NO: 922637 - RNA, 22 nt, Human
uuucaaagguuuugucaugucu

SEQ ID NO: 922638 - RNA, 22 nt, Human
uacaaggaggcuaaugaugaca

SEQ ID NO: 922639 - RNA, 22 nt, Human
uugcaggguugacacugccugc

SEQ ID NO: 922640 - RNA, 22 nt, Human
ugcugcaguucacccugccguc

SEQ ID NO: 922641 - RNA, 19 nt, Human
agcacaguuuccacaugca

SEQ ID NO: 922642 - RNA, 17 nt, Human
aaaauucuguaaagagg

SEQ ID NO: 922643 - RNA, 22 nt, Human
caaauagugucacauugugagg

SEQ ID NO: 922644 - RNA, 22 nt, Human
aggcugccuguuccaaucuccu

SEQ ID NO: 922645 - RNA, 22 nt, Human
aauaauuagugggacagagaac

SEQ ID NO: 922646 - RNA, 22 nt, Human
agaggucagaggucgccagguc

SEQ ID NO: 922647 - RNA, 22 nt, Human
ucucaaacuguguauuauaauu

SEQ ID NO: 922648 - RNA, 22 nt, Human
uagguuuaggagugaaggugaa

SEQ ID NO: 922649 - RNA, 22 nt, Human
cucccuggugacucccaaagcu

SEQ ID NO: 922650 - RNA, 22 nt, Human
ugaauacaggaaaauauacuga

SEQ ID NO: 922651 - RNA, 23 nt, Human
aggcuuccuaucuuagagcuggg

SEQ ID NO: 922652 - RNA, 22 nt, Human
cuuaucuguaaaauggauacaa

SEQ ID NO: 922653 - RNA, 22 nt, Human
cugcucuucccacucacuccca

SEQ ID NO: 922654 - RNA, 22 nt, Human
auuuacagacccucccacuaag

SEQ ID NO: 922655 - RNA, 22 nt, Human
ccugagugaccugaggucuagu

SEQ ID NO: 922656 - RNA, 22 nt, Human
ugacaguaguguuagaacugau

SEQ ID NO: 922657 - RNA, 22 nt, Human
uaaccugacugcucuuuagaau

SEQ ID NO: 922658 - RNA, 22 nt, Human
uaacuaggauuacaagcgugcg

SEQ ID NO: 922659 - RNA, 19 nt, Human
cugugcaggccgggcugag

SEQ ID NO: 922660 - RNA, 22 nt, Human
gauggggaugagaagugagcag

SEQ ID NO: 922661 - RNA, 22 nt, Human
aagaguggagcuggaaaguggg

SEQ ID NO: 922662 - RNA, 22 nt, Human
auuagcaauugcccugugcaau

SEQ ID NO: 922663 - RNA, 22 nt, Human
acacauaagaaacuacaaagag

SEQ ID NO: 922664 - RNA, 21 nt, Human
ugaggcuguuguaccagggag

SEQ ID NO: 922665 - RNA, 22 nt, Human
aaugacaaccacaauggugcug

SEQ ID NO: 922666 - RNA, 22 nt, Human
aggggagcgacauuccgugccg

SEQ ID NO: 922667 - RNA, 22 nt, Human
agagauggagagcacuggggcu

SEQ ID NO: 922668 - RNA, 22 nt, Human
auagauaauguguagcagugau

SEQ ID NO: 922669 - RNA, 19 nt, Human
uccaggcugagagucagcu

SEQ ID NO: 922670 - RNA, 22 nt, Human
aaugcaaauuaucaggcuucuc

SEQ ID NO: 922671 - RNA, 20 nt, Human
ucacacaugguaagcuauga

SEQ ID NO: 922672 - RNA, 16 nt, Human
aucuuccaaaguuauu

SEQ ID NO: 922673 - RNA, 22 nt, Human
ccucuggccauucuuugaugga

SEQ ID NO: 922674 - RNA, 22 nt, Human
guuuaaagucuuggaaggagga

SEQ ID NO: 922675 - RNA, 22 nt, Human
agcuucuugacggauguucugg

SEQ ID NO: 922676 - RNA, 22 nt, Human
uacugcaugaaggcaccuauuu

SEQ ID NO: 922677 - RNA, 22 nt, Human
ugccagcugacagcagagacaa

SEQ ID NO: 922678 - RNA, 22 nt, Human
gucuccacuaaaaacuuucacg

SEQ ID NO: 922679 - RNA, 22 nt, Human
aagcagcacaguaauauuggug

SEQ ID NO: 922680 - RNA, 22 nt, Human
agccugggcccugccucuucuc

SEQ ID NO: 922681 - RNA, 21 nt, Human
ugucugauguauuuuuugccu

SEQ ID NO: 922682 - RNA, 22 nt, Human
aucuuugacugccauucuugac

SEQ ID NO: 922683 - RNA, 22 nt, Human
gcagugaagcaguccuuguuga

SEQ ID NO: 922684 - RNA, 20 nt, Human
ggccggggagcucuccaggg

SEQ ID NO: 922685 - RNA, 22 nt, Human
uuagaauccaugguugcagugg

SEQ ID NO: 922686 - RNA, 22 nt, Human
ucucugggccucaguuuucuca

SEQ ID NO: 922687 - RNA, 22 nt, Human
aucucuaaucaccagcucuagc

SEQ ID NO: 922688 - RNA, 19 nt, Human
uuacaagcauugaaagaaa

SEQ ID NO: 922689 - RNA, 22 nt, Human
agccuuguugcuaccagaugcc

SEQ ID NO: 922690 - RNA, 23 nt, Human
aaggggauacuuccacuuucuuu

SEQ ID NO: 922691 - RNA, 18 nt, Human
gccagagggaagcaggug

SEQ ID NO: 922692 - RNA, 22 nt, Human
aaggguguugaucagagaggau

SEQ ID NO: 922693 - RNA, 22 nt, Human
augaaauauuucagagcagagu

SEQ ID NO: 922694 - RNA, 22 nt, Human
uucuugaugaaugcuaagaacu

SEQ ID NO: 922695 - RNA, 22 nt, Human
ggcaggugccaguuggcuuggg

SEQ ID NO: 922696 - RNA, 22 nt, Human
cucugugugguagauuccauua

SEQ ID NO: 922697 - RNA, 22 nt, Human
ccaaauuaaaucauacagacag

SEQ ID NO: 922698 - RNA, 22 nt, Human
ggcugagcccccucugcguagg

SEQ ID NO: 922699 - RNA, 22 nt, Human
uacagagacccacaagagacug

SEQ ID NO: 922700 - RNA, 22 nt, Human
uuccuuuucuuaaacauaugug

SEQ ID NO: 922701 - RNA, 22 nt, Human
ccccagcacuaccagaagccag

SEQ ID NO: 922702 - RNA, 22 nt, Human
aucaagugaagggcucuugaag

SEQ ID NO: 922703 - RNA, 22 nt, Human
ugugaggagggucaaacugagu

SEQ ID NO: 922704 - RNA, 22 nt, Human
agaauccuggccaggucagagc

SEQ ID NO: 922705 - RNA, 22 nt, Human
aaauggcauagaggugaaggua

SEQ ID NO: 922706 - RNA, 22 nt, Human
aggcaggugggucacuugaguc

SEQ ID NO: 922707 - RNA, 22 nt, Human
cuggacagaaguggcugggcag

SEQ ID NO: 922708 - RNA, 22 nt, Human
gugcccuggcucacagugucuc

SEQ ID NO: 922709 - RNA, 22 nt, Human
cccagcaggcauguugggagga

SEQ ID NO: 922710 - RNA, 22 nt, Human
auggaaauacagccagagcaga

SEQ ID NO: 922711 - RNA, 18 nt, Human
uggcagagugucuguucu

SEQ ID NO: 922712 - RNA, 22 nt, Human
aucaagcuggcauauguaguuc

SEQ ID NO: 922713 - RNA, 22 nt, Human
acacagaggaaagugugaaggg

SEQ ID NO: 922714 - RNA, 17 nt, Human
ccucccacaccgcccug

SEQ ID NO: 922715 - RNA, 19 nt, Human
uccugggcguugacuuugg

SEQ ID NO: 922716 - RNA, 22 nt, Human
agucucuuuguggacucugccu

SEQ ID NO: 922717 - RNA, 21 nt, Human
agcgccugcaacaaggcagau

SEQ ID NO: 922718 - RNA, 22 nt, Human
uuaugcuaaccucaucuucucc

SEQ ID NO: 922719 - RNA, 23 nt, Human
agcaggcaucuguggcacaaggc

SEQ ID NO: 922720 - RNA, 22 nt, Human
acaguuacauuccagcaacauc

SEQ ID NO: 922721 - RNA, 22 nt, Human
cuggugguucaggagaauggcu

SEQ ID NO: 922722 - RNA, 22 nt, Human
cccugcugucccucaguccugc

SEQ ID NO: 922723 - RNA, 22 nt, Human
ugacuuuaagcuaucugauucu

SEQ ID NO: 922724 - RNA, 22 nt, Human
ugcuauuuuguuuucaguccau

SEQ ID NO: 922725 - RNA, 22 nt, Human
gcagacaugaccaccaaccagg

SEQ ID NO: 922726 - RNA, 22 nt, Human
gcaaauguucuauauuugcugu

SEQ ID NO: 922727 - RNA, 22 nt, Human
gaaaacugugauuagaaugccu

SEQ ID NO: 922728 - RNA, 22 nt, Human
cccugagaagaucauugccacg

SEQ ID NO: 922729 - RNA, 22 nt, Human
ugcuccuauccuccugcugaca

SEQ ID NO: 922730 - RNA, 22 nt, Human
ggcaggguuuacaauagcaaua

SEQ ID NO: 922731 - RNA, 22 nt, Human
gagcagcuggaggccuuguugg

SEQ ID NO: 922732 - RNA, 22 nt, Human
uuuuauuaucuuugaaugggac

SEQ ID NO: 922733 - RNA, 22 nt, Human
ucagaguuugaaauaauuuuua

SEQ ID NO: 922734 - RNA, 22 nt, Human
gacagcugccucuguguagauc

SEQ ID NO: 922735 - RNA, 22 nt, Human
ggcuaggccucaggccugccug

SEQ ID NO: 922736 - RNA, 22 nt, Human
augcaaauuaacauauaguaga

SEQ ID NO: 922737 - RNA, 22 nt, Human
cugggauccacgggcucccaag

SEQ ID NO: 922738 - RNA, 22 nt, Human
cugagggcaugaacauuccaua

SEQ ID NO: 922739 - RNA, 22 nt, Human
ugauucuuuggagagcuauaua

SEQ ID NO: 922740 - RNA, 22 nt, Human
acacagugugugcagucggacg

SEQ ID NO: 922741 - RNA, 22 nt, Human
gcauucuuuuugacuccugguu

SEQ ID NO: 922742 - RNA, 22 nt, Human
caggagguggagcucaaguggu

SEQ ID NO: 922743 - RNA, 18 nt, Human
ugagagccugcuuguccc

SEQ ID NO: 922744 - RNA, 22 nt, Human
acagauacagggacuugguauu

SEQ ID NO: 922745 - RNA, 22 nt, Human
cacagggcaccaguuggccauc

SEQ ID NO: 922746 - RNA, 22 nt, Human
uguuuaaccaccauucuauucu

SEQ ID NO: 922747 - RNA, 22 nt, Human
auguauguuucuauauaugaca

SEQ ID NO: 922748 - RNA, 22 nt, Human
uuucuucuugaguaaccagauu

SEQ ID NO: 922749 - RNA, 22 nt, Human
ugcucaggccagccggacagag

SEQ ID NO: 922750 - RNA, 22 nt, Human
aggugcagaaaaaaguccuuua

SEQ ID NO: 922751 - RNA, 22 nt, Human
aucuuuggguacaaacuugccu

SEQ ID NO: 922752 - RNA, 22 nt, Human
agccaagaggagccuaaagcga

SEQ ID NO: 922753 - RNA, 19 nt, Human
ugucugaguaugcugacaa

SEQ ID NO: 922754 - RNA, 22 nt, Human
ugcuuuauaaccauuucugugg

SEQ ID NO: 922755 - RNA, 22 nt, Human
aaaguauguuguggcuuuuaaa

SEQ ID NO: 922756 - RNA, 22 nt, Human
uguggaugagggagugaacaaa

SEQ ID NO: 922757 - RNA, 22 nt, Human
ucccugcuuucuugugagggga

SEQ ID NO: 922758 - RNA, 22 nt, Human
uuucaacagaucugucuucagg

SEQ ID NO: 922759 - RNA, 23 nt, Human
aaauugucguaagguggagaugu

SEQ ID NO: 922760 - RNA, 22 nt, Human
gagcccuuuuccuagauacugu

SEQ ID NO: 922761 - RNA, 22 nt, Human
gaaggagacccugaagaugcug

SEQ ID NO: 922762 - RNA, 22 nt, Human
cacaagaaauaagcugccuuuc

SEQ ID NO: 922763 - RNA, 22 nt, Human
ugguauuuaagacuucacuccu

SEQ ID NO: 922764 - RNA, 22 nt, Human
aggucaggaggccucugccauu

SEQ ID NO: 922765 - RNA, 21 nt, Human
uggaauguaccucccucucuu

SEQ ID NO: 922766 - RNA, 22 nt, Human
acagcagagaacuuuagagggu

SEQ ID NO: 922767 - RNA, 20 nt, Human
cugggcucaagugauccucc

SEQ ID NO: 922768 - RNA, 22 nt, Human
gagagaagggggauaugagccu

SEQ ID NO: 922769 - RNA, 22 nt, Human
cucacauaugcugggauuuccg

SEQ ID NO: 922770 - RNA, 22 nt, Human
auucaaagucuagauguagugu

SEQ ID NO: 922771 - RNA, 22 nt, Human
uauacagauuucugggcaaucu

SEQ ID NO: 922772 - RNA, 22 nt, Human
ccuggcucugagguaugccugg

SEQ ID NO: 922773 - RNA, 22 nt, Human
cucagagcccaggguacacccg

SEQ ID NO: 922774 - RNA, 21 nt, Human
acagcagagaucaagacuaag

SEQ ID NO: 922775 - RNA, 22 nt, Human
gggagacacgcugcaggcauaa

SEQ ID NO: 922776 - RNA, 20 nt, Human
cagcaggaaaagugccucag

SEQ ID NO: 922777 - RNA, 22 nt, Human
auuugucuaaugaguguguacu

SEQ ID NO: 922778 - RNA, 22 nt, Human
ucauuuuugaccauggguagga

SEQ ID NO: 922779 - RNA, 22 nt, Human
ugcaggcauuggugagagaagc

SEQ ID NO: 922780 - RNA, 22 nt, Human
gggaaauuaaugacugguugga

SEQ ID NO: 922781 - RNA, 22 nt, Human
aucaacuuaaagaaaagauacu

SEQ ID NO: 922782 - RNA, 22 nt, Human
uagauaacuugcaccuacagga

SEQ ID NO: 922783 - RNA, 22 nt, Human
gcugcuaagcguuucuguucca

SEQ ID NO: 922784 - RNA, 22 nt, Human
aggacagaaucuauauucaguu

SEQ ID NO: 922785 - RNA, 22 nt, Human
ggggugggagugccauccuuga

SEQ ID NO: 922786 - RNA, 22 nt, Human
uuauaguuaguaggucauuaaa

SEQ ID NO: 922787 - RNA, 22 nt, Human
gccuucaguagugucagcugua

SEQ ID NO: 922788 - RNA, 22 nt, Human
cagguggcuucucccuaggcca

SEQ ID NO: 922789 - RNA, 22 nt, Human
cccacccacucugaccagaagc

SEQ ID NO: 922790 - RNA, 22 nt, Human
aaagaaguguugaauuugcaag

SEQ ID NO: 922791 - RNA, 23 nt, Human
uccuuugucuuugcauagauggu

SEQ ID NO: 922792 - RNA, 23 nt, Human
ugagagccuggcagccuggguuc

SEQ ID NO: 922793 - RNA, 22 nt, Human
aagggcagaaagggacgcuuug

SEQ ID NO: 922794 - RNA, 22 nt, Human
uaaauaagucacugaccauuua

SEQ ID NO: 922795 - RNA, 22 nt, Human
uagucacaaccuucaaguuguc

SEQ ID NO: 922796 - RNA, 22 nt, Human
caggaggaacaagagguucugg

SEQ ID NO: 922797 - RNA, 22 nt, Human
gggaagggagcuggguauuuag

SEQ ID NO: 922798 - RNA, 22 nt, Human
ugcagcugcaggagggugggag

SEQ ID NO: 922799 - RNA, 22 nt, Human
acugagggacucccaccuggca

SEQ ID NO: 922800 - RNA, 21 nt, Human
uccucagggccccagagcacu

SEQ ID NO: 922801 - RNA, 22 nt, Human
augcuucuugagauagaaacac

SEQ ID NO: 922802 - RNA, 22 nt, Human
agacauuuuggaaaguauuacu

SEQ ID NO: 922803 - RNA, 20 nt, Human
gggaggcgagggcugagcag

SEQ ID NO: 922804 - RNA, 22 nt, Human
gagagggcucuguguggguacu

SEQ ID NO: 922805 - RNA, 22 nt, Human
gagugugucggucagcguggcg

SEQ ID NO: 922806 - RNA, 22 nt, Human
uuggaagcccucugcaagaucc

SEQ ID NO: 922807 - RNA, 22 nt, Human
aacaugauuggaaaaugcuguc

SEQ ID NO: 922808 - RNA, 22 nt, Human
auacaguaaccacauucuauag

SEQ ID NO: 922809 - RNA, 22 nt, Human
uaggaagguccaugucuuaucu

SEQ ID NO: 922810 - RNA, 22 nt, Human
ugguggcaugauagugugaaug

SEQ ID NO: 922811 - RNA, 19 nt, Human
gcugucugaugcugagguc

SEQ ID NO: 922812 - RNA, 22 nt, Human
auggccagagaggccagccugg

SEQ ID NO: 922813 - RNA, 23 nt, Human
uggucucagccugugagagcuga

SEQ ID NO: 922814 - RNA, 22 nt, Human
auagccagcauauagcagggag

SEQ ID NO: 922815 - RNA, 22 nt, Human
augaaucuguuuuuugucaaua

SEQ ID NO: 922816 - RNA, 22 nt, Human
agaaguaugugagaaauuaucc

SEQ ID NO: 922817 - RNA, 20 nt, Human
gaaggaagggggcaagguga

SEQ ID NO: 922818 - RNA, 22 nt, Human
cauuugaaauucuuagaacaaa

SEQ ID NO: 922819 - RNA, 22 nt, Human
agcaagacucagcaggauacca

SEQ ID NO: 922820 - RNA, 22 nt, Human
aaggcuuggaccagcuacagug

SEQ ID NO: 922821 - RNA, 22 nt, Human
ggccugcuauuggugggcagac

SEQ ID NO: 922822 - RNA, 22 nt, Human
cagcugugagcagccaguugcc

SEQ ID NO: 922823 - RNA, 22 nt, Human
agaggaggcucugggaucgucc

SEQ ID NO: 922824 - RNA, 22 nt, Human
agcaggaacucagggaguucuc

SEQ ID NO: 922825 - RNA, 22 nt, Human
uuugagaaacagacgaaagaca

SEQ ID NO: 922826 - RNA, 22 nt, Human
agacuauuaccuaaaagauaca

SEQ ID NO: 922827 - RNA, 21 nt, Human
gugcagaggaauguagggggc

SEQ ID NO: 922828 - RNA, 22 nt, Human
auucagcauaaucaguagcuug

SEQ ID NO: 922829 - RNA, 22 nt, Human
uucauguuguaguauguaucag

SEQ ID NO: 922830 - RNA, 22 nt, Human
uaagacagguaguaagaacauu

SEQ ID NO: 922831 - RNA, 22 nt, Human
ucaguggaguauggaugaaguc

SEQ ID NO: 922832 - RNA, 20 nt, Human
aauugcccauccuccuagcc

SEQ ID NO: 922833 - RNA, 22 nt, Human
ucauauuuauauguuggcacag

SEQ ID NO: 922834 - RNA, 21 nt, Human
uuggaaucuuaggaguguggg

SEQ ID NO: 922835 - RNA, 22 nt, Human
cuaggcugcaccuaggauggcu

SEQ ID NO: 922836 - RNA, 22 nt, Human
gccagccagggaagggagagac

SEQ ID NO: 922837 - RNA, 22 nt, Human
aaggaagcagccagagacccuc

SEQ ID NO: 922838 - RNA, 22 nt, Human
agguaaauauaaaucuuacucu

SEQ ID NO: 922839 - RNA, 22 nt, Human
gucuuauuuaaggacaagaaga

SEQ ID NO: 922840 - RNA, 22 nt, Human
aaguugaagcaugaaccaaggu

SEQ ID NO: 922841 - RNA, 21 nt, Human
aagcagcuuaauaaaguaugu

SEQ ID NO: 922842 - RNA, 20 nt, Human
ugcagagcugacauuaccug

SEQ ID NO: 922843 - RNA, 22 nt, Human
cagugcaguggcugagcuggag

SEQ ID NO: 922844 - RNA, 22 nt, Human
gagggaagucauaauguucuag

SEQ ID NO: 922845 - RNA, 21 nt, Human
aggacaggaacuggcugaaua

SEQ ID NO: 922846 - RNA, 22 nt, Human
ugacaaacagggaguuugcuca

SEQ ID NO: 922847 - RNA, 22 nt, Human
auuuacagccuugaaaacagca

SEQ ID NO: 922848 - RNA, 20 nt, Human
aaagcauuuacuugugauug

SEQ ID NO: 922849 - RNA, 21 nt, Human
guugaauauccauguaugugu

SEQ ID NO: 922850 - RNA, 20 nt, Human
cuuagaaauuuuuacccugg

SEQ ID NO: 922851 - RNA, 22 nt, Human
uggcucagaagaaaagguaaac

SEQ ID NO: 922852 - RNA, 20 nt, Human
uggcagaguugucccaccca

SEQ ID NO: 922853 - RNA, 22 nt, Human
agaugcagaguuugcuguggac

SEQ ID NO: 922854 - RNA, 22 nt, Human
aggagggugauccgggcugguc

SEQ ID NO: 922855 - RNA, 22 nt, Human
aagccuuaaauguuucuaauau

SEQ ID NO: 922856 - RNA, 23 nt, Human
uuucuucucgaagagggagcuua

SEQ ID NO: 922857 - RNA, 22 nt, Human
gagcaggcauucuaguggcuga

SEQ ID NO: 922858 - RNA, 17 nt, Human
augugucugaguguccu

SEQ ID NO: 922859 - RNA, 22 nt, Human
caauuucagucucagagaguuc

SEQ ID NO: 922860 - RNA, 22 nt, Human
aaggcugugucagaagcucccu

SEQ ID NO: 922861 - RNA, 22 nt, Human
gcuggaguccaguggcaugauc

SEQ ID NO: 922862 - RNA, 22 nt, Human
auaaagucucauggguaaaugu

SEQ ID NO: 922863 - RNA, 22 nt, Human
gguuuccaaugacaaacacugu

SEQ ID NO: 922864 - RNA, 22 nt, Human
ugucauuaaaaugcuucucaaa

SEQ ID NO: 922865 - RNA, 22 nt, Human
gagggagggacuagcauucucu

SEQ ID NO: 922866 - RNA, 22 nt, Human
agcuguuuccauucuugaguag

SEQ ID NO: 922867 - RNA, 22 nt, Human
cucagacauuuguagaaagugc

SEQ ID NO: 922868 - RNA, 22 nt, Human
gccuguuggugacuuucuguug

SEQ ID NO: 922869 - RNA, 22 nt, Human
cuaagacaugcccugcaugaua

SEQ ID NO: 922870 - RNA, 22 nt, Human
aaaugcaggauuaacagcuuug

SEQ ID NO: 922871 - RNA, 22 nt, Human
aaagcuggcuuuuacaggggcu

SEQ ID NO: 922872 - RNA, 22 nt, Human
ucuucacauucacguaacauag

SEQ ID NO: 922873 - RNA, 22 nt, Human
augggucccuggccgcccucgg

SEQ ID NO: 922874 - RNA, 22 nt, Human
auuuguuccaugaguaaggcua

SEQ ID NO: 922875 - RNA, 22 nt, Human
acagauuuaggacuguagcgau

SEQ ID NO: 922876 - RNA, 22 nt, Human
auguguucacgugcacaugugc

SEQ ID NO: 922877 - RNA, 22 nt, Human
agaaauguugaauacacaaaau

SEQ ID NO: 922878 - RNA, 22 nt, Human
acauucuaugaagauaauuuua

SEQ ID NO: 922879 - RNA, 22 nt, Human
cauacucacuguuguaucuucg

SEQ ID NO: 922880 - RNA, 22 nt, Human
uaugcuuugcaauuggaaaagg

SEQ ID NO: 922881 - RNA, 22 nt, Human
gccagagcagaauagaguggcc

SEQ ID NO: 922882 - RNA, 22 nt, Human
ccuggccagaggcgugccugug

SEQ ID NO: 922883 - RNA, 22 nt, Human
cccucaccaggcuccaggcaug

SEQ ID NO: 922884 - RNA, 22 nt, Human
uugacaaguaauacuuaaauua

SEQ ID NO: 922885 - RNA, 22 nt, Human
ccccauucuggccagcccagcu

SEQ ID NO: 922886 - RNA, 22 nt, Human
acagccugagaguggagcuggc

SEQ ID NO: 922887 - RNA, 22 nt, Human
ccuggccucgugcucacggcuc

SEQ ID NO: 922888 - RNA, 18 nt, Human
auuuugaacaaugcugua

SEQ ID NO: 922889 - RNA, 22 nt, Human
auguacauuauucgagugaugg

SEQ ID NO: 922890 - RNA, 22 nt, Human
acaguuacauuaaacaaaagga

SEQ ID NO: 922891 - RNA, 22 nt, Human
uuuuaugauugagcuggcuaca

SEQ ID NO: 922892 - RNA, 22 nt, Human
cagaagacagagcacuucucuu

SEQ ID NO: 922893 - RNA, 22 nt, Human
ugaaggugaaugucuaugggga

SEQ ID NO: 922894 - RNA, 22 nt, Human
ucucccaggcuggagugcagug

SEQ ID NO: 922895 - RNA, 20 nt, Human
ugaagagugcgcacauugcc

SEQ ID NO: 922896 - RNA, 22 nt, Human
aggcugcugccuuggagagugu

SEQ ID NO: 922897 - RNA, 22 nt, Human
ggcauuugacucagugacuggg

SEQ ID NO: 922898 - RNA, 22 nt, Human
gcuuucugcucuguaaaauggg

SEQ ID NO: 922899 - RNA, 22 nt, Human
ugucagagcaaugagguucagc

SEQ ID NO: 922900 - RNA, 22 nt, Human
gauauuuuuaguauuucugccu

SEQ ID NO: 922901 - RNA, 22 nt, Human
ggccauggucaugggugagcuu

SEQ ID NO: 922902 - RNA, 20 nt, Human
aggcucaggguguuuaggaa

SEQ ID NO: 922903 - RNA, 22 nt, Human
cuggggagacgaucgauguucu

SEQ ID NO: 922904 - RNA, 22 nt, Human
augcauaucagugauuguuugc

SEQ ID NO: 922905 - RNA, 22 nt, Human
aagugguguguuggaagaaauc

SEQ ID NO: 922906 - RNA, 22 nt, Human
uaggaagggcucagggcucggu

SEQ ID NO: 922907 - RNA, 22 nt, Human
agcaggugucggcgagggucuu

SEQ ID NO: 922908 - RNA, 22 nt, Human
ucugcacaggcguagguugacu

SEQ ID NO: 922909 - RNA, 22 nt, Human
caaauguuucuugaacaccaac

SEQ ID NO: 922910 - RNA, 22 nt, Human
ucugagcccucuuuugcagccc

SEQ ID NO: 922911 - RNA, 22 nt, Human
aaaacaggugucagcaaacuau

SEQ ID NO: 922912 - RNA, 22 nt, Human
uuaaaucaguaggcuacuccuu

SEQ ID NO: 922913 - RNA, 22 nt, Human
uauggaugaguuccugaggagu

SEQ ID NO: 922914 - RNA, 22 nt, Human
accaggcccgcugcuauggugg

SEQ ID NO: 922915 - RNA, 22 nt, Human
guaaagcucucauuuaauauca

SEQ ID NO: 922916 - RNA, 22 nt, Human
caguggguaggaaaggcucuuc

SEQ ID NO: 922917 - RNA, 22 nt, Human
ucucacagcaggggccaggucu

SEQ ID NO: 922918 - RNA, 22 nt, Human
auucugaggacagagucuagca

SEQ ID NO: 922919 - RNA, 21 nt, Human
uaguucuacuucagucucaug

SEQ ID NO: 922920 - RNA, 22 nt, Human
uagauuugaaugauguaaagag

SEQ ID NO: 922921 - RNA, 22 nt, Human
ggaggccaugaggcucuaggug

SEQ ID NO: 922922 - RNA, 22 nt, Human
aaagaucagucugaagcaacau

SEQ ID NO: 922923 - RNA, 22 nt, Human
gucugucucucuccagagugca

SEQ ID NO: 922924 - RNA, 21 nt, Human
agcuuguuauuaauucagaac

SEQ ID NO: 922925 - RNA, 22 nt, Human
uggagaauuaggccaaaucucc

SEQ ID NO: 922926 - RNA, 22 nt, Human
ccugcugucaguggggcaggca

SEQ ID NO: 922927 - RNA, 22 nt, Human
cauuuccugucuggaggucaaa

SEQ ID NO: 922928 - RNA, 22 nt, Human
auucucuucugaugucuugcca

SEQ ID NO: 922929 - RNA, 22 nt, Human
auguuucaccagcaaauuaccu

SEQ ID NO: 922930 - RNA, 22 nt, Human
guuuuuauuguguaaauguggg

SEQ ID NO: 922931 - RNA, 22 nt, Human
uacaaccagauccucuaaguca

SEQ ID NO: 922932 - RNA, 22 nt, Human
uaggcuggggguaggaauugag

SEQ ID NO: 922933 - RNA, 22 nt, Human
cuuuccuccacucccuaggcuu

SEQ ID NO: 922934 - RNA, 22 nt, Human
cuacaggucaagcaguagcucu

SEQ ID NO: 922935 - RNA, 22 nt, Human
ugaaggagcugauguaaggggu

SEQ ID NO: 922936 - RNA, 22 nt, Human
uuucugggacuggggagauucu

SEQ ID NO: 922937 - RNA, 20 nt, Human
cagggccacgcuccaaggca

SEQ ID NO: 922938 - RNA, 22 nt, Human
cacagguucaccucagguaggu

SEQ ID NO: 922939 - RNA, 22 nt, Human
aaacagauugaaauucguagua

SEQ ID NO: 922940 - RNA, 19 nt, Human
acaaauaguuacauauccu

SEQ ID NO: 922941 - RNA, 22 nt, Human
aguaagauucuucugaaaaauu

SEQ ID NO: 922942 - RNA, 22 nt, Human
ucuuuauguugauuuccucagg

SEQ ID NO: 922943 - RNA, 22 nt, Human
caaaugauagagccgauuauca

SEQ ID NO: 922944 - RNA, 22 nt, Human
uaaaggcaguucugauuagguc

SEQ ID NO: 922945 - RNA, 22 nt, Human
aaacaaguuuagaauaaugaau

SEQ ID NO: 922946 - RNA, 22 nt, Human
uaacacauaucuacaacaugug

SEQ ID NO: 922947 - RNA, 22 nt, Human
uaguuucuagacaguaagaauu

SEQ ID NO: 922948 - RNA, 22 nt, Human
uagaaacauauaggauggcagg

SEQ ID NO: 922949 - RNA, 22 nt, Human
ugcaggagcccuugggcucugg

SEQ ID NO: 922950 - RNA, 22 nt, Human
aaauccuaauaaugcacuagug

SEQ ID NO: 922951 - RNA, 22 nt, Human
cuuucucuucagcacccagccc

SEQ ID NO: 922952 - RNA, 22 nt, Human
gcaauaaaauguaaugauuggg

SEQ ID NO: 922953 - RNA, 22 nt, Human
ggaggccaugggcagaaucuuu

SEQ ID NO: 922954 - RNA, 22 nt, Human
agaaauuaugcaguaguuuuau

SEQ ID NO: 922955 - RNA, 22 nt, Human
aguaaacacuaaaaugacugcg

SEQ ID NO: 922956 - RNA, 22 nt, Human
caguguuuguauagaauaugca

SEQ ID NO: 922957 - RNA, 22 nt, Human
gggcuugcugauuugggcagga

SEQ ID NO: 922958 - RNA, 19 nt, Human
ccagcagcuuugauucucu

SEQ ID NO: 922959 - RNA, 22 nt, Human
gcuuucuguagguaguuacugu

SEQ ID NO: 922960 - RNA, 22 nt, Human
gcaaagcacacuggagaugucg

SEQ ID NO: 922961 - RNA, 22 nt, Human
ggcugccucaaagcucaagcuc

SEQ ID NO: 922962 - RNA, 22 nt, Human
gagcucccaggccccagcaagg

SEQ ID NO: 922963 - RNA, 22 nt, Human
agugaacaaguuaagaacacua

SEQ ID NO: 922964 - RNA, 22 nt, Human
cugcccugcuggagaucacagu

SEQ ID NO: 922965 - RNA, 22 nt, Human
ugcucaguagcagugugcugcu

SEQ ID NO: 922966 - RNA, 22 nt, Human
uauuaaauguuauuuggguugu

SEQ ID NO: 922967 - RNA, 22 nt, Human
agaagugcuccagugaguuggg

SEQ ID NO: 922968 - RNA, 22 nt, Human
agcagcagggacaaaggaacag

SEQ ID NO: 922969 - RNA, 22 nt, Human
ucuccaggccuuucccaucuua

SEQ ID NO: 922970 - RNA, 22 nt, Human
cugucugcuagaacaucuauac

SEQ ID NO: 922971 - RNA, 22 nt, Human
caaggagaguaauugaaugaga

SEQ ID NO: 922972 - RNA, 22 nt, Human
cuggcccugguaaggacaccca

SEQ ID NO: 922973 - RNA, 18 nt, Human
gagaaaguuugggcagaa

SEQ ID NO: 922974 - RNA, 22 nt, Human
agggggcuccuuggugugcaga

SEQ ID NO: 922975 - RNA, 23 nt, Human
ugcuaaaggcagaauauucaccu

SEQ ID NO: 922976 - RNA, 22 nt, Human
uguauuuauucaggauguaacu

SEQ ID NO: 922977 - RNA, 21 nt, Human
agcugcaggccucccagggau

SEQ ID NO: 922978 - RNA, 22 nt, Human
aaacagcugucauuguuuuaaa

SEQ ID NO: 922979 - RNA, 22 nt, Human
uuuacugaacugcuaguacagg

SEQ ID NO: 922980 - RNA, 22 nt, Human
gagcugcauagcugggauccuc

SEQ ID NO: 922981 - RNA, 23 nt, Human
ucuauacauacugcagccucugg

SEQ ID NO: 922982 - RNA, 22 nt, Human
cuggagagggagcccuggcagu

SEQ ID NO: 922983 - RNA, 22 nt, Human
gccagcuuuggcacaggguggu

SEQ ID NO: 922984 - RNA, 22 nt, Human
aaaaauguuaucuacuguccga

SEQ ID NO: 922985 - RNA, 22 nt, Human
gcaguggcccagcuugcaggcu

SEQ ID NO: 922986 - RNA, 22 nt, Human
guuuuucuaggaccaugugauu

SEQ ID NO: 922987 - RNA, 22 nt, Human
agcugcagcguucauuuuucca

SEQ ID NO: 922988 - RNA, 20 nt, Human
acaauagauuugagcaaagu

SEQ ID NO: 922989 - RNA, 22 nt, Human
ugaggcucacgaacagaagacu

SEQ ID NO: 922990 - RNA, 22 nt, Human
gcuggcagggugguugagagag

SEQ ID NO: 922991 - RNA, 22 nt, Human
cauucuugaaccaggcacugug

SEQ ID NO: 922992 - RNA, 22 nt, Human
aaugcauaccaugucaucuuug

SEQ ID NO: 922993 - RNA, 22 nt, Human
gggggaaagcucaggagccugu

SEQ ID NO: 922994 - RNA, 22 nt, Human
ugcccuguggguaucugauggc

SEQ ID NO: 922995 - RNA, 22 nt, Human
agccccugggaguagcugcugc

SEQ ID NO: 922996 - RNA, 22 nt, Human
cauuccuuaacguggggagucu

SEQ ID NO: 922997 - RNA, 22 nt, Human
gucaggcauuuaggaugaguuc

SEQ ID NO: 922998 - RNA, 22 nt, Human
agcagccagugggagugauaca

SEQ ID NO: 922999 - RNA, 22 nt, Human
accagagagagacaggguugug

SEQ ID NO: 923000 - RNA, 22 nt, Human
uuucuguaauuaaaagggcagg

SEQ ID NO: 923001 - RNA, 22 nt, Human
auuccacaguguguggugagga

SEQ ID NO: 923002 - RNA, 22 nt, Human
gugagcaguuguauaaagacuu

SEQ ID NO: 923003 - RNA, 22 nt, Human
uggcaggaggaugaggcggcua

SEQ ID NO: 923004 - RNA, 22 nt, Human
caguuuaagacaagggggugua

SEQ ID NO: 923005 - RNA, 22 nt, Human
gaaaucuuuucaucucauuuga

SEQ ID NO: 923006 - RNA, 22 nt, Human
gccuggagacagcagaggcggc

SEQ ID NO: 923007 - RNA, 22 nt, Human
ugacaaacucuuugagaacaag

SEQ ID NO: 923008 - RNA, 20 nt, Human
agcaccagugggggcagccc

SEQ ID NO: 923009 - RNA, 22 nt, Human
ccuggcagcauugguagagauu

SEQ ID NO: 923010 - RNA, 22 nt, Human
cauaacuugguguuggaaacug

SEQ ID NO: 923011 - RNA, 22 nt, Human
auuuucagguuuugccauugua

SEQ ID NO: 923012 - RNA, 22 nt, Human
aaauuauuaaacagugggaugc

SEQ ID NO: 923013 - RNA, 22 nt, Human
uggucuuagcuggaaggaggga

SEQ ID NO: 923014 - RNA, 22 nt, Human
auuagaaugcaggguucauugu

SEQ ID NO: 923015 - RNA, 22 nt, Human
agcagcauggcugacuaaagac

SEQ ID NO: 923016 - RNA, 22 nt, Human
ggagggcgacagggcgaccgcg

SEQ ID NO: 923017 - RNA, 22 nt, Human
cccaggagacagaaacagaggu

SEQ ID NO: 923018 - RNA, 22 nt, Human
ggaggggaugguuugacccugg

SEQ ID NO: 923019 - RNA, 22 nt, Human
augaaacucuagcuuucagcac

SEQ ID NO: 923020 - RNA, 22 nt, Human
ggggcugagucagugggaagag

SEQ ID NO: 923021 - RNA, 22 nt, Human
uggaauggaaacaaacugagga

SEQ ID NO: 923022 - RNA, 21 nt, Human
acacaguaacugggcgcaggg

SEQ ID NO: 923023 - RNA, 22 nt, Human
gagcgggaggaacggcucgggc

SEQ ID NO: 923024 - RNA, 22 nt, Human
cccucaggaugcaguggaagug

SEQ ID NO: 923025 - RNA, 22 nt, Human
agcagcaguccuuuguguaauu

SEQ ID NO: 923026 - RNA, 22 nt, Human
ugaaaagucuuauauugucuga

SEQ ID NO: 923027 - RNA, 22 nt, Human
ucugggagcagcucagcagauu

SEQ ID NO: 923028 - RNA, 22 nt, Human
gggagguucuguucgcacuuga

SEQ ID NO: 923029 - RNA, 22 nt, Human
gcaccugguuuauauaaucaua

SEQ ID NO: 923030 - RNA, 22 nt, Human
gagaccccagcucagccuccag

SEQ ID NO: 923031 - RNA, 22 nt, Human
gcagaggagcaaguugcuacag

SEQ ID NO: 923032 - RNA, 20 nt, Human
ugcccagcaagagugcaguu

SEQ ID NO: 923033 - RNA, 19 nt, Human
ugcagcacuaaaaacuuuc

SEQ ID NO: 923034 - RNA, 20 nt, Human
accuccuggaagcaggugcc

SEQ ID NO: 923035 - RNA, 22 nt, Human
uuaauacacuauaugaucacau

SEQ ID NO: 923036 - RNA, 22 nt, Human
aguucacauaucuguuuuauuu

SEQ ID NO: 923037 - RNA, 23 nt, Human
auuuccuacuauaaaagagguaa

SEQ ID NO: 923038 - RNA, 22 nt, Human
aggaaacuaauuaguagaauaa

SEQ ID NO: 923039 - RNA, 22 nt, Human
cuucugaccccuggucuacagc

SEQ ID NO: 923040 - RNA, 22 nt, Human
aacuagcagcuaagacauaauu

SEQ ID NO: 923041 - RNA, 22 nt, Human
cuggcagcuggaggcuagaggc

SEQ ID NO: 923042 - RNA, 22 nt, Human
aaugucuauuugcuacaaagcc

SEQ ID NO: 923043 - RNA, 22 nt, Human
aggcacugggaauaugcugagg

SEQ ID NO: 923044 - RNA, 18 nt, Human
cagcugugcccuguuugg

SEQ ID NO: 923045 - RNA, 22 nt, Human
uugcaaaagccgaggcacucca

SEQ ID NO: 923046 - RNA, 22 nt, Human
auccacccugugguggcuuucu

SEQ ID NO: 923047 - RNA, 22 nt, Human
caggccugaguguggaagucuu

SEQ ID NO: 923048 - RNA, 22 nt, Human
aagccauucaucuaauguccug

SEQ ID NO: 923049 - RNA, 22 nt, Human
agagacaaacacugcaacuucu

SEQ ID NO: 923050 - RNA, 20 nt, Human
ucucccugcccaucucagau

SEQ ID NO: 923051 - RNA, 22 nt, Human
cucaggaugaaagucaugguga

SEQ ID NO: 923052 - RNA, 22 nt, Human
ugcagaggugaaagacuagcaa

SEQ ID NO: 923053 - RNA, 22 nt, Human
ucuucaaaaauacagguuuuca

SEQ ID NO: 923054 - RNA, 22 nt, Human
uuaacucucccuccuuacaucc

SEQ ID NO: 923055 - RNA, 22 nt, Human
ugggugguccaggcucagcaga

SEQ ID NO: 923056 - RNA, 22 nt, Human
uauucauuaugaccaaaucuag

SEQ ID NO: 923057 - RNA, 22 nt, Human
cgcugggggaacuucagccaau

SEQ ID NO: 923058 - RNA, 22 nt, Human
uuuccagaugcuagguugaaag

SEQ ID NO: 923059 - RNA, 22 nt, Human
gggcagugacaaaggggaugaa

SEQ ID NO: 923060 - RNA, 22 nt, Human
aauuccacagcugcacagaggu

SEQ ID NO: 923061 - RNA, 22 nt, Human
cauuugaucuccugaauaaaca

SEQ ID NO: 923062 - RNA, 20 nt, Human
ucuggcaggugaacgagcug

SEQ ID NO: 923063 - RNA, 22 nt, Human
ccugucugcaagggguggaucc

SEQ ID NO: 923064 - RNA, 22 nt, Human
agacagcagcagaggggcuccc

SEQ ID NO: 923065 - RNA, 22 nt, Human
agggcuaggaauggaacuggag

SEQ ID NO: 923066 - RNA, 22 nt, Human
ugcauggauuugacauguguac

SEQ ID NO: 923067 - RNA, 22 nt, Human
uaccccaagagugucugccaug

SEQ ID NO: 923068 - RNA, 22 nt, Human
uauguacacacacaugcaugua

SEQ ID NO: 923069 - RNA, 22 nt, Human
uccccuuuguaagauggaaacg

SEQ ID NO: 923070 - RNA, 22 nt, Human
accagaagcuggagcacaagga

SEQ ID NO: 923071 - RNA, 22 nt, Human
cucaggauagauuguccucuca

SEQ ID NO: 923072 - RNA, 22 nt, Human
gacauaaaauucaauaauuugu

SEQ ID NO: 923073 - RNA, 20 nt, Human
aagauagaauccuaacuuug

SEQ ID NO: 923074 - RNA, 22 nt, Human
agggcuuguuuccuguuucaua

SEQ ID NO: 923075 - RNA, 18 nt, Human
caggucagccuggccuca

SEQ ID NO: 923076 - RNA, 22 nt, Human
ugcagcagguauggcaagcucc

SEQ ID NO: 923077 - RNA, 22 nt, Human
gcccaaagagcuuugaucucag

SEQ ID NO: 923078 - RNA, 20 nt, Human
auccuuggcagaauccagga

SEQ ID NO: 923079 - RNA, 22 nt, Human
aucacaauguacguuaaaaugu

SEQ ID NO: 923080 - RNA, 22 nt, Human
gugacagauuauagggagcguu

SEQ ID NO: 923081 - RNA, 22 nt, Human
cugcccaggggagugcugucgg

SEQ ID NO: 923082 - RNA, 22 nt, Human
uggcagguuaacuuacaacugu

SEQ ID NO: 923083 - RNA, 22 nt, Human
ucagugcuaaaagagcuggugu

SEQ ID NO: 923084 - RNA, 22 nt, Human
cugcaucucugcuagucaguca

SEQ ID NO: 923085 - RNA, 22 nt, Human
aucuagaagucauggcuuucuu

SEQ ID NO: 923086 - RNA, 17 nt, Human
ucagcaguaaugguggg

SEQ ID NO: 923087 - RNA, 22 nt, Human
gcaaagacggacucaggagugc

SEQ ID NO: 923088 - RNA, 22 nt, Human
cuggcuggcugugccccugccg

SEQ ID NO: 923089 - RNA, 22 nt, Human
uuaugaaagacauuucuguugg

SEQ ID NO: 923090 - RNA, 22 nt, Human
cccagggcuguagaauguccaa

SEQ ID NO: 923091 - RNA, 22 nt, Human
ggcugguguuacagucggcagc

SEQ ID NO: 923092 - RNA, 22 nt, Human
aaaugcuuagagguguucaaau

SEQ ID NO: 923093 - RNA, 22 nt, Human
uugauauuagaguauuuguuug

SEQ ID NO: 923094 - RNA, 22 nt, Human
cuuuaguuguaucagucaaguu

SEQ ID NO: 923095 - RNA, 22 nt, Human
aggaggagcagcuuuuugucuc

SEQ ID NO: 923096 - RNA, 22 nt, Human
augaagcaggcacagcuucagg

SEQ ID NO: 923097 - RNA, 22 nt, Human
uguagaaggcuauagacuagga

SEQ ID NO: 923098 - RNA, 22 nt, Human
aagggugggcccuggcagccau

SEQ ID NO: 923099 - RNA, 20 nt, Human
uucuagaaguuugcuaccca

SEQ ID NO: 923100 - RNA, 22 nt, Human
aggcacaggaaugucauccagu

SEQ ID NO: 923101 - RNA, 20 nt, Human
ucucagcauaagaacccuuc

SEQ ID NO: 923102 - RNA, 22 nt, Human
uggcugccuuucaccucaucuc

SEQ ID NO: 923103 - RNA, 22 nt, Human
aacugaaaguuucaccugaggu

SEQ ID NO: 923104 - RNA, 22 nt, Human
cagggcagggccacacccccug

SEQ ID NO: 923105 - RNA, 22 nt, Human
aacaaugaggaucuguucugag

SEQ ID NO: 923106 - RNA, 22 nt, Human
uucacaaagcuggagcauuucc

SEQ ID NO: 923107 - RNA, 22 nt, Human
aaaguagaguuguggaauuacu

SEQ ID NO: 923108 - RNA, 22 nt, Human
gcauuuuucucuccuauaggag

SEQ ID NO: 923109 - RNA, 22 nt, Human
gugcugaggccaaugucagggu

SEQ ID NO: 923110 - RNA, 22 nt, Human
ucagagagguuggugauaagaa

SEQ ID NO: 923111 - RNA, 22 nt, Human
agugcuggcccauagcugcugg

SEQ ID NO: 923112 - RNA, 22 nt, Human
ugaaaucauugccaaguauuga

SEQ ID NO: 923113 - RNA, 22 nt, Human
caggucugagucacauguucau

SEQ ID NO: 923114 - RNA, 21 nt, Human
ugugugugcaggcacacacac

SEQ ID NO: 923115 - RNA, 22 nt, Human
gugugccucccauuagggugua

SEQ ID NO: 923116 - RNA, 22 nt, Human
uggcccuguggcuucagaacag

SEQ ID NO: 923117 - RNA, 22 nt, Human
uccugagagccuuggcuucaga

SEQ ID NO: 923118 - RNA, 19 nt, Human
ccccuuguguaacuagccu

SEQ ID NO: 923119 - RNA, 22 nt, Human
ugcuauuuuuaucuugaucaaa

SEQ ID NO: 923120 - RNA, 22 nt, Human
ggaugggcccgggacggcgcug

SEQ ID NO: 923121 - RNA, 21 nt, Human
uuccacagugagaacugcaag

SEQ ID NO: 923122 - RNA, 22 nt, Human
cugagggagcugcuggccuugg

SEQ ID NO: 923123 - RNA, 22 nt, Human
cccaaggacacgggcagggaca

SEQ ID NO: 923124 - RNA, 22 nt, Human
gaggaacuuaugauauucuacu

SEQ ID NO: 923125 - RNA, 22 nt, Human
acguuaaacauuuagcauagua

SEQ ID NO: 923126 - RNA, 22 nt, Human
aguaucaaucacccuuugaagu

SEQ ID NO: 923127 - RNA, 22 nt, Human
uuucagagccuuuaucucucua

SEQ ID NO: 923128 - RNA, 22 nt, Human
cagugccaaggauggccuggga

SEQ ID NO: 923129 - RNA, 22 nt, Human
aggcccugcccagugccacaag

SEQ ID NO: 923130 - RNA, 22 nt, Human
uacaacauaacgggcauucagu

SEQ ID NO: 923131 - RNA, 22 nt, Human
uguaaacaguaggacuaaagag

SEQ ID NO: 923132 - RNA, 22 nt, Human
uaguuacagagaaaugauuuga

SEQ ID NO: 923133 - RNA, 22 nt, Human
agaagauuaugaauuagagcag

SEQ ID NO: 923134 - RNA, 22 nt, Human
ugucaguuuccugugcccugcu

SEQ ID NO: 923135 - RNA, 22 nt, Human
aaggccuugccugacagcacca

SEQ ID NO: 923136 - RNA, 22 nt, Human
agucccagugagaugaaccagg

SEQ ID NO: 923137 - RNA, 22 nt, Human
acagaauugaagcugaguaaau

SEQ ID NO: 923138 - RNA, 22 nt, Human
ugagagcuguccaccuguggga

SEQ ID NO: 923139 - RNA, 22 nt, Human
aggaaacagugaacuuggcagg

SEQ ID NO: 923140 - RNA, 22 nt, Human
uuucaucauguuggcagauugg

SEQ ID NO: 923141 - RNA, 22 nt, Human
aggcauuuggcugucauuugua

SEQ ID NO: 923142 - RNA, 22 nt, Human
ccaaggacguacaggagauaau

SEQ ID NO: 923143 - RNA, 22 nt, Human
gucucugagcucugagcuggcu

SEQ ID NO: 923144 - RNA, 22 nt, Human
ugccaggcauuugacagacacu

SEQ ID NO: 923145 - RNA, 22 nt, Human
gggcugagccacagcuuuuguu

SEQ ID NO: 923146 - RNA, 22 nt, Human
gaguggcugaguaagaggggag

SEQ ID NO: 923147 - RNA, 22 nt, Human
cuguguccuuuuaguugcugug

SEQ ID NO: 923148 - RNA, 22 nt, Human
ggcaccugucugcucacaguga

SEQ ID NO: 923149 - RNA, 22 nt, Human
auacagcaguuugugauccuag

SEQ ID NO: 923150 - RNA, 22 nt, Human
uucuggaaguuggaaauagcag

SEQ ID NO: 923151 - RNA, 22 nt, Human
cagugcagaggccagggaggau

SEQ ID NO: 923152 - RNA, 22 nt, Human
agaaucugcauuucuaauaagc

SEQ ID NO: 923153 - RNA, 22 nt, Human
ugcagggccuuguugaugugcu

SEQ ID NO: 923154 - RNA, 22 nt, Human
aggcacgagcaauggccgagga

SEQ ID NO: 923155 - RNA, 22 nt, Human
ccgggggcgggacgagcuugac

SEQ ID NO: 923156 - RNA, 22 nt, Human
cucccaggggagucaucugcuu

SEQ ID NO: 923157 - RNA, 22 nt, Human
uucagggcagacagaagagaug

SEQ ID NO: 923158 - RNA, 19 nt, Human
agacacacuuacguggaau

SEQ ID NO: 923159 - RNA, 22 nt, Human
uguuauaacaucgguugacuaa

SEQ ID NO: 923160 - RNA, 22 nt, Human
ucagagguggagauaguuggga

SEQ ID NO: 923161 - RNA, 22 nt, Human
cacaggcuugucagcaugaggc

SEQ ID NO: 923162 - RNA, 22 nt, Human
uagucucuaggaggggaaaaga

SEQ ID NO: 923163 - RNA, 22 nt, Human
ggaagcugggaucucucucccg

SEQ ID NO: 923164 - RNA, 22 nt, Human
auaagcagggucaaaugccuac

SEQ ID NO: 923165 - RNA, 22 nt, Human
aauucauagcaacaaagaccca

SEQ ID NO: 923166 - RNA, 22 nt, Human
gcuguuucucuugagucaaaau

SEQ ID NO: 923167 - RNA, 22 nt, Human
cuccucaguugucccauggaga

SEQ ID NO: 923168 - RNA, 22 nt, Human
ucuugacauucaaucauguaua

SEQ ID NO: 923169 - RNA, 22 nt, Human
uagcagcaaagcaggaucugcu

SEQ ID NO: 923170 - RNA, 22 nt, Human
uguacaaauucaguucuagggu

SEQ ID NO: 923171 - RNA, 22 nt, Human
cugagcuuaacccuguuagcaa

SEQ ID NO: 923172 - RNA, 22 nt, Human
gggacuggaacuacuggugcag

SEQ ID NO: 923173 - RNA, 22 nt, Human
agucuaguaggaucucugggcu

SEQ ID NO: 923174 - RNA, 20 nt, Human
uucucuuuggguccagagaa

SEQ ID NO: 923175 - RNA, 22 nt, Human
cugcagcuuauuugcuguguga

SEQ ID NO: 923176 - RNA, 22 nt, Human
ccucuauagaugugugcaucua

SEQ ID NO: 923177 - RNA, 22 nt, Human
aaaucacuaaguuauagugugg

SEQ ID NO: 923178 - RNA, 22 nt, Human
gcaugcagagaauaccugugau

SEQ ID NO: 923179 - RNA, 22 nt, Human
cugcucuguucccccaucaucu

SEQ ID NO: 923180 - RNA, 22 nt, Human
ucugcacauagguaggcuggaa

SEQ ID NO: 923181 - RNA, 19 nt, Human
ggugugaagugaggaguua

SEQ ID NO: 923182 - RNA, 22 nt, Human
agggcugaccuaagcuccacuu

SEQ ID NO: 923183 - RNA, 20 nt, Human
agaggcuuccuugggaggag

SEQ ID NO: 923184 - RNA, 22 nt, Human
aagaacagguucuagaaccauu

SEQ ID NO: 923185 - RNA, 22 nt, Human
cuaggccaguuaggaagagaag

SEQ ID NO: 923186 - RNA, 22 nt, Human
aggcaggggagcuggaagggua

SEQ ID NO: 923187 - RNA, 22 nt, Human
aguuuuauaucuuccauugguu

SEQ ID NO: 923188 - RNA, 22 nt, Human
ucugacagugugaauauugacu

SEQ ID NO: 923189 - RNA, 22 nt, Human
gcagagguggcaucugggcucu

SEQ ID NO: 923190 - RNA, 22 nt, Human
guagcagcucugagcaugcugc

SEQ ID NO: 923191 - RNA, 22 nt, Human
aggagagucuugagucacuggu

SEQ ID NO: 923192 - RNA, 22 nt, Human
ugugugacccccagugaagccu

SEQ ID NO: 923193 - RNA, 22 nt, Human
uugaggagguaguacagaguau

SEQ ID NO: 923194 - RNA, 22 nt, Human
uuucagagucagcuccucucua

SEQ ID NO: 923195 - RNA, 22 nt, Human
aucaauuuugaggauacaagaa

SEQ ID NO: 923196 - RNA, 22 nt, Human
aguggacauucugcacuuggag

SEQ ID NO: 923197 - RNA, 22 nt, Human
gggcagagaaauggacaguugg

SEQ ID NO: 923198 - RNA, 22 nt, Human
uacagaauauuucugcccugag

SEQ ID NO: 923199 - RNA, 22 nt, Human
aucagugcauccugccacaaag

SEQ ID NO: 923200 - RNA, 22 nt, Human
caggaugcacuaggaaccaggg

SEQ ID NO: 923201 - RNA, 22 nt, Human
ucugaaaugcaggcaauuugcu

SEQ ID NO: 923202 - RNA, 22 nt, Human
acugaauaaggugaaugcucug

SEQ ID NO: 923203 - RNA, 22 nt, Human
acacagagcaaaucaugacaga

SEQ ID NO: 923204 - RNA, 22 nt, Human
gcccucagcuccuggacacaug

SEQ ID NO: 923205 - RNA, 22 nt, Human
cuccucacacccacugcaacca

SEQ ID NO: 923206 - RNA, 22 nt, Human
cucccuggaggcccagaccugg

SEQ ID NO: 923207 - RNA, 20 nt, Human
caccagcagcagcugccacc

SEQ ID NO: 923208 - RNA, 22 nt, Human
ucaggaguacuggugucuacag

SEQ ID NO: 923209 - RNA, 22 nt, Human
cccuuagagggcucuccuuacu

SEQ ID NO: 923210 - RNA, 22 nt, Human
ugagggaggccuccaucugcca

SEQ ID NO: 923211 - RNA, 22 nt, Human
gcuuauuagguuauuucaagga

SEQ ID NO: 923212 - RNA, 22 nt, Human
caggaaauaaaaaguaucuucu

SEQ ID NO: 923213 - RNA, 22 nt, Human
cgggcagaucacacagggcuug

SEQ ID NO: 923214 - RNA, 22 nt, Human
uuucaauaacaaagcucauuuu

SEQ ID NO: 923215 - RNA, 22 nt, Human
ccagugcacagccaggcaggug

SEQ ID NO: 923216 - RNA, 22 nt, Human
cugcaggguuucgccaguugug

SEQ ID NO: 923217 - RNA, 22 nt, Human
gcagcuguggugcugagauagg

SEQ ID NO: 923218 - RNA, 22 nt, Human
uggcccugccacucacugcuga

SEQ ID NO: 923219 - RNA, 22 nt, Human
auucugggacuccuuccucccc

SEQ ID NO: 923220 - RNA, 22 nt, Human
aucuaaacuguuuacucucugc

SEQ ID NO: 923221 - RNA, 22 nt, Human
accaggcuguugggcccagugu

SEQ ID NO: 923222 - RNA, 22 nt, Human
ucugccaguuuauagacaagcc

SEQ ID NO: 923223 - RNA, 22 nt, Human
gcucccagacugaccagaggug

SEQ ID NO: 923224 - RNA, 22 nt, Human
uccaccauguaacaagcucugu

SEQ ID NO: 923225 - RNA, 22 nt, Human
aaaaaugaaacggcugguuggc

SEQ ID NO: 923226 - RNA, 22 nt, Human
guguguauuauugcauacacau

SEQ ID NO: 923227 - RNA, 22 nt, Human
cuggcucacaggugagaugcau

SEQ ID NO: 923228 - RNA, 22 nt, Human
uaucuagagccuggaagucuug

SEQ ID NO: 923229 - RNA, 22 nt, Human
aucuuucaaucaggaaaaaucu

SEQ ID NO: 923230 - RNA, 22 nt, Human
uacaguuuacaugagaggaagc

SEQ ID NO: 923231 - RNA, 22 nt, Human
ugaggccugcauugaacuagaa

SEQ ID NO: 923232 - RNA, 22 nt, Human
ugugaggcuggcaggggccagg

SEQ ID NO: 923233 - RNA, 22 nt, Human
agccaacuaggagauuaaggua

SEQ ID NO: 923234 - RNA, 22 nt, Human
uggugcuggugccacgccccuu

SEQ ID NO: 923235 - RNA, 18 nt, Human
ggccagcuccugaggcag

SEQ ID NO: 923236 - RNA, 22 nt, Human
aaacugucaccuaauguauuuu

SEQ ID NO: 923237 - RNA, 20 nt, Human
ugcagguguuggagaaggua

SEQ ID NO: 923238 - RNA, 22 nt, Human
aaguucaaaaauguaaucagug

SEQ ID NO: 923239 - RNA, 22 nt, Human
acacaacagaagagcaauugca

SEQ ID NO: 923240 - RNA, 22 nt, Human
uuagcagcuuuuaaaugguucu

SEQ ID NO: 923241 - RNA, 22 nt, Human
guugcucaggcaggaguacagu

SEQ ID NO: 923242 - RNA, 22 nt, Human
ucuuucccgccagagcaugagu

SEQ ID NO: 923243 - RNA, 22 nt, Human
uuuuccuaguaggccuauuaga

SEQ ID NO: 923244 - RNA, 22 nt, Human
uuguggcucgugagauguuagg

SEQ ID NO: 923245 - RNA, 20 nt, Human
ucaaguuuugcuugacaaga

SEQ ID NO: 923246 - RNA, 22 nt, Human
gccagcagggaagccuugggcu

SEQ ID NO: 923247 - RNA, 22 nt, Human
uaagccaaaaucaggacacaga

SEQ ID NO: 923248 - RNA, 22 nt, Human
ugaggcuuggcaaaagaguggu

SEQ ID NO: 923249 - RNA, 22 nt, Human
gagccagguuugaaucucaguc

SEQ ID NO: 923250 - RNA, 22 nt, Human
cuccucugucuaccacgagggu

SEQ ID NO: 923251 - RNA, 22 nt, Human
aggacuuccauggauggauugg

SEQ ID NO: 923252 - RNA, 22 nt, Human
ccaagaggcagaaugcagagaa

SEQ ID NO: 923253 - RNA, 21 nt, Human
agcugccugcucuggaccugg

SEQ ID NO: 923254 - RNA, 22 nt, Human
uagcuacaaaucugauaagugg

SEQ ID NO: 923255 - RNA, 23 nt, Human
uggcuucugccccauucucucca

SEQ ID NO: 923256 - RNA, 22 nt, Human
guauauuuugaucacccucuau

SEQ ID NO: 923257 - RNA, 22 nt, Human
augggcagcugcagcaguggug

SEQ ID NO: 923258 - RNA, 22 nt, Human
gccuuggcuguuggagcuugau

SEQ ID NO: 923259 - RNA, 22 nt, Human
ccuccuggugacaaggcaaagc

SEQ ID NO: 923260 - RNA, 23 nt, Human
acucagcuuugggagaugacuca

SEQ ID NO: 923261 - RNA, 22 nt, Human
uguaacaauuucuuacuauugu

SEQ ID NO: 923262 - RNA, 23 nt, Human
gcagacagagcagacuaagacaa

SEQ ID NO: 923263 - RNA, 22 nt, Human
uuuaguguagcauucagaguca

SEQ ID NO: 923264 - RNA, 22 nt, Human
aaggcugguggauuaugagguc

SEQ ID NO: 923265 - RNA, 22 nt, Human
gcaaacauuuggucuagugugu

SEQ ID NO: 923266 - RNA, 22 nt, Human
caagaaugaauucaaugugugg

SEQ ID NO: 923267 - RNA, 22 nt, Human
ucuccaggaagcccucccugac

SEQ ID NO: 923268 - RNA, 22 nt, Human
ccuugagaugagcuaauuuuuu

SEQ ID NO: 923269 - RNA, 22 nt, Human
gggguggccuguaggcagcaug

SEQ ID NO: 923270 - RNA, 22 nt, Human
gaggagugccagccguggaguc

SEQ ID NO: 923271 - RNA, 21 nt, Human
uaucagaagagaaagaaugau

SEQ ID NO: 923272 - RNA, 22 nt, Human
gguguccgcgcuguagaagguc

SEQ ID NO: 923273 - RNA, 22 nt, Human
uucauacauguguacuguucca

SEQ ID NO: 923274 - RNA, 22 nt, Human
uggcuggcuagaauggaaaugu

SEQ ID NO: 923275 - RNA, 22 nt, Human
uaguguguaugguaaugaugaa

SEQ ID NO: 923276 - RNA, 22 nt, Human
aggaugggccugggauaugcuu

SEQ ID NO: 923277 - RNA, 22 nt, Human
ucucuuuaaguauaaucuuaua

SEQ ID NO: 923278 - RNA, 22 nt, Human
agguuucuucuuaggaauaugu

SEQ ID NO: 923279 - RNA, 22 nt, Human
uucauugauaguuuuauguaug

SEQ ID NO: 923280 - RNA, 22 nt, Human
ggacagacagugugagugaggc

SEQ ID NO: 923281 - RNA, 22 nt, Human
uacacacuuacuggagaugaag

SEQ ID NO: 923282 - RNA, 22 nt, Human
gcugagccccccugcguggguc

SEQ ID NO: 923283 - RNA, 22 nt, Human
cugugggccuagucuggccuag

SEQ ID NO: 923284 - RNA, 22 nt, Human
ggagaugcaauguagaaucugg

SEQ ID NO: 923285 - RNA, 22 nt, Human
caaagauaugacauggaaaaug

SEQ ID NO: 923286 - RNA, 22 nt, Human
ccuccuggaaaaauucccuggc

SEQ ID NO: 923287 - RNA, 22 nt, Human
aaauaggaaugugguccuggga

SEQ ID NO: 923288 - RNA, 22 nt, Human
uaauaguuaugguugguucuca

SEQ ID NO: 923289 - RNA, 22 nt, Human
aggcuucagaaagaguaauugg

SEQ ID NO: 923290 - RNA, 22 nt, Human
gcuggagaugcuaugcagaggg

SEQ ID NO: 923291 - RNA, 19 nt, Human
augcaucugcauugacagg

SEQ ID NO: 923292 - RNA, 22 nt, Human
agcugggaggugggcagugaga

SEQ ID NO: 923293 - RNA, 22 nt, Human
caggaaagggaugggcugccac

SEQ ID NO: 923294 - RNA, 22 nt, Human
aggggcuccucucugagaguag

SEQ ID NO: 923295 - RNA, 22 nt, Human
gacugagguauuaagauggcuu

SEQ ID NO: 923296 - RNA, 20 nt, Human
accauaauguuaauuacaaa

SEQ ID NO: 923297 - RNA, 22 nt, Human
uacaguuucucauuaugcucuc

SEQ ID NO: 923298 - RNA, 22 nt, Human
agccccaguucccuggaagucu

SEQ ID NO: 923299 - RNA, 22 nt, Human
guuugccugugauguacauuuc

SEQ ID NO: 923300 - RNA, 22 nt, Human
caggcccuggcagggcugaguc

SEQ ID NO: 923301 - RNA, 22 nt, Human
aauuaguaaccuaauuccaucu

SEQ ID NO: 923302 - RNA, 22 nt, Human
ccccucuggucaaccagucaca

SEQ ID NO: 923303 - RNA, 22 nt, Human
acacugugacaagaaagagcug

SEQ ID NO: 923304 - RNA, 22 nt, Human
augucuucucuguagguaaauu

SEQ ID NO: 923305 - RNA, 22 nt, Human
uggggcuggggaucuugagccu

SEQ ID NO: 923306 - RNA, 22 nt, Human
cugcugucuuuauuucacugcu

SEQ ID NO: 923307 - RNA, 22 nt, Human
cucuucaguuguugcauauucu

SEQ ID NO: 923308 - RNA, 22 nt, Human
uaaaauagcuuaugucuuuuga

SEQ ID NO: 923309 - RNA, 22 nt, Human
cuucuggagcucaccaacuucc

SEQ ID NO: 923310 - RNA, 23 nt, Human
cuccccaguguccucaugcaucu

SEQ ID NO: 923311 - RNA, 22 nt, Human
aaaugaugcuacaguuuuccca

SEQ ID NO: 923312 - RNA, 22 nt, Human
cugcccugggaguaccuguccu

SEQ ID NO: 923313 - RNA, 22 nt, Human
aggacagcaguuggugagguuc

SEQ ID NO: 923314 - RNA, 20 nt, Human
cagagccaagagcagcaucu

SEQ ID NO: 923315 - RNA, 22 nt, Human
aacuuucuuggaugucucaaca

SEQ ID NO: 923316 - RNA, 22 nt, Human
cuggauaaaugcuuuaguugga

SEQ ID NO: 923317 - RNA, 22 nt, Human
ugucugugacagaccuuugcua

SEQ ID NO: 923318 - RNA, 19 nt, Human
gccagcacccagcuguguc

SEQ ID NO: 923319 - RNA, 22 nt, Human
cugaaauucugccucugcacaa

SEQ ID NO: 923320 - RNA, 22 nt, Human
ucucaagcuuguugguauguuu

SEQ ID NO: 923321 - RNA, 22 nt, Human
cagcagcagcuuaguggucccc

SEQ ID NO: 923322 - RNA, 22 nt, Human
agcuuuauauuuaaugaauucu

SEQ ID NO: 923323 - RNA, 22 nt, Human
ucucugggcccagaccuuccuu

SEQ ID NO: 923324 - RNA, 18 nt, Human
uccagagagggagaagug

SEQ ID NO: 923325 - RNA, 22 nt, Human
ccaaugaauauauuucauauga

SEQ ID NO: 923326 - RNA, 22 nt, Human
gggccagacccuuggcgaucug

SEQ ID NO: 923327 - RNA, 22 nt, Human
ugcugggcaucguaggagguac

SEQ ID NO: 923328 - RNA, 22 nt, Human
aaagguuuugguaaggcuuuaa

SEQ ID NO: 923329 - RNA, 22 nt, Human
aaaucucugcaggcaaauguga

SEQ ID NO: 923330 - RNA, 22 nt, Human
caguuuaaggcaggacauggga

SEQ ID NO: 923331 - RNA, 22 nt, Human
ccuuugugguggcccagugugg

SEQ ID NO: 923332 - RNA, 22 nt, Human
cuuuaguuuaagaacaugauga

SEQ ID NO: 923333 - RNA, 22 nt, Human
cugaggagaaagaugguccaag

SEQ ID NO: 923334 - RNA, 22 nt, Human
uguggcagcuggagguggagaa

SEQ ID NO: 923335 - RNA, 22 nt, Human
cugucugugaccucugcauguc

SEQ ID NO: 923336 - RNA, 22 nt, Human
cauuagcauuacuucaaagagu

SEQ ID NO: 923337 - RNA, 22 nt, Human
ugcaacaguggggcaugcugaa

SEQ ID NO: 923338 - RNA, 21 nt, Human
gcugccaccgcgugcuccagg

SEQ ID NO: 923339 - RNA, 22 nt, Human
agagcagcugugacauggacag

SEQ ID NO: 923340 - RNA, 22 nt, Human
acaguucacuuuuuauaucaaa

SEQ ID NO: 923341 - RNA, 22 nt, Human
cucagcagaggcaguauucagu

SEQ ID NO: 923342 - RNA, 22 nt, Human
uucacaggugagcauuaggccg

SEQ ID NO: 923343 - RNA, 22 nt, Human
ugccaaauugaauuacauaauu

SEQ ID NO: 923344 - RNA, 22 nt, Human
ugaggaagugguuguaugguuu

SEQ ID NO: 923345 - RNA, 22 nt, Human
gggauggaucuuggcugaggcu

SEQ ID NO: 923346 - RNA, 22 nt, Human
cagcaguucaauccagugcacg

SEQ ID NO: 923347 - RNA, 22 nt, Human
uucucuuuugugaugugagaug

SEQ ID NO: 923348 - RNA, 22 nt, Human
auuucauguaaauggaaugaua

SEQ ID NO: 923349 - RNA, 22 nt, Human
agagccugggcagcuccucugg

SEQ ID NO: 923350 - RNA, 22 nt, Human
acagagcuuaauucaggagcuu

SEQ ID NO: 923351 - RNA, 22 nt, Human
uuucagaaccaagagagacauc

SEQ ID NO: 923352 - RNA, 22 nt, Human
uuacacagacauggcaucauga

SEQ ID NO: 923353 - RNA, 22 nt, Human
aucagagggugagauggagaaa

SEQ ID NO: 923354 - RNA, 23 nt, Human
gggaagcuccauggaggugcugg

SEQ ID NO: 923355 - RNA, 22 nt, Human
cuguccucaacccauccuucuc

SEQ ID NO: 923356 - RNA, 22 nt, Human
ugcuguggcaguuuauguauag

SEQ ID NO: 923357 - RNA, 22 nt, Human
uggcaguguccuacugguuggu

SEQ ID NO: 923358 - RNA, 22 nt, Human
auucucugaagucuuucagggc

SEQ ID NO: 923359 - RNA, 22 nt, Human
ugccaggcccugugcuggaugc

SEQ ID NO: 923360 - RNA, 22 nt, Human
auuuucaagggagaggccucug

SEQ ID NO: 923361 - RNA, 22 nt, Human
uagagcugauaaugaggccaag

SEQ ID NO: 923362 - RNA, 22 nt, Human
aagaucuauuaugagucagguc

SEQ ID NO: 923363 - RNA, 22 nt, Human
auuagccuccuugucucaugcg

SEQ ID NO: 923364 - RNA, 22 nt, Human
agcaacagaagauagagugaau

SEQ ID NO: 923365 - RNA, 22 nt, Human
ugugugacacauugauaugugc

SEQ ID NO: 923366 - RNA, 22 nt, Human
uagcacaagaaguacacauaga

SEQ ID NO: 923367 - RNA, 23 nt, Human
ggggacaguucccacuggggucu

SEQ ID NO: 923368 - RNA, 22 nt, Human
uucaucaauguguuuaauaaug

SEQ ID NO: 923369 - RNA, 22 nt, Human
ggaagauucagcauauaugagu

SEQ ID NO: 923370 - RNA, 22 nt, Human
auucacaaagaagggaaguaca

SEQ ID NO: 923371 - RNA, 22 nt, Human
auuuccuaggugcucgagugcu

SEQ ID NO: 923372 - RNA, 22 nt, Human
ggcagauggggugacaagagag

SEQ ID NO: 923373 - RNA, 22 nt, Human
accaggaguugggggugggacc

SEQ ID NO: 923374 - RNA, 22 nt, Human
uuucuucucuaaucucaaugau

SEQ ID NO: 923375 - RNA, 22 nt, Human
aggccugagguuccugugcuca

SEQ ID NO: 923376 - RNA, 22 nt, Human
aagagcuuggacuuucaaguca

SEQ ID NO: 923377 - RNA, 22 nt, Human
cugguggcaucuugagacgguu

SEQ ID NO: 923378 - RNA, 22 nt, Human
aaaugcaaguucauauuuuguu

SEQ ID NO: 923379 - RNA, 22 nt, Human
cucagcccagcucaggucuuuc

SEQ ID NO: 923380 - RNA, 22 nt, Human
aggaaccagacagaacugaaug

SEQ ID NO: 923381 - RNA, 22 nt, Human
ggcagcaaacuggcuucaggcu

SEQ ID NO: 923382 - RNA, 20 nt, Human
ggggaagaaaaggaugugau

SEQ ID NO: 923383 - RNA, 22 nt, Human
ugugagaguugagauauuuugc

SEQ ID NO: 923384 - RNA, 17 nt, Human
ugauaguucauuuuaag

SEQ ID NO: 923385 - RNA, 22 nt, Human
uguaugcaucuuugauaaauag

SEQ ID NO: 923386 - RNA, 22 nt, Human
ucaggaagcauccugagguguc

SEQ ID NO: 923387 - RNA, 21 nt, Human
gagugucuaauccaggcuguc

SEQ ID NO: 923388 - RNA, 22 nt, Human
cagaaacacuguauuuagggaa

SEQ ID NO: 923389 - RNA, 22 nt, Human
uuccaacaauguguuauuguuc

SEQ ID NO: 923390 - RNA, 22 nt, Human
ccugcccuaugaccagcuucac

SEQ ID NO: 923391 - RNA, 22 nt, Human
aaagucuuaauguaaguuuagu

SEQ ID NO: 923392 - RNA, 22 nt, Human
agauauaauaauuuacaagugu

SEQ ID NO: 923393 - RNA, 22 nt, Human
cucuggccugcuuccucaggua

SEQ ID NO: 923394 - RNA, 22 nt, Human
gcuguccagagcaugggagcaa

SEQ ID NO: 923395 - RNA, 22 nt, Human
uccaguggcaggcggugagguc

SEQ ID NO: 923396 - RNA, 22 nt, Human
agccagcuggagaccacuguuu

SEQ ID NO: 923397 - RNA, 22 nt, Human
cugcaguuugcuaagagacaaa

SEQ ID NO: 923398 - RNA, 22 nt, Human
uauguguguuucaguggaaaug

SEQ ID NO: 923399 - RNA, 22 nt, Human
gaguggcuccaauuugguccua

SEQ ID NO: 923400 - RNA, 22 nt, Human
ucuccagggacugaggcuggag

SEQ ID NO: 923401 - RNA, 22 nt, Human
agagcuggggccagagucaagg

SEQ ID NO: 923402 - RNA, 22 nt, Human
cagugccacuuaaugaggcugc

SEQ ID NO: 923403 - RNA, 22 nt, Human
cauucaaaagcuccauguuugu

SEQ ID NO: 923404 - RNA, 22 nt, Human
uguggcagaaccagaauucaaa

SEQ ID NO: 923405 - RNA, 22 nt, Human
aaaucucaaaggcuuagcaucu

SEQ ID NO: 923406 - RNA, 22 nt, Human
aggcuguccucucuugcucagu

SEQ ID NO: 923407 - RNA, 22 nt, Human
ugagcuggagucgugagcaaag

SEQ ID NO: 923408 - RNA, 22 nt, Human
uggcagcacuagguacugagcu

SEQ ID NO: 923409 - RNA, 22 nt, Human
gggcuucugcucuuuuggugcu

SEQ ID NO: 923410 - RNA, 22 nt, Human
ucaacccuugugcaacagugau

SEQ ID NO: 923411 - RNA, 20 nt, Human
gccagcacagggagcaguuc

SEQ ID NO: 923412 - RNA, 22 nt, Human
cuaggaaaugaauacaguacac

SEQ ID NO: 923413 - RNA, 22 nt, Human
gaggccagaguuccccgaguca

SEQ ID NO: 923414 - RNA, 22 nt, Human
cagcugugucuaauuauggcug

SEQ ID NO: 923415 - RNA, 22 nt, Human
uggcagaaguacacaagcaugc

SEQ ID NO: 923416 - RNA, 22 nt, Human
gggcucuuuucugagcuucacu

SEQ ID NO: 923417 - RNA, 22 nt, Human
uucuggagacccagcaacaggg

SEQ ID NO: 923418 - RNA, 17 nt, Human
gcuccaggcgugaguga

SEQ ID NO: 923419 - RNA, 22 nt, Human
aaaccuagaaggaagggucucu

SEQ ID NO: 923420 - RNA, 22 nt, Human
agguggcucugacagcucuggu

SEQ ID NO: 923421 - RNA, 22 nt, Human
cugaggccuggccccaccacag

SEQ ID NO: 923422 - RNA, 22 nt, Human
aaaauacuguggaguguugaaa

SEQ ID NO: 923423 - RNA, 22 nt, Human
gucauuuuuuucguaauagugg

SEQ ID NO: 923424 - RNA, 22 nt, Human
ccuuuuauagaucaguguguua

SEQ ID NO: 923425 - RNA, 22 nt, Human
gugcaugaagcaggcagcuccu

SEQ ID NO: 923426 - RNA, 22 nt, Human
ugucugggucaccccuccuggc

SEQ ID NO: 923427 - RNA, 22 nt, Human
uggcucaguuucugcccagcug

SEQ ID NO: 923428 - RNA, 22 nt, Human
ggagccuggucagguuggcucc

SEQ ID NO: 923429 - RNA, 22 nt, Human
gcugccccccggacucggcggg

SEQ ID NO: 923430 - RNA, 22 nt, Human
cacacaggcaggaucccuuccc

SEQ ID NO: 923431 - RNA, 22 nt, Human
ucuuuguuuguacuguuagaau

SEQ ID NO: 923432 - RNA, 22 nt, Human
cauguuaaguguuugauaacca

SEQ ID NO: 923433 - RNA, 22 nt, Human
ucuucacaaagcuguuguuaaa

SEQ ID NO: 923434 - RNA, 22 nt, Human
cagcuccagccugacaccaaga

SEQ ID NO: 923435 - RNA, 22 nt, Human
gagccagugaucagacagggag

SEQ ID NO: 923436 - RNA, 22 nt, Human
acagcuguggccacuugcaucc

SEQ ID NO: 923437 - RNA, 22 nt, Human
acagaaaugauguuuggcaaua

SEQ ID NO: 923438 - RNA, 22 nt, Human
gugggcaaggucccugccagcu

SEQ ID NO: 923439 - RNA, 22 nt, Human
uuauguucagcaucugcuuuau

SEQ ID NO: 923440 - RNA, 22 nt, Human
agcacaaaagcagccacagaug

SEQ ID NO: 923441 - RNA, 22 nt, Human
aucugcaucagacuuugcauga

SEQ ID NO: 923442 - RNA, 22 nt, Human
uaguacaguuuuggcacaugga

SEQ ID NO: 923443 - RNA, 22 nt, Human
ggccaccucugcccuacugagu

SEQ ID NO: 923444 - RNA, 22 nt, Human
uggcauuuccucagugcucaga

SEQ ID NO: 923445 - RNA, 22 nt, Human
uguggccagggggccauguccc

SEQ ID NO: 923446 - RNA, 22 nt, Human
ggccuuagagaccaccuagucu

SEQ ID NO: 923447 - RNA, 17 nt, Human
uucugacccuagagcuc

SEQ ID NO: 923448 - RNA, 20 nt, Human
cuggggagccucgcgguggc

SEQ ID NO: 923449 - RNA, 22 nt, Human
uguggggaagaguaugacuugg

SEQ ID NO: 923450 - RNA, 22 nt, Human
aauagacuccagggucuauuuu

SEQ ID NO: 923451 - RNA, 22 nt, Human
gaggaaacauuguagaagcagu

SEQ ID NO: 923452 - RNA, 22 nt, Human
acuggcuggaguugccaaggcu

SEQ ID NO: 923453 - RNA, 22 nt, Human
auauacacuccacugauacagg

SEQ ID NO: 923454 - RNA, 22 nt, Human
uuuauuuauccuucuggauugc

SEQ ID NO: 923455 - RNA, 22 nt, Human
cugagcagcagggagacuggug

SEQ ID NO: 923456 - RNA, 22 nt, Human
auuuaagacugacuucaccagu

SEQ ID NO: 923457 - RNA, 22 nt, Human
agagaaggguguagccugggcc

SEQ ID NO: 923458 - RNA, 22 nt, Human
ggaagcuguugugagugcagca

SEQ ID NO: 923459 - RNA, 22 nt, Human
guacaaaugagaguucuguuuu

SEQ ID NO: 923460 - RNA, 22 nt, Human
agggucugaccaccaguaggga

SEQ ID NO: 923461 - RNA, 22 nt, Human
uguauuuuuagaccuuuagacc

SEQ ID NO: 923462 - RNA, 22 nt, Human
auuccucauuuguugagaacca

SEQ ID NO: 923463 - RNA, 17 nt, Human
ccaggagcgugggucuc

SEQ ID NO: 923464 - RNA, 22 nt, Human
ggaauguuuuucauugcucucu

SEQ ID NO: 923465 - RNA, 19 nt, Human
aagccagcugccagcucgg

SEQ ID NO: 923466 - RNA, 22 nt, Human
aguguugucaaacggcucagca

SEQ ID NO: 923467 - RNA, 22 nt, Human
cauuuuacugacucuugaauua

SEQ ID NO: 923468 - RNA, 22 nt, Human
ccaaggcacacucugcaagguu

SEQ ID NO: 923469 - RNA, 20 nt, Human
caauagaauguggagauaag

SEQ ID NO: 923470 - RNA, 19 nt, Human
agcagggagugguuguggg

SEQ ID NO: 923471 - RNA, 22 nt, Human
gcaagggugugaaccaaugaga

SEQ ID NO: 923472 - RNA, 22 nt, Human
ucaggagguccgcccgggaggg

SEQ ID NO: 923473 - RNA, 22 nt, Human
uguuuucugaugguuaaugagu

SEQ ID NO: 923474 - RNA, 22 nt, Human
gaggcagagguuguugcaguga

SEQ ID NO: 923475 - RNA, 23 nt, Human
uccagcucccuucaauggcacug

SEQ ID NO: 923476 - RNA, 22 nt, Human
uggccaggccggggacagaacu

SEQ ID NO: 923477 - RNA, 22 nt, Human
cugugagagugguggccuaggc

SEQ ID NO: 923478 - RNA, 20 nt, Human
gauggauuucaacaccuuuc

SEQ ID NO: 923479 - RNA, 22 nt, Human
uguuccagaggcagagauagga

SEQ ID NO: 923480 - RNA, 22 nt, Human
aagacuugaccagguugaaggc

SEQ ID NO: 923481 - RNA, 22 nt, Human
uucugcacaaauuuuagguuau

SEQ ID NO: 923482 - RNA, 23 nt, Human
uuauaaauauuuucagguguguu

SEQ ID NO: 923483 - RNA, 22 nt, Human
ugaacaaauggaaauaaccagu

SEQ ID NO: 923484 - RNA, 22 nt, Human
gggccacaggccuugcccgcag

SEQ ID NO: 923485 - RNA, 20 nt, Human
uacaguguauguauuuaggc

SEQ ID NO: 923486 - RNA, 22 nt, Human
caggcuggaguuaccuuuaggg

SEQ ID NO: 923487 - RNA, 22 nt, Human
ggugggaaggggccagugugcg

SEQ ID NO: 923488 - RNA, 22 nt, Human
ggugucugugauggcauauaac

SEQ ID NO: 923489 - RNA, 22 nt, Human
cacagcccugcgccccaguuug

SEQ ID NO: 923490 - RNA, 22 nt, Human
uuaaagagguaguuagguuuaa

SEQ ID NO: 923491 - RNA, 22 nt, Human
cucagcaggcacugugccuuac

SEQ ID NO: 923492 - RNA, 19 nt, Human
ggugcugacaucaugcuuu

SEQ ID NO: 923493 - RNA, 22 nt, Human
acauccucggggaaaggcacug

SEQ ID NO: 923494 - RNA, 22 nt, Human
uaaacaggccccagggagguug

SEQ ID NO: 923495 - RNA, 22 nt, Human
auggaauauagucuuauaucuc

SEQ ID NO: 923496 - RNA, 22 nt, Human
aauugucuugaaagcaacacuu

SEQ ID NO: 923497 - RNA, 21 nt, Human
cagagccuguguugacaguug

SEQ ID NO: 923498 - RNA, 22 nt, Human
aagcaugggaaucccacagggu

SEQ ID NO: 923499 - RNA, 22 nt, Human
gacaauaagaaaagaggaggca

SEQ ID NO: 923500 - RNA, 22 nt, Human
agcuuaaaguauuuaaauuuca

SEQ ID NO: 923501 - RNA, 22 nt, Human
acauggcucagucucaugacag

SEQ ID NO: 923502 - RNA, 22 nt, Human
ugacauuuaucaaagaaauggu

SEQ ID NO: 923503 - RNA, 22 nt, Human
gaacaauagugguaacaaagcc

SEQ ID NO: 923504 - RNA, 22 nt, Human
cggagggguuugaacagaggag

SEQ ID NO: 923505 - RNA, 22 nt, Human
ugagcuggucuugaguguagcu

SEQ ID NO: 923506 - RNA, 22 nt, Human
gcacugggggcagcagugaggg

SEQ ID NO: 923507 - RNA, 22 nt, Human
uacuuuuaugugaugaaaucug

SEQ ID NO: 923508 - RNA, 19 nt, Human
gcacacccugcaccaccau

SEQ ID NO: 923509 - RNA, 22 nt, Human
uuccuggcacauaguuagugcu

SEQ ID NO: 923510 - RNA, 22 nt, Human
caucauuuguuugcaugcagga

SEQ ID NO: 923511 - RNA, 22 nt, Human
guguccauguuguucaggguga

SEQ ID NO: 923512 - RNA, 22 nt, Human
auagcauggccaggaagcuggg

SEQ ID NO: 923513 - RNA, 22 nt, Human
aggggagaggugagcaacuucu

SEQ ID NO: 923514 - RNA, 22 nt, Human
agaucacagucaauugcaaguu

SEQ ID NO: 923515 - RNA, 22 nt, Human
gcagcaggagaguuuguccugc

SEQ ID NO: 923516 - RNA, 22 nt, Human
cugguccccagacugggcuuag

SEQ ID NO: 923517 - RNA, 22 nt, Human
agcugagggcaggaugggguga

SEQ ID NO: 923518 - RNA, 22 nt, Human
aaguuuaagguggaaguggugg

SEQ ID NO: 923519 - RNA, 22 nt, Human
uugaaaggcacaggcaccuggg

SEQ ID NO: 923520 - RNA, 22 nt, Human
gucacuuucacacuuuauugcu

SEQ ID NO: 923521 - RNA, 22 nt, Human
cccacucccugcacgccugccg

SEQ ID NO: 923522 - RNA, 22 nt, Human
uuacauuuuaguuaaccuguga

SEQ ID NO: 923523 - RNA, 22 nt, Human
gggaugagaguagggugugaaa

SEQ ID NO: 923524 - RNA, 22 nt, Human
gccaggagcccugggcaaguuc

SEQ ID NO: 923525 - RNA, 22 nt, Human
agaggcugucucauauuuugua

SEQ ID NO: 923526 - RNA, 22 nt, Human
ugagcagcaacuguccauggca

SEQ ID NO: 923527 - RNA, 22 nt, Human
aucauuuaugccccaauuagau

SEQ ID NO: 923528 - RNA, 22 nt, Human
aaagacauuagauuaacguaca

SEQ ID NO: 923529 - RNA, 22 nt, Human
augagaaggacauaaauuauag

SEQ ID NO: 923530 - RNA, 22 nt, Human
uagauaaauuagaaaguuuacu

SEQ ID NO: 923531 - RNA, 22 nt, Human
uagcagcuaccuggcuaagagu

SEQ ID NO: 923532 - RNA, 22 nt, Human
cuuauuguucagauagagauga

SEQ ID NO: 923533 - RNA, 22 nt, Human
uguagcauuuuauguaauaagu

SEQ ID NO: 923534 - RNA, 22 nt, Human
ugcucagacaagcugaacagua

SEQ ID NO: 923535 - RNA, 22 nt, Human
uauacaauggcugaaucaucca

SEQ ID NO: 923536 - RNA, 22 nt, Human
gaagaagggagugacaaaugca

SEQ ID NO: 923537 - RNA, 18 nt, Human
uggaggcagaguucuggc

SEQ ID NO: 923538 - RNA, 22 nt, Human
cucucugggcccaguuggcacc

SEQ ID NO: 923539 - RNA, 22 nt, Human
gagagaccucagaaacaaucua

SEQ ID NO: 923540 - RNA, 22 nt, Human
aagucuugaugaucuccuccuu

SEQ ID NO: 923541 - RNA, 17 nt, Human
ucuguucaugcauaccu

SEQ ID NO: 923542 - RNA, 22 nt, Human
ggcugagcaauuuugaugacau

SEQ ID NO: 923543 - RNA, 22 nt, Human
ggacagcauucuacuguaggca

SEQ ID NO: 923544 - RNA, 22 nt, Human
auagccuugacucacagcucuu

SEQ ID NO: 923545 - RNA, 22 nt, Human
cuaauguaaugauauguugaau

SEQ ID NO: 923546 - RNA, 22 nt, Human
gccucuggucccucaugcugug

SEQ ID NO: 923547 - RNA, 22 nt, Human
uuauuuguggcauaugagacga

SEQ ID NO: 923548 - RNA, 22 nt, Human
aaugcauuagcuacauaugucu

SEQ ID NO: 923549 - RNA, 22 nt, Human
ccucaaagcgguaugcagacgg

SEQ ID NO: 923550 - RNA, 22 nt, Human
gugacgugaggggcuccuguug

SEQ ID NO: 923551 - RNA, 22 nt, Human
gcagugaguuaugaucaugcca

SEQ ID NO: 923552 - RNA, 22 nt, Human
gcaggugguccccguggagugg

SEQ ID NO: 923553 - RNA, 22 nt, Human
gagagagaaccccgugcccuuc

SEQ ID NO: 923554 - RNA, 22 nt, Human
uugggccugaucggaauaagga

SEQ ID NO: 923555 - RNA, 22 nt, Human
auggcccagacucagacuggug

SEQ ID NO: 923556 - RNA, 22 nt, Human
uugggcugaucuguggaagaag

SEQ ID NO: 923557 - RNA, 22 nt, Human
acauuucucaucuaguagagua

SEQ ID NO: 923558 - RNA, 22 nt, Human
cacagaggauuuuuagggcagu

SEQ ID NO: 923559 - RNA, 22 nt, Human
gccacagcggggccgcuagagc

SEQ ID NO: 923560 - RNA, 22 nt, Human
aaugaugucgaaaaguaagcuc

SEQ ID NO: 923561 - RNA, 17 nt, Human
aucucucuaaggcaggc

SEQ ID NO: 923562 - RNA, 18 nt, Human
ucauuuugucugccuuug

SEQ ID NO: 923563 - RNA, 22 nt, Human
ucagugcucugagguccagggu

SEQ ID NO: 923564 - RNA, 22 nt, Human
cgugaaaugaguugaauuauug

SEQ ID NO: 923565 - RNA, 22 nt, Human
uccaggccacugcagaggcucu

SEQ ID NO: 923566 - RNA, 22 nt, Human
uaacagaauuugcuaaacuccg

SEQ ID NO: 923567 - RNA, 22 nt, Human
gcagggcugggugggagacaga

SEQ ID NO: 923568 - RNA, 22 nt, Human
ccagccuugacugccccagcac

SEQ ID NO: 923569 - RNA, 22 nt, Human
ccaggugggcgugucuucaccu

SEQ ID NO: 923570 - RNA, 22 nt, Human
caugcaagaagauagauuaaau

SEQ ID NO: 923571 - RNA, 22 nt, Human
ugaacaugcuguugauggccug

SEQ ID NO: 923572 - RNA, 20 nt, Human
ugaaauaaggaguuguccuu

SEQ ID NO: 923573 - RNA, 22 nt, Human
guuagugugacugaggaaugca

SEQ ID NO: 923574 - RNA, 22 nt, Human
uaaaggccagggccugagugcu

SEQ ID NO: 923575 - RNA, 20 nt, Human
gacacaggcaguccucagag

SEQ ID NO: 923576 - RNA, 22 nt, Human
cggcagagugugugcgugcaug

SEQ ID NO: 923577 - RNA, 22 nt, Human
agucaggauuuaaacucagaca

SEQ ID NO: 923578 - RNA, 22 nt, Human
cagaacugggcucgcucugguu

SEQ ID NO: 923579 - RNA, 21 nt, Human
agcagcagggaagccucaucc

SEQ ID NO: 923580 - RNA, 17 nt, Human
agcagaagucagaggga

SEQ ID NO: 923581 - RNA, 22 nt, Human
ggcccagccuggcaacaaugac

SEQ ID NO: 923582 - RNA, 22 nt, Human
auuuagguagcugucuaagugu

SEQ ID NO: 923583 - RNA, 22 nt, Human
aacucuagugcuccuuggagga

SEQ ID NO: 923584 - RNA, 23 nt, Human
ugcaacaaugaggaaagcuacug

SEQ ID NO: 923585 - RNA, 22 nt, Human
caguaaaaauguugucaaggca

SEQ ID NO: 923586 - RNA, 22 nt, Human
uguuuccauggugacagcagcu

SEQ ID NO: 923587 - RNA, 22 nt, Human
acacuuuaucaauauucaaaaa

SEQ ID NO: 923588 - RNA, 22 nt, Human
caugcaggucuggagcuugggg

SEQ ID NO: 923589 - RNA, 22 nt, Human
gcagcuggcucugggaaaaacu

SEQ ID NO: 923590 - RNA, 22 nt, Human
ccaggagggaccgcggcauccc

SEQ ID NO: 923591 - RNA, 22 nt, Human
uucaguagggcccucacacagu

SEQ ID NO: 923592 - RNA, 22 nt, Human
uggcuccacucuccaggaguuu

SEQ ID NO: 923593 - RNA, 22 nt, Human
cugugcuuucaaaagaaggguu

SEQ ID NO: 923594 - RNA, 22 nt, Human
uaacaaaguaccauagauuggg

SEQ ID NO: 923595 - RNA, 22 nt, Human
uugaaaggugacauuguuagag

SEQ ID NO: 923596 - RNA, 22 nt, Human
cagcucccgccaucgggaggca

SEQ ID NO: 923597 - RNA, 22 nt, Human
agggaaucuaggcucagagugc

SEQ ID NO: 923598 - RNA, 22 nt, Human
augcuuagguuaaauuuguaau

SEQ ID NO: 923599 - RNA, 22 nt, Human
gcaaaugcucuccagccugggu

SEQ ID NO: 923600 - RNA, 22 nt, Human
guucucucagccuuuguuauua

SEQ ID NO: 923601 - RNA, 21 nt, Human
auaagcaugcugauuacauuu

SEQ ID NO: 923602 - RNA, 22 nt, Human
uuuacaagaaaucaugaugcua

SEQ ID NO: 923603 - RNA, 21 nt, Human
uggaaaacauuuaaauagcaa

SEQ ID NO: 923604 - RNA, 22 nt, Human
agcuuucuaguuuagccaucuu

SEQ ID NO: 923605 - RNA, 22 nt, Human
ggcagucaagagggagucugaa

SEQ ID NO: 923606 - RNA, 22 nt, Human
ucuuuucauugagaacacacug

SEQ ID NO: 923607 - RNA, 22 nt, Human
aaucucuuguauuuccuuugac

SEQ ID NO: 923608 - RNA, 22 nt, Human
aucaagaguuauauuucauagu

SEQ ID NO: 923609 - RNA, 22 nt, Human
ugccucagucuaaagucucuca

SEQ ID NO: 923610 - RNA, 22 nt, Human
gccagcugaggccgugcaggcu

SEQ ID NO: 923611 - RNA, 19 nt, Human
gcaggucauuaggcuaggu

SEQ ID NO: 923612 - RNA, 22 nt, Human
ucauuuuugucuccgguuugug

SEQ ID NO: 923613 - RNA, 22 nt, Human
cauaagaagguaacauccuuaa

SEQ ID NO: 923614 - RNA, 19 nt, Human
ggucagcugggcuagaggc

SEQ ID NO: 923615 - RNA, 22 nt, Human
ugaacauugucacauuccuagc

SEQ ID NO: 923616 - RNA, 22 nt, Human
auuuuuuagccaagacucugca

SEQ ID NO: 923617 - RNA, 22 nt, Human
aauucaaagccgcuugggaauc

SEQ ID NO: 923618 - RNA, 22 nt, Human
uccgggcaacugaagggagguu

SEQ ID NO: 923619 - RNA, 22 nt, Human
cagcagaaauggauuuugagau

SEQ ID NO: 923620 - RNA, 22 nt, Human
ggcccugggacacaacaccgaa

SEQ ID NO: 923621 - RNA, 22 nt, Human
ggaggccaagucacugaccugg

SEQ ID NO: 923622 - RNA, 22 nt, Human
aaauacuguugaaugaaguaag

SEQ ID NO: 923623 - RNA, 16 nt, Human
gcugggagggagaggu

SEQ ID NO: 923624 - RNA, 22 nt, Human
ccaauacacuuuauagaagaaa

SEQ ID NO: 923625 - RNA, 19 nt, Human
ccagcccugucacuucuug

SEQ ID NO: 923626 - RNA, 22 nt, Human
agggaaggaaaagcugucgcuu

SEQ ID NO: 923627 - RNA, 22 nt, Human
cugagagguaagcagcgcagug

SEQ ID NO: 923628 - RNA, 22 nt, Human
aucagcucauuuugauggaaau

SEQ ID NO: 923629 - RNA, 22 nt, Human
ggccugagucacaucaggagag

SEQ ID NO: 923630 - RNA, 22 nt, Human
acacaugugauucuaagacagc

SEQ ID NO: 923631 - RNA, 22 nt, Human
agcgagguuuugcagauacagc

SEQ ID NO: 923632 - RNA, 22 nt, Human
gaaucuuuuuucuugccaggca

SEQ ID NO: 923633 - RNA, 22 nt, Human
cccagagcugggugggcagcgg

SEQ ID NO: 923634 - RNA, 22 nt, Human
ggcauuugagccauuggccugu

SEQ ID NO: 923635 - RNA, 20 nt, Human
acagauacccugugcuggug

SEQ ID NO: 923636 - RNA, 22 nt, Human
cagaggcuuugcccuggaaacc

SEQ ID NO: 923637 - RNA, 22 nt, Human
cagggugcauacccaugcauac

SEQ ID NO: 923638 - RNA, 22 nt, Human
ugugcuuuucucugcuccugga

SEQ ID NO: 923639 - RNA, 22 nt, Human
uggcagguuuccuccucauagu

SEQ ID NO: 923640 - RNA, 22 nt, Human
gacccuccacucacugcugugu

SEQ ID NO: 923641 - RNA, 22 nt, Human
uuccugguuuauaccuguauca

SEQ ID NO: 923642 - RNA, 22 nt, Human
gugaaacacccuccaaugcaca

SEQ ID NO: 923643 - RNA, 22 nt, Human
aggaggugcuguuuguccugga

SEQ ID NO: 923644 - RNA, 20 nt, Human
aucugcuugccuguccucgg

SEQ ID NO: 923645 - RNA, 22 nt, Human
gacugcaaccuuagacuagaaa

SEQ ID NO: 923646 - RNA, 22 nt, Human
ucuaaggucaggggaaaguuug

SEQ ID NO: 923647 - RNA, 22 nt, Human
ugggcaggauaauaucucaugu

SEQ ID NO: 923648 - RNA, 22 nt, Human
agguauuucaaagcccacuucc

SEQ ID NO: 923649 - RNA, 22 nt, Human
cagucuggaucugugcugcugu

SEQ ID NO: 923650 - RNA, 22 nt, Human
ugcugggcuggagcugccaggg

SEQ ID NO: 923651 - RNA, 21 nt, Human
uccuggcuuuaugcuaccucu

SEQ ID NO: 923652 - RNA, 22 nt, Human
ccugugcccuacaccuuuccag

SEQ ID NO: 923653 - RNA, 22 nt, Human
ccaggugugccagcagggacug

SEQ ID NO: 923654 - RNA, 22 nt, Human
aguuuucagaaauugcgaccca

SEQ ID NO: 923655 - RNA, 22 nt, Human
uuaaagcuggcguuacaguuug

SEQ ID NO: 923656 - RNA, 22 nt, Human
cugcugucgccgagcugcaugc

SEQ ID NO: 923657 - RNA, 22 nt, Human
ucugaagaaauacagcuggggu

SEQ ID NO: 923658 - RNA, 22 nt, Human
ucauacaagaucacuuuggcca

SEQ ID NO: 923659 - RNA, 22 nt, Human
ucauugaguucaaauccuucau

SEQ ID NO: 923660 - RNA, 21 nt, Human
gggugggaggacacagcaggc

SEQ ID NO: 923661 - RNA, 22 nt, Human
uacuguucaugccuucauaaag

SEQ ID NO: 923662 - RNA, 22 nt, Human
ucucaggcacugggugccaacu

SEQ ID NO: 923663 - RNA, 22 nt, Human
caugcauaugucaaaaaagcua

SEQ ID NO: 923664 - RNA, 22 nt, Human
acuggcagagguuggacaccau

SEQ ID NO: 923665 - RNA, 21 nt, Human
gccugggaagagaaagguaag

SEQ ID NO: 923666 - RNA, 22 nt, Human
acugccuucuuggccuucaaaa

SEQ ID NO: 923667 - RNA, 22 nt, Human
gaauuucaagcagugcaauguu

SEQ ID NO: 923668 - RNA, 22 nt, Human
uggcucaggugugagcugaaga

SEQ ID NO: 923669 - RNA, 22 nt, Human
ugcuuaaaggauaguuuaaacu

SEQ ID NO: 923670 - RNA, 22 nt, Human
aaacaguuucuaaucauggaga

SEQ ID NO: 923671 - RNA, 22 nt, Human
ggaugaggaagauuacugagaa

SEQ ID NO: 923672 - RNA, 22 nt, Human
ccugggcugggcgucucauggg

SEQ ID NO: 923673 - RNA, 22 nt, Human
accccucaucaguugcuuccua

SEQ ID NO: 923674 - RNA, 22 nt, Human
cuggcagguggauggggacucc

SEQ ID NO: 923675 - RNA, 22 nt, Human
agcagggcuucugugccugugc

SEQ ID NO: 923676 - RNA, 22 nt, Human
ugcccagcgcccacauucuguc

SEQ ID NO: 923677 - RNA, 22 nt, Human
cacagagacagaagcacuuaug

SEQ ID NO: 923678 - RNA, 22 nt, Human
acacagugguguuuacaaaauu

SEQ ID NO: 923679 - RNA, 22 nt, Human
caugcuuuuuucuaguauaaau

SEQ ID NO: 923680 - RNA, 22 nt, Human
uucagagcaucucuaaagccag

SEQ ID NO: 923681 - RNA, 20 nt, Human
ugggugccugccacggggcc

SEQ ID NO: 923682 - RNA, 22 nt, Human
ucaggcagaguggaagcugcaa

SEQ ID NO: 923683 - RNA, 22 nt, Human
aaaauuuuacugguguuuccuu

SEQ ID NO: 923684 - RNA, 22 nt, Human
uuucuauugaucuaauaaacau

SEQ ID NO: 923685 - RNA, 20 nt, Human
uccccagggcaucaggagca

SEQ ID NO: 923686 - RNA, 22 nt, Human
uugauucugcugaucucggacg

SEQ ID NO: 923687 - RNA, 22 nt, Human
gacaaggcaaccagggaggcuu

SEQ ID NO: 923688 - RNA, 22 nt, Human
gagcaccaaggcucugccaugg

SEQ ID NO: 923689 - RNA, 22 nt, Human
cucaccauggaucuuccauuuc

SEQ ID NO: 923690 - RNA, 22 nt, Human
agaggccaccagagguggugcc

SEQ ID NO: 923691 - RNA, 22 nt, Human
ggcagggaagcuggcaucacgg

SEQ ID NO: 923692 - RNA, 18 nt, Human
aagugacuggcaggccaa

SEQ ID NO: 923693 - RNA, 22 nt, Human
uccuggaggcaaaugaagacuc

SEQ ID NO: 923694 - RNA, 22 nt, Human
acauuuaaccaaacuguuuaau

SEQ ID NO: 923695 - RNA, 22 nt, Human
ugccacagacaggacagaacag

SEQ ID NO: 923696 - RNA, 22 nt, Human
uuaacauuucuuuuccacucau

SEQ ID NO: 923697 - RNA, 18 nt, Human
uuuuggugaggaagugag

SEQ ID NO: 923698 - RNA, 22 nt, Human
uagucucugcuuugcccuuggc

SEQ ID NO: 923699 - RNA, 22 nt, Human
gggcaugguggugcacaccugu

SEQ ID NO: 923700 - RNA, 22 nt, Human
cagcauucuacuuugugaacug

SEQ ID NO: 923701 - RNA, 21 nt, Human
agauggcucccaggucucugg

SEQ ID NO: 923702 - RNA, 19 nt, Human
gucucugcuccagggucuc

SEQ ID NO: 923703 - RNA, 22 nt, Human
ucccuugugagaacauguguug

SEQ ID NO: 923704 - RNA, 22 nt, Human
augagguaugaagugugggaua

SEQ ID NO: 923705 - RNA, 22 nt, Human
gacuuuauaaaugagaggcgga

SEQ ID NO: 923706 - RNA, 22 nt, Human
uagaagagacauagccuguggu

SEQ ID NO: 923707 - RNA, 22 nt, Human
gcaggggcuaaggacacagaga

SEQ ID NO: 923708 - RNA, 23 nt, Human
agaucacaugcugauggaaaaug

SEQ ID NO: 923709 - RNA, 22 nt, Human
aaacaguuuugccaaaaggaca

SEQ ID NO: 923710 - RNA, 22 nt, Human
ugcuggcccuggcucagggaac

SEQ ID NO: 923711 - RNA, 22 nt, Human
caguaacugaugugaucaaacg

SEQ ID NO: 923712 - RNA, 22 nt, Human
uuuccucugcugccauugcccc

SEQ ID NO: 923713 - RNA, 22 nt, Human
aacuacagugggcagaggcaau

SEQ ID NO: 923714 - RNA, 22 nt, Human
caucagaauagcucuguggaua

SEQ ID NO: 923715 - RNA, 22 nt, Human
caagagcucaccggagagcauu

SEQ ID NO: 923716 - RNA, 22 nt, Human
agugucugcggcggggaggcgg

SEQ ID NO: 923717 - RNA, 22 nt, Human
uuacaaaguguuaugauaaaca

SEQ ID NO: 923718 - RNA, 22 nt, Human
guucugaguggcccaagcccug

SEQ ID NO: 923719 - RNA, 22 nt, Human
gaaguucucagcuaggugaugu

SEQ ID NO: 923720 - RNA, 22 nt, Human
uugcaccaaaugaguuaaaauu

SEQ ID NO: 923721 - RNA, 22 nt, Human
cucuggagaacgcuauggaucu

SEQ ID NO: 923722 - RNA, 22 nt, Human
caggagguuguaagagcaggcc

SEQ ID NO: 923723 - RNA, 22 nt, Human
ugucacaauaucccaaucugcc

SEQ ID NO: 923724 - RNA, 22 nt, Human
aagggcugccagggggugccag

SEQ ID NO: 923725 - RNA, 22 nt, Human
auaguaugagcucauacacuug

SEQ ID NO: 923726 - RNA, 22 nt, Human
cuggcccuauuccaggccuucc

SEQ ID NO: 923727 - RNA, 22 nt, Human
ugggaacugcagguguuacaua

SEQ ID NO: 923728 - RNA, 22 nt, Human
uguccugugccaccuuccugag

SEQ ID NO: 923729 - RNA, 22 nt, Human
uucagagaauuggauaauucgu

SEQ ID NO: 923730 - RNA, 22 nt, Human
auuucacauuaauuugaugcuc

SEQ ID NO: 923731 - RNA, 22 nt, Human
uagacauuucugguuauugaca

SEQ ID NO: 923732 - RNA, 20 nt, Human
gcucagggccugggucugga

SEQ ID NO: 923733 - RNA, 22 nt, Human
gucuuuuuuacaccuuacauca

SEQ ID NO: 923734 - RNA, 22 nt, Human
cagauggauuuuguaggcugau

SEQ ID NO: 923735 - RNA, 22 nt, Human
gauucagcuucugagcaguaau

SEQ ID NO: 923736 - RNA, 22 nt, Human
cugggcugucccaaccccaucc

SEQ ID NO: 923737 - RNA, 18 nt, Human
acaaaugugucacaggaa

SEQ ID NO: 923738 - RNA, 22 nt, Human
agaagccacugcucccagugag

SEQ ID NO: 923739 - RNA, 22 nt, Human
ccugugcccugccaggcuggug

SEQ ID NO: 923740 - RNA, 22 nt, Human
ccccagcugagauuugaggaga

SEQ ID NO: 923741 - RNA, 22 nt, Human
caacacauugaagcuaugauga

SEQ ID NO: 923742 - RNA, 22 nt, Human
aggaaggguucuuugugaaaga

SEQ ID NO: 923743 - RNA, 22 nt, Human
cugggccacaagccugugugau

SEQ ID NO: 923744 - RNA, 22 nt, Human
agacaacaccaaaugcuagugu

SEQ ID NO: 923745 - RNA, 22 nt, Human
ggaagcacugaggcagagaggg

SEQ ID NO: 923746 - RNA, 22 nt, Human
cuuuaugaaggaacaaugcucc

SEQ ID NO: 923747 - RNA, 22 nt, Human
acucugugccaggcacuuuggg

SEQ ID NO: 923748 - RNA, 20 nt, Human
cugggcugcccagcuauggg

SEQ ID NO: 923749 - RNA, 20 nt, Human
aguguuucucaacauggggc

SEQ ID NO: 923750 - RNA, 22 nt, Human
cuggaaagugcugagacaauug

SEQ ID NO: 923751 - RNA, 22 nt, Human
ccagagagcuacaaggcauaaa

SEQ ID NO: 923752 - RNA, 22 nt, Human
cauaaaguauagaucugugggu

SEQ ID NO: 923753 - RNA, 22 nt, Human
gaggauggugagcaggacccag

SEQ ID NO: 923754 - RNA, 18 nt, Human
ggagggcuuuggggacug

SEQ ID NO: 923755 - RNA, 22 nt, Human
aguuccaccauuuaggaucugu

SEQ ID NO: 923756 - RNA, 22 nt, Human
uuugaaaggagcuuuauccaga

SEQ ID NO: 923757 - RNA, 22 nt, Human
cccauuuaugacuacacaggug

SEQ ID NO: 923758 - RNA, 22 nt, Human
cuagaaauguagauucuuagug

SEQ ID NO: 923759 - RNA, 22 nt, Human
uucuaaugaaaucuguacagua

SEQ ID NO: 923760 - RNA, 22 nt, Human
cagacaggaauucuggcguggu

SEQ ID NO: 923761 - RNA, 22 nt, Human
ucauuucaguuguucccugguu

SEQ ID NO: 923762 - RNA, 22 nt, Human
gaugugugcugcauaguauauu

SEQ ID NO: 923763 - RNA, 22 nt, Human
ugccugugucacagugauguuu

SEQ ID NO: 923764 - RNA, 22 nt, Human
aggcugugcauuuuggagggcc

SEQ ID NO: 923765 - RNA, 22 nt, Human
ucagaaucuuucuagagucuag

SEQ ID NO: 923766 - RNA, 22 nt, Human
aaugucauugugaguuaggcuu

SEQ ID NO: 923767 - RNA, 22 nt, Human
gugcacuuugggagucucagug

SEQ ID NO: 923768 - RNA, 22 nt, Human
aucagagguuauguggagggga

SEQ ID NO: 923769 - RNA, 22 nt, Human
caacaguuuauaguguuaucuu

SEQ ID NO: 923770 - RNA, 20 nt, Human
cgcccaggagggcccaugug

SEQ ID NO: 923771 - RNA, 22 nt, Human
aguccaaaucuuguuucauauc

SEQ ID NO: 923772 - RNA, 22 nt, Human
cuaucuuuuguucauuuugagu

SEQ ID NO: 923773 - RNA, 22 nt, Human
caaagcagagaacugucucauu

SEQ ID NO: 923774 - RNA, 22 nt, Human
ucuggaguuccugcaggcugug

SEQ ID NO: 923775 - RNA, 22 nt, Human
ucuagaaaguacuagagcuggu

SEQ ID NO: 923776 - RNA, 22 nt, Human
agggucagcuggcugucagggg

SEQ ID NO: 923777 - RNA, 22 nt, Human
cagugucugggacagaaaguca

SEQ ID NO: 923778 - RNA, 20 nt, Human
cagggcacacugcagccucg

SEQ ID NO: 923779 - RNA, 22 nt, Human
uccaaauagcuggaugauggug

SEQ ID NO: 923780 - RNA, 22 nt, Human
acacucugugaggcauguaaug

SEQ ID NO: 923781 - RNA, 22 nt, Human
aggccagugccuuuccagggcu

SEQ ID NO: 923782 - RNA, 22 nt, Human
acuguaaagagguguaucuuua

SEQ ID NO: 923783 - RNA, 22 nt, Human
auucaacuauguauagucuucu

SEQ ID NO: 923784 - RNA, 22 nt, Human
ucucauaaacucaguuuucuca

SEQ ID NO: 923785 - RNA, 22 nt, Human
cuuguucugugcuucuuacauu

SEQ ID NO: 923786 - RNA, 22 nt, Human
uuacaauguaaggcaugguucu

SEQ ID NO: 923787 - RNA, 22 nt, Human
uauuuccaaaagccuauuauga

SEQ ID NO: 923788 - RNA, 22 nt, Human
cagugcuguguuugcugccugg

SEQ ID NO: 923789 - RNA, 22 nt, Human
ucccuggacagccuugccuggg

SEQ ID NO: 923790 - RNA, 22 nt, Human
aucuucaacucagagagugcug

SEQ ID NO: 923791 - RNA, 21 nt, Human
gggagcuggaaacugggugac

SEQ ID NO: 923792 - RNA, 22 nt, Human
uagcaagaggaaacaaggggcc

SEQ ID NO: 923793 - RNA, 22 nt, Human
cugugugccuagaggguggccg

SEQ ID NO: 923794 - RNA, 22 nt, Human
cauucaagaguggacauaaugc

SEQ ID NO: 923795 - RNA, 22 nt, Human
aauauaaauuccugggcccagc

SEQ ID NO: 923796 - RNA, 22 nt, Human
aaugagaaaacacagaggaggu

SEQ ID NO: 923797 - RNA, 22 nt, Human
gugggguagaucuuucucagga

SEQ ID NO: 923798 - RNA, 22 nt, Human
ugagcagagcaggcugcgcccu

SEQ ID NO: 923799 - RNA, 22 nt, Human
uaucuagauuucuuucucugug

SEQ ID NO: 923800 - RNA, 22 nt, Human
ggcagugaaucugagagccugg

SEQ ID NO: 923801 - RNA, 22 nt, Human
gagguggguguaucacagguca

SEQ ID NO: 923802 - RNA, 22 nt, Human
cacagaguggaggcuuggccug

SEQ ID NO: 923803 - RNA, 22 nt, Human
acucugggauuguuucugguau

SEQ ID NO: 923804 - RNA, 22 nt, Human
gcugccccagcugggggcugga

SEQ ID NO: 923805 - RNA, 22 nt, Human
ugcagaagaaugagcuuggagu

SEQ ID NO: 923806 - RNA, 22 nt, Human
ggugcugauucacugacuucug

SEQ ID NO: 923807 - RNA, 22 nt, Human
uccuccagugguacuggccaau

SEQ ID NO: 923808 - RNA, 22 nt, Human
cucagugugagugagaagugca

SEQ ID NO: 923809 - RNA, 22 nt, Human
uggcuccuaucaaggagugggu

SEQ ID NO: 923810 - RNA, 22 nt, Human
caggcagauauguucgcuuuaa

SEQ ID NO: 923811 - RNA, 22 nt, Human
uuccuuaaugaaucaggccauu

SEQ ID NO: 923812 - RNA, 22 nt, Human
aauggacaggagagcauaguca

SEQ ID NO: 923813 - RNA, 22 nt, Human
uaacauguuuguacacugaaac

SEQ ID NO: 923814 - RNA, 22 nt, Human
uggcagaggagaauuaagauua

SEQ ID NO: 923815 - RNA, 22 nt, Human
gcagcgaggugaugaaauagcu

SEQ ID NO: 923816 - RNA, 22 nt, Human
gucccuaguggaaagacaugau

SEQ ID NO: 923817 - RNA, 22 nt, Human
caccacuguaucccuagcacuu

SEQ ID NO: 923818 - RNA, 20 nt, Human
gagggugggacuuccuaggc

SEQ ID NO: 923819 - RNA, 22 nt, Human
auaaaggauaauccauuagacu

SEQ ID NO: 923820 - RNA, 22 nt, Human
uaaucucuuuaugagaagaagg

SEQ ID NO: 923821 - RNA, 15 nt, Human
aagcagcaauauaua

SEQ ID NO: 923822 - RNA, 22 nt, Human
gggugggcccagcccagagaag

SEQ ID NO: 923823 - RNA, 22 nt, Human
aaacuucaagauucaagccugg

SEQ ID NO: 923824 - RNA, 22 nt, Human
cagugcagccaaggacaggcac

SEQ ID NO: 923825 - RNA, 22 nt, Human
ccugugcuucagcuggaggagg

SEQ ID NO: 923826 - RNA, 22 nt, Human
ggcuggagguagaagaacacuu

SEQ ID NO: 923827 - RNA, 18 nt, Human
ucuuuggacaacuacugg

SEQ ID NO: 923828 - RNA, 22 nt, Human
ucaacaauugcauguugauguu

SEQ ID NO: 923829 - RNA, 21 nt, Human
ugggggugaggccuaggaauc

SEQ ID NO: 923830 - RNA, 22 nt, Human
uuuaucugauauucagcgauuu

SEQ ID NO: 923831 - RNA, 22 nt, Human
gucuucugucugucuggcaugu

SEQ ID NO: 923832 - RNA, 22 nt, Human
aguguccccuacagaggcauuc

SEQ ID NO: 923833 - RNA, 22 nt, Human
uccagcuuauagguagauuuaa

SEQ ID NO: 923834 - RNA, 22 nt, Human
aggaagugucagggauaacgau

SEQ ID NO: 923835 - RNA, 22 nt, Human
caggacccaucagccaggcacu

SEQ ID NO: 923836 - RNA, 22 nt, Human
aacaguuuaugagauaugcuau

SEQ ID NO: 923837 - RNA, 20 nt, Human
ggcagagcuaugucuguugc

SEQ ID NO: 923838 - RNA, 22 nt, Human
aaggcaaggccaagccaucagu

SEQ ID NO: 923839 - RNA, 19 nt, Human
aucauacauguuacacucu

SEQ ID NO: 923840 - RNA, 22 nt, Human
ggagcaagagguggugaaaaau

SEQ ID NO: 923841 - RNA, 22 nt, Human
agcuccagaagccugcaaggua

SEQ ID NO: 923842 - RNA, 22 nt, Human
acagaaauuagcagugaguuua

SEQ ID NO: 923843 - RNA, 22 nt, Human
ggacccuguaaagucgugucca

SEQ ID NO: 923844 - RNA, 22 nt, Human
gcagacgucaccgagucgaugg

SEQ ID NO: 923845 - RNA, 22 nt, Human
gggcaggaggcuaauucugcau

SEQ ID NO: 923846 - RNA, 22 nt, Human
ugucaguuaaaugagguacaag

SEQ ID NO: 923847 - RNA, 22 nt, Human
cucugggagaggacacuuggag

SEQ ID NO: 923848 - RNA, 22 nt, Human
ccuugcauuuaaaggcguaggg

SEQ ID NO: 923849 - RNA, 22 nt, Human
ugaggccaaugacccugggcag

SEQ ID NO: 923850 - RNA, 22 nt, Human
uuucuagucagccauaucuagu

SEQ ID NO: 923851 - RNA, 22 nt, Human
ucugucuuagcaucuuugcuca

SEQ ID NO: 923852 - RNA, 18 nt, Human
uguugaaacuucagguaa

SEQ ID NO: 923853 - RNA, 22 nt, Human
caggccuggcccccggcacacc

SEQ ID NO: 923854 - RNA, 22 nt, Human
uacagcauauacagaaugaaca

SEQ ID NO: 923855 - RNA, 22 nt, Human
cugguggcaucuugagaugguu

SEQ ID NO: 923856 - RNA, 22 nt, Human
cugcucuggcguacucggcauc

SEQ ID NO: 923857 - RNA, 22 nt, Human
cuguucuguaagcugcuguugu

SEQ ID NO: 923858 - RNA, 22 nt, Human
aaggccaggccagaugacaguc

SEQ ID NO: 923859 - RNA, 22 nt, Human
gagcagcagcugggccagguuc

SEQ ID NO: 923860 - RNA, 22 nt, Human
ggacauuucauaagaccauucu

SEQ ID NO: 923861 - RNA, 22 nt, Human
ccaggauggggagcagauagaa

SEQ ID NO: 923862 - RNA, 22 nt, Human
agacagcaauaugggagacgga

SEQ ID NO: 923863 - RNA, 17 nt, Human
agcacuaaggauaauac

SEQ ID NO: 923864 - RNA, 22 nt, Human
cagagacauucuccccauugga

SEQ ID NO: 923865 - RNA, 22 nt, Human
acagaagaaagggagguuuugc

SEQ ID NO: 923866 - RNA, 22 nt, Human
cuguggcucauaucuguaaucu

SEQ ID NO: 923867 - RNA, 20 nt, Human
auguauauuacuggcuguga

SEQ ID NO: 923868 - RNA, 22 nt, Human
aggcuggauuuauggggacuuc

SEQ ID NO: 923869 - RNA, 22 nt, Human
ucaaacauaggcacacauucag

SEQ ID NO: 923870 - RNA, 22 nt, Human
aggucacacaacugucagaggc

SEQ ID NO: 923871 - RNA, 22 nt, Human
gcuuacaaggguaggaagucua

SEQ ID NO: 923872 - RNA, 20 nt, Human
uucaugguguauuucuuucu

SEQ ID NO: 923873 - RNA, 22 nt, Human
gcuguuauuuuacaagacuuau

SEQ ID NO: 923874 - RNA, 17 nt, Human
uaaguuauagcagaaga

SEQ ID NO: 923875 - RNA, 22 nt, Human
gugguuuuauucguuccucugu

SEQ ID NO: 923876 - RNA, 22 nt, Human
ggagggcucgucauccaccacu

SEQ ID NO: 923877 - RNA, 22 nt, Human
cccucuccuggcugcauggagc

SEQ ID NO: 923878 - RNA, 22 nt, Human
auacagaauuugcccuuuucau

SEQ ID NO: 923879 - RNA, 23 nt, Human
agcugcugggccugccguggccu

SEQ ID NO: 923880 - RNA, 22 nt, Human
aggcccugggcaguucuguagc

SEQ ID NO: 923881 - RNA, 22 nt, Human
cuggccuggagccucugggugg

SEQ ID NO: 923882 - RNA, 21 nt, Human
uagaauccuggacugggacuc

SEQ ID NO: 923883 - RNA, 22 nt, Human
cuuuggaagugauagauaugau

SEQ ID NO: 923884 - RNA, 22 nt, Human
uggcuggagugggagaaguuua

SEQ ID NO: 923885 - RNA, 22 nt, Human
ucucauugguauauacaugugu

SEQ ID NO: 923886 - RNA, 22 nt, Human
ucacagacucuugauugucuaa

SEQ ID NO: 923887 - RNA, 22 nt, Human
ucccaggcugggggccugaagu

SEQ ID NO: 923888 - RNA, 22 nt, Human
accaggaggccuugguucugag

SEQ ID NO: 923889 - RNA, 22 nt, Human
ccugaggucaugguccaguguu

SEQ ID NO: 923890 - RNA, 22 nt, Human
aagacucuaucuuuagagauca

SEQ ID NO: 923891 - RNA, 21 nt, Human
ugugucagucuuuggaagcaa

SEQ ID NO: 923892 - RNA, 22 nt, Human
ugcagggcacacgcacgggugu

SEQ ID NO: 923893 - RNA, 17 nt, Human
gaggacagggaaguagg

SEQ ID NO: 923894 - RNA, 22 nt, Human
aggcaaaauuacaaaguuauua

SEQ ID NO: 923895 - RNA, 22 nt, Human
accuuggaacugaaguguuuuu

SEQ ID NO: 923896 - RNA, 22 nt, Human
uugggcugaaguagagggcaga

SEQ ID NO: 923897 - RNA, 22 nt, Human
gcuggcagcuggaaguugggcu

SEQ ID NO: 923898 - RNA, 22 nt, Human
gcaggcccuccucuagcaaggc

SEQ ID NO: 923899 - RNA, 22 nt, Human
gaagcacauggcugugagcaac

SEQ ID NO: 923900 - RNA, 22 nt, Human
ccagagcuaaacacacaggcug

SEQ ID NO: 923901 - RNA, 23 nt, Human
aucuuacauauuuagcaccugaa

SEQ ID NO: 923902 - RNA, 22 nt, Human
cacaguaagaaaugaagaggua

SEQ ID NO: 923903 - RNA, 22 nt, Human
cagcuauuuugccuaucauggu

SEQ ID NO: 923904 - RNA, 22 nt, Human
ugucuguguccaaauuuccucu

SEQ ID NO: 923905 - RNA, 22 nt, Human
accaggccuagcaaguacauua

SEQ ID NO: 923906 - RNA, 22 nt, Human
aggaaugucauagaauaaucau

SEQ ID NO: 923907 - RNA, 20 nt, Human
guagaaccaugugugcuggg

SEQ ID NO: 923908 - RNA, 22 nt, Human
gggagaagaaugugucaauugu

SEQ ID NO: 923909 - RNA, 22 nt, Human
aaucuguauugcucauacuuga

SEQ ID NO: 923910 - RNA, 22 nt, Human
agauucagaaaugaggagggcc

SEQ ID NO: 923911 - RNA, 22 nt, Human
ggguggugagauguagcugaug

SEQ ID NO: 923912 - RNA, 22 nt, Human
gcugucugggugcccaaaagaa

SEQ ID NO: 923913 - RNA, 22 nt, Human
caggagcucuuaaggaugugau

SEQ ID NO: 923914 - RNA, 22 nt, Human
gaggccaggggagucagcgucc

SEQ ID NO: 923915 - RNA, 22 nt, Human
auacacacgugcacgugggaaa

SEQ ID NO: 923916 - RNA, 22 nt, Human
gugcaaauuccacuggaaagcu

SEQ ID NO: 923917 - RNA, 22 nt, Human
cagggcccagucccugcuguca

SEQ ID NO: 923918 - RNA, 20 nt, Human
ucagcucuuagaggucgcuu

SEQ ID NO: 923919 - RNA, 22 nt, Human
aagaguuugggcaagucauaaa

SEQ ID NO: 923920 - RNA, 22 nt, Human
ccaggcaaaacagauuuguaug

SEQ ID NO: 923921 - RNA, 22 nt, Human
uuucuugacugcuuaggaaugc

SEQ ID NO: 923922 - RNA, 22 nt, Human
agugcaggcucgcuugugaggc

SEQ ID NO: 923923 - RNA, 17 nt, Human
ugcuuucuuccugcccu

SEQ ID NO: 923924 - RNA, 22 nt, Human
ucucucucagccauuacagaac

SEQ ID NO: 923925 - RNA, 22 nt, Human
gggcugccuuucuucugggagc

SEQ ID NO: 923926 - RNA, 22 nt, Human
aggaggccgauuucagaggucg

SEQ ID NO: 923927 - RNA, 22 nt, Human
cagcuaaggcuccuucuaggua

SEQ ID NO: 923928 - RNA, 22 nt, Human
caagccuuggaaauccauucug

SEQ ID NO: 923929 - RNA, 22 nt, Human
aaucuagagacaauuugaauau

SEQ ID NO: 923930 - RNA, 22 nt, Human
gaggcuccucauucaguaugcu

SEQ ID NO: 923931 - RNA, 22 nt, Human
agcuuguuauaaaugcagaaug

SEQ ID NO: 923932 - RNA, 22 nt, Human
guuauuuauaagguguaacucc

SEQ ID NO: 923933 - RNA, 22 nt, Human
cuggaggcugaguugggucucc

SEQ ID NO: 923934 - RNA, 19 nt, Human
uauguguauauguaucugu

SEQ ID NO: 923935 - RNA, 22 nt, Human
ugggccuuguccccucagcugu

SEQ ID NO: 923936 - RNA, 22 nt, Human
cuuccuguugucacagucugcg

SEQ ID NO: 923937 - RNA, 22 nt, Human
guucacaagaugugguggggag

SEQ ID NO: 923938 - RNA, 22 nt, Human
cugcucugagaggcucuuccua

SEQ ID NO: 923939 - RNA, 22 nt, Human
uggcugaguuccuggcacacgg

SEQ ID NO: 923940 - RNA, 22 nt, Human
acauauauguaaaguacuuugu

SEQ ID NO: 923941 - RNA, 21 nt, Human
gccacugugcacacuaaccca

SEQ ID NO: 923942 - RNA, 20 nt, Human
gcugaggucccugugguuuu

SEQ ID NO: 923943 - RNA, 22 nt, Human
ugccuuccuaauggugggguuu

SEQ ID NO: 923944 - RNA, 22 nt, Human
gaggacacaugacuccagcagg

SEQ ID NO: 923945 - RNA, 19 nt, Human
cagcaagaaugaaggcaua

SEQ ID NO: 923946 - RNA, 22 nt, Human
cccugcagcauucucuaacugg

SEQ ID NO: 923947 - RNA, 22 nt, Human
ccucugaguccuuugggcucuc

SEQ ID NO: 923948 - RNA, 22 nt, Human
aacuuuuucugggauggagggu

SEQ ID NO: 923949 - RNA, 22 nt, Human
gaauuacaaagugagacaagcu

SEQ ID NO: 923950 - RNA, 22 nt, Human
gucucucugacugguccacacc

SEQ ID NO: 923951 - RNA, 22 nt, Human
ugccaggcuccggaacgacagu

SEQ ID NO: 923952 - RNA, 22 nt, Human
acucuacagaaugaauaccugu

SEQ ID NO: 923953 - RNA, 22 nt, Human
ggcagccaguagggccagccug

SEQ ID NO: 923954 - RNA, 22 nt, Human
agcagggcaugaauaaggguuu

SEQ ID NO: 923955 - RNA, 22 nt, Human
acaugucuuuuaaagucuaaua

SEQ ID NO: 923956 - RNA, 22 nt, Human
acaugcacaccuauauacaugu

SEQ ID NO: 923957 - RNA, 22 nt, Human
uccaugugacgguggcaguuuu

SEQ ID NO: 923958 - RNA, 21 nt, Human
cucuuuguggcaauguauuuu

SEQ ID NO: 923959 - RNA, 22 nt, Human
acuguggccuuguggguucagg

SEQ ID NO: 923960 - RNA, 22 nt, Human
gcaugcugcaccagagccucuc

SEQ ID NO: 923961 - RNA, 23 nt, Human
ccaucaggccuccguguccagcc

SEQ ID NO: 923962 - RNA, 22 nt, Human
agcuuuaucagaggagucucua

SEQ ID NO: 923963 - RNA, 22 nt, Human
uacacauaggaggguaauaaaa

SEQ ID NO: 923964 - RNA, 22 nt, Human
cugcuucuaagaaccugcagcu

SEQ ID NO: 923965 - RNA, 22 nt, Human
uacacaugacaguggacugaga

SEQ ID NO: 923966 - RNA, 22 nt, Human
gccugccuggagcuugagguga

SEQ ID NO: 923967 - RNA, 21 nt, Human
uuuuuucuugcgugaggccug

SEQ ID NO: 923968 - RNA, 22 nt, Human
uuacauuaggucaagcugccaa

SEQ ID NO: 923969 - RNA, 22 nt, Human
guuuccaggaaggguugggagg

SEQ ID NO: 923970 - RNA, 22 nt, Human
cugucugggucuacauccucug

SEQ ID NO: 923971 - RNA, 22 nt, Human
cucuuuggcuuugacucccauu

SEQ ID NO: 923972 - RNA, 22 nt, Human
uagcagcuaugccauuuugaca

SEQ ID NO: 923973 - RNA, 22 nt, Human
ugaguccaucgcagggaagugg

SEQ ID NO: 923974 - RNA, 22 nt, Human
cugaggcugggcuugccuucuu

SEQ ID NO: 923975 - RNA, 22 nt, Human
ggcccagugucccggucguggc

SEQ ID NO: 923976 - RNA, 22 nt, Human
uuuuacagucagucaaacucag

SEQ ID NO: 923977 - RNA, 22 nt, Human
augucuguggcaauuguugaug

SEQ ID NO: 923978 - RNA, 22 nt, Human
aucuuggauuggagaaagaagu

SEQ ID NO: 923979 - RNA, 22 nt, Human
acuacuaguggcuacaauaaug

SEQ ID NO: 923980 - RNA, 22 nt, Human
aaauuguugaucuacaguaagg

SEQ ID NO: 923981 - RNA, 22 nt, Human
cagccucuuuccacaucaggca

SEQ ID NO: 923982 - RNA, 21 nt, Human
aagaggcaucacuauuugugu

SEQ ID NO: 923983 - RNA, 22 nt, Human
uuguuuuuaaacaugugacuga

SEQ ID NO: 923984 - RNA, 22 nt, Human
uucccaaagcuuugucugugaa

SEQ ID NO: 923985 - RNA, 22 nt, Human
ccguaugucuggguuucuuaau

SEQ ID NO: 923986 - RNA, 22 nt, Human
uggaauguguucuauuuuacag

SEQ ID NO: 923987 - RNA, 22 nt, Human
ucuagaauacugugacaugcca

SEQ ID NO: 923988 - RNA, 22 nt, Human
cugugucucccaaggaggguca

SEQ ID NO: 923989 - RNA, 22 nt, Human
uugauuuuuuucuacuaugcgc

SEQ ID NO: 923990 - RNA, 22 nt, Human
uuggggcaccuccccagcauuu

SEQ ID NO: 923991 - RNA, 22 nt, Human
aggagcaaggaagcuacaguuu

SEQ ID NO: 923992 - RNA, 22 nt, Human
uuuguucaauauguguuugucc

SEQ ID NO: 923993 - RNA, 22 nt, Human
ugggccugagcucaccaggggc

SEQ ID NO: 923994 - RNA, 22 nt, Human
ucugccacuagugguuaccuua

SEQ ID NO: 923995 - RNA, 22 nt, Human
gucagcagaaacgccacaugca

SEQ ID NO: 923996 - RNA, 22 nt, Human
gaaagcaguauuuaguucuguu

SEQ ID NO: 923997 - RNA, 22 nt, Human
aauguagaugagauauuuuuug

SEQ ID NO: 923998 - RNA, 22 nt, Human
uauuucuuuucgugacuuauug

SEQ ID NO: 923999 - RNA, 22 nt, Human
ugggcugcuuccucagcugaga

SEQ ID NO: 924000 - RNA, 22 nt, Human
ggagaggagcuauugggggcuc

SEQ ID NO: 924001 - RNA, 22 nt, Human
acagggccagccugggaccugg

SEQ ID NO: 924002 - RNA, 22 nt, Human
cuagaaucccaaauggacuggg

SEQ ID NO: 924003 - RNA, 22 nt, Human
guacauaauuuucagccaguuu

SEQ ID NO: 924004 - RNA, 22 nt, Human
ccaggaguggcuggugaccuuc

SEQ ID NO: 924005 - RNA, 22 nt, Human
ugauuucccuguagccucugaa

SEQ ID NO: 924006 - RNA, 22 nt, Human
ucuggcuccguguccgcuccca

SEQ ID NO: 924007 - RNA, 22 nt, Human
ggcuuguccuucugguugucuu

SEQ ID NO: 924008 - RNA, 22 nt, Human
gucucuguuauuuccaggguca

SEQ ID NO: 924009 - RNA, 23 nt, Human
guuaacaugguccauggaagagc

SEQ ID NO: 924010 - RNA, 22 nt, Human
ggcggguguaaguaggacagcg

SEQ ID NO: 924011 - RNA, 22 nt, Human
uccaggagaggccugaccaggu

SEQ ID NO: 924012 - RNA, 22 nt, Human
ccucucucagcuugcugcaacu

SEQ ID NO: 924013 - RNA, 22 nt, Human
uggcucagagccuugagagcug

SEQ ID NO: 924014 - RNA, 22 nt, Human
acaguuuagagcaugaugacca

SEQ ID NO: 924015 - RNA, 22 nt, Human
aauuuguauacauguuacauuu

SEQ ID NO: 924016 - RNA, 22 nt, Human
uuggaagacauuaaagagagug

SEQ ID NO: 924017 - RNA, 22 nt, Human
cuacaguagagguugucaggga

SEQ ID NO: 924018 - RNA, 22 nt, Human
cuggcccucggaguccagcugc

SEQ ID NO: 924019 - RNA, 22 nt, Human
agaggaggauuuguaaaggucu

SEQ ID NO: 924020 - RNA, 20 nt, Human
aguucucuuccuugggccug

SEQ ID NO: 924021 - RNA, 22 nt, Human
uaugcacauuaucuaauccauu

SEQ ID NO: 924022 - RNA, 22 nt, Human
gcuggcugccaauuucagagcu

SEQ ID NO: 924023 - RNA, 22 nt, Human
acauuugucuggcuagaaaguu

SEQ ID NO: 924024 - RNA, 22 nt, Human
aaggcaauggcaagagaaagca

SEQ ID NO: 924025 - RNA, 22 nt, Human
gugagucuuaagcaccaccuuu

SEQ ID NO: 924026 - RNA, 18 nt, Human
gagugcgguggugcacac

SEQ ID NO: 924027 - RNA, 22 nt, Human
aggaguguugcuucagggaagc

SEQ ID NO: 924028 - RNA, 22 nt, Human
agcagccuugcaggggucgcac

SEQ ID NO: 924029 - RNA, 22 nt, Human
cuugcaugcauuugaagaucau

SEQ ID NO: 924030 - RNA, 22 nt, Human
ugucaccucuuuggcugcagcu

SEQ ID NO: 924031 - RNA, 22 nt, Human
uuccuagggcagagccgcuggg

SEQ ID NO: 924032 - RNA, 20 nt, Human
ucaaaauaggugugggcgga

SEQ ID NO: 924033 - RNA, 23 nt, Human
gccuggcuuccaagguaggggag

SEQ ID NO: 924034 - RNA, 22 nt, Human
cagaaagcucuuucaaucuugc

SEQ ID NO: 924035 - RNA, 22 nt, Human
uagaaucauugagaauaacagg

SEQ ID NO: 924036 - RNA, 22 nt, Human
aguaaauaacagagaaaauggg

SEQ ID NO: 924037 - RNA, 22 nt, Human
auugcugaaaugaaaggauaug

SEQ ID NO: 924038 - RNA, 22 nt, Human
uucccucuccaggagcccugag

SEQ ID NO: 924039 - RNA, 22 nt, Human
uguaucaaggguuuauguaagc

SEQ ID NO: 924040 - RNA, 22 nt, Human
uccagcuuugccugaucauaua

SEQ ID NO: 924041 - RNA, 22 nt, Human
uucaugugaucacagauuguaa

SEQ ID NO: 924042 - RNA, 22 nt, Human
agcagguggacagaggaagaaa

SEQ ID NO: 924043 - RNA, 22 nt, Human
gacaauguguugaaagggaaaa

SEQ ID NO: 924044 - RNA, 22 nt, Human
uaacaagaaauacauugguucu

SEQ ID NO: 924045 - RNA, 22 nt, Human
gcuugcaugauauggcaucugg

SEQ ID NO: 924046 - RNA, 22 nt, Human
uauaggaaauuuaucuccuggg

SEQ ID NO: 924047 - RNA, 22 nt, Human
agccacagugcaagagagaaaa

SEQ ID NO: 924048 - RNA, 22 nt, Human
ggccaguuuccaugcacuauuu

SEQ ID NO: 924049 - RNA, 22 nt, Human
cuaaaaauccacacuaggugaa

SEQ ID NO: 924050 - RNA, 22 nt, Human
aaguuugugagguuaaucccuu

SEQ ID NO: 924051 - RNA, 22 nt, Human
ugcacacaguggacaagucuug

SEQ ID NO: 924052 - RNA, 22 nt, Human
agaggccagaucaucauagaug

SEQ ID NO: 924053 - RNA, 20 nt, Human
uuuacauuuugaaacaguga

SEQ ID NO: 924054 - RNA, 22 nt, Human
ucugcugucugauucccacuuc

SEQ ID NO: 924055 - RNA, 22 nt, Human
uggagacaugggcgaaucuaag

SEQ ID NO: 924056 - RNA, 17 nt, Human
ugguucuuuucauuccc

SEQ ID NO: 924057 - RNA, 22 nt, Human
uuucaaagcaacugaaaaggaa

SEQ ID NO: 924058 - RNA, 22 nt, Human
uuccuaggauggugaagcagga

SEQ ID NO: 924059 - RNA, 23 nt, Human
aaagugacuuuuauaccacuaac

SEQ ID NO: 924060 - RNA, 22 nt, Human
cacaugcccagaacuucucauu

SEQ ID NO: 924061 - RNA, 22 nt, Human
uccugggaagcgccggccugcg

SEQ ID NO: 924062 - RNA, 22 nt, Human
aaagccaguucuuagagaaagc

SEQ ID NO: 924063 - RNA, 22 nt, Human
ugcuggcuuugcgagaugcauu

SEQ ID NO: 924064 - RNA, 22 nt, Human
agaaaacuggagccugggguug

SEQ ID NO: 924065 - RNA, 22 nt, Human
aaggcuccagugaaugcuggca

SEQ ID NO: 924066 - RNA, 22 nt, Human
cacagggcaggccccaggccuc

SEQ ID NO: 924067 - RNA, 22 nt, Human
uguucucaguaauucuauuuua

SEQ ID NO: 924068 - RNA, 22 nt, Human
ugcaggguggagcggaagcgga

SEQ ID NO: 924069 - RNA, 22 nt, Human
ccaggccugcauucccucucag

SEQ ID NO: 924070 - RNA, 22 nt, Human
ugccucagagugggcuugcuau

SEQ ID NO: 924071 - RNA, 22 nt, Human
acaguggagaaggcaugaggcu

SEQ ID NO: 924072 - RNA, 22 nt, Human
ucuguucuugcuuuucuccaac

SEQ ID NO: 924073 - RNA, 22 nt, Human
acagcagguuuuaacuuugaag

SEQ ID NO: 924074 - RNA, 22 nt, Human
caucacaggcauuuugaguguc

SEQ ID NO: 924075 - RNA, 22 nt, Human
cuccagaggaaagcacauagug

SEQ ID NO: 924076 - RNA, 22 nt, Human
cagcucucuaaggucuugcuuu

SEQ ID NO: 924077 - RNA, 22 nt, Human
gugugcuguuguucagguagaa

SEQ ID NO: 924078 - RNA, 22 nt, Human
auacugugugcagaguccuaau

SEQ ID NO: 924079 - RNA, 22 nt, Human
uguguuucagaaccuucuuuca

SEQ ID NO: 924080 - RNA, 21 nt, Human
ugcucagucugucuccagcuu

SEQ ID NO: 924081 - RNA, 22 nt, Human
gcugugcuauaucucugagugu

SEQ ID NO: 924082 - RNA, 22 nt, Human
ccuccugcaccuccaggaacuc

SEQ ID NO: 924083 - RNA, 22 nt, Human
guuuaagaaaauucauguuguu

SEQ ID NO: 924084 - RNA, 21 nt, Human
aguuuccucaacugcagaagg

SEQ ID NO: 924085 - RNA, 22 nt, Human
uaggcuuuguguuuugggaaca

SEQ ID NO: 924086 - RNA, 22 nt, Human
caccugggcuuucucugggacu

SEQ ID NO: 924087 - RNA, 22 nt, Human
gcaaagaaaguuuuaaugaggu

SEQ ID NO: 924088 - RNA, 22 nt, Human
guuuuccauggaggucugaccu

SEQ ID NO: 924089 - RNA, 22 nt, Human
uccaggaguggggcagaggucu

SEQ ID NO: 924090 - RNA, 22 nt, Human
ucaggaguaaagaagacuugac

SEQ ID NO: 924091 - RNA, 22 nt, Human
aucuaagauuuugcuaagauca

SEQ ID NO: 924092 - RNA, 22 nt, Human
ggcaguuccagaauuucaguac

SEQ ID NO: 924093 - RNA, 22 nt, Human
ugagcuuacgugggaacagacu

SEQ ID NO: 924094 - RNA, 20 nt, Human
agaguuuggggucauuuugg

SEQ ID NO: 924095 - RNA, 22 nt, Human
auuucaacguuagauguaauag

SEQ ID NO: 924096 - RNA, 20 nt, Human
acguggccaccaguggcuua

SEQ ID NO: 924097 - RNA, 22 nt, Human
uggagcugauacagcuggcuuu

SEQ ID NO: 924098 - RNA, 22 nt, Human
ucauacaacuaagaguuucaga

SEQ ID NO: 924099 - RNA, 22 nt, Human
cuccagggaggucugcaggacu

SEQ ID NO: 924100 - RNA, 22 nt, Human
gcaaaaaaugcuuguugcuuag

SEQ ID NO: 924101 - RNA, 22 nt, Human
acuuucuuaggcuguauaaaug

SEQ ID NO: 924102 - RNA, 21 nt, Human
agcagccauggaugguaugua

SEQ ID NO: 924103 - RNA, 22 nt, Human
auaauuacauuauacuguuaga

SEQ ID NO: 924104 - RNA, 22 nt, Human
gggcugagucugcugccuguca

SEQ ID NO: 924105 - RNA, 22 nt, Human
aauaaguacuuggggauaacuu

SEQ ID NO: 924106 - RNA, 22 nt, Human
auguguuaaugagcaaugaccu

SEQ ID NO: 924107 - RNA, 22 nt, Human
uauacuaugcuucugauccaau

SEQ ID NO: 924108 - RNA, 22 nt, Human
uauguauauguauacacacaca

SEQ ID NO: 924109 - RNA, 22 nt, Human
ucauggcacaugcccuccaggg

SEQ ID NO: 924110 - RNA, 21 nt, Human
caugauaaugaagguguuauu

SEQ ID NO: 924111 - RNA, 23 nt, Human
aaauuauugcucuucaauugccu

SEQ ID NO: 924112 - RNA, 23 nt, Human
accaggagccaagaucucccugg

SEQ ID NO: 924113 - RNA, 22 nt, Human
auuugucuucaguagguucuuc

SEQ ID NO: 924114 - RNA, 22 nt, Human
gaaaucuuuauggaaauaacaa

SEQ ID NO: 924115 - RNA, 18 nt, Human
uaauuugcacaguugcaa

SEQ ID NO: 924116 - RNA, 19 nt, Human
uaagguuuaccagcaaaau

SEQ ID NO: 924117 - RNA, 22 nt, Human
acagacauauuuggcccauagc

SEQ ID NO: 924118 - RNA, 22 nt, Human
caaauguuucuuaucuauuguu

SEQ ID NO: 924119 - RNA, 22 nt, Human
uuuggaauuacuuacucaagcc

SEQ ID NO: 924120 - RNA, 22 nt, Human
uauauacuaugcgauuccugcc

SEQ ID NO: 924121 - RNA, 22 nt, Human
acagugcuaaacacuucuugaa

SEQ ID NO: 924122 - RNA, 22 nt, Human
gggaaggcaccaugguguucca

SEQ ID NO: 924123 - RNA, 22 nt, Human
uucuugcaucacucugcuguuc

SEQ ID NO: 924124 - RNA, 22 nt, Human
caggagguugguagcaguagau

SEQ ID NO: 924125 - RNA, 22 nt, Human
caugggcugaaaaucugcaaac

SEQ ID NO: 924126 - RNA, 20 nt, Human
aggaagcugagauguagagg

SEQ ID NO: 924127 - RNA, 22 nt, Human
auacauauaugguacuuccugg

SEQ ID NO: 924128 - RNA, 22 nt, Human
augcugaaggugaauugacaau

SEQ ID NO: 924129 - RNA, 22 nt, Human
acugaacagccugaggagucac

SEQ ID NO: 924130 - RNA, 22 nt, Human
gacaagacugguuuauuuaagg

SEQ ID NO: 924131 - RNA, 22 nt, Human
uucaaaagcgguccaggaagau

SEQ ID NO: 924132 - RNA, 20 nt, Human
agaaauacuuugguauaaug

SEQ ID NO: 924133 - RNA, 21 nt, Human
uuuaaagaauaggaagggagg

SEQ ID NO: 924134 - RNA, 22 nt, Human
caacuacauccacacuuuguua

SEQ ID NO: 924135 - RNA, 22 nt, Human
gggaggcucugcucagcccccg

SEQ ID NO: 924136 - RNA, 22 nt, Human
uguaaagcaucucugucauaua

SEQ ID NO: 924137 - RNA, 20 nt, Human
ucggcuggacacugugcacu

SEQ ID NO: 924138 - RNA, 22 nt, Human
cuucaguguccucucuaguaga

SEQ ID NO: 924139 - RNA, 22 nt, Human
aauaguaaaagauacagcuaau

SEQ ID NO: 924140 - RNA, 22 nt, Human
cccaggcucuuaugugacuugc

SEQ ID NO: 924141 - RNA, 22 nt, Human
auagacacagaucuauauaugu

SEQ ID NO: 924142 - RNA, 22 nt, Human
ugauuugagguacauaaaucca

SEQ ID NO: 924143 - RNA, 22 nt, Human
gaaaugcuacacuuguuaauga

SEQ ID NO: 924144 - RNA, 22 nt, Human
uggaaaacaaagcucucauuau

SEQ ID NO: 924145 - RNA, 22 nt, Human
gaaacacaugcagcuccauaga

SEQ ID NO: 924146 - RNA, 22 nt, Human
uucaacacugaucguuuacaca

SEQ ID NO: 924147 - RNA, 22 nt, Human
cagcaucuguauccuaggcuga

SEQ ID NO: 924148 - RNA, 22 nt, Human
uguuuauuacaguucuuggaau

SEQ ID NO: 924149 - RNA, 22 nt, Human
aaagagcuuuagaaaucucaga

SEQ ID NO: 924150 - RNA, 22 nt, Human
uccugagguggauugagcagag

SEQ ID NO: 924151 - RNA, 22 nt, Human
aaaaguaauugcaguuuuguca

SEQ ID NO: 924152 - RNA, 17 nt, Human
cucuuuauaaagaguua

SEQ ID NO: 924153 - RNA, 22 nt, Human
ggagccugugggaugagaugug

SEQ ID NO: 924154 - RNA, 22 nt, Human
agaaucaaggugaagcccacag

SEQ ID NO: 924155 - RNA, 22 nt, Human
auucuggguucaugagugagcu

SEQ ID NO: 924156 - RNA, 22 nt, Human
gagcaggccuggggugaggccu

SEQ ID NO: 924157 - RNA, 22 nt, Human
augaauaaacaggugccucuuc

SEQ ID NO: 924158 - RNA, 22 nt, Human
agaguucugaauuuuauucucu

SEQ ID NO: 924159 - RNA, 19 nt, Human
gcauaaaaugucaaugugu

SEQ ID NO: 924160 - RNA, 22 nt, Human
ccagagucuuuauauuccugaa

SEQ ID NO: 924161 - RNA, 22 nt, Human
cucaggauuaaggaaucuaaau

SEQ ID NO: 924162 - RNA, 22 nt, Human
auuaagugacuaaaguaaugcu

SEQ ID NO: 924163 - RNA, 22 nt, Human
cagggccagagagggcuggcug

SEQ ID NO: 924164 - RNA, 22 nt, Human
guucccaggcccugggcucucc

SEQ ID NO: 924165 - RNA, 20 nt, Human
cucuauuauuaauuucuuaa

SEQ ID NO: 924166 - RNA, 22 nt, Human
cauuuugugcuagacacuaugg

SEQ ID NO: 924167 - RNA, 22 nt, Human
aauguuauuguccuuuccaaaa

SEQ ID NO: 924168 - RNA, 22 nt, Human
aaccaauuuaaauauaaagacu

SEQ ID NO: 924169 - RNA, 21 nt, Human
agcugccacccuagcuucuga

SEQ ID NO: 924170 - RNA, 22 nt, Human
uaaucuagucccacauggaauu

SEQ ID NO: 924171 - RNA, 20 nt, Human
caucuccugccuccauguuc

SEQ ID NO: 924172 - RNA, 16 nt, Human
cuuccucuucacuggc

SEQ ID NO: 924173 - RNA, 22 nt, Human
cucugccaguuucuggccucag

SEQ ID NO: 924174 - RNA, 22 nt, Human
gcuggguuuucuuccgggccua

SEQ ID NO: 924175 - RNA, 20 nt, Human
gcugaagauucccaugcaag

SEQ ID NO: 924176 - RNA, 22 nt, Human
caagagcugaggcuggagaggu

SEQ ID NO: 924177 - RNA, 22 nt, Human
ccugugguuuacucuguggcua

SEQ ID NO: 924178 - RNA, 22 nt, Human
gucuuauuggguccaagguggc

SEQ ID NO: 924179 - RNA, 22 nt, Human
agggccagggaagcuguauuuu

SEQ ID NO: 924180 - RNA, 20 nt, Human
agcuucauuauagcccacag

SEQ ID NO: 924181 - RNA, 22 nt, Human
cagguggggagaguguggagca

SEQ ID NO: 924182 - RNA, 22 nt, Human
ugagcagaaguuauaaauaaga

SEQ ID NO: 924183 - RNA, 22 nt, Human
agggagcuaggauccugaaggu

SEQ ID NO: 924184 - RNA, 22 nt, Human
uuauaugaguaucauaucacuu

SEQ ID NO: 924185 - RNA, 21 nt, Human
uccugagugugcccaggcucu

SEQ ID NO: 924186 - RNA, 22 nt, Human
uuucuaagugaacauucaaguu

SEQ ID NO: 924187 - RNA, 22 nt, Human
agcccagcuuugaaccauauca

SEQ ID NO: 924188 - RNA, 22 nt, Human
uacaguuaaaaaguucaauggu

SEQ ID NO: 924189 - RNA, 22 nt, Human
guuuacaaauauuuuaaauggu

SEQ ID NO: 924190 - RNA, 22 nt, Human
uaaagcugcaggcucagaaaac

SEQ ID NO: 924191 - RNA, 22 nt, Human
gcccuccaccagagcccuucuc

SEQ ID NO: 924192 - RNA, 22 nt, Human
ccucuccagcggccucagggcc

SEQ ID NO: 924193 - RNA, 22 nt, Human
gcucccacugcagcccugagcc

SEQ ID NO: 924194 - RNA, 22 nt, Human
uuccuggccucucucugagcag

SEQ ID NO: 924195 - RNA, 22 nt, Human
aggcucagggacucccucccuc

SEQ ID NO: 924196 - RNA, 22 nt, Human
aagccaggccauucucugguuc

SEQ ID NO: 924197 - RNA, 22 nt, Human
cagagccaggguugcaccccug

SEQ ID NO: 924198 - RNA, 22 nt, Human
aguguuucuggcaaaugaaagu

SEQ ID NO: 924199 - RNA, 22 nt, Human
accaggcucugccaguguuuac

SEQ ID NO: 924200 - RNA, 22 nt, Human
aggcuccaccagucaggugcau

SEQ ID NO: 924201 - RNA, 22 nt, Human
cugggcugcagcgggagcgacg

SEQ ID NO: 924202 - RNA, 22 nt, Human
ccagacuguggaguuccuggug

SEQ ID NO: 924203 - RNA, 22 nt, Human
gcuguucuccgaugaccccgug

SEQ ID NO: 924204 - RNA, 22 nt, Human
ucagaggaugcuguucuuuaau

SEQ ID NO: 924205 - RNA, 22 nt, Human
gugcucuauagagaucuaaucg

SEQ ID NO: 924206 - RNA, 22 nt, Human
ggcagucacaggggagacuggg

SEQ ID NO: 924207 - RNA, 22 nt, Human
gcaagcaaaaugggagauuccc

SEQ ID NO: 924208 - RNA, 22 nt, Human
uucuaaauggggauccuuucug

SEQ ID NO: 924209 - RNA, 22 nt, Human
gcugcccaaugguagugucuuu

SEQ ID NO: 924210 - RNA, 22 nt, Human
ugguguguuagagcucagggca

SEQ ID NO: 924211 - RNA, 22 nt, Human
gcggggggaggaacaucuugca

SEQ ID NO: 924212 - RNA, 22 nt, Human
guccaaauuccacagauuucuc

SEQ ID NO: 924213 - RNA, 22 nt, Human
cugcagggcccaaggucaacgg

SEQ ID NO: 924214 - RNA, 22 nt, Human
gcagguggaucaccacgucagg

SEQ ID NO: 924215 - RNA, 20 nt, Human
ucuguaaagacuccagaagc

SEQ ID NO: 924216 - RNA, 22 nt, Human
cucucuggaagggggagcugau

SEQ ID NO: 924217 - RNA, 22 nt, Human
uggggaugaaacccaggcaucu

SEQ ID NO: 924218 - RNA, 22 nt, Human
agucaucucuucuacaauaugg

SEQ ID NO: 924219 - RNA, 22 nt, Human
aaaagagagcugaggagcucca

SEQ ID NO: 924220 - RNA, 22 nt, Human
cccuggagcuagucugagcaga

SEQ ID NO: 924221 - RNA, 22 nt, Human
ucugcaagcucaguucugacuu

SEQ ID NO: 924222 - RNA, 22 nt, Human
ugcuggcuccaaccuggcaucu

SEQ ID NO: 924223 - RNA, 19 nt, Human
ccagucccauacaggagau

SEQ ID NO: 924224 - RNA, 22 nt, Human
uuccuuccauagcaaaacaugc

SEQ ID NO: 924225 - RNA, 22 nt, Human
auaggcuuggcuuauucuuggg

SEQ ID NO: 924226 - RNA, 22 nt, Human
acuguaaaacagguuucaucau

SEQ ID NO: 924227 - RNA, 22 nt, Human
cagcugaguuacucugaggucu

SEQ ID NO: 924228 - RNA, 22 nt, Human
uguuugcuauauccuacuucau

SEQ ID NO: 924229 - RNA, 22 nt, Human
cagacacugcagcagucuccca

SEQ ID NO: 924230 - RNA, 22 nt, Human
ucagcaagaagucauuuguagc

SEQ ID NO: 924231 - RNA, 22 nt, Human
cagcucuguucauagauggugc

SEQ ID NO: 924232 - RNA, 22 nt, Human
acauccauuugcuuuauuugcu

SEQ ID NO: 924233 - RNA, 22 nt, Human
aauguucagcuuucuuacuuaa

SEQ ID NO: 924234 - RNA, 22 nt, Human
aggcucaguauagcuggcaagu

SEQ ID NO: 924235 - RNA, 22 nt, Human
agcugccagcaucccggaaggg

SEQ ID NO: 924236 - RNA, 22 nt, Human
gcuggccauggggagugaggag

SEQ ID NO: 924237 - RNA, 22 nt, Human
aaaugcaaggccaugugaagga

SEQ ID NO: 924238 - RNA, 22 nt, Human
cauguaaaaaauuaggucaucu

SEQ ID NO: 924239 - RNA, 22 nt, Human
uacugcauagacacugggauau

SEQ ID NO: 924240 - RNA, 22 nt, Human
ccagagaggcaaaacuccuucc

SEQ ID NO: 924241 - RNA, 22 nt, Human
ucagcaguccuccaggaucaag

SEQ ID NO: 924242 - RNA, 22 nt, Human
ccccaaaauucuuaaguugaau

SEQ ID NO: 924243 - RNA, 22 nt, Human
gacuccucucuaacccacugga

SEQ ID NO: 924244 - RNA, 22 nt, Human
gaaauguacuuuaaagccaucc

SEQ ID NO: 924245 - RNA, 22 nt, Human
ucuaggaggcacacaaguaguu

SEQ ID NO: 924246 - RNA, 22 nt, Human
ggcugcagguugguuggcagcu

SEQ ID NO: 924247 - RNA, 22 nt, Human
aauugagaugacagaggaauag

SEQ ID NO: 924248 - RNA, 22 nt, Human
ugugacagcacgguucaacugc

SEQ ID NO: 924249 - RNA, 22 nt, Human
cauacugugaagcuuacuauuu

SEQ ID NO: 924250 - RNA, 22 nt, Human
ggcuggcuaucugugguugccu

SEQ ID NO: 924251 - RNA, 22 nt, Human
ucacccagauagugagcauagu

SEQ ID NO: 924252 - RNA, 22 nt, Human
gagggcugauaaaugcgcaugg

SEQ ID NO: 924253 - RNA, 22 nt, Human
cuguccugaaguuuucaugaga

SEQ ID NO: 924254 - RNA, 22 nt, Human
ucuuaaagccaagcauaaacca

SEQ ID NO: 924255 - RNA, 22 nt, Human
ccuuuucuggccaccaagcgcu

SEQ ID NO: 924256 - RNA, 22 nt, Human
ugaggacaugagugggacagag

SEQ ID NO: 924257 - RNA, 21 nt, Human
acccugcuuuaugccguccuc

SEQ ID NO: 924258 - RNA, 22 nt, Human
aguuugaucugacagauuuuaa

SEQ ID NO: 924259 - RNA, 19 nt, Human
uuacuucaggagugaaauu

SEQ ID NO: 924260 - RNA, 22 nt, Human
auguucaguuagcacugaaguc

SEQ ID NO: 924261 - RNA, 18 nt, Human
aaggcuucaaagaguaga

SEQ ID NO: 924262 - RNA, 22 nt, Human
aauuauauguuaaucuucaauu

SEQ ID NO: 924263 - RNA, 22 nt, Human
uguauggcuuggaaauaguuua

SEQ ID NO: 924264 - RNA, 22 nt, Human
ucuuauuuuguuagaugcugua

SEQ ID NO: 924265 - RNA, 22 nt, Human
ugcugccaccccucaccagagc

SEQ ID NO: 924266 - RNA, 22 nt, Human
guccaagagaacugaaauagga

SEQ ID NO: 924267 - RNA, 22 nt, Human
gcucuaugcaugggagcaggag

SEQ ID NO: 924268 - RNA, 22 nt, Human
uuacacaaacacauuccagaua

SEQ ID NO: 924269 - RNA, 22 nt, Human
agcuuuguauuugagcauacga

SEQ ID NO: 924270 - RNA, 22 nt, Human
uuacacucugguugugggccuu

SEQ ID NO: 924271 - RNA, 22 nt, Human
ucacuccauagcuuaacucuuu

SEQ ID NO: 924272 - RNA, 22 nt, Human
gccaaggagacacgguguugua

SEQ ID NO: 924273 - RNA, 20 nt, Human
cuuugguggggguagcccag

SEQ ID NO: 924274 - RNA, 22 nt, Human
aguuagaagugugucaucugug

SEQ ID NO: 924275 - RNA, 17 nt, Human
gcagaaaagucaaggga

SEQ ID NO: 924276 - RNA, 22 nt, Human
cuggcugggagcucgccugcgg

SEQ ID NO: 924277 - RNA, 22 nt, Human
agcacagccucugguuucugac

SEQ ID NO: 924278 - RNA, 22 nt, Human
guacacacuguuugaucauuuc

SEQ ID NO: 924279 - RNA, 22 nt, Human
uguaaaaagcccagccgcugag

SEQ ID NO: 924280 - RNA, 16 nt, Human
cagagaggacagaggc

SEQ ID NO: 924281 - RNA, 22 nt, Human
auugggaugccggcugauaaga

SEQ ID NO: 924282 - RNA, 22 nt, Human
gaggggcuguggagcucucugg

SEQ ID NO: 924283 - RNA, 22 nt, Human
uuacauuguccagaaauuauug

SEQ ID NO: 924284 - RNA, 22 nt, Human
ugggugugaagucuguuggccu

SEQ ID NO: 924285 - RNA, 22 nt, Human
ggcaucuuguugcucaaaucua

SEQ ID NO: 924286 - RNA, 22 nt, Human
uuucauuauguuccuggaagag

SEQ ID NO: 924287 - RNA, 22 nt, Human
ucugucugcaccuaagcacagu

SEQ ID NO: 924288 - RNA, 22 nt, Human
aguggcuguucauuuuacacaa

SEQ ID NO: 924289 - RNA, 22 nt, Human
ucugugccaagcuuauaucugu

SEQ ID NO: 924290 - RNA, 22 nt, Human
gccugagcuacuagggagucug

SEQ ID NO: 924291 - RNA, 22 nt, Human
gaggucaggcuugcagcagggu

SEQ ID NO: 924292 - RNA, 22 nt, Human
uucccagucaaacgaaggacuu

SEQ ID NO: 924293 - RNA, 22 nt, Human
cuggaauguauguaucuuaaga

SEQ ID NO: 924294 - RNA, 22 nt, Human
cgaugggggcaguguuacauug

SEQ ID NO: 924295 - RNA, 22 nt, Human
auguuuaaauuuauagacagug

SEQ ID NO: 924296 - RNA, 22 nt, Human
gugccugcuaccugacuuguuu

SEQ ID NO: 924297 - RNA, 22 nt, Human
uuggaaaugcaaauauauugaa

SEQ ID NO: 924298 - RNA, 22 nt, Human
auucuucagcaggggacacuau

SEQ ID NO: 924299 - RNA, 22 nt, Human
gggaagggagggaccucagucu

SEQ ID NO: 924300 - RNA, 22 nt, Human
cuccagugagugagcaggcgac

SEQ ID NO: 924301 - RNA, 22 nt, Human
gcucagagaguuucacaaguuu

SEQ ID NO: 924302 - RNA, 21 nt, Human
aacauuucaggauccaaauug

SEQ ID NO: 924303 - RNA, 22 nt, Human
aaccuugaauacuuaaauacau

SEQ ID NO: 924304 - RNA, 22 nt, Human
gcucucucgugaacaggugguu

SEQ ID NO: 924305 - RNA, 22 nt, Human
agaaaagugcucuagugagagc

SEQ ID NO: 924306 - RNA, 18 nt, Human
aggcuucccaggcaggcc

SEQ ID NO: 924307 - RNA, 22 nt, Human
uuugggcaauucagugggaccu

SEQ ID NO: 924308 - RNA, 22 nt, Human
agggccugucuguagaacugaa

SEQ ID NO: 924309 - RNA, 22 nt, Human
aguuauagaaccagguccucac

SEQ ID NO: 924310 - RNA, 22 nt, Human
cccaggucuaugccagcucuga

SEQ ID NO: 924311 - RNA, 22 nt, Human
aaacugugagcuaguaaauagg

SEQ ID NO: 924312 - RNA, 22 nt, Human
ucaaggaaugacuauaugagga

SEQ ID NO: 924313 - RNA, 22 nt, Human
cucacaggguucuaucgaagag

SEQ ID NO: 924314 - RNA, 22 nt, Human
ugggcagggucucuguuaucag

SEQ ID NO: 924315 - RNA, 22 nt, Human
agcagggcugcggccccaccac

SEQ ID NO: 924316 - RNA, 23 nt, Human
gugcucugcggucugcuagucug

SEQ ID NO: 924317 - RNA, 22 nt, Human
uuagacauagaauauugucuag

SEQ ID NO: 924318 - RNA, 22 nt, Human
guuaacauaggcuuagggguuu

SEQ ID NO: 924319 - RNA, 17 nt, Human
uuuucucucuuggauuc

SEQ ID NO: 924320 - RNA, 22 nt, Human
uucaaagauuuucccaaagcuc

SEQ ID NO: 924321 - RNA, 22 nt, Human
ugccuuuagggaaaagcaagcu

SEQ ID NO: 924322 - RNA, 22 nt, Human
ugcccugcagugagugcgucug

SEQ ID NO: 924323 - RNA, 22 nt, Human
aagcccuguccggggggaagaa

SEQ ID NO: 924324 - RNA, 22 nt, Human
acagggcagagaggcaggcuug

SEQ ID NO: 924325 - RNA, 22 nt, Human
caccugggcuaaacuaugcagg

SEQ ID NO: 924326 - RNA, 23 nt, Human
uggacagcagcagcagugucacc

SEQ ID NO: 924327 - RNA, 22 nt, Human
cucuguccuccaccugcuuuca

SEQ ID NO: 924328 - RNA, 22 nt, Human
auggcccaggcaggcugguacu

SEQ ID NO: 924329 - RNA, 22 nt, Human
accugccuauggagccacaugg

SEQ ID NO: 924330 - RNA, 22 nt, Human
ucugagccagccaccuccuuca

SEQ ID NO: 924331 - RNA, 22 nt, Human
gaggcugggaaguccaagauca

SEQ ID NO: 924332 - RNA, 22 nt, Human
ccagggccucguguucugagug

SEQ ID NO: 924333 - RNA, 22 nt, Human
gcucugagagagcaaagucacc

SEQ ID NO: 924334 - RNA, 19 nt, Human
aacagucugggaagcacag

SEQ ID NO: 924335 - RNA, 22 nt, Human
agcagccagagaaugaugcagu

SEQ ID NO: 924336 - RNA, 22 nt, Human
agagggagaaaagaaucaguug

SEQ ID NO: 924337 - RNA, 22 nt, Human
gccacaugucaugugcucagua

SEQ ID NO: 924338 - RNA, 23 nt, Human
cucagaggccuguccaggguggu

SEQ ID NO: 924339 - RNA, 22 nt, Human
gcaggaugaaggcagaggcuga

SEQ ID NO: 924340 - RNA, 22 nt, Human
caaguuuacuacuaccugugug

SEQ ID NO: 924341 - RNA, 22 nt, Human
uagaggugagacuucagugaca

SEQ ID NO: 924342 - RNA, 22 nt, Human
gccaccaggagcccaguccaaa

SEQ ID NO: 924343 - RNA, 22 nt, Human
uuucuaauaguugagucagcua

SEQ ID NO: 924344 - RNA, 22 nt, Human
ucagaggacgcacuaggguugu

SEQ ID NO: 924345 - RNA, 22 nt, Human
ugccugggacuguacuaaauuu

SEQ ID NO: 924346 - RNA, 22 nt, Human
gcaggcaggcuuccuugaacug

SEQ ID NO: 924347 - RNA, 22 nt, Human
acugcaaaaaugggugcauuca

SEQ ID NO: 924348 - RNA, 17 nt, Human
cucugggcagccugggg

SEQ ID NO: 924349 - RNA, 22 nt, Human
cugcagagcaugaggaggucug

SEQ ID NO: 924350 - RNA, 22 nt, Human
aaacaagcaagcacauaauuuu

SEQ ID NO: 924351 - RNA, 22 nt, Human
ggcacacagauggagcacuagc

SEQ ID NO: 924352 - RNA, 22 nt, Human
ugggagcaaaugacugggagau

SEQ ID NO: 924353 - RNA, 22 nt, Human
auuccuuggcauucuggacuug

SEQ ID NO: 924354 - RNA, 22 nt, Human
ccaggcagucaggguugugugu

SEQ ID NO: 924355 - RNA, 22 nt, Human
auucaucuguacuucaauaucu

SEQ ID NO: 924356 - RNA, 22 nt, Human
uuacaaguauuuaagaugcugu

SEQ ID NO: 924357 - RNA, 22 nt, Human
cagaaggcuuuguggaguagac

SEQ ID NO: 924358 - RNA, 22 nt, Human
uaaaaguggauaagcuguagga

SEQ ID NO: 924359 - RNA, 22 nt, Human
gcagccagcaggaagcgggaga

SEQ ID NO: 924360 - RNA, 22 nt, Human
uucaggaucauuuguuuuaucu

SEQ ID NO: 924361 - RNA, 22 nt, Human
gaaggaagggcuggcugucuug

SEQ ID NO: 924362 - RNA, 22 nt, Human
uauuucugauugcucaugaggc

SEQ ID NO: 924363 - RNA, 22 nt, Human
aagagcuggaugaagaaaucaa

SEQ ID NO: 924364 - RNA, 23 nt, Human
cuggcccaggugagagguuggug

SEQ ID NO: 924365 - RNA, 22 nt, Human
agcucccagaguccucugccca

SEQ ID NO: 924366 - RNA, 22 nt, Human
cauagaauaugugugauuguua

SEQ ID NO: 924367 - RNA, 22 nt, Human
agcauuuagucuuuauugcagc

SEQ ID NO: 924368 - RNA, 22 nt, Human
uuugaacaagagcuucacauua

SEQ ID NO: 924369 - RNA, 22 nt, Human
agcugccaaguuucucaguuua

SEQ ID NO: 924370 - RNA, 20 nt, Human
agaaauauugaguucagagg

SEQ ID NO: 924371 - RNA, 22 nt, Human
aucacaucucaccacugcaacc

SEQ ID NO: 924372 - RNA, 22 nt, Human
cuguccuguacuuugaggcccu

SEQ ID NO: 924373 - RNA, 22 nt, Human
uggcagagguauauugggagga

SEQ ID NO: 924374 - RNA, 22 nt, Human
cuuucuuuguccaccaacaaug

SEQ ID NO: 924375 - RNA, 22 nt, Human
caagccaggugaacauaacaag

SEQ ID NO: 924376 - RNA, 22 nt, Human
cugugucuugaguaauucggug

SEQ ID NO: 924377 - RNA, 22 nt, Human
ccuguuguuuagcacuuagaac

SEQ ID NO: 924378 - RNA, 22 nt, Human
ucacacauuugaaggccuguca

SEQ ID NO: 924379 - RNA, 22 nt, Human
ugucacagucucgugagcaucu

SEQ ID NO: 924380 - RNA, 22 nt, Human
cugagcugagccaaaucugucu

SEQ ID NO: 924381 - RNA, 22 nt, Human
aggcaggaggaucauggaugca

SEQ ID NO: 924382 - RNA, 22 nt, Human
ggcugccugggagcccuccucu

SEQ ID NO: 924383 - RNA, 22 nt, Human
auguguauuuccaucgaucagc

SEQ ID NO: 924384 - RNA, 22 nt, Human
gcugcuggaugcgcuugauggu

SEQ ID NO: 924385 - RNA, 22 nt, Human
uuaggcaaagcuggaauccagg

SEQ ID NO: 924386 - RNA, 22 nt, Human
ucugcaggaaaaaagugccugg

SEQ ID NO: 924387 - RNA, 22 nt, Human
ccagagaguaucauggagagua

SEQ ID NO: 924388 - RNA, 22 nt, Human
gguguggguccuugugcuugcu

SEQ ID NO: 924389 - RNA, 22 nt, Human
gaccugagauuuugaggcucau

SEQ ID NO: 924390 - RNA, 22 nt, Human
uccuggauggccugcaggcggu

SEQ ID NO: 924391 - RNA, 22 nt, Human
uccacaggcugaggcccuucug

SEQ ID NO: 924392 - RNA, 22 nt, Human
ugcuccagaaaaacuugagacu

SEQ ID NO: 924393 - RNA, 19 nt, Human
ucuaacagcuuucauucua

SEQ ID NO: 924394 - RNA, 22 nt, Human
uuacaacugaagcuaaugugcu

SEQ ID NO: 924395 - RNA, 22 nt, Human
cauggccucaaaggacugcaga

SEQ ID NO: 924396 - RNA, 22 nt, Human
auggcagcauaguggcaaguua

SEQ ID NO: 924397 - RNA, 19 nt, Human
caguuuaugcuuuggggac

SEQ ID NO: 924398 - RNA, 22 nt, Human
ucugcagguguuggaaggguca

SEQ ID NO: 924399 - RNA, 22 nt, Human
ugcucaucaacaugaugaucau

SEQ ID NO: 924400 - RNA, 23 nt, Human
cagggaggagauacuguguaucu

SEQ ID NO: 924401 - RNA, 23 nt, Human
auuuuaaccuugacuaacaugca

SEQ ID NO: 924402 - RNA, 22 nt, Human
ugaaaugcuucucugaaaauac

SEQ ID NO: 924403 - RNA, 22 nt, Human
gcuagaauauuggguaggcaag

SEQ ID NO: 924404 - RNA, 22 nt, Human
cuguggcugucucuuucccaug

SEQ ID NO: 924405 - RNA, 22 nt, Human
aucuuauuuaacacagcaaaac

SEQ ID NO: 924406 - RNA, 22 nt, Human
auguguguguuuaauccucaaa

SEQ ID NO: 924407 - RNA, 22 nt, Human
agccaagcacucaacuccugga

SEQ ID NO: 924408 - RNA, 22 nt, Human
cuggcagggcugguauucaaaa

SEQ ID NO: 924409 - RNA, 22 nt, Human
ggugcugauuaagaacuguaua

SEQ ID NO: 924410 - RNA, 22 nt, Human
aaggucuauggagaagacugag

SEQ ID NO: 924411 - RNA, 22 nt, Human
ggacuugcaggggagacugcgu

SEQ ID NO: 924412 - RNA, 19 nt, Human
caucuggaugauucuccug

SEQ ID NO: 924413 - RNA, 22 nt, Human
ugucccagucaaggcugucauc

SEQ ID NO: 924414 - RNA, 22 nt, Human
aaagaguucacggaggccaaag

SEQ ID NO: 924415 - RNA, 22 nt, Human
guucuuaagaccacaauaaaaa

SEQ ID NO: 924416 - RNA, 22 nt, Human
cugaagacugcugagaaguuac

SEQ ID NO: 924417 - RNA, 22 nt, Human
uucuaacuuucaagguccuuuc

SEQ ID NO: 924418 - RNA, 23 nt, Human
aggcacucgacagaaauauugga

SEQ ID NO: 924419 - RNA, 22 nt, Human
ucugaaauaggagccauguaga

SEQ ID NO: 924420 - RNA, 19 nt, Human
aauauuuuagccucuuccu

SEQ ID NO: 924421 - RNA, 22 nt, Human
ggauguugauugaauggccauu

SEQ ID NO: 924422 - RNA, 20 nt, Human
agaacugaaucauuuugggu

SEQ ID NO: 924423 - RNA, 22 nt, Human
uaaaugacaacaccugcuuuug

SEQ ID NO: 924424 - RNA, 22 nt, Human
cccucgcucuaggcagcccugu

SEQ ID NO: 924425 - RNA, 19 nt, Human
ggcugucuacgaaccaguc

SEQ ID NO: 924426 - RNA, 22 nt, Human
agccagcuguucuggggcagca

SEQ ID NO: 924427 - RNA, 22 nt, Human
ggcagcugcaaaucugcucugu

SEQ ID NO: 924428 - RNA, 20 nt, Human
acugcuucuuucucugaccu

SEQ ID NO: 924429 - RNA, 22 nt, Human
aauaacuggcacauaucacaua

SEQ ID NO: 924430 - RNA, 22 nt, Human
uagcuguuacccauaaaagcca

SEQ ID NO: 924431 - RNA, 22 nt, Human
gacaucaggccugcagucuggg

SEQ ID NO: 924432 - RNA, 22 nt, Human
gcuggaguuggcaaggcaugua

SEQ ID NO: 924433 - RNA, 22 nt, Human
uugcagggcuuggggauuacag

SEQ ID NO: 924434 - RNA, 22 nt, Human
caucuuuucagaagccauucug

SEQ ID NO: 924435 - RNA, 22 nt, Human
gugagcagagaucgcgugauug

SEQ ID NO: 924436 - RNA, 22 nt, Human
gaaugauuaacuaguugauaca

SEQ ID NO: 924437 - RNA, 22 nt, Human
uccaggggugauuuuugacuug

SEQ ID NO: 924438 - RNA, 22 nt, Human
aaugaacaaaauaugcuuugca

SEQ ID NO: 924439 - RNA, 22 nt, Human
aguguguaagggaucaaagagu

SEQ ID NO: 924440 - RNA, 22 nt, Human
guuucuuagacauaugccauga

SEQ ID NO: 924441 - RNA, 22 nt, Human
gggauggcucaaaggagucagg

SEQ ID NO: 924442 - RNA, 21 nt, Human
acaucagaguugugaagguag

SEQ ID NO: 924443 - RNA, 22 nt, Human
uguuaacagguaacugaggcug

SEQ ID NO: 924444 - RNA, 22 nt, Human
ccucucuguaagggucccuccc

SEQ ID NO: 924445 - RNA, 22 nt, Human
uagaaucuggaucugggcgcau

SEQ ID NO: 924446 - RNA, 22 nt, Human
aaagaucauucucugguccaga

SEQ ID NO: 924447 - RNA, 22 nt, Human
aacaucugaaaaggcuucacuc

SEQ ID NO: 924448 - RNA, 23 nt, Human
gaauucuuaaggucacuaaaguc

SEQ ID NO: 924449 - RNA, 22 nt, Human
auguuuaaggaacugguuugcu

SEQ ID NO: 924450 - RNA, 22 nt, Human
cagaaauacccagcauuuggag

SEQ ID NO: 924451 - RNA, 22 nt, Human
acuguggaugccaaaggggagg

SEQ ID NO: 924452 - RNA, 22 nt, Human
ugagguccugcauguugagguc

SEQ ID NO: 924453 - RNA, 22 nt, Human
ugaggcagccugcauuaaagag

SEQ ID NO: 924454 - RNA, 22 nt, Human
uuccugugcuuaauucucacug

SEQ ID NO: 924455 - RNA, 22 nt, Human
cuuggcccaguugccaaggaaa

SEQ ID NO: 924456 - RNA, 22 nt, Human
auuacacaggcuggcucuuuga

SEQ ID NO: 924457 - RNA, 22 nt, Human
uagggagcucuggcagaaggaa

SEQ ID NO: 924458 - RNA, 22 nt, Human
guggcugggcuccgagcggcuu

SEQ ID NO: 924459 - RNA, 22 nt, Human
ggccugagcucuggggaggcaa

SEQ ID NO: 924460 - RNA, 22 nt, Human
uacuacaagggcccuaaaaggu

SEQ ID NO: 924461 - RNA, 22 nt, Human
ugcaggcuggaggagggacuaa

SEQ ID NO: 924462 - RNA, 22 nt, Human
aagcccugcagucucugccaca

SEQ ID NO: 924463 - RNA, 22 nt, Human
ugaagccaucccucagauggcc

SEQ ID NO: 924464 - RNA, 22 nt, Human
ccagccuccauguagauagcug

SEQ ID NO: 924465 - RNA, 22 nt, Human
aggcucagagaugaguaagcac

SEQ ID NO: 924466 - RNA, 22 nt, Human
aaggcuauugggaagaaaaaug

SEQ ID NO: 924467 - RNA, 22 nt, Human
cagcaggcccagaguuucaugg

SEQ ID NO: 924468 - RNA, 22 nt, Human
uuguggggcaacagcaggugaa

SEQ ID NO: 924469 - RNA, 22 nt, Human
guggcagagccaaggcuggagc

SEQ ID NO: 924470 - RNA, 22 nt, Human
cauggcaggaaaaugaacaggc

SEQ ID NO: 924471 - RNA, 22 nt, Human
agagggagaagcuaaaauaacu

SEQ ID NO: 924472 - RNA, 22 nt, Human
acaacauuauacauagaaagcu

SEQ ID NO: 924473 - RNA, 17 nt, Human
ggaaagguagaguaauc

SEQ ID NO: 924474 - RNA, 22 nt, Human
cauuuccagcuccugcaucaug

SEQ ID NO: 924475 - RNA, 22 nt, Human
acccaggagcucugggguccuc

SEQ ID NO: 924476 - RNA, 22 nt, Human
cagggcugugcccaucuucccc

SEQ ID NO: 924477 - RNA, 19 nt, Human
ucucacaucagcuccuagc

SEQ ID NO: 924478 - RNA, 22 nt, Human
augggcaggcacuggcucucag

SEQ ID NO: 924479 - RNA, 22 nt, Human
aucccauuuccuguuuugucaa

SEQ ID NO: 924480 - RNA, 22 nt, Human
cccugcuuagcacccuugcacc

SEQ ID NO: 924481 - RNA, 22 nt, Human
acccggagucggagguugcagu

SEQ ID NO: 924482 - RNA, 22 nt, Human
caaggcuagaaguccaacauca

SEQ ID NO: 924483 - RNA, 21 nt, Human
ugcagcagaagucucuguguc

SEQ ID NO: 924484 - RNA, 22 nt, Human
auggcaguggaaugggaugagu

SEQ ID NO: 924485 - RNA, 23 nt, Human
aggcacugaaugugucagugagu

SEQ ID NO: 924486 - RNA, 22 nt, Human
cauagagugauguaagguaugu

SEQ ID NO: 924487 - RNA, 22 nt, Human
cauuuacauuuaagguuaauau

SEQ ID NO: 924488 - RNA, 22 nt, Human
acaaagugcugacauuacaggc

SEQ ID NO: 924489 - RNA, 22 nt, Human
ccaaaauauuagugcuuaagua

SEQ ID NO: 924490 - RNA, 22 nt, Human
ggcagcaaguggugggagacuu

SEQ ID NO: 924491 - RNA, 22 nt, Human
ugugaggacauuggaggacuca

SEQ ID NO: 924492 - RNA, 21 nt, Human
uaaagcuagaaccuuagcuuu

SEQ ID NO: 924493 - RNA, 22 nt, Human
uagacuagaggaucagcaaggg

SEQ ID NO: 924494 - RNA, 22 nt, Human
cugggagcugucaggagcgugu

SEQ ID NO: 924495 - RNA, 22 nt, Human
caacuuuaaauggcuaugucug

SEQ ID NO: 924496 - RNA, 22 nt, Human
auucucuuuguauaacaucuug

SEQ ID NO: 924497 - RNA, 22 nt, Human
gggcagugguuacacagcugag

SEQ ID NO: 924498 - RNA, 22 nt, Human
auugcagggaggcagguagaug

SEQ ID NO: 924499 - RNA, 22 nt, Human
cuggacagaaaaggccacugga

SEQ ID NO: 924500 - RNA, 19 nt, Human
ggcuccuguggcugcagcc

SEQ ID NO: 924501 - RNA, 22 nt, Human
ugccaucacugaacuucugaaa

SEQ ID NO: 924502 - RNA, 22 nt, Human
acagcuggaggggcugcagagg

SEQ ID NO: 924503 - RNA, 22 nt, Human
ucuuuguuugccuuuaucaaga

SEQ ID NO: 924504 - RNA, 18 nt, Human
ugaggccagagugggcau

SEQ ID NO: 924505 - RNA, 22 nt, Human
aacucuuugaacagugaggcua

SEQ ID NO: 924506 - RNA, 22 nt, Human
augugcaacuucagcagaaagg

SEQ ID NO: 924507 - RNA, 22 nt, Human
ugugcccagacugccucaguga

SEQ ID NO: 924508 - RNA, 22 nt, Human
augggcugggaauacacagggg

SEQ ID NO: 924509 - RNA, 22 nt, Human
aauccagaugagcaaucauacu

SEQ ID NO: 924510 - RNA, 22 nt, Human
auagcuuucuuaaauauauaaa

SEQ ID NO: 924511 - RNA, 22 nt, Human
guguuaaaugcaaucacaugca

SEQ ID NO: 924512 - RNA, 22 nt, Human
agucugaagauauucuugcagg

SEQ ID NO: 924513 - RNA, 22 nt, Human
ggagcuguuggcagcuaucuug

SEQ ID NO: 924514 - RNA, 22 nt, Human
gcaaggcaguccuggggcccug

SEQ ID NO: 924515 - RNA, 23 nt, Human
acagagguccaaacaguauaagc

SEQ ID NO: 924516 - RNA, 22 nt, Human
cccauugugguuguugaggaua

SEQ ID NO: 924517 - RNA, 22 nt, Human
cugcaucuuagucaaaaucugu

SEQ ID NO: 924518 - RNA, 22 nt, Human
guguaaacaacagugguuugaa

SEQ ID NO: 924519 - RNA, 22 nt, Human
cauuuacaauguacagguugug

SEQ ID NO: 924520 - RNA, 22 nt, Human
gccacaggcuccagcaucagua

SEQ ID NO: 924521 - RNA, 22 nt, Human
ugcuuuuagcuaguaacuagua

SEQ ID NO: 924522 - RNA, 22 nt, Human
ggggcugauggaacucaggccu

SEQ ID NO: 924523 - RNA, 22 nt, Human
gucaucuugcuguuuuagaucu

SEQ ID NO: 924524 - RNA, 22 nt, Human
ugcuggccucggcgcugggccu

SEQ ID NO: 924525 - RNA, 22 nt, Human
uuucacaacguuguggugagag

SEQ ID NO: 924526 - RNA, 22 nt, Human
gccagggaggcuguaggguccu

SEQ ID NO: 924527 - RNA, 22 nt, Human
ggccuguccagccugccuggcu

SEQ ID NO: 924528 - RNA, 18 nt, Human
aagauucugcuucucucu

SEQ ID NO: 924529 - RNA, 22 nt, Human
ucagaaauacuaucagcuuuug

SEQ ID NO: 924530 - RNA, 22 nt, Human
ccuggcagacugugagggcagg

SEQ ID NO: 924531 - RNA, 22 nt, Human
aucaaagguaucuaugcugucu

SEQ ID NO: 924532 - RNA, 20 nt, Human
aauacuaaacacaaagcagu

SEQ ID NO: 924533 - RNA, 22 nt, Human
gcucugagacacaaagggugca

SEQ ID NO: 924534 - RNA, 22 nt, Human
aguggagcuuuuccuaucagag

SEQ ID NO: 924535 - RNA, 22 nt, Human
uaauuauuugaagacauuagag

SEQ ID NO: 924536 - RNA, 20 nt, Human
ggcaggcaggagguuuccag

SEQ ID NO: 924537 - RNA, 22 nt, Human
gcaaacugcauucuauagcuug

SEQ ID NO: 924538 - RNA, 19 nt, Human
cugugcuuuaaacuccuau

SEQ ID NO: 924539 - RNA, 22 nt, Human
gcugcugagaauugcaggcaag

SEQ ID NO: 924540 - RNA, 22 nt, Human
uuucaggauuuuaugagauagu

SEQ ID NO: 924541 - RNA, 19 nt, Human
uaucuuuaugcaguggugg

SEQ ID NO: 924542 - RNA, 22 nt, Human
guggcuucaccccaguugucuc

SEQ ID NO: 924543 - RNA, 22 nt, Human
cccaggaaugagcaggcagggg

SEQ ID NO: 924544 - RNA, 22 nt, Human
aagcuguguauuacagaauauu

SEQ ID NO: 924545 - RNA, 23 nt, Human
uaggaagacagcaaaagaaugga

SEQ ID NO: 924546 - RNA, 22 nt, Human
gccucuccgagccacugccucu

SEQ ID NO: 924547 - RNA, 22 nt, Human
uuguuuuggaagaacuuacucu

SEQ ID NO: 924548 - RNA, 22 nt, Human
cagaggggcugacacccuuggc

SEQ ID NO: 924549 - RNA, 22 nt, Human
agcugcucaggagagccagguc

SEQ ID NO: 924550 - RNA, 22 nt, Human
uucauccauaugcagagagcuu

SEQ ID NO: 924551 - RNA, 22 nt, Human
agagucugaggcagcugcagcc

SEQ ID NO: 924552 - RNA, 22 nt, Human
uucauguauuuaucauguaaau

SEQ ID NO: 924553 - RNA, 22 nt, Human
agaaaacauuacauaggugugu

SEQ ID NO: 924554 - RNA, 22 nt, Human
uuugacuccugccuucuccugu

SEQ ID NO: 924555 - RNA, 22 nt, Human
augcucuagacauacuggcuau

SEQ ID NO: 924556 - RNA, 20 nt, Human
ugagugaguuuguggcagga

SEQ ID NO: 924557 - RNA, 22 nt, Human
aguauuucuucauaugauuacu

SEQ ID NO: 924558 - RNA, 22 nt, Human
gggccaaggggagcuggaaggg

SEQ ID NO: 924559 - RNA, 22 nt, Human
gugauguagcccuaauucugca

SEQ ID NO: 924560 - RNA, 22 nt, Human
aauaucacaggaggagaccaag

SEQ ID NO: 924561 - RNA, 22 nt, Human
cuuuacugaagugaagaccugg

SEQ ID NO: 924562 - RNA, 22 nt, Human
uugcauauccuccaacacaugg

SEQ ID NO: 924563 - RNA, 22 nt, Human
uucuaugucagugugcucugug

SEQ ID NO: 924564 - RNA, 22 nt, Human
acagagacaauauuuguaaagu

SEQ ID NO: 924565 - RNA, 22 nt, Human
gagaggaaagauauauacuucu

SEQ ID NO: 924566 - RNA, 22 nt, Human
uacaaagauaaaaucucaccau

SEQ ID NO: 924567 - RNA, 22 nt, Human
cauaaaagccaccuauuuaaag

SEQ ID NO: 924568 - RNA, 22 nt, Human
gggugggagaaaugaguaucua

SEQ ID NO: 924569 - RNA, 22 nt, Human
ucaucuccauacggucucgcag

SEQ ID NO: 924570 - RNA, 22 nt, Human
ggaagcuguuccuguguggcca

SEQ ID NO: 924571 - RNA, 22 nt, Human
caccucaggcagcaaagucuca

SEQ ID NO: 924572 - RNA, 22 nt, Human
ccucaggcugcucacacuuguc

SEQ ID NO: 924573 - RNA, 22 nt, Human
aaaggcccacagucagucuacc

SEQ ID NO: 924574 - RNA, 22 nt, Human
cgcugcagcuggcugcagggaa

SEQ ID NO: 924575 - RNA, 22 nt, Human
ucuugggaucaccuccuggcuu

SEQ ID NO: 924576 - RNA, 22 nt, Human
gaaaguucugcucugauuggcu

SEQ ID NO: 924577 - RNA, 22 nt, Human
cauucccaugacuccugcucag

SEQ ID NO: 924578 - RNA, 22 nt, Human
cuguccauuuugaauuuucagu

SEQ ID NO: 924579 - RNA, 22 nt, Human
agcagagucuucaagggcaggc

SEQ ID NO: 924580 - RNA, 22 nt, Human
caucagcaggcaacacucuugg

SEQ ID NO: 924581 - RNA, 19 nt, Human
aggcucugagcuccuggag

SEQ ID NO: 924582 - RNA, 22 nt, Human
gaggggccuggcacugagcugg

SEQ ID NO: 924583 - RNA, 22 nt, Human
cuggccacugauuccuccccug

SEQ ID NO: 924584 - RNA, 22 nt, Human
agauggaguuguagcagugacu

SEQ ID NO: 924585 - RNA, 22 nt, Human
cuccuggagcagcaggcgcagg

SEQ ID NO: 924586 - RNA, 22 nt, Human
ccucacagcccuuggcccagga

SEQ ID NO: 924587 - RNA, 23 nt, Human
gcugggcuuacucuuucagugag

SEQ ID NO: 924588 - RNA, 22 nt, Human
augauguaauggaaagaacaga

SEQ ID NO: 924589 - RNA, 22 nt, Human
acaaaugugucuaauugugccu

SEQ ID NO: 924590 - RNA, 22 nt, Human
acacuguuccacacuaagaagg

SEQ ID NO: 924591 - RNA, 22 nt, Human
ucagauuuacugcagagcagau

SEQ ID NO: 924592 - RNA, 22 nt, Human
caaggcauuucgcuuagagaga

SEQ ID NO: 924593 - RNA, 22 nt, Human
gcagagcagcaaauggaaagga

SEQ ID NO: 924594 - RNA, 22 nt, Human
gaggcugguucccuugaucuuu

SEQ ID NO: 924595 - RNA, 22 nt, Human
uggucgaccaguuggaaaguaa

SEQ ID NO: 924596 - RNA, 22 nt, Human
ugccugugggugaugauuugau

SEQ ID NO: 924597 - RNA, 22 nt, Human
ugcaugcuucaggcuggcucug

SEQ ID NO: 924598 - RNA, 22 nt, Human
aggcuguggugggcuuugagcc

SEQ ID NO: 924599 - RNA, 22 nt, Human
uggcacagccacugaaucggga

SEQ ID NO: 924600 - RNA, 22 nt, Human
uccugagaugagacagugcugc

SEQ ID NO: 924601 - RNA, 22 nt, Human
caaaugaauuucccugcaaaug

SEQ ID NO: 924602 - RNA, 22 nt, Human
uggcaguuuucaagaguucugu

SEQ ID NO: 924603 - RNA, 22 nt, Human
auuucaugaaacauuccccuug

SEQ ID NO: 924604 - RNA, 22 nt, Human
acuuaaaguaguuuuacugugg

SEQ ID NO: 924605 - RNA, 22 nt, Human
aaaaaugcugugguagcugugu

SEQ ID NO: 924606 - RNA, 22 nt, Human
uaaaaaucuuaugaauggcaag

SEQ ID NO: 924607 - RNA, 21 nt, Human
uauagucacuugagcauuauc

SEQ ID NO: 924608 - RNA, 22 nt, Human
aggaggguggggucugccuguc

SEQ ID NO: 924609 - RNA, 22 nt, Human
acugccugcuccuggcuccaca

SEQ ID NO: 924610 - RNA, 22 nt, Human
ugaaaacuccaaguuucaucag

SEQ ID NO: 924611 - RNA, 22 nt, Human
caaggcaggcaguucacuugag

SEQ ID NO: 924612 - RNA, 22 nt, Human
cauguuuaauugcgauguuuga

SEQ ID NO: 924613 - RNA, 22 nt, Human
aaaacuacauuugacauuuugu

SEQ ID NO: 924614 - RNA, 22 nt, Human
acagaggguguggaggaagacg

SEQ ID NO: 924615 - RNA, 22 nt, Human
gggcagguguugucaaucuaau

SEQ ID NO: 924616 - RNA, 22 nt, Human
aagugcaauuugaaauucugca

SEQ ID NO: 924617 - RNA, 22 nt, Human
cugucacacugauaucaggcuu

SEQ ID NO: 924618 - RNA, 22 nt, Human
cuuguuaaaaugccgauucuga

SEQ ID NO: 924619 - RNA, 17 nt, Human
uccuggcucugccacug

SEQ ID NO: 924620 - RNA, 22 nt, Human
ucuaggguggagcugggaaucc

SEQ ID NO: 924621 - RNA, 19 nt, Human
aucuacaauuauucucagu

SEQ ID NO: 924622 - RNA, 22 nt, Human
uuucaauguaacauuuccaggc

SEQ ID NO: 924623 - RNA, 22 nt, Human
ugggccugggagggcagacgcu

SEQ ID NO: 924624 - RNA, 22 nt, Human
aauuauccaccuuugcaugauu

SEQ ID NO: 924625 - RNA, 22 nt, Human
cuucucuugguaguucuuguug

SEQ ID NO: 924626 - RNA, 22 nt, Human
gugcucugggcugccugacaug

SEQ ID NO: 924627 - RNA, 22 nt, Human
gcugagucuugagcacugagca

SEQ ID NO: 924628 - RNA, 22 nt, Human
uucuuuaugcuucuguuuaggc

SEQ ID NO: 924629 - RNA, 22 nt, Human
acauagaguaucauacuggaug

SEQ ID NO: 924630 - RNA, 22 nt, Human
cuggguggcuguccagccagcc

SEQ ID NO: 924631 - RNA, 22 nt, Human
aggccucauugcccaccugugg

SEQ ID NO: 924632 - RNA, 22 nt, Human
ggcuuccccacaaagcacacaa

SEQ ID NO: 924633 - RNA, 22 nt, Human
aguaaaguaccaaagugugagu

SEQ ID NO: 924634 - RNA, 22 nt, Human
acccagcaugacaccugcacau

SEQ ID NO: 924635 - RNA, 18 nt, Human
cauaauuuucuuucuuua

SEQ ID NO: 924636 - RNA, 21 nt, Human
acauucacaggauauuaucau

SEQ ID NO: 924637 - RNA, 21 nt, Human
ucauuuuuauugcuaccuugc

SEQ ID NO: 924638 - RNA, 22 nt, Human
cuggaggagaacuugaggaagg

SEQ ID NO: 924639 - RNA, 22 nt, Human
ugguauauuaacuaguuucuuc

SEQ ID NO: 924640 - RNA, 22 nt, Human
uaauccugaucaauuuuagcuu

SEQ ID NO: 924641 - RNA, 22 nt, Human
uucccaaaauauaacaguuaac

SEQ ID NO: 924642 - RNA, 23 nt, Human
ggagccuggcauaugagacgcau

SEQ ID NO: 924643 - RNA, 22 nt, Human
cugugucccccucagccaggug

SEQ ID NO: 924644 - RNA, 22 nt, Human
agacagugauguaagcaggagu

SEQ ID NO: 924645 - RNA, 22 nt, Human
guggggaaaggaguggggcuca

SEQ ID NO: 924646 - RNA, 22 nt, Human
uuauguacccacucauauuccc

SEQ ID NO: 924647 - RNA, 22 nt, Human
uauccaaaguggcauauuauag

SEQ ID NO: 924648 - RNA, 22 nt, Human
auuuucucucaaaccuuaaaau

SEQ ID NO: 924649 - RNA, 22 nt, Human
gacccuggaguuaguccugugu

SEQ ID NO: 924650 - RNA, 22 nt, Human
gauguauauucugugccaggau

SEQ ID NO: 924651 - RNA, 22 nt, Human
uuucuugccagagaaaaagagu

SEQ ID NO: 924652 - RNA, 19 nt, Human
uuuacaaguucuuuguaug

SEQ ID NO: 924653 - RNA, 22 nt, Human
ugugugucugcacauguauaau

SEQ ID NO: 924654 - RNA, 22 nt, Human
caugaacaauuugcucacugau

SEQ ID NO: 924655 - RNA, 22 nt, Human
agagggaacggaucccagcgcg

SEQ ID NO: 924656 - RNA, 22 nt, Human
ugaguucuucacauuaccuacg

SEQ ID NO: 924657 - RNA, 19 nt, Human
agcagggacauggaacuuu

SEQ ID NO: 924658 - RNA, 22 nt, Human
uuccagggcagcaagugaaugg

SEQ ID NO: 924659 - RNA, 22 nt, Human
ugucuagaggccaacaggaaag

SEQ ID NO: 924660 - RNA, 22 nt, Human
gcuggcucugcacccaggccuc

SEQ ID NO: 924661 - RNA, 22 nt, Human
acuuucuccagaaaaccaagga

SEQ ID NO: 924662 - RNA, 22 nt, Human
auguuucaaauauauagaguug

SEQ ID NO: 924663 - RNA, 22 nt, Human
cuagaaauacaggcacgugcca

SEQ ID NO: 924664 - RNA, 22 nt, Human
aacaaguuacucuuaaaguaua

SEQ ID NO: 924665 - RNA, 22 nt, Human
gcuggagauacugcucaguauc

SEQ ID NO: 924666 - RNA, 22 nt, Human
aaggaugugacucagucagcua

SEQ ID NO: 924667 - RNA, 23 nt, Human
ugcccucccaaugcuucggucac

SEQ ID NO: 924668 - RNA, 21 nt, Human
agaaccuuggaugccauugca

SEQ ID NO: 924669 - RNA, 22 nt, Human
gugcaaacaucauagaguguac

SEQ ID NO: 924670 - RNA, 21 nt, Human
ucuuuccaauauucaugucuc

SEQ ID NO: 924671 - RNA, 22 nt, Human
ucuccaggcacuaccuggguaa

SEQ ID NO: 924672 - RNA, 22 nt, Human
gcugcucuccauggccgugagu

SEQ ID NO: 924673 - RNA, 22 nt, Human
ggcucauaaacucaguucaguu

SEQ ID NO: 924674 - RNA, 23 nt, Human
uaagacacccgacuccagagaug

SEQ ID NO: 924675 - RNA, 22 nt, Human
aaaaaagauugaugguggaugc

SEQ ID NO: 924676 - RNA, 22 nt, Human
guuucaugccauuuccagauug

SEQ ID NO: 924677 - RNA, 22 nt, Human
agucaggauuuuggauuauucg

SEQ ID NO: 924678 - RNA, 22 nt, Human
gcauuuguugaguugccagcua

SEQ ID NO: 924679 - RNA, 22 nt, Human
agagugggcaggagccucgacu

SEQ ID NO: 924680 - RNA, 22 nt, Human
cgucccaguuccagccgcgcug

SEQ ID NO: 924681 - RNA, 19 nt, Human
aggggcacugucucuagag

SEQ ID NO: 924682 - RNA, 22 nt, Human
uguaaagcauuuccuaaaucca

SEQ ID NO: 924683 - RNA, 19 nt, Human
cuguggccuccaggaggga

SEQ ID NO: 924684 - RNA, 22 nt, Human
aaacuacuggauuaguaacuua

SEQ ID NO: 924685 - RNA, 22 nt, Human
aguguuuaguuaagauuucaaa

SEQ ID NO: 924686 - RNA, 22 nt, Human
cuaaacaucuugcaaugcacag

SEQ ID NO: 924687 - RNA, 22 nt, Human
aguacagucaggaagcugcugu

SEQ ID NO: 924688 - RNA, 22 nt, Human
cucaggccauucuuccagcugc

SEQ ID NO: 924689 - RNA, 22 nt, Human
ugcugaaagaccguauuuaucu

SEQ ID NO: 924690 - RNA, 22 nt, Human
cugggcauuuuucucuguuaca

SEQ ID NO: 924691 - RNA, 22 nt, Human
gccaggcugguuauuuaaugag

SEQ ID NO: 924692 - RNA, 22 nt, Human
ccugccaggcgagucuaggcca

SEQ ID NO: 924693 - RNA, 22 nt, Human
cuucccagacgggguggcagcc

SEQ ID NO: 924694 - RNA, 22 nt, Human
aguuccagugugagagaacaug

SEQ ID NO: 924695 - RNA, 22 nt, Human
aaagaguuaagagucuuaagcu

SEQ ID NO: 924696 - RNA, 22 nt, Human
uauuucucagcauuuuacaucc

SEQ ID NO: 924697 - RNA, 19 nt, Human
gacuucugauguccagaug

SEQ ID NO: 924698 - RNA, 21 nt, Human
ugcauauucuucugguggcug

SEQ ID NO: 924699 - RNA, 22 nt, Human
cugcuguagagaaggguuguca

SEQ ID NO: 924700 - RNA, 22 nt, Human
ugguagggacacuaugcagaaa

SEQ ID NO: 924701 - RNA, 22 nt, Human
aagaguuuuuggagugugaguu

SEQ ID NO: 924702 - RNA, 17 nt, Human
uuuggaaagugaucauu

SEQ ID NO: 924703 - RNA, 22 nt, Human
caugcucuccauuggacacaga

SEQ ID NO: 924704 - RNA, 22 nt, Human
gugugcgcgcgcgucccgggug

SEQ ID NO: 924705 - RNA, 22 nt, Human
uaggccaaaugacuugauguuu

SEQ ID NO: 924706 - RNA, 22 nt, Human
uuuuucuagaccuuaaaggcca

SEQ ID NO: 924707 - RNA, 22 nt, Human
guggguguggaacugugagacc

SEQ ID NO: 924708 - RNA, 22 nt, Human
accagccuccuagcugcuccug

SEQ ID NO: 924709 - RNA, 22 nt, Human
ccuggcuguuuauuucggggcu

SEQ ID NO: 924710 - RNA, 22 nt, Human
aagaucagaacuuuauacagga

SEQ ID NO: 924711 - RNA, 22 nt, Human
ggacagugucugcuucaggccc

SEQ ID NO: 924712 - RNA, 22 nt, Human
ccacaaagaaugggggaagcau

SEQ ID NO: 924713 - RNA, 22 nt, Human
uggaggcagucaaaugacugac

SEQ ID NO: 924714 - RNA, 22 nt, Human
cugcagagaauuguggggcuuc

SEQ ID NO: 924715 - RNA, 22 nt, Human
ugaggcaggaggauugcaggau

SEQ ID NO: 924716 - RNA, 22 nt, Human
ucagaaagguugagucaugugc

SEQ ID NO: 924717 - RNA, 21 nt, Human
gacacaguaaucuuggggcuu

SEQ ID NO: 924718 - RNA, 22 nt, Human
aagagcauuuggugagauuuga

SEQ ID NO: 924719 - RNA, 23 nt, Human
ucuuuccucagcacacaccaaga

SEQ ID NO: 924720 - RNA, 22 nt, Human
uuaugccuccgaaaccuggagu

SEQ ID NO: 924721 - RNA, 22 nt, Human
uggcacugcacuuuaagauuua

SEQ ID NO: 924722 - RNA, 22 nt, Human
caggaagcuagauuuuguugcu

SEQ ID NO: 924723 - RNA, 22 nt, Human
gaguugaaagcaaaaguugaua

SEQ ID NO: 924724 - RNA, 18 nt, Human
uugcuuuguaagcuugca

SEQ ID NO: 924725 - RNA, 22 nt, Human
cagagccaaaugcugugguuau

SEQ ID NO: 924726 - RNA, 22 nt, Human
cugggcagcuaccaccacugcu

SEQ ID NO: 924727 - RNA, 22 nt, Human
cgcagcuguccauguguggggg

SEQ ID NO: 924728 - RNA, 22 nt, Human
uuuguguuuguacaaugcacua

SEQ ID NO: 924729 - RNA, 22 nt, Human
gaaaacuauuggccuagaacaa

SEQ ID NO: 924730 - RNA, 22 nt, Human
ucucugugugugugacagcauu

SEQ ID NO: 924731 - RNA, 22 nt, Human
uaagaaucgauguuuauuuaga

SEQ ID NO: 924732 - RNA, 22 nt, Human
gaugcuaaaauaauuauuuuga

SEQ ID NO: 924733 - RNA, 22 nt, Human
acuaacauguuaaucaaaagaa

SEQ ID NO: 924734 - RNA, 22 nt, Human
agaggucaaugggacuuggauc

SEQ ID NO: 924735 - RNA, 22 nt, Human
uagagcuuagagaaugaguuug

SEQ ID NO: 924736 - RNA, 22 nt, Human
agcuguuuccauaaaugagaca

SEQ ID NO: 924737 - RNA, 22 nt, Human
acuccagguuuuuucacugaag

SEQ ID NO: 924738 - RNA, 22 nt, Human
aggcagcaugcucugcuucuac

SEQ ID NO: 924739 - RNA, 22 nt, Human
gauuucucacuguggauuuccu

SEQ ID NO: 924740 - RNA, 22 nt, Human
agggaagugaaugacagauauc

SEQ ID NO: 924741 - RNA, 22 nt, Human
uauccauuuauuuucuaggcaa

SEQ ID NO: 924742 - RNA, 22 nt, Human
ugugugugcacaugcauauaca

SEQ ID NO: 924743 - RNA, 22 nt, Human
uggcaaauuuuggcaagcugaa

SEQ ID NO: 924744 - RNA, 22 nt, Human
aauaagcaagccugugugcaag

SEQ ID NO: 924745 - RNA, 22 nt, Human
cuguuugugauuagcagugggu

SEQ ID NO: 924746 - RNA, 22 nt, Human
auuagccuguugcauuuucacu

SEQ ID NO: 924747 - RNA, 22 nt, Human
cacagggaguuacagaagcacu

SEQ ID NO: 924748 - RNA, 22 nt, Human
gaaugucuaaacauagcuuuua

SEQ ID NO: 924749 - RNA, 22 nt, Human
aagagacuauggugucuaugaa

SEQ ID NO: 924750 - RNA, 22 nt, Human
ucaaucuguguaugcugggagu

SEQ ID NO: 924751 - RNA, 19 nt, Human
ccagagcccgccagauggg

SEQ ID NO: 924752 - RNA, 22 nt, Human
uccuuagagugguugugcuaug

SEQ ID NO: 924753 - RNA, 19 nt, Human
agccaggguccagacaugu

SEQ ID NO: 924754 - RNA, 22 nt, Human
uagcugucagcaaucaaguggu

SEQ ID NO: 924755 - RNA, 22 nt, Human
agagagggaauauuugggguau

SEQ ID NO: 924756 - RNA, 22 nt, Human
uauuuuaaagacugccagccua

SEQ ID NO: 924757 - RNA, 18 nt, Human
uaaaugcauguuaauaac

SEQ ID NO: 924758 - RNA, 22 nt, Human
guuaacauaggaguuuguugua

SEQ ID NO: 924759 - RNA, 22 nt, Human
augcucagggcacacucuggac

SEQ ID NO: 924760 - RNA, 22 nt, Human
acagggccuuugauggauuaua

SEQ ID NO: 924761 - RNA, 18 nt, Human
ggcuggaagcuguugcug

SEQ ID NO: 924762 - RNA, 22 nt, Human
uuucuaaggcuaggucuuaagg

SEQ ID NO: 924763 - RNA, 22 nt, Human
agaggacagagugcuggauuua

SEQ ID NO: 924764 - RNA, 22 nt, Human
ugaaauguguucuaguguuuug

SEQ ID NO: 924765 - RNA, 22 nt, Human
aggcauggggcugcagucaggu

SEQ ID NO: 924766 - RNA, 22 nt, Human
uuaggaagaaggaggcaguauu

SEQ ID NO: 924767 - RNA, 22 nt, Human
aggacuucaaauggaaacaaaa

SEQ ID NO: 924768 - RNA, 22 nt, Human
acauucugggugauguucuuca

SEQ ID NO: 924769 - RNA, 22 nt, Human
ugggaagguacacgggaaagag

SEQ ID NO: 924770 - RNA, 22 nt, Human
auccuuaauuuacuugcaucuu

SEQ ID NO: 924771 - RNA, 22 nt, Human
agacuucaccuacagcagucuc

SEQ ID NO: 924772 - RNA, 22 nt, Human
cuccuccagugggucccucagg

SEQ ID NO: 924773 - RNA, 21 nt, Human
gccugggauaguggccuccgg

SEQ ID NO: 924774 - RNA, 22 nt, Human
guggacuugcuguccuggacuu

SEQ ID NO: 924775 - RNA, 22 nt, Human
ugucucugaagcccccuccuuu

SEQ ID NO: 924776 - RNA, 22 nt, Human
ggagaggacauggcucccacag

SEQ ID NO: 924777 - RNA, 22 nt, Human
cuucuucuuuuaauaaaugucu

SEQ ID NO: 924778 - RNA, 22 nt, Human
ugggcucuuggaccccaacgcu

SEQ ID NO: 924779 - RNA, 22 nt, Human
uggacacaaagaucaaauauug

SEQ ID NO: 924780 - RNA, 22 nt, Human
aggcuucagguuugcuuugcag

SEQ ID NO: 924781 - RNA, 22 nt, Human
ggcaccuggagguuuacuggau

SEQ ID NO: 924782 - RNA, 22 nt, Human
gugggccaguuccucacaggua

SEQ ID NO: 924783 - RNA, 22 nt, Human
aacaaucuguucgauagaaaau

SEQ ID NO: 924784 - RNA, 22 nt, Human
aguggcuaugcaugacuggaau

SEQ ID NO: 924785 - RNA, 22 nt, Human
aggcccugcggaaaugaucauu

SEQ ID NO: 924786 - RNA, 22 nt, Human
uuuuagaaggaaugcuauggug

SEQ ID NO: 924787 - RNA, 22 nt, Human
uacauuuccugucagagauaua

SEQ ID NO: 924788 - RNA, 22 nt, Human
gcuuacaagccagcuguaccac

SEQ ID NO: 924789 - RNA, 22 nt, Human
caaagguuggaaauguuuacca

SEQ ID NO: 924790 - RNA, 22 nt, Human
uggaaccuggugauguacaagu

SEQ ID NO: 924791 - RNA, 22 nt, Human
gggaggaaggcuugggugagua

SEQ ID NO: 924792 - RNA, 22 nt, Human
cugggaaguagaaucagaugag

SEQ ID NO: 924793 - RNA, 22 nt, Human
agcgcaggaacacgucugccuu

SEQ ID NO: 924794 - RNA, 22 nt, Human
gagagaaaggcuugcaggcugu

SEQ ID NO: 924795 - RNA, 22 nt, Human
ccaggcucugugugggcuagag

SEQ ID NO: 924796 - RNA, 22 nt, Human
acagaagaccaagaaagcuucc

SEQ ID NO: 924797 - RNA, 22 nt, Human
aacugaauuuuaaauacaggcc

SEQ ID NO: 924798 - RNA, 22 nt, Human
aggcuggagguuuguugcggcu

SEQ ID NO: 924799 - RNA, 22 nt, Human
uugucucuaagugugaucuuca

SEQ ID NO: 924800 - RNA, 23 nt, Human
cuucagugugggacugcagcgug

SEQ ID NO: 924801 - RNA, 22 nt, Human
ugacugccccuuccauuccugc

SEQ ID NO: 924802 - RNA, 22 nt, Human
agagccaggcucccauggggca

SEQ ID NO: 924803 - RNA, 22 nt, Human
gaagacuuuaagccgagauuag

SEQ ID NO: 924804 - RNA, 22 nt, Human
uggcagagcuggcugcggauga

SEQ ID NO: 924805 - RNA, 22 nt, Human
gcacagguugcaaaaguucaca

SEQ ID NO: 924806 - RNA, 22 nt, Human
cauaauguuguaacacauagag

SEQ ID NO: 924807 - RNA, 22 nt, Human
gacagaguuguugauguaugcu

SEQ ID NO: 924808 - RNA, 22 nt, Human
gcugcagcuguaggacacaauu

SEQ ID NO: 924809 - RNA, 22 nt, Human
uggugcuguggaggggcagaag

SEQ ID NO: 924810 - RNA, 22 nt, Human
ucccagagcugauaagccuuua

SEQ ID NO: 924811 - RNA, 22 nt, Human
gccacauuagcccucaccaucu

SEQ ID NO: 924812 - RNA, 22 nt, Human
caggcagcugcgacaagagagc

SEQ ID NO: 924813 - RNA, 22 nt, Human
ggaaguuuauugaguucaagua

SEQ ID NO: 924814 - RNA, 22 nt, Human
cagcucucacacccuccuccca

SEQ ID NO: 924815 - RNA, 22 nt, Human
ugccugaauucaauuccuggcu

SEQ ID NO: 924816 - RNA, 22 nt, Human
ugugugaguaaggcugagagag

SEQ ID NO: 924817 - RNA, 22 nt, Human
uccaggagaccagauguaggcc

SEQ ID NO: 924818 - RNA, 22 nt, Human
caguugccuuauuuccuugcug

SEQ ID NO: 924819 - RNA, 22 nt, Human
aagggggcacagucacuguaau

SEQ ID NO: 924820 - RNA, 22 nt, Human
aauuagaaccagaagccauauu

SEQ ID NO: 924821 - RNA, 22 nt, Human
acaugacaaaaugcacaggauu

SEQ ID NO: 924822 - RNA, 22 nt, Human
gcucugggcugcccucuggaca

SEQ ID NO: 924823 - RNA, 22 nt, Human
auguaaacucacauuuucuuca

SEQ ID NO: 924824 - RNA, 22 nt, Human
uuugaaacccgucacuuugagu

SEQ ID NO: 924825 - RNA, 22 nt, Human
gugcugacaggagccuggcggu

SEQ ID NO: 924826 - RNA, 22 nt, Human
uuuguucacaggguuguuguag

SEQ ID NO: 924827 - RNA, 22 nt, Human
aucaacuuguccuugauguuaa

SEQ ID NO: 924828 - RNA, 22 nt, Human
uacagggacauggaacaggcuc

SEQ ID NO: 924829 - RNA, 22 nt, Human
aagcgcagacacagagagugga

SEQ ID NO: 924830 - RNA, 22 nt, Human
gcaaacauaauaugaagacacu

SEQ ID NO: 924831 - RNA, 22 nt, Human
gggggcuggaauauccaucaac

SEQ ID NO: 924832 - RNA, 20 nt, Human
uccagggcuagggagcucau

SEQ ID NO: 924833 - RNA, 22 nt, Human
gugcaguugagacaauaggcug

SEQ ID NO: 924834 - RNA, 17 nt, Human
ggaaaaggaugauacag

SEQ ID NO: 924835 - RNA, 22 nt, Human
uauugcauuucccacguucacu

SEQ ID NO: 924836 - RNA, 20 nt, Human
aagcuuccuugggcgcccgg

SEQ ID NO: 924837 - RNA, 21 nt, Human
ugcucaugcaaugcaugucca

SEQ ID NO: 924838 - RNA, 22 nt, Human
cugcaucugcauaaucaacuuc

SEQ ID NO: 924839 - RNA, 22 nt, Human
gagaaagaaagggaaguuuguu

SEQ ID NO: 924840 - RNA, 22 nt, Human
guuuuuuggguguauaucuucu

SEQ ID NO: 924841 - RNA, 22 nt, Human
gggagcugucaucaguguuguc

SEQ ID NO: 924842 - RNA, 22 nt, Human
aagcccugucacccugacuuca

SEQ ID NO: 924843 - RNA, 22 nt, Human
cuggaaugggccauuugaggcc

SEQ ID NO: 924844 - RNA, 22 nt, Human
aaaaauacuucacuucugggug

SEQ ID NO: 924845 - RNA, 22 nt, Human
ucuagggagcucuagcaguggu

SEQ ID NO: 924846 - RNA, 22 nt, Human
caucaagagucuuacuaucagu

SEQ ID NO: 924847 - RNA, 21 nt, Human
ugagauaaauuuccuuacuac

SEQ ID NO: 924848 - RNA, 22 nt, Human
aggugggcgcugcucccgcugg

SEQ ID NO: 924849 - RNA, 22 nt, Human
uucauugauuccaggcucuucu

SEQ ID NO: 924850 - RNA, 22 nt, Human
gugggggacccaggugcugucc

SEQ ID NO: 924851 - RNA, 22 nt, Human
acagaaauaacuuuuuauguuu

SEQ ID NO: 924852 - RNA, 23 nt, Human
uguguauguaucuaugcauaggu

SEQ ID NO: 924853 - RNA, 22 nt, Human
auaauagcauuagguuuaugca

SEQ ID NO: 924854 - RNA, 21 nt, Human
aacugcaaaugaugcuggaga

SEQ ID NO: 924855 - RNA, 22 nt, Human
ggcagccagcggguggacgcgc

SEQ ID NO: 924856 - RNA, 22 nt, Human
uuauuucccugaggguugcagg

SEQ ID NO: 924857 - RNA, 22 nt, Human
ugucaccacauuugucaauauc

SEQ ID NO: 924858 - RNA, 22 nt, Human
cugggaggacaacuuggagcuc

SEQ ID NO: 924859 - RNA, 19 nt, Human
aucuuuggguccugaaggg

SEQ ID NO: 924860 - RNA, 20 nt, Human
auauaccaucccacaacagg

SEQ ID NO: 924861 - RNA, 22 nt, Human
aaucuucauguccucucuaauu

SEQ ID NO: 924862 - RNA, 22 nt, Human
uauauucugauuccaucugugu

SEQ ID NO: 924863 - RNA, 22 nt, Human
auauauuuugcggucacguggc

SEQ ID NO: 924864 - RNA, 22 nt, Human
ucacauaaauuuaccagaugau

SEQ ID NO: 924865 - RNA, 22 nt, Human
aaccaguauguuuaggagguga

SEQ ID NO: 924866 - RNA, 22 nt, Human
caggagccagcugucccaacca

SEQ ID NO: 924867 - RNA, 20 nt, Human
cucaggauugucuagccccu

SEQ ID NO: 924868 - RNA, 22 nt, Human
gcagggcugcagagggcacugu

SEQ ID NO: 924869 - RNA, 22 nt, Human
uucauguauugcauuguguccu

SEQ ID NO: 924870 - RNA, 22 nt, Human
ugcacacagccagugaguggca

SEQ ID NO: 924871 - RNA, 17 nt, Human
ugaauucaaucugcacu

SEQ ID NO: 924872 - RNA, 22 nt, Human
cuccuuccccuacucagcaucc

SEQ ID NO: 924873 - RNA, 22 nt, Human
uagagacaccaguaccauucug

SEQ ID NO: 924874 - RNA, 22 nt, Human
uaugcuuuaacccucuuauauu

SEQ ID NO: 924875 - RNA, 22 nt, Human
uuugguuuauuaaauuguaggc

SEQ ID NO: 924876 - RNA, 22 nt, Human
uguggccucuaagcucacgaag

SEQ ID NO: 924877 - RNA, 22 nt, Human
ugaggcagcaauuguauuguau

SEQ ID NO: 924878 - RNA, 22 nt, Human
uucucugccucacaggucuaag

SEQ ID NO: 924879 - RNA, 22 nt, Human
guugaauacuugagaaauccau

SEQ ID NO: 924880 - RNA, 22 nt, Human
gccugagagucugcauuucuaa

SEQ ID NO: 924881 - RNA, 18 nt, Human
gcauacagaggggaagua

SEQ ID NO: 924882 - RNA, 22 nt, Human
uugugugauaagucucuugugc

SEQ ID NO: 924883 - RNA, 22 nt, Human
uaucuuucuguccuagauucug

SEQ ID NO: 924884 - RNA, 22 nt, Human
gccucugucauagcucauguga

SEQ ID NO: 924885 - RNA, 22 nt, Human
auuccuugggcugccuuauuau

SEQ ID NO: 924886 - RNA, 22 nt, Human
aaaguuuggauuagcaguuaga

SEQ ID NO: 924887 - RNA, 22 nt, Human
uauguuuuaggaauuaauuguu

SEQ ID NO: 924888 - RNA, 22 nt, Human
agggccugagcucuccuccagu

SEQ ID NO: 924889 - RNA, 22 nt, Human
ggaggccuugaggccaggagcu

SEQ ID NO: 924890 - RNA, 22 nt, Human
ugggccacgucaucucccacaa

SEQ ID NO: 924891 - RNA, 22 nt, Human
aggaggaauacaauccagcagc

SEQ ID NO: 924892 - RNA, 17 nt, Human
agccagguacaagucca

SEQ ID NO: 924893 - RNA, 22 nt, Human
ugcuucaggagaugucaccaug

SEQ ID NO: 924894 - RNA, 22 nt, Human
uggugccaagcaugaggacucu

SEQ ID NO: 924895 - RNA, 22 nt, Human
uucagagcuuagaauggacuac

SEQ ID NO: 924896 - RNA, 22 nt, Human
ccaguuuuuccagugcuuucug

SEQ ID NO: 924897 - RNA, 22 nt, Human
cugggcuuagcagcuccugguc

SEQ ID NO: 924898 - RNA, 22 nt, Human
cagaggcagaauggagauuugg

SEQ ID NO: 924899 - RNA, 22 nt, Human
aaauaaguaguuuaguguugug

SEQ ID NO: 924900 - RNA, 23 nt, Human
auacauacagucuuacugacuuu

SEQ ID NO: 924901 - RNA, 22 nt, Human
uuacaaacaagaucuuauucuu

SEQ ID NO: 924902 - RNA, 22 nt, Human
ccagcuggugggucuuucucug

SEQ ID NO: 924903 - RNA, 19 nt, Human
gggacuggaggauguggag

SEQ ID NO: 924904 - RNA, 22 nt, Human
aauacauaauaaguuuugucug

SEQ ID NO: 924905 - RNA, 22 nt, Human
gcccaagaguuaagucucugcu

SEQ ID NO: 924906 - RNA, 22 nt, Human
aaguccagggaucaaaguaggc

SEQ ID NO: 924907 - RNA, 22 nt, Human
cuccugggcucaagugauccuc

SEQ ID NO: 924908 - RNA, 22 nt, Human
ugaggccacuuccccacagccc

SEQ ID NO: 924909 - RNA, 22 nt, Human
guauguguugaauucagggguc

SEQ ID NO: 924910 - RNA, 22 nt, Human
agaacauaauuaucauaaacug

SEQ ID NO: 924911 - RNA, 22 nt, Human
uuaggaaugagauuucuaguga

SEQ ID NO: 924912 - RNA, 17 nt, Human
gcagccucuugguagug

SEQ ID NO: 924913 - RNA, 22 nt, Human
uggauaaaacguucugaaaaac

SEQ ID NO: 924914 - RNA, 21 nt, Human
ccugagccuguuuauccagaa

SEQ ID NO: 924915 - RNA, 22 nt, Human
guccauggcagagcccuucugc

SEQ ID NO: 924916 - RNA, 22 nt, Human
aguuauagccauauucuaagau

SEQ ID NO: 924917 - RNA, 22 nt, Human
aacuacauagaaauuaguauuu

SEQ ID NO: 924918 - RNA, 22 nt, Human
aggaagacaaucugugugcugu

SEQ ID NO: 924919 - RNA, 22 nt, Human
caucacaucagugugaacaguu

SEQ ID NO: 924920 - RNA, 22 nt, Human
aguaucagaugugauuaaaggg

SEQ ID NO: 924921 - RNA, 22 nt, Human
cgguaaggucugagacaacacc

SEQ ID NO: 924922 - RNA, 22 nt, Human
gcugucacuggcauguuccggg

SEQ ID NO: 924923 - RNA, 22 nt, Human
uagaaaauguuccacugccauu

SEQ ID NO: 924924 - RNA, 22 nt, Human
caccuuuugugucugcguuugu

SEQ ID NO: 924925 - RNA, 22 nt, Human
uauacacauuuuuaccuauagu

SEQ ID NO: 924926 - RNA, 22 nt, Human
uagcaauccguugaucccuugc

SEQ ID NO: 924927 - RNA, 22 nt, Human
acacaguugguggcucagucug

SEQ ID NO: 924928 - RNA, 19 nt, Human
uucugggaggggcugacug

SEQ ID NO: 924929 - RNA, 22 nt, Human
agagacuggcuucuaaaauggc

SEQ ID NO: 924930 - RNA, 22 nt, Human
gccugaggaaugcuccugacuu

SEQ ID NO: 924931 - RNA, 22 nt, Human
gaggaggaggaaguggaaccca

SEQ ID NO: 924932 - RNA, 22 nt, Human
gcagcaggcuuuucauaccuug

SEQ ID NO: 924933 - RNA, 22 nt, Human
cuugcuguuuucuacccucaag

SEQ ID NO: 924934 - RNA, 22 nt, Human
uucauuuaauuuguguauuaac

SEQ ID NO: 924935 - RNA, 22 nt, Human
uuuaguaccaucauuugccucu

SEQ ID NO: 924936 - RNA, 22 nt, Human
cucucuggcuuggcacggagau

SEQ ID NO: 924937 - RNA, 22 nt, Human
ugagcccaggaguuggagaccg

SEQ ID NO: 924938 - RNA, 22 nt, Human
ccagaagaggacacagugugga

SEQ ID NO: 924939 - RNA, 18 nt, Human
ucagcuggggcugcagcc

SEQ ID NO: 924940 - RNA, 22 nt, Human
aggcagugcucaagacagcagc

SEQ ID NO: 924941 - RNA, 20 nt, Human
uuucaccaucuuggccaggc

SEQ ID NO: 924942 - RNA, 22 nt, Human
auguuugucaggauuguaauua

SEQ ID NO: 924943 - RNA, 22 nt, Human
cugcugagguccuugcucagac

SEQ ID NO: 924944 - RNA, 22 nt, Human
augccuuaaggcgagauacuua

SEQ ID NO: 924945 - RNA, 22 nt, Human
caggucagaggcgcagccccca

SEQ ID NO: 924946 - RNA, 23 nt, Human
uccuggugacaugccugagcauc

SEQ ID NO: 924947 - RNA, 22 nt, Human
gcagacuguaccuggaagaggg

SEQ ID NO: 924948 - RNA, 22 nt, Human
ccagcugcccaagaggcauccu

SEQ ID NO: 924949 - RNA, 22 nt, Human
uucugcugaaaacagccaugua

SEQ ID NO: 924950 - RNA, 22 nt, Human
aguugucagucaaagacauuug

SEQ ID NO: 924951 - RNA, 22 nt, Human
guggcagugaggcaggagcagu

SEQ ID NO: 924952 - RNA, 22 nt, Human
gggcucuguuuagaucagagau

SEQ ID NO: 924953 - RNA, 22 nt, Human
gugggagcuucaucaagcaguu

SEQ ID NO: 924954 - RNA, 22 nt, Human
acagacauucagcuaagucuau

SEQ ID NO: 924955 - RNA, 20 nt, Human
uaucugcucuaguagcaguu

SEQ ID NO: 924956 - RNA, 22 nt, Human
aaacucuaguaaaauguauuca

SEQ ID NO: 924957 - RNA, 22 nt, Human
uaguucuagggcaucaucccag

SEQ ID NO: 924958 - RNA, 19 nt, Human
ggagaagcaucuagaaaua

SEQ ID NO: 924959 - RNA, 22 nt, Human
ggugcugaugaguuaggagagg

SEQ ID NO: 924960 - RNA, 19 nt, Human
aaugcugcuucuuuuugca

SEQ ID NO: 924961 - RNA, 22 nt, Human
ucauguuugcccuaagaaaaag

SEQ ID NO: 924962 - RNA, 22 nt, Human
gagcugggcuggcuuccucccu

SEQ ID NO: 924963 - RNA, 22 nt, Human
acugcaaucuggauccuagaag

SEQ ID NO: 924964 - RNA, 21 nt, Human
aaguaaugugucucuucuacc

SEQ ID NO: 924965 - RNA, 22 nt, Human
uuacauaguuaaauaguacagc

SEQ ID NO: 924966 - RNA, 22 nt, Human
aggaagcuccuggagagccagu

SEQ ID NO: 924967 - RNA, 22 nt, Human
guucauuuuucccuaaugagua

SEQ ID NO: 924968 - RNA, 17 nt, Human
gcuucuggagcuucugu

SEQ ID NO: 924969 - RNA, 23 nt, Human
ucagagaggcccccugcagagau

SEQ ID NO: 924970 - RNA, 22 nt, Human
caaauacuaaacauaagauuuu

SEQ ID NO: 924971 - RNA, 23 nt, Human
ggagaggggugugggcaucuuua

SEQ ID NO: 924972 - RNA, 22 nt, Human
cuugcucacaguaccuggcuug

SEQ ID NO: 924973 - RNA, 22 nt, Human
gcuuggcccugccgccuggguc

SEQ ID NO: 924974 - RNA, 22 nt, Human
aagaggagacuucagcaacuug

SEQ ID NO: 924975 - RNA, 22 nt, Human
acacaugaguucucaucuugug

SEQ ID NO: 924976 - RNA, 22 nt, Human
gugggguguccagcagcgagcu

SEQ ID NO: 924977 - RNA, 22 nt, Human
uucauugaaauguuucuagcug

SEQ ID NO: 924978 - RNA, 22 nt, Human
ucuguuuagaugcuuuaucugu

SEQ ID NO: 924979 - RNA, 22 nt, Human
ccagcugucugguuccagagcc

SEQ ID NO: 924980 - RNA, 22 nt, Human
caguguggcugagacagaggcu

SEQ ID NO: 924981 - RNA, 22 nt, Human
aauucugaugagucagagaaag

SEQ ID NO: 924982 - RNA, 17 nt, Human
ugcaggcuguuauagcc

SEQ ID NO: 924983 - RNA, 22 nt, Human
ucuguggcccaagugauggcug

SEQ ID NO: 924984 - RNA, 22 nt, Human
ggguggcacaggugcagagggu

SEQ ID NO: 924985 - RNA, 22 nt, Human
auguguuuauaauuacucaauc

SEQ ID NO: 924986 - RNA, 22 nt, Human
agugguaagggcauaggcacug

SEQ ID NO: 924987 - RNA, 22 nt, Human
gugaaguugauuguuaucguca

SEQ ID NO: 924988 - RNA, 22 nt, Human
agcuggugcucaggggcaugga

SEQ ID NO: 924989 - RNA, 22 nt, Human
uuuacagaugaggaaacugaga

SEQ ID NO: 924990 - RNA, 22 nt, Human
ggcaggacauugacuacaguga

SEQ ID NO: 924991 - RNA, 22 nt, Human
cuaaggcaccgaggcaggagcg

SEQ ID NO: 924992 - RNA, 22 nt, Human
agagagcugacuuuggagucag

SEQ ID NO: 924993 - RNA, 22 nt, Human
ucugccuccugcuugucccgac

SEQ ID NO: 924994 - RNA, 22 nt, Human
ccugucuggaacauggccuguu

SEQ ID NO: 924995 - RNA, 22 nt, Human
acagcauggauaacaaggcacu

SEQ ID NO: 924996 - RNA, 22 nt, Human
acagggccuuauauccagaagg

SEQ ID NO: 924997 - RNA, 22 nt, Human
agaaucuugggcaaauucaucu

SEQ ID NO: 924998 - RNA, 22 nt, Human
agucccagugagaugagccacg

SEQ ID NO: 924999 - RNA, 20 nt, Human
guuuuaugccaguucugugu

SEQ ID NO: 925000 - RNA, 22 nt, Human
auugcaaauaacuguacugaau

SEQ ID NO: 925001 - RNA, 22 nt, Human
gaucacaauuuagacuuuuuaa

SEQ ID NO: 925002 - RNA, 17 nt, Human
aggcagguaagaguuau

SEQ ID NO: 925003 - RNA, 20 nt, Human
uccaggagguuaguguggcu

SEQ ID NO: 925004 - RNA, 22 nt, Human
gacauaaaauggaauucuguug

SEQ ID NO: 925005 - RNA, 22 nt, Human
aggaaugacagauguccgcacc

SEQ ID NO: 925006 - RNA, 22 nt, Human
ugcuggcccaugaagacgcagu

SEQ ID NO: 925007 - RNA, 22 nt, Human
cauggcugcgagaagagugggu

SEQ ID NO: 925008 - RNA, 22 nt, Human
uuauagugggcccaacauggcg

SEQ ID NO: 925009 - RNA, 22 nt, Human
guggcagccgcaggcccugugu

SEQ ID NO: 925010 - RNA, 22 nt, Human
agcaagaagcuuugcugugaua

SEQ ID NO: 925011 - RNA, 22 nt, Human
aaaaguaauugcaauuuuguag

SEQ ID NO: 925012 - RNA, 19 nt, Human
ccuggcccugcugcgcggg

SEQ ID NO: 925013 - RNA, 22 nt, Human
aagaacaguugggaggugagcc

SEQ ID NO: 925014 - RNA, 22 nt, Human
gacagaggagaagaugcugugg

SEQ ID NO: 925015 - RNA, 22 nt, Human
uagcacuuguguuaugccuugu

SEQ ID NO: 925016 - RNA, 22 nt, Human
cggagaggaccugcaacucgcu

SEQ ID NO: 925017 - RNA, 22 nt, Human
ucacagacuguguugcuacuca

SEQ ID NO: 925018 - RNA, 22 nt, Human
agguucaaauuguugcaguuuc

SEQ ID NO: 925019 - RNA, 22 nt, Human
aacaggcuucuucugggcuccu

SEQ ID NO: 925020 - RNA, 22 nt, Human
uccucccugaguggggacagcu

SEQ ID NO: 925021 - RNA, 22 nt, Human
ccauuucacuggguaguugugg

SEQ ID NO: 925022 - RNA, 22 nt, Human
ccagaaaaggagcugcaggaug

SEQ ID NO: 925023 - RNA, 22 nt, Human
uaaggcagccgcucagagaggu

SEQ ID NO: 925024 - RNA, 22 nt, Human
gagccaccuucaacucaggaau

SEQ ID NO: 925025 - RNA, 22 nt, Human
uuuagagagaauuuucaaagug

SEQ ID NO: 925026 - RNA, 22 nt, Human
auguaaaccgugcacucccagg

SEQ ID NO: 925027 - RNA, 22 nt, Human
ccuuuaugagauccugggguga

SEQ ID NO: 925028 - RNA, 22 nt, Human
uucuaguguccuuggacuugcu

SEQ ID NO: 925029 - RNA, 22 nt, Human
aagauacacguuguauugaaua

SEQ ID NO: 925030 - RNA, 20 nt, Human
cucauguggcaccaggcacu

SEQ ID NO: 925031 - RNA, 22 nt, Human
cuuggucucuuuaccggagugu

SEQ ID NO: 925032 - RNA, 22 nt, Human
cacuuucuguguaucuuccauu

SEQ ID NO: 925033 - RNA, 22 nt, Human
gaaagcaauuuguguaaucugu

SEQ ID NO: 925034 - RNA, 22 nt, Human
gaaggagagagacaucgucccu

SEQ ID NO: 925035 - RNA, 22 nt, Human
gcagagcucaagguguucagcu

SEQ ID NO: 925036 - RNA, 22 nt, Human
uccugggcccuccggaucaggu

SEQ ID NO: 925037 - RNA, 22 nt, Human
aggccacaaccacccugugccc

SEQ ID NO: 925038 - RNA, 22 nt, Human
ugcagcaauuugcaguaauuua

SEQ ID NO: 925039 - RNA, 22 nt, Human
gagcagugggaaggaacagggu

SEQ ID NO: 925040 - RNA, 22 nt, Human
ccucucucugcaucuggagggc

SEQ ID NO: 925041 - RNA, 22 nt, Human
ggcuucauuuuaucuuaucaug

SEQ ID NO: 925042 - RNA, 22 nt, Human
agcugagccagcagcaacagga

SEQ ID NO: 925043 - RNA, 22 nt, Human
ugcuuaaauagcuggaggcuac

SEQ ID NO: 925044 - RNA, 22 nt, Human
auucuucucccuuagggcccag

SEQ ID NO: 925045 - RNA, 22 nt, Human
uucuggaauauuugacacaauu

SEQ ID NO: 925046 - RNA, 22 nt, Human
auggugaagcuucauggguguu

SEQ ID NO: 925047 - RNA, 22 nt, Human
ucaggcugcuguacugugaaug

SEQ ID NO: 925048 - RNA, 22 nt, Human
cugggaagaaauugugggaggc

SEQ ID NO: 925049 - RNA, 22 nt, Human
agcaaauacuuuucacugagcc

SEQ ID NO: 925050 - RNA, 22 nt, Human
aguaaacauagaauguucuucc

SEQ ID NO: 925051 - RNA, 22 nt, Human
cuggccaacuugcuuguuggca

SEQ ID NO: 925052 - RNA, 19 nt, Human
ucagggccgcagaggguac

SEQ ID NO: 925053 - RNA, 22 nt, Human
cuguaugucuugugaauuguag

SEQ ID NO: 925054 - RNA, 22 nt, Human
aguucuggcggcugucggcacu

SEQ ID NO: 925055 - RNA, 22 nt, Human
gcugcaagcaugucauccucac

SEQ ID NO: 925056 - RNA, 22 nt, Human
uugcagaaucucaggaaggaga

SEQ ID NO: 925057 - RNA, 22 nt, Human
ggcuggaaaagacaaagcuauu

SEQ ID NO: 925058 - RNA, 22 nt, Human
acauuugauaauuauaaagaca

SEQ ID NO: 925059 - RNA, 22 nt, Human
gggucaaggcuacauggagacc

SEQ ID NO: 925060 - RNA, 22 nt, Human
aggggagagaacauaaggaagu

SEQ ID NO: 925061 - RNA, 22 nt, Human
auaaguucagguaaagaaauca

SEQ ID NO: 925062 - RNA, 22 nt, Human
cucaggcagugcccucuggccg

SEQ ID NO: 925063 - RNA, 22 nt, Human
cagaaggagggggcaagcccug

SEQ ID NO: 925064 - RNA, 22 nt, Human
ccagaggcggagguuugcagug

SEQ ID NO: 925065 - RNA, 22 nt, Human
agagauaguguauuaguugggc

SEQ ID NO: 925066 - RNA, 22 nt, Human
guccacauaggaacccagcuuc

SEQ ID NO: 925067 - RNA, 22 nt, Human
acuaaauacacacauuuguuca

SEQ ID NO: 925068 - RNA, 22 nt, Human
uuuuauguugcuauaauaggua

SEQ ID NO: 925069 - RNA, 22 nt, Human
ucauuuucacacauaaauagca

SEQ ID NO: 925070 - RNA, 22 nt, Human
uguuugaaacuuugaucacuaa

SEQ ID NO: 925071 - RNA, 22 nt, Human
ggucuccugaggcugccacacc

SEQ ID NO: 925072 - RNA, 22 nt, Human
cccugcagccuugcaugccuuc

SEQ ID NO: 925073 - RNA, 22 nt, Human
cucaagaaggaugagcuauugc

SEQ ID NO: 925074 - RNA, 22 nt, Human
uuuucuuaggugcuccaaguag

SEQ ID NO: 925075 - RNA, 22 nt, Human
auacauuagugaacaaaagaga

SEQ ID NO: 925076 - RNA, 22 nt, Human
uucucucuggaccugggaugcg

SEQ ID NO: 925077 - RNA, 22 nt, Human
caaguucacaugcauccuugcu

SEQ ID NO: 925078 - RNA, 22 nt, Human
uuugacaacugugcaguuugua

SEQ ID NO: 925079 - RNA, 20 nt, Human
caacaugagcaagugaacug

SEQ ID NO: 925080 - RNA, 22 nt, Human
gucccagggcaaggcuguuucu

SEQ ID NO: 925081 - RNA, 22 nt, Human
uguucucuaagaaaagaagcau

SEQ ID NO: 925082 - RNA, 22 nt, Human
gggcuccagcagaggcagccgg

SEQ ID NO: 925083 - RNA, 20 nt, Human
gauggcuuuagaagcuggua

SEQ ID NO: 925084 - RNA, 22 nt, Human
cccugccuuguuggagccuaug

SEQ ID NO: 925085 - RNA, 22 nt, Human
cucucccuagguuagcggucag

SEQ ID NO: 925086 - RNA, 22 nt, Human
uauguguauaccuauacaugug

SEQ ID NO: 925087 - RNA, 22 nt, Human
uccacauuauguuucuccuuuc

SEQ ID NO: 925088 - RNA, 22 nt, Human
acagccaggagccaugggcagg

SEQ ID NO: 925089 - RNA, 22 nt, Human
gagccagcugagcugcacuguc

SEQ ID NO: 925090 - RNA, 22 nt, Human
cagcuggcugcggugaggggac

SEQ ID NO: 925091 - RNA, 23 nt, Human
gccugggacugguagugugaccu

SEQ ID NO: 925092 - RNA, 17 nt, Human
agccugggaaggaguga

SEQ ID NO: 925093 - RNA, 22 nt, Human
ggcagcaaauauugucagcugu

SEQ ID NO: 925094 - RNA, 22 nt, Human
uggcuucuauugcuguggcauu

SEQ ID NO: 925095 - RNA, 22 nt, Human
gggccacacagaaccuccuggu

SEQ ID NO: 925096 - RNA, 22 nt, Human
ugucuagacauuagcuucagcu

SEQ ID NO: 925097 - RNA, 22 nt, Human
ucagugaaguaauggugagaga

SEQ ID NO: 925098 - RNA, 22 nt, Human
ugacagcaauaauuuuaucuuc

SEQ ID NO: 925099 - RNA, 22 nt, Human
uucuuuggggaauauucugguu

SEQ ID NO: 925100 - RNA, 22 nt, Human
guucaguguuuacaugauuguu

SEQ ID NO: 925101 - RNA, 20 nt, Human
uuuauucagccuacccucuu

SEQ ID NO: 925102 - RNA, 17 nt, Human
aggcagcucagaacauc

SEQ ID NO: 925103 - RNA, 23 nt, Human
acauacauaagcaccacauuuug

SEQ ID NO: 925104 - RNA, 18 nt, Human
gacagcuguccugagccc

SEQ ID NO: 925105 - RNA, 22 nt, Human
acagcaguuuagaggacagcca

SEQ ID NO: 925106 - RNA, 22 nt, Human
acauuuauuuuggcacggcaca

SEQ ID NO: 925107 - RNA, 22 nt, Human
aagaaaugcacacaacugcugg

SEQ ID NO: 925108 - RNA, 22 nt, Human
uguguaaauuuauuuacauaaa

SEQ ID NO: 925109 - RNA, 19 nt, Human
ugcuccaggccuugccgca

SEQ ID NO: 925110 - RNA, 22 nt, Human
ggcuuuauaggguagaggauca

SEQ ID NO: 925111 - RNA, 22 nt, Human
cccagcuccuuguuugcaucuc

SEQ ID NO: 925112 - RNA, 22 nt, Human
aaugcugucuuuucuacuucau

SEQ ID NO: 925113 - RNA, 22 nt, Human
uugugucuggaaugcguggagc

SEQ ID NO: 925114 - RNA, 22 nt, Human
aauugcuucauuaacauuuagg

SEQ ID NO: 925115 - RNA, 22 nt, Human
ugcugcagagaauguuuuggcc

SEQ ID NO: 925116 - RNA, 22 nt, Human
acaacacagcuuuccucaaguu

SEQ ID NO: 925117 - RNA, 22 nt, Human
gagcacaguccuuuuguuaaaa

SEQ ID NO: 925118 - RNA, 22 nt, Human
uugacagagaaaagugugacuu

SEQ ID NO: 925119 - RNA, 22 nt, Human
uucacaaaaaugcugaacaguu

SEQ ID NO: 925120 - RNA, 22 nt, Human
agcagggcagugcuucagcucu

SEQ ID NO: 925121 - RNA, 22 nt, Human
aaucuacaugcaauauuuuuag

SEQ ID NO: 925122 - RNA, 22 nt, Human
caacuuuagcaauguuaguaua

SEQ ID NO: 925123 - RNA, 22 nt, Human
augggcuaaacuuagaggauau

SEQ ID NO: 925124 - RNA, 22 nt, Human
agggaugggucuaacccagaac

SEQ ID NO: 925125 - RNA, 22 nt, Human
uuucucugugccauuuccauaa

SEQ ID NO: 925126 - RNA, 22 nt, Human
agcuggccuguuagagcugagu

SEQ ID NO: 925127 - RNA, 22 nt, Human
ccagaggaucaguacuggcugg

SEQ ID NO: 925128 - RNA, 22 nt, Human
uaaaugagggcugacaugauug

SEQ ID NO: 925129 - RNA, 22 nt, Human
agggcagacuaggauggaagug

SEQ ID NO: 925130 - RNA, 22 nt, Human
ucugagaaaauaggaaacuuga

SEQ ID NO: 925131 - RNA, 22 nt, Human
ggccuuccaucugccucuguuu

SEQ ID NO: 925132 - RNA, 23 nt, Human
uggcucuguggaucccucaggag

SEQ ID NO: 925133 - RNA, 22 nt, Human
gaguuuuuccaaggucacauga

SEQ ID NO: 925134 - RNA, 22 nt, Human
aguuauuuggcuauagauggua

SEQ ID NO: 925135 - RNA, 22 nt, Human
cauuagaauuagguuguuuacc

SEQ ID NO: 925136 - RNA, 22 nt, Human
uugaguguacuuuagucaucug

SEQ ID NO: 925137 - RNA, 22 nt, Human
uucauuugugguuauuuacaau

SEQ ID NO: 925138 - RNA, 22 nt, Human
uuguguguguaacuuuaugaga

SEQ ID NO: 925139 - RNA, 22 nt, Human
auugaagaguugauuauuaucu

SEQ ID NO: 925140 - RNA, 22 nt, Human
agaaagcagcauuuaugaucuc

SEQ ID NO: 925141 - RNA, 22 nt, Human
cuggguguagauggaaguuugg

SEQ ID NO: 925142 - RNA, 22 nt, Human
caccagaacaagacaggagaau

SEQ ID NO: 925143 - RNA, 19 nt, Human
ggcagccugcacgggcugc

SEQ ID NO: 925144 - RNA, 22 nt, Human
uggcaguuauuaaucaagucuu

SEQ ID NO: 925145 - RNA, 22 nt, Human
uuccugugguguuucccagaca

SEQ ID NO: 925146 - RNA, 22 nt, Human
ugugugggagcacgggcuguug

SEQ ID NO: 925147 - RNA, 22 nt, Human
cugcaggggccucgagcacagg

SEQ ID NO: 925148 - RNA, 22 nt, Human
gaagauuuaagcacaauagucu

SEQ ID NO: 925149 - RNA, 22 nt, Human
caaguaacuugauuaagguaag

SEQ ID NO: 925150 - RNA, 22 nt, Human
agggaauguagcaagaugccaa

SEQ ID NO: 925151 - RNA, 22 nt, Human
uuaggcaauuuugucauugugu

SEQ ID NO: 925152 - RNA, 22 nt, Human
gaaugcuaagcaugugggaguu

SEQ ID NO: 925153 - RNA, 22 nt, Human
aaguccauaguuugcauuacag

SEQ ID NO: 925154 - RNA, 22 nt, Human
uggccagaaccugcaguaggcc

SEQ ID NO: 925155 - RNA, 22 nt, Human
cagcagacuggaguaggcagug

SEQ ID NO: 925156 - RNA, 22 nt, Human
uaacaggguaggagggcaugaa

SEQ ID NO: 925157 - RNA, 22 nt, Human
uaugauuuguagacauuugauu

SEQ ID NO: 925158 - RNA, 22 nt, Human
uccauauuaacuaaaacuagaa

SEQ ID NO: 925159 - RNA, 22 nt, Human
uaacaagaugucacuccugucc

SEQ ID NO: 925160 - RNA, 22 nt, Human
acacuguucuuugcacugagaa

SEQ ID NO: 925161 - RNA, 22 nt, Human
uggagcagccaugaugacagag

SEQ ID NO: 925162 - RNA, 22 nt, Human
uaauaauagcaguagcugccac

SEQ ID NO: 925163 - RNA, 22 nt, Human
gacauugaaguauuuuugucga

SEQ ID NO: 925164 - RNA, 21 nt, Human
ccagagagagggaaguggguu

SEQ ID NO: 925165 - RNA, 22 nt, Human
uucaaacaacucauuuaugcaa

SEQ ID NO: 925166 - RNA, 22 nt, Human
ccaggacuucgaggcuacagug

SEQ ID NO: 925167 - RNA, 21 nt, Human
cagccugcugcuccagggcca

SEQ ID NO: 925168 - RNA, 18 nt, Human
ucuuggcagcaucuggca

SEQ ID NO: 925169 - RNA, 22 nt, Human
ggacugaagugcugucuagugu

SEQ ID NO: 925170 - RNA, 22 nt, Human
auuagcaaggcagcaucaggca

SEQ ID NO: 925171 - RNA, 22 nt, Human
uacaucaaaucaauguuccagu

SEQ ID NO: 925172 - RNA, 22 nt, Human
agccugugacucugugaaacca

SEQ ID NO: 925173 - RNA, 22 nt, Human
accugccucuaagcagcaggug

SEQ ID NO: 925174 - RNA, 22 nt, Human
cucaggaugcaggucacaggac

SEQ ID NO: 925175 - RNA, 22 nt, Human
gugagcagaauaaggguugaga

SEQ ID NO: 925176 - RNA, 22 nt, Human
agcacccuccaacuucccugua

SEQ ID NO: 925177 - RNA, 22 nt, Human
uucucuuagcuguaaagucaau

SEQ ID NO: 925178 - RNA, 22 nt, Human
gcagaggcacagccccagauga

SEQ ID NO: 925179 - RNA, 22 nt, Human
uguccuuuacugauugcuucug

SEQ ID NO: 925180 - RNA, 22 nt, Human
augagaaauuuauuacaagcua

SEQ ID NO: 925181 - RNA, 22 nt, Human
ggaagccaggcugggggaucug

SEQ ID NO: 925182 - RNA, 22 nt, Human
agagacaggguuuugccauguu

SEQ ID NO: 925183 - RNA, 22 nt, Human
ucuucccccgugcuccagugca

SEQ ID NO: 925184 - RNA, 20 nt, Human
uuuuccuucugaguauguug

SEQ ID NO: 925185 - RNA, 22 nt, Human
uagguacauuauuagaugcaug

SEQ ID NO: 925186 - RNA, 22 nt, Human
cagggagaggcaucauagggaa

SEQ ID NO: 925187 - RNA, 22 nt, Human
aaacugcugguugcuggccagc

SEQ ID NO: 925188 - RNA, 22 nt, Human
gcaguccuagggugcucugcag

SEQ ID NO: 925189 - RNA, 22 nt, Human
caagacaugcaauugccacuuu

SEQ ID NO: 925190 - RNA, 22 nt, Human
uauuauuuuagcacugaggauu

SEQ ID NO: 925191 - RNA, 22 nt, Human
ucuuuccaaggacucuguagca

SEQ ID NO: 925192 - RNA, 22 nt, Human
gaagauuuggauuccaugucac

SEQ ID NO: 925193 - RNA, 22 nt, Human
agcugcuguccuaggcacugua

SEQ ID NO: 925194 - RNA, 22 nt, Human
gagguagcgaguggacagugca

SEQ ID NO: 925195 - RNA, 22 nt, Human
gauaauuugauaccucaaucag

SEQ ID NO: 925196 - RNA, 22 nt, Human
ccaggacuuuaaguccagcacu

SEQ ID NO: 925197 - RNA, 20 nt, Human
gacuucccauaucuucuuca

SEQ ID NO: 925198 - RNA, 22 nt, Human
agaagccagaauauucauggau

SEQ ID NO: 925199 - RNA, 22 nt, Human
uccugggacuuucaaggcuagg

SEQ ID NO: 925200 - RNA, 22 nt, Human
ugcagcaccgucccacuggcua

SEQ ID NO: 925201 - RNA, 22 nt, Human
aagcauuuauagauaagaauuu

SEQ ID NO: 925202 - RNA, 22 nt, Human
ccugcagagccacgugccagcg

SEQ ID NO: 925203 - RNA, 22 nt, Human
uauuuguagaauggauuaaggg

SEQ ID NO: 925204 - RNA, 22 nt, Human
uacagaaggaaguuuagcuaaa

SEQ ID NO: 925205 - RNA, 22 nt, Human
aaacuguuauagcagaaaggac

SEQ ID NO: 925206 - RNA, 22 nt, Human
uaucauuuaacagaaucauugc

SEQ ID NO: 925207 - RNA, 17 nt, Human
ugaacuuuagguggagc

SEQ ID NO: 925208 - RNA, 22 nt, Human
ggagaagccacacauugggugu

SEQ ID NO: 925209 - RNA, 22 nt, Human
aggaaauguaguccucaucucc

SEQ ID NO: 925210 - RNA, 22 nt, Human
caauugucagugcuguuuaaau

SEQ ID NO: 925211 - RNA, 19 nt, Human
uuucuuuuccccucagcac

SEQ ID NO: 925212 - RNA, 22 nt, Human
cagggcagggauguugcggcag

SEQ ID NO: 925213 - RNA, 22 nt, Human
uuauguuuuauggcuauaucau

SEQ ID NO: 925214 - RNA, 18 nt, Human
uccugggaaaggcauaca

SEQ ID NO: 925215 - RNA, 22 nt, Human
agaagcacagguaaagugauuu

SEQ ID NO: 925216 - RNA, 22 nt, Human
uggcucugagacacaggcucuc

SEQ ID NO: 925217 - RNA, 22 nt, Human
uauuuucaccauguaucccugu

SEQ ID NO: 925218 - RNA, 22 nt, Human
caggggcucccugggugccagu

SEQ ID NO: 925219 - RNA, 22 nt, Human
gcucucugaggugcuggcagag

SEQ ID NO: 925220 - RNA, 22 nt, Human
gaaaucuuuuccaauuguuuag

SEQ ID NO: 925221 - RNA, 19 nt, Human
ccuuccuccccagggccau

SEQ ID NO: 925222 - RNA, 18 nt, Human
agaccagacaagaauggu

SEQ ID NO: 925223 - RNA, 22 nt, Human
augugugcaucaaugauagauc

SEQ ID NO: 925224 - RNA, 22 nt, Human
uucaacuauuaugaauaaaauu

SEQ ID NO: 925225 - RNA, 22 nt, Human
cuggcagggcucuuugggugcu

SEQ ID NO: 925226 - RNA, 18 nt, Human
uccuuucaccccuucucu

SEQ ID NO: 925227 - RNA, 22 nt, Human
uucugaauccucgaaacauagc

SEQ ID NO: 925228 - RNA, 22 nt, Human
ucagggcaaugucccucagaag

SEQ ID NO: 925229 - RNA, 23 nt, Human
acuacagauacuccugcuguuug

SEQ ID NO: 925230 - RNA, 19 nt, Human
uuagaacauccucuaggga

SEQ ID NO: 925231 - RNA, 20 nt, Human
gaagauggguagaggcacag

SEQ ID NO: 925232 - RNA, 19 nt, Human
gugaacaaggagaauggga

SEQ ID NO: 925233 - RNA, 22 nt, Human
ugauuuuuggaucugagcugca

SEQ ID NO: 925234 - RNA, 22 nt, Human
agcaguggcugaagauguuccu

SEQ ID NO: 925235 - RNA, 22 nt, Human
agacaagagcugaggacauauu

SEQ ID NO: 925236 - RNA, 22 nt, Human
auucuacacaacaugaugaugg

SEQ ID NO: 925237 - RNA, 22 nt, Human
uccugaguguuuggccaggcca

SEQ ID NO: 925238 - RNA, 22 nt, Human
uugcaaaggggaauaaagcaau

SEQ ID NO: 925239 - RNA, 22 nt, Human
aacacaggcauacuggcuccag

SEQ ID NO: 925240 - RNA, 22 nt, Human
cuggcuccaaauucugauguuc

SEQ ID NO: 925241 - RNA, 22 nt, Human
caggggaaggagccuugaaacu

SEQ ID NO: 925242 - RNA, 22 nt, Human
auagccaggagaugauggggga

SEQ ID NO: 925243 - RNA, 22 nt, Human
agguaagggcugcgacuauaag

SEQ ID NO: 925244 - RNA, 22 nt, Human
acauguuaaacaucauggaaug

SEQ ID NO: 925245 - RNA, 22 nt, Human
uucuguuacuguuggucauaac

SEQ ID NO: 925246 - RNA, 20 nt, Human
accagagaccugaaucaguu

SEQ ID NO: 925247 - RNA, 22 nt, Human
gacacagucaagaguggaggaa

SEQ ID NO: 925248 - RNA, 22 nt, Human
acagggcuccuagguggugugc

SEQ ID NO: 925249 - RNA, 22 nt, Human
uucugcaugaacaguuuauucc

SEQ ID NO: 925250 - RNA, 22 nt, Human
ccagagaggccuuggcaagaca

SEQ ID NO: 925251 - RNA, 22 nt, Human
cuaauucuuuggagacaaucug

SEQ ID NO: 925252 - RNA, 22 nt, Human
auggccuggccagagcucugcu

SEQ ID NO: 925253 - RNA, 19 nt, Human
gguuccucacgcuaagggc

SEQ ID NO: 925254 - RNA, 22 nt, Human
aggcugaugcuggcugaggcug

SEQ ID NO: 925255 - RNA, 22 nt, Human
agcuggauuccagugcagucac

SEQ ID NO: 925256 - RNA, 19 nt, Human
aggcugcaagguggugggc

SEQ ID NO: 925257 - RNA, 22 nt, Human
acaggagugaaucuggcacuua

SEQ ID NO: 925258 - RNA, 22 nt, Human
ucuauaauggaaaguggaugug

SEQ ID NO: 925259 - RNA, 18 nt, Human
gagguggcugggccaucu

SEQ ID NO: 925260 - RNA, 22 nt, Human
cccugcagaucuaggguccuuc

SEQ ID NO: 925261 - RNA, 22 nt, Human
aaauucugcaauuugacaagau

SEQ ID NO: 925262 - RNA, 22 nt, Human
agaguccaugaagacagcugag

SEQ ID NO: 925263 - RNA, 22 nt, Human
aguggcagccgagcaggagaug

SEQ ID NO: 925264 - RNA, 22 nt, Human
gcaccuuagccugaauuugugu

SEQ ID NO: 925265 - RNA, 22 nt, Human
gguauucacaauauuuaaagag

SEQ ID NO: 925266 - RNA, 22 nt, Human
uucaaauccuagcccuguggcc

SEQ ID NO: 925267 - RNA, 22 nt, Human
gcugucuggaggcucugaggga

SEQ ID NO: 925268 - RNA, 22 nt, Human
acagcagccuuguugguuucga

SEQ ID NO: 925269 - RNA, 22 nt, Human
ggggaggaguguacagguuuau

SEQ ID NO: 925270 - RNA, 22 nt, Human
cgcaggcaaugcuccgcggggg

SEQ ID NO: 925271 - RNA, 22 nt, Human
ccucugugacuucuaccuucac

SEQ ID NO: 925272 - RNA, 22 nt, Human
uuuuuaugccuacgcugaaaag

SEQ ID NO: 925273 - RNA, 22 nt, Human
cacauucauggaguuugccugu

SEQ ID NO: 925274 - RNA, 23 nt, Human
gcuacagcugacugucauucccu

SEQ ID NO: 925275 - RNA, 22 nt, Human
aucauguucaucguauuuaggc

SEQ ID NO: 925276 - RNA, 22 nt, Human
cagagcuggguuugggaaaccu

SEQ ID NO: 925277 - RNA, 22 nt, Human
auguggaaugaacaaaggaggc

SEQ ID NO: 925278 - RNA, 22 nt, Human
cugggugcugugggcucagagg

SEQ ID NO: 925279 - RNA, 22 nt, Human
uaggacagagauuuguuuuaug

SEQ ID NO: 925280 - RNA, 22 nt, Human
caggcagaaauuuuguuucauu

SEQ ID NO: 925281 - RNA, 22 nt, Human
ucacccaggcuggacugcagug

SEQ ID NO: 925282 - RNA, 22 nt, Human
uucccugcaaccuuucccuggg

SEQ ID NO: 925283 - RNA, 22 nt, Human
ugcagaugccugggcugcacca

SEQ ID NO: 925284 - RNA, 22 nt, Human
cuuguggccaauguuuguuaua

SEQ ID NO: 925285 - RNA, 22 nt, Human
uucaaagaauuuugagaccuga

SEQ ID NO: 925286 - RNA, 20 nt, Human
gguccuguacucucauugaa

SEQ ID NO: 925287 - RNA, 22 nt, Human
uuuauuaugauggacaccuucg

SEQ ID NO: 925288 - RNA, 19 nt, Human
uccagggcuuuauggcuuu

SEQ ID NO: 925289 - RNA, 22 nt, Human
uuuguucuugcaacaguuauua

SEQ ID NO: 925290 - RNA, 22 nt, Human
aaggcaaguuuuaguuuucugg

SEQ ID NO: 925291 - RNA, 22 nt, Human
acccacagccgcugugcguccc

SEQ ID NO: 925292 - RNA, 22 nt, Human
uuuauguuccucuugagcuuuc

SEQ ID NO: 925293 - RNA, 17 nt, Human
ucagcaggggccaagcu

SEQ ID NO: 925294 - RNA, 18 nt, Human
uuugcaugguaacauuga

SEQ ID NO: 925295 - RNA, 22 nt, Human
ugucaguucaauuauaguaauu

SEQ ID NO: 925296 - RNA, 22 nt, Human
accugcugucuugggggaaugc

SEQ ID NO: 925297 - RNA, 21 nt, Human
caucuuaauugaaagcagaga

SEQ ID NO: 925298 - RNA, 22 nt, Human
cucagagggaggacugggcugg

SEQ ID NO: 925299 - RNA, 22 nt, Human
ugagcaggcgcagcaggagguc

SEQ ID NO: 925300 - RNA, 22 nt, Human
gcaguucuccagaauaaagggu

SEQ ID NO: 925301 - RNA, 22 nt, Human
uaacauguucagacuaccugug

SEQ ID NO: 925302 - RNA, 22 nt, Human
augcagcaguuuacaaagcaau

SEQ ID NO: 925303 - RNA, 22 nt, Human
uugugagagaaaauguguauau

SEQ ID NO: 925304 - RNA, 22 nt, Human
guccacagcuggccagggccuc

SEQ ID NO: 925305 - RNA, 22 nt, Human
guuuauaugaacuucauaccca

SEQ ID NO: 925306 - RNA, 20 nt, Human
agucacaguaucagucuuag

SEQ ID NO: 925307 - RNA, 22 nt, Human
gugaggauacuuaagagaacac

SEQ ID NO: 925308 - RNA, 22 nt, Human
uguucauuaguggaaguaaguu

SEQ ID NO: 925309 - RNA, 20 nt, Human
agauggugaaggccagggag

SEQ ID NO: 925310 - RNA, 22 nt, Human
cucuugcuugcaaguggggaua

SEQ ID NO: 925311 - RNA, 22 nt, Human
agcgagggaggucugaggacag

SEQ ID NO: 925312 - RNA, 22 nt, Human
ugcuucugaaaugcaggucuuc

SEQ ID NO: 925313 - RNA, 22 nt, Human
cugggccugugacucccauccu

SEQ ID NO: 925314 - RNA, 22 nt, Human
agcccagcaaagggagguucag

SEQ ID NO: 925315 - RNA, 22 nt, Human
ucccagcaggaguccaguuccc

SEQ ID NO: 925316 - RNA, 16 nt, Human
ccaccugcagcucuca

SEQ ID NO: 925317 - RNA, 22 nt, Human
uaugauguguaccuaagucacc

SEQ ID NO: 925318 - RNA, 22 nt, Human
uaugucuuguguuugcuaaucu

SEQ ID NO: 925319 - RNA, 22 nt, Human
cuuacagagaagaaaauguagu

SEQ ID NO: 925320 - RNA, 22 nt, Human
aagaggaacugggggcugaguc

SEQ ID NO: 925321 - RNA, 22 nt, Human
uuagaacaguguuugccucgcu

SEQ ID NO: 925322 - RNA, 22 nt, Human
uggccagcuguagguugugcag

SEQ ID NO: 925323 - RNA, 22 nt, Human
gcaaucaaugauuuauauuugu

SEQ ID NO: 925324 - RNA, 22 nt, Human
uggcagugaugcggcaggacau

SEQ ID NO: 925325 - RNA, 22 nt, Human
cacugcccaggaccugccaccc

SEQ ID NO: 925326 - RNA, 19 nt, Human
uggaggccucaggaaaaga

SEQ ID NO: 925327 - RNA, 22 nt, Human
uggaagggagcuggaauuugga

SEQ ID NO: 925328 - RNA, 22 nt, Human
agagggcauaaaauagagcacg

SEQ ID NO: 925329 - RNA, 22 nt, Human
guacauuucucccaacacuaaa

SEQ ID NO: 925330 - RNA, 22 nt, Human
gaccaacagaauuuccuguuuu

SEQ ID NO: 925331 - RNA, 22 nt, Human
ugaggcuggaugggaugccucc

SEQ ID NO: 925332 - RNA, 22 nt, Human
aaugcagugagccauuaaaugg

SEQ ID NO: 925333 - RNA, 22 nt, Human
cuuggcagcuacacagguaaga

SEQ ID NO: 925334 - RNA, 22 nt, Human
ugcugaggucacggcggccaga

SEQ ID NO: 925335 - RNA, 22 nt, Human
gcuggucccaauguguuuccuu

SEQ ID NO: 925336 - RNA, 22 nt, Human
ugcuuuauagacaaggaaguag

SEQ ID NO: 925337 - RNA, 22 nt, Human
acagucuuuaauuucuuugugg

SEQ ID NO: 925338 - RNA, 23 nt, Human
guaaaauacgcagugcaguguga

SEQ ID NO: 925339 - RNA, 22 nt, Human
uccuggccgccgcguggggccg

SEQ ID NO: 925340 - RNA, 22 nt, Human
ggcuuugacaugcugaauuaaa

SEQ ID NO: 925341 - RNA, 22 nt, Human
acccgggaggcaggagucauag

SEQ ID NO: 925342 - RNA, 19 nt, Human
aagguggcagcagguauua

SEQ ID NO: 925343 - RNA, 22 nt, Human
gggcggggggagcuggaaugaa

SEQ ID NO: 925344 - RNA, 22 nt, Human
caguuuauauauaagcacauug

SEQ ID NO: 925345 - RNA, 22 nt, Human
ucuucauuuugaagaggcagaa

SEQ ID NO: 925346 - RNA, 22 nt, Human
caaguucacguugcuuuuugag

SEQ ID NO: 925347 - RNA, 23 nt, Human
aguagcacauacaguacuuguuc

SEQ ID NO: 925348 - RNA, 22 nt, Human
cugcuucaaggaaaugaaucgg

SEQ ID NO: 925349 - RNA, 22 nt, Human
auuucaugcagaaggaaguugg

SEQ ID NO: 925350 - RNA, 22 nt, Human
ggugcucaagagggcauccucu

SEQ ID NO: 925351 - RNA, 22 nt, Human
cagugcuauaauccagugucgu

SEQ ID NO: 925352 - RNA, 22 nt, Human
acacugacugggacagaagacc

SEQ ID NO: 925353 - RNA, 22 nt, Human
agguauuuuauagauaaguaaa

SEQ ID NO: 925354 - RNA, 22 nt, Human
cagguagcugcagagacuauuu

SEQ ID NO: 925355 - RNA, 22 nt, Human
guuuuauuggaacacagccaug

SEQ ID NO: 925356 - RNA, 22 nt, Human
cggcagcaaaggaagccagguc

SEQ ID NO: 925357 - RNA, 22 nt, Human
ccauuuuugacagaaggccuaa

SEQ ID NO: 925358 - RNA, 21 nt, Human
gcuggcugucucuuacacggu

SEQ ID NO: 925359 - RNA, 22 nt, Human
aguuuacaugacguguauuuca

SEQ ID NO: 925360 - RNA, 22 nt, Human
cagugcuggagauggguggaac

SEQ ID NO: 925361 - RNA, 22 nt, Human
acccaggagguggaggcugcag

SEQ ID NO: 925362 - RNA, 19 nt, Human
ccagaugagcagcugagau

SEQ ID NO: 925363 - RNA, 22 nt, Human
gggaaggguguugucuuaucuu

SEQ ID NO: 925364 - RNA, 22 nt, Human
aguggcacaauuuugacucccc

SEQ ID NO: 925365 - RNA, 22 nt, Human
ccuuuauguuucugcagccccc

SEQ ID NO: 925366 - RNA, 22 nt, Human
auggcccaggccaggauccagc

SEQ ID NO: 925367 - RNA, 22 nt, Human
augucacaggcaacaagauugc

SEQ ID NO: 925368 - RNA, 22 nt, Human
ccaccacauuugccuagacuuu

SEQ ID NO: 925369 - RNA, 22 nt, Human
agcccugguagccugcugccau

SEQ ID NO: 925370 - RNA, 22 nt, Human
gccaaugacagucucaguucug

SEQ ID NO: 925371 - RNA, 22 nt, Human
guauuagacugagaaauggagu

SEQ ID NO: 925372 - RNA, 22 nt, Human
augcaaacauguuuccucuaag

SEQ ID NO: 925373 - RNA, 20 nt, Human
cccugcagccaugggagugg

SEQ ID NO: 925374 - RNA, 23 nt, Human
gccaggcacaugguggacacgca

SEQ ID NO: 925375 - RNA, 22 nt, Human
acaugaagcaagaaagaugcua

SEQ ID NO: 925376 - RNA, 22 nt, Human
gaagucuucaucugaugcucug

SEQ ID NO: 925377 - RNA, 22 nt, Human
ccugugaauccaucauuauuuc

SEQ ID NO: 925378 - RNA, 22 nt, Human
cuggaauguagagacagcuuag

SEQ ID NO: 925379 - RNA, 22 nt, Human
agaagcagcuuucaaggugauu

SEQ ID NO: 925380 - RNA, 22 nt, Human
uauuuguagcuucccaaagcuu

SEQ ID NO: 925381 - RNA, 22 nt, Human
agccaagaaucaugagcuaaua

SEQ ID NO: 925382 - RNA, 22 nt, Human
aucaggccagcaaucccugggc

SEQ ID NO: 925383 - RNA, 22 nt, Human
cugggcuccuaaccauccaggu

SEQ ID NO: 925384 - RNA, 22 nt, Human
acuguucuccuuuggcuauauc

SEQ ID NO: 925385 - RNA, 22 nt, Human
ucugcaucuguguugagugccc

SEQ ID NO: 925386 - RNA, 22 nt, Human
augaagcaacagcccuccuauu

SEQ ID NO: 925387 - RNA, 22 nt, Human
uacaaagucccauugccaugga

SEQ ID NO: 925388 - RNA, 22 nt, Human
cagcugaagaaagagugguuag

SEQ ID NO: 925389 - RNA, 22 nt, Human
uccaagaagcucagcaaacauc

SEQ ID NO: 925390 - RNA, 21 nt, Human
agaaaaacacgauauaagccc

SEQ ID NO: 925391 - RNA, 22 nt, Human
cacauguguauaugugaggggg

SEQ ID NO: 925392 - RNA, 22 nt, Human
ggaagagagaucccauagaugu

SEQ ID NO: 925393 - RNA, 22 nt, Human
ccuucccuaaagcgucgcuuag

SEQ ID NO: 925394 - RNA, 22 nt, Human
aaguugguguaugagacagaag

SEQ ID NO: 925395 - RNA, 22 nt, Human
aggaagcuuuaugaccagcuaa

SEQ ID NO: 925396 - RNA, 22 nt, Human
uuccaaaaugccuugauaugau

SEQ ID NO: 925397 - RNA, 22 nt, Human
ggcagcuuugagucuuagagua

SEQ ID NO: 925398 - RNA, 22 nt, Human
cucaccacagagccuguccagc

SEQ ID NO: 925399 - RNA, 22 nt, Human
ucaaggagcccacagucuaaug

SEQ ID NO: 925400 - RNA, 22 nt, Human
cagguucuuaacuuguucuucc

SEQ ID NO: 925401 - RNA, 22 nt, Human
acagccugacuuuuguugucac

SEQ ID NO: 925402 - RNA, 22 nt, Human
uccaggccccagcaccuuggga

SEQ ID NO: 925403 - RNA, 22 nt, Human
aaugcauacguguuuguggcaa

SEQ ID NO: 925404 - RNA, 22 nt, Human
aaaugaguagcgaugcacauua

SEQ ID NO: 925405 - RNA, 22 nt, Human
uuuggaaugaaacagcagagcc

SEQ ID NO: 925406 - RNA, 22 nt, Human
agccagagacugugucuguaau

SEQ ID NO: 925407 - RNA, 22 nt, Human
cacauucagggaacauuggagg

SEQ ID NO: 925408 - RNA, 22 nt, Human
gcagccacccucaaggcugaau

SEQ ID NO: 925409 - RNA, 22 nt, Human
ucuuggcaaauuuuugaggcuc

SEQ ID NO: 925410 - RNA, 22 nt, Human
aaauacgugcacauacauacau

SEQ ID NO: 925411 - RNA, 22 nt, Human
uuacaaagcguugagacaagua

SEQ ID NO: 925412 - RNA, 20 nt, Human
gcacagagaugagcaaagua

SEQ ID NO: 925413 - RNA, 23 nt, Human
ggccacugaauuuucugcaucuu

SEQ ID NO: 925414 - RNA, 22 nt, Human
uuaggaagaugcuuuuucuggg

SEQ ID NO: 925415 - RNA, 22 nt, Human
aauauuuuugaggcccuguuau

SEQ ID NO: 925416 - RNA, 20 nt, Human
uuagaguuagcuguuaugca

SEQ ID NO: 925417 - RNA, 22 nt, Human
gccacagguaggaaccuaccuc

SEQ ID NO: 925418 - RNA, 19 nt, Human
uccagggcaggaacaugua

SEQ ID NO: 925419 - RNA, 22 nt, Human
ugcugucagacagcagugguaa

SEQ ID NO: 925420 - RNA, 21 nt, Human
aucugaaaugucaaagcagau

SEQ ID NO: 925421 - RNA, 22 nt, Human
uuuguacugaccaauuauuuga

SEQ ID NO: 925422 - RNA, 22 nt, Human
gggagucaggcucccucagaga

SEQ ID NO: 925423 - RNA, 18 nt, Human
agagaaagaccaaagcau

SEQ ID NO: 925424 - RNA, 22 nt, Human
aaagaugucagucagauaggau

SEQ ID NO: 925425 - RNA, 22 nt, Human
gagaccucuugguaucgcuagg

SEQ ID NO: 925426 - RNA, 22 nt, Human
aacccaggucuuuggcuuccag

SEQ ID NO: 925427 - RNA, 22 nt, Human
ccagggaaucucugaguguguu

SEQ ID NO: 925428 - RNA, 22 nt, Human
uugacuuuacaguuuucuuagg

SEQ ID NO: 925429 - RNA, 22 nt, Human
ucaggaagaaauucuguaucuu

SEQ ID NO: 925430 - RNA, 22 nt, Human
cuggcccaggaagacguguccc

SEQ ID NO: 925431 - RNA, 22 nt, Human
uuacauuuggcuauguccucua

SEQ ID NO: 925432 - RNA, 22 nt, Human
cccugaggcaguaggagcuuuu

SEQ ID NO: 925433 - RNA, 22 nt, Human
ucugccuggccuggagggcaca

SEQ ID NO: 925434 - RNA, 22 nt, Human
cuggagcuccagggucuccucu

SEQ ID NO: 925435 - RNA, 22 nt, Human
uacuuuggguuuagaauaaacu

SEQ ID NO: 925436 - RNA, 22 nt, Human
cagaggcagugggguugcuccu

SEQ ID NO: 925437 - RNA, 20 nt, Human
ugcuucauuaugugagauag

SEQ ID NO: 925438 - RNA, 20 nt, Human
cagcacagagcuuggcucua

SEQ ID NO: 925439 - RNA, 22 nt, Human
aagggcugcuguagaagcagag

SEQ ID NO: 925440 - RNA, 22 nt, Human
ucuuccaagguugcacacuauc

SEQ ID NO: 925441 - RNA, 22 nt, Human
uacacaggcugccucuuugcau

SEQ ID NO: 925442 - RNA, 22 nt, Human
ucacagaaaagcugagcaucag

SEQ ID NO: 925443 - RNA, 22 nt, Human
acuuagcaauuugauuaaaaga

SEQ ID NO: 925444 - RNA, 22 nt, Human
agaaagauccuucuggcugccu

SEQ ID NO: 925445 - RNA, 21 nt, Human
uccagggcgggcgcacggaga

SEQ ID NO: 925446 - RNA, 22 nt, Human
cagaggcuaagaugagugggug

SEQ ID NO: 925447 - RNA, 22 nt, Human
agagacuguacguggcaaguau

SEQ ID NO: 925448 - RNA, 22 nt, Human
accccagcccugcuucugggag

SEQ ID NO: 925449 - RNA, 20 nt, Human
cuguccugaucuuuucagaa

SEQ ID NO: 925450 - RNA, 22 nt, Human
gcagggagggccuuucaugaca

SEQ ID NO: 925451 - RNA, 22 nt, Human
cacugcuuuucagacaguuauu

SEQ ID NO: 925452 - RNA, 22 nt, Human
cucuugguggguggccuguuga

SEQ ID NO: 925453 - RNA, 22 nt, Human
aucuggaacaaagcuuaggaau

SEQ ID NO: 925454 - RNA, 22 nt, Human
aaaccacaugccuucaaaugcu

SEQ ID NO: 925455 - RNA, 22 nt, Human
ugagcuggucacuccuucugaa

SEQ ID NO: 925456 - RNA, 22 nt, Human
aggagggacaccaauauauguu

SEQ ID NO: 925457 - RNA, 22 nt, Human
ccuugacugccuucaggcuggg

SEQ ID NO: 925458 - RNA, 22 nt, Human
cagcugccaagaaucuuuucua

SEQ ID NO: 925459 - RNA, 22 nt, Human
cagagcagguaucuuuggugaa

SEQ ID NO: 925460 - RNA, 22 nt, Human
aggagcagaccguaguccugca

SEQ ID NO: 925461 - RNA, 20 nt, Human
auaaaauaacugccacaaga

SEQ ID NO: 925462 - RNA, 22 nt, Human
cacagguuagcagcuugaaacu

SEQ ID NO: 925463 - RNA, 22 nt, Human
aaggcagagggcuggaucagag

SEQ ID NO: 925464 - RNA, 22 nt, Human
uccaggccgcauaguuacucug

SEQ ID NO: 925465 - RNA, 22 nt, Human
ucacaggguguacaucaccuau

SEQ ID NO: 925466 - RNA, 22 nt, Human
guggugaguucaggcuggggug

SEQ ID NO: 925467 - RNA, 22 nt, Human
uaucuuuagaggaagagaaucu

SEQ ID NO: 925468 - RNA, 22 nt, Human
uuuguuuauuaggggagaguug

SEQ ID NO: 925469 - RNA, 19 nt, Human
agcagcagcaccagggauu

SEQ ID NO: 925470 - RNA, 22 nt, Human
gaggcagagugcaccccaggag

SEQ ID NO: 925471 - RNA, 22 nt, Human
cugaggggaaaagucaggauga

SEQ ID NO: 925472 - RNA, 22 nt, Human
uagcagcucuuuacuaaccagu

SEQ ID NO: 925473 - RNA, 22 nt, Human
ccugccuggcccaccuugccac

SEQ ID NO: 925474 - RNA, 22 nt, Human
agcagccucuguagaggucucc

SEQ ID NO: 925475 - RNA, 22 nt, Human
uaggaacauaugcagugcuuuu

SEQ ID NO: 925476 - RNA, 22 nt, Human
ggagaccagaaggaagcuucga

SEQ ID NO: 925477 - RNA, 22 nt, Human
aggcugggaaauguagucuucc

SEQ ID NO: 925478 - RNA, 22 nt, Human
ggccacagagggcgggaugcug

SEQ ID NO: 925479 - RNA, 22 nt, Human
caucuuugcacccucaaaaccu

SEQ ID NO: 925480 - RNA, 22 nt, Human
uuuagcauguuccuuucauaga

SEQ ID NO: 925481 - RNA, 22 nt, Human
ggagugguggucaggccauggc

SEQ ID NO: 925482 - RNA, 22 nt, Human
caagggcuucaaguggccaaga

SEQ ID NO: 925483 - RNA, 22 nt, Human
gcuucucaauucucacccucca

SEQ ID NO: 925484 - RNA, 17 nt, Human
cagugaagagacauuaa

SEQ ID NO: 925485 - RNA, 22 nt, Human
aacacagacauagugauuacag

SEQ ID NO: 925486 - RNA, 22 nt, Human
uugcucuguaauaaucuggggu

SEQ ID NO: 925487 - RNA, 22 nt, Human
caauggcacugcccaaagagaa

SEQ ID NO: 925488 - RNA, 18 nt, Human
ugucucaguucugcuaug

SEQ ID NO: 925489 - RNA, 22 nt, Human
ucugugcauuucaggaccugaa

SEQ ID NO: 925490 - RNA, 22 nt, Human
gcucugggugaauggcagauug

SEQ ID NO: 925491 - RNA, 22 nt, Human
ucacauguuaggucgggcaagg

SEQ ID NO: 925492 - RNA, 22 nt, Human
cugggaugcggagguugcggug

SEQ ID NO: 925493 - RNA, 22 nt, Human
acauuuagaguucuuuacucca

SEQ ID NO: 925494 - RNA, 22 nt, Human
ggcagccaugcacgcugccugg

SEQ ID NO: 925495 - RNA, 19 nt, Human
guacagugguaagcuauga

SEQ ID NO: 925496 - RNA, 22 nt, Human
aagaugguuucuguagguuuau

SEQ ID NO: 925497 - RNA, 20 nt, Human
agagagcacaggcaggaaag

SEQ ID NO: 925498 - RNA, 19 nt, Human
aaugguaauuagagaaaug

SEQ ID NO: 925499 - RNA, 22 nt, Human
cagugcagacguggagggggca

SEQ ID NO: 925500 - RNA, 22 nt, Human
ugccaggcuguccugggccugg

SEQ ID NO: 925501 - RNA, 22 nt, Human
ugcaugugcccacucuggcuua

SEQ ID NO: 925502 - RNA, 22 nt, Human
guguuucuugcacuccccggac

SEQ ID NO: 925503 - RNA, 22 nt, Human
gcagcauugugagguccugccc

SEQ ID NO: 925504 - RNA, 22 nt, Human
cuguguccuccccaucacuucu

SEQ ID NO: 925505 - RNA, 23 nt, Human
agcauggaauaggaaagaggcag

SEQ ID NO: 925506 - RNA, 22 nt, Human
aaaucuaguaccuuuuugauua

SEQ ID NO: 925507 - RNA, 22 nt, Human
agagcugcaggguggacccagg

SEQ ID NO: 925508 - RNA, 22 nt, Human
acuuuagaccaucuuccacagu

SEQ ID NO: 925509 - RNA, 22 nt, Human
ccaggcaaaucccucuggcaga

SEQ ID NO: 925510 - RNA, 17 nt, Human
ggagagugggaauggcc

SEQ ID NO: 925511 - RNA, 22 nt, Human
aauccauuuacucuuuacaaga

SEQ ID NO: 925512 - RNA, 22 nt, Human
uucuuuggcauuuccuguaugu

SEQ ID NO: 925513 - RNA, 22 nt, Human
cuuaagaagcaagucucagcaa

SEQ ID NO: 925514 - RNA, 22 nt, Human
agaaaaacuaagaguggguggu

SEQ ID NO: 925515 - RNA, 22 nt, Human
cccaggaggucgaagcugcagu

SEQ ID NO: 925516 - RNA, 22 nt, Human
cccagaaggucgaggcugcagu

SEQ ID NO: 925517 - RNA, 22 nt, Human
cagcagagcauuugguaggagg

SEQ ID NO: 925518 - RNA, 22 nt, Human
gucccaggggagcucucugauu

SEQ ID NO: 925519 - RNA, 22 nt, Human
aagugcuagaaccccagcaaca

SEQ ID NO: 925520 - RNA, 22 nt, Human
cugaggcugagacaggugaaau

SEQ ID NO: 925521 - RNA, 22 nt, Human
uucuucucggcugucagauagu

SEQ ID NO: 925522 - RNA, 22 nt, Human
ugggaugaauacaaugggauca

SEQ ID NO: 925523 - RNA, 22 nt, Human
ggagcagagcugggcuuggcug

SEQ ID NO: 925524 - RNA, 22 nt, Human
ugagcccagucugucugacaug

SEQ ID NO: 925525 - RNA, 22 nt, Human
uuguguguuuguagaaaaucca

SEQ ID NO: 925526 - RNA, 22 nt, Human
gaggaagccccauugaagccag

SEQ ID NO: 925527 - RNA, 22 nt, Human
aagaacuuuuggcaaguguuau

SEQ ID NO: 925528 - RNA, 22 nt, Human
uggcccagaucucugaccuuga

SEQ ID NO: 925529 - RNA, 22 nt, Human
guccccagagcugguggugguu

SEQ ID NO: 925530 - RNA, 22 nt, Human
ggaggguggcagcguccugggc

SEQ ID NO: 925531 - RNA, 22 nt, Human
agaacagaggccuuauguuuca

SEQ ID NO: 925532 - RNA, 22 nt, Human
gugaagcagggaaggaaaggau

SEQ ID NO: 925533 - RNA, 22 nt, Human
cagaggugcuggagugaguccu

SEQ ID NO: 925534 - RNA, 22 nt, Human
uaaagcuaugcuuaauuuauca

SEQ ID NO: 925535 - RNA, 22 nt, Human
auuucuuccuucuccuagaaga

SEQ ID NO: 925536 - RNA, 22 nt, Human
cagcagggggcagcgcagauca

SEQ ID NO: 925537 - RNA, 23 nt, Human
ugucccagagggagggauaggcu

SEQ ID NO: 925538 - RNA, 22 nt, Human
auuagauacacagauuuccacu

SEQ ID NO: 925539 - RNA, 18 nt, Human
cuguccaguagacucugc

SEQ ID NO: 925540 - RNA, 23 nt, Human
uugcugagauaaagaaugcaggg

SEQ ID NO: 925541 - RNA, 22 nt, Human
gaggaaaauaacaacuaagggc

SEQ ID NO: 925542 - RNA, 22 nt, Human
aagacacaauguagcccagcac

SEQ ID NO: 925543 - RNA, 22 nt, Human
uagaauaugugguaggaucugg

SEQ ID NO: 925544 - RNA, 22 nt, Human
uauauguaaauaagucuaaugu

SEQ ID NO: 925545 - RNA, 18 nt, Human
cagggcuguggggucacu

SEQ ID NO: 925546 - RNA, 22 nt, Human
guggugaagccccaucucugcu

SEQ ID NO: 925547 - RNA, 22 nt, Human
ucuguguccugcuagcugucuu

SEQ ID NO: 925548 - RNA, 22 nt, Human
uggcuuggcuaagaucuaagcu

SEQ ID NO: 925549 - RNA, 22 nt, Human
uggccuggaagagaggucgagg

SEQ ID NO: 925550 - RNA, 22 nt, Human
acgaaucauucacggacaacac

SEQ ID NO: 925551 - RNA, 20 nt, Human
caguggcuucuguggaauau

SEQ ID NO: 925552 - RNA, 22 nt, Human
aaaagucugcucucauuucaga

SEQ ID NO: 925553 - RNA, 22 nt, Human
ugccaugcccaccucccuucug

SEQ ID NO: 925554 - RNA, 21 nt, Human
aaggcagaagcauggaaugag

SEQ ID NO: 925555 - RNA, 22 nt, Human
aguggcuguccuggcucuaacu

SEQ ID NO: 925556 - RNA, 22 nt, Human
aacaacagcugcuaaagaguug

SEQ ID NO: 925557 - RNA, 22 nt, Human
gagcaaggcggcaucucucuga

SEQ ID NO: 925558 - RNA, 22 nt, Human
agaguaaaguacuuggaauacc

SEQ ID NO: 925559 - RNA, 22 nt, Human
aggcaagcccccagugaggcuc

SEQ ID NO: 925560 - RNA, 22 nt, Human
cucacagguaccagcacccucc

SEQ ID NO: 925561 - RNA, 22 nt, Human
gugcugagauuggagugagcag

SEQ ID NO: 925562 - RNA, 22 nt, Human
guuuuauuuccaugagagaccg

SEQ ID NO: 925563 - RNA, 22 nt, Human
ggagaaaggauaggaaugugcu

SEQ ID NO: 925564 - RNA, 22 nt, Human
agcaggaaggggccuagccugg

SEQ ID NO: 925565 - RNA, 22 nt, Human
caggaagcaucuggcuagcuaa

SEQ ID NO: 925566 - RNA, 22 nt, Human
ggcacaagguuuaaauaacauc

SEQ ID NO: 925567 - RNA, 22 nt, Human
uauuggaaggcauuagugaaua

SEQ ID NO: 925568 - RNA, 22 nt, Human
auuggucucugcuaaagggagg

SEQ ID NO: 925569 - RNA, 22 nt, Human
agucuagaugauccuaggaaua

SEQ ID NO: 925570 - RNA, 22 nt, Human
gaaguacaaaggacauggaaac

SEQ ID NO: 925571 - RNA, 22 nt, Human
aagucacaagcauauaugcauu

SEQ ID NO: 925572 - RNA, 21 nt, Human
acagcauguuuguguguuugc

SEQ ID NO: 925573 - RNA, 22 nt, Human
agcccaggaguccuuaaggacc

SEQ ID NO: 925574 - RNA, 19 nt, Human
aauucuguuucagcagauc

SEQ ID NO: 925575 - RNA, 22 nt, Human
gaaguucugguguaugugauaa

SEQ ID NO: 925576 - RNA, 22 nt, Human
auaacagguugaauccgaaugu

SEQ ID NO: 925577 - RNA, 22 nt, Human
acugcacugauuuaucauccca

SEQ ID NO: 925578 - RNA, 22 nt, Human
cucuggagaugguucucaauug

SEQ ID NO: 925579 - RNA, 22 nt, Human
ccugucugaaggcagggggaug

SEQ ID NO: 925580 - RNA, 22 nt, Human
ucuucauacucaucacauaggu

SEQ ID NO: 925581 - RNA, 22 nt, Human
agggcucagggcacgucaucca

SEQ ID NO: 925582 - RNA, 22 nt, Human
guggggagggagaugcugaagu

SEQ ID NO: 925583 - RNA, 21 nt, Human
ucauuuauugagaaaugacug

SEQ ID NO: 925584 - RNA, 22 nt, Human
ccagcaggcagucauauccuuu

SEQ ID NO: 925585 - RNA, 22 nt, Human
guggccugggguuuguucugag

SEQ ID NO: 925586 - RNA, 22 nt, Human
aucugaaguggagaaaaauaua

SEQ ID NO: 925587 - RNA, 22 nt, Human
ugguaaggauuguagaaacgaa

SEQ ID NO: 925588 - RNA, 22 nt, Human
ggccuggcauggggacuaaggg

SEQ ID NO: 925589 - RNA, 22 nt, Human
aagguauuauuugcaaucauuu

SEQ ID NO: 925590 - RNA, 22 nt, Human
ccagccuucugggacucucauc

SEQ ID NO: 925591 - RNA, 22 nt, Human
aaguuuugaaauacugaagugu

SEQ ID NO: 925592 - RNA, 22 nt, Human
ggcuggguuugacuccuggcuu

SEQ ID NO: 925593 - RNA, 22 nt, Human
gugcaaaaguaauggcaguuuu

SEQ ID NO: 925594 - RNA, 22 nt, Human
cugagccuuauucaccagcccu

SEQ ID NO: 925595 - RNA, 22 nt, Human
aaggcaauugagaagaaacaga

SEQ ID NO: 925596 - RNA, 23 nt, Human
ugagaagccauuagagcaggugg

SEQ ID NO: 925597 - RNA, 22 nt, Human
cugugucucauccgccucuggc

SEQ ID NO: 925598 - RNA, 22 nt, Human
agcuuccucaccucagaggucu

SEQ ID NO: 925599 - RNA, 22 nt, Human
ccugccaggcuuucagguuugg

SEQ ID NO: 925600 - RNA, 22 nt, Human
aaacauuagacaccauaugcuc

SEQ ID NO: 925601 - RNA, 22 nt, Human
ucagugaucuaaggguauggcc

SEQ ID NO: 925602 - RNA, 22 nt, Human
uugacaaguggagauauuuaag

SEQ ID NO: 925603 - RNA, 22 nt, Human
ucaucauccuuuuuugaagagu

SEQ ID NO: 925604 - RNA, 22 nt, Human
aagaguuuccaguuguggcuca

SEQ ID NO: 925605 - RNA, 22 nt, Human
cucugaggucagggcccggcaa

SEQ ID NO: 925606 - RNA, 22 nt, Human
gugauucuuugaucuaugaaag

SEQ ID NO: 925607 - RNA, 22 nt, Human
aaguuuuauuggaacauagcca

SEQ ID NO: 925608 - RNA, 22 nt, Human
ggucgagucacuuguugccuuu

SEQ ID NO: 925609 - RNA, 22 nt, Human
gcagggcuaauggggcaaguag

SEQ ID NO: 925610 - RNA, 22 nt, Human
acucaaauuugucaacugaagc

SEQ ID NO: 925611 - RNA, 22 nt, Human
aguggcagagccaagauaugau

SEQ ID NO: 925612 - RNA, 22 nt, Human
cacugagaggucucauuuccaa

SEQ ID NO: 925613 - RNA, 22 nt, Human
ccccaggagauuugggagcaca

SEQ ID NO: 925614 - RNA, 23 nt, Human
cagaugugcaacucuaggcaaug

SEQ ID NO: 925615 - RNA, 22 nt, Human
ugcgcgcuggcgucacuuagca

SEQ ID NO: 925616 - RNA, 22 nt, Human
caugaaggaauuaagguaagga

SEQ ID NO: 925617 - RNA, 22 nt, Human
uucugagcuacauaguacuggg

SEQ ID NO: 925618 - RNA, 22 nt, Human
ugggccaggucugugucagcug

SEQ ID NO: 925619 - RNA, 22 nt, Human
uggccugguuauauugcuauca

SEQ ID NO: 925620 - RNA, 22 nt, Human
agugggggcagagccucucucg

SEQ ID NO: 925621 - RNA, 22 nt, Human
cagcuucugcuaucgaacaucu

SEQ ID NO: 925622 - RNA, 22 nt, Human
cccagaguucaaacccugcguc

SEQ ID NO: 925623 - RNA, 22 nt, Human
uugugugugagccuucaccaca

SEQ ID NO: 925624 - RNA, 22 nt, Human
uuacagaagagaaagaauucag

SEQ ID NO: 925625 - RNA, 22 nt, Human
agagguaugggcauggugcugu

SEQ ID NO: 925626 - RNA, 22 nt, Human
cugcccuggcagccuaccaugg

SEQ ID NO: 925627 - RNA, 22 nt, Human
agcacagauaacauggagugga

SEQ ID NO: 925628 - RNA, 22 nt, Human
guggcagaagaguaggaugggc

SEQ ID NO: 925629 - RNA, 22 nt, Human
guauucuuaaggauugagcaaa

SEQ ID NO: 925630 - RNA, 22 nt, Human
uacaacuuccagcuuucagccc

SEQ ID NO: 925631 - RNA, 22 nt, Human
uaugugcauuaucuaguucauu

SEQ ID NO: 925632 - RNA, 22 nt, Human
acaaaauuguguuaaacuuuau

SEQ ID NO: 925633 - RNA, 22 nt, Human
cgagaguuagcuaggagucaca

SEQ ID NO: 925634 - RNA, 20 nt, Human
uguugauuggugucaucuca

SEQ ID NO: 925635 - RNA, 22 nt, Human
accugccuaguugguucugccc

SEQ ID NO: 925636 - RNA, 22 nt, Human
acauuucugcaucucagagcua

SEQ ID NO: 925637 - RNA, 22 nt, Human
gcacccagggcaggaagugagg

SEQ ID NO: 925638 - RNA, 19 nt, Human
ucagaggauuuggcuauga

SEQ ID NO: 925639 - RNA, 22 nt, Human
augcccccaucucuguuggcuc

SEQ ID NO: 925640 - RNA, 22 nt, Human
cuuuuuccagcuucaggguggg

SEQ ID NO: 925641 - RNA, 22 nt, Human
ucugugucacugaggccugugu

SEQ ID NO: 925642 - RNA, 22 nt, Human
gagcagcugugggguugaccau

SEQ ID NO: 925643 - RNA, 22 nt, Human
auggauaaucaugaacuuugag

SEQ ID NO: 925644 - RNA, 19 nt, Human
acagugcaugggaccuggu

SEQ ID NO: 925645 - RNA, 22 nt, Human
gccaggcccugggcacuucgug

SEQ ID NO: 925646 - RNA, 20 nt, Human
aguuacuaagugcuggaacc

SEQ ID NO: 925647 - RNA, 22 nt, Human
aagggcagcuauuaucgucauc

SEQ ID NO: 925648 - RNA, 22 nt, Human
uacauuucagagcuccucucug

SEQ ID NO: 925649 - RNA, 22 nt, Human
caggaaauaucuccuggcagag

SEQ ID NO: 925650 - RNA, 22 nt, Human
ugugggcaggcccgggucugag

SEQ ID NO: 925651 - RNA, 22 nt, Human
cuauuucauugugcugagucug

SEQ ID NO: 925652 - RNA, 22 nt, Human
gcuguggccgucagggaaaugg

SEQ ID NO: 925653 - RNA, 21 nt, Human
ucuggcccucacagucacacc

SEQ ID NO: 925654 - RNA, 21 nt, Human
acaaauuguuuauauaggaag

SEQ ID NO: 925655 - RNA, 22 nt, Human
gagggaggggagcuccacccuc

SEQ ID NO: 925656 - RNA, 22 nt, Human
cuggagcuaauaauccaucuga

SEQ ID NO: 925657 - RNA, 22 nt, Human
uuguuaaaaauagauuuccagg

SEQ ID NO: 925658 - RNA, 22 nt, Human
cagcaucccagagcccagagcu

SEQ ID NO: 925659 - RNA, 22 nt, Human
ggccaccaaaguccuguggcuu

SEQ ID NO: 925660 - RNA, 22 nt, Human
gggcugaggcuaccacuggucu

SEQ ID NO: 925661 - RNA, 22 nt, Human
caauguuuguuagagcucuaga

SEQ ID NO: 925662 - RNA, 22 nt, Human
uaucaucugcaaagcacaucua

SEQ ID NO: 925663 - RNA, 22 nt, Human
auucacaaagucacccuuacac

SEQ ID NO: 925664 - RNA, 22 nt, Human
gacaggcaauuaccagcgccca

SEQ ID NO: 925665 - RNA, 22 nt, Human
acaaggaggucuggggggcccu

SEQ ID NO: 925666 - RNA, 22 nt, Human
aagaggagggcagauucaaggc

SEQ ID NO: 925667 - RNA, 22 nt, Human
aucuuuaauuuggaucagggcc

SEQ ID NO: 925668 - RNA, 22 nt, Human
cuggaaaucacuacuagucaau

SEQ ID NO: 925669 - RNA, 22 nt, Human
cucuggguucacugaggcucug

SEQ ID NO: 925670 - RNA, 22 nt, Human
gcaaaggcuagagacacaggga

SEQ ID NO: 925671 - RNA, 22 nt, Human
uaaguucucaauacauuguagc

SEQ ID NO: 925672 - RNA, 22 nt, Human
ucuuuugucaucccuuguacau

SEQ ID NO: 925673 - RNA, 22 nt, Human
uaauacagacaacuugccaaau

SEQ ID NO: 925674 - RNA, 23 nt, Human
caggcucccggaccaggauccgc

SEQ ID NO: 925675 - RNA, 20 nt, Human
uggagggauuguuggcaaau

SEQ ID NO: 925676 - RNA, 19 nt, Human
cacauuuugagucugagau

SEQ ID NO: 925677 - RNA, 22 nt, Human
uaagauuacagugagaaauaaa

SEQ ID NO: 925678 - RNA, 22 nt, Human
ugugugcagacagauauuacuu

SEQ ID NO: 925679 - RNA, 19 nt, Human
ucugugcugggaggcagca

SEQ ID NO: 925680 - RNA, 22 nt, Human
uaacuuuaugacaugucuugcu

SEQ ID NO: 925681 - RNA, 22 nt, Human
auaagguuggucuuaacuaccu

SEQ ID NO: 925682 - RNA, 22 nt, Human
uuggaagggaaccgaguuugcu

SEQ ID NO: 925683 - RNA, 22 nt, Human
ucagaaggaaguuagaguaugg

SEQ ID NO: 925684 - RNA, 23 nt, Human
uccucccugacuucuacagcaca

SEQ ID NO: 925685 - RNA, 22 nt, Human
ccucucuuggccgcagucuucu

SEQ ID NO: 925686 - RNA, 22 nt, Human
uggccuggcagagcaaggccug

SEQ ID NO: 925687 - RNA, 20 nt, Human
ugcugggcaugcaguggaaa

SEQ ID NO: 925688 - RNA, 23 nt, Human
caacacugccuucaggugaagaa

SEQ ID NO: 925689 - RNA, 22 nt, Human
ugaggccaaaaugacucaaaug

SEQ ID NO: 925690 - RNA, 22 nt, Human
cuccaggacacuaacccaggcu

SEQ ID NO: 925691 - RNA, 22 nt, Human
guuucuuauuucaacuggaaca

SEQ ID NO: 925692 - RNA, 20 nt, Human
agcaaacaggcuccaccaga

SEQ ID NO: 925693 - RNA, 22 nt, Human
cugucuguccugaguucaacca

SEQ ID NO: 925694 - RNA, 22 nt, Human
guccugacggcugauuggccug

SEQ ID NO: 925695 - RNA, 22 nt, Human
uaacuucugaauagcaauagua

SEQ ID NO: 925696 - RNA, 22 nt, Human
cuggccaggcauccccugaucc

SEQ ID NO: 925697 - RNA, 22 nt, Human
uagaggcauugcuuaauuucag

SEQ ID NO: 925698 - RNA, 22 nt, Human
ccuggcucaaggcgaggacucc

SEQ ID NO: 925699 - RNA, 22 nt, Human
agaauccuauugucagauucuu

SEQ ID NO: 925700 - RNA, 22 nt, Human
auccagagacccaaggacagaa

SEQ ID NO: 925701 - RNA, 22 nt, Human
uucagggacuuagugucaguuu

SEQ ID NO: 925702 - RNA, 22 nt, Human
aggucuggugagagcaggugcu

SEQ ID NO: 925703 - RNA, 22 nt, Human
cccccugcgcccggcacgucau

SEQ ID NO: 925704 - RNA, 19 nt, Human
gccuaugucuucaaaucau

SEQ ID NO: 925705 - RNA, 22 nt, Human
cagugccaggagacaagaucag

SEQ ID NO: 925706 - RNA, 22 nt, Human
aucgcauuugagcaaucuuuuc

SEQ ID NO: 925707 - RNA, 22 nt, Human
uuuguucauuaguacaguugua

SEQ ID NO: 925708 - RNA, 22 nt, Human
aaugaaacuaguagaaucuuug

SEQ ID NO: 925709 - RNA, 22 nt, Human
cugcugugccuuaaaaugcaag

SEQ ID NO: 925710 - RNA, 22 nt, Human
ccuuaaucugauauggcuggug

SEQ ID NO: 925711 - RNA, 22 nt, Human
acaugcauacacguacauaccu

SEQ ID NO: 925712 - RNA, 22 nt, Human
ugauuuucuccauuguaaauuc

SEQ ID NO: 925713 - RNA, 20 nt, Human
gcaugaggaaucauugcagc

SEQ ID NO: 925714 - RNA, 22 nt, Human
cacugcuugauugacaugcacg

SEQ ID NO: 925715 - RNA, 22 nt, Human
agcugccucucuugagguuacg

SEQ ID NO: 925716 - RNA, 19 nt, Human
ugcuucauuucuuuuaugu

SEQ ID NO: 925717 - RNA, 17 nt, Human
gagacagcaggagcccc

SEQ ID NO: 925718 - RNA, 22 nt, Human
gcacccagugggaugcuuagca

SEQ ID NO: 925719 - RNA, 19 nt, Human
caucagagggcauaggaug

SEQ ID NO: 925720 - RNA, 22 nt, Human
acuauacaccaaaauauuaagg

SEQ ID NO: 925721 - RNA, 22 nt, Human
ugcugugagguugagaaggaag

SEQ ID NO: 925722 - RNA, 18 nt, Human
gcagcugcaguuguagcu

SEQ ID NO: 925723 - RNA, 22 nt, Human
auuucucugccucagcuucugc

SEQ ID NO: 925724 - RNA, 22 nt, Human
ugccauggccuagaccugugau

SEQ ID NO: 925725 - RNA, 22 nt, Human
guauuuucaugauuucagacca

SEQ ID NO: 925726 - RNA, 22 nt, Human
guggaauguccuugaucauaag

SEQ ID NO: 925727 - RNA, 22 nt, Human
aagcugugccuuugccuagaau

SEQ ID NO: 925728 - RNA, 22 nt, Human
ucccacaggagccugaguccca

SEQ ID NO: 925729 - RNA, 22 nt, Human
aacuauuuuuggagcuaacucu

SEQ ID NO: 925730 - RNA, 22 nt, Human
ucacaguuaauuguuggaaugu

SEQ ID NO: 925731 - RNA, 16 nt, Human
cagauggaucuaacuc

SEQ ID NO: 925732 - RNA, 23 nt, Human
aggcagcagguuguccaggguga

SEQ ID NO: 925733 - RNA, 18 nt, Human
gccugagggucaagugug

SEQ ID NO: 925734 - RNA, 22 nt, Human
guguccuggagcccccaguuca

SEQ ID NO: 925735 - RNA, 22 nt, Human
uucacucuucggcaucucugua

SEQ ID NO: 925736 - RNA, 22 nt, Human
acauuuaacccucagguuucug

SEQ ID NO: 925737 - RNA, 22 nt, Human
aagcucaugggugcuguacuuu

SEQ ID NO: 925738 - RNA, 22 nt, Human
uucuaaugaaaguggaccaugg

SEQ ID NO: 925739 - RNA, 22 nt, Human
gagaaauagauucaugguagau

SEQ ID NO: 925740 - RNA, 22 nt, Human
ggcagcucgaugacuucugcau

SEQ ID NO: 925741 - RNA, 22 nt, Human
uaacaguguguccagucaguuu

SEQ ID NO: 925742 - RNA, 22 nt, Human
uguauauacacacucccauguu

SEQ ID NO: 925743 - RNA, 22 nt, Human
cauaguuauaaggcaacacugu

SEQ ID NO: 925744 - RNA, 22 nt, Human
ccagaauccaaaacguuuugag

SEQ ID NO: 925745 - RNA, 17 nt, Human
aguuuauuuagccuucu

SEQ ID NO: 925746 - RNA, 22 nt, Human
gccugcuggauguggccaggcc

SEQ ID NO: 925747 - RNA, 22 nt, Human
ugcacuuuaaaaaauggugaug

SEQ ID NO: 925748 - RNA, 22 nt, Human
cccauuuagauaacaguucaaa

SEQ ID NO: 925749 - RNA, 22 nt, Human
uggagucagaaugcgacaggcc

SEQ ID NO: 925750 - RNA, 22 nt, Human
aggcccaguagucgacggcgcu

SEQ ID NO: 925751 - RNA, 22 nt, Human
gcaaggagccuggaggugagug

SEQ ID NO: 925752 - RNA, 22 nt, Human
aaugaaaugaagauaugaucag

SEQ ID NO: 925753 - RNA, 22 nt, Human
uacagcaauaaugacaccgcuc

SEQ ID NO: 925754 - RNA, 22 nt, Human
ucugggccugauggcuaaagcc

SEQ ID NO: 925755 - RNA, 22 nt, Human
aggcugaaaacgagauggcaau

SEQ ID NO: 925756 - RNA, 22 nt, Human
uucuuuccaaccagauauuggu

SEQ ID NO: 925757 - RNA, 22 nt, Human
gaaggcuggaaggcaaguagga

SEQ ID NO: 925758 - RNA, 22 nt, Human
cccauggggacaccaugaagga

SEQ ID NO: 925759 - RNA, 22 nt, Human
gcccuggagcuagacuaggaca

SEQ ID NO: 925760 - RNA, 22 nt, Human
uggacucuaagcagaggaucua

SEQ ID NO: 925761 - RNA, 22 nt, Human
aauguuuuaaaagagauugaga

SEQ ID NO: 925762 - RNA, 20 nt, Human
gcacuuggcugcugcuucuc

SEQ ID NO: 925763 - RNA, 22 nt, Human
cuuuagguuuugccugagaucu

SEQ ID NO: 925764 - RNA, 22 nt, Human
acuuaugaaugucauuauaaug

SEQ ID NO: 925765 - RNA, 22 nt, Human
ccagugugggcugguggaggac

SEQ ID NO: 925766 - RNA, 19 nt, Human
ugggaguggggaagguccu

SEQ ID NO: 925767 - RNA, 22 nt, Human
cuccugaggacuucuauugggu

SEQ ID NO: 925768 - RNA, 22 nt, Human
ggaggcucccacgcagcucaca

SEQ ID NO: 925769 - RNA, 20 nt, Human
uacagagagcuagcucucug

SEQ ID NO: 925770 - RNA, 22 nt, Human
ccuggaguuuuuugguugacuc

SEQ ID NO: 925771 - RNA, 22 nt, Human
ugggcagauguccucugaagug

SEQ ID NO: 925772 - RNA, 22 nt, Human
cauggcagcaauuuuccugacu

SEQ ID NO: 925773 - RNA, 22 nt, Human
uagaaaacuaauacaugcuuga

SEQ ID NO: 925774 - RNA, 21 nt, Human
ugacacccagagccuccuccc

SEQ ID NO: 925775 - RNA, 22 nt, Human
auguguauuaccucgauuguga

SEQ ID NO: 925776 - RNA, 22 nt, Human
auguuagaaucucugaaugugg

SEQ ID NO: 925777 - RNA, 22 nt, Human
auguuuuccccaaaugaucuuc

SEQ ID NO: 925778 - RNA, 19 nt, Human
ggcagagcuccugcuuucu

SEQ ID NO: 925779 - RNA, 22 nt, Human
aucaaaauggaagaauuuggcu

SEQ ID NO: 925780 - RNA, 22 nt, Human
gauuugucacgguugagagcca

SEQ ID NO: 925781 - RNA, 22 nt, Human
uguuagaauauuguaauauucg

SEQ ID NO: 925782 - RNA, 22 nt, Human
acaggcuggugguccuggccau

SEQ ID NO: 925783 - RNA, 22 nt, Human
uacuaaguagcagaacuaagaa

SEQ ID NO: 925784 - RNA, 22 nt, Human
gccaauuuccugagguaaagcu

SEQ ID NO: 925785 - RNA, 22 nt, Human
uuuaaagagaaugugaaggagu

SEQ ID NO: 925786 - RNA, 22 nt, Human
agcucuggaauaaugaugugau

SEQ ID NO: 925787 - RNA, 22 nt, Human
guggcagcaaaauccugcauuc

SEQ ID NO: 925788 - RNA, 22 nt, Human
guuuccugacuguggaauuaua

SEQ ID NO: 925789 - RNA, 22 nt, Human
uacagaaauugccaccagcucu

SEQ ID NO: 925790 - RNA, 22 nt, Human
uuugagcuuguagcauugcuau

SEQ ID NO: 925791 - RNA, 22 nt, Human
acagagccuccaggagugcugg

SEQ ID NO: 925792 - RNA, 22 nt, Human
aacacuuuuuauauauuguauc

SEQ ID NO: 925793 - RNA, 22 nt, Human
cugccuguggacacccuggagg

SEQ ID NO: 925794 - RNA, 22 nt, Human
agaguuucuugugagcacugac

SEQ ID NO: 925795 - RNA, 22 nt, Human
uuuacugaauuugguauauucc

SEQ ID NO: 925796 - RNA, 22 nt, Human
caggaggaggguacaccaucag

SEQ ID NO: 925797 - RNA, 22 nt, Human
gcuucagauuccucuucuguaa

SEQ ID NO: 925798 - RNA, 22 nt, Human
gccuggagcucggcugagggcg

SEQ ID NO: 925799 - RNA, 22 nt, Human
ccucagagacaguaacuggaau

SEQ ID NO: 925800 - RNA, 20 nt, Human
gcaggcccucucucuagucu

SEQ ID NO: 925801 - RNA, 22 nt, Human
agcauuuaucuuuuguuugagu

SEQ ID NO: 925802 - RNA, 22 nt, Human
gggcagccugcuuucugaucca

SEQ ID NO: 925803 - RNA, 22 nt, Human
agguuaucaucaguugagcacu

SEQ ID NO: 925804 - RNA, 22 nt, Human
acuguuauguuauuacccaugu

SEQ ID NO: 925805 - RNA, 22 nt, Human
augcuauguaacuggcagauag

SEQ ID NO: 925806 - RNA, 22 nt, Human
ucuggagaaucugucagugugg

SEQ ID NO: 925807 - RNA, 22 nt, Human
cagcagcuacuuggagcagcag

SEQ ID NO: 925808 - RNA, 22 nt, Human
agcucugaugacuuuacaacuu

SEQ ID NO: 925809 - RNA, 22 nt, Human
cugauggagagugugauuuggg

SEQ ID NO: 925810 - RNA, 22 nt, Human
uaaacucucaacagagaaccac

SEQ ID NO: 925811 - RNA, 19 nt, Human
cagagccuucagugacucc

SEQ ID NO: 925812 - RNA, 22 nt, Human
caugcagugacucagacacagg

SEQ ID NO: 925813 - RNA, 20 nt, Human
aggcugagggugauuguguc

SEQ ID NO: 925814 - RNA, 22 nt, Human
gagcagcaggccagguugcagg

SEQ ID NO: 925815 - RNA, 23 nt, Human
cugcagccgcguggggacgugga

SEQ ID NO: 925816 - RNA, 22 nt, Human
cuuggacuuuagucucucucca

SEQ ID NO: 925817 - RNA, 19 nt, Human
ugccauuugacugaaugua

SEQ ID NO: 925818 - RNA, 22 nt, Human
agugauggggcccugcacugau

SEQ ID NO: 925819 - RNA, 22 nt, Human
ucucagggcucagagcucaggc

SEQ ID NO: 925820 - RNA, 22 nt, Human
uuuauuaauuagugacccaaug

SEQ ID NO: 925821 - RNA, 22 nt, Human
uuuagcaaauuagcaccucuaa

SEQ ID NO: 925822 - RNA, 22 nt, Human
cuggccuggcaggggaccucua

SEQ ID NO: 925823 - RNA, 22 nt, Human
ucagauuuccuugcaguuugga

SEQ ID NO: 925824 - RNA, 22 nt, Human
aggcuagggccauggcugguga

SEQ ID NO: 925825 - RNA, 22 nt, Human
aauaccuuuucagugcacaaaa

SEQ ID NO: 925826 - RNA, 20 nt, Human
acaugaacagggcuacagca

SEQ ID NO: 925827 - RNA, 22 nt, Human
acauuacagcaaguuuacguua

SEQ ID NO: 925828 - RNA, 22 nt, Human
ccugaguggugcuaagcagaua

SEQ ID NO: 925829 - RNA, 22 nt, Human
ucucucuauuuauuugucuugu

SEQ ID NO: 925830 - RNA, 19 nt, Human
uucuuugaguucuucugag

SEQ ID NO: 925831 - RNA, 22 nt, Human
ggagaugggggauuuuacagcg

SEQ ID NO: 925832 - RNA, 22 nt, Human
uggggacagggcucagcaauuu

SEQ ID NO: 925833 - RNA, 22 nt, Human
agaaaacacugcccccucucuc

SEQ ID NO: 925834 - RNA, 22 nt, Human
aucauuaaauauaagcuucaca

SEQ ID NO: 925835 - RNA, 22 nt, Human
ucugggcuuuacacugugcuua

SEQ ID NO: 925836 - RNA, 22 nt, Human
uacaggcaugaaugaaaucugu

SEQ ID NO: 925837 - RNA, 22 nt, Human
ugacuuccugcacucaggugau

SEQ ID NO: 925838 - RNA, 22 nt, Human
uggcccugcccucuucaucuuu

SEQ ID NO: 925839 - RNA, 22 nt, Human
ucaguccauaggugggccugag

SEQ ID NO: 925840 - RNA, 22 nt, Human
auugaaaaauucacaauucugg

SEQ ID NO: 925841 - RNA, 22 nt, Human
ugagaaggccugugugacaggg

SEQ ID NO: 925842 - RNA, 19 nt, Human
guguacacuuggccauggu

SEQ ID NO: 925843 - RNA, 22 nt, Human
acaaauaugguacucggagaaa

SEQ ID NO: 925844 - RNA, 22 nt, Human
ucuuggauuuuaauggaucaaa

SEQ ID NO: 925845 - RNA, 22 nt, Human
gaauacauggcagggagucauc

SEQ ID NO: 925846 - RNA, 22 nt, Human
ggugugccuggggcuuagcugc

SEQ ID NO: 925847 - RNA, 22 nt, Human
uucacaauaauguccauccucu

SEQ ID NO: 925848 - RNA, 22 nt, Human
aagacauaaaacagucagcgaa

SEQ ID NO: 925849 - RNA, 22 nt, Human
gugccuccaggcucgacuaguc

SEQ ID NO: 925850 - RNA, 22 nt, Human
ugagcaccuggaccagauucug

SEQ ID NO: 925851 - RNA, 22 nt, Human
gcagugcugaucccauggcaga

SEQ ID NO: 925852 - RNA, 22 nt, Human
uccuggcucuaaguccugagug

SEQ ID NO: 925853 - RNA, 22 nt, Human
caaauacuuuauauacuucaaa

SEQ ID NO: 925854 - RNA, 22 nt, Human
ucagaaaagagaaaaucuuaua

SEQ ID NO: 925855 - RNA, 22 nt, Human
auccuguuuuagauaagcuuau

SEQ ID NO: 925856 - RNA, 22 nt, Human
ggggcaggagcccuucuucagc

SEQ ID NO: 925857 - RNA, 23 nt, Human
aagcuggcugggagcagaaggga

SEQ ID NO: 925858 - RNA, 22 nt, Human
aaagccagagcaagcugucaca

SEQ ID NO: 925859 - RNA, 19 nt, Human
ccugggaggcggagguugc

SEQ ID NO: 925860 - RNA, 22 nt, Human
ccucuggcuguaccacuggcac

SEQ ID NO: 925861 - RNA, 22 nt, Human
ugggcacuauggcucugugcac

SEQ ID NO: 925862 - RNA, 22 nt, Human
uggcuccaucauccaugcaaga

SEQ ID NO: 925863 - RNA, 22 nt, Human
ccugugaggucuugcaugugaa

SEQ ID NO: 925864 - RNA, 22 nt, Human
cuguacaggagacgucugugca

SEQ ID NO: 925865 - RNA, 20 nt, Human
uuguuuccuggcuguucugc

SEQ ID NO: 925866 - RNA, 22 nt, Human
uaugaacaugcugugguuauaa

SEQ ID NO: 925867 - RNA, 20 nt, Human
gccacugggcaccagcaggg

SEQ ID NO: 925868 - RNA, 22 nt, Human
aggcacugggggaugagcaagg

SEQ ID NO: 925869 - RNA, 22 nt, Human
gcucccagggacacuggccacu

SEQ ID NO: 925870 - RNA, 22 nt, Human
acaugcaaaugugcaugcaugu

SEQ ID NO: 925871 - RNA, 22 nt, Human
cgaggcaggcaggcggaggaua

SEQ ID NO: 925872 - RNA, 17 nt, Human
uaguaaaugaguagagc

SEQ ID NO: 925873 - RNA, 22 nt, Human
ucucugcaacuacaucuuaggg

SEQ ID NO: 925874 - RNA, 22 nt, Human
cuggcugaagcugggcucuccu

SEQ ID NO: 925875 - RNA, 22 nt, Human
ccauuucauugccuguaaagug

SEQ ID NO: 925876 - RNA, 22 nt, Human
auuucacaggccaguggugggg

SEQ ID NO: 925877 - RNA, 22 nt, Human
aacacuaaugggagaacaaccc

SEQ ID NO: 925878 - RNA, 22 nt, Human
gaggcucagggaguauaugaau

SEQ ID NO: 925879 - RNA, 22 nt, Human
ccaggcugcagucaaggggcau

SEQ ID NO: 925880 - RNA, 22 nt, Human
uuaggauuugaaaaggggcaga

SEQ ID NO: 925881 - RNA, 19 nt, Human
uucauaaguuuagugaggg

SEQ ID NO: 925882 - RNA, 22 nt, Human
agugcauacccuucuaaaaagu

SEQ ID NO: 925883 - RNA, 22 nt, Human
aaagguaaaguaucugcccaag

SEQ ID NO: 925884 - RNA, 22 nt, Human
aaacuagaugaaacgaguaaag

SEQ ID NO: 925885 - RNA, 22 nt, Human
uccucacagggcaggaaggagg

SEQ ID NO: 925886 - RNA, 22 nt, Human
ucaaaagaaacaccauguuccu

SEQ ID NO: 925887 - RNA, 16 nt, Human
cgccucccucccucgc

SEQ ID NO: 925888 - RNA, 22 nt, Human
uacuuguuaucaucuuuuccuu

SEQ ID NO: 925889 - RNA, 22 nt, Human
guucagcccacagagggggccg

SEQ ID NO: 925890 - RNA, 22 nt, Human
augcaucaccgaguugcccacc

SEQ ID NO: 925891 - RNA, 23 nt, Human
cugcaauugccugaucucauugg

SEQ ID NO: 925892 - RNA, 22 nt, Human
aaauagcuuuucauaauucuca

SEQ ID NO: 925893 - RNA, 22 nt, Human
uucuacacucacccagcuguaa

SEQ ID NO: 925894 - RNA, 22 nt, Human
aguuucuuuagauagaaaguuc

SEQ ID NO: 925895 - RNA, 21 nt, Human
uggguggaagcgggaggccgc

SEQ ID NO: 925896 - RNA, 23 nt, Human
aaaguguagccagguuaagaacc

SEQ ID NO: 925897 - RNA, 20 nt, Human
uggcuggcuuguauuuccuu

SEQ ID NO: 925898 - RNA, 22 nt, Human
uuguucuuacuuaagagugaau

SEQ ID NO: 925899 - RNA, 22 nt, Human
agccaguuuaagcaggaggggu

SEQ ID NO: 925900 - RNA, 22 nt, Human
guacaauuauuuaaauggugaa

SEQ ID NO: 925901 - RNA, 22 nt, Human
aacaguugauguagcuuuggag

SEQ ID NO: 925902 - RNA, 22 nt, Human
aguuuaugucuuuacuucagcu

SEQ ID NO: 925903 - RNA, 22 nt, Human
ggucacaaggcagauaauaagg

SEQ ID NO: 925904 - RNA, 22 nt, Human
agccccacguugucuagcaccu

SEQ ID NO: 925905 - RNA, 22 nt, Human
guuuuccugaaacugauggugu

SEQ ID NO: 925906 - RNA, 22 nt, Human
aaacaguggccaauucuggaga

SEQ ID NO: 925907 - RNA, 22 nt, Human
agccacagugggcuaccagcuc

SEQ ID NO: 925908 - RNA, 22 nt, Human
uucugacacauuacuacaugga

SEQ ID NO: 925909 - RNA, 22 nt, Human
gcagcagaaggccaaggggagc

SEQ ID NO: 925910 - RNA, 22 nt, Human
guacauaaaauacugccaugua

SEQ ID NO: 925911 - RNA, 22 nt, Human
gaggcugagaguuuguucuacu

SEQ ID NO: 925912 - RNA, 22 nt, Human
aagccuugccuauuugaugaca

SEQ ID NO: 925913 - RNA, 22 nt, Human
acaaaaagcuccauuacugucc

SEQ ID NO: 925914 - RNA, 18 nt, Human
ugcccaccagaagaggga

SEQ ID NO: 925915 - RNA, 22 nt, Human
ugaaauguaaauaggacuagaa

SEQ ID NO: 925916 - RNA, 22 nt, Human
acagaggcugcgcuugggaacg

SEQ ID NO: 925917 - RNA, 22 nt, Human
ugaacagugugagggugugacc

SEQ ID NO: 925918 - RNA, 22 nt, Human
ucuggagggggaugccucaucc

SEQ ID NO: 925919 - RNA, 22 nt, Human
aggauaaguuugauucuugcca

SEQ ID NO: 925920 - RNA, 22 nt, Human
cugaucuguccuccucagagcc

SEQ ID NO: 925921 - RNA, 22 nt, Human
acugggcaauaaauucagagaa

SEQ ID NO: 925922 - RNA, 22 nt, Human
uggcucugagucugcccuuggc

SEQ ID NO: 925923 - RNA, 22 nt, Human
ugugugucacugaaagaaaucu

SEQ ID NO: 925924 - RNA, 22 nt, Human
augaaacagaguacuuaauaua

SEQ ID NO: 925925 - RNA, 22 nt, Human
ugaaguuuuacuaggugaauuu

SEQ ID NO: 925926 - RNA, 22 nt, Human
uugauguagguuuaucuauugu

SEQ ID NO: 925927 - RNA, 22 nt, Human
gcugggagacagacuuggaacc

SEQ ID NO: 925928 - RNA, 22 nt, Human
ccucauuaacacaaugucauuu

SEQ ID NO: 925929 - RNA, 21 nt, Human
cagugcucaggaauagagaga

SEQ ID NO: 925930 - RNA, 22 nt, Human
agcagggcuguguagguaauga

SEQ ID NO: 925931 - RNA, 17 nt, Human
uuccaguuuaguauugu

SEQ ID NO: 925932 - RNA, 22 nt, Human
guccuuggcagcaguccacccc

SEQ ID NO: 925933 - RNA, 22 nt, Human
gccagaggcccaaggacagcug

SEQ ID NO: 925934 - RNA, 22 nt, Human
agcuccagcggauggucuuaua

SEQ ID NO: 925935 - RNA, 22 nt, Human
gaucugguacaggccugcagcc

SEQ ID NO: 925936 - RNA, 22 nt, Human
ugagcugguucuugaggcauga

SEQ ID NO: 925937 - RNA, 19 nt, Human
guguccauggagcauggag

SEQ ID NO: 925938 - RNA, 23 nt, Human
aaguucuuagguugauacuaaug

SEQ ID NO: 925939 - RNA, 22 nt, Human
cagcugcaugucuguggugguc

SEQ ID NO: 925940 - RNA, 22 nt, Human
ucaggcugguggucagauggcu

SEQ ID NO: 925941 - RNA, 22 nt, Human
gcauuuacauggagcuaucuaa

SEQ ID NO: 925942 - RNA, 22 nt, Human
ucucugacagugaaagaguuca

SEQ ID NO: 925943 - RNA, 21 nt, Human
cugcucugacagugaggccag

SEQ ID NO: 925944 - RNA, 22 nt, Human
uauuuccaggccccacucuaga

SEQ ID NO: 925945 - RNA, 22 nt, Human
uuuguucuuaguaucugugugc

SEQ ID NO: 925946 - RNA, 22 nt, Human
uccccaguaagccugcacugug

SEQ ID NO: 925947 - RNA, 20 nt, Human
gucugaggagcagugggaaa

SEQ ID NO: 925948 - RNA, 22 nt, Human
guuuuucuagaaaucuccuccu

SEQ ID NO: 925949 - RNA, 22 nt, Human
ugucugaguggugcaaggcuga

SEQ ID NO: 925950 - RNA, 22 nt, Human
ccagaggugggagugaucuggu

SEQ ID NO: 925951 - RNA, 22 nt, Human
gagcuggaggcagugcugaggu

SEQ ID NO: 925952 - RNA, 22 nt, Human
uuucuucugagaucagggagaa

SEQ ID NO: 925953 - RNA, 22 nt, Human
gccuggcuaagcagaaggaccc

SEQ ID NO: 925954 - RNA, 22 nt, Human
acaaugugcuuaugaaggcagu

SEQ ID NO: 925955 - RNA, 22 nt, Human
ugugucauauuaguauugagag

SEQ ID NO: 925956 - RNA, 22 nt, Human
ugaggcaggagaaucaccggaa

SEQ ID NO: 925957 - RNA, 22 nt, Human
ucagaaugaaauuucuuucaga

SEQ ID NO: 925958 - RNA, 22 nt, Human
cacuuuacuaucuauaaaauaa

SEQ ID NO: 925959 - RNA, 22 nt, Human
uggcucugccaccuuucccuaa

SEQ ID NO: 925960 - RNA, 22 nt, Human
uucucaggguuggccucaaauc

SEQ ID NO: 925961 - RNA, 22 nt, Human
ucuugauuugaauugcaguugu

SEQ ID NO: 925962 - RNA, 22 nt, Human
cuauuagaaagcaucuucuaua

SEQ ID NO: 925963 - RNA, 22 nt, Human
ugacagauuuugauggcuaaua

SEQ ID NO: 925964 - RNA, 22 nt, Human
uucuuuaccagugaaauguuau

SEQ ID NO: 925965 - RNA, 21 nt, Human
uuugaaagcuacaucuauagc

SEQ ID NO: 925966 - RNA, 22 nt, Human
uugaagcacaaugucuuuuauc

SEQ ID NO: 925967 - RNA, 22 nt, Human
caaauaauuacuauccucacuu

SEQ ID NO: 925968 - RNA, 22 nt, Human
auacaguagggaccaugucuga

SEQ ID NO: 925969 - RNA, 22 nt, Human
cauuucaaguaacagauugcuu

SEQ ID NO: 925970 - RNA, 22 nt, Human
ucuucaauuagauuuaccaauu

SEQ ID NO: 925971 - RNA, 22 nt, Human
ugccuccuucaggagggcccgg

SEQ ID NO: 925972 - RNA, 22 nt, Human
cucagaggaggcagggugugcc

SEQ ID NO: 925973 - RNA, 19 nt, Human
ucuggcuccgccucuuagu

SEQ ID NO: 925974 - RNA, 22 nt, Human
gccaggaaagcaaaaucaccca

SEQ ID NO: 925975 - RNA, 23 nt, Human
uagggcagcugggagggacaugc

SEQ ID NO: 925976 - RNA, 22 nt, Human
cugugucuucacauuugugugc

SEQ ID NO: 925977 - RNA, 22 nt, Human
ggccugugggaggacagcuggg

SEQ ID NO: 925978 - RNA, 22 nt, Human
ucaguaguuuugaucugagcag

SEQ ID NO: 925979 - RNA, 22 nt, Human
aagaaacaaccacugcucuccu

SEQ ID NO: 925980 - RNA, 22 nt, Human
gagcagcuugcgcugucuucac

SEQ ID NO: 925981 - RNA, 22 nt, Human
ugaauggugauuggugcuucuc

SEQ ID NO: 925982 - RNA, 22 nt, Human
uagaaacagaaaacuguaauag

SEQ ID NO: 925983 - RNA, 22 nt, Human
aaaccacuuauaucgugauuug

SEQ ID NO: 925984 - RNA, 22 nt, Human
cuuugaaagcucccaggacuua

SEQ ID NO: 925985 - RNA, 22 nt, Human
cagagcuggcucugcauguaca

SEQ ID NO: 925986 - RNA, 22 nt, Human
ggaccaggccagccucccugcg

SEQ ID NO: 925987 - RNA, 22 nt, Human
uccagggcaugcucagacucag

SEQ ID NO: 925988 - RNA, 22 nt, Human
ugcuccagggccuccagugggg

SEQ ID NO: 925989 - RNA, 22 nt, Human
agacagacguagugugagagua

SEQ ID NO: 925990 - RNA, 22 nt, Human
aaguacuucuagauggauaauc

SEQ ID NO: 925991 - RNA, 22 nt, Human
uguguucuaugguucagggugg

SEQ ID NO: 925992 - RNA, 22 nt, Human
uauacacaaggugugcauuugu

SEQ ID NO: 925993 - RNA, 22 nt, Human
acaguuaacuggagagcgaguu

SEQ ID NO: 925994 - RNA, 22 nt, Human
guuucauuaccugacccaugag

SEQ ID NO: 925995 - RNA, 22 nt, Human
cucugggucucccugaggcuaa

SEQ ID NO: 925996 - RNA, 22 nt, Human
uaugaagucucugauguugagu

SEQ ID NO: 925997 - RNA, 22 nt, Human
ugggcacagggguaggaaugag

SEQ ID NO: 925998 - RNA, 22 nt, Human
uuauuguggacuacuguucugg

SEQ ID NO: 925999 - RNA, 22 nt, Human
ugccaaguagccugcagugacu

SEQ ID NO: 926000 - RNA, 22 nt, Human
acaaagcuagagaagagaauug

SEQ ID NO: 926001 - RNA, 22 nt, Human
ccugaggaugccagcaugggug

SEQ ID NO: 926002 - RNA, 22 nt, Human
agacugaauaacaagcaaauaa

SEQ ID NO: 926003 - RNA, 22 nt, Human
uuccagaggcucuaggggagaa

SEQ ID NO: 926004 - RNA, 22 nt, Human
uucaucaggcaucaugcucaag

SEQ ID NO: 926005 - RNA, 22 nt, Human
agauggcugauggcaggagcca

SEQ ID NO: 926006 - RNA, 22 nt, Human
cugugugcucggauggacucgu

SEQ ID NO: 926007 - RNA, 22 nt, Human
aacagcaucaccccauaacauu

SEQ ID NO: 926008 - RNA, 22 nt, Human
uguaggaguccaaucaggagac

SEQ ID NO: 926009 - RNA, 22 nt, Human
ggcagggcccugauuccugggg

SEQ ID NO: 926010 - RNA, 22 nt, Human
gcugacucagaugcagcuggau

SEQ ID NO: 926011 - RNA, 21 nt, Human
ucuauguacgcaucuaugccu

SEQ ID NO: 926012 - RNA, 18 nt, Human
cucuuucuuuggcacaaa

SEQ ID NO: 926013 - RNA, 22 nt, Human
gaguuuaugucuuucauuguuc

SEQ ID NO: 926014 - RNA, 22 nt, Human
ugggccugauuuaucaucuuca

SEQ ID NO: 926015 - RNA, 22 nt, Human
uuucacaacugcuuauuugaga

SEQ ID NO: 926016 - RNA, 22 nt, Human
cugccagguuggcgcucgcucu

SEQ ID NO: 926017 - RNA, 22 nt, Human
aagcagagaaaagcuuagguuc

SEQ ID NO: 926018 - RNA, 20 nt, Human
auauugcaaggaagcuggau

SEQ ID NO: 926019 - RNA, 22 nt, Human
aauaguauuuauuuggaaaaag

SEQ ID NO: 926020 - RNA, 22 nt, Human
gaacaucagucauaauuuaacg

SEQ ID NO: 926021 - RNA, 22 nt, Human
ggcugugcgucauccggcugca

SEQ ID NO: 926022 - RNA, 17 nt, Human
gcacucccccaccuccu

SEQ ID NO: 926023 - RNA, 22 nt, Human
aacacaguuucucuaugagagu

SEQ ID NO: 926024 - RNA, 22 nt, Human
acuuagcacgaacauuuacuuu

SEQ ID NO: 926025 - RNA, 22 nt, Human
gacaauugcuuuugccgaauaa

SEQ ID NO: 926026 - RNA, 22 nt, Human
uuccuucucuguggggaaggca

SEQ ID NO: 926027 - RNA, 22 nt, Human
gcugccugggcuggcauuccca

SEQ ID NO: 926028 - RNA, 22 nt, Human
gaggggccuggcgaggacaugu

SEQ ID NO: 926029 - RNA, 22 nt, Human
acacugucucauaugaggggac

SEQ ID NO: 926030 - RNA, 22 nt, Human
agagaucaaagcuugccaagua

SEQ ID NO: 926031 - RNA, 22 nt, Human
agggcuugcugauuuaaagagc

SEQ ID NO: 926032 - RNA, 22 nt, Human
ggcucauguuucagaaagugga

SEQ ID NO: 926033 - RNA, 22 nt, Human
aaugucauuuuuaaaugugaga

SEQ ID NO: 926034 - RNA, 22 nt, Human
acagacauuuaauaaaugcuga

SEQ ID NO: 926035 - RNA, 22 nt, Human
gugcugaagaagucuguucgcc

SEQ ID NO: 926036 - RNA, 20 nt, Human
cuccaguguucaggggagug

SEQ ID NO: 926037 - RNA, 22 nt, Human
agguuauuguagauuauaggca

SEQ ID NO: 926038 - RNA, 22 nt, Human
caccacuggaggucuuggcuuu

SEQ ID NO: 926039 - RNA, 22 nt, Human
uauaugaugccaaauaaccugu

SEQ ID NO: 926040 - RNA, 22 nt, Human
ugucagugauuuguagggaauu

SEQ ID NO: 926041 - RNA, 21 nt, Human
aggagcauuguugugguggag

SEQ ID NO: 926042 - RNA, 22 nt, Human
aggcgcugcaugugaaggaguu

SEQ ID NO: 926043 - RNA, 22 nt, Human
agacuuuaaugugcaaaugaaa

SEQ ID NO: 926044 - RNA, 22 nt, Human
ucuggagcgaggucccugucug

SEQ ID NO: 926045 - RNA, 22 nt, Human
guggaggagaggcgccuugcgg

SEQ ID NO: 926046 - RNA, 22 nt, Human
ucacauuuuuuacuggacuuaa

SEQ ID NO: 926047 - RNA, 22 nt, Human
ggcccagccggcgagucucgcg

SEQ ID NO: 926048 - RNA, 22 nt, Human
cagaggaguucaguacacagcc

SEQ ID NO: 926049 - RNA, 19 nt, Human
uugugugucagucagaguu

SEQ ID NO: 926050 - RNA, 22 nt, Human
caagauuuagcucccuuaucuc

SEQ ID NO: 926051 - RNA, 18 nt, Human
acccaguuugaaggaaag

SEQ ID NO: 926052 - RNA, 22 nt, Human
aggcagcaaagaaaugaugcug

SEQ ID NO: 926053 - RNA, 22 nt, Human
aaugugauuuucucacucccuu

SEQ ID NO: 926054 - RNA, 22 nt, Human
aaugugaucgcuuuagaagcuu

SEQ ID NO: 926055 - RNA, 22 nt, Human
uuccuuggguucugauguguuu

SEQ ID NO: 926056 - RNA, 22 nt, Human
cuggccagacuacacaugugug

SEQ ID NO: 926057 - RNA, 22 nt, Human
gcccaggaaguugaggcugccg

SEQ ID NO: 926058 - RNA, 22 nt, Human
uucagcaaauggcuugagauaa

SEQ ID NO: 926059 - RNA, 22 nt, Human
ugggccugauucuugaauccug

SEQ ID NO: 926060 - RNA, 22 nt, Human
aucucaggagguuccucugucc

SEQ ID NO: 926061 - RNA, 22 nt, Human
cucuggaguuagugaucugggc

SEQ ID NO: 926062 - RNA, 22 nt, Human
agcaagcuaacauaggagauug

SEQ ID NO: 926063 - RNA, 22 nt, Human
uuucauagccuucuaaugaguu

SEQ ID NO: 926064 - RNA, 22 nt, Human
ugagccagccucagaagucacg

SEQ ID NO: 926065 - RNA, 22 nt, Human
aaacauuguacauucuguagcu

SEQ ID NO: 926066 - RNA, 22 nt, Human
agcugcagagaaaagaggcugg

SEQ ID NO: 926067 - RNA, 22 nt, Human
ccauuaaaauggaauguaguga

SEQ ID NO: 926068 - RNA, 22 nt, Human
gaacaguagaugagaugcuaga

SEQ ID NO: 926069 - RNA, 22 nt, Human
guucagcacaggugcucagaca

SEQ ID NO: 926070 - RNA, 22 nt, Human
aggccaaguagccgcuguccua

SEQ ID NO: 926071 - RNA, 22 nt, Human
gggaauuauagcugucacaggc

SEQ ID NO: 926072 - RNA, 22 nt, Human
ucucuacagacacuguugacuu

SEQ ID NO: 926073 - RNA, 22 nt, Human
ucugagacuucugaagcuagaa

SEQ ID NO: 926074 - RNA, 23 nt, Human
agagggagauguuuuucucaaga

SEQ ID NO: 926075 - RNA, 21 nt, Human
ccuggcagaagccugauaugc

SEQ ID NO: 926076 - RNA, 22 nt, Human
aagcagggagaaauuuuucuuc

SEQ ID NO: 926077 - RNA, 22 nt, Human
aggggcgaggggagccgugcca

SEQ ID NO: 926078 - RNA, 23 nt, Human
aaagacugaggaaagucucuguc

SEQ ID NO: 926079 - RNA, 22 nt, Human
guaaacaucagccacucuauuu

SEQ ID NO: 926080 - RNA, 19 nt, Human
acaauguuguuggacacuc

SEQ ID NO: 926081 - RNA, 22 nt, Human
gcugcucuuuucagagaugaga

SEQ ID NO: 926082 - RNA, 22 nt, Human
auuguaaaaguauucuaagauu

SEQ ID NO: 926083 - RNA, 23 nt, Human
gccagaggaacgcagagcuuucu

SEQ ID NO: 926084 - RNA, 22 nt, Human
ucaggaguugaaggggauccug

SEQ ID NO: 926085 - RNA, 22 nt, Human
aagaacaugguaggauaacaaa

SEQ ID NO: 926086 - RNA, 22 nt, Human
gaacacaagcguaugucuuugu

SEQ ID NO: 926087 - RNA, 22 nt, Human
gcacacauauauaugagcaugu

SEQ ID NO: 926088 - RNA, 22 nt, Human
cagagccacugcauuuuacagc

SEQ ID NO: 926089 - RNA, 21 nt, Human
acauguaagagaguuucaaga

SEQ ID NO: 926090 - RNA, 22 nt, Human
gcagaggugagaagggccuccc

SEQ ID NO: 926091 - RNA, 22 nt, Human
auugagaaaauaaguauggaua

SEQ ID NO: 926092 - RNA, 22 nt, Human
uggaaacugggaguuaaaugua

SEQ ID NO: 926093 - RNA, 22 nt, Human
cauggcaggugcagauucugug

SEQ ID NO: 926094 - RNA, 23 nt, Human
uucugucuugcugucagcuuucu

SEQ ID NO: 926095 - RNA, 22 nt, Human
gaaugcugagucuuaucucuua

SEQ ID NO: 926096 - RNA, 22 nt, Human
cuguggcauugccgaggcuggc

SEQ ID NO: 926097 - RNA, 22 nt, Human
agaggacagguuuuccaugggc

SEQ ID NO: 926098 - RNA, 22 nt, Human
agcuggcccucgagagccaauu

SEQ ID NO: 926099 - RNA, 22 nt, Human
uguccuagagacaucagauguu

SEQ ID NO: 926100 - RNA, 21 nt, Human
acucaaguggagaugccaggu

SEQ ID NO: 926101 - RNA, 22 nt, Human
ucagcagggcugugguguggcu

SEQ ID NO: 926102 - RNA, 22 nt, Human
uuacacuuguaauuauauaacg

SEQ ID NO: 926103 - RNA, 22 nt, Human
auauguauguacgcacauauuc

SEQ ID NO: 926104 - RNA, 20 nt, Human
aaccaacagaaucaugucuc

SEQ ID NO: 926105 - RNA, 22 nt, Human
uuucucuguucucuaacuguaa

SEQ ID NO: 926106 - RNA, 22 nt, Human
auugauaaauugcaauggggcu

SEQ ID NO: 926107 - RNA, 22 nt, Human
ucauugccauggcauuugcaga

SEQ ID NO: 926108 - RNA, 22 nt, Human
uauguagucaaguggauauaug

SEQ ID NO: 926109 - RNA, 22 nt, Human
ugagagaggggacugccugcuu

SEQ ID NO: 926110 - RNA, 22 nt, Human
gggcuggaggccugccugguua

SEQ ID NO: 926111 - RNA, 22 nt, Human
ucagggcaggacaguguaggcc

SEQ ID NO: 926112 - RNA, 22 nt, Human
ugaacuuuguaguaauggagau

SEQ ID NO: 926113 - RNA, 22 nt, Human
gcugcugguccucagagcucau

SEQ ID NO: 926114 - RNA, 22 nt, Human
auugagaaugcaaucuacuaug

SEQ ID NO: 926115 - RNA, 22 nt, Human
ccuuuguaagaugugaagacug

SEQ ID NO: 926116 - RNA, 22 nt, Human
gaaauguuaugagauauguacu

SEQ ID NO: 926117 - RNA, 22 nt, Human
ucacuuugaauuccuugauuuu

SEQ ID NO: 926118 - RNA, 22 nt, Human
cuuuacagaaagagaacucugg

SEQ ID NO: 926119 - RNA, 20 nt, Human
cucuugggcccaaagggccu

SEQ ID NO: 926120 - RNA, 22 nt, Human
uauucacauucucaggccuggu

SEQ ID NO: 926121 - RNA, 22 nt, Human
uucuuacauauuuucauauggu

SEQ ID NO: 926122 - RNA, 22 nt, Human
gcaggccuuuaucccugccuca

SEQ ID NO: 926123 - RNA, 22 nt, Human
ugcugggauauagcuucuaggg

SEQ ID NO: 926124 - RNA, 22 nt, Human
ugcugucuucucugaggucccu

SEQ ID NO: 926125 - RNA, 22 nt, Human
uuauuuugagagaaugugugcu

SEQ ID NO: 926126 - RNA, 22 nt, Human
aggcugugaguuuugucucaga

SEQ ID NO: 926127 - RNA, 21 nt, Human
ccagagguucugggccucccu

SEQ ID NO: 926128 - RNA, 22 nt, Human
gacaguuuaagcaccuaauauu

SEQ ID NO: 926129 - RNA, 19 nt, Human
aucacaugucaagagcagg

SEQ ID NO: 926130 - RNA, 22 nt, Human
aucuacacuauaacagaaugcu

SEQ ID NO: 926131 - RNA, 22 nt, Human
uuaauagauaugccucuagagu

SEQ ID NO: 926132 - RNA, 22 nt, Human
cagaaaaccugacucuagaacu

SEQ ID NO: 926133 - RNA, 22 nt, Human
ggaaggggagcuaaaucuacug

SEQ ID NO: 926134 - RNA, 22 nt, Human
uuuacaacguuccuggugcuaa

SEQ ID NO: 926135 - RNA, 22 nt, Human
aggcuguguggucaugguggcu

SEQ ID NO: 926136 - RNA, 22 nt, Human
ggcugcccucggggucgcaggc

SEQ ID NO: 926137 - RNA, 22 nt, Human
cugcucuaauaucagauagacu

SEQ ID NO: 926138 - RNA, 19 nt, Human
cugccuguuauggagagaa

SEQ ID NO: 926139 - RNA, 22 nt, Human
cagcaggcucugaguggcugcc

SEQ ID NO: 926140 - RNA, 22 nt, Human
ucuauuuacagaaagcagaauu

SEQ ID NO: 926141 - RNA, 22 nt, Human
cucuguguuaaauuggguuuuu

SEQ ID NO: 926142 - RNA, 22 nt, Human
gcuggagauaguaggauccaua

SEQ ID NO: 926143 - RNA, 22 nt, Human
aggugaaguugaggaggcagaa

SEQ ID NO: 926144 - RNA, 23 nt, Human
uucuucauuuucagaguugagca

SEQ ID NO: 926145 - RNA, 22 nt, Human
cuucacauugggcuugauauga

SEQ ID NO: 926146 - RNA, 22 nt, Human
guauaucagacacucauaugua

SEQ ID NO: 926147 - RNA, 22 nt, Human
gcccugaauuccucaggcugug

SEQ ID NO: 926148 - RNA, 22 nt, Human
ucuaagccaggacugagagacg

SEQ ID NO: 926149 - RNA, 22 nt, Human
agguaucaacagcagagucuga

SEQ ID NO: 926150 - RNA, 22 nt, Human
gggcuccaaaguaagcuuuagu

SEQ ID NO: 926151 - RNA, 22 nt, Human
ugggaauguagaauguaaacca

SEQ ID NO: 926152 - RNA, 22 nt, Human
uggggcagccacauagacaaca

SEQ ID NO: 926153 - RNA, 22 nt, Human
acacagaguauuuagaaggggu

SEQ ID NO: 926154 - RNA, 22 nt, Human
uagaaaguacuaaauuuaacug

SEQ ID NO: 926155 - RNA, 22 nt, Human
ccacuggcuuuuccuaggucuc

SEQ ID NO: 926156 - RNA, 22 nt, Human
uuugauaucuugguauacagau

SEQ ID NO: 926157 - RNA, 22 nt, Human
auuucugugcaguaaaugguga

SEQ ID NO: 926158 - RNA, 22 nt, Human
agcagggaauagcggaaagaau

SEQ ID NO: 926159 - RNA, 22 nt, Human
agaggcagccguauuucaaagg

SEQ ID NO: 926160 - RNA, 22 nt, Human
aaucaaccauauauuugauggg

SEQ ID NO: 926161 - RNA, 22 nt, Human
ccagauucauagaaacucauag

SEQ ID NO: 926162 - RNA, 22 nt, Human
caaauguaaauucuuuugaagc

SEQ ID NO: 926163 - RNA, 18 nt, Human
agggagcaucugguugcc

SEQ ID NO: 926164 - RNA, 22 nt, Human
gcauguguggaggagaugugcu

SEQ ID NO: 926165 - RNA, 22 nt, Human
uagaaaauccaguguggggaga

SEQ ID NO: 926166 - RNA, 22 nt, Human
gcaccagggagggugugcuuca

SEQ ID NO: 926167 - RNA, 22 nt, Human
agggagccuuccuggcuguggu

SEQ ID NO: 926168 - RNA, 22 nt, Human
uucaacaaguauuuauugagca

SEQ ID NO: 926169 - RNA, 22 nt, Human
ugcuucuggcuuaucucgugcc

SEQ ID NO: 926170 - RNA, 21 nt, Human
ccugucuuggacugaggcacc

SEQ ID NO: 926171 - RNA, 23 nt, Human
agggaacaagcaagcugcuaguc

SEQ ID NO: 926172 - RNA, 22 nt, Human
ugucuccauagaguagcuugau

SEQ ID NO: 926173 - RNA, 22 nt, Human
cuagcacaguaugguaucagau

SEQ ID NO: 926174 - RNA, 22 nt, Human
gucucucugcuaggccuccagu

SEQ ID NO: 926175 - RNA, 22 nt, Human
agacaucaaugaucagagguag

SEQ ID NO: 926176 - RNA, 22 nt, Human
aaaaccagguagcaaaggagac

SEQ ID NO: 926177 - RNA, 22 nt, Human
ugcugugcaaaggugaugugag

SEQ ID NO: 926178 - RNA, 22 nt, Human
cuuuggaacauacugcugagcu

SEQ ID NO: 926179 - RNA, 22 nt, Human
cuugagguaugaaaccugcauu

SEQ ID NO: 926180 - RNA, 22 nt, Human
uggggucccacucagcuccccu

SEQ ID NO: 926181 - RNA, 22 nt, Human
ugucagcaggacauuaaaagcu

SEQ ID NO: 926182 - RNA, 22 nt, Human
ccagcagcuuugcauacacuaa

SEQ ID NO: 926183 - RNA, 22 nt, Human
acugggagggucuugaagaggg

SEQ ID NO: 926184 - RNA, 22 nt, Human
cauaauuugauaugcuugaugg

SEQ ID NO: 926185 - RNA, 22 nt, Human
agaugcugcuccacaggccagg

SEQ ID NO: 926186 - RNA, 22 nt, Human
aucuagaggagggcugcuggau

SEQ ID NO: 926187 - RNA, 22 nt, Human
uugaacaaucaaaagaauucau

SEQ ID NO: 926188 - RNA, 22 nt, Human
aaguucaagucuccugaguaua

SEQ ID NO: 926189 - RNA, 22 nt, Human
uggcugagcucccuguguguug

SEQ ID NO: 926190 - RNA, 22 nt, Human
uccuggcucgauugcuaccaau

SEQ ID NO: 926191 - RNA, 22 nt, Human
agggcagaccacgugcaaggau

SEQ ID NO: 926192 - RNA, 20 nt, Human
agugucugggccucaggccc

SEQ ID NO: 926193 - RNA, 22 nt, Human
acacagccaggguaguaaggcu

SEQ ID NO: 926194 - RNA, 22 nt, Human
ucagaaaagacucaggggcuga

SEQ ID NO: 926195 - RNA, 22 nt, Human
cugggacuggguccucaggaca

SEQ ID NO: 926196 - RNA, 21 nt, Human
uuagcaguuguugauuuccag

SEQ ID NO: 926197 - RNA, 22 nt, Human
auguuucaugacugagcaaaau

SEQ ID NO: 926198 - RNA, 22 nt, Human
acuuuguuuucaugaaacagcu

SEQ ID NO: 926199 - RNA, 22 nt, Human
auauugcaauagaugcaucauu

SEQ ID NO: 926200 - RNA, 22 nt, Human
guggaagcugaugggagacagg

SEQ ID NO: 926201 - RNA, 22 nt, Human
gaagagguagcauuggcaggug

SEQ ID NO: 926202 - RNA, 23 nt, Human
aaacuugcuauggcugaaaucau

SEQ ID NO: 926203 - RNA, 21 nt, Human
aagcucuucucagggucaccu

SEQ ID NO: 926204 - RNA, 22 nt, Human
auuaaauuggaucugcauaguu

SEQ ID NO: 926205 - RNA, 22 nt, Human
acucagcuugcacacaucaaug

SEQ ID NO: 926206 - RNA, 22 nt, Human
gagugugggggugcugaggaca

SEQ ID NO: 926207 - RNA, 22 nt, Human
agagcugagaauguggcuuccu

SEQ ID NO: 926208 - RNA, 22 nt, Human
ucaggagggugacaggcccugg

SEQ ID NO: 926209 - RNA, 22 nt, Human
ugcucccacacuacucggaggc

SEQ ID NO: 926210 - RNA, 22 nt, Human
uucuguggaauaugaacuagca

SEQ ID NO: 926211 - RNA, 22 nt, Human
acaaaaucaaaggagugauuca

SEQ ID NO: 926212 - RNA, 22 nt, Human
caguugccuguuuccuugugug

SEQ ID NO: 926213 - RNA, 22 nt, Human
ccaggaagcauaauguaguggg

SEQ ID NO: 926214 - RNA, 22 nt, Human
uuacaacauauuuagcuugauu

SEQ ID NO: 926215 - RNA, 22 nt, Human
gccaggcagcugggagggugcc

SEQ ID NO: 926216 - RNA, 22 nt, Human
ucuuggagacucuuguauauuu

SEQ ID NO: 926217 - RNA, 22 nt, Human
aacauguugcuuuaauaauauu

SEQ ID NO: 926218 - RNA, 22 nt, Human
aauggcugccagggcaggaggu

SEQ ID NO: 926219 - RNA, 19 nt, Human
uauguguguguauuuacau

SEQ ID NO: 926220 - RNA, 22 nt, Human
uucagcagguggugaguucugc

SEQ ID NO: 926221 - RNA, 23 nt, Human
caggagggaaugaaguuagacaa

SEQ ID NO: 926222 - RNA, 22 nt, Human
cuguaugugaaaaugucaagug

SEQ ID NO: 926223 - RNA, 22 nt, Human
acacaugaggaugaggggauca

SEQ ID NO: 926224 - RNA, 22 nt, Human
ccaggcacaggugggccucaga

SEQ ID NO: 926225 - RNA, 23 nt, Human
uagccaggcccagcauggacacc

SEQ ID NO: 926226 - RNA, 22 nt, Human
auggaaugggaagcagagccau

SEQ ID NO: 926227 - RNA, 22 nt, Human
ccugugaugguguuacacuguu

SEQ ID NO: 926228 - RNA, 22 nt, Human
gaggccaggacaugaaagcuga

SEQ ID NO: 926229 - RNA, 21 nt, Human
aggaagcugcccagauaguag

SEQ ID NO: 926230 - RNA, 22 nt, Human
gggcacuguguucagagugcag

SEQ ID NO: 926231 - RNA, 22 nt, Human
ucuguuccuggucucuggagcu

SEQ ID NO: 926232 - RNA, 22 nt, Human
ugcucucucaggccuggcccac

SEQ ID NO: 926233 - RNA, 22 nt, Human
uuuacaguaagguggaugguac

SEQ ID NO: 926234 - RNA, 22 nt, Human
gcuuuacacagaugaauauuuc

SEQ ID NO: 926235 - RNA, 20 nt, Human
gcugcucuccacggucugca

SEQ ID NO: 926236 - RNA, 22 nt, Human
ggcugggucccagcugggagga

SEQ ID NO: 926237 - RNA, 22 nt, Human
aucagugcuaagagagggccug

SEQ ID NO: 926238 - RNA, 22 nt, Human
uugcagagagguuaggaacuca

SEQ ID NO: 926239 - RNA, 22 nt, Human
agucaucugguuuugcauggca

SEQ ID NO: 926240 - RNA, 22 nt, Human
cagcugugggccugacguggca

SEQ ID NO: 926241 - RNA, 22 nt, Human
gcccacagcucguuccucuccu

SEQ ID NO: 926242 - RNA, 22 nt, Human
aaugaauggguuuaauauuuua

SEQ ID NO: 926243 - RNA, 20 nt, Human
ucucugaguuuccuaauuug

SEQ ID NO: 926244 - RNA, 23 nt, Human
aaauagagauaggccagcuuugc

SEQ ID NO: 926245 - RNA, 22 nt, Human
cugcugugacagcugccguguu

SEQ ID NO: 926246 - RNA, 22 nt, Human
gccagagcacaggcugguagua

SEQ ID NO: 926247 - RNA, 22 nt, Human
gaaucucaaauuaagaauuuua

SEQ ID NO: 926248 - RNA, 22 nt, Human
agguaggguuaauggagauaua

SEQ ID NO: 926249 - RNA, 19 nt, Human
agucugcauuucuagcaag

SEQ ID NO: 926250 - RNA, 22 nt, Human
uuccaaagucauguugcugaua

SEQ ID NO: 926251 - RNA, 22 nt, Human
ugcaguggaaucuggagagcag

SEQ ID NO: 926252 - RNA, 22 nt, Human
aggagccuccuucucaugugca

SEQ ID NO: 926253 - RNA, 22 nt, Human
cgcugcaguuuauguguuccug

SEQ ID NO: 926254 - RNA, 22 nt, Human
agcuuugucuucucacauaucc

SEQ ID NO: 926255 - RNA, 22 nt, Human
aggccaagggcaaagcggagag

SEQ ID NO: 926256 - RNA, 22 nt, Human
aguuaguauacaaaguaacagc

SEQ ID NO: 926257 - RNA, 22 nt, Human
guaguuuucugaaaauuacuuu

SEQ ID NO: 926258 - RNA, 22 nt, Human
ugacacagaaauuaagcuguca

SEQ ID NO: 926259 - RNA, 22 nt, Human
aaaaggauguuuucaugaaaca

SEQ ID NO: 926260 - RNA, 22 nt, Human
ugggaagaugaggugccauggg

SEQ ID NO: 926261 - RNA, 22 nt, Human
uacaagaaaguccaguggguuu

SEQ ID NO: 926262 - RNA, 22 nt, Human
caucagaguuaacaucaugacu

SEQ ID NO: 926263 - RNA, 18 nt, Human
cgauguguaugugauuug

SEQ ID NO: 926264 - RNA, 22 nt, Human
guauuccuucagaagacguuua

SEQ ID NO: 926265 - RNA, 22 nt, Human
uugagguaggcggacuccucca

SEQ ID NO: 926266 - RNA, 20 nt, Human
gaaauucucguauuaguuua

SEQ ID NO: 926267 - RNA, 22 nt, Human
uggagguccuggcuggguuuua

SEQ ID NO: 926268 - RNA, 22 nt, Human
uguacaaagaguauagcuuuga

SEQ ID NO: 926269 - RNA, 22 nt, Human
ugucaaagaugucuuugaaaau

SEQ ID NO: 926270 - RNA, 20 nt, Human
gcuggcagaugucuugagau

SEQ ID NO: 926271 - RNA, 22 nt, Human
ugugucucauuuccuccugcug

SEQ ID NO: 926272 - RNA, 22 nt, Human
aacaaguucuaagugucuacuu

SEQ ID NO: 926273 - RNA, 22 nt, Human
caggcaggagccagggauucca

SEQ ID NO: 926274 - RNA, 22 nt, Human
agccaaagaucagugugcaagu

SEQ ID NO: 926275 - RNA, 22 nt, Human
cugggcucagcccaugcugucc

SEQ ID NO: 926276 - RNA, 22 nt, Human
uagaaguugcucaauaaauguu

SEQ ID NO: 926277 - RNA, 22 nt, Human
uggggcaguuaauaaacauucu

SEQ ID NO: 926278 - RNA, 22 nt, Human
cccagccucugggcucacccaa

SEQ ID NO: 926279 - RNA, 22 nt, Human
ccugucugggcuugaguauuua

SEQ ID NO: 926280 - RNA, 22 nt, Human
uucuugaaucacuuuagagaua

SEQ ID NO: 926281 - RNA, 22 nt, Human
ccaggaagcugucugauaugaa

SEQ ID NO: 926282 - RNA, 22 nt, Human
aggcaaaagaaugucauaaaug

SEQ ID NO: 926283 - RNA, 22 nt, Human
uaugaaaugauggggaaaauag

SEQ ID NO: 926284 - RNA, 22 nt, Human
aaauguaagucuuuguuucuua

SEQ ID NO: 926285 - RNA, 22 nt, Human
ccaggcucugcaaaaucaggcu

SEQ ID NO: 926286 - RNA, 22 nt, Human
ugccuaagucugcagucacuug

SEQ ID NO: 926287 - RNA, 22 nt, Human
aagcagaggccacagagugggc

SEQ ID NO: 926288 - RNA, 22 nt, Human
gggcugggcaugguguucccuc

SEQ ID NO: 926289 - RNA, 20 nt, Human
ccugugugguuugcacuaca

SEQ ID NO: 926290 - RNA, 22 nt, Human
gccaggcugccuuaucucuagc

SEQ ID NO: 926291 - RNA, 22 nt, Human
agauuuuaguguagaggacuug

SEQ ID NO: 926292 - RNA, 22 nt, Human
ucuuucuucagcccuguaagau

SEQ ID NO: 926293 - RNA, 22 nt, Human
cagagcucagagcagggcacuc

SEQ ID NO: 926294 - RNA, 22 nt, Human
agcagagcaugcuaagugacuc

SEQ ID NO: 926295 - RNA, 22 nt, Human
guccagcccgggcuccgccagc

SEQ ID NO: 926296 - RNA, 21 nt, Human
auuuucauuuccaggggagga

SEQ ID NO: 926297 - RNA, 22 nt, Human
gccugcagccccucugcaguag

SEQ ID NO: 926298 - RNA, 22 nt, Human
uuucuguuguuggugucuggcu

SEQ ID NO: 926299 - RNA, 22 nt, Human
cagggcauccgugcuccaugcu

SEQ ID NO: 926300 - RNA, 22 nt, Human
agacuguaaagggccagaaagu

SEQ ID NO: 926301 - RNA, 22 nt, Human
uguggcagauacagaagaucaa

SEQ ID NO: 926302 - RNA, 22 nt, Human
gugcugaggugggugggcagcc

SEQ ID NO: 926303 - RNA, 22 nt, Human
ucugucugccuguguccccacc

SEQ ID NO: 926304 - RNA, 22 nt, Human
ugguggcaauguccuggagaag

SEQ ID NO: 926305 - RNA, 22 nt, Human
ggagaaagcuaugugggggagu

SEQ ID NO: 926306 - RNA, 21 nt, Human
uuucuccaagugacugauucc

SEQ ID NO: 926307 - RNA, 21 nt, Human
acagauuagcacaaugcaggc

SEQ ID NO: 926308 - RNA, 22 nt, Human
gguucacuccgaucucugccuc

SEQ ID NO: 926309 - RNA, 19 nt, Human
ugaguguguguuucucuaa

SEQ ID NO: 926310 - RNA, 22 nt, Human
gggagggaaggaccuuaugaau

SEQ ID NO: 926311 - RNA, 23 nt, Human
augcaagaguuucucaaacugga

SEQ ID NO: 926312 - RNA, 17 nt, Human
acacagacaggcagaca

SEQ ID NO: 926313 - RNA, 22 nt, Human
auccugucuuuguuuuaaauau

SEQ ID NO: 926314 - RNA, 22 nt, Human
ugcaaaugggugaggguuagga

SEQ ID NO: 926315 - RNA, 22 nt, Human
ugggccugacacuuacuaggga

SEQ ID NO: 926316 - RNA, 22 nt, Human
aaugugcuucuggcugugguca

SEQ ID NO: 926317 - RNA, 21 nt, Human
uaaaugugagcagggcugggc

SEQ ID NO: 926318 - RNA, 22 nt, Human
cugaggagagguggccuguguu

SEQ ID NO: 926319 - RNA, 22 nt, Human
gauucucuuggauguaggcaua

SEQ ID NO: 926320 - RNA, 22 nt, Human
aggagagaauuacuggguguca

SEQ ID NO: 926321 - RNA, 22 nt, Human
aaaggaaugagcuucuguuagg

SEQ ID NO: 926322 - RNA, 22 nt, Human
caagaaacaccaaugacugcug

SEQ ID NO: 926323 - RNA, 22 nt, Human
cucagaggggaugcuuggagaa

SEQ ID NO: 926324 - RNA, 22 nt, Human
augaagacaggucucaucacca

SEQ ID NO: 926325 - RNA, 18 nt, Human
cacaggcaggugauaggu

SEQ ID NO: 926326 - RNA, 22 nt, Human
cuaacuuuuacagucauguugc

SEQ ID NO: 926327 - RNA, 22 nt, Human
aauuaccaucgucaaaucauau

SEQ ID NO: 926328 - RNA, 22 nt, Human
ggcagcucugcuccacaugagu

SEQ ID NO: 926329 - RNA, 21 nt, Human
ucuaucaccuaaauuaaacag

SEQ ID NO: 926330 - RNA, 22 nt, Human
gacucagauuuagaggguaaga

SEQ ID NO: 926331 - RNA, 22 nt, Human
ccugaagcaaggguaggcaggu

SEQ ID NO: 926332 - RNA, 17 nt, Human
gcagacacuucuauuga

SEQ ID NO: 926333 - RNA, 22 nt, Human
ggcccagcgaggccaccuacag

SEQ ID NO: 926334 - RNA, 22 nt, Human
ggacuguagacaucagccugua

SEQ ID NO: 926335 - RNA, 22 nt, Human
gaaacaacuacuauugauuucu

SEQ ID NO: 926336 - RNA, 22 nt, Human
cugugcugcagacgcaguagcu

SEQ ID NO: 926337 - RNA, 22 nt, Human
acacuuuaguaugaagagguag

SEQ ID NO: 926338 - RNA, 22 nt, Human
cuuguauucugccuaaccuuca

SEQ ID NO: 926339 - RNA, 20 nt, Human
ucucuauucccacgaggaaa

SEQ ID NO: 926340 - RNA, 22 nt, Human
uacaaaucagaucaugaguuua

SEQ ID NO: 926341 - RNA, 22 nt, Human
aggucaagaauugaugugguuu

SEQ ID NO: 926342 - RNA, 22 nt, Human
cauuaauaaacauuucagaaga

SEQ ID NO: 926343 - RNA, 22 nt, Human
gcacacaguagggauucaauga

SEQ ID NO: 926344 - RNA, 22 nt, Human
gcagcugucgcuaggagcugug

SEQ ID NO: 926345 - RNA, 22 nt, Human
gcuuagaacauguggauugcaa

SEQ ID NO: 926346 - RNA, 22 nt, Human
gccuggcacauugcaguggauu

SEQ ID NO: 926347 - RNA, 22 nt, Human
aguucuuuguaaaaggucucua

SEQ ID NO: 926348 - RNA, 22 nt, Human
auuagccuugguaagucuuuca

SEQ ID NO: 926349 - RNA, 22 nt, Human
cugcaggguucggagaguuccc

SEQ ID NO: 926350 - RNA, 19 nt, Human
uggcucugucgaaggcaca

SEQ ID NO: 926351 - RNA, 22 nt, Human
cgucacuucuuagucuauuuuc

SEQ ID NO: 926352 - RNA, 22 nt, Human
agccaugcuccuuccccucugg

SEQ ID NO: 926353 - RNA, 22 nt, Human
acagagcauauaaagugcuuug

SEQ ID NO: 926354 - RNA, 22 nt, Human
gacuccucagucacccucagcu

SEQ ID NO: 926355 - RNA, 22 nt, Human
aggcagaggagaaugaucuucc

SEQ ID NO: 926356 - RNA, 22 nt, Human
aagcuguuagggagugguaggu

SEQ ID NO: 926357 - RNA, 22 nt, Human
aggcagugcaugcaaaggucgg

SEQ ID NO: 926358 - RNA, 22 nt, Human
uguuucuaggucaauaauuuuu

SEQ ID NO: 926359 - RNA, 22 nt, Human
ggucccaguugcccaggucagg

SEQ ID NO: 926360 - RNA, 22 nt, Human
acaugcuacagugaaggaggaa

SEQ ID NO: 926361 - RNA, 22 nt, Human
gugggccaggccggagugcaga

SEQ ID NO: 926362 - RNA, 22 nt, Human
acaacuuuagucuggagggaaa

SEQ ID NO: 926363 - RNA, 22 nt, Human
aucugagacugaguuuggauuu

SEQ ID NO: 926364 - RNA, 22 nt, Human
uuggaaggaauuaaggucauga

SEQ ID NO: 926365 - RNA, 22 nt, Human
uauauguugauacuaauucugg

SEQ ID NO: 926366 - RNA, 22 nt, Human
uuugggcauauagcuguucccu

SEQ ID NO: 926367 - RNA, 22 nt, Human
aggaagcugggguguucuucau

SEQ ID NO: 926368 - RNA, 20 nt, Human
ggagggcagcugagaguugg

SEQ ID NO: 926369 - RNA, 22 nt, Human
uggguagggccugcgccugugc

SEQ ID NO: 926370 - RNA, 22 nt, Human
gacaggcaggccagggcugugg

SEQ ID NO: 926371 - RNA, 23 nt, Human
uuggaacacaguaaaugcacaau

SEQ ID NO: 926372 - RNA, 22 nt, Human
uccugggcuuaguggcuagguc

SEQ ID NO: 926373 - RNA, 22 nt, Human
agcccugcccugccauguggca

SEQ ID NO: 926374 - RNA, 22 nt, Human
gggcacuguacacugugcaugg

SEQ ID NO: 926375 - RNA, 22 nt, Human
cugagaggaugcugcaguggag

SEQ ID NO: 926376 - RNA, 22 nt, Human
uacaaaugguugaauggaugaa

SEQ ID NO: 926377 - RNA, 22 nt, Human
agaggccaauaguagguggcau

SEQ ID NO: 926378 - RNA, 22 nt, Human
uggcuccacaggccagggugug

SEQ ID NO: 926379 - RNA, 22 nt, Human
agaaggggagaagcuaccagga

SEQ ID NO: 926380 - RNA, 22 nt, Human
aggaggucagagccccaugcug

SEQ ID NO: 926381 - RNA, 22 nt, Human
uagacagauuuaaaggaaugga

SEQ ID NO: 926382 - RNA, 22 nt, Human
caugccagggcuugcugccugg

SEQ ID NO: 926383 - RNA, 22 nt, Human
uaaagcuauugcuguuuauugu

SEQ ID NO: 926384 - RNA, 22 nt, Human
gcuggccugaccagccacaggc

SEQ ID NO: 926385 - RNA, 22 nt, Human
ggagggacccacugcggugacc

SEQ ID NO: 926386 - RNA, 22 nt, Human
cagcacagggacaauagcagau

SEQ ID NO: 926387 - RNA, 22 nt, Human
caguggguggcuaaguggcuga

SEQ ID NO: 926388 - RNA, 22 nt, Human
uuaguuuucccaucuuuauggu

SEQ ID NO: 926389 - RNA, 22 nt, Human
acccaggguagaaccucagagc

SEQ ID NO: 926390 - RNA, 22 nt, Human
cugccuguuagucuagcaguua

SEQ ID NO: 926391 - RNA, 22 nt, Human
acucaguacaucuggaguuggc

SEQ ID NO: 926392 - RNA, 22 nt, Human
agacaacaucuaguuuggugga

SEQ ID NO: 926393 - RNA, 22 nt, Human
agucuuaggcuccauuaguaga

SEQ ID NO: 926394 - RNA, 22 nt, Human
gccaggucuaagcaucagccac

SEQ ID NO: 926395 - RNA, 22 nt, Human
gaaagugcucucucuauacaca

SEQ ID NO: 926396 - RNA, 22 nt, Human
uaaagugcagauugugauucag

SEQ ID NO: 926397 - RNA, 22 nt, Human
caggguggcaggcaccauggcc

SEQ ID NO: 926398 - RNA, 22 nt, Human
caggcagagucagauuagacuu

SEQ ID NO: 926399 - RNA, 22 nt, Human
caggguagacaguaggugucug

SEQ ID NO: 926400 - RNA, 22 nt, Human
cccaguccuaaagcagacgcca

SEQ ID NO: 926401 - RNA, 22 nt, Human
ucacugaaaaccauacuucuuu

SEQ ID NO: 926402 - RNA, 22 nt, Human
uucaacaucuuggagcuggaac

SEQ ID NO: 926403 - RNA, 22 nt, Human
ccucucuguguggccucuccau

SEQ ID NO: 926404 - RNA, 22 nt, Human
uucugagggagguucucuggga

SEQ ID NO: 926405 - RNA, 20 nt, Human
agcaguguuucuugacucua

SEQ ID NO: 926406 - RNA, 22 nt, Human
uguaggaacucacagauauucu

SEQ ID NO: 926407 - RNA, 22 nt, Human
uuaacaauagaguuucuucagg

SEQ ID NO: 926408 - RNA, 21 nt, Human
uccccacauuucuaaacagac

SEQ ID NO: 926409 - RNA, 19 nt, Human
aggugcuggugaggguguu

SEQ ID NO: 926410 - RNA, 22 nt, Human
uggcaauuuucuagcagauggc

SEQ ID NO: 926411 - RNA, 20 nt, Human
caggugagcagaucugggug

SEQ ID NO: 926412 - RNA, 22 nt, Human
aaaggucuuuauuggucagcca

SEQ ID NO: 926413 - RNA, 22 nt, Human
gggcuucauucaggcagaauuu

SEQ ID NO: 926414 - RNA, 22 nt, Human
caggaagagguggggcuaaagu

SEQ ID NO: 926415 - RNA, 22 nt, Human
gcacacagacuaaccauauuuc

SEQ ID NO: 926416 - RNA, 22 nt, Human
aggaagcuuggggcagggcuac

SEQ ID NO: 926417 - RNA, 22 nt, Human
ggugccugauggugaugagguc

SEQ ID NO: 926418 - RNA, 22 nt, Human
gcugucaggccaugugggccuu

SEQ ID NO: 926419 - RNA, 22 nt, Human
ugcuaaagcaaacugugcuacu

SEQ ID NO: 926420 - RNA, 22 nt, Human
aauaccaugcagaaauaacaua

SEQ ID NO: 926421 - RNA, 22 nt, Human
ucugagagucucugaggcagau

SEQ ID NO: 926422 - RNA, 22 nt, Human
acugcucucuuugcaggggcua

SEQ ID NO: 926423 - RNA, 20 nt, Human
cacugcccuccagccugagc

SEQ ID NO: 926424 - RNA, 22 nt, Human
gauuuccaugauugggccagaa

SEQ ID NO: 926425 - RNA, 22 nt, Human
cugagcugcaguccuggcucug

SEQ ID NO: 926426 - RNA, 22 nt, Human
guguuaaaaugcuuuauaguag

SEQ ID NO: 926427 - RNA, 22 nt, Human
aagcccuggcucagcucaccag

SEQ ID NO: 926428 - RNA, 22 nt, Human
uuuaucugagcugauagauagu

SEQ ID NO: 926429 - RNA, 22 nt, Human
gccucaggccgcccugcugcuc

SEQ ID NO: 926430 - RNA, 22 nt, Human
agucuuuaaugaucauguauuu

SEQ ID NO: 926431 - RNA, 19 nt, Human
caacaguacugguuugucc

SEQ ID NO: 926432 - RNA, 22 nt, Human
gcagucaguaaggcagccagaa

SEQ ID NO: 926433 - RNA, 22 nt, Human
uagagcuggaaaacugcaggua

SEQ ID NO: 926434 - RNA, 22 nt, Human
cuggguguucaggagcugggcu

SEQ ID NO: 926435 - RNA, 22 nt, Human
cuguugaucucaguuagcuaga

SEQ ID NO: 926436 - RNA, 23 nt, Human
ccguguguauacucuguaauaga

SEQ ID NO: 926437 - RNA, 22 nt, Human
cccaggaaaguggaggcggcug

SEQ ID NO: 926438 - RNA, 22 nt, Human
agauauuaaucguacauaaggu

SEQ ID NO: 926439 - RNA, 22 nt, Human
gcagagccugugucugagcaaa

SEQ ID NO: 926440 - RNA, 22 nt, Human
agugucugaacugggugcugac

SEQ ID NO: 926441 - RNA, 22 nt, Human
agagucagucacuggcacuuug

SEQ ID NO: 926442 - RNA, 22 nt, Human
agagggcuaagguuugggagau

SEQ ID NO: 926443 - RNA, 22 nt, Human
agagcccaucaguggcagugga

SEQ ID NO: 926444 - RNA, 22 nt, Human
augaucagggcagaagcagaag

SEQ ID NO: 926445 - RNA, 22 nt, Human
cccugcagagagugcuuuugug

SEQ ID NO: 926446 - RNA, 22 nt, Human
acuccagguguguuggacucua

SEQ ID NO: 926447 - RNA, 22 nt, Human
uccuagaacuccaggacagucc

SEQ ID NO: 926448 - RNA, 22 nt, Human
aaacaucucaaagagguauuug

SEQ ID NO: 926449 - RNA, 22 nt, Human
cagcacagcacagcggugacuc

SEQ ID NO: 926450 - RNA, 21 nt, Human
acaggccuuaggggccauuca

SEQ ID NO: 926451 - RNA, 22 nt, Human
ucucagaugcccuugcaucacc

SEQ ID NO: 926452 - RNA, 22 nt, Human
agaggcucugccgccucaggua

SEQ ID NO: 926453 - RNA, 22 nt, Human
ugcuuaaaaaguaacugcugau

SEQ ID NO: 926454 - RNA, 22 nt, Human
uggucaguugcaucagagaagu

SEQ ID NO: 926455 - RNA, 22 nt, Human
ggcacugcuguaggcagugagg

SEQ ID NO: 926456 - RNA, 22 nt, Human
uagacuuuucaaaaucuagacc

SEQ ID NO: 926457 - RNA, 22 nt, Human
uuucaagucauucuauaauauc

SEQ ID NO: 926458 - RNA, 22 nt, Human
aacuuuaaggcuauaaauuaug

SEQ ID NO: 926459 - RNA, 22 nt, Human
gccuggcuugccagcccuggcg

SEQ ID NO: 926460 - RNA, 22 nt, Human
uguggcuguguccaccugcugc

SEQ ID NO: 926461 - RNA, 22 nt, Human
ugguggggcuuuccuucugcuu

SEQ ID NO: 926462 - RNA, 22 nt, Human
gcagcagggugccagcuuugca

SEQ ID NO: 926463 - RNA, 22 nt, Human
ugaaagguuaaaaguaguauug

SEQ ID NO: 926464 - RNA, 22 nt, Human
gauccagauauuugggcuggua

SEQ ID NO: 926465 - RNA, 22 nt, Human
acagcagaguaguuuuccaacu

SEQ ID NO: 926466 - RNA, 22 nt, Human
ucugucugagugguguuagagu

SEQ ID NO: 926467 - RNA, 22 nt, Human
gcagccauugagcgaaaaaauc

SEQ ID NO: 926468 - RNA, 17 nt, Human
uccaggcagcaacugag

SEQ ID NO: 926469 - RNA, 22 nt, Human
ucuuuacaagucacauuuucug

SEQ ID NO: 926470 - RNA, 22 nt, Human
aauuauacaauugucaaguucu

SEQ ID NO: 926471 - RNA, 22 nt, Human
gucauaaagcuuguugcauuua

SEQ ID NO: 926472 - RNA, 22 nt, Human
accaggaggaaguguuaaugau

SEQ ID NO: 926473 - RNA, 22 nt, Human
agugucagcuaauuauucauga

SEQ ID NO: 926474 - RNA, 22 nt, Human
caccauuuaagaaagccaaauu

SEQ ID NO: 926475 - RNA, 22 nt, Human
cauuacaaccccaaauuacaaa

SEQ ID NO: 926476 - RNA, 22 nt, Human
aacagugaguugaugacugaau

SEQ ID NO: 926477 - RNA, 22 nt, Human
cuuugaaaacuuaaauaacagc

SEQ ID NO: 926478 - RNA, 22 nt, Human
cacaaauggccguguucaaaga

SEQ ID NO: 926479 - RNA, 22 nt, Human
uguggucccaaggcaacuggaa

SEQ ID NO: 926480 - RNA, 22 nt, Human
uucuacagguacugaaguacau

SEQ ID NO: 926481 - RNA, 22 nt, Human
cugggugacagagugagauggu

SEQ ID NO: 926482 - RNA, 23 nt, Human
gccauggcugccccacaggccuc

SEQ ID NO: 926483 - RNA, 22 nt, Human
uuuggcaaagauggcuagcugu

SEQ ID NO: 926484 - RNA, 22 nt, Human
aagcugaauuuucuaaaagaau

SEQ ID NO: 926485 - RNA, 22 nt, Human
agugcccugcuggggcaggaga

SEQ ID NO: 926486 - RNA, 22 nt, Human
acagacuggaggagaauaguuu

SEQ ID NO: 926487 - RNA, 22 nt, Human
acauuccugccauaaauuuuuu

SEQ ID NO: 926488 - RNA, 22 nt, Human
aaagaugucaguuugaaauaac

SEQ ID NO: 926489 - RNA, 22 nt, Human
cagagcugagucuucaagguug

SEQ ID NO: 926490 - RNA, 22 nt, Human
uaaggcagccucaggguagggu

SEQ ID NO: 926491 - RNA, 22 nt, Human
cagcugucuggggagugcucgc

SEQ ID NO: 926492 - RNA, 22 nt, Human
cucuagaaagauuguugaccaa

SEQ ID NO: 926493 - RNA, 22 nt, Human
agaaauacuuuguaaaucucac

SEQ ID NO: 926494 - RNA, 22 nt, Human
uagaacaaugaauuucuggagg

SEQ ID NO: 926495 - RNA, 22 nt, Human
aaccugaaaguaguaaaagcug

SEQ ID NO: 926496 - RNA, 22 nt, Human
aggaaggagggcagauauuaag

SEQ ID NO: 926497 - RNA, 22 nt, Human
ccuggcuuuuguuuauaaauuc

SEQ ID NO: 926498 - RNA, 22 nt, Human
aaguauauacuaaauguuaauc

SEQ ID NO: 926499 - RNA, 22 nt, Human
accuucugaccaguuaucuuga

SEQ ID NO: 926500 - RNA, 22 nt, Human
gcuccucuucucccacugaaug

SEQ ID NO: 926501 - RNA, 22 nt, Human
gacuucugaauuccuaucaggu

SEQ ID NO: 926502 - RNA, 22 nt, Human
aggaaauguacaaaugaagaug

SEQ ID NO: 926503 - RNA, 22 nt, Human
ucagggcagaauccaaagaauu

SEQ ID NO: 926504 - RNA, 19 nt, Human
cugucugugcagagaugug

SEQ ID NO: 926505 - RNA, 22 nt, Human
augagacuaccuguaauguggc

SEQ ID NO: 926506 - RNA, 22 nt, Human
acuuagcaccuauggcauuuuu

SEQ ID NO: 926507 - RNA, 18 nt, Human
cugugggaagaguuuggg

SEQ ID NO: 926508 - RNA, 22 nt, Human
gcagaauguaggccuucagugu

SEQ ID NO: 926509 - RNA, 22 nt, Human
auucacaacugauccuugcuca

SEQ ID NO: 926510 - RNA, 22 nt, Human
aaaagcuuugccagaugaguug

SEQ ID NO: 926511 - RNA, 22 nt, Human
ggacaggcugcaucugagcaug

SEQ ID NO: 926512 - RNA, 22 nt, Human
gaugaggaauuugagguuagaa

SEQ ID NO: 926513 - RNA, 22 nt, Human
uaaaugcaguuaguacuugcca

SEQ ID NO: 926514 - RNA, 22 nt, Human
aaaauagcagggaugugggaaa

SEQ ID NO: 926515 - RNA, 19 nt, Human
ccccuuagggguuaagccu

SEQ ID NO: 926516 - RNA, 22 nt, Human
gggcuaagcagagugggaacag

SEQ ID NO: 926517 - RNA, 22 nt, Human
uaggucagaacaagcaguaucg

SEQ ID NO: 926518 - RNA, 22 nt, Human
ucucuuuucuuucuggauaaaa

SEQ ID NO: 926519 - RNA, 19 nt, Human
cugggccagagcuguccuc

SEQ ID NO: 926520 - RNA, 22 nt, Human
uuuuucagccaugaauuacacu

SEQ ID NO: 926521 - RNA, 22 nt, Human
gucagcaauaguuaguuuacaa

SEQ ID NO: 926522 - RNA, 19 nt, Human
aagggcugggcaccucacu

SEQ ID NO: 926523 - RNA, 22 nt, Human
uaauuuauagaauuucuuggau

SEQ ID NO: 926524 - RNA, 22 nt, Human
aaugacagcccucuagucuggg

SEQ ID NO: 926525 - RNA, 22 nt, Human
uagcacagcuucuugaugucac

SEQ ID NO: 926526 - RNA, 22 nt, Human
cucuggaguucucaugaggaac

SEQ ID NO: 926527 - RNA, 22 nt, Human
agcuccugcagacuccugcuca

SEQ ID NO: 926528 - RNA, 22 nt, Human
ccugggagagccaucuguggcc

SEQ ID NO: 926529 - RNA, 22 nt, Human
ucuaaacacgucucuuugaaua

SEQ ID NO: 926530 - RNA, 22 nt, Human
ugagcuaaguacucucaucaag

SEQ ID NO: 926531 - RNA, 22 nt, Human
gcaggauggugcccuuucugcc

SEQ ID NO: 926532 - RNA, 21 nt, Human
aggaggcugucucuuucagcu

SEQ ID NO: 926533 - RNA, 22 nt, Human
auucuuaauugccaugcuguau

SEQ ID NO: 926534 - RNA, 22 nt, Human
ccucuggguaucuguggaagua

SEQ ID NO: 926535 - RNA, 22 nt, Human
uaaggcuuucuaaauaugcaga

SEQ ID NO: 926536 - RNA, 22 nt, Human
aguuuauuucuccauuuaccua

SEQ ID NO: 926537 - RNA, 22 nt, Human
caucagcagucacaugaugcug

SEQ ID NO: 926538 - RNA, 22 nt, Human
acccaggagcaggcugggcagu

SEQ ID NO: 926539 - RNA, 22 nt, Human
caagggugaaggcuccuccagg

SEQ ID NO: 926540 - RNA, 22 nt, Human
ccagcccugccucucagggccc

SEQ ID NO: 926541 - RNA, 22 nt, Human
ugcagagggaaaaggugcuccu

SEQ ID NO: 926542 - RNA, 22 nt, Human
ucugcacauggcgcugguccug

SEQ ID NO: 926543 - RNA, 22 nt, Human
cagaaaugacaaaguaagagga

SEQ ID NO: 926544 - RNA, 22 nt, Human
gcuuggcuugggcucagaggcc

SEQ ID NO: 926545 - RNA, 22 nt, Human
cugggccaugggccagcgaggc

SEQ ID NO: 926546 - RNA, 22 nt, Human
ugaggccaggcaaaggcgaucu

SEQ ID NO: 926547 - RNA, 22 nt, Human
guacaggucuuaucuccuagga

SEQ ID NO: 926548 - RNA, 22 nt, Human
uguuaacaauaaguccaggcau

SEQ ID NO: 926549 - RNA, 22 nt, Human
cugucacagguucaaacucccc

SEQ ID NO: 926550 - RNA, 22 nt, Human
cugcaggaggauccugagagug

SEQ ID NO: 926551 - RNA, 22 nt, Human
cgcccagcugaaaucuccaggc

SEQ ID NO: 926552 - RNA, 22 nt, Human
gggaacagccucaccagcccug

SEQ ID NO: 926553 - RNA, 22 nt, Human
uagaggcagaagaaauugacaa

SEQ ID NO: 926554 - RNA, 22 nt, Human
auggcuguuccugggaguucua

SEQ ID NO: 926555 - RNA, 22 nt, Human
agggaugaucaggguagaggcu

SEQ ID NO: 926556 - RNA, 22 nt, Human
agggccugugcuuccugagaua

SEQ ID NO: 926557 - RNA, 22 nt, Human
uaagguuuaacgcccugucucg

SEQ ID NO: 926558 - RNA, 22 nt, Human
caaagaggugagaggagccuuu

SEQ ID NO: 926559 - RNA, 22 nt, Human
aguguauugucucacaguucuu

SEQ ID NO: 926560 - RNA, 22 nt, Human
agggaagguagaggucaccggc

SEQ ID NO: 926561 - RNA, 22 nt, Human
ucccaggaaaacacucgaggac

SEQ ID NO: 926562 - RNA, 23 nt, Human
ggacccuguggagggugagaguc

SEQ ID NO: 926563 - RNA, 22 nt, Human
uaaagguuauugcacuggaguu

SEQ ID NO: 926564 - RNA, 22 nt, Human
cacagcuuccauuagaaugaga

SEQ ID NO: 926565 - RNA, 22 nt, Human
ggcuucagaagacuggacaggu

SEQ ID NO: 926566 - RNA, 22 nt, Human
augcagaaagcggcaaacaggu

SEQ ID NO: 926567 - RNA, 22 nt, Human
gcucagggaaagagcuccuguc

SEQ ID NO: 926568 - RNA, 22 nt, Human
gauuucaauccagcuuucuucu

SEQ ID NO: 926569 - RNA, 22 nt, Human
ugggaagcuacucaugcaggca

SEQ ID NO: 926570 - RNA, 22 nt, Human
auaacagacugauuuuuaaaug

SEQ ID NO: 926571 - RNA, 22 nt, Human
uaucuguugucuuuuacaugua

SEQ ID NO: 926572 - RNA, 22 nt, Human
ccacuuugcaagauauucagag

SEQ ID NO: 926573 - RNA, 19 nt, Human
ugagcuggcugagccucuc

SEQ ID NO: 926574 - RNA, 22 nt, Human
cugccguguuuuucauguuaaa

SEQ ID NO: 926575 - RNA, 22 nt, Human
agggaaauuaaugugagcaaug

SEQ ID NO: 926576 - RNA, 22 nt, Human
accaugccaguggcagccagac

SEQ ID NO: 926577 - RNA, 22 nt, Human
ugcaggugagugcaggggcuca

SEQ ID NO: 926578 - RNA, 22 nt, Human
acguuugcuuucuuuggccugg

SEQ ID NO: 926579 - RNA, 22 nt, Human
uuguagcuuuuuaaugugcugc

SEQ ID NO: 926580 - RNA, 18 nt, Human
ggcuuugcugggguuucu

SEQ ID NO: 926581 - RNA, 22 nt, Human
gaacacugcuguuggguucuga

SEQ ID NO: 926582 - RNA, 22 nt, Human
cuuugcugagcugguuguucaa

SEQ ID NO: 926583 - RNA, 22 nt, Human
uacaguuuuucacugaagaugu

SEQ ID NO: 926584 - RNA, 22 nt, Human
uugaaaggugcugugugcugau

SEQ ID NO: 926585 - RNA, 22 nt, Human
uuccuugaccacugcauaauga

SEQ ID NO: 926586 - RNA, 20 nt, Human
uggcaggaggcagcagugga

SEQ ID NO: 926587 - RNA, 22 nt, Human
uaguuauauccagucuuuaaaa

SEQ ID NO: 926588 - RNA, 22 nt, Human
ugagcccaugcucuuucuacga

SEQ ID NO: 926589 - RNA, 22 nt, Human
ggagagaggagcccacugcugu

SEQ ID NO: 926590 - RNA, 22 nt, Human
uggugccauuagcccugcuguu

SEQ ID NO: 926591 - RNA, 21 nt, Human
ccuguggucuggagggagcac

SEQ ID NO: 926592 - RNA, 23 nt, Human
uggcugagguccagguaguuuca

SEQ ID NO: 926593 - RNA, 22 nt, Human
cugugcugguccagggagcugg

SEQ ID NO: 926594 - RNA, 20 nt, Human
cccuggagagaagcuccacg

SEQ ID NO: 926595 - RNA, 22 nt, Human
gaggagcuugugagaagauguc

SEQ ID NO: 926596 - RNA, 22 nt, Human
guuuaucacaauaaauaauucu

SEQ ID NO: 926597 - RNA, 22 nt, Human
ugaucuuugguaguacgauaau

SEQ ID NO: 926598 - RNA, 22 nt, Human
gaaauuuauuaucuacaucauu

SEQ ID NO: 926599 - RNA, 22 nt, Human
uuugggcauguuguggccagcu

SEQ ID NO: 926600 - RNA, 22 nt, Human
ugaguccauguggaggggaggu

SEQ ID NO: 926601 - RNA, 22 nt, Human
auugucuguacuuuaaaaaugu

SEQ ID NO: 926602 - RNA, 22 nt, Human
uaaguuuaaauguacaugaagc

SEQ ID NO: 926603 - RNA, 22 nt, Human
cuggcacacagcaggcucucag

SEQ ID NO: 926604 - RNA, 22 nt, Human
uguagauuuuggagucuacaag

SEQ ID NO: 926605 - RNA, 22 nt, Human
cagcuggucaacugaaugaaca

SEQ ID NO: 926606 - RNA, 23 nt, Human
ccagcucccaggucugaggacug

SEQ ID NO: 926607 - RNA, 22 nt, Human
aggacccagaaggugcagcaga

SEQ ID NO: 926608 - RNA, 22 nt, Human
acuggacucacguauuccugag

SEQ ID NO: 926609 - RNA, 19 nt, Human
uucuggggccuggccuugg

SEQ ID NO: 926610 - RNA, 22 nt, Human
uuucaguuguuuuagcucugug

SEQ ID NO: 926611 - RNA, 22 nt, Human
ccauuuuucacaagacucacuu

SEQ ID NO: 926612 - RNA, 22 nt, Human
ucuucaaauccuacagugucug

SEQ ID NO: 926613 - RNA, 22 nt, Human
cagguauaugugcauccauaga

SEQ ID NO: 926614 - RNA, 22 nt, Human
ucuaccagggucacagaggccc

SEQ ID NO: 926615 - RNA, 22 nt, Human
cagcuugcuaauuuugacuuca

SEQ ID NO: 926616 - RNA, 22 nt, Human
gaggagacugacagcagauucu

SEQ ID NO: 926617 - RNA, 22 nt, Human
uucauauuaugauuugaaaugc

SEQ ID NO: 926618 - RNA, 22 nt, Human
gaggccuggucuaugagauguu

SEQ ID NO: 926619 - RNA, 22 nt, Human
acauuguauaaugauuaucaca

SEQ ID NO: 926620 - RNA, 22 nt, Human
cuccucacuuuccagacugggc

SEQ ID NO: 926621 - RNA, 22 nt, Human
gcagcugcuguggcaucaagcu

SEQ ID NO: 926622 - RNA, 22 nt, Human
uggacugaugcucccuauugaa

SEQ ID NO: 926623 - RNA, 22 nt, Human
aucucauaaacacacauauaug

SEQ ID NO: 926624 - RNA, 22 nt, Human
agcaggcugaugggcaugcuug

SEQ ID NO: 926625 - RNA, 22 nt, Human
ucagcuuugccaccagcuguaa

SEQ ID NO: 926626 - RNA, 22 nt, Human
gcaguguuuguguucucacaug

SEQ ID NO: 926627 - RNA, 22 nt, Human
cugggugucaggagacaugaug

SEQ ID NO: 926628 - RNA, 22 nt, Human
gggccagcucugugauguaggg

SEQ ID NO: 926629 - RNA, 17 nt, Human
cucugcagugcauggcu

SEQ ID NO: 926630 - RNA, 22 nt, Human
ccaggugugauuuggcaguguc

SEQ ID NO: 926631 - RNA, 22 nt, Human
guggcagcucucuugauuuccc

SEQ ID NO: 926632 - RNA, 20 nt, Human
uggcaggagccacuggaagc

SEQ ID NO: 926633 - RNA, 22 nt, Human
guggcucuaggugagcauggag

SEQ ID NO: 926634 - RNA, 22 nt, Human
agggcagcauugccuuucucca

SEQ ID NO: 926635 - RNA, 22 nt, Human
gagggcucuacucaccacccug

SEQ ID NO: 926636 - RNA, 22 nt, Human
acuccagggcugaacgaggccc

SEQ ID NO: 926637 - RNA, 22 nt, Human
cccugaggauagggcaggaccc

SEQ ID NO: 926638 - RNA, 22 nt, Human
guccuuggaaagucuaaucucu

SEQ ID NO: 926639 - RNA, 22 nt, Human
ggcucuggucagugaggggccu

SEQ ID NO: 926640 - RNA, 22 nt, Human
cugcgggcugucaggcgugcca

SEQ ID NO: 926641 - RNA, 22 nt, Human
uaugucaugggucaaaaugaag

SEQ ID NO: 926642 - RNA, 22 nt, Human
agcugcaggcgccggggccgau

SEQ ID NO: 926643 - RNA, 22 nt, Human
uucaaacauucaaauaaaccgg

SEQ ID NO: 926644 - RNA, 22 nt, Human
agaagaugucacugcagacagc

SEQ ID NO: 926645 - RNA, 22 nt, Human
agauuuccugcacugccuuuga

SEQ ID NO: 926646 - RNA, 22 nt, Human
ugacagugaacagguuaccacu

SEQ ID NO: 926647 - RNA, 22 nt, Human
uggcuucaggcagaauuuagac

SEQ ID NO: 926648 - RNA, 22 nt, Human
cagucaaacuuauaggcacauu

SEQ ID NO: 926649 - RNA, 22 nt, Human
cuggcuccauccuaggcaaaug

SEQ ID NO: 926650 - RNA, 22 nt, Human
uggcugugucaucauagcugug

SEQ ID NO: 926651 - RNA, 20 nt, Human
cccugagacaaaggaggggc

SEQ ID NO: 926652 - RNA, 22 nt, Human
ucugggcaguaccccucuccua

SEQ ID NO: 926653 - RNA, 22 nt, Human
augugagggaaaucagucagaa

SEQ ID NO: 926654 - RNA, 22 nt, Human
ucuaaagauguuuauugacaua

SEQ ID NO: 926655 - RNA, 23 nt, Human
aagcaauaccaggugugggcccu

SEQ ID NO: 926656 - RNA, 22 nt, Human
auguguaaugugguauuuuaau

SEQ ID NO: 926657 - RNA, 22 nt, Human
auacagaauucacuacaguuuc

SEQ ID NO: 926658 - RNA, 19 nt, Human
aaaaacuuaguccagaaag

SEQ ID NO: 926659 - RNA, 22 nt, Human
gauuuucugagccuucaaauuu

SEQ ID NO: 926660 - RNA, 22 nt, Human
gaauuuacagggugagcuucag

SEQ ID NO: 926661 - RNA, 22 nt, Human
cuuagaaggaacaguuuagugc

SEQ ID NO: 926662 - RNA, 22 nt, Human
uacuucaauuuguauaugugaa

SEQ ID NO: 926663 - RNA, 22 nt, Human
cuccugguucagagagcugaga

SEQ ID NO: 926664 - RNA, 22 nt, Human
aaggaagaaaugaauaggugga

SEQ ID NO: 926665 - RNA, 20 nt, Human
uccugggguaagccaugguc

SEQ ID NO: 926666 - RNA, 22 nt, Human
uagauguugaagucauauuugg

SEQ ID NO: 926667 - RNA, 22 nt, Human
cuggcagagucugcugucugca

SEQ ID NO: 926668 - RNA, 22 nt, Human
auguccagaaggguccccuguu

SEQ ID NO: 926669 - RNA, 19 nt, Human
cccuggcaggcaagccugg

SEQ ID NO: 926670 - RNA, 22 nt, Human
acuuccuuuugggaaacuguuu

SEQ ID NO: 926671 - RNA, 22 nt, Human
gacauucacagguaaacauucc

SEQ ID NO: 926672 - RNA, 22 nt, Human
gugcugagcaucaugaggcacu

SEQ ID NO: 926673 - RNA, 22 nt, Human
auuugcuggugaaauagugaca

SEQ ID NO: 926674 - RNA, 22 nt, Human
ugaggcagcauucuucaagaca

SEQ ID NO: 926675 - RNA, 22 nt, Human
agagcugcaccuaugcagaccu

SEQ ID NO: 926676 - RNA, 22 nt, Human
cacagcagagggagccauugaa

SEQ ID NO: 926677 - RNA, 18 nt, Human
uuauucuuccaggccacc

SEQ ID NO: 926678 - RNA, 23 nt, Human
agacccagagacuggcucugcuc

SEQ ID NO: 926679 - RNA, 22 nt, Human
ccagggcagccaacccagaugc

SEQ ID NO: 926680 - RNA, 22 nt, Human
uuaggaagcaggccuaaaauuu

SEQ ID NO: 926681 - RNA, 21 nt, Human
ccaggcaugacugcagagagc

SEQ ID NO: 926682 - RNA, 22 nt, Human
cuagcaggcuaauguaagcuug

SEQ ID NO: 926683 - RNA, 22 nt, Human
uuugaaccugagcuucugcaug

SEQ ID NO: 926684 - RNA, 22 nt, Human
aauaagaacaacuaagguuuau

SEQ ID NO: 926685 - RNA, 22 nt, Human
uaacaauuugcuucauuuguuu

SEQ ID NO: 926686 - RNA, 22 nt, Human
uggcuuuauaaauccacugguu

SEQ ID NO: 926687 - RNA, 22 nt, Human
ucuggaguugaaguucuucccc

SEQ ID NO: 926688 - RNA, 22 nt, Human
uauuugaagggagaaagugcca

SEQ ID NO: 926689 - RNA, 22 nt, Human
acgugugugacauugggaacgu

SEQ ID NO: 926690 - RNA, 22 nt, Human
gggggugaggacaggagcacug

SEQ ID NO: 926691 - RNA, 22 nt, Human
ggccagguggcuguccuggcgu

SEQ ID NO: 926692 - RNA, 22 nt, Human
cugcucuauguccucacccagg

SEQ ID NO: 926693 - RNA, 22 nt, Human
caacaauaugcugaguuuuuca

SEQ ID NO: 926694 - RNA, 22 nt, Human
gacacaggggggcgcuagaaga

SEQ ID NO: 926695 - RNA, 22 nt, Human
auguccaggaucuauccccaga

SEQ ID NO: 926696 - RNA, 22 nt, Human
gaggcuguucaguguccagcuu

SEQ ID NO: 926697 - RNA, 23 nt, Human
ugcgugugugcugaggggcgucc

SEQ ID NO: 926698 - RNA, 22 nt, Human
uggggaugucauauaagaggaa

SEQ ID NO: 926699 - RNA, 22 nt, Human
augggcagggcaguguauaaga

SEQ ID NO: 926700 - RNA, 22 nt, Human
uggcuuuacugucauucuuaug

SEQ ID NO: 926701 - RNA, 21 nt, Human
ugucacuuuaagcuagcucua

SEQ ID NO: 926702 - RNA, 22 nt, Human
ccucuugaaccuaggcaagacu

SEQ ID NO: 926703 - RNA, 22 nt, Human
aagguauagaguuuggaaaaau

SEQ ID NO: 926704 - RNA, 22 nt, Human
agcugaggcauggacaggcugc

SEQ ID NO: 926705 - RNA, 22 nt, Human
ugugaaaucaauuagcugcaga

SEQ ID NO: 926706 - RNA, 20 nt, Human
agugcauggagggagagggc

SEQ ID NO: 926707 - RNA, 22 nt, Human
gaaagcauguagccuguaucca

SEQ ID NO: 926708 - RNA, 22 nt, Human
uagaggagggcuguucuucagu

SEQ ID NO: 926709 - RNA, 22 nt, Human
acaagauguguuuauacaagcu

SEQ ID NO: 926710 - RNA, 22 nt, Human
aagggucuuagagguucauuuu

SEQ ID NO: 926711 - RNA, 22 nt, Human
caggaggcccacaggccccugc

SEQ ID NO: 926712 - RNA, 22 nt, Human
uuucuuuuacaguguggcuauu

SEQ ID NO: 926713 - RNA, 22 nt, Human
agagccugcaguggagaccuug

SEQ ID NO: 926714 - RNA, 22 nt, Human
acagacugauucauugcucagg

SEQ ID NO: 926715 - RNA, 22 nt, Human
ggcaauguagauucuguagauu

SEQ ID NO: 926716 - RNA, 22 nt, Human
aacauugaauuuaaaauacagu

SEQ ID NO: 926717 - RNA, 22 nt, Human
uguagaaagcucuucugaaauc

SEQ ID NO: 926718 - RNA, 22 nt, Human
acuucauguuucuauuagcuca

SEQ ID NO: 926719 - RNA, 22 nt, Human
guuggcacuucauaauaugaaa

SEQ ID NO: 926720 - RNA, 22 nt, Human
gaggagaagcuaagaaacacag

SEQ ID NO: 926721 - RNA, 22 nt, Human
agcucuuuggaaggugugcacu

SEQ ID NO: 926722 - RNA, 22 nt, Human
aaaugcagguaguauuuauuuu

SEQ ID NO: 926723 - RNA, 22 nt, Human
ugucagaacucuauugaugucc

SEQ ID NO: 926724 - RNA, 20 nt, Human
uuucugugauagagaggugu

SEQ ID NO: 926725 - RNA, 22 nt, Human
aauguguguauuucuaggcgag

SEQ ID NO: 926726 - RNA, 22 nt, Human
agcugaauguucucagaccaga

SEQ ID NO: 926727 - RNA, 23 nt, Human
uggccuggagagaaaagaugagu

SEQ ID NO: 926728 - RNA, 22 nt, Human
agaggggcucaagcaguggucu

SEQ ID NO: 926729 - RNA, 22 nt, Human
cauguggauggucuccucauca

SEQ ID NO: 926730 - RNA, 22 nt, Human
uagaggcuucuacugcucacuu

SEQ ID NO: 926731 - RNA, 22 nt, Human
aagugacacauuugugaugaau

SEQ ID NO: 926732 - RNA, 20 nt, Human
uaugauaauuacaaaauagu

SEQ ID NO: 926733 - RNA, 22 nt, Human
uuucaugauccauuuacaaaau

SEQ ID NO: 926734 - RNA, 22 nt, Human
uuccagaggccugggcacacuc

SEQ ID NO: 926735 - RNA, 22 nt, Human
uggcucagcgcggccuggucuu

SEQ ID NO: 926736 - RNA, 19 nt, Human
aauacaguguuauagaauu

SEQ ID NO: 926737 - RNA, 22 nt, Human
agaacagccuauaguggccuuu

SEQ ID NO: 926738 - RNA, 22 nt, Human
uuucucuucacugugugccuca

SEQ ID NO: 926739 - RNA, 22 nt, Human
caaguuaauauauagaauuuug

SEQ ID NO: 926740 - RNA, 22 nt, Human
cucccagagagcaggugggccg

SEQ ID NO: 926741 - RNA, 22 nt, Human
aaggaaagcugugguucugaga

SEQ ID NO: 926742 - RNA, 22 nt, Human
gcugccauuaugggaacgagaa

SEQ ID NO: 926743 - RNA, 22 nt, Human
cagaaauggucuguucagcuua

SEQ ID NO: 926744 - RNA, 20 nt, Human
uucuuuacgaccuuucugca

SEQ ID NO: 926745 - RNA, 22 nt, Human
uggauaaaaucuguaaggcuca

SEQ ID NO: 926746 - RNA, 21 nt, Human
gggccacaccuucugcagacc

SEQ ID NO: 926747 - RNA, 23 nt, Human
ccuugucuggcuggcuggacuuu

SEQ ID NO: 926748 - RNA, 22 nt, Human
ggacuuuaggugagaaggcauu

SEQ ID NO: 926749 - RNA, 22 nt, Human
cuccagugucucagagcagaug

SEQ ID NO: 926750 - RNA, 22 nt, Human
ucuuggcaaguggcagauucuu

SEQ ID NO: 926751 - RNA, 22 nt, Human
cacaggaauaagucaaacuuca

SEQ ID NO: 926752 - RNA, 22 nt, Human
ggcagccaugugggcagcgagu

SEQ ID NO: 926753 - RNA, 22 nt, Human
acacuuuuagcuaugaguuaau

SEQ ID NO: 926754 - RNA, 22 nt, Human
uccucagacacccugcuggcuu

SEQ ID NO: 926755 - RNA, 22 nt, Human
uaggggcuuguaauuuaauaga

SEQ ID NO: 926756 - RNA, 20 nt, Human
ccuguguggccagcugaggc

SEQ ID NO: 926757 - RNA, 19 nt, Human
uuuaccuucuugagagcag

SEQ ID NO: 926758 - RNA, 22 nt, Human
gauauucuauuuuagccagcua

SEQ ID NO: 926759 - RNA, 22 nt, Human
agggcagccauugagggauucu

SEQ ID NO: 926760 - RNA, 22 nt, Human
agagaacaaauuaaaggugguu

SEQ ID NO: 926761 - RNA, 22 nt, Human
cucaggcuaagaaggccaagug

SEQ ID NO: 926762 - RNA, 22 nt, Human
uuucugcagguauugcauaagu

SEQ ID NO: 926763 - RNA, 22 nt, Human
uaggaaauacuguaaguuuggg

SEQ ID NO: 926764 - RNA, 22 nt, Human
aaggcacauauuuuagagucac

SEQ ID NO: 926765 - RNA, 23 nt, Human
augcucugggcugugggaccugc

SEQ ID NO: 926766 - RNA, 22 nt, Human
aguuaacucauuuuauaaugcc

SEQ ID NO: 926767 - RNA, 22 nt, Human
cugaggcacugguaaugggcau

SEQ ID NO: 926768 - RNA, 22 nt, Human
gcccauuuguuuauauacuguc

SEQ ID NO: 926769 - RNA, 18 nt, Human
ugaggcagucagugaugg

SEQ ID NO: 926770 - RNA, 21 nt, Human
cuuuucucuccgcaggacauu

SEQ ID NO: 926771 - RNA, 22 nt, Human
ccuggugcugcuaucaggggua

SEQ ID NO: 926772 - RNA, 22 nt, Human
uuguauuucuccacuuucuguu

SEQ ID NO: 926773 - RNA, 22 nt, Human
gccuggcugcucagccacucac

SEQ ID NO: 926774 - RNA, 22 nt, Human
aaaaucuugacuguuuuuagaa

SEQ ID NO: 926775 - RNA, 20 nt, Human
uggcuccagccuccccuacc

SEQ ID NO: 926776 - RNA, 22 nt, Human
aagaggaauggguguguuuaug

SEQ ID NO: 926777 - RNA, 22 nt, Human
gcacacagauuaggaaacagaa

SEQ ID NO: 926778 - RNA, 22 nt, Human
gggggcaguaaggauauggaaa

SEQ ID NO: 926779 - RNA, 22 nt, Human
uccuaggccuggccugguggau

SEQ ID NO: 926780 - RNA, 22 nt, Human
aagaaguuggaaaugauugaga

SEQ ID NO: 926781 - RNA, 22 nt, Human
cagggcugcuggccgugcccuc

SEQ ID NO: 926782 - RNA, 22 nt, Human
ugcagugggccggaggccaggg

SEQ ID NO: 926783 - RNA, 22 nt, Human
ucaacauacauacauggucagg

SEQ ID NO: 926784 - RNA, 19 nt, Human
aagcaucuuugaaacuggg

SEQ ID NO: 926785 - RNA, 22 nt, Human
agcugggcagacugcagugguu

SEQ ID NO: 926786 - RNA, 19 nt, Human
cccaggagcaguauugaug

SEQ ID NO: 926787 - RNA, 22 nt, Human
uaauacauuaccuaaccucucu

SEQ ID NO: 926788 - RNA, 22 nt, Human
uaucagaagacuuacaguaucg

SEQ ID NO: 926789 - RNA, 22 nt, Human
ggccacugcugcucugguggag

SEQ ID NO: 926790 - RNA, 22 nt, Human
gaaaguuuauagguuauauaau

SEQ ID NO: 926791 - RNA, 22 nt, Human
acaguggaugugauguccaggu

SEQ ID NO: 926792 - RNA, 22 nt, Human
gagaagcaaucaguggccaccc

SEQ ID NO: 926793 - RNA, 22 nt, Human
aauguguauaugaacauacagg

SEQ ID NO: 926794 - RNA, 22 nt, Human
ggucagagcuggagagauaggg

SEQ ID NO: 926795 - RNA, 22 nt, Human
ccagcagcucccucaggguccg

SEQ ID NO: 926796 - RNA, 22 nt, Human
acagaguaucuaucaggaguau

SEQ ID NO: 926797 - RNA, 22 nt, Human
uaccugagguaaggaugaugag

SEQ ID NO: 926798 - RNA, 22 nt, Human
gcagacggaguaucuuguacau

SEQ ID NO: 926799 - RNA, 22 nt, Human
cuguuuaaugcaaugaaaugag

SEQ ID NO: 926800 - RNA, 22 nt, Human
ugagccugccugcaggugugcu

SEQ ID NO: 926801 - RNA, 22 nt, Human
agaaaaggcuugaagagguuuu

SEQ ID NO: 926802 - RNA, 19 nt, Human
gguuaccagugugucuggc

SEQ ID NO: 926803 - RNA, 22 nt, Human
aacacugucagccuuugaugga

SEQ ID NO: 926804 - RNA, 22 nt, Human
ugugccaaucugcugacugucu

SEQ ID NO: 926805 - RNA, 19 nt, Human
aggcuucauccugggcagc

SEQ ID NO: 926806 - RNA, 22 nt, Human
aggaaacauugauauugggaaa

SEQ ID NO: 926807 - RNA, 22 nt, Human
ccaucugacugccacccaggcc

SEQ ID NO: 926808 - RNA, 19 nt, Human
ccugugacuaucuuuguaa

SEQ ID NO: 926809 - RNA, 22 nt, Human
cuuugggauuucaugagagcua

SEQ ID NO: 926810 - RNA, 20 nt, Human
gucagaggacccuagagcga

SEQ ID NO: 926811 - RNA, 20 nt, Human
uguaacaaucuggauguugc

SEQ ID NO: 926812 - RNA, 22 nt, Human
gcacacagcuagauuaccauuc

SEQ ID NO: 926813 - RNA, 22 nt, Human
ucagagguuacccaugggacag

SEQ ID NO: 926814 - RNA, 22 nt, Human
aauguugaccuccugaauguuu

SEQ ID NO: 926815 - RNA, 22 nt, Human
ccacagugaaaucuugauggag

SEQ ID NO: 926816 - RNA, 22 nt, Human
aaacauuuuucuucaucauccu

SEQ ID NO: 926817 - RNA, 22 nt, Human
agcuaagguguccuggaggccc

SEQ ID NO: 926818 - RNA, 22 nt, Human
aagacacaaagcuucccuuuuc

SEQ ID NO: 926819 - RNA, 21 nt, Human
gcagaaaggaaucuuaggucc

SEQ ID NO: 926820 - RNA, 22 nt, Human
ugccuugggauauauggacacu

SEQ ID NO: 926821 - RNA, 22 nt, Human
uguuaacagccagauuugguga

SEQ ID NO: 926822 - RNA, 22 nt, Human
uauuauuaugcauagcaugaaa

SEQ ID NO: 926823 - RNA, 22 nt, Human
aaucuagaguucccagcauaaa

SEQ ID NO: 926824 - RNA, 22 nt, Human
aauuaaauugguuuagagagga

SEQ ID NO: 926825 - RNA, 22 nt, Human
aucaaguuuucuuaguugacug

SEQ ID NO: 926826 - RNA, 22 nt, Human
cagcaucuccauggcuuuggag

SEQ ID NO: 926827 - RNA, 22 nt, Human
uucugcauacacugaauguagu

SEQ ID NO: 926828 - RNA, 22 nt, Human
guuggagugcagcuugugcgau

SEQ ID NO: 926829 - RNA, 22 nt, Human
ugaccacagacccaaugacuac

SEQ ID NO: 926830 - RNA, 22 nt, Human
gaggccugaaaggggaccuaug

SEQ ID NO: 926831 - RNA, 22 nt, Human
caugaguucaaaaugccugccu

SEQ ID NO: 926832 - RNA, 22 nt, Human
aaagcacaugaguaguguagua

SEQ ID NO: 926833 - RNA, 22 nt, Human
uagccaaaguagcuguuauagc

SEQ ID NO: 926834 - RNA, 20 nt, Human
gcccaagcgccggccgcaga

SEQ ID NO: 926835 - RNA, 22 nt, Human
cuggaagaggacacacgaauca

SEQ ID NO: 926836 - RNA, 22 nt, Human
ggaagggaguaguuggaaugca

SEQ ID NO: 926837 - RNA, 22 nt, Human
uuucaaacauagaucugaauau

SEQ ID NO: 926838 - RNA, 22 nt, Human
aaauauagcaauuaugccuacu

SEQ ID NO: 926839 - RNA, 22 nt, Human
agagacuaagaaguuuuaacuu

SEQ ID NO: 926840 - RNA, 22 nt, Human
gcaagcuucauauggcauuuuc

SEQ ID NO: 926841 - RNA, 22 nt, Human
gagcuggccgcagagagggcag

SEQ ID NO: 926842 - RNA, 20 nt, Human
aagggagaauaaugauugua

SEQ ID NO: 926843 - RNA, 22 nt, Human
ugcuggcuuauuuaguaaaugu

SEQ ID NO: 926844 - RNA, 22 nt, Human
gccccagcucugccacaacuag

SEQ ID NO: 926845 - RNA, 22 nt, Human
augaggccagggugccaugaaa

SEQ ID NO: 926846 - RNA, 22 nt, Human
uccaaaguguugggauuauagg

SEQ ID NO: 926847 - RNA, 22 nt, Human
cugaagaaugacagugcuuuga

SEQ ID NO: 926848 - RNA, 22 nt, Human
ggaguggcacucugaggcgggg

SEQ ID NO: 926849 - RNA, 22 nt, Human
uccagacucuuuaaguucauuu

SEQ ID NO: 926850 - RNA, 22 nt, Human
uuacagaaaagggguuguccuu

SEQ ID NO: 926851 - RNA, 22 nt, Human
aagcaucuccucaucauuuggg

SEQ ID NO: 926852 - RNA, 22 nt, Human
ugugugagacaauuggcugugg

SEQ ID NO: 926853 - RNA, 22 nt, Human
aaagcagagaucauggcuugua

SEQ ID NO: 926854 - RNA, 21 nt, Human
agccuggguauccuuugagga

SEQ ID NO: 926855 - RNA, 22 nt, Human
cugcagccuaggugcagcuggg

SEQ ID NO: 926856 - RNA, 22 nt, Human
agguggggaaaccagcgauccc

SEQ ID NO: 926857 - RNA, 22 nt, Human
aauaacaggguugauuugcaau

SEQ ID NO: 926858 - RNA, 22 nt, Human
uggacugggcuaauggcagaca

SEQ ID NO: 926859 - RNA, 22 nt, Human
ggugcugacauucagagucugg

SEQ ID NO: 926860 - RNA, 22 nt, Human
cagggugguaccagcaucuagu

SEQ ID NO: 926861 - RNA, 23 nt, Human
gcucccugugcuccaggagaugc

SEQ ID NO: 926862 - RNA, 22 nt, Human
caggcccuuuccugggcauagg

SEQ ID NO: 926863 - RNA, 20 nt, Human
gcagccguggagacuaggag

SEQ ID NO: 926864 - RNA, 22 nt, Human
gcagaggucaaauaccucauuu

SEQ ID NO: 926865 - RNA, 22 nt, Human
cacaguguggcaaauuucaacu

SEQ ID NO: 926866 - RNA, 22 nt, Human
cuagggacagaaagaggguaga

SEQ ID NO: 926867 - RNA, 22 nt, Human
uggcggggcagcucuggcuucu

SEQ ID NO: 926868 - RNA, 22 nt, Human
agggccugcucuaucacucuca

SEQ ID NO: 926869 - RNA, 22 nt, Human
ccaccaggacagcccugagggg

SEQ ID NO: 926870 - RNA, 22 nt, Human
gcuggagagauaggcauggggu

SEQ ID NO: 926871 - RNA, 22 nt, Human
uaaagcaaugaaaguuuugcag

SEQ ID NO: 926872 - RNA, 22 nt, Human
agcccagugggccgaggcgggg

SEQ ID NO: 926873 - RNA, 22 nt, Human
gguguguguggauuagcaugcc

SEQ ID NO: 926874 - RNA, 22 nt, Human
ugucuauaccugauacagaguu

SEQ ID NO: 926875 - RNA, 22 nt, Human
gcaaaucaccaccuagcuggau

SEQ ID NO: 926876 - RNA, 19 nt, Human
aaacacagauuucuuacca

SEQ ID NO: 926877 - RNA, 22 nt, Human
uggaggauuccacuuacaugag

SEQ ID NO: 926878 - RNA, 22 nt, Human
ggucccaggauugguugcgcag

SEQ ID NO: 926879 - RNA, 22 nt, Human
aacaaggcugguaucuuaaaga

SEQ ID NO: 926880 - RNA, 22 nt, Human
gcucaagggaugggagugggug

SEQ ID NO: 926881 - RNA, 22 nt, Human
ccugccuggcuuccagaagaga

SEQ ID NO: 926882 - RNA, 22 nt, Human
ugggcaggaugcguugauucuu

SEQ ID NO: 926883 - RNA, 22 nt, Human
uggcccagggaguucauggugu

SEQ ID NO: 926884 - RNA, 22 nt, Human
uacaacacugguucgacaugug

SEQ ID NO: 926885 - RNA, 22 nt, Human
acagguuuuggacuccagauuu

SEQ ID NO: 926886 - RNA, 22 nt, Human
ugagaaauauugcacagugagg

SEQ ID NO: 926887 - RNA, 22 nt, Human
ccauuccaugugcuacacauaa

SEQ ID NO: 926888 - RNA, 22 nt, Human
auacaaagacaaaucucaaucu

SEQ ID NO: 926889 - RNA, 22 nt, Human
acacugguugaauuguauaacu

SEQ ID NO: 926890 - RNA, 22 nt, Human
acagcugugacuuagagaaguu

SEQ ID NO: 926891 - RNA, 22 nt, Human
auacacacaaucagguuuugua

SEQ ID NO: 926892 - RNA, 22 nt, Human
gugcugguauaugacugaguuu

SEQ ID NO: 926893 - RNA, 22 nt, Human
ugugaaaggaaggcaugaaaag

SEQ ID NO: 926894 - RNA, 22 nt, Human
acucugggaugagaaaaggguu

SEQ ID NO: 926895 - RNA, 22 nt, Human
ccucugccaccucccacgaggc

SEQ ID NO: 926896 - RNA, 22 nt, Human
aaaccacuccugauucacuuca

SEQ ID NO: 926897 - RNA, 22 nt, Human
ugauaaauccauguaaauggua

SEQ ID NO: 926898 - RNA, 21 nt, Human
agcgucaauaucgucaacagg

SEQ ID NO: 926899 - RNA, 22 nt, Human
acacugaagagcacuuucaaag

SEQ ID NO: 926900 - RNA, 22 nt, Human
aguacauuuauuaaugguaaaa

SEQ ID NO: 926901 - RNA, 22 nt, Human
ggucaacagaauuuguacucag

SEQ ID NO: 926902 - RNA, 22 nt, Human
uugggacagaaaaggagaagau

SEQ ID NO: 926903 - RNA, 22 nt, Human
cagguccuuuaguguccagaac

SEQ ID NO: 926904 - RNA, 21 nt, Human
agcagcuugagucuggagcuc

SEQ ID NO: 926905 - RNA, 22 nt, Human
auucuucauacagacaaguccu

SEQ ID NO: 926906 - RNA, 22 nt, Human
cugcucuagguuccugcauaug

SEQ ID NO: 926907 - RNA, 22 nt, Human
caugaaaaugucaaguucugcu

SEQ ID NO: 926908 - RNA, 22 nt, Human
ggcugugccucuggcagcacau

SEQ ID NO: 926909 - RNA, 19 nt, Human
aaaguucugacuguagagc

SEQ ID NO: 926910 - RNA, 22 nt, Human
ccugggcucugaggagggaguc

SEQ ID NO: 926911 - RNA, 22 nt, Human
gcuguuggggccagcaggucau

SEQ ID NO: 926912 - RNA, 22 nt, Human
gcccaagucagugcuucuggca

SEQ ID NO: 926913 - RNA, 22 nt, Human
agguauaugcuauuacuucugc

SEQ ID NO: 926914 - RNA, 22 nt, Human
uuuuggcacugcgucuacaugg

SEQ ID NO: 926915 - RNA, 22 nt, Human
cacagaagaaucaugcuguguu

SEQ ID NO: 926916 - RNA, 22 nt, Human
ucugacaggauuuuuucaggca

SEQ ID NO: 926917 - RNA, 22 nt, Human
aagcagcuuuugaagagugagg

SEQ ID NO: 926918 - RNA, 22 nt, Human
guaacacuagcucugucacuuu

SEQ ID NO: 926919 - RNA, 22 nt, Human
ucaaagagcucuaucuucaaaa

SEQ ID NO: 926920 - RNA, 22 nt, Human
ccacauuuggagaagauacuuu

SEQ ID NO: 926921 - RNA, 22 nt, Human
ggaugcaggaguugaagaagga

SEQ ID NO: 926922 - RNA, 22 nt, Human
cucugugucagcugggugugca

SEQ ID NO: 926923 - RNA, 22 nt, Human
uaaaggaaucaguuuuagagau

SEQ ID NO: 926924 - RNA, 22 nt, Human
gcugcuggcgcugggcguccgg

SEQ ID NO: 926925 - RNA, 22 nt, Human
aaacacuggcaauuucaugcac

SEQ ID NO: 926926 - RNA, 22 nt, Human
aacugaaacggugaucuuuuaa

SEQ ID NO: 926927 - RNA, 22 nt, Human
acaguaaauaaugcauguugau

SEQ ID NO: 926928 - RNA, 22 nt, Human
aaauucuggccuaucacaguga

SEQ ID NO: 926929 - RNA, 23 nt, Human
aagcuuccuugacuggccccuag

SEQ ID NO: 926930 - RNA, 22 nt, Human
uaccaaaagcuuguuucauaca

SEQ ID NO: 926931 - RNA, 22 nt, Human
augagcaugugacucaaaccaa

SEQ ID NO: 926932 - RNA, 21 nt, Human
ccaggucuugguccuuggacu

SEQ ID NO: 926933 - RNA, 23 nt, Human
aaugauuucaugaugauagcagc

SEQ ID NO: 926934 - RNA, 22 nt, Human
agucugcacucagguggagguc

SEQ ID NO: 926935 - RNA, 22 nt, Human
uuuccucuucuggcaggcaggg

SEQ ID NO: 926936 - RNA, 22 nt, Human
ccaggaggggucucugucuccc

SEQ ID NO: 926937 - RNA, 21 nt, Human
agcucccuguuuccucacucu

SEQ ID NO: 926938 - RNA, 22 nt, Human
cagcugcaggagcugagcacuu

SEQ ID NO: 926939 - RNA, 22 nt, Human
uaacacauuuuaagccauuuua

SEQ ID NO: 926940 - RNA, 22 nt, Human
gcaguguuuacauauuagaaac

SEQ ID NO: 926941 - RNA, 22 nt, Human
gaaugcuggcuuacaggcaguu

SEQ ID NO: 926942 - RNA, 22 nt, Human
agguacagcaauauaagagguc

SEQ ID NO: 926943 - RNA, 22 nt, Human
ucauugcagacuaacaaucuca

SEQ ID NO: 926944 - RNA, 22 nt, Human
auaggaaagaaaauuauguagg

SEQ ID NO: 926945 - RNA, 21 nt, Human
cagugcagggguuagcgugua

SEQ ID NO: 926946 - RNA, 22 nt, Human
aaaggcaugauuaauucugugu

SEQ ID NO: 926947 - RNA, 22 nt, Human
gagaggcugcauaugcacacug

SEQ ID NO: 926948 - RNA, 22 nt, Human
cauguuuuguguacagaauauu

SEQ ID NO: 926949 - RNA, 22 nt, Human
ugaagaauguugcagugagcau

SEQ ID NO: 926950 - RNA, 22 nt, Human
ucagagguggccccugcccuca

SEQ ID NO: 926951 - RNA, 22 nt, Human
uaagagaaugucaggaguggau

SEQ ID NO: 926952 - RNA, 22 nt, Human
cuuccucugccucccgugcuca

SEQ ID NO: 926953 - RNA, 22 nt, Human
gaauagcuuccuuuuuuccaaa

SEQ ID NO: 926954 - RNA, 22 nt, Human
ugggggagagugcaagcaugaa

SEQ ID NO: 926955 - RNA, 22 nt, Human
uuuaguguggcacugauguuca

SEQ ID NO: 926956 - RNA, 22 nt, Human
aaacugugaagcaaguacaagg

SEQ ID NO: 926957 - RNA, 22 nt, Human
agccugguuuaagcauuuuaua

SEQ ID NO: 926958 - RNA, 22 nt, Human
aggcucagccugggccuagagc

SEQ ID NO: 926959 - RNA, 22 nt, Human
cagcccugucccugagggaccu

SEQ ID NO: 926960 - RNA, 20 nt, Human
agcuucagcccuaggauugc

SEQ ID NO: 926961 - RNA, 22 nt, Human
uuccuuuuuacauaaucacauu

SEQ ID NO: 926962 - RNA, 22 nt, Human
agaggccaucugcucugugggg

SEQ ID NO: 926963 - RNA, 18 nt, Human
ccuuuccuccccucagcu

SEQ ID NO: 926964 - RNA, 22 nt, Human
aaggccaaggcugcagugagcc

SEQ ID NO: 926965 - RNA, 22 nt, Human
gugggggaugcugaguuggaaa

SEQ ID NO: 926966 - RNA, 22 nt, Human
gggcaaagugguggaggcaguu

SEQ ID NO: 926967 - RNA, 22 nt, Human
uuuacauggaauauugucuugu

SEQ ID NO: 926968 - RNA, 22 nt, Human
ucuauuuuuauaguugaagugc

SEQ ID NO: 926969 - RNA, 22 nt, Human
aaucuacauagagaucaaauga

SEQ ID NO: 926970 - RNA, 22 nt, Human
ggcagggaggaggugaaaguga

SEQ ID NO: 926971 - RNA, 22 nt, Human
ugguggcuguaagggagagaag

SEQ ID NO: 926972 - RNA, 22 nt, Human
guuuggugugaguucauaccac

SEQ ID NO: 926973 - RNA, 22 nt, Human
ucagaaagaacacaggcaguag

SEQ ID NO: 926974 - RNA, 22 nt, Human
uuacaguuuaagaggaaacaaa

SEQ ID NO: 926975 - RNA, 22 nt, Human
accacauuucugaauagcauaa

SEQ ID NO: 926976 - RNA, 22 nt, Human
ggcaaacaccaggcgagggagc

SEQ ID NO: 926977 - RNA, 22 nt, Human
ugaaugaucuaguuuuguagac

SEQ ID NO: 926978 - RNA, 22 nt, Human
uucuucaacaaggacacuguua

SEQ ID NO: 926979 - RNA, 22 nt, Human
uuuggcuuaacuuacaugauau

SEQ ID NO: 926980 - RNA, 22 nt, Human
ggacaggcgcagggccaaggaa

SEQ ID NO: 926981 - RNA, 22 nt, Human
acaacaagagcuaaggguaagg

SEQ ID NO: 926982 - RNA, 22 nt, Human
cucugagacuuagcaucuacau

SEQ ID NO: 926983 - RNA, 22 nt, Human
auccacuugccacuguauaguu

SEQ ID NO: 926984 - RNA, 22 nt, Human
gacuucaaaggucaaacaucgc

SEQ ID NO: 926985 - RNA, 22 nt, Human
uccagcagcccgaaggcccauc

SEQ ID NO: 926986 - RNA, 22 nt, Human
cugagucucccggcaguggagg

SEQ ID NO: 926987 - RNA, 19 nt, Human
ugcuucuggggcuucucca

SEQ ID NO: 926988 - RNA, 22 nt, Human
uauucaaaguaccuucauugcc

SEQ ID NO: 926989 - RNA, 22 nt, Human
aguggcaguggggcagggcccu

SEQ ID NO: 926990 - RNA, 22 nt, Human
guaaaacauguuuuaacuagga

SEQ ID NO: 926991 - RNA, 22 nt, Human
guuucauagcuacgauuuuggg

SEQ ID NO: 926992 - RNA, 22 nt, Human
aaugagaucagagauaacucaa

SEQ ID NO: 926993 - RNA, 22 nt, Human
uaugugcaaauuaauugcuaga

SEQ ID NO: 926994 - RNA, 18 nt, Human
ggcaaaugcaauucaaag

SEQ ID NO: 926995 - RNA, 22 nt, Human
ugaagacuuugcucuuaaccac

SEQ ID NO: 926996 - RNA, 22 nt, Human
agcgugugccucgggguacacg

SEQ ID NO: 926997 - RNA, 22 nt, Human
cauuaaaauaucucaugguguu

SEQ ID NO: 926998 - RNA, 22 nt, Human
cccaguggagauaggagugugg

SEQ ID NO: 926999 - RNA, 22 nt, Human
cacuguggcuuaccaaagcuaa

SEQ ID NO: 927000 - RNA, 21 nt, Human
aagaguggcugaggaggugau

SEQ ID NO: 927001 - RNA, 22 nt, Human
ccaauguuaggcucugguuuua

SEQ ID NO: 927002 - RNA, 22 nt, Human
uaacagugaccugaaugucaau

SEQ ID NO: 927003 - RNA, 20 nt, Human
gauacacagcuucacuguug

SEQ ID NO: 927004 - RNA, 19 nt, Human
ccugggacuuaggcugggu

SEQ ID NO: 927005 - RNA, 22 nt, Human
aguuauguccucagcaaaucaa

SEQ ID NO: 927006 - RNA, 22 nt, Human
ucacagaaugucagaguugggg

SEQ ID NO: 927007 - RNA, 22 nt, Human
gagggcugauaacaggaauaca

SEQ ID NO: 927008 - RNA, 22 nt, Human
aucugggggagcugcucaugga

SEQ ID NO: 927009 - RNA, 22 nt, Human
ucuccaggaaccaucaugguaa

SEQ ID NO: 927010 - RNA, 22 nt, Human
guucagcagcagugauuuugug

SEQ ID NO: 927011 - RNA, 22 nt, Human
uacugaaaauccugccuguccu

SEQ ID NO: 927012 - RNA, 23 nt, Human
uauugcacacauagaaacauaga

SEQ ID NO: 927013 - RNA, 22 nt, Human
agggcugccccaguccagccgg

SEQ ID NO: 927014 - RNA, 22 nt, Human
cuucuuauuaauccuucucugu

SEQ ID NO: 927015 - RNA, 22 nt, Human
acaggcuuuuacggauaucuuu

SEQ ID NO: 927016 - RNA, 22 nt, Human
ucugccuguaauauuuggagaa

SEQ ID NO: 927017 - RNA, 22 nt, Human
auuucaucccaggcucuggaag

SEQ ID NO: 927018 - RNA, 22 nt, Human
ucauaguuauggagauuaagga

SEQ ID NO: 927019 - RNA, 17 nt, Human
accacuuugccaaguug

SEQ ID NO: 927020 - RNA, 22 nt, Human
agccugugagggaugcugcagu

SEQ ID NO: 927021 - RNA, 22 nt, Human
uucuucaggaagagccuggacu

SEQ ID NO: 927022 - RNA, 22 nt, Human
uggagcagugguccuggagaug

SEQ ID NO: 927023 - RNA, 22 nt, Human
guucuccaggggcuguucaucu

SEQ ID NO: 927024 - RNA, 22 nt, Human
gcucuugauuuccaggagcuag

SEQ ID NO: 927025 - RNA, 22 nt, Human
uuuuauauugagugagaguucc

SEQ ID NO: 927026 - RNA, 22 nt, Human
ugggugaggagaggcugucuaa

SEQ ID NO: 927027 - RNA, 22 nt, Human
cuguccugugcauugucagaug

SEQ ID NO: 927028 - RNA, 22 nt, Human
ucauacaaggaggguguucaaa

SEQ ID NO: 927029 - RNA, 22 nt, Human
cugcucugcagcuuggacuccc

SEQ ID NO: 927030 - RNA, 22 nt, Human
auguagagcuccuugauccucc

SEQ ID NO: 927031 - RNA, 19 nt, Human
gcugagggccacccagccc

SEQ ID NO: 927032 - RNA, 22 nt, Human
cuuauguauauuuggaacguac

SEQ ID NO: 927033 - RNA, 22 nt, Human
aguaucagcagagcuuaaaaga

SEQ ID NO: 927034 - RNA, 22 nt, Human
cccuuagaauuuuguaguuauu

SEQ ID NO: 927035 - RNA, 22 nt, Human
uguaccaguguugagaaugaga

SEQ ID NO: 927036 - RNA, 22 nt, Human
gcauucuucacuaggugagagc

SEQ ID NO: 927037 - RNA, 22 nt, Human
gaacuacaguaagaauugaugu

SEQ ID NO: 927038 - RNA, 22 nt, Human
uucucauagaugcuauagacag

SEQ ID NO: 927039 - RNA, 22 nt, Human
caggguuucuguugagaagucc

SEQ ID NO: 927040 - RNA, 22 nt, Human
ucuuugcagaauuuaacuuugc

SEQ ID NO: 927041 - RNA, 22 nt, Human
ggcugccuacuuucccagaguu

SEQ ID NO: 927042 - RNA, 22 nt, Human
uggggcagcuccaucuauucca

SEQ ID NO: 927043 - RNA, 22 nt, Human
aguagucacuucuauuaauggc

SEQ ID NO: 927044 - RNA, 19 nt, Human
gcaugcagaguaagaaggu

SEQ ID NO: 927045 - RNA, 22 nt, Human
cauuucaauacuaucugagaau

SEQ ID NO: 927046 - RNA, 22 nt, Human
gugggccacugggaggcaaggg

SEQ ID NO: 927047 - RNA, 22 nt, Human
guguccuuauaagaagagaugc

SEQ ID NO: 927048 - RNA, 22 nt, Human
gcagggugugucucauacaguu

SEQ ID NO: 927049 - RNA, 22 nt, Human
acaaugaaagguauucugaacu

SEQ ID NO: 927050 - RNA, 22 nt, Human
caccagguuccgggcagagcug

SEQ ID NO: 927051 - RNA, 21 nt, Human
agcagcugggcaacauggagg

SEQ ID NO: 927052 - RNA, 22 nt, Human
uggcagagagagugcagucgac

SEQ ID NO: 927053 - RNA, 22 nt, Human
cuccacaguugcugcuuuuaau

SEQ ID NO: 927054 - RNA, 22 nt, Human
uuuagaacagauauuguaacuu

SEQ ID NO: 927055 - RNA, 17 nt, Human
agcagcuggguugaucu

SEQ ID NO: 927056 - RNA, 22 nt, Human
uuuccuguugccaucaagaaug

SEQ ID NO: 927057 - RNA, 17 nt, Human
cugaagauaauggcaac

SEQ ID NO: 927058 - RNA, 22 nt, Human
ucuacuuuauaaguauauaagu

SEQ ID NO: 927059 - RNA, 22 nt, Human
ucugcaacagugcccuguaaau

SEQ ID NO: 927060 - RNA, 22 nt, Human
ugccaggccucaggagucucca

SEQ ID NO: 927061 - RNA, 22 nt, Human
gaaaacuaacggaaaaguuagg

SEQ ID NO: 927062 - RNA, 21 nt, Human
ggcuguggagccaugacucac

SEQ ID NO: 927063 - RNA, 22 nt, Human
uagcccagauacaaaucaugau

SEQ ID NO: 927064 - RNA, 22 nt, Human
cuggaauggcaaugggaagucc

SEQ ID NO: 927065 - RNA, 22 nt, Human
acauuucuugaugccucuguga

SEQ ID NO: 927066 - RNA, 22 nt, Human
acagauggaauguguuauggga

SEQ ID NO: 927067 - RNA, 22 nt, Human
aaaguucugagaagcaguuuac

SEQ ID NO: 927068 - RNA, 22 nt, Human
aaaguauuugugauuuuuacca

SEQ ID NO: 927069 - RNA, 22 nt, Human
cucaggcugugaugugauggca

SEQ ID NO: 927070 - RNA, 22 nt, Human
uccugaaaauaauuucacaaga

SEQ ID NO: 927071 - RNA, 22 nt, Human
cauuuuauguuuauggagugcu

SEQ ID NO: 927072 - RNA, 18 nt, Human
ggcuccaggaccuaccca

SEQ ID NO: 927073 - RNA, 22 nt, Human
cacauucaggauuuuccauguc

SEQ ID NO: 927074 - RNA, 22 nt, Human
auuuggaacuuauaauaaguuu

SEQ ID NO: 927075 - RNA, 22 nt, Human
aggaaacauccuuaucuauucu

SEQ ID NO: 927076 - RNA, 19 nt, Human
augcaacaaaaguguaaga

SEQ ID NO: 927077 - RNA, 22 nt, Human
aggagggucauguugaagugua

SEQ ID NO: 927078 - RNA, 22 nt, Human
caggcccugugcugggugaugu

SEQ ID NO: 927079 - RNA, 22 nt, Human
aggcagguuggugagaagacug

SEQ ID NO: 927080 - RNA, 22 nt, Human
ccagacagcaguuaaaggacau

SEQ ID NO: 927081 - RNA, 22 nt, Human
cuggagccaugucuugacugcu

SEQ ID NO: 927082 - RNA, 22 nt, Human
gguggaagccuucagaacagca

SEQ ID NO: 927083 - RNA, 22 nt, Human
caaguuaauugguauuuugauc

SEQ ID NO: 927084 - RNA, 22 nt, Human
auguguguguauauacacacau

SEQ ID NO: 927085 - RNA, 22 nt, Human
uggggucugaguaucugcauuu

SEQ ID NO: 927086 - RNA, 22 nt, Human
caagggcaggagaggauggaug

SEQ ID NO: 927087 - RNA, 22 nt, Human
aacuugguaccaccuucugaag

SEQ ID NO: 927088 - RNA, 22 nt, Human
augggcuaucaaauggagguau

SEQ ID NO: 927089 - RNA, 22 nt, Human
ucccuguacuuacacagcgucc

SEQ ID NO: 927090 - RNA, 22 nt, Human
caugcagggagugcuccuauua

SEQ ID NO: 927091 - RNA, 22 nt, Human
cagugaaguucuacugaauggu

SEQ ID NO: 927092 - RNA, 22 nt, Human
aggcaguggcugagaccagggg

SEQ ID NO: 927093 - RNA, 22 nt, Human
gaugaucugcaagaacuacaug

SEQ ID NO: 927094 - RNA, 22 nt, Human
cgcagagggcaggcagugcugg

SEQ ID NO: 927095 - RNA, 17 nt, Human
agguguggucaagggag

SEQ ID NO: 927096 - RNA, 22 nt, Human
aguuauuacucuuuaacauauu

SEQ ID NO: 927097 - RNA, 22 nt, Human
uucuuuucaagaggggcaagga

SEQ ID NO: 927098 - RNA, 22 nt, Human
aguccccucuaacccaacuuua

SEQ ID NO: 927099 - RNA, 22 nt, Human
gcuggccacauugugccguccu

SEQ ID NO: 927100 - RNA, 22 nt, Human
gcuuccuucuaccacaucaugc

SEQ ID NO: 927101 - RNA, 22 nt, Human
cugagaggcagccagagaaaau

SEQ ID NO: 927102 - RNA, 22 nt, Human
uacagagaugugaaaagcucua

SEQ ID NO: 927103 - RNA, 22 nt, Human
uaagcauaguaccguagcagcu

SEQ ID NO: 927104 - RNA, 22 nt, Human
acuuauagccagaauuaauuau

SEQ ID NO: 927105 - RNA, 22 nt, Human
ggcuuauauugcucuauucaca

SEQ ID NO: 927106 - RNA, 22 nt, Human
gcacaauaacagccaagguuau

SEQ ID NO: 927107 - RNA, 22 nt, Human
gguugcuggggguggcagagcu

SEQ ID NO: 927108 - RNA, 22 nt, Human
uucauagugcuuaauuugauaa

SEQ ID NO: 927109 - RNA, 22 nt, Human
ugaacagucaaaaagugaccau

SEQ ID NO: 927110 - RNA, 20 nt, Human
acauugauuauguuuguaga

SEQ ID NO: 927111 - RNA, 22 nt, Human
gaguaacauguauuggaaggcc

SEQ ID NO: 927112 - RNA, 22 nt, Human
uuuaguguagccuaagcagaau

SEQ ID NO: 927113 - RNA, 22 nt, Human
uucccacacaauuaagucauuu

SEQ ID NO: 927114 - RNA, 22 nt, Human
agugagcauucguuuggaaccc

SEQ ID NO: 927115 - RNA, 22 nt, Human
agauauguuuguauauauuugu

SEQ ID NO: 927116 - RNA, 22 nt, Human
cuucccuuuuuaugucuucagc

SEQ ID NO: 927117 - RNA, 22 nt, Human
uucaauaugauauuagcugugg

SEQ ID NO: 927118 - RNA, 22 nt, Human
cagaguggagauguguguggaa

SEQ ID NO: 927119 - RNA, 22 nt, Human
uacacacagaggccaugggauu

SEQ ID NO: 927120 - RNA, 22 nt, Human
ccaggcuggauuuugcaguuca

SEQ ID NO: 927121 - RNA, 22 nt, Human
uuccauaaucaccuuauucuuu

SEQ ID NO: 927122 - RNA, 22 nt, Human
ccaggcugaauauguuccaggg

SEQ ID NO: 927123 - RNA, 22 nt, Human
ugaacacuguauauucuucuug

SEQ ID NO: 927124 - RNA, 22 nt, Human
accuccccauuaggucacccac

SEQ ID NO: 927125 - RNA, 20 nt, Human
uuucuugucggcuguugcug

SEQ ID NO: 927126 - RNA, 22 nt, Human
ucaggccuuugaacuuggagug

SEQ ID NO: 927127 - RNA, 22 nt, Human
acaguguuuaagagauggcauu

SEQ ID NO: 927128 - RNA, 22 nt, Human
cacauuuauuugaggcuaauug

SEQ ID NO: 927129 - RNA, 22 nt, Human
uuccuugauuaguacaugaagg

SEQ ID NO: 927130 - RNA, 23 nt, Human
aacacauugcuaauuacauucaa

SEQ ID NO: 927131 - RNA, 22 nt, Human
ccauguugucaaacuuagagua

SEQ ID NO: 927132 - RNA, 22 nt, Human
guacaaaaguuauugcgguuuu

SEQ ID NO: 927133 - RNA, 22 nt, Human
aguauuugcauguuagggaccu

SEQ ID NO: 927134 - RNA, 22 nt, Human
uucaaguaaugcuacuccuaug

SEQ ID NO: 927135 - RNA, 22 nt, Human
acagagauggcacagagaaggu

SEQ ID NO: 927136 - RNA, 18 nt, Human
aggccugggaagcugagg

SEQ ID NO: 927137 - RNA, 22 nt, Human
gcugcucugugacagccuccgg

SEQ ID NO: 927138 - RNA, 22 nt, Human
ggagaaagcuguaguggaaugu

SEQ ID NO: 927139 - RNA, 22 nt, Human
ucugagaaugaguguuuucuua

SEQ ID NO: 927140 - RNA, 21 nt, Human
ccuagccucuuacccagcuuu

SEQ ID NO: 927141 - RNA, 22 nt, Human
auggaacagauuaaagugaggg

SEQ ID NO: 927142 - RNA, 22 nt, Human
cagccaccauacagcagaagcu

SEQ ID NO: 927143 - RNA, 22 nt, Human
ucuguagguuaaaaguagacaa

SEQ ID NO: 927144 - RNA, 22 nt, Human
auguggauuguaggaaacugau

SEQ ID NO: 927145 - RNA, 22 nt, Human
ucuguccauuuuccauuuuggc

SEQ ID NO: 927146 - RNA, 22 nt, Human
cuggaccagaaaggacauggcu

SEQ ID NO: 927147 - RNA, 22 nt, Human
auccucacauucucaggacaac

SEQ ID NO: 927148 - RNA, 22 nt, Human
cugaggccgucugggucugcag

SEQ ID NO: 927149 - RNA, 22 nt, Human
acagggcuauauuccucagagu

SEQ ID NO: 927150 - RNA, 22 nt, Human
gcugcucucucccuaaguuggg

SEQ ID NO: 927151 - RNA, 23 nt, Human
cugaggccugcugcguucagguu

SEQ ID NO: 927152 - RNA, 22 nt, Human
auuguugagugcuucagcugua

SEQ ID NO: 927153 - RNA, 22 nt, Human
gcagacaugggaucuauucaca

SEQ ID NO: 927154 - RNA, 22 nt, Human
uuggccuuugucaucaagauca

SEQ ID NO: 927155 - RNA, 22 nt, Human
ucauauuaggguaaugauaaga

SEQ ID NO: 927156 - RNA, 22 nt, Human
gagggccaggcggagacaggcg

SEQ ID NO: 927157 - RNA, 22 nt, Human
aauuucaaagcucacuggcaua

SEQ ID NO: 927158 - RNA, 22 nt, Human
ggggaagaccuggcacuacagc

SEQ ID NO: 927159 - RNA, 22 nt, Human
acaguuaggcacggguacagca

SEQ ID NO: 927160 - RNA, 22 nt, Human
uggaaggagcuaaggaccuggg

SEQ ID NO: 927161 - RNA, 22 nt, Human
uggcugaguaaguugugauaug

SEQ ID NO: 927162 - RNA, 22 nt, Human
gcaugcugcugaggcuggaaua

SEQ ID NO: 927163 - RNA, 22 nt, Human
aggacaaaggaccagaucugga

SEQ ID NO: 927164 - RNA, 22 nt, Human
aaagcaguauaaguaacggaag

SEQ ID NO: 927165 - RNA, 22 nt, Human
guuccuaaauuugaaggacuuu

SEQ ID NO: 927166 - RNA, 22 nt, Human
agcagcaggguguaauugggca

SEQ ID NO: 927167 - RNA, 22 nt, Human
aacagagcucugcucucagauu

SEQ ID NO: 927168 - RNA, 22 nt, Human
uucagccagucaucagucuugu

SEQ ID NO: 927169 - RNA, 22 nt, Human
gaaaggaaauauucuaagcacu

SEQ ID NO: 927170 - RNA, 22 nt, Human
agguuucuacuguguuaagaaa

SEQ ID NO: 927171 - RNA, 22 nt, Human
ccauuagaagauguaauagaga

SEQ ID NO: 927172 - RNA, 22 nt, Human
gauucucugcuaucuaucaccu

SEQ ID NO: 927173 - RNA, 22 nt, Human
uuguuaaaaugaggucauucug

SEQ ID NO: 927174 - RNA, 22 nt, Human
gcucccugaaaagaacaaaguc

SEQ ID NO: 927175 - RNA, 22 nt, Human
cuaauucuguauuuggucauug

SEQ ID NO: 927176 - RNA, 22 nt, Human
caguuucuucuauuuugaacua

SEQ ID NO: 927177 - RNA, 22 nt, Human
cugggcucagaaccuuguuaag

SEQ ID NO: 927178 - RNA, 22 nt, Human
gcagcugcuggagggaggcagg

SEQ ID NO: 927179 - RNA, 22 nt, Human
ugugaggaccucagcagagucu

SEQ ID NO: 927180 - RNA, 22 nt, Human
caguggaauacgagcagauguc

SEQ ID NO: 927181 - RNA, 22 nt, Human
ccacccagaccagggaucuggg

SEQ ID NO: 927182 - RNA, 22 nt, Human
auuucuucaggucagaaauaga

SEQ ID NO: 927183 - RNA, 22 nt, Human
uguuccgaccgugggguuugau

SEQ ID NO: 927184 - RNA, 21 nt, Human
aggcagaaagagcccaggcug

SEQ ID NO: 927185 - RNA, 17 nt, Human
gagacccccacuacacc

SEQ ID NO: 927186 - RNA, 22 nt, Human
caaauagguaaauguaugcugu

SEQ ID NO: 927187 - RNA, 22 nt, Human
agggugcagaaggagccuagga

SEQ ID NO: 927188 - RNA, 22 nt, Human
ugcaaaaagagcgaggagcccu

SEQ ID NO: 927189 - RNA, 22 nt, Human
uucagcaauuuuuuaagcuaau

SEQ ID NO: 927190 - RNA, 21 nt, Human
aagcuuuuccugagaguuguc

SEQ ID NO: 927191 - RNA, 22 nt, Human
acccaugugcucuuuuguaccc

SEQ ID NO: 927192 - RNA, 22 nt, Human
ugugaaccuuggugagucagua

SEQ ID NO: 927193 - RNA, 22 nt, Human
cuuagaaaugcagauucucagg

SEQ ID NO: 927194 - RNA, 22 nt, Human
cuggcucuucagugcuugguuc

SEQ ID NO: 927195 - RNA, 22 nt, Human
cucugcuuuccucuuacacacu

SEQ ID NO: 927196 - RNA, 22 nt, Human
aaguaacaggcaugugaaugac

SEQ ID NO: 927197 - RNA, 22 nt, Human
uuaaagaggcaugggaauguau

SEQ ID NO: 927198 - RNA, 22 nt, Human
cucagggaggccucugcugguu

SEQ ID NO: 927199 - RNA, 22 nt, Human
gaguuuguaaacuauucacuaa

SEQ ID NO: 927200 - RNA, 22 nt, Human
uucaauacaaagaaaggaauuu

SEQ ID NO: 927201 - RNA, 22 nt, Human
gcaugugggaacacuuaggcac

SEQ ID NO: 927202 - RNA, 22 nt, Human
cugcugugugaccauggacagg

SEQ ID NO: 927203 - RNA, 22 nt, Human
aaacaugagcacuugcuucaua

SEQ ID NO: 927204 - RNA, 22 nt, Human
uggaaugaauauguuuuaagga

SEQ ID NO: 927205 - RNA, 22 nt, Human
augcagggauuaaaugacugcc

SEQ ID NO: 927206 - RNA, 22 nt, Human
guccaucuguaggagggacaca

SEQ ID NO: 927207 - RNA, 22 nt, Human
ggucugugucauaggcugaguu

SEQ ID NO: 927208 - RNA, 22 nt, Human
uucuuggcuguucauggucagg

SEQ ID NO: 927209 - RNA, 20 nt, Human
acuuuaugaguucaauuuug

SEQ ID NO: 927210 - RNA, 22 nt, Human
ucauccaguaugacuggugucu

SEQ ID NO: 927211 - RNA, 22 nt, Human
gagaggcuggguuggagaucga

SEQ ID NO: 927212 - RNA, 18 nt, Human
aaaugcugcucaaauucc

SEQ ID NO: 927213 - RNA, 22 nt, Human
uagccucuggaauccuuucucu

SEQ ID NO: 927214 - RNA, 22 nt, Human
uccaagaagcuuacaaucuaau

SEQ ID NO: 927215 - RNA, 22 nt, Human
gaggcugcuuugaugacaggag

SEQ ID NO: 927216 - RNA, 22 nt, Human
uauacacacaugcuccggccuu

SEQ ID NO: 927217 - RNA, 22 nt, Human
auggcccaaacugcaauuacuu

SEQ ID NO: 927218 - RNA, 22 nt, Human
aaguuuggccaaggagacaugg

SEQ ID NO: 927219 - RNA, 22 nt, Human
agcaggugggaucaagcuggca

SEQ ID NO: 927220 - RNA, 22 nt, Human
ccucacagcuugggcaaacggc

SEQ ID NO: 927221 - RNA, 22 nt, Human
uauucaaagugcgaggucaggg

SEQ ID NO: 927222 - RNA, 19 nt, Human
caggcccuggacccaucug

SEQ ID NO: 927223 - RNA, 22 nt, Human
gcuucugaugucagacuucugg

SEQ ID NO: 927224 - RNA, 22 nt, Human
ucauauaaguuuaaaacuaucu

SEQ ID NO: 927225 - RNA, 22 nt, Human
aggugggcacuccgcucgaggu

SEQ ID NO: 927226 - RNA, 22 nt, Human
ucugggcugcuaugaggcagag

SEQ ID NO: 927227 - RNA, 22 nt, Human
ugugcucugaagagugcauguc

SEQ ID NO: 927228 - RNA, 22 nt, Human
aauggcagaaugggccagaagc

SEQ ID NO: 927229 - RNA, 22 nt, Human
acaggcccagcucuucaccaga

SEQ ID NO: 927230 - RNA, 22 nt, Human
aaagcacagggugcuagagagu

SEQ ID NO: 927231 - RNA, 22 nt, Human
cuggaagggucagagugaugag

SEQ ID NO: 927232 - RNA, 22 nt, Human
uggggcuggcuauugucucccu

SEQ ID NO: 927233 - RNA, 22 nt, Human
ugcagaguaaaagcagaugcua

SEQ ID NO: 927234 - RNA, 22 nt, Human
ucagaggaauuugcuuuucaug

SEQ ID NO: 927235 - RNA, 22 nt, Human
gaagcugugaacaagcuacgug

SEQ ID NO: 927236 - RNA, 22 nt, Human
ucucugugguacugagagucua

SEQ ID NO: 927237 - RNA, 20 nt, Human
aauccugggacagaggcagg

SEQ ID NO: 927238 - RNA, 19 nt, Human
ggcuaaugucuuugaaaua

SEQ ID NO: 927239 - RNA, 22 nt, Human
gggaucugauuuaggaugggag

SEQ ID NO: 927240 - RNA, 22 nt, Human
gagggccacguucagggcucuc

SEQ ID NO: 927241 - RNA, 22 nt, Human
ucaaugaagagauuuaaaucau

SEQ ID NO: 927242 - RNA, 22 nt, Human
gaaggagagggucaaggauaau

SEQ ID NO: 927243 - RNA, 22 nt, Human
agaggacacaucuuuccucaaa

SEQ ID NO: 927244 - RNA, 22 nt, Human
uuccuucuuccagaggcugccc

SEQ ID NO: 927245 - RNA, 22 nt, Human
agccugcuucccuuugugcccc

SEQ ID NO: 927246 - RNA, 22 nt, Human
acugagagucuuagaaacacau

SEQ ID NO: 927247 - RNA, 22 nt, Human
aauauuucuggugcuucucacu

SEQ ID NO: 927248 - RNA, 22 nt, Human
auuugaauggcuuaacacaacg

SEQ ID NO: 927249 - RNA, 22 nt, Human
auagcaccaugacuaaacaauu

SEQ ID NO: 927250 - RNA, 22 nt, Human
caagauuuggcaacuuugucau

SEQ ID NO: 927251 - RNA, 22 nt, Human
acagcagaccacuacuaguagg

SEQ ID NO: 927252 - RNA, 22 nt, Human
acaguggaaagaacauggauuu

SEQ ID NO: 927253 - RNA, 22 nt, Human
ugcaggccggcccuaggccuca

SEQ ID NO: 927254 - RNA, 22 nt, Human
uggcuucaggguugucuucagc

SEQ ID NO: 927255 - RNA, 20 nt, Human
gcucaggugacagucaggag

SEQ ID NO: 927256 - RNA, 22 nt, Human
augaagacaaacgacguugcaa

SEQ ID NO: 927257 - RNA, 22 nt, Human
caagggcugcuaucagcuacug

SEQ ID NO: 927258 - RNA, 17 nt, Human
gaacaguguaagacacu

SEQ ID NO: 927259 - RNA, 22 nt, Human
uggcacagaccuuaucuucucu

SEQ ID NO: 927260 - RNA, 22 nt, Human
uucuguggcugggagccuggcu

SEQ ID NO: 927261 - RNA, 22 nt, Human
cagccagaucagggcagggguu

SEQ ID NO: 927262 - RNA, 22 nt, Human
cuuguacauagagaagaagccu

SEQ ID NO: 927263 - RNA, 22 nt, Human
ccugggaggcggagguugcagg

SEQ ID NO: 927264 - RNA, 22 nt, Human
cuacagcuguguguuuaugugc

SEQ ID NO: 927265 - RNA, 23 nt, Human
ccccucugguggcucagcuccug

SEQ ID NO: 927266 - RNA, 22 nt, Human
gucugucccaauagccaacagg

SEQ ID NO: 927267 - RNA, 22 nt, Human
cugggcugagccugggcugugu

SEQ ID NO: 927268 - RNA, 22 nt, Human
caguauguccuuccucguuggc

SEQ ID NO: 927269 - RNA, 22 nt, Human
gaagagcauaugaagagcauau

SEQ ID NO: 927270 - RNA, 22 nt, Human
aaggccacagagccucagagag

SEQ ID NO: 927271 - RNA, 22 nt, Human
gaagacauguuuuuaauaugua

SEQ ID NO: 927272 - RNA, 22 nt, Human
cuccugucaauaggcuccuggc

SEQ ID NO: 927273 - RNA, 22 nt, Human
cugaggugcuauggaggauacg

SEQ ID NO: 927274 - RNA, 22 nt, Human
cugagguagccauggcccaagu

SEQ ID NO: 927275 - RNA, 22 nt, Human
agcagggacauggcaucucucc

SEQ ID NO: 927276 - RNA, 22 nt, Human
acagcucuucuucaagccuggc

SEQ ID NO: 927277 - RNA, 22 nt, Human
ugaaugauaugugaaaaggaac

SEQ ID NO: 927278 - RNA, 22 nt, Human
agaggggaguccuaaucugauu

SEQ ID NO: 927279 - RNA, 22 nt, Human
gccaggcaugggcuucugggcg

SEQ ID NO: 927280 - RNA, 21 nt, Human
cagaggguuucucagguguuu

SEQ ID NO: 927281 - RNA, 20 nt, Human
aggaggucaaauggaaucug

SEQ ID NO: 927282 - RNA, 22 nt, Human
cuucuuuagggaucucuugcug

SEQ ID NO: 927283 - RNA, 17 nt, Human
gugaauggcauagucgg

SEQ ID NO: 927284 - RNA, 22 nt, Human
acaguggaaagaaacgaauuag

SEQ ID NO: 927285 - RNA, 22 nt, Human
uuucauuucauagaauuguguu

SEQ ID NO: 927286 - RNA, 22 nt, Human
uggacccaggcaggucuguccu

SEQ ID NO: 927287 - RNA, 22 nt, Human
aagucuuuuugaaucuauaacu

SEQ ID NO: 927288 - RNA, 17 nt, Human
gaagguuucucuuaggu

SEQ ID NO: 927289 - RNA, 22 nt, Human
caaauguuauucauucuuguuu

SEQ ID NO: 927290 - RNA, 22 nt, Human
agcuggccuccgggugccuggg

SEQ ID NO: 927291 - RNA, 21 nt, Human
cuggagucuggggguggcagu

SEQ ID NO: 927292 - RNA, 22 nt, Human
ggcagcuguuggcucucuagga

SEQ ID NO: 927293 - RNA, 22 nt, Human
uucacauuauaaucaguucugc

SEQ ID NO: 927294 - RNA, 22 nt, Human
acggccuggugcagcaggucgc

SEQ ID NO: 927295 - RNA, 22 nt, Human
aagagauuucuguaaaauguaa

SEQ ID NO: 927296 - RNA, 22 nt, Human
aaaguguugggaagaaagugca

SEQ ID NO: 927297 - RNA, 22 nt, Human
gcccaggaucugcucagaucau

SEQ ID NO: 927298 - RNA, 22 nt, Human
auuuacuagggcuguuuaagua

SEQ ID NO: 927299 - RNA, 22 nt, Human
caugcacacacgugcauguacg

SEQ ID NO: 927300 - RNA, 22 nt, Human
gugaaugguugugaacaucuuu

SEQ ID NO: 927301 - RNA, 22 nt, Human
aguggcagagugcacucaggca

SEQ ID NO: 927302 - RNA, 22 nt, Human
ucagaaguuaauauauaaauuu

SEQ ID NO: 927303 - RNA, 22 nt, Human
uucacuaugcuuggaaacuucu

SEQ ID NO: 927304 - RNA, 22 nt, Human
aaaaguauggugguccuuuuua

SEQ ID NO: 927305 - RNA, 22 nt, Human
uuacacuaugaaugagaauaua

SEQ ID NO: 927306 - RNA, 22 nt, Human
aguaucauguuggaauuaauca

SEQ ID NO: 927307 - RNA, 19 nt, Human
gcugugugaccuugggcaa

SEQ ID NO: 927308 - RNA, 22 nt, Human
cugaaguuaacaucuugauguc

SEQ ID NO: 927309 - RNA, 22 nt, Human
ucaacagaagugauagcuauua

SEQ ID NO: 927310 - RNA, 22 nt, Human
uuuacuuucucaaguauauagg

SEQ ID NO: 927311 - RNA, 22 nt, Human
uuacacacagagcugggccugg

SEQ ID NO: 927312 - RNA, 22 nt, Human
aauugcauguuaaugacuaagu

SEQ ID NO: 927313 - RNA, 23 nt, Human
agugugacuuuuuugacugucac

SEQ ID NO: 927314 - RNA, 22 nt, Human
gcugagggaggcugaacugagu

SEQ ID NO: 927315 - RNA, 22 nt, Human
cagccagugugaccgaggagga

SEQ ID NO: 927316 - RNA, 22 nt, Human
cugaggccucacuguagucccu

SEQ ID NO: 927317 - RNA, 22 nt, Human
ucuucaggguaugggaaaggga

SEQ ID NO: 927318 - RNA, 22 nt, Human
uuucaagagaaaacuaaccuau

SEQ ID NO: 927319 - RNA, 22 nt, Human
auuauaaauauuuucuaggggu

SEQ ID NO: 927320 - RNA, 22 nt, Human
cugagguauuuuauugggcuag

SEQ ID NO: 927321 - RNA, 22 nt, Human
gaggagagaagcuaacggugcu

SEQ ID NO: 927322 - RNA, 22 nt, Human
ugcaaauagccuauauuuauag

SEQ ID NO: 927323 - RNA, 22 nt, Human
aaacagacugcacugccaguca

SEQ ID NO: 927324 - RNA, 23 nt, Human
uucuuacaaggcuggcccacuug

SEQ ID NO: 927325 - RNA, 22 nt, Human
uuuuguuuaaaauccuggaugg

SEQ ID NO: 927326 - RNA, 22 nt, Human
gacaggcuucaugauggcagga

SEQ ID NO: 927327 - RNA, 22 nt, Human
gggccugauuagcaggcuagcu

SEQ ID NO: 927328 - RNA, 22 nt, Human
caucacagauguuguguggagu

SEQ ID NO: 927329 - RNA, 19 nt, Human
cuggaaggagggacuguuc

SEQ ID NO: 927330 - RNA, 22 nt, Human
auucuagcucaucuacuuucca

SEQ ID NO: 927331 - RNA, 18 nt, Human
agcaugagucaggggugc

SEQ ID NO: 927332 - RNA, 22 nt, Human
ucaagacagugugauacuggcc

SEQ ID NO: 927333 - RNA, 22 nt, Human
ggcagugguuagaaacaugagc

SEQ ID NO: 927334 - RNA, 22 nt, Human
cagaagacagcuguuucacucg

SEQ ID NO: 927335 - RNA, 22 nt, Human
ccacacagucaguuuccaagaa

SEQ ID NO: 927336 - RNA, 21 nt, Human
uuccacaguccugaggauuca

SEQ ID NO: 927337 - RNA, 22 nt, Human
cacauucuuucacaguucugaa

SEQ ID NO: 927338 - RNA, 22 nt, Human
gagcuggcuccgccaugcugcu

SEQ ID NO: 927339 - RNA, 22 nt, Human
ugucagcauugcgucacugagc

SEQ ID NO: 927340 - RNA, 22 nt, Human
aggcccaguccucugccgucug

SEQ ID NO: 927341 - RNA, 22 nt, Human
ugucacuucaggaaugcaggga

SEQ ID NO: 927342 - RNA, 22 nt, Human
agcagccucccagggagcagcc

SEQ ID NO: 927343 - RNA, 22 nt, Human
gagagggcugccuggugugagg

SEQ ID NO: 927344 - RNA, 22 nt, Human
auugacaggucuuugggaguau

SEQ ID NO: 927345 - RNA, 22 nt, Human
ggcaauuuggucauuuguauug

SEQ ID NO: 927346 - RNA, 22 nt, Human
uccuuggcaagacacagcacag

SEQ ID NO: 927347 - RNA, 22 nt, Human
uaaugucagcauaguuuauuuu

SEQ ID NO: 927348 - RNA, 22 nt, Human
cuguauuuuuuaagugaucugg

SEQ ID NO: 927349 - RNA, 22 nt, Human
ccccacacucuuuacauucaua

SEQ ID NO: 927350 - RNA, 22 nt, Human
ucuucuuaugugccauuaucuc

SEQ ID NO: 927351 - RNA, 22 nt, Human
uugcaauuaacauaugucaacu

SEQ ID NO: 927352 - RNA, 22 nt, Human
uucagaaggugcagccugggcc

SEQ ID NO: 927353 - RNA, 19 nt, Human
uuucuaguuucagcuuguc

SEQ ID NO: 927354 - RNA, 22 nt, Human
gcaggaguuaaaauauguaaug

SEQ ID NO: 927355 - RNA, 22 nt, Human
uuaaacaccugucuaguguagc

SEQ ID NO: 927356 - RNA, 22 nt, Human
uucaaaucccugcuccacuauu

SEQ ID NO: 927357 - RNA, 22 nt, Human
acuuucuaaaauugcuagcacu

SEQ ID NO: 927358 - RNA, 22 nt, Human
caggcugcuccaggguaggaaa

SEQ ID NO: 927359 - RNA, 22 nt, Human
uuucaagugacuaugguuuuug

SEQ ID NO: 927360 - RNA, 22 nt, Human
uuuuaugugcuggacuggcagu

SEQ ID NO: 927361 - RNA, 22 nt, Human
cuggcaggagcauucacagagg

SEQ ID NO: 927362 - RNA, 17 nt, Human
uauauguaugccucucc

SEQ ID NO: 927363 - RNA, 22 nt, Human
auguuugacugaguuuggcaga

SEQ ID NO: 927364 - RNA, 22 nt, Human
caucuugcuguuauguuuaugu

SEQ ID NO: 927365 - RNA, 22 nt, Human
gccuggagcccaguguggggcu

SEQ ID NO: 927366 - RNA, 22 nt, Human
gacuggagauaaaaccaugagu

SEQ ID NO: 927367 - RNA, 22 nt, Human
ugcucugucaagaaaagaugcc

SEQ ID NO: 927368 - RNA, 22 nt, Human
cucccagaaaauucucagacaa

SEQ ID NO: 927369 - RNA, 22 nt, Human
uuggcaaaauuuaaagaaguga

SEQ ID NO: 927370 - RNA, 22 nt, Human
acaguucuuuguuuauagcuug

SEQ ID NO: 927371 - RNA, 22 nt, Human
ccuucaaauucucuuagcugaa

SEQ ID NO: 927372 - RNA, 22 nt, Human
aaauucuaugucaauguuuauu

SEQ ID NO: 927373 - RNA, 22 nt, Human
agccuugcagaauaauuugaag

SEQ ID NO: 927374 - RNA, 22 nt, Human
uggcugucagucgccugcauuc

SEQ ID NO: 927375 - RNA, 22 nt, Human
ugaccuccaauaccuuucuucc

SEQ ID NO: 927376 - RNA, 20 nt, Human
acugugaaugcugaauuagc

SEQ ID NO: 927377 - RNA, 22 nt, Human
acaguacagcugaaacuuuagu

SEQ ID NO: 927378 - RNA, 22 nt, Human
gggagcugccuuagaccggagg

SEQ ID NO: 927379 - RNA, 22 nt, Human
gccagcauccugguggugguug

SEQ ID NO: 927380 - RNA, 22 nt, Human
uucuacagugacugcagccaua

SEQ ID NO: 927381 - RNA, 22 nt, Human
uacauugcuuucuaauacaucu

SEQ ID NO: 927382 - RNA, 22 nt, Human
uuucaggagagaccagaaauga

SEQ ID NO: 927383 - RNA, 22 nt, Human
ugcuaaauucauuauugauuua

SEQ ID NO: 927384 - RNA, 20 nt, Human
uauuggaucuaagaaauggg

SEQ ID NO: 927385 - RNA, 22 nt, Human
ugacacaaacaagauauuugcc

SEQ ID NO: 927386 - RNA, 21 nt, Human
ggaauugcaggcugucuuuug

SEQ ID NO: 927387 - RNA, 19 nt, Human
agcaccugugagagccugg

SEQ ID NO: 927388 - RNA, 23 nt, Human
gcugcagcuguggauguucucag

SEQ ID NO: 927389 - RNA, 22 nt, Human
uuucaauuccaccaaagcgccc

SEQ ID NO: 927390 - RNA, 22 nt, Human
uacagagauacucuagaucaaa

SEQ ID NO: 927391 - RNA, 22 nt, Human
uuuggcucugcgucuucaccca

SEQ ID NO: 927392 - RNA, 22 nt, Human
gcuccucccugugcagacccag

SEQ ID NO: 927393 - RNA, 22 nt, Human
ggcuggccucuacagggaggca

SEQ ID NO: 927394 - RNA, 22 nt, Human
gcuggagcugcagccugggccu

SEQ ID NO: 927395 - RNA, 22 nt, Human
gugggccuugcagggugcaggg

SEQ ID NO: 927396 - RNA, 22 nt, Human
cagcaggguuaagugacucacc

SEQ ID NO: 927397 - RNA, 22 nt, Human
agaacucuaggauuggcuggau

SEQ ID NO: 927398 - RNA, 18 nt, Human
uucacaggaaaugucuuu

SEQ ID NO: 927399 - RNA, 21 nt, Human
ccuuuagauuucuaugcaguu

SEQ ID NO: 927400 - RNA, 22 nt, Human
cuggagugaagcuuauuuuuca

SEQ ID NO: 927401 - RNA, 22 nt, Human
aauguucagugccuuuaaacau

SEQ ID NO: 927402 - RNA, 22 nt, Human
ugguccugccccgugcacagag

SEQ ID NO: 927403 - RNA, 18 nt, Human
ucuuuguuuccuucuugc

SEQ ID NO: 927404 - RNA, 22 nt, Human
aagauucuugacuagaaugauu

SEQ ID NO: 927405 - RNA, 22 nt, Human
guggccauuuggaaggcaagua

SEQ ID NO: 927406 - RNA, 22 nt, Human
auggacagacacuggccuucug

SEQ ID NO: 927407 - RNA, 22 nt, Human
ggcuccaguuuccccuuggggc

SEQ ID NO: 927408 - RNA, 22 nt, Human
gcugcccagcaggccccagggg

SEQ ID NO: 927409 - RNA, 21 nt, Human
uggggaggggaccugauuaug

SEQ ID NO: 927410 - RNA, 22 nt, Human
ccagcugugccguguggauagc

SEQ ID NO: 927411 - RNA, 22 nt, Human
ccugcugucccucugggcucca

SEQ ID NO: 927412 - RNA, 22 nt, Human
caccccagucuaaaaccagccu

SEQ ID NO: 927413 - RNA, 22 nt, Human
aaugguuuuugcauauucaggu

SEQ ID NO: 927414 - RNA, 22 nt, Human
ucuuuauguuuacuccagcuga

SEQ ID NO: 927415 - RNA, 22 nt, Human
uguccauaccuuuaccugugua

SEQ ID NO: 927416 - RNA, 22 nt, Human
auaaagcaagcauaccauuaag

SEQ ID NO: 927417 - RNA, 22 nt, Human
augauuuucugauaaagaacug

SEQ ID NO: 927418 - RNA, 22 nt, Human
agggggugcccagaugaaggau

SEQ ID NO: 927419 - RNA, 22 nt, Human
auagcuguuuuuaggccaaaua

SEQ ID NO: 927420 - RNA, 22 nt, Human
gaguccagcagaaugagccaag

SEQ ID NO: 927421 - RNA, 22 nt, Human
cacagugaccucuuuaaaaggg

SEQ ID NO: 927422 - RNA, 22 nt, Human
aaguuucauuguucauguaaca

SEQ ID NO: 927423 - RNA, 22 nt, Human
uggcugagagucauccugugug

SEQ ID NO: 927424 - RNA, 22 nt, Human
aggcagaggaaggguggauuug

SEQ ID NO: 927425 - RNA, 22 nt, Human
ucaaacuugguaagagaaauac

SEQ ID NO: 927426 - RNA, 17 nt, Human
uguccauuugccuggag

SEQ ID NO: 927427 - RNA, 22 nt, Human
ucugaaauaggcuucuuuuggu

SEQ ID NO: 927428 - RNA, 22 nt, Human
ucuguguugagaaggaucauga

SEQ ID NO: 927429 - RNA, 22 nt, Human
ucccugugggcagaggcugccu

SEQ ID NO: 927430 - RNA, 22 nt, Human
ggcccagcugggcggggacacg

SEQ ID NO: 927431 - RNA, 21 nt, Human
acuugaaguuggaguuucugu

SEQ ID NO: 927432 - RNA, 22 nt, Human
ucucaggaucuaauacauggua

SEQ ID NO: 927433 - RNA, 22 nt, Human
agaggcacagaggcaguccccu

SEQ ID NO: 927434 - RNA, 22 nt, Human
ccaggguguagggauuccagau

SEQ ID NO: 927435 - RNA, 22 nt, Human
ucccugugacaagucugaguuc

SEQ ID NO: 927436 - RNA, 22 nt, Human
auguguguaugugccuauaucu

SEQ ID NO: 927437 - RNA, 22 nt, Human
aaugggauaauagaaguagaau

SEQ ID NO: 927438 - RNA, 22 nt, Human
ccugucacuguugcagccagcu

SEQ ID NO: 927439 - RNA, 22 nt, Human
gaaccacaagauucaaaggggu

SEQ ID NO: 927440 - RNA, 22 nt, Human
guuaaugucuuccuauucuaca

SEQ ID NO: 927441 - RNA, 22 nt, Human
gaaacuuuggcuaaaagccaga

SEQ ID NO: 927442 - RNA, 22 nt, Human
acugggacuguaugugcuggac

SEQ ID NO: 927443 - RNA, 22 nt, Human
acagacauuuuaagacacuuua

SEQ ID NO: 927444 - RNA, 21 nt, Human
ugacagcauagagcagggagg

SEQ ID NO: 927445 - RNA, 22 nt, Human
aaccugaaacuacauucuugau

SEQ ID NO: 927446 - RNA, 22 nt, Human
aagagauguugaaguuuauuag

SEQ ID NO: 927447 - RNA, 18 nt, Human
auuaaggaauucuuuaga

SEQ ID NO: 927448 - RNA, 22 nt, Human
gaaauaauuuagaagguauucc

SEQ ID NO: 927449 - RNA, 21 nt, Human
acagggcuucagggaggguua

SEQ ID NO: 927450 - RNA, 22 nt, Human
cagacuuuugacauuaauacag

SEQ ID NO: 927451 - RNA, 22 nt, Human
gaggcugcaggcaaugcugccc

SEQ ID NO: 927452 - RNA, 22 nt, Human
gagacacaggcacagaagaggc

SEQ ID NO: 927453 - RNA, 22 nt, Human
ggcaguguggccugaguaaguc

SEQ ID NO: 927454 - RNA, 22 nt, Human
cuguccauuuucgugccuccuu

SEQ ID NO: 927455 - RNA, 22 nt, Human
acugccuguagcccugagaugu

SEQ ID NO: 927456 - RNA, 22 nt, Human
gagaggcugacuggcuguccug

SEQ ID NO: 927457 - RNA, 22 nt, Human
uaaaggcuuuuagugaugguaa

SEQ ID NO: 927458 - RNA, 22 nt, Human
uuccucagagggcgcuggggaa

SEQ ID NO: 927459 - RNA, 22 nt, Human
gguucagggcuaccagugggug

SEQ ID NO: 927460 - RNA, 22 nt, Human
aaagauuccuuuauucuccaag

SEQ ID NO: 927461 - RNA, 22 nt, Human
uagaaccuccacaggaccucca

SEQ ID NO: 927462 - RNA, 22 nt, Human
ccuggggaaucuugcaggggaa

SEQ ID NO: 927463 - RNA, 19 nt, Human
gcagagugggguggagggu

SEQ ID NO: 927464 - RNA, 22 nt, Human
agggaagcuuguuacugagaag

SEQ ID NO: 927465 - RNA, 22 nt, Human
acaguggaauuuguagaugugu

SEQ ID NO: 927466 - RNA, 22 nt, Human
aguggaggcacuaauuggauuu

SEQ ID NO: 927467 - RNA, 22 nt, Human
caaaggcucaguaaaucuuugu

SEQ ID NO: 927468 - RNA, 22 nt, Human
aggaggggcaaugauagucugg

SEQ ID NO: 927469 - RNA, 22 nt, Human
agggcucucuuggacaacugcu

SEQ ID NO: 927470 - RNA, 22 nt, Human
uggcuucugucccugcuacauu

SEQ ID NO: 927471 - RNA, 22 nt, Human
uaaguucucagaagauuuugua

SEQ ID NO: 927472 - RNA, 22 nt, Human
uucucuaaacauauuggaucug

SEQ ID NO: 927473 - RNA, 18 nt, Human
uagauuaaaauugaauuc

SEQ ID NO: 927474 - RNA, 22 nt, Human
ucucccaggugggugccuggag

SEQ ID NO: 927475 - RNA, 18 nt, Human
aguugcuuauucugugca

SEQ ID NO: 927476 - RNA, 22 nt, Human
ucagugucacaggaugcuaugc

SEQ ID NO: 927477 - RNA, 22 nt, Human
uuagcaauugauucucauaagc

SEQ ID NO: 927478 - RNA, 22 nt, Human
ucaguuuuguauguuguaaguc

SEQ ID NO: 927479 - RNA, 22 nt, Human
aacuacagcucuugucuuucug

SEQ ID NO: 927480 - RNA, 22 nt, Human
ggcaagaaggcuucagguagcu

SEQ ID NO: 927481 - RNA, 19 nt, Human
agcaaauauaauaguguuc

SEQ ID NO: 927482 - RNA, 22 nt, Human
ugugaaaagggcuuuguacaaa

SEQ ID NO: 927483 - RNA, 22 nt, Human
cuccccaccuucgcggucccug

SEQ ID NO: 927484 - RNA, 19 nt, Human
uggcagcauugguaccuug

SEQ ID NO: 927485 - RNA, 22 nt, Human
auucagaauuuuggggagcuaa

SEQ ID NO: 927486 - RNA, 22 nt, Human
aguuauauuccauagauucaga

SEQ ID NO: 927487 - RNA, 22 nt, Human
uuacccagugugguuuauagca

SEQ ID NO: 927488 - RNA, 22 nt, Human
gugugccacugccugaggaccc

SEQ ID NO: 927489 - RNA, 22 nt, Human
ccaugccccaauacaggacacc

SEQ ID NO: 927490 - RNA, 22 nt, Human
cuucuucaucuguaaaacuugg

SEQ ID NO: 927491 - RNA, 22 nt, Human
auccagagagguuaggugacau

SEQ ID NO: 927492 - RNA, 22 nt, Human
cacccacugagcucauguccca

SEQ ID NO: 927493 - RNA, 20 nt, Human
ccagaggguagggccgcccc

SEQ ID NO: 927494 - RNA, 22 nt, Human
uaaauuuacccaaggaacaugu

SEQ ID NO: 927495 - RNA, 17 nt, Human
gucugggcuuuagagac

SEQ ID NO: 927496 - RNA, 22 nt, Human
uguaauauaagcauuaauaguu

SEQ ID NO: 927497 - RNA, 22 nt, Human
cccuggggcugagggauggccg

SEQ ID NO: 927498 - RNA, 22 nt, Human
ggcagcaagguggcggaaauga

SEQ ID NO: 927499 - RNA, 22 nt, Human
gcagccaccucccauggcgggg

SEQ ID NO: 927500 - RNA, 22 nt, Human
cacgccagccggacacugggcc

SEQ ID NO: 927501 - RNA, 22 nt, Human
uuuggaaacaucucagaaaaua

SEQ ID NO: 927502 - RNA, 22 nt, Human
uguacuuaugagauccuagucg

SEQ ID NO: 927503 - RNA, 22 nt, Human
ggcaagugugagaagggacugg

SEQ ID NO: 927504 - RNA, 22 nt, Human
cccugggcagucugcacuucag

SEQ ID NO: 927505 - RNA, 22 nt, Human
agcugccaggccccugagaacc

SEQ ID NO: 927506 - RNA, 22 nt, Human
agaaccuucagauuaggaggug

SEQ ID NO: 927507 - RNA, 22 nt, Human
auacacauauauacacguuuaa

SEQ ID NO: 927508 - RNA, 22 nt, Human
uggcucaguuaggucagaaaca

SEQ ID NO: 927509 - RNA, 22 nt, Human
cagucacuuacaaaaauauaau

SEQ ID NO: 927510 - RNA, 23 nt, Human
aggcagugggggccacuuugcuu

SEQ ID NO: 927511 - RNA, 22 nt, Human
uaaucucucuaaguuuccauuu

SEQ ID NO: 927512 - RNA, 22 nt, Human
agcagcuuagggaauucucccu

SEQ ID NO: 927513 - RNA, 22 nt, Human
caucuuugaacucuguauaaac

SEQ ID NO: 927514 - RNA, 22 nt, Human
uaauguguugaauauuuguaca

SEQ ID NO: 927515 - RNA, 22 nt, Human
cuuggcuuuagaacaugggagc

SEQ ID NO: 927516 - RNA, 22 nt, Human
uagggcaggggaggaaucugaa

SEQ ID NO: 927517 - RNA, 22 nt, Human
uggcagcacuugaacuugagcc

SEQ ID NO: 927518 - RNA, 22 nt, Human
gagccuggacaucucaggccca

SEQ ID NO: 927519 - RNA, 22 nt, Human
gaauacauguuguuucccugga

SEQ ID NO: 927520 - RNA, 22 nt, Human
cauuuguacuguucaaugucau

SEQ ID NO: 927521 - RNA, 22 nt, Human
cugcuguguuucacaccucugg

SEQ ID NO: 927522 - RNA, 22 nt, Human
uaagaaacuuaacugggaacua

SEQ ID NO: 927523 - RNA, 22 nt, Human
cucuuucuggaaggcagagugg

SEQ ID NO: 927524 - RNA, 22 nt, Human
ccuccagguguuacauaugacu

SEQ ID NO: 927525 - RNA, 19 nt, Human
aucuaagagaugggggaaa

SEQ ID NO: 927526 - RNA, 22 nt, Human
uggcuggcuagugggcaggauu

SEQ ID NO: 927527 - RNA, 22 nt, Human
cuucaugguaaaucugccuuua

SEQ ID NO: 927528 - RNA, 22 nt, Human
agauuucuguggucauguaaug

SEQ ID NO: 927529 - RNA, 22 nt, Human
ugugaaaucugaacucaaagau

SEQ ID NO: 927530 - RNA, 22 nt, Human
ucuguacacuucagcaugcauc

SEQ ID NO: 927531 - RNA, 22 nt, Human
gagccagccuucuucugagguc

SEQ ID NO: 927532 - RNA, 22 nt, Human
gccugcugccacccuggcuccg

SEQ ID NO: 927533 - RNA, 22 nt, Human
gaggcugaauggccagaagcca

SEQ ID NO: 927534 - RNA, 22 nt, Human
auaacacuaaauguauguaaca

SEQ ID NO: 927535 - RNA, 22 nt, Human
ugaagacagggucuuuaacgag

SEQ ID NO: 927536 - RNA, 22 nt, Human
aagguaaucagccuuuccacaa

SEQ ID NO: 927537 - RNA, 20 nt, Human
gcauugaguauagacagaug

SEQ ID NO: 927538 - RNA, 22 nt, Human
aggcaggagcaagcccuacaag

SEQ ID NO: 927539 - RNA, 22 nt, Human
cugccagcuggagaccaaggaa

SEQ ID NO: 927540 - RNA, 22 nt, Human
caugggggcugaggcugcugua

SEQ ID NO: 927541 - RNA, 22 nt, Human
ucucagggccucccucuguuuc

SEQ ID NO: 927542 - RNA, 22 nt, Human
agaauuagguaaguucaucuga

SEQ ID NO: 927543 - RNA, 22 nt, Human
caagugugacuauuuuuucaua

SEQ ID NO: 927544 - RNA, 22 nt, Human
aaccaugaauggguucuggugu

SEQ ID NO: 927545 - RNA, 22 nt, Human
uacauuuauaaggcuucucugu

SEQ ID NO: 927546 - RNA, 22 nt, Human
aaagcaagaugcauccgucaag

SEQ ID NO: 927547 - RNA, 22 nt, Human
aacaaaggccguuaauaaccac

SEQ ID NO: 927548 - RNA, 22 nt, Human
ccugcugguuuuuacaaagaug

SEQ ID NO: 927549 - RNA, 22 nt, Human
ggccccaguucacuccuggccg

SEQ ID NO: 927550 - RNA, 22 nt, Human
ccucaagaacaauccaccauua

SEQ ID NO: 927551 - RNA, 22 nt, Human
ugggcugcccugaugguccuca

SEQ ID NO: 927552 - RNA, 22 nt, Human
acccucuggcucauuuccuagu

SEQ ID NO: 927553 - RNA, 22 nt, Human
uggcagacacugucgaagccua

SEQ ID NO: 927554 - RNA, 22 nt, Human
aaaagcauuacaugguacguau

SEQ ID NO: 927555 - RNA, 22 nt, Human
aagagagggguugcauggaaau

SEQ ID NO: 927556 - RNA, 22 nt, Human
gagacaaaaguuggagugcaag

SEQ ID NO: 927557 - RNA, 22 nt, Human
ugcagcaggcacaggacggaag

SEQ ID NO: 927558 - RNA, 22 nt, Human
auucagugucuugaucugggaa

SEQ ID NO: 927559 - RNA, 22 nt, Human
cugccaggcgauggauuggcug

SEQ ID NO: 927560 - RNA, 22 nt, Human
gaaggcaagugcuccuuggguc

SEQ ID NO: 927561 - RNA, 17 nt, Human
gcucccugaggacagcu

SEQ ID NO: 927562 - RNA, 22 nt, Human
gagcugcaugcaacucgaaaau

SEQ ID NO: 927563 - RNA, 22 nt, Human
uauauuaaacccucucuguagg

SEQ ID NO: 927564 - RNA, 22 nt, Human
cuguuauuccccuugcuguggu

SEQ ID NO: 927565 - RNA, 20 nt, Human
uucagagauagggucuuuaa

SEQ ID NO: 927566 - RNA, 22 nt, Human
uaaauacagucauuugagccau

SEQ ID NO: 927567 - RNA, 22 nt, Human
auaaagcaauagauuguguaau

SEQ ID NO: 927568 - RNA, 22 nt, Human
agaacacucuccugaaaauuaa

SEQ ID NO: 927569 - RNA, 22 nt, Human
ugcagaagcagagaguugccaa

SEQ ID NO: 927570 - RNA, 22 nt, Human
gugugcaugaggauaggaauaa

SEQ ID NO: 927571 - RNA, 22 nt, Human
uaauuuugcugugaccauugaa

SEQ ID NO: 927572 - RNA, 21 nt, Human
acauggacugugaauggggac

SEQ ID NO: 927573 - RNA, 22 nt, Human
ggcaggugaccuggccucccag

SEQ ID NO: 927574 - RNA, 22 nt, Human
guuuacaugcagaaaaucaaug

SEQ ID NO: 927575 - RNA, 22 nt, Human
acauuaaagaguaagguuaguu

SEQ ID NO: 927576 - RNA, 23 nt, Human
agcugaggugcagauccaaagaa

SEQ ID NO: 927577 - RNA, 22 nt, Human
ugaguucaaguccaaguugcug

SEQ ID NO: 927578 - RNA, 22 nt, Human
cuagccugggauuugaacuuau

SEQ ID NO: 927579 - RNA, 22 nt, Human
ugcucaguccuaccuuggcucc

SEQ ID NO: 927580 - RNA, 20 nt, Human
agcugcccuuuucacauguu

SEQ ID NO: 927581 - RNA, 22 nt, Human
aaaugcagguucuugagccaag

SEQ ID NO: 927582 - RNA, 23 nt, Human
ugucuuaucuagcuucuagaggc

SEQ ID NO: 927583 - RNA, 23 nt, Human
aaggccagaauuucaauggugcc

SEQ ID NO: 927584 - RNA, 22 nt, Human
ccaaagugauaugugcuguaag

SEQ ID NO: 927585 - RNA, 22 nt, Human
gugccucccggggcucuuccuu

SEQ ID NO: 927586 - RNA, 22 nt, Human
caagugagugaccagaguuggu

SEQ ID NO: 927587 - RNA, 22 nt, Human
guuuccugaaguuauuucaucc

SEQ ID NO: 927588 - RNA, 22 nt, Human
acaguaggaauagauguagaua

SEQ ID NO: 927589 - RNA, 22 nt, Human
gcagcugccgugagcucacgcc

SEQ ID NO: 927590 - RNA, 22 nt, Human
gacccagcuuaagucacauguu

SEQ ID NO: 927591 - RNA, 22 nt, Human
uuugaagaccuuaucucuaaau

SEQ ID NO: 927592 - RNA, 17 nt, Human
cucuggggacaguucua

SEQ ID NO: 927593 - RNA, 22 nt, Human
aagugcuuuauaaacaaugaag

SEQ ID NO: 927594 - RNA, 22 nt, Human
cccugauggccuaucuggcagu

SEQ ID NO: 927595 - RNA, 22 nt, Human
ucaugaaaaauuuuccauguca

SEQ ID NO: 927596 - RNA, 22 nt, Human
agucugggaggcuuauaaacag

SEQ ID NO: 927597 - RNA, 22 nt, Human
acucaucagccucuaggaaaga

SEQ ID NO: 927598 - RNA, 22 nt, Human
gccuggaguacuccuugaagug

SEQ ID NO: 927599 - RNA, 22 nt, Human
accagggcaaauguuuguacuc

SEQ ID NO: 927600 - RNA, 22 nt, Human
aaacaguaaguucuaguauuau

SEQ ID NO: 927601 - RNA, 22 nt, Human
gaggccacggaagggagcugug

SEQ ID NO: 927602 - RNA, 22 nt, Human
guauuauuaaguguauuugacc

SEQ ID NO: 927603 - RNA, 20 nt, Human
ggaauugcuuuccugucuuu

SEQ ID NO: 927604 - RNA, 22 nt, Human
gaaguuuauggugcuuguaagg

SEQ ID NO: 927605 - RNA, 22 nt, Human
ucaucugugaauaaugaacugg

SEQ ID NO: 927606 - RNA, 22 nt, Human
ucccccuccaauugccauguua

SEQ ID NO: 927607 - RNA, 22 nt, Human
ugguuagaggcuucuugcuugg

SEQ ID NO: 927608 - RNA, 22 nt, Human
ucuguccaggucagccuacauu

SEQ ID NO: 927609 - RNA, 23 nt, Human
uauuuuccaaaugaugacuacau

SEQ ID NO: 927610 - RNA, 20 nt, Human
ugauucuggucuacgcuuua

SEQ ID NO: 927611 - RNA, 22 nt, Human
uuggauucuguuaggcaccuuc

SEQ ID NO: 927612 - RNA, 22 nt, Human
aggccagggccagauuagccac

SEQ ID NO: 927613 - RNA, 22 nt, Human
ucuucauguauacucaugguac

SEQ ID NO: 927614 - RNA, 22 nt, Human
uuccaggagacuuccagaaaua

SEQ ID NO: 927615 - RNA, 22 nt, Human
agagucaaaauuuaccagaaug

SEQ ID NO: 927616 - RNA, 22 nt, Human
aggcuucaccagacucuuaauc

SEQ ID NO: 927617 - RNA, 22 nt, Human
ucagcugugauccaucuaucua

SEQ ID NO: 927618 - RNA, 20 nt, Human
cucaggauacugcaaaguug

SEQ ID NO: 927619 - RNA, 22 nt, Human
ggcuccuguccuccuggagcuc

SEQ ID NO: 927620 - RNA, 22 nt, Human
ucagugcauucauggguggcug

SEQ ID NO: 927621 - RNA, 22 nt, Human
ucuccaggggcugcugugccac

SEQ ID NO: 927622 - RNA, 22 nt, Human
uccugaggugcucagccaggaa

SEQ ID NO: 927623 - RNA, 23 nt, Human
uuuaacauuugaacauguggcca

SEQ ID NO: 927624 - RNA, 20 nt, Human
uguccuaauagacaagcaga

SEQ ID NO: 927625 - RNA, 22 nt, Human
cagacacuuauugagcaaguac

SEQ ID NO: 927626 - RNA, 22 nt, Human
ccaguguguuuuucucugacuc

SEQ ID NO: 927627 - RNA, 22 nt, Human
uuaccuguaaaacugcgauaua

SEQ ID NO: 927628 - RNA, 22 nt, Human
acauuucugcauguaggguaau

SEQ ID NO: 927629 - RNA, 20 nt, Human
cuuucucuaauuuauaagua

SEQ ID NO: 927630 - RNA, 22 nt, Human
uucaccauguaaaccauguggc

SEQ ID NO: 927631 - RNA, 22 nt, Human
uucuaagucacucagauuuugg

SEQ ID NO: 927632 - RNA, 22 nt, Human
uuguuuuccugggauaccaacc

SEQ ID NO: 927633 - RNA, 22 nt, Human
uguucaaaucuuuugcuuauuu

SEQ ID NO: 927634 - RNA, 22 nt, Human
uaucuauaaguacuaacauggu

SEQ ID NO: 927635 - RNA, 22 nt, Human
caaugcuuuauuuccuccccuu

SEQ ID NO: 927636 - RNA, 22 nt, Human
auauuacacacgguaucacggg

SEQ ID NO: 927637 - RNA, 22 nt, Human
uggcugcuuaaaauugcugcaa

SEQ ID NO: 927638 - RNA, 22 nt, Human
accaggccaaaaucauauuuac

SEQ ID NO: 927639 - RNA, 22 nt, Human
agagcagagggcucugggacaa

SEQ ID NO: 927640 - RNA, 22 nt, Human
gcacagaaaugucuacacaugu

SEQ ID NO: 927641 - RNA, 22 nt, Human
agcuaggagauuuugugaggcu

SEQ ID NO: 927642 - RNA, 22 nt, Human
ggcagguguggaguguuauuuu

SEQ ID NO: 927643 - RNA, 22 nt, Human
ggcacaauugcagcaauaaaca

SEQ ID NO: 927644 - RNA, 22 nt, Human
ucaggagacuggcagugcccac

SEQ ID NO: 927645 - RNA, 22 nt, Human
caccaucugguaggcauuagug

SEQ ID NO: 927646 - RNA, 19 nt, Human
ccugcugcaccacuuguua

SEQ ID NO: 927647 - RNA, 22 nt, Human
aucugcuggcaucucuagccca

SEQ ID NO: 927648 - RNA, 22 nt, Human
uuugucauauugaaggugcuua

SEQ ID NO: 927649 - RNA, 23 nt, Human
uccuuccuuugagaggcuccauc

SEQ ID NO: 927650 - RNA, 22 nt, Human
ccagaaaauauggcuaagguga

SEQ ID NO: 927651 - RNA, 22 nt, Human
ggagcuggcccucugaguuugu

SEQ ID NO: 927652 - RNA, 22 nt, Human
gaaaaguucaucauauauucag

SEQ ID NO: 927653 - RNA, 19 nt, Human
auuucaagagguuuauugg

SEQ ID NO: 927654 - RNA, 22 nt, Human
gaguuauauuugcgauauugga

SEQ ID NO: 927655 - RNA, 22 nt, Human
caucugucuuuuguuacaaggc

SEQ ID NO: 927656 - RNA, 22 nt, Human
cacaguaacuccugaccccucg

SEQ ID NO: 927657 - RNA, 22 nt, Human
cccuuccuccucgccugucaga

SEQ ID NO: 927658 - RNA, 22 nt, Human
ucugggugucacuccugccugc

SEQ ID NO: 927659 - RNA, 22 nt, Human
agaaaacugggaggagagcuuc

SEQ ID NO: 927660 - RNA, 22 nt, Human
acuguggcaaaagaacauugga

SEQ ID NO: 927661 - RNA, 22 nt, Human
ugcagcugcucuucauuucccc

SEQ ID NO: 927662 - RNA, 22 nt, Human
guuauuuucauuggcucagacu

SEQ ID NO: 927663 - RNA, 22 nt, Human
uaaacaagaaacauuuucuguu

SEQ ID NO: 927664 - RNA, 18 nt, Human
cugccugcucuccagcuu

SEQ ID NO: 927665 - RNA, 19 nt, Human
agacaaguuuccagaagcc

SEQ ID NO: 927666 - RNA, 22 nt, Human
uaaagcagccagggucuaagcc

SEQ ID NO: 927667 - RNA, 22 nt, Human
uauuccaaugucaguuauauca

SEQ ID NO: 927668 - RNA, 19 nt, Human
ggcucuggcggcuguagcc

SEQ ID NO: 927669 - RNA, 22 nt, Human
gagagcaauggggacgggcagg

SEQ ID NO: 927670 - RNA, 22 nt, Human
gccaagcuguuuuucagagacg

SEQ ID NO: 927671 - RNA, 22 nt, Human
uggcaguucaggcugcaaucau

SEQ ID NO: 927672 - RNA, 22 nt, Human
gaacaucugugaucucuuuggg

SEQ ID NO: 927673 - RNA, 16 nt, Human
ucacacauuuguuggu

SEQ ID NO: 927674 - RNA, 19 nt, Human
ucagaacucagaaugugua

SEQ ID NO: 927675 - RNA, 22 nt, Human
ggccacagcaaugcugugaugu

SEQ ID NO: 927676 - RNA, 22 nt, Human
aaugccaauauucauuuguguu

SEQ ID NO: 927677 - RNA, 22 nt, Human
ucagacaucucauaauguauua

SEQ ID NO: 927678 - RNA, 22 nt, Human
augcauuguaacgaugugcaca

SEQ ID NO: 927679 - RNA, 22 nt, Human
agacaauggaccaagcaccuuc

SEQ ID NO: 927680 - RNA, 22 nt, Human
ucugagaguacgggcugcgcgc

SEQ ID NO: 927681 - RNA, 22 nt, Human
cugagguagggacgugccguag

SEQ ID NO: 927682 - RNA, 22 nt, Human
ugaagccagggacugacacuuc

SEQ ID NO: 927683 - RNA, 22 nt, Human
gggagaaguggaaaucucauua

SEQ ID NO: 927684 - RNA, 22 nt, Human
ugcuccaggcugcugaagaucu

SEQ ID NO: 927685 - RNA, 22 nt, Human
ucgaaauaauuuagaauauaga

SEQ ID NO: 927686 - RNA, 22 nt, Human
gcagggaagggaaacagagacc

SEQ ID NO: 927687 - RNA, 22 nt, Human
aacauugaaauauuugcaauag

SEQ ID NO: 927688 - RNA, 22 nt, Human
auaagauugucauaguauggac

SEQ ID NO: 927689 - RNA, 22 nt, Human
cagauagcaaauggguaagcua

SEQ ID NO: 927690 - RNA, 22 nt, Human
uugcugaagaaaaaauauguua

SEQ ID NO: 927691 - RNA, 22 nt, Human
ugacacaguugucgacucuaca

SEQ ID NO: 927692 - RNA, 22 nt, Human
uuuuguaugagaagugcuuuac

SEQ ID NO: 927693 - RNA, 22 nt, Human
cugcugagacuggcuuuguguc

SEQ ID NO: 927694 - RNA, 22 nt, Human
aggugccaccucuggugcuguc

SEQ ID NO: 927695 - RNA, 22 nt, Human
agcaccugccugcauuggcuau

SEQ ID NO: 927696 - RNA, 22 nt, Human
agguggcagagcuggcccagcg

SEQ ID NO: 927697 - RNA, 22 nt, Human
ucaggccccuugucagcucugu

SEQ ID NO: 927698 - RNA, 17 nt, Human
uggaaggcuucaauauu

SEQ ID NO: 927699 - RNA, 22 nt, Human
ugcuggcaucuuaauguucugu

SEQ ID NO: 927700 - RNA, 22 nt, Human
uaucuuaaaaaucgaagcagau

SEQ ID NO: 927701 - RNA, 22 nt, Human
uccuggcccgaucccugugaag

SEQ ID NO: 927702 - RNA, 22 nt, Human
ugcuuauuuauagucaauagag

SEQ ID NO: 927703 - RNA, 22 nt, Human
cuguggugagcaacugacugaa

SEQ ID NO: 927704 - RNA, 22 nt, Human
cuguacaucuuaaauggaaaaa

SEQ ID NO: 927705 - RNA, 22 nt, Human
aauguguagcauuuaaugcagu

SEQ ID NO: 927706 - RNA, 22 nt, Human
aggggugauuugggacaggaca

SEQ ID NO: 927707 - RNA, 22 nt, Human
agacacaggauucugcauuucu

SEQ ID NO: 927708 - RNA, 22 nt, Human
cucauucauucccgcagccacc

SEQ ID NO: 927709 - RNA, 22 nt, Human
gaacuacaggugcagcaaguga

SEQ ID NO: 927710 - RNA, 22 nt, Human
cucugccauuuaucagaacugu

SEQ ID NO: 927711 - RNA, 22 nt, Human
aaugucuagaguuuuaagcuua

SEQ ID NO: 927712 - RNA, 22 nt, Human
uuuuaguuuggauuucuaaagc

SEQ ID NO: 927713 - RNA, 20 nt, Human
uuggucagugguucaguuug

SEQ ID NO: 927714 - RNA, 22 nt, Human
caacaguguugcaaucugaaaa

SEQ ID NO: 927715 - RNA, 19 nt, Human
ugucccagacuccgugucu

SEQ ID NO: 927716 - RNA, 22 nt, Human
ggggugggguuacucauugugc

SEQ ID NO: 927717 - RNA, 21 nt, Human
ggaggaaaaaggaaugacuug

SEQ ID NO: 927718 - RNA, 22 nt, Human
guuuccuauggcugcugcagga

SEQ ID NO: 927719 - RNA, 22 nt, Human
ucuuucuuauuagccauuguuc

SEQ ID NO: 927720 - RNA, 23 nt, Human
agaagcugggagccuggggaugg

SEQ ID NO: 927721 - RNA, 22 nt, Human
caguaauagauuugagaguggu

SEQ ID NO: 927722 - RNA, 22 nt, Human
ucugugggugccuccagcagug

SEQ ID NO: 927723 - RNA, 22 nt, Human
ugcagcugaugauacccccaug

SEQ ID NO: 927724 - RNA, 22 nt, Human
gaaaggcaucuucagucucuga

SEQ ID NO: 927725 - RNA, 22 nt, Human
uuuaaauuuguguuuagagggu

SEQ ID NO: 927726 - RNA, 22 nt, Human
ggcaggcugcuugggucauguc

SEQ ID NO: 927727 - RNA, 22 nt, Human
cugcccugcucuccgggaucuu

SEQ ID NO: 927728 - RNA, 22 nt, Human
uacaaacuguccagcccagagg

SEQ ID NO: 927729 - RNA, 22 nt, Human
uauguuuuuaagagaaugcauu

SEQ ID NO: 927730 - RNA, 22 nt, Human
ccugcucuaaaucucauggaac

SEQ ID NO: 927731 - RNA, 22 nt, Human
ucagccaguuaagucaagaaau

SEQ ID NO: 927732 - RNA, 22 nt, Human
aggcuggugcuuccuagggcag

SEQ ID NO: 927733 - RNA, 23 nt, Human
ugacacaggucaaaaauaagaug

SEQ ID NO: 927734 - RNA, 22 nt, Human
ugagguagguaccauuaucacu

SEQ ID NO: 927735 - RNA, 22 nt, Human
uugcuuuuaaucuuuguacauc

SEQ ID NO: 927736 - RNA, 22 nt, Human
gcaggcagagagggguuuccag

SEQ ID NO: 927737 - RNA, 22 nt, Human
caguccugaggaagagcugcug

SEQ ID NO: 927738 - RNA, 20 nt, Human
uggggccuguuucugugguu

SEQ ID NO: 927739 - RNA, 19 nt, Human
ucugaaguccagggcauac

SEQ ID NO: 927740 - RNA, 22 nt, Human
cagcagccgagagggggcucug

SEQ ID NO: 927741 - RNA, 22 nt, Human
caucucauuuauuccaacucag

SEQ ID NO: 927742 - RNA, 22 nt, Human
cagccuccugggacacucaccg

SEQ ID NO: 927743 - RNA, 22 nt, Human
aggcccugauccgaauccagau

SEQ ID NO: 927744 - RNA, 22 nt, Human
ucccucagaaauucucucugaa

SEQ ID NO: 927745 - RNA, 22 nt, Human
uguucugcaaugcugccuccuu

SEQ ID NO: 927746 - RNA, 22 nt, Human
guggccaggagaccuugggcau

SEQ ID NO: 927747 - RNA, 22 nt, Human
auguuaugacaagcaugacaga

SEQ ID NO: 927748 - RNA, 22 nt, Human
cacaugaauugaugccaagugc

SEQ ID NO: 927749 - RNA, 22 nt, Human
uggcaaaaugagcaauuacuuu

SEQ ID NO: 927750 - RNA, 22 nt, Human
gaaucuuauccccaguccuuaa

SEQ ID NO: 927751 - RNA, 22 nt, Human
uggcauccagauacccugaggg

SEQ ID NO: 927752 - RNA, 22 nt, Human
aagcuaggccucaguuuccuga

SEQ ID NO: 927753 - RNA, 22 nt, Human
aaguuuaacuugaauucuuucu

SEQ ID NO: 927754 - RNA, 22 nt, Human
caaauacuuacugaaccugugc

SEQ ID NO: 927755 - RNA, 22 nt, Human
guuguacauaugaggauaaguu

SEQ ID NO: 927756 - RNA, 22 nt, Human
gcagaauucuacagaugauaaa

SEQ ID NO: 927757 - RNA, 23 nt, Human
aaauaccugaauuagauauuauc

SEQ ID NO: 927758 - RNA, 22 nt, Human
uacacaugcauguacuccagga

SEQ ID NO: 927759 - RNA, 22 nt, Human
uagaagauucuaaaguggagag

SEQ ID NO: 927760 - RNA, 22 nt, Human
uauuauuaucuuugaaugggac

SEQ ID NO: 927761 - RNA, 22 nt, Human
ucaauagcauagcaauuaaugu

SEQ ID NO: 927762 - RNA, 22 nt, Human
ccagaccagacugacuugagcc

SEQ ID NO: 927763 - RNA, 22 nt, Human
gcaagcugcucuuauguggagg

SEQ ID NO: 927764 - RNA, 22 nt, Human
ggucagagaaaaguaggguguu

SEQ ID NO: 927765 - RNA, 22 nt, Human
gagggagggccaggucccaacc

SEQ ID NO: 927766 - RNA, 22 nt, Human
gcuguacauucugcacaggccc

SEQ ID NO: 927767 - RNA, 22 nt, Human
cuuaggcaagcagagcccaucc

SEQ ID NO: 927768 - RNA, 22 nt, Human
uaaaagauuuuauaggaacaag

SEQ ID NO: 927769 - RNA, 22 nt, Human
caaugcuugcugacucccuguc

SEQ ID NO: 927770 - RNA, 22 nt, Human
auaagcuuccuguuagaaaccg

SEQ ID NO: 927771 - RNA, 22 nt, Human
uuucugaauaacucuaugauau

SEQ ID NO: 927772 - RNA, 22 nt, Human
cagagccacugucugccaggca

SEQ ID NO: 927773 - RNA, 22 nt, Human
uacagagaacucauagaaagaa

SEQ ID NO: 927774 - RNA, 22 nt, Human
uaaauucuacaacuucaaagau

SEQ ID NO: 927775 - RNA, 22 nt, Human
uuuuauaagcaagaaagggaaa

SEQ ID NO: 927776 - RNA, 18 nt, Human
gagcagcaggaucaagaa

SEQ ID NO: 927777 - RNA, 22 nt, Human
gagaaagggauaauuugaagag

SEQ ID NO: 927778 - RNA, 22 nt, Human
ucacagaauuuuugcuuccagu

SEQ ID NO: 927779 - RNA, 22 nt, Human
ugggagaaagaacccugaguga

SEQ ID NO: 927780 - RNA, 22 nt, Human
cauucacaacugagcauuguug

SEQ ID NO: 927781 - RNA, 22 nt, Human
caggaccccauauucacugaac

SEQ ID NO: 927782 - RNA, 22 nt, Human
guuuaucauuauuauuagcaac

SEQ ID NO: 927783 - RNA, 22 nt, Human
gugugugccaacuuuaugugca

SEQ ID NO: 927784 - RNA, 22 nt, Human
auucaguuacucuagacacuuc

SEQ ID NO: 927785 - RNA, 22 nt, Human
ggaacugagcaauggcaugaaa

SEQ ID NO: 927786 - RNA, 22 nt, Human
ccuggagcuuuuccauccugga

SEQ ID NO: 927787 - RNA, 22 nt, Human
aaugaauugcaguacugacuug

SEQ ID NO: 927788 - RNA, 20 nt, Human
ucuuggcaaaugggaguguc

SEQ ID NO: 927789 - RNA, 22 nt, Human
ugcuggcuuuuugguccuugcu

SEQ ID NO: 927790 - RNA, 23 nt, Human
cugccugcuggggagacagaucu

SEQ ID NO: 927791 - RNA, 22 nt, Human
gagggugguggcuuaaggugcu

SEQ ID NO: 927792 - RNA, 21 nt, Human
uaggccacauggguuggagau

SEQ ID NO: 927793 - RNA, 22 nt, Human
guuucauaugcaguuaacagca

SEQ ID NO: 927794 - RNA, 22 nt, Human
ccccacaggugucugaggcagg

SEQ ID NO: 927795 - RNA, 22 nt, Human
ugugaaaugcuauuuccaugag

SEQ ID NO: 927796 - RNA, 22 nt, Human
ucagaggccugaaagaauuugg

SEQ ID NO: 927797 - RNA, 22 nt, Human
auaucacuagagaaguuguuaa

SEQ ID NO: 927798 - RNA, 22 nt, Human
aacaggaggccuuccaguccag

SEQ ID NO: 927799 - RNA, 20 nt, Human
ucaaagacaagcucucaucc

SEQ ID NO: 927800 - RNA, 22 nt, Human
ugcuggcuggccuggccuggac

SEQ ID NO: 927801 - RNA, 22 nt, Human
agaagugaguugugacuauggg

SEQ ID NO: 927802 - RNA, 22 nt, Human
gggugggacugaagucugaggg

SEQ ID NO: 927803 - RNA, 22 nt, Human
uggcccagacucugcucuuauc

SEQ ID NO: 927804 - RNA, 22 nt, Human
acacagugccaaauugcaguua

SEQ ID NO: 927805 - RNA, 22 nt, Human
gugagacaagauuuguaggcag

SEQ ID NO: 927806 - RNA, 22 nt, Human
cugggccauggaagucucugcc

SEQ ID NO: 927807 - RNA, 22 nt, Human
uuuccuacccuuccaggcagag

SEQ ID NO: 927808 - RNA, 22 nt, Human
ucuagcagggaaagcagagaau

SEQ ID NO: 927809 - RNA, 22 nt, Human
gcaugugucuccccaguggagg

SEQ ID NO: 927810 - RNA, 20 nt, Human
uuggcauuuagacaagaguu

SEQ ID NO: 927811 - RNA, 22 nt, Human
acaugcauaagccuagccauca

SEQ ID NO: 927812 - RNA, 22 nt, Human
augucugucaucuuccaggaag

SEQ ID NO: 927813 - RNA, 22 nt, Human
gccaggagugucccacucauuu

SEQ ID NO: 927814 - RNA, 22 nt, Human
gcccaggauggcuggaggugcu

SEQ ID NO: 927815 - RNA, 22 nt, Human
uggcaaagacugcaaggacuuu

SEQ ID NO: 927816 - RNA, 22 nt, Human
ucaggaaguugaggcguagaga

SEQ ID NO: 927817 - RNA, 22 nt, Human
caggaggcgucuucaguuuguu

SEQ ID NO: 927818 - RNA, 22 nt, Human
uccaaauauuaugauuauagga

SEQ ID NO: 927819 - RNA, 22 nt, Human
aaacugaggaguuagacuaggg

SEQ ID NO: 927820 - RNA, 22 nt, Human
ucaaaggcgguccaggaauaaa

SEQ ID NO: 927821 - RNA, 22 nt, Human
agagggagugaaauggaauaga

SEQ ID NO: 927822 - RNA, 22 nt, Human
cugaaacuuuaguucugcaaca

SEQ ID NO: 927823 - RNA, 22 nt, Human
uuaaagaauagugccccuauug

SEQ ID NO: 927824 - RNA, 22 nt, Human
gaauucugggagagaucugaca

SEQ ID NO: 927825 - RNA, 22 nt, Human
gggcccugaucugugagcgcag

SEQ ID NO: 927826 - RNA, 22 nt, Human
aguuuaggcaggcuccuauggu

SEQ ID NO: 927827 - RNA, 22 nt, Human
ugucucuccacacagccagugc

SEQ ID NO: 927828 - RNA, 22 nt, Human
cagaagcauuccagcaaauagu

SEQ ID NO: 927829 - RNA, 23 nt, Human
aaugaguugggcagcauacaggc

SEQ ID NO: 927830 - RNA, 22 nt, Human
uggccaggaggcugcuucugac

SEQ ID NO: 927831 - RNA, 22 nt, Human
uuccccuugauaaugcaguaag

SEQ ID NO: 927832 - RNA, 22 nt, Human
uguucuagcaacacaguuuugg

SEQ ID NO: 927833 - RNA, 22 nt, Human
ugucuucaggaguaaauaucau

SEQ ID NO: 927834 - RNA, 22 nt, Human
ccuccuggaggcucuagggaaa

SEQ ID NO: 927835 - RNA, 22 nt, Human
ggcccugucugucugcccagcu

SEQ ID NO: 927836 - RNA, 22 nt, Human
accaggaguuuugaccaggggc

SEQ ID NO: 927837 - RNA, 22 nt, Human
gugaaaguaagaaaguaggacu

SEQ ID NO: 927838 - RNA, 19 nt, Human
accuggcuggcgcacuugu

SEQ ID NO: 927839 - RNA, 22 nt, Human
ucaaugcaaucauuggacaagu

SEQ ID NO: 927840 - RNA, 22 nt, Human
ugacaaauacaauaagaucugu

SEQ ID NO: 927841 - RNA, 22 nt, Human
gcuuggccagcagccgggaugc

SEQ ID NO: 927842 - RNA, 22 nt, Human
auaaaaugguaaacgaagcuga

SEQ ID NO: 927843 - RNA, 22 nt, Human
uuauucaccgcaggugcuuccc

SEQ ID NO: 927844 - RNA, 22 nt, Human
uacagauagaauuagugaguua

SEQ ID NO: 927845 - RNA, 22 nt, Human
cugccuucaucucugagcuggg

SEQ ID NO: 927846 - RNA, 22 nt, Human
agcuaagaacuugagcucugga

SEQ ID NO: 927847 - RNA, 22 nt, Human
auguauuugcguauggacauac

SEQ ID NO: 927848 - RNA, 22 nt, Human
guuuacauguacucauuauacu

SEQ ID NO: 927849 - RNA, 22 nt, Human
uggcucagcuuuccccaucugg

SEQ ID NO: 927850 - RNA, 22 nt, Human
uguaaauaaugcauguaaauca

SEQ ID NO: 927851 - RNA, 22 nt, Human
uguaaaccagggucauccuuag

SEQ ID NO: 927852 - RNA, 22 nt, Human
ugggugcaggaugagugcuggc

SEQ ID NO: 927853 - RNA, 22 nt, Human
auaaacuggguaucaagaggcc

SEQ ID NO: 927854 - RNA, 22 nt, Human
auuugcauaauagugauuugua

SEQ ID NO: 927855 - RNA, 22 nt, Human
cagggacaauggcagagccuga

SEQ ID NO: 927856 - RNA, 22 nt, Human
cacaguuuugucuugguuucca

SEQ ID NO: 927857 - RNA, 20 nt, Human
ucaggguuucccauucuugg

SEQ ID NO: 927858 - RNA, 20 nt, Human
gugaaggcuaagcacagagg

SEQ ID NO: 927859 - RNA, 22 nt, Human
cuucauaaucugaaauuuguaa

SEQ ID NO: 927860 - RNA, 22 nt, Human
uccuccagugucuggggccuug

SEQ ID NO: 927861 - RNA, 22 nt, Human
caucagugaaagugaauguucu

SEQ ID NO: 927862 - RNA, 22 nt, Human
acccaggacacagagaugaccc

SEQ ID NO: 927863 - RNA, 22 nt, Human
cugggaagccauguuucuagga

SEQ ID NO: 927864 - RNA, 22 nt, Human
caucaaaauuagacauuguuga

SEQ ID NO: 927865 - RNA, 19 nt, Human
cagagccucagagcuagaa

SEQ ID NO: 927866 - RNA, 22 nt, Human
auugagcaccuacuaugugcua

SEQ ID NO: 927867 - RNA, 22 nt, Human
cuuagaauuuugccuacuacaa

SEQ ID NO: 927868 - RNA, 22 nt, Human
ucuguagcaagugagaggcauu

SEQ ID NO: 927869 - RNA, 22 nt, Human
guggcaggagugggccuugaag

SEQ ID NO: 927870 - RNA, 22 nt, Human
ccaaaauuauuacauuuguagg

SEQ ID NO: 927871 - RNA, 22 nt, Human
acagaugagaagcugcauucaa

SEQ ID NO: 927872 - RNA, 19 nt, Human
ccuauggcaggauggaggc

SEQ ID NO: 927873 - RNA, 20 nt, Human
gugccaggcaagacaggugg

SEQ ID NO: 927874 - RNA, 22 nt, Human
auacuacauuugaaaauugcag

SEQ ID NO: 927875 - RNA, 22 nt, Human
auuccucaaagguagcccauua

SEQ ID NO: 927876 - RNA, 22 nt, Human
uaaggcuuuguagugauugcuu

SEQ ID NO: 927877 - RNA, 22 nt, Human
gaggccuggugugucucccgcu

SEQ ID NO: 927878 - RNA, 22 nt, Human
ucucagaacacccuucuauggu

SEQ ID NO: 927879 - RNA, 22 nt, Human
caggcaggcugcuuuuuguuca

SEQ ID NO: 927880 - RNA, 22 nt, Human
agggcagagggugccucaccug

SEQ ID NO: 927881 - RNA, 22 nt, Human
auacaaauuauaggccccaucc

SEQ ID NO: 927882 - RNA, 20 nt, Human
cgcccagugcgguucugacc

SEQ ID NO: 927883 - RNA, 22 nt, Human
acuggcugaguugcuucagcaa

SEQ ID NO: 927884 - RNA, 22 nt, Human
cauccauuaacucauuuguuuc

SEQ ID NO: 927885 - RNA, 23 nt, Human
uggagcugggcucagacccuggg

SEQ ID NO: 927886 - RNA, 22 nt, Human
gaaauguaugucuucccccauu

SEQ ID NO: 927887 - RNA, 22 nt, Human
ggcuccagaaacuucaguccau

SEQ ID NO: 927888 - RNA, 22 nt, Human
uacaaacucuuuauauuucaua

SEQ ID NO: 927889 - RNA, 22 nt, Human
auuauucuuaaugcagggauua

SEQ ID NO: 927890 - RNA, 22 nt, Human
uucuuucuucucaggcugggua

SEQ ID NO: 927891 - RNA, 22 nt, Human
agccagcacggauuucccagga

SEQ ID NO: 927892 - RNA, 20 nt, Human
acaauacagguugugucuga

SEQ ID NO: 927893 - RNA, 22 nt, Human
acaaccaagaacagagggaaag

SEQ ID NO: 927894 - RNA, 22 nt, Human
aggcaagaacagacaugggagu

SEQ ID NO: 927895 - RNA, 22 nt, Human
ggagagacccuggagaaggucc

SEQ ID NO: 927896 - RNA, 22 nt, Human
uucagcagcuuuuaguacauug

SEQ ID NO: 927897 - RNA, 22 nt, Human
uuugaauagggcuuugcaggga

SEQ ID NO: 927898 - RNA, 22 nt, Human
ugagggcagagcacuggggagc

SEQ ID NO: 927899 - RNA, 19 nt, Human
gcuuuuauugcucaggugc

SEQ ID NO: 927900 - RNA, 17 nt, Human
uuauuuuuugggcugag

SEQ ID NO: 927901 - RNA, 22 nt, Human
aagaaucuuaauccagaaaccu

SEQ ID NO: 927902 - RNA, 23 nt, Human
aucugaaaaggcauuuucuuccc

SEQ ID NO: 927903 - RNA, 22 nt, Human
agcuggggcauuuauccacuaa

SEQ ID NO: 927904 - RNA, 22 nt, Human
agcccuugguauuuuccgaucc

SEQ ID NO: 927905 - RNA, 22 nt, Human
agcuggauuaaauauagcuuuc

SEQ ID NO: 927906 - RNA, 22 nt, Human
uacagugauagagaguagcuau

SEQ ID NO: 927907 - RNA, 22 nt, Human
uuauucuuuaaacauauauguu

SEQ ID NO: 927908 - RNA, 18 nt, Human
aagcacagguguuucagg

SEQ ID NO: 927909 - RNA, 22 nt, Human
caggagccgccaggcacguugg

SEQ ID NO: 927910 - RNA, 22 nt, Human
cuggccagaagcaccuuuggcg

SEQ ID NO: 927911 - RNA, 22 nt, Human
ugccgcagugcggggagggccc

SEQ ID NO: 927912 - RNA, 22 nt, Human
ccucuugccaaucagcuacaga

SEQ ID NO: 927913 - RNA, 22 nt, Human
gcccugagaagaagucggaggg

SEQ ID NO: 927914 - RNA, 22 nt, Human
guaggguuggagagcacaacca

SEQ ID NO: 927915 - RNA, 20 nt, Human
cuguagggugcagcaggcuc

SEQ ID NO: 927916 - RNA, 22 nt, Human
cuacauagauggaugauuguaa

SEQ ID NO: 927917 - RNA, 22 nt, Human
guaaacacuacaaaucaaggcu

SEQ ID NO: 927918 - RNA, 22 nt, Human
uugucuuuggaaauuuaauguu

SEQ ID NO: 927919 - RNA, 22 nt, Human
ggucaggguauaaucaagugag

SEQ ID NO: 927920 - RNA, 22 nt, Human
ugucucuuggcucuaucacuua

SEQ ID NO: 927921 - RNA, 22 nt, Human
cagcaaagguagaagcacagga

SEQ ID NO: 927922 - RNA, 22 nt, Human
aagauuuacuagcauaauagcu

SEQ ID NO: 927923 - RNA, 22 nt, Human
cuugucugugucggauaaaacu

SEQ ID NO: 927924 - RNA, 20 nt, Human
agccaagaacaggcagaacc

SEQ ID NO: 927925 - RNA, 22 nt, Human
ugugucagaaaucagugccucg

SEQ ID NO: 927926 - RNA, 22 nt, Human
aggaagcuagaaggucuucuuu

SEQ ID NO: 927927 - RNA, 22 nt, Human
uagaaagugguugagaguuuag

SEQ ID NO: 927928 - RNA, 22 nt, Human
ucccuggacaacagacuucacu

SEQ ID NO: 927929 - RNA, 22 nt, Human
ccaggagcagaguagguguuca

SEQ ID NO: 927930 - RNA, 22 nt, Human
cgagcagaagccugguggucug

SEQ ID NO: 927931 - RNA, 22 nt, Human
gaggauggauccgaccccuucc

SEQ ID NO: 927932 - RNA, 22 nt, Human
gagcacugagcuggaauuggag

SEQ ID NO: 927933 - RNA, 22 nt, Human
ccagcagagcucaaacuuccug

SEQ ID NO: 927934 - RNA, 22 nt, Human
ugggccugaaggagcugcgccc

SEQ ID NO: 927935 - RNA, 22 nt, Human
gaggggcuggcuguggucccau

SEQ ID NO: 927936 - RNA, 22 nt, Human
ggcaggcaguguggugugaaac

SEQ ID NO: 927937 - RNA, 23 nt, Human
uaggcaggacucagauaugacag

SEQ ID NO: 927938 - RNA, 22 nt, Human
uauguacacauacacuuguaau

SEQ ID NO: 927939 - RNA, 21 nt, Human
ucauuucucuauguauuucac

SEQ ID NO: 927940 - RNA, 22 nt, Human
caaauguaauggcagguuuugc

SEQ ID NO: 927941 - RNA, 22 nt, Human
agcaaauacuugaauaaaaaga

SEQ ID NO: 927942 - RNA, 20 nt, Human
uucucuagccuuccccuggg

SEQ ID NO: 927943 - RNA, 22 nt, Human
ucaagcaaguugcauauugcua

SEQ ID NO: 927944 - RNA, 22 nt, Human
augugucucuaccaaugcaauu

SEQ ID NO: 927945 - RNA, 22 nt, Human
aaugcugucuuagcaugaaagc

SEQ ID NO: 927946 - RNA, 22 nt, Human
aggguggggugcuacaucuuua

SEQ ID NO: 927947 - RNA, 22 nt, Human
cucuggguucuggccugcaccc

SEQ ID NO: 927948 - RNA, 22 nt, Human
ggucccaguccucucccugcua

SEQ ID NO: 927949 - RNA, 22 nt, Human
aaaaggcuaauccagagcaacu

SEQ ID NO: 927950 - RNA, 18 nt, Human
gaacuuuuggcuuugugu

SEQ ID NO: 927951 - RNA, 22 nt, Human
agauauuuaaaucagacaaaga

SEQ ID NO: 927952 - RNA, 22 nt, Human
aggggagccgaggggcaucugu

SEQ ID NO: 927953 - RNA, 22 nt, Human
ggcaucguccugggcauaggga

SEQ ID NO: 927954 - RNA, 22 nt, Human
agauugauagauguuucuaaaa

SEQ ID NO: 927955 - RNA, 22 nt, Human
agggagccaggaacgcaggucg

SEQ ID NO: 927956 - RNA, 22 nt, Human
cuccuggcacucaguguggaag

SEQ ID NO: 927957 - RNA, 22 nt, Human
agcccagguggagugugugggg

SEQ ID NO: 927958 - RNA, 22 nt, Human
ggucccuggaaggcacuaguga

SEQ ID NO: 927959 - RNA, 22 nt, Human
ucacagaagcccucgcaaacua

SEQ ID NO: 927960 - RNA, 22 nt, Human
cucuuagugcaucucauuaguu

SEQ ID NO: 927961 - RNA, 18 nt, Human
aaggcaguaugauugcac

SEQ ID NO: 927962 - RNA, 22 nt, Human
cagaguaaggagcugucaaacg

SEQ ID NO: 927963 - RNA, 20 nt, Human
accaggcccggugucuccuc

SEQ ID NO: 927964 - RNA, 22 nt, Human
agaggccaggcagcccaaggug

SEQ ID NO: 927965 - RNA, 22 nt, Human
gcacugggaagaaugagccugu

SEQ ID NO: 927966 - RNA, 22 nt, Human
ccagaagucaggaaugagucuu

SEQ ID NO: 927967 - RNA, 22 nt, Human
agacaauuaaaaaauuaugcuu

SEQ ID NO: 927968 - RNA, 22 nt, Human
cugagcacugggcacauagcug

SEQ ID NO: 927969 - RNA, 22 nt, Human
gaacacuguuucuucgugaaca

SEQ ID NO: 927970 - RNA, 22 nt, Human
ugugggaggaauuagaauggga

SEQ ID NO: 927971 - RNA, 22 nt, Human
cuuuagcaacgaugaugauauu

SEQ ID NO: 927972 - RNA, 23 nt, Human
cauaaaauauuaguaugguagca

SEQ ID NO: 927973 - RNA, 22 nt, Human
ucuaaacaguuucacucuuaau

SEQ ID NO: 927974 - RNA, 22 nt, Human
agguaguguagcugagugggau

SEQ ID NO: 927975 - RNA, 23 nt, Human
aaguucuauuagugcuggucuag

SEQ ID NO: 927976 - RNA, 22 nt, Human
gcugcccugugguagagggugg

SEQ ID NO: 927977 - RNA, 19 nt, Human
guggcucauguagugggcc

SEQ ID NO: 927978 - RNA, 22 nt, Human
ucaaaugagugacucacacagg

SEQ ID NO: 927979 - RNA, 22 nt, Human
ucauaguucuguuuugaaggau

SEQ ID NO: 927980 - RNA, 22 nt, Human
auaaagauagaaugcuuuccug

SEQ ID NO: 927981 - RNA, 22 nt, Human
ucuaauuuuggcauuuuaaccu

SEQ ID NO: 927982 - RNA, 22 nt, Human
ugcuggcuggagugccucugga

SEQ ID NO: 927983 - RNA, 22 nt, Human
ccuucagaaugaaauucuaaug

SEQ ID NO: 927984 - RNA, 22 nt, Human
aaacagcuuucagaaucucuca

SEQ ID NO: 927985 - RNA, 22 nt, Human
aauauugagaaccagcauguuu

SEQ ID NO: 927986 - RNA, 22 nt, Human
uaauguuuuucucaacauugcu

SEQ ID NO: 927987 - RNA, 22 nt, Human
agagccaaggccucagucucaa

SEQ ID NO: 927988 - RNA, 22 nt, Human
uccacagggauguugaguucuu

SEQ ID NO: 927989 - RNA, 22 nt, Human
uuacaacugggcuugucagcuu

SEQ ID NO: 927990 - RNA, 22 nt, Human
uugugcuaagugcuaugaaggc

SEQ ID NO: 927991 - RNA, 19 nt, Human
cccagaggaaugccuggaa

SEQ ID NO: 927992 - RNA, 22 nt, Human
cagugucucaaaacaaguugcu

SEQ ID NO: 927993 - RNA, 22 nt, Human
ggaggcugagaggucgcagugg

SEQ ID NO: 927994 - RNA, 22 nt, Human
aaauuaacuaucacuuuuguga

SEQ ID NO: 927995 - RNA, 22 nt, Human
uuuacaaguacaccuaacagcu

SEQ ID NO: 927996 - RNA, 22 nt, Human
uuuaugacauuacaauaucaag

SEQ ID NO: 927997 - RNA, 22 nt, Human
uguucauauuccuguccgcuga

SEQ ID NO: 927998 - RNA, 22 nt, Human
acaguuaauaugugacagaacu

SEQ ID NO: 927999 - RNA, 22 nt, Human
acagaggccgccucucucacgg

SEQ ID NO: 928000 - RNA, 22 nt, Human
aauaagaugugcuugaguuugg

SEQ ID NO: 928001 - RNA, 22 nt, Human
agcagggcuccugaaagccgcg

SEQ ID NO: 928002 - RNA, 22 nt, Human
ggauggcagacagugaguggcu

SEQ ID NO: 928003 - RNA, 17 nt, Human
ucaaagaaugcaugcag

SEQ ID NO: 928004 - RNA, 22 nt, Human
cuuucuucaaccucauucugca

SEQ ID NO: 928005 - RNA, 22 nt, Human
agaaucagugagcaguugugau

SEQ ID NO: 928006 - RNA, 22 nt, Human
gcagugaagccagaucugaaau

SEQ ID NO: 928007 - RNA, 22 nt, Human
ucaccaggcaacuauguacucc

SEQ ID NO: 928008 - RNA, 22 nt, Human
ucuuuuucuucuguggaaggug

SEQ ID NO: 928009 - RNA, 22 nt, Human
cugggggccuuacggaacucca

SEQ ID NO: 928010 - RNA, 22 nt, Human
ggcugugcccucacauggggca

SEQ ID NO: 928011 - RNA, 22 nt, Human
agaacagggacuggaggcuuca

SEQ ID NO: 928012 - RNA, 22 nt, Human
acaaguuucauuguuuagaacc

SEQ ID NO: 928013 - RNA, 22 nt, Human
ggcugaaggaugaaagcugcag

SEQ ID NO: 928014 - RNA, 23 nt, Human
uucugggcuguggaagccucggg

SEQ ID NO: 928015 - RNA, 22 nt, Human
agcucagggcaaagacucaaau

SEQ ID NO: 928016 - RNA, 22 nt, Human
augccaaguacaggcacugcuc

SEQ ID NO: 928017 - RNA, 22 nt, Human
uaagaggcauuagagacauagc

SEQ ID NO: 928018 - RNA, 22 nt, Human
aggauuucugugccuggaaaau

SEQ ID NO: 928019 - RNA, 22 nt, Human
cuuuuuguguaugcuacaguug

SEQ ID NO: 928020 - RNA, 22 nt, Human
agauuucugucaccuucuaugc

SEQ ID NO: 928021 - RNA, 22 nt, Human
aguaucaaggaucuccagcacc

SEQ ID NO: 928022 - RNA, 22 nt, Human
aauuuguuuucaagucacugga

SEQ ID NO: 928023 - RNA, 22 nt, Human
uccagcagacucaucagcaagg

SEQ ID NO: 928024 - RNA, 22 nt, Human
aggcaggcugcuauggaguaga

SEQ ID NO: 928025 - RNA, 22 nt, Human
aggaaauugagaaucagaauaa

SEQ ID NO: 928026 - RNA, 22 nt, Human
uuggcuuucagaaucccuaucu

SEQ ID NO: 928027 - RNA, 22 nt, Human
agagcuguggauaguccuggau

SEQ ID NO: 928028 - RNA, 22 nt, Human
uguuauuugggaaaguuguaca

SEQ ID NO: 928029 - RNA, 22 nt, Human
guuugaaaugucugcaagggaa

SEQ ID NO: 928030 - RNA, 23 nt, Human
gugcuuuaugaucugcugucccu

SEQ ID NO: 928031 - RNA, 22 nt, Human
ccagcccugauuagagaauguc

SEQ ID NO: 928032 - RNA, 22 nt, Human
guccacagggauggccacacau

SEQ ID NO: 928033 - RNA, 22 nt, Human
uuguugauguggacgucuggaa

SEQ ID NO: 928034 - RNA, 22 nt, Human
cccugucacaauggaugacauu

SEQ ID NO: 928035 - RNA, 22 nt, Human
ugugaugcuggagugcgaauau

SEQ ID NO: 928036 - RNA, 16 nt, Human
agguggagaaguucac

SEQ ID NO: 928037 - RNA, 22 nt, Human
agaagaauacuugauguucaug

SEQ ID NO: 928038 - RNA, 22 nt, Human
acuuccaaaacacagcauggca

SEQ ID NO: 928039 - RNA, 22 nt, Human
gacauauacuauggaugguucu

SEQ ID NO: 928040 - RNA, 22 nt, Human
gugccucccuguugacuagggu

SEQ ID NO: 928041 - RNA, 22 nt, Human
ggaggucccaggccuggcagca

SEQ ID NO: 928042 - RNA, 22 nt, Human
cugggacuugcagagcaggagg

SEQ ID NO: 928043 - RNA, 22 nt, Human
ccuugggucuaggccagggagu

SEQ ID NO: 928044 - RNA, 22 nt, Human
ucucaacuuugagaaacauugu

SEQ ID NO: 928045 - RNA, 22 nt, Human
aaguauuucguucugaaaaagu

SEQ ID NO: 928046 - RNA, 22 nt, Human
aguacaaacuguuucaaaguag

SEQ ID NO: 928047 - RNA, 22 nt, Human
cugggaggcaccgcgucgugcu

SEQ ID NO: 928048 - RNA, 22 nt, Human
cacacaugugugcagcuuagaa

SEQ ID NO: 928049 - RNA, 22 nt, Human
uccucugggccuauuuguucac

SEQ ID NO: 928050 - RNA, 22 nt, Human
caugagaaguggccuucaaaaa

SEQ ID NO: 928051 - RNA, 22 nt, Human
guuuuauaggcuguugcuauau

SEQ ID NO: 928052 - RNA, 22 nt, Human
gagcucuguguggcuugggugg

SEQ ID NO: 928053 - RNA, 22 nt, Human
cagacacaccaggcccauucug

SEQ ID NO: 928054 - RNA, 22 nt, Human
uaacaauacccauucuaauuac

SEQ ID NO: 928055 - RNA, 22 nt, Human
ggagggguggucgcgaagagca

SEQ ID NO: 928056 - RNA, 16 nt, Human
guucucucacuguacc

SEQ ID NO: 928057 - RNA, 23 nt, Human
auaguuuucccugguucuugcca

SEQ ID NO: 928058 - RNA, 22 nt, Human
caaauacugaguuuauuuucaa

SEQ ID NO: 928059 - RNA, 19 nt, Human
ggaugagggucaggcauag

SEQ ID NO: 928060 - RNA, 22 nt, Human
aaggggaaguagcaccagaggu

SEQ ID NO: 928061 - RNA, 22 nt, Human
caaaagauacuugcaucuaacu

SEQ ID NO: 928062 - RNA, 22 nt, Human
cuguguauugaaaaaggguuaa

SEQ ID NO: 928063 - RNA, 19 nt, Human
agcagagcccugaagaucc

SEQ ID NO: 928064 - RNA, 22 nt, Human
uggcauggcuacuggaauggcg

SEQ ID NO: 928065 - RNA, 22 nt, Human
aaagaacaucggagugggcggg

SEQ ID NO: 928066 - RNA, 18 nt, Human
cagacacucugcucugca

SEQ ID NO: 928067 - RNA, 22 nt, Human
ggcuguguccccaccugagcag

SEQ ID NO: 928068 - RNA, 22 nt, Human
uuccauauuguacucuuuggag

SEQ ID NO: 928069 - RNA, 22 nt, Human
cuguggcugccucaccuacagg

SEQ ID NO: 928070 - RNA, 22 nt, Human
ugagauggggucaugcuuuguc

SEQ ID NO: 928071 - RNA, 22 nt, Human
auacaugugugugcauacaugu

SEQ ID NO: 928072 - RNA, 22 nt, Human
augccauuguauauucauugau

SEQ ID NO: 928073 - RNA, 22 nt, Human
gugcaguaucucugggaguggg

SEQ ID NO: 928074 - RNA, 22 nt, Human
cacaguggcaaaggggcuuggg

SEQ ID NO: 928075 - RNA, 22 nt, Human
cggcuucagucucaucaucgcc

SEQ ID NO: 928076 - RNA, 22 nt, Human
ccacguccagcuaauuuucgua

SEQ ID NO: 928077 - RNA, 22 nt, Human
auauagaaggugcuauuuacau

SEQ ID NO: 928078 - RNA, 21 nt, Human
cagcuucugaagguguaggaa

SEQ ID NO: 928079 - RNA, 22 nt, Human
uuuuacuuaauucuuggucaug

SEQ ID NO: 928080 - RNA, 22 nt, Human
ccuguguuaguuaugggucucu

SEQ ID NO: 928081 - RNA, 22 nt, Human
uggagcagaggcugagguuggg

SEQ ID NO: 928082 - RNA, 18 nt, Human
uuccuugguaacauaugc

SEQ ID NO: 928083 - RNA, 22 nt, Human
gagcauuugguuauaguaauuu

SEQ ID NO: 928084 - RNA, 20 nt, Human
cauuauuguaaucagcugua

SEQ ID NO: 928085 - RNA, 22 nt, Human
ugagcuguacuccuccccaggg

SEQ ID NO: 928086 - RNA, 22 nt, Human
gccaggcauuuauugauugaau

SEQ ID NO: 928087 - RNA, 22 nt, Human
acuuguguaacacagaaagaac

SEQ ID NO: 928088 - RNA, 22 nt, Human
uggucugauucuugcuccccaa

SEQ ID NO: 928089 - RNA, 22 nt, Human
agcugcagccucaugauucggu

SEQ ID NO: 928090 - RNA, 18 nt, Human
ccugucacguccaggccu

SEQ ID NO: 928091 - RNA, 22 nt, Human
cagaaauguucuaaugauucag

SEQ ID NO: 928092 - RNA, 22 nt, Human
cagggccucauggccggggugc

SEQ ID NO: 928093 - RNA, 22 nt, Human
aaauagcugaaaguuccuagau

SEQ ID NO: 928094 - RNA, 22 nt, Human
aagugauuuucuucuuaguuau

SEQ ID NO: 928095 - RNA, 22 nt, Human
auguauaggaguuaucuguugu

SEQ ID NO: 928096 - RNA, 22 nt, Human
augacugcucugggcucccaug

SEQ ID NO: 928097 - RNA, 22 nt, Human
aggccaaauguguauaaaacau

SEQ ID NO: 928098 - RNA, 22 nt, Human
acugagagcguguacaaacuua

SEQ ID NO: 928099 - RNA, 22 nt, Human
acaaauuaccauggaauuuggg

SEQ ID NO: 928100 - RNA, 21 nt, Human
ugcuggguuugcccaucaggc

SEQ ID NO: 928101 - RNA, 22 nt, Human
cacaucauguuaauucauuaca

SEQ ID NO: 928102 - RNA, 23 nt, Human
uuucaguuuggaccagccccgac

SEQ ID NO: 928103 - RNA, 22 nt, Human
aguauuugagagguccaggugu

SEQ ID NO: 928104 - RNA, 22 nt, Human
ggugcaugugagaaagacuggg

SEQ ID NO: 928105 - RNA, 22 nt, Human
ccugagccaagagucagaaucu

SEQ ID NO: 928106 - RNA, 22 nt, Human
uucugucuguaaacuucucaau

SEQ ID NO: 928107 - RNA, 22 nt, Human
caaguucaaguccuggcucugc

SEQ ID NO: 928108 - RNA, 19 nt, Human
gccuggcugggaugagccc

SEQ ID NO: 928109 - RNA, 22 nt, Human
uggcuggagggacccacucaga

SEQ ID NO: 928110 - RNA, 22 nt, Human
ucuuuggaucucaagguggcag

SEQ ID NO: 928111 - RNA, 22 nt, Human
uggcaggagccugcggggaggu

SEQ ID NO: 928112 - RNA, 22 nt, Human
uuguguaacuugagcaaacaca

SEQ ID NO: 928113 - RNA, 22 nt, Human
uguauagaugaggaagcuguua

SEQ ID NO: 928114 - RNA, 22 nt, Human
cugggacuggaccucugccugg

SEQ ID NO: 928115 - RNA, 22 nt, Human
acucagagcuuggcuccuugcu

SEQ ID NO: 928116 - RNA, 22 nt, Human
uuagacagagcuccuugagggc

SEQ ID NO: 928117 - RNA, 22 nt, Human
gccagagaggcaaauccuagca

SEQ ID NO: 928118 - RNA, 22 nt, Human
gagcugagaucgugccauugca

SEQ ID NO: 928119 - RNA, 22 nt, Human
ggaggggugcucagcugucacg

SEQ ID NO: 928120 - RNA, 22 nt, Human
cuggaaugucugcucaauguuu

SEQ ID NO: 928121 - RNA, 22 nt, Human
ggcuggacuuucugcugggcuc

SEQ ID NO: 928122 - RNA, 22 nt, Human
uacacaaucuguuuuuccauuu

SEQ ID NO: 928123 - RNA, 22 nt, Human
aacaaaacauuugucuuguuuc

SEQ ID NO: 928124 - RNA, 22 nt, Human
augcucuagagcucuuuucacu

SEQ ID NO: 928125 - RNA, 22 nt, Human
uccugagagguuuauaacgcag

SEQ ID NO: 928126 - RNA, 22 nt, Human
ugggugaccccagaagaggauc

SEQ ID NO: 928127 - RNA, 22 nt, Human
aaauaguucagcuuguaaaccc

SEQ ID NO: 928128 - RNA, 22 nt, Human
agaagugagacucaguugauga

SEQ ID NO: 928129 - RNA, 22 nt, Human
guuuccaugggagaagacagug

SEQ ID NO: 928130 - RNA, 22 nt, Human
gacacuuuaggccaccaugcaa

SEQ ID NO: 928131 - RNA, 22 nt, Human
ggcugagccacugcgccuggcu

SEQ ID NO: 928132 - RNA, 22 nt, Human
agagccugggaauuugcauguu

SEQ ID NO: 928133 - RNA, 22 nt, Human
acaguuaauaaguaguaaguca

SEQ ID NO: 928134 - RNA, 22 nt, Human
gucuuccacauuucaagaggcu

SEQ ID NO: 928135 - RNA, 22 nt, Human
acaggccuggguucaaauuugg

SEQ ID NO: 928136 - RNA, 22 nt, Human
uacauuuccuugacuccucaac

SEQ ID NO: 928137 - RNA, 22 nt, Human
aaucuuagguuuggcuucaucu

SEQ ID NO: 928138 - RNA, 22 nt, Human
ugcagcacuguucacaauagcc

SEQ ID NO: 928139 - RNA, 22 nt, Human
gcagggcaggauuugaacccag

SEQ ID NO: 928140 - RNA, 22 nt, Human
uuugcucaguucucuguauuuu

SEQ ID NO: 928141 - RNA, 22 nt, Human
uuugugcagcuaagaaaauggc

SEQ ID NO: 928142 - RNA, 22 nt, Human
agacauauuggcuugcuuuaau

SEQ ID NO: 928143 - RNA, 22 nt, Human
augaagucuauuuaccuaagcu

SEQ ID NO: 928144 - RNA, 22 nt, Human
acaugacagggaaugaggugaa

SEQ ID NO: 928145 - RNA, 22 nt, Human
ugggcucucucaccuggaggcu

SEQ ID NO: 928146 - RNA, 22 nt, Human
caccaucuuuuggaggggaauu

SEQ ID NO: 928147 - RNA, 22 nt, Human
auuaaacaauguaaaguucuug

SEQ ID NO: 928148 - RNA, 22 nt, Human
ucacaguguggcaacucacaga

SEQ ID NO: 928149 - RNA, 22 nt, Human
guauucuuauacucagugagcu

SEQ ID NO: 928150 - RNA, 22 nt, Human
ugccagucucacccuggguccu

SEQ ID NO: 928151 - RNA, 22 nt, Human
aaaaaugugaccacaggguguu

SEQ ID NO: 928152 - RNA, 22 nt, Human
uaacaucucccugacuuuugcu

SEQ ID NO: 928153 - RNA, 22 nt, Human
ccagagaggccaaggucguggu

SEQ ID NO: 928154 - RNA, 22 nt, Human
cuggccaggcggccccugcaug

SEQ ID NO: 928155 - RNA, 22 nt, Human
gcaguggauccaaugguaucuu

SEQ ID NO: 928156 - RNA, 22 nt, Human
uggaauagaggugcugauauua

SEQ ID NO: 928157 - RNA, 20 nt, Human
uccaugcaguuuccauacag

SEQ ID NO: 928158 - RNA, 22 nt, Human
caucucugguucagucucugug

SEQ ID NO: 928159 - RNA, 22 nt, Human
uucucucuuccaguucccacuu

SEQ ID NO: 928160 - RNA, 22 nt, Human
aucugaaaagccucuuacuccu

SEQ ID NO: 928161 - RNA, 23 nt, Human
cccuaacuaauucuagggccuaa

SEQ ID NO: 928162 - RNA, 22 nt, Human
ugcagcaucuccuuaaaucuug

SEQ ID NO: 928163 - RNA, 22 nt, Human
ucagugcucaggggagccgagg

SEQ ID NO: 928164 - RNA, 22 nt, Human
uuucuguuaggcaucauuuuaa

SEQ ID NO: 928165 - RNA, 22 nt, Human
gcauuacaggcuguaagaugca

SEQ ID NO: 928166 - RNA, 22 nt, Human
ugcuggccugguuagaaagggg

SEQ ID NO: 928167 - RNA, 20 nt, Human
ccauggccacaucugugcug

SEQ ID NO: 928168 - RNA, 22 nt, Human
gcugucacucaccaggccugca

SEQ ID NO: 928169 - RNA, 22 nt, Human
uucaaguucuguggagagcugu

SEQ ID NO: 928170 - RNA, 22 nt, Human
agaacagcagcacgucaagcug

SEQ ID NO: 928171 - RNA, 22 nt, Human
ugaaauuagaaauauguauggg

SEQ ID NO: 928172 - RNA, 22 nt, Human
agcugugugcauuugggucuca

SEQ ID NO: 928173 - RNA, 22 nt, Human
cuggcaggcacucaugaaauaa

SEQ ID NO: 928174 - RNA, 22 nt, Human
uacaacaauuuccacauuagaa

SEQ ID NO: 928175 - RNA, 22 nt, Human
aggcaaagaaguuggucaggag

SEQ ID NO: 928176 - RNA, 22 nt, Human
cugaaguucauacaauggccau

SEQ ID NO: 928177 - RNA, 22 nt, Human
aucauugaauugcuuuguucuu

SEQ ID NO: 928178 - RNA, 21 nt, Human
aggagaaacacaggucagccc

SEQ ID NO: 928179 - RNA, 22 nt, Human
cugacagauacuuaugacauaa

SEQ ID NO: 928180 - RNA, 22 nt, Human
uggggcagaguaggauuuuggc

SEQ ID NO: 928181 - RNA, 22 nt, Human
uaaugucuaugggccagauaau

SEQ ID NO: 928182 - RNA, 19 nt, Human
uuucucaggaaguuugugu

SEQ ID NO: 928183 - RNA, 22 nt, Human
augaaugaaauacagaguacuu

SEQ ID NO: 928184 - RNA, 22 nt, Human
uucuuucagaacacaagugauu

SEQ ID NO: 928185 - RNA, 22 nt, Human
uggcuacagcuuggccacagag

SEQ ID NO: 928186 - RNA, 22 nt, Human
ugaacagugaucuacauguggc

SEQ ID NO: 928187 - RNA, 22 nt, Human
caugaagcauguuuugucauga

SEQ ID NO: 928188 - RNA, 22 nt, Human
cugagcugguggaagcaugcag

SEQ ID NO: 928189 - RNA, 22 nt, Human
gucaugugacccaaccugagcc

SEQ ID NO: 928190 - RNA, 22 nt, Human
cagcucugacacaguacaaaau

SEQ ID NO: 928191 - RNA, 18 nt, Human
gugcugaauaacuacuuu

SEQ ID NO: 928192 - RNA, 22 nt, Human
cccugauggcacaguggcaggc

SEQ ID NO: 928193 - RNA, 22 nt, Human
ucagagcuuaucucuugcugga

SEQ ID NO: 928194 - RNA, 22 nt, Human
uggcccuguggaggucagugag

SEQ ID NO: 928195 - RNA, 22 nt, Human
gcugcucuacccaugcaucugu

SEQ ID NO: 928196 - RNA, 21 nt, Human
guggccugauuaugaaugggu

SEQ ID NO: 928197 - RNA, 22 nt, Human
aagcuuugcaaugcuucauuau

SEQ ID NO: 928198 - RNA, 22 nt, Human
aggcacaaagacagaaaagcac

SEQ ID NO: 928199 - RNA, 20 nt, Human
agacaaaaugacuucaugca

SEQ ID NO: 928200 - RNA, 22 nt, Human
auggaagggacagaagggcaag

SEQ ID NO: 928201 - RNA, 17 nt, Human
ugcagcaguucccaucu

SEQ ID NO: 928202 - RNA, 22 nt, Human
ucagaaccugcaagucuaaccu

SEQ ID NO: 928203 - RNA, 22 nt, Human
cuuugguguucauuaaacaugg

SEQ ID NO: 928204 - RNA, 22 nt, Human
uccuccagcuacuaggcaaaua

SEQ ID NO: 928205 - RNA, 22 nt, Human
gccagcagcucuugggcgggca

SEQ ID NO: 928206 - RNA, 22 nt, Human
aaugugugccuguuaaggggca

SEQ ID NO: 928207 - RNA, 22 nt, Human
cagcagcugacuccaagagagc

SEQ ID NO: 928208 - RNA, 22 nt, Human
cuggugccuccucccugugcuu

SEQ ID NO: 928209 - RNA, 22 nt, Human
ccagaagggcuauugcagugac

SEQ ID NO: 928210 - RNA, 20 nt, Human
gaaaucaguuaaugaugguu

SEQ ID NO: 928211 - RNA, 22 nt, Human
ucagcagccgcagcugacucag

SEQ ID NO: 928212 - RNA, 22 nt, Human
aggagugagcuuuggggucaga

SEQ ID NO: 928213 - RNA, 22 nt, Human
gauguacuuuaaaauacuucag

SEQ ID NO: 928214 - RNA, 22 nt, Human
aaagaaauaccuuucucagcuu

SEQ ID NO: 928215 - RNA, 22 nt, Human
gagucagauugcagacagggcu

SEQ ID NO: 928216 - RNA, 20 nt, Human
ucccaucacgccugugccag

SEQ ID NO: 928217 - RNA, 22 nt, Human
acugagccugugcccucaucag

SEQ ID NO: 928218 - RNA, 22 nt, Human
agggagcugggccacacugauc

SEQ ID NO: 928219 - RNA, 22 nt, Human
aaugggaggauuuucucucuug

SEQ ID NO: 928220 - RNA, 17 nt, Human
ggccuugggcugcucuu

SEQ ID NO: 928221 - RNA, 22 nt, Human
gguggccaggccagcucuggcc

SEQ ID NO: 928222 - RNA, 22 nt, Human
ucacugcagagaccucuaguca

SEQ ID NO: 928223 - RNA, 22 nt, Human
cagggguguuuuuggccaggag

SEQ ID NO: 928224 - RNA, 22 nt, Human
augagguacuaguauauacgua

SEQ ID NO: 928225 - RNA, 22 nt, Human
gaugaaaaucuugagaugucga

SEQ ID NO: 928226 - RNA, 23 nt, Human
aacaauagagauaaagugagauc

SEQ ID NO: 928227 - RNA, 22 nt, Human
uucuuuaucaguuacucauagg

SEQ ID NO: 928228 - RNA, 22 nt, Human
uuucugauuugacuugaaguau

SEQ ID NO: 928229 - RNA, 22 nt, Human
uacagugcaaugugauguagau

SEQ ID NO: 928230 - RNA, 22 nt, Human
ggguggagguggguuuugagau

SEQ ID NO: 928231 - RNA, 22 nt, Human
aagaagaaguguuauuuuuaga

SEQ ID NO: 928232 - RNA, 19 nt, Human
acaaggcugggagagcgcc

SEQ ID NO: 928233 - RNA, 22 nt, Human
uaaauguuacuuuccuuucaca

SEQ ID NO: 928234 - RNA, 22 nt, Human
uguguguuauuuucagccauua

SEQ ID NO: 928235 - RNA, 22 nt, Human
uuguuacagcagcaauagaaaa

SEQ ID NO: 928236 - RNA, 22 nt, Human
acaugcauacugcugccaacgc

SEQ ID NO: 928237 - RNA, 22 nt, Human
agaaccuuccaucacucccuac

SEQ ID NO: 928238 - RNA, 22 nt, Human
ucaguguuuccugugguacagc

SEQ ID NO: 928239 - RNA, 22 nt, Human
gaagauuuauaaggaccuuauu

SEQ ID NO: 928240 - RNA, 21 nt, Human
aucauucuggaaaauucaagc

SEQ ID NO: 928241 - RNA, 22 nt, Human
ucaggaaauggacaucuuugcu

SEQ ID NO: 928242 - RNA, 22 nt, Human
aagcaauucacaguucacuuaa

SEQ ID NO: 928243 - RNA, 22 nt, Human
uaacuucaagucuguggaucag

SEQ ID NO: 928244 - RNA, 21 nt, Human
uuuaugcagauaaugcuauuu

SEQ ID NO: 928245 - RNA, 18 nt, Human
gagagcugcuaccuagcu

SEQ ID NO: 928246 - RNA, 23 nt, Human
agacugaggcugccagggucaga

SEQ ID NO: 928247 - RNA, 22 nt, Human
acaugcuuguuuuucacaaccu

SEQ ID NO: 928248 - RNA, 22 nt, Human
acuuucaauucccuuagcaacu

SEQ ID NO: 928249 - RNA, 22 nt, Human
ggaggccagaaucuguguugga

SEQ ID NO: 928250 - RNA, 22 nt, Human
cauagaaaagaguagguaaugu

SEQ ID NO: 928251 - RNA, 22 nt, Human
auguuaccaucuuuuaucuaca

SEQ ID NO: 928252 - RNA, 19 nt, Human
aggcagcacccaguccuug

SEQ ID NO: 928253 - RNA, 22 nt, Human
gagugcuggggugcagagaggu

SEQ ID NO: 928254 - RNA, 22 nt, Human
gaagcagagccuaaggcagaca

SEQ ID NO: 928255 - RNA, 20 nt, Human
cuccucaguuccaugggagg

SEQ ID NO: 928256 - RNA, 22 nt, Human
gcugaccuguggcagaagcuca

SEQ ID NO: 928257 - RNA, 22 nt, Human
ugcuggcaccagaaugacugca

SEQ ID NO: 928258 - RNA, 22 nt, Human
ccagggcucuaugaggguggag

SEQ ID NO: 928259 - RNA, 22 nt, Human
uuggccagugaaccaggccugg

SEQ ID NO: 928260 - RNA, 22 nt, Human
cuggcugauuuucucacuucuc

SEQ ID NO: 928261 - RNA, 22 nt, Human
uagaaccucugauuauguuacu

SEQ ID NO: 928262 - RNA, 22 nt, Human
aaauuccauuuugugacuauuc

SEQ ID NO: 928263 - RNA, 22 nt, Human
aggucacaggguugaaguacuu

SEQ ID NO: 928264 - RNA, 20 nt, Human
agcuaagaggaaaagugaga

SEQ ID NO: 928265 - RNA, 22 nt, Human
ggagaguuguuuuugccuagau

SEQ ID NO: 928266 - RNA, 22 nt, Human
aagugauuugcaugcuuaauuc

SEQ ID NO: 928267 - RNA, 22 nt, Human
auagucuuagaaucuugagugu

SEQ ID NO: 928268 - RNA, 22 nt, Human
ugcauacugaacagcaugcuaa

SEQ ID NO: 928269 - RNA, 22 nt, Human
uuuaccuucuuuuaacuacagu

SEQ ID NO: 928270 - RNA, 22 nt, Human
acaaaggugagcagaagacaca

SEQ ID NO: 928271 - RNA, 22 nt, Human
acucagaaugacugaugcugug

SEQ ID NO: 928272 - RNA, 22 nt, Human
agucugugaacuuggcagggaa

SEQ ID NO: 928273 - RNA, 22 nt, Human
ggccagcuuugagcugcaggaa

SEQ ID NO: 928274 - RNA, 22 nt, Human
gugagccgaguauaguucauag

SEQ ID NO: 928275 - RNA, 21 nt, Human
ugccauuuuaaccaagugugc

SEQ ID NO: 928276 - RNA, 22 nt, Human
auuucauggcagacuuuaaccc

SEQ ID NO: 928277 - RNA, 22 nt, Human
acaaauucuacaaucauaugau

SEQ ID NO: 928278 - RNA, 23 nt, Human
ggauacaaagauuaauaguagag

SEQ ID NO: 928279 - RNA, 22 nt, Human
uucuguguugugacauucuaga

SEQ ID NO: 928280 - RNA, 22 nt, Human
guauguauguauauguuuaaga

SEQ ID NO: 928281 - RNA, 22 nt, Human
cuccagcugccaccagauguuu

SEQ ID NO: 928282 - RNA, 22 nt, Human
aagagggaaauuguuggcugcu

SEQ ID NO: 928283 - RNA, 22 nt, Human
uguguguccuugaccucagugg

SEQ ID NO: 928284 - RNA, 22 nt, Human
ggccuuggccuagcccuccagg

SEQ ID NO: 928285 - RNA, 22 nt, Human
guggcugaguggucgagucaga

SEQ ID NO: 928286 - RNA, 22 nt, Human
acauaauagguaccugaauaau

SEQ ID NO: 928287 - RNA, 22 nt, Human
ccacuuugaaccacugaggugg

SEQ ID NO: 928288 - RNA, 19 nt, Human
agcaucucccugaucauuc

SEQ ID NO: 928289 - RNA, 22 nt, Human
uggacccugaagcaacagggag

SEQ ID NO: 928290 - RNA, 22 nt, Human
uccagggcuuggcugggacggu

SEQ ID NO: 928291 - RNA, 22 nt, Human
cagcagcagccccaggaagguu

SEQ ID NO: 928292 - RNA, 22 nt, Human
gcaggcuggucugaccaucccu

SEQ ID NO: 928293 - RNA, 20 nt, Human
ugacauagcucuuggggugc

SEQ ID NO: 928294 - RNA, 22 nt, Human
ccugcucagccccagcucaccc

SEQ ID NO: 928295 - RNA, 22 nt, Human
agcagcugccagagagaguucc

SEQ ID NO: 928296 - RNA, 22 nt, Human
gccagcucagugccaggccccu

SEQ ID NO: 928297 - RNA, 22 nt, Human
augggcugggaucugaguguca

SEQ ID NO: 928298 - RNA, 22 nt, Human
augggaggaugcucgggugcuc

SEQ ID NO: 928299 - RNA, 22 nt, Human
ugugggaccucagagggucccc

SEQ ID NO: 928300 - RNA, 22 nt, Human
guucccauugcccuagcuugua

SEQ ID NO: 928301 - RNA, 22 nt, Human
guggcagaaaugggacuuugag

SEQ ID NO: 928302 - RNA, 22 nt, Human
cagcaaaagccagcauaagcuc

SEQ ID NO: 928303 - RNA, 22 nt, Human
agugaauucuccacccaguagg

SEQ ID NO: 928304 - RNA, 22 nt, Human
uaacacugugguguucuuuguc

SEQ ID NO: 928305 - RNA, 22 nt, Human
gagacugaggucaccaggcugu

SEQ ID NO: 928306 - RNA, 22 nt, Human
guggcagugugaggauccugcu

SEQ ID NO: 928307 - RNA, 22 nt, Human
auuugcaaagguuaacagcagu

SEQ ID NO: 928308 - RNA, 22 nt, Human
ugcaggaauauugaugaacuua

SEQ ID NO: 928309 - RNA, 22 nt, Human
aacagaaucuuggguucuuuuc

SEQ ID NO: 928310 - RNA, 22 nt, Human
aggaggguacaauggguggaaa

SEQ ID NO: 928311 - RNA, 22 nt, Human
cauuugaagacuuagaagagga

SEQ ID NO: 928312 - RNA, 22 nt, Human
aacuguacgauaauaaauuugu

SEQ ID NO: 928313 - RNA, 23 nt, Human
gcggaaggggucauaauggagac

SEQ ID NO: 928314 - RNA, 22 nt, Human
cauuagcauucagugacuugua

SEQ ID NO: 928315 - RNA, 22 nt, Human
auucuaauuaguucuacauguu

SEQ ID NO: 928316 - RNA, 22 nt, Human
uuucaaauagaaucuuuccaaa

SEQ ID NO: 928317 - RNA, 22 nt, Human
uuucucuuucaaucugcaguac

SEQ ID NO: 928318 - RNA, 22 nt, Human
aucaggaagccagucuaaugga

SEQ ID NO: 928319 - RNA, 22 nt, Human
gggcuccgcccuuggcugagcu

SEQ ID NO: 928320 - RNA, 22 nt, Human
uccugguggcuuucccugccuu

SEQ ID NO: 928321 - RNA, 22 nt, Human
cucagugcuucuagcuugauga

SEQ ID NO: 928322 - RNA, 22 nt, Human
cauggcagggcugugggcaggu

SEQ ID NO: 928323 - RNA, 22 nt, Human
uucugcuguaguugcaucuguu

SEQ ID NO: 928324 - RNA, 22 nt, Human
aaagggagcauggcugcaggga

SEQ ID NO: 928325 - RNA, 22 nt, Human
ugcuuaauguacgugaguguac

SEQ ID NO: 928326 - RNA, 22 nt, Human
acucuauaaagauaccucaauu

SEQ ID NO: 928327 - RNA, 22 nt, Human
gagcccaguaggcaaagcugca

SEQ ID NO: 928328 - RNA, 22 nt, Human
aagcugcagacccccugucuca

SEQ ID NO: 928329 - RNA, 19 nt, Human
ugagccagggaggccaugc

SEQ ID NO: 928330 - RNA, 22 nt, Human
cugggugguuuugaugugaauu

SEQ ID NO: 928331 - RNA, 22 nt, Human
uuguuuuaucuuucuacagacu

SEQ ID NO: 928332 - RNA, 22 nt, Human
ggaggccuugccugcaggcaca

SEQ ID NO: 928333 - RNA, 22 nt, Human
uauguacaccggggaagguggg

SEQ ID NO: 928334 - RNA, 22 nt, Human
augcaagauguauagaagacuu

SEQ ID NO: 928335 - RNA, 21 nt, Human
agcugcaaaaacauacaguuc

SEQ ID NO: 928336 - RNA, 22 nt, Human
caucagaaggccagaggguagc

SEQ ID NO: 928337 - RNA, 22 nt, Human
uucaaaguccugucagguagcc

SEQ ID NO: 928338 - RNA, 19 nt, Human
cuuguaaagggcuguuucu

SEQ ID NO: 928339 - RNA, 22 nt, Human
agcuccuggcaaggucauggug

SEQ ID NO: 928340 - RNA, 22 nt, Human
gguuccagagugggcugggaaa

SEQ ID NO: 928341 - RNA, 22 nt, Human
cuagagaaacgccgugggagga

SEQ ID NO: 928342 - RNA, 22 nt, Human
gggguaggaagagaaaauagug

SEQ ID NO: 928343 - RNA, 21 nt, Human
caguucgucuuagaaaauggc

SEQ ID NO: 928344 - RNA, 22 nt, Human
ugggagaggcugccaucuugca

SEQ ID NO: 928345 - RNA, 22 nt, Human
gcugaggucaggagcugugggg

SEQ ID NO: 928346 - RNA, 19 nt, Human
ccugugugggguagagauc

SEQ ID NO: 928347 - RNA, 22 nt, Human
uuucauugucagagcuuugaau

SEQ ID NO: 928348 - RNA, 22 nt, Human
agcaggagagcagugcgugguc

SEQ ID NO: 928349 - RNA, 22 nt, Human
accaggcuugauaccaagaaau

SEQ ID NO: 928350 - RNA, 22 nt, Human
gaugucuucucaacuguagacc

SEQ ID NO: 928351 - RNA, 22 nt, Human
uuccuaacaagucuaucuuuga

SEQ ID NO: 928352 - RNA, 22 nt, Human
uaguuuugauuaguauugucuu

SEQ ID NO: 928353 - RNA, 21 nt, Human
aggggacagaguagcuccagg

SEQ ID NO: 928354 - RNA, 22 nt, Human
aagaggccuggaggcagaggug

SEQ ID NO: 928355 - RNA, 22 nt, Human
auacauguacauaaauguagca

SEQ ID NO: 928356 - RNA, 22 nt, Human
uuacuuuagggauguuuugcuu

SEQ ID NO: 928357 - RNA, 22 nt, Human
ugucuucauucuguauguccag

SEQ ID NO: 928358 - RNA, 22 nt, Human
agaagugccauacuguggucca

SEQ ID NO: 928359 - RNA, 21 nt, Human
gcaaggcaaugccaugauuuc

SEQ ID NO: 928360 - RNA, 22 nt, Human
gcuauuuuugagccauuuauaa

SEQ ID NO: 928361 - RNA, 22 nt, Human
cagguuaguauuuuuaguucau

SEQ ID NO: 928362 - RNA, 22 nt, Human
uggcucaggggucuggcucugu

SEQ ID NO: 928363 - RNA, 22 nt, Human
uuucccaggcuggaaugcagug

SEQ ID NO: 928364 - RNA, 22 nt, Human
aaguccuagacuuggauaguuu

SEQ ID NO: 928365 - RNA, 22 nt, Human
uugugucaggggcccauacuca

SEQ ID NO: 928366 - RNA, 22 nt, Human
cuuuucauuguuuguacaugca

SEQ ID NO: 928367 - RNA, 22 nt, Human
uagcugccauugcuccaggaag

SEQ ID NO: 928368 - RNA, 23 nt, Human
aggcaaugcccugcugagaacuc

SEQ ID NO: 928369 - RNA, 22 nt, Human
gguuucaacuuuugugaggaau

SEQ ID NO: 928370 - RNA, 22 nt, Human
acaggcugcugggcuccgugcu

SEQ ID NO: 928371 - RNA, 22 nt, Human
augaccaguguugcuggccccg

SEQ ID NO: 928372 - RNA, 22 nt, Human
caggaaggcgcggcugugccug

SEQ ID NO: 928373 - RNA, 22 nt, Human
acagaauauuguaagugccacu

SEQ ID NO: 928374 - RNA, 21 nt, Human
aagaggaagcauuauggcaua

SEQ ID NO: 928375 - RNA, 22 nt, Human
uccagagcucugggcauagcug

SEQ ID NO: 928376 - RNA, 22 nt, Human
agaagcagacucugaggcaagg

SEQ ID NO: 928377 - RNA, 22 nt, Human
uugguuccuucugaaaguauug

SEQ ID NO: 928378 - RNA, 22 nt, Human
auacaguauuaccuguucagga

SEQ ID NO: 928379 - RNA, 22 nt, Human
gccagagugauguaacauauau

SEQ ID NO: 928380 - RNA, 22 nt, Human
cuuuuacauuuguugaagagua

SEQ ID NO: 928381 - RNA, 22 nt, Human
uuagaaucagguguuauaauca

SEQ ID NO: 928382 - RNA, 22 nt, Human
acuguguccuauuuccuugaca

SEQ ID NO: 928383 - RNA, 22 nt, Human
aaagauuuaugaaguucaauua

SEQ ID NO: 928384 - RNA, 22 nt, Human
caaguucuggacaggggaauau

SEQ ID NO: 928385 - RNA, 22 nt, Human
aggccagcagcaugacggcauc

SEQ ID NO: 928386 - RNA, 22 nt, Human
auggcagcuggcuugggcaccu

SEQ ID NO: 928387 - RNA, 22 nt, Human
ucuuuggccuuaggagcccuug

SEQ ID NO: 928388 - RNA, 22 nt, Human
acacagaguuugacacauggga

SEQ ID NO: 928389 - RNA, 22 nt, Human
aagcacaggaucuugaggagcg

SEQ ID NO: 928390 - RNA, 22 nt, Human
uuucaacagaauaugaucagag

SEQ ID NO: 928391 - RNA, 22 nt, Human
aguuuccaaauauuguuuuagc

SEQ ID NO: 928392 - RNA, 23 nt, Human
ugcagccacucaggagcucagug

SEQ ID NO: 928393 - RNA, 22 nt, Human
aacauagcuuuacucaaaugac

SEQ ID NO: 928394 - RNA, 22 nt, Human
gaaggaaggaaaaauauauuua

SEQ ID NO: 928395 - RNA, 22 nt, Human
ccuggguccuggcagccuccug

SEQ ID NO: 928396 - RNA, 22 nt, Human
auguaaaguucaguacaguuuu

SEQ ID NO: 928397 - RNA, 17 nt, Human
ccaggcuccaucacugu

SEQ ID NO: 928398 - RNA, 18 nt, Human
uucuccagaaaacauagc

SEQ ID NO: 928399 - RNA, 22 nt, Human
aaaguacuuacaguaugcuugg

SEQ ID NO: 928400 - RNA, 22 nt, Human
cccaauuucuuccucauuugcc

SEQ ID NO: 928401 - RNA, 22 nt, Human
aggcucaguucacgucaacuuu

SEQ ID NO: 928402 - RNA, 22 nt, Human
cuguccaucagaaaggggcuua

SEQ ID NO: 928403 - RNA, 22 nt, Human
acagggagaugggugaaagcgg

SEQ ID NO: 928404 - RNA, 22 nt, Human
cauaacuugcuuuggagcccgg

SEQ ID NO: 928405 - RNA, 22 nt, Human
cagcagggaagcugugcuguuu

SEQ ID NO: 928406 - RNA, 16 nt, Human
cuccucuccuucagga

SEQ ID NO: 928407 - RNA, 22 nt, Human
uccagcaguccaugugagacac

SEQ ID NO: 928408 - RNA, 22 nt, Human
uggaguaaguaugccuuggugg

SEQ ID NO: 928409 - RNA, 22 nt, Human
aauuuguacaaaauguuuauaa

SEQ ID NO: 928410 - RNA, 22 nt, Human
ggaggggaacuaaucccgugac

SEQ ID NO: 928411 - RNA, 22 nt, Human
ugcuugauuagggaagucacau

SEQ ID NO: 928412 - RNA, 21 nt, Human
ccuggagacaaagacagggug

SEQ ID NO: 928413 - RNA, 22 nt, Human
caggcuuuugcauagcacuggg

SEQ ID NO: 928414 - RNA, 22 nt, Human
gacaagacauugguaaagauau

SEQ ID NO: 928415 - RNA, 22 nt, Human
aauugaaaauauuguagaccau

SEQ ID NO: 928416 - RNA, 22 nt, Human
gcauucuucacaguauuccucc

SEQ ID NO: 928417 - RNA, 22 nt, Human
cacaguggaaacagcuaagccu

SEQ ID NO: 928418 - RNA, 22 nt, Human
caauugaacagaugaguuaaau

SEQ ID NO: 928419 - RNA, 22 nt, Human
uuucacauuuuauacuuaagcc

SEQ ID NO: 928420 - RNA, 22 nt, Human
gacccaggagugcagagagugg

SEQ ID NO: 928421 - RNA, 22 nt, Human
cccaguggcuuuugcccagguu

SEQ ID NO: 928422 - RNA, 22 nt, Human
ugguauggccuggagaaugcag

SEQ ID NO: 928423 - RNA, 22 nt, Human
aguuucugcaaaucauuuuuau

SEQ ID NO: 928424 - RNA, 22 nt, Human
cagcuccuguuggucuugagga

SEQ ID NO: 928425 - RNA, 22 nt, Human
gggaagggagggccuccaguca

SEQ ID NO: 928426 - RNA, 22 nt, Human
gcaguugcaggauuuguguugu

SEQ ID NO: 928427 - RNA, 22 nt, Human
uguuuucacaaugaugucagau

SEQ ID NO: 928428 - RNA, 22 nt, Human
cauuuuauccucugggaagcua

SEQ ID NO: 928429 - RNA, 22 nt, Human
ggcaggugcugggagcaucuca

SEQ ID NO: 928430 - RNA, 22 nt, Human
uacagugacagauagggauaga

SEQ ID NO: 928431 - RNA, 22 nt, Human
auuuaucucuggaaacuaagca

SEQ ID NO: 928432 - RNA, 22 nt, Human
uuucagcuuuaccauuccauga

SEQ ID NO: 928433 - RNA, 22 nt, Human
uucuaagggguucacaggcaua

SEQ ID NO: 928434 - RNA, 22 nt, Human
ugagcagacucugcagagccac

SEQ ID NO: 928435 - RNA, 22 nt, Human
cugccugugaacauacuggggg

SEQ ID NO: 928436 - RNA, 22 nt, Human
gcauacagagaggauguggcau

SEQ ID NO: 928437 - RNA, 22 nt, Human
cugcucuaacugcauuaguuuu

SEQ ID NO: 928438 - RNA, 23 nt, Human
uugcagggauggaguucaaaaug

SEQ ID NO: 928439 - RNA, 22 nt, Human
aauggcaaaaggaguuaguuga

SEQ ID NO: 928440 - RNA, 22 nt, Human
uaagauaugguaggaaguuugg

SEQ ID NO: 928441 - RNA, 21 nt, Human
cagcaagacauguuuaucaag

SEQ ID NO: 928442 - RNA, 22 nt, Human
acaguguacuagguacauguuc

SEQ ID NO: 928443 - RNA, 22 nt, Human
gcuuucuugcugcaugguggcu

SEQ ID NO: 928444 - RNA, 22 nt, Human
gcugucuggcauggcguggcug

SEQ ID NO: 928445 - RNA, 22 nt, Human
ccuccaggcugaauaucuagaa

SEQ ID NO: 928446 - RNA, 22 nt, Human
aaguucaaguguaaucuuuauu

SEQ ID NO: 928447 - RNA, 21 nt, Human
ucucuuucuggaagcuucccu

SEQ ID NO: 928448 - RNA, 22 nt, Human
ccaagaggguugcccugagcgu

SEQ ID NO: 928449 - RNA, 22 nt, Human
acucugaaugugcauguaaauc

SEQ ID NO: 928450 - RNA, 21 nt, Human
agacagaacaacugcucucca

SEQ ID NO: 928451 - RNA, 22 nt, Human
uaugucuggaaguguacuuguc

SEQ ID NO: 928452 - RNA, 22 nt, Human
ggcuggcuuucucuccgcaccu

SEQ ID NO: 928453 - RNA, 20 nt, Human
gagauuaacugagaaucuag

SEQ ID NO: 928454 - RNA, 22 nt, Human
ugauuucucuuggcaauauguu

SEQ ID NO: 928455 - RNA, 22 nt, Human
ccugcccagcuucccgagugca

SEQ ID NO: 928456 - RNA, 22 nt, Human
aaagugcugggauuacaggugu

SEQ ID NO: 928457 - RNA, 22 nt, Human
gugguuugugcauagcuccuau

SEQ ID NO: 928458 - RNA, 22 nt, Human
uauugcaucucuucauaucugu

SEQ ID NO: 928459 - RNA, 22 nt, Human
ccucuggcucacagcaccaacu

SEQ ID NO: 928460 - RNA, 22 nt, Human
aagacauuuugaaauuggaagc

SEQ ID NO: 928461 - RNA, 22 nt, Human
uguuuuaaagccauugccuuuc

SEQ ID NO: 928462 - RNA, 22 nt, Human
gcagccagcccuagucccacuu

SEQ ID NO: 928463 - RNA, 22 nt, Human
uauuaauucuugccaauucucc

SEQ ID NO: 928464 - RNA, 22 nt, Human
aaucuuuuaggggauccugagg

SEQ ID NO: 928465 - RNA, 22 nt, Human
agagucuguuacuuguccccua

SEQ ID NO: 928466 - RNA, 22 nt, Human
cauucauaagacuuugcucuug

SEQ ID NO: 928467 - RNA, 22 nt, Human
ggcuugggagcaggcaugugac

SEQ ID NO: 928468 - RNA, 21 nt, Human
ucagugcaauucuauggggaa

SEQ ID NO: 928469 - RNA, 22 nt, Human
aguguuaaugguguauauuagg

SEQ ID NO: 928470 - RNA, 22 nt, Human
ucccaggcagcuucuuucauca

SEQ ID NO: 928471 - RNA, 22 nt, Human
auggccugggcccgcuucagau

SEQ ID NO: 928472 - RNA, 22 nt, Human
gcuggcuugacagaggccuggg

SEQ ID NO: 928473 - RNA, 22 nt, Human
uauguugagugaaagaagcuag

SEQ ID NO: 928474 - RNA, 22 nt, Human
ggaaacauuccaagaguugaaa

SEQ ID NO: 928475 - RNA, 22 nt, Human
gcugcuuugacagugggaacag

SEQ ID NO: 928476 - RNA, 22 nt, Human
ucuucaugaaauugauugcuua

SEQ ID NO: 928477 - RNA, 22 nt, Human
cugugggcugaaagugcucccg

SEQ ID NO: 928478 - RNA, 22 nt, Human
uggcaggagguuuucuccagga

SEQ ID NO: 928479 - RNA, 22 nt, Human
uccuggauuaauagggagcugu

SEQ ID NO: 928480 - RNA, 21 nt, Human
guucuauuuugcaaacuucug

SEQ ID NO: 928481 - RNA, 21 nt, Human
augugaaauaucaucagagca

SEQ ID NO: 928482 - RNA, 20 nt, Human
uguuauuagcaagcuucuuu

SEQ ID NO: 928483 - RNA, 22 nt, Human
cccaggcugcguauccacaaua

SEQ ID NO: 928484 - RNA, 22 nt, Human
ucccugggccuccugcuaugca

SEQ ID NO: 928485 - RNA, 23 nt, Human
ucucagugccgauugcauacaca

SEQ ID NO: 928486 - RNA, 21 nt, Human
ggaagggcucugaggacggcu

SEQ ID NO: 928487 - RNA, 22 nt, Human
ccaagccuagucgugcacacag

SEQ ID NO: 928488 - RNA, 22 nt, Human
agucuccacuugacaucagcag

SEQ ID NO: 928489 - RNA, 22 nt, Human
uuuaagagcuaguaugucauuu

SEQ ID NO: 928490 - RNA, 22 nt, Human
gagagcccugcuccuaucccag

SEQ ID NO: 928491 - RNA, 22 nt, Human
acuuucaagcccucuagagaca

SEQ ID NO: 928492 - RNA, 22 nt, Human
cagccugggcuccagagucccu

SEQ ID NO: 928493 - RNA, 22 nt, Human
accacccucagcagagcugaaa

SEQ ID NO: 928494 - RNA, 22 nt, Human
cacagguauauguguauauacu

SEQ ID NO: 928495 - RNA, 22 nt, Human
auggcagggaccaagcugucau

SEQ ID NO: 928496 - RNA, 22 nt, Human
caguaguggggagcccaguguc

SEQ ID NO: 928497 - RNA, 22 nt, Human
acauguguggccgcuguagaca

SEQ ID NO: 928498 - RNA, 22 nt, Human
gaugucuuagguaacauucuau

SEQ ID NO: 928499 - RNA, 22 nt, Human
ugccagagaguggcuggguguc

SEQ ID NO: 928500 - RNA, 22 nt, Human
ugcagcucauugcuggggucug

SEQ ID NO: 928501 - RNA, 22 nt, Human
cugggugccagcauggcugagu

SEQ ID NO: 928502 - RNA, 22 nt, Human
uauaguaaaauuuucauuuaug

SEQ ID NO: 928503 - RNA, 20 nt, Human
ggcaugagaugugagggagg

SEQ ID NO: 928504 - RNA, 22 nt, Human
aagaaugagcucaaagaucuua

SEQ ID NO: 928505 - RNA, 22 nt, Human
acagacaguaaauaguguggcu

SEQ ID NO: 928506 - RNA, 21 nt, Human
uugagcauguacuuugugcuu

SEQ ID NO: 928507 - RNA, 22 nt, Human
acugacaccaccaauauguuca

SEQ ID NO: 928508 - RNA, 22 nt, Human
acauuagauaacucagaaagga

SEQ ID NO: 928509 - RNA, 22 nt, Human
acaggcagguugagaaacauuu

SEQ ID NO: 928510 - RNA, 22 nt, Human
acagcugcugcuucucacuggg

SEQ ID NO: 928511 - RNA, 22 nt, Human
acaugcuuugcacuuacaucau

SEQ ID NO: 928512 - RNA, 22 nt, Human
gcuggaagaaugagugccucgu

SEQ ID NO: 928513 - RNA, 22 nt, Human
auuuauuaugggauuuggcuca

SEQ ID NO: 928514 - RNA, 22 nt, Human
uuaaaaggguaagcagcaacuu

SEQ ID NO: 928515 - RNA, 21 nt, Human
guguaaacggacucaugcagu

SEQ ID NO: 928516 - RNA, 22 nt, Human
uuaauuaagagauacugcagua

SEQ ID NO: 928517 - RNA, 17 nt, Human
uucaagauauugaaaug

SEQ ID NO: 928518 - RNA, 15 nt, Human
uauacagaaguucag

SEQ ID NO: 928519 - RNA, 22 nt, Human
gggaugacaaagugucuguccc

SEQ ID NO: 928520 - RNA, 22 nt, Human
acuuuuuaguuuccucaaacau

SEQ ID NO: 928521 - RNA, 22 nt, Human
uucagagcuggugucuacagcu

SEQ ID NO: 928522 - RNA, 22 nt, Human
ucuaggguccacagggucagcc

SEQ ID NO: 928523 - RNA, 23 nt, Human
agugcuggagaagcuucuggcuu

SEQ ID NO: 928524 - RNA, 22 nt, Human
agacaugguuuauuuuaauggu

SEQ ID NO: 928525 - RNA, 22 nt, Human
cagagggaguuucugagguugc

SEQ ID NO: 928526 - RNA, 22 nt, Human
gagggggcuagcgcagugccca

SEQ ID NO: 928527 - RNA, 22 nt, Human
uggcugggagcuggaacugggc

SEQ ID NO: 928528 - RNA, 22 nt, Human
aaguuuagucuugucuuaguaa

SEQ ID NO: 928529 - RNA, 21 nt, Human
ccaggguccagcugccauggu

SEQ ID NO: 928530 - RNA, 22 nt, Human
aaguguuuuguaaacagaaaag

SEQ ID NO: 928531 - RNA, 22 nt, Human
ucuuuggcauuuaggagcagga

SEQ ID NO: 928532 - RNA, 20 nt, Human
uaggcagagcugugcagccu

SEQ ID NO: 928533 - RNA, 22 nt, Human
agcuguguguuuccacugagcu

SEQ ID NO: 928534 - RNA, 22 nt, Human
ugugaagaucaggguccuagag

SEQ ID NO: 928535 - RNA, 22 nt, Human
ccuggggagagaaagcccagcc

SEQ ID NO: 928536 - RNA, 22 nt, Human
acacauuuuggcuagguggaga

SEQ ID NO: 928537 - RNA, 22 nt, Human
ucccaaggcacagggcagggac

SEQ ID NO: 928538 - RNA, 22 nt, Human
gaaagccaucuggcugcuggga

SEQ ID NO: 928539 - RNA, 22 nt, Human
cccagaggugaaggagguggga

SEQ ID NO: 928540 - RNA, 22 nt, Human
gaaacagggaguaguaauuuac

SEQ ID NO: 928541 - RNA, 22 nt, Human
uaacuuuucuaggugugauaau

SEQ ID NO: 928542 - RNA, 22 nt, Human
ccagugugcaaucucuggcuua

SEQ ID NO: 928543 - RNA, 22 nt, Human
aaguucuacuguggguaaaaug

SEQ ID NO: 928544 - RNA, 22 nt, Human
auauacuuuucacuaauggcua

SEQ ID NO: 928545 - RNA, 22 nt, Human
aaauagacacaugcguucauau

SEQ ID NO: 928546 - RNA, 22 nt, Human
ccacaagacucugucagcauaa

SEQ ID NO: 928547 - RNA, 22 nt, Human
cacaggaagaucucccagaggu

SEQ ID NO: 928548 - RNA, 21 nt, Human
ugagugccaccugcuggccaa

SEQ ID NO: 928549 - RNA, 22 nt, Human
uuacaguuuaccaagaauauug

SEQ ID NO: 928550 - RNA, 22 nt, Human
gcaggaagggaaagguugacuc

SEQ ID NO: 928551 - RNA, 17 nt, Human
auguaagaagaaagcag

SEQ ID NO: 928552 - RNA, 22 nt, Human
ucucccuggagcccugaagcau

SEQ ID NO: 928553 - RNA, 22 nt, Human
uccaggccacauggauggcgau

SEQ ID NO: 928554 - RNA, 22 nt, Human
uuccaggaggcacugacagagg

SEQ ID NO: 928555 - RNA, 22 nt, Human
gacuacagauagccaauuaagu

SEQ ID NO: 928556 - RNA, 22 nt, Human
auggcagaauuaggauuucaag

SEQ ID NO: 928557 - RNA, 22 nt, Human
cugcccugcuaaugaguuccaa

SEQ ID NO: 928558 - RNA, 23 nt, Human
ccucccaggcugcgagucccgag

SEQ ID NO: 928559 - RNA, 22 nt, Human
gugggcagccuguccggagacc

SEQ ID NO: 928560 - RNA, 22 nt, Human
acaugcauggcugcuuaaauua

SEQ ID NO: 928561 - RNA, 22 nt, Human
auuggaaguauuucaucaaaag

SEQ ID NO: 928562 - RNA, 22 nt, Human
ugcccugugugugcaagcacug

SEQ ID NO: 928563 - RNA, 22 nt, Human
aaacacagggauauauauucca

SEQ ID NO: 928564 - RNA, 22 nt, Human
aggccacagucagugggugcug

SEQ ID NO: 928565 - RNA, 22 nt, Human
uggcagagugcagaagaggcau

SEQ ID NO: 928566 - RNA, 22 nt, Human
aaauuuuaguaaggaaguugag

SEQ ID NO: 928567 - RNA, 22 nt, Human
uccugccuagcaggugaccuau

SEQ ID NO: 928568 - RNA, 22 nt, Human
uggucagcuucagaguguucca

SEQ ID NO: 928569 - RNA, 22 nt, Human
ucuuuauuuaagucuguuguaa

SEQ ID NO: 928570 - RNA, 22 nt, Human
ugguggggucaucgucagaugc

SEQ ID NO: 928571 - RNA, 22 nt, Human
uguguacuaaacuuccauauau

SEQ ID NO: 928572 - RNA, 22 nt, Human
aggaagcugguuacgaagggau

SEQ ID NO: 928573 - RNA, 22 nt, Human
agaaaacuugucacagcucuca

SEQ ID NO: 928574 - RNA, 22 nt, Human
guuccuuggaagaacuugaggu

SEQ ID NO: 928575 - RNA, 22 nt, Human
uggcuucagacuucugcuacgu

SEQ ID NO: 928576 - RNA, 22 nt, Human
ucucucagauggggcacuagua

SEQ ID NO: 928577 - RNA, 22 nt, Human
uuaaaagggauguuaucuguaa

SEQ ID NO: 928578 - RNA, 23 nt, Human
auauaaacaccagauagauugua

SEQ ID NO: 928579 - RNA, 22 nt, Human
agcuuuaucacaauauuggcua

SEQ ID NO: 928580 - RNA, 22 nt, Human
uuuacaacccaaguccagagag

SEQ ID NO: 928581 - RNA, 22 nt, Human
cugcuucacguugugccuuguu

SEQ ID NO: 928582 - RNA, 22 nt, Human
agucccagcccaguccuguaag

SEQ ID NO: 928583 - RNA, 22 nt, Human
acacaagauuguguauugaauu

SEQ ID NO: 928584 - RNA, 20 nt, Human
acaaaauagguacuggguag

SEQ ID NO: 928585 - RNA, 22 nt, Human
uacacaauuaguugcaaaguga

SEQ ID NO: 928586 - RNA, 22 nt, Human
cugggguggugcaggccucaug

SEQ ID NO: 928587 - RNA, 22 nt, Human
agcuuuuauuggcugucauuug

SEQ ID NO: 928588 - RNA, 22 nt, Human
ggagggguggucaccuggcagg

SEQ ID NO: 928589 - RNA, 22 nt, Human
aucauuuuauggcugagaggac

SEQ ID NO: 928590 - RNA, 22 nt, Human
ccuuuguacucugguccaaacu

SEQ ID NO: 928591 - RNA, 22 nt, Human
gacagacaggaggccaccugcu

SEQ ID NO: 928592 - RNA, 22 nt, Human
gugcuguauugagacaaggucg

SEQ ID NO: 928593 - RNA, 22 nt, Human
gggcagugauuuuccuuagagg

SEQ ID NO: 928594 - RNA, 22 nt, Human
uagcugaaugugaccuuaaaga

SEQ ID NO: 928595 - RNA, 22 nt, Human
cacugaaaggaaaccagagcau

SEQ ID NO: 928596 - RNA, 22 nt, Human
aauacuauguagccaaaauaau

SEQ ID NO: 928597 - RNA, 22 nt, Human
uucaguguuuguagagauaacu

SEQ ID NO: 928598 - RNA, 22 nt, Human
ugccuucuucucccuggcucag

SEQ ID NO: 928599 - RNA, 22 nt, Human
aaagaucugacuuagacacaga

SEQ ID NO: 928600 - RNA, 22 nt, Human
uaucaauacauguuaucagugu

SEQ ID NO: 928601 - RNA, 22 nt, Human
uuccuggguugugcauuguaca

SEQ ID NO: 928602 - RNA, 22 nt, Human
cuccaggcccacgucgaggagg

SEQ ID NO: 928603 - RNA, 22 nt, Human
uggaaugugguaucaguagaaa

SEQ ID NO: 928604 - RNA, 22 nt, Human
aagcccaguuucacacugagac

SEQ ID NO: 928605 - RNA, 22 nt, Human
uuuauccagaaucaggauuuuu

SEQ ID NO: 928606 - RNA, 22 nt, Human
aggaagcucaaagccaugaugu

SEQ ID NO: 928607 - RNA, 22 nt, Human
aagcaagaggaaauguggaccu

SEQ ID NO: 928608 - RNA, 22 nt, Human
ugggcugaguguggaacuaguu

SEQ ID NO: 928609 - RNA, 17 nt, Human
gcucugccaggaaagag

SEQ ID NO: 928610 - RNA, 22 nt, Human
cauuugauuacuaaagauaauu

SEQ ID NO: 928611 - RNA, 22 nt, Human
agaugcugugucuguucccuug

SEQ ID NO: 928612 - RNA, 22 nt, Human
cagaaguuggagcuuuccauca

SEQ ID NO: 928613 - RNA, 22 nt, Human
acugccagguaagugcuccugc

SEQ ID NO: 928614 - RNA, 22 nt, Human
cagcaucuuucucuucuggagu

SEQ ID NO: 928615 - RNA, 22 nt, Human
agggcucagcaucucauucugu

SEQ ID NO: 928616 - RNA, 22 nt, Human
aggauggggucugcagccuggu

SEQ ID NO: 928617 - RNA, 22 nt, Human
uggaccaugagcugcagguguu

SEQ ID NO: 928618 - RNA, 22 nt, Human
ugagggagucaugauuaaggaa

SEQ ID NO: 928619 - RNA, 22 nt, Human
ucucacagcucugcugcaugcu

SEQ ID NO: 928620 - RNA, 22 nt, Human
cucccugugucuucacuuggcc

SEQ ID NO: 928621 - RNA, 20 nt, Human
aaaugaugggaauaaucuau

SEQ ID NO: 928622 - RNA, 22 nt, Human
guuucaugacugauguuguuga

SEQ ID NO: 928623 - RNA, 22 nt, Human
cagcagccuccacucgccccac

SEQ ID NO: 928624 - RNA, 22 nt, Human
gggaauugagguaugcugggcu

SEQ ID NO: 928625 - RNA, 22 nt, Human
aggcucugcauccaggcuuuau

SEQ ID NO: 928626 - RNA, 22 nt, Human
aggcccgagguucgugugcacc

SEQ ID NO: 928627 - RNA, 22 nt, Human
ccagagggaacugggccucauu

SEQ ID NO: 928628 - RNA, 22 nt, Human
ucuucauuuuacaggcagaccu

SEQ ID NO: 928629 - RNA, 22 nt, Human
gugcucauagaugaugcucuuu

SEQ ID NO: 928630 - RNA, 22 nt, Human
auguuucaggcgaacuaacaug

SEQ ID NO: 928631 - RNA, 22 nt, Human
uauuaauaagugacuacuagcu

SEQ ID NO: 928632 - RNA, 22 nt, Human
ccugggugaugugcugcccucg

SEQ ID NO: 928633 - RNA, 22 nt, Human
cagguggggggcuuccgagccu

SEQ ID NO: 928634 - RNA, 22 nt, Human
guggccuggaugagcuucgaca

SEQ ID NO: 928635 - RNA, 22 nt, Human
ucaguccaaugauuguaggaca

SEQ ID NO: 928636 - RNA, 22 nt, Human
uugaagaaauuauuuuauauag

SEQ ID NO: 928637 - RNA, 22 nt, Human
ucaggcugcuuucaugcuuaga

SEQ ID NO: 928638 - RNA, 22 nt, Human
aaggcucugcaaaaccuccaag

SEQ ID NO: 928639 - RNA, 22 nt, Human
aaaugcuguucuuuuagguaga

SEQ ID NO: 928640 - RNA, 22 nt, Human
aauaaugagacagcuuauuuaa

SEQ ID NO: 928641 - RNA, 22 nt, Human
ccagagagguagcuuacccucu

SEQ ID NO: 928642 - RNA, 22 nt, Human
guucucaguucaggaaggacau

SEQ ID NO: 928643 - RNA, 22 nt, Human
cagaccugagguugaguaccag

SEQ ID NO: 928644 - RNA, 22 nt, Human
uggcaugcaagaggaggcuccc

SEQ ID NO: 928645 - RNA, 23 nt, Human
agccucagccgguggcagaagug

SEQ ID NO: 928646 - RNA, 22 nt, Human
acuucucuucauagguggcaau

SEQ ID NO: 928647 - RNA, 22 nt, Human
ucacauuucgcaucaguccgau

SEQ ID NO: 928648 - RNA, 22 nt, Human
augaaagcaggaauuguucugu

SEQ ID NO: 928649 - RNA, 22 nt, Human
uuccuuccuccuccaguucugg

SEQ ID NO: 928650 - RNA, 21 nt, Human
uccugcaggaggccugagagg

SEQ ID NO: 928651 - RNA, 22 nt, Human
aaggacugcuaggaagccgugu

SEQ ID NO: 928652 - RNA, 22 nt, Human
uggagugcaauaguaauaaggu

SEQ ID NO: 928653 - RNA, 22 nt, Human
uacuauuuugacaugaaauuga

SEQ ID NO: 928654 - RNA, 22 nt, Human
cagcagcugcgugcccaggccg

SEQ ID NO: 928655 - RNA, 22 nt, Human
agcagcaaggaacagaauggac

SEQ ID NO: 928656 - RNA, 22 nt, Human
ucucuccaacaugguggugcug

SEQ ID NO: 928657 - RNA, 22 nt, Human
aaagcauuacuagacuggauuu

SEQ ID NO: 928658 - RNA, 22 nt, Human
cccaggcuggggcuccuccagc

SEQ ID NO: 928659 - RNA, 20 nt, Human
gccaggagggugugaugagc

SEQ ID NO: 928660 - RNA, 22 nt, Human
agaaaugaauauguagugguua

SEQ ID NO: 928661 - RNA, 22 nt, Human
uucuguaugccaauggguuuuu

SEQ ID NO: 928662 - RNA, 22 nt, Human
uuugaaucugauauggcagcau

SEQ ID NO: 928663 - RNA, 22 nt, Human
ccuggacuaaaaucuuuucuua

SEQ ID NO: 928664 - RNA, 22 nt, Human
aaucugugcucccugcauuugu

SEQ ID NO: 928665 - RNA, 22 nt, Human
uagaacagaggguugcccagau

SEQ ID NO: 928666 - RNA, 22 nt, Human
auuugcuucauagaucugugga

SEQ ID NO: 928667 - RNA, 22 nt, Human
cauucacagagggggaagcauc

SEQ ID NO: 928668 - RNA, 22 nt, Human
uguaaacucaguauguuuuacu

SEQ ID NO: 928669 - RNA, 22 nt, Human
augaaauucaucugagaaugcu

SEQ ID NO: 928670 - RNA, 19 nt, Human
agcugcagaccagaagugc

SEQ ID NO: 928671 - RNA, 22 nt, Human
uggcagcuugaaugcagucuuu

SEQ ID NO: 928672 - RNA, 21 nt, Human
ccagcagcucaaggaucucuu

SEQ ID NO: 928673 - RNA, 22 nt, Human
gagaacagaagcauuccuaauu

SEQ ID NO: 928674 - RNA, 18 nt, Human
acaggccucaguccugca

SEQ ID NO: 928675 - RNA, 22 nt, Human
cuuuauguacuguguauuugaa

SEQ ID NO: 928676 - RNA, 19 nt, Human
cuucagggaggggccaggc

SEQ ID NO: 928677 - RNA, 22 nt, Human
uggccagguguggguucucaga

SEQ ID NO: 928678 - RNA, 22 nt, Human
aggacuucugagcugcuuuaaa

SEQ ID NO: 928679 - RNA, 22 nt, Human
cccaggaggacauuccauaccc

SEQ ID NO: 928680 - RNA, 22 nt, Human
uggggcucuccacagugucuca

SEQ ID NO: 928681 - RNA, 22 nt, Human
auagacgcggccgcugaugcag

SEQ ID NO: 928682 - RNA, 22 nt, Human
uccagcucuucaguucugcaaa

SEQ ID NO: 928683 - RNA, 17 nt, Human
ugauucaacuagaaacu

SEQ ID NO: 928684 - RNA, 22 nt, Human
ucccugcagccccugagccuuc

SEQ ID NO: 928685 - RNA, 22 nt, Human
cuaucucuuguuuuccugaagc

SEQ ID NO: 928686 - RNA, 22 nt, Human
gugugggggcagcucugauaug

SEQ ID NO: 928687 - RNA, 22 nt, Human
agggcucugugacuaucacugc

SEQ ID NO: 928688 - RNA, 22 nt, Human
uucugggccuccuaggacaggc

SEQ ID NO: 928689 - RNA, 22 nt, Human
uggcucagaugcucuuccagug

SEQ ID NO: 928690 - RNA, 22 nt, Human
uguauguaaaggucuucauguu

SEQ ID NO: 928691 - RNA, 22 nt, Human
ucugaaauaaaugcacuguuag

SEQ ID NO: 928692 - RNA, 22 nt, Human
cucugugguuagacuauggcug

SEQ ID NO: 928693 - RNA, 22 nt, Human
cugcugagcaucagggcugccc

SEQ ID NO: 928694 - RNA, 22 nt, Human
agggccuggaacugugggcagg

SEQ ID NO: 928695 - RNA, 22 nt, Human
ucacacauacucaugugugagu

SEQ ID NO: 928696 - RNA, 22 nt, Human
uguuacaauauuaucaacugag

SEQ ID NO: 928697 - RNA, 22 nt, Human
ccagaagagaucacaguucuug

SEQ ID NO: 928698 - RNA, 22 nt, Human
cuggguugcccugggccuguga

SEQ ID NO: 928699 - RNA, 22 nt, Human
cauuuguaguuaaaaaugucuc

SEQ ID NO: 928700 - RNA, 22 nt, Human
aagaauguucuuguagucauga

SEQ ID NO: 928701 - RNA, 22 nt, Human
cagagaacuccaguggcuggcg

SEQ ID NO: 928702 - RNA, 22 nt, Human
aaguuugagagccuuuaguaua

SEQ ID NO: 928703 - RNA, 22 nt, Human
aaacugaagccuuggagugaca

SEQ ID NO: 928704 - RNA, 22 nt, Human
ucugggaaccaaagggugcuua

SEQ ID NO: 928705 - RNA, 22 nt, Human
auuccaaagccugaauaaugga

SEQ ID NO: 928706 - RNA, 22 nt, Human
auguaacaggugaagcucugag

SEQ ID NO: 928707 - RNA, 21 nt, Human
ucccucagacagggugccuau

SEQ ID NO: 928708 - RNA, 22 nt, Human
caggagugucgggucacuaggu

SEQ ID NO: 928709 - RNA, 21 nt, Human
aggcugcuggcucaggguccu

SEQ ID NO: 928710 - RNA, 22 nt, Human
cccugggagaaguugagggcug

SEQ ID NO: 928711 - RNA, 22 nt, Human
uucucaggcacuucuuccccgc

SEQ ID NO: 928712 - RNA, 22 nt, Human
gaggcacagaguaggugcacac

SEQ ID NO: 928713 - RNA, 22 nt, Human
agccaaaguccaaaugcagugu

SEQ ID NO: 928714 - RNA, 22 nt, Human
uaauaaaugaaagugcuggcau

SEQ ID NO: 928715 - RNA, 22 nt, Human
ccagcagccccucaaugaucug

SEQ ID NO: 928716 - RNA, 20 nt, Human
aggcuuggcuuggcaggaac

SEQ ID NO: 928717 - RNA, 22 nt, Human
uuugucuuggccaagguucuga

SEQ ID NO: 928718 - RNA, 22 nt, Human
auguagcagaagauguuuuccu

SEQ ID NO: 928719 - RNA, 22 nt, Human
ggcaggugcgcauguugcauua

SEQ ID NO: 928720 - RNA, 22 nt, Human
agcugcuguuuggugagucuug

SEQ ID NO: 928721 - RNA, 22 nt, Human
cccagggcuugagucauccaug

SEQ ID NO: 928722 - RNA, 22 nt, Human
gugugcaguagagaaagagcag

SEQ ID NO: 928723 - RNA, 22 nt, Human
agaauucagaaugcauuucuaa

SEQ ID NO: 928724 - RNA, 19 nt, Human
agcuguggaugugggauuu

SEQ ID NO: 928725 - RNA, 22 nt, Human
uauuccagugugaucuuuguag

SEQ ID NO: 928726 - RNA, 22 nt, Human
agcucuggcacuggcgcgggau

SEQ ID NO: 928727 - RNA, 22 nt, Human
gcaucuguuagagugugcaugc

SEQ ID NO: 928728 - RNA, 19 nt, Human
gacacaguugguuccuuug

SEQ ID NO: 928729 - RNA, 22 nt, Human
ugagcuuccucccugcauccau

SEQ ID NO: 928730 - RNA, 21 nt, Human
caguguggugaccagggucuc

SEQ ID NO: 928731 - RNA, 22 nt, Human
uuucagaguuaguagagcaugu

SEQ ID NO: 928732 - RNA, 22 nt, Human
auucuacaaucauguagauccu

SEQ ID NO: 928733 - RNA, 22 nt, Human
gguggacaguguuagcucuggg

SEQ ID NO: 928734 - RNA, 22 nt, Human
aucugucuuuuauucaugagcu

SEQ ID NO: 928735 - RNA, 22 nt, Human
ugucauuuucugguuaguuaau

SEQ ID NO: 928736 - RNA, 22 nt, Human
aaagcuuugcuggaaggaagag

SEQ ID NO: 928737 - RNA, 22 nt, Human
cauuggaaugcauuugaagaga

SEQ ID NO: 928738 - RNA, 22 nt, Human
aggucugagcuccuuccucuga

SEQ ID NO: 928739 - RNA, 21 nt, Human
uacauagaggugauaucuguu

SEQ ID NO: 928740 - RNA, 22 nt, Human
aacacagucauuagaggcagcc

SEQ ID NO: 928741 - RNA, 22 nt, Human
ugcagaguagugaggggacaga

SEQ ID NO: 928742 - RNA, 22 nt, Human
aaguugcuuuccggcgggcagg

SEQ ID NO: 928743 - RNA, 22 nt, Human
agcaagaugaaggauucaagac

SEQ ID NO: 928744 - RNA, 22 nt, Human
ccugcuguaaugugucuuuauu

SEQ ID NO: 928745 - RNA, 22 nt, Human
uucuucaaaguaauagagacua

SEQ ID NO: 928746 - RNA, 22 nt, Human
auuugucuagugguauucacgu

SEQ ID NO: 928747 - RNA, 22 nt, Human
gacacagcuaauggcuuaggac

SEQ ID NO: 928748 - RNA, 22 nt, Human
gacaaauguaccccuagagucu

SEQ ID NO: 928749 - RNA, 22 nt, Human
auacaugaggaggcuggaaaca

SEQ ID NO: 928750 - RNA, 22 nt, Human
guggagaggaacccagcucugu

SEQ ID NO: 928751 - RNA, 22 nt, Human
cucccucccuacgugagcucac

SEQ ID NO: 928752 - RNA, 22 nt, Human
ccaugugucgggccugcagugg

SEQ ID NO: 928753 - RNA, 22 nt, Human
uaacucuuuacuauacauuuau

SEQ ID NO: 928754 - RNA, 22 nt, Human
uauacacauccuccaaagauag

SEQ ID NO: 928755 - RNA, 21 nt, Human
aaguuugggauucaguuucca

SEQ ID NO: 928756 - RNA, 22 nt, Human
gcaagaaaaaggcuucaugaac

SEQ ID NO: 928757 - RNA, 22 nt, Human
gcuguuagucaaaucaguugag

SEQ ID NO: 928758 - RNA, 22 nt, Human
auuuacacuugguuuacuagag

SEQ ID NO: 928759 - RNA, 22 nt, Human
cuggagccagccagggcccucu

SEQ ID NO: 928760 - RNA, 22 nt, Human
aucagaaauugcuaccagugga

SEQ ID NO: 928761 - RNA, 22 nt, Human
uguguguauaauaaugucugca

SEQ ID NO: 928762 - RNA, 22 nt, Human
auauguuuugugcuucauuggu

SEQ ID NO: 928763 - RNA, 22 nt, Human
uuggaagacagugaaacagcac

SEQ ID NO: 928764 - RNA, 22 nt, Human
aggcccaugugagucuuguccu

SEQ ID NO: 928765 - RNA, 22 nt, Human
auguguaggugaaucgaggcug

SEQ ID NO: 928766 - RNA, 19 nt, Human
ucaaaacacaaaugguuga

SEQ ID NO: 928767 - RNA, 22 nt, Human
uuuugcuuaucugagugcagcc

SEQ ID NO: 928768 - RNA, 22 nt, Human
aagauacauuuucuucagagaa

SEQ ID NO: 928769 - RNA, 22 nt, Human
agcagaaccugcagaccugucu

SEQ ID NO: 928770 - RNA, 22 nt, Human
uaacaguguggacuugagaucu

SEQ ID NO: 928771 - RNA, 22 nt, Human
uagaaaauagggccuguggagc

SEQ ID NO: 928772 - RNA, 22 nt, Human
uggauuuauuagguuggugaaa

SEQ ID NO: 928773 - RNA, 22 nt, Human
uucauugaugugguuuaaugua

SEQ ID NO: 928774 - RNA, 22 nt, Human
gggccagagcacagaggauguu

SEQ ID NO: 928775 - RNA, 22 nt, Human
uugaaaaccgugggaggcugaa

SEQ ID NO: 928776 - RNA, 22 nt, Human
aauucacaaaaccagauugcuu

SEQ ID NO: 928777 - RNA, 22 nt, Human
guucuuaaagauucaucaagca

SEQ ID NO: 928778 - RNA, 22 nt, Human
ucaugcagguuuccagccagau

SEQ ID NO: 928779 - RNA, 22 nt, Human
aucuuagaaguuugauaaaauc

SEQ ID NO: 928780 - RNA, 22 nt, Human
auguauuugcgagguuaggaaa

SEQ ID NO: 928781 - RNA, 22 nt, Human
gaauguucugaggaaucagaga

SEQ ID NO: 928782 - RNA, 22 nt, Human
uaaagcuagaauuguuccagca

SEQ ID NO: 928783 - RNA, 22 nt, Human
guccaugguugcuuucauguaa

SEQ ID NO: 928784 - RNA, 22 nt, Human
cuugcuuaccuaguuagcucca

SEQ ID NO: 928785 - RNA, 22 nt, Human
cugggagacgcagcuggggauc

SEQ ID NO: 928786 - RNA, 22 nt, Human
gcuagcaaaugucauuuggaag

SEQ ID NO: 928787 - RNA, 22 nt, Human
acccaggauaaucuguguaucu

SEQ ID NO: 928788 - RNA, 22 nt, Human
uguuccuucacagcaguggaca

SEQ ID NO: 928789 - RNA, 22 nt, Human
ugccgugucccauugugcucug

SEQ ID NO: 928790 - RNA, 22 nt, Human
gcugcaggcggccgugguggcg

SEQ ID NO: 928791 - RNA, 19 nt, Human
ugggcagcucccucugucc

SEQ ID NO: 928792 - RNA, 22 nt, Human
guuucaaagucagaaaaggagg

SEQ ID NO: 928793 - RNA, 22 nt, Human
aaugguuuauggggaccgcaaa

SEQ ID NO: 928794 - RNA, 22 nt, Human
aaagugacugccagugcugggc

SEQ ID NO: 928795 - RNA, 22 nt, Human
cucuagggugcaggccccagga

SEQ ID NO: 928796 - RNA, 22 nt, Human
uguccagagucacagagcucaa

SEQ ID NO: 928797 - RNA, 22 nt, Human
agaaccuuucuuuagaaauuca

SEQ ID NO: 928798 - RNA, 22 nt, Human
aggcuccugagaggcagaggcu

SEQ ID NO: 928799 - RNA, 22 nt, Human
aauguucaguagaauaggaaug

SEQ ID NO: 928800 - RNA, 22 nt, Human
auuguaaauagugccacaauaa

SEQ ID NO: 928801 - RNA, 22 nt, Human
uuugcugaccccauucugaguc

SEQ ID NO: 928802 - RNA, 22 nt, Human
agcuggagaugcccagcaccgg

SEQ ID NO: 928803 - RNA, 22 nt, Human
ugaguccacuuuaaaaugucag

SEQ ID NO: 928804 - RNA, 22 nt, Human
gggagcugaacugcugaaguug

SEQ ID NO: 928805 - RNA, 22 nt, Human
gcauuagaagggaccucugggg

SEQ ID NO: 928806 - RNA, 22 nt, Human
agguauuuaugagagcacauau

SEQ ID NO: 928807 - RNA, 20 nt, Human
acugccuugguucaguaggu

SEQ ID NO: 928808 - RNA, 22 nt, Human
agauucuacucuagauccaugg

SEQ ID NO: 928809 - RNA, 22 nt, Human
uucuagggaaugggaugaggau

SEQ ID NO: 928810 - RNA, 22 nt, Human
gagccagggagggucugguaua

SEQ ID NO: 928811 - RNA, 21 nt, Human
aggcucagcagguguauaaag

SEQ ID NO: 928812 - RNA, 19 nt, Human
uggagggguuugaaugugg

SEQ ID NO: 928813 - RNA, 22 nt, Human
acauucuuugaguuuuguuaaa

SEQ ID NO: 928814 - RNA, 22 nt, Human
gagaggcccuguggucccagcu

SEQ ID NO: 928815 - RNA, 22 nt, Human
cucugagcucgugcaguacuuc

SEQ ID NO: 928816 - RNA, 22 nt, Human
aaaugcugaguguuuagagauc

SEQ ID NO: 928817 - RNA, 20 nt, Human
caccacagaauuggggacag

SEQ ID NO: 928818 - RNA, 22 nt, Human
aucucugauuuacagcaucucu

SEQ ID NO: 928819 - RNA, 22 nt, Human
uggaaccuaaaaaugucauugc

SEQ ID NO: 928820 - RNA, 22 nt, Human
caugguuucaugagaauuaccc

SEQ ID NO: 928821 - RNA, 22 nt, Human
acaagguaucaucuuggaagca

SEQ ID NO: 928822 - RNA, 22 nt, Human
agcuagaauauugaucugaaau

SEQ ID NO: 928823 - RNA, 22 nt, Human
uuauauaaagauaacuuuucuu

SEQ ID NO: 928824 - RNA, 22 nt, Human
caggauaacagaaaauagcuga

SEQ ID NO: 928825 - RNA, 20 nt, Human
aacuccuagccucaagugau

SEQ ID NO: 928826 - RNA, 22 nt, Human
agaggagguccuuuucugaugu

SEQ ID NO: 928827 - RNA, 22 nt, Human
ugucugaggaagucagcccuuu

SEQ ID NO: 928828 - RNA, 22 nt, Human
ugcucaggucguucugccccuu

SEQ ID NO: 928829 - RNA, 22 nt, Human
ucauuguauacuuuauuuauga

SEQ ID NO: 928830 - RNA, 16 nt, Human
ucugagcacaaaacac

SEQ ID NO: 928831 - RNA, 22 nt, Human
uacucuaaaaagaagcagaucu

SEQ ID NO: 928832 - RNA, 22 nt, Human
uggcagcauuaauuauucaggu

SEQ ID NO: 928833 - RNA, 22 nt, Human
ucuuugggcuaggaguuuggau

SEQ ID NO: 928834 - RNA, 19 nt, Human
auauagcauuauucaauuu

SEQ ID NO: 928835 - RNA, 21 nt, Human
ccuguggauuuuaaaauugga

SEQ ID NO: 928836 - RNA, 22 nt, Human
aaccacaugaaaagaguaauau

SEQ ID NO: 928837 - RNA, 22 nt, Human
ugaguucugcccuacaccugaa

SEQ ID NO: 928838 - RNA, 22 nt, Human
aggccuccuggcuccaggccuu

SEQ ID NO: 928839 - RNA, 19 nt, Human
uaccaaauugcauuauggc

SEQ ID NO: 928840 - RNA, 22 nt, Human
gccucagccggcggacgccagg

SEQ ID NO: 928841 - RNA, 22 nt, Human
agcuccagauuaauuguaggag

SEQ ID NO: 928842 - RNA, 22 nt, Human
uaacaggugguaguuugugcuc

SEQ ID NO: 928843 - RNA, 22 nt, Human
uuguacuagaaaauuauucuuu

SEQ ID NO: 928844 - RNA, 22 nt, Human
cagggcagcuuccuuuguuagg

SEQ ID NO: 928845 - RNA, 23 nt, Human
aguguucagcauguaguaaauac

SEQ ID NO: 928846 - RNA, 22 nt, Human
augcccugcugccaucuggccg

SEQ ID NO: 928847 - RNA, 23 nt, Human
aauaaggccaaacuaucuggucu

SEQ ID NO: 928848 - RNA, 22 nt, Human
uguccuuuuucuuaggaaauau

SEQ ID NO: 928849 - RNA, 22 nt, Human
aggggccuggcacugagcuggc

SEQ ID NO: 928850 - RNA, 22 nt, Human
acaggguuguggccuuaaaggc

SEQ ID NO: 928851 - RNA, 22 nt, Human
aggcaggaacccugugugcgcc

SEQ ID NO: 928852 - RNA, 21 nt, Human
accaucuuccaugcauuauau

SEQ ID NO: 928853 - RNA, 22 nt, Human
auacaguaagugucccugaaac

SEQ ID NO: 928854 - RNA, 22 nt, Human
cuggguguuggguacugaccgu

SEQ ID NO: 928855 - RNA, 22 nt, Human
aagucugacuagaaucucuccc

SEQ ID NO: 928856 - RNA, 22 nt, Human
gugugccaccagucaaggugaa

SEQ ID NO: 928857 - RNA, 22 nt, Human
agagguaugguauauuggaaga

SEQ ID NO: 928858 - RNA, 22 nt, Human
uacuaugugaaaauacuauagu

SEQ ID NO: 928859 - RNA, 22 nt, Human
cagguucccuagcagcaaagcc

SEQ ID NO: 928860 - RNA, 22 nt, Human
aaggguuugucucccucaaggc

SEQ ID NO: 928861 - RNA, 22 nt, Human
acuguggcgucaggaagaaauu

SEQ ID NO: 928862 - RNA, 22 nt, Human
cugaggugagcuucccugggcu

SEQ ID NO: 928863 - RNA, 23 nt, Human
cacacccaucacuaagagcuccu

SEQ ID NO: 928864 - RNA, 22 nt, Human
gcauuuugaggcugggggagca

SEQ ID NO: 928865 - RNA, 22 nt, Human
aagcagggucuuccucaguugg

SEQ ID NO: 928866 - RNA, 22 nt, Human
caugucuuuguuaugcucacca

SEQ ID NO: 928867 - RNA, 22 nt, Human
cuucaauaccugcguugcuagu

SEQ ID NO: 928868 - RNA, 18 nt, Human
guggaggguucucagaau

SEQ ID NO: 928869 - RNA, 22 nt, Human
uguagaacugacauuuuggacu

SEQ ID NO: 928870 - RNA, 22 nt, Human
acacaguaggauaguuugagga

SEQ ID NO: 928871 - RNA, 22 nt, Human
gacagcugaaggaugauucagg

SEQ ID NO: 928872 - RNA, 22 nt, Human
augaacagaggaauagaauucu

SEQ ID NO: 928873 - RNA, 22 nt, Human
agaugcugccucuccucacaag

SEQ ID NO: 928874 - RNA, 22 nt, Human
ucccuguaagguucugagauuu

SEQ ID NO: 928875 - RNA, 22 nt, Human
agacuuuauaguuuuuggcuau

SEQ ID NO: 928876 - RNA, 22 nt, Human
uuauuauugauucgcucucaaa

SEQ ID NO: 928877 - RNA, 21 nt, Human
agaugcagugacccacugggg

SEQ ID NO: 928878 - RNA, 22 nt, Human
gggcuggcucccagguguugaa

SEQ ID NO: 928879 - RNA, 22 nt, Human
agucauaauuauaaacaucagu

SEQ ID NO: 928880 - RNA, 22 nt, Human
aguacaaauuauagcgcuugga

SEQ ID NO: 928881 - RNA, 20 nt, Human
ucuggcucuuugcuccuccc

SEQ ID NO: 928882 - RNA, 22 nt, Human
uucuggaagcugggcagcaccc

SEQ ID NO: 928883 - RNA, 22 nt, Human
ugugaauggacaauuaaaucua

SEQ ID NO: 928884 - RNA, 22 nt, Human
aaggcauuaccuaaguuuggga

SEQ ID NO: 928885 - RNA, 17 nt, Human
agagggcucaaggcauc

SEQ ID NO: 928886 - RNA, 22 nt, Human
ccagaggcuggcagccagcuga

SEQ ID NO: 928887 - RNA, 22 nt, Human
agguaaggaaauugaggcaauu

SEQ ID NO: 928888 - RNA, 22 nt, Human
uggcuggauaucaggcaagggg

SEQ ID NO: 928889 - RNA, 22 nt, Human
acaugaaaguuauucugaguug

SEQ ID NO: 928890 - RNA, 22 nt, Human
guccugggggcagcugugucca

SEQ ID NO: 928891 - RNA, 22 nt, Human
uccugaggacuaacaggaagga

SEQ ID NO: 928892 - RNA, 22 nt, Human
cuggaagaguccuaaacagaua

SEQ ID NO: 928893 - RNA, 22 nt, Human
uuuuuccuuagggguuacucac

SEQ ID NO: 928894 - RNA, 22 nt, Human
uucauggaucaugccuuuugug

SEQ ID NO: 928895 - RNA, 22 nt, Human
uauugaagagauaagugacaga

SEQ ID NO: 928896 - RNA, 22 nt, Human
accagcuguuaggcuuggugcu

SEQ ID NO: 928897 - RNA, 22 nt, Human
uaaggacaaucagguuaguagc

SEQ ID NO: 928898 - RNA, 19 nt, Human
auccuaaauccaguuucua

SEQ ID NO: 928899 - RNA, 22 nt, Human
cugcagggugacguugcccacc

SEQ ID NO: 928900 - RNA, 22 nt, Human
ugugccuggucccugagucgag

SEQ ID NO: 928901 - RNA, 22 nt, Human
cuacauaaauauuuaugugucu

SEQ ID NO: 928902 - RNA, 22 nt, Human
cccagagccgguggugcucaca

SEQ ID NO: 928903 - RNA, 22 nt, Human
cccaggcagaauuaguguuuca

SEQ ID NO: 928904 - RNA, 22 nt, Human
caaauauuccagguacaucccu

SEQ ID NO: 928905 - RNA, 22 nt, Human
cugugugaauagugaggucuau

SEQ ID NO: 928906 - RNA, 22 nt, Human
gcagauggcugagccugcagau

SEQ ID NO: 928907 - RNA, 22 nt, Human
ggaagggcaauaaaaucucagg

SEQ ID NO: 928908 - RNA, 22 nt, Human
acauucaacauggcuggucuag

SEQ ID NO: 928909 - RNA, 22 nt, Human
auaucacagguguuuaccugau

SEQ ID NO: 928910 - RNA, 22 nt, Human
aaaaacagaaugugucuaacuc

SEQ ID NO: 928911 - RNA, 22 nt, Human
cauuuaguacaacuuuuacagu

SEQ ID NO: 928912 - RNA, 20 nt, Human
cagaagcaaggcagguaccu

SEQ ID NO: 928913 - RNA, 22 nt, Human
cguuuauuuugaagauuccacu

SEQ ID NO: 928914 - RNA, 22 nt, Human
ugcaucuguucauucguuccca

SEQ ID NO: 928915 - RNA, 22 nt, Human
uagcuccuggcugcagggccuc

SEQ ID NO: 928916 - RNA, 22 nt, Human
agaugaagaugccacuaagacc

SEQ ID NO: 928917 - RNA, 23 nt, Human
agguucaggagauggaggaacaa

SEQ ID NO: 928918 - RNA, 22 nt, Human
guuucuuucuauugacugaaca

SEQ ID NO: 928919 - RNA, 22 nt, Human
caaggucccagccccucuuggc

SEQ ID NO: 928920 - RNA, 22 nt, Human
acuuuagauauuccucuguaca

SEQ ID NO: 928921 - RNA, 22 nt, Human
aagagguuucaugauuuucuua

SEQ ID NO: 928922 - RNA, 19 nt, Human
aucucaacccuacucucug

SEQ ID NO: 928923 - RNA, 23 nt, Human
ucaugaguggcugcggggcugag

SEQ ID NO: 928924 - RNA, 20 nt, Human
cugagcugagcuccaugggu

SEQ ID NO: 928925 - RNA, 22 nt, Human
agcuguuuucuaaugcauuuga

SEQ ID NO: 928926 - RNA, 22 nt, Human
uugucuauuuguucagguaagg

SEQ ID NO: 928927 - RNA, 22 nt, Human
cagggcaaagagagcacaugcu

SEQ ID NO: 928928 - RNA, 22 nt, Human
gaguggggcguggauccagcgu

SEQ ID NO: 928929 - RNA, 22 nt, Human
acagcagcacuauugacauuuu

SEQ ID NO: 928930 - RNA, 22 nt, Human
cagauguaguagcuuuauugca

SEQ ID NO: 928931 - RNA, 22 nt, Human
cuggcuuucuauuuggugcuau

SEQ ID NO: 928932 - RNA, 22 nt, Human
uggaauguauagauguuaugua

SEQ ID NO: 928933 - RNA, 22 nt, Human
agcagacaccaggaguaaagaa

SEQ ID NO: 928934 - RNA, 22 nt, Human
uagaaagcuugggguguuuaaa

SEQ ID NO: 928935 - RNA, 22 nt, Human
uacagcugcaaggguuucuggg

SEQ ID NO: 928936 - RNA, 22 nt, Human
uauauuuaauccuagagccauu

SEQ ID NO: 928937 - RNA, 22 nt, Human
ucugggagugugucuggccauc

SEQ ID NO: 928938 - RNA, 22 nt, Human
cugggaccuccucacuguucua

SEQ ID NO: 928939 - RNA, 22 nt, Human
acacugaguauugaguagggua

SEQ ID NO: 928940 - RNA, 22 nt, Human
agcauuacuauucucaaaaaca

SEQ ID NO: 928941 - RNA, 22 nt, Human
gagggaaacagauggguugugg

SEQ ID NO: 928942 - RNA, 22 nt, Human
aguuuauagcccagauucaugg

SEQ ID NO: 928943 - RNA, 22 nt, Human
ucuucacagcuuuguccagaag

SEQ ID NO: 928944 - RNA, 22 nt, Human
uugcauuugacaaauuauuuaa

SEQ ID NO: 928945 - RNA, 22 nt, Human
uccuggggccaggcaccucugg

SEQ ID NO: 928946 - RNA, 20 nt, Human
uccaggcccacucagcugaa

SEQ ID NO: 928947 - RNA, 22 nt, Human
gugagguagcagagacagugaa

SEQ ID NO: 928948 - RNA, 22 nt, Human
cagcauggagacaaagugggca

SEQ ID NO: 928949 - RNA, 22 nt, Human
auaagccugauucacuugucau

SEQ ID NO: 928950 - RNA, 22 nt, Human
gcgcaagccacacagccugggg

SEQ ID NO: 928951 - RNA, 22 nt, Human
ucaaauaguugacauuaacuug

SEQ ID NO: 928952 - RNA, 22 nt, Human
cuaauaauagagguggcauuug

SEQ ID NO: 928953 - RNA, 22 nt, Human
aggccagaaauuuggaguaugu

SEQ ID NO: 928954 - RNA, 22 nt, Human
cugggacacccaaggaaagagc

SEQ ID NO: 928955 - RNA, 22 nt, Human
agaauucuggaguugggaggaa

SEQ ID NO: 928956 - RNA, 21 nt, Human
gcucaugguggagaaaagcag

SEQ ID NO: 928957 - RNA, 22 nt, Human
ggugaguccagaguccaaaucc

SEQ ID NO: 928958 - RNA, 23 nt, Human
agcuggguggccugcgugaagcu

SEQ ID NO: 928959 - RNA, 20 nt, Human
ccacaggaguccagucgacc

SEQ ID NO: 928960 - RNA, 22 nt, Human
gcacaggccaugggaggacagc

SEQ ID NO: 928961 - RNA, 16 nt, Human
cagccugcagugguca

SEQ ID NO: 928962 - RNA, 22 nt, Human
ggggaccugggcuucaaggguu

SEQ ID NO: 928963 - RNA, 22 nt, Human
aaauuucuggaagugucagagu

SEQ ID NO: 928964 - RNA, 22 nt, Human
aagaggcugaaugagaaaguac

SEQ ID NO: 928965 - RNA, 22 nt, Human
acagagcugggaucugaaccca

SEQ ID NO: 928966 - RNA, 22 nt, Human
gggcuucugggcaccacucccu

SEQ ID NO: 928967 - RNA, 17 nt, Human
uuaagcauguaaucugc

SEQ ID NO: 928968 - RNA, 22 nt, Human
gagaaucauggcaacagaauga

SEQ ID NO: 928969 - RNA, 23 nt, Human
uugcauuaauguggaggcacagg

SEQ ID NO: 928970 - RNA, 22 nt, Human
uuacauauuauccaaaacugcu

SEQ ID NO: 928971 - RNA, 22 nt, Human
agcaggugaucgcgugugcucc

SEQ ID NO: 928972 - RNA, 22 nt, Human
auauggaaugguaaucuacaau

SEQ ID NO: 928973 - RNA, 22 nt, Human
ucaggcugggcuccucucccca

SEQ ID NO: 928974 - RNA, 22 nt, Human
gcuuguuugugauuucuccaga

SEQ ID NO: 928975 - RNA, 22 nt, Human
augaggcccaaacauuacaaau

SEQ ID NO: 928976 - RNA, 22 nt, Human
uagauguuuugauauuugcuga

SEQ ID NO: 928977 - RNA, 20 nt, Human
ucagacccagauuagcaggu

SEQ ID NO: 928978 - RNA, 22 nt, Human
auuauuacuccugauuguacug

SEQ ID NO: 928979 - RNA, 22 nt, Human
auuugucaauaagaugaacaua

SEQ ID NO: 928980 - RNA, 22 nt, Human
cagugggacaugggcacugggc

SEQ ID NO: 928981 - RNA, 22 nt, Human
ugugaaaugaguauauuugaau

SEQ ID NO: 928982 - RNA, 22 nt, Human
ucacaguuucuuuucugauaaa

SEQ ID NO: 928983 - RNA, 22 nt, Human
ucaauguaauaaaauacucuau

SEQ ID NO: 928984 - RNA, 22 nt, Human
gggcuggaguugggaagacaaa

SEQ ID NO: 928985 - RNA, 22 nt, Human
uagaaaguaaaucaguuuuauu

SEQ ID NO: 928986 - RNA, 20 nt, Human
uauuugaaauggccaagugu

SEQ ID NO: 928987 - RNA, 22 nt, Human
uguuauaucuaaauagccacau

SEQ ID NO: 928988 - RNA, 22 nt, Human
acuacaucuugcauaucuauaa

SEQ ID NO: 928989 - RNA, 22 nt, Human
uucuggaguugugaccucaggg

SEQ ID NO: 928990 - RNA, 22 nt, Human
ugcugucaagaaaacaagcaau

SEQ ID NO: 928991 - RNA, 22 nt, Human
gaaggcugaugacagauucugc

SEQ ID NO: 928992 - RNA, 22 nt, Human
cuccagaaauucaacagcaaau

SEQ ID NO: 928993 - RNA, 22 nt, Human
cuauauuucuuggcuuuaaaca

SEQ ID NO: 928994 - RNA, 22 nt, Human
guacaauuccugucaagcuggc

SEQ ID NO: 928995 - RNA, 22 nt, Human
guaaaaaggccaagcccuugug

SEQ ID NO: 928996 - RNA, 22 nt, Human
cugccuggggcaucagucaagg

SEQ ID NO: 928997 - RNA, 21 nt, Human
uuagcaaagcaaacacaugcu

SEQ ID NO: 928998 - RNA, 22 nt, Human
uggcccugaggacccagugugg

SEQ ID NO: 928999 - RNA, 22 nt, Human
auugacaaucuacuauguucug

SEQ ID NO: 929000 - RNA, 22 nt, Human
gggcaacugaaaaauuguauuc

SEQ ID NO: 929001 - RNA, 22 nt, Human
gaaauguaauucucuugaagau

SEQ ID NO: 929002 - RNA, 22 nt, Human
uucugcaucccagaagaggaca

SEQ ID NO: 929003 - RNA, 22 nt, Human
ggaacuggguuagggucucuuc

SEQ ID NO: 929004 - RNA, 21 nt, Human
gugaagacuuugccuuuaaga

SEQ ID NO: 929005 - RNA, 22 nt, Human
auagacacagcuaugauuugag

SEQ ID NO: 929006 - RNA, 22 nt, Human
gagaggcugguaaagucugaac

SEQ ID NO: 929007 - RNA, 21 nt, Human
gccaggaguagauuacauuua

SEQ ID NO: 929008 - RNA, 22 nt, Human
ucacuuaaaaauucuaguuaug

SEQ ID NO: 929009 - RNA, 19 nt, Human
ugcccaggccucccaaaag

SEQ ID NO: 929010 - RNA, 19 nt, Human
gcugggagcagacccuccc

SEQ ID NO: 929011 - RNA, 22 nt, Human
gagagugaggccugggaaucua

SEQ ID NO: 929012 - RNA, 22 nt, Human
gcuacccagagccucacccugu

SEQ ID NO: 929013 - RNA, 22 nt, Human
caucaucaaaagugacagagaa

SEQ ID NO: 929014 - RNA, 22 nt, Human
ggaagcugcagucccccccaag

SEQ ID NO: 929015 - RNA, 22 nt, Human
uggggucuggaguugcccauga

SEQ ID NO: 929016 - RNA, 22 nt, Human
gggcucuaggccaagagucccg

SEQ ID NO: 929017 - RNA, 22 nt, Human
uccagcucuggcuuggcuagcu

SEQ ID NO: 929018 - RNA, 22 nt, Human
aaagcagagguugcagugagcu

SEQ ID NO: 929019 - RNA, 22 nt, Human
cuugcugugugguguucucaga

SEQ ID NO: 929020 - RNA, 22 nt, Human
aaugucugagucucuguauccc

SEQ ID NO: 929021 - RNA, 22 nt, Human
aggcucugugacaaucaagcug

SEQ ID NO: 929022 - RNA, 22 nt, Human
cagagcuuuuuacauuaaugau

SEQ ID NO: 929023 - RNA, 22 nt, Human
ucuguucaugaaauaucuuuuu

SEQ ID NO: 929024 - RNA, 18 nt, Human
ugaauuaguuugugguuu

SEQ ID NO: 929025 - RNA, 20 nt, Human
uauauuuucucuuuggccuu

SEQ ID NO: 929026 - RNA, 22 nt, Human
ggccaaaugaaggcaaugggac

SEQ ID NO: 929027 - RNA, 22 nt, Human
uggagccaaugaacauuugcug

SEQ ID NO: 929028 - RNA, 22 nt, Human
auucacaauuagaaguagauaa

SEQ ID NO: 929029 - RNA, 22 nt, Human
aagaacauguuaaaagauucac

SEQ ID NO: 929030 - RNA, 22 nt, Human
aauuagcagcauauucugcgau

SEQ ID NO: 929031 - RNA, 22 nt, Human
ugggucccuucagcucucaugg

SEQ ID NO: 929032 - RNA, 22 nt, Human
cucuggcuuugcucaugcaucc

SEQ ID NO: 929033 - RNA, 22 nt, Human
caccugaagauuuagagauuga

SEQ ID NO: 929034 - RNA, 22 nt, Human
caggaaaauggaaucaccugua

SEQ ID NO: 929035 - RNA, 22 nt, Human
caguccugagccaaucaugaug

SEQ ID NO: 929036 - RNA, 22 nt, Human
guucccaucagggaugagggug

SEQ ID NO: 929037 - RNA, 22 nt, Human
cuaggcuggagugcaguggcau

SEQ ID NO: 929038 - RNA, 22 nt, Human
agcuagaaguccuagauaaagg

SEQ ID NO: 929039 - RNA, 22 nt, Human
guaggcagauaggagugcagcc

SEQ ID NO: 929040 - RNA, 22 nt, Human
cauuagcaagucacuauuuuau

SEQ ID NO: 929041 - RNA, 19 nt, Human
cacacccaugcuugccaag

SEQ ID NO: 929042 - RNA, 23 nt, Human
aacuccugaaucgugagccaucu

SEQ ID NO: 929043 - RNA, 22 nt, Human
uccugagccccagggagguugg

SEQ ID NO: 929044 - RNA, 22 nt, Human
augggaagguuuugagagcggg

SEQ ID NO: 929045 - RNA, 22 nt, Human
uuuuuguauagaaaugaacuaa

SEQ ID NO: 929046 - RNA, 22 nt, Human
ucccacagguggagcuugcagu

SEQ ID NO: 929047 - RNA, 22 nt, Human
auuauucuuaugucaucauggc

SEQ ID NO: 929048 - RNA, 22 nt, Human
cugcaagauguugucauaugcu

SEQ ID NO: 929049 - RNA, 22 nt, Human
aguuucauuucuuaguaccagu

SEQ ID NO: 929050 - RNA, 22 nt, Human
ucagaaagcugauucuugauac

SEQ ID NO: 929051 - RNA, 17 nt, Human
gucagcagcuugcuugu

SEQ ID NO: 929052 - RNA, 22 nt, Human
acacccagcuuuugaaugcccu

SEQ ID NO: 929053 - RNA, 22 nt, Human
uaaagcagucuguguaugugaa

SEQ ID NO: 929054 - RNA, 22 nt, Human
cacuucaagagcaagggugcca

SEQ ID NO: 929055 - RNA, 20 nt, Human
ugcuuuuauaccuauaauga

SEQ ID NO: 929056 - RNA, 22 nt, Human
ugggccuguugggguugaguua

SEQ ID NO: 929057 - RNA, 22 nt, Human
uucuucaugcuguugcugcuug

SEQ ID NO: 929058 - RNA, 22 nt, Human
uccaggagguaugaguggcccc

SEQ ID NO: 929059 - RNA, 22 nt, Human
aauacugagaucccacaaagca

SEQ ID NO: 929060 - RNA, 23 nt, Human
uucauugauugcaaggagauugg

SEQ ID NO: 929061 - RNA, 22 nt, Human
uggcugaggagggucuucuggu

SEQ ID NO: 929062 - RNA, 22 nt, Human
agccuggagaggcgccauacac

SEQ ID NO: 929063 - RNA, 18 nt, Human
uagcacagagcaggaugu

SEQ ID NO: 929064 - RNA, 17 nt, Human
aggcaggcagagcggga

SEQ ID NO: 929065 - RNA, 22 nt, Human
ucaccuaauugaagucaggagu

SEQ ID NO: 929066 - RNA, 22 nt, Human
cccaggaguucgaggcuguagu

SEQ ID NO: 929067 - RNA, 22 nt, Human
gaauucuuuucuuucugaaagu

SEQ ID NO: 929068 - RNA, 22 nt, Human
uucccagugauuaaggcagugg

SEQ ID NO: 929069 - RNA, 22 nt, Human
gccgggcccugaccucagaguu

SEQ ID NO: 929070 - RNA, 19 nt, Human
guccucauguuguucucca

SEQ ID NO: 929071 - RNA, 22 nt, Human
aucauagaggaaaauccacguu

SEQ ID NO: 929072 - RNA, 22 nt, Human
uaaauguaccuucugccuuacu

SEQ ID NO: 929073 - RNA, 22 nt, Human
aggcuuggaaaauuuacagugu

SEQ ID NO: 929074 - RNA, 22 nt, Human
uggagcagaaauggccucuugu

SEQ ID NO: 929075 - RNA, 22 nt, Human
ggucacagggaagggcucucaa

SEQ ID NO: 929076 - RNA, 22 nt, Human
auuacaauaagguuuauuugua

SEQ ID NO: 929077 - RNA, 23 nt, Human
ugucaaguauagcaggcccuccc

SEQ ID NO: 929078 - RNA, 22 nt, Human
cagaccaucuugaagcaaacug

SEQ ID NO: 929079 - RNA, 22 nt, Human
guuuccaagucucucaacaccc

SEQ ID NO: 929080 - RNA, 22 nt, Human
cagggaggaugggcuguuuugc

SEQ ID NO: 929081 - RNA, 22 nt, Human
uuugacaaauguaucugcauua

SEQ ID NO: 929082 - RNA, 22 nt, Human
gggaucugaguaggcagaagcu

SEQ ID NO: 929083 - RNA, 19 nt, Human
gcccugagagcuuggguuc

SEQ ID NO: 929084 - RNA, 22 nt, Human
uugucuaaugagcuccacuuca

SEQ ID NO: 929085 - RNA, 22 nt, Human
uguacagauaaagacuguaaau

SEQ ID NO: 929086 - RNA, 22 nt, Human
ugaaggguggcauggcaggcag

SEQ ID NO: 929087 - RNA, 22 nt, Human
aaauguucauuaagggccuguu

SEQ ID NO: 929088 - RNA, 22 nt, Human
ucuccagguucagucgauggaa

SEQ ID NO: 929089 - RNA, 22 nt, Human
caggccuuuuuuccugcagugu

SEQ ID NO: 929090 - RNA, 22 nt, Human
cuccuguauguugggcuucaca

SEQ ID NO: 929091 - RNA, 22 nt, Human
gcagccucugaugauggccgua

SEQ ID NO: 929092 - RNA, 22 nt, Human
uguguagcucauauuaguguua

SEQ ID NO: 929093 - RNA, 22 nt, Human
uucaaaauuguucuaagcucug

SEQ ID NO: 929094 - RNA, 21 nt, Human
agguacuaaugaaaagugauu

SEQ ID NO: 929095 - RNA, 20 nt, Human
ugucugaaaaggaagcuauc

SEQ ID NO: 929096 - RNA, 21 nt, Human
caucaugcuuguguuggagaa

SEQ ID NO: 929097 - RNA, 22 nt, Human
uauuauugcaaguauauaaagu

SEQ ID NO: 929098 - RNA, 22 nt, Human
caggcuccuucccagggauggu

SEQ ID NO: 929099 - RNA, 22 nt, Human
gccagggcucgcggucccucgu

SEQ ID NO: 929100 - RNA, 22 nt, Human
ucaggccaagguagacaugacu

SEQ ID NO: 929101 - RNA, 22 nt, Human
uguguucauguugauucauagc

SEQ ID NO: 929102 - RNA, 22 nt, Human
cagggccugccugguuccugga

SEQ ID NO: 929103 - RNA, 22 nt, Human
auguuucaguucuaaaguuaga

SEQ ID NO: 929104 - RNA, 22 nt, Human
guaauuuaauucucugacuuga

SEQ ID NO: 929105 - RNA, 22 nt, Human
uucacaggauagcuauugcacg

SEQ ID NO: 929106 - RNA, 22 nt, Human
caucuucaccagagacaagcaa

SEQ ID NO: 929107 - RNA, 22 nt, Human
uaaagcaggcaucucucuccuc

SEQ ID NO: 929108 - RNA, 22 nt, Human
gggcagcacguuucaggaggau

SEQ ID NO: 929109 - RNA, 22 nt, Human
agcuggagcuucaagcagguaa

SEQ ID NO: 929110 - RNA, 22 nt, Human
acaggcaaggccagugagaaau

SEQ ID NO: 929111 - RNA, 22 nt, Human
ggagacagcaggaagaaauauc

SEQ ID NO: 929112 - RNA, 22 nt, Human
acagaugaaacccagcuaguug

SEQ ID NO: 929113 - RNA, 22 nt, Human
uacauguauguguuaauaucug

SEQ ID NO: 929114 - RNA, 22 nt, Human
uuugcuuaaaagcggagcaaga

SEQ ID NO: 929115 - RNA, 22 nt, Human
ccuggcucccugcacagggcuc

SEQ ID NO: 929116 - RNA, 22 nt, Human
aggaccaacauagcagcagugg

SEQ ID NO: 929117 - RNA, 22 nt, Human
acuugcuuaguuugcaacagag

SEQ ID NO: 929118 - RNA, 19 nt, Human
uuuauucaccuuuaccuug

SEQ ID NO: 929119 - RNA, 22 nt, Human
aauaucagcucugucacuuacu

SEQ ID NO: 929120 - RNA, 22 nt, Human
cagaagaugcuuuguaaaauga

SEQ ID NO: 929121 - RNA, 22 nt, Human
uguggccacuguuucuuuuccu

SEQ ID NO: 929122 - RNA, 22 nt, Human
cuaggccauauuuugagaacug

SEQ ID NO: 929123 - RNA, 22 nt, Human
gccagauguagauagcaaggua

SEQ ID NO: 929124 - RNA, 22 nt, Human
ucucagagaagugaugagcaau

SEQ ID NO: 929125 - RNA, 22 nt, Human
cagcacagugcagaugcugacu

SEQ ID NO: 929126 - RNA, 22 nt, Human
caguagcaggcacucagcacgu

SEQ ID NO: 929127 - RNA, 22 nt, Human
ggccauggggacagagggugaa

SEQ ID NO: 929128 - RNA, 22 nt, Human
uacagacaguuuuucagauauu

SEQ ID NO: 929129 - RNA, 22 nt, Human
uuucuaguggguauucccuguu

SEQ ID NO: 929130 - RNA, 22 nt, Human
agucacauuugggggugucaaa

SEQ ID NO: 929131 - RNA, 22 nt, Human
cagcagcuagaggaagggcaga

SEQ ID NO: 929132 - RNA, 22 nt, Human
agaagccacaggccucgucugg

SEQ ID NO: 929133 - RNA, 22 nt, Human
gccugccugcugucaucugccu

SEQ ID NO: 929134 - RNA, 22 nt, Human
aguaucauuuuggcauuaguau

SEQ ID NO: 929135 - RNA, 22 nt, Human
guggcugcuguccucucugguu

SEQ ID NO: 929136 - RNA, 23 nt, Human
cagagcuggcucagagcugccug

SEQ ID NO: 929137 - RNA, 22 nt, Human
auguccaauagaagggagaagc

SEQ ID NO: 929138 - RNA, 22 nt, Human
uuuaaaagggguauuaagucca

SEQ ID NO: 929139 - RNA, 22 nt, Human
gaaggcaagaucucaguggagg

SEQ ID NO: 929140 - RNA, 22 nt, Human
aggagcacuaauuccugcagag

SEQ ID NO: 929141 - RNA, 20 nt, Human
auguuucucugucgugauuu

SEQ ID NO: 929142 - RNA, 22 nt, Human
uguggccagccacaggcauggu

SEQ ID NO: 929143 - RNA, 22 nt, Human
ugcugcugauggcaccuaggca

SEQ ID NO: 929144 - RNA, 22 nt, Human
aaacugcaauuauguuugcaga

SEQ ID NO: 929145 - RNA, 22 nt, Human
ggcagaagugaugggauauaac

SEQ ID NO: 929146 - RNA, 22 nt, Human
cagcugaggucaaagaagcagg

SEQ ID NO: 929147 - RNA, 22 nt, Human
cggcuggagcuuugaaccugau

SEQ ID NO: 929148 - RNA, 23 nt, Human
cgugucugugggcgauccggccu

SEQ ID NO: 929149 - RNA, 22 nt, Human
gauauuuacaaauuugccaaua

SEQ ID NO: 929150 - RNA, 22 nt, Human
gugugugugcaucucuuuuauu

SEQ ID NO: 929151 - RNA, 22 nt, Human
uccuuuccaugcuucuagaggc

SEQ ID NO: 929152 - RNA, 22 nt, Human
gccaugggucugcuggcucagc

SEQ ID NO: 929153 - RNA, 18 nt, Human
agagacagcagcaaaaga

SEQ ID NO: 929154 - RNA, 22 nt, Human
aaauucauauguugaaaugcua

SEQ ID NO: 929155 - RNA, 22 nt, Human
gcuguagggcugagcuggaccg

SEQ ID NO: 929156 - RNA, 22 nt, Human
ucucuuuaaagacucagagauu

SEQ ID NO: 929157 - RNA, 22 nt, Human
cugacucuccucaagcauaaau

SEQ ID NO: 929158 - RNA, 22 nt, Human
gcacaaggguggucucuggagc

SEQ ID NO: 929159 - RNA, 22 nt, Human
gugauggagucaaggcuagaac

SEQ ID NO: 929160 - RNA, 22 nt, Human
ggcugagcacuuuaggcaggag

SEQ ID NO: 929161 - RNA, 22 nt, Human
gcuaagggaggcaugccguggu

SEQ ID NO: 929162 - RNA, 22 nt, Human
uuaccacagugccugucuaaug

SEQ ID NO: 929163 - RNA, 22 nt, Human
cauguguguccaugugacuaag

SEQ ID NO: 929164 - RNA, 22 nt, Human
ucaguguugaauuuuuugcaaa

SEQ ID NO: 929165 - RNA, 22 nt, Human
agcagcaaagaauaggcccucu

SEQ ID NO: 929166 - RNA, 22 nt, Human
cuccagggcagcauggcagugg

SEQ ID NO: 929167 - RNA, 22 nt, Human
ugaccuauuagauuuccuugcc

SEQ ID NO: 929168 - RNA, 22 nt, Human
ggguccaggcguggcccagaug

SEQ ID NO: 929169 - RNA, 22 nt, Human
ggagguggagcuggaaguucca

SEQ ID NO: 929170 - RNA, 22 nt, Human
uuuccagugaaauuuugaaugu

SEQ ID NO: 929171 - RNA, 22 nt, Human
aaacauagcacacacagcucuu

SEQ ID NO: 929172 - RNA, 22 nt, Human
uauguauaaucacagaguguca

SEQ ID NO: 929173 - RNA, 22 nt, Human
gcucaggcaaauuucuggugaa

SEQ ID NO: 929174 - RNA, 22 nt, Human
ugggccuggggcagcccaaauc

SEQ ID NO: 929175 - RNA, 22 nt, Human
aacaguguguuuuguuauuaag

SEQ ID NO: 929176 - RNA, 22 nt, Human
acaucucacuucuuugaaggcu

SEQ ID NO: 929177 - RNA, 22 nt, Human
uucuucuacagugauuaauagu

SEQ ID NO: 929178 - RNA, 22 nt, Human
uuaagaagguacucaaagaucu

SEQ ID NO: 929179 - RNA, 22 nt, Human
uacuguuuucuauaauggcugu

SEQ ID NO: 929180 - RNA, 22 nt, Human
aaagccuuuuaugaucaguuaa

SEQ ID NO: 929181 - RNA, 22 nt, Human
uuaugcuaguugaaauaacaca

SEQ ID NO: 929182 - RNA, 22 nt, Human
uggagcaggugccaggugugug

SEQ ID NO: 929183 - RNA, 23 nt, Human
cugcuuucccacuccaugcucuu

SEQ ID NO: 929184 - RNA, 19 nt, Human
agucuucaucugccaggcc

SEQ ID NO: 929185 - RNA, 22 nt, Human
uaaauacuuuacaggaugucuc

SEQ ID NO: 929186 - RNA, 22 nt, Human
caucucacugagggguuuacaa

SEQ ID NO: 929187 - RNA, 22 nt, Human
uccugccucaggcucuggagua

SEQ ID NO: 929188 - RNA, 19 nt, Human
uaaaaacugaaggaagcag

SEQ ID NO: 929189 - RNA, 22 nt, Human
agagcuggugcauauucagaaa

SEQ ID NO: 929190 - RNA, 22 nt, Human
gccaguggcccucuggagaagg

SEQ ID NO: 929191 - RNA, 20 nt, Human
agagugggugucacaggcug

SEQ ID NO: 929192 - RNA, 22 nt, Human
cauuacaaacauguuaagauuu

SEQ ID NO: 929193 - RNA, 22 nt, Human
ugcccagcuauuccuuucuuag

SEQ ID NO: 929194 - RNA, 22 nt, Human
acaaggaggauauguuuaaggg

SEQ ID NO: 929195 - RNA, 21 nt, Human
uuggaaucucuucaucucugc

SEQ ID NO: 929196 - RNA, 22 nt, Human
gcaggcuuugacuuggggcagc

SEQ ID NO: 929197 - RNA, 22 nt, Human
cagcaagucagugaguagaaga

SEQ ID NO: 929198 - RNA, 22 nt, Human
gugcucuaggggucagugguua

SEQ ID NO: 929199 - RNA, 22 nt, Human
uagcaguagcauuuaacauaua

SEQ ID NO: 929200 - RNA, 22 nt, Human
ucuguuuuugaggcuaucuucu

SEQ ID NO: 929201 - RNA, 22 nt, Human
auugcccuagggcuaagcagga

SEQ ID NO: 929202 - RNA, 22 nt, Human
uuagaacauuuuuagaccaaua

SEQ ID NO: 929203 - RNA, 22 nt, Human
agaggcuucuuucugauuugcg

SEQ ID NO: 929204 - RNA, 22 nt, Human
ugcuucuggaaacaguggcugu

SEQ ID NO: 929205 - RNA, 19 nt, Human
ccagagagcuagguacaga

SEQ ID NO: 929206 - RNA, 22 nt, Human
caaacauugggggcuucaacac

SEQ ID NO: 929207 - RNA, 19 nt, Human
accuuuccuuucucagaug

SEQ ID NO: 929208 - RNA, 22 nt, Human
ucacucuguguuugaacucaag

SEQ ID NO: 929209 - RNA, 22 nt, Human
gcuucugcagccaaagaagccg

SEQ ID NO: 929210 - RNA, 22 nt, Human
cugugcugcuagaccuggauuc

SEQ ID NO: 929211 - RNA, 22 nt, Human
cucuuuuucagccuuaccaaag

SEQ ID NO: 929212 - RNA, 22 nt, Human
cagaggcuaaggguagcuuggg

SEQ ID NO: 929213 - RNA, 22 nt, Human
agcaguggugugaggagggcuc

SEQ ID NO: 929214 - RNA, 22 nt, Human
cacauccuucagcugagcccag

SEQ ID NO: 929215 - RNA, 22 nt, Human
ucagaguccaugguacuuaauu

SEQ ID NO: 929216 - RNA, 22 nt, Human
ccugccagggccagaggccagc

SEQ ID NO: 929217 - RNA, 22 nt, Human
uugcccuuguggaguuuacaug

SEQ ID NO: 929218 - RNA, 22 nt, Human
aagagcuggauggaaucuggga

SEQ ID NO: 929219 - RNA, 22 nt, Human
uaacugcaccaucaaauuagag

SEQ ID NO: 929220 - RNA, 18 nt, Human
ugagacagcuaccacuug

SEQ ID NO: 929221 - RNA, 22 nt, Human
ccucucugucacaccaguggcc

SEQ ID NO: 929222 - RNA, 20 nt, Human
uucccuggaaggagaagcag

SEQ ID NO: 929223 - RNA, 22 nt, Human
uggccaggccucuuggugccca

SEQ ID NO: 929224 - RNA, 22 nt, Human
uaccaugauguuugaguuacua

SEQ ID NO: 929225 - RNA, 22 nt, Human
uuugugugcgucuggccugggg

SEQ ID NO: 929226 - RNA, 19 nt, Human
acagaguccagaggaaagg

SEQ ID NO: 929227 - RNA, 22 nt, Human
uuccuugaaugagucauggaaa

SEQ ID NO: 929228 - RNA, 22 nt, Human
cugugaauuaaguauuguuauc

SEQ ID NO: 929229 - RNA, 22 nt, Human
ccaguccacgucaagaagaggu

SEQ ID NO: 929230 - RNA, 22 nt, Human
gcccuaggcuuuugugacugcc

SEQ ID NO: 929231 - RNA, 22 nt, Human
aggccagugcagcuggaacaga

SEQ ID NO: 929232 - RNA, 22 nt, Human
ccaccagcagugugcaaggauu

SEQ ID NO: 929233 - RNA, 22 nt, Human
ugcugcaggaauucucaaggga

SEQ ID NO: 929234 - RNA, 22 nt, Human
gagcaguggucacagggaggga

SEQ ID NO: 929235 - RNA, 22 nt, Human
cuuauuuaugucugucucuaau

SEQ ID NO: 929236 - RNA, 22 nt, Human
ugggccaguccagccccaggga

SEQ ID NO: 929237 - RNA, 22 nt, Human
ggcugccugaacuuuggggaaa

SEQ ID NO: 929238 - RNA, 22 nt, Human
ccccagcacuuggaguggggag

SEQ ID NO: 929239 - RNA, 22 nt, Human
agaggccggccgagcccauggg

SEQ ID NO: 929240 - RNA, 22 nt, Human
guuuccugaugugggagaucuu

SEQ ID NO: 929241 - RNA, 22 nt, Human
agcccuggcagagccagguagu

SEQ ID NO: 929242 - RNA, 22 nt, Human
cuggaacuccuggggagcuggu

SEQ ID NO: 929243 - RNA, 22 nt, Human
cccuggguucuggcugggcugc

SEQ ID NO: 929244 - RNA, 14 nt, Human
aagaucaccuuccu

SEQ ID NO: 929245 - RNA, 22 nt, Human
cugcguguuugcacccugucug

SEQ ID NO: 929246 - RNA, 22 nt, Human
ucugccgugcgaggucccacca

SEQ ID NO: 929247 - RNA, 22 nt, Human
ugggucccucaugagaggcauu

SEQ ID NO: 929248 - RNA, 22 nt, Human
cuuaaucauggcuugugggagg

SEQ ID NO: 929249 - RNA, 22 nt, Human
cucucuguuaugcuuucaugaa

SEQ ID NO: 929250 - RNA, 22 nt, Human
cugcagagcaaguaacauccuc

SEQ ID NO: 929251 - RNA, 22 nt, Human
ccagggugagaaaaggcuggau

SEQ ID NO: 929252 - RNA, 22 nt, Human
guucucucaaacuuuguguuug

SEQ ID NO: 929253 - RNA, 21 nt, Human
agcaugcacuacuucaucuua

SEQ ID NO: 929254 - RNA, 22 nt, Human
gcaggcaggaaggacuaaguaa

SEQ ID NO: 929255 - RNA, 22 nt, Human
cuucugccccuguagccugagu

SEQ ID NO: 929256 - RNA, 19 nt, Human
gucccugggcagaggcacc

SEQ ID NO: 929257 - RNA, 22 nt, Human
aggugucuucagggugagacag

SEQ ID NO: 929258 - RNA, 22 nt, Human
uuucuaguauauaacuagaucu

SEQ ID NO: 929259 - RNA, 22 nt, Human
guacacacuauguauuguacac

SEQ ID NO: 929260 - RNA, 22 nt, Human
cugaaauaaaguugcuaaaauu

SEQ ID NO: 929261 - RNA, 22 nt, Human
cacuagaaccaaugacauuucu

SEQ ID NO: 929262 - RNA, 22 nt, Human
acucucugagcuaccaggugag

SEQ ID NO: 929263 - RNA, 22 nt, Human
gcugagacuggcagcaggaagu

SEQ ID NO: 929264 - RNA, 22 nt, Human
uuguguuucugugauauguaaa

SEQ ID NO: 929265 - RNA, 22 nt, Human
uagcaagaaaacacaagaauua

SEQ ID NO: 929266 - RNA, 21 nt, Human
uuucgcauguguuaacuguga

SEQ ID NO: 929267 - RNA, 22 nt, Human
gauuucaagcccccagagauuc

SEQ ID NO: 929268 - RNA, 19 nt, Human
cuggccaggccaggggccc

SEQ ID NO: 929269 - RNA, 22 nt, Human
uaguuuaccaaauugaucuucc

SEQ ID NO: 929270 - RNA, 22 nt, Human
cuccagugggggugagccuaga

SEQ ID NO: 929271 - RNA, 22 nt, Human
ggcugugcgggcagccguggga

SEQ ID NO: 929272 - RNA, 22 nt, Human
auggagguguuugauaauuugg

SEQ ID NO: 929273 - RNA, 22 nt, Human
ucuaaaguaugcuaauauguga

SEQ ID NO: 929274 - RNA, 22 nt, Human
ugcaguggaaagacucagacuu

SEQ ID NO: 929275 - RNA, 22 nt, Human
caucuugcugacuugcauuauu

SEQ ID NO: 929276 - RNA, 22 nt, Human
ugggccugaguuugggaacugg

SEQ ID NO: 929277 - RNA, 22 nt, Human
uuuagcauuaagcuuuucaaau

SEQ ID NO: 929278 - RNA, 22 nt, Human
gugggcagauuaauuucucaau

SEQ ID NO: 929279 - RNA, 20 nt, Human
agugucuggugcagggccuc

SEQ ID NO: 929280 - RNA, 22 nt, Human
ucugggagguggcagggugcau

SEQ ID NO: 929281 - RNA, 22 nt, Human
gacaggggucccucugggcugu

SEQ ID NO: 929282 - RNA, 16 nt, Human
aaagaaacaggugucc

SEQ ID NO: 929283 - RNA, 22 nt, Human
uugcagggucccagaggccugg

SEQ ID NO: 929284 - RNA, 22 nt, Human
ucuggggagugccuaaguggaa

SEQ ID NO: 929285 - RNA, 22 nt, Human
cugccaggcugucccagguccg

SEQ ID NO: 929286 - RNA, 21 nt, Human
ucccugcuuucuggcccaguc

SEQ ID NO: 929287 - RNA, 22 nt, Human
agaguggccucagagaaauaca

SEQ ID NO: 929288 - RNA, 22 nt, Human
uuggaagaaauaucaauagugu

SEQ ID NO: 929289 - RNA, 22 nt, Human
ucuuuugugccaaguaaugaau

SEQ ID NO: 929290 - RNA, 22 nt, Human
gcaguagcaguauccagaagca

SEQ ID NO: 929291 - RNA, 22 nt, Human
ucagccugcgucauggugacac

SEQ ID NO: 929292 - RNA, 22 nt, Human
cuggagcccaggccuggugucu

SEQ ID NO: 929293 - RNA, 22 nt, Human
ggcugggcaggucugcacaggg

SEQ ID NO: 929294 - RNA, 22 nt, Human
ccugaagaauucaaauccagau

SEQ ID NO: 929295 - RNA, 22 nt, Human
aaauacuggcaagugcuaauuc

SEQ ID NO: 929296 - RNA, 22 nt, Human
uuuccucugucaugacagcuga

SEQ ID NO: 929297 - RNA, 22 nt, Human
agcaagaauauuucugccacug

SEQ ID NO: 929298 - RNA, 22 nt, Human
caggcucacuuucucagucaca

SEQ ID NO: 929299 - RNA, 19 nt, Human
gggugaggaagagcguugc

SEQ ID NO: 929300 - RNA, 23 nt, Human
gugcgccaggacaaccugacgga

SEQ ID NO: 929301 - RNA, 22 nt, Human
ggacuuuaggaagggccaagug

SEQ ID NO: 929302 - RNA, 20 nt, Human
aagggcagagggaacagacu

SEQ ID NO: 929303 - RNA, 22 nt, Human
gcacacaugcguguauaugggu

SEQ ID NO: 929304 - RNA, 22 nt, Human
gguuuccacuugcugaagaaag

SEQ ID NO: 929305 - RNA, 22 nt, Human
ggacauggagcuccauggaggc

SEQ ID NO: 929306 - RNA, 22 nt, Human
ggcucaggaugagccuucucau

SEQ ID NO: 929307 - RNA, 22 nt, Human
caggggcuagcacuuaauguuu

SEQ ID NO: 929308 - RNA, 20 nt, Human
agagacccuguagcuugcag

SEQ ID NO: 929309 - RNA, 22 nt, Human
agucugaagacucaugucugaa

SEQ ID NO: 929310 - RNA, 22 nt, Human
aucagaaaggugggcaagcaga

SEQ ID NO: 929311 - RNA, 22 nt, Human
acuugguugaugucauaagguu

SEQ ID NO: 929312 - RNA, 22 nt, Human
cccuggagguggagguugcagg

SEQ ID NO: 929313 - RNA, 22 nt, Human
cugggccuggagcccacgagcc

SEQ ID NO: 929314 - RNA, 22 nt, Human
aauaacagaaacuugagcauca

SEQ ID NO: 929315 - RNA, 22 nt, Human
aaagaccugugguagcucuaaa

SEQ ID NO: 929316 - RNA, 22 nt, Human
auggguggagggugacacggau

SEQ ID NO: 929317 - RNA, 22 nt, Human
uccugagcacagagacaaggaa

SEQ ID NO: 929318 - RNA, 22 nt, Human
cagcuggguuuaguggggugug

SEQ ID NO: 929319 - RNA, 22 nt, Human
uggcugaggcuggagugcagug

SEQ ID NO: 929320 - RNA, 22 nt, Human
guggcauggagaaggaggcagu

SEQ ID NO: 929321 - RNA, 22 nt, Human
gaggacugaaacuuacaggaaa

SEQ ID NO: 929322 - RNA, 22 nt, Human
ccaagcugagcaccaucugauc

SEQ ID NO: 929323 - RNA, 22 nt, Human
cuacaacauagucuucuacaga

SEQ ID NO: 929324 - RNA, 19 nt, Human
aaaguguuuuaaagaggau

SEQ ID NO: 929325 - RNA, 22 nt, Human
guuauauucaaaaugaggcugu

SEQ ID NO: 929326 - RNA, 22 nt, Human
ugaggccagcuucagcagugga

SEQ ID NO: 929327 - RNA, 17 nt, Human
gagguaggaagugaguc

SEQ ID NO: 929328 - RNA, 22 nt, Human
acauggcauucacucccacagg

SEQ ID NO: 929329 - RNA, 19 nt, Human
ucucaauucuccccacugc

SEQ ID NO: 929330 - RNA, 22 nt, Human
uauuucuaagagauaucuguac

SEQ ID NO: 929331 - RNA, 22 nt, Human
aaguucaaggcucuagaguucc

SEQ ID NO: 929332 - RNA, 22 nt, Human
gcagugugucucuuggcuuccu

SEQ ID NO: 929333 - RNA, 22 nt, Human
uaugaauucuguucauugauga

SEQ ID NO: 929334 - RNA, 22 nt, Human
auaaauguuuguugaaugaaua

SEQ ID NO: 929335 - RNA, 22 nt, Human
aaggcuggguaaccuguccacu

SEQ ID NO: 929336 - RNA, 22 nt, Human
ggagcugugcugggugaucagg

SEQ ID NO: 929337 - RNA, 22 nt, Human
cacacugcuuacacaaaaugau

SEQ ID NO: 929338 - RNA, 22 nt, Human
augugacaguguuugacagaug

SEQ ID NO: 929339 - RNA, 22 nt, Human
ugugcugugggacucaggcucc

SEQ ID NO: 929340 - RNA, 20 nt, Human
aaaugcuguaauguuuggga

SEQ ID NO: 929341 - RNA, 22 nt, Human
gcuuguuugugccucugcagaa

SEQ ID NO: 929342 - RNA, 23 nt, Human
uauccuaaaggcaacaggaaguc

SEQ ID NO: 929343 - RNA, 22 nt, Human
agagcacagaagaauaggugcu

SEQ ID NO: 929344 - RNA, 22 nt, Human
guagcagcucuccaggguucac

SEQ ID NO: 929345 - RNA, 22 nt, Human
ugcuccaggagcaaccuuugag

SEQ ID NO: 929346 - RNA, 23 nt, Human
guggagccacaucacaggcuccu

SEQ ID NO: 929347 - RNA, 22 nt, Human
ggaaguguggcuaagccaagaa

SEQ ID NO: 929348 - RNA, 22 nt, Human
cugcaguucucaauuucuauug

SEQ ID NO: 929349 - RNA, 22 nt, Human
ugccaaauaugcacguguaugc

SEQ ID NO: 929350 - RNA, 23 nt, Human
agucagagagugugagacaacug

SEQ ID NO: 929351 - RNA, 22 nt, Human
ggaaggaggaugcucuggccuu

SEQ ID NO: 929352 - RNA, 22 nt, Human
uauuggaagugaacaccaggcu

SEQ ID NO: 929353 - RNA, 21 nt, Human
cuuguuccaagcaugucugag

SEQ ID NO: 929354 - RNA, 20 nt, Human
gcuuggcagguuuuguugcc

SEQ ID NO: 929355 - RNA, 22 nt, Human
ucccugugagucaacuaaacaa

SEQ ID NO: 929356 - RNA, 22 nt, Human
auaguacagcauuuuuccugag

SEQ ID NO: 929357 - RNA, 22 nt, Human
auugaaaaugacauuugugccc

SEQ ID NO: 929358 - RNA, 22 nt, Human
cugaccugagugguacaaggca

SEQ ID NO: 929359 - RNA, 22 nt, Human
ucugugcacuaacauuccuggu

SEQ ID NO: 929360 - RNA, 22 nt, Human
aagaaaugcagaaaugugcugg

SEQ ID NO: 929361 - RNA, 19 nt, Human
uccugcagguggcuugcag

SEQ ID NO: 929362 - RNA, 18 nt, Human
ucugccugcagggcaucu

SEQ ID NO: 929363 - RNA, 22 nt, Human
agcagcagaggucagaaaggua

SEQ ID NO: 929364 - RNA, 22 nt, Human
ugagcagggacuuugaguguag

SEQ ID NO: 929365 - RNA, 22 nt, Human
uagaggcauuaaugaauaaaca

SEQ ID NO: 929366 - RNA, 22 nt, Human
gugaguguuaacccacugcuuc

SEQ ID NO: 929367 - RNA, 22 nt, Human
cauuguucaacacugacuugca

SEQ ID NO: 929368 - RNA, 22 nt, Human
ugggagcugggguuggacgucu

SEQ ID NO: 929369 - RNA, 22 nt, Human
caggcaguggcucacagcaacc

SEQ ID NO: 929370 - RNA, 22 nt, Human
ucaagaauuuggauaagaaaug

SEQ ID NO: 929371 - RNA, 22 nt, Human
ucaggagggucucuauuuuccu

SEQ ID NO: 929372 - RNA, 22 nt, Human
ugagcuguaaggcugucacuga

SEQ ID NO: 929373 - RNA, 22 nt, Human
auacagaggguuucaugggcag

SEQ ID NO: 929374 - RNA, 22 nt, Human
ccauuaaacuuguggacccagu

SEQ ID NO: 929375 - RNA, 22 nt, Human
agcagcuugaggcuggauucca

SEQ ID NO: 929376 - RNA, 22 nt, Human
ugugaacauuucugguuauuug

SEQ ID NO: 929377 - RNA, 21 nt, Human
ucagauaccagacucaagggg

SEQ ID NO: 929378 - RNA, 22 nt, Human
uuacaaucugauugucucaucu

SEQ ID NO: 929379 - RNA, 22 nt, Human
ucaaaacaaucauuggaugugc

SEQ ID NO: 929380 - RNA, 22 nt, Human
gugucccagccccacaggccug

SEQ ID NO: 929381 - RNA, 21 nt, Human
ugcagccucugcccagcagug

SEQ ID NO: 929382 - RNA, 22 nt, Human
ggauucagcgaggcagccugga

SEQ ID NO: 929383 - RNA, 22 nt, Human
uacacagaagccagaaggccug

SEQ ID NO: 929384 - RNA, 22 nt, Human
aagcugaugucccaguuugaag

SEQ ID NO: 929385 - RNA, 22 nt, Human
gaauguaauaggaaacgugugg

SEQ ID NO: 929386 - RNA, 22 nt, Human
aaagugaauugauuuaagggga

SEQ ID NO: 929387 - RNA, 22 nt, Human
cuguggaccugcucuuagagac

SEQ ID NO: 929388 - RNA, 22 nt, Human
cucagggcucugcaugcacacg

SEQ ID NO: 929389 - RNA, 22 nt, Human
agaaggguaguuguaagaguga

SEQ ID NO: 929390 - RNA, 22 nt, Human
cagguccaguaaaaagaguccu

SEQ ID NO: 929391 - RNA, 22 nt, Human
uggcuucucagaauacucugga

SEQ ID NO: 929392 - RNA, 22 nt, Human
cauucaaaugugccacuguccu

SEQ ID NO: 929393 - RNA, 20 nt, Human
cagacaucuccaaaucugug

SEQ ID NO: 929394 - RNA, 22 nt, Human
augucacagucugacucaguga

SEQ ID NO: 929395 - RNA, 22 nt, Human
gaggagggcuuuguugauguua

SEQ ID NO: 929396 - RNA, 20 nt, Human
ugaucaugugaaagucaugu

SEQ ID NO: 929397 - RNA, 22 nt, Human
cuacaaagcucuucuacaggca

SEQ ID NO: 929398 - RNA, 21 nt, Human
ccuggcugcacaguugcuggu

SEQ ID NO: 929399 - RNA, 20 nt, Human
gccuccacacucaccccuua

SEQ ID NO: 929400 - RNA, 22 nt, Human
ucugcugcugcagcuacacuau

SEQ ID NO: 929401 - RNA, 22 nt, Human
uacaggucuaacuaaaugaauu

SEQ ID NO: 929402 - RNA, 22 nt, Human
ucuuguuacaguuuauuacaug

SEQ ID NO: 929403 - RNA, 22 nt, Human
ucuguccauuuacagauaugca

SEQ ID NO: 929404 - RNA, 22 nt, Human
gaggcucagagacuuuaaguuu

SEQ ID NO: 929405 - RNA, 22 nt, Human
uaaagguuauaaagguuagggg

SEQ ID NO: 929406 - RNA, 22 nt, Human
uggagaaagcugcauauggaaa

SEQ ID NO: 929407 - RNA, 22 nt, Human
caggcucccgaaaucacccaug

SEQ ID NO: 929408 - RNA, 22 nt, Human
cauggcuggcacacagcaacca

SEQ ID NO: 929409 - RNA, 22 nt, Human
agcugcugcaaguggugcuaac

SEQ ID NO: 929410 - RNA, 22 nt, Human
ucacuccucauugcugcccauu

SEQ ID NO: 929411 - RNA, 22 nt, Human
ugugggcagauacacagacacg

SEQ ID NO: 929412 - RNA, 22 nt, Human
uagcaucuuuuucugucuucua

SEQ ID NO: 929413 - RNA, 22 nt, Human
uuuaugucacuuugaaagagag

SEQ ID NO: 929414 - RNA, 22 nt, Human
ugcuccagcaacaggcuuagcu

SEQ ID NO: 929415 - RNA, 22 nt, Human
cauuacgagcucuaaaauacua

SEQ ID NO: 929416 - RNA, 22 nt, Human
caaggaggcagugggacuugaa

SEQ ID NO: 929417 - RNA, 22 nt, Human
gggauggcugccugcaucagga

SEQ ID NO: 929418 - RNA, 22 nt, Human
uagguacagcuaaaaauuaucu

SEQ ID NO: 929419 - RNA, 22 nt, Human
auauuuuguaacuuggaauagg

SEQ ID NO: 929420 - RNA, 22 nt, Human
guucguauuuaugucgcagaag

SEQ ID NO: 929421 - RNA, 22 nt, Human
aaucuguauuguuaacaaguaa

SEQ ID NO: 929422 - RNA, 22 nt, Human
uaaauacuuuuacuccacugau

SEQ ID NO: 929423 - RNA, 22 nt, Human
ggcucuucugguugucacauuu

SEQ ID NO: 929424 - RNA, 17 nt, Human
aguguuuccuuaucauu

SEQ ID NO: 929425 - RNA, 22 nt, Human
uucucauacaggaucucuuauu

SEQ ID NO: 929426 - RNA, 20 nt, Human
acacuguucuucacacauuu

SEQ ID NO: 929427 - RNA, 22 nt, Human
ugaagagauagaaguacaugcu

SEQ ID NO: 929428 - RNA, 22 nt, Human
gcacugauuacccauugcugcu

SEQ ID NO: 929429 - RNA, 18 nt, Human
gacaaaaguacagacaga

SEQ ID NO: 929430 - RNA, 22 nt, Human
caagaauccuguucuugaagau

SEQ ID NO: 929431 - RNA, 22 nt, Human
ugagccagucugucugggugaa

SEQ ID NO: 929432 - RNA, 22 nt, Human
ucuggaugaagacccagaggcu

SEQ ID NO: 929433 - RNA, 22 nt, Human
guuucauucggcagcucauaag

SEQ ID NO: 929434 - RNA, 19 nt, Human
auauauguauacaaugugg

SEQ ID NO: 929435 - RNA, 22 nt, Human
uccuggccuuagcgaggcgguc

SEQ ID NO: 929436 - RNA, 19 nt, Human
uggggccuccugucccugg

SEQ ID NO: 929437 - RNA, 22 nt, Human
aucccaccucaaucugaagcuc

SEQ ID NO: 929438 - RNA, 22 nt, Human
ggcagugccugaugcugcagga

SEQ ID NO: 929439 - RNA, 22 nt, Human
cacagaauggaccaguuuuaga

SEQ ID NO: 929440 - RNA, 22 nt, Human
aacauucaccucuaccuccuuc

SEQ ID NO: 929441 - RNA, 22 nt, Human
uagggagaggaagcaggccgcu

SEQ ID NO: 929442 - RNA, 22 nt, Human
agcagcauuaagggaacugcag

SEQ ID NO: 929443 - RNA, 22 nt, Human
agccaguuggcuaugaggagga

SEQ ID NO: 929444 - RNA, 22 nt, Human
gcauucuugguaugaaggacag

SEQ ID NO: 929445 - RNA, 22 nt, Human
gacauuuauuagaaaacuauca

SEQ ID NO: 929446 - RNA, 22 nt, Human
ccaaggagaaugacaccaugga

SEQ ID NO: 929447 - RNA, 22 nt, Human
gaaagcugugaaauagugcucu

SEQ ID NO: 929448 - RNA, 22 nt, Human
uuuaacauguucaagaaacaua

SEQ ID NO: 929449 - RNA, 22 nt, Human
uacagaaucuaugcuucacagu

SEQ ID NO: 929450 - RNA, 22 nt, Human
uuugacagcauauccucauauu

SEQ ID NO: 929451 - RNA, 22 nt, Human
ggagucagaauggcaggguggu

SEQ ID NO: 929452 - RNA, 22 nt, Human
aggaagagcaucuuugggucug

SEQ ID NO: 929453 - RNA, 23 nt, Human
agaacagugacuaauauagagag

SEQ ID NO: 929454 - RNA, 22 nt, Human
uccagcuaacaccuacuggcca

SEQ ID NO: 929455 - RNA, 22 nt, Human
ugguuaaaugcuccgaucuugg

SEQ ID NO: 929456 - RNA, 21 nt, Human
aauuuugaaggaagauuaagg

SEQ ID NO: 929457 - RNA, 22 nt, Human
uuccuuggugcgccugcugcag

SEQ ID NO: 929458 - RNA, 22 nt, Human
ugcuccaggcaagcugagaguu

SEQ ID NO: 929459 - RNA, 22 nt, Human
uagaaacaaguuucucuuuggg

SEQ ID NO: 929460 - RNA, 22 nt, Human
ucuucaaagcauaugcaggcau

SEQ ID NO: 929461 - RNA, 22 nt, Human
gcuggcugcagauuuuagaggu

SEQ ID NO: 929462 - RNA, 22 nt, Human
cauaaucccaggcuugcauuca

SEQ ID NO: 929463 - RNA, 22 nt, Human
auuccacacaguaauacucaau

SEQ ID NO: 929464 - RNA, 22 nt, Human
cugcugggucuaugcaagugga

SEQ ID NO: 929465 - RNA, 22 nt, Human
gaagcccuauccucuccuggga

SEQ ID NO: 929466 - RNA, 22 nt, Human
agccuuaaaugcuagauucaua

SEQ ID NO: 929467 - RNA, 22 nt, Human
cccuuccuugugacuggugggg

SEQ ID NO: 929468 - RNA, 22 nt, Human
aaguacauaaaggaauuagcca

SEQ ID NO: 929469 - RNA, 21 nt, Human
ucagaaucugugagcuaucuc

SEQ ID NO: 929470 - RNA, 22 nt, Human
uccuuggccuggguggggucuc

SEQ ID NO: 929471 - RNA, 22 nt, Human
gaagucugcugcucaggaguuu

SEQ ID NO: 929472 - RNA, 22 nt, Human
aagaaucuaugguacauccaag

SEQ ID NO: 929473 - RNA, 22 nt, Human
gagcuggugaucagcuggagga

SEQ ID NO: 929474 - RNA, 22 nt, Human
gugucaugggguuuguuauaca

SEQ ID NO: 929475 - RNA, 22 nt, Human
auguuccuuccagagagcagaa

SEQ ID NO: 929476 - RNA, 22 nt, Human
gaccacugaaugcacuucuaau

SEQ ID NO: 929477 - RNA, 22 nt, Human
aggcaggccgugucccuccuca

SEQ ID NO: 929478 - RNA, 22 nt, Human
aguacauauugaguggugauau

SEQ ID NO: 929479 - RNA, 16 nt, Human
uaucuagaguugaggu

SEQ ID NO: 929480 - RNA, 22 nt, Human
ucagaauuuaaaauguguagau

SEQ ID NO: 929481 - RNA, 22 nt, Human
cguuuccaacugugaugagguc

SEQ ID NO: 929482 - RNA, 22 nt, Human
aaauccuaaggagaauaugauu

SEQ ID NO: 929483 - RNA, 22 nt, Human
cggcuggguucggcugcaggcc

SEQ ID NO: 929484 - RNA, 22 nt, Human
uaauuuuccacucuguuuaucu

SEQ ID NO: 929485 - RNA, 22 nt, Human
aagcugccugccacgcuagaua

SEQ ID NO: 929486 - RNA, 22 nt, Human
caggcagugucccaggaagcca

SEQ ID NO: 929487 - RNA, 23 nt, Human
auuauuaaggacauggacuuugu

SEQ ID NO: 929488 - RNA, 22 nt, Human
auaaacuauguaauuugcucua

SEQ ID NO: 929489 - RNA, 22 nt, Human
ggugagaaagggauuccuguuc

SEQ ID NO: 929490 - RNA, 19 nt, Human
acuucaaaucuuagagaaa

SEQ ID NO: 929491 - RNA, 23 nt, Human
cccaggaguuucacugcaaaggu

SEQ ID NO: 929492 - RNA, 22 nt, Human
aagacaugacugcacagccaaa

SEQ ID NO: 929493 - RNA, 19 nt, Human
cuggaauguggcuggugca

SEQ ID NO: 929494 - RNA, 22 nt, Human
gggaagagugucgguugaagug

SEQ ID NO: 929495 - RNA, 22 nt, Human
uuagcagcuaaacugacagacc

SEQ ID NO: 929496 - RNA, 22 nt, Human
gcuuuagaagacacucuguuuu

SEQ ID NO: 929497 - RNA, 22 nt, Human
aaacaauguacauuuauaaugc

SEQ ID NO: 929498 - RNA, 22 nt, Human
ugcuggcuauuuaaagaagaaa

SEQ ID NO: 929499 - RNA, 22 nt, Human
uaguuaacucuugguaauaggu

SEQ ID NO: 929500 - RNA, 22 nt, Human
gcacuaaaccaacauguaauaa

SEQ ID NO: 929501 - RNA, 22 nt, Human
caugcacacacaguucuaauua

SEQ ID NO: 929502 - RNA, 22 nt, Human
gccuucucugugagcuccuagg

SEQ ID NO: 929503 - RNA, 22 nt, Human
ccuggcuccaaagcugugacuc

SEQ ID NO: 929504 - RNA, 18 nt, Human
uccuuuucucccacccac

SEQ ID NO: 929505 - RNA, 18 nt, Human
cccagccucuccuuucua

SEQ ID NO: 929506 - RNA, 22 nt, Human
ucccccacucuaaaggagccuu

SEQ ID NO: 929507 - RNA, 22 nt, Human
uaauuauucuagucacauagca

SEQ ID NO: 929508 - RNA, 22 nt, Human
cagugccugucuuauucuuaca

SEQ ID NO: 929509 - RNA, 22 nt, Human
ucagaggaauaaugcugcauuu

SEQ ID NO: 929510 - RNA, 22 nt, Human
gugggacucuucuuuggcagug

SEQ ID NO: 929511 - RNA, 22 nt, Human
auaaauuuucuugcuguacuua

SEQ ID NO: 929512 - RNA, 22 nt, Human
uuacauuuugcacagauguccc

SEQ ID NO: 929513 - RNA, 22 nt, Human
cacagggagaggaacagcgcag

SEQ ID NO: 929514 - RNA, 22 nt, Human
acaaaaagggagaugagguaga

SEQ ID NO: 929515 - RNA, 20 nt, Human
ucugucucugagcuagacuu

SEQ ID NO: 929516 - RNA, 22 nt, Human
ucuuuuuuuccugugcagagcu

SEQ ID NO: 929517 - RNA, 22 nt, Human
cagguagguauggugcagucuu

SEQ ID NO: 929518 - RNA, 22 nt, Human
ugggggagauugugcaucucua

SEQ ID NO: 929519 - RNA, 22 nt, Human
auugcuguaaauuaucuuauua

SEQ ID NO: 929520 - RNA, 22 nt, Human
aacagauuguaaccugauagcc

SEQ ID NO: 929521 - RNA, 22 nt, Human
guuagcaacaagucucaaugac

SEQ ID NO: 929522 - RNA, 22 nt, Human
ggcagauggaagaggcuggguc

SEQ ID NO: 929523 - RNA, 22 nt, Human
uaacaugauuugcuauuuagau

SEQ ID NO: 929524 - RNA, 22 nt, Human
uaggugaguuuggggaagauag

SEQ ID NO: 929525 - RNA, 22 nt, Human
uucuuaagcaccuaaaaagugg

SEQ ID NO: 929526 - RNA, 22 nt, Human
cuccugggagcagggauggaug

SEQ ID NO: 929527 - RNA, 21 nt, Human
uucucuccauaugcccagccc

SEQ ID NO: 929528 - RNA, 22 nt, Human
gcauuuuaaugagguuuaugag

SEQ ID NO: 929529 - RNA, 22 nt, Human
aggagcugauaaaaggggguca

SEQ ID NO: 929530 - RNA, 22 nt, Human
uguagaaguucuucaggagaau

SEQ ID NO: 929531 - RNA, 22 nt, Human
auagcagcauuucuuccaagga

SEQ ID NO: 929532 - RNA, 22 nt, Human
cucugggucuaccuguggccag

SEQ ID NO: 929533 - RNA, 22 nt, Human
ugcagggacacgaagacaaaua

SEQ ID NO: 929534 - RNA, 22 nt, Human
ucagaaggaugugcagguggca

SEQ ID NO: 929535 - RNA, 22 nt, Human
agccuaggggguccugggccac

SEQ ID NO: 929536 - RNA, 22 nt, Human
auugaaagcacaaagaacaagu

SEQ ID NO: 929537 - RNA, 22 nt, Human
uguuugcuuacuuguaugcugc

SEQ ID NO: 929538 - RNA, 22 nt, Human
acacugguuguuaauaguaaca

SEQ ID NO: 929539 - RNA, 22 nt, Human
ucaucuuuaccccuugcuucaa

SEQ ID NO: 929540 - RNA, 20 nt, Human
uguuugugccagcuuuguca

SEQ ID NO: 929541 - RNA, 22 nt, Human
guugagcaaggccagagaagcc

SEQ ID NO: 929542 - RNA, 17 nt, Human
cuauuuuggagauuaaa

SEQ ID NO: 929543 - RNA, 22 nt, Human
uccuguggucuggaaggaaugg

SEQ ID NO: 929544 - RNA, 23 nt, Human
cugcagagaacugagggacagcc

SEQ ID NO: 929545 - RNA, 22 nt, Human
uuugagaagcugucuugggcuc

SEQ ID NO: 929546 - RNA, 22 nt, Human
gcccugugguuccaggaagcaa

SEQ ID NO: 929547 - RNA, 22 nt, Human
auuccaaaaggauguuagaaug

SEQ ID NO: 929548 - RNA, 22 nt, Human
uguguaaagcuuguuccagaaa

SEQ ID NO: 929549 - RNA, 16 nt, Human
aggagcuggguaggag

SEQ ID NO: 929550 - RNA, 22 nt, Human
gcuggaggcuggagugcagugg

SEQ ID NO: 929551 - RNA, 22 nt, Human
acuuucaagaacuucuuuaaug

SEQ ID NO: 929552 - RNA, 22 nt, Human
auugucuuacauacuguggagg

SEQ ID NO: 929553 - RNA, 22 nt, Human
uauaugcaugcccauguauaca

SEQ ID NO: 929554 - RNA, 22 nt, Human
ggcugccccaugggcugggcug

SEQ ID NO: 929555 - RNA, 22 nt, Human
aaauacugugaauaaagguuuu

SEQ ID NO: 929556 - RNA, 22 nt, Human
uaucagcauauuuacuuucuug

SEQ ID NO: 929557 - RNA, 22 nt, Human
agagaaacaggucagcugggag

SEQ ID NO: 929558 - RNA, 21 nt, Human
cuauuggaaaagaaaauauuu

SEQ ID NO: 929559 - RNA, 21 nt, Human
cauuccucggcucauagagga

SEQ ID NO: 929560 - RNA, 22 nt, Human
aaagccaucuguauuaagugaa

SEQ ID NO: 929561 - RNA, 22 nt, Human
ccucacugaagaggugacauuu

SEQ ID NO: 929562 - RNA, 22 nt, Human
acagagcuguacaugugccaug

SEQ ID NO: 929563 - RNA, 22 nt, Human
guggcagagguuccucagugug

SEQ ID NO: 929564 - RNA, 22 nt, Human
ucccagccauuccuuuaggugu

SEQ ID NO: 929565 - RNA, 21 nt, Human
augucuguucuuucuggcagg

SEQ ID NO: 929566 - RNA, 22 nt, Human
acacaauggcgugugccacaga

SEQ ID NO: 929567 - RNA, 19 nt, Human
cagcugccuuuucuuugca

SEQ ID NO: 929568 - RNA, 22 nt, Human
caggaaggggcucacucuggcc

SEQ ID NO: 929569 - RNA, 22 nt, Human
cagauuuaggcuuaguccaagc

SEQ ID NO: 929570 - RNA, 22 nt, Human
ucugggccucaccugcugcuca

SEQ ID NO: 929571 - RNA, 22 nt, Human
uagcagcugcaucauuuuacag

SEQ ID NO: 929572 - RNA, 22 nt, Human
cucugagguuccuuugcccucg

SEQ ID NO: 929573 - RNA, 22 nt, Human
ugcuccaugcgcucggccggcg

SEQ ID NO: 929574 - RNA, 22 nt, Human
aagaaaguggguaauaugauuu

SEQ ID NO: 929575 - RNA, 22 nt, Human
acucaguuaucauguguccaca

SEQ ID NO: 929576 - RNA, 22 nt, Human
aauaccuuuccugccauucacu

SEQ ID NO: 929577 - RNA, 22 nt, Human
ugcaaauacaaaaugguacagc

SEQ ID NO: 929578 - RNA, 23 nt, Human
ucccaggaaucugcauuuuuaac

SEQ ID NO: 929579 - RNA, 23 nt, Human
uaauuauggaauaauuugcaacg

SEQ ID NO: 929580 - RNA, 19 nt, Human
cccucaggucugagcaguc

SEQ ID NO: 929581 - RNA, 21 nt, Human
uguaaguuucaucugaauugg

SEQ ID NO: 929582 - RNA, 22 nt, Human
caaguuuaaggcacugauaagu

SEQ ID NO: 929583 - RNA, 22 nt, Human
uauaagauacuuggcauagugc

SEQ ID NO: 929584 - RNA, 19 nt, Human
augacagaguugauaagug

SEQ ID NO: 929585 - RNA, 22 nt, Human
auuuccaaucucugcauauggg

SEQ ID NO: 929586 - RNA, 22 nt, Human
cugugcccucuuugcuggccuu

SEQ ID NO: 929587 - RNA, 22 nt, Human
aggaggacucucugagccagcc

SEQ ID NO: 929588 - RNA, 22 nt, Human
uguuguacucaacagaugaauu

SEQ ID NO: 929589 - RNA, 22 nt, Human
ccugcguccacggcugggagac

SEQ ID NO: 929590 - RNA, 22 nt, Human
ccucagggaggccucuguggcu

SEQ ID NO: 929591 - RNA, 22 nt, Human
ugaguauuccuuaucugaaaug

SEQ ID NO: 929592 - RNA, 22 nt, Human
auguuuuuggcuucaaguuucu

SEQ ID NO: 929593 - RNA, 22 nt, Human
ugugugggugguaaggaaggcc

SEQ ID NO: 929594 - RNA, 22 nt, Human
ccuucaaacuuucauuaaccag

SEQ ID NO: 929595 - RNA, 22 nt, Human
uuauggaaaacuccagagagua

SEQ ID NO: 929596 - RNA, 22 nt, Human
aggcuucuugggcuucauucug

SEQ ID NO: 929597 - RNA, 22 nt, Human
cuucugugcuucacaguugcca

SEQ ID NO: 929598 - RNA, 22 nt, Human
gagugugggcacgggggccuug

SEQ ID NO: 929599 - RNA, 22 nt, Human
aucuuagacccuugguagaaaa

SEQ ID NO: 929600 - RNA, 22 nt, Human
agggcuggccacaugauuuggu

SEQ ID NO: 929601 - RNA, 22 nt, Human
ucccuggaacagagagacaacg

SEQ ID NO: 929602 - RNA, 22 nt, Human
agagccagcauuugacacuggc

SEQ ID NO: 929603 - RNA, 22 nt, Human
acaaggagaagaaauuggucau

SEQ ID NO: 929604 - RNA, 22 nt, Human
augugucuagauugcuguaccg

SEQ ID NO: 929605 - RNA, 22 nt, Human
cacagcugcacagaggaggugc

SEQ ID NO: 929606 - RNA, 22 nt, Human
ugggcaaguaucggacucugag

SEQ ID NO: 929607 - RNA, 22 nt, Human
gaaaguucacacauccacaugg

SEQ ID NO: 929608 - RNA, 22 nt, Human
gcuggcagagacaagaagacua

SEQ ID NO: 929609 - RNA, 22 nt, Human
agcagggcacuggaaggcacug

SEQ ID NO: 929610 - RNA, 22 nt, Human
aauguuacgaucaacaacacau

SEQ ID NO: 929611 - RNA, 22 nt, Human
uggcagaguuauggguauuuau

SEQ ID NO: 929612 - RNA, 22 nt, Human
ccuucacaccaucuuuaccagg

SEQ ID NO: 929613 - RNA, 22 nt, Human
uucugagaugugaaucugucaa

SEQ ID NO: 929614 - RNA, 22 nt, Human
ucacagaaucucugauaagucu

SEQ ID NO: 929615 - RNA, 22 nt, Human
gauugaaagacuguuugggaga

SEQ ID NO: 929616 - RNA, 22 nt, Human
ugcugccaccugguggcugaag

SEQ ID NO: 929617 - RNA, 22 nt, Human
aaugcuauucauuaagccuacu

SEQ ID NO: 929618 - RNA, 22 nt, Human
gcugagcucccagcaguaucug

SEQ ID NO: 929619 - RNA, 22 nt, Human
agucacagaaugauggcuccag

SEQ ID NO: 929620 - RNA, 22 nt, Human
caugugauuacacuaagaaggu

SEQ ID NO: 929621 - RNA, 22 nt, Human
ugggaaggauaccuuggaacau

SEQ ID NO: 929622 - RNA, 22 nt, Human
aucuuuggacggucccaacuga

SEQ ID NO: 929623 - RNA, 22 nt, Human
aaacauuccauuucuauguaag

SEQ ID NO: 929624 - RNA, 22 nt, Human
cagugagggcccccuuccaggu

SEQ ID NO: 929625 - RNA, 22 nt, Human
cauuucuccugggugauaaauu

SEQ ID NO: 929626 - RNA, 22 nt, Human
uuaagaagccacacaccucuuu

SEQ ID NO: 929627 - RNA, 22 nt, Human
ugaagcccugugucagcuucca

SEQ ID NO: 929628 - RNA, 22 nt, Human
ucaaucaaugugucaguuccca

SEQ ID NO: 929629 - RNA, 22 nt, Human
uuuaaagaaauuccucaucuuu

SEQ ID NO: 929630 - RNA, 22 nt, Human
ugggagcuccuggagggcagga

SEQ ID NO: 929631 - RNA, 22 nt, Human
gaagguuugaaauagguauaga

SEQ ID NO: 929632 - RNA, 22 nt, Human
cagggcugaaaucaagguguag

SEQ ID NO: 929633 - RNA, 22 nt, Human
aaagguaucauguccauacagu

SEQ ID NO: 929634 - RNA, 22 nt, Human
gcacccacuuaggccagucaau

SEQ ID NO: 929635 - RNA, 22 nt, Human
agggccaguaccaggugggugg

SEQ ID NO: 929636 - RNA, 21 nt, Human
cucaggaucuuauauauuagu

SEQ ID NO: 929637 - RNA, 22 nt, Human
uagauuucgcugcaucucaauc

SEQ ID NO: 929638 - RNA, 22 nt, Human
uuacacaugaagguccaauguu

SEQ ID NO: 929639 - RNA, 22 nt, Human
uaaaaaacauuacucuguccug

SEQ ID NO: 929640 - RNA, 22 nt, Human
guuacaacucccugaaccucgg

SEQ ID NO: 929641 - RNA, 22 nt, Human
cugugucacucacugcguuaug

SEQ ID NO: 929642 - RNA, 22 nt, Human
auaaugaaugcagaguuauuuu

SEQ ID NO: 929643 - RNA, 22 nt, Human
agccagcuaccggggcuccugg

SEQ ID NO: 929644 - RNA, 22 nt, Human
agcagccaguucucugugguag

SEQ ID NO: 929645 - RNA, 22 nt, Human
caaacauucagaugcaauggua

SEQ ID NO: 929646 - RNA, 22 nt, Human
uccuagaaggaucauucuagug

SEQ ID NO: 929647 - RNA, 22 nt, Human
ugaggcacugggagagcacacu

SEQ ID NO: 929648 - RNA, 22 nt, Human
aacaguacuugauaauuugcac

SEQ ID NO: 929649 - RNA, 22 nt, Human
gggaagccaugcucagagguac

SEQ ID NO: 929650 - RNA, 22 nt, Human
uuuggaagggaaagaaaguacu

SEQ ID NO: 929651 - RNA, 22 nt, Human
gacagguaccggucagacuacg

SEQ ID NO: 929652 - RNA, 22 nt, Human
uaggaagguguuuuuaaggagc

SEQ ID NO: 929653 - RNA, 22 nt, Human
cugucuguucagauucauuacu

SEQ ID NO: 929654 - RNA, 22 nt, Human
agcuccugaguagcuuuacuca

SEQ ID NO: 929655 - RNA, 22 nt, Human
auucaguuauuuacuuugcuau

SEQ ID NO: 929656 - RNA, 22 nt, Human
auauaaugauuuucuggugagu

SEQ ID NO: 929657 - RNA, 22 nt, Human
cuuagaaugggacccaaugggu

SEQ ID NO: 929658 - RNA, 22 nt, Human
uuuaccaaggcauaguaaucuc

SEQ ID NO: 929659 - RNA, 22 nt, Human
gucuagaauggaugagcauuuu

SEQ ID NO: 929660 - RNA, 22 nt, Human
uuuucaguuacuguuuauguga

SEQ ID NO: 929661 - RNA, 22 nt, Human
gcuucacacuaaaaauguuaaa

SEQ ID NO: 929662 - RNA, 22 nt, Human
uuagaaauauggugcugccgcc

SEQ ID NO: 929663 - RNA, 22 nt, Human
acaggcaaguacacaggcucau

SEQ ID NO: 929664 - RNA, 22 nt, Human
agcagccacagucugggacagg

SEQ ID NO: 929665 - RNA, 21 nt, Human
ucacguggucacaugagcuuu

SEQ ID NO: 929666 - RNA, 22 nt, Human
agcuuuaucuucaccugggaau

SEQ ID NO: 929667 - RNA, 22 nt, Human
ggguggcaucucucugagcugu

SEQ ID NO: 929668 - RNA, 19 nt, Human
gaggcccaugagggugcuc

SEQ ID NO: 929669 - RNA, 22 nt, Human
ccucaggcuugugagccuucag

SEQ ID NO: 929670 - RNA, 22 nt, Human
aaaaaugcuuggacuuaauaaa

SEQ ID NO: 929671 - RNA, 22 nt, Human
cccuggccuacaggcccagaga

SEQ ID NO: 929672 - RNA, 22 nt, Human
aacuuucugaaaagcuugauca

SEQ ID NO: 929673 - RNA, 22 nt, Human
aaugucuuucuguucuaugaga

SEQ ID NO: 929674 - RNA, 22 nt, Human
uucuccaacacaagcaugaugu

SEQ ID NO: 929675 - RNA, 23 nt, Human
aaacuacaacgccaggcacugag

SEQ ID NO: 929676 - RNA, 22 nt, Human
aggcucagccccugggaggaga

SEQ ID NO: 929677 - RNA, 22 nt, Human
uauauauucuuaaguaguguag

SEQ ID NO: 929678 - RNA, 22 nt, Human
uuacaucacuuuacuuaauaau

SEQ ID NO: 929679 - RNA, 22 nt, Human
uaaaugcagcaguuucuguucu

SEQ ID NO: 929680 - RNA, 22 nt, Human
gugugcagggggccagcgcagc

SEQ ID NO: 929681 - RNA, 22 nt, Human
cuggcucugagugguaucuuga

SEQ ID NO: 929682 - RNA, 22 nt, Human
caguuucugccaggauguguua

SEQ ID NO: 929683 - RNA, 22 nt, Human
augugugugcauuucucucccu

SEQ ID NO: 929684 - RNA, 22 nt, Human
acaggccugacacacagagggc

SEQ ID NO: 929685 - RNA, 22 nt, Human
uuagaaucuuguaucagaaguu

SEQ ID NO: 929686 - RNA, 22 nt, Human
uuuccacacugcagccagcaaa

SEQ ID NO: 929687 - RNA, 22 nt, Human
cuguggcuggccuuauugcugc

SEQ ID NO: 929688 - RNA, 17 nt, Human
ugucuacucugacuaaa

SEQ ID NO: 929689 - RNA, 21 nt, Human
ugcuggccucaagggugacuu

SEQ ID NO: 929690 - RNA, 22 nt, Human
uugggguguuggauggagcaag

SEQ ID NO: 929691 - RNA, 22 nt, Human
aguuucuuggucacaguuuuca

SEQ ID NO: 929692 - RNA, 22 nt, Human
aggaaugauucaagacuuggcu

SEQ ID NO: 929693 - RNA, 19 nt, Human
uucuggacagcagaaacca

SEQ ID NO: 929694 - RNA, 22 nt, Human
agucaagguggaccagaaaaau

SEQ ID NO: 929695 - RNA, 22 nt, Human
auuucucuaagcauccguuugc

SEQ ID NO: 929696 - RNA, 22 nt, Human
cucacagguagaauaacaacau

SEQ ID NO: 929697 - RNA, 22 nt, Human
gcauguggugcugaggcugucg

SEQ ID NO: 929698 - RNA, 22 nt, Human
uuuuauauggcacauugguugg

SEQ ID NO: 929699 - RNA, 22 nt, Human
ccaguguggccaggugcuggua

SEQ ID NO: 929700 - RNA, 22 nt, Human
cccgacuagcugggauuacagg

SEQ ID NO: 929701 - RNA, 22 nt, Human
aaaguucagugccuucuauaca

SEQ ID NO: 929702 - RNA, 22 nt, Human
aauucaaagacuagaauuuugc

SEQ ID NO: 929703 - RNA, 22 nt, Human
gggagagagaaaacguggcgca

SEQ ID NO: 929704 - RNA, 22 nt, Human
acacaguuuaugguauucuguu

SEQ ID NO: 929705 - RNA, 22 nt, Human
uggcagccuggaaucucucagc

SEQ ID NO: 929706 - RNA, 21 nt, Human
agcuggcucucucuggagaga

SEQ ID NO: 929707 - RNA, 22 nt, Human
aucaucuaaauugaguccagcu

SEQ ID NO: 929708 - RNA, 22 nt, Human
acauuaaaauugggugggguaa

SEQ ID NO: 929709 - RNA, 22 nt, Human
caugcaaaugguggcuaaaugg

SEQ ID NO: 929710 - RNA, 22 nt, Human
aaagcuaguaauauuuuaaucc

SEQ ID NO: 929711 - RNA, 22 nt, Human
cuauagaaacaaccucucuuuc

SEQ ID NO: 929712 - RNA, 22 nt, Human
gacagcaugaucaaggagccca

SEQ ID NO: 929713 - RNA, 22 nt, Human
acugucacuaacuaagucuagu

SEQ ID NO: 929714 - RNA, 22 nt, Human
gacacaugaccauaaaugcuaa

SEQ ID NO: 929715 - RNA, 22 nt, Human
cagagaugugauccagcugucu

SEQ ID NO: 929716 - RNA, 22 nt, Human
ugucuccacaggugucagcuca

SEQ ID NO: 929717 - RNA, 22 nt, Human
ucccugugaaucagaagcaggu

SEQ ID NO: 929718 - RNA, 22 nt, Human
uccaaaguaauuucacuucugu

SEQ ID NO: 929719 - RNA, 22 nt, Human
gcuuuacugucuggaaaguuug

SEQ ID NO: 929720 - RNA, 22 nt, Human
uccuggguucauguccuggugc

SEQ ID NO: 929721 - RNA, 22 nt, Human
cugacagucuugccaaguuucu

SEQ ID NO: 929722 - RNA, 22 nt, Human
cugccucacauuggcuguguga

SEQ ID NO: 929723 - RNA, 22 nt, Human
uacaaccauagacauauacuag

SEQ ID NO: 929724 - RNA, 22 nt, Human
acaguacucuaaugaaaagugc

SEQ ID NO: 929725 - RNA, 18 nt, Human
ggguccccagcugcaggg

SEQ ID NO: 929726 - RNA, 23 nt, Human
acuucauggcacugucuuagagg

SEQ ID NO: 929727 - RNA, 22 nt, Human
uggcccaagucugcuagaagag

SEQ ID NO: 929728 - RNA, 22 nt, Human
cuuauagaauuagagagauuuu

SEQ ID NO: 929729 - RNA, 22 nt, Human
ggaggucacgacugggaugccu

SEQ ID NO: 929730 - RNA, 22 nt, Human
cucugcccgcggaugccacguc

SEQ ID NO: 929731 - RNA, 22 nt, Human
aagaggcagcccgcugaggcug

SEQ ID NO: 929732 - RNA, 16 nt, Human
gcuggagggagggguu

SEQ ID NO: 929733 - RNA, 22 nt, Human
uuuauaguuauauacagauguu

SEQ ID NO: 929734 - RNA, 22 nt, Human
uaagugaugaaagcagaugucu

SEQ ID NO: 929735 - RNA, 22 nt, Human
aaaacuuucagggauacagaaa

SEQ ID NO: 929736 - RNA, 22 nt, Human
ucuggccagugaaaugcagaau

SEQ ID NO: 929737 - RNA, 22 nt, Human
agaugaaaagauaagcagcaau

SEQ ID NO: 929738 - RNA, 22 nt, Human
uguacagggugcagcgagcgga

SEQ ID NO: 929739 - RNA, 22 nt, Human
ucuuauuuagagaggacuagag

SEQ ID NO: 929740 - RNA, 22 nt, Human
gugcacaucgugcagguuuguu

SEQ ID NO: 929741 - RNA, 22 nt, Human
uuuggaggggaagaccuuggag

SEQ ID NO: 929742 - RNA, 22 nt, Human
cucugggucccacgucauugcu

SEQ ID NO: 929743 - RNA, 22 nt, Human
uggcagugggaauggacaaaca

SEQ ID NO: 929744 - RNA, 22 nt, Human
cuguuuauugagcaaucugcca

SEQ ID NO: 929745 - RNA, 22 nt, Human
uagcaaaggccuuggacacgcu

SEQ ID NO: 929746 - RNA, 20 nt, Human
cuagucucacaucccuggca

SEQ ID NO: 929747 - RNA, 22 nt, Human
gagcuguguaugcaucauucug

SEQ ID NO: 929748 - RNA, 22 nt, Human
aaaugacagaguaagcuguuua

SEQ ID NO: 929749 - RNA, 22 nt, Human
cuaggugauccacugcucucuu

SEQ ID NO: 929750 - RNA, 22 nt, Human
ugcagcugcaaguccaggucag

SEQ ID NO: 929751 - RNA, 22 nt, Human
ucugggaaguccucugucaugc

SEQ ID NO: 929752 - RNA, 21 nt, Human
gcaugccugcaucuuaguguu

SEQ ID NO: 929753 - RNA, 19 nt, Human
cuggagauagggccuuuaa

SEQ ID NO: 929754 - RNA, 22 nt, Human
ugcuguauuuauggccacugaa

SEQ ID NO: 929755 - RNA, 22 nt, Human
gaggccagugugcuguguuuuc

SEQ ID NO: 929756 - RNA, 22 nt, Human
aaaagcaagaggcuggauuaaa

SEQ ID NO: 929757 - RNA, 21 nt, Human
auguccuggcuaccagcgcag

SEQ ID NO: 929758 - RNA, 22 nt, Human
cccccucugccgggguccuuca

SEQ ID NO: 929759 - RNA, 20 nt, Human
acacaguagaugagugacug

SEQ ID NO: 929760 - RNA, 22 nt, Human
gauuuccuugcauauugguaau

SEQ ID NO: 929761 - RNA, 22 nt, Human
ucauauauuuaguugugcaaca

SEQ ID NO: 929762 - RNA, 22 nt, Human
augacaaaggcugaaagggaaa

SEQ ID NO: 929763 - RNA, 22 nt, Human
augugcagccuuucuucaucau

SEQ ID NO: 929764 - RNA, 22 nt, Human
guuauauaauuccugugguagu

SEQ ID NO: 929765 - RNA, 22 nt, Human
accaugucauuuauuggccaaa

SEQ ID NO: 929766 - RNA, 22 nt, Human
aagcaagacagaaguuacugcc

SEQ ID NO: 929767 - RNA, 22 nt, Human
ucaggaaaggcagagugucugu

SEQ ID NO: 929768 - RNA, 22 nt, Human
uccuuggagucaugauggaggu

SEQ ID NO: 929769 - RNA, 22 nt, Human
acagauaauuagcauaaaugcu

SEQ ID NO: 929770 - RNA, 22 nt, Human
caagcuccuuacauccacaggg

SEQ ID NO: 929771 - RNA, 22 nt, Human
gggcagcccagaacugcugcag

SEQ ID NO: 929772 - RNA, 22 nt, Human
uuccaguucuucuguaagcacu

SEQ ID NO: 929773 - RNA, 17 nt, Human
cuaggcuuggcagcucg

SEQ ID NO: 929774 - RNA, 22 nt, Human
aguacagauuucugggcccuac

SEQ ID NO: 929775 - RNA, 22 nt, Human
cagccucuaagcacagccucuc

SEQ ID NO: 929776 - RNA, 22 nt, Human
ggaaacuuggaugccagcacuc

SEQ ID NO: 929777 - RNA, 22 nt, Human
aguuuguaugccaacagcaaag

SEQ ID NO: 929778 - RNA, 19 nt, Human
uucuagaacuguucucuca

SEQ ID NO: 929779 - RNA, 22 nt, Human
augaaguucucaauaaucaugu

SEQ ID NO: 929780 - RNA, 22 nt, Human
acagagguuuccauugagguuu

SEQ ID NO: 929781 - RNA, 22 nt, Human
gugggcaggcccuaggcgauuu

SEQ ID NO: 929782 - RNA, 22 nt, Human
cuggaaaguacagugugucaca

SEQ ID NO: 929783 - RNA, 22 nt, Human
uuuuugucuagcgucucuaguu

SEQ ID NO: 929784 - RNA, 22 nt, Human
uugcccugccucccugagguga

SEQ ID NO: 929785 - RNA, 22 nt, Human
guggaagccuaagaguagggag

SEQ ID NO: 929786 - RNA, 22 nt, Human
agacagaccauggcuauucaga

SEQ ID NO: 929787 - RNA, 22 nt, Human
aaguccaaggcugggugcagug

SEQ ID NO: 929788 - RNA, 22 nt, Human
acagaguucccacuccagaagc

SEQ ID NO: 929789 - RNA, 19 nt, Human
accaggagacagugagcuu

SEQ ID NO: 929790 - RNA, 22 nt, Human
agaccccauaccucagcaggua

SEQ ID NO: 929791 - RNA, 22 nt, Human
ugcuuagaaucuggacuuguug

SEQ ID NO: 929792 - RNA, 22 nt, Human
uaacagaagaaaacauauugga

SEQ ID NO: 929793 - RNA, 22 nt, Human
uauauuaaaugaccaguuuuaa

SEQ ID NO: 929794 - RNA, 22 nt, Human
gcaguguuucagugcuuuuucu

SEQ ID NO: 929795 - RNA, 22 nt, Human
gauuuauuggucuuucauuggu

SEQ ID NO: 929796 - RNA, 22 nt, Human
gcuggccauagaagccaaagag

SEQ ID NO: 929797 - RNA, 22 nt, Human
ucugccagcuucuggugguugc

SEQ ID NO: 929798 - RNA, 22 nt, Human
aaauguuccggguaaggagaaa

SEQ ID NO: 929799 - RNA, 22 nt, Human
auauaacucuuguucuuauagu

SEQ ID NO: 929800 - RNA, 22 nt, Human
gucugcugcagagcauggcuuu

SEQ ID NO: 929801 - RNA, 22 nt, Human
ccugccaggccagugagcuucc

SEQ ID NO: 929802 - RNA, 22 nt, Human
uuucucauagucaugccucuua

SEQ ID NO: 929803 - RNA, 22 nt, Human
gguuaaaaauaauuuacuuggc

SEQ ID NO: 929804 - RNA, 22 nt, Human
gugugcgcgcucauaggugugu

SEQ ID NO: 929805 - RNA, 22 nt, Human
gcauggcagccaguacauggug

SEQ ID NO: 929806 - RNA, 22 nt, Human
acuucauguuguuuacaacuua

SEQ ID NO: 929807 - RNA, 22 nt, Human
aagucuuucauaagucucuuau

SEQ ID NO: 929808 - RNA, 22 nt, Human
uuaagaggagaucauacuggag

SEQ ID NO: 929809 - RNA, 22 nt, Human
gucauuuuugacuuugaaguga

SEQ ID NO: 929810 - RNA, 22 nt, Human
ucccauuuuggaugcggauugg

SEQ ID NO: 929811 - RNA, 22 nt, Human
aggcugggcuccgcccaacucc

SEQ ID NO: 929812 - RNA, 23 nt, Human
uagaauccucugagauggaauag

SEQ ID NO: 929813 - RNA, 20 nt, Human
uuguuuuaaauccuggauga

SEQ ID NO: 929814 - RNA, 22 nt, Human
uaagaggcaaaagauacucaga

SEQ ID NO: 929815 - RNA, 22 nt, Human
uuguccugcaaccucacauggc

SEQ ID NO: 929816 - RNA, 22 nt, Human
ucuucaggagcugaaagccugc

SEQ ID NO: 929817 - RNA, 22 nt, Human
uggcugagggggcaguucagga

SEQ ID NO: 929818 - RNA, 22 nt, Human
cugcccagaaucacucacucga

SEQ ID NO: 929819 - RNA, 22 nt, Human
uuuguuuggcaacuugguaaag

SEQ ID NO: 929820 - RNA, 22 nt, Human
cuuccuagcuucagagucuguu

SEQ ID NO: 929821 - RNA, 22 nt, Human
gaggcucagggaaacagcgcag

SEQ ID NO: 929822 - RNA, 22 nt, Human
acacauaugguugcugcaguga

SEQ ID NO: 929823 - RNA, 22 nt, Human
ggccuuggugccauggccaguu

SEQ ID NO: 929824 - RNA, 21 nt, Human
aaaugcuuuguauauaucugu

SEQ ID NO: 929825 - RNA, 22 nt, Human
gguggcggccacuucagcccug

SEQ ID NO: 929826 - RNA, 22 nt, Human
ccugccuggagcugagugugga

SEQ ID NO: 929827 - RNA, 22 nt, Human
agugaaguaaaagaugugcauc

SEQ ID NO: 929828 - RNA, 22 nt, Human
gaaagguugggugaauggugga

SEQ ID NO: 929829 - RNA, 22 nt, Human
caggagcagaggguggucagca

SEQ ID NO: 929830 - RNA, 22 nt, Human
aaaggcaaaggcugguauggcu

SEQ ID NO: 929831 - RNA, 22 nt, Human
gugggugauguacuggaggcca

SEQ ID NO: 929832 - RNA, 22 nt, Human
cugucuggaaugcaguacauag

SEQ ID NO: 929833 - RNA, 22 nt, Human
acacaggcauagccauacaugu

SEQ ID NO: 929834 - RNA, 22 nt, Human
cggcucaggccacaggacggca

SEQ ID NO: 929835 - RNA, 22 nt, Human
guggcagcggugugcaaggagg

SEQ ID NO: 929836 - RNA, 22 nt, Human
gaaagagaaccugggccuagau

SEQ ID NO: 929837 - RNA, 22 nt, Human
gguccccagcaguggcugcuuc

SEQ ID NO: 929838 - RNA, 22 nt, Human
caggcagcauuuacucugauga

SEQ ID NO: 929839 - RNA, 22 nt, Human
ucagcccuggcacugucuccca

SEQ ID NO: 929840 - RNA, 19 nt, Human
auacacuaauauaaaccac

SEQ ID NO: 929841 - RNA, 22 nt, Human
acucacauuucaucaggccaag

SEQ ID NO: 929842 - RNA, 22 nt, Human
uccaggccugccugguguuugc

SEQ ID NO: 929843 - RNA, 21 nt, Human
augucuguucugauuggugcg

SEQ ID NO: 929844 - RNA, 22 nt, Human
ucaggagcagcaugggugagag

SEQ ID NO: 929845 - RNA, 22 nt, Human
uagaaaccucagggaaaucuuu

SEQ ID NO: 929846 - RNA, 22 nt, Human
aguuuugauacuuucucuucau

SEQ ID NO: 929847 - RNA, 22 nt, Human
accagaggaggaauuaccuucc

SEQ ID NO: 929848 - RNA, 21 nt, Human
ggccucugucauccugggaag

SEQ ID NO: 929849 - RNA, 22 nt, Human
cgaaaucagcaucuugaggcaa

SEQ ID NO: 929850 - RNA, 22 nt, Human
aguggcugaauauauuuuacua

SEQ ID NO: 929851 - RNA, 22 nt, Human
ucccgcuucuuccgaaucgcga

SEQ ID NO: 929852 - RNA, 22 nt, Human
aggcuccuuuaccauucuggag

SEQ ID NO: 929853 - RNA, 22 nt, Human
aacuguagaagggacacaaaag

SEQ ID NO: 929854 - RNA, 22 nt, Human
cugcuccaguagccccaugugg

SEQ ID NO: 929855 - RNA, 22 nt, Human
cuuguccagauguuuguuaggu

SEQ ID NO: 929856 - RNA, 22 nt, Human
aguuauaaucugcuacugauau

SEQ ID NO: 929857 - RNA, 22 nt, Human
gacauguauuaguacauauggu

SEQ ID NO: 929858 - RNA, 22 nt, Human
uccaaauauauucacguccuag

SEQ ID NO: 929859 - RNA, 22 nt, Human
aggccagcucacccuggcuccu

SEQ ID NO: 929860 - RNA, 22 nt, Human
aaaucagacuugaauuuucauc

SEQ ID NO: 929861 - RNA, 22 nt, Human
aggacacagcugcucugcagag

SEQ ID NO: 929862 - RNA, 16 nt, Human
agaggcuguaauggaa

SEQ ID NO: 929863 - RNA, 22 nt, Human
agugggagcggcagucggggac

SEQ ID NO: 929864 - RNA, 22 nt, Human
agcuccugaaaagcgcuugcuu

SEQ ID NO: 929865 - RNA, 22 nt, Human
cagggagaucuuggcuccuggu

SEQ ID NO: 929866 - RNA, 22 nt, Human
gggaagugagcuggaaucaagg

SEQ ID NO: 929867 - RNA, 22 nt, Human
cugagguagaggaaauguagcu

SEQ ID NO: 929868 - RNA, 22 nt, Human
caggaggaaaguuccacucaac

SEQ ID NO: 929869 - RNA, 22 nt, Human
uugccaggagacaucuggagcc

SEQ ID NO: 929870 - RNA, 22 nt, Human
gaggucaggggagaggcugaug

SEQ ID NO: 929871 - RNA, 22 nt, Human
agucuggagugauuauguggga

SEQ ID NO: 929872 - RNA, 21 nt, Human
ccaccaggucuucugcucggg

SEQ ID NO: 929873 - RNA, 22 nt, Human
ggguggaaaguauuuggggacc

SEQ ID NO: 929874 - RNA, 21 nt, Human
uaggugggagccccaguaugc

SEQ ID NO: 929875 - RNA, 22 nt, Human
agcuggugauguggucccucac

SEQ ID NO: 929876 - RNA, 22 nt, Human
ggugugggucagcuuuauuaau

SEQ ID NO: 929877 - RNA, 22 nt, Human
uuuugaauaauucagaaacagc

SEQ ID NO: 929878 - RNA, 22 nt, Human
ccuggccugugaaucugagagc

SEQ ID NO: 929879 - RNA, 21 nt, Human
gcaggguuugugcugugaguu

SEQ ID NO: 929880 - RNA, 22 nt, Human
caggguggaacaggcaauacuu

SEQ ID NO: 929881 - RNA, 22 nt, Human
agguagcuggugcugggcuccu

SEQ ID NO: 929882 - RNA, 22 nt, Human
cuagggcagggaguguuugcgc

SEQ ID NO: 929883 - RNA, 19 nt, Human
acugcagggaggaggugug

SEQ ID NO: 929884 - RNA, 22 nt, Human
cuggcaguguccagcucgugau

SEQ ID NO: 929885 - RNA, 23 nt, Human
uggcuugcuaauguuccaaauaa

SEQ ID NO: 929886 - RNA, 22 nt, Human
augcaggaagagcccuggagcu

SEQ ID NO: 929887 - RNA, 22 nt, Human
gccacaggucggcuagaggguc

SEQ ID NO: 929888 - RNA, 22 nt, Human
aggccugggacgggagccguga

SEQ ID NO: 929889 - RNA, 22 nt, Human
ggcagaggaagcuggaaguggg

SEQ ID NO: 929890 - RNA, 22 nt, Human
ggccuugggauguggcugcagc

SEQ ID NO: 929891 - RNA, 19 nt, Human
gaugcucauucagguggaa

SEQ ID NO: 929892 - RNA, 22 nt, Human
gaggagcuucagaggaaucuua

SEQ ID NO: 929893 - RNA, 22 nt, Human
agaggaaguaaucaggaccugc

SEQ ID NO: 929894 - RNA, 22 nt, Human
ggccuugguaaauuggcauuug

SEQ ID NO: 929895 - RNA, 18 nt, Human
uggguggcuagggaguuu

SEQ ID NO: 929896 - RNA, 22 nt, Human
gggagcugaaggagccggcggg

SEQ ID NO: 929897 - RNA, 22 nt, Human
ggagaagggaacugaguuuuug

SEQ ID NO: 929898 - RNA, 22 nt, Human
ucagguagugguuaaguucugu

SEQ ID NO: 929899 - RNA, 22 nt, Human
gagggccaaugugucccugagc

SEQ ID NO: 929900 - RNA, 22 nt, Human
ggcuagggagacagagggcaug

SEQ ID NO: 929901 - RNA, 22 nt, Human
guaaagcaaaauguagagauug

SEQ ID NO: 929902 - RNA, 22 nt, Human
aggaagagcuggaccagaggac

SEQ ID NO: 929903 - RNA, 23 nt, Human
uacugggcagcugcucugacacc

SEQ ID NO: 929904 - RNA, 22 nt, Human
uugagcugccuggcuguggcuc

SEQ ID NO: 929905 - RNA, 22 nt, Human
caggccacacggcggcucccug

SEQ ID NO: 929906 - RNA, 22 nt, Human
aggacugggugcagagggcauc

SEQ ID NO: 929907 - RNA, 21 nt, Human
ugugacagaggcggugccuac

SEQ ID NO: 929908 - RNA, 22 nt, Human
auuugugggacuauaaugcagg

SEQ ID NO: 929909 - RNA, 22 nt, Human
gggcugaauuuguugcauguaa

SEQ ID NO: 929910 - RNA, 22 nt, Human
gcacugggggcagcagugaggg

SEQ ID NO: 929911 - RNA, 22 nt, Human
agggaggucuggcugcccugag

SEQ ID NO: 929912 - RNA, 18 nt, Human
ggugagggagcuggaagc

SEQ ID NO: 929913 - RNA, 22 nt, Human
aggagggagcuuaagccaggca

SEQ ID NO: 929914 - RNA, 22 nt, Human
ugggggagccuucacaguagcu

SEQ ID NO: 929915 - RNA, 22 nt, Human
gggacgugagugaagaaggucu

SEQ ID NO: 929916 - RNA, 23 nt, Human
gguuggcuguacccaggcucccu

SEQ ID NO: 929917 - RNA, 22 nt, Human
aggcugagccugggcguggugg

SEQ ID NO: 929918 - RNA, 18 nt, Human
ggaaggugcuggagugca

SEQ ID NO: 929919 - RNA, 22 nt, Human
uggcugaggcuuuucuuaaaga

SEQ ID NO: 929920 - RNA, 22 nt, Human
augcggagccccaagcuugaag

SEQ ID NO: 929921 - RNA, 22 nt, Human
gagcugcauagcugggauccuc

SEQ ID NO: 929922 - RNA, 22 nt, Human
ccaggugugcucugcaguggau

SEQ ID NO: 929923 - RNA, 22 nt, Human
uggccugauuuugcuaagagaa

SEQ ID NO: 929924 - RNA, 22 nt, Human
ugggcaaggcuggagccugcag

SEQ ID NO: 929925 - RNA, 22 nt, Human
cauuggcuccugugggacauga

SEQ ID NO: 929926 - RNA, 22 nt, Human
agggcccuagggaaugagacau

SEQ ID NO: 929927 - RNA, 22 nt, Human
aggggcagccucacaauccucu

SEQ ID NO: 929928 - RNA, 22 nt, Human
uuaaggaacuugucuuucucuu

SEQ ID NO: 929929 - RNA, 21 nt, Human
uccaggagcacgggacuagga

SEQ ID NO: 929930 - RNA, 22 nt, Human
ucugggaguuucugugggagcu

SEQ ID NO: 929931 - RNA, 22 nt, Human
gucaggaugagggaugaggagu

SEQ ID NO: 929932 - RNA, 22 nt, Human
gcuuuggaaauauagacucaag

SEQ ID NO: 929933 - RNA, 20 nt, Human
ucagugggaaagugagagug

SEQ ID NO: 929934 - RNA, 22 nt, Human
ggcuguggucauuaggagguug

SEQ ID NO: 929935 - RNA, 22 nt, Human
acuggaaaguauucuuucacug

SEQ ID NO: 929936 - RNA, 22 nt, Human
gagcugggaagauagcuugagc

SEQ ID NO: 929937 - RNA, 21 nt, Human
agggaaaaggcugagugaggg

SEQ ID NO: 929938 - RNA, 22 nt, Human
gucuggaggaggaagaaggcac

SEQ ID NO: 929939 - RNA, 19 nt, Human
ggaggcuucuuggggucgg

SEQ ID NO: 929940 - RNA, 22 nt, Human
gaggggccuggcgaggacaugu

SEQ ID NO: 929941 - RNA, 22 nt, Human
acccggaggcgggggaugcagu

SEQ ID NO: 929942 - RNA, 22 nt, Human
gcugcagggagcuggaaggcuc

SEQ ID NO: 929943 - RNA, 22 nt, Human
cugagcugguucucuugugaaa

SEQ ID NO: 929944 - RNA, 18 nt, Human
agggagagaccgcggguc

SEQ ID NO: 929945 - RNA, 22 nt, Human
uugucaggaacuaugauuaugc

SEQ ID NO: 929946 - RNA, 22 nt, Human
ccaggaaguaugacccaacaga

SEQ ID NO: 929947 - RNA, 22 nt, Human
ggcuggccuguguggccgccac

SEQ ID NO: 929948 - RNA, 22 nt, Human
gcuggguuuucuuccgggccua

SEQ ID NO: 929949 - RNA, 22 nt, Human
uggcugaggucuggggcuucug

SEQ ID NO: 929950 - RNA, 22 nt, Human
caguauuuaggauuaggagaga

SEQ ID NO: 929951 - RNA, 22 nt, Human
ugggaugggaucucgcuguguc

SEQ ID NO: 929952 - RNA, 22 nt, Human
aaagcagaacugagagagcugg

SEQ ID NO: 929953 - RNA, 22 nt, Human
gacaggugcuaagggaccuggc

SEQ ID NO: 929954 - RNA, 22 nt, Human
aggacagcagugcuggcacuug

SEQ ID NO: 929955 - RNA, 22 nt, Human
guagaggggugauucugugaga

SEQ ID NO: 929956 - RNA, 20 nt, Human
uugaggagauauugaauacu

SEQ ID NO: 929957 - RNA, 22 nt, Human
uagggcucugagaguucagccu

SEQ ID NO: 929958 - RNA, 22 nt, Human
gggagggucugagagcugcacc

SEQ ID NO: 929959 - RNA, 22 nt, Human
uuuuuaagagucuggaaauagu

SEQ ID NO: 929960 - RNA, 22 nt, Human
agguaagguuuggaggcagugg

SEQ ID NO: 929961 - RNA, 22 nt, Human
auggccagcaagguagggcaau

SEQ ID NO: 929962 - RNA, 22 nt, Human
aggcugcagaggugcugccaga

SEQ ID NO: 929963 - RNA, 22 nt, Human
aggaauguggaagguggcggcg

SEQ ID NO: 929964 - RNA, 22 nt, Human
gagaugugucagguccuggggg

SEQ ID NO: 929965 - RNA, 22 nt, Human
ggcuggaaggcccuuuguugau

SEQ ID NO: 929966 - RNA, 22 nt, Human
ggagcagggaauuacagcgcag

SEQ ID NO: 929967 - RNA, 22 nt, Human
uggaaggggagcuggaaagggg

SEQ ID NO: 929968 - RNA, 22 nt, Human
uucacagaauugucuugacugg

SEQ ID NO: 929969 - RNA, 22 nt, Human
uggcuggggccugaauccugca

SEQ ID NO: 929970 - RNA, 22 nt, Human
cagggccugccugguuccugga

SEQ ID NO: 929971 - RNA, 19 nt, Human
ugguggaggugcaccugac

SEQ ID NO: 929972 - RNA, 22 nt, Human
gggcagcaucaggaggggcuuu

SEQ ID NO: 929973 - RNA, 23 nt, Human
ugagagccuggcagccuggguuc

SEQ ID NO: 929974 - RNA, 22 nt, Human
aaggggaguuagugauaaaacc

SEQ ID NO: 929975 - RNA, 21 nt, Human
ucaggaagagccaguucaugc

SEQ ID NO: 929976 - RNA, 23 nt, Human
ggucccaguggagaggccucacc

SEQ ID NO: 929977 - RNA, 22 nt, Human
gggcugagggguaucucauggg

SEQ ID NO: 929978 - RNA, 22 nt, Human
ccugaggaugccagcaugggug

SEQ ID NO: 929979 - RNA, 22 nt, Human
uugaggagucaggggcacggaa

SEQ ID NO: 929980 - RNA, 21 nt, Human
ggagucagggucuggcugggg

SEQ ID NO: 929981 - RNA, 22 nt, Human
uggcuggcuguccagcugggca

SEQ ID NO: 929982 - RNA, 22 nt, Human
auggccugcagugcugccacag

SEQ ID NO: 929983 - RNA, 20 nt, Human
acacugugcuaaggauuuuc

SEQ ID NO: 929984 - RNA, 22 nt, Human
cuggagcucuguguguuccuga

SEQ ID NO: 929985 - RNA, 22 nt, Human
ugaacaggugccuucagggagu

SEQ ID NO: 929986 - RNA, 22 nt, Human
gauggaggagauggcagggugc

SEQ ID NO: 929987 - RNA, 22 nt, Human
caggccugugacaccgugucug

SEQ ID NO: 929988 - RNA, 22 nt, Human
gagggcugccacguugggcgag

SEQ ID NO: 929989 - RNA, 22 nt, Human
uggcugaguuacgaacagagca

SEQ ID NO: 929990 - RNA, 22 nt, Human
aggccgugugagcaugugugag

SEQ ID NO: 929991 - RNA, 22 nt, Human
uggcugggagcuggaacugggc

SEQ ID NO: 929992 - RNA, 22 nt, Human
aggggagguggcagaaaugugc

SEQ ID NO: 929993 - RNA, 22 nt, Human
gcaggaguguggugggacaucc

SEQ ID NO: 929994 - RNA, 22 nt, Human
cagaggccuggcuuggacaccu

SEQ ID NO: 929995 - RNA, 22 nt, Human
uugggagaaauaguugauccgc

SEQ ID NO: 929996 - RNA, 22 nt, Human
cugggagaugacucagagcagg

SEQ ID NO: 929997 - RNA, 20 nt, Human
cugggcagguguuugaucuc

SEQ ID NO: 929998 - RNA, 22 nt, Human
gcccagggcugcaaguggacgc

SEQ ID NO: 929999 - RNA, 22 nt, Human
ccauggccaggaaagccaaggu

SEQ ID NO: 930000 - RNA, 22 nt, Human
ggcuggacuugguccuguuuug

SEQ ID NO: 930001 - RNA, 22 nt, Human
uacugaaagagugguggacucu

SEQ ID NO: 930002 - RNA, 22 nt, Human
uaaaguauaagcauuggaguau

SEQ ID NO: 930003 - RNA, 22 nt, Human
cagcaguguacaaggugucaga

SEQ ID NO: 930004 - RNA, 22 nt, Human
ggcuuggaaauugcaggacaca

SEQ ID NO: 930005 - RNA, 22 nt, Human
auguuugaaauuguaaguauau

SEQ ID NO: 930006 - RNA, 22 nt, Human
aggcugucucaccucaggaggg

SEQ ID NO: 930007 - RNA, 22 nt, Human
agagcuggguggacuuguaguu

SEQ ID NO: 930008 - RNA, 17 nt, Human
ucugcagggggccgugu

SEQ ID NO: 930009 - RNA, 22 nt, Human
ccagcuggcccagcugugcucc

SEQ ID NO: 930010 - RNA, 17 nt, Human
ggccugcaccuccugcu

SEQ ID NO: 930011 - RNA, 22 nt, Human
uuauugcuaugaugauguguag

SEQ ID NO: 930012 - RNA, 22 nt, Human
gcugggcaggccucgugagggc

SEQ ID NO: 930013 - RNA, 22 nt, Human
uggggcaugugaaccuggaugu

SEQ ID NO: 930014 - RNA, 19 nt, Human
ugguggaggccccauguuc

SEQ ID NO: 930015 - RNA, 22 nt, Human
aaacaguguguuucagagaggc

SEQ ID NO: 930016 - RNA, 22 nt, Human
uuugagaagcauggcuguauuc

SEQ ID NO: 930017 - RNA, 22 nt, Human
ugggguagguaugaaaacuagg

SEQ ID NO: 930018 - RNA, 22 nt, Human
gucugcugacagagcauggacc

SEQ ID NO: 930019 - RNA, 22 nt, Human
ccugaggcccuggcugugcuga

SEQ ID NO: 930020 - RNA, 22 nt, Human
agggaaauuaaugugagcaaug

SEQ ID NO: 930021 - RNA, 22 nt, Human
aguucugggaggugcacgucca

SEQ ID NO: 930022 - RNA, 22 nt, Human
ggaaacugcuuacacuagaggg

SEQ ID NO: 930023 - RNA, 22 nt, Human
ugggaagaguuagagacagcug

SEQ ID NO: 930024 - RNA, 22 nt, Human
ugcuggccucggcgcugggccu

SEQ ID NO: 930025 - RNA, 22 nt, Human
uagggagugcguagcagggugg

SEQ ID NO: 930026 - RNA, 22 nt, Human
cgggaagguggagguugcagug

SEQ ID NO: 930027 - RNA, 22 nt, Human
caggugggagccacagcguaca

SEQ ID NO: 930028 - RNA, 23 nt, Human
agguggagcugugcagccggggc

SEQ ID NO: 930029 - RNA, 22 nt, Human
ucccacugucuucucgugcucg

SEQ ID NO: 930030 - RNA, 22 nt, Human
ggcuggaacuucuucuggcauu

SEQ ID NO: 930031 - RNA, 22 nt, Human
gccugagccgccugagcggcgg

SEQ ID NO: 930032 - RNA, 22 nt, Human
gggagcugagcuggaagagaau

SEQ ID NO: 930033 - RNA, 23 nt, Human
uccaguuaaugguucccagucug

SEQ ID NO: 930034 - RNA, 22 nt, Human
agcaggaaggggaugaugggca

SEQ ID NO: 930035 - RNA, 22 nt, Human
aguaacuuaagcaauuguguau

SEQ ID NO: 930036 - RNA, 22 nt, Human
cugggaggcggagguuguagug

SEQ ID NO: 930037 - RNA, 22 nt, Human
gugcugagugcagagugcagag

SEQ ID NO: 930038 - RNA, 22 nt, Human
agcaaggcagcuuucacugcuu

SEQ ID NO: 930039 - RNA, 22 nt, Human
cugagggagcugcuggccuugg

SEQ ID NO: 930040 - RNA, 22 nt, Human
ugaaggccuccccgagcauuag

SEQ ID NO: 930041 - RNA, 22 nt, Human
gggagcugaacugcugaaguug

SEQ ID NO: 930042 - RNA, 22 nt, Human
cgucuaggccgugcccugaggu

SEQ ID NO: 930043 - RNA, 22 nt, Human
uccaggaggacugagggggcug

SEQ ID NO: 930044 - RNA, 22 nt, Human
cuggccuggcaggggaccucua

SEQ ID NO: 930045 - RNA, 20 nt, Human
ugggguccuggaggggaucc

SEQ ID NO: 930046 - RNA, 22 nt, Human
ggugagagaaaagaaacacugu

SEQ ID NO: 930047 - RNA, 22 nt, Human
agguggucuuguggaugccgca

SEQ ID NO: 930048 - RNA, 22 nt, Human
cuugccagggacucagucaggg

SEQ ID NO: 930049 - RNA, 22 nt, Human
gcugggagucgcgucuguggcc

SEQ ID NO: 930050 - RNA, 22 nt, Human
gcggggggcaggcaguacguug

SEQ ID NO: 930051 - RNA, 22 nt, Human
gacuggcucuaucuccuuggcg

SEQ ID NO: 930052 - RNA, 22 nt, Human
uggcaaggccacaggugcaguu

SEQ ID NO: 930053 - RNA, 21 nt, Human
ccuggagacaaagacagggug

SEQ ID NO: 930054 - RNA, 22 nt, Human
ucacaggagcccaggggagcug

SEQ ID NO: 930055 - RNA, 22 nt, Human
cuggagcagcagguggccaggg

SEQ ID NO: 930056 - RNA, 22 nt, Human
auggguggccccgugugcaguc

SEQ ID NO: 930057 - RNA, 22 nt, Human
ggagggaaccuuggcuggauug

SEQ ID NO: 930058 - RNA, 22 nt, Human
uguuuuaagggucaacugucac

SEQ ID NO: 930059 - RNA, 22 nt, Human
ggcucugcugguaagaugccuc

SEQ ID NO: 930060 - RNA, 22 nt, Human
agggcccaccuuggugcugagg

SEQ ID NO: 930061 - RNA, 23 nt, Human
ugacagagcacagugggggagau

SEQ ID NO: 930062 - RNA, 22 nt, Human
cagggcuccccagagagccucu

SEQ ID NO: 930063 - RNA, 22 nt, Human
aggugcuuggcucgugcacaca

SEQ ID NO: 930064 - RNA, 22 nt, Human
agucaggacagauuuucugggg

SEQ ID NO: 930065 - RNA, 22 nt, Human
agguggcagacuaacagaagga

SEQ ID NO: 930066 - RNA, 22 nt, Human
agguggaguuaagugugaacug

SEQ ID NO: 930067 - RNA, 22 nt, Human
ugggugguugcugaggcuccuu

SEQ ID NO: 930068 - RNA, 22 nt, Human
uggcugagcugcagcguggcuu

SEQ ID NO: 930069 - RNA, 22 nt, Human
caggcucgguccaguggcaccc

SEQ ID NO: 930070 - RNA, 22 nt, Human
cuggaagcgucggaggaagggc

SEQ ID NO: 930071 - RNA, 22 nt, Human
aggggagguguccccaaaucuc

SEQ ID NO: 930072 - RNA, 22 nt, Human
uagaaaagccccagcuggaggg

SEQ ID NO: 930073 - RNA, 22 nt, Human
uucugggcacacaggcccuggu

SEQ ID NO: 930074 - RNA, 22 nt, Human
uggcaguagagcuggaacuuga

SEQ ID NO: 930075 - RNA, 22 nt, Human
gaggaggcuuccgggaggcacg

SEQ ID NO: 930076 - RNA, 22 nt, Human
caugggaauaaaguuauuucaa

SEQ ID NO: 930077 - RNA, 22 nt, Human
ccugggcaaaugccagagacaa

SEQ ID NO: 930078 - RNA, 22 nt, Human
uggcugaggcacagcugccgcc

SEQ ID NO: 930079 - RNA, 22 nt, Human
ccaggagaaugggauuacccua

SEQ ID NO: 930080 - RNA, 22 nt, Human
gugcaggugguuggcccagccg

SEQ ID NO: 930081 - RNA, 22 nt, Human
uggguguguccauauuuugacu

SEQ ID NO: 930082 - RNA, 22 nt, Human
gugagagugguuuauguccaug

SEQ ID NO: 930083 - RNA, 22 nt, Human
cugagggccuucuaugcugagc

SEQ ID NO: 930084 - RNA, 18 nt, Human
gggcuuuacagaguggag

SEQ ID NO: 930085 - RNA, 22 nt, Human
ggucccagucccuuuccaccgu

SEQ ID NO: 930086 - RNA, 19 nt, Human
cccuggaggaguguuggcu

SEQ ID NO: 930087 - RNA, 22 nt, Human
cggcuggagcugagaaaggagc

SEQ ID NO: 930088 - RNA, 21 nt, Human
cagaggggcuagccuggcugc

SEQ ID NO: 930089 - RNA, 22 nt, Human
gaggcuggcagaaaagcacagg

SEQ ID NO: 930090 - RNA, 21 nt, Human
ggucaggcaugugcccugagc

SEQ ID NO: 930091 - RNA, 22 nt, Human
uuggaggaagcucaugggggau

SEQ ID NO: 930092 - RNA, 22 nt, Human
acggagcccgugucagguggga

SEQ ID NO: 930093 - RNA, 20 nt, Human
ccagguggugccuggagagg

SEQ ID NO: 930094 - RNA, 22 nt, Human
uggcuuuugaaaaggugaugua

SEQ ID NO: 930095 - RNA, 22 nt, Human
ucugagagcuguagaagccuau

SEQ ID NO: 930096 - RNA, 22 nt, Human
aggcugcugccuuggagagugu

SEQ ID NO: 930097 - RNA, 22 nt, Human
agaggagguccuuuucugaugu

SEQ ID NO: 930098 - RNA, 22 nt, Human
cugaaggauguguggugggagu

SEQ ID NO: 930099 - RNA, 22 nt, Human
gaaggagaggauugugaggcug

SEQ ID NO: 930100 - RNA, 22 nt, Human
gaaaggagaggguuaaggagcu

SEQ ID NO: 930101 - RNA, 22 nt, Human
uggcaggaaaaagggccagagg

SEQ ID NO: 930102 - RNA, 19 nt, Human
ggauaagguuggagugauc

SEQ ID NO: 930103 - RNA, 22 nt, Human
gggcuguaggagcuggaauggg

SEQ ID NO: 930104 - RNA, 22 nt, Human
uauuagggaacugcaagacuaa

SEQ ID NO: 930105 - RNA, 22 nt, Human
guuuauuggguauuguggagcc

SEQ ID NO: 930106 - RNA, 22 nt, Human
gggacuggaguagaggccggug

SEQ ID NO: 930107 - RNA, 22 nt, Human
agcacuggaaaguuaagaguuu

SEQ ID NO: 930108 - RNA, 17 nt, Human
agcagcuggguugaucu

SEQ ID NO: 930109 - RNA, 23 nt, Human
ugucuugguuucuucacccuagu

SEQ ID NO: 930110 - RNA, 23 nt, Human
ucugaccucguuugcuguguucu

SEQ ID NO: 930111 - RNA, 22 nt, Human
gucuagggcuccucagugacaa

SEQ ID NO: 930112 - RNA, 22 nt, Human
ccuggagacccacuucugccaa

SEQ ID NO: 930113 - RNA, 22 nt, Human
cagaguggugcaagggcagugu

SEQ ID NO: 930114 - RNA, 22 nt, Human
uggagcugguucuggggaagcu

SEQ ID NO: 930115 - RNA, 22 nt, Human
ccaggagagcucucguucagug

SEQ ID NO: 930116 - RNA, 19 nt, Human
cugggacaaugaaagcauc

SEQ ID NO: 930117 - RNA, 22 nt, Human
uagcugggacuacuggcccugc

SEQ ID NO: 930118 - RNA, 22 nt, Human
uggaaauacaagaaguauguca

SEQ ID NO: 930119 - RNA, 22 nt, Human
gccuggggaacuugauccuguc

SEQ ID NO: 930120 - RNA, 22 nt, Human
ugugcuugucguggagccaggc

SEQ ID NO: 930121 - RNA, 22 nt, Human
gcagagauccaggguauagguu

SEQ ID NO: 930122 - RNA, 22 nt, Human
uggcacaguuaaaguuguagaa

SEQ ID NO: 930123 - RNA, 22 nt, Human
uggugcugccaccuccucugcu

SEQ ID NO: 930124 - RNA, 21 nt, Human
uggcaggcagcuggaagcuug

SEQ ID NO: 930125 - RNA, 22 nt, Human
acugggcaaggauaugaugggu

SEQ ID NO: 930126 - RNA, 22 nt, Human
agccacugugugaccagcuguc

SEQ ID NO: 930127 - RNA, 22 nt, Human
aggagucaccugcccaaaguca

SEQ ID NO: 930128 - RNA, 22 nt, Human
ugcaggaacucgaaaacuauag

SEQ ID NO: 930129 - RNA, 21 nt, Human
agggccucuguguacuggggg

SEQ ID NO: 930130 - RNA, 20 nt, Human
ccuggagccuggaaggaguc

SEQ ID NO: 930131 - RNA, 19 nt, Human
cccagaggaaugccuggaa

SEQ ID NO: 930132 - RNA, 22 nt, Human
ggcaguggugggaggcucgcuc

SEQ ID NO: 930133 - RNA, 18 nt, Human
gagaggagccagaauuuu

SEQ ID NO: 930134 - RNA, 22 nt, Human
gggagcuggagcuggaagacuc

SEQ ID NO: 930135 - RNA, 22 nt, Human
agggcaguguggugggacugac

SEQ ID NO: 930136 - RNA, 22 nt, Human
aagcuggccuguaccugcugag

SEQ ID NO: 930137 - RNA, 22 nt, Human
ugggguccucucacuuggaggg

SEQ ID NO: 930138 - RNA, 22 nt, Human
aagaggaggacgguucccagaa

SEQ ID NO: 930139 - RNA, 22 nt, Human
uugcaaauaauagccugaaacu

SEQ ID NO: 930140 - RNA, 22 nt, Human
agagaagagucuugucaaauua

SEQ ID NO: 930141 - RNA, 22 nt, Human
aggagacaguuuggacguguag

SEQ ID NO: 930142 - RNA, 19 nt, Human
gggaaugauggaagacuuc

SEQ ID NO: 930143 - RNA, 22 nt, Human
uuagaaaucaccucugaagauc

SEQ ID NO: 930144 - RNA, 22 nt, Human
cauaggcucuucagagaacuga

SEQ ID NO: 930145 - RNA, 22 nt, Human
aggcaguuguugcugagcagcu

SEQ ID NO: 930146 - RNA, 22 nt, Human
cgaggaggaaacgcggagaacu

SEQ ID NO: 930147 - RNA, 22 nt, Human
aaggaggaauguagccagcucc

SEQ ID NO: 930148 - RNA, 22 nt, Human
guggcaggagggcaucacuugg

SEQ ID NO: 930149 - RNA, 22 nt, Human
gaggagaggcuggacgcgguga

SEQ ID NO: 930150 - RNA, 17 nt, Human
gugagcugagucaggac

SEQ ID NO: 930151 - RNA, 22 nt, Human
aaggcacauauuuuagagucac

SEQ ID NO: 930152 - RNA, 22 nt, Human
aggugcugccccgagaaggaug

SEQ ID NO: 930153 - RNA, 18 nt, Human
ggaaaaggagugucuagc

SEQ ID NO: 930154 - RNA, 22 nt, Human
uggcugagugaacauguccauu

SEQ ID NO: 930155 - RNA, 22 nt, Human
uuuccagggaggaauguggggu

SEQ ID NO: 930156 - RNA, 22 nt, Human
agagaugcuguggguagaggca

SEQ ID NO: 930157 - RNA, 22 nt, Human
cugggagggguagccaauccua

SEQ ID NO: 930158 - RNA, 18 nt, Human
auggcuccagugucuucc

SEQ ID NO: 930159 - RNA, 22 nt, Human
ucaggagaguguucaguggagg

SEQ ID NO: 930160 - RNA, 22 nt, Human
gagguuggagggcuggccugca

SEQ ID NO: 930161 - RNA, 22 nt, Human
ucaaaggcuugugguucuggga

SEQ ID NO: 930162 - RNA, 22 nt, Human
aggcaguugaguggcuuuuuca

SEQ ID NO: 930163 - RNA, 22 nt, Human
gcugcaggcucugcaggaauug

SEQ ID NO: 930164 - RNA, 22 nt, Human
gggggcuggacuuucccacaca

SEQ ID NO: 930165 - RNA, 22 nt, Human
ggugggugagcccugggagcug

SEQ ID NO: 930166 - RNA, 23 nt, Human
uggggcugauggagacggaccag

SEQ ID NO: 930167 - RNA, 22 nt, Human
agucaggaagcuggagcugggg

SEQ ID NO: 930168 - RNA, 22 nt, Human
uugccaggggacaucuggagcc

SEQ ID NO: 930169 - RNA, 22 nt, Human
gaaagcagaugaaauugcaaca

SEQ ID NO: 930170 - RNA, 22 nt, Human
uggcugaggagagggcggaagu

SEQ ID NO: 930171 - RNA, 18 nt, Human
ggccucagccuggccgga

SEQ ID NO: 930172 - RNA, 22 nt, Human
ggcugagcuuuucaugaugguu

SEQ ID NO: 930173 - RNA, 22 nt, Human
uuuccaaggaugugucucucua

SEQ ID NO: 930174 - RNA, 22 nt, Human
ugcuggaguggcacuguguggc

SEQ ID NO: 930175 - RNA, 22 nt, Human
ugggaagauaugagugaccaac

SEQ ID NO: 930176 - RNA, 22 nt, Human
ugggcagggagcuggaaccaca

SEQ ID NO: 930177 - RNA, 22 nt, Human
aaggggggcaccugcaugcccg

SEQ ID NO: 930178 - RNA, 22 nt, Human
gcaggaguuagagguuuaaucu

SEQ ID NO: 930179 - RNA, 22 nt, Human
augggaggcagacacuaaguuc

SEQ ID NO: 930180 - RNA, 22 nt, Human
gggcaugguggcaggcaccugu

SEQ ID NO: 930181 - RNA, 22 nt, Human
ugggcagacgggagcuugccuu

SEQ ID NO: 930182 - RNA, 22 nt, Human
ucugagcuggagcccaucaccu

SEQ ID NO: 930183 - RNA, 22 nt, Human
gagggugguggcuuaaggugcu

SEQ ID NO: 930184 - RNA, 22 nt, Human
agcaggaacucagggaguucuc

SEQ ID NO: 930185 - RNA, 20 nt, Human
aggaaggagaaucugagcaa

SEQ ID NO: 930186 - RNA, 22 nt, Human
ccaggaagaaacagucuuuaua

SEQ ID NO: 930187 - RNA, 20 nt, Human
ggccugagcauggcuggcag

SEQ ID NO: 930188 - RNA, 23 nt, Human
cugagggcuggucugaagucugc

SEQ ID NO: 930189 - RNA, 22 nt, Human
accuggaggcagagguugcagu

SEQ ID NO: 930190 - RNA, 22 nt, Human
gggaugagagcugggacagaag

SEQ ID NO: 930191 - RNA, 22 nt, Human
gaggggcucuugggcaugaagg

SEQ ID NO: 930192 - RNA, 20 nt, Human
agcuugccccugucuuugcc

SEQ ID NO: 930193 - RNA, 20 nt, Human
aggggcaccugcgacggggc

SEQ ID NO: 930194 - RNA, 22 nt, Human
cugggaggcagucucucuagaa

SEQ ID NO: 930195 - RNA, 18 nt, Human
agggcugaugaguuuggg

SEQ ID NO: 930196 - RNA, 22 nt, Human
uccgggagcugaacgucuugcg

SEQ ID NO: 930197 - RNA, 22 nt, Human
gcauuacuucuuucauagguca

SEQ ID NO: 930198 - RNA, 22 nt, Human
aguguuugaguuugcggcauug

SEQ ID NO: 930199 - RNA, 22 nt, Human
agguggagaagagaugggcagu

SEQ ID NO: 930200 - RNA, 22 nt, Human
uuauugagcacauaguaugugg

SEQ ID NO: 930201 - RNA, 22 nt, Human
uuggaggacuaguuaagagacc

SEQ ID NO: 930202 - RNA, 22 nt, Human
gcuggccugcgagggcaggcug

SEQ ID NO: 930203 - RNA, 22 nt, Human
auuagguaguauaaucuuuguu

SEQ ID NO: 930204 - RNA, 22 nt, Human
ugaggcuggaugggaugccucc

SEQ ID NO: 930205 - RNA, 22 nt, Human
ugggagagauaggcuucuggac

SEQ ID NO: 930206 - RNA, 22 nt, Human
cagggccucugugggcucucuc

SEQ ID NO: 930207 - RNA, 22 nt, Human
gggagaguagcuggaagguucu

SEQ ID NO: 930208 - RNA, 22 nt, Human
ccagcagcucccucaggguccg

SEQ ID NO: 930209 - RNA, 22 nt, Human
gcaugcaggaagggcuugggga

SEQ ID NO: 930210 - RNA, 22 nt, Human
gcuggccugaccugaggcuggg

SEQ ID NO: 930211 - RNA, 22 nt, Human
aagccugagccaugcuuuacug

SEQ ID NO: 930212 - RNA, 22 nt, Human
ggcagagcuugcagugagccga

SEQ ID NO: 930213 - RNA, 21 nt, Human
ucuuggggaggagggcugcac

SEQ ID NO: 930214 - RNA, 22 nt, Human
agaguuaaugcaggccaagccu

SEQ ID NO: 930215 - RNA, 22 nt, Human
agguggcagaugggggugcucg

SEQ ID NO: 930216 - RNA, 22 nt, Human
gcugaagagagaugcguccagc

SEQ ID NO: 930217 - RNA, 22 nt, Human
acagcuggaggucugugagcac

SEQ ID NO: 930218 - RNA, 22 nt, Human
cugagcagaagggugcacgugc

SEQ ID NO: 930219 - RNA, 22 nt, Human
ggagggaguuucauuccugccc

SEQ ID NO: 930220 - RNA, 22 nt, Human
gagaggaagccuucuguacuug

SEQ ID NO: 930221 - RNA, 22 nt, Human
gggagagcgcgcuagggccgag

SEQ ID NO: 930222 - RNA, 22 nt, Human
uggaaggggccaggcgcggagu

SEQ ID NO: 930223 - RNA, 22 nt, Human
ugucaaguuguuaaguucuggg

SEQ ID NO: 930224 - RNA, 22 nt, Human
gggaggaaggcuugggugagua

SEQ ID NO: 930225 - RNA, 22 nt, Human
ggagacagugacuuagagacug

SEQ ID NO: 930226 - RNA, 22 nt, Human
gugcaggacagcacaucuccug

SEQ ID NO: 930227 - RNA, 22 nt, Human
cagguguugcaguugaagacug

SEQ ID NO: 930228 - RNA, 23 nt, Human
gggcagcuuaagcuuguuuuucu

SEQ ID NO: 930229 - RNA, 22 nt, Human
gcaggcuuauggggagacagag

SEQ ID NO: 930230 - RNA, 22 nt, Human
ggcugcccucggggucgcaggc

SEQ ID NO: 930231 - RNA, 22 nt, Human
agguuuggguucauugcuggcu

SEQ ID NO: 930232 - RNA, 19 nt, Human
ggccuggauuuagggcucc

SEQ ID NO: 930233 - RNA, 22 nt, Human
agcuggguacacguugucacaa

SEQ ID NO: 930234 - RNA, 22 nt, Human
agauggcagggguaccuggaag

SEQ ID NO: 930235 - RNA, 22 nt, Human
gucaggggccaugggccaagga

SEQ ID NO: 930236 - RNA, 22 nt, Human
uaggcagggauuaggguugauu

SEQ ID NO: 930237 - RNA, 22 nt, Human
uaaggagagaauuuagagguuu

SEQ ID NO: 930238 - RNA, 22 nt, Human
gacaguggagccacguugggag

SEQ ID NO: 930239 - RNA, 22 nt, Human
gaggcugugugucccucuggac

SEQ ID NO: 930240 - RNA, 22 nt, Human
ggcagguguggugaccagagau

SEQ ID NO: 930241 - RNA, 22 nt, Human
caggguggcaggcaccauggcc

SEQ ID NO: 930242 - RNA, 22 nt, Human
acccggagucggagguugcagu

SEQ ID NO: 930243 - RNA, 22 nt, Human
ucuggaaggggaucugugguca

SEQ ID NO: 930244 - RNA, 22 nt, Human
ggaaggggagcuggaaagggua

SEQ ID NO: 930245 - RNA, 22 nt, Human
cugggaguugacgaggcuugua

SEQ ID NO: 930246 - RNA, 22 nt, Human
ggcuagggaucuagaccaggac

SEQ ID NO: 930247 - RNA, 22 nt, Human
uuccuuggagucaaacagggag

SEQ ID NO: 930248 - RNA, 20 nt, Human
gucagaggacccuagagcga

SEQ ID NO: 930249 - RNA, 23 nt, Human
aggcugcagaagaauagggucau

SEQ ID NO: 930250 - RNA, 22 nt, Human
aggcggcuccgggagugugggc

SEQ ID NO: 930251 - RNA, 22 nt, Human
ggaagaggcugaggccaugcug

SEQ ID NO: 930252 - RNA, 22 nt, Human
acgggcugggacggggaagcuc

SEQ ID NO: 930253 - RNA, 22 nt, Human
ggccacuguuuccugggcaguu

SEQ ID NO: 930254 - RNA, 22 nt, Human
ggagugggaacaaugacauggu

SEQ ID NO: 930255 - RNA, 22 nt, Human
ugguggggccagacuucagcuc

SEQ ID NO: 930256 - RNA, 22 nt, Human
gccuggagcucggcugagggcg

SEQ ID NO: 930257 - RNA, 20 nt, Human
ugcuggaggcgccggcgcuc

SEQ ID NO: 930258 - RNA, 22 nt, Human
uuuggucuggaaucuucagggu

SEQ ID NO: 930259 - RNA, 22 nt, Human
agaguggcaccuuaccugagac

SEQ ID NO: 930260 - RNA, 19 nt, Human
ugcuugccugccuuuccca

SEQ ID NO: 930261 - RNA, 22 nt, Human
ggcgaggugucugccaucaagc

SEQ ID NO: 930262 - RNA, 22 nt, Human
ggaagcuguuaucaucuguauc

SEQ ID NO: 930263 - RNA, 22 nt, Human
uuuucuuggaguggcuguccuu

SEQ ID NO: 930264 - RNA, 18 nt, Human
augggcagguaagaucca

SEQ ID NO: 930265 - RNA, 22 nt, Human
gggcuguuugcauauguuuaua

SEQ ID NO: 930266 - RNA, 22 nt, Human
aguggcugugaaauacauggga

SEQ ID NO: 930267 - RNA, 22 nt, Human
gggggaaaguggagguucguga

SEQ ID NO: 930268 - RNA, 19 nt, Human
gcagcugugggaagagcca

SEQ ID NO: 930269 - RNA, 22 nt, Human
ccugagcuuacaauuuaagaac

SEQ ID NO: 930270 - RNA, 22 nt, Human
ggccuugguggcuuugcugaug

SEQ ID NO: 930271 - RNA, 22 nt, Human
ggaggaggggugacugaaugcu

SEQ ID NO: 930272 - RNA, 22 nt, Human
ggguuguagagcuggaagggga

SEQ ID NO: 930273 - RNA, 22 nt, Human
cugaagcugggcacuuccuuuu

SEQ ID NO: 930274 - RNA, 21 nt, Human
gcccacagugaggaggauccc

SEQ ID NO: 930275 - RNA, 22 nt, Human
gcacugagcuuuggaggagcag

SEQ ID NO: 930276 - RNA, 22 nt, Human
guaggggccagaaagacuuaga

SEQ ID NO: 930277 - RNA, 22 nt, Human
aggaaagcucccaguagggcuc

SEQ ID NO: 930278 - RNA, 22 nt, Human
cugcagggcagggccuccuggc

SEQ ID NO: 930279 - RNA, 22 nt, Human
ugugcugcucucagugacagcc

SEQ ID NO: 930280 - RNA, 22 nt, Human
aggccacucagggggccaagau

SEQ ID NO: 930281 - RNA, 22 nt, Human
aggcugagguaggaggaucgcu

SEQ ID NO: 930282 - RNA, 23 nt, Human
agacagaggcugaggcuggccgc

SEQ ID NO: 930283 - RNA, 22 nt, Human
uagggggcuuugcugcuugaca

SEQ ID NO: 930284 - RNA, 22 nt, Human
agccuggacagcuacggagaac

SEQ ID NO: 930285 - RNA, 22 nt, Human
agugagaguauuaaugugaacu

SEQ ID NO: 930286 - RNA, 22 nt, Human
gagcugagggucuaggaggguu

SEQ ID NO: 930287 - RNA, 22 nt, Human
ugguuuguauauguuugugaga

SEQ ID NO: 930288 - RNA, 22 nt, Human
cugaaggacacgugaggagcca

SEQ ID NO: 930289 - RNA, 22 nt, Human
ugucuuggccacuaggagugcc

SEQ ID NO: 930290 - RNA, 22 nt, Human
cuggagaggcugggaacagguu

SEQ ID NO: 930291 - RNA, 22 nt, Human
gcuagagaccagaggccuugaa

SEQ ID NO: 930292 - RNA, 22 nt, Human
agguggcuaugaggaugcaguc

SEQ ID NO: 930293 - RNA, 22 nt, Human
ggugagaggcagugcuguggaa

SEQ ID NO: 930294 - RNA, 22 nt, Human
uggcagaaugaagacuggggcc

SEQ ID NO: 930295 - RNA, 22 nt, Human
caguguuuagcacagugcuugg

SEQ ID NO: 930296 - RNA, 22 nt, Human
uccuuggagaaucuuguuuuac

SEQ ID NO: 930297 - RNA, 22 nt, Human
cuggaaggagcccgggcggauc

SEQ ID NO: 930298 - RNA, 22 nt, Human
guuguuuuugaacggugguggc

SEQ ID NO: 930299 - RNA, 20 nt, Human
ugggaucgaaucaagucugu

SEQ ID NO: 930300 - RNA, 23 nt, Human
uagacugcaggcuccuugagggc

SEQ ID NO: 930301 - RNA, 22 nt, Human
gccagugccugcugcucagggc

SEQ ID NO: 930302 - RNA, 22 nt, Human
aggacaaaggaccagaucugga

SEQ ID NO: 930303 - RNA, 23 nt, Human
aagaaugcuucugaagagcugcc

SEQ ID NO: 930304 - RNA, 22 nt, Human
cggagaggugggggcagcaucu

SEQ ID NO: 930305 - RNA, 22 nt, Human
aaggcacuugcccagagcugca

SEQ ID NO: 930306 - RNA, 22 nt, Human
cagggccagggcuauggugaag

SEQ ID NO: 930307 - RNA, 22 nt, Human
ggcaagagggcagauggagugc

SEQ ID NO: 930308 - RNA, 22 nt, Human
gaagcgcggcgucggcgugggu

SEQ ID NO: 930309 - RNA, 22 nt, Human
aagaguggagcuggaaaguggg

SEQ ID NO: 930310 - RNA, 19 nt, Human
agacaaguuuccagaagcc

SEQ ID NO: 930311 - RNA, 22 nt, Human
gucuguggaguugcuugcugga

SEQ ID NO: 930312 - RNA, 22 nt, Human
gaaggaagcugucuggaugugu

SEQ ID NO: 930313 - RNA, 19 nt, Human
gaauggguucuguagggag

SEQ ID NO: 930314 - RNA, 19 nt, Human
ugggcagugccagggcuua

SEQ ID NO: 930315 - RNA, 22 nt, Human
cacagagagcuacgugcagcgu

SEQ ID NO: 930316 - RNA, 22 nt, Human
cugggaggcccacguugggaag

SEQ ID NO: 930317 - RNA, 22 nt, Human
aguggcuguuccaggugaggac

SEQ ID NO: 930318 - RNA, 18 nt, Human
uggggggcuugucugaag

SEQ ID NO: 930319 - RNA, 22 nt, Human
aggggcuuguggaguugcuggu

SEQ ID NO: 930320 - RNA, 22 nt, Human
ggggucugggcuuagcuggaau

SEQ ID NO: 930321 - RNA, 21 nt, Human
ggccuuggcgggggccgaauu

SEQ ID NO: 930322 - RNA, 22 nt, Human
cuugccaguguugcagaagcuc

SEQ ID NO: 930323 - RNA, 20 nt, Human
agcuggcccccgguggccug

SEQ ID NO: 930324 - RNA, 22 nt, Human
ccagcaggaaagugacguuuga

SEQ ID NO: 930325 - RNA, 22 nt, Human
uugagcagaucgggcugugggg

SEQ ID NO: 930326 - RNA, 19 nt, Human
aggaaggcggcggcugccc

SEQ ID NO: 930327 - RNA, 22 nt, Human
uaagggcugacuuggaacuguc

SEQ ID NO: 930328 - RNA, 22 nt, Human
ugggaaggggagcuggaaagga

SEQ ID NO: 930329 - RNA, 22 nt, Human
cucacaggguucuaucgaagag

SEQ ID NO: 930330 - RNA, 22 nt, Human
gugggcaucuccuuggaagcca

SEQ ID NO: 930331 - RNA, 22 nt, Human
uggccaggcagguagaacggcc

SEQ ID NO: 930332 - RNA, 22 nt, Human
gaggcugaacagguucucauga

SEQ ID NO: 930333 - RNA, 18 nt, Human
ggaggcucugugguuucc

SEQ ID NO: 930334 - RNA, 22 nt, Human
gagaugggcgagaagguggacu

SEQ ID NO: 930335 - RNA, 22 nt, Human
augaggagucaaggagucggag

SEQ ID NO: 930336 - RNA, 22 nt, Human
ggagaguggauuccagcuguau

SEQ ID NO: 930337 - RNA, 22 nt, Human
agagccuguucggaggcgcccc

SEQ ID NO: 930338 - RNA, 22 nt, Human
uggaagggguuacgcagcagga

SEQ ID NO: 930339 - RNA, 22 nt, Human
agcuggguguagggcuggacaa

SEQ ID NO: 930340 - RNA, 22 nt, Human
gggaggugauuaggaccaugua

SEQ ID NO: 930341 - RNA, 22 nt, Human
uagcugcacaggaaguaagauu

SEQ ID NO: 930342 - RNA, 22 nt, Human
cugagcugcucccgcugcagcg

SEQ ID NO: 930343 - RNA, 22 nt, Human
ggggaggaagcuggaacacggg

SEQ ID NO: 930344 - RNA, 22 nt, Human
ugaggaggugggcacacagagu

SEQ ID NO: 930345 - RNA, 22 nt, Human
gagguggcugcuugcugggaaa

SEQ ID NO: 930346 - RNA, 22 nt, Human
cagaggccccauuggcugugcg

SEQ ID NO: 930347 - RNA, 22 nt, Human
cugaugcucuggauguagucaa

SEQ ID NO: 930348 - RNA, 22 nt, Human
agagcagaggcauggccguggg

SEQ ID NO: 930349 - RNA, 22 nt, Human
aagggugguguaggagaucaaa

SEQ ID NO: 930350 - RNA, 22 nt, Human
gcggggggcagcagucgcucag

SEQ ID NO: 930351 - RNA, 22 nt, Human
ugaggauggaaugcugugcaag

SEQ ID NO: 930352 - RNA, 22 nt, Human
gagucgagcagaaagccgucgg

SEQ ID NO: 930353 - RNA, 22 nt, Human
aguggcaguagaugagcugguu

SEQ ID NO: 930354 - RNA, 22 nt, Human
agacagcgaggacagaggggug

SEQ ID NO: 930355 - RNA, 22 nt, Human
ugccuggauggcucugagcagg

SEQ ID NO: 930356 - RNA, 18 nt, Human
agcugaggggacugaaga

SEQ ID NO: 930357 - RNA, 19 nt, Human
auagaguagaguaucuguu

SEQ ID NO: 930358 - RNA, 22 nt, Human
gaggagagaagcuaacggugcu

SEQ ID NO: 930359 - RNA, 21 nt, Human
agaugaggauacugaggccua

SEQ ID NO: 930360 - RNA, 19 nt, Human
gggugaggaagagcguugc

SEQ ID NO: 930361 - RNA, 22 nt, Human
gcaaggagcaccuuucuggaac

SEQ ID NO: 930362 - RNA, 17 nt, Human
gagguaggaagugaguc

SEQ ID NO: 930363 - RNA, 22 nt, Human
cauugcuguuaauugucucuag

SEQ ID NO: 930364 - RNA, 22 nt, Human
gcaggguaggugacagguaguc

SEQ ID NO: 930365 - RNA, 22 nt, Human
ggagccuggaguuucugauggg

SEQ ID NO: 930366 - RNA, 22 nt, Human
ggaaggaucuggcugaaaucca

SEQ ID NO: 930367 - RNA, 17 nt, Human
uaagggggaaacggagc

SEQ ID NO: 930368 - RNA, 21 nt, Human
gggcuggauauuggaaagagg

SEQ ID NO: 930369 - RNA, 22 nt, Human
gggcuggagagucccacguggg

SEQ ID NO: 930370 - RNA, 22 nt, Human
ugggccagauccauggcaauaa

SEQ ID NO: 930371 - RNA, 22 nt, Human
aagggggaaauccuagcgccgc

SEQ ID NO: 930372 - RNA, 21 nt, Human
agaaggcaaaagcagacaucu

SEQ ID NO: 930373 - RNA, 22 nt, Human
ggccuuggaguccuccacugga

SEQ ID NO: 930374 - RNA, 22 nt, Human
ggacauggaaguauggagugga

SEQ ID NO: 930375 - RNA, 22 nt, Human
gaguaaaagaugaggcaguaga

SEQ ID NO: 930376 - RNA, 22 nt, Human
guggcuaggcccaacggcagga

SEQ ID NO: 930377 - RNA, 21 nt, Human
uggagagugauuucagugugg

SEQ ID NO: 930378 - RNA, 22 nt, Human
auggaggaugugcagcaugggc

SEQ ID NO: 930379 - RNA, 22 nt, Human
uuugaagauaaauauggagaaa

SEQ ID NO: 930380 - RNA, 22 nt, Human
aagguggcggcugccagguccu

SEQ ID NO: 930381 - RNA, 22 nt, Human
ggcggugguugagaggacggcg

SEQ ID NO: 930382 - RNA, 22 nt, Human
gguggcugugagcauuauguga

SEQ ID NO: 930383 - RNA, 22 nt, Human
cugaaacuauggggaggggagc

SEQ ID NO: 930384 - RNA, 22 nt, Human
agaagcagaaggaagcagggcc

SEQ ID NO: 930385 - RNA, 22 nt, Human
gccaggguggcagaaggcccca

SEQ ID NO: 930386 - RNA, 22 nt, Human
cagguagaggcugccaucagcu

SEQ ID NO: 930387 - RNA, 22 nt, Human
gcugguggcagagcuccgcggc

SEQ ID NO: 930388 - RNA, 22 nt, Human
gaggcaaagcauguggcucagg

SEQ ID NO: 930389 - RNA, 22 nt, Human
uggaaauaguugugagucaggc

SEQ ID NO: 930390 - RNA, 22 nt, Human
agcaggaggagagccuggcggu

SEQ ID NO: 930391 - RNA, 20 nt, Human
gugcccaguuggugacagac

SEQ ID NO: 930392 - RNA, 22 nt, Human
gggcagcaaaucugagucuggu

SEQ ID NO: 930393 - RNA, 22 nt, Human T-lymphotropic virus 1
ggguuuuuuaggcuggacaacu

SEQ ID NO: 930394 - RNA, 19 nt, Human T-lymphotropic virus 1
guccaggccugacaagccc

SEQ ID NO: 930395 - RNA, 22 nt, Human
cuguuguaucauuuguucacau

SEQ ID NO: 930396 - RNA, 22 nt, Human
gcuauacaaguguagaauagag

SEQ ID NO: 930397 - RNA, 22 nt, Human
acaguuaccacuuagcaguuac

SEQ ID NO: 930398 - RNA, 22 nt, Human
auguagcaugaggcacugugcc

SEQ ID NO: 930399 - RNA, 22 nt, Human
uaaguucaaugaacucaguucu

SEQ ID NO: 930400 - RNA, 22 nt, Human
ugcauagaggauccaguguggu

SEQ ID NO: 930401 - RNA, 22 nt, Human
gcucugccucuuugcugcguca

SEQ ID NO: 930402 - RNA, 22 nt, Human
uuacacaaacacauuccagaua

SEQ ID NO: 930403 - RNA, 22 nt, Human
ccugucuacauaacugugugaa

SEQ ID NO: 930404 - RNA, 22 nt, Human
aaucuagucuccuuaagucuuu

SEQ ID NO: 930405 - RNA, 22 nt, Human
uggcuuuacuuaaacugaauca

SEQ ID NO: 930406 - RNA, 17 nt, Human
uaugcuuuucuucucca

SEQ ID NO: 930407 - RNA, 22 nt, Human
aacagacauauuuuuaauaugc

SEQ ID NO: 930408 - RNA, 22 nt, Human
uacaugucuacaugcauuuuug

SEQ ID NO: 930409 - RNA, 22 nt, Human
ugguaaugguucucuugcuaua

SEQ ID NO: 930410 - RNA, 22 nt, Human
auagcaauggcaacaacuaagc

SEQ ID NO: 930411 - RNA, 20 nt, Human
augugaaagaucaguugucu

SEQ ID NO: 930412 - RNA, 22 nt, Human
ucacagaagggaaagaugccaa

SEQ ID NO: 930413 - RNA, 22 nt, Human
acacauguauggcacuuacauu

SEQ ID NO: 930414 - RNA, 20 nt, Human
uuuacauccccaccagcaau

SEQ ID NO: 930415 - RNA, 22 nt, Human
acaaaggugagcagaagacaca

SEQ ID NO: 930416 - RNA, 22 nt, Human
uucaaguacuguagauuucagg

SEQ ID NO: 930417 - RNA, 22 nt, Human
gcagcaguaggaaauaacacag

SEQ ID NO: 930418 - RNA, 22 nt, Human
gaaggcaagaucucaguggagg

SEQ ID NO: 930419 - RNA, 21 nt, Human
acuuuacaauuuacauaguga

SEQ ID NO: 930420 - RNA, 22 nt, Human
uacagcauuuuguagaguacua

SEQ ID NO: 930421 - RNA, 22 nt, Human
caguaacaugaagagacaugga

SEQ ID NO: 930422 - RNA, 22 nt, Human
acaguuagggacuauaaucauu

SEQ ID NO: 930423 - RNA, 22 nt, Human
ugaguuuugucuugcuagaagu

SEQ ID NO: 930424 - RNA, 22 nt, Human
uauggcuucuauaaggaagcuu

SEQ ID NO: 930425 - RNA, 22 nt, Human
aaauggcuuugaggguaggaca

SEQ ID NO: 930426 - RNA, 22 nt, Human
cauuuacacuucuaaccacaag

SEQ ID NO: 930427 - RNA, 22 nt, Human
cauggcuuggagcaggaugaga

SEQ ID NO: 930428 - RNA, 22 nt, Human
acaugaaugcagccauaacacu

SEQ ID NO: 930429 - RNA, 22 nt, Human
ugagaauuuuuggcagaaacaa

SEQ ID NO: 930430 - RNA, 23 nt, Human
acacuuucaaauaugcacagagc

SEQ ID NO: 930431 - RNA, 20 nt, Human
ucacacaugguaagcuauga

SEQ ID NO: 930432 - RNA, 22 nt, Human
uuagucaauagugaauauagag

SEQ ID NO: 930433 - RNA, 21 nt, Human
gaauggcucgcgcgccacacu

SEQ ID NO: 930434 - RNA, 22 nt, Human
cugcuuggcauugguaaagaau

SEQ ID NO: 930435 - RNA, 22 nt, Human
uagcucucuuuaucuuucuaua

SEQ ID NO: 930436 - RNA, 22 nt, Human
ucuaacuugaacucaugacugu

SEQ ID NO: 930437 - RNA, 22 nt, Human
aauggcuuagugcuucacuucu

SEQ ID NO: 930438 - RNA, 22 nt, Human
aucuguuauugaauaggugcua

SEQ ID NO: 930439 - RNA, 22 nt, Human
cauuucaauuauuugcucuucu

SEQ ID NO: 930440 - RNA, 22 nt, Human
ggaaugcucaguucuuggugcu

SEQ ID NO: 930441 - RNA, 22 nt, Human
ucuguugguucuguuucucuga

SEQ ID NO: 930442 - RNA, 22 nt, Human
uuccaagagccuuucuucuaga

SEQ ID NO: 930443 - RNA, 22 nt, Human
acacaauguaccauaucuccaa

SEQ ID NO: 930444 - RNA, 22 nt, Human
uccugaagucacaggcucugag

SEQ ID NO: 930445 - RNA, 22 nt, Human
uggcuucucauuugcauuaaac

SEQ ID NO: 930446 - RNA, 21 nt, Human
cugccaccugcuccaucagca

SEQ ID NO: 930447 - RNA, 22 nt, Human
acauaugcgaucauaggaugca

SEQ ID NO: 930448 - RNA, 22 nt, Human
aguaacaagugccaacguuaga

SEQ ID NO: 930449 - RNA, 22 nt, Human
gaagggaaggaaagaaccagca

SEQ ID NO: 930450 - RNA, 22 nt, Human
gaaagacauaguugcaagaugg

SEQ ID NO: 930451 - RNA, 22 nt, Human
uucagaguaggauacuagcuua

SEQ ID NO: 930452 - RNA, 22 nt, Human
gacacaugaccauaaaugcuaa

SEQ ID NO: 930453 - RNA, 22 nt, Human
uauaccaaaauaucagaaaggg

SEQ ID NO: 930454 - RNA, 22 nt, Human
uagucuaagaaaucuuuacuuu

SEQ ID NO: 930455 - RNA, 22 nt, Human
uuuccacacugcagccagcaaa

SEQ ID NO: 930456 - RNA, 22 nt, Human
gagucagaagaaacuauuuaca

SEQ ID NO: 930457 - RNA, 22 nt, Human
aaacaguaaguucuaguauuau

SEQ ID NO: 930458 - RNA, 22 nt, Human
ugcguuuaguuucaagacacgu

SEQ ID NO: 930459 - RNA, 22 nt, Human
ucugcuugugucuguccagccu

SEQ ID NO: 930460 - RNA, 22 nt, Human
uauggcuugucuuuauaccagg

SEQ ID NO: 930461 - RNA, 22 nt, Human
aauagcuugccuaauccucaug

SEQ ID NO: 930462 - RNA, 22 nt, Human
uccuguuaguguuagacuuccc

SEQ ID NO: 930463 - RNA, 22 nt, Human
uacaccugggacccauccaaga

SEQ ID NO: 930464 - RNA, 22 nt, Human
auguaguuuggggcuagauuua

SEQ ID NO: 930465 - RNA, 22 nt, Human
ccugucacauauuugcuguuca

SEQ ID NO: 930466 - RNA, 22 nt, Human
acuaaauuugucaaugacacuu

SEQ ID NO: 930467 - RNA, 22 nt, Human
aguaacagagcauggguucaga

SEQ ID NO: 930468 - RNA, 17 nt, Human
gcucugccccagccucu

SEQ ID NO: 930469 - RNA, 22 nt, Human
cuuacacuuuccgaaagcuugu

SEQ ID NO: 930470 - RNA, 22 nt, Human
uagaauuaugccuugcugucca

SEQ ID NO: 930471 - RNA, 22 nt, Human
auaaauuaugaauggcccuuuu

SEQ ID NO: 930472 - RNA, 22 nt, Human
cacauuuaucucucuccgguga

SEQ ID NO: 930473 - RNA, 22 nt, Human
cacacacaguuuuguauucugu

SEQ ID NO: 930474 - RNA, 22 nt, Human
cccuguuaaugucaaccugccu

SEQ ID NO: 930475 - RNA, 21 nt, Human
auggaaauuggcaaaugcuac

SEQ ID NO: 930476 - RNA, 22 nt, Human
cagcagaguuuggcuucuaaug

SEQ ID NO: 930477 - RNA, 22 nt, Human
ugugaaagucaaauuaauugaa

SEQ ID NO: 930478 - RNA, 22 nt, Human
cugcuuggguccuggcaugggu

SEQ ID NO: 930479 - RNA, 22 nt, Human
gucaucuuaaggacugcuauag

SEQ ID NO: 930480 - RNA, 22 nt, Human
aacauuuaggaaggaccuccuc

SEQ ID NO: 930481 - RNA, 22 nt, Human
acacauuccugcagacaugaug

SEQ ID NO: 930482 - RNA, 22 nt, Human
aacaugaaguuuucuauaguga

SEQ ID NO: 930483 - RNA, 22 nt, Human
cugugaauuuaaagcacacauc

SEQ ID NO: 930484 - RNA, 22 nt, Human
cugccacuuuggagugcucaga

SEQ ID NO: 930485 - RNA, 21 nt, Human
auggcuucucaggugcacuga

SEQ ID NO: 930486 - RNA, 22 nt, Human
uccugaaggcagauggggauca

SEQ ID NO: 930487 - RNA, 20 nt, Human
aacaaacuacaaaauuaugu

SEQ ID NO: 930488 - RNA, 22 nt, Human
aacuucaccuuuuugccacacu

SEQ ID NO: 930489 - RNA, 22 nt, Human
uagcuuuaaaaaucaucaaagc

SEQ ID NO: 930490 - RNA, 22 nt, Human
ccuucgagauuuaaacacugau

SEQ ID NO: 930491 - RNA, 22 nt, Human
gacagagaggcugagcaguaca

SEQ ID NO: 930492 - RNA, 22 nt, Human
ggcuucucuccaguaugcauuc

SEQ ID NO: 930493 - RNA, 22 nt, Human
aaguuuacuggggagaucaccu

SEQ ID NO: 930494 - RNA, 22 nt, Human
aauaacuucauguaacauuuaa

SEQ ID NO: 930495 - RNA, 22 nt, Human
aagucacacuagacaacugagg

SEQ ID NO: 930496 - RNA, 22 nt, Human
uguugguaggauuugcuucagc

SEQ ID NO: 930497 - RNA, 22 nt, Human
uauggcuuaaaauuucagcaug

SEQ ID NO: 930498 - RNA, 22 nt, Human
uuuguaugugauaagacuauuc

SEQ ID NO: 930499 - RNA, 22 nt, Human
aaugguuuucuagaacaugaaa

SEQ ID NO: 930500 - RNA, 22 nt, Human
ugucaucugcggguggcacugc

SEQ ID NO: 930501 - RNA, 22 nt, Human
uacagcauauacagaaugaaca

SEQ ID NO: 930502 - RNA, 22 nt, Human
aauggcuuagcucagcgcucag

SEQ ID NO: 930503 - RNA, 20 nt, Human
ccuuuauuauuuguaugaug

SEQ ID NO: 930504 - RNA, 22 nt, Human
ucucuggcugauauuccucugc

SEQ ID NO: 930505 - RNA, 22 nt, Human
agcuucucucaggguaucuuuc

SEQ ID NO: 930506 - RNA, 17 nt, Human
cuaaauacuugcguuuc

SEQ ID NO: 930507 - RNA, 22 nt, Human
ucucuucuauuugagacuauuu

SEQ ID NO: 930508 - RNA, 19 nt, Human
cugugcuuuaaacuccuau

SEQ ID NO: 930509 - RNA, 22 nt, Human
cagcuucaauaauggcugaugg

SEQ ID NO: 930510 - RNA, 22 nt, Human
uccugaagcucucuuaaggaaa

SEQ ID NO: 930511 - RNA, 22 nt, Human
uuguagcauuuuaaaugagcau

SEQ ID NO: 930512 - RNA, 22 nt, Human
aacacuguaucagucuucaaua

SEQ ID NO: 930513 - RNA, 22 nt, Human
uccuucaggccucauucucaua

SEQ ID NO: 930514 - RNA, 22 nt, Human
uccugaagaacgaagucaugua

SEQ ID NO: 930515 - RNA, 22 nt, Human
uucacaaaacacuauuuucugg

SEQ ID NO: 930516 - RNA, 22 nt, Human
aaaugacauuaggauccugcau

SEQ ID NO: 930517 - RNA, 22 nt, Human
uugcauagugcugagguucggg

SEQ ID NO: 930518 - RNA, 22 nt, Human
aagacaugcaguuuguuccauu

SEQ ID NO: 930519 - RNA, 22 nt, Human
aacaguaaaaaucauuuaguug

SEQ ID NO: 930520 - RNA, 22 nt, Human
cagcagaggugguucacauugu

SEQ ID NO: 930521 - RNA, 22 nt, Human
aaugucuuuugauacaaguuac

SEQ ID NO: 930522 - RNA, 22 nt, Human
auacaauuauucugcagauauu

SEQ ID NO: 930523 - RNA, 22 nt, Human
aaaucuguaagcaauugcucag

SEQ ID NO: 930524 - RNA, 22 nt, Human
gcuuuacagggcacaaagggag

SEQ ID NO: 930525 - RNA, 22 nt, Human
cauggcuucgcgcguccccgcu

SEQ ID NO: 930526 - RNA, 22 nt, Human
gagcuucagaauuuaacagacu

SEQ ID NO: 930527 - RNA, 22 nt, Human
uuguagcagggaucagaauaca

SEQ ID NO: 930528 - RNA, 22 nt, Human
acacauuauagagaguauaaua

SEQ ID NO: 930529 - RNA, 20 nt, Human
aagcuuccaggaucuggugu

SEQ ID NO: 930530 - RNA, 22 nt, Human
uagcagcucacagccucccauu

SEQ ID NO: 930531 - RNA, 22 nt, Human
aagcuuuaugaucucucagcua

SEQ ID NO: 930532 - RNA, 22 nt, Human
guuauucaacuugugucucuua

SEQ ID NO: 930533 - RNA, 22 nt, Human
augugcuuuagguuuguuuaca

SEQ ID NO: 930534 - RNA, 22 nt, Human
aagaaacaaccacugcucuccu

SEQ ID NO: 930535 - RNA, 22 nt, Human
cagacacacaagcaaucuaagu

SEQ ID NO: 930536 - RNA, 22 nt, Human
uuacaguuguucuaucagcaug

SEQ ID NO: 930537 - RNA, 22 nt, Human
guacacaaaagaggaaaccgga

SEQ ID NO: 930538 - RNA, 22 nt, Human
aucauaaaccacuuuguaaucu

SEQ ID NO: 930539 - RNA, 22 nt, Human
uuuacacugugaaacagguauc

SEQ ID NO: 930540 - RNA, 22 nt, Human
gcauucccaaaagacacuuacc

SEQ ID NO: 930541 - RNA, 22 nt, Human
uuauuauguggaugaaagaugu

SEQ ID NO: 930542 - RNA, 22 nt, Human
auacacauguguaugugcaugc

SEQ ID NO: 930543 - RNA, 22 nt, Human
gccuucagcccugacuggccag

SEQ ID NO: 930544 - RNA, 22 nt, Human
aacaugaugacauuguaagcuu

SEQ ID NO: 930545 - RNA, 22 nt, Human
aucaagaauguucauucuucua

SEQ ID NO: 930546 - RNA, 22 nt, Human
caacuucacugugccucuaguu

SEQ ID NO: 930547 - RNA, 20 nt, Human
uuuagcacauuguacaaaac

SEQ ID NO: 930548 - RNA, 22 nt, Human
gauggcuucucucuagcuuggu

SEQ ID NO: 930549 - RNA, 22 nt, Human
uccuucagugucccgcucaggu

SEQ ID NO: 930550 - RNA, 22 nt, Human
ucacauuucugauuauaccaaa

SEQ ID NO: 930551 - RNA, 22 nt, Human
cuucuuucccaggcauguuuua

SEQ ID NO: 930552 - RNA, 22 nt, Human
aguacacagaguuauuuugugu

SEQ ID NO: 930553 - RNA, 23 nt, Human
auaaauuacuaucucccuagagc

SEQ ID NO: 930554 - RNA, 22 nt, Human
uuccagagaggcucauguuccc

SEQ ID NO: 930555 - RNA, 22 nt, Human
uaacaguauagccuaacauuuc

SEQ ID NO: 930556 - RNA, 20 nt, Human
uccugccacaccucaguugc

SEQ ID NO: 930557 - RNA, 18 nt, Human
cagcagagacauucaaaa

SEQ ID NO: 930558 - RNA, 22 nt, Human
acacacugaauuuuguggaaac

SEQ ID NO: 930559 - RNA, 22 nt, Human
caucuguugcuuccuaacaagu

SEQ ID NO: 930560 - RNA, 22 nt, Human
uucacaaagcuggagcauuucc

SEQ ID NO: 930561 - RNA, 22 nt, Human
gcuucucucucagacugcaagc

SEQ ID NO: 930562 - RNA, 22 nt, Human
uuugcacacacaauaacaaaug

SEQ ID NO: 930563 - RNA, 22 nt, Human
guggcuucaucaacugugcuua

SEQ ID NO: 930564 - RNA, 22 nt, Human
cuuauucagaaggagaaaugga

SEQ ID NO: 930565 - RNA, 22 nt, Human
augcuuggaugcugccauggga

SEQ ID NO: 930566 - RNA, 22 nt, Human
ugaagcuugagugucaguuccu

SEQ ID NO: 930567 - RNA, 22 nt, Human
aauggcuugcaaauggguccau

SEQ ID NO: 930568 - RNA, 22 nt, Human
aaucuguuuguuuacaccuuuu

SEQ ID NO: 930569 - RNA, 22 nt, Human
acaaauagaaaaucuggauugg

SEQ ID NO: 930570 - RNA, 22 nt, Human
uucuagcagagggcaucugcug

SEQ ID NO: 930571 - RNA, 22 nt, Human
uuuauugcauacacaaauguca

SEQ ID NO: 930572 - RNA, 22 nt, Human
uuucacacuagucagaauacca

SEQ ID NO: 930573 - RNA, 22 nt, Human
agcagagaccauauagcccaga

SEQ ID NO: 930574 - RNA, 22 nt, Human
aggaugugaguggacacagucc

SEQ ID NO: 930575 - RNA, 20 nt, Human
gauggcuuuagaagcuggua

SEQ ID NO: 930576 - RNA, 22 nt, Human
cauuuaugauaguaauaugaaa

SEQ ID NO: 930577 - RNA, 22 nt, Human
aaucuguuuuugaaacuuugua

SEQ ID NO: 930578 - RNA, 22 nt, Human
uuaaccuguuaugcccccagag

SEQ ID NO: 930579 - RNA, 22 nt, Human
ucacaaauagcuauauuaagga

SEQ ID NO: 930580 - RNA, 22 nt, Human
uacaguuucccagcagaugcaa

SEQ ID NO: 930581 - RNA, 22 nt, Human
agaagacagagucuacauucua

SEQ ID NO: 930582 - RNA, 22 nt, Human
cuggcccucggaguccagcugc

SEQ ID NO: 930583 - RNA, 18 nt, Human
ccuggcacacuggcucau

SEQ ID NO: 930584 - RNA, 22 nt, Human
uuuacacuuuccugggaacauc

SEQ ID NO: 930585 - RNA, 20 nt, Human
auacacauauucuugcaacu

SEQ ID NO: 930586 - RNA, 22 nt, Human
uacacaauucuggaugcauguc

SEQ ID NO: 930587 - RNA, 22 nt, Human
aggcccuguuaugagccacugu

SEQ ID NO: 930588 - RNA, 22 nt, Human
ccacaugaugaggaagcugaac

SEQ ID NO: 930589 - RNA, 22 nt, Human
caugagaagguuuuggcauaua

SEQ ID NO: 930590 - RNA, 22 nt, Human
gaagcaucagcaauggcuggaa

SEQ ID NO: 930591 - RNA, 22 nt, Human
aaagcacauuacaagcucaguc

SEQ ID NO: 930592 - RNA, 22 nt, Human
aagucacacugcugggaacucu

SEQ ID NO: 930593 - RNA, 19 nt, Human
cuuauacagauuuucucau

SEQ ID NO: 930594 - RNA, 22 nt, Human
ucugugcuaaugcuucacaaua

SEQ ID NO: 930595 - RNA, 22 nt, Human
ucacaaaugaggaaaucgagca

SEQ ID NO: 930596 - RNA, 20 nt, Human
auguagcagugugcugggaa

SEQ ID NO: 930597 - RNA, 22 nt, Human
ucuuggcuaguaccuuccugcc

SEQ ID NO: 930598 - RNA, 22 nt, Human
ugcuuagggcuccuccaauaga

SEQ ID NO: 930599 - RNA, 21 nt, Human
uucacagaugggaaaacugag

SEQ ID NO: 930600 - RNA, 22 nt, Human
aauuccaaauguuuucaaucca

SEQ ID NO: 930601 - RNA, 22 nt, Human
aucuggcucucucauuuacaaa

SEQ ID NO: 930602 - RNA, 22 nt, Human
uuauuacaaugcagaaaauaga

SEQ ID NO: 930603 - RNA, 22 nt, Human
cuuauucagcacuugcucugua

SEQ ID NO: 930604 - RNA, 22 nt, Human
ccacuguggaaagcaguucaga

SEQ ID NO: 930605 - RNA, 22 nt, Human
ucacaaauuucagcucccugaa

SEQ ID NO: 930606 - RNA, 20 nt, Human
auacacaugcagacagaugc

SEQ ID NO: 930607 - RNA, 22 nt, Human
uuaaauuauugagggauuguca

SEQ ID NO: 930608 - RNA, 22 nt, Human
agaucacauaauuuccugugac

SEQ ID NO: 930609 - RNA, 22 nt, Human
uauggcuugaguuucagacuau

SEQ ID NO: 930610 - RNA, 22 nt, Human
uuuagcaaguucucugagagaa

SEQ ID NO: 930611 - RNA, 22 nt, Human
uggcuuccugcacagugucugc

SEQ ID NO: 930612 - RNA, 22 nt, Human
cauucccugucucuucaauccu

SEQ ID NO: 930613 - RNA, 22 nt, Human
uccuucagccaugggcucucca

SEQ ID NO: 930614 - RNA, 22 nt, Human
auccaugauugcccagaggugu

SEQ ID NO: 930615 - RNA, 22 nt, Human
aauuaagaaaauguuuuaugau

SEQ ID NO: 930616 - RNA, 22 nt, Human
cacacaguggaguauuacucag

SEQ ID NO: 930617 - RNA, 22 nt, Human
aagcuucaguggacuguagugu

SEQ ID NO: 930618 - RNA, 22 nt, Human
aauggcuuuggcaggaauuuca

SEQ ID NO: 930619 - RNA, 22 nt, Human
acauauuuccaugcagcauguc

SEQ ID NO: 930620 - RNA, 22 nt, Human
auuccacaugaaaggagcugaa

SEQ ID NO: 930621 - RNA, 22 nt, Human
aaagagucuggcguuuuaaugg

SEQ ID NO: 930622 - RNA, 22 nt, Human
gcuuuacagagaaaguuugccu

SEQ ID NO: 930623 - RNA, 22 nt, Human
augcaguggcuucagugucagu

SEQ ID NO: 930624 - RNA, 21 nt, Human
acuuaaauuccuugauauuua

SEQ ID NO: 930625 - RNA, 22 nt, Human
aaccaugucuuguuuuccuagu

SEQ ID NO: 930626 - RNA, 21 nt, Human
ucuguuggaggccucucuucc

SEQ ID NO: 930627 - RNA, 22 nt, Human
caugugaauuccaaagcuaggu

SEQ ID NO: 930628 - RNA, 22 nt, Human
uacacauauguguguauaugug

SEQ ID NO: 930629 - RNA, 22 nt, Human
agaaacaucauuggaacacaag

SEQ ID NO: 930630 - RNA, 22 nt, Human
gagguggcacugugaggagcac

SEQ ID NO: 930631 - RNA, 22 nt, Human
acagaucacuugacuaaaauga

SEQ ID NO: 930632 - RNA, 22 nt, Human
aguucacagcaaaguggggacc

SEQ ID NO: 930633 - RNA, 22 nt, Human
uaauuuuaauaguauguggcau

SEQ ID NO: 930634 - RNA, 22 nt, Human
aagcauuuuguuuuaagaauga

SEQ ID NO: 930635 - RNA, 22 nt, Human
ugucauuuaucuuauaguaauc

SEQ ID NO: 930636 - RNA, 22 nt, Human
uuauucuguauuucagguaugu

SEQ ID NO: 930637 - RNA, 22 nt, Human
acauuuauuuuggcacggcaca

SEQ ID NO: 930638 - RNA, 22 nt, Human
auaacuucaucaaauaggcaca

SEQ ID NO: 930639 - RNA, 22 nt, Human
uuccacagaugaaaauuaaguu

SEQ ID NO: 930640 - RNA, 22 nt, Human
gacauuuauuagaaaacuauca

SEQ ID NO: 930641 - RNA, 22 nt, Human
acaagguugauucuggcaucug

SEQ ID NO: 930642 - RNA, 17 nt, Human
auuucacuuagcaugag

SEQ ID NO: 930643 - RNA, 22 nt, Human
gauggcuuugugcaccaugauu

SEQ ID NO: 930644 - RNA, 22 nt, Human
ugugacuucuuuuugaguucaa

SEQ ID NO: 930645 - RNA, 22 nt, Human
auugugaauagugccgcaguaa

SEQ ID NO: 930646 - RNA, 22 nt, Human
auacaugucaucauauguuugu

SEQ ID NO: 930647 - RNA, 22 nt, Human
uuuuaugcaaguuaugauuaaa

SEQ ID NO: 930648 - RNA, 22 nt, Human
accugucaugucaauguucagu

SEQ ID NO: 930649 - RNA, 22 nt, Human
augcuuggcagaguucuuuuuc

SEQ ID NO: 930650 - RNA, 23 nt, Human
ugcuuggacaagacucuauuaag

SEQ ID NO: 930651 - RNA, 22 nt, Human
caagaguuuaaaucaauggcca

SEQ ID NO: 930652 - RNA, 20 nt, Human
acacugugcuaaggauuuuc

SEQ ID NO: 930653 - RNA, 22 nt, Human
aagagaauucugguuuuccuau

SEQ ID NO: 930654 - RNA, 22 nt, Human
cugaggccuggccccaccacag

SEQ ID NO: 930655 - RNA, 22 nt, Human
gaaccuguccugagugaggagu

SEQ ID NO: 930656 - RNA, 22 nt, Human
acuguuauuuguaauccauuau

SEQ ID NO: 930657 - RNA, 22 nt, Human
aaccauguacuuuauucuguuu

SEQ ID NO: 930658 - RNA, 22 nt, Human
aaucuucauaaaaaucuaguag

SEQ ID NO: 930659 - RNA, 22 nt, Human
ucccugcugagagugcucuccc

SEQ ID NO: 930660 - RNA, 22 nt, Human
acacuaagguuggagucacagu

SEQ ID NO: 930661 - RNA, 22 nt, Human
gccaaccauuggcuucuuguca

SEQ ID NO: 930662 - RNA, 22 nt, Human
acacugugucuagcauuuuaca

SEQ ID NO: 930663 - RNA, 22 nt, Human
acauuucauguuuuccagagca

SEQ ID NO: 930664 - RNA, 22 nt, Human
gcuguaugugaggccacaguga

SEQ ID NO: 930665 - RNA, 22 nt, Human
cuuuccuggcuggcaguugugg

SEQ ID NO: 930666 - RNA, 22 nt, Human
ccacaaauuagguuuugcuugu

SEQ ID NO: 930667 - RNA, 22 nt, Human
cuuauucaaugcuggaaauguu

SEQ ID NO: 930668 - RNA, 22 nt, Human
cuguagcuccagccugucuaca

SEQ ID NO: 930669 - RNA, 22 nt, Human
uccugaagaggcuacacugcuu

SEQ ID NO: 930670 - RNA, 21 nt, Human
acacaagcacucguacauacg

SEQ ID NO: 930671 - RNA, 22 nt, Human
cacacauggcugccagggaggu

SEQ ID NO: 930672 - RNA, 22 nt, Human
caguaugugaugcaacggaaua

SEQ ID NO: 930673 - RNA, 22 nt, Human
ggacugagcugacaucuguugg

SEQ ID NO: 930674 - RNA, 22 nt, Human
uaggccuucggugugugcuugg

SEQ ID NO: 930675 - RNA, 22 nt, Human
uuggacugguuuacauuucaag

SEQ ID NO: 930676 - RNA, 18 nt, Human
cugugacuccuagaucuc

SEQ ID NO: 930677 - RNA, 22 nt, Human
cuguugaucucaguuagcuaga

SEQ ID NO: 930678 - RNA, 22 nt, Human
aauucacauguugaaguccuaa

SEQ ID NO: 930679 - RNA, 22 nt, Human
acucaugauaugccuauaagau

SEQ ID NO: 930680 - RNA, 22 nt, Human
uaagacauaccaaguuguguga

SEQ ID NO: 930681 - RNA, 22 nt, Human
cauggcuucuaagugauaacgu

SEQ ID NO: 930682 - RNA, 22 nt, Human
acaugcuuugcacuuacaucau

SEQ ID NO: 930683 - RNA, 22 nt, Human
uucuucugccucccaccugaua

SEQ ID NO: 930684 - RNA, 22 nt, Human
uucacacucucacucccugacc

SEQ ID NO: 930685 - RNA, 22 nt, Human
ugcuuugccagacaguucccuu

SEQ ID NO: 930686 - RNA, 22 nt, Human
auacacaggcaugcuucugauu

SEQ ID NO: 930687 - RNA, 22 nt, Human
aauggcuuaaguauaagugaga

SEQ ID NO: 930688 - RNA, 22 nt, Human
aaugcuuccaaaauaccaagcc

SEQ ID NO: 930689 - RNA, 22 nt, Human
uauggcuucauugugcuccgca

SEQ ID NO: 930690 - RNA, 22 nt, Human
uuugcacacauucuuagaaaug

SEQ ID NO: 930691 - RNA, 22 nt, Human
acacacuggagguaaauggggu

SEQ ID NO: 930692 - RNA, 22 nt, Human
acagcagagugugagauagcca

SEQ ID NO: 930693 - RNA, 22 nt, Human
gcuuccucccugcugcucacua

SEQ ID NO: 930694 - RNA, 22 nt, Human
acaguacugaguacugaguugg

SEQ ID NO: 930695 - RNA, 22 nt, Human
uagacuauuucuuuugcauagg

SEQ ID NO: 930696 - RNA, 22 nt, Human
ucuuuacaucacaauuguaugg

SEQ ID NO: 930697 - RNA, 22 nt, Human
uucacaaagcugguuccuucug

SEQ ID NO: 930698 - RNA, 22 nt, Human
auucacaaagucacccuuacac

SEQ ID NO: 930699 - RNA, 22 nt, Human
ccacccugaggaaugguccggc

SEQ ID NO: 930700 - RNA, 22 nt, Human
auuuaugcaucccagcauguga

SEQ ID NO: 930701 - RNA, 22 nt, Human
uuauccaagcagaagcugcaca

SEQ ID NO: 930702 - RNA, 22 nt, Human
acuucacauuagcuaaaaggga

SEQ ID NO: 930703 - RNA, 22 nt, Human
acacauaagaaacuacaaagag

SEQ ID NO: 930704 - RNA, 22 nt, Human
uuacacagugcacaagcagagu

SEQ ID NO: 930705 - RNA, 22 nt, Human
augugcuugacuacucucuauu

SEQ ID NO: 930706 - RNA, 22 nt, Human
uagaaacaagggagaggauucu

SEQ ID NO: 930707 - RNA, 22 nt, Human
acacauuagugcucugucucau

SEQ ID NO: 930708 - RNA, 22 nt, Human
ccuuuuauauggcucaucacag

SEQ ID NO: 930709 - RNA, 22 nt, Human
ugcaguucuaaguagacaaguc

SEQ ID NO: 930710 - RNA, 22 nt, Human
gaaauugucagcuucuuucagu

SEQ ID NO: 930711 - RNA, 22 nt, Human
uacauuagcaaacaucuuggug

SEQ ID NO: 930712 - RNA, 22 nt, Human
cucugugcccuacugcucagcu

SEQ ID NO: 930713 - RNA, 20 nt, Human
aucuuugucucuguaguugu

SEQ ID NO: 930714 - RNA, 22 nt, Human
auacacauaucagguguauaca

SEQ ID NO: 930715 - RNA, 22 nt, Human
uuucucugaguuguuacaaaac

SEQ ID NO: 930716 - RNA, 22 nt, Human
cugucauuuaagacauucugga

SEQ ID NO: 930717 - RNA, 22 nt, Human
ucuaacuuguauguauaguuuu

SEQ ID NO: 930718 - RNA, 22 nt, Human
agacuuuaaugugcaaaugaaa

SEQ ID NO: 930719 - RNA, 22 nt, Human
ugucacaauaucccaaucugcc

SEQ ID NO: 930720 - RNA, 23 nt, Human
acuagaaaaugacuuucucccug

SEQ ID NO: 930721 - RNA, 22 nt, Human
ccugcaagacuauuuaguucca

SEQ ID NO: 930722 - RNA, 22 nt, Human
gccuucaguagugucagcugua

SEQ ID NO: 930723 - RNA, 22 nt, Human
cuucaauugccaccagcuagca

SEQ ID NO: 930724 - RNA, 22 nt, Human
acagaauuuacacaucucuaaa

SEQ ID NO: 930725 - RNA, 22 nt, Human
ugaaggaaugagggaguggguc

SEQ ID NO: 930726 - RNA, 22 nt, Human
auucuccaguagucauucuauc

SEQ ID NO: 930727 - RNA, 19 nt, Human
augugcuugggccaugcua

SEQ ID NO: 930728 - RNA, 22 nt, Human
uucuaacuccacuucccacucc

SEQ ID NO: 930729 - RNA, 22 nt, Human
acaguaaauaaugcauguugau

SEQ ID NO: 930730 - RNA, 21 nt, Human
uccuucagucuagaugauugu

SEQ ID NO: 930731 - RNA, 22 nt, Human
auuguaaaaguauucuaagauu

SEQ ID NO: 930732 - RNA, 22 nt, Human
uucauucagguguauuuauggg

SEQ ID NO: 930733 - RNA, 22 nt, Human
acauaucuuucccucuccugaa

SEQ ID NO: 930734 - RNA, 22 nt, Human
uuuagcaagaugcccuggcuuu

SEQ ID NO: 930735 - RNA, 22 nt, Human
aacaugauguauuuucuugucu

SEQ ID NO: 930736 - RNA, 22 nt, Human
uuugauugucaccuaccuugca

SEQ ID NO: 930737 - RNA, 22 nt, Human
auagacaaucccccauccuacc

SEQ ID NO: 930738 - RNA, 22 nt, Human
aacaugauaguauuuugaggug

SEQ ID NO: 930739 - RNA, 22 nt, Human
aaaacaguuuaggcaucacagu

SEQ ID NO: 930740 - RNA, 22 nt, Human
uuacuuuagaaauagucaucaa

SEQ ID NO: 930741 - RNA, 22 nt, Human
cacacaugugagcagagaggcg

SEQ ID NO: 930742 - RNA, 22 nt, Human
augaugaagcaugguuacacug

SEQ ID NO: 930743 - RNA, 22 nt, Human
ccacacuggcaugggauggagg

SEQ ID NO: 930744 - RNA, 22 nt, Human
aagcaugguuucugacgucaug

SEQ ID NO: 930745 - RNA, 22 nt, Human
ugucuacugagaagcuaugcaa

SEQ ID NO: 930746 - RNA, 22 nt, Human
auguuuaugcaaacaugugagu

SEQ ID NO: 930747 - RNA, 22 nt, Human
uauggcuugacuugcaccggca

SEQ ID NO: 930748 - RNA, 22 nt, Human
uagcacauacauaauagauaga

SEQ ID NO: 930749 - RNA, 22 nt, Human
ugcacaaaggcucccugcugag

SEQ ID NO: 930750 - RNA, 22 nt, Human
uuacacugacagcugaaaagca

SEQ ID NO: 930751 - RNA, 22 nt, Human
gagaaacaggaauugagucgcu

SEQ ID NO: 930752 - RNA, 22 nt, Human
uggcuucccauagcuugcuagu

SEQ ID NO: 930753 - RNA, 18 nt, Human
uaacauguuuucauuaag

SEQ ID NO: 930754 - RNA, 22 nt, Human
uuaccuguguguuugauacaua

SEQ ID NO: 930755 - RNA, 22 nt, Human
uggcuuuaagaagacugacagc

SEQ ID NO: 930756 - RNA, 21 nt, Human
aaguugucucuuuugguuccu

SEQ ID NO: 930757 - RNA, 17 nt, Human
cucugggucuccugcuu

SEQ ID NO: 930758 - RNA, 22 nt, Human
auaaucuggucuuuguaugagu

SEQ ID NO: 930759 - RNA, 22 nt, Human
acacagaggcaugacaguggcu

SEQ ID NO: 930760 - RNA, 17 nt, Human
cugcuuggccucugggg

SEQ ID NO: 930761 - RNA, 22 nt, Human
gaggaggaaguucucuguaggc

SEQ ID NO: 930762 - RNA, 22 nt, Human
aagucacagaacccauuguaac

SEQ ID NO: 930763 - RNA, 22 nt, Human
uuauugcaacuuuagggauaga

SEQ ID NO: 930764 - RNA, 22 nt, Human
aaacuucagggaauaaaagagu

SEQ ID NO: 930765 - RNA, 22 nt, Human
ugucuacuugggcucuacagca

SEQ ID NO: 930766 - RNA, 22 nt, Human
ccacccugccuugggccaguga

SEQ ID NO: 930767 - RNA, 22 nt, Human
agacagcaugauacaugaugcu

SEQ ID NO: 930768 - RNA, 22 nt, Human
caauagcagaccuagaaagcaa

SEQ ID NO: 930769 - RNA, 22 nt, Human
augagaaugcauucauguuuug

SEQ ID NO: 930770 - RNA, 22 nt, Human
agagaaacaggucagcugggag

SEQ ID NO: 930771 - RNA, 22 nt, Human
agggcccucugggcacuguggc

SEQ ID NO: 930772 - RNA, 22 nt, Human
uuucuauuguaagucuccuaua

SEQ ID NO: 930773 - RNA, 22 nt, Human
accacuguacagcagauauagu

SEQ ID NO: 930774 - RNA, 22 nt, Human
uguuuucugaugguuaaugagu

SEQ ID NO: 930775 - RNA, 18 nt, Human
acauuuaggagagucaau

SEQ ID NO: 930776 - RNA, 17 nt, Human
cacuugcuggucuaccu

SEQ ID NO: 930777 - RNA, 22 nt, Human
cauacugugaagcuuacuauuu

SEQ ID NO: 930778 - RNA, 22 nt, Human
uuacacuuuggcaagcuauuaa

SEQ ID NO: 930779 - RNA, 22 nt, Human
cauuucaauacaguuuguaaau

SEQ ID NO: 930780 - RNA, 22 nt, Human
aauggcuuuaggaauccagugc

SEQ ID NO: 930781 - RNA, 22 nt, Human
ugaagacucagaagcuaagaua

SEQ ID NO: 930782 - RNA, 20 nt, Human
ccucugccuuucuagucuga

SEQ ID NO: 930783 - RNA, 22 nt, Human
uugauacagcagccugugaucc

SEQ ID NO: 930784 - RNA, 23 nt, Human
aacuuugccaggagacagcacag

SEQ ID NO: 930785 - RNA, 22 nt, Human
cuguuacugcuggagccauuga

SEQ ID NO: 930786 - RNA, 22 nt, Human
gagguggcuuagucucuggaca

SEQ ID NO: 930787 - RNA, 22 nt, Human
uuacuacauuguaacacaguac

SEQ ID NO: 930788 - RNA, 22 nt, Human
uuuacacaaaauguuaguagau

SEQ ID NO: 930789 - RNA, 22 nt, Human
aaauuaagggugagaagaguug

SEQ ID NO: 930790 - RNA, 22 nt, Human
uauuaugaucccagcccuggag

SEQ ID NO: 930791 - RNA, 22 nt, Human
agaaacagaaccaggugucauu

SEQ ID NO: 930792 - RNA, 22 nt, Human
ugccugaugcaggaguaucaga

SEQ ID NO: 930793 - RNA, 22 nt, Human
uggcuucugagcauugaaacgu

SEQ ID NO: 930794 - RNA, 22 nt, Human
gagaaacacuguuaguuuauua

SEQ ID NO: 930795 - RNA, 22 nt, Human
ugagggaauccucacaucaauc

SEQ ID NO: 930796 - RNA, 22 nt, Human
acagaugagagacaaugugcua

SEQ ID NO: 930797 - RNA, 22 nt, Human
uaccacagucugccauuagaug

SEQ ID NO: 930798 - RNA, 18 nt, Human
gagcuucaggcuaaccug

SEQ ID NO: 930799 - RNA, 22 nt, Human
uuugugaacacugcgcagaacu

SEQ ID NO: 930800 - RNA, 22 nt, Human
ucgcuuuaauggucuucacagc

SEQ ID NO: 930801 - RNA, 21 nt, Human
gaacauuuggguuguuucuac

SEQ ID NO: 930802 - RNA, 23 nt, Human
caacacugccuucaggugaagaa

SEQ ID NO: 930803 - RNA, 22 nt, Human
cauuucaaaagaauugccagaa

SEQ ID NO: 930804 - RNA, 22 nt, Human
caaggcuucacguccccagugc

SEQ ID NO: 930805 - RNA, 22 nt, Human
guuuacacauaacuccuaucaa

SEQ ID NO: 930806 - RNA, 22 nt, Human
auuuaauuuucucaacagugcu

SEQ ID NO: 930807 - RNA, 19 nt, Human
gcagcaguggaaggaaaaa

SEQ ID NO: 930808 - RNA, 22 nt, Human
ugugaauggacaauuaaaucua

SEQ ID NO: 930809 - RNA, 22 nt, Human
gcagcaguggucuguagaagga

SEQ ID NO: 930810 - RNA, 22 nt, Human
augugcuuuuacuccccagagu

SEQ ID NO: 930811 - RNA, 23 nt, Human
uguagcugucugagcagacacug

SEQ ID NO: 930812 - RNA, 22 nt, Human
aacuuuacuugaaagaacaugu

SEQ ID NO: 930813 - RNA, 22 nt, Human
aaccucuuugugaaugucauga

SEQ ID NO: 930814 - RNA, 19 nt, Human
gaauuuuaggacuucagca

SEQ ID NO: 930815 - RNA, 22 nt, Human
cuguugugaauuuaguuaccaa

SEQ ID NO: 930816 - RNA, 22 nt, Human
augcuucucagcucaaggcaaa

SEQ ID NO: 930817 - RNA, 22 nt, Human
cagcaaauacuacuaguuuuua

SEQ ID NO: 930818 - RNA, 22 nt, Human
ucagaacauggcauguuccauc

SEQ ID NO: 930819 - RNA, 22 nt, Human
gaaacagucaacuuucuuuccc

SEQ ID NO: 930820 - RNA, 22 nt, Human
cauuuaguuauacuaaaacauu

SEQ ID NO: 930821 - RNA, 22 nt, Human
ucacacauacucaugugugagu

SEQ ID NO: 930822 - RNA, 22 nt, Human
uucucaguaguuagcauuugug

SEQ ID NO: 930823 - RNA, 22 nt, Human
aagcuguucucuaaguuucaug

SEQ ID NO: 930824 - RNA, 22 nt, Human
uuggacugagaguuccaccauu

SEQ ID NO: 930825 - RNA, 22 nt, Human
gcuuauacucuggagaauaaga

SEQ ID NO: 930826 - RNA, 22 nt, Human
auuuaaauuuucugauggagag

SEQ ID NO: 930827 - RNA, 22 nt, Human
uucagcaaacacgaugcuuguu

SEQ ID NO: 930828 - RNA, 22 nt, Human
uauugcauccccauugugcccc

SEQ ID NO: 930829 - RNA, 22 nt, Human
uuuauagcugugagaccuuggg

SEQ ID NO: 930830 - RNA, 22 nt, Human
uuagacuagaagcuuccacuuu

SEQ ID NO: 930831 - RNA, 22 nt, Human
gaguaauucugguaaaucauug

SEQ ID NO: 930832 - RNA, 22 nt, Human
cugcuuggaggccugggugcua

SEQ ID NO: 930833 - RNA, 22 nt, Human
uucaguaaaacacugcaauguc

SEQ ID NO: 930834 - RNA, 22 nt, Human
ugugcucuguggaucugagcaa

SEQ ID NO: 930835 - RNA, 22 nt, Human
acauuaaacuugcuuggcugua

SEQ ID NO: 930836 - RNA, 22 nt, Human
cuucagcaacuuuggaauguuu

SEQ ID NO: 930837 - RNA, 22 nt, Human
ucuucucuacaccagcagcccc

SEQ ID NO: 930838 - RNA, 22 nt, Human
aucuggcuauugacauguuaua

SEQ ID NO: 930839 - RNA, 22 nt, Human
acaagagucugcauuucuaaca

SEQ ID NO: 930840 - RNA, 22 nt, Human
agaggaauggagacuaaacgcu

SEQ ID NO: 930841 - RNA, 22 nt, Human
uagcacuauuuuucacuauccu

SEQ ID NO: 930842 - RNA, 20 nt, Human
uuuauugagcacguacugug

SEQ ID NO: 930843 - RNA, 22 nt, Human
aguacacacaguagaauagagu

SEQ ID NO: 930844 - RNA, 22 nt, Human
uacauuaaggauauggacauga

SEQ ID NO: 930845 - RNA, 22 nt, Human
cuucuacacaucccucuugcuu

SEQ ID NO: 930846 - RNA, 22 nt, Human
gagucacauacuauguaauaga

SEQ ID NO: 930847 - RNA, 22 nt, Human
augucaaaucaguuuuaucaga

SEQ ID NO: 930848 - RNA, 22 nt, Human
agagaacaugacguaauagugg

SEQ ID NO: 930849 - RNA, 22 nt, Human
cacaguaugaucuaaaguaagu

SEQ ID NO: 930850 - RNA, 22 nt, Human
gugcuuggaccaggucaucuuc

SEQ ID NO: 930851 - RNA, 22 nt, Human
uuuaucugagcugauagauagu

SEQ ID NO: 930852 - RNA, 22 nt, Human
aauggcuuugaguauuuucugg

SEQ ID NO: 930853 - RNA, 22 nt, Human
aguacacagaauucuacuuguu

SEQ ID NO: 930854 - RNA, 21 nt, Human
gcagagaaugaacuuuggcuu

SEQ ID NO: 930855 - RNA, 22 nt, Human
gauggcuuaagaguaaaaggca

SEQ ID NO: 930856 - RNA, 22 nt, Human
aaaaugcaugagaaugugcucg

SEQ ID NO: 930857 - RNA, 22 nt, Human
uuuaccaagaguugucacuguu

SEQ ID NO: 930858 - RNA, 22 nt, Human
cacacaugguagcagguacaag

SEQ ID NO: 930859 - RNA, 22 nt, Human
uuccaaagugcuggaauuacau

SEQ ID NO: 930860 - RNA, 22 nt, Human
gauggcuuugaggaauuugaau

SEQ ID NO: 930861 - RNA, 22 nt, Human
aggucacaggcuuugaaaucaa

SEQ ID NO: 930862 - RNA, 22 nt, Human
cuguuuauaaaccaccaguuua

SEQ ID NO: 930863 - RNA, 22 nt, Human
ucacaugaagaucccucaauuu

SEQ ID NO: 930864 - RNA, 22 nt, Human
uggcuucugucccugcuacauu

SEQ ID NO: 930865 - RNA, 18 nt, Human
uggcugcuuccagguaca

SEQ ID NO: 930866 - RNA, 22 nt, Human
gcucugccuggucgcgugcugg

SEQ ID NO: 930867 - RNA, 22 nt, Human
cuuucccagaguaguugaugcu

SEQ ID NO: 930868 - RNA, 22 nt, Human
ccugugcuggcuuuauucucag

SEQ ID NO: 930869 - RNA, 19 nt, Human
cucuuacagaauagacaca

SEQ ID NO: 930870 - RNA, 22 nt, Human
aggcaauccucuuacagauggg

SEQ ID NO: 930871 - RNA, 22 nt, Human
auuuaccagcugugcacugaua

SEQ ID NO: 930872 - RNA, 22 nt, Human
aacaucaucaugaacaacuaau

SEQ ID NO: 930873 - RNA, 17 nt, Human
agcauuuguguuaacag

SEQ ID NO: 930874 - RNA, 22 nt, Human
acaguaaaacauuuuuauuagg

SEQ ID NO: 930875 - RNA, 22 nt, Human
auggaaauccaagucaccguag

SEQ ID NO: 930876 - RNA, 22 nt, Human
aaccuguuuugguugcauuuca

SEQ ID NO: 930877 - RNA, 22 nt, Human
auagaauucuuugaaauuuaug

SEQ ID NO: 930878 - RNA, 22 nt, Human
cuguggcucaggccuguaagcc

SEQ ID NO: 930879 - RNA, 22 nt, Human
cugagcucaagugaucugccca

SEQ ID NO: 930880 - RNA, 22 nt, Human
ucccaucuccaacauuuuucuu

SEQ ID NO: 930881 - RNA, 22 nt, Human
auggucuugugagaguaacagu

SEQ ID NO: 930882 - RNA, 22 nt, Human
ucacagcaaaagugugcagagc

SEQ ID NO: 930883 - RNA, 22 nt, Human
acacacugcucgcucagauuaa

SEQ ID NO: 930884 - RNA, 22 nt, Human
uggcucucagcucccagcagcc

SEQ ID NO: 930885 - RNA, 22 nt, Human
uuuagcacgguaacacauaaag

SEQ ID NO: 930886 - RNA, 22 nt, Human
ccacacugaaccucagugucuu

SEQ ID NO: 930887 - RNA, 22 nt, Human
uccacuguggucccuugcugcc

SEQ ID NO: 930888 - RNA, 22 nt, Human
uuuuuagccaagccauaggucu

SEQ ID NO: 930889 - RNA, 22 nt, Human
auucuagcaguuacaggcugau

SEQ ID NO: 930890 - RNA, 22 nt, Human
gacauuuauuggauuuuacgag

SEQ ID NO: 930891 - RNA, 22 nt, Human
cagaugaacugugacugaaaau

SEQ ID NO: 930892 - RNA, 22 nt, Human
uaaccuuugaccuugcuugugc

SEQ ID NO: 930893 - RNA, 19 nt, Human
uggcuuccugacucucauc

SEQ ID NO: 930894 - RNA, 22 nt, Human
uauagcaacuccaaagagacuu

SEQ ID NO: 930895 - RNA, 22 nt, Human
guacaauuaagugcacaaauag

SEQ ID NO: 930896 - RNA, 22 nt, Human
uuucacacugcagcaucagaga

SEQ ID NO: 930897 - RNA, 22 nt, Human
uggauaccugguuuuuauuuac

SEQ ID NO: 930898 - RNA, 22 nt, Human
aguggcuuggcugcacuacagg

SEQ ID NO: 930899 - RNA, 22 nt, Human
uuaugaaagacauuucuguugg

SEQ ID NO: 930900 - RNA, 22 nt, Human
agagaacagccuccuagagaaa

SEQ ID NO: 930901 - RNA, 22 nt, Human
uaguaacagauuuauacagucu

SEQ ID NO: 930902 - RNA, 18 nt, Human
guuaacaauuacuaacgc

SEQ ID NO: 930903 - RNA, 22 nt, Human
acagaauugauggaaaucucag

SEQ ID NO: 930904 - RNA, 22 nt, Human
uuugucaccaguggcuuuggua

SEQ ID NO: 930905 - RNA, 22 nt, Human
gcacaugacaguaaguagagca

SEQ ID NO: 930906 - RNA, 19 nt, Human
ggaaacaggggccagagga

SEQ ID NO: 930907 - RNA, 22 nt, Human
gaguuacauuuggugacacuuc

SEQ ID NO: 930908 - RNA, 22 nt, Human
cuucacaaucaccuuuucggaa

SEQ ID NO: 930909 - RNA, 22 nt, Human
acaguaaaucaacagaauaucu

SEQ ID NO: 930910 - RNA, 20 nt, Human
gaaacauuggcagcaacuga

SEQ ID NO: 930911 - RNA, 22 nt, Human
augcuucuguguauguuucagg

SEQ ID NO: 930912 - RNA, 22 nt, Human
cacacaugguuccgcaggaugc

SEQ ID NO: 930913 - RNA, 22 nt, Human
uagaaacagauguuuuugaaga

SEQ ID NO: 930914 - RNA, 22 nt, Human
ugugccugaguuggcugaguac

SEQ ID NO: 930915 - RNA, 19 nt, Human
agcuuccauauucucuagu

SEQ ID NO: 930916 - RNA, 22 nt, Human
aucuggcuccuacacuugaaga

SEQ ID NO: 930917 - RNA, 22 nt, Human
uuacacaaguucuuuaaccuau

SEQ ID NO: 930918 - RNA, 20 nt, Human
ugugucuuccuuucuuuaug

SEQ ID NO: 930919 - RNA, 22 nt, Human
uacagaaaucacaucgcuuuga

SEQ ID NO: 930920 - RNA, 22 nt, Human
aagacaauccuggacagucagc

SEQ ID NO: 930921 - RNA, 22 nt, Human
uccuucagauuccugcuucugg

SEQ ID NO: 930922 - RNA, 22 nt, Human
cuggcccuggagggcugugcga

SEQ ID NO: 930923 - RNA, 22 nt, Human
aucacaaaggguuuucucugag

SEQ ID NO: 930924 - RNA, 21 nt, Human
gcuugccuuccuaucuuuggc

SEQ ID NO: 930925 - RNA, 18 nt, Human
ugcaaauggcuguuugau

SEQ ID NO: 930926 - RNA, 22 nt, Human
uucaagaaagaguggcuauucc

SEQ ID NO: 930927 - RNA, 22 nt, Human
gcuuuacaacaaauugaauaug

SEQ ID NO: 930928 - RNA, 22 nt, Human
uaauuuacagagauacagucag

SEQ ID NO: 930929 - RNA, 21 nt, Human
auacacauacacauaaaugug

SEQ ID NO: 930930 - RNA, 22 nt, Human
cacacugauagcacuaagucag

SEQ ID NO: 930931 - RNA, 22 nt, Human
caaugcuuuauuuccuccccuu

SEQ ID NO: 930932 - RNA, 22 nt, Human
ugugaaagagucuuauaguuuc

SEQ ID NO: 930933 - RNA, 22 nt, Human
aacauuuaugguagucauugca

SEQ ID NO: 930934 - RNA, 22 nt, Human
gauggcuucugaaucagggccu

SEQ ID NO: 930935 - RNA, 22 nt, Human
caagcagagguuuauguauuag

SEQ ID NO: 930936 - RNA, 17 nt, Human
ugcuuggcuucuuuagg

SEQ ID NO: 930937 - RNA, 22 nt, Human
uucaguguggugcacaguuuug

SEQ ID NO: 930938 - RNA, 22 nt, Human
acauuuaguaugagucucugua

SEQ ID NO: 930939 - RNA, 22 nt, Human
uaacaauacccauucuaauuac

SEQ ID NO: 930940 - RNA, 22 nt, Human
gccuucaguaacugagacggaa

SEQ ID NO: 930941 - RNA, 22 nt, Human
uaauagaauaguggaaacauug

SEQ ID NO: 930942 - RNA, 22 nt, Human
uucagagucagggaucucagag

SEQ ID NO: 930943 - RNA, 22 nt, Human
augugcuuggacauucuaggaa

SEQ ID NO: 930944 - RNA, 22 nt, Human
ucccugccaguccuggucugaa

SEQ ID NO: 930945 - RNA, 22 nt, Human
cuacagaguucacaggauuuua

SEQ ID NO: 930946 - RNA, 22 nt, Human
cuaacugucaugcacauguguu

SEQ ID NO: 930947 - RNA, 22 nt, Human
uuggacugaaucuuucucacac

SEQ ID NO: 930948 - RNA, 21 nt, Human
augugaaauaucaucagagca

SEQ ID NO: 930949 - RNA, 22 nt, Human
gacuguuaccuauauuuaugug

SEQ ID NO: 930950 - RNA, 22 nt, Human
uggcuucuggcuggugagaaau

SEQ ID NO: 930951 - RNA, 22 nt, Human
ugucucuuggcucuaucacuua

SEQ ID NO: 930952 - RNA, 22 nt, Human
uuuauuauccaguguugucaug

SEQ ID NO: 930953 - RNA, 20 nt, Human
uuuccacuguaauguaugau

SEQ ID NO: 930954 - RNA, 22 nt, Human
agcauuuaccucaaugcaucug

SEQ ID NO: 930955 - RNA, 22 nt, Human
gaugucuuacuaacuagccuuu

SEQ ID NO: 930956 - RNA, 22 nt, Human
ugucuacuccugugcuagcucc

SEQ ID NO: 930957 - RNA, 22 nt, Human
ugacauuucuuguugauauaaa

SEQ ID NO: 930958 - RNA, 22 nt, Human
ucuuuacaaucuaagcauaguu

SEQ ID NO: 930959 - RNA, 22 nt, Human
auacaccaccuuggaucuuuca

SEQ ID NO: 930960 - RNA, 22 nt, Human
uggccucuuaggacauccucua

SEQ ID NO: 930961 - RNA, 20 nt, Human
gacuuuacaucagcacucuu

SEQ ID NO: 930962 - RNA, 22 nt, Human
cuagagaaacagugcucugaac

SEQ ID NO: 930963 - RNA, 22 nt, Human
cuguuguauuauucaauauuau

SEQ ID NO: 930964 - RNA, 22 nt, Human
aagaguauagcuuuaggauuga

SEQ ID NO: 930965 - RNA, 22 nt, Human
gucaucuuaucauuguugcugu

SEQ ID NO: 930966 - RNA, 22 nt, Human
acacggcacuuuaggaaggggc

SEQ ID NO: 930967 - RNA, 22 nt, Human
auggcuaaaccugaacuggucu

SEQ ID NO: 930968 - RNA, 22 nt, Human
cuuuauuccuacaagauuuucu

SEQ ID NO: 930969 - RNA, 22 nt, Human
guaaauuauuucaagaucaucu

SEQ ID NO: 930970 - RNA, 22 nt, Human
cuuuaccacaaggacagaacuu

SEQ ID NO: 930971 - RNA, 22 nt, Human
ucacagaauuuuugcuuccagu

SEQ ID NO: 930972 - RNA, 22 nt, Human
aguucucagcuuaguaugcugu

SEQ ID NO: 930973 - RNA, 22 nt, Human
gaucagaauuuacuuauaauug

SEQ ID NO: 930974 - RNA, 22 nt, Human
uacaguaaaugugguagaaacu

SEQ ID NO: 930975 - RNA, 23 nt, Human
acaccugugcuguagucacuaca

SEQ ID NO: 930976 - RNA, 22 nt, Human
agacaauguuuggucuacacuu

SEQ ID NO: 930977 - RNA, 22 nt, Human
ggaauucuguagcucuuccucu

SEQ ID NO: 930978 - RNA, 22 nt, Human
auuuagucucccuuaucaagga

SEQ ID NO: 930979 - RNA, 22 nt, Human
uagacaauauuugaaaguagug

SEQ ID NO: 930980 - RNA, 22 nt, Human
ucaccacucacucaggcaaguc

SEQ ID NO: 930981 - RNA, 22 nt, Human
uagaaacagcauauauuagccc

SEQ ID NO: 930982 - RNA, 22 nt, Human
accuuuaugauucacaauguau

SEQ ID NO: 930983 - RNA, 22 nt, Human
aacagcauauuucauauauuga

SEQ ID NO: 930984 - RNA, 23 nt, Human
aguucucaaaaccagcuugacaa

SEQ ID NO: 930985 - RNA, 22 nt, Human
cagaaacagacaugacgcagua

SEQ ID NO: 930986 - RNA, 22 nt, Human
aauuccaaaucaacuagucuag

SEQ ID NO: 930987 - RNA, 22 nt, Human
accugugcaaagacuggucagg

SEQ ID NO: 930988 - RNA, 21 nt, Human
auggcugaugauauugaacau

SEQ ID NO: 930989 - RNA, 21 nt, Human
acagcagagaucaagacuaag

SEQ ID NO: 930990 - RNA, 22 nt, Human
gaauuccacuuuggcuuuuggg

SEQ ID NO: 930991 - RNA, 22 nt, Human
ucuaaaaugcagaucuacuggu

SEQ ID NO: 930992 - RNA, 22 nt, Human
auggcauugaguaaagucagua

SEQ ID NO: 930993 - RNA, 22 nt, Human
aaugguuuggacuauucaauag

SEQ ID NO: 930994 - RNA, 22 nt, Human
uauggcuuuuuauucaucuuac

SEQ ID NO: 930995 - RNA, 22 nt, Human
uacacauuucucuuagagacac

SEQ ID NO: 930996 - RNA, 22 nt, Human
aagcuguuuuggccuuaguuga

SEQ ID NO: 930997 - RNA, 22 nt, Human
gagauauuuauucauacuguca

SEQ ID NO: 930998 - RNA, 22 nt, Human
uaccauuuugaaacauuucauc

SEQ ID NO: 930999 - RNA, 22 nt, Human
uugucugaauauguauguaucc

SEQ ID NO: 931000 - RNA, 22 nt, Human
uuccaagaguaaauucaaauug

SEQ ID NO: 931001 - RNA, 22 nt, Human
uuugugaaaugaagucacaacu

SEQ ID NO: 931002 - RNA, 22 nt, Human
uacguuuagcuuuaugagacau

SEQ ID NO: 931003 - RNA, 22 nt, Human
acacaugaggaaggccucaccc

SEQ ID NO: 931004 - RNA, 22 nt, Human
augugaaauauuaagccgagga

SEQ ID NO: 931005 - RNA, 23 nt, Human
cccugcucaggggucugauucuc

SEQ ID NO: 931006 - RNA, 22 nt, Human
uagaaacagaauaugagugaga

SEQ ID NO: 931007 - RNA, 22 nt, Human
agcacauuuuauuuaagaaaau

SEQ ID NO: 931008 - RNA, 22 nt, Human
auagcaaugaucaagacagaca

SEQ ID NO: 931009 - RNA, 22 nt, Human
augagucacucagcagaaaagg

SEQ ID NO: 931010 - RNA, 22 nt, Human
uuuauauguuuguacaauuaag

SEQ ID NO: 931011 - RNA, 22 nt, Human
cuugcuuggagaagagaucagu

SEQ ID NO: 931012 - RNA, 22 nt, Human
ucugacuuuucucacuguugug

SEQ ID NO: 931013 - RNA, 22 nt, Human
acuuuacauuugaucucucuaa

SEQ ID NO: 931014 - RNA, 22 nt, Human
auuuacacuaaaggaaggagga

SEQ ID NO: 931015 - RNA, 22 nt, Human
acagcaguggguugccaguggg

SEQ ID NO: 931016 - RNA, 22 nt, Human
uaacauguucagacuaccugug

SEQ ID NO: 931017 - RNA, 22 nt, Human
aagcuucaguucuggggcaaug

SEQ ID NO: 931018 - RNA, 22 nt, Human
gaaaaaugcuccaaaucugugg

SEQ ID NO: 931019 - RNA, 22 nt, Human
aucccacaccccuacaacauau

SEQ ID NO: 931020 - RNA, 22 nt, Human
uuuauuauucucuggagaaugu

SEQ ID NO: 931021 - RNA, 22 nt, Human
uucaacaggaaagcacuuuaca

SEQ ID NO: 931022 - RNA, 22 nt, Human
aguucacaagugcauuucagga

SEQ ID NO: 931023 - RNA, 22 nt, Human
uguagcuuuauauuguguuggg

SEQ ID NO: 931024 - RNA, 22 nt, Human
aacuuuuaaaauacacagacaa

SEQ ID NO: 931025 - RNA, 22 nt, Human
gugcaggauguugggaaucagg

SEQ ID NO: 931026 - RNA, 22 nt, Human
ucaauuucuugguuugauaaua

SEQ ID NO: 931027 - RNA, 22 nt, Human
uuugaauguuggauugacuuag

SEQ ID NO: 931028 - RNA, 22 nt, Human
aagcuuuaagugucagucagcc

SEQ ID NO: 931029 - RNA, 22 nt, Human
ucuucauuuugaagaggcagaa

SEQ ID NO: 931030 - RNA, 22 nt, Human
ucacaaauauuuuaacaguagg

SEQ ID NO: 931031 - RNA, 22 nt, Human
cagagcagauuucuaaguauug

SEQ ID NO: 931032 - RNA, 19 nt, Human
ucuuggcuuugucuacugu

SEQ ID NO: 931033 - RNA, 22 nt, Human
ucaauuuuaugaaacaaaguga

SEQ ID NO: 931034 - RNA, 22 nt, Human
aauagcuuuuacuccuccgagg

SEQ ID NO: 931035 - RNA, 22 nt, Human
aaggcuuugauuccauugcccu

SEQ ID NO: 931036 - RNA, 22 nt, Human
uuccaaauuccaauccccugaa

SEQ ID NO: 931037 - RNA, 22 nt, Human
acacaauggcgugugccacaga

SEQ ID NO: 931038 - RNA, 22 nt, Human
ucuguagcauucaccagcccug

SEQ ID NO: 931039 - RNA, 22 nt, Human
acacacuguaaggacuaucacu

SEQ ID NO: 931040 - RNA, 22 nt, Human
uguguuggcuugccuguuaggc

SEQ ID NO: 931041 - RNA, 22 nt, Human
auuauucaaauucccacuauac

SEQ ID NO: 931042 - RNA, 22 nt, Human
auuucacucucccugccacuua

SEQ ID NO: 931043 - RNA, 22 nt, Human
uuuacaccaaaaugacacagag

SEQ ID NO: 931044 - RNA, 22 nt, Human
auuuguuuaucgucgauuguag

SEQ ID NO: 931045 - RNA, 22 nt, Human
ggcucugcugcacccuuggcuc

SEQ ID NO: 931046 - RNA, 22 nt, Human
ggaaggaagaggaccgagcugg

SEQ ID NO: 931047 - RNA, 22 nt, Human
uucaacagacccuucuuucuuu

SEQ ID NO: 931048 - RNA, 22 nt, Human
uagaaacaaaaucugaugacuc

SEQ ID NO: 931049 - RNA, 22 nt, Human
acacauuuauggaucgcagaaa

SEQ ID NO: 931050 - RNA, 22 nt, Human
ggcuucaccugugcacucuacc

SEQ ID NO: 931051 - RNA, 22 nt, Human
aaaggcaugauuaauucugugu

SEQ ID NO: 931052 - RNA, 22 nt, Human
auuugcaaagguuaacagcagu

SEQ ID NO: 931053 - RNA, 22 nt, Human
ugucuucuguauucaagucuau

SEQ ID NO: 931054 - RNA, 17 nt, Human
uuacacaggagagcucu

SEQ ID NO: 931055 - RNA, 22 nt, Human
cccuggcaaaacacucucuuga

SEQ ID NO: 931056 - RNA, 22 nt, Human
acaaacuaccuacagauguuca

SEQ ID NO: 931057 - RNA, 22 nt, Human
uggcuucucccgacacccuggc

SEQ ID NO: 931058 - RNA, 22 nt, Human
acacaugauaagaaaguuuaaa

SEQ ID NO: 931059 - RNA, 22 nt, Human
uacacaaaggcacucuguuguu

SEQ ID NO: 931060 - RNA, 22 nt, Human
aacacuaaaggucaguuagaag

SEQ ID NO: 931061 - RNA, 22 nt, Human
agaauaaccaguguuucacagu

SEQ ID NO: 931062 - RNA, 22 nt, Human
gauggcuuguuuucuggcugaa

SEQ ID NO: 931063 - RNA, 22 nt, Human
aagagcaucuauuucacagugg

SEQ ID NO: 931064 - RNA, 19 nt, Human
cuguccuuggcugcacugu

SEQ ID NO: 931065 - RNA, 18 nt, Human
uauaaccuguuuugaugg

SEQ ID NO: 931066 - RNA, 22 nt, Human
uguaggaauuccagugacuuca

SEQ ID NO: 931067 - RNA, 22 nt, Human
uuccuuguuuguagcucuggga

SEQ ID NO: 931068 - RNA, 22 nt, Human
cagcagagacgguaagcagaac

SEQ ID NO: 931069 - RNA, 22 nt, Human
ccuucagaaugaaauucuaaug

SEQ ID NO: 931070 - RNA, 22 nt, Human
aaggcuuuaaauaaccguaaag

SEQ ID NO: 931071 - RNA, 22 nt, Human
acagaacaggcugagaaaaaca

SEQ ID NO: 931072 - RNA, 22 nt, Human
uccugaagaaggcagauauuug

SEQ ID NO: 931073 - RNA, 22 nt, Human
aacacagaucaaaauauuuccu

SEQ ID NO: 931074 - RNA, 22 nt, Human
uuacacaauuuuauugaccuaa

SEQ ID NO: 931075 - RNA, 20 nt, Human
uccuucagacgacaagcaag

SEQ ID NO: 931076 - RNA, 22 nt, Human
cuccugcccacgugcuacuucu

SEQ ID NO: 931077 - RNA, 22 nt, Human
uaaccuuuguucaauguaagau

SEQ ID NO: 931078 - RNA, 22 nt, Human
augugcuucaggaugucagugu

SEQ ID NO: 931079 - RNA, 22 nt, Human
cuuucacuuuaaucugacaccu

SEQ ID NO: 931080 - RNA, 22 nt, Human
aauucacaugcaugucugugca

SEQ ID NO: 931081 - RNA, 17 nt, Human
ugagcuucaaucaggug

SEQ ID NO: 931082 - RNA, 22 nt, Human
uggcuuccagagcugcuccacc

SEQ ID NO: 931083 - RNA, 22 nt, Human
uacacuaauguuuuugcaaagc

SEQ ID NO: 931084 - RNA, 22 nt, Human
ugccaagaccacaauugcuuuu

SEQ ID NO: 931085 - RNA, 22 nt, Human
ugugagcacuauggcuaggcuc

SEQ ID NO: 931086 - RNA, 22 nt, Human
acugucuucauaucugugucuc

SEQ ID NO: 931087 - RNA, 21 nt, Human
cucuuuguggcaauguauuuu

SEQ ID NO: 931088 - RNA, 22 nt, Human
aaugguuuugucucaucaaugu

SEQ ID NO: 931089 - RNA, 22 nt, Human
agagaagggggaaagaucucac

SEQ ID NO: 931090 - RNA, 22 nt, Human
aaacaugagcaucucuucaagc

SEQ ID NO: 931091 - RNA, 22 nt, Human
guucucauaguggaaaauaggu

SEQ ID NO: 931092 - RNA, 22 nt, Human
uggcuuaguucuagaaauuugg

SEQ ID NO: 931093 - RNA, 22 nt, Human
ccuguaaguaguuugccugagc

SEQ ID NO: 931094 - RNA, 18 nt, Human
agcaguguggcaagcaga

SEQ ID NO: 931095 - RNA, 22 nt, Human
ugugaaagcaagucuaguucuc

SEQ ID NO: 931096 - RNA, 22 nt, Human
ggaggaggggugacugaaugcu

SEQ ID NO: 931097 - RNA, 21 nt, Human
aagcuucccugcucuccaggg

SEQ ID NO: 931098 - RNA, 22 nt, Human
cagcaguaauuagugcugcaug

SEQ ID NO: 931099 - RNA, 22 nt, Human
augucccagacacuuuaucuua

SEQ ID NO: 931100 - RNA, 22 nt, Human
ugacuuuaaagcucacucuuuu

SEQ ID NO: 931101 - RNA, 22 nt, Human
aaaaaccauugucuucagucuc

SEQ ID NO: 931102 - RNA, 22 nt, Human
acuguuaugauuuacacagucc

SEQ ID NO: 931103 - RNA, 22 nt, Human
ucagagaauguccuucuucauu

SEQ ID NO: 931104 - RNA, 22 nt, Human
uuuaccacagaaaaaaguaacu

SEQ ID NO: 931105 - RNA, 22 nt, Human
cacaaugauuugguucaaaaau

SEQ ID NO: 931106 - RNA, 22 nt, Human
aagcagaaggggaauaauauuu

SEQ ID NO: 931107 - RNA, 22 nt, Human
uggcucuccagcucuaaggccu

SEQ ID NO: 931108 - RNA, 22 nt, Human
cacaugcaggagccaauguaca

SEQ ID NO: 931109 - RNA, 22 nt, Human
ugugccagaauguuuuuauaca

SEQ ID NO: 931110 - RNA, 23 nt, Human
cuguagcuaaaagcugggauuug

SEQ ID NO: 931111 - RNA, 22 nt, Human
caauuagcugguacugacagga

SEQ ID NO: 931112 - RNA, 22 nt, Human
acuguuauguuauuacccaugu

SEQ ID NO: 931113 - RNA, 22 nt, Human
uuuccaaaggaggaaccaguuu

SEQ ID NO: 931114 - RNA, 22 nt, Human
caugcaguugaagcacagagag

SEQ ID NO: 931115 - RNA, 22 nt, Human
uaacacuguccaaagaauucca

SEQ ID NO: 931116 - RNA, 22 nt, Human
uaacuucacuggacucagcagc

SEQ ID NO: 931117 - RNA, 22 nt, Human
cuaaacuuuuauaacauugaga

SEQ ID NO: 931118 - RNA, 22 nt, Human
auacacaugcacacaugugugu

SEQ ID NO: 931119 - RNA, 22 nt, Human
cugucacugaugggcucaccag

SEQ ID NO: 931120 - RNA, 22 nt, Human
agcuucacuuuguacuuuguca

SEQ ID NO: 931121 - RNA, 21 nt, Human
aaacugaccuugccugagaca

SEQ ID NO: 931122 - RNA, 22 nt, Human
uuaggaaaagaagacauuucua

SEQ ID NO: 931123 - RNA, 22 nt, Human
cuuguugggucgugaauucugu

SEQ ID NO: 931124 - RNA, 22 nt, Human
aaauuuuagacuccugggucua

SEQ ID NO: 931125 - RNA, 22 nt, Human
cuagagaaucuuuuaagaagug

SEQ ID NO: 931126 - RNA, 22 nt, Human
uccuggcucugcugccuccuag

SEQ ID NO: 931127 - RNA, 22 nt, Human
auucacaacugauccuugcuca

SEQ ID NO: 931128 - RNA, 22 nt, Human
uucacaaacuucaugauggcac

SEQ ID NO: 931129 - RNA, 22 nt, Human
acauuaagaaacgagagagcaa

SEQ ID NO: 931130 - RNA, 22 nt, Human
auggaaaucagguucauccaag

SEQ ID NO: 931131 - RNA, 23 nt, Human
uucuaaccuuaaagcccuuugga

SEQ ID NO: 931132 - RNA, 22 nt, Human
uuaggaauuuaucacagacugg

SEQ ID NO: 931133 - RNA, 22 nt, Human
uuacacaauauaugguacuugg

SEQ ID NO: 931134 - RNA, 22 nt, Human
ugugcuucucuuucucacuuaa

SEQ ID NO: 931135 - RNA, 22 nt, Human
ugcuuuaccuucccagaaacca

SEQ ID NO: 931136 - RNA, 22 nt, Human
uuacucagucucccauacauug

SEQ ID NO: 931137 - RNA, 22 nt, Human
agaaaucaggaacaguaaggag

SEQ ID NO: 931138 - RNA, 22 nt, Human
ucugugcugcccaacuucucaa

SEQ ID NO: 931139 - RNA, 22 nt, Human
aacacugucagccuuugaugga

SEQ ID NO: 931140 - RNA, 22 nt, Human
uuuuacaccucagaugagcaga

SEQ ID NO: 931141 - RNA, 22 nt, Human
uauggcuucugggccaaauuua

SEQ ID NO: 931142 - RNA, 22 nt, Human
ugaucuuugguaguacgauaau

SEQ ID NO: 931143 - RNA, 22 nt, Human
uucaucugcuucuuccuauucc

SEQ ID NO: 931144 - RNA, 22 nt, Human
uaacuuuaguguaugagguaag

SEQ ID NO: 931145 - RNA, 22 nt, Human
uuuccaaagguggcaggaacaa

SEQ ID NO: 931146 - RNA, 22 nt, Human
ucaaacagaggaacaauuguuu

SEQ ID NO: 931147 - RNA, 22 nt, Human
uacaaagcaaaucaucuaagag

SEQ ID NO: 931148 - RNA, 22 nt, Human
uaucuguuaggaucagagcugg

SEQ ID NO: 931149 - RNA, 22 nt, Human
acacuuuacucuuacaccauug

SEQ ID NO: 931150 - RNA, 22 nt, Human
ucacacauuucucaaguguagg

SEQ ID NO: 931151 - RNA, 22 nt, Human
caucacaccacaggcauuuucu

SEQ ID NO: 931152 - RNA, 19 nt, Human
uaaaucuguauucuucaaa

SEQ ID NO: 931153 - RNA, 22 nt, Human
aaacauguaaguucagaucacc

SEQ ID NO: 931154 - RNA, 22 nt, Human
cagucacugguucuauaggccc

SEQ ID NO: 931155 - RNA, 22 nt, Human
uaacuuuaugacaugucuugcu

SEQ ID NO: 931156 - RNA, 22 nt, Human
agacaauuuuugguuuugcaag

SEQ ID NO: 931157 - RNA, 22 nt, Human
aucuuugucacucuacugucua

SEQ ID NO: 931158 - RNA, 22 nt, Human
aauggcuuucagcaaggauaga

SEQ ID NO: 931159 - RNA, 22 nt, Human
cacauuuagguuccuauagcca

SEQ ID NO: 931160 - RNA, 19 nt, Human
aaaccuguuaguagagcac

SEQ ID NO: 931161 - RNA, 22 nt, Human
uuguacacacaggaacaaacgu

SEQ ID NO: 931162 - RNA, 23 nt, Human
acaugauacacaauuagcaaacc

SEQ ID NO: 931163 - RNA, 22 nt, Human
aucugucuaugauauagucugu

SEQ ID NO: 931164 - RNA, 22 nt, Human
aaccuguaaauccaaacaaucu

SEQ ID NO: 931165 - RNA, 22 nt, Human
cagucuucuaaccuagcagccu

SEQ ID NO: 931166 - RNA, 22 nt, Human
uuaugcaaagaaauagacuaau

SEQ ID NO: 931167 - RNA, 22 nt, Human
cccuucaggguuaaguagaggg

SEQ ID NO: 931168 - RNA, 21 nt, Human
agcauucaaaagaugccauaa

SEQ ID NO: 931169 - RNA, 19 nt, Human
aaguucucagaguucaaag

SEQ ID NO: 931170 - RNA, 22 nt, Human
ggcuucuccagguacugagcau

SEQ ID NO: 931171 - RNA, 22 nt, Human
uggcuucuuuccacuguccugu

SEQ ID NO: 931172 - RNA, 22 nt, Human
uauggcuuugaaagggcuuuuc

SEQ ID NO: 931173 - RNA, 22 nt, Human
aguaaacacgugggguuucuuu

SEQ ID NO: 931174 - RNA, 22 nt, Human
ucagaacaguucuuaauauugc

SEQ ID NO: 931175 - RNA, 22 nt, Human
uauggcuuuucuuccuccccca

SEQ ID NO: 931176 - RNA, 22 nt, Human
ggcucugcuucucaccuguucc

SEQ ID NO: 931177 - RNA, 22 nt, Human
auuccacagcuacguuuugagc

SEQ ID NO: 931178 - RNA, 22 nt, Human
uuucacacaacgugaauauacu

SEQ ID NO: 931179 - RNA, 22 nt, Human
ucugaguuuaggaccaggcuga

SEQ ID NO: 931180 - RNA, 22 nt, Human
gaacuuuaggauuuucacaggu

SEQ ID NO: 931181 - RNA, 22 nt, Human
cuugcuuuaucugguuucucau

SEQ ID NO: 931182 - RNA, 22 nt, Human
uuuuauauggcacauugguugg

SEQ ID NO: 931183 - RNA, 22 nt, Human
agguggcucugacagcucuggu

SEQ ID NO: 931184 - RNA, 22 nt, Human
ucacagcaguaaagaaaacacu

SEQ ID NO: 931185 - RNA, 22 nt, Human
cagcauuguaagaaugaagacc

SEQ ID NO: 931186 - RNA, 22 nt, Human
uaaucuguaauuuuugcaauag

SEQ ID NO: 931187 - RNA, 22 nt, Human
uacauuuacagagccuucucug

SEQ ID NO: 931188 - RNA, 22 nt, Human
acugugcuaucuacugaauuau

SEQ ID NO: 931189 - RNA, 22 nt, Human
ugagaauuugcauuucuaacaa

SEQ ID NO: 931190 - RNA, 21 nt, Human
ugguaauguucaguauccacu

SEQ ID NO: 931191 - RNA, 22 nt, Human
gugcuuggcuuggugugaccug

SEQ ID NO: 931192 - RNA, 22 nt, Human
uguuggaaaggccaggcugugg

SEQ ID NO: 931193 - RNA, 22 nt, Human
auuacacaggcuggcucuuuga

SEQ ID NO: 931194 - RNA, 22 nt, Human
uacacaugaucauuuaguagca

SEQ ID NO: 931195 - RNA, 22 nt, Human
cauggcuuuuuagcauauucaa

SEQ ID NO: 931196 - RNA, 22 nt, Human
ugaaggaaagagggaacauccc

SEQ ID NO: 931197 - RNA, 22 nt, Human
auucacaauagcagcuugcaug

SEQ ID NO: 931198 - RNA, 22 nt, Human
aaacaugaugucauauaugcca

SEQ ID NO: 931199 - RNA, 22 nt, Human
acuuuacaggcacuucaaguau

SEQ ID NO: 931200 - RNA, 22 nt, Human
caaucacaaagagacaaguguc

SEQ ID NO: 931201 - RNA, 22 nt, Human
gcagagaaaguuuuguccucag

SEQ ID NO: 931202 - RNA, 22 nt, Human
ucuucucuccugcuuggcagaa

SEQ ID NO: 931203 - RNA, 22 nt, Human
uuuaucucuuuugaccaagauu

SEQ ID NO: 931204 - RNA, 21 nt, Human
gcucuggccuacuguucccuc

SEQ ID NO: 931205 - RNA, 22 nt, Human
aauaacagagucuucaagauag

SEQ ID NO: 931206 - RNA, 22 nt, Human
uaacaguauugaagauaaacua

SEQ ID NO: 931207 - RNA, 22 nt, Human
ccacuguuuuucaguuaacuuu

SEQ ID NO: 931208 - RNA, 22 nt, Human
caucuguuuuugucaauuacau

SEQ ID NO: 931209 - RNA, 22 nt, Human
uauuacaauuuacauugcacuu

SEQ ID NO: 931210 - RNA, 22 nt, Human
guccaaauuccacagauuucuc

SEQ ID NO: 931211 - RNA, 18 nt, Human
guuuacacauucuagaaa

SEQ ID NO: 931212 - RNA, 22 nt, Human
cuggcuuccaugcuguaguggc

SEQ ID NO: 931213 - RNA, 22 nt, Human
uagaaacauauguuugagacau

SEQ ID NO: 931214 - RNA, 22 nt, Human
uacagcaugaucacaauggaaa

SEQ ID NO: 931215 - RNA, 21 nt, Human
gagaaucaggaaggauugaug

SEQ ID NO: 931216 - RNA, 22 nt, Human
aacaguaucuacgggaacuauu

SEQ ID NO: 931217 - RNA, 22 nt, Human
ucugugcucaaguucugccucu

SEQ ID NO: 931218 - RNA, 23 nt, Human
ucauuucauccagccuugagagu

SEQ ID NO: 931219 - RNA, 22 nt, Human
gccuucaggugcugccaggcua

SEQ ID NO: 931220 - RNA, 22 nt, Human
aguugcagccuucaggagaccc

SEQ ID NO: 931221 - RNA, 16 nt, Human
auucacaaggcaucgg

SEQ ID NO: 931222 - RNA, 22 nt, Human
cccugugcacacacuucacucu

SEQ ID NO: 931223 - RNA, 22 nt, Human
aacacaugaaaguuggugagua

SEQ ID NO: 931224 - RNA, 22 nt, Human
uagcaaauacaugauguaauuu

SEQ ID NO: 931225 - RNA, 22 nt, Human
uuuaucugcauucugaccaucu

SEQ ID NO: 931226 - RNA, 22 nt, Human
accugauauguuugaucacccu

SEQ ID NO: 931227 - RNA, 22 nt, Human
aauggcuucaugucuguggaaa

SEQ ID NO: 931228 - RNA, 22 nt, Human
uuuagucagguaagaugcaggg

SEQ ID NO: 931229 - RNA, 22 nt, Human
gcagcgagugcggcugccacag

SEQ ID NO: 931230 - RNA, 22 nt, Human
cugccaccaugccccagcagag

SEQ ID NO: 931231 - RNA, 22 nt, Human
ucccuaaacucugaacugauuc

SEQ ID NO: 931232 - RNA, 20 nt, Human
auagacaaagacaugccaga

SEQ ID NO: 931233 - RNA, 22 nt, Human
aaaaccaaguuuuccuuagucu

SEQ ID NO: 931234 - RNA, 22 nt, Human
gaaugucuucuguucccagcug

SEQ ID NO: 931235 - RNA, 22 nt, Human
ggagcaucugaacagggagaag

SEQ ID NO: 931236 - RNA, 22 nt, Human
uucacccuggaccagaaauugg

SEQ ID NO: 931237 - RNA, 22 nt, Human
gacacaugucagacggacaccc

SEQ ID NO: 931238 - RNA, 22 nt, Human
uacacagggagagauuggaaac

SEQ ID NO: 931239 - RNA, 22 nt, Human
guuguacaauuguuucacaugc

SEQ ID NO: 931240 - RNA, 22 nt, Human
ccugcucaccugauguggcaac

SEQ ID NO: 931241 - RNA, 22 nt, Human
acaugucuuguggcuuugaucu

SEQ ID NO: 931242 - RNA, 22 nt, Human
caguaugacuacaaacagcuuu

SEQ ID NO: 931243 - RNA, 22 nt, Human
aaaccuguagcaguuuguuaca

SEQ ID NO: 931244 - RNA, 22 nt, Human
aagcuucagugugagcauguaa

SEQ ID NO: 931245 - RNA, 22 nt, Human
uauggcuuuucauuccuaugug

SEQ ID NO: 931246 - RNA, 22 nt, Human
auggcucuugaauugauacucu

SEQ ID NO: 931247 - RNA, 22 nt, Human
uuggcaauggaccagccacugg

SEQ ID NO: 931248 - RNA, 20 nt, Human
uuacacuuuguagcauuuuu

SEQ ID NO: 931249 - RNA, 22 nt, Human
ggucacaagguacuguaagaaa

SEQ ID NO: 931250 - RNA, 22 nt, Human
uaaacaugugagugugcauaua

SEQ ID NO: 931251 - RNA, 21 nt, Human
accuucaguguucucagcugc

SEQ ID NO: 931252 - RNA, 22 nt, Human
ucagagaacugcagcccuuccu

SEQ ID NO: 931253 - RNA, 22 nt, Human
acagauauaugauuguguaaau

SEQ ID NO: 931254 - RNA, 18 nt, Human
uuauggcugugaaagagu

SEQ ID NO: 931255 - RNA, 22 nt, Human
augaaacaaggguauuuucucu

SEQ ID NO: 931256 - RNA, 22 nt, Human
acagcagugcacagagaacccu

SEQ ID NO: 931257 - RNA, 22 nt, Human
uuaugaaaacaaucaguaggca

SEQ ID NO: 931258 - RNA, 22 nt, Human
cauggcuuuugcuuuugcccau

SEQ ID NO: 931259 - RNA, 22 nt, Human
cuuaaucucaccugcaaagucc

SEQ ID NO: 931260 - RNA, 22 nt, Human
aaauguaagucuuuguuucuua

SEQ ID NO: 931261 - RNA, 22 nt, Human
auggcuuugaaguucagcuuuu

SEQ ID NO: 931262 - RNA, 22 nt, Human
uuaagagaagaguaucuagaac

SEQ ID NO: 931263 - RNA, 22 nt, Human
uuccagaacaauguggacguau

SEQ ID NO: 931264 - RNA, 22 nt, Human
acuucacagguuuucauaaaac

SEQ ID NO: 931265 - RNA, 22 nt, Human
agcaaucagcuucuuuguguuu

SEQ ID NO: 931266 - RNA, 22 nt, Human
auaacccucuggauaggacagg

SEQ ID NO: 931267 - RNA, 22 nt, Human
gacauuuaaggcagucacuuaa

SEQ ID NO: 931268 - RNA, 22 nt, Human
guacacauauuuccaaggguaa

SEQ ID NO: 931269 - RNA, 22 nt, Human
agucagacauaauucuaacauu

SEQ ID NO: 931270 - RNA, 22 nt, Human
gcuuggcuuugucuuguucacu

SEQ ID NO: 931271 - RNA, 23 nt, Human
aaaugacauaugguuucugaagg

SEQ ID NO: 931272 - RNA, 22 nt, Human
acagaugaauuuuaauuguguu

SEQ ID NO: 931273 - RNA, 22 nt, Human
gacuucacaauaaugugacacu

SEQ ID NO: 931274 - RNA, 22 nt, Human
accuuuauagcugauuaugaca

SEQ ID NO: 931275 - RNA, 22 nt, Human
aucuuuguuuugaugcagaucu

SEQ ID NO: 931276 - RNA, 22 nt, Human
ccacccuguguuuuugccauug

SEQ ID NO: 931277 - RNA, 22 nt, Human
ugcuuggcuuucugagcuucug

SEQ ID NO: 931278 - RNA, 22 nt, Human
gacauuaauuucuuugguaauu

SEQ ID NO: 931279 - RNA, 22 nt, Human
cagcaguuaugaguagaauagu

SEQ ID NO: 931280 - RNA, 23 nt, Human
gccuucagcucgggaaggcuccc

SEQ ID NO: 931281 - RNA, 20 nt, Human
aacacugugcgugguaggug

SEQ ID NO: 931282 - RNA, 22 nt, Human
uuuagcaauuauuaaggguuga

SEQ ID NO: 931283 - RNA, 20 nt, Human
ugagcuucagauaucgugca

SEQ ID NO: 931284 - RNA, 22 nt, Human
cugagcucagucccagcucuac

SEQ ID NO: 931285 - RNA, 22 nt, Human
cauggcuuuuuuauucugaaug

SEQ ID NO: 931286 - RNA, 23 nt, Human
gcucugccacuuaauagcugugu

SEQ ID NO: 931287 - RNA, 23 nt, Human
uuacuuuugcaccaaccuaauau

SEQ ID NO: 931288 - RNA, 22 nt, Human
uuuacacauuauuuucagugug

SEQ ID NO: 931289 - RNA, 22 nt, Human
caagcagaaaucuagaacucca

SEQ ID NO: 931290 - RNA, 22 nt, Human
auagcaauuaagcuccagaauu

SEQ ID NO: 931291 - RNA, 22 nt, Human
uaacuuucacaucacacugacu

SEQ ID NO: 931292 - RNA, 22 nt, Human
guagcagcagagcagguccucc

SEQ ID NO: 931293 - RNA, 22 nt, Human
uuagcacuggauuucaucagaa

SEQ ID NO: 931294 - RNA, 22 nt, Human
uggcuucuuugugacagcucuu

SEQ ID NO: 931295 - RNA, 22 nt, Human
acacaggagauauguaauggcu

SEQ ID NO: 931296 - RNA, 22 nt, Human
cuucccauauaacuaauuucug

SEQ ID NO: 931297 - RNA, 22 nt, Human
ggcugcuccuuuacccuggcag

SEQ ID NO: 931298 - RNA, 22 nt, Human
uccugaagccugagugaugacu

SEQ ID NO: 931299 - RNA, 22 nt, Human
uuuucugaccuaucuacauuua

SEQ ID NO: 931300 - RNA, 22 nt, Human
acauguguacauauauaugugc

SEQ ID NO: 931301 - RNA, 22 nt, Human
cauggcuugcuaguggcccaag

SEQ ID NO: 931302 - RNA, 20 nt, Human
uuuuagcacuuguuauggug

SEQ ID NO: 931303 - RNA, 22 nt, Human
ggaauacuaugacacacaggug

SEQ ID NO: 931304 - RNA, 22 nt, Human
aauagcauguucaugauaaaau

SEQ ID NO: 931305 - RNA, 23 nt, Human
ugauuacaggaaguucaaguguu

SEQ ID NO: 931306 - RNA, 23 nt, Human
guacacauaguguaguuauauuu

SEQ ID NO: 931307 - RNA, 22 nt, Human
agcuuccuugaauucuguagaa

SEQ ID NO: 931308 - RNA, 22 nt, Human
uucagaguacacagagaucuuc

SEQ ID NO: 931309 - RNA, 22 nt, Human
uuuauacauggagaauuuuugc

SEQ ID NO: 931310 - RNA, 22 nt, Human
acaauuagugaucagugaugcc

SEQ ID NO: 931311 - RNA, 22 nt, Human
ugacuucucuggccuggugcag

SEQ ID NO: 931312 - RNA, 22 nt, Human
uuauuacacugaaagaauugcg

SEQ ID NO: 931313 - RNA, 22 nt, Human
accacagaggaauuugaagagg

SEQ ID NO: 931314 - RNA, 22 nt, Human
cagauguacaugaagggcaaug

SEQ ID NO: 931315 - RNA, 20 nt, Human
guacacauauauguaugugu

SEQ ID NO: 931316 - RNA, 22 nt, Human
aguaaacugugugccuuugacu

SEQ ID NO: 931317 - RNA, 22 nt, Human
acuuuacaagcuuauagccuag

SEQ ID NO: 931318 - RNA, 22 nt, Human
auugaguacuuagugucauaua

SEQ ID NO: 931319 - RNA, 22 nt, Human
ucugcuuuagaauccaguagcu

SEQ ID NO: 931320 - RNA, 22 nt, Human
ugcagauucaaaugaaaugcaa

SEQ ID NO: 931321 - RNA, 22 nt, Human
uuuuauugucucccaguucugg

SEQ ID NO: 931322 - RNA, 22 nt, Human
auuucaacguuagauguaauag

SEQ ID NO: 931323 - RNA, 22 nt, Human
auuucacagcugucaguguuac

SEQ ID NO: 931324 - RNA, 22 nt, Human
aacacaugccuuaagaauaagu

SEQ ID NO: 931325 - RNA, 22 nt, Human
acuuuacaaacuccucacuguu

SEQ ID NO: 931326 - RNA, 22 nt, Human
cacauuuacuuuuaucccuugg

SEQ ID NO: 931327 - RNA, 19 nt, Human
uucacauuuuuguggcacu

SEQ ID NO: 931328 - RNA, 22 nt, Human
uggcuucugcauauuuuuagag

SEQ ID NO: 931329 - RNA, 22 nt, Human
gaugucuuugaggcucacugcu

SEQ ID NO: 931330 - RNA, 22 nt, Human
caguuuaguguugcauuuggag

SEQ ID NO: 931331 - RNA, 22 nt, Human
uuuaucuguuguacauuuaugc

SEQ ID NO: 931332 - RNA, 18 nt, Human
ucacagaauauugagugg

SEQ ID NO: 931333 - RNA, 22 nt, Human
aaaggcaugccuccauuucuau

SEQ ID NO: 931334 - RNA, 23 nt, Human
aguucucauucaucacggccuau

SEQ ID NO: 931335 - RNA, 22 nt, Human
cacagcauugccuuccaaaagg

SEQ ID NO: 931336 - RNA, 22 nt, Human
auggucuuaggguaggcagcug

SEQ ID NO: 931337 - RNA, 22 nt, Human
auuauucagucuuguaaggagu

SEQ ID NO: 931338 - RNA, 22 nt, Human
uuuauaucuuaugucauuucaa

SEQ ID NO: 931339 - RNA, 22 nt, Human
auagcaauuugcccaauuaccu

SEQ ID NO: 931340 - RNA, 22 nt, Human
aagaacaugaaccucuucuaac

SEQ ID NO: 931341 - RNA, 20 nt, Human
ugccuuuccuguuucaucuu

SEQ ID NO: 931342 - RNA, 22 nt, Human
ucuggcuccugaguccaugcuc

SEQ ID NO: 931343 - RNA, 22 nt, Human
cucuguugagcauuuuuccccu

SEQ ID NO: 931344 - RNA, 22 nt, Human
ucccugcccugccuucaugguu

SEQ ID NO: 931345 - RNA, 22 nt, Human
aacacuguggucuuuucaguaa

SEQ ID NO: 931346 - RNA, 22 nt, Human
uggaccaugagcugcagguguu

SEQ ID NO: 931347 - RNA, 19 nt, Human
auggaaaaugccagacuga

SEQ ID NO: 931348 - RNA, 22 nt, Human
uggcuucucccuccccaucuag

SEQ ID NO: 931349 - RNA, 22 nt, Human
aaugcuucaaccucccacaugu

SEQ ID NO: 931350 - RNA, 22 nt, Human
augcgcuuugugugaagcagug

SEQ ID NO: 931351 - RNA, 22 nt, Human
auucauuccaggucagucagac

SEQ ID NO: 931352 - RNA, 22 nt, Human
uaaaugagauguacauaacuca

SEQ ID NO: 931353 - RNA, 22 nt, Human
aucugaguguuggauuuauugu

SEQ ID NO: 931354 - RNA, 22 nt, Human
acuggcuugaaguagauucaaa

SEQ ID NO: 931355 - RNA, 22 nt, Human
ucuuuguaagacauguaagucc

SEQ ID NO: 931356 - RNA, 22 nt, Human
uccuucagcuuguuagagugac

SEQ ID NO: 931357 - RNA, 22 nt, Human
uauggcuugucccuggucaguc

SEQ ID NO: 931358 - RNA, 22 nt, Human
acacacugagugccauaggacc

SEQ ID NO: 931359 - RNA, 22 nt, Human
ugcauuuacgguacaacagcag

SEQ ID NO: 931360 - RNA, 22 nt, Human
aauagcauguaaguuuaaaaga

SEQ ID NO: 931361 - RNA, 18 nt, Human
cugcuugggagacgucag

SEQ ID NO: 931362 - RNA, 22 nt, Human
acccuguauacgcuacauuuuu

SEQ ID NO: 931363 - RNA, 22 nt, Human
uacacuuguucaaacagcaaaa

SEQ ID NO: 931364 - RNA, 22 nt, Human
auauuguguguacaaguaguua

SEQ ID NO: 931365 - RNA, 22 nt, Human
agaaaugugagccccuuaucaa

SEQ ID NO: 931366 - RNA, 22 nt, Human
auucagucaaaccacuggucau

SEQ ID NO: 931367 - RNA, 22 nt, Human
gccuucaggaggguuccagaca

SEQ ID NO: 931368 - RNA, 22 nt, Human
uuauucagugcauauauuaaaa

SEQ ID NO: 931369 - RNA, 22 nt, Human
uuccuuguggaaacuauggacg

SEQ ID NO: 931370 - RNA, 22 nt, Human
agcacaugacuuuuagucgagu

SEQ ID NO: 931371 - RNA, 22 nt, Human
caaugcuucaggcuccuuauag

SEQ ID NO: 931372 - RNA, 22 nt, Human
ccuaacuuuaaugggaccagga

SEQ ID NO: 931373 - RNA, 22 nt, Human
aucacacuguuauuuuaguuaa

SEQ ID NO: 931374 - RNA, 22 nt, Human
uuccagaaaguucuggaacugg

SEQ ID NO: 931375 - RNA, 22 nt, Human
uuaaauuagucaagcuucucug

SEQ ID NO: 931376 - RNA, 22 nt, Human
cacuccuguuccacuaaaugag

SEQ ID NO: 931377 - RNA, 22 nt, Human
agaucagaaagccaauaucaua

SEQ ID NO: 931378 - RNA, 22 nt, Human
gaguagacauuaaauuacacug

SEQ ID NO: 931379 - RNA, 22 nt, Human
cagagaaagggugaauuccuuc

SEQ ID NO: 931380 - RNA, 22 nt, Human
acacaugaggaugaggggauca

SEQ ID NO: 931381 - RNA, 22 nt, Human
acaggacaaggggaagaagaua

SEQ ID NO: 931382 - RNA, 22 nt, Human
acauuuacccuggaacauugga

SEQ ID NO: 931383 - RNA, 20 nt, Human
uacuguuguugcuguugcca

SEQ ID NO: 931384 - RNA, 22 nt, Human
auaacuucaguuucuguguccu

SEQ ID NO: 931385 - RNA, 22 nt, Human
cucuuuguagccuuugcauauu

SEQ ID NO: 931386 - RNA, 22 nt, Human
uagugaaaccugacagaucaug

SEQ ID NO: 931387 - RNA, 22 nt, Human
aauggcuuuuaaaaauagcauu

SEQ ID NO: 931388 - RNA, 22 nt, Human
augcuucuccugaacaucccug

SEQ ID NO: 931389 - RNA, 22 nt, Human
aacacugucuuauacuucaaug

SEQ ID NO: 931390 - RNA, 22 nt, Human
uauuccaacuucacuauugucu

SEQ ID NO: 931391 - RNA, 22 nt, Human
uaugaaaagguggccaauguag

SEQ ID NO: 931392 - RNA, 18 nt, Human
uggcuucugaacaacugc

SEQ ID NO: 931393 - RNA, 22 nt, Human
aucacagauugugaauaacuau

SEQ ID NO: 931394 - RNA, 22 nt, Human
uggcuucucagaauacucugga

SEQ ID NO: 931395 - RNA, 20 nt, Human
acacuguucuucacacauuu

SEQ ID NO: 931396 - RNA, 23 nt, Human
uaguuacauuauugucagagcug

SEQ ID NO: 931397 - RNA, 22 nt, Human
ugucaacagauacuagagagcu

SEQ ID NO: 931398 - RNA, 22 nt, Human
ucacagcagaauuuaggaggca

SEQ ID NO: 931399 - RNA, 22 nt, Human
guaaccugggauguagcacaga

SEQ ID NO: 931400 - RNA, 22 nt, Human
uguugguaaauagcuuagcaau

SEQ ID NO: 931401 - RNA, 22 nt, Human
ucccauguguuccucuagucua

SEQ ID NO: 931402 - RNA, 22 nt, Human
cacaugaagauucaacuggaug

SEQ ID NO: 931403 - RNA, 22 nt, Human
acugugaaucacuacuaguaga

SEQ ID NO: 931404 - RNA, 22 nt, Human
uucuccugcccuuggacuucca

SEQ ID NO: 931405 - RNA, 22 nt, Human
uaagcaaauaaugcaucaaggg

SEQ ID NO: 931406 - RNA, 22 nt, Human
ugugcuaaguauuuucuuauuu

SEQ ID NO: 931407 - RNA, 22 nt, Human
ugagucacagccuugccuuggu

SEQ ID NO: 931408 - RNA, 22 nt, Human
uuucucugugccauuuccauaa

SEQ ID NO: 931409 - RNA, 22 nt, Human
gcuuuacaugauuucucacccu

SEQ ID NO: 931410 - RNA, 22 nt, Human
cucacagagccucugugucuuc

SEQ ID NO: 931411 - RNA, 22 nt, Human
augugaaaaauuucuuauuaca

SEQ ID NO: 931412 - RNA, 22 nt, Human
uggcuccuucauucuccugcca

SEQ ID NO: 931413 - RNA, 22 nt, Human
acaagguuuaaauagccaucag

SEQ ID NO: 931414 - RNA, 22 nt, Human
uauacacauuuuuaccuauagu

SEQ ID NO: 931415 - RNA, 22 nt, Human
aagaaauaagacuucucugucc

SEQ ID NO: 931416 - RNA, 22 nt, Human
acuaaauacacacauuuguuca

SEQ ID NO: 931417 - RNA, 22 nt, Human
acacuguuccacacuaagaagg

SEQ ID NO: 931418 - RNA, 22 nt, Human
uagacaaucucagcaaacacac

SEQ ID NO: 931419 - RNA, 22 nt, Human
uguuuacagcugaucaggcauc

SEQ ID NO: 931420 - RNA, 20 nt, Human
ccugugcuuaucacuugcug

SEQ ID NO: 931421 - RNA, 22 nt, Human
ucaguuuaagaugacuaacaau

SEQ ID NO: 931422 - RNA, 22 nt, Human
aaugguuucaaacacacuaagu

SEQ ID NO: 931423 - RNA, 22 nt, Human
gacauuaaaugucuuaguugcc

SEQ ID NO: 931424 - RNA, 22 nt, Human
caguuuaguaggugauaucaau

SEQ ID NO: 931425 - RNA, 22 nt, Human
acagucuuuagaguauuguccu

SEQ ID NO: 931426 - RNA, 22 nt, Human
uauuaugagccaggugcugucu

SEQ ID NO: 931427 - RNA, 22 nt, Human
uaacauuagguagacauaagcc

SEQ ID NO: 931428 - RNA, 22 nt, Human
auuucagaauguccuaauuuag

SEQ ID NO: 931429 - RNA, 22 nt, Human
uaacauguuaagaaauuagaua

SEQ ID NO: 931430 - RNA, 23 nt, Human
ucuaaaauucaucauuuacguuc

SEQ ID NO: 931431 - RNA, 22 nt, Human
uuacaauuacuugaucucagcu

SEQ ID NO: 931432 - RNA, 22 nt, Human
uugcagagaucagcagguuuga

SEQ ID NO: 931433 - RNA, 22 nt, Human
uagaaacagaaaacuguaauag

SEQ ID NO: 931434 - RNA, 22 nt, Human
caaccaguagcugaguucaaaa

SEQ ID NO: 931435 - RNA, 22 nt, Human
aacauaauguggccaaagucac

SEQ ID NO: 931436 - RNA, 22 nt, Human
aaugguuugauggacaaaauga

SEQ ID NO: 931437 - RNA, 22 nt, Human
aguaacaggguauuuguguggg

SEQ ID NO: 931438 - RNA, 22 nt, Human
uuuccccagguagauagauaau

SEQ ID NO: 931439 - RNA, 22 nt, Human
uuacagagcucauuucuaaggg

SEQ ID NO: 931440 - RNA, 22 nt, Human
cuuucaacuacauacaggcgau

SEQ ID NO: 931441 - RNA, 21 nt, Human
ugcuuugcucguucccagagu

SEQ ID NO: 931442 - RNA, 22 nt, Human
auaaauucucugauguauagua

SEQ ID NO: 931443 - RNA, 22 nt, Human
uugcuaacgcucacccuuugcc

SEQ ID NO: 931444 - RNA, 22 nt, Human
auaauguugaugauugucuuug

SEQ ID NO: 931445 - RNA, 22 nt, Human
agauggcugggcucguccgcag

SEQ ID NO: 931446 - RNA, 22 nt, Human
caugagaaguggccuucaaaaa

SEQ ID NO: 931447 - RNA, 22 nt, Human
gcuucacaggcaaguuaagccu

SEQ ID NO: 931448 - RNA, 21 nt, Human
ccuucuccauuacaguaagcu

SEQ ID NO: 931449 - RNA, 21 nt, Human
acauguaagagaguuucaaga

SEQ ID NO: 931450 - RNA, 22 nt, Human
ucuuggcuacuuuccugucugc

SEQ ID NO: 931451 - RNA, 22 nt, Human
ucacagaauaaauguacuggcc

SEQ ID NO: 931452 - RNA, 22 nt, Human
aaucuguuuaacagauuucugu

SEQ ID NO: 931453 - RNA, 22 nt, Human
cacacugucuuuaugagcugua

SEQ ID NO: 931454 - RNA, 22 nt, Human
uuacacaaaagcaagugugugu

SEQ ID NO: 931455 - RNA, 22 nt, Human
aagauaauguucuagcugucag

SEQ ID NO: 931456 - RNA, 22 nt, Human
uccugaaggagcaguugcuggg

SEQ ID NO: 931457 - RNA, 22 nt, Human
uaaccugcugugcuggucaguc

SEQ ID NO: 931458 - RNA, 22 nt, Human
uucaauucuaaacuaauauucu

SEQ ID NO: 931459 - RNA, 22 nt, Human
uauggcuuuuggcuucucucug

SEQ ID NO: 931460 - RNA, 22 nt, Human
uuacacaucuagacccauuuuu

SEQ ID NO: 931461 - RNA, 22 nt, Human
agaaacauccugcuuuccauuu

SEQ ID NO: 931462 - RNA, 22 nt, Human
acagcaugucuaguuaaauacu

SEQ ID NO: 931463 - RNA, 22 nt, Human
aaaaaccuuucauugcaaaugu

SEQ ID NO: 931464 - RNA, 22 nt, Human
gccuucagcggccgcucgcugc

SEQ ID NO: 931465 - RNA, 22 nt, Human
agacuguacuuucugcagcucu

SEQ ID NO: 931466 - RNA, 22 nt, Human
aagcaucuccucaucauuuggg

SEQ ID NO: 931467 - RNA, 22 nt, Human
ugacaauggguggacaagauag

SEQ ID NO: 931468 - RNA, 22 nt, Human
auacacauuacuuucugucuga

SEQ ID NO: 931469 - RNA, 22 nt, Human
acauuuaaguuaaaaccucagu

SEQ ID NO: 931470 - RNA, 22 nt, Human
gagcuucagcgugugcuaaggg

SEQ ID NO: 931471 - RNA, 22 nt, Human
auuguagcccaugcauaaaccg

SEQ ID NO: 931472 - RNA, 22 nt, Human
cuuucccacgcaguggaugaga

SEQ ID NO: 931473 - RNA, 22 nt, Human
ucuggcuccacaccucacugca

SEQ ID NO: 931474 - RNA, 20 nt, Human
aucagacuugcauuucagga

SEQ ID NO: 931475 - RNA, 22 nt, Human
uuuauugaacacuugcacuggc

SEQ ID NO: 931476 - RNA, 22 nt, Human
cagagaaacucagauagcugau

SEQ ID NO: 931477 - RNA, 22 nt, Human
uagauguuuuaacucuugguua

SEQ ID NO: 931478 - RNA, 22 nt, Human
gauggcuuccuucucacugugu

SEQ ID NO: 931479 - RNA, 22 nt, Human
gaacacaagcguaugucuuugu

SEQ ID NO: 931480 - RNA, 22 nt, Human
uuuccaaaguugccauaagcuu

SEQ ID NO: 931481 - RNA, 22 nt, Human
gcaguacuuuaagggaugaagc

SEQ ID NO: 931482 - RNA, 22 nt, Human
aacauuuauucuaauucuggga

SEQ ID NO: 931483 - RNA, 22 nt, Human
cacagugacuggcacauaguaa

SEQ ID NO: 931484 - RNA, 22 nt, Human
cauggcuucgucacagagggca

SEQ ID NO: 931485 - RNA, 22 nt, Human
cuguagcugacaggaucacuua

SEQ ID NO: 931486 - RNA, 22 nt, Human
aguuacaaccaugacacaagca

SEQ ID NO: 931487 - RNA, 19 nt, Human
uuaggaaaccacuuuccuu

SEQ ID NO: 931488 - RNA, 22 nt, Human
ucacaugaguauuauuuuccaa

SEQ ID NO: 931489 - RNA, 22 nt, Human
augaguucauugcauuugacag

SEQ ID NO: 931490 - RNA, 22 nt, Human
cauuuagucaaggacacguggc

SEQ ID NO: 931491 - RNA, 22 nt, Human
ugaaacagucuccagacuugga

SEQ ID NO: 931492 - RNA, 22 nt, Human
acuuuacagaugguuuccugac

SEQ ID NO: 931493 - RNA, 22 nt, Human
ucccugccucucagacuuccuu

SEQ ID NO: 931494 - RNA, 22 nt, Human
uaaucuguugacuaacuuggga

SEQ ID NO: 931495 - RNA, 22 nt, Human
acauuuaccuaguuaagucaau

SEQ ID NO: 931496 - RNA, 22 nt, Human
ugucuucuaccuugacagcauu

SEQ ID NO: 931497 - RNA, 22 nt, Human
cacacuuuguugaaguuuucau

SEQ ID NO: 931498 - RNA, 22 nt, Human
ucagagaaggcugagucacggc

SEQ ID NO: 931499 - RNA, 22 nt, Human
uggcuucuagagcccauccuuc

SEQ ID NO: 931500 - RNA, 22 nt, Human
auacagaagaacuauagccacu

SEQ ID NO: 931501 - RNA, 22 nt, Human
agaaaucugacugcugugcaca

SEQ ID NO: 931502 - RNA, 23 nt, Human
ccugacacaaaaggauucuugcu

SEQ ID NO: 931503 - RNA, 22 nt, Human
aaucuguugucaggaauccaca

SEQ ID NO: 931504 - RNA, 22 nt, Human
accugucugggcuacauuugca

SEQ ID NO: 931505 - RNA, 22 nt, Human
uuacacuuaucuagagccaugg

SEQ ID NO: 931506 - RNA, 20 nt, Human
ucacaugagcuggggcaggc

SEQ ID NO: 931507 - RNA, 22 nt, Human
uuugagcagagaaaggacauga

SEQ ID NO: 931508 - RNA, 20 nt, Human
uuuaccaacucaccaguauc

SEQ ID NO: 931509 - RNA, 22 nt, Human
acuaaauagccucugguaguug

SEQ ID NO: 931510 - RNA, 22 nt, Human
uccccagaggaauaugagauug

SEQ ID NO: 931511 - RNA, 22 nt, Human
uccuucaguuaaagaucucaca

SEQ ID NO: 931512 - RNA, 22 nt, Human
auuuacacuugguuuacuagag

SEQ ID NO: 931513 - RNA, 22 nt, Human
uacacuaaaucuucaucuuuua

SEQ ID NO: 931514 - RNA, 19 nt, Human
ucagacugaaaguuuagau

SEQ ID NO: 931515 - RNA, 22 nt, Human
ugcuugacuuugucacagcaug

SEQ ID NO: 931516 - RNA, 22 nt, Human
auuauucaacacuugagaaauu

SEQ ID NO: 931517 - RNA, 22 nt, Human
auggcuucuagcauugucacaa

SEQ ID NO: 931518 - RNA, 22 nt, Human
cuuuaccagauuccauugcaag

SEQ ID NO: 931519 - RNA, 22 nt, Human
cuuuccugaaaucucuucugca

SEQ ID NO: 931520 - RNA, 22 nt, Human
uucuacauauauuuuucucacu

SEQ ID NO: 931521 - RNA, 22 nt, Human
ugagaauucuacaauagaucaa

SEQ ID NO: 931522 - RNA, 19 nt, Human
cuguggcugaccucuggcc

SEQ ID NO: 931523 - RNA, 22 nt, Human
aaaacaguuauaaacagaguca

SEQ ID NO: 931524 - RNA, 22 nt, Human
acacaugaaagacauuaaggug

SEQ ID NO: 931525 - RNA, 22 nt, Human
uguauuaacauuaauaaaaugg

SEQ ID NO: 931526 - RNA, 22 nt, Human
ucuaaccuuguggucugcuggu

SEQ ID NO: 931527 - RNA, 22 nt, Human
augagcuugguccagcaggcuu

SEQ ID NO: 931528 - RNA, 23 nt, Human
cuuauucauucauguagcccauu

SEQ ID NO: 931529 - RNA, 22 nt, Human
aaccuguuuucuucucaucuag

SEQ ID NO: 931530 - RNA, 22 nt, Human
uucacagaugagaaaauugagg

SEQ ID NO: 931531 - RNA, 22 nt, Human
ggugaccucaccuggucccacc

SEQ ID NO: 931532 - RNA, 21 nt, Human
acagcauguuuguguguuugc

SEQ ID NO: 931533 - RNA, 22 nt, Human
aguuccaaagccuguauucuua

SEQ ID NO: 931534 - RNA, 22 nt, Human
uauuccaaugucaguuauauca

SEQ ID NO: 931535 - RNA, 22 nt, Human
cuguuuaucuaggaguugcagg

SEQ ID NO: 931536 - RNA, 22 nt, Human
acuuuacacaucuuuucucauu

SEQ ID NO: 931537 - RNA, 22 nt, Human
uuaccaaaugaaauagagauuu

SEQ ID NO: 931538 - RNA, 22 nt, Human
aguuuuauuaaauccacagaag

SEQ ID NO: 931539 - RNA, 17 nt, Human
auuccacagggaaucug

SEQ ID NO: 931540 - RNA, 21 nt, Human
gcauuaaaagcaguuguuggu

SEQ ID NO: 931541 - RNA, 22 nt, Human
guaaccugucggaaagccuugu

SEQ ID NO: 931542 - RNA, 22 nt, Human
uccugaaguauggguauggagu

SEQ ID NO: 931543 - RNA, 22 nt, Human
uccuucaguucaauuaguccgu

SEQ ID NO: 931544 - RNA, 20 nt, Human
uauuacacacaaugagcagu

SEQ ID NO: 931545 - RNA, 22 nt, Human
cacauuaagaauaaugagacua

SEQ ID NO: 931546 - RNA, 22 nt, Human
cuguggcucauaucuguaaucu

SEQ ID NO: 931547 - RNA, 22 nt, Human
agaaucaacugaaaauugguga

SEQ ID NO: 931548 - RNA, 22 nt, Human
acacaugaguucucaucuugug

SEQ ID NO: 931549 - RNA, 22 nt, Human
cagcaugaaaaguguugcuauc

SEQ ID NO: 931550 - RNA, 19 nt, Human
ucuuuguacaagucucugc

SEQ ID NO: 931551 - RNA, 20 nt, Human
gucuuauuuaacacaugacu

SEQ ID NO: 931552 - RNA, 22 nt, Human
uuuaucugugguaaauaacauu

SEQ ID NO: 931553 - RNA, 22 nt, Human
aaauccuuuggaggacaugaug

SEQ ID NO: 931554 - RNA, 22 nt, Human
uauacacauuacaguuucagga

SEQ ID NO: 931555 - RNA, 22 nt, Human
gaaauuuacaacuuucucaugg

SEQ ID NO: 931556 - RNA, 22 nt, Human
ugcuggcuuagauaucacugcc

SEQ ID NO: 931557 - RNA, 18 nt, Human
acaaucugaaaccuguca

SEQ ID NO: 931558 - RNA, 20 nt, Human
gaauuuuaugaacacuacca

SEQ ID NO: 931559 - RNA, 22 nt, Human
uagaaacaaagaccugggugcu

SEQ ID NO: 931560 - RNA, 22 nt, Human
ugagaaaacucaaagacagauc

SEQ ID NO: 931561 - RNA, 19 nt, Human
uagcuucacguggucuaga

SEQ ID NO: 931562 - RNA, 20 nt, Human
cagcuucaaugucagcuuga

SEQ ID NO: 931563 - RNA, 22 nt, Human
cuaacuuuuacagucauguugc

SEQ ID NO: 931564 - RNA, 22 nt, Human
auuauucauugguaggcaagcu

SEQ ID NO: 931565 - RNA, 22 nt, Human
agauggcugauuaacuccaugg

SEQ ID NO: 931566 - RNA, 22 nt, Human
cuauggcuguguucaugcuaca

SEQ ID NO: 931567 - RNA, 22 nt, Human
ugacaacagccaucacuuuuag

SEQ ID NO: 931568 - RNA, 18 nt, Human
uggcuucuugagcuaaca

SEQ ID NO: 931569 - RNA, 21 nt, Human
ugucacuuuaagcuagcucua

SEQ ID NO: 931570 - RNA, 22 nt, Human
ucuccuacucacucaaggcuug

SEQ ID NO: 931571 - RNA, 22 nt, Human
aacaugucuuacuuugcuuucu

SEQ ID NO: 931572 - RNA, 22 nt, Human
ucacagaaggaccuuguuucau

SEQ ID NO: 931573 - RNA, 22 nt, Human
aaacaaacauagguuugaaagu

SEQ ID NO: 931574 - RNA, 22 nt, Human
cuaagaaauguugugaaugcca

SEQ ID NO: 931575 - RNA, 22 nt, Human
aagucacaaagugcuguacaug

SEQ ID NO: 931576 - RNA, 22 nt, Human
uuucaacucaugcuaaaggaag

SEQ ID NO: 931577 - RNA, 22 nt, Human
acauuucucccugcaugccugc

SEQ ID NO: 931578 - RNA, 22 nt, Human
aagcuucaucugaugccgaacu

SEQ ID NO: 931579 - RNA, 22 nt, Human
acaguaaagccuucugguugac

SEQ ID NO: 931580 - RNA, 22 nt, Human
uucuacaugagaaaauguauuu

SEQ ID NO: 931581 - RNA, 23 nt, Human
uccugccagaugacuccuuucuu

SEQ ID NO: 931582 - RNA, 22 nt, Human
uuccaauuguucuuuggaaucu

SEQ ID NO: 931583 - RNA, 22 nt, Human
uuuauucacuggggucugcccg

SEQ ID NO: 931584 - RNA, 22 nt, Human
uacuuuuagccuauuugauucu

SEQ ID NO: 931585 - RNA, 22 nt, Human
acccuguuaugguguaacauuu

SEQ ID NO: 931586 - RNA, 22 nt, Human
uauccuguuuugcacaauuaua

SEQ ID NO: 931587 - RNA, 19 nt, Human
ucacucucccugucugucc

SEQ ID NO: 931588 - RNA, 22 nt, Human
ucuuuacauaguguggacuacu

SEQ ID NO: 931589 - RNA, 22 nt, Human
aagucacagcuaaauagcuaag

SEQ ID NO: 931590 - RNA, 22 nt, Human
acauuaguuucucagaucauuu

SEQ ID NO: 931591 - RNA, 22 nt, Human
ccugccuauguaagugguuucu

SEQ ID NO: 931592 - RNA, 22 nt, Human
uagcagugcccuguggaauaag

SEQ ID NO: 931593 - RNA, 22 nt, Human
uagacuuuucaaaaucuagacc

SEQ ID NO: 931594 - RNA, 19 nt, Human
aaugguuugaugaaguaua

SEQ ID NO: 931595 - RNA, 22 nt, Human
uaccaugauguuugaguuacua

SEQ ID NO: 931596 - RNA, 22 nt, Human
cuucaccuccuccucugugggc

SEQ ID NO: 931597 - RNA, 22 nt, Human
cccuggcagcaaucacuggugu

SEQ ID NO: 931598 - RNA, 22 nt, Human
ucagcacugucuauuagugaga

SEQ ID NO: 931599 - RNA, 22 nt, Human
aacacuaaugggagaacaaccc

SEQ ID NO: 931600 - RNA, 22 nt, Human
cagaaacugcuccccugguagg

SEQ ID NO: 931601 - RNA, 22 nt, Human
uaagauuacagugagaaauaaa

SEQ ID NO: 931602 - RNA, 22 nt, Human
cagauaacugaaauaucauacc

SEQ ID NO: 931603 - RNA, 22 nt, Human
acacacuggcccccaguacuga

SEQ ID NO: 931604 - RNA, 22 nt, Human
cuggcuucagcugccaucaaug

SEQ ID NO: 931605 - RNA, 22 nt, Human
gacaaaacugagaucacacugu

SEQ ID NO: 931606 - RNA, 22 nt, Human
auuuugugaacccucaagcaau

SEQ ID NO: 931607 - RNA, 22 nt, Human
acaagucuguuaugcaccugga

SEQ ID NO: 931608 - RNA, 22 nt, Human
uagcacauuguugaccagaagg

SEQ ID NO: 931609 - RNA, 22 nt, Human
agcaacaggcauaauguguuga

SEQ ID NO: 931610 - RNA, 22 nt, Human
uuucacagcuuccacuuaagga

SEQ ID NO: 931611 - RNA, 21 nt, Human
ugcuaggccauauugguugcu

SEQ ID NO: 931612 - RNA, 22 nt, Human
guaaccuggaaguuuagggaag

SEQ ID NO: 931613 - RNA, 22 nt, Human
gauacacacccuugauaggacu

SEQ ID NO: 931614 - RNA, 22 nt, Human
cuuauucauauauucucgguag

SEQ ID NO: 931615 - RNA, 22 nt, Human
uuccuuguucuacaucccugcc

SEQ ID NO: 931616 - RNA, 22 nt, Human
uuacacuucuaaaaaaagcagg

SEQ ID NO: 931617 - RNA, 22 nt, Human
uaaccugcaacagaucugucuu

SEQ ID NO: 931618 - RNA, 22 nt, Human
uuaacaaaaauaucaggcauca

SEQ ID NO: 931619 - RNA, 22 nt, Human
uauuaugagguauuuggacuuu

SEQ ID NO: 931620 - RNA, 22 nt, Human
acccugaagaaacuucuaagug

SEQ ID NO: 931621 - RNA, 22 nt, Human
ugcucuggguucuugcuguuac

SEQ ID NO: 931622 - RNA, 20 nt, Human
gcuucuuuucuggcccauga

SEQ ID NO: 931623 - RNA, 22 nt, Human
aaugucuucaguguauacaugg

SEQ ID NO: 931624 - RNA, 22 nt, Human
uauuccaacugucauagucaua

SEQ ID NO: 931625 - RNA, 21 nt, Human
acacugugucauaaugcuuaa

SEQ ID NO: 931626 - RNA, 22 nt, Human
gcagagaacccagcagauuggc

SEQ ID NO: 931627 - RNA, 21 nt, Human
uccuucaguucugcacuuucu

SEQ ID NO: 931628 - RNA, 22 nt, Human
uacaugucuggguuuuguuucc

SEQ ID NO: 931629 - RNA, 22 nt, Human
cacagaaauauugugucccuug

SEQ ID NO: 931630 - RNA, 22 nt, Human
uguuuauagauggccacaauga

SEQ ID NO: 931631 - RNA, 22 nt, Human
aaaagacaucuauuucaggcag

SEQ ID NO: 931632 - RNA, 22 nt, Human
uuucccuacuuguaacuggaaa

SEQ ID NO: 931633 - RNA, 22 nt, Human
augcuguuaagaaucucuuccu

SEQ ID NO: 931634 - RNA, 22 nt, Human
uauaaccuuuucuuuauccucc

SEQ ID NO: 931635 - RNA, 22 nt, Human
uauuacacuuucuucuucaagc

SEQ ID NO: 931636 - RNA, 22 nt, Human
aaccagugaaacaccaggcaag

SEQ ID NO: 931637 - RNA, 18 nt, Human
ucucuucuuggcagucaa

SEQ ID NO: 931638 - RNA, 22 nt, Human
ucacaaauguuugcaugugucu

SEQ ID NO: 931639 - RNA, 22 nt, Human
aguaaacaguaucuuuaguguc

SEQ ID NO: 931640 - RNA, 22 nt, Human
acauucuauagcaagcugaucu

SEQ ID NO: 931641 - RNA, 22 nt, Human
ucaacaguugcacuggagaggu

SEQ ID NO: 931642 - RNA, 22 nt, Human
aacuuguaggacugcacuguag

SEQ ID NO: 931643 - RNA, 22 nt, Human
acauuucuucccuuuagcagaa

SEQ ID NO: 931644 - RNA, 22 nt, Human
augaugaaaacugaagguuagg

SEQ ID NO: 931645 - RNA, 19 nt, Human
uuacaucugcaacacuggu

SEQ ID NO: 931646 - RNA, 22 nt, Human
acacaaugucaucauaauguca

SEQ ID NO: 931647 - RNA, 22 nt, Human
auggcuucucgcuggcaccugu

SEQ ID NO: 931648 - RNA, 22 nt, Human
uuccaaauuaaaauguacaaug

SEQ ID NO: 931649 - RNA, 22 nt, Human
agauggcuuagccuggcuccca

SEQ ID NO: 931650 - RNA, 22 nt, Human
uauuccaaaauaguuaagcacu

SEQ ID NO: 931651 - RNA, 22 nt, Human
cuagcuucaaguccuggcugug

SEQ ID NO: 931652 - RNA, 22 nt, Human
uugacuuuucuuggucacauga

SEQ ID NO: 931653 - RNA, 22 nt, Human
ugcuuugcaaauaauagaaugu

SEQ ID NO: 931654 - RNA, 22 nt, Human
auaaccugguaguauuaaaugu

SEQ ID NO: 931655 - RNA, 22 nt, Human
cacauuuaggagguggggaagc

SEQ ID NO: 931656 - RNA, 22 nt, Human
caucuguuuccuaaucuguagc

SEQ ID NO: 931657 - RNA, 22 nt, Human
aaaguaacaauaagguucuauu

SEQ ID NO: 931658 - RNA, 22 nt, Human
ucacagaagcaucauacccgga

SEQ ID NO: 931659 - RNA, 22 nt, Human
ccuggcaccuguguuuucugga

SEQ ID NO: 931660 - RNA, 22 nt, Human
cccugugcugucaugcugggcg

SEQ ID NO: 931661 - RNA, 22 nt, Human
auauuaaauggauuuugggagc

SEQ ID NO: 931662 - RNA, 22 nt, Human
uuugugaauagguuggcuucca

SEQ ID NO: 931663 - RNA, 23 nt, Human
uaaauuucuugauucuuauguga

SEQ ID NO: 931664 - RNA, 22 nt, Human
auggcucucuagggcccagguu

SEQ ID NO: 931665 - RNA, 22 nt, Human
gugaaggaggggccacagauau

SEQ ID NO: 931666 - RNA, 22 nt, Human
cuacacuuugguugacuuugug

SEQ ID NO: 931667 - RNA, 22 nt, Human
cacacaugugugcagcuuagaa

SEQ ID NO: 931668 - RNA, 22 nt, Human
agagaauuacagaagaauguca

SEQ ID NO: 931669 - RNA, 22 nt, Human
ucaccacuaggaauuguguagu

SEQ ID NO: 931670 - RNA, 22 nt, Human
ugucucaucucuuaaccccacu

SEQ ID NO: 931671 - RNA, 22 nt, Human
gcaguaggagggacaacuaccu

SEQ ID NO: 931672 - RNA, 22 nt, Human
auacccuuuacaggaacagcaa

SEQ ID NO: 931673 - RNA, 22 nt, Human
cacacaugacccacuuuuaccg

SEQ ID NO: 931674 - RNA, 22 nt, Human
agcagucauuuuaggucaugca

SEQ ID NO: 931675 - RNA, 22 nt, Human
auccacagugcagcaagggccc

SEQ ID NO: 931676 - RNA, 22 nt, Human
ccugucacgaugacugcacucu

SEQ ID NO: 931677 - RNA, 22 nt, Human
cugcuugggguuaggguguccu

SEQ ID NO: 931678 - RNA, 22 nt, Human
acugucuuccaggucuggaggu

SEQ ID NO: 931679 - RNA, 22 nt, Human
uacaguaaccuuauuugucauu

SEQ ID NO: 931680 - RNA, 21 nt, Human
aauaaccacuaauauaguggc

SEQ ID NO: 931681 - RNA, 22 nt, Human
uuuguuuucaaugugucauuca

SEQ ID NO: 931682 - RNA, 22 nt, Human
ucaacaaauacuuaaagcagag

SEQ ID NO: 931683 - RNA, 22 nt, Human
acuacacagggaugugacuacc

SEQ ID NO: 931684 - RNA, 22 nt, Human
auaguuuuauagauauugugua

SEQ ID NO: 931685 - RNA, 22 nt, Human
gacacuuuuuuaaagcucauua

SEQ ID NO: 931686 - RNA, 22 nt, Human
aaucuguuuccaauacuugcua

SEQ ID NO: 931687 - RNA, 22 nt, Human
gaacaguaacugucugcugugu

SEQ ID NO: 931688 - RNA, 22 nt, Human
ccugucaccuagguacugagca

SEQ ID NO: 931689 - RNA, 22 nt, Human
acauucuauucugcaggacaag

SEQ ID NO: 931690 - RNA, 22 nt, Human
aaaucguuauaauguuaagccu

SEQ ID NO: 931691 - RNA, 22 nt, Human
uauuaugaucgugacucaagga

SEQ ID NO: 931692 - RNA, 22 nt, Human
acacauguauguuuuguauuug

SEQ ID NO: 931693 - RNA, 23 nt, Human
ucuuuacauacugaugaguucuc

SEQ ID NO: 931694 - RNA, 22 nt, Human
auggaguuuggggucaaauacu

SEQ ID NO: 931695 - RNA, 23 nt, Human
agaucacauaguuaucagaugac

SEQ ID NO: 931696 - RNA, 22 nt, Human
augaguuaguuucuugucuaga

SEQ ID NO: 931697 - RNA, 22 nt, Human
agcaguuguagucauggaaaau

SEQ ID NO: 931698 - RNA, 20 nt, Human
ccuucuccagcuuguucuug

SEQ ID NO: 931699 - RNA, 22 nt, Human
ccuguuguuuagcacuuagaac

SEQ ID NO: 931700 - RNA, 22 nt, Human
augugcuuucuuuccaaggggc

SEQ ID NO: 931701 - RNA, 22 nt, Human
auugaguaguaggaaaauaacu

SEQ ID NO: 931702 - RNA, 22 nt, Human
ucuagaaaaccaauauuacaug

SEQ ID NO: 931703 - RNA, 22 nt, Human
auuuaccauccugugaauggcc

SEQ ID NO: 931704 - RNA, 22 nt, Human
uuuacucaaguaugcauuuaug

SEQ ID NO: 931705 - RNA, 22 nt, Human
uguuuguagagacagcugaugc

SEQ ID NO: 931706 - RNA, 22 nt, Human
cacauuuagagguuagcauggu

SEQ ID NO: 931707 - RNA, 22 nt, Human
ccuuuacaaaguucuucauggg

SEQ ID NO: 931708 - RNA, 22 nt, Human
ucccuucaauaauucaacauua

SEQ ID NO: 931709 - RNA, 22 nt, Human
uauaaccuggauucuggcacua

SEQ ID NO: 931710 - RNA, 22 nt, Human
agcacuuuaagcaacagaucaa

SEQ ID NO: 931711 - RNA, 22 nt, Human
ucaccacugaacagaccuuugg

SEQ ID NO: 931712 - RNA, 22 nt, Human
uucccgucuuugcuaugccugc

SEQ ID NO: 931713 - RNA, 22 nt, Human
uaaccaugcaugucucuaguuu

SEQ ID NO: 931714 - RNA, 22 nt, Human
uuucucugggcacucuccaaac

SEQ ID NO: 931715 - RNA, 22 nt, Human
uuaaauggagggggaaauacgu

SEQ ID NO: 931716 - RNA, 22 nt, Human
gcuucuacccacgagaugcaaa

SEQ ID NO: 931717 - RNA, 22 nt, Human
gaguaauuuucuugauuucuua

SEQ ID NO: 931718 - RNA, 22 nt, Human
cauggcuuucccucaagagcaa

SEQ ID NO: 931719 - RNA, 22 nt, Human
uucaucuguagcaucuuccaau

SEQ ID NO: 931720 - RNA, 22 nt, Human
cuacacuugcaugagucuugaa

SEQ ID NO: 931721 - RNA, 22 nt, Human
gucacaaagcgcgguggucggu

SEQ ID NO: 931722 - RNA, 22 nt, Human
auggaaaugauggaacauuaaa

SEQ ID NO: 931723 - RNA, 21 nt, Human
uauggcuuuacuaagcugcac

SEQ ID NO: 931724 - RNA, 22 nt, Human
aaacuucagacuccccacuucu

SEQ ID NO: 931725 - RNA, 22 nt, Human
ggcucugccacuucuuggcugu

SEQ ID NO: 931726 - RNA, 22 nt, Human
caugagaaccaggucuguguuu

SEQ ID NO: 931727 - RNA, 23 nt, Human
guaggaauuuucacuuccucuug

SEQ ID NO: 931728 - RNA, 22 nt, Human
cagugcuuugggaggcugagga

SEQ ID NO: 931729 - RNA, 22 nt, Human
ugucucuuggauugcuugcucu

SEQ ID NO: 931730 - RNA, 22 nt, Human
aaaucguuucguuccugguuuu

SEQ ID NO: 931731 - RNA, 22 nt, Human
acugaguuauggguaugccuug

SEQ ID NO: 931732 - RNA, 22 nt, Human
accacuuuacagaaauggaaag

SEQ ID NO: 931733 - RNA, 22 nt, Human
uuacaguuuaccaagaauauug

SEQ ID NO: 931734 - RNA, 22 nt, Human
gagcacuguacucauuugcacu

SEQ ID NO: 931735 - RNA, 17 nt, Human
uauacacagacagacug

SEQ ID NO: 931736 - RNA, 22 nt, Human
cagcaacauauaugaaacugug

SEQ ID NO: 931737 - RNA, 22 nt, Human
aaccuguuuugauuaacaagua

SEQ ID NO: 931738 - RNA, 22 nt, Human
uccugccauuugcuuuuucucc

SEQ ID NO: 931739 - RNA, 22 nt, Human
uuauacaguuuauacuuagaau

SEQ ID NO: 931740 - RNA, 22 nt, Human
auucauucuugguaugaacagc

SEQ ID NO: 931741 - RNA, 22 nt, Human
auuuauugguuugcauggugaa

SEQ ID NO: 931742 - RNA, 22 nt, Human
agcaggaaggucugugugaguc

SEQ ID NO: 931743 - RNA, 22 nt, Human
auccacuuggcugguuguucua

SEQ ID NO: 931744 - RNA, 22 nt, Human
uuauugaaggaacugaaauaaa

SEQ ID NO: 931745 - RNA, 22 nt, Human
gcacaugagcugcugggauggg

SEQ ID NO: 931746 - RNA, 20 nt, Human
acauuugaguaucaucuacu

SEQ ID NO: 931747 - RNA, 22 nt, Human
gacauuuagguagcuuccaguu

SEQ ID NO: 931748 - RNA, 22 nt, Human
uauucacaguugauuuacaguu

SEQ ID NO: 931749 - RNA, 22 nt, Human
uuauucaccucuauuagacuca

SEQ ID NO: 931750 - RNA, 22 nt, Human
gcuucucccuacagaugucagu

SEQ ID NO: 931751 - RNA, 22 nt, Human
ucuaaccuuugaaacugcuuuc

SEQ ID NO: 931752 - RNA, 21 nt, Human
uuguagcuuguuagaccaugu

SEQ ID NO: 931753 - RNA, 23 nt, Human
agcuucgccuuccuuucucugca

SEQ ID NO: 931754 - RNA, 22 nt, Human
cuguggcugcagccuugguccu

SEQ ID NO: 931755 - RNA, 23 nt, Human
aucaccagcggaagcugcagacc

SEQ ID NO: 931756 - RNA, 20 nt, Human
cuguggcucaugcaucugcc

SEQ ID NO: 931757 - RNA, 22 nt, Human
acuuucaagaacuucuuuaaug

SEQ ID NO: 931758 - RNA, 19 nt, Human
uuuauucaccuuuaccuug

SEQ ID NO: 931759 - RNA, 22 nt, Human
cuacaugaauggguguauuacu

SEQ ID NO: 931760 - RNA, 20 nt, Human
uuaugcaagcaucaauauug

SEQ ID NO: 931761 - RNA, 22 nt, Human
gcagagaaggauugaaaccaga

SEQ ID NO: 931762 - RNA, 22 nt, Human
cauggcuuagaaguuccagccc

SEQ ID NO: 931763 - RNA, 22 nt, Human
cagaaacauguauaaaguugua

SEQ ID NO: 931764 - RNA, 22 nt, Human
ucuuuacaagucacauuuucug

SEQ ID NO: 931765 - RNA, 22 nt, Human
ucuccucugugccacagcuugg

SEQ ID NO: 931766 - RNA, 22 nt, Human
uaugaaaauuuagcugaagcau

SEQ ID NO: 931767 - RNA, 22 nt, Human
uaagcuucaaagaacauauugg

SEQ ID NO: 931768 - RNA, 22 nt, Human
ucuuuacacaagacaagaauaa

SEQ ID NO: 931769 - RNA, 22 nt, Human
augaaggauggcuggcugcccu

SEQ ID NO: 931770 - RNA, 21 nt, Human
agaaaaacacgauauaagccc

SEQ ID NO: 931771 - RNA, 22 nt, Human
guuuacacuccaggcuggggug

SEQ ID NO: 931772 - RNA, 22 nt, Human
aguggaccagaagacugaagcu

SEQ ID NO: 931773 - RNA, 22 nt, Human
uuugcuuguucaagauuucugu

SEQ ID NO: 931774 - RNA, 22 nt, Human
uauggcuucuuuugcaacuacu

SEQ ID NO: 931775 - RNA, 22 nt, Human
acagcaguuacugaaauaaagu

SEQ ID NO: 931776 - RNA, 22 nt, Human
auucagagauuguuauucagac

SEQ ID NO: 931777 - RNA, 22 nt, Human
guggcuuccaagacuaagucac

SEQ ID NO: 931778 - RNA, 22 nt, Human
ucuggcuccguguccgcuccca

SEQ ID NO: 931779 - RNA, 22 nt, Human
cacaugguggugcuugauaagc

SEQ ID NO: 931780 - RNA, 22 nt, Human
uacaacagacaggaauaagauu

SEQ ID NO: 931781 - RNA, 22 nt, Human
ugucaucuguguuuugcuggag

SEQ ID NO: 931782 - RNA, 22 nt, Human
aaacaguguuuuuaugauuuau

SEQ ID NO: 931783 - RNA, 22 nt, Human
uuuguaacugagugcucagagc

SEQ ID NO: 931784 - RNA, 22 nt, Human
ccuuuacaguagcccuuuugaa

SEQ ID NO: 931785 - RNA, 22 nt, Human
cuugcuugauuaugaucauaaa

SEQ ID NO: 931786 - RNA, 22 nt, Human
aaaccauggaguaaguucacau

SEQ ID NO: 931787 - RNA, 22 nt, Human
auggccuuggcugcagagacau

SEQ ID NO: 931788 - RNA, 22 nt, Human
acauuuagcuguacaaucuaug

SEQ ID NO: 931789 - RNA, 22 nt, Human
gaguuacauggacauucucucc

SEQ ID NO: 931790 - RNA, 22 nt, Human
cacuuuuaacaggagaauuccc

SEQ ID NO: 931791 - RNA, 22 nt, Human
cagugccauauugaaagacauu

SEQ ID NO: 931792 - RNA, 22 nt, Human
ucacaugagucacuaucuuaau

SEQ ID NO: 931793 - RNA, 22 nt, Human
uaacacaugguuaguacacaau

SEQ ID NO: 931794 - RNA, 22 nt, Human
uacccaaggcccuuucaauuuc

SEQ ID NO: 931795 - RNA, 22 nt, Human
aaauacuguccaccauggagca

SEQ ID NO: 931796 - RNA, 22 nt, Human
uucuauugggcagcauugcuuc

SEQ ID NO: 931797 - RNA, 21 nt, Human
ucucacugucugcuuuguuua

SEQ ID NO: 931798 - RNA, 22 nt, Human
aaucuaacuucauagcugauuu

SEQ ID NO: 931799 - RNA, 22 nt, Human
augugcuuuauuaaguaaaaau

SEQ ID NO: 931800 - RNA, 22 nt, Human
ccacaguaaagaaacaacuucg

SEQ ID NO: 931801 - RNA, 22 nt, Human
ggcuucuccccuuugagucuuc

SEQ ID NO: 931802 - RNA, 22 nt, Human
aaaaaccuuucccauacuaaga

SEQ ID NO: 931803 - RNA, 22 nt, Human
guuccacaaaaggucuaguuua

SEQ ID NO: 931804 - RNA, 22 nt, Human
ugcuugacuuaguuucucauuu

SEQ ID NO: 931805 - RNA, 22 nt, Human
cacauuuaaagguugaagcuga

SEQ ID NO: 931806 - RNA, 22 nt, Human
cuuacacacuagaugguaggug

SEQ ID NO: 931807 - RNA, 22 nt, Human
cacauuuaucuguucuuucuag

SEQ ID NO: 931808 - RNA, 21 nt, Human
auucagaguaauucaucuuua

SEQ ID NO: 931809 - RNA, 22 nt, Human
uagucuuuuuaauaaauaaugc

SEQ ID NO: 931810 - RNA, 22 nt, Human
ccugugcucccuauguaucugg

SEQ ID NO: 931811 - RNA, 22 nt, Human
uaguuacagugcauagcaagau

SEQ ID NO: 931812 - RNA, 22 nt, Human
cacauuuaagugcuuguucaga

SEQ ID NO: 931813 - RNA, 22 nt, Human
uuaggaaaggguuuucuaacag

SEQ ID NO: 931814 - RNA, 22 nt, Human
uaacaguauauuuaccaaaccu

SEQ ID NO: 931815 - RNA, 22 nt, Human
ucagcuucucaaaauggcuuag

SEQ ID NO: 931816 - RNA, 22 nt, Human
cugugcuucagagucagugcug

SEQ ID NO: 931817 - RNA, 22 nt, Human
cauggcuuacuuucagggagua

SEQ ID NO: 931818 - RNA, 22 nt, Human
aagagcauuuggugagauuuga

SEQ ID NO: 931819 - RNA, 22 nt, Human
aaaucguggaagacaccagugg

SEQ ID NO: 931820 - RNA, 20 nt, Human
uauggcuugcagccacccuu

SEQ ID NO: 931821 - RNA, 22 nt, Human
caugaugucacagagaagcaca

SEQ ID NO: 931822 - RNA, 17 nt, Human
acacaagcaccuugagg

SEQ ID NO: 931823 - RNA, 22 nt, Human
guuuauucuucagcaacaucug

SEQ ID NO: 931824 - RNA, 22 nt, Human
uauacacauaucuucuaggccu

SEQ ID NO: 931825 - RNA, 22 nt, Human
cuagucacuguaauaaucugcu

SEQ ID NO: 931826 - RNA, 22 nt, Human
acauuguacucuuagcguuguu

SEQ ID NO: 931827 - RNA, 22 nt, Human
auuuugaaaagcauuugaguaa

SEQ ID NO: 931828 - RNA, 22 nt, Human
uggaauucccaaguaacuuuua

SEQ ID NO: 931829 - RNA, 22 nt, Human
agaaacaacuuguuucucuugc

SEQ ID NO: 931830 - RNA, 22 nt, Human
gauggcuucagucuccuugggu

SEQ ID NO: 931831 - RNA, 22 nt, Human
auccacuugccacuguauaguu

SEQ ID NO: 931832 - RNA, 22 nt, Human
uggcuucucccucugccugauu

SEQ ID NO: 931833 - RNA, 22 nt, Human
uuucucugugggcuuuaugcau

SEQ ID NO: 931834 - RNA, 22 nt, Human
aaucuguuccugaggcaccaga

SEQ ID NO: 931835 - RNA, 22 nt, Human
cagcagagaugagauuccuaua

SEQ ID NO: 931836 - RNA, 22 nt, Human
aaucauguacugcuguggcuuu

SEQ ID NO: 931837 - RNA, 22 nt, Human
aaacaguagaaguguauuuuau

SEQ ID NO: 931838 - RNA, 22 nt, Human
cagaaacacuuguagagaaguu

SEQ ID NO: 931839 - RNA, 19 nt, Human
uagacuuuuccagcaggca

SEQ ID NO: 931840 - RNA, 22 nt, Human
agauggcugauggcaggagcca

SEQ ID NO: 931841 - RNA, 22 nt, Human
gacaauuagaucauuccuuuga

SEQ ID NO: 931842 - RNA, 22 nt, Human
aaacaaugaaauucauucuuca

SEQ ID NO: 931843 - RNA, 22 nt, Human
aacuguugucauauggucuuaa

SEQ ID NO: 931844 - RNA, 22 nt, Human
cugugcuuagccaucacauuca

SEQ ID NO: 931845 - RNA, 22 nt, Human
aguaaacacugucuuuauauau

SEQ ID NO: 931846 - RNA, 22 nt, Human
cuacaaauauguuaagguguuu

SEQ ID NO: 931847 - RNA, 22 nt, Human
gucacaaaggugagggacauga

SEQ ID NO: 931848 - RNA, 22 nt, Human
cuggcccuaugagccuccugau

SEQ ID NO: 931849 - RNA, 18 nt, Human
ugcucuggucucacuugg

SEQ ID NO: 931850 - RNA, 22 nt, Human
ccacaagacucugucagcauaa

SEQ ID NO: 931851 - RNA, 22 nt, Human
aacagcaucaccccauaacauu

SEQ ID NO: 931852 - RNA, 22 nt, Human
agaaacaucauuguuugguauu

SEQ ID NO: 931853 - RNA, 22 nt, Human
guggaccaagguggaagauaaa

SEQ ID NO: 931854 - RNA, 22 nt, Human
auuauucaaucauauuaaaagu

SEQ ID NO: 931855 - RNA, 22 nt, Human
caugcagugguaaaaagucagg

SEQ ID NO: 931856 - RNA, 22 nt, Human
ucacagaacaauguuuaguucu

SEQ ID NO: 931857 - RNA, 22 nt, Human
cuacacuuguucgacugcagga

SEQ ID NO: 931858 - RNA, 22 nt, Human
acuguuacagagcaggaaauug

SEQ ID NO: 931859 - RNA, 22 nt, Human
uagagcuauuuaucagccagaa

SEQ ID NO: 931860 - RNA, 22 nt, Human
aucuggcuuuuacugaauugcu

SEQ ID NO: 931861 - RNA, 19 nt, Human
acauuuaaauucagaucuc

SEQ ID NO: 931862 - RNA, 22 nt, Human
cuacaacauuaugcuuucuguc

SEQ ID NO: 931863 - RNA, 22 nt, Human
uacacuauuuuacugauacaaa

SEQ ID NO: 931864 - RNA, 22 nt, Human
uugugggauggcucuucccaaa

SEQ ID NO: 931865 - RNA, 22 nt, Human
accuuuuauguaaauauauguu

SEQ ID NO: 931866 - RNA, 22 nt, Human
acacuguuccugaaauuguuau

SEQ ID NO: 931867 - RNA, 22 nt, Human
acacauuaggcagugcuuaaau

SEQ ID NO: 931868 - RNA, 22 nt, Human
uuuuacacuucgguugugugca

SEQ ID NO: 931869 - RNA, 22 nt, Human
ucucuucugaccuagccuugga

SEQ ID NO: 931870 - RNA, 22 nt, Human
uuccacugaaggaucuagggaa

SEQ ID NO: 931871 - RNA, 22 nt, Human
ccuuuacacauggaaugggucu

SEQ ID NO: 931872 - RNA, 22 nt, Human
uauuaugauucggacguggcag

SEQ ID NO: 931873 - RNA, 22 nt, Human
cuucacacccacuaaaaugaug

SEQ ID NO: 931874 - RNA, 22 nt, Human
cagaaacaggcaacgugugcac

SEQ ID NO: 931875 - RNA, 22 nt, Human
cuggcccuucucuugcuuccug

SEQ ID NO: 931876 - RNA, 17 nt, Human
uccuucagugccucugc

SEQ ID NO: 931877 - RNA, 22 nt, Human
cacagaauggaccaguuuuaga

SEQ ID NO: 931878 - RNA, 22 nt, Human
agaaacauuuagauuauauguc

SEQ ID NO: 931879 - RNA, 22 nt, Human
agugaaagguugagaauauucu

SEQ ID NO: 931880 - RNA, 22 nt, Human
cuauacacuuuuugaaaauaga

SEQ ID NO: 931881 - RNA, 22 nt, Human
gcagcagugcgggcagcuacag

SEQ ID NO: 931882 - RNA, 17 nt, Human
acacagagauuaacaca

SEQ ID NO: 931883 - RNA, 22 nt, Human
uauggcuuuaaacuuuucauuu

SEQ ID NO: 931884 - RNA, 23 nt, Human
uauacacauguggcaguauagug

SEQ ID NO: 931885 - RNA, 22 nt, Human
cccuggcagaaugucucugggc

SEQ ID NO: 931886 - RNA, 22 nt, Human
cuucagaagaaaagcagugugu

SEQ ID NO: 931887 - RNA, 18 nt, Human
agcagagagugaauggga

SEQ ID NO: 931888 - RNA, 22 nt, Human
uacacaugcucagauuccugug

SEQ ID NO: 931889 - RNA, 22 nt, Human
cuuguagcugcuucuucugaag

SEQ ID NO: 931890 - RNA, 22 nt, Human
cuucuucuggacaggcagcucc

SEQ ID NO: 931891 - RNA, 22 nt, Human
cuaaccugcauggcagcuagaa

SEQ ID NO: 931892 - RNA, 21 nt, Human
gcagcaguguucuagaauacu

SEQ ID NO: 931893 - RNA, 22 nt, Human
cuucugugcgccucuauucccu

SEQ ID NO: 931894 - RNA, 22 nt, Human
uguuacacccacaaaaaauucc

SEQ ID NO: 931895 - RNA, 22 nt, Human
ucauuuauagcuaaccuugaau

SEQ ID NO: 931896 - RNA, 22 nt, Human
aacauuuacaaauccuucugca

SEQ ID NO: 931897 - RNA, 22 nt, Human
augaaauuugcugcuaaguucc

SEQ ID NO: 931898 - RNA, 18 nt, Human
cuccccuguuuucccugc

SEQ ID NO: 931899 - RNA, 23 nt, Human
ugcuggcuguguuauugccaaca

SEQ ID NO: 931900 - RNA, 23 nt, Human
uauggcuuacagugcuuuaggua

SEQ ID NO: 931901 - RNA, 22 nt, Human
uggcuaagauuuaaauguuugc

SEQ ID NO: 931902 - RNA, 22 nt, Human
uucacaaaaaugcugaacaguu

SEQ ID NO: 931903 - RNA, 22 nt, Human
uguaugcuuuccuucuuucugg

SEQ ID NO: 931904 - RNA, 22 nt, Human
acaagcagagauuaaauguuuu

SEQ ID NO: 931905 - RNA, 21 nt, Human
uuggauguauuuauguuuuag

SEQ ID NO: 931906 - RNA, 22 nt, Human
auacagaauacuaauuccugag

SEQ ID NO: 931907 - RNA, 22 nt, Human
caaaacauucagagagcucacu

SEQ ID NO: 931908 - RNA, 22 nt, Human
ucacaugagguuaugacaaagc

SEQ ID NO: 931909 - RNA, 22 nt, Human
caaauagacucuagaauuuauu

SEQ ID NO: 931910 - RNA, 22 nt, Human
cuuuuacaguggaccugccauu

SEQ ID NO: 931911 - RNA, 22 nt, Human
uggcuucauucagcaugacagu

SEQ ID NO: 931912 - RNA, 22 nt, Human
aaacaugaauagauauuaaaca

SEQ ID NO: 931913 - RNA, 20 nt, Human
acuuuacagagaagacugac

SEQ ID NO: 931914 - RNA, 22 nt, Human
cagcagagcuuauuaacuaaaa

SEQ ID NO: 931915 - RNA, 22 nt, Human
ugugaaacggagucagggaagg

SEQ ID NO: 931916 - RNA, 22 nt, Human
agaguaacuuuuaacuuuacgu

SEQ ID NO: 931917 - RNA, 22 nt, Human
gcuuuacaugagaugaggacaa

SEQ ID NO: 931918 - RNA, 22 nt, Human
cacauuaaaauccuaacuucca

SEQ ID NO: 931919 - RNA, 22 nt, Human
cauggcuucugaucaaggaacu

SEQ ID NO: 931920 - RNA, 22 nt, Human
gaucuguuuuuucuuagacagu

SEQ ID NO: 931921 - RNA, 20 nt, Human
cuaaccuuaaccaucaccag

SEQ ID NO: 931922 - RNA, 22 nt, Human
acagaugauuuuuaugaaaaca

SEQ ID NO: 931923 - RNA, 22 nt, Human
uugcuuggcaggcuuccagucu

SEQ ID NO: 931924 - RNA, 22 nt, Human
ggcugaggcggcgaugcccuug

SEQ ID NO: 931925 - RNA, 22 nt, Human
aagcuguuggcagauagcucug

SEQ ID NO: 931926 - RNA, 22 nt, Human
cacacaugaaucccuaguaccu

SEQ ID NO: 931927 - RNA, 22 nt, Human
uuauugcagauggugugagaga

SEQ ID NO: 931928 - RNA, 22 nt, Human
cagcaaggucugucaauagugg

SEQ ID NO: 931929 - RNA, 22 nt, Human
acuuugcacuucaauauaacuu

SEQ ID NO: 931930 - RNA, 22 nt, Human
ugauucagaccugucagacuuc

SEQ ID NO: 931931 - RNA, 22 nt, Human
uacacagacucuucaauucaga

SEQ ID NO: 931932 - RNA, 22 nt, Human
cuaacuuuuugauucuugggga

SEQ ID NO: 931933 - RNA, 22 nt, Human
aauuagaagggaguuauugaua

SEQ ID NO: 931934 - RNA, 22 nt, Human
uucagacuagacacauuucaag

SEQ ID NO: 931935 - RNA, 22 nt, Human
aaucauguccaucuuaacuuuc

SEQ ID NO: 931936 - RNA, 22 nt, Human
guuacacacaauauauccuaaa

SEQ ID NO: 931937 - RNA, 22 nt, Human
ggcucccugggugcuccugcuc

SEQ ID NO: 931938 - RNA, 22 nt, Human
accuuuaucgccaucauugugc

SEQ ID NO: 931939 - RNA, 22 nt, Human
auuucacagcugcuguucaggu

SEQ ID NO: 931940 - RNA, 23 nt, Human
uguaacuuugggcauguugcuuc

SEQ ID NO: 931941 - RNA, 22 nt, Human
aaaugacagaguaagcuguuua

SEQ ID NO: 931942 - RNA, 22 nt, Human
auucuagcugaguaucagcccc

SEQ ID NO: 931943 - RNA, 22 nt, Human
gcuuuacauuuuggaaagguga

SEQ ID NO: 931944 - RNA, 22 nt, Human
auggcugagaugggcuccaggc

SEQ ID NO: 931945 - RNA, 22 nt, Human
aguucacauuccgagguacugg

SEQ ID NO: 931946 - RNA, 22 nt, Human
agugaauucugcacuacugaag

SEQ ID NO: 931947 - RNA, 22 nt, Human
guuccacaucacacuacuugau

SEQ ID NO: 931948 - RNA, 22 nt, Human
aucuguuguuuguuugcuaaag

SEQ ID NO: 931949 - RNA, 22 nt, Human
aauuaagagagaguugaagcaa

SEQ ID NO: 931950 - RNA, 22 nt, Human
uauuacacagugaaagcaugga

SEQ ID NO: 931951 - RNA, 22 nt, Human
auggcucugagaaccugagcua

SEQ ID NO: 931952 - RNA, 22 nt, Human
cagaacaugauauaaacagaag

SEQ ID NO: 931953 - RNA, 22 nt, Human
uuaaauuauuucuagugaggug

SEQ ID NO: 931954 - RNA, 22 nt, Human
cccugugccuaguuggccuaaa

SEQ ID NO: 931955 - RNA, 22 nt, Human
aauugcuuuaguuaccauagug

SEQ ID NO: 931956 - RNA, 22 nt, Human
acagagcaacuuuauuucaugg

SEQ ID NO: 931957 - RNA, 20 nt, Human
ugacaaaugaucugauuuuc

SEQ ID NO: 931958 - RNA, 22 nt, Human
aacauuuauugagcaccuacug

SEQ ID NO: 931959 - RNA, 22 nt, Human
uccugcgagugcgcuuuugguc

SEQ ID NO: 931960 - RNA, 22 nt, Human
cauggcuuguaauaaauuuaua

SEQ ID NO: 931961 - RNA, 22 nt, Human
uagaaacauucaguugcagucc

SEQ ID NO: 931962 - RNA, 22 nt, Human
gaagagcuccaaaaacagugag

SEQ ID NO: 931963 - RNA, 20 nt, Human
uuuaccaaaggaguuaugau

SEQ ID NO: 931964 - RNA, 22 nt, Human
ggaauucugcauguucaguugg

SEQ ID NO: 931965 - RNA, 22 nt, Human
ccuuuacaucugacuucuuuca

SEQ ID NO: 931966 - RNA, 23 nt, Human
ccuggcacacaguugacauggaa

SEQ ID NO: 931967 - RNA, 22 nt, Human
cauggcuugucuugucuucuga

SEQ ID NO: 931968 - RNA, 22 nt, Human
cuguagcagcugaccuggcuaa

SEQ ID NO: 931969 - RNA, 22 nt, Human
auccacagagaggaagaauagu

SEQ ID NO: 931970 - RNA, 22 nt, Human
uuuguaaccuaaagcaccagau

SEQ ID NO: 931971 - RNA, 19 nt, Human
gaaugucuccuacuucuga

SEQ ID NO: 931972 - RNA, 22 nt, Human
aacacugugcuccccaggcugu

SEQ ID NO: 931973 - RNA, 22 nt, Human
uuuagcaaagguaggguucaga

SEQ ID NO: 931974 - RNA, 22 nt, Human
uuuaucugaaaaaacucuugga

SEQ ID NO: 931975 - RNA, 22 nt, Human
agcaagauuuuccuugaauguu

SEQ ID NO: 931976 - RNA, 22 nt, Human
acagcaugagaguagcaaaagg

SEQ ID NO: 931977 - RNA, 22 nt, Human
augcuugggacucccuguagca

SEQ ID NO: 931978 - RNA, 21 nt, Human
uaaaccuggcgcuguucaaag

SEQ ID NO: 931979 - RNA, 22 nt, Human
acauugauacugagauacaaag

SEQ ID NO: 931980 - RNA, 22 nt, Human
acaugaaaagacuaucugauua

SEQ ID NO: 931981 - RNA, 23 nt, Human
aaacuacauuuauaguuuuucuc

SEQ ID NO: 931982 - RNA, 22 nt, Human
uguuguagcuugacagcagcca

SEQ ID NO: 931983 - RNA, 22 nt, Human
cuguggcucaauugccuacuga

SEQ ID NO: 931984 - RNA, 22 nt, Human
ugcuuggagaaucagucccagc

SEQ ID NO: 931985 - RNA, 22 nt, Human
uuuacacugacagcacauaagg

SEQ ID NO: 931986 - RNA, 22 nt, Human
cuuauucagaccuuggauucuu

SEQ ID NO: 931987 - RNA, 22 nt, Human
ccacaugaaauugcuuauauuu

SEQ ID NO: 931988 - RNA, 22 nt, Human
agcuucucuggucuucugccaa

SEQ ID NO: 931989 - RNA, 21 nt, Human
cauuucaugauuauagaaaug

SEQ ID NO: 931990 - RNA, 22 nt, Human
aucauuuacaaacucagcauug

SEQ ID NO: 931991 - RNA, 22 nt, Human
gucuuauuaugagguuagacuu

SEQ ID NO: 931992 - RNA, 22 nt, Human
cacacaugugggauccgcaggg

SEQ ID NO: 931993 - RNA, 22 nt, Human
uaucuguuugcucacagguguu

SEQ ID NO: 931994 - RNA, 22 nt, Human
uaucuguuccaggcacucagcu

SEQ ID NO: 931995 - RNA, 22 nt, Human
aucacaaaggucucagagcaca

SEQ ID NO: 931996 - RNA, 22 nt, Human
aagucacaagcauauaugcauu

SEQ ID NO: 931997 - RNA, 22 nt, Human
agaauuagucacaauuauagga

SEQ ID NO: 931998 - RNA, 22 nt, Human
ugaucuuuuuggucauuugggu

SEQ ID NO: 931999 - RNA, 22 nt, Human
cagaaacagagaaauauuggcu

SEQ ID NO: 932000 - RNA, 22 nt, Human
aacccauuaauccuugcaagca

SEQ ID NO: 932001 - RNA, 22 nt, Human
acaugaguacagauggauguaa

SEQ ID NO: 932002 - RNA, 22 nt, Human
cuuauacacccucuucccaggc

SEQ ID NO: 932003 - RNA, 22 nt, Human
uacauuaacuuacguccacaug

SEQ ID NO: 932004 - RNA, 18 nt, Human
uuauucagacgcauauga

SEQ ID NO: 932005 - RNA, 22 nt, Human
gucaaaaaguagucauuucugu

SEQ ID NO: 932006 - RNA, 22 nt, Human
cucuggcucugacaguugaucc

SEQ ID NO: 932007 - RNA, 22 nt, Human
acugucacuaacuaagucuagu

SEQ ID NO: 932008 - RNA, 22 nt, Human
uacacauucuagggcacaguua

SEQ ID NO: 932009 - RNA, 22 nt, Human
caacacugauuauggcugagcu

SEQ ID NO: 932010 - RNA, 22 nt, Human
gcaguacuuuaucacauggaau

SEQ ID NO: 932011 - RNA, 22 nt, Human
uuacacuugaaaacaggauuua

SEQ ID NO: 932012 - RNA, 22 nt, Human
aacacuguaacagcaucauuuu

SEQ ID NO: 932013 - RNA, 22 nt, Human
uacaguuuuuauucaugacaag

SEQ ID NO: 932014 - RNA, 22 nt, Human
caacagaaggaagcagggucag

SEQ ID NO: 932015 - RNA, 22 nt, Human
ugucuauagccugauuuguugg

SEQ ID NO: 932016 - RNA, 22 nt, Human
uucacaacugccauagccagug

SEQ ID NO: 932017 - RNA, 22 nt, Human
cugugcuuaccugcccagguga

SEQ ID NO: 932018 - RNA, 20 nt, Human
cugcuugggacacugccaga

SEQ ID NO: 932019 - RNA, 22 nt, Human
cagcuaguaaauggcaagacua

SEQ ID NO: 932020 - RNA, 22 nt, Human
guuguacagcauuccauauagg

SEQ ID NO: 932021 - RNA, 18 nt, Human
ccugugcuccagcaucug

SEQ ID NO: 932022 - RNA, 22 nt, Human
uguacuuccccaaugacagcac

SEQ ID NO: 932023 - RNA, 22 nt, Human
ugaguaucaauuacauaguugu

SEQ ID NO: 932024 - RNA, 22 nt, Human
uauggcuuccaggcuggccagg

SEQ ID NO: 932025 - RNA, 22 nt, Human
aaggaauucaaauuuucucugg

SEQ ID NO: 932026 - RNA, 22 nt, Human
augagauaggaacaaacuuaca

SEQ ID NO: 932027 - RNA, 22 nt, Human
agcuguuguuaauuaacucauu

SEQ ID NO: 932028 - RNA, 22 nt, Human
gcuuggcugugagcuuugcugu

SEQ ID NO: 932029 - RNA, 22 nt, Human
ucacaugauguuuccucugugc

SEQ ID NO: 932030 - RNA, 22 nt, Human
acagaauuaaugaaaauuacaa

SEQ ID NO: 932031 - RNA, 22 nt, Human
uuuaccaagauagcaucugguu

SEQ ID NO: 932032 - RNA, 22 nt, Human
aggaaucaggagaugagcacgg

SEQ ID NO: 932033 - RNA, 22 nt, Human
aguucuaagaugcuccacagag

SEQ ID NO: 932034 - RNA, 18 nt, Human
accacaugauaucuugcc

SEQ ID NO: 932035 - RNA, 20 nt, Human
uuuacauuuugaaacaguga

SEQ ID NO: 932036 - RNA, 22 nt, Human
aacacauggguguuuauuguac

SEQ ID NO: 932037 - RNA, 22 nt, Human
aacuucuaaucuguacaguuuu

SEQ ID NO: 932038 - RNA, 22 nt, Human
cugcuuggaguccuccagcacc

SEQ ID NO: 932039 - RNA, 22 nt, Human
uauggcuuuuaaggagaucuga

SEQ ID NO: 932040 - RNA, 22 nt, Human
cuguggcucaaaaucccaugau

SEQ ID NO: 932041 - RNA, 22 nt, Human
cacuucacuuggaugccuuuuc

SEQ ID NO: 932042 - RNA, 22 nt, Human
augcauuuauguguguacauug

SEQ ID NO: 932043 - RNA, 22 nt, Human
cagcagagguuggaacaguucu

SEQ ID NO: 932044 - RNA, 22 nt, Human
cauggcuucaaagccuuuggca

SEQ ID NO: 932045 - RNA, 22 nt, Human
auaggaauuucuucagcacuga

SEQ ID NO: 932046 - RNA, 22 nt, Human
augagauagacuaugucauaca

SEQ ID NO: 932047 - RNA, 22 nt, Human
acacacuggcaggagcuauaaa

SEQ ID NO: 932048 - RNA, 22 nt, Human
agucuacaaagggaagcccuuu

SEQ ID NO: 932049 - RNA, 22 nt, Human
uguuuguacucaaagccaugag

SEQ ID NO: 932050 - RNA, 22 nt, Human
gagcaguaggagaacccugagc

SEQ ID NO: 932051 - RNA, 22 nt, Human
cacaugagacaauuaaagacuu

SEQ ID NO: 932052 - RNA, 22 nt, Human
uuaaccuguaaaaugggagaag

SEQ ID NO: 932053 - RNA, 20 nt, Human
aagcaucuggauguagcaau

SEQ ID NO: 932054 - RNA, 22 nt, Human
ccacaugaaucuuggaagcagg

SEQ ID NO: 932055 - RNA, 19 nt, Human
agacacaucacauuucucc

SEQ ID NO: 932056 - RNA, 22 nt, Human
cacuggcugagcuucucuaggg

SEQ ID NO: 932057 - RNA, 22 nt, Human
uuuuauuggagugauaccaagc

SEQ ID NO: 932058 - RNA, 22 nt, Human
gugcauuugugcaugcacaugu

SEQ ID NO: 932059 - RNA, 22 nt, Human
gcacaugagaagcuggcgaugc

SEQ ID NO: 932060 - RNA, 22 nt, Human
ugaguauuccuuaucugaaaug

SEQ ID NO: 932061 - RNA, 22 nt, Human
uggcuucacugcucaagugauu

SEQ ID NO: 932062 - RNA, 22 nt, Human
gcacaugaguuaagcuggggca

SEQ ID NO: 932063 - RNA, 22 nt, Human
accuucagacaucaacuaucuc

SEQ ID NO: 932064 - RNA, 22 nt, Human
uuuguaacauuauggacugcuu

SEQ ID NO: 932065 - RNA, 22 nt, Human
uccuucaguuaucacaguacug

SEQ ID NO: 932066 - RNA, 22 nt, Human
auucuccacuguaagguuauua

SEQ ID NO: 932067 - RNA, 22 nt, Human
aacuguuacauaguuauagauc

SEQ ID NO: 932068 - RNA, 23 nt, Human
uggcugagauccuacuguuugcu

SEQ ID NO: 932069 - RNA, 18 nt, Human
uuguagcaaauggcagug

SEQ ID NO: 932070 - RNA, 22 nt, Human
guggcuucaugaacacugauga

SEQ ID NO: 932071 - RNA, 22 nt, Human
gucacaaauccccucagcaacu

SEQ ID NO: 932072 - RNA, 22 nt, Human
cugagcuuaacccuguuagcaa

SEQ ID NO: 932073 - RNA, 22 nt, Human
guugcuuguuaguggugagguu

SEQ ID NO: 932074 - RNA, 22 nt, Human
agaaaucaugucuuauuucuau

SEQ ID NO: 932075 - RNA, 17 nt, Human
gcacaaaucaauuacua

SEQ ID NO: 932076 - RNA, 17 nt, Human
aacaguaagcccuguuu

SEQ ID NO: 932077 - RNA, 22 nt, Human
ucacaacuugaagcugauuuaa

SEQ ID NO: 932078 - RNA, 23 nt, Human
agacacauaggagcagcuauugg

SEQ ID NO: 932079 - RNA, 22 nt, Human
uccuucagggggccgccugcac

SEQ ID NO: 932080 - RNA, 22 nt, Human
uucccuuccucacucuacuugu

SEQ ID NO: 932081 - RNA, 19 nt, Human
uaacuuguagauaugaagu

SEQ ID NO: 932082 - RNA, 22 nt, Human
ccacccugugcaggcgugggua

SEQ ID NO: 932083 - RNA, 22 nt, Human
auauauaaccuggauaaggcuu

SEQ ID NO: 932084 - RNA, 22 nt, Human
uuuauugacccaaagcgagagu

SEQ ID NO: 932085 - RNA, 22 nt, Human
cucuguugucaguggaagcagc

SEQ ID NO: 932086 - RNA, 22 nt, Human
ucauggaugauagcuucauugc

SEQ ID NO: 932087 - RNA, 22 nt, Human
caugaguaugauuauacccagu

SEQ ID NO: 932088 - RNA, 22 nt, Human
cuguuacacggaccuucaaauc

SEQ ID NO: 932089 - RNA, 18 nt, Human
cacauuuaccuggcuccc

SEQ ID NO: 932090 - RNA, 22 nt, Human
ugagaagcagcuuacagguguc

SEQ ID NO: 932091 - RNA, 16 nt, Human
gacacaugggggaaaa

SEQ ID NO: 932092 - RNA, 22 nt, Human
uguauacauguguucaugcaug

SEQ ID NO: 932093 - RNA, 22 nt, Human
auggcucugcugggcaaagcaa

SEQ ID NO: 932094 - RNA, 22 nt, Human
cacaugaacaugcuggaaaagc

SEQ ID NO: 932095 - RNA, 22 nt, Human
cuuauucagcaaguuuggguac

SEQ ID NO: 932096 - RNA, 22 nt, Human
caguaugagaguugaaucaagg

SEQ ID NO: 932097 - RNA, 22 nt, Human
acuaacuucugagaaccaauug

SEQ ID NO: 932098 - RNA, 22 nt, Human
uacacauguauuuauguguaca

SEQ ID NO: 932099 - RNA, 22 nt, Human
uuuaucugauauucagcgauuu

SEQ ID NO: 932100 - RNA, 21 nt, Human
augugcuuagcugcugguagu

SEQ ID NO: 932101 - RNA, 22 nt, Human
cagcauauuacuuuaaaaaauc

SEQ ID NO: 932102 - RNA, 22 nt, Human
acaugauuuuaguaucauaaua

SEQ ID NO: 932103 - RNA, 22 nt, Human
ucuguuaugcauaagcaucagu

SEQ ID NO: 932104 - RNA, 22 nt, Human
accugucaucccggcugcaccg

SEQ ID NO: 932105 - RNA, 22 nt, Human
aaaaccugauugaauucuauuu

SEQ ID NO: 932106 - RNA, 22 nt, Human
gacauuuaaauugcaggcagcc

SEQ ID NO: 932107 - RNA, 19 nt, Human
cucuggcuuccaaagcauc

SEQ ID NO: 932108 - RNA, 22 nt, Human
cuguuguaaagcuauucauuug

SEQ ID NO: 932109 - RNA, 22 nt, Human
uuuccacagcuguauaaaauaa

SEQ ID NO: 932110 - RNA, 22 nt, Human
ggaauucucuaugcucuguucc

SEQ ID NO: 932111 - RNA, 22 nt, Human
gagaagcaaucaguggccaccc

SEQ ID NO: 932112 - RNA, 22 nt, Human
agaaacuaagucauaacucuuu

SEQ ID NO: 932113 - RNA, 22 nt, Human
cuguagcagacagacccuaggu

SEQ ID NO: 932114 - RNA, 22 nt, Human
cagcaugaugcucacacaaaac

SEQ ID NO: 932115 - RNA, 22 nt, Human
gacauuuagaagucuaauggcc

SEQ ID NO: 932116 - RNA, 22 nt, Human
aacauguauuuuccuuggcaac

SEQ ID NO: 932117 - RNA, 22 nt, Human
ccuuuacacguaaggcuguuga

SEQ ID NO: 932118 - RNA, 20 nt, Human
auacacauucauagaaaaau

SEQ ID NO: 932119 - RNA, 22 nt, Human
cucuggcuguuugcagcucaag

SEQ ID NO: 932120 - RNA, 17 nt, Human
gcucuggcacaggauug

SEQ ID NO: 932121 - RNA, 22 nt, Human
ugaguauccuauaugguguaag

SEQ ID NO: 932122 - RNA, 22 nt, Human
ucuacacugggggcuuugagca

SEQ ID NO: 932123 - RNA, 22 nt, Human
uuaagagauuuaggaacauuau

SEQ ID NO: 932124 - RNA, 22 nt, Human
uguccucuccaacagccucugu

SEQ ID NO: 932125 - RNA, 22 nt, Human
ucacagaauagcacuguaagcg

SEQ ID NO: 932126 - RNA, 17 nt, Human
ucauuucaguaaaucca

SEQ ID NO: 932127 - RNA, 19 nt, Human
agaugucuauuugacuauc

SEQ ID NO: 932128 - RNA, 23 nt, Human
gaauggcuaagcacauagacuug

SEQ ID NO: 932129 - RNA, 22 nt, Human
uuccaacuuugaaaauguuaug

SEQ ID NO: 932130 - RNA, 22 nt, Human
caugaucugguccuacuguggg

SEQ ID NO: 932131 - RNA, 22 nt, Human
ccuguugucauggaauaaguua

SEQ ID NO: 932132 - RNA, 22 nt, Human
cacugguguacaggagguaaaa

SEQ ID NO: 932133 - RNA, 22 nt, Human
ugcuggcuuuuugugucaaaga

SEQ ID NO: 932134 - RNA, 22 nt, Human
cacaugugggaaauggugcuua

SEQ ID NO: 932135 - RNA, 22 nt, Human
uaaaaccaggucuugggauuua

SEQ ID NO: 932136 - RNA, 22 nt, Human
ccuggcacgaagggcugagguu

SEQ ID NO: 932137 - RNA, 22 nt, Human
acagauauaaacuauaguagug

SEQ ID NO: 932138 - RNA, 22 nt, Human
augugcuuuccaaugcuguagg

SEQ ID NO: 932139 - RNA, 22 nt, Human
augugaaacgcaaugggaucau

SEQ ID NO: 932140 - RNA, 22 nt, Human
uaauaaaugaaagugcuggcau

SEQ ID NO: 932141 - RNA, 22 nt, Human
auuacacuuguucaucaucacc

SEQ ID NO: 932142 - RNA, 22 nt, Human
uuuagccaaucagcuugggagc

SEQ ID NO: 932143 - RNA, 22 nt, Human
cuuucacagcuugaaaaguauu

SEQ ID NO: 932144 - RNA, 21 nt, Human
aggaaugcugaggcucacuuu

SEQ ID NO: 932145 - RNA, 22 nt, Human
ucauuucagccauuuuuaaaug

SEQ ID NO: 932146 - RNA, 22 nt, Human
gaguaauuuucuuaaaacauca

SEQ ID NO: 932147 - RNA, 22 nt, Human
uccuucagaggauaaggaagaa

SEQ ID NO: 932148 - RNA, 22 nt, Human
agagaacacgugcaucugcaau

SEQ ID NO: 932149 - RNA, 21 nt, Human
uaaauaauaaguugcugagau

SEQ ID NO: 932150 - RNA, 22 nt, Human
agaaacagcauuagcaucaauu

SEQ ID NO: 932151 - RNA, 22 nt, Human
cuuuuacauuuguugaagagua

SEQ ID NO: 932152 - RNA, 22 nt, Human
acacuucucuuugaagaacaau

SEQ ID NO: 932153 - RNA, 20 nt, Human
auucacaaagccaguguugc

SEQ ID NO: 932154 - RNA, 22 nt, Human
agagcauccauuuuugucacau

SEQ ID NO: 932155 - RNA, 22 nt, Human
uaccaagguaguggagacagaa

SEQ ID NO: 932156 - RNA, 22 nt, Human
uucagcaagugucucuacuguc

SEQ ID NO: 932157 - RNA, 22 nt, Human
auacaugaggaggcuggaaaca

SEQ ID NO: 932158 - RNA, 22 nt, Human
gcuuccuucuaccacaucaugc

SEQ ID NO: 932159 - RNA, 22 nt, Human
agaucagagaugcuaaaagagc

SEQ ID NO: 932160 - RNA, 22 nt, Human
auuacaaucgagagaaacaaau

SEQ ID NO: 932161 - RNA, 18 nt, Human
ucacaugacagcuguugc

SEQ ID NO: 932162 - RNA, 22 nt, Human
uuuauuagugcuuguaucacug

SEQ ID NO: 932163 - RNA, 22 nt, Human
uauggcuuaugcugaacaccug

SEQ ID NO: 932164 - RNA, 22 nt, Human
caguauguuugggagacaugac

SEQ ID NO: 932165 - RNA, 22 nt, Human
gaucuguuucauucacagucug

SEQ ID NO: 932166 - RNA, 22 nt, Human
uucucuugugccaaguuguugc

SEQ ID NO: 932167 - RNA, 19 nt, Human
uacacuuguaaugagcaga

SEQ ID NO: 932168 - RNA, 22 nt, Human
uuacacauugcagaucaaaaug

SEQ ID NO: 932169 - RNA, 22 nt, Human
aaugcuguugaguuguuccugu

SEQ ID NO: 932170 - RNA, 22 nt, Human
ucacacauucuagguauguuga

SEQ ID NO: 932171 - RNA, 17 nt, Human
acaguaacuauguuaug

SEQ ID NO: 932172 - RNA, 22 nt, Human
aauggcuuauguaaugcuguuu

SEQ ID NO: 932173 - RNA, 22 nt, Human
ccuaacuucacuucauugaagu

SEQ ID NO: 932174 - RNA, 20 nt, Human
uggaccauaaacaccaggua

SEQ ID NO: 932175 - RNA, 22 nt, Human
uggcuucuucauaugugaucuu

SEQ ID NO: 932176 - RNA, 22 nt, Human
cacccuguacaaauggacaucu

SEQ ID NO: 932177 - RNA, 22 nt, Human
cuuuacaccaagcagaucuuuc

SEQ ID NO: 932178 - RNA, 22 nt, Human
uuuauuaauguagcauccaugg

SEQ ID NO: 932179 - RNA, 22 nt, Human
uccuucagaggacggcagccag

SEQ ID NO: 932180 - RNA, 22 nt, Human
accugucaaguccagcgcaaca

SEQ ID NO: 932181 - RNA, 22 nt, Human
uacaaugauuagcuaacuugcc

SEQ ID NO: 932182 - RNA, 22 nt, Human
caggagaugacagggaagaacc

SEQ ID NO: 932183 - RNA, 22 nt, Human
cacuuuacuaucuauaaaauaa

SEQ ID NO: 932184 - RNA, 22 nt, Human
ucugcuugcguucugcucccuc

SEQ ID NO: 932185 - RNA, 22 nt, Human
augucccuugucugugaugucu

SEQ ID NO: 932186 - RNA, 22 nt, Human
uuuacaucucaccagauucaua

SEQ ID NO: 932187 - RNA, 22 nt, Human
uacaucuuugucuaugaccagc

SEQ ID NO: 932188 - RNA, 22 nt, Human
aaacaguggccaauucuggaga

SEQ ID NO: 932189 - RNA, 22 nt, Human
gauggcuugcuuagugacagca

SEQ ID NO: 932190 - RNA, 22 nt, Human
uucuauuuccaguccuucagag

SEQ ID NO: 932191 - RNA, 22 nt, Human
uagaaacaugagagaaacucuu

SEQ ID NO: 932192 - RNA, 22 nt, Human
uucacauuacaaggccauauuu

SEQ ID NO: 932193 - RNA, 22 nt, Human
cagugccagagguacuagugga

SEQ ID NO: 932194 - RNA, 22 nt, Human
uucaacagcuuccaaagugugu

SEQ ID NO: 932195 - RNA, 22 nt, Human
cuucucuggcuccucagcgccc

SEQ ID NO: 932196 - RNA, 22 nt, Human
aauugauggacagagaugaaga

SEQ ID NO: 932197 - RNA, 22 nt, Human
acacucuugcauuaccugaaua

SEQ ID NO: 932198 - RNA, 21 nt, Human
uccuggcuuuaugcuaccucu

SEQ ID NO: 932199 - RNA, 22 nt, Human
cucuggcucuguugagauuugu

SEQ ID NO: 932200 - RNA, 22 nt, Human
agacauuuggaagauacacaua

SEQ ID NO: 932201 - RNA, 20 nt, Human
gauaaauugucucuuaagug

SEQ ID NO: 932202 - RNA, 22 nt, Human
uggcucucuuguaagguaguag

SEQ ID NO: 932203 - RNA, 22 nt, Human
uaucuguucauguuuauauguc

SEQ ID NO: 932204 - RNA, 22 nt, Human
ucugugcuaauuuauccuuccu

SEQ ID NO: 932205 - RNA, 22 nt, Human
cugaugcucuggauguagucaa

SEQ ID NO: 932206 - RNA, 21 nt, Human
aguucacaggaacaagcaggg

SEQ ID NO: 932207 - RNA, 22 nt, Human
aauaacaggguugauuugcaau

SEQ ID NO: 932208 - RNA, 22 nt, Human
agagaacuucuccuaaaucuca

SEQ ID NO: 932209 - RNA, 22 nt, Human
uagcacaucuucuuggccugca

SEQ ID NO: 932210 - RNA, 22 nt, Human
acacagaguuauuaugugaacu

SEQ ID NO: 932211 - RNA, 23 nt, Human
ccuguugggacagcuuuaccaga

SEQ ID NO: 932212 - RNA, 22 nt, Human
cuucaguauccuccacauguua

SEQ ID NO: 932213 - RNA, 22 nt, Human
gagcacugauuuauuuuugucu

SEQ ID NO: 932214 - RNA, 22 nt, Human
cccugcacacucgugucuugac

SEQ ID NO: 932215 - RNA, 22 nt, Human
gaugucuuucugugugccuaga

SEQ ID NO: 932216 - RNA, 22 nt, Human
ucacagcacauggaccgagucc

SEQ ID NO: 932217 - RNA, 22 nt, Human
aaucuguuuuaucauuuguuac

SEQ ID NO: 932218 - RNA, 20 nt, Human
ggaaggcuguuuuuccacca

SEQ ID NO: 932219 - RNA, 22 nt, Human
uuacacaaagcuccccaaauag

SEQ ID NO: 932220 - RNA, 22 nt, Human
ggcucugccauuuccuagcugc

SEQ ID NO: 932221 - RNA, 22 nt, Human
ugucaccacuggcugaaacacc

SEQ ID NO: 932222 - RNA, 22 nt, Human
aauucuaaauguaauuuagaau

SEQ ID NO: 932223 - RNA, 22 nt, Human
cauuucaccuuagagaauuauu

SEQ ID NO: 932224 - RNA, 22 nt, Human
ccacugauccugacuuuggagc

SEQ ID NO: 932225 - RNA, 22 nt, Human
ugaugcauugccgacuuacugg

SEQ ID NO: 932226 - RNA, 22 nt, Human
gcagagaagaugcccaggcuuc

SEQ ID NO: 932227 - RNA, 22 nt, Human
gacaaugguggauacaugucau

SEQ ID NO: 932228 - RNA, 22 nt, Human
uggcuagaauuggguucacagg

SEQ ID NO: 932229 - RNA, 22 nt, Human
gcagaggaucaggcucuggaaa

SEQ ID NO: 932230 - RNA, 22 nt, Human
uuguagcaucaaucaguacuuu

SEQ ID NO: 932231 - RNA, 22 nt, Human
acaugcuuguuuuucacaaccu

SEQ ID NO: 932232 - RNA, 22 nt, Human
gcuuuacauaaacauuuauuau

SEQ ID NO: 932233 - RNA, 22 nt, Human
ggaaggggagcuggaaagggua

SEQ ID NO: 932234 - RNA, 22 nt, Human
ucacagaagaugcuggauguug

SEQ ID NO: 932235 - RNA, 22 nt, Human
acacuuuaucucaucucagaca

SEQ ID NO: 932236 - RNA, 22 nt, Human
ggucuucuggaaagcagacugu

SEQ ID NO: 932237 - RNA, 22 nt, Human
ccaccaagucccacuauaauuu

SEQ ID NO: 932238 - RNA, 18 nt, Human
ucacaugauuacccuggg

SEQ ID NO: 932239 - RNA, 22 nt, Human
gacauuuaauaguauuguggga

SEQ ID NO: 932240 - RNA, 22 nt, Human
cacacauggucaguggcuacuc

SEQ ID NO: 932241 - RNA, 22 nt, Human
acccugauauagguccaagagc

SEQ ID NO: 932242 - RNA, 22 nt, Human
auucacaaguugauggauauuu

SEQ ID NO: 932243 - RNA, 22 nt, Human
ucacaaaugaccaugguuacua

SEQ ID NO: 932244 - RNA, 23 nt, Human
ucuuuacagcagcaggauuugga

SEQ ID NO: 932245 - RNA, 22 nt, Human
uucuuugggcaauugcuggccc

SEQ ID NO: 932246 - RNA, 22 nt, Human
ccauuucauugccuguaaagug

SEQ ID NO: 932247 - RNA, 22 nt, Human
acacaggacagggauguguuuu

SEQ ID NO: 932248 - RNA, 22 nt, Human
cauggcuuuguucauauaauuu

SEQ ID NO: 932249 - RNA, 22 nt, Human
acaugauauuaaugucuuauuu

SEQ ID NO: 932250 - RNA, 22 nt, Human
cacagagacaugaugucauugc

SEQ ID NO: 932251 - RNA, 22 nt, Human
caucuuauuuucuucuagugcu

SEQ ID NO: 932252 - RNA, 22 nt, Human
uuuauugcuggccaccuguagc

SEQ ID NO: 932253 - RNA, 22 nt, Human
cuguuggaugugacacuguuag

SEQ ID NO: 932254 - RNA, 22 nt, Human
cuucuuggacuacucacuagag

SEQ ID NO: 932255 - RNA, 22 nt, Human
acauucuagaagagcuucacuu

SEQ ID NO: 932256 - RNA, 22 nt, Human
caguuuauagcucuagcagcuu

SEQ ID NO: 932257 - RNA, 22 nt, Human
aaaccuguggccacuaaauuug

SEQ ID NO: 932258 - RNA, 22 nt, Human
aaacuguugugguuuaucauua

SEQ ID NO: 932259 - RNA, 22 nt, Human
uucuccuggagugcuuguuggg

SEQ ID NO: 932260 - RNA, 22 nt, Human
aucuguguaugugaccuuaucu

SEQ ID NO: 932261 - RNA, 22 nt, Human
auucaaauuaaguuaauucagc

SEQ ID NO: 932262 - RNA, 22 nt, Human
uauacacauccuccaaagauag

SEQ ID NO: 932263 - RNA, 22 nt, Human
ugugcuaaggcagucuaucaca

SEQ ID NO: 932264 - RNA, 22 nt, Human
uuacacaugcucacuuauuugu

SEQ ID NO: 932265 - RNA, 22 nt, Human
guggcuuccaugugcaucugac

SEQ ID NO: 932266 - RNA, 22 nt, Human
auaacagugaccucucagcacc

SEQ ID NO: 932267 - RNA, 22 nt, Human
uuacacaugaagguccaauguu

SEQ ID NO: 932268 - RNA, 17 nt, Human
cuucucuggcagaagau

SEQ ID NO: 932269 - RNA, 22 nt, Human
acaaacagcuaacauauguuaa

SEQ ID NO: 932270 - RNA, 22 nt, Human
aauucaaauuacaauaguuguu

SEQ ID NO: 932271 - RNA, 22 nt, Human
accuucaggugagcacacagau

SEQ ID NO: 932272 - RNA, 22 nt, Human
acucuggcuugaggaccagguc

SEQ ID NO: 932273 - RNA, 22 nt, Human
cuuuguuguuaauuggcgcuua

SEQ ID NO: 932274 - RNA, 23 nt, Human
ucugugcuacaaaucgcgucugu

SEQ ID NO: 932275 - RNA, 20 nt, Human
auuauucauacaugugugac

SEQ ID NO: 932276 - RNA, 21 nt, Human
uccucuccaugaucuguuugu

SEQ ID NO: 932277 - RNA, 22 nt, Human
cagcagagcugggaauaaaauu

SEQ ID NO: 932278 - RNA, 22 nt, Human
guggcuucaccccaguugucuc

SEQ ID NO: 932279 - RNA, 22 nt, Human
ccuggcacaucuaacucacucu

SEQ ID NO: 932280 - RNA, 22 nt, Human
uagaaacagagcagguggccca

SEQ ID NO: 932281 - RNA, 22 nt, Human
ucuucuccuuugccauguguuu

SEQ ID NO: 932282 - RNA, 22 nt, Human
acaguacagcugaaacuuuagu

SEQ ID NO: 932283 - RNA, 22 nt, Human
auuacacauagacauucguuca

SEQ ID NO: 932284 - RNA, 22 nt, Human
uuuauucaagaugagguucaug

SEQ ID NO: 932285 - RNA, 22 nt, Human
cauggcuuuguucuguuagaug

SEQ ID NO: 932286 - RNA, 22 nt, Human
acugucacuugcaacugugagg

SEQ ID NO: 932287 - RNA, 22 nt, Human
auggcuuccucuggauuggauu

SEQ ID NO: 932288 - RNA, 22 nt, Human
agcuucucucuuugcacucaca

SEQ ID NO: 932289 - RNA, 22 nt, Human
cagaagcuuugcucauaaccau

SEQ ID NO: 932290 - RNA, 22 nt, Human
cacauuuaauccuuuauaagua

SEQ ID NO: 932291 - RNA, 22 nt, Human
guucacaagaguuacagacaga

SEQ ID NO: 932292 - RNA, 22 nt, Human
uuuguuuugaacuagcucagaa

SEQ ID NO: 932293 - RNA, 22 nt, Human
aacaugugucuugcauuucuug

SEQ ID NO: 932294 - RNA, 23 nt, Human
uguaacuugauggaaugagcuau

SEQ ID NO: 932295 - RNA, 22 nt, Human
agcuuccuacaaccaucucaga

SEQ ID NO: 932296 - RNA, 22 nt, Human
gagcuucagagaccacuuaacu

SEQ ID NO: 932297 - RNA, 20 nt, Human
aauuuuaucuccauccuuug

SEQ ID NO: 932298 - RNA, 22 nt, Human
aucaccaggcaaaaugucagag

SEQ ID NO: 932299 - RNA, 23 nt, Human
uggcuucugccccauucucucca

SEQ ID NO: 932300 - RNA, 22 nt, Human
uuauugcaacuccuaaauagag

SEQ ID NO: 932301 - RNA, 22 nt, Human
ggcuucucagcacacuguccac

SEQ ID NO: 932302 - RNA, 22 nt, Human
agaaacaucgcuuaguccucau

SEQ ID NO: 932303 - RNA, 22 nt, Human
cacacaugucucuccaugcucu

SEQ ID NO: 932304 - RNA, 22 nt, Human
acaucaguaacuguaaaacagg

SEQ ID NO: 932305 - RNA, 18 nt, Human
uggcuucugcuagcugga

SEQ ID NO: 932306 - RNA, 22 nt, Human
uaccauuugagagagaacauaa

SEQ ID NO: 932307 - RNA, 22 nt, Human
ugugaaaaaaguucuagaagga

SEQ ID NO: 932308 - RNA, 22 nt, Human
agcagagaccugguuuuguuga

SEQ ID NO: 932309 - RNA, 22 nt, Human
ucucuucuagcuucuugugguu

SEQ ID NO: 932310 - RNA, 22 nt, Human
aaugucuuucucauaacagaua

SEQ ID NO: 932311 - RNA, 22 nt, Human
uuuauucagcagcagcaguggu

SEQ ID NO: 932312 - RNA, 22 nt, Human
aaucacauuagugaaacacuga

SEQ ID NO: 932313 - RNA, 22 nt, Human
ggcuuccuggggccuccugcaa

SEQ ID NO: 932314 - RNA, 22 nt, Human
gaagcuucuggcauuucucaaa

SEQ ID NO: 932315 - RNA, 22 nt, Human
acacuuuaagcauuucacacug

SEQ ID NO: 932316 - RNA, 22 nt, Human
uuuaccacaauuuuaaacaaug

SEQ ID NO: 932317 - RNA, 22 nt, Human
uauggcuucucagucaugaaaa

SEQ ID NO: 932318 - RNA, 22 nt, Human
aacagaaucuuggguucuuuuc

SEQ ID NO: 932319 - RNA, 22 nt, Human
uuacacuuuaaauccagcuugu

SEQ ID NO: 932320 - RNA, 22 nt, Human
cacuucaccacuaggcuauacu

SEQ ID NO: 932321 - RNA, 22 nt, Human
aagacaauuugauacuaguugc

SEQ ID NO: 932322 - RNA, 22 nt, Human
gcauggcuguugaagucagcuc

SEQ ID NO: 932323 - RNA, 22 nt, Human
aaucuguuuccauuagagucau

SEQ ID NO: 932324 - RNA, 22 nt, Human
ucacaagagcuggacugucuuu

SEQ ID NO: 932325 - RNA, 22 nt, Human
uaacacauagauauuuuaacuu

SEQ ID NO: 932326 - RNA, 22 nt, Human
cacaagauggucacauaagugc

SEQ ID NO: 932327 - RNA, 22 nt, Human
cucuggcuugguaaaaacuucu

SEQ ID NO: 932328 - RNA, 22 nt, Human
augugcuugaagccucagagaa

SEQ ID NO: 932329 - RNA, 22 nt, Human
uguuauccucagcucaccucua

SEQ ID NO: 932330 - RNA, 22 nt, Human
ucacagcacccugaggugcugg

SEQ ID NO: 932331 - RNA, 22 nt, Human
cacaugagugagaacaugcagu

SEQ ID NO: 932332 - RNA, 22 nt, Human
cuuuuagcuguuuccauggcaa

SEQ ID NO: 932333 - RNA, 19 nt, Human
cacuguuguccuaguacuu

SEQ ID NO: 932334 - RNA, 22 nt, Human
uuacaauugagucuauuguaug

SEQ ID NO: 932335 - RNA, 22 nt, Human
ucuguuaucucaagucacaaga

SEQ ID NO: 932336 - RNA, 22 nt, Human
uuuauuauguacaggcacuaua

SEQ ID NO: 932337 - RNA, 22 nt, Human
cuucccugagcuuucucaggcu

SEQ ID NO: 932338 - RNA, 22 nt, Human
guacuucuuaaauuaggaucaa

SEQ ID NO: 932339 - RNA, 19 nt, Human
uuucucugugcaccuuuuc

SEQ ID NO: 932340 - RNA, 22 nt, Human
cuugcuuguuuaguucacagau

SEQ ID NO: 932341 - RNA, 22 nt, Human
uuguugggcaugcaguggcugu

SEQ ID NO: 932342 - RNA, 22 nt, Human
aaagcagcaaguauuuguuacu

SEQ ID NO: 932343 - RNA, 22 nt, Human
acauuguaguuguucugcagca

SEQ ID NO: 932344 - RNA, 22 nt, Human
ggaaggaacaaacccugugugg

SEQ ID NO: 932345 - RNA, 22 nt, Human
aaaucaucucugcauccuuagc

SEQ ID NO: 932346 - RNA, 22 nt, Human
uugugaauggugccgcaauaaa

SEQ ID NO: 932347 - RNA, 20 nt, Human
uuuauucacagagaagaguu

SEQ ID NO: 932348 - RNA, 23 nt, Human
ucaucaaaggaaguacgugucac

SEQ ID NO: 932349 - RNA, 22 nt, Human
aguacacuaugguaacuggagu

SEQ ID NO: 932350 - RNA, 22 nt, Human
cguuuauuuugaagauuccacu

SEQ ID NO: 932351 - RNA, 22 nt, Human
uuacccagggaccaagagaaac

SEQ ID NO: 932352 - RNA, 20 nt, Human
agaagcaucauucugauguc

SEQ ID NO: 932353 - RNA, 22 nt, Human
ugcuuggcuucauuuaaguuuu

SEQ ID NO: 932354 - RNA, 22 nt, Human
uggcuucucgccugucaucccg

SEQ ID NO: 932355 - RNA, 22 nt, Human
gcuccugcccucuugcaauucc

SEQ ID NO: 932356 - RNA, 23 nt, Human
aaguaacagggauaauagcaguu

SEQ ID NO: 932357 - RNA, 22 nt, Human
acaguaugaaugcagaauguag

SEQ ID NO: 932358 - RNA, 22 nt, Human
aagauacauuuucuucagagaa

SEQ ID NO: 932359 - RNA, 22 nt, Human
uacaaucacccaaagagccaga

SEQ ID NO: 932360 - RNA, 22 nt, Human
aucacaaaggcugcuucaugau

SEQ ID NO: 932361 - RNA, 23 nt, Human
cuguuauauucuagggagcugca

SEQ ID NO: 932362 - RNA, 22 nt, Human
uauggcuuugggccaaaucuac

SEQ ID NO: 932363 - RNA, 22 nt, Human
auacacauuugcuagagauggg

SEQ ID NO: 932364 - RNA, 17 nt, Human
aaucuguuuacagucag

SEQ ID NO: 932365 - RNA, 22 nt, Human
ucacaugaggcauccccgggca

SEQ ID NO: 932366 - RNA, 22 nt, Human
aagaguaaaugucuaauuagga

SEQ ID NO: 932367 - RNA, 22 nt, Human
acacuuugggcuggauaauuau

SEQ ID NO: 932368 - RNA, 22 nt, Human
ccucucuguguggccucuccau

SEQ ID NO: 932369 - RNA, 22 nt, Human
cauucccuuggggaguucaugc

SEQ ID NO: 932370 - RNA, 22 nt, Human
acacaugaaauaauauuaugca

SEQ ID NO: 932371 - RNA, 22 nt, Human
ucacauuugauaaugcccauug

SEQ ID NO: 932372 - RNA, 22 nt, Human
gaaacacauaugaacaguugau

SEQ ID NO: 932373 - RNA, 22 nt, Human
caugcagugacucagacacagg

SEQ ID NO: 932374 - RNA, 22 nt, Human
uugaaacagacaaguaaauguc

SEQ ID NO: 932375 - RNA, 22 nt, Human
cuguccaccuuugauaggcucu

SEQ ID NO: 932376 - RNA, 22 nt, Human
auuguauaauuguauugccaaa

SEQ ID NO: 932377 - RNA, 22 nt, Human
cuguggcuucugggucaguuca

SEQ ID NO: 932378 - RNA, 22 nt, Human
ucuuuguaagaaauucuuccgu

SEQ ID NO: 932379 - RNA, 22 nt, Human
aauucaaauuugaguuugugau

SEQ ID NO: 932380 - RNA, 22 nt, Human
uggcugcugcucacucagccuc

SEQ ID NO: 932381 - RNA, 22 nt, Human
caucaguaaggcaacauagcuu

SEQ ID NO: 932382 - RNA, 22 nt, Human
ggaaggaaauuggggcaguugu

SEQ ID NO: 932383 - RNA, 21 nt, Human
uucaggguuucacaauacuaa

SEQ ID NO: 932384 - RNA, 22 nt, Human
gaagacuacuguugcacucaua

SEQ ID NO: 932385 - RNA, 22 nt, Human
uauggcuuguggagaguuguag

SEQ ID NO: 932386 - RNA, 22 nt, Human
ucacaggagucaaggaauagua

SEQ ID NO: 932387 - RNA, 22 nt, Human
cuaggcucagucucuggucugu

SEQ ID NO: 932388 - RNA, 22 nt, Human
acauugaugaaaagguaucauu

SEQ ID NO: 932389 - RNA, 22 nt, Human
acaguagucucaggaauaggca

SEQ ID NO: 932390 - RNA, 21 nt, Human
ucagagaauggccuacucuca

SEQ ID NO: 932391 - RNA, 22 nt, Human
cagguggcagaggucucuggaa

SEQ ID NO: 932392 - RNA, 22 nt, Human
uuuguaacuuuagaauugaucc

SEQ ID NO: 932393 - RNA, 19 nt, Human
uuuuaaguccucucuauuc

SEQ ID NO: 932394 - RNA, 22 nt, Human
uaaccuuuggugaaauauuaac

SEQ ID NO: 932395 - RNA, 22 nt, Human
cacauuuauuugaggcuaauug

SEQ ID NO: 932396 - RNA, 21 nt, Human
ccuuuacaauuuugcauuccu

SEQ ID NO: 932397 - RNA, 22 nt, Human
ucaucaaagcgcuuggaguagg

SEQ ID NO: 932398 - RNA, 22 nt, Human
caugauaacuucauuacacaau

SEQ ID NO: 932399 - RNA, 22 nt, Human
acuucacacagcaaauuuaucu

SEQ ID NO: 932400 - RNA, 22 nt, Human
uccacugugcagcucugcugau

SEQ ID NO: 932401 - RNA, 21 nt, Human
acuguuauucccauuuucacc

SEQ ID NO: 932402 - RNA, 22 nt, Human
uggcuucugggacuugugagca

SEQ ID NO: 932403 - RNA, 22 nt, Human
aagacuaaauguguucuaaagu

SEQ ID NO: 932404 - RNA, 22 nt, Human
cuuguuauuggaaaugucaugc

SEQ ID NO: 932405 - RNA, 22 nt, Human
ucacaaaugucuccuguccugu

SEQ ID NO: 932406 - RNA, 22 nt, Human
guucacaaauaugcacuuacga

SEQ ID NO: 932407 - RNA, 18 nt, Human
ggcuucucacugaccuca

SEQ ID NO: 932408 - RNA, 22 nt, Human
ccuucagucccauguuucucuu

SEQ ID NO: 932409 - RNA, 22 nt, Human
aaugucuuuucccuuacuuucc

SEQ ID NO: 932410 - RNA, 22 nt, Human
cucuuuguggaacggcaguguc

SEQ ID NO: 932411 - RNA, 22 nt, Human
cuuuacacauccuaaccagugu

SEQ ID NO: 932412 - RNA, 22 nt, Human
uacacugugguaaacucaaagu

SEQ ID NO: 932413 - RNA, 22 nt, Human
uaauggcuaaaauucagaagaa

SEQ ID NO: 932414 - RNA, 22 nt, Human
agcaguaagacuuuuuucugug

SEQ ID NO: 932415 - RNA, 22 nt, Human
acccaugaguguaucuuuaaaa

SEQ ID NO: 932416 - RNA, 22 nt, Human
ugucacuuugccuucuggacuu

SEQ ID NO: 932417 - RNA, 22 nt, Human
caauagcaggucuacagagaga

SEQ ID NO: 932418 - RNA, 20 nt, Human
cugcuugggccccucuggcc

SEQ ID NO: 932419 - RNA, 22 nt, Human
ugacuucugggugagccagcau

SEQ ID NO: 932420 - RNA, 22 nt, Human
acacaugugauucuaagacagc

SEQ ID NO: 932421 - RNA, 22 nt, Human
uuugugaagggaacagaagugu

SEQ ID NO: 932422 - RNA, 22 nt, Human
cacacaugagucuccccauugg

SEQ ID NO: 932423 - RNA, 22 nt, Human
caguaacaugucuguuaagaaa

SEQ ID NO: 932424 - RNA, 22 nt, Human
aaauacaguguguguucuuuga

SEQ ID NO: 932425 - RNA, 22 nt, Human
auucacaaaugcugccccauuc

SEQ ID NO: 932426 - RNA, 22 nt, Human
uuacacauuaacaggcagcuaa

SEQ ID NO: 932427 - RNA, 19 nt, Human
ucacaugaagccuagagaa

SEQ ID NO: 932428 - RNA, 22 nt, Human
acacaugcucauaaauaaauag

SEQ ID NO: 932429 - RNA, 21 nt, Human
acacauuaugagcauagacuc

SEQ ID NO: 932430 - RNA, 22 nt, Human
acaguaaaaagccuuagaauuu

SEQ ID NO: 932431 - RNA, 22 nt, Human
aagcauuuauagauaagaauuu

SEQ ID NO: 932432 - RNA, 22 nt, Human
ucuguuauaaaucacacugcau

SEQ ID NO: 932433 - RNA, 22 nt, Human
uggcuucuugacuucuuggcug

SEQ ID NO: 932434 - RNA, 22 nt, Human
uaaacagcuacugugucaaagg

SEQ ID NO: 932435 - RNA, 22 nt, Human
acacauuaucucauuaaauacu

SEQ ID NO: 932436 - RNA, 22 nt, Human
cagagaaagacuugcccuuagu

SEQ ID NO: 932437 - RNA, 22 nt, Human
gccaccaugucuggcugaguuu

SEQ ID NO: 932438 - RNA, 22 nt, Human
guagcaucuguuggcugcuccu

SEQ ID NO: 932439 - RNA, 22 nt, Human
agcucacauucucaucagaugu

SEQ ID NO: 932440 - RNA, 22 nt, Human
augaaacagaguacuuaauaua

SEQ ID NO: 932441 - RNA, 22 nt, Human
ucuggcucuauaacuccuagcu

SEQ ID NO: 932442 - RNA, 22 nt, Human
acacauggucuacuucuucuca

SEQ ID NO: 932443 - RNA, 22 nt, Human
caaggaauauuuaagaacguca

SEQ ID NO: 932444 - RNA, 22 nt, Human
auuuguugcuagcagcacugau

SEQ ID NO: 932445 - RNA, 22 nt, Human
augauauuugcaaugugcuugc

SEQ ID NO: 932446 - RNA, 22 nt, Human
ugucuuucugcaccaccucaca

SEQ ID NO: 932447 - RNA, 22 nt, Human
auggcuuuguguucagagcuga

SEQ ID NO: 932448 - RNA, 22 nt, Human
ucuguuauucugucuauugcca

SEQ ID NO: 932449 - RNA, 22 nt, Human
uuauucacucauuuaacauuau

SEQ ID NO: 932450 - RNA, 22 nt, Human
gauauauguaaaaguagacaga

SEQ ID NO: 932451 - RNA, 22 nt, Human
cuguuacuguauuuaaucaucu

SEQ ID NO: 932452 - RNA, 22 nt, Human
acacagugguguuuacaaaauu

SEQ ID NO: 932453 - RNA, 22 nt, Human
acacaugaccuccgcagcagca

SEQ ID NO: 932454 - RNA, 22 nt, Human
uuacacaugucucaguggaaau

SEQ ID NO: 932455 - RNA, 22 nt, Human
ucuuggcugcguccuggcugug

SEQ ID NO: 932456 - RNA, 22 nt, Human
uauggcuuaggagaguuuaacu

SEQ ID NO: 932457 - RNA, 22 nt, Human
guuuuacaagguuaaucagcag

SEQ ID NO: 932458 - RNA, 22 nt, Human
ucuguagcuucuugagaggcca

SEQ ID NO: 932459 - RNA, 22 nt, Human
agauggcugggccccaccccag

SEQ ID NO: 932460 - RNA, 22 nt, Human
ucugugcuuucccugccuucuu

SEQ ID NO: 932461 - RNA, 22 nt, Human
cauggcuuuuagcccuacauga

SEQ ID NO: 932462 - RNA, 22 nt, Human
uuuacacauaccucuuuaaagu

SEQ ID NO: 932463 - RNA, 22 nt, Human
auggcuugauagaaagcuaguu

SEQ ID NO: 932464 - RNA, 22 nt, Human
uaucuguuaaaacaagcuuuaa

SEQ ID NO: 932465 - RNA, 22 nt, Human
uuaaauaguaggucuauuuugg

SEQ ID NO: 932466 - RNA, 22 nt, Human
aguuacaaacacuaucaguucu

SEQ ID NO: 932467 - RNA, 22 nt, Human
gaaauguaggcauaauuauuuu

SEQ ID NO: 932468 - RNA, 22 nt, Human
aagagauugguuauaagagauu

SEQ ID NO: 932469 - RNA, 18 nt, Human
cauuccaaguucuaccuc

SEQ ID NO: 932470 - RNA, 22 nt, Human
uugucuggucaaaucacuugua

SEQ ID NO: 932471 - RNA, 19 nt, Human
auaaauaaaaagugggaga

SEQ ID NO: 932472 - RNA, 22 nt, Human
ugaguucucaugaaaucuaguu

SEQ ID NO: 932473 - RNA, 22 nt, Human
ccacuguuuccuuucugcuggc

SEQ ID NO: 932474 - RNA, 22 nt, Human
agccauuuugguaaugauaaca

SEQ ID NO: 932475 - RNA, 22 nt, Human
ugucucuucagcccauggcuuc

SEQ ID NO: 932476 - RNA, 23 nt, Human
ucacauuuaaccccucagaccuc

SEQ ID NO: 932477 - RNA, 22 nt, Human
ccuggcacauaauaguggcuca

SEQ ID NO: 932478 - RNA, 23 nt, Human
ugagucaccacaguuacagucac

SEQ ID NO: 932479 - RNA, 17 nt, Human
auggcuuugucacacag

SEQ ID NO: 932480 - RNA, 21 nt, Human
cuuauucacuguuauuuauca

SEQ ID NO: 932481 - RNA, 22 nt, Human
auuucuacaguacacaugcauu

SEQ ID NO: 932482 - RNA, 22 nt, Human
gaaaacauccagagauagaccu

SEQ ID NO: 932483 - RNA, 21 nt, Human
uacaugaguguaugagcauau

SEQ ID NO: 932484 - RNA, 18 nt, Human
acaguaaagaaaggaauu

SEQ ID NO: 932485 - RNA, 20 nt, Human
uucuaauuugauggaguagc

SEQ ID NO: 932486 - RNA, 22 nt, Human
ugaguucaaagacagguauagg

SEQ ID NO: 932487 - RNA, 22 nt, Human
aaaccaucagauaauucauacu

SEQ ID NO: 932488 - RNA, 22 nt, Human
acaagguuugguaccacaucca

SEQ ID NO: 932489 - RNA, 22 nt, Human
cauucuaucuuggacuggaucu

SEQ ID NO: 932490 - RNA, 22 nt, Human
aaacacaucauucaugucguca

SEQ ID NO: 932491 - RNA, 22 nt, Human
gacaguauccagguggugaaga

SEQ ID NO: 932492 - RNA, 21 nt, Human
gcacaugagggagggcaugcc

SEQ ID NO: 932493 - RNA, 22 nt, Human
gagaagcaaucagcagccaccc

SEQ ID NO: 932494 - RNA, 22 nt, Human
aguucccaggugaugcugaugu

SEQ ID NO: 932495 - RNA, 22 nt, Human
caccacuguaucccuagcacuu

SEQ ID NO: 932496 - RNA, 22 nt, Human
uuacucugaauguuucuacuga

SEQ ID NO: 932497 - RNA, 23 nt, Human
aaacuucaguagugucaucagcc

SEQ ID NO: 932498 - RNA, 22 nt, Human
uuauuauggcaguuuucuaggu

SEQ ID NO: 932499 - RNA, 22 nt, Human
uuugacaccaggagagaaaaca

SEQ ID NO: 932500 - RNA, 22 nt, Human
uuuuauugggaguccucuacug

SEQ ID NO: 932501 - RNA, 22 nt, Human
cuagaaacauuacauguguuaa

SEQ ID NO: 932502 - RNA, 22 nt, Human
gagaagcaaucgugacaucucc

SEQ ID NO: 932503 - RNA, 22 nt, Human
gcuuuacacagcugguucuugu

SEQ ID NO: 932504 - RNA, 18 nt, Human
ugcuuggagcauuuacca

SEQ ID NO: 932505 - RNA, 22 nt, Human
cuggcuucccugucuuauggaa

SEQ ID NO: 932506 - RNA, 22 nt, Human
ucuucauuuuacaggcagaccu

SEQ ID NO: 932507 - RNA, 22 nt, Human
agagaacauauuuuguaugauu

SEQ ID NO: 932508 - RNA, 18 nt, Human
auggcuucugaguggagg

SEQ ID NO: 932509 - RNA, 21 nt, Human
uggcuucugccaauguuaaga

SEQ ID NO: 932510 - RNA, 22 nt, Human
caucaugccccgcuacagugca

SEQ ID NO: 932511 - RNA, 22 nt, Human
uggcuucucuguuuuaguauuu

SEQ ID NO: 932512 - RNA, 22 nt, Human
caccacugaauuguucacuuuc

SEQ ID NO: 932513 - RNA, 22 nt, Human
auacagaacaagccucaccucc

SEQ ID NO: 932514 - RNA, 22 nt, Human
uaacauguguauugguuuccua

SEQ ID NO: 932515 - RNA, 22 nt, Human
uauggcuucugcuuucuugacu

SEQ ID NO: 932516 - RNA, 22 nt, Human
uaucuguuuauuguuacuguca

SEQ ID NO: 932517 - RNA, 22 nt, Human
uuaugcaaggacuuauuacagu

SEQ ID NO: 932518 - RNA, 22 nt, Human
aguaaacauagaauguucuucc

SEQ ID NO: 932519 - RNA, 20 nt, Human
gaaauguaucucuugauucu

SEQ ID NO: 932520 - RNA, 22 nt, Human
gacauuuagaaguuagauucaa

SEQ ID NO: 932521 - RNA, 17 nt, Human
aaacuucauucucagga

SEQ ID NO: 932522 - RNA, 22 nt, Human
ucacagaaagcuguguccugac

SEQ ID NO: 932523 - RNA, 22 nt, Human
uccuucagcuacucaguuucca

SEQ ID NO: 932524 - RNA, 22 nt, Human
auuguaacaggaucccuguggc

SEQ ID NO: 932525 - RNA, 22 nt, Human
augcaauuuacuguacauaaau

SEQ ID NO: 932526 - RNA, 22 nt, Human
uuucucuggccucaguuuaaca

SEQ ID NO: 932527 - RNA, 22 nt, Human
uccuucagaaaaccucagucuu

SEQ ID NO: 932528 - RNA, 22 nt, Human
auacacauauguguguauaugu

SEQ ID NO: 932529 - RNA, 22 nt, Human
auuacaauaauacaugcucauu

SEQ ID NO: 932530 - RNA, 22 nt, Human
guugugaauagugccgcaauaa

SEQ ID NO: 932531 - RNA, 22 nt, Human
uaacuucagcgaguucucuuaa

SEQ ID NO: 932532 - RNA, 22 nt, Human
cauuaaaucuuccagaccucac

SEQ ID NO: 932533 - RNA, 22 nt, Human
gucagacugcacucaaggacag

SEQ ID NO: 932534 - RNA, 22 nt, Human
ucuuugcaugcauuuucccuua

SEQ ID NO: 932535 - RNA, 21 nt, Human
aaagcaucacgaacauuuggg

SEQ ID NO: 932536 - RNA, 22 nt, Human
auaaccaugauuaaucuaagaa

SEQ ID NO: 932537 - RNA, 22 nt, Human
gugcuucucuucacacccaacu

SEQ ID NO: 932538 - RNA, 22 nt, Human
augugaaauagcuggauaugaa

SEQ ID NO: 932539 - RNA, 22 nt, Human
uagaaacauauaggauggcagg

SEQ ID NO: 932540 - RNA, 22 nt, Human
uccacagcuguccuguaacagg

SEQ ID NO: 932541 - RNA, 22 nt, Human
auucacaaaaugauauagauac

SEQ ID NO: 932542 - RNA, 18 nt, Human
aaguaacagaagagcaca

SEQ ID NO: 932543 - RNA, 22 nt, Human
uguuauucuaguggaucacguc

SEQ ID NO: 932544 - RNA, 22 nt, Human
ugugcucuggaguugccuucac

SEQ ID NO: 932545 - RNA, 22 nt, Human
uucagacuggcuacauuuucau

SEQ ID NO: 932546 - RNA, 22 nt, Human
aacacauggcaagagcaggaaa

SEQ ID NO: 932547 - RNA, 21 nt, Human
auuucagagcacacaaguaaa

SEQ ID NO: 932548 - RNA, 22 nt, Human
uuaaauuaggacucuaguucug

SEQ ID NO: 932549 - RNA, 22 nt, Human
agcucuccaucuaucugugaug

SEQ ID NO: 932550 - RNA, 22 nt, Human
auagaugguauuuagacuagcg

SEQ ID NO: 932551 - RNA, 22 nt, Human
acaugaaaacugguuccuucag

SEQ ID NO: 932552 - RNA, 22 nt, Human
aucaacagguauggaugagauu

SEQ ID NO: 932553 - RNA, 22 nt, Human
uguggcuuccacgauggucacc

SEQ ID NO: 932554 - RNA, 22 nt, Human
cugcuuggcuuauaaccucagg

SEQ ID NO: 932555 - RNA, 22 nt, Human
agcaugaagacuucagagcuag

SEQ ID NO: 932556 - RNA, 22 nt, Human
acacuguugcuggcacagacag

SEQ ID NO: 932557 - RNA, 22 nt, Human
augugcuuggaaaagcaguggu

SEQ ID NO: 932558 - RNA, 22 nt, Human
agacuguuaauuucaauuaaaa

SEQ ID NO: 932559 - RNA, 22 nt, Human
cuguuggagucauuccuuccag

SEQ ID NO: 932560 - RNA, 22 nt, Human
guccaaauuuuucacauguaga

SEQ ID NO: 932561 - RNA, 22 nt, Human
uacuuuuaugugaugaaaucug

SEQ ID NO: 932562 - RNA, 22 nt, Human
ccauuaaagcaccacuguaaua

SEQ ID NO: 932563 - RNA, 22 nt, Human
acacaugagaaacaucaguugu

SEQ ID NO: 932564 - RNA, 22 nt, Human
acacaaugcauauuuuuccaga

SEQ ID NO: 932565 - RNA, 22 nt, Human
aauggcuuugacauuuucaaau

SEQ ID NO: 932566 - RNA, 18 nt, Human
augcuucugauagaagca

SEQ ID NO: 932567 - RNA, 22 nt, Human
ugacaaugauuagguagcuucu

SEQ ID NO: 932568 - RNA, 22 nt, Human
aagacaauuuugaguaugcaca

SEQ ID NO: 932569 - RNA, 22 nt, Human
ccacugucuuuuccaggcugaa

SEQ ID NO: 932570 - RNA, 22 nt, Human
uaaccuguuaagggcugaccca

SEQ ID NO: 932571 - RNA, 22 nt, Human
auuuacaccuucuucgauucuc

SEQ ID NO: 932572 - RNA, 22 nt, Human
agauggcuagauugcaagaacu

SEQ ID NO: 932573 - RNA, 22 nt, Human
uuccaaaugcccaucuacacag

SEQ ID NO: 932574 - RNA, 22 nt, Human
ucacagaacaagccugguggag

SEQ ID NO: 932575 - RNA, 22 nt, Human
agaaaucuuugaaguguaaugu

SEQ ID NO: 932576 - RNA, 22 nt, Human
auggaaauguuccauauauuga

SEQ ID NO: 932577 - RNA, 22 nt, Human
caaugcuucucauuagccaaug

SEQ ID NO: 932578 - RNA, 21 nt, Human
ugucaguuauaaucaccacag

SEQ ID NO: 932579 - RNA, 22 nt, Human
acacuuuaucaauauucaaaaa

SEQ ID NO: 932580 - RNA, 22 nt, Human
aguucacaccaaaguuagguag

SEQ ID NO: 932581 - RNA, 22 nt, Human
ccugcucaacgaauauggcgau

SEQ ID NO: 932582 - RNA, 22 nt, Human
ugcucugggaccgucauuaaaa

SEQ ID NO: 932583 - RNA, 22 nt, Human
uuuccaaaggcuaaacucaguu

SEQ ID NO: 932584 - RNA, 22 nt, Human
gcaaauguggcuuccuuucuag

SEQ ID NO: 932585 - RNA, 22 nt, Human
acacuucuauucccugcacaaa

SEQ ID NO: 932586 - RNA, 23 nt, Human
ucuuggcuggacaagucacucac

SEQ ID NO: 932587 - RNA, 22 nt, Human
cacagaacaccaaagaaccuuc

SEQ ID NO: 932588 - RNA, 22 nt, Human
cauauuguaaaagguugaaucc

SEQ ID NO: 932589 - RNA, 22 nt, Human
gcacaugaggcugucuuugucu

SEQ ID NO: 932590 - RNA, 22 nt, Human
cuuuacacaugagaccugcaau

SEQ ID NO: 932591 - RNA, 22 nt, Human
auuaugaaguugagggacccug

SEQ ID NO: 932592 - RNA, 22 nt, Human
augcuuuacaguuuuccaaaca

SEQ ID NO: 932593 - RNA, 22 nt, Human
gcuuuacauguuucccuuuaag

SEQ ID NO: 932594 - RNA, 22 nt, Human
uuacaucuaaacugugaacaau

SEQ ID NO: 932595 - RNA, 22 nt, Human
ucagagaacuccacaccuuagg

SEQ ID NO: 932596 - RNA, 22 nt, Human
uuccacaagugauaucuagcug

SEQ ID NO: 932597 - RNA, 22 nt, Human
aacauuuaugauugagguaaau

SEQ ID NO: 932598 - RNA, 22 nt, Human
uaaucuguuguuaauauugacu

SEQ ID NO: 932599 - RNA, 22 nt, Human
caugagaaugaagaagacuuaa

SEQ ID NO: 932600 - RNA, 22 nt, Human
cuuacauugucuuaguuuucaa

SEQ ID NO: 932601 - RNA, 22 nt, Human
agagaaauuucccugccuucug

SEQ ID NO: 932602 - RNA, 22 nt, Human
uccugaagaugaaaagagaggu

SEQ ID NO: 932603 - RNA, 22 nt, Human
ucucuggcagacaccucccuga

SEQ ID NO: 932604 - RNA, 22 nt, Human
uuuauucacuucagugccaaag

SEQ ID NO: 932605 - RNA, 22 nt, Human
ccugugcucccauagcuucugu

SEQ ID NO: 932606 - RNA, 22 nt, Human
cuaaauuaucaugagaauuaug

SEQ ID NO: 932607 - RNA, 22 nt, Human
augugcuuauggucucugguug

SEQ ID NO: 932608 - RNA, 22 nt, Human
aaucagaccguucuggcugucc

SEQ ID NO: 932609 - RNA, 22 nt, Human
cuucucuggcauagcaagcagg

SEQ ID NO: 932610 - RNA, 23 nt, Human
uuuagucaguugacagccauaua

SEQ ID NO: 932611 - RNA, 22 nt, Human
gcaguguguggugagggcugcc

SEQ ID NO: 932612 - RNA, 20 nt, Human
uuuauucagccuacccucuu

SEQ ID NO: 932613 - RNA, 22 nt, Human
aaguaaauguuggagcucaaau

SEQ ID NO: 932614 - RNA, 22 nt, Human
uaucuguuaugggcugaauugc

SEQ ID NO: 932615 - RNA, 22 nt, Human
uucacaaaaugguuuguugaug

SEQ ID NO: 932616 - RNA, 18 nt, Human
acauuucucucugcguga

SEQ ID NO: 932617 - RNA, 22 nt, Human
acuuugcaaugggcagaaccca

SEQ ID NO: 932618 - RNA, 22 nt, Human
ccacagauuauuucuaaacagg

SEQ ID NO: 932619 - RNA, 22 nt, Human
uagaaacagagagauaugcccc

SEQ ID NO: 932620 - RNA, 22 nt, Human
acauuauaguugcuacagagua

SEQ ID NO: 932621 - RNA, 22 nt, Human
acaauagucaaugcacgucauu

SEQ ID NO: 932622 - RNA, 22 nt, Human
ugugcuucaucacuucucaguu

SEQ ID NO: 932623 - RNA, 22 nt, Human
ugauuacacuauuugggaauag

SEQ ID NO: 932624 - RNA, 22 nt, Human
acauuuauauaacucacuagga

SEQ ID NO: 932625 - RNA, 22 nt, Human
uccugaagagcccugcucugug

SEQ ID NO: 932626 - RNA, 22 nt, Human
ucaccaaggcauuuucacagca

SEQ ID NO: 932627 - RNA, 22 nt, Human
acaccaugaugagugauguagc

SEQ ID NO: 932628 - RNA, 22 nt, Human
auuuuguggcagaugcagaacc

SEQ ID NO: 932629 - RNA, 22 nt, Human
cuguuguagcugcgcugcuuca

SEQ ID NO: 932630 - RNA, 22 nt, Human
ucaucaaaagccuucuggguua

SEQ ID NO: 932631 - RNA, 22 nt, Human
caaauacuuacugaaccugugc

SEQ ID NO: 932632 - RNA, 17 nt, Human
uucagcaguguuucucc

SEQ ID NO: 932633 - RNA, 20 nt, Human
uggcuucucuucacuccugu

SEQ ID NO: 932634 - RNA, 22 nt, Human
aguucccuccacaacuucucac

SEQ ID NO: 932635 - RNA, 22 nt, Human
cccuggcaugcaugucccuggc

SEQ ID NO: 932636 - RNA, 22 nt, Human
ucaaauuaguggaauaauaaug

SEQ ID NO: 932637 - RNA, 22 nt, Human
auuccaauuguacuugcuuuua

SEQ ID NO: 932638 - RNA, 22 nt, Human
cugucacuuaaauucaggcuga

SEQ ID NO: 932639 - RNA, 22 nt, Human
ugaguuacugccuaguaacuug

SEQ ID NO: 932640 - RNA, 22 nt, Human
uucacaaacaccagaauggcua

SEQ ID NO: 932641 - RNA, 19 nt, Human
ucaacaguggugcugugga

SEQ ID NO: 932642 - RNA, 22 nt, Human
ugaagcuuuccuguggucagga

SEQ ID NO: 932643 - RNA, 22 nt, Human
caacuucaccaggguuccuaga

SEQ ID NO: 932644 - RNA, 22 nt, Human
uucacacuuuggaauuccaccu

SEQ ID NO: 932645 - RNA, 22 nt, Human
uugacuuuacaguuuucuuagg

SEQ ID NO: 932646 - RNA, 22 nt, Human
uacacaugcauguacuccagga

SEQ ID NO: 932647 - RNA, 22 nt, Human
ucaguuaccugacagugguuau

SEQ ID NO: 932648 - RNA, 22 nt, Human
caauuuuauugguccaaauaca

SEQ ID NO: 932649 - RNA, 22 nt, Human
uccuucagcucucuauuuagau

SEQ ID NO: 932650 - RNA, 22 nt, Human
ggcuccuggaggcaccacuggu

SEQ ID NO: 932651 - RNA, 22 nt, Human
auucauucugaccucaagagaa

SEQ ID NO: 932652 - RNA, 22 nt, Human
ccugaguagcuggaauuaaagg

SEQ ID NO: 932653 - RNA, 22 nt, Human
uuguaaaugaccuuuucuaauu

SEQ ID NO: 932654 - RNA, 22 nt, Human
auacacaucuauuuaagagaca

SEQ ID NO: 932655 - RNA, 22 nt, Human
cuguggcugugaaacuucucag

SEQ ID NO: 932656 - RNA, 22 nt, Human
uguuacacagcagaauagcaag

SEQ ID NO: 932657 - RNA, 22 nt, Human
uagcuagcugcacaggcccugg

SEQ ID NO: 932658 - RNA, 22 nt, Human
uuuaucuguuguaccugcauug

SEQ ID NO: 932659 - RNA, 22 nt, Human
caucaaauaaagaaauuccuug

SEQ ID NO: 932660 - RNA, 22 nt, Human
acaucaugagagacuuaaauug

SEQ ID NO: 932661 - RNA, 22 nt, Human
aggaagagcauucacaugguag

SEQ ID NO: 932662 - RNA, 22 nt, Human
acucuguuugcagguagcucag

SEQ ID NO: 932663 - RNA, 22 nt, Human
gcaggagacuggcugugguagu

SEQ ID NO: 932664 - RNA, 23 nt, Human
aagcaugguucacaguuaguacu

SEQ ID NO: 932665 - RNA, 19 nt, Human
acacaugaggagggacccc

SEQ ID NO: 932666 - RNA, 22 nt, Human
cuguagcagugugcucuuuuuc

SEQ ID NO: 932667 - RNA, 22 nt, Human
cauuucuccgccgagaucacug

SEQ ID NO: 932668 - RNA, 22 nt, Human
aagcuucauauaugugugaguc

SEQ ID NO: 932669 - RNA, 22 nt, Human
gcauggcuauucuaacucacau

SEQ ID NO: 932670 - RNA, 22 nt, Human
cuaaacauguuggugcuuuaaa

SEQ ID NO: 932671 - RNA, 22 nt, Human
uuuaucuggacugugauauaaa

SEQ ID NO: 932672 - RNA, 22 nt, Human
auggcuuuugaugcuaagccaa

SEQ ID NO: 932673 - RNA, 22 nt, Human
aaacacauuagcccuguggaaa

SEQ ID NO: 932674 - RNA, 22 nt, Human
cugcugcucuugugcauuagug

SEQ ID NO: 932675 - RNA, 22 nt, Human
acauuuagaugguguuauagua

SEQ ID NO: 932676 - RNA, 22 nt, Human
ucacaugacuuuuugguggccu

SEQ ID NO: 932677 - RNA, 22 nt, Human
augacuuuguuguuuuccagcg

SEQ ID NO: 932678 - RNA, 22 nt, Human
acacauuaugagcaguugucuu

SEQ ID NO: 932679 - RNA, 22 nt, Human
cuuguagcugacuaucuuguuc

SEQ ID NO: 932680 - RNA, 20 nt, Human
ccacaugagcucuuucugac

SEQ ID NO: 932681 - RNA, 20 nt, Human
uucagaguuuacucaaacug

SEQ ID NO: 932682 - RNA, 22 nt, Human
acacagagcuucucaacuggga

SEQ ID NO: 932683 - RNA, 22 nt, Human
uuuagcaauuucuaaaaguguu

SEQ ID NO: 932684 - RNA, 22 nt, Human
gaugucuuaagcccagaaguuc

SEQ ID NO: 932685 - RNA, 22 nt, Human
gcauaggccacuagugccagga

SEQ ID NO: 932686 - RNA, 22 nt, Human
uagcacauaacuuagaauaguu

SEQ ID NO: 932687 - RNA, 22 nt, Human
augugcuugagggaaaucaguu

SEQ ID NO: 932688 - RNA, 22 nt, Human
agcacaugcacagugcuacacu

SEQ ID NO: 932689 - RNA, 22 nt, Human
aagaguaugcaugcauguuugu

SEQ ID NO: 932690 - RNA, 22 nt, Human
aauagauucaugguuaagagca

SEQ ID NO: 932691 - RNA, 22 nt, Human
cauuuaguuuugcaguagcagg

SEQ ID NO: 932692 - RNA, 22 nt, Human
uuucacagagaaauauaacagg

SEQ ID NO: 932693 - RNA, 22 nt, Human
augcuuggcguuucacuuccug

SEQ ID NO: 932694 - RNA, 22 nt, Human
uacacaugacaguggacugaga

SEQ ID NO: 932695 - RNA, 22 nt, Human
auauauucuuaaagaaucugac

SEQ ID NO: 932696 - RNA, 19 nt, Human
uggcuucuguuuucauguu

SEQ ID NO: 932697 - RNA, 23 nt, Human
ccuucagaagaaguaacaggggc

SEQ ID NO: 932698 - RNA, 22 nt, Human
cccugcuaguccuuccuuggcu

SEQ ID NO: 932699 - RNA, 22 nt, Human
ccuaacuuucauuaggccccag

SEQ ID NO: 932700 - RNA, 22 nt, Human
auuuccaugucgguauuuuaua

SEQ ID NO: 932701 - RNA, 22 nt, Human
ucuuggcugugcaugcaucuuc

SEQ ID NO: 932702 - RNA, 22 nt, Human
acauggcuaaagcaagucuaga

SEQ ID NO: 932703 - RNA, 22 nt, Human
aaaccugucugauuauggagac

SEQ ID NO: 932704 - RNA, 22 nt, Human
ccacccuggguucugaugugga

SEQ ID NO: 932705 - RNA, 22 nt, Human
ucagaaauuuucucaguaguuc

SEQ ID NO: 932706 - RNA, 22 nt, Human
uuguaacaguagcugucagcuc

SEQ ID NO: 932707 - RNA, 22 nt, Human
aucuuugugcuaauguaguucu

SEQ ID NO: 932708 - RNA, 22 nt, Human
gaugucuucucaacuguagacc

SEQ ID NO: 932709 - RNA, 22 nt, Human
acacaugauuaaugccaagcau

SEQ ID NO: 932710 - RNA, 22 nt, Human
ccucuuugugccugcaggcugc

SEQ ID NO: 932711 - RNA, 22 nt, Human
aaaacauguccauacagaaacu

SEQ ID NO: 932712 - RNA, 22 nt, Human
cuggcaccuccagcucauggcc

SEQ ID NO: 932713 - RNA, 19 nt, Human
acucuguuguacuugaggg

SEQ ID NO: 932714 - RNA, 22 nt, Human
uauuaugaggcuuagggaugac

SEQ ID NO: 932715 - RNA, 18 nt, Human
uauaaccucuguuacuca

SEQ ID NO: 932716 - RNA, 22 nt, Human
gcuucuccucccgcucccaggc

SEQ ID NO: 932717 - RNA, 22 nt, Human
aacacugugcccacccuagucc

SEQ ID NO: 932718 - RNA, 22 nt, Human
ucucaucucaaauuguaauccc

SEQ ID NO: 932719 - RNA, 22 nt, Human
aauaggaaaauauuuaacaaga

SEQ ID NO: 932720 - RNA, 22 nt, Human
ggcuucucucccccagcuccac

SEQ ID NO: 932721 - RNA, 22 nt, Human
ucuuggcuucuguauuuccugu

SEQ ID NO: 932722 - RNA, 21 nt, Human
ucauuuauugagaaaugacug

SEQ ID NO: 932723 - RNA, 22 nt, Human
aucugagucaaauauuucauuu

SEQ ID NO: 932724 - RNA, 21 nt, Human
ucuuuacauuugccucuugca

SEQ ID NO: 932725 - RNA, 22 nt, Human
uggcaccaucaaggcugagaac

SEQ ID NO: 932726 - RNA, 22 nt, Human
aaauauguaagauuagcacuag

SEQ ID NO: 932727 - RNA, 22 nt, Human
uuuauugcccuguaguacagga

SEQ ID NO: 932728 - RNA, 22 nt, Human
uuguagcuuaucaaggcuguuu

SEQ ID NO: 932729 - RNA, 22 nt, Human
aagcacugugccucauaucuga

SEQ ID NO: 932730 - RNA, 22 nt, Human
ucuuuacaguccucugucaauc

SEQ ID NO: 932731 - RNA, 22 nt, Human
accugcuagaagcaaaugucug

SEQ ID NO: 932732 - RNA, 22 nt, Human
acagucuuuaauuucuuugugg

SEQ ID NO: 932733 - RNA, 22 nt, Human
ucugaguucauaccaggcuacc

SEQ ID NO: 932734 - RNA, 22 nt, Human
uuugugaacaaacaugaagaug

SEQ ID NO: 932735 - RNA, 20 nt, Human
aagcauggucaaaacuuaug

SEQ ID NO: 932736 - RNA, 22 nt, Human
ccuuccaguauguuaagauggu

SEQ ID NO: 932737 - RNA, 22 nt, Human
uauuaugaggacugguguaagg

SEQ ID NO: 932738 - RNA, 22 nt, Human
cugccacucugggugggccugg

SEQ ID NO: 932739 - RNA, 22 nt, Human
aaacuguuccuuuuucagcaac

SEQ ID NO: 932740 - RNA, 22 nt, Human
uauuucaacguaugaaaagcug

SEQ ID NO: 932741 - RNA, 22 nt, Human
aauggcuuacccuggauugugu

SEQ ID NO: 932742 - RNA, 17 nt, Human
ccuguuguugccuuugc

SEQ ID NO: 932743 - RNA, 22 nt, Human
agcagagaagacacaggcuuca

SEQ ID NO: 932744 - RNA, 22 nt, Human
uauccuguguacugucuaguac

SEQ ID NO: 932745 - RNA, 22 nt, Human
aauggcuucugaagcacacuuu

SEQ ID NO: 932746 - RNA, 22 nt, Human
cacagcaagagcuaaaugacca

SEQ ID NO: 932747 - RNA, 22 nt, Human
acaugacuauaauuacuuaaau

SEQ ID NO: 932748 - RNA, 22 nt, Human
ucuggcucuguguccucaccca

SEQ ID NO: 932749 - RNA, 20 nt, Human
cacauuaaggaaaacaacug

SEQ ID NO: 932750 - RNA, 22 nt, Human
cuccugucaauaggcuccuggc

SEQ ID NO: 932751 - RNA, 22 nt, Human
cuaaccuguugaaggaauugcu

SEQ ID NO: 932752 - RNA, 22 nt, Human
uagcuaauggugaagauucaga

SEQ ID NO: 932753 - RNA, 22 nt, Human
aaacagcaauggagaagccagg

SEQ ID NO: 932754 - RNA, 22 nt, Human
uauggcuuuucuuuccuagugu

SEQ ID NO: 932755 - RNA, 22 nt, Human
ucuuuaauguacuuucuuucac

SEQ ID NO: 932756 - RNA, 22 nt, Human
cagcaguacuucucagagguau

SEQ ID NO: 932757 - RNA, 22 nt, Human
aguaacaugaguuuuucuaaug

SEQ ID NO: 932758 - RNA, 22 nt, Human
cuguuggacuuuucaaggucug

SEQ ID NO: 932759 - RNA, 22 nt, Human
ccacccuggacaggccucugag

SEQ ID NO: 932760 - RNA, 22 nt, Human
cuguuacuaaucuuuucugcua

SEQ ID NO: 932761 - RNA, 22 nt, Human
cagcuucagggacagcuucuuu

SEQ ID NO: 932762 - RNA, 22 nt, Human
uuuguaacaaguugaucuggua

SEQ ID NO: 932763 - RNA, 22 nt, Human
ugucaucuacccguuaggcuuu

SEQ ID NO: 932764 - RNA, 22 nt, Human
uucucacagaagcacgaagccu

SEQ ID NO: 932765 - RNA, 22 nt, Human
ccugcucagagcgucuugugug

SEQ ID NO: 932766 - RNA, 22 nt, Human
uacuuugaccaccaucugauua

SEQ ID NO: 932767 - RNA, 16 nt, Human
gaucuguucuauuuca

SEQ ID NO: 932768 - RNA, 22 nt, Human
cuuugcuugacacugugauugu

SEQ ID NO: 932769 - RNA, 22 nt, Human
ugcccacaucugcuuauuucau

SEQ ID NO: 932770 - RNA, 22 nt, Human
aucuuugugaaucucaacuugg

SEQ ID NO: 932771 - RNA, 22 nt, Human
auacacauguuauuguggaagc

SEQ ID NO: 932772 - RNA, 22 nt, Human
cagagaaaaaauccugcucuca

SEQ ID NO: 932773 - RNA, 22 nt, Human
ccugaucaaguuuucuggcucc

SEQ ID NO: 932774 - RNA, 22 nt, Human
cuguggcuggccugucugacau

SEQ ID NO: 932775 - RNA, 22 nt, Human
ccuggcacugaccaggcacuga

SEQ ID NO: 932776 - RNA, 22 nt, Human
uaaccuggggcgguuucccaau

SEQ ID NO: 932777 - RNA, 22 nt, Human
uuauuaugugcuagagaaugua

SEQ ID NO: 932778 - RNA, 17 nt, Human
caacuucacaaacuguc

SEQ ID NO: 932779 - RNA, 22 nt, Human
caguaugucuacuggacaaagu

SEQ ID NO: 932780 - RNA, 22 nt, Human
gagucagaauuguauuuuaaac

SEQ ID NO: 932781 - RNA, 22 nt, Human
cauggcuuuccaguccuccacu

SEQ ID NO: 932782 - RNA, 20 nt, Human
agaaacauuucuugagaacu

SEQ ID NO: 932783 - RNA, 22 nt, Human
uauagcaauucagaauacaugu

SEQ ID NO: 932784 - RNA, 21 nt, Human
uucauucauggcauaauauag

SEQ ID NO: 932785 - RNA, 22 nt, Human
uaauaacaauuguaggacauga

SEQ ID NO: 932786 - RNA, 22 nt, Human
acuggauggugucaugagcagc

SEQ ID NO: 932787 - RNA, 22 nt, Human
uuuccacaauuugagcagcaga

SEQ ID NO: 932788 - RNA, 22 nt, Human
ucacaaaucauuuuaucugugu

SEQ ID NO: 932789 - RNA, 22 nt, Human
cauaacuuuaaagacagugugg

SEQ ID NO: 932790 - RNA, 22 nt, Human
uucuuugguguuacccagcuca

SEQ ID NO: 932791 - RNA, 20 nt, Human
aaugucuugagacauuucag

SEQ ID NO: 932792 - RNA, 22 nt, Human
uaacuucaaaauugccacaugu

SEQ ID NO: 932793 - RNA, 22 nt, Human
uuugaaugagaauuauugucau

SEQ ID NO: 932794 - RNA, 22 nt, Human
agacauuuuacauucuuccauu

SEQ ID NO: 932795 - RNA, 22 nt, Human
agaagcauuauaacaugcaagg

SEQ ID NO: 932796 - RNA, 22 nt, Human
auuuacacugguucucagagcu

SEQ ID NO: 932797 - RNA, 22 nt, Human
cacaugagguggagaugaauga

SEQ ID NO: 932798 - RNA, 22 nt, Human
uacacauguccaaggugucacc

SEQ ID NO: 932799 - RNA, 22 nt, Human
caguaacauuucaagguagagg

SEQ ID NO: 932800 - RNA, 22 nt, Human
uagaaacauguucuguucuguu

SEQ ID NO: 932801 - RNA, 22 nt, Human
cccuucagugcuaggcugccug

SEQ ID NO: 932802 - RNA, 22 nt, Human
ugucacaauuuauuucucuuga

SEQ ID NO: 932803 - RNA, 22 nt, Human
auuacacagcgguuacuacuag

SEQ ID NO: 932804 - RNA, 22 nt, Human
augacaauacuucaauaagcug

SEQ ID NO: 932805 - RNA, 22 nt, Human
ucuggcccaugauccugcuaac

SEQ ID NO: 932806 - RNA, 22 nt, Human
uuuauuccaugugucuaugacc

SEQ ID NO: 932807 - RNA, 22 nt, Human
aauuuccagaucagaugacuca

SEQ ID NO: 932808 - RNA, 22 nt, Human
uccugccaucugcuguugaucu

SEQ ID NO: 932809 - RNA, 22 nt, Human
uucacagaagaggucacauuuc

SEQ ID NO: 932810 - RNA, 22 nt, Human
ccuguaggaacgccuucauuug

SEQ ID NO: 932811 - RNA, 22 nt, Human
ucacauuugcaauugcauuguu

SEQ ID NO: 932812 - RNA, 22 nt, Human
gaacuuuaaucccuugggcuua

SEQ ID NO: 932813 - RNA, 22 nt, Human
gccuucaguaguauccucauga

SEQ ID NO: 932814 - RNA, 23 nt, Human
cacaugaccugaccuaggcuagg

SEQ ID NO: 932815 - RNA, 22 nt, Human
agagacaggguuuugucguguu

SEQ ID NO: 932816 - RNA, 22 nt, Human
uuccaagagcuuuaauuguuga

SEQ ID NO: 932817 - RNA, 22 nt, Human
accugucaacccaucaccuagg

SEQ ID NO: 932818 - RNA, 22 nt, Human
uucagaguuagacgaaaagcaa

SEQ ID NO: 932819 - RNA, 22 nt, Human
gaucuuuauacuguaauaauga

SEQ ID NO: 932820 - RNA, 18 nt, Human
caguaacuauguuguuac

SEQ ID NO: 932821 - RNA, 22 nt, Human
agaucacaguucucuauucgua

SEQ ID NO: 932822 - RNA, 22 nt, Human
gaaccuguuuauguuaccugcg

SEQ ID NO: 932823 - RNA, 22 nt, Human
aaccuguucccugguccuugac

SEQ ID NO: 932824 - RNA, 22 nt, Human
ccacaugagcuggcaaugcccu

SEQ ID NO: 932825 - RNA, 22 nt, Human
gcuuuacaaguggugcagauua

SEQ ID NO: 932826 - RNA, 21 nt, Human
ccuggcacuggccugcugagc

SEQ ID NO: 932827 - RNA, 22 nt, Human
acuguuacagggcacugaacau

SEQ ID NO: 932828 - RNA, 22 nt, Human
agucacaauaccgugugucagu

SEQ ID NO: 932829 - RNA, 22 nt, Human
aacagauaauuucuaaguuacu

SEQ ID NO: 932830 - RNA, 22 nt, Human
guacuucuggccaggcuggcca

SEQ ID NO: 932831 - RNA, 22 nt, Human
agauguguuucuaguuccugca

SEQ ID NO: 932832 - RNA, 22 nt, Human
accaaauaggcuuccuggguug

SEQ ID NO: 932833 - RNA, 19 nt, Human
cucuccaccuaacagguau

SEQ ID NO: 932834 - RNA, 22 nt, Human
cacuaaaacuacauuggaaaca

SEQ ID NO: 932835 - RNA, 22 nt, Human
auaaaucuauuggacaugugug

SEQ ID NO: 932836 - RNA, 22 nt, Human
gaacagacuuugccaauuacag

SEQ ID NO: 932837 - RNA, 22 nt, Human
augugcuuuaaagaagccagcu

SEQ ID NO: 932838 - RNA, 22 nt, Human
acuuuguagguuucagugaaac

SEQ ID NO: 932839 - RNA, 22 nt, Human
auggcucucuugaccuaggcac

SEQ ID NO: 932840 - RNA, 23 nt, Human
cuucucugagcuaggaaugcucu

SEQ ID NO: 932841 - RNA, 19 nt, Human
aagcguuucccacuugcuu

SEQ ID NO: 932842 - RNA, 22 nt, Human
gagaaaugagugauucacuuuu

SEQ ID NO: 932843 - RNA, 22 nt, Human
uucaagcagagauauuucaaga

SEQ ID NO: 932844 - RNA, 22 nt, Human
cuuucacucgagcuccugcagc

SEQ ID NO: 932845 - RNA, 22 nt, Human
acaugcauucucuaaaagcaaa

SEQ ID NO: 932846 - RNA, 22 nt, Human
uguacacauuuuuauguuaaca

SEQ ID NO: 932847 - RNA, 22 nt, Human
uuaguucacugcuauaucauca

SEQ ID NO: 932848 - RNA, 22 nt, Human
uggcuucuauugcuguggcauu

SEQ ID NO: 932849 - RNA, 22 nt, Human
aaaugugauacuguucuuuuua

SEQ ID NO: 932850 - RNA, 22 nt, Human
cucugugcucccaugcuaguaa

SEQ ID NO: 932851 - RNA, 22 nt, Human
gacauuuacugaauacugauua

SEQ ID NO: 932852 - RNA, 22 nt, Human
uuccaagaagucaacagguagu

SEQ ID NO: 932853 - RNA, 22 nt, Human
acacuguucuuugcacugagaa

SEQ ID NO: 932854 - RNA, 22 nt, Human
auuuacacauucauaagauuuc

SEQ ID NO: 932855 - RNA, 19 nt, Human
acuguagcacugcaguaua

SEQ ID NO: 932856 - RNA, 22 nt, Human
cacuguuauuacuacuauacau

SEQ ID NO: 932857 - RNA, 22 nt, Human
uuauagcagcaugauuuacaau

SEQ ID NO: 932858 - RNA, 22 nt, Human
aagacaauguuucugauagaua

SEQ ID NO: 932859 - RNA, 22 nt, Human
gcucugcccaggaccguccuug

SEQ ID NO: 932860 - RNA, 22 nt, Human
ucauguaaauguggaugcuucc

SEQ ID NO: 932861 - RNA, 22 nt, Human
cacauuuaagcagauguggacc

SEQ ID NO: 932862 - RNA, 22 nt, Human
ucacagcauuuuuagaaagauu

SEQ ID NO: 932863 - RNA, 20 nt, Human
uggcuccuggcuccucccuc

SEQ ID NO: 932864 - RNA, 22 nt, Human
uuuauucauuguuucgucgcag

SEQ ID NO: 932865 - RNA, 22 nt, Human
gaauggaaacugggagauggcc

SEQ ID NO: 932866 - RNA, 20 nt, Human
uggcugugggcaucuguuuc

SEQ ID NO: 932867 - RNA, 20 nt, Human
ucccugccuuuuacugcugg

SEQ ID NO: 932868 - RNA, 22 nt, Human
uguaaaacaaaauuuguggaga

SEQ ID NO: 932869 - RNA, 19 nt, Human
uccuguuauggagcuuagg

SEQ ID NO: 932870 - RNA, 22 nt, Human
uccuucagucuucugagccaua

SEQ ID NO: 932871 - RNA, 22 nt, Human
ccacacugaccagcugugagac

SEQ ID NO: 932872 - RNA, 22 nt, Human
acuucacauuugcaagucuugg

SEQ ID NO: 932873 - RNA, 22 nt, Human
uuacacaggcacuuaaaaugca

SEQ ID NO: 932874 - RNA, 22 nt, Human
cuguagcugggccucggcagug

SEQ ID NO: 932875 - RNA, 22 nt, Human
uccugaagcaguuagcaugagc

SEQ ID NO: 932876 - RNA, 22 nt, Human
guaaauaacugguaauuggggu

SEQ ID NO: 932877 - RNA, 22 nt, Human
aucuaaaaggagcucuuuaucu

SEQ ID NO: 932878 - RNA, 22 nt, Human
aagaaauacaugguuuuugagu

SEQ ID NO: 932879 - RNA, 22 nt, Human
cuaacauuuauugagcacuuag

SEQ ID NO: 932880 - RNA, 22 nt, Human
uagcacaugccgggagugaucu

SEQ ID NO: 932881 - RNA, 22 nt, Human
gagaagcaauuuccaacugugc

SEQ ID NO: 932882 - RNA, 22 nt, Human
uuucacacccacuaggacuguu

SEQ ID NO: 932883 - RNA, 22 nt, Human
augaaauaucuugaagaaauuc

SEQ ID NO: 932884 - RNA, 22 nt, Human
ggcuucucccuucuucugauug

SEQ ID NO: 932885 - RNA, 22 nt, Human
acacugugaucuugagaaaggu

SEQ ID NO: 932886 - RNA, 22 nt, Human
ucacaugaaaugcuguaaagaa

SEQ ID NO: 932887 - RNA, 22 nt, Human
auuacacuaaugugacaacaau

SEQ ID NO: 932888 - RNA, 22 nt, Human
agaagcauuauuuaauuuuacu

SEQ ID NO: 932889 - RNA, 22 nt, Human
uuaucugaaaaccucaaaauau

SEQ ID NO: 932890 - RNA, 22 nt, Human
acaguaacucuuuuacccuccu

SEQ ID NO: 932891 - RNA, 22 nt, Human
aaucuuuuaggggauccugagg

SEQ ID NO: 932892 - RNA, 22 nt, Human
uuugaaugugugaguuaacuuu

SEQ ID NO: 932893 - RNA, 22 nt, Human
cagagaaagaagcccauucauu

SEQ ID NO: 932894 - RNA, 22 nt, Human
acucacuucuuuuacuauaaaa

SEQ ID NO: 932895 - RNA, 22 nt, Human
uuccucagagagacagaaacua

SEQ ID NO: 932896 - RNA, 22 nt, Human
aagucacacaguuaacaugagg

SEQ ID NO: 932897 - RNA, 22 nt, Human
gauggcuuacagacaguuagga

SEQ ID NO: 932898 - RNA, 22 nt, Human
agugaugugggagaguauagcu

SEQ ID NO: 932899 - RNA, 22 nt, Human
aaaucuguuucagguauauuug

SEQ ID NO: 932900 - RNA, 22 nt, Human
acauuugacauuuaguaucagc

SEQ ID NO: 932901 - RNA, 22 nt, Human
augguuuauuagcugcacaggc

SEQ ID NO: 932902 - RNA, 22 nt, Human
aacacugugcaguguaaugcug

SEQ ID NO: 932903 - RNA, 22 nt, Human
gcuuccaucuaugucuucauca

SEQ ID NO: 932904 - RNA, 22 nt, Human
auuuagucuguaacaguacagu

SEQ ID NO: 932905 - RNA, 22 nt, Human
gaguaauuccaauauaaaucac

SEQ ID NO: 932906 - RNA, 22 nt, Human
auaaccuguuucagacauuugu

SEQ ID NO: 932907 - RNA, 22 nt, Human
uuuauucaucaucuguucauau

SEQ ID NO: 932908 - RNA, 22 nt, Human
uuugcuugauuaggauauggaa

SEQ ID NO: 932909 - RNA, 22 nt, Human
cucauauugcugguggucuaag

SEQ ID NO: 932910 - RNA, 22 nt, Human
aaacaguauuaucaauauauuu

SEQ ID NO: 932911 - RNA, 22 nt, Human
aaucuguucuacucuauucaga

SEQ ID NO: 932912 - RNA, 22 nt, Human
uuuacacaaaagauagcacacc

SEQ ID NO: 932913 - RNA, 22 nt, Human
agcuucucaggagucugaggca

SEQ ID NO: 932914 - RNA, 22 nt, Human
cguucacaucguauuauuggga

SEQ ID NO: 932915 - RNA, 22 nt, Human
uacacuuuuuacuacagauucu

SEQ ID NO: 932916 - RNA, 22 nt, Human
uugugaauagugccgcuauaaa

SEQ ID NO: 932917 - RNA, 22 nt, Human
uaagauuauacuuaaagagaaa

SEQ ID NO: 932918 - RNA, 22 nt, Human
ugccaccaucuggcuguguuga

SEQ ID NO: 932919 - RNA, 22 nt, Human
aauucacaauuauguugggaga

SEQ ID NO: 932920 - RNA, 22 nt, Human
uucagggucuagaguaucuacc

SEQ ID NO: 932921 - RNA, 22 nt, Human
ugaagagaagaaaauuaucuuu

SEQ ID NO: 932922 - RNA, 22 nt, Human
auguuucugaaguuuacagaua

SEQ ID NO: 932923 - RNA, 22 nt, Human
cacauuuaugggcugggaggca

SEQ ID NO: 932924 - RNA, 22 nt, Human
caccuguuagcucuaauuuucu

SEQ ID NO: 932925 - RNA, 22 nt, Human
cacauuuacauauaaaacuuuc

SEQ ID NO: 932926 - RNA, 22 nt, Human
aguacacaguagacuuucucau

SEQ ID NO: 932927 - RNA, 22 nt, Human
aucaagaauugggagcuauuga

SEQ ID NO: 932928 - RNA, 22 nt, Human
uuuacaacccaaguccagagag

SEQ ID NO: 932929 - RNA, 22 nt, Human
acacauuaaaacgucuacaaug

SEQ ID NO: 932930 - RNA, 22 nt, Human
uuuauuauucuguucucucuac

SEQ ID NO: 932931 - RNA, 22 nt, Human
uaauuucaccguugcuagaaau

SEQ ID NO: 932932 - RNA, 18 nt, Human
ucuuuuguccccugcugc

SEQ ID NO: 932933 - RNA, 20 nt, Human
aauggcuuauagcaugcuac

SEQ ID NO: 932934 - RNA, 22 nt, Human
aguaacagaaggccugacuuaa

SEQ ID NO: 932935 - RNA, 22 nt, Human
cccugccaaucccgucucucug

SEQ ID NO: 932936 - RNA, 22 nt, Human
cacaugaucacuucuugaaaau

SEQ ID NO: 932937 - RNA, 22 nt, Human
uacuaacuuguacacagccuaa

SEQ ID NO: 932938 - RNA, 22 nt, Human
agagaaacccuucaguguuuug

SEQ ID NO: 932939 - RNA, 22 nt, Human
uccaagaucaagguguuggcag

SEQ ID NO: 932940 - RNA, 22 nt, Human
agcuaucaguaggaccauguuc

SEQ ID NO: 932941 - RNA, 22 nt, Human
guuccacaaagauugucucucu

SEQ ID NO: 932942 - RNA, 22 nt, Human
acucacuuuccauucaagcacc

SEQ ID NO: 932943 - RNA, 22 nt, Human
aaauuucaguuggaaugagcuc

SEQ ID NO: 932944 - RNA, 22 nt, Human
cacacaugcauguaagaccucu

SEQ ID NO: 932945 - RNA, 22 nt, Human
uuccagaggagugauucagagg

SEQ ID NO: 932946 - RNA, 22 nt, Human
cagucacuccagccugccucag

SEQ ID NO: 932947 - RNA, 22 nt, Human
agaucacaguggcaacucccuu

SEQ ID NO: 932948 - RNA, 22 nt, Human
aaauuucaagcaaaguagcuau

SEQ ID NO: 932949 - RNA, 22 nt, Human
uauggcuuucuccauagggcag

SEQ ID NO: 932950 - RNA, 22 nt, Human
uuuugucuaagaacuuugcaaa

SEQ ID NO: 932951 - RNA, 22 nt, Human
uguuacuuggugucucuggcug

SEQ ID NO: 932952 - RNA, 22 nt, Human
gcuucuccagaccuucaucccc

SEQ ID NO: 932953 - RNA, 22 nt, Human
uuucucugccaguuauuuuccu

SEQ ID NO: 932954 - RNA, 20 nt, Human
uggcucucucuaguaagugg

SEQ ID NO: 932955 - RNA, 22 nt, Human
cuagagaacaacauucauaugg

SEQ ID NO: 932956 - RNA, 22 nt, Human
aaaacacacuggaccaauuuaa

SEQ ID NO: 932957 - RNA, 22 nt, Human
acauuucugcaucucagagcua

SEQ ID NO: 932958 - RNA, 22 nt, Human
aaacauguuuagaaagcagcug

SEQ ID NO: 932959 - RNA, 22 nt, Human
ucagagaauccguaagucacaa

SEQ ID NO: 932960 - RNA, 22 nt, Human
cccugcuaguugucucagugau

SEQ ID NO: 932961 - RNA, 22 nt, Human
ucuauuguaggcauguagcuug

SEQ ID NO: 932962 - RNA, 22 nt, Human
acauaacaaucauaggacauag

SEQ ID NO: 932963 - RNA, 22 nt, Human
gaccuucaagcaccauauuuau

SEQ ID NO: 932964 - RNA, 21 nt, Human
ucugugcuuuuuuggcuccua

SEQ ID NO: 932965 - RNA, 23 nt, Human
aagacuaauucuuaauugcuuag

SEQ ID NO: 932966 - RNA, 22 nt, Human
agaugucuguaauucuaagcau

SEQ ID NO: 932967 - RNA, 22 nt, Human
gauggcuucacuuacauggcug

SEQ ID NO: 932968 - RNA, 22 nt, Human
acacaugcagguauacauguuc

SEQ ID NO: 932969 - RNA, 22 nt, Human
cuaagcuuuucaaaaacauguu

SEQ ID NO: 932970 - RNA, 22 nt, Human
ucuucauuuuauagcaucugug

SEQ ID NO: 932971 - RNA, 22 nt, Human
gugcuucuuucuccucaagccu

SEQ ID NO: 932972 - RNA, 22 nt, Human
agauaaugucaaauucugucug

SEQ ID NO: 932973 - RNA, 22 nt, Human
acacaugaaucacugguggaag

SEQ ID NO: 932974 - RNA, 22 nt, Human
agaaauuaugcaguaguuuuau

SEQ ID NO: 932975 - RNA, 22 nt, Human
aggucacacuuggaucauagaa

SEQ ID NO: 932976 - RNA, 22 nt, Human
auacaguagacaaucucaugaa

SEQ ID NO: 932977 - RNA, 22 nt, Human
uaugugaauacagcaguggaug

SEQ ID NO: 932978 - RNA, 22 nt, Human
ugucucuucugccuccagcugu

SEQ ID NO: 932979 - RNA, 19 nt, Human
ccuuugaaucaggacacuu

SEQ ID NO: 932980 - RNA, 22 nt, Human
ccugccacuucuugcuauggag

SEQ ID NO: 932981 - RNA, 22 nt, Human
uggcuucuuagaccaguggccu

SEQ ID NO: 932982 - RNA, 22 nt, Human
agagaauucuggugcuaacaag

SEQ ID NO: 932983 - RNA, 22 nt, Human
cuguuaaagauaguuaagcuuc

SEQ ID NO: 932984 - RNA, 22 nt, Human
uagcauuucacugaucuucacu

SEQ ID NO: 932985 - RNA, 22 nt, Human
cugugcuuucaggccgcugugu

SEQ ID NO: 932986 - RNA, 22 nt, Human
acacagaguuugacacauggga

SEQ ID NO: 932987 - RNA, 22 nt, Human
caccacuggaggucuuggcuuu

SEQ ID NO: 932988 - RNA, 22 nt, Human
ugcaaaugcccauuuauuuucu

SEQ ID NO: 932989 - RNA, 22 nt, Human
uaauuuacuugcaaauaacaau

SEQ ID NO: 932990 - RNA, 22 nt, Human
aagcauuucaauauaauauuca

SEQ ID NO: 932991 - RNA, 22 nt, Human
uuuagcaauaucauaaggaaga

SEQ ID NO: 932992 - RNA, 22 nt, Human
aauuaauauuuguggaauuaau

SEQ ID NO: 932993 - RNA, 22 nt, Human
uucauucagcacauauuuauug

SEQ ID NO: 932994 - RNA, 22 nt, Human
aguaacaguaacaucuuccuag

SEQ ID NO: 932995 - RNA, 22 nt, Human
ugggugaaaauuuugguggcac

SEQ ID NO: 932996 - RNA, 22 nt, Human
aauggcuuuaaguagucucaca

SEQ ID NO: 932997 - RNA, 22 nt, Human
uaucuguucugcuugauuuuga

SEQ ID NO: 932998 - RNA, 22 nt, Human
cuguacuuuugcaggucacagc

SEQ ID NO: 932999 - RNA, 21 nt, Human
aacaugauauguguauggauu

SEQ ID NO: 933000 - RNA, 22 nt, Human
auaaauuaggaucugggguucc

SEQ ID NO: 933001 - RNA, 23 nt, Human
ugguggcuugugguggccaccag

SEQ ID NO: 933002 - RNA, 18 nt, Human
uuuccaagaagagagcuc

SEQ ID NO: 933003 - RNA, 22 nt, Human
ucugugcuuaacuacucacccc

SEQ ID NO: 933004 - RNA, 22 nt, Human
acuaaagucaucaaagaacuuu

SEQ ID NO: 933005 - RNA, 22 nt, Human
agcacuuugggagauaaagcug

SEQ ID NO: 933006 - RNA, 22 nt, Human
ucuuuguuauugugaauagggu

SEQ ID NO: 933007 - RNA, 22 nt, Human
auggcuucgaguauauacauag

SEQ ID NO: 933008 - RNA, 22 nt, Human
agaguauuuugauuauccugga

SEQ ID NO: 933009 - RNA, 22 nt, Human
gucuacaaagcuucaagucucu

SEQ ID NO: 933010 - RNA, 22 nt, Human
uguaggaauguuuuuaaguugg

SEQ ID NO: 933011 - RNA, 22 nt, Human
uauggcuuuaaacaacuuaggu

SEQ ID NO: 933012 - RNA, 22 nt, Human
uuacacaaaguuagcucuugca

SEQ ID NO: 933013 - RNA, 22 nt, Human
uccacaugacuucuaauaacug

SEQ ID NO: 933014 - RNA, 22 nt, Human
uucuuuggggucuccagcauag

SEQ ID NO: 933015 - RNA, 22 nt, Human
cacacaugaaguugcugagcua

SEQ ID NO: 933016 - RNA, 22 nt, Human
aacaguaucuuuuaucagaaau

SEQ ID NO: 933017 - RNA, 22 nt, Human
acauuaaauuucauagugauua

SEQ ID NO: 933018 - RNA, 22 nt, Human
ucuccuuucuggagccugcuca

SEQ ID NO: 933019 - RNA, 22 nt, Human
cauggcuugcaagcauaggaga

SEQ ID NO: 933020 - RNA, 22 nt, Human
ccacugucagaggggcugugcc

SEQ ID NO: 933021 - RNA, 22 nt, Human
agacaacaucuaguuuggugga

SEQ ID NO: 933022 - RNA, 22 nt, Human
acagcagucagugaauauuuaa

SEQ ID NO: 933023 - RNA, 22 nt, Human
uaauuuuaacugugcuguuugg

SEQ ID NO: 933024 - RNA, 20 nt, Human
uauggcuuggcaaagcuuca

SEQ ID NO: 933025 - RNA, 22 nt, Human
acuguagcugccacuggaugca

SEQ ID NO: 933026 - RNA, 22 nt, Human
auauggcuguugguagccaaca

SEQ ID NO: 933027 - RNA, 21 nt, Human
uuuagcaagaguauagugcau

SEQ ID NO: 933028 - RNA, 22 nt, Human
uugugaauagugccgcaauaaa

SEQ ID NO: 933029 - RNA, 22 nt, Human
augugaaaccugugaguagagu

SEQ ID NO: 933030 - RNA, 22 nt, Human
uggcuucugagucuccugacau

SEQ ID NO: 933031 - RNA, 22 nt, Human
acaucaguaauuaagucucaag

SEQ ID NO: 933032 - RNA, 22 nt, Human
cacaugcauaccuauguguaua

SEQ ID NO: 933033 - RNA, 22 nt, Human
ucuuuguacaggaaggcacugu

SEQ ID NO: 933034 - RNA, 22 nt, Human
augcaugauccugagcaaccca

SEQ ID NO: 933035 - RNA, 22 nt, Human
uuuuguguugccauguuaagca

SEQ ID NO: 933036 - RNA, 22 nt, Human
agaaucaaagagaaauacuuug

SEQ ID NO: 933037 - RNA, 22 nt, Human
aaauuaagaguaacucuguaga

SEQ ID NO: 933038 - RNA, 22 nt, Human
aauggcuuagcagaguuagaag

SEQ ID NO: 933039 - RNA, 22 nt, Human
uggcugagaccuucccaaauuc

SEQ ID NO: 933040 - RNA, 22 nt, Human
uauuaugaggggcagagggcau

SEQ ID NO: 933041 - RNA, 18 nt, Human
agcucacagaucuguuuu

SEQ ID NO: 933042 - RNA, 20 nt, Human
uucuuuguuccuuacauuug

SEQ ID NO: 933043 - RNA, 20 nt, Human
aguucacaggccaaauuucu

SEQ ID NO: 933044 - RNA, 22 nt, Human
aaucaguuaaauauugaguaca

SEQ ID NO: 933045 - RNA, 22 nt, Human
aauggcuuuggucuggguccca

SEQ ID NO: 933046 - RNA, 22 nt, Human
ugucaccuggaaaucacucuaa

SEQ ID NO: 933047 - RNA, 22 nt, Human
cucaaauaccucuccaugugac

SEQ ID NO: 933048 - RNA, 22 nt, Human
gugccaccuucaaaucacauug

SEQ ID NO: 933049 - RNA, 21 nt, Human
ugacuuuauuugacagcccag

SEQ ID NO: 933050 - RNA, 22 nt, Human
uuaugucaaaaugguugagauu

SEQ ID NO: 933051 - RNA, 21 nt, Human
aauggcuuauacagaaguaag

SEQ ID NO: 933052 - RNA, 22 nt, Human
cacauuuaauugguuuagggug

SEQ ID NO: 933053 - RNA, 22 nt, Human
aagcauggagcaauagaaugac

SEQ ID NO: 933054 - RNA, 22 nt, Human
aaccuuuauuugguacuauucu

SEQ ID NO: 933055 - RNA, 22 nt, Human
cuguuacaagagagagacauga

SEQ ID NO: 933056 - RNA, 23 nt, Human
aaaugugagggaaaaucuuucug

SEQ ID NO: 933057 - RNA, 22 nt, Human
accaagcacaaagaugaguaaa

SEQ ID NO: 933058 - RNA, 22 nt, Human
gcacaugacuuugaggaaacca

SEQ ID NO: 933059 - RNA, 22 nt, Human
cuguuguauuuccaacuaugua

SEQ ID NO: 933060 - RNA, 19 nt, Human
auucagcauucugcacuuc

SEQ ID NO: 933061 - RNA, 22 nt, Human
ccuggcacacgguggcauucaa

SEQ ID NO: 933062 - RNA, 19 nt, Human
auggcucugggaucacugc

SEQ ID NO: 933063 - RNA, 22 nt, Human
uuuacccauauuagcaucaagu

SEQ ID NO: 933064 - RNA, 22 nt, Human
aagcauggcuguucuagcuaua

SEQ ID NO: 933065 - RNA, 22 nt, Human
aagacacugggggcugcagcca

SEQ ID NO: 933066 - RNA, 22 nt, Human
cacagauaccuagugaaacaua

SEQ ID NO: 933067 - RNA, 22 nt, Human
ucacacaucucagguguuuaau

SEQ ID NO: 933068 - RNA, 22 nt, Human
cuuuaucagaaaacacauuagg

SEQ ID NO: 933069 - RNA, 22 nt, Human
uuggcagacugacaaucuguuu

SEQ ID NO: 933070 - RNA, 22 nt, Human
uuaaaccauaguuuaacauaag

SEQ ID NO: 933071 - RNA, 22 nt, Human
gucacacaauaguaaguggucc

SEQ ID NO: 933072 - RNA, 22 nt, Human
ucaacuuuaguguagcuauuua

SEQ ID NO: 933073 - RNA, 22 nt, Human
uagucagcaugaaauaagcagc

SEQ ID NO: 933074 - RNA, 22 nt, Human
cauggcuuaccccaggagcagc

SEQ ID NO: 933075 - RNA, 22 nt, Human
aauggcuuuugcacuuaaaucg

SEQ ID NO: 933076 - RNA, 22 nt, Human
aaugugcuccaauugucuacuu

SEQ ID NO: 933077 - RNA, 23 nt, Human
ucugugcucgggggagcucucug

SEQ ID NO: 933078 - RNA, 22 nt, Human
ucacaagauauuucaguccuuu

SEQ ID NO: 933079 - RNA, 19 nt, Human
agauggcuuggacugaaaa

SEQ ID NO: 933080 - RNA, 22 nt, Human
acacuuuuguguauauccaguu

SEQ ID NO: 933081 - RNA, 22 nt, Human
uugugaaauguuucaaaauagu

SEQ ID NO: 933082 - RNA, 19 nt, Human
gcucagagucccccugcgg

SEQ ID NO: 933083 - RNA, 22 nt, Human
acuaacuugcugagugaccaug

SEQ ID NO: 933084 - RNA, 22 nt, Human
accuuuauaugaaagaugacau

SEQ ID NO: 933085 - RNA, 22 nt, Human
uagacuauagcucacagugcuu

SEQ ID NO: 933086 - RNA, 22 nt, Human
cagcagaggaaagcaaaucuaa

SEQ ID NO: 933087 - RNA, 22 nt, Human
ugaguaauucacaaaacagaug

SEQ ID NO: 933088 - RNA, 22 nt, Human
acaguuuaucgauucaccuacc

SEQ ID NO: 933089 - RNA, 22 nt, Human
augcuuggccccuuuauagccu

SEQ ID NO: 933090 - RNA, 22 nt, Human
augugaaaauccaauggcagca

SEQ ID NO: 933091 - RNA, 22 nt, Human
caugcaguauucaggacaguuc

SEQ ID NO: 933092 - RNA, 22 nt, Human
ccuucagagguguagauugcgu

SEQ ID NO: 933093 - RNA, 22 nt, Human
aaaacacaagaagcaggguaca

SEQ ID NO: 933094 - RNA, 22 nt, Human
uuaacuggggaagcauuucaug

SEQ ID NO: 933095 - RNA, 22 nt, Human
aacauuuauauggguucaugaa

SEQ ID NO: 933096 - RNA, 22 nt, Human
ucagaucauggaucuauuacuu

SEQ ID NO: 933097 - RNA, 22 nt, Human
aaagcaugcuacuuuauauagg

SEQ ID NO: 933098 - RNA, 22 nt, Human
cuuauucauaagucagacacac

SEQ ID NO: 933099 - RNA, 22 nt, Human
acugucacugugauguuagaga

SEQ ID NO: 933100 - RNA, 22 nt, Human
uggaauucuuauucugacuuca

SEQ ID NO: 933101 - RNA, 22 nt, Human
cuucagcagccucuugcauaaa

SEQ ID NO: 933102 - RNA, 22 nt, Human
acagaguaggugcucaguaaau

SEQ ID NO: 933103 - RNA, 22 nt, Human
auccuucaaaaggaauagcagg

SEQ ID NO: 933104 - RNA, 21 nt, Human
cuucuuggggagcagcuagac

SEQ ID NO: 933105 - RNA, 22 nt, Human
cauggcuucaugaggguuuugc

SEQ ID NO: 933106 - RNA, 19 nt, Human
uucucugugcuagacucug

SEQ ID NO: 933107 - RNA, 22 nt, Human
uacacaugugcacgcguguccu

SEQ ID NO: 933108 - RNA, 22 nt, Human
gacauuuaugaaggagauaugc

SEQ ID NO: 933109 - RNA, 20 nt, Human
ucugugcuacacuccagauu

SEQ ID NO: 933110 - RNA, 22 nt, Human
uucaauucugcucugaucuuag

SEQ ID NO: 933111 - RNA, 22 nt, Human
ucuguuggcuuuuuaaaguugu

SEQ ID NO: 933112 - RNA, 22 nt, Human
ucuacaaauaaauuacuaugua

SEQ ID NO: 933113 - RNA, 21 nt, Human
agcucacaguucuguccuguc

SEQ ID NO: 933114 - RNA, 22 nt, Human
acacuuugaagauggaaacuug

SEQ ID NO: 933115 - RNA, 22 nt, Human
cagcagagggagccauugaaau

SEQ ID NO: 933116 - RNA, 22 nt, Human
ggaccaucucuagccagagcuu

SEQ ID NO: 933117 - RNA, 22 nt, Human
auuacaauaagguuuauuugua

SEQ ID NO: 933118 - RNA, 22 nt, Human
aagcagagccugagacagggau

SEQ ID NO: 933119 - RNA, 22 nt, Human
aaaucaacuugugacguuaggu

SEQ ID NO: 933120 - RNA, 22 nt, Human
cugugaauugcaacaauugcaa

SEQ ID NO: 933121 - RNA, 22 nt, Human
cacauugaaccauauauuagug

SEQ ID NO: 933122 - RNA, 22 nt, Human
cacauuuaaaaaauccacgauc

SEQ ID NO: 933123 - RNA, 22 nt, Human
cacuugcuggaugguggcucag

SEQ ID NO: 933124 - RNA, 22 nt, Human
aaacaaacaauuaguugugugg

SEQ ID NO: 933125 - RNA, 22 nt, Human
uuauuaugccauuaccucccug

SEQ ID NO: 933126 - RNA, 22 nt, Human
uagcuucagggaaaccacugcu

SEQ ID NO: 933127 - RNA, 22 nt, Human
aagacaauuuauguuaggguca

SEQ ID NO: 933128 - RNA, 22 nt, Human
gagaagcagguuuagcagacaa

SEQ ID NO: 933129 - RNA, 22 nt, Human
aaacuucaaggauuugcaaauc

SEQ ID NO: 933130 - RNA, 19 nt, Human
uccugaagauuuccucagc

SEQ ID NO: 933131 - RNA, 22 nt, Human
aacauaaauuugaaguggcaaa

SEQ ID NO: 933132 - RNA, 22 nt, Human
auuauucaauguuauuucagug

SEQ ID NO: 933133 - RNA, 22 nt, Human
cucuggcuggcaccugaucuga

SEQ ID NO: 933134 - RNA, 22 nt, Human
uuauuaugguauuucuuugcag

SEQ ID NO: 933135 - RNA, 22 nt, Human
agaaaucuauguuuugguuaga

SEQ ID NO: 933136 - RNA, 22 nt, Human
uaaccuuuuuaucuuaccucca

SEQ ID NO: 933137 - RNA, 22 nt, Human
uauggcuuucaaaggaacucgg

SEQ ID NO: 933138 - RNA, 22 nt, Human
cccugcacagccuggcucucuu

SEQ ID NO: 933139 - RNA, 19 nt, Human
ugauggaauuugacauucc

SEQ ID NO: 933140 - RNA, 20 nt, Human
gcuaggcuggugauugucaa

SEQ ID NO: 933141 - RNA, 22 nt, Human
acauuucagauucaugaaguga

SEQ ID NO: 933142 - RNA, 22 nt, Human
aaaccuguuaauagagcgaugc

SEQ ID NO: 933143 - RNA, 22 nt, Human
gucuuauugcguauguauacaa

SEQ ID NO: 933144 - RNA, 22 nt, Human
gaaacagugagaacuuuuccug

SEQ ID NO: 933145 - RNA, 22 nt, Human
cuuuacacaaugauuuucuuua

SEQ ID NO: 933146 - RNA, 22 nt, Human
uaugcagcaccacucacugcag

SEQ ID NO: 933147 - RNA, 22 nt, Human
uuuauuaugauggacaccuucg

SEQ ID NO: 933148 - RNA, 22 nt, Human
cacaaauaccaguuuccuaaca

SEQ ID NO: 933149 - RNA, 22 nt, Human
aguucucaggucagcugagucu

SEQ ID NO: 933150 - RNA, 22 nt, Human
caauuacauuuauugagcauuc

SEQ ID NO: 933151 - RNA, 22 nt, Human
auuauucauggucuuccacaau

SEQ ID NO: 933152 - RNA, 22 nt, Human
guuccaaagucucugagcugag

SEQ ID NO: 933153 - RNA, 22 nt, Human
cagacuguagaguuugagaagu

SEQ ID NO: 933154 - RNA, 22 nt, Human
agaagcauuggaccaggggccc

SEQ ID NO: 933155 - RNA, 22 nt, Human
acauaucugugagguuuuguug

SEQ ID NO: 933156 - RNA, 22 nt, Human
uacacauguuuggcaaguaugu

SEQ ID NO: 933157 - RNA, 22 nt, Human
agcagagacaugaaauaugcuu

SEQ ID NO: 933158 - RNA, 17 nt, Human
ugucuacucugacuaaa

SEQ ID NO: 933159 - RNA, 23 nt, Human
uaauuuuagccuuacaggacccu

SEQ ID NO: 933160 - RNA, 22 nt, Human
aaugucuuuauuucagguuuac

SEQ ID NO: 933161 - RNA, 22 nt, Human
uaaauacagucauuugagccau

SEQ ID NO: 933162 - RNA, 23 nt, Human
ucagagaaugguaugcuuuuccu

SEQ ID NO: 933163 - RNA, 22 nt, Human
uuggcaaugucuaaacacauuu

SEQ ID NO: 933164 - RNA, 22 nt, Human
aacuguugcuuguaauaugugc

SEQ ID NO: 933165 - RNA, 22 nt, Human
uuuauucacucauucagccagu

SEQ ID NO: 933166 - RNA, 22 nt, Human
guuucauuaccugacccaugag

SEQ ID NO: 933167 - RNA, 22 nt, Human
uagcaaccagaacagcacucua

SEQ ID NO: 933168 - RNA, 22 nt, Human
acuuuacaauauccugugacuu

SEQ ID NO: 933169 - RNA, 22 nt, Human
gauggcuuugccugcugugagg

SEQ ID NO: 933170 - RNA, 22 nt, Human
ccacuuuugggaacagugagua

SEQ ID NO: 933171 - RNA, 22 nt, Human
acacagagccagggaauacagu

SEQ ID NO: 933172 - RNA, 19 nt, Human
ggucacaaggaguugugaa

SEQ ID NO: 933173 - RNA, 22 nt, Human
ggcuucucuaaagaucaugcgu

SEQ ID NO: 933174 - RNA, 22 nt, Human
agagaacagacagaugcaauga

SEQ ID NO: 933175 - RNA, 22 nt, Human
gggcucaggccuggccucucac

SEQ ID NO: 933176 - RNA, 22 nt, Human
aaacaguccucuuuauuuaguc

SEQ ID NO: 933177 - RNA, 22 nt, Human
gcuucucuuguccaagggcagg

SEQ ID NO: 933178 - RNA, 22 nt, Human
guuacacagcuaagcuucuccu

SEQ ID NO: 933179 - RNA, 22 nt, Human
ugagaauuugugaacuuuucuc

SEQ ID NO: 933180 - RNA, 22 nt, Human
uacacuguuuuuggaaagaaga

SEQ ID NO: 933181 - RNA, 22 nt, Human
ugcaaagaugaaauauuaaagg

SEQ ID NO: 933182 - RNA, 22 nt, Human
cagcagagcugugugggaaggg

SEQ ID NO: 933183 - RNA, 20 nt, Human
auaaccugcccagaggauga

SEQ ID NO: 933184 - RNA, 21 nt, Human
agcagacugaauacauucuua

SEQ ID NO: 933185 - RNA, 19 nt, Human
acacauguguguuaugugc

SEQ ID NO: 933186 - RNA, 22 nt, Human
guucacacuuuugauaugugaa

SEQ ID NO: 933187 - RNA, 23 nt, Human
aaacuguugcuucaauguauccu

SEQ ID NO: 933188 - RNA, 22 nt, Human
gaagcaaucuggcucccagcca

SEQ ID NO: 933189 - RNA, 23 nt, Human
acuuaaaugguucuuuaucucag

SEQ ID NO: 933190 - RNA, 16 nt, Human
cuuccucuucacuggc

SEQ ID NO: 933191 - RNA, 22 nt, Human
uugcuuggcccauugcuucagu

SEQ ID NO: 933192 - RNA, 22 nt, Human
auacaugacacugggcuacagg

SEQ ID NO: 933193 - RNA, 22 nt, Human
acaguaacaccuacucuguccc

SEQ ID NO: 933194 - RNA, 22 nt, Human
ucuguguauuugugaccuguau

SEQ ID NO: 933195 - RNA, 22 nt, Human
cuacaguagagguugucaggga

SEQ ID NO: 933196 - RNA, 22 nt, Human
uuucuccuccagagagacacag

SEQ ID NO: 933197 - RNA, 22 nt, Human
uauggcuuuaaauugaaggagu

SEQ ID NO: 933198 - RNA, 23 nt, Human
ucauaaauauuagcacaguagga

SEQ ID NO: 933199 - RNA, 22 nt, Human
acuucacaaagagaucaucuaa

SEQ ID NO: 933200 - RNA, 22 nt, Human
accaguuaaagggaaauugaaa

SEQ ID NO: 933201 - RNA, 22 nt, Human
acacuguuuuagggaagaaaau

SEQ ID NO: 933202 - RNA, 22 nt, Human
ucuguuauacagucuguggcac

SEQ ID NO: 933203 - RNA, 22 nt, Human
uagacaaugccaucuugugguu

SEQ ID NO: 933204 - RNA, 22 nt, Human
uacauuuauaaggcuucucugu

SEQ ID NO: 933205 - RNA, 22 nt, Human
auuuagucaucacucauguguu

SEQ ID NO: 933206 - RNA, 22 nt, Human
ucuaacuuagggaauacuuuag

SEQ ID NO: 933207 - RNA, 22 nt, Human
cuuauucagauacagacucuug

SEQ ID NO: 933208 - RNA, 22 nt, Human
acauaaauagauuauugggagg

SEQ ID NO: 933209 - RNA, 22 nt, Human
ugcuuggccuacuuguccuuug

SEQ ID NO: 933210 - RNA, 22 nt, Human
cauguauugaagugugcaucug

SEQ ID NO: 933211 - RNA, 22 nt, Human
auacaguaauuuguaacucauc

SEQ ID NO: 933212 - RNA, 22 nt, Human
aucuaacuuauguuuuaccaaa

SEQ ID NO: 933213 - RNA, 22 nt, Human
cugaacuuauugagugcuugcu

SEQ ID NO: 933214 - RNA, 22 nt, Human
aaugguuuaguuaagacugagu

SEQ ID NO: 933215 - RNA, 23 nt, Human
ccugcucaggcgugugcccugcu

SEQ ID NO: 933216 - RNA, 22 nt, Human
agcagcagggacaaaggaacag

SEQ ID NO: 933217 - RNA, 22 nt, Human
uacacauuacauaauacuaucu

SEQ ID NO: 933218 - RNA, 22 nt, Human
auauacuuggagacuaucauug

SEQ ID NO: 933219 - RNA, 22 nt, Human
auuucaacagaguuugaaggca

SEQ ID NO: 933220 - RNA, 22 nt, Human
aauggcuuaaugauaccuuauc

SEQ ID NO: 933221 - RNA, 22 nt, Human
gcacaaauacaaaguugagaaa

SEQ ID NO: 933222 - RNA, 22 nt, Human
uggcuuccccuaccuuccaauu

SEQ ID NO: 933223 - RNA, 22 nt, Human
guuauucaauggcuuauaagga

SEQ ID NO: 933224 - RNA, 22 nt, Human
ucauauuaggguaaugauaaga

SEQ ID NO: 933225 - RNA, 22 nt, Human
aaucuucacucuuaacugugca

SEQ ID NO: 933226 - RNA, 22 nt, Human
gacauuuagcuguuuugcauuu

SEQ ID NO: 933227 - RNA, 22 nt, Human
gaaccuguaaguauagaugugg

SEQ ID NO: 933228 - RNA, 22 nt, Human
gucuacuuuuuaaucuuggcag

SEQ ID NO: 933229 - RNA, 23 nt, Human
agaugucuuagaaacugaagcug

SEQ ID NO: 933230 - RNA, 22 nt, Human
auagaauuugcacuaaaucugc

SEQ ID NO: 933231 - RNA, 18 nt, Human
acccuuuccaaacugcag

SEQ ID NO: 933232 - RNA, 17 nt, Human
ugacaaugacaagcacu

SEQ ID NO: 933233 - RNA, 22 nt, Human
uucacaaugccuuguugauggu

SEQ ID NO: 933234 - RNA, 22 nt, Human
uauacacauguguguauucaua

SEQ ID NO: 933235 - RNA, 22 nt, Human
agagaauuugagacuugcccaa

SEQ ID NO: 933236 - RNA, 22 nt, Human
agaaacagaagggaaagcuuuu

SEQ ID NO: 933237 - RNA, 22 nt, Human
ucacaaauauagugagaaccag

SEQ ID NO: 933238 - RNA, 22 nt, Human
augucuucuaagcucuaagcug

SEQ ID NO: 933239 - RNA, 22 nt, Human
ucuuuguacuuucuggcugucc

SEQ ID NO: 933240 - RNA, 22 nt, Human
ucacaaaucgaagccuuauaau

SEQ ID NO: 933241 - RNA, 22 nt, Human
ucccauguuagguguuucuguu

SEQ ID NO: 933242 - RNA, 22 nt, Human
auuccacaggagcugguuuucu

SEQ ID NO: 933243 - RNA, 22 nt, Human
acacaaauuguaggauaauugc

SEQ ID NO: 933244 - RNA, 22 nt, Human
acacuucucauuugauacuaac

SEQ ID NO: 933245 - RNA, 22 nt, Human
uucuccucuguuaccuugcaaa

SEQ ID NO: 933246 - RNA, 22 nt, Human
aaacuucaguaggagccaaccu

SEQ ID NO: 933247 - RNA, 20 nt, Human
uaaauuagccuugaagauua

SEQ ID NO: 933248 - RNA, 22 nt, Human
uuuaaauuuagaagaaacacug

SEQ ID NO: 933249 - RNA, 22 nt, Human
gcuucucuuucuccccuggcgg

SEQ ID NO: 933250 - RNA, 22 nt, Human
aauggaaccuaguuauccacau

SEQ ID NO: 933251 - RNA, 22 nt, Human
cacacuuugugcuaaucuauuu

SEQ ID NO: 933252 - RNA, 22 nt, Human
ccugcucaugggucccuggcag

SEQ ID NO: 933253 - RNA, 22 nt, Human
guggcuucugcggugugcgcag

SEQ ID NO: 933254 - RNA, 22 nt, Human
uacaucaaaucaauguuccagu

SEQ ID NO: 933255 - RNA, 22 nt, Human
ucagcuucccuaucugaccaua

SEQ ID NO: 933256 - RNA, 22 nt, Human
cuuuccugccuuauucauucau

SEQ ID NO: 933257 - RNA, 22 nt, Human
cacaugaucgucaugugaaagu

SEQ ID NO: 933258 - RNA, 22 nt, Human
agagacaaugccaaugcacacg

SEQ ID NO: 933259 - RNA, 22 nt, Human
ugcauguguuucccagcaagcu

SEQ ID NO: 933260 - RNA, 22 nt, Human
aaagacaugacacauuggagag

SEQ ID NO: 933261 - RNA, 22 nt, Human
agcagcaggcuuaaggaaaagu

SEQ ID NO: 933262 - RNA, 22 nt, Human
cuuuacauuaauuucuacugau

SEQ ID NO: 933263 - RNA, 22 nt, Human
uaaauuaaagauuggagaagga

SEQ ID NO: 933264 - RNA, 19 nt, Human
uccuucagucagaucuggg

SEQ ID NO: 933265 - RNA, 20 nt, Human
ucagagaaggagcuuuccug

SEQ ID NO: 933266 - RNA, 22 nt, Human
gaccuucaguguguuucucaca

SEQ ID NO: 933267 - RNA, 19 nt, Human
cuguccacacacucgcuuc

SEQ ID NO: 933268 - RNA, 22 nt, Human
uucacagauguauuggaacucc

SEQ ID NO: 933269 - RNA, 22 nt, Human
uaauuuuacuuccugagcaccu

SEQ ID NO: 933270 - RNA, 22 nt, Human
ucuuuguaaguuauauguagua

SEQ ID NO: 933271 - RNA, 22 nt, Human
gcccuguccuccugacugagug

SEQ ID NO: 933272 - RNA, 22 nt, Human
aacaaacucaaauggaagagug

SEQ ID NO: 933273 - RNA, 22 nt, Human
cuguuuaucucuaaccuguuua

SEQ ID NO: 933274 - RNA, 22 nt, Human
cagcagagcugggcuuugaauu

SEQ ID NO: 933275 - RNA, 22 nt, Human
aaaguacaugcaauucuucuga

SEQ ID NO: 933276 - RNA, 22 nt, Human
ugaguucuucacauuaccuacg

SEQ ID NO: 933277 - RNA, 22 nt, Human
uuuauuauagugguggggacug

SEQ ID NO: 933278 - RNA, 22 nt, Human
ugcuuauaauguuacugacaac

SEQ ID NO: 933279 - RNA, 22 nt, Human
agccauuuuccugaaauauaac

SEQ ID NO: 933280 - RNA, 22 nt, Human
uuuuacaccuguuaacucuaag

SEQ ID NO: 933281 - RNA, 23 nt, Human
cuguccuuggucuuggcugagug

SEQ ID NO: 933282 - RNA, 16 nt, Human
aaauggcuuaggcuua

SEQ ID NO: 933283 - RNA, 22 nt, Human
cuagagaaaaugauagcaggaa

SEQ ID NO: 933284 - RNA, 22 nt, Human
cuucuuuguucuguugucucac

SEQ ID NO: 933285 - RNA, 22 nt, Human
ugguggaaauaaacauccaauu

SEQ ID NO: 933286 - RNA, 21 nt, Human
gaaugucugccuucacaauga

SEQ ID NO: 933287 - RNA, 22 nt, Human
ucacaauucagaaaccaaguag

SEQ ID NO: 933288 - RNA, 22 nt, Human
ucuguuuagaugcuuuaucugu

SEQ ID NO: 933289 - RNA, 22 nt, Human
accaugaugcauccuuaaggaa

SEQ ID NO: 933290 - RNA, 22 nt, Human
ugcauucugacuuaguuaauau

SEQ ID NO: 933291 - RNA, 22 nt, Human
aagagaauaucgauagcacucu

SEQ ID NO: 933292 - RNA, 22 nt, Human
acaacuguuagacacuucuaag

SEQ ID NO: 933293 - RNA, 22 nt, Human
aaggauuuguccaaagucacac

SEQ ID NO: 933294 - RNA, 22 nt, Human
ccuuuacaguaugguuguauca

SEQ ID NO: 933295 - RNA, 22 nt, Human
aauggcuucuuuuugguauaau

SEQ ID NO: 933296 - RNA, 22 nt, Human
uuccacaaugguuaagcucguu

SEQ ID NO: 933297 - RNA, 22 nt, Human
gaagcaauguguuuucaacauu

SEQ ID NO: 933298 - RNA, 22 nt, Human
agauaaugauucugcauuucua

SEQ ID NO: 933299 - RNA, 22 nt, Human
cccugcagcauucucuaacugg

SEQ ID NO: 933300 - RNA, 22 nt, Human
cauuuccacuucugaaaacugg

SEQ ID NO: 933301 - RNA, 22 nt, Human
auugaguaauaauugaucuugg

SEQ ID NO: 933302 - RNA, 22 nt, Human
gcuucacagaaucaauaguugg

SEQ ID NO: 933303 - RNA, 22 nt, Human
uaaacauggauucugaucacag

SEQ ID NO: 933304 - RNA, 22 nt, Human
uuguuauaaagacuaaauaugu

SEQ ID NO: 933305 - RNA, 20 nt, Human
ucaaguuuugcuugacaaga

SEQ ID NO: 933306 - RNA, 22 nt, Human
uguagcuucagucugaucucau

SEQ ID NO: 933307 - RNA, 22 nt, Human
cugugacuggaaucuggcucuu

SEQ ID NO: 933308 - RNA, 22 nt, Human
ucuuuguaaaugccuagcauaa

SEQ ID NO: 933309 - RNA, 20 nt, Human
agaaacagcacaauucuguu

SEQ ID NO: 933310 - RNA, 22 nt, Human
uauuuagcuggagucagugcuu

SEQ ID NO: 933311 - RNA, 22 nt, Human
acuguuauaguucacuuuuccc

SEQ ID NO: 933312 - RNA, 22 nt, Human
uuccaaauguuggacaacugua

SEQ ID NO: 933313 - RNA, 22 nt, Human
aagugaauguagcaaacuugaa

SEQ ID NO: 933314 - RNA, 22 nt, Human
aacaguauugguugaacucaag

SEQ ID NO: 933315 - RNA, 23 nt, Human
gcucuggcagcuugugucagcac

SEQ ID NO: 933316 - RNA, 19 nt, Human
auuuauuguaugauuccau

SEQ ID NO: 933317 - RNA, 22 nt, Human
uacacaacugacaaccauucug

SEQ ID NO: 933318 - RNA, 22 nt, Human
uaacuguugugcgggucucugg

SEQ ID NO: 933319 - RNA, 22 nt, Human
gccucuccuggagaaggcaggg

SEQ ID NO: 933320 - RNA, 22 nt, Human
ggcaugcucuuuguccacagua

SEQ ID NO: 933321 - RNA, 22 nt, Human
gugcuugggggaaguaacagac

SEQ ID NO: 933322 - RNA, 22 nt, Human
aguucacaagcguaggugcuga

SEQ ID NO: 933323 - RNA, 22 nt, Human
augugcuugcagaugagccuca

SEQ ID NO: 933324 - RNA, 22 nt, Human
acacagcuuucagucauuaucu

SEQ ID NO: 933325 - RNA, 20 nt, Human
uauuaugaccuguguucugg

SEQ ID NO: 933326 - RNA, 22 nt, Human
gauacagaaaggcugcauugag

SEQ ID NO: 933327 - RNA, 22 nt, Human
cacaguauucacugggcagauu

SEQ ID NO: 933328 - RNA, 18 nt, Human
aacuguugaaauagcuug

SEQ ID NO: 933329 - RNA, 22 nt, Human
auguaagacuuuaagaaccuaa

SEQ ID NO: 933330 - RNA, 22 nt, Human
ucaccuguuggauguauacugu

SEQ ID NO: 933331 - RNA, 22 nt, Human
aauggcaugacuugcccaaggc

SEQ ID NO: 933332 - RNA, 22 nt, Human
cuuuguaaucauucccuugguu

SEQ ID NO: 933333 - RNA, 22 nt, Human
auaaccuggauauaaacagaug

SEQ ID NO: 933334 - RNA, 22 nt, Human
aacagaguggagccaaacuuug

SEQ ID NO: 933335 - RNA, 22 nt, Human
agucacaucgauuauaaaauuu

SEQ ID NO: 933336 - RNA, 22 nt, Human
gaacuaaaugaaauuacuggug

SEQ ID NO: 933337 - RNA, 22 nt, Human
ugaaggaaugaguauacuguuu

SEQ ID NO: 933338 - RNA, 22 nt, Human
acauuaaaaaauguugcaugaa

SEQ ID NO: 933339 - RNA, 23 nt, Human
acuuugcagagccccuugaaaca

SEQ ID NO: 933340 - RNA, 22 nt, Human
uuuaauuugaaaugaguaaccc

SEQ ID NO: 933341 - RNA, 22 nt, Human
auuucccaggacuagaaauaua

SEQ ID NO: 933342 - RNA, 22 nt, Human
agagaaacugauguccuuugaa

SEQ ID NO: 933343 - RNA, 22 nt, Human
acacauguuuccaaaagcaccc

SEQ ID NO: 933344 - RNA, 22 nt, Human
guagacagaaagcggaaucaua

SEQ ID NO: 933345 - RNA, 22 nt, Human
uuacaguuuaagaggaaacaaa

SEQ ID NO: 933346 - RNA, 22 nt, Human
gcauggcuuccaaaagugcuaa

SEQ ID NO: 933347 - RNA, 22 nt, Human
ucacagaaugucagaguugggg

SEQ ID NO: 933348 - RNA, 22 nt, Human
uauugcagacaaaaugagcuac

SEQ ID NO: 933349 - RNA, 22 nt, Human
ucuaacuugugaguauagauga

SEQ ID NO: 933350 - RNA, 22 nt, Human
uuaagagacaggagaaugaugu

SEQ ID NO: 933351 - RNA, 22 nt, Human
uagcagagaggggacaguggca

SEQ ID NO: 933352 - RNA, 22 nt, Human
agcuagacuuucccuuuccaug

SEQ ID NO: 933353 - RNA, 22 nt, Human
uuuagcaaaacauuaugucugu

SEQ ID NO: 933354 - RNA, 22 nt, Human
augcuugguuccuacuucuggc

SEQ ID NO: 933355 - RNA, 22 nt, Human
cuuuacacuuggacccacacuu

SEQ ID NO: 933356 - RNA, 22 nt, Human
uggcuucugggguggccugcau

SEQ ID NO: 933357 - RNA, 22 nt, Human
uaagacauaaauaggcuuuuua

SEQ ID NO: 933358 - RNA, 22 nt, Human
aguuauuucaguaacauaauag

SEQ ID NO: 933359 - RNA, 22 nt, Human
cagcuucauguccagguacugu

SEQ ID NO: 933360 - RNA, 22 nt, Human
aaauagacacaugcguucauau

SEQ ID NO: 933361 - RNA, 22 nt, Human
uacacagaggcugaugucuuag

SEQ ID NO: 933362 - RNA, 22 nt, Human
acagauaaauuuauaggagugu

SEQ ID NO: 933363 - RNA, 22 nt, Human
uauggcuuuuaacugucguaug

SEQ ID NO: 933364 - RNA, 21 nt, Human
uaacacauuuugguacuuugg

SEQ ID NO: 933365 - RNA, 22 nt, Human
agacaacuagaaaacuagacag

SEQ ID NO: 933366 - RNA, 22 nt, Human
cuagagaauugucuugagaguu

SEQ ID NO: 933367 - RNA, 22 nt, Human
gagaaacaacacuugaugccuu

SEQ ID NO: 933368 - RNA, 17 nt, Human
ggaaaagaagaguagga

SEQ ID NO: 933369 - RNA, 22 nt, Human
auaaccugagauugagcugccu

SEQ ID NO: 933370 - RNA, 22 nt, Human
uaacuucucugagccucauucc

SEQ ID NO: 933371 - RNA, 22 nt, Human
aaacuucagugaaugacuuaug

SEQ ID NO: 933372 - RNA, 22 nt, Human
cuguuggaugguuuccaaaaga

SEQ ID NO: 933373 - RNA, 16 nt, Human
ucucccuguucuccaa

SEQ ID NO: 933374 - RNA, 22 nt, Human
aaacaguacucgauuuuuguag

SEQ ID NO: 933375 - RNA, 22 nt, Human
guuacacaggaaaacauuagca

SEQ ID NO: 933376 - RNA, 22 nt, Human
uggcuucuuucuuuccaugugu

SEQ ID NO: 933377 - RNA, 22 nt, Human
aguucucaagacaauuaccugu

SEQ ID NO: 933378 - RNA, 20 nt, Human
gagucacagaagaagcugaa

SEQ ID NO: 933379 - RNA, 22 nt, Human
cagcagagaaauuaaacuucug

SEQ ID NO: 933380 - RNA, 22 nt, Human
auuaaauuaaguggcuaauuua

SEQ ID NO: 933381 - RNA, 22 nt, Human
uuuaugcagcguuucaccaccc

SEQ ID NO: 933382 - RNA, 22 nt, Human
ucuuuaauaucugccccagagc

SEQ ID NO: 933383 - RNA, 22 nt, Human
uggcugaauaauauucuguugu

SEQ ID NO: 933384 - RNA, 22 nt, Human
gacacuuugggacucagcccua

SEQ ID NO: 933385 - RNA, 22 nt, Human
cuuugcuucuccaaccugcuca

SEQ ID NO: 933386 - RNA, 22 nt, Human
cuuggcugcuuuugugcacauu

SEQ ID NO: 933387 - RNA, 23 nt, Human
cuggcuucuggggccucuguuuc

SEQ ID NO: 933388 - RNA, 22 nt, Human
uaggcuucccgcucacaugccc

SEQ ID NO: 933389 - RNA, 22 nt, Human
uauggcuucuuguguuacugug

SEQ ID NO: 933390 - RNA, 21 nt, Human
ucucaucuccugaccugugcc

SEQ ID NO: 933391 - RNA, 20 nt, Human
agaagcauucaaagaaaacu

SEQ ID NO: 933392 - RNA, 18 nt, Human
uuugcuuuccuucuucag

SEQ ID NO: 933393 - RNA, 22 nt, Human
cuucacuugcucaucaugcuau

SEQ ID NO: 933394 - RNA, 22 nt, Human
agaguauugugaccauuuguca

SEQ ID NO: 933395 - RNA, 22 nt, Human
agcagagaggagguggcccugu

SEQ ID NO: 933396 - RNA, 22 nt, Human
uugugauacugagcuuggcauu

SEQ ID NO: 933397 - RNA, 22 nt, Human
gcuuuacacagaugaauauuuc

SEQ ID NO: 933398 - RNA, 22 nt, Human
acuuuacccgcacucagacaca

SEQ ID NO: 933399 - RNA, 22 nt, Human
ucuguuggcuugagauuuaauu

SEQ ID NO: 933400 - RNA, 22 nt, Human
gagaggaagccuucuguacuug

SEQ ID NO: 933401 - RNA, 22 nt, Human
ugaggucuguccugucuuugga

SEQ ID NO: 933402 - RNA, 22 nt, Human
uggggugugcucagagcagggg

SEQ ID NO: 933403 - RNA, 22 nt, Human
cugguggaauggcagagggaac

SEQ ID NO: 933404 - RNA, 22 nt, Human
cagggccugccugguuccugga

SEQ ID NO: 933405 - RNA, 22 nt, Human
uggaaggggccaggcgcggagu

SEQ ID NO: 933406 - RNA, 22 nt, Human
ugagcagacuugaugaggcagc

SEQ ID NO: 933407 - RNA, 22 nt, Human
ggugagaggcagugcuguggaa

SEQ ID NO: 933408 - RNA, 20 nt, Human
gggugugggcccggccaggc

SEQ ID NO: 933409 - RNA, 22 nt, Human
aggagcagaacuguuguggagg

SEQ ID NO: 933410 - RNA, 22 nt, Human
ucugaggucauuccaaggacau

SEQ ID NO: 933411 - RNA, 22 nt, Human
cgcuuuggagucccugcuuuac

SEQ ID NO: 933412 - RNA, 22 nt, Human
ugaggaggugggcacacagagu

SEQ ID NO: 933413 - RNA, 22 nt, Human
agauguuuuuccaggucuaauu

SEQ ID NO: 933414 - RNA, 22 nt, Human
uggguagggagcuggaauccua

SEQ ID NO: 933415 - RNA, 22 nt, Human
aauggcuguucucugugauugg

SEQ ID NO: 933416 - RNA, 21 nt, Human
cuggagcuuggugagaagugu

SEQ ID NO: 933417 - RNA, 22 nt, Human
acgugcaggaucugguuggcga

SEQ ID NO: 933418 - RNA, 22 nt, Human
gggggcgccgccgcucaucuca

SEQ ID NO: 933419 - RNA, 22 nt, Human
uuuucaguuccaucucugcucu

SEQ ID NO: 933420 - RNA, 22 nt, Human
aggcugagccugggcguggugg

SEQ ID NO: 933421 - RNA, 22 nt, Human
uggaagggguuacgcagcagga

SEQ ID NO: 933422 - RNA, 22 nt, Human
ugcuuuggcccaacauugaugc

SEQ ID NO: 933423 - RNA, 22 nt, Human
gagaugggcgagaagguggacu

SEQ ID NO: 933424 - RNA, 22 nt, Human
ggacauugaagcuggaaaggga

SEQ ID NO: 933425 - RNA, 22 nt, Human
gacuuugguucagggcucagag

SEQ ID NO: 933426 - RNA, 22 nt, Human
gugggugucaguaucuuuaacg

SEQ ID NO: 933427 - RNA, 22 nt, Human
cgaggaggaaacgcggagaacu

SEQ ID NO: 933428 - RNA, 18 nt, Human
auggcuccagugucuucc

SEQ ID NO: 933429 - RNA, 19 nt, Human
cacuguccuagucgaggcc

SEQ ID NO: 933430 - RNA, 22 nt, Human
uggggcuccuccuggcaggagg

SEQ ID NO: 933431 - RNA, 22 nt, Human
gagguuggagggcuggccugca

SEQ ID NO: 933432 - RNA, 21 nt, Human
gcuccuggugcugcguggcgc

SEQ ID NO: 933433 - RNA, 22 nt, Human
ucucagaaaugacaggagguac

SEQ ID NO: 933434 - RNA, 23 nt, Human
uggcucugagcuuccugguggcc

SEQ ID NO: 933435 - RNA, 22 nt, Human
uaguguguggucucucccuugu

SEQ ID NO: 933436 - RNA, 22 nt, Human
agguaagguuuggaggcagugg

SEQ ID NO: 933437 - RNA, 22 nt, Human
aaggccaucuacuuacggaauu

SEQ ID NO: 933438 - RNA, 22 nt, Human
aggcugagguaggaggaucgcu

SEQ ID NO: 933439 - RNA, 16 nt, Human
aggagcuggguaggag

SEQ ID NO: 933440 - RNA, 22 nt, Human
cggagaggugggggcagcaucu

SEQ ID NO: 933441 - RNA, 22 nt, Human
ggcuucaguggccagagaugau

SEQ ID NO: 933442 - RNA, 22 nt, Human
ccugaggaugccagcaugggug

SEQ ID NO: 933443 - RNA, 22 nt, Human
gcggggggcaggcaguacguug

SEQ ID NO: 933444 - RNA, 22 nt, Human
ggaagccaguugcuuggugugg

SEQ ID NO: 933445 - RNA, 22 nt, Human
ccugucugaaggcagggggaug

SEQ ID NO: 933446 - RNA, 22 nt, Human
uagggggcuuugcugcuugaca

SEQ ID NO: 933447 - RNA, 18 nt, Human
gagaggagccagaauuuu

SEQ ID NO: 933448 - RNA, 20 nt, Human
ucuggggaugaggucuagga

SEQ ID NO: 933449 - RNA, 22 nt, Human
ggaaggcuuuaagcaccaaagc

SEQ ID NO: 933450 - RNA, 22 nt, Human
aggcugcugccuuggagagugu

SEQ ID NO: 933451 - RNA, 22 nt, Human
auggaggaugugcagcaugggc

SEQ ID NO: 933452 - RNA, 22 nt, Human
cugggagggguagccaauccua

SEQ ID NO: 933453 - RNA, 22 nt, Human
uggcuuuugaaaaggugaugua

SEQ ID NO: 933454 - RNA, 22 nt, Human
uuagggacagcucuguagguga

SEQ ID NO: 933455 - RNA, 22 nt, Human
uuggggaagcuuugaaauacuu

SEQ ID NO: 933456 - RNA, 22 nt, Human
uggcauuggaauuuguguugca

SEQ ID NO: 933457 - RNA, 22 nt, Human
gcugccaauccagcugugggag

SEQ ID NO: 933458 - RNA, 22 nt, Human
cgggaagguggagguugcagug

SEQ ID NO: 933459 - RNA, 22 nt, Human
agggcaguguggugggacugac

SEQ ID NO: 933460 - RNA, 22 nt, Human
gagcuaggauaucaugagggua

SEQ ID NO: 933461 - RNA, 22 nt, Human
ggagcugugcugggugaucagg

SEQ ID NO: 933462 - RNA, 20 nt, Human
ccagguggugccuggagagg

SEQ ID NO: 933463 - RNA, 22 nt, Human
gagggugguggcuuaaggugcu

SEQ ID NO: 933464 - RNA, 22 nt, Human
cacgccuggacggcggagggug

SEQ ID NO: 933465 - RNA, 22 nt, Human
cugagaggcacaaggcauuucg

SEQ ID NO: 933466 - RNA, 22 nt, Human
auuccucagcaggccuuuuguu

SEQ ID NO: 933467 - RNA, 22 nt, Human
ggagagagaccuccaugcccag

SEQ ID NO: 933468 - RNA, 22 nt, Human
cuaggugauccacugcucucuu

SEQ ID NO: 933469 - RNA, 22 nt, Human
aggagcggauguguccugccag

SEQ ID NO: 933470 - RNA, 22 nt, Human
cugggguaucugccacaacucu

SEQ ID NO: 933471 - RNA, 20 nt, Human
uccugggguaagccaugguc

SEQ ID NO: 933472 - RNA, 22 nt, Human
gccuggggaacuugauccuguc

SEQ ID NO: 933473 - RNA, 22 nt, Human
ggaggaggggugacugaaugcu

SEQ ID NO: 933474 - RNA, 22 nt, Human
cuggagggcugcagcgaggcug

SEQ ID NO: 933475 - RNA, 22 nt, Human
ggguggaaaguauuuggggacc

SEQ ID NO: 933476 - RNA, 22 nt, Human
uuuccucacacagaagaucuug

SEQ ID NO: 933477 - RNA, 22 nt, Human
ggaaggguuuaagcaggagagu

SEQ ID NO: 933478 - RNA, 19 nt, Human
aggaaggcggcggcugccc

SEQ ID NO: 933479 - RNA, 22 nt, Human
ugugaggaccucagcagagucu

SEQ ID NO: 933480 - RNA, 22 nt, Human
ggcggugguugagaggacggcg

SEQ ID NO: 933481 - RNA, 22 nt, Human
ccaggaggaaagaccagcccau

SEQ ID NO: 933482 - RNA, 22 nt, Human
ggcagaggaagcuggaaguggg

SEQ ID NO: 933483 - RNA, 22 nt, Human
gggccuuggcgaaguguggugg

SEQ ID NO: 933484 - RNA, 21 nt, Human
ucgaccugcugggcucgggcu

SEQ ID NO: 933485 - RNA, 22 nt, Human
uggggucagcaggccuggccug

SEQ ID NO: 933486 - RNA, 22 nt, Human
gguggcugugagcauuauguga

SEQ ID NO: 933487 - RNA, 22 nt, Human
augggaggcagacacuaaguuc

SEQ ID NO: 933488 - RNA, 22 nt, Human
cuggagcagcagguggccaggg

SEQ ID NO: 933489 - RNA, 22 nt, Human
uguccugugaccuggcaccaca

SEQ ID NO: 933490 - RNA, 22 nt, Human
agggaggucuggcugcccugag

SEQ ID NO: 933491 - RNA, 22 nt, Human
gggaagugcccucuucaggaga

SEQ ID NO: 933492 - RNA, 22 nt, Human
aucagagcuaguacuugcaggu

SEQ ID NO: 933493 - RNA, 20 nt, Human
ugugugaauuagggcauguu

SEQ ID NO: 933494 - RNA, 22 nt, Human
gaggugggaugugugugcuacu

SEQ ID NO: 933495 - RNA, 22 nt, Human
cagugacguaaacugcaugugc

SEQ ID NO: 933496 - RNA, 22 nt, Human
ggcaagagggcagauggagugc

SEQ ID NO: 933497 - RNA, 21 nt, Human
ucuuggggaggagggcugcac

SEQ ID NO: 933498 - RNA, 22 nt, Human
cugggguuggccagggcccuag

SEQ ID NO: 933499 - RNA, 21 nt, Human
uuggaacaagcagcaguuugc

SEQ ID NO: 933500 - RNA, 22 nt, Human
agcccugugugcuuguguuccu

SEQ ID NO: 933501 - RNA, 22 nt, Human
caggggacacuccugcuugggc

SEQ ID NO: 933502 - RNA, 22 nt, Human
uccugagauaggaguugaaggc

SEQ ID NO: 933503 - RNA, 22 nt, Human
gcaguuaccuauuuuguagaaa

SEQ ID NO: 933504 - RNA, 22 nt, Human
aggaaagcucccaguagggcuc

SEQ ID NO: 933505 - RNA, 22 nt, Human
auggcauuugaaucugucuuuu

SEQ ID NO: 933506 - RNA, 21 nt, Human
ucagagggcccuggaggcuca

SEQ ID NO: 933507 - RNA, 22 nt, Human
ccaggaaguaugacccaacaga

SEQ ID NO: 933508 - RNA, 22 nt, Human
gaguuugugggaauggaguauu

SEQ ID NO: 933509 - RNA, 22 nt, Human
auggguggccccgugugcaguc

SEQ ID NO: 933510 - RNA, 22 nt, Human
uccugccaccggggguggcgau

SEQ ID NO: 933511 - RNA, 22 nt, Human
cagggagccccaauuccaugcc

SEQ ID NO: 933512 - RNA, 22 nt, Human
gagugugucggucagcguggcg

SEQ ID NO: 933513 - RNA, 22 nt, Human
acagagccuccaggagugcugg

SEQ ID NO: 933514 - RNA, 22 nt, Human
gcuaggaguggugggucaagga

SEQ ID NO: 933515 - RNA, 22 nt, Human
ggguuguagagcuggaagggga

SEQ ID NO: 933516 - RNA, 22 nt, Human
ugggagagauaggcuucuggac

SEQ ID NO: 933517 - RNA, 22 nt, Human
ccaagaggggcagagggcugca

SEQ ID NO: 933518 - RNA, 22 nt, Human
auugagaaggagauuggcaucu

SEQ ID NO: 933519 - RNA, 22 nt, Human
ccugggaaggugaggcccugga

SEQ ID NO: 933520 - RNA, 22 nt, Human
auuguauacaagcuuaauuguu

SEQ ID NO: 933521 - RNA, 22 nt, Human
gucuggaggaggaagaaggcac

SEQ ID NO: 933522 - RNA, 22 nt, Human
gucuggagccacugcugcugcu

SEQ ID NO: 933523 - RNA, 21 nt, Human
agggaaaaggcugagugaggg

SEQ ID NO: 933524 - RNA, 22 nt, Human
caggaggaaaguuccacucaac

SEQ ID NO: 933525 - RNA, 22 nt, Human
ugugguuuugguucagaaacaa

SEQ ID NO: 933526 - RNA, 22 nt, Human
ggccuugguaaauuggcauuug

SEQ ID NO: 933527 - RNA, 22 nt, Human
cagggccagggcuauggugaag

SEQ ID NO: 933528 - RNA, 22 nt, Human
ugcuccaucuagagcucugcag

SEQ ID NO: 933529 - RNA, 22 nt, Human
ggugcggagacuccaugaggcc

SEQ ID NO: 933530 - RNA, 22 nt, Human
uuggaggaagcucaugggggau

SEQ ID NO: 933531 - RNA, 22 nt, Human
cugggaggcccacguugggaag

SEQ ID NO: 933532 - RNA, 22 nt, Human
ggccuugggauguggcugcagc

SEQ ID NO: 933533 - RNA, 22 nt, Human
ggagaagggaacugaguuuuug

SEQ ID NO: 933534 - RNA, 22 nt, Human
caggguggcaggcaccauggcc

SEQ ID NO: 933535 - RNA, 18 nt, Human
gccugccagccgagggac

SEQ ID NO: 933536 - RNA, 19 nt, Human
agcagagcagggccguggg

SEQ ID NO: 933537 - RNA, 22 nt, Human
gccagaggggcucgaaggcgcg

SEQ ID NO: 933538 - RNA, 22 nt, Human
aggcagccuauggggagcucag

SEQ ID NO: 933539 - RNA, 22 nt, Human
gaccaggagauuugagcuaggc

SEQ ID NO: 933540 - RNA, 22 nt, Human
ggccuugguggcuuugcugaug

SEQ ID NO: 933541 - RNA, 22 nt, Human
gagcugagggucuaggaggguu

SEQ ID NO: 933542 - RNA, 22 nt, Human
uucuggaguuugaagaucaggu

SEQ ID NO: 933543 - RNA, 20 nt, Human
ggcagagcuaugucuguugc

SEQ ID NO: 933544 - RNA, 22 nt, Human
gggaugagagcugggacagaag

SEQ ID NO: 933545 - RNA, 22 nt, Human
uuguaagacuguagaaugcaaa

SEQ ID NO: 933546 - RNA, 22 nt, Human
ggucuggccuccgggcaggugg

SEQ ID NO: 933547 - RNA, 22 nt, Human
guucucucagcgauagugaugg

SEQ ID NO: 933548 - RNA, 22 nt, Human
gguguuguacauucuguggauu

SEQ ID NO: 933549 - RNA, 22 nt, Human
cugagggagcugcuggccuugg

SEQ ID NO: 933550 - RNA, 22 nt, Human
augauugaaaaugacauugcca

SEQ ID NO: 933551 - RNA, 22 nt, Human
cugggagaugacucagagcagg

SEQ ID NO: 933552 - RNA, 22 nt, Human
aagcuguuagggagugguaggu

SEQ ID NO: 933553 - RNA, 22 nt, Human
ugggaaggggagcuggaaagga

SEQ ID NO: 933554 - RNA, 19 nt, Human
agcagggagugguuguggg

SEQ ID NO: 933555 - RNA, 22 nt, Human
cuguccuaugaguacucacuag

SEQ ID NO: 933556 - RNA, 22 nt, Human
cuggacacuggggaugcgcagu

SEQ ID NO: 933557 - RNA, 22 nt, Human
ugggguccucucacuuggaggg

SEQ ID NO: 933558 - RNA, 22 nt, Human
cccagaggcugaguugggagca

SEQ ID NO: 933559 - RNA, 22 nt, Human
gggagggucugagagcugcacc

SEQ ID NO: 933560 - RNA, 22 nt, Human
cuguggcugcgcccugggggag

SEQ ID NO: 933561 - RNA, 22 nt, Human
ggugggugagcccugggagcug

SEQ ID NO: 933562 - RNA, 22 nt, Human
uggcugggagcuggaacugggc

SEQ ID NO: 933563 - RNA, 22 nt, Human
aaggcuuugugcugaguugucg

SEQ ID NO: 933564 - RNA, 22 nt, Human
uagcccuugaugcugcggccag

SEQ ID NO: 933565 - RNA, 22 nt, Human
ggcuggaaggcccuuuguugau

SEQ ID NO: 933566 - RNA, 22 nt, Human
agccagcauauauauaguugaa

SEQ ID NO: 933567 - RNA, 22 nt, Human
uuauggcauucauuggggcuuu

SEQ ID NO: 933568 - RNA, 22 nt, Human
gugggggcaggcagugcuagga

SEQ ID NO: 933569 - RNA, 22 nt, Human
cuagcccuuggugagaacagcg

SEQ ID NO: 933570 - RNA, 22 nt, Human
gccuggagcucggcugagggcg

SEQ ID NO: 933571 - RNA, 22 nt, Human
cgggagccucugggucacacug

SEQ ID NO: 933572 - RNA, 22 nt, Human
aguguuugaguuugcggcauug

SEQ ID NO: 933573 - RNA, 22 nt, Human
gacggagcugguugcugcggcu

SEQ ID NO: 933574 - RNA, 22 nt, Human
gagaauguuaauguugaaguau

SEQ ID NO: 933575 - RNA, 22 nt, Human
ugguccugagcaccagccugac

SEQ ID NO: 933576 - RNA, 22 nt, Human
gggcggggcuuccguccuccac

SEQ ID NO: 933577 - RNA, 22 nt, Human
ggggaggaagcuggaacacggg

SEQ ID NO: 933578 - RNA, 21 nt, Human
ucaggaagagccaguucaugc

SEQ ID NO: 933579 - RNA, 22 nt, Human
gcagcuuuggagguggaacucu

SEQ ID NO: 933580 - RNA, 22 nt, Human
caauaguaaauuacggaggaga

SEQ ID NO: 933581 - RNA, 22 nt, Human
ccagguggacggcgaguacagg

SEQ ID NO: 933582 - RNA, 22 nt, Human
guugggcugaagugugugcuua

SEQ ID NO: 933583 - RNA, 22 nt, Human
ucagagccccuccgcuguccca

SEQ ID NO: 933584 - RNA, 22 nt, Human
gucauggaggauugugaguggu

SEQ ID NO: 933585 - RNA, 22 nt, Human
ccugggugaugugcugcccucg

SEQ ID NO: 933586 - RNA, 22 nt, Human
auggauggaacucugcuguggu

SEQ ID NO: 933587 - RNA, 22 nt, Human
ggagugggaacaaugacauggu

SEQ ID NO: 933588 - RNA, 22 nt, Human
gagugggugaaugugcucauaa

SEQ ID NO: 933589 - RNA, 22 nt, Human
aggggagguguccccaaaucuc

SEQ ID NO: 933590 - RNA, 18 nt, Human
gaaggcauucaguggcuu

SEQ ID NO: 933591 - RNA, 22 nt, Human
ggacauggaaguauggagugga

SEQ ID NO: 933592 - RNA, 22 nt, Human
aguggcaguagaugagcugguu

SEQ ID NO: 933593 - RNA, 22 nt, Human
gccugagccgccugagcggcgg

SEQ ID NO: 933594 - RNA, 22 nt, Human
gaaggcaguaaauggcuguuuu

SEQ ID NO: 933595 - RNA, 22 nt, Human
ggcagguguggugaccagagau

SEQ ID NO: 933596 - RNA, 22 nt, Human
ucuggcccaucuucugccacca

SEQ ID NO: 933597 - RNA, 22 nt, Human
ucuggggucaccuggggugcuu

SEQ ID NO: 933598 - RNA, 22 nt, Human
gagcagcagcugggccagguuc

SEQ ID NO: 933599 - RNA, 22 nt, Human
cagggaugggauggagucaguu

SEQ ID NO: 933600 - RNA, 22 nt, Human
uggaagguguggcaggucuagu

SEQ ID NO: 933601 - RNA, 22 nt, Human
ugaggauggaaugcugugcaag

SEQ ID NO: 933602 - RNA, 22 nt, Human
ugggugguugcugaggcuccuu

SEQ ID NO: 933603 - RNA, 22 nt, Human
guggcauugccuucugcaggaa

SEQ ID NO: 933604 - RNA, 22 nt, Human
ugugugaacucucugauguaca

SEQ ID NO: 933605 - RNA, 22 nt, Human
gggaagugagcuggaaucaagg

SEQ ID NO: 933606 - RNA, 22 nt, Human
ggaaggggagcuggaaagggua

SEQ ID NO: 933607 - RNA, 21 nt, Human
acugaacuuguguucuagagg

SEQ ID NO: 933608 - RNA, 22 nt, Human
agcuuugggcagaagaggauuc

SEQ ID NO: 933609 - RNA, 22 nt, Human
cauggaaggcaaaagacacaga

SEQ ID NO: 933610 - RNA, 22 nt, Human
ugcuggaguggcacuguguggc

SEQ ID NO: 933611 - RNA, 22 nt, Human
gaggcagagacuccaccuucag

SEQ ID NO: 933612 - RNA, 20 nt, Human
aggaaggagaaucugagcaa

SEQ ID NO: 933613 - RNA, 21 nt, Human
ccuggagacaaagacagggug

SEQ ID NO: 933614 - RNA, 22 nt, Human
uggcagcauuuuuuccagaaca

SEQ ID NO: 933615 - RNA, 22 nt, Human
uuggaggacuaguuaagagacc

SEQ ID NO: 933616 - RNA, 18 nt, Human
uggguggcuagggaguuu

SEQ ID NO: 933617 - RNA, 22 nt, Human
uggcuccuuccgcagcaugccu

SEQ ID NO: 933618 - RNA, 22 nt, Human
gugagagugguuuauguccaug

SEQ ID NO: 933619 - RNA, 22 nt, Human
ggaaacauuccaagaguugaaa

SEQ ID NO: 933620 - RNA, 22 nt, Human
uaagggaacagcuucaaacuca

SEQ ID NO: 933621 - RNA, 21 nt, Human
ccaugucagaugugggcugug

SEQ ID NO: 933622 - RNA, 22 nt, Human
auggaguugagcucuguugucc

SEQ ID NO: 933623 - RNA, 22 nt, Human
cagagccuuaguucuccuagaa

SEQ ID NO: 933624 - RNA, 21 nt, Human
uaggugggagccccaguaugc

SEQ ID NO: 933625 - RNA, 22 nt, Human
gccugagauucccggagccgug

SEQ ID NO: 933626 - RNA, 22 nt, Human
gcucugugggggaaauccuggg

SEQ ID NO: 933627 - RNA, 22 nt, Human
aagcccuuggcgcacaccgggc

SEQ ID NO: 933628 - RNA, 22 nt, Human
gaaagcagaugaaauugcaaca

SEQ ID NO: 933629 - RNA, 22 nt, Human
cagacaggguccuguccgucac

SEQ ID NO: 933630 - RNA, 22 nt, Human
gcugggcccugggugcccuagc

SEQ ID NO: 933631 - RNA, 22 nt, Human
ccuggggaccugccucagcccu

SEQ ID NO: 933632 - RNA, 22 nt, Human
gaaaccuuugccgauggggucc

SEQ ID NO: 933633 - RNA, 22 nt, Human
ccuaggccgcccggugcguggg

SEQ ID NO: 933634 - RNA, 21 nt, Human
uccaggagcacgggacuagga

SEQ ID NO: 933635 - RNA, 22 nt, Human
gaggggcucuugggcaugaagg

SEQ ID NO: 933636 - RNA, 22 nt, Human
aauggcugccagggcaggaggu

SEQ ID NO: 933637 - RNA, 22 nt, Human
cgaggagugugaaggcuugucg

SEQ ID NO: 933638 - RNA, 22 nt, Human
gacagggacacagccagugagg

SEQ ID NO: 933639 - RNA, 22 nt, Human
accaagaguccaagugagguug

SEQ ID NO: 933640 - RNA, 22 nt, Human
ccuggagacccacuucugccaa

SEQ ID NO: 933641 - RNA, 22 nt, Human
gaggaggcuuccgggaggcacg

SEQ ID NO: 933642 - RNA, 22 nt, Human
cccagagcaugugcugccuuug

SEQ ID NO: 933643 - RNA, 22 nt, Human
ugagccuggagucguggagggg

SEQ ID NO: 933644 - RNA, 17 nt, Human
uaagggggaaacggagc

SEQ ID NO: 933645 - RNA, 22 nt, Human
cagggagcuggugccagccgac

SEQ ID NO: 933646 - RNA, 23 nt, Human
uggggcugauggagacggaccag

SEQ ID NO: 933647 - RNA, 22 nt, Human
gguuguaguuggagguuguaua

SEQ ID NO: 933648 - RNA, 22 nt, Human
uucugauugcugaugaggccca

SEQ ID NO: 933649 - RNA, 22 nt, Human
aagaggaggacgguucccagaa

SEQ ID NO: 933650 - RNA, 22 nt, Human
gggaggugauuaggaccaugua

SEQ ID NO: 933651 - RNA, 22 nt, Human
cuggagaggcugggaacagguu

SEQ ID NO: 933652 - RNA, 22 nt, Human
gggcagcaaaucugagucuggu

SEQ ID NO: 933653 - RNA, 22 nt, Human
gcagaggggaagcugaggaauu

SEQ ID NO: 933654 - RNA, 22 nt, Human
gaacugggaaugcugucccauc

SEQ ID NO: 933655 - RNA, 19 nt, Human
aaggcuuucugagugaaaa

SEQ ID NO: 933656 - RNA, 22 nt, Human
cccaggaguuagagguuguggu

SEQ ID NO: 933657 - RNA, 22 nt, Human
gggacuggaguagaggccggug

SEQ ID NO: 933658 - RNA, 22 nt, Human
agagcuggguggacuuguaguu

SEQ ID NO: 933659 - RNA, 22 nt, Human
aagggugguguaggagaucaaa

SEQ ID NO: 933660 - RNA, 23 nt, Human
gggugcugccuguagucaugcug

SEQ ID NO: 933661 - RNA, 22 nt, Human
ggagcggagggagggccacugu

SEQ ID NO: 933662 - RNA, 22 nt, Human
ugaaggccuccccgagcauuag

SEQ ID NO: 933663 - RNA, 22 nt, Human
aggaagccuggaguccugccca

SEQ ID NO: 933664 - RNA, 22 nt, Human
ccugggcugcucauggggauga

SEQ ID NO: 933665 - RNA, 22 nt, Human
gccuggcaaggcccuguugacu

SEQ ID NO: 933666 - RNA, 19 nt, Human
ccuggcccugcugcgcggg

SEQ ID NO: 933667 - RNA, 22 nt, Human
agauguuuauaacucaugagug

SEQ ID NO: 933668 - RNA, 22 nt, Human
ugggggagccuucacaguagcu

SEQ ID NO: 933669 - RNA, 22 nt, Human
guggaaggaauuaacagacuag

SEQ ID NO: 933670 - RNA, 22 nt, Human
agaggagguccuuuucugaugu

SEQ ID NO: 933671 - RNA, 22 nt, Human
cagggagaggccucuguugccc

SEQ ID NO: 933672 - RNA, 22 nt, Human
cggcagagcccugagucagccu

SEQ ID NO: 933673 - RNA, 21 nt, Human
uggcccuggccacggcugcca

SEQ ID NO: 933674 - RNA, 22 nt, Human
aggaggguggggucugccuguc

SEQ ID NO: 933675 - RNA, 22 nt, Human
uccaggaggacugagggggcug

SEQ ID NO: 933676 - RNA, 22 nt, Human
ucaggggacagccagcuggagg

SEQ ID NO: 933677 - RNA, 19 nt, Human
ggggcccggggucugcgag

SEQ ID NO: 933678 - RNA, 22 nt, Human
uccuggggaggucgaggcugag

SEQ ID NO: 933679 - RNA, 22 nt, Human
augcaggaagagcccuggagcu

SEQ ID NO: 933680 - RNA, 22 nt, Human
aaaugcucgccuuggccgagac

SEQ ID NO: 933681 - RNA, 22 nt, Human
ccuccugggccuugcucuguga

SEQ ID NO: 933682 - RNA, 19 nt, Human
ggccuggauuuagggcucc

SEQ ID NO: 933683 - RNA, 19 nt, Human
ggauaagguuggagugauc

SEQ ID NO: 933684 - RNA, 22 nt, Human
uuggcgcccaggacgccgccgc

SEQ ID NO: 933685 - RNA, 22 nt, Human
uggcugaggagagggcggaagu

SEQ ID NO: 933686 - RNA, 22 nt, Human
uggccuugcccagcgccuaggu

SEQ ID NO: 933687 - RNA, 22 nt, Human
aaggggggcaccugcaugcccg

SEQ ID NO: 933688 - RNA, 22 nt, Human
gggagcugagcuggaagagaau

SEQ ID NO: 933689 - RNA, 22 nt, Human
ggaggugacuggaucaugggca

SEQ ID NO: 933690 - RNA, 22 nt, Human
agguggcuaugaggaugcaguc

SEQ ID NO: 933691 - RNA, 22 nt, Human
gaggggcugggguugacuccaa

SEQ ID NO: 933692 - RNA, 17 nt, Human
ggugaguguccaggugg

SEQ ID NO: 933693 - RNA, 22 nt, Human
ugggugugagcccgggagccgc

SEQ ID NO: 933694 - RNA, 22 nt, Human
ggagaggggaacuuguugcuug

SEQ ID NO: 933695 - RNA, 22 nt, Human
ccaggaagaaacagucuuuaua

SEQ ID NO: 933696 - RNA, 22 nt, Human
aggagucauugagagggguccu

SEQ ID NO: 933697 - RNA, 22 nt, Human
ugccuaggcuggaaugcagugg

SEQ ID NO: 933698 - RNA, 22 nt, Human
agcugcugcaaguggugcuaac

SEQ ID NO: 933699 - RNA, 20 nt, Human
gugcccaguuggugacagac

SEQ ID NO: 933700 - RNA, 22 nt, Human
uggcagaaugaagacuggggcc

SEQ ID NO: 933701 - RNA, 22 nt, Human
ggagacucaccccgcauucuag

SEQ ID NO: 933702 - RNA, 22 nt, Human
gauggaggagauggcagggugc

SEQ ID NO: 933703 - RNA, 22 nt, Human
ggccuuggaguccuccacugga

SEQ ID NO: 933704 - RNA, 22 nt, Human
ugaguggacgugaggcugagua

SEQ ID NO: 933705 - RNA, 22 nt, Human
uggcugagcugcagcguggcuu

SEQ ID NO: 933706 - RNA, 22 nt, Human
uagauuaucccugauuugucca

SEQ ID NO: 933707 - RNA, 22 nt, Human
ggccgcggauuuucccgcuggc

SEQ ID NO: 933708 - RNA, 22 nt, Human
gggaggaaggcuugggugagua

SEQ ID NO: 933709 - RNA, 22 nt, Human
gaggggccuggcgaggacaugu

SEQ ID NO: 933710 - RNA, 20 nt, Human
ggccggggagcucuccaggg

SEQ ID NO: 933711 - RNA, 22 nt, Human
ggaaggaucuggcugaaaucca

SEQ ID NO: 933712 - RNA, 19 nt, Human
uccuggggaggggcauggc

SEQ ID NO: 933713 - RNA, 22 nt, Human
agugggagcggcagucggggac

SEQ ID NO: 933714 - RNA, 22 nt, Human
agagggcgcccaggcccacgcc

SEQ ID NO: 933715 - RNA, 22 nt, Human
gccagagggauuccuggugugu

SEQ ID NO: 933716 - RNA, 22 nt, Human
gaaggagaggauugugaggcug

SEQ ID NO: 933717 - RNA, 22 nt, Human
gcugcucucucccuaaguuggg

SEQ ID NO: 933718 - RNA, 22 nt, Human
gggagagcgcgcuagggccgag

SEQ ID NO: 933719 - RNA, 22 nt, Human
uuuggagagaugaaguucugug

SEQ ID NO: 933720 - RNA, 22 nt, Human
uggcaggaaaaagggccagagg

SEQ ID NO: 933721 - RNA, 22 nt, Human
aguggcugugaaauacauggga

SEQ ID NO: 933722 - RNA, 21 nt, Human
gggcuggauauuggaaagagg

SEQ ID NO: 933723 - RNA, 22 nt, Human
uccuggguccauggcagccgaa

SEQ ID NO: 933724 - RNA, 22 nt, Human
uagggagugcguagcagggugg

SEQ ID NO: 933725 - RNA, 22 nt, Human
agagugaaguaauuguuaggau

SEQ ID NO: 933726 - RNA, 22 nt, Human
uguccugugcacuguagcaugu

SEQ ID NO: 933727 - RNA, 22 nt, Human
guccuggggauuauagaguguu

SEQ ID NO: 933728 - RNA, 23 nt, Human
uccugcagauaagcugguugaca

SEQ ID NO: 933729 - RNA, 22 nt, Human
uccaggaguccuggguggcccc

SEQ ID NO: 933730 - RNA, 22 nt, Human
agguggaguuaagugugaacug

SEQ ID NO: 933731 - RNA, 22 nt, Human
aggacugggugcagagggcauc

SEQ ID NO: 933732 - RNA, 22 nt, Human
gaggugaguggggucuccaggg

SEQ ID NO: 933733 - RNA, 18 nt, Human
uggggggcuugucugaag

SEQ ID NO: 933734 - RNA, 22 nt, Human
ucagaagcauccauuucaccac

SEQ ID NO: 933735 - RNA, 22 nt, Human
gcaaggagcaccuuucuggaac

SEQ ID NO: 933736 - RNA, 22 nt, Human
agcuuuggcaucugacuagccg

SEQ ID NO: 933737 - RNA, 22 nt, Human
gagaagguggaccugaaggagc

SEQ ID NO: 933738 - RNA, 22 nt, Human
ggcuuuggggguguccaagaaa

SEQ ID NO: 933739 - RNA, 22 nt, Human
agugacagauuaccggcagagc

SEQ ID NO: 933740 - RNA, 22 nt, Human
cauuuuccucugcugguguuca

SEQ ID NO: 933741 - RNA, 21 nt, Human
uuccuggaggcagaaacguga

SEQ ID NO: 933742 - RNA, 22 nt, Human
aggcuauuuccacucuucucau

SEQ ID NO: 933743 - RNA, 22 nt, Human
ggagggaaccuuggcuggauug

SEQ ID NO: 933744 - RNA, 22 nt, Human
auggagcagcagaaggggcuug

SEQ ID NO: 933745 - RNA, 22 nt, Human
acagggagucugaggggauagu

SEQ ID NO: 933746 - RNA, 22 nt, Human
ugucuuggccacuaggagugcc

SEQ ID NO: 933747 - RNA, 22 nt, Human
gaguggggcccacugcugggug

SEQ ID NO: 933748 - RNA, 22 nt, Human
agggaagcagcagccgccuguc

SEQ ID NO: 933749 - RNA, 19 nt, Human
uggcucugucgaaggcaca

SEQ ID NO: 933750 - RNA, 19 nt, Human
uggcagcauugguaccuug

SEQ ID NO: 933751 - RNA, 20 nt, Human
cagagccaggguuuuguuuu

SEQ ID NO: 933752 - RNA, 22 nt, Human
ccaggaugacccccacuuuccu

SEQ ID NO: 933753 - RNA, 22 nt, Human
ucugggagaguagauaaaggaa

SEQ ID NO: 933754 - RNA, 19 nt, Human
ggaggcuucuuggggucgg

SEQ ID NO: 933755 - RNA, 22 nt, Human
agcuccacucccugccuguuuc

SEQ ID NO: 933756 - RNA, 22 nt, Human
uucagagcuggugucuacagcu

SEQ ID NO: 933757 - RNA, 22 nt, Human
agggggcuccuuggugugcaga

SEQ ID NO: 933758 - RNA, 22 nt, Human
uuccuggggacuuaccgucauu

SEQ ID NO: 933759 - RNA, 22 nt, Human
aaggaucauguauauguuuaag

SEQ ID NO: 933760 - RNA, 22 nt, Human
uaccugagaagaaacccguguu

SEQ ID NO: 933761 - RNA, 22 nt, Human
gcauucuugguggagugcuaaa

SEQ ID NO: 933762 - RNA, 22 nt, Human
gagggcugccacguugggcgag

SEQ ID NO: 933763 - RNA, 22 nt, Human
uggcuuccagaacugagcaaca

SEQ ID NO: 933764 - RNA, 20 nt, Human
ugugguuuuugccaguugaa

SEQ ID NO: 933765 - RNA, 22 nt, Human
cagaggccuggcuuggacaccu

SEQ ID NO: 933766 - RNA, 22 nt, Human
ugguggggccagacuucagcuc

SEQ ID NO: 933767 - RNA, 22 nt, Human
acuuccagaaaugauuuaauuu

SEQ ID NO: 933768 - RNA, 22 nt, Human
uuggcugacaaauggaaucucu

SEQ ID NO: 933769 - RNA, 19 nt, Human
ugguggaggugcaccugac

SEQ ID NO: 933770 - RNA, 22 nt, Human
ggguucagugaugccuucagga

SEQ ID NO: 933771 - RNA, 22 nt, Human
aggggagccagggcugcgaguu

SEQ ID NO: 933772 - RNA, 22 nt, Human
cugaaggacacgugaggagcca

SEQ ID NO: 933773 - RNA, 22 nt, Human
cccuugggcuucagcccuaccg

SEQ ID NO: 933774 - RNA, 22 nt, Human
gaauguuuaaaaggugcaguuu

SEQ ID NO: 933775 - RNA, 22 nt, Human
aucagaagaaauggaugugacu

SEQ ID NO: 933776 - RNA, 22 nt, Human
accuggaggcagagguugcagu

SEQ ID NO: 933777 - RNA, 22 nt, Human
aggagccauugcaggauggcag

SEQ ID NO: 933778 - RNA, 22 nt, Human
cauuguuggcagagggacagag

SEQ ID NO: 933779 - RNA, 21 nt, Human
uuuaaggccagcaggagguga

SEQ ID NO: 933780 - RNA, 22 nt, Human
ggagcagggaauuacagcgcag

SEQ ID NO: 933781 - RNA, 22 nt, Human
ggggagaguauuuuauucaagu

SEQ ID NO: 933782 - RNA, 22 nt, Human
ggaaccuuaguguucuuuuacc

SEQ ID NO: 933783 - RNA, 22 nt, Human
acccggaggcgggggaugcagu

SEQ ID NO: 933784 - RNA, 22 nt, Human
aucuucccaggcuggggagagg

SEQ ID NO: 933785 - RNA, 22 nt, Human
ggggaagaaauagaacauuuug

SEQ ID NO: 933786 - RNA, 21 nt, Human
ugaggccugccagucucagaa

SEQ ID NO: 933787 - RNA, 22 nt, Human
uggagcugguucuggggaagcu

SEQ ID NO: 933788 - RNA, 22 nt, Human
gguguggcaguggaccugugaa

SEQ ID NO: 933789 - RNA, 22 nt, Human
aaggggaguuagugauaaaacc

SEQ ID NO: 933790 - RNA, 22 nt, Human
aggggcagccucacaauccucu

SEQ ID NO: 933791 - RNA, 22 nt, Human
ugugagacguaggccaucgagg

SEQ ID NO: 933792 - RNA, 22 nt, Human
ggcuagggaucuagaccaggac

SEQ ID NO: 933793 - RNA, 22 nt, Human
cacagaggacuguagcggggag

SEQ ID NO: 933794 - RNA, 20 nt, Human
aggggcaccugcgacggggc

SEQ ID NO: 933795 - RNA, 22 nt, Human
uggaagggagcuggaauuugga

SEQ ID NO: 933796 - RNA, 18 nt, Human
aggagcggcugcggcugc

SEQ ID NO: 933797 - RNA, 22 nt, Human
ggccaaggcucuugagggcuga

SEQ ID NO: 933798 - RNA, 22 nt, Human
uccaggagugauaaggccacug

SEQ ID NO: 933799 - RNA, 22 nt, Human
cuggagaacagagcuguuuaga

SEQ ID NO: 933800 - RNA, 18 nt, Human
ccucagggagagagacgc

SEQ ID NO: 933801 - RNA, 22 nt, Human
auccugggaaguggccuccucc

SEQ ID NO: 933802 - RNA, 22 nt, Human
gggcccuggacguggcggcaga

SEQ ID NO: 933803 - RNA, 22 nt, Human
uguaccgccuugugggguuggg

SEQ ID NO: 933804 - RNA, 22 nt, Human
agcgcuugccgcacuccaagca

SEQ ID NO: 933805 - RNA, 17 nt, Human
uguguaaguugcauaga

SEQ ID NO: 933806 - RNA, 22 nt, Human
uuucugugauaggcugcgacgc

SEQ ID NO: 933807 - RNA, 22 nt, Human
gggcugagggguaucucauggg

SEQ ID NO: 933808 - RNA, 23 nt, Human
gcugccaaggaggcaggggugcc

SEQ ID NO: 933809 - RNA, 22 nt, Human
uugggauuacagguguaagcca

SEQ ID NO: 933810 - RNA, 22 nt, Human
aggugggacccguggggugcga

SEQ ID NO: 933811 - RNA, 22 nt, Human
auggaguguggccaggcaguaa

SEQ ID NO: 933812 - RNA, 22 nt, Human
uccaaggacauuguucuaguug

SEQ ID NO: 933813 - RNA, 22 nt, Human
gucugcccuuggccugggacuu

SEQ ID NO: 933814 - RNA, 19 nt, Human
cccuggaggaguguuggcu

SEQ ID NO: 933815 - RNA, 22 nt, Human
uuccaaggcugcuauuuguuuc

SEQ ID NO: 933816 - RNA, 18 nt, Human
agguauaugaaucucuuu

SEQ ID NO: 933817 - RNA, 22 nt, Human
guccagagaguaaaggggguaa

SEQ ID NO: 933818 - RNA, 22 nt, Human
ucuggaaggggaucugugguca

SEQ ID NO: 933819 - RNA, 22 nt, Human
acccggagucggagguugcagu

SEQ ID NO: 933820 - RNA, 22 nt, Human
cacauuggcaaacgggguugca

SEQ ID NO: 933821 - RNA, 22 nt, Human
gggggcuggacuuucccacaca

SEQ ID NO: 933822 - RNA, 21 nt, Human
aggucccagguuugggcagca

SEQ ID NO: 933823 - RNA, 22 nt, Human
caggguggaacaggcaauacuu

SEQ ID NO: 933824 - RNA, 22 nt, Human
cuugggcuuagaagguaaguga

SEQ ID NO: 933825 - RNA, 22 nt, Human
agguggagaagagaugggcagu

SEQ ID NO: 933826 - RNA, 22 nt, Human
uuuucaguugugcucucuaguu

SEQ ID NO: 933827 - RNA, 20 nt, Human
ugagccugcuguaggaggcc

SEQ ID NO: 933828 - RNA, 22 nt, Human
aggggaauggguagacuguuga

SEQ ID NO: 933829 - RNA, 22 nt, Human
auauuuguuuggcagaguucag

SEQ ID NO: 933830 - RNA, 22 nt, Human
ggacugucuccuugcugguagg

SEQ ID NO: 933831 - RNA, 17 nt, Human
ugaggccugcaucagug

SEQ ID NO: 933832 - RNA, 21 nt, Human
cccuugccugcacuccucggc

SEQ ID NO: 933833 - RNA, 19 nt, Human
gaauggguucuguagggag

SEQ ID NO: 933834 - RNA, 22 nt, Human
cucagugaauuggaggauggcc

SEQ ID NO: 933835 - RNA, 22 nt, Human
gggcccugcgacucgcggcgga

SEQ ID NO: 933836 - RNA, 19 nt, Human
gggugaggaagagcguugc

SEQ ID NO: 933837 - RNA, 17 nt, Human
gagguaggaagugaguc

SEQ ID NO: 933838 - RNA, 22 nt, Human
aggggagguggcagaaaugugc

SEQ ID NO: 933839 - RNA, 21 nt, Human
cagaggggcuagccuggcugc

SEQ ID NO: 933840 - RNA, 22 nt, Human
uccgggagcugaacgucuugcg

SEQ ID NO: 933841 - RNA, 22 nt, Human
agcccuugguauuuuccgaucc

SEQ ID NO: 933842 - RNA, 22 nt, Human
uccuggcaaagauguugguguu

SEQ ID NO: 933843 - RNA, 22 nt, Human
aggguugaagucugguccucau

SEQ ID NO: 933844 - RNA, 22 nt, Human
gccuggaucccagggagucagg

SEQ ID NO: 933845 - RNA, 22 nt, Human
aaggcaguuaauuuggcuagaa

SEQ ID NO: 933846 - RNA, 22 nt, Human
agggagcauugugacauaucac

SEQ ID NO: 933847 - RNA, 22 nt, Human
ucgcuugaacccaggaagugga

SEQ ID NO: 933848 - RNA, 22 nt, Human
gcuggguggaucggaggcucug

SEQ ID NO: 933849 - RNA, 22 nt, Human
gucagcaggguccccuugagug

SEQ ID NO: 933850 - RNA, 22 nt, Human
agggcagagauuaauuaagaca

SEQ ID NO: 933851 - RNA, 22 nt, Human
gcugucucauacaaggcccugc

SEQ ID NO: 933852 - RNA, 22 nt, Human
uaaggcuguuaggaggauuaaa

SEQ ID NO: 933853 - RNA, 22 nt, Human
aggagggagcuuaagccaggca

SEQ ID NO: 933854 - RNA, 22 nt, Human
guagaggggugauucugugaga

SEQ ID NO: 933855 - RNA, 22 nt, Human
ggagugacucucggggccacua

SEQ ID NO: 933856 - RNA, 22 nt, Human
cugggaggcggagguuguagug

SEQ ID NO: 933857 - RNA, 20 nt, Human
ucucccugcccaucucagau

SEQ ID NO: 933858 - RNA, 22 nt, Human
ggcuagggagacagagggcaug

SEQ ID NO: 933859 - RNA, 22 nt, Human
agcaggggcaggguuuugugcu

SEQ ID NO: 933860 - RNA, 22 nt, Human
aguggcuguuccaggugaggac

SEQ ID NO: 933861 - RNA, 17 nt, Human
gugagcugagucaggac

SEQ ID NO: 933862 - RNA, 22 nt, Human
ccaggagagcucucguucagug

SEQ ID NO: 933863 - RNA, 22 nt, Human
ggccauggcgggagccggcguc

SEQ ID NO: 933864 - RNA, 22 nt, Human
uggaaggggagcuggaaagggg

SEQ ID NO: 933865 - RNA, 22 nt, Human
ugggaugggaucucgcuguguc

SEQ ID NO: 933866 - RNA, 22 nt, Human
ucccugggguaucgcugaggca

SEQ ID NO: 933867 - RNA, 22 nt, Human
aggcgaagggaccagacgguag

SEQ ID NO: 933868 - RNA, 22 nt, Human
ugccuggauggcucugagcagg

SEQ ID NO: 933869 - RNA, 22 nt, Human
ugaaggccagggauuugcagcc

SEQ ID NO: 933870 - RNA, 22 nt, Human
uggaauguuaaaccucaaugau

SEQ ID NO: 933871 - RNA, 20 nt, Human
cccuuuucacgaaaaggaga

SEQ ID NO: 933872 - RNA, 22 nt, Human
gagucgagcagaaagccgucgg

SEQ ID NO: 933873 - RNA, 22 nt, Human
cuggagcuggcccaggcuggcc

SEQ ID NO: 933874 - RNA, 22 nt, Human
gggagaguagcuggaagguucu

SEQ ID NO: 933875 - RNA, 19 nt, Human
ugguucuccuuccacaguc

SEQ ID NO: 933876 - RNA, 22 nt, Human
ggcuguggucauuaggagguug

SEQ ID NO: 933877 - RNA, 22 nt, Human
gccugccuucggugcgcagcgg

SEQ ID NO: 933878 - RNA, 22 nt, Human
ucuccuggcauuugguugagua

SEQ ID NO: 933879 - RNA, 22 nt, Human
ugcugggauuacagucaugagc

SEQ ID NO: 933880 - RNA, 22 nt, Human
acuugguggcgaacgaggguca

SEQ ID NO: 933881 - RNA, 22 nt, Human
agggagcugcucugcuuccgug

SEQ ID NO: 933882 - RNA, 22 nt, Human
gcuuggccagcagccgggaugc

SEQ ID NO: 933883 - RNA, 22 nt, Human
gagguggcugcuugcugggaaa

SEQ ID NO: 933884 - RNA, 22 nt, Human
uggcuggggccugaauccugca

SEQ ID NO: 933885 - RNA, 22 nt, Human
gaggagaggcuggacgcgguga

SEQ ID NO: 933886 - RNA, 22 nt, Human
uggggugccgacagggagggca

SEQ ID NO: 933887 - RNA, 22 nt, Human
gaagcccuggggucagugucgu

SEQ ID NO: 933888 - RNA, 18 nt, Human
agggagagaccgcggguc

SEQ ID NO: 933889 - RNA, 22 nt, Human
gggcuggagagucccacguggg

SEQ ID NO: 933890 - RNA, 22 nt, Human
gccugagauuggacauuauuua

SEQ ID NO: 933891 - RNA, 22 nt, Human
gguauggagucugaguuucuag

SEQ ID NO: 933892 - RNA, 22 nt, Human
cgcaggugccggcagauggggu

SEQ ID NO: 933893 - RNA, 22 nt, Human
ugggcagggagcuggaaccaca

SEQ ID NO: 933894 - RNA, 22 nt, Human
ccgggagguggagauugcggug

SEQ ID NO: 933895 - RNA, 22 nt, Human
ggagaggguagggguccugccc

SEQ ID NO: 933896 - RNA, 22 nt, Human
gaggagagaagcuaacggugcu

SEQ ID NO: 933897 - RNA, 22 nt, Human
aagcagccagccaucaugcccg

SEQ ID NO: 933898 - RNA, 22 nt, Human
ccaagaggggaagggccgcagc

SEQ ID NO: 933899 - RNA, 18 nt, Human
ggugagggagcuggaagc

SEQ ID NO: 933900 - RNA, 18 nt, Human
gggguagaguguccuauu

SEQ ID NO: 933901 - RNA, 22 nt, Human
ugaggagcaggguggcuuacuc

SEQ ID NO: 933902 - RNA, 22 nt, Human
ggagguggagcuggaaguucca

SEQ ID NO: 933903 - RNA, 22 nt, Human
gcucaugggcccagagcagccc

SEQ ID NO: 933904 - RNA, 22 nt, Human
ucugggaguuucugugggagcu

SEQ ID NO: 933905 - RNA, 22 nt, Human
uggcagcagggccccuggagga

SEQ ID NO: 933906 - RNA, 22 nt, Human
uuguuuguaaggcucuuagaau

SEQ ID NO: 933907 - RNA, 22 nt, Human
agaugcugcuccacaggccagg

SEQ ID NO: 933908 - RNA, 22 nt, Human
uugaggagucaggggcacggaa

SEQ ID NO: 933909 - RNA, 20 nt, Human
agcuuugguuaagccagugg

SEQ ID NO: 933910 - RNA, 22 nt, Human
agucuggagugauuauguggga

SEQ ID NO: 933911 - RNA, 22 nt, Human
gguuuguugggguccaggccca

SEQ ID NO: 933912 - RNA, 22 nt, Human
gggcuguuugcauauguuuaua

SEQ ID NO: 933913 - RNA, 22 nt, Human
aucagagcugcauuuuagagcc

SEQ ID NO: 933914 - RNA, 22 nt, Human
cuggaaggagcccgggcggauc

SEQ ID NO: 933915 - RNA, 22 nt, Human
accaggcccuccagcugcgugg

SEQ ID NO: 933916 - RNA, 22 nt, Human
gucaggggccaugggccaagga

SEQ ID NO: 933917 - RNA, 22 nt, Human
aaagggaaguugcacauguucc

SEQ ID NO: 933918 - RNA, 22 nt, Human
uggcagugugggaggaagguac

SEQ ID NO: 933919 - RNA, 22 nt, Human
cccgggaggaggaaguugcagu

SEQ ID NO: 933920 - RNA, 22 nt, Human
auggaguucugccagcgcugcu

SEQ ID NO: 933921 - RNA, 22 nt, Human
cccaggaggcagaaguugcagu

SEQ ID NO: 933922 - RNA, 18 nt, Human
ggaaggugcuggagugca

SEQ ID NO: 933923 - RNA, 22 nt, Human T-lymphotropic virus 2
aaugaaccuccauuuaccauuu

SEQ ID NO: 933924 - RNA, 22 nt, Human T-lymphotropic virus 2
uuuggcggaggauacaggggcc

SEQ ID NO: 933925 - RNA, 22 nt, Human T-lymphotropic virus 2
cucaugggguugaggacggcug

SEQ ID NO: 933926 - RNA, 22 nt, Human T-lymphotropic virus 2
caagcucuugggucccgguacc

SEQ ID NO: 933927 - RNA, 22 nt, Human T-lymphotropic virus 2
ccacggcaguuauguuguagag

SEQ ID NO: 933928 - RNA, 22 nt, Human T-lymphotropic virus 2
aaugaaccuccauuuaccauuu

SEQ ID NO: 933929 - RNA, 22 nt, Human T-lymphotropic virus 2
ugagggugguaguaauggcauu

SEQ ID NO: 933930 - RNA, 22 nt, Human T-lymphotropic virus 2
uauccacgcaaaccaugcagga

SEQ ID NO: 933931 - RNA, 21 nt, Human T-lymphotropic virus 2
uauagggauuguagguguuug

SEQ ID NO: 933932 - RNA, 22 nt, Human T-lymphotropic virus 2
ucuguaaggucagcuggauaaa

SEQ ID NO: 933933 - RNA, 22 nt, Human T-lymphotropic virus 2
cgguuuuguaaccgcuguggaa

SEQ ID NO: 933934 - RNA, 21 nt, Human T-lymphotropic virus 2
uaacgcauggaguuguugugg

SEQ ID NO: 933935 - RNA, 22 nt, Human
acacuucuauucccugcacaaa

SEQ ID NO: 933936 - RNA, 22 nt, Human
aggcagcccacaggacacagga

SEQ ID NO: 933937 - RNA, 22 nt, Human
cuucuucagcacaauauugaug

SEQ ID NO: 933938 - RNA, 22 nt, Human
cugcucuggcuguguacuucag

SEQ ID NO: 933939 - RNA, 22 nt, Human
ugggggagauugugcaucucua

SEQ ID NO: 933940 - RNA, 19 nt, Human
ucucugcuucucuuggcau

SEQ ID NO: 933941 - RNA, 22 nt, Human
uauauuaaaugaccaguuuuaa

SEQ ID NO: 933942 - RNA, 22 nt, Human
aaauaguuagcccugcauauau

SEQ ID NO: 933943 - RNA, 22 nt, Human
cccaggccccagggcuugucag

SEQ ID NO: 933944 - RNA, 22 nt, Human
agaggcccugggcuggugugcu

SEQ ID NO: 933945 - RNA, 22 nt, Human
uccucagaagaaccccuagauu

SEQ ID NO: 933946 - RNA, 22 nt, Human
gcagagccaggcuggggcaggu

SEQ ID NO: 933947 - RNA, 22 nt, Human
uggcaacauggacaggucugcc

SEQ ID NO: 933948 - RNA, 22 nt, Human
ccuguggcugccacuuggguga

SEQ ID NO: 933949 - RNA, 22 nt, Human
agggcagagaucugagugggca

SEQ ID NO: 933950 - RNA, 22 nt, Human
ugcagcuccucuggcugccuga

SEQ ID NO: 933951 - RNA, 20 nt, Human
gaggcucugggcauggcgcc

SEQ ID NO: 933952 - RNA, 22 nt, Human
accucugccaagaugugcuccc

SEQ ID NO: 933953 - RNA, 22 nt, Human
ccucugcugcuguugagcaccg

SEQ ID NO: 933954 - RNA, 22 nt, Human
aucuuucagagcuccaucaggg

SEQ ID NO: 933955 - RNA, 22 nt, Human
gcagaagcagcagaugggcgca

SEQ ID NO: 933956 - RNA, 22 nt, Human
ccagggugcucuguggcgucgc

SEQ ID NO: 933957 - RNA, 22 nt, Human
cgugucaucugagccuugggcg

SEQ ID NO: 933958 - RNA, 22 nt, Human
uuuuacuuaauucuuggucaug

SEQ ID NO: 933959 - RNA, 22 nt, Human
acuuccuguuaugugugccucu

SEQ ID NO: 933960 - RNA, 19 nt, Human
ucaaagcaagcauguucug

SEQ ID NO: 933961 - RNA, 22 nt, Human
caaaaguaauugugguuuucac

SEQ ID NO: 933962 - RNA, 22 nt, Human
cugucugucaaguucaucucca

SEQ ID NO: 933963 - RNA, 18 nt, Human
aguaguggguuuagcuuc

SEQ ID NO: 933964 - RNA, 22 nt, Human
acaaaaaccguggauucagcau

SEQ ID NO: 933965 - RNA, 20 nt, Human
gagagcuggggaugaggcug

SEQ ID NO: 933966 - RNA, 22 nt, Human
ggcagcaggcgacuucccuauu

SEQ ID NO: 933967 - RNA, 22 nt, Human
gggcucugggauucagagcaag

SEQ ID NO: 933968 - RNA, 17 nt, Human
acucugcugaaguagaa

SEQ ID NO: 933969 - RNA, 22 nt, Human
caagcagagacuagauagcugu

SEQ ID NO: 933970 - RNA, 22 nt, Human
cagccaggcccccgagucguug

SEQ ID NO: 933971 - RNA, 23 nt, Human
cccagcagagaugaggagggguc

SEQ ID NO: 933972 - RNA, 22 nt, Human
cccaggagcuucucucugccuc

SEQ ID NO: 933973 - RNA, 22 nt, Human
aaaucaguaaauguucauuaac

SEQ ID NO: 933974 - RNA, 22 nt, Human
gcagcaaucuucacagugucau

SEQ ID NO: 933975 - RNA, 22 nt, Human
gacagggcgcccagccuguuuc

SEQ ID NO: 933976 - RNA, 22 nt, Human
aauucuauaggcaagcuauuuu

SEQ ID NO: 933977 - RNA, 22 nt, Human
aaaaagcuuaaaugagcaguuc

SEQ ID NO: 933978 - RNA, 22 nt, Human
cauuggaaugcauuugaagaga

SEQ ID NO: 933979 - RNA, 22 nt, Human
auucuuggcaaggagauuuaaa

SEQ ID NO: 933980 - RNA, 22 nt, Human
agucaguguucuccggagaggc

SEQ ID NO: 933981 - RNA, 22 nt, Human
uggucucuucuuccaagauggc

SEQ ID NO: 933982 - RNA, 22 nt, Human
gagguggugguggaggcauagc

SEQ ID NO: 933983 - RNA, 23 nt, Human
ccagccucugggucuucauccag

SEQ ID NO: 933984 - RNA, 22 nt, Human
accaaggagccacauacaaccu

SEQ ID NO: 933985 - RNA, 22 nt, Human
cagggagaggcaucauagggaa

SEQ ID NO: 933986 - RNA, 22 nt, Human
uugaaagaagaagcugcgaugu

SEQ ID NO: 933987 - RNA, 22 nt, Human
aaaugcuugcucuugauuauuu

SEQ ID NO: 933988 - RNA, 22 nt, Human
gcucccagggcagcgcagaaga

SEQ ID NO: 933989 - RNA, 22 nt, Human
agcaggagcugugggaagaugg

SEQ ID NO: 933990 - RNA, 22 nt, Human
ugaggcuguucuaccagggcca

SEQ ID NO: 933991 - RNA, 22 nt, Human
aaacaugagcacuugcuucaua

SEQ ID NO: 933992 - RNA, 22 nt, Human
aauagaauuuguacuguguuuu

SEQ ID NO: 933993 - RNA, 22 nt, Human
ugcagcagcagggaggaggcuc

SEQ ID NO: 933994 - RNA, 22 nt, Human
acuuuguaauaguuuaagguca

SEQ ID NO: 933995 - RNA, 22 nt, Human
agugaaauacugucguuuuuag

SEQ ID NO: 933996 - RNA, 22 nt, Human
cugcagcuguagaggacagugg

SEQ ID NO: 933997 - RNA, 20 nt, Human
ccacaggaguccagucgacc

SEQ ID NO: 933998 - RNA, 22 nt, Human
uuguuacuaagccuuuaaauag

SEQ ID NO: 933999 - RNA, 22 nt, Human
auugaaagauuuugggcucaug

SEQ ID NO: 934000 - RNA, 22 nt, Human
ugcauuguaggauguuuagcag

SEQ ID NO: 934001 - RNA, 22 nt, Human
uauguguaggaggaggacaggg

SEQ ID NO: 934002 - RNA, 16 nt, Human
gggagggaguuggugg

SEQ ID NO: 934003 - RNA, 22 nt, Human
augcugagcagagcugacaugc

SEQ ID NO: 934004 - RNA, 22 nt, Human
uacuuuuugucucuuugaaugu

SEQ ID NO: 934005 - RNA, 22 nt, Human
gucccagaugucuggaacuccc

SEQ ID NO: 934006 - RNA, 19 nt, Human
agccacagaacuugcagga

SEQ ID NO: 934007 - RNA, 22 nt, Human
agcagacauaucucaugucaca

SEQ ID NO: 934008 - RNA, 22 nt, Human
augugucuuggaguuuuaaugu

SEQ ID NO: 934009 - RNA, 22 nt, Human
ggcuucauggaggaggugaguc

SEQ ID NO: 934010 - RNA, 22 nt, Human
uagggauguccugagacuuggc

SEQ ID NO: 934011 - RNA, 22 nt, Human
gugcaugugucuuuauaguaga

SEQ ID NO: 934012 - RNA, 22 nt, Human
auuugucuucaguagguucuuc

SEQ ID NO: 934013 - RNA, 22 nt, Human
cucacugacgaggaagcugaga

SEQ ID NO: 934014 - RNA, 22 nt, Human
auacaacuuuaucuguaaugag

SEQ ID NO: 934015 - RNA, 22 nt, Human
gcugcugugaauuuuuuaaaug

SEQ ID NO: 934016 - RNA, 22 nt, Human
cagucccaucucccagguggcu

SEQ ID NO: 934017 - RNA, 22 nt, Human
uuuggccacuugggaguccagg

SEQ ID NO: 934018 - RNA, 22 nt, Human
uccaagaucuacagcaguuuag

SEQ ID NO: 934019 - RNA, 22 nt, Human
cagggguggcugcagcagaggu

SEQ ID NO: 934020 - RNA, 21 nt, Human
cagcaaaucauugggcagacu

SEQ ID NO: 934021 - RNA, 22 nt, Human
aggcucagcaucugauucauau

SEQ ID NO: 934022 - RNA, 22 nt, Human
ucacucuguuagaggaaagugc

SEQ ID NO: 934023 - RNA, 22 nt, Human
aagacaagcaucaaaucaggca

SEQ ID NO: 934024 - RNA, 22 nt, Human
agcugccacauggugucacugu

SEQ ID NO: 934025 - RNA, 22 nt, Human
aaggaagggaaauagugauguc

SEQ ID NO: 934026 - RNA, 22 nt, Human
aguaacaagugccaacguuaga

SEQ ID NO: 934027 - RNA, 22 nt, Human
gucaggggccaugggccaagga

SEQ ID NO: 934028 - RNA, 22 nt, Human
ccccaggagaaaucuuaaacua

SEQ ID NO: 934029 - RNA, 22 nt, Human
gcaagauguuaacauagggaga

SEQ ID NO: 934030 - RNA, 21 nt, Human
guguuuccuguuuauggcuug

SEQ ID NO: 934031 - RNA, 22 nt, Human
aacacauauuuauauaugcaca

SEQ ID NO: 934032 - RNA, 20 nt, Human
aaaaucucccagaaacuuau

SEQ ID NO: 934033 - RNA, 22 nt, Human
ucugcagcgugcaggcuggugc

SEQ ID NO: 934034 - RNA, 22 nt, Human
cugccucucagccugaccgcca

SEQ ID NO: 934035 - RNA, 22 nt, Human
gagugagggcagcaggggcugc

SEQ ID NO: 934036 - RNA, 22 nt, Human
accugaggccuccccagcagac

SEQ ID NO: 934037 - RNA, 23 nt, Human
uguugaaguaacuguuacauaga

SEQ ID NO: 934038 - RNA, 22 nt, Human
agucccagccuaggcugugcug

SEQ ID NO: 934039 - RNA, 22 nt, Human
caaagcucaugcucuuagccau

SEQ ID NO: 934040 - RNA, 22 nt, Human
uggucaaaaacucucaguggac

SEQ ID NO: 934041 - RNA, 22 nt, Human
uggaccugcuggaugggcaggu

SEQ ID NO: 934042 - RNA, 22 nt, Human
cuccuggaagcccgcccugcug

SEQ ID NO: 934043 - RNA, 22 nt, Human
ucccagagaagagcuggaugga

SEQ ID NO: 934044 - RNA, 22 nt, Human
uuugaaauuaagauauugucca

SEQ ID NO: 934045 - RNA, 22 nt, Human
uugcuucagagggagacacuuu

SEQ ID NO: 934046 - RNA, 22 nt, Human
ccaggcugcagucaaggggcau

SEQ ID NO: 934047 - RNA, 22 nt, Human
gaggcagaggaagguggucucu

SEQ ID NO: 934048 - RNA, 22 nt, Human
gccaucacauccaggcuaccuc

SEQ ID NO: 934049 - RNA, 22 nt, Human
ugugcuucaucacuucucaguu

SEQ ID NO: 934050 - RNA, 22 nt, Human
uucauucugggcucuaaggaac

SEQ ID NO: 934051 - RNA, 22 nt, Human
uccuucaggguugaggccgacu

SEQ ID NO: 934052 - RNA, 22 nt, Human
gcuccuggcuccaggcagccaa

SEQ ID NO: 934053 - RNA, 22 nt, Human
uggcagcugaggggaggcuuug

SEQ ID NO: 934054 - RNA, 22 nt, Human
gaggaaggucccaucagaauuu

SEQ ID NO: 934055 - RNA, 22 nt, Human
auggccaagcauauacagauug

SEQ ID NO: 934056 - RNA, 22 nt, Human
cagauccaucucucagaaagag

SEQ ID NO: 934057 - RNA, 22 nt, Human
gagcugccagacaugggaauga

SEQ ID NO: 934058 - RNA, 20 nt, Human
ucuggcucuuugcuccuccc

SEQ ID NO: 934059 - RNA, 22 nt, Human
agggcagagggugccucaccug

SEQ ID NO: 934060 - RNA, 22 nt, Human
uuacuuugcuuucucauuacag

SEQ ID NO: 934061 - RNA, 22 nt, Human
gacagggccgcagauggagacu

SEQ ID NO: 934062 - RNA, 22 nt, Human
ccuggugcuuaccagagcuuuu

SEQ ID NO: 934063 - RNA, 22 nt, Human
auuucagguaccugugggaucc

SEQ ID NO: 934064 - RNA, 22 nt, Human
gucaggaucaaauugaaguuau

SEQ ID NO: 934065 - RNA, 21 nt, Human
ucauccagguccugcuucuuc

SEQ ID NO: 934066 - RNA, 22 nt, Human
acuccuggggauccauuccuuu

SEQ ID NO: 934067 - RNA, 22 nt, Human
ucucuggcagggauaucuggcu

SEQ ID NO: 934068 - RNA, 22 nt, Human
aagcaauaagccagauuuggau

SEQ ID NO: 934069 - RNA, 22 nt, Human
augcuuugauuugguuucucua

SEQ ID NO: 934070 - RNA, 23 nt, Human
uuuuccagaaucgacucuguaga

SEQ ID NO: 934071 - RNA, 22 nt, Human
aggcucugggaagcagugaguu

SEQ ID NO: 934072 - RNA, 22 nt, Human
aucuggcuauugacauguuaua

SEQ ID NO: 934073 - RNA, 22 nt, Human
gaaaaugugccuuuggguauug

SEQ ID NO: 934074 - RNA, 22 nt, Human
ucugagcuacgaugccugucac

SEQ ID NO: 934075 - RNA, 22 nt, Human
aggcggcugguguccugcaggu

SEQ ID NO: 934076 - RNA, 22 nt, Human
aggagcugaaacuucucauaug

SEQ ID NO: 934077 - RNA, 22 nt, Human
ucauuuccucaaauucaagguu

SEQ ID NO: 934078 - RNA, 22 nt, Human
gagcugcuucugugugccgggu

SEQ ID NO: 934079 - RNA, 22 nt, Human
ggcugcuggcauugagguaggu

SEQ ID NO: 934080 - RNA, 22 nt, Human
agccugagugcuuaggacuguu

SEQ ID NO: 934081 - RNA, 22 nt, Human
uguguuuuacaaauucucuuaa

SEQ ID NO: 934082 - RNA, 22 nt, Human
agcuucuugaccaagccuguaa

SEQ ID NO: 934083 - RNA, 22 nt, Human
agggcagaggcggacacggaag

SEQ ID NO: 934084 - RNA, 23 nt, Human
ugcaugugaauucauacuuguuu

SEQ ID NO: 934085 - RNA, 21 nt, Human
gggagcuggaaacugggugac

SEQ ID NO: 934086 - RNA, 22 nt, Human
aagauguaucaguuaagucuuc

SEQ ID NO: 934087 - RNA, 22 nt, Human
aagauuucugcuuuuggaggca

SEQ ID NO: 934088 - RNA, 22 nt, Human
aggcuggguaccugucauaugc

SEQ ID NO: 934089 - RNA, 19 nt, Human
aggccugggguuuugcacu

SEQ ID NO: 934090 - RNA, 22 nt, Human
acaaagcuagagaagagaauug

SEQ ID NO: 934091 - RNA, 22 nt, Human
aggagucaggaccaaauggaaa

SEQ ID NO: 934092 - RNA, 22 nt, Human
ugcugccauggucgcugguguc

SEQ ID NO: 934093 - RNA, 22 nt, Human
uccaugagacagauacuguaag

SEQ ID NO: 934094 - RNA, 22 nt, Human
gugucauuaaccaccaugcaaa

SEQ ID NO: 934095 - RNA, 22 nt, Human
uaguaacagauuuauacagucu

SEQ ID NO: 934096 - RNA, 21 nt, Human
ccagacuggccuaugugguag

SEQ ID NO: 934097 - RNA, 21 nt, Human
uuguucuuccagaagcaaagu

SEQ ID NO: 934098 - RNA, 22 nt, Human
uacauuguuuuuucuugccauc

SEQ ID NO: 934099 - RNA, 22 nt, Human
agauggggcucaguguggaggc

SEQ ID NO: 934100 - RNA, 19 nt, Human
acuuccugcccgcuccuuu

SEQ ID NO: 934101 - RNA, 22 nt, Human
caggugcugcguggcggagcug

SEQ ID NO: 934102 - RNA, 22 nt, Human
aucaggaucacagaaacuuuua

SEQ ID NO: 934103 - RNA, 22 nt, Human
gagccugagugcugccuccccu

SEQ ID NO: 934104 - RNA, 22 nt, Human
agagccaggugcugcuguuuga

SEQ ID NO: 934105 - RNA, 22 nt, Human
uacccaggagaaacagcagggc

SEQ ID NO: 934106 - RNA, 22 nt, Human
uacauagcaaggaaaugacaga

SEQ ID NO: 934107 - RNA, 22 nt, Human
uguaugcuuuccaaaaaugcug

SEQ ID NO: 934108 - RNA, 22 nt, Human
ugaggcaggaugcuugcacagg

SEQ ID NO: 934109 - RNA, 22 nt, Human
acccugggcuuggccugcucag

SEQ ID NO: 934110 - RNA, 22 nt, Human
gccucugcaggugcgguuaucc

SEQ ID NO: 934111 - RNA, 22 nt, Human
uuagccauugucagcacauggc

SEQ ID NO: 934112 - RNA, 22 nt, Human
ugcaggcuuuagccccauggcu

SEQ ID NO: 934113 - RNA, 22 nt, Human
acugcuuuuagaaaucuauaga

SEQ ID NO: 934114 - RNA, 22 nt, Human
uucaggauaguggugaguggca

SEQ ID NO: 934115 - RNA, 17 nt, Human
aggcuggcucacaggga

SEQ ID NO: 934116 - RNA, 22 nt, Human
aaggcagcagaggaaaggugcu

SEQ ID NO: 934117 - RNA, 22 nt, Human
uaaauguguaaaccuccauuac

SEQ ID NO: 934118 - RNA, 22 nt, Human
guggcagcggugugcaaggagg

SEQ ID NO: 934119 - RNA, 22 nt, Human
aacuaaaucuggcauuuagagc

SEQ ID NO: 934120 - RNA, 22 nt, Human
ggcagcagggucuagauugaug

SEQ ID NO: 934121 - RNA, 22 nt, Human
ucugcagggaugugagggguga

SEQ ID NO: 934122 - RNA, 22 nt, Human
ccuggccauuugaacuucagac

SEQ ID NO: 934123 - RNA, 22 nt, Human
aaaggccuugagcugggugcca

SEQ ID NO: 934124 - RNA, 19 nt, Human
uggcugggcgugccuccgu

SEQ ID NO: 934125 - RNA, 22 nt, Human
ccuggcacgaagggcugagguu

SEQ ID NO: 934126 - RNA, 22 nt, Human
uggggcuggcacagucucuauu

SEQ ID NO: 934127 - RNA, 22 nt, Human
uccuguuuaucugugugacucg

SEQ ID NO: 934128 - RNA, 22 nt, Human
gcuggagcugaguucccugggc

SEQ ID NO: 934129 - RNA, 22 nt, Human
cugggaggugaacagaaaaacu

SEQ ID NO: 934130 - RNA, 22 nt, Human
ccucagccuuggccccaggcag

SEQ ID NO: 934131 - RNA, 22 nt, Human
uuccuguauucuaaagggaaag

SEQ ID NO: 934132 - RNA, 22 nt, Human
auugacaauguauuuguaucug

SEQ ID NO: 934133 - RNA, 22 nt, Human
caggcagauuugcugcccucca

SEQ ID NO: 934134 - RNA, 22 nt, Human
caaaaguaaucguggcuuuugc

SEQ ID NO: 934135 - RNA, 22 nt, Human
agccagaggccagccugccuca

SEQ ID NO: 934136 - RNA, 22 nt, Human
cagccagagaaagggcacugcc

SEQ ID NO: 934137 - RNA, 22 nt, Human
cugggagucaccaggagcaagg

SEQ ID NO: 934138 - RNA, 17 nt, Human
uucaaagcuuaucaagg

SEQ ID NO: 934139 - RNA, 22 nt, Human
uuccaguugguagaauguaagg

SEQ ID NO: 934140 - RNA, 21 nt, Human
gauuucacuuaccuucauuua

SEQ ID NO: 934141 - RNA, 22 nt, Human
ggagaggggcaaguuuaucuag

SEQ ID NO: 934142 - RNA, 19 nt, Human
uuucccagcccuugcugug

SEQ ID NO: 934143 - RNA, 22 nt, Human
cagcaucuuucucuucuggagu

SEQ ID NO: 934144 - RNA, 22 nt, Human
acugaaggcuuucccaagguca

SEQ ID NO: 934145 - RNA, 22 nt, Human
uuauuugcccauguuuagcaga

SEQ ID NO: 934146 - RNA, 22 nt, Human
uuccaggacaagauguuucagg

SEQ ID NO: 934147 - RNA, 22 nt, Human
augcuguggggagugaggguag

SEQ ID NO: 934148 - RNA, 22 nt, Human
gcagagacuccacugucuugug

SEQ ID NO: 934149 - RNA, 21 nt, Human
uuugaaagcuacaucuauagc

SEQ ID NO: 934150 - RNA, 22 nt, Human
gugggcuggacccuccugcucc

SEQ ID NO: 934151 - RNA, 22 nt, Human
ugcugucugcaacaguacuaca

SEQ ID NO: 934152 - RNA, 22 nt, Human
uggccugguuauauugcuauca

SEQ ID NO: 934153 - RNA, 22 nt, Human
auuuauuaagcaucugcuaugu

SEQ ID NO: 934154 - RNA, 22 nt, Human
caguacuugggggguucuaagu

SEQ ID NO: 934155 - RNA, 19 nt, Human
ggucagcugggcuagaggc

SEQ ID NO: 934156 - RNA, 22 nt, Human
uugcuuccucgaggccagcgug

SEQ ID NO: 934157 - RNA, 22 nt, Human
cugaggcugcccagggccaggu

SEQ ID NO: 934158 - RNA, 22 nt, Human
ugggugaggaugaugaggcagc

SEQ ID NO: 934159 - RNA, 22 nt, Human
gaggccuggcugucagucccca

SEQ ID NO: 934160 - RNA, 22 nt, Human
guacucucuugaaggccuuucu

SEQ ID NO: 934161 - RNA, 22 nt, Human
ccugggagugucagacuugcuu

SEQ ID NO: 934162 - RNA, 22 nt, Human
aagggccauaacuugcaguguu

SEQ ID NO: 934163 - RNA, 22 nt, Human
aggcccugcccagagcuccucg

SEQ ID NO: 934164 - RNA, 22 nt, Human
cccuggagggcagacagaugcc

SEQ ID NO: 934165 - RNA, 20 nt, Human
ugaagcagccuugauucugu

SEQ ID NO: 934166 - RNA, 20 nt, Human
cagauggcacgucagggcau

SEQ ID NO: 934167 - RNA, 18 nt, Human
uuaauguggcuuacuaug

SEQ ID NO: 934168 - RNA, 22 nt, Human
cucugagagagcuggugagcac

SEQ ID NO: 934169 - RNA, 22 nt, Human
ggccagaggccauccuccugcu

SEQ ID NO: 934170 - RNA, 22 nt, Human
aguaaagcagaguugcaguaca

SEQ ID NO: 934171 - RNA, 20 nt, Human
agcuggagaagggcccuucc

SEQ ID NO: 934172 - RNA, 22 nt, Human
acagggcccuugccagcacaag

SEQ ID NO: 934173 - RNA, 22 nt, Human
auuuccauagagcgucucacag

SEQ ID NO: 934174 - RNA, 22 nt, Human
gcugcugguccucagagcucau

SEQ ID NO: 934175 - RNA, 22 nt, Human
caggaaagaaaugagaacacca

SEQ ID NO: 934176 - RNA, 22 nt, Human
uuuccuuccagguuccuaaggc

SEQ ID NO: 934177 - RNA, 22 nt, Human
ucucccacugcaagcccaggcu

SEQ ID NO: 934178 - RNA, 22 nt, Human
gcagggccagugcagagaggaa

SEQ ID NO: 934179 - RNA, 22 nt, Human
ggccaagauggaaggagagaug

SEQ ID NO: 934180 - RNA, 22 nt, Human
ucccagaguucaaugggaaggu

SEQ ID NO: 934181 - RNA, 22 nt, Human
acagucuacuugagcuuguaua

SEQ ID NO: 934182 - RNA, 22 nt, Human
ugucacagggauaccauggggc

SEQ ID NO: 934183 - RNA, 22 nt, Human
guguguccuugggccucugcag

SEQ ID NO: 934184 - RNA, 21 nt, Human
ugaggcaggggugcuuuuguc

SEQ ID NO: 934185 - RNA, 22 nt, Human
caguggcuguuucuggaaggca

SEQ ID NO: 934186 - RNA, 22 nt, Human
aaaucuguaagcaauugcucag

SEQ ID NO: 934187 - RNA, 22 nt, Human
acagaccaaguuuccagcaggu

SEQ ID NO: 934188 - RNA, 22 nt, Human
accaugggucagccaccucagc

SEQ ID NO: 934189 - RNA, 22 nt, Human
cacagaaaaaggcuugaaaauc

SEQ ID NO: 934190 - RNA, 22 nt, Human
cagaggcagaggucaucucugg

SEQ ID NO: 934191 - RNA, 22 nt, Human
uggcucagcugucacagccugg

SEQ ID NO: 934192 - RNA, 22 nt, Human
gggcugggauugcuugcuguga

SEQ ID NO: 934193 - RNA, 22 nt, Human
ccagcuccaaguuugggcauca

SEQ ID NO: 934194 - RNA, 22 nt, Human
ccuccugguugcaaugaaaugg

SEQ ID NO: 934195 - RNA, 22 nt, Human
cauuuguacagaacagcuuuau

SEQ ID NO: 934196 - RNA, 22 nt, Human
cugggccugguagggcuugaaa

SEQ ID NO: 934197 - RNA, 22 nt, Human
uuuccaagacuccaguucuccc

SEQ ID NO: 934198 - RNA, 22 nt, Human
gaggcuggcagaaaagcacagg

SEQ ID NO: 934199 - RNA, 22 nt, Human
ggacagcucugccaggagcuca

SEQ ID NO: 934200 - RNA, 21 nt, Human
ucuguacaucauugagucccc

SEQ ID NO: 934201 - RNA, 23 nt, Human
aaccagauaaauggcuccagggc

SEQ ID NO: 934202 - RNA, 22 nt, Human
ccuguguggccaggcuggaguc

SEQ ID NO: 934203 - RNA, 22 nt, Human
uuugcauuccugccugcauuca

SEQ ID NO: 934204 - RNA, 20 nt, Human
aaaaacaguaaugcugaaga

SEQ ID NO: 934205 - RNA, 22 nt, Human
uuguuucuucauuuagaagcuu

SEQ ID NO: 934206 - RNA, 22 nt, Human
aaguuguauauaccgcuuuaag

SEQ ID NO: 934207 - RNA, 22 nt, Human
cagguggguguaugaaugcaaa

SEQ ID NO: 934208 - RNA, 22 nt, Human
ccugccugcagaaaguaucucc

SEQ ID NO: 934209 - RNA, 22 nt, Human
gccuggguuccaugaucuccag

SEQ ID NO: 934210 - RNA, 17 nt, Human
ugagaaguaggcaucau

SEQ ID NO: 934211 - RNA, 22 nt, Human
ccagagcugauuccugggacuu

SEQ ID NO: 934212 - RNA, 22 nt, Human
cagggcagcuuccuuuguuagg

SEQ ID NO: 934213 - RNA, 22 nt, Human
auguaacaggugaagcucugag

SEQ ID NO: 934214 - RNA, 22 nt, Human
ucuucucuccugcuuggcagaa

SEQ ID NO: 934215 - RNA, 22 nt, Human
ugcagcuguaacagaggccuca

SEQ ID NO: 934216 - RNA, 22 nt, Human
ggagggagucagcugauuagaa

SEQ ID NO: 934217 - RNA, 22 nt, Human
ccacagggcacaagggagguug

SEQ ID NO: 934218 - RNA, 22 nt, Human
cugagaggcacaaggcauuucg

SEQ ID NO: 934219 - RNA, 22 nt, Human
ucacacguccuugcuacuccuc

SEQ ID NO: 934220 - RNA, 22 nt, Human
cugcuguguuccuccugcaucu

SEQ ID NO: 934221 - RNA, 22 nt, Human
uguuugaaagcaccuacauuuu

SEQ ID NO: 934222 - RNA, 18 nt, Human
ccuggcagccaugcgcgc

SEQ ID NO: 934223 - RNA, 22 nt, Human
ucagaacauugacauucuuauu

SEQ ID NO: 934224 - RNA, 22 nt, Human
uacccaggggcugagcagaggu

SEQ ID NO: 934225 - RNA, 22 nt, Human
uuugcauaagucauguccagug

SEQ ID NO: 934226 - RNA, 20 nt, Human
cugcucugcuuugcaggugg

SEQ ID NO: 934227 - RNA, 22 nt, Human
uucuuuaaaauagugagaaaga

SEQ ID NO: 934228 - RNA, 22 nt, Human
cuccugcgguacuacugugcuu

SEQ ID NO: 934229 - RNA, 22 nt, Human
ugcuugugagaguuuuuucaga

SEQ ID NO: 934230 - RNA, 22 nt, Human
agggaucaaaaaauguacaugc

SEQ ID NO: 934231 - RNA, 22 nt, Human
uccagccaagggagguuacuag

SEQ ID NO: 934232 - RNA, 22 nt, Human
guugaaauuugugauaauuuag

SEQ ID NO: 934233 - RNA, 22 nt, Human
gcaaggcugugcacuuugcauu

SEQ ID NO: 934234 - RNA, 22 nt, Human
gagacagaguuucacucuuguu

SEQ ID NO: 934235 - RNA, 22 nt, Human
agcagcuucuuucacuccugga

SEQ ID NO: 934236 - RNA, 22 nt, Human
gggcagcagagcccugccgagu

SEQ ID NO: 934237 - RNA, 22 nt, Human
uccagggcuggguuggcucagc

SEQ ID NO: 934238 - RNA, 22 nt, Human
acuuuguugaugaaauaguuuu

SEQ ID NO: 934239 - RNA, 22 nt, Human
cugagccacugcuuguucagug

SEQ ID NO: 934240 - RNA, 22 nt, Human
caauaagccagguguuuguguu

SEQ ID NO: 934241 - RNA, 22 nt, Human
uaagaacaagcuggggguucca

SEQ ID NO: 934242 - RNA, 22 nt, Human
gggugggguucaggaaucuuca

SEQ ID NO: 934243 - RNA, 22 nt, Human
gcuccuucaggugguagcuguu

SEQ ID NO: 934244 - RNA, 22 nt, Human
uucauucaucucuaaaaugccu

SEQ ID NO: 934245 - RNA, 22 nt, Human
ccugggcauucuuugaguucuc

SEQ ID NO: 934246 - RNA, 22 nt, Human
gauuuguagcuuuucagucugu

SEQ ID NO: 934247 - RNA, 22 nt, Human
ugcucugaugggguggacauag

SEQ ID NO: 934248 - RNA, 20 nt, Human
ucucugcuguccacauuugc

SEQ ID NO: 934249 - RNA, 22 nt, Human
uggucaaaagaaagcucagaac

SEQ ID NO: 934250 - RNA, 22 nt, Human
acacagggucuagaguuaggcc

SEQ ID NO: 934251 - RNA, 22 nt, Human
ucagcugaguucuagagcacuc

SEQ ID NO: 934252 - RNA, 22 nt, Human
ugaacaaacugcauucuucacu

SEQ ID NO: 934253 - RNA, 22 nt, Human
uuucaaaguugggaauuguaau

SEQ ID NO: 934254 - RNA, 22 nt, Human
agaagccauucccuguaggcuc

SEQ ID NO: 934255 - RNA, 22 nt, Human
cugucucugucuuaacucccag

SEQ ID NO: 934256 - RNA, 20 nt, Human
gggcaguggcgcuaucucag

SEQ ID NO: 934257 - RNA, 22 nt, Human
acugaaggaaagccuuugcaug

SEQ ID NO: 934258 - RNA, 22 nt, Human
gcugucuccauagcuguguguc

SEQ ID NO: 934259 - RNA, 22 nt, Human
ugaggcagaaauuccuguuuuc

SEQ ID NO: 934260 - RNA, 22 nt, Human
ggaugcaggaguugaagaagga

SEQ ID NO: 934261 - RNA, 22 nt, Human
cagcagggggcagcgcagauca

SEQ ID NO: 934262 - RNA, 22 nt, Human
aaugcauauguaggcaagcagu

SEQ ID NO: 934263 - RNA, 22 nt, Human
gcugccagucuaaugggaaaca

SEQ ID NO: 934264 - RNA, 22 nt, Human
gccagcucccaagugagccccu

SEQ ID NO: 934265 - RNA, 21 nt, Human
gccacugcacuccagccuggg

SEQ ID NO: 934266 - RNA, 22 nt, Human
ugagaaaagguugagaugauaa

SEQ ID NO: 934267 - RNA, 22 nt, Human
ucuggcucauaggaaggccauu

SEQ ID NO: 934268 - RNA, 22 nt, Human
agcugcccuucucuugcccuug

SEQ ID NO: 934269 - RNA, 22 nt, Human
uaucaauacauguuaucagugu

SEQ ID NO: 934270 - RNA, 17 nt, Human
ccagagcuacugagacu

SEQ ID NO: 934271 - RNA, 22 nt, Human
uccagucauuuccauuguuccc

SEQ ID NO: 934272 - RNA, 22 nt, Human
agcuggcuccagaaggagucgu

SEQ ID NO: 934273 - RNA, 23 nt, Human
acuuuagauaaauuaugugcaca

SEQ ID NO: 934274 - RNA, 22 nt, Human
uuucaaagacagccauauuugu

SEQ ID NO: 934275 - RNA, 22 nt, Human
gccuggcaggggccugggagug

SEQ ID NO: 934276 - RNA, 17 nt, Human
ccaggugggaggugggg

SEQ ID NO: 934277 - RNA, 21 nt, Human
gcauggcaggucacuggggca

SEQ ID NO: 934278 - RNA, 22 nt, Human
auucuccacacauccagaccuu

SEQ ID NO: 934279 - RNA, 22 nt, Human
agcagugggggaguguuaguuu

SEQ ID NO: 934280 - RNA, 22 nt, Human
auacagaauacuaauuccugag

SEQ ID NO: 934281 - RNA, 22 nt, Human
uuucaagcauaacugggaagag

SEQ ID NO: 934282 - RNA, 22 nt, Human
ugcagaaggccugacauugcac

SEQ ID NO: 934283 - RNA, 22 nt, Human
aaauauaauuucugccucaaua

SEQ ID NO: 934284 - RNA, 22 nt, Human
caggucagagucccccuguccu

SEQ ID NO: 934285 - RNA, 19 nt, Human
cuuauuagagugagagcuu

SEQ ID NO: 934286 - RNA, 22 nt, Human
ugcaauaaagugcuauaaaucc

SEQ ID NO: 934287 - RNA, 22 nt, Human
auugaaagcacaaagaacaagu

SEQ ID NO: 934288 - RNA, 22 nt, Human
uuuggaaugguaccuucaguug

SEQ ID NO: 934289 - RNA, 22 nt, Human
cagagcuggguuugggaaaccu

SEQ ID NO: 934290 - RNA, 17 nt, Human
gcccaggaaggacggcc

SEQ ID NO: 934291 - RNA, 22 nt, Human
uacucugccacuaggaguucug

SEQ ID NO: 934292 - RNA, 22 nt, Human
gcagggcugggugggagacaga

SEQ ID NO: 934293 - RNA, 22 nt, Human
ugccucuguggaaauggugguc

SEQ ID NO: 934294 - RNA, 22 nt, Human
ccugggucacucaggcaggcgg

SEQ ID NO: 934295 - RNA, 22 nt, Human
ggaggccagggacccagucagc

SEQ ID NO: 934296 - RNA, 22 nt, Human
gggaaaggaucagugggaggcu

SEQ ID NO: 934297 - RNA, 22 nt, Human
aaauugugagcuauagaucuag

SEQ ID NO: 934298 - RNA, 23 nt, Human
auaaggcauaaagguacauugga

SEQ ID NO: 934299 - RNA, 22 nt, Human
aaaugaccagaauacaggcuuc

SEQ ID NO: 934300 - RNA, 22 nt, Human
aaugucugccugaacuuuauau

SEQ ID NO: 934301 - RNA, 22 nt, Human
uuuuaagaugcuaguauuucag

SEQ ID NO: 934302 - RNA, 20 nt, Human
cccagguaggugccaugagu

SEQ ID NO: 934303 - RNA, 22 nt, Human
gagauuggauuuaauggccaaa

SEQ ID NO: 934304 - RNA, 22 nt, Human
uuauccaaacuggugaaucauu

SEQ ID NO: 934305 - RNA, 22 nt, Human
ugcaugcagcuggugauaagaa

SEQ ID NO: 934306 - RNA, 22 nt, Human
cccuggaggcuggaggcaguag

SEQ ID NO: 934307 - RNA, 22 nt, Human
ugucccaguucccaggguugcu

SEQ ID NO: 934308 - RNA, 22 nt, Human
uaaguucaaugaacucaguucu

SEQ ID NO: 934309 - RNA, 22 nt, Human
ucuggcuccugaguccaugcuc

SEQ ID NO: 934310 - RNA, 22 nt, Human
accaggaggaaguguuaaugau

SEQ ID NO: 934311 - RNA, 22 nt, Human
gggaucagaaacauagcccuga

SEQ ID NO: 934312 - RNA, 22 nt, Human
aggagaggguggcauuaaguuu

SEQ ID NO: 934313 - RNA, 22 nt, Human
agucucuuauucccuauugcug

SEQ ID NO: 934314 - RNA, 22 nt, Human
ggccaaaucuguaaggcaagau

SEQ ID NO: 934315 - RNA, 22 nt, Human
ucaggagaaaauaucaggaagu

SEQ ID NO: 934316 - RNA, 22 nt, Human
cccuugcacauuugucuuuaau

SEQ ID NO: 934317 - RNA, 22 nt, Human
aggcagcagccacaaggccuga

SEQ ID NO: 934318 - RNA, 22 nt, Human
uggucaaauuuagucucuggaa

SEQ ID NO: 934319 - RNA, 22 nt, Human
uugacagcaaagauugugccua

SEQ ID NO: 934320 - RNA, 22 nt, Human
cagcaauaacucaaagccauuu

SEQ ID NO: 934321 - RNA, 22 nt, Human
agagugaucagauaucaggugu

SEQ ID NO: 934322 - RNA, 22 nt, Human
auguuuccgugagcauccuuga

SEQ ID NO: 934323 - RNA, 22 nt, Human
cauuugaugacucaacucauaa

SEQ ID NO: 934324 - RNA, 22 nt, Human
uuucaaauggagucgugaaaug

SEQ ID NO: 934325 - RNA, 22 nt, Human
uagucaaaccucagaauacccc

SEQ ID NO: 934326 - RNA, 22 nt, Human
ucacauucucagcaucuauaca

SEQ ID NO: 934327 - RNA, 22 nt, Human
agggccuggaacugugggcagg

SEQ ID NO: 934328 - RNA, 22 nt, Human
gcagggucuugagaggcagcca

SEQ ID NO: 934329 - RNA, 21 nt, Human
cucacaggaugcaguguuacu

SEQ ID NO: 934330 - RNA, 22 nt, Human
ggaaccaguggaaugauaugcu

SEQ ID NO: 934331 - RNA, 22 nt, Human
uagggcagaguccaggaugggc

SEQ ID NO: 934332 - RNA, 22 nt, Human
aggcugcugccuuggagagugu

SEQ ID NO: 934333 - RNA, 22 nt, Human
gccagagccacuuuugggugau

SEQ ID NO: 934334 - RNA, 21 nt, Human
gccugccugcgugacccucuu

SEQ ID NO: 934335 - RNA, 22 nt, Human
uccaugagagguaacuuuacaa

SEQ ID NO: 934336 - RNA, 22 nt, Human
guggugcauccuugaguaagcu

SEQ ID NO: 934337 - RNA, 22 nt, Human
ucagaaauguaagcugaugacu

SEQ ID NO: 934338 - RNA, 22 nt, Human
caaggaaacaugaaaugcauug

SEQ ID NO: 934339 - RNA, 22 nt, Human
cgcugccaggauccccugccgg

SEQ ID NO: 934340 - RNA, 22 nt, Human
ggacaagccugugaguggguuu

SEQ ID NO: 934341 - RNA, 22 nt, Human
guaauuuuuaguucauucuauc

SEQ ID NO: 934342 - RNA, 22 nt, Human
gaagccccaaacccucgccauc

SEQ ID NO: 934343 - RNA, 22 nt, Human
gaaugugugacucuauugagca

SEQ ID NO: 934344 - RNA, 20 nt, Human
ccuggagccuggaaggaguc

SEQ ID NO: 934345 - RNA, 17 nt, Human
aggcagcucagaacauc

SEQ ID NO: 934346 - RNA, 22 nt, Human
uugagcacaacucuuggagagc

SEQ ID NO: 934347 - RNA, 22 nt, Human
aacagaacccgagugugaaucu

SEQ ID NO: 934348 - RNA, 22 nt, Human
aagauguguccauucuuugcuc

SEQ ID NO: 934349 - RNA, 22 nt, Human
cagaggccauauuucuucacuc

SEQ ID NO: 934350 - RNA, 22 nt, Human
uauuuaauaaaacuauggcaug

SEQ ID NO: 934351 - RNA, 22 nt, Human
gggcaggaugcaguuucagaga

SEQ ID NO: 934352 - RNA, 22 nt, Human
ugcagaaguauuccaggcccca

SEQ ID NO: 934353 - RNA, 22 nt, Human
uuucuaaaauagauuuuauggu

SEQ ID NO: 934354 - RNA, 22 nt, Human
ccugaccuccaaguggcucugg

SEQ ID NO: 934355 - RNA, 22 nt, Human
ggcugcugugaccucaggugau

SEQ ID NO: 934356 - RNA, 22 nt, Human
guggguggaucaccugagguca

SEQ ID NO: 934357 - RNA, 22 nt, Human
gugauuucaaauauagagugag

SEQ ID NO: 934358 - RNA, 22 nt, Human
guuauguaucuugauugggugg

SEQ ID NO: 934359 - RNA, 22 nt, Human
uggcuucagacuucugcuacgu

SEQ ID NO: 934360 - RNA, 22 nt, Human
uggcagggugggcuucagcccc

SEQ ID NO: 934361 - RNA, 22 nt, Human
uacaguuuguuacauuguuagu

SEQ ID NO: 934362 - RNA, 22 nt, Human
uuagaaaacauaagugguaaag

SEQ ID NO: 934363 - RNA, 22 nt, Human
cagcuuugucugauuccucuuu

SEQ ID NO: 934364 - RNA, 22 nt, Human
ugaaggaagaauaggcaguguu

SEQ ID NO: 934365 - RNA, 23 nt, Human
uggcccugaaucuguccuggagg

SEQ ID NO: 934366 - RNA, 22 nt, Human
ggucccaguccucucccugcua

SEQ ID NO: 934367 - RNA, 22 nt, Human
ccugggcaggaugggcccggug

SEQ ID NO: 934368 - RNA, 22 nt, Human
ccuuucucuggcagcaggacag

SEQ ID NO: 934369 - RNA, 22 nt, Human
auaugaagucagacaaacuggg

SEQ ID NO: 934370 - RNA, 19 nt, Human
cccagagcauccugaacuu

SEQ ID NO: 934371 - RNA, 20 nt, Human
uuaggcauuuggauuggcuu

SEQ ID NO: 934372 - RNA, 22 nt, Human
caggccucaggggcucaggcug

SEQ ID NO: 934373 - RNA, 22 nt, Human
aaugauguauguauaaggcagg

SEQ ID NO: 934374 - RNA, 22 nt, Human
aagcaucucuauguggagagug

SEQ ID NO: 934375 - RNA, 22 nt, Human
ccuuuuaugaacuugagcaggu

SEQ ID NO: 934376 - RNA, 22 nt, Human
uggcucuguuuguuaacuagac

SEQ ID NO: 934377 - RNA, 20 nt, Human
cuguccccgaggucaccagg

SEQ ID NO: 934378 - RNA, 22 nt, Human
ucccaggaaggauucggcauuu

SEQ ID NO: 934379 - RNA, 17 nt, Human
ccucccacaccgcccug

SEQ ID NO: 934380 - RNA, 22 nt, Human
cacagggcagguacucucagag

SEQ ID NO: 934381 - RNA, 22 nt, Human
aaaguguaaaagcauguuaggg

SEQ ID NO: 934382 - RNA, 22 nt, Human
auccagggauaaaaguaagguu

SEQ ID NO: 934383 - RNA, 22 nt, Human
acaggggauugauuggaagucu

SEQ ID NO: 934384 - RNA, 20 nt, Human
gucaggauuaguaaacucug

SEQ ID NO: 934385 - RNA, 22 nt, Human
cugcuguggguuaagacacugu

SEQ ID NO: 934386 - RNA, 22 nt, Human
agggucuguggaugcaucuggg

SEQ ID NO: 934387 - RNA, 22 nt, Human
auuuccuaggguagaugucaca

SEQ ID NO: 934388 - RNA, 22 nt, Human
cuuagaaaucgaacucagguua

SEQ ID NO: 934389 - RNA, 22 nt, Human
cagcucugugggagcguaugug

SEQ ID NO: 934390 - RNA, 22 nt, Human
uccugugccuccaccugcuccg

SEQ ID NO: 934391 - RNA, 22 nt, Human
ccugccugcaaaaugggacaag

SEQ ID NO: 934392 - RNA, 22 nt, Human
gucaccagucccagcuccugaa

SEQ ID NO: 934393 - RNA, 22 nt, Human
agagccugcuguguaagucaca

SEQ ID NO: 934394 - RNA, 22 nt, Human
gaggcaugucuggccuguccca

SEQ ID NO: 934395 - RNA, 22 nt, Human
ggaagagggaaccacgacugua

SEQ ID NO: 934396 - RNA, 22 nt, Human
aagauaugaggucaccugcugg

SEQ ID NO: 934397 - RNA, 22 nt, Human
guuuauuauucaacuucauguu

SEQ ID NO: 934398 - RNA, 22 nt, Human
uggcccucagucuugcuccugc

SEQ ID NO: 934399 - RNA, 22 nt, Human
gcuggcagcuggaaguugggcu

SEQ ID NO: 934400 - RNA, 22 nt, Human
gcuuccucgcugggcagaggca

SEQ ID NO: 934401 - RNA, 22 nt, Human
ucuucauuuuauagcaucugug

SEQ ID NO: 934402 - RNA, 22 nt, Human
gccccagguugccugucccagg

SEQ ID NO: 934403 - RNA, 22 nt, Human
aaggacagaaacagauugcugg

SEQ ID NO: 934404 - RNA, 22 nt, Human
uauuuucuguggaggaccagau

SEQ ID NO: 934405 - RNA, 22 nt, Human
aagcagaguccccuucccaugg

SEQ ID NO: 934406 - RNA, 22 nt, Human
ugggcugcccaagguggccaug

SEQ ID NO: 934407 - RNA, 23 nt, Human
acacaaggguaacugccagccau

SEQ ID NO: 934408 - RNA, 22 nt, Human
ccugggagcuguggaaaggcug

SEQ ID NO: 934409 - RNA, 22 nt, Human
gcaggaugaaggcagaggcuga

SEQ ID NO: 934410 - RNA, 20 nt, Human
cucaggauacugcaaaguug

SEQ ID NO: 934411 - RNA, 22 nt, Human
gggugaggagcugccagucaug

SEQ ID NO: 934412 - RNA, 22 nt, Human
aaacagucaugguugcuguuca

SEQ ID NO: 934413 - RNA, 22 nt, Human
uuucacaaguuucaggauucug

SEQ ID NO: 934414 - RNA, 20 nt, Human
caccaggcgcucugagaaca

SEQ ID NO: 934415 - RNA, 22 nt, Human
cucuucuuauggccguggcuga

SEQ ID NO: 934416 - RNA, 22 nt, Human
gcccauggcagaacugugagca

SEQ ID NO: 934417 - RNA, 22 nt, Human
ggagagagaugccgccuugcuc

SEQ ID NO: 934418 - RNA, 22 nt, Human
acaaacagcuaacauauguuaa

SEQ ID NO: 934419 - RNA, 22 nt, Human
ugccuggauucgguuguuguca

SEQ ID NO: 934420 - RNA, 22 nt, Human
gcucccagcaauugaggcagcc

SEQ ID NO: 934421 - RNA, 22 nt, Human
uauuucugauugcucaugaggc

SEQ ID NO: 934422 - RNA, 22 nt, Human
gugaccaucagagaauaacaaa

SEQ ID NO: 934423 - RNA, 18 nt, Human
aggcaggcuggagugacu

SEQ ID NO: 934424 - RNA, 22 nt, Human
uggcagcagcuaacuuaggcag

SEQ ID NO: 934425 - RNA, 22 nt, Human
ucgugcuccuggugaggcucug

SEQ ID NO: 934426 - RNA, 22 nt, Human
guaagcaucugucucuucugca

SEQ ID NO: 934427 - RNA, 22 nt, Human
ucagagaugcagugccaccuac

SEQ ID NO: 934428 - RNA, 22 nt, Human
ugagcccaggaguuggagaccg

SEQ ID NO: 934429 - RNA, 22 nt, Human
ggccugagcagacagcaugaug

SEQ ID NO: 934430 - RNA, 22 nt, Human
ucaggaugagcucauaacuaug

SEQ ID NO: 934431 - RNA, 22 nt, Human
uuugcaaagugacuauuauaug

SEQ ID NO: 934432 - RNA, 22 nt, Human
gagagcugucagcguagcaccg

SEQ ID NO: 934433 - RNA, 22 nt, Human
cagcccugcacgcugccuccgc

SEQ ID NO: 934434 - RNA, 22 nt, Human
gacacagagauaggccuguguu

SEQ ID NO: 934435 - RNA, 22 nt, Human
cagcagaggaaagcaaaucuaa

SEQ ID NO: 934436 - RNA, 22 nt, Human
uuuaaucaggcaaagcauaaua

SEQ ID NO: 934437 - RNA, 20 nt, Human
uaagaacaagacuaggaagc

SEQ ID NO: 934438 - RNA, 22 nt, Human
agcaugcacaugacuggcuuaa

SEQ ID NO: 934439 - RNA, 22 nt, Human
uccaggaggacugagggggcug

SEQ ID NO: 934440 - RNA, 22 nt, Human
cccugccucugaagcugcucag

SEQ ID NO: 934441 - RNA, 22 nt, Human
aauguauuccucaugcaagagu

SEQ ID NO: 934442 - RNA, 22 nt, Human
aagcagaaaaacugagcuccaa

SEQ ID NO: 934443 - RNA, 22 nt, Human
uccuucagggcugaccacaggc

SEQ ID NO: 934444 - RNA, 22 nt, Human
cugcugugcauauuuaucuagg

SEQ ID NO: 934445 - RNA, 22 nt, Human
gauuucuuugcaagcuguguuc

SEQ ID NO: 934446 - RNA, 22 nt, Human
cucaggauucucgacacucaca

SEQ ID NO: 934447 - RNA, 22 nt, Human
gagggugguggcuuaaggugcu

SEQ ID NO: 934448 - RNA, 22 nt, Human
gcaagcugcuuaagcucauugu

SEQ ID NO: 934449 - RNA, 22 nt, Human
augaguaagaccauaauuuuug

SEQ ID NO: 934450 - RNA, 22 nt, Human
cuacccaggcuggagugcagua

SEQ ID NO: 934451 - RNA, 22 nt, Human
cagaggcaggauaagaacugcg

SEQ ID NO: 934452 - RNA, 22 nt, Human
cuggccugugggcugucuccgg

SEQ ID NO: 934453 - RNA, 16 nt, Human
gcccaggacgggaggc

SEQ ID NO: 934454 - RNA, 22 nt, Human
ugcucucucaggccuggcccac

SEQ ID NO: 934455 - RNA, 22 nt, Human
gccccagcucugccacaacuag

SEQ ID NO: 934456 - RNA, 23 nt, Human
uggcucugagcuuccugguggcc

SEQ ID NO: 934457 - RNA, 22 nt, Human
aucauucugauggucaaugcua

SEQ ID NO: 934458 - RNA, 22 nt, Human
ucccagagacagagccuccucc

SEQ ID NO: 934459 - RNA, 22 nt, Human
uacuuuguggagauuaaaaaua

SEQ ID NO: 934460 - RNA, 22 nt, Human
acuggccagguucaaaauacag

SEQ ID NO: 934461 - RNA, 23 nt, Human
aagcugccagucugaagccuggg

SEQ ID NO: 934462 - RNA, 22 nt, Human
caaggagaaaacggcuucugaa

SEQ ID NO: 934463 - RNA, 22 nt, Human
guaacaaaguuucuaggugcug

SEQ ID NO: 934464 - RNA, 19 nt, Human
ucuguucacauuguuucgc

SEQ ID NO: 934465 - RNA, 22 nt, Human
agggccuggugaccuggguccu

SEQ ID NO: 934466 - RNA, 22 nt, Human
caaaagcaguucuaucugaguu

SEQ ID NO: 934467 - RNA, 20 nt, Human
aguaccuuuuguauguuacc

SEQ ID NO: 934468 - RNA, 22 nt, Human
ucauuucuauugcuacugucug

SEQ ID NO: 934469 - RNA, 22 nt, Human
aacaaguaaguuuauauauauu

SEQ ID NO: 934470 - RNA, 22 nt, Human
aauguggaaucauggacuuuau

SEQ ID NO: 934471 - RNA, 22 nt, Human
cuuuauauccagauguuuggug

SEQ ID NO: 934472 - RNA, 22 nt, Human
gggacaggcugagacuugagcu

SEQ ID NO: 934473 - RNA, 22 nt, Human
cuccugggcucauaucauucag

SEQ ID NO: 934474 - RNA, 22 nt, Human
auaaggcauauagucacuuuuu

SEQ ID NO: 934475 - RNA, 22 nt, Human
gccugccugcugugugcaaguu

SEQ ID NO: 934476 - RNA, 22 nt, Human
agccaaggagugcagguggcuu

SEQ ID NO: 934477 - RNA, 22 nt, Human
uccuucaaagcuccuagugagc

SEQ ID NO: 934478 - RNA, 22 nt, Human
aaguucaagcucugccuaaaau

SEQ ID NO: 934479 - RNA, 19 nt, Human
gcugggagcagacccuccc

SEQ ID NO: 934480 - RNA, 22 nt, Human
ccugcucugguuuagucagucu

SEQ ID NO: 934481 - RNA, 22 nt, Human
ugcauuuguuaccuuauugcag

SEQ ID NO: 934482 - RNA, 22 nt, Human
gcucuggaagcaucugagagga

SEQ ID NO: 934483 - RNA, 22 nt, Human
aaugcacagcguuccaugcuug

SEQ ID NO: 934484 - RNA, 19 nt, Human
aguagcagaaagugcagug

SEQ ID NO: 934485 - RNA, 19 nt, Human
gcucagcagacccagugcu

SEQ ID NO: 934486 - RNA, 22 nt, Human
caaggagauaaaauguugagcu

SEQ ID NO: 934487 - RNA, 22 nt, Human
gagcucaggagcaucagaagaa

SEQ ID NO: 934488 - RNA, 22 nt, Human
ucuuuccuguaacugcuguuca

SEQ ID NO: 934489 - RNA, 22 nt, Human
uagacagauuuaaaggaaugga

SEQ ID NO: 934490 - RNA, 22 nt, Human
gauuuucaugauaaacuuguga

SEQ ID NO: 934491 - RNA, 22 nt, Human
uaaaugcuaucgcauaaaaccu

SEQ ID NO: 934492 - RNA, 22 nt, Human
ucagggaaauuuccauguguuu

SEQ ID NO: 934493 - RNA, 22 nt, Human
gaggcacuggaggaaaggagaa

SEQ ID NO: 934494 - RNA, 22 nt, Human
cucuggacacuggcaugggguc

SEQ ID NO: 934495 - RNA, 22 nt, Human
ccugggagugcacagguuucgu

SEQ ID NO: 934496 - RNA, 20 nt, Human
caguagcaauaauuagaagc

SEQ ID NO: 934497 - RNA, 22 nt, Human
augucacauggucaccucuagc

SEQ ID NO: 934498 - RNA, 22 nt, Human
gauuucaagcccccagagauuc

SEQ ID NO: 934499 - RNA, 22 nt, Human
ccuggagccccucuggccagcc

SEQ ID NO: 934500 - RNA, 22 nt, Human
cccagccucuguuugcuccucu

SEQ ID NO: 934501 - RNA, 22 nt, Human
cucaggaaaggccaugcaaggg

SEQ ID NO: 934502 - RNA, 22 nt, Human
gagucacaaagccuuucuuauu

SEQ ID NO: 934503 - RNA, 22 nt, Human
ucauccaguaccauggaaggca

SEQ ID NO: 934504 - RNA, 22 nt, Human
ugucucugccagcuagcagaau

SEQ ID NO: 934505 - RNA, 22 nt, Human
agaggcaggaagagcugauuuu

SEQ ID NO: 934506 - RNA, 22 nt, Human
caugcuuucuguccaaauguua

SEQ ID NO: 934507 - RNA, 22 nt, Human
ccuggcaggccccuccuggauu

SEQ ID NO: 934508 - RNA, 22 nt, Human
gccuggaguuguggugaagcca

SEQ ID NO: 934509 - RNA, 22 nt, Human
gagugguaggcaguguuaggaa

SEQ ID NO: 934510 - RNA, 20 nt, Human
aggcagcuggccaggcaggu

SEQ ID NO: 934511 - RNA, 22 nt, Human
uuccaggggcagcagugauggu

SEQ ID NO: 934512 - RNA, 22 nt, Human
cagaaauguacugacaugcagu

SEQ ID NO: 934513 - RNA, 22 nt, Human
ugcuugggaauguggagucaga

SEQ ID NO: 934514 - RNA, 22 nt, Human
cagaaauguucuaaugauucag

SEQ ID NO: 934515 - RNA, 22 nt, Human
uugcuuuguggugguucuucca

SEQ ID NO: 934516 - RNA, 22 nt, Human
gccuggaggggccaggguggua

SEQ ID NO: 934517 - RNA, 22 nt, Human
gugauacaaauaaacauaugcu

SEQ ID NO: 934518 - RNA, 22 nt, Human
uggcccugaggacccagugugg

SEQ ID NO: 934519 - RNA, 22 nt, Human
guuugucuuaauuaggcaucga

SEQ ID NO: 934520 - RNA, 22 nt, Human
cccuggcaaaacacucucuuga

SEQ ID NO: 934521 - RNA, 22 nt, Human
cucagaauuacaucccauuuua

SEQ ID NO: 934522 - RNA, 22 nt, Human
aauacaaucaaauucacuagca

SEQ ID NO: 934523 - RNA, 22 nt, Human
ccagccaguccagcauuggugu

SEQ ID NO: 934524 - RNA, 22 nt, Human
cagugggugaugaguccugggg

SEQ ID NO: 934525 - RNA, 22 nt, Human
gaggccagcgcgcagcacuuuu

SEQ ID NO: 934526 - RNA, 22 nt, Human
ugcuucucccaaccagggccug

SEQ ID NO: 934527 - RNA, 22 nt, Human
gcagcugggccccagccucucc

SEQ ID NO: 934528 - RNA, 22 nt, Human
aucuuguuauaagagauaaugg

SEQ ID NO: 934529 - RNA, 22 nt, Human
cucuucuugucucugguuagaa

SEQ ID NO: 934530 - RNA, 22 nt, Human
cccaggucugugccagcucuga

SEQ ID NO: 934531 - RNA, 22 nt, Human
uguaaauaaugcauguaaauca

SEQ ID NO: 934532 - RNA, 22 nt, Human
ggcucuggagacauguggagag

SEQ ID NO: 934533 - RNA, 22 nt, Human
ucucuucuaacacuagaaauuc

SEQ ID NO: 934534 - RNA, 22 nt, Human
ccucuggcuguaccacuggcac

SEQ ID NO: 934535 - RNA, 22 nt, Human
aaaggucaagcuggacucaggu

SEQ ID NO: 934536 - RNA, 22 nt, Human
ggugaggggagagugaaagaaa

SEQ ID NO: 934537 - RNA, 22 nt, Human
uccaaagggaagcgcuuucugu

SEQ ID NO: 934538 - RNA, 22 nt, Human
gcuguucagggcacucaugggc

SEQ ID NO: 934539 - RNA, 20 nt, Human
ccucaguguccuggacuggg

SEQ ID NO: 934540 - RNA, 22 nt, Human
ggggcagagcauagcuccaauu

SEQ ID NO: 934541 - RNA, 22 nt, Human
ucauugcaagcucauuuaucug

SEQ ID NO: 934542 - RNA, 21 nt, Human
gugguucuagagaaacagaau

SEQ ID NO: 934543 - RNA, 22 nt, Human
gaugccuccaaaugagggcaga

SEQ ID NO: 934544 - RNA, 22 nt, Human
uaagaacaguagaacaguaggu

SEQ ID NO: 934545 - RNA, 22 nt, Human
auuuggcaaauaauuugagggu

SEQ ID NO: 934546 - RNA, 22 nt, Human
cagccaucaguaaagacagcuu

SEQ ID NO: 934547 - RNA, 22 nt, Human
ccaggccugauugggaaucuug

SEQ ID NO: 934548 - RNA, 22 nt, Human
gagcgauguggguauguagaag

SEQ ID NO: 934549 - RNA, 21 nt, Human
cagggcacacagaggauggua

SEQ ID NO: 934550 - RNA, 22 nt, Human
uugagucaguaauuccauuucu

SEQ ID NO: 934551 - RNA, 22 nt, Human
gcugagucuugagcacugagca

SEQ ID NO: 934552 - RNA, 22 nt, Human
gcggagggcgagcccgcggagc

SEQ ID NO: 934553 - RNA, 22 nt, Human
auuuauuaugggauuuggcaca

SEQ ID NO: 934554 - RNA, 22 nt, Human
aaaaaucuaugacugcuucucc

SEQ ID NO: 934555 - RNA, 22 nt, Human
uuauuccauuauuucacuuagg

SEQ ID NO: 934556 - RNA, 22 nt, Human
uuuuuccuaagcaguggagcug

SEQ ID NO: 934557 - RNA, 22 nt, Human
agggaagaaaauccaucgcugc

SEQ ID NO: 934558 - RNA, 22 nt, Human
ucuuugcaggccaaauuguuaa

SEQ ID NO: 934559 - RNA, 22 nt, Human
uugcaccauuucacuuccauua

SEQ ID NO: 934560 - RNA, 22 nt, Human
auugaaagauaggcuacugugg

SEQ ID NO: 934561 - RNA, 22 nt, Human
agccagcuggagaccacuguuu

SEQ ID NO: 934562 - RNA, 22 nt, Human
aggcacugugcuucuuauaugu

SEQ ID NO: 934563 - RNA, 22 nt, Human
ucagcugcucaaauuuauguca

SEQ ID NO: 934564 - RNA, 22 nt, Human
agacaucagcuugugugcaggg

SEQ ID NO: 934565 - RNA, 22 nt, Human
ucuuggcaauuugaucucaguu

SEQ ID NO: 934566 - RNA, 22 nt, Human
ccagggccucguguucugagug

SEQ ID NO: 934567 - RNA, 23 nt, Human
aaacuugcuauggcugaaaucau

SEQ ID NO: 934568 - RNA, 22 nt, Human
agcuucuugggcuuuacacaaa

SEQ ID NO: 934569 - RNA, 22 nt, Human
agaggggaaggaugugauguga

SEQ ID NO: 934570 - RNA, 22 nt, Human
uggcacugggacagaugcucuc

SEQ ID NO: 934571 - RNA, 22 nt, Human
ucccaggcuaggccucugcguu

SEQ ID NO: 934572 - RNA, 22 nt, Human
ugcagggcuaagucagagccug

SEQ ID NO: 934573 - RNA, 22 nt, Human
ggccucugaggacagccuuggc

SEQ ID NO: 934574 - RNA, 22 nt, Human
gcuggccugaccagccacaggc

SEQ ID NO: 934575 - RNA, 22 nt, Human
gagggaggcaucaugaauccag

SEQ ID NO: 934576 - RNA, 23 nt, Human
ccagcuccgugagccucgggcuc

SEQ ID NO: 934577 - RNA, 22 nt, Human
cuggcaggcggcagagcccagg

SEQ ID NO: 934578 - RNA, 19 nt, Human
agcagagcccugaagaucc

SEQ ID NO: 934579 - RNA, 22 nt, Human
gcuucccacagcuggacugggg

SEQ ID NO: 934580 - RNA, 22 nt, Human
ucagagcuuuggagaccaggaa

SEQ ID NO: 934581 - RNA, 22 nt, Human
aacaucuuguccuuagauuaaa

SEQ ID NO: 934582 - RNA, 22 nt, Human
gugucccacucuggaggugaag

SEQ ID NO: 934583 - RNA, 22 nt, Human
auguaaggcugccuaugacacu

SEQ ID NO: 934584 - RNA, 22 nt, Human
uuguaacagcugcuuaauagag

SEQ ID NO: 934585 - RNA, 22 nt, Human
gggaguggguuuggccuaggcc

SEQ ID NO: 934586 - RNA, 22 nt, Human
aaagauguuuuauaaguuaugg

SEQ ID NO: 934587 - RNA, 22 nt, Human
ugaagcaguuacuggguguuaa

SEQ ID NO: 934588 - RNA, 22 nt, Human
cuggaugcuuccucucugcuag

SEQ ID NO: 934589 - RNA, 22 nt, Human
uuuaucuuuaggacuuugcaga

SEQ ID NO: 934590 - RNA, 22 nt, Human
cagaaugagauaacccagauug

SEQ ID NO: 934591 - RNA, 22 nt, Human
agcugguaugaacaggauagga

SEQ ID NO: 934592 - RNA, 22 nt, Human
uccuggagggaggcggugcuac

SEQ ID NO: 934593 - RNA, 20 nt, Human
ucauuucuugggguuccaag

SEQ ID NO: 934594 - RNA, 22 nt, Human
gcaggggcaggagaucucaggc

SEQ ID NO: 934595 - RNA, 22 nt, Human
cucaggcacgggucagugagcg

SEQ ID NO: 934596 - RNA, 22 nt, Human
uggcuucugcuuucaguggagg

SEQ ID NO: 934597 - RNA, 22 nt, Human
augcuguggccagaguucaacu

SEQ ID NO: 934598 - RNA, 22 nt, Human
caaauguaaauucuuuugaagc

SEQ ID NO: 934599 - RNA, 19 nt, Human
acaggcagaauugggugug

SEQ ID NO: 934600 - RNA, 22 nt, Human
aggcugggaagguaaaguugua

SEQ ID NO: 934601 - RNA, 22 nt, Human
gggccaugagagguucaucaac

SEQ ID NO: 934602 - RNA, 19 nt, Human
uguuuuguuaaagcagucc

SEQ ID NO: 934603 - RNA, 22 nt, Human
ugccagcccaccuuggggccuc

SEQ ID NO: 934604 - RNA, 22 nt, Human
ucagcuuggacagcuugguuga

SEQ ID NO: 934605 - RNA, 22 nt, Human
guguggcugugggagauguuca

SEQ ID NO: 934606 - RNA, 22 nt, Human
auacaucuaugccuuucugaca

SEQ ID NO: 934607 - RNA, 22 nt, Human
aagagagggguugcauggaaau

SEQ ID NO: 934608 - RNA, 23 nt, Human
cuccucguaacucuguggugggu

SEQ ID NO: 934609 - RNA, 23 nt, Human
uuuauauuccuaaugucuugagc

SEQ ID NO: 934610 - RNA, 22 nt, Human
uggagacugugcuaagggaguu

SEQ ID NO: 934611 - RNA, 22 nt, Human
acuccagggcugaacgaggccc

SEQ ID NO: 934612 - RNA, 22 nt, Human
ccuggcugggccugauuucuca

SEQ ID NO: 934613 - RNA, 22 nt, Human
auauguguacgugcaguauaua

SEQ ID NO: 934614 - RNA, 22 nt, Human
ugggccuggcccuguggaggag

SEQ ID NO: 934615 - RNA, 22 nt, Human
ggaggccacgguuuagcaccga

SEQ ID NO: 934616 - RNA, 22 nt, Human
caggggaagaugccaagggaga

SEQ ID NO: 934617 - RNA, 22 nt, Human
gcuggccaaaguguaccuggag

SEQ ID NO: 934618 - RNA, 22 nt, Human
uaggagcuaaaauauuuuauau

SEQ ID NO: 934619 - RNA, 20 nt, Human
gaugggaaucggagcuggua

SEQ ID NO: 934620 - RNA, 22 nt, Human
cagcgucucguugugggccucg

SEQ ID NO: 934621 - RNA, 22 nt, Human
uucucagauccaucagaagucc

SEQ ID NO: 934622 - RNA, 22 nt, Human
cccaagcagggugcagaggcau

SEQ ID NO: 934623 - RNA, 22 nt, Human
uucaauucuaaacuaauauucu

SEQ ID NO: 934624 - RNA, 22 nt, Human
gcuuccuaaaugcacagggcag

SEQ ID NO: 934625 - RNA, 22 nt, Human
ugaaagcucugucaucauuccu

SEQ ID NO: 934626 - RNA, 22 nt, Human
ugugugucagagucuccauggu

SEQ ID NO: 934627 - RNA, 22 nt, Human
uguggccucaaggcugcccuca

SEQ ID NO: 934628 - RNA, 21 nt, Human
ccaggcagagcugugaguucu

SEQ ID NO: 934629 - RNA, 22 nt, Human
ggcuguggggccggguacagug

SEQ ID NO: 934630 - RNA, 22 nt, Human
uguacacugcaggaugcauugc

SEQ ID NO: 934631 - RNA, 21 nt, Human
gacaggacuagaccagagcuc

SEQ ID NO: 934632 - RNA, 22 nt, Human
agcuggccuccgggugccuggg

SEQ ID NO: 934633 - RNA, 22 nt, Human
ucugggagguacugggaggugu

SEQ ID NO: 934634 - RNA, 22 nt, Human
acagccauagaugcuuauguaa

SEQ ID NO: 934635 - RNA, 22 nt, Human
gacauacagcauggucuaugaa

SEQ ID NO: 934636 - RNA, 22 nt, Human
uguagcacagagcuuugacacu

SEQ ID NO: 934637 - RNA, 22 nt, Human
ccugccugucccucaguccaca

SEQ ID NO: 934638 - RNA, 22 nt, Human
aacucugcagugacuuauaaag

SEQ ID NO: 934639 - RNA, 22 nt, Human
ccagggcagcgccccuccacgc

SEQ ID NO: 934640 - RNA, 22 nt, Human
ccagcccuguaaggaugaggca

SEQ ID NO: 934641 - RNA, 22 nt, Human
cuggcacacaaguauuuccuuu

SEQ ID NO: 934642 - RNA, 19 nt, Human
uggccagguacugucugcu

SEQ ID NO: 934643 - RNA, 22 nt, Human
guuagaaagugucugcuugggu

SEQ ID NO: 934644 - RNA, 22 nt, Human
ccuguucaagguauuaauuauc

SEQ ID NO: 934645 - RNA, 22 nt, Human
gccuucaggaaaucaguccuug

SEQ ID NO: 934646 - RNA, 22 nt, Human
ucugccugaaauucacauguaa

SEQ ID NO: 934647 - RNA, 22 nt, Human
uuuagaaauucaucuauggccu

SEQ ID NO: 934648 - RNA, 22 nt, Human
gagcaccucaauuugcuauuug

SEQ ID NO: 934649 - RNA, 19 nt, Human
uacuuuuucaggacagagu

SEQ ID NO: 934650 - RNA, 22 nt, Human
cccagccucugggcucacccaa

SEQ ID NO: 934651 - RNA, 22 nt, Human
ugaaagggguugaguuacagcu

SEQ ID NO: 934652 - RNA, 22 nt, Human
aucuaagaguuaacaucaagaa

SEQ ID NO: 934653 - RNA, 22 nt, Human
ucucugguggcuccaucaguag

SEQ ID NO: 934654 - RNA, 21 nt, Human
gcucagaguauugcacuguuu

SEQ ID NO: 934655 - RNA, 18 nt, Human
ggcugugcguggaggcug

SEQ ID NO: 934656 - RNA, 22 nt, Human
aaaucucaauuugaauuguagc

SEQ ID NO: 934657 - RNA, 22 nt, Human
uuagugauaggaagccagauug

SEQ ID NO: 934658 - RNA, 22 nt, Human
auucuuggagcagucaaagaag

SEQ ID NO: 934659 - RNA, 18 nt, Human
gaggcagcuagcaauuuu

SEQ ID NO: 934660 - RNA, 22 nt, Human
ucccugggcaucacguugcuuc

SEQ ID NO: 934661 - RNA, 22 nt, Human
agaggcagccguauuucaaagg

SEQ ID NO: 934662 - RNA, 22 nt, Human
uagaauguaaauuccaagggca

SEQ ID NO: 934663 - RNA, 22 nt, Human
uagccucuggaauccuuucucu

SEQ ID NO: 934664 - RNA, 19 nt, Human
aggcugugagggaggacuc

SEQ ID NO: 934665 - RNA, 22 nt, Human
ggcugcuguacugaugucaguu

SEQ ID NO: 934666 - RNA, 22 nt, Human
caaggcaggaagccugucuuau

SEQ ID NO: 934667 - RNA, 22 nt, Human
uaaguuuaaauguacaugaagc

SEQ ID NO: 934668 - RNA, 22 nt, Human
ugcauauuguccuugauauuau

SEQ ID NO: 934669 - RNA, 22 nt, Human
caaagaugcugauguuggauca

SEQ ID NO: 934670 - RNA, 22 nt, Human
cagguggggcagcugugggagc

SEQ ID NO: 934671 - RNA, 22 nt, Human
gcuguucacggaggaggauggg

SEQ ID NO: 934672 - RNA, 22 nt, Human
gcugugcuugggaagaaucucu

SEQ ID NO: 934673 - RNA, 22 nt, Human
uguguauagguugugcuaauag

SEQ ID NO: 934674 - RNA, 22 nt, Human
aggcacugggggaugagcaagg

SEQ ID NO: 934675 - RNA, 22 nt, Human
uguacauugucacucaucaagu

SEQ ID NO: 934676 - RNA, 22 nt, Human
augggaggcaggcucagaaccg

SEQ ID NO: 934677 - RNA, 22 nt, Human
agcagugggugacagagcugag

SEQ ID NO: 934678 - RNA, 22 nt, Human
cuggcgcaacagaaaaucugga

SEQ ID NO: 934679 - RNA, 22 nt, Human
ggaggccaggaaggcucggaga

SEQ ID NO: 934680 - RNA, 19 nt, Human
ucauaaggagagaggaaau

SEQ ID NO: 934681 - RNA, 22 nt, Human
caauaugcaagcuauuaaguau

SEQ ID NO: 934682 - RNA, 22 nt, Human
uguagaaagaauauguuucaua

SEQ ID NO: 934683 - RNA, 22 nt, Human
acagcuggaggucugugagcac

SEQ ID NO: 934684 - RNA, 22 nt, Human
aagaacaacugcuuuaaaagca

SEQ ID NO: 934685 - RNA, 21 nt, Human
uucuccccagcgaauccucgg

SEQ ID NO: 934686 - RNA, 22 nt, Human
agcugucuaccugcagaguccu

SEQ ID NO: 934687 - RNA, 22 nt, Human
gucuccugagacugcagucacc

SEQ ID NO: 934688 - RNA, 22 nt, Human
uuagcucagaaaauuuaaacuu

SEQ ID NO: 934689 - RNA, 22 nt, Human
aaggcagccuuuugaguugauu

SEQ ID NO: 934690 - RNA, 22 nt, Human
auguuguagcauaugaaauaua

SEQ ID NO: 934691 - RNA, 22 nt, Human
accugccuaguugguucugccc

SEQ ID NO: 934692 - RNA, 17 nt, Human
agaaagaggauccacag

SEQ ID NO: 934693 - RNA, 22 nt, Human
acuuugcagagccagaagagaa

SEQ ID NO: 934694 - RNA, 22 nt, Human
gaaaggccagcucacagaugag

SEQ ID NO: 934695 - RNA, 22 nt, Human
gaggagcuugugagaagauguc

SEQ ID NO: 934696 - RNA, 22 nt, Human
uucuguuuuagaaauaaguagu

SEQ ID NO: 934697 - RNA, 22 nt, Human
uaaggcacccgugagcugccag

SEQ ID NO: 934698 - RNA, 22 nt, Human
ggauggagaugaccauggugac

SEQ ID NO: 934699 - RNA, 22 nt, Human
ccuggccuccuggccuucucau

SEQ ID NO: 934700 - RNA, 22 nt, Human
ggugaggcagguggcugcugag

SEQ ID NO: 934701 - RNA, 22 nt, Human
cagcugccugcaacacaagcuu

SEQ ID NO: 934702 - RNA, 22 nt, Human
agcagggggaguuagacuagau

SEQ ID NO: 934703 - RNA, 22 nt, Human
gucuucuuguuuugaaggaaau

SEQ ID NO: 934704 - RNA, 22 nt, Human
uuccauaaugagauucccagcc

SEQ ID NO: 934705 - RNA, 22 nt, Human
ccacucugauuuuggcuccacu

SEQ ID NO: 934706 - RNA, 20 nt, Human
uugauucaagggcugaugga

SEQ ID NO: 934707 - RNA, 22 nt, Human
aggcacuggucuaccccuuagu

SEQ ID NO: 934708 - RNA, 22 nt, Human
cuucuggaggacacuggcccca

SEQ ID NO: 934709 - RNA, 17 nt, Human
gauuuccugaaguucuu

SEQ ID NO: 934710 - RNA, 22 nt, Human
uaugcacauucacacaaaaaug

SEQ ID NO: 934711 - RNA, 22 nt, Human
guguugacucuuggacuucaag

SEQ ID NO: 934712 - RNA, 22 nt, Human
uuucuguagggauuucacaguu

SEQ ID NO: 934713 - RNA, 22 nt, Human
ugcagaagugagucaugaggaa

SEQ ID NO: 934714 - RNA, 22 nt, Human
cuccugagcucugaggaagcuu

SEQ ID NO: 934715 - RNA, 22 nt, Human
cuggacagaaagggcugcugug

SEQ ID NO: 934716 - RNA, 22 nt, Human
uggaggcauuuuagguugucac

SEQ ID NO: 934717 - RNA, 22 nt, Human
uggcagugccccuugaccagug

SEQ ID NO: 934718 - RNA, 22 nt, Human
aaaguuugaaugauauauuagu

SEQ ID NO: 934719 - RNA, 18 nt, Human
cccucuccugcuaguggg

SEQ ID NO: 934720 - RNA, 22 nt, Human
guucacaaaauucuggccagug

SEQ ID NO: 934721 - RNA, 22 nt, Human
gcagggaccugccacugcuguc

SEQ ID NO: 934722 - RNA, 22 nt, Human
aagcgccaugguuccugcgcag

SEQ ID NO: 934723 - RNA, 22 nt, Human
gagccaggucgggccgcggcga

SEQ ID NO: 934724 - RNA, 22 nt, Human
ucauugcaguugaguuguguua

SEQ ID NO: 934725 - RNA, 22 nt, Human
aaaguuugagugauuugacaca

SEQ ID NO: 934726 - RNA, 22 nt, Human
ucccagccugacagugcaucaa

SEQ ID NO: 934727 - RNA, 22 nt, Human
acauuucuuuucaucucuauau

SEQ ID NO: 934728 - RNA, 22 nt, Human
uccucugcucagcauuccucac

SEQ ID NO: 934729 - RNA, 22 nt, Human
ucagggcaggacaguguaggcc

SEQ ID NO: 934730 - RNA, 22 nt, Human
aaauugugcucacacugauauu

SEQ ID NO: 934731 - RNA, 22 nt, Human
aagaacauucgaacuauuuucu

SEQ ID NO: 934732 - RNA, 22 nt, Human
cuuaggaugaguuuuugcguuu

SEQ ID NO: 934733 - RNA, 22 nt, Human
uuccaugaaagugaaauggagc

SEQ ID NO: 934734 - RNA, 22 nt, Human
uacauaguauucacauuguuuu

SEQ ID NO: 934735 - RNA, 22 nt, Human
ccugucacgaugacugcacucu

SEQ ID NO: 934736 - RNA, 22 nt, Human
augaguugaagcuacaagaggc

SEQ ID NO: 934737 - RNA, 22 nt, Human
auggcaggcccagguguucauu

SEQ ID NO: 934738 - RNA, 22 nt, Human
uuccuggcgccacggagccggu

SEQ ID NO: 934739 - RNA, 22 nt, Human
ucccacacagcccgcucaccgg

SEQ ID NO: 934740 - RNA, 22 nt, Human
uggagcccagggugagaaggag

SEQ ID NO: 934741 - RNA, 22 nt, Human
uaaagcacgucuauuuaaugau

SEQ ID NO: 934742 - RNA, 19 nt, Human
gcuggccacgccccaguug

SEQ ID NO: 934743 - RNA, 22 nt, Human
aaaggaagaugccaggacucug

SEQ ID NO: 934744 - RNA, 22 nt, Human
auacaacuuuacaugcaauucc

SEQ ID NO: 934745 - RNA, 22 nt, Human
accauuuaauaaguauuuccau

SEQ ID NO: 934746 - RNA, 22 nt, Human
uagcugccaaaagggugggcua

SEQ ID NO: 934747 - RNA, 22 nt, Human
agaggcugaaugaugucaucau

SEQ ID NO: 934748 - RNA, 22 nt, Human
aaaaugaggucaauauccuuuu

SEQ ID NO: 934749 - RNA, 17 nt, Human
ucuccuggcucuaucag

SEQ ID NO: 934750 - RNA, 22 nt, Human
cugggagcaccauacuuguuuc

SEQ ID NO: 934751 - RNA, 22 nt, Human
accuguuuguguccauuaguga

SEQ ID NO: 934752 - RNA, 22 nt, Human
gugcaagguacauccuugaugu

SEQ ID NO: 934753 - RNA, 22 nt, Human
gccuugccucagccauggaaac

SEQ ID NO: 934754 - RNA, 22 nt, Human
uuccucagagggcgcuggggaa

SEQ ID NO: 934755 - RNA, 21 nt, Human
aaacugaccuugccugagaca

SEQ ID NO: 934756 - RNA, 22 nt, Human
uuaaacaguguuucaugugggg

SEQ ID NO: 934757 - RNA, 22 nt, Human
cagacacaccaggcccauucug

SEQ ID NO: 934758 - RNA, 21 nt, Human
aaucauacaaaacaugucagg

SEQ ID NO: 934759 - RNA, 22 nt, Human
gcugucugcugggucgcucagg

SEQ ID NO: 934760 - RNA, 22 nt, Human
uuucuguuaggcaucauuuuaa

SEQ ID NO: 934761 - RNA, 22 nt, Human
cucagaaucugccaaguucagg

SEQ ID NO: 934762 - RNA, 22 nt, Human
gcucagagggaacaaggggcug

SEQ ID NO: 934763 - RNA, 22 nt, Human
cuucuucaauagcaagcgcaua

SEQ ID NO: 934764 - RNA, 19 nt, Human
gaucuuugccaauuuaagc

SEQ ID NO: 934765 - RNA, 22 nt, Human
guaggcagguggaggagugaag

SEQ ID NO: 934766 - RNA, 21 nt, Human
ggugucaguuuuggucauuag

SEQ ID NO: 934767 - RNA, 21 nt, Human
uagggcaggcauuggaagaga

SEQ ID NO: 934768 - RNA, 22 nt, Human
aaggcugauuagacugauagcu

SEQ ID NO: 934769 - RNA, 22 nt, Human
uucuugauuucaugcaguuaag

SEQ ID NO: 934770 - RNA, 22 nt, Human
ugaggggagaagcagcagccug

SEQ ID NO: 934771 - RNA, 18 nt, Human
auccuugaugagaggucu

SEQ ID NO: 934772 - RNA, 22 nt, Human
ucucucagggggaaggcugaag

SEQ ID NO: 934773 - RNA, 22 nt, Human
ucucauucauacccuacaugcu

SEQ ID NO: 934774 - RNA, 22 nt, Human
caggccugucugcacaugaggc

SEQ ID NO: 934775 - RNA, 22 nt, Human
gcagcuggggaggucgugggga

SEQ ID NO: 934776 - RNA, 22 nt, Human
gccucugcaugcucagcaccca

SEQ ID NO: 934777 - RNA, 22 nt, Human
caggggaguuuuaugcaacaga

SEQ ID NO: 934778 - RNA, 22 nt, Human
uuugaagucaggcuuucuaccc

SEQ ID NO: 934779 - RNA, 22 nt, Human
aagauuauuuaagacaggaacc

SEQ ID NO: 934780 - RNA, 22 nt, Human
ugccuggguccaggccaagccu

SEQ ID NO: 934781 - RNA, 22 nt, Human
ugaagcuuuccuguggucagga

SEQ ID NO: 934782 - RNA, 22 nt, Human
gcugccugucccaggaugagga

SEQ ID NO: 934783 - RNA, 22 nt, Human
uuccauaaaggugauaguauac

SEQ ID NO: 934784 - RNA, 22 nt, Human
gagccugaauuugaccugcuua

SEQ ID NO: 934785 - RNA, 22 nt, Human
ucuugggauugcccugcaguuc

SEQ ID NO: 934786 - RNA, 22 nt, Human
uauuucuguaacucagggucug

SEQ ID NO: 934787 - RNA, 20 nt, Human
ggcagcaggaguuuccucuu

SEQ ID NO: 934788 - RNA, 22 nt, Human
uauuacugagguuuuauggagu

SEQ ID NO: 934789 - RNA, 22 nt, Human
aggcccuggcacugccugggag

SEQ ID NO: 934790 - RNA, 22 nt, Human
cuuaacagauacaucugugguu

SEQ ID NO: 934791 - RNA, 22 nt, Human
ugggcccaagagagucuccaac

SEQ ID NO: 934792 - RNA, 22 nt, Human
cagggagaagucuggucagucc

SEQ ID NO: 934793 - RNA, 22 nt, Human
cugcucugcaaggcacagugau

SEQ ID NO: 934794 - RNA, 22 nt, Human
auaagcauguuagaauauuuga

SEQ ID NO: 934795 - RNA, 22 nt, Human
ugaagcagcaccauuuuagagc

SEQ ID NO: 934796 - RNA, 22 nt, Human
auaaacaucuguuucucuucug

SEQ ID NO: 934797 - RNA, 22 nt, Human
uugaggagcaggaugggaggcu

SEQ ID NO: 934798 - RNA, 22 nt, Human
ucuuagcauuucauaacaacug

SEQ ID NO: 934799 - RNA, 22 nt, Human
uguguuaaguauuugauacacu

SEQ ID NO: 934800 - RNA, 22 nt, Human
uuucacagguacaaacacuccu

SEQ ID NO: 934801 - RNA, 22 nt, Human
gcccucagaugggaaaggaggg

SEQ ID NO: 934802 - RNA, 19 nt, Human
uuacuuggcaaagucaguc

SEQ ID NO: 934803 - RNA, 22 nt, Human
gggagcugagggaccucugugg

SEQ ID NO: 934804 - RNA, 22 nt, Human
ggcucaggccagaccacgacuc

SEQ ID NO: 934805 - RNA, 22 nt, Human
ccaugagacagcaacugaaagu

SEQ ID NO: 934806 - RNA, 22 nt, Human
aaauuucaagcaaaguagcuau

SEQ ID NO: 934807 - RNA, 22 nt, Human
cuuguggcccauggcuuccugc

SEQ ID NO: 934808 - RNA, 22 nt, Human
cucccaagggguaagggagcug

SEQ ID NO: 934809 - RNA, 22 nt, Human
aaggccagcuuguagggcuggu

SEQ ID NO: 934810 - RNA, 22 nt, Human
agccccuuccaguucucagauc

SEQ ID NO: 934811 - RNA, 22 nt, Human
ggcaggagauaaaauauuaguu

SEQ ID NO: 934812 - RNA, 22 nt, Human
agaacuuaggaacaacagcuua

SEQ ID NO: 934813 - RNA, 22 nt, Human
uaguaucuauuaguaacaagag

SEQ ID NO: 934814 - RNA, 22 nt, Human
uaucuguucaauggaagaugac

SEQ ID NO: 934815 - RNA, 22 nt, Human
gaacagcccuguuaagucuguu

SEQ ID NO: 934816 - RNA, 22 nt, Human
gcuuuauguaaguccaaaggca

SEQ ID NO: 934817 - RNA, 22 nt, Human
cugggccuuggauugacacugu

SEQ ID NO: 934818 - RNA, 21 nt, Human
ccagaggccucucuuggccac

SEQ ID NO: 934819 - RNA, 22 nt, Human
ggcugaaguguaguggcucacu

SEQ ID NO: 934820 - RNA, 22 nt, Human
accaucagagcacaguccgugc

SEQ ID NO: 934821 - RNA, 22 nt, Human
agccacagcaacaagugcaauu

SEQ ID NO: 934822 - RNA, 21 nt, Human
uugaaggaucacuucuguacc

SEQ ID NO: 934823 - RNA, 21 nt, Human
ucucuacacuuucacuaggcu

SEQ ID NO: 934824 - RNA, 22 nt, Human
acaguguuuuaugagaauuguu

SEQ ID NO: 934825 - RNA, 22 nt, Human
ggucaugcugugaaucagugcu

SEQ ID NO: 934826 - RNA, 22 nt, Human
cugggcacauuuugacuagugu

SEQ ID NO: 934827 - RNA, 22 nt, Human
uauuuccagcaguaagaagaca

SEQ ID NO: 934828 - RNA, 20 nt, Human
aggcucagagcaguaguaca

SEQ ID NO: 934829 - RNA, 22 nt, Human
uaaaguucuggugagagguaag

SEQ ID NO: 934830 - RNA, 22 nt, Human
agggcagagaaauguaguugag

SEQ ID NO: 934831 - RNA, 22 nt, Human
uggcagagaauaaaucuugacu

SEQ ID NO: 934832 - RNA, 22 nt, Human
acuuucauuuguaauaaacuuc

SEQ ID NO: 934833 - RNA, 22 nt, Human
ugcagaggagucagccugggca

SEQ ID NO: 934834 - RNA, 18 nt, Human
ucaagacaucaugaaaua

SEQ ID NO: 934835 - RNA, 22 nt, Human
agguaaagacagugaaagaggg

SEQ ID NO: 934836 - RNA, 22 nt, Human
ccagggcauccucacaucgcag

SEQ ID NO: 934837 - RNA, 22 nt, Human
ucacuuauaaaaugcaagaucu

SEQ ID NO: 934838 - RNA, 22 nt, Human
aaguuaugaaauuuggacagcu

SEQ ID NO: 934839 - RNA, 22 nt, Human
gaagcagcaaaucugcaguauc

SEQ ID NO: 934840 - RNA, 22 nt, Human
guaauuuuggaguauaaccugg

SEQ ID NO: 934841 - RNA, 22 nt, Human
aagccaggcaugcuuggacagu

SEQ ID NO: 934842 - RNA, 22 nt, Human
ucaggcagaugcagggauggau

SEQ ID NO: 934843 - RNA, 22 nt, Human
augugaaacugaagcauccaua

SEQ ID NO: 934844 - RNA, 20 nt, Human
acaggagaucugaggaaagg

SEQ ID NO: 934845 - RNA, 22 nt, Human
gcucugcugcuuacuagauggu

SEQ ID NO: 934846 - RNA, 22 nt, Human
gcagggugaaggucacauagaa

SEQ ID NO: 934847 - RNA, 20 nt, Human
cagcugccuggcucugggau

SEQ ID NO: 934848 - RNA, 22 nt, Human
aagcugcccucauucccagugc

SEQ ID NO: 934849 - RNA, 22 nt, Human
cugccuguuuucugauagauuu

SEQ ID NO: 934850 - RNA, 22 nt, Human
agauacauugaguuuccuccug

SEQ ID NO: 934851 - RNA, 19 nt, Human
agcauuuggaauucuacac

SEQ ID NO: 934852 - RNA, 23 nt, Human
acaaaugcccauacaucuaguuc

SEQ ID NO: 934853 - RNA, 22 nt, Human
ucauugaacgaagagcuccauu

SEQ ID NO: 934854 - RNA, 22 nt, Human
uauggcauaucugggagacucu

SEQ ID NO: 934855 - RNA, 22 nt, Human
ccucugggagacugcuacugag

SEQ ID NO: 934856 - RNA, 22 nt, Human
ucugggcucuuaguguacccuc

SEQ ID NO: 934857 - RNA, 22 nt, Human
agugugugcaugcauucgugca

SEQ ID NO: 934858 - RNA, 22 nt, Human
uggcugaauaauauucuguugu

SEQ ID NO: 934859 - RNA, 22 nt, Human
cuucugagcagaccuccugggg

SEQ ID NO: 934860 - RNA, 19 nt, Human
guucaaacacugauucagc

SEQ ID NO: 934861 - RNA, 22 nt, Human
auguaucaauuaucugucugca

SEQ ID NO: 934862 - RNA, 23 nt, Human
aaccuagacuacuuacuaugugg

SEQ ID NO: 934863 - RNA, 22 nt, Human
cauuuacagugagaguuuuuac

SEQ ID NO: 934864 - RNA, 22 nt, Human
aaagugacaaccauuuauuaag

SEQ ID NO: 934865 - RNA, 22 nt, Human
ggccuggaagaggacagagaaa

SEQ ID NO: 934866 - RNA, 22 nt, Human
ugcugcacgauaaauaauuucu

SEQ ID NO: 934867 - RNA, 22 nt, Human
cucccacuccuggcucaccaca

SEQ ID NO: 934868 - RNA, 22 nt, Human
guuauugcaguauagaggucua

SEQ ID NO: 934869 - RNA, 22 nt, Human
agcaguggagcgagauguuuaa

SEQ ID NO: 934870 - RNA, 22 nt, Human
ugcaguggugguaaagaugcuc

SEQ ID NO: 934871 - RNA, 22 nt, Human
aauguguacuuuuucaugcuca

SEQ ID NO: 934872 - RNA, 20 nt, Human
gggaguggugguagccugug

SEQ ID NO: 934873 - RNA, 22 nt, Human
cuuuaagacucugcucuuggug

SEQ ID NO: 934874 - RNA, 22 nt, Human
cagacagacagccguggccacc

SEQ ID NO: 934875 - RNA, 22 nt, Human
uauuccaaaaucccaaacugcc

SEQ ID NO: 934876 - RNA, 19 nt, Human
aguguguacugaaagcacu

SEQ ID NO: 934877 - RNA, 22 nt, Human
auuuaaugucgagcuauuguag

SEQ ID NO: 934878 - RNA, 22 nt, Human
augugucuuucaagguauagaa

SEQ ID NO: 934879 - RNA, 22 nt, Human
ggcuggcucagggcuugagaga

SEQ ID NO: 934880 - RNA, 22 nt, Human
cugcccaggaaccagaggggca

SEQ ID NO: 934881 - RNA, 22 nt, Human
uucacaggauauaugugcaggg

SEQ ID NO: 934882 - RNA, 22 nt, Human
uuugaaagcaggugugggaggg

SEQ ID NO: 934883 - RNA, 22 nt, Human
ggaggagguggguuaaguugua

SEQ ID NO: 934884 - RNA, 22 nt, Human
ucaguuuuuaaaugauauaauu

SEQ ID NO: 934885 - RNA, 22 nt, Human
ucuccuggaagaauaccacacu

SEQ ID NO: 934886 - RNA, 22 nt, Human
aaguucaaggaagccuccaguu

SEQ ID NO: 934887 - RNA, 22 nt, Human
cacagggcagaggguccguggc

SEQ ID NO: 934888 - RNA, 22 nt, Human
aggucagaagugccagggaauu

SEQ ID NO: 934889 - RNA, 22 nt, Human
ugaguucucacccauucuucuu

SEQ ID NO: 934890 - RNA, 20 nt, Human
aucagcaacugccacucagu

SEQ ID NO: 934891 - RNA, 22 nt, Human
gccuggguccacugaucaugcu

SEQ ID NO: 934892 - RNA, 22 nt, Human
uuuaagagcuaguaugucauuu

SEQ ID NO: 934893 - RNA, 23 nt, Human
ucaggauauugugugccaaggug

SEQ ID NO: 934894 - RNA, 19 nt, Human
ccagagcccgccagauggg

SEQ ID NO: 934895 - RNA, 22 nt, Human
guuuacaaauauuuuaaauggu

SEQ ID NO: 934896 - RNA, 22 nt, Human
ugggcugcccugaugguccuca

SEQ ID NO: 934897 - RNA, 22 nt, Human
ccagucagccaagcugcagcgg

SEQ ID NO: 934898 - RNA, 22 nt, Human
ggcugcugaguuggccaggaga

SEQ ID NO: 934899 - RNA, 22 nt, Human
acucucugguauuggcaaguuu

SEQ ID NO: 934900 - RNA, 22 nt, Human
gcccaggaagugacucagaugu

SEQ ID NO: 934901 - RNA, 22 nt, Human
aaggagaguacaggaguuggua

SEQ ID NO: 934902 - RNA, 18 nt, Human
agucuucugauccauuuu

SEQ ID NO: 934903 - RNA, 22 nt, Human
uguccucagauaugucuacucu

SEQ ID NO: 934904 - RNA, 22 nt, Human
uggcucagcuuacuuuugaggg

SEQ ID NO: 934905 - RNA, 22 nt, Human
uugcauguagaauacucaacuu

SEQ ID NO: 934906 - RNA, 22 nt, Human
gaaggaggugucaguuggacug

SEQ ID NO: 934907 - RNA, 22 nt, Human
uuugaaguggaaaaggauuuaa

SEQ ID NO: 934908 - RNA, 20 nt, Human
agcauuugaaauaugacuau

SEQ ID NO: 934909 - RNA, 22 nt, Human
caaaaguaauugcaguuuuugc

SEQ ID NO: 934910 - RNA, 22 nt, Human
ccugugucagccccugccucca

SEQ ID NO: 934911 - RNA, 23 nt, Human
uccaggagcaugcuggcuggcga

SEQ ID NO: 934912 - RNA, 22 nt, Human
ugcaggugaaaauuaugaggau

SEQ ID NO: 934913 - RNA, 22 nt, Human
gccugggaacucugaucuccug

SEQ ID NO: 934914 - RNA, 22 nt, Human
gcugccugaucauacaccaggg

SEQ ID NO: 934915 - RNA, 18 nt, Human
auggucucauacugggag

SEQ ID NO: 934916 - RNA, 22 nt, Human
uuggccuuguuaaggaggcccu

SEQ ID NO: 934917 - RNA, 22 nt, Human
aauucaugaguagaaucuauau

SEQ ID NO: 934918 - RNA, 18 nt, Human
auuuugaacaaugcugua

SEQ ID NO: 934919 - RNA, 22 nt, Human
ugggcugcagggguugagagcu

SEQ ID NO: 934920 - RNA, 22 nt, Human
uggcucaggccacuucuuuuau

SEQ ID NO: 934921 - RNA, 21 nt, Human
ccugagggugguugugaagau

SEQ ID NO: 934922 - RNA, 22 nt, Human
uauguuuuucaagugcacacua

SEQ ID NO: 934923 - RNA, 22 nt, Human
ggaggcucugcuccguguguuc

SEQ ID NO: 934924 - RNA, 22 nt, Human
guuguuuugcaggauccuuaca

SEQ ID NO: 934925 - RNA, 22 nt, Human
ggccaggagaggagggcacuga

SEQ ID NO: 934926 - RNA, 22 nt, Human
ugcuggaggggccugaccagga

SEQ ID NO: 934927 - RNA, 22 nt, Human
cugugccaucugcacucucguc

SEQ ID NO: 934928 - RNA, 22 nt, Human
guguggcugccagccaagaggc

SEQ ID NO: 934929 - RNA, 22 nt, Human
gggcuggagccagcuguggcug

SEQ ID NO: 934930 - RNA, 22 nt, Human
cccugaggcaaaggcuagaguu

SEQ ID NO: 934931 - RNA, 22 nt, Human
ccucauggaccucagacugucc

SEQ ID NO: 934932 - RNA, 22 nt, Human
auucacaaauaacaggugcaga

SEQ ID NO: 934933 - RNA, 22 nt, Human
aaggcacucauucaaggagaua

SEQ ID NO: 934934 - RNA, 22 nt, Human
cagcugaguuuccaagucugcc

SEQ ID NO: 934935 - RNA, 22 nt, Human
uucauagugauuguucagauag

SEQ ID NO: 934936 - RNA, 22 nt, Human
aagcccagcugaaagcauuuuu

SEQ ID NO: 934937 - RNA, 22 nt, Human
uuugaaaaaggccuuugguaug

SEQ ID NO: 934938 - RNA, 22 nt, Human
auauaguuggguuucauucuac

SEQ ID NO: 934939 - RNA, 22 nt, Human
ugcaccuuguugcuuuuacgaa

SEQ ID NO: 934940 - RNA, 22 nt, Human
ggagccuggccuggcucugugu

SEQ ID NO: 934941 - RNA, 22 nt, Human
ccucaggggcuuuucguuguug

SEQ ID NO: 934942 - RNA, 17 nt, Human
cagacaggcugucaccc

SEQ ID NO: 934943 - RNA, 22 nt, Human
agcagccagaaauccagaggug

SEQ ID NO: 934944 - RNA, 22 nt, Human
cacagcuucuccuugauaucgc

SEQ ID NO: 934945 - RNA, 22 nt, Human
cuuuuuccagcuucaggguggg

SEQ ID NO: 934946 - RNA, 22 nt, Human
uggaaagacauucagccgcugg

SEQ ID NO: 934947 - RNA, 20 nt, Human
ucacucugaugcuagggugg

SEQ ID NO: 934948 - RNA, 22 nt, Human
gcccaggagaggccagggcuga

SEQ ID NO: 934949 - RNA, 22 nt, Human
ggcucugcccagaugaagagga

SEQ ID NO: 934950 - RNA, 22 nt, Human
uggcuccuaucaaggagugggu

SEQ ID NO: 934951 - RNA, 22 nt, Human
caugagcugcugggagccuguc

SEQ ID NO: 934952 - RNA, 22 nt, Human
gagcacugaggaaagcugguua

SEQ ID NO: 934953 - RNA, 22 nt, Human
cugccuggggaaugugaggauu

SEQ ID NO: 934954 - RNA, 22 nt, Human
gcugagugauugauauuuuagu

SEQ ID NO: 934955 - RNA, 22 nt, Human
ugucccaggccucauguugcca

SEQ ID NO: 934956 - RNA, 22 nt, Human
aagcugccacacggugaguacu

SEQ ID NO: 934957 - RNA, 22 nt, Human
ccuggauucaagucuuucuuuc

SEQ ID NO: 934958 - RNA, 22 nt, Human
gaauacaugauacaugaacugc

SEQ ID NO: 934959 - RNA, 22 nt, Human
aaaugguaagacaacacauuau

SEQ ID NO: 934960 - RNA, 22 nt, Human
ugccucugugggccuuccuggc

SEQ ID NO: 934961 - RNA, 22 nt, Human
acaaagucucuaauaaucuucu

SEQ ID NO: 934962 - RNA, 23 nt, Human
auuucuaggggauuuucuggugc

SEQ ID NO: 934963 - RNA, 17 nt, Human
uguagcuucuccuucuc

SEQ ID NO: 934964 - RNA, 22 nt, Human
ccaggaggcagagguuacagug

SEQ ID NO: 934965 - RNA, 22 nt, Human
ugacagcauaacacuggucuug

SEQ ID NO: 934966 - RNA, 22 nt, Human
aucaguuuaacugucaagagcc

SEQ ID NO: 934967 - RNA, 22 nt, Human
gcagcauauuguacuggccugc

SEQ ID NO: 934968 - RNA, 22 nt, Human
ucacaagaauuuguagaugaaa

SEQ ID NO: 934969 - RNA, 22 nt, Human
uggcuuccugcacagugucugc

SEQ ID NO: 934970 - RNA, 20 nt, Human
uaugaguauuacuuucagga

SEQ ID NO: 934971 - RNA, 22 nt, Human
gagggucccgagcccugucaga

SEQ ID NO: 934972 - RNA, 22 nt, Human
cacauuuaauccuuuauaagua

SEQ ID NO: 934973 - RNA, 20 nt, Human
ggcagagcuaugucuguugc

SEQ ID NO: 934974 - RNA, 17 nt, Human
gguggccugcaguggcu

SEQ ID NO: 934975 - RNA, 22 nt, Human
uuuugugagcccauaaaugcca

SEQ ID NO: 934976 - RNA, 22 nt, Human
gagagcccugcuccuaucccag

SEQ ID NO: 934977 - RNA, 22 nt, Human
ucuucagacuccaaauguuuua

SEQ ID NO: 934978 - RNA, 22 nt, Human
uuuaagaugguauuuuauaaag

SEQ ID NO: 934979 - RNA, 21 nt, Human
agggagcuuuagguagaaguu

SEQ ID NO: 934980 - RNA, 22 nt, Human
uugcucagcacuggagccagcu

SEQ ID NO: 934981 - RNA, 22 nt, Human
agagccugcaucaggcuugggg

SEQ ID NO: 934982 - RNA, 22 nt, Human
cauuuguauguuccuccuuagg

SEQ ID NO: 934983 - RNA, 22 nt, Human
uaaggccauuauggugggcccg

SEQ ID NO: 934984 - RNA, 22 nt, Human
aagaacaguugggaggugagcc

SEQ ID NO: 934985 - RNA, 22 nt, Human
caagggugguauugggagcaua

SEQ ID NO: 934986 - RNA, 22 nt, Human
uuaaaagagcagcccagcauau

SEQ ID NO: 934987 - RNA, 22 nt, Human
ccagcuggcaggagagucaggg

SEQ ID NO: 934988 - RNA, 22 nt, Human
auucacauguugaagcccuaac

SEQ ID NO: 934989 - RNA, 22 nt, Human
aggccucacauugggcuucaag

SEQ ID NO: 934990 - RNA, 22 nt, Human
aagccaggcugcacuugcuggg

SEQ ID NO: 934991 - RNA, 19 nt, Human
guggccugcgcugggugcg

SEQ ID NO: 934992 - RNA, 22 nt, Human
auucaucaacugauagccauag

SEQ ID NO: 934993 - RNA, 22 nt, Human
uggggcuccuccuggcaggagg

SEQ ID NO: 934994 - RNA, 20 nt, Human
cccucccagaugcuucccaa

SEQ ID NO: 934995 - RNA, 22 nt, Human
uggccaggggaguuccccucca

SEQ ID NO: 934996 - RNA, 22 nt, Human
caggagugaaaugaggcccagg

SEQ ID NO: 934997 - RNA, 22 nt, Human
agaccagcugccucccagggcc

SEQ ID NO: 934998 - RNA, 20 nt, Human
uggcuccugcgguggaacca

SEQ ID NO: 934999 - RNA, 22 nt, Human
agggcugcuauguugauucaga

SEQ ID NO: 935000 - RNA, 22 nt, Human
agaugauggccauguccucucc

SEQ ID NO: 935001 - RNA, 23 nt, Human
aacuccugaaucgugagccaucu

SEQ ID NO: 935002 - RNA, 22 nt, Human
uuguuuaaaauguagcaagaaa

SEQ ID NO: 935003 - RNA, 22 nt, Human
gcaggagcuggaaagugauguu

SEQ ID NO: 935004 - RNA, 22 nt, Human
ugcuucugggcaaaugugugug

SEQ ID NO: 935005 - RNA, 22 nt, Human
agggaggucuuugaggggcuua

SEQ ID NO: 935006 - RNA, 22 nt, Human
cagaaauggaauuuuccaucac

SEQ ID NO: 935007 - RNA, 22 nt, Human
ugucucaguauacgaaacacuu

SEQ ID NO: 935008 - RNA, 21 nt, Human
cuggacugaggagacagucgc

SEQ ID NO: 935009 - RNA, 22 nt, Human
ugggauggagccugaguauagu

SEQ ID NO: 935010 - RNA, 22 nt, Human
auggcacuaagagggagcugga

SEQ ID NO: 935011 - RNA, 22 nt, Human
auaauuuuuguuugauguccaa

SEQ ID NO: 935012 - RNA, 20 nt, Human
agggucaguagcacagagcu

SEQ ID NO: 935013 - RNA, 22 nt, Human
gggcuggucuggcuuagucagg

SEQ ID NO: 935014 - RNA, 22 nt, Human
accccagcccugcuucugggag

SEQ ID NO: 935015 - RNA, 22 nt, Human
cuaaaugcccuacaaugacugg

SEQ ID NO: 935016 - RNA, 22 nt, Human
ccagugugggcccggccuccuc

SEQ ID NO: 935017 - RNA, 22 nt, Human
gggcuggaggagauccagaggc

SEQ ID NO: 935018 - RNA, 22 nt, Human
acaccuuugugaagugaugaug

SEQ ID NO: 935019 - RNA, 20 nt, Human
cugagagucugugcuuaguc

SEQ ID NO: 935020 - RNA, 19 nt, Human
agcaaauauaauaguguuc

SEQ ID NO: 935021 - RNA, 22 nt, Human
aucaaaguuucccagaaguugu

SEQ ID NO: 935022 - RNA, 22 nt, Human
aagcacuuagaagagugccugc

SEQ ID NO: 935023 - RNA, 22 nt, Human
caggaaaaaugccaggagucag

SEQ ID NO: 935024 - RNA, 22 nt, Human
uggaagcacuuggguuuuguug

SEQ ID NO: 935025 - RNA, 22 nt, Human
ggcugccuacuuucccagaguu

SEQ ID NO: 935026 - RNA, 22 nt, Human
cuggagcugcuguccuugggug

SEQ ID NO: 935027 - RNA, 22 nt, Human
cagaguucaaagccugcuggga

SEQ ID NO: 935028 - RNA, 22 nt, Human
ugcagcucauugguguccuggu

SEQ ID NO: 935029 - RNA, 22 nt, Human
ggcacagggagccgcaguugca

SEQ ID NO: 935030 - RNA, 17 nt, Human
augugucugaguguccu

SEQ ID NO: 935031 - RNA, 22 nt, Human
gcuggcagucccaucagcuggg

SEQ ID NO: 935032 - RNA, 22 nt, Human
gaacccaaaccuggaccucccu

SEQ ID NO: 935033 - RNA, 22 nt, Human
guauuaggaaauaugaagaaag

SEQ ID NO: 935034 - RNA, 20 nt, Human
caagcccucuuuagccugcc

SEQ ID NO: 935035 - RNA, 22 nt, Human
cagauccacccuuguagugaca

SEQ ID NO: 935036 - RNA, 22 nt, Human
ugggcagacauugaguuuguuc

SEQ ID NO: 935037 - RNA, 22 nt, Human
ucagugcagaauagugaugcau

SEQ ID NO: 935038 - RNA, 22 nt, Human
cuuugaauuccaguacaauaac

SEQ ID NO: 935039 - RNA, 22 nt, Human
uguauguguauguacauaugca

SEQ ID NO: 935040 - RNA, 22 nt, Human
ucccuggguucccguggaagug

SEQ ID NO: 935041 - RNA, 22 nt, Human
uuccgcuggggccgccuggcgg

SEQ ID NO: 935042 - RNA, 22 nt, Human
cuaauacucauuucuguaacuc

SEQ ID NO: 935043 - RNA, 22 nt, Human
gggcugcuuuuaagggucucag

SEQ ID NO: 935044 - RNA, 22 nt, Human
cagauggcagggcagcucugca

SEQ ID NO: 935045 - RNA, 21 nt, Human
cuguuucuugugaagugacac

SEQ ID NO: 935046 - RNA, 22 nt, Human
gaauuacaaagugagacaagcu

SEQ ID NO: 935047 - RNA, 21 nt, Human
agcagaggcugccuggugacu

SEQ ID NO: 935048 - RNA, 22 nt, Human
gccuccuggccuuugcuccuca

SEQ ID NO: 935049 - RNA, 22 nt, Human
ccuggagcuuggucacgcugcg

SEQ ID NO: 935050 - RNA, 22 nt, Human
cuggggugagcagaaacagggg

SEQ ID NO: 935051 - RNA, 22 nt, Human
cuugcacacauguacaugugua

SEQ ID NO: 935052 - RNA, 22 nt, Human
gccuggcugggcaccaggggag

SEQ ID NO: 935053 - RNA, 22 nt, Human
guuugauucaagaacaaagagu

SEQ ID NO: 935054 - RNA, 23 nt, Human
uggcucugagagguucagaugcu

SEQ ID NO: 935055 - RNA, 22 nt, Human
cagcagaggugguucacauugu

SEQ ID NO: 935056 - RNA, 22 nt, Human
ugcuuccuugagcucuccaauc

SEQ ID NO: 935057 - RNA, 22 nt, Human
agcugagagguggcaagcugua

SEQ ID NO: 935058 - RNA, 22 nt, Human
ggagccuguggcugcuugaagc

SEQ ID NO: 935059 - RNA, 22 nt, Human
ggcuccuguccccucagcugcu

SEQ ID NO: 935060 - RNA, 22 nt, Human
cagaggcagugggguugcuccu

SEQ ID NO: 935061 - RNA, 22 nt, Human
ggcaggagggcggacaaugacc

SEQ ID NO: 935062 - RNA, 23 nt, Human
cuugcagggcuggaggcuuagaa

SEQ ID NO: 935063 - RNA, 20 nt, Human
gagccugggaagucuaaggu

SEQ ID NO: 935064 - RNA, 22 nt, Human
aggagcugcauggauaccuggu

SEQ ID NO: 935065 - RNA, 22 nt, Human
uagacacaucaaguauaguuaa

SEQ ID NO: 935066 - RNA, 22 nt, Human
uuucaucuucccagagaccuug

SEQ ID NO: 935067 - RNA, 22 nt, Human
gaugggaggaaccugggucccu

SEQ ID NO: 935068 - RNA, 22 nt, Human
ucaaaaaguugaagaguugggg

SEQ ID NO: 935069 - RNA, 22 nt, Human
acacccagagcgccagugccga

SEQ ID NO: 935070 - RNA, 22 nt, Human
uuucacaagacagcuacuguug

SEQ ID NO: 935071 - RNA, 22 nt, Human
uugaauaguguuuucaguauac

SEQ ID NO: 935072 - RNA, 22 nt, Human
ggcagcagggcugucucccuac

SEQ ID NO: 935073 - RNA, 22 nt, Human
gugaaggacuagcauggagggc

SEQ ID NO: 935074 - RNA, 22 nt, Human
aacuucuugguccugagcuguu

SEQ ID NO: 935075 - RNA, 22 nt, Human
caggguacagaguuuucuaaac

SEQ ID NO: 935076 - RNA, 22 nt, Human
ggcuugcuucuuguccaggaau

SEQ ID NO: 935077 - RNA, 22 nt, Human
uauccaaacauauagucucucu

SEQ ID NO: 935078 - RNA, 22 nt, Human
uuugcauugcagugguuuacag

SEQ ID NO: 935079 - RNA, 22 nt, Human
agcaagcuaccuagauagucua

SEQ ID NO: 935080 - RNA, 22 nt, Human
gauacaaauucaugucugaauu

SEQ ID NO: 935081 - RNA, 22 nt, Human
ggccaggagcugcacagggcuc

SEQ ID NO: 935082 - RNA, 22 nt, Human
uucagagcaucucuaaagccag

SEQ ID NO: 935083 - RNA, 22 nt, Human
auguuuuauuaccaacuuguac

SEQ ID NO: 935084 - RNA, 22 nt, Human
uuaggauaugaaacaguauaag

SEQ ID NO: 935085 - RNA, 22 nt, Human
gugcucaggaagcuguuccugc

SEQ ID NO: 935086 - RNA, 22 nt, Human
cccucugccucugaguaggaca

SEQ ID NO: 935087 - RNA, 22 nt, Human
ggaggagacaguaaaaagcacg

SEQ ID NO: 935088 - RNA, 22 nt, Human
ggagugaaucacuagaugcaga

SEQ ID NO: 935089 - RNA, 22 nt, Human
aucauuucccuuuagaucacaa

SEQ ID NO: 935090 - RNA, 22 nt, Human
aaauaauguuaggccuuugcuc

SEQ ID NO: 935091 - RNA, 22 nt, Human
cauuuccacuucugaaaacugg

SEQ ID NO: 935092 - RNA, 22 nt, Human
auucuucacauaagugcuguac

SEQ ID NO: 935093 - RNA, 22 nt, Human
uggaaggagacugggaagugug

SEQ ID NO: 935094 - RNA, 22 nt, Human
uggcccugugugcaggcugcac

SEQ ID NO: 935095 - RNA, 22 nt, Human
aggucauuggggacuaucuccg

SEQ ID NO: 935096 - RNA, 22 nt, Human
agcaccugcuuaaugugcagug

SEQ ID NO: 935097 - RNA, 22 nt, Human
ugccgcagugcggggagggccc

SEQ ID NO: 935098 - RNA, 22 nt, Human
uagcuuuccuuguugccugugc

SEQ ID NO: 935099 - RNA, 22 nt, Human
ucccagagccaagcuauggaug

SEQ ID NO: 935100 - RNA, 22 nt, Human
cuccuggcccugagcucccagg

SEQ ID NO: 935101 - RNA, 22 nt, Human
ccuggugccacuagagaauguc

SEQ ID NO: 935102 - RNA, 22 nt, Human
uguuugaacugaauaacauagu

SEQ ID NO: 935103 - RNA, 20 nt, Human
gauuucaaagcagaguggcc

SEQ ID NO: 935104 - RNA, 20 nt, Human
uauuuagauucaaguaugga

SEQ ID NO: 935105 - RNA, 22 nt, Human
uuuuucaagacaaccugcaugu

SEQ ID NO: 935106 - RNA, 22 nt, Human
ugaagcccugugucagcuucca

SEQ ID NO: 935107 - RNA, 22 nt, Human
agauacauagcugugagcacac

SEQ ID NO: 935108 - RNA, 22 nt, Human
ugaggcaggacauggacaacug

SEQ ID NO: 935109 - RNA, 22 nt, Human
cccaggagaccuagaucuguuu

SEQ ID NO: 935110 - RNA, 22 nt, Human
aacucugcuuauaguuugucca

SEQ ID NO: 935111 - RNA, 22 nt, Human
cugugucuaaucuuauacauca

SEQ ID NO: 935112 - RNA, 22 nt, Human
caggggcuguggcacauggugu

SEQ ID NO: 935113 - RNA, 22 nt, Human
ugcuguguucuccugacucacc

SEQ ID NO: 935114 - RNA, 22 nt, Human
cugccuccucacguccacagug

SEQ ID NO: 935115 - RNA, 22 nt, Human
cccaggcuggagugcaauggca

SEQ ID NO: 935116 - RNA, 20 nt, Human
agacaggagcccccauucag

SEQ ID NO: 935117 - RNA, 22 nt, Human
aauauccacacugugucccugc

SEQ ID NO: 935118 - RNA, 22 nt, Human
uaacagaagaaaacauauugga

SEQ ID NO: 935119 - RNA, 22 nt, Human
uccauguggccagacacuggca

SEQ ID NO: 935120 - RNA, 22 nt, Human
ugcaggcuguaaucugaggcua

SEQ ID NO: 935121 - RNA, 22 nt, Human
agcaggugggaucaagcuggca

SEQ ID NO: 935122 - RNA, 22 nt, Human
uucaagaugcacaguggcauuc

SEQ ID NO: 935123 - RNA, 19 nt, Human
gcucagagggcccugugcu

SEQ ID NO: 935124 - RNA, 22 nt, Human
accagagauggggcuucucugu

SEQ ID NO: 935125 - RNA, 17 nt, Human
gcugagugcagggaguc

SEQ ID NO: 935126 - RNA, 22 nt, Human
ucacagacauggugagguaaca

SEQ ID NO: 935127 - RNA, 22 nt, Human
acuuguuuuaucugucaauaga

SEQ ID NO: 935128 - RNA, 22 nt, Human
ucuuuccucugagcuccuguag

SEQ ID NO: 935129 - RNA, 21 nt, Human
cagaaguaaggguaacuucuc

SEQ ID NO: 935130 - RNA, 22 nt, Human
aaggcagccaugugcuuugggu

SEQ ID NO: 935131 - RNA, 22 nt, Human
guguacaugagaaaucaacuuu

SEQ ID NO: 935132 - RNA, 22 nt, Human
guggcugcagcccagcggcacg

SEQ ID NO: 935133 - RNA, 22 nt, Human
gugggagcuuuggcaucaggcu

SEQ ID NO: 935134 - RNA, 22 nt, Human
cagaguccuggacacagagaca

SEQ ID NO: 935135 - RNA, 22 nt, Human
cagggccacuguagaugaggag

SEQ ID NO: 935136 - RNA, 22 nt, Human
uaauaucuacuucauagaguuu

SEQ ID NO: 935137 - RNA, 22 nt, Human
ugaguucuaguggcugcagauu

SEQ ID NO: 935138 - RNA, 23 nt, Human
aucauucuccaaucuggagcagg

SEQ ID NO: 935139 - RNA, 22 nt, Human
ccagagagauugcuucuaaaga

SEQ ID NO: 935140 - RNA, 22 nt, Human
uucauucugcaguucucagcuc

SEQ ID NO: 935141 - RNA, 22 nt, Human
aaggcaguaggaucuuccacag

SEQ ID NO: 935142 - RNA, 22 nt, Human
ugaagccaucccucagauggcc

SEQ ID NO: 935143 - RNA, 22 nt, Human
guagcuuauuagggauaauagu

SEQ ID NO: 935144 - RNA, 22 nt, Human
caugaguuuuuuaguucaugca

SEQ ID NO: 935145 - RNA, 22 nt, Human
agguacaguagacagacaguua

SEQ ID NO: 935146 - RNA, 22 nt, Human
ugaggcaggagguugagaacug

SEQ ID NO: 935147 - RNA, 23 nt, Human
uggcaccaggcauucuaggggua

SEQ ID NO: 935148 - RNA, 22 nt, Human
gcuguucauagaaauggucuca

SEQ ID NO: 935149 - RNA, 22 nt, Human
uuagaaaggagcuuauuucuuu

SEQ ID NO: 935150 - RNA, 22 nt, Human
aaggucauugguucugaauucu

SEQ ID NO: 935151 - RNA, 22 nt, Human
caccaggcugaaccagagggga

SEQ ID NO: 935152 - RNA, 22 nt, Human
cugggcugugguguggcccaaa

SEQ ID NO: 935153 - RNA, 22 nt, Human
gccuggagacaaggacaaaggg

SEQ ID NO: 935154 - RNA, 22 nt, Human
gguagcagggcugugagucaga

SEQ ID NO: 935155 - RNA, 22 nt, Human
gcacagagggcagugagccucu

SEQ ID NO: 935156 - RNA, 22 nt, Human
cuaccuuucugacucuugggau

SEQ ID NO: 935157 - RNA, 22 nt, Human
uaauuauuaugacaacaauugc

SEQ ID NO: 935158 - RNA, 22 nt, Human
auucauaacggcaaaugucacc

SEQ ID NO: 935159 - RNA, 22 nt, Human
gcaguggggaaugcuggggaga

SEQ ID NO: 935160 - RNA, 22 nt, Human
agcgggugcugugucagcccuc

SEQ ID NO: 935161 - RNA, 22 nt, Human
ccuggcagcauugguagagauu

SEQ ID NO: 935162 - RNA, 22 nt, Human
ggcccacuugaaauggagcuca

SEQ ID NO: 935163 - RNA, 22 nt, Human
caggguccaucuuucaucacug

SEQ ID NO: 935164 - RNA, 22 nt, Human
uuucuagggcucuugucuucug

SEQ ID NO: 935165 - RNA, 22 nt, Human
auuuuucucuccacuccauuaa

SEQ ID NO: 935166 - RNA, 22 nt, Human
aaggucauggcaaauuacuuuu

SEQ ID NO: 935167 - RNA, 22 nt, Human
cccacaggcuagggguagggca

SEQ ID NO: 935168 - RNA, 22 nt, Human
uauugacagagggucagaagag

SEQ ID NO: 935169 - RNA, 22 nt, Human
gugcugucaauugcuuucagua

SEQ ID NO: 935170 - RNA, 22 nt, Human
cacagaauuaagggagaaauau

SEQ ID NO: 935171 - RNA, 22 nt, Human
acagcaugucuaguuaaauacu

SEQ ID NO: 935172 - RNA, 19 nt, Human
uucaggauugacccuacug

SEQ ID NO: 935173 - RNA, 22 nt, Human
aguucucaggucagcugagucu

SEQ ID NO: 935174 - RNA, 22 nt, Human
cugccugggccggccacccucu

SEQ ID NO: 935175 - RNA, 22 nt, Human
cugagccuguguuucucuggca

SEQ ID NO: 935176 - RNA, 22 nt, Human
aaaggccaccaacaugaagcau

SEQ ID NO: 935177 - RNA, 21 nt, Human
acagucuccccagaucucucc

SEQ ID NO: 935178 - RNA, 22 nt, Human
gugcauuucucauacacuaaau

SEQ ID NO: 935179 - RNA, 19 nt, Human
ucucacaucagcuccuagc

SEQ ID NO: 935180 - RNA, 18 nt, Human
uaggagagaauuuauuua

SEQ ID NO: 935181 - RNA, 22 nt, Human
cacugcagaucagaggcugaga

SEQ ID NO: 935182 - RNA, 22 nt, Human
uagagaaauaagcuuugccuug

SEQ ID NO: 935183 - RNA, 22 nt, Human
cugugcccuggccaggccucuc

SEQ ID NO: 935184 - RNA, 22 nt, Human
aggcucugaucagguggcugug

SEQ ID NO: 935185 - RNA, 22 nt, Human
gggcugugcugaguaggaggug

SEQ ID NO: 935186 - RNA, 22 nt, Human
ccaggagcaggagcuggacaga

SEQ ID NO: 935187 - RNA, 22 nt, Human
cccucccaggaguggccagaga

SEQ ID NO: 935188 - RNA, 22 nt, Human
ucuguucauacagaguauagua

SEQ ID NO: 935189 - RNA, 22 nt, Human
uguuccuguguggaaaagggcc

SEQ ID NO: 935190 - RNA, 22 nt, Human
uggggcuggggaucuugagccu

SEQ ID NO: 935191 - RNA, 22 nt, Human
gaaaagcuaggccaguucagcu

SEQ ID NO: 935192 - RNA, 22 nt, Human
auuucuguaguccacauucuuu

SEQ ID NO: 935193 - RNA, 22 nt, Human
cuucagagugcagaagauuggg

SEQ ID NO: 935194 - RNA, 22 nt, Human
ggggccuuuucugaauguggaa

SEQ ID NO: 935195 - RNA, 22 nt, Human
gagcugccugaacaagcagcag

SEQ ID NO: 935196 - RNA, 22 nt, Human
cugagauggccacugggucuca

SEQ ID NO: 935197 - RNA, 22 nt, Human
uccagggaugccagccauguug

SEQ ID NO: 935198 - RNA, 22 nt, Human
ucagcuggagaugagaaccgaa

SEQ ID NO: 935199 - RNA, 22 nt, Human
caagagcugugaccucauucac

SEQ ID NO: 935200 - RNA, 22 nt, Human
gagggcagugaauuuugaagcu

SEQ ID NO: 935201 - RNA, 22 nt, Human
ccaggcagccaagugugugugu

SEQ ID NO: 935202 - RNA, 22 nt, Human
agcuugccucuuaaucaccuca

SEQ ID NO: 935203 - RNA, 20 nt, Human
cugcugugauucccuccucc

SEQ ID NO: 935204 - RNA, 22 nt, Human
aaagcucuuuuccaaguauuga

SEQ ID NO: 935205 - RNA, 22 nt, Human
uggcugugaacaaagagaauaa

SEQ ID NO: 935206 - RNA, 22 nt, Human
uaggauuuggcuuuagucaggu

SEQ ID NO: 935207 - RNA, 22 nt, Human
auucagaaaguugucauauuug

SEQ ID NO: 935208 - RNA, 22 nt, Human
ucucccaggcugcccuguggac

SEQ ID NO: 935209 - RNA, 22 nt, Human
gcugcucucagagcucaugcug

SEQ ID NO: 935210 - RNA, 22 nt, Human
uuuuuccaccguacuuccugag

SEQ ID NO: 935211 - RNA, 22 nt, Human
aggcccugcuuuccagagcuca

SEQ ID NO: 935212 - RNA, 22 nt, Human
aauuuggcagugucuugaagua

SEQ ID NO: 935213 - RNA, 22 nt, Human
gcugccagccaacuugcugugc

SEQ ID NO: 935214 - RNA, 20 nt, Human
ggcagagggccugggagaag

SEQ ID NO: 935215 - RNA, 22 nt, Human
cucuguccuaugcuugauagaa

SEQ ID NO: 935216 - RNA, 22 nt, Human
ugccugucuuaauaucuggaaa

SEQ ID NO: 935217 - RNA, 22 nt, Human
uuauauguuucuguuuggaggc

SEQ ID NO: 935218 - RNA, 22 nt, Human
ccugagccuggcucaugcacuc

SEQ ID NO: 935219 - RNA, 22 nt, Human
acagccugcugccugcuucuug

SEQ ID NO: 935220 - RNA, 22 nt, Human
uaagaacagugucugucucaca

SEQ ID NO: 935221 - RNA, 22 nt, Human
aucugcagaggacaggcgagga

SEQ ID NO: 935222 - RNA, 20 nt, Human
aggaggcauagucuggaaag

SEQ ID NO: 935223 - RNA, 23 nt, Human
cccaggagccugaguccucucug

SEQ ID NO: 935224 - RNA, 21 nt, Human
gccagagcaguacaaugaggu

SEQ ID NO: 935225 - RNA, 22 nt, Human
cucucuggaagggggagcugau

SEQ ID NO: 935226 - RNA, 22 nt, Human
auagucacucuguuagguguuu

SEQ ID NO: 935227 - RNA, 22 nt, Human
ugcugccaccccucaccagagc

SEQ ID NO: 935228 - RNA, 19 nt, Human
uuuggcacucugaaguguu

SEQ ID NO: 935229 - RNA, 22 nt, Human
ccaccagcuucagcagccgcgg

SEQ ID NO: 935230 - RNA, 23 nt, Human
ccagcucccaggucugaggacug

SEQ ID NO: 935231 - RNA, 19 nt, Human
agugucaucagcuacucag

SEQ ID NO: 935232 - RNA, 22 nt, Human
uuuugaaagaguccugcuacag

SEQ ID NO: 935233 - RNA, 22 nt, Human
cuggcuugcagcucaucauaaa

SEQ ID NO: 935234 - RNA, 22 nt, Human
gccaccagccccaugcgcugug

SEQ ID NO: 935235 - RNA, 22 nt, Human
uagaaaucuacuuagacuuucu

SEQ ID NO: 935236 - RNA, 22 nt, Human
ugucuuaauuuggaugauguuu

SEQ ID NO: 935237 - RNA, 22 nt, Human
agucccagugagaugaaccagg

SEQ ID NO: 935238 - RNA, 22 nt, Human
ccuggccugcucggcucuuaag

SEQ ID NO: 935239 - RNA, 22 nt, Human
gcagaagucagaccaucugaau

SEQ ID NO: 935240 - RNA, 22 nt, Human
uuuucuuauggugaagcacaaa

SEQ ID NO: 935241 - RNA, 22 nt, Human
ugucccagaucacaggagggga

SEQ ID NO: 935242 - RNA, 22 nt, Human
agcuauguauuuguguguuaaa

SEQ ID NO: 935243 - RNA, 22 nt, Human
cagcucucacacccuccuccca

SEQ ID NO: 935244 - RNA, 22 nt, Human
ggccauggaccccgagcugacc

SEQ ID NO: 935245 - RNA, 22 nt, Human
uacauauacugagugauuugcu

SEQ ID NO: 935246 - RNA, 22 nt, Human
ugacagaaagaauaugucaauc

SEQ ID NO: 935247 - RNA, 22 nt, Human
acuuccuguguuggucuugcug

SEQ ID NO: 935248 - RNA, 22 nt, Human
caaagcaaggcucaguuugaac

SEQ ID NO: 935249 - RNA, 22 nt, Human
agggcugcugcuccgggcccag

SEQ ID NO: 935250 - RNA, 22 nt, Human
ugaggcagaguaagauacauga

SEQ ID NO: 935251 - RNA, 23 nt, Human
aggcacugaaugugucagugagu

SEQ ID NO: 935252 - RNA, 22 nt, Human
ccugucugaggaggugcucuuu

SEQ ID NO: 935253 - RNA, 22 nt, Human
aguguccaacucagcuugucaa

SEQ ID NO: 935254 - RNA, 22 nt, Human
gaugauggacaaagcauuggug

SEQ ID NO: 935255 - RNA, 22 nt, Human
agaugcuucaguguuuaauuua

SEQ ID NO: 935256 - RNA, 22 nt, Human
augaaaaguucgaucuagaagg

SEQ ID NO: 935257 - RNA, 22 nt, Human
uugggagcuuggacuuagugug

SEQ ID NO: 935258 - RNA, 22 nt, Human
ccugacucuggccaggccagcu

SEQ ID NO: 935259 - RNA, 22 nt, Human
gacccaggaagcuacuucuggu

SEQ ID NO: 935260 - RNA, 22 nt, Human
gcuguucaaaagccacaguuac

SEQ ID NO: 935261 - RNA, 22 nt, Human
caggcagccugagggaucuggg

SEQ ID NO: 935262 - RNA, 22 nt, Human
ccuggaaggugaugguacagca

SEQ ID NO: 935263 - RNA, 22 nt, Human
gaggcaggcccugaaugaguca

SEQ ID NO: 935264 - RNA, 22 nt, Human
ccagccuccauguagauagcug

SEQ ID NO: 935265 - RNA, 22 nt, Human
aguccaggaguugggugacauu

SEQ ID NO: 935266 - RNA, 22 nt, Human
ccugcagaccacacucaguccu

SEQ ID NO: 935267 - RNA, 22 nt, Human
cacauuugaaggaauuagcauu

SEQ ID NO: 935268 - RNA, 23 nt, Human
acucagcuuugggagaugacuca

SEQ ID NO: 935269 - RNA, 23 nt, Human
uugcuucugugcaauucaguacu

SEQ ID NO: 935270 - RNA, 22 nt, Human
aaagauuuaagaauaauuugug

SEQ ID NO: 935271 - RNA, 22 nt, Human
gcugccacuuggucaugucaug

SEQ ID NO: 935272 - RNA, 22 nt, Human
uggaggccagagguacugggac

SEQ ID NO: 935273 - RNA, 22 nt, Human
ucaggaguccugccugcagccu

SEQ ID NO: 935274 - RNA, 22 nt, Human
aggaaagggguagguguggacg

SEQ ID NO: 935275 - RNA, 22 nt, Human
gugcauuugacgaauacucacu

SEQ ID NO: 935276 - RNA, 22 nt, Human
gggagcuguaguccagauaccg

SEQ ID NO: 935277 - RNA, 22 nt, Human
auacaagacucagcacagacgg

SEQ ID NO: 935278 - RNA, 22 nt, Human
agccuucauaaucuugggcuuu

SEQ ID NO: 935279 - RNA, 22 nt, Human
aaaugcaauuguauguacucca

SEQ ID NO: 935280 - RNA, 22 nt, Human
aucuggcuuggguguggguagc

SEQ ID NO: 935281 - RNA, 22 nt, Human
aguggcagagguugacugcagu

SEQ ID NO: 935282 - RNA, 22 nt, Human
gcucugagccgggggccugucc

SEQ ID NO: 935283 - RNA, 19 nt, Human
acuuucuccaggaccuguu

SEQ ID NO: 935284 - RNA, 22 nt, Human
uucuauaagacucauauuucuu

SEQ ID NO: 935285 - RNA, 22 nt, Human
cugagccaguagucagggacaa

SEQ ID NO: 935286 - RNA, 22 nt, Human
ccagagcccgggaccuggacuu

SEQ ID NO: 935287 - RNA, 22 nt, Human
ugguaaaguguacugaauauga

SEQ ID NO: 935288 - RNA, 22 nt, Human
ccucugcucugguccaugugcu

SEQ ID NO: 935289 - RNA, 22 nt, Human
agagccuggacuuuucugagcc

SEQ ID NO: 935290 - RNA, 22 nt, Human
uccaugaggcagggaggcuggc

SEQ ID NO: 935291 - RNA, 21 nt, Human
agagcugggacuugccugaga

SEQ ID NO: 935292 - RNA, 22 nt, Human
agaaauguacgauguuaugcag

SEQ ID NO: 935293 - RNA, 22 nt, Human
cuggccaguugccuuccugggu

SEQ ID NO: 935294 - RNA, 22 nt, Human
ccucccacauccuagcucugcu

SEQ ID NO: 935295 - RNA, 22 nt, Human
uauuuuguuuuguauccacugu

SEQ ID NO: 935296 - RNA, 22 nt, Human
ucugagaggauuccugucccga

SEQ ID NO: 935297 - RNA, 22 nt, Human
ucuggcucuuugggugauugua

SEQ ID NO: 935298 - RNA, 22 nt, Human
ggcugccucaaagcucaagcuc

SEQ ID NO: 935299 - RNA, 22 nt, Human
ccaggagagcauugcacagagg

SEQ ID NO: 935300 - RNA, 22 nt, Human
ccagggugggguccaggaacca

SEQ ID NO: 935301 - RNA, 22 nt, Human
cucuggaguggguggccgggag

SEQ ID NO: 935302 - RNA, 22 nt, Human
ugauuuccacagucaggggugc

SEQ ID NO: 935303 - RNA, 22 nt, Human
ugagggaguuggguguauagga

SEQ ID NO: 935304 - RNA, 22 nt, Human
gguucacauauugagaguauuc

SEQ ID NO: 935305 - RNA, 22 nt, Human
aaauguaguauguugcauguau

SEQ ID NO: 935306 - RNA, 22 nt, Human
agagccugaggccaggaaaaug

SEQ ID NO: 935307 - RNA, 22 nt, Human
ucauacauaacuuguacaguga

SEQ ID NO: 935308 - RNA, 22 nt, Human
ucacauuuguuccucugcacuu

SEQ ID NO: 935309 - RNA, 22 nt, Human
cacuggugacuucugagcugga

SEQ ID NO: 935310 - RNA, 22 nt, Human
guguugaugacauuuuagaaac

SEQ ID NO: 935311 - RNA, 22 nt, Human
acauugaucagccucccaugca

SEQ ID NO: 935312 - RNA, 22 nt, Human
aagauacauaaagguagagucu

SEQ ID NO: 935313 - RNA, 22 nt, Human
aagacuguacauuuuccagucu

SEQ ID NO: 935314 - RNA, 22 nt, Human
uccauguguuuuccuguccaca

SEQ ID NO: 935315 - RNA, 22 nt, Human
cuuucucuguguuucacaugcu

SEQ ID NO: 935316 - RNA, 22 nt, Human
uagggauggcagcauguagcuu

SEQ ID NO: 935317 - RNA, 22 nt, Human
uggcacugaaaaaggagagguu

SEQ ID NO: 935318 - RNA, 23 nt, Human
uggacgccgacuuuggaggcgcu

SEQ ID NO: 935319 - RNA, 22 nt, Human
aauccaggguguggccuuucca

SEQ ID NO: 935320 - RNA, 22 nt, Human
gcccuggccuucaucucagaca

SEQ ID NO: 935321 - RNA, 22 nt, Human
aguccaugguucugacucaucu

SEQ ID NO: 935322 - RNA, 22 nt, Human
uggcagcuaucuuuaaugagau

SEQ ID NO: 935323 - RNA, 22 nt, Human
guggccugccagcagauggcgc

SEQ ID NO: 935324 - RNA, 22 nt, Human
ucaaugauagacaagaucuaag

SEQ ID NO: 935325 - RNA, 22 nt, Human
ugagguguguccccagggaggu

SEQ ID NO: 935326 - RNA, 22 nt, Human
aacauuuaugauugagguaaau

SEQ ID NO: 935327 - RNA, 22 nt, Human
gcaugugucuccccaguggagg

SEQ ID NO: 935328 - RNA, 22 nt, Human
acacauauauacauauuugugc

SEQ ID NO: 935329 - RNA, 22 nt, Human
ugcuuuuaagaacaaugcugcu

SEQ ID NO: 935330 - RNA, 22 nt, Human
ggaugcacgaaggcgccucgga

SEQ ID NO: 935331 - RNA, 22 nt, Human
gcuggcaggagccuuucccuuu

SEQ ID NO: 935332 - RNA, 18 nt, Human
gcugagguggugucagag

SEQ ID NO: 935333 - RNA, 22 nt, Human
uugcauguguaauuuuucuaaa

SEQ ID NO: 935334 - RNA, 22 nt, Human
cagagccucagaauccugugga

SEQ ID NO: 935335 - RNA, 22 nt, Human
uccucaggcggugaggaggggc

SEQ ID NO: 935336 - RNA, 22 nt, Human
aaucauaauucaaauaagcuua

SEQ ID NO: 935337 - RNA, 21 nt, Human
agguggggcugcaccucugcu

SEQ ID NO: 935338 - RNA, 22 nt, Human
gccugagcuacuagggagucug

SEQ ID NO: 935339 - RNA, 22 nt, Human
ucuuuacaucacaauuguaugg

SEQ ID NO: 935340 - RNA, 22 nt, Human
agucuucacucuucacuacuau

SEQ ID NO: 935341 - RNA, 22 nt, Human
ucaguguagcagacuuguagcc

SEQ ID NO: 935342 - RNA, 22 nt, Human
cuccagggaggucugcaggacu

SEQ ID NO: 935343 - RNA, 22 nt, Human
uauuucagguauggugugaaau

SEQ ID NO: 935344 - RNA, 22 nt, Human
ucauuucaaguucugacagcua

SEQ ID NO: 935345 - RNA, 22 nt, Human
uggcccugcacccagagcaguu

SEQ ID NO: 935346 - RNA, 22 nt, Human
guggccugaugccagcccugug

SEQ ID NO: 935347 - RNA, 22 nt, Human
ccagagcccagggucaugcagg

SEQ ID NO: 935348 - RNA, 22 nt, Human
caaauauuccagguacaucccu

SEQ ID NO: 935349 - RNA, 22 nt, Human
uggcacaaaucuagucccuggu

SEQ ID NO: 935350 - RNA, 22 nt, Human
caguagcaggcaggugcuuuug

SEQ ID NO: 935351 - RNA, 22 nt, Human
accugccuaucagcugccugcu

SEQ ID NO: 935352 - RNA, 22 nt, Human
caguagcacucugucagugaag

SEQ ID NO: 935353 - RNA, 22 nt, Human
cugcagaggucuugcugauggu

SEQ ID NO: 935354 - RNA, 22 nt, Human
agggcugcuccuccuucaggcc

SEQ ID NO: 935355 - RNA, 22 nt, Human
cugcagcuuuggaaaccuguuu

SEQ ID NO: 935356 - RNA, 22 nt, Human
aaacauucucagcccugcuugc

SEQ ID NO: 935357 - RNA, 22 nt, Human
ucugaaagaagggcagucuuuu

SEQ ID NO: 935358 - RNA, 22 nt, Human
agaaacugaauuauuucugagg

SEQ ID NO: 935359 - RNA, 22 nt, Human
agucaguguagaaagcccaggc

SEQ ID NO: 935360 - RNA, 22 nt, Human
uaagauaugguaggaaguuugg

SEQ ID NO: 935361 - RNA, 22 nt, Human
ugcucccaggcauucucuguug

SEQ ID NO: 935362 - RNA, 22 nt, Human
cugcagcugucucuacugggca

SEQ ID NO: 935363 - RNA, 22 nt, Human
uugcugaauugaauccuuuggu

SEQ ID NO: 935364 - RNA, 22 nt, Human
caggugggccgggguuuguucu

SEQ ID NO: 935365 - RNA, 22 nt, Human
gcuccuggauguucaagucggc

SEQ ID NO: 935366 - RNA, 22 nt, Human
uuauuaguguugauauuaggau

SEQ ID NO: 935367 - RNA, 22 nt, Human
aaugcuguaaagaugcuaucug

SEQ ID NO: 935368 - RNA, 22 nt, Human
cacaguggauugggugaugccc

SEQ ID NO: 935369 - RNA, 22 nt, Human
uggccucucuaccaggcagccu

SEQ ID NO: 935370 - RNA, 22 nt, Human
guuccaggcaagugggauagga

SEQ ID NO: 935371 - RNA, 22 nt, Human
ucccuggacagccuugccuggg

SEQ ID NO: 935372 - RNA, 22 nt, Human
gugcugugugauccaugcuggc

SEQ ID NO: 935373 - RNA, 22 nt, Human
ugaauggucacugagcaucugu

SEQ ID NO: 935374 - RNA, 22 nt, Human
guggcugcucgggcuccggccc

SEQ ID NO: 935375 - RNA, 22 nt, Human
agucucugucguagaucagcgu

SEQ ID NO: 935376 - RNA, 22 nt, Human
ugaaccaggaggcagccagcac

SEQ ID NO: 935377 - RNA, 20 nt, Human
agaauucuuacccuuugaug

SEQ ID NO: 935378 - RNA, 21 nt, Human
gggugggaggacacagcaggc

SEQ ID NO: 935379 - RNA, 22 nt, Human
gggagguucuguucgcacuuga

SEQ ID NO: 935380 - RNA, 22 nt, Human
uccuggagaauccugccaccug

SEQ ID NO: 935381 - RNA, 22 nt, Human
ugaacaacugcaaaaaucucca

SEQ ID NO: 935382 - RNA, 19 nt, Human
acucaagucuaaugaaauc

SEQ ID NO: 935383 - RNA, 22 nt, Human
ccagcugcugugcagggaggcu

SEQ ID NO: 935384 - RNA, 22 nt, Human
ugaaggccuaacuuccagugcu

SEQ ID NO: 935385 - RNA, 22 nt, Human
cugugucucauccgccucuggc

SEQ ID NO: 935386 - RNA, 20 nt, Human
acuccugguaacuuuuguga

SEQ ID NO: 935387 - RNA, 19 nt, Human
uggagacugagagugagca

SEQ ID NO: 935388 - RNA, 22 nt, Human
ugagagugauugguucgaaugu

SEQ ID NO: 935389 - RNA, 22 nt, Human
guuugcauuccaauuuagggga

SEQ ID NO: 935390 - RNA, 22 nt, Human
uccuggaggggacagcaugggc

SEQ ID NO: 935391 - RNA, 22 nt, Human
uucucuagguuuuagaugaaga

SEQ ID NO: 935392 - RNA, 22 nt, Human
agcuuccaauuucuccaagaga

SEQ ID NO: 935393 - RNA, 22 nt, Human
agcagccacccagcugcucauu

SEQ ID NO: 935394 - RNA, 22 nt, Human
acauuucuucccuuuagcagaa

SEQ ID NO: 935395 - RNA, 22 nt, Human
caggcagcugcgacaagagagc

SEQ ID NO: 935396 - RNA, 22 nt, Human
uguggcccagaugagugugcua

SEQ ID NO: 935397 - RNA, 22 nt, Human
gcuucuggaggagcugggcuga

SEQ ID NO: 935398 - RNA, 22 nt, Human
ucacuguaucauguugcacuua

SEQ ID NO: 935399 - RNA, 22 nt, Human
aggcucagcugguggugaucgc

SEQ ID NO: 935400 - RNA, 21 nt, Human
ggagauggguaucgccugggc

SEQ ID NO: 935401 - RNA, 22 nt, Human
cuuguagaauugaaauggucuc

SEQ ID NO: 935402 - RNA, 22 nt, Human
uugaaaggugacauuguuagag

SEQ ID NO: 935403 - RNA, 22 nt, Human
uacaggaggauuaucaaaggau

SEQ ID NO: 935404 - RNA, 22 nt, Human
gcccucuggcagccuuggcugg

SEQ ID NO: 935405 - RNA, 22 nt, Human
ccaggcugggcuacaaguugag

SEQ ID NO: 935406 - RNA, 22 nt, Human
aaaugcauugguuucuacuugu

SEQ ID NO: 935407 - RNA, 22 nt, Human
uucaaauacauucuuugccacu

SEQ ID NO: 935408 - RNA, 22 nt, Human
aaacaccagcacuguuuacaaa

SEQ ID NO: 935409 - RNA, 22 nt, Human
uccaggagguugagugaguucc

SEQ ID NO: 935410 - RNA, 22 nt, Human
aggccaaagcaagacccuguaa

SEQ ID NO: 935411 - RNA, 22 nt, Human
ugcagaagaauguaggcauaag

SEQ ID NO: 935412 - RNA, 22 nt, Human
ugaacucgggaggaggcugcag

SEQ ID NO: 935413 - RNA, 22 nt, Human
gaccugccugagcugccucugc

SEQ ID NO: 935414 - RNA, 22 nt, Human
gccaggcagcaggaagccagug

SEQ ID NO: 935415 - RNA, 22 nt, Human
aguuauuacucuuuaacauauu

SEQ ID NO: 935416 - RNA, 22 nt, Human
uaaaauugcggugaauauuucc

SEQ ID NO: 935417 - RNA, 22 nt, Human
uucucuuuugugaugugagaug

SEQ ID NO: 935418 - RNA, 22 nt, Human
uuccagauuucuacacaagacc

SEQ ID NO: 935419 - RNA, 22 nt, Human
cggccaagccggggccccgaag

SEQ ID NO: 935420 - RNA, 22 nt, Human
augucuuuggcuuugacauggc

SEQ ID NO: 935421 - RNA, 20 nt, Human
aucagacuugcauuucagga

SEQ ID NO: 935422 - RNA, 22 nt, Human
gagaaagcuucuuucccacagg

SEQ ID NO: 935423 - RNA, 22 nt, Human
cauguguaugcauucauacaua

SEQ ID NO: 935424 - RNA, 22 nt, Human
ggcucuggagcacagacgucug

SEQ ID NO: 935425 - RNA, 22 nt, Human
cagccugcccuggaagcccagc

SEQ ID NO: 935426 - RNA, 22 nt, Human
ugcugcauuuaucuucucaaac

SEQ ID NO: 935427 - RNA, 22 nt, Human
aaaucaguucacguucugaggu

SEQ ID NO: 935428 - RNA, 22 nt, Human
cccaggucuaugccagcucuga

SEQ ID NO: 935429 - RNA, 22 nt, Human
auucauuuagguauucacuuac

SEQ ID NO: 935430 - RNA, 22 nt, Human
agagaggcgaguuaccugugcu

SEQ ID NO: 935431 - RNA, 22 nt, Human
cagagagcuuagugugcugcau

SEQ ID NO: 935432 - RNA, 22 nt, Human
gaggaacccagcugggguugcc

SEQ ID NO: 935433 - RNA, 20 nt, Human
gggugagauguaggagaggg

SEQ ID NO: 935434 - RNA, 19 nt, Human
ccuuggaguuccaggugga

SEQ ID NO: 935435 - RNA, 22 nt, Human
aggccaaagcucaccugcagcu

SEQ ID NO: 935436 - RNA, 22 nt, Human
cagggccuuauccugccauuga

SEQ ID NO: 935437 - RNA, 22 nt, Human
aaagauuugaaauuaggcauca

SEQ ID NO: 935438 - RNA, 22 nt, Human
ccugaggcccuggcugugcuga

SEQ ID NO: 935439 - RNA, 22 nt, Human
gagccaggguuugaaacuagac

SEQ ID NO: 935440 - RNA, 22 nt, Human
agagguagagguugcagugagc

SEQ ID NO: 935441 - RNA, 22 nt, Human
cuagccaugggcauuaaaggua

SEQ ID NO: 935442 - RNA, 22 nt, Human
cacugccuggaaggagagacau

SEQ ID NO: 935443 - RNA, 22 nt, Human
aucuucucauguguaaugaggu

SEQ ID NO: 935444 - RNA, 22 nt, Human
cugaggccuaagacaugaauga

SEQ ID NO: 935445 - RNA, 22 nt, Human
gagaaagauguaggcugggagg

SEQ ID NO: 935446 - RNA, 22 nt, Human
gccagagacacuuggagguaga

SEQ ID NO: 935447 - RNA, 22 nt, Human
ggucccaggauugguugcgcag

SEQ ID NO: 935448 - RNA, 22 nt, Human
cuucugugauuugguuaggaua

SEQ ID NO: 935449 - RNA, 22 nt, Human
acaagcaugggcuuugacauca

SEQ ID NO: 935450 - RNA, 22 nt, Human
aggcuggggaauugaauuugcu

SEQ ID NO: 935451 - RNA, 22 nt, Human
guucacaagaugugguggggag

SEQ ID NO: 935452 - RNA, 20 nt, Human
ccugccuguguuugugauga

SEQ ID NO: 935453 - RNA, 22 nt, Human
cagcugccacaggacuuucuga

SEQ ID NO: 935454 - RNA, 22 nt, Human
ggcaggcagaggcugagacagg

SEQ ID NO: 935455 - RNA, 22 nt, Human
uuagauaacaguagaauaucaa

SEQ ID NO: 935456 - RNA, 22 nt, Human
gcccaggccggagagcagugcu

SEQ ID NO: 935457 - RNA, 22 nt, Human
uggcaacaccuggaagacaugg

SEQ ID NO: 935458 - RNA, 22 nt, Human
ccuugcaggggaacaggcagug

SEQ ID NO: 935459 - RNA, 22 nt, Human
gcuggccauggggagugaggag

SEQ ID NO: 935460 - RNA, 22 nt, Human
uuauguaccugaauuaguaaag

SEQ ID NO: 935461 - RNA, 22 nt, Human
agcccaggugagggguucgaaa

SEQ ID NO: 935462 - RNA, 22 nt, Human
gcuugggagaggguccccagga

SEQ ID NO: 935463 - RNA, 22 nt, Human
uuuauguaauuucauaggugug

SEQ ID NO: 935464 - RNA, 22 nt, Human
gggcucuguccauuccuucaua

SEQ ID NO: 935465 - RNA, 22 nt, Human
gagcucugggaaacaaagugua

SEQ ID NO: 935466 - RNA, 22 nt, Human
ugauacagucagcucacaauug

SEQ ID NO: 935467 - RNA, 22 nt, Human
uggagcugaacuuugaggccag

SEQ ID NO: 935468 - RNA, 22 nt, Human
uaugcacauugguuuccucauu

SEQ ID NO: 935469 - RNA, 22 nt, Human
acaguaauaaguguuggugagg

SEQ ID NO: 935470 - RNA, 22 nt, Human
uugcccagaguccacagcguac

SEQ ID NO: 935471 - RNA, 22 nt, Human
accaggaggccuugguucugag

SEQ ID NO: 935472 - RNA, 22 nt, Human
ccaggaggcagaaguugcagug

SEQ ID NO: 935473 - RNA, 22 nt, Human
caaaaguucucacccagacaug

SEQ ID NO: 935474 - RNA, 22 nt, Human
agcagccaggaaucugcagagc

SEQ ID NO: 935475 - RNA, 22 nt, Human
ggcaaggccugcagcucagugu

SEQ ID NO: 935476 - RNA, 23 nt, Human
uccugagaugagacagugcugcc

SEQ ID NO: 935477 - RNA, 21 nt, Human
auuauuauuucuguguccagc

SEQ ID NO: 935478 - RNA, 19 nt, Human
aguggcagaucuggaagua

SEQ ID NO: 935479 - RNA, 22 nt, Human
uuuccucugagugagcugggag

SEQ ID NO: 935480 - RNA, 22 nt, Human
ucuggcucuaacuaggcaucag

SEQ ID NO: 935481 - RNA, 22 nt, Human
uugaccauaccuccaggcaguu

SEQ ID NO: 935482 - RNA, 22 nt, Human
auuagguugugcuuuguggaca

SEQ ID NO: 935483 - RNA, 22 nt, Human
aggaggcacucacucucagggu

SEQ ID NO: 935484 - RNA, 22 nt, Human
aaaggccacacugcucuuucuc

SEQ ID NO: 935485 - RNA, 22 nt, Human
ccugguggacagcagccagcag

SEQ ID NO: 935486 - RNA, 17 nt, Human
gcuuccugugcugggga

SEQ ID NO: 935487 - RNA, 21 nt, Human
ccacaggggcuccccugucag

SEQ ID NO: 935488 - RNA, 22 nt, Human
agccaaggcagcuagagcucug

SEQ ID NO: 935489 - RNA, 22 nt, Human
ggcuggcuggcugguagacaag

SEQ ID NO: 935490 - RNA, 22 nt, Human
ggcugccauaacagaguaccac

SEQ ID NO: 935491 - RNA, 22 nt, Human
aaaaucugcuuccuuuuacaga

SEQ ID NO: 935492 - RNA, 22 nt, Human
uugaaauaucaaguuauuagug

SEQ ID NO: 935493 - RNA, 22 nt, Human
cagcaggcguugggagaaagac

SEQ ID NO: 935494 - RNA, 22 nt, Human
gcaauaaauaacauggaagaca

SEQ ID NO: 935495 - RNA, 22 nt, Human
accaaggagaaggugcaagcuu

SEQ ID NO: 935496 - RNA, 22 nt, Human
uagauuucucauucauagauug

SEQ ID NO: 935497 - RNA, 22 nt, Human
ggcagagguagcuggaaccagg

SEQ ID NO: 935498 - RNA, 22 nt, Human
ugucagggcaugcgguccagcc

SEQ ID NO: 935499 - RNA, 20 nt, Human
ucagggcaugggacagcccc

SEQ ID NO: 935500 - RNA, 22 nt, Human
aauaaaauggucaguuuucuca

SEQ ID NO: 935501 - RNA, 22 nt, Human
gcagagcugucuaagucacuuc

SEQ ID NO: 935502 - RNA, 22 nt, Human
uucugaggcacuggcucuccca

SEQ ID NO: 935503 - RNA, 22 nt, Human
agggcagcagcccauggcucug

SEQ ID NO: 935504 - RNA, 22 nt, Human
acacauuucuaaauuuuuaccg

SEQ ID NO: 935505 - RNA, 19 nt, Human
agccagggugagaaggagc

SEQ ID NO: 935506 - RNA, 22 nt, Human
cuuauguaaacuacagauaaua

SEQ ID NO: 935507 - RNA, 22 nt, Human
gcagccacugggagugcuuaua

SEQ ID NO: 935508 - RNA, 22 nt, Human
uuucuauaacuggacuggauug

SEQ ID NO: 935509 - RNA, 17 nt, Human
ugcugccaagucccaac

SEQ ID NO: 935510 - RNA, 22 nt, Human
cugagggugcuauucuugccuu

SEQ ID NO: 935511 - RNA, 20 nt, Human
aggcagagcgcacuuuuaga

SEQ ID NO: 935512 - RNA, 22 nt, Human
agcagcuguacuuucaucuguu

SEQ ID NO: 935513 - RNA, 22 nt, Human
gccucugcggggcccgagcccg

SEQ ID NO: 935514 - RNA, 22 nt, Human
aguaaaucagaccucauuaugu

SEQ ID NO: 935515 - RNA, 22 nt, Human
uugaaagugccaaguccuagug

SEQ ID NO: 935516 - RNA, 17 nt, Human
aagacagaagccaugag

SEQ ID NO: 935517 - RNA, 22 nt, Human
cagcugccccuccagggcuggg

SEQ ID NO: 935518 - RNA, 22 nt, Human
acaauacaggcuucuggacuua

SEQ ID NO: 935519 - RNA, 22 nt, Human
uucugagcugcaacacuaacau

SEQ ID NO: 935520 - RNA, 22 nt, Human
caggcagcaucagucugcugua

SEQ ID NO: 935521 - RNA, 22 nt, Human
gcugccuggagcucagccugcc

SEQ ID NO: 935522 - RNA, 22 nt, Human
gccuggcucugagggagcuccu

SEQ ID NO: 935523 - RNA, 22 nt, Human
ccagggugggaggcugaaggcg

SEQ ID NO: 935524 - RNA, 20 nt, Human
acaggggcagcacaauaaug

SEQ ID NO: 935525 - RNA, 22 nt, Human
agugcuuugugcucucacugca

SEQ ID NO: 935526 - RNA, 22 nt, Human
gggcuucucuuaugcuaacugg

SEQ ID NO: 935527 - RNA, 23 nt, Human
gugagucuugccuuugcugugga

SEQ ID NO: 935528 - RNA, 22 nt, Human
ggcaugggccgaggugccuccu

SEQ ID NO: 935529 - RNA, 22 nt, Human
gaggcccuccagcugucagcug

SEQ ID NO: 935530 - RNA, 22 nt, Human
cucuggaguucuucaagcuacu

SEQ ID NO: 935531 - RNA, 22 nt, Human
cagggcuguggcuuugugcugu

SEQ ID NO: 935532 - RNA, 22 nt, Human
aucuggcucacuuagucuagga

SEQ ID NO: 935533 - RNA, 22 nt, Human
aacugcuggggaggccaaacuc

SEQ ID NO: 935534 - RNA, 22 nt, Human
uguacaaugccagggaacacca

SEQ ID NO: 935535 - RNA, 22 nt, Human
ugugggcucccccucacucugu

SEQ ID NO: 935536 - RNA, 22 nt, Human
caaugauggcuaggcagcugcu

SEQ ID NO: 935537 - RNA, 22 nt, Human
gaagagcugcaguuuccugggc

SEQ ID NO: 935538 - RNA, 22 nt, Human
ggggagugacgcagggccauag

SEQ ID NO: 935539 - RNA, 22 nt, Human
uggcucagcugacucggcuucu

SEQ ID NO: 935540 - RNA, 22 nt, Human
gauuucaauccagcuuucuucu

SEQ ID NO: 935541 - RNA, 22 nt, Human
aagcugccuuccaugugaggaa

SEQ ID NO: 935542 - RNA, 22 nt, Human
gagccucguggcggccacugcg

SEQ ID NO: 935543 - RNA, 22 nt, Human
guguccaucagcagccacugug

SEQ ID NO: 935544 - RNA, 22 nt, Human
gccaggagaaaaggcgaaugau

SEQ ID NO: 935545 - RNA, 19 nt, Human
ccuggaggugaagguucuc

SEQ ID NO: 935546 - RNA, 22 nt, Human
ucagggcacaggccuguggguu

SEQ ID NO: 935547 - RNA, 22 nt, Human
gucacuggggccacaugcagaa

SEQ ID NO: 935548 - RNA, 22 nt, Human
cccagcagaccgcugugauggc

SEQ ID NO: 935549 - RNA, 22 nt, Human
caggcagcagaggaguguggga

SEQ ID NO: 935550 - RNA, 22 nt, Human
accuuauuuugaaauagauugu

SEQ ID NO: 935551 - RNA, 22 nt, Human
acugucaccaucagagcgggaa

SEQ ID NO: 935552 - RNA, 22 nt, Human
uauuccagguuucuuguuguau

SEQ ID NO: 935553 - RNA, 22 nt, Human
auguacaguggaaacuaacaaa

SEQ ID NO: 935554 - RNA, 22 nt, Human
uuaugcuaguauaguccuuaga

SEQ ID NO: 935555 - RNA, 22 nt, Human
uuuccucuccggggccuccagg

SEQ ID NO: 935556 - RNA, 22 nt, Human
aggugaaguugaggaggcagaa

SEQ ID NO: 935557 - RNA, 22 nt, Human
ggaaaaggccacagggacacau

SEQ ID NO: 935558 - RNA, 22 nt, Human
cacaggagcuguggggcagugu

SEQ ID NO: 935559 - RNA, 22 nt, Human
gaggcagcaaaauauaucauaa

SEQ ID NO: 935560 - RNA, 22 nt, Human
cagacacagcaauucuguguug

SEQ ID NO: 935561 - RNA, 22 nt, Human
cugccucuugacagaucguggc

SEQ ID NO: 935562 - RNA, 22 nt, Human
cccuggagcuagucugagcaga

SEQ ID NO: 935563 - RNA, 22 nt, Human
gagagugaaggcuucccagcaa

SEQ ID NO: 935564 - RNA, 22 nt, Human
gaggagaggcuggacgcgguga

SEQ ID NO: 935565 - RNA, 22 nt, Human
cuggcagcucugagucccuucu

SEQ ID NO: 935566 - RNA, 22 nt, Human
aguuucauauuaccaugucacc

SEQ ID NO: 935567 - RNA, 22 nt, Human
cccaggagagaggggauaaagc

SEQ ID NO: 935568 - RNA, 20 nt, Human
cagagccaagagcagcaucu

SEQ ID NO: 935569 - RNA, 22 nt, Human
ucacuggggccuuuggucagga

SEQ ID NO: 935570 - RNA, 22 nt, Human
cucuccagccacagaagcugcu

SEQ ID NO: 935571 - RNA, 22 nt, Human
gagccuggccuccugccucagc

SEQ ID NO: 935572 - RNA, 22 nt, Human
gagugcaguuggggugagggga

SEQ ID NO: 935573 - RNA, 22 nt, Human
aacuagaacgucuaguugcugg

SEQ ID NO: 935574 - RNA, 22 nt, Human
aguucucaagacaauuaccugu

SEQ ID NO: 935575 - RNA, 22 nt, Human
cuguaugaggaucagacuggac

SEQ ID NO: 935576 - RNA, 22 nt, Human
auacaaagacaaaucucaaucu

SEQ ID NO: 935577 - RNA, 22 nt, Human
ucuugauuacaaauaacaucau

SEQ ID NO: 935578 - RNA, 22 nt, Human
gggcagcuggcuuauagguuug

SEQ ID NO: 935579 - RNA, 22 nt, Human
uauaaagaaguguaaacaggaa

SEQ ID NO: 935580 - RNA, 22 nt, Human
uucccaggcugugcuaccagag

SEQ ID NO: 935581 - RNA, 23 nt, Human
acagaggcuuaaaugaguggcag

SEQ ID NO: 935582 - RNA, 22 nt, Human
caaaugcagucccuuuguugcu

SEQ ID NO: 935583 - RNA, 22 nt, Human
gaggagaggccaucguuguuau

SEQ ID NO: 935584 - RNA, 22 nt, Human
gucuucuuuaaccuacuaaagc

SEQ ID NO: 935585 - RNA, 22 nt, Human
acagagcaauaacagggagagg

SEQ ID NO: 935586 - RNA, 22 nt, Human
auaaguucagguaaagaaauca

SEQ ID NO: 935587 - RNA, 22 nt, Human
ugccaggaggaggugggacaga

SEQ ID NO: 935588 - RNA, 22 nt, Human
cugggagaugacucagagcagg

SEQ ID NO: 935589 - RNA, 22 nt, Human
aaaucacuaaguuauagugugg

SEQ ID NO: 935590 - RNA, 22 nt, Human
gccuucagcggccgcucgcugc

SEQ ID NO: 935591 - RNA, 22 nt, Human
caaauucucuuacuguuugaca

SEQ ID NO: 935592 - RNA, 22 nt, Human
acagaccaaaaaaggauauugg

SEQ ID NO: 935593 - RNA, 22 nt, Human
uucugucacuuaggaggucaua

SEQ ID NO: 935594 - RNA, 22 nt, Human
ggcagcuuucucacccaugacc

SEQ ID NO: 935595 - RNA, 22 nt, Human
gacagggcgagacucagucuca

SEQ ID NO: 935596 - RNA, 22 nt, Human
cccaggaauuggaggcugcagu

SEQ ID NO: 935597 - RNA, 22 nt, Human
uccugccuucauacugcuguau

SEQ ID NO: 935598 - RNA, 22 nt, Human
gcagacauuuugaaucuaggcu

SEQ ID NO: 935599 - RNA, 22 nt, Human
gcagccacucucauuccacgug

SEQ ID NO: 935600 - RNA, 22 nt, Human
uccauuuuagagaugaagaaac

SEQ ID NO: 935601 - RNA, 22 nt, Human
agaggaugguugaggaagaccu

SEQ ID NO: 935602 - RNA, 22 nt, Human
gugggagcugcuaccuccuucc

SEQ ID NO: 935603 - RNA, 22 nt, Human
gagcagaugugugccaggaugc

SEQ ID NO: 935604 - RNA, 22 nt, Human
gcucaagagagaugcaguucuu

SEQ ID NO: 935605 - RNA, 22 nt, Human
gcaggcucuucuuucugcccag

SEQ ID NO: 935606 - RNA, 19 nt, Human
cagucccaaauucuuguca

SEQ ID NO: 935607 - RNA, 22 nt, Human
aaugaacacagcccucuacuuu

SEQ ID NO: 935608 - RNA, 22 nt, Human
uucuaugccauguucagcuacu

SEQ ID NO: 935609 - RNA, 22 nt, Human
gucaucuuaucauuguugcugu

SEQ ID NO: 935610 - RNA, 22 nt, Human
ggcagcuuguccuggaggaugg

SEQ ID NO: 935611 - RNA, 22 nt, Human
caugggcucuucuggacugcac

SEQ ID NO: 935612 - RNA, 22 nt, Human
agucucagaguaccugagggac

SEQ ID NO: 935613 - RNA, 22 nt, Human
auacuguagaggcauagcuagu

SEQ ID NO: 935614 - RNA, 22 nt, Human
agugcugucccgacaacugagg

SEQ ID NO: 935615 - RNA, 22 nt, Human
aaggugucacugggacaggaaa

SEQ ID NO: 935616 - RNA, 22 nt, Human
uccagucaggcugaauucaagg

SEQ ID NO: 935617 - RNA, 22 nt, Human
auugacaagcaguaugucuuag

SEQ ID NO: 935618 - RNA, 20 nt, Human
aggcucugcauuucugagug

SEQ ID NO: 935619 - RNA, 22 nt, Human
ucugucaggagauuggcagcug

SEQ ID NO: 935620 - RNA, 22 nt, Human
ucagggacugcagagggaagcu

SEQ ID NO: 935621 - RNA, 22 nt, Human
gacuccugccuccucuguuugc

SEQ ID NO: 935622 - RNA, 22 nt, Human
cagguggcaugacugccuacaa

SEQ ID NO: 935623 - RNA, 22 nt, Human
ucuuuuggaaaugaugugcagg

SEQ ID NO: 935624 - RNA, 22 nt, Human
ucaaggugcugugcugugcuag

SEQ ID NO: 935625 - RNA, 22 nt, Human
uaccuauagguacaauuacaag

SEQ ID NO: 935626 - RNA, 22 nt, Human
acugugugggccgcucacuggg

SEQ ID NO: 935627 - RNA, 22 nt, Human
ucucuggaguauaaccagggau

SEQ ID NO: 935628 - RNA, 21 nt, Human
ugcugccauagaccugaggga

SEQ ID NO: 935629 - RNA, 22 nt, Human
aguguuugagacacauuucacu

SEQ ID NO: 935630 - RNA, 22 nt, Human
gugugccaacaaaagacagugc

SEQ ID NO: 935631 - RNA, 22 nt, Human
ggaggacacuggcucugccuuc

SEQ ID NO: 935632 - RNA, 22 nt, Human
uacugccuggagcauuggugcu

SEQ ID NO: 935633 - RNA, 22 nt, Human
acagaaggcggggacaaggcgg

SEQ ID NO: 935634 - RNA, 22 nt, Human
agcagcucaaagccugcaagga

SEQ ID NO: 935635 - RNA, 20 nt, Human
gcagagcuguucugugggga

SEQ ID NO: 935636 - RNA, 22 nt, Human
agagccacugggagacagagca

SEQ ID NO: 935637 - RNA, 22 nt, Human
gaggaggaaacccuguuccucu

SEQ ID NO: 935638 - RNA, 22 nt, Human
aguccaaggagagacagcauuu

SEQ ID NO: 935639 - RNA, 22 nt, Human
ggaggggagucucccaaagccg

SEQ ID NO: 935640 - RNA, 22 nt, Human
uagcacaucuucuuggccugca

SEQ ID NO: 935641 - RNA, 22 nt, Human
cugucuuuuacuaucauuuacu

SEQ ID NO: 935642 - RNA, 22 nt, Human
cagccagggagcaaagaguuga

SEQ ID NO: 935643 - RNA, 22 nt, Human
gcuccuggcucucugagggcug

SEQ ID NO: 935644 - RNA, 19 nt, Human
ccaggagcaguggugagcu

SEQ ID NO: 935645 - RNA, 22 nt, Human
gcaggagagccagcaggcuucc

SEQ ID NO: 935646 - RNA, 22 nt, Human
ucacaaauauuuuaacaguagg

SEQ ID NO: 935647 - RNA, 22 nt, Human
agcugcugcgccucacccuggc

SEQ ID NO: 935648 - RNA, 22 nt, Human
aggauccuguauggagaagcug

SEQ ID NO: 935649 - RNA, 22 nt, Human
cagcaggguuaagugacucacc

SEQ ID NO: 935650 - RNA, 21 nt, Human
aggagcuguguuagcuggucg

SEQ ID NO: 935651 - RNA, 22 nt, Human
cuggcaggaaguuagaugguaa

SEQ ID NO: 935652 - RNA, 22 nt, Human
gagugucugaauuagagcacaa

SEQ ID NO: 935653 - RNA, 22 nt, Human
uugaaaggguuaaagugguaaa

SEQ ID NO: 935654 - RNA, 22 nt, Human
gaggggcuggguagggcaaccc

SEQ ID NO: 935655 - RNA, 22 nt, Human
uucauguguauggaacauuuuu

SEQ ID NO: 935656 - RNA, 22 nt, Human
uaggcagccagcaucaguuggg

SEQ ID NO: 935657 - RNA, 22 nt, Human
agcuucucaggagucugaggca

SEQ ID NO: 935658 - RNA, 22 nt, Human
ucccaggaggugcuuccuagga

SEQ ID NO: 935659 - RNA, 22 nt, Human
uaacauuagguagacauaagcc

SEQ ID NO: 935660 - RNA, 22 nt, Human
uccaggagacacccuugugugu

SEQ ID NO: 935661 - RNA, 22 nt, Human
gcuggcuguguuucaucucuga

SEQ ID NO: 935662 - RNA, 22 nt, Human
uggcagcacuagguacugagcu

SEQ ID NO: 935663 - RNA, 22 nt, Human
gcccaugcucucaggcgggccu

SEQ ID NO: 935664 - RNA, 22 nt, Human
acuuguuuacaagcaguucuga

SEQ ID NO: 935665 - RNA, 22 nt, Human
agauuucaauggauauugcaag

SEQ ID NO: 935666 - RNA, 22 nt, Human
uuagccauuaauguccugugca

SEQ ID NO: 935667 - RNA, 22 nt, Human
ggaaaaggccauuguuucucug

SEQ ID NO: 935668 - RNA, 22 nt, Human
cugcaggcucgaagacacggau

SEQ ID NO: 935669 - RNA, 23 nt, Human
uuugaaguugacugccuuccaga

SEQ ID NO: 935670 - RNA, 20 nt, Human
cagaaggucuaagcuuuaga

SEQ ID NO: 935671 - RNA, 22 nt, Human
ccagaggcuggggaaggauaca

SEQ ID NO: 935672 - RNA, 22 nt, Human
ggcuggaaguccaagaucaaga

SEQ ID NO: 935673 - RNA, 19 nt, Human
uccccagcaccucugaguc

SEQ ID NO: 935674 - RNA, 22 nt, Human
aaggcaggaugggaaaagauuu

SEQ ID NO: 935675 - RNA, 22 nt, Human
gcagacaucaagcacaggccca

SEQ ID NO: 935676 - RNA, 22 nt, Human
uuauuuacaacucuucucuucc

SEQ ID NO: 935677 - RNA, 22 nt, Human
aucagcaagauguaauuucuau

SEQ ID NO: 935678 - RNA, 22 nt, Human
uuaugggagcaauuggggaggu

SEQ ID NO: 935679 - RNA, 22 nt, Human
ggccugagucccaccuggcugu

SEQ ID NO: 935680 - RNA, 22 nt, Human
cuggccaauccauuaauuuguu

SEQ ID NO: 935681 - RNA, 22 nt, Human
ccucagggaaugggaggcuggg

SEQ ID NO: 935682 - RNA, 22 nt, Human
gcuguauuccugcacuguauag

SEQ ID NO: 935683 - RNA, 22 nt, Human
aagcagagcaagcguauuuauu

SEQ ID NO: 935684 - RNA, 22 nt, Human
uucaucaauguguuuaauaaug

SEQ ID NO: 935685 - RNA, 22 nt, Human
auagaacagaaacagaugcaca

SEQ ID NO: 935686 - RNA, 22 nt, Human
auacuuucugaccaauuaauug

SEQ ID NO: 935687 - RNA, 22 nt, Human
agggcuggagccacagcuggga

SEQ ID NO: 935688 - RNA, 22 nt, Human
acagguggcauaggcaguuuga

SEQ ID NO: 935689 - RNA, 22 nt, Human
gggaggucagggugccugcugg

SEQ ID NO: 935690 - RNA, 22 nt, Human
ggugaggcccagugaucugugu

SEQ ID NO: 935691 - RNA, 22 nt, Human
uguuggcagauugucuaggguu

SEQ ID NO: 935692 - RNA, 22 nt, Human
aauucacaugcaugucugugca

SEQ ID NO: 935693 - RNA, 22 nt, Human
ugucaucuucaucauaaguaaa

SEQ ID NO: 935694 - RNA, 22 nt, Human
ugaagcagauggucuggucauu

SEQ ID NO: 935695 - RNA, 22 nt, Human
ggcuggcuuucucuccgcaccu

SEQ ID NO: 935696 - RNA, 22 nt, Human
cuggccaguuguccuggcuugg

SEQ ID NO: 935697 - RNA, 22 nt, Human
cagagcuguccaaacccugaca

SEQ ID NO: 935698 - RNA, 22 nt, Human
gcccaggaagccaccgggaagu

SEQ ID NO: 935699 - RNA, 22 nt, Human
ggauggcagucugcaugagaaa

SEQ ID NO: 935700 - RNA, 22 nt, Human
ggagcugcuuugaucugaagaa

SEQ ID NO: 935701 - RNA, 22 nt, Human
ugcauugauagaaaaacaugga

SEQ ID NO: 935702 - RNA, 22 nt, Human
uggcugcuuguuuuagugaggc

SEQ ID NO: 935703 - RNA, 21 nt, Human
acagacagggccagugucccc

SEQ ID NO: 935704 - RNA, 22 nt, Human
ccacagugguucucaaccaggg

SEQ ID NO: 935705 - RNA, 22 nt, Human
cugagccagggccacacaugga

SEQ ID NO: 935706 - RNA, 22 nt, Human
agccuggaagaaccugaagucu

SEQ ID NO: 935707 - RNA, 22 nt, Human
aacaauaauugcgguucucuau

SEQ ID NO: 935708 - RNA, 22 nt, Human
ugucucugguauuaggugaaaa

SEQ ID NO: 935709 - RNA, 21 nt, Human
cagaggccucaugcucugugc

SEQ ID NO: 935710 - RNA, 22 nt, Human
uccucaggaugugggguagaau

SEQ ID NO: 935711 - RNA, 22 nt, Human
cuccaggccagggaaguggaca

SEQ ID NO: 935712 - RNA, 18 nt, Human
caggaugagugaugggga

SEQ ID NO: 935713 - RNA, 22 nt, Human
ucaaagucauggcuaguaauga

SEQ ID NO: 935714 - RNA, 19 nt, Human
cccagcuugaccaccugcu

SEQ ID NO: 935715 - RNA, 22 nt, Human
aagggagguaaagcuauuuaaa

SEQ ID NO: 935716 - RNA, 22 nt, Human
ugaaggccagcagagugaaggc

SEQ ID NO: 935717 - RNA, 22 nt, Human
uaucuguuaugggcugaauugc

SEQ ID NO: 935718 - RNA, 22 nt, Human
uugaaaggugaacaugaugcac

SEQ ID NO: 935719 - RNA, 22 nt, Human
uagccgggugugguggaacucc

SEQ ID NO: 935720 - RNA, 22 nt, Human
uaacuccaucucugugucugcu

SEQ ID NO: 935721 - RNA, 22 nt, Human
gauggcagucaaccaggugagg

SEQ ID NO: 935722 - RNA, 22 nt, Human
aggaaaaucgagucuggaggca

SEQ ID NO: 935723 - RNA, 22 nt, Human
uacaaaugaccauagccacuua

SEQ ID NO: 935724 - RNA, 22 nt, Human
auuuagaaguuggagggcaaga

SEQ ID NO: 935725 - RNA, 22 nt, Human
gcugcuggcaucuagggggugg

SEQ ID NO: 935726 - RNA, 22 nt, Human
uggcagcagccauggaaggccc

SEQ ID NO: 935727 - RNA, 22 nt, Human
aaggcugagagucacaguccua

SEQ ID NO: 935728 - RNA, 22 nt, Human
ugcaaaugaguugcagaucagg

SEQ ID NO: 935729 - RNA, 22 nt, Human
ucucuucugaaaccugucuuua

SEQ ID NO: 935730 - RNA, 22 nt, Human
auuuguaacacgugacagguug

SEQ ID NO: 935731 - RNA, 22 nt, Human
agggccagaggcaccuugcagc

SEQ ID NO: 935732 - RNA, 22 nt, Human
cuggugugauugagcccaggug

SEQ ID NO: 935733 - RNA, 22 nt, Human
ggccucugguucguggugaccu

SEQ ID NO: 935734 - RNA, 19 nt, Human
auaaggcaggaggaaauuu

SEQ ID NO: 935735 - RNA, 22 nt, Human
ccugcagcuccggauuucuggg

SEQ ID NO: 935736 - RNA, 22 nt, Human
cagucucucagcuuucagcugu

SEQ ID NO: 935737 - RNA, 22 nt, Human
aggagggugauccgggcugguc

SEQ ID NO: 935738 - RNA, 22 nt, Human
cagcugagcaucacuagucugg

SEQ ID NO: 935739 - RNA, 22 nt, Human
aggcucaguuugguuuccauug

SEQ ID NO: 935740 - RNA, 22 nt, Human
cagggagcuggcuggcgugagu

SEQ ID NO: 935741 - RNA, 19 nt, Human
ggaggccuggguauuugcc

SEQ ID NO: 935742 - RNA, 22 nt, Human
uggcucaguuucugcccagcug

SEQ ID NO: 935743 - RNA, 22 nt, Human
cugccugcuuaccaugcaucag

SEQ ID NO: 935744 - RNA, 22 nt, Human
uuuguaugugauaagacuauuc

SEQ ID NO: 935745 - RNA, 22 nt, Human
cagcacuggggggauucggagc

SEQ ID NO: 935746 - RNA, 20 nt, Human
cugagccaacucucuucuug

SEQ ID NO: 935747 - RNA, 22 nt, Human
uucuucuuuaucucaguauccu

SEQ ID NO: 935748 - RNA, 22 nt, Human
aagcuccccgaaacccaccucu

SEQ ID NO: 935749 - RNA, 22 nt, Human
agcagagguguuuauuauggga

SEQ ID NO: 935750 - RNA, 22 nt, Human
ggaagagccuggggugucaggc

SEQ ID NO: 935751 - RNA, 22 nt, Human
ggcagggugccuggcuccuguu

SEQ ID NO: 935752 - RNA, 22 nt, Human
auaaaaccaaagcagcaguguu

SEQ ID NO: 935753 - RNA, 22 nt, Human
ugucauuuaguccucugugugu

SEQ ID NO: 935754 - RNA, 22 nt, Human
cugugauuguuaguuccuauac

SEQ ID NO: 935755 - RNA, 22 nt, Human
aaagccuuggucaucugguucc

SEQ ID NO: 935756 - RNA, 22 nt, Human
gucugucucccugugacugaga

SEQ ID NO: 935757 - RNA, 22 nt, Human
cugcagugaaaucaggaagcaa

SEQ ID NO: 935758 - RNA, 22 nt, Human
aaauguagaccuauagggaccu

SEQ ID NO: 935759 - RNA, 22 nt, Human
aggcucagagaugaguaagcac

SEQ ID NO: 935760 - RNA, 22 nt, Human
ccauggcauuuuaugugucuua

SEQ ID NO: 935761 - RNA, 22 nt, Human
aaaccgcaauuacuuuugcguc

SEQ ID NO: 935762 - RNA, 22 nt, Human
aagucauuaucucuucuaaucu

SEQ ID NO: 935763 - RNA, 22 nt, Human
cagcuccccucuguggggcagu

SEQ ID NO: 935764 - RNA, 22 nt, Human
gcuaggagauugagcucugaag

SEQ ID NO: 935765 - RNA, 22 nt, Human
ugaaaguuacaggaaaacagau

SEQ ID NO: 935766 - RNA, 22 nt, Human
aacucaguuacauauuagaaua

SEQ ID NO: 935767 - RNA, 22 nt, Human
cuaaaugccuuuccuaccuaac

SEQ ID NO: 935768 - RNA, 22 nt, Human
gccugaugagcuuccagcugag

SEQ ID NO: 935769 - RNA, 22 nt, Human
agugaaaugauaguguaaauac

SEQ ID NO: 935770 - RNA, 22 nt, Human
agccagggacgcugcaggcuac

SEQ ID NO: 935771 - RNA, 22 nt, Human
caguagcacuagauaugugugg

SEQ ID NO: 935772 - RNA, 23 nt, Human
agccucuuuucuccugcccugca

SEQ ID NO: 935773 - RNA, 22 nt, Human
aaaacuaaauacgcuuugccuc

SEQ ID NO: 935774 - RNA, 22 nt, Human
gucaaauauacuaagagguaaa

SEQ ID NO: 935775 - RNA, 22 nt, Human
uaucuuuagaggaagagaaucu

SEQ ID NO: 935776 - RNA, 22 nt, Human
aacaaaccuucccuauacgucu

SEQ ID NO: 935777 - RNA, 22 nt, Human
cugaagccaugugcucacuggu

SEQ ID NO: 935778 - RNA, 22 nt, Human
gcacagaacuucucuuaguagg

SEQ ID NO: 935779 - RNA, 22 nt, Human
ccucuguccuggggaguggagc

SEQ ID NO: 935780 - RNA, 22 nt, Human
gaggaggcuuccgggaggcacg

SEQ ID NO: 935781 - RNA, 22 nt, Human
uuggccaaccagaacggagguc

SEQ ID NO: 935782 - RNA, 19 nt, Human
gaaggagagcugaguuagg

SEQ ID NO: 935783 - RNA, 22 nt, Human
acauccauguuguaauguuccu

SEQ ID NO: 935784 - RNA, 22 nt, Human
ggccuuggugccauggccaguu

SEQ ID NO: 935785 - RNA, 22 nt, Human
uagagcaguuggcagcuguauu

SEQ ID NO: 935786 - RNA, 22 nt, Human
gcccucucggcauagcaggggc

SEQ ID NO: 935787 - RNA, 20 nt, Human
ccucaagcagacugacagcu

SEQ ID NO: 935788 - RNA, 21 nt, Human
ccaggaaggacugagcucccu

SEQ ID NO: 935789 - RNA, 22 nt, Human
ucccagaagugaaauuucuaga

SEQ ID NO: 935790 - RNA, 16 nt, Human
ggagagugucugcaaa

SEQ ID NO: 935791 - RNA, 22 nt, Human
cccuggggcugagggauggccg

SEQ ID NO: 935792 - RNA, 22 nt, Human
agcugcccccagggcugugcuu

SEQ ID NO: 935793 - RNA, 22 nt, Human
caggagaucuuaggaauucuua

SEQ ID NO: 935794 - RNA, 22 nt, Human
uaauuucuaauucauuuucagu

SEQ ID NO: 935795 - RNA, 22 nt, Human
gagcaggccagcaauggaaggg

SEQ ID NO: 935796 - RNA, 22 nt, Human
uggccuuggacagagcgcuccu

SEQ ID NO: 935797 - RNA, 22 nt, Human
ggcucugcuucagaaggcucau

SEQ ID NO: 935798 - RNA, 22 nt, Human
cugugccaggcccagcugacuu

SEQ ID NO: 935799 - RNA, 22 nt, Human
caucagcacuaugauuaaagua

SEQ ID NO: 935800 - RNA, 22 nt, Human
cuuuccuagauggccaucuuuc

SEQ ID NO: 935801 - RNA, 22 nt, Human
uuugaaauaugaggcauuauga

SEQ ID NO: 935802 - RNA, 22 nt, Human
gcucuguguugucagaggcacc

SEQ ID NO: 935803 - RNA, 22 nt, Human
cugugugugucugcagcauacu

SEQ ID NO: 935804 - RNA, 22 nt, Human
ccacagaggacaacugccuggc

SEQ ID NO: 935805 - RNA, 19 nt, Human
cauuaggauuagagacaag

SEQ ID NO: 935806 - RNA, 23 nt, Human
gucagggcuggggucagagugac

SEQ ID NO: 935807 - RNA, 22 nt, Human
gaaauaguacagcauaguucuu

SEQ ID NO: 935808 - RNA, 22 nt, Human
cagcuugcuaauuuugacuuca

SEQ ID NO: 935809 - RNA, 22 nt, Human
gaggggcuugaggcccugaugg

SEQ ID NO: 935810 - RNA, 22 nt, Human
ugugccagccucuggcuguguc

SEQ ID NO: 935811 - RNA, 19 nt, Human
agaguauugaauuugcccu

SEQ ID NO: 935812 - RNA, 22 nt, Human
ugcaggagaaaguacggagcgu

SEQ ID NO: 935813 - RNA, 22 nt, Human
gcagaggccaggccaccagcaa

SEQ ID NO: 935814 - RNA, 22 nt, Human
cugggagcaagaggcugcaaau

SEQ ID NO: 935815 - RNA, 22 nt, Human
uaggaggguuagagggaaauau

SEQ ID NO: 935816 - RNA, 22 nt, Human
aagagcuguaugccauaugauu

SEQ ID NO: 935817 - RNA, 20 nt, Human
aagagcauaguacaggaaga

SEQ ID NO: 935818 - RNA, 22 nt, Human
gucagcagugucagcucugggg

SEQ ID NO: 935819 - RNA, 22 nt, Human
auacaucuuccuuuuaaaaugc

SEQ ID NO: 935820 - RNA, 23 nt, Human
ggcagcucucaucugaugacuga

SEQ ID NO: 935821 - RNA, 22 nt, Human
cuuuuuaucucuuaaugauguu

SEQ ID NO: 935822 - RNA, 22 nt, Human
agcaugcugguguucauggcag

SEQ ID NO: 935823 - RNA, 22 nt, Human
aaauuauuacaagcuaguuggc

SEQ ID NO: 935824 - RNA, 22 nt, Human
aagcugcccuguguuagaguuc

SEQ ID NO: 935825 - RNA, 22 nt, Human
agacagaacagaauaauuguug

SEQ ID NO: 935826 - RNA, 22 nt, Human
aacuucugggcuguccaaaacu

SEQ ID NO: 935827 - RNA, 22 nt, Human
agacagcaugauacaugaugcu

SEQ ID NO: 935828 - RNA, 22 nt, Human
ucuccucaccaccagcagcaga

SEQ ID NO: 935829 - RNA, 22 nt, Human
gcauggcagccaguacauggug

SEQ ID NO: 935830 - RNA, 19 nt, Human
gcagcugcuugaaaagaaa

SEQ ID NO: 935831 - RNA, 22 nt, Human
cacaaugcguacauauaucaaa

SEQ ID NO: 935832 - RNA, 22 nt, Human
cugugucuuuccuacuuugugg

SEQ ID NO: 935833 - RNA, 22 nt, Human
auuaggauguguauauuguguu

SEQ ID NO: 935834 - RNA, 22 nt, Human
ugaggcaguauuuuagugacuu

SEQ ID NO: 935835 - RNA, 22 nt, Human
gagcucagauucuggugucaga

SEQ ID NO: 935836 - RNA, 22 nt, Human
gcuggcagggugguugagagag

SEQ ID NO: 935837 - RNA, 22 nt, Human
gauccuugcacuugacuuggca

SEQ ID NO: 935838 - RNA, 22 nt, Human
ucaggaucggccuuuuuuuaag

SEQ ID NO: 935839 - RNA, 22 nt, Human
uucuuuccaaccagauauuggu

SEQ ID NO: 935840 - RNA, 22 nt, Human
caugugugacaaacugccugca

SEQ ID NO: 935841 - RNA, 22 nt, Human
uaaagcaggccacauaugugau

SEQ ID NO: 935842 - RNA, 22 nt, Human
ugugccaggcacuugcccaggc

SEQ ID NO: 935843 - RNA, 22 nt, Human
acagggaacaggaauauacaaa

SEQ ID NO: 935844 - RNA, 22 nt, Human
ucaucacucauuggacaacaga

SEQ ID NO: 935845 - RNA, 22 nt, Human
cugggaggauucauugagguga

SEQ ID NO: 935846 - RNA, 22 nt, Human
ggucugaguggugcugacucag

SEQ ID NO: 935847 - RNA, 23 nt, Human
ggcacugaagcuacaauggugag

SEQ ID NO: 935848 - RNA, 22 nt, Human
augauucagcaauuuuauaucu

SEQ ID NO: 935849 - RNA, 22 nt, Human
ucuuugaacuuggcugaucucu

SEQ ID NO: 935850 - RNA, 22 nt, Human
agcagggcucuguggagggugg

SEQ ID NO: 935851 - RNA, 22 nt, Human
uuagaaaggaaucuucauuuca

SEQ ID NO: 935852 - RNA, 22 nt, Human
cccuggagggacagcugcucua

SEQ ID NO: 935853 - RNA, 20 nt, Human
cagcucugggaaagaggcca

SEQ ID NO: 935854 - RNA, 22 nt, Human
aaagauuauggcauugaaauac

SEQ ID NO: 935855 - RNA, 22 nt, Human
cuuacauugugugcaugagggg

SEQ ID NO: 935856 - RNA, 22 nt, Human
aaaguauuuuugacaggcauua

SEQ ID NO: 935857 - RNA, 22 nt, Human
cugccucaugcugccugcagcc

SEQ ID NO: 935858 - RNA, 22 nt, Human
aaauaguuacuucugcugucuu

SEQ ID NO: 935859 - RNA, 22 nt, Human
uggcagaguaggauggcccugu

SEQ ID NO: 935860 - RNA, 22 nt, Human
uuugaauguuuuagguacuuaa

SEQ ID NO: 935861 - RNA, 22 nt, Human
ugaaaaacuuuaauccauaaag

SEQ ID NO: 935862 - RNA, 22 nt, Human
agcagccagugggagugauaca

SEQ ID NO: 935863 - RNA, 22 nt, Human
ggagaugguggaagcuggugca

SEQ ID NO: 935864 - RNA, 21 nt, Human
ugcagaggcacaaacaagccc

SEQ ID NO: 935865 - RNA, 19 nt, Human
uccucagugacaaccucag

SEQ ID NO: 935866 - RNA, 22 nt, Human
aagauaaacucuugauuucuga

SEQ ID NO: 935867 - RNA, 20 nt, Human
caggccucugggggcccugg

SEQ ID NO: 935868 - RNA, 19 nt, Human
uccugggcugggccagguc

SEQ ID NO: 935869 - RNA, 22 nt, Human
uacaccuuaaucauaugugucu

SEQ ID NO: 935870 - RNA, 22 nt, Human
gcacacaguauaugcucauuaa

SEQ ID NO: 935871 - RNA, 22 nt, Human
ucccugggguaacauuagaggg

SEQ ID NO: 935872 - RNA, 22 nt, Human
augcugugguagacagcauucc

SEQ ID NO: 935873 - RNA, 22 nt, Human
uaggcagcagugcuaugauucu

SEQ ID NO: 935874 - RNA, 22 nt, Human
uaaggccaaggggccauagucu

SEQ ID NO: 935875 - RNA, 22 nt, Human
gggcuacagacaugcucuaagc

SEQ ID NO: 935876 - RNA, 22 nt, Human
uugaagcaggaaaauuucuauu

SEQ ID NO: 935877 - RNA, 22 nt, Human
caggaucuuuuaaugucuccag

SEQ ID NO: 935878 - RNA, 22 nt, Human
uggggccuggucagagcugcac

SEQ ID NO: 935879 - RNA, 22 nt, Human
ggaaagagcuaaaagggugaga

SEQ ID NO: 935880 - RNA, 18 nt, Human
ucauuagggauugcaaag

SEQ ID NO: 935881 - RNA, 22 nt, Human
aaaacuccugaaauuguuuccc

SEQ ID NO: 935882 - RNA, 22 nt, Human
gugggugauguacuggaggcca

SEQ ID NO: 935883 - RNA, 22 nt, Human
aaagacuagcauuuauauguac

SEQ ID NO: 935884 - RNA, 22 nt, Human
caggcagccugcggucugcaca

SEQ ID NO: 935885 - RNA, 22 nt, Human
gcucaggaaacagcagggcuug

SEQ ID NO: 935886 - RNA, 22 nt, Human
gggauggggucaacauguaccu

SEQ ID NO: 935887 - RNA, 22 nt, Human
gaggcugcuuugaugacaggag

SEQ ID NO: 935888 - RNA, 18 nt, Human
aaguaugccuauguuauu

SEQ ID NO: 935889 - RNA, 22 nt, Human
aaggagagagcuuugcuggaac

SEQ ID NO: 935890 - RNA, 21 nt, Human
aagcaggacauaugaugcccu

SEQ ID NO: 935891 - RNA, 22 nt, Human
uagcuuuguguaugaugucugu

SEQ ID NO: 935892 - RNA, 22 nt, Human
ucauuuguucucauucucuacu

SEQ ID NO: 935893 - RNA, 22 nt, Human
uaaacauggauucugaucacag

SEQ ID NO: 935894 - RNA, 22 nt, Human
cuguggaaauaaacaaugcuaa

SEQ ID NO: 935895 - RNA, 22 nt, Human
uggcucagcagguuagaaacua

SEQ ID NO: 935896 - RNA, 22 nt, Human
cuccucuggaaauuccucugcc

SEQ ID NO: 935897 - RNA, 22 nt, Human
ccaggggcuggugcugagcugg

SEQ ID NO: 935898 - RNA, 18 nt, Human
augggaggggccaagaga

SEQ ID NO: 935899 - RNA, 22 nt, Human
gcuggagauaguaggauccaua

SEQ ID NO: 935900 - RNA, 22 nt, Human
acacauuuaaaaaggaacauau

SEQ ID NO: 935901 - RNA, 22 nt, Human
acaagaauuuacauguagugga

SEQ ID NO: 935902 - RNA, 22 nt, Human
ucugugccuccguaacacacca

SEQ ID NO: 935903 - RNA, 22 nt, Human
uaaggcacacaguugcugcaug

SEQ ID NO: 935904 - RNA, 22 nt, Human
uagacacaagagaaggguauaa

SEQ ID NO: 935905 - RNA, 22 nt, Human
uacauucuggaaaggcacagac

SEQ ID NO: 935906 - RNA, 19 nt, Human
gcagcugugggaagagcca

SEQ ID NO: 935907 - RNA, 22 nt, Human
aagucuguagaaaaacaguuua

SEQ ID NO: 935908 - RNA, 21 nt, Human
ugcaggagucugugagucagg

SEQ ID NO: 935909 - RNA, 22 nt, Human
cagcagcugcgugcccaggccg

SEQ ID NO: 935910 - RNA, 22 nt, Human
cuggugcuggagccuagucccu

SEQ ID NO: 935911 - RNA, 19 nt, Human
acagaaauuaguuauuuuc

SEQ ID NO: 935912 - RNA, 22 nt, Human
uguaugcagggcuuguaugcag

SEQ ID NO: 935913 - RNA, 22 nt, Human
gaagccaagugcaaaugccuua

SEQ ID NO: 935914 - RNA, 23 nt, Human
ucugagagaacaaugccuccuau

SEQ ID NO: 935915 - RNA, 22 nt, Human
aacuuucagaauccuaugcauu

SEQ ID NO: 935916 - RNA, 22 nt, Human
ugcccaagcagaggagugauuc

SEQ ID NO: 935917 - RNA, 22 nt, Human
gcugugugcucacguaguggaa

SEQ ID NO: 935918 - RNA, 22 nt, Human
ccaggagccacucaggcccaca

SEQ ID NO: 935919 - RNA, 22 nt, Human
ggguccaggucuucaggcagag

SEQ ID NO: 935920 - RNA, 22 nt, Human
cagaagaggacuggguagcuca

SEQ ID NO: 935921 - RNA, 22 nt, Human
ggagugaguacuggaguagcug

SEQ ID NO: 935922 - RNA, 22 nt, Human
cugcuguguugccagugucacc

SEQ ID NO: 935923 - RNA, 22 nt, Human
ucucacugggucacagcagagg

SEQ ID NO: 935924 - RNA, 23 nt, Human
ugagcugguauuguccaucucca

SEQ ID NO: 935925 - RNA, 22 nt, Human
ccugucauacuaacguaguggg

SEQ ID NO: 935926 - RNA, 22 nt, Human
caggcagcugggucaccguccc

SEQ ID NO: 935927 - RNA, 22 nt, Human
aauuuccagaucagaugacuca

SEQ ID NO: 935928 - RNA, 22 nt, Human
ucauaaaacacaccagguaguu

SEQ ID NO: 935929 - RNA, 22 nt, Human
gugcuuucugcaugguuccuac

SEQ ID NO: 935930 - RNA, 22 nt, Human
uccuggccucgcuguccaccuu

SEQ ID NO: 935931 - RNA, 22 nt, Human
caguucucuuuccacuggaggc

SEQ ID NO: 935932 - RNA, 22 nt, Human
ucagaggguggcugggagcauc

SEQ ID NO: 935933 - RNA, 23 nt, Human
aguuuguaaagaaauauuugcac

SEQ ID NO: 935934 - RNA, 21 nt, Human
gccauuguuuucuaccuggag

SEQ ID NO: 935935 - RNA, 22 nt, Human
gcacacccucucaccagcacug

SEQ ID NO: 935936 - RNA, 22 nt, Human
uuccaggaagauucaacaaaag

SEQ ID NO: 935937 - RNA, 22 nt, Human
guuuaagaggguuucauuccca

SEQ ID NO: 935938 - RNA, 18 nt, Human
uccauuguucuacuguga

SEQ ID NO: 935939 - RNA, 22 nt, Human
agaaaagggcaggagggauaca

SEQ ID NO: 935940 - RNA, 22 nt, Human
gcugcccaggagagguggggcu

SEQ ID NO: 935941 - RNA, 22 nt, Human
gcugccugccuaguuccacagu

SEQ ID NO: 935942 - RNA, 22 nt, Human
uagaaacugauagucuugugcu

SEQ ID NO: 935943 - RNA, 22 nt, Human
uguguacagcaggauuucucaa

SEQ ID NO: 935944 - RNA, 19 nt, Human
caugagcugcucacuuccc

SEQ ID NO: 935945 - RNA, 22 nt, Human
ucucagagcuucagaaagcacc

SEQ ID NO: 935946 - RNA, 22 nt, Human
caguugcuacaguucaagugug

SEQ ID NO: 935947 - RNA, 22 nt, Human
auuauguaacugugguucagca

SEQ ID NO: 935948 - RNA, 22 nt, Human
aagccucuggggccucaucugu

SEQ ID NO: 935949 - RNA, 22 nt, Human
ugggcacuauggcucugugcac

SEQ ID NO: 935950 - RNA, 22 nt, Human
aaagucauacauggugcuuacu

SEQ ID NO: 935951 - RNA, 22 nt, Human
cugaggucucuuuccauaguga

SEQ ID NO: 935952 - RNA, 22 nt, Human
cagaguguaucuguguaagcau

SEQ ID NO: 935953 - RNA, 22 nt, Human
uucagcaaauggacuguucagg

SEQ ID NO: 935954 - RNA, 22 nt, Human
uugcagagaucagcagguuuga

SEQ ID NO: 935955 - RNA, 22 nt, Human
aucagcaagcauuuauugagug

SEQ ID NO: 935956 - RNA, 22 nt, Human
cuggcagguuuggugucuggug

SEQ ID NO: 935957 - RNA, 22 nt, Human
gccuucagcccugacuggccag

SEQ ID NO: 935958 - RNA, 22 nt, Human
acuuguucauugaguacauaug

SEQ ID NO: 935959 - RNA, 22 nt, Human
uggcucucaggccugcugcguu

SEQ ID NO: 935960 - RNA, 22 nt, Human
uuucagaugcaauuaauuuuca

SEQ ID NO: 935961 - RNA, 22 nt, Human
ugcaaacaggagaguaaguaua

SEQ ID NO: 935962 - RNA, 22 nt, Human
acucccagguugccuggcaggc

SEQ ID NO: 935963 - RNA, 22 nt, Human
cugcagcuauauuuucccacag

SEQ ID NO: 935964 - RNA, 22 nt, Human
caggggcugugggcggagccuc

SEQ ID NO: 935965 - RNA, 22 nt, Human
uuucuaaaugguggcugcauug

SEQ ID NO: 935966 - RNA, 22 nt, Human
uuugcauuuguucaaguauuga

SEQ ID NO: 935967 - RNA, 19 nt, Human
gguaaaagugagcuucagg

SEQ ID NO: 935968 - RNA, 22 nt, Human
uuagaaaaaggcuguggucuua

SEQ ID NO: 935969 - RNA, 22 nt, Human
gaggcagcugaagcuucaaaga

SEQ ID NO: 935970 - RNA, 22 nt, Human
acugccuugucucuugccuguu

SEQ ID NO: 935971 - RNA, 22 nt, Human
cccagccaaggugcugguguug

SEQ ID NO: 935972 - RNA, 20 nt, Human
gcuuuuucuaauagcagucc

SEQ ID NO: 935973 - RNA, 22 nt, Human
uccuuccuggggucucugcugc

SEQ ID NO: 935974 - RNA, 22 nt, Human
acaguaccugcucucaagcaaa

SEQ ID NO: 935975 - RNA, 22 nt, Human
cacuggggugggccugguagag

SEQ ID NO: 935976 - RNA, 22 nt, Human
uugcuauuuugagagucauagu

SEQ ID NO: 935977 - RNA, 22 nt, Human
aaugauguauuaguacaacaca

SEQ ID NO: 935978 - RNA, 22 nt, Human
ccacagccauuccagggaggcu

SEQ ID NO: 935979 - RNA, 19 nt, Human
gucaucuuuuaauaaugug

SEQ ID NO: 935980 - RNA, 22 nt, Human
cugcucugaguauuaacggagg

SEQ ID NO: 935981 - RNA, 19 nt, Human
cucuggagcagacacugga

SEQ ID NO: 935982 - RNA, 22 nt, Human
aggguagguguaagauagcccu

SEQ ID NO: 935983 - RNA, 22 nt, Human
uuacaguauuguuaaacucuuu

SEQ ID NO: 935984 - RNA, 22 nt, Human
cuuggcagcuuuuggaggagcc

SEQ ID NO: 935985 - RNA, 22 nt, Human
cugaggcuggggaagggaagug

SEQ ID NO: 935986 - RNA, 22 nt, Human
agaggggaguccuaaucugauu

SEQ ID NO: 935987 - RNA, 22 nt, Human
cugugcuucgcaacuccaaggu

SEQ ID NO: 935988 - RNA, 22 nt, Human
uccugccuaccuugcggaggug

SEQ ID NO: 935989 - RNA, 22 nt, Human
uugaggaguguuuagggugagg

SEQ ID NO: 935990 - RNA, 22 nt, Human
agaaggccuaacuugggggcaa

SEQ ID NO: 935991 - RNA, 22 nt, Human
cagagcuggagcuugaauggag

SEQ ID NO: 935992 - RNA, 22 nt, Human
cuggaaugccucccugucagag

SEQ ID NO: 935993 - RNA, 22 nt, Human
cagaaauucccauuucagauuc

SEQ ID NO: 935994 - RNA, 22 nt, Human
aaagauuuaugaaguucaauua

SEQ ID NO: 935995 - RNA, 22 nt, Human
ggcagcuggguuggccagaaac

SEQ ID NO: 935996 - RNA, 22 nt, Human
gcuccuggccagcacagggccc

SEQ ID NO: 935997 - RNA, 22 nt, Human
cagcucuguaaauuccuucauc

SEQ ID NO: 935998 - RNA, 22 nt, Human
gcugcaggcauuuuccugggca

SEQ ID NO: 935999 - RNA, 23 nt, Human
cauguacacacagcuguacagug

SEQ ID NO: 936000 - RNA, 22 nt, Human
auuagcugaccucuaaggagcc

SEQ ID NO: 936001 - RNA, 22 nt, Human
cagcugccacaccucuuucucu

SEQ ID NO: 936002 - RNA, 22 nt, Human
agcugcucuuugaaggacacuu

SEQ ID NO: 936003 - RNA, 22 nt, Human
cccaagaucuuucgugcacuaa

SEQ ID NO: 936004 - RNA, 22 nt, Human
ugacacagaaauuaagcuguca

SEQ ID NO: 936005 - RNA, 22 nt, Human
gcucuggacccuggaguggcug

SEQ ID NO: 936006 - RNA, 22 nt, Human
gagcagugacuggagcaugaga

SEQ ID NO: 936007 - RNA, 22 nt, Human
cuucucagaggccagaagcuau

SEQ ID NO: 936008 - RNA, 22 nt, Human
cccacagguccccaugaacucg

SEQ ID NO: 936009 - RNA, 22 nt, Human
auuuccaguccuaaugaucugg

SEQ ID NO: 936010 - RNA, 22 nt, Human
uuccucuccucccaccagguga

SEQ ID NO: 936011 - RNA, 23 nt, Human
uacuuaggaauggggacggcaag

SEQ ID NO: 936012 - RNA, 22 nt, Human
uucaagauggccccagugagcc

SEQ ID NO: 936013 - RNA, 22 nt, Human
uaaggccaccguuauagaacca

SEQ ID NO: 936014 - RNA, 22 nt, Human
agauuucagguuggggcagaag

SEQ ID NO: 936015 - RNA, 19 nt, Human
aucuuacagagcagaguac

SEQ ID NO: 936016 - RNA, 23 nt, Human
uucauuugucuacuucacuuguu

SEQ ID NO: 936017 - RNA, 22 nt, Human
ggugaaggcacaagagggcaag

SEQ ID NO: 936018 - RNA, 22 nt, Human
aaaguguggagauugaacuaaa

SEQ ID NO: 936019 - RNA, 22 nt, Human
ucuggccagcaugagaccuggu

SEQ ID NO: 936020 - RNA, 22 nt, Human
ugauuucaaguagugacaugcu

SEQ ID NO: 936021 - RNA, 21 nt, Human
aggcaucuaaagagaguagac

SEQ ID NO: 936022 - RNA, 22 nt, Human
gaccaaggaagaggggagccag

SEQ ID NO: 936023 - RNA, 22 nt, Human
uuguaacacuuuucuauuaaua

SEQ ID NO: 936024 - RNA, 21 nt, Human
aggggacagaguagcuccagg

SEQ ID NO: 936025 - RNA, 22 nt, Human
aggccagcagcaugacggcauc

SEQ ID NO: 936026 - RNA, 22 nt, Human
ugggcagagucauacaggagac

SEQ ID NO: 936027 - RNA, 22 nt, Human
uggccuuguguuuuagagaaag

SEQ ID NO: 936028 - RNA, 22 nt, Human
ugucccauggacacaacuucuu

SEQ ID NO: 936029 - RNA, 22 nt, Human
agaggcuccuucacucuggcac

SEQ ID NO: 936030 - RNA, 22 nt, Human
aggccagcgcugcuagcucccg

SEQ ID NO: 936031 - RNA, 22 nt, Human
cacaaauggccguguucaaaga

SEQ ID NO: 936032 - RNA, 22 nt, Human
cugccagucuaugcugcucggc

SEQ ID NO: 936033 - RNA, 22 nt, Human
uaaauucccaacucugcucuuc

SEQ ID NO: 936034 - RNA, 22 nt, Human
aaugcacagcuaaagugguucc

SEQ ID NO: 936035 - RNA, 22 nt, Human
ucucugggauaaacugggccag

SEQ ID NO: 936036 - RNA, 20 nt, Human
uugauucccucuaaacucgc

SEQ ID NO: 936037 - RNA, 22 nt, Human
auuuaaauuuucugauggagag

SEQ ID NO: 936038 - RNA, 22 nt, Human
cuggcugcaggaaggagugggc

SEQ ID NO: 936039 - RNA, 23 nt, Human
agaggccaacuucuugccccucc

SEQ ID NO: 936040 - RNA, 18 nt, Human
uucagcagcagacacacu

SEQ ID NO: 936041 - RNA, 22 nt, Human
ugugucccuuggaaccucagcu

SEQ ID NO: 936042 - RNA, 18 nt, Human
uggagcagguaggcauga

SEQ ID NO: 936043 - RNA, 22 nt, Human
ccuugcugcgugcuagcacaga

SEQ ID NO: 936044 - RNA, 22 nt, Human
uuggcuuccaggaucucagcag

SEQ ID NO: 936045 - RNA, 17 nt, Human
aucuggcugcuucuaga

SEQ ID NO: 936046 - RNA, 22 nt, Human
gaauauuaguaucaguuauacc

SEQ ID NO: 936047 - RNA, 21 nt, Human
ucccagggccaggugccauca

SEQ ID NO: 936048 - RNA, 22 nt, Human
aaacacagggauauauauucca

SEQ ID NO: 936049 - RNA, 22 nt, Human
ugauuuccaugaagcugaaggc

SEQ ID NO: 936050 - RNA, 22 nt, Human
cugagcugguggaagcaugcag

SEQ ID NO: 936051 - RNA, 22 nt, Human
aggacuucaucaccuguauaaa

SEQ ID NO: 936052 - RNA, 22 nt, Human
aacuagaaccacuuguauuucc

SEQ ID NO: 936053 - RNA, 22 nt, Human
caccaucagcagcaggugucaa

SEQ ID NO: 936054 - RNA, 22 nt, Human
gccaggcuguggggaacuugaa

SEQ ID NO: 936055 - RNA, 20 nt, Human
ccugggcuccaggagccccg

SEQ ID NO: 936056 - RNA, 22 nt, Human
ggcugcucuucuuggcgaccuc

SEQ ID NO: 936057 - RNA, 22 nt, Human
caggagagauaugaguccccac

SEQ ID NO: 936058 - RNA, 21 nt, Human
auggagggaccagggaagcag

SEQ ID NO: 936059 - RNA, 22 nt, Human
ccaaggcuucccagagaugcuc

SEQ ID NO: 936060 - RNA, 22 nt, Human
ucccagagcucuggagguugga

SEQ ID NO: 936061 - RNA, 22 nt, Human
gaaaugugugacaaguuucaau

SEQ ID NO: 936062 - RNA, 22 nt, Human
ggugcagaggagccagcugggg

SEQ ID NO: 936063 - RNA, 21 nt, Human
ugcucaugcaaugcaugucca

SEQ ID NO: 936064 - RNA, 22 nt, Human
aagucuuacagacaagcugaag

SEQ ID NO: 936065 - RNA, 22 nt, Human
gggacagcuguagugcuuggcu

SEQ ID NO: 936066 - RNA, 22 nt, Human
gcaguggcuaggagucuggcgu

SEQ ID NO: 936067 - RNA, 23 nt, Human
cccagcagauuguaaagugucca

SEQ ID NO: 936068 - RNA, 21 nt, Human
agcagcugcaguuucuaucug

SEQ ID NO: 936069 - RNA, 22 nt, Human
cagaagaguagcugaacaaguu

SEQ ID NO: 936070 - RNA, 22 nt, Human
caguacuuauuucuauuuaggg

SEQ ID NO: 936071 - RNA, 22 nt, Human
uggcucugucaaacugcacaca

SEQ ID NO: 936072 - RNA, 22 nt, Human
uuugcauuuugauaagaucacu

SEQ ID NO: 936073 - RNA, 22 nt, Human
aguuucuaccgguacauucagg

SEQ ID NO: 936074 - RNA, 20 nt, Human
cagcccuccaguggaggcag

SEQ ID NO: 936075 - RNA, 22 nt, Human
agcccuagagcuggaggucagu

SEQ ID NO: 936076 - RNA, 22 nt, Human
agcccccaaaagugcuuaugau

SEQ ID NO: 936077 - RNA, 22 nt, Human
gagccagccuucuucugagguc

SEQ ID NO: 936078 - RNA, 22 nt, Human
aacagacauauuuuuaauaugc

SEQ ID NO: 936079 - RNA, 22 nt, Human
ugggagcagccaacauggccuu

SEQ ID NO: 936080 - RNA, 22 nt, Human
ggcugccuccugcugggcugga

SEQ ID NO: 936081 - RNA, 22 nt, Human
aaaaguauuuauggcuauguaa

SEQ ID NO: 936082 - RNA, 22 nt, Human
gcucagaggagcaucauaagga

SEQ ID NO: 936083 - RNA, 22 nt, Human
ugcauuauuugcaugugccugu

SEQ ID NO: 936084 - RNA, 22 nt, Human
gcagcugccuauucagggcuug

SEQ ID NO: 936085 - RNA, 22 nt, Human
gcacaauuauuuaugcaguaug

SEQ ID NO: 936086 - RNA, 22 nt, Human
ugaaaucaauugcaauguuuau

SEQ ID NO: 936087 - RNA, 22 nt, Human
uuggccaaggucacugggugag

SEQ ID NO: 936088 - RNA, 22 nt, Human
aggcugucugaccccagagccc

SEQ ID NO: 936089 - RNA, 22 nt, Human
cagagccugccucuggcugugg

SEQ ID NO: 936090 - RNA, 22 nt, Human
caaagucccagcugcuuagaga

SEQ ID NO: 936091 - RNA, 22 nt, Human
cuggccaggcuugggacagaca

SEQ ID NO: 936092 - RNA, 22 nt, Human
ucaggagacuuaugucacagug

SEQ ID NO: 936093 - RNA, 22 nt, Human
uuucauaauacuguacaugaaa

SEQ ID NO: 936094 - RNA, 18 nt, Human
acauuucuaugcuucugg

SEQ ID NO: 936095 - RNA, 22 nt, Human
aggcagugcaugcaaaggucgg

SEQ ID NO: 936096 - RNA, 22 nt, Human
cugcugugccuuaaaaugcaag

SEQ ID NO: 936097 - RNA, 22 nt, Human
ugcugccacaaauucagcugcc

SEQ ID NO: 936098 - RNA, 22 nt, Human
cuacagacccaccuuggaagaa

SEQ ID NO: 936099 - RNA, 22 nt, Human
uauacagaaccgccugaagucu

SEQ ID NO: 936100 - RNA, 22 nt, Human
uuuuccucugagcuuugaauaa

SEQ ID NO: 936101 - RNA, 22 nt, Human
uggcuccuucauucuccugcca

SEQ ID NO: 936102 - RNA, 22 nt, Human
aggagggagcuuaagccaggca

SEQ ID NO: 936103 - RNA, 23 nt, Human
auguauuuaaauuucagugauga

SEQ ID NO: 936104 - RNA, 22 nt, Human
agagcugagaauguggcuuccu

SEQ ID NO: 936105 - RNA, 22 nt, Human
gcccucagaguuccccacagug

SEQ ID NO: 936106 - RNA, 22 nt, Human
uuuggacuuagccugcagaauu

SEQ ID NO: 936107 - RNA, 22 nt, Human
auaaaaacugacccauccuuug

SEQ ID NO: 936108 - RNA, 22 nt, Human
uaguuuaaaaguuagggaugau

SEQ ID NO: 936109 - RNA, 22 nt, Human
auugacaauuagcccuuaggug

SEQ ID NO: 936110 - RNA, 19 nt, Human
ugaggccaaggucacagau

SEQ ID NO: 936111 - RNA, 22 nt, Human
gcagcugcuguggcaucaagcu

SEQ ID NO: 936112 - RNA, 22 nt, Human
agggccaggaacaccugaaggg

SEQ ID NO: 936113 - RNA, 22 nt, Human
cuuguccuuuacuugagacuca

SEQ ID NO: 936114 - RNA, 22 nt, Human
gaggccaaguuggagaccaggu

SEQ ID NO: 936115 - RNA, 22 nt, Human
aaaaccaggcguuuccuauuau

SEQ ID NO: 936116 - RNA, 22 nt, Human
ugggcaggaugcguugauucuu

SEQ ID NO: 936117 - RNA, 22 nt, Human
cauucuuauauuuacucauuca

SEQ ID NO: 936118 - RNA, 22 nt, Human
aauuaaauugguuuagagagga

SEQ ID NO: 936119 - RNA, 22 nt, Human
ucgagucauguucucccauuaa

SEQ ID NO: 936120 - RNA, 17 nt, Human
ggccuugggcugcucuu

SEQ ID NO: 936121 - RNA, 22 nt, Human
ugaacauauucaccucuaaaua

SEQ ID NO: 936122 - RNA, 22 nt, Human
ugcugagaaucacagguuauaa

SEQ ID NO: 936123 - RNA, 22 nt, Human
aucacauuguuagcauagacug

SEQ ID NO: 936124 - RNA, 22 nt, Human
cagggccaguucucgcagcagu

SEQ ID NO: 936125 - RNA, 22 nt, Human
uugcaaauguuucauaacagua

SEQ ID NO: 936126 - RNA, 22 nt, Human
ucuguaaauccugcucagcaac

SEQ ID NO: 936127 - RNA, 22 nt, Human
cugggcacuugcucacagcucu

SEQ ID NO: 936128 - RNA, 22 nt, Human
gccucugcccauccaccaucag

SEQ ID NO: 936129 - RNA, 20 nt, Human
uaucaaucagaaagaagacu

SEQ ID NO: 936130 - RNA, 22 nt, Human
uuggagcccugaggaucuggau

SEQ ID NO: 936131 - RNA, 22 nt, Human
aaaauaguuaacguucagagua

SEQ ID NO: 936132 - RNA, 22 nt, Human
auaaggaaugauguaucaguuu

SEQ ID NO: 936133 - RNA, 22 nt, Human
augcaccugaacuccaucagcu

SEQ ID NO: 936134 - RNA, 22 nt, Human
ucacauuuuccuugguaucugu

SEQ ID NO: 936135 - RNA, 20 nt, Human
acuggcagccugccugcugu

SEQ ID NO: 936136 - RNA, 22 nt, Human
uuuaagaaguuauguuauaaau

SEQ ID NO: 936137 - RNA, 22 nt, Human
ugucaaaaugacuuuacuacag

SEQ ID NO: 936138 - RNA, 18 nt, Human
cucugcuaaugggcagcu

SEQ ID NO: 936139 - RNA, 20 nt, Human
ucacaucuggcagcugauga

SEQ ID NO: 936140 - RNA, 22 nt, Human
cacuggcccauuccugucuggc

SEQ ID NO: 936141 - RNA, 21 nt, Human
agccagcuaucacacagcauu

SEQ ID NO: 936142 - RNA, 22 nt, Human
ucccacugugaauccaaggccu

SEQ ID NO: 936143 - RNA, 22 nt, Human
gccuggagccucagcaaggagg

SEQ ID NO: 936144 - RNA, 22 nt, Human
ugagugaggaagcgguggagga

SEQ ID NO: 936145 - RNA, 20 nt, Human
uauuugaaauggccaagugu

SEQ ID NO: 936146 - RNA, 23 nt, Human
ucaugcccaggcuccagauguca

SEQ ID NO: 936147 - RNA, 22 nt, Human
ucuuugaauccuuuacaucuga

SEQ ID NO: 936148 - RNA, 22 nt, Human
cuacauuuuucaccgagccucu

SEQ ID NO: 936149 - RNA, 22 nt, Human
uuuucauuuacauuagggaaga

SEQ ID NO: 936150 - RNA, 21 nt, Human
agcuggugucagagcucuggg

SEQ ID NO: 936151 - RNA, 22 nt, Human
gucuucaacaauaacuaccacu

SEQ ID NO: 936152 - RNA, 21 nt, Human
uuuauuaacaacuguggacgu

SEQ ID NO: 936153 - RNA, 22 nt, Human
aggacagcagugcuggcacuug

SEQ ID NO: 936154 - RNA, 22 nt, Human
uacaacauuguguugcuucaua

SEQ ID NO: 936155 - RNA, 22 nt, Human
acauucaaggccuucugacaca

SEQ ID NO: 936156 - RNA, 22 nt, Human
gagcugggcacacgccacuuga

SEQ ID NO: 936157 - RNA, 22 nt, Human
cagggccagccgcagcauccac

SEQ ID NO: 936158 - RNA, 22 nt, Human
gcuggcuugauaguuucugcuu

SEQ ID NO: 936159 - RNA, 22 nt, Human
ucaguggagcuaagcaugagau

SEQ ID NO: 936160 - RNA, 22 nt, Human
caccagcagaagacugagggug

SEQ ID NO: 936161 - RNA, 22 nt, Human
uuuuuguagucauuagaagagg

SEQ ID NO: 936162 - RNA, 20 nt, Human
auacacuugcccagcuugug

SEQ ID NO: 936163 - RNA, 22 nt, Human
ggugacugguuuaucuggcagu

SEQ ID NO: 936164 - RNA, 22 nt, Human
aacaugucuggguauucacaag

SEQ ID NO: 936165 - RNA, 22 nt, Human
gcugagagugagcacuggauau

SEQ ID NO: 936166 - RNA, 22 nt, Human
uggcagcagggccccuggagga

SEQ ID NO: 936167 - RNA, 22 nt, Human
uaaaauguuugcaagagaccag

SEQ ID NO: 936168 - RNA, 22 nt, Human
gcacagcaauuucuauaagcuc

SEQ ID NO: 936169 - RNA, 22 nt, Human
aacuuucuuggaugucucaaca

SEQ ID NO: 936170 - RNA, 22 nt, Human
caggcagcucuaauggaaagug

SEQ ID NO: 936171 - RNA, 22 nt, Human
caggguggcaggcaccauggcc

SEQ ID NO: 936172 - RNA, 22 nt, Human
cucugagcuccuggaagcgugc

SEQ ID NO: 936173 - RNA, 22 nt, Human
ggcaggcugggugucauggagu

SEQ ID NO: 936174 - RNA, 22 nt, Human
aggccaaguagcuagcauugaa

SEQ ID NO: 936175 - RNA, 23 nt, Human
gagagcugacugucaagacuguu

SEQ ID NO: 936176 - RNA, 22 nt, Human
auuauguagguuaggugguugu

SEQ ID NO: 936177 - RNA, 23 nt, Human
cacugggcccaggguguggaggc

SEQ ID NO: 936178 - RNA, 22 nt, Human
uucaggauuguguuuuuccuga

SEQ ID NO: 936179 - RNA, 22 nt, Human
cacagcauaaugaaauauacuu

SEQ ID NO: 936180 - RNA, 22 nt, Human
agagggauggccccguaacuca

SEQ ID NO: 936181 - RNA, 22 nt, Human
aggauaguugugaagauaggcu

SEQ ID NO: 936182 - RNA, 22 nt, Human
cagaaggcuggcagauugagau

SEQ ID NO: 936183 - RNA, 22 nt, Human
uggcuucuugggaugggucauu

SEQ ID NO: 936184 - RNA, 22 nt, Human
ugugacagaucuuuaaauaaug

SEQ ID NO: 936185 - RNA, 22 nt, Human
uggcagcuagauaguguguuua

SEQ ID NO: 936186 - RNA, 22 nt, Human
guggauggauugaggcaguggg

SEQ ID NO: 936187 - RNA, 22 nt, Human
gaggcaucugggcacagaagug

SEQ ID NO: 936188 - RNA, 22 nt, Human
gccaggcagcugggagggugcc

SEQ ID NO: 936189 - RNA, 22 nt, Human
gagccaggggucagcuccgagg

SEQ ID NO: 936190 - RNA, 22 nt, Human
agcauugccugccuauugcuaa

SEQ ID NO: 936191 - RNA, 22 nt, Human
aggccuagaggaauggccaggg

SEQ ID NO: 936192 - RNA, 22 nt, Human
aggcucugacccaugggaccca

SEQ ID NO: 936193 - RNA, 22 nt, Human
gcaggcugugaggcucagaugg

SEQ ID NO: 936194 - RNA, 22 nt, Human
cuggcugggagcgagcugcuca

SEQ ID NO: 936195 - RNA, 22 nt, Human
gccaggaguguguggcuauguu

SEQ ID NO: 936196 - RNA, 22 nt, Human
ucagggcagaauccaaagaauu

SEQ ID NO: 936197 - RNA, 22 nt, Human
ugagagggcccagagcacacca

SEQ ID NO: 936198 - RNA, 22 nt, Human
agaaauaugcugauuagaugaa

SEQ ID NO: 936199 - RNA, 22 nt, Human
guggaggacaaaagaagccuuu

SEQ ID NO: 936200 - RNA, 22 nt, Human
agccuccuggaguuucugggau

SEQ ID NO: 936201 - RNA, 22 nt, Human
aagcaagacagaaguuacugcc

SEQ ID NO: 936202 - RNA, 21 nt, Human
aaguuuguucuuguauagucu

SEQ ID NO: 936203 - RNA, 22 nt, Human
gugcagugacccuggagagcug

SEQ ID NO: 936204 - RNA, 22 nt, Human
ucccagcgcggggggaggaucc

SEQ ID NO: 936205 - RNA, 22 nt, Human
acucugacuggagugagagagg

SEQ ID NO: 936206 - RNA, 22 nt, Human
aggggugauuugggacaggaca

SEQ ID NO: 936207 - RNA, 22 nt, Human
ccuguucaaguugcagggcugg

SEQ ID NO: 936208 - RNA, 22 nt, Human
uuguuacagcagugauuucaga

SEQ ID NO: 936209 - RNA, 19 nt, Human
uuuaggauaaagucuggac

SEQ ID NO: 936210 - RNA, 22 nt, Human
uggcucaggagggaucuuugcu

SEQ ID NO: 936211 - RNA, 22 nt, Human
acaacaggguaaggcaggccau

SEQ ID NO: 936212 - RNA, 22 nt, Human
ugaacagauggcccagcagagg

SEQ ID NO: 936213 - RNA, 22 nt, Human
agaauucucuuccauugaaaca

SEQ ID NO: 936214 - RNA, 21 nt, Human
ugauccuuucccccauguugc

SEQ ID NO: 936215 - RNA, 22 nt, Human
gacauucacaguuuccgauggu

SEQ ID NO: 936216 - RNA, 22 nt, Human
gagcagaacuacucacauaucg

SEQ ID NO: 936217 - RNA, 22 nt, Human
agcuauguaacagugccaugga

SEQ ID NO: 936218 - RNA, 22 nt, Human
uggcaccagcaccuagaugggg

SEQ ID NO: 936219 - RNA, 22 nt, Human
caaagccucugauuucacuugu

SEQ ID NO: 936220 - RNA, 22 nt, Human
uuuggaauguaguuuaaucauc

SEQ ID NO: 936221 - RNA, 22 nt, Human
aagaacagguucuagaaccauu

SEQ ID NO: 936222 - RNA, 22 nt, Human
uagauuuuacuucugucauuac

SEQ ID NO: 936223 - RNA, 22 nt, Human
ucauuuguugcuguuaccugag

SEQ ID NO: 936224 - RNA, 22 nt, Human
uguguuccuucgucuucccuuc

SEQ ID NO: 936225 - RNA, 22 nt, Human
cugggguggauggguccaaguu

SEQ ID NO: 936226 - RNA, 22 nt, Human
uggaaagaugaagauguuuaag

SEQ ID NO: 936227 - RNA, 22 nt, Human
uucucagguagugcugaugcug

SEQ ID NO: 936228 - RNA, 22 nt, Human
ucaaagucucugcuucuguaac

SEQ ID NO: 936229 - RNA, 22 nt, Human
gcugccagcucacucuccugag

SEQ ID NO: 936230 - RNA, 22 nt, Human
aagcucugcucagcagacuagg

SEQ ID NO: 936231 - RNA, 22 nt, Human
ugaacuccaaauacugcugauu

SEQ ID NO: 936232 - RNA, 22 nt, Human
aguggcaguagaugagcugguu

SEQ ID NO: 936233 - RNA, 22 nt, Human
guaggaagcucugaggcuaguu

SEQ ID NO: 936234 - RNA, 22 nt, Human
aggaccagccuccaggucucuu

SEQ ID NO: 936235 - RNA, 22 nt, Human
agcagcaggcuguguggacuga

SEQ ID NO: 936236 - RNA, 22 nt, Human
cccaggaaaucaggcuuucuag

SEQ ID NO: 936237 - RNA, 19 nt, Human
uucauucucuuauuguugu

SEQ ID NO: 936238 - RNA, 22 nt, Human
ggauaagaaaauuguaauaacu

SEQ ID NO: 936239 - RNA, 22 nt, Human
agccuucagcaguucaggugcc

SEQ ID NO: 936240 - RNA, 18 nt, Human
gccugggaggaggaaaug

SEQ ID NO: 936241 - RNA, 22 nt, Human
ucuuuccaaggacucuguagca

SEQ ID NO: 936242 - RNA, 21 nt, Human
ugcagcagaguaagcagggga

SEQ ID NO: 936243 - RNA, 22 nt, Human
aaaaagauguccugaaguuuag

SEQ ID NO: 936244 - RNA, 21 nt, Human
agcagccauuucacagagacu

SEQ ID NO: 936245 - RNA, 22 nt, Human
ggagauggaauagauucugacu

SEQ ID NO: 936246 - RNA, 22 nt, Human
gcugagcuagcuaucucagucu

SEQ ID NO: 936247 - RNA, 22 nt, Human
aaguucaaggcagguccugagg

SEQ ID NO: 936248 - RNA, 22 nt, Human
ccagcuggucugugcucauguu

SEQ ID NO: 936249 - RNA, 22 nt, Human
uguaucaaggguuuauguaagc

SEQ ID NO: 936250 - RNA, 22 nt, Human
ccuggaagauucaccacuacca

SEQ ID NO: 936251 - RNA, 22 nt, Human
aagagcuggucacagguccauu

SEQ ID NO: 936252 - RNA, 22 nt, Human
aauguguguauuucuaggcgag

SEQ ID NO: 936253 - RNA, 22 nt, Human
gggaaggagguggcuugaagug

SEQ ID NO: 936254 - RNA, 22 nt, Human
ggcccugggaugcucagcagug

SEQ ID NO: 936255 - RNA, 22 nt, Human
ugagagugaaaugucacauguc

SEQ ID NO: 936256 - RNA, 22 nt, Human
ugagaggccccagcucuuggcc

SEQ ID NO: 936257 - RNA, 22 nt, Human
ggcagccaugcacgcugccugg

SEQ ID NO: 936258 - RNA, 22 nt, Human
ugaaucugauuucccuggaggc

SEQ ID NO: 936259 - RNA, 22 nt, Human
ucugucaccgagggcauccaaa

SEQ ID NO: 936260 - RNA, 22 nt, Human
cagaauuugaaguaauauucca

SEQ ID NO: 936261 - RNA, 17 nt, Human
uuaagguggaucagcac

SEQ ID NO: 936262 - RNA, 22 nt, Human
uugcugugaaaccaugggaagu

SEQ ID NO: 936263 - RNA, 22 nt, Human
auuaggaaacugaaugucagaa

SEQ ID NO: 936264 - RNA, 18 nt, Human
augugucuuucuuguuug

SEQ ID NO: 936265 - RNA, 19 nt, Human
cugguccugacugaggggu

SEQ ID NO: 936266 - RNA, 22 nt, Human
agagugucugguagcugcucug

SEQ ID NO: 936267 - RNA, 22 nt, Human
uugcauguuauuuaaucuguau

SEQ ID NO: 936268 - RNA, 18 nt, Human
uagaauauaggucauucu

SEQ ID NO: 936269 - RNA, 22 nt, Human
aagaggaggacgguucccagaa

SEQ ID NO: 936270 - RNA, 22 nt, Human
ggugggugagcccugggagcug

SEQ ID NO: 936271 - RNA, 22 nt, Human
uuugcauuuguuuagaaccuga

SEQ ID NO: 936272 - RNA, 22 nt, Human
cugccagguuggcgcucgcucu

SEQ ID NO: 936273 - RNA, 22 nt, Human
auccaaaccuggacaugagugg

SEQ ID NO: 936274 - RNA, 22 nt, Human
gagcugcccugagcuuugcaug

SEQ ID NO: 936275 - RNA, 22 nt, Human
gggcagaggggcgcuucccucu

SEQ ID NO: 936276 - RNA, 22 nt, Human
uccaggaccucccaggcuagag

SEQ ID NO: 936277 - RNA, 22 nt, Human
ggccucuggucaagacaagcau

SEQ ID NO: 936278 - RNA, 22 nt, Human
ggaggggagguccagcugaucu

SEQ ID NO: 936279 - RNA, 22 nt, Human
ugccuggcaacuguggugggcu

SEQ ID NO: 936280 - RNA, 17 nt, Human
acucaggaucugggagu

SEQ ID NO: 936281 - RNA, 22 nt, Human
uggcagaggcucugugauguug

SEQ ID NO: 936282 - RNA, 22 nt, Human
ugggccugggagggcagacgcu

SEQ ID NO: 936283 - RNA, 22 nt, Human
guucaaagcuccugguacagua

SEQ ID NO: 936284 - RNA, 22 nt, Human
ucugccuggguguggagcagag

SEQ ID NO: 936285 - RNA, 22 nt, Human
aaggcccuggcaggaagcagga

SEQ ID NO: 936286 - RNA, 22 nt, Human
aaacauuugcaacucgguuugg

SEQ ID NO: 936287 - RNA, 22 nt, Human
uccugucugcucacagagcugg

SEQ ID NO: 936288 - RNA, 22 nt, Human
ggaaagaccugagauaggaaua

SEQ ID NO: 936289 - RNA, 22 nt, Human
aggccagaaaugucagggagug

SEQ ID NO: 936290 - RNA, 23 nt, Human
uagagcagggaaaucugucagag

SEQ ID NO: 936291 - RNA, 22 nt, Human
agagcuggacgucugagcccua

SEQ ID NO: 936292 - RNA, 22 nt, Human
ugaagccuuguguggccucucu

SEQ ID NO: 936293 - RNA, 22 nt, Human
uucagcaaacacgaugcuuguu

SEQ ID NO: 936294 - RNA, 22 nt, Human
gcuggucacucugggagcugcu

SEQ ID NO: 936295 - RNA, 22 nt, Human
gguucacacuaagcuuaagugg

SEQ ID NO: 936296 - RNA, 22 nt, Human
acccugagggguauagcagaag

SEQ ID NO: 936297 - RNA, 22 nt, Human
gagcagcuccagccgcaugacu

SEQ ID NO: 936298 - RNA, 22 nt, Human
cccugggacccgcugcagaggc

SEQ ID NO: 936299 - RNA, 22 nt, Human
agcagggcaaagucaggcuaac

SEQ ID NO: 936300 - RNA, 22 nt, Human
uguaucaaaccaaauuaauucu

SEQ ID NO: 936301 - RNA, 17 nt, Human
aaaauucuguaaagagg

SEQ ID NO: 936302 - RNA, 18 nt, Human
uccuggccacacuaccuu

SEQ ID NO: 936303 - RNA, 18 nt, Human
gccugcaggcacgggggu

SEQ ID NO: 936304 - RNA, 22 nt, Human
ucucccaggugggugccuggag

SEQ ID NO: 936305 - RNA, 22 nt, Human
aacaucagaauauccauguugg

SEQ ID NO: 936306 - RNA, 22 nt, Human
cagguccccuccccuaccaggc

SEQ ID NO: 936307 - RNA, 22 nt, Human
aggcucugacgucacacguggc

SEQ ID NO: 936308 - RNA, 22 nt, Human
cuguggaauugaugcuuagugu

SEQ ID NO: 936309 - RNA, 22 nt, Human
gcuggggagggcgucaaggcca

SEQ ID NO: 936310 - RNA, 22 nt, Human
agggucugacaaugugacuuag

SEQ ID NO: 936311 - RNA, 22 nt, Human
gcccaggaaaugccccguggug

SEQ ID NO: 936312 - RNA, 22 nt, Human
cucaguuucuucauauuguagg

SEQ ID NO: 936313 - RNA, 22 nt, Human
aauauuuguuaguguuuuaaug

SEQ ID NO: 936314 - RNA, 22 nt, Human
cugaggugcuagggucccugcu

SEQ ID NO: 936315 - RNA, 22 nt, Human
uggcucuggauuaaucuaggaa

SEQ ID NO: 936316 - RNA, 22 nt, Human
agauggcagggguaccuggaag

SEQ ID NO: 936317 - RNA, 22 nt, Human
aauucacauauacauuauuccu

SEQ ID NO: 936318 - RNA, 22 nt, Human
uccuggucuacacugcauuggg

SEQ ID NO: 936319 - RNA, 21 nt, Human
ggccuuggcgggggccgaauu

SEQ ID NO: 936320 - RNA, 22 nt, Human
gcuggccuccugcuagauggaa

SEQ ID NO: 936321 - RNA, 22 nt, Human
agaggcggagguugcagugagc

SEQ ID NO: 936322 - RNA, 22 nt, Human
ugggagcaggaagcaggaagua

SEQ ID NO: 936323 - RNA, 22 nt, Human
uugaaaugcagauuccaaucca

SEQ ID NO: 936324 - RNA, 22 nt, Human
ggcagcuccaaaaggaaacacu

SEQ ID NO: 936325 - RNA, 22 nt, Human
ggcuggguuauuuauggccaag

SEQ ID NO: 936326 - RNA, 21 nt, Human
acucugcugcgggcuuggccu

SEQ ID NO: 936327 - RNA, 22 nt, Human
ggcagggagagcaugcugauaa

SEQ ID NO: 936328 - RNA, 23 nt, Human
ggccacaaauagucuccccuggc

SEQ ID NO: 936329 - RNA, 21 nt, Human
uucugagcacucaucacuguc

SEQ ID NO: 936330 - RNA, 22 nt, Human
uacuuuggauccuuacaauagc

SEQ ID NO: 936331 - RNA, 22 nt, Human
ucuggcuccaccuccuuuacua

SEQ ID NO: 936332 - RNA, 22 nt, Human
uuuacaaccucauauucugaug

SEQ ID NO: 936333 - RNA, 22 nt, Human
cuuggcugucuauaggaaagag

SEQ ID NO: 936334 - RNA, 22 nt, Human
uggugaagucagcggagcccgg

SEQ ID NO: 936335 - RNA, 22 nt, Human
aaacagcuaauggccaggaaua

SEQ ID NO: 936336 - RNA, 22 nt, Human
gguggcagaggugcaucagccc

SEQ ID NO: 936337 - RNA, 22 nt, Human
aggguagggccguagggccaug

SEQ ID NO: 936338 - RNA, 22 nt, Human
ugagccaaugauuugaauagag

SEQ ID NO: 936339 - RNA, 22 nt, Human
uuuuucauauuccccucucugg

SEQ ID NO: 936340 - RNA, 22 nt, Human
uggcagccacaucucguggauu

SEQ ID NO: 936341 - RNA, 22 nt, Human
aggcuggaguacaguggcuauu

SEQ ID NO: 936342 - RNA, 22 nt, Human
cugccuugaggagguuguggga

SEQ ID NO: 936343 - RNA, 19 nt, Human
auuagcaugcuugaggaug

SEQ ID NO: 936344 - RNA, 22 nt, Human
aauaugcauuaacuguguacau

SEQ ID NO: 936345 - RNA, 22 nt, Human
cccaugagaccugguuuaaggc

SEQ ID NO: 936346 - RNA, 22 nt, Human
agucaauuaucucuaggucauc

SEQ ID NO: 936347 - RNA, 22 nt, Human
uauuccaguccuauccucuuuu

SEQ ID NO: 936348 - RNA, 20 nt, Human
uauaacaguguugggugugu

SEQ ID NO: 936349 - RNA, 22 nt, Human
gcacugugacccagagcaggug

SEQ ID NO: 936350 - RNA, 21 nt, Human
uggaaagauucaaagaccagg

SEQ ID NO: 936351 - RNA, 22 nt, Human
ucuugccucuuccccuuuccau

SEQ ID NO: 936352 - RNA, 22 nt, Human
cccaggaggcagaaguugcagu

SEQ ID NO: 936353 - RNA, 22 nt, Human
cugccugugugugccugcagaa

SEQ ID NO: 936354 - RNA, 20 nt, Human
cuccucaguuccaugggagg

SEQ ID NO: 936355 - RNA, 22 nt, Human
ucccagaggcaguugguaacuu

SEQ ID NO: 936356 - RNA, 22 nt, Human
ucuccuggagcaggaagguggg

SEQ ID NO: 936357 - RNA, 22 nt, Human
uagauuuuaggagauuuuacug

SEQ ID NO: 936358 - RNA, 22 nt, Human
uaaaacugaauacauacugagg

SEQ ID NO: 936359 - RNA, 22 nt, Human
gaaaucugaaucuucuguuggu

SEQ ID NO: 936360 - RNA, 22 nt, Human
aggcaagcauuuaaccacucau

SEQ ID NO: 936361 - RNA, 22 nt, Human
ggugggcaacauuuggccugag

SEQ ID NO: 936362 - RNA, 22 nt, Human
gcaagcugcucuuauguggagg

SEQ ID NO: 936363 - RNA, 22 nt, Human
ucccagagugagccaggggcag

SEQ ID NO: 936364 - RNA, 22 nt, Human
cagcauugaucccaggcugugg

SEQ ID NO: 936365 - RNA, 20 nt, Human
ucauuguguugccaauuccc

SEQ ID NO: 936366 - RNA, 22 nt, Human
cuguuacacggaccuucaaauc

SEQ ID NO: 936367 - RNA, 22 nt, Human
ucucaccauggugcuugcuuau

SEQ ID NO: 936368 - RNA, 22 nt, Human
uauugacaauuugugaaacuau

SEQ ID NO: 936369 - RNA, 20 nt, Human
agaguaacuggcacauaggg

SEQ ID NO: 936370 - RNA, 22 nt, Human
ugaugggaggugcugcaggacc

SEQ ID NO: 936371 - RNA, 22 nt, Human
uuuauuauguacaggcacuaua

SEQ ID NO: 936372 - RNA, 19 nt, Human
ggcagcuggacgcuguuca

SEQ ID NO: 936373 - RNA, 22 nt, Human
gccuaggagacaagcgugaaag

SEQ ID NO: 936374 - RNA, 22 nt, Human
cagagguagaaggcaugcagug

SEQ ID NO: 936375 - RNA, 22 nt, Human
acagauauaugauuguguaaau

SEQ ID NO: 936376 - RNA, 22 nt, Human
gccccuggcuggccagcuccuc

SEQ ID NO: 936377 - RNA, 19 nt, Human
acacagggaucagaggguu

SEQ ID NO: 936378 - RNA, 22 nt, Human
augaccccuaaaauuuacuguc

SEQ ID NO: 936379 - RNA, 22 nt, Human
aggagaggucucccuuccccag

SEQ ID NO: 936380 - RNA, 22 nt, Human
cacauacaaugguguuauuugg

SEQ ID NO: 936381 - RNA, 22 nt, Human
cugagcucuaaugucagccuug

SEQ ID NO: 936382 - RNA, 20 nt, Human
uucacagaggacucagguca

SEQ ID NO: 936383 - RNA, 22 nt, Human
ccugucuggaacauggccuguu

SEQ ID NO: 936384 - RNA, 22 nt, Human
aaauuuaagaagugugugcgug

SEQ ID NO: 936385 - RNA, 20 nt, Human
ucagagucaucaaagauggu

SEQ ID NO: 936386 - RNA, 22 nt, Human
auauaaagagcuuaguauagug

SEQ ID NO: 936387 - RNA, 21 nt, Human
ggauggauagggaagagauuu

SEQ ID NO: 936388 - RNA, 22 nt, Human
ugucaaauuuuuauugcaguau

SEQ ID NO: 936389 - RNA, 22 nt, Human
ggcuuccuggggccuccugcaa

SEQ ID NO: 936390 - RNA, 22 nt, Human
uagcccagaagagggaagcaac

SEQ ID NO: 936391 - RNA, 22 nt, Human
cagagguaccagcagccucugg

SEQ ID NO: 936392 - RNA, 22 nt, Human
uccugagcuucaaaacacuuug

SEQ ID NO: 936393 - RNA, 22 nt, Human
ccucaggguggcaucagaucuu

SEQ ID NO: 936394 - RNA, 19 nt, Human
ccaguagagacagcugcag

SEQ ID NO: 936395 - RNA, 22 nt, Human
guuugcauuuauuagucuucug

SEQ ID NO: 936396 - RNA, 22 nt, Human
uuuccaagagcuuauuucugaa

SEQ ID NO: 936397 - RNA, 22 nt, Human
guauucuugguuaucaaaauac

SEQ ID NO: 936398 - RNA, 22 nt, Human
aaaauguaaagcuugaguguag

SEQ ID NO: 936399 - RNA, 22 nt, Human
ccagaggcuggcagccagcuga

SEQ ID NO: 936400 - RNA, 22 nt, Human
ggcucuggugaggguaggagau

SEQ ID NO: 936401 - RNA, 17 nt, Human
aggccagaugaggcaag

SEQ ID NO: 936402 - RNA, 22 nt, Human
aguggcagaagucacuggguag

SEQ ID NO: 936403 - RNA, 22 nt, Human
ucaggggagguugaaucgucuc

SEQ ID NO: 936404 - RNA, 22 nt, Human
gcaggcagagagggguuuccag

SEQ ID NO: 936405 - RNA, 22 nt, Human
uuguccuuaccucaaucuggaa

SEQ ID NO: 936406 - RNA, 22 nt, Human
ccaguugguuucaaugggacag

SEQ ID NO: 936407 - RNA, 19 nt, Human
accaggcuuauggucagug

SEQ ID NO: 936408 - RNA, 22 nt, Human
cccucugccugcgcccuggugu

SEQ ID NO: 936409 - RNA, 22 nt, Human
ggcugggcuccgggagcaugcg

SEQ ID NO: 936410 - RNA, 22 nt, Human
cagugcagccaaggacaggcac

SEQ ID NO: 936411 - RNA, 22 nt, Human
ugggagcagcuuugcgagggag

SEQ ID NO: 936412 - RNA, 21 nt, Human
aucauucuggaaaauucaagc

SEQ ID NO: 936413 - RNA, 20 nt, Human
cucaggauugucuagccccu

SEQ ID NO: 936414 - RNA, 22 nt, Human
ugaggggauacgguacacauug

SEQ ID NO: 936415 - RNA, 22 nt, Human
ucucagagaacaguuggugcuu

SEQ ID NO: 936416 - RNA, 22 nt, Human
auggggugaccaugagcauuua

SEQ ID NO: 936417 - RNA, 22 nt, Human
gcugggcuugguuucccugcuu

SEQ ID NO: 936418 - RNA, 22 nt, Human
gugguaaucggauucuuaccgg

SEQ ID NO: 936419 - RNA, 22 nt, Human
auacacauauguguguauaugu

SEQ ID NO: 936420 - RNA, 22 nt, Human
uccuggaggcaaaugaagacuc

SEQ ID NO: 936421 - RNA, 22 nt, Human
gcaggugguccccguggagugg

SEQ ID NO: 936422 - RNA, 22 nt, Human
ugcugggcuugaaagcugcuaa

SEQ ID NO: 936423 - RNA, 22 nt, Human
aaaagggacuacucucagcucc

SEQ ID NO: 936424 - RNA, 22 nt, Human
uaguuuaauggucaacuaauga

SEQ ID NO: 936425 - RNA, 22 nt, Human
auuucacucuuaauugcuuccu

SEQ ID NO: 936426 - RNA, 22 nt, Human
cuggcugugcugcaggcuuugg

SEQ ID NO: 936427 - RNA, 22 nt, Human
ccuucuucuguguggcccaaga

SEQ ID NO: 936428 - RNA, 22 nt, Human
uggccuggcucacagugagauu

SEQ ID NO: 936429 - RNA, 22 nt, Human
cccuguacagucucuguggcac

SEQ ID NO: 936430 - RNA, 22 nt, Human
caguggccaugguggcaggggu

SEQ ID NO: 936431 - RNA, 22 nt, Human
uacauaguuccauuuacaggaa

SEQ ID NO: 936432 - RNA, 22 nt, Human
guggagccaggaucuccgcaca

SEQ ID NO: 936433 - RNA, 22 nt, Human
guguguuucagaagccaggugu

SEQ ID NO: 936434 - RNA, 22 nt, Human
uuugucagucaugucugcuuuu

SEQ ID NO: 936435 - RNA, 22 nt, Human
accacuguaucuccagcacauu

SEQ ID NO: 936436 - RNA, 22 nt, Human
acuuugcaauacuuaauacaaa

SEQ ID NO: 936437 - RNA, 22 nt, Human
aacacauaggcagagcaugaca

SEQ ID NO: 936438 - RNA, 23 nt, Human
acagagguccaaacaguauaagc

SEQ ID NO: 936439 - RNA, 22 nt, Human
ugccagcuccgaggagcugcag

SEQ ID NO: 936440 - RNA, 22 nt, Human
aaucuggcauuugagaguagga

SEQ ID NO: 936441 - RNA, 21 nt, Human
gcagccacugccuucaacaau

SEQ ID NO: 936442 - RNA, 22 nt, Human
gcugugcuggaaggggaccugc

SEQ ID NO: 936443 - RNA, 22 nt, Human
uauuucuggcuuugagggugau

SEQ ID NO: 936444 - RNA, 22 nt, Human
uggaggaugagugugggcucug

SEQ ID NO: 936445 - RNA, 22 nt, Human
ugggcagaauugugguaguuaa

SEQ ID NO: 936446 - RNA, 22 nt, Human
cagcagugcuucagugugagau

SEQ ID NO: 936447 - RNA, 22 nt, Human
auguguccacaggugugagaga

SEQ ID NO: 936448 - RNA, 22 nt, Human
gagguagcgaguggacagugca

SEQ ID NO: 936449 - RNA, 22 nt, Human
acauuucuauagugcaucuguu

SEQ ID NO: 936450 - RNA, 22 nt, Human
agguaaaauagauaguauuucu

SEQ ID NO: 936451 - RNA, 19 nt, Human
gcugcucugggucucaucu

SEQ ID NO: 936452 - RNA, 22 nt, Human
gcccagcaggacagagugguuu

SEQ ID NO: 936453 - RNA, 22 nt, Human
gggccucugugcagaggggccu

SEQ ID NO: 936454 - RNA, 21 nt, Human
ucagggcagugggagguuccu

SEQ ID NO: 936455 - RNA, 22 nt, Human
gauggcagguaguggucucauc

SEQ ID NO: 936456 - RNA, 22 nt, Human
uuucagugcuucuguuuaccgg

SEQ ID NO: 936457 - RNA, 22 nt, Human
gcucagagauggggaaugaaaa

SEQ ID NO: 936458 - RNA, 22 nt, Human
caaaugcuaacuucuuuccaaa

SEQ ID NO: 936459 - RNA, 22 nt, Human
agcaggugacagggcuguggug

SEQ ID NO: 936460 - RNA, 22 nt, Human
acauauauuacuaguaaagaca

SEQ ID NO: 936461 - RNA, 22 nt, Human
agccugcaggaugggcagcacc

SEQ ID NO: 936462 - RNA, 22 nt, Human
ggcugcuucucacucauuugca

SEQ ID NO: 936463 - RNA, 22 nt, Human
aauugacagaaaguuuacgagg

SEQ ID NO: 936464 - RNA, 22 nt, Human
uccugccuagcaggugaccuau

SEQ ID NO: 936465 - RNA, 22 nt, Human
ucugagccaaaauaaacagcau

SEQ ID NO: 936466 - RNA, 22 nt, Human
ucaguuuuaagguuugagaauu

SEQ ID NO: 936467 - RNA, 22 nt, Human
ccccagcacuuggaguggggag

SEQ ID NO: 936468 - RNA, 22 nt, Human
uguuuuuacugugauccagaaa

SEQ ID NO: 936469 - RNA, 19 nt, Human
uacauuuguguacacuugu

SEQ ID NO: 936470 - RNA, 22 nt, Human
cugcugugggcaggguagcugg

SEQ ID NO: 936471 - RNA, 22 nt, Human
aggagccaagauggggcaagua

SEQ ID NO: 936472 - RNA, 22 nt, Human
cagggcuggcucaugaaaaguu

SEQ ID NO: 936473 - RNA, 22 nt, Human
ucuggcucaggucagacaggga

SEQ ID NO: 936474 - RNA, 22 nt, Human
aagauuuaccacuuuauucaag

SEQ ID NO: 936475 - RNA, 22 nt, Human
uuaggaaucaccugcagaucuu

SEQ ID NO: 936476 - RNA, 22 nt, Human
gcucccaggaagagaagggcca

SEQ ID NO: 936477 - RNA, 19 nt, Human
aacuagaaagguuuugaga

SEQ ID NO: 936478 - RNA, 22 nt, Human
ggcuuccuaauacucccuacac

SEQ ID NO: 936479 - RNA, 18 nt, Human
caguuuuuauaucuggca

SEQ ID NO: 936480 - RNA, 22 nt, Human
ucagcagggccuccuugugcag

SEQ ID NO: 936481 - RNA, 20 nt, Human
gccagcccugacacaggagc

SEQ ID NO: 936482 - RNA, 17 nt, Human
ucaggcugggugcagug

SEQ ID NO: 936483 - RNA, 22 nt, Human
cucagaagaacaaaggcucuac

SEQ ID NO: 936484 - RNA, 22 nt, Human
uuuaauuaggaaaugggcaggg

SEQ ID NO: 936485 - RNA, 22 nt, Human
ggcucaggcuggagugcagugg

SEQ ID NO: 936486 - RNA, 22 nt, Human
caggcaccccaggugagcacug

SEQ ID NO: 936487 - RNA, 22 nt, Human
uguuuaaauagaacauacugca

SEQ ID NO: 936488 - RNA, 22 nt, Human
auagaaauggcagcuggugcua

SEQ ID NO: 936489 - RNA, 22 nt, Human
caggggcaggugugagaucauc

SEQ ID NO: 936490 - RNA, 22 nt, Human
cagguggaucucuaaggacuga

SEQ ID NO: 936491 - RNA, 22 nt, Human
aagauggagcacgagcagaagc

SEQ ID NO: 936492 - RNA, 22 nt, Human
gcuguccucugaucucuggagg

SEQ ID NO: 936493 - RNA, 22 nt, Human
ggccuugguaaagggaugcaug

SEQ ID NO: 936494 - RNA, 22 nt, Human
ccugccagggccuuggaagaaa

SEQ ID NO: 936495 - RNA, 22 nt, Human
ucugcaggcuuauaggaugggu

SEQ ID NO: 936496 - RNA, 22 nt, Human
uugcuguguaacuccuggccug

SEQ ID NO: 936497 - RNA, 17 nt, Human
gcuguaguuugauaaga

SEQ ID NO: 936498 - RNA, 22 nt, Human
uucaggaucacuaaacccucca

SEQ ID NO: 936499 - RNA, 22 nt, Human
gaaggccacaaaaaaugucaua

SEQ ID NO: 936500 - RNA, 22 nt, Human
uccaguggguugcugagggagg

SEQ ID NO: 936501 - RNA, 22 nt, Human
uccucagggggccaacccagcc

SEQ ID NO: 936502 - RNA, 22 nt, Human
uuauacuaaaacgcauugaauu

SEQ ID NO: 936503 - RNA, 23 nt, Human
cugcagccgcguggggacgugga

SEQ ID NO: 936504 - RNA, 17 nt, Human
agccccucagcgucacc

SEQ ID NO: 936505 - RNA, 22 nt, Human
cagggcagggccacacccccug

SEQ ID NO: 936506 - RNA, 22 nt, Human
gccugccuguuggcugaggugc

SEQ ID NO: 936507 - RNA, 22 nt, Human
cagaggaggccaccgcauaggc

SEQ ID NO: 936508 - RNA, 22 nt, Human
guggagacuucuacuagagacc

SEQ ID NO: 936509 - RNA, 22 nt, Human
uucaggauggcggauguugggg

SEQ ID NO: 936510 - RNA, 22 nt, Human
gcugaagcccacguggcuugua

SEQ ID NO: 936511 - RNA, 22 nt, Human
uugcauuugaucuuggguucuc

SEQ ID NO: 936512 - RNA, 22 nt, Human
agagcugugaaaaugagguuug

SEQ ID NO: 936513 - RNA, 22 nt, Human
gcccaggacucagggugucgcg

SEQ ID NO: 936514 - RNA, 22 nt, Human
guggccaacucaauguuuuuca

SEQ ID NO: 936515 - RNA, 22 nt, Human
ucaggagaaucagggcuguccu

SEQ ID NO: 936516 - RNA, 22 nt, Human
uuggccaagacucauguccuau

SEQ ID NO: 936517 - RNA, 22 nt, Human
uaagaaauuuaguuauagaaug

SEQ ID NO: 936518 - RNA, 21 nt, Human
agccuguugguuuacugcuca

SEQ ID NO: 936519 - RNA, 22 nt, Human
guccucugggcagcugccccac

SEQ ID NO: 936520 - RNA, 22 nt, Human
ggggcagagagaaggaagcuug

SEQ ID NO: 936521 - RNA, 22 nt, Human
guaggcagugguuggaagagaa

SEQ ID NO: 936522 - RNA, 22 nt, Human
cuagagggauguuaggauagca

SEQ ID NO: 936523 - RNA, 22 nt, Human
ccagguggcuucugcccgaugu

SEQ ID NO: 936524 - RNA, 22 nt, Human
aguggugcugcgcgcggagcuc

SEQ ID NO: 936525 - RNA, 23 nt, Human
cccuggccuuggggcacaggcug

SEQ ID NO: 936526 - RNA, 18 nt, Human
ccgggcuuuggugacaca

SEQ ID NO: 936527 - RNA, 22 nt, Human
cagggacagccuugggguggcg

SEQ ID NO: 936528 - RNA, 22 nt, Human
uuuuuauaugaaggauagugcg

SEQ ID NO: 936529 - RNA, 22 nt, Human
ugcugcucaaugagaugccauc

SEQ ID NO: 936530 - RNA, 22 nt, Human
agagucuuccaggcagccugag

SEQ ID NO: 936531 - RNA, 22 nt, Human
auguaucaacaaauuguacagu

SEQ ID NO: 936532 - RNA, 22 nt, Human
cuugcuuuguccagaaauucag

SEQ ID NO: 936533 - RNA, 22 nt, Human
cugaaggagcauagucaguuuu

SEQ ID NO: 936534 - RNA, 17 nt, Human
uccaugagacaugaaga

SEQ ID NO: 936535 - RNA, 20 nt, Human
ccagagcagccacugaaguu

SEQ ID NO: 936536 - RNA, 22 nt, Human
ucuggccuauuucugucagauc

SEQ ID NO: 936537 - RNA, 22 nt, Human
gggccugugcacaguucuguua

SEQ ID NO: 936538 - RNA, 22 nt, Human
uccucaggcugccuggaagacu

SEQ ID NO: 936539 - RNA, 22 nt, Human
guccucugcuucaugcccugau

SEQ ID NO: 936540 - RNA, 22 nt, Human
ugaggcaggaggauugcaggau

SEQ ID NO: 936541 - RNA, 22 nt, Human
auguauguaguguacauauaca

SEQ ID NO: 936542 - RNA, 22 nt, Human
ucaaaguaaaaguauagaguuu

SEQ ID NO: 936543 - RNA, 18 nt, Human
ccucagggagagagacgc

SEQ ID NO: 936544 - RNA, 22 nt, Human
acuguucauuuguccuguaucu

SEQ ID NO: 936545 - RNA, 22 nt, Human
aggcaccuugcgguccagugaa

SEQ ID NO: 936546 - RNA, 22 nt, Human
ugccagugggugugcagagacu

SEQ ID NO: 936547 - RNA, 22 nt, Human
ucuccuggcaugugggucaucu

SEQ ID NO: 936548 - RNA, 21 nt, Human
ggagcugcaggagccgaaggc

SEQ ID NO: 936549 - RNA, 22 nt, Human
auuccaguucuccucucuaaag

SEQ ID NO: 936550 - RNA, 22 nt, Human
cagcacugcugcuguacacaca

SEQ ID NO: 936551 - RNA, 22 nt, Human
cuucacauguuggaguccuuug

SEQ ID NO: 936552 - RNA, 22 nt, Human
acuggccaggcacagcuguggg

SEQ ID NO: 936553 - RNA, 22 nt, Human
ugggcuggagcuuguugcuucc

SEQ ID NO: 936554 - RNA, 22 nt, Human
gaggcagugucgguggcaggau

SEQ ID NO: 936555 - RNA, 22 nt, Human
uuuaaauaggacuccugggggu

SEQ ID NO: 936556 - RNA, 22 nt, Human
ugagaguauuuuggcauuauca

SEQ ID NO: 936557 - RNA, 22 nt, Human
cagcugaauucuucagacucca

SEQ ID NO: 936558 - RNA, 22 nt, Human
cauuagaagaacaguuauauua

SEQ ID NO: 936559 - RNA, 22 nt, Human
agagccugugauugucaucacc

SEQ ID NO: 936560 - RNA, 22 nt, Human
gcccagcagaucucagugucuc

SEQ ID NO: 936561 - RNA, 22 nt, Human
uuuauuauucucuggagaaugu

SEQ ID NO: 936562 - RNA, 21 nt, Human
cacucaggguaugugccaggc

SEQ ID NO: 936563 - RNA, 22 nt, Human
cagggacaauggcagagccuga

SEQ ID NO: 936564 - RNA, 22 nt, Human
cagagaaaaaauccugcucuca

SEQ ID NO: 936565 - RNA, 23 nt, Human
gccugccugaccugugcaaaguc

SEQ ID NO: 936566 - RNA, 22 nt, Human
ccauaagguuuggggccaugca

SEQ ID NO: 936567 - RNA, 22 nt, Human
uuccaugaaggagacugagaag

SEQ ID NO: 936568 - RNA, 21 nt, Human
uggccaaacuggagcauuuga

SEQ ID NO: 936569 - RNA, 22 nt, Human
gugcucacugugagacguccug

SEQ ID NO: 936570 - RNA, 22 nt, Human
cagaccugagguugaguaccag

SEQ ID NO: 936571 - RNA, 22 nt, Human
ucaauaaaauuguuuuccuauc

SEQ ID NO: 936572 - RNA, 22 nt, Human
caaauguauucucacuucaggg

SEQ ID NO: 936573 - RNA, 22 nt, Human
gcccugggauuggguggaggcu

SEQ ID NO: 936574 - RNA, 22 nt, Human
cugaaggaagcagaagcgaggu

SEQ ID NO: 936575 - RNA, 22 nt, Human
gcaggccuuggcaaugagccug

SEQ ID NO: 936576 - RNA, 22 nt, Human
ucuucagaggaagucagucuuu

SEQ ID NO: 936577 - RNA, 22 nt, Human
ucuuuacaaucuaagcauaguu

SEQ ID NO: 936578 - RNA, 23 nt, Human
uggccaagauaaucucaguuuuc

SEQ ID NO: 936579 - RNA, 22 nt, Human
ccugcuucagggaugauggcac

SEQ ID NO: 936580 - RNA, 22 nt, Human
cucagccugugaagagcagagg

SEQ ID NO: 936581 - RNA, 22 nt, Human
gucccaggcagagucaggaggg

SEQ ID NO: 936582 - RNA, 16 nt, Human
agaggccuugaggaag

SEQ ID NO: 936583 - RNA, 22 nt, Human
aaacuccugggcucaagcaguu

SEQ ID NO: 936584 - RNA, 23 nt, Human
ccagucucuuuccaaaaucacau

SEQ ID NO: 936585 - RNA, 22 nt, Human
uggagaggaaagugcaguuuug

SEQ ID NO: 936586 - RNA, 22 nt, Human
cagcccagccgagggccuggcu

SEQ ID NO: 936587 - RNA, 22 nt, Human
aggccugaggaccagauaaaug

SEQ ID NO: 936588 - RNA, 22 nt, Human
gcugagagcggccagcugggaa

SEQ ID NO: 936589 - RNA, 22 nt, Human
gagcagaacaggccggguggga

SEQ ID NO: 936590 - RNA, 22 nt, Human
ucaggaucaggggccuuuccuu

SEQ ID NO: 936591 - RNA, 18 nt, Human
acaggccucaguccugca

SEQ ID NO: 936592 - RNA, 22 nt, Human
gcuuccugagaaacaaucugau

SEQ ID NO: 936593 - RNA, 22 nt, Human
acaauauuguacccagaaguuu

SEQ ID NO: 936594 - RNA, 22 nt, Human
agccaaggacacggagccuccu

SEQ ID NO: 936595 - RNA, 19 nt, Human
ggccuggauuuagggcucc

SEQ ID NO: 936596 - RNA, 22 nt, Human
caggagacuauggcccaaggcc

SEQ ID NO: 936597 - RNA, 22 nt, Human
cccaggcugaguuagagguguc

SEQ ID NO: 936598 - RNA, 22 nt, Human
ggagguggcagagggacauucu

SEQ ID NO: 936599 - RNA, 22 nt, Human
agucuuaugguuaaauagaugc

SEQ ID NO: 936600 - RNA, 22 nt, Human
gauguuucaugcuagcaugugu

SEQ ID NO: 936601 - RNA, 22 nt, Human
uauauuaguggaaugauaugaa

SEQ ID NO: 936602 - RNA, 22 nt, Human
agcuccugcucuuugucccuaa

SEQ ID NO: 936603 - RNA, 22 nt, Human
gcagugcugaucccauggcaga

SEQ ID NO: 936604 - RNA, 18 nt, Human
uuaaggauaagcagacua

SEQ ID NO: 936605 - RNA, 22 nt, Human
uccaggaggcucugguugacgu

SEQ ID NO: 936606 - RNA, 22 nt, Human
auuuccaggagaaaggauuuua

SEQ ID NO: 936607 - RNA, 18 nt, Human
agcugcagaccaggaggu

SEQ ID NO: 936608 - RNA, 22 nt, Human
uacagggguaacaguggggaau

SEQ ID NO: 936609 - RNA, 22 nt, Human
gccugaaguuucaugccucuau

SEQ ID NO: 936610 - RNA, 22 nt, Human
ucuugggaccauuuacacauac

SEQ ID NO: 936611 - RNA, 22 nt, Human
cagucucucugaaguauuaaga

SEQ ID NO: 936612 - RNA, 22 nt, Human
uaggaugacacagcaaguauag

SEQ ID NO: 936613 - RNA, 22 nt, Human
cucccugggcagauguggcucu

SEQ ID NO: 936614 - RNA, 22 nt, Human
cuugcaggccuuucuagcucua

SEQ ID NO: 936615 - RNA, 22 nt, Human
cagugcaugaaacaauaugcag

SEQ ID NO: 936616 - RNA, 22 nt, Human
auuuguaagcuagagccaugau

SEQ ID NO: 936617 - RNA, 22 nt, Human
gaccauuucuaggaaucagacu

SEQ ID NO: 936618 - RNA, 22 nt, Human
ucuccugggugcuuuaucagaa

SEQ ID NO: 936619 - RNA, 22 nt, Human
cugccuggaccggcagcccucc

SEQ ID NO: 936620 - RNA, 22 nt, Human
auguacauuuagaucauuucug

SEQ ID NO: 936621 - RNA, 22 nt, Human
cucuccagaucugcugagccag

SEQ ID NO: 936622 - RNA, 22 nt, Human
ggagcagccuguguagacgggg

SEQ ID NO: 936623 - RNA, 22 nt, Human
aagcagcugauuucacagcuca

SEQ ID NO: 936624 - RNA, 22 nt, Human
agugaaauuccuggucuuuguu

SEQ ID NO: 936625 - RNA, 22 nt, Human
gccuggagcucaugugggcauu

SEQ ID NO: 936626 - RNA, 22 nt, Human
ccuguggcucucuuuggagguc

SEQ ID NO: 936627 - RNA, 22 nt, Human
uuucaucuaacacuacauaggg

SEQ ID NO: 936628 - RNA, 22 nt, Human
aucugcuuccuccuuagggaaa

SEQ ID NO: 936629 - RNA, 22 nt, Human
ggaggccaaggcgggcggauca

SEQ ID NO: 936630 - RNA, 22 nt, Human
ugagccuguccugugcauguga

SEQ ID NO: 936631 - RNA, 22 nt, Human
cagagccagcuguccuuggcau

SEQ ID NO: 936632 - RNA, 22 nt, Human
uagaauaugauuaauuuucuua

SEQ ID NO: 936633 - RNA, 22 nt, Human
ggcagcugggucacaccgaucu

SEQ ID NO: 936634 - RNA, 21 nt, Human
ugucauuaaucgcuauagaag

SEQ ID NO: 936635 - RNA, 22 nt, Human
ucagagguaagggcugagagga

SEQ ID NO: 936636 - RNA, 22 nt, Human
uguccauggauagagcugcucg

SEQ ID NO: 936637 - RNA, 23 nt, Human
accaggagaaaagcuuugcggga

SEQ ID NO: 936638 - RNA, 22 nt, Human
uugacaauugggagauauaaag

SEQ ID NO: 936639 - RNA, 22 nt, Human
agcugccaccucugccuuuggg

SEQ ID NO: 936640 - RNA, 22 nt, Human
cauuuguaguaucuguuuauau

SEQ ID NO: 936641 - RNA, 22 nt, Human
ugaggcagggagaguggauaug

SEQ ID NO: 936642 - RNA, 22 nt, Human
caagggaccugagauggucucu

SEQ ID NO: 936643 - RNA, 22 nt, Human
ggagccagagggaugcaguuga

SEQ ID NO: 936644 - RNA, 22 nt, Human
aauuaggaauaaaugaguacuu

SEQ ID NO: 936645 - RNA, 22 nt, Human
uguuuaauugggccaacagcgg

SEQ ID NO: 936646 - RNA, 22 nt, Human
aagagcugcaucuaagccauga

SEQ ID NO: 936647 - RNA, 22 nt, Human
ccuggcagacagcacugaagcu

SEQ ID NO: 936648 - RNA, 18 nt, Human
agugugugcccuuucagg

SEQ ID NO: 936649 - RNA, 22 nt, Human
aaaggccacuugaaggauuuuu

SEQ ID NO: 936650 - RNA, 22 nt, Human
uucuuaggacuaguauagcaug

SEQ ID NO: 936651 - RNA, 22 nt, Human
guuuacauauuuuaauugguga

SEQ ID NO: 936652 - RNA, 19 nt, Human
auuccucaaggacagaaau

SEQ ID NO: 936653 - RNA, 22 nt, Human
uauugaguuacagaaaauacuu

SEQ ID NO: 936654 - RNA, 22 nt, Human
agaacagaggccuuauguuuca

SEQ ID NO: 936655 - RNA, 20 nt, Human
cuuagaaauuuuuacccugg

SEQ ID NO: 936656 - RNA, 22 nt, Human
ucucagagaccugaacucccug

SEQ ID NO: 936657 - RNA, 22 nt, Human
auucuucauguugaagcuguca

SEQ ID NO: 936658 - RNA, 22 nt, Human
cacagcugccauggcugcacuu

SEQ ID NO: 936659 - RNA, 22 nt, Human
caggguggaagcuguagagugg

SEQ ID NO: 936660 - RNA, 22 nt, Human
aggagagagaacacuugggucc

SEQ ID NO: 936661 - RNA, 22 nt, Human
uuagaaaucugcugccaugcaa

SEQ ID NO: 936662 - RNA, 22 nt, Human
guucacaucacuucacugaacc

SEQ ID NO: 936663 - RNA, 22 nt, Human
auaugugugaugcauggacuaa

SEQ ID NO: 936664 - RNA, 22 nt, Human
uuuuauagcugaauaguauucc

SEQ ID NO: 936665 - RNA, 22 nt, Human
cagcaguguggaagcugagggg

SEQ ID NO: 936666 - RNA, 22 nt, Human
ucugggaaccagugcggcuggg

SEQ ID NO: 936667 - RNA, 22 nt, Human
cuggcucuucagugcuugguuc

SEQ ID NO: 936668 - RNA, 22 nt, Human
ggagauuuauagcacacuucag

SEQ ID NO: 936669 - RNA, 22 nt, Human
ugaggaugacgauggcaauggc

SEQ ID NO: 936670 - RNA, 22 nt, Human
aagccagcauuuucccauuccu

SEQ ID NO: 936671 - RNA, 22 nt, Human
acccaggagccgugagagguua

SEQ ID NO: 936672 - RNA, 22 nt, Human
uucacagucacccuucuccaug

SEQ ID NO: 936673 - RNA, 22 nt, Human
uaaagugcugggauuauaggcc

SEQ ID NO: 936674 - RNA, 22 nt, Human
uccuggagauaauugcagugaa

SEQ ID NO: 936675 - RNA, 22 nt, Human
ggcagugguuagaaacaugagc

SEQ ID NO: 936676 - RNA, 20 nt, Human
agcaagaguaaggacagcga

SEQ ID NO: 936677 - RNA, 22 nt, Human
uggcccugaggggcugugcccc

SEQ ID NO: 936678 - RNA, 22 nt, Human
cugcagagcaaguaacauccuc

SEQ ID NO: 936679 - RNA, 22 nt, Human
ggcaggcuggcuuuguuccagg

SEQ ID NO: 936680 - RNA, 22 nt, Human
accacaggaauugcucuguggu

SEQ ID NO: 936681 - RNA, 22 nt, Human
auugcuguggaaauauaagaug

SEQ ID NO: 936682 - RNA, 22 nt, Human
ggggacccucaggacugcgucu

SEQ ID NO: 936683 - RNA, 22 nt, Human
ucauugcagugauguuguaugu

SEQ ID NO: 936684 - RNA, 18 nt, Human
ucuuuggacaacuacugg

SEQ ID NO: 936685 - RNA, 22 nt, Human
augauacaucuucaugucagug

SEQ ID NO: 936686 - RNA, 22 nt, Human
cuccugugggucaccaauaggc

SEQ ID NO: 936687 - RNA, 22 nt, Human
auucuucaucagagaugcacua

SEQ ID NO: 936688 - RNA, 22 nt, Human
ggcagcaugagccuggugaauu

SEQ ID NO: 936689 - RNA, 22 nt, Human
caugcugugugguuagaacugu

SEQ ID NO: 936690 - RNA, 22 nt, Human
acagggcaaccucugggagacu

SEQ ID NO: 936691 - RNA, 22 nt, Human
cucacagguaccagcacccucc

SEQ ID NO: 936692 - RNA, 22 nt, Human
ucucacugcaaauauuauguau

SEQ ID NO: 936693 - RNA, 22 nt, Human
guucuucagaggggaaagaacc

SEQ ID NO: 936694 - RNA, 19 nt, Human
agugaaauggaguauucaa

SEQ ID NO: 936695 - RNA, 22 nt, Human
ucuccuggccgggcuguccccu

SEQ ID NO: 936696 - RNA, 22 nt, Human
gcuggugcauuagcugcaguuc

SEQ ID NO: 936697 - RNA, 22 nt, Human
agaggccggccgagcccauggg

SEQ ID NO: 936698 - RNA, 22 nt, Human
ggccugggcccacugucaagag

SEQ ID NO: 936699 - RNA, 22 nt, Human
gggcugggauggcuugaagauu

SEQ ID NO: 936700 - RNA, 22 nt, Human
cugggagcuuuuagaaaugcag

SEQ ID NO: 936701 - RNA, 22 nt, Human
uauuucagacacugaucuugca

SEQ ID NO: 936702 - RNA, 22 nt, Human
ggcuccugggaugggacugagc

SEQ ID NO: 936703 - RNA, 22 nt, Human
ugcuuaauauugugauguaaua

SEQ ID NO: 936704 - RNA, 22 nt, Human
ggcuggcacugaggagagcucu

SEQ ID NO: 936705 - RNA, 22 nt, Human
acuaugcucauuguuaauauuu

SEQ ID NO: 936706 - RNA, 22 nt, Human
ugcacauucacuuagguauugu

SEQ ID NO: 936707 - RNA, 22 nt, Human
gagguacaugaggauacacagg

SEQ ID NO: 936708 - RNA, 22 nt, Human
gcagagaacccagcagauuggc

SEQ ID NO: 936709 - RNA, 22 nt, Human
gccacccccaaguagguggucu

SEQ ID NO: 936710 - RNA, 22 nt, Human
cacacaggagagugcuggaggu

SEQ ID NO: 936711 - RNA, 22 nt, Human
cacugugucaguuugguuagac

SEQ ID NO: 936712 - RNA, 19 nt, Human
ggcugggucuggcagguuc

SEQ ID NO: 936713 - RNA, 22 nt, Human
cccagcacaggcaauuccauac

SEQ ID NO: 936714 - RNA, 22 nt, Human
uacugcaugguggaguggagcu

SEQ ID NO: 936715 - RNA, 22 nt, Human
agccacagcuccuugguggaga

SEQ ID NO: 936716 - RNA, 22 nt, Human
gcaggagcucguuuccaggcug

SEQ ID NO: 936717 - RNA, 22 nt, Human
ccuuuuucccuggagggacagc

SEQ ID NO: 936718 - RNA, 22 nt, Human
aaauuauuaugccccucuauaa

SEQ ID NO: 936719 - RNA, 22 nt, Human
ucuggcucccagccugcucuca

SEQ ID NO: 936720 - RNA, 22 nt, Human
gcucaggaccgaggggugggaa

SEQ ID NO: 936721 - RNA, 22 nt, Human
aaacuguauauuuauggcaugu

SEQ ID NO: 936722 - RNA, 21 nt, Human
cagagcuguccaaacccugac

SEQ ID NO: 936723 - RNA, 22 nt, Human
acagcaagccagcuugucacug

SEQ ID NO: 936724 - RNA, 22 nt, Human
aggaguggaauuacuggguucu

SEQ ID NO: 936725 - RNA, 22 nt, Human
cagagccauuauggagacuugc

SEQ ID NO: 936726 - RNA, 22 nt, Human
cuggaagguuccucccagcucc

SEQ ID NO: 936727 - RNA, 22 nt, Human
cuacugaguccuucagcugcca

SEQ ID NO: 936728 - RNA, 22 nt, Human
ugagccagauaagggcucacgc

SEQ ID NO: 936729 - RNA, 20 nt, Human
caucaucacaugagccaauu

SEQ ID NO: 936730 - RNA, 22 nt, Human
aagcaaaagguuacacuucugg

SEQ ID NO: 936731 - RNA, 22 nt, Human
uggagccaaggccaguucucag

SEQ ID NO: 936732 - RNA, 22 nt, Human
uggugcaagucucugaggaggg

SEQ ID NO: 936733 - RNA, 22 nt, Human
ugugaaaugaagauaauucuug

SEQ ID NO: 936734 - RNA, 18 nt, Human
uccagcgugcuccagggc

SEQ ID NO: 936735 - RNA, 22 nt, Human
aggcccuggucaggucuggcug

SEQ ID NO: 936736 - RNA, 22 nt, Human
accagccugucugagucguggg

SEQ ID NO: 936737 - RNA, 22 nt, Human
uccauggguagcccugguugag

SEQ ID NO: 936738 - RNA, 22 nt, Human
gcagcugagcgugaggaagagu

SEQ ID NO: 936739 - RNA, 22 nt, Human
acaggcagcacuaaucucuggu

SEQ ID NO: 936740 - RNA, 22 nt, Human
cccugagagugagugccaccuu

SEQ ID NO: 936741 - RNA, 22 nt, Human
uucauacaguggcugcacucca

SEQ ID NO: 936742 - RNA, 22 nt, Human
uucagcaagugucucuacuguc

SEQ ID NO: 936743 - RNA, 22 nt, Human
gcugagguaggagguugcagug

SEQ ID NO: 936744 - RNA, 22 nt, Human
ucucaggaucuaauacauggua

SEQ ID NO: 936745 - RNA, 22 nt, Human
cagccagguucaaguccuuaua

SEQ ID NO: 936746 - RNA, 22 nt, Human
cccuggagcugcuugcauguug

SEQ ID NO: 936747 - RNA, 17 nt, Human
uauguaguacuuauaaa

SEQ ID NO: 936748 - RNA, 22 nt, Human
gaaaaagugaccuugguagcua

SEQ ID NO: 936749 - RNA, 22 nt, Human
ucucucugccaacucacagcca

SEQ ID NO: 936750 - RNA, 20 nt, Human
accuuucaaaugauucagca

SEQ ID NO: 936751 - RNA, 22 nt, Human
auggggcugggauucuccucgg

SEQ ID NO: 936752 - RNA, 22 nt, Human
agccuggagcuugaguuaugag

SEQ ID NO: 936753 - RNA, 22 nt, Human
gcccaugcacuuucugugaugg

SEQ ID NO: 936754 - RNA, 22 nt, Human
acauuugagaugccuuuuaggu

SEQ ID NO: 936755 - RNA, 22 nt, Human
ccaggccugcaucugcugcgca

SEQ ID NO: 936756 - RNA, 22 nt, Human
gcugcugugccuggcguccugu

SEQ ID NO: 936757 - RNA, 22 nt, Human
ugguaaauauguccauucucuu

SEQ ID NO: 936758 - RNA, 22 nt, Human
ccuguucaauauucuuccuugu

SEQ ID NO: 936759 - RNA, 18 nt, Human
gggcucugauccuucacc

SEQ ID NO: 936760 - RNA, 22 nt, Human
auaguuugugaaacacagcagu

SEQ ID NO: 936761 - RNA, 22 nt, Human
agaguguuucagucuuccuaga

SEQ ID NO: 936762 - RNA, 22 nt, Human
gcucuguacgcaggaugagggg

SEQ ID NO: 936763 - RNA, 22 nt, Human
ucuucaauuagauuuaccaauu

SEQ ID NO: 936764 - RNA, 22 nt, Human
gugcccugaguggguaggagag

SEQ ID NO: 936765 - RNA, 22 nt, Human
uccugagauaaaucucauguga

SEQ ID NO: 936766 - RNA, 22 nt, Human
acuggcagccacaacuggcagg

SEQ ID NO: 936767 - RNA, 18 nt, Human
uugauaaacaauuucauu

SEQ ID NO: 936768 - RNA, 22 nt, Human
gcagggagguuugcugaccugg

SEQ ID NO: 936769 - RNA, 22 nt, Human
auugacaagugagcugggcugc

SEQ ID NO: 936770 - RNA, 22 nt, Human
aaguaugugauacauguuaauu

SEQ ID NO: 936771 - RNA, 22 nt, Human
cagggcagggauguugcggcag

SEQ ID NO: 936772 - RNA, 22 nt, Human
ugaagaugucagcagggguggu

SEQ ID NO: 936773 - RNA, 22 nt, Human
ggaggaccugcuggcccugcaa

SEQ ID NO: 936774 - RNA, 22 nt, Human
ucugagcuggagcccaucaccu

SEQ ID NO: 936775 - RNA, 22 nt, Human
gccaggcugaggcucuggaaga

SEQ ID NO: 936776 - RNA, 22 nt, Human
uguaauauuguagugacaguac

SEQ ID NO: 936777 - RNA, 22 nt, Human
ccuggccucgugcucacggcuc

SEQ ID NO: 936778 - RNA, 22 nt, Human
uuuaugagcaccuuggcccaga

SEQ ID NO: 936779 - RNA, 20 nt, Human
cugggcugcccagcuauggg

SEQ ID NO: 936780 - RNA, 18 nt, Human
aaggcuucaaagaguaga

SEQ ID NO: 936781 - RNA, 22 nt, Human
cuucagaaugggacuguguuug

SEQ ID NO: 936782 - RNA, 22 nt, Human
cagggagaaaucuccaggaggu

SEQ ID NO: 936783 - RNA, 22 nt, Human
gagccuccuccuggugugccga

SEQ ID NO: 936784 - RNA, 21 nt, Human
aaggccugcuuacugcuaguu

SEQ ID NO: 936785 - RNA, 22 nt, Human
aacucugcaaccuauguagacc

SEQ ID NO: 936786 - RNA, 22 nt, Human
cugccuuugcccuugacacugu

SEQ ID NO: 936787 - RNA, 22 nt, Human
agcuguucccucacugcaguca

SEQ ID NO: 936788 - RNA, 22 nt, Human
uuuauuugucuugccauuuagu

SEQ ID NO: 936789 - RNA, 22 nt, Human
ggccucuguuuggagccaggau

SEQ ID NO: 936790 - RNA, 22 nt, Human
cugcuguguuucugcuagaaaa

SEQ ID NO: 936791 - RNA, 22 nt, Human
augcucugggcaggagcccugg

SEQ ID NO: 936792 - RNA, 22 nt, Human
aacaaauguaaaaugcagaugc

SEQ ID NO: 936793 - RNA, 22 nt, Human
aggauuuugacuuauucaggga

SEQ ID NO: 936794 - RNA, 22 nt, Human
uacauuguucaugcaugagaaa

SEQ ID NO: 936795 - RNA, 22 nt, Human
agccagacauggcuccugcucc

SEQ ID NO: 936796 - RNA, 23 nt, Human
ugaguucucaucuuggcuucuau

SEQ ID NO: 936797 - RNA, 18 nt, Human
aaaaugcaggcgacaugg

SEQ ID NO: 936798 - RNA, 22 nt, Human
ugagcuguagcagaugcuguug

SEQ ID NO: 936799 - RNA, 22 nt, Human
gcauucuuuuuaggagguuccu

SEQ ID NO: 936800 - RNA, 22 nt, Human
gcuagaaaucgacuucagaauu

SEQ ID NO: 936801 - RNA, 22 nt, Human
ugaauauguuccucacaaguuc

SEQ ID NO: 936802 - RNA, 21 nt, Human
uccuucaguucugcacuuucu

SEQ ID NO: 936803 - RNA, 22 nt, Human
cccagggauuauaaaggugaaa

SEQ ID NO: 936804 - RNA, 22 nt, Human
cugaaggaagcagguggccugu

SEQ ID NO: 936805 - RNA, 22 nt, Human
ggcucaggacacagugguuuag

SEQ ID NO: 936806 - RNA, 22 nt, Human
gugugcagaagacacaagacau

SEQ ID NO: 936807 - RNA, 22 nt, Human
auaaggcagucacuggaauguu

SEQ ID NO: 936808 - RNA, 22 nt, Human
cuggcagcgcagcaugaagucg

SEQ ID NO: 936809 - RNA, 22 nt, Human
ugugcccauuccacuugaguac

SEQ ID NO: 936810 - RNA, 22 nt, Human
uguggcucucaugcacucccag

SEQ ID NO: 936811 - RNA, 22 nt, Human
ucagggcauacucuucaagguc

SEQ ID NO: 936812 - RNA, 22 nt, Human
ucuucuuccuccacagggccca

SEQ ID NO: 936813 - RNA, 22 nt, Human
ugcuuggcuuucugagcuucug

SEQ ID NO: 936814 - RNA, 22 nt, Human
auauauaagcugaugagccaca

SEQ ID NO: 936815 - RNA, 22 nt, Human
cagggcagagggaaacuccuuu

SEQ ID NO: 936816 - RNA, 22 nt, Human
aggagacaucuaacuguagguu

SEQ ID NO: 936817 - RNA, 22 nt, Human
uggccucuuaggacauccucua

SEQ ID NO: 936818 - RNA, 22 nt, Human
accccagcucugagccacacca

SEQ ID NO: 936819 - RNA, 20 nt, Human
auccaugagagucuggauuc

SEQ ID NO: 936820 - RNA, 22 nt, Human
cccaagagguggagguugcagu

SEQ ID NO: 936821 - RNA, 22 nt, Human
ucugagccaccugccagugcug

SEQ ID NO: 936822 - RNA, 22 nt, Human
guaagagcacugucuccugcug

SEQ ID NO: 936823 - RNA, 19 nt, Human
ugaagcaauaccauuuuug

SEQ ID NO: 936824 - RNA, 22 nt, Human
gaaaagagaacaucugaggauc

SEQ ID NO: 936825 - RNA, 22 nt, Human
auacuaaaguauagaacuuagu

SEQ ID NO: 936826 - RNA, 21 nt, Human
ugcuggaaaaagugguucuag

SEQ ID NO: 936827 - RNA, 22 nt, Human
aaucauucuuauuucacagcaa

SEQ ID NO: 936828 - RNA, 22 nt, Human
cagggcaguaacgggaacaucu

SEQ ID NO: 936829 - RNA, 22 nt, Human
accacugggcgggcagccugcu

SEQ ID NO: 936830 - RNA, 22 nt, Human
uaaaugcaaugugcuuuaccag

SEQ ID NO: 936831 - RNA, 22 nt, Human
gggcuacauugugagagaaguu

SEQ ID NO: 936832 - RNA, 22 nt, Human
uggcagagguauauugggagga

SEQ ID NO: 936833 - RNA, 22 nt, Human
ggaggccaaggcagguggaucg

SEQ ID NO: 936834 - RNA, 22 nt, Human
ugcugaaauuagaacauugagg

SEQ ID NO: 936835 - RNA, 22 nt, Human
aagacagaccacgugacagggc

SEQ ID NO: 936836 - RNA, 22 nt, Human
uuggccaagucacugguuaaug

SEQ ID NO: 936837 - RNA, 22 nt, Human
acccaggguagagugcaguggc

SEQ ID NO: 936838 - RNA, 22 nt, Human
gcugagguggagauugcaguga

SEQ ID NO: 936839 - RNA, 22 nt, Human
aggugccagaugcacagcugaa

SEQ ID NO: 936840 - RNA, 22 nt, Human
uccugccucuccaugcuaacua

SEQ ID NO: 936841 - RNA, 22 nt, Human
ccuggccucagacagagggugg

SEQ ID NO: 936842 - RNA, 22 nt, Human
cuacccagagugaaucucuuaa

SEQ ID NO: 936843 - RNA, 22 nt, Human
uuuauugcauacacaaauguca

SEQ ID NO: 936844 - RNA, 22 nt, Human
ccuccuggugacaaggcaaagc

SEQ ID NO: 936845 - RNA, 22 nt, Human
aggcugaggcagguggaucauu

SEQ ID NO: 936846 - RNA, 19 nt, Human
gccugcagaaaaggcaggg

SEQ ID NO: 936847 - RNA, 22 nt, Human
cugcuucuccaaaguaggacuu

SEQ ID NO: 936848 - RNA, 21 nt, Human
uucaaugaaaacaaagugagg

SEQ ID NO: 936849 - RNA, 22 nt, Human
uaugaacucuggagucugagug

SEQ ID NO: 936850 - RNA, 22 nt, Human
ccagcccucacugaggccucuc

SEQ ID NO: 936851 - RNA, 21 nt, Human
agggagcuauuuauaguaagc

SEQ ID NO: 936852 - RNA, 22 nt, Human
cagagccaggucuaggagucuc

SEQ ID NO: 936853 - RNA, 22 nt, Human
cucucugagugagggacaagcu

SEQ ID NO: 936854 - RNA, 18 nt, Human
uccagagcuacuguggug

SEQ ID NO: 936855 - RNA, 22 nt, Human
acagaacugggaaaugcacaua

SEQ ID NO: 936856 - RNA, 22 nt, Human
acuggcagagacccugauggcc

SEQ ID NO: 936857 - RNA, 22 nt, Human
gagacaaaaguuggagugcaag

SEQ ID NO: 936858 - RNA, 22 nt, Human
ggaggugguggcagugacaauu

SEQ ID NO: 936859 - RNA, 22 nt, Human
cuugggaaugcuaacagaugac

SEQ ID NO: 936860 - RNA, 22 nt, Human
uagaaacacagaucugguguca

SEQ ID NO: 936861 - RNA, 22 nt, Human
cagccuuuuaggacuauuugug

SEQ ID NO: 936862 - RNA, 22 nt, Human
agagccuggaccugagcuacaa

SEQ ID NO: 936863 - RNA, 19 nt, Human
ucccuuccugucgggcucc

SEQ ID NO: 936864 - RNA, 22 nt, Human
ccucugagagaaggccuucagc

SEQ ID NO: 936865 - RNA, 22 nt, Human
acuugggaugguggccagagcg

SEQ ID NO: 936866 - RNA, 22 nt, Human
cacugcuucuggaggaauuugg

SEQ ID NO: 936867 - RNA, 22 nt, Human
caagaaauuucuuaagaacuaa

SEQ ID NO: 936868 - RNA, 20 nt, Human
gacaggagaguuagguaggu

SEQ ID NO: 936869 - RNA, 22 nt, Human
ugucaccaguuccaggaaauaa

SEQ ID NO: 936870 - RNA, 22 nt, Human
caaggaaaacagaugaucaaca

SEQ ID NO: 936871 - RNA, 22 nt, Human
uuugaaaggugucgagaugugu

SEQ ID NO: 936872 - RNA, 22 nt, Human
cuuugaauugccguuucaucug

SEQ ID NO: 936873 - RNA, 22 nt, Human
cagcugccacuugcucucggcu

SEQ ID NO: 936874 - RNA, 17 nt, Human
agcugaccagauggacu

SEQ ID NO: 936875 - RNA, 22 nt, Human
auauuaauuauuuacacaugag

SEQ ID NO: 936876 - RNA, 22 nt, Human
aggagcagaacuguuguggagg

SEQ ID NO: 936877 - RNA, 22 nt, Human
acuguucacagauuagucgaug

SEQ ID NO: 936878 - RNA, 21 nt, Human
ucuguucaaggaacuacggau

SEQ ID NO: 936879 - RNA, 22 nt, Human
caaauaguaugagcaaugauuc

SEQ ID NO: 936880 - RNA, 17 nt, Human
auuuccucagggcugag

SEQ ID NO: 936881 - RNA, 20 nt, Human
cccugcagccaugggagugg

SEQ ID NO: 936882 - RNA, 22 nt, Human
caguucuuaauaccaugugguu

SEQ ID NO: 936883 - RNA, 20 nt, Human
gcaaauggaucccacaagcc

SEQ ID NO: 936884 - RNA, 22 nt, Human
ucuggcucccuggagcuccaca

SEQ ID NO: 936885 - RNA, 22 nt, Human
agucucaggcagaggaaggcua

SEQ ID NO: 936886 - RNA, 22 nt, Human
gaggggcugggguugacuccaa

SEQ ID NO: 936887 - RNA, 22 nt, Human
caaguaugagaaagcuauuacc

SEQ ID NO: 936888 - RNA, 22 nt, Human
agcugccaggccccugagaacc

SEQ ID NO: 936889 - RNA, 22 nt, Human
aggcuucccagcugagcucagc

SEQ ID NO: 936890 - RNA, 22 nt, Human
cccagacucaucccugggagcu

SEQ ID NO: 936891 - RNA, 22 nt, Human
uuucagaucauuuuuuaaguac

SEQ ID NO: 936892 - RNA, 22 nt, Human
aggcagaaaauagucauccaaa

SEQ ID NO: 936893 - RNA, 22 nt, Human
ggucccagcuggucacugucag

SEQ ID NO: 936894 - RNA, 22 nt, Human
agcauuuaauuacaguuuaauu

SEQ ID NO: 936895 - RNA, 22 nt, Human
aggaguggugcaggaccugcca

SEQ ID NO: 936896 - RNA, 22 nt, Human
augcugugauuguagaaauauu

SEQ ID NO: 936897 - RNA, 22 nt, Human
uuucucaguuacuagcuguggu

SEQ ID NO: 936898 - RNA, 19 nt, Human
gcuuuuuguugucaaaggu

SEQ ID NO: 936899 - RNA, 22 nt, Human
uucuccagagggcucugcagga

SEQ ID NO: 936900 - RNA, 22 nt, Human
ucccagagucuucuccuguaau

SEQ ID NO: 936901 - RNA, 22 nt, Human
gccaccucggcuuucucugcuc

SEQ ID NO: 936902 - RNA, 22 nt, Human
ucccuggacaacagacuucacu

SEQ ID NO: 936903 - RNA, 22 nt, Human
gccugcuggaggagccucaggg

SEQ ID NO: 936904 - RNA, 22 nt, Human
cucacuguccaacaggcuuuac

SEQ ID NO: 936905 - RNA, 22 nt, Human
gguaaaaugcagauucuuagcc

SEQ ID NO: 936906 - RNA, 21 nt, Human
uagcacuucgcuguaauuggg

SEQ ID NO: 936907 - RNA, 22 nt, Human
caggaaugaggucguaaguguc

SEQ ID NO: 936908 - RNA, 22 nt, Human
auugaaagaguuuucugcugca

SEQ ID NO: 936909 - RNA, 22 nt, Human
gauuucaaggaguuuucacagu

SEQ ID NO: 936910 - RNA, 22 nt, Human
gcucucuuuuuccagugguggu

SEQ ID NO: 936911 - RNA, 22 nt, Human
gaaggucaccuccccucucugg

SEQ ID NO: 936912 - RNA, 22 nt, Human
uuuguaagcaaguuaacauuuu

SEQ ID NO: 936913 - RNA, 22 nt, Human
acagagcacauagauuggaguu

SEQ ID NO: 936914 - RNA, 22 nt, Human
aaucucuugggaggaaugaauu

SEQ ID NO: 936915 - RNA, 22 nt, Human
aucuucaaagcacaucguuugu

SEQ ID NO: 936916 - RNA, 22 nt, Human
cuggagccagccagggcccucu

SEQ ID NO: 936917 - RNA, 22 nt, Human
ucccuggcagcuaagggugguc

SEQ ID NO: 936918 - RNA, 22 nt, Human
cugucucuguugccuguaggug

SEQ ID NO: 936919 - RNA, 22 nt, Human
gagagucuagugcaccuaguuu

SEQ ID NO: 936920 - RNA, 22 nt, Human
gcacacagccagcugagggcua

SEQ ID NO: 936921 - RNA, 21 nt, Human
gcaaauguucaggaaaaaaga

SEQ ID NO: 936922 - RNA, 22 nt, Human
gcuuuguguagaaggaggaugg

SEQ ID NO: 936923 - RNA, 22 nt, Human
gccaggaggggagaguguguca

SEQ ID NO: 936924 - RNA, 22 nt, Human
cacagggccuggggcagcugcu

SEQ ID NO: 936925 - RNA, 22 nt, Human
ucuuagaaugucaacugauguu

SEQ ID NO: 936926 - RNA, 22 nt, Human
cauaagaaauuuaacagaacuu

SEQ ID NO: 936927 - RNA, 22 nt, Human
agcuggaggauaacucacuucu

SEQ ID NO: 936928 - RNA, 22 nt, Human
aauuaggaaauucagccauuuu

SEQ ID NO: 936929 - RNA, 22 nt, Human
uugcugaagugaagguauguuu

SEQ ID NO: 936930 - RNA, 22 nt, Human
uggaaagaauuccuaugguuca

SEQ ID NO: 936931 - RNA, 22 nt, Human
ucuacugugguccuuguaacca

SEQ ID NO: 936932 - RNA, 22 nt, Human
cuggagccccagacagggagag

SEQ ID NO: 936933 - RNA, 23 nt, Human
cauggcagcaagagcucauggcc

SEQ ID NO: 936934 - RNA, 22 nt, Human
uggcagacacugucgaagccua

SEQ ID NO: 936935 - RNA, 22 nt, Human
ugggcagaguugugaugaacug

SEQ ID NO: 936936 - RNA, 22 nt, Human
uuuccucugucaugacagcuga

SEQ ID NO: 936937 - RNA, 22 nt, Human
uuuauuagauuaucaaagaggu

SEQ ID NO: 936938 - RNA, 22 nt, Human
gcagcugcaggcaggcuugcug

SEQ ID NO: 936939 - RNA, 22 nt, Human
ucaauuaugccauugcaauauu

SEQ ID NO: 936940 - RNA, 22 nt, Human
ccauuguaaagaguauacuuug

SEQ ID NO: 936941 - RNA, 22 nt, Human
uaaccuuuguucaauguaagau

SEQ ID NO: 936942 - RNA, 22 nt, Human
uuucaguguaagguuuccagga

SEQ ID NO: 936943 - RNA, 22 nt, Human
cccaaacaguuccugugguacu

SEQ ID NO: 936944 - RNA, 22 nt, Human
augguguagcaugugauaugac

SEQ ID NO: 936945 - RNA, 22 nt, Human
ugagccuguggggugacaacca

SEQ ID NO: 936946 - RNA, 22 nt, Human
uccagccaccaccuugauugcc

SEQ ID NO: 936947 - RNA, 22 nt, Human
gaaaauguuuguccggagcuga

SEQ ID NO: 936948 - RNA, 22 nt, Human
ggcugcagcagagggacucacg

SEQ ID NO: 936949 - RNA, 23 nt, Human
cccagcuuucccacugccgagag

SEQ ID NO: 936950 - RNA, 22 nt, Human
guaaaucccauccuuucucugg

SEQ ID NO: 936951 - RNA, 22 nt, Human
ucucagaguuuuuuuccaggac

SEQ ID NO: 936952 - RNA, 22 nt, Human
gcuggggucugugaggagggcu

SEQ ID NO: 936953 - RNA, 22 nt, Human
ugaagccaucaggaagccagca

SEQ ID NO: 936954 - RNA, 22 nt, Human
cugcucugugguccaugagaca

SEQ ID NO: 936955 - RNA, 22 nt, Human
ugaaacacuuucaauuacauau

SEQ ID NO: 936956 - RNA, 22 nt, Human
aucuggcucgcuaggcucuggg

SEQ ID NO: 936957 - RNA, 22 nt, Human
uagaacagaguuccagugauca

SEQ ID NO: 936958 - RNA, 22 nt, Human
guuauguaaucuaacacucagu

SEQ ID NO: 936959 - RNA, 19 nt, Human
ugcaggaggacugagcaga

SEQ ID NO: 936960 - RNA, 22 nt, Human
cucagagucugcauuucuguca

SEQ ID NO: 936961 - RNA, 22 nt, Human
cauuuuaagaugaccugguuuc

SEQ ID NO: 936962 - RNA, 22 nt, Human
uggacagguugaguaggaggag

SEQ ID NO: 936963 - RNA, 22 nt, Human
augucagauguuuaucugauuu

SEQ ID NO: 936964 - RNA, 22 nt, Human
uccaugucuucaugugucuaac

SEQ ID NO: 936965 - RNA, 22 nt, Human
acaugcauucucuaaaagcaaa

SEQ ID NO: 936966 - RNA, 22 nt, Human
uggggugccgacagggagggca

SEQ ID NO: 936967 - RNA, 22 nt, Human
uccuggguccauggcagccgaa

SEQ ID NO: 936968 - RNA, 19 nt, Human
ucauuguugguuugucggg

SEQ ID NO: 936969 - RNA, 22 nt, Human
gucuuaaaaucagaggauauag

SEQ ID NO: 936970 - RNA, 20 nt, Human
agcuucuucugucuaauuuu

SEQ ID NO: 936971 - RNA, 22 nt, Human
uagcuauuuagcccagauaagu

SEQ ID NO: 936972 - RNA, 22 nt, Human
cucuccucagaacaggcccucu

SEQ ID NO: 936973 - RNA, 22 nt, Human
ugcugaaacaauaacauacugg

SEQ ID NO: 936974 - RNA, 22 nt, Human
accuuucauuaaagucuguagu

SEQ ID NO: 936975 - RNA, 22 nt, Human
gggagggaggugcugguucacg

SEQ ID NO: 936976 - RNA, 22 nt, Human
aguguguguuugggcgguuuau

SEQ ID NO: 936977 - RNA, 22 nt, Human
gugggagcugcggaggccuggg

SEQ ID NO: 936978 - RNA, 22 nt, Human
ucagaggaaaggucagauggcu

SEQ ID NO: 936979 - RNA, 22 nt, Human
agcaacuguuacaagaacaaca

SEQ ID NO: 936980 - RNA, 22 nt, Human
cagcaaaauuugaggauugccu

SEQ ID NO: 936981 - RNA, 22 nt, Human
uacuuucuuguuccuuucauaa

SEQ ID NO: 936982 - RNA, 22 nt, Human
uucuuuuccuacacagcgauuu

SEQ ID NO: 936983 - RNA, 22 nt, Human
uucccaugccuggccccuaucc

SEQ ID NO: 936984 - RNA, 22 nt, Human
acuguucacuagugaggguuga

SEQ ID NO: 936985 - RNA, 20 nt, Human
ucagaggcugccagcugggg

SEQ ID NO: 936986 - RNA, 22 nt, Human
ugggcuccagcaccugugcucu

SEQ ID NO: 936987 - RNA, 17 nt, Human
aaauaugaccucaaagu

SEQ ID NO: 936988 - RNA, 22 nt, Human
gguggcuggaggagcugaugga

SEQ ID NO: 936989 - RNA, 22 nt, Human
gugcuaggauuacaggcauggg

SEQ ID NO: 936990 - RNA, 22 nt, Human
uggcugcugagaaggcagcugu

SEQ ID NO: 936991 - RNA, 20 nt, Human
gcucccugguagaaauguuu

SEQ ID NO: 936992 - RNA, 21 nt, Human
cucucugcuuaugaauaguga

SEQ ID NO: 936993 - RNA, 22 nt, Human
cagcuuuuuagaaucuagggca

SEQ ID NO: 936994 - RNA, 19 nt, Human
caggaaggggcgaaucugg

SEQ ID NO: 936995 - RNA, 22 nt, Human
cagcagggaagcugugcuguuu

SEQ ID NO: 936996 - RNA, 22 nt, Human
aggagcagcccacuccuguccu

SEQ ID NO: 936997 - RNA, 22 nt, Human
agcccaggucucaaaguacagg

SEQ ID NO: 936998 - RNA, 22 nt, Human
agccacagagagggagcugcaa

SEQ ID NO: 936999 - RNA, 22 nt, Human
aagcugccugccacgcuagaua

SEQ ID NO: 937000 - RNA, 22 nt, Human
ggucccaggagaauaggugcaa

SEQ ID NO: 937001 - RNA, 20 nt, Human
cccuccagcaaccaggacuu

SEQ ID NO: 937002 - RNA, 22 nt, Human
cccuggcagaaugucucugggc

SEQ ID NO: 937003 - RNA, 22 nt, Human
gaauuguagagggaacagaagc

SEQ ID NO: 937004 - RNA, 20 nt, Human
uacuugaauguugcagcagu

SEQ ID NO: 937005 - RNA, 21 nt, Human
uguaaguuucaucugaauugg

SEQ ID NO: 937006 - RNA, 22 nt, Human
ccuggguggcagagguugcagu

SEQ ID NO: 937007 - RNA, 22 nt, Human
cauuuccagcuccugcaucaug

SEQ ID NO: 937008 - RNA, 22 nt, Human
uggacaggaucugagacugaga

SEQ ID NO: 937009 - RNA, 22 nt, Human
aaguucaaggugauaguggcag

SEQ ID NO: 937010 - RNA, 22 nt, Human
uggugcugacaguucugagugc

SEQ ID NO: 937011 - RNA, 22 nt, Human
gcucugugggugaguagaaucu

SEQ ID NO: 937012 - RNA, 22 nt, Human
ucagcagaggggaaggcaucug

SEQ ID NO: 937013 - RNA, 19 nt, Human
uagcagcugccaaaggaga

SEQ ID NO: 937014 - RNA, 23 nt, Human
uuugaaaguaucaacucgccuga

SEQ ID NO: 937015 - RNA, 22 nt, Human
aaauguguauaugaaacaugau

SEQ ID NO: 937016 - RNA, 22 nt, Human
ugcugcugaucauuuauagucu

SEQ ID NO: 937017 - RNA, 22 nt, Human
uuccuguccgcaauggccuggg

SEQ ID NO: 937018 - RNA, 22 nt, Human
caggguuucaccauguuagcag

SEQ ID NO: 937019 - RNA, 22 nt, Human
gcaaauucuuaacuggacugug

SEQ ID NO: 937020 - RNA, 22 nt, Human
uucagaaugugaccuuauuugg

SEQ ID NO: 937021 - RNA, 22 nt, Human
ugggaauggaugcuaagugcua

SEQ ID NO: 937022 - RNA, 22 nt, Human
cauggccucaaaggacugcaga

SEQ ID NO: 937023 - RNA, 22 nt, Human
gagugugggcacgggggccuug

SEQ ID NO: 937024 - RNA, 22 nt, Human
uggcucagagagggagugugga

SEQ ID NO: 937025 - RNA, 22 nt, Human
cacagguguaugaauaugucca

SEQ ID NO: 937026 - RNA, 22 nt, Human
ggaagagagggcugggccucaa

SEQ ID NO: 937027 - RNA, 22 nt, Human
cagcugcccauccugggaaaug

SEQ ID NO: 937028 - RNA, 22 nt, Human
uggcucagcgguggcagcagac

SEQ ID NO: 937029 - RNA, 20 nt, Human
ucugccacuuuuucugucac

SEQ ID NO: 937030 - RNA, 22 nt, Human
gagggcagagucuaaugaugca

SEQ ID NO: 937031 - RNA, 22 nt, Human
ucagugcacagagauuuuuguu

SEQ ID NO: 937032 - RNA, 21 nt, Human
agcagcagaucuggugagggc

SEQ ID NO: 937033 - RNA, 22 nt, Human
gccuggaguggacuuggccccu

SEQ ID NO: 937034 - RNA, 22 nt, Human
aaaugauugucaaaguucuguu

SEQ ID NO: 937035 - RNA, 22 nt, Human
auguacaguuucuagacucaaa

SEQ ID NO: 937036 - RNA, 22 nt, Human
uuguggcucgugagauguuagg

SEQ ID NO: 937037 - RNA, 22 nt, Human
ggcucugcgcgguaaagugacu

SEQ ID NO: 937038 - RNA, 22 nt, Human
uccugagcugccgcaucagcag

SEQ ID NO: 937039 - RNA, 22 nt, Human
caucuucagguucauggucaua

SEQ ID NO: 937040 - RNA, 22 nt, Human
ggcaugcugcguacagaugaac

SEQ ID NO: 937041 - RNA, 22 nt, Human
uuuaaauuuagaagaaacacug

SEQ ID NO: 937042 - RNA, 22 nt, Human
agcugggaugauaaccucaguc

SEQ ID NO: 937043 - RNA, 22 nt, Human
guuaaauucgaugauggauaaa

SEQ ID NO: 937044 - RNA, 22 nt, Human
acagggcagaaauguugcaucu

SEQ ID NO: 937045 - RNA, 20 nt, Human
gcccacucuaauccacuguc

SEQ ID NO: 937046 - RNA, 22 nt, Human
uuggccaauuuagaacguguug

SEQ ID NO: 937047 - RNA, 22 nt, Human
accuuggggugaugcugaaaga

SEQ ID NO: 937048 - RNA, 22 nt, Human
cagcagcaaaucuagaagagga

SEQ ID NO: 937049 - RNA, 22 nt, Human
auuggucaggacuggcaugugg

SEQ ID NO: 937050 - RNA, 22 nt, Human
ggguaauuggggccuugcagug

SEQ ID NO: 937051 - RNA, 22 nt, Human
caggagcucuuaaggaugugau

SEQ ID NO: 937052 - RNA, 22 nt, Human
agggcagcucucaccucuggcc

SEQ ID NO: 937053 - RNA, 22 nt, Human
gcccagccuccaagcuccaagg

SEQ ID NO: 937054 - RNA, 22 nt, Human
cuccuggcuuucccagaccagg

SEQ ID NO: 937055 - RNA, 22 nt, Human
uuugaaguguuauuucuaucac

SEQ ID NO: 937056 - RNA, 22 nt, Human
cuccugaggggacaggacucau

SEQ ID NO: 937057 - RNA, 22 nt, Human
cagcagguauguuuguucagca

SEQ ID NO: 937058 - RNA, 22 nt, Human
aaagcagaggugauaugacuua

SEQ ID NO: 937059 - RNA, 22 nt, Human
uguguucaagauuaguucuagu

SEQ ID NO: 937060 - RNA, 22 nt, Human
cugcugugauugggagaaaccg

SEQ ID NO: 937061 - RNA, 22 nt, Human
gcagugguccaguucacaccca

SEQ ID NO: 937062 - RNA, 22 nt, Human
agcagggcuucugugccugugc

SEQ ID NO: 937063 - RNA, 22 nt, Human
cagccugcagggcugccuguug

SEQ ID NO: 937064 - RNA, 22 nt, Human
cugcucugacccuuucaccuuc

SEQ ID NO: 937065 - RNA, 22 nt, Human
uagugcuuaacacaaagugauu

SEQ ID NO: 937066 - RNA, 21 nt, Human
cccuugccugcacuccucggc

SEQ ID NO: 937067 - RNA, 22 nt, Human
augcugugagugugccgcagag

SEQ ID NO: 937068 - RNA, 22 nt, Human
uugaagcagcucaggaggcuua

SEQ ID NO: 937069 - RNA, 22 nt, Human
cccuugcaucccauguguggcc

SEQ ID NO: 937070 - RNA, 22 nt, Human
ugggcuggcugaggcauucacu

SEQ ID NO: 937071 - RNA, 18 nt, Human
aggcuucuuggcucaguc

SEQ ID NO: 937072 - RNA, 22 nt, Human
ucuguucauaguaguguauaug

SEQ ID NO: 937073 - RNA, 21 nt, Human
cuccugggcuaagauauagug

SEQ ID NO: 937074 - RNA, 22 nt, Human
aaguguuaaaagauuaaaugcu

SEQ ID NO: 937075 - RNA, 22 nt, Human
cauggcccucuucuggagcaau

SEQ ID NO: 937076 - RNA, 22 nt, Human
cagagcugucauuugccaguga

SEQ ID NO: 937077 - RNA, 22 nt, Human
uugcagggaccugcagaaagcu

SEQ ID NO: 937078 - RNA, 22 nt, Human
gccugcaguucugugcuaggca

SEQ ID NO: 937079 - RNA, 22 nt, Human
uaaaucuuguggcaaugcuucu

SEQ ID NO: 937080 - RNA, 22 nt, Human
uguuuuuaaauaaugauagaaa

SEQ ID NO: 937081 - RNA, 22 nt, Human
ucuccucucuuaccugguacaa

SEQ ID NO: 937082 - RNA, 17 nt, Human
auuucacuuagcaugag

SEQ ID NO: 937083 - RNA, 22 nt, Human
ucagggaacaauguuauggcuu

SEQ ID NO: 937084 - RNA, 22 nt, Human
ccaggcucugcgcuggacaugg

SEQ ID NO: 937085 - RNA, 22 nt, Human
cagagaccccgcugcccuucug

SEQ ID NO: 937086 - RNA, 23 nt, Human
ccugggcauuggcugcagcuucu

SEQ ID NO: 937087 - RNA, 22 nt, Human
uccaggagaccagauguaggcc

SEQ ID NO: 937088 - RNA, 22 nt, Human
gggccccuuguaucucuggcuc

SEQ ID NO: 937089 - RNA, 22 nt, Human
uggccugggugcugcugacauc

SEQ ID NO: 937090 - RNA, 22 nt, Human
aaaguguggcacaagucacauc

SEQ ID NO: 937091 - RNA, 22 nt, Human
cacucaggguacaauggagggc

SEQ ID NO: 937092 - RNA, 22 nt, Human
gcuguguuuuauguuagguuaa

SEQ ID NO: 937093 - RNA, 22 nt, Human
ccugugggagggagcggcugga

SEQ ID NO: 937094 - RNA, 20 nt, Human
uccagcugggaacagcugau

SEQ ID NO: 937095 - RNA, 22 nt, Human
cauggacucugguuuggggagc

SEQ ID NO: 937096 - RNA, 22 nt, Human
aaguucaauggaaaagcuuuag

SEQ ID NO: 937097 - RNA, 22 nt, Human
cuguguggccucaagccagccu

SEQ ID NO: 937098 - RNA, 20 nt, Human
uguacacaguacuuuacaau

SEQ ID NO: 937099 - RNA, 22 nt, Human
acauucuauuucaucaugucua

SEQ ID NO: 937100 - RNA, 22 nt, Human
aaguucaaguaguguuacaugg

SEQ ID NO: 937101 - RNA, 22 nt, Human
ucucucuucaacccuuaacuag

SEQ ID NO: 937102 - RNA, 22 nt, Human
caagcccaggauuccccaguua

SEQ ID NO: 937103 - RNA, 22 nt, Human
guguggcuaccucagaggagca

SEQ ID NO: 937104 - RNA, 22 nt, Human
ucuuuccuagaggcugaugagu

SEQ ID NO: 937105 - RNA, 22 nt, Human
uauuucugggaguucagaaauu

SEQ ID NO: 937106 - RNA, 22 nt, Human
aagcaauagcaacaacuuuaca

SEQ ID NO: 937107 - RNA, 22 nt, Human
acguuuucagugacugugcuuc

SEQ ID NO: 937108 - RNA, 22 nt, Human
gccauuuucugucuuguuuauu

SEQ ID NO: 937109 - RNA, 22 nt, Human
ggccucaguuucuccauggguu

SEQ ID NO: 937110 - RNA, 22 nt, Human
uugggcaaaguguuucuggagc

SEQ ID NO: 937111 - RNA, 22 nt, Human
aaaaucugguaauuugaaugug

SEQ ID NO: 937112 - RNA, 22 nt, Human
aguuuagaguucaaauuaguuc

SEQ ID NO: 937113 - RNA, 22 nt, Human
uuaaacagagucugaaauguaa

SEQ ID NO: 937114 - RNA, 22 nt, Human
cccaaggacacgggcagggaca

SEQ ID NO: 937115 - RNA, 22 nt, Human
uggccauagcucagcuccuuca

SEQ ID NO: 937116 - RNA, 22 nt, Human
cugagccaccggcagggacauc

SEQ ID NO: 937117 - RNA, 22 nt, Human
uugcugugucauuuguuuaauc

SEQ ID NO: 937118 - RNA, 22 nt, Human
gagcaggcuugcagagaagggg

SEQ ID NO: 937119 - RNA, 20 nt, Human
agagccuugaggaagaugau

SEQ ID NO: 937120 - RNA, 22 nt, Human
cacagcugaaguagccaugugg

SEQ ID NO: 937121 - RNA, 22 nt, Human
gccucugcacuguggcacacca

SEQ ID NO: 937122 - RNA, 22 nt, Human
acagaaauaacuuuuuauguuu

SEQ ID NO: 937123 - RNA, 20 nt, Human
augcuuucuugugugcugcu

SEQ ID NO: 937124 - RNA, 22 nt, Human
uuccaguuaaggaagcuauucu

SEQ ID NO: 937125 - RNA, 22 nt, Human
acaggggaauuuacugucauua

SEQ ID NO: 937126 - RNA, 22 nt, Human
caggauccuggcugcauggacg

SEQ ID NO: 937127 - RNA, 22 nt, Human
cuaagccacucaaaucuugugg

SEQ ID NO: 937128 - RNA, 22 nt, Human
cuuuugauaguugcugagcagg

SEQ ID NO: 937129 - RNA, 22 nt, Human
cucaggaugaaagucaugguga

SEQ ID NO: 937130 - RNA, 22 nt, Human
gcugggagcaaguacucaucuu

SEQ ID NO: 937131 - RNA, 22 nt, Human
gaagcagcagcuggggacaguu

SEQ ID NO: 937132 - RNA, 22 nt, Human
acuguugucaggcugcuuugga

SEQ ID NO: 937133 - RNA, 22 nt, Human
uuugcuauuuuucugugcagcu

SEQ ID NO: 937134 - RNA, 22 nt, Human
uucugagcuacauaguacuggg

SEQ ID NO: 937135 - RNA, 22 nt, Human
ccagugcuucuuugcuagcugg

SEQ ID NO: 937136 - RNA, 22 nt, Human
acucugcuugcccaauggaaac

SEQ ID NO: 937137 - RNA, 22 nt, Human
aagagguugucugugaugaguu

SEQ ID NO: 937138 - RNA, 20 nt, Human
gagccuuccccucaccacug

SEQ ID NO: 937139 - RNA, 22 nt, Human
acagggaauggagggaucagua

SEQ ID NO: 937140 - RNA, 22 nt, Human
guuugcauaaaguggaugcagg

SEQ ID NO: 937141 - RNA, 22 nt, Human
auguggcacagcacaguaagag

SEQ ID NO: 937142 - RNA, 22 nt, Human
agagcuguggauaguccuggau

SEQ ID NO: 937143 - RNA, 22 nt, Human
ccagccuggguguuagaagaca

SEQ ID NO: 937144 - RNA, 17 nt, Human
cagugcagagcccuuuc

SEQ ID NO: 937145 - RNA, 22 nt, Human
aagaauguuaguuucugauaca

SEQ ID NO: 937146 - RNA, 22 nt, Human
ggccagagagccgcuguuagga

SEQ ID NO: 937147 - RNA, 22 nt, Human
agcaucuggucaugagugagaa

SEQ ID NO: 937148 - RNA, 22 nt, Human
cugggagaucuccugagggcag

SEQ ID NO: 937149 - RNA, 22 nt, Human
ccucccaccauuuagagagagc

SEQ ID NO: 937150 - RNA, 22 nt, Human
aaguuugacagaaguuucuaau

SEQ ID NO: 937151 - RNA, 20 nt, Human
ugucaugcauuagaugaaga

SEQ ID NO: 937152 - RNA, 22 nt, Human
caugcacaaagguaagaugcgu

SEQ ID NO: 937153 - RNA, 22 nt, Human
aagguacagaaauuaacaagga

SEQ ID NO: 937154 - RNA, 22 nt, Human
ugugggcaggcccgggucugag

SEQ ID NO: 937155 - RNA, 22 nt, Human
ccuguguguaggccaggggagu

SEQ ID NO: 937156 - RNA, 22 nt, Human
agccccucuguggcucugccuc

SEQ ID NO: 937157 - RNA, 23 nt, Human
agucaguguaaguuuggaaugca

SEQ ID NO: 937158 - RNA, 22 nt, Human
caggggccggcuguccgugccc

SEQ ID NO: 937159 - RNA, 22 nt, Human
cccacucuggcucccuucuagu

SEQ ID NO: 937160 - RNA, 22 nt, Human
cagcagagcuuauguuggguca

SEQ ID NO: 937161 - RNA, 18 nt, Human
agagaugguguagaguuu

SEQ ID NO: 937162 - RNA, 22 nt, Human
uuauuagguuauucucuguacu

SEQ ID NO: 937163 - RNA, 22 nt, Human
aaagguuugcauggaauuuacc

SEQ ID NO: 937164 - RNA, 22 nt, Human
aagaauguucauuaaacuguug

SEQ ID NO: 937165 - RNA, 22 nt, Human
aucauaaagugcuaucugauug

SEQ ID NO: 937166 - RNA, 22 nt, Human
caguuucuacgacuuaagcaca

SEQ ID NO: 937167 - RNA, 22 nt, Human
ucagcaauccucccacaggugg

SEQ ID NO: 937168 - RNA, 22 nt, Human
uggaggaaucagggcuuaggcu

SEQ ID NO: 937169 - RNA, 22 nt, Human
agaggucauaucucagaagaga

SEQ ID NO: 937170 - RNA, 22 nt, Human
gccucccuggcccacagcagcg

SEQ ID NO: 937171 - RNA, 22 nt, Human
aaauuucaguuaccuuuacguu

SEQ ID NO: 937172 - RNA, 22 nt, Human
cuggggcugcgguggaggagcc

SEQ ID NO: 937173 - RNA, 22 nt, Human
gccugccuagaauugcagcuuu

SEQ ID NO: 937174 - RNA, 19 nt, Human
gccucugcuggggacaggc

SEQ ID NO: 937175 - RNA, 22 nt, Human
aucuacaggcugaggugggagg

SEQ ID NO: 937176 - RNA, 22 nt, Human
accuacccuuagaucacaaggg

SEQ ID NO: 937177 - RNA, 22 nt, Human
ccuguggcacaugcagggauuc

SEQ ID NO: 937178 - RNA, 22 nt, Human
auuuuuccaauuaggauaaaga

SEQ ID NO: 937179 - RNA, 22 nt, Human
cagcagagcugggcuuugaauu

SEQ ID NO: 937180 - RNA, 22 nt, Human
gugauugcccagcaccauuguu

SEQ ID NO: 937181 - RNA, 22 nt, Human
uggcugccuuucaccucaucuc

SEQ ID NO: 937182 - RNA, 22 nt, Human
guaacugaggcagcuuuuaaga

SEQ ID NO: 937183 - RNA, 23 nt, Human
cccagagcacagccuccagaugc

SEQ ID NO: 937184 - RNA, 22 nt, Human
cccaggaaaguggaggcggcug

SEQ ID NO: 937185 - RNA, 22 nt, Human
agcugccaucagccuuuggaug

SEQ ID NO: 937186 - RNA, 22 nt, Human
uggggugguaauacaccguucu

SEQ ID NO: 937187 - RNA, 22 nt, Human
uaccuugggcuauuaucuuuga

SEQ ID NO: 937188 - RNA, 22 nt, Human
acaaacuaccuacagauguuca

SEQ ID NO: 937189 - RNA, 22 nt, Human
uagcacaucuggcgcuuauagg

SEQ ID NO: 937190 - RNA, 22 nt, Human
agcugucuccagauacaggauu

SEQ ID NO: 937191 - RNA, 22 nt, Human
cccagcaguaaccaguggaaau

SEQ ID NO: 937192 - RNA, 22 nt, Human
caggagaggaggcuacuucuua

SEQ ID NO: 937193 - RNA, 22 nt, Human
aauauaauuuuauuccuagagu

SEQ ID NO: 937194 - RNA, 22 nt, Human
aaguccaucucugccccacaca

SEQ ID NO: 937195 - RNA, 22 nt, Human
cuuuggcaaggguuuuaauugu

SEQ ID NO: 937196 - RNA, 22 nt, Human
caaugugugcuuacaggccagu

SEQ ID NO: 937197 - RNA, 22 nt, Human
caguacuuggucaaggaagcag

SEQ ID NO: 937198 - RNA, 22 nt, Human
agcaggugcauggcgagcgcgg

SEQ ID NO: 937199 - RNA, 22 nt, Human
aagagggaggugcgggugcaga

SEQ ID NO: 937200 - RNA, 22 nt, Human
ucucuucuagcuucuugugguu

SEQ ID NO: 937201 - RNA, 22 nt, Human
uauucacaaaaugagguccuca

SEQ ID NO: 937202 - RNA, 22 nt, Human
gguggccaggccagcucuggcc

SEQ ID NO: 937203 - RNA, 22 nt, Human
acguuuucuagagaauaugcag

SEQ ID NO: 937204 - RNA, 22 nt, Human
gaugaaaaaagacgagcauaua

SEQ ID NO: 937205 - RNA, 22 nt, Human
caugggcuacagaagcaugcug

SEQ ID NO: 937206 - RNA, 22 nt, Human
ggugaaggaggaagcugaugga

SEQ ID NO: 937207 - RNA, 22 nt, Human
ugagccuggccugcagagacca

SEQ ID NO: 937208 - RNA, 22 nt, Human
uaggcacugaguacauauuggu

SEQ ID NO: 937209 - RNA, 22 nt, Human
ucugucuccucugaggugccag

SEQ ID NO: 937210 - RNA, 22 nt, Human
cugcccaaauccuucuuccucu

SEQ ID NO: 937211 - RNA, 22 nt, Human
agcugcaggcccaugcucaguc

SEQ ID NO: 937212 - RNA, 22 nt, Human
ucuuggagacucuuguauauuu

SEQ ID NO: 937213 - RNA, 22 nt, Human
aguugacauccagagacauucu

SEQ ID NO: 937214 - RNA, 22 nt, Human
acagaggccucggccugcccag

SEQ ID NO: 937215 - RNA, 22 nt, Human
gcugccaauccagcugugggag

SEQ ID NO: 937216 - RNA, 22 nt, Human
gaggcagcuuggggcugugggu

SEQ ID NO: 937217 - RNA, 22 nt, Human
uaacauuccucaaaguuuucag

SEQ ID NO: 937218 - RNA, 22 nt, Human
gggagggaaggaccuuaugaau

SEQ ID NO: 937219 - RNA, 22 nt, Human
gagagaagaauguuccgaggcc

SEQ ID NO: 937220 - RNA, 22 nt, Human
cauauucuuuaagcaaugcucu

SEQ ID NO: 937221 - RNA, 22 nt, Human
cuguagcaaguuauucaauaaa

SEQ ID NO: 937222 - RNA, 22 nt, Human
auggacaggaacucccuuggca

SEQ ID NO: 937223 - RNA, 22 nt, Human
agcugcucugauaaaccuacuu

SEQ ID NO: 937224 - RNA, 22 nt, Human
uccaagggaauuuaaaguugcu

SEQ ID NO: 937225 - RNA, 22 nt, Human
ccuuuucaacuaagauucugca

SEQ ID NO: 937226 - RNA, 23 nt, Human
ccucccaccuauuucacuuucuu

SEQ ID NO: 937227 - RNA, 22 nt, Human
cauguuuacuaccaggagaaug

SEQ ID NO: 937228 - RNA, 22 nt, Human
ucugcagcuuuuugguggggug

SEQ ID NO: 937229 - RNA, 22 nt, Human
agauggagaaugacaauuaagg

SEQ ID NO: 937230 - RNA, 22 nt, Human
cuucagggugacgcaggcugca

SEQ ID NO: 937231 - RNA, 22 nt, Human
agagcuguagcuuccuagagcc

SEQ ID NO: 937232 - RNA, 22 nt, Human
ugccugggggacuaaggccaaa

SEQ ID NO: 937233 - RNA, 22 nt, Human
uuguuuucuccacugcaucuua

SEQ ID NO: 937234 - RNA, 22 nt, Human
ccugucaggguuugccucagaa

SEQ ID NO: 937235 - RNA, 20 nt, Human
ugaaggccauuuguuccaga

SEQ ID NO: 937236 - RNA, 22 nt, Human
ccacagggcacagacaggaagc

SEQ ID NO: 937237 - RNA, 22 nt, Human
aaagaaauagauggcauuuaaa

SEQ ID NO: 937238 - RNA, 22 nt, Human
cuuauuagaaagaaaagacaug

SEQ ID NO: 937239 - RNA, 17 nt, Human
gcagugaaaagagauca

SEQ ID NO: 937240 - RNA, 22 nt, Human
uuugaaaggaaguuaauacuuu

SEQ ID NO: 937241 - RNA, 22 nt, Human
uaaugugugucaucaguagagu

SEQ ID NO: 937242 - RNA, 22 nt, Human
ccuguucagagcuaagcaucau

SEQ ID NO: 937243 - RNA, 20 nt, Human
uucuuucaucuacacguugu

SEQ ID NO: 937244 - RNA, 19 nt, Human
ggucucagugcagcugcag

SEQ ID NO: 937245 - RNA, 22 nt, Human
ccaggagagcaggcgugcagcu

SEQ ID NO: 937246 - RNA, 23 nt, Human
ugcugggguaguuuguggcacag

SEQ ID NO: 937247 - RNA, 22 nt, Human
ccagguggugaaagugggcccu

SEQ ID NO: 937248 - RNA, 22 nt, Human
aagcugccagcugagcugaggc

SEQ ID NO: 937249 - RNA, 22 nt, Human
aagaaucauccugcaagagucu

SEQ ID NO: 937250 - RNA, 22 nt, Human
ccagggucucugcugccugaga

SEQ ID NO: 937251 - RNA, 22 nt, Human
uugaggagcacuagucagguau

SEQ ID NO: 937252 - RNA, 22 nt, Human
uaaccuuuggugaaauauuaac

SEQ ID NO: 937253 - RNA, 22 nt, Human
gaaguacaguuuuaucuagcca

SEQ ID NO: 937254 - RNA, 22 nt, Human
gugucccaggccucuggaauua

SEQ ID NO: 937255 - RNA, 22 nt, Human
cacugucuuuugugaagacaau

SEQ ID NO: 937256 - RNA, 22 nt, Human
agagccugaggcccugagaggg

SEQ ID NO: 937257 - RNA, 22 nt, Human
ucucaggcuaccuugcacaagg

SEQ ID NO: 937258 - RNA, 22 nt, Human
cccaggaagaaauucugauuug

SEQ ID NO: 937259 - RNA, 22 nt, Human
uagcucuucaaucacugucucc

SEQ ID NO: 937260 - RNA, 22 nt, Human
agucagugaaaacuagaauguu

SEQ ID NO: 937261 - RNA, 22 nt, Human
ggcagcucugaugaugcucugg

SEQ ID NO: 937262 - RNA, 22 nt, Human
agcucccaggcagucaugagga

SEQ ID NO: 937263 - RNA, 22 nt, Human
aggcaagcugcagagaguccuu

SEQ ID NO: 937264 - RNA, 22 nt, Human
cggcagagacggcgcuuugaac

SEQ ID NO: 937265 - RNA, 20 nt, Human
ugcugucguguuuucugcuu

SEQ ID NO: 937266 - RNA, 22 nt, Human
uaggccaguggcagguugugug

SEQ ID NO: 937267 - RNA, 22 nt, Human
ggaugcuggggaccaaucucug

SEQ ID NO: 937268 - RNA, 22 nt, Human
uuauccaagcagaagcugcaca

SEQ ID NO: 937269 - RNA, 22 nt, Human
ugauuuccucuacuagcaauua

SEQ ID NO: 937270 - RNA, 22 nt, Human
ucacugggagaugugggaaggg

SEQ ID NO: 937271 - RNA, 22 nt, Human
ccuggccaggcucucagcacug

SEQ ID NO: 937272 - RNA, 22 nt, Human
ucccagagacaucauuucuccg

SEQ ID NO: 937273 - RNA, 22 nt, Human
ucccuuaaaacucauguguugu

SEQ ID NO: 937274 - RNA, 22 nt, Human
aaguuacaggagaaagagauca

SEQ ID NO: 937275 - RNA, 22 nt, Human
ucucugggugauggcagggcac

SEQ ID NO: 937276 - RNA, 22 nt, Human
gagaaggaguagcugaccuggg

SEQ ID NO: 937277 - RNA, 22 nt, Human
auguaucaugcaggguccauga

SEQ ID NO: 937278 - RNA, 22 nt, Human
cauugguagaguuuguuuuaua

SEQ ID NO: 937279 - RNA, 22 nt, Human
uugcagcagggugaauucacuc

SEQ ID NO: 937280 - RNA, 22 nt, Human
agugguaacuaaguccugcuua

SEQ ID NO: 937281 - RNA, 20 nt, Human
guguuucaugugauacaaug

SEQ ID NO: 937282 - RNA, 22 nt, Human
ugucucaguacacuccgauguu

SEQ ID NO: 937283 - RNA, 22 nt, Human
ggccagcucugcacagcagcug

SEQ ID NO: 937284 - RNA, 22 nt, Human
cuggcaggaagaggaaagguca

SEQ ID NO: 937285 - RNA, 22 nt, Human
ucauuucucccggccaaaaacu

SEQ ID NO: 937286 - RNA, 22 nt, Human
uugaaaggcacaggcaccuggg

SEQ ID NO: 937287 - RNA, 22 nt, Human
auaauuuaaauuaguaugugau

SEQ ID NO: 937288 - RNA, 22 nt, Human
gcucccacugcagcccugagcc

SEQ ID NO: 937289 - RNA, 22 nt, Human
ucuggcuccacaccucacugca

SEQ ID NO: 937290 - RNA, 22 nt, Human
ucuccuuuaagauuuccucagg

SEQ ID NO: 937291 - RNA, 22 nt, Human
gcugccagcuuuccuuggcuga

SEQ ID NO: 937292 - RNA, 22 nt, Human
ugugcucuggaguugccuucac

SEQ ID NO: 937293 - RNA, 22 nt, Human
augcagaaugaguucacgaucu

SEQ ID NO: 937294 - RNA, 23 nt, Human
ccaggcaguagcuauugaaguga

SEQ ID NO: 937295 - RNA, 20 nt, Human
gcagcagacagacaggggac

SEQ ID NO: 937296 - RNA, 21 nt, Human
uccaggaguucuaauaggugu

SEQ ID NO: 937297 - RNA, 22 nt, Human
guggccucaugucuauaaagag

SEQ ID NO: 937298 - RNA, 22 nt, Human
uuguuucaugaguguaaaggga

SEQ ID NO: 937299 - RNA, 22 nt, Human
gccucugccaagggggcugcgg

SEQ ID NO: 937300 - RNA, 22 nt, Human
auucaguuaaaaacuguacuuc

SEQ ID NO: 937301 - RNA, 22 nt, Human
augcuguguuuuaaauggaaau

SEQ ID NO: 937302 - RNA, 22 nt, Human
agauuccagaucccaaaaauga

SEQ ID NO: 937303 - RNA, 22 nt, Human
ugucuuauggcauguccacugg

SEQ ID NO: 937304 - RNA, 22 nt, Human
ggccagcugggccaccaggugc

SEQ ID NO: 937305 - RNA, 22 nt, Human
uccucagacuucccuuugugua

SEQ ID NO: 937306 - RNA, 22 nt, Human
gcugugagccgcugcugagcau

SEQ ID NO: 937307 - RNA, 22 nt, Human
uuuguuuucaaugugucauuca

SEQ ID NO: 937308 - RNA, 20 nt, Human
ccugggguacacuggcaugu

SEQ ID NO: 937309 - RNA, 22 nt, Human
uacaaagugagcaaccucuuuu

SEQ ID NO: 937310 - RNA, 22 nt, Human
uucagcaauuuuuuaagcuaau

SEQ ID NO: 937311 - RNA, 22 nt, Human
acacugaauauacaaugaauau

SEQ ID NO: 937312 - RNA, 22 nt, Human
uggacaggugagugacucaggg

SEQ ID NO: 937313 - RNA, 22 nt, Human
ucaaaagucugcauucuucaca

SEQ ID NO: 937314 - RNA, 22 nt, Human
agccuguggaucccugcacugg

SEQ ID NO: 937315 - RNA, 22 nt, Human
aggagaggcaucaagaaaaucg

SEQ ID NO: 937316 - RNA, 22 nt, Human
augccaggccccacgcugggca

SEQ ID NO: 937317 - RNA, 22 nt, Human
aaugcacaugccacauguggua

SEQ ID NO: 937318 - RNA, 22 nt, Human
ggaggccaugaggcucuaggug

SEQ ID NO: 937319 - RNA, 22 nt, Human
acuuucugcaguguuggaaaug

SEQ ID NO: 937320 - RNA, 22 nt, Human
cacagcuaggaggaaagcagag

SEQ ID NO: 937321 - RNA, 22 nt, Human
acagcagcuaaccccugggcca

SEQ ID NO: 937322 - RNA, 22 nt, Human
aaugccaguguguugauuccag

SEQ ID NO: 937323 - RNA, 22 nt, Human
auuggcagaaacagcagggcca

SEQ ID NO: 937324 - RNA, 22 nt, Human
auuauuauauagggaaaguccc

SEQ ID NO: 937325 - RNA, 22 nt, Human
ugggagcaaaugacugggagau

SEQ ID NO: 937326 - RNA, 18 nt, Human
aggccugggaagcugagg

SEQ ID NO: 937327 - RNA, 22 nt, Human
aaagacauugaagaaggacuua

SEQ ID NO: 937328 - RNA, 22 nt, Human
uaaaugagggcugacaugauug

SEQ ID NO: 937329 - RNA, 22 nt, Human
cacccuggaaagaaggucuggg

SEQ ID NO: 937330 - RNA, 22 nt, Human
auaugcuuaugaugucucaagu

SEQ ID NO: 937331 - RNA, 22 nt, Human
ugucuuauuccuucuguucagc

SEQ ID NO: 937332 - RNA, 22 nt, Human
uccuggcccucugcaaacgcca

SEQ ID NO: 937333 - RNA, 22 nt, Human
cugccuggagcauucugaaggu

SEQ ID NO: 937334 - RNA, 22 nt, Human
uaaggccaaguucauauacaac

SEQ ID NO: 937335 - RNA, 22 nt, Human
ggagccagugcccucuggugga

SEQ ID NO: 937336 - RNA, 22 nt, Human
ugaggcagugugagauaauaaa

SEQ ID NO: 937337 - RNA, 22 nt, Human
ucuguuccauguuuuguuccau

SEQ ID NO: 937338 - RNA, 22 nt, Human
guuuccaaccccaccaaagugc

SEQ ID NO: 937339 - RNA, 18 nt, Human
uggagcugagugcugugc

SEQ ID NO: 937340 - RNA, 22 nt, Human
acaguaauauugaugcucguca

SEQ ID NO: 937341 - RNA, 22 nt, Human
aacagcaauagcacuauucauu

SEQ ID NO: 937342 - RNA, 22 nt, Human
uggccugggucacaccaggguc

SEQ ID NO: 937343 - RNA, 22 nt, Human
aaaggccaauaaagacaagcug

SEQ ID NO: 937344 - RNA, 22 nt, Human
ugaaaucugcaugcaaaguccu

SEQ ID NO: 937345 - RNA, 22 nt, Human
acaaaguccugguguauggcca

SEQ ID NO: 937346 - RNA, 23 nt, Human
cacuccuguuucuaagccagcau

SEQ ID NO: 937347 - RNA, 22 nt, Human
ugggcucugcaucagugcccau

SEQ ID NO: 937348 - RNA, 22 nt, Human
ggcagggucuggacugaaagcu

SEQ ID NO: 937349 - RNA, 22 nt, Human
uccagucaagcuugagaauuuc

SEQ ID NO: 937350 - RNA, 22 nt, Human
guuuuuccugcugacuuggguc

SEQ ID NO: 937351 - RNA, 22 nt, Human
uuucauugcagagucugugugc

SEQ ID NO: 937352 - RNA, 20 nt, Human
aggaacuggaagggaggaaa

SEQ ID NO: 937353 - RNA, 22 nt, Human
uacaaaaaauugauacugacga

SEQ ID NO: 937354 - RNA, 22 nt, Human
gagugcagaugccagccccagu

SEQ ID NO: 937355 - RNA, 22 nt, Human
gggcccuggacguggcggcaga

SEQ ID NO: 937356 - RNA, 22 nt, Human
cuucuuuacuuucuagaaauaa

SEQ ID NO: 937357 - RNA, 22 nt, Human
gccuggagacagcagaggcggc

SEQ ID NO: 937358 - RNA, 22 nt, Human
uagacagauuucuuguuagaca

SEQ ID NO: 937359 - RNA, 22 nt, Human
uauuggaugauucacuuggcag

SEQ ID NO: 937360 - RNA, 22 nt, Human
ggugcuucugggcauagcagga

SEQ ID NO: 937361 - RNA, 22 nt, Human
accacugcccauggugaaaacu

SEQ ID NO: 937362 - RNA, 22 nt, Human
cugggccuagcaacagaggagu

SEQ ID NO: 937363 - RNA, 22 nt, Human
uacuuugucaugcuaagaguga

SEQ ID NO: 937364 - RNA, 20 nt, Human
uuucacagucccuguuuccu

SEQ ID NO: 937365 - RNA, 22 nt, Human
uuagaaaucaccucugaagauc

SEQ ID NO: 937366 - RNA, 22 nt, Human
ccauuuguucgcccagcuccaa

SEQ ID NO: 937367 - RNA, 22 nt, Human
cccaggaugaucgagaguggga

SEQ ID NO: 937368 - RNA, 22 nt, Human
auuguguaauuuucagcucaua

SEQ ID NO: 937369 - RNA, 22 nt, Human
ccuggggagaagagcuuccccc

SEQ ID NO: 937370 - RNA, 22 nt, Human
cacauuucuaggaaauuaaaug

SEQ ID NO: 937371 - RNA, 22 nt, Human
aguguuucuggcaaaugaaagu

SEQ ID NO: 937372 - RNA, 22 nt, Human
uucccucuccuacucaggaaag

SEQ ID NO: 937373 - RNA, 21 nt, Human
auucugaguugucagucuuca

SEQ ID NO: 937374 - RNA, 22 nt, Human
cccagggcccuggacagcuaca

SEQ ID NO: 937375 - RNA, 22 nt, Human
uuguuaaagaugcagauuccau

SEQ ID NO: 937376 - RNA, 20 nt, Human
ccaggcacugucccaugcag

SEQ ID NO: 937377 - RNA, 22 nt, Human
uuccuggccucucucugagcag

SEQ ID NO: 937378 - RNA, 22 nt, Human
cagagcagucuggagauccagc

SEQ ID NO: 937379 - RNA, 22 nt, Human
cagaggugcauacaggucauua

SEQ ID NO: 937380 - RNA, 22 nt, Human
uggcagagcuggcugcggauga

SEQ ID NO: 937381 - RNA, 22 nt, Human
aucuggcugagcgaggcccaca

SEQ ID NO: 937382 - RNA, 22 nt, Human
cugucccuucauuauucacuac

SEQ ID NO: 937383 - RNA, 22 nt, Human
cagggccugagggcugcucugc

SEQ ID NO: 937384 - RNA, 22 nt, Human
ugauaauauuuugaaucauaag

SEQ ID NO: 937385 - RNA, 22 nt, Human
agauacaucuugaacuucuaga

SEQ ID NO: 937386 - RNA, 22 nt, Human
gggcugcacguauucugcucac

SEQ ID NO: 937387 - RNA, 22 nt, Human
gcagcugcagacccucagugcu

SEQ ID NO: 937388 - RNA, 19 nt, Human
uggcauugguccagauaaa

SEQ ID NO: 937389 - RNA, 22 nt, Human
uuuaguaaguucacugcaaagc

SEQ ID NO: 937390 - RNA, 22 nt, Human
ucauccagaaaaaugucuuagc

SEQ ID NO: 937391 - RNA, 22 nt, Human
acagggcagagaggcaggcuug

SEQ ID NO: 937392 - RNA, 22 nt, Human
gagcagugagugaauguugccu

SEQ ID NO: 937393 - RNA, 22 nt, Human
ugggcccugacuucaagcaucc

SEQ ID NO: 937394 - RNA, 22 nt, Human
gcagggcugcagagggcacugu

SEQ ID NO: 937395 - RNA, 22 nt, Human
ccugucucccuggcauggcuca

SEQ ID NO: 937396 - RNA, 22 nt, Human
agaccauagggaccucagguug

SEQ ID NO: 937397 - RNA, 22 nt, Human
ggccacuccgcugcuacuggaa

SEQ ID NO: 937398 - RNA, 22 nt, Human
ugccugcucuuaccacucuccc

SEQ ID NO: 937399 - RNA, 22 nt, Human
ucagccagugccuugaucuugc

SEQ ID NO: 937400 - RNA, 22 nt, Human
ugggagcaagcuggugcuggag

SEQ ID NO: 937401 - RNA, 22 nt, Human
aaauacaguguguguucuuuga

SEQ ID NO: 937402 - RNA, 22 nt, Human
cugagccaaccacagcaggagc

SEQ ID NO: 937403 - RNA, 22 nt, Human
agucugcacucagguggagguc

SEQ ID NO: 937404 - RNA, 22 nt, Human
agggcagagacaugcuuccuga

SEQ ID NO: 937405 - RNA, 22 nt, Human
gcuuuccuggcccugucccugc

SEQ ID NO: 937406 - RNA, 22 nt, Human
aaagaaggaccuggaggaggau

SEQ ID NO: 937407 - RNA, 22 nt, Human
guggcaggucccauuggagcag

SEQ ID NO: 937408 - RNA, 22 nt, Human
ugaaagcacucacuucugcucu

SEQ ID NO: 937409 - RNA, 20 nt, Human
ugggagcuggugaggucuca

SEQ ID NO: 937410 - RNA, 22 nt, Human
acauccagaucucagcauggcu

SEQ ID NO: 937411 - RNA, 22 nt, Human
uauuucugucagccagauaugg

SEQ ID NO: 937412 - RNA, 22 nt, Human
agcagccagagaaugaugcagu

SEQ ID NO: 937413 - RNA, 22 nt, Human
uacucugcaaguugaagguggc

SEQ ID NO: 937414 - RNA, 22 nt, Human
cauggcaggugugggguuuuau

SEQ ID NO: 937415 - RNA, 22 nt, Human
uuacaaagcguugagacaagua

SEQ ID NO: 937416 - RNA, 21 nt, Human
ccugagccuguuuauccagaa

SEQ ID NO: 937417 - RNA, 22 nt, Human
uauuucuuucagguauguguug

SEQ ID NO: 937418 - RNA, 22 nt, Human
gccugggagagggauagugcag

SEQ ID NO: 937419 - RNA, 20 nt, Human
ucagccagcuaacaugggga

SEQ ID NO: 937420 - RNA, 22 nt, Human
uuugggaaacuuaggggucaga

SEQ ID NO: 937421 - RNA, 22 nt, Human
agggcagagagaugaaugggau

SEQ ID NO: 937422 - RNA, 22 nt, Human
ccaugagcuuccuauauagggu

SEQ ID NO: 937423 - RNA, 22 nt, Human
guacauuucucuuguucuuauu

SEQ ID NO: 937424 - RNA, 22 nt, Human
uuuauuaaaacuguuggcucug

SEQ ID NO: 937425 - RNA, 22 nt, Human
uccagggauguccuguagcacu

SEQ ID NO: 937426 - RNA, 22 nt, Human
gaggcagagucacaaagagucu

SEQ ID NO: 937427 - RNA, 22 nt, Human
gauuucaaaaguagauccauca

SEQ ID NO: 937428 - RNA, 22 nt, Human
cagucacauugcccugcauuua

SEQ ID NO: 937429 - RNA, 22 nt, Human
aaaggugacacucugccagcug

SEQ ID NO: 937430 - RNA, 22 nt, Human
cugggcugcgggcgccccucca

SEQ ID NO: 937431 - RNA, 22 nt, Human
uuacaaagagaaguuguagaau

SEQ ID NO: 937432 - RNA, 22 nt, Human
agggggcaggagagaccugcug

SEQ ID NO: 937433 - RNA, 22 nt, Human
gccuggagaggaagccggugga

SEQ ID NO: 937434 - RNA, 23 nt, Human
uggaggaaacacaucagaagacc

SEQ ID NO: 937435 - RNA, 22 nt, Human
acugccugugucccuucagugc

SEQ ID NO: 937436 - RNA, 19 nt, Human
cucugccucccuccugggu

SEQ ID NO: 937437 - RNA, 19 nt, Human
gaagaagcuugagaaguag

SEQ ID NO: 937438 - RNA, 22 nt, Human
uccugggcugugugccacucug

SEQ ID NO: 937439 - RNA, 22 nt, Human
caggccugugaguugaggcccc

SEQ ID NO: 937440 - RNA, 22 nt, Human
cacauguuuggcaugucaccaa

SEQ ID NO: 937441 - RNA, 19 nt, Human
uguagcaguuuaaaacaac

SEQ ID NO: 937442 - RNA, 22 nt, Human
gcauuucuuccuggugugagcc

SEQ ID NO: 937443 - RNA, 22 nt, Human
caagugucuauaucagugcuug

SEQ ID NO: 937444 - RNA, 22 nt, Human
acucaggaauggggcugggacu

SEQ ID NO: 937445 - RNA, 21 nt, Human
cauugucgacauuuuccccuc

SEQ ID NO: 937446 - RNA, 22 nt, Human
aagcuguucucuaaguuucaug

SEQ ID NO: 937447 - RNA, 22 nt, Human
ggaggaggcggcagaaguuccu

SEQ ID NO: 937448 - RNA, 22 nt, Human
guugaaagaucauguggcugcc

SEQ ID NO: 937449 - RNA, 22 nt, Human
auggcugggaugggguagagaa

SEQ ID NO: 937450 - RNA, 22 nt, Human
uuccuauuuccaugaaacacaa

SEQ ID NO: 937451 - RNA, 22 nt, Human
aacugccuggccaggcugcaac

SEQ ID NO: 937452 - RNA, 18 nt, Human
gaugggagcaagagaaga

SEQ ID NO: 937453 - RNA, 22 nt, Human
gaaggccacaagagaaguuaag

SEQ ID NO: 937454 - RNA, 22 nt, Human
acaggcuuuuuuagaaugacau

SEQ ID NO: 937455 - RNA, 20 nt, Human
agggccugcucugugguguc

SEQ ID NO: 937456 - RNA, 22 nt, Human
gugccugggguugagcuaugaa

SEQ ID NO: 937457 - RNA, 22 nt, Human
cagagugagggccugcaccugc

SEQ ID NO: 937458 - RNA, 22 nt, Human
cccugcugucaggugcugggag

SEQ ID NO: 937459 - RNA, 22 nt, Human
ucauucuugaucacuaguuagu

SEQ ID NO: 937460 - RNA, 22 nt, Human
ccucugagaccagcucugcacc

SEQ ID NO: 937461 - RNA, 20 nt, Human
gccugagcuccgccuccugu

SEQ ID NO: 937462 - RNA, 22 nt, Human
uuucuguauuuaaaagaucugg

SEQ ID NO: 937463 - RNA, 22 nt, Human
uuaaaauagccagugccccucu

SEQ ID NO: 937464 - RNA, 22 nt, Human
guuaauaaagguauagaaucag

SEQ ID NO: 937465 - RNA, 23 nt, Human
ggagugcaauggcgccaucucgg

SEQ ID NO: 937466 - RNA, 22 nt, Human
uuucaaagaguuguaaauuacu

SEQ ID NO: 937467 - RNA, 22 nt, Human
agaaagcacucugucuuuuacc

SEQ ID NO: 937468 - RNA, 22 nt, Human
agcuggggcugcagagaacagg

SEQ ID NO: 937469 - RNA, 22 nt, Human
acccaggagagagcuauaaaau

SEQ ID NO: 937470 - RNA, 21 nt, Human
gcugcaucaaucuacccaggg

SEQ ID NO: 937471 - RNA, 22 nt, Human
gcaggggaguggaugauggauu

SEQ ID NO: 937472 - RNA, 22 nt, Human
uuccaugaagggcagccucuca

SEQ ID NO: 937473 - RNA, 22 nt, Human
agcagacaacccagaugaccca

SEQ ID NO: 937474 - RNA, 22 nt, Human
gugccaggugcuaagcugugcu

SEQ ID NO: 937475 - RNA, 22 nt, Human
cccagcauuucugggcugcacu

SEQ ID NO: 937476 - RNA, 23 nt, Human
ucuccagugucucuucauugagu

SEQ ID NO: 937477 - RNA, 23 nt, Human
uugcuuucaucaugagaugcucc

SEQ ID NO: 937478 - RNA, 22 nt, Human
ccucacugaagaggugacauuu

SEQ ID NO: 937479 - RNA, 22 nt, Human
gcucccaggcauggagguaauu

SEQ ID NO: 937480 - RNA, 22 nt, Human
auccugggaagcugacauugaa

SEQ ID NO: 937481 - RNA, 22 nt, Human
uccucugccccagaugaaauuu

SEQ ID NO: 937482 - RNA, 22 nt, Human
ggcugugauugguggaugugaa

SEQ ID NO: 937483 - RNA, 22 nt, Human
ucacaggacccugaggguggcg

SEQ ID NO: 937484 - RNA, 22 nt, Human
auuucagauucagaaauguagg

SEQ ID NO: 937485 - RNA, 22 nt, Human
cugcugggaaggucugcucagu

SEQ ID NO: 937486 - RNA, 22 nt, Human
aggccaaaccggauggaaaagg

SEQ ID NO: 937487 - RNA, 22 nt, Human
ugcaccauuaauuuaugugaga

SEQ ID NO: 937488 - RNA, 22 nt, Human
ggguagcaugugucagaguuug

SEQ ID NO: 937489 - RNA, 22 nt, Human
cuacauuucccagcugccuucc

SEQ ID NO: 937490 - RNA, 22 nt, Human
auguguacaaccaagcacuaaa

SEQ ID NO: 937491 - RNA, 22 nt, Human
cacaggaggaggugcccgggcc

SEQ ID NO: 937492 - RNA, 22 nt, Human
gugucacaagagcccaggaaac

SEQ ID NO: 937493 - RNA, 22 nt, Human
aggcaguggagcuggaauaggc

SEQ ID NO: 937494 - RNA, 22 nt, Human
cuuccucccccacacacucacu

SEQ ID NO: 937495 - RNA, 21 nt, Human
aggcucagagaucaaacagua

SEQ ID NO: 937496 - RNA, 22 nt, Human
uaagaacagauaaaguuucccc

SEQ ID NO: 937497 - RNA, 22 nt, Human
cccgggaggaggaaguugcagu

SEQ ID NO: 937498 - RNA, 22 nt, Human
acagaaagaagguguauuugag

SEQ ID NO: 937499 - RNA, 22 nt, Human
ggcagcugucucugaguuagca

SEQ ID NO: 937500 - RNA, 23 nt, Human
agggcccaagccuggacagcagg

SEQ ID NO: 937501 - RNA, 22 nt, Human
gcugucuggguugagggcccug

SEQ ID NO: 937502 - RNA, 22 nt, Human
ugcaacauuauuaaacuaagca

SEQ ID NO: 937503 - RNA, 22 nt, Human
gagagucuaggaaccucauaua

SEQ ID NO: 937504 - RNA, 22 nt, Human
cuguguccugcgucaagccaau

SEQ ID NO: 937505 - RNA, 22 nt, Human
cuguuucaagugaagucagaca

SEQ ID NO: 937506 - RNA, 22 nt, Human
ggcacugagaggcucuuccuaa

SEQ ID NO: 937507 - RNA, 20 nt, Human
ugcagggcugccucccagcu

SEQ ID NO: 937508 - RNA, 22 nt, Human
uaugcugaauuugguuugcuau

SEQ ID NO: 937509 - RNA, 19 nt, Human
uuucaauggcuuagagaaa

SEQ ID NO: 937510 - RNA, 22 nt, Human
uagacacauccguggaagcuuc

SEQ ID NO: 937511 - RNA, 22 nt, Human
uucuugcaggucacucacugag

SEQ ID NO: 937512 - RNA, 22 nt, Human
gcaggcugauagaggauuccau

SEQ ID NO: 937513 - RNA, 23 nt, Human
uggcucagcuaguuuuccauuuc

SEQ ID NO: 937514 - RNA, 22 nt, Human
uguucuugggaaucuuacaguu

SEQ ID NO: 937515 - RNA, 19 nt, Human
ccaggagagcuuggagaag

SEQ ID NO: 937516 - RNA, 22 nt, Human
ccugggcaaaugccagagacaa

SEQ ID NO: 937517 - RNA, 22 nt, Human
agucuucucauuucacaugcuu

SEQ ID NO: 937518 - RNA, 22 nt, Human
cagagccccccuucugaucaca

SEQ ID NO: 937519 - RNA, 22 nt, Human
agugcuuuaccuagauaauguu

SEQ ID NO: 937520 - RNA, 22 nt, Human
ggagcuguugcgcaugcgcucg

SEQ ID NO: 937521 - RNA, 22 nt, Human
aggcaagcgcagaagcggagga

SEQ ID NO: 937522 - RNA, 22 nt, Human
uuggccaaauaaucuugcagau

SEQ ID NO: 937523 - RNA, 22 nt, Human
aggccuggguguucaccagaag

SEQ ID NO: 937524 - RNA, 22 nt, Human
gagucuuaggcaaaaauaaugg

SEQ ID NO: 937525 - RNA, 22 nt, Human
cauaaguuggguaauauaauga

SEQ ID NO: 937526 - RNA, 22 nt, Human
cagaggccaccuguggccacug

SEQ ID NO: 937527 - RNA, 22 nt, Human
gcuggcugggucccugagaggc

SEQ ID NO: 937528 - RNA, 22 nt, Human
cagggcaggacagauacauuac

SEQ ID NO: 937529 - RNA, 22 nt, Human
cugucuccagggcaggugcagg

SEQ ID NO: 937530 - RNA, 22 nt, Human
acccugagucagacagccugac

SEQ ID NO: 937531 - RNA, 20 nt, Human
gcccaagguccagaaggggg

SEQ ID NO: 937532 - RNA, 22 nt, Human
uaauacuuaccuugcagagucu

SEQ ID NO: 937533 - RNA, 22 nt, Human
agacagcuaauaaaugagugug

SEQ ID NO: 937534 - RNA, 22 nt, Human
gugucccaauguucaggacggc

SEQ ID NO: 937535 - RNA, 22 nt, Human
ccucuugccaaucagcuacaga

SEQ ID NO: 937536 - RNA, 22 nt, Human
gcccacagcucguuccucuccu

SEQ ID NO: 937537 - RNA, 22 nt, Human
cauugcccaguaggaucaccag

SEQ ID NO: 937538 - RNA, 22 nt, Human
agagcuuagaauuucagaugau

SEQ ID NO: 937539 - RNA, 22 nt, Human
agcagugaugcaugacagccua

SEQ ID NO: 937540 - RNA, 22 nt, Human
auguauuucuauguagugaaga

SEQ ID NO: 937541 - RNA, 22 nt, Human
uguucaauccccagguccugaa

SEQ ID NO: 937542 - RNA, 22 nt, Human
ugcagccaucuuucuuggagga

SEQ ID NO: 937543 - RNA, 21 nt, Human
ggacagcugcgcgcagggcuc

SEQ ID NO: 937544 - RNA, 22 nt, Human
cccaggagacugagcuguaacc

SEQ ID NO: 937545 - RNA, 22 nt, Human
aagacauuacuggaaucugacu

SEQ ID NO: 937546 - RNA, 22 nt, Human
auggagggugucagagagcgaa

SEQ ID NO: 937547 - RNA, 22 nt, Human
auuauauugaguauaaccagag

SEQ ID NO: 937548 - RNA, 22 nt, Human
gccaggcuguuuuuauuacugu

SEQ ID NO: 937549 - RNA, 22 nt, Human
guugaaaguagaugcuauuugg

SEQ ID NO: 937550 - RNA, 22 nt, Human
aggcagcuggcagcacccaggg

SEQ ID NO: 937551 - RNA, 23 nt, Human
gacagagugagaccuugucuuac

SEQ ID NO: 937552 - RNA, 22 nt, Human
gucagcucucuuauccaugagg

SEQ ID NO: 937553 - RNA, 22 nt, Human
cuguccugcaguugggggcagg

SEQ ID NO: 937554 - RNA, 22 nt, Human
cacaguuucuauaggucagaau

SEQ ID NO: 937555 - RNA, 22 nt, Human
uaugcuuuacuuuucauuguga

SEQ ID NO: 937556 - RNA, 22 nt, Human
uugcaccaaaugaguuaaaauu

SEQ ID NO: 937557 - RNA, 22 nt, Human
agggcugguauguccaugaaag

SEQ ID NO: 937558 - RNA, 19 nt, Human
cauuccuuugucugccaaa

SEQ ID NO: 937559 - RNA, 22 nt, Human
ccagggcaauaggaacacuuuu

SEQ ID NO: 937560 - RNA, 22 nt, Human
ccacagggcucuaggcgcuucc

SEQ ID NO: 937561 - RNA, 22 nt, Human
acccugccgugggcugcuugug

SEQ ID NO: 937562 - RNA, 22 nt, Human
cauucauuagaauagauaugua

SEQ ID NO: 937563 - RNA, 22 nt, Human
ggcaggugcucugugggccugg

SEQ ID NO: 937564 - RNA, 22 nt, Human
gaaauuauugcuagagacugca

SEQ ID NO: 937565 - RNA, 22 nt, Human
cugagguguugaugaccuaugc

SEQ ID NO: 937566 - RNA, 21 nt, Human
cucuggaggcaagggagagug

SEQ ID NO: 937567 - RNA, 22 nt, Human
gucaaguuaagauaaggucaug

SEQ ID NO: 937568 - RNA, 22 nt, Human
ugauuuccuggcuuuggaguuc

SEQ ID NO: 937569 - RNA, 20 nt, Human
agucccagaucaaauuucug

SEQ ID NO: 937570 - RNA, 22 nt, Human
agcugcccagauaggaggaggc

SEQ ID NO: 937571 - RNA, 22 nt, Human
ccacugucugcaggccucagca

SEQ ID NO: 937572 - RNA, 23 nt, Human
uucuucucaauuaguugauucag

SEQ ID NO: 937573 - RNA, 22 nt, Human
aaucuucuuucuuaacaguaca

SEQ ID NO: 937574 - RNA, 22 nt, Human
ggccagugugcaggucagagau

SEQ ID NO: 937575 - RNA, 22 nt, Human
auugaaagguuuugagcagaua

SEQ ID NO: 937576 - RNA, 16 nt, Human
gagccaggugccuuga

SEQ ID NO: 937577 - RNA, 22 nt, Human
agggaaugcuccguauaaaucu

SEQ ID NO: 937578 - RNA, 22 nt, Human
ggcuucuccagguacugagcau

SEQ ID NO: 937579 - RNA, 22 nt, Human
caaaguauauuggauugaaugg

SEQ ID NO: 937580 - RNA, 22 nt, Human
cacacaugaaucccuaguaccu

SEQ ID NO: 937581 - RNA, 22 nt, Human
gaggaagcagggcuuggcugag

SEQ ID NO: 937582 - RNA, 22 nt, Human
aagcaccuggguuauaucuuag

SEQ ID NO: 937583 - RNA, 22 nt, Human
augugucuaauuccaggagcac

SEQ ID NO: 937584 - RNA, 22 nt, Human
agugugucgagggaggguccag

SEQ ID NO: 937585 - RNA, 22 nt, Human
gauggacagccuggaaggaaag

SEQ ID NO: 937586 - RNA, 22 nt, Human
agccagcaugaagacagaggcc

SEQ ID NO: 937587 - RNA, 21 nt, Human
uacagaaugcgcuucagucug

SEQ ID NO: 937588 - RNA, 22 nt, Human
ggaggguuagcaaaggcacaga

SEQ ID NO: 937589 - RNA, 22 nt, Human
gaggggaaagugugaggcugcg

SEQ ID NO: 937590 - RNA, 22 nt, Human
cccaggaaguggagguugcagu

SEQ ID NO: 937591 - RNA, 22 nt, Human
auacauguaacugcauuguaau

SEQ ID NO: 937592 - RNA, 22 nt, Human
auugaauagaugcauuauacua

SEQ ID NO: 937593 - RNA, 22 nt, Human
augcuguagaucuuagccucua

SEQ ID NO: 937594 - RNA, 22 nt, Human
uccucacauggugagccacaca

SEQ ID NO: 937595 - RNA, 22 nt, Human
cuucucucugcauaggcauggg

SEQ ID NO: 937596 - RNA, 22 nt, Human
uacaguagacaauguuaguaug

SEQ ID NO: 937597 - RNA, 22 nt, Human
gugucaugggguuuguuauaca

SEQ ID NO: 937598 - RNA, 22 nt, Human
ucagcaauaugauaggcuuugu

SEQ ID NO: 937599 - RNA, 18 nt, Human
acugugguuuauguguag

SEQ ID NO: 937600 - RNA, 22 nt, Human
uuggccaaacagaguucaacag

SEQ ID NO: 937601 - RNA, 22 nt, Human
gcugcagccaaauucauuguca

SEQ ID NO: 937602 - RNA, 22 nt, Human
uccagcagguccgagacaaguu

SEQ ID NO: 937603 - RNA, 22 nt, Human
uaaauguaccuucugccuuacu

SEQ ID NO: 937604 - RNA, 22 nt, Human
gagcacagccaaaguaagaagg

SEQ ID NO: 937605 - RNA, 22 nt, Human
cagcuggguuuaguggggugug

SEQ ID NO: 937606 - RNA, 22 nt, Human
ggacuucuaagugccagacacu

SEQ ID NO: 937607 - RNA, 22 nt, Human
agauggguaacuggagucugcu

SEQ ID NO: 937608 - RNA, 22 nt, Human
auguacaaaaugccacugaauu

SEQ ID NO: 937609 - RNA, 22 nt, Human
gucuaauuccugcucuuacuca

SEQ ID NO: 937610 - RNA, 22 nt, Human
cagguggagcugacugagggca

SEQ ID NO: 937611 - RNA, 22 nt, Human
aggcuuauuuuaggucucucuu

SEQ ID NO: 937612 - RNA, 22 nt, Human
guggcagcugguaugcagacag

SEQ ID NO: 937613 - RNA, 22 nt, Human
uaauuucaauagcuugcauaau

SEQ ID NO: 937614 - RNA, 22 nt, Human
cugggagucuggccucuggucc

SEQ ID NO: 937615 - RNA, 22 nt, Human
gcuuccuagaucugugguacuc

SEQ ID NO: 937616 - RNA, 22 nt, Human
uggagcaagcuggagagaacau

SEQ ID NO: 937617 - RNA, 22 nt, Human
ggcucagguuuaaagugcuuua

SEQ ID NO: 937618 - RNA, 22 nt, Human
ucugcagguguuggaaggguca

SEQ ID NO: 937619 - RNA, 22 nt, Human
agguggggccaaaugcuacagu

SEQ ID NO: 937620 - RNA, 22 nt, Human
caguagccacuagacacaugua

SEQ ID NO: 937621 - RNA, 22 nt, Human
cgcagaagagguugucuagucc

SEQ ID NO: 937622 - RNA, 22 nt, Human
aaacaugaauagauauuaaaca

SEQ ID NO: 937623 - RNA, 22 nt, Human
aggccaaauguguauaaaacau

SEQ ID NO: 937624 - RNA, 22 nt, Human
cugucaggggcggguggagcgg

SEQ ID NO: 937625 - RNA, 22 nt, Human
gggaggugauggcaagcagcgg

SEQ ID NO: 937626 - RNA, 22 nt, Human
caguuuaaaugagugacugcag

SEQ ID NO: 937627 - RNA, 22 nt, Human
uagcuaucuguguccagaucca

SEQ ID NO: 937628 - RNA, 22 nt, Human
gucaggauuuuaaaaucccagu

SEQ ID NO: 937629 - RNA, 22 nt, Human
uggccuggugcucaggcaguag

SEQ ID NO: 937630 - RNA, 22 nt, Human
aggcacugaaagguggccagag

SEQ ID NO: 937631 - RNA, 22 nt, Human
uuacaaaguucugaguucaaac

SEQ ID NO: 937632 - RNA, 22 nt, Human
cugcugugcaggugccuaugau

SEQ ID NO: 937633 - RNA, 22 nt, Human
uguauauucugccuaaaagcuu

SEQ ID NO: 937634 - RNA, 22 nt, Human
cucaggacccgguccagguggg

SEQ ID NO: 937635 - RNA, 20 nt, Human
agucucuguagugccugaga

SEQ ID NO: 937636 - RNA, 22 nt, Human
ucccaggacccaggcauucaca

SEQ ID NO: 937637 - RNA, 22 nt, Human
gucucugcucuagagucuguga

SEQ ID NO: 937638 - RNA, 22 nt, Human
gcuguggguccggaccccacgg

SEQ ID NO: 937639 - RNA, 22 nt, Human
cucaggaggaggaaguucauug

SEQ ID NO: 937640 - RNA, 22 nt, Human
gcagggcucaacaggacacccc

SEQ ID NO: 937641 - RNA, 22 nt, Human
ucuuuccauggccacacagucu

SEQ ID NO: 937642 - RNA, 22 nt, Human
augaugguggguaauguguaaa

SEQ ID NO: 937643 - RNA, 20 nt, Human
uucuucucuaguuaucuuca

SEQ ID NO: 937644 - RNA, 22 nt, Human
uaaaugaaaggguuuaauuuau

SEQ ID NO: 937645 - RNA, 22 nt, Human
gcucuggacuggggccugagaa

SEQ ID NO: 937646 - RNA, 22 nt, Human
agaagccagcuucagcugcccg

SEQ ID NO: 937647 - RNA, 22 nt, Human
aagagcauauuaauaguggaga

SEQ ID NO: 937648 - RNA, 21 nt, Human
ggcauggcaccucugggcagg

SEQ ID NO: 937649 - RNA, 22 nt, Human
auguuuuucauaccaguguugg

SEQ ID NO: 937650 - RNA, 22 nt, Human
ggcugccugccuccaagccggg

SEQ ID NO: 937651 - RNA, 22 nt, Human
ccugugaggucaucugugguaa

SEQ ID NO: 937652 - RNA, 22 nt, Human
gagagcugcagccgagaggggg

SEQ ID NO: 937653 - RNA, 21 nt, Human
ggcuccugcuuugugaggggc

SEQ ID NO: 937654 - RNA, 19 nt, Human
ggaccagguccugggcagc

SEQ ID NO: 937655 - RNA, 22 nt, Human
uggcagagucaucacaucugga

SEQ ID NO: 937656 - RNA, 22 nt, Human
ccuccaggaacuugagagacac

SEQ ID NO: 937657 - RNA, 22 nt, Human
uuucaguuuccagcuuugucau

SEQ ID NO: 937658 - RNA, 22 nt, Human
gaggccuggagccgccuaggcg

SEQ ID NO: 937659 - RNA, 22 nt, Human
uauuuaguuaucuuucauaaaa

SEQ ID NO: 937660 - RNA, 22 nt, Human
cucugggcaccaaagagcagcu

SEQ ID NO: 937661 - RNA, 22 nt, Human
agcagggcugcagugugucuuu

SEQ ID NO: 937662 - RNA, 22 nt, Human
uggagugaaguaaagaggacaa

SEQ ID NO: 937663 - RNA, 22 nt, Human
uagggauggaaacuaggaaucu

SEQ ID NO: 937664 - RNA, 22 nt, Human
uauuccuauuucuaaacauaug

SEQ ID NO: 937665 - RNA, 22 nt, Human
cagagguacaagcuaaguuggg

SEQ ID NO: 937666 - RNA, 22 nt, Human
auagucuuagaucagauaaagu

SEQ ID NO: 937667 - RNA, 22 nt, Human
ugaagucuauuaacugauuucu

SEQ ID NO: 937668 - RNA, 18 nt, Human
gugacagcugcuagcuca

SEQ ID NO: 937669 - RNA, 22 nt, Human
cugggacagagcagcagugggg

SEQ ID NO: 937670 - RNA, 22 nt, Human
auguuacauaguccuuauuugu

SEQ ID NO: 937671 - RNA, 22 nt, Human
gaaaggcaguacagcugagccu

SEQ ID NO: 937672 - RNA, 22 nt, Human
aaguuuuccuguguccaagaug

SEQ ID NO: 937673 - RNA, 22 nt, Human
cauugcacuccagcuugggcaa

SEQ ID NO: 937674 - RNA, 22 nt, Human
ucaggcagaggauggggagcgu

SEQ ID NO: 937675 - RNA, 22 nt, Human
guggccuuuccugaagaaauga

SEQ ID NO: 937676 - RNA, 22 nt, Human
aaaggucaaaaucgugacauug

SEQ ID NO: 937677 - RNA, 22 nt, Human
agcaggcuccuuccuucucugg

SEQ ID NO: 937678 - RNA, 22 nt, Human
cagcugccaagaaucuuuucua

SEQ ID NO: 937679 - RNA, 22 nt, Human
ucucaggaguagugggauccau

SEQ ID NO: 937680 - RNA, 22 nt, Human
agaaauguuacaguuguuauuu

SEQ ID NO: 937681 - RNA, 22 nt, Human
agcagcauucucugguaugggg

SEQ ID NO: 937682 - RNA, 22 nt, Human
auauucuugugauuauaaagua

SEQ ID NO: 937683 - RNA, 22 nt, Human
gaggcaggcagauugcuugagg

SEQ ID NO: 937684 - RNA, 23 nt, Human
ucccagggaaggugagcgaggcu

SEQ ID NO: 937685 - RNA, 22 nt, Human
uucagcaaugacagccuauaua

SEQ ID NO: 937686 - RNA, 22 nt, Human
ccaccuccaccuauugccagcc

SEQ ID NO: 937687 - RNA, 22 nt, Human
ucagaaguugagauauucaggg

SEQ ID NO: 937688 - RNA, 22 nt, Human
ugauuuccacgugcacccaggu

SEQ ID NO: 937689 - RNA, 22 nt, Human
ggucaggggcugcucuacagag

SEQ ID NO: 937690 - RNA, 22 nt, Human
auggccuggccagagcucugcu

SEQ ID NO: 937691 - RNA, 22 nt, Human
guuuuauaggcuguugcuauau

SEQ ID NO: 937692 - RNA, 22 nt, Human
ggccaccuuccaguugccugca

SEQ ID NO: 937693 - RNA, 22 nt, Human
ucaccacugaacagaccuuugg

SEQ ID NO: 937694 - RNA, 22 nt, Human
ggaguucacugugcaggcucug

SEQ ID NO: 937695 - RNA, 22 nt, Human
uaugugcauaugcauacacaca

SEQ ID NO: 937696 - RNA, 22 nt, Human
uuaggcauuggaaggucagcuu

SEQ ID NO: 937697 - RNA, 22 nt, Human
ucuucagagugaaagucuguga

SEQ ID NO: 937698 - RNA, 22 nt, Human
ccuggccacagggcucugcauu

SEQ ID NO: 937699 - RNA, 22 nt, Human
cuggccugaggccgccuucaga

SEQ ID NO: 937700 - RNA, 22 nt, Human
aggaagcugccugggaugggaa

SEQ ID NO: 937701 - RNA, 23 nt, Human
uugcaaauuucaguuaguucaug

SEQ ID NO: 937702 - RNA, 22 nt, Human
uuacaguaugaucaacuuuuca

SEQ ID NO: 937703 - RNA, 22 nt, Human
agacaaaggauuaaugaugaug

SEQ ID NO: 937704 - RNA, 22 nt, Human
uuuuauuaucuuugaaugggac

SEQ ID NO: 937705 - RNA, 22 nt, Human
ugguggccaauucacagggcuc

SEQ ID NO: 937706 - RNA, 22 nt, Human
ccugagggcgccgagcucccag

SEQ ID NO: 937707 - RNA, 22 nt, Human
caggcagagugagguggucuaa

SEQ ID NO: 937708 - RNA, 22 nt, Human
gugcagggcuggcaccggaggc

SEQ ID NO: 937709 - RNA, 22 nt, Human
ccaagggcugcugaggugucca

SEQ ID NO: 937710 - RNA, 22 nt, Human
ucaugcuuaaaagacacuugag

SEQ ID NO: 937711 - RNA, 20 nt, Human
aggauuugagaaggcgucuu

SEQ ID NO: 937712 - RNA, 22 nt, Human
aagcuggcaugucaccugagaa

SEQ ID NO: 937713 - RNA, 22 nt, Human
ugaacagaucaauagaacugac

SEQ ID NO: 937714 - RNA, 22 nt, Human
ucauuucccuccuacaaagagg

SEQ ID NO: 937715 - RNA, 22 nt, Human
ugcuuuguguuugaauagauaa

SEQ ID NO: 937716 - RNA, 19 nt, Human
ggcucucuuaaagcuguuu

SEQ ID NO: 937717 - RNA, 22 nt, Human
uuggcuucuggcagucuggacg

SEQ ID NO: 937718 - RNA, 22 nt, Human
gcucugcuggaaguucucugga

SEQ ID NO: 937719 - RNA, 22 nt, Human
ucauugaaugcucugcagguug

SEQ ID NO: 937720 - RNA, 22 nt, Human
aauaagauugacacaaguaccu

SEQ ID NO: 937721 - RNA, 22 nt, Human
aaucaguauugguauagaauga

SEQ ID NO: 937722 - RNA, 22 nt, Human
uccaaggcauagacacagugcc

SEQ ID NO: 937723 - RNA, 22 nt, Human
aaauuagucgguuuaggaauuu

SEQ ID NO: 937724 - RNA, 22 nt, Human
agcaauauaaauguuggguaga

SEQ ID NO: 937725 - RNA, 22 nt, Human
gcccugugccagucacgcugug

SEQ ID NO: 937726 - RNA, 22 nt, Human
aucuggcugacuuugugggaca

SEQ ID NO: 937727 - RNA, 22 nt, Human
aggcaguuuaggcagcgauuua

SEQ ID NO: 937728 - RNA, 22 nt, Human
agcagccaauuggaggaugaag

SEQ ID NO: 937729 - RNA, 22 nt, Human
ugcuuuggccacuagaauucag

SEQ ID NO: 937730 - RNA, 22 nt, Human
uccuuguaaaggagcucuaaca

SEQ ID NO: 937731 - RNA, 22 nt, Human
aggcuagcuuuggcucaguaaa

SEQ ID NO: 937732 - RNA, 22 nt, Human
ccagggcagcagaauuggggca

SEQ ID NO: 937733 - RNA, 22 nt, Human
ugacagaaugugacucucagau

SEQ ID NO: 937734 - RNA, 22 nt, Human
guugaaaugagggauuaaucag

SEQ ID NO: 937735 - RNA, 22 nt, Human
ucugcaggccucgacaaggcca

SEQ ID NO: 937736 - RNA, 22 nt, Human
guccugggccugcugaggcuga

SEQ ID NO: 937737 - RNA, 22 nt, Human
gcagagcccuggggguauggug

SEQ ID NO: 937738 - RNA, 22 nt, Human
agguggagaagagaugggcagu

SEQ ID NO: 937739 - RNA, 22 nt, Human
aggcucugugacaaucaagcug

SEQ ID NO: 937740 - RNA, 22 nt, Human
auguaacuguuauauuuuguug

SEQ ID NO: 937741 - RNA, 22 nt, Human
auucuucacaaauauauagaag

SEQ ID NO: 937742 - RNA, 22 nt, Human
ucugggagccaugccuuggagu

SEQ ID NO: 937743 - RNA, 22 nt, Human
ucuaaagaagaggguucugcgg

SEQ ID NO: 937744 - RNA, 22 nt, Human
cagaagaauggugucugagcuc

SEQ ID NO: 937745 - RNA, 22 nt, Human
uucagucagugacuaagcaguu

SEQ ID NO: 937746 - RNA, 22 nt, Human
aggaaaggccuuugcauuuggu

SEQ ID NO: 937747 - RNA, 22 nt, Human
agugcuuugaacgaaaggcuga

SEQ ID NO: 937748 - RNA, 22 nt, Human
uccagcagcccgaaggcccauc

SEQ ID NO: 937749 - RNA, 22 nt, Human
caggaacacaaugagucucaaa

SEQ ID NO: 937750 - RNA, 22 nt, Human
agcagcuauuucuuccagagag

SEQ ID NO: 937751 - RNA, 22 nt, Human
cucucuggcacuucauugcugu

SEQ ID NO: 937752 - RNA, 22 nt, Human
gcuguccugggaacaggcacua

SEQ ID NO: 937753 - RNA, 20 nt, Human
gucagugucuucaguaguga

SEQ ID NO: 937754 - RNA, 22 nt, Human
caggugggagccacagcguaca

SEQ ID NO: 937755 - RNA, 22 nt, Human
uuugcauuguuucaaaagugaa

SEQ ID NO: 937756 - RNA, 22 nt, Human
uucaggagcuggcugcgaagga

SEQ ID NO: 937757 - RNA, 22 nt, Human
cugagaggugacagcgugcugg

SEQ ID NO: 937758 - RNA, 22 nt, Human
uguaaucauuacaguacaugga

SEQ ID NO: 937759 - RNA, 22 nt, Human
uucuucuucaagugcugcauuc

SEQ ID NO: 937760 - RNA, 22 nt, Human
cuucaagagaaugcagggaugu

SEQ ID NO: 937761 - RNA, 22 nt, Human
uucaaaggcaggauagcagcug

SEQ ID NO: 937762 - RNA, 22 nt, Human
uccucagaugcucuuggacgcc

SEQ ID NO: 937763 - RNA, 22 nt, Human
uaaaugcaguuaguacuugcca

SEQ ID NO: 937764 - RNA, 22 nt, Human
caggccucccggugcacacuga

SEQ ID NO: 937765 - RNA, 22 nt, Human
ucugucacccgagcaggcgaga

SEQ ID NO: 937766 - RNA, 22 nt, Human
aggagccaguuccaccccagga

SEQ ID NO: 937767 - RNA, 22 nt, Human
uucacaaaacacuauuuucugg

SEQ ID NO: 937768 - RNA, 22 nt, Human
uagagcuauuuagagcauuuua

SEQ ID NO: 937769 - RNA, 22 nt, Human
gaggaaccacucugagaagcca

SEQ ID NO: 937770 - RNA, 22 nt, Human
uuaauuuuuauguauagugugu

SEQ ID NO: 937771 - RNA, 22 nt, Human
caggagugaguuggggucuaca

SEQ ID NO: 937772 - RNA, 22 nt, Human
uuauugagcacauaguaugugg

SEQ ID NO: 937773 - RNA, 22 nt, Human
gcucccaccuuugcuaucagua

SEQ ID NO: 937774 - RNA, 22 nt, Human
augagcugugggauuccagagg

SEQ ID NO: 937775 - RNA, 22 nt, Human
ggcuagaauaauugacuucauu

SEQ ID NO: 937776 - RNA, 22 nt, Human
gccugggagugcacagugaggu

SEQ ID NO: 937777 - RNA, 22 nt, Human
uacauauagacaguuacucuag

SEQ ID NO: 937778 - RNA, 23 nt, Human
gcuguuagauuuaauaagcauuu

SEQ ID NO: 937779 - RNA, 22 nt, Human
aggcacuguggguguggccgga

SEQ ID NO: 937780 - RNA, 22 nt, Human
aagggaaaucauauggugcagu

SEQ ID NO: 937781 - RNA, 22 nt, Human
cuuuggcaacacaugugggaca

SEQ ID NO: 937782 - RNA, 22 nt, Human
acacugaaugcuguuuagaaau

SEQ ID NO: 937783 - RNA, 22 nt, Human
acuuuguauaagacaauaaaga

SEQ ID NO: 937784 - RNA, 22 nt, Human
auaucuuuuagagcaagcuugu

SEQ ID NO: 937785 - RNA, 22 nt, Human
uccuucagauuccugcuucugg

SEQ ID NO: 937786 - RNA, 22 nt, Human
gcccagcuccucugcagacccu

SEQ ID NO: 937787 - RNA, 22 nt, Human
uuucuaggcacagugucuuccc

SEQ ID NO: 937788 - RNA, 22 nt, Human
uggaguucucaggugagggcuu

SEQ ID NO: 937789 - RNA, 22 nt, Human
caggaugguggcaugaucagaa

SEQ ID NO: 937790 - RNA, 18 nt, Human
cagcugccagcucaugga

SEQ ID NO: 937791 - RNA, 22 nt, Human
cacccaggcagguggcugagaa

SEQ ID NO: 937792 - RNA, 22 nt, Human
aucaggauagugguuaccuggg

SEQ ID NO: 937793 - RNA, 21 nt, Human
cagagcagcguucugcugugg

SEQ ID NO: 937794 - RNA, 22 nt, Human
cuggagccacuuuuuauccuuu

SEQ ID NO: 937795 - RNA, 22 nt, Human
gugcauauaugcacauaugugu

SEQ ID NO: 937796 - RNA, 22 nt, Human
ucuggcucucaacaaauauuua

SEQ ID NO: 937797 - RNA, 22 nt, Human
auguguuuguaccuuuaaauau

SEQ ID NO: 937798 - RNA, 22 nt, Human
ucuuuucuggacucugcaugga

SEQ ID NO: 937799 - RNA, 22 nt, Human
augaggcauuccacucaaacuc

SEQ ID NO: 937800 - RNA, 22 nt, Human
ucugugccucaucugguucagg

SEQ ID NO: 937801 - RNA, 22 nt, Human
uagugauuaaaggcagaauguu

SEQ ID NO: 937802 - RNA, 22 nt, Human
agccuggauccauguggcuacc

SEQ ID NO: 937803 - RNA, 22 nt, Human
ccacagcugaccgcaggugagc

SEQ ID NO: 937804 - RNA, 22 nt, Human
cacaggaauuagcagccuaaaa

SEQ ID NO: 937805 - RNA, 22 nt, Human
ucccaggaauccguccucuaga

SEQ ID NO: 937806 - RNA, 22 nt, Human
guggggggacguuggucacuuu

SEQ ID NO: 937807 - RNA, 16 nt, Human
gagggcagaggcggaa

SEQ ID NO: 937808 - RNA, 22 nt, Human
gagguggucgaggagggguacc

SEQ ID NO: 937809 - RNA, 22 nt, Human
aaagcagagcagggcacuuaug

SEQ ID NO: 937810 - RNA, 22 nt, Human
agcugcuguccuaggcacugua

SEQ ID NO: 937811 - RNA, 22 nt, Human
uauacuuuccugcaacuuugau

SEQ ID NO: 937812 - RNA, 22 nt, Human
augugucuugagggggauggag

SEQ ID NO: 937813 - RNA, 22 nt, Human
caguaugagaguugaaucaagg

SEQ ID NO: 937814 - RNA, 22 nt, Human
agccucucuuuauucccagcua

SEQ ID NO: 937815 - RNA, 22 nt, Human
uccuugaaugaauguucucucc

SEQ ID NO: 937816 - RNA, 22 nt, Human
uccuuccugcaggccaaguccu

SEQ ID NO: 937817 - RNA, 22 nt, Human
gagacugcauuguccaaggguu

SEQ ID NO: 937818 - RNA, 22 nt, Human
aacaacugaaaagcuuuuucug

SEQ ID NO: 937819 - RNA, 22 nt, Human
gccaggcuggcaaaaggaaacc

SEQ ID NO: 937820 - RNA, 22 nt, Human
uuauccuggauuauauauguga

SEQ ID NO: 937821 - RNA, 21 nt, Human
acaugcauagagagauuucug

SEQ ID NO: 937822 - RNA, 23 nt, Human
agcacacuuguacaaugcccuag

SEQ ID NO: 937823 - RNA, 22 nt, Human
agcucccagaagccagagucgg

SEQ ID NO: 937824 - RNA, 22 nt, Human
uugcauuuccuguacuguuuga

SEQ ID NO: 937825 - RNA, 22 nt, Human
ugaggcagcaauugauuauuca

SEQ ID NO: 937826 - RNA, 22 nt, Human
ucuggcucagggcucugaggga

SEQ ID NO: 937827 - RNA, 22 nt, Human
ugacaauacagagagagcaaaa

SEQ ID NO: 937828 - RNA, 22 nt, Human
caggaugaagggcaaaggcaag

SEQ ID NO: 937829 - RNA, 22 nt, Human
agagcuggaaucagaccucagg

SEQ ID NO: 937830 - RNA, 22 nt, Human
acaggugugagaacaugccuug

SEQ ID NO: 937831 - RNA, 22 nt, Human
uaaaaguaggaaugaaacgcau

SEQ ID NO: 937832 - RNA, 22 nt, Human
aucauucuauuguugagcugcc

SEQ ID NO: 937833 - RNA, 22 nt, Human
ccaguccagugccaugcauggc

SEQ ID NO: 937834 - RNA, 22 nt, Human
cccagcucugcagaccugcccu

SEQ ID NO: 937835 - RNA, 22 nt, Human
agcccuucaaccugccuacucc

SEQ ID NO: 937836 - RNA, 22 nt, Human
gugcagggagcccagaaggucc

SEQ ID NO: 937837 - RNA, 22 nt, Human
caccagggacaaugcuaggggu

SEQ ID NO: 937838 - RNA, 22 nt, Human
gcagagcauguccucaggacag

SEQ ID NO: 937839 - RNA, 22 nt, Human
cugggacuuuacccuguggccc

SEQ ID NO: 937840 - RNA, 23 nt, Human
cugcccugaucuugaucuauugu

SEQ ID NO: 937841 - RNA, 22 nt, Human
augaugugugcugaucaagcuu

SEQ ID NO: 937842 - RNA, 21 nt, Human
ucagggcagcugcucuucaga

SEQ ID NO: 937843 - RNA, 22 nt, Human
ggcuggaaaagacaaagcuauu

SEQ ID NO: 937844 - RNA, 22 nt, Human
uggccugacugucaggcuguau

SEQ ID NO: 937845 - RNA, 20 nt, Human
ugugggcccuuggcuggcaa

SEQ ID NO: 937846 - RNA, 22 nt, Human
cuucacaauucuaacagggcaa

SEQ ID NO: 937847 - RNA, 22 nt, Human
uuucaguuacugcuauaucauu

SEQ ID NO: 937848 - RNA, 22 nt, Human
agaagugccauacuguggucca

SEQ ID NO: 937849 - RNA, 22 nt, Human
uugaaagucacaauggcauuaa

SEQ ID NO: 937850 - RNA, 22 nt, Human
uucugugauugacauguggcuu

SEQ ID NO: 937851 - RNA, 22 nt, Human
aggccucagugaucaucaucag

SEQ ID NO: 937852 - RNA, 22 nt, Human
uuuagaaguucacacauuuaaa

SEQ ID NO: 937853 - RNA, 22 nt, Human
aggcagugcugugcccugaacc

SEQ ID NO: 937854 - RNA, 22 nt, Human
ucugggcacugcugagccugua

SEQ ID NO: 937855 - RNA, 22 nt, Human
auuguucaaagugcuuugcaug

SEQ ID NO: 937856 - RNA, 22 nt, Human
uuaaagagucuacugcacaucc

SEQ ID NO: 937857 - RNA, 22 nt, Human
cuggccuggcaggggaccucua

SEQ ID NO: 937858 - RNA, 22 nt, Human
cauugcacagcccuguggugau

SEQ ID NO: 937859 - RNA, 22 nt, Human
ugcagaagcagagaguugccaa

SEQ ID NO: 937860 - RNA, 22 nt, Human
uacucugccccagccaauaaug

SEQ ID NO: 937861 - RNA, 22 nt, Human
uaaaagcucuucuguugaguua

SEQ ID NO: 937862 - RNA, 22 nt, Human
ggcagucagugugguucauaaa

SEQ ID NO: 937863 - RNA, 22 nt, Human
gcagcguggggacaggagcuca

SEQ ID NO: 937864 - RNA, 22 nt, Human
ggcaagaaggcuucagguagcu

SEQ ID NO: 937865 - RNA, 22 nt, Human
cauacuuuugcccugacauucu

SEQ ID NO: 937866 - RNA, 22 nt, Human
acagauguacacucauauauaa

SEQ ID NO: 937867 - RNA, 22 nt, Human
uugacacaguuuucucauuaag

SEQ ID NO: 937868 - RNA, 22 nt, Human
aauggcucugauguuguuguga

SEQ ID NO: 937869 - RNA, 22 nt, Human
uguuacacagcagaauagcaag

SEQ ID NO: 937870 - RNA, 22 nt, Human
uggccugucuuguugugcuaga

SEQ ID NO: 937871 - RNA, 21 nt, Human
agagaagggacucuuccaguc

SEQ ID NO: 937872 - RNA, 22 nt, Human
ucccugggccuccugcuaugca

SEQ ID NO: 937873 - RNA, 22 nt, Human
cuggagccacugggucuuguau

SEQ ID NO: 937874 - RNA, 22 nt, Human
gcugugaguggaggaggcugag

SEQ ID NO: 937875 - RNA, 22 nt, Human
augcaguacauacaaacacuga

SEQ ID NO: 937876 - RNA, 22 nt, Human
aagacagagacucugcaacagg

SEQ ID NO: 937877 - RNA, 20 nt, Human
gcccaggaauuugcauuucu

SEQ ID NO: 937878 - RNA, 22 nt, Human
gcuggcagaagagcugguucaa

SEQ ID NO: 937879 - RNA, 22 nt, Human
uucucuuauucuggauaugcag

SEQ ID NO: 937880 - RNA, 22 nt, Human
agugacugacaccuguaauccc

SEQ ID NO: 937881 - RNA, 17 nt, Human
ucagagggaugagcagg

SEQ ID NO: 937882 - RNA, 22 nt, Human
uucaagaugccagggacgcggc

SEQ ID NO: 937883 - RNA, 22 nt, Human
cggaggggauacauuuucugaa

SEQ ID NO: 937884 - RNA, 22 nt, Human
cuggggggagcugcguccagca

SEQ ID NO: 937885 - RNA, 22 nt, Human
ggcugaguugagaggauuacuu

SEQ ID NO: 937886 - RNA, 22 nt, Human
uuguaacagcuguuuauauagu

SEQ ID NO: 937887 - RNA, 22 nt, Human
guugaaugaaucauucuaugua

SEQ ID NO: 937888 - RNA, 22 nt, Human
uacaaaugaaccaacuuugaug

SEQ ID NO: 937889 - RNA, 22 nt, Human
gaagagcugcucagaacaugau

SEQ ID NO: 937890 - RNA, 22 nt, Human
uuucacaaagcauagcacuuua

SEQ ID NO: 937891 - RNA, 22 nt, Human
gcucugcugggugggcaguuau

SEQ ID NO: 937892 - RNA, 22 nt, Human
uucaaugagcccggggccauag

SEQ ID NO: 937893 - RNA, 22 nt, Human
agcagaggaggauuuaguuagg

SEQ ID NO: 937894 - RNA, 22 nt, Human
agucucagaaaauaugcuuuuu

SEQ ID NO: 937895 - RNA, 22 nt, Human
ucauuuguucaucugcucuucu

SEQ ID NO: 937896 - RNA, 22 nt, Human
uucaauucugcucugaucuuag

SEQ ID NO: 937897 - RNA, 19 nt, Human
gcaggcaguggcauucgga

SEQ ID NO: 937898 - RNA, 18 nt, Human
caugucugcgccacaagg

SEQ ID NO: 937899 - RNA, 22 nt, Human
uguuucagucccuguguucaau

SEQ ID NO: 937900 - RNA, 22 nt, Human
cagcugagucugagguucuuug

SEQ ID NO: 937901 - RNA, 22 nt, Human
aggcagcugaggucuggcgccc

SEQ ID NO: 937902 - RNA, 21 nt, Human
ugcaggcaggcagagaugcug

SEQ ID NO: 937903 - RNA, 22 nt, Human
aaguaugacauuuaagacaauu

SEQ ID NO: 937904 - RNA, 22 nt, Human
aacaggagaguaaauauaugau

SEQ ID NO: 937905 - RNA, 22 nt, Human
cuggcagcugcccgagaugccc

SEQ ID NO: 937906 - RNA, 22 nt, Human
gcagccacuuugcaaccaagag

SEQ ID NO: 937907 - RNA, 22 nt, Human
accaggaguaacagugaguggu

SEQ ID NO: 937908 - RNA, 19 nt, Human
ccuggccagacuucugccc

SEQ ID NO: 937909 - RNA, 21 nt, Human
cauauuaaaucggugccuuua

SEQ ID NO: 937910 - RNA, 22 nt, Human
gccuggcccagggcucuuguug

SEQ ID NO: 937911 - RNA, 22 nt, Human
cagcccagcagggucuggcccu

SEQ ID NO: 937912 - RNA, 22 nt, Human
aauccugugugacucuggggag

SEQ ID NO: 937913 - RNA, 22 nt, Human
ucagacuucaguuuuuaguugu

SEQ ID NO: 937914 - RNA, 22 nt, Human
ggggacaguuaaagaccaagac

SEQ ID NO: 937915 - RNA, 20 nt, Human
caccacagaauuggggacag

SEQ ID NO: 937916 - RNA, 19 nt, Human
uugcauuguaguuggacug

SEQ ID NO: 937917 - RNA, 22 nt, Human
uuacaagcagcuacauaucaca

SEQ ID NO: 937918 - RNA, 22 nt, Human
ggaccuggcaauuugcaucucu

SEQ ID NO: 937919 - RNA, 22 nt, Human
auggccaagcaugccuguggcc

SEQ ID NO: 937920 - RNA, 18 nt, Human
uggacaggguggagaaaa

SEQ ID NO: 937921 - RNA, 22 nt, Human
acugucugcuggccccugguua

SEQ ID NO: 937922 - RNA, 21 nt, Human
ugccagcauguaggcuaguug

SEQ ID NO: 937923 - RNA, 22 nt, Human
gagggccagcagccucagcaug

SEQ ID NO: 937924 - RNA, 19 nt, Human
ucuggagcugaugcaggug

SEQ ID NO: 937925 - RNA, 23 nt, Human
aaguucaagucacagccugucuu

SEQ ID NO: 937926 - RNA, 22 nt, Human
ucuuaaagagcgcaauuugagg

SEQ ID NO: 937927 - RNA, 22 nt, Human
ucuuucaaugagcauucuuucc

SEQ ID NO: 937928 - RNA, 22 nt, Human
cagaagcagugagagaugugca

SEQ ID NO: 937929 - RNA, 22 nt, Human
ccagcgcuucccaucagggagg

SEQ ID NO: 937930 - RNA, 22 nt, Human
cugaggcaugaaugugggcuuu

SEQ ID NO: 937931 - RNA, 22 nt, Human
auuaaggaauguaggcaagaag

SEQ ID NO: 937932 - RNA, 22 nt, Human
auaugagagaggaaagauuuua

SEQ ID NO: 937933 - RNA, 22 nt, Human
ggagcagagcauuucacagccu

SEQ ID NO: 937934 - RNA, 22 nt, Human
augggaggcagcagagcccagc

SEQ ID NO: 937935 - RNA, 22 nt, Human
gucuugaucuccugaccuugug

SEQ ID NO: 937936 - RNA, 22 nt, Human
gaaaguuucuucauuaagaugu

SEQ ID NO: 937937 - RNA, 22 nt, Human
cccaggaggcgcagguugcggu

SEQ ID NO: 937938 - RNA, 22 nt, Human
ccccggaggcggagguugcagu

SEQ ID NO: 937939 - RNA, 22 nt, Human
gccugagcccaggugugcagag

SEQ ID NO: 937940 - RNA, 22 nt, Human
gacagcagccacagggagaggg

SEQ ID NO: 937941 - RNA, 22 nt, Human
aauuuccagaccccauccacag

SEQ ID NO: 937942 - RNA, 22 nt, Human
ucugagcauugaauuuucuucc

SEQ ID NO: 937943 - RNA, 19 nt, Human
agggaaggauucugucauu

SEQ ID NO: 937944 - RNA, 22 nt, Human
ugucccaguuggguauugaauu

SEQ ID NO: 937945 - RNA, 22 nt, Human
agggaggauaguagucaguuua

SEQ ID NO: 937946 - RNA, 19 nt, Human
ugcuuccucaccaucuccc

SEQ ID NO: 937947 - RNA, 22 nt, Human
uagcugucaccagaaauggcca

SEQ ID NO: 937948 - RNA, 21 nt, Human
cccacggaaugaugaggcacu

SEQ ID NO: 937949 - RNA, 22 nt, Human
ugcagggcuacaggacuacaac

SEQ ID NO: 937950 - RNA, 22 nt, Human
aggcuccuugcucacaggcuca

SEQ ID NO: 937951 - RNA, 20 nt, Human
gggagucuggaugaaagaug

SEQ ID NO: 937952 - RNA, 22 nt, Human
ugcagugguguccagguguacu

SEQ ID NO: 937953 - RNA, 22 nt, Human
auuuccagugcacugaauagaa

SEQ ID NO: 937954 - RNA, 22 nt, Human
ucugucucaaguucuugcacuc

SEQ ID NO: 937955 - RNA, 22 nt, Human
guccucagucaguuuggugggg

SEQ ID NO: 937956 - RNA, 22 nt, Human
aggauccugcgcuuugggggag

SEQ ID NO: 937957 - RNA, 22 nt, Human
ucugcuguugccaugaguaaua

SEQ ID NO: 937958 - RNA, 22 nt, Human
gcaccuuuuucuaggagaaugu

SEQ ID NO: 937959 - RNA, 22 nt, Human
ggcugcagcggauuggggauug

SEQ ID NO: 937960 - RNA, 22 nt, Human
guccucaggaaagcagauaaca

SEQ ID NO: 937961 - RNA, 22 nt, Human
uaggcaggugugcacugcccac

SEQ ID NO: 937962 - RNA, 22 nt, Human
caggcaggugcagauuccucuu

SEQ ID NO: 937963 - RNA, 22 nt, Human
gcugugcagucuuuggugugcc

SEQ ID NO: 937964 - RNA, 22 nt, Human
ggcuagaacuuuacacuuugca

SEQ ID NO: 937965 - RNA, 22 nt, Human
ucacugcaaggaggcuucucaa

SEQ ID NO: 937966 - RNA, 22 nt, Human
cagaguggcacucugcuggaug

SEQ ID NO: 937967 - RNA, 22 nt, Human
aucaggaucagggcuagcagag

SEQ ID NO: 937968 - RNA, 17 nt, Human
cauguguaugugggagu

SEQ ID NO: 937969 - RNA, 22 nt, Human
aaaugaguuuccucaauguccu

SEQ ID NO: 937970 - RNA, 22 nt, Human
ccugccagugaagcugacgggc

SEQ ID NO: 937971 - RNA, 20 nt, Human
gagauggacagaugaagggg

SEQ ID NO: 937972 - RNA, 19 nt, Human
aagcagcccuggcaagagc

SEQ ID NO: 937973 - RNA, 22 nt, Human
gaauuguacgcuuuacauaggu

SEQ ID NO: 937974 - RNA, 22 nt, Human
agugcacaccuuaguacaaagu

SEQ ID NO: 937975 - RNA, 22 nt, Human
ggagcggagggagggccacugu

SEQ ID NO: 937976 - RNA, 22 nt, Human
aaaagacaucuauuucaggcag

SEQ ID NO: 937977 - RNA, 22 nt, Human
ucugcugugggucuauauuuua

SEQ ID NO: 937978 - RNA, 19 nt, Human
uucauucuuucuacuuacc

SEQ ID NO: 937979 - RNA, 22 nt, Human
auuguauuuccagcuugaaugu

SEQ ID NO: 937980 - RNA, 22 nt, Human
uggcucucagcucccagcagcc

SEQ ID NO: 937981 - RNA, 22 nt, Human
ucuggaguccagauccauuugg

SEQ ID NO: 937982 - RNA, 22 nt, Human
ucaguauccacaaaugcucaaa

SEQ ID NO: 937983 - RNA, 22 nt, Human
augcaguagauaggcacuuuua

SEQ ID NO: 937984 - RNA, 22 nt, Human
uccagugguacauggagacacu

SEQ ID NO: 937985 - RNA, 22 nt, Human
aagagggcagcacagguggguc

SEQ ID NO: 937986 - RNA, 22 nt, Human
uuuuauucuaaguaugauggga

SEQ ID NO: 937987 - RNA, 22 nt, Human
caaugguggugucagaagagau

SEQ ID NO: 937988 - RNA, 20 nt, Human
uaugcuuuuuauaagauuga

SEQ ID NO: 937989 - RNA, 22 nt, Human
ugcucccaaacgaccuacugug

SEQ ID NO: 937990 - RNA, 21 nt, Human
gucagcagauccagcacuugu

SEQ ID NO: 937991 - RNA, 22 nt, Human
agauggggcagaauggagccau

SEQ ID NO: 937992 - RNA, 22 nt, Human
uuuuuugucuugaagaaauggu

SEQ ID NO: 937993 - RNA, 22 nt, Human
agggagccagaguugggagcuc

SEQ ID NO: 937994 - RNA, 22 nt, Human
auuuaugacuggugaauagaac

SEQ ID NO: 937995 - RNA, 22 nt, Human
cagccacguagcccuuggccgu

SEQ ID NO: 937996 - RNA, 22 nt, Human
uuuuuaagagauucuccagucu

SEQ ID NO: 937997 - RNA, 17 nt, Human
cucuccuuccucugagg

SEQ ID NO: 937998 - RNA, 22 nt, Human
ugccuguguccccuucuuggca

SEQ ID NO: 937999 - RNA, 22 nt, Human
ugccuugcacauaauauacauu

SEQ ID NO: 938000 - RNA, 22 nt, Human
gagcucauccccaugguccguc

SEQ ID NO: 938001 - RNA, 22 nt, Human
uuuucacacaaggugauaaguu

SEQ ID NO: 938002 - RNA, 22 nt, Human
ggcugagggccagggcuagucu

SEQ ID NO: 938003 - RNA, 22 nt, Human
gcagagccugacgggauuuuuc

SEQ ID NO: 938004 - RNA, 22 nt, Human
uccuuccucggggacccagauc

SEQ ID NO: 938005 - RNA, 22 nt, Human
gcaaggcugagcacauuugcau

SEQ ID NO: 938006 - RNA, 22 nt, Human
cugagcugggaguagagacucu

SEQ ID NO: 938007 - RNA, 22 nt, Human
ccugggcaacauagugagaccu

SEQ ID NO: 938008 - RNA, 22 nt, Human
gggcuggugaggcugcccugca

SEQ ID NO: 938009 - RNA, 22 nt, Human
uaagaacauuuucggaaagaua

SEQ ID NO: 938010 - RNA, 19 nt, Human
cagaacagaggucauggcc

SEQ ID NO: 938011 - RNA, 22 nt, Human
uuccuggcauagagagggcaca

SEQ ID NO: 938012 - RNA, 22 nt, Human
ugcaagcacucaaugcaaacag

SEQ ID NO: 938013 - RNA, 22 nt, Human
ugggcugccggcaggcucugcc

SEQ ID NO: 938014 - RNA, 23 nt, Human
ccacuagcaccuguucaacuucu

SEQ ID NO: 938015 - RNA, 22 nt, Human
ugccuugcgggcguuucuguug

SEQ ID NO: 938016 - RNA, 21 nt, Human
agaaauguaucauucuuuucc

SEQ ID NO: 938017 - RNA, 22 nt, Human
aucuggguucaccaugcuccug

SEQ ID NO: 938018 - RNA, 22 nt, Human
agcccaagcuaugaggugaccu

SEQ ID NO: 938019 - RNA, 22 nt, Human
uccaggcaggguuaaggguccu

SEQ ID NO: 938020 - RNA, 22 nt, Human
acuuucauuugugaagacugua

SEQ ID NO: 938021 - RNA, 21 nt, Human
ucacuuauaauguauuugcug

SEQ ID NO: 938022 - RNA, 22 nt, Human
uccauuuacuauucucauaucg

SEQ ID NO: 938023 - RNA, 22 nt, Human
cuccucugucuaccacgagggu

SEQ ID NO: 938024 - RNA, 19 nt, Human
agacagagcucaguggguu

SEQ ID NO: 938025 - RNA, 22 nt, Human
cuccaggagcugugucuuucuu

SEQ ID NO: 938026 - RNA, 22 nt, Human
aggagccaugagugacaucaca

SEQ ID NO: 938027 - RNA, 22 nt, Human
acaugaaaccugagucuaacuc

SEQ ID NO: 938028 - RNA, 21 nt, Human
cgcagagcgaacuugcggcgc

SEQ ID NO: 938029 - RNA, 22 nt, Human
ucugccuuggcaaccacagcuu

SEQ ID NO: 938030 - RNA, 22 nt, Human
cugagauggaguuuugcucuug

SEQ ID NO: 938031 - RNA, 22 nt, Human
ggucccugcugaagccuuggug

SEQ ID NO: 938032 - RNA, 22 nt, Human
cuggagagggagcccuggcagu

SEQ ID NO: 938033 - RNA, 22 nt, Human
cuggcucacaggugagaugcau

SEQ ID NO: 938034 - RNA, 22 nt, Human
gcucccagacugaccagaggug

SEQ ID NO: 938035 - RNA, 22 nt, Human
gcauccagagguagccacugug

SEQ ID NO: 938036 - RNA, 22 nt, Human
acuucucuucauagguggcaau

SEQ ID NO: 938037 - RNA, 23 nt, Human
uccagcagagccuuccaggaggg

SEQ ID NO: 938038 - RNA, 22 nt, Human
gcccagcugucuggcagggaug

SEQ ID NO: 938039 - RNA, 22 nt, Human
ggcuggagauaugucuggaaca

SEQ ID NO: 938040 - RNA, 22 nt, Human
ggcucugcccagguggacagca

SEQ ID NO: 938041 - RNA, 22 nt, Human
aggaaagguagcgugccagcag

SEQ ID NO: 938042 - RNA, 22 nt, Human
agcaggagagcagugcgugguc

SEQ ID NO: 938043 - RNA, 22 nt, Human
aaaagguaguugccaaauaagg

SEQ ID NO: 938044 - RNA, 22 nt, Human
cuagaaaugcucaagagaaagu

SEQ ID NO: 938045 - RNA, 23 nt, Human
ucugucaccuauggcugcucuuc

SEQ ID NO: 938046 - RNA, 22 nt, Human
caucugcuguuccuuggacuca

SEQ ID NO: 938047 - RNA, 22 nt, Human
uaucuacaggugucagguaaga

SEQ ID NO: 938048 - RNA, 22 nt, Human
aaugaugguauugaugagcuaa

SEQ ID NO: 938049 - RNA, 22 nt, Human
uggugagcgaugcugcauguuc

SEQ ID NO: 938050 - RNA, 22 nt, Human
gugauuccuauuaguacaugca

SEQ ID NO: 938051 - RNA, 22 nt, Human
acucagaaugacugaugcugug

SEQ ID NO: 938052 - RNA, 22 nt, Human
ggugggcagcucuuggcaggca

SEQ ID NO: 938053 - RNA, 22 nt, Human
uuauggcauauuccucauugua

SEQ ID NO: 938054 - RNA, 19 nt, Human
augauggucccauucaccu

SEQ ID NO: 938055 - RNA, 22 nt, Human
uccucugcuccaucuuuacugu

SEQ ID NO: 938056 - RNA, 22 nt, Human
aaaccauggaguaaguucacau

SEQ ID NO: 938057 - RNA, 22 nt, Human
aggcggcuccgggagugugggc

SEQ ID NO: 938058 - RNA, 22 nt, Human
uucuucaaaauccagcaugauu

SEQ ID NO: 938059 - RNA, 22 nt, Human
uggcucugugucucccagcagc

SEQ ID NO: 938060 - RNA, 22 nt, Human
uaauuauuugaagacauuagag

SEQ ID NO: 938061 - RNA, 22 nt, Human
agcugcugagagucugccgggc

SEQ ID NO: 938062 - RNA, 22 nt, Human
cagccucuaagcacagccucuc

SEQ ID NO: 938063 - RNA, 22 nt, Human
uucuccagaccuugugacuaug

SEQ ID NO: 938064 - RNA, 22 nt, Human
cgagcaugaugacggcuguggc

SEQ ID NO: 938065 - RNA, 22 nt, Human
uccugggcccaggcugccaggg

SEQ ID NO: 938066 - RNA, 19 nt, Human
ugaguucugugguucucaa

SEQ ID NO: 938067 - RNA, 22 nt, Human
cuucucaaaguugugaaucagg

SEQ ID NO: 938068 - RNA, 22 nt, Human
uuccauaaucaccuuauucuuu

SEQ ID NO: 938069 - RNA, 22 nt, Human
gcugccucccccauggcuggaa

SEQ ID NO: 938070 - RNA, 22 nt, Human
ccaaaguccauaguuuacauaa

SEQ ID NO: 938071 - RNA, 22 nt, Human
cagaggaguucaguacacagcc

SEQ ID NO: 938072 - RNA, 22 nt, Human
aggcaggcccucuggaaaggua

SEQ ID NO: 938073 - RNA, 22 nt, Human
cacagcuuccauuagaaugaga

SEQ ID NO: 938074 - RNA, 21 nt, Human
ugccagcauuaaacagucauu

SEQ ID NO: 938075 - RNA, 22 nt, Human
ugcuuuauuuauaaaauagcaa

SEQ ID NO: 938076 - RNA, 22 nt, Human
gcucccugcagcugagaguucc

SEQ ID NO: 938077 - RNA, 22 nt, Human
auuguaauuuuagagaaagugg

SEQ ID NO: 938078 - RNA, 22 nt, Human
aagccaggggcugcuuaggaga

SEQ ID NO: 938079 - RNA, 22 nt, Human
uggggacaggagacuuacagcu

SEQ ID NO: 938080 - RNA, 21 nt, Human
auuuggauauugcuggcaaau

SEQ ID NO: 938081 - RNA, 22 nt, Human
gcagguggcagaggugggaucu

SEQ ID NO: 938082 - RNA, 22 nt, Human
acacacaacucauuguguaaua

SEQ ID NO: 938083 - RNA, 22 nt, Human
uuuuauugucaaugaagacaga

SEQ ID NO: 938084 - RNA, 22 nt, Human
uccuggaguauuucuguggugu

SEQ ID NO: 938085 - RNA, 22 nt, Human
ucaugucaguuucuucuauaaa

SEQ ID NO: 938086 - RNA, 22 nt, Human
cugccaucugagccaaaagugc

SEQ ID NO: 938087 - RNA, 22 nt, Human
uggucaaaaaggccuagacaca

SEQ ID NO: 938088 - RNA, 22 nt, Human
auuuucuagauagaugaugcau

SEQ ID NO: 938089 - RNA, 22 nt, Human
uuccuucucagcccucgaggau

SEQ ID NO: 938090 - RNA, 22 nt, Human
caagaacauugugaucacuuca

SEQ ID NO: 938091 - RNA, 22 nt, Human
aggagucacucagggcuucauc

SEQ ID NO: 938092 - RNA, 22 nt, Human
auagacauuuugcauucaagca

SEQ ID NO: 938093 - RNA, 22 nt, Human
gcuguauuuaacaacuggcuca

SEQ ID NO: 938094 - RNA, 22 nt, Human
agagccaggaugucuucugggg

SEQ ID NO: 938095 - RNA, 22 nt, Human
uuuguuaauucuuauguuagag

SEQ ID NO: 938096 - RNA, 22 nt, Human
uggcaggguuggccaccuuacc

SEQ ID NO: 938097 - RNA, 22 nt, Human
ugggcuguccagcaccugggcu

SEQ ID NO: 938098 - RNA, 21 nt, Human
agcuuccugcagugggagguc

SEQ ID NO: 938099 - RNA, 22 nt, Human
auaaagaggauguauuuacagc

SEQ ID NO: 938100 - RNA, 15 nt, Human
cuccaugauuuugca

SEQ ID NO: 938101 - RNA, 17 nt, Human
cccacggaggugugaaa

SEQ ID NO: 938102 - RNA, 22 nt, Human
uucuucaaagaugucuguugga

SEQ ID NO: 938103 - RNA, 23 nt, Human
gaggcacucaggaaaugugagug

SEQ ID NO: 938104 - RNA, 22 nt, Human
aguuuguaucaauuugcuuuau

SEQ ID NO: 938105 - RNA, 20 nt, Human
gcagcugaaaguaugacacc

SEQ ID NO: 938106 - RNA, 22 nt, Human
uucuucuugucugcccucacau

SEQ ID NO: 938107 - RNA, 22 nt, Human
gaugugggguugagggaccagc

SEQ ID NO: 938108 - RNA, 22 nt, Human
gccaccagggggcuccagugag

SEQ ID NO: 938109 - RNA, 19 nt, Human
ggaugagggucaggcauag

SEQ ID NO: 938110 - RNA, 22 nt, Human
uccugccuuagagcaaggaaaa

SEQ ID NO: 938111 - RNA, 21 nt, Human
ccagcagcucaaggaucucuu

SEQ ID NO: 938112 - RNA, 22 nt, Human
uuuaaauuuguguuuagagggu

SEQ ID NO: 938113 - RNA, 22 nt, Human
uuucuucugagaucagggagaa

SEQ ID NO: 938114 - RNA, 22 nt, Human
ugaaguccuagaacuccuggua

SEQ ID NO: 938115 - RNA, 22 nt, Human
aaggccagacaggaccacaucu

SEQ ID NO: 938116 - RNA, 22 nt, Human
ccagccagcugcccuuggggcc

SEQ ID NO: 938117 - RNA, 22 nt, Human
agagagccugaguggcagcuau

SEQ ID NO: 938118 - RNA, 22 nt, Human
acauguguauagccuguauaga

SEQ ID NO: 938119 - RNA, 22 nt, Human
uauuucuaagagauaucuguac

SEQ ID NO: 938120 - RNA, 22 nt, Human
ggcaaaaaccgcaauaacuucu

SEQ ID NO: 938121 - RNA, 22 nt, Human
gcugcaggagcuggagcugugg

SEQ ID NO: 938122 - RNA, 17 nt, Human
ccugggaggaguuauga

SEQ ID NO: 938123 - RNA, 22 nt, Human
ugaggcagcuuuuucugugugu

SEQ ID NO: 938124 - RNA, 22 nt, Human
cagguaaaaauaaauuugugag

SEQ ID NO: 938125 - RNA, 22 nt, Human
gagagcuguguucauucuacca

SEQ ID NO: 938126 - RNA, 21 nt, Human
ccuucucuugcuucagcuuca

SEQ ID NO: 938127 - RNA, 22 nt, Human
cuguuuauaaauagaggggagu

SEQ ID NO: 938128 - RNA, 20 nt, Human
uggagccaaggugugucugg

SEQ ID NO: 938129 - RNA, 19 nt, Human
uauucaggaugauggcaca

SEQ ID NO: 938130 - RNA, 22 nt, Human
aguaaacauaauuuaccuguag

SEQ ID NO: 938131 - RNA, 21 nt, Human
ccagagccugcugagcccccu

SEQ ID NO: 938132 - RNA, 22 nt, Human
uaaccuuucaggcauguagguu

SEQ ID NO: 938133 - RNA, 22 nt, Human
agaggggcucaagcaguggucu

SEQ ID NO: 938134 - RNA, 22 nt, Human
uaaccauauuuuccauuaaguu

SEQ ID NO: 938135 - RNA, 22 nt, Human
aagaacugugcuccaggcucca

SEQ ID NO: 938136 - RNA, 22 nt, Human
ccagggcacguugggacaguac

SEQ ID NO: 938137 - RNA, 22 nt, Human
aauguuaaaaccuucagugcuu

SEQ ID NO: 938138 - RNA, 22 nt, Human
acacaaugcauauuuuuccaga

SEQ ID NO: 938139 - RNA, 22 nt, Human
uucauuccugagcccauauuua

SEQ ID NO: 938140 - RNA, 22 nt, Human
uuccaggagacuuccagaaaua

SEQ ID NO: 938141 - RNA, 22 nt, Human
uaggcagcuuagguuagaagug

SEQ ID NO: 938142 - RNA, 22 nt, Human
ggcuggcaggcacaguaugcaa

SEQ ID NO: 938143 - RNA, 22 nt, Human
ggcuggcagaggggagucugug

SEQ ID NO: 938144 - RNA, 22 nt, Human
cugcugugugaccauggacagg

SEQ ID NO: 938145 - RNA, 22 nt, Human
ugugccaugaggcucugauaug

SEQ ID NO: 938146 - RNA, 19 nt, Human
acagagcucucugcuucug

SEQ ID NO: 938147 - RNA, 22 nt, Human
ugaguaauaaacugucuugcuc

SEQ ID NO: 938148 - RNA, 22 nt, Human
aggcaugugacccuggacucag

SEQ ID NO: 938149 - RNA, 22 nt, Human
gcucaggaucagccaccucuuu

SEQ ID NO: 938150 - RNA, 20 nt, Human
accucugcaucaauccuuug

SEQ ID NO: 938151 - RNA, 22 nt, Human
auacauguucguguacauguuc

SEQ ID NO: 938152 - RNA, 22 nt, Human
ggagaggguguggaaaguuauc

SEQ ID NO: 938153 - RNA, 22 nt, Human
uuuuagaaauacugauuuagug

SEQ ID NO: 938154 - RNA, 22 nt, Human
acuccugguuuguguccuggcu

SEQ ID NO: 938155 - RNA, 22 nt, Human
uacccagggcuuuucugaugca

SEQ ID NO: 938156 - RNA, 22 nt, Human
ccugccugcaccuucucugggg

SEQ ID NO: 938157 - RNA, 22 nt, Human
ugaaucauggauaaauagcuua

SEQ ID NO: 938158 - RNA, 22 nt, Human
uucuuaacucaaauauauaucc

SEQ ID NO: 938159 - RNA, 22 nt, Human
gccugucugcgucacgcuuauu

SEQ ID NO: 938160 - RNA, 22 nt, Human
caggugccucaggaugagacaa

SEQ ID NO: 938161 - RNA, 22 nt, Human
cugcuuugcauagcugccagag

SEQ ID NO: 938162 - RNA, 22 nt, Human
guaagggauuugaacauagguu

SEQ ID NO: 938163 - RNA, 22 nt, Human
uugggagcuuggccgagaugua

SEQ ID NO: 938164 - RNA, 22 nt, Human
cugcagggcagggccuccuggc

SEQ ID NO: 938165 - RNA, 22 nt, Human
ccagggccaagagaccucgagg

SEQ ID NO: 938166 - RNA, 22 nt, Human
aaaaaugcuuggacuuaauaaa

SEQ ID NO: 938167 - RNA, 22 nt, Human
gaggcccugaagacagcugggg

SEQ ID NO: 938168 - RNA, 22 nt, Human
gcagcucccagcuugaaagguc

SEQ ID NO: 938169 - RNA, 22 nt, Human
uggcucugggcaccguguccac

SEQ ID NO: 938170 - RNA, 22 nt, Human
aaagcuauuugugaguuauaga

SEQ ID NO: 938171 - RNA, 22 nt, Human
aaaaugugaucuacaaaugcaa

SEQ ID NO: 938172 - RNA, 18 nt, Human
caggagcaggaguugaac

SEQ ID NO: 938173 - RNA, 22 nt, Human
uugaaauggaagugaaaauucu

SEQ ID NO: 938174 - RNA, 22 nt, Human
aaugcaguuucauuuguagaau

SEQ ID NO: 938175 - RNA, 19 nt, Human
gcuguauuaaagauacaug

SEQ ID NO: 938176 - RNA, 22 nt, Human
agagaaggucacuaaggaccca

SEQ ID NO: 938177 - RNA, 22 nt, Human
aacuaacagucauuaaaagaac

SEQ ID NO: 938178 - RNA, 22 nt, Human
uggaagggagugacagucagag

SEQ ID NO: 938179 - RNA, 22 nt, Human
gcucucugccauaugaggauac

SEQ ID NO: 938180 - RNA, 22 nt, Human
aggagcugagggagcgcccuug

SEQ ID NO: 938181 - RNA, 22 nt, Human
ggggcacuuccaggcugaggcu

SEQ ID NO: 938182 - RNA, 23 nt, Human
aaguaacagggauaauagcaguu

SEQ ID NO: 938183 - RNA, 22 nt, Human
ugcugaugaguccuucuaucgc

SEQ ID NO: 938184 - RNA, 22 nt, Human
uggcagccaucugagggugggg

SEQ ID NO: 938185 - RNA, 22 nt, Human
uucucugaguacguuucagugu

SEQ ID NO: 938186 - RNA, 22 nt, Human
ccuccagggcagacggggagca

SEQ ID NO: 938187 - RNA, 22 nt, Human
uggccugauuuugcuaagagaa

SEQ ID NO: 938188 - RNA, 22 nt, Human
cauuaagucuguuaacuggaga

SEQ ID NO: 938189 - RNA, 22 nt, Human
aaggcacucagccuugggacag

SEQ ID NO: 938190 - RNA, 22 nt, Human
augcccugaggaaugucacgcu

SEQ ID NO: 938191 - RNA, 22 nt, Human
ucacugcaaccucugccuuccg

SEQ ID NO: 938192 - RNA, 22 nt, Human
ccugcugugaccggggagcagg

SEQ ID NO: 938193 - RNA, 22 nt, Human
aaaucucaggccucuauuuacu

SEQ ID NO: 938194 - RNA, 19 nt, Human
gcuggggccugaccagaca

SEQ ID NO: 938195 - RNA, 22 nt, Human
cgggcuggcugcagcugcugga

SEQ ID NO: 938196 - RNA, 22 nt, Human
aauauaguucugguauuguuaa

SEQ ID NO: 938197 - RNA, 22 nt, Human
agagcagauggccagggggccu

SEQ ID NO: 938198 - RNA, 17 nt, Human
ugagcaguagaagaugc

SEQ ID NO: 938199 - RNA, 22 nt, Human
cauggcagggcugugggcaggu

SEQ ID NO: 938200 - RNA, 22 nt, Human
gccucugcucggacuuugccuc

SEQ ID NO: 938201 - RNA, 22 nt, Human
caaauucucaagguuuauccca

SEQ ID NO: 938202 - RNA, 22 nt, Human
uuguguccugauuugacacaau

SEQ ID NO: 938203 - RNA, 22 nt, Human
ucugaggcauaaccuguucugc

SEQ ID NO: 938204 - RNA, 22 nt, Human
aaaguuacuaucacaaugaaau

SEQ ID NO: 938205 - RNA, 22 nt, Human
acugggccuugccauggcagcc

SEQ ID NO: 938206 - RNA, 20 nt, Human
ucauugcacauaauggaagc

SEQ ID NO: 938207 - RNA, 19 nt, Human
gcagccaggugcucuaccu

SEQ ID NO: 938208 - RNA, 22 nt, Human
ccagccagucccgcaugaccgc

SEQ ID NO: 938209 - RNA, 22 nt, Human
cugcaggaauucaaagugagcu

SEQ ID NO: 938210 - RNA, 22 nt, Human
uguuuauuuucaggauggauug

SEQ ID NO: 938211 - RNA, 22 nt, Human
augaggcaguacacacaaagcc

SEQ ID NO: 938212 - RNA, 22 nt, Human
uguucaaaugaucuucuuaaau

SEQ ID NO: 938213 - RNA, 22 nt, Human
ccagagccucgcccggagccuc

SEQ ID NO: 938214 - RNA, 22 nt, Human
uaacccaauaauugguggccuu

SEQ ID NO: 938215 - RNA, 22 nt, Human
cagguaagagacggauuggccc

SEQ ID NO: 938216 - RNA, 22 nt, Human
cugcugugaguuuggaggucua

SEQ ID NO: 938217 - RNA, 22 nt, Human
caggaugagaggcccagggaag

SEQ ID NO: 938218 - RNA, 22 nt, Human
gccugggugucgaucacuagug

SEQ ID NO: 938219 - RNA, 22 nt, Human
cugcgcagcaaucagagaggag

SEQ ID NO: 938220 - RNA, 22 nt, Human
cagacagggaccucgcuccaga

SEQ ID NO: 938221 - RNA, 22 nt, Human
cugggagguggagguugcauug

SEQ ID NO: 938222 - RNA, 22 nt, Human
gucucagauaacauguauucua

SEQ ID NO: 938223 - RNA, 22 nt, Human
caguguuccaggcggcagugaa

SEQ ID NO: 938224 - RNA, 22 nt, Human
uaugaagaaguucugugaaaug

SEQ ID NO: 938225 - RNA, 22 nt, Human
uuuuagauugggaaauguaaag

SEQ ID NO: 938226 - RNA, 22 nt, Human
gccuggagaaaggaagguggga

SEQ ID NO: 938227 - RNA, 22 nt, Human
gucuggggaagucagggcauca

SEQ ID NO: 938228 - RNA, 22 nt, Human
ucccagcagcauagcucagaau

SEQ ID NO: 938229 - RNA, 19 nt, Human
caggagagcaugcacuuug

SEQ ID NO: 938230 - RNA, 22 nt, Human
uucuacagacuauaacugugau

SEQ ID NO: 938231 - RNA, 22 nt, Human
aggcugaggcagguggaucacu

SEQ ID NO: 938232 - RNA, 22 nt, Human
cagcugucuaaguugagcagga

SEQ ID NO: 938233 - RNA, 22 nt, Human
ugaggcagggaguuuaauuguc

SEQ ID NO: 938234 - RNA, 22 nt, Human
ccugggccugaaaacauuucuc

SEQ ID NO: 938235 - RNA, 22 nt, Human
acuuaguauuuuucagcuuuga

SEQ ID NO: 938236 - RNA, 22 nt, Human
uggcucugaccagguagaggag

SEQ ID NO: 938237 - RNA, 22 nt, Human
gcccaggaguucaaggcugcag

SEQ ID NO: 938238 - RNA, 22 nt, Human
ucauuuguugaacuuuagugcg

SEQ ID NO: 938239 - RNA, 22 nt, Human
cugcugccggcgagccucccuu

SEQ ID NO: 938240 - RNA, 19 nt, Human
ugucccagacuccgugucu

SEQ ID NO: 938241 - RNA, 22 nt, Human
aggcagcaugggcccagagucc

SEQ ID NO: 938242 - RNA, 22 nt, Human
uggaguucauccaugacagcuu

SEQ ID NO: 938243 - RNA, 22 nt, Human
gaacagcugcuagagaucugug

SEQ ID NO: 938244 - RNA, 22 nt, Human
uggccugcuuucauuugaugcu

SEQ ID NO: 938245 - RNA, 22 nt, Human
agccuccaguagcugaagagac

SEQ ID NO: 938246 - RNA, 22 nt, Human
cauugacaguucuuuaaguugc

SEQ ID NO: 938247 - RNA, 19 nt, Human
cagagcagugguuccugaa

SEQ ID NO: 938248 - RNA, 22 nt, Human
cugggcagugguggcaucuuug

SEQ ID NO: 938249 - RNA, 22 nt, Human
uggcagaggaggcucagauuga

SEQ ID NO: 938250 - RNA, 22 nt, Human
ugcugccaggucuugcugucca

SEQ ID NO: 938251 - RNA, 22 nt, Human
cagcccagcacuaaguagauuu

SEQ ID NO: 938252 - RNA, 22 nt, Human
gggcacugaaugccaagcuagg

SEQ ID NO: 938253 - RNA, 20 nt, Human
uccugagccuccaccauguc

SEQ ID NO: 938254 - RNA, 22 nt, Human
agcugcccugggucuugcugcu

SEQ ID NO: 938255 - RNA, 22 nt, Human
caggggacaguaugguggauga

SEQ ID NO: 938256 - RNA, 22 nt, Human
uacauacacaaauauacuguuu

SEQ ID NO: 938257 - RNA, 22 nt, Human
cacagggccacuuucccaguaa

SEQ ID NO: 938258 - RNA, 22 nt, Human
cagaggcucaccagccuuucac

SEQ ID NO: 938259 - RNA, 22 nt, Human
aguaacucauguaaaccucaca

SEQ ID NO: 938260 - RNA, 22 nt, Human
auuaaagugaaguucucagaug

SEQ ID NO: 938261 - RNA, 22 nt, Human
gcauuauuaauagcugcaugag

SEQ ID NO: 938262 - RNA, 22 nt, Human
ucauucagguugggcaaguguc

SEQ ID NO: 938263 - RNA, 22 nt, Human
ucuguuuugcauaauguucuuu

SEQ ID NO: 938264 - RNA, 22 nt, Human
auguaguauuuggaaauguaaa

SEQ ID NO: 938265 - RNA, 22 nt, Human
ucacucugggccagcgcaggua

SEQ ID NO: 938266 - RNA, 22 nt, Human
agccagggagguggagguugca

SEQ ID NO: 938267 - RNA, 22 nt, Human
uggcagaguucgcuccuauuca

SEQ ID NO: 938268 - RNA, 22 nt, Human
aaaauaucagcaaagggugaca

SEQ ID NO: 938269 - RNA, 21 nt, Human
ucaggcaggcgcagagggaag

SEQ ID NO: 938270 - RNA, 19 nt, Human
ggucacagggguuacaagg

SEQ ID NO: 938271 - RNA, 22 nt, Human
caagaaaugggauuugacugcc

SEQ ID NO: 938272 - RNA, 22 nt, Human
aggaggccgggauucuggagau

SEQ ID NO: 938273 - RNA, 22 nt, Human
gcaaagguagccaaggagcuca

SEQ ID NO: 938274 - RNA, 22 nt, Human
gagggagagugauggaccauug

SEQ ID NO: 938275 - RNA, 22 nt, Human
cacacagaugguaagggaggga

SEQ ID NO: 938276 - RNA, 22 nt, Human
uagagcuggaauuugcagcaag

SEQ ID NO: 938277 - RNA, 22 nt, Human
aguaauaauuuauauuagggag

SEQ ID NO: 938278 - RNA, 22 nt, Human
aauaguaaaagauacagcuaau

SEQ ID NO: 938279 - RNA, 22 nt, Human
cuccuggaggauagugacuggg

SEQ ID NO: 938280 - RNA, 22 nt, Human
uccuggccugucuggaguagcu

SEQ ID NO: 938281 - RNA, 22 nt, Human
uagaagcaguaauagaaauagg

SEQ ID NO: 938282 - RNA, 22 nt, Human
uccucuggauauaagccucacc

SEQ ID NO: 938283 - RNA, 20 nt, Human
gcccaggaucucugaggcau

SEQ ID NO: 938284 - RNA, 22 nt, Human
auguagcaucuauccugauaaa

SEQ ID NO: 938285 - RNA, 22 nt, Human
ccuugggauuucucaugccaau

SEQ ID NO: 938286 - RNA, 22 nt, Human
ugaaggaaugaguauacuguuu

SEQ ID NO: 938287 - RNA, 22 nt, Human
uccugggcaaaaguaucuguga

SEQ ID NO: 938288 - RNA, 22 nt, Human
gagcccuggcagucugggaugg

SEQ ID NO: 938289 - RNA, 22 nt, Human
uaugaaacauucauacaaauaa

SEQ ID NO: 938290 - RNA, 22 nt, Human
augaaacacacacgcgcauacu

SEQ ID NO: 938291 - RNA, 22 nt, Human
agcugcagucaagcugggccac

SEQ ID NO: 938292 - RNA, 22 nt, Human
cugggagcaagucaggaaaggu

SEQ ID NO: 938293 - RNA, 22 nt, Human
cugagcugggcucucuugaggg

SEQ ID NO: 938294 - RNA, 22 nt, Human
cagggcugagaauuuagagaca

SEQ ID NO: 938295 - RNA, 22 nt, Human
uuccaugaaauguguuaugcuu

SEQ ID NO: 938296 - RNA, 22 nt, Human
guccucaguaagagggccucug

SEQ ID NO: 938297 - RNA, 22 nt, Human
uggcgcaacucauucauggugu

SEQ ID NO: 938298 - RNA, 22 nt, Human
ucuccuuugaaaguuaggacug

SEQ ID NO: 938299 - RNA, 22 nt, Human
cuguguuggcuuuucucuugua

SEQ ID NO: 938300 - RNA, 22 nt, Human
ucccuggaacagagagacaacg

SEQ ID NO: 938301 - RNA, 22 nt, Human
cuucaggauuuaggaagaugaa

SEQ ID NO: 938302 - RNA, 22 nt, Human
agagugauucuaguuagggaau

SEQ ID NO: 938303 - RNA, 22 nt, Human
ccagccugguucagaauuggcu

SEQ ID NO: 938304 - RNA, 22 nt, Human
cauggcauugcauaacggggcu

SEQ ID NO: 938305 - RNA, 19 nt, Human
gaggagcuaucggagacag

SEQ ID NO: 938306 - RNA, 22 nt, Human
guauuuucaagagcaguaguau

SEQ ID NO: 938307 - RNA, 22 nt, Human
ucaacacucuuuggcacaguua

SEQ ID NO: 938308 - RNA, 22 nt, Human
cugggccacaagccugugugau

SEQ ID NO: 938309 - RNA, 22 nt, Human
ucuucacaccgggcagcaggaa

SEQ ID NO: 938310 - RNA, 22 nt, Human
agggucugcauuccaacuuggg

SEQ ID NO: 938311 - RNA, 22 nt, Human
ggcagggaagcuggcaucacgg

SEQ ID NO: 938312 - RNA, 22 nt, Human
gugugcccuggcuccagcacca

SEQ ID NO: 938313 - RNA, 22 nt, Human
gaagcuucguggcucuucaaau

SEQ ID NO: 938314 - RNA, 23 nt, Human
cugaggccugcugcguucagguu

SEQ ID NO: 938315 - RNA, 22 nt, Human
uugucugugaaauggaaauagu

SEQ ID NO: 938316 - RNA, 22 nt, Human
uguuuguucccucucuuuccug

SEQ ID NO: 938317 - RNA, 22 nt, Human
aggcaggugggucacuugaguc

SEQ ID NO: 938318 - RNA, 22 nt, Human
aaugcugcucucauaauuauag

SEQ ID NO: 938319 - RNA, 22 nt, Human
ugccugcuaggcccugcugggu

SEQ ID NO: 938320 - RNA, 22 nt, Human
agugugucugaucacuugugag

SEQ ID NO: 938321 - RNA, 22 nt, Human
cagccuuuuccauguauuguug

SEQ ID NO: 938322 - RNA, 20 nt, Human
uggcccuguuuucuccaggc

SEQ ID NO: 938323 - RNA, 22 nt, Human
gagagcacaugaacauggagga

SEQ ID NO: 938324 - RNA, 21 nt, Human
ggcagccugacccccagagag

SEQ ID NO: 938325 - RNA, 22 nt, Human
agucaguggcuccgagccuggu

SEQ ID NO: 938326 - RNA, 20 nt, Human
uugcaaauaucuauugauug

SEQ ID NO: 938327 - RNA, 22 nt, Human
auucuucagaauaucuggcacu

SEQ ID NO: 938328 - RNA, 22 nt, Human
gaaagaggaaggagauguauua

SEQ ID NO: 938329 - RNA, 22 nt, Human
ugcugcucuguaaagugaugag

SEQ ID NO: 938330 - RNA, 22 nt, Human
cuggggcugcagcgaucuucau

SEQ ID NO: 938331 - RNA, 22 nt, Human
gcugcucuugaggggcucacug

SEQ ID NO: 938332 - RNA, 22 nt, Human
gugggagcuucaucaagcaguu

SEQ ID NO: 938333 - RNA, 22 nt, Human
uagggagcucuggcagaaggaa

SEQ ID NO: 938334 - RNA, 22 nt, Human
uugcaggauuuuagagaugaca

SEQ ID NO: 938335 - RNA, 22 nt, Human
ugguaaagaaggcuagaucuga

SEQ ID NO: 938336 - RNA, 22 nt, Human
uggcucagagccuugagagcug

SEQ ID NO: 938337 - RNA, 22 nt, Human
gggagagagagcucauguugaa

SEQ ID NO: 938338 - RNA, 22 nt, Human
aagcagugcgcucaucuaaggg

SEQ ID NO: 938339 - RNA, 22 nt, Human
uccaggagcucauccacgucaa

SEQ ID NO: 938340 - RNA, 22 nt, Human
aagagagagcauucuucuguua

SEQ ID NO: 938341 - RNA, 22 nt, Human
ucucuggguuuuuguccuguac

SEQ ID NO: 938342 - RNA, 22 nt, Human
uauguagaagcugcucaaagaa

SEQ ID NO: 938343 - RNA, 22 nt, Human
gcagcccagagcgcaggacccc

SEQ ID NO: 938344 - RNA, 22 nt, Human
aucuggcuuucuuaaugacuua

SEQ ID NO: 938345 - RNA, 22 nt, Human
ggcagggguccugguguugacu

SEQ ID NO: 938346 - RNA, 22 nt, Human
auaauaaaccaggaugggucug

SEQ ID NO: 938347 - RNA, 22 nt, Human
ggccagaggccacagcuguguc

SEQ ID NO: 938348 - RNA, 22 nt, Human
cuguccuugcuggccagguaug

SEQ ID NO: 938349 - RNA, 22 nt, Human
aucaggauguuuggcugucaua

SEQ ID NO: 938350 - RNA, 22 nt, Human
cuugaaagucacaugcagcccu

SEQ ID NO: 938351 - RNA, 22 nt, Human
cugggggcaauggucagagugu

SEQ ID NO: 938352 - RNA, 22 nt, Human
aaaugcacagguuuuaaauccu

SEQ ID NO: 938353 - RNA, 22 nt, Human
cagaguacugggagaacagaag

SEQ ID NO: 938354 - RNA, 22 nt, Human
cugggagccuggcaguugcuga

SEQ ID NO: 938355 - RNA, 21 nt, Human
uuucuuaggcucuaaaaugac

SEQ ID NO: 938356 - RNA, 22 nt, Human
ucuccugugcacccucccugug

SEQ ID NO: 938357 - RNA, 22 nt, Human
ccacaucucgguccccucuuug

SEQ ID NO: 938358 - RNA, 22 nt, Human
gugcugugucuaucaggaauaa

SEQ ID NO: 938359 - RNA, 22 nt, Human
uuuguaaaagcccaagcuguag

SEQ ID NO: 938360 - RNA, 22 nt, Human
gcucccacgcaauucuuuucag

SEQ ID NO: 938361 - RNA, 19 nt, Human
gugcuuuuuaagagcucag

SEQ ID NO: 938362 - RNA, 22 nt, Human
gcacagggaggcuggccuggcc

SEQ ID NO: 938363 - RNA, 22 nt, Human
gaggaggccaguggaaggaagc

SEQ ID NO: 938364 - RNA, 23 nt, Human
agaaaagcuuggacacauggccu

SEQ ID NO: 938365 - RNA, 22 nt, Human
uagggaugagccaguggguagu

SEQ ID NO: 938366 - RNA, 22 nt, Human
uucaacacaggaacaugauaua

SEQ ID NO: 938367 - RNA, 17 nt, Human
gagacagcaggagcccc

SEQ ID NO: 938368 - RNA, 18 nt, Human
aguaaagcuuauuacaug

SEQ ID NO: 938369 - RNA, 22 nt, Human
ccucuccaguuuuaacgugacc

SEQ ID NO: 938370 - RNA, 18 nt, Human
uaaaugcauguuaauaac

SEQ ID NO: 938371 - RNA, 22 nt, Human
ggcugugggccagcuagacccu

SEQ ID NO: 938372 - RNA, 22 nt, Human
uucaggauucugugucugacaa

SEQ ID NO: 938373 - RNA, 22 nt, Human
uugcaaauauguucuccuauuc

SEQ ID NO: 938374 - RNA, 22 nt, Human
gcugccuguccugaggaguccg

SEQ ID NO: 938375 - RNA, 22 nt, Human
auggccuccgacccaugacgug

SEQ ID NO: 938376 - RNA, 21 nt, Human
agagagggagaugaaacaucc

SEQ ID NO: 938377 - RNA, 21 nt, Human
agcagaggcagaauguaugca

SEQ ID NO: 938378 - RNA, 22 nt, Human
ccaguuuuuccagugcuuucug

SEQ ID NO: 938379 - RNA, 22 nt, Human
cagggccuucguaaguguccgg

SEQ ID NO: 938380 - RNA, 22 nt, Human
caggccuggcccccggcacacc

SEQ ID NO: 938381 - RNA, 19 nt, Human
ugcauaaauuauauacuuu

SEQ ID NO: 938382 - RNA, 22 nt, Human
aagacccacaaggcugaauguu

SEQ ID NO: 938383 - RNA, 22 nt, Human
ggccagaggugguacauagcuu

SEQ ID NO: 938384 - RNA, 22 nt, Human
aaugauuuccccuacacagaag

SEQ ID NO: 938385 - RNA, 22 nt, Human
aaaaguaauugcaauuuuguag

SEQ ID NO: 938386 - RNA, 22 nt, Human
cuagaaauacaggcacgugcca

SEQ ID NO: 938387 - RNA, 22 nt, Human
ugucaugccauuuaaaauguuu

SEQ ID NO: 938388 - RNA, 22 nt, Human
uauuccuauggccacugcuacu

SEQ ID NO: 938389 - RNA, 22 nt, Human
cuggcccagagagcagagcuua

SEQ ID NO: 938390 - RNA, 22 nt, Human
ucuucuccagugcuucugcaca

SEQ ID NO: 938391 - RNA, 22 nt, Human
ccagcccuugcugaaggguggc

SEQ ID NO: 938392 - RNA, 22 nt, Human
uaacagaaauuuuaguuagggg

SEQ ID NO: 938393 - RNA, 22 nt, Human
uugcaggggaaggagcagagcu

SEQ ID NO: 938394 - RNA, 22 nt, Human
aucauuuaaaacaagucucuau

SEQ ID NO: 938395 - RNA, 17 nt, Human
cccagcuggcagugccg

SEQ ID NO: 938396 - RNA, 22 nt, Human
uuugacaucuaagaauucuuac

SEQ ID NO: 938397 - RNA, 22 nt, Human
ucagaacaauugggaaccauua

SEQ ID NO: 938398 - RNA, 22 nt, Human
uucuuauagaagcaaccauugu

SEQ ID NO: 938399 - RNA, 22 nt, Human
gucauuccuuauguugauucag

SEQ ID NO: 938400 - RNA, 22 nt, Human
uagggcagcugcaucaggcacu

SEQ ID NO: 938401 - RNA, 22 nt, Human
uggcagaggagaauuaagauua

SEQ ID NO: 938402 - RNA, 21 nt, Human
aggugccaaggagaagcaggc

SEQ ID NO: 938403 - RNA, 22 nt, Human
uuugaaaucuaaucaaggaaca

SEQ ID NO: 938404 - RNA, 22 nt, Human
ccuggcuuccuggagcucacaa

SEQ ID NO: 938405 - RNA, 22 nt, Human
cuuaugcugagaaugaaagaau

SEQ ID NO: 938406 - RNA, 19 nt, Human
cgcaggagccgaggugacc

SEQ ID NO: 938407 - RNA, 22 nt, Human
ggcugcugguagggguaggaag

SEQ ID NO: 938408 - RNA, 22 nt, Human
uuuuaauacugcuauuguagga

SEQ ID NO: 938409 - RNA, 22 nt, Human
gugucaugcacacucaguguug

SEQ ID NO: 938410 - RNA, 22 nt, Human
gagccagcgccuugccucuggg

SEQ ID NO: 938411 - RNA, 22 nt, Human
ccagagccugcugagccccauu

SEQ ID NO: 938412 - RNA, 22 nt, Human
cagggcucaucugugugaccag

SEQ ID NO: 938413 - RNA, 22 nt, Human
agucucugggcaugguugugac

SEQ ID NO: 938414 - RNA, 22 nt, Human
cuucagaagaaaagcagugugu

SEQ ID NO: 938415 - RNA, 22 nt, Human
aggcacuguacuagguacaggg

SEQ ID NO: 938416 - RNA, 22 nt, Human
cauuucauaguugucacaauaa

SEQ ID NO: 938417 - RNA, 22 nt, Human
gccagcuggagacuggcagggg

SEQ ID NO: 938418 - RNA, 22 nt, Human
caguggguccuaaguacaguuc

SEQ ID NO: 938419 - RNA, 22 nt, Human
uaaguucaagucuuggauauaa

SEQ ID NO: 938420 - RNA, 22 nt, Human
uuuggaauuggcauucuauucu

SEQ ID NO: 938421 - RNA, 22 nt, Human
cagaccagaaggaagccgacaa

SEQ ID NO: 938422 - RNA, 22 nt, Human
agaggcaguauacaauccgagc

SEQ ID NO: 938423 - RNA, 22 nt, Human
aguggggagguccaggccaccc

SEQ ID NO: 938424 - RNA, 22 nt, Human
uugguuuagagagugugguuac

SEQ ID NO: 938425 - RNA, 22 nt, Human
uggaggggcaauggagcgcgga

SEQ ID NO: 938426 - RNA, 18 nt, Human
ccuggagcuccacagcaa

SEQ ID NO: 938427 - RNA, 22 nt, Human
acagaauuaaugaaaauuacaa

SEQ ID NO: 938428 - RNA, 22 nt, Human
uggcagaggaaaaagucacugg

SEQ ID NO: 938429 - RNA, 22 nt, Human
uggcacauagcagguacucagu

SEQ ID NO: 938430 - RNA, 22 nt, Human
ugaaaaggguagaucccuaagu

SEQ ID NO: 938431 - RNA, 22 nt, Human
aggcagcaugcucugcuucuac

SEQ ID NO: 938432 - RNA, 22 nt, Human
uggcucuggggacaguaagucc

SEQ ID NO: 938433 - RNA, 22 nt, Human
augacaguucuacacuuaaucu

SEQ ID NO: 938434 - RNA, 22 nt, Human
gcaagcugaugugauagugaaa

SEQ ID NO: 938435 - RNA, 22 nt, Human
ggccuggcauggggacuaaggg

SEQ ID NO: 938436 - RNA, 22 nt, Human
uugcaguugucuuuccuaauuu

SEQ ID NO: 938437 - RNA, 22 nt, Human
uuugaauagaggccccucagaa

SEQ ID NO: 938438 - RNA, 22 nt, Human
ucaggagagaguuggguaggcu

SEQ ID NO: 938439 - RNA, 22 nt, Human
guuaucaugcuucaucaucacu

SEQ ID NO: 938440 - RNA, 22 nt, Human
acaaaauuguguuaaacuuuau

SEQ ID NO: 938441 - RNA, 22 nt, Human
cagcaggaggugaguagcaggu

SEQ ID NO: 938442 - RNA, 22 nt, Human
cagggcuguaaauuagugcuga

SEQ ID NO: 938443 - RNA, 22 nt, Human
cucaccaggaacagcugcggag

SEQ ID NO: 938444 - RNA, 22 nt, Human
agcacauucugccuugcuuugc

SEQ ID NO: 938445 - RNA, 22 nt, Human
cuggcuggcaaguagaacacaa

SEQ ID NO: 938446 - RNA, 22 nt, Human
cagcugcccugccuugcccuua

SEQ ID NO: 938447 - RNA, 22 nt, Human
ggaggccaaggaggagcuugcc

SEQ ID NO: 938448 - RNA, 22 nt, Human
uagaaagugaagguuaauuaau

SEQ ID NO: 938449 - RNA, 22 nt, Human
cuguaugguccacgugggugcc

SEQ ID NO: 938450 - RNA, 22 nt, Human
uaaauucuacaacuucaaagau

SEQ ID NO: 938451 - RNA, 22 nt, Human
gguggccugcccugaucccugg

SEQ ID NO: 938452 - RNA, 22 nt, Human
cagucccagacccagaaggugg

SEQ ID NO: 938453 - RNA, 21 nt, Human
ugcuuuaugggaaaaauguca

SEQ ID NO: 938454 - RNA, 22 nt, Human
agagcuuauaucuuggccaucc

SEQ ID NO: 938455 - RNA, 22 nt, Human
uaagaacaguguuucaucucua

SEQ ID NO: 938456 - RNA, 22 nt, Human
uugcugaaaacaguggguauug

SEQ ID NO: 938457 - RNA, 22 nt, Human
aguauguauuuuauacuuacag

SEQ ID NO: 938458 - RNA, 22 nt, Human
aagggcaggcacccacccucac

SEQ ID NO: 938459 - RNA, 22 nt, Human
aggagccccucuucaguccugg

SEQ ID NO: 938460 - RNA, 22 nt, Human
gugccugugcggacucagggaa

SEQ ID NO: 938461 - RNA, 22 nt, Human
aaagaugucauacacauuaaga

SEQ ID NO: 938462 - RNA, 22 nt, Human
ucaaucacguguuccauguucu

SEQ ID NO: 938463 - RNA, 22 nt, Human
uuucauguuuucuuaaauggca

SEQ ID NO: 938464 - RNA, 22 nt, Human
aaggagaaaugguagaugugca

SEQ ID NO: 938465 - RNA, 22 nt, Human
agcuucuuggcucagcacuugg

SEQ ID NO: 938466 - RNA, 22 nt, Human
auaauuaauuucaguaaucucc

SEQ ID NO: 938467 - RNA, 17 nt, Human
aagauuucauuagcuga

SEQ ID NO: 938468 - RNA, 20 nt, Human
gagggcaggcacccauuuca

SEQ ID NO: 938469 - RNA, 22 nt, Human
ucagggcagccuaaggcaccuc

SEQ ID NO: 938470 - RNA, 22 nt, Human
agcaggaggguuuuguagaguc

SEQ ID NO: 938471 - RNA, 22 nt, Human
ggcaaaaacagcaaugacuuuu

SEQ ID NO: 938472 - RNA, 22 nt, Human
cagagcugguguuacaagucca

SEQ ID NO: 938473 - RNA, 22 nt, Human
uggagcaggugggaugucguga

SEQ ID NO: 938474 - RNA, 22 nt, Human
agcagcuuacauguggccuauc

SEQ ID NO: 938475 - RNA, 20 nt, Human
gccugcagguuggaugggau

SEQ ID NO: 938476 - RNA, 22 nt, Human
acuguacacgugucauuuacag

SEQ ID NO: 938477 - RNA, 22 nt, Human
uucauucuuugaaucugaggua

SEQ ID NO: 938478 - RNA, 22 nt, Human
uuaaguccuugguaauuuucuu

SEQ ID NO: 938479 - RNA, 20 nt, Human
uuccagagaucugcauuuua

SEQ ID NO: 938480 - RNA, 22 nt, Human
cacagaggacuguagcggggag

SEQ ID NO: 938481 - RNA, 22 nt, Human
auugucugaauccaaagcucug

SEQ ID NO: 938482 - RNA, 22 nt, Human
gagcucuguguagccugagggu

SEQ ID NO: 938483 - RNA, 18 nt, Human
ugaacagaugaguugaag

SEQ ID NO: 938484 - RNA, 22 nt, Human
gggagcugguuccugcccucca

SEQ ID NO: 938485 - RNA, 22 nt, Human
ccagagucuuuauauuccugaa

SEQ ID NO: 938486 - RNA, 22 nt, Human
ggaggccuugaggccaggagcu

SEQ ID NO: 938487 - RNA, 22 nt, Human
gauuucaaggauguuagaggug

SEQ ID NO: 938488 - RNA, 22 nt, Human
ggugaagguggaacgcagagca

SEQ ID NO: 938489 - RNA, 22 nt, Human
ucugggaaguccucugucaugc

SEQ ID NO: 938490 - RNA, 22 nt, Human
uccagcagguuggucaggugca

SEQ ID NO: 938491 - RNA, 22 nt, Human
uacuuucuguccuucuguuaaa

SEQ ID NO: 938492 - RNA, 21 nt, Human
cuugaaagguagagucuacag

SEQ ID NO: 938493 - RNA, 22 nt, Human
acccagaggcggagguugcagu

SEQ ID NO: 938494 - RNA, 22 nt, Human
ugcagugccucggcagugcagc

SEQ ID NO: 938495 - RNA, 23 nt, Human
gcucagagguuuuucucuggaug

SEQ ID NO: 938496 - RNA, 22 nt, Human
acaggagaauuaucuggaacaa

SEQ ID NO: 938497 - RNA, 22 nt, Human
agcugggccugagcuggaagcu

SEQ ID NO: 938498 - RNA, 22 nt, Human
aaguugaaugcguacgugacau

SEQ ID NO: 938499 - RNA, 22 nt, Human
ccugaagagcacucuagaguug

SEQ ID NO: 938500 - RNA, 22 nt, Human
gugggagcauggucccagugcc

SEQ ID NO: 938501 - RNA, 22 nt, Human
agggagugguuaagaaggugca

SEQ ID NO: 938502 - RNA, 22 nt, Human
gaggagagaagcuaacggugcu

SEQ ID NO: 938503 - RNA, 22 nt, Human
uggggcuguccuuagucugaga

SEQ ID NO: 938504 - RNA, 22 nt, Human
aguggcagagugcacucaggca

SEQ ID NO: 938505 - RNA, 22 nt, Human
cacauaaguggguuccauugca

SEQ ID NO: 938506 - RNA, 22 nt, Human
ggagaccagaaggaagcuucga

SEQ ID NO: 938507 - RNA, 22 nt, Human
ugagggcugcuuccagagcuag

SEQ ID NO: 938508 - RNA, 22 nt, Human
ucuggagccuuggaugggaaag

SEQ ID NO: 938509 - RNA, 21 nt, Human
ucuccaguauccuucucugag

SEQ ID NO: 938510 - RNA, 22 nt, Human
aagggcugccagggggugccag

SEQ ID NO: 938511 - RNA, 19 nt, Human
gcagccaccgcggcggccg

SEQ ID NO: 938512 - RNA, 22 nt, Human
acuugaauuauauuucuagaga

SEQ ID NO: 938513 - RNA, 22 nt, Human
gaugcacugcaguauauacugu

SEQ ID NO: 938514 - RNA, 22 nt, Human
auccuugaaugacucugcccuc

SEQ ID NO: 938515 - RNA, 22 nt, Human
gugagcagaacagguggcuucu

SEQ ID NO: 938516 - RNA, 22 nt, Human
caggaaccuaaagagacauuac

SEQ ID NO: 938517 - RNA, 22 nt, Human
agaauaugaggaaacugugaau

SEQ ID NO: 938518 - RNA, 22 nt, Human
gaggcugcugagagcccuguuu

SEQ ID NO: 938519 - RNA, 22 nt, Human
caggcagcccugcaccaagugu

SEQ ID NO: 938520 - RNA, 16 nt, Human
ccacagggcaaggggc

SEQ ID NO: 938521 - RNA, 19 nt, Human
uguuggugcggauguggag

SEQ ID NO: 938522 - RNA, 22 nt, Human
cugggagcugucaggagcgugu

SEQ ID NO: 938523 - RNA, 21 nt, Human
acagagccgggcacaaagcug

SEQ ID NO: 938524 - RNA, 22 nt, Human
cugggcuguucugccccugggu

SEQ ID NO: 938525 - RNA, 19 nt, Human
uugaaagauuagcuuucua

SEQ ID NO: 938526 - RNA, 22 nt, Human
aaacugaauucccaagggcaug

SEQ ID NO: 938527 - RNA, 22 nt, Human
ggagccugugggaugagaugug

SEQ ID NO: 938528 - RNA, 22 nt, Human
ccauuugucaccucugcacucc

SEQ ID NO: 938529 - RNA, 22 nt, Human
auuguaucuugucauuaugcau

SEQ ID NO: 938530 - RNA, 23 nt, Human
ggccuguguuuugucugaaguac

SEQ ID NO: 938531 - RNA, 22 nt, Human
ggguuggggcccagcagucugc

SEQ ID NO: 938532 - RNA, 22 nt, Human
gccagagcugagugagguucuu

SEQ ID NO: 938533 - RNA, 22 nt, Human
ucuuaaaaguaugccaauugga

SEQ ID NO: 938534 - RNA, 22 nt, Human
aauccagguggcggagguugug

SEQ ID NO: 938535 - RNA, 22 nt, Human
cuccccagguucaggagguggg

SEQ ID NO: 938536 - RNA, 22 nt, Human
ccuggccagaggcgugccugug

SEQ ID NO: 938537 - RNA, 22 nt, Human
augcaguaaauguucuaguuug

SEQ ID NO: 938538 - RNA, 21 nt, Human
augucaaaugcuuuauuuuau

SEQ ID NO: 938539 - RNA, 23 nt, Human
aggaacugaggccuagggaggua

SEQ ID NO: 938540 - RNA, 22 nt, Human
ucucuggggauggaccugggag

SEQ ID NO: 938541 - RNA, 22 nt, Human
cgcugccaggucaccaggggua

SEQ ID NO: 938542 - RNA, 22 nt, Human
cucaggaugucggugacuauug

SEQ ID NO: 938543 - RNA, 22 nt, Human
acacagggaggaggugcugugc

SEQ ID NO: 938544 - RNA, 22 nt, Human
agagccagcauuugggcccugc

SEQ ID NO: 938545 - RNA, 22 nt, Human
cauccagggcagccauggccug

SEQ ID NO: 938546 - RNA, 22 nt, Human
gcagcagaguuugggagauggu

SEQ ID NO: 938547 - RNA, 22 nt, Human
gcagcaugagcuauacaaagua

SEQ ID NO: 938548 - RNA, 22 nt, Human
cacagaauaaauugguaucaga

SEQ ID NO: 938549 - RNA, 22 nt, Human
aagccagggucaggggccuccu

SEQ ID NO: 938550 - RNA, 22 nt, Human
accagcucagaagccagaaaga

SEQ ID NO: 938551 - RNA, 22 nt, Human
cagggcugguuugucgaagaaa

SEQ ID NO: 938552 - RNA, 22 nt, Human
cacagcugcccuacuccaugug

SEQ ID NO: 938553 - RNA, 22 nt, Human
aggccugggacgggagccguga

SEQ ID NO: 938554 - RNA, 20 nt, Human
ccagucccugagcaccaggg

SEQ ID NO: 938555 - RNA, 22 nt, Human
caaaaguaccuugugugcuuug

SEQ ID NO: 938556 - RNA, 22 nt, Human
ugggcagaguagcucagaagaa

SEQ ID NO: 938557 - RNA, 22 nt, Human
caguccagcucaucaguggcac

SEQ ID NO: 938558 - RNA, 22 nt, Human
agaugaaagauuuuuauagaga

SEQ ID NO: 938559 - RNA, 22 nt, Human
ugaggggagcuagcaugccuug

SEQ ID NO: 938560 - RNA, 22 nt, Human
ccucaggggugcccacagcugc

SEQ ID NO: 938561 - RNA, 22 nt, Human
agccccugggaguagcugcugc

SEQ ID NO: 938562 - RNA, 22 nt, Human
gcagccccaggagacgcccagg

SEQ ID NO: 938563 - RNA, 22 nt, Human
agggacagaugaaugacugagu

SEQ ID NO: 938564 - RNA, 22 nt, Human
uucuuuugggaauuacguaugc

SEQ ID NO: 938565 - RNA, 22 nt, Human
aaguuuuaacaaguacuuacua

SEQ ID NO: 938566 - RNA, 22 nt, Human
cagcaucuaaucuucaugccgg

SEQ ID NO: 938567 - RNA, 22 nt, Human
gaggcaguuccugagugacaag

SEQ ID NO: 938568 - RNA, 22 nt, Human
ccugccaggcuuugggcuucug

SEQ ID NO: 938569 - RNA, 19 nt, Human
agaggccucagcagcuggc

SEQ ID NO: 938570 - RNA, 21 nt, Human
ccugcagcaccagaaggagau

SEQ ID NO: 938571 - RNA, 21 nt, Human
aaugaaguggcuauuuugagg

SEQ ID NO: 938572 - RNA, 22 nt, Human
uauuagagaaaagauggaugug

SEQ ID NO: 938573 - RNA, 22 nt, Human
ugccuggcaagaggggcuggcu

SEQ ID NO: 938574 - RNA, 22 nt, Human
ucacucuggaguccgcuaccag

SEQ ID NO: 938575 - RNA, 22 nt, Human
gagagaggccuccauguacuga

SEQ ID NO: 938576 - RNA, 22 nt, Human
agagucugaggcagcugcagcc

SEQ ID NO: 938577 - RNA, 22 nt, Human
gcagcauacagggagaguacuc

SEQ ID NO: 938578 - RNA, 22 nt, Human
cccuguggaggaggagagcagu

SEQ ID NO: 938579 - RNA, 22 nt, Human
gcccagaaguugaggcugcagu

SEQ ID NO: 938580 - RNA, 22 nt, Human
ugguuuauuucucugaaagguu

SEQ ID NO: 938581 - RNA, 22 nt, Human
cugaggcucccucgggucugcu

SEQ ID NO: 938582 - RNA, 22 nt, Human
aaggcugccucugccagaggag

SEQ ID NO: 938583 - RNA, 22 nt, Human
gauggggaugagaagugagcag

SEQ ID NO: 938584 - RNA, 22 nt, Human
ucuguucaugaaauaucuuuuu

SEQ ID NO: 938585 - RNA, 18 nt, Human
ugcuggguaacuguaugg

SEQ ID NO: 938586 - RNA, 22 nt, Human
uuucagcugguaaaggaguagc

SEQ ID NO: 938587 - RNA, 22 nt, Human
ucagggacauuuagacacugau

SEQ ID NO: 938588 - RNA, 19 nt, Human
uuggaaggagccagagugg

SEQ ID NO: 938589 - RNA, 22 nt, Human
uauuaugagguauuuggacuuu

SEQ ID NO: 938590 - RNA, 22 nt, Human
ccuggccucagccuagggcuga

SEQ ID NO: 938591 - RNA, 22 nt, Human
acauaaaguacugagagacucu

SEQ ID NO: 938592 - RNA, 22 nt, Human
agcugccauggccugaauuuac

SEQ ID NO: 938593 - RNA, 22 nt, Human
gcucugcucccucaaaugacau

SEQ ID NO: 938594 - RNA, 22 nt, Human
agagaugucgccuugcccaggg

SEQ ID NO: 938595 - RNA, 20 nt, Human
ugcagcuucaccugugucau

SEQ ID NO: 938596 - RNA, 22 nt, Human
gccuggaggaauguagcugagg

SEQ ID NO: 938597 - RNA, 22 nt, Human
ucagagagccucaggcacugcc

SEQ ID NO: 938598 - RNA, 22 nt, Human
agcugcugugugcucaggcagg

SEQ ID NO: 938599 - RNA, 19 nt, Human
ggcagucucaagcagcaca

SEQ ID NO: 938600 - RNA, 22 nt, Human
uagugcuuggcccuaccagaua

SEQ ID NO: 938601 - RNA, 22 nt, Human
cugccucugguuuuggucccug

SEQ ID NO: 938602 - RNA, 22 nt, Human
uaagauuuuuaaaauguccuca

SEQ ID NO: 938603 - RNA, 22 nt, Human
uuuuaugauugagcuggcuaca

SEQ ID NO: 938604 - RNA, 22 nt, Human
auggggcucugcggcugcuccc

SEQ ID NO: 938605 - RNA, 22 nt, Human
uugaagcauuucuuugagcuuc

SEQ ID NO: 938606 - RNA, 22 nt, Human
aggcaucugaguuugcaagcuu

SEQ ID NO: 938607 - RNA, 22 nt, Human
guccugggcccaggggcugccu

SEQ ID NO: 938608 - RNA, 22 nt, Human
cucaggauagauuguccucuca

SEQ ID NO: 938609 - RNA, 22 nt, Human
acaaauguggacauggauaaug

SEQ ID NO: 938610 - RNA, 22 nt, Human
ucaagaaagggcuucaccagga

SEQ ID NO: 938611 - RNA, 22 nt, Human
uaaaugugcacuuuacuuuuca

SEQ ID NO: 938612 - RNA, 19 nt, Human
gggcuucugggaucaagag

SEQ ID NO: 938613 - RNA, 22 nt, Human
uccugggccuguacuccauccg

SEQ ID NO: 938614 - RNA, 22 nt, Human
gccucugcugcaagccugguug

SEQ ID NO: 938615 - RNA, 22 nt, Human
auacaucuugucagauucaugu

SEQ ID NO: 938616 - RNA, 20 nt, Human
acuugcugggcuuuguuacc

SEQ ID NO: 938617 - RNA, 22 nt, Human
agguggguccuggcucugccau

SEQ ID NO: 938618 - RNA, 22 nt, Human
uuugacaucaauacccuagaau

SEQ ID NO: 938619 - RNA, 22 nt, Human
aagugguagacaaagauaauug

SEQ ID NO: 938620 - RNA, 22 nt, Human
agcaguggcuggauggugugcu

SEQ ID NO: 938621 - RNA, 21 nt, Human
uggcagacuagaguauagaug

SEQ ID NO: 938622 - RNA, 22 nt, Human
aaauuagucauguuguauuacu

SEQ ID NO: 938623 - RNA, 22 nt, Human
gcagggugccgacuucagggau

SEQ ID NO: 938624 - RNA, 22 nt, Human
cugcauuagucaugcuuugcag

SEQ ID NO: 938625 - RNA, 21 nt, Human
uuugcauuuuacaugugggga

SEQ ID NO: 938626 - RNA, 22 nt, Human
ugccaggccucaggagucucca

SEQ ID NO: 938627 - RNA, 22 nt, Human
ggcaggcaggagcgugcuuggg

SEQ ID NO: 938628 - RNA, 21 nt, Human
aaagaacaggcagauguucuu

SEQ ID NO: 938629 - RNA, 22 nt, Human
uagaaguuaaaggaauacagaa

SEQ ID NO: 938630 - RNA, 22 nt, Human
aucacauugccagugauuaccc

SEQ ID NO: 938631 - RNA, 22 nt, Human
ucaggcagcuccaggaauggua

SEQ ID NO: 938632 - RNA, 22 nt, Human
cuuaagaaauugcauucuaauc

SEQ ID NO: 938633 - RNA, 22 nt, Human
gacugucauucuagugcccaug

SEQ ID NO: 938634 - RNA, 22 nt, Human
uucuuaagcaguuuggcauguu

SEQ ID NO: 938635 - RNA, 22 nt, Human
auggaaaggcuguggaaacuua

SEQ ID NO: 938636 - RNA, 22 nt, Human
ucccaggaucugagggcagaga

SEQ ID NO: 938637 - RNA, 22 nt, Human
uuucuagaggcuccaggggagu

SEQ ID NO: 938638 - RNA, 23 nt, Human
uccugaggguuucccagccuugg

SEQ ID NO: 938639 - RNA, 22 nt, Human
aaguuucauguggagguagacu

SEQ ID NO: 938640 - RNA, 17 nt, Human
ugaagaugcauggcagc

SEQ ID NO: 938641 - RNA, 22 nt, Human
aucaguuugauaauaaggcuug

SEQ ID NO: 938642 - RNA, 22 nt, Human
cauaacauccuugcuacuuuga

SEQ ID NO: 938643 - RNA, 22 nt, Human
aaaugauggaaaugaggcugaa

SEQ ID NO: 938644 - RNA, 21 nt, Human
cugcuuuacuucagaggaucu

SEQ ID NO: 938645 - RNA, 22 nt, Human
agccagcaggugagugcagccu

SEQ ID NO: 938646 - RNA, 22 nt, Human
ugcagaccucccauggcugccu

SEQ ID NO: 938647 - RNA, 22 nt, Human
aguauguagugcaaucagucag

SEQ ID NO: 938648 - RNA, 17 nt, Human
caagagagaugacugga

SEQ ID NO: 938649 - RNA, 22 nt, Human
cagucuuagaggugacugugga

SEQ ID NO: 938650 - RNA, 22 nt, Human
augcacuugcguguuugcaaau

SEQ ID NO: 938651 - RNA, 22 nt, Human
aaguuugagaagcuuauagaua

SEQ ID NO: 938652 - RNA, 22 nt, Human
ugagccaggcuccaugccaccu

SEQ ID NO: 938653 - RNA, 22 nt, Human
aggcucagagagcuguguccau

SEQ ID NO: 938654 - RNA, 22 nt, Human
uggcagagcccagaacugagca

SEQ ID NO: 938655 - RNA, 22 nt, Human
gcugcucuacccaugcaucugu

SEQ ID NO: 938656 - RNA, 22 nt, Human
gccagagcugagacacgagucc

SEQ ID NO: 938657 - RNA, 22 nt, Human
gucccagggaugcagacaugag

SEQ ID NO: 938658 - RNA, 22 nt, Human
gccuuggcugaugugcgaauga

SEQ ID NO: 938659 - RNA, 21 nt, Human
aggcagcucaggcccagagag

SEQ ID NO: 938660 - RNA, 22 nt, Human
uucagcagucguccaggaaaag

SEQ ID NO: 938661 - RNA, 19 nt, Human
ccuggcccugcugcgcggg

SEQ ID NO: 938662 - RNA, 22 nt, Human
gcagcaggcuuuucauaccuug

SEQ ID NO: 938663 - RNA, 22 nt, Human
agcugcucucacuggacgccug

SEQ ID NO: 938664 - RNA, 22 nt, Human
gucucagagagcuacucucuua

SEQ ID NO: 938665 - RNA, 16 nt, Human
cuuccucuucacuggc

SEQ ID NO: 938666 - RNA, 22 nt, Human
acuaagugauucuaagcaucuu

SEQ ID NO: 938667 - RNA, 22 nt, Human
acuuauuucauggaucauaaug

SEQ ID NO: 938668 - RNA, 22 nt, Human
cugcugcucgaccagucccagg

SEQ ID NO: 938669 - RNA, 22 nt, Human
cucucuucccgugaguguugca

SEQ ID NO: 938670 - RNA, 22 nt, Human
uuauuagguuuacauaaagguu

SEQ ID NO: 938671 - RNA, 22 nt, Human
ugggugcuucgucagcucugag

SEQ ID NO: 938672 - RNA, 21 nt, Human
ggucuuccaaauaaggagaaa

SEQ ID NO: 938673 - RNA, 22 nt, Human
cuugucugugucggauaaaacu

SEQ ID NO: 938674 - RNA, 22 nt, Human
ccagcuggugggucuuucucug

SEQ ID NO: 938675 - RNA, 22 nt, Human
aaacaaugaaauucauucuuca

SEQ ID NO: 938676 - RNA, 22 nt, Human
auguccuuccauuuugaucugu

SEQ ID NO: 938677 - RNA, 22 nt, Human
ucacugcucucuaagcaucgcc

SEQ ID NO: 938678 - RNA, 22 nt, Human
aguuuaauauccuucaacuuuc

SEQ ID NO: 938679 - RNA, 19 nt, Human
agaaguuagacauugcaau

SEQ ID NO: 938680 - RNA, 22 nt, Human
ucauuucuccgaccugcugucc

SEQ ID NO: 938681 - RNA, 22 nt, Human
aaaugcuguaacugauauucug

SEQ ID NO: 938682 - RNA, 22 nt, Human
accagagcuuacaugcuagaaa

SEQ ID NO: 938683 - RNA, 22 nt, Human
ccagcugcaggggagcagugga

SEQ ID NO: 938684 - RNA, 21 nt, Human
gccaggaguagauuacauuua

SEQ ID NO: 938685 - RNA, 22 nt, Human
ugcaggaaauuccaggguggcc

SEQ ID NO: 938686 - RNA, 22 nt, Human
uggagccaggagccugggaguc

SEQ ID NO: 938687 - RNA, 22 nt, Human
cagucccacuagugccaauacc

SEQ ID NO: 938688 - RNA, 22 nt, Human
aacagaauaguugauguacagu

SEQ ID NO: 938689 - RNA, 22 nt, Human
uuggaaggugagucccuggguu

SEQ ID NO: 938690 - RNA, 22 nt, Human
uuuugaaagccagguuuguaug

SEQ ID NO: 938691 - RNA, 22 nt, Human
uugaauucauuucucauugagu

SEQ ID NO: 938692 - RNA, 22 nt, Human
gggucuggacggcugcaggaag

SEQ ID NO: 938693 - RNA, 22 nt, Human
ggagaagggacagacucagcuu

SEQ ID NO: 938694 - RNA, 22 nt, Human
ggcacagggaggcccuggugug

SEQ ID NO: 938695 - RNA, 22 nt, Human
gcaggcagagaaggaacauuua

SEQ ID NO: 938696 - RNA, 19 nt, Human
uugaggggccaggggagau

SEQ ID NO: 938697 - RNA, 22 nt, Human
cacugaaggcuaggauuagaug

SEQ ID NO: 938698 - RNA, 22 nt, Human
cuggccaaugccuggggaauag

SEQ ID NO: 938699 - RNA, 22 nt, Human
cugccuuccaaccccagacucc

SEQ ID NO: 938700 - RNA, 22 nt, Human
ccugccugaaggucagccaccc

SEQ ID NO: 938701 - RNA, 22 nt, Human
cuugggagacacaagaagacau

SEQ ID NO: 938702 - RNA, 20 nt, Human
uuucuguaaggcauuaaucu

SEQ ID NO: 938703 - RNA, 22 nt, Human
ucagaaauuuucucaguaguuc

SEQ ID NO: 938704 - RNA, 22 nt, Human
gcugcagcagcugcaggguugu

SEQ ID NO: 938705 - RNA, 22 nt, Human
gugccucagcaccgccugcagc

SEQ ID NO: 938706 - RNA, 22 nt, Human
gcacagccacugagugagaacc

SEQ ID NO: 938707 - RNA, 22 nt, Human
ucuugggaucaccuccuggcuu

SEQ ID NO: 938708 - RNA, 22 nt, Human
auucuuuucccaacugcuuuaa

SEQ ID NO: 938709 - RNA, 22 nt, Human
cagagcagggugcaccuugggc

SEQ ID NO: 938710 - RNA, 22 nt, Human
ccaucuccacugucccugucaa

SEQ ID NO: 938711 - RNA, 18 nt, Human
ccauuucaugauuauuac

SEQ ID NO: 938712 - RNA, 22 nt, Human
gaggaaccaaucugugauauuc

SEQ ID NO: 938713 - RNA, 22 nt, Human
guuuucuuccugcaauuggcau

SEQ ID NO: 938714 - RNA, 20 nt, Human
uccagggcuagggagcucau

SEQ ID NO: 938715 - RNA, 22 nt, Human
cuggcugcuuguagacucgacu

SEQ ID NO: 938716 - RNA, 23 nt, Human
acugagccagggccugggucagc

SEQ ID NO: 938717 - RNA, 22 nt, Human
acaggcagggaccuuggcuaag

SEQ ID NO: 938718 - RNA, 22 nt, Human
gaugguuugguaaaaguauguu

SEQ ID NO: 938719 - RNA, 22 nt, Human
gcagugccuugcuucucugucu

SEQ ID NO: 938720 - RNA, 22 nt, Human
uucuuaagaggaacauuuuugu

SEQ ID NO: 938721 - RNA, 22 nt, Human
uacaguaaccagucuacuuaga

SEQ ID NO: 938722 - RNA, 22 nt, Human
cugucuguuucugauucaaccu

SEQ ID NO: 938723 - RNA, 22 nt, Human
uccuugaagaaugauucuugga

SEQ ID NO: 938724 - RNA, 22 nt, Human
cuggcagcaguuaugaaacaau

SEQ ID NO: 938725 - RNA, 22 nt, Human
aaauacauaaagguuguaccag

SEQ ID NO: 938726 - RNA, 22 nt, Human
uggcucuguuuuaugaguacca

SEQ ID NO: 938727 - RNA, 22 nt, Human
gugcauuugugcaugcacaugu

SEQ ID NO: 938728 - RNA, 22 nt, Human
ggcagcauuuagagcacagugu

SEQ ID NO: 938729 - RNA, 22 nt, Human
cagcuccccaugguuccugaag

SEQ ID NO: 938730 - RNA, 22 nt, Human
gaccauuuguugaaaagauuau

SEQ ID NO: 938731 - RNA, 22 nt, Human
aggggcugcuggguccgccccu

SEQ ID NO: 938732 - RNA, 22 nt, Human
uacagaaaaacuggcauugaag

SEQ ID NO: 938733 - RNA, 22 nt, Human
cuuuggaagugaccacaauccu

SEQ ID NO: 938734 - RNA, 22 nt, Human
acuccugggugcauuucugauu

SEQ ID NO: 938735 - RNA, 22 nt, Human
uuugcaaaaugucuuguguuag

SEQ ID NO: 938736 - RNA, 22 nt, Human
caagccucagaaucuucuccau

SEQ ID NO: 938737 - RNA, 22 nt, Human
ucccacugcuuugcucugcuca

SEQ ID NO: 938738 - RNA, 22 nt, Human
ugggacugcucuugcugggguc

SEQ ID NO: 938739 - RNA, 22 nt, Human
aggcugcagaacagucaggugc

SEQ ID NO: 938740 - RNA, 22 nt, Human
cauagagugauguaagguaugu

SEQ ID NO: 938741 - RNA, 22 nt, Human
augccuggacugacaugcacug

SEQ ID NO: 938742 - RNA, 18 nt, Human
gccugccuagagcuugcc

SEQ ID NO: 938743 - RNA, 21 nt, Human
auuucagagcacacaaguaaa

SEQ ID NO: 938744 - RNA, 22 nt, Human
auggcacugaccucccuuguaa

SEQ ID NO: 938745 - RNA, 22 nt, Human
acccugggucauauacagugug

SEQ ID NO: 938746 - RNA, 22 nt, Human
ccuucauugcaucuuuaagaga

SEQ ID NO: 938747 - RNA, 22 nt, Human
acagagguguguguaggacagu

SEQ ID NO: 938748 - RNA, 20 nt, Human
aggcagacaaggagucuguu

SEQ ID NO: 938749 - RNA, 22 nt, Human
ugccuguccugaggaugagggu

SEQ ID NO: 938750 - RNA, 22 nt, Human
agaggcagaaguguucaaaccc

SEQ ID NO: 938751 - RNA, 22 nt, Human
gugcucuggcuggucucccggu

SEQ ID NO: 938752 - RNA, 22 nt, Human
cuuccaaacccaggguaugggc

SEQ ID NO: 938753 - RNA, 22 nt, Human
uaugaguacaaggacucugucu

SEQ ID NO: 938754 - RNA, 22 nt, Human
uccuucuuucccccuagucauu

SEQ ID NO: 938755 - RNA, 22 nt, Human
gagcagcugagcuggaaugaga

SEQ ID NO: 938756 - RNA, 22 nt, Human
acauugaugaaaagguaucauu

SEQ ID NO: 938757 - RNA, 22 nt, Human
ggugguggagccagcugggagu

SEQ ID NO: 938758 - RNA, 22 nt, Human
gcuggagcugcagccugggccu

SEQ ID NO: 938759 - RNA, 20 nt, Human
cugggaggucuuccaaauca

SEQ ID NO: 938760 - RNA, 22 nt, Human
agggcagcuaaggugcugacug

SEQ ID NO: 938761 - RNA, 22 nt, Human
uacuuucuagcucuccccaguu

SEQ ID NO: 938762 - RNA, 22 nt, Human
ccagggcaggggcuggaguuca

SEQ ID NO: 938763 - RNA, 22 nt, Human
guugaguggguuaggaugcuga

SEQ ID NO: 938764 - RNA, 22 nt, Human
aagggcuggcccugggaagagu

SEQ ID NO: 938765 - RNA, 22 nt, Human
uuccugagggacuuuugagauu

SEQ ID NO: 938766 - RNA, 22 nt, Human
accuuuuauguaaauauauguu

SEQ ID NO: 938767 - RNA, 22 nt, Human
caguauguacucuuaucaugua

SEQ ID NO: 938768 - RNA, 22 nt, Human
uugugucuaaauaaggagaccu

SEQ ID NO: 938769 - RNA, 22 nt, Human
uccuuuccaugcuucuagaggc

SEQ ID NO: 938770 - RNA, 22 nt, Human
gcaggggaguggcaggcccgga

SEQ ID NO: 938771 - RNA, 22 nt, Human
ucucaggguuuguacaagugua

SEQ ID NO: 938772 - RNA, 18 nt, Human
caggucagccuggccuca

SEQ ID NO: 938773 - RNA, 22 nt, Human
aauguguagggugccuguuuuu

SEQ ID NO: 938774 - RNA, 19 nt, Human
ugcauccaaagccccacca

SEQ ID NO: 938775 - RNA, 22 nt, Human
ggccaaaugaaggcaaugggac

SEQ ID NO: 938776 - RNA, 21 nt, Human
ugcugccaucaugcagagaug

SEQ ID NO: 938777 - RNA, 22 nt, Human
aaggccaugcacauccuaggca

SEQ ID NO: 938778 - RNA, 22 nt, Human
cagcccugagagaaccaucuau

SEQ ID NO: 938779 - RNA, 22 nt, Human
acauuucucagguaagucauuu

SEQ ID NO: 938780 - RNA, 22 nt, Human
gacagaagaggaacuuggacag

SEQ ID NO: 938781 - RNA, 22 nt, Human
cuggaggcacccuuagagaggc

SEQ ID NO: 938782 - RNA, 22 nt, Human
agcacagguacggagaugcuac

SEQ ID NO: 938783 - RNA, 22 nt, Human
uucaaagugcauguuccucaga

SEQ ID NO: 938784 - RNA, 22 nt, Human
cugcccugucuuuuucugauga

SEQ ID NO: 938785 - RNA, 22 nt, Human
uaaauacuuuuacuccacugau

SEQ ID NO: 938786 - RNA, 22 nt, Human
gugccagcucuccccacaucug

SEQ ID NO: 938787 - RNA, 22 nt, Human
cacagaagaaucaugcuguguu

SEQ ID NO: 938788 - RNA, 22 nt, Human
aagucuuagcaacuaucgcuuu

SEQ ID NO: 938789 - RNA, 22 nt, Human
guggaggagaggcgccuugcgg

SEQ ID NO: 938790 - RNA, 22 nt, Human
ugcugaggucaccuugcugcua

SEQ ID NO: 938791 - RNA, 22 nt, Human
ugcauuauacuuuuagaaauuu

SEQ ID NO: 938792 - RNA, 22 nt, Human
uauugaggauugaggaaagcac

SEQ ID NO: 938793 - RNA, 22 nt, Human
caacccaagguuaguuggucuu

SEQ ID NO: 938794 - RNA, 21 nt, Human
uuuauuuauauaggacacaug

SEQ ID NO: 938795 - RNA, 22 nt, Human
uuauuuagucuagaugaauuuu

SEQ ID NO: 938796 - RNA, 22 nt, Human
aggccugaggaccuucuggagg

SEQ ID NO: 938797 - RNA, 22 nt, Human
ugcuggggauccguaccaaccc

SEQ ID NO: 938798 - RNA, 22 nt, Human
uggcccugacacgugguacugg

SEQ ID NO: 938799 - RNA, 22 nt, Human
cuggggcugcggacgggagccc

SEQ ID NO: 938800 - RNA, 22 nt, Human
ucaugcacaugugucaccauca

SEQ ID NO: 938801 - RNA, 22 nt, Human
uucagagaugacaccugguguu

SEQ ID NO: 938802 - RNA, 22 nt, Human
aggcuucuuagauuggcuggag

SEQ ID NO: 938803 - RNA, 22 nt, Human
caggaaccuaaugaaggcucac

SEQ ID NO: 938804 - RNA, 22 nt, Human
uuuccagagcaugucugcucag

SEQ ID NO: 938805 - RNA, 22 nt, Human
ccaggcugugguuuagauagag

SEQ ID NO: 938806 - RNA, 22 nt, Human
gagaaccucuccacaagucugg

SEQ ID NO: 938807 - RNA, 20 nt, Human
uggucuggagccagugagga

SEQ ID NO: 938808 - RNA, 19 nt, Human
auaaauaaaaagugggaga

SEQ ID NO: 938809 - RNA, 22 nt, Human
uggggcugucccgguuuggcga

SEQ ID NO: 938810 - RNA, 22 nt, Human
ucucagagggaaaggccaauuu

SEQ ID NO: 938811 - RNA, 22 nt, Human
aucaggaugacuauaaggcugc

SEQ ID NO: 938812 - RNA, 22 nt, Human
uaacccaaaggcaaugucucga

SEQ ID NO: 938813 - RNA, 22 nt, Human
aucaguuuggaacauucaggcc

SEQ ID NO: 938814 - RNA, 22 nt, Human
gcugcagcuuuaggauccagug

SEQ ID NO: 938815 - RNA, 22 nt, Human
ucaggagauguaaccuuagcug

SEQ ID NO: 938816 - RNA, 22 nt, Human
ggccugcuucucagugagcuug

SEQ ID NO: 938817 - RNA, 22 nt, Human
cugcucugcagcuuggacuccc

SEQ ID NO: 938818 - RNA, 22 nt, Human
auuauuaggugcucucugacaa

SEQ ID NO: 938819 - RNA, 22 nt, Human
acucugcuauugcagugcaaaa

SEQ ID NO: 938820 - RNA, 22 nt, Human
uugcauugcuuggucuucaaga

SEQ ID NO: 938821 - RNA, 22 nt, Human
cauuuauuggcauguaguaggu

SEQ ID NO: 938822 - RNA, 22 nt, Human
caggcacugugccucgcucccu

SEQ ID NO: 938823 - RNA, 22 nt, Human
guguuuuaagaaagaagcucag

SEQ ID NO: 938824 - RNA, 20 nt, Human
auguaaaauuauaaggcuga

SEQ ID NO: 938825 - RNA, 22 nt, Human
ugaggugaagaguggagcucag

SEQ ID NO: 938826 - RNA, 22 nt, Human
ggagcagacauaaccuuacaga

SEQ ID NO: 938827 - RNA, 22 nt, Human
ggcugccugaacuuuggggaaa

SEQ ID NO: 938828 - RNA, 22 nt, Human
ugaagcaggaucguuugcuuca

SEQ ID NO: 938829 - RNA, 22 nt, Human
aggcagcuuucuguaggggugu

SEQ ID NO: 938830 - RNA, 22 nt, Human
ugugucaugugugaggcucccu

SEQ ID NO: 938831 - RNA, 22 nt, Human
uaaaguuuggcagacaauaaca

SEQ ID NO: 938832 - RNA, 22 nt, Human
uuauuauuggugaguuaaggaa

SEQ ID NO: 938833 - RNA, 21 nt, Human
cuguggaagggaacuagaggg

SEQ ID NO: 938834 - RNA, 22 nt, Human
cuucagaauccagaaucagaau

SEQ ID NO: 938835 - RNA, 22 nt, Human
cuguggagcuuguggcaguggg

SEQ ID NO: 938836 - RNA, 22 nt, Human
ucugucacucccugaugaugaa

SEQ ID NO: 938837 - RNA, 22 nt, Human
uggcuagcccuuguggggagag

SEQ ID NO: 938838 - RNA, 22 nt, Human
uggcucaguggcagccgcagcu

SEQ ID NO: 938839 - RNA, 22 nt, Human
caguuauuaugaggucauuagg

SEQ ID NO: 938840 - RNA, 16 nt, Human
ccaccugcagcucuca

SEQ ID NO: 938841 - RNA, 22 nt, Human
agaaaugcucuuccugaccaga

SEQ ID NO: 938842 - RNA, 18 nt, Human
gagaggagccagaauuuu

SEQ ID NO: 938843 - RNA, 19 nt, Human
ucaaaacacaaaugguuga

SEQ ID NO: 938844 - RNA, 22 nt, Human
acuuugcaaugggcagaaccca

SEQ ID NO: 938845 - RNA, 17 nt, Human
gugcagggaugaaggau

SEQ ID NO: 938846 - RNA, 22 nt, Human
ugggccuguugggguugaguua

SEQ ID NO: 938847 - RNA, 22 nt, Human
ugcuggggucauggggcgcccg

SEQ ID NO: 938848 - RNA, 22 nt, Human
caggguggggaaauagcgcccu

SEQ ID NO: 938849 - RNA, 22 nt, Human
ugaggggagacagaguggacuc

SEQ ID NO: 938850 - RNA, 22 nt, Human
cccaaggcugcagugagcauga

SEQ ID NO: 938851 - RNA, 20 nt, Human
ggcucuggaaucuggugggc

SEQ ID NO: 938852 - RNA, 21 nt, Human
ucugucugguuuuagaguggc

SEQ ID NO: 938853 - RNA, 22 nt, Human
agggcuggcaucucuaaugcug

SEQ ID NO: 938854 - RNA, 22 nt, Human
accuuguuaaaaugaggauucu

SEQ ID NO: 938855 - RNA, 22 nt, Human
ccugucagcugauggcuaugua

SEQ ID NO: 938856 - RNA, 22 nt, Human
aagggaggggauguaagccugg

SEQ ID NO: 938857 - RNA, 22 nt, Human
gggaggagggugcuggcuaaac

SEQ ID NO: 938858 - RNA, 22 nt, Human
uccaagggaaugugggcaaugc

SEQ ID NO: 938859 - RNA, 22 nt, Human
aaauguguuuagaugguuuauu

SEQ ID NO: 938860 - RNA, 22 nt, Human
aauaauuuccagccaacuggaa

SEQ ID NO: 938861 - RNA, 22 nt, Human
uccucagacacccugcuggcuu

SEQ ID NO: 938862 - RNA, 22 nt, Human
gcuggcagggacagcugcgugu

SEQ ID NO: 938863 - RNA, 22 nt, Human
ugaggggagguuggggcacauc

SEQ ID NO: 938864 - RNA, 22 nt, Human
ucuggcuccacuuucuucauuu

SEQ ID NO: 938865 - RNA, 22 nt, Human
gcucagagaugucugcugccuu

SEQ ID NO: 938866 - RNA, 22 nt, Human
cugccagugaaauugugucagu

SEQ ID NO: 938867 - RNA, 22 nt, Human
uccuuuuugguccaaggugacc

SEQ ID NO: 938868 - RNA, 22 nt, Human
gaguuguucaacgugugugaaa

SEQ ID NO: 938869 - RNA, 22 nt, Human
caggagcugggucuggaagcag

SEQ ID NO: 938870 - RNA, 22 nt, Human
aggaaaaauaaggcagcagggc

SEQ ID NO: 938871 - RNA, 22 nt, Human
aucaauucuuaggaaaauagcu

SEQ ID NO: 938872 - RNA, 22 nt, Human
cugugcauugucuugucuguag

SEQ ID NO: 938873 - RNA, 22 nt, Human
acaucucaugaaugauaaauca

SEQ ID NO: 938874 - RNA, 22 nt, Human
gcacugaaaauguuggauucca

SEQ ID NO: 938875 - RNA, 21 nt, Human
guggcccugguguggcugcac

SEQ ID NO: 938876 - RNA, 23 nt, Human
auauuagggagauuagcccucua

SEQ ID NO: 938877 - RNA, 22 nt, Human
guccaugauucuguguaguaga

SEQ ID NO: 938878 - RNA, 22 nt, Human
agcuucccaagguuggaagguu

SEQ ID NO: 938879 - RNA, 22 nt, Human
cugggccagucucggccgcucu

SEQ ID NO: 938880 - RNA, 22 nt, Human
acagggccucagccagggcaga

SEQ ID NO: 938881 - RNA, 22 nt, Human
ccaggaaugaaauguagauaaa

SEQ ID NO: 938882 - RNA, 22 nt, Human
gucccuggaucugggacagcug

SEQ ID NO: 938883 - RNA, 22 nt, Human
uccugggcugcagggaagagca

SEQ ID NO: 938884 - RNA, 22 nt, Human
acucuggcccuccugcugccag

SEQ ID NO: 938885 - RNA, 22 nt, Human
uccuuuccagccucaccucagc

SEQ ID NO: 938886 - RNA, 22 nt, Human
aagcugccuagaguugaauguc

SEQ ID NO: 938887 - RNA, 22 nt, Human
uuaaaaugcagauucugauuca

SEQ ID NO: 938888 - RNA, 22 nt, Human
acagaggccaugagcugccacc

SEQ ID NO: 938889 - RNA, 22 nt, Human
agcaggguuuggggauuggcac

SEQ ID NO: 938890 - RNA, 22 nt, Human
gaaauauugggacucagagcuu

SEQ ID NO: 938891 - RNA, 20 nt, Human
agccugccagcuggcccaga

SEQ ID NO: 938892 - RNA, 22 nt, Human
cagggcccaggccacuggguug

SEQ ID NO: 938893 - RNA, 22 nt, Human
ccagagcugcauccagcagguu

SEQ ID NO: 938894 - RNA, 22 nt, Human
ugaagcaggaaacuucuuguuu

SEQ ID NO: 938895 - RNA, 22 nt, Human
gccaggagaaugcuagcagagg

SEQ ID NO: 938896 - RNA, 22 nt, Human
gccagagcagaauagaguggcc

SEQ ID NO: 938897 - RNA, 22 nt, Human
aucaguuuuguucacuacuaua

SEQ ID NO: 938898 - RNA, 22 nt, Human
ccuccuuuccuguuuuccugag

SEQ ID NO: 938899 - RNA, 22 nt, Human
cugcuuuggcucagugacauca

SEQ ID NO: 938900 - RNA, 19 nt, Human
gcucugcuacuauuaccac

SEQ ID NO: 938901 - RNA, 22 nt, Human
uggccugggccugccggugcaa

SEQ ID NO: 938902 - RNA, 22 nt, Human
uauuucugaauccaaaagguca

SEQ ID NO: 938903 - RNA, 22 nt, Human
cugugucugccugggauccauu

SEQ ID NO: 938904 - RNA, 22 nt, Human
aaugagcuagaccugcuuccuc

SEQ ID NO: 938905 - RNA, 22 nt, Human
cucugcuuggaacuggacagaa

SEQ ID NO: 938906 - RNA, 22 nt, Human
uuaaaaugaauauugauuagca

SEQ ID NO: 938907 - RNA, 22 nt, Human
aaugcugcaagaggugaaaaga

SEQ ID NO: 938908 - RNA, 22 nt, Human
aagcuaugggggaguuucaacc

SEQ ID NO: 938909 - RNA, 22 nt, Human
aaaacagacagccaguguagag

SEQ ID NO: 938910 - RNA, 22 nt, Human
acaggcucuggggcaggauggc

SEQ ID NO: 938911 - RNA, 23 nt, Human
cugucuccugggcuagguggaau

SEQ ID NO: 938912 - RNA, 22 nt, Human
cuugaaagucagcagaguggau

SEQ ID NO: 938913 - RNA, 22 nt, Human
aaauguguguauguacauauau

SEQ ID NO: 938914 - RNA, 22 nt, Human
caggaaggcccaccuguccugu

SEQ ID NO: 938915 - RNA, 21 nt, Human
acagggcaugcagcuggcugu

SEQ ID NO: 938916 - RNA, 22 nt, Human
cuuaaauuuucaucuacaagaa

SEQ ID NO: 938917 - RNA, 22 nt, Human
gcugccuucaguucugauucau

SEQ ID NO: 938918 - RNA, 22 nt, Human
aagagcuggagcugcuacagga

SEQ ID NO: 938919 - RNA, 22 nt, Human
augagcuguaagguggcuuccu

SEQ ID NO: 938920 - RNA, 22 nt, Human
cuuuuacugugaaaagaaacug

SEQ ID NO: 938921 - RNA, 22 nt, Human
aacaaaugauaccaguucucaa

SEQ ID NO: 938922 - RNA, 22 nt, Human
uggaagggggaagacagcucug

SEQ ID NO: 938923 - RNA, 22 nt, Human
ucauaaaaugcuccugauauug

SEQ ID NO: 938924 - RNA, 22 nt, Human
gagggcaggggucuugcacggu

SEQ ID NO: 938925 - RNA, 22 nt, Human
aaaucuggccccuugccuauuu

SEQ ID NO: 938926 - RNA, 22 nt, Human
ucaucuaagagucuuacauuua

SEQ ID NO: 938927 - RNA, 22 nt, Human
gaaggccacuuuguguugagaa

SEQ ID NO: 938928 - RNA, 22 nt, Human
ugcaggagcagagauggcugga

SEQ ID NO: 938929 - RNA, 22 nt, Human
ucuggcagggguucugcacuug

SEQ ID NO: 938930 - RNA, 22 nt, Human
aauacaguaauuuugaugaguu

SEQ ID NO: 938931 - RNA, 22 nt, Human
caggugggcuugggagaacacu

SEQ ID NO: 938932 - RNA, 22 nt, Human
aggcacugacaauucuggacug

SEQ ID NO: 938933 - RNA, 22 nt, Human
ggacagcauaucagcagggcag

SEQ ID NO: 938934 - RNA, 22 nt, Human
ucaaaacaacacucagguguaa

SEQ ID NO: 938935 - RNA, 22 nt, Human
ccagagccuggcaucugcauaa

SEQ ID NO: 938936 - RNA, 22 nt, Human
cugggagcuggaaugggagaag

SEQ ID NO: 938937 - RNA, 22 nt, Human
gccugagaaggauaggaagcga

SEQ ID NO: 938938 - RNA, 22 nt, Human
acagggcagguggcuacugguc

SEQ ID NO: 938939 - RNA, 22 nt, Human
cagggugccucccgcucgccgg

SEQ ID NO: 938940 - RNA, 22 nt, Human
gucccaggugggcuccaccucu

SEQ ID NO: 938941 - RNA, 22 nt, Human
ccugccagauccccugagcuga

SEQ ID NO: 938942 - RNA, 22 nt, Human
gucugagaaucuugcauaucau

SEQ ID NO: 938943 - RNA, 22 nt, Human
acccagagccagggucaggagc

SEQ ID NO: 938944 - RNA, 22 nt, Human
acagagcacugcccugugccgc

SEQ ID NO: 938945 - RNA, 22 nt, Human
cggcagcaaaggaagccagguc

SEQ ID NO: 938946 - RNA, 23 nt, Human
aaaugcagggucgcagguuacag

SEQ ID NO: 938947 - RNA, 22 nt, Human
gcaggcuccaggccggccccuu

SEQ ID NO: 938948 - RNA, 22 nt, Human
agaugagggguagaaaggacuu

SEQ ID NO: 938949 - RNA, 22 nt, Human
ucaccugggagggcugugguag

SEQ ID NO: 938950 - RNA, 22 nt, Human
cugucacacugauaucaggcuu

SEQ ID NO: 938951 - RNA, 22 nt, Human
ucacagacaauuguuuuggugu

SEQ ID NO: 938952 - RNA, 22 nt, Human
cgcagggauuucaaggggccuu

SEQ ID NO: 938953 - RNA, 22 nt, Human
acccaggaggcaagguugcagu

SEQ ID NO: 938954 - RNA, 22 nt, Human
ccugagacaugaaccaggcucc

SEQ ID NO: 938955 - RNA, 17 nt, Human
agagggaaaaugcgguu

SEQ ID NO: 938956 - RNA, 22 nt, Human
ccagaagaccccguccaccucc

SEQ ID NO: 938957 - RNA, 22 nt, Human
aaaaguaauugaugcaaucgua

SEQ ID NO: 938958 - RNA, 22 nt, Human
uauuggauagcuugugcagaau

SEQ ID NO: 938959 - RNA, 22 nt, Human
ccuggaaggcaggcauggauug

SEQ ID NO: 938960 - RNA, 22 nt, Human
cagcugccaugacauguccugc

SEQ ID NO: 938961 - RNA, 22 nt, Human
ggccagcagucacagggucaga

SEQ ID NO: 938962 - RNA, 22 nt, Human
ugcuagugcaggguuuucaguu

SEQ ID NO: 938963 - RNA, 22 nt, Human
uccuucagggggccgccugcac

SEQ ID NO: 938964 - RNA, 22 nt, Human
agagggcauuaacucugucuug

SEQ ID NO: 938965 - RNA, 22 nt, Human
ggccugcucugcagccucuaca

SEQ ID NO: 938966 - RNA, 22 nt, Human
aaggcuaugaucuuuuucauga

SEQ ID NO: 938967 - RNA, 22 nt, Human
gaggccuguagucauggaugua

SEQ ID NO: 938968 - RNA, 22 nt, Human
caggggcuuuuccucuauaagg

SEQ ID NO: 938969 - RNA, 22 nt, Human
uccaggagggguaggcaguaug

SEQ ID NO: 938970 - RNA, 22 nt, Human
gaugcugaagugaagugaucuu

SEQ ID NO: 938971 - RNA, 22 nt, Human
ggggcugggauuugaacccagg

SEQ ID NO: 938972 - RNA, 22 nt, Human
cugcagaguggagccucggcug

SEQ ID NO: 938973 - RNA, 22 nt, Human
aaggcagcucagcucauggcag

SEQ ID NO: 938974 - RNA, 22 nt, Human
cugcccaggcugaaggaacauc

SEQ ID NO: 938975 - RNA, 22 nt, Human
gcaccuuuggaaugaaaaguug

SEQ ID NO: 938976 - RNA, 22 nt, Human
augauuuccaguuguugcuaag

SEQ ID NO: 938977 - RNA, 22 nt, Human
uucuucaguuugguaaauguaa

SEQ ID NO: 938978 - RNA, 22 nt, Human
ucuguucagaagaggugaaagu

SEQ ID NO: 938979 - RNA, 22 nt, Human
cagauaaaggcuuacuaguagu

SEQ ID NO: 938980 - RNA, 22 nt, Human
gggucccaggaaggagcagugu

SEQ ID NO: 938981 - RNA, 22 nt, Human
agagcugaaaaagcugacccgg

SEQ ID NO: 938982 - RNA, 22 nt, Human
ccaaaaagcucagagauauguu

SEQ ID NO: 938983 - RNA, 22 nt, Human
ucagaagcauguggggagccug

SEQ ID NO: 938984 - RNA, 18 nt, Human
cucucuggucuggauccc

SEQ ID NO: 938985 - RNA, 22 nt, Human
ucuggcaaaggcaaccacaguu

SEQ ID NO: 938986 - RNA, 22 nt, Human
cagcuuggcuuccgcuuuacug

SEQ ID NO: 938987 - RNA, 22 nt, Human
ugcugccuuagcagccaggcaa

SEQ ID NO: 938988 - RNA, 22 nt, Human
agaaguuaccacauacuucucu

SEQ ID NO: 938989 - RNA, 22 nt, Human
cucuggcuucuaccuugcaguu

SEQ ID NO: 938990 - RNA, 22 nt, Human
gacagagaggcugagcaguaca

SEQ ID NO: 938991 - RNA, 19 nt, Human
ugggcagcucccucugucc

SEQ ID NO: 938992 - RNA, 22 nt, Human
ggaggccaaagugugggcggcu

SEQ ID NO: 938993 - RNA, 22 nt, Human
acucugcuuccacuuuugcuaa

SEQ ID NO: 938994 - RNA, 22 nt, Human
uggcacugaccccaggccugug

SEQ ID NO: 938995 - RNA, 22 nt, Human
aggccagcaagaaagagagucu

SEQ ID NO: 938996 - RNA, 22 nt, Human
ucucucuuuuuaaucauguaau

SEQ ID NO: 938997 - RNA, 22 nt, Human
ucagggauugcaaaauucaucc

SEQ ID NO: 938998 - RNA, 22 nt, Human
ucagagaacacagaggugaugu

SEQ ID NO: 938999 - RNA, 22 nt, Human
agggaagcccuggcugagaccc

SEQ ID NO: 939000 - RNA, 22 nt, Human
auugcaccuuggguuuugaaag

SEQ ID NO: 939001 - RNA, 20 nt, Human
uuggcagcaguuccaaguga

SEQ ID NO: 939002 - RNA, 19 nt, Human
cucugccucuggcuguggc

SEQ ID NO: 939003 - RNA, 22 nt, Human
ugauuuccccagucuugcugcu

SEQ ID NO: 939004 - RNA, 22 nt, Human
agaggucagaacaggaaagugu

SEQ ID NO: 939005 - RNA, 18 nt, Human
ucuauauggacauagaga

SEQ ID NO: 939006 - RNA, 17 nt, Human
gcugacccuggagaagu

SEQ ID NO: 939007 - RNA, 22 nt, Human
cuggagccgcauggagcaggga

SEQ ID NO: 939008 - RNA, 22 nt, Human
ggcugccugaggcagugagaga

SEQ ID NO: 939009 - RNA, 22 nt, Human
uuucuauuuuaaaggcauaugg

SEQ ID NO: 939010 - RNA, 23 nt, Human
uugcacauuggagcuggucuucu

SEQ ID NO: 939011 - RNA, 21 nt, Human
agcaggaggcagucacagcuc

SEQ ID NO: 939012 - RNA, 22 nt, Human
ccuggccaaucuagggcuguua

SEQ ID NO: 939013 - RNA, 23 nt, Human
cagcugaagcagccugggcugga

SEQ ID NO: 939014 - RNA, 22 nt, Human
cuccucacacccacugcaacca

SEQ ID NO: 939015 - RNA, 22 nt, Human
acucugcaauguggcaagaaca

SEQ ID NO: 939016 - RNA, 19 nt, Human
uccugggcugcgucuugcc

SEQ ID NO: 939017 - RNA, 22 nt, Human
aacuuuguguguuuaauauggc

SEQ ID NO: 939018 - RNA, 22 nt, Human
cagagcuggagaaguggauuua

SEQ ID NO: 939019 - RNA, 22 nt, Human
auacauguuguaccauauguuu

SEQ ID NO: 939020 - RNA, 22 nt, Human
uuuucagugggcaaugauguga

SEQ ID NO: 939021 - RNA, 23 nt, Human
acagggcauugcuggccucgagg

SEQ ID NO: 939022 - RNA, 22 nt, Human
uguguccuucugggagucccag

SEQ ID NO: 939023 - RNA, 22 nt, Human
ucauaaaaauagacucuaaagu

SEQ ID NO: 939024 - RNA, 22 nt, Human
ggacuggacucucaggcucaca

SEQ ID NO: 939025 - RNA, 22 nt, Human
ugcucuguugugcaugugggau

SEQ ID NO: 939026 - RNA, 17 nt, Human
cccagagaugcugccuu

SEQ ID NO: 939027 - RNA, 22 nt, Human
aggcccuggcccccagagauuc

SEQ ID NO: 939028 - RNA, 22 nt, Human
uggaaggaagccaaggaagguu

SEQ ID NO: 939029 - RNA, 20 nt, Human
ucugucucugagcuagacuu

SEQ ID NO: 939030 - RNA, 22 nt, Human
gauuucuugauaaguaguguga

SEQ ID NO: 939031 - RNA, 19 nt, Human
auaaggcagugacuuuuuu

SEQ ID NO: 939032 - RNA, 22 nt, Human
ccagucugugugccagccugcg

SEQ ID NO: 939033 - RNA, 22 nt, Human
uugcuucaguagcucuuuaaag

SEQ ID NO: 939034 - RNA, 22 nt, Human
cagcugggagcuccauuagaua

SEQ ID NO: 939035 - RNA, 22 nt, Human
uguguguauaugcauuuaucua

SEQ ID NO: 939036 - RNA, 22 nt, Human
agcuuccuguugagagagggag

SEQ ID NO: 939037 - RNA, 22 nt, Human
gacccaggguauccagagcugc

SEQ ID NO: 939038 - RNA, 22 nt, Human
ccugcccuagagaugacacaau

SEQ ID NO: 939039 - RNA, 22 nt, Human
caggcagcuagauuuauaacaa

SEQ ID NO: 939040 - RNA, 23 nt, Human
acugcuuuauucaugaggcucuc

SEQ ID NO: 939041 - RNA, 22 nt, Human
ucacaaagggagggauagcugg

SEQ ID NO: 939042 - RNA, 22 nt, Human
uagaguguuguaauugaaaagg

SEQ ID NO: 939043 - RNA, 22 nt, Human
cucagggucugguccuuagauu

SEQ ID NO: 939044 - RNA, 22 nt, Human
uacuuuuagccuauuugauucu

SEQ ID NO: 939045 - RNA, 22 nt, Human
aaaagcucuuucugcuguagau

SEQ ID NO: 939046 - RNA, 22 nt, Human
ugcuggggcucugaccacucca

SEQ ID NO: 939047 - RNA, 22 nt, Human
ugucacauugaauaugauuuau

SEQ ID NO: 939048 - RNA, 22 nt, Human
ccggggacuuaaagugaaggaa

SEQ ID NO: 939049 - RNA, 22 nt, Human
gcgcaggagccgcggagggccg

SEQ ID NO: 939050 - RNA, 22 nt, Human
ccagguggaggugugagguccu

SEQ ID NO: 939051 - RNA, 21 nt, Human
gcagccagacgggauucaguu

SEQ ID NO: 939052 - RNA, 22 nt, Human
agggugccuggaagccacucac

SEQ ID NO: 939053 - RNA, 22 nt, Human
ccugaggacacacgcugcagga

SEQ ID NO: 939054 - RNA, 22 nt, Human
aguccuucaagaaaucuggaaa

SEQ ID NO: 939055 - RNA, 22 nt, Human
aucaggaucugcaucauaagaa

SEQ ID NO: 939056 - RNA, 21 nt, Human
agggccugugcucuccagguc

SEQ ID NO: 939057 - RNA, 22 nt, Human
ggacagagcccugguggccuaa

SEQ ID NO: 939058 - RNA, 22 nt, Human
ggcagcucugugucugggaagc

SEQ ID NO: 939059 - RNA, 22 nt, Human
ugcugcucucagccaccaggaa

SEQ ID NO: 939060 - RNA, 20 nt, Human
gcugucuggauuagaagccu

SEQ ID NO: 939061 - RNA, 22 nt, Human
ccuggccagcagccccuuccuc

SEQ ID NO: 939062 - RNA, 22 nt, Human
ucacauuuucuacuacuguacg

SEQ ID NO: 939063 - RNA, 22 nt, Human
acagcuguggccacuugcaucc

SEQ ID NO: 939064 - RNA, 17 nt, Human
uucugagccacuuccuu

SEQ ID NO: 939065 - RNA, 22 nt, Human
uaaugucagcauaguuuauuuu

SEQ ID NO: 939066 - RNA, 22 nt, Human
uaaaaugaucucucauguucuu

SEQ ID NO: 939067 - RNA, 22 nt, Human
agaguguuauuugcucuguauu

SEQ ID NO: 939068 - RNA, 22 nt, Human
gcagcugccccgacugugaguc

SEQ ID NO: 939069 - RNA, 22 nt, Human
gggaguggauuauguggaccca

SEQ ID NO: 939070 - RNA, 22 nt, Human
gccagcagggcccaaaugcugg

SEQ ID NO: 939071 - RNA, 22 nt, Human
cuggagccggaccagggacggu

SEQ ID NO: 939072 - RNA, 22 nt, Human
gagagcuggguucaaguagcug

SEQ ID NO: 939073 - RNA, 22 nt, Human
ucugccuuccccauaaucugau

SEQ ID NO: 939074 - RNA, 22 nt, Human
aucuacccacugaacacaauau

SEQ ID NO: 939075 - RNA, 22 nt, Human
cacaggugcuccucggggagcu

SEQ ID NO: 939076 - RNA, 22 nt, Human
gcagagccagaauggccaggac

SEQ ID NO: 939077 - RNA, 22 nt, Human
uuagauauguuuuugcuaaugc

SEQ ID NO: 939078 - RNA, 22 nt, Human
cuuccagagauagggccucaag

SEQ ID NO: 939079 - RNA, 22 nt, Human
augaaggauggcuggcugcccu

SEQ ID NO: 939080 - RNA, 22 nt, Human
uguucuugagccuuuagaccua

SEQ ID NO: 939081 - RNA, 22 nt, Human
uggagccaugccuggccuuucc

SEQ ID NO: 939082 - RNA, 22 nt, Human
cucugguguccuuuagaauuua

SEQ ID NO: 939083 - RNA, 22 nt, Human
ucacuugccuagcccaguucag

SEQ ID NO: 939084 - RNA, 22 nt, Human
ucuccugcagucagcagucuca

SEQ ID NO: 939085 - RNA, 22 nt, Human
agggcugcugaggaagccuugc

SEQ ID NO: 939086 - RNA, 22 nt, Human
gccugcagggugaugggcugcc

SEQ ID NO: 939087 - RNA, 22 nt, Human
uuauuccaauuucuccuacaaa

SEQ ID NO: 939088 - RNA, 22 nt, Human
cuggcagcgguuugcagccugg

SEQ ID NO: 939089 - RNA, 22 nt, Human
uuuggaaaguugucacuuuaga

SEQ ID NO: 939090 - RNA, 22 nt, Human
cccaggagguuggggcuacagu

SEQ ID NO: 939091 - RNA, 19 nt, Human
aggcucugagcuccuggag

SEQ ID NO: 939092 - RNA, 18 nt, Human
cucaccauucugcccaau

SEQ ID NO: 939093 - RNA, 22 nt, Human
acaggccugagauuuugcauuu

SEQ ID NO: 939094 - RNA, 22 nt, Human
gagaugaauguaaacaaaggca

SEQ ID NO: 939095 - RNA, 22 nt, Human
acucugcuaaauguguaggcuc

SEQ ID NO: 939096 - RNA, 22 nt, Human
cagcuuccaucuccacugcccu

SEQ ID NO: 939097 - RNA, 22 nt, Human
guuauuaguaagacucgcacau

SEQ ID NO: 939098 - RNA, 22 nt, Human
uaacacugguauuucauuuagu

SEQ ID NO: 939099 - RNA, 22 nt, Human
ccaggcuggagugcaauggugc

SEQ ID NO: 939100 - RNA, 22 nt, Human
aggaccuguaccucagcaucua

SEQ ID NO: 939101 - RNA, 22 nt, Human
gagccuggagcuggaacgaagc

SEQ ID NO: 939102 - RNA, 22 nt, Human
cauuguuaauugguaucuuaca

SEQ ID NO: 939103 - RNA, 22 nt, Human
ccuguucacugcacaguuuccg

SEQ ID NO: 939104 - RNA, 22 nt, Human
aggguggcuggaggaaucagaa

SEQ ID NO: 939105 - RNA, 22 nt, Human
cugugagcuggguggccaggac

SEQ ID NO: 939106 - RNA, 23 nt, Human
uccagggauuaaugaagucaguc

SEQ ID NO: 939107 - RNA, 23 nt, Human
gggagaauaugaggaugauggug

SEQ ID NO: 939108 - RNA, 19 nt, Human
aaaaacuuaguccagaaag

SEQ ID NO: 939109 - RNA, 22 nt, Human
aauguacaauaagacaaagagg

SEQ ID NO: 939110 - RNA, 22 nt, Human
aaugucaaaggcuauacauuca

SEQ ID NO: 939111 - RNA, 21 nt, Human
ucucugggcccuccugugggg

SEQ ID NO: 939112 - RNA, 22 nt, Human
gaaaaaugagcugaugucaggg

SEQ ID NO: 939113 - RNA, 22 nt, Human
ugcaccccauuuuacauuuaca

SEQ ID NO: 939114 - RNA, 22 nt, Human
uggccaagaaugauaugugaag

SEQ ID NO: 939115 - RNA, 22 nt, Human
guaauugacucagcucuguuca

SEQ ID NO: 939116 - RNA, 22 nt, Human
gcaggagccaggccgagcuggu

SEQ ID NO: 939117 - RNA, 18 nt, Human
gcugccugcauuccucac

SEQ ID NO: 939118 - RNA, 22 nt, Human
cugcugucauagccaucccucc

SEQ ID NO: 939119 - RNA, 17 nt, Human
ugagacagggcaggccc

SEQ ID NO: 939120 - RNA, 22 nt, Human
ucaaauaccagcuuuuccagaa

SEQ ID NO: 939121 - RNA, 22 nt, Human
aggugagugugacugcaagaga

SEQ ID NO: 939122 - RNA, 18 nt, Human
acauuucuaggugaaagc

SEQ ID NO: 939123 - RNA, 22 nt, Human
cccagcucuuuuagcggcaucu

SEQ ID NO: 939124 - RNA, 22 nt, Human
acuucaugcagaagagagcugu

SEQ ID NO: 939125 - RNA, 22 nt, Human
uguggaaaauuggaacguuccu

SEQ ID NO: 939126 - RNA, 22 nt, Human
ggcagcuuccuaggagagggca

SEQ ID NO: 939127 - RNA, 22 nt, Human
cagcugccuucugcgggaaguc

SEQ ID NO: 939128 - RNA, 22 nt, Human
ccagcucuggcuucuugcuggg

SEQ ID NO: 939129 - RNA, 22 nt, Human
agcagcugcagagggcuccccc

SEQ ID NO: 939130 - RNA, 18 nt, Human
uggcagcuagguaaagaa

SEQ ID NO: 939131 - RNA, 22 nt, Human
gcagggacugugaucucacaga

SEQ ID NO: 939132 - RNA, 22 nt, Human
gcuugaaaauucauagguauuu

SEQ ID NO: 939133 - RNA, 22 nt, Human
uauuuccaccuauuauuuucug

SEQ ID NO: 939134 - RNA, 20 nt, Human
ucacaggggaccaggagcag

SEQ ID NO: 939135 - RNA, 22 nt, Human
gagcagugggaaggaacagggu

SEQ ID NO: 939136 - RNA, 21 nt, Human
ugggaugggucugggaccagc

SEQ ID NO: 939137 - RNA, 22 nt, Human
cuggggacuugcagacacaauu

SEQ ID NO: 939138 - RNA, 22 nt, Human
ccagcagcgauagggugagugc

SEQ ID NO: 939139 - RNA, 22 nt, Human
ucuuaaagcagcuuguaaaaug

SEQ ID NO: 939140 - RNA, 22 nt, Human
aagggcagagggaaucccacau

SEQ ID NO: 939141 - RNA, 22 nt, Human
ucuaggagcaugaagggaaggc

SEQ ID NO: 939142 - RNA, 21 nt, Human
gcucccugcucagcuccuggg

SEQ ID NO: 939143 - RNA, 23 nt, Human
ucaaacauauugugagacacagg

SEQ ID NO: 939144 - RNA, 22 nt, Human
aguuuauagcccagauucaugg

SEQ ID NO: 939145 - RNA, 22 nt, Human
aggccagcacgacagccgcagg

SEQ ID NO: 939146 - RNA, 22 nt, Human
gggggcuguccugugcauugua

SEQ ID NO: 939147 - RNA, 22 nt, Human
aggccagggucccacacucgca

SEQ ID NO: 939148 - RNA, 22 nt, Human
accugccucagugcagcuggau

SEQ ID NO: 939149 - RNA, 22 nt, Human
gauguagagggaagauuuuaaa

SEQ ID NO: 939150 - RNA, 22 nt, Human
ccagguggaaggucugugcucu

SEQ ID NO: 939151 - RNA, 22 nt, Human
acugucuccucaucaugccugg

SEQ ID NO: 939152 - RNA, 22 nt, Human
aagauucagccaaauuguucau

SEQ ID NO: 939153 - RNA, 22 nt, Human
ggcagcugaccuagcaccaucc

SEQ ID NO: 939154 - RNA, 22 nt, Human
acaaugcaccagcaucuucacc

SEQ ID NO: 939155 - RNA, 22 nt, Human
ugugugaaggaauauauacuca

SEQ ID NO: 939156 - RNA, 17 nt, Human
acagggcagaaacagcu

SEQ ID NO: 939157 - RNA, 18 nt, Human
gguggcucagucaugggg

SEQ ID NO: 939158 - RNA, 22 nt, Human
uguuccaauaaggaguugaaau

SEQ ID NO: 939159 - RNA, 22 nt, Human
ucagcuggcaguucagaggcug

SEQ ID NO: 939160 - RNA, 22 nt, Human
ugcugccagggcucugcccaca

SEQ ID NO: 939161 - RNA, 22 nt, Human
aauguguacaugacagauagaa

SEQ ID NO: 939162 - RNA, 17 nt, Human
uggcuucccugggccac

SEQ ID NO: 939163 - RNA, 20 nt, Human
ugucauuguuucuaggaccu

SEQ ID NO: 939164 - RNA, 22 nt, Human
cagcaauaagccagguuagaca

SEQ ID NO: 939165 - RNA, 18 nt, Human
agaggggagguaagucug

SEQ ID NO: 939166 - RNA, 22 nt, Human
cugggccuggcguuccaggcug

SEQ ID NO: 939167 - RNA, 22 nt, Human
ucugagaggcaucugcacuucu

SEQ ID NO: 939168 - RNA, 22 nt, Human
aaugcacacauuugguacugaa

SEQ ID NO: 939169 - RNA, 22 nt, Human
gccuucugugcuccuggccuuu

SEQ ID NO: 939170 - RNA, 22 nt, Human
ucucagagcaucauuuucuuag

SEQ ID NO: 939171 - RNA, 23 nt, Human
ugccucugccucccuagucugca

SEQ ID NO: 939172 - RNA, 20 nt, Human
aggcugccaggucucacauc

SEQ ID NO: 939173 - RNA, 18 nt, Human
ccugagcccugcuuacuu

SEQ ID NO: 939174 - RNA, 18 nt, Human
acagacaaaauggaaaug

SEQ ID NO: 939175 - RNA, 23 nt, Human
aaucuggcugauguuuuuucucu

SEQ ID NO: 939176 - RNA, 22 nt, Human
cagaggccccauuggcugugcg

SEQ ID NO: 939177 - RNA, 22 nt, Human
acacagggauauuucagguggu

SEQ ID NO: 939178 - RNA, 22 nt, Human
acagaccucuagauuacauuug

SEQ ID NO: 939179 - RNA, 22 nt, Human
ucagagccaaucauggugcauu

SEQ ID NO: 939180 - RNA, 22 nt, Human
gaaaugcagauucugauucugu

SEQ ID NO: 939181 - RNA, 22 nt, Human
ugucccucauugacgcugugcc

SEQ ID NO: 939182 - RNA, 22 nt, Human
uacaucuagccuuacaauuauu

SEQ ID NO: 939183 - RNA, 22 nt, Human
agugcugucaguuuuauagaua

SEQ ID NO: 939184 - RNA, 22 nt, Human
uuguauucauugcuuacccaau

SEQ ID NO: 939185 - RNA, 21 nt, Human
auguaggaguuauuggaacag

SEQ ID NO: 939186 - RNA, 22 nt, Human
agcaggaguguccccuggcugu

SEQ ID NO: 939187 - RNA, 22 nt, Human
ccuggagcgcgggucaagcugg

SEQ ID NO: 939188 - RNA, 19 nt, Human
auuugaaagcugugcuugc

SEQ ID NO: 939189 - RNA, 22 nt, Human
uucuucucagggucccacaugg

SEQ ID NO: 939190 - RNA, 20 nt, Human
ggaccagguggggcgguggc

SEQ ID NO: 939191 - RNA, 22 nt, Human
cugaagcaaaugaaacagcucu

SEQ ID NO: 939192 - RNA, 22 nt, Human
guuugcauauuugcacaggaau

SEQ ID NO: 939193 - RNA, 22 nt, Human
ucauuuguggaagugauugugg

SEQ ID NO: 939194 - RNA, 21 nt, Human
agcagaggggacauguuugau

SEQ ID NO: 939195 - RNA, 22 nt, Human
cuuggggcugucacucuggcau

SEQ ID NO: 939196 - RNA, 22 nt, Human
gcucugcuguggaauccucucc

SEQ ID NO: 939197 - RNA, 18 nt, Human
ugagagugugugcucuug

SEQ ID NO: 939198 - RNA, 22 nt, Human
cugguccuccuugccuucagau

SEQ ID NO: 939199 - RNA, 22 nt, Human
agauguguuucuaguuccugca

SEQ ID NO: 939200 - RNA, 22 nt, Human
agggaggagaauggacuccuuc

SEQ ID NO: 939201 - RNA, 22 nt, Human
uauuuuguauuuaugcaagaaa

SEQ ID NO: 939202 - RNA, 22 nt, Human
gagcugucuggggacucugggu

SEQ ID NO: 939203 - RNA, 22 nt, Human
aaaauacuguggaguguugaaa

SEQ ID NO: 939204 - RNA, 21 nt, Human
uuacuuuugcagcaaccuaau

SEQ ID NO: 939205 - RNA, 22 nt, Human
ggcugcagagcugggugggccu

SEQ ID NO: 939206 - RNA, 22 nt, Human
ugagauuuucagcaucacuuca

SEQ ID NO: 939207 - RNA, 22 nt, Human
ugcagagguguugcugagauaa

SEQ ID NO: 939208 - RNA, 17 nt, Human
ggugagaccucccacuc

SEQ ID NO: 939209 - RNA, 22 nt, Human
aaauauaguaaaugcauaguuc

SEQ ID NO: 939210 - RNA, 21 nt, Human
gccaccccuggcacaggugcu

SEQ ID NO: 939211 - RNA, 22 nt, Human
caaguaaagaaucacauuucuu

SEQ ID NO: 939212 - RNA, 22 nt, Human
uccaggagagguagaggguucc

SEQ ID NO: 939213 - RNA, 22 nt, Human
cugggaguugacgaggcuugua

SEQ ID NO: 939214 - RNA, 22 nt, Human
cuggggcuucaaugcuucggug

SEQ ID NO: 939215 - RNA, 22 nt, Human
ugaggcagugauguuuaagcac

SEQ ID NO: 939216 - RNA, 22 nt, Human
ucagggcauucaagaggccugg

SEQ ID NO: 939217 - RNA, 22 nt, Human
uuuuuccuagcgauuugucagc

SEQ ID NO: 939218 - RNA, 22 nt, Human
aggggcuggaguucgagguuac

SEQ ID NO: 939219 - RNA, 21 nt, Human
gccagccuguuuaccuguggu

SEQ ID NO: 939220 - RNA, 22 nt, Human
cagaauuuagcacaauguaugg

SEQ ID NO: 939221 - RNA, 21 nt, Human
gcaugccugcaucuuaguguu

SEQ ID NO: 939222 - RNA, 22 nt, Human
augaaggcuguguagauggaug

SEQ ID NO: 939223 - RNA, 22 nt, Human
cucucugggggccaugccaaga

SEQ ID NO: 939224 - RNA, 19 nt, Human
cagagcugcuggccucguc

SEQ ID NO: 939225 - RNA, 22 nt, Human
aaaucugggucaagguggagug

SEQ ID NO: 939226 - RNA, 22 nt, Human
ugaaaugagagcacagaauaaa

SEQ ID NO: 939227 - RNA, 22 nt, Human
agcucccagagcucgagaguaa

SEQ ID NO: 939228 - RNA, 22 nt, Human
uucuucuucauuucugacgaug

SEQ ID NO: 939229 - RNA, 22 nt, Human
ccuguuuagugaggugaggagu

SEQ ID NO: 939230 - RNA, 22 nt, Human
acucugcucaaaguccugaggc

SEQ ID NO: 939231 - RNA, 21 nt, Human
aauaaaacaguuggugucaau

SEQ ID NO: 939232 - RNA, 22 nt, Human
ucugagaguagagcugccucuu

SEQ ID NO: 939233 - RNA, 22 nt, Human
ucaguuuucucauuuaugagau

SEQ ID NO: 939234 - RNA, 22 nt, Human
cagcaguggccaucuguguggu

SEQ ID NO: 939235 - RNA, 22 nt, Human
ccugccuguacuagagacccag

SEQ ID NO: 939236 - RNA, 22 nt, Human
aggcagcagggccacuggcuga

SEQ ID NO: 939237 - RNA, 22 nt, Human
caacagaagguguacuacugaa

SEQ ID NO: 939238 - RNA, 22 nt, Human
augcaguaaaauaggagguaau

SEQ ID NO: 939239 - RNA, 22 nt, Human
ucuguggccuguguccaagugc

SEQ ID NO: 939240 - RNA, 22 nt, Human
uacuuagagcgauaauuuauac

SEQ ID NO: 939241 - RNA, 22 nt, Human
uggggcucaccuaggcuggaag

SEQ ID NO: 939242 - RNA, 22 nt, Human
uuugugaagggaacagaagugu

SEQ ID NO: 939243 - RNA, 22 nt, Human
ucugauuagagcauucuugagu

SEQ ID NO: 939244 - RNA, 22 nt, Human
cagagcagagugauuguucugg

SEQ ID NO: 939245 - RNA, 22 nt, Human
agccuggcccugcugaacucug

SEQ ID NO: 939246 - RNA, 22 nt, Human
auguggaggaaaugaguguaca

SEQ ID NO: 939247 - RNA, 22 nt, Human
agugugcuauugcaccaucaua

SEQ ID NO: 939248 - RNA, 22 nt, Human
ccucccacuucuugcugagguc

SEQ ID NO: 939249 - RNA, 18 nt, Human
gcccagaggucugggccc

SEQ ID NO: 939250 - RNA, 22 nt, Human
gcagugggaagguuggcacaug

SEQ ID NO: 939251 - RNA, 22 nt, Human
uuucauuacguguuugacuugu

SEQ ID NO: 939252 - RNA, 22 nt, Human
gugucauguagaaauugaugaa

SEQ ID NO: 939253 - RNA, 22 nt, Human
agccuggccugggcaggcacau

SEQ ID NO: 939254 - RNA, 22 nt, Human
gaggcugcggggaggagccugc

SEQ ID NO: 939255 - RNA, 22 nt, Human
gggcuugcugauuugggcagga

SEQ ID NO: 939256 - RNA, 22 nt, Human
gggacuucauagcuaggcacuu

SEQ ID NO: 939257 - RNA, 22 nt, Human
ugagcaguaggucugaauagug

SEQ ID NO: 939258 - RNA, 22 nt, Human
aauugugcuaugauuaugaaag

SEQ ID NO: 939259 - RNA, 18 nt, Human
ugggauggagaguaacug

SEQ ID NO: 939260 - RNA, 21 nt, Human
agucccaggggugagugaugu

SEQ ID NO: 939261 - RNA, 22 nt, Human
aggcaguuguugcugagcagcu

SEQ ID NO: 939262 - RNA, 22 nt, Human
aaguuuguguaguuuagcaucc

SEQ ID NO: 939263 - RNA, 22 nt, Human
aagaauucacugguagagucaa

SEQ ID NO: 939264 - RNA, 18 nt, Human
gcagcugacacuggaguu

SEQ ID NO: 939265 - RNA, 22 nt, Human
uggcacccugaaguuggucacu

SEQ ID NO: 939266 - RNA, 22 nt, Human
aggcacugauucucagaguuac

SEQ ID NO: 939267 - RNA, 22 nt, Human
cuccuugguguaguacugagca

SEQ ID NO: 939268 - RNA, 22 nt, Human
acacauuauaggcaaucaaaag

SEQ ID NO: 939269 - RNA, 18 nt, Human
ugggcacaaugaacagca

SEQ ID NO: 939270 - RNA, 20 nt, Human
ucuguucaaaucuuaguucc

SEQ ID NO: 939271 - RNA, 22 nt, Human
caggguccggcugccuggcugu

SEQ ID NO: 939272 - RNA, 22 nt, Human
agggccugcaucaggagcuugg

SEQ ID NO: 939273 - RNA, 21 nt, Human
ggugggcacaggagagcagag

SEQ ID NO: 939274 - RNA, 22 nt, Human
aggcugccaaagcuucugucuc

SEQ ID NO: 939275 - RNA, 22 nt, Human
cacaugcauaaggauaauuacu

SEQ ID NO: 939276 - RNA, 22 nt, Human
gaacccaggcuuuugaggcugu

SEQ ID NO: 939277 - RNA, 22 nt, Human
ucagaguggugguuuugccuuc

SEQ ID NO: 939278 - RNA, 22 nt, Human
ccuuaaauucuccauuugaaag

SEQ ID NO: 939279 - RNA, 22 nt, Human
cuggccugcugggugagguccu

SEQ ID NO: 939280 - RNA, 22 nt, Human
ugggccuguugccugaguccau

SEQ ID NO: 939281 - RNA, 22 nt, Human
ggagcugugcagugacuacaga

SEQ ID NO: 939282 - RNA, 22 nt, Human
ccuccugggagagcacggaggg

SEQ ID NO: 939283 - RNA, 19 nt, Human
agcuuccauauucucuagu

SEQ ID NO: 939284 - RNA, 22 nt, Human
uggaggaugccauccaggauac

SEQ ID NO: 939285 - RNA, 22 nt, Human
cuguggcuaggaagcuguggga

SEQ ID NO: 939286 - RNA, 18 nt, Human
cugcuugggagacgucag

SEQ ID NO: 939287 - RNA, 22 nt, Human
ugaaaucuuagccauucugccu

SEQ ID NO: 939288 - RNA, 22 nt, Human
uucacagacauugcagacugaa

SEQ ID NO: 939289 - RNA, 22 nt, Human
gcagugggcaacaagagcugga

SEQ ID NO: 939290 - RNA, 22 nt, Human
gccucuggggcagcugagucau

SEQ ID NO: 939291 - RNA, 22 nt, Human
cagcagagaaauuaaacuucug

SEQ ID NO: 939292 - RNA, 22 nt, Human
ccacacagggggaugaguuauu

SEQ ID NO: 939293 - RNA, 22 nt, Human
uucaugaauggaaucaaugcuc

SEQ ID NO: 939294 - RNA, 22 nt, Human
guucucucugcuuccaagaugg

SEQ ID NO: 939295 - RNA, 22 nt, Human
acauuucuuagccuaguuccag

SEQ ID NO: 939296 - RNA, 22 nt, Human
cagucuuuguucccauuacuga

SEQ ID NO: 939297 - RNA, 22 nt, Human
gcuggagccaagcugcucuugg

SEQ ID NO: 939298 - RNA, 22 nt, Human
cauuuucagcacccaucugaaa

SEQ ID NO: 939299 - RNA, 22 nt, Human
ccagggcauguccaagacuuag

SEQ ID NO: 939300 - RNA, 21 nt, Human
uggcccuggccacggcugcca

SEQ ID NO: 939301 - RNA, 22 nt, Human
cagcugacgccagaguggaauu

SEQ ID NO: 939302 - RNA, 22 nt, Human
uuugaagucagacacugcuuug

SEQ ID NO: 939303 - RNA, 22 nt, Human
gaaaguuuauagguuauauaau

SEQ ID NO: 939304 - RNA, 22 nt, Human
cccuccccacaaagcuucacac

SEQ ID NO: 939305 - RNA, 22 nt, Human
cccaucacagacacuggguuau

SEQ ID NO: 939306 - RNA, 22 nt, Human
ucacaggcuccagggccuggau

SEQ ID NO: 939307 - RNA, 22 nt, Human
guuaggauauggugaaauggag

SEQ ID NO: 939308 - RNA, 22 nt, Human
aaagaggaaccaagagcacgug

SEQ ID NO: 939309 - RNA, 22 nt, Human
gcacugcaucuacuggcaagua

SEQ ID NO: 939310 - RNA, 22 nt, Human
gcauuuauuucuuuacugcauc

SEQ ID NO: 939311 - RNA, 22 nt, Human
gacaucauagggugggaggaaa

SEQ ID NO: 939312 - RNA, 22 nt, Human
uggcagggugccaguugcgagu

SEQ ID NO: 939313 - RNA, 22 nt, Human
ucuucaaaaaauauccaucagu

SEQ ID NO: 939314 - RNA, 22 nt, Human
uggcccugcagaacuagccugg

SEQ ID NO: 939315 - RNA, 22 nt, Human
gagaaaugcaugcaugucauca

SEQ ID NO: 939316 - RNA, 22 nt, Human
gagaagcaauuuccaacugugc

SEQ ID NO: 939317 - RNA, 22 nt, Human
gccaggcagccacccucugcga

SEQ ID NO: 939318 - RNA, 22 nt, Human
acaaagguggaccauguggcuu

SEQ ID NO: 939319 - RNA, 22 nt, Human
auucacaacugauccuugcuca

SEQ ID NO: 939320 - RNA, 22 nt, Human
uucucuuagcuguaaagucaau

SEQ ID NO: 939321 - RNA, 22 nt, Human
agcacuuuccuggcaaaugugg

SEQ ID NO: 939322 - RNA, 22 nt, Human
cagaggccuauccaguguccau

SEQ ID NO: 939323 - RNA, 22 nt, Human
agcagccacagucugggacagg

SEQ ID NO: 939324 - RNA, 22 nt, Human
ucagccagguaauguggagaug

SEQ ID NO: 939325 - RNA, 18 nt, Human
agcagcugucagaaugcc

SEQ ID NO: 939326 - RNA, 22 nt, Human
augugucuugcggcaguuggua

SEQ ID NO: 939327 - RNA, 22 nt, Human
cuggguggcagagccugcagug

SEQ ID NO: 939328 - RNA, 22 nt, Human
uccauuuucaucucauguauaa

SEQ ID NO: 939329 - RNA, 22 nt, Human
aagcagcuuaaauuagagccug

SEQ ID NO: 939330 - RNA, 22 nt, Human
cagguggggcgcccucaggcag

SEQ ID NO: 939331 - RNA, 18 nt, Human
uggcucugcagccagaug

SEQ ID NO: 939332 - RNA, 22 nt, Human
agggcugcaucugccuggugaa

SEQ ID NO: 939333 - RNA, 22 nt, Human
gacagugcauuuccuggcaugg

SEQ ID NO: 939334 - RNA, 19 nt, Human
guugaaaguaggugagggu

SEQ ID NO: 939335 - RNA, 22 nt, Human
augggugugaaaauggucaucu

SEQ ID NO: 939336 - RNA, 22 nt, Human
aucaguuuggugcuuucaguga

SEQ ID NO: 939337 - RNA, 22 nt, Human
uccuugacugugaggaacuagc

SEQ ID NO: 939338 - RNA, 22 nt, Human
uagggauguggugagaacugag

SEQ ID NO: 939339 - RNA, 22 nt, Human
cacauguaguaagcaggcaaug

SEQ ID NO: 939340 - RNA, 22 nt, Human
gggcuuggcacaugggcucagc

SEQ ID NO: 939341 - RNA, 22 nt, Human
gaaggaggcguuagcccuagga

SEQ ID NO: 939342 - RNA, 22 nt, Human
cacugugggguuuggcuggaac

SEQ ID NO: 939343 - RNA, 22 nt, Human
agaggagguccuuuucugaugu

SEQ ID NO: 939344 - RNA, 22 nt, Human
ugccugucuccucugcagggug

SEQ ID NO: 939345 - RNA, 22 nt, Human
uccaggucuggccugcuaggca

SEQ ID NO: 939346 - RNA, 22 nt, Human
cagucccaugagcccagaacau

SEQ ID NO: 939347 - RNA, 22 nt, Human
ccagagccggauugugaagugc

SEQ ID NO: 939348 - RNA, 22 nt, Human
cuguccuguggaccugaggacg

SEQ ID NO: 939349 - RNA, 22 nt, Human
agucugucugucacuucugcag

SEQ ID NO: 939350 - RNA, 22 nt, Human
ccaguggguaggccauggugag

SEQ ID NO: 939351 - RNA, 22 nt, Human
cucagggcuugaguguccagga

SEQ ID NO: 939352 - RNA, 22 nt, Human
uuauuuaaaagugguaagauuc

SEQ ID NO: 939353 - RNA, 20 nt, Human
uccucagaagacauuugggg

SEQ ID NO: 939354 - RNA, 22 nt, Human
uggcagcagaacaugaaaccca

SEQ ID NO: 939355 - RNA, 22 nt, Human
uaaaucaguuucucuuauuggu

SEQ ID NO: 939356 - RNA, 22 nt, Human
cuggccacaugugugcugagca

SEQ ID NO: 939357 - RNA, 22 nt, Human
uaaggccaauuacauauguuca

SEQ ID NO: 939358 - RNA, 22 nt, Human
agccucuguagaaagcagugug

SEQ ID NO: 939359 - RNA, 23 nt, Human
gcagacagagcagacuaagacaa

SEQ ID NO: 939360 - RNA, 22 nt, Human
augcuuccaaggcuaagacaag

SEQ ID NO: 939361 - RNA, 22 nt, Human
agagcuggggccagagucaagg

SEQ ID NO: 939362 - RNA, 21 nt, Human
gcaggcuggucaaaccucagu

SEQ ID NO: 939363 - RNA, 22 nt, Human
cugggcacacagugacucugca

SEQ ID NO: 939364 - RNA, 22 nt, Human
cugggccaucagaggggcugga

SEQ ID NO: 939365 - RNA, 22 nt, Human
aaggccugggaggccucucuuc

SEQ ID NO: 939366 - RNA, 22 nt, Human
gugcaugucggggugcauguca

SEQ ID NO: 939367 - RNA, 22 nt, Human
auacaugucaucauauguuugu

SEQ ID NO: 939368 - RNA, 20 nt, Human
acauguacuaaugaauacag

SEQ ID NO: 939369 - RNA, 22 nt, Human
caguacuuugaagauauuuuag

SEQ ID NO: 939370 - RNA, 22 nt, Human
ggucccagaauugguuagcaca

SEQ ID NO: 939371 - RNA, 22 nt, Human
uugcaauagccuuauuuccaaa

SEQ ID NO: 939372 - RNA, 22 nt, Human
aucuggcuuuuacugaauugcu

SEQ ID NO: 939373 - RNA, 22 nt, Human
ucugggaacugagcuccccuag

SEQ ID NO: 939374 - RNA, 22 nt, Human
aagggagacaguugugugagga

SEQ ID NO: 939375 - RNA, 22 nt, Human
cucuuucaguucugauagucuc

SEQ ID NO: 939376 - RNA, 22 nt, Human
uagcugcugcagcacagggagg

SEQ ID NO: 939377 - RNA, 22 nt, Human
aagcugccugggaggaagggcu

SEQ ID NO: 939378 - RNA, 22 nt, Human
cauggcaggugcagauucugug

SEQ ID NO: 939379 - RNA, 22 nt, Human
gaggcagcagaacauggaagag

SEQ ID NO: 939380 - RNA, 22 nt, Human
ggagccagcagggugacacuga

SEQ ID NO: 939381 - RNA, 22 nt, Human
cucuucuugccugaugaggcag

SEQ ID NO: 939382 - RNA, 22 nt, Human
cagauggccagaggcagcugca

SEQ ID NO: 939383 - RNA, 22 nt, Human
cuuccugaacaaugccaucaau

SEQ ID NO: 939384 - RNA, 22 nt, Human
cccagcucucgcacuuacuagc

SEQ ID NO: 939385 - RNA, 22 nt, Human
auucuucacuguuucagaauga

SEQ ID NO: 939386 - RNA, 22 nt, Human
cugggaggcacuauucaggagg

SEQ ID NO: 939387 - RNA, 22 nt, Human
ggagugucagaaacaguguccu

SEQ ID NO: 939388 - RNA, 21 nt, Human
ucuccuggguccaacccaugc

SEQ ID NO: 939389 - RNA, 22 nt, Human
cucagcagugacaagagaguau

SEQ ID NO: 939390 - RNA, 22 nt, Human
ccucccuggccagagcagcagc

SEQ ID NO: 939391 - RNA, 22 nt, Human
cagaggcaggaagaugggcagu

SEQ ID NO: 939392 - RNA, 22 nt, Human
uaugcauagguaucuauacuca

SEQ ID NO: 939393 - RNA, 22 nt, Human
gugucauggaaaauugcaaugg

SEQ ID NO: 939394 - RNA, 21 nt, Human
aagagcuggaucaaggauaag

SEQ ID NO: 939395 - RNA, 22 nt, Human
cuguccccgcgaguccagagcu

SEQ ID NO: 939396 - RNA, 22 nt, Human
gggagcuggagcuggaagacuc

SEQ ID NO: 939397 - RNA, 22 nt, Human
cacaggagagcugggaggugcc

SEQ ID NO: 939398 - RNA, 20 nt, Human
gcuguucacauuauuaguag

SEQ ID NO: 939399 - RNA, 22 nt, Human
uuuucagaggccuaagagguuu

SEQ ID NO: 939400 - RNA, 22 nt, Human
ucccagaggcuccagucucuau

SEQ ID NO: 939401 - RNA, 20 nt, Human
gaacauuuggccauacugag

SEQ ID NO: 939402 - RNA, 22 nt, Human
ggccugcucaguccucuuucuu

SEQ ID NO: 939403 - RNA, 22 nt, Human
aauguucaaaagcaucagugaa

SEQ ID NO: 939404 - RNA, 22 nt, Human
gcccaggaguucaagucuagug

SEQ ID NO: 939405 - RNA, 22 nt, Human
cuggcucaauuuguacugcugu

SEQ ID NO: 939406 - RNA, 22 nt, Human
ucucugggaaugggccugggua

SEQ ID NO: 939407 - RNA, 22 nt, Human
gcacugaaugccaaaguguagg

SEQ ID NO: 939408 - RNA, 22 nt, Human
ucccagccuuucuuuucugcug

SEQ ID NO: 939409 - RNA, 22 nt, Human
ucaagcaggguagcaagcuggu

SEQ ID NO: 939410 - RNA, 22 nt, Human
gauuuccuagacauggggcaga

SEQ ID NO: 939411 - RNA, 22 nt, Human
aucagcaaguccuguuaauucu

SEQ ID NO: 939412 - RNA, 22 nt, Human
cuggcucaugugaugagggcaa

SEQ ID NO: 939413 - RNA, 22 nt, Human
aggugagguuugggagguguca

SEQ ID NO: 939414 - RNA, 22 nt, Human
ucucccacagucucccauggcu

SEQ ID NO: 939415 - RNA, 22 nt, Human
gggaccaggugggugcauuccg

SEQ ID NO: 939416 - RNA, 22 nt, Human
ggccagaaaguuaagcuguggc

SEQ ID NO: 939417 - RNA, 21 nt, Human
ugaaacacucuuuccaugaga

SEQ ID NO: 939418 - RNA, 22 nt, Human
guacaugucaaaaaaugcauaa

SEQ ID NO: 939419 - RNA, 22 nt, Human
cuuauguauaauguuccacaua

SEQ ID NO: 939420 - RNA, 23 nt, Human
ccaggccucucagagggugugcc

SEQ ID NO: 939421 - RNA, 19 nt, Human
caguggagauuggaggagg

SEQ ID NO: 939422 - RNA, 22 nt, Human
aaaggugacugcagcagcuauu

SEQ ID NO: 939423 - RNA, 22 nt, Human
gcuuccuucuaccacaucaugc

SEQ ID NO: 939424 - RNA, 22 nt, Human
ccuggccauagggcccaggaaa

SEQ ID NO: 939425 - RNA, 22 nt, Human
auuaaauuggaucugcauaguu

SEQ ID NO: 939426 - RNA, 22 nt, Human
uugcucaggcuuagagcuacua

SEQ ID NO: 939427 - RNA, 23 nt, Human
ucugucacuuucugcuguggagu

SEQ ID NO: 939428 - RNA, 18 nt, Human
ccagaggcccgggcaggc

SEQ ID NO: 939429 - RNA, 22 nt, Human
uaaaucagggagucaucugcga

SEQ ID NO: 939430 - RNA, 22 nt, Human
ucaggagucugugcaguuccac

SEQ ID NO: 939431 - RNA, 22 nt, Human
uauucacauuaauaagucuuca

SEQ ID NO: 939432 - RNA, 22 nt, Human
gccugguguccagaggcgagug

SEQ ID NO: 939433 - RNA, 22 nt, Human
cuggagcuaauaauccaucuga

SEQ ID NO: 939434 - RNA, 22 nt, Human
guggccuggauagacuccaucu

SEQ ID NO: 939435 - RNA, 22 nt, Human
cccuugggccccagcucagggc

SEQ ID NO: 939436 - RNA, 22 nt, Human
ugucucugagaugacucccacc

SEQ ID NO: 939437 - RNA, 22 nt, Human
aaaugcuacauacacaucaggg

SEQ ID NO: 939438 - RNA, 22 nt, Human
caaaugugguuucucagcauuc

SEQ ID NO: 939439 - RNA, 22 nt, Human
ucugucacaauuugcuuacucu

SEQ ID NO: 939440 - RNA, 22 nt, Human
cucucugaggaaggagcaucug

SEQ ID NO: 939441 - RNA, 22 nt, Human
cugcugagcaucagggcugccc

SEQ ID NO: 939442 - RNA, 22 nt, Human
cugccuuggaaaaugugguaau

SEQ ID NO: 939443 - RNA, 22 nt, Human
cagggcaguuuuacuucucucu

SEQ ID NO: 939444 - RNA, 22 nt, Human
ugaaauguaaauaggacuagaa

SEQ ID NO: 939445 - RNA, 23 nt, Human
ccagucucacguauacaggauuu

SEQ ID NO: 939446 - RNA, 22 nt, Human
aucaggaugcugucaguuacca

SEQ ID NO: 939447 - RNA, 22 nt, Human
gccuugcuuugcuucuggacag

SEQ ID NO: 939448 - RNA, 22 nt, Human
gugccugcagcaauccauggca

SEQ ID NO: 939449 - RNA, 22 nt, Human
ugcaggccucacaccuggcacc

SEQ ID NO: 939450 - RNA, 22 nt, Human
caggugggaccaugauagggca

SEQ ID NO: 939451 - RNA, 19 nt, Human
ugaaauggcaguugcuaaa

SEQ ID NO: 939452 - RNA, 22 nt, Human
cuggccuuuaaaaugaccuuau

SEQ ID NO: 939453 - RNA, 22 nt, Human
ugagccagguuaagacaggagc

SEQ ID NO: 939454 - RNA, 22 nt, Human
aaaaugcucaucagcgauggcu

SEQ ID NO: 939455 - RNA, 22 nt, Human
aggguggcugaguagauggaag

SEQ ID NO: 939456 - RNA, 20 nt, Human
augauuuugcacuaacuuca

SEQ ID NO: 939457 - RNA, 22 nt, Human
uggcuggggccacaguuuuccu

SEQ ID NO: 939458 - RNA, 22 nt, Human
cagggaggaugggcuguuuugc

SEQ ID NO: 939459 - RNA, 22 nt, Human
auuuagaaauuccaaaaguauu

SEQ ID NO: 939460 - RNA, 22 nt, Human
aagaugauaggacuugcuuaag

SEQ ID NO: 939461 - RNA, 22 nt, Human
acaaagucacaauaauuaaccu

SEQ ID NO: 939462 - RNA, 22 nt, Human
ugcagaggaccauuguccugga

SEQ ID NO: 939463 - RNA, 22 nt, Human
ugucuguacaaauuuucugugu

SEQ ID NO: 939464 - RNA, 22 nt, Human
ccuguucaccauggucacgugc

SEQ ID NO: 939465 - RNA, 22 nt, Human
aaauugcauuuuaaagguagau

SEQ ID NO: 939466 - RNA, 22 nt, Human
cugagggccuuggcuccugccc

SEQ ID NO: 939467 - RNA, 22 nt, Human
caggugcccagcuccugcugug

SEQ ID NO: 939468 - RNA, 22 nt, Human
accaggagaggcacuugcaaug

SEQ ID NO: 939469 - RNA, 20 nt, Human
gagauggcuaagugcugaac

SEQ ID NO: 939470 - RNA, 22 nt, Human
caaauaguuuuucauguauuau

SEQ ID NO: 939471 - RNA, 22 nt, Human
uuuccucacuucaugagaguuu

SEQ ID NO: 939472 - RNA, 20 nt, Human
cagagcuguuauggaugaug

SEQ ID NO: 939473 - RNA, 22 nt, Human
ugcagcucugaacagucaugaa

SEQ ID NO: 939474 - RNA, 22 nt, Human
uuccuccacgugacaggagcca

SEQ ID NO: 939475 - RNA, 22 nt, Human
ugcccaggguggagugcagcgg

SEQ ID NO: 939476 - RNA, 22 nt, Human
uuagagucaaaauggcauguua

SEQ ID NO: 939477 - RNA, 22 nt, Human
gaagcagcuuucuggugaggag

SEQ ID NO: 939478 - RNA, 22 nt, Human
cucuuuaaaguaaaauuugucu

SEQ ID NO: 939479 - RNA, 22 nt, Human
cuaauuuucccaaggccuucua

SEQ ID NO: 939480 - RNA, 22 nt, Human
aacaaauggggccuuguaugaa

SEQ ID NO: 939481 - RNA, 23 nt, Human
aggcagagccaaggucaaaaccc

SEQ ID NO: 939482 - RNA, 21 nt, Human
ucagaguggaagacaguuuga

SEQ ID NO: 939483 - RNA, 22 nt, Human
uugggugcugucauggggcacg

SEQ ID NO: 939484 - RNA, 22 nt, Human
acacugaauguuuaagaacuug

SEQ ID NO: 939485 - RNA, 22 nt, Human
aaaaaugaaacggcugguuggc

SEQ ID NO: 939486 - RNA, 22 nt, Human
ucagaagccggaagugcuccuc

SEQ ID NO: 939487 - RNA, 22 nt, Human
ggccugcugcuaugacuuccug

SEQ ID NO: 939488 - RNA, 22 nt, Human
gagcugagccuggguggaccgc

SEQ ID NO: 939489 - RNA, 20 nt, Human
auacaaagagauugauguau

SEQ ID NO: 939490 - RNA, 22 nt, Human
uuauuuauggcacuguuggugg

SEQ ID NO: 939491 - RNA, 22 nt, Human
aauucuugguccuaguguauaa

SEQ ID NO: 939492 - RNA, 22 nt, Human
agcuggcagucauccuagugag

SEQ ID NO: 939493 - RNA, 22 nt, Human
cagugcugggcagaggagagcg

SEQ ID NO: 939494 - RNA, 22 nt, Human
gaaaucugcggugaggccugag

SEQ ID NO: 939495 - RNA, 22 nt, Human
auaaggcagucccuuaacaagg

SEQ ID NO: 939496 - RNA, 22 nt, Human
gugcugucguggaacugggcug

SEQ ID NO: 939497 - RNA, 22 nt, Human
guccucagggaauguggcgggu

SEQ ID NO: 939498 - RNA, 22 nt, Human
augugcauuaaaugucaauguu

SEQ ID NO: 939499 - RNA, 22 nt, Human
caaaguuuaaaguagauuucag

SEQ ID NO: 939500 - RNA, 22 nt, Human
cucuggcuuugcucaugcaucc

SEQ ID NO: 939501 - RNA, 22 nt, Human
ucucagagcuucaguuauuuuc

SEQ ID NO: 939502 - RNA, 22 nt, Human
gccaggcucagcagucaaccug

SEQ ID NO: 939503 - RNA, 22 nt, Human
agcuggagaucaugcugauacu

SEQ ID NO: 939504 - RNA, 22 nt, Human
gccugcugaaccucaugcaguc

SEQ ID NO: 939505 - RNA, 22 nt, Human
uaaguauguuagaaaaucaagu

SEQ ID NO: 939506 - RNA, 22 nt, Human
uugaaaggugcugugugcugau

SEQ ID NO: 939507 - RNA, 22 nt, Human
cacagcuuguuuagugacucac

SEQ ID NO: 939508 - RNA, 21 nt, Human
agggagcuggccacacagccu

SEQ ID NO: 939509 - RNA, 22 nt, Human
gucauugcaguggcaaaucaca

SEQ ID NO: 939510 - RNA, 20 nt, Human
agcccaggccugugugaguc

SEQ ID NO: 939511 - RNA, 22 nt, Human
cagggcaggaugcugugauuau

SEQ ID NO: 939512 - RNA, 22 nt, Human
ggacacagauaaucacacagau

SEQ ID NO: 939513 - RNA, 22 nt, Human
ucuggcucucauacucgccagu

SEQ ID NO: 939514 - RNA, 18 nt, Human
ucagcuggggcugcagcc

SEQ ID NO: 939515 - RNA, 22 nt, Human
ccaugagccaggcugaggaagc

SEQ ID NO: 939516 - RNA, 22 nt, Human
ucagagucucccccaguuuggg

SEQ ID NO: 939517 - RNA, 22 nt, Human
aacuagucagugauucucagaa

SEQ ID NO: 939518 - RNA, 22 nt, Human
gucucagaccacccucuuuggc

SEQ ID NO: 939519 - RNA, 22 nt, Human
agcuuuauuugucauucacggc

SEQ ID NO: 939520 - RNA, 22 nt, Human
augugaggaagaaagagguaag

SEQ ID NO: 939521 - RNA, 22 nt, Human
gauuaggacauggauguauguu

SEQ ID NO: 939522 - RNA, 22 nt, Human
caggauggucuucauuuggcuc

SEQ ID NO: 939523 - RNA, 22 nt, Human
uggggcacuuaugaugugccac

SEQ ID NO: 939524 - RNA, 22 nt, Human
ugcaggaacugggagggauagu

SEQ ID NO: 939525 - RNA, 22 nt, Human
ugcugccagagagacagggacu

SEQ ID NO: 939526 - RNA, 22 nt, Human
ucugccacuuuugcuuacuggg

SEQ ID NO: 939527 - RNA, 22 nt, Human
gcagaggacagggauuuagauu

SEQ ID NO: 939528 - RNA, 22 nt, Human
ccaggacagugaacauguaaga

SEQ ID NO: 939529 - RNA, 22 nt, Human
uuccagaagccuccauauuacu

SEQ ID NO: 939530 - RNA, 22 nt, Human
aggacugggugcagagggcauc

SEQ ID NO: 939531 - RNA, 22 nt, Human
ucaguucugcuagaaaaacagu

SEQ ID NO: 939532 - RNA, 22 nt, Human
ugacacaggcagcucccagcac

SEQ ID NO: 939533 - RNA, 22 nt, Human
cagcuggcagaaccugcaucca

SEQ ID NO: 939534 - RNA, 22 nt, Human
uuucaacaggaugauaauaggc

SEQ ID NO: 939535 - RNA, 22 nt, Human
uccucugcuggaagggcaagag

SEQ ID NO: 939536 - RNA, 22 nt, Human
gaagagcugacagugucauccu

SEQ ID NO: 939537 - RNA, 22 nt, Human
ccagcugguuaaaauagagaaa

SEQ ID NO: 939538 - RNA, 21 nt, Human
gggcuggacaugguggcucau

SEQ ID NO: 939539 - RNA, 22 nt, Human
guuauuagaagugaaggauugu

SEQ ID NO: 939540 - RNA, 22 nt, Human
gggcagcagaggaucccuuaau

SEQ ID NO: 939541 - RNA, 22 nt, Human
ucagucucaucaacucuauucc

SEQ ID NO: 939542 - RNA, 22 nt, Human
uuuauguuugacaaugaucugg

SEQ ID NO: 939543 - RNA, 23 nt, Human
agucuuaauacagcucuuuucua

SEQ ID NO: 939544 - RNA, 22 nt, Human
uggccugcagcucucagggaag

SEQ ID NO: 939545 - RNA, 22 nt, Human
gggcacugugcuaggugcugag

SEQ ID NO: 939546 - RNA, 22 nt, Human
cauggcugcgagaagagugggu

SEQ ID NO: 939547 - RNA, 22 nt, Human
acagccagggcauugucgccga

SEQ ID NO: 939548 - RNA, 22 nt, Human
uggcagaguucgcugugccuuu

SEQ ID NO: 939549 - RNA, 22 nt, Human
cagggcccauggcucagguagg

SEQ ID NO: 939550 - RNA, 22 nt, Human
ccuuggagcggucagcacuggu

SEQ ID NO: 939551 - RNA, 22 nt, Human
acauuucugagcagggagcugu

SEQ ID NO: 939552 - RNA, 22 nt, Human
uggccugguuguugcugccguu

SEQ ID NO: 939553 - RNA, 22 nt, Human
cacccaggcuagagugcagugg

SEQ ID NO: 939554 - RNA, 22 nt, Human
ugggccugggucuuugcugcca

SEQ ID NO: 939555 - RNA, 22 nt, Human
uagcaggguaaauguagaugga

SEQ ID NO: 939556 - RNA, 22 nt, Human
gggcuggaggugagcaggacag

SEQ ID NO: 939557 - RNA, 22 nt, Human
ugcucauuggcgaucugaggga

SEQ ID NO: 939558 - RNA, 22 nt, Human
gccuuugcaccaucagugcaau

SEQ ID NO: 939559 - RNA, 22 nt, Human
auggcccaggccuccuguggcu

SEQ ID NO: 939560 - RNA, 22 nt, Human
gaaggccauuuuuagguagaau

SEQ ID NO: 939561 - RNA, 22 nt, Human
ugucucaggcccaagccaguaa

SEQ ID NO: 939562 - RNA, 22 nt, Human
agaggccaguggcugugcuguc

SEQ ID NO: 939563 - RNA, 22 nt, Human
cuucaagauccauagauauugc

SEQ ID NO: 939564 - RNA, 22 nt, Human
ugggacaguuguccuccacucu

SEQ ID NO: 939565 - RNA, 22 nt, Human
aggcuccaugcaaaggcuguuu

SEQ ID NO: 939566 - RNA, 22 nt, Human
augugucaauuuucaaaugcuu

SEQ ID NO: 939567 - RNA, 22 nt, Human
uagcagaagaaauucagaguug

SEQ ID NO: 939568 - RNA, 22 nt, Human
uuggcacacaguaagcccuaag

SEQ ID NO: 939569 - RNA, 22 nt, Human
agagaacaaauuaaaggugguu

SEQ ID NO: 939570 - RNA, 22 nt, Human
aaaagagucuuaggcagucaua

SEQ ID NO: 939571 - RNA, 22 nt, Human
uuacauuuuaguuaaccuguga

SEQ ID NO: 939572 - RNA, 22 nt, Human
ugaugauguuuaucuugguauu

SEQ ID NO: 939573 - RNA, 22 nt, Human
cagaaugcaaauuuuauaauau

SEQ ID NO: 939574 - RNA, 22 nt, Human
caaaguuaugaaugauaagauu

SEQ ID NO: 939575 - RNA, 22 nt, Human
uuguguuucuggccaagaugga

SEQ ID NO: 939576 - RNA, 21 nt, Human
acagcagacaggcuuaggacc

SEQ ID NO: 939577 - RNA, 22 nt, Human
ugaugaauaaacuugagaguca

SEQ ID NO: 939578 - RNA, 22 nt, Human
aagugagugguaaggagcaugg

SEQ ID NO: 939579 - RNA, 22 nt, Human
caggcagcauuuacucugauga

SEQ ID NO: 939580 - RNA, 22 nt, Human
acuggcaguggcagcagaaaga

SEQ ID NO: 939581 - RNA, 22 nt, Human
ugagcccagagcccuuguaggg

SEQ ID NO: 939582 - RNA, 22 nt, Human
ugugccugaguuggcugaguac

SEQ ID NO: 939583 - RNA, 22 nt, Human
aaaugcagauugucauucagga

SEQ ID NO: 939584 - RNA, 22 nt, Human
acaaaguuaacaguuggauagu

SEQ ID NO: 939585 - RNA, 19 nt, Human
uuagccauccacagugaaa

SEQ ID NO: 939586 - RNA, 21 nt, Human
aggucagcccagcucuggaag

SEQ ID NO: 939587 - RNA, 22 nt, Human
gugauuucagguuuuucauacu

SEQ ID NO: 939588 - RNA, 23 nt, Human
cuggcucuguagguggcauccuu

SEQ ID NO: 939589 - RNA, 22 nt, Human
aucuauuaugcugagaaacugu

SEQ ID NO: 939590 - RNA, 22 nt, Human
ggccacaagugguccugagucc

SEQ ID NO: 939591 - RNA, 22 nt, Human
uggccuggcagagcaaggccug

SEQ ID NO: 939592 - RNA, 18 nt, Human
ugucucugaauuccagug

SEQ ID NO: 939593 - RNA, 22 nt, Human
gccuggccugaacuaggaggug

SEQ ID NO: 939594 - RNA, 22 nt, Human
gcacagcucgagcucaggaggg

SEQ ID NO: 939595 - RNA, 22 nt, Human
ugagagagccugaaucucuuac

SEQ ID NO: 939596 - RNA, 22 nt, Human
aagcccagcaucccugcaccag

SEQ ID NO: 939597 - RNA, 21 nt, Human
cagaggggcuagccuggcugc

SEQ ID NO: 939598 - RNA, 22 nt, Human
aggcaguguguagcuggaagag

SEQ ID NO: 939599 - RNA, 20 nt, Human
cuucaggacccauccucccc

SEQ ID NO: 939600 - RNA, 22 nt, Human
ugaaaugaaacagaacauauca

SEQ ID NO: 939601 - RNA, 19 nt, Human
gcacccugaggucauggcc

SEQ ID NO: 939602 - RNA, 22 nt, Human
auuuugaaaagcauuugaguaa

SEQ ID NO: 939603 - RNA, 22 nt, Human
gcuggccauggccugcgccauc

SEQ ID NO: 939604 - RNA, 22 nt, Human
guuagaaacacauucuuauuga

SEQ ID NO: 939605 - RNA, 22 nt, Human
uuaggaaauuaugguuucagau

SEQ ID NO: 939606 - RNA, 22 nt, Human
ucacaugcagucacugagcagg

SEQ ID NO: 939607 - RNA, 22 nt, Human
aaccauuugcaguuacugagac

SEQ ID NO: 939608 - RNA, 21 nt, Human
cccaggaguccuauuuaaaug

SEQ ID NO: 939609 - RNA, 22 nt, Human
gccaggcugcuccagggaggcc

SEQ ID NO: 939610 - RNA, 22 nt, Human
ugggaaauguguuucuggacca

SEQ ID NO: 939611 - RNA, 22 nt, Human
auccaguucucagugcuuacag

SEQ ID NO: 939612 - RNA, 22 nt, Human
cagcacuggggccacuggaguu

SEQ ID NO: 939613 - RNA, 22 nt, Human
aaaugcagguucuugagccaag

SEQ ID NO: 939614 - RNA, 22 nt, Human
uggcccugcuaugauccugcaa

SEQ ID NO: 939615 - RNA, 22 nt, Human
cugccugcugccuguggagggu

SEQ ID NO: 939616 - RNA, 22 nt, Human
cuggagcauccaugcccagggu

SEQ ID NO: 939617 - RNA, 22 nt, Human
ccuccuggagcauuggugagga

SEQ ID NO: 939618 - RNA, 22 nt, Human
uuucacauguggaaugccaggu

SEQ ID NO: 939619 - RNA, 22 nt, Human
ugaugaaaauaugauucugagg

SEQ ID NO: 939620 - RNA, 19 nt, Human
gaggcgaggcgugcaggag

SEQ ID NO: 939621 - RNA, 22 nt, Human
guagccauuggcaaugaagccu

SEQ ID NO: 939622 - RNA, 22 nt, Human
caccagggcucugagcucugaa

SEQ ID NO: 939623 - RNA, 18 nt, Human
ucacagugcucuugccua

SEQ ID NO: 939624 - RNA, 22 nt, Human
uucaugcuuuuaccgcuguuaa

SEQ ID NO: 939625 - RNA, 22 nt, Human
gcagauggcucagacacugggg

SEQ ID NO: 939626 - RNA, 22 nt, Human
acucugccaucccaggugcugu

SEQ ID NO: 939627 - RNA, 22 nt, Human
gcuuccugauauucauacuguu

SEQ ID NO: 939628 - RNA, 22 nt, Human
ccucacuggccagccaggggug

SEQ ID NO: 939629 - RNA, 20 nt, Human
ggggcugcaugcagagaaga

SEQ ID NO: 939630 - RNA, 22 nt, Human
agauuucagaugcucggcaguu

SEQ ID NO: 939631 - RNA, 22 nt, Human
gagagugaggccugggaaucua

SEQ ID NO: 939632 - RNA, 22 nt, Human
aagaugauagaucugucaaugu

SEQ ID NO: 939633 - RNA, 23 nt, Human
caguacuuaguguagcguuaauu

SEQ ID NO: 939634 - RNA, 22 nt, Human
ucacaacuugaagcugauuuaa

SEQ ID NO: 939635 - RNA, 22 nt, Human
cugggacacccagagcugcaga

SEQ ID NO: 939636 - RNA, 22 nt, Human
ggcagcaucucuggcagcagcu

SEQ ID NO: 939637 - RNA, 23 nt, Human
agacccagagacuggcucugcuc

SEQ ID NO: 939638 - RNA, 22 nt, Human
agucucugcaugaugcagcaca

SEQ ID NO: 939639 - RNA, 22 nt, Human
guacauuucauuuaaaugaugu

SEQ ID NO: 939640 - RNA, 22 nt, Human
ccugucugaaggcagggggaug

SEQ ID NO: 939641 - RNA, 22 nt, Human
aguaggaggcgggagcaugaag

SEQ ID NO: 939642 - RNA, 18 nt, Human
ucuuggcagcaucuggca

SEQ ID NO: 939643 - RNA, 22 nt, Human
ggcugccaggagggaggccagu

SEQ ID NO: 939644 - RNA, 22 nt, Human
uuccaguucccaugaggauuaa

SEQ ID NO: 939645 - RNA, 22 nt, Human
ugaaggccagggauuugcagcc

SEQ ID NO: 939646 - RNA, 22 nt, Human
agagggaucacccuguuucugg

SEQ ID NO: 939647 - RNA, 22 nt, Human
ucuaaccuuugaaacugcuuuc

SEQ ID NO: 939648 - RNA, 22 nt, Human
gggaagcaggugcagcucgccu

SEQ ID NO: 939649 - RNA, 22 nt, Human
cuccaggccauggcugcggagg

SEQ ID NO: 939650 - RNA, 22 nt, Human
cugggccaucuccuuugugugg

SEQ ID NO: 939651 - RNA, 22 nt, Human
aaaugugcuugugaucagcugu

SEQ ID NO: 939652 - RNA, 22 nt, Human
aucaggauucaccccagagcug

SEQ ID NO: 939653 - RNA, 22 nt, Human
ggcugagcacuuuaggcaggag

SEQ ID NO: 939654 - RNA, 22 nt, Human
uagagcugcuggacuguaacag

SEQ ID NO: 939655 - RNA, 22 nt, Human
acuccugguucccaguugagau

SEQ ID NO: 939656 - RNA, 22 nt, Human
gggcaagcucuucagaagcucu

SEQ ID NO: 939657 - RNA, 22 nt, Human
gcaggagaaaugaagauugggu

SEQ ID NO: 939658 - RNA, 22 nt, Human
aaaacucugcaguuaguuucua

SEQ ID NO: 939659 - RNA, 23 nt, Human
aaaguguagccagguuaagaacc

SEQ ID NO: 939660 - RNA, 22 nt, Human
uggccuggggaccugugagacc

SEQ ID NO: 939661 - RNA, 23 nt, Human
ucaguuuuggcuguucaguguug

SEQ ID NO: 939662 - RNA, 22 nt, Human
guccugucccccaaggcugugg

SEQ ID NO: 939663 - RNA, 22 nt, Human
auucuucacauggauaggaucu

SEQ ID NO: 939664 - RNA, 22 nt, Human
gggcagcuggauaguuuuaaau

SEQ ID NO: 939665 - RNA, 22 nt, Human
cuuucacagcugugcuuaugau

SEQ ID NO: 939666 - RNA, 22 nt, Human
acuuugaaggggaacauuuuaa

SEQ ID NO: 939667 - RNA, 20 nt, Human
uggagcuguaaucuugucug

SEQ ID NO: 939668 - RNA, 22 nt, Human
uggagucugugaugcucugggu

SEQ ID NO: 939669 - RNA, 22 nt, Human
aucuauuucugcuaauaacaau

SEQ ID NO: 939670 - RNA, 22 nt, Human
ugggcagauguggcucuccuug

SEQ ID NO: 939671 - RNA, 22 nt, Human
ugaaggcccuaucuccauauac

SEQ ID NO: 939672 - RNA, 22 nt, Human
aacucuggagcacgcccuggcc

SEQ ID NO: 939673 - RNA, 22 nt, Human
aaauauguauggaguucaugaa

SEQ ID NO: 939674 - RNA, 22 nt, Human
agaggacaaaaugagaagugcu

SEQ ID NO: 939675 - RNA, 22 nt, Human
cuggcucauagagcagcuccaa

SEQ ID NO: 939676 - RNA, 22 nt, Human
gcugcuccgucugagcucuggu

SEQ ID NO: 939677 - RNA, 22 nt, Human
cagaguguuucuuugggugggu

SEQ ID NO: 939678 - RNA, 22 nt, Human
ggccccugcggacugccuagag

SEQ ID NO: 939679 - RNA, 22 nt, Human
gcagaugguggggcaggaaaau

SEQ ID NO: 939680 - RNA, 22 nt, Human
ccuuagagaguacugggcugcc

SEQ ID NO: 939681 - RNA, 22 nt, Human
uccaucagauucccuccugaga

SEQ ID NO: 939682 - RNA, 21 nt, Human
ugugugcauaugcauguacau

SEQ ID NO: 939683 - RNA, 22 nt, Human
uuucuucucgacaccuuauccc

SEQ ID NO: 939684 - RNA, 22 nt, Human
auauuagggucucuaaauucua

SEQ ID NO: 939685 - RNA, 22 nt, Human
ugcugaaaacucaaccauugug

SEQ ID NO: 939686 - RNA, 22 nt, Human
cucuggacagcaggugcugugg

SEQ ID NO: 939687 - RNA, 22 nt, Human
ccucagaugucuuaaggcacug

SEQ ID NO: 939688 - RNA, 22 nt, Human
cugggcacaggggagcagaguc

SEQ ID NO: 939689 - RNA, 22 nt, Human
ggcagcaguccauggcccaagg

SEQ ID NO: 939690 - RNA, 22 nt, Human
ggagugggaacaaugacauggu

SEQ ID NO: 939691 - RNA, 21 nt, Human
ccccugggagcccugucagua

SEQ ID NO: 939692 - RNA, 22 nt, Human
cacauuucugugagucaauauu

SEQ ID NO: 939693 - RNA, 22 nt, Human
ggggcacacuuuugguagauau

SEQ ID NO: 939694 - RNA, 22 nt, Human
uuacaggggacauuggggacau

SEQ ID NO: 939695 - RNA, 19 nt, Human
cccuggcaggcaagccugg

SEQ ID NO: 939696 - RNA, 19 nt, Human
gucucugcuccagggucuc

SEQ ID NO: 939697 - RNA, 22 nt, Human
uugaacugguaguuggaaaucu

SEQ ID NO: 939698 - RNA, 22 nt, Human
uaguuaaaauaauggagauguu

SEQ ID NO: 939699 - RNA, 22 nt, Human
augugagguaucuaggucuucg

SEQ ID NO: 939700 - RNA, 22 nt, Human
ugugcaggugcaggaagggggc

SEQ ID NO: 939701 - RNA, 21 nt, Human
cugcaucucauagaacauguc

SEQ ID NO: 939702 - RNA, 22 nt, Human
cagccuuuaagcuuggauaggu

SEQ ID NO: 939703 - RNA, 22 nt, Human
caucagcagucacaugaugcug

SEQ ID NO: 939704 - RNA, 22 nt, Human
agcugccacugagggugcacag

SEQ ID NO: 939705 - RNA, 20 nt, Human
uccuggccucccuggggcuc

SEQ ID NO: 939706 - RNA, 22 nt, Human
gaggggcucuugggcaugaagg

SEQ ID NO: 939707 - RNA, 22 nt, Human
auggccaagcuuacucuguugu

SEQ ID NO: 939708 - RNA, 22 nt, Human
cagagccaacgccaccugccca

SEQ ID NO: 939709 - RNA, 20 nt, Human
uccugcaguuccuaggaggg

SEQ ID NO: 939710 - RNA, 22 nt, Human
uuccucucgcucuccggggccc

SEQ ID NO: 939711 - RNA, 22 nt, Human
acugagcucuugacugggaguu

SEQ ID NO: 939712 - RNA, 22 nt, Human
ccaggagacaaagaugacugcu

SEQ ID NO: 939713 - RNA, 22 nt, Human
aggcugagauagguggaucauu

SEQ ID NO: 939714 - RNA, 22 nt, Human
gggagcugaauggcaauggaga

SEQ ID NO: 939715 - RNA, 22 nt, Human
cauuuguuaauuacuauuaucu

SEQ ID NO: 939716 - RNA, 18 nt, Human
cugcccagagcauuucau

SEQ ID NO: 939717 - RNA, 22 nt, Human
gggcagggguagcauuccaagu

SEQ ID NO: 939718 - RNA, 21 nt, Human
gcagacugcccugcugucccc

SEQ ID NO: 939719 - RNA, 22 nt, Human
cauuaaaauaucucaugguguu

SEQ ID NO: 939720 - RNA, 22 nt, Human
uccauggggcccaggaugagag

SEQ ID NO: 939721 - RNA, 22 nt, Human
ccucaggggucacugugaggag

SEQ ID NO: 939722 - RNA, 22 nt, Human
gcaugguggccuuaggguagcc

SEQ ID NO: 939723 - RNA, 22 nt, Human
ggcaguggaggacccugugucu

SEQ ID NO: 939724 - RNA, 22 nt, Human
cuccagggagcuguggagguuu

SEQ ID NO: 939725 - RNA, 20 nt, Human
acaaaauagguacuggguag

SEQ ID NO: 939726 - RNA, 22 nt, Human
acagagccaaaaggacauagua

SEQ ID NO: 939727 - RNA, 22 nt, Human
gcucccugacucaguuccugag

SEQ ID NO: 939728 - RNA, 22 nt, Human
cuccucccucuuugccacacau

SEQ ID NO: 939729 - RNA, 22 nt, Human
aggucauuguuaagucaccaua

SEQ ID NO: 939730 - RNA, 22 nt, Human
agcugcagauucuaucuagaag

SEQ ID NO: 939731 - RNA, 22 nt, Human
acauuucuccuugcaggaguca

SEQ ID NO: 939732 - RNA, 20 nt, Human
cccuggagagaagcuccacg

SEQ ID NO: 939733 - RNA, 22 nt, Human
guacuuccagccaagugagaca

SEQ ID NO: 939734 - RNA, 22 nt, Human
gacccaggagagaggguugcau

SEQ ID NO: 939735 - RNA, 22 nt, Human
auguccuucuccucuuaccugc

SEQ ID NO: 939736 - RNA, 23 nt, Human
uuucuucagaagccuugcgaggc

SEQ ID NO: 939737 - RNA, 22 nt, Human
caguacuuugcaucauuccacu

SEQ ID NO: 939738 - RNA, 22 nt, Human
guauuugauacaugaaauggug

SEQ ID NO: 939739 - RNA, 16 nt, Human
ugggcagaugagaaga

SEQ ID NO: 939740 - RNA, 22 nt, Human
uccauugucuuugguccuagcc

SEQ ID NO: 939741 - RNA, 22 nt, Human
gggcuucucccuaaggacucug

SEQ ID NO: 939742 - RNA, 22 nt, Human
ugaggcaguauucuccauucca

SEQ ID NO: 939743 - RNA, 22 nt, Human
cauugcaccacauugcaucccu

SEQ ID NO: 939744 - RNA, 22 nt, Human
cacuccuguuccacuaaaugag

SEQ ID NO: 939745 - RNA, 22 nt, Human
aauaugcauguauacaugugua

SEQ ID NO: 939746 - RNA, 22 nt, Human
ugggccuggguuccuccugggc

SEQ ID NO: 939747 - RNA, 22 nt, Human
gcuggcucagggacuagaguuu

SEQ ID NO: 939748 - RNA, 22 nt, Human
aggucaaguuuagauagaguua

SEQ ID NO: 939749 - RNA, 22 nt, Human
cugggacagcugagacaggaga

SEQ ID NO: 939750 - RNA, 22 nt, Human
uggcugaaucugcagcaggaag

SEQ ID NO: 939751 - RNA, 22 nt, Human
ccaggagacuguacugauauuu

SEQ ID NO: 939752 - RNA, 20 nt, Human
gcugccuguuucuguaagua

SEQ ID NO: 939753 - RNA, 22 nt, Human
aggcagacugugcgggaagagu

SEQ ID NO: 939754 - RNA, 22 nt, Human
ucacagggauggaauagaaaua

SEQ ID NO: 939755 - RNA, 22 nt, Human
uccaaauucuagggccuugguu

SEQ ID NO: 939756 - RNA, 22 nt, Human
ucaugaaucguggaaugauuua

SEQ ID NO: 939757 - RNA, 22 nt, Human
ccugggcuuucaaaaccagccu

SEQ ID NO: 939758 - RNA, 20 nt, Human
ucagaugggagugagccauc

SEQ ID NO: 939759 - RNA, 20 nt, Human
cugugccuaaaccuccgggu

SEQ ID NO: 939760 - RNA, 22 nt, Human
gaaagagaaccugggccuagau

SEQ ID NO: 939761 - RNA, 22 nt, Human
auaugcauaugucaaaacuuau

SEQ ID NO: 939762 - RNA, 22 nt, Human
gcuggccucaucacugacuucu

SEQ ID NO: 939763 - RNA, 22 nt, Human
ucagugucuugggcuugaaugc

SEQ ID NO: 939764 - RNA, 22 nt, Human
ugagaaccaugaaaagcuguca

SEQ ID NO: 939765 - RNA, 22 nt, Human
accaggagccacaggaggagcc

SEQ ID NO: 939766 - RNA, 22 nt, Human
gcagagugggagcccagggcug

SEQ ID NO: 939767 - RNA, 20 nt, Human
uugaggagauauugaauacu

SEQ ID NO: 939768 - RNA, 22 nt, Human
acugucugcccugagaugccag

SEQ ID NO: 939769 - RNA, 22 nt, Human
caaauagugucacauugugagg

SEQ ID NO: 939770 - RNA, 22 nt, Human
uguaggauuuucaccagaccuu

SEQ ID NO: 939771 - RNA, 22 nt, Human
cugcccuguuuggacagcccgg

SEQ ID NO: 939772 - RNA, 22 nt, Human
cuggguggcgucuggggccagu

SEQ ID NO: 939773 - RNA, 22 nt, Human
ccuggcagacugugagggcagg

SEQ ID NO: 939774 - RNA, 23 nt, Human
ucuuuccucagcacacaccaaga

SEQ ID NO: 939775 - RNA, 22 nt, Human
uucaagauggcaccagugagug

SEQ ID NO: 939776 - RNA, 22 nt, Human
ucaucacauaugucaugauuug

SEQ ID NO: 939777 - RNA, 21 nt, Human
ggagucauuagucauuuccuu

SEQ ID NO: 939778 - RNA, 19 nt, Human
ccugggagucagcugaagg

SEQ ID NO: 939779 - RNA, 22 nt, Human
cuucuaggcuucucagggggca

SEQ ID NO: 939780 - RNA, 22 nt, Human
cccucugcugccuggcuggguc

SEQ ID NO: 939781 - RNA, 22 nt, Human
ucaggauccauagacucccaaa

SEQ ID NO: 939782 - RNA, 22 nt, Human
acugcagcaaagcccgugucuu

SEQ ID NO: 939783 - RNA, 22 nt, Human
gggacugggagauccuccuggc

SEQ ID NO: 939784 - RNA, 22 nt, Human
uuauguauggauggcugaaagu

SEQ ID NO: 939785 - RNA, 22 nt, Human
ccaggagcagauauggacauaa

SEQ ID NO: 939786 - RNA, 22 nt, Human
ucccagagccucugccacucug

SEQ ID NO: 939787 - RNA, 22 nt, Human
aaguaugcaaaucgucuuagaa

SEQ ID NO: 939788 - RNA, 20 nt, Human
aauauaauucucugaauuua

SEQ ID NO: 939789 - RNA, 22 nt, Human
ggcuccuggcaucuggugggua

SEQ ID NO: 939790 - RNA, 22 nt, Human
ccagcagaagcucccgcugggu

SEQ ID NO: 939791 - RNA, 22 nt, Human
caccagcuuugcccacugccca

SEQ ID NO: 939792 - RNA, 22 nt, Human
ccugugugcugaugacgacaga

SEQ ID NO: 939793 - RNA, 22 nt, Human
caggguagacaguaggugucug

SEQ ID NO: 939794 - RNA, 22 nt, Human
ucaaaugcacguagagaaaaua

SEQ ID NO: 939795 - RNA, 22 nt, Human
gucccuuggcucacaaacagcu

SEQ ID NO: 939796 - RNA, 22 nt, Human
auguuucagauacagaucaaau

SEQ ID NO: 939797 - RNA, 22 nt, Human
cugugcuugcggguguggagcc

SEQ ID NO: 939798 - RNA, 22 nt, Human
agaagccaacagggcaggagag

SEQ ID NO: 939799 - RNA, 22 nt, Human
agaugguguuuccccaggugga

SEQ ID NO: 939800 - RNA, 22 nt, Human
augggaggguggaaaggcucug

SEQ ID NO: 939801 - RNA, 22 nt, Human
uagaaacagcauauauuagccc

SEQ ID NO: 939802 - RNA, 17 nt, Human
uagagcugguucaggag

SEQ ID NO: 939803 - RNA, 22 nt, Human
gaggccaggaagcccaagauca

SEQ ID NO: 939804 - RNA, 22 nt, Human
auggggcuguucucugcccugc

SEQ ID NO: 939805 - RNA, 22 nt, Human
caagagcuacccugugccauau

SEQ ID NO: 939806 - RNA, 22 nt, Human
ucauugcagaaauaaaggugaa

SEQ ID NO: 939807 - RNA, 22 nt, Human
uugaagagugccuuccagacau

SEQ ID NO: 939808 - RNA, 22 nt, Human
ucaacacuauccaggcaaucuu

SEQ ID NO: 939809 - RNA, 22 nt, Human
uuucuuaguccuagagugauuu

SEQ ID NO: 939810 - RNA, 22 nt, Human
agagcccuuucuccaggcaccu

SEQ ID NO: 939811 - RNA, 22 nt, Human
gcugucugggaggccuccacuu

SEQ ID NO: 939812 - RNA, 22 nt, Human
ggaggcugagaaguccaagauc

SEQ ID NO: 939813 - RNA, 22 nt, Human
ccuggcugcauuuugcuggaug

SEQ ID NO: 939814 - RNA, 22 nt, Human
uggcuggcccugggagugcaga

SEQ ID NO: 939815 - RNA, 23 nt, Human
gccagccuugcucuccugcagcc

SEQ ID NO: 939816 - RNA, 22 nt, Human
ugcuggggagugauugaccauc

SEQ ID NO: 939817 - RNA, 22 nt, Human
uggggacacagagccaaacuau

SEQ ID NO: 939818 - RNA, 16 nt, Human
auuuccagauuaugca

SEQ ID NO: 939819 - RNA, 20 nt, Human
aacuuguucuaccuguuuca

SEQ ID NO: 939820 - RNA, 22 nt, Human
gauuaggagggagaggcaagua

SEQ ID NO: 939821 - RNA, 22 nt, Human
gggcagcucagccaccaugcag

SEQ ID NO: 939822 - RNA, 22 nt, Human
ucacaguaaaagcauggaagag

SEQ ID NO: 939823 - RNA, 22 nt, Human
aagugggaauagaaaugaaggu

SEQ ID NO: 939824 - RNA, 22 nt, Human
uuucuuguaagauguuuauuaa

SEQ ID NO: 939825 - RNA, 22 nt, Human
ugggcacuguagcuggugcugg

SEQ ID NO: 939826 - RNA, 22 nt, Human
aacaucuacuaagugccaggca

SEQ ID NO: 939827 - RNA, 22 nt, Human
cuccagggagcuuggaaagacc

SEQ ID NO: 939828 - RNA, 22 nt, Human
ggaagaggcugagccagguccc

SEQ ID NO: 939829 - RNA, 22 nt, Human
aguuacuugagacguuuaugaa

SEQ ID NO: 939830 - RNA, 22 nt, Human
agcugagcauuugauccaccuc

SEQ ID NO: 939831 - RNA, 22 nt, Human
uucugagccucauucaugaggc

SEQ ID NO: 939832 - RNA, 22 nt, Human
gagguucacaggcuaucacagu

SEQ ID NO: 939833 - RNA, 22 nt, Human
aaggcagcuuuaaaaaagaugc

SEQ ID NO: 939834 - RNA, 22 nt, Human
gccuugggccagcugcucugga

SEQ ID NO: 939835 - RNA, 22 nt, Human
aaaguggucaccuucucauuuc

SEQ ID NO: 939836 - RNA, 22 nt, Human
auucauuugcuauuguguaugg

SEQ ID NO: 939837 - RNA, 19 nt, Human
ugugaaagcuaguguucuu

SEQ ID NO: 939838 - RNA, 22 nt, Human
ugcauuucagaagaaaauucgg

SEQ ID NO: 939839 - RNA, 22 nt, Human
gugccugcugcagagucgcugu

SEQ ID NO: 939840 - RNA, 22 nt, Human
caaaugugacuuuugggcuucu

SEQ ID NO: 939841 - RNA, 22 nt, Human
uuagagaugucccaaaaugaag

SEQ ID NO: 939842 - RNA, 19 nt, Human
cuggccaggccaggggccc

SEQ ID NO: 939843 - RNA, 22 nt, Human
gcagagguggcaucugggcucu

SEQ ID NO: 939844 - RNA, 22 nt, Human
gccuggagggucccucucugga

SEQ ID NO: 939845 - RNA, 22 nt, Human
uucaagaugucuucacaauagu

SEQ ID NO: 939846 - RNA, 22 nt, Human
uuggcagugucugcaaaaugga

SEQ ID NO: 939847 - RNA, 23 nt, Human
accaggaguugucucaggaaaca

SEQ ID NO: 939848 - RNA, 22 nt, Human
ccagguaggagagagggauccu

SEQ ID NO: 939849 - RNA, 22 nt, Human
uggcuggcuuguucacugacug

SEQ ID NO: 939850 - RNA, 21 nt, Human
uuugaaagugggugauucuuu

SEQ ID NO: 939851 - RNA, 22 nt, Human
acaauucuggguauuuauauag

SEQ ID NO: 939852 - RNA, 22 nt, Human
gucuuguuugggauguggaugg

SEQ ID NO: 939853 - RNA, 22 nt, Human
auuucuucaggucagaaauaga

SEQ ID NO: 939854 - RNA, 22 nt, Human
cucucugcuguauccuuaggcu

SEQ ID NO: 939855 - RNA, 22 nt, Human
accugggagucacaccugagaa

SEQ ID NO: 939856 - RNA, 22 nt, Human
gagggaggggagcuccacccuc

SEQ ID NO: 939857 - RNA, 22 nt, Human
cagucacauggaugauggauag

SEQ ID NO: 939858 - RNA, 22 nt, Human
acugggagucaugaggaaggag

SEQ ID NO: 939859 - RNA, 22 nt, Human
ccaggagguggagauugcagug

SEQ ID NO: 939860 - RNA, 22 nt, Human
gcugccuguugaagggucugug

SEQ ID NO: 939861 - RNA, 22 nt, Human
agaaagaacgcacuugugcugc

SEQ ID NO: 939862 - RNA, 20 nt, Human
uuucugugagaaacacuguu

SEQ ID NO: 939863 - RNA, 22 nt, Human
cugagagccuccuguuggcuag

SEQ ID NO: 939864 - RNA, 22 nt, Human
agcccagcaaagggagguucag

SEQ ID NO: 939865 - RNA, 22 nt, Human
auauucguggucaaguaaggcc

SEQ ID NO: 939866 - RNA, 22 nt, Human
ucuguucaagacugaggugaca

SEQ ID NO: 939867 - RNA, 22 nt, Human
uauuuagaaugcguguacgugu

SEQ ID NO: 939868 - RNA, 22 nt, Human
auuuccauacacccauuucuga

SEQ ID NO: 939869 - RNA, 22 nt, Human
uggagcagccaugaugacagag

SEQ ID NO: 939870 - RNA, 22 nt, Human
ucuggcuccaggaccgggcaca

SEQ ID NO: 939871 - RNA, 22 nt, Human
agcucuggaauaaugaugugau

SEQ ID NO: 939872 - RNA, 22 nt, Human
gaaaccucuuagccucucuuug

SEQ ID NO: 939873 - RNA, 21 nt, Human
agcugagcccagaagacuggu

SEQ ID NO: 939874 - RNA, 22 nt, Human
ccuggcaggcuggggacagugc

SEQ ID NO: 939875 - RNA, 23 nt, Human
acucacaaagcaggaucauguug

SEQ ID NO: 939876 - RNA, 23 nt, Human
cacugcagcguggucuggcagga

SEQ ID NO: 939877 - RNA, 22 nt, Human
agggugcagaaggagccuagga

SEQ ID NO: 939878 - RNA, 22 nt, Human
cgaugguucuggcugcuuguau

SEQ ID NO: 939879 - RNA, 22 nt, Human
gccuguccuggaugcucugcaa

SEQ ID NO: 939880 - RNA, 22 nt, Human
gcacugggaaugagggcagcuu

SEQ ID NO: 939881 - RNA, 19 nt, Human
ccauggagagagaugcauu

SEQ ID NO: 939882 - RNA, 22 nt, Human
agaacagaugugggcagaccug

SEQ ID NO: 939883 - RNA, 22 nt, Human
gaagagcuaaaggcacaggcuu

SEQ ID NO: 939884 - RNA, 22 nt, Human
gcaguggggcgcugggaguugg

SEQ ID NO: 939885 - RNA, 22 nt, Human
gggcuggaggaccggccucgga

SEQ ID NO: 939886 - RNA, 22 nt, Human
uuuauuauagugguggggacug

SEQ ID NO: 939887 - RNA, 21 nt, Human
acagaguaguugaaacagaga

SEQ ID NO: 939888 - RNA, 22 nt, Human
gagggcugaagauuguggcccc

SEQ ID NO: 939889 - RNA, 22 nt, Human
ugccucagcugaggccgcucca

SEQ ID NO: 939890 - RNA, 23 nt, Human
ugcugguguuuuugggaccaggg

SEQ ID NO: 939891 - RNA, 22 nt, Human
agccuggccacucagggccuga

SEQ ID NO: 939892 - RNA, 22 nt, Human
uggcagaaguacacaagcaugc

SEQ ID NO: 939893 - RNA, 22 nt, Human
auucuccagcucacuguccaua

SEQ ID NO: 939894 - RNA, 20 nt, Human
cagaccugcacccacuucga

SEQ ID NO: 939895 - RNA, 22 nt, Human
cauugcacaucugagaagagau

SEQ ID NO: 939896 - RNA, 22 nt, Human
caugcacagugauaucugaaga

SEQ ID NO: 939897 - RNA, 22 nt, Human
augggggccugaacaggcaaaa

SEQ ID NO: 939898 - RNA, 22 nt, Human
ggagcugcucagagccaguccc

SEQ ID NO: 939899 - RNA, 22 nt, Human
uuugaacuucuaccugucauau

SEQ ID NO: 939900 - RNA, 22 nt, Human
uaggcacugaggggagcaaggu

SEQ ID NO: 939901 - RNA, 22 nt, Human
ucaggagacaaagggugcggag

SEQ ID NO: 939902 - RNA, 22 nt, Human
agcugcuccuuuccugcaggcg

SEQ ID NO: 939903 - RNA, 22 nt, Human
caggcugggacugaccccugcu

SEQ ID NO: 939904 - RNA, 17 nt, Human
guccugggaggagagag

SEQ ID NO: 939905 - RNA, 22 nt, Human
ccaaagucuggagcagcagagc

SEQ ID NO: 939906 - RNA, 22 nt, Human
gagaggggcccaagccacauag

SEQ ID NO: 939907 - RNA, 21 nt, Human
ucacaucuauguuaagcaaac

SEQ ID NO: 939908 - RNA, 22 nt, Human
cccaggaggaggaaaaagcucg

SEQ ID NO: 939909 - RNA, 22 nt, Human
acccaggacaaaauaaccaggu

SEQ ID NO: 939910 - RNA, 22 nt, Human
cugaggccucuguucaccagaa

SEQ ID NO: 939911 - RNA, 22 nt, Human
uaagccugguucauaauuugcu

SEQ ID NO: 939912 - RNA, 22 nt, Human
ggagggagcauccccuugcuga

SEQ ID NO: 939913 - RNA, 22 nt, Human
uggcuucaucugcagcacugcc

SEQ ID NO: 939914 - RNA, 22 nt, Human
acaugcaugucuaugggcaggu

SEQ ID NO: 939915 - RNA, 22 nt, Human
guggccugccgcaccccaauau

SEQ ID NO: 939916 - RNA, 22 nt, Human
gaaugcacuuccaacaucuauu

SEQ ID NO: 939917 - RNA, 22 nt, Human
gaaaugcaaauucucucucgcu

SEQ ID NO: 939918 - RNA, 22 nt, Human
acuugggauuucagaugcugug

SEQ ID NO: 939919 - RNA, 22 nt, Human
uauaugcagauuuucaucaucg

SEQ ID NO: 939920 - RNA, 22 nt, Human
uggcaccugaacuuagaggugu

SEQ ID NO: 939921 - RNA, 22 nt, Human
aggcucugguuggcaaguaaag

SEQ ID NO: 939922 - RNA, 22 nt, Human
uauauuaacuugugauccugga

SEQ ID NO: 939923 - RNA, 21 nt, Human
cagagguggccugaccucuga

SEQ ID NO: 939924 - RNA, 22 nt, Human
cuggcagcgugagcagcaucca

SEQ ID NO: 939925 - RNA, 22 nt, Human
uggaggaaguggcuggccagaa

SEQ ID NO: 939926 - RNA, 22 nt, Human
gcugcccaguucugcugcugcc

SEQ ID NO: 939927 - RNA, 22 nt, Human
ugcucugcaagcaggagcaaga

SEQ ID NO: 939928 - RNA, 22 nt, Human
cugguuuagcuguaagguuccc

SEQ ID NO: 939929 - RNA, 23 nt, Human
cccauuuucauguuaacuccugg

SEQ ID NO: 939930 - RNA, 22 nt, Human
gcccauggacacccaagugcca

SEQ ID NO: 939931 - RNA, 22 nt, Human
ucuguucagaaauggaagugcc

SEQ ID NO: 939932 - RNA, 22 nt, Human
ggcaugggguguauguggcacg

SEQ ID NO: 939933 - RNA, 22 nt, Human
cccaggauggggcugcaguuau

SEQ ID NO: 939934 - RNA, 22 nt, Human
uuuauuuaaagucguguguuaa

SEQ ID NO: 939935 - RNA, 22 nt, Human
cauggagauaaacugaaauauu

SEQ ID NO: 939936 - RNA, 22 nt, Human
cugcucugaagccaggauucug

SEQ ID NO: 939937 - RNA, 21 nt, Human
ccacucugaguguugaacaga

SEQ ID NO: 939938 - RNA, 22 nt, Human
agugaaaucagguuuugacugc

SEQ ID NO: 939939 - RNA, 22 nt, Human
cuggucugagggcucuugaggc

SEQ ID NO: 939940 - RNA, 19 nt, Human
uagaaugcccacuuaaaaa

SEQ ID NO: 939941 - RNA, 22 nt, Human
ucagagugaccuuacauggucu

SEQ ID NO: 939942 - RNA, 22 nt, Human
uucugggagagaaagggccuug

SEQ ID NO: 939943 - RNA, 22 nt, Human
uuuccucugaugcugacuugga

SEQ ID NO: 939944 - RNA, 22 nt, Human
uaguuuuacuugcgaugauaau

SEQ ID NO: 939945 - RNA, 22 nt, Human
ccuuccaggagucucugcaggu

SEQ ID NO: 939946 - RNA, 22 nt, Human
cagagccaggugguguuggggc

SEQ ID NO: 939947 - RNA, 22 nt, Human
aauuucaagucuugaagaagua

SEQ ID NO: 939948 - RNA, 22 nt, Human
cuagggaguggcagagcuggga

SEQ ID NO: 939949 - RNA, 22 nt, Human
ucuauuuacagaaagcagaauu

SEQ ID NO: 939950 - RNA, 22 nt, Human
guccuggggaauacagaagccg

SEQ ID NO: 939951 - RNA, 22 nt, Human
caggcagccaggggaccugucc

SEQ ID NO: 939952 - RNA, 22 nt, Human
aacagcaugcuggguaacauug

SEQ ID NO: 939953 - RNA, 19 nt, Human
aaaagucuauucaauuaca

SEQ ID NO: 939954 - RNA, 22 nt, Human
caggcugcagcagcaguggccc

SEQ ID NO: 939955 - RNA, 22 nt, Human
cacagguguucuugcagugaaa

SEQ ID NO: 939956 - RNA, 22 nt, Human
ccucagagguuuucauucugua

SEQ ID NO: 939957 - RNA, 22 nt, Human
gcacccagggacuuggcuggcc

SEQ ID NO: 939958 - RNA, 22 nt, Human
ggcugccugugcccaggcacac

SEQ ID NO: 939959 - RNA, 22 nt, Human
gcagagcagugcuugcccagcg

SEQ ID NO: 939960 - RNA, 21 nt, Human
uucuuuccccagaggacuaaa

SEQ ID NO: 939961 - RNA, 22 nt, Human
acagagcuguacaugugccaug

SEQ ID NO: 939962 - RNA, 22 nt, Human
gcuccugucuuggggcacuggc

SEQ ID NO: 939963 - RNA, 22 nt, Human
cuuaagauuugagauaccuaau

SEQ ID NO: 939964 - RNA, 22 nt, Human
cugucugcuagaacaucuauac

SEQ ID NO: 939965 - RNA, 22 nt, Human
gcuggagcuugagaggacaggg

SEQ ID NO: 939966 - RNA, 22 nt, Human
uauguacauaacaugaaaugca

SEQ ID NO: 939967 - RNA, 22 nt, Human
aggaaucccgcaccagcugcug

SEQ ID NO: 939968 - RNA, 22 nt, Human
guguccagggccguguugucuu

SEQ ID NO: 939969 - RNA, 22 nt, Human
gcugccuggcuuuaguccacuu

SEQ ID NO: 939970 - RNA, 22 nt, Human
gccuggagcucggcugagggcg

SEQ ID NO: 939971 - RNA, 22 nt, Human
aagauuuccuucaguagagcua

SEQ ID NO: 939972 - RNA, 22 nt, Human
uauguacauguuaaagggcaaa

SEQ ID NO: 939973 - RNA, 20 nt, Human
ugcucaggauggagaggugu

SEQ ID NO: 939974 - RNA, 22 nt, Human
ccagaagucaggaaugagucuu

SEQ ID NO: 939975 - RNA, 22 nt, Human
uuauagaaggagcauucacuua

SEQ ID NO: 939976 - RNA, 22 nt, Human
uggcacuggcgcaggauggcgg

SEQ ID NO: 939977 - RNA, 22 nt, Human
ggaaagaggauaguggguaggu

SEQ ID NO: 939978 - RNA, 22 nt, Human
agaucaaagccaugagagauuu

SEQ ID NO: 939979 - RNA, 22 nt, Human
acuuucuaggucucaguccuuu

SEQ ID NO: 939980 - RNA, 17 nt, Human
gccaaaggguuccaauc

SEQ ID NO: 939981 - RNA, 22 nt, Human
aaaauauuuuagggccaggaga

SEQ ID NO: 939982 - RNA, 22 nt, Human
agccaacuaggagauuaaggua

SEQ ID NO: 939983 - RNA, 22 nt, Human
cuggagcugucuucacaggccu

SEQ ID NO: 939984 - RNA, 22 nt, Human
agaaauuccuaagguacacaag

SEQ ID NO: 939985 - RNA, 22 nt, Human
cugucuccuccacugcauggga

SEQ ID NO: 939986 - RNA, 22 nt, Human
augcccaaugucacaauuuuug

SEQ ID NO: 939987 - RNA, 22 nt, Human
aggcagugccuggaccccagcu

SEQ ID NO: 939988 - RNA, 22 nt, Human
uaagugcaauguuuuacuuaaa

SEQ ID NO: 939989 - RNA, 22 nt, Human
ugcaccugagaggucucugagg

SEQ ID NO: 939990 - RNA, 22 nt, Human
ucuauacaaguuucacuuugac

SEQ ID NO: 939991 - RNA, 22 nt, Human
agcugucugucuccugaggaga

SEQ ID NO: 939992 - RNA, 22 nt, Human
agguggggaaaccagcgauccc

SEQ ID NO: 939993 - RNA, 22 nt, Human
uugugaguagugccgcaauaaa

SEQ ID NO: 939994 - RNA, 22 nt, Human
cccuggagucagguuggccugg

SEQ ID NO: 939995 - RNA, 22 nt, Human
auuaggacacauacauguacag

SEQ ID NO: 939996 - RNA, 22 nt, Human
ggcagcuaggggcagggaauuc

SEQ ID NO: 939997 - RNA, 22 nt, Human
ucucuccuuaucauuguguuua

SEQ ID NO: 939998 - RNA, 22 nt, Human
gcagaggcuguagggaagguug

SEQ ID NO: 939999 - RNA, 22 nt, Human
uucuuacuaguauguuucagca

SEQ ID NO: 940000 - RNA, 22 nt, Human
auaugugugccauuucagcagu

SEQ ID NO: 940001 - RNA, 22 nt, Human
acuguguggaaauuugugaggg

SEQ ID NO: 940002 - RNA, 20 nt, Human
ugucagugccugaggcacag

SEQ ID NO: 940003 - RNA, 22 nt, Human
auugaaagcauggauuuggauu

SEQ ID NO: 940004 - RNA, 22 nt, Human
gucaggauuauaauccccaugg

SEQ ID NO: 940005 - RNA, 22 nt, Human
cuauuucugccuaaugaccugu

SEQ ID NO: 940006 - RNA, 22 nt, Human
uuugaaagucaaccuuccaguu

SEQ ID NO: 940007 - RNA, 22 nt, Human
caggugggcguggcgagaaggc

SEQ ID NO: 940008 - RNA, 22 nt, Human
cagcaggauuugaaaggaagag

SEQ ID NO: 940009 - RNA, 22 nt, Human
gaaggaaaucugugauuuaugc

SEQ ID NO: 940010 - RNA, 22 nt, Human
agaagccauguuuaguaggaug

SEQ ID NO: 940011 - RNA, 23 nt, Human
caugggagugagaaugccagcuc

SEQ ID NO: 940012 - RNA, 22 nt, Human
uggagcugggguuugaaucugg

SEQ ID NO: 940013 - RNA, 19 nt, Human
uccaggagcaaagccaguu

SEQ ID NO: 940014 - RNA, 19 nt, Human
cccucaggucugagcaguc

SEQ ID NO: 940015 - RNA, 22 nt, Human
agucuucccugugccagagugu

SEQ ID NO: 940016 - RNA, 22 nt, Human
aaugucugagucucuguauccc

SEQ ID NO: 940017 - RNA, 22 nt, Human
augacacaauuuuagagcugaa

SEQ ID NO: 940018 - RNA, 22 nt, Human
cccuggaguagcacugggucgc

SEQ ID NO: 940019 - RNA, 22 nt, Human
ucagggcaccaaaaaagaugcc

SEQ ID NO: 940020 - RNA, 20 nt, Human
uacagaaacaggacuuuugg

SEQ ID NO: 940021 - RNA, 22 nt, Human
acauuucuaucauccuguaaug

SEQ ID NO: 940022 - RNA, 20 nt, Human
aguagcagugugacauugac

SEQ ID NO: 940023 - RNA, 22 nt, Human
aaagucauugcuguuaucaaug

SEQ ID NO: 940024 - RNA, 22 nt, Human
gagaggcagaggccugaaaccg

SEQ ID NO: 940025 - RNA, 22 nt, Human
ugugcuucagguugucgccacg

SEQ ID NO: 940026 - RNA, 21 nt, Human
auacuuugaauuacagccuug

SEQ ID NO: 940027 - RNA, 22 nt, Human
ucucuggagggcuccaggcggg

SEQ ID NO: 940028 - RNA, 22 nt, Human
agggcagccaugagccuucagg

SEQ ID NO: 940029 - RNA, 22 nt, Human
ggucucagacuggcaggcagug

SEQ ID NO: 940030 - RNA, 22 nt, Human
gcauccagucuuggcuccugga

SEQ ID NO: 940031 - RNA, 22 nt, Human
ucuggcccagccccugagguca

SEQ ID NO: 940032 - RNA, 22 nt, Human
aaauauagugacacuuauaguc

SEQ ID NO: 940033 - RNA, 22 nt, Human
uggggaagggcacccuggagac

SEQ ID NO: 940034 - RNA, 21 nt, Human
aggaaguggccagauugggaa

SEQ ID NO: 940035 - RNA, 22 nt, Human
auguagcagauauuugugcaca

SEQ ID NO: 940036 - RNA, 22 nt, Human
gcugucugcaucucuagagcuu

SEQ ID NO: 940037 - RNA, 22 nt, Human
ugccuggguucccaccccaaag

SEQ ID NO: 940038 - RNA, 22 nt, Human
gaggcagcugggauacaaggga

SEQ ID NO: 940039 - RNA, 22 nt, Human
gcuccugggcccugggcuaacu

SEQ ID NO: 940040 - RNA, 22 nt, Human
gagauucuguagucaggcaucu

SEQ ID NO: 940041 - RNA, 22 nt, Human
uguaagauauucagcuuauuga

SEQ ID NO: 940042 - RNA, 22 nt, Human
uaaagugcuggauuugaguaaa

SEQ ID NO: 940043 - RNA, 22 nt, Human
acagaggucauggagaguucuc

SEQ ID NO: 940044 - RNA, 22 nt, Human
ucagcugccuuucccaugcuag

SEQ ID NO: 940045 - RNA, 22 nt, Human
auacauacauguaugcacauac

SEQ ID NO: 940046 - RNA, 22 nt, Human
aaauguuuugcucccauguggu

SEQ ID NO: 940047 - RNA, 22 nt, Human
ugugauauuugaguauugucaa

SEQ ID NO: 940048 - RNA, 22 nt, Human
guccucuggaagaugaguucuu

SEQ ID NO: 940049 - RNA, 19 nt, Human
ggccaggcugacugugguc

SEQ ID NO: 940050 - RNA, 22 nt, Human
uccugaggcucacuuugaaugu

SEQ ID NO: 940051 - RNA, 22 nt, Human
ucccagggcagcuguccagaag

SEQ ID NO: 940052 - RNA, 22 nt, Human
ccugcugugaagccaggccugu

SEQ ID NO: 940053 - RNA, 22 nt, Human
uaucuguuaggaucagagcugg

SEQ ID NO: 940054 - RNA, 22 nt, Human
caaaugcauagaaagaugaaac

SEQ ID NO: 940055 - RNA, 22 nt, Human
ucauucuuuaccaaguugucac

SEQ ID NO: 940056 - RNA, 23 nt, Human
uuucucauccagagagucagucc

SEQ ID NO: 940057 - RNA, 22 nt, Human
aucuccaggcauuucaagagac

SEQ ID NO: 940058 - RNA, 22 nt, Human
cucugagaaagcugugagcuaa

SEQ ID NO: 940059 - RNA, 22 nt, Human
ucagggcaaaagggaaaccauu

SEQ ID NO: 940060 - RNA, 22 nt, Human
uuauuuuuaaaaguucacacag

SEQ ID NO: 940061 - RNA, 22 nt, Human
ucuggcuccacucugugcaugc

SEQ ID NO: 940062 - RNA, 22 nt, Human
uccugggcgguuaugugaucug

SEQ ID NO: 940063 - RNA, 22 nt, Human
aggcagcuuucagugucucuca

SEQ ID NO: 940064 - RNA, 22 nt, Human
gcugccaguguggcaugaugca

SEQ ID NO: 940065 - RNA, 22 nt, Human
ggcauguuucaucacaucaaga

SEQ ID NO: 940066 - RNA, 22 nt, Human
agggccugugcuuccugagaua

SEQ ID NO: 940067 - RNA, 22 nt, Human
uauguacaugauuucauuugcu

SEQ ID NO: 940068 - RNA, 22 nt, Human
augggaguuuucucugaugcuc

SEQ ID NO: 940069 - RNA, 22 nt, Human
cuggcucacuagcccugcccug

SEQ ID NO: 940070 - RNA, 22 nt, Human
ugaugcugcugggaguggugcu

SEQ ID NO: 940071 - RNA, 22 nt, Human
agcagcuguggaaaaguaacua

SEQ ID NO: 940072 - RNA, 19 nt, Human
ucacaggcaucuccccaga

SEQ ID NO: 940073 - RNA, 22 nt, Human
gcucccuccaugaggcagaccg

SEQ ID NO: 940074 - RNA, 22 nt, Human
caugcuuugggucagaaaugcc

SEQ ID NO: 940075 - RNA, 22 nt, Human
gaggcagcuuaggguacugacu

SEQ ID NO: 940076 - RNA, 22 nt, Human
agggccugggauguccuccuag

SEQ ID NO: 940077 - RNA, 22 nt, Human
ugugccuucucaguccugcuca

SEQ ID NO: 940078 - RNA, 22 nt, Human
caaaaguagugaaguuguacau

SEQ ID NO: 940079 - RNA, 18 nt, Human
ccagguggugacagagau

SEQ ID NO: 940080 - RNA, 21 nt, Human
ugagccaggcugacggcugug

SEQ ID NO: 940081 - RNA, 22 nt, Human
acaccauacucauguugguucc

SEQ ID NO: 940082 - RNA, 22 nt, Human
cuggagccccaggcugugcaga

SEQ ID NO: 940083 - RNA, 22 nt, Human
caggauagaaaggccauggagu

SEQ ID NO: 940084 - RNA, 22 nt, Human
uguguacucaauugagccauuu

SEQ ID NO: 940085 - RNA, 22 nt, Human
gugagggguggcugagcaguuu

SEQ ID NO: 940086 - RNA, 22 nt, Human
aagauguaucuuuccuuuaauu

SEQ ID NO: 940087 - RNA, 22 nt, Human
cugggccagauccagccucaca

SEQ ID NO: 940088 - RNA, 20 nt, Human
uguugauuggugucaucuca

SEQ ID NO: 940089 - RNA, 22 nt, Human
uuaaaucaggcaucauuucagu

SEQ ID NO: 940090 - RNA, 22 nt, Human
agaaaugacaagacugaucagg

SEQ ID NO: 940091 - RNA, 19 nt, Human
acagaaauguaagugagac

SEQ ID NO: 940092 - RNA, 23 nt, Human
ucucaagaggaagcagggcucau

SEQ ID NO: 940093 - RNA, 22 nt, Human
guacuuccguggacuaauuguu

SEQ ID NO: 940094 - RNA, 22 nt, Human
ucuggccaguagauguggguug

SEQ ID NO: 940095 - RNA, 22 nt, Human
gcuucucucucagacugcaagc

SEQ ID NO: 940096 - RNA, 22 nt, Human
ugaagcugugggcaguggagcc

SEQ ID NO: 940097 - RNA, 20 nt, Human
gccuguccugagugucaugg

SEQ ID NO: 940098 - RNA, 22 nt, Human
gcagcccagguguagcucuuug

SEQ ID NO: 940099 - RNA, 22 nt, Human
cauggcagagaaggggaacugg

SEQ ID NO: 940100 - RNA, 22 nt, Human
ugaggccagcuucagcagugga

SEQ ID NO: 940101 - RNA, 22 nt, Human
ggggcagaaguagugccccuga

SEQ ID NO: 940102 - RNA, 22 nt, Human
ggccagcucuuguccacggagg

SEQ ID NO: 940103 - RNA, 22 nt, Human
uuugcauugccucugacuuaug

SEQ ID NO: 940104 - RNA, 22 nt, Human
ucagacaguuugcagugugccu

SEQ ID NO: 940105 - RNA, 22 nt, Human
caggccugaguguggaagucuu

SEQ ID NO: 940106 - RNA, 22 nt, Human
agguaacacuacuuaguauacu

SEQ ID NO: 940107 - RNA, 22 nt, Human
caggagggcccgagacucuucc

SEQ ID NO: 940108 - RNA, 22 nt, Human
uugaacuguaagcaugucugcc

SEQ ID NO: 940109 - RNA, 20 nt, Human
cccaggaguuugcucuuacu

SEQ ID NO: 940110 - RNA, 22 nt, Human
aggcagugcagaguccucuucu

SEQ ID NO: 940111 - RNA, 22 nt, Human
cagugucuccagaugcuccaau

SEQ ID NO: 940112 - RNA, 22 nt, Human
aguuuaugaaacacagauuuga

SEQ ID NO: 940113 - RNA, 22 nt, Human
uuucacaaacugaggagacaau

SEQ ID NO: 940114 - RNA, 22 nt, Human
caggcugcagugcaguggcuau

SEQ ID NO: 940115 - RNA, 22 nt, Human
ggucauugucagagccuguacu

SEQ ID NO: 940116 - RNA, 22 nt, Human
uacaucuauacugaucuacauu

SEQ ID NO: 940117 - RNA, 22 nt, Human
ucucagaguuuagagcugagcc

SEQ ID NO: 940118 - RNA, 22 nt, Human
auauuucuggggguguguuucu

SEQ ID NO: 940119 - RNA, 22 nt, Human
aaacacuagcaggaagcacuga

SEQ ID NO: 940120 - RNA, 22 nt, Human
aauucuauguucuugaguaaga

SEQ ID NO: 940121 - RNA, 22 nt, Human
acauaaauagauuauugggagg

SEQ ID NO: 940122 - RNA, 22 nt, Human
gccuggucucuuucaugucagu

SEQ ID NO: 940123 - RNA, 22 nt, Human
uggugguuaugcgcuuuguggg

SEQ ID NO: 940124 - RNA, 22 nt, Human
ggcuauguggucauauaagaua

SEQ ID NO: 940125 - RNA, 22 nt, Human
ggguggggcccaggaaaucuau

SEQ ID NO: 940126 - RNA, 22 nt, Human
uguuauugagguuacuuauaag

SEQ ID NO: 940127 - RNA, 22 nt, Human
aauagcucacugauuucucuuu

SEQ ID NO: 940128 - RNA, 22 nt, Human
aaaucugggagcagcucggcca

SEQ ID NO: 940129 - RNA, 22 nt, Human
ggcucuggucagugaggggccu

SEQ ID NO: 940130 - RNA, 22 nt, Human
ucuucacagaugcauauacuuc

SEQ ID NO: 940131 - RNA, 22 nt, Human
gcagaagggaauaaggagcuuu

SEQ ID NO: 940132 - RNA, 22 nt, Human
accagcagaguugaggaggaca

SEQ ID NO: 940133 - RNA, 20 nt, Human
aagcagaagcugcucucagc

SEQ ID NO: 940134 - RNA, 22 nt, Human
ugagccaggaguuugaggcugu

SEQ ID NO: 940135 - RNA, 22 nt, Human
uuagcugcauuaucaaaguuau

SEQ ID NO: 940136 - RNA, 22 nt, Human
cuccuguauguugggcuucaca

SEQ ID NO: 940137 - RNA, 22 nt, Human
cucacugucuguacuagcugau

SEQ ID NO: 940138 - RNA, 22 nt, Human
ucucagagggaaacaugaguga

SEQ ID NO: 940139 - RNA, 22 nt, Human
guccuggguccccgcaggucag

SEQ ID NO: 940140 - RNA, 22 nt, Human
ggguggcacaggugcagagggu

SEQ ID NO: 940141 - RNA, 22 nt, Human
ucucagggccccaaaggcuagu

SEQ ID NO: 940142 - RNA, 22 nt, Human
uauguuuaguauccauuuucag

SEQ ID NO: 940143 - RNA, 22 nt, Human
agucuuaacuaugcaaguacua

SEQ ID NO: 940144 - RNA, 22 nt, Human
gcucaggauuucauccaugugu

SEQ ID NO: 940145 - RNA, 22 nt, Human
acagcagcacuauugacauuuu

SEQ ID NO: 940146 - RNA, 18 nt, Human
gguggcaggucagaugcc

SEQ ID NO: 940147 - RNA, 22 nt, Human
auagauuugaauuuaagacuug

SEQ ID NO: 940148 - RNA, 22 nt, Human
cccauggcuuaggagggagugu

SEQ ID NO: 940149 - RNA, 22 nt, Human
ugaaaugacagucuuaagcucu

SEQ ID NO: 940150 - RNA, 22 nt, Human
guuuuccuucucagccauugcc

SEQ ID NO: 940151 - RNA, 21 nt, Human
ucugagagcaacugcccuuua

SEQ ID NO: 940152 - RNA, 22 nt, Human
gugcugcagagucucgugccgc

SEQ ID NO: 940153 - RNA, 22 nt, Human
gaaauauuucucuugagccccu

SEQ ID NO: 940154 - RNA, 22 nt, Human
uuuuuaguagagguggguuuca

SEQ ID NO: 940155 - RNA, 22 nt, Human
ucuuuccuacuuuauugugaac

SEQ ID NO: 940156 - RNA, 22 nt, Human
aggcccuguccauggugcugaa

SEQ ID NO: 940157 - RNA, 22 nt, Human
gguagcacauugcauuaggaga

SEQ ID NO: 940158 - RNA, 22 nt, Human
agggggcaucagguccuggcuc

SEQ ID NO: 940159 - RNA, 22 nt, Human
ggaggcccagagaggugaagug

SEQ ID NO: 940160 - RNA, 22 nt, Human
gccaccagguuagauccagccu

SEQ ID NO: 940161 - RNA, 22 nt, Human
aagauucucagagugaaagaau

SEQ ID NO: 940162 - RNA, 22 nt, Human
cugggacaugauagaaacagau

SEQ ID NO: 940163 - RNA, 21 nt, Human
gcaaccagaccacagggcagu

SEQ ID NO: 940164 - RNA, 22 nt, Human
guggcccucugauagggucagg

SEQ ID NO: 940165 - RNA, 19 nt, Human
guggccucggagcgcgcgg

SEQ ID NO: 940166 - RNA, 22 nt, Human
gaaggagagagacaucgucccu

SEQ ID NO: 940167 - RNA, 22 nt, Human
gcagggcaaugaucccgagagg

SEQ ID NO: 940168 - RNA, 22 nt, Human
gaggguggguuucuugcacguc

SEQ ID NO: 940169 - RNA, 22 nt, Human
cagcuagcuaagaaggccagag

SEQ ID NO: 940170 - RNA, 22 nt, Human
uuccuggcaugaaaaauaucac

SEQ ID NO: 940171 - RNA, 22 nt, Human
aaauuccauuaugauaauuucg

SEQ ID NO: 940172 - RNA, 22 nt, Human
gagagcugcaagguagggcggg

SEQ ID NO: 940173 - RNA, 22 nt, Human
acuuggcaaguaucuauaaagu

SEQ ID NO: 940174 - RNA, 21 nt, Human
uaaggccaagucuauuucugu

SEQ ID NO: 940175 - RNA, 22 nt, Human
ugcccaggauugugaggucagg

SEQ ID NO: 940176 - RNA, 22 nt, Human
uauaacacucagaaagaaucau

SEQ ID NO: 940177 - RNA, 17 nt, Human
ucauuuguugugacuag

SEQ ID NO: 940178 - RNA, 22 nt, Human
accauuuuggguauuuucagag

SEQ ID NO: 940179 - RNA, 22 nt, Human
uucaggaucauuuguuuuaucu

SEQ ID NO: 940180 - RNA, 22 nt, Human
auucuucauuguugauucaugu

SEQ ID NO: 940181 - RNA, 22 nt, Human
cuucccagacgggguggcagcc

SEQ ID NO: 940182 - RNA, 22 nt, Human
cuggcugugcagucuuccagaa

SEQ ID NO: 940183 - RNA, 22 nt, Human
ucugcugugauuugcuaccugu

SEQ ID NO: 940184 - RNA, 22 nt, Human
cagguggcuucucccuaggcca

SEQ ID NO: 940185 - RNA, 22 nt, Human
ggagcagcacugauuagcgguu

SEQ ID NO: 940186 - RNA, 19 nt, Human
ucucacaguuuccuugccu

SEQ ID NO: 940187 - RNA, 22 nt, Human
ucccagagcugauaagccuuua

SEQ ID NO: 940188 - RNA, 22 nt, Human
cuggaggcugaguugggucucc

SEQ ID NO: 940189 - RNA, 22 nt, Human
aggccuguuccuuccugggcac

SEQ ID NO: 940190 - RNA, 22 nt, Human
agccucugcuggcccuggcacu

SEQ ID NO: 940191 - RNA, 19 nt, Human
ccugcagggaugagagguu

SEQ ID NO: 940192 - RNA, 22 nt, Human
uacauauuugucuuuguacugu

SEQ ID NO: 940193 - RNA, 22 nt, Human
gcucugcuguguuuguucagca

SEQ ID NO: 940194 - RNA, 22 nt, Human
cugaaggagaaggccacuguuc

SEQ ID NO: 940195 - RNA, 22 nt, Human
aagcugcccaagacugaagcau

SEQ ID NO: 940196 - RNA, 22 nt, Human
ucuuaaagccaagcauaaacca

SEQ ID NO: 940197 - RNA, 22 nt, Human
gcuccuggugcuguagagauuu

SEQ ID NO: 940198 - RNA, 22 nt, Human
uggccaggcagguagaacggcc

SEQ ID NO: 940199 - RNA, 22 nt, Human
ccagugcuuccaggaauacggu

SEQ ID NO: 940200 - RNA, 22 nt, Human
auaguauuuaauaguuagcuca

SEQ ID NO: 940201 - RNA, 22 nt, Human
gcacugggggcagcagugaggg

SEQ ID NO: 940202 - RNA, 22 nt, Human
aggcucugcagaccccagcugu

SEQ ID NO: 940203 - RNA, 22 nt, Human
cagagcugcaaaugccccuccg

SEQ ID NO: 940204 - RNA, 22 nt, Human
gcuccucugucaaaugagagug

SEQ ID NO: 940205 - RNA, 22 nt, Human
aaagauuucagaagccugugcc

SEQ ID NO: 940206 - RNA, 22 nt, Human
ggaugcaggggcagcagagccu

SEQ ID NO: 940207 - RNA, 22 nt, Human
uucauucuugucuuuguauagu

SEQ ID NO: 940208 - RNA, 22 nt, Human
agccagagagccccagguucua

SEQ ID NO: 940209 - RNA, 22 nt, Human
agaguguuuuucugucaaggac

SEQ ID NO: 940210 - RNA, 22 nt, Human
agaguucugcucuucucaguga

SEQ ID NO: 940211 - RNA, 22 nt, Human
aaggacuccaauucuuucaucu

SEQ ID NO: 940212 - RNA, 22 nt, Human
agcucauggugcuaucucaggg

SEQ ID NO: 940213 - RNA, 22 nt, Human
cugggcacuuuggggagccuac

SEQ ID NO: 940214 - RNA, 20 nt, Human
gcugccuuguccugcuuggu

SEQ ID NO: 940215 - RNA, 22 nt, Human
agucccagugacuuggccagaa

SEQ ID NO: 940216 - RNA, 22 nt, Human
gucuucuuuucagucugcuugu

SEQ ID NO: 940217 - RNA, 22 nt, Human
uuuccucuucuggcaggcaggg

SEQ ID NO: 940218 - RNA, 22 nt, Human
acuguauugguuuucuauugcu

SEQ ID NO: 940219 - RNA, 22 nt, Human
agcagcuggggccugugacgau

SEQ ID NO: 940220 - RNA, 22 nt, Human
aggugagggugccagugcaugg

SEQ ID NO: 940221 - RNA, 22 nt, Human
cagaaauggagcccaggaaucu

SEQ ID NO: 940222 - RNA, 22 nt, Human
gcugauccuuuuaugucuagcu

SEQ ID NO: 940223 - RNA, 22 nt, Human
agugugggugagggaggcccuc

SEQ ID NO: 940224 - RNA, 22 nt, Human
auguaacuucugugaaucugac

SEQ ID NO: 940225 - RNA, 22 nt, Human
aaaaaugaauucuucaguggca

SEQ ID NO: 940226 - RNA, 22 nt, Human
ucaguuuuguauguuguaaguc

SEQ ID NO: 940227 - RNA, 22 nt, Human
aagggcaggugggcauuucugg

SEQ ID NO: 940228 - RNA, 22 nt, Human
acugugugcccugacgccaggg

SEQ ID NO: 940229 - RNA, 22 nt, Human
gcucugcuugcaucaugacugc

SEQ ID NO: 940230 - RNA, 22 nt, Human
uucaagguaugguagcugguca

SEQ ID NO: 940231 - RNA, 22 nt, Human
ucacugcucuccaauguggagu

SEQ ID NO: 940232 - RNA, 22 nt, Human
gccuuuuuuguugcucugucac

SEQ ID NO: 940233 - RNA, 22 nt, Human
cagccccucccucaggcaggug

SEQ ID NO: 940234 - RNA, 22 nt, Human
ccucugccugcacaucauccug

SEQ ID NO: 940235 - RNA, 22 nt, Human
cagggccucauccucagagauu

SEQ ID NO: 940236 - RNA, 22 nt, Human
ucacugcugcugccaugaugga

SEQ ID NO: 940237 - RNA, 22 nt, Human
agcacaggaccaaggaagcugu

SEQ ID NO: 940238 - RNA, 22 nt, Human
uaaaugugagugaugcggugaa

SEQ ID NO: 940239 - RNA, 17 nt, Human
agaggcagauacuugga

SEQ ID NO: 940240 - RNA, 22 nt, Human
ugcagcugaggccagcuaugcc

SEQ ID NO: 940241 - RNA, 22 nt, Human
auuggcaguuagugacgaggcu

SEQ ID NO: 940242 - RNA, 22 nt, Human
gcaaaaaaugcuuguugcuuag

SEQ ID NO: 940243 - RNA, 22 nt, Human
cagggugccuguccucagcaaa

SEQ ID NO: 940244 - RNA, 22 nt, Human
auacuuuggggguuaguguaga

SEQ ID NO: 940245 - RNA, 22 nt, Human
ggaccugccagaacucaggcua

SEQ ID NO: 940246 - RNA, 22 nt, Human
aggggagcuaacaccagagccc

SEQ ID NO: 940247 - RNA, 22 nt, Human
aguacuucagaggcugcccagg

SEQ ID NO: 940248 - RNA, 22 nt, Human
agucugcuuccuggagaacuca

SEQ ID NO: 940249 - RNA, 21 nt, Human
gugucaugguugacuuuggca

SEQ ID NO: 940250 - RNA, 22 nt, Human
ccugagccucuugcacgcucag

SEQ ID NO: 940251 - RNA, 22 nt, Human
accucugcaaugcaaugucaug

SEQ ID NO: 940252 - RNA, 22 nt, Human
aggggagguggcagaaaugugc

SEQ ID NO: 940253 - RNA, 18 nt, Human
gaggccugagaaccaggu

SEQ ID NO: 940254 - RNA, 20 nt, Human
auuucaguguuugcaauuuc

SEQ ID NO: 940255 - RNA, 22 nt, Human
ucauccaguucacauggugagu

SEQ ID NO: 940256 - RNA, 22 nt, Human
uuagucaauagugaauauagag

SEQ ID NO: 940257 - RNA, 22 nt, Human
aguaucaaggaucuccagcacc

SEQ ID NO: 940258 - RNA, 22 nt, Human
ccugcuggccaguggagggcug

SEQ ID NO: 940259 - RNA, 22 nt, Human
ugcugaugcuguucuguuagga

SEQ ID NO: 940260 - RNA, 22 nt, Human
caaggaaaaagcgagcucgggg

SEQ ID NO: 940261 - RNA, 22 nt, Human
agcaggcuuguuaugucugaga

SEQ ID NO: 940262 - RNA, 22 nt, Human
cuggucaaggagagucucugca

SEQ ID NO: 940263 - RNA, 22 nt, Human
uccaguggugguuugaagggca

SEQ ID NO: 940264 - RNA, 22 nt, Human
acugcaggagacacagcugcug

SEQ ID NO: 940265 - RNA, 22 nt, Human
ccugggcuggaguacagcagug

SEQ ID NO: 940266 - RNA, 22 nt, Human
ugauuucauaguauauacauga

SEQ ID NO: 940267 - RNA, 22 nt, Human
uggggugggcaugcgcuguccu

SEQ ID NO: 940268 - RNA, 22 nt, Human
uaauaaaugaaagugcuggcau

SEQ ID NO: 940269 - RNA, 22 nt, Human
ugauucacagacuucacaaggc

SEQ ID NO: 940270 - RNA, 22 nt, Human
uugaacagcuguuacauuguua

SEQ ID NO: 940271 - RNA, 22 nt, Human
ccagccuggacugggucuugug

SEQ ID NO: 940272 - RNA, 22 nt, Human
gggcacuguacacugugcaugg

SEQ ID NO: 940273 - RNA, 22 nt, Human
agacaaagacagcaucucaggu

SEQ ID NO: 940274 - RNA, 22 nt, Human
ugcagcaggcacaggacggaag

SEQ ID NO: 940275 - RNA, 22 nt, Human
uugcaaaugaccauugccacau

SEQ ID NO: 940276 - RNA, 22 nt, Human
ugcucuguauucuauggcaguu

SEQ ID NO: 940277 - RNA, 20 nt, Human
caggaugauuggacacgaug

SEQ ID NO: 940278 - RNA, 22 nt, Human
ggcugccugcucaggugcggcg

SEQ ID NO: 940279 - RNA, 22 nt, Human
ccugccugguguaagucuaagg

SEQ ID NO: 940280 - RNA, 22 nt, Human
cuuaacagagagaaguguugcu

SEQ ID NO: 940281 - RNA, 22 nt, Human
cugugcuuccaggauggcagcu

SEQ ID NO: 940282 - RNA, 22 nt, Human
guggccaaggcagagaaagagc

SEQ ID NO: 940283 - RNA, 22 nt, Human
ucccagacaaucauuggccacc

SEQ ID NO: 940284 - RNA, 22 nt, Human
gcuccagguauuugcccuuuua

SEQ ID NO: 940285 - RNA, 22 nt, Human
ccaggccuggaccaugccaggg

SEQ ID NO: 940286 - RNA, 21 nt, Human
agagagaaggccauauggucc

SEQ ID NO: 940287 - RNA, 22 nt, Human
caggcuggagugcaguugugca

SEQ ID NO: 940288 - RNA, 22 nt, Human
agggcagcacaaggcauggacu

SEQ ID NO: 940289 - RNA, 21 nt, Human
cucaaagaccaaaaguguaga

SEQ ID NO: 940290 - RNA, 22 nt, Human
gaaggcaggcuucugauuaggu

SEQ ID NO: 940291 - RNA, 22 nt, Human
ucagggcagguuaacuugggug

SEQ ID NO: 940292 - RNA, 22 nt, Human
cagagcugagaauguugaugcu

SEQ ID NO: 940293 - RNA, 22 nt, Human
cuggagccauguauagccuaug

SEQ ID NO: 940294 - RNA, 22 nt, Human
ggcagacaccuuuaugucuaau

SEQ ID NO: 940295 - RNA, 22 nt, Human
gcccagcacagcuggaagaguc

SEQ ID NO: 940296 - RNA, 22 nt, Human
uucccucucacuuaaagcuugg

SEQ ID NO: 940297 - RNA, 22 nt, Human
uuuuagcacuaagugauaugcu

SEQ ID NO: 940298 - RNA, 22 nt, Human
aacacugcugcuggguucugug

SEQ ID NO: 940299 - RNA, 22 nt, Human
cagaagcauuccagcaaauagu

SEQ ID NO: 940300 - RNA, 22 nt, Human
ggcagggcuugucucugugaug

SEQ ID NO: 940301 - RNA, 22 nt, Human
uguguuccugccuggcucuggu

SEQ ID NO: 940302 - RNA, 22 nt, Human
uccaagggcuuuggcgugaagu

SEQ ID NO: 940303 - RNA, 22 nt, Human
acagucauuagauacaaugucu

SEQ ID NO: 940304 - RNA, 21 nt, Human
ggccugaguauaggacaggcc

SEQ ID NO: 940305 - RNA, 22 nt, Human
uagccggguguugugucaugca

SEQ ID NO: 940306 - RNA, 20 nt, Human
cacaggcuauaugagagcca

SEQ ID NO: 940307 - RNA, 22 nt, Human
uggcagcauguuauguaaggaa

SEQ ID NO: 940308 - RNA, 22 nt, Human
cuugaaagauuuggccucugug

SEQ ID NO: 940309 - RNA, 22 nt, Human
uucucugaaggccaugcucacu

SEQ ID NO: 940310 - RNA, 18 nt, Human
gcagcuagccaggggggc

SEQ ID NO: 940311 - RNA, 22 nt, Human
cuuaaagaaauugaggagagga

SEQ ID NO: 940312 - RNA, 22 nt, Human
gucuccugagccuugacugcaa

SEQ ID NO: 940313 - RNA, 22 nt, Human
agcauuuaggagaauuugagaa

SEQ ID NO: 940314 - RNA, 19 nt, Human
cuccucagucccagagguc

SEQ ID NO: 940315 - RNA, 22 nt, Human
ucucagagaucuuucugcaugu

SEQ ID NO: 940316 - RNA, 22 nt, Human
ugugaaauucuugaaaugcaca

SEQ ID NO: 940317 - RNA, 22 nt, Human
aggucauuccagccauuccccu

SEQ ID NO: 940318 - RNA, 22 nt, Human
gcuguucccauguggggcucag

SEQ ID NO: 940319 - RNA, 22 nt, Human
gcagggccagggcucaggcugu

SEQ ID NO: 940320 - RNA, 22 nt, Human
ucacauuuuaucuauuuuaagu

SEQ ID NO: 940321 - RNA, 22 nt, Human
aggcaggcucaaugcccagucu

SEQ ID NO: 940322 - RNA, 22 nt, Human
uggcugaauaaaauaugguguu

SEQ ID NO: 940323 - RNA, 22 nt, Human
ucagaaauacuaucagcuuuug

SEQ ID NO: 940324 - RNA, 22 nt, Human
ugcaauaacccaguaucuguga

SEQ ID NO: 940325 - RNA, 22 nt, Human
cuuacauuuaaucaugugucau

SEQ ID NO: 940326 - RNA, 22 nt, Human
guuauaaauaccuaauaggauu

SEQ ID NO: 940327 - RNA, 22 nt, Human
gcacugaacuuuaaucauuucu

SEQ ID NO: 940328 - RNA, 22 nt, Human
ucagagcuuaucucuugcugga

SEQ ID NO: 940329 - RNA, 23 nt, Human
uggagcugacagucagagggagg

SEQ ID NO: 940330 - RNA, 22 nt, Human
aggggugaaggcccgauaggag

SEQ ID NO: 940331 - RNA, 22 nt, Human
gaggccuggugugucucccgcu

SEQ ID NO: 940332 - RNA, 22 nt, Human
guggagcccugguagggacccc

SEQ ID NO: 940333 - RNA, 22 nt, Human
ugagcccaggaguuggaggcug

SEQ ID NO: 940334 - RNA, 22 nt, Human
uuuauuuauaagccacuugcug

SEQ ID NO: 940335 - RNA, 22 nt, Human
acaaaaguguaggaauuccuua

SEQ ID NO: 940336 - RNA, 22 nt, Human
acuguucaucucuuagaaagua

SEQ ID NO: 940337 - RNA, 22 nt, Human
ccaggcugggcggggaaccugg

SEQ ID NO: 940338 - RNA, 22 nt, Human
ccaccagcuuugccacccugcu

SEQ ID NO: 940339 - RNA, 22 nt, Human
agaggcacuccagccacugguc

SEQ ID NO: 940340 - RNA, 22 nt, Human
uuccaagaguaaauucaaauug

SEQ ID NO: 940341 - RNA, 22 nt, Human
uuugaaguucccccauaucaga

SEQ ID NO: 940342 - RNA, 22 nt, Human
uuuccuuccuugcuagccugag

SEQ ID NO: 940343 - RNA, 22 nt, Human
agccacagucuguagccagcuu

SEQ ID NO: 940344 - RNA, 22 nt, Human
gcccgcagagaucuuuaacaaa

SEQ ID NO: 940345 - RNA, 22 nt, Human
aaggcacugacugugcagggga

SEQ ID NO: 940346 - RNA, 22 nt, Human
agcucccagaaggcccugcgcc

SEQ ID NO: 940347 - RNA, 18 nt, Human
gagcugccauauuuaguu

SEQ ID NO: 940348 - RNA, 22 nt, Human
uaaaugugaccuucauuuuaua

SEQ ID NO: 940349 - RNA, 22 nt, Human
uaaggccagccagcaaaucugu

SEQ ID NO: 940350 - RNA, 22 nt, Human
ucucauguauugcccuggugug

SEQ ID NO: 940351 - RNA, 22 nt, Human
aggcagcagugauaagauagga

SEQ ID NO: 940352 - RNA, 22 nt, Human
uuugacaugcaaagcacuuuag

SEQ ID NO: 940353 - RNA, 20 nt, Human
uauauaggaaauauuguguu

SEQ ID NO: 940354 - RNA, 21 nt, Human
aagggagauaggaaucaggcc

SEQ ID NO: 940355 - RNA, 22 nt, Human
gagggauggugugagaggcuca

SEQ ID NO: 940356 - RNA, 22 nt, Human
aggcagcuucugauuagcagcg

SEQ ID NO: 940357 - RNA, 22 nt, Human
agucucugcaugccugcugugc

SEQ ID NO: 940358 - RNA, 22 nt, Human
uaaaaaguugaaaggacuuauc

SEQ ID NO: 940359 - RNA, 22 nt, Human
auauuaaugagcaaguaaguga

SEQ ID NO: 940360 - RNA, 22 nt, Human
uaacacacugaaggugagaugg

SEQ ID NO: 940361 - RNA, 18 nt, Human
gcagagugcgucucugug

SEQ ID NO: 940362 - RNA, 22 nt, Human
cccugcagaaccacagacaaac

SEQ ID NO: 940363 - RNA, 22 nt, Human
gaggagagaacauuccuccaua

SEQ ID NO: 940364 - RNA, 22 nt, Human
cugccaggcacgugcagcauca

SEQ ID NO: 940365 - RNA, 22 nt, Human
uccuggcccaaucugcccauga

SEQ ID NO: 940366 - RNA, 22 nt, Human
cucagaaguucagccuagagua

SEQ ID NO: 940367 - RNA, 22 nt, Human
ggccagggggcuucagacucca

SEQ ID NO: 940368 - RNA, 22 nt, Human
aguauacauauauuagccuucg

SEQ ID NO: 940369 - RNA, 22 nt, Human
gggcuggaucuccugcaggcag

SEQ ID NO: 940370 - RNA, 22 nt, Human
acauuucucccugcaugccugc

SEQ ID NO: 940371 - RNA, 22 nt, Human
ugcagaggagcuggaaggcugg

SEQ ID NO: 940372 - RNA, 22 nt, Human
gugcuuccccaagccacagccu

SEQ ID NO: 940373 - RNA, 22 nt, Human
acuguucaagcaaaugacauug

SEQ ID NO: 940374 - RNA, 22 nt, Human
ucccagagcccaaguuggagag

SEQ ID NO: 940375 - RNA, 22 nt, Human
gugggccuugcagggugcaggg

SEQ ID NO: 940376 - RNA, 22 nt, Human
guggccaggccgacugccaggc

SEQ ID NO: 940377 - RNA, 22 nt, Human
uggaaggggagcuggaaagggg

SEQ ID NO: 940378 - RNA, 22 nt, Human
ggucugaguagagggcuggcga

SEQ ID NO: 940379 - RNA, 22 nt, Human
uacaaaguuugggguccucaaa

SEQ ID NO: 940380 - RNA, 22 nt, Human
uaguuacagcaggcaggauaua

SEQ ID NO: 940381 - RNA, 22 nt, Human
ggcuggcaagucagugcugaug

SEQ ID NO: 940382 - RNA, 22 nt, Human
guuccaguaugauuccacccau

SEQ ID NO: 940383 - RNA, 22 nt, Human
agcugccaaguuggaguagcaa

SEQ ID NO: 940384 - RNA, 22 nt, Human
aagauuucuuacuuauugaugc

SEQ ID NO: 940385 - RNA, 22 nt, Human
ccucugcucccuggugucugag

SEQ ID NO: 940386 - RNA, 22 nt, Human
agaaaucacaggaggcagaagg

SEQ ID NO: 940387 - RNA, 20 nt, Human
cagaggcaaggagacuugga

SEQ ID NO: 940388 - RNA, 22 nt, Human
cagggcagaaggcacucuacuc

SEQ ID NO: 940389 - RNA, 22 nt, Human
aucauuacuccuguaaaauugu

SEQ ID NO: 940390 - RNA, 22 nt, Human
auuuacagaugaugcuauuuga

SEQ ID NO: 940391 - RNA, 22 nt, Human
ucuaggagaaccaucagggagg

SEQ ID NO: 940392 - RNA, 22 nt, Human
gcaggggcuacucugagcuucc

SEQ ID NO: 940393 - RNA, 22 nt, Human
agcucccagcuccuuugagaga

SEQ ID NO: 940394 - RNA, 22 nt, Human
uugaaauauggauugaccuuga

SEQ ID NO: 940395 - RNA, 22 nt, Human
ggauccuucuuugaccucacag

SEQ ID NO: 940396 - RNA, 22 nt, Human
gcagcagaggcccuacucuuug

SEQ ID NO: 940397 - RNA, 22 nt, Human
aucuggcucauucagggaacgg

SEQ ID NO: 940398 - RNA, 22 nt, Human
gccagggagucugggccacaga

SEQ ID NO: 940399 - RNA, 20 nt, Human
uguucacaguaguugcugcu

SEQ ID NO: 940400 - RNA, 22 nt, Human
uagggcuauaagagaauaagac

SEQ ID NO: 940401 - RNA, 22 nt, Human
augggcagcagcugccauucau

SEQ ID NO: 940402 - RNA, 22 nt, Human
uucuaguguccuuggacuugcu

SEQ ID NO: 940403 - RNA, 22 nt, Human
ucucaggccccugaguuucucu

SEQ ID NO: 940404 - RNA, 22 nt, Human
aucuacaggauaguuuaauauu

SEQ ID NO: 940405 - RNA, 22 nt, Human
ccaggagauuuuuccauagcac

SEQ ID NO: 940406 - RNA, 22 nt, Human
ggacagcccauacacaugucug

SEQ ID NO: 940407 - RNA, 17 nt, Human
ucaugcccaacuauuac

SEQ ID NO: 940408 - RNA, 22 nt, Human
gcucccuguucucagccaugau

SEQ ID NO: 940409 - RNA, 22 nt, Human
ucagguggcuuggagggggacg

SEQ ID NO: 940410 - RNA, 22 nt, Human
uuucuaaggccagagacugcug

SEQ ID NO: 940411 - RNA, 22 nt, Human
aggagaggcucuaacucugugu

SEQ ID NO: 940412 - RNA, 22 nt, Human
ucuucaaacugaaaauuuagaa

SEQ ID NO: 940413 - RNA, 22 nt, Human
agggccugagcuggcugaccuc

SEQ ID NO: 940414 - RNA, 22 nt, Human
ccuccuggaggcucuagggaaa

SEQ ID NO: 940415 - RNA, 20 nt, Human
gagcagcuguuugcauugca

SEQ ID NO: 940416 - RNA, 22 nt, Human
aacacaaagaagcugcaggauc

SEQ ID NO: 940417 - RNA, 18 nt, Human
uuaagagcugaaagggga

SEQ ID NO: 940418 - RNA, 19 nt, Human
ucuaacagaagugucgucc

SEQ ID NO: 940419 - RNA, 22 nt, Human
aguaccaugcuuccugacuggu

SEQ ID NO: 940420 - RNA, 22 nt, Human
guguaaggccccagguucuuua

SEQ ID NO: 940421 - RNA, 22 nt, Human
uaguccaguaaaacagcuaacg

SEQ ID NO: 940422 - RNA, 22 nt, Human
ccuggagcucacugggagccgg

SEQ ID NO: 940423 - RNA, 22 nt, Human
uucucagagcacugcugacaaa

SEQ ID NO: 940424 - RNA, 22 nt, Human
ugccaggcccugugcuggaugc

SEQ ID NO: 940425 - RNA, 22 nt, Human
acucugaggagugacuagaggu

SEQ ID NO: 940426 - RNA, 22 nt, Human
uccugggcuuaagugauccucc

SEQ ID NO: 940427 - RNA, 22 nt, Human
guggcagcaaaugccuggacua

SEQ ID NO: 940428 - RNA, 22 nt, Human
aagaugcagcaaacuacuuuuu

SEQ ID NO: 940429 - RNA, 22 nt, Human
gugacucacacaggccugggcu

SEQ ID NO: 940430 - RNA, 22 nt, Human
cugugcaagcccaagauaaaac

SEQ ID NO: 940431 - RNA, 22 nt, Human
acauuaucccuggcacaacugc

SEQ ID NO: 940432 - RNA, 21 nt, Human
ggagggcagcccagacuggcu

SEQ ID NO: 940433 - RNA, 22 nt, Human
uccaggagauucauuaggucau

SEQ ID NO: 940434 - RNA, 22 nt, Human
gcucugcucuaacauuccugac

SEQ ID NO: 940435 - RNA, 22 nt, Human
ccagcagcuguggcuuugccuc

SEQ ID NO: 940436 - RNA, 22 nt, Human
uggaggaaaaaaccaggcagag

SEQ ID NO: 940437 - RNA, 22 nt, Human
cacauggccuguguggccagac

SEQ ID NO: 940438 - RNA, 22 nt, Human
aagugacaccucuucccuuucc

SEQ ID NO: 940439 - RNA, 22 nt, Human
acuuucuccagaaaaccaagga

SEQ ID NO: 940440 - RNA, 20 nt, Human
agugcaagaaagcacagcug

SEQ ID NO: 940441 - RNA, 23 nt, Human
cauuucugggagauuuauaaaau

SEQ ID NO: 940442 - RNA, 22 nt, Human
agggguggagaguguugccagu

SEQ ID NO: 940443 - RNA, 22 nt, Human
agccccaggcccggacgccucu

SEQ ID NO: 940444 - RNA, 22 nt, Human
auacacauguguaugugcaugc

SEQ ID NO: 940445 - RNA, 22 nt, Human
ucucuguaguugggcagcugcu

SEQ ID NO: 940446 - RNA, 22 nt, Human
gcucucugucguuaugcuucau

SEQ ID NO: 940447 - RNA, 22 nt, Human
agauggagaccuuggaugaacu

SEQ ID NO: 940448 - RNA, 22 nt, Human
ggaggggucucuagcgaggaga

SEQ ID NO: 940449 - RNA, 22 nt, Human
gaugguuuaugauagaugggaa

SEQ ID NO: 940450 - RNA, 22 nt, Human
uguauuuuuagaccuuuagacc

SEQ ID NO: 940451 - RNA, 20 nt, Human
agaggcuuccuugggaggag

SEQ ID NO: 940452 - RNA, 22 nt, Human
accuuucacgguaucagacauc

SEQ ID NO: 940453 - RNA, 22 nt, Human
acacagggcugcgccugacccc

SEQ ID NO: 940454 - RNA, 22 nt, Human
ucucuucucuagugagcaacug

SEQ ID NO: 940455 - RNA, 22 nt, Human
auuuggcaacauuaauugaauc

SEQ ID NO: 940456 - RNA, 21 nt, Human
acaugucucuaaucucaguga

SEQ ID NO: 940457 - RNA, 22 nt, Human
gagaagguggaccugaaggagc

SEQ ID NO: 940458 - RNA, 23 nt, Human
cuccccaguguccucaugcaucu

SEQ ID NO: 940459 - RNA, 22 nt, Human
gacagguggggaaacuaaggua

SEQ ID NO: 940460 - RNA, 22 nt, Human
guuaggauuauauaucccauga

SEQ ID NO: 940461 - RNA, 22 nt, Human
ccuggccucuccgaguaaccug

SEQ ID NO: 940462 - RNA, 22 nt, Human
gggagagaugcugauugccaau

SEQ ID NO: 940463 - RNA, 22 nt, Human
cagagggcucuuggcugccugc

SEQ ID NO: 940464 - RNA, 22 nt, Human
aggcagcuuaagcccuggccca

SEQ ID NO: 940465 - RNA, 22 nt, Human
gcagccacccucaaggcugaau

SEQ ID NO: 940466 - RNA, 22 nt, Human
gcuguggccaacaaaccacuuu

SEQ ID NO: 940467 - RNA, 22 nt, Human
gaugcacuuucuuuucaacagu

SEQ ID NO: 940468 - RNA, 22 nt, Human
guugaaaguggagaaccugguu

SEQ ID NO: 940469 - RNA, 22 nt, Human
uucugaaagccaauucauugaa

SEQ ID NO: 940470 - RNA, 22 nt, Human
aggugcugccccgagaaggaug

SEQ ID NO: 940471 - RNA, 22 nt, Human
ggguacaaagauuucauaagau

SEQ ID NO: 940472 - RNA, 22 nt, Human
uuuuccucuguauuugaaaugc

SEQ ID NO: 940473 - RNA, 22 nt, Human
ggcugccauaacugauaccaua

SEQ ID NO: 940474 - RNA, 22 nt, Human
guguaaggugaaaucaacaaau

SEQ ID NO: 940475 - RNA, 22 nt, Human
uguuugaauuuugcuaacgugu

SEQ ID NO: 940476 - RNA, 20 nt, Human
ucuggcaggugaacgagcug

SEQ ID NO: 940477 - RNA, 22 nt, Human
uaugugcaaauuaauugcuaga

SEQ ID NO: 940478 - RNA, 18 nt, Human
gaaaugugauucuagggc

SEQ ID NO: 940479 - RNA, 22 nt, Human
ugggagcacccugaggagcuuc

SEQ ID NO: 940480 - RNA, 22 nt, Human
agaagaaacugucggggauauu

SEQ ID NO: 940481 - RNA, 22 nt, Human
caugggcuuuggaggcuggagg

SEQ ID NO: 940482 - RNA, 22 nt, Human
ucugaaggugcuagagaaagcu

SEQ ID NO: 940483 - RNA, 22 nt, Human
ccucucccacguggcagaggcu

SEQ ID NO: 940484 - RNA, 22 nt, Human
gcccucugcacagcucugagca

SEQ ID NO: 940485 - RNA, 22 nt, Human
gagcagcucugugccuggagac

SEQ ID NO: 940486 - RNA, 22 nt, Human
gguggcagucuuaagagaucuu

SEQ ID NO: 940487 - RNA, 22 nt, Human
ccaggagaauaauggcagauua

SEQ ID NO: 940488 - RNA, 16 nt, Human
gucuggccuaccugcc

SEQ ID NO: 940489 - RNA, 22 nt, Human
accgaguuagccaggauggucu

SEQ ID NO: 940490 - RNA, 22 nt, Human
gccuucaguagugucagcugua

SEQ ID NO: 940491 - RNA, 22 nt, Human
aacagugagaagguggacagga

SEQ ID NO: 940492 - RNA, 22 nt, Human
cugggcaauaugcugggccugg

SEQ ID NO: 940493 - RNA, 23 nt, Human
uggaaagcggaccuggggcagag

SEQ ID NO: 940494 - RNA, 22 nt, Human
agaaaucagaacccugaaguuc

SEQ ID NO: 940495 - RNA, 22 nt, Human
ccaggacucaguggggaaaggg

SEQ ID NO: 940496 - RNA, 22 nt, Human
uccuucuuugacaaguggcaga

SEQ ID NO: 940497 - RNA, 22 nt, Human
aucaggaucugggagccugaaa

SEQ ID NO: 940498 - RNA, 22 nt, Human
cuggagcuggcuuccuuccacu

SEQ ID NO: 940499 - RNA, 22 nt, Human
cuacccagauccaggauggcua

SEQ ID NO: 940500 - RNA, 22 nt, Human
agcuggugcugaagcucuugag

SEQ ID NO: 940501 - RNA, 22 nt, Human
gcugcccacaaugauuacaugg

SEQ ID NO: 940502 - RNA, 22 nt, Human
cuggugccuccucccugugcuu

SEQ ID NO: 940503 - RNA, 22 nt, Human
gcuggcuguaucaccuggccag

SEQ ID NO: 940504 - RNA, 22 nt, Human
guauucauauuaaacauaucaa

SEQ ID NO: 940505 - RNA, 22 nt, Human
cuguucacacacuuguacucuc

SEQ ID NO: 940506 - RNA, 20 nt, Human
aagcacauuucuacaauaau

SEQ ID NO: 940507 - RNA, 22 nt, Human
cuuacauugucuuaguuuucaa

SEQ ID NO: 940508 - RNA, 17 nt, Human
uuccccugaccaagccu

SEQ ID NO: 940509 - RNA, 22 nt, Human
ccugggagugugccaucucugu

SEQ ID NO: 940510 - RNA, 22 nt, Human
uaggauaugugaaaucauauua

SEQ ID NO: 940511 - RNA, 22 nt, Human
gcugccucuguagcuuuggacc

SEQ ID NO: 940512 - RNA, 20 nt, Human
ggcacuggaagcacacagga

SEQ ID NO: 940513 - RNA, 18 nt, Human
uccagagguguuggagcc

SEQ ID NO: 940514 - RNA, 22 nt, Human
aggcaguguauugcuagcggcu

SEQ ID NO: 940515 - RNA, 22 nt, Human
ggggcagccuccaggaaagcug

SEQ ID NO: 940516 - RNA, 22 nt, Human
gccuggugugcgccgcgcagcu

SEQ ID NO: 940517 - RNA, 19 nt, Human
cuguccuuggcugcacugu

SEQ ID NO: 940518 - RNA, 22 nt, Human
gcagaggcagggcccuccucca

SEQ ID NO: 940519 - RNA, 22 nt, Human
cuugccuucuguuccuauagaa

SEQ ID NO: 940520 - RNA, 22 nt, Human
ccugagguggcugcagcacugc

SEQ ID NO: 940521 - RNA, 22 nt, Human
uaaagguagugugacauauugu

SEQ ID NO: 940522 - RNA, 22 nt, Human
acuuccugaauggggcuaauua

SEQ ID NO: 940523 - RNA, 22 nt, Human
agaggccuaauugcuacccuuu

SEQ ID NO: 940524 - RNA, 22 nt, Human
auuuguugcuagcagcacugau

SEQ ID NO: 940525 - RNA, 22 nt, Human
gagguggguguaucacagguca

SEQ ID NO: 940526 - RNA, 22 nt, Human
uauuaggguaaauuugacaugc

SEQ ID NO: 940527 - RNA, 22 nt, Human
uugggagcaaauaggaaagagg

SEQ ID NO: 940528 - RNA, 22 nt, Human
gcucccugccuacacggaccuu

SEQ ID NO: 940529 - RNA, 22 nt, Human
cccuugggguggagguugcagu

SEQ ID NO: 940530 - RNA, 22 nt, Human
aagaaaagaaaccugaggcuuu

SEQ ID NO: 940531 - RNA, 22 nt, Human
gaucaaaagcuggguucuaaaa

SEQ ID NO: 940532 - RNA, 22 nt, Human
uuuuauguaauccuuacugucg

SEQ ID NO: 940533 - RNA, 22 nt, Human
uucaauucaauucuaaauauau

SEQ ID NO: 940534 - RNA, 22 nt, Human
acagggucauuuuaugaucugu

SEQ ID NO: 940535 - RNA, 22 nt, Human
gaugcacuugccccuccucaga

SEQ ID NO: 940536 - RNA, 22 nt, Human
gaugcacaugugaguauagaag

SEQ ID NO: 940537 - RNA, 22 nt, Human
caggccaggcugcauuugcccc

SEQ ID NO: 940538 - RNA, 22 nt, Human
guguggcugauugacaugguca

SEQ ID NO: 940539 - RNA, 22 nt, Human
aagagguaaccauagcaaccac

SEQ ID NO: 940540 - RNA, 22 nt, Human
cucaggaucgcuugcccuaggg

SEQ ID NO: 940541 - RNA, 22 nt, Human
augauugaccaucugcugggcu

SEQ ID NO: 940542 - RNA, 22 nt, Human
ggccucucuggcauggcugccc

SEQ ID NO: 940543 - RNA, 20 nt, Human
agcagcuguguuuucauccu

SEQ ID NO: 940544 - RNA, 22 nt, Human
agcaguggaccucagugcuauu

SEQ ID NO: 940545 - RNA, 22 nt, Human
augcaaaugaacauguugcuag

SEQ ID NO: 940546 - RNA, 22 nt, Human
aauaauuuuagcucagaguugu

SEQ ID NO: 940547 - RNA, 23 nt, Human
uggcaaggaaugggauggagacu

SEQ ID NO: 940548 - RNA, 22 nt, Human
ccaccagcagugugcaaggauu

SEQ ID NO: 940549 - RNA, 22 nt, Human
acagugugugcuuucccuuacg

SEQ ID NO: 940550 - RNA, 22 nt, Human
uucuuccucagcagggcugccu

SEQ ID NO: 940551 - RNA, 22 nt, Human
uugcauugggagugaggagacc

SEQ ID NO: 940552 - RNA, 22 nt, Human
aaaugucuguuagucauaucau

SEQ ID NO: 940553 - RNA, 22 nt, Human
cagaguggcgacccccucagcu

SEQ ID NO: 940554 - RNA, 22 nt, Human
agcugguucagaaauuagaugg

SEQ ID NO: 940555 - RNA, 22 nt, Human
ucagugugaggucuuccacccg

SEQ ID NO: 940556 - RNA, 22 nt, Human
cugcuuugacuguuaagaacca

SEQ ID NO: 940557 - RNA, 22 nt, Human
guuuauuauacaacaaaagcua

SEQ ID NO: 940558 - RNA, 22 nt, Human
acugagcugcuugaagugaacu

SEQ ID NO: 940559 - RNA, 21 nt, Human
gccugggauaguggccuccgg

SEQ ID NO: 940560 - RNA, 22 nt, Human
agaggccuuucuguugagugaa

SEQ ID NO: 940561 - RNA, 22 nt, Human
ugccugucagggggagugggaa

SEQ ID NO: 940562 - RNA, 22 nt, Human
aaaggccauuacuugcuuuuag

SEQ ID NO: 940563 - RNA, 22 nt, Human
ugcuuagacgucaaguacagcc

SEQ ID NO: 940564 - RNA, 22 nt, Human
acacauuucucuuuuuguaagu

SEQ ID NO: 940565 - RNA, 22 nt, Human
gcugggaagugcaagaucaagg

SEQ ID NO: 940566 - RNA, 22 nt, Human
agccuggcuguaaccucauggu

SEQ ID NO: 940567 - RNA, 22 nt, Human
gcagccacacuguuacagaaug

SEQ ID NO: 940568 - RNA, 22 nt, Human
agggaguuagaaauccaggaua

SEQ ID NO: 940569 - RNA, 22 nt, Human
ggaggugaggccguagggugug

SEQ ID NO: 940570 - RNA, 22 nt, Human
gugcauauaugugcagcaucaa

SEQ ID NO: 940571 - RNA, 22 nt, Human
uggcucuguugagguauggauu

SEQ ID NO: 940572 - RNA, 22 nt, Human
ucagugucuugaccugggugug

SEQ ID NO: 940573 - RNA, 22 nt, Human
uuugcagugucagcuucugugu

SEQ ID NO: 940574 - RNA, 22 nt, Human
uugaagauggaucgccacucuc

SEQ ID NO: 940575 - RNA, 22 nt, Human
ugucaaaaauaagagagauugu

SEQ ID NO: 940576 - RNA, 22 nt, Human
cgaggcagacaaaaguuggaag

SEQ ID NO: 940577 - RNA, 22 nt, Human
cuggcaguuggcagggcugcca

SEQ ID NO: 940578 - RNA, 22 nt, Human
aggauuuguuuauaggucuuaa

SEQ ID NO: 940579 - RNA, 22 nt, Human
acagcagcuggguucccaccau

SEQ ID NO: 940580 - RNA, 22 nt, Human
ugccucugcugcuguggcauca

SEQ ID NO: 940581 - RNA, 22 nt, Human
gcagacagggcuacagagguac

SEQ ID NO: 940582 - RNA, 22 nt, Human
uuauuaggaacucaggauuuuu

SEQ ID NO: 940583 - RNA, 22 nt, Human
ugugugaauggauuauucuauu

SEQ ID NO: 940584 - RNA, 22 nt, Human
gaggccagaaugagcugaaugc

SEQ ID NO: 940585 - RNA, 22 nt, Human
ccagagccggcucccucagcuu

SEQ ID NO: 940586 - RNA, 20 nt, Human
cucucccagcacagcuuccu

SEQ ID NO: 940587 - RNA, 18 nt, Human
aggcccuggccucgaaca

SEQ ID NO: 940588 - RNA, 22 nt, Human
uuuaguagaugcagcauuauuu

SEQ ID NO: 940589 - RNA, 23 nt, Human
cuugcaggaagcagauggcacac

SEQ ID NO: 940590 - RNA, 22 nt, Human
ccccagcucagugcagggacau

SEQ ID NO: 940591 - RNA, 22 nt, Human
cuguggaaggccuguccugaaa

SEQ ID NO: 940592 - RNA, 22 nt, Human
ggcucagguuaccagucccucc

SEQ ID NO: 940593 - RNA, 20 nt, Human
ccuggaagagcuccccaggc

SEQ ID NO: 940594 - RNA, 22 nt, Human
ugccucugguuaucugguaccu

SEQ ID NO: 940595 - RNA, 22 nt, Human
gugauuuucuccuccuagaagu

SEQ ID NO: 940596 - RNA, 22 nt, Human
ggcagggaaacagcugauccca

SEQ ID NO: 940597 - RNA, 22 nt, Human
cagcccaaagccccaggcuaga

SEQ ID NO: 940598 - RNA, 22 nt, Human
cccagcccugaccuauuggaaa

SEQ ID NO: 940599 - RNA, 22 nt, Human
cuuguccccagcagguugguuu

SEQ ID NO: 940600 - RNA, 22 nt, Human
uggccugggccggcagauauac

SEQ ID NO: 940601 - RNA, 20 nt, Human
uccugagauuuaagggguuc

SEQ ID NO: 940602 - RNA, 22 nt, Human
cuggagggugagccucaucucu

SEQ ID NO: 940603 - RNA, 22 nt, Human
uugggaaggcguggaagcagaa

SEQ ID NO: 940604 - RNA, 22 nt, Human
ggcccugagcugaaguacugug

SEQ ID NO: 940605 - RNA, 20 nt, Human
cucucuggaaggugggagcc

SEQ ID NO: 940606 - RNA, 22 nt, Human
agccugagagccaagcugugca

SEQ ID NO: 940607 - RNA, 22 nt, Human
ugggccugugaugcugggcuau

SEQ ID NO: 940608 - RNA, 22 nt, Human
agaggacagacggaaagugcca

SEQ ID NO: 940609 - RNA, 22 nt, Human
uguacaguguagucaugagguu

SEQ ID NO: 940610 - RNA, 22 nt, Human
aggccugucuggggcucagcca

SEQ ID NO: 940611 - RNA, 22 nt, Human
ggcagccuugagggaggccugg

SEQ ID NO: 940612 - RNA, 22 nt, Human
uucccaguauuaccuucaggaa

SEQ ID NO: 940613 - RNA, 22 nt, Human
acagggcaccugagguaggaag

SEQ ID NO: 940614 - RNA, 22 nt, Human
cucccuggaggcccagaccugg

SEQ ID NO: 940615 - RNA, 22 nt, Human
gcaggagcccuggcauguucuu

SEQ ID NO: 940616 - RNA, 23 nt, Human
cuggcucauccugguugcagugg

SEQ ID NO: 940617 - RNA, 21 nt, Human
acaggagaccgccuggcaguc

SEQ ID NO: 940618 - RNA, 22 nt, Human
acaaagucugaaaccugaggca

SEQ ID NO: 940619 - RNA, 22 nt, Human
acauuucugcaucucagagcua

SEQ ID NO: 940620 - RNA, 22 nt, Human
uagagcuguaucaaagagccuu

SEQ ID NO: 940621 - RNA, 19 nt, Human
gcaggcacagcccugggug

SEQ ID NO: 940622 - RNA, 22 nt, Human
auuaggauguuccuaugcacau

SEQ ID NO: 940623 - RNA, 22 nt, Human
cuggcuguauuaguuugauccu

SEQ ID NO: 940624 - RNA, 22 nt, Human
cacccaggcuggagugcagggg

SEQ ID NO: 940625 - RNA, 22 nt, Human
aaauguguuucuuugugaaugg

SEQ ID NO: 940626 - RNA, 22 nt, Human
augcaucauggaaaacucaguu

SEQ ID NO: 940627 - RNA, 19 nt, Human
cugaggcccauguaccaug

SEQ ID NO: 940628 - RNA, 22 nt, Human
gacucagugauuugacaugccu

SEQ ID NO: 940629 - RNA, 22 nt, Human
ggcagcacugcagcuuguuggg

SEQ ID NO: 940630 - RNA, 22 nt, Human
agagccagcaagugaauaguga

SEQ ID NO: 940631 - RNA, 18 nt, Human
ucagggaagagaauauga

SEQ ID NO: 940632 - RNA, 22 nt, Human
auguuucaccagcaaauuaccu

SEQ ID NO: 940633 - RNA, 22 nt, Human
ucugggcuugguuagggcuguu

SEQ ID NO: 940634 - RNA, 22 nt, Human
cagacagcugcuuucuugcugu

SEQ ID NO: 940635 - RNA, 21 nt, Human
cccagggaagccgcagucacc

SEQ ID NO: 940636 - RNA, 21 nt, Human
aagccucaagcagaagacaga

SEQ ID NO: 940637 - RNA, 22 nt, Human
cagagagagucaaaucuuugcu

SEQ ID NO: 940638 - RNA, 22 nt, Human
cuguacauauacauuuuuuucc

SEQ ID NO: 940639 - RNA, 22 nt, Human
cugaggaagacagcagcugugu

SEQ ID NO: 940640 - RNA, 22 nt, Human
cugcugucuuuauuucacugcu

SEQ ID NO: 940641 - RNA, 22 nt, Human
agauuucccacuccauguauug

SEQ ID NO: 940642 - RNA, 22 nt, Human
aggcccugcauuguacugaggg

SEQ ID NO: 940643 - RNA, 22 nt, Human
acauucaugucccacuucuagc

SEQ ID NO: 940644 - RNA, 22 nt, Human
cuuuccaagaaugcagauaccu

SEQ ID NO: 940645 - RNA, 22 nt, Human
auguuuaaaggagucagagacu

SEQ ID NO: 940646 - RNA, 23 nt, Human
aucaagauaauccagaugaccua

SEQ ID NO: 940647 - RNA, 22 nt, Human
gcacucugugaucugcagagcc

SEQ ID NO: 940648 - RNA, 22 nt, Human
gcucugcucuugacuuaccagg

SEQ ID NO: 940649 - RNA, 22 nt, Human
agaauaguggcaaugacugcac

SEQ ID NO: 940650 - RNA, 22 nt, Human
aauucacauguugaaguccuaa

SEQ ID NO: 940651 - RNA, 22 nt, Human
auguaucagauaaagcaugugg

SEQ ID NO: 940652 - RNA, 22 nt, Human
uaauccacaauagagauuaucu

SEQ ID NO: 940653 - RNA, 22 nt, Human
aggccuccugcagggaugagug

SEQ ID NO: 940654 - RNA, 22 nt, Human
ucaauucugguccucaggaacu

SEQ ID NO: 940655 - RNA, 17 nt, Human
uuuucucucuuggauuc

SEQ ID NO: 940656 - RNA, 22 nt, Human
uucuccgcuaaguucucugcag

SEQ ID NO: 940657 - RNA, 22 nt, Human
caggccuccacuccacgcagac

SEQ ID NO: 940658 - RNA, 22 nt, Human
uuguuuuaucuuucuacagacu

SEQ ID NO: 940659 - RNA, 22 nt, Human
acccaggagcucugggguccuc

SEQ ID NO: 940660 - RNA, 22 nt, Human
uccucaggucaaagcaggagaa

SEQ ID NO: 940661 - RNA, 21 nt, Human
gcaaggcuuuuguguuuccca

SEQ ID NO: 940662 - RNA, 22 nt, Human
gcuggccagggcugcucgcgga

SEQ ID NO: 940663 - RNA, 22 nt, Human
gagggucccugcucagggccag

SEQ ID NO: 940664 - RNA, 22 nt, Human
ggggcagaguagcuggggugug

SEQ ID NO: 940665 - RNA, 22 nt, Human
aggccaaauagcagguuugcua

SEQ ID NO: 940666 - RNA, 19 nt, Human
accucugcagagauguuua

SEQ ID NO: 940667 - RNA, 22 nt, Human
caaugugguggcagaugucagu

SEQ ID NO: 940668 - RNA, 22 nt, Human
ggcugcuggaagacugaacaag

SEQ ID NO: 940669 - RNA, 22 nt, Human
ucugucugcaccuaagcacagu

SEQ ID NO: 940670 - RNA, 22 nt, Human
aacaugaaaguugcuaagugca

SEQ ID NO: 940671 - RNA, 22 nt, Human
cuggagcucuccagagccccgu

SEQ ID NO: 940672 - RNA, 22 nt, Human
guguaucaaagcacagacuuca

SEQ ID NO: 940673 - RNA, 22 nt, Human
uggcagcaauuagcuagagcug

SEQ ID NO: 940674 - RNA, 18 nt, Human
gcucugcccaggcugccc

SEQ ID NO: 940675 - RNA, 22 nt, Human
cugggagggguagccaauccua

SEQ ID NO: 940676 - RNA, 22 nt, Human
aucacaaaggcugcuucaugau

SEQ ID NO: 940677 - RNA, 22 nt, Human
ugcagaagaaaacagcugugug

SEQ ID NO: 940678 - RNA, 22 nt, Human
gucauuguguggacauggagaa

SEQ ID NO: 940679 - RNA, 22 nt, Human
gaggacagcuuagggcuuccug

SEQ ID NO: 940680 - RNA, 22 nt, Human
aggacagggauucaaacuccca

SEQ ID NO: 940681 - RNA, 22 nt, Human
uggcagcuccggguaggggcug

SEQ ID NO: 940682 - RNA, 22 nt, Human
cagagcugauuggauccagaga

SEQ ID NO: 940683 - RNA, 19 nt, Human
ucaaagucugagucacuuu

SEQ ID NO: 940684 - RNA, 22 nt, Human
uugaauaggacucagcagugau

SEQ ID NO: 940685 - RNA, 22 nt, Human
ccucagagccuccagaaggaau

SEQ ID NO: 940686 - RNA, 22 nt, Human
uuauucuuuaaacauauauguu

SEQ ID NO: 940687 - RNA, 22 nt, Human
gguggguuuggaagagcaggcu

SEQ ID NO: 940688 - RNA, 22 nt, Human
ugcuucaggagaugucaccaug

SEQ ID NO: 940689 - RNA, 21 nt, Human
agaaaauggcguuuuagauuu

SEQ ID NO: 940690 - RNA, 22 nt, Human
uuccagcaggcagacaggagau

SEQ ID NO: 940691 - RNA, 22 nt, Human
aggagcugcuuaaaugguuggu

SEQ ID NO: 940692 - RNA, 22 nt, Human
uucaggauccccuugaugggcu

SEQ ID NO: 940693 - RNA, 22 nt, Human
aauucacaaaaguuagauccau

SEQ ID NO: 940694 - RNA, 22 nt, Human
uuugaaaguguuuacuugggaa

SEQ ID NO: 940695 - RNA, 22 nt, Human
ugcucacugaacucuugcuguc

SEQ ID NO: 940696 - RNA, 22 nt, Human
guuuucugauuagcaaaucuga

SEQ ID NO: 940697 - RNA, 22 nt, Human
gucagaggggcagcugccaggc

SEQ ID NO: 940698 - RNA, 22 nt, Human
aauuccugucuuaacaguucug

SEQ ID NO: 940699 - RNA, 22 nt, Human
aaaugucuaucuggcauauucc

SEQ ID NO: 940700 - RNA, 22 nt, Human
uggacaaaugauuucuaccuuu

SEQ ID NO: 940701 - RNA, 22 nt, Human
aagucaaaccuugcucacagga

SEQ ID NO: 940702 - RNA, 22 nt, Human
ugcccaaaccucuccuagcucu

SEQ ID NO: 940703 - RNA, 22 nt, Human
cauaugaaauaugaguugaaca

SEQ ID NO: 940704 - RNA, 22 nt, Human
uggacucaaguccaaguucacg

SEQ ID NO: 940705 - RNA, 22 nt, Human
uaaaccuugguagcaucuugcu

SEQ ID NO: 940706 - RNA, 22 nt, Human
aggaggccgauuucagaggucg

SEQ ID NO: 940707 - RNA, 22 nt, Human
gaggccuggaccagccacagag

SEQ ID NO: 940708 - RNA, 22 nt, Human
gcucucugguuccagucaggaa

SEQ ID NO: 940709 - RNA, 22 nt, Human
agaggcuccaccuucucugucc

SEQ ID NO: 940710 - RNA, 22 nt, Human
aggaggcccuagagcucuagag

SEQ ID NO: 940711 - RNA, 22 nt, Human
cuggcugcgucugcucugacag

SEQ ID NO: 940712 - RNA, 22 nt, Human
uuccuggugguggugacagcac

SEQ ID NO: 940713 - RNA, 22 nt, Human
uuguuuugcuaaagggucauca

SEQ ID NO: 940714 - RNA, 22 nt, Human
uuugcauuucucguaaggaaac

SEQ ID NO: 940715 - RNA, 20 nt, Human
aggcaguuagaaggagauga

SEQ ID NO: 940716 - RNA, 22 nt, Human
agcuccaggugcaagucauggu

SEQ ID NO: 940717 - RNA, 22 nt, Human
accuguuuuccuaucuagauug

SEQ ID NO: 940718 - RNA, 22 nt, Human
agcagagcggggccuccggaag

SEQ ID NO: 940719 - RNA, 22 nt, Human
ccuggagggcgccgcacagucc

SEQ ID NO: 940720 - RNA, 22 nt, Human
agucccagccuguaggauuggg

SEQ ID NO: 940721 - RNA, 22 nt, Human
aaacuacuggauuaguaacuua

SEQ ID NO: 940722 - RNA, 22 nt, Human
cugagccaugagccugcgccca

SEQ ID NO: 940723 - RNA, 22 nt, Human
uauuugaaggcauacauuuuga

SEQ ID NO: 940724 - RNA, 20 nt, Human
ugcuugucaugcacucaggc

SEQ ID NO: 940725 - RNA, 22 nt, Human
cucugggcuuguugaccugcac

SEQ ID NO: 940726 - RNA, 22 nt, Human
agacaggagagggaacugccgg

SEQ ID NO: 940727 - RNA, 22 nt, Human
acauuucugcuagaauagguga

SEQ ID NO: 940728 - RNA, 22 nt, Human
gaugcaaagcauuuuugugugu

SEQ ID NO: 940729 - RNA, 18 nt, Human
uuucacaaccuccagagg

SEQ ID NO: 940730 - RNA, 20 nt, Human
gcagcugcccccagucccug

SEQ ID NO: 940731 - RNA, 22 nt, Human
gccaccagugggggccugggca

SEQ ID NO: 940732 - RNA, 22 nt, Human
agagcugggugaagugccauca

SEQ ID NO: 940733 - RNA, 22 nt, Human
aagauuuccauuucuagcucau

SEQ ID NO: 940734 - RNA, 22 nt, Human
cuugcaggauuuugcugcugua

SEQ ID NO: 940735 - RNA, 22 nt, Human
agcuguguggugucugacagcu

SEQ ID NO: 940736 - RNA, 22 nt, Human
cuuagaaaugcagauucucagg

SEQ ID NO: 940737 - RNA, 22 nt, Human
ggguggagcuuggacaccagua

SEQ ID NO: 940738 - RNA, 22 nt, Human
acaggcugcccgcuccccaccu

SEQ ID NO: 940739 - RNA, 22 nt, Human
aaaugcaggaaauuaugcuuuu

SEQ ID NO: 940740 - RNA, 22 nt, Human
cccagcauggagugaggacuca

SEQ ID NO: 940741 - RNA, 22 nt, Human
cuucuucaucuguaaaacuugg

SEQ ID NO: 940742 - RNA, 22 nt, Human
auuagguuagugugcaagagaa

SEQ ID NO: 940743 - RNA, 22 nt, Human
gacccaggggcagggagaaagu

SEQ ID NO: 940744 - RNA, 22 nt, Human
uuguuaaaaugcauauucuggu

SEQ ID NO: 940745 - RNA, 22 nt, Human
uugcagcugcaguaaauguuca

SEQ ID NO: 940746 - RNA, 22 nt, Human
guauuugauagauuucaaagga

SEQ ID NO: 940747 - RNA, 22 nt, Human
gugucccagcagcacauuggcu

SEQ ID NO: 940748 - RNA, 22 nt, Human
ggccaaaccgcaauuauuuuug

SEQ ID NO: 940749 - RNA, 22 nt, Human
auuuccuauggauacaggcaga

SEQ ID NO: 940750 - RNA, 22 nt, Human
uccauuuuguagguaugcuaca

SEQ ID NO: 940751 - RNA, 22 nt, Human
gcagauggacuguaugaccuga

SEQ ID NO: 940752 - RNA, 22 nt, Human
cccagcucucugcucuuagccu

SEQ ID NO: 940753 - RNA, 22 nt, Human
caagauggaguccgggaaugug

SEQ ID NO: 940754 - RNA, 22 nt, Human
cagccccucacagagcuguccu

SEQ ID NO: 940755 - RNA, 22 nt, Human
gacauucacagguaaacauucc

SEQ ID NO: 940756 - RNA, 22 nt, Human
ccaggccucccuuuuccagcca

SEQ ID NO: 940757 - RNA, 19 nt, Human
cugggagguguucagagaa

SEQ ID NO: 940758 - RNA, 22 nt, Human
augaaacaguguguauagcaaa

SEQ ID NO: 940759 - RNA, 22 nt, Human
auuaggauuugguauggucaua

SEQ ID NO: 940760 - RNA, 23 nt, Human
gugauuucagggaacagaaucag

SEQ ID NO: 940761 - RNA, 22 nt, Human
gcucagagcuugaaguuccacu

SEQ ID NO: 940762 - RNA, 22 nt, Human
acagaauucucucugcagaggc

SEQ ID NO: 940763 - RNA, 22 nt, Human
uuugacauuauccuguuacugg

SEQ ID NO: 940764 - RNA, 22 nt, Human
ggagcugggaauuggaucaucu

SEQ ID NO: 940765 - RNA, 22 nt, Human
uaguuuuuucaacaaauggugc

SEQ ID NO: 940766 - RNA, 19 nt, Human
acuggcaguuucugcaugg

SEQ ID NO: 940767 - RNA, 22 nt, Human
uaggggugaggccaggcaucag

SEQ ID NO: 940768 - RNA, 22 nt, Human
agaggaggaagagcuuuaaaau

SEQ ID NO: 940769 - RNA, 23 nt, Human
aggugccaacugagagcugagag

SEQ ID NO: 940770 - RNA, 22 nt, Human
aaauucaguuuuaauaaucacu

SEQ ID NO: 940771 - RNA, 22 nt, Human
uugacagcuauuuugcuuugau

SEQ ID NO: 940772 - RNA, 22 nt, Human
ucuucacaggagccugccugcc

SEQ ID NO: 940773 - RNA, 21 nt, Human
gcugucucuggcuccugggaa

SEQ ID NO: 940774 - RNA, 22 nt, Human
uccuucagaaaaccucagucuu

SEQ ID NO: 940775 - RNA, 20 nt, Human
aagagcugacucacaguggu

SEQ ID NO: 940776 - RNA, 22 nt, Human
ccagagccucuuaugaagaucg

SEQ ID NO: 940777 - RNA, 22 nt, Human
augcaguacagauaauucuaca

SEQ ID NO: 940778 - RNA, 22 nt, Human
cugcagccucaaccuccugagc

SEQ ID NO: 940779 - RNA, 22 nt, Human
uacagcuaggcaaaaaugacau

SEQ ID NO: 940780 - RNA, 21 nt, Human
auccuugaucagaagagugcu

SEQ ID NO: 940781 - RNA, 22 nt, Human
ggcuggaaguccaagaucaagg

SEQ ID NO: 940782 - RNA, 22 nt, Human
guccucugggagccuugagccu

SEQ ID NO: 940783 - RNA, 22 nt, Human
cagggguguuuuuggccaggag

SEQ ID NO: 940784 - RNA, 22 nt, Human
ugcuugaggggaauaaaaagaa

SEQ ID NO: 940785 - RNA, 22 nt, Human
cucagagcccaggguacacccg

SEQ ID NO: 940786 - RNA, 20 nt, Human
ccaccuggccaaggcugugc

SEQ ID NO: 940787 - RNA, 22 nt, Human
gcugugagggucuagugaggug

SEQ ID NO: 940788 - RNA, 23 nt, Human
ugcuucucugcuugacaguucug

SEQ ID NO: 940789 - RNA, 22 nt, Human
ggcugcagggcagcuggugugg

SEQ ID NO: 940790 - RNA, 22 nt, Human
gccuggagggcucuagagaggc

SEQ ID NO: 940791 - RNA, 20 nt, Human
aggaagccaaaggcugucuu

SEQ ID NO: 940792 - RNA, 22 nt, Human
uuauuuaaugugaucugaagag

SEQ ID NO: 940793 - RNA, 22 nt, Human
cccucugccugggaccaagucc

SEQ ID NO: 940794 - RNA, 22 nt, Human
acccuggggguggccagugcca

SEQ ID NO: 940795 - RNA, 23 nt, Human
agcuggguggccugcgugaagcu

SEQ ID NO: 940796 - RNA, 22 nt, Human
gugcccaggcccaaggcaccac

SEQ ID NO: 940797 - RNA, 19 nt, Human
ugucacugucauggcccag

SEQ ID NO: 940798 - RNA, 22 nt, Human
uccuucaagaugccacagcuuu

SEQ ID NO: 940799 - RNA, 21 nt, Human
gaaaggucuuaacuuacagag

SEQ ID NO: 940800 - RNA, 22 nt, Human
gaauagcuuccuuuuuuccaaa

SEQ ID NO: 940801 - RNA, 22 nt, Human
aggcacaguuucauccccgggc

SEQ ID NO: 940802 - RNA, 22 nt, Human
cccugagaugccucacccuagu

SEQ ID NO: 940803 - RNA, 22 nt, Human
gugugcccuuguucagcagagu

SEQ ID NO: 940804 - RNA, 22 nt, Human
ggagaggacauggcucccacag

SEQ ID NO: 940805 - RNA, 22 nt, Human
agccagccgggggaccacagug

SEQ ID NO: 940806 - RNA, 19 nt, Human
agucccaggcccgaaagag

SEQ ID NO: 940807 - RNA, 22 nt, Human
gcuggcaccugcaccaagcagg

SEQ ID NO: 940808 - RNA, 22 nt, Human
ggcagcuuucaauaggguuaug

SEQ ID NO: 940809 - RNA, 22 nt, Human
uuugauaacagugaauaucaug

SEQ ID NO: 940810 - RNA, 22 nt, Human
gagcuuggugaugccuccuggu

SEQ ID NO: 940811 - RNA, 22 nt, Human
ggcacuguguacacacagagac

SEQ ID NO: 940812 - RNA, 22 nt, Human
agauacaucauuuauaccuuca

SEQ ID NO: 940813 - RNA, 22 nt, Human
aucauucuagcuguuguguuga

SEQ ID NO: 940814 - RNA, 22 nt, Human
agguaaagacugcaaggagaau

SEQ ID NO: 940815 - RNA, 22 nt, Human
auucuucaccugagucagucua

SEQ ID NO: 940816 - RNA, 22 nt, Human
agaaaugcauuagcacauauag

SEQ ID NO: 940817 - RNA, 22 nt, Human
ggagcugggguuggcaucuucc

SEQ ID NO: 940818 - RNA, 22 nt, Human
cauacuuugggauaagagugga

SEQ ID NO: 940819 - RNA, 22 nt, Human
ccuggccagggucugggcugcu

SEQ ID NO: 940820 - RNA, 22 nt, Human
ugcucaggaaauaaugucugug

SEQ ID NO: 940821 - RNA, 22 nt, Human
ccagagcuccagggcuacagaa

SEQ ID NO: 940822 - RNA, 22 nt, Human
uaauuuacuugcaaauaacaau

SEQ ID NO: 940823 - RNA, 22 nt, Human
gccacaugcaauugcagcacgu

SEQ ID NO: 940824 - RNA, 22 nt, Human
gaaacccaaacuaagacaguag

SEQ ID NO: 940825 - RNA, 22 nt, Human
uguguuaacacugcaugauaau

SEQ ID NO: 940826 - RNA, 22 nt, Human
uccugucuaaagaccugcaggc

SEQ ID NO: 940827 - RNA, 22 nt, Human
cacacaugagucuccccauugg

SEQ ID NO: 940828 - RNA, 22 nt, Human
gggcuuauggagggcuuuguac

SEQ ID NO: 940829 - RNA, 22 nt, Human
cucccucugucuuguccagaaa

SEQ ID NO: 940830 - RNA, 22 nt, Human
aguguauugauuggaacagccu

SEQ ID NO: 940831 - RNA, 22 nt, Human
aaguucuacuguggguaaaaug

SEQ ID NO: 940832 - RNA, 22 nt, Human
caagaugaaacuacagggagga

SEQ ID NO: 940833 - RNA, 20 nt, Human
uaacauaguccagagaacga

SEQ ID NO: 940834 - RNA, 22 nt, Human
agccaggauuggcugagccuua

SEQ ID NO: 940835 - RNA, 22 nt, Human
gucucccacuuucuggccucuu

SEQ ID NO: 940836 - RNA, 23 nt, Human
ugucacauuuaguuggcauuguu

SEQ ID NO: 940837 - RNA, 22 nt, Human
uucagagccacuucaagucuaa

SEQ ID NO: 940838 - RNA, 22 nt, Human
ccagggcaauuauuuggagggu

SEQ ID NO: 940839 - RNA, 22 nt, Human
gcugugcuauaucucugagugu

SEQ ID NO: 940840 - RNA, 22 nt, Human
aggagaguucacacuggucaga

SEQ ID NO: 940841 - RNA, 22 nt, Human
accaguccgcggagcuccgggg

SEQ ID NO: 940842 - RNA, 22 nt, Human
uuugcauuguaauauuuaguuc

SEQ ID NO: 940843 - RNA, 22 nt, Human
uaccuuuugcuuauuaugacac

SEQ ID NO: 940844 - RNA, 22 nt, Human
agcuccugcacccagccuugag

SEQ ID NO: 940845 - RNA, 22 nt, Human
auucugagaaaugcauugucag

SEQ ID NO: 940846 - RNA, 21 nt, Human
auacauucuauuaagcauuua

SEQ ID NO: 940847 - RNA, 22 nt, Human
aagacauuuauuugaaucaauu

SEQ ID NO: 940848 - RNA, 22 nt, Human
cugcuguguaucauuuuagaug

SEQ ID NO: 940849 - RNA, 22 nt, Human
uggcugggggugcuauagcugc

SEQ ID NO: 940850 - RNA, 22 nt, Human
auccaggguguggagagagcuc

SEQ ID NO: 940851 - RNA, 22 nt, Human
guuauguaugagggaaugauua

SEQ ID NO: 940852 - RNA, 22 nt, Human
gagugcaggccugagcaccauc

SEQ ID NO: 940853 - RNA, 21 nt, Human
ucauuugugaucugauuucca

SEQ ID NO: 940854 - RNA, 22 nt, Human
auauaaguuaguggucauguuu

SEQ ID NO: 940855 - RNA, 22 nt, Human
ggggcccagcaccccuccucgc

SEQ ID NO: 940856 - RNA, 22 nt, Human
uucaacuagauuuauacaauuc

SEQ ID NO: 940857 - RNA, 22 nt, Human
gcagagccugggggucugcgga

SEQ ID NO: 940858 - RNA, 22 nt, Human
aggcccuggguuagggcccacu

SEQ ID NO: 940859 - RNA, 22 nt, Human
acucucagaggguggcagcaau

SEQ ID NO: 940860 - RNA, 22 nt, Human
aagggcaggaaaagauggaugu

SEQ ID NO: 940861 - RNA, 22 nt, Human
uaaaguucagugcaugaaugug

SEQ ID NO: 940862 - RNA, 22 nt, Human
uuccuuccauagcaaaacaugc

SEQ ID NO: 940863 - RNA, 22 nt, Human
cguuggagacacuugaggacuu

SEQ ID NO: 940864 - RNA, 22 nt, Human
aucuggcugcugugcuuaagcu

SEQ ID NO: 940865 - RNA, 22 nt, Human
uggcuucuuagaccaguggccu

SEQ ID NO: 940866 - RNA, 22 nt, Human
cuugugcauuucauuccucagg

SEQ ID NO: 940867 - RNA, 22 nt, Human
ggugcagaucuuucucuucagg

SEQ ID NO: 940868 - RNA, 22 nt, Human
cagugcaguugguggcaggggu

SEQ ID NO: 940869 - RNA, 22 nt, Human
uuucaagagggaacugaacaca

SEQ ID NO: 940870 - RNA, 22 nt, Human
cuuauguauauuuggaacguac

SEQ ID NO: 940871 - RNA, 22 nt, Human
aggcugcugaggccaccacgcu

SEQ ID NO: 940872 - RNA, 20 nt, Human
uuugucuguuaaguguuucu

SEQ ID NO: 940873 - RNA, 22 nt, Human
ccagaggcuggguucaccucag

SEQ ID NO: 940874 - RNA, 22 nt, Human
gugcaugugcauccauguguac

SEQ ID NO: 940875 - RNA, 22 nt, Human
uuucuguagugugguauguagg

SEQ ID NO: 940876 - RNA, 22 nt, Human
uggcagcuggcucugcgcaggc

SEQ ID NO: 940877 - RNA, 22 nt, Human
gcuuucucuucacugauguuca

SEQ ID NO: 940878 - RNA, 22 nt, Human
aauucacagaaccauggugcuc

SEQ ID NO: 940879 - RNA, 22 nt, Human
uggaaggcaacggagugagcug

SEQ ID NO: 940880 - RNA, 20 nt, Human
ggagagcagggaagacagua

SEQ ID NO: 940881 - RNA, 22 nt, Human
acucaggaagaaagcagcuggu

SEQ ID NO: 940882 - RNA, 22 nt, Human
acccagagcugggcuuggcaaa

SEQ ID NO: 940883 - RNA, 22 nt, Human
uaaaugugggggccacgggcuu

SEQ ID NO: 940884 - RNA, 22 nt, Human
cucacaggcaucucaucaggcu

SEQ ID NO: 940885 - RNA, 22 nt, Human
gugugucuuucauuucaugagg

SEQ ID NO: 940886 - RNA, 22 nt, Human
ucccagggucaguggugaggcc

SEQ ID NO: 940887 - RNA, 22 nt, Human
uacauuaucuuguuaucuuuca

SEQ ID NO: 940888 - RNA, 22 nt, Human
caacuccuccccagcaugccaa

SEQ ID NO: 940889 - RNA, 22 nt, Human
uggcagggccugcucaucaucc

SEQ ID NO: 940890 - RNA, 22 nt, Human
ucuaaaaaagucuguucacuug

SEQ ID NO: 940891 - RNA, 20 nt, Human
accauaauguuaauuacaaa

SEQ ID NO: 940892 - RNA, 22 nt, Human
ugggggugacuaucucgggaau

SEQ ID NO: 940893 - RNA, 22 nt, Human
agcugcccuuuaugaugcugaa

SEQ ID NO: 940894 - RNA, 22 nt, Human
gcuuagucaauuauaaauaggc

SEQ ID NO: 940895 - RNA, 22 nt, Human
agggucugacuccucuggcaag

SEQ ID NO: 940896 - RNA, 22 nt, Human
cagagacauuaagugccaugau

SEQ ID NO: 940897 - RNA, 22 nt, Human
aauacugccugugagguaacuc

SEQ ID NO: 940898 - RNA, 22 nt, Human
ucaugaauauugaaugcuucau

SEQ ID NO: 940899 - RNA, 22 nt, Human
caacuccuggcuguuaggcaca

SEQ ID NO: 940900 - RNA, 19 nt, Human
gagcagcugcacccauuga

SEQ ID NO: 940901 - RNA, 21 nt, Human
gagacagacuuucguccccug

SEQ ID NO: 940902 - RNA, 19 nt, Human
agagaggcugugugaggga

SEQ ID NO: 940903 - RNA, 22 nt, Human
cccaccccuggacaggugagug

SEQ ID NO: 940904 - RNA, 22 nt, Human
guccucugggcuuugagcaguc

SEQ ID NO: 940905 - RNA, 22 nt, Human
gugugucccuccucuccugagu

SEQ ID NO: 940906 - RNA, 20 nt, Human
ucaggaugugcugagugaag

SEQ ID NO: 940907 - RNA, 22 nt, Human
cucuuaaagcuuccaguuucaa

SEQ ID NO: 940908 - RNA, 22 nt, Human
aaggcacuuuuccugagaugau

SEQ ID NO: 940909 - RNA, 22 nt, Human
ucugccaccaccuacacuagua

SEQ ID NO: 940910 - RNA, 22 nt, Human
uuucuucacaggguauugggug

SEQ ID NO: 940911 - RNA, 23 nt, Human
uugugucuacuuccuaucuaggg

SEQ ID NO: 940912 - RNA, 22 nt, Human
gcccaggagguggaggugcagu

SEQ ID NO: 940913 - RNA, 22 nt, Human
uugaaaguccuucuugaguuac

SEQ ID NO: 940914 - RNA, 22 nt, Human
gcagcagcccagggcucucaga

SEQ ID NO: 940915 - RNA, 22 nt, Human
caguuucuuggaugccaauuuc

SEQ ID NO: 940916 - RNA, 22 nt, Human
aggucauugaaguuauuuucuu

SEQ ID NO: 940917 - RNA, 21 nt, Human
ugcagccauucagcccuaugc

SEQ ID NO: 940918 - RNA, 22 nt, Human
uuauuuggguuugaguguggca

SEQ ID NO: 940919 - RNA, 22 nt, Human
ccuccuggggugaaggauggga

SEQ ID NO: 940920 - RNA, 22 nt, Human
uggcagaaguucacuaguagcu

SEQ ID NO: 940921 - RNA, 23 nt, Human
agagcuuucuaaaauguaaaucu

SEQ ID NO: 940922 - RNA, 22 nt, Human
cucagcagcagggaagagguca

SEQ ID NO: 940923 - RNA, 22 nt, Human
uaaaucacuccuaauaaucagu

SEQ ID NO: 940924 - RNA, 22 nt, Human
cucaggguaaugaaagacgaau

SEQ ID NO: 940925 - RNA, 22 nt, Human
gcugugugacugagagccuggc

SEQ ID NO: 940926 - RNA, 22 nt, Human
cugccuggucucaggcaugggg

SEQ ID NO: 940927 - RNA, 22 nt, Human
gagcuuugcuggaagccugggg

SEQ ID NO: 940928 - RNA, 22 nt, Human
ucauugucuugauaugauuguc

SEQ ID NO: 940929 - RNA, 22 nt, Human
ggucagccuuggauuugguagc

SEQ ID NO: 940930 - RNA, 22 nt, Human
gcccaggaggcagagguugugg

SEQ ID NO: 940931 - RNA, 22 nt, Human
cacucugacuggcccugcagga

SEQ ID NO: 940932 - RNA, 22 nt, Human
ucugcaggaggcuggcugcagg

SEQ ID NO: 940933 - RNA, 22 nt, Human
cacccugggcugggccuguuaa

SEQ ID NO: 940934 - RNA, 21 nt, Human
uaauaauuccacuacagagua

SEQ ID NO: 940935 - RNA, 22 nt, Human
uuggcacugugccuggcacauu

SEQ ID NO: 940936 - RNA, 21 nt, Human
agcugcuuucagcuccuagag

SEQ ID NO: 940937 - RNA, 22 nt, Human
ggccaaaugaaaucugagcaau

SEQ ID NO: 940938 - RNA, 19 nt, Human
ugagaggcuuaaggcagcu

SEQ ID NO: 940939 - RNA, 22 nt, Human
acagagcugggugcccccugga

SEQ ID NO: 940940 - RNA, 22 nt, Human
cccagguggcagaagcugcagu

SEQ ID NO: 940941 - RNA, 22 nt, Human
caguggcgugaucucugcucac

SEQ ID NO: 940942 - RNA, 21 nt, Human
ucuuugcaucaguuguuuucu

SEQ ID NO: 940943 - RNA, 22 nt, Human
uuauuccauagaagucaaggaa

SEQ ID NO: 940944 - RNA, 22 nt, Human
cugacccauauaagaguggagg

SEQ ID NO: 940945 - RNA, 22 nt, Human
ucugggagagcugcugucagag

SEQ ID NO: 940946 - RNA, 22 nt, Human
ugcuggagaucauuaauguuca

SEQ ID NO: 940947 - RNA, 22 nt, Human
ugcagucuggauguccucagau

SEQ ID NO: 940948 - RNA, 22 nt, Human
aaaguguagagacuuuggaacc

SEQ ID NO: 940949 - RNA, 22 nt, Human
aacaguaaugugguguuggguu

SEQ ID NO: 940950 - RNA, 22 nt, Human
cucacugcaaguuccaccuacc

SEQ ID NO: 940951 - RNA, 22 nt, Human
agucucugugagcucccaaugg

SEQ ID NO: 940952 - RNA, 21 nt, Human
agaggcaggcauuaaguacac

SEQ ID NO: 940953 - RNA, 22 nt, Human
caguuucuucaucaguuaagca

SEQ ID NO: 940954 - RNA, 22 nt, Human
aacaaauguguuuuguaauuaa

SEQ ID NO: 940955 - RNA, 22 nt, Human
cagcagugaugugugaggguuc

SEQ ID NO: 940956 - RNA, 22 nt, Human
cugcagaggguuugagcauccu

SEQ ID NO: 940957 - RNA, 22 nt, Human
agccaugugucuuuauucuguu

SEQ ID NO: 940958 - RNA, 22 nt, Human
ucaggagcagcaugggugagag

SEQ ID NO: 940959 - RNA, 22 nt, Human
aggcagcuggcaaauucuagag

SEQ ID NO: 940960 - RNA, 22 nt, Human
auuguacaaugccuggaacauu

SEQ ID NO: 940961 - RNA, 22 nt, Human
auauuuucacagaacuugcaaa

SEQ ID NO: 940962 - RNA, 22 nt, Human
uucagauaaacuacaaauaauu

SEQ ID NO: 940963 - RNA, 22 nt, Human
agcucucaagauaagaaagaac

SEQ ID NO: 940964 - RNA, 22 nt, Human
agucccaggcagccgagccggu

SEQ ID NO: 940965 - RNA, 22 nt, Human
ggaaagagcccagcagugcuug

SEQ ID NO: 940966 - RNA, 22 nt, Human
auguuuuaugcuucagaugagg

SEQ ID NO: 940967 - RNA, 22 nt, Human
gagucccaugaugauagccaca

SEQ ID NO: 940968 - RNA, 22 nt, Human
agugucugaaccaccggggcau

SEQ ID NO: 940969 - RNA, 22 nt, Human
cugggacccugcccuguggccu

SEQ ID NO: 940970 - RNA, 22 nt, Human
caaaaguaauugcgguuuuugc

SEQ ID NO: 940971 - RNA, 20 nt, Human
agucccuuuggucagguauu

SEQ ID NO: 940972 - RNA, 22 nt, Human
ugacagaacagguugggagcaa

SEQ ID NO: 940973 - RNA, 22 nt, Human
acagcacaaucugagucccaga

SEQ ID NO: 940974 - RNA, 22 nt, Human
gcuggccagcccucuuccucca

SEQ ID NO: 940975 - RNA, 20 nt, Human
gucagaggacccuagagcga

SEQ ID NO: 940976 - RNA, 19 nt, Human
augucuggguaacagcugc

SEQ ID NO: 940977 - RNA, 22 nt, Human
ucgagcucuggagccaaggaug

SEQ ID NO: 940978 - RNA, 22 nt, Human
acaaaguuugugguauuccaag

SEQ ID NO: 940979 - RNA, 22 nt, Human
ccaaaaaguacauuuaggugug

SEQ ID NO: 940980 - RNA, 22 nt, Human
gaggccagaguuccccgaguca

SEQ ID NO: 940981 - RNA, 22 nt, Human
aauaacaggcucaucagaugcu

SEQ ID NO: 940982 - RNA, 22 nt, Human
gggugggaucuguggagccuca

SEQ ID NO: 940983 - RNA, 22 nt, Human
gccugccugaaggcuguaccag

SEQ ID NO: 940984 - RNA, 22 nt, Human
aaaaugcaugagaaugugcucg

SEQ ID NO: 940985 - RNA, 22 nt, Human
acugugggagcgcaguggcagc

SEQ ID NO: 940986 - RNA, 22 nt, Human
guggcucuccauugacauggaa

SEQ ID NO: 940987 - RNA, 22 nt, Human
gggcaguggcucacgccuguaa

SEQ ID NO: 940988 - RNA, 22 nt, Human
cagcugacagugaggugggggc

SEQ ID NO: 940989 - RNA, 22 nt, Human
augcugugucaccuuaggauuu

SEQ ID NO: 940990 - RNA, 22 nt, Human
aaguucaagagugacauauuag

SEQ ID NO: 940991 - RNA, 22 nt, Human
guuauauaagacaaaucagagu

SEQ ID NO: 940992 - RNA, 22 nt, Human
gaggcugcccaacuggagugga

SEQ ID NO: 940993 - RNA, 22 nt, Human
aggcagcugaccacaguaugau

SEQ ID NO: 940994 - RNA, 22 nt, Human
auauauuugagaauauucauga

SEQ ID NO: 940995 - RNA, 22 nt, Human
agccacagggggugagggacaa

SEQ ID NO: 940996 - RNA, 20 nt, Human
gcuuucaagcuugucauugu

SEQ ID NO: 940997 - RNA, 23 nt, Human
ugcuguccaacagacuggccaug

SEQ ID NO: 940998 - RNA, 22 nt, Human
uggaggugagugugguacagca

SEQ ID NO: 940999 - RNA, 22 nt, Human
aguuuuucugggaggcacugcu

SEQ ID NO: 941000 - RNA, 22 nt, Human
guauuagguuggugcaaaauug

SEQ ID NO: 941001 - RNA, 18 nt, Human
acagaacucaggggcacc

SEQ ID NO: 941002 - RNA, 22 nt, Human
gggcccagcgugguuccaucug

SEQ ID NO: 941003 - RNA, 22 nt, Human
ggaagggccucgggcgugggac

SEQ ID NO: 941004 - RNA, 22 nt, Human
caaacugagcaucagaaaguuu

SEQ ID NO: 941005 - RNA, 22 nt, Human
gucccugggaugcccuucuggg

SEQ ID NO: 941006 - RNA, 22 nt, Human
aagaggagacuucagcaacuug

SEQ ID NO: 941007 - RNA, 22 nt, Human
uugaaucuauguauucagugua

SEQ ID NO: 941008 - RNA, 20 nt, Human
uaaggcuguuuuguauuccu

SEQ ID NO: 941009 - RNA, 20 nt, Human
ccagguggugccuggagagg

SEQ ID NO: 941010 - RNA, 22 nt, Human
aaaaugagauacaguuugaaag

SEQ ID NO: 941011 - RNA, 22 nt, Human
cugcccugggauggucugugcg

SEQ ID NO: 941012 - RNA, 22 nt, Human
cagggacauugguggccagguu

SEQ ID NO: 941013 - RNA, 22 nt, Human
gcugcucuggcucugcaguguc

SEQ ID NO: 941014 - RNA, 22 nt, Human
uuaagauagaacccaguagucu

SEQ ID NO: 941015 - RNA, 22 nt, Human
ugauuaacugucuauuaaucau

SEQ ID NO: 941016 - RNA, 22 nt, Human
ggcagcugugaagugccucaca

SEQ ID NO: 941017 - RNA, 22 nt, Human
cagagacccuaggcaggugaca

SEQ ID NO: 941018 - RNA, 22 nt, Human
cugagcugggacucaguagcaa

SEQ ID NO: 941019 - RNA, 22 nt, Human
gggcaugguggugcacaccugu

SEQ ID NO: 941020 - RNA, 22 nt, Human
ugggcagacgcuguuggaaggc

SEQ ID NO: 941021 - RNA, 22 nt, Human
agaggccaggcugcagagggau

SEQ ID NO: 941022 - RNA, 22 nt, Human
uucagcaagaauuuacugagcu

SEQ ID NO: 941023 - RNA, 22 nt, Human
cugugucuaaucaggucaguca

SEQ ID NO: 941024 - RNA, 22 nt, Human
ucucagucagccuugauguccc

SEQ ID NO: 941025 - RNA, 22 nt, Human
caaauucagaaaauugguagag

SEQ ID NO: 941026 - RNA, 22 nt, Human
agaagccacuggagguugagau

SEQ ID NO: 941027 - RNA, 22 nt, Human
uuagaaauacaagugagguuga

SEQ ID NO: 941028 - RNA, 22 nt, Human
uaccucacugggccucaguuuu

SEQ ID NO: 941029 - RNA, 22 nt, Human
uccuggagccacggagcuuuca

SEQ ID NO: 941030 - RNA, 22 nt, Human
auuugcaaagucguaucuguga

SEQ ID NO: 941031 - RNA, 22 nt, Human
gcaggaguuaggcgucguggau

SEQ ID NO: 941032 - RNA, 22 nt, Human
uacaaaaguaauuacgguuuuu

SEQ ID NO: 941033 - RNA, 22 nt, Human
ucuucauuuuacaggcagaccu

SEQ ID NO: 941034 - RNA, 22 nt, Human
ucccuggccauuccucuaggcc

SEQ ID NO: 941035 - RNA, 22 nt, Human
agugcucauaaaaaugugaaac

SEQ ID NO: 941036 - RNA, 22 nt, Human
aggcacaggaaugucauccagu

SEQ ID NO: 941037 - RNA, 22 nt, Human
auauguuucaguauucaaguca

SEQ ID NO: 941038 - RNA, 22 nt, Human
auggcaguuguaugggcuguau

SEQ ID NO: 941039 - RNA, 21 nt, Human
agcagaacagucgagcacugc

SEQ ID NO: 941040 - RNA, 22 nt, Human
cacauugaaaugacccaauaau

SEQ ID NO: 941041 - RNA, 23 nt, Human
ccuggcuggauucucugcauuca

SEQ ID NO: 941042 - RNA, 22 nt, Human
cuguucaugcugauucuguaug

SEQ ID NO: 941043 - RNA, 22 nt, Human
uggccuguggcuuaaggucugu

SEQ ID NO: 941044 - RNA, 22 nt, Human
cuagcaucagaugagaagcugu

SEQ ID NO: 941045 - RNA, 22 nt, Human
uuggcagggccaggcucucucu

SEQ ID NO: 941046 - RNA, 22 nt, Human
uuucuucauagaccuugucuug

SEQ ID NO: 941047 - RNA, 22 nt, Human
ugugccagaaaauaugcugagg

SEQ ID NO: 941048 - RNA, 20 nt, Human
uccagggcaacuagagugug

SEQ ID NO: 941049 - RNA, 22 nt, Human
gcugcccucccagggcaagcuu

SEQ ID NO: 941050 - RNA, 22 nt, Human
gaagagcuuagacagaaucaaa

SEQ ID NO: 941051 - RNA, 22 nt, Human
gcccaggauucuuucuuccuua

SEQ ID NO: 941052 - RNA, 22 nt, Human
ucucaagagggaggcaaucaug

SEQ ID NO: 941053 - RNA, 22 nt, Human
uggaaagucucuuuugacugua

SEQ ID NO: 941054 - RNA, 22 nt, Human
uaaauguguguagccaucugug

SEQ ID NO: 941055 - RNA, 22 nt, Human
gagugugucggucagcguggcg

SEQ ID NO: 941056 - RNA, 22 nt, Human
gaggcccaggucaagcagccac

SEQ ID NO: 941057 - RNA, 22 nt, Human
ggcagugaaugaaacagaggcu

SEQ ID NO: 941058 - RNA, 17 nt, Human
uuagcaaaauagcacuu

SEQ ID NO: 941059 - RNA, 21 nt, Human
agcagcugggcaacauggagg

SEQ ID NO: 941060 - RNA, 22 nt, Human
cugaaaugguugccuggagaau

SEQ ID NO: 941061 - RNA, 22 nt, Human
ugccaggcgugguggugcgcac

SEQ ID NO: 941062 - RNA, 22 nt, Human
ucaggacagccagggugcagac

SEQ ID NO: 941063 - RNA, 22 nt, Human
uuuccuaguucuaagaaaugua

SEQ ID NO: 941064 - RNA, 22 nt, Human
agcugccuguccuaggccauca

SEQ ID NO: 941065 - RNA, 22 nt, Human
ucacucugguccauccgagagc

SEQ ID NO: 941066 - RNA, 22 nt, Human
uauuauuauaguuauugggaag

SEQ ID NO: 941067 - RNA, 22 nt, Human
aggcagguuggugagaagacug

SEQ ID NO: 941068 - RNA, 22 nt, Human
gagguagcaugcuggaagggac

SEQ ID NO: 941069 - RNA, 22 nt, Human
agggccugacacccuugccagc

SEQ ID NO: 941070 - RNA, 22 nt, Human
uggccacaguguccagcagcag

SEQ ID NO: 941071 - RNA, 22 nt, Human
aacucagucauaaagcgaaugc

SEQ ID NO: 941072 - RNA, 22 nt, Human
cuccauugaacauccucucaga

SEQ ID NO: 941073 - RNA, 22 nt, Human
ggccauggugguuugagcaccu

SEQ ID NO: 941074 - RNA, 22 nt, Human
gacccaggcucgugggacggcu

SEQ ID NO: 941075 - RNA, 22 nt, Human
gcuucccagcagaggaaagacu

SEQ ID NO: 941076 - RNA, 22 nt, Human
uacauuugcuuugauuuucagc

SEQ ID NO: 941077 - RNA, 22 nt, Human
ucugggaacucugucauuuccc

SEQ ID NO: 941078 - RNA, 22 nt, Human
uuucuaggucuuccauacugcc

SEQ ID NO: 941079 - RNA, 22 nt, Human
aucugaagcuaucugcacuuca

SEQ ID NO: 941080 - RNA, 22 nt, Human
cucugcagaauuugagcugcuc

SEQ ID NO: 941081 - RNA, 22 nt, Human
gaggagcuugaggcuaggagcc

SEQ ID NO: 941082 - RNA, 22 nt, Human
ucuuguccuaagagcuggauuc

SEQ ID NO: 941083 - RNA, 22 nt, Human
agcagaagaaagccacaugacu

SEQ ID NO: 941084 - RNA, 22 nt, Human
guggaaugaauagauuugcauu

SEQ ID NO: 941085 - RNA, 22 nt, Human
ugggcaagucacuucugucuuu

SEQ ID NO: 941086 - RNA, 22 nt, Human
ggaagaggaggagccaggcuuu

SEQ ID NO: 941087 - RNA, 22 nt, Human
aguggggucuccuccagccccc

SEQ ID NO: 941088 - RNA, 22 nt, Human
uagaaauaaaucugcagcuggg

SEQ ID NO: 941089 - RNA, 22 nt, Human
ggcacugaaccaggacacaagc

SEQ ID NO: 941090 - RNA, 22 nt, Human
accagagcgcucaagccuuccc

SEQ ID NO: 941091 - RNA, 19 nt, Human
gcuucccaccagccagccc

SEQ ID NO: 941092 - RNA, 22 nt, Human
ugugucagaaggcaauggggau

SEQ ID NO: 941093 - RNA, 22 nt, Human
uaaggcaccauaauauauuuaa

SEQ ID NO: 941094 - RNA, 22 nt, Human
cuuaagaauauugaaguugugg

SEQ ID NO: 941095 - RNA, 22 nt, Human
ccuggcugguggcagcgacaag

SEQ ID NO: 941096 - RNA, 20 nt, Human
ugagccaaacgaugaagagc

SEQ ID NO: 941097 - RNA, 22 nt, Human
cauauaaauacaacauguguua

SEQ ID NO: 941098 - RNA, 22 nt, Human
cugaggaugguguggucuucuc

SEQ ID NO: 941099 - RNA, 22 nt, Human
gugccugugccaggggugugcu

SEQ ID NO: 941100 - RNA, 22 nt, Human
gugccagcaguuauggugauuu

SEQ ID NO: 941101 - RNA, 18 nt, Human
aggcacuggaauuaaggg

SEQ ID NO: 941102 - RNA, 22 nt, Human
gagacagcacaggccacuggga

SEQ ID NO: 941103 - RNA, 22 nt, Human
ugaggcaggagaauggcgggaa

SEQ ID NO: 941104 - RNA, 22 nt, Human
guugcacaguuccucaagcagg

SEQ ID NO: 941105 - RNA, 22 nt, Human
acugcagccuagggaccacagu

SEQ ID NO: 941106 - RNA, 22 nt, Human
gcuguccagagcaugggagcaa

SEQ ID NO: 941107 - RNA, 22 nt, Human
aacaaaugaccugauuucuucc

SEQ ID NO: 941108 - RNA, 23 nt, Human
ucuccuccuagauacagucaugg

SEQ ID NO: 941109 - RNA, 22 nt, Human
caggcuugauuauucagacaau

SEQ ID NO: 941110 - RNA, 21 nt, Human
ugcauuccuccauccaacagg

SEQ ID NO: 941111 - RNA, 22 nt, Human
accaggcugugaagugagacua

SEQ ID NO: 941112 - RNA, 22 nt, Human
gacagcugugcaggagaagggg

SEQ ID NO: 941113 - RNA, 22 nt, Human
gccacugcacuccagcccaggc

SEQ ID NO: 941114 - RNA, 22 nt, Human
aaaugcaccuugcugugagacu

SEQ ID NO: 941115 - RNA, 22 nt, Human
uccucagaauggauggcagggg

SEQ ID NO: 941116 - RNA, 22 nt, Human
ggcaggcugcuugggucauguc

SEQ ID NO: 941117 - RNA, 22 nt, Human
cagaaauguuuauauguggugu

SEQ ID NO: 941118 - RNA, 22 nt, Human
gaaauuuauuaucuacaucauu

SEQ ID NO: 941119 - RNA, 22 nt, Human
ccugcuguaaugugucuuuauu

SEQ ID NO: 941120 - RNA, 19 nt, Human
gccugccuggguuucugag

SEQ ID NO: 941121 - RNA, 22 nt, Human
gcucagccgaacuucagagcag

SEQ ID NO: 941122 - RNA, 22 nt, Human
ucccuggcuguguucaggugcg

SEQ ID NO: 941123 - RNA, 22 nt, Human
uauggcauauaguccagcauaa

SEQ ID NO: 941124 - RNA, 22 nt, Human
uccaugagggacacuggaugcu

SEQ ID NO: 941125 - RNA, 22 nt, Human
aagugacauaccuuacauaugu

SEQ ID NO: 941126 - RNA, 22 nt, Human
aacagacaacuccuguggcuca

SEQ ID NO: 941127 - RNA, 22 nt, Human
gcgaaaaauguguaaauauguu

SEQ ID NO: 941128 - RNA, 22 nt, Human
aggacagaccuaggacuggagc

SEQ ID NO: 941129 - RNA, 22 nt, Human
ugcaagggcuuagggggcugug

SEQ ID NO: 941130 - RNA, 22 nt, Human
gaggcacugcugggccccugua

SEQ ID NO: 941131 - RNA, 22 nt, Human
gcccaguaguucaagguugcag

SEQ ID NO: 941132 - RNA, 22 nt, Human
aggaaacuccccuacaucucaa

SEQ ID NO: 941133 - RNA, 22 nt, Human
gaccuuuuuacuguguacgcug

SEQ ID NO: 941134 - RNA, 22 nt, Human
caggcacagaguuauucauuua

SEQ ID NO: 941135 - RNA, 22 nt, Human
ggcugccuucagacuccagcuu

SEQ ID NO: 941136 - RNA, 20 nt, Human
agggcagcuugaggagccgg

SEQ ID NO: 941137 - RNA, 20 nt, Human
caggcacacucauuccugcu

SEQ ID NO: 941138 - RNA, 21 nt, Human
agaugcugugcuccaggagca

SEQ ID NO: 941139 - RNA, 22 nt, Human
cuguccagcugaccagagcagc

SEQ ID NO: 941140 - RNA, 22 nt, Human
ggaggugggauuaggaccuaaa

SEQ ID NO: 941141 - RNA, 22 nt, Human
agaagcagacucugaggcaagg

SEQ ID NO: 941142 - RNA, 18 nt, Human
uucacaggaaaugucuuu

SEQ ID NO: 941143 - RNA, 22 nt, Human
aaacagcuggucucaaauguuc

SEQ ID NO: 941144 - RNA, 22 nt, Human
agccuggagaagauguguauug

SEQ ID NO: 941145 - RNA, 19 nt, Human
uucacauuggaagaaguag

SEQ ID NO: 941146 - RNA, 22 nt, Human
caguauguuugggagacaugac

SEQ ID NO: 941147 - RNA, 22 nt, Human
gcucucuggguggugggcaaca

SEQ ID NO: 941148 - RNA, 22 nt, Human
acacauauucauauguacuuac

SEQ ID NO: 941149 - RNA, 22 nt, Human
ggcacugagcgggcucugagcg

SEQ ID NO: 941150 - RNA, 22 nt, Human
uuagccaugcccuagaagagga

SEQ ID NO: 941151 - RNA, 22 nt, Human
ccaggcugagcaugauuggagc

SEQ ID NO: 941152 - RNA, 22 nt, Human
gcugggagccguaccugucacg

SEQ ID NO: 941153 - RNA, 22 nt, Human
uuuauuuggcaucucugccaag

SEQ ID NO: 941154 - RNA, 22 nt, Human
uuuacagaucuguugauuuguu

SEQ ID NO: 941155 - RNA, 22 nt, Human
augguuuguguggcccagauga

SEQ ID NO: 941156 - RNA, 21 nt, Human
ugcugaugucagagaagcaag

SEQ ID NO: 941157 - RNA, 22 nt, Human
ugcauugcaguuaacucaguau

SEQ ID NO: 941158 - RNA, 20 nt, Human
gaggcugcggacugcuggac

SEQ ID NO: 941159 - RNA, 22 nt, Human
cugaaaauguuacacaggaaga

SEQ ID NO: 941160 - RNA, 22 nt, Human
aauauaugugguauugaccagc

SEQ ID NO: 941161 - RNA, 20 nt, Human
auaauuuacccugcaccacu

SEQ ID NO: 941162 - RNA, 22 nt, Human
ccaaggagcugcaggcacuugu

SEQ ID NO: 941163 - RNA, 22 nt, Human
aggcugcuuccuuacguggcug

SEQ ID NO: 941164 - RNA, 22 nt, Human
gcaggcagaucaccugucagga

SEQ ID NO: 941165 - RNA, 22 nt, Human
gaggaaaauggaguguaauuaa

SEQ ID NO: 941166 - RNA, 22 nt, Human
gcugccaugccacagcacucac

SEQ ID NO: 941167 - RNA, 20 nt, Human
ccugucuggagacaaagaga

SEQ ID NO: 941168 - RNA, 22 nt, Human
ugcucccagggacucuggcugg

SEQ ID NO: 941169 - RNA, 22 nt, Human
aauguguauacuggcaauuaag

SEQ ID NO: 941170 - RNA, 22 nt, Human
auacauuagcucauaugauuaa

SEQ ID NO: 941171 - RNA, 22 nt, Human
cagggccugcuuccuucuuguu

SEQ ID NO: 941172 - RNA, 22 nt, Human
ugugcaaaguguacaaauuaau

SEQ ID NO: 941173 - RNA, 22 nt, Human
ugugacaucgcugugucuguuu

SEQ ID NO: 941174 - RNA, 22 nt, Human
uucuucuugaaacuuuagguug

SEQ ID NO: 941175 - RNA, 22 nt, Human
caggauggugugagugugagga

SEQ ID NO: 941176 - RNA, 21 nt, Human
uccauuguuuucccaggguuu

SEQ ID NO: 941177 - RNA, 20 nt, Human
accuugaacccgccagccau

SEQ ID NO: 941178 - RNA, 20 nt, Human
aggagcugaauuagaggguu

SEQ ID NO: 941179 - RNA, 22 nt, Human
acauguguacauauauaugugc

SEQ ID NO: 941180 - RNA, 22 nt, Human
gggccacacagaaccuccuggu

SEQ ID NO: 941181 - RNA, 22 nt, Human
auuuucugguugagguuuaaca

SEQ ID NO: 941182 - RNA, 22 nt, Human
gcucccugaaaagaacaaaguc

SEQ ID NO: 941183 - RNA, 22 nt, Human
uuguacaaauaggaaccucuga

SEQ ID NO: 941184 - RNA, 22 nt, Human
aaaguaaccuaguaauaguguc

SEQ ID NO: 941185 - RNA, 22 nt, Human
acuuugcacuaaguuacucauu

SEQ ID NO: 941186 - RNA, 22 nt, Human
auauuccauugguuucccuucu

SEQ ID NO: 941187 - RNA, 22 nt, Human
caaggccauauugccuguaugu

SEQ ID NO: 941188 - RNA, 22 nt, Human
aaaagcuagucaaugauguauu

SEQ ID NO: 941189 - RNA, 22 nt, Human
auaauuuaauuuucacaguggu

SEQ ID NO: 941190 - RNA, 22 nt, Human
uuucucugaggcuggccucccu

SEQ ID NO: 941191 - RNA, 22 nt, Human
uccagggagauacuggcugcca

SEQ ID NO: 941192 - RNA, 22 nt, Human
ggcuucugguaaagaccacacc

SEQ ID NO: 941193 - RNA, 22 nt, Human
aggccugaaggaagaugagcug

SEQ ID NO: 941194 - RNA, 22 nt, Human
uaaaugcagcaguuucuguucu

SEQ ID NO: 941195 - RNA, 22 nt, Human
ccagcugacgaugccuggucuc

SEQ ID NO: 941196 - RNA, 22 nt, Human
gcccaggaaagauagggccuca

SEQ ID NO: 941197 - RNA, 22 nt, Human
uggcagggaauacagauguuua

SEQ ID NO: 941198 - RNA, 22 nt, Human
uaacuaacuaguguucaaaaua

SEQ ID NO: 941199 - RNA, 22 nt, Human
agugaaauuuguuuagauaggu

SEQ ID NO: 941200 - RNA, 22 nt, Human
gcugucaggaacaugccuuggu

SEQ ID NO: 941201 - RNA, 23 nt, Human
gccucagagaaacagcugcacac

SEQ ID NO: 941202 - RNA, 20 nt, Human
ucacuaguaaccaucugcuu

SEQ ID NO: 941203 - RNA, 22 nt, Human
aggagccuccuucucaugugca

SEQ ID NO: 941204 - RNA, 22 nt, Human
ucacucugucccccauugagau

SEQ ID NO: 941205 - RNA, 22 nt, Human
ccuguggggccaucucagucac

SEQ ID NO: 941206 - RNA, 22 nt, Human
uagggcaguuauaacauuagug

SEQ ID NO: 941207 - RNA, 22 nt, Human
uagaaacucaggauacucuucc

SEQ ID NO: 941208 - RNA, 22 nt, Human
gccugguggacacugggcauca

SEQ ID NO: 941209 - RNA, 22 nt, Human
uauguacaccggggaagguggg

SEQ ID NO: 941210 - RNA, 22 nt, Human
cagauggcaacagcucugugac

SEQ ID NO: 941211 - RNA, 22 nt, Human
ucuuagaaauuccccaguggcu

SEQ ID NO: 941212 - RNA, 22 nt, Human
aaaggucagacuuaggcugggc

SEQ ID NO: 941213 - RNA, 22 nt, Human
acauuucugucuuagggacugu

SEQ ID NO: 941214 - RNA, 22 nt, Human
aguguggguuuuauggagcccu

SEQ ID NO: 941215 - RNA, 23 nt, Human
uuccuggcagguacaacuuuuac

SEQ ID NO: 941216 - RNA, 22 nt, Human
cagccuucugaaugaacguacu

SEQ ID NO: 941217 - RNA, 22 nt, Human
aucccugcccucauggagcuua

SEQ ID NO: 941218 - RNA, 22 nt, Human
auaaggcagugacuucaucuau

SEQ ID NO: 941219 - RNA, 22 nt, Human
gauuuagagaauguuuuguaag

SEQ ID NO: 941220 - RNA, 22 nt, Human
auguucuuccaaaucuguaaca

SEQ ID NO: 941221 - RNA, 22 nt, Human
gcugccuuuuaaagccucgcuu

SEQ ID NO: 941222 - RNA, 22 nt, Human
cagagccacuuggagaugagaa

SEQ ID NO: 941223 - RNA, 22 nt, Human
gcaucuaauccaguccagcauc

SEQ ID NO: 941224 - RNA, 22 nt, Human
uaacagaauagcagaaacagaa

SEQ ID NO: 941225 - RNA, 22 nt, Human
cugccuggguucaaguccuguu

SEQ ID NO: 941226 - RNA, 22 nt, Human
uauaugcuaauggugccauucc

SEQ ID NO: 941227 - RNA, 22 nt, Human
cuguggagugcuuggcucagug

SEQ ID NO: 941228 - RNA, 22 nt, Human
agugugagcccuggaguggugc

SEQ ID NO: 941229 - RNA, 22 nt, Human
agggcagccauugagggauucu

SEQ ID NO: 941230 - RNA, 22 nt, Human
gagcagcugguaggugaaccca

SEQ ID NO: 941231 - RNA, 22 nt, Human
gagcaggcucugccuguguguc

SEQ ID NO: 941232 - RNA, 22 nt, Human
ucugucacuauuggccagaaca

SEQ ID NO: 941233 - RNA, 21 nt, Human
ucaggagagcccaucuacaaa

SEQ ID NO: 941234 - RNA, 22 nt, Human
acagccagggucucaggaggcg

SEQ ID NO: 941235 - RNA, 22 nt, Human
gccugugcuuaacugacgugag

SEQ ID NO: 941236 - RNA, 22 nt, Human
ugucuucagcaaaugccuuucu

SEQ ID NO: 941237 - RNA, 22 nt, Human
gcaggccugacuguagggggca

SEQ ID NO: 941238 - RNA, 22 nt, Human
uggcacauagaaaaggaucaau

SEQ ID NO: 941239 - RNA, 22 nt, Human
ccagcccugccucucagggccc

SEQ ID NO: 941240 - RNA, 22 nt, Human
uggacucagugcugccauuccc

SEQ ID NO: 941241 - RNA, 22 nt, Human
ucacagacacagggagaagcau

SEQ ID NO: 941242 - RNA, 22 nt, Human
uacaaagugugcccaugcugag

SEQ ID NO: 941243 - RNA, 22 nt, Human
ugguccugagcaccagccugac

SEQ ID NO: 941244 - RNA, 22 nt, Human
aaggcagcaccgccuccugaaa

SEQ ID NO: 941245 - RNA, 21 nt, Human
ccuggcuucagggugcacugg

SEQ ID NO: 941246 - RNA, 22 nt, Human
aguuucuuuagauagaaaguuc

SEQ ID NO: 941247 - RNA, 22 nt, Human
gggcuaggcuuggccagcacug

SEQ ID NO: 941248 - RNA, 22 nt, Human
ugggcuccucgucacucgcugu

SEQ ID NO: 941249 - RNA, 16 nt, Human
gggcugggggauucug

SEQ ID NO: 941250 - RNA, 19 nt, Human
cauaauacaguggaucuga

SEQ ID NO: 941251 - RNA, 22 nt, Human
accaucagucacauguagagaa

SEQ ID NO: 941252 - RNA, 20 nt, Human
gaggaaaagcugccaggccu

SEQ ID NO: 941253 - RNA, 22 nt, Human
ccaggccuuucuucuuggucug

SEQ ID NO: 941254 - RNA, 22 nt, Human
gugggacagcuggagggucccu

SEQ ID NO: 941255 - RNA, 22 nt, Human
ucccagcagucagagcuaugug

SEQ ID NO: 941256 - RNA, 22 nt, Human
uagccaggcgaggucagugucg

SEQ ID NO: 941257 - RNA, 22 nt, Human
guggguggaggcgucgagggca

SEQ ID NO: 941258 - RNA, 22 nt, Human
aaacuacuaugggaauguacuu

SEQ ID NO: 941259 - RNA, 22 nt, Human
ucccaggaaaacacucgaggac

SEQ ID NO: 941260 - RNA, 22 nt, Human
gacauuucaaucucauuauggg

SEQ ID NO: 941261 - RNA, 22 nt, Human
ugcccugugugugcaagcacug

SEQ ID NO: 941262 - RNA, 22 nt, Human
gccaggaguucagaugcauguu

SEQ ID NO: 941263 - RNA, 22 nt, Human
ggccucugccucaucugggcac

SEQ ID NO: 941264 - RNA, 22 nt, Human
gccuggagaagauggaacuagc

SEQ ID NO: 941265 - RNA, 20 nt, Human
gcugcucuccacggucugca

SEQ ID NO: 941266 - RNA, 22 nt, Human
uggccagguguggguucucaga

SEQ ID NO: 941267 - RNA, 19 nt, Human
uccaggaggcugccauuga

SEQ ID NO: 941268 - RNA, 22 nt, Human
ugugugccagccuacgaggagc

SEQ ID NO: 941269 - RNA, 22 nt, Human
cccuggaagguucucuggcuca

SEQ ID NO: 941270 - RNA, 22 nt, Human
gaggcugugugucccucuggac

SEQ ID NO: 941271 - RNA, 22 nt, Human
uggugugggcguggcaggcaag

SEQ ID NO: 941272 - RNA, 22 nt, Human
gcucugcugagauaucugggag

SEQ ID NO: 941273 - RNA, 22 nt, Human
ugcaccauacccauuccccucu

SEQ ID NO: 941274 - RNA, 22 nt, Human
cugggugguuuugaugugaauu

SEQ ID NO: 941275 - RNA, 22 nt, Human
auuucugugcaguaaaugguga

SEQ ID NO: 941276 - RNA, 21 nt, Human
uccuuccuugagguccuuucc

SEQ ID NO: 941277 - RNA, 20 nt, Human
aggaaaaauggaaacuggag

SEQ ID NO: 941278 - RNA, 19 nt, Human
uggucuaaaugugugcccc

SEQ ID NO: 941279 - RNA, 20 nt, Human
augccucuaauuuugcaaac

SEQ ID NO: 941280 - RNA, 22 nt, Human
auggacaggcugagcuuccuca

SEQ ID NO: 941281 - RNA, 22 nt, Human
ucuguucagacacuuuacaugu

SEQ ID NO: 941282 - RNA, 22 nt, Human
uccuugaaaagaaugucuccau

SEQ ID NO: 941283 - RNA, 22 nt, Human
aggccucuucagggagcaugga

SEQ ID NO: 941284 - RNA, 22 nt, Human
ccuggccacccagccuuggcca

SEQ ID NO: 941285 - RNA, 22 nt, Human
uuguuucugaguuuucauguau

SEQ ID NO: 941286 - RNA, 22 nt, Human
uuucacauuagauaugucauuu

SEQ ID NO: 941287 - RNA, 22 nt, Human
ugcacauuaguguuugagaugc

SEQ ID NO: 941288 - RNA, 22 nt, Human
cacugaguucccugacauuuca

SEQ ID NO: 941289 - RNA, 22 nt, Human
uuguaacaggcacucugugcca

SEQ ID NO: 941290 - RNA, 22 nt, Human
auuguggugucaguuauaggca

SEQ ID NO: 941291 - RNA, 22 nt, Human
ucaguuuucucaucuguaauuu

SEQ ID NO: 941292 - RNA, 22 nt, Human
uuccgcuguuuaguugaaguuu

SEQ ID NO: 941293 - RNA, 22 nt, Human
aaccaggugacucauggugagc

SEQ ID NO: 941294 - RNA, 22 nt, Human
gcagaggagaugaagauacuuu

SEQ ID NO: 941295 - RNA, 22 nt, Human
aagaggaacugggggcugaguc

SEQ ID NO: 941296 - RNA, 22 nt, Human
uauuuugacuauuaaaccaaca

SEQ ID NO: 941297 - RNA, 22 nt, Human
aggaugagccgcgcaagcugac

SEQ ID NO: 941298 - RNA, 22 nt, Human
cugagcuuggccaggaaugaau

SEQ ID NO: 941299 - RNA, 22 nt, Human
acauuucucuuagaguuggacu

SEQ ID NO: 941300 - RNA, 23 nt, Human
gccuucagcucgggaaggcuccc

SEQ ID NO: 941301 - RNA, 22 nt, Human
uuagccauggacugaauugacu

SEQ ID NO: 941302 - RNA, 22 nt, Human
cauacauaugcauguguguaua

SEQ ID NO: 941303 - RNA, 22 nt, Human
aagaugauguuguguuuucacu

SEQ ID NO: 941304 - RNA, 22 nt, Human
ucaggagacauucuuaaaguag

SEQ ID NO: 941305 - RNA, 22 nt, Human
uuuuugcaccaaccuaauagaa

SEQ ID NO: 941306 - RNA, 22 nt, Human
ucacguuuuacugagugagaua

SEQ ID NO: 941307 - RNA, 22 nt, Human
gccucugcaacuccgccuuggu

SEQ ID NO: 941308 - RNA, 22 nt, Human
cagccaggccuggugaccaaag

SEQ ID NO: 941309 - RNA, 22 nt, Human
guggcagcaaaauccugcauuc

SEQ ID NO: 941310 - RNA, 23 nt, Human
aaggucacagaacuuagcaagcc

SEQ ID NO: 941311 - RNA, 22 nt, Human
ccuggcugcuauagcagcaugu

SEQ ID NO: 941312 - RNA, 22 nt, Human
uuuaaaauuuagaccucuccac

SEQ ID NO: 941313 - RNA, 22 nt, Human
agcagagcuauucuugugcaau

SEQ ID NO: 941314 - RNA, 22 nt, Human
accaaggaagaaucuauuugag

SEQ ID NO: 941315 - RNA, 22 nt, Human
uugugaaauguuucaaaauagu

SEQ ID NO: 941316 - RNA, 22 nt, Human
cccaggaagaggggucaggugu

SEQ ID NO: 941317 - RNA, 22 nt, Human
ucugagccuauuucaaauuccu

SEQ ID NO: 941318 - RNA, 22 nt, Human
ggagccaggggaccuucacaga

SEQ ID NO: 941319 - RNA, 22 nt, Human
ucaggagggugacaggcccugg

SEQ ID NO: 941320 - RNA, 22 nt, Human
gguucacacuuucaugauuuca

SEQ ID NO: 941321 - RNA, 22 nt, Human
aauaggcaguuggauaugcaag

SEQ ID NO: 941322 - RNA, 22 nt, Human
gcagggugauagugaggcucag

SEQ ID NO: 941323 - RNA, 22 nt, Human
cuggccuguccugacccagccu

SEQ ID NO: 941324 - RNA, 19 nt, Human
cugugcaggccgggcugag

SEQ ID NO: 941325 - RNA, 19 nt, Human
uaucuguuuccugcuuguc

SEQ ID NO: 941326 - RNA, 22 nt, Human
aaaaacuguaauuacuuuugca

SEQ ID NO: 941327 - RNA, 22 nt, Human
agggagcugagcugugagcagc

SEQ ID NO: 941328 - RNA, 22 nt, Human
cccucuacagggaagcgcuuuc

SEQ ID NO: 941329 - RNA, 22 nt, Human
auuuggauucuuauuuagcacu

SEQ ID NO: 941330 - RNA, 22 nt, Human
cauaccuuucucaagcacaugu

SEQ ID NO: 941331 - RNA, 22 nt, Human
agccuguccagaggacagggcu

SEQ ID NO: 941332 - RNA, 22 nt, Human
acucuucuugcugcucauuaau

SEQ ID NO: 941333 - RNA, 17 nt, Human
aggugcuggagcaucag

SEQ ID NO: 941334 - RNA, 22 nt, Human
ggcccaucucuugcucuggguu

SEQ ID NO: 941335 - RNA, 22 nt, Human
ucagcagauggguuguguuggc

SEQ ID NO: 941336 - RNA, 23 nt, Human
ugggcaucuccucugugccaggc

SEQ ID NO: 941337 - RNA, 20 nt, Human
gaguuccccauuucuccugg

SEQ ID NO: 941338 - RNA, 22 nt, Human
ugucccucugaggcuucccugg

SEQ ID NO: 941339 - RNA, 22 nt, Human
uccaagaagucaucuaaacugu

SEQ ID NO: 941340 - RNA, 22 nt, Human
agcaccugcuugugacuaggga

SEQ ID NO: 941341 - RNA, 21 nt, Human
uccauaagagaccaucuccua

SEQ ID NO: 941342 - RNA, 22 nt, Human
uaaaugugucuauggacccgcc

SEQ ID NO: 941343 - RNA, 22 nt, Human
augaagcuaaacccugcagcca

SEQ ID NO: 941344 - RNA, 22 nt, Human
cuccugaguaguagcauuguca

SEQ ID NO: 941345 - RNA, 19 nt, Human
uuugcagugguuccuuugu

SEQ ID NO: 941346 - RNA, 22 nt, Human
cuguuuauuacacuggauagca

SEQ ID NO: 941347 - RNA, 22 nt, Human
uggguggcggccugguucugag

SEQ ID NO: 941348 - RNA, 22 nt, Human
ucagcuccucaugcaggggaua

SEQ ID NO: 941349 - RNA, 22 nt, Human
cuggcucagugccuucagaagu

SEQ ID NO: 941350 - RNA, 22 nt, Human
uucuuugaguuaguacagucca

SEQ ID NO: 941351 - RNA, 22 nt, Human
augcaguauaaaucauuucugg

SEQ ID NO: 941352 - RNA, 22 nt, Human
caccuugugauccucuugccuu

SEQ ID NO: 941353 - RNA, 22 nt, Human
cagagcugguaagugguagagg

SEQ ID NO: 941354 - RNA, 22 nt, Human
gcccugugcgacucuagagguu

SEQ ID NO: 941355 - RNA, 21 nt, Human
gcccucaggggaggauggccu

SEQ ID NO: 941356 - RNA, 22 nt, Human
gcuccacuugcagcuaggcuug

SEQ ID NO: 941357 - RNA, 22 nt, Human
ccaggagucaauaaaggaagcu

SEQ ID NO: 941358 - RNA, 22 nt, Human
accucugcaguagggcugugcc

SEQ ID NO: 941359 - RNA, 22 nt, Human
agaaaauauucauugagaggcu

SEQ ID NO: 941360 - RNA, 22 nt, Human
cagagcugacccaaggauugaa

SEQ ID NO: 941361 - RNA, 22 nt, Human
cuacuucugugaugaaacuaca

SEQ ID NO: 941362 - RNA, 22 nt, Human
gcugcagcucgccuuccggccu

SEQ ID NO: 941363 - RNA, 18 nt, Human
acaaaggucugcaagacc

SEQ ID NO: 941364 - RNA, 22 nt, Human
cauuaagauuuuuuucuacugg

SEQ ID NO: 941365 - RNA, 22 nt, Human
uaugauuuguagacauuugauu

SEQ ID NO: 941366 - RNA, 20 nt, Human
ucucccaggcucagggaaga

SEQ ID NO: 941367 - RNA, 21 nt, Human
uuucuucacuuugccccaugu

SEQ ID NO: 941368 - RNA, 17 nt, Human
ggccuuggggccucagu

SEQ ID NO: 941369 - RNA, 22 nt, Human
ugggcagagucguggggaauag

SEQ ID NO: 941370 - RNA, 22 nt, Human
aagggcagccugacucacgguc

SEQ ID NO: 941371 - RNA, 22 nt, Human
gccugucugcagggcugucauu

SEQ ID NO: 941372 - RNA, 18 nt, Human
ucuuggaguaaugaucaa

SEQ ID NO: 941373 - RNA, 18 nt, Human
cagagcagagguggagcg

SEQ ID NO: 941374 - RNA, 22 nt, Human
ucuggcucuccagugcucuuag

SEQ ID NO: 941375 - RNA, 22 nt, Human
aaaucaguucucccuuucuuca

SEQ ID NO: 941376 - RNA, 22 nt, Human
uuuuugaaggcugaugugauua

SEQ ID NO: 941377 - RNA, 22 nt, Human
ugucccuggaacuauggcucca

SEQ ID NO: 941378 - RNA, 21 nt, Human
uggccucccacacuuccaugg

SEQ ID NO: 941379 - RNA, 22 nt, Human
guucauauuacuuugagugcag

SEQ ID NO: 941380 - RNA, 22 nt, Human
agcagccauagauagcaugcaa

SEQ ID NO: 941381 - RNA, 22 nt, Human
cugucagcacucuacuacagau

SEQ ID NO: 941382 - RNA, 22 nt, Human
acagccuguuugaucuggugcu

SEQ ID NO: 941383 - RNA, 22 nt, Human
gauuuccucacuaacauccauc

SEQ ID NO: 941384 - RNA, 22 nt, Human
uugagaagaggcuuuguaggaa

SEQ ID NO: 941385 - RNA, 22 nt, Human
ucagcaguguaguuuaucauuc

SEQ ID NO: 941386 - RNA, 22 nt, Human
ucaggagauggucuuuauaggc

SEQ ID NO: 941387 - RNA, 20 nt, Human
uccuggccuucucgggcagu

SEQ ID NO: 941388 - RNA, 22 nt, Human
ugccugggaaccaauccuggcu

SEQ ID NO: 941389 - RNA, 22 nt, Human
uagcagggucucaggagucagg

SEQ ID NO: 941390 - RNA, 22 nt, Human
augcacagcagugaguucagug

SEQ ID NO: 941391 - RNA, 22 nt, Human
uacacacagaggccaugggauu

SEQ ID NO: 941392 - RNA, 22 nt, Human
aaggcagcagugcacgacugau

SEQ ID NO: 941393 - RNA, 18 nt, Human
agaguguucucagugaaa

SEQ ID NO: 941394 - RNA, 22 nt, Human
uccaggaggguuuucugccuuc

SEQ ID NO: 941395 - RNA, 22 nt, Human
uggcaucauagccaaggugcuu

SEQ ID NO: 941396 - RNA, 22 nt, Human
uuucaaagucaauaucauuacc

SEQ ID NO: 941397 - RNA, 20 nt, Human
uaggcagagcugugcagccu

SEQ ID NO: 941398 - RNA, 22 nt, Human
gcauacagagaggauguggcau

SEQ ID NO: 941399 - RNA, 20 nt, Human
uggggccuguuucugugguu

SEQ ID NO: 941400 - RNA, 22 nt, Human
augauacaagcaaaacuaauca

SEQ ID NO: 941401 - RNA, 22 nt, Human
uuccaggaagcaguuagcagcc

SEQ ID NO: 941402 - RNA, 22 nt, Human
caggguggaaaagcuaguugga

SEQ ID NO: 941403 - RNA, 22 nt, Human
ucccaggaauugaagccagugu

SEQ ID NO: 941404 - RNA, 22 nt, Human
cugggcucagcccaugcugucc

SEQ ID NO: 941405 - RNA, 20 nt, Human
gucugaggagcagugggaaa

SEQ ID NO: 941406 - RNA, 21 nt, Human
ccugggccaaauucccuggac

SEQ ID NO: 941407 - RNA, 22 nt, Human
agcaccuucacaggcucucagg

SEQ ID NO: 941408 - RNA, 18 nt, Human
aguguuaaguaaguagca

SEQ ID NO: 941409 - RNA, 22 nt, Human
ugacagggcuagaggcaaugca

SEQ ID NO: 941410 - RNA, 22 nt, Human
guggcugcuacagagcuggagg

SEQ ID NO: 941411 - RNA, 22 nt, Human
uccagccuaggggaacagcugc

SEQ ID NO: 941412 - RNA, 22 nt, Human
acuuccugcuaugagcuucugu

SEQ ID NO: 941413 - RNA, 22 nt, Human
ccacccugagccgcaagagcag

SEQ ID NO: 941414 - RNA, 22 nt, Human
cccauuuaaacacaagcuuuca

SEQ ID NO: 941415 - RNA, 17 nt, Human
ggucuggggccauuggc

SEQ ID NO: 941416 - RNA, 22 nt, Human
ucccagauuguugauggcuuaa

SEQ ID NO: 941417 - RNA, 22 nt, Human
uuacaagauaaccugaugcugu

SEQ ID NO: 941418 - RNA, 18 nt, Human
ggucuuuaggucaguguc

SEQ ID NO: 941419 - RNA, 22 nt, Human
uucuuucccagaagauauguuu

SEQ ID NO: 941420 - RNA, 22 nt, Human
aagggacuuugucagcuuucca

SEQ ID NO: 941421 - RNA, 22 nt, Human
ucaggaugaccacgagccucua

SEQ ID NO: 941422 - RNA, 22 nt, Human
acauuccugaggaaauacauuc

SEQ ID NO: 941423 - RNA, 23 nt, Human
agaugaaagcuucccaucacagu

SEQ ID NO: 941424 - RNA, 22 nt, Human
acacagccaggguaguaaggcu

SEQ ID NO: 941425 - RNA, 22 nt, Human
ugucccagggaaggcccagcac

SEQ ID NO: 941426 - RNA, 22 nt, Human
guauuaggagguggagccuuug

SEQ ID NO: 941427 - RNA, 22 nt, Human
cugccuugaaaaugaagcuuua

SEQ ID NO: 941428 - RNA, 22 nt, Human
caaggccaguucaccaagggca

SEQ ID NO: 941429 - RNA, 20 nt, Human
uuucaguugguuaauggcau

SEQ ID NO: 941430 - RNA, 22 nt, Human
cacuaaguaagcuccucuacaa

SEQ ID NO: 941431 - RNA, 22 nt, Human
uauuuccaggccccacucuaga

SEQ ID NO: 941432 - RNA, 22 nt, Human
cuuuauuagauguagacuuucu

SEQ ID NO: 941433 - RNA, 22 nt, Human
uuuauaaguacuuugucugcuu

SEQ ID NO: 941434 - RNA, 22 nt, Human
augcaagauguauagaagacuu

SEQ ID NO: 941435 - RNA, 22 nt, Human
cugagggucaacuugauuguau

SEQ ID NO: 941436 - RNA, 22 nt, Human
uagcacauacauaauagauaga

SEQ ID NO: 941437 - RNA, 22 nt, Human
aaugcuuuuugcgaaaugugca

SEQ ID NO: 941438 - RNA, 20 nt, Human
cccaggagcugugccccauc

SEQ ID NO: 941439 - RNA, 22 nt, Human
gcaggggcugagcaccagcggg

SEQ ID NO: 941440 - RNA, 22 nt, Human
augauugaaaaugacauugcca

SEQ ID NO: 941441 - RNA, 22 nt, Human
ucugucuucaucagcaugugau

SEQ ID NO: 941442 - RNA, 19 nt, Human
agcagagcagggccguggg

SEQ ID NO: 941443 - RNA, 22 nt, Human
cagcuggcccuuugguagccuu

SEQ ID NO: 941444 - RNA, 22 nt, Human
aaauauguaagauuagcacuag

SEQ ID NO: 941445 - RNA, 22 nt, Human
ugaaagcagugccaugauuaug

SEQ ID NO: 941446 - RNA, 22 nt, Human
cuuaacauccugcauuuuucuu

SEQ ID NO: 941447 - RNA, 22 nt, Human
uggagaugaauauguguaccug

SEQ ID NO: 941448 - RNA, 22 nt, Human
ccugccucaucaacuugucgug

SEQ ID NO: 941449 - RNA, 20 nt, Human
aacagggggcugcagagggc

SEQ ID NO: 941450 - RNA, 22 nt, Human
cugggaugucuauagaacacuu

SEQ ID NO: 941451 - RNA, 22 nt, Human
agcagcuggugagcaagcucag

SEQ ID NO: 941452 - RNA, 22 nt, Human
agggcagaccacgugcaaggau

SEQ ID NO: 941453 - RNA, 22 nt, Human
aaaugcauguagaauaauagag

SEQ ID NO: 941454 - RNA, 22 nt, Human
gauuauauaauggaagcucuug

SEQ ID NO: 941455 - RNA, 19 nt, Human
cagaccuguccagccugug

SEQ ID NO: 941456 - RNA, 22 nt, Human
ugggcagacuaaggucaaagcu

SEQ ID NO: 941457 - RNA, 19 nt, Human
gcuggcagauguggccgug

SEQ ID NO: 941458 - RNA, 22 nt, Human
aggcagcugugaggacuggauu

SEQ ID NO: 941459 - RNA, 22 nt, Human
caggagccccaggcugacaaua

SEQ ID NO: 941460 - RNA, 22 nt, Human
auguuuccauuuucuuguauca

SEQ ID NO: 941461 - RNA, 22 nt, Human
gugggacucuucuuuggcagug

SEQ ID NO: 941462 - RNA, 22 nt, Human
augcucuggaguacgugaaauu

SEQ ID NO: 941463 - RNA, 20 nt, Human
gaaaugugaccucuucugug

SEQ ID NO: 941464 - RNA, 17 nt, Human
cccugccaccaggaagc

SEQ ID NO: 941465 - RNA, 22 nt, Human
ugggagucagacagccugagau

SEQ ID NO: 941466 - RNA, 22 nt, Human
auucacaaaaugauauagauac

SEQ ID NO: 941467 - RNA, 19 nt, Human
uuucacaaagagagcguga

SEQ ID NO: 941468 - RNA, 22 nt, Human
cauuuacauuuaagguuaauau

SEQ ID NO: 941469 - RNA, 22 nt, Human
gagagcugggggacuguggaug

SEQ ID NO: 941470 - RNA, 22 nt, Human
ucaaaacaaucauuggaugugc

SEQ ID NO: 941471 - RNA, 22 nt, Human
aacauuucagcaccugauuccu

SEQ ID NO: 941472 - RNA, 22 nt, Human
ugggugggagcgcccugucugg

SEQ ID NO: 941473 - RNA, 23 nt, Human
ucugggcaccuuguugacaugau

SEQ ID NO: 941474 - RNA, 22 nt, Human
ucuguucauguugggcuuuucc

SEQ ID NO: 941475 - RNA, 22 nt, Human
auuuaaaugcuuaagaggguuu

SEQ ID NO: 941476 - RNA, 22 nt, Human
agggaaaguaagcauuucauua

SEQ ID NO: 941477 - RNA, 22 nt, Human
cauugcacuccacccuaggcaa

SEQ ID NO: 941478 - RNA, 22 nt, Human
uuucacaaacucagggugugug

SEQ ID NO: 941479 - RNA, 22 nt, Human
cugaaggagguagagugacaua

SEQ ID NO: 941480 - RNA, 22 nt, Human
aaaauucugucauuaaauugug

SEQ ID NO: 941481 - RNA, 18 nt, Human
uggcagggaggaaauaua

SEQ ID NO: 941482 - RNA, 22 nt, Human
auuguuuuguuucccagugacu

SEQ ID NO: 941483 - RNA, 22 nt, Human
uuaauuuucucaucugugaaau

SEQ ID NO: 941484 - RNA, 20 nt, Human
cuaucuccuggcgugccuuc

SEQ ID NO: 941485 - RNA, 22 nt, Human
gagccaggcccguacuugcugu

SEQ ID NO: 941486 - RNA, 22 nt, Human
cuguuuucaaagagagagaaug

SEQ ID NO: 941487 - RNA, 21 nt, Human
gcaggguccuuuccauuccua

SEQ ID NO: 941488 - RNA, 22 nt, Human
gaaaugugaccuacuuccuugu

SEQ ID NO: 941489 - RNA, 22 nt, Human
gguggcaggcccugagcauccc

SEQ ID NO: 941490 - RNA, 22 nt, Human
auccuugagaaaauaaaugacc

SEQ ID NO: 941491 - RNA, 22 nt, Human
agaccauggccauccuaggaaa

SEQ ID NO: 941492 - RNA, 22 nt, Human
gcugcagcaagcccuccagggg

SEQ ID NO: 941493 - RNA, 22 nt, Human
auggccaagaaauugccgacug

SEQ ID NO: 941494 - RNA, 22 nt, Human
agaauguagucuuggagauuua

SEQ ID NO: 941495 - RNA, 22 nt, Human
aagcgccacgagaagcuggacc

SEQ ID NO: 941496 - RNA, 22 nt, Human
acauucuagaagucuuugcaau

SEQ ID NO: 941497 - RNA, 22 nt, Human
agggggcccuugcaggugagcg

SEQ ID NO: 941498 - RNA, 19 nt, Human
agacacacuugauaugugu

SEQ ID NO: 941499 - RNA, 22 nt, Human
acauuucuccuacuuguuauuu

SEQ ID NO: 941500 - RNA, 22 nt, Human
gccaggcuggugcaaggauauu

SEQ ID NO: 941501 - RNA, 22 nt, Human
cuguaguugaugauuucugaua

SEQ ID NO: 941502 - RNA, 22 nt, Human
cauuuuauccucugggaagcua

SEQ ID NO: 941503 - RNA, 22 nt, Human
ugcaggggcuugucugggccug

SEQ ID NO: 941504 - RNA, 22 nt, Human
gagccuggauugaagugggugg

SEQ ID NO: 941505 - RNA, 22 nt, Human
ucaguuuuuacggucacaggga

SEQ ID NO: 941506 - RNA, 22 nt, Human
acuuucuauuguuuagauucug

SEQ ID NO: 941507 - RNA, 22 nt, Human
caggccugugacaccgugucug

SEQ ID NO: 941508 - RNA, 22 nt, Human
aaaugcagauuuugaugcagca

SEQ ID NO: 941509 - RNA, 22 nt, Human
ucagcuccagaguugcacagug

SEQ ID NO: 941510 - RNA, 22 nt, Human
uguuaugugccacacuugaggg

SEQ ID NO: 941511 - RNA, 19 nt, Human
acacagggcuagaguuaca

SEQ ID NO: 941512 - RNA, 22 nt, Human
ccuggcagaauauuaaagugca

SEQ ID NO: 941513 - RNA, 22 nt, Human
ccagggcagccaacccagaugc

SEQ ID NO: 941514 - RNA, 22 nt, Human
agaauucuggaguugggaggaa

SEQ ID NO: 941515 - RNA, 22 nt, Human
aaggagcuuguucgccuuccuc

SEQ ID NO: 941516 - RNA, 22 nt, Human
gggcuggcucccagguguugaa

SEQ ID NO: 941517 - RNA, 19 nt, Human
uggagggguuugaaugugg

SEQ ID NO: 941518 - RNA, 22 nt, Human
ggaggacaggggcugcagcaca

SEQ ID NO: 941519 - RNA, 22 nt, Human
cauacauuuugcauauuuacca

SEQ ID NO: 941520 - RNA, 22 nt, Human
gggcagcugccacuccgcuugc

SEQ ID NO: 941521 - RNA, 22 nt, Human
guaacagaaagucaugcucauu

SEQ ID NO: 941522 - RNA, 18 nt, Human
agggaguuuuagggaagg

SEQ ID NO: 941523 - RNA, 22 nt, Human
gcugaguguaaugauggcagag

SEQ ID NO: 941524 - RNA, 22 nt, Human
ggugcagugguguggcaaaggg

SEQ ID NO: 941525 - RNA, 22 nt, Human
accagagcagacuacuggaggu

SEQ ID NO: 941526 - RNA, 22 nt, Human
cugguggggaguccuggucucc

SEQ ID NO: 941527 - RNA, 22 nt, Human
cuuguacaggaauccaugguau

SEQ ID NO: 941528 - RNA, 22 nt, Human
gagcugugagggacacauugcu

SEQ ID NO: 941529 - RNA, 22 nt, Human
accuugaugccuuuccaagaug

SEQ ID NO: 941530 - RNA, 20 nt, Human
ggaagcagagaacuguuuuc

SEQ ID NO: 941531 - RNA, 22 nt, Human
uuuuccuacugauaaacaguua

SEQ ID NO: 941532 - RNA, 22 nt, Human
agauacaugucaagagacuuau

SEQ ID NO: 941533 - RNA, 22 nt, Human
uugcauuucccauugaguaaug

SEQ ID NO: 941534 - RNA, 22 nt, Human
acucaggaaaugaagacugguu

SEQ ID NO: 941535 - RNA, 21 nt, Human
aggcucagcagguguauaaag

SEQ ID NO: 941536 - RNA, 22 nt, Human
agggcagcacagcugugcuccu

SEQ ID NO: 941537 - RNA, 22 nt, Human
caggcugcggucggcucugguc

SEQ ID NO: 941538 - RNA, 20 nt, Human
cugagcugagcuccaugggu

SEQ ID NO: 941539 - RNA, 22 nt, Human
gucccagagagcacuaguccau

SEQ ID NO: 941540 - RNA, 22 nt, Human
uccagggagauggcagaggcug

SEQ ID NO: 941541 - RNA, 22 nt, Human
agggaauguagcaagaugccaa

SEQ ID NO: 941542 - RNA, 22 nt, Human
ccagagucuaugaguccucauu

SEQ ID NO: 941543 - RNA, 22 nt, Human
aucaaaguggaaguuuacuagg

SEQ ID NO: 941544 - RNA, 22 nt, Human
cucuucuuuaguccagaccauc

SEQ ID NO: 941545 - RNA, 23 nt, Human
augcaguauaugucaguaguuua

SEQ ID NO: 941546 - RNA, 22 nt, Human
cauucauuuaugaaauaucuau

SEQ ID NO: 941547 - RNA, 22 nt, Human
acagccuggacuggcucucugc

SEQ ID NO: 941548 - RNA, 22 nt, Human
ucucagagauguuagggaagag

SEQ ID NO: 941549 - RNA, 17 nt, Human
caggcuccuuccagauu

SEQ ID NO: 941550 - RNA, 20 nt, Human
aggcacuggauuucuuauau

SEQ ID NO: 941551 - RNA, 22 nt, Human
uuccuggccccaccccuggaga

SEQ ID NO: 941552 - RNA, 22 nt, Human
cagagccaucccagccuguggu

SEQ ID NO: 941553 - RNA, 22 nt, Human
aaagcagaacugagagagcugg

SEQ ID NO: 941554 - RNA, 22 nt, Human
aaauauagcaauuaugccuacu

SEQ ID NO: 941555 - RNA, 22 nt, Human
ucugggcugggagcguguggac

SEQ ID NO: 941556 - RNA, 22 nt, Human
aguucacauuccgagguacugg

SEQ ID NO: 941557 - RNA, 22 nt, Human
ggaggccaaggugggcggauca

SEQ ID NO: 941558 - RNA, 22 nt, Human
gagaggucaucucccaucagca

SEQ ID NO: 941559 - RNA, 20 nt, Human
ucccucaggucauugggcug

SEQ ID NO: 941560 - RNA, 22 nt, Human
ugccugaguuuaacccucagag

SEQ ID NO: 941561 - RNA, 22 nt, Human
cagagcucuauguucauggagg

SEQ ID NO: 941562 - RNA, 22 nt, Human
auaguggugagcugcauuuaug

SEQ ID NO: 941563 - RNA, 22 nt, Human
ugggagcaggugugcuagggaa

SEQ ID NO: 941564 - RNA, 22 nt, Human
ugcccuguuccugccuccagcu

SEQ ID NO: 941565 - RNA, 22 nt, Human
ucacaggaaccaucagagaaau

SEQ ID NO: 941566 - RNA, 22 nt, Human
ugcagugguugagagcccagac

SEQ ID NO: 941567 - RNA, 22 nt, Human
aggaagcccuugucauuucugu

SEQ ID NO: 941568 - RNA, 22 nt, Human
ugucucugaacagcuuacuaaa

SEQ ID NO: 941569 - RNA, 22 nt, Human
uucuucuccuaaggagaguccu

SEQ ID NO: 941570 - RNA, 22 nt, Human
uuugaaagacagaauauuuuug

SEQ ID NO: 941571 - RNA, 22 nt, Human
gucaucuucgcagagugauuuu

SEQ ID NO: 941572 - RNA, 22 nt, Human
ccacagggucagccacucugca

SEQ ID NO: 941573 - RNA, 19 nt, Human
cagcugccuuuucuuugca

SEQ ID NO: 941574 - RNA, 22 nt, Human
aguacauauaguaauuuagcca

SEQ ID NO: 941575 - RNA, 21 nt, Human
ugauuuccagaaaauuggccc

SEQ ID NO: 941576 - RNA, 22 nt, Human
agggacaguuacaucaucagac

SEQ ID NO: 941577 - RNA, 22 nt, Human
uucauuaaguauaaaauguggu

SEQ ID NO: 941578 - RNA, 22 nt, Human
aaugugcaggcucaaaccuugu

SEQ ID NO: 941579 - RNA, 22 nt, Human
agcaaggcagucagcuggcugg

SEQ ID NO: 941580 - RNA, 19 nt, Human
uggagaggaaaugcugcuc

SEQ ID NO: 941581 - RNA, 22 nt, Human
agaugcugugaggaagcuagga

SEQ ID NO: 941582 - RNA, 22 nt, Human
gccucugcaucaucacuccagc

SEQ ID NO: 941583 - RNA, 22 nt, Human
cuuucacauaauugaccuugaa

SEQ ID NO: 941584 - RNA, 22 nt, Human
ggggaugguagaccggugacgu

SEQ ID NO: 941585 - RNA, 22 nt, Human
agcaugaaagcauaggacaguc

SEQ ID NO: 941586 - RNA, 17 nt, Human
uccagagcacagagcuc

SEQ ID NO: 941587 - RNA, 22 nt, Human
ucagcugagcuccagcucauag

SEQ ID NO: 941588 - RNA, 22 nt, Human
uugcauugaaugcacauuuuua

SEQ ID NO: 941589 - RNA, 22 nt, Human
uuugcuaaugccucugaaauca

SEQ ID NO: 941590 - RNA, 22 nt, Human
cuaugaaaugucagauucugca

SEQ ID NO: 941591 - RNA, 23 nt, Human
ugccagaggcagucacaguggug

SEQ ID NO: 941592 - RNA, 22 nt, Human
gcagggaagggaaacagagacc

SEQ ID NO: 941593 - RNA, 22 nt, Human
ggcuggagugggcuccagaguu

SEQ ID NO: 941594 - RNA, 22 nt, Human
ugaggcaguucuuacuuguauu

SEQ ID NO: 941595 - RNA, 22 nt, Human
aauacaguagguaauaguucau

SEQ ID NO: 941596 - RNA, 22 nt, Human
guggccagaagacugcaaugcu

SEQ ID NO: 941597 - RNA, 22 nt, Human
ucaucugucauccacaaagcug

SEQ ID NO: 941598 - RNA, 22 nt, Human
aagaauguucuuguagucauga

SEQ ID NO: 941599 - RNA, 22 nt, Human
ugcccaggcuggaaugcagugg

SEQ ID NO: 941600 - RNA, 22 nt, Human
acacagaguauuuagaaggggu

SEQ ID NO: 941601 - RNA, 22 nt, Human
gggcauguagugugcauagaga

SEQ ID NO: 941602 - RNA, 18 nt, Human
agggucagugucacuggc

SEQ ID NO: 941603 - RNA, 22 nt, Human
uuucagauggagguuuaggaca

SEQ ID NO: 941604 - RNA, 22 nt, Human
cgccugggaguccacaccugcu

SEQ ID NO: 941605 - RNA, 22 nt, Human
ucaggccacggcucacugagac

SEQ ID NO: 941606 - RNA, 22 nt, Human
gaguuuaaauaacacauuucca

SEQ ID NO: 941607 - RNA, 22 nt, Human
ucacaguaucacacaaggauua

SEQ ID NO: 941608 - RNA, 22 nt, Human
uugcuuccaguccaagucuguu

SEQ ID NO: 941609 - RNA, 22 nt, Human
uuuuauuaguggcuagaugggg

SEQ ID NO: 941610 - RNA, 22 nt, Human
agugaacaaagguagugagcau

SEQ ID NO: 941611 - RNA, 22 nt, Human
ucugggagguaaccaugcugau

SEQ ID NO: 941612 - RNA, 22 nt, Human
uccuuggggacgcugacaucgu

SEQ ID NO: 941613 - RNA, 22 nt, Human
aggcuuccgaguagcugggacu

SEQ ID NO: 941614 - RNA, 21 nt, Human
aguugcauaggccagccaucc

SEQ ID NO: 941615 - RNA, 22 nt, Human
uggcaggguggcaacuuuuggu

SEQ ID NO: 941616 - RNA, 22 nt, Human
gauuuccuaauguggaucucug

SEQ ID NO: 941617 - RNA, 22 nt, Human
ccaaggcuccucagcuggucuu

SEQ ID NO: 941618 - RNA, 22 nt, Human
ucucuuuuauguacacccugac

SEQ ID NO: 941619 - RNA, 22 nt, Human
cucuggccuggggccugcuccc

SEQ ID NO: 941620 - RNA, 22 nt, Human
cugcugagguccuugcucagac

SEQ ID NO: 941621 - RNA, 22 nt, Human
auacuuacuuuucuucagacua

SEQ ID NO: 941622 - RNA, 22 nt, Human
cagacauauguuuuaacagauu

SEQ ID NO: 941623 - RNA, 22 nt, Human
gucacuguauccagguuccagc

SEQ ID NO: 941624 - RNA, 22 nt, Human
agcagccagagucugaacauua

SEQ ID NO: 941625 - RNA, 22 nt, Human
agcuggcauacuuugcuaggaa

SEQ ID NO: 941626 - RNA, 22 nt, Human
ucuccuggcucaccaggcugga

SEQ ID NO: 941627 - RNA, 22 nt, Human
cauguuaaugaauuuuugcagu

SEQ ID NO: 941628 - RNA, 22 nt, Human
auaaggcaucucucaguuagca

SEQ ID NO: 941629 - RNA, 22 nt, Human
ccgggcgggggcucucgucacc

SEQ ID NO: 941630 - RNA, 22 nt, Human
cccagccuuugcuuccugguuc

SEQ ID NO: 941631 - RNA, 19 nt, Human
cuucuucuuggcagccaag

SEQ ID NO: 941632 - RNA, 22 nt, Human
aauaauguugacgauagucuua

SEQ ID NO: 941633 - RNA, 22 nt, Human
gcuggcucccauugguccuucc

SEQ ID NO: 941634 - RNA, 22 nt, Human
aguguacacuaaaugaauacaa

SEQ ID NO: 941635 - RNA, 22 nt, Human
agggcagcauugccuuucucca

SEQ ID NO: 941636 - RNA, 22 nt, Human
cuauuucaaggcccagauauga

SEQ ID NO: 941637 - RNA, 22 nt, Human
uggcucagugacauuccuccca

SEQ ID NO: 941638 - RNA, 22 nt, Human
ugcuggguuaccuaagccuaaa

SEQ ID NO: 941639 - RNA, 22 nt, Human
uuaacaugucuugacuucaucu

SEQ ID NO: 941640 - RNA, 22 nt, Human
gcaggccucuguugagggccuu

SEQ ID NO: 941641 - RNA, 22 nt, Human
cuuccucaugugcaaugcaagc

SEQ ID NO: 941642 - RNA, 22 nt, Human
augucuuucgcaucaguagcua

SEQ ID NO: 941643 - RNA, 22 nt, Human
acuccagguuuuuucacugaag

SEQ ID NO: 941644 - RNA, 22 nt, Human
gcagacuguaucaaugucagua

SEQ ID NO: 941645 - RNA, 22 nt, Human
gauccuugcaacucugugaggu

SEQ ID NO: 941646 - RNA, 22 nt, Human
uggggccugagguggagcugca

SEQ ID NO: 941647 - RNA, 22 nt, Human
ugugccuuaugaauucuuucug

SEQ ID NO: 941648 - RNA, 22 nt, Human
aaugggagguaguaugggaggu

SEQ ID NO: 941649 - RNA, 22 nt, Human
gccaggcagcagcgaggauggu

SEQ ID NO: 941650 - RNA, 22 nt, Human
gaaaucaggaugauguuccaga

SEQ ID NO: 941651 - RNA, 22 nt, Human
cccaugccuucugacucacagg

SEQ ID NO: 941652 - RNA, 22 nt, Human
ucagcugccucucccuggaaga

SEQ ID NO: 941653 - RNA, 22 nt, Human
cugcaggggccucgagcacagg

SEQ ID NO: 941654 - RNA, 17 nt, Human
guccuacccauggucua

SEQ ID NO: 941655 - RNA, 22 nt, Human
accauguguuuuacacauggua

SEQ ID NO: 941656 - RNA, 22 nt, Human
caucucaugggcaugccaagcu

SEQ ID NO: 941657 - RNA, 22 nt, Human
aagagaggacauggugaaccug

SEQ ID NO: 941658 - RNA, 22 nt, Human
aagggcugaaagaccuugggca

SEQ ID NO: 941659 - RNA, 22 nt, Human
acugggaguucuccaugucccu

SEQ ID NO: 941660 - RNA, 22 nt, Human
acagccagucaucucagcaggg

SEQ ID NO: 941661 - RNA, 22 nt, Human
uauuccagugugaucuuuguag

SEQ ID NO: 941662 - RNA, 22 nt, Human
gcauuucugugcauacacauga

SEQ ID NO: 941663 - RNA, 22 nt, Human
gugggccucuugaggguggcua

SEQ ID NO: 941664 - RNA, 20 nt, Human
uauuuacaacuuagagccuc

SEQ ID NO: 941665 - RNA, 22 nt, Human
cacucugagccaaaacuaauuc

SEQ ID NO: 941666 - RNA, 22 nt, Human
acugcuuuucuaagauucugug

SEQ ID NO: 941667 - RNA, 22 nt, Human
accaggagccauagagucaggc

SEQ ID NO: 941668 - RNA, 22 nt, Human
uuccaggauggcaauaaugaau

SEQ ID NO: 941669 - RNA, 22 nt, Human
uugggagcauuuagaaaagacg

SEQ ID NO: 941670 - RNA, 22 nt, Human
agaugaaaagauaagcagcaau

SEQ ID NO: 941671 - RNA, 22 nt, Human
gggccuggugcuucugacuccu

SEQ ID NO: 941672 - RNA, 22 nt, Human
cugugucucccaaggaggguca

SEQ ID NO: 941673 - RNA, 22 nt, Human
uugugucuggauuucagcuuuc

SEQ ID NO: 941674 - RNA, 22 nt, Human
acacaggggcucggcugggugc

SEQ ID NO: 941675 - RNA, 19 nt, Human
uuagaaacuguugacacug

SEQ ID NO: 941676 - RNA, 22 nt, Human
gcaggaguguggugggacaucc

SEQ ID NO: 941677 - RNA, 22 nt, Human
gcaucuucacacaaagccagug

SEQ ID NO: 941678 - RNA, 22 nt, Human
aaaucagagugguuggucaucc

SEQ ID NO: 941679 - RNA, 22 nt, Human
ccucagggccaucucugucccu

SEQ ID NO: 941680 - RNA, 22 nt, Human
ggagagaaauugagguagcaag

SEQ ID NO: 941681 - RNA, 22 nt, Human
caguguguggauccucccagga

SEQ ID NO: 941682 - RNA, 21 nt, Human
agcuuguguguaucacagugu

SEQ ID NO: 941683 - RNA, 22 nt, Human
uucacauuauaaucaguucugc

SEQ ID NO: 941684 - RNA, 22 nt, Human
gcacagaaguaaaauacaaguc

SEQ ID NO: 941685 - RNA, 22 nt, Human
uucaggaugcucagaguagucu

SEQ ID NO: 941686 - RNA, 22 nt, Human
aggggacacggcuucuccaggg

SEQ ID NO: 941687 - RNA, 22 nt, Human
gagugaaaaaggaagggccaua

SEQ ID NO: 941688 - RNA, 22 nt, Human
uucuaacucuguuauguguuuc

SEQ ID NO: 941689 - RNA, 22 nt, Human
cugggagauugcuagagaugca

SEQ ID NO: 941690 - RNA, 22 nt, Human
gggcugcuguagagaacauguu

SEQ ID NO: 941691 - RNA, 22 nt, Human
gcucugcuuucuggggggaucc

SEQ ID NO: 941692 - RNA, 22 nt, Human
aggccagacagcuagaaacagg

SEQ ID NO: 941693 - RNA, 23 nt, Human
ggagaggggugugggcaucuuua

SEQ ID NO: 941694 - RNA, 22 nt, Human
augagcugggccauccagugau

SEQ ID NO: 941695 - RNA, 22 nt, Human
ucuguucaucucaugggagaau

SEQ ID NO: 941696 - RNA, 22 nt, Human
acacaugcauaagccuucccuu

SEQ ID NO: 941697 - RNA, 22 nt, Human
aucagcugaaaaacaggcagca

SEQ ID NO: 941698 - RNA, 22 nt, Human
ccuggagcaggagcugcagagg

SEQ ID NO: 941699 - RNA, 22 nt, Human
cagggaggcugucuuaugccug

SEQ ID NO: 941700 - RNA, 22 nt, Human
cugaagcaaaggaucgagcuaa

SEQ ID NO: 941701 - RNA, 22 nt, Human
cuuugcaaacgauuaccacaug

SEQ ID NO: 941702 - RNA, 22 nt, Human
aggaagcuccuggagagccagu

SEQ ID NO: 941703 - RNA, 22 nt, Human
ugagccugaguucaaggcugca

SEQ ID NO: 941704 - RNA, 23 nt, Human
cuuuuaacuugaucugagaccag

SEQ ID NO: 941705 - RNA, 22 nt, Human
acaauucugaugguuucccagu

SEQ ID NO: 941706 - RNA, 22 nt, Human
aaaucaguuguuauauuaaaga

SEQ ID NO: 941707 - RNA, 18 nt, Human
agcuggggccucuggucc

SEQ ID NO: 941708 - RNA, 22 nt, Human
uuuccuaaucccaaugacauuu

SEQ ID NO: 941709 - RNA, 22 nt, Human
guggcugcagagccagcaagcu

SEQ ID NO: 941710 - RNA, 22 nt, Human
gaaggaaaaauacucuguaagg

SEQ ID NO: 941711 - RNA, 23 nt, Human
cugcuguguuggucucgauggga

SEQ ID NO: 941712 - RNA, 21 nt, Human
gagcauggcuuacaucagcag

SEQ ID NO: 941713 - RNA, 22 nt, Human
caagaugggcaccccagcaccu

SEQ ID NO: 941714 - RNA, 17 nt, Human
cuggagccuccaacucc

SEQ ID NO: 941715 - RNA, 23 nt, Human
uggcccugugcaugcugcuuccc

SEQ ID NO: 941716 - RNA, 19 nt, Human
uggaggagaggaaaaguca

SEQ ID NO: 941717 - RNA, 22 nt, Human
cauguacaguuuuucuguccug

SEQ ID NO: 941718 - RNA, 22 nt, Human
gaugcagaaaguagacaccauc

SEQ ID NO: 941719 - RNA, 19 nt, Human
acugccugaggcucacagg

SEQ ID NO: 941720 - RNA, 22 nt, Human
gccucugcgccucagccgaccu

SEQ ID NO: 941721 - RNA, 22 nt, Human
aggcaggccccugagaauagac

SEQ ID NO: 941722 - RNA, 22 nt, Human
aucuggcuugacuuugcgacuu

SEQ ID NO: 941723 - RNA, 22 nt, Human
ugaaaugaaugugauucgauag

SEQ ID NO: 941724 - RNA, 22 nt, Human
ugcugccaaaugcgagcucugu

SEQ ID NO: 941725 - RNA, 22 nt, Human
cauguacaaaaggcaaaugccu

SEQ ID NO: 941726 - RNA, 20 nt, Human
cagcaggaaaagugccucag

SEQ ID NO: 941727 - RNA, 22 nt, Human
cuacauggagaagaaaauucuu

SEQ ID NO: 941728 - RNA, 22 nt, Human
agaggggaaguaaugaaugaua

SEQ ID NO: 941729 - RNA, 22 nt, Human
acaaaugccauauauaaauucu

SEQ ID NO: 941730 - RNA, 22 nt, Human
uaaauaaguucuucauuguuug

SEQ ID NO: 941731 - RNA, 22 nt, Human
agucccagugagaugagccacg

SEQ ID NO: 941732 - RNA, 22 nt, Human
uguguuauugccacugaagacc

SEQ ID NO: 941733 - RNA, 22 nt, Human
caacugcugacaccaucacucc

SEQ ID NO: 941734 - RNA, 22 nt, Human
uaacagaauuugcuaaacuccg

SEQ ID NO: 941735 - RNA, 22 nt, Human
gggcuccaacggugagcaugga

SEQ ID NO: 941736 - RNA, 22 nt, Human
ucugagccacagauguccuguu

SEQ ID NO: 941737 - RNA, 22 nt, Human
cuggcagucacggccaugugcu

SEQ ID NO: 941738 - RNA, 22 nt, Human
gggcagaggcucuggcccaucc

SEQ ID NO: 941739 - RNA, 22 nt, Human
auguuuuacccuuugcacaaac

SEQ ID NO: 941740 - RNA, 22 nt, Human
uggcuuccuccagagcaggagg

SEQ ID NO: 941741 - RNA, 22 nt, Human
ccaggcagcaaauuuucugaau

SEQ ID NO: 941742 - RNA, 22 nt, Human
uccuucaguucaauuaguccgu

SEQ ID NO: 941743 - RNA, 22 nt, Human
ccugcuguucuguuuagugaac

SEQ ID NO: 941744 - RNA, 22 nt, Human
ucucagucuuugcaaggaugcu

SEQ ID NO: 941745 - RNA, 20 nt, Human
ucacagaaacaaauagagaa

SEQ ID NO: 941746 - RNA, 22 nt, Human
cuggcucccguuguccuugaag

SEQ ID NO: 941747 - RNA, 22 nt, Human
gaggccugggagccuguccucc

SEQ ID NO: 941748 - RNA, 22 nt, Human
gugcaggggaucagguugcagc

SEQ ID NO: 941749 - RNA, 21 nt, Human
agagccugagaucuuccagca

SEQ ID NO: 941750 - RNA, 22 nt, Human
cguguggucccggcaaggcaag

SEQ ID NO: 941751 - RNA, 22 nt, Human
gacccaggcccaaggcugccag

SEQ ID NO: 941752 - RNA, 22 nt, Human
agccacagguguuggccagugu

SEQ ID NO: 941753 - RNA, 22 nt, Human
caggacagagcccagacugugu

SEQ ID NO: 941754 - RNA, 22 nt, Human
cauuuauucauuugcuagggcu

SEQ ID NO: 941755 - RNA, 22 nt, Human
aucuacaggauuuuacagaguu

SEQ ID NO: 941756 - RNA, 22 nt, Human
gccaggcauuuguuaggugcug

SEQ ID NO: 941757 - RNA, 22 nt, Human
cacagggcagugauuguccaca

SEQ ID NO: 941758 - RNA, 22 nt, Human
ggcugcagguugguuggcagcu

SEQ ID NO: 941759 - RNA, 20 nt, Human
cagagacccaggcuucagcu

SEQ ID NO: 941760 - RNA, 22 nt, Human
gaaaucugucuuuguuugaaua

SEQ ID NO: 941761 - RNA, 20 nt, Human
gugugaagcccucaggagga

SEQ ID NO: 941762 - RNA, 22 nt, Human
ucuagaaacaugacauugaucu

SEQ ID NO: 941763 - RNA, 22 nt, Human
gcagugggagcuuaggcagugc

SEQ ID NO: 941764 - RNA, 22 nt, Human
ucaggauggcuucugcaucaaa

SEQ ID NO: 941765 - RNA, 22 nt, Human
ucuggcucucucaucacccaau

SEQ ID NO: 941766 - RNA, 21 nt, Human
agucuguuaggaugacucuga

SEQ ID NO: 941767 - RNA, 22 nt, Human
gaagcccagggcguggccgggc

SEQ ID NO: 941768 - RNA, 22 nt, Human
gcccagcaccucucucaggguu

SEQ ID NO: 941769 - RNA, 22 nt, Human
agcagccuuugaucaucuggga

SEQ ID NO: 941770 - RNA, 22 nt, Human
aaauucuaugucaauguuuauu

SEQ ID NO: 941771 - RNA, 22 nt, Human
guucuucagucacaucacagaa

SEQ ID NO: 941772 - RNA, 22 nt, Human
cauuucugucacguucuuuuau

SEQ ID NO: 941773 - RNA, 22 nt, Human
ucaaauaaggagucaugaccau

SEQ ID NO: 941774 - RNA, 22 nt, Human
ucugagccaauuucugugucca

SEQ ID NO: 941775 - RNA, 22 nt, Human
auucaaguccagcuucucuaca

SEQ ID NO: 941776 - RNA, 22 nt, Human
ugggcucugaagucagucugcu

SEQ ID NO: 941777 - RNA, 22 nt, Human
gcucugucauuuugcagacacu

SEQ ID NO: 941778 - RNA, 22 nt, Human
ucauuugugugagugauuugac

SEQ ID NO: 941779 - RNA, 22 nt, Human
agagaacacgugcaucugcaau

SEQ ID NO: 941780 - RNA, 22 nt, Human
ugggccugggcuccuguccucu

SEQ ID NO: 941781 - RNA, 20 nt, Human
cugcugugugugccucagcc

SEQ ID NO: 941782 - RNA, 22 nt, Human
acacaugcugauaagaauauaa

SEQ ID NO: 941783 - RNA, 22 nt, Human
uuccucucucuugccagaaugu

SEQ ID NO: 941784 - RNA, 22 nt, Human
ugggcacaaacaucugccuguu

SEQ ID NO: 941785 - RNA, 22 nt, Human
cuugcugucccuugguaugaac

SEQ ID NO: 941786 - RNA, 22 nt, Human
ccuucugcuggucaucccagug

SEQ ID NO: 941787 - RNA, 22 nt, Human
augcuguguggccaccuccaug

SEQ ID NO: 941788 - RNA, 22 nt, Human
ggaagugaggaauuagguuuau

SEQ ID NO: 941789 - RNA, 22 nt, Human
cagagcaggcccacugcccucc

SEQ ID NO: 941790 - RNA, 22 nt, Human
gcuggccacacugcugauggag

SEQ ID NO: 941791 - RNA, 22 nt, Human
ucugacauuagauuaauuggaa

SEQ ID NO: 941792 - RNA, 22 nt, Human
agaaaugugaauuucauuuccu

SEQ ID NO: 941793 - RNA, 22 nt, Human
aagacugucuuuucugagugac

SEQ ID NO: 941794 - RNA, 20 nt, Human
cccuggccuguuucaugccc

SEQ ID NO: 941795 - RNA, 22 nt, Human
ccagcuggagcucgcagauagg

SEQ ID NO: 941796 - RNA, 22 nt, Human
gacuguguccaugugcuggauu

SEQ ID NO: 941797 - RNA, 22 nt, Human
uuccagaaaucuuucagcucaa

SEQ ID NO: 941798 - RNA, 21 nt, Human
aagcuucccugcucuccaggg

SEQ ID NO: 941799 - RNA, 22 nt, Human
gcuggccaggaagagucucaga

SEQ ID NO: 941800 - RNA, 22 nt, Human
uaaggcacccuucugaguagag

SEQ ID NO: 941801 - RNA, 22 nt, Human
aggagggacaccaauauauguu

SEQ ID NO: 941802 - RNA, 22 nt, Human
uccaggccuaggccaagugauu

SEQ ID NO: 941803 - RNA, 22 nt, Human
uuguguuucugugauauguaaa

SEQ ID NO: 941804 - RNA, 22 nt, Human
cucuguccacagguuugucccu

SEQ ID NO: 941805 - RNA, 22 nt, Human
agaggaugauuuuaaggacacu

SEQ ID NO: 941806 - RNA, 22 nt, Human
cuuaauaaaugguagcuguuau

SEQ ID NO: 941807 - RNA, 22 nt, Human
uuacuggcugggccugagggcu

SEQ ID NO: 941808 - RNA, 21 nt, Human
ccuucuccacagggucuccgg

SEQ ID NO: 941809 - RNA, 22 nt, Human
ugacagcugagccccaggcaag

SEQ ID NO: 941810 - RNA, 22 nt, Human
ucaucugucccaggcuuuuuuc

SEQ ID NO: 941811 - RNA, 22 nt, Human
aaaagucagucucuccuagcuc

SEQ ID NO: 941812 - RNA, 22 nt, Human
aaagauuugaguucugcuuaua

SEQ ID NO: 941813 - RNA, 22 nt, Human
ggccucucuccuuggcuugcag

SEQ ID NO: 941814 - RNA, 22 nt, Human
ccucagcugcuucccuggagcc

SEQ ID NO: 941815 - RNA, 22 nt, Human
ugaaggcccagccacagaaugg

SEQ ID NO: 941816 - RNA, 22 nt, Human
ggugcccaccugucuuccugga

SEQ ID NO: 941817 - RNA, 22 nt, Human
agccugguguggggcugcagag

SEQ ID NO: 941818 - RNA, 21 nt, Human
auccauccaucuuggccuaac

SEQ ID NO: 941819 - RNA, 22 nt, Human
cugugucuucuguuuugaaguu

SEQ ID NO: 941820 - RNA, 21 nt, Human
gagcugggcgaggcuccgggg

SEQ ID NO: 941821 - RNA, 22 nt, Human
uggcucaguuccaucaucugga

SEQ ID NO: 941822 - RNA, 22 nt, Human
uggcacugagcagccgcggcag

SEQ ID NO: 941823 - RNA, 22 nt, Human
agagcugcaggguggacccagg

SEQ ID NO: 941824 - RNA, 22 nt, Human
gugcuuucugcugcauuccucu

SEQ ID NO: 941825 - RNA, 22 nt, Human
gcuguucacauuuugggccaaa

SEQ ID NO: 941826 - RNA, 22 nt, Human
ccaggagagcgcccucccggcc

SEQ ID NO: 941827 - RNA, 22 nt, Human
uuauuucauguaaaauuuaugu

SEQ ID NO: 941828 - RNA, 23 nt, Human
ugagcccaggaggucaaggcugc

SEQ ID NO: 941829 - RNA, 22 nt, Human
aacuccagggcauugucuccug

SEQ ID NO: 941830 - RNA, 22 nt, Human
cuacuuuaauuuucugcagaga

SEQ ID NO: 941831 - RNA, 21 nt, Human
agacaguaacucuucuacucc

SEQ ID NO: 941832 - RNA, 22 nt, Human
gggaguggagagcaauggauga

SEQ ID NO: 941833 - RNA, 22 nt, Human
uuucagggagccuagaagagcu

SEQ ID NO: 941834 - RNA, 22 nt, Human
guuuucaauuauaagauggcuu

SEQ ID NO: 941835 - RNA, 22 nt, Human
uuccggaagguucucuagaauu

SEQ ID NO: 941836 - RNA, 22 nt, Human
cuccucaguugucccauggaga

SEQ ID NO: 941837 - RNA, 22 nt, Human
acgagagguccuuagaaucugu

SEQ ID NO: 941838 - RNA, 22 nt, Human
gaaucauagaacauuaauagaa

SEQ ID NO: 941839 - RNA, 22 nt, Human
aggggcugccuggcuuggcacu

SEQ ID NO: 941840 - RNA, 22 nt, Human
guguuuccuaguuuaaugaaug

SEQ ID NO: 941841 - RNA, 22 nt, Human
gggucagcugcugggggcugac

SEQ ID NO: 941842 - RNA, 22 nt, Human
uucucuuuucaccaguugcuaa

SEQ ID NO: 941843 - RNA, 18 nt, Human
uggcucuggacuugcucc

SEQ ID NO: 941844 - RNA, 18 nt, Human
gccuggcuucggagccgc

SEQ ID NO: 941845 - RNA, 22 nt, Human
guggugcaggccagcaggggcg

SEQ ID NO: 941846 - RNA, 22 nt, Human
ugaggcaggaguuaaugugcuc

SEQ ID NO: 941847 - RNA, 22 nt, Human
guucacaaauaugcacuuacga

SEQ ID NO: 941848 - RNA, 21 nt, Human
agaagccuggguggagguggg

SEQ ID NO: 941849 - RNA, 22 nt, Human
ucccagagauuuccucuccuuc

SEQ ID NO: 941850 - RNA, 22 nt, Human
cccuggagugccggaaucaaga

SEQ ID NO: 941851 - RNA, 22 nt, Human
agugagggaugaagaacugcgg

SEQ ID NO: 941852 - RNA, 22 nt, Human
cacauauuugaugaagcuuugu

SEQ ID NO: 941853 - RNA, 22 nt, Human
cagggucugaaacugaucacag

SEQ ID NO: 941854 - RNA, 22 nt, Human
ccaggacuuuaaguccagcacu

SEQ ID NO: 941855 - RNA, 22 nt, Human
agccucucuguuagucacuggg

SEQ ID NO: 941856 - RNA, 22 nt, Human
caggcacuguguuaggcacugu

SEQ ID NO: 941857 - RNA, 22 nt, Human
uuccuugguagagagaauauuu

SEQ ID NO: 941858 - RNA, 22 nt, Human
uggccacauccuuuccuuguca

SEQ ID NO: 941859 - RNA, 22 nt, Human
augauugguggucagcaguaug

SEQ ID NO: 941860 - RNA, 22 nt, Human
ccugccaggagcuggugcugca

SEQ ID NO: 941861 - RNA, 22 nt, Human
ucaggcagagcuguggagcucu

SEQ ID NO: 941862 - RNA, 22 nt, Human
ccaucagcaugggagcaugggc

SEQ ID NO: 941863 - RNA, 22 nt, Human
ccagggaguuuccaaucugaga

SEQ ID NO: 941864 - RNA, 22 nt, Human
agaauucuuggugguuagaaua

SEQ ID NO: 941865 - RNA, 22 nt, Human
gcugcccagcaggccccagggg

SEQ ID NO: 941866 - RNA, 22 nt, Human
uagugaaacaguuaucaaucug

SEQ ID NO: 941867 - RNA, 22 nt, Human
cagagggaaaaggggaguaaua

SEQ ID NO: 941868 - RNA, 20 nt, Human
agguauaagaaaugugauuu

SEQ ID NO: 941869 - RNA, 22 nt, Human
guguaauuauauaaagaucuac

SEQ ID NO: 941870 - RNA, 22 nt, Human
auagauguucaaucagauauuu

SEQ ID NO: 941871 - RNA, 19 nt, Human
cagcugcaccgugaccauc

SEQ ID NO: 941872 - RNA, 22 nt, Human
cucagcagagaccagggaggaa

SEQ ID NO: 941873 - RNA, 22 nt, Human
guuagaauaaaaggucagagag

SEQ ID NO: 941874 - RNA, 22 nt, Human
uuuaaaaaacuagucugagucu

SEQ ID NO: 941875 - RNA, 22 nt, Human
ggagagcagggaggcugcucug

SEQ ID NO: 941876 - RNA, 18 nt, Human
cacaggcucccagugagg

SEQ ID NO: 941877 - RNA, 22 nt, Human
acuugggagggugugggcagcu

SEQ ID NO: 941878 - RNA, 22 nt, Human
aggagggagaugcccauccugg

SEQ ID NO: 941879 - RNA, 22 nt, Human
ggcacugauuccauucaugaag

SEQ ID NO: 941880 - RNA, 22 nt, Human
agccauugaguuuuaugugcua

SEQ ID NO: 941881 - RNA, 23 nt, Human
uacauuguggauggaguccuggg

SEQ ID NO: 941882 - RNA, 22 nt, Human
ggagguggcagggaacauaauu

SEQ ID NO: 941883 - RNA, 22 nt, Human
aaauuguugaucuacaguaagg

SEQ ID NO: 941884 - RNA, 22 nt, Human
auuucauagauuguaaaucccu

SEQ ID NO: 941885 - RNA, 22 nt, Human
cugacagucucauugauuugcu

SEQ ID NO: 941886 - RNA, 22 nt, Human
ucucuucauagugacacccauc

SEQ ID NO: 941887 - RNA, 22 nt, Human
ccuggccacucagguguggggc

SEQ ID NO: 941888 - RNA, 22 nt, Human
uacaguagaauuuuuaguaacu

SEQ ID NO: 941889 - RNA, 21 nt, Human
auguaggguuugccuucucua

SEQ ID NO: 941890 - RNA, 22 nt, Human
ucucagagagaugaaacuucca

SEQ ID NO: 941891 - RNA, 22 nt, Human
cccagcacuuugaauaugucac

SEQ ID NO: 941892 - RNA, 22 nt, Human
uuucuauucuggaucuguggca

SEQ ID NO: 941893 - RNA, 22 nt, Human
aggaugggccugggauaugcuu

SEQ ID NO: 941894 - RNA, 22 nt, Human
cugcccugagggccuguguguu

SEQ ID NO: 941895 - RNA, 22 nt, Human
cucuuuccucagccacagucua

SEQ ID NO: 941896 - RNA, 22 nt, Human
uuguuuaauaucgugaaguacu

SEQ ID NO: 941897 - RNA, 22 nt, Human
gcacacagauuaggaaacagaa

SEQ ID NO: 941898 - RNA, 22 nt, Human
gccugugcauagcagcggacuc

SEQ ID NO: 941899 - RNA, 22 nt, Human
auggggagagaagggcugagcu

SEQ ID NO: 941900 - RNA, 22 nt, Human
gguggguauugaauacaggugu

SEQ ID NO: 941901 - RNA, 22 nt, Human
ucccuggagauaacuucuggga

SEQ ID NO: 941902 - RNA, 22 nt, Human
agagccugugggagaugcagcu

SEQ ID NO: 941903 - RNA, 22 nt, Human
auauguuuugugcuucauuggu

SEQ ID NO: 941904 - RNA, 22 nt, Human
aucuggcuauuucuggucgggg

SEQ ID NO: 941905 - RNA, 22 nt, Human
uggaaagagguagaggaucugg

SEQ ID NO: 941906 - RNA, 17 nt, Human
uccuucagggccucaca

SEQ ID NO: 941907 - RNA, 22 nt, Human
ugccuggaugugcuggccucac

SEQ ID NO: 941908 - RNA, 22 nt, Human
ccuggcagguggagguugcagu

SEQ ID NO: 941909 - RNA, 22 nt, Human
accaggaggccuggagcacaaa

SEQ ID NO: 941910 - RNA, 22 nt, Human
ucucgacagccuggcacagugg

SEQ ID NO: 941911 - RNA, 22 nt, Human
gcugagcugaggcagggcuggg

SEQ ID NO: 941912 - RNA, 22 nt, Human
caggccuggcugcagcucgccu

SEQ ID NO: 941913 - RNA, 22 nt, Human
uggucuaaauauggcucuaaau

SEQ ID NO: 941914 - RNA, 22 nt, Human
aguauugugacucaaguauucu

SEQ ID NO: 941915 - RNA, 22 nt, Human
uuaaaagaauccuguuauccuc

SEQ ID NO: 941916 - RNA, 22 nt, Human
uuauguaauuuguuugcucuuc

SEQ ID NO: 941917 - RNA, 22 nt, Human
gugccugccccacuccucagca

SEQ ID NO: 941918 - RNA, 22 nt, Human
acuggcugaaguuuacuuuuug

SEQ ID NO: 941919 - RNA, 22 nt, Human
caagaacaguuugccaaauugg

SEQ ID NO: 941920 - RNA, 22 nt, Human
ucaaauacauggucaaucaacu

SEQ ID NO: 941921 - RNA, 22 nt, Human
aucauucuaguccuuauggucu

SEQ ID NO: 941922 - RNA, 22 nt, Human
uacagaguggugagaucuuuug

SEQ ID NO: 941923 - RNA, 22 nt, Human
cuggcuggccggagcgaggcgg

SEQ ID NO: 941924 - RNA, 22 nt, Human
ugucuucaguaaaauacacuau

SEQ ID NO: 941925 - RNA, 22 nt, Human
aucaggauucaguaucuccagc

SEQ ID NO: 941926 - RNA, 22 nt, Human
gcauggcagugaggauggugcu

SEQ ID NO: 941927 - RNA, 22 nt, Human
cucuucuuggcccccaugaggg

SEQ ID NO: 941928 - RNA, 20 nt, Human
gucucagaauggauuugcau

SEQ ID NO: 941929 - RNA, 22 nt, Human
uuccaaaggaauggggagcuau

SEQ ID NO: 941930 - RNA, 22 nt, Human
gcucugcugauccgcagccauc

SEQ ID NO: 941931 - RNA, 22 nt, Human
uucuucaaaacaacacuggccu

SEQ ID NO: 941932 - RNA, 22 nt, Human
acuccuggggcugccaucacag

SEQ ID NO: 941933 - RNA, 22 nt, Human
ucagaaauagucuuuaaaauga

SEQ ID NO: 941934 - RNA, 23 nt, Human
aaugggugcaacuauccaugaca

SEQ ID NO: 941935 - RNA, 22 nt, Human
ggcaguagccagggacuggcag

SEQ ID NO: 941936 - RNA, 22 nt, Human
aaggcucuuggagugaaugcag

SEQ ID NO: 941937 - RNA, 22 nt, Human
ucucugcuugguguaugugagu

SEQ ID NO: 941938 - RNA, 22 nt, Human
ggcagcuuuuaucccugacaga

SEQ ID NO: 941939 - RNA, 22 nt, Human
uggaaggaaagguagcagagaa

SEQ ID NO: 941940 - RNA, 20 nt, Human
aggagaaauucgggacaccu

SEQ ID NO: 941941 - RNA, 22 nt, Human
agcuggaggggccagcaggugu

SEQ ID NO: 941942 - RNA, 22 nt, Human
uuuuaugugcuggacuggcagu

SEQ ID NO: 941943 - RNA, 22 nt, Human
ccugccuggaucagccauccug

SEQ ID NO: 941944 - RNA, 22 nt, Human
guccucugcccaggucaagguu

SEQ ID NO: 941945 - RNA, 22 nt, Human
agcaaagucaguggaaccaucc

SEQ ID NO: 941946 - RNA, 22 nt, Human
aagggcagaauagagaagaugg

SEQ ID NO: 941947 - RNA, 22 nt, Human
cagcaggaggugagaugugacc

SEQ ID NO: 941948 - RNA, 22 nt, Human
augggaggcagacacuaaguuc

SEQ ID NO: 941949 - RNA, 22 nt, Human
accaggcuggagugcaguggcg

SEQ ID NO: 941950 - RNA, 22 nt, Human
cauugacaucaggcuuggccaa

SEQ ID NO: 941951 - RNA, 22 nt, Human
agccuggauucgugcauccaca

SEQ ID NO: 941952 - RNA, 20 nt, Human
ugggccuguggcagaagucu

SEQ ID NO: 941953 - RNA, 22 nt, Human
cuguccuguagcuccaucaguc

SEQ ID NO: 941954 - RNA, 22 nt, Human
aggggcucaaagugugcaggga

SEQ ID NO: 941955 - RNA, 22 nt, Human
cucuggaauuaaggaagccugu

SEQ ID NO: 941956 - RNA, 22 nt, Human
cugcugcaggaugggcacucug

SEQ ID NO: 941957 - RNA, 18 nt, Human
ugaauagggguuugcaga

SEQ ID NO: 941958 - RNA, 20 nt, Human
ugaggcaggagaauggcaug

SEQ ID NO: 941959 - RNA, 22 nt, Human
uuagauaaauugcaacuugauu

SEQ ID NO: 941960 - RNA, 20 nt, Human
ucucuucuggggagauaaaa

SEQ ID NO: 941961 - RNA, 22 nt, Human
uggcagcuguguccagguagaa

SEQ ID NO: 941962 - RNA, 20 nt, Human
uauuucugggcaaccauuua

SEQ ID NO: 941963 - RNA, 22 nt, Human
acuguguggaccacucugaggc

SEQ ID NO: 941964 - RNA, 22 nt, Human
cugccuugguuucuagcagggc

SEQ ID NO: 941965 - RNA, 17 nt, Human
cacccuggcuagucuga

SEQ ID NO: 941966 - RNA, 22 nt, Human
aagcaugugcuggggcuuuuug

SEQ ID NO: 941967 - RNA, 22 nt, Human
cagagccaaaugcugugguuau

SEQ ID NO: 941968 - RNA, 22 nt, Human
gaggaaugucagcacaggccuc

SEQ ID NO: 941969 - RNA, 22 nt, Human
gugugcaugcauagacaccaca

SEQ ID NO: 941970 - RNA, 22 nt, Human
aacccuggggcagcugcuaggg

SEQ ID NO: 941971 - RNA, 22 nt, Human
aagcuggagaguuaggugaaua

SEQ ID NO: 941972 - RNA, 21 nt, Human
uacugagaccucacagugugc

SEQ ID NO: 941973 - RNA, 22 nt, Human
gucccagaaacauauugcuggu

SEQ ID NO: 941974 - RNA, 22 nt, Human
agcagcucuuaacaaagcaugg

SEQ ID NO: 941975 - RNA, 22 nt, Human
uuuauuguuguuagucauaagu

SEQ ID NO: 941976 - RNA, 23 nt, Human
gcagaggagcaagcuggacacca

SEQ ID NO: 941977 - RNA, 22 nt, Human
acagcagcgucaacuuaaaauu

SEQ ID NO: 941978 - RNA, 22 nt, Human
ugaaaugagcauuuauucuuua

SEQ ID NO: 941979 - RNA, 22 nt, Human
ggcacugacugugcagcgcacc

SEQ ID NO: 941980 - RNA, 22 nt, Human
auggcagcaaaugucuggcugg

SEQ ID NO: 941981 - RNA, 21 nt, Human
uggcagaguugaguaguuaug

SEQ ID NO: 941982 - RNA, 22 nt, Human
cuuuccaaugcauuuccaaugu

SEQ ID NO: 941983 - RNA, 22 nt, Human
ucucagagauucagggagaagu

SEQ ID NO: 941984 - RNA, 22 nt, Human
uuucugugguggguaguucaga

SEQ ID NO: 941985 - RNA, 22 nt, Human
uguuguuuucucauggagaaua

SEQ ID NO: 941986 - RNA, 22 nt, Human
ccagcuggugacauccccaacc

SEQ ID NO: 941987 - RNA, 22 nt, Human
gaggcauggccugaggcuagga

SEQ ID NO: 941988 - RNA, 23 nt, Human
acugucugauauguuuuccauca

SEQ ID NO: 941989 - RNA, 20 nt, Human
auacacauauucuugcaacu

SEQ ID NO: 941990 - RNA, 22 nt, Human
gggccucucccuucucacgcau

SEQ ID NO: 941991 - RNA, 22 nt, Human
gggugggccacugagcagcgug

SEQ ID NO: 941992 - RNA, 22 nt, Human
uggcugccuagugucugagcag

SEQ ID NO: 941993 - RNA, 22 nt, Human
uagaaauguugguauuaacauu

SEQ ID NO: 941994 - RNA, 21 nt, Human
ucuuggccuaaguucacugaa

SEQ ID NO: 941995 - RNA, 22 nt, Human
auggaaagugcauggaagucau

SEQ ID NO: 941996 - RNA, 22 nt, Human
ucagagaguuagugucuuagcu

SEQ ID NO: 941997 - RNA, 22 nt, Human
gcaaggaccuuugagcgugcca

SEQ ID NO: 941998 - RNA, 22 nt, Human
uagggaggcuacuucuuguagg

SEQ ID NO: 941999 - RNA, 22 nt, Human
cucuuaguuuaucuuugacaaa

SEQ ID NO: 942000 - RNA, 22 nt, Human
ggccgggcaggucucagccagc

SEQ ID NO: 942001 - RNA, 22 nt, Human
uaugugcaguuugcucuuaaca

SEQ ID NO: 942002 - RNA, 22 nt, Human
gcucugcugacagcugggacag

SEQ ID NO: 942003 - RNA, 22 nt, Human
gcugugcagccaagugccucug

SEQ ID NO: 942004 - RNA, 22 nt, Human
ggccagagaauaugccuuacgu

SEQ ID NO: 942005 - RNA, 23 nt, Human
ccacagagcugccaauuccugug

SEQ ID NO: 942006 - RNA, 22 nt, Human
cccagcaggaggagguugcagu

SEQ ID NO: 942007 - RNA, 21 nt, Human
uuagcaaagcaaacacaugcu

SEQ ID NO: 942008 - RNA, 22 nt, Human
agugaaaugauucugagcaaga

SEQ ID NO: 942009 - RNA, 22 nt, Human
agaauuguugggguaauaaaag

SEQ ID NO: 942010 - RNA, 22 nt, Human
ucagcagcagcucagcauguuu

SEQ ID NO: 942011 - RNA, 22 nt, Human
ucuugggaaauaaacagauuga

SEQ ID NO: 942012 - RNA, 22 nt, Human
auagugguuggauaugucagag

SEQ ID NO: 942013 - RNA, 21 nt, Human
acagaugggaugagcacacug

SEQ ID NO: 942014 - RNA, 22 nt, Human
aggcugucaucuuugcaggcag

SEQ ID NO: 942015 - RNA, 22 nt, Human
auucacaauuagaaguagauaa

SEQ ID NO: 942016 - RNA, 22 nt, Human
gcugugggugcuggcuccaccc

SEQ ID NO: 942017 - RNA, 22 nt, Human
ucuguucagguuucagagaacu

SEQ ID NO: 942018 - RNA, 22 nt, Human
cuggccagcauuuuugcuuuag

SEQ ID NO: 942019 - RNA, 22 nt, Human
uguguuuugaacucaucuacug

SEQ ID NO: 942020 - RNA, 22 nt, Human
ggugagggaguggaacgaggug

SEQ ID NO: 942021 - RNA, 22 nt, Human
ggcccucccugagccagguggg

SEQ ID NO: 942022 - RNA, 22 nt, Human
ggccucucuccagucagugcag

SEQ ID NO: 942023 - RNA, 22 nt, Human
uuaguaaauaaagucuacuuuc

SEQ ID NO: 942024 - RNA, 22 nt, Human
ugaugggaaaaugaggccuggg

SEQ ID NO: 942025 - RNA, 22 nt, Human
ucaggaugguguggaggaaaua

SEQ ID NO: 942026 - RNA, 22 nt, Human
uguggccuccuguuccugggua

SEQ ID NO: 942027 - RNA, 22 nt, Human
uaaggccagcaugaaugcagca

SEQ ID NO: 942028 - RNA, 22 nt, Human
gggcagcucggaagugggaaag

SEQ ID NO: 942029 - RNA, 22 nt, Human
caggaggaggugagguagaacu

SEQ ID NO: 942030 - RNA, 22 nt, Human
aggccagcuguuacuagagcca

SEQ ID NO: 942031 - RNA, 22 nt, Human
uagcuuuacaaagugcugcacc

SEQ ID NO: 942032 - RNA, 22 nt, Human
cccauucauccucgcuuccuuc

SEQ ID NO: 942033 - RNA, 22 nt, Human
ugagagucucagaccuccuggu

SEQ ID NO: 942034 - RNA, 22 nt, Human
auuuugaugcuaucuaaugaau

SEQ ID NO: 942035 - RNA, 22 nt, Human
auuugucucugcacuuuacuca

SEQ ID NO: 942036 - RNA, 22 nt, Human
aaagaauuuguacacccuacua

SEQ ID NO: 942037 - RNA, 22 nt, Human
agaagccaauucugugugaguc

SEQ ID NO: 942038 - RNA, 22 nt, Human
gagcuguccuaccaggaguccu

SEQ ID NO: 942039 - RNA, 22 nt, Human
gaaaugcauaaucuuaguagau

SEQ ID NO: 942040 - RNA, 22 nt, Human
uggcccugacugauguggaggg

SEQ ID NO: 942041 - RNA, 22 nt, Human
ggcucaggccuguaauccuagc

SEQ ID NO: 942042 - RNA, 23 nt, Human
uuuuaauuuggacauaagaagau

SEQ ID NO: 942043 - RNA, 18 nt, Human
uguuccaaggaaggaauc

SEQ ID NO: 942044 - RNA, 23 nt, Human
guggagccacaucacaggcuccu

SEQ ID NO: 942045 - RNA, 22 nt, Human
uuucacauaaauauuaugccua

SEQ ID NO: 942046 - RNA, 21 nt, Human
ccaccaggucuucugcucggg

SEQ ID NO: 942047 - RNA, 22 nt, Human
ggcagauggagaagcagcaggu

SEQ ID NO: 942048 - RNA, 19 nt, Human
cugaggugcaguaagaggc

SEQ ID NO: 942049 - RNA, 22 nt, Human
ggcccugggcagaggagugggc

SEQ ID NO: 942050 - RNA, 22 nt, Human
uucucauucugacucaguguag

SEQ ID NO: 942051 - RNA, 22 nt, Human
ugaggcagauauuuauuggguu

SEQ ID NO: 942052 - RNA, 22 nt, Human
aagccagguguugugguaagag

SEQ ID NO: 942053 - RNA, 22 nt, Human
ggcucaggagaggggcuaaaag

SEQ ID NO: 942054 - RNA, 19 nt, Human
gcauaaaaugucaaugugu

SEQ ID NO: 942055 - RNA, 22 nt, Human
uggcuaggcuccaagagcugga

SEQ ID NO: 942056 - RNA, 22 nt, Human
acaaaugcuuaguucaccaaaa

SEQ ID NO: 942057 - RNA, 22 nt, Human
uggccuggccacauccagcagg

SEQ ID NO: 942058 - RNA, 22 nt, Human
aggcaggcacacuuccuccagg

SEQ ID NO: 942059 - RNA, 19 nt, Human
cucuggccucuggaugcug

SEQ ID NO: 942060 - RNA, 22 nt, Human
uuuccauauucugcgucugcca

SEQ ID NO: 942061 - RNA, 22 nt, Human
caagauggacauaaggagagaa

SEQ ID NO: 942062 - RNA, 22 nt, Human
cagaccucaguccucaguagga

SEQ ID NO: 942063 - RNA, 22 nt, Human
auuuuguggguucugcugaugu

SEQ ID NO: 942064 - RNA, 22 nt, Human
gagaggagguggcuaugacagc

SEQ ID NO: 942065 - RNA, 22 nt, Human
ccagcagcagcguccaaggaga

SEQ ID NO: 942066 - RNA, 22 nt, Human
gauggccuguauuugggccaga

SEQ ID NO: 942067 - RNA, 22 nt, Human
gggcuggggcucaauaauuugu

SEQ ID NO: 942068 - RNA, 22 nt, Human
uucugaaccauugagcacugcc

SEQ ID NO: 942069 - RNA, 22 nt, Human
uuaggaguccagaugucuuggg

SEQ ID NO: 942070 - RNA, 18 nt, Human
agcagaauucuaggguuc

SEQ ID NO: 942071 - RNA, 22 nt, Human
caggggacauuaaagcuccaua

SEQ ID NO: 942072 - RNA, 22 nt, Human
gaugauuuuaugucuugucauu

SEQ ID NO: 942073 - RNA, 22 nt, Human
uaaugcuuaacagcuggcuuuu

SEQ ID NO: 942074 - RNA, 20 nt, Human
gccugcagagaaggucagag

SEQ ID NO: 942075 - RNA, 22 nt, Human
caaggccugccucuggcagaaa

SEQ ID NO: 942076 - RNA, 22 nt, Human
uagaaagcuugggguguuuaaa

SEQ ID NO: 942077 - RNA, 22 nt, Human
ucacugucugaaagaaauggcc

SEQ ID NO: 942078 - RNA, 22 nt, Human
ucugagaguacgggcugcgcgc

SEQ ID NO: 942079 - RNA, 22 nt, Human
ccacugucagaggggcugugcc

SEQ ID NO: 942080 - RNA, 22 nt, Human
cccagacauaacagcagagagg

SEQ ID NO: 942081 - RNA, 22 nt, Human
ugugccauuucuauucugcagc

SEQ ID NO: 942082 - RNA, 22 nt, Human
ugaagguggcauaggagagaug

SEQ ID NO: 942083 - RNA, 22 nt, Human
gcagguguggaguggggugagc

SEQ ID NO: 942084 - RNA, 22 nt, Human
auggccaaaucuaaacuguugg

SEQ ID NO: 942085 - RNA, 22 nt, Human
ggaaccaggaguuacacgaguu

SEQ ID NO: 942086 - RNA, 22 nt, Human
aggcagauauuggggugaugug

SEQ ID NO: 942087 - RNA, 22 nt, Human
ggcuggcagaagugugcuggcu

SEQ ID NO: 942088 - RNA, 23 nt, Human
aacugagauaauguauguaaagc

SEQ ID NO: 942089 - RNA, 22 nt, Human
caggggcucugagauugucuaa

SEQ ID NO: 942090 - RNA, 22 nt, Human
aacuuuaaggcuauaaauuaug

SEQ ID NO: 942091 - RNA, 22 nt, Human
agggcuggcuaggugcguuccc

SEQ ID NO: 942092 - RNA, 22 nt, Human
guguuuccucuagaagccaugg

SEQ ID NO: 942093 - RNA, 22 nt, Human
acugaaauacugcucuuggauu

SEQ ID NO: 942094 - RNA, 21 nt, Human
gccugcagaccccaccaggcu

SEQ ID NO: 942095 - RNA, 22 nt, Human
ucuggcuccuggcuccacugcc

SEQ ID NO: 942096 - RNA, 22 nt, Human
auaaaaguuuccaaucaugccu

SEQ ID NO: 942097 - RNA, 22 nt, Human
gugcccugguccccagcauaua

SEQ ID NO: 942098 - RNA, 22 nt, Human
ucucagagggaggauuacugcc

SEQ ID NO: 942099 - RNA, 22 nt, Human
aaugcagugagccauuaaaugg

SEQ ID NO: 942100 - RNA, 23 nt, Human
acagaaaguucugcuggacagag

SEQ ID NO: 942101 - RNA, 22 nt, Human
acagcugggugcugcucagagc

SEQ ID NO: 942102 - RNA, 22 nt, Human
uaagcauucaaugcuuagcacu

SEQ ID NO: 942103 - RNA, 22 nt, Human
auuauuagauucuuaauuguaa

SEQ ID NO: 942104 - RNA, 22 nt, Human
agacaacaccaaaugcuagugu

SEQ ID NO: 942105 - RNA, 22 nt, Human
ugaggcagguggauuacaaggu

SEQ ID NO: 942106 - RNA, 22 nt, Human
acauaccauacauggugagaug

SEQ ID NO: 942107 - RNA, 22 nt, Human
guuguauagagggcaugaaucu

SEQ ID NO: 942108 - RNA, 22 nt, Human
gcugggcaccggagagacccca

SEQ ID NO: 942109 - RNA, 22 nt, Human
aggcugggaaauguagucuucc

SEQ ID NO: 942110 - RNA, 22 nt, Human
ccagcuccugggucuuagucag

SEQ ID NO: 942111 - RNA, 22 nt, Human
agugcagugguuaggagccagg

SEQ ID NO: 942112 - RNA, 22 nt, Human
ggaaggucgagcugcaucuggc

SEQ ID NO: 942113 - RNA, 22 nt, Human
auauuucucucagacauggaag

SEQ ID NO: 942114 - RNA, 22 nt, Human
uagaaaugugauaauagcuuaa

SEQ ID NO: 942115 - RNA, 22 nt, Human
gagcagggagacaacucuggug

SEQ ID NO: 942116 - RNA, 22 nt, Human
aauggccagcaacaggagugaa

SEQ ID NO: 942117 - RNA, 19 nt, Human
ucugaggguccagaugcau

SEQ ID NO: 942118 - RNA, 22 nt, Human
augggaugcauggcuguggcca

SEQ ID NO: 942119 - RNA, 22 nt, Human
cagcaugcaaguccagaugugg

SEQ ID NO: 942120 - RNA, 22 nt, Human
guuugcauuucuugaacuauau

SEQ ID NO: 942121 - RNA, 22 nt, Human
uuaauuuuaaccuguuuguguc

SEQ ID NO: 942122 - RNA, 22 nt, Human
aucaggauuauuaaaucuggau

SEQ ID NO: 942123 - RNA, 22 nt, Human
gccuggagggauagaaugcaag

SEQ ID NO: 942124 - RNA, 22 nt, Human
cugugucuugaguaauucggug

SEQ ID NO: 942125 - RNA, 22 nt, Human
uuuauaagaagcaaugucugag

SEQ ID NO: 942126 - RNA, 22 nt, Human
cuggccucaccucagacuuacu

SEQ ID NO: 942127 - RNA, 21 nt, Human
ugcuucucuagaucaacuacu

SEQ ID NO: 942128 - RNA, 22 nt, Human
uugauuccuugaaauauccuug

SEQ ID NO: 942129 - RNA, 22 nt, Human
uuuuuaagcuccuuugauguca

SEQ ID NO: 942130 - RNA, 22 nt, Human
cacacaugucucuccaugcucu

SEQ ID NO: 942131 - RNA, 20 nt, Human
ccagacagcaccugccuggu

SEQ ID NO: 942132 - RNA, 22 nt, Human
uguguccauucaggcacugacc

SEQ ID NO: 942133 - RNA, 22 nt, Human
ucagaguguuuuacuaaacaag

SEQ ID NO: 942134 - RNA, 22 nt, Human
ugucuucaucuccaugcacaga

SEQ ID NO: 942135 - RNA, 22 nt, Human
gagcccucucuguaggcaagua

SEQ ID NO: 942136 - RNA, 22 nt, Human
cucuuaguaaugccaugaagca

SEQ ID NO: 942137 - RNA, 19 nt, Human
agcagccaucgaccaugga

SEQ ID NO: 942138 - RNA, 22 nt, Human
gcugcuucucugauggagucca

SEQ ID NO: 942139 - RNA, 22 nt, Human
uuacacaacaucuguauuauua

SEQ ID NO: 942140 - RNA, 22 nt, Human
gccaggaggcugcuguguaggc

SEQ ID NO: 942141 - RNA, 22 nt, Human
ucucagaggugcccuggcaucu

SEQ ID NO: 942142 - RNA, 22 nt, Human
cuucuucaagagaaugggagac

SEQ ID NO: 942143 - RNA, 22 nt, Human
ugcauuguugaugaguugaaua

SEQ ID NO: 942144 - RNA, 22 nt, Human
ucuccucuauuucuguauguau

SEQ ID NO: 942145 - RNA, 22 nt, Human
ucuuuucaucauuuaauaggua

SEQ ID NO: 942146 - RNA, 22 nt, Human
aaaugugucauauucaaaguca

SEQ ID NO: 942147 - RNA, 22 nt, Human
uauuagguuggugcaacaguaa

SEQ ID NO: 942148 - RNA, 22 nt, Human
uccguauuugacuauugcaccg

SEQ ID NO: 942149 - RNA, 22 nt, Human
uauauguaagcuauguaagagu

SEQ ID NO: 942150 - RNA, 22 nt, Human
ugcaccuuguccauuuuuggcc

SEQ ID NO: 942151 - RNA, 22 nt, Human
uuccaugacaccgagggaaguc

SEQ ID NO: 942152 - RNA, 22 nt, Human
ggccucaguuucuucaacugua

SEQ ID NO: 942153 - RNA, 22 nt, Human
aauaagaauuuacuugucaaga

SEQ ID NO: 942154 - RNA, 22 nt, Human
agcuuccucaccucagaggucu

SEQ ID NO: 942155 - RNA, 20 nt, Human
cagccuccacucacucagcu

SEQ ID NO: 942156 - RNA, 17 nt, Human
uuccuggaagucauucc

SEQ ID NO: 942157 - RNA, 22 nt, Human
guggccaaacaccaguuuagga

SEQ ID NO: 942158 - RNA, 22 nt, Human
gcagacuggucuucagccuugg

SEQ ID NO: 942159 - RNA, 22 nt, Human
augccagccucuaagcacuuua

SEQ ID NO: 942160 - RNA, 22 nt, Human
gaaaagggcaagagagagggca

SEQ ID NO: 942161 - RNA, 22 nt, Human
cugaggugagcuucccugggcu

SEQ ID NO: 942162 - RNA, 22 nt, Human
uccaggagugauaaggccacug

SEQ ID NO: 942163 - RNA, 22 nt, Human
ucagggcaaagggcagaguuug

SEQ ID NO: 942164 - RNA, 22 nt, Human
accccaagacaguagaagagaa

SEQ ID NO: 942165 - RNA, 22 nt, Human
uagcagggccaggcugggaacc

SEQ ID NO: 942166 - RNA, 22 nt, Human
aggcagcucuguggccucccag

SEQ ID NO: 942167 - RNA, 22 nt, Human
ugaaacauuugaugaucuuugg

SEQ ID NO: 942168 - RNA, 20 nt, Human
acugagcugcauggagagga

SEQ ID NO: 942169 - RNA, 22 nt, Human
agaauaaauguuggacuuagga

SEQ ID NO: 942170 - RNA, 22 nt, Human
ucugcagaaguggcugggccac

SEQ ID NO: 942171 - RNA, 19 nt, Human
cucucacucgccacauccu

SEQ ID NO: 942172 - RNA, 21 nt, Human
ucagcagcuuuugcagucccu

SEQ ID NO: 942173 - RNA, 18 nt, Human
ugagaggcagguagagga

SEQ ID NO: 942174 - RNA, 22 nt, Human
aggcucagaggugagcaucugc

SEQ ID NO: 942175 - RNA, 22 nt, Human
aggggaggagcuuuucuugccu

SEQ ID NO: 942176 - RNA, 22 nt, Human
guuccuauauagccuuaaggau

SEQ ID NO: 942177 - RNA, 22 nt, Human
ugaaauguguaauguggaugcc

SEQ ID NO: 942178 - RNA, 22 nt, Human
cuuugcaaacugucacacuuuc

SEQ ID NO: 942179 - RNA, 19 nt, Human
ucuggcuccugccaggcug

SEQ ID NO: 942180 - RNA, 22 nt, Human
ugaacgcagguccacauggcuc

SEQ ID NO: 942181 - RNA, 22 nt, Human
agggacuuguguccuauguaug

SEQ ID NO: 942182 - RNA, 22 nt, Human
caggggcaagaaugcugucagc

SEQ ID NO: 942183 - RNA, 23 nt, Human
gcugucugucaucucugcgggag

SEQ ID NO: 942184 - RNA, 18 nt, Human
gcagcugcaguuguagcu

SEQ ID NO: 942185 - RNA, 22 nt, Human
cuggccacaacuagcccaggac

SEQ ID NO: 942186 - RNA, 22 nt, Human
gcagcagagaacacaaugaugg

SEQ ID NO: 942187 - RNA, 21 nt, Human
uccuggcccacucuaucccca

SEQ ID NO: 942188 - RNA, 21 nt, Human
cugcucugacagugaggccag

SEQ ID NO: 942189 - RNA, 22 nt, Human
cccugaggggaguggugaggug

SEQ ID NO: 942190 - RNA, 22 nt, Human
acugugcacaauucuaaguccu

SEQ ID NO: 942191 - RNA, 22 nt, Human
ugauucuuugaccaaaaaauug

SEQ ID NO: 942192 - RNA, 17 nt, Human
uguggccuucugagcuu

SEQ ID NO: 942193 - RNA, 22 nt, Human
cugccaaggcuggggaggacaa

SEQ ID NO: 942194 - RNA, 22 nt, Human
uuuauuguuuagaagggggcug

SEQ ID NO: 942195 - RNA, 22 nt, Human
gaggcugcaggcaaugcugccc

SEQ ID NO: 942196 - RNA, 22 nt, Human
aagggcuggccacauucugggu

SEQ ID NO: 942197 - RNA, 22 nt, Human
cagggcaguaccgcccucuggc

SEQ ID NO: 942198 - RNA, 22 nt, Human
uguaccuuuuucugugcaugcu

SEQ ID NO: 942199 - RNA, 22 nt, Human
aucaguuugagugcugugucaa

SEQ ID NO: 942200 - RNA, 21 nt, Human
agauuguauggaggugagagg

SEQ ID NO: 942201 - RNA, 22 nt, Human
uauuagcgcuuacugaguugcc

SEQ ID NO: 942202 - RNA, 22 nt, Human
ucacaauuuggauacagcuaug

SEQ ID NO: 942203 - RNA, 22 nt, Human
uucaagaucuuccaaaggauac

SEQ ID NO: 942204 - RNA, 22 nt, Human
cuccuggcuucugaaaucgugg

SEQ ID NO: 942205 - RNA, 22 nt, Human
ggauggcaggacaaggacccag

SEQ ID NO: 942206 - RNA, 22 nt, Human
caugcuuuaccaaagcagugau

SEQ ID NO: 942207 - RNA, 22 nt, Human
aagccagauagaagaacucauu

SEQ ID NO: 942208 - RNA, 22 nt, Human
agcaccaucagaugcaauaucu

SEQ ID NO: 942209 - RNA, 22 nt, Human
ucuguaucuaauuuuacaguag

SEQ ID NO: 942210 - RNA, 22 nt, Human
caggcagaguuagagcaacugg

SEQ ID NO: 942211 - RNA, 22 nt, Human
cccaggaacagggcucagaccc

SEQ ID NO: 942212 - RNA, 22 nt, Human
cacuggaauauggcguugaacc

SEQ ID NO: 942213 - RNA, 22 nt, Human
guggccaauuuccaucuguaag

SEQ ID NO: 942214 - RNA, 22 nt, Human
ccagggcaggagaaagacucac

SEQ ID NO: 942215 - RNA, 22 nt, Human
guauuuauaggggaaugagagu

SEQ ID NO: 942216 - RNA, 22 nt, Human
acagugucugacacauuguagc

SEQ ID NO: 942217 - RNA, 22 nt, Human
aaacugccuccugggcaacuaa

SEQ ID NO: 942218 - RNA, 22 nt, Human
agggccagcacuccuggcagga

SEQ ID NO: 942219 - RNA, 22 nt, Human
gccaggagugucccacucauuu

SEQ ID NO: 942220 - RNA, 22 nt, Human
aagcuggaacaucuugaggaag

SEQ ID NO: 942221 - RNA, 22 nt, Human
cuggcacaaugucacuuuugcu

SEQ ID NO: 942222 - RNA, 22 nt, Human
cuuuauguuggggugucuuagu

SEQ ID NO: 942223 - RNA, 22 nt, Human
uuuccucuucuucccaugucau

SEQ ID NO: 942224 - RNA, 21 nt, Human
cagcagaguaaugcauucgua

SEQ ID NO: 942225 - RNA, 22 nt, Human
acuucuggugucauacugcauu

SEQ ID NO: 942226 - RNA, 22 nt, Human
gcucugcugaagccccuugcau

SEQ ID NO: 942227 - RNA, 22 nt, Human
uggccuggcccugaggcccugu

SEQ ID NO: 942228 - RNA, 22 nt, Human
aaaaugaugcuguaauuuggca

SEQ ID NO: 942229 - RNA, 22 nt, Human
ccagggcaucacauccaguguu

SEQ ID NO: 942230 - RNA, 22 nt, Human
accucugccacuuucuaacucu

SEQ ID NO: 942231 - RNA, 22 nt, Human
ggugggcacauucagucucugu

SEQ ID NO: 942232 - RNA, 22 nt, Human
uuucaguguaucuuccaaaagc

SEQ ID NO: 942233 - RNA, 22 nt, Human
ucacaggguuuggaagccuccu

SEQ ID NO: 942234 - RNA, 23 nt, Human
uuccagaguccacaucugccacc

SEQ ID NO: 942235 - RNA, 22 nt, Human
gccaggcacaguucuaggugcu

SEQ ID NO: 942236 - RNA, 21 nt, Human
gagacagcccagugccagggc

SEQ ID NO: 942237 - RNA, 20 nt, Human
agacaaaaugacuucaugca

SEQ ID NO: 942238 - RNA, 22 nt, Human
ugcuggaggaguuuacuguggc

SEQ ID NO: 942239 - RNA, 22 nt, Human
aaaugucuuuaucucauguaac

SEQ ID NO: 942240 - RNA, 22 nt, Human
aaaccaaacauuugcgguggug

SEQ ID NO: 942241 - RNA, 22 nt, Human
cugaggucuagacaccccaggg

SEQ ID NO: 942242 - RNA, 22 nt, Human
uccucugccaaagggaguugcc

SEQ ID NO: 942243 - RNA, 22 nt, Human
uuuaaauggcauuuucccagau

SEQ ID NO: 942244 - RNA, 22 nt, Human
ucaguuuugaaaacauugaaug

SEQ ID NO: 942245 - RNA, 22 nt, Human
cccagcuccagagccagaaaca

SEQ ID NO: 942246 - RNA, 22 nt, Human
uaauucagggccagaaucccca

SEQ ID NO: 942247 - RNA, 22 nt, Human
ucuugaaggggggcaguguuga

SEQ ID NO: 942248 - RNA, 22 nt, Human
cuggcagguccagcuggacuca

SEQ ID NO: 942249 - RNA, 22 nt, Human
cugcccagaagccagaugggca

SEQ ID NO: 942250 - RNA, 22 nt, Human
acucugcuaaauguaaguuggu

SEQ ID NO: 942251 - RNA, 23 nt, Human
cugcuguuuucuguaccugaagc

SEQ ID NO: 942252 - RNA, 22 nt, Human
aggggaugauccucccgcagcg

SEQ ID NO: 942253 - RNA, 22 nt, Human
accaggagguguuugcucaagu

SEQ ID NO: 942254 - RNA, 22 nt, Human
ggagaguggauuccagcuguau

SEQ ID NO: 942255 - RNA, 22 nt, Human
auacaguauuaccuguucagga

SEQ ID NO: 942256 - RNA, 22 nt, Human
gcagcugggacacugaggccag

SEQ ID NO: 942257 - RNA, 22 nt, Human
caaaugauaccuauuacuaggc

SEQ ID NO: 942258 - RNA, 22 nt, Human
acaggagugaaucuggcacuua

SEQ ID NO: 942259 - RNA, 22 nt, Human
acagguggcuuauuggcugauu

SEQ ID NO: 942260 - RNA, 22 nt, Human
augaggcaaucaugguccaguu

SEQ ID NO: 942261 - RNA, 22 nt, Human
cauugcuguuaauugucucuag

SEQ ID NO: 942262 - RNA, 18 nt, Human
cuuuaugugcagagcuuu

SEQ ID NO: 942263 - RNA, 22 nt, Human
gccuugggaaagugggaggaga

SEQ ID NO: 942264 - RNA, 22 nt, Human
ugagccagccuugcagcugugc

SEQ ID NO: 942265 - RNA, 19 nt, Human
ccaggaaccccuagcuacc

SEQ ID NO: 942266 - RNA, 22 nt, Human
uuuguuuagaaagagauuggug

SEQ ID NO: 942267 - RNA, 22 nt, Human
gugguaauuuaauccuacacug

SEQ ID NO: 942268 - RNA, 22 nt, Human
ucagggaaugaugcacacaguu

SEQ ID NO: 942269 - RNA, 22 nt, Human
auuaaauacugcaggcuaagca

SEQ ID NO: 942270 - RNA, 22 nt, Human
gggccuggcaugcagccccguu

SEQ ID NO: 942271 - RNA, 19 nt, Human
agcuccugggcucugggcc

SEQ ID NO: 942272 - RNA, 22 nt, Human
ucugaggcauacccaggccccc

SEQ ID NO: 942273 - RNA, 16 nt, Human
auuguuuucaauuaga

SEQ ID NO: 942274 - RNA, 22 nt, Human
ggguccagcgacagcaggcuca

SEQ ID NO: 942275 - RNA, 22 nt, Human
uccaggcuagguuuacaggaca

SEQ ID NO: 942276 - RNA, 22 nt, Human
aguguuucucagaagggccuau

SEQ ID NO: 942277 - RNA, 22 nt, Human
gcuccuggcucuggccaaggga

SEQ ID NO: 942278 - RNA, 22 nt, Human
caggccucuccuuagucuggca

SEQ ID NO: 942279 - RNA, 22 nt, Human
aaaucaguuaagaugaggccau

SEQ ID NO: 942280 - RNA, 22 nt, Human
ugcugggcuagaagcugaggcc

SEQ ID NO: 942281 - RNA, 22 nt, Human
uuuuaucaaucauuaagacauu

SEQ ID NO: 942282 - RNA, 22 nt, Human
gcagugcuaaguagcuggccca

SEQ ID NO: 942283 - RNA, 22 nt, Human
gucaggaucucccaguacauau

SEQ ID NO: 942284 - RNA, 22 nt, Human
gcagacagcauguugggcuauu

SEQ ID NO: 942285 - RNA, 22 nt, Human
uggcagucggacuucuaucuca

SEQ ID NO: 942286 - RNA, 22 nt, Human
agggccagcccauaaugccaaa

SEQ ID NO: 942287 - RNA, 19 nt, Human
uggaggcaagacauggagg

SEQ ID NO: 942288 - RNA, 17 nt, Human
aggccucccuccaggcc

SEQ ID NO: 942289 - RNA, 22 nt, Human
cagcaggcccaggugcugguga

SEQ ID NO: 942290 - RNA, 17 nt, Human
ugguggcuggagucagg

SEQ ID NO: 942291 - RNA, 22 nt, Human
gagaggauccacaaaccaggaa

SEQ ID NO: 942292 - RNA, 22 nt, Human
gaagcccuauccucuccuggga

SEQ ID NO: 942293 - RNA, 22 nt, Human
uggaagcaucacuucuugccug

SEQ ID NO: 942294 - RNA, 22 nt, Human
uucacaggugacuggggauaac

SEQ ID NO: 942295 - RNA, 22 nt, Human
gcaucuuucuguccauucagca

SEQ ID NO: 942296 - RNA, 22 nt, Human
ugucagugaguuaguugcaagu

SEQ ID NO: 942297 - RNA, 22 nt, Human
ucucagagaaaugugucaccau

SEQ ID NO: 942298 - RNA, 22 nt, Human
gcugccuuugugagccaagggg

SEQ ID NO: 942299 - RNA, 22 nt, Human
uggcagagcaaaaagauagaau

SEQ ID NO: 942300 - RNA, 22 nt, Human
gaggccugguagccgagcccca

SEQ ID NO: 942301 - RNA, 22 nt, Human
cuggacagaaaaggccacugga

SEQ ID NO: 942302 - RNA, 22 nt, Human
ugccugugucacagugauguuu

SEQ ID NO: 942303 - RNA, 21 nt, Human
agagaauugccuuagauguuc

SEQ ID NO: 942304 - RNA, 22 nt, Human
gaggcaguuugccaugccagga

SEQ ID NO: 942305 - RNA, 22 nt, Human
ugaaacacugcgauaaaauccu

SEQ ID NO: 942306 - RNA, 22 nt, Human
gcugucuguucgagcguguguu

SEQ ID NO: 942307 - RNA, 22 nt, Human
aaagcaaugaugguagacacgu

SEQ ID NO: 942308 - RNA, 22 nt, Human
cauuugaauuguucugugggaa

SEQ ID NO: 942309 - RNA, 22 nt, Human
uugggguguuggauggagcaag

SEQ ID NO: 942310 - RNA, 22 nt, Human
aaaguucagugccuucuauaca

SEQ ID NO: 942311 - RNA, 22 nt, Human
ugcucugguccucccucggcgc

SEQ ID NO: 942312 - RNA, 22 nt, Human
aaggccaggacaccaggggacu

SEQ ID NO: 942313 - RNA, 22 nt, Human
uggccacuuggcaugugugcca

SEQ ID NO: 942314 - RNA, 22 nt, Human
gcagggcucugcuguaguccua

SEQ ID NO: 942315 - RNA, 22 nt, Human
cuggcagcuggaggcuagaggc

SEQ ID NO: 942316 - RNA, 22 nt, Human
cugcuuugaggggcucuguaua

SEQ ID NO: 942317 - RNA, 22 nt, Human
gucuuugcugucuuugcucuca

SEQ ID NO: 942318 - RNA, 22 nt, Human
agcccagccggauucccaguuc

SEQ ID NO: 942319 - RNA, 22 nt, Human
uccaggagauacacugcaccag

SEQ ID NO: 942320 - RNA, 17 nt, Human
ucuguucaugcauaccu

SEQ ID NO: 942321 - RNA, 22 nt, Human
uaugcauuuuauagugcaaagc

SEQ ID NO: 942322 - RNA, 22 nt, Human
uaggcagcugcaaacuucgguc

SEQ ID NO: 942323 - RNA, 22 nt, Human
ggccugagaaccauggggccaa

SEQ ID NO: 942324 - RNA, 21 nt, Human
uucugggaaaugagcuggggc

SEQ ID NO: 942325 - RNA, 22 nt, Human
ggcccuguuagagcucccacaa

SEQ ID NO: 942326 - RNA, 22 nt, Human
uuagauaauguagagauaugag

SEQ ID NO: 942327 - RNA, 22 nt, Human
uagcacugaaucacaugcugcu

SEQ ID NO: 942328 - RNA, 22 nt, Human
aagggcagcugacagaugcuua

SEQ ID NO: 942329 - RNA, 22 nt, Human
ucucagagaugucaagagucua

SEQ ID NO: 942330 - RNA, 22 nt, Human
ccacaggaccagaggagaucac

SEQ ID NO: 942331 - RNA, 22 nt, Human
uugaaagacuucuccugugaaa

SEQ ID NO: 942332 - RNA, 22 nt, Human
gcucccagcauugcugcugaau

SEQ ID NO: 942333 - RNA, 22 nt, Human
gcaaagucugcaucuggaucag

SEQ ID NO: 942334 - RNA, 22 nt, Human
ucccagcauaacaaacugcccg

SEQ ID NO: 942335 - RNA, 22 nt, Human
agucucagcaagcauggcuagu

SEQ ID NO: 942336 - RNA, 22 nt, Human
uccaggagugugugcuaauggg

SEQ ID NO: 942337 - RNA, 20 nt, Human
agauggugaaggccagggag

SEQ ID NO: 942338 - RNA, 22 nt, Human
agaggcccucucugcucagucu

SEQ ID NO: 942339 - RNA, 22 nt, Human
ugcacacaguucucaggaaaga

SEQ ID NO: 942340 - RNA, 22 nt, Human
cagggagggaggaaaauuugcu

SEQ ID NO: 942341 - RNA, 22 nt, Human
gcugucaguuuuacccacagac

SEQ ID NO: 942342 - RNA, 22 nt, Human
ccaaggaguagagcaggaagcu

SEQ ID NO: 942343 - RNA, 22 nt, Human
aaucuauucccuuucuguaaaa

SEQ ID NO: 942344 - RNA, 22 nt, Human
cagcaauaaugucuacaaaucu

SEQ ID NO: 942345 - RNA, 22 nt, Human
aagacauugucauuuuauaauu

SEQ ID NO: 942346 - RNA, 22 nt, Human
gggcagauggggcacaggcuga

SEQ ID NO: 942347 - RNA, 22 nt, Human
ucuguucaguugauuagacaga

SEQ ID NO: 942348 - RNA, 22 nt, Human
gcucugcugucuucuugcaggc

SEQ ID NO: 942349 - RNA, 22 nt, Human
aguggcagccgagcaggagaug

SEQ ID NO: 942350 - RNA, 21 nt, Human
ucacuagugccuucugucauu

SEQ ID NO: 942351 - RNA, 22 nt, Human
cuccuuggccguuaaugucaca

SEQ ID NO: 942352 - RNA, 22 nt, Human
cuggcugcuggccugaggaugc

SEQ ID NO: 942353 - RNA, 22 nt, Human
caguggcaugguugacugcagu

SEQ ID NO: 942354 - RNA, 22 nt, Human
ggcucagaccucccagcuccag

SEQ ID NO: 942355 - RNA, 22 nt, Human
gcagcagagcuuuguccuggcu

SEQ ID NO: 942356 - RNA, 22 nt, Human
auuuaguguguauugcuauuau

SEQ ID NO: 942357 - RNA, 22 nt, Human
gcagggcugcugaaacuuguuu

SEQ ID NO: 942358 - RNA, 22 nt, Human
cccagcaucuccaggcauggcc

SEQ ID NO: 942359 - RNA, 22 nt, Human
acagugcuaaacacuucuugaa

SEQ ID NO: 942360 - RNA, 22 nt, Human
uggcagcaguggagguagaaag

SEQ ID NO: 942361 - RNA, 22 nt, Human
gcuggccacauugugccguccu

SEQ ID NO: 942362 - RNA, 21 nt, Human
gccaccucgucucggagcagc

SEQ ID NO: 942363 - RNA, 22 nt, Human
gacuuucucuccucccaggugu

SEQ ID NO: 942364 - RNA, 22 nt, Human
gccugagccgccugagcggcgg

SEQ ID NO: 942365 - RNA, 20 nt, Human
ugaaauaaggaguuguccuu

SEQ ID NO: 942366 - RNA, 22 nt, Human
uaauuuaauuucaugccagccu

SEQ ID NO: 942367 - RNA, 22 nt, Human
gauauagguucauaguguuaca

SEQ ID NO: 942368 - RNA, 22 nt, Human
gcccagcuuuuugaggcaggca

SEQ ID NO: 942369 - RNA, 22 nt, Human
agccugucugucuccaaagcug

SEQ ID NO: 942370 - RNA, 22 nt, Human
gccucugcccuccugggacugc

SEQ ID NO: 942371 - RNA, 18 nt, Human
gcaggugccacugcuguu

SEQ ID NO: 942372 - RNA, 22 nt, Human
aaauaaguuaaacuagaaugau

SEQ ID NO: 942373 - RNA, 22 nt, Human
cugcccugcccaggccuugggc

SEQ ID NO: 942374 - RNA, 22 nt, Human
gcugucagcgcccaaggagcuc

SEQ ID NO: 942375 - RNA, 22 nt, Human
ugaagcagagugaaggugaauu

SEQ ID NO: 942376 - RNA, 22 nt, Human
gauuucaaagguucugcaugcc

SEQ ID NO: 942377 - RNA, 22 nt, Human
agagccagguguagucucggag

SEQ ID NO: 942378 - RNA, 22 nt, Human
uucaagauggcugcaaauacuu

SEQ ID NO: 942379 - RNA, 22 nt, Human
gucagagagggcacgugcacac

SEQ ID NO: 942380 - RNA, 22 nt, Human
gggcugagucugcugccuguca

SEQ ID NO: 942381 - RNA, 22 nt, Human
gugcucuguguauuaggauguc

SEQ ID NO: 942382 - RNA, 22 nt, Human
aaacuuuaagacaguccucaag

SEQ ID NO: 942383 - RNA, 22 nt, Human
ucuuugcaugcauuuucccuua

SEQ ID NO: 942384 - RNA, 22 nt, Human
ccuggcagucaggggaguccuu

SEQ ID NO: 942385 - RNA, 22 nt, Human
agagccugcagcugugaagaaa

SEQ ID NO: 942386 - RNA, 22 nt, Human
aagauggaguaguguaaugguu

SEQ ID NO: 942387 - RNA, 20 nt, Human
gucucaaguaucucacaguc

SEQ ID NO: 942388 - RNA, 22 nt, Human
uauacugucgcauuacacucac

SEQ ID NO: 942389 - RNA, 22 nt, Human
aggcucagcccaagguggagag

SEQ ID NO: 942390 - RNA, 22 nt, Human
ugcugccagccaggccauggag

SEQ ID NO: 942391 - RNA, 23 nt, Human
aaauuauugcucuucaauugccu

SEQ ID NO: 942392 - RNA, 22 nt, Human
ccaggagaugggaaaguagcag

SEQ ID NO: 942393 - RNA, 22 nt, Human
uuucuagucagccauaucuagu

SEQ ID NO: 942394 - RNA, 21 nt, Human
cagaggcaggcucugugugug

SEQ ID NO: 942395 - RNA, 22 nt, Human
uuaaaaccaucagcuguaagau

SEQ ID NO: 942396 - RNA, 22 nt, Human
auuugucuuuggaccugugaga

SEQ ID NO: 942397 - RNA, 22 nt, Human
uccuggccuuauccccaaacug

SEQ ID NO: 942398 - RNA, 22 nt, Human
agaaugcaagauaaacuuuauu

SEQ ID NO: 942399 - RNA, 19 nt, Human
agucuuucccacucgucuu

SEQ ID NO: 942400 - RNA, 17 nt, Human
ucaggauguagcaguag

SEQ ID NO: 942401 - RNA, 22 nt, Human
agcuggccuuagugagcaccug

SEQ ID NO: 942402 - RNA, 22 nt, Human
auuaguaaaacauuguauaugu

SEQ ID NO: 942403 - RNA, 22 nt, Human
ccuccugguccagcaucucuuu

SEQ ID NO: 942404 - RNA, 22 nt, Human
gugcagguguuuuggcugccag

SEQ ID NO: 942405 - RNA, 22 nt, Human
cagcuggcgggcagagccgcca

SEQ ID NO: 942406 - RNA, 22 nt, Human
cacauacaaggcacacuggagg

SEQ ID NO: 942407 - RNA, 22 nt, Human
uggggcuguggauucucacgaa

SEQ ID NO: 942408 - RNA, 22 nt, Human
uccucugcuguucugguucuuu

SEQ ID NO: 942409 - RNA, 22 nt, Human
agaugaagacucaggagcaggu

SEQ ID NO: 942410 - RNA, 22 nt, Human
augcaaaaguaacugugauuuu

SEQ ID NO: 942411 - RNA, 19 nt, Human
agcagccauagacaauaug

SEQ ID NO: 942412 - RNA, 22 nt, Human
gccugccugcugucaucugccu

SEQ ID NO: 942413 - RNA, 22 nt, Human
ucaggauguuaauauagcauua

SEQ ID NO: 942414 - RNA, 22 nt, Human
ucuucauuccguagauauuuau

SEQ ID NO: 942415 - RNA, 22 nt, Human
agugacaacaaguugacuagaa

SEQ ID NO: 942416 - RNA, 22 nt, Human
guaggcagauaggagugcagcc

SEQ ID NO: 942417 - RNA, 22 nt, Human
cugcuguguggugaaacucagu

SEQ ID NO: 942418 - RNA, 22 nt, Human
caguuuuuagauuaguuggugg

SEQ ID NO: 942419 - RNA, 22 nt, Human
ugcuggccgugagcucucggga

SEQ ID NO: 942420 - RNA, 22 nt, Human
uaugagaaaauaaauaucuguu

SEQ ID NO: 942421 - RNA, 22 nt, Human
ucucagagugacaaugagaauu

SEQ ID NO: 942422 - RNA, 22 nt, Human
ggaggccauaguuugggaguca

SEQ ID NO: 942423 - RNA, 21 nt, Human
ugguggagugugcugagcaug

SEQ ID NO: 942424 - RNA, 22 nt, Human
uauucacagcugccgcacucag

SEQ ID NO: 942425 - RNA, 22 nt, Human
cucuucuugaaagaggaauuca

SEQ ID NO: 942426 - RNA, 23 nt, Human
ucagagaaguuguaggcugggga

SEQ ID NO: 942427 - RNA, 22 nt, Human
ggcaaaaaccacaauuacuuuu

SEQ ID NO: 942428 - RNA, 22 nt, Human
gccacguugccacccgggugac

SEQ ID NO: 942429 - RNA, 22 nt, Human
uuuuaucuaccuaugcucauuu

SEQ ID NO: 942430 - RNA, 22 nt, Human
gaggcugcuguuagcccugggc

SEQ ID NO: 942431 - RNA, 22 nt, Human
ggccucggcccacugcugcggu

SEQ ID NO: 942432 - RNA, 22 nt, Human
gcucaggaaauaguuuaguguu

SEQ ID NO: 942433 - RNA, 22 nt, Human
ucaaaguccuugcuuuuucugu

SEQ ID NO: 942434 - RNA, 22 nt, Human
cagaguggcagucccaggccca

SEQ ID NO: 942435 - RNA, 22 nt, Human
agagccaggacugugucucacu

SEQ ID NO: 942436 - RNA, 22 nt, Human
agcugcccuguggggaggguug

SEQ ID NO: 942437 - RNA, 22 nt, Human
caugauuuugucuuguguuaau

SEQ ID NO: 942438 - RNA, 22 nt, Human
uccagggaagagcagaggcuac

SEQ ID NO: 942439 - RNA, 22 nt, Human
acagguggagugguuagcaggc

SEQ ID NO: 942440 - RNA, 22 nt, Human
ucagacuucuacuuugcagagc

SEQ ID NO: 942441 - RNA, 22 nt, Human
gcauaauauacaugcuugaucc

SEQ ID NO: 942442 - RNA, 22 nt, Human
uaaguucagaguucucauuugu

SEQ ID NO: 942443 - RNA, 22 nt, Human
caggagaagguuuggagugcag

SEQ ID NO: 942444 - RNA, 22 nt, Human
acugaaggaaacuuuuguguuu

SEQ ID NO: 942445 - RNA, 22 nt, Human
uggccuugagagaucaaaaggu

SEQ ID NO: 942446 - RNA, 19 nt, Human
agucucaguguacagaggc

SEQ ID NO: 942447 - RNA, 22 nt, Human
cuccuuccccuacucagcaucc

SEQ ID NO: 942448 - RNA, 22 nt, Human
ggggccuuggaucugugccccg

SEQ ID NO: 942449 - RNA, 23 nt, Human
gugagcagcccacuaggaaugcc

SEQ ID NO: 942450 - RNA, 22 nt, Human
ccuggcagcagcacaugccuuc

SEQ ID NO: 942451 - RNA, 22 nt, Human
gucccagggaagaaggcagcac

SEQ ID NO: 942452 - RNA, 19 nt, Human
ucaucucacagggccuggc

SEQ ID NO: 942453 - RNA, 22 nt, Human
uuuuccucugcagagcaguuag

SEQ ID NO: 942454 - RNA, 22 nt, Human
uauuaucauugguaauaugguc

SEQ ID NO: 942455 - RNA, 22 nt, Human
agacccugucaguguuaggaaa

SEQ ID NO: 942456 - RNA, 22 nt, Human
ggccugcuuuccgagccugcag

SEQ ID NO: 942457 - RNA, 21 nt, Human
gugcucugggcagcagagggc

SEQ ID NO: 942458 - RNA, 22 nt, Human
ggaagaagggucauuggcagcc

SEQ ID NO: 942459 - RNA, 22 nt, Human
cugccacuagcuuucacaucuu

SEQ ID NO: 942460 - RNA, 22 nt, Human
gugcugugcgcuuuuucuguau

SEQ ID NO: 942461 - RNA, 21 nt, Human
uccugccuuaguccagagcag

SEQ ID NO: 942462 - RNA, 22 nt, Human
augcagcugucagggagaacau

SEQ ID NO: 942463 - RNA, 22 nt, Human
ggcucacgcaauuaucccggcc

SEQ ID NO: 942464 - RNA, 22 nt, Human
cuacucugaauugaagugauau

SEQ ID NO: 942465 - RNA, 22 nt, Human
ugacccugcuucuuggugcagg

SEQ ID NO: 942466 - RNA, 22 nt, Human
cauuuguuuagaagucuuuaua

SEQ ID NO: 942467 - RNA, 19 nt, Human
ccagcagcuuugauucucu

SEQ ID NO: 942468 - RNA, 22 nt, Human
cucuugaagcaggggccaguuc

SEQ ID NO: 942469 - RNA, 22 nt, Human
cucaggaugcaauuccaucaag

SEQ ID NO: 942470 - RNA, 22 nt, Human
cccaguuucaacuuuccagugg

SEQ ID NO: 942471 - RNA, 22 nt, Human
uaaguggaagguuauaugcuaa

SEQ ID NO: 942472 - RNA, 22 nt, Human
gaagccuugaacugcaaacccc

SEQ ID NO: 942473 - RNA, 22 nt, Human
uuguuuuggaagaacuuacucu

SEQ ID NO: 942474 - RNA, 22 nt, Human
gccagguggcugagcagcugca

SEQ ID NO: 942475 - RNA, 22 nt, Human
ucaagagacaggacguguuuca

SEQ ID NO: 942476 - RNA, 22 nt, Human
ugagcuuacuucuguacacaga

SEQ ID NO: 942477 - RNA, 22 nt, Human
gauugaaacauaggcagucgag

SEQ ID NO: 942478 - RNA, 22 nt, Human
ugucaugccaggaaauaguccc

SEQ ID NO: 942479 - RNA, 22 nt, Human
aaacacaucauucaugucguca

SEQ ID NO: 942480 - RNA, 22 nt, Human
ggcacugauaauguccucucuc

SEQ ID NO: 942481 - RNA, 22 nt, Human
acaacauucuuaaauacacuga

SEQ ID NO: 942482 - RNA, 19 nt, Human
acagaagcauagaaaagga

SEQ ID NO: 942483 - RNA, 22 nt, Human
uucuuuccacagaggggaugau

SEQ ID NO: 942484 - RNA, 22 nt, Human
ccuggcugaaccaaugaagugg

SEQ ID NO: 942485 - RNA, 22 nt, Human
uguguacuugaaagggcagguc

SEQ ID NO: 942486 - RNA, 22 nt, Human
uugcucuguaauaaucuggggu

SEQ ID NO: 942487 - RNA, 22 nt, Human
ugugaaagauacuaggcagagg

SEQ ID NO: 942488 - RNA, 23 nt, Human
gcucugagggcuuaucccuccca

SEQ ID NO: 942489 - RNA, 22 nt, Human
uucuuucacucaagaaggaucu

SEQ ID NO: 942490 - RNA, 22 nt, Human
cagcagcucccauccgcugagc

SEQ ID NO: 942491 - RNA, 22 nt, Human
uacaguaaagcugcuaugaauu

SEQ ID NO: 942492 - RNA, 22 nt, Human
uauguacaaucagcaguucaua

SEQ ID NO: 942493 - RNA, 22 nt, Human
cuucaugcugauauccucgaug

SEQ ID NO: 942494 - RNA, 22 nt, Human
gcagcuggcucagagagguggg

SEQ ID NO: 942495 - RNA, 19 nt, Human
ccugugugggguagagauc

SEQ ID NO: 942496 - RNA, 22 nt, Human
aucagcaaucucguguauuagg

SEQ ID NO: 942497 - RNA, 22 nt, Human
gagcagugguugaacagaggca

SEQ ID NO: 942498 - RNA, 22 nt, Human
cugcucagcggaaggaagagcg

SEQ ID NO: 942499 - RNA, 22 nt, Human
gaaggccauugcguccugggau

SEQ ID NO: 942500 - RNA, 22 nt, Human
agugccuggaccccaugacaua

SEQ ID NO: 942501 - RNA, 22 nt, Human
cucuuaaagaauguuccagcug

SEQ ID NO: 942502 - RNA, 22 nt, Human
caaaguuuggcucucaugacau

SEQ ID NO: 942503 - RNA, 18 nt, Human
uggcagagugucuguucu

SEQ ID NO: 942504 - RNA, 22 nt, Human
aaggcccuaauagagcacauau

SEQ ID NO: 942505 - RNA, 22 nt, Human
caguuucuuaucuucaaaauug

SEQ ID NO: 942506 - RNA, 22 nt, Human
uuuccucuuauacaguguuuau

SEQ ID NO: 942507 - RNA, 22 nt, Human
cggggcugcgcucuuccugccg

SEQ ID NO: 942508 - RNA, 22 nt, Human
ugcacagcgggugucugucagg

SEQ ID NO: 942509 - RNA, 22 nt, Human
guaucuuuugguggaaaaauaa

SEQ ID NO: 942510 - RNA, 22 nt, Human
gcagcaggagaguuuguccugc

SEQ ID NO: 942511 - RNA, 22 nt, Human
cacagggcagugcugcccacuc

SEQ ID NO: 942512 - RNA, 22 nt, Human
uccagccuaauguucuucccac

SEQ ID NO: 942513 - RNA, 22 nt, Human
ucucugcuaagauugugucuag

SEQ ID NO: 942514 - RNA, 22 nt, Human
ugcaauaaguuguguuaucacu

SEQ ID NO: 942515 - RNA, 22 nt, Human
uccaagggcucauggacacuuu

SEQ ID NO: 942516 - RNA, 22 nt, Human
ggcugaaggaugaaagcugcag

SEQ ID NO: 942517 - RNA, 22 nt, Human
uuuguguuuguacaaugcacua

SEQ ID NO: 942518 - RNA, 22 nt, Human
ugacaccacaacuagccauuga

SEQ ID NO: 942519 - RNA, 22 nt, Human
cagcuggcuccaccucugggcu

SEQ ID NO: 942520 - RNA, 22 nt, Human
aggagaggaaucauuauuacaa

SEQ ID NO: 942521 - RNA, 22 nt, Human
gacaguuuuuaauccuuucaug

SEQ ID NO: 942522 - RNA, 22 nt, Human
ccuuaaaagaacuaucucuucu

SEQ ID NO: 942523 - RNA, 22 nt, Human
gugccugggcaugagcuuguug

SEQ ID NO: 942524 - RNA, 22 nt, Human
ccagcucuuggugcacuuacau

SEQ ID NO: 942525 - RNA, 18 nt, Human
gucauugcaacauacugu

SEQ ID NO: 942526 - RNA, 17 nt, Human
cagggcugucugccuag

SEQ ID NO: 942527 - RNA, 22 nt, Human
uggcugcucaagggaggaggcu

SEQ ID NO: 942528 - RNA, 22 nt, Human
agaaguaggcagggcuguauca

SEQ ID NO: 942529 - RNA, 22 nt, Human
ggacacaagcuccggggcugca

SEQ ID NO: 942530 - RNA, 22 nt, Human
uuauucuucuucucuugccagg

SEQ ID NO: 942531 - RNA, 22 nt, Human
uccauuuuagaagaaaauccac

SEQ ID NO: 942532 - RNA, 22 nt, Human
aaaucaaaagacauguguuuua

SEQ ID NO: 942533 - RNA, 22 nt, Human
ucucuucuaauuuucccgagua

SEQ ID NO: 942534 - RNA, 22 nt, Human
ugccagaagauucucuaucaga

SEQ ID NO: 942535 - RNA, 22 nt, Human
cucagggacguuagaggacagg

SEQ ID NO: 942536 - RNA, 22 nt, Human
ggcugccugcuccuccugcacg

SEQ ID NO: 942537 - RNA, 22 nt, Human
agacaggcagaggcugcagagg

SEQ ID NO: 942538 - RNA, 19 nt, Human
uccucaggggcucacagac

SEQ ID NO: 942539 - RNA, 22 nt, Human
uagggcagagcuuguacacgau

SEQ ID NO: 942540 - RNA, 18 nt, Human
cagggccccagaauuauc

SEQ ID NO: 942541 - RNA, 22 nt, Human
ccaaggagaaaugcugugcuuu

SEQ ID NO: 942542 - RNA, 22 nt, Human
cauugcacugcagcccgggcaa

SEQ ID NO: 942543 - RNA, 21 nt, Human
aaugcauuaacauaaagcuga

SEQ ID NO: 942544 - RNA, 22 nt, Human
uuaguaggagagcuuguucauu

SEQ ID NO: 942545 - RNA, 22 nt, Human
ugagauguaagguaugcuuacu

SEQ ID NO: 942546 - RNA, 18 nt, Human
aaguaacagaagagcaca

SEQ ID NO: 942547 - RNA, 22 nt, Human
caaauacuggguaaguuaauuu

SEQ ID NO: 942548 - RNA, 21 nt, Human
agcagccauggaugguaugua

SEQ ID NO: 942549 - RNA, 22 nt, Human
gaggcuggugguuaguuccauu

SEQ ID NO: 942550 - RNA, 22 nt, Human
agacagcaggggagucugguuu

SEQ ID NO: 942551 - RNA, 22 nt, Human
ccugggaggcggagguugcagu

SEQ ID NO: 942552 - RNA, 22 nt, Human
uuccuugaaugagucauggaaa

SEQ ID NO: 942553 - RNA, 22 nt, Human
gucuuuaugguaugaaaacuga

SEQ ID NO: 942554 - RNA, 22 nt, Human
caggauggagggagggcuguua

SEQ ID NO: 942555 - RNA, 22 nt, Human
cugcuguguggauucaauggcu

SEQ ID NO: 942556 - RNA, 22 nt, Human
gcucugggauuaccagccuuag

SEQ ID NO: 942557 - RNA, 22 nt, Human
cuccugggaauuuaguugugag

SEQ ID NO: 942558 - RNA, 22 nt, Human
uugguuuaggaacuggcuugga

SEQ ID NO: 942559 - RNA, 22 nt, Human
gguggccucucaugcaagguag

SEQ ID NO: 942560 - RNA, 22 nt, Human
auuuucauggcuucugcucagu

SEQ ID NO: 942561 - RNA, 22 nt, Human
gaucuguuucauucacagucug

SEQ ID NO: 942562 - RNA, 22 nt, Human
uuucacaaguaaaguccuaagu

SEQ ID NO: 942563 - RNA, 22 nt, Human
auuuugaaaccaaguuauuucc

SEQ ID NO: 942564 - RNA, 22 nt, Human
cuacccagcaccuaggcugccu

SEQ ID NO: 942565 - RNA, 22 nt, Human
cucacaggagaaagucaugguc

SEQ ID NO: 942566 - RNA, 22 nt, Human
augcagcuucaggauuaugaug

SEQ ID NO: 942567 - RNA, 22 nt, Human
uugaaaggaauacagaggccua

SEQ ID NO: 942568 - RNA, 22 nt, Human
ggagcagggcagugaauucugg

SEQ ID NO: 942569 - RNA, 21 nt, Human
gggaaauuaggauugcucauc

SEQ ID NO: 942570 - RNA, 18 nt, Human
ugcuuggagcauuuacca

SEQ ID NO: 942571 - RNA, 22 nt, Human
cacugaagcuuucauucucuug

SEQ ID NO: 942572 - RNA, 22 nt, Human
gcugggcagccccuacagagag

SEQ ID NO: 942573 - RNA, 22 nt, Human
ccacugucuuuuccaggcugaa

SEQ ID NO: 942574 - RNA, 22 nt, Human
aagucuuacauaauaguuugga

SEQ ID NO: 942575 - RNA, 22 nt, Human
cagggccuccccggcagucuuu

SEQ ID NO: 942576 - RNA, 22 nt, Human
ccugcugugaaacuggcauaug

SEQ ID NO: 942577 - RNA, 22 nt, Human
aauauuucuccuucguuauagc

SEQ ID NO: 942578 - RNA, 22 nt, Human
uaugcacauuaucuaauccauu

SEQ ID NO: 942579 - RNA, 20 nt, Human
ucucagcauaagaacccuuc

SEQ ID NO: 942580 - RNA, 22 nt, Human
uaaaucccuacaucuguguuuu

SEQ ID NO: 942581 - RNA, 22 nt, Human
ggcagcuccuccuagucugccc

SEQ ID NO: 942582 - RNA, 21 nt, Human
acagaggcauacagcuuaagg

SEQ ID NO: 942583 - RNA, 22 nt, Human
agugcuuuagagaaauggugcu

SEQ ID NO: 942584 - RNA, 22 nt, Human
ggcauggcucggagucagaaca

SEQ ID NO: 942585 - RNA, 22 nt, Human
gcuccuggucuggagcuucaag

SEQ ID NO: 942586 - RNA, 22 nt, Human
cugggccugggaggccaggucu

SEQ ID NO: 942587 - RNA, 22 nt, Human
cauuuagagucuugcaauuuua

SEQ ID NO: 942588 - RNA, 22 nt, Human
auucggaucauguguauguguu

SEQ ID NO: 942589 - RNA, 22 nt, Human
gcugucaccaaagcaggcacug

SEQ ID NO: 942590 - RNA, 22 nt, Human
uuauuaugguauuucuuugcag

SEQ ID NO: 942591 - RNA, 22 nt, Human
uacaugaacaaaauagcagaaa

SEQ ID NO: 942592 - RNA, 22 nt, Human
gagguuagaggucagugcaguc

SEQ ID NO: 942593 - RNA, 22 nt, Human
uauucacagguucuggggauca

SEQ ID NO: 942594 - RNA, 20 nt, Human
cacugaagacuucuugcuca

SEQ ID NO: 942595 - RNA, 22 nt, Human
gccuugggggugaaagaggcua

SEQ ID NO: 942596 - RNA, 22 nt, Human
uugacacagaucaauauucaac

SEQ ID NO: 942597 - RNA, 22 nt, Human
agggaggaucugcuccuugucu

SEQ ID NO: 942598 - RNA, 22 nt, Human
ucauccagagcuucauaaguaa

SEQ ID NO: 942599 - RNA, 22 nt, Human
uuucauaugggcauuggcaaua

SEQ ID NO: 942600 - RNA, 22 nt, Human
agacauuuggaagauacacaua

SEQ ID NO: 942601 - RNA, 22 nt, Human
aggagugcaaauaguccagaga

SEQ ID NO: 942602 - RNA, 22 nt, Human
cagucccaccaggaucgcucuu

SEQ ID NO: 942603 - RNA, 22 nt, Human
acauuuaaauaugccuuauauu

SEQ ID NO: 942604 - RNA, 22 nt, Human
agagccugucugccuuucuacc

SEQ ID NO: 942605 - RNA, 22 nt, Human
aucugcuugaaugagcaacagg

SEQ ID NO: 942606 - RNA, 22 nt, Human
ccacugaaggucaacauagagc

SEQ ID NO: 942607 - RNA, 22 nt, Human
guggccucugugcuccugccua

SEQ ID NO: 942608 - RNA, 22 nt, Human
uacuccugcugauccugccagc

SEQ ID NO: 942609 - RNA, 22 nt, Human
ccagcuccccucagcagguaau

SEQ ID NO: 942610 - RNA, 17 nt, Human
agguggguggaucaccu

SEQ ID NO: 942611 - RNA, 22 nt, Human
ccuccugggcuccugucugcac

SEQ ID NO: 942612 - RNA, 22 nt, Human
gugacagaguuuuagaucucau

SEQ ID NO: 942613 - RNA, 22 nt, Human
ccugucugcaugagugagcaua

SEQ ID NO: 942614 - RNA, 21 nt, Human
ugaaaucugaugggacaaaug

SEQ ID NO: 942615 - RNA, 22 nt, Human
guggagacgggacagaagcuaa

SEQ ID NO: 942616 - RNA, 22 nt, Human
aguaaaauuaauggaucagaag

SEQ ID NO: 942617 - RNA, 22 nt, Human
caagaugaucccugaaggcagc

SEQ ID NO: 942618 - RNA, 22 nt, Human
aaaggccacacagagcagggag

SEQ ID NO: 942619 - RNA, 22 nt, Human
gggcauggugaugugcaccugu

SEQ ID NO: 942620 - RNA, 22 nt, Human
uuuccaauaaagugucauuguu

SEQ ID NO: 942621 - RNA, 21 nt, Human
uugaagcaaggguggcucuga

SEQ ID NO: 942622 - RNA, 22 nt, Human
aaaguauucuugacuguuuuuc

SEQ ID NO: 942623 - RNA, 22 nt, Human
gcuguggucugugagcuccaaa

SEQ ID NO: 942624 - RNA, 22 nt, Human
cuguguccucccgcugcaccca

SEQ ID NO: 942625 - RNA, 22 nt, Human
uccaagggcaacaauggaacac

SEQ ID NO: 942626 - RNA, 22 nt, Human
aauaagaaagagucagcuucag

SEQ ID NO: 942627 - RNA, 22 nt, Human
augcagauguuugguucauugu

SEQ ID NO: 942628 - RNA, 20 nt, Human
ucugcucagcccucaguggc

SEQ ID NO: 942629 - RNA, 19 nt, Human
acauauguggauauacaug

SEQ ID NO: 942630 - RNA, 22 nt, Human
cggggacacacuggcagcuccu

SEQ ID NO: 942631 - RNA, 22 nt, Human
ugaggcaggagaaucacaugaa

SEQ ID NO: 942632 - RNA, 22 nt, Human
ucaaacuagccugacugguauu

SEQ ID NO: 942633 - RNA, 22 nt, Human
gagcuuccugaugccgaccagu

SEQ ID NO: 942634 - RNA, 22 nt, Human
gcagcuuggauuucuguaguuu

SEQ ID NO: 942635 - RNA, 22 nt, Human
agagaugaaaaguggagacugg

SEQ ID NO: 942636 - RNA, 22 nt, Human
aaugaugguuucaucacuugaa

SEQ ID NO: 942637 - RNA, 17 nt, Human
cugagcauccgugcucu

SEQ ID NO: 942638 - RNA, 22 nt, Human
cauaauauacuacauugaugaa

SEQ ID NO: 942639 - RNA, 22 nt, Human
ugaagacacauacaagggaaug

SEQ ID NO: 942640 - RNA, 21 nt, Human
augacagaugcugcagaucgu

SEQ ID NO: 942641 - RNA, 18 nt, Human
aggaagcaggaggaaggc

SEQ ID NO: 942642 - RNA, 16 nt, Human
aggccaaaaaggggca

SEQ ID NO: 942643 - RNA, 22 nt, Human
guauuagguuggugcaaaagua

SEQ ID NO: 942644 - RNA, 22 nt, Human
ucuuugaauuucugacugucuu

SEQ ID NO: 942645 - RNA, 22 nt, Human
ugugcccaucccucuggagugu

SEQ ID NO: 942646 - RNA, 22 nt, Human
uaugcauauagaugcacacaca

SEQ ID NO: 942647 - RNA, 22 nt, Human
uuaauuuugaugagguucaguu

SEQ ID NO: 942648 - RNA, 22 nt, Human
ucagaagcugguguccuuugaa

SEQ ID NO: 942649 - RNA, 22 nt, Human
gagauauguuagaaagcuauug

SEQ ID NO: 942650 - RNA, 22 nt, Human
aggggccucgcaggaccgcucc

SEQ ID NO: 942651 - RNA, 22 nt, Human
ucagccugcgucauggugacac

SEQ ID NO: 942652 - RNA, 22 nt, Human
cuguagccaguuuggccucacc

SEQ ID NO: 942653 - RNA, 22 nt, Human
ccagacuguggaguuccuggug

SEQ ID NO: 942654 - RNA, 16 nt, Human
aggaggggaauuagga

SEQ ID NO: 942655 - RNA, 22 nt, Human
uccaggaguggggcagaggucu

SEQ ID NO: 942656 - RNA, 22 nt, Human
ucaguuuucaauuucaucagag

SEQ ID NO: 942657 - RNA, 21 nt, Human
ccugggagaucagcugccuuc

SEQ ID NO: 942658 - RNA, 23 nt, Human
uccaggagaauuccagggcccgg

SEQ ID NO: 942659 - RNA, 22 nt, Human
cuuguucaguccugacuuccug

SEQ ID NO: 942660 - RNA, 22 nt, Human
ccucccacauugaggacaugcu

SEQ ID NO: 942661 - RNA, 22 nt, Human
uuucauuauguuccuggaagag

SEQ ID NO: 942662 - RNA, 22 nt, Human
gugggaugguagguagguaaua

SEQ ID NO: 942663 - RNA, 22 nt, Human
gcagagcuccccaagacaccaa

SEQ ID NO: 942664 - RNA, 22 nt, Human
cuccaggcuucaagggccggcc

SEQ ID NO: 942665 - RNA, 22 nt, Human
ucugucugacaggguaugaacu

SEQ ID NO: 942666 - RNA, 22 nt, Human
ucuugggaaauguuugcgagcu

SEQ ID NO: 942667 - RNA, 22 nt, Human
uugacaaugcacugugcuaagu

SEQ ID NO: 942668 - RNA, 19 nt, Human
aggucuaaucauaagacaa

SEQ ID NO: 942669 - RNA, 22 nt, Human
acuuccugggcaugcagagucc

SEQ ID NO: 942670 - RNA, 22 nt, Human
auuucccagcuuugaucaguuu

SEQ ID NO: 942671 - RNA, 18 nt, Human
uacaugcauaaaugaagc

SEQ ID NO: 942672 - RNA, 22 nt, Human
ucacauuuucauauucucugag

SEQ ID NO: 942673 - RNA, 22 nt, Human
uuuaagauucaguaaggcaaac

SEQ ID NO: 942674 - RNA, 22 nt, Human
cucugcagaggcccaaggcuga

SEQ ID NO: 942675 - RNA, 22 nt, Human
ggagcugaaggggugggcucag

SEQ ID NO: 942676 - RNA, 22 nt, Human
gaauauuuuuaaagggacuaau

SEQ ID NO: 942677 - RNA, 20 nt, Human
acuggagccaucucagccua

SEQ ID NO: 942678 - RNA, 22 nt, Human
gcugccugccuugccuggagga

SEQ ID NO: 942679 - RNA, 22 nt, Human
uaucuauuccaaauaucagcgu

SEQ ID NO: 942680 - RNA, 22 nt, Human
uggcaguguauagguggcuccu

SEQ ID NO: 942681 - RNA, 22 nt, Human
aaggaggaauuucagggugaau

SEQ ID NO: 942682 - RNA, 19 nt, Human
caaggguugggucugucau

SEQ ID NO: 942683 - RNA, 22 nt, Human
gcuggcucuucaguggagauag

SEQ ID NO: 942684 - RNA, 22 nt, Human
gcucucugggugugucuagaua

SEQ ID NO: 942685 - RNA, 22 nt, Human
gccuggcaaggcccuguugacu

SEQ ID NO: 942686 - RNA, 22 nt, Human
gcauuuguguucuuccuagagc

SEQ ID NO: 942687 - RNA, 22 nt, Human
ucauacaucuuguauaucuauc

SEQ ID NO: 942688 - RNA, 22 nt, Human
aggaggcuguggagcacuccau

SEQ ID NO: 942689 - RNA, 22 nt, Human
ccauggccgccgcugcucagga

SEQ ID NO: 942690 - RNA, 22 nt, Human
agcacagaguugcagagagcgu

SEQ ID NO: 942691 - RNA, 22 nt, Human
uauauagaaaagcagauguugg

SEQ ID NO: 942692 - RNA, 22 nt, Human
ucugggagacguguguugucag

SEQ ID NO: 942693 - RNA, 22 nt, Human
aaaauaacuucuacuauuugca

SEQ ID NO: 942694 - RNA, 20 nt, Human
gaggccucagccucagcucc

SEQ ID NO: 942695 - RNA, 22 nt, Human
gccucugcaauuacauugugcc

SEQ ID NO: 942696 - RNA, 22 nt, Human
ccuccuggaaaaauucccuggc

SEQ ID NO: 942697 - RNA, 21 nt, Human
ggacuuacauagguaaggggu

SEQ ID NO: 942698 - RNA, 22 nt, Human
agcugccccaugagaggcaggu

SEQ ID NO: 942699 - RNA, 22 nt, Human
cugcucuguuaauuaaacuuug

SEQ ID NO: 942700 - RNA, 22 nt, Human
ugucucugugacuccuuccgcc

SEQ ID NO: 942701 - RNA, 22 nt, Human
cucagaguggggcucccugagg

SEQ ID NO: 942702 - RNA, 22 nt, Human
ucuguucaucaucuggacacau

SEQ ID NO: 942703 - RNA, 22 nt, Human
cuggagcagguuuaggaguccc

SEQ ID NO: 942704 - RNA, 22 nt, Human
uggcuggcuagugggcaggauu

SEQ ID NO: 942705 - RNA, 20 nt, Human
cacagcuugccuuuuaugac

SEQ ID NO: 942706 - RNA, 22 nt, Human
cagcaggagcagucagacuccu

SEQ ID NO: 942707 - RNA, 22 nt, Human
ucugagggcuugaggggaagua

SEQ ID NO: 942708 - RNA, 22 nt, Human
ggggcagauggaacagagcaca

SEQ ID NO: 942709 - RNA, 22 nt, Human
uugucuguccaggcaccccaag

SEQ ID NO: 942710 - RNA, 22 nt, Human
aaucagucauuagcucugaccu

SEQ ID NO: 942711 - RNA, 22 nt, Human
agggcugcccagugugagagcu

SEQ ID NO: 942712 - RNA, 22 nt, Human
uuuauauagagauuugugcaug

SEQ ID NO: 942713 - RNA, 22 nt, Human
gccugcagugagugcagaaggu

SEQ ID NO: 942714 - RNA, 22 nt, Human
aggcacuguucccaguuauccu

SEQ ID NO: 942715 - RNA, 22 nt, Human
acauacauauguuuaaaugcau

SEQ ID NO: 942716 - RNA, 22 nt, Human
agagccuugaagaucuggaaaa

SEQ ID NO: 942717 - RNA, 22 nt, Human
uccuugaagagugggcggucga

SEQ ID NO: 942718 - RNA, 22 nt, Human
cuugaaagcacuuaguaaauua

SEQ ID NO: 942719 - RNA, 21 nt, Human
gccacguuucagucuucucag

SEQ ID NO: 942720 - RNA, 22 nt, Human
uauauuaaagugcuuugcagug

SEQ ID NO: 942721 - RNA, 22 nt, Human
gcuguucaagacuaggaaauuu

SEQ ID NO: 942722 - RNA, 22 nt, Human
aaggcaguacuuuauguccaua

SEQ ID NO: 942723 - RNA, 22 nt, Human
uggagcagagaugggagcccaa

SEQ ID NO: 942724 - RNA, 22 nt, Human
gcuggccaggugcuuugguucu

SEQ ID NO: 942725 - RNA, 22 nt, Human
cugcuguguuagcagguuuagu

SEQ ID NO: 942726 - RNA, 22 nt, Human
aauuucuaauugaaucucucuu

SEQ ID NO: 942727 - RNA, 22 nt, Human
ugucacauaauuuaucuguagg

SEQ ID NO: 942728 - RNA, 22 nt, Human
agaaaugaagcaggaguuauua

SEQ ID NO: 942729 - RNA, 22 nt, Human
aagccagggauuccugagggag

SEQ ID NO: 942730 - RNA, 22 nt, Human
cagcccugagaaggaggaucuc

SEQ ID NO: 942731 - RNA, 22 nt, Human
ggagccuggucagguuggcucc

SEQ ID NO: 942732 - RNA, 22 nt, Human
agaccaagacuauaaugagagg

SEQ ID NO: 942733 - RNA, 16 nt, Human
aaggagggaagagaau

SEQ ID NO: 942734 - RNA, 22 nt, Human
aaauauuagggagaacagggac

SEQ ID NO: 942735 - RNA, 22 nt, Human
ccuggcagcgccgaagcuggcc

SEQ ID NO: 942736 - RNA, 21 nt, Human
aggcccagcuuuccucuugcu

SEQ ID NO: 942737 - RNA, 22 nt, Human
agcauggggcaaugcaugugcu

SEQ ID NO: 942738 - RNA, 22 nt, Human
ggcuucucgugccgaagcaaga

SEQ ID NO: 942739 - RNA, 22 nt, Human
cuauugaauagcccaaaucauu

SEQ ID NO: 942740 - RNA, 22 nt, Human
uagaacaugugaaaauauagcc

SEQ ID NO: 942741 - RNA, 17 nt, Human
uuucaucugggaccacc

SEQ ID NO: 942742 - RNA, 22 nt, Human
cugcuuuggcagaagucagcua

SEQ ID NO: 942743 - RNA, 22 nt, Human
gcaguggcaccgcuggcucugg

SEQ ID NO: 942744 - RNA, 22 nt, Human
uccuuugacuucuugcagucca

SEQ ID NO: 942745 - RNA, 22 nt, Human
auaucuuuguuuuugccaagau

SEQ ID NO: 942746 - RNA, 22 nt, Human
ggcacugagaacaggcugacuu

SEQ ID NO: 942747 - RNA, 21 nt, Human
uugcaccaugauaaauucaga

SEQ ID NO: 942748 - RNA, 22 nt, Human
acagagcaguucuggagcuggc

SEQ ID NO: 942749 - RNA, 22 nt, Human
accaucaguacuggaugcugac

SEQ ID NO: 942750 - RNA, 22 nt, Human
uucuuucccuuccagcagcucc

SEQ ID NO: 942751 - RNA, 23 nt, Human
ucuuuacauacugaugaguucuc

SEQ ID NO: 942752 - RNA, 22 nt, Human
cagggccaugaggcacaggguc

SEQ ID NO: 942753 - RNA, 22 nt, Human
ugggcagaaaucaguaucagau

SEQ ID NO: 942754 - RNA, 23 nt, Human
uugugggcagauuccauggggag

SEQ ID NO: 942755 - RNA, 22 nt, Human
aaaauugucgaacaguaguaac

SEQ ID NO: 942756 - RNA, 22 nt, Human
uucaagauccagcacaacagug

SEQ ID NO: 942757 - RNA, 22 nt, Human
ucucuucacaugcuugcuccaa

SEQ ID NO: 942758 - RNA, 22 nt, Human
agaggccuaaccaagauguccu

SEQ ID NO: 942759 - RNA, 22 nt, Human
uuuuccuaguaggccuauuaga

SEQ ID NO: 942760 - RNA, 22 nt, Human
ggccuagggaguggccaugccu

SEQ ID NO: 942761 - RNA, 22 nt, Human
cugggccagcaacugcaaugga

SEQ ID NO: 942762 - RNA, 22 nt, Human
cagcagugugcaggugugcugg

SEQ ID NO: 942763 - RNA, 22 nt, Human
agggccuggaacuggagaccac

SEQ ID NO: 942764 - RNA, 22 nt, Human
caggcucccacccuccugcagc

SEQ ID NO: 942765 - RNA, 22 nt, Human
ccuuucucauuuuaagcauuag

SEQ ID NO: 942766 - RNA, 22 nt, Human
agagcugggacuuggacucaau

SEQ ID NO: 942767 - RNA, 23 nt, Human
aguuuuucugcaugguucuguau

SEQ ID NO: 942768 - RNA, 22 nt, Human
aggcucugucaggcggagcagc

SEQ ID NO: 942769 - RNA, 22 nt, Human
gggcuggcucugucuagaaagg

SEQ ID NO: 942770 - RNA, 22 nt, Human
gccaggugggagacagacagca

SEQ ID NO: 942771 - RNA, 22 nt, Human
aaaugcuguguuuuaacauaga

SEQ ID NO: 942772 - RNA, 22 nt, Human
uuugcaaauaccaugaaacuug

SEQ ID NO: 942773 - RNA, 22 nt, Human
uggagcagggcaucacugugcg

SEQ ID NO: 942774 - RNA, 22 nt, Human
gcucaggacuggaggagcgggg

SEQ ID NO: 942775 - RNA, 23 nt, Human
aggagccaggaaccagcuucccc

SEQ ID NO: 942776 - RNA, 22 nt, Human
gucaggauuuacaaacuucagu

SEQ ID NO: 942777 - RNA, 22 nt, Human
ucuccuggcauuugguugagua

SEQ ID NO: 942778 - RNA, 22 nt, Human
uaaguucauaagcuuauucuua

SEQ ID NO: 942779 - RNA, 22 nt, Human
aaagaacaauguggaaucuccu

SEQ ID NO: 942780 - RNA, 22 nt, Human
ccagcucuuuuggcugagugag

SEQ ID NO: 942781 - RNA, 22 nt, Human
auaaggcagaaauagggaaagu

SEQ ID NO: 942782 - RNA, 22 nt, Human
uggcucaggccuacgacgccuu

SEQ ID NO: 942783 - RNA, 22 nt, Human
ucucagagauuuauggaaaacu

SEQ ID NO: 942784 - RNA, 22 nt, Human
auuucuuccucugucaguaacu

SEQ ID NO: 942785 - RNA, 22 nt, Human
gaaaggugccccauaggcagga

SEQ ID NO: 942786 - RNA, 22 nt, Human
gagggcugaugcuuacuuauuu

SEQ ID NO: 942787 - RNA, 22 nt, Human
cuggagcccaggccuggugucu

SEQ ID NO: 942788 - RNA, 22 nt, Human
auauaaaguguuuagaaagcug

SEQ ID NO: 942789 - RNA, 22 nt, Human
ccugagagagaagcgaccuggu

SEQ ID NO: 942790 - RNA, 22 nt, Human
agcccaggaaguugaggcuugc

SEQ ID NO: 942791 - RNA, 22 nt, Human
cuuugaaagcucccaggacuua

SEQ ID NO: 942792 - RNA, 22 nt, Human
uauguguauguacauacauaca

SEQ ID NO: 942793 - RNA, 22 nt, Human
acaggcuuacaggcugcaagua

SEQ ID NO: 942794 - RNA, 22 nt, Human
aguggcaggcggagauguagga

SEQ ID NO: 942795 - RNA, 22 nt, Human
cugcuguguuucacaccucugg

SEQ ID NO: 942796 - RNA, 22 nt, Human
ugggggagccuucacaguagcu

SEQ ID NO: 942797 - RNA, 22 nt, Human
uucauucccuuauauuagcauu

SEQ ID NO: 942798 - RNA, 22 nt, Human
aguuauaugugaaaacacguau

SEQ ID NO: 942799 - RNA, 22 nt, Human
uccagagggcgauggcuggggg

SEQ ID NO: 942800 - RNA, 22 nt, Human
uagaaaugaauguuuaaaaguc

SEQ ID NO: 942801 - RNA, 22 nt, Human
auauugaacccuacagacugua

SEQ ID NO: 942802 - RNA, 20 nt, Human
auguuuuauaaaagaacggg

SEQ ID NO: 942803 - RNA, 22 nt, Human
caaugauucugcaacugugugc

SEQ ID NO: 942804 - RNA, 22 nt, Human
cuguuuuugugcugugucuccc

SEQ ID NO: 942805 - RNA, 22 nt, Human
ucaggcuggaaugcaguggggc

SEQ ID NO: 942806 - RNA, 22 nt, Human
gaggacagugugaucugccagc

SEQ ID NO: 942807 - RNA, 18 nt, Human
uggugaaggguggaggag

SEQ ID NO: 942808 - RNA, 22 nt, Human
ugcuuugggucucucuaguuuc

SEQ ID NO: 942809 - RNA, 18 nt, Human
ucugagggugcgggagcu

SEQ ID NO: 942810 - RNA, 22 nt, Human
ggcuuggaaaugguaaugagcu

SEQ ID NO: 942811 - RNA, 21 nt, Human
cagcuuugucugucuucgggg

SEQ ID NO: 942812 - RNA, 22 nt, Human
caggauggucagaugcauuguc

SEQ ID NO: 942813 - RNA, 23 nt, Human
uggagcugggcucagacccuggg

SEQ ID NO: 942814 - RNA, 22 nt, Human
ucacagcaaaagugugcagagc

SEQ ID NO: 942815 - RNA, 22 nt, Human
gauuucuucauucauuagaugg

SEQ ID NO: 942816 - RNA, 20 nt, Human
aggaagcugagauguagagg

SEQ ID NO: 942817 - RNA, 22 nt, Human
guccucugaaguugugcaaugc

SEQ ID NO: 942818 - RNA, 22 nt, Human
aaaugcacagagccuuagagau

SEQ ID NO: 942819 - RNA, 22 nt, Human
aaucgguugaacccaggaagug

SEQ ID NO: 942820 - RNA, 22 nt, Human
uuaauucuuccggacugugaaa

SEQ ID NO: 942821 - RNA, 21 nt, Human
guauugcagaguuaugugcuc

SEQ ID NO: 942822 - RNA, 22 nt, Human
uaaaguguccuagcuaggaggc

SEQ ID NO: 942823 - RNA, 22 nt, Human
cagcagcuggugagacacagcc

SEQ ID NO: 942824 - RNA, 22 nt, Human
ccccaggagcuuguuuuagaga

SEQ ID NO: 942825 - RNA, 22 nt, Human
aaggcugagggcuguaccuggc

SEQ ID NO: 942826 - RNA, 22 nt, Human
cugggccaaaagaaguguucuu

SEQ ID NO: 942827 - RNA, 16 nt, Human
gccuggaguggcaggg

SEQ ID NO: 942828 - RNA, 22 nt, Human
cugggaggcaccgcgucgugcu

SEQ ID NO: 942829 - RNA, 22 nt, Human
gaggcagaaguugcagugagca

SEQ ID NO: 942830 - RNA, 22 nt, Human
aaccaggacaauuuugaaagua

SEQ ID NO: 942831 - RNA, 22 nt, Human
gaagaacacuucaugauucauu

SEQ ID NO: 942832 - RNA, 22 nt, Human
uggugucugcacucccuggcgu

SEQ ID NO: 942833 - RNA, 22 nt, Human
agggcugagacuaaggccagau

SEQ ID NO: 942834 - RNA, 22 nt, Human
ccuugcugaccaucaccuuuga

SEQ ID NO: 942835 - RNA, 22 nt, Human
acaaaugucuccucuuuuguua

SEQ ID NO: 942836 - RNA, 22 nt, Human
uccucugcuccaggcuggacuu

SEQ ID NO: 942837 - RNA, 22 nt, Human
ugucucugaggugagggucagc

SEQ ID NO: 942838 - RNA, 22 nt, Human
ugggagcccaagggagcugccg

SEQ ID NO: 942839 - RNA, 15 nt, Human
aggcacugugggacc

SEQ ID NO: 942840 - RNA, 22 nt, Human
uuuguuaaaaugcagauucugu

SEQ ID NO: 942841 - RNA, 22 nt, Human
gaguguucccacaccccaguug

SEQ ID NO: 942842 - RNA, 22 nt, Human
ucuguucauuugccucggcucu

SEQ ID NO: 942843 - RNA, 22 nt, Human
cucugggcaggaccaguggacc

SEQ ID NO: 942844 - RNA, 22 nt, Human
agaccuggauuccaauccuacc

SEQ ID NO: 942845 - RNA, 21 nt, Human
cuggccgaccccucugugcuc

SEQ ID NO: 942846 - RNA, 22 nt, Human
ugccugggguuggcaaacugcu

SEQ ID NO: 942847 - RNA, 22 nt, Human
gcaguggcaugaugugggcuca

SEQ ID NO: 942848 - RNA, 22 nt, Human
ggagugacucacagcugggaca

SEQ ID NO: 942849 - RNA, 22 nt, Human
agaggcggagcuugcagugagc

SEQ ID NO: 942850 - RNA, 22 nt, Human
uccugggcuugcuccuccagcu

SEQ ID NO: 942851 - RNA, 22 nt, Human
uaguuauuauuguuacuaucag

SEQ ID NO: 942852 - RNA, 22 nt, Human
gcuccugggcucuaccuugcua

SEQ ID NO: 942853 - RNA, 22 nt, Human
agcagagguuuguuggaaaccu

SEQ ID NO: 942854 - RNA, 22 nt, Human
caggaggggguggaguuucgcc

SEQ ID NO: 942855 - RNA, 22 nt, Human
agggggaggcugugcugcgucu

SEQ ID NO: 942856 - RNA, 22 nt, Human
ccagcucuagccccauguggcu

SEQ ID NO: 942857 - RNA, 20 nt, Human
cagcuuggaugagaggcuga

SEQ ID NO: 942858 - RNA, 22 nt, Human
uacagucaacauugaugaugau

SEQ ID NO: 942859 - RNA, 22 nt, Human
gaagcccacguuuggugaugua

SEQ ID NO: 942860 - RNA, 20 nt, Human
gcugaccccugcugucaugc

SEQ ID NO: 942861 - RNA, 18 nt, Human
gcaggagauggguggggu

SEQ ID NO: 942862 - RNA, 22 nt, Human
gcgucugaguugcgggggcuca

SEQ ID NO: 942863 - RNA, 22 nt, Human
ugcauuguuuagaacucuuugg

SEQ ID NO: 942864 - RNA, 22 nt, Human
gaugcagggcuggcaggagcuu

SEQ ID NO: 942865 - RNA, 23 nt, Human
aaacugcuuccaauuccugccau

SEQ ID NO: 942866 - RNA, 22 nt, Human
ugagccuggguggucgaggcug

SEQ ID NO: 942867 - RNA, 22 nt, Human
gagccugaaauacaggucacug

SEQ ID NO: 942868 - RNA, 22 nt, Human
gcuggccucgcaggcaggaugu

SEQ ID NO: 942869 - RNA, 22 nt, Human
cacagaguggaggcuuggccug

SEQ ID NO: 942870 - RNA, 22 nt, Human
caagauggguguugugaugguu

SEQ ID NO: 942871 - RNA, 20 nt, Human
uguuccaagcuaaugaauga

SEQ ID NO: 942872 - RNA, 21 nt, Human
ucacagacuggucagugaggc

SEQ ID NO: 942873 - RNA, 22 nt, Human
ugcuucaaguugaaauauucuu

SEQ ID NO: 942874 - RNA, 22 nt, Human
ugggcaggauaauaucucaugu

SEQ ID NO: 942875 - RNA, 22 nt, Human
aauauucaaguuauucuuucuu

SEQ ID NO: 942876 - RNA, 22 nt, Human
uggcagcuauuacaaggaaguc

SEQ ID NO: 942877 - RNA, 22 nt, Human
cugccucugcgucccacagagu

SEQ ID NO: 942878 - RNA, 22 nt, Human
cagacccucgggugaguuggcc

SEQ ID NO: 942879 - RNA, 22 nt, Human
acucugggccccagguggagcu

SEQ ID NO: 942880 - RNA, 22 nt, Human
ucuccuggcccugucgccaucu

SEQ ID NO: 942881 - RNA, 22 nt, Human
ccugucuggccuuccacggggg

SEQ ID NO: 942882 - RNA, 23 nt, Human
ggagccuggcauaugagacgcau

SEQ ID NO: 942883 - RNA, 18 nt, Human
agggaucaucacugcagc

SEQ ID NO: 942884 - RNA, 22 nt, Human
uccaggaggugaggggaccaaa

SEQ ID NO: 942885 - RNA, 22 nt, Human
auuauaggcuugagccaccgug

SEQ ID NO: 942886 - RNA, 22 nt, Human
ugucauguguucuuaaauacau

SEQ ID NO: 942887 - RNA, 22 nt, Human
aguaaaaucuuaagcacagugg

SEQ ID NO: 942888 - RNA, 22 nt, Human
gaguuauugaguauagaaugua

SEQ ID NO: 942889 - RNA, 22 nt, Human
acugucuguccugcucuccgug

SEQ ID NO: 942890 - RNA, 22 nt, Human
uuaaagggccgauuuccaggcc

SEQ ID NO: 942891 - RNA, 22 nt, Human
ugugacaugugucaucuuuucu

SEQ ID NO: 942892 - RNA, 22 nt, Human
uacauguaagacaugagacucu

SEQ ID NO: 942893 - RNA, 22 nt, Human
aguaaaauuucugcugaggaga

SEQ ID NO: 942894 - RNA, 22 nt, Human
gcagcuggagcaucuucucauc

SEQ ID NO: 942895 - RNA, 22 nt, Human
uuuauuagugcuuguaucacug

SEQ ID NO: 942896 - RNA, 22 nt, Human
acuuccugcaaucguccacucc

SEQ ID NO: 942897 - RNA, 22 nt, Human
gccuggugaaaggcagagagcg

SEQ ID NO: 942898 - RNA, 22 nt, Human
auuugcuuuaagguauaaaagg

SEQ ID NO: 942899 - RNA, 22 nt, Human
uugcauuuuuagaugcuucugu

SEQ ID NO: 942900 - RNA, 22 nt, Human
ggcugagcucaggggcagcagg

SEQ ID NO: 942901 - RNA, 22 nt, Human
ucuuggccagguguggugccuc

SEQ ID NO: 942902 - RNA, 22 nt, Human
cugaaaugacgguuuggggcaa

SEQ ID NO: 942903 - RNA, 22 nt, Human
gccagccuucuguggccugcaa

SEQ ID NO: 942904 - RNA, 22 nt, Human
ucuuugcacacaucccuucccg

SEQ ID NO: 942905 - RNA, 22 nt, Human
uugagaagaaauaguuugcaau

SEQ ID NO: 942906 - RNA, 21 nt, Human
agaaaaaccagcauguuuuca

SEQ ID NO: 942907 - RNA, 22 nt, Human
ugaggugaccgcagaugggaag

SEQ ID NO: 942908 - RNA, 22 nt, Human
uguagggaggaaggguuggaaa

SEQ ID NO: 942909 - RNA, 22 nt, Human
auuucuguauccugcugucaga

SEQ ID NO: 942910 - RNA, 22 nt, Human
acaggcagcgucauugcugcuc

SEQ ID NO: 942911 - RNA, 22 nt, Human
gccuggcuccuaagagcacaac

SEQ ID NO: 942912 - RNA, 22 nt, Human
cucagucugucuugucuguguu

SEQ ID NO: 942913 - RNA, 21 nt, Human
cgggcuggccgggcccucacc

SEQ ID NO: 942914 - RNA, 22 nt, Human
cugcagccuccugggguacaug

SEQ ID NO: 942915 - RNA, 22 nt, Human
uccuugggaaaucacuagcacu

SEQ ID NO: 942916 - RNA, 22 nt, Human
agcagcagaggucagaaaggua

SEQ ID NO: 942917 - RNA, 22 nt, Human
aagccagccagugccagucuua

SEQ ID NO: 942918 - RNA, 22 nt, Human
ugucaugcagguuuguuauaga

SEQ ID NO: 942919 - RNA, 22 nt, Human
ucacugcagacaaccucaguca

SEQ ID NO: 942920 - RNA, 20 nt, Human
ucuccuggugacaguaccca

SEQ ID NO: 942921 - RNA, 22 nt, Human
ucaggauaaaauguaauggcaa

SEQ ID NO: 942922 - RNA, 22 nt, Human
gaaaucugaacucuguauccuu

SEQ ID NO: 942923 - RNA, 22 nt, Human
uguuuaguaggaguuuaauacu

SEQ ID NO: 942924 - RNA, 19 nt, Human
uugguggugguuuugguuc

SEQ ID NO: 942925 - RNA, 22 nt, Human
acuguucacccagcacuagcag

SEQ ID NO: 942926 - RNA, 22 nt, Human
ugggcugcagagcccggccuuc

SEQ ID NO: 942927 - RNA, 22 nt, Human
agcaggugaugugagucuggaa

SEQ ID NO: 942928 - RNA, 22 nt, Human
uagagcugggcagugcucugag

SEQ ID NO: 942929 - RNA, 22 nt, Human
guaucuuucccaccaaucacaa

SEQ ID NO: 942930 - RNA, 22 nt, Human
aaaugucugagacuucugaacu

SEQ ID NO: 942931 - RNA, 22 nt, Human
gagaggaguaggcugauggugc

SEQ ID NO: 942932 - RNA, 22 nt, Human
aggccuggccugggcggcauug

SEQ ID NO: 942933 - RNA, 22 nt, Human
cccagccuggugcacugugggg

SEQ ID NO: 942934 - RNA, 22 nt, Human
uucuucuuucccccugugguac

SEQ ID NO: 942935 - RNA, 22 nt, Human
uaugaagauauaucugaucucu

SEQ ID NO: 942936 - RNA, 22 nt, Human
caggcagcucaaccuugggagc

SEQ ID NO: 942937 - RNA, 22 nt, Human
uaaguaaauuuauaaugugauu

SEQ ID NO: 942938 - RNA, 22 nt, Human
ugccugaggagucagggcaggu

SEQ ID NO: 942939 - RNA, 21 nt, Human
gcucuuggaaggggcucagcu

SEQ ID NO: 942940 - RNA, 22 nt, Human
uugcaaauuauuuuagucccuu

SEQ ID NO: 942941 - RNA, 22 nt, Human
agcagccauuuaaaaugaauug

SEQ ID NO: 942942 - RNA, 23 nt, Human
aggauccugguacaggagcagag

SEQ ID NO: 942943 - RNA, 22 nt, Human
cugugcaagacuuacuuuaaua

SEQ ID NO: 942944 - RNA, 22 nt, Human
ugucccagcacuuugggagucu

SEQ ID NO: 942945 - RNA, 22 nt, Human
aauaugugagguauguucagug

SEQ ID NO: 942946 - RNA, 22 nt, Human
uucaaaacaaucuguuugcauu

SEQ ID NO: 942947 - RNA, 22 nt, Human
ggcugcaguuugucuuuugcuu

SEQ ID NO: 942948 - RNA, 22 nt, Human
aauguguguucggggcccagag

SEQ ID NO: 942949 - RNA, 22 nt, Human
cauuuguaucauauguaucuua

SEQ ID NO: 942950 - RNA, 22 nt, Human
augaacacauguacacauuucu

SEQ ID NO: 942951 - RNA, 22 nt, Human
cugccugugcaugcagucagaa

SEQ ID NO: 942952 - RNA, 22 nt, Human
ggauggagguucucagaugcuc

SEQ ID NO: 942953 - RNA, 22 nt, Human
gcucccaccuccagccugaguu

SEQ ID NO: 942954 - RNA, 22 nt, Human
cucucuggaccucaacuauuuu

SEQ ID NO: 942955 - RNA, 20 nt, Human
aauuuacucacagaaugaau

SEQ ID NO: 942956 - RNA, 22 nt, Human
cagugguggaaugaggaauugu

SEQ ID NO: 942957 - RNA, 22 nt, Human
gucaugccuggcuucuuagaca

SEQ ID NO: 942958 - RNA, 22 nt, Human
acucagaagauauaaugacuca

SEQ ID NO: 942959 - RNA, 22 nt, Human
gucugcccucacgccagcuggg

SEQ ID NO: 942960 - RNA, 18 nt, Human
uuugcaaaggaaguaugg

SEQ ID NO: 942961 - RNA, 22 nt, Human
agagugaaguuuuugaaaguga

SEQ ID NO: 942962 - RNA, 22 nt, Human
caaggugcagcguugucaagcu

SEQ ID NO: 942963 - RNA, 22 nt, Human
cugaaauuccauuucagccaca

SEQ ID NO: 942964 - RNA, 22 nt, Human
uugauacagcagccugugaucc

SEQ ID NO: 942965 - RNA, 18 nt, Human
ggagagugagaucaaaca

SEQ ID NO: 942966 - RNA, 22 nt, Human
agaaaucaauaucuauauguug

SEQ ID NO: 942967 - RNA, 22 nt, Human
cagaagaaaguggggagacaag

SEQ ID NO: 942968 - RNA, 22 nt, Human
uucucuucaucucaguaaaugu

SEQ ID NO: 942969 - RNA, 22 nt, Human
cugggaaauggcuucgagcuca

SEQ ID NO: 942970 - RNA, 22 nt, Human
uuguuacacauaauaacauuuu

SEQ ID NO: 942971 - RNA, 22 nt, Human
uauuuaaaaagaggccagcugg

SEQ ID NO: 942972 - RNA, 22 nt, Human
cacugcuuuaaggcugaguaac

SEQ ID NO: 942973 - RNA, 22 nt, Human
aaauauuauugcuuaaggggag

SEQ ID NO: 942974 - RNA, 22 nt, Human
aggaggcugguucaggccauau

SEQ ID NO: 942975 - RNA, 22 nt, Human
caggaagagaacauggaggcug

SEQ ID NO: 942976 - RNA, 22 nt, Human
uguggccagcagguggcugugu

SEQ ID NO: 942977 - RNA, 22 nt, Human
gcugugugaaaacugggccugg

SEQ ID NO: 942978 - RNA, 22 nt, Human
auauguguauuugguuagccua

SEQ ID NO: 942979 - RNA, 22 nt, Human
uaacaguguggacuugagaucu

SEQ ID NO: 942980 - RNA, 22 nt, Human
acauuucucagggaguuuugcu

SEQ ID NO: 942981 - RNA, 22 nt, Human
aaagaacaaauuagcuguuuua

SEQ ID NO: 942982 - RNA, 22 nt, Human
caguggcugugaccagggaccu

SEQ ID NO: 942983 - RNA, 22 nt, Human
ucugucacuuauuaagauggau

SEQ ID NO: 942984 - RNA, 19 nt, Human
cuggcagccugucuguguc

SEQ ID NO: 942985 - RNA, 22 nt, Human
caaaugauagagccgauuauca

SEQ ID NO: 942986 - RNA, 23 nt, Human
cccuggaguaaauucuuggaagg

SEQ ID NO: 942987 - RNA, 21 nt, Human
gauuugcagaaacuagacagg

SEQ ID NO: 942988 - RNA, 21 nt, Human
gugguuauuuucauuagcauc

SEQ ID NO: 942989 - RNA, 22 nt, Human
aacauucuauuuugcuaaaaca

SEQ ID NO: 942990 - RNA, 22 nt, Human
agaaaaaucuuggcgcuugucu

SEQ ID NO: 942991 - RNA, 22 nt, Human
agagccaggcaggcaauguuga

SEQ ID NO: 942992 - RNA, 22 nt, Human
ccagugcacagccaggcaggug

SEQ ID NO: 942993 - RNA, 22 nt, Human
ugcugccuuugggaccuggccu

SEQ ID NO: 942994 - RNA, 22 nt, Human
cuggccugagcacagcggcugc

SEQ ID NO: 942995 - RNA, 23 nt, Human
uggcuucugccccauucucucca

SEQ ID NO: 942996 - RNA, 22 nt, Human
ccucaggaaaugaauaaauggc

SEQ ID NO: 942997 - RNA, 22 nt, Human
gcucacagccggcuggcagggg

SEQ ID NO: 942998 - RNA, 22 nt, Human
ucuuguuucuguauauaaugac

SEQ ID NO: 942999 - RNA, 22 nt, Human
ugggaggaaugucacugagcca

SEQ ID NO: 943000 - RNA, 22 nt, Human
cugggcagaauuuuaggauggc

SEQ ID NO: 943001 - RNA, 22 nt, Human
caguaaagcauguaugucuuca

SEQ ID NO: 943002 - RNA, 22 nt, Human
cccaggaaaugggcucuugccu

SEQ ID NO: 943003 - RNA, 22 nt, Human
uucucagaggagucgggagcug

SEQ ID NO: 943004 - RNA, 20 nt, Human
agugacagagacuguguggc

SEQ ID NO: 943005 - RNA, 22 nt, Human
aacauuucauuggaagcuaugu

SEQ ID NO: 943006 - RNA, 22 nt, Human
gagcugucucuauaugaaugcu

SEQ ID NO: 943007 - RNA, 22 nt, Human
ugcugccucagcuuccugggcu

SEQ ID NO: 943008 - RNA, 22 nt, Human
gcacugaaauuauaugcauuug

SEQ ID NO: 943009 - RNA, 22 nt, Human
ggcaguggguuccccaaggcac

SEQ ID NO: 943010 - RNA, 22 nt, Human
ggucucagcuggaguccuuggu

SEQ ID NO: 943011 - RNA, 22 nt, Human
aaauaugugaucagugaauaaa

SEQ ID NO: 943012 - RNA, 22 nt, Human
aaggccuggauuuagguuguga

SEQ ID NO: 943013 - RNA, 22 nt, Human
ccuggcugccgagugugcagcg

SEQ ID NO: 943014 - RNA, 22 nt, Human
uagaucugauacaauucaucug

SEQ ID NO: 943015 - RNA, 22 nt, Human
acugaaggaagcgggcaggggu

SEQ ID NO: 943016 - RNA, 20 nt, Human
guccugggagccacagcaca

SEQ ID NO: 943017 - RNA, 22 nt, Human
acauuguagacuuuucauaugu

SEQ ID NO: 943018 - RNA, 22 nt, Human
caggagauguaagacuucuguu

SEQ ID NO: 943019 - RNA, 22 nt, Human
cugccucuauaggaguccacca

SEQ ID NO: 943020 - RNA, 20 nt, Human
aggcagcugggaaaugaggg

SEQ ID NO: 943021 - RNA, 22 nt, Human
uuggcagugucacuagggagcc

SEQ ID NO: 943022 - RNA, 22 nt, Human
aagacugugucuauggcuacuc

SEQ ID NO: 943023 - RNA, 22 nt, Human
gcuggugagcaaaggagaagga

SEQ ID NO: 943024 - RNA, 22 nt, Human
cagcucucuaaggucuugcuuu

SEQ ID NO: 943025 - RNA, 22 nt, Human
cggggcugcucguccuccugug

SEQ ID NO: 943026 - RNA, 22 nt, Human
caggaaauaucuccuggcagag

SEQ ID NO: 943027 - RNA, 22 nt, Human
ucucacucauuuccuaggucuu

SEQ ID NO: 943028 - RNA, 22 nt, Human
cugggagaggaaccucgagggu

SEQ ID NO: 943029 - RNA, 22 nt, Human
uaaaugugcacagguuagaagg

SEQ ID NO: 943030 - RNA, 22 nt, Human
agugggaggcggcugacgggcg

SEQ ID NO: 943031 - RNA, 22 nt, Human
cagacaggguccuguccgucac

SEQ ID NO: 943032 - RNA, 17 nt, Human
agcagcuggguugaucu

SEQ ID NO: 943033 - RNA, 22 nt, Human
auaaaugauucagcaggaaaua

SEQ ID NO: 943034 - RNA, 22 nt, Human
agucuuaugugauuuaucuuuc

SEQ ID NO: 943035 - RNA, 21 nt, Human
agagaagaggacuuucucaca

SEQ ID NO: 943036 - RNA, 22 nt, Human
gaggagagccugcacuuugacc

SEQ ID NO: 943037 - RNA, 17 nt, Human
uucucuuccuggauagu

SEQ ID NO: 943038 - RNA, 22 nt, Human
uggcuucugggacuugugagca

SEQ ID NO: 943039 - RNA, 22 nt, Human
uuggcaguaaaagaaaaugcuu

SEQ ID NO: 943040 - RNA, 22 nt, Human
gaagcagccacggggagacaga

SEQ ID NO: 943041 - RNA, 22 nt, Human
aagagggcugcaaucuuauugc

SEQ ID NO: 943042 - RNA, 22 nt, Human
gaggagcugggucagggagaca

SEQ ID NO: 943043 - RNA, 22 nt, Human
ugaaaugaucaguuugguuacu

SEQ ID NO: 943044 - RNA, 22 nt, Human
accaggagacaugaccaaugag

SEQ ID NO: 943045 - RNA, 22 nt, Human
gggcagcugccaagugcaucgc

SEQ ID NO: 943046 - RNA, 22 nt, Human
cuucagaacuauaaaaaguacu

SEQ ID NO: 943047 - RNA, 21 nt, Human
gaacauuuggguuguuucuac

SEQ ID NO: 943048 - RNA, 22 nt, Human
uaacaucuuuagcagcucgaac

SEQ ID NO: 943049 - RNA, 22 nt, Human
cagagcagcagagcuuccaugg

SEQ ID NO: 943050 - RNA, 22 nt, Human
aucaguuucugugaagaacaca

SEQ ID NO: 943051 - RNA, 22 nt, Human
ggcacagagcccagcuuccuag

SEQ ID NO: 943052 - RNA, 22 nt, Human
uuugacaggacuaacauauggc

SEQ ID NO: 943053 - RNA, 22 nt, Human
aggcugccucgugagcucgcug

SEQ ID NO: 943054 - RNA, 22 nt, Human
cuccuggcucgcccccagcuga

SEQ ID NO: 943055 - RNA, 22 nt, Human
agagcagaggcauggccguggg

SEQ ID NO: 943056 - RNA, 22 nt, Human
cugggugguucuaacuguugau

SEQ ID NO: 943057 - RNA, 22 nt, Human
gcucuccacugaccacggggca

SEQ ID NO: 943058 - RNA, 22 nt, Human
agaaaguucugugaguuguuca

SEQ ID NO: 943059 - RNA, 20 nt, Human
ugcagagcuggcuggcuccu

SEQ ID NO: 943060 - RNA, 22 nt, Human
aagcagcuuuugaagagugagg

SEQ ID NO: 943061 - RNA, 18 nt, Human
aauuuccauaugaauugc

SEQ ID NO: 943062 - RNA, 22 nt, Human
aggcagugcucaagacagcagc

SEQ ID NO: 943063 - RNA, 22 nt, Human
ucucugauguauaucagagaac

SEQ ID NO: 943064 - RNA, 22 nt, Human
agcagaaccacagcacuguuga

SEQ ID NO: 943065 - RNA, 20 nt, Human
aucaggauucuugcuuuguu

SEQ ID NO: 943066 - RNA, 22 nt, Human
ccacagagcauuagauuucaga

SEQ ID NO: 943067 - RNA, 22 nt, Human
uguggccuugcagccuggaggu

SEQ ID NO: 943068 - RNA, 22 nt, Human
gacuucuauuaauaccucuacu

SEQ ID NO: 943069 - RNA, 22 nt, Human
gcucuggcuacuguggcuaccg

SEQ ID NO: 943070 - RNA, 22 nt, Human
gaggaaagcugguuuaaaguau

SEQ ID NO: 943071 - RNA, 22 nt, Human
aggggcucaguuacuuuggcag

SEQ ID NO: 943072 - RNA, 22 nt, Human
gugaagauaaggaugcugcagu

SEQ ID NO: 943073 - RNA, 21 nt, Human
uggcucugagccucauggcug

SEQ ID NO: 943074 - RNA, 22 nt, Human
agucccagcucugccacuuacu

SEQ ID NO: 943075 - RNA, 22 nt, Human
ccauuguaaauucuguggaagu

SEQ ID NO: 943076 - RNA, 21 nt, Human
uguucacauggagcagaaugu

SEQ ID NO: 943077 - RNA, 22 nt, Human
gauuuggccuuucgcaugguau

SEQ ID NO: 943078 - RNA, 22 nt, Human
cacccacccacugcucauuggc

SEQ ID NO: 943079 - RNA, 22 nt, Human
cccacucccugcacgccugccg

SEQ ID NO: 943080 - RNA, 22 nt, Human
cgcagcagccccgugguaggug

SEQ ID NO: 943081 - RNA, 22 nt, Human
cuuccucccggcccaugcucug

SEQ ID NO: 943082 - RNA, 22 nt, Human
ucugggaguggguccaaggaau

SEQ ID NO: 943083 - RNA, 22 nt, Human
aaggcagccagauccuuugggu

SEQ ID NO: 943084 - RNA, 22 nt, Human
aggcagguccccuggaaggcac

SEQ ID NO: 943085 - RNA, 22 nt, Human
cuucuugcugggggccucagug

SEQ ID NO: 943086 - RNA, 22 nt, Human
uuaauaaacaggugcagcugaa

SEQ ID NO: 943087 - RNA, 17 nt, Human
gcagcagagagacccuc

SEQ ID NO: 943088 - RNA, 22 nt, Human
uaugcacagaaguuugcugaau

SEQ ID NO: 943089 - RNA, 22 nt, Human
aaagccauugaacuguacuuua

SEQ ID NO: 943090 - RNA, 22 nt, Human
aaggcagccauagcaccaucca

SEQ ID NO: 943091 - RNA, 22 nt, Human
accucccagcucugagcuuggg

SEQ ID NO: 943092 - RNA, 22 nt, Human
ucuucaaaugcuaguaauauca

SEQ ID NO: 943093 - RNA, 22 nt, Human
ccugugucuuccccacuggugu

SEQ ID NO: 943094 - RNA, 22 nt, Human
agaaguuguagguuugcauauu

SEQ ID NO: 943095 - RNA, 22 nt, Human
gcagcugcagagaccggguggg

SEQ ID NO: 943096 - RNA, 22 nt, Human
uggcccugacuuggaggccuga

SEQ ID NO: 943097 - RNA, 22 nt, Human
gaggaugugucuggucugggca

SEQ ID NO: 943098 - RNA, 22 nt, Human
cacuggcaugugaggcgguggc

SEQ ID NO: 943099 - RNA, 22 nt, Human
gagcuuaggccagggacaggga

SEQ ID NO: 943100 - RNA, 22 nt, Human
agggcacaucugcugggaaugg

SEQ ID NO: 943101 - RNA, 22 nt, Human
ccuccuggcccugggccuggaa

SEQ ID NO: 943102 - RNA, 22 nt, Human
aaaugcagaucccugaaucuca

SEQ ID NO: 943103 - RNA, 22 nt, Human
aaugcucaaaauguuucaucua

SEQ ID NO: 943104 - RNA, 22 nt, Human
cccaggaggacauuccauaccc

SEQ ID NO: 943105 - RNA, 22 nt, Human
uuaaaguucauuaaaugagcca

SEQ ID NO: 943106 - RNA, 23 nt, Human
agaugaggcuucuccauguuggu

SEQ ID NO: 943107 - RNA, 22 nt, Human
uggcaacaugucgaagugcugu

SEQ ID NO: 943108 - RNA, 22 nt, Human
aagaggucauaccagauaaggg

SEQ ID NO: 943109 - RNA, 22 nt, Human
agcagcucuggcacuguagcau

SEQ ID NO: 943110 - RNA, 22 nt, Human
ggcacucagagauucaggcugu

SEQ ID NO: 943111 - RNA, 22 nt, Human
caauguguuugcauauuaaaau

SEQ ID NO: 943112 - RNA, 22 nt, Human
ccuccaggcugaauaucuagaa

SEQ ID NO: 943113 - RNA, 22 nt, Human
aucagcaaucaaauugcagagu

SEQ ID NO: 943114 - RNA, 22 nt, Human
agagcugcaauuucauguggug

SEQ ID NO: 943115 - RNA, 20 nt, Human
ugcuggggacauacagggug

SEQ ID NO: 943116 - RNA, 22 nt, Human
uguacaugugucuguauaucuu

SEQ ID NO: 943117 - RNA, 23 nt, Human
uggcuggcagaaacugaagcaug

SEQ ID NO: 943118 - RNA, 17 nt, Human
uggcucugaggcugaau

SEQ ID NO: 943119 - RNA, 22 nt, Human
cugcuuugggcagcuuuguggc

SEQ ID NO: 943120 - RNA, 21 nt, Human
aggugggagaccauguagguc

SEQ ID NO: 943121 - RNA, 22 nt, Human
uuaacagacauauauauuugua

SEQ ID NO: 943122 - RNA, 19 nt, Human
ccucugcuccaguuuccuu

SEQ ID NO: 943123 - RNA, 22 nt, Human
uaggagaggugaauggcacacu

SEQ ID NO: 943124 - RNA, 22 nt, Human
cugcagccuaggugcagcuggg

SEQ ID NO: 943125 - RNA, 22 nt, Human
uggccugccugggagcagcagg

SEQ ID NO: 943126 - RNA, 17 nt, Human
guuugcaugguguuaac

SEQ ID NO: 943127 - RNA, 22 nt, Human
uccaggagagguguggggacug

SEQ ID NO: 943128 - RNA, 21 nt, Human
uucuucuuggacuguuuuggc

SEQ ID NO: 943129 - RNA, 22 nt, Human
uuugcauuaguuuagauuucaa

SEQ ID NO: 943130 - RNA, 22 nt, Human
uauaucauggagauuaacauuc

SEQ ID NO: 943131 - RNA, 22 nt, Human
ucaaaugcucuuugcagagagg

SEQ ID NO: 943132 - RNA, 22 nt, Human
ggcuggucacaccacugcaggg

SEQ ID NO: 943133 - RNA, 22 nt, Human
auuauguagcuaaaaauugugu

SEQ ID NO: 943134 - RNA, 22 nt, Human
gaggggcucuuuaauaguaaca

SEQ ID NO: 943135 - RNA, 22 nt, Human
uuggcugaagguuaagugcugg

SEQ ID NO: 943136 - RNA, 18 nt, Human
gggaucaggcugccuagg

SEQ ID NO: 943137 - RNA, 22 nt, Human
auuguauaacagcauguauuuu

SEQ ID NO: 943138 - RNA, 23 nt, Human
uccagcagccaagaaggguagaa

SEQ ID NO: 943139 - RNA, 22 nt, Human
uagaaaugcccagauucugcua

SEQ ID NO: 943140 - RNA, 22 nt, Human
ucuguggcacgauugcacugca

SEQ ID NO: 943141 - RNA, 22 nt, Human
aaaccuauuggcaagaauaaua

SEQ ID NO: 943142 - RNA, 18 nt, Human
gugcugugggcaguggcc

SEQ ID NO: 943143 - RNA, 22 nt, Human
uggcucaggggucuggcucugu

SEQ ID NO: 943144 - RNA, 22 nt, Human
uacagccucacauuuacuuaca

SEQ ID NO: 943145 - RNA, 22 nt, Human
ucugucacuuuuauuuacugaa

SEQ ID NO: 943146 - RNA, 19 nt, Human
uaaaaugucuguggucagu

SEQ ID NO: 943147 - RNA, 22 nt, Human
ucucagggcagcaaggaagcau

SEQ ID NO: 943148 - RNA, 22 nt, Human
augugucugugggcacacacac

SEQ ID NO: 943149 - RNA, 22 nt, Human
gcuggugccuuguuguuguuac

SEQ ID NO: 943150 - RNA, 22 nt, Human
guggcugguuuccugcaugcaa

SEQ ID NO: 943151 - RNA, 22 nt, Human
ucuggagcaacagagcaggaca

SEQ ID NO: 943152 - RNA, 22 nt, Human
uuugaaaggaauuaggaugaca

SEQ ID NO: 943153 - RNA, 22 nt, Human
gagagugagauccuccugggga

SEQ ID NO: 943154 - RNA, 22 nt, Human
gagggcugcaaugagacagaga

SEQ ID NO: 943155 - RNA, 22 nt, Human
agauacauuguucuaagcauug

SEQ ID NO: 943156 - RNA, 22 nt, Human
aggcugcucaguagauggagcu

SEQ ID NO: 943157 - RNA, 22 nt, Human
aaggcagagggcuggaucagag

SEQ ID NO: 943158 - RNA, 22 nt, Human
gcagagccgugaauggauuuca

SEQ ID NO: 943159 - RNA, 18 nt, Human
ucucuuuuccccucauug

SEQ ID NO: 943160 - RNA, 22 nt, Human
ucugcucagugcuuaucucuaa

SEQ ID NO: 943161 - RNA, 20 nt, Human
cuucuucauuaacccuacug

SEQ ID NO: 943162 - RNA, 22 nt, Human
ugcccaaguguuuggcugaguc

SEQ ID NO: 943163 - RNA, 20 nt, Human
ucuccuggucugguccgugc

SEQ ID NO: 943164 - RNA, 22 nt, Human
aggagccaagcagaacuaagga

SEQ ID NO: 943165 - RNA, 22 nt, Human
auuuuuccaugauacuuaucug

SEQ ID NO: 943166 - RNA, 22 nt, Human
uguccucuuccagugcuccuuc

SEQ ID NO: 943167 - RNA, 22 nt, Human
ugggggcauggaccagccuggc

SEQ ID NO: 943168 - RNA, 22 nt, Human
uaaagucaucuuuacaucuuug

SEQ ID NO: 943169 - RNA, 22 nt, Human
agacucaagcagauaggaauua

SEQ ID NO: 943170 - RNA, 22 nt, Human
uaaaucagccuuugcuauuuua

SEQ ID NO: 943171 - RNA, 22 nt, Human
cugccuggaaugccagcuucuc

SEQ ID NO: 943172 - RNA, 22 nt, Human
cugugucuucugcuuacagucu

SEQ ID NO: 943173 - RNA, 22 nt, Human
agcuuguuagaaauguagacuc

SEQ ID NO: 943174 - RNA, 22 nt, Human
acauguuagaaaugcagaaucu

SEQ ID NO: 943175 - RNA, 22 nt, Human
auauuucuccaaauguuuucaa

SEQ ID NO: 943176 - RNA, 22 nt, Human
ccuguucaagggaugauugacc

SEQ ID NO: 943177 - RNA, 22 nt, Human
uccuucaguuaucacaguacug

SEQ ID NO: 943178 - RNA, 18 nt, Human
agcuggcccuggcugccg

SEQ ID NO: 943179 - RNA, 22 nt, Human
uguauuuuuaggaaugcgcuau

SEQ ID NO: 943180 - RNA, 22 nt, Human
acucugccuuucagcagaugaa

SEQ ID NO: 943181 - RNA, 22 nt, Human
acuugcugguggcauuuacagu

SEQ ID NO: 943182 - RNA, 22 nt, Human
agggcagagcugucuaaauggc

SEQ ID NO: 943183 - RNA, 22 nt, Human
cagcugaggucaaagaagcagg

SEQ ID NO: 943184 - RNA, 22 nt, Human
agacuuugagcucuuagagaag

SEQ ID NO: 943185 - RNA, 22 nt, Human
ucacgagaggcacagaauagag

SEQ ID NO: 943186 - RNA, 20 nt, Human
ccucucugaagaggucaucu

SEQ ID NO: 943187 - RNA, 22 nt, Human
ugguggccuugauggcaucugc

SEQ ID NO: 943188 - RNA, 22 nt, Human
cugggagcggcugucacugguu

SEQ ID NO: 943189 - RNA, 22 nt, Human
gaaaucugcuucuugcauagua

SEQ ID NO: 943190 - RNA, 15 nt, Human
uggcagcuuguuaag

SEQ ID NO: 943191 - RNA, 19 nt, Human
ugucucugaaagaugagcu

SEQ ID NO: 943192 - RNA, 22 nt, Human
ggagccuggcaaugcugcgucc

SEQ ID NO: 943193 - RNA, 17 nt, Human
agaacuguaguagcucc

SEQ ID NO: 943194 - RNA, 22 nt, Human
cucagagaagucuuugcuaaac

SEQ ID NO: 943195 - RNA, 22 nt, Human
cuuauuagaguuguguucuguu

SEQ ID NO: 943196 - RNA, 22 nt, Human
caggcugggaacgccacccgcu

SEQ ID NO: 943197 - RNA, 22 nt, Human
ggcuucaccaggugcaugcaug

SEQ ID NO: 943198 - RNA, 22 nt, Human
ucaggcugaggucaucugcauc

SEQ ID NO: 943199 - RNA, 22 nt, Human
ccaggguggcguagaugcuggg

SEQ ID NO: 943200 - RNA, 22 nt, Human
aauuucagagguagagauucua

SEQ ID NO: 943201 - RNA, 22 nt, Human
cccaggaguuugaguucagcau

SEQ ID NO: 943202 - RNA, 22 nt, Human
ugggcugcuguuacaggggcug

SEQ ID NO: 943203 - RNA, 22 nt, Human
auucugucuuuuuaaaauaaua

SEQ ID NO: 943204 - RNA, 22 nt, Human
acuggcucagaguuccuagaga

SEQ ID NO: 943205 - RNA, 22 nt, Human
acagugucaugucguguucccc

SEQ ID NO: 943206 - RNA, 22 nt, Human
gaucuguuauaaucucuuuuau

SEQ ID NO: 943207 - RNA, 22 nt, Human
agccucucuccagcuuggcaga

SEQ ID NO: 943208 - RNA, 22 nt, Human
gggguugguuuaaaugcuugag

SEQ ID NO: 943209 - RNA, 22 nt, Human
agcaccugcuaugugucaggga

SEQ ID NO: 943210 - RNA, 22 nt, Human
uugugugguagcuucauugaac

SEQ ID NO: 943211 - RNA, 22 nt, Human
cucaggauggaagccuacagga

SEQ ID NO: 943212 - RNA, 22 nt, Human
aggacccagaggcagaggacgu

SEQ ID NO: 943213 - RNA, 22 nt, Human
uggcuuccaaaggaaugggccu

SEQ ID NO: 943214 - RNA, 23 nt, Human
gggcagcuuaagcuuguuuuucu

SEQ ID NO: 943215 - RNA, 22 nt, Human
gaggcaguguuuacugcccugu

SEQ ID NO: 943216 - RNA, 22 nt, Human
gcaggaagcauagaagaaugcc

SEQ ID NO: 943217 - RNA, 22 nt, Human
agcaggaguuugaugcuuuuau

SEQ ID NO: 943218 - RNA, 22 nt, Human
cugcaggcugagcgccugccgg

SEQ ID NO: 943219 - RNA, 22 nt, Human
agagcagcacguuguccccaca

SEQ ID NO: 943220 - RNA, 22 nt, Human
ugggcagcuuccacuuaguuag

SEQ ID NO: 943221 - RNA, 23 nt, Human
acagacaacacugaugagagaaa

SEQ ID NO: 943222 - RNA, 22 nt, Human
aggcucaggcaggaauggcgga

SEQ ID NO: 943223 - RNA, 22 nt, Human
uuuuauauugagugagaguucc

SEQ ID NO: 943224 - RNA, 22 nt, Human
cacuguguaagaagaugggcuu

SEQ ID NO: 943225 - RNA, 22 nt, Human
guggccuggaguuugauguagg

SEQ ID NO: 943226 - RNA, 22 nt, Human
caggaggcuccuagggcucugu

SEQ ID NO: 943227 - RNA, 22 nt, Human
uuucagaaagcugaacauauga

SEQ ID NO: 943228 - RNA, 22 nt, Human
caagagcauuuaguuagcuggu

SEQ ID NO: 943229 - RNA, 22 nt, Human
gaggagcugggcugagaggguc

SEQ ID NO: 943230 - RNA, 22 nt, Human
aucuggcucaccuggguaaaua

SEQ ID NO: 943231 - RNA, 22 nt, Human
uaacagaaauauuuccagguga

SEQ ID NO: 943232 - RNA, 22 nt, Human
uaacagaaaagaacugaguuug

SEQ ID NO: 943233 - RNA, 22 nt, Human
uacaaaguuuucuuggauugag

SEQ ID NO: 943234 - RNA, 22 nt, Human
gccuucugcgcucgugucuccg

SEQ ID NO: 943235 - RNA, 22 nt, Human
aagucacagcuaaauagcuaag

SEQ ID NO: 943236 - RNA, 22 nt, Human
aauacauauggaauuccauguu

SEQ ID NO: 943237 - RNA, 22 nt, Human
agaaaguucacugguauauuuu

SEQ ID NO: 943238 - RNA, 22 nt, Human
uccauuuucuugcucuagguaa

SEQ ID NO: 943239 - RNA, 22 nt, Human
ugcagggcuuccucuuggaguu

SEQ ID NO: 943240 - RNA, 22 nt, Human
ucagaggucccuagcaggagug

SEQ ID NO: 943241 - RNA, 22 nt, Human
caagggcucacggucugcuggg

SEQ ID NO: 943242 - RNA, 22 nt, Human
ucccagagcagaugugcuaaag

SEQ ID NO: 943243 - RNA, 22 nt, Human
ugcuuucaaaggcuuucuagau

SEQ ID NO: 943244 - RNA, 22 nt, Human
aguguugucaaacggcucagca

SEQ ID NO: 943245 - RNA, 22 nt, Human
cuacauuuuaauaagcugcuua

SEQ ID NO: 943246 - RNA, 22 nt, Human
ugagagaugaaguuaguuguuc

SEQ ID NO: 943247 - RNA, 22 nt, Human
ucugccuucgcugcucccugaa

SEQ ID NO: 943248 - RNA, 22 nt, Human
ucacucuguuuuacucacuguu

SEQ ID NO: 943249 - RNA, 19 nt, Human
agaggcagucuccaacagg

SEQ ID NO: 943250 - RNA, 22 nt, Human
ucugcaggcuuggaguggcagc

SEQ ID NO: 943251 - RNA, 22 nt, Human
ugacuucaaaggcucuacuccu

SEQ ID NO: 943252 - RNA, 22 nt, Human
cagggcuggauccuccagacuc

SEQ ID NO: 943253 - RNA, 22 nt, Human
cccagcauccucagggagcggg

SEQ ID NO: 943254 - RNA, 22 nt, Human
ggcucaggggccaggccugucc

SEQ ID NO: 943255 - RNA, 22 nt, Human
ggcaguggcuccucucuacucc

SEQ ID NO: 943256 - RNA, 22 nt, Human
ucuggcaggcaaucggcucugg

SEQ ID NO: 943257 - RNA, 22 nt, Human
auuuaagacugacuucaccagu

SEQ ID NO: 943258 - RNA, 22 nt, Human
ccacagagacagagcccagggu

SEQ ID NO: 943259 - RNA, 22 nt, Human
guaacagaggguuugcagauau

SEQ ID NO: 943260 - RNA, 20 nt, Human
gggcaguucaaugccacucu

SEQ ID NO: 943261 - RNA, 22 nt, Human
cagcuacuccucccaugacuuc

SEQ ID NO: 943262 - RNA, 22 nt, Human
ugccagggcugcuacuggcuga

SEQ ID NO: 943263 - RNA, 22 nt, Human
gugccugguuuggggaauguuc

SEQ ID NO: 943264 - RNA, 22 nt, Human
agcaacagcccugagguucaug

SEQ ID NO: 943265 - RNA, 22 nt, Human
ucagggcauggcugcacuuggc

SEQ ID NO: 943266 - RNA, 22 nt, Human
cuaugaaaggauuuggaguugu

SEQ ID NO: 943267 - RNA, 22 nt, Human
aagauuuccuggauguaauucc

SEQ ID NO: 943268 - RNA, 22 nt, Human
aagaguuuucuauaaucuuggc

SEQ ID NO: 943269 - RNA, 22 nt, Human
cgcuggccauagccuccugugu

SEQ ID NO: 943270 - RNA, 18 nt, Human
uggagccagcucuaggau

SEQ ID NO: 943271 - RNA, 22 nt, Human
agcagagccugggcuaggggug

SEQ ID NO: 943272 - RNA, 22 nt, Human
ccuggccagcuaauugcccauc

SEQ ID NO: 943273 - RNA, 22 nt, Human
auaucuuuguaugguucagcag

SEQ ID NO: 943274 - RNA, 22 nt, Human
ugaaaaggagccuuagguaggu

SEQ ID NO: 943275 - RNA, 22 nt, Human
cugcugcugagagcucagccug

SEQ ID NO: 943276 - RNA, 22 nt, Human
caaaucuauauguugauauucu

SEQ ID NO: 943277 - RNA, 22 nt, Human
gccagccugugggggcucugug

SEQ ID NO: 943278 - RNA, 22 nt, Human
cagcagcccacgcgugcugucc

SEQ ID NO: 943279 - RNA, 22 nt, Human
agaggccaugcuagaggccugg

SEQ ID NO: 943280 - RNA, 22 nt, Human
agccaggacguugcucagcucc

SEQ ID NO: 943281 - RNA, 22 nt, Human
agcccaggagguggagguugca

SEQ ID NO: 943282 - RNA, 22 nt, Human
uugucugucccagcuugugcau

SEQ ID NO: 943283 - RNA, 22 nt, Human
auucaaguucuucugucuuugc

SEQ ID NO: 943284 - RNA, 22 nt, Human
ggcacgugccuaaggagcaggc

SEQ ID NO: 943285 - RNA, 22 nt, Human
gccugcagaggugcugcuagcu

SEQ ID NO: 943286 - RNA, 19 nt, Human
aauacaguguuauagaauu

SEQ ID NO: 943287 - RNA, 22 nt, Human
acacaguaugaaaagucuaguu

SEQ ID NO: 943288 - RNA, 17 nt, Human
cacaggugugguuugag

SEQ ID NO: 943289 - RNA, 22 nt, Human
acagaaauugggcaaauggaag

SEQ ID NO: 943290 - RNA, 22 nt, Human
aguccagaccccggcagcuggu

SEQ ID NO: 943291 - RNA, 19 nt, Human
agggcugcucuggccuggg

SEQ ID NO: 943292 - RNA, 22 nt, Human
uggcagcuuccugcucauagga

SEQ ID NO: 943293 - RNA, 22 nt, Human
uggguagaggaauugggcuacc

SEQ ID NO: 943294 - RNA, 22 nt, Human
gagcucccuggagguucagaua

SEQ ID NO: 943295 - RNA, 22 nt, Human
ggccucugggguccugagccca

SEQ ID NO: 943296 - RNA, 22 nt, Human
ucuucucucauguaggagggaa

SEQ ID NO: 943297 - RNA, 22 nt, Human
aagccaggaagagagccuucac

SEQ ID NO: 943298 - RNA, 22 nt, Human
cccaggagauaacguucccaag

SEQ ID NO: 943299 - RNA, 22 nt, Human
guuacacaggaaaacauuagca

SEQ ID NO: 943300 - RNA, 22 nt, Human
aucucagggcuggagcccugga

SEQ ID NO: 943301 - RNA, 22 nt, Human
ccucucauagucuguauccuuu

SEQ ID NO: 943302 - RNA, 22 nt, Human
gaugcacagugacccugccagu

SEQ ID NO: 943303 - RNA, 22 nt, Human
uucuuaaagaggcaaaacacag

SEQ ID NO: 943304 - RNA, 22 nt, Human
ccccaggacacauggaccaagu

SEQ ID NO: 943305 - RNA, 22 nt, Human
accagagaaaacacagcaggcu

SEQ ID NO: 943306 - RNA, 22 nt, Human
cucacugugaccucagcagaca

SEQ ID NO: 943307 - RNA, 22 nt, Human
uccaggaggcagggcugugccc

SEQ ID NO: 943308 - RNA, 22 nt, Human
gaaaugugggucaugacccauu

SEQ ID NO: 943309 - RNA, 22 nt, Human
uucucauguaaaugccaucauc

SEQ ID NO: 943310 - RNA, 22 nt, Human
cuauguuuaucuguauuucugu

SEQ ID NO: 943311 - RNA, 22 nt, Human
uuuauuuauccuucuggauugc

SEQ ID NO: 943312 - RNA, 22 nt, Human
accuuuuuucagaacucuaaag

SEQ ID NO: 943313 - RNA, 17 nt, Human
ccuguguuugcuccuuc

SEQ ID NO: 943314 - RNA, 22 nt, Human
caguggguaggaaaggcucuuc

SEQ ID NO: 943315 - RNA, 22 nt, Human
gcaggagccacuucagggaugc

SEQ ID NO: 943316 - RNA, 22 nt, Human
uucuuaagcguaugauaaugaa

SEQ ID NO: 943317 - RNA, 21 nt, Human
guggcucugccaggacugaaa

SEQ ID NO: 943318 - RNA, 22 nt, Human
agggcagauggaacuuccccga

SEQ ID NO: 943319 - RNA, 22 nt, Human
acccaggccugagagacaggag

SEQ ID NO: 943320 - RNA, 22 nt, Human
auggccaacugaaaugaaagau

SEQ ID NO: 943321 - RNA, 22 nt, Human
ugagccagaggaggcugugugg

SEQ ID NO: 943322 - RNA, 20 nt, Human
cugcuguguuauuguagaac

SEQ ID NO: 943323 - RNA, 22 nt, Human
cagagccagcccacuguucccg

SEQ ID NO: 943324 - RNA, 22 nt, Human
aggcagcuuucuggugcaccau

SEQ ID NO: 943325 - RNA, 20 nt, Human
gagacagcaaaagccucucc

SEQ ID NO: 943326 - RNA, 19 nt, Human
uguguguuuauauauguau

SEQ ID NO: 943327 - RNA, 22 nt, Human
ccuggagcacucucccuggcug

SEQ ID NO: 943328 - RNA, 22 nt, Human
aagggcugaaugaaggguugaa

SEQ ID NO: 943329 - RNA, 17 nt, Human
ccucacagggaccagac

SEQ ID NO: 943330 - RNA, 22 nt, Human
auuguuaugaaaauaagauguu

SEQ ID NO: 943331 - RNA, 22 nt, Human
uugucugaaagaucauuacauu

SEQ ID NO: 943332 - RNA, 22 nt, Human
cagaccagcucuaugaacccaa

SEQ ID NO: 943333 - RNA, 22 nt, Human
ccugggugucaugggcagcugg

SEQ ID NO: 943334 - RNA, 22 nt, Human
gcacagaacagagaaauagcca

SEQ ID NO: 943335 - RNA, 22 nt, Human
ucugaggcuauguucaggcuaa

SEQ ID NO: 943336 - RNA, 22 nt, Human
ugcugccaagcccgugcuccug

SEQ ID NO: 943337 - RNA, 22 nt, Human
ggagugacucucggggccacua

SEQ ID NO: 943338 - RNA, 22 nt, Human
ucugcugucacucauuugcuuc

SEQ ID NO: 943339 - RNA, 22 nt, Human
uuagauaauguuauuguaauuu

SEQ ID NO: 943340 - RNA, 22 nt, Human
cggagaggugggggcagcaucu

SEQ ID NO: 943341 - RNA, 19 nt, Human
ccucuccgcccaccagccc

SEQ ID NO: 943342 - RNA, 22 nt, Human
gguugccggggcaggacuggaa

SEQ ID NO: 943343 - RNA, 20 nt, Human
uguuaaaggacacuugcuuu

SEQ ID NO: 943344 - RNA, 22 nt, Human
uuugaaguaccugguucugacu

SEQ ID NO: 943345 - RNA, 22 nt, Human
augaaacaugagaaauggagag

SEQ ID NO: 943346 - RNA, 22 nt, Human
aggauguucgggucacauagcc

SEQ ID NO: 943347 - RNA, 22 nt, Human
aucccuggacggcgccucccca

SEQ ID NO: 943348 - RNA, 22 nt, Human
cccagcugcaccucuauggccu

SEQ ID NO: 943349 - RNA, 19 nt, Human
ccuuccuccccagggccau

SEQ ID NO: 943350 - RNA, 20 nt, Human
ucagacuugauucuaugcua

SEQ ID NO: 943351 - RNA, 22 nt, Human
ggcagcugcaaaucugcucugu

SEQ ID NO: 943352 - RNA, 19 nt, Human
aggcaggugcagagguccc

SEQ ID NO: 943353 - RNA, 19 nt, Human
gccaggagggcucuggcug

SEQ ID NO: 943354 - RNA, 22 nt, Human
ucagcaguggcucucaugcagu

SEQ ID NO: 943355 - RNA, 22 nt, Human
ccucucuguguggccucuccau

SEQ ID NO: 943356 - RNA, 22 nt, Human
agagggcagggcgguaaguccu

SEQ ID NO: 943357 - RNA, 22 nt, Human
ggaaggagggcggcaaugauga

SEQ ID NO: 943358 - RNA, 22 nt, Human
ccugugccauccugagcauccc

SEQ ID NO: 943359 - RNA, 22 nt, Human
cagggccaagccccuuuggcug

SEQ ID NO: 943360 - RNA, 22 nt, Human
aggcucugugcagccugcaucu

SEQ ID NO: 943361 - RNA, 22 nt, Human
agaugcugccucuccucacaag

SEQ ID NO: 943362 - RNA, 22 nt, Human
uuggcagagaguaugcugaaga

SEQ ID NO: 943363 - RNA, 22 nt, Human
cugccaggcagggagauggcug

SEQ ID NO: 943364 - RNA, 22 nt, Human
ucuucccuaaucaccaucuuca

SEQ ID NO: 943365 - RNA, 22 nt, Human
agugaguggacccugcaaggaa

SEQ ID NO: 943366 - RNA, 23 nt, Human
agcaauaagaagggauacaugug

SEQ ID NO: 943367 - RNA, 22 nt, Human
cccaggaggcagagguugcagu

SEQ ID NO: 943368 - RNA, 22 nt, Human
gaggcagugcauugucuagggg

SEQ ID NO: 943369 - RNA, 19 nt, Human
ccagcccugucacuucuug

SEQ ID NO: 943370 - RNA, 22 nt, Human
agaggccagcagugccuaucug

SEQ ID NO: 943371 - RNA, 22 nt, Human
gggacagacccaugggccaggu

SEQ ID NO: 943372 - RNA, 22 nt, Human
ugcagaagcugcaggucagugg

SEQ ID NO: 943373 - RNA, 22 nt, Human
ugcuuggccuacuuguccuuug

SEQ ID NO: 943374 - RNA, 23 nt, Human
uuagagaugauuaaaaaaucuug

SEQ ID NO: 943375 - RNA, 22 nt, Human
acugggccggugcagaguaguu

SEQ ID NO: 943376 - RNA, 22 nt, Human
auccccagaaaauaggugccua

SEQ ID NO: 943377 - RNA, 22 nt, Human
ccuggagcaaaaaucuaaggag

SEQ ID NO: 943378 - RNA, 22 nt, Human
uaaggcacgcauaagagggggc

SEQ ID NO: 943379 - RNA, 19 nt, Human
ugcucauggggacuucucc

SEQ ID NO: 943380 - RNA, 22 nt, Human
aaguguagauuauggagugucu

SEQ ID NO: 943381 - RNA, 22 nt, Human
ccaaagucagugcucagucguc

SEQ ID NO: 943382 - RNA, 22 nt, Human
gagcccuccauggagccaggca

SEQ ID NO: 943383 - RNA, 22 nt, Human
ucuuagaaguucauguuccagc

SEQ ID NO: 943384 - RNA, 22 nt, Human
gcccagcacauugcugaggacc

SEQ ID NO: 943385 - RNA, 22 nt, Human
augacagaaggccucccugaca

SEQ ID NO: 943386 - RNA, 22 nt, Human
ggcagaggaaggaugaauucac

SEQ ID NO: 943387 - RNA, 22 nt, Human
auucacaaguugauggauauuu

SEQ ID NO: 943388 - RNA, 22 nt, Human
aaauaauuauagcgagucuauc

SEQ ID NO: 943389 - RNA, 22 nt, Human
auugacaaggaaacuauaccag

SEQ ID NO: 943390 - RNA, 22 nt, Human
agaaauguuuauggcugccuau

SEQ ID NO: 943391 - RNA, 22 nt, Human
uaaaaguuuuaguuguacauaa

SEQ ID NO: 943392 - RNA, 22 nt, Human
ucagggcucaccagccucugcc

SEQ ID NO: 943393 - RNA, 22 nt, Human
acucaggagggaucagcuauca

SEQ ID NO: 943394 - RNA, 20 nt, Human
cauuuguuagcuuucuacug

SEQ ID NO: 943395 - RNA, 22 nt, Human
cccaguccuaaagcagacgcca

SEQ ID NO: 943396 - RNA, 20 nt, Human
gagauuuccaaucaugccca

SEQ ID NO: 943397 - RNA, 22 nt, Human
ugcucuggggagcuccucugcg

SEQ ID NO: 943398 - RNA, 22 nt, Human
aggcagggucuugcuauguugc

SEQ ID NO: 943399 - RNA, 22 nt, Human
aggcaggcacuccggaaguguc

SEQ ID NO: 943400 - RNA, 22 nt, Human
gcugucagaaggugaaggguaa

SEQ ID NO: 943401 - RNA, 22 nt, Human
ucccaggaugugcgugccgccg

SEQ ID NO: 943402 - RNA, 22 nt, Human
aggcagcaaagaaaugaugcug

SEQ ID NO: 943403 - RNA, 22 nt, Human
ucugucacucuagagauggcag

SEQ ID NO: 943404 - RNA, 22 nt, Human
cagagccugcucacgucucugu

SEQ ID NO: 943405 - RNA, 22 nt, Human
ccaggagucuggaugagguguc

SEQ ID NO: 943406 - RNA, 17 nt, Human
cagcugugagagccuua

SEQ ID NO: 943407 - RNA, 22 nt, Human
cugggcugcaguuccugguccu

SEQ ID NO: 943408 - RNA, 19 nt, Human
aagaagcaauaagcuguga

SEQ ID NO: 943409 - RNA, 22 nt, Human
cauaucccauuggccaggacau

SEQ ID NO: 943410 - RNA, 22 nt, Human
ugggccugccccaggcuucagc

SEQ ID NO: 943411 - RNA, 19 nt, Human
ggaagagaggaaaggugga

SEQ ID NO: 943412 - RNA, 22 nt, Human
agccaaagaucagugugcaagu

SEQ ID NO: 943413 - RNA, 21 nt, Human
cccaggaggcugagaagagca

SEQ ID NO: 943414 - RNA, 22 nt, Human
ugcagcugcuugauucaucuug

SEQ ID NO: 943415 - RNA, 22 nt, Human
acccagaggugucuagcaagcu

SEQ ID NO: 943416 - RNA, 22 nt, Human
ugacacauuaaaugcucacaaa

SEQ ID NO: 943417 - RNA, 22 nt, Human
agcuucuggaagccuggcagca

SEQ ID NO: 943418 - RNA, 22 nt, Human
ucccucagaaauucucucugaa

SEQ ID NO: 943419 - RNA, 22 nt, Human
uuuacagaaugucaauuucuau

SEQ ID NO: 943420 - RNA, 22 nt, Human
acagagcaauucuuggguguuu

SEQ ID NO: 943421 - RNA, 22 nt, Human
ggcaucuguccaucucuccagc

SEQ ID NO: 943422 - RNA, 22 nt, Human
agcaccugccugcauuggcuau

SEQ ID NO: 943423 - RNA, 22 nt, Human
aguuuucacacucaccaaaagg

SEQ ID NO: 943424 - RNA, 22 nt, Human
cuggcaggucucgcugacgugu

SEQ ID NO: 943425 - RNA, 22 nt, Human
uuuguucugaaaacucaagucc

SEQ ID NO: 943426 - RNA, 22 nt, Human
cuuguauuccccuaucucuaaa

SEQ ID NO: 943427 - RNA, 22 nt, Human
acagaacuuccugcuggagugg

SEQ ID NO: 943428 - RNA, 22 nt, Human
caacugagcaguagcgucugga

SEQ ID NO: 943429 - RNA, 22 nt, Human
gcugagcuagaaaaggaccaca

SEQ ID NO: 943430 - RNA, 22 nt, Human
aaguucaagucuccugaguaua

SEQ ID NO: 943431 - RNA, 22 nt, Human
cugcugugagugguucuugccu

SEQ ID NO: 943432 - RNA, 21 nt, Human
ucagaacaauuccaugccucc

SEQ ID NO: 943433 - RNA, 22 nt, Human
uggcagcugcaggccuccugag

SEQ ID NO: 943434 - RNA, 22 nt, Human
cuggcucaggguggucuggguc

SEQ ID NO: 943435 - RNA, 22 nt, Human
uuugcauuaucucacuuauaua

SEQ ID NO: 943436 - RNA, 22 nt, Human
gagcagugaagacagaaguaca

SEQ ID NO: 943437 - RNA, 22 nt, Human
uccugccuugccugggacauca

SEQ ID NO: 943438 - RNA, 22 nt, Human
auuuauguaucuguguagauca

SEQ ID NO: 943439 - RNA, 22 nt, Human
ccaggagaagcaucugagugua

SEQ ID NO: 943440 - RNA, 22 nt, Human
cuucuuaaugacagauuaaaau

SEQ ID NO: 943441 - RNA, 22 nt, Human
uuuggccacagauccuuggggg

SEQ ID NO: 943442 - RNA, 22 nt, Human
guugggaagcagauggaugagc

SEQ ID NO: 943443 - RNA, 22 nt, Human
uauugaaaugaaugacagugau

SEQ ID NO: 943444 - RNA, 22 nt, Human
agucucugccagcuuguccucu

SEQ ID NO: 943445 - RNA, 22 nt, Human
acaggugggcuuaagagucggc

SEQ ID NO: 943446 - RNA, 22 nt, Human
auggccaaggggccuaggcagg

SEQ ID NO: 943447 - RNA, 22 nt, Human
cccaggagagagacuugaaucu

SEQ ID NO: 943448 - RNA, 22 nt, Human
uugaaucauuacaauagauaag

SEQ ID NO: 943449 - RNA, 22 nt, Human
cauuuguuaaccaguguggauu

SEQ ID NO: 943450 - RNA, 22 nt, Human
guuauuuuaucucugagagguu

SEQ ID NO: 943451 - RNA, 22 nt, Human
guggcugcagagggcacagcau

SEQ ID NO: 943452 - RNA, 22 nt, Human
acagaaauauagaagguaggaa

SEQ ID NO: 943453 - RNA, 22 nt, Human
uggcagagucucuccuuuccag

SEQ ID NO: 943454 - RNA, 22 nt, Human
aucauguuccagaaacagugau

SEQ ID NO: 943455 - RNA, 22 nt, Human
gaaggccaguuuugagauaggu

SEQ ID NO: 943456 - RNA, 22 nt, Human
ggccugucucacccccgggugc

SEQ ID NO: 943457 - RNA, 22 nt, Human
ugggagcagccucagcuucggg

SEQ ID NO: 943458 - RNA, 22 nt, Human
agcaggaaguagucuguaagca

SEQ ID NO: 943459 - RNA, 19 nt, Human
gagcccucuccauggccac

SEQ ID NO: 943460 - RNA, 22 nt, Human
guuguauucuucaauaucagag

SEQ ID NO: 943461 - RNA, 22 nt, Human
aaaaaucacuuuuauaggcagc

SEQ ID NO: 943462 - RNA, 22 nt, Human
aaguguauauaugacuuauaaa

SEQ ID NO: 943463 - RNA, 22 nt, Human
ugucagaacucuauugaugucc

SEQ ID NO: 943464 - RNA, 22 nt, Human
ggucccagcugcucaagaggcu

SEQ ID NO: 943465 - RNA, 22 nt, Human
caaagguauaaguuaauauaca

SEQ ID NO: 943466 - RNA, 20 nt, Human
acaauagauuugagcaaagu

SEQ ID NO: 943467 - RNA, 22 nt, Human
cuguauuuguccucuauuuauu

SEQ ID NO: 943468 - RNA, 22 nt, Human
aaggcugcuuuuaacaugcaua

SEQ ID NO: 943469 - RNA, 20 nt, Human
cugcccagccacugagggau

SEQ ID NO: 943470 - RNA, 22 nt, Human
ucaaauaccagcaauuucaugu

SEQ ID NO: 943471 - RNA, 22 nt, Human
uuaacagagugccuggcaugua

SEQ ID NO: 943472 - RNA, 22 nt, Human
aaucacaauuacuuuugcacca

SEQ ID NO: 943473 - RNA, 22 nt, Human
ucagcaggcgguuccuuguggg

SEQ ID NO: 943474 - RNA, 18 nt, Human
uccugccugugccccagg

SEQ ID NO: 943475 - RNA, 22 nt, Human
augucacauggccuguacuuug

SEQ ID NO: 943476 - RNA, 22 nt, Human
aagacuuucucccaaauccuca

SEQ ID NO: 943477 - RNA, 22 nt, Human
ugaugaaauguugaggcaguga

SEQ ID NO: 943478 - RNA, 22 nt, Human
gagaccaggaaguacagcagcc

SEQ ID NO: 943479 - RNA, 22 nt, Human
ucaggcugccuaucagacugug

SEQ ID NO: 943480 - RNA, 22 nt, Human
ucagucucagcaccuagucaca

SEQ ID NO: 943481 - RNA, 22 nt, Human
uuuuaguguagucaccgugggu

SEQ ID NO: 943482 - RNA, 22 nt, Human
cagagccuuccuagcagacucu

SEQ ID NO: 943483 - RNA, 22 nt, Human
ugcuggcugggcugcuggagac

SEQ ID NO: 943484 - RNA, 22 nt, Human
aagagcuggcccaaucugagca

SEQ ID NO: 943485 - RNA, 22 nt, Human
uguacuuccccaaugacagcac

SEQ ID NO: 943486 - RNA, 22 nt, Human
cuggcccaggaagacguguccc

SEQ ID NO: 943487 - RNA, 21 nt, Human
aacauuucugggagaacucac

SEQ ID NO: 943488 - RNA, 23 nt, Human
cagaccuggcagucauccucaac

SEQ ID NO: 943489 - RNA, 22 nt, Human
aaagccuugagauccuauaguu

SEQ ID NO: 943490 - RNA, 22 nt, Human
ccagaggcuggcaagggcuccu

SEQ ID NO: 943491 - RNA, 22 nt, Human
cagcagcuacuuggagcagcag

SEQ ID NO: 943492 - RNA, 22 nt, Human
accucaggauguggacacagaa

SEQ ID NO: 943493 - RNA, 23 nt, Human
aggcccaacucugugagggcugc

SEQ ID NO: 943494 - RNA, 22 nt, Human
caagggcucuuuugaggaaugu

SEQ ID NO: 943495 - RNA, 22 nt, Human
uuuccucuccaccaggaggucu

SEQ ID NO: 943496 - RNA, 19 nt, Human
caugcugaccugcuguggu

SEQ ID NO: 943497 - RNA, 22 nt, Human
gcucugcuaauauuguaguacc

SEQ ID NO: 943498 - RNA, 22 nt, Human
gccagggggucagcaggcacuu

SEQ ID NO: 943499 - RNA, 22 nt, Human
cuggcuccauccuugagcucug

SEQ ID NO: 943500 - RNA, 22 nt, Human
cccaggaccgcgcggcugagcg

SEQ ID NO: 943501 - RNA, 22 nt, Human
uuuuccucugcaauaaaagcag

SEQ ID NO: 943502 - RNA, 22 nt, Human
cugcacaguuugauuucuugcu

SEQ ID NO: 943503 - RNA, 22 nt, Human
agugcuguuagguuaauauagu

SEQ ID NO: 943504 - RNA, 22 nt, Human
acguuuucagccuuaauguaga

SEQ ID NO: 943505 - RNA, 22 nt, Human
gcagggacaccuuugugaagcu

SEQ ID NO: 943506 - RNA, 22 nt, Human
ccagggagccuggugugucagc

SEQ ID NO: 943507 - RNA, 22 nt, Human
ggccaggaagggaagaucagca

SEQ ID NO: 943508 - RNA, 22 nt, Human
uccuucagcuuauuucuuagga

SEQ ID NO: 943509 - RNA, 20 nt, Human
ugaaggccagcagcauaggg

SEQ ID NO: 943510 - RNA, 22 nt, Human
aauuuuaaucaguggugcugag

SEQ ID NO: 943511 - RNA, 22 nt, Human
auuagcauauuaaauagucauu

SEQ ID NO: 943512 - RNA, 22 nt, Human
uauuuguauuucaugcaguaaa

SEQ ID NO: 943513 - RNA, 22 nt, Human
agaggcugcacuugcucaugau

SEQ ID NO: 943514 - RNA, 22 nt, Human
agcugaugccauguggaacagu

SEQ ID NO: 943515 - RNA, 22 nt, Human
ugccugaugcaggaguaucaga

SEQ ID NO: 943516 - RNA, 22 nt, Human
cugugcugauucagcacaggcc

SEQ ID NO: 943517 - RNA, 22 nt, Human
cugcugggcagaggcugcauga

SEQ ID NO: 943518 - RNA, 22 nt, Human
gaggcgagaagcuggagauggu

SEQ ID NO: 943519 - RNA, 22 nt, Human
cuauuuaugugcuauuuuguau

SEQ ID NO: 943520 - RNA, 22 nt, Human
gggaaggagccugcuugcuaga

SEQ ID NO: 943521 - RNA, 22 nt, Human
uauuuugucuucugcucaucac

SEQ ID NO: 943522 - RNA, 22 nt, Human
gaguuauuagucaaauagggaa

SEQ ID NO: 943523 - RNA, 22 nt, Human
agggaaauuaaugugagcaaug

SEQ ID NO: 943524 - RNA, 20 nt, Human
ucucaggguucagcaaagua

SEQ ID NO: 943525 - RNA, 22 nt, Human
uagagcuggaaaacugcaggua

SEQ ID NO: 943526 - RNA, 22 nt, Human
aggcuucuaggguuggcagcgg

SEQ ID NO: 943527 - RNA, 22 nt, Human
uaagcuauuccugaagaagguu

SEQ ID NO: 943528 - RNA, 22 nt, Human
cugggagcccugacuagccugg

SEQ ID NO: 943529 - RNA, 22 nt, Human
ugaagccagcuuuggaagacac

SEQ ID NO: 943530 - RNA, 22 nt, Human
guuuuauuuccaugagagaccg

SEQ ID NO: 943531 - RNA, 22 nt, Human
ugcacacacaugaaguagcaug

SEQ ID NO: 943532 - RNA, 22 nt, Human
agggggugcuacuuccagaguu

SEQ ID NO: 943533 - RNA, 23 nt, Human
uauggcaugguacuuccagcaga

SEQ ID NO: 943534 - RNA, 22 nt, Human
gagauuggccuggcuugccaac

SEQ ID NO: 943535 - RNA, 22 nt, Human
cuugaaagcuuugcgucuucua

SEQ ID NO: 943536 - RNA, 22 nt, Human
uugcacagaugagggugaugcu

SEQ ID NO: 943537 - RNA, 22 nt, Human
uucacauugguucuugauagcu

SEQ ID NO: 943538 - RNA, 22 nt, Human
cuggcucaccuccgcuccagca

SEQ ID NO: 943539 - RNA, 22 nt, Human
ggcugccugggagcccuccucu

SEQ ID NO: 943540 - RNA, 22 nt, Human
auaaauaucacuguugucccuc

SEQ ID NO: 943541 - RNA, 22 nt, Human
auaaacagcuccauuuagugcc

SEQ ID NO: 943542 - RNA, 22 nt, Human
cuggggcccaucgagggcugag

SEQ ID NO: 943543 - RNA, 22 nt, Human
ggcagcaguggcugcuauuguc

SEQ ID NO: 943544 - RNA, 22 nt, Human
agagcuguucaacguagcaaug

SEQ ID NO: 943545 - RNA, 22 nt, Human
ucaaaaguuucacauagagaua

SEQ ID NO: 943546 - RNA, 22 nt, Human
guggccuggaaaggcuggucug

SEQ ID NO: 943547 - RNA, 22 nt, Human
uuccucuccucacaugagucac

SEQ ID NO: 943548 - RNA, 22 nt, Human
acucuuuuauaaagcaucuuga

SEQ ID NO: 943549 - RNA, 22 nt, Human
ccugccuggagcugagugugga

SEQ ID NO: 943550 - RNA, 22 nt, Human
cugggccucauccucagaguuu

SEQ ID NO: 943551 - RNA, 22 nt, Human
uugaacauuaacuucagucuau

SEQ ID NO: 943552 - RNA, 22 nt, Human
gccccugggagcagagccacca

SEQ ID NO: 943553 - RNA, 22 nt, Human
uucuuaacuggaaaaugucaga

SEQ ID NO: 943554 - RNA, 22 nt, Human
cacuggggaaaacaggcuucuu

SEQ ID NO: 943555 - RNA, 22 nt, Human
ucacaaaugaggaaaucgagca

SEQ ID NO: 943556 - RNA, 22 nt, Human
aggugcagcugguggagucugg

SEQ ID NO: 943557 - RNA, 22 nt, Human
ucacaggagagcugaugcuggu

SEQ ID NO: 943558 - RNA, 22 nt, Human
aaaugugcuucuuacucucaau

SEQ ID NO: 943559 - RNA, 22 nt, Human
ccuuccagaguucagucugccc

SEQ ID NO: 943560 - RNA, 22 nt, Human
aaagucauuguaauauaugcua

SEQ ID NO: 943561 - RNA, 22 nt, Human
uggagcaggacugcugcccuca

SEQ ID NO: 943562 - RNA, 22 nt, Human
cucugugcccuacugcucagcu

SEQ ID NO: 943563 - RNA, 22 nt, Human
cugggcuacguguugacagcau

SEQ ID NO: 943564 - RNA, 22 nt, Human
auuguaaguagaaauguuaugg

SEQ ID NO: 943565 - RNA, 22 nt, Human
ucacaaaucauuuuaucugugu

SEQ ID NO: 943566 - RNA, 22 nt, Human
ugcagccaucgcagagucugua

SEQ ID NO: 943567 - RNA, 22 nt, Human
ccagggcaaaugagaucauagc

SEQ ID NO: 943568 - RNA, 22 nt, Human
gcguggugcugcccugcacaca

SEQ ID NO: 943569 - RNA, 19 nt, Human
gccacuccugaugcugccc

SEQ ID NO: 943570 - RNA, 22 nt, Human
aaauuauucucauguguuucuu

SEQ ID NO: 943571 - RNA, 23 nt, Human
uuuauccaacucuguaaucucuc

SEQ ID NO: 943572 - RNA, 21 nt, Human
ggcagcucagcagauggggac

SEQ ID NO: 943573 - RNA, 22 nt, Human
agcagcucuguuuaccuggagg

SEQ ID NO: 943574 - RNA, 22 nt, Human
uuucauggcuaggacuagagug

SEQ ID NO: 943575 - RNA, 22 nt, Human
cuggggaggcagggcugccccu

SEQ ID NO: 943576 - RNA, 22 nt, Human
gcaggagacuggcugugguagu

SEQ ID NO: 943577 - RNA, 22 nt, Human
ggggccuguagagcuucaggga

SEQ ID NO: 943578 - RNA, 22 nt, Human
cccagggucccugcucucugug

SEQ ID NO: 943579 - RNA, 22 nt, Human
gccuggagagcacugugcgcuu

SEQ ID NO: 943580 - RNA, 22 nt, Human
agaggccuccgaaaggugggcu

SEQ ID NO: 943581 - RNA, 22 nt, Human
cacagggcaggccccaggccuc

SEQ ID NO: 943582 - RNA, 22 nt, Human
aggaagccugcaggugacugcu

SEQ ID NO: 943583 - RNA, 22 nt, Human
guugaaagagcauggacuugaa

SEQ ID NO: 943584 - RNA, 22 nt, Human
cagaaggcuuuguggaguagac

SEQ ID NO: 943585 - RNA, 22 nt, Human
uggcacugccuggcagggcccc

SEQ ID NO: 943586 - RNA, 22 nt, Human
gggcagcuagcccucuagccca

SEQ ID NO: 943587 - RNA, 22 nt, Human
cagcauggggcuuggagucagc

SEQ ID NO: 943588 - RNA, 22 nt, Human
ggcuucucucccccagcuccac

SEQ ID NO: 943589 - RNA, 22 nt, Human
gaucuucuagcagaaguaauuu

SEQ ID NO: 943590 - RNA, 18 nt, Human
cugagggcagccccuggg

SEQ ID NO: 943591 - RNA, 22 nt, Human
guuuaagaaaauucauguuguu

SEQ ID NO: 943592 - RNA, 22 nt, Human
caggagcaaggagcagugggau

SEQ ID NO: 943593 - RNA, 22 nt, Human
uccucaggugacuagguaucuu

SEQ ID NO: 943594 - RNA, 22 nt, Human
uaauguguugaauauuuguaca

SEQ ID NO: 943595 - RNA, 22 nt, Human
ucucagaguuuacggggcugaa

SEQ ID NO: 943596 - RNA, 22 nt, Human
aauucacaauguguagucaugc

SEQ ID NO: 943597 - RNA, 22 nt, Human
gccuccugguugcuucuccaac

SEQ ID NO: 943598 - RNA, 22 nt, Human
cugugucucguuaaagcauugg

SEQ ID NO: 943599 - RNA, 22 nt, Human
uggccagguugggcuuugcagc

SEQ ID NO: 943600 - RNA, 18 nt, Human
auguauguacauauuuau

SEQ ID NO: 943601 - RNA, 22 nt, Human
ccuggcuggcaagaucgugaag

SEQ ID NO: 943602 - RNA, 22 nt, Human
auaguuugaaggcuguucuacu

SEQ ID NO: 943603 - RNA, 22 nt, Human
ggacucagcagccaggaguggc

SEQ ID NO: 943604 - RNA, 22 nt, Human
uacaucauaauaauacuuagaa

SEQ ID NO: 943605 - RNA, 22 nt, Human
acucugccccgaguucugggaa

SEQ ID NO: 943606 - RNA, 22 nt, Human
uuuaucagagauauguguggac

SEQ ID NO: 943607 - RNA, 22 nt, Human
ccacagagagugucagccuuug

SEQ ID NO: 943608 - RNA, 22 nt, Human
uccucaugccgggucucacgcu

SEQ ID NO: 943609 - RNA, 22 nt, Human
aauauccagguagaugucuucu

SEQ ID NO: 943610 - RNA, 22 nt, Human
ugccucagucuaaagucucuca

SEQ ID NO: 943611 - RNA, 23 nt, Human
agacagaggcugaggcuggccgc

SEQ ID NO: 943612 - RNA, 22 nt, Human
uccucccacauaggacaauggg

SEQ ID NO: 943613 - RNA, 23 nt, Human
ucccagccucuucucuugcauac

SEQ ID NO: 943614 - RNA, 23 nt, Human
aguaaagcaauuguuggcgagag

SEQ ID NO: 943615 - RNA, 22 nt, Human
gucaaguuuauccgcucauuca

SEQ ID NO: 943616 - RNA, 22 nt, Human
cagcccuggugccaagguuccc

SEQ ID NO: 943617 - RNA, 22 nt, Human
cugcaguguucuggaaugcauu

SEQ ID NO: 943618 - RNA, 22 nt, Human
ucagucuucccuccagugcaac

SEQ ID NO: 943619 - RNA, 23 nt, Human
aguacauucgaaaaauucuguga

SEQ ID NO: 943620 - RNA, 22 nt, Human
gagagugaugaaugguuaaaca

SEQ ID NO: 943621 - RNA, 22 nt, Human
ugcauggaggaagaugaaugca

SEQ ID NO: 943622 - RNA, 22 nt, Human
aucaguuuauacuuauaaaucu

SEQ ID NO: 943623 - RNA, 22 nt, Human
aguuaaagucugaaauagagaa

SEQ ID NO: 943624 - RNA, 19 nt, Human
aggcagcaggccagggaug

SEQ ID NO: 943625 - RNA, 22 nt, Human
uggcagcugccauguccacgug

SEQ ID NO: 943626 - RNA, 22 nt, Human
caggauggccccggggcugugc

SEQ ID NO: 943627 - RNA, 22 nt, Human
gaaggagggugcggaucugagc

SEQ ID NO: 943628 - RNA, 17 nt, Human
uucaaugauuaaugcau

SEQ ID NO: 943629 - RNA, 22 nt, Human
ccaggagagcucucguucagug

SEQ ID NO: 943630 - RNA, 22 nt, Human
auuagagaaauguugccaagau

SEQ ID NO: 943631 - RNA, 22 nt, Human
acauuuaaauaccuauguuucu

SEQ ID NO: 943632 - RNA, 22 nt, Human
ccucccagugccuccagagcag

SEQ ID NO: 943633 - RNA, 22 nt, Human
cagaguguugaccauaagccca

SEQ ID NO: 943634 - RNA, 18 nt, Human
gggcauggaugcagcauc

SEQ ID NO: 943635 - RNA, 22 nt, Human
ugugaagcuggauccuggagcu

SEQ ID NO: 943636 - RNA, 22 nt, Human
aaacaacucggcaacugcuuuu

SEQ ID NO: 943637 - RNA, 22 nt, Human
ccacacagucaguuuccaagaa

SEQ ID NO: 943638 - RNA, 22 nt, Human
ucugggcccuaaaccagcucua

SEQ ID NO: 943639 - RNA, 22 nt, Human
auuuguagugaagugaaaauaa

SEQ ID NO: 943640 - RNA, 22 nt, Human
uagauaaauuagaaaguuuacu

SEQ ID NO: 943641 - RNA, 21 nt, Human
ucuugaaaauuguagcaguuu

SEQ ID NO: 943642 - RNA, 22 nt, Human
ggagauagacuuggugagccac

SEQ ID NO: 943643 - RNA, 22 nt, Human
agcucccagaguccucugccca

SEQ ID NO: 943644 - RNA, 22 nt, Human
aguucucagcuuaguaugcugu

SEQ ID NO: 943645 - RNA, 20 nt, Human
uauuaggaaggaggaaggaa

SEQ ID NO: 943646 - RNA, 22 nt, Human
cuccacagcucaggcucagagu

SEQ ID NO: 943647 - RNA, 22 nt, Human
ugcugccuugaccuccugggcu

SEQ ID NO: 943648 - RNA, 22 nt, Human
ugccuggguguaaagggccaac

SEQ ID NO: 943649 - RNA, 22 nt, Human
ggcuccuggggaggugagcuug

SEQ ID NO: 943650 - RNA, 22 nt, Human
gcugucugcugugcacugagca

SEQ ID NO: 943651 - RNA, 22 nt, Human
auuaggaaauguguugcaagca

SEQ ID NO: 943652 - RNA, 22 nt, Human
uccaagggaaacugcacuucua

SEQ ID NO: 943653 - RNA, 22 nt, Human
ucagggaaucagacucugcagc

SEQ ID NO: 943654 - RNA, 22 nt, Human
uccagccaugacucggacagug

SEQ ID NO: 943655 - RNA, 22 nt, Human
uguuuauuacaguucuuggaau

SEQ ID NO: 943656 - RNA, 22 nt, Human
cuggagccugcaguuuucacuu

SEQ ID NO: 943657 - RNA, 22 nt, Human
uucuuaagaaaccaucacauuc

SEQ ID NO: 943658 - RNA, 22 nt, Human
cacagcagaaaguguaggagga

SEQ ID NO: 943659 - RNA, 22 nt, Human
gcauuguccugcuucugagugu

SEQ ID NO: 943660 - RNA, 22 nt, Human
ggcaccugcucaucuggacuca

SEQ ID NO: 943661 - RNA, 22 nt, Human
uuuaaauguuuaaaacucguga

SEQ ID NO: 943662 - RNA, 22 nt, Human
caugaaaaugucaaguucugcu

SEQ ID NO: 943663 - RNA, 22 nt, Human
ugaguuuuuucaacauaugaag

SEQ ID NO: 943664 - RNA, 22 nt, Human
uggggguguccuggugcacaca

SEQ ID NO: 943665 - RNA, 22 nt, Human
gaacccaguccaggugcagccu

SEQ ID NO: 943666 - RNA, 22 nt, Human
gggcucugcgcucagcuccagc

SEQ ID NO: 943667 - RNA, 22 nt, Human
ucacaucuuauuagaguaucuc

SEQ ID NO: 943668 - RNA, 22 nt, Human
aaaggcaggcuuucacaucuca

SEQ ID NO: 943669 - RNA, 22 nt, Human
guccucuguuagaaaugugcuu

SEQ ID NO: 943670 - RNA, 22 nt, Human
ugcguugcgcuccugcagcagg

SEQ ID NO: 943671 - RNA, 22 nt, Human
aaggcaguagguguuucaaacu

SEQ ID NO: 943672 - RNA, 22 nt, Human
uggcugggccgggccuugugcc

SEQ ID NO: 943673 - RNA, 22 nt, Human
ugaccaaaggugguuuauuugg

SEQ ID NO: 943674 - RNA, 22 nt, Human
aaacugcugguugcuggccagc

SEQ ID NO: 943675 - RNA, 21 nt, Human
acaguucaugauaacuccauc

SEQ ID NO: 943676 - RNA, 22 nt, Human
aagagcugauuaagucaugagg

SEQ ID NO: 943677 - RNA, 22 nt, Human
acagugcuggcuacaacccugg

SEQ ID NO: 943678 - RNA, 22 nt, Human
ggaccagagaagugagcaccug

SEQ ID NO: 943679 - RNA, 22 nt, Human
ucagugcuucggcgagcaccua

SEQ ID NO: 943680 - RNA, 22 nt, Human
acagagcugggaucugaaccca

SEQ ID NO: 943681 - RNA, 20 nt, Human
ggcagcucacuacuuucugu

SEQ ID NO: 943682 - RNA, 22 nt, Human
aaggagcucccggcagaccagg

SEQ ID NO: 943683 - RNA, 22 nt, Human
cagcaggguauacagggaauuu

SEQ ID NO: 943684 - RNA, 22 nt, Human
ucccaggaagaucccagggacc

SEQ ID NO: 943685 - RNA, 22 nt, Human
uccuccagugucuggggccuug

SEQ ID NO: 943686 - RNA, 22 nt, Human
uaugccagggacuguuucacca

SEQ ID NO: 943687 - RNA, 22 nt, Human
cccagggacagcuagguggggc

SEQ ID NO: 943688 - RNA, 21 nt, Human
gcagagccugagguucuugag

SEQ ID NO: 943689 - RNA, 22 nt, Human
gggcagagaaauggacaguugg

SEQ ID NO: 943690 - RNA, 23 nt, Human
uagcuguggcguaaggcucagcu

SEQ ID NO: 943691 - RNA, 22 nt, Human
ccagggcaacgcugucucagag

SEQ ID NO: 943692 - RNA, 22 nt, Human
aaagcucuuauagcagagugug

SEQ ID NO: 943693 - RNA, 22 nt, Human
uauuuccaagcugaauccaaug

SEQ ID NO: 943694 - RNA, 20 nt, Human
auuuggcaugaaguauugau

SEQ ID NO: 943695 - RNA, 22 nt, Human
ucaggccacuucacaggugauu

SEQ ID NO: 943696 - RNA, 22 nt, Human
guccugggaaggaagccaggga

SEQ ID NO: 943697 - RNA, 22 nt, Human
uagcucuucauuucaucugauu

SEQ ID NO: 943698 - RNA, 22 nt, Human
aacauacauauuucagugucca

SEQ ID NO: 943699 - RNA, 21 nt, Human
agagucugcauuucugacaag

SEQ ID NO: 943700 - RNA, 19 nt, Human
cuggugcuugagugaguca

SEQ ID NO: 943701 - RNA, 22 nt, Human
cugcugugucagaguccagggg

SEQ ID NO: 943702 - RNA, 22 nt, Human
auacaacagaaaaugauuauuc

SEQ ID NO: 943703 - RNA, 22 nt, Human
uagucccauuuugagguauuug

SEQ ID NO: 943704 - RNA, 22 nt, Human
aggauccuuuuucugcuguuug

SEQ ID NO: 943705 - RNA, 22 nt, Human
aggagcagaauuuaaugugcag

SEQ ID NO: 943706 - RNA, 22 nt, Human
ugcuauacauguacauauuagu

SEQ ID NO: 943707 - RNA, 18 nt, Human
ugacagaaccuggagccu

SEQ ID NO: 943708 - RNA, 22 nt, Human
caaaagucuuccuauucucuua

SEQ ID NO: 943709 - RNA, 22 nt, Human
cugcaagauuggaagaugcaau

SEQ ID NO: 943710 - RNA, 22 nt, Human
ccuuucucuuugcugaucaugu

SEQ ID NO: 943711 - RNA, 20 nt, Human
cugccuggaggccucuaccu

SEQ ID NO: 943712 - RNA, 22 nt, Human
cacaggguuguucugaggauuc

SEQ ID NO: 943713 - RNA, 22 nt, Human
ugggugggagcacccugucugg

SEQ ID NO: 943714 - RNA, 22 nt, Human
ugucucugauaaguaguucagu

SEQ ID NO: 943715 - RNA, 22 nt, Human
ggcagcuucuuaauauggagac

SEQ ID NO: 943716 - RNA, 21 nt, Human
acagcaagccuucacaugagu

SEQ ID NO: 943717 - RNA, 22 nt, Human
gcugucacacaugggaucucag

SEQ ID NO: 943718 - RNA, 22 nt, Human
agaaguauaaagaauguuuaug

SEQ ID NO: 943719 - RNA, 22 nt, Human
gcuggccugcaaagcccggcug

SEQ ID NO: 943720 - RNA, 22 nt, Human
cauugcacucuggcuggaacgg

SEQ ID NO: 943721 - RNA, 22 nt, Human
cagcccuguccagcagagggug

SEQ ID NO: 943722 - RNA, 23 nt, Human
uuacaguaggaguuggaaaacca

SEQ ID NO: 943723 - RNA, 22 nt, Human
uauuuucuggacagucuugcuu

SEQ ID NO: 943724 - RNA, 21 nt, Human
ugacauaauccauaguacaaa

SEQ ID NO: 943725 - RNA, 22 nt, Human
agggaagagcuugcaagaaacc

SEQ ID NO: 943726 - RNA, 22 nt, Human
uuuggaaaguguacaaauuuga

SEQ ID NO: 943727 - RNA, 22 nt, Human
caccuuguggcccagucagguu

SEQ ID NO: 943728 - RNA, 22 nt, Human
uuggaugaagucuagcuuuagu

SEQ ID NO: 943729 - RNA, 22 nt, Human
gucuucuguaagaugagguccc

SEQ ID NO: 943730 - RNA, 22 nt, Human
agcaugcgcuugaucagcucca

SEQ ID NO: 943731 - RNA, 22 nt, Human
uggcucagauuuuuguaggcuu

SEQ ID NO: 943732 - RNA, 22 nt, Human
ucuccuggguaaaaggguugau

SEQ ID NO: 943733 - RNA, 22 nt, Human
cugggaggcagucucucuagaa

SEQ ID NO: 943734 - RNA, 22 nt, Human
uugcaucuagggcaacccagag

SEQ ID NO: 943735 - RNA, 22 nt, Human
aaauaacuuaugaucgucuggc

SEQ ID NO: 943736 - RNA, 22 nt, Human
aaaauugaagugaucaggaacu

SEQ ID NO: 943737 - RNA, 21 nt, Human
agcugggccucagccugcagu

SEQ ID NO: 943738 - RNA, 17 nt, Human
uagcugccccgaaugcu

SEQ ID NO: 943739 - RNA, 22 nt, Human
accaggagagauuuuauugaga

SEQ ID NO: 943740 - RNA, 22 nt, Human
acauuugucuucuuucagauua

SEQ ID NO: 943741 - RNA, 22 nt, Human
auacuuugcuaguaucagugug

SEQ ID NO: 943742 - RNA, 22 nt, Human
gaggcagcauucgcauagacag

SEQ ID NO: 943743 - RNA, 22 nt, Human
ucaaauaugugauagaagcuaa

SEQ ID NO: 943744 - RNA, 22 nt, Human
ugacacagauuagagacauacc

SEQ ID NO: 943745 - RNA, 22 nt, Human
uggcucuguugugcugagccag

SEQ ID NO: 943746 - RNA, 22 nt, Human
cuggggcauugggagaggccug

SEQ ID NO: 943747 - RNA, 22 nt, Human
accugagggcccaaacuuggua

SEQ ID NO: 943748 - RNA, 22 nt, Human
cccaaggaagacgcuugugaua

SEQ ID NO: 943749 - RNA, 22 nt, Human
cagagccuaaaacgacuccacu

SEQ ID NO: 943750 - RNA, 22 nt, Human
caugugucaaaugauguagcug

SEQ ID NO: 943751 - RNA, 22 nt, Human
gagggagucugugcaaagaauu

SEQ ID NO: 943752 - RNA, 22 nt, Human
uacuaggaagcagcugcauugg

SEQ ID NO: 943753 - RNA, 20 nt, Human
uuuuuccuucucuacaggca

SEQ ID NO: 943754 - RNA, 22 nt, Human
uugacaaaaauaacacagcaua

SEQ ID NO: 943755 - RNA, 22 nt, Human
acuggccaggcagcaguagcuu

SEQ ID NO: 943756 - RNA, 22 nt, Human
ucugcucuaguugcuuccugcc

SEQ ID NO: 943757 - RNA, 22 nt, Human
ucugugacuugcgggaggagaa

SEQ ID NO: 943758 - RNA, 21 nt, Human
guauucuuuaugaagugaaaa

SEQ ID NO: 943759 - RNA, 22 nt, Human
ggcaugcucuuuguccacagua

SEQ ID NO: 943760 - RNA, 22 nt, Human
auuauggacguuaauuuuggaa

SEQ ID NO: 943761 - RNA, 21 nt, Human
uuucaauguguucuuuguagu

SEQ ID NO: 943762 - RNA, 22 nt, Human
cuucacaaagcucucuuuaugu

SEQ ID NO: 943763 - RNA, 22 nt, Human
ugucccagucaaggcugucauc

SEQ ID NO: 943764 - RNA, 22 nt, Human
ggaaggaggggcaaagcaguuc

SEQ ID NO: 943765 - RNA, 22 nt, Human
cguggccagccauuuccuggaa

SEQ ID NO: 943766 - RNA, 22 nt, Human
uccuugaauugugccacuuacc

SEQ ID NO: 943767 - RNA, 23 nt, Human
ccugaagggucaggguccucagc

SEQ ID NO: 943768 - RNA, 22 nt, Human
caucacagauguuguguggagu

SEQ ID NO: 943769 - RNA, 22 nt, Human
uggcagggucuugcuguguugc

SEQ ID NO: 943770 - RNA, 22 nt, Human
cuucuuaucaaguggcaaaucu

SEQ ID NO: 943771 - RNA, 22 nt, Human
cuuacauuaaguaagagauuga

SEQ ID NO: 943772 - RNA, 22 nt, Human
gagggagugccagagggccagc

SEQ ID NO: 943773 - RNA, 22 nt, Human
caggagacaaguuagcagcuga

SEQ ID NO: 943774 - RNA, 20 nt, Human
agaggaggauuauuuuauuc

SEQ ID NO: 943775 - RNA, 22 nt, Human
ccugccugcuuucugcuuugca

SEQ ID NO: 943776 - RNA, 21 nt, Human
ucccagagugcuugggacugc

SEQ ID NO: 943777 - RNA, 20 nt, Human
cucugcugcccgccggcugc

SEQ ID NO: 943778 - RNA, 22 nt, Human
ucaguguccggagccugagugc

SEQ ID NO: 943779 - RNA, 22 nt, Human
guucuucaggcugugcucuaga

SEQ ID NO: 943780 - RNA, 22 nt, Human
uaguaaaaguuuaguugaaagu

SEQ ID NO: 943781 - RNA, 22 nt, Human
uuagauaaauuaagacuuuaca

SEQ ID NO: 943782 - RNA, 22 nt, Human
gcauuuccugugcuuggcauau

SEQ ID NO: 943783 - RNA, 22 nt, Human
gaggagagagggacugucugca

SEQ ID NO: 943784 - RNA, 22 nt, Human
auguacauuuguaguaauauca

SEQ ID NO: 943785 - RNA, 22 nt, Human
ucaaugauaucagcaggaugug

SEQ ID NO: 943786 - RNA, 22 nt, Human
acagagagaaacaaucagcagc

SEQ ID NO: 943787 - RNA, 22 nt, Human
gcagggcuguucaggagggugg

SEQ ID NO: 943788 - RNA, 22 nt, Human
acuguacuguguauuguagaau

SEQ ID NO: 943789 - RNA, 22 nt, Human
ggcuggagacaacguccugccc

SEQ ID NO: 943790 - RNA, 22 nt, Human
ggauuugggcuugcagcagagc

SEQ ID NO: 943791 - RNA, 22 nt, Human
agcagagaagacacaggcuuca

SEQ ID NO: 943792 - RNA, 22 nt, Human
aaugugaaaccgcacagaauaa

SEQ ID NO: 943793 - RNA, 22 nt, Human
gccucaggacuggcauacucau

SEQ ID NO: 943794 - RNA, 22 nt, Human
agaggggagagcuaagcaauuc

SEQ ID NO: 943795 - RNA, 21 nt, Human
ugugucacuaacuagaggcua

SEQ ID NO: 943796 - RNA, 22 nt, Human
cuuucauucuuagauauuagug

SEQ ID NO: 943797 - RNA, 22 nt, Human
agccacagcgaaccucucuucc

SEQ ID NO: 943798 - RNA, 22 nt, Human
cucacuguuuaauagcuggauc

SEQ ID NO: 943799 - RNA, 22 nt, Human
guggccugccgugugguauggg

SEQ ID NO: 943800 - RNA, 22 nt, Human
ucccagaggucucugcugguuc

SEQ ID NO: 943801 - RNA, 22 nt, Human
uaagcugugggagauuggcaua

SEQ ID NO: 943802 - RNA, 20 nt, Human
aggcacuggggauagguaag

SEQ ID NO: 943803 - RNA, 22 nt, Human
acagaguagcucaagaagauug

SEQ ID NO: 943804 - RNA, 15 nt, Human
cccaggaguucgaga

SEQ ID NO: 943805 - RNA, 22 nt, Human
uggcucaggcuugaaaauagau

SEQ ID NO: 943806 - RNA, 20 nt, Human
uccagaggccacauccagug

SEQ ID NO: 943807 - RNA, 22 nt, Human
ugaaaucugucccacuuuagcu

SEQ ID NO: 943808 - RNA, 22 nt, Human
ugcugcacaauuggaaaguauc

SEQ ID NO: 943809 - RNA, 22 nt, Human
ucaagucucaauguauuauggu

SEQ ID NO: 943810 - RNA, 22 nt, Human
ucaguagcagaaagcaaugagu

SEQ ID NO: 943811 - RNA, 22 nt, Human
ucuuacauauagcaugaguaca

SEQ ID NO: 943812 - RNA, 22 nt, Human
cugcagagcauaaaucugaaua

SEQ ID NO: 943813 - RNA, 22 nt, Human
aucaagaauguucauucuucua

SEQ ID NO: 943814 - RNA, 21 nt, Human
acucaggagacuaacuauguc

SEQ ID NO: 943815 - RNA, 19 nt, Human
uuugaaagaguuuuauugg

SEQ ID NO: 943816 - RNA, 22 nt, Human
gaagcccauuuguacagcacau

SEQ ID NO: 943817 - RNA, 22 nt, Human
aaauugcaaaaguacuuuuagg

SEQ ID NO: 943818 - RNA, 22 nt, Human
acaauucucucauaucuuauua

SEQ ID NO: 943819 - RNA, 22 nt, Human
cugaaugaggaaaagagugagg

SEQ ID NO: 943820 - RNA, 22 nt, Human
ucugaagccuuuguacaggccu

SEQ ID NO: 943821 - RNA, 23 nt, Human
uggcagagacccagaaucuacau

SEQ ID NO: 943822 - RNA, 22 nt, Human
caaaugcuggcccugcuacuua

SEQ ID NO: 943823 - RNA, 22 nt, Human
ucauugaauauggggccauaca

SEQ ID NO: 943824 - RNA, 22 nt, Human
acuugcauuauauuuaucacaa

SEQ ID NO: 943825 - RNA, 22 nt, Human
cacacaggaugaagcagcagaa

SEQ ID NO: 943826 - RNA, 22 nt, Human
cccauuuaucccaagguuacuc

SEQ ID NO: 943827 - RNA, 17 nt, Human
ucuguccagggagugug

SEQ ID NO: 943828 - RNA, 21 nt, Human
cucaggcauuugaggagaguc

SEQ ID NO: 943829 - RNA, 22 nt, Human
accacaggacccaugagucagu

SEQ ID NO: 943830 - RNA, 20 nt, Human
auaaaauaacugccacaaga

SEQ ID NO: 943831 - RNA, 22 nt, Human
ucccuggguccugcuugcucuc

SEQ ID NO: 943832 - RNA, 22 nt, Human
gcacagggcccugugcguaggu

SEQ ID NO: 943833 - RNA, 22 nt, Human
ugcugccaugcagagcaacaga

SEQ ID NO: 943834 - RNA, 22 nt, Human
uugucuguaaagacggccacca

SEQ ID NO: 943835 - RNA, 22 nt, Human
uagaaaucauuuagaaguauug

SEQ ID NO: 943836 - RNA, 22 nt, Human
gauaugaaguggcauugugaag

SEQ ID NO: 943837 - RNA, 22 nt, Human
cagugcaguuucccagaugcug

SEQ ID NO: 943838 - RNA, 23 nt, Human
gucagcuugaccaguggagaguc

SEQ ID NO: 943839 - RNA, 22 nt, Human
uauagcaagcaggacagucuca

SEQ ID NO: 943840 - RNA, 22 nt, Human
gcugcuguugauuuaguccaau

SEQ ID NO: 943841 - RNA, 22 nt, Human
gcaggagacaacuguaaggaga

SEQ ID NO: 943842 - RNA, 19 nt, Human
gcuccuggaugaccugugg

SEQ ID NO: 943843 - RNA, 22 nt, Human
auugucuucuggucuuaucuuu

SEQ ID NO: 943844 - RNA, 22 nt, Human
ucucucagcuuugagaccugcu

SEQ ID NO: 943845 - RNA, 20 nt, Human
aggcugggguguuuugccca

SEQ ID NO: 943846 - RNA, 23 nt, Human
cauuugauccucacaauaaaugg

SEQ ID NO: 943847 - RNA, 22 nt, Human
gaggccacaguccugaggcauc

SEQ ID NO: 943848 - RNA, 22 nt, Human
cauggaaggcaaaagacacaga

SEQ ID NO: 943849 - RNA, 22 nt, Human
uauuuccugcauggugauguaa

SEQ ID NO: 943850 - RNA, 22 nt, Human
gcugggcacugucccauaggcu

SEQ ID NO: 943851 - RNA, 22 nt, Human
agcuggccuguuagagcugagu

SEQ ID NO: 943852 - RNA, 22 nt, Human
gcugcccugucugcagcaggac

SEQ ID NO: 943853 - RNA, 22 nt, Human
auauaauaguuucauaaaggcu

SEQ ID NO: 943854 - RNA, 22 nt, Human
ccacugggggcugcaggcacuc

SEQ ID NO: 943855 - RNA, 22 nt, Human
ugugugcagccucugucuuugg

SEQ ID NO: 943856 - RNA, 22 nt, Human
caggccugcaggaaaggcuccc

SEQ ID NO: 943857 - RNA, 22 nt, Human
gccuggagcuacuggacacuga

SEQ ID NO: 943858 - RNA, 22 nt, Human
agaggcaggagguugacuugag

SEQ ID NO: 943859 - RNA, 22 nt, Human
auuuggcauaggcagaggccca

SEQ ID NO: 943860 - RNA, 22 nt, Human
uagucuuuugagaaguauaucu

SEQ ID NO: 943861 - RNA, 19 nt, Human
ucccaggaaccuuuuauuu

SEQ ID NO: 943862 - RNA, 22 nt, Human
cauuguuaccaucuuuuaccua

SEQ ID NO: 943863 - RNA, 22 nt, Human
gcagccagaagacucagaacaa

SEQ ID NO: 943864 - RNA, 22 nt, Human
ugccuugguucucuacuuggag

SEQ ID NO: 943865 - RNA, 22 nt, Human
gcuucucuggccugcagggcau

SEQ ID NO: 943866 - RNA, 18 nt, Human
aaugcacacauuuacucc

SEQ ID NO: 943867 - RNA, 22 nt, Human
uacaaaguagaaauucaguaaa

SEQ ID NO: 943868 - RNA, 22 nt, Human
acagagcucccagccaucuccu

SEQ ID NO: 943869 - RNA, 22 nt, Human
uugcagcuucgagucuaucugu

SEQ ID NO: 943870 - RNA, 22 nt, Human
ucagauggcacacagagccugc

SEQ ID NO: 943871 - RNA, 22 nt, Human
auccaugauuaguaggauaaag

SEQ ID NO: 943872 - RNA, 20 nt, Human
ccagagcugauggcugcccg

SEQ ID NO: 943873 - RNA, 21 nt, Human
guggccugauuaugaaugggu

SEQ ID NO: 943874 - RNA, 22 nt, Human
ccugagggaggguauaggcugu

SEQ ID NO: 943875 - RNA, 22 nt, Human
uuacuuuggguccugcuuauaa

SEQ ID NO: 943876 - RNA, 22 nt, Human
aucaaaguccaucagaagguag

SEQ ID NO: 943877 - RNA, 22 nt, Human
aaaaaguauuggccaugguuga

SEQ ID NO: 943878 - RNA, 22 nt, Human
cacuaugcuuacaugcuuauau

SEQ ID NO: 943879 - RNA, 22 nt, Human
gcaccaggcuuagagccccagg

SEQ ID NO: 943880 - RNA, 22 nt, Human
uuauguacucugcaauguuuga

SEQ ID NO: 943881 - RNA, 17 nt, Human
gccaggagguuugagcu

SEQ ID NO: 943882 - RNA, 22 nt, Human
uuccauuuauucuuguccagau

SEQ ID NO: 943883 - RNA, 20 nt, Human
uaacagaaguagaagugggu

SEQ ID NO: 943884 - RNA, 22 nt, Human
aaugagcugcugcuguuccacc

SEQ ID NO: 943885 - RNA, 22 nt, Human
uaaauguauaggcacuaaaccu

SEQ ID NO: 943886 - RNA, 20 nt, Human
auuaggauuuuaggucauca

SEQ ID NO: 943887 - RNA, 22 nt, Human
cagucucuugcuucauuaguug

SEQ ID NO: 943888 - RNA, 21 nt, Human
uauuucuuugacucucucccu

SEQ ID NO: 943889 - RNA, 22 nt, Human
uuucacauaugguuguugauug

SEQ ID NO: 943890 - RNA, 22 nt, Human
caguggcagagaacagagaccu

SEQ ID NO: 943891 - RNA, 22 nt, Human
gcugucugacuccaaguuggag

SEQ ID NO: 943892 - RNA, 22 nt, Human
cccucaggagaugucagcugga

SEQ ID NO: 943893 - RNA, 22 nt, Human
uaggcacuggggaggcagcaug

SEQ ID NO: 943894 - RNA, 22 nt, Human
ggcucuggaaaguguccuugau

SEQ ID NO: 943895 - RNA, 22 nt, Human
aggacagcccuugagagcacau

SEQ ID NO: 943896 - RNA, 22 nt, Human
ccaaaguccacaguuuacauua

SEQ ID NO: 943897 - RNA, 22 nt, Human
uaaggcacccauguucauacag

SEQ ID NO: 943898 - RNA, 22 nt, Human
ucagccucucugaguccagacc

SEQ ID NO: 943899 - RNA, 22 nt, Human
uggcagcuagcuguuuucaugc

SEQ ID NO: 943900 - RNA, 22 nt, Human
cagaacugggcagggagcagag

SEQ ID NO: 943901 - RNA, 22 nt, Human
uuucugcugugcuuucuugcgu

SEQ ID NO: 943902 - RNA, 22 nt, Human
ccugcagguaaggcuaacugcc

SEQ ID NO: 943903 - RNA, 22 nt, Human
ucucagggagggcgagucagcg

SEQ ID NO: 943904 - RNA, 22 nt, Human
gcaucuaaauaaacgugggagu

SEQ ID NO: 943905 - RNA, 22 nt, Human
cacagaggaaaggcaguuggua

SEQ ID NO: 943906 - RNA, 22 nt, Human
ugccuguguugauuacuuuguc

SEQ ID NO: 943907 - RNA, 22 nt, Human
ugaggcagccugcauuaaagag

SEQ ID NO: 943908 - RNA, 22 nt, Human
cccaggaucaccuggucaaggg

SEQ ID NO: 943909 - RNA, 23 nt, Human
uggcuaaaggcucuaguccugcu

SEQ ID NO: 943910 - RNA, 22 nt, Human
ucugucugagggagugacauuu

SEQ ID NO: 943911 - RNA, 22 nt, Human
ccaaagagcuagaauuauaggc

SEQ ID NO: 943912 - RNA, 22 nt, Human
uccuaggcaguuggugcuccau

SEQ ID NO: 943913 - RNA, 20 nt, Human
aucuucuuggccagcuugcu

SEQ ID NO: 943914 - RNA, 22 nt, Human
uuauuauugugaccugagaaug

SEQ ID NO: 943915 - RNA, 22 nt, Human
gccagagguucaacaacugucu

SEQ ID NO: 943916 - RNA, 22 nt, Human
aacagaaaucauuuagggcucu

SEQ ID NO: 943917 - RNA, 22 nt, Human
ggcaggcaaugaggaugggaag

SEQ ID NO: 943918 - RNA, 22 nt, Human
auuuuacuuugugaauauugac

SEQ ID NO: 943919 - RNA, 22 nt, Human
ccccuuccaggaagcagaaucg

SEQ ID NO: 943920 - RNA, 22 nt, Human
gcaggaugggagcuucacucug

SEQ ID NO: 943921 - RNA, 22 nt, Human
guugaaagcuuuucauuuaguu

SEQ ID NO: 943922 - RNA, 21 nt, Human
aaauacagaaacuuguuuuca

SEQ ID NO: 943923 - RNA, 22 nt, Human
ucuggccagugaaaugcagaau

SEQ ID NO: 943924 - RNA, 22 nt, Human
gccagcucagugccaggccccu

SEQ ID NO: 943925 - RNA, 22 nt, Human
cagucccaaggaggaagcaguc

SEQ ID NO: 943926 - RNA, 22 nt, Human
uaaugcaguacugauauaaaca

SEQ ID NO: 943927 - RNA, 22 nt, Human
aguguuaagagaaaauucugcu

SEQ ID NO: 943928 - RNA, 22 nt, Human
uucacagggcagcagcugagcc

SEQ ID NO: 943929 - RNA, 22 nt, Human
aaguaaauguuggagcucaaau

SEQ ID NO: 943930 - RNA, 22 nt, Human
gucaggauguuuauucuccagu

SEQ ID NO: 943931 - RNA, 22 nt, Human
acagcagcuugcgugucugguc

SEQ ID NO: 943932 - RNA, 22 nt, Human
cuuucucugugugguaaagggc

SEQ ID NO: 943933 - RNA, 22 nt, Human
aggcuccuuguucaucauccau

SEQ ID NO: 943934 - RNA, 22 nt, Human
gaaaaguaaacacuagggguca

SEQ ID NO: 943935 - RNA, 22 nt, Human
aguucuuuugugaacauaugcu

SEQ ID NO: 943936 - RNA, 22 nt, Human
ccccuuccuuccucagacagcc

SEQ ID NO: 943937 - RNA, 22 nt, Human
agcccagggaaccaggaagugg

SEQ ID NO: 943938 - RNA, 22 nt, Human
ugccaaggguaugggcaagaua

SEQ ID NO: 943939 - RNA, 22 nt, Human
uguaugcaccauuguauuaccu

SEQ ID NO: 943940 - RNA, 22 nt, Human
ugcucuccggcuuccguggccu

SEQ ID NO: 943941 - RNA, 22 nt, Human
ugagccugguugcagugucugg

SEQ ID NO: 943942 - RNA, 22 nt, Human
ccagcugauucgguggugguug

SEQ ID NO: 943943 - RNA, 22 nt, Human
acagagguaggacaugagauau

SEQ ID NO: 943944 - RNA, 22 nt, Human
ugcaggugccucuugagcuugu

SEQ ID NO: 943945 - RNA, 22 nt, Human
uguccucacaggaaugaacuuu

SEQ ID NO: 943946 - RNA, 22 nt, Human
acugagcugugacaaugcuuaa

SEQ ID NO: 943947 - RNA, 22 nt, Human
uccuccuucgggacugcuugac

SEQ ID NO: 943948 - RNA, 22 nt, Human
ggucacugcucuaaacaaaagu

SEQ ID NO: 943949 - RNA, 21 nt, Human
cucaggauggcggccuggugg

SEQ ID NO: 943950 - RNA, 22 nt, Human
ucugggaagcugguccuguucu

SEQ ID NO: 943951 - RNA, 22 nt, Human
gugucccagccccacaggccug

SEQ ID NO: 943952 - RNA, 22 nt, Human
uccaggagacacaagguacaua

SEQ ID NO: 943953 - RNA, 22 nt, Human
aauguugaggauaucagaaaau

SEQ ID NO: 943954 - RNA, 22 nt, Human
uuccuguaguugugcaauguac

SEQ ID NO: 943955 - RNA, 22 nt, Human
uguauuuucugaagauaaucaa

SEQ ID NO: 943956 - RNA, 22 nt, Human
gaggccugaggcugccuggagc

SEQ ID NO: 943957 - RNA, 22 nt, Human
uucuuguauauaaaaaucauuu

SEQ ID NO: 943958 - RNA, 22 nt, Human
uagcacauaacuuagaauaguu

SEQ ID NO: 943959 - RNA, 20 nt, Human
gccagcacagggagcaguuc

SEQ ID NO: 943960 - RNA, 22 nt, Human
guggagccaggggcuguaggua

SEQ ID NO: 943961 - RNA, 22 nt, Human
ugucagugguagacccagaggu

SEQ ID NO: 943962 - RNA, 21 nt, Human
gucaaacuugcaccagugccc

SEQ ID NO: 943963 - RNA, 22 nt, Human
uugcauaaagauuuuauugcau

SEQ ID NO: 943964 - RNA, 22 nt, Human
cugcauucauaucagauagaag

SEQ ID NO: 943965 - RNA, 22 nt, Human
uggcucagugcauucacaguaa

SEQ ID NO: 943966 - RNA, 22 nt, Human
aggguggcaccuggaagggaug

SEQ ID NO: 943967 - RNA, 22 nt, Human
ugcaauaaggaguaauaguaaa

SEQ ID NO: 943968 - RNA, 22 nt, Human
cagcucugcugggaggaugcag

SEQ ID NO: 943969 - RNA, 23 nt, Human
acagcaagaggaccagaugugag

SEQ ID NO: 943970 - RNA, 22 nt, Human
agccaugcaccuuacucuugcu

SEQ ID NO: 943971 - RNA, 17 nt, Human
auucuuugaugucucug

SEQ ID NO: 943972 - RNA, 22 nt, Human
uucauucccaagaguaaacaua

SEQ ID NO: 943973 - RNA, 22 nt, Human
aucauuccacauguaccacuag

SEQ ID NO: 943974 - RNA, 22 nt, Human
aucagcaaaaaugccuucagaa

SEQ ID NO: 943975 - RNA, 22 nt, Human
aaugaacaggugaaugucagau

SEQ ID NO: 943976 - RNA, 22 nt, Human
uuccaaagaaauugaccaagac

SEQ ID NO: 943977 - RNA, 22 nt, Human
cuuccagguccuucuugagaag

SEQ ID NO: 943978 - RNA, 22 nt, Human
cugcacagagcagggcagacac

SEQ ID NO: 943979 - RNA, 22 nt, Human
cauuugaaugagauugcuguaa

SEQ ID NO: 943980 - RNA, 22 nt, Human
ggguggaggagaacaggcccca

SEQ ID NO: 943981 - RNA, 22 nt, Human
aggcucuggcuacuacagagcu

SEQ ID NO: 943982 - RNA, 22 nt, Human
caaaaguaauggcgguuuuuac

SEQ ID NO: 943983 - RNA, 22 nt, Human
auguguauacuugugcuuacuc

SEQ ID NO: 943984 - RNA, 20 nt, Human
ugcagggcucugcuucucuc

SEQ ID NO: 943985 - RNA, 22 nt, Human
ucaugccacuuacaaaauaaug

SEQ ID NO: 943986 - RNA, 22 nt, Human
uuccauaauaaccugagagaaa

SEQ ID NO: 943987 - RNA, 23 nt, Human
ggguccagagacaggcaugggug

SEQ ID NO: 943988 - RNA, 22 nt, Human
gggcugcuuccuggggaaugcu

SEQ ID NO: 943989 - RNA, 22 nt, Human
ugaagcaggguggccagauugu

SEQ ID NO: 943990 - RNA, 22 nt, Human
cugggcaguuuuacaucauugc

SEQ ID NO: 943991 - RNA, 22 nt, Human
gcugucuguggugucagcugac

SEQ ID NO: 943992 - RNA, 22 nt, Human
accaggaggcuacacuguccca

SEQ ID NO: 943993 - RNA, 22 nt, Human
aaguggacuaauacaaggacua

SEQ ID NO: 943994 - RNA, 22 nt, Human
aauucacaaaaccagauugcuu

SEQ ID NO: 943995 - RNA, 22 nt, Human
cuggcagcguguuuaugaacau

SEQ ID NO: 943996 - RNA, 22 nt, Human
uauauuaacacccacuugccuc

SEQ ID NO: 943997 - RNA, 22 nt, Human
ugcaguggaggccgugagacag

SEQ ID NO: 943998 - RNA, 22 nt, Human
aagcaaagaguuuaguggguga

SEQ ID NO: 943999 - RNA, 22 nt, Human
cugccagcucgccacaaugaca

SEQ ID NO: 944000 - RNA, 22 nt, Human
aguguacauguuuacagcaucu

SEQ ID NO: 944001 - RNA, 22 nt, Human
cucuuccucucaugcggucaua

SEQ ID NO: 944002 - RNA, 22 nt, Human
uugcaaaagccgaggcacucca

SEQ ID NO: 944003 - RNA, 17 nt, Human
ggcagcugugugcaugc

SEQ ID NO: 944004 - RNA, 22 nt, Human
aagaguaugcaugcauguuugu

SEQ ID NO: 944005 - RNA, 22 nt, Human
gcccucagcuccuggacacaug

SEQ ID NO: 944006 - RNA, 22 nt, Human
gcagcuggucuggccuagagua

SEQ ID NO: 944007 - RNA, 22 nt, Human
agagauaugcugccuaaauuua

SEQ ID NO: 944008 - RNA, 22 nt, Human
cuggcagcucuacucagagccu

SEQ ID NO: 944009 - RNA, 23 nt, Human
aggugcagcccuggaccugcccc

SEQ ID NO: 944010 - RNA, 22 nt, Human
ucucuguacaguacaugccgug

SEQ ID NO: 944011 - RNA, 22 nt, Human
ugggggugugccagggaccucc

SEQ ID NO: 944012 - RNA, 22 nt, Human
ggcagacuguaauaggagaauu

SEQ ID NO: 944013 - RNA, 22 nt, Human
uaaaugugucuuuuuaaggccu

SEQ ID NO: 944014 - RNA, 22 nt, Human
gcuggccauucucuuugagaug

SEQ ID NO: 944015 - RNA, 22 nt, Human
aguuauauaacuaucuagaugc

SEQ ID NO: 944016 - RNA, 22 nt, Human
ucaggggacuuaggagagaagu

SEQ ID NO: 944017 - RNA, 22 nt, Human
uucuucaacaaggacacuguua

SEQ ID NO: 944018 - RNA, 22 nt, Human
ugaggcagugcugggaagccug

SEQ ID NO: 944019 - RNA, 22 nt, Human
ggccuguguccuccuugcccug

SEQ ID NO: 944020 - RNA, 22 nt, Human
acuggaagccaguugacaauca

SEQ ID NO: 944021 - RNA, 22 nt, Human
uauuccagguauucuucaagag

SEQ ID NO: 944022 - RNA, 22 nt, Human
cagagguauugcaaaagccuag

SEQ ID NO: 944023 - RNA, 22 nt, Human
uuuaggauauuaauguucagag

SEQ ID NO: 944024 - RNA, 22 nt, Human
uuauuagagugcuuugagaaag

SEQ ID NO: 944025 - RNA, 22 nt, Human
ucuggccuuaucuguccaagcc

SEQ ID NO: 944026 - RNA, 22 nt, Human
aucuucucaagcagcauccugu

SEQ ID NO: 944027 - RNA, 19 nt, Human
ugcuagaaauucugugacu

SEQ ID NO: 944028 - RNA, 22 nt, Human
ugagcuuccucccugcauccau

SEQ ID NO: 944029 - RNA, 22 nt, Human
aggcagacaaggacacaguggg

SEQ ID NO: 944030 - RNA, 22 nt, Human
ucuuguuacaguuuauuacaug

SEQ ID NO: 944031 - RNA, 22 nt, Human
aaagaacagauguguggugcau

SEQ ID NO: 944032 - RNA, 22 nt, Human
cagcuuucaucagugacacuca

SEQ ID NO: 944033 - RNA, 22 nt, Human
uccuggccaggaugaccuaaca

SEQ ID NO: 944034 - RNA, 22 nt, Human
ggcucaggacugcagcguagag

SEQ ID NO: 944035 - RNA, 22 nt, Human
cucugggaccauggcaagugcg

SEQ ID NO: 944036 - RNA, 22 nt, Human
ugaggccagucucaucacaggc

SEQ ID NO: 944037 - RNA, 22 nt, Human
uacauuuauaaggcuucucugu

SEQ ID NO: 944038 - RNA, 22 nt, Human
ggacuggccggcgcugaggccc

SEQ ID NO: 944039 - RNA, 22 nt, Human
gccuggcugcuagccagaggca

SEQ ID NO: 944040 - RNA, 22 nt, Human
ccuccaaguuugacucaggaca

SEQ ID NO: 944041 - RNA, 22 nt, Human
ugaagggggagauauaugugug

SEQ ID NO: 944042 - RNA, 22 nt, Human
uauuggcagcaugagcuccugg

SEQ ID NO: 944043 - RNA, 22 nt, Human
uuccagagcaguuuucagauca

SEQ ID NO: 944044 - RNA, 22 nt, Human
gagacauggcaaaagcacuggu

SEQ ID NO: 944045 - RNA, 17 nt, Human
uuucuccuuccaucuca

SEQ ID NO: 944046 - RNA, 21 nt, Human
gcagccacagccaccaagcua

SEQ ID NO: 944047 - RNA, 22 nt, Human
ugugaaagcaagucuaguucuc

SEQ ID NO: 944048 - RNA, 22 nt, Human
ucccagccuuccuuguggugaa

SEQ ID NO: 944049 - RNA, 22 nt, Human
cccuggaggcggauguugcagu

SEQ ID NO: 944050 - RNA, 22 nt, Human
gcagaggcuccauuuuacagau

SEQ ID NO: 944051 - RNA, 22 nt, Human
aggcugcuucagcugcagggag

SEQ ID NO: 944052 - RNA, 20 nt, Human
ucugaggcugagcucuacuu

SEQ ID NO: 944053 - RNA, 22 nt, Human
cucccagagagcaggugggccg

SEQ ID NO: 944054 - RNA, 22 nt, Human
cugggagcccgcguccuggugg

SEQ ID NO: 944055 - RNA, 22 nt, Human
ccacagggacuguuaaaacccu

SEQ ID NO: 944056 - RNA, 22 nt, Human
gcccugcugucuucagaguaua

SEQ ID NO: 944057 - RNA, 23 nt, Human
acuauaaaguuguucugauuuac

SEQ ID NO: 944058 - RNA, 22 nt, Human
agguaggggguuugggaacugc

SEQ ID NO: 944059 - RNA, 22 nt, Human
auaugcacacucugcccacaga

SEQ ID NO: 944060 - RNA, 22 nt, Human
cccagccagccucuucccauau

SEQ ID NO: 944061 - RNA, 22 nt, Human
ucugagcccucuuuugcagccc

SEQ ID NO: 944062 - RNA, 22 nt, Human
ggcuuugccuggaauuuccuug

SEQ ID NO: 944063 - RNA, 22 nt, Human
guuucuaugguuuauauuacug

SEQ ID NO: 944064 - RNA, 22 nt, Human
aacauauaaacucuuaaguuca

SEQ ID NO: 944065 - RNA, 22 nt, Human
uucuucaaugugcccuguuuuc

SEQ ID NO: 944066 - RNA, 22 nt, Human
uucauucuugggaucagagagu

SEQ ID NO: 944067 - RNA, 22 nt, Human
gcuggcauuacaggagagaacc

SEQ ID NO: 944068 - RNA, 19 nt, Human
ugcucaggccaaggagccc

SEQ ID NO: 944069 - RNA, 22 nt, Human
uggcaguccccugugccuggaa

SEQ ID NO: 944070 - RNA, 22 nt, Human
ugcucuggaguggcuugugcac

SEQ ID NO: 944071 - RNA, 18 nt, Human
uucaccagugugaugggu

SEQ ID NO: 944072 - RNA, 22 nt, Human
gcucugagauugagccuuuggu

SEQ ID NO: 944073 - RNA, 22 nt, Human
auguuuuugagauacaaacaga

SEQ ID NO: 944074 - RNA, 22 nt, Human
ccugggcucuauccugacccag

SEQ ID NO: 944075 - RNA, 22 nt, Human
ugcagaaggaggaggaaaucca

SEQ ID NO: 944076 - RNA, 22 nt, Human
auccuugagccaaugacugauu

SEQ ID NO: 944077 - RNA, 22 nt, Human
cccugcaggggaccugcagccu

SEQ ID NO: 944078 - RNA, 22 nt, Human
gcuccuggcauccugcuuuuaa

SEQ ID NO: 944079 - RNA, 22 nt, Human
uccaggaguuugaccugugggc

SEQ ID NO: 944080 - RNA, 22 nt, Human
ucauggcacuuagcacaguccu

SEQ ID NO: 944081 - RNA, 22 nt, Human
gagcagggccacuucuguaccu

SEQ ID NO: 944082 - RNA, 22 nt, Human
ggaggagacccugugucaguuu

SEQ ID NO: 944083 - RNA, 22 nt, Human
agcccaggaaucugcaucuuga

SEQ ID NO: 944084 - RNA, 22 nt, Human
ucugccuggaugauggcagggc

SEQ ID NO: 944085 - RNA, 22 nt, Human
gagggacagcuaaagagaaauu

SEQ ID NO: 944086 - RNA, 22 nt, Human
uauugaugcuuggauugggcca

SEQ ID NO: 944087 - RNA, 22 nt, Human
cagugucuuauuuguagcucag

SEQ ID NO: 944088 - RNA, 23 nt, Human
gagcugggauacaggcuuacugc

SEQ ID NO: 944089 - RNA, 22 nt, Human
ugucuguaagguguuuauguua

SEQ ID NO: 944090 - RNA, 22 nt, Human
ugcugcuguauccuuaguguca

SEQ ID NO: 944091 - RNA, 22 nt, Human
ugguaucagagccaucuguauu

SEQ ID NO: 944092 - RNA, 22 nt, Human
guccucuggccuuucccaggac

SEQ ID NO: 944093 - RNA, 22 nt, Human
uccaggcccauggagcagagcu

SEQ ID NO: 944094 - RNA, 22 nt, Human
ugaggcaggaauggggaaaagu

SEQ ID NO: 944095 - RNA, 18 nt, Human
guccugagcucugcugua

SEQ ID NO: 944096 - RNA, 21 nt, Human
cccuguguuccacagcagaca

SEQ ID NO: 944097 - RNA, 22 nt, Human
ucugagggugggagaaggagcu

SEQ ID NO: 944098 - RNA, 23 nt, Human
ggccuccuggucuaggcuagacu

SEQ ID NO: 944099 - RNA, 18 nt, Human
aaacuggcuuggccugug

SEQ ID NO: 944100 - RNA, 20 nt, Human
agcugccccugggcacugcc

SEQ ID NO: 944101 - RNA, 22 nt, Human
aggggagccccugguccuggug

SEQ ID NO: 944102 - RNA, 19 nt, Human
uggcuuccaucucucucau

SEQ ID NO: 944103 - RNA, 22 nt, Human
uuuuaucugcuucauuaguuga

SEQ ID NO: 944104 - RNA, 22 nt, Human
auggcagccugagcagaggaau

SEQ ID NO: 944105 - RNA, 22 nt, Human
ucuguaucacccguucccagaa

SEQ ID NO: 944106 - RNA, 22 nt, Human
ucacacgugagguucuauccug

SEQ ID NO: 944107 - RNA, 22 nt, Human
aagcugccauagaacgagaggu

SEQ ID NO: 944108 - RNA, 22 nt, Human
cuccuggcucugccacuuacua

SEQ ID NO: 944109 - RNA, 22 nt, Human
ucagaagucccuugcaucuuag

SEQ ID NO: 944110 - RNA, 22 nt, Human
agcugccagaugacagugcuau

SEQ ID NO: 944111 - RNA, 20 nt, Human
uccugggguaagccaugguc

SEQ ID NO: 944112 - RNA, 22 nt, Human
ggcucuggcaaggggaggcuac

SEQ ID NO: 944113 - RNA, 22 nt, Human
uuagccaugugggaaaaacagc

SEQ ID NO: 944114 - RNA, 22 nt, Human
gccuucugauaucucuuggcau

SEQ ID NO: 944115 - RNA, 22 nt, Human
gggcuguggagccgcgagggcu

SEQ ID NO: 944116 - RNA, 22 nt, Human
caggugggccaugaaaaaugac

SEQ ID NO: 944117 - RNA, 22 nt, Human
ucugggaagcugcgugccuguu

SEQ ID NO: 944118 - RNA, 22 nt, Human
gugcucuccuggcugcccugac

SEQ ID NO: 944119 - RNA, 22 nt, Human
aaccaaauggaugguaagaggg

SEQ ID NO: 944120 - RNA, 22 nt, Human
auguaagguucagaguauguga

SEQ ID NO: 944121 - RNA, 22 nt, Human
agcuguguagggaaucagagaa

SEQ ID NO: 944122 - RNA, 22 nt, Human
aaggguggauuucugagcucua

SEQ ID NO: 944123 - RNA, 22 nt, Human
uguuggcaucucugagagaguu

SEQ ID NO: 944124 - RNA, 22 nt, Human
uaucuguuggcuccuaguugua

SEQ ID NO: 944125 - RNA, 17 nt, Human
cagacagauauccuggg

SEQ ID NO: 944126 - RNA, 22 nt, Human
caggcagcucugcuuuuccuaa

SEQ ID NO: 944127 - RNA, 22 nt, Human
ccucacagggccaggccccuca

SEQ ID NO: 944128 - RNA, 22 nt, Human
augcagagacagauguggcaug

SEQ ID NO: 944129 - RNA, 22 nt, Human
aucacuguguauguauaugcag

SEQ ID NO: 944130 - RNA, 22 nt, Human
gaggagcacaugaggcugaggg

SEQ ID NO: 944131 - RNA, 19 nt, Human
ugacaggcuguugccuuga

SEQ ID NO: 944132 - RNA, 22 nt, Human
uacuuuagaaggaaauaaguuc

SEQ ID NO: 944133 - RNA, 22 nt, Human
caugucuguguacacaugcaca

SEQ ID NO: 944134 - RNA, 22 nt, Human
agccuggagguaaugaggaaac

SEQ ID NO: 944135 - RNA, 22 nt, Human
gugcauugcgaugcagacgacc

SEQ ID NO: 944136 - RNA, 22 nt, Human
gccucugcggagcuguacauca

SEQ ID NO: 944137 - RNA, 22 nt, Human
gcucugaggcugggagcacucu

SEQ ID NO: 944138 - RNA, 22 nt, Human
ucuguaaaacuucuuuguaaau

SEQ ID NO: 944139 - RNA, 22 nt, Human
aaggcugaggagggccugcagg

SEQ ID NO: 944140 - RNA, 22 nt, Human
ucuggccacccgaggccccugc

SEQ ID NO: 944141 - RNA, 22 nt, Human
caaaguuaucaacugcaacauu

SEQ ID NO: 944142 - RNA, 22 nt, Human
uuauuauaaugagggauaaaaa

SEQ ID NO: 944143 - RNA, 22 nt, Human
uuccucaugggguuccuucaga

SEQ ID NO: 944144 - RNA, 22 nt, Human
agucccagcucagaaccacuag

SEQ ID NO: 944145 - RNA, 22 nt, Human
ucuuuggaucccaacuggcugg

SEQ ID NO: 944146 - RNA, 22 nt, Human
cagaggcuguguaggcagacug

SEQ ID NO: 944147 - RNA, 22 nt, Human
uuucccagagguaugaauaagu

SEQ ID NO: 944148 - RNA, 22 nt, Human
uaaugaauaaacuugagaguca

SEQ ID NO: 944149 - RNA, 22 nt, Human
acauguggucaaucuguguagg

SEQ ID NO: 944150 - RNA, 22 nt, Human
uaauuauucuagucacauagca

SEQ ID NO: 944151 - RNA, 22 nt, Human
agcucccagucuccucuccaug

SEQ ID NO: 944152 - RNA, 22 nt, Human
ucuggccauggcaagccgagug

SEQ ID NO: 944153 - RNA, 22 nt, Human
uuuacagagaauguacauaaag

SEQ ID NO: 944154 - RNA, 22 nt, Human
cacagcagaaauaugaaggcag

SEQ ID NO: 944155 - RNA, 22 nt, Human
cagagccaugguaugggcuugu

SEQ ID NO: 944156 - RNA, 22 nt, Human
cgcaccacugaauuccagccug

SEQ ID NO: 944157 - RNA, 20 nt, Human
ucucaggccccaguuuucuu

SEQ ID NO: 944158 - RNA, 22 nt, Human
aaacuguaagagaauaaacuac

SEQ ID NO: 944159 - RNA, 22 nt, Human
acagaauuaucaggaaauguua

SEQ ID NO: 944160 - RNA, 22 nt, Human
ugcccaaguccuccaccgaggu

SEQ ID NO: 944161 - RNA, 22 nt, Human
aaaugcaucagcucauaagaga

SEQ ID NO: 944162 - RNA, 22 nt, Human
ugcaguggaaucuggagagcag

SEQ ID NO: 944163 - RNA, 22 nt, Human
gcccugucggaacugcgaccuc

SEQ ID NO: 944164 - RNA, 22 nt, Human
uaaauuuacccaaggaacaugu

SEQ ID NO: 944165 - RNA, 22 nt, Human
cagcugagcucccaggccauca

SEQ ID NO: 944166 - RNA, 22 nt, Human
uagaggugacacugagaccaua

SEQ ID NO: 944167 - RNA, 22 nt, Human
ccagcugggauuaagggaaaau

SEQ ID NO: 944168 - RNA, 22 nt, Human
guaguucugcagugucaccuga

SEQ ID NO: 944169 - RNA, 22 nt, Human
ggucucaggagacuggagagca

SEQ ID NO: 944170 - RNA, 23 nt, Human
gggggcugguugacucucugcag

SEQ ID NO: 944171 - RNA, 22 nt, Human
gguggccuuucaguggaucagg

SEQ ID NO: 944172 - RNA, 20 nt, Human
acaauuuccucacuauaugc

SEQ ID NO: 944173 - RNA, 22 nt, Human
ucuccuggucaccucagaaguc

SEQ ID NO: 944174 - RNA, 22 nt, Human
aguauucuggaauucuauguga

SEQ ID NO: 944175 - RNA, 22 nt, Human
ggggcagcuaccggaaguaggg

SEQ ID NO: 944176 - RNA, 22 nt, Human
gucagaggaauggaugagugau

SEQ ID NO: 944177 - RNA, 21 nt, Human
aguucauacugaguaacaaaa

SEQ ID NO: 944178 - RNA, 22 nt, Human
gggcagcugccccucucugggc

SEQ ID NO: 944179 - RNA, 22 nt, Human
uaacagaaguuguucauugugg

SEQ ID NO: 944180 - RNA, 23 nt, Human
agcuggaggcugucuacucccaa

SEQ ID NO: 944181 - RNA, 22 nt, Human
aauggacaggagagcauaguca

SEQ ID NO: 944182 - RNA, 22 nt, Human
gcauucaucuuccuccaugcag

SEQ ID NO: 944183 - RNA, 22 nt, Human
auccugggcagugugucacucu

SEQ ID NO: 944184 - RNA, 22 nt, Human
augaaauaucuugaagaaauuc

SEQ ID NO: 944185 - RNA, 22 nt, Human
gggcagcucucacagcagccaa

SEQ ID NO: 944186 - RNA, 22 nt, Human
ucaagugcuugugagguauuug

SEQ ID NO: 944187 - RNA, 22 nt, Human
ccugauggagcccugcugcaug

SEQ ID NO: 944188 - RNA, 22 nt, Human
augaguaaaaccacuauuuaca

SEQ ID NO: 944189 - RNA, 22 nt, Human
ugaaggaaugagggaguggguc

SEQ ID NO: 944190 - RNA, 22 nt, Human
cauuauguucaguagcuuaaaa

SEQ ID NO: 944191 - RNA, 22 nt, Human
uaucuuugcaaauaucucuaag

SEQ ID NO: 944192 - RNA, 22 nt, Human
uucaugaaaguguaucuugugg

SEQ ID NO: 944193 - RNA, 22 nt, Human
uuggagguuugaaaauaugugu

SEQ ID NO: 944194 - RNA, 22 nt, Human
cacugcaguuccccagugcgca

SEQ ID NO: 944195 - RNA, 22 nt, Human
ccagcugaggcagccacacagg

SEQ ID NO: 944196 - RNA, 22 nt, Human
ggaagggcaaaagagaugaacu

SEQ ID NO: 944197 - RNA, 22 nt, Human
cugcccuggucccauggcugau

SEQ ID NO: 944198 - RNA, 22 nt, Human
aaggagagguuguccguguugu

SEQ ID NO: 944199 - RNA, 19 nt, Human
ugccuggacaaaugugggg

SEQ ID NO: 944200 - RNA, 22 nt, Human
cagagccagaacuagaccuugu

SEQ ID NO: 944201 - RNA, 23 nt, Human
ucuguucaaggcuuucuccuuga

SEQ ID NO: 944202 - RNA, 22 nt, Human
acaaaguaggucaucaaagcuc

SEQ ID NO: 944203 - RNA, 22 nt, Human
acauuguuugagaauacagaug

SEQ ID NO: 944204 - RNA, 22 nt, Human
ggagaaggaagaaagcuacuau

SEQ ID NO: 944205 - RNA, 22 nt, Human
gagagcuggauucuggauaggu

SEQ ID NO: 944206 - RNA, 22 nt, Human
ucaaugauuagaguuuagugug

SEQ ID NO: 944207 - RNA, 23 nt, Human
aagcugccuucgcaguuggucug

SEQ ID NO: 944208 - RNA, 22 nt, Human
gucaggaugggcagccaaacua

SEQ ID NO: 944209 - RNA, 22 nt, Human
uagaaaguaaaucaguuuuauu

SEQ ID NO: 944210 - RNA, 22 nt, Human
ccuggagcacagcccaguccca

SEQ ID NO: 944211 - RNA, 22 nt, Human
uggguucagaucccagcucugu

SEQ ID NO: 944212 - RNA, 22 nt, Human
ugugaaaagcaggcuacuuucu

SEQ ID NO: 944213 - RNA, 22 nt, Human
uccaggaguccuggguggcccc

SEQ ID NO: 944214 - RNA, 22 nt, Human
caugaagcacagcucucuuuuu

SEQ ID NO: 944215 - RNA, 22 nt, Human
cagacaggaauucuggcguggu

SEQ ID NO: 944216 - RNA, 22 nt, Human
agagggcaaguguaguccagua

SEQ ID NO: 944217 - RNA, 22 nt, Human
aggcagcuggaggcagagacua

SEQ ID NO: 944218 - RNA, 22 nt, Human
caggggcuguuugccucaggcc

SEQ ID NO: 944219 - RNA, 22 nt, Human
uggcacaugguaagugcuuaac

SEQ ID NO: 944220 - RNA, 17 nt, Human
gccucugcuugugucau

SEQ ID NO: 944221 - RNA, 19 nt, Human
ccauggcaaugaucugaug

SEQ ID NO: 944222 - RNA, 22 nt, Human
ggcagccauggacacuggcuag

SEQ ID NO: 944223 - RNA, 22 nt, Human
ucauuacagagauauaaucuac

SEQ ID NO: 944224 - RNA, 22 nt, Human
acagaauauugguuacuguugc

SEQ ID NO: 944225 - RNA, 22 nt, Human
ggcaagcauaaccuguacagcc

SEQ ID NO: 944226 - RNA, 22 nt, Human
cacuacuugaaagaauuacaga

SEQ ID NO: 944227 - RNA, 22 nt, Human
aggguggagggagucccugagc

SEQ ID NO: 944228 - RNA, 22 nt, Human
cucacagcagcucugcgagaua

SEQ ID NO: 944229 - RNA, 22 nt, Human
ggcagagaugugggucagaauc

SEQ ID NO: 944230 - RNA, 22 nt, Human
cuggccuggucuggccucucca

SEQ ID NO: 944231 - RNA, 22 nt, Human
aacaugcucuguuucuuggaug

SEQ ID NO: 944232 - RNA, 22 nt, Human
uggggaggacgggcgccuuccu

SEQ ID NO: 944233 - RNA, 22 nt, Human
acauuuaaugauccuacuguga

SEQ ID NO: 944234 - RNA, 22 nt, Human
uagugcuuuaaguuuacagaga

SEQ ID NO: 944235 - RNA, 22 nt, Human
ucaaagucuaucuguaauuacu

SEQ ID NO: 944236 - RNA, 22 nt, Human
ucagucuuugcuuaugacaaua

SEQ ID NO: 944237 - RNA, 22 nt, Human
agucagcagccuggccaggaga

SEQ ID NO: 944238 - RNA, 22 nt, Human
ugucuuccucuuggcuugagcu

SEQ ID NO: 944239 - RNA, 22 nt, Human
aacauucaccucuaccuccuuc

SEQ ID NO: 944240 - RNA, 22 nt, Human
agaaggaguguacaggucaugc

SEQ ID NO: 944241 - RNA, 22 nt, Human
ccagugggugcugggcucugcc

SEQ ID NO: 944242 - RNA, 22 nt, Human
ccaaaugugccuguuucaacaa

SEQ ID NO: 944243 - RNA, 22 nt, Human
gaagcagcugccagagaugucu

SEQ ID NO: 944244 - RNA, 22 nt, Human
uccacauccauugcuugacuuu

SEQ ID NO: 944245 - RNA, 22 nt, Human
agacccugcaccucucgugggc

SEQ ID NO: 944246 - RNA, 22 nt, Human
aucugccucuucuucauugcga

SEQ ID NO: 944247 - RNA, 22 nt, Human
auguuucaccaguuuuauaaga

SEQ ID NO: 944248 - RNA, 22 nt, Human
cugugucuguggaauagcgaau

SEQ ID NO: 944249 - RNA, 22 nt, Human
acaccuuugccccaagucauag

SEQ ID NO: 944250 - RNA, 22 nt, Human
gagcuggcaggaggcuccccga

SEQ ID NO: 944251 - RNA, 22 nt, Human
aggcagcagucaugaggaaaga

SEQ ID NO: 944252 - RNA, 22 nt, Human
accaaggaagagauucucaguu

SEQ ID NO: 944253 - RNA, 22 nt, Human
ugcaacagacuuuauuaacucu

SEQ ID NO: 944254 - RNA, 22 nt, Human
uucuuaagcaccuaaaaagugg

SEQ ID NO: 944255 - RNA, 22 nt, Human
ugugucuguguauacacggcau

SEQ ID NO: 944256 - RNA, 20 nt, Human
ccugucuccucuuaccuggc

SEQ ID NO: 944257 - RNA, 22 nt, Human
caggaugagguagaggcagaua

SEQ ID NO: 944258 - RNA, 22 nt, Human
cugccagccaggccagguaggc

SEQ ID NO: 944259 - RNA, 21 nt, Human
uuugaauagaaauagugcuua

SEQ ID NO: 944260 - RNA, 22 nt, Human
ugcucugugguccaagauggcu

SEQ ID NO: 944261 - RNA, 22 nt, Human
guuuuaguggguggccacugau

SEQ ID NO: 944262 - RNA, 22 nt, Human
gcugccugauguccagcaggac

SEQ ID NO: 944263 - RNA, 22 nt, Human
uccaugaguuugaggaaaagag

SEQ ID NO: 944264 - RNA, 20 nt, Human
ccaauaaagcucuauaggga

SEQ ID NO: 944265 - RNA, 22 nt, Human
uaucuguuguccaugcagaaag

SEQ ID NO: 944266 - RNA, 22 nt, Human
gcacugugcuagaagccagggg

SEQ ID NO: 944267 - RNA, 22 nt, Human
ggucaggguuccagguaucuuc

SEQ ID NO: 944268 - RNA, 22 nt, Human
agagcuggcugguagcccugau

SEQ ID NO: 944269 - RNA, 22 nt, Human
cuggccaacuugcuuguuggca

SEQ ID NO: 944270 - RNA, 22 nt, Human
ucugagaggcagaccuuccuaa

SEQ ID NO: 944271 - RNA, 22 nt, Human
guagcuuaugaaaugugagggg

SEQ ID NO: 944272 - RNA, 22 nt, Human
aggccagcuuccagaggggcag

SEQ ID NO: 944273 - RNA, 22 nt, Human
uuugauucuguaaaauaacagg

SEQ ID NO: 944274 - RNA, 22 nt, Human
caaauccagaucccagucguag

SEQ ID NO: 944275 - RNA, 22 nt, Human
agaaaugugagccccuuaucaa

SEQ ID NO: 944276 - RNA, 22 nt, Human
aggcagcauuugaauccagguc

SEQ ID NO: 944277 - RNA, 22 nt, Human
cuaggccacuugcucucaugga

SEQ ID NO: 944278 - RNA, 22 nt, Human
gcaggcaguuauuuaguagaau

SEQ ID NO: 944279 - RNA, 22 nt, Human
gguuugcaugugauguugggca

SEQ ID NO: 944280 - RNA, 23 nt, Human
acuuuauugaccccaggucaguu

SEQ ID NO: 944281 - RNA, 18 nt, Human
cuuguucuucucuuggcg

SEQ ID NO: 944282 - RNA, 22 nt, Human
acagaauacuacagacugguua

SEQ ID NO: 944283 - RNA, 22 nt, Human
cauuuguauagugcuuagacca

SEQ ID NO: 944284 - RNA, 22 nt, Human
ucauuuguaccauuuuuuaaga

SEQ ID NO: 944285 - RNA, 22 nt, Human
uccuggccuagcucacccugga

SEQ ID NO: 944286 - RNA, 22 nt, Human
cuggcagucugccucuucacug

SEQ ID NO: 944287 - RNA, 22 nt, Human
uuuccucuuugugacacagcug

SEQ ID NO: 944288 - RNA, 22 nt, Human
gucauucuuaacaacucaguag

SEQ ID NO: 944289 - RNA, 22 nt, Human
aguuauauuccauagauucaga

SEQ ID NO: 944290 - RNA, 22 nt, Human
cuggggcucacuuuggucaggc

SEQ ID NO: 944291 - RNA, 22 nt, Human
aagcacaaugaacaucuuagau

SEQ ID NO: 944292 - RNA, 22 nt, Human
ucucagagaagugaugagcaau

SEQ ID NO: 944293 - RNA, 22 nt, Human
ugcuucuggaaacaguggcugu

SEQ ID NO: 944294 - RNA, 22 nt, Human
cccaggagaucuggaucucguc

SEQ ID NO: 944295 - RNA, 22 nt, Human
gcugggaggaucucucccuguc

SEQ ID NO: 944296 - RNA, 22 nt, Human
uuugcauugcauuaaguauucu

SEQ ID NO: 944297 - RNA, 22 nt, Human
gcaguccucucauuggccuccu

SEQ ID NO: 944298 - RNA, 22 nt, Human
ccaggagaugggagcaucuaaa

SEQ ID NO: 944299 - RNA, 18 nt, Human
cugaggcuggcaggagcc

SEQ ID NO: 944300 - RNA, 21 nt, Human
gggccuggcugcgcaggacgg

SEQ ID NO: 944301 - RNA, 22 nt, Human
auacuguuucucuucuacauga

SEQ ID NO: 944302 - RNA, 22 nt, Human
ugucuuaagaaauugcauuugu

SEQ ID NO: 944303 - RNA, 22 nt, Human
guuuaauaauguugaauuacua

SEQ ID NO: 944304 - RNA, 22 nt, Human
guccucuguguaggcugcagac

SEQ ID NO: 944305 - RNA, 22 nt, Human
uguuaucugagcaacgucgacg

SEQ ID NO: 944306 - RNA, 22 nt, Human
uggagcuggaauuucugggccu

SEQ ID NO: 944307 - RNA, 22 nt, Human
gccugagauucccggagccgug

SEQ ID NO: 944308 - RNA, 22 nt, Human
aucuuucagggccauuuguauu

SEQ ID NO: 944309 - RNA, 22 nt, Human
ucuuugcaugugcuucuuggcc

SEQ ID NO: 944310 - RNA, 22 nt, Human
agcugcccagcuaggaagaagg

SEQ ID NO: 944311 - RNA, 22 nt, Human
cugccacuuacuaggcauggug

SEQ ID NO: 944312 - RNA, 22 nt, Human
ucucaggaauagaguggcagca

SEQ ID NO: 944313 - RNA, 22 nt, Human
ucugagagccucuagccuaagu

SEQ ID NO: 944314 - RNA, 22 nt, Human
uauugacaauaggcaacugagg

SEQ ID NO: 944315 - RNA, 22 nt, Human
aguugaaauuagaguccuggcu

SEQ ID NO: 944316 - RNA, 22 nt, Human
uauccagggaguuuuagggcuu

SEQ ID NO: 944317 - RNA, 22 nt, Human
auucagcauaaucaguagcuug

SEQ ID NO: 944318 - RNA, 22 nt, Human
ccuggcagcgugccgagcugcg

SEQ ID NO: 944319 - RNA, 22 nt, Human
gugugcaguagagaaagagcag

SEQ ID NO: 944320 - RNA, 19 nt, Human
uauggcaggccgaggcacu

SEQ ID NO: 944321 - RNA, 22 nt, Human
ugcagcucauugcuggggucug

SEQ ID NO: 944322 - RNA, 22 nt, Human
ugggagccauuuuagaggcugc

SEQ ID NO: 944323 - RNA, 22 nt, Human
ggagcagagcucuucaucugca

SEQ ID NO: 944324 - RNA, 20 nt, Human
cccaggagugagcagcuuua

SEQ ID NO: 944325 - RNA, 22 nt, Human
gcccaggaguuggaggcugcag

SEQ ID NO: 944326 - RNA, 22 nt, Human
ggccucacccaucggugccuuu

SEQ ID NO: 944327 - RNA, 22 nt, Human
cugccaggacugacgucuucag

SEQ ID NO: 944328 - RNA, 22 nt, Human
cuugaaagcacuccuuugacug

SEQ ID NO: 944329 - RNA, 22 nt, Human
ucuggccugggccugccggugc

SEQ ID NO: 944330 - RNA, 22 nt, Human
cugcagagguugguucuaagau

SEQ ID NO: 944331 - RNA, 22 nt, Human
uugaauaauuaauuacacucag

SEQ ID NO: 944332 - RNA, 22 nt, Human
ugccugggccuucccaccucug

SEQ ID NO: 944333 - RNA, 22 nt, Human
cagagccagcaguggggacagg

SEQ ID NO: 944334 - RNA, 23 nt, Human
agcccagcagagaaccuaggucc

SEQ ID NO: 944335 - RNA, 22 nt, Human
ggcaaaguuuucaucucauaac

SEQ ID NO: 944336 - RNA, 22 nt, Human
gagccuggauugucaccgacuu

SEQ ID NO: 944337 - RNA, 22 nt, Human
auugacaaauggauguugacau

SEQ ID NO: 944338 - RNA, 22 nt, Human
caggccugauacacugaacucu

SEQ ID NO: 944339 - RNA, 22 nt, Human
ucuggcucaggagcuguguuca

SEQ ID NO: 944340 - RNA, 22 nt, Human
gaggccugucgcuaggccucug

SEQ ID NO: 944341 - RNA, 22 nt, Human
uuuuuuauaucaacugaagucu

SEQ ID NO: 944342 - RNA, 22 nt, Human
acagcagcaauagcagugacau

SEQ ID NO: 944343 - RNA, 22 nt, Human
cagcaccaggcagaccuggagc

SEQ ID NO: 944344 - RNA, 22 nt, Human
ugcauguguuugccacagugag

SEQ ID NO: 944345 - RNA, 22 nt, Human
uuugaaagccuggcuuuucucu

SEQ ID NO: 944346 - RNA, 22 nt, Human
guguccagagaaacucacagcu

SEQ ID NO: 944347 - RNA, 22 nt, Human
guucuucaggccauccucccag

SEQ ID NO: 944348 - RNA, 22 nt, Human
cugggccagaccuuguggucuu

SEQ ID NO: 944349 - RNA, 22 nt, Human
auggccaaauaacagcuugcau

SEQ ID NO: 944350 - RNA, 22 nt, Human
ggaggcaggaaagacagguuca

SEQ ID NO: 944351 - RNA, 22 nt, Human
augguacaauguguuuguuagg

SEQ ID NO: 944352 - RNA, 22 nt, Human
cugggcuguaauguggcacuga

SEQ ID NO: 944353 - RNA, 22 nt, Human
agaagauuuagguugacgcuau

SEQ ID NO: 944354 - RNA, 22 nt, Human
gugcuuuccauccucccugcug

SEQ ID NO: 944355 - RNA, 21 nt, Human
gagugucuaauccaggcuguc

SEQ ID NO: 944356 - RNA, 22 nt, Human
cugaagaggacgcagcagcaag

SEQ ID NO: 944357 - RNA, 22 nt, Human
gggcagcugcagggauggugac

SEQ ID NO: 944358 - RNA, 22 nt, Human
agcccucauggaacagcuccua

SEQ ID NO: 944359 - RNA, 22 nt, Human
uccaggagcauccaggugaagc

SEQ ID NO: 944360 - RNA, 22 nt, Human
uguucuucuagauugccuuuua

SEQ ID NO: 944361 - RNA, 22 nt, Human
uagaauauacacuacagcuuaa

SEQ ID NO: 944362 - RNA, 22 nt, Human
acagcagccuuguugguuucga

SEQ ID NO: 944363 - RNA, 22 nt, Human
gacaugcaacaauuuggcauuu

SEQ ID NO: 944364 - RNA, 21 nt, Human
acccuggguucuccauacccu

SEQ ID NO: 944365 - RNA, 20 nt, Human
gccaggagggugugaugagc

SEQ ID NO: 944366 - RNA, 22 nt, Human
guuauauauaguauuucucuga

SEQ ID NO: 944367 - RNA, 22 nt, Human
ccagagcuucggggcggcugua

SEQ ID NO: 944368 - RNA, 22 nt, Human
aaaauacacauacuaggggaaa

SEQ ID NO: 944369 - RNA, 22 nt, Human
ccucugaguccucccugguugc

SEQ ID NO: 944370 - RNA, 22 nt, Human
cccuggugguacggcacuggca

SEQ ID NO: 944371 - RNA, 22 nt, Human
gcaccuuucuauauucaguggc

SEQ ID NO: 944372 - RNA, 22 nt, Human
ggcccacacugacagcugagcu

SEQ ID NO: 944373 - RNA, 22 nt, Human
gguuggaggugggaauagcuag

SEQ ID NO: 944374 - RNA, 22 nt, Human
uuaguuaggaaacaaaguuguu

SEQ ID NO: 944375 - RNA, 22 nt, Human
aguaaugugccugaaauacuug

SEQ ID NO: 944376 - RNA, 22 nt, Human
cugaggccccucuugugagcau

SEQ ID NO: 944377 - RNA, 22 nt, Human
cucagcuggcaauucuggcucc

SEQ ID NO: 944378 - RNA, 22 nt, Human
caggagagcccggguccgggcu

SEQ ID NO: 944379 - RNA, 22 nt, Human
gcauuuguacaaaaugcaguag

SEQ ID NO: 944380 - RNA, 22 nt, Human
cagagcagguaucuuuggugaa

SEQ ID NO: 944381 - RNA, 19 nt, Human
uggcagggagugauauuag

SEQ ID NO: 944382 - RNA, 22 nt, Human
uugcaaaggggaauaaagcaau

SEQ ID NO: 944383 - RNA, 22 nt, Human
ugagguggcuagggaggcacuc

SEQ ID NO: 944384 - RNA, 22 nt, Human
acauucuagauauguuauauuu

SEQ ID NO: 944385 - RNA, 22 nt, Human
uauuucagcacaugggauaggu

SEQ ID NO: 944386 - RNA, 22 nt, Human
acaaaugcaaguuuuaugucaa

SEQ ID NO: 944387 - RNA, 22 nt, Human
agagacugcgugucagcgcugg

SEQ ID NO: 944388 - RNA, 22 nt, Human
acuaaauaguuuugacagaaca

SEQ ID NO: 944389 - RNA, 22 nt, Human
gcugcccagacauugaaucagg

SEQ ID NO: 944390 - RNA, 22 nt, Human
cugggagacaagagagggcuga

SEQ ID NO: 944391 - RNA, 23 nt, Human
uccucccaaauuucagccucauu

SEQ ID NO: 944392 - RNA, 22 nt, Human
aggcaggcucaggcccaugcuu

SEQ ID NO: 944393 - RNA, 19 nt, Human
agggccugagcagauguug

SEQ ID NO: 944394 - RNA, 22 nt, Human
auuuucagagacaucuggacuu

SEQ ID NO: 944395 - RNA, 22 nt, Human
caggagaaauguggcugcuacc

SEQ ID NO: 944396 - RNA, 22 nt, Human
gggggcuggacuuucccacaca

SEQ ID NO: 944397 - RNA, 22 nt, Human
aaggaaagacauauaaaugacu

SEQ ID NO: 944398 - RNA, 22 nt, Human
gacauaaaauucaauaauuugu

SEQ ID NO: 944399 - RNA, 22 nt, Human
uggcucugaucagauguccagu

SEQ ID NO: 944400 - RNA, 22 nt, Human
uucaaugauuuuuagggaucau

SEQ ID NO: 944401 - RNA, 22 nt, Human
aggaagcuagagccaccggacu

SEQ ID NO: 944402 - RNA, 22 nt, Human
gcagggaggaagagaugcuucc

SEQ ID NO: 944403 - RNA, 20 nt, Human
acagaauaugcugguugugg

SEQ ID NO: 944404 - RNA, 22 nt, Human
acccaggauagagugcugcagu

SEQ ID NO: 944405 - RNA, 22 nt, Human
acuggccaugggauuuauauuu

SEQ ID NO: 944406 - RNA, 22 nt, Human
agucucugcugguugugccuau

SEQ ID NO: 944407 - RNA, 22 nt, Human
aagcuuucagagcagaauguga

SEQ ID NO: 944408 - RNA, 22 nt, Human
caucacccggaacugugucugc

SEQ ID NO: 944409 - RNA, 22 nt, Human
gcagcugcuggaaguuccugcc

SEQ ID NO: 944410 - RNA, 23 nt, Human
caggcaggaugaggacuacacuc

SEQ ID NO: 944411 - RNA, 22 nt, Human
gucccauaaguagugcaacuug

SEQ ID NO: 944412 - RNA, 22 nt, Human
ggagaggagauuguggcauuuu

SEQ ID NO: 944413 - RNA, 22 nt, Human
ggcaccuggauguagcagugaa

SEQ ID NO: 944414 - RNA, 22 nt, Human
ccaaaguccauaguuuacauua

SEQ ID NO: 944415 - RNA, 22 nt, Human
cagcuuggaggaggaucuaaga

SEQ ID NO: 944416 - RNA, 22 nt, Human
acuggagcccguggaggcgcag

SEQ ID NO: 944417 - RNA, 22 nt, Human
ucuuccucuagaucugaggccc

SEQ ID NO: 944418 - RNA, 22 nt, Human
uggcagagugcagaagaggcau

SEQ ID NO: 944419 - RNA, 22 nt, Human
gagagugucgggggccccagga

SEQ ID NO: 944420 - RNA, 22 nt, Human
cagcuucugagcaagccagggg

SEQ ID NO: 944421 - RNA, 22 nt, Human
ggcuucuguccucuggaucugu

SEQ ID NO: 944422 - RNA, 22 nt, Human
uaaugcacaugacugaacuauu

SEQ ID NO: 944423 - RNA, 22 nt, Human
uguguucuggaaagcucacuga

SEQ ID NO: 944424 - RNA, 22 nt, Human
auuuauuaccucggaguuucug

SEQ ID NO: 944425 - RNA, 22 nt, Human
aagaaauaagacuucucugucc

SEQ ID NO: 944426 - RNA, 22 nt, Human
cuuauuagugucugucugaguu

SEQ ID NO: 944427 - RNA, 22 nt, Human
ccagcugguguuccuuaggacc

SEQ ID NO: 944428 - RNA, 22 nt, Human
uggcugggagcuggaacugggc

SEQ ID NO: 944429 - RNA, 22 nt, Human
gauauuuugagaaauccuauga

SEQ ID NO: 944430 - RNA, 19 nt, Human
ucccagagucuagagguug

SEQ ID NO: 944431 - RNA, 20 nt, Human
agcugguuaucuuaauucuu

SEQ ID NO: 944432 - RNA, 22 nt, Human
auuagagaaugugcugacauug

SEQ ID NO: 944433 - RNA, 23 nt, Human
uuguuuuuagagguggcaugaga

SEQ ID NO: 944434 - RNA, 22 nt, Human
ucacaaaagcuuuugaauuugg

SEQ ID NO: 944435 - RNA, 22 nt, Human
agcucacagaaauccugcagga

SEQ ID NO: 944436 - RNA, 22 nt, Human
cagcuccugggccaucuccuag

SEQ ID NO: 944437 - RNA, 21 nt, Human
uuuuuucuugcgugaggccug

SEQ ID NO: 944438 - RNA, 22 nt, Human
ggcagucuuaucagcauuggac

SEQ ID NO: 944439 - RNA, 22 nt, Human
aggucaaggccaaaagaguggu

SEQ ID NO: 944440 - RNA, 22 nt, Human
caaggccaagguuuugugaacu

SEQ ID NO: 944441 - RNA, 22 nt, Human
ucccaggacaggccacauggaa

SEQ ID NO: 944442 - RNA, 22 nt, Human
ugucaccucuuuggcugcagcu

SEQ ID NO: 944443 - RNA, 22 nt, Human
gcucacuggccugaagaggacg

SEQ ID NO: 944444 - RNA, 22 nt, Human
ccagcccugucaccaacuggag

SEQ ID NO: 944445 - RNA, 22 nt, Human
gcauuccuacaggcugcuauga

SEQ ID NO: 944446 - RNA, 22 nt, Human
gauuucaaguaucuugggcgag

SEQ ID NO: 944447 - RNA, 22 nt, Human
cuucucuucccagggacacagg

SEQ ID NO: 944448 - RNA, 20 nt, Human
agagaauucccuuuggagau

SEQ ID NO: 944449 - RNA, 22 nt, Human
gggaggugauuaggaccaugua

SEQ ID NO: 944450 - RNA, 22 nt, Human
gcugccugcucggcuccuggga

SEQ ID NO: 944451 - RNA, 22 nt, Human
aagcagccucauuugugguaag

SEQ ID NO: 944452 - RNA, 22 nt, Human
uugaacaguuuugucagguuca

SEQ ID NO: 944453 - RNA, 22 nt, Human
agcugguguccuccuggagcug

SEQ ID NO: 944454 - RNA, 22 nt, Human
ucacuguugaccuggaaguggg

SEQ ID NO: 944455 - RNA, 22 nt, Human
ugcauguuauuguggcaagaau

SEQ ID NO: 944456 - RNA, 22 nt, Human
cacuugggagcauugcacaugu

SEQ ID NO: 944457 - RNA, 22 nt, Human
aaagagcuucauuuccauuuau

SEQ ID NO: 944458 - RNA, 23 nt, Human
auaauaacgucugucuugucucu

SEQ ID NO: 944459 - RNA, 22 nt, Human
gagccuguguuuccuguagcca

SEQ ID NO: 944460 - RNA, 22 nt, Human
acacagggcaaugcuuugaccu

SEQ ID NO: 944461 - RNA, 22 nt, Human
aggacuuagaacauuauguacu

SEQ ID NO: 944462 - RNA, 22 nt, Human
cccagcagaaucugaugagggc

SEQ ID NO: 944463 - RNA, 22 nt, Human
gagggcagagacagugauucac

SEQ ID NO: 944464 - RNA, 22 nt, Human
aaagguuaguucuuagaagugc

SEQ ID NO: 944465 - RNA, 22 nt, Human
gcuggcugcgucaucacagggc

SEQ ID NO: 944466 - RNA, 22 nt, Human
uugcauuguaggauguuagaag

SEQ ID NO: 944467 - RNA, 22 nt, Human
aggcagagagcaguggccgucu

SEQ ID NO: 944468 - RNA, 22 nt, Human
agggagaaaauuggaugcacaa

SEQ ID NO: 944469 - RNA, 18 nt, Human
ugucucaggcugaaacag

SEQ ID NO: 944470 - RNA, 22 nt, Human
ugcuccagugagcuggccaucc

SEQ ID NO: 944471 - RNA, 22 nt, Human
acugccuugaaagauuguugag

SEQ ID NO: 944472 - RNA, 22 nt, Human
agggcccauagaucgucagcuu

SEQ ID NO: 944473 - RNA, 19 nt, Human
accaggaguaucagagcug

SEQ ID NO: 944474 - RNA, 22 nt, Human
gagagggauacugaguuuuggu

SEQ ID NO: 944475 - RNA, 22 nt, Human
caggcagccuucucgucucaca

SEQ ID NO: 944476 - RNA, 22 nt, Human
gcacccagaggucagcagugcu

SEQ ID NO: 944477 - RNA, 22 nt, Human
cauuuugugcuagacacuaugg

SEQ ID NO: 944478 - RNA, 22 nt, Human
uggguaaacugggucuggagag

SEQ ID NO: 944479 - RNA, 22 nt, Human
agccugccuugggcugcuugag

SEQ ID NO: 944480 - RNA, 22 nt, Human
guggccaagaaaauagaugcau

SEQ ID NO: 944481 - RNA, 22 nt, Human
auagaauagcauagaaaauuga

SEQ ID NO: 944482 - RNA, 22 nt, Human
caggugggagcggagacugauu

SEQ ID NO: 944483 - RNA, 22 nt, Human
ucuuuuggguucuuaugauuua

SEQ ID NO: 944484 - RNA, 21 nt, Human
aagaaguuuggauuuuguccu

SEQ ID NO: 944485 - RNA, 22 nt, Human
uagcugcccaucuuuccuuuag

SEQ ID NO: 944486 - RNA, 22 nt, Human
gacccuguuucuacaaauaauu

SEQ ID NO: 944487 - RNA, 22 nt, Human
cccugccuacaggguuuucuuu

SEQ ID NO: 944488 - RNA, 22 nt, Human
aguuauaaucugcuacugauau

SEQ ID NO: 944489 - RNA, 22 nt, Human
agaccaagaaaggaugaggauc

SEQ ID NO: 944490 - RNA, 22 nt, Human
gcuggcuguguuccuucugcca

SEQ ID NO: 944491 - RNA, 20 nt, Human
gccuggaggcagagauaaag

SEQ ID NO: 944492 - RNA, 22 nt, Human
caguugcuggaugugcagcucu

SEQ ID NO: 944493 - RNA, 22 nt, Human
aauucacagcauuugcccaucu

SEQ ID NO: 944494 - RNA, 21 nt, Human
ggucagggggugccuccaggu

SEQ ID NO: 944495 - RNA, 22 nt, Human
aggcagagcugauguucuguga

SEQ ID NO: 944496 - RNA, 22 nt, Human
cugccagcaaugugaccaugcu

SEQ ID NO: 944497 - RNA, 22 nt, Human
caaggccaaagggccacuguca

SEQ ID NO: 944498 - RNA, 22 nt, Human
ccugggcaacauagugagaccc

SEQ ID NO: 944499 - RNA, 22 nt, Human
acauuucuuccuaauuaucccu

SEQ ID NO: 944500 - RNA, 22 nt, Human
caggccugacccugagcuucac

SEQ ID NO: 944501 - RNA, 22 nt, Human
cuguccauuuucgugccuccuu

SEQ ID NO: 944502 - RNA, 22 nt, Human
aacucaguguguuucuuaguau

SEQ ID NO: 944503 - RNA, 22 nt, Human
acauagcuuaaaugagaagaua

SEQ ID NO: 944504 - RNA, 22 nt, Human
cugcuuuguguggucccuccag

SEQ ID NO: 944505 - RNA, 22 nt, Human
ugcucugggcaacagccucccu

SEQ ID NO: 944506 - RNA, 18 nt, Human
uggagccauugccaccau

SEQ ID NO: 944507 - RNA, 22 nt, Human
auaaggcagaaaugauucuagu

SEQ ID NO: 944508 - RNA, 22 nt, Human
cugggccuagaggaagcugaca

SEQ ID NO: 944509 - RNA, 22 nt, Human
agcagccaaaugaagauuuuac

SEQ ID NO: 944510 - RNA, 22 nt, Human
uuauuccagcuaagaguccugg

SEQ ID NO: 944511 - RNA, 22 nt, Human
uuagcugacugugugauuuggc

SEQ ID NO: 944512 - RNA, 22 nt, Human
acagauugaucuugagaauuau

SEQ ID NO: 944513 - RNA, 22 nt, Human
cuggagcuccagggucuccucu

SEQ ID NO: 944514 - RNA, 22 nt, Human
agcuccugaaaauccagacugg

SEQ ID NO: 944515 - RNA, 22 nt, Human
ccaggacuucgaggcuacagug

SEQ ID NO: 944516 - RNA, 22 nt, Human
ccugagggaaggaugcuaccca

SEQ ID NO: 944517 - RNA, 22 nt, Human
agagugaagguugacacuucac

SEQ ID NO: 944518 - RNA, 22 nt, Human
cacagaaucugugacuccaaga

SEQ ID NO: 944519 - RNA, 22 nt, Human
agucuugcauuuucugaagaug

SEQ ID NO: 944520 - RNA, 22 nt, Human
ugucaucucacugauauagaug

SEQ ID NO: 944521 - RNA, 21 nt, Human
gcagccagccgagaccaugcc

SEQ ID NO: 944522 - RNA, 16 nt, Human
uggaaggggucuccgg

SEQ ID NO: 944523 - RNA, 22 nt, Human
gugaggugguacaauauuaacu

SEQ ID NO: 944524 - RNA, 22 nt, Human
agcagggcagguaaggaucaga

SEQ ID NO: 944525 - RNA, 22 nt, Human
cuugugcaauugacauugaauc

SEQ ID NO: 944526 - RNA, 22 nt, Human
cagugcuccugauguacccuug

SEQ ID NO: 944527 - RNA, 22 nt, Human
gcagcagaugcuuucauggaca

SEQ ID NO: 944528 - RNA, 22 nt, Human
gcccuggaaucucuccauggga

SEQ ID NO: 944529 - RNA, 22 nt, Human
cugggucuccggcagccucggg

SEQ ID NO: 944530 - RNA, 22 nt, Human
gaggugagaagggggucagaug

SEQ ID NO: 944531 - RNA, 20 nt, Human
cccagccccuaccuguugcc

SEQ ID NO: 944532 - RNA, 22 nt, Human
cucugaacucuugggcagcaug

SEQ ID NO: 944533 - RNA, 18 nt, Human
acugugugaauuagcucc

SEQ ID NO: 944534 - RNA, 22 nt, Human
caggaaagggaugggcugccac

SEQ ID NO: 944535 - RNA, 22 nt, Human
ugagcccagagaucugagcuau

SEQ ID NO: 944536 - RNA, 22 nt, Human
uacaugcucaguaacuuucagu

SEQ ID NO: 944537 - RNA, 22 nt, Human
ucuguucuuguccccacuucag

SEQ ID NO: 944538 - RNA, 22 nt, Human
ucucagagaggggccgggccuu

SEQ ID NO: 944539 - RNA, 22 nt, Human
acaaagugcacaagaugagaac

SEQ ID NO: 944540 - RNA, 22 nt, Human
aguuguaagagacagauauaaa

SEQ ID NO: 944541 - RNA, 22 nt, Human
ggacaggguaaguacuagugug

SEQ ID NO: 944542 - RNA, 22 nt, Human
gagggugggccagauaugaggg

SEQ ID NO: 944543 - RNA, 22 nt, Human
uucaaucauuuuuacauagucc

SEQ ID NO: 944544 - RNA, 22 nt, Human
ucucaggagccacagcgggagu

SEQ ID NO: 944545 - RNA, 22 nt, Human
aaaugaugcucacagauuagug

SEQ ID NO: 944546 - RNA, 22 nt, Human
acaggggcuccgaaggugaggg

SEQ ID NO: 944547 - RNA, 22 nt, Human
acauagaaccuggcacauagua

SEQ ID NO: 944548 - RNA, 22 nt, Human
uuggcagauuugucaguaagcu

SEQ ID NO: 944549 - RNA, 22 nt, Human
agccuccaucccaugcacaaag

SEQ ID NO: 944550 - RNA, 21 nt, Human
accucaagcaacaaccaaggu

SEQ ID NO: 944551 - RNA, 22 nt, Human
ucaguuuuuaagaguuaugcga

SEQ ID NO: 944552 - RNA, 22 nt, Human
ucuuggccccaccugugccagc

SEQ ID NO: 944553 - RNA, 22 nt, Human
cugccaggcagcagagggagaa

SEQ ID NO: 944554 - RNA, 21 nt, Human
aaggagccuaggaggcucagg

SEQ ID NO: 944555 - RNA, 22 nt, Human
cuucuugcaauuuucaucuuau

SEQ ID NO: 944556 - RNA, 23 nt, Human
cagaaaacccagagcucaguccc

SEQ ID NO: 944557 - RNA, 22 nt, Human
uuccugaugcacacagucauuu

SEQ ID NO: 944558 - RNA, 22 nt, Human
gggaaauugugugagaucuuug

SEQ ID NO: 944559 - RNA, 22 nt, Human
ggggccugcgagguucaacuuc

SEQ ID NO: 944560 - RNA, 22 nt, Human
agacaaauggaguaugagcaac

SEQ ID NO: 944561 - RNA, 22 nt, Human
cagucccacaagaucuccacaa

SEQ ID NO: 944562 - RNA, 22 nt, Human
auguguaggugaaucgaggcug

SEQ ID NO: 944563 - RNA, 21 nt, Human
cccaggagaagaaaagaugca

SEQ ID NO: 944564 - RNA, 22 nt, Human
uaugaaaagguggccaauguag

SEQ ID NO: 944565 - RNA, 22 nt, Human
acucaagauagggaaaguacaa

SEQ ID NO: 944566 - RNA, 22 nt, Human
ugcugcacucaccaacagauaa

SEQ ID NO: 944567 - RNA, 22 nt, Human
ucacaccuguaaucccaggccu

SEQ ID NO: 944568 - RNA, 20 nt, Human
gcauggcauguagugaagug

SEQ ID NO: 944569 - RNA, 22 nt, Human
gcugcugcgcuugucuacuguu

SEQ ID NO: 944570 - RNA, 22 nt, Human
guugggaaggcaagaaguagaa

SEQ ID NO: 944571 - RNA, 20 nt, Human
aaucagaaagugugagcucu

SEQ ID NO: 944572 - RNA, 22 nt, Human
acaaagugaauugcaucgaguu

SEQ ID NO: 944573 - RNA, 20 nt, Human
gugcauuucaccuguacugu

SEQ ID NO: 944574 - RNA, 22 nt, Human
guaacacagaaaugaaauucca

SEQ ID NO: 944575 - RNA, 22 nt, Human
ucucuggaauuuugagagugac

SEQ ID NO: 944576 - RNA, 22 nt, Human
gccugcagauauauaggauggu

SEQ ID NO: 944577 - RNA, 22 nt, Human
gggccaggucggugaaugguca

SEQ ID NO: 944578 - RNA, 22 nt, Human
aguaaugucccuuaaauguggu

SEQ ID NO: 944579 - RNA, 22 nt, Human
agagcaggcauaaagcuuugaa

SEQ ID NO: 944580 - RNA, 22 nt, Human
gccaggagacuccauucauuug

SEQ ID NO: 944581 - RNA, 22 nt, Human
cuucaagauauuucuagaauca

SEQ ID NO: 944582 - RNA, 22 nt, Human
auccaaagauggaaagaacuuu

SEQ ID NO: 944583 - RNA, 22 nt, Human
cccugccuucuuggccuuuaaa

SEQ ID NO: 944584 - RNA, 22 nt, Human
auggacagugugaagcagauag

SEQ ID NO: 944585 - RNA, 22 nt, Human
uucuggagagaaaccuuacaaa

SEQ ID NO: 944586 - RNA, 22 nt, Human
cugcucaguaauaguccuaucu

SEQ ID NO: 944587 - RNA, 22 nt, Human
ccccagccuuccaugggaauug

SEQ ID NO: 944588 - RNA, 22 nt, Human
ggccuugggcagacacgucaca

SEQ ID NO: 944589 - RNA, 22 nt, Human
acugaaagauaaaucaguuagc

SEQ ID NO: 944590 - RNA, 22 nt, Human
cacugcuuucacaguuuguucc

SEQ ID NO: 944591 - RNA, 22 nt, Human
aggcugggaaaccugaaguugu

SEQ ID NO: 944592 - RNA, 22 nt, Human
ggcagcuguaagaugagugaau

SEQ ID NO: 944593 - RNA, 22 nt, Human
uggccugccuucgcugagcuga

SEQ ID NO: 944594 - RNA, 22 nt, Human
gccagagccggcuucacaggau

SEQ ID NO: 944595 - RNA, 22 nt, Human
cccaggcagccugcagggaagg

SEQ ID NO: 944596 - RNA, 22 nt, Human
uggcaguggcucagagugcaga

SEQ ID NO: 944597 - RNA, 22 nt, Human
gggcagcagcaggaggucucug

SEQ ID NO: 944598 - RNA, 22 nt, Human
gcuguauuuauuuucuaggguu

SEQ ID NO: 944599 - RNA, 22 nt, Human
uuaaaacagcgugaaucuggca

SEQ ID NO: 944600 - RNA, 22 nt, Human
uuuuaguuguaguuggugagga

SEQ ID NO: 944601 - RNA, 20 nt, Human
cugggccauccuuuuacaau

SEQ ID NO: 944602 - RNA, 22 nt, Human
agucccagcccaguccuguaag

SEQ ID NO: 944603 - RNA, 22 nt, Human
ccucuuccacugggccccaucc

SEQ ID NO: 944604 - RNA, 22 nt, Human
uccugccucaggcucuggagua

SEQ ID NO: 944605 - RNA, 22 nt, Human
gagcucuggguggcaggugucu

SEQ ID NO: 944606 - RNA, 19 nt, Human
gggcagaauggcaucucag

SEQ ID NO: 944607 - RNA, 22 nt, Human
agucagugaaggcauugcucaa

SEQ ID NO: 944608 - RNA, 22 nt, Human
gaaaugcauggaucuuggcaga

SEQ ID NO: 944609 - RNA, 19 nt, Human
aauaauguucaugagauug

SEQ ID NO: 944610 - RNA, 22 nt, Human
ucuugggaagcccauuuccacc

SEQ ID NO: 944611 - RNA, 19 nt, Human
cugggccagagcuguccuc

SEQ ID NO: 944612 - RNA, 22 nt, Human
ugcagcugauuaaagggcagac

SEQ ID NO: 944613 - RNA, 22 nt, Human
caggugggagcgaggagcuacu

SEQ ID NO: 944614 - RNA, 22 nt, Human
uuggccuuaaccucucugugcc

SEQ ID NO: 944615 - RNA, 22 nt, Human
cagagccaaaccucagggcccg

SEQ ID NO: 944616 - RNA, 22 nt, Human
agaaauguggaggaacagggcu

SEQ ID NO: 944617 - RNA, 22 nt, Human
gcagcugcagguggucccaugc

SEQ ID NO: 944618 - RNA, 22 nt, Human
cugcaucacagcaggaggcaca

SEQ ID NO: 944619 - RNA, 22 nt, Human
gagcagcuuaugucaagccaga

SEQ ID NO: 944620 - RNA, 22 nt, Human
ccagcuggagccaagguggacu

SEQ ID NO: 944621 - RNA, 22 nt, Human
agugucauuuuguccaucuucu

SEQ ID NO: 944622 - RNA, 22 nt, Human
aauaucaguauauuguaucagu

SEQ ID NO: 944623 - RNA, 22 nt, Human
uuuauuauccaguguugucaug

SEQ ID NO: 944624 - RNA, 22 nt, Human
gucuucuuguguugccugucuu

SEQ ID NO: 944625 - RNA, 22 nt, Human
agagacaggguuuugccauguu

SEQ ID NO: 944626 - RNA, 22 nt, Human
ugaggcaggaaguuauauaaug

SEQ ID NO: 944627 - RNA, 23 nt, Human
uggcagcuguguaagagaaagca

SEQ ID NO: 944628 - RNA, 22 nt, Human
ugucaucugauauuacuuauag

SEQ ID NO: 944629 - RNA, 22 nt, Human
uaugccugauaacugugucucu

SEQ ID NO: 944630 - RNA, 22 nt, Human
acuuuauuuccuauugcaucca

SEQ ID NO: 944631 - RNA, 22 nt, Human
cagcugcaggaacaaaaaugug

SEQ ID NO: 944632 - RNA, 22 nt, Human
agugccaggagcaaggagcucc

SEQ ID NO: 944633 - RNA, 22 nt, Human
agacaggacacaagcugcauaa

SEQ ID NO: 944634 - RNA, 23 nt, Human
gaguguucauagcaggcucuugc

SEQ ID NO: 944635 - RNA, 22 nt, Human
uaugugaauacagcaguggaug

SEQ ID NO: 944636 - RNA, 22 nt, Human
uguuucaugauugcugucauuu

SEQ ID NO: 944637 - RNA, 22 nt, Human
gcaaaugaguuguaacauaaaa

SEQ ID NO: 944638 - RNA, 22 nt, Human
cacaagacuuauuuguguagaa

SEQ ID NO: 944639 - RNA, 22 nt, Human
aggacccugagcgggcaugccg

SEQ ID NO: 944640 - RNA, 22 nt, Human
gcuguguuugacaguagcagac

SEQ ID NO: 944641 - RNA, 20 nt, Human
gugggcagcaggcauacugg

SEQ ID NO: 944642 - RNA, 22 nt, Human
uccugccucuugccuucuucac

SEQ ID NO: 944643 - RNA, 21 nt, Human
auugaaagucaacaaucaguu

SEQ ID NO: 944644 - RNA, 22 nt, Human
uucuccaacacaagcaugaugu

SEQ ID NO: 944645 - RNA, 23 nt, Human
agagcuuagggaauucacaugag

SEQ ID NO: 944646 - RNA, 22 nt, Human
cuacauuaaauuggcuuacuua

SEQ ID NO: 944647 - RNA, 22 nt, Human
cccaagagcuucuaggacgcug

SEQ ID NO: 944648 - RNA, 22 nt, Human
gccagagcacaggcugguagua

SEQ ID NO: 944649 - RNA, 22 nt, Human
cuggcugguuacuauuucuggu

SEQ ID NO: 944650 - RNA, 22 nt, Human
ccagcagagucuaggaaggagg

SEQ ID NO: 944651 - RNA, 23 nt, Human
aggauguaggauguauggcagag

SEQ ID NO: 944652 - RNA, 18 nt, Human
gcuccugguuggaaagaa

SEQ ID NO: 944653 - RNA, 18 nt, Human
agucucagcggaggagua

SEQ ID NO: 944654 - RNA, 22 nt, Human
aagcagaggguauggccagguu

SEQ ID NO: 944655 - RNA, 22 nt, Human
acuccuggguucuaaauuugaa

SEQ ID NO: 944656 - RNA, 22 nt, Human
gaggcacugcaguacagugacu

SEQ ID NO: 944657 - RNA, 22 nt, Human
uuugaaagaauuuauguacuuu

SEQ ID NO: 944658 - RNA, 22 nt, Human
uuaaauuauuucuagugaggug

SEQ ID NO: 944659 - RNA, 22 nt, Human
ugugucugaacuaguugcucuc

SEQ ID NO: 944660 - RNA, 22 nt, Human
uggcugcugcuuggucuucuuc

SEQ ID NO: 944661 - RNA, 22 nt, Human
augggcuguccuaguccagccc

SEQ ID NO: 944662 - RNA, 22 nt, Human
uauuuuaaagacugccagccua

SEQ ID NO: 944663 - RNA, 17 nt, Human
ggcagccucaggcguuu

SEQ ID NO: 944664 - RNA, 22 nt, Human
uuauuacacugaaagaauugcg

SEQ ID NO: 944665 - RNA, 22 nt, Human
accuguuuggaggagguguuag

SEQ ID NO: 944666 - RNA, 22 nt, Human
uccuuguaacguugggcugggg

SEQ ID NO: 944667 - RNA, 22 nt, Human
cacauggggcgcugcauuggcc

SEQ ID NO: 944668 - RNA, 22 nt, Human
gaaggccaagaggcuccaagau

SEQ ID NO: 944669 - RNA, 19 nt, Human
auuuacugccuaaaaucuc

SEQ ID NO: 944670 - RNA, 22 nt, Human
ucacaggagggagagacaccca

SEQ ID NO: 944671 - RNA, 22 nt, Human
gaacaguaucaguagugccagu

SEQ ID NO: 944672 - RNA, 22 nt, Human
ggacacagcugcagccacaccc

SEQ ID NO: 944673 - RNA, 22 nt, Human
gcugccugaagugucuacacug

SEQ ID NO: 944674 - RNA, 22 nt, Human
ugucccagguccuagaugacca

SEQ ID NO: 944675 - RNA, 22 nt, Human
ugcauuaugcuugugcuguaua

SEQ ID NO: 944676 - RNA, 22 nt, Human
cccuggcauaaaacuucuccag

SEQ ID NO: 944677 - RNA, 22 nt, Human
augcuuuuaugucacaugguca

SEQ ID NO: 944678 - RNA, 22 nt, Human
cagucccagacauaguaaggga

SEQ ID NO: 944679 - RNA, 22 nt, Human
augggaggaugcucgggugcuc

SEQ ID NO: 944680 - RNA, 22 nt, Human
gccuucaguaguauccucauga

SEQ ID NO: 944681 - RNA, 22 nt, Human
ccugggugacccgugagcgucc

SEQ ID NO: 944682 - RNA, 22 nt, Human
cugcagcuccccugagaucaag

SEQ ID NO: 944683 - RNA, 22 nt, Human
caaaacauucagagagcucacu

SEQ ID NO: 944684 - RNA, 19 nt, Human
auagucuuuccaauuauac

SEQ ID NO: 944685 - RNA, 22 nt, Human
ugggcagacgggagcuugccuu

SEQ ID NO: 944686 - RNA, 22 nt, Human
aggaugagaagauuggaaucuu

SEQ ID NO: 944687 - RNA, 22 nt, Human
uaggagagcugaacuauugucu

SEQ ID NO: 944688 - RNA, 22 nt, Human
aggagcugcagauucugccuug

SEQ ID NO: 944689 - RNA, 22 nt, Human
ggggaggcugaugugggcaaag

SEQ ID NO: 944690 - RNA, 22 nt, Human
acauuuuuuagagucccacauu

SEQ ID NO: 944691 - RNA, 22 nt, Human
uagaaaagauaacauucugugc

SEQ ID NO: 944692 - RNA, 22 nt, Human
cauguugaauggccuugauuuu

SEQ ID NO: 944693 - RNA, 18 nt, Human
cccagcccaccauuucuc

SEQ ID NO: 944694 - RNA, 20 nt, Human
cagcaguggaugagaguuuu

SEQ ID NO: 944695 - RNA, 20 nt, Human
agguggcuccugcugggggu

SEQ ID NO: 944696 - RNA, 22 nt, Human
ugucaugcuuauguuacauacu

SEQ ID NO: 944697 - RNA, 22 nt, Human
ugaugaaacugagguuccaaga

SEQ ID NO: 944698 - RNA, 22 nt, Human
ugaugcuucacgcugaauaugc

SEQ ID NO: 944699 - RNA, 22 nt, Human
agcccaggucuggcccagccug

SEQ ID NO: 944700 - RNA, 22 nt, Human
auucuuucaaggaauaguuauu

SEQ ID NO: 944701 - RNA, 22 nt, Human
gagguggaaggcaggaacaaau

SEQ ID NO: 944702 - RNA, 22 nt, Human
cauuaucugccauugacaccau

SEQ ID NO: 944703 - RNA, 22 nt, Human
ugugaaggcagcagcucugucc

SEQ ID NO: 944704 - RNA, 22 nt, Human
ugucacauaggcaaaauguuuu

SEQ ID NO: 944705 - RNA, 22 nt, Human
guggcuugaccaucccugcuac

SEQ ID NO: 944706 - RNA, 22 nt, Human
gauaaugaugacaaugacaacc

SEQ ID NO: 944707 - RNA, 22 nt, Human
guucacaauuuuuacugauugg

SEQ ID NO: 944708 - RNA, 22 nt, Human
ggccccacgggggaguccuagu

SEQ ID NO: 944709 - RNA, 22 nt, Human
uagcuguguaagcuugguaaga

SEQ ID NO: 944710 - RNA, 22 nt, Human
cacugccugugagcugugugcc

SEQ ID NO: 944711 - RNA, 21 nt, Human
uuucugucucugccacuaguu

SEQ ID NO: 944712 - RNA, 23 nt, Human
ugcaggggaggcuuaaagcaggu

SEQ ID NO: 944713 - RNA, 22 nt, Human
gcuaugcaggagccuaaugaca

SEQ ID NO: 944714 - RNA, 19 nt, Human
cuggcucuuggguggagga

SEQ ID NO: 944715 - RNA, 22 nt, Human
aucaguuuguauaugaaacacu

SEQ ID NO: 944716 - RNA, 22 nt, Human
cuggcagcuucaggacacucgg

SEQ ID NO: 944717 - RNA, 19 nt, Human
gccagcagaaugaugaggc

SEQ ID NO: 944718 - RNA, 22 nt, Human
caggggcugagaaggaacgucc

SEQ ID NO: 944719 - RNA, 20 nt, Human
cugagcgucuaagaggugag

SEQ ID NO: 944720 - RNA, 22 nt, Human
gagggaugguaguugacacuga

SEQ ID NO: 944721 - RNA, 22 nt, Human
uggccuuccuggugacucauga

SEQ ID NO: 944722 - RNA, 22 nt, Human
caacccaaaagcguuuccauuu

SEQ ID NO: 944723 - RNA, 22 nt, Human
ggagcugaugacgucaccaugg

SEQ ID NO: 944724 - RNA, 22 nt, Human
aggaaaugcugaugcuccugga

SEQ ID NO: 944725 - RNA, 22 nt, Human
ccagggcagggaccacgugucu

SEQ ID NO: 944726 - RNA, 22 nt, Human
ugccuaggaaaccucaugcuuc

SEQ ID NO: 944727 - RNA, 22 nt, Human
acagcuguauccccagagcuca

SEQ ID NO: 944728 - RNA, 22 nt, Human
acuggcagcagcagcccuuggg

SEQ ID NO: 944729 - RNA, 19 nt, Human
uccuccuuacuuccucuug

SEQ ID NO: 944730 - RNA, 22 nt, Human
uggcaauuucagaaaauagaau

SEQ ID NO: 944731 - RNA, 22 nt, Human
cucugagaggugagaagcagca

SEQ ID NO: 944732 - RNA, 22 nt, Human
ucugucugcucauuuaccucag

SEQ ID NO: 944733 - RNA, 22 nt, Human
cuuccuggccauugccauggca

SEQ ID NO: 944734 - RNA, 22 nt, Human
gucaggaugcuauuguuauuaa

SEQ ID NO: 944735 - RNA, 22 nt, Human
aggcaagggggcgccaccuucc

SEQ ID NO: 944736 - RNA, 22 nt, Human
cagagcuggagggaacccuggc

SEQ ID NO: 944737 - RNA, 22 nt, Human
cagggccagcgucucgggcuau

SEQ ID NO: 944738 - RNA, 22 nt, Human
aguacauuuauuaaugguaaaa

SEQ ID NO: 944739 - RNA, 22 nt, Human
gccaccaggagcccaguccaaa

SEQ ID NO: 944740 - RNA, 22 nt, Human
ccaggcccugcuccucacacca

SEQ ID NO: 944741 - RNA, 22 nt, Human
gagagcuguaauagucaugucu

SEQ ID NO: 944742 - RNA, 22 nt, Human
ugaaagcagcaccaauaccauu

SEQ ID NO: 944743 - RNA, 22 nt, Human
ugaggcaguugagcuuccugag

SEQ ID NO: 944744 - RNA, 22 nt, Human
gccagggcaggggagcaucugc

SEQ ID NO: 944745 - RNA, 22 nt, Human
cacucugcaggccaaaccaaag

SEQ ID NO: 944746 - RNA, 23 nt, Human
aggcccugccugucccucuuuuu

SEQ ID NO: 944747 - RNA, 22 nt, Human
ucccaaggcacagggcagggac

SEQ ID NO: 944748 - RNA, 22 nt, Human
ugucuuuaugcacacugacuug

SEQ ID NO: 944749 - RNA, 22 nt, Human
aggguagggcccggagacagac

SEQ ID NO: 944750 - RNA, 22 nt, Human
aggccucacucucagagcuucu

SEQ ID NO: 944751 - RNA, 22 nt, Human
auucuucagcaggggacacuau

SEQ ID NO: 944752 - RNA, 22 nt, Human
cggagcugccugccaagccugc

SEQ ID NO: 944753 - RNA, 22 nt, Human
uggcaagccugagauccgggag

SEQ ID NO: 944754 - RNA, 22 nt, Human
acacuugauaggucaaaucagu

SEQ ID NO: 944755 - RNA, 17 nt, Human
gaaagguccuagaaauc

SEQ ID NO: 944756 - RNA, 22 nt, Human
ccuggcagcccagagcgccgcu

SEQ ID NO: 944757 - RNA, 22 nt, Human
agcauuuaguuaguaaauguuu

SEQ ID NO: 944758 - RNA, 22 nt, Human
ggcagcagcaagguuggagcug

SEQ ID NO: 944759 - RNA, 22 nt, Human
gcugucugggaugucacugcug

SEQ ID NO: 944760 - RNA, 22 nt, Human
gcagcuucaguaggugaagaca

SEQ ID NO: 944761 - RNA, 22 nt, Human
ugagccagaguggagugugccu

SEQ ID NO: 944762 - RNA, 22 nt, Human
agggccugcucuaucacucuca

SEQ ID NO: 944763 - RNA, 21 nt, Human
ugauuuccaucuuaaaauaaa

SEQ ID NO: 944764 - RNA, 18 nt, Human
aggcaggugcuggaaguc

SEQ ID NO: 944765 - RNA, 22 nt, Human
aaaacauucugugaacucucaa

SEQ ID NO: 944766 - RNA, 22 nt, Human
uggcugcuagccagagcuucag

SEQ ID NO: 944767 - RNA, 22 nt, Human
gucauuucuguuucuucagugc

SEQ ID NO: 944768 - RNA, 22 nt, Human
auaucaaacgaaguuauuuuaa

SEQ ID NO: 944769 - RNA, 19 nt, Human
gcugucugaugcugagguc

SEQ ID NO: 944770 - RNA, 22 nt, Human
cccaggagguggagguugcagu

SEQ ID NO: 944771 - RNA, 22 nt, Human
uuuauucuugagagugagaaga

SEQ ID NO: 944772 - RNA, 22 nt, Human
aggguggcaguuacuggagcaa

SEQ ID NO: 944773 - RNA, 22 nt, Human
uuccauaauuaaguggagagaa

SEQ ID NO: 944774 - RNA, 22 nt, Human
gcugcucucucccuaaguuggg

SEQ ID NO: 944775 - RNA, 22 nt, Human
cugucauugagccugucagggc

SEQ ID NO: 944776 - RNA, 22 nt, Human
aguguccccuacagaggcauuc

SEQ ID NO: 944777 - RNA, 22 nt, Human
cacauuuaaagguugaagcuga

SEQ ID NO: 944778 - RNA, 22 nt, Human
ggccagcuuugagcugcaggaa

SEQ ID NO: 944779 - RNA, 22 nt, Human
caggccacaaguuggguucaag

SEQ ID NO: 944780 - RNA, 21 nt, Human
uauaguguggauaugcugaug

SEQ ID NO: 944781 - RNA, 22 nt, Human
uccugggaagagaccugagcau

SEQ ID NO: 944782 - RNA, 22 nt, Human
caagagcucaccggagagcauu

SEQ ID NO: 944783 - RNA, 22 nt, Human
gggcagcuggccagguauucug

SEQ ID NO: 944784 - RNA, 22 nt, Human
uuucacaaucaaauggugaaau

SEQ ID NO: 944785 - RNA, 22 nt, Human
cuuggcagauccaaaaaugaca

SEQ ID NO: 944786 - RNA, 22 nt, Human
uugaaggaggcuccuuuuuaaa

SEQ ID NO: 944787 - RNA, 22 nt, Human
uuucauuauaaaaaguuggcuu

SEQ ID NO: 944788 - RNA, 20 nt, Human
uuccuguauacaaagaguuc

SEQ ID NO: 944789 - RNA, 22 nt, Human
agugcauauaugaagaguauga

SEQ ID NO: 944790 - RNA, 22 nt, Human
gcuggggcugggcugaggaaga

SEQ ID NO: 944791 - RNA, 22 nt, Human
uauuuauucauucagcaagcau

SEQ ID NO: 944792 - RNA, 23 nt, Human
ggaaagagaggaguugugcauag

SEQ ID NO: 944793 - RNA, 22 nt, Human
cagccaucccagccugugguuc

SEQ ID NO: 944794 - RNA, 22 nt, Human
ggccuuggggaggauggugucc

SEQ ID NO: 944795 - RNA, 22 nt, Human
ccagggugaccagcuggccuag

SEQ ID NO: 944796 - RNA, 23 nt, Human
ucugggccacuugucugcacuuc

SEQ ID NO: 944797 - RNA, 22 nt, Human
gcucaggagcucuugguggcgc

SEQ ID NO: 944798 - RNA, 22 nt, Human
agcaguggccuggggcucugug

SEQ ID NO: 944799 - RNA, 22 nt, Human
acaccuuuuauucgccaggcac

SEQ ID NO: 944800 - RNA, 22 nt, Human
gcugggagcaaagccaugcaua

SEQ ID NO: 944801 - RNA, 22 nt, Human
cuucacaaaauauuucauuaua

SEQ ID NO: 944802 - RNA, 22 nt, Human
agguggguaucaugagagauua

SEQ ID NO: 944803 - RNA, 17 nt, Human
gccuuccuuccuccaca

SEQ ID NO: 944804 - RNA, 22 nt, Human
uaggaaaaauacagaauuauau

SEQ ID NO: 944805 - RNA, 21 nt, Human
uugaaaguaaauucagcagcu

SEQ ID NO: 944806 - RNA, 22 nt, Human
gcagauggcagcccaggcuggg

SEQ ID NO: 944807 - RNA, 22 nt, Human
ccagggcauguaacuaauggug

SEQ ID NO: 944808 - RNA, 22 nt, Human
ugacucuguaccugucugccuu

SEQ ID NO: 944809 - RNA, 22 nt, Human
uuugcauucuagaaaaauuucu

SEQ ID NO: 944810 - RNA, 22 nt, Human
uauggcauuguuggugaugaua

SEQ ID NO: 944811 - RNA, 22 nt, Human
aggauuucugugccuggaaaau

SEQ ID NO: 944812 - RNA, 22 nt, Human
augucccuucuuuggugcucag

SEQ ID NO: 944813 - RNA, 22 nt, Human
ugucccagacauaaguggacau

SEQ ID NO: 944814 - RNA, 22 nt, Human
ccacaggcugcugcaggucccg

SEQ ID NO: 944815 - RNA, 22 nt, Human
uucaggauucuuucagacuggg

SEQ ID NO: 944816 - RNA, 22 nt, Human
ccucugccaccucccacgaggc

SEQ ID NO: 944817 - RNA, 22 nt, Human
agccacagagcaggagaccuuu

SEQ ID NO: 944818 - RNA, 22 nt, Human
ggcaaaaaguucccaucagugu

SEQ ID NO: 944819 - RNA, 22 nt, Human
agugcuuugguauagaacuauu

SEQ ID NO: 944820 - RNA, 22 nt, Human
ggcugccuugacccuggcuccg

SEQ ID NO: 944821 - RNA, 22 nt, Human
acuaggggcucaggcccaggga

SEQ ID NO: 944822 - RNA, 21 nt, Human
aagaagcaauuuauuggaagg

SEQ ID NO: 944823 - RNA, 22 nt, Human
aaaucagucccucuuggaauuu

SEQ ID NO: 944824 - RNA, 18 nt, Human
gucuggaggucaggagcu

SEQ ID NO: 944825 - RNA, 22 nt, Human
ugaggcacuccaggaugcuguu

SEQ ID NO: 944826 - RNA, 22 nt, Human
uuaaacagacaguaaaugaaac

SEQ ID NO: 944827 - RNA, 18 nt, Human
ggccugaggauuucagca

SEQ ID NO: 944828 - RNA, 22 nt, Human
acaugcauaggagaagucuuua

SEQ ID NO: 944829 - RNA, 22 nt, Human
ugcucacagcccagaacauaau

SEQ ID NO: 944830 - RNA, 22 nt, Human
gcugccucugcgacucugggcg

SEQ ID NO: 944831 - RNA, 22 nt, Human
ugaagcagcuucuuucugucaa

SEQ ID NO: 944832 - RNA, 22 nt, Human
uuuugcuugagugcacaaaaug

SEQ ID NO: 944833 - RNA, 22 nt, Human
cuggagccaugucuugacugcu

SEQ ID NO: 944834 - RNA, 22 nt, Human
uaggacaggugaggggcugugg

SEQ ID NO: 944835 - RNA, 22 nt, Human
uuugaacaugcugcaugauaau

SEQ ID NO: 944836 - RNA, 22 nt, Human
cagagcaguaaaucuggggcac

SEQ ID NO: 944837 - RNA, 22 nt, Human
uguguacauaucuauccuagau

SEQ ID NO: 944838 - RNA, 22 nt, Human
ucagggugaaccaggcaggaau

SEQ ID NO: 944839 - RNA, 23 nt, Human
ucuugaaaagccuacagcaguuc

SEQ ID NO: 944840 - RNA, 22 nt, Human
acugggccuggauuggcguguc

SEQ ID NO: 944841 - RNA, 22 nt, Human
uggagccauaacccuuucguac

SEQ ID NO: 944842 - RNA, 22 nt, Human
cuguggcuaugguguacauacu

SEQ ID NO: 944843 - RNA, 22 nt, Human
gcuguucacaucuggaccauuu

SEQ ID NO: 944844 - RNA, 22 nt, Human
ucccagaggacuguuggugcua

SEQ ID NO: 944845 - RNA, 22 nt, Human
gccaggcuggucuugaacuccu

SEQ ID NO: 944846 - RNA, 22 nt, Human
gaaucucaguggaagcaggaag

SEQ ID NO: 944847 - RNA, 22 nt, Human
aggcccuguaagguguggagau

SEQ ID NO: 944848 - RNA, 22 nt, Human
auaauuuacuaagcucuaccuu

SEQ ID NO: 944849 - RNA, 22 nt, Human
ccucaggcuuacgggcaaugga

SEQ ID NO: 944850 - RNA, 22 nt, Human
uuuccucugcugccauugcccc

SEQ ID NO: 944851 - RNA, 20 nt, Human
uucauucauuccacaacuuc

SEQ ID NO: 944852 - RNA, 20 nt, Human
cuuuggcaaugagaacaggg

SEQ ID NO: 944853 - RNA, 22 nt, Human
cugcuucugggaugauggagua

SEQ ID NO: 944854 - RNA, 22 nt, Human
agggagcucuaaguagagggac

SEQ ID NO: 944855 - RNA, 22 nt, Human
uaaaaugacuuccuccaacauc

SEQ ID NO: 944856 - RNA, 22 nt, Human
agcagggcagcugaugcgcacg

SEQ ID NO: 944857 - RNA, 22 nt, Human
ccauccugcauugcuauucaga

SEQ ID NO: 944858 - RNA, 22 nt, Human
ugccugggugcuggcuggucac

SEQ ID NO: 944859 - RNA, 21 nt, Human
ugagagccuccaaccggcuac

SEQ ID NO: 944860 - RNA, 22 nt, Human
auuagguaagauaaagcagagg

SEQ ID NO: 944861 - RNA, 22 nt, Human
cauuuguaauacugacuugcag

SEQ ID NO: 944862 - RNA, 22 nt, Human
gcagagaaaguuuuguccucag

SEQ ID NO: 944863 - RNA, 20 nt, Human
ucccuggaggugguggcauc

SEQ ID NO: 944864 - RNA, 22 nt, Human
uucuguaagggauuuauucuga

SEQ ID NO: 944865 - RNA, 22 nt, Human
uuuugaaagggugauuuggcuu

SEQ ID NO: 944866 - RNA, 22 nt, Human
cagcugacccagugaggaggca

SEQ ID NO: 944867 - RNA, 22 nt, Human
agcaaaguagcugcuguucuua

SEQ ID NO: 944868 - RNA, 22 nt, Human
uggagccagagcgcagccuggg

SEQ ID NO: 944869 - RNA, 22 nt, Human
augcccugcugcuggggcagug

SEQ ID NO: 944870 - RNA, 22 nt, Human
cagggccagagagggcuggcug

SEQ ID NO: 944871 - RNA, 22 nt, Human
aagucagagcaacugagacauu

SEQ ID NO: 944872 - RNA, 22 nt, Human
guuuucaaggggauuuaacuga

SEQ ID NO: 944873 - RNA, 22 nt, Human
auucacaaaugcugccccauuc

SEQ ID NO: 944874 - RNA, 22 nt, Human
acuugaaaggaagcucuaaaac

SEQ ID NO: 944875 - RNA, 23 nt, Human
gcagauggccccagagugcugcc

SEQ ID NO: 944876 - RNA, 22 nt, Human
uaccuugggguuuuguugcucu

SEQ ID NO: 944877 - RNA, 22 nt, Human
ccaggguguagggauuccagau

SEQ ID NO: 944878 - RNA, 22 nt, Human
cacagggcuucucauggggugc

SEQ ID NO: 944879 - RNA, 22 nt, Human
auuuucuaagccugucagacuu

SEQ ID NO: 944880 - RNA, 22 nt, Human
uccagaaacuuuuccagucuca

SEQ ID NO: 944881 - RNA, 22 nt, Human
ggccaaauuuggccaugagcau

SEQ ID NO: 944882 - RNA, 22 nt, Human
agcagagcccuuccauggccuu

SEQ ID NO: 944883 - RNA, 22 nt, Human
cagaggcagccgggggagaacg

SEQ ID NO: 944884 - RNA, 22 nt, Human
cacccagcagcacuuaagacua

SEQ ID NO: 944885 - RNA, 22 nt, Human
uuagugauuacuacauagauga

SEQ ID NO: 944886 - RNA, 22 nt, Human
agaaaacuugucacagcucuca

SEQ ID NO: 944887 - RNA, 22 nt, Human
gcagcugguuaaugggagaauu

SEQ ID NO: 944888 - RNA, 22 nt, Human
ucuuuggauaucgcuagaccgu

SEQ ID NO: 944889 - RNA, 19 nt, Human
ugucucagugucccuuccu

SEQ ID NO: 944890 - RNA, 22 nt, Human
gaaggaagucauuagugcagac

SEQ ID NO: 944891 - RNA, 22 nt, Human
uguuuuaaucucccauugcucu

SEQ ID NO: 944892 - RNA, 22 nt, Human
aagucauucuauuucucuaugu

SEQ ID NO: 944893 - RNA, 22 nt, Human
auggccugggcccgcuucagau

SEQ ID NO: 944894 - RNA, 22 nt, Human
cuugaaucuggcuuugccacuu

SEQ ID NO: 944895 - RNA, 22 nt, Human
uuggcagucucagucagauggc

SEQ ID NO: 944896 - RNA, 22 nt, Human
ccagcucucagcgggagacuca

SEQ ID NO: 944897 - RNA, 22 nt, Human
auuucacucauucauguuacuu

SEQ ID NO: 944898 - RNA, 22 nt, Human
ccugcaggggagagacuucuag

SEQ ID NO: 944899 - RNA, 22 nt, Human
cacaagagagugcgcguugcaa

SEQ ID NO: 944900 - RNA, 22 nt, Human
agaaauguuguggguuuuguua

SEQ ID NO: 944901 - RNA, 19 nt, Human
agggaguuuauauuugcac

SEQ ID NO: 944902 - RNA, 22 nt, Human
acugucuuccaggucuggaggu

SEQ ID NO: 944903 - RNA, 22 nt, Human
caagcuccuuacauccacaggg

SEQ ID NO: 944904 - RNA, 22 nt, Human
augugcuaaacucaacaaaucu

SEQ ID NO: 944905 - RNA, 22 nt, Human
ccuguccuccaagagcacaucu

SEQ ID NO: 944906 - RNA, 22 nt, Human
auccuugaacuuagacacuagg

SEQ ID NO: 944907 - RNA, 22 nt, Human
cacuccagccucagugacagag

SEQ ID NO: 944908 - RNA, 19 nt, Human
ucaaggcucccugagggau

SEQ ID NO: 944909 - RNA, 22 nt, Human
aauguguauaugaacauacagg

SEQ ID NO: 944910 - RNA, 23 nt, Human
cagaggcaucggauucaacauca

SEQ ID NO: 944911 - RNA, 22 nt, Human
gcugguuuccuuaucuauaaag

SEQ ID NO: 944912 - RNA, 22 nt, Human
agagacaggguuuugucguguu

SEQ ID NO: 944913 - RNA, 22 nt, Human
ggaggggagauguuugggcuca

SEQ ID NO: 944914 - RNA, 18 nt, Human
aaugcuauuguuauaggg

SEQ ID NO: 944915 - RNA, 23 nt, Human
gggugggccaaauuagguagccu

SEQ ID NO: 944916 - RNA, 22 nt, Human
aagcagcuggaagaguaagaug

SEQ ID NO: 944917 - RNA, 22 nt, Human
aaggcagcaggauuuggugacu

SEQ ID NO: 944918 - RNA, 22 nt, Human
ggcagaaggccucccagcuccu

SEQ ID NO: 944919 - RNA, 22 nt, Human
ggccaugguuggggaagacaug

SEQ ID NO: 944920 - RNA, 23 nt, Human
auucuucauuaucuucuagaaaa

SEQ ID NO: 944921 - RNA, 19 nt, Human
ggugaccaccuggucagug

SEQ ID NO: 944922 - RNA, 22 nt, Human
uauccaggaggaacucauuuug

SEQ ID NO: 944923 - RNA, 21 nt, Human
ccuggcagaagccugauaugc

SEQ ID NO: 944924 - RNA, 22 nt, Human
aaguuauuuccucgugacugaa

SEQ ID NO: 944925 - RNA, 22 nt, Human
gugugccagacaugaugcuaug

SEQ ID NO: 944926 - RNA, 22 nt, Human
cuggagccuucaccaggggaaa

SEQ ID NO: 944927 - RNA, 22 nt, Human
accaggaguugggggugggacc

SEQ ID NO: 944928 - RNA, 22 nt, Human
auccaugaucaauuuauuacua

SEQ ID NO: 944929 - RNA, 22 nt, Human
uuacuuuggauggucaagaaag

SEQ ID NO: 944930 - RNA, 22 nt, Human
uggcagcauuuuuuccagaaca

SEQ ID NO: 944931 - RNA, 22 nt, Human
aaaagucugcucucauuucaga

SEQ ID NO: 944932 - RNA, 22 nt, Human
uccuuucccuuuccauccuggc

SEQ ID NO: 944933 - RNA, 20 nt, Human
cugccaugauugauagagug

SEQ ID NO: 944934 - RNA, 20 nt, Human
cucugcagcaaggccugggu

SEQ ID NO: 944935 - RNA, 22 nt, Human
ugcauugcauuugucaugaaga

SEQ ID NO: 944936 - RNA, 22 nt, Human
gccuugggcacaggcagggccc

SEQ ID NO: 944937 - RNA, 22 nt, Human
ccagagagaaauggauuugagu

SEQ ID NO: 944938 - RNA, 22 nt, Human
cagcauggagacaaagugggca

SEQ ID NO: 944939 - RNA, 22 nt, Human
cugucccucaucaccucugggu

SEQ ID NO: 944940 - RNA, 22 nt, Human
gcaggagcugcucuccugacga

SEQ ID NO: 944941 - RNA, 22 nt, Human
aggcauguauaugugcacaugu

SEQ ID NO: 944942 - RNA, 22 nt, Human
accaaggagacaaagguguauu

SEQ ID NO: 944943 - RNA, 22 nt, Human
ggggaaggauugaguugaccca

SEQ ID NO: 944944 - RNA, 22 nt, Human
ucuccuggauagauacuaucca

SEQ ID NO: 944945 - RNA, 22 nt, Human
augggaggaagagaagaugucu

SEQ ID NO: 944946 - RNA, 22 nt, Human
uuuccucuuccgagggggaggc

SEQ ID NO: 944947 - RNA, 22 nt, Human
ccugugccagcugggcccugcc

SEQ ID NO: 944948 - RNA, 22 nt, Human
ucacucugcugcccgagggcug

SEQ ID NO: 944949 - RNA, 22 nt, Human
guaaaugugcuucuuuuaacuu

SEQ ID NO: 944950 - RNA, 22 nt, Human
cugagagucagcuucuccuccu

SEQ ID NO: 944951 - RNA, 22 nt, Human
uuaaauauuuucagcaggguca

SEQ ID NO: 944952 - RNA, 22 nt, Human
ccugggugaaaucucuccugca

SEQ ID NO: 944953 - RNA, 22 nt, Human
auccuugagccuuaucuuuugu

SEQ ID NO: 944954 - RNA, 22 nt, Human
aaauuauaggugccaccuugga

SEQ ID NO: 944955 - RNA, 22 nt, Human
gcucccagcauugcuucccagg

SEQ ID NO: 944956 - RNA, 22 nt, Human
auuauucuuaugucaucauggc

SEQ ID NO: 944957 - RNA, 22 nt, Human
agaggggcucauauccugucau

SEQ ID NO: 944958 - RNA, 22 nt, Human
acagccaggagccaugggcagg

SEQ ID NO: 944959 - RNA, 22 nt, Human
cagaacauucacucauaugugg

SEQ ID NO: 944960 - RNA, 23 nt, Human
ucacacagcuggucagguacaga

SEQ ID NO: 944961 - RNA, 22 nt, Human
uccuuagagacaagaccaguuu

SEQ ID NO: 944962 - RNA, 22 nt, Human
aacccagccguguagcugccgc

SEQ ID NO: 944963 - RNA, 22 nt, Human
uuaagucacuuaucuaaagaca

SEQ ID NO: 944964 - RNA, 20 nt, Human
uggcuccucuuggcuguggc

SEQ ID NO: 944965 - RNA, 22 nt, Human
augauguugauaaauuacuuua

SEQ ID NO: 944966 - RNA, 22 nt, Human
cauugcacuuuggguccaggac

SEQ ID NO: 944967 - RNA, 22 nt, Human
uucuguauauuguaaagacuca

SEQ ID NO: 944968 - RNA, 22 nt, Human
uccugccugagcguggaggagg

SEQ ID NO: 944969 - RNA, 22 nt, Human
cuggccgguauuugccucuggg

SEQ ID NO: 944970 - RNA, 22 nt, Human
aaguuuaagguggaaguggugg

SEQ ID NO: 944971 - RNA, 22 nt, Human
cacucuccagcacaccccauuu

SEQ ID NO: 944972 - RNA, 22 nt, Human
ggcugccuggaccuccucuuuc

SEQ ID NO: 944973 - RNA, 22 nt, Human
aagguacaaaguauuauuuaaa

SEQ ID NO: 944974 - RNA, 22 nt, Human
ggcugugcgggcagccguggga

SEQ ID NO: 944975 - RNA, 22 nt, Human
uuaugaaagacauuucuguugg

SEQ ID NO: 944976 - RNA, 22 nt, Human
ucugcagauuuaucagcagcug

SEQ ID NO: 944977 - RNA, 22 nt, Human
caucuggcuagcuaucauugug

SEQ ID NO: 944978 - RNA, 22 nt, Human
ugcucuucggggccacugcuug

SEQ ID NO: 944979 - RNA, 22 nt, Human
augaagcugaccuugucuugcu

SEQ ID NO: 944980 - RNA, 22 nt, Human
ucagaggacgcacuaggguugu

SEQ ID NO: 944981 - RNA, 22 nt, Human
uugcuuugccaccagaagucua

SEQ ID NO: 944982 - RNA, 22 nt, Human
cugggcagcuaccaccacugcu

SEQ ID NO: 944983 - RNA, 22 nt, Human
gggagcaggagccugccugcca

SEQ ID NO: 944984 - RNA, 22 nt, Human
ugcacuggggucccagcgcacg

SEQ ID NO: 944985 - RNA, 22 nt, Human
auuauuaggacuacugggguug

SEQ ID NO: 944986 - RNA, 22 nt, Human
gacagcaggaugugaggggaug

SEQ ID NO: 944987 - RNA, 22 nt, Human
ucaucuugcugccauugcuuua

SEQ ID NO: 944988 - RNA, 22 nt, Human
gcugauuauuacaugucugugg

SEQ ID NO: 944989 - RNA, 22 nt, Human
uuucuauaugaggagcuaaagu

SEQ ID NO: 944990 - RNA, 19 nt, Human
cagaguacaccagauagga

SEQ ID NO: 944991 - RNA, 22 nt, Human
gcuggccuuugaggaagcugcg

SEQ ID NO: 944992 - RNA, 22 nt, Human
ucauccaguuguggagagggaa

SEQ ID NO: 944993 - RNA, 22 nt, Human
ccuguguggaaaccgcaugacg

SEQ ID NO: 944994 - RNA, 22 nt, Human
aggagcugaagucucugcacuc

SEQ ID NO: 944995 - RNA, 22 nt, Human
gggccugggaacuugcauuuag

SEQ ID NO: 944996 - RNA, 22 nt, Human
aguauuucugcucaugaaagag

SEQ ID NO: 944997 - RNA, 22 nt, Human
ugcagcauugcaaagcagucuu

SEQ ID NO: 944998 - RNA, 22 nt, Human
uggccacacccaccuagaggag

SEQ ID NO: 944999 - RNA, 22 nt, Human
caaagguauucucauuuuggaa

SEQ ID NO: 945000 - RNA, 22 nt, Human
gggcagugguuacacagcugag

SEQ ID NO: 945001 - RNA, 22 nt, Human
agaggcagcagucauacuacag

SEQ ID NO: 945002 - RNA, 22 nt, Human
uugauacaggccuucuagauga

SEQ ID NO: 945003 - RNA, 22 nt, Human
cccagcuccaagggacagcgaa

SEQ ID NO: 945004 - RNA, 22 nt, Human
cggcagagcuuccugcucagcg

SEQ ID NO: 945005 - RNA, 22 nt, Human
auauuagguuggugcaaaagua

SEQ ID NO: 945006 - RNA, 22 nt, Human
cuggagccggcgagccccagcc

SEQ ID NO: 945007 - RNA, 22 nt, Human
uccuggccuugcgucuugggag

SEQ ID NO: 945008 - RNA, 22 nt, Human
ugaaggagcucaaugaugaugc

SEQ ID NO: 945009 - RNA, 22 nt, Human
gcccuuccuuagacagcaggau

SEQ ID NO: 945010 - RNA, 22 nt, Human
ucugccaccuucauccuccacu

SEQ ID NO: 945011 - RNA, 22 nt, Human
ucccugcucagcucaccuggca

SEQ ID NO: 945012 - RNA, 22 nt, Human
cacaggcuugucagcaugaggc

SEQ ID NO: 945013 - RNA, 22 nt, Human
gcugcugucacggugcuaaggg

SEQ ID NO: 945014 - RNA, 22 nt, Human
ucccagccuuccagucugguuu

SEQ ID NO: 945015 - RNA, 22 nt, Human
ucacugcagagaccucuaguca

SEQ ID NO: 945016 - RNA, 22 nt, Human
uuucuauagcuuucuugggagu

SEQ ID NO: 945017 - RNA, 22 nt, Human
ggcacugggagaggugagacgg

SEQ ID NO: 945018 - RNA, 22 nt, Human
aaaucagacuugaauuuucauc

SEQ ID NO: 945019 - RNA, 22 nt, Human
uugcauuugacaaauuauuuaa

SEQ ID NO: 945020 - RNA, 22 nt, Human
gugauuucuaaucaucugaaug

SEQ ID NO: 945021 - RNA, 22 nt, Human
cuggccugggagcugcuagcgu

SEQ ID NO: 945022 - RNA, 22 nt, Human
aagcccaguuucacacugagac

SEQ ID NO: 945023 - RNA, 22 nt, Human
ucuacuuuucccuauacaguuu

SEQ ID NO: 945024 - RNA, 22 nt, Human
agucugucuacuuaaagucugu

SEQ ID NO: 945025 - RNA, 22 nt, Human
cagccagaaccuaggaugagcu

SEQ ID NO: 945026 - RNA, 22 nt, Human
cucugucccagacccaccucuc

SEQ ID NO: 945027 - RNA, 19 nt, Human
ugagagugaggaaggcuuc

SEQ ID NO: 945028 - RNA, 22 nt, Human
gccauaaauugcuggucaaaau

SEQ ID NO: 945029 - RNA, 22 nt, Human
ucuuagaaguuuauggcacgga

SEQ ID NO: 945030 - RNA, 22 nt, Human
gaggagaggggcucccaagagc

SEQ ID NO: 945031 - RNA, 22 nt, Human
cagcuccucacgagucuugaaa

SEQ ID NO: 945032 - RNA, 22 nt, Human
cuucugcaauaaguuuuggucc

SEQ ID NO: 945033 - RNA, 22 nt, Human
auucuguauggggaaacuagag

SEQ ID NO: 945034 - RNA, 22 nt, Human
gagagcugggcuuugggugaag

SEQ ID NO: 945035 - RNA, 22 nt, Human
cauuucuguacauguuuuggug

SEQ ID NO: 945036 - RNA, 17 nt, Human
acagaggcaggagugga

SEQ ID NO: 945037 - RNA, 22 nt, Human
ucagagugggagaaugugccaa

SEQ ID NO: 945038 - RNA, 22 nt, Human
uuucuuauauucugucauuguu

SEQ ID NO: 945039 - RNA, 22 nt, Human
uguauuuucuucuggaagcuua

SEQ ID NO: 945040 - RNA, 20 nt, Human
uccagcugucuuucagagac

SEQ ID NO: 945041 - RNA, 22 nt, Human
caaaaguaauugugguuuuugc

SEQ ID NO: 945042 - RNA, 22 nt, Human
cagccuuugggucagaagauuc

SEQ ID NO: 945043 - RNA, 22 nt, Human
ucuggccuacuggaguccauga

SEQ ID NO: 945044 - RNA, 22 nt, Human
guauuaggaggaacacaggccu

SEQ ID NO: 945045 - RNA, 22 nt, Human
ucauuauccuaguaucuugaau

SEQ ID NO: 945046 - RNA, 18 nt, Human
aacuucaacuacaaugga

SEQ ID NO: 945047 - RNA, 22 nt, Human
cagagaaacucagauagcugau

SEQ ID NO: 945048 - RNA, 22 nt, Human
gauuuucauuauagcuaguuuc

SEQ ID NO: 945049 - RNA, 22 nt, Human
auuucuuuucaagagggugcuu

SEQ ID NO: 945050 - RNA, 22 nt, Human
uugaagcaaauucugugcagua

SEQ ID NO: 945051 - RNA, 22 nt, Human
aggcacuggguaauuaguagcu

SEQ ID NO: 945052 - RNA, 22 nt, Human
aauaacuucaguucuuacauua

SEQ ID NO: 945053 - RNA, 22 nt, Human
ucuccuggaagugauuccccug

SEQ ID NO: 945054 - RNA, 22 nt, Human
aggaagcucggagagggcaaau

SEQ ID NO: 945055 - RNA, 22 nt, Human
cucuccucugaaguggugaccc

SEQ ID NO: 945056 - RNA, 22 nt, Human
caagagcuuuagaaaugcucau

SEQ ID NO: 945057 - RNA, 22 nt, Human
uuguaaauaguaguaagaugcc

SEQ ID NO: 945058 - RNA, 22 nt, Human
ggugccaggcuguagucagggu

SEQ ID NO: 945059 - RNA, 22 nt, Human
cuauuuucauucuuacauuguc

SEQ ID NO: 945060 - RNA, 22 nt, Human
cggagaggaccugcaacucgcu

SEQ ID NO: 945061 - RNA, 22 nt, Human
aguucuucauaaccuuacugug

SEQ ID NO: 945062 - RNA, 22 nt, Human
auuacacaggauuugccuuacu

SEQ ID NO: 945063 - RNA, 22 nt, Human
uuguuugaggucacugauauuu

SEQ ID NO: 945064 - RNA, 22 nt, Human
ugcuccuuccucauccugugca

SEQ ID NO: 945065 - RNA, 22 nt, Human
uugugaaacauucauggauuug

SEQ ID NO: 945066 - RNA, 22 nt, Human
acccaggauaaucuguguaucu

SEQ ID NO: 945067 - RNA, 20 nt, Human
aucuggcucagauccugcag

SEQ ID NO: 945068 - RNA, 22 nt, Human
cccaggagguagagguugcagu

SEQ ID NO: 945069 - RNA, 22 nt, Human
gaggcagccucaguggaccucg

SEQ ID NO: 945070 - RNA, 22 nt, Human
agaaaucuaagaugcucaagga

SEQ ID NO: 945071 - RNA, 22 nt, Human
ugccugagugauguggcagcca

SEQ ID NO: 945072 - RNA, 22 nt, Human
ccuguucauuuuuugacucugc

SEQ ID NO: 945073 - RNA, 22 nt, Human
uccucagaaaccccugugaggu

SEQ ID NO: 945074 - RNA, 22 nt, Human
gggggcucugacucccucagcu

SEQ ID NO: 945075 - RNA, 22 nt, Human
cugcucuggucucuucauguuu

SEQ ID NO: 945076 - RNA, 20 nt, Human
cucuccuugccgacuuggca

SEQ ID NO: 945077 - RNA, 22 nt, Human
aucaggaugaagcuguagcgaa

SEQ ID NO: 945078 - RNA, 22 nt, Human
gaggccugguuuccagcauccu

SEQ ID NO: 945079 - RNA, 22 nt, Human
ucuggagcuuccucauuuacag

SEQ ID NO: 945080 - RNA, 22 nt, Human
gagacagcagggccagggccug

SEQ ID NO: 945081 - RNA, 22 nt, Human
gcauuuaaauuugaacuucaga

SEQ ID NO: 945082 - RNA, 22 nt, Human
gcaggagucacugacuuggucc

SEQ ID NO: 945083 - RNA, 22 nt, Human
ugcaggagcugugcggugaggg

SEQ ID NO: 945084 - RNA, 22 nt, Human
ugaagccacagagcaucugccu

SEQ ID NO: 945085 - RNA, 21 nt, Human
uggcagacaggaggagcucac

SEQ ID NO: 945086 - RNA, 22 nt, Human
ggaugcugcuaucaggcuucga

SEQ ID NO: 945087 - RNA, 22 nt, Human
cugaagaugucugagaugcuca

SEQ ID NO: 945088 - RNA, 22 nt, Human
gcaggauggugcccuuucugcc

SEQ ID NO: 945089 - RNA, 23 nt, Human
uugaaagguagcuggcagcuaga

SEQ ID NO: 945090 - RNA, 22 nt, Human
caggaggccaacugugggacuu

SEQ ID NO: 945091 - RNA, 22 nt, Human
uuuuaaguuaauauaauugagg

SEQ ID NO: 945092 - RNA, 22 nt, Human
auacauacguacauacguaugu

SEQ ID NO: 945093 - RNA, 22 nt, Human
ccuggaugauccaugucaugga

SEQ ID NO: 945094 - RNA, 22 nt, Human
uauuauuaaauggcagaauuuu

SEQ ID NO: 945095 - RNA, 18 nt, Human
acauuucuccuucugacc

SEQ ID NO: 945096 - RNA, 22 nt, Human
auacacaugcacacaugugugu

SEQ ID NO: 945097 - RNA, 22 nt, Human
uaaaaaguagugagaauggcgc

SEQ ID NO: 945098 - RNA, 22 nt, Human
acauuguauaaugauuaucaca

SEQ ID NO: 945099 - RNA, 22 nt, Human
acagugucuccugguacccagu

SEQ ID NO: 945100 - RNA, 17 nt, Human
ucugaagccagucugcu

SEQ ID NO: 945101 - RNA, 22 nt, Human
ccuucagaccuagacaggaauc

SEQ ID NO: 945102 - RNA, 22 nt, Human
uucuuacagaguuuacagagcc

SEQ ID NO: 945103 - RNA, 22 nt, Human
gagggaauggugugcaagaggu

SEQ ID NO: 945104 - RNA, 22 nt, Human
cccaggaaaugaacuucugauu

SEQ ID NO: 945105 - RNA, 22 nt, Human
gcaucuaaacuugcaucauugu

SEQ ID NO: 945106 - RNA, 22 nt, Human
gcucagaaaagugaggcucagu

SEQ ID NO: 945107 - RNA, 22 nt, Human
cagcagagaccaagugauuuga

SEQ ID NO: 945108 - RNA, 22 nt, Human
gaaauacaaaugccuagauccu

SEQ ID NO: 945109 - RNA, 22 nt, Human
gcugguccacucccuggaggcu

SEQ ID NO: 945110 - RNA, 21 nt, Human
gagcucucaggcaagaagcag

SEQ ID NO: 945111 - RNA, 22 nt, Human
uccauaagcagguucuuccuga

SEQ ID NO: 945112 - RNA, 22 nt, Human
aacauucugguucuaaaaaccu

SEQ ID NO: 945113 - RNA, 22 nt, Human
cccaggagauggugcguggucu

SEQ ID NO: 945114 - RNA, 22 nt, Human
aguggacucuucccagugcuug

SEQ ID NO: 945115 - RNA, 22 nt, Human
ugaaagcacugauucucaacuc

SEQ ID NO: 945116 - RNA, 21 nt, Human
agcagagugcuuugacuuugu

SEQ ID NO: 945117 - RNA, 20 nt, Human
aguaggggaaugcaagagca

SEQ ID NO: 945118 - RNA, 22 nt, Human
acacucugcucugagcuucagg

SEQ ID NO: 945119 - RNA, 22 nt, Human
uacuuugcagcuugauaaaaug

SEQ ID NO: 945120 - RNA, 20 nt, Human
accccagccccucuaucuga

SEQ ID NO: 945121 - RNA, 22 nt, Human
ccccuuccgucucuugaguguc

SEQ ID NO: 945122 - RNA, 22 nt, Human
ucaaguauaucuagucauuagg

SEQ ID NO: 945123 - RNA, 22 nt, Human
cauugcacuucugcuuuuccuc

SEQ ID NO: 945124 - RNA, 22 nt, Human
gagaggcaggcgcugcaauggu

SEQ ID NO: 945125 - RNA, 22 nt, Human
aagugaagaaauacaugagaau

SEQ ID NO: 945126 - RNA, 22 nt, Human
uuauuaaugaguacaaguuauu

SEQ ID NO: 945127 - RNA, 22 nt, Human
ccagagccagagaggugccugc

SEQ ID NO: 945128 - RNA, 22 nt, Human
ggccaggcuggucucagacuuc

SEQ ID NO: 945129 - RNA, 22 nt, Human
auguagagcaguguuguccaau

SEQ ID NO: 945130 - RNA, 22 nt, Human
uggacagcgaaagugccuggga

SEQ ID NO: 945131 - RNA, 22 nt, Human
cuucacaacgacaucugguuag

SEQ ID NO: 945132 - RNA, 22 nt, Human
uggcaccaggcgggguggcugu

SEQ ID NO: 945133 - RNA, 22 nt, Human
agggcagaaaccaccuugaugg

SEQ ID NO: 945134 - RNA, 21 nt, Human
aaauguguuccauaaugcuuu

SEQ ID NO: 945135 - RNA, 22 nt, Human
gagacacacacaggagguggca

SEQ ID NO: 945136 - RNA, 22 nt, Human
aauuucagaacccaaauuagcg

SEQ ID NO: 945137 - RNA, 18 nt, Human
gggcaagcggcugucacc

SEQ ID NO: 945138 - RNA, 22 nt, Human
acacuaaugagaaaggaauuaa

SEQ ID NO: 945139 - RNA, 22 nt, Human
gugguuuucuccaacccagaac

SEQ ID NO: 945140 - RNA, 22 nt, Human
agccauugaauuuagugccuuu

SEQ ID NO: 945141 - RNA, 22 nt, Human
acugccugcucauaacauugcu

SEQ ID NO: 945142 - RNA, 22 nt, Human
ccugggcagguguggcuucccc

SEQ ID NO: 945143 - RNA, 22 nt, Human
acagggcauuuccucuaugugu

SEQ ID NO: 945144 - RNA, 22 nt, Human
cugccucucaggucccugagau

SEQ ID NO: 945145 - RNA, 22 nt, Human
ucugccugcuaacuccugcacc

SEQ ID NO: 945146 - RNA, 21 nt, Human
cugaggcagcacagcuaguca

SEQ ID NO: 945147 - RNA, 22 nt, Human
aauagaauguaaucuaauacau

SEQ ID NO: 945148 - RNA, 19 nt, Human
gcaugcuugguggcuucug

SEQ ID NO: 945149 - RNA, 22 nt, Human
aggucacacuuggaucauagaa

SEQ ID NO: 945150 - RNA, 22 nt, Human
cagugccaugucugagccccua

SEQ ID NO: 945151 - RNA, 19 nt, Human
cccaggaggcggagguugc

SEQ ID NO: 945152 - RNA, 22 nt, Human
gaaagaagcuuuagauggcuau

SEQ ID NO: 945153 - RNA, 22 nt, Human
gcacagggcaacaggucuguua

SEQ ID NO: 945154 - RNA, 22 nt, Human
ggugggcaggucacucugccuc

SEQ ID NO: 945155 - RNA, 22 nt, Human
caggcuugggagcagagccacu

SEQ ID NO: 945156 - RNA, 20 nt, Human
gcaggcagggaaugggggug

SEQ ID NO: 945157 - RNA, 22 nt, Human
cagcaggaccauugaggcauca

SEQ ID NO: 945158 - RNA, 22 nt, Human
cacucugcagcugaagggcugg

SEQ ID NO: 945159 - RNA, 22 nt, Human
gggaaauugucaacacucucaa

SEQ ID NO: 945160 - RNA, 22 nt, Human
agugcagccgagaucaggugcu

SEQ ID NO: 945161 - RNA, 22 nt, Human
cuucucagucaccugugagucu

SEQ ID NO: 945162 - RNA, 22 nt, Human
uugaacaguccuaagagacccu

SEQ ID NO: 945163 - RNA, 17 nt, Human
uagcuguguuucagcua

SEQ ID NO: 945164 - RNA, 22 nt, Human
uaaccaaagggccuaaggaaug

SEQ ID NO: 945165 - RNA, 22 nt, Human
ggcuucugccacgagagggaag

SEQ ID NO: 945166 - RNA, 20 nt, Human
aagaaacuugaaaguacaag

SEQ ID NO: 945167 - RNA, 22 nt, Human
ugggcagacugagcccuguccc

SEQ ID NO: 945168 - RNA, 22 nt, Human
acuggcaguuugagaaugcauu

SEQ ID NO: 945169 - RNA, 22 nt, Human
accugccuucucaaggacauga

SEQ ID NO: 945170 - RNA, 22 nt, Human
ucccaggagcaccuuuugagcc

SEQ ID NO: 945171 - RNA, 22 nt, Human
ccagaggcauguucaaagcaau

SEQ ID NO: 945172 - RNA, 23 nt, Human
aggcagcagguuguccaggguga

SEQ ID NO: 945173 - RNA, 22 nt, Human
gccaggcuccccggaucccugg

SEQ ID NO: 945174 - RNA, 22 nt, Human
ccuuugggugaauuccucucuu

SEQ ID NO: 945175 - RNA, 22 nt, Human
ucucagaguaauucuuuaaggu

SEQ ID NO: 945176 - RNA, 22 nt, Human
aacaguaaagacagaauuuauc

SEQ ID NO: 945177 - RNA, 22 nt, Human
gacagcaggagaucaugauaga

SEQ ID NO: 945178 - RNA, 22 nt, Human
aaggcucucugauggcagcagu

SEQ ID NO: 945179 - RNA, 22 nt, Human
ccucugcaccauagccuucagc

SEQ ID NO: 945180 - RNA, 22 nt, Human
augcaguacugauacaugccac

SEQ ID NO: 945181 - RNA, 22 nt, Human
uuugacauuggcuuauucuguu

SEQ ID NO: 945182 - RNA, 22 nt, Human
cauggcagcaauuuuccugacu

SEQ ID NO: 945183 - RNA, 22 nt, Human
ccucacucugcacccugcagca

SEQ ID NO: 945184 - RNA, 22 nt, Human
acuuuuuacaggguguauacca

SEQ ID NO: 945185 - RNA, 22 nt, Human
ugggcagaaugugggauccaga

SEQ ID NO: 945186 - RNA, 22 nt, Human
cacacuuuuggcauguuugguu

SEQ ID NO: 945187 - RNA, 22 nt, Human
cccucugcaggcuggaccugcc

SEQ ID NO: 945188 - RNA, 22 nt, Human
aggaccagaggccagagucagc

SEQ ID NO: 945189 - RNA, 22 nt, Human
acauaucuuucccucuccugaa

SEQ ID NO: 945190 - RNA, 22 nt, Human
aguggcagaucucuggucugga

SEQ ID NO: 945191 - RNA, 22 nt, Human
acuuucauguuggugaaggguu

SEQ ID NO: 945192 - RNA, 22 nt, Human
cagcauuggguuaccuuuguuu

SEQ ID NO: 945193 - RNA, 22 nt, Human
gggcacagcugcuacccagugc

SEQ ID NO: 945194 - RNA, 22 nt, Human
cacagcagagggagccauugaa

SEQ ID NO: 945195 - RNA, 22 nt, Human
agauaacuuuuggguauucaug

SEQ ID NO: 945196 - RNA, 22 nt, Human
aaugugguuaacccauuuaaga

SEQ ID NO: 945197 - RNA, 22 nt, Human
ccccagcugcauacuugccaag

SEQ ID NO: 945198 - RNA, 17 nt, Human
agcugccagggagugug

SEQ ID NO: 945199 - RNA, 21 nt, Human
agcugcuccagggagcucagg

SEQ ID NO: 945200 - RNA, 22 nt, Human
cagagcugcuucccaguuugug

SEQ ID NO: 945201 - RNA, 22 nt, Human
gccuuucaguuccaucaaagga

SEQ ID NO: 945202 - RNA, 22 nt, Human
guggccaauaggagcagcuauc

SEQ ID NO: 945203 - RNA, 22 nt, Human
cuugauguauaaguugauaugu

SEQ ID NO: 945204 - RNA, 22 nt, Human
aacuagaaaacaagaugcugau

SEQ ID NO: 945205 - RNA, 22 nt, Human
gggcugccaagccugccugccu

SEQ ID NO: 945206 - RNA, 17 nt, Human
aggcauggucuggggug

SEQ ID NO: 945207 - RNA, 22 nt, Human
aagcagccaccucaucuccacu

SEQ ID NO: 945208 - RNA, 22 nt, Human
uuagaaaugauuucaccucuuu

SEQ ID NO: 945209 - RNA, 22 nt, Human
auaaugugaagauaaugcaaga

SEQ ID NO: 945210 - RNA, 22 nt, Human
gaggcagagugcaccccaggag

SEQ ID NO: 945211 - RNA, 22 nt, Human
ugguggcuguugcagaacugag

SEQ ID NO: 945212 - RNA, 22 nt, Human
cagcaggcucugaguggcugcc

SEQ ID NO: 945213 - RNA, 22 nt, Human
uuuguuaaauauuuauugagug

SEQ ID NO: 945214 - RNA, 22 nt, Human
acauacuaugaauacauguguc

SEQ ID NO: 945215 - RNA, 22 nt, Human
caggcacucauucagagaggug

SEQ ID NO: 945216 - RNA, 22 nt, Human
cuggagaggccccaagauauuu

SEQ ID NO: 945217 - RNA, 22 nt, Human
acugggagggucuugaagaggg

SEQ ID NO: 945218 - RNA, 22 nt, Human
caauagcagcuucugaaugcaa

SEQ ID NO: 945219 - RNA, 22 nt, Human
cucucuguuaugcuuucaugaa

SEQ ID NO: 945220 - RNA, 22 nt, Human
auucugaguccaugggggcagg

SEQ ID NO: 945221 - RNA, 22 nt, Human
gccagugguagaggggaggccg

SEQ ID NO: 945222 - RNA, 22 nt, Human
gauuucuugauaauucaaaucc

SEQ ID NO: 945223 - RNA, 22 nt, Human
gaagagcuuaguuguccuagaa

SEQ ID NO: 945224 - RNA, 22 nt, Human
agauguuccagccaaugggaau

SEQ ID NO: 945225 - RNA, 22 nt, Human
auauacuuggagacuaucauug

SEQ ID NO: 945226 - RNA, 21 nt, Human
uagcagaaacaguucaggcca

SEQ ID NO: 945227 - RNA, 22 nt, Human
aauuaggagaaaacuguugucu

SEQ ID NO: 945228 - RNA, 22 nt, Human
ggcaggagaauggcgugaacuc

SEQ ID NO: 945229 - RNA, 22 nt, Human
caggcugaucagggcugggaug

SEQ ID NO: 945230 - RNA, 22 nt, Human
ucuguucaguuguaccuucccc

SEQ ID NO: 945231 - RNA, 22 nt, Human
auggaguucuuuaaauucacag

SEQ ID NO: 945232 - RNA, 21 nt, Human
ugaaugaggaggauggcauuu

SEQ ID NO: 945233 - RNA, 22 nt, Human
cugaacuuauugagugcuugcu

SEQ ID NO: 945234 - RNA, 22 nt, Human
aggagcccugcgggaggcagag

SEQ ID NO: 945235 - RNA, 22 nt, Human
ccuagagcucugcuuuaucuaa

SEQ ID NO: 945236 - RNA, 22 nt, Human
uggccugccccgagauccuggc

SEQ ID NO: 945237 - RNA, 22 nt, Human
aggccugcagcaggagcaaacc

SEQ ID NO: 945238 - RNA, 22 nt, Human
gcucccaggaugaggagccagg

SEQ ID NO: 945239 - RNA, 22 nt, Human
uggcucagcauucacuggucuu

SEQ ID NO: 945240 - RNA, 22 nt, Human
aaggccugcucagcugucugug

SEQ ID NO: 945241 - RNA, 22 nt, Human
guauguauguauauguuuaaga

SEQ ID NO: 945242 - RNA, 22 nt, Human
ggcuccucucuggccgcucccg

SEQ ID NO: 945243 - RNA, 22 nt, Human
uggcuuccacugugugcccccu

SEQ ID NO: 945244 - RNA, 22 nt, Human
gugugcagugagcaaaagaucu

SEQ ID NO: 945245 - RNA, 22 nt, Human
gcaggccagcugugcagauggg

SEQ ID NO: 945246 - RNA, 22 nt, Human
acugaaggguaaugugggagcc

SEQ ID NO: 945247 - RNA, 22 nt, Human
uuuccuaugauauucuaugugu

SEQ ID NO: 945248 - RNA, 22 nt, Human
agagccuguuuugugggagaug

SEQ ID NO: 945249 - RNA, 22 nt, Human
cuacccaggcuuagagggcugg

SEQ ID NO: 945250 - RNA, 22 nt, Human
gggagccaaggagagaggccuu

SEQ ID NO: 945251 - RNA, 22 nt, Human
aagaauaaauuaagauacuuag

SEQ ID NO: 945252 - RNA, 22 nt, Human
uuaugcuaaaugaaucaaguca

SEQ ID NO: 945253 - RNA, 22 nt, Human
uucugagguccaugcaguacug

SEQ ID NO: 945254 - RNA, 22 nt, Human
ggcagagcuugcagugagccga

SEQ ID NO: 945255 - RNA, 22 nt, Human
ucuucacauggaacaugaagcu

SEQ ID NO: 945256 - RNA, 22 nt, Human
ugaaagguguccaauauuucuc

SEQ ID NO: 945257 - RNA, 20 nt, Human
agugccagggcaggugagag

SEQ ID NO: 945258 - RNA, 22 nt, Human
uaacagaagaugaaacuucuuu

SEQ ID NO: 945259 - RNA, 22 nt, Human
accaggagcauuuuuuauuagu

SEQ ID NO: 945260 - RNA, 22 nt, Human
aacugcauucagaaagcucacu

SEQ ID NO: 945261 - RNA, 22 nt, Human
ucugggagcagaugaugguaua

SEQ ID NO: 945262 - RNA, 22 nt, Human
caccguuugguuuggauuuaca

SEQ ID NO: 945263 - RNA, 22 nt, Human
acuuucucaaaucagacuuuaa

SEQ ID NO: 945264 - RNA, 22 nt, Human
auguaguguagagauuagucuc

SEQ ID NO: 945265 - RNA, 22 nt, Human
gccaagaguuuccagcugcaag

SEQ ID NO: 945266 - RNA, 22 nt, Human
aggcacugagaggcuguguugc

SEQ ID NO: 945267 - RNA, 22 nt, Human
ucacaguuauagucuguagaau

SEQ ID NO: 945268 - RNA, 22 nt, Human
acacagggcggaaagcaugaga

SEQ ID NO: 945269 - RNA, 22 nt, Human
gcugucacaaauauuucucagc

SEQ ID NO: 945270 - RNA, 22 nt, Human
guuucauacagauuauucaugg

SEQ ID NO: 945271 - RNA, 22 nt, Human
cugggcugcagcgggagcgacg

SEQ ID NO: 945272 - RNA, 22 nt, Human
gcuguucacagacucugcucug

SEQ ID NO: 945273 - RNA, 22 nt, Human
agggccagggaagcuguauuuu

SEQ ID NO: 945274 - RNA, 22 nt, Human
agcugcucaggagagccagguc

SEQ ID NO: 945275 - RNA, 20 nt, Human
ugaaaaggucaggagacaug

SEQ ID NO: 945276 - RNA, 22 nt, Human
gcagaggauagcauaugaaccu

SEQ ID NO: 945277 - RNA, 22 nt, Human
agcuuguuaaggaugcauauua

SEQ ID NO: 945278 - RNA, 21 nt, Human
ccuggcugcacaguugcuggu

SEQ ID NO: 945279 - RNA, 22 nt, Human
uuuccucugggcccugccaccc

SEQ ID NO: 945280 - RNA, 22 nt, Human
uauagaagagacaugugcauag

SEQ ID NO: 945281 - RNA, 22 nt, Human
gcucucuggaggccauggacag

SEQ ID NO: 945282 - RNA, 22 nt, Human
guggcugcuaagucuccuuccu

SEQ ID NO: 945283 - RNA, 22 nt, Human
gauuuauuggucuuucauuggu

SEQ ID NO: 945284 - RNA, 22 nt, Human
uggagggaacaaaggaguccca

SEQ ID NO: 945285 - RNA, 23 nt, Human
cagugcagggcaacucagacucc

SEQ ID NO: 945286 - RNA, 22 nt, Human
agaagcugccuacaugaccagc

SEQ ID NO: 945287 - RNA, 22 nt, Human
uaggcagggauuaggguugauu

SEQ ID NO: 945288 - RNA, 23 nt, Human
cauaaaauauuaguaugguagca

SEQ ID NO: 945289 - RNA, 21 nt, Human
ccauaccuaccucaccugguu

SEQ ID NO: 945290 - RNA, 17 nt, Human
ugcauuguaggcuagcc

SEQ ID NO: 945291 - RNA, 22 nt, Human
uuuguuaaggaguauugcuucu

SEQ ID NO: 945292 - RNA, 22 nt, Human
acccaggagacggaggugcagu

SEQ ID NO: 945293 - RNA, 22 nt, Human
ucugugaacaucacauugacag

SEQ ID NO: 945294 - RNA, 22 nt, Human
gggcucugggaugcucuuagag

SEQ ID NO: 945295 - RNA, 22 nt, Human
augcacuaugaugagcuagucu

SEQ ID NO: 945296 - RNA, 22 nt, Human
aagcaccucuaugauugcuuuu

SEQ ID NO: 945297 - RNA, 22 nt, Human
cugcugggucuaugcaagugga

SEQ ID NO: 945298 - RNA, 22 nt, Human
uguuuuauuucuccaagaggga

SEQ ID NO: 945299 - RNA, 22 nt, Human
gcugccucaggcaccuccuggc

SEQ ID NO: 945300 - RNA, 22 nt, Human
uuaauacagucuccagaaguaa

SEQ ID NO: 945301 - RNA, 22 nt, Human
auugagaauccauuugagauga

SEQ ID NO: 945302 - RNA, 22 nt, Human
aucaggaucaugcuggguggga

SEQ ID NO: 945303 - RNA, 22 nt, Human
cuggacuuuggcccaucugcca

SEQ ID NO: 945304 - RNA, 22 nt, Human
cucaugucuucacccauucuaa

SEQ ID NO: 945305 - RNA, 22 nt, Human
ugcagcugguuuagaacuagau

SEQ ID NO: 945306 - RNA, 22 nt, Human
cagaccuggaaaacaggcuugc

SEQ ID NO: 945307 - RNA, 22 nt, Human
gaaaaaugcuccaaaucugugg

SEQ ID NO: 945308 - RNA, 21 nt, Human
uccucugcagugagguggccu

SEQ ID NO: 945309 - RNA, 22 nt, Human
ugcagaggugaaagacuagcaa

SEQ ID NO: 945310 - RNA, 22 nt, Human
agcagggcuugccgcuuguccu

SEQ ID NO: 945311 - RNA, 22 nt, Human
uugcaaaugggcaaagcagauc

SEQ ID NO: 945312 - RNA, 22 nt, Human
cugugucggacgugggcagcag

SEQ ID NO: 945313 - RNA, 22 nt, Human
aggccagcucacccuggcuccu

SEQ ID NO: 945314 - RNA, 22 nt, Human
agagggcccauguugggcugcu

SEQ ID NO: 945315 - RNA, 22 nt, Human
gcucagggaacuuuuugcaggc

SEQ ID NO: 945316 - RNA, 22 nt, Human
uggccugguaccacauagauuu

SEQ ID NO: 945317 - RNA, 22 nt, Human
ugaggcuggcaaggcugguauu

SEQ ID NO: 945318 - RNA, 22 nt, Human
ucacaugcccuguauuuaccag

SEQ ID NO: 945319 - RNA, 22 nt, Human
aauguguagauguugcauuccu

SEQ ID NO: 945320 - RNA, 22 nt, Human
ucugcaggcucuagaugagguu

SEQ ID NO: 945321 - RNA, 22 nt, Human
ggagcugggacccugucaucug

SEQ ID NO: 945322 - RNA, 22 nt, Human
acugggaggcaaagagcaagga

SEQ ID NO: 945323 - RNA, 23 nt, Human
uggccuggagagaaaagaugagu

SEQ ID NO: 945324 - RNA, 22 nt, Human
ccugucagaugaaguaauugug

SEQ ID NO: 945325 - RNA, 22 nt, Human
auucacaaagucacccuuacac

SEQ ID NO: 945326 - RNA, 17 nt, Human
ucaggauccaggguucu

SEQ ID NO: 945327 - RNA, 21 nt, Human
ccaggcuccugaggcugguca

SEQ ID NO: 945328 - RNA, 22 nt, Human
ugcaggccggcccuaggccuca

SEQ ID NO: 945329 - RNA, 22 nt, Human
cccuuggggcucuuugccaggc

SEQ ID NO: 945330 - RNA, 23 nt, Human
gggcaguuauguuguccuuggcu

SEQ ID NO: 945331 - RNA, 19 nt, Human
ggcugucucggcccagcca

SEQ ID NO: 945332 - RNA, 22 nt, Human
uagggcagauucgguggaguuu

SEQ ID NO: 945333 - RNA, 23 nt, Human
uagggcagcugggagggacaugc

SEQ ID NO: 945334 - RNA, 22 nt, Human
gcagugaaucuggcaagaauuu

SEQ ID NO: 945335 - RNA, 22 nt, Human
ugucauuuucuaaucuguuguc

SEQ ID NO: 945336 - RNA, 22 nt, Human
uagcagcucacagccucccauu

SEQ ID NO: 945337 - RNA, 19 nt, Human
ucugcuggcagaauucccu

SEQ ID NO: 945338 - RNA, 22 nt, Human
ggagagcugguagcuggcucca

SEQ ID NO: 945339 - RNA, 22 nt, Human
gcuggagguuucaccugaguuu

SEQ ID NO: 945340 - RNA, 22 nt, Human
cagagagagugggguguggauu

SEQ ID NO: 945341 - RNA, 22 nt, Human
augcagcugugggcaagaaaug

SEQ ID NO: 945342 - RNA, 21 nt, Human
caggaaaagcggaagucuagc

SEQ ID NO: 945343 - RNA, 22 nt, Human
aaucuucacagaaaaaugucug

SEQ ID NO: 945344 - RNA, 22 nt, Human
caggcagcugaggacuuugcua

SEQ ID NO: 945345 - RNA, 22 nt, Human
aauaauguuaugucauucuucu

SEQ ID NO: 945346 - RNA, 22 nt, Human
gggauggggggaagcguccaug

SEQ ID NO: 945347 - RNA, 22 nt, Human
caaaaugugagucccaccucaa

SEQ ID NO: 945348 - RNA, 22 nt, Human
uucuuuccucccagccuuugga

SEQ ID NO: 945349 - RNA, 22 nt, Human
gcagccacuaguuuuccuguuu

SEQ ID NO: 945350 - RNA, 22 nt, Human
ccccaccugugcgucugccgca

SEQ ID NO: 945351 - RNA, 20 nt, Human
cugugcuuuggaaccuggaa

SEQ ID NO: 945352 - RNA, 18 nt, Human
gcuggcugcacuucugcu

SEQ ID NO: 945353 - RNA, 22 nt, Human
ggccugugagcccuugcaugua

SEQ ID NO: 945354 - RNA, 22 nt, Human
cuccaggagggggauggcugua

SEQ ID NO: 945355 - RNA, 22 nt, Human
acagggccaggugagaggugcu

SEQ ID NO: 945356 - RNA, 22 nt, Human
acagagccuccaggagugcugg

SEQ ID NO: 945357 - RNA, 22 nt, Human
uggcagagaacacggcugaucu

SEQ ID NO: 945358 - RNA, 22 nt, Human
aguauuuccuggcuuaucugcu

SEQ ID NO: 945359 - RNA, 22 nt, Human
uucuuucagaacacaagugauu

SEQ ID NO: 945360 - RNA, 21 nt, Human
ucagcagcaucugccuagagu

SEQ ID NO: 945361 - RNA, 22 nt, Human
gccaggaggcuuaacuggacag

SEQ ID NO: 945362 - RNA, 22 nt, Human
uuagccauuaaauuacaaggug

SEQ ID NO: 945363 - RNA, 20 nt, Human
uuucuugucggcuguugcug

SEQ ID NO: 945364 - RNA, 18 nt, Human
aagaggaggaaacccagg

SEQ ID NO: 945365 - RNA, 22 nt, Human
uugauuuuaaaauagugacacu

SEQ ID NO: 945366 - RNA, 22 nt, Human
uggcagagaacacacaugauuc

SEQ ID NO: 945367 - RNA, 22 nt, Human
gagucacauuaauuuaauuuua

SEQ ID NO: 945368 - RNA, 22 nt, Human
aggguggggugcuacaucuuua

SEQ ID NO: 945369 - RNA, 22 nt, Human
aggagcugucagagugccagag

SEQ ID NO: 945370 - RNA, 22 nt, Human
ccaccaggacagcccugagggg

SEQ ID NO: 945371 - RNA, 19 nt, Human
ccugggaggcggagguugc

SEQ ID NO: 945372 - RNA, 22 nt, Human
uuccucagcuggccugauuggg

SEQ ID NO: 945373 - RNA, 22 nt, Human
cucuggccgcagcucagcucug

SEQ ID NO: 945374 - RNA, 22 nt, Human
auucagaaauagaaaauuugau

SEQ ID NO: 945375 - RNA, 19 nt, Human
ugucuuaauuaacucagag

SEQ ID NO: 945376 - RNA, 20 nt, Human
aggcccugccagggacggag

SEQ ID NO: 945377 - RNA, 22 nt, Human
ccagggcuccauugcucauccu

SEQ ID NO: 945378 - RNA, 22 nt, Human
ugcugucaguuggcaggaugag

SEQ ID NO: 945379 - RNA, 22 nt, Human
uuugaaagggacaaagucacug

SEQ ID NO: 945380 - RNA, 21 nt, Human
gggccacaccuucugcagacc

SEQ ID NO: 945381 - RNA, 22 nt, Human
ucucuucuauuugagacuauuu

SEQ ID NO: 945382 - RNA, 22 nt, Human
acagaaugcguagugcauguug

SEQ ID NO: 945383 - RNA, 22 nt, Human
cugcgcagggguggcgccagaa

SEQ ID NO: 945384 - RNA, 22 nt, Human
ucaugacaacuauauuauucca

SEQ ID NO: 945385 - RNA, 22 nt, Human
aucaggauggguuuggcuuagg

SEQ ID NO: 945386 - RNA, 22 nt, Human
gggcagcugucuugguucucaa

SEQ ID NO: 945387 - RNA, 21 nt, Human
uccaggagcacgggacuagga

SEQ ID NO: 945388 - RNA, 22 nt, Human
uggagcugagagccaggcuggc

SEQ ID NO: 945389 - RNA, 22 nt, Human
gaggcagcaugguaccuuggag

SEQ ID NO: 945390 - RNA, 22 nt, Human
uggggcgcgagguccuggcucc

SEQ ID NO: 945391 - RNA, 22 nt, Human
agauuuagacugccuuaaucau

SEQ ID NO: 945392 - RNA, 22 nt, Human
acagacauucagcuaagucuau

SEQ ID NO: 945393 - RNA, 22 nt, Human
ucugggugaugaaaugcacugu

SEQ ID NO: 945394 - RNA, 22 nt, Human
uaacuuugauaagaaucaggga

SEQ ID NO: 945395 - RNA, 22 nt, Human
ugagcuggucuugaguguagcu

SEQ ID NO: 945396 - RNA, 22 nt, Human
gaggcagcaauaaaaagaauuu

SEQ ID NO: 945397 - RNA, 22 nt, Human
gucugcugcagagcauggcuuu

SEQ ID NO: 945398 - RNA, 22 nt, Human
caccagcuacagacuacugugu

SEQ ID NO: 945399 - RNA, 22 nt, Human
cucuuccuacagucugcuaugc

SEQ ID NO: 945400 - RNA, 22 nt, Human
aaggcagauauaaagacuagag

SEQ ID NO: 945401 - RNA, 22 nt, Human
uaacagaaauaguaggugaggg

SEQ ID NO: 945402 - RNA, 19 nt, Human
ucuaagccucaauguuuuc

SEQ ID NO: 945403 - RNA, 22 nt, Human
ggagccugggcauuaguaauuu

SEQ ID NO: 945404 - RNA, 22 nt, Human
gaugagggccugguggcugugc

SEQ ID NO: 945405 - RNA, 22 nt, Human
augcugugcuggcuaaccaugg

SEQ ID NO: 945406 - RNA, 22 nt, Human
gaaggggacuggcagcugcaga

SEQ ID NO: 945407 - RNA, 21 nt, Human
uuauugagacauuuguggaaa

SEQ ID NO: 945408 - RNA, 22 nt, Human
cauuuguagcuauuuacuguau

SEQ ID NO: 945409 - RNA, 22 nt, Human
ugcugcuguuuccuacaucuca

SEQ ID NO: 945410 - RNA, 22 nt, Human
ccaagggcucugacuugccugc

SEQ ID NO: 945411 - RNA, 22 nt, Human
uuggccaaaaaagucauuagaa

SEQ ID NO: 945412 - RNA, 22 nt, Human
ggucagagggugggcugccugu

SEQ ID NO: 945413 - RNA, 22 nt, Human
cucagggcaguauggcugagag

SEQ ID NO: 945414 - RNA, 22 nt, Human
uggcagagucugggcuugggca

SEQ ID NO: 945415 - RNA, 22 nt, Human
ugcccagcacugugccagucac

SEQ ID NO: 945416 - RNA, 22 nt, Human
ucagaacauuuaaaaagugguu

SEQ ID NO: 945417 - RNA, 22 nt, Human
cccuggccagcucaugucugag

SEQ ID NO: 945418 - RNA, 22 nt, Human
uaacacugauuuguucucaggg

SEQ ID NO: 945419 - RNA, 22 nt, Human
acaauguaggauauguacuugu

SEQ ID NO: 945420 - RNA, 22 nt, Human
ucacucugaaugguacugagga

SEQ ID NO: 945421 - RNA, 22 nt, Human
ggccucugguucacagggagga

SEQ ID NO: 945422 - RNA, 22 nt, Human
ugaagcaguucucagaaguggg

SEQ ID NO: 945423 - RNA, 22 nt, Human
uguuuuguuuaugagagcacag

SEQ ID NO: 945424 - RNA, 22 nt, Human
augcagguugggcaaguguggg

SEQ ID NO: 945425 - RNA, 18 nt, Human
ggcugagguugacuagaa

SEQ ID NO: 945426 - RNA, 22 nt, Human
uauguagguaaacacagacaua

SEQ ID NO: 945427 - RNA, 22 nt, Human
auaauaacaccugaauaggaaa

SEQ ID NO: 945428 - RNA, 22 nt, Human
gcugagagaaaagugagguucu

SEQ ID NO: 945429 - RNA, 22 nt, Human
cugcucuggcguacucggcauc

SEQ ID NO: 945430 - RNA, 22 nt, Human
cucuggagaacuccuugugucu

SEQ ID NO: 945431 - RNA, 22 nt, Human
cugaaggauucaaaauggcagg

SEQ ID NO: 945432 - RNA, 22 nt, Human
ucccagagucagagguggggcc

SEQ ID NO: 945433 - RNA, 22 nt, Human
ugucaugccaccguuucccaga

SEQ ID NO: 945434 - RNA, 17 nt, Human
gagagcugcugcuuccg

SEQ ID NO: 945435 - RNA, 22 nt, Human
ggcaucuccaaaacaugaacuc

SEQ ID NO: 945436 - RNA, 22 nt, Human
uggccucugggaaagcagauuc

SEQ ID NO: 945437 - RNA, 22 nt, Human
ccuaugccugucacucugcgcu

SEQ ID NO: 945438 - RNA, 22 nt, Human
ugucucugugagaucugacgau

SEQ ID NO: 945439 - RNA, 22 nt, Human
uccaggagggauugggcugugg

SEQ ID NO: 945440 - RNA, 22 nt, Human
cucaggaggugguagaggcccu

SEQ ID NO: 945441 - RNA, 22 nt, Human
gauggcaggugauagccgaguc

SEQ ID NO: 945442 - RNA, 22 nt, Human
gcagcuguguaaugagcccaca

SEQ ID NO: 945443 - RNA, 22 nt, Human
ccuggcuccugccucugcaggg

SEQ ID NO: 945444 - RNA, 22 nt, Human
ugcaccuucauuuuaggcagcu

SEQ ID NO: 945445 - RNA, 22 nt, Human
gcuggaaggcuaggcucaguug

SEQ ID NO: 945446 - RNA, 22 nt, Human
augggcugugagguccggcagg

SEQ ID NO: 945447 - RNA, 22 nt, Human
gguggggccugcuccagcggcc

SEQ ID NO: 945448 - RNA, 22 nt, Human
cagagacaguuucacagggucu

SEQ ID NO: 945449 - RNA, 22 nt, Human
ugucugugaccucuuuggagcc

SEQ ID NO: 945450 - RNA, 22 nt, Human
uaauuccaaguugagacaugca

SEQ ID NO: 945451 - RNA, 22 nt, Human
ggcagcuguggacgucgucauu

SEQ ID NO: 945452 - RNA, 22 nt, Human
auguucaaacuuuuuacacacc

SEQ ID NO: 945453 - RNA, 22 nt, Human
uauuucuugaguggucaguuuc

SEQ ID NO: 945454 - RNA, 22 nt, Human
caccuuuugugucugcguuugu

SEQ ID NO: 945455 - RNA, 22 nt, Human
guggcucucgccagccugcggg

SEQ ID NO: 945456 - RNA, 22 nt, Human
ccaggcugcuguugguguccgc

SEQ ID NO: 945457 - RNA, 22 nt, Human
gcugccacucugagcuugcuuc

SEQ ID NO: 945458 - RNA, 22 nt, Human
aaaguuuggauuagcaguuaga

SEQ ID NO: 945459 - RNA, 21 nt, Human
cccaggaggagcuccggcucc

SEQ ID NO: 945460 - RNA, 22 nt, Human
cccaggaggcagagcuugcagu

SEQ ID NO: 945461 - RNA, 22 nt, Human
augucuuuauaaauguauaaug

SEQ ID NO: 945462 - RNA, 22 nt, Human
uauccaauucaccauugauggg

SEQ ID NO: 945463 - RNA, 22 nt, Human
uccuuggcuuucuggagcuucu

SEQ ID NO: 945464 - RNA, 22 nt, Human
uggaagcuguggcauaacugag

SEQ ID NO: 945465 - RNA, 22 nt, Human
gcuggccugggcucaagaccag

SEQ ID NO: 945466 - RNA, 19 nt, Human
accuugggcaagugccuuc

SEQ ID NO: 945467 - RNA, 22 nt, Human
ugguccagaugccuuggcuuua

SEQ ID NO: 945468 - RNA, 22 nt, Human
cauugucacccaaagcucauag

SEQ ID NO: 945469 - RNA, 22 nt, Human
cugagccagagggagucggguc

SEQ ID NO: 945470 - RNA, 22 nt, Human
ucuuugcaacucccauuuccau

SEQ ID NO: 945471 - RNA, 22 nt, Human
cuaggaggcgggggcugcagua

SEQ ID NO: 945472 - RNA, 22 nt, Human
agcaguggcugaagauguuccu

SEQ ID NO: 945473 - RNA, 22 nt, Human
cccugccuuguuggagccuaug

SEQ ID NO: 945474 - RNA, 22 nt, Human
uaaaaguauacuuucaaaggag

SEQ ID NO: 945475 - RNA, 22 nt, Human
auucaguaggucuagaauaaga

SEQ ID NO: 945476 - RNA, 22 nt, Human
uauuugaagauucuucugaugu

SEQ ID NO: 945477 - RNA, 22 nt, Human
uuugcaauuugugcugcaaaug

SEQ ID NO: 945478 - RNA, 22 nt, Human
augcacaagaggcuagaaaaga

SEQ ID NO: 945479 - RNA, 22 nt, Human
uuccaaauuaaaauguacaaug

SEQ ID NO: 945480 - RNA, 22 nt, Human
aggagcuguuuuguucagcaaa

SEQ ID NO: 945481 - RNA, 22 nt, Human
agaggcuguuacacucccagau

SEQ ID NO: 945482 - RNA, 22 nt, Human
aaaucuaggcucauccuggucc

SEQ ID NO: 945483 - RNA, 22 nt, Human
gcugccaugguccaggcuccag

SEQ ID NO: 945484 - RNA, 22 nt, Human
agggccagagucuguguagaua

SEQ ID NO: 945485 - RNA, 22 nt, Human
augcaucuauucccaagggcag

SEQ ID NO: 945486 - RNA, 22 nt, Human
uggcagagcccagacuccaguc

SEQ ID NO: 945487 - RNA, 22 nt, Human
aaauguauccuacuuccugagu

SEQ ID NO: 945488 - RNA, 22 nt, Human
uugaaaaguuuugaaacacucu

SEQ ID NO: 945489 - RNA, 22 nt, Human
acuccuggguuccggagauucu

SEQ ID NO: 945490 - RNA, 22 nt, Human
gggccugucucacucccugguu

SEQ ID NO: 945491 - RNA, 19 nt, Human
aucugccuuagugcugcug

SEQ ID NO: 945492 - RNA, 22 nt, Human
gugggggcaggcagugcuagga

SEQ ID NO: 945493 - RNA, 16 nt, Human
ucucugcuucauaggu

SEQ ID NO: 945494 - RNA, 22 nt, Human
gccugcuguuaacugcaggaau

SEQ ID NO: 945495 - RNA, 22 nt, Human
uuucauaaugucacagucaaaa

SEQ ID NO: 945496 - RNA, 22 nt, Human
uagaaacauauaggauggcagg

SEQ ID NO: 945497 - RNA, 22 nt, Human
uaaugcacagaauugacauggg

SEQ ID NO: 945498 - RNA, 22 nt, Human
ucuucagauugcacugagcaag

SEQ ID NO: 945499 - RNA, 22 nt, Human
aauucacaggagguauuugucc

SEQ ID NO: 945500 - RNA, 22 nt, Human
gcagagccuugcgucaugugcc

SEQ ID NO: 945501 - RNA, 22 nt, Human
caggcuggaguuaccuuuaggg

SEQ ID NO: 945502 - RNA, 22 nt, Human
uucaggauuauacucucuuccc

SEQ ID NO: 945503 - RNA, 22 nt, Human
ugcuggccaauggcagaggcgg

SEQ ID NO: 945504 - RNA, 21 nt, Human
aaaggccauaaucacggagca

SEQ ID NO: 945505 - RNA, 22 nt, Human
auuucaguguugguuagcaagc

SEQ ID NO: 945506 - RNA, 22 nt, Human
gcuggcaggguucucacugaaa

SEQ ID NO: 945507 - RNA, 22 nt, Human
gaggcagcggcucacagagaaa

SEQ ID NO: 945508 - RNA, 22 nt, Human
ccugccugacagagaagguuca

SEQ ID NO: 945509 - RNA, 22 nt, Human
ggucauuguucuuuucugugau

SEQ ID NO: 945510 - RNA, 22 nt, Human
aauaaacugcucaauugcauca

SEQ ID NO: 945511 - RNA, 22 nt, Human
ccuccagcugccucagucucuu

SEQ ID NO: 945512 - RNA, 22 nt, Human
ugcaggugugguuccucagcca

SEQ ID NO: 945513 - RNA, 22 nt, Human
gccagagcaugcacugccugca

SEQ ID NO: 945514 - RNA, 22 nt, Human
aagagcuggaagugaagauaac

SEQ ID NO: 945515 - RNA, 22 nt, Human
agggccagaaucccucagucua

SEQ ID NO: 945516 - RNA, 22 nt, Human
ccugggagagccaucuguggcc

SEQ ID NO: 945517 - RNA, 22 nt, Human
aauuaacagagggcuuauuacu

SEQ ID NO: 945518 - RNA, 22 nt, Human
aaaaauaggucaaccguguaug

SEQ ID NO: 945519 - RNA, 22 nt, Human
guggccuggcgagcuggcgcgg

SEQ ID NO: 945520 - RNA, 22 nt, Human
cugagcugcucccgcugcagcg

SEQ ID NO: 945521 - RNA, 20 nt, Human
guggcaggcagugaaggagc

SEQ ID NO: 945522 - RNA, 22 nt, Human
cugagccagcgggcucacuuuu

SEQ ID NO: 945523 - RNA, 22 nt, Human
ucugucacugagcucaggauuc

SEQ ID NO: 945524 - RNA, 22 nt, Human
auauauuuugcggucacguggc

SEQ ID NO: 945525 - RNA, 22 nt, Human
uccccagggcugcagagggugu

SEQ ID NO: 945526 - RNA, 19 nt, Human
guaagggcuaauggacuau

SEQ ID NO: 945527 - RNA, 22 nt, Human
agacagcauggagcugauaaca

SEQ ID NO: 945528 - RNA, 22 nt, Human
cacaagucuguggucuccaaca

SEQ ID NO: 945529 - RNA, 22 nt, Human
acugcuuuucagagucugccug

SEQ ID NO: 945530 - RNA, 22 nt, Human
agauaaauuccuaagauuucag

SEQ ID NO: 945531 - RNA, 22 nt, Human
ucuccuggcucuaaaaggcugu

SEQ ID NO: 945532 - RNA, 23 nt, Human
uuuggacuugugacucuucuccu

SEQ ID NO: 945533 - RNA, 22 nt, Human
caggcagcaggagcccugcucg

SEQ ID NO: 945534 - RNA, 22 nt, Human
ccuguucauuuguauuugucuu

SEQ ID NO: 945535 - RNA, 22 nt, Human
cuggcagcagcuucuggaucga

SEQ ID NO: 945536 - RNA, 22 nt, Human
uauuccaagcacagcaacccag

SEQ ID NO: 945537 - RNA, 22 nt, Human
acugcuuuaucugagaaguccu

SEQ ID NO: 945538 - RNA, 22 nt, Human
caugcaggcacccagagcccac

SEQ ID NO: 945539 - RNA, 22 nt, Human
uuuucuauucauugucuauggu

SEQ ID NO: 945540 - RNA, 22 nt, Human
uuaaaucaguaggcuacuccuu

SEQ ID NO: 945541 - RNA, 22 nt, Human
gcugauguuuaguugauguuac

SEQ ID NO: 945542 - RNA, 20 nt, Human
ugugcaggagagugaggcug

SEQ ID NO: 945543 - RNA, 22 nt, Human
gaaacugugaucguguucuggg

SEQ ID NO: 945544 - RNA, 22 nt, Human
aaacuccugcauacucagaagc

SEQ ID NO: 945545 - RNA, 22 nt, Human
agcugagcucaggcugauguaa

SEQ ID NO: 945546 - RNA, 20 nt, Human
caggaggcaaggucaagguc

SEQ ID NO: 945547 - RNA, 22 nt, Human
ggcagcaggagccaucugguag

SEQ ID NO: 945548 - RNA, 22 nt, Human
cacaggcuccggccuugcagcc

SEQ ID NO: 945549 - RNA, 22 nt, Human
cagugcauagauccugaggccu

SEQ ID NO: 945550 - RNA, 22 nt, Human
acauuucucaucuaguagagua

SEQ ID NO: 945551 - RNA, 22 nt, Human
augaaauuugcugcuaaguucc

SEQ ID NO: 945552 - RNA, 21 nt, Human
ggccucugucauccugggaag

SEQ ID NO: 945553 - RNA, 22 nt, Human
gggcacuguggggcccaugcug

SEQ ID NO: 945554 - RNA, 22 nt, Human
uugggcucaggaguuugagacc

SEQ ID NO: 945555 - RNA, 22 nt, Human
ucucccagaggaucccagugga

SEQ ID NO: 945556 - RNA, 20 nt, Human
uggagccacagucagguucc

SEQ ID NO: 945557 - RNA, 22 nt, Human
agaggucagauuucuccuggug

SEQ ID NO: 945558 - RNA, 20 nt, Human
aggcacuguugucuguaucc

SEQ ID NO: 945559 - RNA, 22 nt, Human
gcuuuuucaaaugaaagcuggu

SEQ ID NO: 945560 - RNA, 22 nt, Human
cugcuuuguaaaauagacauaa

SEQ ID NO: 945561 - RNA, 23 nt, Human
guaaaauacgcagugcaguguga

SEQ ID NO: 945562 - RNA, 22 nt, Human
ggcuggcuugccaagcucaggg

SEQ ID NO: 945563 - RNA, 22 nt, Human
cuucagaagccugcagccuuug

SEQ ID NO: 945564 - RNA, 22 nt, Human
gagucuuugguaaagucugcug

SEQ ID NO: 945565 - RNA, 22 nt, Human
uguguauucagcaagcgaaaca

SEQ ID NO: 945566 - RNA, 22 nt, Human
uuauguuuuaaguguguaucuu

SEQ ID NO: 945567 - RNA, 22 nt, Human
gacccaggagugcagagagugg

SEQ ID NO: 945568 - RNA, 22 nt, Human
gccaugcuugguaugcugugag

SEQ ID NO: 945569 - RNA, 20 nt, Human
uuuacauuuugaaacaguga

SEQ ID NO: 945570 - RNA, 22 nt, Human
cugggcuucucccccuggcaga

SEQ ID NO: 945571 - RNA, 22 nt, Human
ucacuuagauggggaucaucac

SEQ ID NO: 945572 - RNA, 18 nt, Human
ccuggaccugucuccuuu

SEQ ID NO: 945573 - RNA, 22 nt, Human
cucucugguuucagcgaagggg

SEQ ID NO: 945574 - RNA, 22 nt, Human
ccucuucugagugagacucccu

SEQ ID NO: 945575 - RNA, 22 nt, Human
ugucucugggugauucaguccu

SEQ ID NO: 945576 - RNA, 22 nt, Human
cagcaguggaacuacccaggga

SEQ ID NO: 945577 - RNA, 22 nt, Human
ggcugcugguggaaugguaggc

SEQ ID NO: 945578 - RNA, 22 nt, Human
ucagggcauguauguuucuuua

SEQ ID NO: 945579 - RNA, 22 nt, Human
uuauguuugaguauaugacuca

SEQ ID NO: 945580 - RNA, 22 nt, Human
gcagcugccuucagcuggaugg

SEQ ID NO: 945581 - RNA, 22 nt, Human
aggcccaguagugcugccuuua

SEQ ID NO: 945582 - RNA, 22 nt, Human
gggccuguguguucaggagccu

SEQ ID NO: 945583 - RNA, 22 nt, Human
gucccagaggacagggucacau

SEQ ID NO: 945584 - RNA, 22 nt, Human
ccagcagacacacaggcguggg

SEQ ID NO: 945585 - RNA, 22 nt, Human
gcuccuggcuucacugacauca

SEQ ID NO: 945586 - RNA, 22 nt, Human
uagagcauuuagaggggcagga

SEQ ID NO: 945587 - RNA, 22 nt, Human
ugcugucuguuuacuggcuaua

SEQ ID NO: 945588 - RNA, 22 nt, Human
agaaaugacacacaugagacau

SEQ ID NO: 945589 - RNA, 22 nt, Human
cagcuccugcagcugcugccgu

SEQ ID NO: 945590 - RNA, 22 nt, Human
ggcugcagaaguacuuccggau

SEQ ID NO: 945591 - RNA, 22 nt, Human
guuucacagucugcagaauuuu

SEQ ID NO: 945592 - RNA, 22 nt, Human
gcaggguaggugacagguaguc

SEQ ID NO: 945593 - RNA, 22 nt, Human
cucaguuucugacauuaaaauc

SEQ ID NO: 945594 - RNA, 22 nt, Human
aggaagaauguuuacauaucaa

SEQ ID NO: 945595 - RNA, 22 nt, Human
auucuucaguauguguggauug

SEQ ID NO: 945596 - RNA, 22 nt, Human
gagcuucccucugcagucccug

SEQ ID NO: 945597 - RNA, 22 nt, Human
gccagcagccacagaagucacu

SEQ ID NO: 945598 - RNA, 22 nt, Human
cagagacagggcagggagugug

SEQ ID NO: 945599 - RNA, 22 nt, Human
gagcccagguucugcuuccagc

SEQ ID NO: 945600 - RNA, 22 nt, Human
augcugaggacaaagagaucaa

SEQ ID NO: 945601 - RNA, 22 nt, Human
uugaaggacaucuuguuucuag

SEQ ID NO: 945602 - RNA, 22 nt, Human
aaguuauaucaucucauugacg

SEQ ID NO: 945603 - RNA, 22 nt, Human
auuuauuauugugguuacuucu

SEQ ID NO: 945604 - RNA, 22 nt, Human
auucuuauuauaguaaaacagu

SEQ ID NO: 945605 - RNA, 22 nt, Human
cucacuggcaagacuacaggug

SEQ ID NO: 945606 - RNA, 22 nt, Human
ugggccuggagcccuggagagu

SEQ ID NO: 945607 - RNA, 22 nt, Human
uuaacauacaucaugaacaaug

SEQ ID NO: 945608 - RNA, 22 nt, Human
gagcagcuagauaaagcccuuc

SEQ ID NO: 945609 - RNA, 22 nt, Human
aggcacugaagugguaaaugua

SEQ ID NO: 945610 - RNA, 22 nt, Human
ugggagagcacugcagccccgg

SEQ ID NO: 945611 - RNA, 20 nt, Human
ggcugugcccuuccguggcc

SEQ ID NO: 945612 - RNA, 22 nt, Human
cagcagagcauuugguaggagg

SEQ ID NO: 945613 - RNA, 22 nt, Human
gcccaggaguuugcauuuuaac

SEQ ID NO: 945614 - RNA, 20 nt, Human
augugagggguugaaguggg

SEQ ID NO: 945615 - RNA, 22 nt, Human
auaccuuuuagacauguaguug

SEQ ID NO: 945616 - RNA, 22 nt, Human
ggcacugggugagggucacugg

SEQ ID NO: 945617 - RNA, 22 nt, Human
ccaggccuuccaguacgcagaa

SEQ ID NO: 945618 - RNA, 22 nt, Human
gccaguuccuguggagucagag

SEQ ID NO: 945619 - RNA, 22 nt, Human
gacagacauuuccugauccaau

SEQ ID NO: 945620 - RNA, 20 nt, Human
uuggcagcuucaggguacua

SEQ ID NO: 945621 - RNA, 22 nt, Human
uuacugaaaauucuucaggauu

SEQ ID NO: 945622 - RNA, 22 nt, Human
ccugggugaugugcugcccucg

SEQ ID NO: 945623 - RNA, 22 nt, Human
uuugacaaaggaaaaaugcaca

SEQ ID NO: 945624 - RNA, 22 nt, Human
augccacugacauggacaauuu

SEQ ID NO: 945625 - RNA, 22 nt, Human
guaggcagggcuguggggagaa

SEQ ID NO: 945626 - RNA, 18 nt, Human
ggcugccuguuccugaag

SEQ ID NO: 945627 - RNA, 22 nt, Human
ugugccugucacccucagagag

SEQ ID NO: 945628 - RNA, 22 nt, Human
acacugaagagcacuuucaaag

SEQ ID NO: 945629 - RNA, 22 nt, Human
uacaaagagguaauugcauaua

SEQ ID NO: 945630 - RNA, 22 nt, Human
cugggagagaagcgaagcuggg

SEQ ID NO: 945631 - RNA, 22 nt, Human
aaguuugagagccuuuaguaua

SEQ ID NO: 945632 - RNA, 22 nt, Human
ccugggcauaaaucacuccaag

SEQ ID NO: 945633 - RNA, 21 nt, Human
uucuucaguuuaauauaaaau

SEQ ID NO: 945634 - RNA, 22 nt, Human
cccuggagggauuucucaauca

SEQ ID NO: 945635 - RNA, 22 nt, Human
gccuucugauugcuggacugac

SEQ ID NO: 945636 - RNA, 19 nt, Human
cccaggagucuggcugguu

SEQ ID NO: 945637 - RNA, 18 nt, Human
aggcacagagcauacaua

SEQ ID NO: 945638 - RNA, 22 nt, Human
ucugcuguccuuuauauagauu

SEQ ID NO: 945639 - RNA, 23 nt, Human
uggggagaguuacccuggaagcg

SEQ ID NO: 945640 - RNA, 22 nt, Human
cuaauacacccuauugcuuguu

SEQ ID NO: 945641 - RNA, 22 nt, Human
ucagaggugguaaaggacagca

SEQ ID NO: 945642 - RNA, 22 nt, Human
aggagcuggguuccuuuggugg

SEQ ID NO: 945643 - RNA, 22 nt, Human
gccugggugaauuugauccuaa

SEQ ID NO: 945644 - RNA, 22 nt, Human
acuggcagagguuggacaccau

SEQ ID NO: 945645 - RNA, 19 nt, Human
ugccugucaguagaucuca

SEQ ID NO: 945646 - RNA, 22 nt, Human
aaucaguuguucacucugaaaa

SEQ ID NO: 945647 - RNA, 22 nt, Human
aaggcugagacagcacaggucc

SEQ ID NO: 945648 - RNA, 22 nt, Human
ucugagccguauggcuuggcua

SEQ ID NO: 945649 - RNA, 22 nt, Human
ccagcccuugagauggaaggga

SEQ ID NO: 945650 - RNA, 22 nt, Human
gacauguugaagaauauuugga

SEQ ID NO: 945651 - RNA, 22 nt, Human
uguguauagcaguuuccagucu

SEQ ID NO: 945652 - RNA, 22 nt, Human
uggcagcucccagagcuuccaa

SEQ ID NO: 945653 - RNA, 22 nt, Human
auuuccucaugaucauaaugca

SEQ ID NO: 945654 - RNA, 22 nt, Human
ccacagggugucaucagcuuga

SEQ ID NO: 945655 - RNA, 22 nt, Human
uugcuucauuuuaaauaaagac

SEQ ID NO: 945656 - RNA, 22 nt, Human
auccauggaggacaagagcaau

SEQ ID NO: 945657 - RNA, 22 nt, Human
ggugcagaaggaagggagcugg

SEQ ID NO: 945658 - RNA, 22 nt, Human
cagggucuuauaaggccaauuu

SEQ ID NO: 945659 - RNA, 22 nt, Human
acacaggggaaaguggagcuga

SEQ ID NO: 945660 - RNA, 20 nt, Human
augugucuguaaacaacucu

SEQ ID NO: 945661 - RNA, 22 nt, Human
ggucuuccgagaggccugugcu

SEQ ID NO: 945662 - RNA, 22 nt, Human
ugcaggcaggggaugagcagcc

SEQ ID NO: 945663 - RNA, 22 nt, Human
gcacucuguuucuccugucagc

SEQ ID NO: 945664 - RNA, 22 nt, Human
aguagaaagaaggcacugggcc

SEQ ID NO: 945665 - RNA, 22 nt, Human
cacucccuucaggagccuagga

SEQ ID NO: 945666 - RNA, 22 nt, Human
gagcuggugugugcccgagcac

SEQ ID NO: 945667 - RNA, 22 nt, Human
agaaaucaugacuaagagcagu

SEQ ID NO: 945668 - RNA, 22 nt, Human
agaugaaaauacgugacuuuaa

SEQ ID NO: 945669 - RNA, 22 nt, Human
acugggagagcgaccagauucu

SEQ ID NO: 945670 - RNA, 22 nt, Human
uggcucugugcuucuaguaucu

SEQ ID NO: 945671 - RNA, 22 nt, Human
caauaauauccugugcuguuug

SEQ ID NO: 945672 - RNA, 22 nt, Human
aacucaguucuuuccacaaugc

SEQ ID NO: 945673 - RNA, 19 nt, Human
cuuugucagaacaugcuuc

SEQ ID NO: 945674 - RNA, 22 nt, Human
cagccugggcuccagagucccu

SEQ ID NO: 945675 - RNA, 22 nt, Human
ugcuggcccaugaagacgcagu

SEQ ID NO: 945676 - RNA, 22 nt, Human
uuccuuccgggcaccaggcacu

SEQ ID NO: 945677 - RNA, 22 nt, Human
cuguggaaaauuuguauguaau

SEQ ID NO: 945678 - RNA, 22 nt, Human
cccauugugguuguugaggaua

SEQ ID NO: 945679 - RNA, 22 nt, Human
gauuucuucauuuguggugaau

SEQ ID NO: 945680 - RNA, 22 nt, Human
ggguccagacacuccagaggaa

SEQ ID NO: 945681 - RNA, 22 nt, Human
aagaaauguagagccuaguaaa

SEQ ID NO: 945682 - RNA, 22 nt, Human
uguggugagaaacugguagauu

SEQ ID NO: 945683 - RNA, 22 nt, Human
ccuggagcacauggcaggaggc

SEQ ID NO: 945684 - RNA, 22 nt, Human
aacauacagugagcaguggacu

SEQ ID NO: 945685 - RNA, 22 nt, Human
ucccaggacaugggcucugcuc

SEQ ID NO: 945686 - RNA, 22 nt, Human
guuauaaaaugcacaguuguuu

SEQ ID NO: 945687 - RNA, 22 nt, Human
ugcuugagacacauaugaauuu

SEQ ID NO: 945688 - RNA, 22 nt, Human
ucacugaagacugggcucuaaa

SEQ ID NO: 945689 - RNA, 22 nt, Human
agggcccuccccgcucagggca

SEQ ID NO: 945690 - RNA, 22 nt, Human
gacacagcacuguacaaggaau

SEQ ID NO: 945691 - RNA, 22 nt, Human
ucagaaguaggagacauucuug

SEQ ID NO: 945692 - RNA, 22 nt, Human
gggcugagggguaucucauggg

SEQ ID NO: 945693 - RNA, 22 nt, Human
cuugcuggugguguuuucuaug

SEQ ID NO: 945694 - RNA, 23 nt, Human
aaaguugauuugcaguuuaagag

SEQ ID NO: 945695 - RNA, 22 nt, Human
gcagcccaauggacugagacag

SEQ ID NO: 945696 - RNA, 22 nt, Human
gacccaggguggucaccugaaa

SEQ ID NO: 945697 - RNA, 22 nt, Human
uauuggucuuggaagguuuugu

SEQ ID NO: 945698 - RNA, 22 nt, Human
uccuggaggcaaaugagcacau

SEQ ID NO: 945699 - RNA, 22 nt, Human
uuauuuaaaauguagguuggga

SEQ ID NO: 945700 - RNA, 22 nt, Human
caggccugggcuucggggcuga

SEQ ID NO: 945701 - RNA, 22 nt, Human
auguacauuuuccuaauguuuu

SEQ ID NO: 945702 - RNA, 22 nt, Human
auguaucagaaauagcauuggc

SEQ ID NO: 945703 - RNA, 22 nt, Human
cuggcaggagcauucacagagg

SEQ ID NO: 945704 - RNA, 22 nt, Human
caguauuuauggcuugaguauu

SEQ ID NO: 945705 - RNA, 22 nt, Human
aaggcagcaagaauuccagguu

SEQ ID NO: 945706 - RNA, 22 nt, Human
uuauuucauugauuucuaagac

SEQ ID NO: 945707 - RNA, 22 nt, Human
aaguaugcuaauuaacuagcac

SEQ ID NO: 945708 - RNA, 22 nt, Human
uggcuggggagccccgacuccc

SEQ ID NO: 945709 - RNA, 22 nt, Human
aaaaaugcugugguagcugugu

SEQ ID NO: 945710 - RNA, 22 nt, Human
agcaucuggugagggccuaguu

SEQ ID NO: 945711 - RNA, 22 nt, Human
agggauggaagcucgucugcaa

SEQ ID NO: 945712 - RNA, 22 nt, Human
gagcugccugugugccaugaug

SEQ ID NO: 945713 - RNA, 22 nt, Human
gcaagcaagcagguagagcuga

SEQ ID NO: 945714 - RNA, 21 nt, Human
ugggagagggcucagcuaccc

SEQ ID NO: 945715 - RNA, 22 nt, Human
aagcugccuugcugaggagaaa

SEQ ID NO: 945716 - RNA, 22 nt, Human
uucuggagcuaaaguccacucu

SEQ ID NO: 945717 - RNA, 22 nt, Human
cuggagagauccuccugaaaaa

SEQ ID NO: 945718 - RNA, 22 nt, Human
uguggagcacuguuccuggcau

SEQ ID NO: 945719 - RNA, 19 nt, Human
cuggggcuuugguacugcc

SEQ ID NO: 945720 - RNA, 22 nt, Human
aaugagacacgugaagcagaug

SEQ ID NO: 945721 - RNA, 22 nt, Human
ggaggccaucuggcuggaggcu

SEQ ID NO: 945722 - RNA, 22 nt, Human
ugugucaagacauuuagucauu

SEQ ID NO: 945723 - RNA, 22 nt, Human
gcugcccuaauaucacauguua

SEQ ID NO: 945724 - RNA, 22 nt, Human
uucauuccuucccuaagcaacu

SEQ ID NO: 945725 - RNA, 22 nt, Human
agucccaguucgguucuuccuc

SEQ ID NO: 945726 - RNA, 22 nt, Human
ucucugucugagccuggcagac

SEQ ID NO: 945727 - RNA, 20 nt, Human
uuugagaccagucugcccaa

SEQ ID NO: 945728 - RNA, 22 nt, Human
uacucugcaggauggacuaugg

SEQ ID NO: 945729 - RNA, 18 nt, Human
ucugucuguacaaguauc

SEQ ID NO: 945730 - RNA, 22 nt, Human
ugaggaggucagagucuggcug

SEQ ID NO: 945731 - RNA, 22 nt, Human
uccagccacucagcagggauug

SEQ ID NO: 945732 - RNA, 22 nt, Human
uuuauucaucaucuguucauau

SEQ ID NO: 945733 - RNA, 22 nt, Human
uauauuuaaauccagguugaaa

SEQ ID NO: 945734 - RNA, 22 nt, Human
gcagggcagcuuagucccuguc

SEQ ID NO: 945735 - RNA, 22 nt, Human
cugcccugggaguaccuguccu

SEQ ID NO: 945736 - RNA, 22 nt, Human
gcaugcugcaccagagccucuc

SEQ ID NO: 945737 - RNA, 22 nt, Human
ccagcuccaggacugggagcug

SEQ ID NO: 945738 - RNA, 22 nt, Human
ugaaugaguuuggcugcuguuc

SEQ ID NO: 945739 - RNA, 22 nt, Human
uaugcacgucuauuuaugaaga

SEQ ID NO: 945740 - RNA, 22 nt, Human
cagcuggggcagccacgugcgg

SEQ ID NO: 945741 - RNA, 22 nt, Human
ugccuggaaggcccaugggaag

SEQ ID NO: 945742 - RNA, 22 nt, Human
aagguacaccaaaguucaaguu

SEQ ID NO: 945743 - RNA, 22 nt, Human
caaagguaaagaucugcugugg

SEQ ID NO: 945744 - RNA, 22 nt, Human
cugugcuuaccugcccagguga

SEQ ID NO: 945745 - RNA, 22 nt, Human
agcugggagcagagccacagcc

SEQ ID NO: 945746 - RNA, 22 nt, Human
aggaugaauaacugaaauggug

SEQ ID NO: 945747 - RNA, 22 nt, Human
guguacauagaauugugcuuug

SEQ ID NO: 945748 - RNA, 22 nt, Human
gggcacagaagucuaagacauc

SEQ ID NO: 945749 - RNA, 22 nt, Human
gcugccacauuuucaggacuaa

SEQ ID NO: 945750 - RNA, 22 nt, Human
ccagcuucucucugaugcagcu

SEQ ID NO: 945751 - RNA, 22 nt, Human
cucaggagacaguguccacaug

SEQ ID NO: 945752 - RNA, 22 nt, Human
cacaugggcguaauguccaugg

SEQ ID NO: 945753 - RNA, 22 nt, Human
aaacaugagcaucucuucaagc

SEQ ID NO: 945754 - RNA, 22 nt, Human
ccacccuggacaggccucugag

SEQ ID NO: 945755 - RNA, 22 nt, Human
ggucagguuuuuaggagugacc

SEQ ID NO: 945756 - RNA, 22 nt, Human
agaugaagauaucugcaggggc

SEQ ID NO: 945757 - RNA, 22 nt, Human
gcagggacaucuuugucuagua

SEQ ID NO: 945758 - RNA, 22 nt, Human
auacauucagcagugcucauga

SEQ ID NO: 945759 - RNA, 22 nt, Human
agugcuguaacaacuuauuugg

SEQ ID NO: 945760 - RNA, 22 nt, Human
gggcucugguacuuccuggcuc

SEQ ID NO: 945761 - RNA, 22 nt, Human
cccaggagaugcacuccauugg

SEQ ID NO: 945762 - RNA, 23 nt, Human
gccaggaguggguagacuaaugc

SEQ ID NO: 945763 - RNA, 22 nt, Human
uuggaauucaaguuguagcuua

SEQ ID NO: 945764 - RNA, 18 nt, Human
ugcucuggucucacuugg

SEQ ID NO: 945765 - RNA, 22 nt, Human
cuuaagauuugcgauaccuaau

SEQ ID NO: 945766 - RNA, 22 nt, Human
aucuuucuauuucuaaaaacua

SEQ ID NO: 945767 - RNA, 22 nt, Human
cuuuucaugagucuguuauggg

SEQ ID NO: 945768 - RNA, 22 nt, Human
uuauuugguugcugacuuggaa

SEQ ID NO: 945769 - RNA, 22 nt, Human
acugcuuuagaccuagagcucu

SEQ ID NO: 945770 - RNA, 23 nt, Human
agaugagccaacaccuccaugcc

SEQ ID NO: 945771 - RNA, 22 nt, Human
guugacagcuggugagcugcua

SEQ ID NO: 945772 - RNA, 22 nt, Human
uauccuuguacuauaguauuua

SEQ ID NO: 945773 - RNA, 20 nt, Human
ucugcccaccccggcuccca

SEQ ID NO: 945774 - RNA, 22 nt, Human
aaagccuugggauuugugauca

SEQ ID NO: 945775 - RNA, 23 nt, Human
uccuucagagccucccuccaagc

SEQ ID NO: 945776 - RNA, 22 nt, Human
gaaggaaaacagaucugccuga

SEQ ID NO: 945777 - RNA, 22 nt, Human
ucccagagugugggcaucaagg

SEQ ID NO: 945778 - RNA, 20 nt, Human
gcagcuacucugucucgcuc

SEQ ID NO: 945779 - RNA, 22 nt, Human
gaaugugucacccugucccaug

SEQ ID NO: 945780 - RNA, 22 nt, Human
cugcucuguucccccaucaucu

SEQ ID NO: 945781 - RNA, 22 nt, Human
ccucuucuaggacguccuugug

SEQ ID NO: 945782 - RNA, 21 nt, Human
uccucugcucucauaccacaa

SEQ ID NO: 945783 - RNA, 22 nt, Human
cucaugauguagcgaaugagaa

SEQ ID NO: 945784 - RNA, 22 nt, Human
agccucugcuuaugcaaaggua

SEQ ID NO: 945785 - RNA, 22 nt, Human
cccucccagaugggcuugaggu

SEQ ID NO: 945786 - RNA, 17 nt, Human
gaggacagggaaguagg

SEQ ID NO: 945787 - RNA, 22 nt, Human
ugcagccaccaccucugcugaa

SEQ ID NO: 945788 - RNA, 20 nt, Human
guccaggacccagcaggagg

SEQ ID NO: 945789 - RNA, 21 nt, Human
caugaagccgguucccuguuu

SEQ ID NO: 945790 - RNA, 22 nt, Human
ugggccaggauuucaagacccu

SEQ ID NO: 945791 - RNA, 22 nt, Human
aaaugucuuugaguauuucugc

SEQ ID NO: 945792 - RNA, 22 nt, Human
cacucugcugaaaucgccuugu

SEQ ID NO: 945793 - RNA, 22 nt, Human
uggugcuguggaggggcagaag

SEQ ID NO: 945794 - RNA, 22 nt, Human
cgggcagauugggaagguucau

SEQ ID NO: 945795 - RNA, 22 nt, Human
auccuucaaggggcugacagcu

SEQ ID NO: 945796 - RNA, 22 nt, Human
agagcuggccagggaucacucu

SEQ ID NO: 945797 - RNA, 22 nt, Human
ccagcugcuugggaaaaugucu

SEQ ID NO: 945798 - RNA, 22 nt, Human
uccuggccgccgcguggggccg

SEQ ID NO: 945799 - RNA, 22 nt, Human
ucuucacaugaccuucaugucu

SEQ ID NO: 945800 - RNA, 22 nt, Human
ucuguuccaguagaaaggugca

SEQ ID NO: 945801 - RNA, 22 nt, Human
uuccuggcugaacugaacuccu

SEQ ID NO: 945802 - RNA, 22 nt, Human
gguguccaucaggcugugcuuc

SEQ ID NO: 945803 - RNA, 21 nt, Human
ggggcagagcuaggcccugca

SEQ ID NO: 945804 - RNA, 22 nt, Human
ggagccuguuaguugagugcuc

SEQ ID NO: 945805 - RNA, 18 nt, Human
uugagggaggggcagagu

SEQ ID NO: 945806 - RNA, 22 nt, Human
gcauuuagcuuuaaaauauuuc

SEQ ID NO: 945807 - RNA, 22 nt, Human
acaggcucucagccaguuggca

SEQ ID NO: 945808 - RNA, 22 nt, Human
cccucuggcucuucucaggccg

SEQ ID NO: 945809 - RNA, 22 nt, Human
ugcuuccuauccacacaaugcc

SEQ ID NO: 945810 - RNA, 22 nt, Human
augaagucugcacaugcaugug

SEQ ID NO: 945811 - RNA, 22 nt, Human
caacauuucaaggucuuuagga

SEQ ID NO: 945812 - RNA, 22 nt, Human
auaugagaauuggaaaauauca

SEQ ID NO: 945813 - RNA, 22 nt, Human
uggcucuguucgccaucaggag

SEQ ID NO: 945814 - RNA, 22 nt, Human
uacauuugggacaauaagagaa

SEQ ID NO: 945815 - RNA, 22 nt, Human
aaggcacugagccagccgucuc

SEQ ID NO: 945816 - RNA, 22 nt, Human
auugcagcuggucaggguaauu

SEQ ID NO: 945817 - RNA, 21 nt, Human
ucugucucuccacugcccugc

SEQ ID NO: 945818 - RNA, 22 nt, Human
uggccuggcugcccugucugga

SEQ ID NO: 945819 - RNA, 22 nt, Human
agcugcucccuauccuuuccuu

SEQ ID NO: 945820 - RNA, 22 nt, Human
ugugaaaggggucacagggaaa

SEQ ID NO: 945821 - RNA, 22 nt, Human
uccuugaaaaucuugguuuaga

SEQ ID NO: 945822 - RNA, 22 nt, Human
caagagcucccagaccugggca

SEQ ID NO: 945823 - RNA, 22 nt, Human
uaaaaguggauaagcuguagga

SEQ ID NO: 945824 - RNA, 22 nt, Human
uuugaaaggagcuuuauccaga

SEQ ID NO: 945825 - RNA, 22 nt, Human
acuggcaguagagggagcgcau

SEQ ID NO: 945826 - RNA, 22 nt, Human
gccagucuucauauucauggug

SEQ ID NO: 945827 - RNA, 22 nt, Human
caggccuggagugcaauggcac

SEQ ID NO: 945828 - RNA, 22 nt, Human
cuuuggcaugguccucacuaua

SEQ ID NO: 945829 - RNA, 23 nt, Human
agucucagcuggaaacauguguc

SEQ ID NO: 945830 - RNA, 22 nt, Human
uaagucaugauucuguguuacu

SEQ ID NO: 945831 - RNA, 22 nt, Human
ucaagaaggaguuauuuauuca

SEQ ID NO: 945832 - RNA, 22 nt, Human
uccagcagaaaagagguaggga

SEQ ID NO: 945833 - RNA, 22 nt, Human
uuccaggaggagguacuagagg

SEQ ID NO: 945834 - RNA, 22 nt, Human
gaggcaguguugaaaaggagag

SEQ ID NO: 945835 - RNA, 22 nt, Human
auuauguauuugguauaguuug

SEQ ID NO: 945836 - RNA, 22 nt, Human
uuucauaaggguuucuagacuu

SEQ ID NO: 945837 - RNA, 22 nt, Human
gcugccuccugaaagcgcucug

SEQ ID NO: 945838 - RNA, 22 nt, Human
acacagggcagagagcuggcuc

SEQ ID NO: 945839 - RNA, 22 nt, Human
acacagggggcauucuaggagu

SEQ ID NO: 945840 - RNA, 18 nt, Human
ugugaacacauuuuucug

SEQ ID NO: 945841 - RNA, 22 nt, Human
uagcagggguagauagagugug

SEQ ID NO: 945842 - RNA, 22 nt, Human
cacagcuugggcucugacaaua

SEQ ID NO: 945843 - RNA, 22 nt, Human
cauugaaauauggaaacugaug

SEQ ID NO: 945844 - RNA, 20 nt, Human
aggagaugauccagagucag

SEQ ID NO: 945845 - RNA, 22 nt, Human
augcuguguggucaaguuaauu

SEQ ID NO: 945846 - RNA, 22 nt, Human
cagagccaggguugcaccccug

SEQ ID NO: 945847 - RNA, 22 nt, Human
auguuuaaucggcugccuuucc

SEQ ID NO: 945848 - RNA, 22 nt, Human
aagucauugguagcuugauagg

SEQ ID NO: 945849 - RNA, 23 nt, Human
agaggggagcaucugcuggcuga

SEQ ID NO: 945850 - RNA, 22 nt, Human
gggcagagagcuggaacuccuu

SEQ ID NO: 945851 - RNA, 23 nt, Human
auagucauguaaaauauuugaag

SEQ ID NO: 945852 - RNA, 22 nt, Human
acaguacauaauccugagucug

SEQ ID NO: 945853 - RNA, 22 nt, Human
uucuucaaauagcagggaguca

SEQ ID NO: 945854 - RNA, 22 nt, Human
agcagaacugaugagacuugag

SEQ ID NO: 945855 - RNA, 22 nt, Human
caagagcuggagaggcagucua

SEQ ID NO: 945856 - RNA, 19 nt, Human
gggcuccuugggccucucu

SEQ ID NO: 945857 - RNA, 22 nt, Human
acaaaaauuagcugggcauggu

SEQ ID NO: 945858 - RNA, 22 nt, Human
ccuuuccuuuuuagugugggag

SEQ ID NO: 945859 - RNA, 22 nt, Human
cccaggaaugggaaggaggaau

SEQ ID NO: 945860 - RNA, 22 nt, Human
agaggaggcagcuuaacucagu

SEQ ID NO: 945861 - RNA, 22 nt, Human
acccaggcuggagugcaguagc

SEQ ID NO: 945862 - RNA, 22 nt, Human
ucucuucuaauuaggguccaug

SEQ ID NO: 945863 - RNA, 22 nt, Human
ccuuggaggacugcugcuucuu

SEQ ID NO: 945864 - RNA, 22 nt, Human
uugaauaguuuuggauagcaua

SEQ ID NO: 945865 - RNA, 20 nt, Human
cccucugcuacacugggagc

SEQ ID NO: 945866 - RNA, 22 nt, Human
augaagucuagcaagcauugaa

SEQ ID NO: 945867 - RNA, 22 nt, Human
gucuauauauugcuugaauaau

SEQ ID NO: 945868 - RNA, 22 nt, Human
ucagaagagcuggugcugccug

SEQ ID NO: 945869 - RNA, 22 nt, Human
cagccagggucaggcagcuucu

SEQ ID NO: 945870 - RNA, 22 nt, Human
uugaagcaaggcgaaucuugug

SEQ ID NO: 945871 - RNA, 22 nt, Human
auucccaucgucaacuucacug

SEQ ID NO: 945872 - RNA, 22 nt, Human
ccugggaggcuguuuccagccu

SEQ ID NO: 945873 - RNA, 22 nt, Human
cuucaucaacucuaacaaaugu

SEQ ID NO: 945874 - RNA, 22 nt, Human
cucuggaggccuaaggaagugg

SEQ ID NO: 945875 - RNA, 22 nt, Human
augcagcaguuuacaaagcaau

SEQ ID NO: 945876 - RNA, 22 nt, Human
gcccaggaguugaaugcagcag

SEQ ID NO: 945877 - RNA, 22 nt, Human
gcccaggauggagaauaguggu

SEQ ID NO: 945878 - RNA, 22 nt, Human
uaugcauaauuggauaaguaga

SEQ ID NO: 945879 - RNA, 22 nt, Human
agggagcuucuggccucagccu

SEQ ID NO: 945880 - RNA, 22 nt, Human
uccagggacagcgcuggagcua

SEQ ID NO: 945881 - RNA, 22 nt, Human
acucugcuggcugcagggcagc

SEQ ID NO: 945882 - RNA, 19 nt, Human
caaggccaccauuucuccg

SEQ ID NO: 945883 - RNA, 22 nt, Human
uggagggcaugcuguccauggg

SEQ ID NO: 945884 - RNA, 22 nt, Human
aaugcacaaaaauuguauguaa

SEQ ID NO: 945885 - RNA, 17 nt, Human
uggacccuugggccucc

SEQ ID NO: 945886 - RNA, 22 nt, Human
agugacucacuagcucucagug

SEQ ID NO: 945887 - RNA, 22 nt, Human
gccugagagacccauggggcaa

SEQ ID NO: 945888 - RNA, 22 nt, Human
cuggccuucagacucggacuga

SEQ ID NO: 945889 - RNA, 22 nt, Human
aaauaggagcuuaagcacuucu

SEQ ID NO: 945890 - RNA, 22 nt, Human
cucaggauuaaggaaucuaaau

SEQ ID NO: 945891 - RNA, 22 nt, Human
gggcagagguucaacuucaaca

SEQ ID NO: 945892 - RNA, 22 nt, Human
cagcuccacuugaguggggccu

SEQ ID NO: 945893 - RNA, 19 nt, Human
ccuuccagcuccuuuucag

SEQ ID NO: 945894 - RNA, 22 nt, Human
cagagugaaaacugagcucaaa

SEQ ID NO: 945895 - RNA, 22 nt, Human
ggagucccagcaaagccuuccc

SEQ ID NO: 945896 - RNA, 22 nt, Human
uuugaguugcuuauuuaauagg

SEQ ID NO: 945897 - RNA, 19 nt, Human
uaaggccaaaaguaagugu

SEQ ID NO: 945898 - RNA, 22 nt, Human
cagaguguauucugcaguugca

SEQ ID NO: 945899 - RNA, 22 nt, Human
aggauccuuuggccacuucuua

SEQ ID NO: 945900 - RNA, 22 nt, Human
agcuuuaugggagcuuagauaa

SEQ ID NO: 945901 - RNA, 23 nt, Human
aaauucaguccuucaacucugag

SEQ ID NO: 945902 - RNA, 22 nt, Human
aaggcacuagcaagcugccugg

SEQ ID NO: 945903 - RNA, 22 nt, Human
gcagaaggucuggcacuucagg

SEQ ID NO: 945904 - RNA, 22 nt, Human
agcaacaggaaauagcugauua

SEQ ID NO: 945905 - RNA, 22 nt, Human
ugggacagugugccuugcuccu

SEQ ID NO: 945906 - RNA, 22 nt, Human
ugagccugggagauggaggcug

SEQ ID NO: 945907 - RNA, 22 nt, Human
ugccucugaggaagauuguguu

SEQ ID NO: 945908 - RNA, 22 nt, Human
aggccuggugugccggaugcag

SEQ ID NO: 945909 - RNA, 22 nt, Human
ugaggcagcauucuucaagaca

SEQ ID NO: 945910 - RNA, 19 nt, Human
uagcugccuguuaccucca

SEQ ID NO: 945911 - RNA, 22 nt, Human
acaaagucuuuuacaacaguca

SEQ ID NO: 945912 - RNA, 22 nt, Human
ggcugggcaggucugcacaggg

SEQ ID NO: 945913 - RNA, 22 nt, Human
aaggcagcccuggcucagccug

SEQ ID NO: 945914 - RNA, 22 nt, Human
uugucuuaaauggauggacaau

SEQ ID NO: 945915 - RNA, 19 nt, Human
uccaaaggacccaccucca

SEQ ID NO: 945916 - RNA, 22 nt, Human
ggccugaggcaauagucagaca

SEQ ID NO: 945917 - RNA, 22 nt, Human
gaaaugugcagaauguguuaga

SEQ ID NO: 945918 - RNA, 22 nt, Human
gcuuugaagucugugucuuuug

SEQ ID NO: 945919 - RNA, 18 nt, Human
cugaaggauccaggugua

SEQ ID NO: 945920 - RNA, 22 nt, Human
cagcuccagcccaggcagcucc

SEQ ID NO: 945921 - RNA, 19 nt, Human
ggcugcugguuacagaggc

SEQ ID NO: 945922 - RNA, 22 nt, Human
uucagaauauuuguuuuacaug

SEQ ID NO: 945923 - RNA, 22 nt, Human
ugaaugugaugcuaaacauaug

SEQ ID NO: 945924 - RNA, 22 nt, Human
uagaaaugauugguugagcucu

SEQ ID NO: 945925 - RNA, 22 nt, Human
caugcacaacauacucaagagg

SEQ ID NO: 945926 - RNA, 22 nt, Human
ucagaguguggugagaugugca

SEQ ID NO: 945927 - RNA, 22 nt, Human
ugaaagguuauuuaggucugcu

SEQ ID NO: 945928 - RNA, 22 nt, Human
cagaggcaaaagagguggaggu

SEQ ID NO: 945929 - RNA, 22 nt, Human
augugucugauggcccugaauu

SEQ ID NO: 945930 - RNA, 22 nt, Human
cugccuuggcccuaguucaugg

SEQ ID NO: 945931 - RNA, 22 nt, Human
uuugacauggaauaacucauuu

SEQ ID NO: 945932 - RNA, 22 nt, Human
cagggcuguuagcugcugcucu

SEQ ID NO: 945933 - RNA, 18 nt, Human
ccugccagucuggagcag

SEQ ID NO: 945934 - RNA, 22 nt, Human
auaaagauuucuuuuucucuac

SEQ ID NO: 945935 - RNA, 22 nt, Human
cucuugaagggcaucugaguua

SEQ ID NO: 945936 - RNA, 22 nt, Human
cugaaggauuagagagcacuua

SEQ ID NO: 945937 - RNA, 22 nt, Human
ccaggcagagggauccccaucc

SEQ ID NO: 945938 - RNA, 22 nt, Human
ugggcucugugccagguuggug

SEQ ID NO: 945939 - RNA, 23 nt, Human
aucagucuugguagcugugccca

SEQ ID NO: 945940 - RNA, 21 nt, Human
uagaaaucagcuggugccucu

SEQ ID NO: 945941 - RNA, 22 nt, Human
ugcacagugaccccuggugacu

SEQ ID NO: 945942 - RNA, 22 nt, Human
agcagcugucccuuaacaucag

SEQ ID NO: 945943 - RNA, 22 nt, Human
aauucuagcauugugaaaauau

SEQ ID NO: 945944 - RNA, 22 nt, Human
ucauccaguaugacuggugucu

SEQ ID NO: 945945 - RNA, 18 nt, Human
acaguaaagaaaggaauu

SEQ ID NO: 945946 - RNA, 22 nt, Human
cucugggcaaguaugauagaaa

SEQ ID NO: 945947 - RNA, 22 nt, Human
ggcaagcucaggccucaggugu

SEQ ID NO: 945948 - RNA, 22 nt, Human
gcugggagccccgagccagcgc

SEQ ID NO: 945949 - RNA, 22 nt, Human
uccugcugagcgucugucauuu

SEQ ID NO: 945950 - RNA, 22 nt, Human
gggcugcugcugccagcgacac

SEQ ID NO: 945951 - RNA, 22 nt, Human
cugugugcugaaaugcagugag

SEQ ID NO: 945952 - RNA, 22 nt, Human
ggcagcuaguuuaagaaagagg

SEQ ID NO: 945953 - RNA, 22 nt, Human
gcucccagcuggagccucaaca

SEQ ID NO: 945954 - RNA, 22 nt, Human
agaggagcugggaggcccucgu

SEQ ID NO: 945955 - RNA, 22 nt, Human
augugucugguuauugacaugc

SEQ ID NO: 945956 - RNA, 23 nt, Human
cuucuggcucuauaucagaauuc

SEQ ID NO: 945957 - RNA, 22 nt, Human
acuguucaaguuuuaugcugga

SEQ ID NO: 945958 - RNA, 22 nt, Human
gcugucacacauggccccagcu

SEQ ID NO: 945959 - RNA, 22 nt, Human
ccucagcucuucccugugcaca

SEQ ID NO: 945960 - RNA, 22 nt, Human
ggagucaggagcaggcugggcu

SEQ ID NO: 945961 - RNA, 22 nt, Human
cugccaggcgauggauuggcug

SEQ ID NO: 945962 - RNA, 22 nt, Human
ggccagaaguuggaaaagagcc

SEQ ID NO: 945963 - RNA, 17 nt, Human
ucuggccuuccugaacu

SEQ ID NO: 945964 - RNA, 17 nt, Human
agcuccugcccauggcu

SEQ ID NO: 945965 - RNA, 22 nt, Human
ugggccuguggcuuggcucuag

SEQ ID NO: 945966 - RNA, 22 nt, Human
uuuuaguuguacugucaacagu

SEQ ID NO: 945967 - RNA, 22 nt, Human
gccucugcaccaguacugugcc

SEQ ID NO: 945968 - RNA, 22 nt, Human
ugaugguugauuauaaaucagu

SEQ ID NO: 945969 - RNA, 18 nt, Human
cugggucuccaggcugcc

SEQ ID NO: 945970 - RNA, 17 nt, Human
gcucccugaggacagcu

SEQ ID NO: 945971 - RNA, 21 nt, Human
gggucugaauaucuggugcug

SEQ ID NO: 945972 - RNA, 22 nt, Human
ccugggcagggcuggacucuca

SEQ ID NO: 945973 - RNA, 22 nt, Human
guucacauccuugugaggauuu

SEQ ID NO: 945974 - RNA, 23 nt, Human
gccucuggagccccagugcucag

SEQ ID NO: 945975 - RNA, 20 nt, Human
gcauugaguauagacagaug

SEQ ID NO: 945976 - RNA, 22 nt, Human
ucugagcuuuuauuaucaaccu

SEQ ID NO: 945977 - RNA, 22 nt, Human
cugucaccuguucacugcagca

SEQ ID NO: 945978 - RNA, 22 nt, Human
cccaggagacagaaacagaggu

SEQ ID NO: 945979 - RNA, 22 nt, Human
ugguccaggguguaguacagag

SEQ ID NO: 945980 - RNA, 17 nt, Human
aaugaaugaauucuuug

SEQ ID NO: 945981 - RNA, 22 nt, Human
uuugaaauaugugucuuuugaa

SEQ ID NO: 945982 - RNA, 17 nt, Human
cugucugcgcaugaggu

SEQ ID NO: 945983 - RNA, 22 nt, Human
ggcacugaaguggguguugggu

SEQ ID NO: 945984 - RNA, 22 nt, Human
uaucuacuccucuuucagaugc

SEQ ID NO: 945985 - RNA, 22 nt, Human
uuugcauuauauuuauagaaga

SEQ ID NO: 945986 - RNA, 22 nt, Human
aagugaguggccuggagaggug

SEQ ID NO: 945987 - RNA, 22 nt, Human
gcagccagccccucugaccucu

SEQ ID NO: 945988 - RNA, 22 nt, Human
uccuuuuuauaguuagagaaac

SEQ ID NO: 945989 - RNA, 18 nt, Human
acagaaauagcugugccu

SEQ ID NO: 945990 - RNA, 22 nt, Human
ggucagggcucuuccaguggcu

SEQ ID NO: 945991 - RNA, 22 nt, Human
agggcucugagugggaaagagg

SEQ ID NO: 945992 - RNA, 20 nt, Human
uccaguuuuggagacauucu

SEQ ID NO: 945993 - RNA, 21 nt, Human
agugaaaugaaguguaugcuc

SEQ ID NO: 945994 - RNA, 22 nt, Human
cccaggaaccuaccagcucgag

SEQ ID NO: 945995 - RNA, 22 nt, Human
acaacauuauacauagaaagcu

SEQ ID NO: 945996 - RNA, 22 nt, Human
caguguccucagccagcagcua

SEQ ID NO: 945997 - RNA, 22 nt, Human
aggaagccaugguggacgucua

SEQ ID NO: 945998 - RNA, 22 nt, Human
aaaaagguugauccagauuagg

SEQ ID NO: 945999 - RNA, 22 nt, Human
ugucccauggauaccaggcuau

SEQ ID NO: 946000 - RNA, 21 nt, Human
agcaccuuacagcuauaaugg

SEQ ID NO: 946001 - RNA, 22 nt, Human
cagccuguagaauacaguaaau

SEQ ID NO: 946002 - RNA, 22 nt, Human
agccuggaggaggaguugagca

SEQ ID NO: 946003 - RNA, 22 nt, Human
ucagaagacuacuaggacacau

SEQ ID NO: 946004 - RNA, 22 nt, Human
gggcguggauggucagugcagg

SEQ ID NO: 946005 - RNA, 22 nt, Human
cagcagagcugugugggaaggg

SEQ ID NO: 946006 - RNA, 22 nt, Human
ggcugucugugguggagcguug

SEQ ID NO: 946007 - RNA, 22 nt, Human
cugugucugaauaacucugugu

SEQ ID NO: 946008 - RNA, 22 nt, Human
uacuacauuaauaaaacauuca

SEQ ID NO: 946009 - RNA, 22 nt, Human
uuggccaagauacgagcacaua

SEQ ID NO: 946010 - RNA, 22 nt, Human
augccuguaaucccagugcuuu

SEQ ID NO: 946011 - RNA, 22 nt, Human
uuuaggauaacuccaguuuucc

SEQ ID NO: 946012 - RNA, 22 nt, Human
ugcucuggguccugggccuccu

SEQ ID NO: 946013 - RNA, 22 nt, Human
caguacuuaguucucaugguuu

SEQ ID NO: 946014 - RNA, 22 nt, Human
aguuauagaaccagguccucac

SEQ ID NO: 946015 - RNA, 22 nt, Human
cagcuguggcugccacugcucc

SEQ ID NO: 946016 - RNA, 22 nt, Human
gugcagcagggggaagacagug

SEQ ID NO: 946017 - RNA, 21 nt, Human
uggagcugaauuuuuggcauc

SEQ ID NO: 946018 - RNA, 22 nt, Human
cuuucaaugugccugccuuggg

SEQ ID NO: 946019 - RNA, 22 nt, Human
ccuggcaguuuugcccaggauu

SEQ ID NO: 946020 - RNA, 20 nt, Human
ggccuuggguuucgccuguu

SEQ ID NO: 946021 - RNA, 22 nt, Human
guccaugauucugugacacccu

SEQ ID NO: 946022 - RNA, 22 nt, Human
uacagauacagaucuagauaca

SEQ ID NO: 946023 - RNA, 22 nt, Human
uucugugaaucuuuuuucccac

SEQ ID NO: 946024 - RNA, 22 nt, Human
gcucccugcacucugcagcccu

SEQ ID NO: 946025 - RNA, 22 nt, Human
uggcaggcagugugggagcugg

SEQ ID NO: 946026 - RNA, 22 nt, Human
cuggcucaggaaaguugcugcu

SEQ ID NO: 946027 - RNA, 22 nt, Human
caaaugcuacuaauaggcaagu

SEQ ID NO: 946028 - RNA, 22 nt, Human
cacagccugcugcacucaagaa

SEQ ID NO: 946029 - RNA, 22 nt, Human
uuguuaguuuauauaauguagu

SEQ ID NO: 946030 - RNA, 22 nt, Human
gcuaccugagcaagagcuucaa

SEQ ID NO: 946031 - RNA, 22 nt, Human
uuuucuuacugucugugauccu

SEQ ID NO: 946032 - RNA, 22 nt, Human
gcugcccugugguccagcaggu

SEQ ID NO: 946033 - RNA, 22 nt, Human
gggaagaguaacuagcccaugu

SEQ ID NO: 946034 - RNA, 22 nt, Human
uucacauuaucaggauuguuuc

SEQ ID NO: 946035 - RNA, 18 nt, Human
agggagagaccgcggguc

SEQ ID NO: 946036 - RNA, 22 nt, Human
agagcugaauuuggguggugga

SEQ ID NO: 946037 - RNA, 17 nt, Human
aggaaacauuuucuuuc

SEQ ID NO: 946038 - RNA, 22 nt, Human
aaauaguaaagugguagccauc

SEQ ID NO: 946039 - RNA, 22 nt, Human
aaguucuaauuuugcauucagg

SEQ ID NO: 946040 - RNA, 22 nt, Human
cuucagaggggacucaaaguca

SEQ ID NO: 946041 - RNA, 22 nt, Human
ucaguaacuuacuuauucaccu

SEQ ID NO: 946042 - RNA, 22 nt, Human
agacauaagugcuaugacauug

SEQ ID NO: 946043 - RNA, 22 nt, Human
gcugcaggggggucuggacuug

SEQ ID NO: 946044 - RNA, 22 nt, Human
agagccagccuucucagcuuac

SEQ ID NO: 946045 - RNA, 22 nt, Human
auucacaaagaagggaaguaca

SEQ ID NO: 946046 - RNA, 22 nt, Human
ccagggccaguaagauuggcau

SEQ ID NO: 946047 - RNA, 22 nt, Human
acucugcuuaauuaaaaccagg

SEQ ID NO: 946048 - RNA, 22 nt, Human
uagggcaguuucauguuaucuu

SEQ ID NO: 946049 - RNA, 20 nt, Human
accaauguuagcuuaguacu

SEQ ID NO: 946050 - RNA, 22 nt, Human
cugcuaaaccucucugagagcu

SEQ ID NO: 946051 - RNA, 22 nt, Human
uauucaaaguaccuucauugcc

SEQ ID NO: 946052 - RNA, 22 nt, Human
guuuuguugcugcagagcucaa

SEQ ID NO: 946053 - RNA, 22 nt, Human
cuuagaaauaaugguuucaguu

SEQ ID NO: 946054 - RNA, 22 nt, Human
augaaaacggaccagagcuauu

SEQ ID NO: 946055 - RNA, 22 nt, Human
cugcugcugagaaugccucagg

SEQ ID NO: 946056 - RNA, 17 nt, Human
cugcuuugugcaacgcu

SEQ ID NO: 946057 - RNA, 22 nt, Human
aaaaugcuauuucauggaggag

SEQ ID NO: 946058 - RNA, 22 nt, Human
aguguuccuugcuuucccagag

SEQ ID NO: 946059 - RNA, 22 nt, Human
cagggagaucuuggcuccuggu

SEQ ID NO: 946060 - RNA, 22 nt, Human
ggcugcaggcagaggcugucug

SEQ ID NO: 946061 - RNA, 22 nt, Human
ugcagaagaaugagcuuggagu

SEQ ID NO: 946062 - RNA, 22 nt, Human
uggccuuggcagugagaagagu

SEQ ID NO: 946063 - RNA, 22 nt, Human
uccaggcauaaugcccaguggu

SEQ ID NO: 946064 - RNA, 22 nt, Human
gccccagccaaggugacacgaa

SEQ ID NO: 946065 - RNA, 22 nt, Human
cacaggcucuucucacuugauu

SEQ ID NO: 946066 - RNA, 22 nt, Human
uuggcagcccagcuuacuagca

SEQ ID NO: 946067 - RNA, 22 nt, Human
ccaaggagcucauauucuuguu

SEQ ID NO: 946068 - RNA, 22 nt, Human
acucugcuuauugcugcaggca

SEQ ID NO: 946069 - RNA, 22 nt, Human
auaguguguaaagugcagugau

SEQ ID NO: 946070 - RNA, 17 nt, Human
ccacucaguaauuucuc

SEQ ID NO: 946071 - RNA, 22 nt, Human
ugcaucuuacguuuugaaaggg

SEQ ID NO: 946072 - RNA, 22 nt, Human
auguccuuugcuucucuggucc

SEQ ID NO: 946073 - RNA, 22 nt, Human
ugaauaguccuuggaauaacug

SEQ ID NO: 946074 - RNA, 22 nt, Human
aggugcuuggcucgugcacaca

SEQ ID NO: 946075 - RNA, 22 nt, Human
gccuggcaggccugggccagca

SEQ ID NO: 946076 - RNA, 22 nt, Human
ccuccugggacaggcuggcaca

SEQ ID NO: 946077 - RNA, 22 nt, Human
uuuuuggguccaggcuguaucu

SEQ ID NO: 946078 - RNA, 22 nt, Human
uugcagcuuagugauguuaucu

SEQ ID NO: 946079 - RNA, 22 nt, Human
uauguacauggagagcaauuga

SEQ ID NO: 946080 - RNA, 22 nt, Human
uuguauuagcuguaaauuuucu

SEQ ID NO: 946081 - RNA, 22 nt, Human
gaaucauuuauuuuugacagca

SEQ ID NO: 946082 - RNA, 22 nt, Human
ccagggugaggaggcucccacg

SEQ ID NO: 946083 - RNA, 22 nt, Human
gccagccccuuagggcucuccc

SEQ ID NO: 946084 - RNA, 22 nt, Human
guauacauagaugaugaacaag

SEQ ID NO: 946085 - RNA, 22 nt, Human
cucccuggcacagcgagagguu

SEQ ID NO: 946086 - RNA, 22 nt, Human
aaaacuacauuugacauuuugu

SEQ ID NO: 946087 - RNA, 22 nt, Human
uugcugaaguuaaugcuugcaa

SEQ ID NO: 946088 - RNA, 22 nt, Human
aauucauccaugaacaauucca

SEQ ID NO: 946089 - RNA, 22 nt, Human
aggcagauuuaggagaaaagaa

SEQ ID NO: 946090 - RNA, 22 nt, Human
uccuggcccgaucccugugaag

SEQ ID NO: 946091 - RNA, 22 nt, Human
guguguccucaguaguggcaug

SEQ ID NO: 946092 - RNA, 22 nt, Human
gccuggagcccaguguggggcu

SEQ ID NO: 946093 - RNA, 22 nt, Human
uagaaaucagguuuuuagaaag

SEQ ID NO: 946094 - RNA, 22 nt, Human
cucaggcccacagcagacccac

SEQ ID NO: 946095 - RNA, 22 nt, Human
uuaaacagguuuuugaauggcc

SEQ ID NO: 946096 - RNA, 21 nt, Human
aaaaagcuggggcaugcaugc

SEQ ID NO: 946097 - RNA, 22 nt, Human
cuuauguaugcuacuuuguggu

SEQ ID NO: 946098 - RNA, 22 nt, Human
guggauggauuuugaggaaugg

SEQ ID NO: 946099 - RNA, 22 nt, Human
agcaccugcacaguggaggaaa

SEQ ID NO: 946100 - RNA, 22 nt, Human
uuucaaauaccauaaaccuaau

SEQ ID NO: 946101 - RNA, 22 nt, Human
uauagccauuuccaguggcauc

SEQ ID NO: 946102 - RNA, 22 nt, Human
caggagugagaugcgaucacuu

SEQ ID NO: 946103 - RNA, 22 nt, Human
cacaggagguuaggaagugguc

SEQ ID NO: 946104 - RNA, 22 nt, Human
ggccucugcccucacuccuguc

SEQ ID NO: 946105 - RNA, 21 nt, Human
aacauuucaggauccaaauug

SEQ ID NO: 946106 - RNA, 22 nt, Human
caggcagcguccugcuuccugu

SEQ ID NO: 946107 - RNA, 22 nt, Human
gccuggcaggccuguuggggcu

SEQ ID NO: 946108 - RNA, 22 nt, Human
auggauaauggugauaguugca

SEQ ID NO: 946109 - RNA, 22 nt, Human
uacuuugucauucuaaccuucc

SEQ ID NO: 946110 - RNA, 22 nt, Human
ggcugccucugaugugcagacg

SEQ ID NO: 946111 - RNA, 22 nt, Human
aacuccagugucagcugcaaug

SEQ ID NO: 946112 - RNA, 22 nt, Human
gcugccaccguggagaugagug

SEQ ID NO: 946113 - RNA, 22 nt, Human
aggcacugugcugaugucuuau

SEQ ID NO: 946114 - RNA, 22 nt, Human
cucucugguacauagaguuugg

SEQ ID NO: 946115 - RNA, 22 nt, Human
agagggagugaaauggaauaga

SEQ ID NO: 946116 - RNA, 22 nt, Human
uaacaauaguguuugcuaguca

SEQ ID NO: 946117 - RNA, 19 nt, Human
uggcuccugccugccuucu

SEQ ID NO: 946118 - RNA, 22 nt, Human
acccaggaggcagagguugcag

SEQ ID NO: 946119 - RNA, 20 nt, Human
acugccuugguucaguaggu

SEQ ID NO: 946120 - RNA, 22 nt, Human
aguguuccugcucucaggaagc

SEQ ID NO: 946121 - RNA, 23 nt, Human
agggcacugaagcuggaauuggg

SEQ ID NO: 946122 - RNA, 22 nt, Human
cagagcucagagcagggcacuc

SEQ ID NO: 946123 - RNA, 23 nt, Human
cagguggcuccacgagggguggg

SEQ ID NO: 946124 - RNA, 22 nt, Human
gcucagaggcacgaccucuugg

SEQ ID NO: 946125 - RNA, 22 nt, Human
acaaaugcagcauaaagugaac

SEQ ID NO: 946126 - RNA, 22 nt, Human
uggcucaguaaucgagucuccu

SEQ ID NO: 946127 - RNA, 21 nt, Human
auggagccuaagaguggaggu

SEQ ID NO: 946128 - RNA, 22 nt, Human
ucuggcucaaaauacguacucu

SEQ ID NO: 946129 - RNA, 22 nt, Human
gggaugucacugugccuggcac

SEQ ID NO: 946130 - RNA, 23 nt, Human
uccuccuuuugcuugugcuuccc

SEQ ID NO: 946131 - RNA, 22 nt, Human
ugcugcuccccagcacacagca

SEQ ID NO: 946132 - RNA, 22 nt, Human
acacauuaugagcaguugucuu

SEQ ID NO: 946133 - RNA, 22 nt, Human
cagcagccuacaaugcacagaa

SEQ ID NO: 946134 - RNA, 22 nt, Human
ucauguaaguauagaaagcagu

SEQ ID NO: 946135 - RNA, 22 nt, Human
uugauguacagaauuguucaca

SEQ ID NO: 946136 - RNA, 19 nt, Human
agccuggcuuugcucugcu

SEQ ID NO: 946137 - RNA, 22 nt, Human
aagagagaacucccuucgccag

SEQ ID NO: 946138 - RNA, 16 nt, Human
gcuccugggcccucga

SEQ ID NO: 946139 - RNA, 22 nt, Human
auuugcuuucagguauaaaagg

SEQ ID NO: 946140 - RNA, 22 nt, Human
uguggcugucuguucuccuagg

SEQ ID NO: 946141 - RNA, 18 nt, Human
gagguccugcucuagccc

SEQ ID NO: 946142 - RNA, 22 nt, Human
uccagccaugcaugacaaucac

SEQ ID NO: 946143 - RNA, 21 nt, Human
acaggcuuuagaaaaugacuc

SEQ ID NO: 946144 - RNA, 21 nt, Human
augaagucuaugcuucugugu

SEQ ID NO: 946145 - RNA, 22 nt, Human
guggccagcaagugcugccucu

SEQ ID NO: 946146 - RNA, 22 nt, Human
ucacuuaaaaauucuaguuaug

SEQ ID NO: 946147 - RNA, 22 nt, Human
gcagcuccuccugggcuggaga

SEQ ID NO: 946148 - RNA, 22 nt, Human
uucuuucccaguagaugugaaa

SEQ ID NO: 946149 - RNA, 22 nt, Human
cugccuccugccgugcagcuuc

SEQ ID NO: 946150 - RNA, 21 nt, Human
cucuugugucagagccagagg

SEQ ID NO: 946151 - RNA, 22 nt, Human
uaauuuaauuccauggauucua

SEQ ID NO: 946152 - RNA, 22 nt, Human
ggccagggccuggggacugucc

SEQ ID NO: 946153 - RNA, 22 nt, Human
ugaaaaggaguccuuguuuuca

SEQ ID NO: 946154 - RNA, 22 nt, Human
cacagggccuugugugacugca

SEQ ID NO: 946155 - RNA, 22 nt, Human
gccaagagaaugugagagaaau

SEQ ID NO: 946156 - RNA, 22 nt, Human
ucagaagcaggagugugcacaa

SEQ ID NO: 946157 - RNA, 22 nt, Human
uggccacagccucugccaguuc

SEQ ID NO: 946158 - RNA, 22 nt, Human
aggcgcugcgcuggggccagaa

SEQ ID NO: 946159 - RNA, 20 nt, Human
uccaugaguuagagacuaua

SEQ ID NO: 946160 - RNA, 22 nt, Human
ugagccuggagucguggagggg

SEQ ID NO: 946161 - RNA, 23 nt, Human
gggaccagcuagggcugugaccu

SEQ ID NO: 946162 - RNA, 20 nt, Human
uuucaagucagcaauucuca

SEQ ID NO: 946163 - RNA, 22 nt, Human
auaacagagagcuacugaacug

SEQ ID NO: 946164 - RNA, 22 nt, Human
auuucauugaaguuaauucuuc

SEQ ID NO: 946165 - RNA, 22 nt, Human
guccucagagugggcagguccu

SEQ ID NO: 946166 - RNA, 22 nt, Human
cccuggaggcggagcuugcagu

SEQ ID NO: 946167 - RNA, 22 nt, Human
cacagggcaccaguuggccauc

SEQ ID NO: 946168 - RNA, 21 nt, Human
uccucagggccccagagcacu

SEQ ID NO: 946169 - RNA, 22 nt, Human
ugagagauugcuguauguuuug

SEQ ID NO: 946170 - RNA, 22 nt, Human
ggagcuggucagccuugagcau

SEQ ID NO: 946171 - RNA, 22 nt, Human
ucuguucaguugauguaguuuu

SEQ ID NO: 946172 - RNA, 22 nt, Human
uuauuccaguaaucucuguaau

SEQ ID NO: 946173 - RNA, 22 nt, Human
uggcugugugccaggcugucug

SEQ ID NO: 946174 - RNA, 18 nt, Human
aagcugcccucaggcagg

SEQ ID NO: 946175 - RNA, 22 nt, Human
cuacacaguucugccuaauggc

SEQ ID NO: 946176 - RNA, 22 nt, Human
cugggcugcaucaaagaggcau

SEQ ID NO: 946177 - RNA, 22 nt, Human
ugaacaguuucaagaaaacuuu

SEQ ID NO: 946178 - RNA, 22 nt, Human
gcagcugauggaaguccuauug

SEQ ID NO: 946179 - RNA, 22 nt, Human
gaguuuaacacuuggagaaaag

SEQ ID NO: 946180 - RNA, 22 nt, Human
gcagagugauggaaugugggug

SEQ ID NO: 946181 - RNA, 23 nt, Human
uggggccaagugaggaagggucu

SEQ ID NO: 946182 - RNA, 21 nt, Human
ugcaugcuauguuuuuauuuc

SEQ ID NO: 946183 - RNA, 22 nt, Human
aggcccugcccagugccacaag

SEQ ID NO: 946184 - RNA, 22 nt, Human
aggagagcuggugucuggaauc

SEQ ID NO: 946185 - RNA, 22 nt, Human
ucuggcucauacaagccugcaa

SEQ ID NO: 946186 - RNA, 22 nt, Human
aggagagaauguuccaggcuug

SEQ ID NO: 946187 - RNA, 22 nt, Human
ccagcuccucuucccaguguca

SEQ ID NO: 946188 - RNA, 22 nt, Human
ucagaggacaagcucccuggug

SEQ ID NO: 946189 - RNA, 20 nt, Human
gcuuccuucccagcccccac

SEQ ID NO: 946190 - RNA, 22 nt, Human
caucuuuaacaauuuacaaugu

SEQ ID NO: 946191 - RNA, 22 nt, Human
gcagaggggaagcugaggaauu

SEQ ID NO: 946192 - RNA, 22 nt, Human
uaggauaugguagaaaucauuc

SEQ ID NO: 946193 - RNA, 22 nt, Human
gggaggaggaauguuuugugua

SEQ ID NO: 946194 - RNA, 22 nt, Human
uuaaugcagaaaucaaacugac

SEQ ID NO: 946195 - RNA, 22 nt, Human
uccuuggcagcagggagcauga

SEQ ID NO: 946196 - RNA, 22 nt, Human
ccugggagaacugcuggguugg

SEQ ID NO: 946197 - RNA, 22 nt, Human
cagagagaggccacugcuauua

SEQ ID NO: 946198 - RNA, 22 nt, Human
aagccuuccugagugcaaggcc

SEQ ID NO: 946199 - RNA, 22 nt, Human
agugcugaagacuggcuaggga

SEQ ID NO: 946200 - RNA, 18 nt, Human
aggccagcccugcuacug

SEQ ID NO: 946201 - RNA, 22 nt, Human
agccccaguccgcugcgggcgg

SEQ ID NO: 946202 - RNA, 22 nt, Human
uuugagauggagucuugcucug

SEQ ID NO: 946203 - RNA, 22 nt, Human
ugccugucuucaggagugucac

SEQ ID NO: 946204 - RNA, 22 nt, Human
ucugccucgcuaacagcagcca

SEQ ID NO: 946205 - RNA, 22 nt, Human
ugaggggagcccgcccuggacg

SEQ ID NO: 946206 - RNA, 22 nt, Human
agcugauuccacuuuuucccca

SEQ ID NO: 946207 - RNA, 22 nt, Human
gcccugucccuuggcuucuagg

SEQ ID NO: 946208 - RNA, 22 nt, Human
agucucagcuacuugggaggcu

SEQ ID NO: 946209 - RNA, 22 nt, Human
uacuaugugaaaauacuauagu

SEQ ID NO: 946210 - RNA, 22 nt, Human
uaucuguugucuuuuacaugua

SEQ ID NO: 946211 - RNA, 22 nt, Human
auaucaguaucuauguauuugu

SEQ ID NO: 946212 - RNA, 22 nt, Human
uggcaggagguuuucuccagga

SEQ ID NO: 946213 - RNA, 20 nt, Human
cuguggaauuuuaccaugcg

SEQ ID NO: 946214 - RNA, 22 nt, Human
ccuguucacccuccaugcacag

SEQ ID NO: 946215 - RNA, 22 nt, Human
agugugcugcuuaaacaguugu

SEQ ID NO: 946216 - RNA, 22 nt, Human
ucagggcaagauugguuaauaa

SEQ ID NO: 946217 - RNA, 22 nt, Human
acagccuguguaccagcuggga

SEQ ID NO: 946218 - RNA, 22 nt, Human
uuucaaagaccauuaacuauca

SEQ ID NO: 946219 - RNA, 22 nt, Human
agagccugggaauuugcauguu

SEQ ID NO: 946220 - RNA, 22 nt, Human
aaggcacugcuuugcugcgccc

SEQ ID NO: 946221 - RNA, 22 nt, Human
aagauuucugcuccugagagaa

SEQ ID NO: 946222 - RNA, 22 nt, Human
agggcugcaggcaagauauggc

SEQ ID NO: 946223 - RNA, 22 nt, Human
ucaggagacuggcagugcccac

SEQ ID NO: 946224 - RNA, 22 nt, Human
agaaaucauucccaaacccaua

SEQ ID NO: 946225 - RNA, 22 nt, Human
auugaggcagcauaguucaggg

SEQ ID NO: 946226 - RNA, 22 nt, Human
agugauggugagugagaagcuc

SEQ ID NO: 946227 - RNA, 21 nt, Human
aggcuguccuuugccagcccu

SEQ ID NO: 946228 - RNA, 22 nt, Human
accaaggaguuugguauuuuag

SEQ ID NO: 946229 - RNA, 22 nt, Human
ucacucuggccucugcagcagu

SEQ ID NO: 946230 - RNA, 22 nt, Human
agggcagagcacugaauuggga

SEQ ID NO: 946231 - RNA, 22 nt, Human
agcccaggcagagggaugcuug

SEQ ID NO: 946232 - RNA, 22 nt, Human
cugggagauugaggccauggug

SEQ ID NO: 946233 - RNA, 22 nt, Human
gcugucuucacuuccugguuuc

SEQ ID NO: 946234 - RNA, 22 nt, Human
agagugggugaucucuguuguc

SEQ ID NO: 946235 - RNA, 19 nt, Human
gcugugccucucuccugcu

SEQ ID NO: 946236 - RNA, 18 nt, Human
ucaggagacacagacgca

SEQ ID NO: 946237 - RNA, 22 nt, Human
agcagcauguugggaugugaaa

SEQ ID NO: 946238 - RNA, 22 nt, Human
augaguucaauuguuucaguca

SEQ ID NO: 946239 - RNA, 20 nt, Human
acaaaugcauucugugacau

SEQ ID NO: 946240 - RNA, 22 nt, Human
gaaugcacucacccaucacuca

SEQ ID NO: 946241 - RNA, 22 nt, Human
uggcucagccauucguguugcc

SEQ ID NO: 946242 - RNA, 22 nt, Human
uacugcauaacuggcauguggg

SEQ ID NO: 946243 - RNA, 22 nt, Human
ucuggagcuuguuucagauggu

SEQ ID NO: 946244 - RNA, 22 nt, Human
acauuuuuauucaucaaagcag

SEQ ID NO: 946245 - RNA, 21 nt, Human
uaucuacuggugucuuucaga

SEQ ID NO: 946246 - RNA, 20 nt, Human
gccuggcacccggggcuggc

SEQ ID NO: 946247 - RNA, 22 nt, Human
uggugcugauaauggcaggauu

SEQ ID NO: 946248 - RNA, 22 nt, Human
agggugcauguuugcaagagug

SEQ ID NO: 946249 - RNA, 22 nt, Human
gcaggugggggucggugcaucu

SEQ ID NO: 946250 - RNA, 22 nt, Human
caaggccacuccagagacuggu

SEQ ID NO: 946251 - RNA, 22 nt, Human
uuucacaacacaaucucguuaa

SEQ ID NO: 946252 - RNA, 22 nt, Human
uggcucaguuuagcagcucagu

SEQ ID NO: 946253 - RNA, 22 nt, Human
gcagggaagaucuuggagcugc

SEQ ID NO: 946254 - RNA, 22 nt, Human
uaaaguauauuuuuucucaaua

SEQ ID NO: 946255 - RNA, 20 nt, Human
caguccaaucagaggccacc

SEQ ID NO: 946256 - RNA, 22 nt, Human
aauguucaacagauggauauuu

SEQ ID NO: 946257 - RNA, 22 nt, Human
uggagcugagaaguggagcucu

SEQ ID NO: 946258 - RNA, 22 nt, Human
cugggaguguucuaggucacau

SEQ ID NO: 946259 - RNA, 22 nt, Human
ggagaggagcuauugggggcuc

SEQ ID NO: 946260 - RNA, 22 nt, Human
ggaggccuagccagcuccaguu

SEQ ID NO: 946261 - RNA, 22 nt, Human
aaacauuguuaugauaaauuac

SEQ ID NO: 946262 - RNA, 21 nt, Human
cugugcuucuuccuaagccag

SEQ ID NO: 946263 - RNA, 22 nt, Human
aaguuacuggcaagggcugcag

SEQ ID NO: 946264 - RNA, 22 nt, Human
ucauugcaccccagucccagcu

SEQ ID NO: 946265 - RNA, 22 nt, Human
ugcugguggagaaaguggaggu

SEQ ID NO: 946266 - RNA, 22 nt, Human
gucuggccugccagcucuggug

SEQ ID NO: 946267 - RNA, 22 nt, Human
gaggcacugagagugggggaug

SEQ ID NO: 946268 - RNA, 22 nt, Human
ucucaggguuuccugggggcug

SEQ ID NO: 946269 - RNA, 22 nt, Human
gguggcagcgucuaucugacau

SEQ ID NO: 946270 - RNA, 22 nt, Human
gcaggagcagucaggggcagcu

SEQ ID NO: 946271 - RNA, 22 nt, Human
agccagcuguacugccugcuca

SEQ ID NO: 946272 - RNA, 22 nt, Human
aaggcaguuugggccaccaucu

SEQ ID NO: 946273 - RNA, 22 nt, Human
cuaauuuuuguucugcauugaa

SEQ ID NO: 946274 - RNA, 22 nt, Human
gcccaggaggucaaguagcuau

SEQ ID NO: 946275 - RNA, 22 nt, Human
ggcagcucacgggcauggggug

SEQ ID NO: 946276 - RNA, 22 nt, Human
cuggcuuucucugugguguuca

SEQ ID NO: 946277 - RNA, 22 nt, Human
ucacaugcuugaggaaagaaaa

SEQ ID NO: 946278 - RNA, 22 nt, Human
ggagggacccacucuagaggug

SEQ ID NO: 946279 - RNA, 22 nt, Human
ggaggcgauccugggaaacacc

SEQ ID NO: 946280 - RNA, 22 nt, Human
augcugagugagugaaacccag

SEQ ID NO: 946281 - RNA, 22 nt, Human
ccugccaggccagugagcuucc

SEQ ID NO: 946282 - RNA, 22 nt, Human
cacugaagguaggaccaaggcu

SEQ ID NO: 946283 - RNA, 22 nt, Human
guaaaauagaauaacguggcua

SEQ ID NO: 946284 - RNA, 19 nt, Human
ccugucugucuucagcuag

SEQ ID NO: 946285 - RNA, 22 nt, Human
ggugaaggucuacugugugcca

SEQ ID NO: 946286 - RNA, 22 nt, Human
cccaggagagaggccaguuggc

SEQ ID NO: 946287 - RNA, 22 nt, Human
agccuucaguaaauccacugug

SEQ ID NO: 946288 - RNA, 22 nt, Human
gaggcuguuagggccugaggua

SEQ ID NO: 946289 - RNA, 22 nt, Human
gcuccuggagagauugagaaag

SEQ ID NO: 946290 - RNA, 22 nt, Human
ccagcagagcauggggaggaag

SEQ ID NO: 946291 - RNA, 22 nt, Human
ccugccugcguccucugagggc

SEQ ID NO: 946292 - RNA, 22 nt, Human
caaggccaguccauuuuggaag

SEQ ID NO: 946293 - RNA, 22 nt, Human
aagagcuggaugaagaaaucaa

SEQ ID NO: 946294 - RNA, 22 nt, Human
gggcugggaauggcuaaguaug

SEQ ID NO: 946295 - RNA, 22 nt, Human
uggcagcuggagggcaauggcc

SEQ ID NO: 946296 - RNA, 22 nt, Human
uuuauuccaugugucuaugacc

SEQ ID NO: 946297 - RNA, 22 nt, Human
guuugcauguguacuuaauugg

SEQ ID NO: 946298 - RNA, 22 nt, Human
aguggcagagccaaguagagcc

SEQ ID NO: 946299 - RNA, 22 nt, Human
auuguacuuuuauuacauguag

SEQ ID NO: 946300 - RNA, 22 nt, Human
uuuggaauuggaaagugcugug

SEQ ID NO: 946301 - RNA, 22 nt, Human
ggcagcuuccugagccagcagc

SEQ ID NO: 946302 - RNA, 22 nt, Human
ggagccugcgggagcucccauu

SEQ ID NO: 946303 - RNA, 18 nt, Human
aaauguacuguccauggc

SEQ ID NO: 946304 - RNA, 22 nt, Human
aaaagcagaucuccaaagucua

SEQ ID NO: 946305 - RNA, 22 nt, Human
gcagaagcugggcagcgaggug

SEQ ID NO: 946306 - RNA, 22 nt, Human
acuuucuauggcuuauuaugag

SEQ ID NO: 946307 - RNA, 20 nt, Human
ccuccuggucaggugugcag

SEQ ID NO: 946308 - RNA, 17 nt, Human
ugaggccugcaucagug

SEQ ID NO: 946309 - RNA, 22 nt, Human
acagaguauuggaaaggcagug

SEQ ID NO: 946310 - RNA, 22 nt, Human
uuggccaauuccagaggaucau

SEQ ID NO: 946311 - RNA, 22 nt, Human
ugggauggcauccugggccuug

SEQ ID NO: 946312 - RNA, 22 nt, Human
guuucuuaaauguagcaggacc

SEQ ID NO: 946313 - RNA, 22 nt, Human
gccuucugaucgcuggacugac

SEQ ID NO: 946314 - RNA, 22 nt, Human
cagaaguaagauuacugugagu

SEQ ID NO: 946315 - RNA, 22 nt, Human
agccaagcaccacuggcacucg

SEQ ID NO: 946316 - RNA, 19 nt, Human
gcugcuggcucuggcugga

SEQ ID NO: 946317 - RNA, 22 nt, Human
gagggcugauaacaggaauaca

SEQ ID NO: 946318 - RNA, 22 nt, Human
cugcccugucugcagccuggcu

SEQ ID NO: 946319 - RNA, 18 nt, Human
acauuucucucugcguga

SEQ ID NO: 946320 - RNA, 22 nt, Human
ucagggcacauucugcaguggc

SEQ ID NO: 946321 - RNA, 22 nt, Human
acauuucuugaugccucuguga

SEQ ID NO: 946322 - RNA, 22 nt, Human
gccugcuggauguggccaggcc

SEQ ID NO: 946323 - RNA, 22 nt, Human
uaggaucucaccauagaaggaa

SEQ ID NO: 946324 - RNA, 22 nt, Human
gagcuuccauggacgccaucug

SEQ ID NO: 946325 - RNA, 22 nt, Human
uggcucaguuucaguccugguu

SEQ ID NO: 946326 - RNA, 22 nt, Human
uggcucagaggggaagugguuu

SEQ ID NO: 946327 - RNA, 22 nt, Human
gaagagcugugauucaggcuua

SEQ ID NO: 946328 - RNA, 22 nt, Human
ugagccagucugucugggugaa

SEQ ID NO: 946329 - RNA, 22 nt, Human
cgcugggcgccgaccugcuggc

SEQ ID NO: 946330 - RNA, 18 nt, Human
uggagcaggaagccuggc

SEQ ID NO: 946331 - RNA, 22 nt, Human
aggauguuaucugugcaggugg

SEQ ID NO: 946332 - RNA, 22 nt, Human
caucaaauggcaagugaaagcu

SEQ ID NO: 946333 - RNA, 22 nt, Human
gugaaaauaaggcugguucuug

SEQ ID NO: 946334 - RNA, 22 nt, Human
gucuggagccacccuaagcauu

SEQ ID NO: 946335 - RNA, 22 nt, Human
ugggcagauuaaugcaguggcu

SEQ ID NO: 946336 - RNA, 21 nt, Human
uggcucuggguaggagagugc

SEQ ID NO: 946337 - RNA, 22 nt, Human
uuuacuuugugucaagucaaga

SEQ ID NO: 946338 - RNA, 22 nt, Human
cauugcugugggcauuugcugc

SEQ ID NO: 946339 - RNA, 22 nt, Human
ccagcagccaccuucucgaaau

SEQ ID NO: 946340 - RNA, 22 nt, Human
agccucucuuucugguggcuaa

SEQ ID NO: 946341 - RNA, 22 nt, Human
gccugccuucggugcgcagcgg

SEQ ID NO: 946342 - RNA, 22 nt, Human
gcugagcugggacaguccuggg

SEQ ID NO: 946343 - RNA, 22 nt, Human
gaggagagggcugcgggcccac

SEQ ID NO: 946344 - RNA, 15 nt, Human
ugggcagaucacuug

SEQ ID NO: 946345 - RNA, 22 nt, Human
agaugcugucacacacacuguu

SEQ ID NO: 946346 - RNA, 22 nt, Human
caaggccagagccagcgauaag

SEQ ID NO: 946347 - RNA, 22 nt, Human
agcagcucacaggauuccugaa

SEQ ID NO: 946348 - RNA, 18 nt, Human
augcuuugcuuacguuau

SEQ ID NO: 946349 - RNA, 22 nt, Human
agggcucugggguggcagagau

SEQ ID NO: 946350 - RNA, 22 nt, Human
cugagcauggccgguccauggu

SEQ ID NO: 946351 - RNA, 22 nt, Human
ggcucaggaugagccuucucau

SEQ ID NO: 946352 - RNA, 22 nt, Human
agggcugcaccggggcuucgcg

SEQ ID NO: 946353 - RNA, 22 nt, Human
ucaacagaagugauagcuauua

SEQ ID NO: 946354 - RNA, 22 nt, Human
caguuaaaggcccaauaucugg

SEQ ID NO: 946355 - RNA, 22 nt, Human
ugccucagagugggcuugcuau

SEQ ID NO: 946356 - RNA, 22 nt, Human
auugcacaaacacagucagacu

SEQ ID NO: 946357 - RNA, 23 nt, Human
uuucaacaaugcuuagagaaaac

SEQ ID NO: 946358 - RNA, 22 nt, Human
uaaguucauuagacuacagaua

SEQ ID NO: 946359 - RNA, 22 nt, Human
gccucacugcagccccaggaag

SEQ ID NO: 946360 - RNA, 22 nt, Human
gagggggagaugugcacacacu

SEQ ID NO: 946361 - RNA, 22 nt, Human
uccugcagaccucagucagguc

SEQ ID NO: 946362 - RNA, 22 nt, Human
aggagagucuugagucacuggu

SEQ ID NO: 946363 - RNA, 22 nt, Human
ucacaucucccuggaggacaca

SEQ ID NO: 946364 - RNA, 18 nt, Human
ucugggcuucccgaggcu

SEQ ID NO: 946365 - RNA, 22 nt, Human
gagggcaguagccucguacccu

SEQ ID NO: 946366 - RNA, 22 nt, Human
ucucaggaagugauauugagac

SEQ ID NO: 946367 - RNA, 22 nt, Human
uguauguaaaguuuguaauaga

SEQ ID NO: 946368 - RNA, 22 nt, Human
gaggcccucuugccacaaugaa

SEQ ID NO: 946369 - RNA, 19 nt, Human
cagcaauaaugccagaugg

SEQ ID NO: 946370 - RNA, 22 nt, Human
uaggcacugggcuaggacaggu

SEQ ID NO: 946371 - RNA, 22 nt, Human
uccaguucuaggucacucucug

SEQ ID NO: 946372 - RNA, 22 nt, Human
agcuggcagcucucagggguac

SEQ ID NO: 946373 - RNA, 22 nt, Human
guaauguguuuugaaaaacagu

SEQ ID NO: 946374 - RNA, 22 nt, Human
aggugauguccacagcuugcag

SEQ ID NO: 946375 - RNA, 22 nt, Human
uggaggaugccuggggaggccu

SEQ ID NO: 946376 - RNA, 22 nt, Human
uuggaaagcaagcuggacauac

SEQ ID NO: 946377 - RNA, 22 nt, Human
uccaggaggcaccuuuggacca

SEQ ID NO: 946378 - RNA, 22 nt, Human
agcuggccuucggugucacugg

SEQ ID NO: 946379 - RNA, 22 nt, Human
gggcuggcaucgguugcugaga

SEQ ID NO: 946380 - RNA, 22 nt, Human
gggcacagagggucuugaagaa

SEQ ID NO: 946381 - RNA, 22 nt, Human
cauuucugauuacagaauacua

SEQ ID NO: 946382 - RNA, 22 nt, Human
ugggacaggaugaccagaaggu

SEQ ID NO: 946383 - RNA, 21 nt, Human
agcuggcagauauggugucug

SEQ ID NO: 946384 - RNA, 22 nt, Human
caggagcuacucagguuggguu

SEQ ID NO: 946385 - RNA, 22 nt, Human
gucaccagugcuaagaggugga

SEQ ID NO: 946386 - RNA, 22 nt, Human
gacucguucauaguuccaauuu

SEQ ID NO: 946387 - RNA, 22 nt, Human
acagcuggaggccccauugucc

SEQ ID NO: 946388 - RNA, 18 nt, Human
ucagagguacagaaaagu

SEQ ID NO: 946389 - RNA, 22 nt, Human
gcccaggaaauaaaagugggcu

SEQ ID NO: 946390 - RNA, 22 nt, Human
ccuucuuaaacaucauuuuggc

SEQ ID NO: 946391 - RNA, 22 nt, Human
cacugaaggcugcagcucagcc

SEQ ID NO: 946392 - RNA, 22 nt, Human
aucugccugagucuagguuuuc

SEQ ID NO: 946393 - RNA, 20 nt, Human
ugcuguaagauuagagagcu

SEQ ID NO: 946394 - RNA, 22 nt, Human
cagcucccgccaucgggaggca

SEQ ID NO: 946395 - RNA, 22 nt, Human
aaacccaucugucugucugcag

SEQ ID NO: 946396 - RNA, 22 nt, Human
uauuuaauuugcucauugugau

SEQ ID NO: 946397 - RNA, 22 nt, Human
uccacugcagcuucugauggaa

SEQ ID NO: 946398 - RNA, 22 nt, Human
ccugggucuugguucaugcucu

SEQ ID NO: 946399 - RNA, 18 nt, Human
uuccaugauuccuuucac

SEQ ID NO: 946400 - RNA, 22 nt, Human
augugucuuugagacucugcua

SEQ ID NO: 946401 - RNA, 22 nt, Human
ugaagcaggaaccagcagcauu

SEQ ID NO: 946402 - RNA, 22 nt, Human
aaguucaagaucaagguuccag

SEQ ID NO: 946403 - RNA, 22 nt, Human
uugauuucuauucagauguaga

SEQ ID NO: 946404 - RNA, 22 nt, Human
ccaaggaggccccaggucagcu

SEQ ID NO: 946405 - RNA, 22 nt, Human
gaaguucaggugggaauugagc

SEQ ID NO: 946406 - RNA, 21 nt, Human
ccaggguccagcugccauggu

SEQ ID NO: 946407 - RNA, 22 nt, Human
gacacauagaucuaucucacuc

SEQ ID NO: 946408 - RNA, 22 nt, Human
aaggcagcuucaccacagcauu

SEQ ID NO: 946409 - RNA, 18 nt, Human
aggagccuuugcacugga

SEQ ID NO: 946410 - RNA, 22 nt, Human
cuggagcucuguguguuccuga

SEQ ID NO: 946411 - RNA, 22 nt, Human
aaaaaguuucaacugccaacuc

SEQ ID NO: 946412 - RNA, 21 nt, Human
cagcuccacuaaagcagcugu

SEQ ID NO: 946413 - RNA, 22 nt, Human
caggguggaauggaaugcuggc

SEQ ID NO: 946414 - RNA, 22 nt, Human
cucuguagaaacagggcagaag

SEQ ID NO: 946415 - RNA, 22 nt, Human
uccuguaguugcuaaguuuguu

SEQ ID NO: 946416 - RNA, 22 nt, Human
ucauccuuuugcaugggaaggc

SEQ ID NO: 946417 - RNA, 21 nt, Human
ucucuggaauuagaccauguu

SEQ ID NO: 946418 - RNA, 22 nt, Human
uaauuucuagggacuaaggugc

SEQ ID NO: 946419 - RNA, 22 nt, Human
accagagcuggcagaguaucaa

SEQ ID NO: 946420 - RNA, 22 nt, Human
ucuggcaggucaaucauucuuu

SEQ ID NO: 946421 - RNA, 22 nt, Human
ccuaagaauuaaugaauacacc

SEQ ID NO: 946422 - RNA, 22 nt, Human
uucuggaggccccuuccuucuc

SEQ ID NO: 946423 - RNA, 22 nt, Human
uaugaaauuuaaacacagauca

SEQ ID NO: 946424 - RNA, 22 nt, Human
gucucccaaccccugugcccag

SEQ ID NO: 946425 - RNA, 22 nt, Human
auuucagaugaccaaauggaaa

SEQ ID NO: 946426 - RNA, 19 nt, Human
gagcgcagagggcagggga

SEQ ID NO: 946427 - RNA, 22 nt, Human
gcaccacaucaaugaggggagc

SEQ ID NO: 946428 - RNA, 22 nt, Human
auuuucuauucugcugguuuag

SEQ ID NO: 946429 - RNA, 21 nt, Human
agggcagauuagcuguaagag

SEQ ID NO: 946430 - RNA, 22 nt, Human
agauuucaaugugagcauuagu

SEQ ID NO: 946431 - RNA, 22 nt, Human
ucuguagcaagugagaggcauu

SEQ ID NO: 946432 - RNA, 22 nt, Human
aaacauugcuaaauaaugcugc

SEQ ID NO: 946433 - RNA, 22 nt, Human
cuggccuuggaagggagcccgu

SEQ ID NO: 946434 - RNA, 22 nt, Human
gcagugaaacaauaggaucaaa

SEQ ID NO: 946435 - RNA, 22 nt, Human
ucaggaaagaagaugcucagug

SEQ ID NO: 946436 - RNA, 22 nt, Human
gauaccagacagggagggagaa

SEQ ID NO: 946437 - RNA, 22 nt, Human
gggcuggcgggaaaggcaauuc

SEQ ID NO: 946438 - RNA, 22 nt, Human
ugggcucauggcccagcacugg

SEQ ID NO: 946439 - RNA, 22 nt, Human
ugaagcaggugaauggaugucg

SEQ ID NO: 946440 - RNA, 22 nt, Human
cugucauuuaagacauucugga

SEQ ID NO: 946441 - RNA, 22 nt, Human
ggcaggugcaccugagccaucu

SEQ ID NO: 946442 - RNA, 22 nt, Human
uggcugggugcuauccaguacu

SEQ ID NO: 946443 - RNA, 22 nt, Human
uaauaggagccaggucacauag

SEQ ID NO: 946444 - RNA, 22 nt, Human
gccaugccugugucuccaggcc

SEQ ID NO: 946445 - RNA, 22 nt, Human
uggcuuccgccgcgggccucgg

SEQ ID NO: 946446 - RNA, 22 nt, Human
agauguuuucuaauucuauauu

SEQ ID NO: 946447 - RNA, 22 nt, Human
uuuaaagaaauuccucaucuuu

SEQ ID NO: 946448 - RNA, 22 nt, Human
uguagcauguaaauugguuauu

SEQ ID NO: 946449 - RNA, 22 nt, Human
uccaggagucuagccucaggcc

SEQ ID NO: 946450 - RNA, 23 nt, Human
agggaaaguaguaauggccuuug

SEQ ID NO: 946451 - RNA, 22 nt, Human
ucaaauguucccuguacuggcc

SEQ ID NO: 946452 - RNA, 22 nt, Human
uaggcacugguuguggauaguu

SEQ ID NO: 946453 - RNA, 22 nt, Human
cuguggugagcaacugacugaa

SEQ ID NO: 946454 - RNA, 23 nt, Human
agggguggucaguacccgcagug

SEQ ID NO: 946455 - RNA, 22 nt, Human
aggcccugagaaaaucccugca

SEQ ID NO: 946456 - RNA, 22 nt, Human
uggaagagggagcuggguggcc

SEQ ID NO: 946457 - RNA, 22 nt, Human
agcagggccucuggcacugguc

SEQ ID NO: 946458 - RNA, 22 nt, Human
agacaugagaaacccaccagag

SEQ ID NO: 946459 - RNA, 22 nt, Human
aauaaaaugaacugguagaguu

SEQ ID NO: 946460 - RNA, 22 nt, Human
aggcacagagaaugcccuccau

SEQ ID NO: 946461 - RNA, 22 nt, Human
gggcugcugccaccagguggau

SEQ ID NO: 946462 - RNA, 22 nt, Human
aaguaaaagcuuuaccaugcgc

SEQ ID NO: 946463 - RNA, 22 nt, Human
ucugguaaccuuuaucccuccu

SEQ ID NO: 946464 - RNA, 17 nt, Human
uaugcuuuucuucucca

SEQ ID NO: 946465 - RNA, 22 nt, Human
gcuggcagagacaagaagacua

SEQ ID NO: 946466 - RNA, 18 nt, Human
agcagcugugccacacug

SEQ ID NO: 946467 - RNA, 22 nt, Human
ccagcccuucccaacuggccag

SEQ ID NO: 946468 - RNA, 22 nt, Human
uggcuggcaguaggcuaguggc

SEQ ID NO: 946469 - RNA, 22 nt, Human
uaucuaaauggaauauuccaga

SEQ ID NO: 946470 - RNA, 22 nt, Human
caaagugcuggaauuacaggug

SEQ ID NO: 946471 - RNA, 22 nt, Human
gaguaagagcuggcuuuggugu

SEQ ID NO: 946472 - RNA, 22 nt, Human
agacagguaaauagagaugcug

SEQ ID NO: 946473 - RNA, 22 nt, Human
ccacagcaugcaggccugacac

SEQ ID NO: 946474 - RNA, 22 nt, Human
uugauacauuuuuaggauaaac

SEQ ID NO: 946475 - RNA, 22 nt, Human
uucucagagcucacuguaguaa

SEQ ID NO: 946476 - RNA, 22 nt, Human
ggggauggaauguaguagugau

SEQ ID NO: 946477 - RNA, 22 nt, Human
aagggcaggcagagaucauaua

SEQ ID NO: 946478 - RNA, 22 nt, Human
aaagccagagcaagcugucaca

SEQ ID NO: 946479 - RNA, 22 nt, Human
ggcagcucugcuccacaugagu

SEQ ID NO: 946480 - RNA, 22 nt, Human
gcucaaggcaggcagacaugag

SEQ ID NO: 946481 - RNA, 22 nt, Human
uggcuggcaaggcuggagucag

SEQ ID NO: 946482 - RNA, 22 nt, Human
uguuucuaggucaauaauuuuu

SEQ ID NO: 946483 - RNA, 22 nt, Human
uuggcagcagggaguuggccgc

SEQ ID NO: 946484 - RNA, 22 nt, Human
auucuuaauugccaugcuguau

SEQ ID NO: 946485 - RNA, 22 nt, Human
ugaagcagcaaaugaugggaga

SEQ ID NO: 946486 - RNA, 22 nt, Human
cagcauggggaucacuguaggc

SEQ ID NO: 946487 - RNA, 22 nt, Human
uauguguuugacacccugcaag

SEQ ID NO: 946488 - RNA, 23 nt, Human
uugcauguagcccaugaguaacu

SEQ ID NO: 946489 - RNA, 20 nt, Human
uccaggagguuaguguggcu

SEQ ID NO: 946490 - RNA, 20 nt, Human
ucugccacugcacucugccc

SEQ ID NO: 946491 - RNA, 22 nt, Human
agucauaugacccuucacaaac

SEQ ID NO: 946492 - RNA, 22 nt, Human
auugaaucugcacuaguauuuu

SEQ ID NO: 946493 - RNA, 22 nt, Human
agcugcugagccaggcugaugu

SEQ ID NO: 946494 - RNA, 22 nt, Human
caagagcugcaaauagcgugac

SEQ ID NO: 946495 - RNA, 23 nt, Human
gccugggacucaggaggagcuca

SEQ ID NO: 946496 - RNA, 22 nt, Human
aaaaguguccagauuaugaaga

SEQ ID NO: 946497 - RNA, 22 nt, Human
aaagcaguauauugguaguugu

SEQ ID NO: 946498 - RNA, 22 nt, Human
uccaaacacccuccaugcugca

SEQ ID NO: 946499 - RNA, 22 nt, Human
ucuucagacccuuagcugugau

SEQ ID NO: 946500 - RNA, 22 nt, Human
ucucagggaccaugaugaugac

SEQ ID NO: 946501 - RNA, 22 nt, Human
gcugcucuccauggccgugagu

SEQ ID NO: 946502 - RNA, 20 nt, Human
agcuggccuguccuaggccu

SEQ ID NO: 946503 - RNA, 22 nt, Human
cagcuccugaggacugcuggga

SEQ ID NO: 946504 - RNA, 20 nt, Human
ccugccugccucggcucauu

SEQ ID NO: 946505 - RNA, 22 nt, Human
uucucagauauuuacugagcau

SEQ ID NO: 946506 - RNA, 22 nt, Human
aaugauguuuuuaaagaacaua

SEQ ID NO: 946507 - RNA, 21 nt, Human
acugggagaacgagccuuucc

SEQ ID NO: 946508 - RNA, 22 nt, Human
agaauucuccuucagggcagga

SEQ ID NO: 946509 - RNA, 22 nt, Human
caguggagagacuuuuacucuu

SEQ ID NO: 946510 - RNA, 22 nt, Human
ugucucuggcccaugagcagag

SEQ ID NO: 946511 - RNA, 22 nt, Human
cuaaucaucuuucucuuaaagc

SEQ ID NO: 946512 - RNA, 22 nt, Human
uacuuccuguuuccaugucugu

SEQ ID NO: 946513 - RNA, 22 nt, Human
ggugccagccuagugcaguggu

SEQ ID NO: 946514 - RNA, 22 nt, Human
gaggugaguggaucacgagguc

SEQ ID NO: 946515 - RNA, 22 nt, Human
uccuucagcucucuauuuagau

SEQ ID NO: 946516 - RNA, 19 nt, Human
ccagcagacacagcugccc

SEQ ID NO: 946517 - RNA, 21 nt, Human
cugagggccgcagcugggcuc

SEQ ID NO: 946518 - RNA, 22 nt, Human
ccucugggugggaggccgggcg

SEQ ID NO: 946519 - RNA, 22 nt, Human
gcugugcagguccccacugccu

SEQ ID NO: 946520 - RNA, 22 nt, Human
aagggcagcuuaaauugguagc

SEQ ID NO: 946521 - RNA, 22 nt, Human
ugggacagggaaucugaucccc

SEQ ID NO: 946522 - RNA, 22 nt, Human
acuguguguuugucuagcacag

SEQ ID NO: 946523 - RNA, 22 nt, Human
cuggccuuuuguuucuggagaa

SEQ ID NO: 946524 - RNA, 22 nt, Human
uuuucauuuuuguagaugcaag

SEQ ID NO: 946525 - RNA, 22 nt, Human
aggcuggcgucaggggcuguac

SEQ ID NO: 946526 - RNA, 22 nt, Human
aagugccaucauagcauggcug

SEQ ID NO: 946527 - RNA, 22 nt, Human
acagggcaugugcaagagacau

SEQ ID NO: 946528 - RNA, 22 nt, Human
cauuuuaaaugauuuaagccaa

SEQ ID NO: 946529 - RNA, 19 nt, Human
caguggccuggaggucucu

SEQ ID NO: 946530 - RNA, 22 nt, Human
agacagggucuugaucagagcu

SEQ ID NO: 946531 - RNA, 22 nt, Human
aggccagaaauuuggaguaugu

SEQ ID NO: 946532 - RNA, 22 nt, Human
ucaccgccuugcccggccgggc

SEQ ID NO: 946533 - RNA, 22 nt, Human
uaugugcaaaaugcuagacuag

SEQ ID NO: 946534 - RNA, 22 nt, Human
aggcagacucaauggcuagaua

SEQ ID NO: 946535 - RNA, 22 nt, Human
gcucucuguuauuaagaucuuu

SEQ ID NO: 946536 - RNA, 22 nt, Human
augcuauacucaaagaaauuca

SEQ ID NO: 946537 - RNA, 22 nt, Human
uccagccuuucuacucacugag

SEQ ID NO: 946538 - RNA, 17 nt, Human
gcugcagcgguaggcag

SEQ ID NO: 946539 - RNA, 22 nt, Human
aaugcuguauaucuuagcuaau

SEQ ID NO: 946540 - RNA, 22 nt, Human
agauuuccaucuuuuucaugug

SEQ ID NO: 946541 - RNA, 22 nt, Human
cagaggccccagaacuagcucu

SEQ ID NO: 946542 - RNA, 22 nt, Human
ucuucagauaaagggagaguau

SEQ ID NO: 946543 - RNA, 22 nt, Human
gaggggagacagggaaaucagu

SEQ ID NO: 946544 - RNA, 22 nt, Human
auugugcaaauauuaucuguag

SEQ ID NO: 946545 - RNA, 22 nt, Human
ugcagccaauucauucauucuu

SEQ ID NO: 946546 - RNA, 22 nt, Human
gagaggccaccugacgagcagu

SEQ ID NO: 946547 - RNA, 22 nt, Human
uccuugaauccuagcauccuau

SEQ ID NO: 946548 - RNA, 22 nt, Human
gcauggcauuaacaagauggaa

SEQ ID NO: 946549 - RNA, 22 nt, Human
agcugccacaugcccaagggca

SEQ ID NO: 946550 - RNA, 22 nt, Human
ugccagggugucaggagagcua

SEQ ID NO: 946551 - RNA, 22 nt, Human
uucuccuuuguaauucucaucc

SEQ ID NO: 946552 - RNA, 18 nt, Human
uggguggcuagggaguuu

SEQ ID NO: 946553 - RNA, 19 nt, Human
uggcucugucgaaggcaca

SEQ ID NO: 946554 - RNA, 22 nt, Human
acagagcauauaaagugcuuug

SEQ ID NO: 946555 - RNA, 22 nt, Human
augacagaggagugcaggugau

SEQ ID NO: 946556 - RNA, 22 nt, Human
ccaggccuggccaggggaugcc

SEQ ID NO: 946557 - RNA, 22 nt, Human
ucacucuguggcccaggcagug

SEQ ID NO: 946558 - RNA, 22 nt, Human
cugcaucaguggauaugauggu

SEQ ID NO: 946559 - RNA, 22 nt, Human
uucucuucuguucagugcccaa

SEQ ID NO: 946560 - RNA, 22 nt, Human
gccuuccugcagcucugagcgu

SEQ ID NO: 946561 - RNA, 22 nt, Human
ucauuuuucacacagggucacc

SEQ ID NO: 946562 - RNA, 19 nt, Human
uggcaggcccaggauggac

SEQ ID NO: 946563 - RNA, 22 nt, Human
cagggccagcgcccaggcccag

SEQ ID NO: 946564 - RNA, 22 nt, Human
cugagaggaacaucuuaugcuu

SEQ ID NO: 946565 - RNA, 22 nt, Human
acauugcugcauucuccuuccc

SEQ ID NO: 946566 - RNA, 19 nt, Human
agauggggaagagugugag

SEQ ID NO: 946567 - RNA, 22 nt, Human
ggaggggaugguuugacccugg

SEQ ID NO: 946568 - RNA, 22 nt, Human
auaaauuuauaauuguuuccug

SEQ ID NO: 946569 - RNA, 22 nt, Human
aaugucugccagaacugaucau

SEQ ID NO: 946570 - RNA, 22 nt, Human
uucuuacagcccuauuacuaaa

SEQ ID NO: 946571 - RNA, 22 nt, Human
auuuagaacuuuguuugccaau

SEQ ID NO: 946572 - RNA, 22 nt, Human
agucccagacuccaguuuucug

SEQ ID NO: 946573 - RNA, 22 nt, Human
ccugccugauuccaggauggcu

SEQ ID NO: 946574 - RNA, 22 nt, Human
uucucuaagcuggcugaggucu

SEQ ID NO: 946575 - RNA, 22 nt, Human
uuucuagucucgaucucuuaau

SEQ ID NO: 946576 - RNA, 22 nt, Human
gcucugggaacugacugccuuc

SEQ ID NO: 946577 - RNA, 21 nt, Human
gcccagcaaggugagaaggcc

SEQ ID NO: 946578 - RNA, 22 nt, Human
aggccuguuccaggccccuuuu

SEQ ID NO: 946579 - RNA, 22 nt, Human
cuggcagguggauggggacucc

SEQ ID NO: 946580 - RNA, 22 nt, Human
gagagggagccagccaggaacc

SEQ ID NO: 946581 - RNA, 22 nt, Human
ccagcugagaaguguaaaguga

SEQ ID NO: 946582 - RNA, 22 nt, Human
cccaggaacagcacagaacagc

SEQ ID NO: 946583 - RNA, 22 nt, Human
cugcuguggugucaagcaucuc

SEQ ID NO: 946584 - RNA, 22 nt, Human
cugaagcacagcauauaaauaa

SEQ ID NO: 946585 - RNA, 22 nt, Human
uaccauuucauucuuuccucau

SEQ ID NO: 946586 - RNA, 22 nt, Human
agcugaaagugcuuugaggacu

SEQ ID NO: 946587 - RNA, 22 nt, Human
auggaagguccuacagagcgca

SEQ ID NO: 946588 - RNA, 22 nt, Human
caaggccagggaauuuuucugg

SEQ ID NO: 946589 - RNA, 22 nt, Human
uuuucauuguuacuaugagcua

SEQ ID NO: 946590 - RNA, 22 nt, Human
guggcugcuguccucucugguu

SEQ ID NO: 946591 - RNA, 22 nt, Human
agcccagggacagggcggaugu

SEQ ID NO: 946592 - RNA, 22 nt, Human
cccaggaaagagacugcugggu

SEQ ID NO: 946593 - RNA, 22 nt, Human
uugcucaggcuggugugcagug

SEQ ID NO: 946594 - RNA, 22 nt, Human
uugaaguuguaguucagugaag

SEQ ID NO: 946595 - RNA, 20 nt, Human
agguccugggacuggcagag

SEQ ID NO: 946596 - RNA, 22 nt, Human
cccccuggcaggcuggccucuc

SEQ ID NO: 946597 - RNA, 20 nt, Human
cgugcugugaccuugagcau

SEQ ID NO: 946598 - RNA, 22 nt, Human
ucugaggcccugcaggcagugu

SEQ ID NO: 946599 - RNA, 22 nt, Human
uguggcuuaagaaugccuuuaa

SEQ ID NO: 946600 - RNA, 22 nt, Human
ggagccaguauuuaguggucuu

SEQ ID NO: 946601 - RNA, 22 nt, Human
ugagccugcaauaagcacagcc

SEQ ID NO: 946602 - RNA, 22 nt, Human
uuuuucauugcagccucucucc

SEQ ID NO: 946603 - RNA, 22 nt, Human
guuaggauguggggacuuuggg

SEQ ID NO: 946604 - RNA, 22 nt, Human
ucaaaccaccuuguuacugggg

SEQ ID NO: 946605 - RNA, 22 nt, Human
augguacaaaauguauaaaguc

SEQ ID NO: 946606 - RNA, 22 nt, Human
uuuauuacaccagguuaacuca

SEQ ID NO: 946607 - RNA, 22 nt, Human
caguguacuuggaauguaacag

SEQ ID NO: 946608 - RNA, 22 nt, Human
gaccaggacacaguggcaaggu

SEQ ID NO: 946609 - RNA, 22 nt, Human
auaaaaaggacagauguggucu

SEQ ID NO: 946610 - RNA, 22 nt, Human
gggccaaggggagcuggaaggg

SEQ ID NO: 946611 - RNA, 22 nt, Human
cugugucuucacauuugugugc

SEQ ID NO: 946612 - RNA, 22 nt, Human
uuuaagacuuagauuuauuggg

SEQ ID NO: 946613 - RNA, 22 nt, Human
ggcucuggcguccaauggagcg

SEQ ID NO: 946614 - RNA, 22 nt, Human
acaugcauacacguacauaccu

SEQ ID NO: 946615 - RNA, 22 nt, Human
agccagcagggcuuagaggaca

SEQ ID NO: 946616 - RNA, 22 nt, Human
cugaggagagaucacguggugu

SEQ ID NO: 946617 - RNA, 22 nt, Human
auacaucuagagucauaaaaac

SEQ ID NO: 946618 - RNA, 22 nt, Human
ccagaagggcuauugcagugac

SEQ ID NO: 946619 - RNA, 22 nt, Human
ucccagccggugccuggguccc

SEQ ID NO: 946620 - RNA, 22 nt, Human
uugcaaauuccaauccaauauu

SEQ ID NO: 946621 - RNA, 22 nt, Human
augugucucuaaaauuuaguaa

SEQ ID NO: 946622 - RNA, 22 nt, Human
uaaauguggagacucaggaguc

SEQ ID NO: 946623 - RNA, 22 nt, Human
uccagugguuugaaaggggugu

SEQ ID NO: 946624 - RNA, 22 nt, Human
agugaaaugacugaaucagaua

SEQ ID NO: 946625 - RNA, 22 nt, Human
uggcagcuguuaauguuuuguu

SEQ ID NO: 946626 - RNA, 22 nt, Human
agaugcugcuccacaggccagg

SEQ ID NO: 946627 - RNA, 22 nt, Human
guggaauguccuugaucauaag

SEQ ID NO: 946628 - RNA, 22 nt, Human
gcugucuggcauggcguggcug

SEQ ID NO: 946629 - RNA, 18 nt, Human
cugcugcaggcacucagg

SEQ ID NO: 946630 - RNA, 22 nt, Human
agugaaauugcuguaagaggaa

SEQ ID NO: 946631 - RNA, 22 nt, Human
aggcugcuucaauggauaagau

SEQ ID NO: 946632 - RNA, 22 nt, Human
aagugaaacauguaucucuuua

SEQ ID NO: 946633 - RNA, 22 nt, Human
caaagugcugagauuacaggua

SEQ ID NO: 946634 - RNA, 22 nt, Human
uuaauguguguacaggauuuug

SEQ ID NO: 946635 - RNA, 22 nt, Human
gugcauuuaggucacaugaugu

SEQ ID NO: 946636 - RNA, 22 nt, Human
uguuucaagcaauagcauuuca

SEQ ID NO: 946637 - RNA, 22 nt, Human
cauuucacaaauggccacauca

SEQ ID NO: 946638 - RNA, 22 nt, Human
cccaggcagggacgugcucugg

SEQ ID NO: 946639 - RNA, 22 nt, Human
ugcaugcugcacacaugcguag

SEQ ID NO: 946640 - RNA, 22 nt, Human
acuccuggaaaagaacgcaggg

SEQ ID NO: 946641 - RNA, 22 nt, Human
caaugauguuuagauaaaaucc

SEQ ID NO: 946642 - RNA, 22 nt, Human
agucacuguucugucaugucaa

SEQ ID NO: 946643 - RNA, 22 nt, Human
auaaaacuuauuagaauugugu

SEQ ID NO: 946644 - RNA, 22 nt, Human
agggcugccugacuccagagcc

SEQ ID NO: 946645 - RNA, 22 nt, Human
uuuauuuggcauccagggagaa

SEQ ID NO: 946646 - RNA, 22 nt, Human
gcugcagcccggcgcgccugag

SEQ ID NO: 946647 - RNA, 19 nt, Human
ugcagcucagggcaggggc

SEQ ID NO: 946648 - RNA, 22 nt, Human
cuugaaagaagggucuuuuaau

SEQ ID NO: 946649 - RNA, 21 nt, Human
uggcucugcucagagcagucc

SEQ ID NO: 946650 - RNA, 22 nt, Human
gaaccaaguaggauacaaggag

SEQ ID NO: 946651 - RNA, 22 nt, Human
ggccuuggugcucuguguugca

SEQ ID NO: 946652 - RNA, 22 nt, Human
augaaauguuggucccaaucgc

SEQ ID NO: 946653 - RNA, 22 nt, Human
aggacaggauugagcugaacug

SEQ ID NO: 946654 - RNA, 22 nt, Human
agaaaugaaaccaaagccuaga

SEQ ID NO: 946655 - RNA, 21 nt, Human
aggccucuucauggccaugau

SEQ ID NO: 946656 - RNA, 22 nt, Human
cugcccuguggcucugagucau

SEQ ID NO: 946657 - RNA, 22 nt, Human
uucucagagugaccaagucuuu

SEQ ID NO: 946658 - RNA, 22 nt, Human
auggcaagcaagcugaagagau

SEQ ID NO: 946659 - RNA, 22 nt, Human
gccugcagccucaagggcugag

SEQ ID NO: 946660 - RNA, 22 nt, Human
uucaggauccccaccgcguuua

SEQ ID NO: 946661 - RNA, 22 nt, Human
gauggcagcagcagccagggau

SEQ ID NO: 946662 - RNA, 22 nt, Human
ucuuguuaucaggaaaacagua

SEQ ID NO: 946663 - RNA, 22 nt, Human
cagggccaagcugcagcaucug

SEQ ID NO: 946664 - RNA, 22 nt, Human
cuggugagacgguugacaggag

SEQ ID NO: 946665 - RNA, 22 nt, Human
uccagggguaccggccaggcag

SEQ ID NO: 946666 - RNA, 22 nt, Human
gaggacagagccgccuggcaag

SEQ ID NO: 946667 - RNA, 22 nt, Human
aggcagccaucugcaggaagga

SEQ ID NO: 946668 - RNA, 22 nt, Human
acuguguccucauguggcagaa

SEQ ID NO: 946669 - RNA, 22 nt, Human
ggugugccuggggcuuagcugc

SEQ ID NO: 946670 - RNA, 22 nt, Human
ucccuggggauguuggccugcc

SEQ ID NO: 946671 - RNA, 22 nt, Human
aaaauacuacugucuucuuccc

SEQ ID NO: 946672 - RNA, 22 nt, Human
ugggcugcggauaggccucgga

SEQ ID NO: 946673 - RNA, 22 nt, Human
cuggcagugacauugcaggugc

SEQ ID NO: 946674 - RNA, 22 nt, Human
ucugucacccagagugcagugg

SEQ ID NO: 946675 - RNA, 22 nt, Human
agaggccacuuugccugugaug

SEQ ID NO: 946676 - RNA, 22 nt, Human
uugaaucuggguacuuguaaua

SEQ ID NO: 946677 - RNA, 22 nt, Human
uucaagucaaggaaagaggucu

SEQ ID NO: 946678 - RNA, 22 nt, Human
acagagauggcacagagaaggu

SEQ ID NO: 946679 - RNA, 22 nt, Human
ggugaguugggguucacagguc

SEQ ID NO: 946680 - RNA, 22 nt, Human
uuuaauugauucacagucugua

SEQ ID NO: 946681 - RNA, 22 nt, Human
ccuguucacuuugacuucucca

SEQ ID NO: 946682 - RNA, 19 nt, Human
acagggcagcaauaggaua

SEQ ID NO: 946683 - RNA, 22 nt, Human
uuucaguuguccuguuaauagc

SEQ ID NO: 946684 - RNA, 23 nt, Human
gggcugcuccaggccaaggcugg

SEQ ID NO: 946685 - RNA, 22 nt, Human
caggucagaggcgcagccccca

SEQ ID NO: 946686 - RNA, 22 nt, Human
ugcagcuucuuguccugugauu

SEQ ID NO: 946687 - RNA, 22 nt, Human
uuaaauuagucaagcuucucug

SEQ ID NO: 946688 - RNA, 22 nt, Human
ucugggagagcacguggcugac

SEQ ID NO: 946689 - RNA, 22 nt, Human
gucccuggaauggacucugcgc

SEQ ID NO: 946690 - RNA, 22 nt, Human
uggcccugcuuaugucucucuu

SEQ ID NO: 946691 - RNA, 22 nt, Human
uccuguuaguguuagacuuccc

SEQ ID NO: 946692 - RNA, 22 nt, Human
ggucccugguucccucugagcu

SEQ ID NO: 946693 - RNA, 22 nt, Human
cagcccucagguccucagcagc

SEQ ID NO: 946694 - RNA, 22 nt, Human
aaaaugcugggaaaguuggaau

SEQ ID NO: 946695 - RNA, 22 nt, Human
uccaggagaaggccauccagcg

SEQ ID NO: 946696 - RNA, 22 nt, Human
uauuccaguucaccuuuucauc

SEQ ID NO: 946697 - RNA, 22 nt, Human
augcccgauaccuaguuaacuc

SEQ ID NO: 946698 - RNA, 22 nt, Human
ggagcuguuggcagcuaucuug

SEQ ID NO: 946699 - RNA, 22 nt, Human
gaucauuugcaggaaacauuaa

SEQ ID NO: 946700 - RNA, 22 nt, Human
gcagggacaacugugcaccuga

SEQ ID NO: 946701 - RNA, 22 nt, Human
uagaacagaggguugcccagau

SEQ ID NO: 946702 - RNA, 22 nt, Human
uuccauauuuguguggcaaaag

SEQ ID NO: 946703 - RNA, 22 nt, Human
ggcagcugauuagcaucaagga

SEQ ID NO: 946704 - RNA, 22 nt, Human
aacaaaugauuguugguuggag

SEQ ID NO: 946705 - RNA, 22 nt, Human
aguggcagagcugugucuugaa

SEQ ID NO: 946706 - RNA, 22 nt, Human
auugaaagagaauguagcucuu

SEQ ID NO: 946707 - RNA, 22 nt, Human
uauucugugugauauguaaaug

SEQ ID NO: 946708 - RNA, 22 nt, Human
aaggccauuauucugauauauu

SEQ ID NO: 946709 - RNA, 22 nt, Human
uuuucuuaggugcuccaaguag

SEQ ID NO: 946710 - RNA, 22 nt, Human
gcagaggcaaucagguaugugg

SEQ ID NO: 946711 - RNA, 22 nt, Human
ggagcugcuccuucagccaagu

SEQ ID NO: 946712 - RNA, 22 nt, Human
agagauguucauucagcauguu

SEQ ID NO: 946713 - RNA, 22 nt, Human
gcaguggauccaaugguaucuu

SEQ ID NO: 946714 - RNA, 22 nt, Human
ucuuacauauacgucauuuagu

SEQ ID NO: 946715 - RNA, 19 nt, Human
ucaaugcaugaaaucagcc

SEQ ID NO: 946716 - RNA, 21 nt, Human
aaggcagaagcauggaaugag

SEQ ID NO: 946717 - RNA, 22 nt, Human
ugucaucuuggucuggaauaag

SEQ ID NO: 946718 - RNA, 22 nt, Human
uagaauaugugguguauacuuu

SEQ ID NO: 946719 - RNA, 22 nt, Human
guggccuggaugagcuucgaca

SEQ ID NO: 946720 - RNA, 22 nt, Human
cugaagagcucuccuguccccu

SEQ ID NO: 946721 - RNA, 22 nt, Human
aaauuacuuuacacuuucaucu

SEQ ID NO: 946722 - RNA, 18 nt, Human
accugccuguucuucucu

SEQ ID NO: 946723 - RNA, 22 nt, Human
cacagacccagaagggaugaag

SEQ ID NO: 946724 - RNA, 22 nt, Human
uucuucuuuccuauaauuaauu

SEQ ID NO: 946725 - RNA, 22 nt, Human
acaguaauuaaaauggaucugc

SEQ ID NO: 946726 - RNA, 22 nt, Human
gacagagugcagggcuagaaga

SEQ ID NO: 946727 - RNA, 22 nt, Human
aggcugugaguuuugucucaga

SEQ ID NO: 946728 - RNA, 22 nt, Human
acaguguccuuguggucccugu

SEQ ID NO: 946729 - RNA, 22 nt, Human
uccaggaguccugggagugauu

SEQ ID NO: 946730 - RNA, 22 nt, Human
ugcuuuauguuaucagaagggu

SEQ ID NO: 946731 - RNA, 22 nt, Human
cagccuccugggacacucaccg

SEQ ID NO: 946732 - RNA, 22 nt, Human
aaagcugcugccaaucaggcuu

SEQ ID NO: 946733 - RNA, 22 nt, Human
uccagucuucuugcagcuacau

SEQ ID NO: 946734 - RNA, 22 nt, Human
aagaggaaaugauugacuauau

SEQ ID NO: 946735 - RNA, 22 nt, Human
gaggucagucagaccaggguuu

SEQ ID NO: 946736 - RNA, 22 nt, Human
cauuguuauagcauuacacacc

SEQ ID NO: 946737 - RNA, 22 nt, Human
aaaugcacaaaguaaguguaau

SEQ ID NO: 946738 - RNA, 23 nt, Human
uccaugagaugugggcuucuagu

SEQ ID NO: 946739 - RNA, 22 nt, Human
gaguggggcguggauccagcgu

SEQ ID NO: 946740 - RNA, 19 nt, Human
agcagcuggagguggagug

SEQ ID NO: 946741 - RNA, 22 nt, Human
ugggagcaccuugagggcagaa

SEQ ID NO: 946742 - RNA, 22 nt, Human
aucagcaagacuaggggaauac

SEQ ID NO: 946743 - RNA, 22 nt, Human
ccucaugguacuuacuguagcu

SEQ ID NO: 946744 - RNA, 22 nt, Human
cccagcaguuguuggugcacau

SEQ ID NO: 946745 - RNA, 22 nt, Human
gccugggaagacuaagugggag

SEQ ID NO: 946746 - RNA, 22 nt, Human
agcagagccagaauuggaccag

SEQ ID NO: 946747 - RNA, 22 nt, Human
gcugugcacuaccuauacaucc

SEQ ID NO: 946748 - RNA, 23 nt, Human
ucucaggacacacaugucuauca

SEQ ID NO: 946749 - RNA, 22 nt, Human
uugcauuguugcaaugaaguau

SEQ ID NO: 946750 - RNA, 22 nt, Human
uauuucuuguuauucucguuga

SEQ ID NO: 946751 - RNA, 22 nt, Human
gcucccaguucccaaagugacc

SEQ ID NO: 946752 - RNA, 22 nt, Human
uccaggagguaugaguggcccc

SEQ ID NO: 946753 - RNA, 23 nt, Human
gccuggagaaaagcugcaguuca

SEQ ID NO: 946754 - RNA, 22 nt, Human
uccuugaauggacauuacacug

SEQ ID NO: 946755 - RNA, 22 nt, Human
gcacugggugugaggcagcguc

SEQ ID NO: 946756 - RNA, 22 nt, Human
aagacagagggaagcaaugaug

SEQ ID NO: 946757 - RNA, 22 nt, Human
ccugccugucaucgccugcgcc

SEQ ID NO: 946758 - RNA, 22 nt, Human
gcacagaagagcuuuggaauga

SEQ ID NO: 946759 - RNA, 22 nt, Human
aacagaauugcugcugccaaug

SEQ ID NO: 946760 - RNA, 22 nt, Human
gccagggaacccaagggccuca

SEQ ID NO: 946761 - RNA, 17 nt, Human
uuccaguuuaguauugu

SEQ ID NO: 946762 - RNA, 22 nt, Human
ucaaagcaucagucaauuuagg

SEQ ID NO: 946763 - RNA, 19 nt, Human
cugccuguuauggagagaa

SEQ ID NO: 946764 - RNA, 22 nt, Human
ggugcucaagagggcauccucu

SEQ ID NO: 946765 - RNA, 21 nt, Human
agugaaauugcaucagaggga

SEQ ID NO: 946766 - RNA, 22 nt, Human
gcagcuggacccacacggcuua

SEQ ID NO: 946767 - RNA, 22 nt, Human
ucugggcuuuacacugugcuua

SEQ ID NO: 946768 - RNA, 22 nt, Human
auccaggcuggguguggcuacu

SEQ ID NO: 946769 - RNA, 18 nt, Human
ugugguggagcugccuuc

SEQ ID NO: 946770 - RNA, 22 nt, Human
gcugcucuuuucagagaugaga

SEQ ID NO: 946771 - RNA, 22 nt, Human
cugguccauucucucccugaag

SEQ ID NO: 946772 - RNA, 22 nt, Human
gcugggcagccuggccgcugcc

SEQ ID NO: 946773 - RNA, 22 nt, Human
ucuggagcgaggucccugucug

SEQ ID NO: 946774 - RNA, 22 nt, Human
ugggccagcaauugcugcucag

SEQ ID NO: 946775 - RNA, 22 nt, Human
acuguucauauucuuagaaauu

SEQ ID NO: 946776 - RNA, 22 nt, Human
agugggcagugcgcucggaugc

SEQ ID NO: 946777 - RNA, 22 nt, Human
cccuccagccauggacccaggu

SEQ ID NO: 946778 - RNA, 22 nt, Human
gaucauuuugaugcccuuuuag

SEQ ID NO: 946779 - RNA, 22 nt, Human
agaaugcaguuugaaauaaggu

SEQ ID NO: 946780 - RNA, 22 nt, Human
guucuucagauuccauuucagu

SEQ ID NO: 946781 - RNA, 22 nt, Human
gcugggcaccucucccagauug

SEQ ID NO: 946782 - RNA, 22 nt, Human
uauaugcaugcccauguauaca

SEQ ID NO: 946783 - RNA, 22 nt, Human
uucauuacugcgguagucacac

SEQ ID NO: 946784 - RNA, 22 nt, Human
cuucuucauguauugauagucu

SEQ ID NO: 946785 - RNA, 22 nt, Human
augggagccaucgcauuugcug

SEQ ID NO: 946786 - RNA, 22 nt, Human
cagaauuuuucgaauguacugu

SEQ ID NO: 946787 - RNA, 22 nt, Human
agagcugcaccuaugcagaccu

SEQ ID NO: 946788 - RNA, 22 nt, Human
uuugaaagcuacuuucggguca

SEQ ID NO: 946789 - RNA, 22 nt, Human
augggaggaucacuugaggcca

SEQ ID NO: 946790 - RNA, 17 nt, Human
aggagucucagaugagc

SEQ ID NO: 946791 - RNA, 22 nt, Human
augucacagcucccauuccucc

SEQ ID NO: 946792 - RNA, 22 nt, Human
ccugucuggccaccagggcgau

SEQ ID NO: 946793 - RNA, 22 nt, Human
gucuuucuaugaugaacuguug

SEQ ID NO: 946794 - RNA, 22 nt, Human
agggggugucucugauuggguu

SEQ ID NO: 946795 - RNA, 22 nt, Human
acucugcugauagguccucaga

SEQ ID NO: 946796 - RNA, 22 nt, Human
ucaggagaguguucaguggagg

SEQ ID NO: 946797 - RNA, 22 nt, Human
uuuuucagccaugaauuacacu

SEQ ID NO: 946798 - RNA, 20 nt, Human
aggacagcagcugccacuug

SEQ ID NO: 946799 - RNA, 22 nt, Human
uauuucagucacuucuucucug

SEQ ID NO: 946800 - RNA, 22 nt, Human
cugcccaggaaggagaggaugg

SEQ ID NO: 946801 - RNA, 22 nt, Human
aggcaguggcugagaccagggg

SEQ ID NO: 946802 - RNA, 22 nt, Human
ugucccagacacaguaugcgcu

SEQ ID NO: 946803 - RNA, 20 nt, Human
uauuuguauuugggaaaguu

SEQ ID NO: 946804 - RNA, 22 nt, Human
ggcaggagcucuccaguuugcc

SEQ ID NO: 946805 - RNA, 22 nt, Human
ugcucaguccuaccuuggcucc

SEQ ID NO: 946806 - RNA, 22 nt, Human
uuaacaauagaguuucuucagg

SEQ ID NO: 946807 - RNA, 22 nt, Human
aaaugcagcagcuaauugaaaa

SEQ ID NO: 946808 - RNA, 22 nt, Human
uuuuucuaauggcuuaggaugu

SEQ ID NO: 946809 - RNA, 22 nt, Human
cuggggcucucuggaaugcuug

SEQ ID NO: 946810 - RNA, 22 nt, Human
aguccuuugggaaaaaugacua

SEQ ID NO: 946811 - RNA, 22 nt, Human
gaaugcacacgugugugcaugc

SEQ ID NO: 946812 - RNA, 22 nt, Human
cagaggcugaugugggaugggc

SEQ ID NO: 946813 - RNA, 22 nt, Human
uaggccaggacagagcuuccag

SEQ ID NO: 946814 - RNA, 21 nt, Human
ccagcuccaggaccuuggauc

SEQ ID NO: 946815 - RNA, 22 nt, Human
gcucuguccagcgugcacagaa

SEQ ID NO: 946816 - RNA, 22 nt, Human
agacccagaaagcagcugcauu

SEQ ID NO: 946817 - RNA, 22 nt, Human
cuuuguauucaguugggcugug

SEQ ID NO: 946818 - RNA, 18 nt, Human
ugggcugccuggccucug

SEQ ID NO: 946819 - RNA, 22 nt, Human
cagcuccugccugggcagcugu

SEQ ID NO: 946820 - RNA, 21 nt, Human
uucucagaucgaguagugaga

SEQ ID NO: 946821 - RNA, 22 nt, Human
aggcagucuaguccccaggcaa

SEQ ID NO: 946822 - RNA, 22 nt, Human
uaauuucaccguugcuagaaau

SEQ ID NO: 946823 - RNA, 22 nt, Human
acaggcugcugagccauuugcu

SEQ ID NO: 946824 - RNA, 19 nt, Human
gaguuauugccagggcaug

SEQ ID NO: 946825 - RNA, 22 nt, Human
gcaaagcauucuguggagucua

SEQ ID NO: 946826 - RNA, 21 nt, Human
gaugaagcaaucuuucuguug

SEQ ID NO: 946827 - RNA, 22 nt, Human
uguuucauuaguacugacaaua

SEQ ID NO: 946828 - RNA, 22 nt, Human
auucuguauggaaaagcacuau

SEQ ID NO: 946829 - RNA, 22 nt, Human
acaaggaggucuggggggcccu

SEQ ID NO: 946830 - RNA, 22 nt, Human
ggccugcugacccaaguccugu

SEQ ID NO: 946831 - RNA, 22 nt, Human
uguaugcuuguguauaauauaa

SEQ ID NO: 946832 - RNA, 20 nt, Human
agugucugggccucaggccc

SEQ ID NO: 946833 - RNA, 22 nt, Human
auuuggaaacaauuauauucuu

SEQ ID NO: 946834 - RNA, 22 nt, Human
gagagugagauaauuucacaua

SEQ ID NO: 946835 - RNA, 22 nt, Human
gaggcagcagggcugguuccuu

SEQ ID NO: 946836 - RNA, 22 nt, Human
ucacuuauugcucaucucaugc

SEQ ID NO: 946837 - RNA, 21 nt, Human
ugacugaggcuucuucacaca

SEQ ID NO: 946838 - RNA, 19 nt, Human
auacagauguauccaugau

SEQ ID NO: 946839 - RNA, 22 nt, Human
acacugcagaugaaagcauaag

SEQ ID NO: 946840 - RNA, 22 nt, Human
gaggccuggcugggaggaggug

SEQ ID NO: 946841 - RNA, 22 nt, Human
aagaauguggguggauaugaug

SEQ ID NO: 946842 - RNA, 22 nt, Human
gaggaggcacuugagcagaugu

SEQ ID NO: 946843 - RNA, 22 nt, Human
gaaauauuguacuggagauguu

SEQ ID NO: 946844 - RNA, 22 nt, Human
aagcagaaguugaucuaccaua

SEQ ID NO: 946845 - RNA, 22 nt, Human
ggcucugcagugacuugagggg

SEQ ID NO: 946846 - RNA, 22 nt, Human
cccaggugcugcgugaagccuc

SEQ ID NO: 946847 - RNA, 22 nt, Human
uccugccuguuuaccuguacuu

SEQ ID NO: 946848 - RNA, 22 nt, Human
agcccugggaggccagcuugua

SEQ ID NO: 946849 - RNA, 17 nt, Human
cuccuggcagccucagg

SEQ ID NO: 946850 - RNA, 22 nt, Human
ugcagcauuauucacaguagcc

SEQ ID NO: 946851 - RNA, 22 nt, Human
ccugggcucaagugauccuccu

SEQ ID NO: 946852 - RNA, 22 nt, Human
caggaccuggaaugcuugugaa

SEQ ID NO: 946853 - RNA, 22 nt, Human
cucccagggucuaggcugcugg

SEQ ID NO: 946854 - RNA, 22 nt, Human
aguauuucuaguugguucuacu

SEQ ID NO: 946855 - RNA, 22 nt, Human
ucucagagagcuguguuuuccu

SEQ ID NO: 946856 - RNA, 22 nt, Human
aaggccaacuaggaugagcuag

SEQ ID NO: 946857 - RNA, 22 nt, Human
ucugaggccccugggcaggaug

SEQ ID NO: 946858 - RNA, 18 nt, Human
aguggucuguuauaucau

SEQ ID NO: 946859 - RNA, 22 nt, Human
gguccccagcaguggcugcuuc

SEQ ID NO: 946860 - RNA, 22 nt, Human
cucagaguucuccugggaggug

SEQ ID NO: 946861 - RNA, 22 nt, Human
cuuuguagcugcuucugauuua

SEQ ID NO: 946862 - RNA, 22 nt, Human
gagcaguagaguacauggcucc

SEQ ID NO: 946863 - RNA, 22 nt, Human
gcacugugaucaaggcuaagca

SEQ ID NO: 946864 - RNA, 22 nt, Human
cuacauuuugugauuaugaaau

SEQ ID NO: 946865 - RNA, 21 nt, Human
uucagcaguccucuagagaua

SEQ ID NO: 946866 - RNA, 22 nt, Human
accaggagggacccugguggcc

SEQ ID NO: 946867 - RNA, 22 nt, Human
uuuacuguuuacagcuaaugca

SEQ ID NO: 946868 - RNA, 22 nt, Human
guuuuauuggaacacagccaug

SEQ ID NO: 946869 - RNA, 22 nt, Human
ggcgaggccgggacaggcugga

SEQ ID NO: 946870 - RNA, 22 nt, Human
gauucugagcugguguuuuacg

SEQ ID NO: 946871 - RNA, 22 nt, Human
ucuuccaagguugcacacuauc

SEQ ID NO: 946872 - RNA, 22 nt, Human
uccugagggcgauucagcaggu

SEQ ID NO: 946873 - RNA, 22 nt, Human
aauauguucaaaauagaucacu

SEQ ID NO: 946874 - RNA, 22 nt, Human
ucugucaccauucagcuugaau

SEQ ID NO: 946875 - RNA, 22 nt, Human
uggcccugcuguaucaucugcu

SEQ ID NO: 946876 - RNA, 22 nt, Human
aggaagcuaaccagggagugag

SEQ ID NO: 946877 - RNA, 22 nt, Human
acuccugggugcugaccagcgu

SEQ ID NO: 946878 - RNA, 22 nt, Human
caugggagguuggcuuggcaug

SEQ ID NO: 946879 - RNA, 22 nt, Human
aaauuauuuucagaauggagaa

SEQ ID NO: 946880 - RNA, 22 nt, Human
ccuggcucuucagagguuccua

SEQ ID NO: 946881 - RNA, 22 nt, Human
acugcuuacaaaaggaaagaau

SEQ ID NO: 946882 - RNA, 22 nt, Human
ugggacacccucacgccugcac

SEQ ID NO: 946883 - RNA, 22 nt, Human
cagccagggagggcaaaugaga

SEQ ID NO: 946884 - RNA, 22 nt, Human
gcacccagaauaaggacaggac

SEQ ID NO: 946885 - RNA, 22 nt, Human
cagcugcccaggccaccuggag

SEQ ID NO: 946886 - RNA, 20 nt, Human
cuguagggugcagcaggcuc

SEQ ID NO: 946887 - RNA, 22 nt, Human
cccauggggacaccaugaagga

SEQ ID NO: 946888 - RNA, 22 nt, Human
agggaagaugucucaucuuagg

SEQ ID NO: 946889 - RNA, 22 nt, Human
aaauguguuucgaaaacuggug

SEQ ID NO: 946890 - RNA, 22 nt, Human
ccaggccuccugugaguggacc

SEQ ID NO: 946891 - RNA, 22 nt, Human
uuacauuuggcuauguccucua

SEQ ID NO: 946892 - RNA, 22 nt, Human
ccugggaggcagagguugcagu

SEQ ID NO: 946893 - RNA, 23 nt, Human
uucaaaacuggaaaaucagaugc

SEQ ID NO: 946894 - RNA, 22 nt, Human
ucugucugcgcuugcccuggug

SEQ ID NO: 946895 - RNA, 22 nt, Human
cucucugcaaguuuugaaauag

SEQ ID NO: 946896 - RNA, 22 nt, Human
cagcaggcagccauuucacugu

SEQ ID NO: 946897 - RNA, 22 nt, Human
ucaguuuucucaucugugaaau

SEQ ID NO: 946898 - RNA, 22 nt, Human
ccagugcaggugagcaccaggu

SEQ ID NO: 946899 - RNA, 22 nt, Human
uccaggagucagacagauggug

SEQ ID NO: 946900 - RNA, 22 nt, Human
auuccaaagccugaauaaugga

SEQ ID NO: 946901 - RNA, 22 nt, Human
uaaagaacacagggaauagcac

SEQ ID NO: 946902 - RNA, 22 nt, Human
aaagucauuggaauauuaauga

SEQ ID NO: 946903 - RNA, 21 nt, Human
gaggccacuaauaggggcaga

SEQ ID NO: 946904 - RNA, 22 nt, Human
agcaggcuuucaagagucuucu

SEQ ID NO: 946905 - RNA, 22 nt, Human
caaggagaguaauugaaugaga

SEQ ID NO: 946906 - RNA, 22 nt, Human
cugcuguuccaccucugaaugc

SEQ ID NO: 946907 - RNA, 22 nt, Human
cagagcuguuacuauucaugaa

SEQ ID NO: 946908 - RNA, 20 nt, Human
cccugagacaaaggaggggc

SEQ ID NO: 946909 - RNA, 22 nt, Human
uggccucugcaauggauucacc

SEQ ID NO: 946910 - RNA, 17 nt, Human
cuccuggccaccccucu

SEQ ID NO: 946911 - RNA, 22 nt, Human
aaaggcuaugagauagaagaua

SEQ ID NO: 946912 - RNA, 22 nt, Human
uuuuaucuucauuccuaucuac

SEQ ID NO: 946913 - RNA, 22 nt, Human
gcugaagggagugcugagucug

SEQ ID NO: 946914 - RNA, 22 nt, Human
uacuuacagagcuuauaaguua

SEQ ID NO: 946915 - RNA, 20 nt, Human
uccagccacuuccgcugguc

SEQ ID NO: 946916 - RNA, 22 nt, Human
agggagaacaguugcagcagac

SEQ ID NO: 946917 - RNA, 22 nt, Human
ggcuuucuagaucuagcucugu

SEQ ID NO: 946918 - RNA, 22 nt, Human
aggcagcugcccucuccuuccu

SEQ ID NO: 946919 - RNA, 22 nt, Human
ugcauuccuccaccuccugcac

SEQ ID NO: 946920 - RNA, 22 nt, Human
caggccuggguucaaaucccuu

SEQ ID NO: 946921 - RNA, 22 nt, Human
cuucugggcauucagcugcaca

SEQ ID NO: 946922 - RNA, 22 nt, Human
uuugcauugcauacaaggaacu

SEQ ID NO: 946923 - RNA, 22 nt, Human
gcuuuggagccuguguucugcc

SEQ ID NO: 946924 - RNA, 22 nt, Human
uucuuagaugauuaaugauggg

SEQ ID NO: 946925 - RNA, 22 nt, Human
cuucuucacacuggucugaagc

SEQ ID NO: 946926 - RNA, 22 nt, Human
aggcagaucacuugaggccagg

SEQ ID NO: 946927 - RNA, 22 nt, Human
ugcagccauuuucugccaaugc

SEQ ID NO: 946928 - RNA, 22 nt, Human
ucugugcucuucucaguaucac

SEQ ID NO: 946929 - RNA, 22 nt, Human
ugcagaguaaaagcagaugcua

SEQ ID NO: 946930 - RNA, 22 nt, Human
uugaaaguuuauggagucugca

SEQ ID NO: 946931 - RNA, 22 nt, Human
gcucugaggcugugaggugcug

SEQ ID NO: 946932 - RNA, 22 nt, Human
uuucuucagagagagcuuuccc

SEQ ID NO: 946933 - RNA, 22 nt, Human
caguggugaagagcaggggcuc

SEQ ID NO: 946934 - RNA, 22 nt, Human
cauaacuagagugaaauguuga

SEQ ID NO: 946935 - RNA, 22 nt, Human
aaauucuuucauggcuaauaag

SEQ ID NO: 946936 - RNA, 18 nt, Human
ucagggaaucuuggccuu

SEQ ID NO: 946937 - RNA, 22 nt, Human
uaggcacuguguuuguaggagu

SEQ ID NO: 946938 - RNA, 20 nt, Human
gcacugaaauucaauguuug

SEQ ID NO: 946939 - RNA, 22 nt, Human
uucaugugaauauauuugucuu

SEQ ID NO: 946940 - RNA, 22 nt, Human
cugagacuuucaugugcuuuua

SEQ ID NO: 946941 - RNA, 22 nt, Human
gcacagggagcaggucucuggu

SEQ ID NO: 946942 - RNA, 22 nt, Human
ucuuuaaucauaaccaagaugg

SEQ ID NO: 946943 - RNA, 20 nt, Human
cucaguguggccugaguguu

SEQ ID NO: 946944 - RNA, 22 nt, Human
acaaggcugaacagugaagccg

SEQ ID NO: 946945 - RNA, 22 nt, Human
aaugcacauauauguguauaca

SEQ ID NO: 946946 - RNA, 22 nt, Human
agcccagcagaaaguccagccu

SEQ ID NO: 946947 - RNA, 23 nt, Human
ccuucagaagaaguaacaggggc

SEQ ID NO: 946948 - RNA, 22 nt, Human
gagaaggggugauguggguaau

SEQ ID NO: 946949 - RNA, 22 nt, Human
cuggcagggugggcuuugcuuu

SEQ ID NO: 946950 - RNA, 22 nt, Human
gcacagccagcaucugagggau

SEQ ID NO: 946951 - RNA, 22 nt, Human
cagggcuccccgcaccgcagcc

SEQ ID NO: 946952 - RNA, 17 nt, Human
acagagcacaucaagau

SEQ ID NO: 946953 - RNA, 22 nt, Human
acacagaaccucauagccucuc

SEQ ID NO: 946954 - RNA, 22 nt, Human
gcucccucugcucaggcacuug

SEQ ID NO: 946955 - RNA, 22 nt, Human
aauuaggaaaugagaguauuug

SEQ ID NO: 946956 - RNA, 22 nt, Human
cagggcugaaaucaagguguag

SEQ ID NO: 946957 - RNA, 22 nt, Human
uucaagaugacccagucacacg

SEQ ID NO: 946958 - RNA, 22 nt, Human
ccuggcugggguagaagugagg

SEQ ID NO: 946959 - RNA, 22 nt, Human
guggccaagggacucuaaggca

SEQ ID NO: 946960 - RNA, 22 nt, Human
gucccagggagguucagggcuu

SEQ ID NO: 946961 - RNA, 19 nt, Human
ucugccucuggucaggcuc

SEQ ID NO: 946962 - RNA, 22 nt, Human
cugaggucaauuaaucaacaac

SEQ ID NO: 946963 - RNA, 22 nt, Human
gauuuccuugcauauugguaau

SEQ ID NO: 946964 - RNA, 22 nt, Human
guuuaaguuucagaagcuaaga

SEQ ID NO: 946965 - RNA, 22 nt, Human
ucugggugcccuuugcucuguu

SEQ ID NO: 946966 - RNA, 22 nt, Human
acacuuuacagcuuccuuugca

SEQ ID NO: 946967 - RNA, 22 nt, Human
cucaggaugcaggucacaggac

SEQ ID NO: 946968 - RNA, 22 nt, Human
ucaaagucacaacucucuaauu

SEQ ID NO: 946969 - RNA, 22 nt, Human
acaggccacaguggagucucug

SEQ ID NO: 946970 - RNA, 22 nt, Human
ccagggucuuggagaggagugc

SEQ ID NO: 946971 - RNA, 23 nt, Human
gccuggccaccccagggcugcuu

SEQ ID NO: 946972 - RNA, 22 nt, Human
agggcugccugcucugcauuga

SEQ ID NO: 946973 - RNA, 22 nt, Human
uagagaaaagcagggaucagga

SEQ ID NO: 946974 - RNA, 22 nt, Human
ugaaaucuuuaguuucuguccc

SEQ ID NO: 946975 - RNA, 22 nt, Human
uucacaggaggguggaugcaug

SEQ ID NO: 946976 - RNA, 22 nt, Human
auuucugauaaacguaagcugc

SEQ ID NO: 946977 - RNA, 22 nt, Human
ucagaagaagagacuccacagc

SEQ ID NO: 946978 - RNA, 21 nt, Human
aggcagcaggauccagggaca

SEQ ID NO: 946979 - RNA, 22 nt, Human
gccuggcucacagagcagccuu

SEQ ID NO: 946980 - RNA, 20 nt, Human
agcaguaggaccucugggcc

SEQ ID NO: 946981 - RNA, 22 nt, Human
agcugcuaugacaacaccagcc

SEQ ID NO: 946982 - RNA, 19 nt, Human
guuuuucccagacgaggca

SEQ ID NO: 946983 - RNA, 22 nt, Human
gcccucucuucugcagccucca

SEQ ID NO: 946984 - RNA, 22 nt, Human
ccaggaguuggagguugcagug

SEQ ID NO: 946985 - RNA, 22 nt, Human
auuccaguuggguucuaauaca

SEQ ID NO: 946986 - RNA, 22 nt, Human
cugggcugucccaaccccaucc

SEQ ID NO: 946987 - RNA, 22 nt, Human
augcauaauguauguauugacu

SEQ ID NO: 946988 - RNA, 22 nt, Human
gcagagccaugggagguuuuug

SEQ ID NO: 946989 - RNA, 22 nt, Human
aucuaagauguauugagcacuu

SEQ ID NO: 946990 - RNA, 22 nt, Human
ggggaugguggcauuuguaaaa

SEQ ID NO: 946991 - RNA, 22 nt, Human
aaucuucauuuugacaagauuc

SEQ ID NO: 946992 - RNA, 22 nt, Human
aucaaaguaggcauauguuuuu

SEQ ID NO: 946993 - RNA, 22 nt, Human
guacuucccugggaggcaagca

SEQ ID NO: 946994 - RNA, 22 nt, Human
uggaagaggcccaugacugccu

SEQ ID NO: 946995 - RNA, 22 nt, Human
gugccuggagcuaauguguaua

SEQ ID NO: 946996 - RNA, 22 nt, Human
ugcauuugucuugucucaugaa

SEQ ID NO: 946997 - RNA, 22 nt, Human
ggugacuggagggacccaggcc

SEQ ID NO: 946998 - RNA, 22 nt, Human
gcacaugagcugcugggauggg

SEQ ID NO: 946999 - RNA, 22 nt, Human
aggcuggcuuggcucuccugug

SEQ ID NO: 947000 - RNA, 20 nt, Human
cuggguggcaagcaaggggg

SEQ ID NO: 947001 - RNA, 22 nt, Human
uccuugaauauaauaacaguag

SEQ ID NO: 947002 - RNA, 22 nt, Human
uccaggagaggccugaccaggu

SEQ ID NO: 947003 - RNA, 22 nt, Human
ccuuucucuuggauaccgauug

SEQ ID NO: 947004 - RNA, 22 nt, Human
aaagcagagguugcagugagcu

SEQ ID NO: 947005 - RNA, 22 nt, Human
aggcccugagcauccgagggca

SEQ ID NO: 947006 - RNA, 22 nt, Human
gauuucuuuaugaaguacagaa

SEQ ID NO: 947007 - RNA, 22 nt, Human
ucugccuggauuuuggaaagcu

SEQ ID NO: 947008 - RNA, 22 nt, Human
cugcagagcuaggcugagugaa

SEQ ID NO: 947009 - RNA, 22 nt, Human
ccgggccucgggacaccgggua

SEQ ID NO: 947010 - RNA, 22 nt, Human
aaguccaugaucaagauguggc

SEQ ID NO: 947011 - RNA, 22 nt, Human
uggaucucggcaaugcgggacu

SEQ ID NO: 947012 - RNA, 22 nt, Human
uguacauacauagauauacaca

SEQ ID NO: 947013 - RNA, 22 nt, Human
aaggcacuuaacgugggaggau

SEQ ID NO: 947014 - RNA, 22 nt, Human
cuggagagaccgaaagaggcug

SEQ ID NO: 947015 - RNA, 20 nt, Human
cacaagagaauacacacugg

SEQ ID NO: 947016 - RNA, 22 nt, Human
gcuggggagcuagaccucagca

SEQ ID NO: 947017 - RNA, 20 nt, Human
gccuggaggcaaugggaaga

SEQ ID NO: 947018 - RNA, 22 nt, Human
uggcagucuggguuggcaguua

SEQ ID NO: 947019 - RNA, 22 nt, Human
cuuaggauuuaauuucagacuc

SEQ ID NO: 947020 - RNA, 22 nt, Human
cuuuagugguauuuuagcaagu

SEQ ID NO: 947021 - RNA, 22 nt, Human
ggcucuggguucugcaaugcgu

SEQ ID NO: 947022 - RNA, 22 nt, Human
uaaauguguuguggaugaaguu

SEQ ID NO: 947023 - RNA, 22 nt, Human
ucucagggugaggaaagaauuu

SEQ ID NO: 947024 - RNA, 21 nt, Human
gagccuucccucugcccuuuc

SEQ ID NO: 947025 - RNA, 22 nt, Human
cacugaagaugcgacuagugcu

SEQ ID NO: 947026 - RNA, 22 nt, Human
cugucuguucagauucauuacu

SEQ ID NO: 947027 - RNA, 22 nt, Human
ugggcuggcugaacuucaaccu

SEQ ID NO: 947028 - RNA, 22 nt, Human
agggcagaaaucgauuacaccu

SEQ ID NO: 947029 - RNA, 22 nt, Human
ccaggagcaaagaucacuggga

SEQ ID NO: 947030 - RNA, 22 nt, Human
uaaaauagcaugugcagugaaa

SEQ ID NO: 947031 - RNA, 22 nt, Human
uguggaaaagaauaagggagau

SEQ ID NO: 947032 - RNA, 22 nt, Human
uccuuagagauacugucuugaa

SEQ ID NO: 947033 - RNA, 22 nt, Human
uaaggucauggugaauaauaag

SEQ ID NO: 947034 - RNA, 22 nt, Human
auuguggcuagacagucacaau

SEQ ID NO: 947035 - RNA, 22 nt, Human
agccauggcgccacuagaggga

SEQ ID NO: 947036 - RNA, 22 nt, Human
aguucucauugcaugagacaga

SEQ ID NO: 947037 - RNA, 23 nt, Human
auacauacagucuuacugacuuu

SEQ ID NO: 947038 - RNA, 22 nt, Human
cuggcaguggggccucaguguu

SEQ ID NO: 947039 - RNA, 23 nt, Human
uggugccucagaagcagugggcu

SEQ ID NO: 947040 - RNA, 22 nt, Human
gagggggcgugcaaggcuccgc

SEQ ID NO: 947041 - RNA, 22 nt, Human
aagugagauuauauguacggga

SEQ ID NO: 947042 - RNA, 17 nt, Human
caaggccagcaucuuca

SEQ ID NO: 947043 - RNA, 22 nt, Human
caguucuuauuuggccaguguc

SEQ ID NO: 947044 - RNA, 22 nt, Human
ucaagagauugaauaauaacug

SEQ ID NO: 947045 - RNA, 22 nt, Human
cuggaagaggaagccagcugga

SEQ ID NO: 947046 - RNA, 22 nt, Human
gguguccuacagggccgcaggc

SEQ ID NO: 947047 - RNA, 22 nt, Human
ucuggcuuucauuuguuuaaag

SEQ ID NO: 947048 - RNA, 22 nt, Human
gccagugugcaagaggccacca

SEQ ID NO: 947049 - RNA, 22 nt, Human
aggaagcuuagugaaaggacca

SEQ ID NO: 947050 - RNA, 22 nt, Human
agcgagggaggucugaggacag

SEQ ID NO: 947051 - RNA, 19 nt, Human
aucagcaagguaggaugug

SEQ ID NO: 947052 - RNA, 22 nt, Human
ugugcucugaagagugcauguc

SEQ ID NO: 947053 - RNA, 22 nt, Human
gaggaaccaaaucagcuugcac

SEQ ID NO: 947054 - RNA, 22 nt, Human
cuggcucauuuuagcaucaggu

SEQ ID NO: 947055 - RNA, 22 nt, Human
cagagaccccuggcaugguggu

SEQ ID NO: 947056 - RNA, 22 nt, Human
aaaugcacaauaaaguaaaggc

SEQ ID NO: 947057 - RNA, 22 nt, Human
gcagaggccuagguggaaggcc

SEQ ID NO: 947058 - RNA, 22 nt, Human
cagaugaggcaaccucauugcu

SEQ ID NO: 947059 - RNA, 22 nt, Human
uggggacauagccagucuggcu

SEQ ID NO: 947060 - RNA, 20 nt, Human
aaacauucauguacaaguga

SEQ ID NO: 947061 - RNA, 22 nt, Human
aagcagccuggacuugggcugg

SEQ ID NO: 947062 - RNA, 22 nt, Human
cugagagugcucuuugauguca

SEQ ID NO: 947063 - RNA, 22 nt, Human
augcacccagugucuggacuau

SEQ ID NO: 947064 - RNA, 22 nt, Human
gccuggagcucuccacuugggg

SEQ ID NO: 947065 - RNA, 22 nt, Human
ucacaacucuuuccauuuaaua

SEQ ID NO: 947066 - RNA, 22 nt, Human
guguguccaggcgggagucaag

SEQ ID NO: 947067 - RNA, 22 nt, Human
gugcauguuaaugguguacaaa

SEQ ID NO: 947068 - RNA, 22 nt, Human
uagugcuuuaggccugaguguc

SEQ ID NO: 947069 - RNA, 22 nt, Human
ggcagcugagcauggcuaccuu

SEQ ID NO: 947070 - RNA, 22 nt, Human
caaggccaguuucuccuaguca

SEQ ID NO: 947071 - RNA, 20 nt, Human
ggccugagcauggcuggcag

SEQ ID NO: 947072 - RNA, 22 nt, Human
gugggaugcaguggugaguggc

SEQ ID NO: 947073 - RNA, 22 nt, Human
uggccacaugcgucugugaggc

SEQ ID NO: 947074 - RNA, 22 nt, Human
gaggugggaugugugugcuacu

SEQ ID NO: 947075 - RNA, 22 nt, Human
gagaggaguagacacuuugguu

SEQ ID NO: 947076 - RNA, 22 nt, Human
uuaauguggaaagcucuugagu

SEQ ID NO: 947077 - RNA, 23 nt, Human
aacaauagguuuuggcagaauag

SEQ ID NO: 947078 - RNA, 20 nt, Human
ccagcugagccaaggggaga

SEQ ID NO: 947079 - RNA, 22 nt, Human
ccucccuuggccauagccagcc

SEQ ID NO: 947080 - RNA, 22 nt, Human
cagucccaguuugagacucugg

SEQ ID NO: 947081 - RNA, 17 nt, Human
ugcauuguuggaaauuu

SEQ ID NO: 947082 - RNA, 22 nt, Human
uucuacaauaugaauaaugaag

SEQ ID NO: 947083 - RNA, 22 nt, Human
gcugguuaggugagggugcgcc

SEQ ID NO: 947084 - RNA, 23 nt, Human
uaagaacagacaagcauuuacau

SEQ ID NO: 947085 - RNA, 22 nt, Human
augaggcaucugcagucacuag

SEQ ID NO: 947086 - RNA, 22 nt, Human
ggcucugcuggauugaggccag

SEQ ID NO: 947087 - RNA, 22 nt, Human
gagcucagcccaaagagcagug

SEQ ID NO: 947088 - RNA, 22 nt, Human
ucugagagguuaagcaauuuga

SEQ ID NO: 947089 - RNA, 22 nt, Human
ugcuauugugaacagugccaca

SEQ ID NO: 947090 - RNA, 22 nt, Human
augaagauaagaccaggcugga

SEQ ID NO: 947091 - RNA, 22 nt, Human
aaucaguuguccaaaguucaca

SEQ ID NO: 947092 - RNA, 22 nt, Human
acuugggucaaguagcucacag

SEQ ID NO: 947093 - RNA, 22 nt, Human
gcuucauuacugacagucugug

SEQ ID NO: 947094 - RNA, 22 nt, Human
ccugggcuugcaucugugcugg

SEQ ID NO: 947095 - RNA, 22 nt, Human
ucuguucacugagcaauggcaa

SEQ ID NO: 947096 - RNA, 22 nt, Human
gggagggaucugcuaggcaaug

SEQ ID NO: 947097 - RNA, 22 nt, Human
ggcugucucugugacugccacc

SEQ ID NO: 947098 - RNA, 22 nt, Human
gagcuuccacucuagaaggagu

SEQ ID NO: 947099 - RNA, 22 nt, Human
agcagcugguaggaguggccac

SEQ ID NO: 947100 - RNA, 22 nt, Human
gcagcugcaauaggcaucaagc

SEQ ID NO: 947101 - RNA, 22 nt, Human
aucuggcuccuacacuugaaga

SEQ ID NO: 947102 - RNA, 22 nt, Human
gggcagccucggugccugcugc

SEQ ID NO: 947103 - RNA, 22 nt, Human
uccuuuuuaagucguuguggua

SEQ ID NO: 947104 - RNA, 22 nt, Human
uacucagagucauugcccuucu

SEQ ID NO: 947105 - RNA, 22 nt, Human
uugaaucucuugaaucucuguu

SEQ ID NO: 947106 - RNA, 22 nt, Human
ugaggccacuuccccacagccc

SEQ ID NO: 947107 - RNA, 22 nt, Human
agccacagcauguguguaugua

SEQ ID NO: 947108 - RNA, 22 nt, Human
aauuaacaaauguagcugugau

SEQ ID NO: 947109 - RNA, 22 nt, Human
auucuguauuucuaauaagauc

SEQ ID NO: 947110 - RNA, 22 nt, Human
ggguggcuccuaugggcauagc

SEQ ID NO: 947111 - RNA, 22 nt, Human
auuauaaagaacaugugugugg

SEQ ID NO: 947112 - RNA, 22 nt, Human
ggugggcacccgagacuggauc

SEQ ID NO: 947113 - RNA, 22 nt, Human
uggaagagacacuuacauucag

SEQ ID NO: 947114 - RNA, 22 nt, Human
ucucagagccuaacuaaccuaa

SEQ ID NO: 947115 - RNA, 22 nt, Human
cagggaguuuuuguuccucuag

SEQ ID NO: 947116 - RNA, 22 nt, Human
aaguauuucguucugaaaaagu

SEQ ID NO: 947117 - RNA, 22 nt, Human
gcuggcaguaaaggguuuggca

SEQ ID NO: 947118 - RNA, 22 nt, Human
uuacaucuaaacugugaacaau

SEQ ID NO: 947119 - RNA, 22 nt, Human
cuggugucugcucccucacagc

SEQ ID NO: 947120 - RNA, 20 nt, Human
cauuugaaucuccauucugc

SEQ ID NO: 947121 - RNA, 19 nt, Human
ugagaaggcaguggggagc

SEQ ID NO: 947122 - RNA, 22 nt, Human
ugaaagcacaaguucuaacagg

SEQ ID NO: 947123 - RNA, 22 nt, Human
auucacaaguucuagggauuag

SEQ ID NO: 947124 - RNA, 22 nt, Human
gcucccacaaccuucuugcucc

SEQ ID NO: 947125 - RNA, 22 nt, Human
ugcuucagaggaaaggcaaaag

SEQ ID NO: 947126 - RNA, 22 nt, Human
uggcucagauaauucaaggggc

SEQ ID NO: 947127 - RNA, 22 nt, Human
guggccaagagauaaaauugug

SEQ ID NO: 947128 - RNA, 22 nt, Human
acagaaauuagcagugaguuua

SEQ ID NO: 947129 - RNA, 22 nt, Human
cuucaagaagacagcagagcau

SEQ ID NO: 947130 - RNA, 22 nt, Human
ugucugucugcaagccagaaag

SEQ ID NO: 947131 - RNA, 22 nt, Human
cccuguccuggaugggagcacu

SEQ ID NO: 947132 - RNA, 22 nt, Human
cauucugugauucuaaaucccu

SEQ ID NO: 947133 - RNA, 22 nt, Human
auaacagaugugaagugcuaau

SEQ ID NO: 947134 - RNA, 22 nt, Human
acugugcuuucucuggaggcau

SEQ ID NO: 947135 - RNA, 22 nt, Human
agugcuuuccuucuugugacau

SEQ ID NO: 947136 - RNA, 22 nt, Human
cacuuaagcaguuaauuuaucu

SEQ ID NO: 947137 - RNA, 22 nt, Human
acuccagggcuccaucccuugu

SEQ ID NO: 947138 - RNA, 22 nt, Human
ggcagugaaaaaguauguuucc

SEQ ID NO: 947139 - RNA, 22 nt, Human
uaaagcacauaucuuacaauaa

SEQ ID NO: 947140 - RNA, 22 nt, Human
uuauuuauuguguaccuacugu

SEQ ID NO: 947141 - RNA, 22 nt, Human
aagguacaguuuuaagaauaag

SEQ ID NO: 947142 - RNA, 22 nt, Human
ugaggccaggaucccaggcucu

SEQ ID NO: 947143 - RNA, 21 nt, Human
cggccaaauuccuccuaggga

SEQ ID NO: 947144 - RNA, 22 nt, Human
agugcauaaaggaaaaacugaa

SEQ ID NO: 947145 - RNA, 22 nt, Human
uggugccuugggccuacagcgc

SEQ ID NO: 947146 - RNA, 22 nt, Human
cuguauuuaguuaaaaugcuaa

SEQ ID NO: 947147 - RNA, 22 nt, Human
aaaagguuuugaguacaaauau

SEQ ID NO: 947148 - RNA, 22 nt, Human
agagugcagauaagagaauguu

SEQ ID NO: 947149 - RNA, 22 nt, Human
uuggccaaagcucaccagugcu

SEQ ID NO: 947150 - RNA, 22 nt, Human
cuagucacucagcacugacaaa

SEQ ID NO: 947151 - RNA, 22 nt, Human
caggcacuagcagaaugaggcu

SEQ ID NO: 947152 - RNA, 22 nt, Human
uucauugugaacacauucugcc

SEQ ID NO: 947153 - RNA, 17 nt, Human
aggcugcugggccaggg

SEQ ID NO: 947154 - RNA, 22 nt, Human
ugcagggccgcuggaggucaug

SEQ ID NO: 947155 - RNA, 22 nt, Human
guuuuauaauugcuucauaaga

SEQ ID NO: 947156 - RNA, 21 nt, Human
ugcauaaagaaauacaaauac

SEQ ID NO: 947157 - RNA, 15 nt, Human
cagucccagggaccc

SEQ ID NO: 947158 - RNA, 22 nt, Human
ucaggcugguggucagauggcu

SEQ ID NO: 947159 - RNA, 22 nt, Human
uaaauguguuagucaugguuuu

SEQ ID NO: 947160 - RNA, 22 nt, Human
auccaggccuugaaguaccagu

SEQ ID NO: 947161 - RNA, 22 nt, Human
aaguguguauuguuuaugcugc

SEQ ID NO: 947162 - RNA, 22 nt, Human
agggugguucuuuuaguggaag

SEQ ID NO: 947163 - RNA, 22 nt, Human
uccagugguaguaaagaggucu

SEQ ID NO: 947164 - RNA, 20 nt, Human
ggcaggcuuuauauggaggg

SEQ ID NO: 947165 - RNA, 22 nt, Human
uccaggagaaaacugacggugg

SEQ ID NO: 947166 - RNA, 22 nt, Human
ggcucagguugggucacaugac

SEQ ID NO: 947167 - RNA, 22 nt, Human
aaauauguaaccaaggugaagu

SEQ ID NO: 947168 - RNA, 22 nt, Human
agugaggcuaauaggcaauggu

SEQ ID NO: 947169 - RNA, 22 nt, Human
gcagggucgcucuaggagauca

SEQ ID NO: 947170 - RNA, 22 nt, Human
ugugucagagguagagauggca

SEQ ID NO: 947171 - RNA, 22 nt, Human
auguagcaugaggcacugugcc

SEQ ID NO: 947172 - RNA, 22 nt, Human
agagaagacuuacagccacagu

SEQ ID NO: 947173 - RNA, 21 nt, Human
cauuaaguaccagggcacugu

SEQ ID NO: 947174 - RNA, 20 nt, Human
uacugggcaagcccacagac

SEQ ID NO: 947175 - RNA, 19 nt, Human
aggucauugauagugcagg

SEQ ID NO: 947176 - RNA, 22 nt, Human
gcaugucaugucauguaggaau

SEQ ID NO: 947177 - RNA, 22 nt, Human
aaaacaguuauaaacagaguca

SEQ ID NO: 947178 - RNA, 22 nt, Human
agcagccagaaagggcagucga

SEQ ID NO: 947179 - RNA, 22 nt, Human
uagggcaggugaagaaaagcua

SEQ ID NO: 947180 - RNA, 22 nt, Human
aauguugagcuugaaaguaggu

SEQ ID NO: 947181 - RNA, 22 nt, Human
auuguauuagcacaauacaauu

SEQ ID NO: 947182 - RNA, 22 nt, Human
aggcagcuuuaacugguaguag

SEQ ID NO: 947183 - RNA, 22 nt, Human
cccuggaguccuggcaguugau

SEQ ID NO: 947184 - RNA, 22 nt, Human
agcuacccgaggacaggcuaag

SEQ ID NO: 947185 - RNA, 22 nt, Human
agacucugcuaagaauauaauu

SEQ ID NO: 947186 - RNA, 21 nt, Human
gagugcaggucugaugccauc

SEQ ID NO: 947187 - RNA, 17 nt, Human
agauggcaggaggcaga

SEQ ID NO: 947188 - RNA, 22 nt, Human
aaggcacuuuucuaaagaccuu

SEQ ID NO: 947189 - RNA, 22 nt, Human
uuugggcaguagauguaucacu

SEQ ID NO: 947190 - RNA, 20 nt, Human
cauuggacuuggcuucaugg

SEQ ID NO: 947191 - RNA, 22 nt, Human
uugcugaaaucuaugacauccu

SEQ ID NO: 947192 - RNA, 23 nt, Human
aggagaagagauuuccacaugca

SEQ ID NO: 947193 - RNA, 22 nt, Human
gugcuuuuaaaggcaauuagua

SEQ ID NO: 947194 - RNA, 22 nt, Human
guagaagugaugucauguuaua

SEQ ID NO: 947195 - RNA, 18 nt, Human
uggccuggagacaacucu

SEQ ID NO: 947196 - RNA, 17 nt, Human
uccuucagugccucugc

SEQ ID NO: 947197 - RNA, 22 nt, Human
gugcauauguguguauacaaac

SEQ ID NO: 947198 - RNA, 22 nt, Human
caagccugucucaccagugcua

SEQ ID NO: 947199 - RNA, 22 nt, Human
cucagaguccccaguggguuug

SEQ ID NO: 947200 - RNA, 22 nt, Human
uuauuuucuccucagaaagugg

SEQ ID NO: 947201 - RNA, 22 nt, Human
uuuaauguucaucucaaaggau

SEQ ID NO: 947202 - RNA, 22 nt, Human
caaagguaguauauauauuguu

SEQ ID NO: 947203 - RNA, 22 nt, Human
acacaguauuacaauaggugcu

SEQ ID NO: 947204 - RNA, 22 nt, Human
agggauguaaauucuucuucuu

SEQ ID NO: 947205 - RNA, 22 nt, Human
uccagagguauguagagaguau

SEQ ID NO: 947206 - RNA, 22 nt, Human
uuucacaauuuuaaggagcaaa

SEQ ID NO: 947207 - RNA, 22 nt, Human
gggauggacuuggggacuccag

SEQ ID NO: 947208 - RNA, 19 nt, Human
caggaaugagguaauggcu

SEQ ID NO: 947209 - RNA, 19 nt, Human
acuggcagcuguagucugu

SEQ ID NO: 947210 - RNA, 22 nt, Human
uguaugugcuugagaagguggg

SEQ ID NO: 947211 - RNA, 17 nt, Human
uugaacugcugagucag

SEQ ID NO: 947212 - RNA, 21 nt, Human
accagcaggagaucagaagga

SEQ ID NO: 947213 - RNA, 22 nt, Human
cugggaggugcagcaaaaauca

SEQ ID NO: 947214 - RNA, 22 nt, Human
ccuggagcuuuuccauccugga

SEQ ID NO: 947215 - RNA, 22 nt, Human
ugcugcucuucaccauggccuc

SEQ ID NO: 947216 - RNA, 22 nt, Human
gcagacagacugcagugauuuu

SEQ ID NO: 947217 - RNA, 22 nt, Human
ugccaggauauaagagugcgau

SEQ ID NO: 947218 - RNA, 22 nt, Human
auccaugaagguacuucucagg

SEQ ID NO: 947219 - RNA, 22 nt, Human
acuuugaaacuaaaauucauua

SEQ ID NO: 947220 - RNA, 22 nt, Human
ugggagcaguugugaagcucag

SEQ ID NO: 947221 - RNA, 22 nt, Human
uuuuccucaggaaugcuaagcu

SEQ ID NO: 947222 - RNA, 22 nt, Human
agucuugcucuugcaucugcuu

SEQ ID NO: 947223 - RNA, 22 nt, Human
cuggcagcccaaccuagagucu

SEQ ID NO: 947224 - RNA, 22 nt, Human
cugacuguaauucuguucuuaa

SEQ ID NO: 947225 - RNA, 22 nt, Human
augcacuacuagaugcaaaagu

SEQ ID NO: 947226 - RNA, 17 nt, Human
ucaggcugugccuggua

SEQ ID NO: 947227 - RNA, 22 nt, Human
aggaucuugcuguagaggauag

SEQ ID NO: 947228 - RNA, 22 nt, Human
caugggaggucugcaaggugcu

SEQ ID NO: 947229 - RNA, 22 nt, Human
cuagaaauauuuuacagucaag

SEQ ID NO: 947230 - RNA, 22 nt, Human
uagcuuuaccauagaagaguau

SEQ ID NO: 947231 - RNA, 22 nt, Human
uuccagggcuaauuccugugga

SEQ ID NO: 947232 - RNA, 22 nt, Human
uccuuucaccaaaaaguguugu

SEQ ID NO: 947233 - RNA, 22 nt, Human
cccagacuccucuggcuggugg

SEQ ID NO: 947234 - RNA, 22 nt, Human
cuuguaauuauaauguacuguu

SEQ ID NO: 947235 - RNA, 22 nt, Human
gacaauaaaaugaucuuacagu

SEQ ID NO: 947236 - RNA, 22 nt, Human
uuuccauguuggugaaaugagg

SEQ ID NO: 947237 - RNA, 23 nt, Human
ucuccuggcugcacuguggccac

SEQ ID NO: 947238 - RNA, 15 nt, Human
aaucuggcggcaagu

SEQ ID NO: 947239 - RNA, 22 nt, Human
guaucuuuuacaccaggaaauu

SEQ ID NO: 947240 - RNA, 22 nt, Human
uguauacauuuaacuagauaga

SEQ ID NO: 947241 - RNA, 21 nt, Human
uucucagagucuauuacaguu

SEQ ID NO: 947242 - RNA, 22 nt, Human
gguuugaacagcuuuggagaag

SEQ ID NO: 947243 - RNA, 22 nt, Human
cuacuucuaaguacauggugau

SEQ ID NO: 947244 - RNA, 22 nt, Human
auauuucaugggguuccauacu

SEQ ID NO: 947245 - RNA, 22 nt, Human
agaaagaacguugguuaucuua

SEQ ID NO: 947246 - RNA, 22 nt, Human
gccugccuuuguaugacccuga

SEQ ID NO: 947247 - RNA, 22 nt, Human
cagggccaccguguuugcugcu

SEQ ID NO: 947248 - RNA, 22 nt, Human
ugugaugguucacugggcauga

SEQ ID NO: 947249 - RNA, 22 nt, Human
ccagugcuaagguagccucugc

SEQ ID NO: 947250 - RNA, 22 nt, Human
auucaagagcccauguuuccug

SEQ ID NO: 947251 - RNA, 22 nt, Human
uuguaaaugaccuuuucuaauu

SEQ ID NO: 947252 - RNA, 22 nt, Human
gccugccuggagcuugagguga

SEQ ID NO: 947253 - RNA, 22 nt, Human
agcaguagugauggccccugag

SEQ ID NO: 947254 - RNA, 22 nt, Human
auaagagcuagucuuuuccuug

SEQ ID NO: 947255 - RNA, 21 nt, Human
aggcagaaagagcccaggcug

SEQ ID NO: 947256 - RNA, 22 nt, Human
aagucuuacauaaacaggaaau

SEQ ID NO: 947257 - RNA, 22 nt, Human
ucagagugugacuuggucauga

SEQ ID NO: 947258 - RNA, 22 nt, Human
acaguuauucuuuaugcaacca

SEQ ID NO: 947259 - RNA, 19 nt, Human
gccugagccagccaugcaa

SEQ ID NO: 947260 - RNA, 22 nt, Human
guccucuguagggcugggccac

SEQ ID NO: 947261 - RNA, 22 nt, Human
aaggccagaguacuagaggcug

SEQ ID NO: 947262 - RNA, 22 nt, Human
uagggcaggggaggaaucugaa

SEQ ID NO: 947263 - RNA, 22 nt, Human
aggcacugacagauucuguguc

SEQ ID NO: 947264 - RNA, 22 nt, Human
cacaauguauauguauaucaaa

SEQ ID NO: 947265 - RNA, 22 nt, Human
agacuuucuugaccuaguuaau

SEQ ID NO: 947266 - RNA, 22 nt, Human
acauacuuuuuaaaagauugcu

SEQ ID NO: 947267 - RNA, 22 nt, Human
aagauacugaugauguaggcua

SEQ ID NO: 947268 - RNA, 22 nt, Human
uugcagcuucuaccacuguuuc

SEQ ID NO: 947269 - RNA, 22 nt, Human
ucucugaguaagugacaguuca

SEQ ID NO: 947270 - RNA, 22 nt, Human
uuagggcuuuucugaauaggcc

SEQ ID NO: 947271 - RNA, 22 nt, Human
caguuuuucaaaauuacaugau

SEQ ID NO: 947272 - RNA, 22 nt, Human
aggggcugggacagagccaagc

SEQ ID NO: 947273 - RNA, 21 nt, Human
gauuuuaaagagacugccaca

SEQ ID NO: 947274 - RNA, 22 nt, Human
cuucuggggauggagcccagaa

SEQ ID NO: 947275 - RNA, 22 nt, Human
caggaugggugucggccagcac

SEQ ID NO: 947276 - RNA, 22 nt, Human
aauuucaauuacuuuugcacca

SEQ ID NO: 947277 - RNA, 22 nt, Human
cagcuuugcccuuugcccaauc

SEQ ID NO: 947278 - RNA, 22 nt, Human
agaaauguauucuguauguuuu

SEQ ID NO: 947279 - RNA, 22 nt, Human
gagaggaguuacuauuuccgag

SEQ ID NO: 947280 - RNA, 22 nt, Human
agaauucugacaauagaauugg

SEQ ID NO: 947281 - RNA, 22 nt, Human
guugaaagaugucuugguuccc

SEQ ID NO: 947282 - RNA, 22 nt, Human
gggccuggggacaccaccauga

SEQ ID NO: 947283 - RNA, 23 nt, Human
uguaaaaugggguaguguuacca

SEQ ID NO: 947284 - RNA, 22 nt, Human
cucaggggaccuggcuccgagu

SEQ ID NO: 947285 - RNA, 22 nt, Human
ugggaggaucgcuugagcccag

SEQ ID NO: 947286 - RNA, 22 nt, Human
agcagccacacgccuccuucuc

SEQ ID NO: 947287 - RNA, 22 nt, Human
cugucucucuaggacacugggg

SEQ ID NO: 947288 - RNA, 22 nt, Human
ugccugucuuggaguccuggcc

SEQ ID NO: 947289 - RNA, 19 nt, Human
ucucaauguucagaaagcu

SEQ ID NO: 947290 - RNA, 22 nt, Human
gaggggcugggcagucccugga

SEQ ID NO: 947291 - RNA, 22 nt, Human
aggccagagaggggaccagccu

SEQ ID NO: 947292 - RNA, 22 nt, Human
ugcagcuucuccaucuccuugu

SEQ ID NO: 947293 - RNA, 22 nt, Human
uaacagaauccuguuauugcca

SEQ ID NO: 947294 - RNA, 18 nt, Human
cugcuuugccuucauucc

SEQ ID NO: 947295 - RNA, 20 nt, Human
uuggccaaaucuuagucaug

SEQ ID NO: 947296 - RNA, 22 nt, Human
aucuuguuaaaaugcagaaacu

SEQ ID NO: 947297 - RNA, 22 nt, Human
uaugcacacauuagcacagggu

SEQ ID NO: 947298 - RNA, 22 nt, Human
uccaugagcuagggauucauca

SEQ ID NO: 947299 - RNA, 22 nt, Human
cugggagcugaggcugacgcug

SEQ ID NO: 947300 - RNA, 22 nt, Human
gggccuccggggugagcugugg

SEQ ID NO: 947301 - RNA, 22 nt, Human
agccuauuccaggaugagcuca

SEQ ID NO: 947302 - RNA, 22 nt, Human
aguuggcauuuuauuuaaguau

SEQ ID NO: 947303 - RNA, 22 nt, Human
acuguucauccuuuuugaacaa

SEQ ID NO: 947304 - RNA, 22 nt, Human
ccuggcugucguuuugugaaau

SEQ ID NO: 947305 - RNA, 22 nt, Human
aaacaaguguaaacuagucugu

SEQ ID NO: 947306 - RNA, 22 nt, Human
cuccaugaauuugagcuuugug

SEQ ID NO: 947307 - RNA, 22 nt, Human
acaugucaauuuaguacucuua

SEQ ID NO: 947308 - RNA, 21 nt, Human
aguguccuugaucuugccuug

SEQ ID NO: 947309 - RNA, 22 nt, Human
cucuuucugauucgcugggacc

SEQ ID NO: 947310 - RNA, 22 nt, Human
gggcugugagaguggggcugcu

SEQ ID NO: 947311 - RNA, 22 nt, Human
gcaaggagacuguagggccaag

SEQ ID NO: 947312 - RNA, 22 nt, Human
ucuuucucucuaaucaagcaca

SEQ ID NO: 947313 - RNA, 22 nt, Human
uaaaauguagcuucuaggcugg

SEQ ID NO: 947314 - RNA, 22 nt, Human
auaaugaggauuugcauauuag

SEQ ID NO: 947315 - RNA, 22 nt, Human
ucaggggaaaucucucagcgaa

SEQ ID NO: 947316 - RNA, 22 nt, Human
ucagaccauccugcuguuagug

SEQ ID NO: 947317 - RNA, 22 nt, Human
agcugccugcuuaugagcucca

SEQ ID NO: 947318 - RNA, 22 nt, Human
uguucauuuggcccuuuuguau

SEQ ID NO: 947319 - RNA, 22 nt, Human
aaaaauguuaucuacuguccga

SEQ ID NO: 947320 - RNA, 22 nt, Human
ucagagugaggcccagcaaucu

SEQ ID NO: 947321 - RNA, 22 nt, Human
acagggcagagggcaguuggua

SEQ ID NO: 947322 - RNA, 22 nt, Human
cugggagcucagcccuggggug

SEQ ID NO: 947323 - RNA, 22 nt, Human
ccuuuugcucucccauccagaa

SEQ ID NO: 947324 - RNA, 22 nt, Human
ugauggcuaucccuggaagggc

SEQ ID NO: 947325 - RNA, 22 nt, Human
aaaucacuguuauugaucuuaa

SEQ ID NO: 947326 - RNA, 22 nt, Human
uuucuuauacuauauugucauc

SEQ ID NO: 947327 - RNA, 22 nt, Human
ggcagagacuggguuggcagag

SEQ ID NO: 947328 - RNA, 22 nt, Human
gccagcagguggagagaucaag

SEQ ID NO: 947329 - RNA, 22 nt, Human
ucagaaaagguagcugugacaa

SEQ ID NO: 947330 - RNA, 22 nt, Human
caggcccugggcaggaucagcc

SEQ ID NO: 947331 - RNA, 22 nt, Human
uaucuguuugcucacagguguu

SEQ ID NO: 947332 - RNA, 22 nt, Human
gagcacagcuggagguagcauu

SEQ ID NO: 947333 - RNA, 22 nt, Human
guugaaauccuaacccccuagu

SEQ ID NO: 947334 - RNA, 22 nt, Human
cuggccagacuacacaugugug

SEQ ID NO: 947335 - RNA, 22 nt, Human
auuucagcccaguaugagcccc

SEQ ID NO: 947336 - RNA, 22 nt, Human
ggggcuggcucacuaagagacu

SEQ ID NO: 947337 - RNA, 22 nt, Human
cuuuggcagccucugcuauuga

SEQ ID NO: 947338 - RNA, 22 nt, Human
uacauggguagguuaagucaua

SEQ ID NO: 947339 - RNA, 22 nt, Human
ucugccacuagugguuaccuua

SEQ ID NO: 947340 - RNA, 22 nt, Human
cccuugggugccagccacaagu

SEQ ID NO: 947341 - RNA, 22 nt, Human
auggcagccuguggacagucaa

SEQ ID NO: 947342 - RNA, 22 nt, Human
gagcagcucugggugacccagu

SEQ ID NO: 947343 - RNA, 22 nt, Human
ugcuucaggaagaaacgccagg

SEQ ID NO: 947344 - RNA, 22 nt, Human
auuucccaugugaaucaauugg

SEQ ID NO: 947345 - RNA, 22 nt, Human
uuccauaacugaccgaaugcau

SEQ ID NO: 947346 - RNA, 22 nt, Human
gcagggugugucucauacaguu

SEQ ID NO: 947347 - RNA, 22 nt, Human
acaccagggccuagccagggcg

SEQ ID NO: 947348 - RNA, 22 nt, Human
ggccacaacuugcuccuagccc

SEQ ID NO: 947349 - RNA, 22 nt, Human
acuggacagaggaaauauggag

SEQ ID NO: 947350 - RNA, 22 nt, Human
aucuucaacuugaucauuugaa

SEQ ID NO: 947351 - RNA, 22 nt, Human
auuugcuucugugaaaucaagu

SEQ ID NO: 947352 - RNA, 22 nt, Human
agccucugacugucagcaaggu

SEQ ID NO: 947353 - RNA, 22 nt, Human
ccucucuguaagggucccuccc

SEQ ID NO: 947354 - RNA, 22 nt, Human
acuugggaguucuggaagccug

SEQ ID NO: 947355 - RNA, 22 nt, Human
cccaggaaugaggggcggaggc

SEQ ID NO: 947356 - RNA, 22 nt, Human
aggcugcuuucauggccgcccc

SEQ ID NO: 947357 - RNA, 22 nt, Human
uccagcagaccaucaaggcuca

SEQ ID NO: 947358 - RNA, 22 nt, Human
ccugggcaggccggacgcuggg

SEQ ID NO: 947359 - RNA, 22 nt, Human
gcuggccugggcagccugucgg

SEQ ID NO: 947360 - RNA, 22 nt, Human
aacugcuguggccuaguacuua

SEQ ID NO: 947361 - RNA, 22 nt, Human
caggcagcugacugucagauau

SEQ ID NO: 947362 - RNA, 22 nt, Human
ugguuuugcuaaaauagaaaga

SEQ ID NO: 947363 - RNA, 23 nt, Human
auugaugacuugauuacacuuuu

SEQ ID NO: 947364 - RNA, 23 nt, Human
gccucugcucugcguuggggacu

SEQ ID NO: 947365 - RNA, 22 nt, Human
uauaguacauggaaucuucaua

SEQ ID NO: 947366 - RNA, 22 nt, Human
auuaaagaaacccagcauguga

SEQ ID NO: 947367 - RNA, 22 nt, Human
gccaggguggcagaaggcccca

SEQ ID NO: 947368 - RNA, 22 nt, Human
uggccacccagcugacgccuuc

SEQ ID NO: 947369 - RNA, 17 nt, Human
acacagccagguucucc

SEQ ID NO: 947370 - RNA, 22 nt, Human
accugagaaugggggcaugugu

SEQ ID NO: 947371 - RNA, 22 nt, Human
cauugcacuccaucuugggcaa

SEQ ID NO: 947372 - RNA, 22 nt, Human
gaggcugaggguuagagaguca

SEQ ID NO: 947373 - RNA, 22 nt, Human
acccaggaugauaauguucaca

SEQ ID NO: 947374 - RNA, 22 nt, Human
ccugccagcccgcguucaugcc

SEQ ID NO: 947375 - RNA, 22 nt, Human
cagagggcucaguccugcugga

SEQ ID NO: 947376 - RNA, 22 nt, Human
ucagccacuacccaccuuaaca

SEQ ID NO: 947377 - RNA, 22 nt, Human
ucagaagcaaacaucacucuag

SEQ ID NO: 947378 - RNA, 22 nt, Human
ggcagcucacugauuagcaauu

SEQ ID NO: 947379 - RNA, 22 nt, Human
gggcagcucugcccaucagagg

SEQ ID NO: 947380 - RNA, 22 nt, Human
uggcagcuccuggggccagcac

SEQ ID NO: 947381 - RNA, 22 nt, Human
aagaacauuuuguagaaugaca

SEQ ID NO: 947382 - RNA, 22 nt, Human
ggcucugccugcccagcagcac

SEQ ID NO: 947383 - RNA, 22 nt, Human
cccagccugucuuucccaauga

SEQ ID NO: 947384 - RNA, 22 nt, Human
cauaagaaauaaugaugaugac

SEQ ID NO: 947385 - RNA, 22 nt, Human
ggaggaccccagcagcucccca

SEQ ID NO: 947386 - RNA, 22 nt, Human
uucacagggccacuggcaggag

SEQ ID NO: 947387 - RNA, 22 nt, Human
cacaauuuguuuuaucaguauu

SEQ ID NO: 947388 - RNA, 22 nt, Human
augaggauuaacuguugucaua

SEQ ID NO: 947389 - RNA, 22 nt, Human
ucaggggcccuucccucagcag

SEQ ID NO: 947390 - RNA, 22 nt, Human
aagccgaggccacacagcagga

SEQ ID NO: 947391 - RNA, 22 nt, Human
ggccugccucacagucagcacc

SEQ ID NO: 947392 - RNA, 22 nt, Human
cagugauggauauggagaaguc

SEQ ID NO: 947393 - RNA, 22 nt, Human
ugaauaagaauuauuauaauga

SEQ ID NO: 947394 - RNA, 22 nt, Human
gccuggagugcaguggcgugau

SEQ ID NO: 947395 - RNA, 22 nt, Human
agugaaaacacuaguucuugcc

SEQ ID NO: 947396 - RNA, 22 nt, Human
ucucugcucugugccucaguuu

SEQ ID NO: 947397 - RNA, 22 nt, Human
augugugccccuuuuacucuuu

SEQ ID NO: 947398 - RNA, 22 nt, Human
agcuggagaugcccagcaccgg

SEQ ID NO: 947399 - RNA, 22 nt, Human
ggcagccuccagggcacuggug

SEQ ID NO: 947400 - RNA, 22 nt, Human
uaaagguaugucuuaaucaaac

SEQ ID NO: 947401 - RNA, 22 nt, Human
cugggcacugcaggguguugag

SEQ ID NO: 947402 - RNA, 22 nt, Human
cccaggagguggagguugcagc

SEQ ID NO: 947403 - RNA, 22 nt, Human
ccugagcugaacuaagcaguuu

SEQ ID NO: 947404 - RNA, 22 nt, Human
uguuuucagucauauagcaggu

SEQ ID NO: 947405 - RNA, 22 nt, Human
cagaaccaggaacugauggaga

SEQ ID NO: 947406 - RNA, 22 nt, Human
agggcuggccacaugauuuggu

SEQ ID NO: 947407 - RNA, 22 nt, Human
ggugaggcuaagugacacaggg

SEQ ID NO: 947408 - RNA, 22 nt, Human
ucacucugcaggaaggagcagc

SEQ ID NO: 947409 - RNA, 22 nt, Human
gcaggcagagguggaggagaca

SEQ ID NO: 947410 - RNA, 22 nt, Human
ggaggagggguuuacauuggaa

SEQ ID NO: 947411 - RNA, 22 nt, Human
uguggccaccagagcugcuauu

SEQ ID NO: 947412 - RNA, 22 nt, Human
agucauguguucaucuuucauu

SEQ ID NO: 947413 - RNA, 22 nt, Human
gggccccaaaaugccaggcucu

SEQ ID NO: 947414 - RNA, 22 nt, Human
agcagcugagccccagcuguga

SEQ ID NO: 947415 - RNA, 22 nt, Human
auugucgcuuauuuaggugcuu

SEQ ID NO: 947416 - RNA, 22 nt, Human
cuucaaacccagauuaaaugca

SEQ ID NO: 947417 - RNA, 22 nt, Human
gcguaaggccucuggucucgga

SEQ ID NO: 947418 - RNA, 22 nt, Human
ucucacuuuccagacuuuucaa

SEQ ID NO: 947419 - RNA, 22 nt, Human
gaauucuuuucuuucugaaagu

SEQ ID NO: 947420 - RNA, 19 nt, Human
cuugguuaugguaugaugc

SEQ ID NO: 947421 - RNA, 23 nt, Human
gcugcagcuguggauguucucag

SEQ ID NO: 947422 - RNA, 22 nt, Human
auugcuguaaauuaucuuauua

SEQ ID NO: 947423 - RNA, 22 nt, Human
acucugcucuuauaguguuaua

SEQ ID NO: 947424 - RNA, 17 nt, Human
agcugaaauugcugaag

SEQ ID NO: 947425 - RNA, 22 nt, Human
agaggacagguuuuccaugggc

SEQ ID NO: 947426 - RNA, 17 nt, Human
cucagaguugcuuuguc

SEQ ID NO: 947427 - RNA, 22 nt, Human
gucagcaggguccccuugagug

SEQ ID NO: 947428 - RNA, 22 nt, Human
ccagggugagugucauggguua

SEQ ID NO: 947429 - RNA, 19 nt, Human
uggcagcauugguaccuug

SEQ ID NO: 947430 - RNA, 22 nt, Human
auuuuuaugacaaaccauccuc

SEQ ID NO: 947431 - RNA, 22 nt, Human
uauguacaucguugaauucaaa

SEQ ID NO: 947432 - RNA, 22 nt, Human
acauuucucuugaugucucuau

SEQ ID NO: 947433 - RNA, 21 nt, Human
gcugccaccgcgugcuccagg

SEQ ID NO: 947434 - RNA, 22 nt, Human
aaagacauuagauuaacguaca

SEQ ID NO: 947435 - RNA, 22 nt, Human
aaagguaguacuucuagaaggg

SEQ ID NO: 947436 - RNA, 22 nt, Human
uguugauuaguguuuagacuua

SEQ ID NO: 947437 - RNA, 22 nt, Human
aaucuggcauguaagcuuagag

SEQ ID NO: 947438 - RNA, 22 nt, Human
uccagggcugacuugggagagg

SEQ ID NO: 947439 - RNA, 22 nt, Human
cugucccagauguucucagcac

SEQ ID NO: 947440 - RNA, 23 nt, Human
gcugagguacauuuacaggaaga

SEQ ID NO: 947441 - RNA, 22 nt, Human
agcagagcgccugcucagaggg

SEQ ID NO: 947442 - RNA, 22 nt, Human
ugcugggggcuuucuggauacc

SEQ ID NO: 947443 - RNA, 22 nt, Human
ccagcaccuugaucuuggaguu

SEQ ID NO: 947444 - RNA, 22 nt, Human
ccccaggagauuugggagcaca

SEQ ID NO: 947445 - RNA, 22 nt, Human
auuaaaauuccaagguaugcca

SEQ ID NO: 947446 - RNA, 22 nt, Human
gcccagugguaaaagcaggccu

SEQ ID NO: 947447 - RNA, 22 nt, Human
gucccaggcuuauguggagcuu

SEQ ID NO: 947448 - RNA, 22 nt, Human
cauucacucagcgaugccagua

SEQ ID NO: 947449 - RNA, 22 nt, Human
ccugggagagucuguggucucc

SEQ ID NO: 947450 - RNA, 22 nt, Human
uaggaugaaaauccagcuuaua

SEQ ID NO: 947451 - RNA, 18 nt, Human
ugucaucuguuuaaaacc

SEQ ID NO: 947452 - RNA, 22 nt, Human
cccagcaucccagugggcagca

SEQ ID NO: 947453 - RNA, 22 nt, Human
ucacucuguguuugaacucaag

SEQ ID NO: 947454 - RNA, 22 nt, Human
gcuggccuugugucugaggaag

SEQ ID NO: 947455 - RNA, 22 nt, Human
cugcugcucagugucaucaugu

SEQ ID NO: 947456 - RNA, 22 nt, Human
uugugucuuaaagauuaaaugg

SEQ ID NO: 947457 - RNA, 22 nt, Human
caugcuccaaaaacaagagaau

SEQ ID NO: 947458 - RNA, 22 nt, Human
gccaguggucacugaggaagaa

SEQ ID NO: 947459 - RNA, 21 nt, Human
ugcaggaaagugcugcgaccc

SEQ ID NO: 947460 - RNA, 22 nt, Human
uuauguaggauaaugaauugcc

SEQ ID NO: 947461 - RNA, 22 nt, Human
uaaacauuuguuauucuuguuu

SEQ ID NO: 947462 - RNA, 22 nt, Human
cugccucuauucacugaggcag

SEQ ID NO: 947463 - RNA, 22 nt, Human
uuuuguuguaauauaccuaucc

SEQ ID NO: 947464 - RNA, 21 nt, Human
uggaggaauaaagcacagaag

SEQ ID NO: 947465 - RNA, 22 nt, Human
cuggugccauucuguggccuag

SEQ ID NO: 947466 - RNA, 22 nt, Human
ugcagcaggagccaggccuggu

SEQ ID NO: 947467 - RNA, 22 nt, Human
aaaaguuaccucuguaauauaa

SEQ ID NO: 947468 - RNA, 22 nt, Human
ggccucuguucugcauuccucc

SEQ ID NO: 947469 - RNA, 22 nt, Human
cugaaagaauaagauguuuaca

SEQ ID NO: 947470 - RNA, 22 nt, Human
gaccuggaggauccucuucuug

SEQ ID NO: 947471 - RNA, 22 nt, Human
augagcuucccagacaggaugg

SEQ ID NO: 947472 - RNA, 22 nt, Human
accaucagucauugucaguggg

SEQ ID NO: 947473 - RNA, 22 nt, Human
uagcugccuuugggcuccugcu

SEQ ID NO: 947474 - RNA, 22 nt, Human
gggcagcucuuugguauccuuc

SEQ ID NO: 947475 - RNA, 22 nt, Human
ucagaggauugccucagcgagc

SEQ ID NO: 947476 - RNA, 22 nt, Human
guuugaaugcaguaugcauuuu

SEQ ID NO: 947477 - RNA, 22 nt, Human
gacagaggcuggagcaccuccu

SEQ ID NO: 947478 - RNA, 22 nt, Human
uuggcacagagcugcagccugg

SEQ ID NO: 947479 - RNA, 22 nt, Human
ucagggcauccauugccuguug

SEQ ID NO: 947480 - RNA, 22 nt, Human
ugggccuggacaaggccacuag

SEQ ID NO: 947481 - RNA, 22 nt, Human
uccugccucacaguugaaguuu

SEQ ID NO: 947482 - RNA, 22 nt, Human
caaguaaacaauaugugauuca

SEQ ID NO: 947483 - RNA, 22 nt, Human
aggcacugguccauuuucugca

SEQ ID NO: 947484 - RNA, 22 nt, Human
ggucacaggggagaagagugau

SEQ ID NO: 947485 - RNA, 22 nt, Human
ucuguaguagguuguaguucuu

SEQ ID NO: 947486 - RNA, 22 nt, Human
cccuuagcucaauuucuugccc

SEQ ID NO: 947487 - RNA, 19 nt, Human
uucuccaggcugcagaggg

SEQ ID NO: 947488 - RNA, 17 nt, Human
ucagcaggggccaagcu

SEQ ID NO: 947489 - RNA, 22 nt, Human
uuucuucauucaccuucacccc

SEQ ID NO: 947490 - RNA, 22 nt, Human
acaggcugggcgcuuccugcgg

SEQ ID NO: 947491 - RNA, 22 nt, Human
uggccucaagucugagggccuu

SEQ ID NO: 947492 - RNA, 22 nt, Human
cauauuuauagaucuggcauuu

SEQ ID NO: 947493 - RNA, 22 nt, Human
guguauaacuaucuaucuagua

SEQ ID NO: 947494 - RNA, 22 nt, Human
aguaaaaauugaggugcaaaau

SEQ ID NO: 947495 - RNA, 22 nt, Human
aaugcuagugugauauguaagg

SEQ ID NO: 947496 - RNA, 22 nt, Human
gcagcuggggccacacuuaggc

SEQ ID NO: 947497 - RNA, 22 nt, Human
caccagagugggugagggugau

SEQ ID NO: 947498 - RNA, 22 nt, Human
agcagggcagugcuucagcucu

SEQ ID NO: 947499 - RNA, 22 nt, Human
augcccugcaucaagugacacu

SEQ ID NO: 947500 - RNA, 22 nt, Human
aggccugaaguguggagugggg

SEQ ID NO: 947501 - RNA, 18 nt, Human
gagagggaucccucagga

SEQ ID NO: 947502 - RNA, 22 nt, Human
auauaauacaaccugcuaagug

SEQ ID NO: 947503 - RNA, 22 nt, Human
ugcucugucaagaaaagaugcc

SEQ ID NO: 947504 - RNA, 22 nt, Human
ugcuggcccuggcucagggaac

SEQ ID NO: 947505 - RNA, 21 nt, Human
aagagcugucaggaaggcugc

SEQ ID NO: 947506 - RNA, 22 nt, Human
cagggugacugcccuggccacu

SEQ ID NO: 947507 - RNA, 22 nt, Human
auuuucuauguuguaauuguua

SEQ ID NO: 947508 - RNA, 22 nt, Human
ggcugccaggagaagcucagug

SEQ ID NO: 947509 - RNA, 22 nt, Human
ugucuuaauaugugcauucugu

SEQ ID NO: 947510 - RNA, 22 nt, Human
uuacaaagaguguucuuuucca

SEQ ID NO: 947511 - RNA, 22 nt, Human
ugaagcaggcauugacugauga

SEQ ID NO: 947512 - RNA, 22 nt, Human
uaggcagcgcuuggcugugcuu

SEQ ID NO: 947513 - RNA, 22 nt, Human
ucacccuugauaauguucuucu

SEQ ID NO: 947514 - RNA, 22 nt, Human
aaggaaccauuugugugcaugg

SEQ ID NO: 947515 - RNA, 23 nt, Human
ugggccuggaaagccuuagagag

SEQ ID NO: 947516 - RNA, 22 nt, Human
agcuuuauauuuaaugaauucu

SEQ ID NO: 947517 - RNA, 22 nt, Human
aggacagcaguuggugagguuc

SEQ ID NO: 947518 - RNA, 22 nt, Human
aaaugugugcacaaagacagcu

SEQ ID NO: 947519 - RNA, 22 nt, Human
uucuguguggguagcuccuguu

SEQ ID NO: 947520 - RNA, 22 nt, Human
agucucuuccuucaaggcuggu

SEQ ID NO: 947521 - RNA, 22 nt, Human
ggcucagaaacuaaaggcgcug

SEQ ID NO: 947522 - RNA, 22 nt, Human
agccuggaccaggggccucaga

SEQ ID NO: 947523 - RNA, 22 nt, Human
ucuacccagagcuaugaccuga

SEQ ID NO: 947524 - RNA, 22 nt, Human
uugcauuccaguccccacugug

SEQ ID NO: 947525 - RNA, 22 nt, Human
ccugucugcggaggaguggaag

SEQ ID NO: 947526 - RNA, 22 nt, Human
ggaguuggugagcaccaggcuu

SEQ ID NO: 947527 - RNA, 22 nt, Human
cagggccauuggcguggcuguc

SEQ ID NO: 947528 - RNA, 22 nt, Human
uaaggcaccuguccaggcuggg

SEQ ID NO: 947529 - RNA, 22 nt, Human
ggccaggcugcccugggagcag

SEQ ID NO: 947530 - RNA, 22 nt, Human
cucuccagaauaugccgccgug

SEQ ID NO: 947531 - RNA, 17 nt, Human
cagcucugcaucuuccu

SEQ ID NO: 947532 - RNA, 22 nt, Human
uggagcagcuaagccucugaga

SEQ ID NO: 947533 - RNA, 22 nt, Human
ucugaagaacugaguaaacaug

SEQ ID NO: 947534 - RNA, 22 nt, Human
ugggcucuccuggaggacaaca

SEQ ID NO: 947535 - RNA, 22 nt, Human
agggcagcagcuccuccuagcu

SEQ ID NO: 947536 - RNA, 22 nt, Human
guucauuuuacuguaaauagca

SEQ ID NO: 947537 - RNA, 22 nt, Human
aggauccuccuuagaaaagacc

SEQ ID NO: 947538 - RNA, 22 nt, Human
aguggccagugcugcucugggg

SEQ ID NO: 947539 - RNA, 18 nt, Human
cggcagagugcuucuagc

SEQ ID NO: 947540 - RNA, 22 nt, Human
cuauuacauuucuggacauuca

SEQ ID NO: 947541 - RNA, 22 nt, Human
cucaagacugaucgcaguggaa

SEQ ID NO: 947542 - RNA, 22 nt, Human
ugggcugcugucugcacaugcu

SEQ ID NO: 947543 - RNA, 22 nt, Human
ugggcagaggacagggaagauc

SEQ ID NO: 947544 - RNA, 22 nt, Human
uacaaaguuugagaaugcuuuc

SEQ ID NO: 947545 - RNA, 22 nt, Human
gccuguguggaugcgccggugc

SEQ ID NO: 947546 - RNA, 22 nt, Human
cggagggguuugaacagaggag

SEQ ID NO: 947547 - RNA, 22 nt, Human
ucauugaauuugguucaauaug

SEQ ID NO: 947548 - RNA, 22 nt, Human
aggagcuggaguccaggcaagu

SEQ ID NO: 947549 - RNA, 22 nt, Human
ucucauugguauauacaugugu

SEQ ID NO: 947550 - RNA, 22 nt, Human
aacaugcugccuuucuacgagu

SEQ ID NO: 947551 - RNA, 22 nt, Human
agcaccaugaccuugccauuga

SEQ ID NO: 947552 - RNA, 22 nt, Human
caggcagaagaaguggaaggac

SEQ ID NO: 947553 - RNA, 22 nt, Human
gagagguccauuccccugucag

SEQ ID NO: 947554 - RNA, 22 nt, Human
uugggcugaacccugcagcuga

SEQ ID NO: 947555 - RNA, 22 nt, Human
gauguguuuccaggauuuguuu

SEQ ID NO: 947556 - RNA, 22 nt, Human
auuucaaggcuauuaauauaaa

SEQ ID NO: 947557 - RNA, 22 nt, Human
cuuuaagagaucaccaaucaca

SEQ ID NO: 947558 - RNA, 22 nt, Human
aaaugucuuucaauagagaaau

SEQ ID NO: 947559 - RNA, 22 nt, Human
uucuggagaucugccuauggga

SEQ ID NO: 947560 - RNA, 22 nt, Human
ucagcagugcagggugaggcag

SEQ ID NO: 947561 - RNA, 22 nt, Human
agacagagauacuauguuguca

SEQ ID NO: 947562 - RNA, 20 nt, Human
caguuuaacuuugagcaguu

SEQ ID NO: 947563 - RNA, 22 nt, Human
acagaguaggugcugucgacug

SEQ ID NO: 947564 - RNA, 22 nt, Human
agcagaacauuuucagggcugu

SEQ ID NO: 947565 - RNA, 23 nt, Human
gggauauggaccuuggaggaguc

SEQ ID NO: 947566 - RNA, 22 nt, Human
uuaacagagaacauagaaguag

SEQ ID NO: 947567 - RNA, 21 nt, Human
ugcccacagcaaaugcagagg

SEQ ID NO: 947568 - RNA, 22 nt, Human
agagugauggguugugcugacc

SEQ ID NO: 947569 - RNA, 22 nt, Human
aaagauaauguuuccuuauucu

SEQ ID NO: 947570 - RNA, 22 nt, Human
uccaggaggccucauuuccugu

SEQ ID NO: 947571 - RNA, 22 nt, Human
guuauguaugggggccuuauga

SEQ ID NO: 947572 - RNA, 22 nt, Human
gcagagugagccgaggcugcuc

SEQ ID NO: 947573 - RNA, 22 nt, Human
cucccugguguccccuccagga

SEQ ID NO: 947574 - RNA, 22 nt, Human
agcauggggcuccgcaaugaac

SEQ ID NO: 947575 - RNA, 22 nt, Human
uguacauuuagagcucaauaga

SEQ ID NO: 947576 - RNA, 22 nt, Human
cccagcaggucggugcugccug

SEQ ID NO: 947577 - RNA, 22 nt, Human
cagacuugacggcagcugcuuu

SEQ ID NO: 947578 - RNA, 23 nt, Human
agggugagcaagcuauggagacc

SEQ ID NO: 947579 - RNA, 22 nt, Human
aaaguguugggaagaaagugca

SEQ ID NO: 947580 - RNA, 22 nt, Human
acuggccaugaacuugggaucu

SEQ ID NO: 947581 - RNA, 22 nt, Human
ccagcuggcacuguggcugccc

SEQ ID NO: 947582 - RNA, 21 nt, Human
ccagccucagaucagggagcu

SEQ ID NO: 947583 - RNA, 22 nt, Human
acuccuggguugcaguccucaa

SEQ ID NO: 947584 - RNA, 20 nt, Human
aaaguguaagcauauaauua

SEQ ID NO: 947585 - RNA, 19 nt, Human
gugaggauacugcucagag

SEQ ID NO: 947586 - RNA, 22 nt, Human
ggagacagugacuuagagacug

SEQ ID NO: 947587 - RNA, 22 nt, Human
acuucuggauagagucagcuuu

SEQ ID NO: 947588 - RNA, 22 nt, Human
gucaccaggucugaugcagcca

SEQ ID NO: 947589 - RNA, 22 nt, Human
gcugccuggaauaacggcuggc

SEQ ID NO: 947590 - RNA, 22 nt, Human
cccaggcagucuggcucuaaag

SEQ ID NO: 947591 - RNA, 22 nt, Human
acuguagcugccacuggaugca

SEQ ID NO: 947592 - RNA, 22 nt, Human
cuggcagcuuagcacucugguu

SEQ ID NO: 947593 - RNA, 23 nt, Human
gggagccaggaccucgcgcccca

SEQ ID NO: 947594 - RNA, 22 nt, Human
caucacugacgcugagauucca

SEQ ID NO: 947595 - RNA, 22 nt, Human
agcuggguguguaucagauaaa

SEQ ID NO: 947596 - RNA, 22 nt, Human
caaauucucacccuguuugauu

SEQ ID NO: 947597 - RNA, 22 nt, Human
acccacgaagaugagcggcaug

SEQ ID NO: 947598 - RNA, 16 nt, Human
ccccaggacuuggcac

SEQ ID NO: 947599 - RNA, 19 nt, Human
gacagugcaguuguaguac

SEQ ID NO: 947600 - RNA, 22 nt, Human
gaaauauuacaguggaggggau

SEQ ID NO: 947601 - RNA, 23 nt, Human
aacaccaaggcucagagagauaa

SEQ ID NO: 947602 - RNA, 22 nt, Human
ggucccaggcugcgggcuggug

SEQ ID NO: 947603 - RNA, 22 nt, Human
uacauuuguuauagaaaugaag

SEQ ID NO: 947604 - RNA, 22 nt, Human
cugcaggcaucuaacugugggc

SEQ ID NO: 947605 - RNA, 22 nt, Human
acauucuuaacaguuaaaaacu

SEQ ID NO: 947606 - RNA, 22 nt, Human
ucagggacuaggugcugccuga

SEQ ID NO: 947607 - RNA, 22 nt, Human
aucagcaagauugugucuugua

SEQ ID NO: 947608 - RNA, 22 nt, Human
aauaucagcacuuuugugguau

SEQ ID NO: 947609 - RNA, 22 nt, Human
caaauguguagagcuuuugggg

SEQ ID NO: 947610 - RNA, 22 nt, Human
ccuggcugcuuucacuauggag

SEQ ID NO: 947611 - RNA, 22 nt, Human
agaggcuccuagccacuggcuu

SEQ ID NO: 947612 - RNA, 22 nt, Human
uuugaauagcauaggauuacau

SEQ ID NO: 947613 - RNA, 22 nt, Human
gccaggcauucuagaaguagug

SEQ ID NO: 947614 - RNA, 22 nt, Human
ugccagccagguucugaggcua

SEQ ID NO: 947615 - RNA, 22 nt, Human
gggucugaggaguaccauuguc

SEQ ID NO: 947616 - RNA, 22 nt, Human
cugcucucuguuccccuggauc

SEQ ID NO: 947617 - RNA, 22 nt, Human
cagcucaaguuucccaggucag

SEQ ID NO: 947618 - RNA, 22 nt, Human
uggguagagacacagucugggg

SEQ ID NO: 947619 - RNA, 22 nt, Human
ucacucugagaggucacuggaa

SEQ ID NO: 947620 - RNA, 22 nt, Human
augccagucaaagaagaugaca

SEQ ID NO: 947621 - RNA, 22 nt, Human
aggcagcaugggccccagcucc

SEQ ID NO: 947622 - RNA, 20 nt, Human
gcagagccucacugcaaggg

SEQ ID NO: 947623 - RNA, 22 nt, Human
aaauaguuguuuggaucaauaa

SEQ ID NO: 947624 - RNA, 22 nt, Human
cugggccaguuaugucucaucu

SEQ ID NO: 947625 - RNA, 22 nt, Human
gcucugggcugcccucuggaca

SEQ ID NO: 947626 - RNA, 23 nt, Human
aucaaacuggugagaaugucagu

SEQ ID NO: 947627 - RNA, 22 nt, Human
gacucugcuacaggccgagguu

SEQ ID NO: 947628 - RNA, 22 nt, Human
uacaaagcuguauagccugguc

SEQ ID NO: 947629 - RNA, 22 nt, Human
gagccugaugaaacaggcagac

SEQ ID NO: 947630 - RNA, 19 nt, Human
agucucacccaagcagucu

SEQ ID NO: 947631 - RNA, 22 nt, Human
ccugucugcagauaucucaggu

SEQ ID NO: 947632 - RNA, 22 nt, Human
agagcccucuucacugccccuu

SEQ ID NO: 947633 - RNA, 23 nt, Human
uuauugaggguguagauuggugu

SEQ ID NO: 947634 - RNA, 22 nt, Human
cacuucaauuaacuucagcauu

SEQ ID NO: 947635 - RNA, 22 nt, Human
gcugagcugcuguucauccugc

SEQ ID NO: 947636 - RNA, 20 nt, Human
ugccaugguaacagagugug

SEQ ID NO: 947637 - RNA, 22 nt, Human
ggagccagagucugcaguguaa

SEQ ID NO: 947638 - RNA, 17 nt, Human
accagccucuccugggg

SEQ ID NO: 947639 - RNA, 22 nt, Human
ggcuguggcagcuggaaguggu

SEQ ID NO: 947640 - RNA, 22 nt, Human
cggagccugcuuguugcagcug

SEQ ID NO: 947641 - RNA, 22 nt, Human
uggcgagccccgacugaguguu

SEQ ID NO: 947642 - RNA, 22 nt, Human
ggccucgcggcuucugguggcu

SEQ ID NO: 947643 - RNA, 22 nt, Human
cacguuuuaugacagaagaagc

SEQ ID NO: 947644 - RNA, 22 nt, Human
aaaguauuugugauuuuuacca

SEQ ID NO: 947645 - RNA, 22 nt, Human
augcugugccuggaaagcggcu

SEQ ID NO: 947646 - RNA, 22 nt, Human
aggcccugcaggaagcaggaug

SEQ ID NO: 947647 - RNA, 19 nt, Human
aagggcugggcaccucacu

SEQ ID NO: 947648 - RNA, 22 nt, Human
uggcucagaguucaucuuuuag

SEQ ID NO: 947649 - RNA, 18 nt, Human
caaagcucacguuccauc

SEQ ID NO: 947650 - RNA, 22 nt, Human
ucaugcuuauugcauauuugga

SEQ ID NO: 947651 - RNA, 22 nt, Human
uuuauauuucccaggauuggcc

SEQ ID NO: 947652 - RNA, 22 nt, Human
gaggguccccaugcagagcuca

SEQ ID NO: 947653 - RNA, 22 nt, Human
aaggccagccugagagcuaaca

SEQ ID NO: 947654 - RNA, 22 nt, Human
cuggcccuucucuugcuuccug

SEQ ID NO: 947655 - RNA, 22 nt, Human
cccagagccucauucuguuggg

SEQ ID NO: 947656 - RNA, 22 nt, Human
uuaugauuugccacagauuggu

SEQ ID NO: 947657 - RNA, 22 nt, Human
cuguccuccggccaccuacagu

SEQ ID NO: 947658 - RNA, 22 nt, Human
uguggccuggaaggggcugcuc

SEQ ID NO: 947659 - RNA, 22 nt, Human
gucccacaccuugaggggucuu

SEQ ID NO: 947660 - RNA, 22 nt, Human
cugaggugcuauggaggauacg

SEQ ID NO: 947661 - RNA, 22 nt, Human
guacauuuugagguuaaaacaa

SEQ ID NO: 947662 - RNA, 22 nt, Human
aacauuucuucugaaacugagu

SEQ ID NO: 947663 - RNA, 22 nt, Human
uagcagcuuaaguaauuagaau

SEQ ID NO: 947664 - RNA, 22 nt, Human
ucaugacaucuguuuaucucaa

SEQ ID NO: 947665 - RNA, 22 nt, Human
cugggguggaggagcuccccug

SEQ ID NO: 947666 - RNA, 22 nt, Human
uccaggagguuuggaggaagca

SEQ ID NO: 947667 - RNA, 22 nt, Human
caggcgagugaacagacucuca

SEQ ID NO: 947668 - RNA, 22 nt, Human
cagagcugugauaaauagauau

SEQ ID NO: 947669 - RNA, 22 nt, Human
acagagcuuaauucaggagcuu

SEQ ID NO: 947670 - RNA, 22 nt, Human
agcagggcagugaucagaaagg

SEQ ID NO: 947671 - RNA, 22 nt, Human
gaggcagccagagguucucauu

SEQ ID NO: 947672 - RNA, 22 nt, Human
cugccugugccaaugcuccuuu

SEQ ID NO: 947673 - RNA, 22 nt, Human
cugcuggccuagcccauccucu

SEQ ID NO: 947674 - RNA, 22 nt, Human
ucugggaaugaauaagaccugu

SEQ ID NO: 947675 - RNA, 22 nt, Human
ugucucugcuuuccuugcaggg

SEQ ID NO: 947676 - RNA, 22 nt, Human
cuguggaguuuguggcgcugac

SEQ ID NO: 947677 - RNA, 22 nt, Human
caggaguggugugagggacucc

SEQ ID NO: 947678 - RNA, 22 nt, Human
uguuuaauucaccaucauguuc

SEQ ID NO: 947679 - RNA, 20 nt, Human
ugaaaggugggaauuguggg

SEQ ID NO: 947680 - RNA, 22 nt, Human
ggggugggcgugcagggacacc

SEQ ID NO: 947681 - RNA, 22 nt, Human
gcaggguccauggaggcagccc

SEQ ID NO: 947682 - RNA, 18 nt, Human
aaagaaggauuggagagc

SEQ ID NO: 947683 - RNA, 22 nt, Human
cucugcaugccuugcucagaca

SEQ ID NO: 947684 - RNA, 22 nt, Human
agugucugccaacugcaugguc

SEQ ID NO: 947685 - RNA, 22 nt, Human
ggaugcaggacggcauggaugu

SEQ ID NO: 947686 - RNA, 22 nt, Human
cccagccucagcuuuacuucca

SEQ ID NO: 947687 - RNA, 22 nt, Human
gguuugcauucugaaaggcuca

SEQ ID NO: 947688 - RNA, 22 nt, Human
ggcuccugauaggagaaugcgg

SEQ ID NO: 947689 - RNA, 23 nt, Human
gcagagcugcccuauugccuugg

SEQ ID NO: 947690 - RNA, 22 nt, Human
accugagcaugccaggagagug

SEQ ID NO: 947691 - RNA, 22 nt, Human
aacagcagggggaccugcuggu

SEQ ID NO: 947692 - RNA, 22 nt, Human
guggccugucagaagccguggg

SEQ ID NO: 947693 - RNA, 20 nt, Human
ugugugcacacaugacauuc

SEQ ID NO: 947694 - RNA, 21 nt, Human
uguuguuuuauggcuaugaau

SEQ ID NO: 947695 - RNA, 22 nt, Human
agugcuuuagcauccaacuguc

SEQ ID NO: 947696 - RNA, 20 nt, Human
cuucuucaguaguuuguucu

SEQ ID NO: 947697 - RNA, 22 nt, Human
gcauguguggaggagaugugcu

SEQ ID NO: 947698 - RNA, 22 nt, Human
uggcaucucaaacaggcagauu

SEQ ID NO: 947699 - RNA, 22 nt, Human
gggagggaggugaugcuuggcu

SEQ ID NO: 947700 - RNA, 22 nt, Human
ugcaggaaucagaggggaagcg

SEQ ID NO: 947701 - RNA, 22 nt, Human
aggggagaguuaaugugaaugu

SEQ ID NO: 947702 - RNA, 22 nt, Human
ggucucuguugccuccaucaag

SEQ ID NO: 947703 - RNA, 22 nt, Human
ggagaggcgaugagucacagcc

SEQ ID NO: 947704 - RNA, 22 nt, Human
cuguccugauggugccacuggu

SEQ ID NO: 947705 - RNA, 22 nt, Human
ucauugaagugacugaaagauu

SEQ ID NO: 947706 - RNA, 22 nt, Human
ugaaggaaagagggaacauccc

SEQ ID NO: 947707 - RNA, 22 nt, Human
ucccaagugucuuggaccaggg

SEQ ID NO: 947708 - RNA, 22 nt, Human
acuucuugggacccuggcaccg

SEQ ID NO: 947709 - RNA, 22 nt, Human
cccaggaguaagugacauuguu

SEQ ID NO: 947710 - RNA, 22 nt, Human
gaugaggggucauuggcuggga

SEQ ID NO: 947711 - RNA, 22 nt, Human
aaacagcugucauuguuuuaaa

SEQ ID NO: 947712 - RNA, 19 nt, Human
auagaaaggguuaaagaca

SEQ ID NO: 947713 - RNA, 22 nt, Human
uaacagaaaggcucaggugcuc

SEQ ID NO: 947714 - RNA, 22 nt, Human
uguccucuaauuggccucuugc

SEQ ID NO: 947715 - RNA, 22 nt, Human
aggcaggggagcuggaagggua

SEQ ID NO: 947716 - RNA, 22 nt, Human
ugucaguguauacauacaguau

SEQ ID NO: 947717 - RNA, 22 nt, Human
gcugcagcagaaguucucagag

SEQ ID NO: 947718 - RNA, 22 nt, Human
acugugcaugaaccgaaacaaa

SEQ ID NO: 947719 - RNA, 22 nt, Human
gaacagaagaggcuggugccac

SEQ ID NO: 947720 - RNA, 23 nt, Human
cagggcugguagggaagagcgug

SEQ ID NO: 947721 - RNA, 22 nt, Human
gugcagcugugguggagccagg

SEQ ID NO: 947722 - RNA, 22 nt, Human
uaggcacuagacaugguuacca

SEQ ID NO: 947723 - RNA, 22 nt, Human
uguuuuaaagccauugccuuuc

SEQ ID NO: 947724 - RNA, 22 nt, Human
agccucugauggcucccaagga

SEQ ID NO: 947725 - RNA, 22 nt, Human
aaauguggguaaugggacugga

SEQ ID NO: 947726 - RNA, 22 nt, Human
uuuguaaauagcaguacucaug

SEQ ID NO: 947727 - RNA, 22 nt, Human
cugccucuguugggcauggucu

SEQ ID NO: 947728 - RNA, 19 nt, Human
ucccgcccacugagcgugc

SEQ ID NO: 947729 - RNA, 22 nt, Human
uacauuccauguguguguauuc

SEQ ID NO: 947730 - RNA, 22 nt, Human
accugagccuagggagguugag

SEQ ID NO: 947731 - RNA, 22 nt, Human
gcucugucuucagcacacagua

SEQ ID NO: 947732 - RNA, 22 nt, Human
acacaaguucuaaagauugcgc

SEQ ID NO: 947733 - RNA, 22 nt, Human
ugagcuggucacuccuucugaa

SEQ ID NO: 947734 - RNA, 22 nt, Human
cucuggagcauuucaccuacau

SEQ ID NO: 947735 - RNA, 22 nt, Human
gagaggccaaaaucccugcccc

SEQ ID NO: 947736 - RNA, 22 nt, Human
aucuguucuucaaaauauuaca

SEQ ID NO: 947737 - RNA, 22 nt, Human
gagagcuguuuaucuucuucaa

SEQ ID NO: 947738 - RNA, 22 nt, Human
ggaccagagcucgggcuucuca

SEQ ID NO: 947739 - RNA, 22 nt, Human
aaggcacugaacuuaaauucug

SEQ ID NO: 947740 - RNA, 22 nt, Human
agaagcaguuauuuuuugcaca

SEQ ID NO: 947741 - RNA, 22 nt, Human
uagugcuuaauaaauuucagaa

SEQ ID NO: 947742 - RNA, 22 nt, Human
augcuguggaugccuugcccca

SEQ ID NO: 947743 - RNA, 22 nt, Human
gaggccugguuugcaugagaau

SEQ ID NO: 947744 - RNA, 22 nt, Human
gugucccaaucuacuuuucccu

SEQ ID NO: 947745 - RNA, 22 nt, Human
ucuccugggaggacaaggaagg

SEQ ID NO: 947746 - RNA, 22 nt, Human
gcagccugaugaucuggguugu

SEQ ID NO: 947747 - RNA, 22 nt, Human
uucauauauaugcacuacguac

SEQ ID NO: 947748 - RNA, 22 nt, Human
aggcacugauucuguuuuccau

SEQ ID NO: 947749 - RNA, 23 nt, Human
agucuucauuguauuuccagacc

SEQ ID NO: 947750 - RNA, 22 nt, Human
ucagagaggcaauacuguuuaa

SEQ ID NO: 947751 - RNA, 22 nt, Human
gauggcaggcaggugaguagag

SEQ ID NO: 947752 - RNA, 22 nt, Human
agccagcugugggcucaggcgg

SEQ ID NO: 947753 - RNA, 22 nt, Human
agggcuggaggguacuaguuua

SEQ ID NO: 947754 - RNA, 22 nt, Human
uugauuaaacaggcauauucaa

SEQ ID NO: 947755 - RNA, 22 nt, Human
uggcagagagacucuccuugau

SEQ ID NO: 947756 - RNA, 22 nt, Human
uugaggagucaggggcacggaa

SEQ ID NO: 947757 - RNA, 22 nt, Human
uugaagcauuugcuauagcauu

SEQ ID NO: 947758 - RNA, 22 nt, Human
ggaggaggggcgcuuugucuau

SEQ ID NO: 947759 - RNA, 22 nt, Human
auauuucuugagcaccugguau

SEQ ID NO: 947760 - RNA, 22 nt, Human
ugcccugcagugagugcgucug

SEQ ID NO: 947761 - RNA, 22 nt, Human
gcagagaagaugcccaggcuuc

SEQ ID NO: 947762 - RNA, 22 nt, Human
ucacuaaguuacauuuaguauu

SEQ ID NO: 947763 - RNA, 22 nt, Human
acaggagaaaucuggucaaaag

SEQ ID NO: 947764 - RNA, 22 nt, Human
ugggcuacucugggagccuaac

SEQ ID NO: 947765 - RNA, 22 nt, Human
ucuccaagcagggcugcaaggc

SEQ ID NO: 947766 - RNA, 22 nt, Human
aagaaugucguugguauuuuaa

SEQ ID NO: 947767 - RNA, 22 nt, Human
uaaagguagcaugaaacugcaa

SEQ ID NO: 947768 - RNA, 22 nt, Human
aggcuggcccuacuggcugccu

SEQ ID NO: 947769 - RNA, 22 nt, Human
gucaggauuggggucaugaguc

SEQ ID NO: 947770 - RNA, 20 nt, Human
uacagaaugcaauaaaaugg

SEQ ID NO: 947771 - RNA, 22 nt, Human
cuggagagaaaugacaaagcua

SEQ ID NO: 947772 - RNA, 22 nt, Human
cugagccauccauaccagcuua

SEQ ID NO: 947773 - RNA, 22 nt, Human
aacuucuggauguuucaaaugu

SEQ ID NO: 947774 - RNA, 22 nt, Human
caaaaguaauuaugguuuuugc

SEQ ID NO: 947775 - RNA, 22 nt, Human
ugcuuccuucccguucuucucc

SEQ ID NO: 947776 - RNA, 20 nt, Human
uggagcuccagcguccaugu

SEQ ID NO: 947777 - RNA, 22 nt, Human
ucuccugguacccuuccuagca

SEQ ID NO: 947778 - RNA, 22 nt, Human
ucacuaagugccgaguuuaguu

SEQ ID NO: 947779 - RNA, 17 nt, Human
gguguauggggagggaa

SEQ ID NO: 947780 - RNA, 23 nt, Human
aggcgagcucuucuccagcacgu

SEQ ID NO: 947781 - RNA, 22 nt, Human
gcuguguuggugaagcuguagc

SEQ ID NO: 947782 - RNA, 22 nt, Human
aggcugcaggucugggucaugu

SEQ ID NO: 947783 - RNA, 22 nt, Human
uggagccuguguuucugcccag

SEQ ID NO: 947784 - RNA, 22 nt, Human
uccugccugcaaucccagcacu

SEQ ID NO: 947785 - RNA, 22 nt, Human
aguuuuuccguggcuacgauaa

SEQ ID NO: 947786 - RNA, 23 nt, Human
aaugauuucaugaugauagcagc

SEQ ID NO: 947787 - RNA, 22 nt, Human
auuuucaaaacaucugcugugu

SEQ ID NO: 947788 - RNA, 22 nt, Human
gcaggggcuaaggacacagaga

SEQ ID NO: 947789 - RNA, 22 nt, Human
uaaauucugaucaaguuccuuc

SEQ ID NO: 947790 - RNA, 23 nt, Human
ucguugaauagcaauagcacaac

SEQ ID NO: 947791 - RNA, 21 nt, Human
acuggccaccacuggcagggg

SEQ ID NO: 947792 - RNA, 22 nt, Human
caggccucagagaguggcgggg

SEQ ID NO: 947793 - RNA, 22 nt, Human
cccaggaggcggagguuguggu

SEQ ID NO: 947794 - RNA, 21 nt, Human
acuguucauuugaugaacugg

SEQ ID NO: 947795 - RNA, 20 nt, Human
cugcucagaccaacucuucu

SEQ ID NO: 947796 - RNA, 22 nt, Human
aaaugccucugcuguacacaau

SEQ ID NO: 947797 - RNA, 22 nt, Human
agucccuguacuuuccacugcc

SEQ ID NO: 947798 - RNA, 22 nt, Human
auagugcaguggacugaguuaa

SEQ ID NO: 947799 - RNA, 20 nt, Human
agccagaagaaggcuggaga

SEQ ID NO: 947800 - RNA, 22 nt, Human
ccacucugauuucaagggagau

SEQ ID NO: 947801 - RNA, 22 nt, Human
caggagaggcuguacguuucuc

SEQ ID NO: 947802 - RNA, 22 nt, Human
gcugucuugcucacucuugcag

SEQ ID NO: 947803 - RNA, 22 nt, Human
acauuucagcgugcaugacaug

SEQ ID NO: 947804 - RNA, 22 nt, Human
aagccaagaguuaacuauuugu

SEQ ID NO: 947805 - RNA, 22 nt, Human
gaggcugggaaguccaagacca

SEQ ID NO: 947806 - RNA, 22 nt, Human
agauuucacaugcugcucuauu

SEQ ID NO: 947807 - RNA, 22 nt, Human
cucaggccauucuuccagcugc

SEQ ID NO: 947808 - RNA, 22 nt, Human
gggcugugggacccggcacuuu

SEQ ID NO: 947809 - RNA, 22 nt, Human
aucugccuccaaguccaugugu

SEQ ID NO: 947810 - RNA, 22 nt, Human
agagggcugcugcacagugcuc

SEQ ID NO: 947811 - RNA, 22 nt, Human
aggagcugagucagcccgacag

SEQ ID NO: 947812 - RNA, 22 nt, Human
gggugggguguaucggauccua

SEQ ID NO: 947813 - RNA, 22 nt, Human
aucuggcucucucauuuacaaa

SEQ ID NO: 947814 - RNA, 22 nt, Human
caggaugugaggaggccauuug

SEQ ID NO: 947815 - RNA, 18 nt, Human
aagaggaggagcagguug

SEQ ID NO: 947816 - RNA, 17 nt, Human
uguuccauuugaccacc

SEQ ID NO: 947817 - RNA, 22 nt, Human
uucuaaaauaaguuuaucuggu

SEQ ID NO: 947818 - RNA, 22 nt, Human
cuucucagcauuuugucagucu

SEQ ID NO: 947819 - RNA, 22 nt, Human
uauaagaaacaaggcaaauuuu

SEQ ID NO: 947820 - RNA, 22 nt, Human
ugucccagauacuggacauaga

SEQ ID NO: 947821 - RNA, 22 nt, Human
ccucugaggucauggacuuggc

SEQ ID NO: 947822 - RNA, 22 nt, Human
ucagcacugauguuucagaaga

SEQ ID NO: 947823 - RNA, 22 nt, Human
auauuaggugcucaauacaugc

SEQ ID NO: 947824 - RNA, 22 nt, Human
ugcccuguuaucuuggaagagu

SEQ ID NO: 947825 - RNA, 22 nt, Human
acuggcagaggauagcacuaau

SEQ ID NO: 947826 - RNA, 22 nt, Human
ggaagugaggaaauauuuuguu

SEQ ID NO: 947827 - RNA, 21 nt, Human
aaaaugugagcgugaugcuua

SEQ ID NO: 947828 - RNA, 22 nt, Human
ucugggaauuuauuggcacuuu

SEQ ID NO: 947829 - RNA, 22 nt, Human
ugagccagcaggccuccagugg

SEQ ID NO: 947830 - RNA, 22 nt, Human
gcucagaggaugcuccuuuaug

SEQ ID NO: 947831 - RNA, 22 nt, Human
cauuuacuguugaaucccuagc

SEQ ID NO: 947832 - RNA, 22 nt, Human
ccuguuuaucuaucuagagaug

SEQ ID NO: 947833 - RNA, 22 nt, Human
gcugaaauucagauuccuaggc

SEQ ID NO: 947834 - RNA, 22 nt, Human
gcacuugguaggacuucaguga

SEQ ID NO: 947835 - RNA, 22 nt, Human
gggucuggcaugcugagaugga

SEQ ID NO: 947836 - RNA, 22 nt, Human
uuugcauuucuaaugagcuccg

SEQ ID NO: 947837 - RNA, 22 nt, Human
ugaaaugauguacaagaaggca

SEQ ID NO: 947838 - RNA, 22 nt, Human
ugcuauacggagcaucuucagg

SEQ ID NO: 947839 - RNA, 20 nt, Human
gccugccucagcuagcugag

SEQ ID NO: 947840 - RNA, 22 nt, Human
uucaggaugacaccauguccag

SEQ ID NO: 947841 - RNA, 17 nt, Human
uggagcugcguguguuc

SEQ ID NO: 947842 - RNA, 22 nt, Human
auacagcagugaauaagauaaa

SEQ ID NO: 947843 - RNA, 23 nt, Human
cagagcuggcucagagcugccug

SEQ ID NO: 947844 - RNA, 22 nt, Human
aucaggaugacaacugcugggu

SEQ ID NO: 947845 - RNA, 23 nt, Human
cacaccaggagccgucugggcca

SEQ ID NO: 947846 - RNA, 21 nt, Human
agacagagugcagucuacaua

SEQ ID NO: 947847 - RNA, 22 nt, Human
uaaauucagugaguaauuucug

SEQ ID NO: 947848 - RNA, 22 nt, Human
uaguuaggguucugcagagaca

SEQ ID NO: 947849 - RNA, 21 nt, Human
ugguuugcggccaaaguuaaa

SEQ ID NO: 947850 - RNA, 22 nt, Human
uuguggaaauacagacuccaag

SEQ ID NO: 947851 - RNA, 22 nt, Human
ucauggauggccgggaggugau

SEQ ID NO: 947852 - RNA, 21 nt, Human
cucuggagucaagagcuucca

SEQ ID NO: 947853 - RNA, 22 nt, Human
acagaauugauggaaaucucag

SEQ ID NO: 947854 - RNA, 22 nt, Human
gcugccugguuucucagcugca

SEQ ID NO: 947855 - RNA, 22 nt, Human
guuuucuuugaaugcuucuaga

SEQ ID NO: 947856 - RNA, 22 nt, Human
gcuuggaaguaggauugggaga

SEQ ID NO: 947857 - RNA, 17 nt, Human
ggccuguguggcugcag

SEQ ID NO: 947858 - RNA, 22 nt, Human
uuaaaugaacgagauaugcaac

SEQ ID NO: 947859 - RNA, 20 nt, Human
agcccuguuuccuggagaga

SEQ ID NO: 947860 - RNA, 22 nt, Human
agcagggccaacaguaaacacc

SEQ ID NO: 947861 - RNA, 19 nt, Human
ugggcuuccccagggcaga

SEQ ID NO: 947862 - RNA, 22 nt, Human
agggcacaagacucugagcccc

SEQ ID NO: 947863 - RNA, 22 nt, Human
accaggaguagaauaucuguga

SEQ ID NO: 947864 - RNA, 19 nt, Human
acacugaauguagaauugg

SEQ ID NO: 947865 - RNA, 22 nt, Human
cuggcagauuggggucagcagu

SEQ ID NO: 947866 - RNA, 17 nt, Human
ugauaguucauuuuaag

SEQ ID NO: 947867 - RNA, 22 nt, Human
acuugauuuugaaccuuucuac

SEQ ID NO: 947868 - RNA, 20 nt, Human
uagauuucauacuucucuuu

SEQ ID NO: 947869 - RNA, 22 nt, Human
uuuauguacauauccacaagga

SEQ ID NO: 947870 - RNA, 22 nt, Human
aggauguugcuauuggcagucu

SEQ ID NO: 947871 - RNA, 22 nt, Human
aaggucauuguugcauguucuc

SEQ ID NO: 947872 - RNA, 22 nt, Human
gaggcugguaggaaaggaaaca

SEQ ID NO: 947873 - RNA, 22 nt, Human
agcuccuccugugccaggccag

SEQ ID NO: 947874 - RNA, 22 nt, Human
ucuguucuauuggucuaugugu

SEQ ID NO: 947875 - RNA, 22 nt, Human
auuagggaaggauuuggccuga

SEQ ID NO: 947876 - RNA, 23 nt, Human
ugcagcugccucuggcgggccgg

SEQ ID NO: 947877 - RNA, 22 nt, Human
cucagugugaaugcucaguaaa

SEQ ID NO: 947878 - RNA, 22 nt, Human
agagcuggauggucaagauggc

SEQ ID NO: 947879 - RNA, 22 nt, Human
auacagauguugaauguuauau

SEQ ID NO: 947880 - RNA, 22 nt, Human
agucucagggccacccggggaa

SEQ ID NO: 947881 - RNA, 22 nt, Human
cagggacugagauccagacugu

SEQ ID NO: 947882 - RNA, 22 nt, Human
cccuggaggaccccaauguggc

SEQ ID NO: 947883 - RNA, 22 nt, Human
cagauggaacacagaaaggaga

SEQ ID NO: 947884 - RNA, 22 nt, Human
ccagucccaggcagaaauccag

SEQ ID NO: 947885 - RNA, 22 nt, Human
ggcagcucaccucugguccagg

SEQ ID NO: 947886 - RNA, 22 nt, Human
gcauugaguccacucugucuuu

SEQ ID NO: 947887 - RNA, 22 nt, Human
acaaaccagcuuaagcaagaug

SEQ ID NO: 947888 - RNA, 21 nt, Human
uaaagaagaugaaugugauca

SEQ ID NO: 947889 - RNA, 22 nt, Human
cuggccucauagccaagcugug

SEQ ID NO: 947890 - RNA, 22 nt, Human
gggucucucucggcuccacgcg

SEQ ID NO: 947891 - RNA, 22 nt, Human
agucuuuccugcuugacuguuc

SEQ ID NO: 947892 - RNA, 21 nt, Human
gaggcugucugcugcuggccu

SEQ ID NO: 947893 - RNA, 22 nt, Human
gaaaauguuagcuucauaguca

SEQ ID NO: 947894 - RNA, 22 nt, Human
auuugucugcuugcugccuucc

SEQ ID NO: 947895 - RNA, 22 nt, Human
ugcucuguaacaaauugacaug

SEQ ID NO: 947896 - RNA, 22 nt, Human
ccacuugugaaauaaucaaaua

SEQ ID NO: 947897 - RNA, 22 nt, Human
ggggcagagaauaaaaaccuaa

SEQ ID NO: 947898 - RNA, 17 nt, Human
aaucuguuuacagucag

SEQ ID NO: 947899 - RNA, 22 nt, Human
guggccaagaggggacuggaua

SEQ ID NO: 947900 - RNA, 22 nt, Human
ggcccugugguuuugcaaaguc

SEQ ID NO: 947901 - RNA, 22 nt, Human
agggcaaguugagugugcgugg

SEQ ID NO: 947902 - RNA, 17 nt, Human
agagagagcaugccacc

SEQ ID NO: 947903 - RNA, 22 nt, Human
gagcugccaguguaugaauucu

SEQ ID NO: 947904 - RNA, 22 nt, Human
cugugucccaguaccuugggua

SEQ ID NO: 947905 - RNA, 22 nt, Human
gcuccuggcaggcagugugugu

SEQ ID NO: 947906 - RNA, 22 nt, Human
uuguuucagcuguaugcuaugu

SEQ ID NO: 947907 - RNA, 22 nt, Human
ucuccuccuuuuuucaacauag

SEQ ID NO: 947908 - RNA, 22 nt, Human
agguauagaauugaaaggguuu

SEQ ID NO: 947909 - RNA, 22 nt, Human
ucccagcagagccagcaagccg

SEQ ID NO: 947910 - RNA, 22 nt, Human
cuguggcuuucucugccuccuu

SEQ ID NO: 947911 - RNA, 22 nt, Human
uggggacacagagguucguugg

SEQ ID NO: 947912 - RNA, 22 nt, Human
cugcccugacugaccuuuugaa

SEQ ID NO: 947913 - RNA, 23 nt, Human
uugauacagaagaaucaguuugu

SEQ ID NO: 947914 - RNA, 21 nt, Human
acagaacuguauagugauaaa

SEQ ID NO: 947915 - RNA, 22 nt, Human
cagggcagaacauauagauagu

SEQ ID NO: 947916 - RNA, 22 nt, Human
uuucuucagccacuccaaacug

SEQ ID NO: 947917 - RNA, 22 nt, Human
gccagcugguaggcaccuagcc

SEQ ID NO: 947918 - RNA, 22 nt, Human
uagaaacaucagcuaaccaaaa

SEQ ID NO: 947919 - RNA, 22 nt, Human
gggcagcucuggcugugggaag

SEQ ID NO: 947920 - RNA, 22 nt, Human
aaggcacuacgcugcuggggcg

SEQ ID NO: 947921 - RNA, 22 nt, Human
caggcacuggccagucagcaca

SEQ ID NO: 947922 - RNA, 22 nt, Human
cugagucucccggcaguggagg

SEQ ID NO: 947923 - RNA, 22 nt, Human
acaaaguuauucuuucagagga

SEQ ID NO: 947924 - RNA, 22 nt, Human
cugggaaggggaagguccucuc

SEQ ID NO: 947925 - RNA, 22 nt, Human
uagcagcugugaguaaaagcca

SEQ ID NO: 947926 - RNA, 22 nt, Human
ucucaggaagauuagggcuaag

SEQ ID NO: 947927 - RNA, 22 nt, Human
uggauaaacucacuguaaguug

SEQ ID NO: 947928 - RNA, 22 nt, Human
accuauuuaugcaauuaugaaa

SEQ ID NO: 947929 - RNA, 22 nt, Human
acaaagucaaauugcagccgcc

SEQ ID NO: 947930 - RNA, 22 nt, Human
ugccugcugcuaagcucuuugu

SEQ ID NO: 947931 - RNA, 22 nt, Human
uggcccugucccuggagccugg

SEQ ID NO: 947932 - RNA, 22 nt, Human
acugugugaaacaucaaugugu

SEQ ID NO: 947933 - RNA, 22 nt, Human
ugucacuucaggaaugcaggga

SEQ ID NO: 947934 - RNA, 22 nt, Human
ggccuugggauguggcugcagc

SEQ ID NO: 947935 - RNA, 22 nt, Human
agcuauguauaaauaggccacu

SEQ ID NO: 947936 - RNA, 22 nt, Human
uuaaauauuauguugucugcaa

SEQ ID NO: 947937 - RNA, 22 nt, Human
uuccagaauuuuguucugcuug

SEQ ID NO: 947938 - RNA, 22 nt, Human
cccagcuccgagcuccgagccg

SEQ ID NO: 947939 - RNA, 22 nt, Human
ccuuccuggcuguccgccugau

SEQ ID NO: 947940 - RNA, 19 nt, Human
ggcucucccuugagagagc

SEQ ID NO: 947941 - RNA, 22 nt, Human
aagcagccagccaucaugcccg

SEQ ID NO: 947942 - RNA, 22 nt, Human
cugagccagcuggcaugugcua

SEQ ID NO: 947943 - RNA, 22 nt, Human
gucucuaucauagcugaacccu

SEQ ID NO: 947944 - RNA, 22 nt, Human
aucaaaguucguaacugauaac

SEQ ID NO: 947945 - RNA, 22 nt, Human
gaaugcagauggcugguguaug

SEQ ID NO: 947946 - RNA, 22 nt, Human
guguuuccaguucagaaagcaa

SEQ ID NO: 947947 - RNA, 20 nt, Human
cagggccacgcuccaaggca

SEQ ID NO: 947948 - RNA, 22 nt, Human
acauuucuuucuauucaguagc

SEQ ID NO: 947949 - RNA, 22 nt, Human
gggccugacugagagcuccuca

SEQ ID NO: 947950 - RNA, 22 nt, Human
uuuaguagaaauauuugggccu

SEQ ID NO: 947951 - RNA, 19 nt, Human
ugccagcauuaggcugaag

SEQ ID NO: 947952 - RNA, 15 nt, Human
ugauuuccuacuaac

SEQ ID NO: 947953 - RNA, 22 nt, Human
gcacacaggcaguuuccagcca

SEQ ID NO: 947954 - RNA, 23 nt, Human
ggggccugcaccggucugcgcgg

SEQ ID NO: 947955 - RNA, 22 nt, Human
cagggccucuccuccaggaacu

SEQ ID NO: 947956 - RNA, 22 nt, Human
agauuucccaaauacuuguuau

SEQ ID NO: 947957 - RNA, 22 nt, Human
aacucacuuuguggcuucugaa

SEQ ID NO: 947958 - RNA, 22 nt, Human
uccaggaguuugagacugcagu

SEQ ID NO: 947959 - RNA, 22 nt, Human
agaggggacagccaccugcccg

SEQ ID NO: 947960 - RNA, 22 nt, Human
agauuucccucuuguauuugca

SEQ ID NO: 947961 - RNA, 22 nt, Human
ugggccugaguuugggaacugg

SEQ ID NO: 947962 - RNA, 22 nt, Human
aaccauuugccauuaucuuaag

SEQ ID NO: 947963 - RNA, 22 nt, Human
ccuggaccaaacacuggccugg

SEQ ID NO: 947964 - RNA, 19 nt, Human
cugggccagaaucagcuca

SEQ ID NO: 947965 - RNA, 23 nt, Human
agaagcagcuucuggaguaucgg

SEQ ID NO: 947966 - RNA, 22 nt, Human
uuauuagggugguuuauguucu

SEQ ID NO: 947967 - RNA, 22 nt, Human
ggagcugcacgcucugaagccu

SEQ ID NO: 947968 - RNA, 22 nt, Human
ugccagcaguagcaguaggcca

SEQ ID NO: 947969 - RNA, 22 nt, Human
gaacccaaccucacuuggggua

SEQ ID NO: 947970 - RNA, 22 nt, Human
gcacuaaaccaacauguaauaa

SEQ ID NO: 947971 - RNA, 22 nt, Human
gagcuggcuccgccaugcugcu

SEQ ID NO: 947972 - RNA, 22 nt, Human
acuggcaggcugcuggccggcg

SEQ ID NO: 947973 - RNA, 22 nt, Human
ucucuucuugauuuucacugga

SEQ ID NO: 947974 - RNA, 22 nt, Human
auagucuuagucuauaguuuug

SEQ ID NO: 947975 - RNA, 22 nt, Human
agggcacagccuaaagccuaug

SEQ ID NO: 947976 - RNA, 22 nt, Human
uggcagcuggaucccaaggcag

SEQ ID NO: 947977 - RNA, 22 nt, Human
auccaggcgaaugcagaaggcc

SEQ ID NO: 947978 - RNA, 23 nt, Human
uuucuguuggguauauauccaag

SEQ ID NO: 947979 - RNA, 22 nt, Human
cugugccaguguauuccuguga

SEQ ID NO: 947980 - RNA, 22 nt, Human
agucccagagaggucggggcca

SEQ ID NO: 947981 - RNA, 22 nt, Human
caggaggaacaagagguucugg

SEQ ID NO: 947982 - RNA, 22 nt, Human
gagcucccaggccccagcaagg

SEQ ID NO: 947983 - RNA, 22 nt, Human
uuaaguaagaccuuaugucuug

SEQ ID NO: 947984 - RNA, 22 nt, Human
uuaugacaggaaaaucacagaa

SEQ ID NO: 947985 - RNA, 22 nt, Human
ucaggcagaccaccgugggcag

SEQ ID NO: 947986 - RNA, 22 nt, Human
ggagaggauguuuuaguaacuu

SEQ ID NO: 947987 - RNA, 22 nt, Human
ugcacacacgcggcacaucugu

SEQ ID NO: 947988 - RNA, 23 nt, Human
cuggggcuuucaaaucugggcag

SEQ ID NO: 947989 - RNA, 20 nt, Human
gcauccauauaugcaugugu

SEQ ID NO: 947990 - RNA, 22 nt, Human
ugagcuucuuuauuuggccaga

SEQ ID NO: 947991 - RNA, 22 nt, Human
ucaugcccagagcaguaaauua

SEQ ID NO: 947992 - RNA, 22 nt, Human
uucaguaaaacacugcaauguc

SEQ ID NO: 947993 - RNA, 22 nt, Human
uagagcugauaaugaggccaag

SEQ ID NO: 947994 - RNA, 22 nt, Human
gaggggcagaaugugaucaggg

SEQ ID NO: 947995 - RNA, 22 nt, Human
cuguaaauaugaagaauauaug

SEQ ID NO: 947996 - RNA, 22 nt, Human
gcuggccugggcagaggcuaug

SEQ ID NO: 947997 - RNA, 22 nt, Human
cugucuguuuuaccuucuccag

SEQ ID NO: 947998 - RNA, 22 nt, Human
acuuucucaggaauucacagac

SEQ ID NO: 947999 - RNA, 22 nt, Human
cagagcugggaucccaugggcg

SEQ ID NO: 948000 - RNA, 22 nt, Human
ucuuuauuuuaugcuugugcaa

SEQ ID NO: 948001 - RNA, 22 nt, Human
uagaaucuaguucauucauuug

SEQ ID NO: 948002 - RNA, 22 nt, Human
ccaggccagcaggcacaccugc

SEQ ID NO: 948003 - RNA, 22 nt, Human
gccagcucagaugcaggaagga

SEQ ID NO: 948004 - RNA, 22 nt, Human
agugcagcaugcuggggaggcu

SEQ ID NO: 948005 - RNA, 22 nt, Human
augcugcacaagccacauguag

SEQ ID NO: 948006 - RNA, 22 nt, Human
gacucugcuaggaaaaucucag

SEQ ID NO: 948007 - RNA, 22 nt, Human
uauuucaugugcaccauaauuc

SEQ ID NO: 948008 - RNA, 22 nt, Human
ucaaaugcaggucuggucuugg

SEQ ID NO: 948009 - RNA, 22 nt, Human
auaaaaguaggaccaacuuaca

SEQ ID NO: 948010 - RNA, 22 nt, Human
ucucuuccaguaagagucuuua

SEQ ID NO: 948011 - RNA, 22 nt, Human
uucagcaacucaaaccuauuag

SEQ ID NO: 948012 - RNA, 22 nt, Human
ucccagagaaagucaaggucuu

SEQ ID NO: 948013 - RNA, 22 nt, Human
ccuccugggacucauuagcacc

SEQ ID NO: 948014 - RNA, 22 nt, Human
uaccugggcccaccagugccug

SEQ ID NO: 948015 - RNA, 23 nt, Human
cagggcugggcuugguguuaggc

SEQ ID NO: 948016 - RNA, 22 nt, Human
cagucucagaggugggaguggg

SEQ ID NO: 948017 - RNA, 22 nt, Human
gaggucaggcuugcagcagggu

SEQ ID NO: 948018 - RNA, 22 nt, Human
caguuucugggcguucacaggu

SEQ ID NO: 948019 - RNA, 22 nt, Human
cugcuuuggacaacuauucuug

SEQ ID NO: 948020 - RNA, 22 nt, Human
ugagccaggcucaagugauccu

SEQ ID NO: 948021 - RNA, 22 nt, Human
ggagcuguaacgagccauugcu

SEQ ID NO: 948022 - RNA, 20 nt, Human
ccuguucacugcgcaguuuc

SEQ ID NO: 948023 - RNA, 22 nt, Human
cccagggcuuuucucacuagac

SEQ ID NO: 948024 - RNA, 22 nt, Human
ccaggaaauagugcugugaucu

SEQ ID NO: 948025 - RNA, 15 nt, Human
ucacucuggaaggga

SEQ ID NO: 948026 - RNA, 22 nt, Human
auuuguacaaauuuauguuagu

SEQ ID NO: 948027 - RNA, 22 nt, Human
caugcugugcaucuugaugacc

SEQ ID NO: 948028 - RNA, 22 nt, Human
cagcugaguuacucugaggucu

SEQ ID NO: 948029 - RNA, 19 nt, Human
ugaggggaggagaggccug

SEQ ID NO: 948030 - RNA, 22 nt, Human
uuuuagauaguuuaacugcacu

SEQ ID NO: 948031 - RNA, 22 nt, Human
auacagaaaaugaugcagaguu

SEQ ID NO: 948032 - RNA, 22 nt, Human
ucccagagguugagucacuuau

SEQ ID NO: 948033 - RNA, 22 nt, Human
cagcugccccauaaaucacagu

SEQ ID NO: 948034 - RNA, 22 nt, Human
agcccuggcccggcugugcuuu

SEQ ID NO: 948035 - RNA, 22 nt, Human
cuuaaaaucuggcaguuagcua

SEQ ID NO: 948036 - RNA, 22 nt, Human
gcuggcagaauuucuucuugcu

SEQ ID NO: 948037 - RNA, 22 nt, Human
gccuccugaaaggaagagcucc

SEQ ID NO: 948038 - RNA, 23 nt, Human
gccucugcagccuaguuaguguc

SEQ ID NO: 948039 - RNA, 22 nt, Human
acagaauuaaaguguuugugga

SEQ ID NO: 948040 - RNA, 22 nt, Human
gcaggaugagugaguacauuua

SEQ ID NO: 948041 - RNA, 22 nt, Human
gaggcucagagggagcaugguc

SEQ ID NO: 948042 - RNA, 22 nt, Human
aggcugaggcagguggaucacc

SEQ ID NO: 948043 - RNA, 22 nt, Human
gguggccucugcaggccucgac

SEQ ID NO: 948044 - RNA, 22 nt, Human
ucagcaaugagaacuggcauuu

SEQ ID NO: 948045 - RNA, 22 nt, Human
ugcauaaagugccauaguauua

SEQ ID NO: 948046 - RNA, 22 nt, Human
ugcccacauucaaaaggugaug

SEQ ID NO: 948047 - RNA, 22 nt, Human
ugcugucuuccaggauggugaa

SEQ ID NO: 948048 - RNA, 22 nt, Human
ccagccucacuggcaucaccua

SEQ ID NO: 948049 - RNA, 22 nt, Human
ugugcuucugcagagacuauuu

SEQ ID NO: 948050 - RNA, 22 nt, Human
cagcccugccauggagccuccu

SEQ ID NO: 948051 - RNA, 22 nt, Human
caaggccaagucucugugaaga

SEQ ID NO: 948052 - RNA, 22 nt, Human
aaggcugaguaaaacagagaac

SEQ ID NO: 948053 - RNA, 19 nt, Human
gugauuucuuuccacaagc

SEQ ID NO: 948054 - RNA, 22 nt, Human
agccuccaaaugucaggucccg

SEQ ID NO: 948055 - RNA, 22 nt, Human
gaacuguaguuaauacuacaca

SEQ ID NO: 948056 - RNA, 22 nt, Human
gagucaguaauggauaugucau

SEQ ID NO: 948057 - RNA, 22 nt, Human
cagaagcaaaugccuugcugag

SEQ ID NO: 948058 - RNA, 22 nt, Human
gagggcugccacguugggcgag

SEQ ID NO: 948059 - RNA, 22 nt, Human
acucugcucuguauuucacugu

SEQ ID NO: 948060 - RNA, 22 nt, Human
ucccucuguguugggcaugccu

SEQ ID NO: 948061 - RNA, 22 nt, Human
aaggcaguaaaaucuaccuugc

SEQ ID NO: 948062 - RNA, 22 nt, Human
acucacuuuccauucaagcacc

SEQ ID NO: 948063 - RNA, 22 nt, Human
ugccaggagucaggccaggcag

SEQ ID NO: 948064 - RNA, 22 nt, Human
guuugaaaaaagcaguauguaa

SEQ ID NO: 948065 - RNA, 22 nt, Human
gagcccaggcagagguugcagu

SEQ ID NO: 948066 - RNA, 22 nt, Human
ugcagaagcagagccgguggcc

SEQ ID NO: 948067 - RNA, 22 nt, Human
cuguagcagugugcucuuuuuc

SEQ ID NO: 948068 - RNA, 22 nt, Human
cccaggaagagugaguggcauu

SEQ ID NO: 948069 - RNA, 22 nt, Human
ccauuguaguaucuguuuuagu

SEQ ID NO: 948070 - RNA, 22 nt, Human
gaguuauuaauggcugaguuug

SEQ ID NO: 948071 - RNA, 18 nt, Human
agcuucccucugagaggg

SEQ ID NO: 948072 - RNA, 22 nt, Human
uacauguauugauuucucuucu

SEQ ID NO: 948073 - RNA, 22 nt, Human
uccuggagcuuccuucauggua

SEQ ID NO: 948074 - RNA, 22 nt, Human
cagcaauauacacagucuaugg

SEQ ID NO: 948075 - RNA, 22 nt, Human
acuggccagaacuaagucacau

SEQ ID NO: 948076 - RNA, 22 nt, Human
uauaacaguuuaggugguguca

SEQ ID NO: 948077 - RNA, 22 nt, Human
ggccugcugggccccacagucc

SEQ ID NO: 948078 - RNA, 22 nt, Human
ugcugccuccaacuccugggcu

SEQ ID NO: 948079 - RNA, 22 nt, Human
ucugcaagauggucuuagaggu

SEQ ID NO: 948080 - RNA, 22 nt, Human
acagugacguuuauuugagacg

SEQ ID NO: 948081 - RNA, 22 nt, Human
gaggcacugaauacuugagggu

SEQ ID NO: 948082 - RNA, 18 nt, Human
ggagagugacagagucgu

SEQ ID NO: 948083 - RNA, 20 nt, Human
acauugauuauguuuguaga

SEQ ID NO: 948084 - RNA, 19 nt, Human
agggagaauuccaagagga

SEQ ID NO: 948085 - RNA, 22 nt, Human
ccugucucuuucaaucugagag

SEQ ID NO: 948086 - RNA, 22 nt, Human
ucuccuucgaggcccagcuccc

SEQ ID NO: 948087 - RNA, 22 nt, Human
uacauggugguggcacuugacu

SEQ ID NO: 948088 - RNA, 22 nt, Human
cacugcuuauaaauucuaggca

SEQ ID NO: 948089 - RNA, 22 nt, Human
cacagggcuuugauggcugagu

SEQ ID NO: 948090 - RNA, 22 nt, Human
aaaucaguuagugguaggauug

SEQ ID NO: 948091 - RNA, 22 nt, Human
ccagccugaaaugccucauccu

SEQ ID NO: 948092 - RNA, 22 nt, Human
cugggaggacaacuuggagcuc

SEQ ID NO: 948093 - RNA, 22 nt, Human
ucacagggcauuauggcuccag

SEQ ID NO: 948094 - RNA, 22 nt, Human
uauuucagcaagaagaaugugg

SEQ ID NO: 948095 - RNA, 22 nt, Human
acaguaaugauucugagucucu

SEQ ID NO: 948096 - RNA, 22 nt, Human
gcagacaggcccaguggaggga

SEQ ID NO: 948097 - RNA, 22 nt, Human
aaccuucacuugcuucauuuga

SEQ ID NO: 948098 - RNA, 22 nt, Human
aauaucaacaguguccuucuaa

SEQ ID NO: 948099 - RNA, 22 nt, Human
uucuucaauuuuccauauacug

SEQ ID NO: 948100 - RNA, 22 nt, Human
aggcuuccucgugccuuagaua

SEQ ID NO: 948101 - RNA, 22 nt, Human
cugugcuggagaugggccagag

SEQ ID NO: 948102 - RNA, 22 nt, Human
gaaauguguuguucauuucuaa

SEQ ID NO: 948103 - RNA, 22 nt, Human
uaauguauaacaaauacucauc

SEQ ID NO: 948104 - RNA, 22 nt, Human
auugaaagauauacuguucuca

SEQ ID NO: 948105 - RNA, 22 nt, Human
aggccuggccuuuauguucaag

SEQ ID NO: 948106 - RNA, 22 nt, Human
ucauuaagauuacgugccagaa

SEQ ID NO: 948107 - RNA, 22 nt, Human
uaggagggcccugaaaauggca

SEQ ID NO: 948108 - RNA, 22 nt, Human
ugggcagagaguagaggcaacg

SEQ ID NO: 948109 - RNA, 17 nt, Human
agguggcugcugcgccu

SEQ ID NO: 948110 - RNA, 22 nt, Human
acugccaggauggcacuagagg

SEQ ID NO: 948111 - RNA, 22 nt, Human
ugggcagaaggaagagccaccu

SEQ ID NO: 948112 - RNA, 22 nt, Human
ugagccaggcacugcuccugga

SEQ ID NO: 948113 - RNA, 19 nt, Human
ugcaagcuuuuucuuguua

SEQ ID NO: 948114 - RNA, 22 nt, Human
gcaggaagaugagcucagguaa

SEQ ID NO: 948115 - RNA, 22 nt, Human
gccuggaggggacagucucugg

SEQ ID NO: 948116 - RNA, 22 nt, Human
ccacucugauuggucaccucug

SEQ ID NO: 948117 - RNA, 22 nt, Human
gcuugggauaugcugauguaaa

SEQ ID NO: 948118 - RNA, 22 nt, Human
aguuugaaaguauugacagaag

SEQ ID NO: 948119 - RNA, 22 nt, Human
aauauaaugcuguuuuaugcca

SEQ ID NO: 948120 - RNA, 22 nt, Human
cacucugccugauguuacaugg

SEQ ID NO: 948121 - RNA, 17 nt, Human
agaugcuggccacaugu

SEQ ID NO: 948122 - RNA, 22 nt, Human
cagcugcuuuaguuuuccaucc

SEQ ID NO: 948123 - RNA, 22 nt, Human
ccugcugggccugagcaaugag

SEQ ID NO: 948124 - RNA, 22 nt, Human
ugaggcagucacccccuccugc

SEQ ID NO: 948125 - RNA, 22 nt, Human
cuggccaacaucuggggcacau

SEQ ID NO: 948126 - RNA, 22 nt, Human
gccagguggcugagugacugag

SEQ ID NO: 948127 - RNA, 22 nt, Human
cccuggaggcaaagguugcagu

SEQ ID NO: 948128 - RNA, 22 nt, Human
cagcaagauuuuuaaagcaagg

SEQ ID NO: 948129 - RNA, 22 nt, Human
cuucucaguugcaagugucaga

SEQ ID NO: 948130 - RNA, 22 nt, Human
ugcagaagacacaagguaacgu

SEQ ID NO: 948131 - RNA, 22 nt, Human
ucagugugaguaccaugcucag

SEQ ID NO: 948132 - RNA, 22 nt, Human
cugccuggccugaucuccacgc

SEQ ID NO: 948133 - RNA, 22 nt, Human
acacucugugaggcauguaaug

SEQ ID NO: 948134 - RNA, 22 nt, Human
cagcuggcugcaugaugccaaa

SEQ ID NO: 948135 - RNA, 22 nt, Human
ccagcacugcucucagacugag

SEQ ID NO: 948136 - RNA, 22 nt, Human
cagaggaugaucuggccucucu

SEQ ID NO: 948137 - RNA, 22 nt, Human
augaaagaugauuuaaaguacu

SEQ ID NO: 948138 - RNA, 22 nt, Human
ugcauuuccagauuucuggagu

SEQ ID NO: 948139 - RNA, 22 nt, Human
gaggaaaagagacagguuauug

SEQ ID NO: 948140 - RNA, 21 nt, Human
aacaaagggaugcucaucuuu

SEQ ID NO: 948141 - RNA, 22 nt, Human
acuuuugguucuguaacuguga

SEQ ID NO: 948142 - RNA, 22 nt, Human
uuuuucaugagacuagaaguca

SEQ ID NO: 948143 - RNA, 22 nt, Human
cagggcccaagacacaaugagg

SEQ ID NO: 948144 - RNA, 22 nt, Human
aaugucugcucuacucaggagg

SEQ ID NO: 948145 - RNA, 22 nt, Human
uggcccugcugggucagagcug

SEQ ID NO: 948146 - RNA, 23 nt, Human
gagguacagcaccagugaauagg

SEQ ID NO: 948147 - RNA, 22 nt, Human
ccaggaguuugaggcugcagug

SEQ ID NO: 948148 - RNA, 22 nt, Human
uggcagcagacaucugaggucu

SEQ ID NO: 948149 - RNA, 22 nt, Human
uuaauaaaguaugaauuggaaa

SEQ ID NO: 948150 - RNA, 22 nt, Human
caguuuuugccauuaagaguaa

SEQ ID NO: 948151 - RNA, 22 nt, Human
ugggcuguggagcaccuuugca

SEQ ID NO: 948152 - RNA, 18 nt, Human
ccugcagcccaggaggcc

SEQ ID NO: 948153 - RNA, 22 nt, Human
gccagcccagcuccaggggaaa

SEQ ID NO: 948154 - RNA, 22 nt, Human
ccaggcuggauuuugcaguuca

SEQ ID NO: 948155 - RNA, 22 nt, Human
uuuaggaucucucuuguuacau

SEQ ID NO: 948156 - RNA, 22 nt, Human
cuggccacuggagguggcaccc

SEQ ID NO: 948157 - RNA, 22 nt, Human
gcuguucugcgucccaggcugg

SEQ ID NO: 948158 - RNA, 22 nt, Human
agaguucagcuacugcaaaugu

SEQ ID NO: 948159 - RNA, 22 nt, Human
cagaaaauaaaguuucuacgca

SEQ ID NO: 948160 - RNA, 22 nt, Human
cauuucugggagacaugcuaga

SEQ ID NO: 948161 - RNA, 21 nt, Human
ucccacucuaaauggacugaa

SEQ ID NO: 948162 - RNA, 22 nt, Human
ugauuuccaguugcugggugcu

SEQ ID NO: 948163 - RNA, 22 nt, Human
ggcugccucuggaagcuggaga

SEQ ID NO: 948164 - RNA, 22 nt, Human
guuauguauugggaaauccaag

SEQ ID NO: 948165 - RNA, 22 nt, Human
ggggcuguuuuuggaauggcug

SEQ ID NO: 948166 - RNA, 20 nt, Human
cuguaucagguuacaaagua

SEQ ID NO: 948167 - RNA, 22 nt, Human
augcuuuacaguuuuccaaaca

SEQ ID NO: 948168 - RNA, 22 nt, Human
ggaagaggcugaggccaugcug

SEQ ID NO: 948169 - RNA, 22 nt, Human
cagccagcugaauguaccauga

SEQ ID NO: 948170 - RNA, 22 nt, Human
gucaggauuauuuuauuaaaag

SEQ ID NO: 948171 - RNA, 22 nt, Human
uguaggaguccaaucaggagac

SEQ ID NO: 948172 - RNA, 21 nt, Human
aaagugguaaggauuauuuug

SEQ ID NO: 948173 - RNA, 22 nt, Human
caguccuggggaccaggcugag

SEQ ID NO: 948174 - RNA, 22 nt, Human
cucagaguccccacaucugggu

SEQ ID NO: 948175 - RNA, 22 nt, Human
guucuucagcauuagaagucau

SEQ ID NO: 948176 - RNA, 22 nt, Human
gcagggacagggcagggccuuu

SEQ ID NO: 948177 - RNA, 22 nt, Human
gacccagcuuaagucacauguu

SEQ ID NO: 948178 - RNA, 22 nt, Human
gaggcagcgggucaggaccgug

SEQ ID NO: 948179 - RNA, 22 nt, Human
ugacagaaauaguucuuaauuu

SEQ ID NO: 948180 - RNA, 22 nt, Human
agucucuuuguggacucugccu

SEQ ID NO: 948181 - RNA, 20 nt, Human
ugccagggccagcagaggcu

SEQ ID NO: 948182 - RNA, 22 nt, Human
gacagggcaagacucugucuaa

SEQ ID NO: 948183 - RNA, 22 nt, Human
cugagggcaugaacauuccaua

SEQ ID NO: 948184 - RNA, 22 nt, Human
cagcuugggaguuugguuuuau

SEQ ID NO: 948185 - RNA, 22 nt, Human
augaaaacuuuagccucauuag

SEQ ID NO: 948186 - RNA, 17 nt, Human
caggcagacauguaagc

SEQ ID NO: 948187 - RNA, 22 nt, Human
uacagaaaucacaucgcuuuga

SEQ ID NO: 948188 - RNA, 22 nt, Human
cugucaguaggcucccaucauu

SEQ ID NO: 948189 - RNA, 22 nt, Human
uggccaguagauaggcaggcaa

SEQ ID NO: 948190 - RNA, 22 nt, Human
ucauugaauuucacagcuuuau

SEQ ID NO: 948191 - RNA, 22 nt, Human
ggcuccuguccuccuggagcuc

SEQ ID NO: 948192 - RNA, 22 nt, Human
uagcagcuuccagagagggcag

SEQ ID NO: 948193 - RNA, 19 nt, Human
uucccaggaaaggggugca

SEQ ID NO: 948194 - RNA, 22 nt, Human
ugccaggcauauggccucuuug

SEQ ID NO: 948195 - RNA, 22 nt, Human
agguggggugagcugcagacua

SEQ ID NO: 948196 - RNA, 23 nt, Human
uccuuccuuugagaggcuccauc

SEQ ID NO: 948197 - RNA, 22 nt, Human
cucaaggacuuauucaugccug

SEQ ID NO: 948198 - RNA, 22 nt, Human
auucuuaauuccaaagacugag

SEQ ID NO: 948199 - RNA, 20 nt, Human
agaagcugauacugauggaa

SEQ ID NO: 948200 - RNA, 22 nt, Human
ugggcagaucuuugguggcuag

SEQ ID NO: 948201 - RNA, 22 nt, Human
uguguacaggccuugcuagacu

SEQ ID NO: 948202 - RNA, 22 nt, Human
gcagggaagacccggagcagcg

SEQ ID NO: 948203 - RNA, 22 nt, Human
ugggagcugggguuggacgucu

SEQ ID NO: 948204 - RNA, 22 nt, Human
gacuccugggccucugagaggc

SEQ ID NO: 948205 - RNA, 22 nt, Human
guggccaaggugcagagcagcu

SEQ ID NO: 948206 - RNA, 22 nt, Human
cuucccugauaagagccucaga

SEQ ID NO: 948207 - RNA, 22 nt, Human
uccucagcaaacacuucacucu

SEQ ID NO: 948208 - RNA, 22 nt, Human
agauacauuaguaguuacuugu

SEQ ID NO: 948209 - RNA, 22 nt, Human
ccugugcauccgguggucauug

SEQ ID NO: 948210 - RNA, 22 nt, Human
ucuuccaguguagacaucugcc

SEQ ID NO: 948211 - RNA, 22 nt, Human
ugaaggccucugguacaugcca

SEQ ID NO: 948212 - RNA, 22 nt, Human
ucucuggaagcgcagaucuguu

SEQ ID NO: 948213 - RNA, 18 nt, Human
ugucauugccagggaagc

SEQ ID NO: 948214 - RNA, 22 nt, Human
ccugcagcuguaggagaaggcg

SEQ ID NO: 948215 - RNA, 23 nt, Human
auguuauuauuagcagucuugcc

SEQ ID NO: 948216 - RNA, 22 nt, Human
cacagugcaugaugggcagaag

SEQ ID NO: 948217 - RNA, 22 nt, Human
uccugggcuuuguuucucuccu

SEQ ID NO: 948218 - RNA, 22 nt, Human
cagucccagaagagccugggag

SEQ ID NO: 948219 - RNA, 22 nt, Human
aaaugcacagaggccagagagg

SEQ ID NO: 948220 - RNA, 22 nt, Human
uucacaggcuuggagguggggg

SEQ ID NO: 948221 - RNA, 22 nt, Human
cugggccucaaucucagaguuu

SEQ ID NO: 948222 - RNA, 22 nt, Human
ucagagccccuccgcuguccca

SEQ ID NO: 948223 - RNA, 22 nt, Human
auuucaguguuuuaagaguuca

SEQ ID NO: 948224 - RNA, 22 nt, Human
gggcaugagagggcagcuggca

SEQ ID NO: 948225 - RNA, 23 nt, Human
uauuagggccaggacuggcaaau

SEQ ID NO: 948226 - RNA, 22 nt, Human
aagaaauauugggccuuauaaa

SEQ ID NO: 948227 - RNA, 22 nt, Human
cugaaggauguguggugggagu

SEQ ID NO: 948228 - RNA, 22 nt, Human
ucucagagauuuuguuucccuu

SEQ ID NO: 948229 - RNA, 22 nt, Human
caggggcagucugugugcgugg

SEQ ID NO: 948230 - RNA, 22 nt, Human
aauggccagcugggagaguuga

SEQ ID NO: 948231 - RNA, 22 nt, Human
uauccaaaguuucucagaaacu

SEQ ID NO: 948232 - RNA, 18 nt, Human
uuuaugagcugugggacc

SEQ ID NO: 948233 - RNA, 22 nt, Human
uggccugaggcucggcaugggu

SEQ ID NO: 948234 - RNA, 22 nt, Human
ucaggagaacuuccuucuaccc

SEQ ID NO: 948235 - RNA, 23 nt, Human
agaggccagccuuuggagacacc

SEQ ID NO: 948236 - RNA, 22 nt, Human
aaugcuguucugagucugcagg

SEQ ID NO: 948237 - RNA, 21 nt, Human
uccuccuucaaguccuggccu

SEQ ID NO: 948238 - RNA, 22 nt, Human
ucauugcauuuauucacuggca

SEQ ID NO: 948239 - RNA, 22 nt, Human
cagcugacuucauaggaagaca

SEQ ID NO: 948240 - RNA, 22 nt, Human
agcagggguaacagaaggaaag

SEQ ID NO: 948241 - RNA, 22 nt, Human
agcugccagcaucccggaaggg

SEQ ID NO: 948242 - RNA, 22 nt, Human
uccucacagucaacacuuugag

SEQ ID NO: 948243 - RNA, 22 nt, Human
uuucauaauagugcaguuuguu

SEQ ID NO: 948244 - RNA, 22 nt, Human
auuuccagcagcauauuugucu

SEQ ID NO: 948245 - RNA, 22 nt, Human
ggccagagaagucagacccuug

SEQ ID NO: 948246 - RNA, 22 nt, Human
cccuggcaugcaugucccuggc

SEQ ID NO: 948247 - RNA, 22 nt, Human
gccaggccugcaagugcuggug

SEQ ID NO: 948248 - RNA, 22 nt, Human
uuguaacagguacuaaauaacu

SEQ ID NO: 948249 - RNA, 22 nt, Human
ugggcugccagcucuccagaug

SEQ ID NO: 948250 - RNA, 22 nt, Human
ucaaggcuaaacuuucagagua

SEQ ID NO: 948251 - RNA, 22 nt, Human
ccaggagcaacuugaaggcaag

SEQ ID NO: 948252 - RNA, 22 nt, Human
uaccugagcccagugcagcaua

SEQ ID NO: 948253 - RNA, 22 nt, Human
ggcagagcuuguuccuucuguu

SEQ ID NO: 948254 - RNA, 22 nt, Human
caugcuguguguuuuagcucca

SEQ ID NO: 948255 - RNA, 18 nt, Human
ugaggcagucagugaugg

SEQ ID NO: 948256 - RNA, 18 nt, Human
cucagggcaucagucugg

SEQ ID NO: 948257 - RNA, 22 nt, Human
acaaauaugguacucggagaaa

SEQ ID NO: 948258 - RNA, 22 nt, Human
cuggcuggccggaggcaucccu

SEQ ID NO: 948259 - RNA, 22 nt, Human
gccugugacucgucuugggcca

SEQ ID NO: 948260 - RNA, 22 nt, Human
aaaugcauuuuuaauuagaccc

SEQ ID NO: 948261 - RNA, 18 nt, Human
cagaagcaggcagugcag

SEQ ID NO: 948262 - RNA, 20 nt, Human
uuucaguuaucuugaccuuc

SEQ ID NO: 948263 - RNA, 22 nt, Human
caggagcucucaucgucagggc

SEQ ID NO: 948264 - RNA, 22 nt, Human
cugaaugucgaucagcuugggu

SEQ ID NO: 948265 - RNA, 22 nt, Human
ccagacaggaacacacaucucc

SEQ ID NO: 948266 - RNA, 22 nt, Human
auccaaagcccuaaguuaacug

SEQ ID NO: 948267 - RNA, 22 nt, Human
gaaggagacccugaagaugcug

SEQ ID NO: 948268 - RNA, 22 nt, Human
ccaggagagcucuaaauggcug

SEQ ID NO: 948269 - RNA, 22 nt, Human
cugccuggaaggagcaagggga

SEQ ID NO: 948270 - RNA, 22 nt, Human
uucagugucaauuuuuaaauau

SEQ ID NO: 948271 - RNA, 22 nt, Human
cagugcagaacacauggaaaau

SEQ ID NO: 948272 - RNA, 20 nt, Human
cccagggaccugagcuccau

SEQ ID NO: 948273 - RNA, 22 nt, Human
uggcagcagggaggccaguguu

SEQ ID NO: 948274 - RNA, 22 nt, Human
caggacaguuugcuuugcccug

SEQ ID NO: 948275 - RNA, 22 nt, Human
uuuccuuccaaaugcccgggag

SEQ ID NO: 948276 - RNA, 22 nt, Human
ugcuaucucuauauccauuuau

SEQ ID NO: 948277 - RNA, 22 nt, Human
ugaaaucuucacuaagucucuu

SEQ ID NO: 948278 - RNA, 22 nt, Human
cucuggagugcagccugguggc

SEQ ID NO: 948279 - RNA, 22 nt, Human
aggccugagcagaggaguggac

SEQ ID NO: 948280 - RNA, 21 nt, Human
aucacauuggcuguuauuauu

SEQ ID NO: 948281 - RNA, 22 nt, Human
cacugagaggucucauuuccaa

SEQ ID NO: 948282 - RNA, 22 nt, Human
gcagggcacagacagugccaag

SEQ ID NO: 948283 - RNA, 22 nt, Human
ucugccugccagucugguccuc

SEQ ID NO: 948284 - RNA, 22 nt, Human
uuuguuuacucauucauugaug

SEQ ID NO: 948285 - RNA, 19 nt, Human
caucuggaugauucuccug

SEQ ID NO: 948286 - RNA, 22 nt, Human
aaagguuaagguguucaagaaa

SEQ ID NO: 948287 - RNA, 22 nt, Human
acagcugugaaaauccacagga

SEQ ID NO: 948288 - RNA, 22 nt, Human
guaggcagucucucaggugauc

SEQ ID NO: 948289 - RNA, 22 nt, Human
gggcccacuggcugucugaccc

SEQ ID NO: 948290 - RNA, 22 nt, Human
gcuguuaggugcccugaccuug

SEQ ID NO: 948291 - RNA, 22 nt, Human
uuaauuaaauucaugagcauug

SEQ ID NO: 948292 - RNA, 22 nt, Human
aggccugacuugaauuuagggc

SEQ ID NO: 948293 - RNA, 20 nt, Human
aagggcagagggaacagacu

SEQ ID NO: 948294 - RNA, 22 nt, Human
gcuggcuguuggagguaccugc

SEQ ID NO: 948295 - RNA, 22 nt, Human
agggacuggcucucugagcagg

SEQ ID NO: 948296 - RNA, 22 nt, Human
augaagcugguuuuggcuuggg

SEQ ID NO: 948297 - RNA, 22 nt, Human
guucuccauucagcuuccugug

SEQ ID NO: 948298 - RNA, 22 nt, Human
gccuggugguauccuggcaaga

SEQ ID NO: 948299 - RNA, 22 nt, Human
agacuucucaguuuuauuagua

SEQ ID NO: 948300 - RNA, 22 nt, Human
ccaggagcuggagggugcagug

SEQ ID NO: 948301 - RNA, 22 nt, Human
uuggccuucccuaccugggcca

SEQ ID NO: 948302 - RNA, 22 nt, Human
ugccucugugugcaggugagca

SEQ ID NO: 948303 - RNA, 22 nt, Human
ccugccagucacuaugucaccu

SEQ ID NO: 948304 - RNA, 22 nt, Human
uucaccuugaauaugucuuaaa

SEQ ID NO: 948305 - RNA, 22 nt, Human
aucugacaaccuauugacuuga

SEQ ID NO: 948306 - RNA, 22 nt, Human
ucaggcugagaaaaucuggacc

SEQ ID NO: 948307 - RNA, 22 nt, Human
gcugggagaggcccugaaguga

SEQ ID NO: 948308 - RNA, 22 nt, Human
cuggguggaucgcagccccagg

SEQ ID NO: 948309 - RNA, 22 nt, Human
uccuggaguugugcagugcaca

SEQ ID NO: 948310 - RNA, 22 nt, Human
ucggagcuguagaugaaacccu

SEQ ID NO: 948311 - RNA, 22 nt, Human
cagggccugccugguuccugga

SEQ ID NO: 948312 - RNA, 19 nt, Human
cugcucaggucagucuguc

SEQ ID NO: 948313 - RNA, 22 nt, Human
caguuucuguuuuaaauagcag

SEQ ID NO: 948314 - RNA, 22 nt, Human
cccuuggggaugcugugucugg

SEQ ID NO: 948315 - RNA, 22 nt, Human
ucccugggaacaaaggaugaga

SEQ ID NO: 948316 - RNA, 22 nt, Human
auggcagggcagccucucagag

SEQ ID NO: 948317 - RNA, 22 nt, Human
augcacgccccacacuggugug

SEQ ID NO: 948318 - RNA, 22 nt, Human
uccucuucugcccaucagaggc

SEQ ID NO: 948319 - RNA, 22 nt, Human
cccuucccuucugggagaucca

SEQ ID NO: 948320 - RNA, 22 nt, Human
uguuuaagcugaugagguaucg

SEQ ID NO: 948321 - RNA, 22 nt, Human
ggcagcuccucaaaaaauuaaa

SEQ ID NO: 948322 - RNA, 23 nt, Human
ccagugauugccuggaaggaggu

SEQ ID NO: 948323 - RNA, 22 nt, Human
gaugcugagagguggagggaac

SEQ ID NO: 948324 - RNA, 22 nt, Human
ggcaugggagugagcaaccuua

SEQ ID NO: 948325 - RNA, 19 nt, Human
cagaguccuugaccagucc

SEQ ID NO: 948326 - RNA, 22 nt, Human
cagagcugcgcuuuuuccuggu

SEQ ID NO: 948327 - RNA, 22 nt, Human
cacaaugugguuugucaucuuu

SEQ ID NO: 948328 - RNA, 22 nt, Human
uucugggacaucuggacaguuu

SEQ ID NO: 948329 - RNA, 23 nt, Human
ggccauggagacuuagaaugggc

SEQ ID NO: 948330 - RNA, 21 nt, Human
ucaaagcacauauuugcacau

SEQ ID NO: 948331 - RNA, 22 nt, Human
uccuccaggucuaggguggcuu

SEQ ID NO: 948332 - RNA, 22 nt, Human
gagaggcugaaaucacaggagc

SEQ ID NO: 948333 - RNA, 22 nt, Human
auucacagggacaaugggagag

SEQ ID NO: 948334 - RNA, 22 nt, Human
caugucuuggcuuaggcacaga

SEQ ID NO: 948335 - RNA, 20 nt, Human
aaagucuuaugguuaauuuu

SEQ ID NO: 948336 - RNA, 22 nt, Human
ccagcccuccuccaucagagga

SEQ ID NO: 948337 - RNA, 22 nt, Human
ucaggggcuugaggugcauguc

SEQ ID NO: 948338 - RNA, 22 nt, Human
acagcauugcuccaucucaaga

SEQ ID NO: 948339 - RNA, 22 nt, Human
cuggggcuggugaggcaggcuc

SEQ ID NO: 948340 - RNA, 22 nt, Human
caguggccugagccaggcuucc

SEQ ID NO: 948341 - RNA, 22 nt, Human
agaaauacuaggaauauucaua

SEQ ID NO: 948342 - RNA, 17 nt, Human
agcugagcuggccaggg

SEQ ID NO: 948343 - RNA, 22 nt, Human
guucuucaguaaaauuaaaugu

SEQ ID NO: 948344 - RNA, 22 nt, Human
auauucuuccaaaacaucauuu

SEQ ID NO: 948345 - RNA, 22 nt, Human
guucacaagaguuacagacaga

SEQ ID NO: 948346 - RNA, 22 nt, Human
ccagaggaaaaauaucucccua

SEQ ID NO: 948347 - RNA, 23 nt, Human
agggccugauggcucccgcuggc

SEQ ID NO: 948348 - RNA, 22 nt, Human
auauucuucuuguucagacuau

SEQ ID NO: 948349 - RNA, 22 nt, Human
ucuaagccuaggaaaugaguuu

SEQ ID NO: 948350 - RNA, 22 nt, Human
cccaggaguuggaggcuacggu

SEQ ID NO: 948351 - RNA, 22 nt, Human
caggagcccagaguccucagcu

SEQ ID NO: 948352 - RNA, 22 nt, Human
gaggccaaucaauagggcaaua

SEQ ID NO: 948353 - RNA, 22 nt, Human
aaggcacuguacuaguuaguua

SEQ ID NO: 948354 - RNA, 20 nt, Human
guggccucucacauucugag

SEQ ID NO: 948355 - RNA, 22 nt, Human
cuggcuccaucacugggugaug

SEQ ID NO: 948356 - RNA, 22 nt, Human
ccugggagguggagguugcagc

SEQ ID NO: 948357 - RNA, 22 nt, Human
aggcuccuaucgcuuucagcaa

SEQ ID NO: 948358 - RNA, 22 nt, Human
cagagcugggcauggugaaagg

SEQ ID NO: 948359 - RNA, 22 nt, Human
ggagggcucaauugacuccuga

SEQ ID NO: 948360 - RNA, 20 nt, Human
gugccuggagaagaggcugu

SEQ ID NO: 948361 - RNA, 22 nt, Human
aaagacuuggcuuaugauuugc

SEQ ID NO: 948362 - RNA, 22 nt, Human
uuucaguuuuugcucgauguau

SEQ ID NO: 948363 - RNA, 22 nt, Human
gcagcuccuucaaucucaccau

SEQ ID NO: 948364 - RNA, 22 nt, Human
cagcccuggaacagcugacuca

SEQ ID NO: 948365 - RNA, 22 nt, Human
agggccucugacgcccccagcc

SEQ ID NO: 948366 - RNA, 22 nt, Human
uaagauguuuugguuugauaag

SEQ ID NO: 948367 - RNA, 22 nt, Human
ucuguggauuuuaguguucaug

SEQ ID NO: 948368 - RNA, 22 nt, Human
caacagaaggaagcagggucag

SEQ ID NO: 948369 - RNA, 22 nt, Human
agggcagcccuucugggagggc

SEQ ID NO: 948370 - RNA, 22 nt, Human
aaaggaagauugagcuuuucca

SEQ ID NO: 948371 - RNA, 22 nt, Human
cagccucucuguaucucaggau

SEQ ID NO: 948372 - RNA, 22 nt, Human
agccacagucugaugccugaga

SEQ ID NO: 948373 - RNA, 22 nt, Human
cugcaggauucucccaguugga

SEQ ID NO: 948374 - RNA, 19 nt, Human
acccagagcccuuugcagg

SEQ ID NO: 948375 - RNA, 22 nt, Human
gaggcaggcacuguuaucagca

SEQ ID NO: 948376 - RNA, 22 nt, Human
cagcagagggagccauugaaau

SEQ ID NO: 948377 - RNA, 20 nt, Human
cagucccaauccagggccag

SEQ ID NO: 948378 - RNA, 22 nt, Human
cccagggagguagcaggagaaa

SEQ ID NO: 948379 - RNA, 22 nt, Human
aauguacaaggguuccaguuuu

SEQ ID NO: 948380 - RNA, 22 nt, Human
auaugaaaguaagcaugugugu

SEQ ID NO: 948381 - RNA, 22 nt, Human
guucuguacuccaagcucuucc

SEQ ID NO: 948382 - RNA, 23 nt, Human
ugcauuauccucucugaagacca

SEQ ID NO: 948383 - RNA, 22 nt, Human
uucuggaguauuccuggcaccu

SEQ ID NO: 948384 - RNA, 22 nt, Human
ucuucuucccaucccucaaaug

SEQ ID NO: 948385 - RNA, 22 nt, Human
uugugcauuucucugagugugu

SEQ ID NO: 948386 - RNA, 22 nt, Human
uauguacaguccuuaacuuaaa

SEQ ID NO: 948387 - RNA, 22 nt, Human
uuuguaaaggccugaauuucag

SEQ ID NO: 948388 - RNA, 22 nt, Human
cugagcugcggcaggcaccugg

SEQ ID NO: 948389 - RNA, 22 nt, Human
ggccugugucugugccuguccu

SEQ ID NO: 948390 - RNA, 22 nt, Human
ugggaccaagucauuucuuuag

SEQ ID NO: 948391 - RNA, 22 nt, Human
gcugucacaucaaggcacuaaa

SEQ ID NO: 948392 - RNA, 22 nt, Human
aacaucuuuuuguuugcugaaa

SEQ ID NO: 948393 - RNA, 22 nt, Human
uugcaaaugugaauaauuacac

SEQ ID NO: 948394 - RNA, 20 nt, Human
gguagcagcugcugucaucc

SEQ ID NO: 948395 - RNA, 22 nt, Human
auaucacaguaguuguuuaguu

SEQ ID NO: 948396 - RNA, 22 nt, Human
uggagcagcaucacuuugagcu

SEQ ID NO: 948397 - RNA, 22 nt, Human
uuagucuucuuccuuauauguu

SEQ ID NO: 948398 - RNA, 22 nt, Human
ugggggugaaagucuggacagu

SEQ ID NO: 948399 - RNA, 18 nt, Human
aggauauuaagaguacag

SEQ ID NO: 948400 - RNA, 22 nt, Human
uauauucaaugauuaguaucag

SEQ ID NO: 948401 - RNA, 22 nt, Human
gcucccagggaccgcagggcag

SEQ ID NO: 948402 - RNA, 22 nt, Human
gcagagccaggagagacccuug

SEQ ID NO: 948403 - RNA, 22 nt, Human
acucccacuccagaguagaagc

SEQ ID NO: 948404 - RNA, 22 nt, Human
ugaacccaggagguugcaguga

SEQ ID NO: 948405 - RNA, 22 nt, Human
agugaaauccuggucaacaggu

SEQ ID NO: 948406 - RNA, 22 nt, Human
uuuucucuacaaaauaaccagc

SEQ ID NO: 948407 - RNA, 22 nt, Human
uguacauagaucuugaaaauua

SEQ ID NO: 948408 - RNA, 22 nt, Human
gacagcuguggagaggcaugug

SEQ ID NO: 948409 - RNA, 22 nt, Human
ggagccuuccagacugcccaca

SEQ ID NO: 948410 - RNA, 22 nt, Human
agccucugcacgggcacgggug

SEQ ID NO: 948411 - RNA, 22 nt, Human
gaugugagugguagcugggauu

SEQ ID NO: 948412 - RNA, 23 nt, Human
gggagccauggguggucauggag

SEQ ID NO: 948413 - RNA, 22 nt, Human
ucuagaaaaaaacugcugugga

SEQ ID NO: 948414 - RNA, 22 nt, Human
guggagaccuccuaggaugugu

SEQ ID NO: 948415 - RNA, 22 nt, Human
ugcuuccugaggccgucuucuc

SEQ ID NO: 948416 - RNA, 22 nt, Human
uccagggcuuggcugggacggu

SEQ ID NO: 948417 - RNA, 22 nt, Human
uggagcaggcaucuuucucucu

SEQ ID NO: 948418 - RNA, 19 nt, Human
ucgagucaagacacuaggc

SEQ ID NO: 948419 - RNA, 22 nt, Human
aggccugagccccagguuuguu

SEQ ID NO: 948420 - RNA, 18 nt, Human
cagcagagacauucaaaa

SEQ ID NO: 948421 - RNA, 22 nt, Human
aauaugucugcuaauuguuucu

SEQ ID NO: 948422 - RNA, 22 nt, Human
cagagcagugaggaguugugua

SEQ ID NO: 948423 - RNA, 22 nt, Human
ucugcugcugagcacacuccua

SEQ ID NO: 948424 - RNA, 22 nt, Human
uauuuccauguuagaacuaagu

SEQ ID NO: 948425 - RNA, 22 nt, Human
gcuggcccagggucaccuagga

SEQ ID NO: 948426 - RNA, 22 nt, Human
caggucccgccccgggcugacc

SEQ ID NO: 948427 - RNA, 22 nt, Human
auguuuaagaaagucuuccaua

SEQ ID NO: 948428 - RNA, 22 nt, Human
uggcucaagugauccuccugcc

SEQ ID NO: 948429 - RNA, 22 nt, Human
ucgugucagaucagagguuccu

SEQ ID NO: 948430 - RNA, 22 nt, Human
aaaguucagauuagacucaaga

SEQ ID NO: 948431 - RNA, 22 nt, Human
ccaggcucugucuggucagaag

SEQ ID NO: 948432 - RNA, 22 nt, Human
guggcaggagacuggaagaugg

SEQ ID NO: 948433 - RNA, 22 nt, Human
gcuggguggaucggaggcucug

SEQ ID NO: 948434 - RNA, 22 nt, Human
caccucuuugauuugaggcaag

SEQ ID NO: 948435 - RNA, 22 nt, Human
ugaaggaaaugacggcagaaga

SEQ ID NO: 948436 - RNA, 23 nt, Human
cagcccuuccugcauguuuuugu

SEQ ID NO: 948437 - RNA, 22 nt, Human
cugggguggugcaggccucaug

SEQ ID NO: 948438 - RNA, 22 nt, Human
cagcuggcuggucagugcacaa

SEQ ID NO: 948439 - RNA, 22 nt, Human
uaucuaaaggauuuaauuuagu

SEQ ID NO: 948440 - RNA, 22 nt, Human
ccucucucuccugcacacacac

SEQ ID NO: 948441 - RNA, 23 nt, Human
uugucugugcuuuuccaguugcu

SEQ ID NO: 948442 - RNA, 22 nt, Human
agagcuggguggacuuguaguu

SEQ ID NO: 948443 - RNA, 22 nt, Human
agcugcccuggcggagcugcuc

SEQ ID NO: 948444 - RNA, 22 nt, Human
agaaaaggcuugaagagguuuu

SEQ ID NO: 948445 - RNA, 22 nt, Human
ucaagauaccaccauuauaugu

SEQ ID NO: 948446 - RNA, 22 nt, Human
ugaugcugagccugggacugac

SEQ ID NO: 948447 - RNA, 21 nt, Human
guuugcaugaacaagucagcc

SEQ ID NO: 948448 - RNA, 22 nt, Human
uacccagcuucaagucaggacu

SEQ ID NO: 948449 - RNA, 22 nt, Human
gcaggcuggaggcuguucuggg

SEQ ID NO: 948450 - RNA, 23 nt, Human
acaguuauagcugugaauaacau

SEQ ID NO: 948451 - RNA, 22 nt, Human
cagggagggacaauugucaccu

SEQ ID NO: 948452 - RNA, 22 nt, Human
cuaaauaaucccucuggucuua

SEQ ID NO: 948453 - RNA, 22 nt, Human
uaaaauguguuucuguaugguu

SEQ ID NO: 948454 - RNA, 23 nt, Human
cuggccuccgacacuggccaaga

SEQ ID NO: 948455 - RNA, 22 nt, Human
agagcagcuggggcagagacca

SEQ ID NO: 948456 - RNA, 22 nt, Human
cucccuggugacucccaaagcu

SEQ ID NO: 948457 - RNA, 22 nt, Human
aauguacacugaaagccuauca

SEQ ID NO: 948458 - RNA, 19 nt, Human
uucacaauuaugaaauuag

SEQ ID NO: 948459 - RNA, 22 nt, Human
uggagcccagacacuggcauug

SEQ ID NO: 948460 - RNA, 20 nt, Human
ggaggguggaagaaagcaag

SEQ ID NO: 948461 - RNA, 22 nt, Human
ccagcugcugugaggaccacag

SEQ ID NO: 948462 - RNA, 22 nt, Human
aggcagcuggaaaacuccaggc

SEQ ID NO: 948463 - RNA, 22 nt, Human
gaaggccucacucugcagcaua

SEQ ID NO: 948464 - RNA, 22 nt, Human
aucuggcuuaccuagggugccu

SEQ ID NO: 948465 - RNA, 22 nt, Human
ggccugugcacaugugcaggaa

SEQ ID NO: 948466 - RNA, 22 nt, Human
ugaagcaaacgcuucuguuccu

SEQ ID NO: 948467 - RNA, 22 nt, Human
uggcagggccuaccccaauauc

SEQ ID NO: 948468 - RNA, 22 nt, Human
aaguguguugacugaauugggg

SEQ ID NO: 948469 - RNA, 23 nt, Human
cauguacagaguuugauaaagug

SEQ ID NO: 948470 - RNA, 22 nt, Human
ggccuggaaugcuuuccuacca

SEQ ID NO: 948471 - RNA, 21 nt, Human
ugaagccugaggcauagcccc

SEQ ID NO: 948472 - RNA, 22 nt, Human
gaccaggagauuugagcuaggc

SEQ ID NO: 948473 - RNA, 22 nt, Human
ccucacugcuauguguuugcuc

SEQ ID NO: 948474 - RNA, 21 nt, Human
ggcagcccgcccucuccuggc

SEQ ID NO: 948475 - RNA, 22 nt, Human
ucacucugacuuggccuccaac

SEQ ID NO: 948476 - RNA, 22 nt, Human
cauguaaaacacucagaacagu

SEQ ID NO: 948477 - RNA, 22 nt, Human
gcccaggaguugguggcugcag

SEQ ID NO: 948478 - RNA, 22 nt, Human
agguggaacguucaggugcuag

SEQ ID NO: 948479 - RNA, 22 nt, Human
ucuggccaggggucccugaagg

SEQ ID NO: 948480 - RNA, 22 nt, Human
uucuucaaccaucuacauaaac

SEQ ID NO: 948481 - RNA, 22 nt, Human
aggaggggcaaugauagucugg

SEQ ID NO: 948482 - RNA, 22 nt, Human
acuuucuaggugcuauugugau

SEQ ID NO: 948483 - RNA, 22 nt, Human
cagugcauaaucuaaauggggg

SEQ ID NO: 948484 - RNA, 22 nt, Human
gugcugcucacaucuggaggua

SEQ ID NO: 948485 - RNA, 21 nt, Human
gcaggaugcaucuuggugucu

SEQ ID NO: 948486 - RNA, 22 nt, Human
aaaauguguuuaugcauuucgu

SEQ ID NO: 948487 - RNA, 17 nt, Human
gcaaucucagucuccuu

SEQ ID NO: 948488 - RNA, 22 nt, Human
ggcuucugagugcucugcuguu

SEQ ID NO: 948489 - RNA, 22 nt, Human
ccugagaccaaguugcagccau

SEQ ID NO: 948490 - RNA, 22 nt, Human
ccagagaccagaacauggggau

SEQ ID NO: 948491 - RNA, 22 nt, Human
uggcuuucucccccagcuucuc

SEQ ID NO: 948492 - RNA, 22 nt, Human
ucaaaugcugccuuugugugcc

SEQ ID NO: 948493 - RNA, 22 nt, Human
ucucaagcuuguugguauguuu

SEQ ID NO: 948494 - RNA, 22 nt, Human
caauacuuccuuguuagaggca

SEQ ID NO: 948495 - RNA, 22 nt, Human
gcaugggcaagaggacuggggg

SEQ ID NO: 948496 - RNA, 22 nt, Human
uugcacuaggaaaaggcagcca

SEQ ID NO: 948497 - RNA, 22 nt, Human
ugggaggcuuccagaccuugcu

SEQ ID NO: 948498 - RNA, 22 nt, Human
gggccagagcuuggcagcuggg

SEQ ID NO: 948499 - RNA, 22 nt, Human
ucuggccaacccucaaguugua

SEQ ID NO: 948500 - RNA, 22 nt, Human
ugauugaagaggugaggaaguu

SEQ ID NO: 948501 - RNA, 22 nt, Human
uacauguaggugacauuuuaau

SEQ ID NO: 948502 - RNA, 22 nt, Human
ggcucccugccuguccucaguc

SEQ ID NO: 948503 - RNA, 22 nt, Human
caggcacugugcugagcucugc

SEQ ID NO: 948504 - RNA, 22 nt, Human
aggcugcagugcagguaggauu

SEQ ID NO: 948505 - RNA, 21 nt, Human
gcugagagguugggaaguuca

SEQ ID NO: 948506 - RNA, 22 nt, Human
gcuguggcuguacagagaccau

SEQ ID NO: 948507 - RNA, 22 nt, Human
gcucaagggaugggagugggug

SEQ ID NO: 948508 - RNA, 22 nt, Human
caaaugcaaaauauaacccugu

SEQ ID NO: 948509 - RNA, 22 nt, Human
uggggcugugagacuacaggau

SEQ ID NO: 948510 - RNA, 22 nt, Human
caggaaugacugcagauggggc

SEQ ID NO: 948511 - RNA, 22 nt, Human
gugcaguggcagauccuagcuc

SEQ ID NO: 948512 - RNA, 18 nt, Human
ucucagaggccauccuag

SEQ ID NO: 948513 - RNA, 22 nt, Human
gccuggaguacuccuugaagug

SEQ ID NO: 948514 - RNA, 22 nt, Human
aguugcagacgcagagauguug

SEQ ID NO: 948515 - RNA, 21 nt, Human
uacauuugagagcuauaagcu

SEQ ID NO: 948516 - RNA, 22 nt, Human
aaacagaaggguagguaaacau

SEQ ID NO: 948517 - RNA, 19 nt, Human
agcaccugugagagccugg

SEQ ID NO: 948518 - RNA, 22 nt, Human
uaguccagccuuggguguagcc

SEQ ID NO: 948519 - RNA, 22 nt, Human
cauggggagacaccuagggaaa

SEQ ID NO: 948520 - RNA, 22 nt, Human
ccaugagcuucaacugacacag

SEQ ID NO: 948521 - RNA, 22 nt, Human
uuugcaguuucauugcugaaau

SEQ ID NO: 948522 - RNA, 22 nt, Human
ucugccugcaguguggcagggc

SEQ ID NO: 948523 - RNA, 22 nt, Human
ucagagaguuggaaagaauuaa

SEQ ID NO: 948524 - RNA, 22 nt, Human
gcaagcaguuguggcuucugag

SEQ ID NO: 948525 - RNA, 22 nt, Human
gaaggaagugcucauacuaguu

SEQ ID NO: 948526 - RNA, 22 nt, Human
acugcagccuuugggcucauaa

SEQ ID NO: 948527 - RNA, 22 nt, Human
uuauucuuuucuccagaauccc

SEQ ID NO: 948528 - RNA, 22 nt, Human
ucugcaggaaaaaagugccugg

SEQ ID NO: 948529 - RNA, 22 nt, Human
guuuuuccuugcugaggacccg

SEQ ID NO: 948530 - RNA, 22 nt, Human
gcugucccaugguugcaagaug

SEQ ID NO: 948531 - RNA, 23 nt, Human
ccaaagucgaagucuaguccaga

SEQ ID NO: 948532 - RNA, 22 nt, Human
gugucacaugguuuacugcagc

SEQ ID NO: 948533 - RNA, 19 nt, Human
uugaaauuguuugauaugg

SEQ ID NO: 948534 - RNA, 22 nt, Human
agcugccauccgaggugucaga

SEQ ID NO: 948535 - RNA, 22 nt, Human
uaaacagaaagcagauguacuu

SEQ ID NO: 948536 - RNA, 22 nt, Human
auccaggcugcgggucucaagu

SEQ ID NO: 948537 - RNA, 22 nt, Human
ucuugcuaaagaccaacacauu

SEQ ID NO: 948538 - RNA, 22 nt, Human
cuggccaggcucucacgugguc

SEQ ID NO: 948539 - RNA, 22 nt, Human
gagcuggcuaauacugacuuau

SEQ ID NO: 948540 - RNA, 22 nt, Human
acucaggaaaugagaggcucuc

SEQ ID NO: 948541 - RNA, 22 nt, Human
gucucagauucagacaucuaca

SEQ ID NO: 948542 - RNA, 22 nt, Human
ggagcugcauuuagggagccuu

SEQ ID NO: 948543 - RNA, 19 nt, Human
ugcagaagacacaguggug

SEQ ID NO: 948544 - RNA, 18 nt, Human
gguggccuugacuucucu

SEQ ID NO: 948545 - RNA, 23 nt, Human
uggccugcagaguuucugcuggg

SEQ ID NO: 948546 - RNA, 22 nt, Human
ucauuucaaugauacuacuaag

SEQ ID NO: 948547 - RNA, 22 nt, Human
ggaggccaaggcagguggauca

SEQ ID NO: 948548 - RNA, 22 nt, Human
uccaggagguugagacugcagu

SEQ ID NO: 948549 - RNA, 22 nt, Human
ggcucaggaccugggauugcca

SEQ ID NO: 948550 - RNA, 22 nt, Human
ugucuagggagcugcucaggcu

SEQ ID NO: 948551 - RNA, 22 nt, Human
uuccuggcaccaccacuucuag

SEQ ID NO: 948552 - RNA, 22 nt, Human
ggccucagugggccgcugcagg

SEQ ID NO: 948553 - RNA, 22 nt, Human
ucuggccugaaaguccaugcuu

SEQ ID NO: 948554 - RNA, 22 nt, Human
acaugcuuucuagguccuucug

SEQ ID NO: 948555 - RNA, 22 nt, Human
gacuccuggcuuucccucuuag

SEQ ID NO: 948556 - RNA, 22 nt, Human
cuuuuccacugagccucacaaa

SEQ ID NO: 948557 - RNA, 21 nt, Human
acagcauguuuguguguuugc

SEQ ID NO: 948558 - RNA, 22 nt, Human
gagguagccacagauagagacu

SEQ ID NO: 948559 - RNA, 22 nt, Human
agggggugcccagaugaaggau

SEQ ID NO: 948560 - RNA, 22 nt, Human
cccaggaggcagagguuggagc

SEQ ID NO: 948561 - RNA, 22 nt, Human
cuucaguucuaaaguagaaugu

SEQ ID NO: 948562 - RNA, 22 nt, Human
ucagcagggcugugguguggcu

SEQ ID NO: 948563 - RNA, 22 nt, Human
cucugcuuuuuaaaaggagucc

SEQ ID NO: 948564 - RNA, 22 nt, Human
cagagcugcucaugguggccag

SEQ ID NO: 948565 - RNA, 22 nt, Human
ccugggagguggauguugcggu

SEQ ID NO: 948566 - RNA, 22 nt, Human
gugugucuugaccaggaucgga

SEQ ID NO: 948567 - RNA, 22 nt, Human
cugccuguuagucuagcaguua

SEQ ID NO: 948568 - RNA, 22 nt, Human
ccugucuguccucucaugagcc

SEQ ID NO: 948569 - RNA, 22 nt, Human
uucaguuucagucuugcaaaaa

SEQ ID NO: 948570 - RNA, 22 nt, Human
agaaacuucagcuauucuuuug

SEQ ID NO: 948571 - RNA, 22 nt, Human
aauaauuuugagagccuggaaa

SEQ ID NO: 948572 - RNA, 21 nt, Human
ccuauugaauauaggaagauu

SEQ ID NO: 948573 - RNA, 22 nt, Human
uguacaguauauuucaaagcca

SEQ ID NO: 948574 - RNA, 22 nt, Human
cuuacagagaagaaaauguagu

SEQ ID NO: 948575 - RNA, 22 nt, Human
uggcacaugguaagacucagua

SEQ ID NO: 948576 - RNA, 22 nt, Human
ggcaccuggagguuuacuggau

SEQ ID NO: 948577 - RNA, 22 nt, Human
augcuguggaaguuccugaagc

SEQ ID NO: 948578 - RNA, 22 nt, Human
ggcagaagaaaggcuaagucuc

SEQ ID NO: 948579 - RNA, 23 nt, Human
cucugcaggagagugggcagggc

SEQ ID NO: 948580 - RNA, 22 nt, Human
aaggcagccuuuguuugauuga

SEQ ID NO: 948581 - RNA, 22 nt, Human
agccuugaguucaagugcuggc

SEQ ID NO: 948582 - RNA, 23 nt, Human
aaagacugcugagaauuuuagga

SEQ ID NO: 948583 - RNA, 21 nt, Human
cugcuguggcccccgacaugc

SEQ ID NO: 948584 - RNA, 22 nt, Human
aaaaucaguacacuuuauuuug

SEQ ID NO: 948585 - RNA, 22 nt, Human
uggcucugcaccucaguguacc

SEQ ID NO: 948586 - RNA, 22 nt, Human
cacugaaauauuaauaucuuau

SEQ ID NO: 948587 - RNA, 22 nt, Human
acuccaggcaucugcuucugcu

SEQ ID NO: 948588 - RNA, 22 nt, Human
uauuccagaugaaaucauucag

SEQ ID NO: 948589 - RNA, 23 nt, Human
ugggaguguugggaucucugcuc

SEQ ID NO: 948590 - RNA, 22 nt, Human
ccugugcccucagccuggcucu

SEQ ID NO: 948591 - RNA, 22 nt, Human
aggcagagcuggguuuugaaau

SEQ ID NO: 948592 - RNA, 22 nt, Human
ucuuagaaaugaaguucuuucu

SEQ ID NO: 948593 - RNA, 21 nt, Human
ucauuuuuauugcuaccuugc

SEQ ID NO: 948594 - RNA, 22 nt, Human
ugcaggugcguuuucaagccuc

SEQ ID NO: 948595 - RNA, 17 nt, Human
cccaugagcccacuccc

SEQ ID NO: 948596 - RNA, 22 nt, Human
guuuggggucugcagagcggcg

SEQ ID NO: 948597 - RNA, 22 nt, Human
ccuguucaugaaacugcuuucc

SEQ ID NO: 948598 - RNA, 22 nt, Human
cauagaaacugagacaaggauu

SEQ ID NO: 948599 - RNA, 22 nt, Human
agcaggugaauuccuggaugug

SEQ ID NO: 948600 - RNA, 22 nt, Human
acucugaggcaggucagggcag

SEQ ID NO: 948601 - RNA, 22 nt, Human
cucaggauguacuacagaaggc

SEQ ID NO: 948602 - RNA, 23 nt, Human
aaggccagaauuucaauggugcc

SEQ ID NO: 948603 - RNA, 18 nt, Human
gaaaggagagacaguagg

SEQ ID NO: 948604 - RNA, 22 nt, Human
caaagggcucuagacucagcag

SEQ ID NO: 948605 - RNA, 22 nt, Human
gccugcuggcuguccauugcag

SEQ ID NO: 948606 - RNA, 22 nt, Human
uucauuccuucuguaccuugcc

SEQ ID NO: 948607 - RNA, 22 nt, Human
guauuaggugguggaauuguag

SEQ ID NO: 948608 - RNA, 19 nt, Human
agucugcauuucuagcaag

SEQ ID NO: 948609 - RNA, 22 nt, Human
caacugugaauuuuaugauacc

SEQ ID NO: 948610 - RNA, 20 nt, Human
ugggccugagccugugggcu

SEQ ID NO: 948611 - RNA, 22 nt, Human
cuuaagaugaggucaugcuaua

SEQ ID NO: 948612 - RNA, 22 nt, Human
aaagguaacaguuauaaccagg

SEQ ID NO: 948613 - RNA, 22 nt, Human
uuauugccugauugaggucauu

SEQ ID NO: 948614 - RNA, 22 nt, Human
ucuggagcuggagggcaaggca

SEQ ID NO: 948615 - RNA, 22 nt, Human
agcugguggauuaugcuguaca

SEQ ID NO: 948616 - RNA, 22 nt, Human
caggcaggagccagggauucca

SEQ ID NO: 948617 - RNA, 22 nt, Human
auguguauugagcaccuacugc

SEQ ID NO: 948618 - RNA, 22 nt, Human
aucagacucagaaaugacgugg

SEQ ID NO: 948619 - RNA, 22 nt, Human
agggucccgaaggagacagcaa

SEQ ID NO: 948620 - RNA, 22 nt, Human
caccaggcuggagugcagaggu

SEQ ID NO: 948621 - RNA, 22 nt, Human
agagacaccgcgcaucauggcu

SEQ ID NO: 948622 - RNA, 20 nt, Human
gcaaggcacagugaggaggg

SEQ ID NO: 948623 - RNA, 22 nt, Human
caagaauuguacaaacugggug

SEQ ID NO: 948624 - RNA, 22 nt, Human
aaagccauuacaaaauuucaua

SEQ ID NO: 948625 - RNA, 22 nt, Human
aaucaguuaggguguuaaugag

SEQ ID NO: 948626 - RNA, 22 nt, Human
aucagacucugcauugcagucu

SEQ ID NO: 948627 - RNA, 22 nt, Human
auacacauuacuuucugucuga

SEQ ID NO: 948628 - RNA, 22 nt, Human
aguacauacuucaaauguacuu

SEQ ID NO: 948629 - RNA, 22 nt, Human
acucugcuugggccauaucugg

SEQ ID NO: 948630 - RNA, 22 nt, Human
ccucagagguguggcaucucug

SEQ ID NO: 948631 - RNA, 22 nt, Human
acagaauugaaaguauaaucug

SEQ ID NO: 948632 - RNA, 18 nt, Human
gggcuguguucaugccca

SEQ ID NO: 948633 - RNA, 22 nt, Human
uccugagaugagacagugcugc

SEQ ID NO: 948634 - RNA, 22 nt, Human
cugaaggacacgugaggagcca

SEQ ID NO: 948635 - RNA, 22 nt, Human
uuucucugcugccugugucgau

SEQ ID NO: 948636 - RNA, 22 nt, Human
ucccagcccagauuugugugac

SEQ ID NO: 948637 - RNA, 22 nt, Human
caggggccaggcugucugcugu

SEQ ID NO: 948638 - RNA, 22 nt, Human
ccuccugguaauuagcgaaagg

SEQ ID NO: 948639 - RNA, 22 nt, Human
ugagacaguucugcagcugggu

SEQ ID NO: 948640 - RNA, 22 nt, Human
ccaggaggcggaagguacagug

SEQ ID NO: 948641 - RNA, 22 nt, Human
aggcacaguggcucacaccugu

SEQ ID NO: 948642 - RNA, 22 nt, Human
uucacauuggugauauguuucu

SEQ ID NO: 948643 - RNA, 19 nt, Human
augauacaggugaaaauug

SEQ ID NO: 948644 - RNA, 22 nt, Human
gcaggaguguauuugcauguaa

SEQ ID NO: 948645 - RNA, 17 nt, Human
cucacggaggaugaauc

SEQ ID NO: 948646 - RNA, 22 nt, Human
ucucucagaggccaggguccug

SEQ ID NO: 948647 - RNA, 22 nt, Human
uccugcagagacagaggccuca

SEQ ID NO: 948648 - RNA, 22 nt, Human
uagaaaagaauuuuauuugaua

SEQ ID NO: 948649 - RNA, 20 nt, Human
cccagugaagcauggaagag

SEQ ID NO: 948650 - RNA, 21 nt, Human
ggcagccucuguggaagggga

SEQ ID NO: 948651 - RNA, 22 nt, Human
cuuucacaguccugacugagcg

SEQ ID NO: 948652 - RNA, 22 nt, Human
uuccucugaaauggcuuggaaa

SEQ ID NO: 948653 - RNA, 22 nt, Human
ucccagaaaaaggaggcuauga

SEQ ID NO: 948654 - RNA, 22 nt, Human
caggcagcugcuggguucagcc

SEQ ID NO: 948655 - RNA, 22 nt, Human
ggcccuguccuggcugucuccg

SEQ ID NO: 948656 - RNA, 18 nt, Human
ccagcaugccagaggcug

SEQ ID NO: 948657 - RNA, 22 nt, Human
ugauuuccuaggucuggagaag

SEQ ID NO: 948658 - RNA, 22 nt, Human
ugcccagggauaagccuagaga

SEQ ID NO: 948659 - RNA, 22 nt, Human
accuucaaugaaaauaauaguc

SEQ ID NO: 948660 - RNA, 22 nt, Human
ggcugggcucgcugauuggcug

SEQ ID NO: 948661 - RNA, 22 nt, Human
ugaaggcauugaugaaggaauc

SEQ ID NO: 948662 - RNA, 22 nt, Human
uggcacugcacuuuaagauuua

SEQ ID NO: 948663 - RNA, 22 nt, Human
ccuggcuguggcggugcucuca

SEQ ID NO: 948664 - RNA, 22 nt, Human
cuuccugcauugugccagaguu

SEQ ID NO: 948665 - RNA, 22 nt, Human
uggcucaguuugggggauugaa

SEQ ID NO: 948666 - RNA, 22 nt, Human
ggcuuggaaauugcaggacaca

SEQ ID NO: 948667 - RNA, 23 nt, Human
uggaccugaaccagugccucugu

SEQ ID NO: 948668 - RNA, 22 nt, Human
uguuaaucaaucaacaguauua

SEQ ID NO: 948669 - RNA, 22 nt, Human
acuuggagagcauugcugggga

SEQ ID NO: 948670 - RNA, 22 nt, Human
cuuguucaguugccucuccugc

SEQ ID NO: 948671 - RNA, 19 nt, Human
ugcagccacgugagagacu

SEQ ID NO: 948672 - RNA, 22 nt, Human
uccugccucuuuucuuauucca

SEQ ID NO: 948673 - RNA, 22 nt, Human
uuagaaagaacuuuagauauca

SEQ ID NO: 948674 - RNA, 22 nt, Human
ucagcaaugugauacugugcaa

SEQ ID NO: 948675 - RNA, 22 nt, Human
gcugguuagaaaacagagcuca

SEQ ID NO: 948676 - RNA, 22 nt, Human
cucacugugccuuuucccaaac

SEQ ID NO: 948677 - RNA, 22 nt, Human
uuugcauaggauggacauuuua

SEQ ID NO: 948678 - RNA, 22 nt, Human
aaugcacauguuguaauaaaua

SEQ ID NO: 948679 - RNA, 17 nt, Human
gcagccagugcagcagg

SEQ ID NO: 948680 - RNA, 22 nt, Human
uuauuagagauauuugguuagg

SEQ ID NO: 948681 - RNA, 22 nt, Human
auuuuacuacuccaauuaauga

SEQ ID NO: 948682 - RNA, 22 nt, Human
ucagcaguuuuauaugcagcuu

SEQ ID NO: 948683 - RNA, 22 nt, Human
uggagcaggugcucaggguaau

SEQ ID NO: 948684 - RNA, 22 nt, Human
auaguaacuggcauguuuauga

SEQ ID NO: 948685 - RNA, 22 nt, Human
agguaggguuaauggagauaua

SEQ ID NO: 948686 - RNA, 23 nt, Human
uuucauaugguguggaugaagaa

SEQ ID NO: 948687 - RNA, 22 nt, Human
augcuguguuugagaaccuagg

SEQ ID NO: 948688 - RNA, 22 nt, Human
cauuuucaugaguuucuguuca

SEQ ID NO: 948689 - RNA, 22 nt, Human
uggucuuuaagguagcugucau

SEQ ID NO: 948690 - RNA, 22 nt, Human
uuucaucuuccuuggcauaggu

SEQ ID NO: 948691 - RNA, 22 nt, Human
aggcuguggugcugaaggaggg

SEQ ID NO: 948692 - RNA, 22 nt, Human
augugaggcagcacggagauua

SEQ ID NO: 948693 - RNA, 22 nt, Human
ugcauuguugaauauuucauag

SEQ ID NO: 948694 - RNA, 22 nt, Human
gggagggaagguaccuguguga

SEQ ID NO: 948695 - RNA, 19 nt, Human
ugcccaggccagguugggc

SEQ ID NO: 948696 - RNA, 22 nt, Human
ugagguaggugguaagagauac

SEQ ID NO: 948697 - RNA, 22 nt, Human
auuaaauuuucacuaggcuccc

SEQ ID NO: 948698 - RNA, 22 nt, Human
auuuccuuugcaaagacugugc

SEQ ID NO: 948699 - RNA, 22 nt, Human
cugugggcugaaagugcucccg

SEQ ID NO: 948700 - RNA, 23 nt, Human
ucagugauguugaaccuagcagu

SEQ ID NO: 948701 - RNA, 18 nt, Human
ucuggcucaggacugaac

SEQ ID NO: 948702 - RNA, 22 nt, Human
ugagggagagggcgaaaaugaa

SEQ ID NO: 948703 - RNA, 22 nt, Human
uaaggcacuucaauguuuagaa

SEQ ID NO: 948704 - RNA, 22 nt, Human
ugcugcugauggcaccuaggca

SEQ ID NO: 948705 - RNA, 22 nt, Human
gccaggagggaaaggacaauuu

SEQ ID NO: 948706 - RNA, 22 nt, Human
uuuccuaggagauugaucacau

SEQ ID NO: 948707 - RNA, 22 nt, Human
ugagccuggcggaagcagcgug

SEQ ID NO: 948708 - RNA, 22 nt, Human
auguagcagaagauguuuuccu

SEQ ID NO: 948709 - RNA, 22 nt, Human
uucuucuccgaggagggcuggu

SEQ ID NO: 948710 - RNA, 20 nt, Human
aagagaagaagucuuugaaa

SEQ ID NO: 948711 - RNA, 20 nt, Human
agaggccaguuaggagucua

SEQ ID NO: 948712 - RNA, 22 nt, Human
uuaugacauaugaguacaagua

SEQ ID NO: 948713 - RNA, 22 nt, Human
agggcccucuggcaggccaggc

SEQ ID NO: 948714 - RNA, 23 nt, Human
uuucacaaugagcauuacagaau

SEQ ID NO: 948715 - RNA, 22 nt, Human
ugggccugaaggagcugcgccc

SEQ ID NO: 948716 - RNA, 22 nt, Human
ugucaccagcugcuccucagga

SEQ ID NO: 948717 - RNA, 22 nt, Human
aauuuccaaauuucugucacac

SEQ ID NO: 948718 - RNA, 22 nt, Human
cuggguaaguuccuaaggcuca

SEQ ID NO: 948719 - RNA, 22 nt, Human
agccacaccuguccugccagcu

SEQ ID NO: 948720 - RNA, 22 nt, Human
cccaggagaccugugaaaggac

SEQ ID NO: 948721 - RNA, 22 nt, Human
gucucccaucguuugugaggaa

SEQ ID NO: 948722 - RNA, 22 nt, Human
uacaagagguauauagaaacag

SEQ ID NO: 948723 - RNA, 22 nt, Human
auccaaaucaugucagaagaac

SEQ ID NO: 948724 - RNA, 21 nt, Human
ucucuggaguuagcagagaga

SEQ ID NO: 948725 - RNA, 22 nt, Human
ugucacauguguggcauuuuuc

SEQ ID NO: 948726 - RNA, 22 nt, Human
uccucuggcucuuucccuagga

SEQ ID NO: 948727 - RNA, 22 nt, Human
ugccaggggaccuagggauguc

SEQ ID NO: 948728 - RNA, 22 nt, Human
cugcuguggccagccaggucaa

SEQ ID NO: 948729 - RNA, 22 nt, Human
cacaggggcaaacuguagggga

SEQ ID NO: 948730 - RNA, 22 nt, Human
ucaauucaacacaugcacauug

SEQ ID NO: 948731 - RNA, 22 nt, Human
auuuguaauuucuuaucugugu

SEQ ID NO: 948732 - RNA, 20 nt, Human
uauauguguacauacacaca

SEQ ID NO: 948733 - RNA, 20 nt, Human
uacauucaaaacaaacucug

SEQ ID NO: 948734 - RNA, 22 nt, Human
uguguauuucuggaacagacua

SEQ ID NO: 948735 - RNA, 22 nt, Human
uggcagcaccagcaguguccuu

SEQ ID NO: 948736 - RNA, 22 nt, Human
uuuccucuuuguaccuugacua

SEQ ID NO: 948737 - RNA, 22 nt, Human
ucauuuauaaggaugcaauuaa

SEQ ID NO: 948738 - RNA, 22 nt, Human
cagcucuggcgucagggagcga

SEQ ID NO: 948739 - RNA, 22 nt, Human
uuaagaauggaaugaggaauuu

SEQ ID NO: 948740 - RNA, 22 nt, Human
uauugaaauucuucauguccuc

SEQ ID NO: 948741 - RNA, 22 nt, Human
uaacagaaauagaaaugagagu

SEQ ID NO: 948742 - RNA, 22 nt, Human
uuagagaaauucugguaaugua

SEQ ID NO: 948743 - RNA, 22 nt, Human
gaaggcuggcuuucugagagca

SEQ ID NO: 948744 - RNA, 22 nt, Human
ucugcuguauuagguugaacug

SEQ ID NO: 948745 - RNA, 22 nt, Human
ccacaaguuucagcacccagag

SEQ ID NO: 948746 - RNA, 22 nt, Human
uagcagaaccagcagucaauuu

SEQ ID NO: 948747 - RNA, 22 nt, Human
cugcugugacagcugccguguu

SEQ ID NO: 948748 - RNA, 22 nt, Human
uuugaagugggcauuagaaccu

SEQ ID NO: 948749 - RNA, 22 nt, Human
cagggccuuuuagcaucuucuc

SEQ ID NO: 948750 - RNA, 19 nt, Human
ccuguucaugacucugucc

SEQ ID NO: 948751 - RNA, 20 nt, Human
agagcagcaguuggugaggu

SEQ ID NO: 948752 - RNA, 22 nt, Human
aaguauaagcuauucuucauga

SEQ ID NO: 948753 - RNA, 22 nt, Human
ccucuggcaacuucacagccca

SEQ ID NO: 948754 - RNA, 22 nt, Human
auaugaaaauguuuuagcugua

SEQ ID NO: 948755 - RNA, 22 nt, Human
acucagaaccauuuacucugag

SEQ ID NO: 948756 - RNA, 23 nt, Human
ugucccagagggagggauaggcu

SEQ ID NO: 948757 - RNA, 22 nt, Human
cccuggagugugacgaggcauu

SEQ ID NO: 948758 - RNA, 22 nt, Human
gcaggagagucugugccagguu

SEQ ID NO: 948759 - RNA, 22 nt, Human
gaggcaacacauuuggaaagca

SEQ ID NO: 948760 - RNA, 22 nt, Human
uuccaaagucauguugcugaua

SEQ ID NO: 948761 - RNA, 22 nt, Human
agguaaggcuguaagcuaagcc

SEQ ID NO: 948762 - RNA, 21 nt, Human
gggugcuguggucaugcagga

SEQ ID NO: 948763 - RNA, 22 nt, Human
acugucacuccaacugagucgu

SEQ ID NO: 948764 - RNA, 22 nt, Human
cuuguaaaagguacauuaugcu

SEQ ID NO: 948765 - RNA, 20 nt, Human
agauuauuccuaagauuucu

SEQ ID NO: 948766 - RNA, 22 nt, Human
cagaguccugcaccagcuccag

SEQ ID NO: 948767 - RNA, 22 nt, Human
caggcucccugggcaguggcag

SEQ ID NO: 948768 - RNA, 21 nt, Human
gauguuggaggcuggggucug

SEQ ID NO: 948769 - RNA, 22 nt, Human
ugaaggaauggaggaucagagc

SEQ ID NO: 948770 - RNA, 22 nt, Human
ggcaaggccuugcccagcauuc

SEQ ID NO: 948771 - RNA, 22 nt, Human
uggugagcucuuuagacuggga

SEQ ID NO: 948772 - RNA, 20 nt, Human
ggcugccuccuuccuuuccu

SEQ ID NO: 948773 - RNA, 22 nt, Human
agaacagcagcacgucaagcug

SEQ ID NO: 948774 - RNA, 22 nt, Human
aggggccauuguucugcccgcu

SEQ ID NO: 948775 - RNA, 22 nt, Human
uggaggcaccacuggcugcccg

SEQ ID NO: 948776 - RNA, 18 nt, Human
ggcucaggcuauccuaac

SEQ ID NO: 948777 - RNA, 22 nt, Human
uggcucagcaagacauugaccu

SEQ ID NO: 948778 - RNA, 20 nt, Human
uacuuaggcuuguuuuggcc

SEQ ID NO: 948779 - RNA, 22 nt, Human
cuggugguucaggagaauggcu

SEQ ID NO: 948780 - RNA, 20 nt, Human
uccaggagaacugggagccg

SEQ ID NO: 948781 - RNA, 22 nt, Human
acugagcugcaagucagggagg

SEQ ID NO: 948782 - RNA, 22 nt, Human
agccaggaauuggacaacacau

SEQ ID NO: 948783 - RNA, 22 nt, Human
caggcagcucgaugccuuguug

SEQ ID NO: 948784 - RNA, 22 nt, Human
aggguccaucaaggacugcaca

SEQ ID NO: 948785 - RNA, 22 nt, Human
gccuccuggauuuuagugccau

SEQ ID NO: 948786 - RNA, 22 nt, Human
ucugggcucugucagcaccucu

SEQ ID NO: 948787 - RNA, 22 nt, Human
ucaggcaggcagagggcaaaug

SEQ ID NO: 948788 - RNA, 22 nt, Human
acaggcugacuuccugccaugu

SEQ ID NO: 948789 - RNA, 22 nt, Human
uauucacauucucaggccuggu

SEQ ID NO: 948790 - RNA, 22 nt, Human
gccagcugcaucuccugggcug

SEQ ID NO: 948791 - RNA, 22 nt, Human
acagagcuuaggaugacuccca

SEQ ID NO: 948792 - RNA, 22 nt, Human
cuuauggcuguagucuggaagu

SEQ ID NO: 948793 - RNA, 22 nt, Human
agcaggguauguuagagcugua

SEQ ID NO: 948794 - RNA, 22 nt, Human
cauagaaaagaguagguaaugu

SEQ ID NO: 948795 - RNA, 22 nt, Human
ucagccuggcaggauggccugg

SEQ ID NO: 948796 - RNA, 20 nt, Human
aggagggaccuggauuggcg

SEQ ID NO: 948797 - RNA, 22 nt, Human
gccuggaguucagccaaguccc

SEQ ID NO: 948798 - RNA, 22 nt, Human
agcacauucuugccuuaaccuc

SEQ ID NO: 948799 - RNA, 19 nt, Human
ucuggcuccgccucuuagu

SEQ ID NO: 948800 - RNA, 19 nt, Human
gggaugggcccucacccuc

SEQ ID NO: 948801 - RNA, 22 nt, Human
gcuggccaguguggugaccacc

SEQ ID NO: 948802 - RNA, 22 nt, Human
uccaggaggaggaaggcugcca

SEQ ID NO: 948803 - RNA, 22 nt, Human
cagaggcucuuccucacugccc

SEQ ID NO: 948804 - RNA, 22 nt, Human
uccuggagagugggcgagcaca

SEQ ID NO: 948805 - RNA, 22 nt, Human
ugcauguggaccccuggugccu

SEQ ID NO: 948806 - RNA, 22 nt, Human
aggccuguuggcgugggcucua

SEQ ID NO: 948807 - RNA, 22 nt, Human
ucuuugcaggagcccuuugaac

SEQ ID NO: 948808 - RNA, 22 nt, Human
cagggccuccuaaggcaucuaa

SEQ ID NO: 948809 - RNA, 22 nt, Human
uccaggagugcugguuagagua

SEQ ID NO: 948810 - RNA, 22 nt, Human
aucauguugcucaaaauuaaac

SEQ ID NO: 948811 - RNA, 22 nt, Human
ugccugccaugcagaaagcuga

SEQ ID NO: 948812 - RNA, 22 nt, Human
ugcauuauaacugaauguuguu

SEQ ID NO: 948813 - RNA, 22 nt, Human
cuggcucagacagcugugcagu

SEQ ID NO: 948814 - RNA, 22 nt, Human
cauggccuugagugacugcacu

SEQ ID NO: 948815 - RNA, 22 nt, Human
uguggucucguuauguugccca

SEQ ID NO: 948816 - RNA, 22 nt, Human
gccacagggcagaugcgcagag

SEQ ID NO: 948817 - RNA, 20 nt, Human
ccagcauguacacaugugga

SEQ ID NO: 948818 - RNA, 22 nt, Human
gagaaacuuggaguuauucugg

SEQ ID NO: 948819 - RNA, 22 nt, Human
ugggcucucuggcaggaaggcu

SEQ ID NO: 948820 - RNA, 22 nt, Human
cuccuuccugccccagugauaa

SEQ ID NO: 948821 - RNA, 22 nt, Human
uugggagcuggaagcaaggccu

SEQ ID NO: 948822 - RNA, 18 nt, Human
gagcccugagucugcaca

SEQ ID NO: 948823 - RNA, 21 nt, Human
ccugugugucugacugggcua

SEQ ID NO: 948824 - RNA, 19 nt, Human
uccaccuuucuucauuugg

SEQ ID NO: 948825 - RNA, 22 nt, Human
gccugucucuuggaacuuggua

SEQ ID NO: 948826 - RNA, 22 nt, Human
gaggagguuccggguggagaag

SEQ ID NO: 948827 - RNA, 22 nt, Human
ggccugagcuugggcagcguau

SEQ ID NO: 948828 - RNA, 21 nt, Human
gcagcuggucucagagcuugc

SEQ ID NO: 948829 - RNA, 22 nt, Human
aucaguuucuaccauguggaau

SEQ ID NO: 948830 - RNA, 22 nt, Human
ggaggcucccacgcagcucaca

SEQ ID NO: 948831 - RNA, 22 nt, Human
auguuacacauaggcauaaaug

SEQ ID NO: 948832 - RNA, 22 nt, Human
aguguuucccaguaggaugaaa

SEQ ID NO: 948833 - RNA, 22 nt, Human
gucauuccuauccauuugauac

SEQ ID NO: 948834 - RNA, 22 nt, Human
agggccugggguagcuuacugc

SEQ ID NO: 948835 - RNA, 22 nt, Human
auuacaaaagaagggagaaggu

SEQ ID NO: 948836 - RNA, 22 nt, Human
ccacucugcugugcuccaugau

SEQ ID NO: 948837 - RNA, 22 nt, Human
agggugggcuagacucuucccc

SEQ ID NO: 948838 - RNA, 22 nt, Human
ucacagugagccaugucagaga

SEQ ID NO: 948839 - RNA, 22 nt, Human
aggcucuguuauucuagagggc

SEQ ID NO: 948840 - RNA, 22 nt, Human
ugaaagcuguccacuaggcugu

SEQ ID NO: 948841 - RNA, 22 nt, Human
ccucgaccuccccaggcucagg

SEQ ID NO: 948842 - RNA, 22 nt, Human
aucagcaagcaugguuaggugu

SEQ ID NO: 948843 - RNA, 22 nt, Human
auauuaggaguuaaauguauua

SEQ ID NO: 948844 - RNA, 22 nt, Human
auggaaagccaguguuccauca

SEQ ID NO: 948845 - RNA, 17 nt, Human
aggugcagaggcagagc

SEQ ID NO: 948846 - RNA, 22 nt, Human
ugcaugcauaaauguacacaca

SEQ ID NO: 948847 - RNA, 22 nt, Human
gugagcaggauuucauggugua

SEQ ID NO: 948848 - RNA, 22 nt, Human
gccugguggugugcucaagugg

SEQ ID NO: 948849 - RNA, 22 nt, Human
ucuuuguaacugucuauugaga

SEQ ID NO: 948850 - RNA, 22 nt, Human
ccaggaaauggcuugcuucuuu

SEQ ID NO: 948851 - RNA, 22 nt, Human
ugcauugccucuauucauuaua

SEQ ID NO: 948852 - RNA, 22 nt, Human
acaggccugacacacagagggc

SEQ ID NO: 948853 - RNA, 22 nt, Human
ucagcuccacagcuccucugcc

SEQ ID NO: 948854 - RNA, 22 nt, Human
gagccugggacugggggucaug

SEQ ID NO: 948855 - RNA, 22 nt, Human
gaagcccaggcuuccuuggcuu

SEQ ID NO: 948856 - RNA, 22 nt, Human
gagaggugaauguggaugccac

SEQ ID NO: 948857 - RNA, 22 nt, Human
agaaaucucaguaucucaggga

SEQ ID NO: 948858 - RNA, 22 nt, Human
aaagacauggaacuagagaugg

SEQ ID NO: 948859 - RNA, 22 nt, Human
caggcugagcucuggccugggc

SEQ ID NO: 948860 - RNA, 22 nt, Human
gccauuuagggaggcaagguga

SEQ ID NO: 948861 - RNA, 22 nt, Human
ccaaagugcugggguuacaggc

SEQ ID NO: 948862 - RNA, 22 nt, Human
cuguuuauggagguaaggcauc

SEQ ID NO: 948863 - RNA, 22 nt, Human
ccugagugaauucccucacugu

SEQ ID NO: 948864 - RNA, 22 nt, Human
uuuucaguaaugucuacauaau

SEQ ID NO: 948865 - RNA, 22 nt, Human
gggcuucucuuuagugagcuga

SEQ ID NO: 948866 - RNA, 22 nt, Human
uagagcuagcuucaaaaugcga

SEQ ID NO: 948867 - RNA, 22 nt, Human
ugcagggccuucuagaccaugg

SEQ ID NO: 948868 - RNA, 22 nt, Human
ggcugggcaaacaagacucuuc

SEQ ID NO: 948869 - RNA, 22 nt, Human
auuucucuuagcaagacauuac

SEQ ID NO: 948870 - RNA, 22 nt, Human
ccugagccugaguggugcaggg

SEQ ID NO: 948871 - RNA, 22 nt, Human
ggucauugaaaucagaaggguu

SEQ ID NO: 948872 - RNA, 22 nt, Human
gggcccuggauuuaagcaugga

SEQ ID NO: 948873 - RNA, 22 nt, Human
aggauuugaaccugcauccagu

SEQ ID NO: 948874 - RNA, 22 nt, Human
uggccucuggcugaggacuaac

SEQ ID NO: 948875 - RNA, 22 nt, Human
gcugucuuccuugcuccaaggg

SEQ ID NO: 948876 - RNA, 22 nt, Human
ugcagggcccuugggguugaac

SEQ ID NO: 948877 - RNA, 22 nt, Human
cagaggcugggaccucaggcau

SEQ ID NO: 948878 - RNA, 22 nt, Human
agugcacagcgugauguauugg

SEQ ID NO: 948879 - RNA, 22 nt, Human
uccaaggguucaugugcauuca

SEQ ID NO: 948880 - RNA, 22 nt, Human
gaagcagcaaguauaggacagg

SEQ ID NO: 948881 - RNA, 22 nt, Human
uugcauuuaaguagauguuaca

SEQ ID NO: 948882 - RNA, 22 nt, Human
guucacaaaguacuguaugcau

SEQ ID NO: 948883 - RNA, 22 nt, Human
uguucagagacagaaauucuaa

SEQ ID NO: 948884 - RNA, 22 nt, Human
uggcccugcuggccaaaggcua

SEQ ID NO: 948885 - RNA, 22 nt, Human
caggcacucagucuggaucccu

SEQ ID NO: 948886 - RNA, 22 nt, Human
gcucugagaggugcagcaguaa

SEQ ID NO: 948887 - RNA, 22 nt, Human
agccacagcccacaggacucuu

SEQ ID NO: 948888 - RNA, 22 nt, Human
agggagcuuccgaacuacagcu

SEQ ID NO: 948889 - RNA, 22 nt, Human
aggcacuguggaagacaugguu

SEQ ID NO: 948890 - RNA, 22 nt, Human
agggcccaggacagcaucaggg

SEQ ID NO: 948891 - RNA, 19 nt, Human
augucccaccgccccugag

SEQ ID NO: 948892 - RNA, 22 nt, Human
uccaagggcagcagccauagcc

SEQ ID NO: 948893 - RNA, 22 nt, Human
auccuugacacacuccaguacu

SEQ ID NO: 948894 - RNA, 22 nt, Human
caaggcugcugcgggucgcacc

SEQ ID NO: 948895 - RNA, 20 nt, Human
ugagugauggaggcggguca

SEQ ID NO: 948896 - RNA, 22 nt, Human
cccaggaggcagagauagcagu

SEQ ID NO: 948897 - RNA, 22 nt, Human
agcagaugagccucaugacugg

SEQ ID NO: 948898 - RNA, 22 nt, Human
uggcaaggccacaggugcaguu

SEQ ID NO: 948899 - RNA, 22 nt, Human
uaacagaaacagauaaguguaa

SEQ ID NO: 948900 - RNA, 22 nt, Human
aagcaauauacugauaugauua

SEQ ID NO: 948901 - RNA, 22 nt, Human
ucaaaguagggguaagccaggc

SEQ ID NO: 948902 - RNA, 22 nt, Human
uccuugaacagagggccugggu

SEQ ID NO: 948903 - RNA, 22 nt, Human
gcucagagauguucaguagcuu

SEQ ID NO: 948904 - RNA, 22 nt, Human
agaggcugucccuugcuauucc

SEQ ID NO: 948905 - RNA, 22 nt, Human
ugucuuuggaauauuuagcuga

SEQ ID NO: 948906 - RNA, 22 nt, Human
ucuuuccuuagaauaauucuuu

SEQ ID NO: 948907 - RNA, 20 nt, Human
uccuucaggcagggccuagu

SEQ ID NO: 948908 - RNA, 22 nt, Human
auguuauaguuauaaaaugagg

SEQ ID NO: 948909 - RNA, 22 nt, Human
ccugggaagagcugacaggagg

SEQ ID NO: 948910 - RNA, 22 nt, Human
aagcagaugggacuccaaggca

SEQ ID NO: 948911 - RNA, 22 nt, Human
cuggccaagcuucucuaagcag

SEQ ID NO: 948912 - RNA, 22 nt, Human
aucuacagcugucugcacagua

SEQ ID NO: 948913 - RNA, 22 nt, Human
augucaaaucaguuuuaucaga

SEQ ID NO: 948914 - RNA, 22 nt, Human
ccuggaaguuggagguugcagu

SEQ ID NO: 948915 - RNA, 22 nt, Human
ugcagggccagacuggguugga

SEQ ID NO: 948916 - RNA, 22 nt, Human
cacugccaccugcaugcccuga

SEQ ID NO: 948917 - RNA, 22 nt, Human
gcagcaggcacggucucgacau

SEQ ID NO: 948918 - RNA, 22 nt, Human
uccucuggggcgugguccugga

SEQ ID NO: 948919 - RNA, 22 nt, Human
aaguuugugucagagcuguuac

SEQ ID NO: 948920 - RNA, 21 nt, Human
ucacauuucucauggguaaau

SEQ ID NO: 948921 - RNA, 22 nt, Human
agcuagaauguuccuuuucauu

SEQ ID NO: 948922 - RNA, 22 nt, Human
caguagcaggcacucagcacgu

SEQ ID NO: 948923 - RNA, 22 nt, Human
uuaaacagucccagaggcugac

SEQ ID NO: 948924 - RNA, 22 nt, Human
gggcuggcaggaccugggcuga

SEQ ID NO: 948925 - RNA, 22 nt, Human
aguugacauccauaacaggaag

SEQ ID NO: 948926 - RNA, 22 nt, Human
ugcaugugcccacucuggcuua

SEQ ID NO: 948927 - RNA, 22 nt, Human
aucuagaaaguguugaagauca

SEQ ID NO: 948928 - RNA, 22 nt, Human
ugagagugguucagcucagaag

SEQ ID NO: 948929 - RNA, 22 nt, Human
uucuucaaacaaaaguggcaug

SEQ ID NO: 948930 - RNA, 22 nt, Human
acauuaaugaggugaugacaca

SEQ ID NO: 948931 - RNA, 17 nt, Human
acagagguuauacagac

SEQ ID NO: 948932 - RNA, 22 nt, Human
auuaaauuggacgcugggggaa

SEQ ID NO: 948933 - RNA, 22 nt, Human
uugaacauuggcaauuucauau

SEQ ID NO: 948934 - RNA, 22 nt, Human
uggcugccuagucccucagccu

SEQ ID NO: 948935 - RNA, 22 nt, Human
aaaugguguuucuaaugcuaga

SEQ ID NO: 948936 - RNA, 22 nt, Human
ucacuucacacccacuaucaug

SEQ ID NO: 948937 - RNA, 22 nt, Human
uguuuaaucuauaaaauggaga

SEQ ID NO: 948938 - RNA, 22 nt, Human
ccagagugacgugaagugugaa

SEQ ID NO: 948939 - RNA, 22 nt, Human
ugucccagcagcuggguucucu

SEQ ID NO: 948940 - RNA, 22 nt, Human
gcaaagcugggugugaaugcac

SEQ ID NO: 948941 - RNA, 22 nt, Human
auugcuaggaacagguugcacc

SEQ ID NO: 948942 - RNA, 20 nt, Human
acugggcauaccuguccugu

SEQ ID NO: 948943 - RNA, 22 nt, Human
auaagguaugaaaaguaaaugg

SEQ ID NO: 948944 - RNA, 22 nt, Human
aacuuucagcaaguaauucugg

SEQ ID NO: 948945 - RNA, 22 nt, Human
uggccggggcugauggacagug

SEQ ID NO: 948946 - RNA, 22 nt, Human
caucugccuaaguggcccuguu

SEQ ID NO: 948947 - RNA, 22 nt, Human
uuucaaacauaucuucauuacu

SEQ ID NO: 948948 - RNA, 22 nt, Human
gcagagcuaucuucuggauuug

SEQ ID NO: 948949 - RNA, 22 nt, Human
uggucucugacucugaagaccc

SEQ ID NO: 948950 - RNA, 22 nt, Human
gaguuauuuugagcagaugguu

SEQ ID NO: 948951 - RNA, 22 nt, Human
agagugauccuaauugauuugg

SEQ ID NO: 948952 - RNA, 22 nt, Human
uugaagcagagaaauacuugaa

SEQ ID NO: 948953 - RNA, 22 nt, Human
uacaguucacaguaucauaaau

SEQ ID NO: 948954 - RNA, 22 nt, Human
cuccuucccuucaaguguuccu

SEQ ID NO: 948955 - RNA, 22 nt, Human
uuguuuuuaugaacauccagga

SEQ ID NO: 948956 - RNA, 22 nt, Human
agagcagauggagcuggaagag

SEQ ID NO: 948957 - RNA, 22 nt, Human
gcacuuggauauacaaaugaag

SEQ ID NO: 948958 - RNA, 19 nt, Human
gcauuucucuuuacagcca

SEQ ID NO: 948959 - RNA, 22 nt, Human
aaaagaggagugguuuaugaca

SEQ ID NO: 948960 - RNA, 22 nt, Human
ccagucccagcucugccaugcu

SEQ ID NO: 948961 - RNA, 22 nt, Human
uccugagauucugcauuucuaa

SEQ ID NO: 948962 - RNA, 22 nt, Human
gccugagagucugcauuucuaa

SEQ ID NO: 948963 - RNA, 22 nt, Human
ugccagaagugcuuuauaagug

SEQ ID NO: 948964 - RNA, 22 nt, Human
accaggagucuagccuagucaa

SEQ ID NO: 948965 - RNA, 18 nt, Human
cagggcuguggggucacu

SEQ ID NO: 948966 - RNA, 22 nt, Human
ggcacugaucugauuucccucc

SEQ ID NO: 948967 - RNA, 22 nt, Human
augggguggaguccgggcagcg

SEQ ID NO: 948968 - RNA, 22 nt, Human
ccacagggaacaugacagccuu

SEQ ID NO: 948969 - RNA, 22 nt, Human
agggcugccauuucuggcccaa

SEQ ID NO: 948970 - RNA, 22 nt, Human
ucccagcauuaaugccugucag

SEQ ID NO: 948971 - RNA, 22 nt, Human
gaggcugccccuuccucagcug

SEQ ID NO: 948972 - RNA, 22 nt, Human
cccaggagaauauaauguucuu

SEQ ID NO: 948973 - RNA, 22 nt, Human
ugcuggggguucagaugaguaa

SEQ ID NO: 948974 - RNA, 22 nt, Human
caauauucaguggaaaagccau

SEQ ID NO: 948975 - RNA, 22 nt, Human
aggggcuguggaaaccaacucu

SEQ ID NO: 948976 - RNA, 22 nt, Human
agugaaauaugcccauugcugu

SEQ ID NO: 948977 - RNA, 22 nt, Human
aaucuuucccuauuaaaugugg

SEQ ID NO: 948978 - RNA, 22 nt, Human
cagcaggauaugguggagagag

SEQ ID NO: 948979 - RNA, 22 nt, Human
aagcagcauaauugcuauuuua

SEQ ID NO: 948980 - RNA, 22 nt, Human
uuaagacauucagauauuucua

SEQ ID NO: 948981 - RNA, 22 nt, Human
uggcagcaauuugugauguuga

SEQ ID NO: 948982 - RNA, 22 nt, Human
augaaggcaguuaaacgucauc

SEQ ID NO: 948983 - RNA, 19 nt, Human
ucccaggaagcaaauguca

SEQ ID NO: 948984 - RNA, 22 nt, Human
gagcucugacugcugggugaca

SEQ ID NO: 948985 - RNA, 22 nt, Human
ggcuccagggaguggagagaag

SEQ ID NO: 948986 - RNA, 22 nt, Human
gucccuaguggaaagacaugau

SEQ ID NO: 948987 - RNA, 17 nt, Human
gagugcugguggagcuc

SEQ ID NO: 948988 - RNA, 20 nt, Human
ucagcucugugccugggaug

SEQ ID NO: 948989 - RNA, 22 nt, Human
ucucugcucaggcaccagcccu

SEQ ID NO: 948990 - RNA, 22 nt, Human
uucaaacaaaacuguucccaua

SEQ ID NO: 948991 - RNA, 22 nt, Human
cacucugcgcugggcgccagcg

SEQ ID NO: 948992 - RNA, 22 nt, Human
auguuuccagguucuuccuaug

SEQ ID NO: 948993 - RNA, 22 nt, Human
uuccuguuucauagaaaacuga

SEQ ID NO: 948994 - RNA, 22 nt, Human
cuuauuauaaaauccuguuuga

SEQ ID NO: 948995 - RNA, 22 nt, Human
ccucuucugcuucaggagcacu

SEQ ID NO: 948996 - RNA, 22 nt, Human
uuauuaggaaaaggucagaugu

SEQ ID NO: 948997 - RNA, 22 nt, Human
gggugcugacuggggccugaaa

SEQ ID NO: 948998 - RNA, 22 nt, Human
ucacaccuuuuagaauuacuau

SEQ ID NO: 948999 - RNA, 18 nt, Human
acauacauucugucugca

SEQ ID NO: 949000 - RNA, 22 nt, Human
cugcuuugaaaauaaacuuguc

SEQ ID NO: 949001 - RNA, 22 nt, Human
ucauugcagcuucagguguuca

SEQ ID NO: 949002 - RNA, 22 nt, Human
gcuccuggugcaaaguuucuuc

SEQ ID NO: 949003 - RNA, 22 nt, Human
gugacagucaaagacaugacuu

SEQ ID NO: 949004 - RNA, 22 nt, Human
agggcagacuaggauggaagug

SEQ ID NO: 949005 - RNA, 22 nt, Human
auggggugagacuaggauuaaa

SEQ ID NO: 949006 - RNA, 22 nt, Human
agaggccaucugcucugugggg

SEQ ID NO: 949007 - RNA, 23 nt, Human
uggcagugaucaaaagcuuacau

SEQ ID NO: 949008 - RNA, 21 nt, Human
gcugcugccccuagugaggcc

SEQ ID NO: 949009 - RNA, 20 nt, Human
caaguguagaaacuaauaag

SEQ ID NO: 949010 - RNA, 22 nt, Human
acucugugugaguagagccugu

SEQ ID NO: 949011 - RNA, 22 nt, Human
ucaggagaaagccaauuagagu

SEQ ID NO: 949012 - RNA, 22 nt, Human
cugaugcuauaagccacagugg

SEQ ID NO: 949013 - RNA, 22 nt, Human
cacaaaugugcagaaaugugag

SEQ ID NO: 949014 - RNA, 22 nt, Human
ucauugcaggcauuccccugcc

SEQ ID NO: 949015 - RNA, 22 nt, Human
uugaagcauuguggcuuguauu

SEQ ID NO: 949016 - RNA, 22 nt, Human
aaggcagucugguuucaaagca

SEQ ID NO: 949017 - RNA, 22 nt, Human
cugcucugagaggcucuuccua

SEQ ID NO: 949018 - RNA, 22 nt, Human
accuuuuuguucuguucucagc

SEQ ID NO: 949019 - RNA, 22 nt, Human
cucccaggcacagggaggagcc

SEQ ID NO: 949020 - RNA, 22 nt, Human
aagaagagaaaugugcugcugg

SEQ ID NO: 949021 - RNA, 22 nt, Human
uggcucugagacacaggcucuc

SEQ ID NO: 949022 - RNA, 22 nt, Human
ugucuccucauacugucauauu

SEQ ID NO: 949023 - RNA, 22 nt, Human
agaaaagguugaaaguaggauu

SEQ ID NO: 949024 - RNA, 22 nt, Human
uuuuccagauuggacuuagucc

SEQ ID NO: 949025 - RNA, 22 nt, Human
agggcuggcaagggauugaaau

SEQ ID NO: 949026 - RNA, 22 nt, Human
acuucauuguaauauuauagca

SEQ ID NO: 949027 - RNA, 22 nt, Human
ggcagaagauaggacagggaau

SEQ ID NO: 949028 - RNA, 22 nt, Human
uuccuuaguguuagauucugug

SEQ ID NO: 949029 - RNA, 22 nt, Human
caagcagacaguaggccuagaa

SEQ ID NO: 949030 - RNA, 22 nt, Human
agagggcagucucagauuggga

SEQ ID NO: 949031 - RNA, 22 nt, Human
acccaggaggugacacagggcu

SEQ ID NO: 949032 - RNA, 19 nt, Human
gcccugcaggagguggggc

SEQ ID NO: 949033 - RNA, 22 nt, Human
uccucaggagagcuccuaugcc

SEQ ID NO: 949034 - RNA, 22 nt, Human
ucacuguauuugcugaugcaua

SEQ ID NO: 949035 - RNA, 20 nt, Human
aauguauauuuuaugccagg

SEQ ID NO: 949036 - RNA, 22 nt, Human
uuguuucauggggauguuuauu

SEQ ID NO: 949037 - RNA, 20 nt, Human
aaaauauguauaacucuucu

SEQ ID NO: 949038 - RNA, 22 nt, Human
guaucacuuuugagagugagaa

SEQ ID NO: 949039 - RNA, 22 nt, Human
auucaaauuaaguuaauucagc

SEQ ID NO: 949040 - RNA, 22 nt, Human
ccacagagacaggguccuugcu

SEQ ID NO: 949041 - RNA, 22 nt, Human
aggccagcccugggcugagaga

SEQ ID NO: 949042 - RNA, 22 nt, Human
uggcagcugguacagugggucu

SEQ ID NO: 949043 - RNA, 22 nt, Human
ggcuggcaagugucugcucaug

SEQ ID NO: 949044 - RNA, 22 nt, Human
ggagccagggaagcugcuuccu

SEQ ID NO: 949045 - RNA, 20 nt, Human
gcacugaagguuccagggga

SEQ ID NO: 949046 - RNA, 19 nt, Human
gaggucagcaagaaguauu

SEQ ID NO: 949047 - RNA, 22 nt, Human
agacaaagaaaccguagaagca

SEQ ID NO: 949048 - RNA, 22 nt, Human
cuucacaaauggccuagaguuc

SEQ ID NO: 949049 - RNA, 23 nt, Human
ugauuuccagugagucaguggga

SEQ ID NO: 949050 - RNA, 22 nt, Human
gccaggagcccugggcaaguuc

SEQ ID NO: 949051 - RNA, 22 nt, Human
aggccuggugaaugaaguaucu

SEQ ID NO: 949052 - RNA, 22 nt, Human
cugccagcucucuggaggcucu

SEQ ID NO: 949053 - RNA, 20 nt, Human
ccugucugcaauggagguca

SEQ ID NO: 949054 - RNA, 22 nt, Human
uguucuuucaguuagacacagu

SEQ ID NO: 949055 - RNA, 22 nt, Human
ucugaagccaccucugcuuguc

SEQ ID NO: 949056 - RNA, 22 nt, Human
gaggcccugguaggucagagug

SEQ ID NO: 949057 - RNA, 22 nt, Human
uccucaggauguggaguagaau

SEQ ID NO: 949058 - RNA, 22 nt, Human
uucagggagagcgggacgggug

SEQ ID NO: 949059 - RNA, 22 nt, Human
cagagccacugucugccaggca

SEQ ID NO: 949060 - RNA, 22 nt, Human
cugagcuuccaguuccuccagg

SEQ ID NO: 949061 - RNA, 22 nt, Human
cauggcagaaaccugagcugcu

SEQ ID NO: 949062 - RNA, 22 nt, Human
agggcagcagcggcccaggccu

SEQ ID NO: 949063 - RNA, 22 nt, Human
ccuggcagcuguuuggcuuggc

SEQ ID NO: 949064 - RNA, 22 nt, Human
aggccuggcuuugguuugcuga

SEQ ID NO: 949065 - RNA, 20 nt, Human
acuuucucgguuucucaccu

SEQ ID NO: 949066 - RNA, 22 nt, Human
uuuuccuauaugcaaagaaugc

SEQ ID NO: 949067 - RNA, 22 nt, Human
cagcugugcuguauuaagcucu

SEQ ID NO: 949068 - RNA, 22 nt, Human
gucacuguuuccuauuauauuu

SEQ ID NO: 949069 - RNA, 22 nt, Human
gcagggcuauuggaaggagaug

SEQ ID NO: 949070 - RNA, 22 nt, Human
ugagacaguuuuucuauuucca

SEQ ID NO: 949071 - RNA, 22 nt, Human
cuccucuggcuuccuggaggca

SEQ ID NO: 949072 - RNA, 22 nt, Human
aggagcagaacugauucugacu

SEQ ID NO: 949073 - RNA, 22 nt, Human
uuuguaaaaggaggaagcaugg

SEQ ID NO: 949074 - RNA, 22 nt, Human
gugagcaucuuggcagauauga

SEQ ID NO: 949075 - RNA, 22 nt, Human
aggugaguuacaggaggagguc

SEQ ID NO: 949076 - RNA, 22 nt, Human
cagugccucuuaagugucaccc

SEQ ID NO: 949077 - RNA, 22 nt, Human
aggcagcguagcaaggcuagua

SEQ ID NO: 949078 - RNA, 22 nt, Human
uggcuggcgccgggcuagccac

SEQ ID NO: 949079 - RNA, 22 nt, Human
ucagagcugcccaugcaagggg

SEQ ID NO: 949080 - RNA, 17 nt, Human
gcgcagcuccuggcgcg

SEQ ID NO: 949081 - RNA, 22 nt, Human
cugagccaaggggacagugaca

SEQ ID NO: 949082 - RNA, 22 nt, Human
ugagccuggggccugggcagcg

SEQ ID NO: 949083 - RNA, 22 nt, Human
cuccaggaaaauagggaaugag

SEQ ID NO: 949084 - RNA, 20 nt, Human
uugagcuuuuaguacagaca

SEQ ID NO: 949085 - RNA, 23 nt, Human
acuuaaaugguucuuuaucucag

SEQ ID NO: 949086 - RNA, 22 nt, Human
guucacaagcugauugucuuuc

SEQ ID NO: 949087 - RNA, 22 nt, Human
ugcaagagguaaaaugaaagga

SEQ ID NO: 949088 - RNA, 22 nt, Human
aacuccugaggaaauggucuca

SEQ ID NO: 949089 - RNA, 22 nt, Human
ugaggcaggaguucaggcugcg

SEQ ID NO: 949090 - RNA, 22 nt, Human
ccagcagcucccucaggguccg

SEQ ID NO: 949091 - RNA, 22 nt, Human
cuuaaauucuuaaugcccucau

SEQ ID NO: 949092 - RNA, 22 nt, Human
gcugccaguaguuggagcucca

SEQ ID NO: 949093 - RNA, 22 nt, Human
uuucaguucaguuuauuauauc

SEQ ID NO: 949094 - RNA, 22 nt, Human
aauauuaauagaagggguucua

SEQ ID NO: 949095 - RNA, 22 nt, Human
agggaaaggcugaugcuguggg

SEQ ID NO: 949096 - RNA, 16 nt, Human
agcagggcgggaagga

SEQ ID NO: 949097 - RNA, 22 nt, Human
caggcacugugcuagauccuug

SEQ ID NO: 949098 - RNA, 22 nt, Human
augucacagucugacucaguga

SEQ ID NO: 949099 - RNA, 22 nt, Human
acccaggacucucuuccaguag

SEQ ID NO: 949100 - RNA, 22 nt, Human
gaggacugcagaugggugcauc

SEQ ID NO: 949101 - RNA, 22 nt, Human
agcugcccugggcuggagaugg

SEQ ID NO: 949102 - RNA, 22 nt, Human
uucucugagauagacuaagugg

SEQ ID NO: 949103 - RNA, 22 nt, Human
caggcugggcagccuccccggc

SEQ ID NO: 949104 - RNA, 22 nt, Human
gaaggcuugcagcucuguggca

SEQ ID NO: 949105 - RNA, 22 nt, Human
gccagggaggcuguaggguccu

SEQ ID NO: 949106 - RNA, 22 nt, Human
gcugaaugaauguauuuuaaaa

SEQ ID NO: 949107 - RNA, 22 nt, Human
gucuggaguggggccugagaau

SEQ ID NO: 949108 - RNA, 22 nt, Human
uguucucacuggaugcuucaca

SEQ ID NO: 949109 - RNA, 22 nt, Human
ggcauggcuggguucuggugag

SEQ ID NO: 949110 - RNA, 22 nt, Human
gcagagcaguacucucuugacu

SEQ ID NO: 949111 - RNA, 22 nt, Human
aguuuauguaaaauuaguaaug

SEQ ID NO: 949112 - RNA, 22 nt, Human
ggaaaguggugguggaaagagg

SEQ ID NO: 949113 - RNA, 22 nt, Human
gcugucugcaagccaggaaaug

SEQ ID NO: 949114 - RNA, 22 nt, Human
ucucaccaaagccuugaccaua

SEQ ID NO: 949115 - RNA, 22 nt, Human
auuauuauuguugauguuaggg

SEQ ID NO: 949116 - RNA, 22 nt, Human
agcugccgaugcccagcugcau

SEQ ID NO: 949117 - RNA, 22 nt, Human
gaaaugcagaaccugagaccau

SEQ ID NO: 949118 - RNA, 19 nt, Human
uucuccagccugaccugag

SEQ ID NO: 949119 - RNA, 22 nt, Human
uaguaucuuucuauauuuccca

SEQ ID NO: 949120 - RNA, 22 nt, Human
ggguccagcuacaucagggugg

SEQ ID NO: 949121 - RNA, 22 nt, Human
aggcacugcuucuaaguaggaa

SEQ ID NO: 949122 - RNA, 21 nt, Human
aggcacuguuugugguuuggg

SEQ ID NO: 949123 - RNA, 22 nt, Human
uuucauuauucaugcuaguuau

SEQ ID NO: 949124 - RNA, 22 nt, Human
acagggccauuaucuguucuag

SEQ ID NO: 949125 - RNA, 23 nt, Human
ugaaggccuggaggacgcguugu

SEQ ID NO: 949126 - RNA, 22 nt, Human
ggcagcagaacuggcccuguau

SEQ ID NO: 949127 - RNA, 18 nt, Human
cguuuuuccgggauugca

SEQ ID NO: 949128 - RNA, 20 nt, Human
ccuaggcaugcugagucucc

SEQ ID NO: 949129 - RNA, 22 nt, Human
ugugugcaauucuuaacauaca

SEQ ID NO: 949130 - RNA, 23 nt, Human
ccucagcauggcaggagcccagc

SEQ ID NO: 949131 - RNA, 20 nt, Human
auucacaaagccaguguugc

SEQ ID NO: 949132 - RNA, 22 nt, Human
ugcauuccauguguuuccugag

SEQ ID NO: 949133 - RNA, 22 nt, Human
uuuuaauugcaauuaugguccc

SEQ ID NO: 949134 - RNA, 22 nt, Human
agugucauaugccacugcaucc

SEQ ID NO: 949135 - RNA, 22 nt, Human
gcugcucugcuguguaagcagg

SEQ ID NO: 949136 - RNA, 22 nt, Human
aggacuccauguguccuggaga

SEQ ID NO: 949137 - RNA, 22 nt, Human
uuuucauuguuccucgagcauu

SEQ ID NO: 949138 - RNA, 22 nt, Human
caagggaguuacugagggcggg

SEQ ID NO: 949139 - RNA, 23 nt, Human
uaugaacugcauugcuggugugu

SEQ ID NO: 949140 - RNA, 22 nt, Human
ucacagaaauaagauaguuauu

SEQ ID NO: 949141 - RNA, 22 nt, Human
ccaggcauccauugcuuccucu

SEQ ID NO: 949142 - RNA, 22 nt, Human
ugagcccuaagggucaagcagg

SEQ ID NO: 949143 - RNA, 22 nt, Human
aaaguguugauaugugacaucc

SEQ ID NO: 949144 - RNA, 22 nt, Human
aaucauaauuguauacauucau

SEQ ID NO: 949145 - RNA, 22 nt, Human
cagacacagauaugcauauggc

SEQ ID NO: 949146 - RNA, 22 nt, Human
cccagcucaagcagagagcuaa

SEQ ID NO: 949147 - RNA, 22 nt, Human
ugcugucugauucagggugauu

SEQ ID NO: 949148 - RNA, 22 nt, Human
gaguuuaaagcauacauauuuu

SEQ ID NO: 949149 - RNA, 22 nt, Human
cccagcuaccucugcuaggaga

SEQ ID NO: 949150 - RNA, 22 nt, Human
uccugagagcagaguccaggug

SEQ ID NO: 949151 - RNA, 22 nt, Human
acccaggacaugggcacccgug

SEQ ID NO: 949152 - RNA, 22 nt, Human
cacagggcagagaccugggugc

SEQ ID NO: 949153 - RNA, 22 nt, Human
ggcucuggugggaagguuagau

SEQ ID NO: 949154 - RNA, 22 nt, Human
ugucugugaccucuuaggcaag

SEQ ID NO: 949155 - RNA, 20 nt, Human
guaaaauauggucuuugggu

SEQ ID NO: 949156 - RNA, 22 nt, Human
uugagggucuggaucugcugcu

SEQ ID NO: 949157 - RNA, 22 nt, Human
cucaaauauguggucagaaagc

SEQ ID NO: 949158 - RNA, 22 nt, Human
cugggcaguuuauucaguucug

SEQ ID NO: 949159 - RNA, 18 nt, Human
ucaaagucuggcuccacu

SEQ ID NO: 949160 - RNA, 22 nt, Human
acaggacuguggaaggaucucu

SEQ ID NO: 949161 - RNA, 23 nt, Human
uucaagauacgguuuccaggcug

SEQ ID NO: 949162 - RNA, 22 nt, Human
gccaggcagauaugugagcuua

SEQ ID NO: 949163 - RNA, 22 nt, Human
gccucuggucccucaugcugug

SEQ ID NO: 949164 - RNA, 22 nt, Human
gugcuuaauacaugucaauaac

SEQ ID NO: 949165 - RNA, 22 nt, Human
agaagccauugaagcagaccuc

SEQ ID NO: 949166 - RNA, 22 nt, Human
aguaacuaugcuugagaaucag

SEQ ID NO: 949167 - RNA, 22 nt, Human
ccugagaggcccucucacuguc

SEQ ID NO: 949168 - RNA, 22 nt, Human
uggagcugggaguccugggcug

SEQ ID NO: 949169 - RNA, 22 nt, Human
gccucugcucucagguagccuc

SEQ ID NO: 949170 - RNA, 20 nt, Human
ccaagagcaugcaugaggaa

SEQ ID NO: 949171 - RNA, 22 nt, Human
uacaguauuaugagugauugaa

SEQ ID NO: 949172 - RNA, 22 nt, Human
gaguuauucuagguccuuugua

SEQ ID NO: 949173 - RNA, 22 nt, Human
uggucaacaggcagggaugaaa

SEQ ID NO: 949174 - RNA, 22 nt, Human
ccaggagcauuaagagaacaua

SEQ ID NO: 949175 - RNA, 22 nt, Human
cagggcugcuggccgugcccuc

SEQ ID NO: 949176 - RNA, 22 nt, Human
agccacagucaaccuguccaua

SEQ ID NO: 949177 - RNA, 22 nt, Human
gcagcuguggguuccaagucua

SEQ ID NO: 949178 - RNA, 22 nt, Human
agaauaaacugcuuuagggcag

SEQ ID NO: 949179 - RNA, 22 nt, Human
aggcucagauccuuguguccug

SEQ ID NO: 949180 - RNA, 22 nt, Human
gcaggaugccagggcagcagcg

SEQ ID NO: 949181 - RNA, 22 nt, Human
gggagcaggacauaauagcaau

SEQ ID NO: 949182 - RNA, 22 nt, Human
guggcuucuggcugggccucag

SEQ ID NO: 949183 - RNA, 22 nt, Human
ugugucaaguggaauuucaggg

SEQ ID NO: 949184 - RNA, 23 nt, Human
ugggggugcacgggccacaucuu

SEQ ID NO: 949185 - RNA, 18 nt, Human
cccggcuaauuuuuggua

SEQ ID NO: 949186 - RNA, 22 nt, Human
cagaggauucccuagugaccug

SEQ ID NO: 949187 - RNA, 22 nt, Human
agcuuccuuggcgcugaggccu

SEQ ID NO: 949188 - RNA, 22 nt, Human
ccugccuguaagauggguacaa

SEQ ID NO: 949189 - RNA, 22 nt, Human
gcaguucuacuuauccauagac

SEQ ID NO: 949190 - RNA, 22 nt, Human
uaggauguagcuaugucaucau

SEQ ID NO: 949191 - RNA, 22 nt, Human
gugguaauagagcuccaaacua

SEQ ID NO: 949192 - RNA, 22 nt, Human
acuggcagcuguaggaugcaug

SEQ ID NO: 949193 - RNA, 22 nt, Human
ugcauuaugcuacccagaagcu

SEQ ID NO: 949194 - RNA, 22 nt, Human
uuuuuccuuagggguuacucac

SEQ ID NO: 949195 - RNA, 22 nt, Human
uaaagguacgaagugagggauu

SEQ ID NO: 949196 - RNA, 22 nt, Human
auucucuuuguauaacaucuug

SEQ ID NO: 949197 - RNA, 22 nt, Human
agacaguguguguauauauggu

SEQ ID NO: 949198 - RNA, 22 nt, Human
cugggagcuuggagccuuuggu

SEQ ID NO: 949199 - RNA, 22 nt, Human
ugucaucuuuuuaaagaagaga

SEQ ID NO: 949200 - RNA, 22 nt, Human
agcuuguagaaggccacgagca

SEQ ID NO: 949201 - RNA, 22 nt, Human
uauucacaggcuggagugaugu

SEQ ID NO: 949202 - RNA, 22 nt, Human
gaagaggaugacaggagccggu

SEQ ID NO: 949203 - RNA, 22 nt, Human
cccaucaggaacccaggagccc

SEQ ID NO: 949204 - RNA, 22 nt, Human
cuaucuuucgauucuagcuuaa

SEQ ID NO: 949205 - RNA, 22 nt, Human
caccuagcagaacagaggugcu

SEQ ID NO: 949206 - RNA, 22 nt, Human
uuggcaguagugguaguacauu

SEQ ID NO: 949207 - RNA, 22 nt, Human
ucuggccaauguugugaucaca

SEQ ID NO: 949208 - RNA, 22 nt, Human
ccucagaggugaacaucagugc

SEQ ID NO: 949209 - RNA, 22 nt, Human
agucuuauguuugugaagaacu

SEQ ID NO: 949210 - RNA, 22 nt, Human
auugcuguacacuucuagaucu

SEQ ID NO: 949211 - RNA, 22 nt, Human
cagggccacccucugcugggug

SEQ ID NO: 949212 - RNA, 22 nt, Human
aagcccagaugugagaacugag

SEQ ID NO: 949213 - RNA, 22 nt, Human
caaaugcauaguuuauaagaag

SEQ ID NO: 949214 - RNA, 22 nt, Human
uggagccagcccaggccccucu

SEQ ID NO: 949215 - RNA, 22 nt, Human
cugccgagugggucaugaggca

SEQ ID NO: 949216 - RNA, 22 nt, Human
gcuggccucuacaggccggcca

SEQ ID NO: 949217 - RNA, 22 nt, Human
gagagcugugguuugaccaggc

SEQ ID NO: 949218 - RNA, 22 nt, Human
ucuccuggauggaccuucucuu

SEQ ID NO: 949219 - RNA, 22 nt, Human
uugacaagaaucguugccuugg

SEQ ID NO: 949220 - RNA, 22 nt, Human
uagcccagcaugagcagagcug

SEQ ID NO: 949221 - RNA, 22 nt, Human
gcccaggaguugaagggcugac

SEQ ID NO: 949222 - RNA, 22 nt, Human
cucuucaaaagucuaauccuua

SEQ ID NO: 949223 - RNA, 22 nt, Human
cuggcacaugcucccugagugg

SEQ ID NO: 949224 - RNA, 22 nt, Human
ugugcuucuugcagcuccugua

SEQ ID NO: 949225 - RNA, 19 nt, Human
gcucugugaugcugagggg

SEQ ID NO: 949226 - RNA, 22 nt, Human
agcagcugagaugguaagauuc

SEQ ID NO: 949227 - RNA, 22 nt, Human
agcccagaggcugggcgugcau

SEQ ID NO: 949228 - RNA, 22 nt, Human
agucuucagagaaauuaacucu

SEQ ID NO: 949229 - RNA, 22 nt, Human
cugggcugagccugggcugugu

SEQ ID NO: 949230 - RNA, 22 nt, Human
uccagagccuauauguucaacu

SEQ ID NO: 949231 - RNA, 22 nt, Human
aacucugccagguuucaggagc

SEQ ID NO: 949232 - RNA, 22 nt, Human
agcagcugggcucagagcuggg

SEQ ID NO: 949233 - RNA, 22 nt, Human
agcugcccugguaagauugaug

SEQ ID NO: 949234 - RNA, 22 nt, Human
gccucugggcucugccccuggc

SEQ ID NO: 949235 - RNA, 22 nt, Human
acagagcauuugggacagagag

SEQ ID NO: 949236 - RNA, 22 nt, Human
guauccuuugcggaaauuucua

SEQ ID NO: 949237 - RNA, 22 nt, Human
ccugguggccuucagcccacaa

SEQ ID NO: 949238 - RNA, 22 nt, Human
cagugguuauacuuacuguuuc

SEQ ID NO: 949239 - RNA, 22 nt, Human
uugcagggcaggaccauggaca

SEQ ID NO: 949240 - RNA, 22 nt, Human
aaugccuuggagagccuagagg

SEQ ID NO: 949241 - RNA, 22 nt, Human
ggcugcuugcuguuucuuggau

SEQ ID NO: 949242 - RNA, 22 nt, Human
uuucaauguaugucuuucugag

SEQ ID NO: 949243 - RNA, 22 nt, Human
uguaaauugaaggaaauuugug

SEQ ID NO: 949244 - RNA, 22 nt, Human
ugggggacugcacuggcgucag

SEQ ID NO: 949245 - RNA, 22 nt, Human
aaagucauguaaugauaugauu

SEQ ID NO: 949246 - RNA, 20 nt, Human
acugcuucuuucucugaccu

SEQ ID NO: 949247 - RNA, 22 nt, Human
uagauuucgcugcaucucaauc

SEQ ID NO: 949248 - RNA, 22 nt, Human
ugccucugugggcagagcugcc

SEQ ID NO: 949249 - RNA, 20 nt, Human
ccuuuauuauuuguaugaug

SEQ ID NO: 949250 - RNA, 22 nt, Human
gaggaggcuggcgccgccugcc

SEQ ID NO: 949251 - RNA, 22 nt, Human
ccauggcaauggucagucuauu

SEQ ID NO: 949252 - RNA, 22 nt, Human
agagcuguucagcagccagguu

SEQ ID NO: 949253 - RNA, 22 nt, Human
cucugcugcccaggccugcuag

SEQ ID NO: 949254 - RNA, 22 nt, Human
ggggcagcucccgagggcagga

SEQ ID NO: 949255 - RNA, 18 nt, Human
cagauccaggcagcuauu

SEQ ID NO: 949256 - RNA, 22 nt, Human
uccugagagcagcugcuuugga

SEQ ID NO: 949257 - RNA, 22 nt, Human
gcacccaggcuugggcagcaac

SEQ ID NO: 949258 - RNA, 22 nt, Human
cccagcccagcguucgaggggu

SEQ ID NO: 949259 - RNA, 22 nt, Human
acuuuggaucugauguaaucag

SEQ ID NO: 949260 - RNA, 22 nt, Human
uucuucagucccacuagccaca

SEQ ID NO: 949261 - RNA, 22 nt, Human
cuuuggcacagucucauuugau

SEQ ID NO: 949262 - RNA, 22 nt, Human
ccaggacuuauuacaguauaac

SEQ ID NO: 949263 - RNA, 22 nt, Human
ccuggccuggcacucccucugc

SEQ ID NO: 949264 - RNA, 18 nt, Human
uguacaguuaugagcauu

SEQ ID NO: 949265 - RNA, 22 nt, Human
aggagcugggcugcugcuggga

SEQ ID NO: 949266 - RNA, 22 nt, Human
agagaaaagaguucaggcuuug

SEQ ID NO: 949267 - RNA, 22 nt, Human
gacagcagacagaacuaccugc

SEQ ID NO: 949268 - RNA, 22 nt, Human
acagggucaagggugcuacaag

SEQ ID NO: 949269 - RNA, 22 nt, Human
uccaggagggggagccgugccg

SEQ ID NO: 949270 - RNA, 22 nt, Human
uccccagccgugaaggagagga

SEQ ID NO: 949271 - RNA, 17 nt, Human
gccuggcccagccuggc

SEQ ID NO: 949272 - RNA, 22 nt, Human
aaggcaggaugcggacccaucu

SEQ ID NO: 949273 - RNA, 22 nt, Human
gcugggaggaauuuggggaaua

SEQ ID NO: 949274 - RNA, 22 nt, Human
aggcaccuugagagcaggagcu

SEQ ID NO: 949275 - RNA, 17 nt, Human
ugaaggaaggaugaugu

SEQ ID NO: 949276 - RNA, 22 nt, Human
gggcugcuuauacugaugauaa

SEQ ID NO: 949277 - RNA, 22 nt, Human
caaaaguaauguaugcucaucg

SEQ ID NO: 949278 - RNA, 22 nt, Human
aaugaugguuaaacacuggagg

SEQ ID NO: 949279 - RNA, 19 nt, Human
gagcugccuuuugaagacc

SEQ ID NO: 949280 - RNA, 22 nt, Human
ugggagcaagcuacuuagggaa

SEQ ID NO: 949281 - RNA, 22 nt, Human
cagguggguacaucacagagac

SEQ ID NO: 949282 - RNA, 22 nt, Human
auggccuggggagcaugggaag

SEQ ID NO: 949283 - RNA, 22 nt, Human
uccuggccagaggacaaagcug

SEQ ID NO: 949284 - RNA, 22 nt, Human
caagagcuagacuuugucagga

SEQ ID NO: 949285 - RNA, 22 nt, Human
uggagcaggaagucuauggcug

SEQ ID NO: 949286 - RNA, 22 nt, Human
ugcuauaagaauuauauuacuc

SEQ ID NO: 949287 - RNA, 22 nt, Human
ccuccaggauaagucagggccu

SEQ ID NO: 949288 - RNA, 22 nt, Human
augugaaagagguguucagugg

SEQ ID NO: 949289 - RNA, 22 nt, Human
cauuuguaucugggcugcugug

SEQ ID NO: 949290 - RNA, 22 nt, Human
aaaugguauuuacucuguauua

SEQ ID NO: 949291 - RNA, 17 nt, Human
gagaguguauuggaugc

SEQ ID NO: 949292 - RNA, 22 nt, Human
cuuggccucuucucaggguggg

SEQ ID NO: 949293 - RNA, 22 nt, Human
uaggcaauauuagacuuugucu

SEQ ID NO: 949294 - RNA, 22 nt, Human
ugucugguggguugacaggcag

SEQ ID NO: 949295 - RNA, 22 nt, Human
agagggagcccagucauagcug

SEQ ID NO: 949296 - RNA, 22 nt, Human
gccugccuuuuggaggcacauu

SEQ ID NO: 949297 - RNA, 22 nt, Human
uacucugcucauuggagugugu

SEQ ID NO: 949298 - RNA, 22 nt, Human
uuggccaacauggugaaacccc

SEQ ID NO: 949299 - RNA, 22 nt, Human
cucuggagggaggcugagcugg

SEQ ID NO: 949300 - RNA, 22 nt, Human
gagcagagacaguacaacuggc

SEQ ID NO: 949301 - RNA, 22 nt, Human
aggcacagcacaccuggccccc

SEQ ID NO: 949302 - RNA, 22 nt, Human
cugccagcacugccuccugagg

SEQ ID NO: 949303 - RNA, 22 nt, Human
cccaggagacauauagaaggac

SEQ ID NO: 949304 - RNA, 22 nt, Human
gccuggagaccugcuccucuac

SEQ ID NO: 949305 - RNA, 22 nt, Human
cugggacacccaaggaaagagc

SEQ ID NO: 949306 - RNA, 22 nt, Human
aaccaggacaauuugaauagaa

SEQ ID NO: 949307 - RNA, 22 nt, Human
acagggcuuagaaaucuguugc

SEQ ID NO: 949308 - RNA, 22 nt, Human
ucauguuugagacuaauuuuuc

SEQ ID NO: 949309 - RNA, 22 nt, Human
ucucagaguuccucuggagucc

SEQ ID NO: 949310 - RNA, 22 nt, Human
aaaagacauaugugggcauucu

SEQ ID NO: 949311 - RNA, 22 nt, Human
cagcugagaccagaaugcaggu

SEQ ID NO: 949312 - RNA, 22 nt, Human
uagaacaugcucauguauaaau

SEQ ID NO: 949313 - RNA, 21 nt, Human
ugccagggauuuacagagccu

SEQ ID NO: 949314 - RNA, 22 nt, Human
uauuuauaaucugccaaagaga

SEQ ID NO: 949315 - RNA, 18 nt, Human
gagucuuuguuacugcug

SEQ ID NO: 949316 - RNA, 22 nt, Human
agugaccaacaaugcugagaag

SEQ ID NO: 949317 - RNA, 22 nt, Human
agauacauauagaaaacaucaa

SEQ ID NO: 949318 - RNA, 22 nt, Human
agauaauuugaguaaauuaauu

SEQ ID NO: 949319 - RNA, 22 nt, Human
ccucagggucugaggagaccgu

SEQ ID NO: 949320 - RNA, 22 nt, Human
aucacgucaugguuugaucugg

SEQ ID NO: 949321 - RNA, 22 nt, Human
gugcugggcuccaccccagagg

SEQ ID NO: 949322 - RNA, 23 nt, Human
aggucagcaggcaaggaaauggc

SEQ ID NO: 949323 - RNA, 22 nt, Human
aaguuugcauagauuaagcauu

SEQ ID NO: 949324 - RNA, 22 nt, Human
aggcaguuucugggacagcaua

SEQ ID NO: 949325 - RNA, 22 nt, Human
cauacauugcucauucaguauc

SEQ ID NO: 949326 - RNA, 22 nt, Human
auacagaagaacuauagccacu

SEQ ID NO: 949327 - RNA, 22 nt, Human
cagaggccuuucuacagugaua

SEQ ID NO: 949328 - RNA, 22 nt, Human
aggaggccccuccuggguugcu

SEQ ID NO: 949329 - RNA, 22 nt, Human
agagagcccgggccagggcaca

SEQ ID NO: 949330 - RNA, 22 nt, Human
agccagcucccuccccugcagg

SEQ ID NO: 949331 - RNA, 22 nt, Human
acugcagccuugaacucugggc

SEQ ID NO: 949332 - RNA, 22 nt, Human
caggccugagacaucugagaua

SEQ ID NO: 949333 - RNA, 17 nt, Human
agcagcuggcacaggag

SEQ ID NO: 949334 - RNA, 22 nt, Human
gggagacacgcugcaggcauaa

SEQ ID NO: 949335 - RNA, 22 nt, Human
ccaggagcuggcauguggagag

SEQ ID NO: 949336 - RNA, 22 nt, Human
ugaaggccagcucuuuaucagc

SEQ ID NO: 949337 - RNA, 22 nt, Human
gaagaacaccugcugcccagug

SEQ ID NO: 949338 - RNA, 23 nt, Human
guuguaauggauaaugcaaauug

SEQ ID NO: 949339 - RNA, 22 nt, Human
aggaggccgcugaugggcuccc

SEQ ID NO: 949340 - RNA, 19 nt, Human
ucauaaaaaugguaaccca

SEQ ID NO: 949341 - RNA, 22 nt, Human
cagugguugguagauacuugag

SEQ ID NO: 949342 - RNA, 22 nt, Human
gcaaguuauuuccauuuaaagc

SEQ ID NO: 949343 - RNA, 22 nt, Human
uugaaaguagcagcugcauaug

SEQ ID NO: 949344 - RNA, 22 nt, Human
guccucugacucagccuuggga

SEQ ID NO: 949345 - RNA, 22 nt, Human
uggaaggagcuaaggaccuggg

SEQ ID NO: 949346 - RNA, 22 nt, Human
auucuucaccauggauaauuug

SEQ ID NO: 949347 - RNA, 22 nt, Human
uaucuguuguaguacagaugau

SEQ ID NO: 949348 - RNA, 17 nt, Human
augugucuagugcaacc

SEQ ID NO: 949349 - RNA, 22 nt, Human
uuugugaacaaacaugaagaug

SEQ ID NO: 949350 - RNA, 22 nt, Human
cucugagcagaggccguggcua

SEQ ID NO: 949351 - RNA, 22 nt, Human
aacaguaucuuuuaucagaaau

SEQ ID NO: 949352 - RNA, 22 nt, Human
ggagacagugguagggccuaag

SEQ ID NO: 949353 - RNA, 22 nt, Human
cugugucucuccuuacaagacu

SEQ ID NO: 949354 - RNA, 22 nt, Human
uggagcugguaaacagugacau

SEQ ID NO: 949355 - RNA, 22 nt, Human
aagcuggcaauuaucaaaacug

SEQ ID NO: 949356 - RNA, 22 nt, Human
aaaaacugcaauuacuuuuguc

SEQ ID NO: 949357 - RNA, 22 nt, Human
aucuugcauuugcuaaaaugca

SEQ ID NO: 949358 - RNA, 22 nt, Human
ggccucugcaacuggcuguggc

SEQ ID NO: 949359 - RNA, 22 nt, Human
gugccugguuuggggaguguuc

SEQ ID NO: 949360 - RNA, 20 nt, Human
agacccuguguccuguggcc

SEQ ID NO: 949361 - RNA, 22 nt, Human
ccagcagaggggcggagugcag

SEQ ID NO: 949362 - RNA, 22 nt, Human
ggcgugggaaguggggcuucug

SEQ ID NO: 949363 - RNA, 22 nt, Human
cuucuauaaacugugaucuuuc

SEQ ID NO: 949364 - RNA, 22 nt, Human
aggccaggcaacauucugaagu

SEQ ID NO: 949365 - RNA, 22 nt, Human
uuccuguaugucagugaagagc

SEQ ID NO: 949366 - RNA, 22 nt, Human
uggccugcccagagcagcucug

SEQ ID NO: 949367 - RNA, 22 nt, Human
cugugcuugacagugggaagca

SEQ ID NO: 949368 - RNA, 22 nt, Human
ucccugggccacagcugugagc

SEQ ID NO: 949369 - RNA, 22 nt, Human
ucaggggcugugcauuucccag

SEQ ID NO: 949370 - RNA, 22 nt, Human
gucccuggucuaccguggcuuc

SEQ ID NO: 949371 - RNA, 22 nt, Human
gcccuuccaacccagagggcaa

SEQ ID NO: 949372 - RNA, 22 nt, Human
auccuuggaugugucuuuuugu

SEQ ID NO: 949373 - RNA, 23 nt, Human
aucaaaguggaaaucaauuaucu

SEQ ID NO: 949374 - RNA, 22 nt, Human
ccacccuuggguucggaggccg

SEQ ID NO: 949375 - RNA, 22 nt, Human
ccagggugugggcgucggcacg

SEQ ID NO: 949376 - RNA, 22 nt, Human
guauguguaaguaugccaccuu

SEQ ID NO: 949377 - RNA, 20 nt, Human
cagagaccugucuucacaga

SEQ ID NO: 949378 - RNA, 22 nt, Human
agggaguguaaauggugcucag

SEQ ID NO: 949379 - RNA, 22 nt, Human
cacugcaggucugagauggggg

SEQ ID NO: 949380 - RNA, 22 nt, Human
gccugagacagugugguccaau

SEQ ID NO: 949381 - RNA, 22 nt, Human
uggcagcugaauggcuggaugg

SEQ ID NO: 949382 - RNA, 22 nt, Human
agcaccuggucuccuggcgcug

SEQ ID NO: 949383 - RNA, 18 nt, Human
uccucucuuuccccaggg

SEQ ID NO: 949384 - RNA, 22 nt, Human
cucagcucuuuauacuagcugu

SEQ ID NO: 949385 - RNA, 22 nt, Human
gcugucugucucugugacuuaa

SEQ ID NO: 949386 - RNA, 22 nt, Human
ggcacugacacuagcauggcac

SEQ ID NO: 949387 - RNA, 22 nt, Human
ucaggggacagccagcuggagg

SEQ ID NO: 949388 - RNA, 22 nt, Human
uaccuucaccagcgaauguuug

SEQ ID NO: 949389 - RNA, 22 nt, Human
cagccuuugugaacaucaggug

SEQ ID NO: 949390 - RNA, 22 nt, Human
uucauugugauucuuggcuagc

SEQ ID NO: 949391 - RNA, 22 nt, Human
agaccaagugcaggugccacua

SEQ ID NO: 949392 - RNA, 22 nt, Human
aaaucagagucugauuuuaagg

SEQ ID NO: 949393 - RNA, 22 nt, Human
gcccaggagccuggagaugugu

SEQ ID NO: 949394 - RNA, 22 nt, Human
augucccagcugagagacaacu

SEQ ID NO: 949395 - RNA, 22 nt, Human
cugagcugaaacuugagaggcu

SEQ ID NO: 949396 - RNA, 18 nt, Human
acucaggaaaugaugaca

SEQ ID NO: 949397 - RNA, 22 nt, Human
gaggccuggguuggaggugcau

SEQ ID NO: 949398 - RNA, 22 nt, Human
ccuggaggagcgcugaccagcu

SEQ ID NO: 949399 - RNA, 22 nt, Human
ccccuuccacagugcuuccuaa

SEQ ID NO: 949400 - RNA, 22 nt, Human
aagcagccacuggccaguuaua

SEQ ID NO: 949401 - RNA, 22 nt, Human
agcugccagcaaguuucaaaca

SEQ ID NO: 949402 - RNA, 22 nt, Human
gguuauauaauucagugcuuuc

SEQ ID NO: 949403 - RNA, 22 nt, Human
ccagaaaaugcagaacauagaa

SEQ ID NO: 949404 - RNA, 22 nt, Human
ugaagcaacuggacaaguuggc

SEQ ID NO: 949405 - RNA, 22 nt, Human
gagauggggaauaggagcaagc

SEQ ID NO: 949406 - RNA, 22 nt, Human
ggugauuuucgaguuucauguu

SEQ ID NO: 949407 - RNA, 22 nt, Human
aucuggcucccuuggaauccgu

SEQ ID NO: 949408 - RNA, 22 nt, Human
uguuaacaucuuggacucguga

SEQ ID NO: 949409 - RNA, 22 nt, Human
gaagcacauggcuauagcuauu

SEQ ID NO: 949410 - RNA, 22 nt, Human
cugagccauaagggaggcuggg

SEQ ID NO: 949411 - RNA, 23 nt, Human
cuccuggaggguccggcccugcc

SEQ ID NO: 949412 - RNA, 20 nt, Human
cucuggcuccgcgugaccgc

SEQ ID NO: 949413 - RNA, 22 nt, Human
aggggugugcauccuggaggau

SEQ ID NO: 949414 - RNA, 22 nt, Human
agugauggagcuuccucugcua

SEQ ID NO: 949415 - RNA, 18 nt, Human
aggccaaacuuguaagca

SEQ ID NO: 949416 - RNA, 22 nt, Human
ucaguuacuccuuuccuuaggu

SEQ ID NO: 949417 - RNA, 22 nt, Human
uguaggccuauguccagcaauu

SEQ ID NO: 949418 - RNA, 22 nt, Human
cacuggaauucaagauacugag

SEQ ID NO: 949419 - RNA, 22 nt, Human
uccaugaggaccaaauucguag

SEQ ID NO: 949420 - RNA, 22 nt, Human
ucaggugggaccugcuaggaca

SEQ ID NO: 949421 - RNA, 22 nt, Human
uagcagugccaggauuuugcug

SEQ ID NO: 949422 - RNA, 22 nt, Human
cuacauuuguucuauagcuuuu

SEQ ID NO: 949423 - RNA, 18 nt, Human
cugaggccaacuacacug

SEQ ID NO: 949424 - RNA, 22 nt, Human
ggcagggaggaggugaaaguga

SEQ ID NO: 949425 - RNA, 22 nt, Human
gaggagggagcuggaagcucuu

SEQ ID NO: 949426 - RNA, 22 nt, Human
ggcuuccuuucacuacccucag

SEQ ID NO: 949427 - RNA, 21 nt, Human
auuguuaucauugugcugugu

SEQ ID NO: 949428 - RNA, 22 nt, Human
caugucuggguauaugcauaug

SEQ ID NO: 949429 - RNA, 20 nt, Human
gggcuggcgcauggggaaag

SEQ ID NO: 949430 - RNA, 18 nt, Human
ccagagcuggcuccucgc

SEQ ID NO: 949431 - RNA, 22 nt, Human
uucauugucucuguuugccuuc

SEQ ID NO: 949432 - RNA, 22 nt, Human
cauuuagaaacuguuuuuaaca

SEQ ID NO: 949433 - RNA, 22 nt, Human
ggaucauuaacacauccaucac

SEQ ID NO: 949434 - RNA, 22 nt, Human
uugugucccccuuugagagcca

SEQ ID NO: 949435 - RNA, 22 nt, Human
caguacuucuuggaaacuggau

SEQ ID NO: 949436 - RNA, 22 nt, Human
gcagaggccugaagguggcggg

SEQ ID NO: 949437 - RNA, 22 nt, Human
ugccaggagagugcaugcaggg

SEQ ID NO: 949438 - RNA, 22 nt, Human
ccccaggacguggcccucauag

SEQ ID NO: 949439 - RNA, 22 nt, Human
aggaaagcucccaguagggcuc

SEQ ID NO: 949440 - RNA, 22 nt, Human
ggcucuggugcccuggcuccca

SEQ ID NO: 949441 - RNA, 22 nt, Human
ugcugggggugucucaccaggc

SEQ ID NO: 949442 - RNA, 22 nt, Human
uaacugauauugaaaaacauca

SEQ ID NO: 949443 - RNA, 22 nt, Human
cacagagagcuacgugcagcgu

SEQ ID NO: 949444 - RNA, 22 nt, Human
agagccaggaucuguuuugggg

SEQ ID NO: 949445 - RNA, 22 nt, Human
ucccagcagggccgaccagccu

SEQ ID NO: 949446 - RNA, 22 nt, Human
gaagcagcucagauugacugaa

SEQ ID NO: 949447 - RNA, 22 nt, Human
guuccacaaaauguacccaguu

SEQ ID NO: 949448 - RNA, 22 nt, Human
uugccuugauucuucucaugug

SEQ ID NO: 949449 - RNA, 22 nt, Human
aaggagugcaugacucagagua

SEQ ID NO: 949450 - RNA, 22 nt, Human
cuggaaauuggagaugauguuu

SEQ ID NO: 949451 - RNA, 22 nt, Human
aauugcuaaagauuauguuuuc

SEQ ID NO: 949452 - RNA, 22 nt, Human
agugacagcugggaaggugaaa

SEQ ID NO: 949453 - RNA, 22 nt, Human
guggccaggacauugccaggca

SEQ ID NO: 949454 - RNA, 22 nt, Human
auggagacgcaagggaccuagg

SEQ ID NO: 949455 - RNA, 22 nt, Human
auuauuagugauguuguuacug

SEQ ID NO: 949456 - RNA, 22 nt, Human
caaauguguaaggaaguguuag

SEQ ID NO: 949457 - RNA, 22 nt, Human
cugcuggagguuggagcaugca

SEQ ID NO: 949458 - RNA, 22 nt, Human
cccaggagguguagcugcgugg

SEQ ID NO: 949459 - RNA, 22 nt, Human
ccaggccuguguuguguggagg

SEQ ID NO: 949460 - RNA, 22 nt, Human
aggaccaacauagcagcagugg

SEQ ID NO: 949461 - RNA, 22 nt, Human
auuguguccucauugaccuuca

SEQ ID NO: 949462 - RNA, 22 nt, Human
uuacaaagagugccagagugug

SEQ ID NO: 949463 - RNA, 16 nt, Human
ccagaggccuggccuc

SEQ ID NO: 949464 - RNA, 23 nt, Human
uggcucagggucucuuaugaagu

SEQ ID NO: 949465 - RNA, 22 nt, Human
ucuggcucacuucaggcuucac

SEQ ID NO: 949466 - RNA, 22 nt, Human
uuaguaauguguuaauaugaau

SEQ ID NO: 949467 - RNA, 22 nt, Human
aguguacaguuuguaguacuac

SEQ ID NO: 949468 - RNA, 22 nt, Human
aauauuguuucaagaucacaga

SEQ ID NO: 949469 - RNA, 22 nt, Human
ggcuuccuggagaaggucugag

SEQ ID NO: 949470 - RNA, 22 nt, Human
ugccucuguugagccuuggcug

SEQ ID NO: 949471 - RNA, 22 nt, Human
ccacugggcguuucuguccaau

SEQ ID NO: 949472 - RNA, 22 nt, Human
aauuuguuaaaagugagugaca

SEQ ID NO: 949473 - RNA, 18 nt, Human
uuccauaauguauguaac

SEQ ID NO: 949474 - RNA, 22 nt, Human
ccugggcaucucaugcaccugc

SEQ ID NO: 949475 - RNA, 22 nt, Human
agagaagagcaaugauaaauuu

SEQ ID NO: 949476 - RNA, 22 nt, Human
guccucuggugaaagcauuccc

SEQ ID NO: 949477 - RNA, 23 nt, Human
aggcagcuggguagcaucuuucu

SEQ ID NO: 949478 - RNA, 22 nt, Human
uaggaaaagucuagauugauga

SEQ ID NO: 949479 - RNA, 22 nt, Human
uugagggaacaugagaaucauc

SEQ ID NO: 949480 - RNA, 21 nt, Human
gacaggggaagaagcaaggag

SEQ ID NO: 949481 - RNA, 22 nt, Human
ccuccuggcuuuucccauugaa

SEQ ID NO: 949482 - RNA, 23 nt, Human
uugcauagacauccucauagauu

SEQ ID NO: 949483 - RNA, 22 nt, Human
uugcaggaaacugagugugagc

SEQ ID NO: 949484 - RNA, 22 nt, Human
uucugagacaauugagagucua

SEQ ID NO: 949485 - RNA, 22 nt, Human
aggcccugaagucggccccuca

SEQ ID NO: 949486 - RNA, 22 nt, Human
ucaagcaucuuggucuacgauc

SEQ ID NO: 949487 - RNA, 22 nt, Human
ugaaaugaagggcuuguucugg

SEQ ID NO: 949488 - RNA, 22 nt, Human
gcagaggccaucaacuuugcca

SEQ ID NO: 949489 - RNA, 22 nt, Human
gaugaagccugacuucucggug

SEQ ID NO: 949490 - RNA, 22 nt, Human
aauuucagaccauuugcaauua

SEQ ID NO: 949491 - RNA, 22 nt, Human
ucauauaccagagaguuuauau

SEQ ID NO: 949492 - RNA, 22 nt, Human
acagcuguggggacucuugccc

SEQ ID NO: 949493 - RNA, 22 nt, Human
ccuggagaccagaggauacuuc

SEQ ID NO: 949494 - RNA, 22 nt, Human
auuugcagagcucugaauuuug

SEQ ID NO: 949495 - RNA, 17 nt, Human
cuggagccaagagggcc

SEQ ID NO: 949496 - RNA, 22 nt, Human
cucuucucugcagccuuugaag

SEQ ID NO: 949497 - RNA, 22 nt, Human
uucauuaguucugaagaugucu

SEQ ID NO: 949498 - RNA, 22 nt, Human
uaugcacaguuacaagaauauc

SEQ ID NO: 949499 - RNA, 21 nt, Human
uuugaaagcccuauguuuuca

SEQ ID NO: 949500 - RNA, 22 nt, Human
aggcacugggaauaugcugagg

SEQ ID NO: 949501 - RNA, 18 nt, Human
ugcucuguuuaaugauuu

SEQ ID NO: 949502 - RNA, 23 nt, Human
uggcucucucagugcugcagagg

SEQ ID NO: 949503 - RNA, 22 nt, Human
aaugaacaaaauaugcuuugca

SEQ ID NO: 949504 - RNA, 22 nt, Human
cugacucuccucaagcauaaau

SEQ ID NO: 949505 - RNA, 22 nt, Human
ccuauugacaauucucuucucc

SEQ ID NO: 949506 - RNA, 22 nt, Human
gaggacaggagacucacuguuu

SEQ ID NO: 949507 - RNA, 22 nt, Human
cuguugcucugaacaggucuug

SEQ ID NO: 949508 - RNA, 22 nt, Human
auguguaaaaagugcuuaauau

SEQ ID NO: 949509 - RNA, 22 nt, Human
cauccaggcaccacaaccagcu

SEQ ID NO: 949510 - RNA, 22 nt, Human
gcugcugucagugguggcaguu

SEQ ID NO: 949511 - RNA, 20 nt, Human
uuggcagcagcucagccacc

SEQ ID NO: 949512 - RNA, 22 nt, Human
ccucaggaaccacauugcugcu

SEQ ID NO: 949513 - RNA, 22 nt, Human
ucucagagugguggucccucug

SEQ ID NO: 949514 - RNA, 22 nt, Human
ucugggcagcagcagcuaguag

SEQ ID NO: 949515 - RNA, 22 nt, Human
ugggauaguggccaggaccccc

SEQ ID NO: 949516 - RNA, 22 nt, Human
caugggagcuaucuccaucacu

SEQ ID NO: 949517 - RNA, 20 nt, Human
ggccuuggccucuuugcagc

SEQ ID NO: 949518 - RNA, 22 nt, Human
ccagcuugaagaugugcugguu

SEQ ID NO: 949519 - RNA, 21 nt, Human
cacaggugggucagugaggcc

SEQ ID NO: 949520 - RNA, 22 nt, Human
ucuguuuaggcaaaauagcuac

SEQ ID NO: 949521 - RNA, 22 nt, Human
agacagugcaagaagagcaggc

SEQ ID NO: 949522 - RNA, 22 nt, Human
auggcuggcauccaggugggcu

SEQ ID NO: 949523 - RNA, 22 nt, Human
ugagcacaaguuugcaugugug

SEQ ID NO: 949524 - RNA, 22 nt, Human
uuucacauacaguguauaguag

SEQ ID NO: 949525 - RNA, 22 nt, Human
aggucacccguuugacuaucca

SEQ ID NO: 949526 - RNA, 22 nt, Human
auuucuauaggaggacaguauu

SEQ ID NO: 949527 - RNA, 22 nt, Human
cuggcagcugugugaagaacug

SEQ ID NO: 949528 - RNA, 21 nt, Human
cagaggcagguccugggacgg

SEQ ID NO: 949529 - RNA, 22 nt, Human
gaagccaguacugugcucugca

SEQ ID NO: 949530 - RNA, 22 nt, Human
ggguccagaguugaagagguua

SEQ ID NO: 949531 - RNA, 22 nt, Human
aggagagagcugagcuuugcug

SEQ ID NO: 949532 - RNA, 22 nt, Human
cuugccuucuuuuccuauagaa

SEQ ID NO: 949533 - RNA, 22 nt, Human
gaggcagcucuucugaaugggg

SEQ ID NO: 949534 - RNA, 23 nt, Human
agcagggccagaauacuugcugu

SEQ ID NO: 949535 - RNA, 22 nt, Human
cauauuaaggucuguaaggggu

SEQ ID NO: 949536 - RNA, 22 nt, Human
gacccugccaugagugacaggg

SEQ ID NO: 949537 - RNA, 22 nt, Human
agguaagggucacaguucauau

SEQ ID NO: 949538 - RNA, 19 nt, Human
agcuggggcgguguguguu

SEQ ID NO: 949539 - RNA, 22 nt, Human
ccugaggcuuaaucugucccaa

SEQ ID NO: 949540 - RNA, 23 nt, Human
cuggcuccgaagacuccaggauc

SEQ ID NO: 949541 - RNA, 22 nt, Human
uggcucagagcagggacucugg

SEQ ID NO: 949542 - RNA, 19 nt, Human
aggguccagggagcggcuc

SEQ ID NO: 949543 - RNA, 22 nt, Human
ucagguguuagaagaaauuuca

SEQ ID NO: 949544 - RNA, 22 nt, Human
uuggccaauccuauuggguggg

SEQ ID NO: 949545 - RNA, 22 nt, Human
gguccuggaaauugacggaaag

SEQ ID NO: 949546 - RNA, 22 nt, Human
caaaggagguaaugggugugag

SEQ ID NO: 949547 - RNA, 22 nt, Human
aggacuucuccgauaagucaga

SEQ ID NO: 949548 - RNA, 22 nt, Human
cagggugggcacccagccucca

SEQ ID NO: 949549 - RNA, 22 nt, Human
caggggcucugggugaugugag

SEQ ID NO: 949550 - RNA, 22 nt, Human
agaaacauuuagauuauauguc

SEQ ID NO: 949551 - RNA, 21 nt, Human
uggcugagccaggugugugga

SEQ ID NO: 949552 - RNA, 22 nt, Human
acacacagguaaaggagccugg

SEQ ID NO: 949553 - RNA, 22 nt, Human
agcaccuguggcucaugcucgu

SEQ ID NO: 949554 - RNA, 22 nt, Human
cuggaguuagaguagacacuga

SEQ ID NO: 949555 - RNA, 22 nt, Human
cuguagccagaagcagaaggcc

SEQ ID NO: 949556 - RNA, 22 nt, Human
caggaacauuuaaccacagggu

SEQ ID NO: 949557 - RNA, 22 nt, Human
uuugaaaguucuucugacacua

SEQ ID NO: 949558 - RNA, 22 nt, Human
acagaggaaggcugagcugccc

SEQ ID NO: 949559 - RNA, 22 nt, Human
caaauguauaaauguacuuucu

SEQ ID NO: 949560 - RNA, 22 nt, Human
aaaggccagguuggcugguauu

SEQ ID NO: 949561 - RNA, 22 nt, Human
ucuuuccuaggugauaugcaau

SEQ ID NO: 949562 - RNA, 22 nt, Human
ggcuucccuuuccgagaggaga

SEQ ID NO: 949563 - RNA, 22 nt, Human
agaacuguccuuggaggagagu

SEQ ID NO: 949564 - RNA, 22 nt, Human
cagcuuccauaagagauggaga

SEQ ID NO: 949565 - RNA, 22 nt, Human
cccaggaggguggccucugccc

SEQ ID NO: 949566 - RNA, 22 nt, Human
agaguguaauaagggcaagggc

SEQ ID NO: 949567 - RNA, 22 nt, Human
augcugugucuagcaggaacac

SEQ ID NO: 949568 - RNA, 21 nt, Human
acagcagggcuggcaugacag

SEQ ID NO: 949569 - RNA, 21 nt, Human
ccuggccaaucugauaggguu

SEQ ID NO: 949570 - RNA, 22 nt, Human
aucucccagccacagcauucuu

SEQ ID NO: 949571 - RNA, 22 nt, Human
uuccaagagcuuuaauuguuga

SEQ ID NO: 949572 - RNA, 22 nt, Human
cguguacagucuaucuuuuuuc

SEQ ID NO: 949573 - RNA, 22 nt, Human
acucugagcaucccaagucuua

SEQ ID NO: 949574 - RNA, 20 nt, Human
uggccuuggggagcucacac

SEQ ID NO: 949575 - RNA, 22 nt, Human
ugggcugcuucuauuggugguc

SEQ ID NO: 949576 - RNA, 22 nt, Human
agguguguauaaacauacauau

SEQ ID NO: 949577 - RNA, 22 nt, Human
uguuuuaugagccauauaaccu

SEQ ID NO: 949578 - RNA, 23 nt, Human
uacaugcuauaauuucacccuca

SEQ ID NO: 949579 - RNA, 22 nt, Human
uguccugggaaugggaugcagu

SEQ ID NO: 949580 - RNA, 19 nt, Human
ggcagcuugggaagguagc

SEQ ID NO: 949581 - RNA, 22 nt, Human
ugcagcagguuccaaaggguua

SEQ ID NO: 949582 - RNA, 22 nt, Human
gaaggccauuagagccugugcc

SEQ ID NO: 949583 - RNA, 22 nt, Human
ucaccuuagcuagaggaagaga

SEQ ID NO: 949584 - RNA, 22 nt, Human
ucuggccagaaagacuugaugu

SEQ ID NO: 949585 - RNA, 22 nt, Human
aagggcagggaguuugugucua

SEQ ID NO: 949586 - RNA, 18 nt, Human
uccuccuuuggccuuuuc

SEQ ID NO: 949587 - RNA, 22 nt, Human
agacucaagacugcagaagacg

SEQ ID NO: 949588 - RNA, 22 nt, Human
gggauggggagcuggaaagggg

SEQ ID NO: 949589 - RNA, 22 nt, Human
cagcaggacauggaggaguaaa

SEQ ID NO: 949590 - RNA, 22 nt, Human
caugcaggcccgccugaauggg

SEQ ID NO: 949591 - RNA, 22 nt, Human
ugccucugggugaccaaggagc

SEQ ID NO: 949592 - RNA, 22 nt, Human
auaauguguucaucuuacaauu

SEQ ID NO: 949593 - RNA, 22 nt, Human
ucuuuguaaaugccuagcauaa

SEQ ID NO: 949594 - RNA, 22 nt, Human
gaaaucugcccagugcacuggu

SEQ ID NO: 949595 - RNA, 22 nt, Human
ugcaguggaaagacucagacuu

SEQ ID NO: 949596 - RNA, 22 nt, Human
ucaaaugcggucauggcuuuua

SEQ ID NO: 949597 - RNA, 22 nt, Human
ccaggaagcugucugauaugaa

SEQ ID NO: 949598 - RNA, 19 nt, Human
acccucucagugccugagg

SEQ ID NO: 949599 - RNA, 22 nt, Human
agcccuccucacaucagcgucc

SEQ ID NO: 949600 - RNA, 22 nt, Human
ucucuucuuguguuuuccugcc

SEQ ID NO: 949601 - RNA, 20 nt, Human
ugcuccaucuaaagugauua

SEQ ID NO: 949602 - RNA, 22 nt, Human
gugggcaaggucccugccagcu

SEQ ID NO: 949603 - RNA, 22 nt, Human
gaggaguggaguugcuggguug

SEQ ID NO: 949604 - RNA, 22 nt, Human
ugccucccucucugccacugga

SEQ ID NO: 949605 - RNA, 22 nt, Human
ugcccuuggguaacuugcugau

SEQ ID NO: 949606 - RNA, 22 nt, Human
uauaauccauucauugauuucu

SEQ ID NO: 949607 - RNA, 21 nt, Human
ucucugugucuuuaagcugga

SEQ ID NO: 949608 - RNA, 21 nt, Human
uccagggaacuucucaggaau

SEQ ID NO: 949609 - RNA, 20 nt, Human
gugggcagaugugugcaugg

SEQ ID NO: 949610 - RNA, 22 nt, Human
aagaagagaacuggcauccuaa

SEQ ID NO: 949611 - RNA, 22 nt, Human
agccucugugacucacagguca

SEQ ID NO: 949612 - RNA, 22 nt, Human
gcaaaugcuaaaguguagagac

SEQ ID NO: 949613 - RNA, 22 nt, Human
uuucaacauauaccauaaugcc

SEQ ID NO: 949614 - RNA, 22 nt, Human
cucuggaguucucaugaggaac

SEQ ID NO: 949615 - RNA, 22 nt, Human
acagcuuuucaauucugcugag

SEQ ID NO: 949616 - RNA, 22 nt, Human
ugugugacccccagugaagccu

SEQ ID NO: 949617 - RNA, 21 nt, Human
cauuucuauugaugagaaaag

SEQ ID NO: 949618 - RNA, 22 nt, Human
uucuuguaauuuggagaaauga

SEQ ID NO: 949619 - RNA, 22 nt, Human
uuugacauugccaauuugcuca

SEQ ID NO: 949620 - RNA, 22 nt, Human
ugaaacagucuccagacuugga

SEQ ID NO: 949621 - RNA, 22 nt, Human
agagccagcaacucuagcccug

SEQ ID NO: 949622 - RNA, 22 nt, Human
gagagugaggcaucaggggcag

SEQ ID NO: 949623 - RNA, 22 nt, Human
aggcacugcagauuacaggcgc

SEQ ID NO: 949624 - RNA, 19 nt, Human
uccauaagcuuguguucau

SEQ ID NO: 949625 - RNA, 22 nt, Human
acaaaggugcgucccuucagcu

SEQ ID NO: 949626 - RNA, 22 nt, Human
aguguccccuccaagggccugg

SEQ ID NO: 949627 - RNA, 22 nt, Human
ugggcagaggcagcagaaaccu

SEQ ID NO: 949628 - RNA, 22 nt, Human
aaugcacauaaauauggucuua

SEQ ID NO: 949629 - RNA, 22 nt, Human
cucuugaaaauuggaacacaga

SEQ ID NO: 949630 - RNA, 22 nt, Human
gaggcugauucggggaacagca

SEQ ID NO: 949631 - RNA, 22 nt, Human
ugccaggcccagcuccagagcu

SEQ ID NO: 949632 - RNA, 22 nt, Human
cugaagccacgauagcuuccua

SEQ ID NO: 949633 - RNA, 22 nt, Human
gggcugccuuucuucugggagc

SEQ ID NO: 949634 - RNA, 22 nt, Human
ccagcugcgggcaucgagaguu

SEQ ID NO: 949635 - RNA, 22 nt, Human
caggcuggagugaguguagugg

SEQ ID NO: 949636 - RNA, 22 nt, Human
agggcagccucucagccuaggu

SEQ ID NO: 949637 - RNA, 22 nt, Human
gaggggcuggcuguggucccau

SEQ ID NO: 949638 - RNA, 22 nt, Human
ccuccagcgcgauccacuccgg

SEQ ID NO: 949639 - RNA, 22 nt, Human
auugucuuuggugcuuccagga

SEQ ID NO: 949640 - RNA, 22 nt, Human
uauuuccaaaagccuauuauga

SEQ ID NO: 949641 - RNA, 22 nt, Human
uggcugggcccccaccugccuc

SEQ ID NO: 949642 - RNA, 22 nt, Human
aggucacauggauaaugaucag

SEQ ID NO: 949643 - RNA, 22 nt, Human
cagggcagggagcuuagaauga

SEQ ID NO: 949644 - RNA, 22 nt, Human
ugcugucccccgugucugggcu

SEQ ID NO: 949645 - RNA, 22 nt, Human
uuggcugagagaggaaaagggc

SEQ ID NO: 949646 - RNA, 22 nt, Human
ccaggagagcagaagcccaggc

SEQ ID NO: 949647 - RNA, 22 nt, Human
ggaggggaacuaaucccgugac

SEQ ID NO: 949648 - RNA, 22 nt, Human
auucacaaugauacauaagcga

SEQ ID NO: 949649 - RNA, 22 nt, Human
uggcucugggaaucuguugcuu

SEQ ID NO: 949650 - RNA, 22 nt, Human
gagauggggucagcugggacau

SEQ ID NO: 949651 - RNA, 18 nt, Human
uggcucagauggcuuuaa

SEQ ID NO: 949652 - RNA, 22 nt, Human
gcagagccccucaagccagccu

SEQ ID NO: 949653 - RNA, 22 nt, Human
caggguggcacaucacagcauu

SEQ ID NO: 949654 - RNA, 22 nt, Human
ggagacaguauggcuuguagcu

SEQ ID NO: 949655 - RNA, 22 nt, Human
cucuguccuugcacaguuccua

SEQ ID NO: 949656 - RNA, 22 nt, Human
ugucuucaucucagacacaguu

SEQ ID NO: 949657 - RNA, 22 nt, Human
augugucugaccacuguauugg

SEQ ID NO: 949658 - RNA, 22 nt, Human
agcugccaucugaagaacugca

SEQ ID NO: 949659 - RNA, 20 nt, Human
cucuccucacccgugucagg

SEQ ID NO: 949660 - RNA, 22 nt, Human
cagcuuuguccugcaaaccuga

SEQ ID NO: 949661 - RNA, 22 nt, Human
acugcccucccaucuauugcaa

SEQ ID NO: 949662 - RNA, 22 nt, Human
auaucaaagcuaguggaaauuu

SEQ ID NO: 949663 - RNA, 22 nt, Human
acuuaaaaagaaucuuuucacg

SEQ ID NO: 949664 - RNA, 22 nt, Human
aaugauggucauggcaacuuuu

SEQ ID NO: 949665 - RNA, 22 nt, Human
auguaauaggguaacauaacau

SEQ ID NO: 949666 - RNA, 22 nt, Human
gaguuuaaaacgcuuguauuua

SEQ ID NO: 949667 - RNA, 22 nt, Human
ggcuucagugagcugagcucac

SEQ ID NO: 949668 - RNA, 22 nt, Human
cuggcucccucgcugaggugcu

SEQ ID NO: 949669 - RNA, 22 nt, Human
auuuaagauugcguauucaugu

SEQ ID NO: 949670 - RNA, 22 nt, Human
cucuggccugcagauccaugcu

SEQ ID NO: 949671 - RNA, 22 nt, Human
cuuugcaauagaggcacacaug

SEQ ID NO: 949672 - RNA, 22 nt, Human
caucugcugcugaagccagcau

SEQ ID NO: 949673 - RNA, 22 nt, Human
cucaggauagcugcgcagccug

SEQ ID NO: 949674 - RNA, 22 nt, Human
cagcucccuauggugaggcgac

SEQ ID NO: 949675 - RNA, 22 nt, Human
cccaggaggccaagguugcagu

SEQ ID NO: 949676 - RNA, 22 nt, Human
aacaugauggggaagaacaaga

SEQ ID NO: 949677 - RNA, 19 nt, Human
ucuuuggcuaaauugggug

SEQ ID NO: 949678 - RNA, 22 nt, Human
uaggccagaggagcagcuuugg

SEQ ID NO: 949679 - RNA, 22 nt, Human
caggacaguauaggcuuuagga

SEQ ID NO: 949680 - RNA, 19 nt, Human
ggccccucucacaggaguu

SEQ ID NO: 949681 - RNA, 22 nt, Human
agccagggauggcagugcccag

SEQ ID NO: 949682 - RNA, 22 nt, Human
uucacaggaauguaggggucuu

SEQ ID NO: 949683 - RNA, 22 nt, Human
cagcaucaccgccauuucugau

SEQ ID NO: 949684 - RNA, 22 nt, Human
uuccauuguuucugucuucacu

SEQ ID NO: 949685 - RNA, 22 nt, Human
cagcccagcagucuuagccugc

SEQ ID NO: 949686 - RNA, 22 nt, Human
cugggggcaagcagacagcugu

SEQ ID NO: 949687 - RNA, 22 nt, Human
ucuggcucggauuugucuagca

SEQ ID NO: 949688 - RNA, 22 nt, Human
gaggucaggggagaggcugaug

SEQ ID NO: 949689 - RNA, 22 nt, Human
cuauuagguaugcagccuauuu

SEQ ID NO: 949690 - RNA, 22 nt, Human
cucaggauauugggcuggagca

SEQ ID NO: 949691 - RNA, 22 nt, Human
gaggaccacagaugagccugca

SEQ ID NO: 949692 - RNA, 22 nt, Human
aggcaggcuggucugaagagug

SEQ ID NO: 949693 - RNA, 22 nt, Human
gcugccugauuuacauagugaa

SEQ ID NO: 949694 - RNA, 22 nt, Human
gacagcuggcaguggaaaggug

SEQ ID NO: 949695 - RNA, 22 nt, Human
auggaaagcuaagccauuuacc

SEQ ID NO: 949696 - RNA, 22 nt, Human
ccugagagcgaguggccucaug

SEQ ID NO: 949697 - RNA, 22 nt, Human
guuuuuaucuaauagcaguuau

SEQ ID NO: 949698 - RNA, 22 nt, Human
cugagccaaaaagcagagcuug

SEQ ID NO: 949699 - RNA, 22 nt, Human
ggagggcaucaaucaggccugg

SEQ ID NO: 949700 - RNA, 22 nt, Human
cugggcugucaauggcccucug

SEQ ID NO: 949701 - RNA, 22 nt, Human
aucuggcuggauucuuagcguu

SEQ ID NO: 949702 - RNA, 22 nt, Human
gaaaggucaguuccacuuccau

SEQ ID NO: 949703 - RNA, 22 nt, Human
gucugucaucugagauggagug

SEQ ID NO: 949704 - RNA, 22 nt, Human
gucaugccagcggagcucggga

SEQ ID NO: 949705 - RNA, 22 nt, Human
caagaugccccugguagggauc

SEQ ID NO: 949706 - RNA, 22 nt, Human
agagcugaggauccagcugagc

SEQ ID NO: 949707 - RNA, 22 nt, Human
cugcugagcccuggcacaggug

SEQ ID NO: 949708 - RNA, 23 nt, Human
gugcaugugucuuuacaguagca

SEQ ID NO: 949709 - RNA, 22 nt, Human
uuugcauaaaggagcauuucuc

SEQ ID NO: 949710 - RNA, 22 nt, Human
uuuaccaagcuuuaauuacaua

SEQ ID NO: 949711 - RNA, 18 nt, Human
gucacuguguuucugagc

SEQ ID NO: 949712 - RNA, 22 nt, Human
gaguguuccagaaacuggcccu

SEQ ID NO: 949713 - RNA, 22 nt, Human
uuugcaaagaaauuauugcugu

SEQ ID NO: 949714 - RNA, 19 nt, Human
aaggcagcaguagcaucca

SEQ ID NO: 949715 - RNA, 22 nt, Human
uggcacauaguaggugcucaau

SEQ ID NO: 949716 - RNA, 22 nt, Human
cuggaaggcucugcugccuguc

SEQ ID NO: 949717 - RNA, 22 nt, Human
ugggcuggugagggaucauuua

SEQ ID NO: 949718 - RNA, 22 nt, Human
uuguuuguaugcugagaagaau

SEQ ID NO: 949719 - RNA, 22 nt, Human
uggcuggacagugggcagugga

SEQ ID NO: 949720 - RNA, 22 nt, Human
ccugcagguugcagaggcggaa

SEQ ID NO: 949721 - RNA, 22 nt, Human
agaugggcgcccuggacugagg

SEQ ID NO: 949722 - RNA, 18 nt, Human
augugcaauuuuguauuu

SEQ ID NO: 949723 - RNA, 22 nt, Human
ugggagcaguucagguguggcu

SEQ ID NO: 949724 - RNA, 22 nt, Human
ucagaggagccaaaguucugag

SEQ ID NO: 949725 - RNA, 18 nt, Human
gaagggagcuggaaugca

SEQ ID NO: 949726 - RNA, 23 nt, Human
uccaagggcuacaaacacagacc

SEQ ID NO: 949727 - RNA, 22 nt, Human
uuucaugagauuccuccacauc

SEQ ID NO: 949728 - RNA, 22 nt, Human
aaaacaguuuaggcaucacagu

SEQ ID NO: 949729 - RNA, 22 nt, Human
ugauuuccugugcgcccuuagg

SEQ ID NO: 949730 - RNA, 20 nt, Human
guauuaggagguaaauguaa

SEQ ID NO: 949731 - RNA, 22 nt, Human
gggaaccagccgcuuccgccuc

SEQ ID NO: 949732 - RNA, 22 nt, Human
caggaucccuggccuccgccca

SEQ ID NO: 949733 - RNA, 22 nt, Human
agugggcagcccaggaggucuu

SEQ ID NO: 949734 - RNA, 22 nt, Human
agaggcacagaggcaguccccu

SEQ ID NO: 949735 - RNA, 19 nt, Human
aggaaagguggccuuagca

SEQ ID NO: 949736 - RNA, 22 nt, Human
ccagggcagugggagaaggugc

SEQ ID NO: 949737 - RNA, 22 nt, Human
gcagagcucaagguguucagcu

SEQ ID NO: 949738 - RNA, 17 nt, Human
acaagcaguggccaugg

SEQ ID NO: 949739 - RNA, 20 nt, Human
acagccagaggaggcagaca

SEQ ID NO: 949740 - RNA, 22 nt, Human
ugcccugucuaagcugucagua

SEQ ID NO: 949741 - RNA, 22 nt, Human
auucuggauuaucaguccacca

SEQ ID NO: 949742 - RNA, 22 nt, Human
ugaagacagaccaaggagaaug

SEQ ID NO: 949743 - RNA, 22 nt, Human
gggugggagucuggcccucaaa

SEQ ID NO: 949744 - RNA, 22 nt, Human
cauagcaacagcaucaagucaa

SEQ ID NO: 949745 - RNA, 22 nt, Human
gaaacacaugcagcuccauaga

SEQ ID NO: 949746 - RNA, 22 nt, Human
cuggccugaggucggcuguagg

SEQ ID NO: 949747 - RNA, 22 nt, Human
aagcugccaccagcccagggca

SEQ ID NO: 949748 - RNA, 22 nt, Human
uggguagagcaggcuggggcuu

SEQ ID NO: 949749 - RNA, 23 nt, Human
uuucaacuccugccauuauuucu

SEQ ID NO: 949750 - RNA, 22 nt, Human
uuugaauaucacaaacuuucaa

SEQ ID NO: 949751 - RNA, 19 nt, Human
cagagccucagagcuagaa

SEQ ID NO: 949752 - RNA, 22 nt, Human
aaauuggauuuuaaacuguugg

SEQ ID NO: 949753 - RNA, 20 nt, Human
ugcucugucuaaaacuuccc

SEQ ID NO: 949754 - RNA, 23 nt, Human
aggaggaaaaguuaucugcugag

SEQ ID NO: 949755 - RNA, 18 nt, Human
uguuaggaagggcacaca

SEQ ID NO: 949756 - RNA, 22 nt, Human
ucuuugcaucccuuccauaguu

SEQ ID NO: 949757 - RNA, 22 nt, Human
ccagucccaucucugucgcuua

SEQ ID NO: 949758 - RNA, 22 nt, Human
aaauguguuccuuugcuacaga

SEQ ID NO: 949759 - RNA, 23 nt, Human
cuuuuaacuagaguaucagcugc

SEQ ID NO: 949760 - RNA, 22 nt, Human
gcuuccuggagggagagagcug

SEQ ID NO: 949761 - RNA, 22 nt, Human
gagcugugaaaagugccugggg

SEQ ID NO: 949762 - RNA, 22 nt, Human
aggucagcaugaguagaaggua

SEQ ID NO: 949763 - RNA, 22 nt, Human
gagccaagggcgugcuggagag

SEQ ID NO: 949764 - RNA, 20 nt, Human
aguuauaguaucuagccaug

SEQ ID NO: 949765 - RNA, 22 nt, Human
cucucugggcccaguuggcacc

SEQ ID NO: 949766 - RNA, 22 nt, Human
aaggccaugaccacuugcugug

SEQ ID NO: 949767 - RNA, 22 nt, Human
agcaccuugcucuuggccuucc

SEQ ID NO: 949768 - RNA, 22 nt, Human
cugagaaggaagccuccacucu

SEQ ID NO: 949769 - RNA, 22 nt, Human
auuucuguugcuuauaaauuac

SEQ ID NO: 949770 - RNA, 23 nt, Human
ucucuuucaagagcuuaaugugc

SEQ ID NO: 949771 - RNA, 22 nt, Human
uuuuauuggagugauaccaagc

SEQ ID NO: 949772 - RNA, 22 nt, Human
ugcacacaaaugugaacgugcc

SEQ ID NO: 949773 - RNA, 22 nt, Human
gagcucuggcagggcaggucug

SEQ ID NO: 949774 - RNA, 22 nt, Human
auucuucauuuacuguuacuug

SEQ ID NO: 949775 - RNA, 22 nt, Human
gcacagggccuggcacauaaga

SEQ ID NO: 949776 - RNA, 22 nt, Human
aggagccaggaaaccugcucug

SEQ ID NO: 949777 - RNA, 22 nt, Human
ucugucuccugccagugccucu

SEQ ID NO: 949778 - RNA, 22 nt, Human
uccuucagugucccgcucaggu

SEQ ID NO: 949779 - RNA, 21 nt, Human
aggagggcacaaggccaggaa

SEQ ID NO: 949780 - RNA, 22 nt, Human
gaggggaaaguucugcacaagg

SEQ ID NO: 949781 - RNA, 22 nt, Human
gagcaggcauucuaguggcuga

SEQ ID NO: 949782 - RNA, 22 nt, Human
acacugaauaauugagaguuga

SEQ ID NO: 949783 - RNA, 22 nt, Human
cagagcagaagcgguccucaca

SEQ ID NO: 949784 - RNA, 22 nt, Human
ccuggccaggcuccaaguacug

SEQ ID NO: 949785 - RNA, 22 nt, Human
agccaggaagaaggucacacca

SEQ ID NO: 949786 - RNA, 22 nt, Human
ucagcugaaguggagaagcaga

SEQ ID NO: 949787 - RNA, 22 nt, Human
acagggcagagugaaaugcuau

SEQ ID NO: 949788 - RNA, 22 nt, Human
gcaggccuccccugcuggagcu

SEQ ID NO: 949789 - RNA, 22 nt, Human
ugcuguuauacuuagcugguua

SEQ ID NO: 949790 - RNA, 22 nt, Human
ccagcucucugcagaaaggacu

SEQ ID NO: 949791 - RNA, 22 nt, Human
cugcuucuaagaaccugcagcu

SEQ ID NO: 949792 - RNA, 22 nt, Human
cuguuaaucugcuugcaugaug

SEQ ID NO: 949793 - RNA, 22 nt, Human
ugccuuggugcuucuucaugug

SEQ ID NO: 949794 - RNA, 22 nt, Human
ggaggcugcugccucacguggg

SEQ ID NO: 949795 - RNA, 22 nt, Human
guacacauuaugcuucucuaaa

SEQ ID NO: 949796 - RNA, 22 nt, Human
augugcaacuucagcagaaagg

SEQ ID NO: 949797 - RNA, 22 nt, Human
uauaucaccaaaaacaguucug

SEQ ID NO: 949798 - RNA, 22 nt, Human
uuggcagcauccaagucucggg

SEQ ID NO: 949799 - RNA, 22 nt, Human
gagcacugauuuauuuuugucu

SEQ ID NO: 949800 - RNA, 22 nt, Human
ugacaguuaagguauacauuca

SEQ ID NO: 949801 - RNA, 22 nt, Human
cucugugcucccaugcuaguaa

SEQ ID NO: 949802 - RNA, 22 nt, Human
gugucaugggagucagaaguga

SEQ ID NO: 949803 - RNA, 22 nt, Human
ugggaguguucuuggcuugcuu

SEQ ID NO: 949804 - RNA, 22 nt, Human
uagaaaugauuuugaugcuuca

SEQ ID NO: 949805 - RNA, 19 nt, Human
ucucuggggacacuuucac

SEQ ID NO: 949806 - RNA, 22 nt, Human
gaggccagcuaguccaggaagu

SEQ ID NO: 949807 - RNA, 22 nt, Human
ccugucuguauugguuugcuau

SEQ ID NO: 949808 - RNA, 23 nt, Human
uaauucacauauacauugcuuca

SEQ ID NO: 949809 - RNA, 22 nt, Human
gcucaggacccaggugugaccu

SEQ ID NO: 949810 - RNA, 22 nt, Human
agugaguggguuacagauggga

SEQ ID NO: 949811 - RNA, 19 nt, Human
gcacugaagaguuggucac

SEQ ID NO: 949812 - RNA, 22 nt, Human
caaaugaagaaccuucucaccu

SEQ ID NO: 949813 - RNA, 22 nt, Human
uuugaacugauaaucuucuguu

SEQ ID NO: 949814 - RNA, 22 nt, Human
aggagaaggaagugcaucacua

SEQ ID NO: 949815 - RNA, 22 nt, Human
gcaaaacagucgaugccuccca

SEQ ID NO: 949816 - RNA, 22 nt, Human
ucagucucuggggcuucuguuu

SEQ ID NO: 949817 - RNA, 22 nt, Human
acuuucucccacccacccgucu

SEQ ID NO: 949818 - RNA, 22 nt, Human
ugaaagguuaaaaguaguauug

SEQ ID NO: 949819 - RNA, 22 nt, Human
cauuugaaccuggauguucuua

SEQ ID NO: 949820 - RNA, 18 nt, Human
gggcaucauucacaaagu

SEQ ID NO: 949821 - RNA, 22 nt, Human
aaguucaaguguaaucuuuauu

SEQ ID NO: 949822 - RNA, 22 nt, Human
uuguuauaaagacuaaauaugu

SEQ ID NO: 949823 - RNA, 22 nt, Human
gauuucaaccuaacaguaugac

SEQ ID NO: 949824 - RNA, 22 nt, Human
agcagccaaccuuacauucauc

SEQ ID NO: 949825 - RNA, 22 nt, Human
gaucuucucuuuaguagaaaca

SEQ ID NO: 949826 - RNA, 22 nt, Human
gugucccaaagauuagaaauca

SEQ ID NO: 949827 - RNA, 22 nt, Human
gcagcugaauguccauugcugc

SEQ ID NO: 949828 - RNA, 22 nt, Human
uguaauggaagugggauugcau

SEQ ID NO: 949829 - RNA, 22 nt, Human
ccaaaguccuuucuccaccugc

SEQ ID NO: 949830 - RNA, 22 nt, Human
ucagaaaugaucguuauucauu

SEQ ID NO: 949831 - RNA, 22 nt, Human
agcugaguuaauucaucacuua

SEQ ID NO: 949832 - RNA, 21 nt, Human
gacucugcaccaaauuaagcc

SEQ ID NO: 949833 - RNA, 22 nt, Human
ggcugccuccucgagacaggau

SEQ ID NO: 949834 - RNA, 22 nt, Human
uugauaaaaugauaucuucuuu

SEQ ID NO: 949835 - RNA, 22 nt, Human
uggagcugacucacaccagcua

SEQ ID NO: 949836 - RNA, 22 nt, Human
agggcagagauuaauuaagaca

SEQ ID NO: 949837 - RNA, 22 nt, Human
gcugcccauuccacuggauggu

SEQ ID NO: 949838 - RNA, 22 nt, Human
ucccagggacaccaagcuguuu

SEQ ID NO: 949839 - RNA, 22 nt, Human
uuuuauauggcacauugguugg

SEQ ID NO: 949840 - RNA, 22 nt, Human
ucuggaaguuagaggaggaaag

SEQ ID NO: 949841 - RNA, 22 nt, Human
cuggccacugguggucauaggc

SEQ ID NO: 949842 - RNA, 22 nt, Human
aaucaguuagaaggaagagaau

SEQ ID NO: 949843 - RNA, 22 nt, Human
gauuucuacuugaacuugcuaa

SEQ ID NO: 949844 - RNA, 22 nt, Human
agucucuuuaaucacagugucu

SEQ ID NO: 949845 - RNA, 22 nt, Human
auuaggcagggcaugguggcuc

SEQ ID NO: 949846 - RNA, 22 nt, Human
uuugaaucugauauggcagcau

SEQ ID NO: 949847 - RNA, 22 nt, Human
gcuugggacuggagaauagggu

SEQ ID NO: 949848 - RNA, 19 nt, Human
ggcagaagguguaggggga

SEQ ID NO: 949849 - RNA, 22 nt, Human
uggcucagcgcggccuggucuu

SEQ ID NO: 949850 - RNA, 22 nt, Human
guguccacggcugagaaugauu

SEQ ID NO: 949851 - RNA, 22 nt, Human
gacagaggcaagaccagaagcc

SEQ ID NO: 949852 - RNA, 22 nt, Human
ucugggagauccaagcagaacu

SEQ ID NO: 949853 - RNA, 22 nt, Human
aagcugccaaugguaagcugcu

SEQ ID NO: 949854 - RNA, 17 nt, Human
ucccaggaacagggaau

SEQ ID NO: 949855 - RNA, 22 nt, Human
gcucuguguccacagcuggaaa

SEQ ID NO: 949856 - RNA, 22 nt, Human
aaaugcauaucaaagacuugaa

SEQ ID NO: 949857 - RNA, 22 nt, Human
ggagccuugggcgcucucccau

SEQ ID NO: 949858 - RNA, 22 nt, Human
aauguauaaaguguuaauaacu

SEQ ID NO: 949859 - RNA, 22 nt, Human
gagaggcugacuggcuguccug

SEQ ID NO: 949860 - RNA, 22 nt, Human
uugaaaggccuguuuauccagc

SEQ ID NO: 949861 - RNA, 22 nt, Human
uuguuacaucuuauguaagugg

SEQ ID NO: 949862 - RNA, 22 nt, Human
uguuucuagagaaaauauuuac

SEQ ID NO: 949863 - RNA, 22 nt, Human
caaaauguucuggcaccuuuaa

SEQ ID NO: 949864 - RNA, 22 nt, Human
gucaucuugcuguuuuagaucu

SEQ ID NO: 949865 - RNA, 20 nt, Human
cagaggcauuuucagacucu

SEQ ID NO: 949866 - RNA, 20 nt, Human
guauuagguguuccucuuuc

SEQ ID NO: 949867 - RNA, 22 nt, Human
gcugagugagguccagagcuug

SEQ ID NO: 949868 - RNA, 22 nt, Human
aacuuucaggcaaugaauauuu

SEQ ID NO: 949869 - RNA, 22 nt, Human
cugcugggcuccucaugugacu

SEQ ID NO: 949870 - RNA, 22 nt, Human
aaacucuggagauguuuaugca

SEQ ID NO: 949871 - RNA, 22 nt, Human
ucagagugcagggaguagcagc

SEQ ID NO: 949872 - RNA, 22 nt, Human
cagaggcccagugagagggcug

SEQ ID NO: 949873 - RNA, 22 nt, Human
uugcacuccagcccgagcaaca

SEQ ID NO: 949874 - RNA, 22 nt, Human
gcuacugauugaccuuggagag

SEQ ID NO: 949875 - RNA, 22 nt, Human
guggcugggcuccgagcggcuu

SEQ ID NO: 949876 - RNA, 22 nt, Human
gcuggccuucugcagaguucug

SEQ ID NO: 949877 - RNA, 22 nt, Human
uuuaaauucugucugccgcuua

SEQ ID NO: 949878 - RNA, 22 nt, Human
uccagaguacggaagagucauc

SEQ ID NO: 949879 - RNA, 22 nt, Human
agaggccagggacacugcucaa

SEQ ID NO: 949880 - RNA, 22 nt, Human
gagccagguuggaggcugcagu

SEQ ID NO: 949881 - RNA, 20 nt, Human
uucaggauucuagaccacac

SEQ ID NO: 949882 - RNA, 22 nt, Human
ucucccacagccgugcuucaag

SEQ ID NO: 949883 - RNA, 22 nt, Human
aacuuugucuuuuaugcuuaca

SEQ ID NO: 949884 - RNA, 22 nt, Human
uuauuucuugucuauguagcca

SEQ ID NO: 949885 - RNA, 22 nt, Human
uccuucaguuaaagaucucaca

SEQ ID NO: 949886 - RNA, 22 nt, Human
ucuggccaacaaaaacuaaguc

SEQ ID NO: 949887 - RNA, 22 nt, Human
cccagguggguuggccucuguc

SEQ ID NO: 949888 - RNA, 22 nt, Human
ggcgcuggccacgguggcucug

SEQ ID NO: 949889 - RNA, 22 nt, Human
ucagaacagaagaaggaacacg

SEQ ID NO: 949890 - RNA, 22 nt, Human
ccuggggcucaagauggcgccg

SEQ ID NO: 949891 - RNA, 22 nt, Human
ccucacuuuccuuucuccuggg

SEQ ID NO: 949892 - RNA, 22 nt, Human
cagcuggcagcccuggcccugc

SEQ ID NO: 949893 - RNA, 22 nt, Human
cagaagcacuaggaggaaacgu

SEQ ID NO: 949894 - RNA, 22 nt, Human
caggcuugcugcuagagcacuu

SEQ ID NO: 949895 - RNA, 22 nt, Human
acagagaugcaaguguguauuu

SEQ ID NO: 949896 - RNA, 21 nt, Human
ugggggagaauugguugcuuu

SEQ ID NO: 949897 - RNA, 22 nt, Human
uaagucauaagucaugauguua

SEQ ID NO: 949898 - RNA, 22 nt, Human
cugcagggcccgccugagcccu

SEQ ID NO: 949899 - RNA, 22 nt, Human
uugucccaggacuugcauagau

SEQ ID NO: 949900 - RNA, 22 nt, Human
uggccaaaguagaaaauaauag

SEQ ID NO: 949901 - RNA, 22 nt, Human
ccccagccagcaggaccucuga

SEQ ID NO: 949902 - RNA, 22 nt, Human
uauuucagcccuacuacuuggc

SEQ ID NO: 949903 - RNA, 22 nt, Human
uugauacauagcacaguuuagg

SEQ ID NO: 949904 - RNA, 22 nt, Human
ccccaggaagccucagauuugc

SEQ ID NO: 949905 - RNA, 22 nt, Human
acucuugucucaacuuuuguau

SEQ ID NO: 949906 - RNA, 22 nt, Human
agggaauccaucuaucuucauu

SEQ ID NO: 949907 - RNA, 22 nt, Human
uuuggaauauuaaaaugucuca

SEQ ID NO: 949908 - RNA, 22 nt, Human
caaauaucuuuggcaaagagaa

SEQ ID NO: 949909 - RNA, 22 nt, Human
uaagacauuugaaaugugaucc

SEQ ID NO: 949910 - RNA, 22 nt, Human
acucugcucuuuggacaaugcc

SEQ ID NO: 949911 - RNA, 19 nt, Human
ccuggguccacucagacua

SEQ ID NO: 949912 - RNA, 22 nt, Human
agccuggagaggcgccauacac

SEQ ID NO: 949913 - RNA, 22 nt, Human
aguuauucauuuauucuguaca

SEQ ID NO: 949914 - RNA, 22 nt, Human
ucauuguuucugcuuuucauga

SEQ ID NO: 949915 - RNA, 22 nt, Human
aaucuucacagagaaaauuagg

SEQ ID NO: 949916 - RNA, 22 nt, Human
uauucacaguugauuuacaguu

SEQ ID NO: 949917 - RNA, 22 nt, Human
gcugucugucuucacaucucgc

SEQ ID NO: 949918 - RNA, 22 nt, Human
ccagggcaugggaagaacugaa

SEQ ID NO: 949919 - RNA, 22 nt, Human
aagggcuggaucucucugagca

SEQ ID NO: 949920 - RNA, 22 nt, Human
uuggcaucaguguaggaccugu

SEQ ID NO: 949921 - RNA, 22 nt, Human
gagggaaggacccauuuuaagu

SEQ ID NO: 949922 - RNA, 20 nt, Human
caggagggacauuucagcau

SEQ ID NO: 949923 - RNA, 22 nt, Human
gccagcaguauguccuggcagu

SEQ ID NO: 949924 - RNA, 21 nt, Human
ucccucagaagcucuugguca

SEQ ID NO: 949925 - RNA, 22 nt, Human
uuucuauaaaaagugcuaggau

SEQ ID NO: 949926 - RNA, 22 nt, Human
uguauuuugugaggaucacucu

SEQ ID NO: 949927 - RNA, 22 nt, Human
agucuccuuggccucaaugccu

SEQ ID NO: 949928 - RNA, 22 nt, Human
auguuuuauauuuugcagcagu

SEQ ID NO: 949929 - RNA, 22 nt, Human
caguggaggcucaagugugcuu

SEQ ID NO: 949930 - RNA, 22 nt, Human
ccuuuuauaaaguuguauugaa

SEQ ID NO: 949931 - RNA, 19 nt, Human
gggcucuggccucaguggg

SEQ ID NO: 949932 - RNA, 22 nt, Human
gcuguucagaugcgauucagga

SEQ ID NO: 949933 - RNA, 23 nt, Human
cccuggagcuagucugagcagag

SEQ ID NO: 949934 - RNA, 22 nt, Human
aauuuagaauucgcuagcuaau

SEQ ID NO: 949935 - RNA, 22 nt, Human
aggccuuuguggagcucauggc

SEQ ID NO: 949936 - RNA, 22 nt, Human
gcagcccaaaaaagagguagau

SEQ ID NO: 949937 - RNA, 22 nt, Human
ucucugguuauuaacuaacucc

SEQ ID NO: 949938 - RNA, 22 nt, Human
ucccaggguccucuucuggaau

SEQ ID NO: 949939 - RNA, 22 nt, Human
acaugcauacaagcacauguag

SEQ ID NO: 949940 - RNA, 22 nt, Human
ugcauuaucuuuaauguucuca

SEQ ID NO: 949941 - RNA, 22 nt, Human
aaaaguucccugguuagaaaag

SEQ ID NO: 949942 - RNA, 22 nt, Human
gcccacacaccagcucaggagg

SEQ ID NO: 949943 - RNA, 22 nt, Human
cugggcuggcgcauccgacacg

SEQ ID NO: 949944 - RNA, 22 nt, Human
uugaaaacuuucuagaccaaga

SEQ ID NO: 949945 - RNA, 22 nt, Human
agaaauguggaucguuuuaaaa

SEQ ID NO: 949946 - RNA, 22 nt, Human
agccccaguaagggagggccug

SEQ ID NO: 949947 - RNA, 22 nt, Human
gcccagcagcugguggagaagg

SEQ ID NO: 949948 - RNA, 22 nt, Human
uuuccucauuuaucugcuggga

SEQ ID NO: 949949 - RNA, 22 nt, Human
cagggcaguuugugccuaugag

SEQ ID NO: 949950 - RNA, 19 nt, Human
cugcugggugcugagggag

SEQ ID NO: 949951 - RNA, 22 nt, Human
gcaggaugggagcuucacuuug

SEQ ID NO: 949952 - RNA, 22 nt, Human
acacaggagauauguaauggcu

SEQ ID NO: 949953 - RNA, 22 nt, Human
agcugcaguaaagcucuccagg

SEQ ID NO: 949954 - RNA, 22 nt, Human
ggaggggauuuaguagaugcua

SEQ ID NO: 949955 - RNA, 22 nt, Human
auaugaagaauuccaauuugga

SEQ ID NO: 949956 - RNA, 22 nt, Human
aauaguguuguucacucaggag

SEQ ID NO: 949957 - RNA, 22 nt, Human
cccuggaguccggagcucaccu

SEQ ID NO: 949958 - RNA, 22 nt, Human
gcucaggaaggcucaaccagga

SEQ ID NO: 949959 - RNA, 22 nt, Human
gugcagagaaaugagaagucga

SEQ ID NO: 949960 - RNA, 22 nt, Human
ccagaggugcugggagaggucu

SEQ ID NO: 949961 - RNA, 22 nt, Human
ugagcuucaaaauaugugaauc

SEQ ID NO: 949962 - RNA, 22 nt, Human
gcugccuuuugcuccucccacc

SEQ ID NO: 949963 - RNA, 22 nt, Human
cugagccuuauucaccagcccu

SEQ ID NO: 949964 - RNA, 22 nt, Human
ucucuggccgagagucccuggg

SEQ ID NO: 949965 - RNA, 22 nt, Human
ucccaggauguuggcggcaggu

SEQ ID NO: 949966 - RNA, 22 nt, Human
cacucaggcugugucaggagga

SEQ ID NO: 949967 - RNA, 23 nt, Human
agccuucaggcaaugucaguaga

SEQ ID NO: 949968 - RNA, 22 nt, Human
guacauguugguuguuuccagu

SEQ ID NO: 949969 - RNA, 22 nt, Human
cugcuguguuggcauuggauag

SEQ ID NO: 949970 - RNA, 22 nt, Human
ccuuccuggagcccaugcagau

SEQ ID NO: 949971 - RNA, 22 nt, Human
agggagcaugggugaagcaggc

SEQ ID NO: 949972 - RNA, 22 nt, Human
acagguggaggcuuuaggaggu

SEQ ID NO: 949973 - RNA, 22 nt, Human
augcaguaaauguuaagaaaaa

SEQ ID NO: 949974 - RNA, 22 nt, Human
gggugacauuucccaaugagcc

SEQ ID NO: 949975 - RNA, 22 nt, Human
gagagucacugucugcauuucc

SEQ ID NO: 949976 - RNA, 22 nt, Human
uagccgcuuaauuauuugguga

SEQ ID NO: 949977 - RNA, 22 nt, Human
uggaaagaaaaacaggccauga

SEQ ID NO: 949978 - RNA, 22 nt, Human
gccuaggaguggggauggcggu

SEQ ID NO: 949979 - RNA, 22 nt, Human
cagcugccugucuggaggcaau

SEQ ID NO: 949980 - RNA, 22 nt, Human
ccacacugaaccucagugucuu

SEQ ID NO: 949981 - RNA, 22 nt, Human
auuguuuuccaaagaugcugcu

SEQ ID NO: 949982 - RNA, 22 nt, Human
uuugcacuagcauuuguccaug

SEQ ID NO: 949983 - RNA, 22 nt, Human
acaggugaccugcucauaugaa

SEQ ID NO: 949984 - RNA, 22 nt, Human
ugcugccaccugguggcugaag

SEQ ID NO: 949985 - RNA, 22 nt, Human
uccaagggcaugcugaaauaag

SEQ ID NO: 949986 - RNA, 22 nt, Human
gcagauggcugagccugcagau

SEQ ID NO: 949987 - RNA, 20 nt, Human
aauaaaagaagccuucaccc

SEQ ID NO: 949988 - RNA, 22 nt, Human
ccugaagcaaggguaggcaggu

SEQ ID NO: 949989 - RNA, 22 nt, Human
ccagucccgcaugguccagaau

SEQ ID NO: 949990 - RNA, 22 nt, Human
aagaauuauugcaauacuagau

SEQ ID NO: 949991 - RNA, 19 nt, Human
cuguggcugaccucuggcc

SEQ ID NO: 949992 - RNA, 22 nt, Human
uggagggaacccaggcugcucu

SEQ ID NO: 949993 - RNA, 22 nt, Human
gcagcguggggcugagucagcu

SEQ ID NO: 949994 - RNA, 22 nt, Human
gcucccaccaggcagaccuacc

SEQ ID NO: 949995 - RNA, 22 nt, Human
gcagcugccgugagcucacgcc

SEQ ID NO: 949996 - RNA, 22 nt, Human
auuacacacucaaguccuguua

SEQ ID NO: 949997 - RNA, 22 nt, Human
uuucuaguccucaugcaucauu

SEQ ID NO: 949998 - RNA, 22 nt, Human
augauguuauuuucagaaacau

SEQ ID NO: 949999 - RNA, 20 nt, Human
aagauucauuguaauuaggg

SEQ ID NO: 950000 - RNA, 22 nt, Human
cuguauuucccacauucucuau

SEQ ID NO: 950001 - RNA, 22 nt, Human
aagacaauuugauacuaguugc

SEQ ID NO: 950002 - RNA, 22 nt, Human
cucuuaaauaacaucauugcuu

SEQ ID NO: 950003 - RNA, 22 nt, Human
cuccuggcacugucuugaccca

SEQ ID NO: 950004 - RNA, 22 nt, Human
ggccugcuccgggggcugagcu

SEQ ID NO: 950005 - RNA, 22 nt, Human
ugcugaaagucccaaaucucau

SEQ ID NO: 950006 - RNA, 22 nt, Human
uauugaaauccauuacguucuu

SEQ ID NO: 950007 - RNA, 22 nt, Human
uagggcagccacccaggcugcu

SEQ ID NO: 950008 - RNA, 22 nt, Human
agaaugcuccagagcugaaaga

SEQ ID NO: 950009 - RNA, 21 nt, Human
gcucucugcaugguggcucag

SEQ ID NO: 950010 - RNA, 22 nt, Human
caggaacaauguaagucucauu

SEQ ID NO: 950011 - RNA, 18 nt, Human
ucugcugcugcguccugc

SEQ ID NO: 950012 - RNA, 22 nt, Human
uauuuuaaagugaagggucuug

SEQ ID NO: 950013 - RNA, 22 nt, Human
gggacaggccccucgcuagcuu

SEQ ID NO: 950014 - RNA, 22 nt, Human
uuuaacacuaguuucuuuaacu

SEQ ID NO: 950015 - RNA, 22 nt, Human
cacaggcugcccgcagcuggga

SEQ ID NO: 950016 - RNA, 22 nt, Human
uauguacacauacacuuguaau

SEQ ID NO: 950017 - RNA, 19 nt, Human
gcuuuggagggagguucua

SEQ ID NO: 950018 - RNA, 22 nt, Human
ugcagccuugccuccucccagc

SEQ ID NO: 950019 - RNA, 22 nt, Human
gugaggggaguaaagccauguu

SEQ ID NO: 950020 - RNA, 18 nt, Human
ugcuggcaacuacuauug

SEQ ID NO: 950021 - RNA, 22 nt, Human
ggccugaggcgucccagcugug

SEQ ID NO: 950022 - RNA, 22 nt, Human
gggcagcuccuguggaauccac

SEQ ID NO: 950023 - RNA, 22 nt, Human
cucugggcacauuuuccaggac

SEQ ID NO: 950024 - RNA, 21 nt, Human
uggaccaaaguaauuugccuu

SEQ ID NO: 950025 - RNA, 22 nt, Human
aaagaauacccugggucauaaa

SEQ ID NO: 950026 - RNA, 22 nt, Human
ugaaggugucuuugugaacauc

SEQ ID NO: 950027 - RNA, 22 nt, Human
ugggcuggcguggagaguuuag

SEQ ID NO: 950028 - RNA, 22 nt, Human
gccuaauaacuagcuguguaac

SEQ ID NO: 950029 - RNA, 22 nt, Human
gucagugucuuaacagagauua

SEQ ID NO: 950030 - RNA, 22 nt, Human
cagucccuaguggagcucacag

SEQ ID NO: 950031 - RNA, 22 nt, Human
gaguccaguuguucacagaggc

SEQ ID NO: 950032 - RNA, 22 nt, Human
cccuggaggagcuuagagcuug

SEQ ID NO: 950033 - RNA, 22 nt, Human
cccaggcuggagugcaauggug

SEQ ID NO: 950034 - RNA, 22 nt, Human
cugggcagugguggcccuuccc

SEQ ID NO: 950035 - RNA, 22 nt, Human
uggaggagggcuggugucugua

SEQ ID NO: 950036 - RNA, 22 nt, Human
ugagcccaggaguaugaggcug

SEQ ID NO: 950037 - RNA, 22 nt, Human
auucaguucuaaggucagugcc

SEQ ID NO: 950038 - RNA, 22 nt, Human
aggcaggcaaccaccugggaag

SEQ ID NO: 950039 - RNA, 22 nt, Human
uuauguacaauguuaauguaaa

SEQ ID NO: 950040 - RNA, 22 nt, Human
uagggaggaggguuuucaaauc

SEQ ID NO: 950041 - RNA, 22 nt, Human
gagcagcuguccccaaagcuuc

SEQ ID NO: 950042 - RNA, 19 nt, Human
ucuuucauuucuagcucug

SEQ ID NO: 950043 - RNA, 22 nt, Human
ucccagggugcgccugcccucg

SEQ ID NO: 950044 - RNA, 22 nt, Human
uggcacugaagcuggaaagccu

SEQ ID NO: 950045 - RNA, 21 nt, Human
uuccuggcggcagaaacguga

SEQ ID NO: 950046 - RNA, 22 nt, Human
ugguaauuuacgcauuucugua

SEQ ID NO: 950047 - RNA, 22 nt, Human
cucuccuugcagauggcugccu

SEQ ID NO: 950048 - RNA, 22 nt, Human
aagcaggcauuccagagacaau

SEQ ID NO: 950049 - RNA, 22 nt, Human
ggcuccugaaagacuaugggaa

SEQ ID NO: 950050 - RNA, 22 nt, Human
auuaucuauguagaaugauuuu

SEQ ID NO: 950051 - RNA, 22 nt, Human
agugcauugcaucucugcuuca

SEQ ID NO: 950052 - RNA, 22 nt, Human
ugcaagaggaauucuagaagca

SEQ ID NO: 950053 - RNA, 22 nt, Human
ccaggagaaugggauuacccua

SEQ ID NO: 950054 - RNA, 22 nt, Human
ucccugggagaugaugaugagg

SEQ ID NO: 950055 - RNA, 22 nt, Human
uucuuaaaacuuauggacaggu

SEQ ID NO: 950056 - RNA, 22 nt, Human
aggcaagcccccagugaggcuc

SEQ ID NO: 950057 - RNA, 22 nt, Human
gggagcugagcuggaagagaau

SEQ ID NO: 950058 - RNA, 22 nt, Human
agagcagugcugaagaguaggg

SEQ ID NO: 950059 - RNA, 18 nt, Human
cauuguacaaugcuuuau

SEQ ID NO: 950060 - RNA, 22 nt, Human
ccuggagauuucuucaagcuuu

SEQ ID NO: 950061 - RNA, 22 nt, Human
cugggaggcggagguuguagug

SEQ ID NO: 950062 - RNA, 19 nt, Human
uguggccaugguucagcug

SEQ ID NO: 950063 - RNA, 22 nt, Human
gaaacugugaggaucuuaacuu

SEQ ID NO: 950064 - RNA, 22 nt, Human
gucucuggguuaagcagugcau

SEQ ID NO: 950065 - RNA, 22 nt, Human
cccuccagcucaaagcaaccgg

SEQ ID NO: 950066 - RNA, 22 nt, Human
ugccuugccacugcucuuaaug

SEQ ID NO: 950067 - RNA, 22 nt, Human
ucaguuuuucuauacuuuguag

SEQ ID NO: 950068 - RNA, 19 nt, Human
aauccaggauaagccccuu

SEQ ID NO: 950069 - RNA, 23 nt, Human
uggccucuccccaccuggcagaa

SEQ ID NO: 950070 - RNA, 22 nt, Human
cccaggaaacccgaaggcgacc

SEQ ID NO: 950071 - RNA, 22 nt, Human
cugccuggcauggagaagagaa

SEQ ID NO: 950072 - RNA, 22 nt, Human
cuacauuuggagaguauaggaa

SEQ ID NO: 950073 - RNA, 22 nt, Human
guggcccugucccaggccuccu

SEQ ID NO: 950074 - RNA, 22 nt, Human
ugaggcagcccacuuuccuuag

SEQ ID NO: 950075 - RNA, 22 nt, Human
ugcucagacaagcugaacagua

SEQ ID NO: 950076 - RNA, 22 nt, Human
uuagccauuuuauacaagugua

SEQ ID NO: 950077 - RNA, 22 nt, Human
ggcagcaguaggagcuaaucuu

SEQ ID NO: 950078 - RNA, 22 nt, Human
cccagagcugagucugauauau

SEQ ID NO: 950079 - RNA, 22 nt, Human
uuuauguaaguggaaugaugcc

SEQ ID NO: 950080 - RNA, 22 nt, Human
uggaaagcgaggaguuggcauu

SEQ ID NO: 950081 - RNA, 22 nt, Human
agcucccaauugacuugaacua

SEQ ID NO: 950082 - RNA, 22 nt, Human
gcucugcuggagggaaagagaa

SEQ ID NO: 950083 - RNA, 22 nt, Human
aagugacacauggcacuucuau

SEQ ID NO: 950084 - RNA, 21 nt, Human
ucagacuugagcucuucuaca

SEQ ID NO: 950085 - RNA, 22 nt, Human
cuccucagacuuuccuuguccg

SEQ ID NO: 950086 - RNA, 22 nt, Human
cuucuuaaagauuacacaauga

SEQ ID NO: 950087 - RNA, 22 nt, Human
uggcucaguagcagugugguca

SEQ ID NO: 950088 - RNA, 22 nt, Human
ugauuuuuagcuauucugaaga

SEQ ID NO: 950089 - RNA, 22 nt, Human
aggggccuggacauggacgcgc

SEQ ID NO: 950090 - RNA, 22 nt, Human
gaggccuggaauuccagccugg

SEQ ID NO: 950091 - RNA, 22 nt, Human
uaagaauuguguugaauagagu

SEQ ID NO: 950092 - RNA, 22 nt, Human
uuugaaauuggcucauugguuu

SEQ ID NO: 950093 - RNA, 22 nt, Human
cucucaggcuugggucguggca

SEQ ID NO: 950094 - RNA, 22 nt, Human
ugcucagggacaauggagaggg

SEQ ID NO: 950095 - RNA, 22 nt, Human
uaagacacaugcguacaagaua

SEQ ID NO: 950096 - RNA, 22 nt, Human
ccaggagcagggcuggcugcac

SEQ ID NO: 950097 - RNA, 22 nt, Human
cagaggcuaagaugagugggug

SEQ ID NO: 950098 - RNA, 22 nt, Human
aggcaguggaugucaggaaugg

SEQ ID NO: 950099 - RNA, 22 nt, Human
agaccaugggcucugaagagca

SEQ ID NO: 950100 - RNA, 22 nt, Human
uggcucaggaucuaagcagaau

SEQ ID NO: 950101 - RNA, 22 nt, Human
ggagccaguuuagaccucaguu

SEQ ID NO: 950102 - RNA, 22 nt, Human
uccagccaagccuugguagcug

SEQ ID NO: 950103 - RNA, 22 nt, Human
gcuggccagugucccagggauc

SEQ ID NO: 950104 - RNA, 22 nt, Human
aaaguguugggauuacaggugu

SEQ ID NO: 950105 - RNA, 22 nt, Human
uuggccaaggaaguagcaacgg

SEQ ID NO: 950106 - RNA, 22 nt, Human
gcucagagcaucccagugaaug

SEQ ID NO: 950107 - RNA, 22 nt, Human
gagagcuggccagcuucaguau

SEQ ID NO: 950108 - RNA, 22 nt, Human
uguguauuaccauuuuacagcu

SEQ ID NO: 950109 - RNA, 22 nt, Human
gggcaguuuauucuagaugguu

SEQ ID NO: 950110 - RNA, 22 nt, Human
auacuguuuugugacuuaucuu

SEQ ID NO: 950111 - RNA, 22 nt, Human
gcacagggagacagccguggcc

SEQ ID NO: 950112 - RNA, 22 nt, Human
cugcccuggcagccuaccaugg

SEQ ID NO: 950113 - RNA, 22 nt, Human
gcuguucauuagaaauagaaug

SEQ ID NO: 950114 - RNA, 22 nt, Human
gcucugagagugggugauucug

SEQ ID NO: 950115 - RNA, 22 nt, Human
cuuccuguugucacagucugcg

SEQ ID NO: 950116 - RNA, 22 nt, Human
auuucaguagaaaaucuugauu

SEQ ID NO: 950117 - RNA, 22 nt, Human
aucugcaggaaugugugcagag

SEQ ID NO: 950118 - RNA, 22 nt, Human
gcuggccucuggagaagggcuu

SEQ ID NO: 950119 - RNA, 22 nt, Human
ucacaggagauuaugugugcua

SEQ ID NO: 950120 - RNA, 22 nt, Human
uuggaggcaaugggaaggaggc

SEQ ID NO: 950121 - RNA, 22 nt, Human
aggcuucccaagcagcugcaaa

SEQ ID NO: 950122 - RNA, 22 nt, Human
aaauuuucagagcacuagagaa

SEQ ID NO: 950123 - RNA, 22 nt, Human
ggccucagaccggagcuggcca

SEQ ID NO: 950124 - RNA, 22 nt, Human
aagagcuggauugugcugcaga

SEQ ID NO: 950125 - RNA, 21 nt, Human
cugguguagcacucaggugcu

SEQ ID NO: 950126 - RNA, 22 nt, Human
aggcuucuacguggucccaggg

SEQ ID NO: 950127 - RNA, 22 nt, Human
cucagagcaaugaacaugcaaa

SEQ ID NO: 950128 - RNA, 22 nt, Human
acagacauuuucuguauugccu

SEQ ID NO: 950129 - RNA, 22 nt, Human
cagggcuggcuguggcaaucuc

SEQ ID NO: 950130 - RNA, 22 nt, Human
ggcucugggucuguggggagcg

SEQ ID NO: 950131 - RNA, 22 nt, Human
gggugggacugaagucugaggg

SEQ ID NO: 950132 - RNA, 22 nt, Human
ugcccaggaucuggcgaugcuc

SEQ ID NO: 950133 - RNA, 22 nt, Human
guucauuuaugauguaacaugu

SEQ ID NO: 950134 - RNA, 20 nt, Human
uugcagcagugaggugaagg

SEQ ID NO: 950135 - RNA, 22 nt, Human
ugaaccagagucuccagugguu

SEQ ID NO: 950136 - RNA, 22 nt, Human
uuugaaugcaggacauacagaa

SEQ ID NO: 950137 - RNA, 22 nt, Human
agcuguguguuuccacugagcu

SEQ ID NO: 950138 - RNA, 22 nt, Human
ugaaaguugcacauaagagaau

SEQ ID NO: 950139 - RNA, 22 nt, Human
acaaaaagcuccauuacugucc

SEQ ID NO: 950140 - RNA, 23 nt, Human
cugcagucgccggccugggugcc

SEQ ID NO: 950141 - RNA, 22 nt, Human
aggcccugggagcagagaugca

SEQ ID NO: 950142 - RNA, 22 nt, Human
gggagggaaggaggcgccgugu

SEQ ID NO: 950143 - RNA, 20 nt, Human
gacauucauaguuauuacca

SEQ ID NO: 950144 - RNA, 22 nt, Human
cuccagggaugagacagaguag

SEQ ID NO: 950145 - RNA, 22 nt, Human
agcugguuagcaaucuaaguga

SEQ ID NO: 950146 - RNA, 22 nt, Human
ggagcuguucaggacugcuuca

SEQ ID NO: 950147 - RNA, 22 nt, Human
cuccagggaaaggggcguccgc

SEQ ID NO: 950148 - RNA, 22 nt, Human
ccccuggguccaggcuucucug

SEQ ID NO: 950149 - RNA, 22 nt, Human
auaacagaguugggaagugaaa

SEQ ID NO: 950150 - RNA, 22 nt, Human
uccuucagucuucugagccaua

SEQ ID NO: 950151 - RNA, 20 nt, Human
aggagccauugacugcagca

SEQ ID NO: 950152 - RNA, 22 nt, Human
cauuucuagggaucauaaagua

SEQ ID NO: 950153 - RNA, 22 nt, Human
ggcccagccggcgagucucgcg

SEQ ID NO: 950154 - RNA, 22 nt, Human
agugcuuucuugcuccaucagu

SEQ ID NO: 950155 - RNA, 22 nt, Human
cagggcaugaggugugcuucuc

SEQ ID NO: 950156 - RNA, 22 nt, Human
uaaaucaguagauaugguauag

SEQ ID NO: 950157 - RNA, 22 nt, Human
aaaguuuuagaacuaggaagca

SEQ ID NO: 950158 - RNA, 22 nt, Human
acccaggacacagagaugaccc

SEQ ID NO: 950159 - RNA, 22 nt, Human
cuggcaaguacugggccagcuc

SEQ ID NO: 950160 - RNA, 22 nt, Human
aacagaaugcaggggaugcugc

SEQ ID NO: 950161 - RNA, 22 nt, Human
cccaggagauggagguugcagu

SEQ ID NO: 950162 - RNA, 22 nt, Human
ucagaacagaagcuggcuauaa

SEQ ID NO: 950163 - RNA, 22 nt, Human
aguaugaagaugaugaaaaaua

SEQ ID NO: 950164 - RNA, 22 nt, Human
ucccagggacucucugccuucc

SEQ ID NO: 950165 - RNA, 22 nt, Human
uuauuuggaaauauggcuucug

SEQ ID NO: 950166 - RNA, 22 nt, Human
uauauuaaacccucucuguagg

SEQ ID NO: 950167 - RNA, 22 nt, Human
gagcucagcacuaaaaucaugu

SEQ ID NO: 950168 - RNA, 22 nt, Human
acacuuuguuguggcauauacg

SEQ ID NO: 950169 - RNA, 22 nt, Human
uagcagagcagggaucagagcc

SEQ ID NO: 950170 - RNA, 22 nt, Human
gaggagagaugguagauugggu

SEQ ID NO: 950171 - RNA, 22 nt, Human
gauuuuauauggcauacugugg

SEQ ID NO: 950172 - RNA, 22 nt, Human
gagcucauucauucauugccug

SEQ ID NO: 950173 - RNA, 22 nt, Human
ccugccugcggcccgcggggag

SEQ ID NO: 950174 - RNA, 22 nt, Human
uagcccagagucccaauuccag

SEQ ID NO: 950175 - RNA, 22 nt, Human
uggaguuccuuugaaaggcucu

SEQ ID NO: 950176 - RNA, 21 nt, Human
uccaggaguggcugggcaggg

SEQ ID NO: 950177 - RNA, 22 nt, Human
cuuccuucugaagcauagaagc

SEQ ID NO: 950178 - RNA, 22 nt, Human
ucagcugcucuguugagcugaa

SEQ ID NO: 950179 - RNA, 20 nt, Human
aaggcacuaugucugcuagc

SEQ ID NO: 950180 - RNA, 22 nt, Human
uuuauguaguuacggacuauca

SEQ ID NO: 950181 - RNA, 22 nt, Human
ugggccugacucaccugccucc

SEQ ID NO: 950182 - RNA, 22 nt, Human
ccuuuuauacucagugauauca

SEQ ID NO: 950183 - RNA, 22 nt, Human
acagcagcuaaaggugucuccu

SEQ ID NO: 950184 - RNA, 22 nt, Human
uugauacaggcucuauuucauc

SEQ ID NO: 950185 - RNA, 22 nt, Human
ggcagaguggagugcggccucc

SEQ ID NO: 950186 - RNA, 22 nt, Human
gcugagcucccagcaguaucug

SEQ ID NO: 950187 - RNA, 22 nt, Human
ccugccagcauggcuuaucucc

SEQ ID NO: 950188 - RNA, 22 nt, Human
aggggcuggcuuaucugagagu

SEQ ID NO: 950189 - RNA, 22 nt, Human
cucuucaauagauuguugaggg

SEQ ID NO: 950190 - RNA, 22 nt, Human
agugaaauggaugcugcuacug

SEQ ID NO: 950191 - RNA, 22 nt, Human
gcagugcuuuagucuguccuuu

SEQ ID NO: 950192 - RNA, 22 nt, Human
ccacccagccagaugcaggaag

SEQ ID NO: 950193 - RNA, 22 nt, Human
cagacuuucaaggagugaaggc

SEQ ID NO: 950194 - RNA, 22 nt, Human
ggcagccauacucagaccuggg

SEQ ID NO: 950195 - RNA, 22 nt, Human
caaaugcaugagaaauaagagg

SEQ ID NO: 950196 - RNA, 22 nt, Human
ugaggcagcaauuguauuguau

SEQ ID NO: 950197 - RNA, 22 nt, Human
aaaaauagcuucucuugucccu

SEQ ID NO: 950198 - RNA, 22 nt, Human
ccaggagagcaaaggucacucu

SEQ ID NO: 950199 - RNA, 22 nt, Human
ucuggcucuguguccccaccca

SEQ ID NO: 950200 - RNA, 22 nt, Human
ucauaauacaaagaguucugca

SEQ ID NO: 950201 - RNA, 22 nt, Human
acauuuguaugcguuuuuacug

SEQ ID NO: 950202 - RNA, 22 nt, Human
ugugcagagcccacaggcagcu

SEQ ID NO: 950203 - RNA, 22 nt, Human
uguacaauagcuauuaucucca

SEQ ID NO: 950204 - RNA, 22 nt, Human
uaugaacuuuugaugugacaug

SEQ ID NO: 950205 - RNA, 22 nt, Human
gcugagggcauguguggcgacu

SEQ ID NO: 950206 - RNA, 22 nt, Human
uuuauagggacaguucuuggag

SEQ ID NO: 950207 - RNA, 22 nt, Human
cuauuaggcuuccauuucaugc

SEQ ID NO: 950208 - RNA, 22 nt, Human
gggacagaaggaagugagcaca

SEQ ID NO: 950209 - RNA, 22 nt, Human
cagcagcuucuguugaucagaa

SEQ ID NO: 950210 - RNA, 22 nt, Human
caucagcaggcaacacucuugg

SEQ ID NO: 950211 - RNA, 22 nt, Human
aagaguuaagcaacagauacca

SEQ ID NO: 950212 - RNA, 22 nt, Human
cugcugugcagacagacucucu

SEQ ID NO: 950213 - RNA, 22 nt, Human
uuuguagaggguaauugacaga

SEQ ID NO: 950214 - RNA, 22 nt, Human
cugggccugucagggcuuuuug

SEQ ID NO: 950215 - RNA, 22 nt, Human
uugaaggacauccuauuucuag

SEQ ID NO: 950216 - RNA, 19 nt, Human
ccaggccaucccaguuccc

SEQ ID NO: 950217 - RNA, 21 nt, Human
ucacaugcccauuacuggagc

SEQ ID NO: 950218 - RNA, 22 nt, Human
uguaguaagugcgcaauaaaua

SEQ ID NO: 950219 - RNA, 22 nt, Human
ucugaggcuucagacuguacug

SEQ ID NO: 950220 - RNA, 22 nt, Human
uaugcacacauguaugcaugug

SEQ ID NO: 950221 - RNA, 22 nt, Human
uucaacuauuaugaauaaaauu

SEQ ID NO: 950222 - RNA, 22 nt, Human
aaggcagcaacuaauggaucuc

SEQ ID NO: 950223 - RNA, 22 nt, Human
uccuucagcuacucaguuucca

SEQ ID NO: 950224 - RNA, 22 nt, Human
ggcugagcaauuuugaugacau

SEQ ID NO: 950225 - RNA, 22 nt, Human
cucuucuugcuagacugagugc

SEQ ID NO: 950226 - RNA, 17 nt, Human
ucuuuccugccaugcuc

SEQ ID NO: 950227 - RNA, 22 nt, Human
aucaguuucacuugcuugcaaa

SEQ ID NO: 950228 - RNA, 22 nt, Human
gcagcugagagaagaacagggc

SEQ ID NO: 950229 - RNA, 22 nt, Human
uugugucuggaaugcguggagc

SEQ ID NO: 950230 - RNA, 22 nt, Human
agggagcucaguuggaagcggu

SEQ ID NO: 950231 - RNA, 22 nt, Human
ucacaugaguauuauuuuccaa

SEQ ID NO: 950232 - RNA, 22 nt, Human
gugcgccagcucaaggggaggc

SEQ ID NO: 950233 - RNA, 22 nt, Human
ccuggcagguggcgcccucggc

SEQ ID NO: 950234 - RNA, 22 nt, Human
ucugguuagccaauaaugccaa

SEQ ID NO: 950235 - RNA, 22 nt, Human
gcucuuccauuucucuugaacu

SEQ ID NO: 950236 - RNA, 22 nt, Human
uuaauaggcuucuaacauagcu

SEQ ID NO: 950237 - RNA, 20 nt, Human
uucuggaggcuacaagucug

SEQ ID NO: 950238 - RNA, 22 nt, Human
uaaaagacccucuagaguccca

SEQ ID NO: 950239 - RNA, 22 nt, Human
caagaugugccuaaucagaccu

SEQ ID NO: 950240 - RNA, 22 nt, Human
uuugcauuacuugacuuuaguu

SEQ ID NO: 950241 - RNA, 22 nt, Human
aagggaggaggauuuauuguac

SEQ ID NO: 950242 - RNA, 21 nt, Human
caugcaggauuuaaccuagaa

SEQ ID NO: 950243 - RNA, 22 nt, Human
gauuuuaauuauaggagguccu

SEQ ID NO: 950244 - RNA, 22 nt, Human
gagggcuccucacauucucuau

SEQ ID NO: 950245 - RNA, 22 nt, Human
uuucaguggguuuauuucaugu

SEQ ID NO: 950246 - RNA, 22 nt, Human
ggagccagaggcugcugcugug

SEQ ID NO: 950247 - RNA, 22 nt, Human
ugcauuguugaccaguugugca

SEQ ID NO: 950248 - RNA, 22 nt, Human
uuuccuucaucaucugagagcu

SEQ ID NO: 950249 - RNA, 22 nt, Human
aggcagaugggagcuggaaguu

SEQ ID NO: 950250 - RNA, 22 nt, Human
aagccucaccuuuuagaagcua

SEQ ID NO: 950251 - RNA, 22 nt, Human
cagggcagugaagaacacacgu

SEQ ID NO: 950252 - RNA, 22 nt, Human
ucugacauuuugagaaugacau

SEQ ID NO: 950253 - RNA, 22 nt, Human
cuaauguggacucuaucaaagu

SEQ ID NO: 950254 - RNA, 22 nt, Human
cacaaaaguaggaggcaggcgg

SEQ ID NO: 950255 - RNA, 22 nt, Human
uggccuggggaagaccaugggc

SEQ ID NO: 950256 - RNA, 22 nt, Human
guccaggaaucaaaagauggaa

SEQ ID NO: 950257 - RNA, 22 nt, Human
acagaaauauucguggugcuug

SEQ ID NO: 950258 - RNA, 19 nt, Human
aauguaguguuaugucaac

SEQ ID NO: 950259 - RNA, 22 nt, Human
aggucccaggcauagcuggucu

SEQ ID NO: 950260 - RNA, 22 nt, Human
ggcugcugggaauaugccagcu

SEQ ID NO: 950261 - RNA, 17 nt, Human
gcacugaacaauccugu

SEQ ID NO: 950262 - RNA, 22 nt, Human
caggcugccgugaagcaggccu

SEQ ID NO: 950263 - RNA, 22 nt, Human
agccaagcacucaacuccugga

SEQ ID NO: 950264 - RNA, 22 nt, Human
cagacaggcaggugcugcuuug

SEQ ID NO: 950265 - RNA, 21 nt, Human
uggcucugaaagagugcugca

SEQ ID NO: 950266 - RNA, 19 nt, Human
cacagggcaggucucaugu

SEQ ID NO: 950267 - RNA, 22 nt, Human
gagaaguuucugguuugcauag

SEQ ID NO: 950268 - RNA, 22 nt, Human
uucaagaucgaguuuaaaguga

SEQ ID NO: 950269 - RNA, 20 nt, Human
uggcccaguggggcagggug

SEQ ID NO: 950270 - RNA, 21 nt, Human
uuuuauugaugaauggccacu

SEQ ID NO: 950271 - RNA, 22 nt, Human
cagggcugugcccaucuucccc

SEQ ID NO: 950272 - RNA, 22 nt, Human
cagaaagaccugggcucaagag

SEQ ID NO: 950273 - RNA, 22 nt, Human
aggugccaauuuucagugaaca

SEQ ID NO: 950274 - RNA, 22 nt, Human
gcaaugauauugaagugaugaa

SEQ ID NO: 950275 - RNA, 22 nt, Human
uauauuaaccauaggguucuag

SEQ ID NO: 950276 - RNA, 22 nt, Human
cuguuuauacgacagguggagg

SEQ ID NO: 950277 - RNA, 22 nt, Human
uccagcagggaauuaguagucu

SEQ ID NO: 950278 - RNA, 22 nt, Human
cagaggccucacuuccagccag

SEQ ID NO: 950279 - RNA, 22 nt, Human
gcagagcuguuaauggagcuga

SEQ ID NO: 950280 - RNA, 22 nt, Human
aacuacuaccacagucaagaca

SEQ ID NO: 950281 - RNA, 22 nt, Human
gagauuucuuuugaugccuguc

SEQ ID NO: 950282 - RNA, 22 nt, Human
gcucaggaaaacagucuaguaa

SEQ ID NO: 950283 - RNA, 20 nt, Human
ucacauccucucccaacaug

SEQ ID NO: 950284 - RNA, 22 nt, Human
aaaaugugcaguuuuuaagcug

SEQ ID NO: 950285 - RNA, 17 nt, Human
agcagcugaagcagcca

SEQ ID NO: 950286 - RNA, 22 nt, Human
cagugauguuucugcaucagag

SEQ ID NO: 950287 - RNA, 22 nt, Human
aguuggagugaacaugagauug

SEQ ID NO: 950288 - RNA, 22 nt, Human
cuggcaggcagacuucugcaag

SEQ ID NO: 950289 - RNA, 22 nt, Human
gggagggaaagcuugaucuguc

SEQ ID NO: 950290 - RNA, 22 nt, Human
acccagcuggaugcauggaggc

SEQ ID NO: 950291 - RNA, 17 nt, Human
agugacuuggaaagagc

SEQ ID NO: 950292 - RNA, 22 nt, Human
uaauguguccugaaagcuucug

SEQ ID NO: 950293 - RNA, 22 nt, Human
guaucuuuccacaucuucagua

SEQ ID NO: 950294 - RNA, 19 nt, Human
agccuggagggcuggucac

SEQ ID NO: 950295 - RNA, 22 nt, Human
aaugcacaugucuuggccucac

SEQ ID NO: 950296 - RNA, 22 nt, Human
uucuuuccccauggaguucgga

SEQ ID NO: 950297 - RNA, 22 nt, Human
acucugcugucugauggcagga

SEQ ID NO: 950298 - RNA, 22 nt, Human
cccaggcucccaggugggacaa

SEQ ID NO: 950299 - RNA, 21 nt, Human
ugggcagauggcaguguggcu

SEQ ID NO: 950300 - RNA, 22 nt, Human
ccugccuggcuuccagaagaga

SEQ ID NO: 950301 - RNA, 22 nt, Human
ccugagagcauuccacacugaa

SEQ ID NO: 950302 - RNA, 22 nt, Human
uugcauuugagaaaguucuccu

SEQ ID NO: 950303 - RNA, 22 nt, Human
cagccugcuagggcaaugccuu

SEQ ID NO: 950304 - RNA, 22 nt, Human
aaggucauuuuuuccucuguug

SEQ ID NO: 950305 - RNA, 22 nt, Human
caggcagcgcucguggccuggc

SEQ ID NO: 950306 - RNA, 22 nt, Human
uacauugugauguuucaauaca

SEQ ID NO: 950307 - RNA, 22 nt, Human
acugccauuggucaaaugagug

SEQ ID NO: 950308 - RNA, 22 nt, Human
cugcccugagucaugccagaug

SEQ ID NO: 950309 - RNA, 22 nt, Human
uucuuauucuugaaauguggga

SEQ ID NO: 950310 - RNA, 21 nt, Human
accaggcuugugggagggagc

SEQ ID NO: 950311 - RNA, 22 nt, Human
ugagcugggcugggcugagcug

SEQ ID NO: 950312 - RNA, 22 nt, Human
agcaggcuaagggaccuguuua

SEQ ID NO: 950313 - RNA, 22 nt, Human
cggcagcuccgcgccguaggac

SEQ ID NO: 950314 - RNA, 22 nt, Human
aauguucagaggacaauauaaa

SEQ ID NO: 950315 - RNA, 22 nt, Human
gcccaggaaguugaggcugccg

SEQ ID NO: 950316 - RNA, 21 nt, Human
acagcaagccuuccuuucagg

SEQ ID NO: 950317 - RNA, 22 nt, Human
uguccugcaacugaaggagaag

SEQ ID NO: 950318 - RNA, 22 nt, Human
cccaggaaugagcaggcagggg

SEQ ID NO: 950319 - RNA, 22 nt, Human
ggaggggccggcugccugccac

SEQ ID NO: 950320 - RNA, 22 nt, Human
cagacagaaggcuccuugaggu

SEQ ID NO: 950321 - RNA, 22 nt, Human
uuuccuaagguagugauaauuu

SEQ ID NO: 950322 - RNA, 22 nt, Human
cacugcuuuuuuggcuauguac

SEQ ID NO: 950323 - RNA, 22 nt, Human
aagggcugagcacagugagcca

SEQ ID NO: 950324 - RNA, 22 nt, Human
aguacagaccugucucuuccug

SEQ ID NO: 950325 - RNA, 22 nt, Human
aaguucaaucagaugaaaaagc

SEQ ID NO: 950326 - RNA, 22 nt, Human
uggccugaauuauggcagaucu

SEQ ID NO: 950327 - RNA, 22 nt, Human
ugggaggcagguaggugaugau

SEQ ID NO: 950328 - RNA, 22 nt, Human
guggcucuaggugagcauggag

SEQ ID NO: 950329 - RNA, 22 nt, Human
ccagccucaucgccugccuguc

SEQ ID NO: 950330 - RNA, 22 nt, Human
uaggaugagggguggccaagua

SEQ ID NO: 950331 - RNA, 22 nt, Human
cacugccuccccaggcuccaca

SEQ ID NO: 950332 - RNA, 22 nt, Human
gagccagcuauguagcaagagg

SEQ ID NO: 950333 - RNA, 22 nt, Human
acacugcucacuucuucccuug

SEQ ID NO: 950334 - RNA, 21 nt, Human
acauccaggguccucacugcc

SEQ ID NO: 950335 - RNA, 19 nt, Human
aggacucuggaggcaugag

SEQ ID NO: 950336 - RNA, 22 nt, Human
ugggcacuggaagccugcugug

SEQ ID NO: 950337 - RNA, 22 nt, Human
ugaaaucuuauacuuugguagu

SEQ ID NO: 950338 - RNA, 22 nt, Human
cgucuuccucuuacgaugcgcu

SEQ ID NO: 950339 - RNA, 20 nt, Human
cuuggccuacuuagcuuugu

SEQ ID NO: 950340 - RNA, 22 nt, Human
cccaggagaauauuuuuggguc

SEQ ID NO: 950341 - RNA, 22 nt, Human
uggcucagaacuacuucuaguu

SEQ ID NO: 950342 - RNA, 18 nt, Human
acaaauguagugucuuaa

SEQ ID NO: 950343 - RNA, 22 nt, Human
auucacaacaaaaggauaugag

SEQ ID NO: 950344 - RNA, 22 nt, Human
uuagaaaauuugcuucuuugga

SEQ ID NO: 950345 - RNA, 22 nt, Human
aggaccaguaugagagcaucug

SEQ ID NO: 950346 - RNA, 22 nt, Human
caggccagugugcuucccaggc

SEQ ID NO: 950347 - RNA, 22 nt, Human
uuccuaauggcaaaacauguuu

SEQ ID NO: 950348 - RNA, 22 nt, Human
agcuuccugaugcaagagggcu

SEQ ID NO: 950349 - RNA, 22 nt, Human
gcagaggcauuucugacgcugc

SEQ ID NO: 950350 - RNA, 21 nt, Human
ugggcacugagggugcugcuc

SEQ ID NO: 950351 - RNA, 22 nt, Human
cuuccucacggugcaacaggaa

SEQ ID NO: 950352 - RNA, 22 nt, Human
auugacaaucuacuauguucug

SEQ ID NO: 950353 - RNA, 22 nt, Human
ucuccuggccuuuagguuaagg

SEQ ID NO: 950354 - RNA, 18 nt, Human
gugagcagagagcaucac

SEQ ID NO: 950355 - RNA, 22 nt, Human
aaacacauuuuaggaaaaucua

SEQ ID NO: 950356 - RNA, 22 nt, Human
uggggcuggcuauugucucccu

SEQ ID NO: 950357 - RNA, 22 nt, Human
aggcucuguuugcugugguacc

SEQ ID NO: 950358 - RNA, 22 nt, Human
guuucuaaauguucugaguuuu

SEQ ID NO: 950359 - RNA, 22 nt, Human
gagccaaggguugccauggaga

SEQ ID NO: 950360 - RNA, 19 nt, Human
cuucuggcccugagccacc

SEQ ID NO: 950361 - RNA, 22 nt, Human
uggaggaaguugcuggaaguca

SEQ ID NO: 950362 - RNA, 17 nt, Human
ucugggcuucagugguc

SEQ ID NO: 950363 - RNA, 22 nt, Human
gccagguggucuggcuccagag

SEQ ID NO: 950364 - RNA, 22 nt, Human
uuuaucuuuggaucuucagaaa

SEQ ID NO: 950365 - RNA, 17 nt, Human
agugaaauuuacauugc

SEQ ID NO: 950366 - RNA, 22 nt, Human
cagggucuuggcgccaucaccc

SEQ ID NO: 950367 - RNA, 22 nt, Human
cucaaguaagaaacagaauugg

SEQ ID NO: 950368 - RNA, 22 nt, Human
acuuagaacaggcagaauucca

SEQ ID NO: 950369 - RNA, 22 nt, Human
ucugccuugagguccucagcuc

SEQ ID NO: 950370 - RNA, 22 nt, Human
cccaggcagagagcuggugagc

SEQ ID NO: 950371 - RNA, 22 nt, Human
ccugcagacacuuguccagcaa

SEQ ID NO: 950372 - RNA, 22 nt, Human
cccucagcuucucccugcagcu

SEQ ID NO: 950373 - RNA, 22 nt, Human
uaaaucucacuggguauauugg

SEQ ID NO: 950374 - RNA, 22 nt, Human
caauagaaaacucaauacuuaa

SEQ ID NO: 950375 - RNA, 22 nt, Human
ccaggcugccgaggaaagaaag

SEQ ID NO: 950376 - RNA, 22 nt, Human
uuggccaagggaucgagguugg

SEQ ID NO: 950377 - RNA, 22 nt, Human
gcaggaaagguugagacuuugc

SEQ ID NO: 950378 - RNA, 22 nt, Human
uuguacacaauucuuaacauac

SEQ ID NO: 950379 - RNA, 20 nt, Human
ugugaaagcaguagaaugac

SEQ ID NO: 950380 - RNA, 22 nt, Human
acccaggagguggaggcugcag

SEQ ID NO: 950381 - RNA, 22 nt, Human
uuggcagugaugcagcuuguuc

SEQ ID NO: 950382 - RNA, 22 nt, Human
aggcucugugauccacaaugag

SEQ ID NO: 950383 - RNA, 22 nt, Human
gagaggcuaugagguucugugu

SEQ ID NO: 950384 - RNA, 22 nt, Human
agaaaugggccuugggacacaa

SEQ ID NO: 950385 - RNA, 22 nt, Human
uaugcauaugaccccaagcuug

SEQ ID NO: 950386 - RNA, 22 nt, Human
augcccugugguucaugugaga

SEQ ID NO: 950387 - RNA, 22 nt, Human
cccugagcccauaguugacauu

SEQ ID NO: 950388 - RNA, 22 nt, Human
caggagcccguugcuccggcgg

SEQ ID NO: 950389 - RNA, 22 nt, Human
ugcagugggccggaggccaggg

SEQ ID NO: 950390 - RNA, 21 nt, Human
aggaggggucuuucccacuga

SEQ ID NO: 950391 - RNA, 22 nt, Human
cucaggagaugacagaagguau

SEQ ID NO: 950392 - RNA, 22 nt, Human
caauguguguguuuuucucaac

SEQ ID NO: 950393 - RNA, 22 nt, Human
uaaaugauaauaaugcuagugu

SEQ ID NO: 950394 - RNA, 22 nt, Human
ucauugcacuccagccugggca

SEQ ID NO: 950395 - RNA, 22 nt, Human
uuccauauguauauagcuguua

SEQ ID NO: 950396 - RNA, 22 nt, Human
caggcugucugaauggaggccc

SEQ ID NO: 950397 - RNA, 22 nt, Human
ggguacuuaauauuuacggggu

SEQ ID NO: 950398 - RNA, 22 nt, Human
uugcauugaaaauauauuuuaa

SEQ ID NO: 950399 - RNA, 22 nt, Human
cagaguguuagcgcugguuggg

SEQ ID NO: 950400 - RNA, 22 nt, Human
ucaccagucuuucuuaccauug

SEQ ID NO: 950401 - RNA, 22 nt, Human
agcccaaggcuucccugcuggc

SEQ ID NO: 950402 - RNA, 22 nt, Human
ucccaggacuuccaguuggagg

SEQ ID NO: 950403 - RNA, 22 nt, Human
caguuucuauggcugggcucug

SEQ ID NO: 950404 - RNA, 22 nt, Human
acagcagagacacucaggaggc

SEQ ID NO: 950405 - RNA, 22 nt, Human
acagaguacauucagagacuau

SEQ ID NO: 950406 - RNA, 22 nt, Human
gccucugcaucuucgccgcacu

SEQ ID NO: 950407 - RNA, 22 nt, Human
uuugggaacucuaucauggaaa

SEQ ID NO: 950408 - RNA, 22 nt, Human
gaggccugaaaggggaccuaug

SEQ ID NO: 950409 - RNA, 22 nt, Human
uaauuuaauccaaguguuacau

SEQ ID NO: 950410 - RNA, 18 nt, Human
gcuccuggaccaggucac

SEQ ID NO: 950411 - RNA, 22 nt, Human
ugcagggcacacgcacgggugu

SEQ ID NO: 950412 - RNA, 22 nt, Human
uagaaaauagggccuguggagc

SEQ ID NO: 950413 - RNA, 22 nt, Human
cccagcucucucaguucugcuu

SEQ ID NO: 950414 - RNA, 22 nt, Human
gucucagaguccuacuuauucc

SEQ ID NO: 950415 - RNA, 22 nt, Human
auaaggcaagcugucaguuugu

SEQ ID NO: 950416 - RNA, 18 nt, Human
agagcagcggcaucacac

SEQ ID NO: 950417 - RNA, 18 nt, Human
uggcagcaggaagccauu

SEQ ID NO: 950418 - RNA, 22 nt, Human
accuuaaaacugacacauggag

SEQ ID NO: 950419 - RNA, 22 nt, Human
ccucuggucccagcucugcugc

SEQ ID NO: 950420 - RNA, 20 nt, Human
ggcugcugugggcagagagg

SEQ ID NO: 950421 - RNA, 22 nt, Human
cccuggguucuggcugggcugc

SEQ ID NO: 950422 - RNA, 22 nt, Human
augcuguguauuuuacucuuuc

SEQ ID NO: 950423 - RNA, 22 nt, Human
cagggcagagccaggauuucaa

SEQ ID NO: 950424 - RNA, 22 nt, Human
ugggggucaggaugaggccuug

SEQ ID NO: 950425 - RNA, 22 nt, Human
gcagaggcacagccccagauga

SEQ ID NO: 950426 - RNA, 22 nt, Human
ccagcagcccacaggcgucccu

SEQ ID NO: 950427 - RNA, 19 nt, Human
ugaggggcucacagucuca

SEQ ID NO: 950428 - RNA, 22 nt, Human
ggggacugccuuccacagacac

SEQ ID NO: 950429 - RNA, 22 nt, Human
agcagcuggguccggcggagca

SEQ ID NO: 950430 - RNA, 22 nt, Human
ugaggcagguaagcaaguuuug

SEQ ID NO: 950431 - RNA, 22 nt, Human
uggcagggccugaaucuuauac

SEQ ID NO: 950432 - RNA, 22 nt, Human
cucccuggcuuuguccugaggc

SEQ ID NO: 950433 - RNA, 22 nt, Human
agccccacacucucucugagaa

SEQ ID NO: 950434 - RNA, 22 nt, Human
gucaggaugacaagugcuuuca

SEQ ID NO: 950435 - RNA, 22 nt, Human
gggcacuggaaggcucucaggc

SEQ ID NO: 950436 - RNA, 17 nt, Human
aaggccauuuccaccca

SEQ ID NO: 950437 - RNA, 22 nt, Human
gcugccugcacagagcugcuuu

SEQ ID NO: 950438 - RNA, 22 nt, Human
cuggcucccagcuuucagggag

SEQ ID NO: 950439 - RNA, 22 nt, Human
uuuuaucugugacaucuggcag

SEQ ID NO: 950440 - RNA, 22 nt, Human
gcagggcucauucuaguacaau

SEQ ID NO: 950441 - RNA, 22 nt, Human
uuauuauagauuaugcaagauu

SEQ ID NO: 950442 - RNA, 22 nt, Human
ccaggcaggcagcguucucagg

SEQ ID NO: 950443 - RNA, 22 nt, Human
cacagcuuaugccacugauugg

SEQ ID NO: 950444 - RNA, 22 nt, Human
cugggcagccucacacaauguu

SEQ ID NO: 950445 - RNA, 22 nt, Human
cacaaaugguuguagacauuaa

SEQ ID NO: 950446 - RNA, 22 nt, Human
ucauuguuauguuuugcugucu

SEQ ID NO: 950447 - RNA, 20 nt, Human
augcaaacccugcuuugugg

SEQ ID NO: 950448 - RNA, 22 nt, Human
uaugucacauuguaacagugug

SEQ ID NO: 950449 - RNA, 22 nt, Human
aggcucauucuugccucugagc

SEQ ID NO: 950450 - RNA, 22 nt, Human
gcagccaggaaagcuggacccu

SEQ ID NO: 950451 - RNA, 22 nt, Human
ucucugaguauccugaacugcc

SEQ ID NO: 950452 - RNA, 22 nt, Human
gauuucuaguucauuaucuauu

SEQ ID NO: 950453 - RNA, 19 nt, Human
gccugggaugggcagaacu

SEQ ID NO: 950454 - RNA, 22 nt, Human
gagagaagaaagccaugguccu

SEQ ID NO: 950455 - RNA, 22 nt, Human
cugccuccuggcugauggguag

SEQ ID NO: 950456 - RNA, 22 nt, Human
ugcuguagcccugcacagugca

SEQ ID NO: 950457 - RNA, 22 nt, Human
ucaggcugugggcacuggccau

SEQ ID NO: 950458 - RNA, 22 nt, Human
gugauuuugagaccuauauagu

SEQ ID NO: 950459 - RNA, 22 nt, Human
acuuccugcagcuucucagccc

SEQ ID NO: 950460 - RNA, 22 nt, Human
aagaacaguguccugggacucg

SEQ ID NO: 950461 - RNA, 22 nt, Human
aguggggcggacaggaccagga

SEQ ID NO: 950462 - RNA, 22 nt, Human
uagucuuuuuaauaaauaaugc

SEQ ID NO: 950463 - RNA, 23 nt, Human
gagugcagaauagacaugcagug

SEQ ID NO: 950464 - RNA, 22 nt, Human
aaggccugggaguacugggaca

SEQ ID NO: 950465 - RNA, 22 nt, Human
uucauucauuacgugccaggca

SEQ ID NO: 950466 - RNA, 22 nt, Human
augauggugggagaugacccag

SEQ ID NO: 950467 - RNA, 22 nt, Human
aaaguucaugguguuauagaaa

SEQ ID NO: 950468 - RNA, 22 nt, Human
auaacagauacucucugugagg

SEQ ID NO: 950469 - RNA, 22 nt, Human
cucuucagauaaaagggauauu

SEQ ID NO: 950470 - RNA, 23 nt, Human
ucugcucugaaguucggcugagc

SEQ ID NO: 950471 - RNA, 18 nt, Human
cucucugggugaggacaa

SEQ ID NO: 950472 - RNA, 22 nt, Human
aauuucaaugcacucaugguug

SEQ ID NO: 950473 - RNA, 22 nt, Human
agggcugggcugcuuguuguca

SEQ ID NO: 950474 - RNA, 22 nt, Human
uggccuccccuaacagccucuu

SEQ ID NO: 950475 - RNA, 22 nt, Human
uaguuucagcuccuucauccug

SEQ ID NO: 950476 - RNA, 22 nt, Human
caggauggucucgaucuccuga

SEQ ID NO: 950477 - RNA, 22 nt, Human
uggcagacuuuagggucuacau

SEQ ID NO: 950478 - RNA, 22 nt, Human
gaggccaggacaugaaagcuga

SEQ ID NO: 950479 - RNA, 22 nt, Human
agcagcagauccaaaaaaugug

SEQ ID NO: 950480 - RNA, 20 nt, Human
ggcagcuugggcagcaguua

SEQ ID NO: 950481 - RNA, 22 nt, Human
aggagcugacuuguaaagcauu

SEQ ID NO: 950482 - RNA, 22 nt, Human
ugacccauggucugaucauagg

SEQ ID NO: 950483 - RNA, 22 nt, Human
uuucacaaugcaauccuacuuc

SEQ ID NO: 950484 - RNA, 22 nt, Human
uuuacauuucccucugucaguu

SEQ ID NO: 950485 - RNA, 23 nt, Human
uuucaaauuacucugcagaugac

SEQ ID NO: 950486 - RNA, 22 nt, Human
ugacagggugauuaugagagcu

SEQ ID NO: 950487 - RNA, 22 nt, Human
guacacauugucuguuuacuuc

SEQ ID NO: 950488 - RNA, 22 nt, Human
agcagagucugugugcacuuua

SEQ ID NO: 950489 - RNA, 22 nt, Human
aagaaauuaaugugccauuacu

SEQ ID NO: 950490 - RNA, 22 nt, Human
agccaggggauucaucagggac

SEQ ID NO: 950491 - RNA, 22 nt, Human
uuucucaucuggaaacagugcu

SEQ ID NO: 950492 - RNA, 22 nt, Human
auacauacauguacacauaaau

SEQ ID NO: 950493 - RNA, 22 nt, Human
aggcacuucucaaauucaugcc

SEQ ID NO: 950494 - RNA, 20 nt, Human
ccuggcuuugcaucugugau

SEQ ID NO: 950495 - RNA, 22 nt, Human
ucccccacucuaaaggagccuu

SEQ ID NO: 950496 - RNA, 22 nt, Human
agauggaguuaguaccagaguc

SEQ ID NO: 950497 - RNA, 22 nt, Human
cagucucucuuguagugcagcu

SEQ ID NO: 950498 - RNA, 22 nt, Human
cucugcaggggaggcaugcacu

SEQ ID NO: 950499 - RNA, 22 nt, Human
gauuucuguaacacuucagaua

SEQ ID NO: 950500 - RNA, 22 nt, Human
ggcucuggugugaagcagccuc

SEQ ID NO: 950501 - RNA, 22 nt, Human
gucaucuuugcccugugcagga

SEQ ID NO: 950502 - RNA, 22 nt, Human
uggccgggccgggcgccuccac

SEQ ID NO: 950503 - RNA, 18 nt, Human
acuaugcugaauaaaugg

SEQ ID NO: 950504 - RNA, 22 nt, Human
aaauguguuugauaggaauauu

SEQ ID NO: 950505 - RNA, 22 nt, Human
auuugucuagugguauucacgu

SEQ ID NO: 950506 - RNA, 22 nt, Human
gaaaggagggaaacagagcggu

SEQ ID NO: 950507 - RNA, 22 nt, Human
uaaagguaguuuuaaaggugcu

SEQ ID NO: 950508 - RNA, 22 nt, Human
acucacauuucaucaggccaag

SEQ ID NO: 950509 - RNA, 22 nt, Human
cuggccuggggccucagcugcu

SEQ ID NO: 950510 - RNA, 22 nt, Human
cucuccuccaacagcccugccg

SEQ ID NO: 950511 - RNA, 22 nt, Human
agagagggcauagaaaaaggga

SEQ ID NO: 950512 - RNA, 22 nt, Human
ggcccaaggcccaggucgagcu

SEQ ID NO: 950513 - RNA, 22 nt, Human
aggauuuuagauaagacagcaa

SEQ ID NO: 950514 - RNA, 22 nt, Human
gcacccagccagcaucucagag

SEQ ID NO: 950515 - RNA, 22 nt, Human
uggucaguugcaucagagaagu

SEQ ID NO: 950516 - RNA, 22 nt, Human
ggucuugcuauguugcccaggc

SEQ ID NO: 950517 - RNA, 22 nt, Human
cccuguccuuggcugugaggcu

SEQ ID NO: 950518 - RNA, 22 nt, Human
uucucugaucuugcuagacuga

SEQ ID NO: 950519 - RNA, 22 nt, Human
gccuggcacauugcaguggauu

SEQ ID NO: 950520 - RNA, 22 nt, Human
ccagaggucuccugcacgggau

SEQ ID NO: 950521 - RNA, 22 nt, Human
cccuucagcugagugggacagc

SEQ ID NO: 950522 - RNA, 22 nt, Human
aguggcagagcaggugcuggaa

SEQ ID NO: 950523 - RNA, 22 nt, Human
aucaaaaugcuccagugauggu

SEQ ID NO: 950524 - RNA, 22 nt, Human
gcuccucuucucccacugaaug

SEQ ID NO: 950525 - RNA, 22 nt, Human
ccaggaaaauaccaagcuuuaa

SEQ ID NO: 950526 - RNA, 22 nt, Human
ggaggaggggugacugaaugcu

SEQ ID NO: 950527 - RNA, 22 nt, Human
aggucauuaaaguuaaaugagg

SEQ ID NO: 950528 - RNA, 22 nt, Human
caaaugauacuguuuuuagucu

SEQ ID NO: 950529 - RNA, 22 nt, Human
acaucugaggagaccagccucu

SEQ ID NO: 950530 - RNA, 22 nt, Human
gaggcccaguccugcaagcacg

SEQ ID NO: 950531 - RNA, 22 nt, Human
caggugccgggaaugcagcaau

SEQ ID NO: 950532 - RNA, 22 nt, Human
ccaggcugcucacaagcugccc

SEQ ID NO: 950533 - RNA, 22 nt, Human
gccaggcuggaaagaacagaca

SEQ ID NO: 950534 - RNA, 17 nt, Human
ggcugcugugcuggugc

SEQ ID NO: 950535 - RNA, 22 nt, Human
aaagccuugcccgucacuggga

SEQ ID NO: 950536 - RNA, 20 nt, Human
uugauaggcagcuugucagg

SEQ ID NO: 950537 - RNA, 22 nt, Human
ccagccaggcuggcuguggagg

SEQ ID NO: 950538 - RNA, 22 nt, Human
cugagguggaacagaggugaag

SEQ ID NO: 950539 - RNA, 22 nt, Human
cuggagcuaggaaguccaagau

SEQ ID NO: 950540 - RNA, 22 nt, Human
agucccagaugacccagcuacu

SEQ ID NO: 950541 - RNA, 22 nt, Human
uugugucugggggagugacauc

SEQ ID NO: 950542 - RNA, 20 nt, Human
guucucacugaucugcaggg

SEQ ID NO: 950543 - RNA, 22 nt, Human
uggaaauggaucugaugagucu

SEQ ID NO: 950544 - RNA, 22 nt, Human
gccauccucugagcacuaggca

SEQ ID NO: 950545 - RNA, 21 nt, Human
ugaaaugagaaugcugagcac

SEQ ID NO: 950546 - RNA, 22 nt, Human
ugaaggcuguuggauggggaag

SEQ ID NO: 950547 - RNA, 21 nt, Human
aaugugugcuauuuaucuuuu

SEQ ID NO: 950548 - RNA, 22 nt, Human
gcuggcaucacuggcuucggug

SEQ ID NO: 950549 - RNA, 22 nt, Human
gggagagguuacccgagcaacu

SEQ ID NO: 950550 - RNA, 18 nt, Human
agcagagcccaugcauuc

SEQ ID NO: 950551 - RNA, 21 nt, Human
uucagcaagcacucuggacac

SEQ ID NO: 950552 - RNA, 22 nt, Human
cagugggcugugauggauucac

SEQ ID NO: 950553 - RNA, 22 nt, Human
auguguguauauauagucauuu

SEQ ID NO: 950554 - RNA, 22 nt, Human
cugccacuuucacccagugcuc

SEQ ID NO: 950555 - RNA, 22 nt, Human
auuugcuugugcuaugaaaguu

SEQ ID NO: 950556 - RNA, 22 nt, Human
cuguuuauagcagagcaagccu

SEQ ID NO: 950557 - RNA, 21 nt, Human
uggcaggcagcuggaagcuug

SEQ ID NO: 950558 - RNA, 22 nt, Human
agccagugcaacagcagugaag

SEQ ID NO: 950559 - RNA, 22 nt, Human
aaauccuaaggagaauaugauu

SEQ ID NO: 950560 - RNA, 22 nt, Human
uuucuguaaggacuuaaugcaa

SEQ ID NO: 950561 - RNA, 21 nt, Human
gcacagggacagaucaucaca

SEQ ID NO: 950562 - RNA, 22 nt, Human
cacauguacagaagcaggcugg

SEQ ID NO: 950563 - RNA, 21 nt, Human
agggaaagaaaaugagcuaau

SEQ ID NO: 950564 - RNA, 17 nt, Human
uucucugagcuguauug

SEQ ID NO: 950565 - RNA, 22 nt, Human
caaggccauaagagauacaaaa

SEQ ID NO: 950566 - RNA, 22 nt, Human
ucucucagaggaagaggcagug

SEQ ID NO: 950567 - RNA, 22 nt, Human
uguauuagaucugagaacuucu

SEQ ID NO: 950568 - RNA, 22 nt, Human
aaaacauugaauugcacacuau

SEQ ID NO: 950569 - RNA, 22 nt, Human
acucaggaaauugagauaaugg

SEQ ID NO: 950570 - RNA, 22 nt, Human
ugcuggguagaaguauuagucu

SEQ ID NO: 950571 - RNA, 23 nt, Human
uuacuuuugcaccaaccuaauau

SEQ ID NO: 950572 - RNA, 22 nt, Human
cugugcaguaggucagggcugg

SEQ ID NO: 950573 - RNA, 22 nt, Human
ccagaccacccuggccaugcac

SEQ ID NO: 950574 - RNA, 22 nt, Human
cucugaagggagggccaagccc

SEQ ID NO: 950575 - RNA, 20 nt, Human
ggggcccaagcccucuugcc

SEQ ID NO: 950576 - RNA, 22 nt, Human
acacaggaagucagcacugaug

SEQ ID NO: 950577 - RNA, 22 nt, Human
gggcaugguggcaggcaccugu

SEQ ID NO: 950578 - RNA, 22 nt, Human
agugucauuccagggacccucg

SEQ ID NO: 950579 - RNA, 22 nt, Human
ccuggagcccaaggcagugaga

SEQ ID NO: 950580 - RNA, 22 nt, Human
agccagagcugaugucauucuc

SEQ ID NO: 950581 - RNA, 22 nt, Human
augcugugucaggaauuugaua

SEQ ID NO: 950582 - RNA, 20 nt, Human
acauggaaggucaaacuauc

SEQ ID NO: 950583 - RNA, 22 nt, Human
ugcauguguguguauuuauaaa

SEQ ID NO: 950584 - RNA, 22 nt, Human
ggcagaggaagcuggaaguggg

SEQ ID NO: 950585 - RNA, 22 nt, Human
uggcagcugagugcacccccuc

SEQ ID NO: 950586 - RNA, 22 nt, Human
gcuguguccucacacagccuuu

SEQ ID NO: 950587 - RNA, 22 nt, Human
auucacaauagcagcuugcaug

SEQ ID NO: 950588 - RNA, 22 nt, Human
caagagcuagaaauugguuaga

SEQ ID NO: 950589 - RNA, 19 nt, Human
acauuuaaauucagaucuc

SEQ ID NO: 950590 - RNA, 22 nt, Human
cucuuaaaauuaccuuugcaaa

SEQ ID NO: 950591 - RNA, 22 nt, Human
aaaugaacaguugcauucucug

SEQ ID NO: 950592 - RNA, 22 nt, Human
gucuggaggaggaagaaggcac

SEQ ID NO: 950593 - RNA, 22 nt, Human
gagccuucaucgcagccuuguu

SEQ ID NO: 950594 - RNA, 22 nt, Human
aggucauuccuugucuucuugc

SEQ ID NO: 950595 - RNA, 22 nt, Human
agcugaaggcuagaacagcugg

SEQ ID NO: 950596 - RNA, 22 nt, Human
uuuuuccuagugcuuucuggua

SEQ ID NO: 950597 - RNA, 22 nt, Human
gcagauggaaagugcuugaggg

SEQ ID NO: 950598 - RNA, 22 nt, Human
gccuguccacuaaacagccaag

SEQ ID NO: 950599 - RNA, 22 nt, Human
uucagcaacauuuguugagugc

SEQ ID NO: 950600 - RNA, 22 nt, Human
uaacagaaaggggacagaaaua

SEQ ID NO: 950601 - RNA, 22 nt, Human
ucuuugcacugugcaagcagaa

SEQ ID NO: 950602 - RNA, 22 nt, Human
aggcugggaaauguauuccagc

SEQ ID NO: 950603 - RNA, 19 nt, Human
gggaaauucacuugcuucc

SEQ ID NO: 950604 - RNA, 22 nt, Human
ccaggcucaggugcgagagaca

SEQ ID NO: 950605 - RNA, 22 nt, Human
gcaccuggcugcccagguggag

SEQ ID NO: 950606 - RNA, 22 nt, Human
ggagagcaggguccugagauac

SEQ ID NO: 950607 - RNA, 22 nt, Human
gcagaagcccggucagcgcacg

SEQ ID NO: 950608 - RNA, 20 nt, Human
cucugcuuuaggagagucag

SEQ ID NO: 950609 - RNA, 22 nt, Human
ugccaaucuuugugauaauugc

SEQ ID NO: 950610 - RNA, 22 nt, Human
agaggggaggcgaaccagaguc

SEQ ID NO: 950611 - RNA, 22 nt, Human
cccuggagcaucucugcugucu

SEQ ID NO: 950612 - RNA, 22 nt, Human
cuggccugaucucaugcugucc

SEQ ID NO: 950613 - RNA, 22 nt, Human
uggcagagaaccugggcuuugu

SEQ ID NO: 950614 - RNA, 22 nt, Human
uggugagcucuggcagucugug

SEQ ID NO: 950615 - RNA, 22 nt, Human
cagcaggggaacugugggccag

SEQ ID NO: 950616 - RNA, 22 nt, Human
gggcucucaugaguguguggua

SEQ ID NO: 950617 - RNA, 22 nt, Human
uccacagaauguaagauccaca

SEQ ID NO: 950618 - RNA, 22 nt, Human
uccucagggaagaugagccuca

SEQ ID NO: 950619 - RNA, 22 nt, Human
acagagaaagugggcugaagau

SEQ ID NO: 950620 - RNA, 22 nt, Human
ucauaacagcuaagucccuuuc

SEQ ID NO: 950621 - RNA, 22 nt, Human
ucagggcaucaucaugaauaua

SEQ ID NO: 950622 - RNA, 22 nt, Human
aaguuuguucagggcuuacauu

SEQ ID NO: 950623 - RNA, 20 nt, Human
ugacucugcaaccgucucuc

SEQ ID NO: 950624 - RNA, 21 nt, Human
ugcuggccucaagggugacuu

SEQ ID NO: 950625 - RNA, 22 nt, Human
aagcagcagaccugauuuugaa

SEQ ID NO: 950626 - RNA, 22 nt, Human
gauggcagcauauugacagcau

SEQ ID NO: 950627 - RNA, 22 nt, Human
gaaggagcuaaagggagcccug

SEQ ID NO: 950628 - RNA, 22 nt, Human
ucugaacuccagcccugcucuc

SEQ ID NO: 950629 - RNA, 21 nt, Human
gggcagcucuguuuuauuuuc

SEQ ID NO: 950630 - RNA, 22 nt, Human
auuuuucucucacacuuaccag

SEQ ID NO: 950631 - RNA, 20 nt, Human
cacaggccuugugagcagac

SEQ ID NO: 950632 - RNA, 22 nt, Human
cucugagagcggucuguggcuu

SEQ ID NO: 950633 - RNA, 20 nt, Human
uugcauuggaugugcaggug

SEQ ID NO: 950634 - RNA, 22 nt, Human
uuaggcauauggcacaugauag

SEQ ID NO: 950635 - RNA, 22 nt, Human
cuugcuucauuagugucuuagu

SEQ ID NO: 950636 - RNA, 22 nt, Human
cuggccuggcagggagggcaug

SEQ ID NO: 950637 - RNA, 22 nt, Human
cggcagcugauugcagagcacc

SEQ ID NO: 950638 - RNA, 22 nt, Human
gcucugagcacugugcggcugg

SEQ ID NO: 950639 - RNA, 22 nt, Human
agucauaauuauaaacaucagu

SEQ ID NO: 950640 - RNA, 22 nt, Human
uuguccuuggaugaagcuggga

SEQ ID NO: 950641 - RNA, 22 nt, Human
ggagagaauuccauggacaugu

SEQ ID NO: 950642 - RNA, 23 nt, Human
aggcugcagaagaauagggucau

SEQ ID NO: 950643 - RNA, 22 nt, Human
uuuaacagaugcuaugucuacc

SEQ ID NO: 950644 - RNA, 22 nt, Human
gaggccuggucuaugagauguu

SEQ ID NO: 950645 - RNA, 18 nt, Human
gggcccuggcguccgccc

SEQ ID NO: 950646 - RNA, 22 nt, Human
ucacuuuugaucccuaugcagu

SEQ ID NO: 950647 - RNA, 22 nt, Human
ucucccacgguacaggauaaac

SEQ ID NO: 950648 - RNA, 19 nt, Human
cucagcuguagcucaugug

SEQ ID NO: 950649 - RNA, 22 nt, Human
ggccucucauguccugggcuuc

SEQ ID NO: 950650 - RNA, 22 nt, Human
ugcaauaacuacuuuaauguug

SEQ ID NO: 950651 - RNA, 22 nt, Human
aggucauuacaauuaucauuuu

SEQ ID NO: 950652 - RNA, 22 nt, Human
gauacauuuuaucuccuaacag

SEQ ID NO: 950653 - RNA, 22 nt, Human
uagauuucaggcuggcuugcgg

SEQ ID NO: 950654 - RNA, 22 nt, Human
aguguuguaugggaugacugcu

SEQ ID NO: 950655 - RNA, 22 nt, Human
agcaauauuucagcuagcaggu

SEQ ID NO: 950656 - RNA, 22 nt, Human
ugccugucuuuccucccucgua

SEQ ID NO: 950657 - RNA, 22 nt, Human
gugcagcugcaggagucagguc

SEQ ID NO: 950658 - RNA, 22 nt, Human
gucaggauuugaacucaggucu

SEQ ID NO: 950659 - RNA, 22 nt, Human
ggggcggggcucugagaagcau

SEQ ID NO: 950660 - RNA, 22 nt, Human
aagauuucucuccuggaaagca

SEQ ID NO: 950661 - RNA, 22 nt, Human
cagcugcaguucaaugcuugcu

SEQ ID NO: 950662 - RNA, 23 nt, Human
ugacacauuuccuuuccacugca

SEQ ID NO: 950663 - RNA, 22 nt, Human
uucuuuuacauuaagauuucag

SEQ ID NO: 950664 - RNA, 22 nt, Human
gugugccaggaacuggcugcug

SEQ ID NO: 950665 - RNA, 22 nt, Human
auggccaagaauauuucucaac

SEQ ID NO: 950666 - RNA, 22 nt, Human
ggcuggccucaggguccucgcu

SEQ ID NO: 950667 - RNA, 22 nt, Human
ugggaggagcccucugggaagg

SEQ ID NO: 950668 - RNA, 22 nt, Human
cugagagcagggacuugagcca

SEQ ID NO: 950669 - RNA, 22 nt, Human
cuguaauucacuagggucagcg

SEQ ID NO: 950670 - RNA, 22 nt, Human
uuccagugaugggcaauuuggu

SEQ ID NO: 950671 - RNA, 22 nt, Human
ggcagugacuguucagacgucc

SEQ ID NO: 950672 - RNA, 22 nt, Human
aggcagauuacuugaggccagg

SEQ ID NO: 950673 - RNA, 22 nt, Human
gcauugucaaaagugguaugac

SEQ ID NO: 950674 - RNA, 22 nt, Human
acugugugacuguuauuacugu

SEQ ID NO: 950675 - RNA, 22 nt, Human
agggcagcuagcuguagaaaga

SEQ ID NO: 950676 - RNA, 22 nt, Human
ucagggaacuacuucucccuau

SEQ ID NO: 950677 - RNA, 22 nt, Human
augagacuaccuguaauguggc

SEQ ID NO: 950678 - RNA, 22 nt, Human
agcugagcugcagaugacugua

SEQ ID NO: 950679 - RNA, 22 nt, Human
agcugcuacugcucugccagag

SEQ ID NO: 950680 - RNA, 22 nt, Human
cucuggaaaaccacuagcagga

SEQ ID NO: 950681 - RNA, 22 nt, Human
agucccagaucuccauucgguc

SEQ ID NO: 950682 - RNA, 22 nt, Human
aagaacagauucagccugaacu

SEQ ID NO: 950683 - RNA, 22 nt, Human
cugcugcauuacucuucucaag

SEQ ID NO: 950684 - RNA, 22 nt, Human
ugucaccaugccagcuucugcc

SEQ ID NO: 950685 - RNA, 22 nt, Human
ucaaggaggugcuuggcuucac

SEQ ID NO: 950686 - RNA, 22 nt, Human
uuucauuuugguuaugccauaa

SEQ ID NO: 950687 - RNA, 22 nt, Human
augcugagacuggagcagcugg

SEQ ID NO: 950688 - RNA, 22 nt, Human
caggaacagcaccaggagcuag

SEQ ID NO: 950689 - RNA, 22 nt, Human
gcugagagcaaagcaugucuag

SEQ ID NO: 950690 - RNA, 22 nt, Human
cuccuuccugguuagcaccuua

SEQ ID NO: 950691 - RNA, 22 nt, Human
gaagccaacauuccaaguagaa

SEQ ID NO: 950692 - RNA, 22 nt, Human
gagggagggccaggucccaacc

SEQ ID NO: 950693 - RNA, 22 nt, Human
aggaaaacacaguauugaugga

SEQ ID NO: 950694 - RNA, 21 nt, Human
ucucugggaggacuugugaga

SEQ ID NO: 950695 - RNA, 22 nt, Human
ugaggcaggacugagcgggaug

SEQ ID NO: 950696 - RNA, 22 nt, Human
ucaaaugcuguauuguaguaau

SEQ ID NO: 950697 - RNA, 22 nt, Human
aagagcuggcucuugcagcagc

SEQ ID NO: 950698 - RNA, 22 nt, Human
accuggagucauuugaggagua

SEQ ID NO: 950699 - RNA, 22 nt, Human
aagcagaggaccgacggaggga

SEQ ID NO: 950700 - RNA, 22 nt, Human
gcugauguaagacuuuugguuu

SEQ ID NO: 950701 - RNA, 22 nt, Human
ggucagggggaucugugaggua

SEQ ID NO: 950702 - RNA, 22 nt, Human
gagcugggacauggguccucuc

SEQ ID NO: 950703 - RNA, 22 nt, Human
acugaaggucucagcaaggaug

SEQ ID NO: 950704 - RNA, 20 nt, Human
gggugggagagucugagggu

SEQ ID NO: 950705 - RNA, 22 nt, Human
ugguuugcccacucgagugauu

SEQ ID NO: 950706 - RNA, 22 nt, Human
gcuuuuaauuaguugcuuccau

SEQ ID NO: 950707 - RNA, 22 nt, Human
auaaaagaaguuuugguacuug

SEQ ID NO: 950708 - RNA, 22 nt, Human
gcuuggcauugaccauuaucau

SEQ ID NO: 950709 - RNA, 20 nt, Human
gugaccagaagacagugggu

SEQ ID NO: 950710 - RNA, 22 nt, Human
auaauguagguauguguauuua

SEQ ID NO: 950711 - RNA, 22 nt, Human
cagaagccugccucagaugcac

SEQ ID NO: 950712 - RNA, 22 nt, Human
uuucaaauagaaucuuuccaaa

SEQ ID NO: 950713 - RNA, 22 nt, Human
auguguuuauaauuacucaauc

SEQ ID NO: 950714 - RNA, 22 nt, Human
gcuguuccugcuuagaggucgg

SEQ ID NO: 950715 - RNA, 22 nt, Human
aaugugcagaugaauaaacaaa

SEQ ID NO: 950716 - RNA, 19 nt, Human
ucaaaugccaaugucacag

SEQ ID NO: 950717 - RNA, 22 nt, Human
ucagagaaguaagguggggugc

SEQ ID NO: 950718 - RNA, 22 nt, Human
aggagaaguaaggcuagaugau

SEQ ID NO: 950719 - RNA, 22 nt, Human
ucuagaaauuuugccuuguauu

SEQ ID NO: 950720 - RNA, 22 nt, Human
agguccagcuguugcagccucc

SEQ ID NO: 950721 - RNA, 22 nt, Human
acugaguguaggacuuugaguu

SEQ ID NO: 950722 - RNA, 20 nt, Human
uggagcugugguaaggagca

SEQ ID NO: 950723 - RNA, 22 nt, Human
ugugcccauuacacagaggcau

SEQ ID NO: 950724 - RNA, 22 nt, Human
auguuucaaugcacuuuagccu

SEQ ID NO: 950725 - RNA, 22 nt, Human
ucaaaugcuucuacuccuaaga

SEQ ID NO: 950726 - RNA, 22 nt, Human
ucuacugcacuggugucucauc

SEQ ID NO: 950727 - RNA, 22 nt, Human
auuuggcacacuggguucucgu

SEQ ID NO: 950728 - RNA, 22 nt, Human
gcugcuuccuuuccugcugacc

SEQ ID NO: 950729 - RNA, 22 nt, Human
augcuuuuccaggagaaauaua

SEQ ID NO: 950730 - RNA, 22 nt, Human
aaaauuauagaucuagugccug

SEQ ID NO: 950731 - RNA, 22 nt, Human
cuacauaaauuuaucacagacu

SEQ ID NO: 950732 - RNA, 22 nt, Human
cucucccccacagcagccuucu

SEQ ID NO: 950733 - RNA, 21 nt, Human
ggccucugccuugccccacuc

SEQ ID NO: 950734 - RNA, 22 nt, Human
gcugaaggaggcucugguacua

SEQ ID NO: 950735 - RNA, 22 nt, Human
cugcugugccucuuuucacgug

SEQ ID NO: 950736 - RNA, 22 nt, Human
cuggagcccugaaugggcagga

SEQ ID NO: 950737 - RNA, 22 nt, Human
uguguacacaaugauugcagag

SEQ ID NO: 950738 - RNA, 22 nt, Human
aaaguuuccugcuaagugcuau

SEQ ID NO: 950739 - RNA, 22 nt, Human
acagccagguaaaggcauggca

SEQ ID NO: 950740 - RNA, 22 nt, Human
agugcuguccaguuucacaggu

SEQ ID NO: 950741 - RNA, 22 nt, Human
aguacuuuacuucuuacaguuu

SEQ ID NO: 950742 - RNA, 20 nt, Human
gcugaggucauuaugccuca

SEQ ID NO: 950743 - RNA, 22 nt, Human
acucagaguuugcguuccauac

SEQ ID NO: 950744 - RNA, 23 nt, Human
aguuccagaaaaaugcucaagca

SEQ ID NO: 950745 - RNA, 22 nt, Human
ugggcacacugaaucugcuauu

SEQ ID NO: 950746 - RNA, 22 nt, Human
uuugcagucuggccugcuuugg

SEQ ID NO: 950747 - RNA, 22 nt, Human
uuuugucuaagaacuuugcaaa

SEQ ID NO: 950748 - RNA, 22 nt, Human
cuggcucaguucuugguuuuca

SEQ ID NO: 950749 - RNA, 22 nt, Human
agggcucuguccccagaggccc

SEQ ID NO: 950750 - RNA, 22 nt, Human
gcucacugcaaccucugcuucc

SEQ ID NO: 950751 - RNA, 22 nt, Human
aagcccagaugggagcauuuca

SEQ ID NO: 950752 - RNA, 22 nt, Human
cccagacugcagagcgggcaga

SEQ ID NO: 950753 - RNA, 22 nt, Human
ccaaaauguuugaaugcaugug

SEQ ID NO: 950754 - RNA, 22 nt, Human
uggcccugccacucacugcuga

SEQ ID NO: 950755 - RNA, 22 nt, Human
ccucccaccguaucucaguggc

SEQ ID NO: 950756 - RNA, 22 nt, Human
agcagcuccugccaugagugcu

SEQ ID NO: 950757 - RNA, 22 nt, Human
gggacuguaaauucauauggcc

SEQ ID NO: 950758 - RNA, 22 nt, Human
gggacuggaguagaggccggug

SEQ ID NO: 950759 - RNA, 20 nt, Human
cuuccacacaagaagcacag

SEQ ID NO: 950760 - RNA, 22 nt, Human
ccaggacaaguguggccauggc

SEQ ID NO: 950761 - RNA, 22 nt, Human
caugaagcauguuuugucauga

SEQ ID NO: 950762 - RNA, 22 nt, Human
aaugggaggauuuucucucuug

SEQ ID NO: 950763 - RNA, 19 nt, Human
ugaaggagggggauggcca

SEQ ID NO: 950764 - RNA, 22 nt, Human
gcagccacagaggagggaugca

SEQ ID NO: 950765 - RNA, 22 nt, Human
aauggcugggaguguauuuugg

SEQ ID NO: 950766 - RNA, 22 nt, Human
gaggggcugcccuggugucagg

SEQ ID NO: 950767 - RNA, 22 nt, Human
gcuggcugaggucuagcucuuu

SEQ ID NO: 950768 - RNA, 22 nt, Human
gggcugcugccaaucacagccu

SEQ ID NO: 950769 - RNA, 22 nt, Human
caguagcagggauuauuuuagg

SEQ ID NO: 950770 - RNA, 22 nt, Human
ccagagcccagcacacggugcu

SEQ ID NO: 950771 - RNA, 19 nt, Human
cauuuuaagcauccccagu

SEQ ID NO: 950772 - RNA, 22 nt, Human
ugaaauauuuagagaguaaguu

SEQ ID NO: 950773 - RNA, 22 nt, Human
uggccugggcaugaagcaucgu

SEQ ID NO: 950774 - RNA, 20 nt, Human
gcucccagccugcagucccc

SEQ ID NO: 950775 - RNA, 22 nt, Human
ggcuucagugacuggugcccuc

SEQ ID NO: 950776 - RNA, 22 nt, Human
auuggcaggaaccgaggagggg

SEQ ID NO: 950777 - RNA, 20 nt, Human
uaugaagauaugugaacagc

SEQ ID NO: 950778 - RNA, 19 nt, Human
ucugucacuggggguauuc

SEQ ID NO: 950779 - RNA, 22 nt, Human
aagccuugcagcauuaggcucu

SEQ ID NO: 950780 - RNA, 22 nt, Human
gcacagggcugccaggcggcuu

SEQ ID NO: 950781 - RNA, 20 nt, Human
cagagaccaggccagguguc

SEQ ID NO: 950782 - RNA, 22 nt, Human
uugcugugucugauggcugaga

SEQ ID NO: 950783 - RNA, 22 nt, Human
gccugccuuugugaggaagcgg

SEQ ID NO: 950784 - RNA, 22 nt, Human
gucccugcccuccugggacuca

SEQ ID NO: 950785 - RNA, 22 nt, Human
gaguggggucugggcaucaguc

SEQ ID NO: 950786 - RNA, 22 nt, Human
ccagccuucugagcugccugga

SEQ ID NO: 950787 - RNA, 22 nt, Human
agagcucaagacgcucacagua

SEQ ID NO: 950788 - RNA, 22 nt, Human
agauauuuguaucuugcuauug

SEQ ID NO: 950789 - RNA, 22 nt, Human
gcagcugaagcugcaguuccag

SEQ ID NO: 950790 - RNA, 22 nt, Human
uuccuuaggcuguuugcagugc

SEQ ID NO: 950791 - RNA, 22 nt, Human
uagaaacacagagagacccaug

SEQ ID NO: 950792 - RNA, 22 nt, Human
agcacaggcuuuggugugaggg

SEQ ID NO: 950793 - RNA, 22 nt, Human
ccaggccaaauucagucagcag

SEQ ID NO: 950794 - RNA, 22 nt, Human
uacauucaacaugucacuaugu

SEQ ID NO: 950795 - RNA, 22 nt, Human
cagcaugguuggguucugggga

SEQ ID NO: 950796 - RNA, 19 nt, Human
acaaagcugugagcagcuu

SEQ ID NO: 950797 - RNA, 23 nt, Human
uggcucuguggaucccucaggag

SEQ ID NO: 950798 - RNA, 22 nt, Human
agcugcugcggaaagaugccac

SEQ ID NO: 950799 - RNA, 22 nt, Human
uggcacuggaaucguagccuug

SEQ ID NO: 950800 - RNA, 20 nt, Human
agcaggaaugaugcuuucau

SEQ ID NO: 950801 - RNA, 22 nt, Human
agggcagccugagugcuggccc

SEQ ID NO: 950802 - RNA, 22 nt, Human
agagagcauugaggaaaucuuc

SEQ ID NO: 950803 - RNA, 22 nt, Human
uuaaaugaugcauaucauuuag

SEQ ID NO: 950804 - RNA, 22 nt, Human
ugccagcacaaguuaagagauc

SEQ ID NO: 950805 - RNA, 22 nt, Human
gguaacaguauguagaguaaga

SEQ ID NO: 950806 - RNA, 22 nt, Human
acaggcugccuaccaaguauca

SEQ ID NO: 950807 - RNA, 20 nt, Human
ggcucugcuugugagcagcc

SEQ ID NO: 950808 - RNA, 21 nt, Human
ggcugcugggagagcugcgug

SEQ ID NO: 950809 - RNA, 22 nt, Human
ugguggcuucugaggauggcga

SEQ ID NO: 950810 - RNA, 22 nt, Human
uuccuuaguugacugucuuagu

SEQ ID NO: 950811 - RNA, 22 nt, Human
agagccuggucugagauaggac

SEQ ID NO: 950812 - RNA, 22 nt, Human
ucccaggauguuuauggcuggu

SEQ ID NO: 950813 - RNA, 17 nt, Human
gaggagcuccaguaggu

SEQ ID NO: 950814 - RNA, 22 nt, Human
gcugucacucaccaggccugca

SEQ ID NO: 950815 - RNA, 22 nt, Human
ccacagaguuacaaaacaguca

SEQ ID NO: 950816 - RNA, 22 nt, Human
ucuuugcagaauuuaacuuugc

SEQ ID NO: 950817 - RNA, 22 nt, Human
gagggguguggagccaucaguu

SEQ ID NO: 950818 - RNA, 22 nt, Human
uuugaaagcaccauuugaguag

SEQ ID NO: 950819 - RNA, 22 nt, Human
gcuggagguagggagguccugu

SEQ ID NO: 950820 - RNA, 22 nt, Human
cuggcugccacuucagggucuu

SEQ ID NO: 950821 - RNA, 22 nt, Human
acauuucuaauuuaauguaaca

SEQ ID NO: 950822 - RNA, 22 nt, Human
uguuccaugucuuuguaggacu

SEQ ID NO: 950823 - RNA, 22 nt, Human
gggcugucaugugucagugacc

SEQ ID NO: 950824 - RNA, 22 nt, Human
cugcuggggucagagcacuggg

SEQ ID NO: 950825 - RNA, 22 nt, Human
agcagcaggagccgugggguga

SEQ ID NO: 950826 - RNA, 22 nt, Human
aaguaaauaucuguuuauagca

SEQ ID NO: 950827 - RNA, 22 nt, Human
gguggccucgguggugcacagg

SEQ ID NO: 950828 - RNA, 22 nt, Human
gcagggccagguacaagaagca

SEQ ID NO: 950829 - RNA, 20 nt, Human
uguuccaugacuauuuggau

SEQ ID NO: 950830 - RNA, 22 nt, Human
aggcagaggagaaugaucuucc

SEQ ID NO: 950831 - RNA, 22 nt, Human
uuggccaaaggaaagacuacug

SEQ ID NO: 950832 - RNA, 22 nt, Human
cccugcagaccaaugccauaga

SEQ ID NO: 950833 - RNA, 22 nt, Human
auauguuuuuggaaagaacaca

SEQ ID NO: 950834 - RNA, 22 nt, Human
augucuaaaagauaaaguuuaa

SEQ ID NO: 950835 - RNA, 22 nt, Human
uucauguaauuccauaagguaa

SEQ ID NO: 950836 - RNA, 22 nt, Human
ccucuucuagguuucagccugc

SEQ ID NO: 950837 - RNA, 22 nt, Human
accuggcaugaagcaugccuua

SEQ ID NO: 950838 - RNA, 22 nt, Human
cugguacaaaaugcugauauca

SEQ ID NO: 950839 - RNA, 22 nt, Human
agcaggagcccuuaucaccagg

SEQ ID NO: 950840 - RNA, 21 nt, Human
cagugcucaaucugacagugg

SEQ ID NO: 950841 - RNA, 22 nt, Human
acagcuugcaauggcuuucaac

SEQ ID NO: 950842 - RNA, 22 nt, Human
uauggcauuuuguaagggcuug

SEQ ID NO: 950843 - RNA, 23 nt, Human
acauacauggagauaaagugaug

SEQ ID NO: 950844 - RNA, 18 nt, Human
cugccuguugcugagagg

SEQ ID NO: 950845 - RNA, 22 nt, Human
agggagguaggagcuucuagcu

SEQ ID NO: 950846 - RNA, 22 nt, Human
agacaaaugguaauuaugucua

SEQ ID NO: 950847 - RNA, 22 nt, Human
agguagagcuccaguagaaaau

SEQ ID NO: 950848 - RNA, 22 nt, Human
ugcagauucaaaugaaaugcaa

SEQ ID NO: 950849 - RNA, 22 nt, Human
uuacaugguuguuggaaaugcu

SEQ ID NO: 950850 - RNA, 23 nt, Human
aggaggccugaaacugaggcuga

SEQ ID NO: 950851 - RNA, 22 nt, Human
auaugucgcuacaucauuagau

SEQ ID NO: 950852 - RNA, 22 nt, Human
acagaauucuaguauguggcuu

SEQ ID NO: 950853 - RNA, 22 nt, Human
ucacaaauagcuauauuaagga

SEQ ID NO: 950854 - RNA, 22 nt, Human
uucaggaugaaagugugcaaca

SEQ ID NO: 950855 - RNA, 20 nt, Human
cugcugugguccuuuauuuu

SEQ ID NO: 950856 - RNA, 22 nt, Human
cucagaauuuagggcucugagg

SEQ ID NO: 950857 - RNA, 22 nt, Human
uaucuuguaauagguccacuug

SEQ ID NO: 950858 - RNA, 22 nt, Human
uaaggccaaacuauuauaguuc

SEQ ID NO: 950859 - RNA, 22 nt, Human
aagauauuuuagaacauucacu

SEQ ID NO: 950860 - RNA, 19 nt, Human
uuuuccuucuauauguuuc

SEQ ID NO: 950861 - RNA, 22 nt, Human
aacuuuauuguuaggggcuaaa

SEQ ID NO: 950862 - RNA, 22 nt, Human
cagccaggagccucugcaacua

SEQ ID NO: 950863 - RNA, 19 nt, Human
ucucagagcccuagaggcc

SEQ ID NO: 950864 - RNA, 20 nt, Human
cccuaggaacgcagcaggag

SEQ ID NO: 950865 - RNA, 17 nt, Human
agcagaagucagaggga

SEQ ID NO: 950866 - RNA, 22 nt, Human
ugcagucuuccagcugcacaaa

SEQ ID NO: 950867 - RNA, 22 nt, Human
aaaaguuuaagacucauucuag

SEQ ID NO: 950868 - RNA, 22 nt, Human
gugguuuugccauuacaaguaa

SEQ ID NO: 950869 - RNA, 22 nt, Human
ccuuucucuaucgacccaucgc

SEQ ID NO: 950870 - RNA, 22 nt, Human
augaaauugaucuugaacuuuu

SEQ ID NO: 950871 - RNA, 22 nt, Human
aaucaguuucuuggcaaguuua

SEQ ID NO: 950872 - RNA, 22 nt, Human
auagaaaacagauguccuuaaa

SEQ ID NO: 950873 - RNA, 22 nt, Human
ucauggagacuuugagccuguu

SEQ ID NO: 950874 - RNA, 22 nt, Human
caaauguguuuuuucuucuaca

SEQ ID NO: 950875 - RNA, 20 nt, Human
uccaggcagcucagaguguc

SEQ ID NO: 950876 - RNA, 22 nt, Human
ccagggugugagaaggaaguag

SEQ ID NO: 950877 - RNA, 22 nt, Human
gcagcuaccacccaggaaggac

SEQ ID NO: 950878 - RNA, 22 nt, Human
cucaggauugugccuagggaga

SEQ ID NO: 950879 - RNA, 22 nt, Human
cuggcagcauggagccugugcu

SEQ ID NO: 950880 - RNA, 22 nt, Human
cccccaaggccaggcugagacc

SEQ ID NO: 950881 - RNA, 20 nt, Human
gcugggggugugcugaguga

SEQ ID NO: 950882 - RNA, 22 nt, Human
ggaggcuccacugcucuuccug

SEQ ID NO: 950883 - RNA, 22 nt, Human
agggguggccugccuuacuccc

SEQ ID NO: 950884 - RNA, 22 nt, Human
ucauugcagacuaacaaucuca

SEQ ID NO: 950885 - RNA, 22 nt, Human
ugccugggagugaccaagacuc

SEQ ID NO: 950886 - RNA, 22 nt, Human
ggccuugggcuggcugcaguau

SEQ ID NO: 950887 - RNA, 22 nt, Human
gaguguggugaacaggagcacc

SEQ ID NO: 950888 - RNA, 22 nt, Human
cuucuucauaggcaguccuguu

SEQ ID NO: 950889 - RNA, 22 nt, Human
cuggagaggcugggaacagguu

SEQ ID NO: 950890 - RNA, 22 nt, Human
agagcagguggcaacucuggga

SEQ ID NO: 950891 - RNA, 22 nt, Human
gccugucaauuuuguguacaau

SEQ ID NO: 950892 - RNA, 20 nt, Human
aguguuccggaagacuggca

SEQ ID NO: 950893 - RNA, 23 nt, Human
aagaauaaaugacauuaaaggug

SEQ ID NO: 950894 - RNA, 22 nt, Human
cagaggccuggcuuggacaccu

SEQ ID NO: 950895 - RNA, 22 nt, Human
cgggcagaucacacagggcuug

SEQ ID NO: 950896 - RNA, 22 nt, Human
cugcugagaaaagacugaggga

SEQ ID NO: 950897 - RNA, 22 nt, Human
ugcucugguaacucacuuccau

SEQ ID NO: 950898 - RNA, 22 nt, Human
uggccuugggcagguggccugc

SEQ ID NO: 950899 - RNA, 22 nt, Human
cuugcugucuugcauuuagagc

SEQ ID NO: 950900 - RNA, 22 nt, Human
uguguuugggggagaugcauuu

SEQ ID NO: 950901 - RNA, 22 nt, Human
aggcagcuagagagugaaacug

SEQ ID NO: 950902 - RNA, 22 nt, Human
uccuucagaggacggcagccag

SEQ ID NO: 950903 - RNA, 22 nt, Human
uuugaaagaaaccagugaguga

SEQ ID NO: 950904 - RNA, 22 nt, Human
guucuucacauuucauugagga

SEQ ID NO: 950905 - RNA, 22 nt, Human
acacauuauagagaguauaaua

SEQ ID NO: 950906 - RNA, 19 nt, Human
ugagugggccccugcagac

SEQ ID NO: 950907 - RNA, 22 nt, Human
cuugcaggcagggccuccugga

SEQ ID NO: 950908 - RNA, 22 nt, Human
ggcugagccuggagcaucuggu

SEQ ID NO: 950909 - RNA, 22 nt, Human
gcaagcuggcuguuagaggaug

SEQ ID NO: 950910 - RNA, 22 nt, Human
aucuucaaagggauguccaugg

SEQ ID NO: 950911 - RNA, 22 nt, Human
ggccuugcuuggguuauaugcc

SEQ ID NO: 950912 - RNA, 20 nt, Human
aggcucugccauugucccug

SEQ ID NO: 950913 - RNA, 23 nt, Human
auggagcugguacuagcuaccuc

SEQ ID NO: 950914 - RNA, 22 nt, Human
ugguuuugcuccaguauaaaua

SEQ ID NO: 950915 - RNA, 20 nt, Human
uguccuaauagacaagcaga

SEQ ID NO: 950916 - RNA, 20 nt, Human
ugaugguucuuuccggguug

SEQ ID NO: 950917 - RNA, 22 nt, Human
ccagggcacuuaggcccagccc

SEQ ID NO: 950918 - RNA, 22 nt, Human
aauguacaaaagucagccaacu

SEQ ID NO: 950919 - RNA, 22 nt, Human
ccaagcuacuuaggagucugag

SEQ ID NO: 950920 - RNA, 22 nt, Human
caguguggagggagagagccug

SEQ ID NO: 950921 - RNA, 22 nt, Human
gcaaauauucaagacuuuucca

SEQ ID NO: 950922 - RNA, 22 nt, Human
auuguauuuguacaagacaugu

SEQ ID NO: 950923 - RNA, 22 nt, Human
uguuuuaagagcgcacuuuaua

SEQ ID NO: 950924 - RNA, 19 nt, Human
uggggcuguguuuugaccc

SEQ ID NO: 950925 - RNA, 22 nt, Human
ccuugcauauauuauaucuuug

SEQ ID NO: 950926 - RNA, 22 nt, Human
ugguccaagugagguggccucu

SEQ ID NO: 950927 - RNA, 22 nt, Human
augggaggaaggaggcccuuga

SEQ ID NO: 950928 - RNA, 22 nt, Human
uuuguuuugaacuagcucagaa

SEQ ID NO: 950929 - RNA, 22 nt, Human
auaauuuacaacugcuuuuaau

SEQ ID NO: 950930 - RNA, 22 nt, Human
cgcuggggcuuuuugcuugaga

SEQ ID NO: 950931 - RNA, 22 nt, Human
agcuggcccucgagagccaauu

SEQ ID NO: 950932 - RNA, 22 nt, Human
uuagcuaaacuguaacuagaau

SEQ ID NO: 950933 - RNA, 22 nt, Human
auucucaaacaagugguuugau

SEQ ID NO: 950934 - RNA, 22 nt, Human
acugcaucugaaacauggguca

SEQ ID NO: 950935 - RNA, 22 nt, Human
gaggccugcuuuggcacucugg

SEQ ID NO: 950936 - RNA, 22 nt, Human
uuguuuuaaugagggagguuga

SEQ ID NO: 950937 - RNA, 22 nt, Human
cuggccaauauagggaaaucuu

SEQ ID NO: 950938 - RNA, 22 nt, Human
ucugccuggauuccauucucca

SEQ ID NO: 950939 - RNA, 22 nt, Human
ggcaggugugagaucgaggcca

SEQ ID NO: 950940 - RNA, 22 nt, Human
ugaaaugagauagauaaucagg

SEQ ID NO: 950941 - RNA, 22 nt, Human
acuccaggguuuugcaccugga

SEQ ID NO: 950942 - RNA, 22 nt, Human
guccacauaggaacccagcuuc

SEQ ID NO: 950943 - RNA, 22 nt, Human
caagacaagaucuaagcaugcu

SEQ ID NO: 950944 - RNA, 21 nt, Human
gcaggggauagaaauggucug

SEQ ID NO: 950945 - RNA, 22 nt, Human
gcuguccucuuggacucagggc

SEQ ID NO: 950946 - RNA, 17 nt, Human
ccuuucucuuucaucuc

SEQ ID NO: 950947 - RNA, 22 nt, Human
uuucaaagguggaagagugaau

SEQ ID NO: 950948 - RNA, 22 nt, Human
ccuggcuggauggagccccugg

SEQ ID NO: 950949 - RNA, 22 nt, Human
cccugcagccuugcaugccuuc

SEQ ID NO: 950950 - RNA, 22 nt, Human
aauuucaaguggcaucuuugau

SEQ ID NO: 950951 - RNA, 22 nt, Human
agcugccagggacugggcaugg

SEQ ID NO: 950952 - RNA, 22 nt, Human
uagagcuggccgggacagcugg

SEQ ID NO: 950953 - RNA, 22 nt, Human
cucaccacagagccuguccagc

SEQ ID NO: 950954 - RNA, 22 nt, Human
ggaaggaggaugcucuggccuu

SEQ ID NO: 950955 - RNA, 18 nt, Human
aucuuuccauagcauguu

SEQ ID NO: 950956 - RNA, 20 nt, Human
auuccauaguuggcacuuuu

SEQ ID NO: 950957 - RNA, 22 nt, Human
uagcagggaaggugugcugagc

SEQ ID NO: 950958 - RNA, 22 nt, Human
cagccagcuggcacugugagua

SEQ ID NO: 950959 - RNA, 22 nt, Human
ccaggcaucacgggcauguggc

SEQ ID NO: 950960 - RNA, 22 nt, Human
aaaucugguucaguaaguccuc

SEQ ID NO: 950961 - RNA, 22 nt, Human
uaaguuaucggaguguguuuca

SEQ ID NO: 950962 - RNA, 22 nt, Human
ccuggcagcaggugggcccgug

SEQ ID NO: 950963 - RNA, 18 nt, Human
cccagcuccacuucccuc

SEQ ID NO: 950964 - RNA, 22 nt, Human
auaaagacaugcuuacuugccc

SEQ ID NO: 950965 - RNA, 22 nt, Human
auaguacacauccuacaauguu

SEQ ID NO: 950966 - RNA, 22 nt, Human
cugcacugagcucucccagccc

SEQ ID NO: 950967 - RNA, 20 nt, Human
aggccaaacccagcgcgccc

SEQ ID NO: 950968 - RNA, 22 nt, Human
ugacauaauaauccaaacauac

SEQ ID NO: 950969 - RNA, 22 nt, Human
agguggggaggagugucucuuu

SEQ ID NO: 950970 - RNA, 22 nt, Human
ugcuggcuggccuggccuggac

SEQ ID NO: 950971 - RNA, 22 nt, Human
ucaugcaaggcugaaacauggu

SEQ ID NO: 950972 - RNA, 22 nt, Human
guuuagaauucuaacuuuaagg

SEQ ID NO: 950973 - RNA, 22 nt, Human
acauuucuaguuguucaucucc

SEQ ID NO: 950974 - RNA, 22 nt, Human
guauuagggccaaaggcaggaa

SEQ ID NO: 950975 - RNA, 22 nt, Human
caggcacuggggaugcugggau

SEQ ID NO: 950976 - RNA, 22 nt, Human
cagugaaaucacaacuuuaguu

SEQ ID NO: 950977 - RNA, 22 nt, Human
uggaggcaucagagugcuuggc

SEQ ID NO: 950978 - RNA, 22 nt, Human
ugggaggacuugugggcuucau

SEQ ID NO: 950979 - RNA, 22 nt, Human
uuaucguacgcuucagaaauuu

SEQ ID NO: 950980 - RNA, 22 nt, Human
uuucacuagaacguucuuguuu

SEQ ID NO: 950981 - RNA, 22 nt, Human
ugucucagggcagcagcagggg

SEQ ID NO: 950982 - RNA, 22 nt, Human
uauguuaaauguuugauguuua

SEQ ID NO: 950983 - RNA, 22 nt, Human
gcagcuggaagugacacucugu

SEQ ID NO: 950984 - RNA, 18 nt, Human
gagaggcccggcugugcc

SEQ ID NO: 950985 - RNA, 17 nt, Human
acuccuggucugaaggg

SEQ ID NO: 950986 - RNA, 22 nt, Human
aaucaguuaaauauugaguaca

SEQ ID NO: 950987 - RNA, 22 nt, Human
ugacauaaguugguagaaagga

SEQ ID NO: 950988 - RNA, 22 nt, Human
aauaauguacauacauauuucg

SEQ ID NO: 950989 - RNA, 22 nt, Human
ggaaaugacuuggugcuucguu

SEQ ID NO: 950990 - RNA, 17 nt, Human
aagagaggcugagcugg

SEQ ID NO: 950991 - RNA, 21 nt, Human
cauuucaugauuauagaaaug

SEQ ID NO: 950992 - RNA, 22 nt, Human
uccuggauucugcccugaaggc

SEQ ID NO: 950993 - RNA, 22 nt, Human
agccuggacagcuacggagaac

SEQ ID NO: 950994 - RNA, 17 nt, Human
uccaggagaggcaaugg

SEQ ID NO: 950995 - RNA, 22 nt, Human
uuucaugugcaauuagcaauau

SEQ ID NO: 950996 - RNA, 22 nt, Human
cagccagcuucagauccaagcc

SEQ ID NO: 950997 - RNA, 22 nt, Human
acagaagagcacauuuaguaug

SEQ ID NO: 950998 - RNA, 22 nt, Human
cacccuggcuggaggugcagug

SEQ ID NO: 950999 - RNA, 22 nt, Human
ucagaagucccagaauucacau

SEQ ID NO: 951000 - RNA, 22 nt, Human
ugcgcggcucagucaucuccag

SEQ ID NO: 951001 - RNA, 22 nt, Human
cagcuucugucugauuagcaag

SEQ ID NO: 951002 - RNA, 22 nt, Human
ccauaaggagccagacauucca

SEQ ID NO: 951003 - RNA, 22 nt, Human
gacaggguacgggcuaggcaca

SEQ ID NO: 951004 - RNA, 19 nt, Human
agcauccagucaugggauc

SEQ ID NO: 951005 - RNA, 22 nt, Human
aucagugcuaaagcaaaugccc

SEQ ID NO: 951006 - RNA, 22 nt, Human
ugcuguguggaugugaagaauc

SEQ ID NO: 951007 - RNA, 18 nt, Human
aaaugcuaggcuacauga

SEQ ID NO: 951008 - RNA, 22 nt, Human
gaggcagcuggguccggucggg

SEQ ID NO: 951009 - RNA, 22 nt, Human
uugcauugauguuccuucuugc

SEQ ID NO: 951010 - RNA, 22 nt, Human
uccagggaucuuuagagucuuu

SEQ ID NO: 951011 - RNA, 22 nt, Human
uggagcugauacagcuggcuuu

SEQ ID NO: 951012 - RNA, 22 nt, Human
ucuggcucugaauucacuucug

SEQ ID NO: 951013 - RNA, 22 nt, Human
gucuggccuuuuuagcuugugg

SEQ ID NO: 951014 - RNA, 22 nt, Human
uagaggugucacuuugggaagu

SEQ ID NO: 951015 - RNA, 22 nt, Human
ugccugucucugacugccauua

SEQ ID NO: 951016 - RNA, 22 nt, Human
ggagccugacagugcccagcau

SEQ ID NO: 951017 - RNA, 22 nt, Human
uuuguuuagaugguaaaucagu

SEQ ID NO: 951018 - RNA, 22 nt, Human
aauagguagccagauauauaaa

SEQ ID NO: 951019 - RNA, 22 nt, Human
uucuaaauggggauccuuucug

SEQ ID NO: 951020 - RNA, 22 nt, Human
gaggcugucuguuagccuggga

SEQ ID NO: 951021 - RNA, 22 nt, Human
ggugagaggcagaggacagcuu

SEQ ID NO: 951022 - RNA, 22 nt, Human
accucuggccuucaggcaucau

SEQ ID NO: 951023 - RNA, 22 nt, Human
acccaggagacagguugcagug

SEQ ID NO: 951024 - RNA, 22 nt, Human
agggaagcuuguuacugagaag

SEQ ID NO: 951025 - RNA, 21 nt, Human
aucagcaaaugccugucuccc

SEQ ID NO: 951026 - RNA, 22 nt, Human
ucaucaaagcgcuuggaguagg

SEQ ID NO: 951027 - RNA, 22 nt, Human
gcuguccaugucuggccucagu

SEQ ID NO: 951028 - RNA, 22 nt, Human
ggaggccaucagggagggcauu

SEQ ID NO: 951029 - RNA, 20 nt, Human
aaguuuucuccaaauacagu

SEQ ID NO: 951030 - RNA, 22 nt, Human
gcaaaugcucuccuuggucagg

SEQ ID NO: 951031 - RNA, 22 nt, Human
cagagccauccaggugccuguu

SEQ ID NO: 951032 - RNA, 22 nt, Human
cuuuauguucaguacaaugcuu

SEQ ID NO: 951033 - RNA, 22 nt, Human
uccuggccgcuggccccugaga

SEQ ID NO: 951034 - RNA, 22 nt, Human
ugaaucaguauaaauucucaaa

SEQ ID NO: 951035 - RNA, 22 nt, Human
ccugacgaaaggcgugcuggag

SEQ ID NO: 951036 - RNA, 22 nt, Human
aaucuucuacuugacaguucuc

SEQ ID NO: 951037 - RNA, 22 nt, Human
aaggaguuuggguagucauaca

SEQ ID NO: 951038 - RNA, 22 nt, Human
ggagggaaugucuagcauucuu

SEQ ID NO: 951039 - RNA, 22 nt, Human
uauuagguaugaacuggcaacc

SEQ ID NO: 951040 - RNA, 22 nt, Human
guuccauaucacagcagacgaa

SEQ ID NO: 951041 - RNA, 22 nt, Human
ucucaggggccuggaguccugg

SEQ ID NO: 951042 - RNA, 20 nt, Human
ucaggcaguggggaaaggca

SEQ ID NO: 951043 - RNA, 22 nt, Human
gccagggcucgcggucccucgu

SEQ ID NO: 951044 - RNA, 22 nt, Human
caaguuaucagaaggcacuuuu

SEQ ID NO: 951045 - RNA, 22 nt, Human
gcagagcucuguucuuaucucc

SEQ ID NO: 951046 - RNA, 22 nt, Human
uuucacaaaugucuuuaacuug

SEQ ID NO: 951047 - RNA, 22 nt, Human
ugauuuccaauaaggagaaugu

SEQ ID NO: 951048 - RNA, 22 nt, Human
cugccugcuucugagccagagg

SEQ ID NO: 951049 - RNA, 22 nt, Human
uucaggaugcagagguuguagu

SEQ ID NO: 951050 - RNA, 22 nt, Human
cagcuucucagaaagcugaggu

SEQ ID NO: 951051 - RNA, 22 nt, Human
agcugccaaguuucucaguuua

SEQ ID NO: 951052 - RNA, 22 nt, Human
aggagaaagacuggacagccaa

SEQ ID NO: 951053 - RNA, 22 nt, Human
aggcacaggccucagcacccag

SEQ ID NO: 951054 - RNA, 22 nt, Human
uguagcucuccagccagcaagg

SEQ ID NO: 951055 - RNA, 22 nt, Human
uguuggcauuagaggguuauug

SEQ ID NO: 951056 - RNA, 22 nt, Human
ugucuuuucuacuguaagcaua

SEQ ID NO: 951057 - RNA, 22 nt, Human
aaaugcacucugcuucugugac

SEQ ID NO: 951058 - RNA, 22 nt, Human
uggccuggugucugcgaggccu

SEQ ID NO: 951059 - RNA, 22 nt, Human
cagacaugauguaagcagaggc

SEQ ID NO: 951060 - RNA, 22 nt, Human
ccugggaggcggagguugcagg

SEQ ID NO: 951061 - RNA, 23 nt, Human
acagcugcaccuggccgccuggc

SEQ ID NO: 951062 - RNA, 22 nt, Human
ccaucagcuccaguaucuucug

SEQ ID NO: 951063 - RNA, 22 nt, Human
ccauaagguugaaaacuguaca

SEQ ID NO: 951064 - RNA, 22 nt, Human
uuuucuaacaucuaguaauuug

SEQ ID NO: 951065 - RNA, 20 nt, Human
ucagugauuuugaagaggaa

SEQ ID NO: 951066 - RNA, 22 nt, Human
gagcugaguuaccuccagauca

SEQ ID NO: 951067 - RNA, 22 nt, Human
auguacacaugcaugcaugugc

SEQ ID NO: 951068 - RNA, 22 nt, Human
gcccaggauaaugcugucccug

SEQ ID NO: 951069 - RNA, 22 nt, Human
aucaguuuuuauuaauguagcu

SEQ ID NO: 951070 - RNA, 22 nt, Human
cuggaagguucuuugugugccu

SEQ ID NO: 951071 - RNA, 22 nt, Human
uacaguaacauguuguacaagc

SEQ ID NO: 951072 - RNA, 22 nt, Human
accaaacaaaauugugcacugu

SEQ ID NO: 951073 - RNA, 22 nt, Human
agugggcaugaucuggugucug

SEQ ID NO: 951074 - RNA, 22 nt, Human
gucuuucuuaauucaagugcuu

SEQ ID NO: 951075 - RNA, 22 nt, Human
aauguucauugauuaaaugaau

SEQ ID NO: 951076 - RNA, 17 nt, Human
ggcagcugccacuuuuu

SEQ ID NO: 951077 - RNA, 22 nt, Human
cagcagagacgguaagcagaac

SEQ ID NO: 951078 - RNA, 22 nt, Human
aaauacuagaauucagaguuga

SEQ ID NO: 951079 - RNA, 22 nt, Human
agccacagugcaagagagaaaa

SEQ ID NO: 951080 - RNA, 22 nt, Human
uacuaaauaguuuaauuccuca

SEQ ID NO: 951081 - RNA, 22 nt, Human
ggguggagaggcuaaguccagu

SEQ ID NO: 951082 - RNA, 22 nt, Human
caggcugcagaggccuuucaug

SEQ ID NO: 951083 - RNA, 22 nt, Human
uuucaacagcucucaaaugauc

SEQ ID NO: 951084 - RNA, 22 nt, Human
gcagcuggcccugacacgcaga

SEQ ID NO: 951085 - RNA, 21 nt, Human
uuacuuuugcaccaaccuaau

SEQ ID NO: 951086 - RNA, 22 nt, Human
ucuucagauggccaguuguccc

SEQ ID NO: 951087 - RNA, 22 nt, Human
uucaaucauuagaaucucaggc

SEQ ID NO: 951088 - RNA, 22 nt, Human
ggaugcugggagacagcaggca

SEQ ID NO: 951089 - RNA, 23 nt, Human
ugauuuuaaaaaguaaguuauca

SEQ ID NO: 951090 - RNA, 22 nt, Human
ucacucugggcccuacugggcu

SEQ ID NO: 951091 - RNA, 22 nt, Human
uugcaucuaccauaucaaagau

SEQ ID NO: 951092 - RNA, 22 nt, Human
uucaagauaauaggaaugaaaa

SEQ ID NO: 951093 - RNA, 22 nt, Human
auuguacaugcagugagucauc

SEQ ID NO: 951094 - RNA, 22 nt, Human
uuuaaauuauaguuaaugucug

SEQ ID NO: 951095 - RNA, 22 nt, Human
aggcauggcuuuaggcaggcgu

SEQ ID NO: 951096 - RNA, 22 nt, Human
gugugucuuuauaagaagaggg

SEQ ID NO: 951097 - RNA, 22 nt, Human
ugaaaucuccucuuuauauauc

SEQ ID NO: 951098 - RNA, 22 nt, Human
aaugaugggaaggagaaaagca

SEQ ID NO: 951099 - RNA, 22 nt, Human
uggaaauguauuugggcaugcc

SEQ ID NO: 951100 - RNA, 22 nt, Human
cucuccuggggagcacacacac

SEQ ID NO: 951101 - RNA, 22 nt, Human
uagaauaugugguaggaucugg

SEQ ID NO: 951102 - RNA, 22 nt, Human
ugggccacuugaaaguggaugu

SEQ ID NO: 951103 - RNA, 22 nt, Human
cccucagcuccacccucagcag

SEQ ID NO: 951104 - RNA, 18 nt, Human
cccacggugcuguagggc

SEQ ID NO: 951105 - RNA, 22 nt, Human
uugguuuacuaggauucaaauu

SEQ ID NO: 951106 - RNA, 22 nt, Human
cuuuguaucuaaauaucuugaa

SEQ ID NO: 951107 - RNA, 20 nt, Human
uucaaaguguaugauaugca

SEQ ID NO: 951108 - RNA, 22 nt, Human
aucuagaaguggcaugaauuac

SEQ ID NO: 951109 - RNA, 22 nt, Human
uuccuguauuuugcgaauuuuc

SEQ ID NO: 951110 - RNA, 21 nt, Human
uucaaagagugggcauuguca

SEQ ID NO: 951111 - RNA, 22 nt, Human
acccagcucuuugauggucuug

SEQ ID NO: 951112 - RNA, 22 nt, Human
gaaaggccauuucugaggguuu

SEQ ID NO: 951113 - RNA, 22 nt, Human
acagggcagugucuugaaaaau

SEQ ID NO: 951114 - RNA, 22 nt, Human
uggcucuggugcgggcuccugc

SEQ ID NO: 951115 - RNA, 22 nt, Human
ggucuaaaaugagucuuccuag

SEQ ID NO: 951116 - RNA, 22 nt, Human
acauaugugcuuauauccauga

SEQ ID NO: 951117 - RNA, 23 nt, Human
uccaggagaaccccugucugucc

SEQ ID NO: 951118 - RNA, 22 nt, Human
cccucugcucaggugcauaggc

SEQ ID NO: 951119 - RNA, 22 nt, Human
ugggcagcagcaaagccagacu

SEQ ID NO: 951120 - RNA, 22 nt, Human
uuugaaaguccuaggagagucc

SEQ ID NO: 951121 - RNA, 22 nt, Human
aucauaaaccacuuuguaaucu

SEQ ID NO: 951122 - RNA, 22 nt, Human
cucccaggacucagaggagaag

SEQ ID NO: 951123 - RNA, 22 nt, Human
aggcugggcaccguuuugaucc

SEQ ID NO: 951124 - RNA, 22 nt, Human
agcugggaggugggcagugaga

SEQ ID NO: 951125 - RNA, 22 nt, Human
caccuggcuggaagugcuccgg

SEQ ID NO: 951126 - RNA, 17 nt, Human
uggcagcugaaagcucu

SEQ ID NO: 951127 - RNA, 22 nt, Human
ucagccugcuccaagugcugcc

SEQ ID NO: 951128 - RNA, 22 nt, Human
ccagcuccuucugucuguggag

SEQ ID NO: 951129 - RNA, 22 nt, Human
uggcucagaugcucuuccagug

SEQ ID NO: 951130 - RNA, 22 nt, Human
auguguagaacuguaaugccca

SEQ ID NO: 951131 - RNA, 22 nt, Human
cuggcucucugagauauugagu

SEQ ID NO: 951132 - RNA, 22 nt, Human
aggcccuguuaugagccacugu

SEQ ID NO: 951133 - RNA, 22 nt, Human
uaugcacacaggcuuaauucau

SEQ ID NO: 951134 - RNA, 22 nt, Human
cuguuuaucuaggaguugcagg

SEQ ID NO: 951135 - RNA, 22 nt, Human
cugucaucacaguugagcagcc

SEQ ID NO: 951136 - RNA, 22 nt, Human
cucucuggcuuggcacggagau

SEQ ID NO: 951137 - RNA, 22 nt, Human
ccuggcucucugcagauccugg

SEQ ID NO: 951138 - RNA, 22 nt, Human
ugaugggacugccagcugcuga

SEQ ID NO: 951139 - RNA, 22 nt, Human
gagccagcagccggcaccacca

SEQ ID NO: 951140 - RNA, 23 nt, Human
uggagaugccccacucccugucu

SEQ ID NO: 951141 - RNA, 22 nt, Human
cacugaaggacaguaggaaggg

SEQ ID NO: 951142 - RNA, 19 nt, Human
uuacaucugcaacacuggu

SEQ ID NO: 951143 - RNA, 20 nt, Human
ucaccuuuguugguauucau

SEQ ID NO: 951144 - RNA, 22 nt, Human
acuaacauguuaaucaaaagaa

SEQ ID NO: 951145 - RNA, 22 nt, Human
cccucugaccuccugccacagu

SEQ ID NO: 951146 - RNA, 22 nt, Human
aguggcaggaaaguggaagaga

SEQ ID NO: 951147 - RNA, 21 nt, Human
agaaaaguagaguuuucagag

SEQ ID NO: 951148 - RNA, 22 nt, Human
accugccucuaagcagcaggug

SEQ ID NO: 951149 - RNA, 22 nt, Human
caggggcucuaaugcaugauca

SEQ ID NO: 951150 - RNA, 22 nt, Human
gacaucaauauucugcagggau

SEQ ID NO: 951151 - RNA, 17 nt, Human
uuccacaauaguuuguc

SEQ ID NO: 951152 - RNA, 22 nt, Human
cagaaguaagauuacugugaga

SEQ ID NO: 951153 - RNA, 22 nt, Human
gggaagggagggaccucagucu

SEQ ID NO: 951154 - RNA, 22 nt, Human
agaggaaguaaucaggaccugc

SEQ ID NO: 951155 - RNA, 22 nt, Human
acuuccuggcguagcugacauu

SEQ ID NO: 951156 - RNA, 22 nt, Human
gggccacauugaagggugggua

SEQ ID NO: 951157 - RNA, 22 nt, Human
agccacgucccugucaggguca

SEQ ID NO: 951158 - RNA, 22 nt, Human
cauuugaaauucuuagaacaaa

SEQ ID NO: 951159 - RNA, 23 nt, Human
ugucuggcucauggugggucuca

SEQ ID NO: 951160 - RNA, 23 nt, Human
cugcugugaaacaugguuuuggu

SEQ ID NO: 951161 - RNA, 22 nt, Human
uuauguagcagaaagauguuug

SEQ ID NO: 951162 - RNA, 22 nt, Human
cauucauuuacuuucaacagcu

SEQ ID NO: 951163 - RNA, 22 nt, Human
auuaaauuagcaaacugugaaa

SEQ ID NO: 951164 - RNA, 22 nt, Human
ucugcaggcuguacaggaagca

SEQ ID NO: 951165 - RNA, 22 nt, Human
gagaggagucccuaucacaguu

SEQ ID NO: 951166 - RNA, 18 nt, Human
gcccugguggagcuggug

SEQ ID NO: 951167 - RNA, 22 nt, Human
cauuaugugggaaaauguucuu

SEQ ID NO: 951168 - RNA, 21 nt, Human
ggcagcugaccgcgcggugca

SEQ ID NO: 951169 - RNA, 20 nt, Human
acccagcucugugcccuggg

SEQ ID NO: 951170 - RNA, 22 nt, Human
uccugagauguggagcuccaug

SEQ ID NO: 951171 - RNA, 22 nt, Human
acaacuucucacagauaaauuu

SEQ ID NO: 951172 - RNA, 22 nt, Human
uuacuuugaugaucaaugagcg

SEQ ID NO: 951173 - RNA, 22 nt, Human
cuggagcaggcuugucccagcu

SEQ ID NO: 951174 - RNA, 22 nt, Human
aaauaauugaguuggucaauau

SEQ ID NO: 951175 - RNA, 22 nt, Human
gccugaggaaugcuccugacuu

SEQ ID NO: 951176 - RNA, 22 nt, Human
gaguggggcccacugcugggug

SEQ ID NO: 951177 - RNA, 22 nt, Human
ccaggaagccucagaugcugag

SEQ ID NO: 951178 - RNA, 22 nt, Human
cuggggccacaacggcgcacgc

SEQ ID NO: 951179 - RNA, 22 nt, Human
ugcagcauucuuggccacuacu

SEQ ID NO: 951180 - RNA, 22 nt, Human
ucccucagggugcaguugcuuu

SEQ ID NO: 951181 - RNA, 22 nt, Human
aagggcugcuguagaagcagag

SEQ ID NO: 951182 - RNA, 22 nt, Human
uuucccaguucccugcucuaua

SEQ ID NO: 951183 - RNA, 22 nt, Human
gaccauuugcuaguaaauugca

SEQ ID NO: 951184 - RNA, 22 nt, Human
agcauuuaugacuaauguaaaa

SEQ ID NO: 951185 - RNA, 22 nt, Human
aacacuuucuuccuugcucagg

SEQ ID NO: 951186 - RNA, 22 nt, Human
ccuggagguggagguugcagug

SEQ ID NO: 951187 - RNA, 22 nt, Human
ccagccaggcauugcaaacuga

SEQ ID NO: 951188 - RNA, 22 nt, Human
ggucaggguauaaucaagugag

SEQ ID NO: 951189 - RNA, 22 nt, Human
auuuacagaagcauguaauagc

SEQ ID NO: 951190 - RNA, 22 nt, Human
aaggcacuugcccagagcugca

SEQ ID NO: 951191 - RNA, 22 nt, Human
ccaggguggggcaggcccacug

SEQ ID NO: 951192 - RNA, 22 nt, Human
uuaacagauguuuauggagcau

SEQ ID NO: 951193 - RNA, 22 nt, Human
aggaagcuggugugaggaugaa

SEQ ID NO: 951194 - RNA, 22 nt, Human
cggccaaauugcagagagaagc

SEQ ID NO: 951195 - RNA, 22 nt, Human
agcagcauagaagcugggagga

SEQ ID NO: 951196 - RNA, 22 nt, Human
cagcaugguggagcugcucuuu

SEQ ID NO: 951197 - RNA, 22 nt, Human
ugaugguuuuauuaauaggacc

SEQ ID NO: 951198 - RNA, 22 nt, Human
cugugccuuuguagcugugccu

SEQ ID NO: 951199 - RNA, 22 nt, Human
gcugcaggcgccugcggucucu

SEQ ID NO: 951200 - RNA, 22 nt, Human
cacugcagcaccaugcagggcu

SEQ ID NO: 951201 - RNA, 22 nt, Human
uggcucagccagcccuaggaac

SEQ ID NO: 951202 - RNA, 22 nt, Human
augugucuggcauggaaagugu

SEQ ID NO: 951203 - RNA, 22 nt, Human
acagcuggcaggggggcaugaa

SEQ ID NO: 951204 - RNA, 22 nt, Human
cauauuugguauaacuuaagca

SEQ ID NO: 951205 - RNA, 22 nt, Human
uagcagggaagaugaucagaau

SEQ ID NO: 951206 - RNA, 17 nt, Human
acacagggagagggagc

SEQ ID NO: 951207 - RNA, 22 nt, Human
gaccagagaaaggcacuggaag

SEQ ID NO: 951208 - RNA, 21 nt, Human
auaagcaugcugauuacauuu

SEQ ID NO: 951209 - RNA, 22 nt, Human
ucaaaguuuguggcaauuuauu

SEQ ID NO: 951210 - RNA, 22 nt, Human
uggaagccaggcccgcuccuaa

SEQ ID NO: 951211 - RNA, 22 nt, Human
uggcugugggaugagagccuca

SEQ ID NO: 951212 - RNA, 22 nt, Human
auucuucacaccuguuccuguu

SEQ ID NO: 951213 - RNA, 22 nt, Human
cuggccauguugccucugagac

SEQ ID NO: 951214 - RNA, 22 nt, Human
uggcucagucuggguugacuga

SEQ ID NO: 951215 - RNA, 20 nt, Human
cguaaggcaagugcugcauc

SEQ ID NO: 951216 - RNA, 22 nt, Human
ucccaggaugaagacaguguug

SEQ ID NO: 951217 - RNA, 22 nt, Human
ucuccugggcuugguugaaguu

SEQ ID NO: 951218 - RNA, 22 nt, Human
aaagcacauuacaagcucaguc

SEQ ID NO: 951219 - RNA, 18 nt, Human
gucaccuggaucagauua

SEQ ID NO: 951220 - RNA, 17 nt, Human
uuccucucacauuuuuu

SEQ ID NO: 951221 - RNA, 22 nt, Human
ucacucuguguuucccugggac

SEQ ID NO: 951222 - RNA, 22 nt, Human
cugagcuggucuauggacuugg

SEQ ID NO: 951223 - RNA, 22 nt, Human
ucagcugccccaguggccccag

SEQ ID NO: 951224 - RNA, 23 nt, Human
agccagggcacugguggagauug

SEQ ID NO: 951225 - RNA, 20 nt, Human
ccagucucuaucagaaauaa

SEQ ID NO: 951226 - RNA, 22 nt, Human
auauucacugagcauaaagcca

SEQ ID NO: 951227 - RNA, 22 nt, Human
gcugucccgaaccccugguaau

SEQ ID NO: 951228 - RNA, 22 nt, Human
uaacuccagagaauccauccau

SEQ ID NO: 951229 - RNA, 22 nt, Human
aaaggucauugaaaaggaggaa

SEQ ID NO: 951230 - RNA, 22 nt, Human
ucuggagaacuugcaagaggau

SEQ ID NO: 951231 - RNA, 22 nt, Human
gcuuccugucccucagccauga

SEQ ID NO: 951232 - RNA, 22 nt, Human
accaggggaugguuggcacugu

SEQ ID NO: 951233 - RNA, 22 nt, Human
ugaccaaaaaauucccugugag

SEQ ID NO: 951234 - RNA, 22 nt, Human
uucuucucucauagauuaaggu

SEQ ID NO: 951235 - RNA, 22 nt, Human
gauuucuuuagguguaauagug

SEQ ID NO: 951236 - RNA, 22 nt, Human
ggaggaugccaagcugugcaca

SEQ ID NO: 951237 - RNA, 22 nt, Human
ucagggcaaugucccucagaag

SEQ ID NO: 951238 - RNA, 20 nt, Human
aggaaaaggguggugguaga

SEQ ID NO: 951239 - RNA, 22 nt, Human
uagcauuuauggucaugugucc

SEQ ID NO: 951240 - RNA, 22 nt, Human
cugcugcugcuaucuacccagg

SEQ ID NO: 951241 - RNA, 22 nt, Human
guguacauauugagucugcuga

SEQ ID NO: 951242 - RNA, 22 nt, Human
aggccuuccucggagacaggga

SEQ ID NO: 951243 - RNA, 22 nt, Human
agagagagggaaacugcuaaac

SEQ ID NO: 951244 - RNA, 22 nt, Human
cacugaagccugggaguaagac

SEQ ID NO: 951245 - RNA, 22 nt, Human
uaaauuaugucacaugacucug

SEQ ID NO: 951246 - RNA, 21 nt, Human
cagaggcugagagggcaaucu

SEQ ID NO: 951247 - RNA, 22 nt, Human
caugcacuuaccugaaauucaa

SEQ ID NO: 951248 - RNA, 22 nt, Human
cuccucccugcgauugcucugc

SEQ ID NO: 951249 - RNA, 22 nt, Human
gaaaucugaacaacagcuguca

SEQ ID NO: 951250 - RNA, 22 nt, Human
aaggcagcacagcaacugcuca

SEQ ID NO: 951251 - RNA, 22 nt, Human
aaaucagugcucauuugaaagg

SEQ ID NO: 951252 - RNA, 22 nt, Human
aucuggcuuuuaccccacggcc

SEQ ID NO: 951253 - RNA, 23 nt, Human
ucuggcuccauccuuggggaucc

SEQ ID NO: 951254 - RNA, 22 nt, Human
aggugcagaaaaaaguccuuua

SEQ ID NO: 951255 - RNA, 18 nt, Human
ugacucacccugucagug

SEQ ID NO: 951256 - RNA, 22 nt, Human
ugugccuggcauucugggcuuc

SEQ ID NO: 951257 - RNA, 20 nt, Human
aagagaggaaguuauacuag

SEQ ID NO: 951258 - RNA, 22 nt, Human
ccugucaguugcugucagggau

SEQ ID NO: 951259 - RNA, 22 nt, Human
uccugucugucuuuggucccuu

SEQ ID NO: 951260 - RNA, 22 nt, Human
uccaaagaagucacaaacgaag

SEQ ID NO: 951261 - RNA, 22 nt, Human
cucauacauaugccauuccugc

SEQ ID NO: 951262 - RNA, 22 nt, Human
accucugcucaagaccccuccg

SEQ ID NO: 951263 - RNA, 22 nt, Human
aucucagacauguuguccauga

SEQ ID NO: 951264 - RNA, 22 nt, Human
aagauuauggcagauaacaauu

SEQ ID NO: 951265 - RNA, 22 nt, Human
aagaaauuaaggaaugcaacga

SEQ ID NO: 951266 - RNA, 22 nt, Human
cagcagaggcacgucugugaau

SEQ ID NO: 951267 - RNA, 22 nt, Human
ggcuggcacucuguccaguguc

SEQ ID NO: 951268 - RNA, 22 nt, Human
ucacagugaugacgugggagca

SEQ ID NO: 951269 - RNA, 22 nt, Human
ggcugcuguuucagagacuguu

SEQ ID NO: 951270 - RNA, 22 nt, Human
cagcucccaguggcagcuccuu

SEQ ID NO: 951271 - RNA, 19 nt, Human
cugucaggggcuggauguu

SEQ ID NO: 951272 - RNA, 22 nt, Human
uaugucuuuguccaugugcagu

SEQ ID NO: 951273 - RNA, 22 nt, Human
agcagcugcagggagggucugc

SEQ ID NO: 951274 - RNA, 22 nt, Human
guagcccaccuggggagggcga

SEQ ID NO: 951275 - RNA, 22 nt, Human
cuuuauguccaccagacugcaa

SEQ ID NO: 951276 - RNA, 22 nt, Human
agcuuuguauuugagcauacga

SEQ ID NO: 951277 - RNA, 22 nt, Human
cuuagcaugugguguccuugua

SEQ ID NO: 951278 - RNA, 22 nt, Human
gagguacagaguguuccaaugu

SEQ ID NO: 951279 - RNA, 22 nt, Human
agaauuagucacaauuauagga

SEQ ID NO: 951280 - RNA, 22 nt, Human
caggauccccaggucgccgucc

SEQ ID NO: 951281 - RNA, 22 nt, Human
ugggagaagcagcagccaagug

SEQ ID NO: 951282 - RNA, 22 nt, Human
uuucacaucagagguagauuag

SEQ ID NO: 951283 - RNA, 22 nt, Human
gagagggccgggggccagcucc

SEQ ID NO: 951284 - RNA, 22 nt, Human
ucugcagcuucuugccagagag

SEQ ID NO: 951285 - RNA, 22 nt, Human
aggagagggguaggauuaauuu

SEQ ID NO: 951286 - RNA, 22 nt, Human
auugacaagacaauggcucuua

SEQ ID NO: 951287 - RNA, 21 nt, Human
ugcagcugacacugguaugcc

SEQ ID NO: 951288 - RNA, 19 nt, Human
ggcugccuggagcgagggc

SEQ ID NO: 951289 - RNA, 22 nt, Human
cuguaaaacugcuuaaguaugc

SEQ ID NO: 951290 - RNA, 22 nt, Human
uuggcaggaauauugcagaggu

SEQ ID NO: 951291 - RNA, 22 nt, Human
agaauaaaucaaauguccugag

SEQ ID NO: 951292 - RNA, 22 nt, Human
gaauguaauagucaguagaaca

SEQ ID NO: 951293 - RNA, 22 nt, Human
gcagggcuguggacacuuuggu

SEQ ID NO: 951294 - RNA, 22 nt, Human
gcagauggugccaugucuugug

SEQ ID NO: 951295 - RNA, 22 nt, Human
cuggccuuggugcuugcagaca

SEQ ID NO: 951296 - RNA, 22 nt, Human
agggacacugaugagaaauucu

SEQ ID NO: 951297 - RNA, 22 nt, Human
cucagcccagcccaggaccagg

SEQ ID NO: 951298 - RNA, 22 nt, Human
uacaugcuccacuuucuccugu

SEQ ID NO: 951299 - RNA, 22 nt, Human
ggacccugggcuugcuccuggg

SEQ ID NO: 951300 - RNA, 22 nt, Human
ugucucagaggcaggaagagcc

SEQ ID NO: 951301 - RNA, 22 nt, Human
augucccuugucugugaugucu

SEQ ID NO: 951302 - RNA, 22 nt, Human
uuccucucaacaugccugccgg

SEQ ID NO: 951303 - RNA, 22 nt, Human
auuugaagucuucaugauuucu

SEQ ID NO: 951304 - RNA, 22 nt, Human
uagcugccagaccauucuuacu

SEQ ID NO: 951305 - RNA, 22 nt, Human
gggauggcucaaaggagucagg

SEQ ID NO: 951306 - RNA, 22 nt, Human
cuuguacauagagaagaagccu

SEQ ID NO: 951307 - RNA, 17 nt, Human
ucugccgacugccagcu

SEQ ID NO: 951308 - RNA, 22 nt, Human
ucagcuccucagagccucaguu

SEQ ID NO: 951309 - RNA, 22 nt, Human
auuuaucaccaguuagcugacu

SEQ ID NO: 951310 - RNA, 22 nt, Human
guacacucccccugugaaguug

SEQ ID NO: 951311 - RNA, 22 nt, Human
ugaggccaaugacccugggcag

SEQ ID NO: 951312 - RNA, 22 nt, Human
ugauuucccuguagccucugaa

SEQ ID NO: 951313 - RNA, 22 nt, Human
gcacugcagguggguggagagg

SEQ ID NO: 951314 - RNA, 22 nt, Human
gcaggcaguuugcuuuucccuc

SEQ ID NO: 951315 - RNA, 22 nt, Human
agccagccaguucacuaggaaa

SEQ ID NO: 951316 - RNA, 23 nt, Human
uggcagcagaucuuaaagugacc

SEQ ID NO: 951317 - RNA, 20 nt, Human
guugaaaguaauaugaugcu

SEQ ID NO: 951318 - RNA, 22 nt, Human
guccuggcccacuggcaggcug

SEQ ID NO: 951319 - RNA, 22 nt, Human
cagggugcgccacucagaugua

SEQ ID NO: 951320 - RNA, 22 nt, Human
gaggcaugcagagcuggagcag

SEQ ID NO: 951321 - RNA, 22 nt, Human
cccagcuccuuggaugggcagg

SEQ ID NO: 951322 - RNA, 19 nt, Human
ggaaacaggggccagagga

SEQ ID NO: 951323 - RNA, 21 nt, Human
ucagaguguguuacagcaagc

SEQ ID NO: 951324 - RNA, 22 nt, Human
uccagcucuaacaugcugggcc

SEQ ID NO: 951325 - RNA, 22 nt, Human
cuggguggaaagugcugagaau

SEQ ID NO: 951326 - RNA, 22 nt, Human
uuucaugaggggcaaaaucuca

SEQ ID NO: 951327 - RNA, 22 nt, Human
cccucccaagcacucugacaua

SEQ ID NO: 951328 - RNA, 22 nt, Human
caucacuguccaaaguucaguu

SEQ ID NO: 951329 - RNA, 22 nt, Human
aguccaggucucugagucacaa

SEQ ID NO: 951330 - RNA, 22 nt, Human
agagugaaaagcuagagcagua

SEQ ID NO: 951331 - RNA, 22 nt, Human
ucucugcugagaagggcuggca

SEQ ID NO: 951332 - RNA, 22 nt, Human
aaagauuucacaucccaagccu

SEQ ID NO: 951333 - RNA, 22 nt, Human
gagagcaggaggcagcgggacg

SEQ ID NO: 951334 - RNA, 22 nt, Human
ugugccuggaucucugugacaa

SEQ ID NO: 951335 - RNA, 22 nt, Human
ucuguucagcugccucagggua

SEQ ID NO: 951336 - RNA, 22 nt, Human
ugguacuuggaggcagaaaaau

SEQ ID NO: 951337 - RNA, 22 nt, Human
gaaguuuauuucaaucuauuca

SEQ ID NO: 951338 - RNA, 19 nt, Human
auggaaaaugccagacuga

SEQ ID NO: 951339 - RNA, 22 nt, Human
uugcauaaaagaguauaucuua

SEQ ID NO: 951340 - RNA, 22 nt, Human
ggcucugguugaccaugauggc

SEQ ID NO: 951341 - RNA, 22 nt, Human
cuugaaucuucugaguauuugc

SEQ ID NO: 951342 - RNA, 22 nt, Human
uacuguauuugauaagugaagu

SEQ ID NO: 951343 - RNA, 22 nt, Human
gagagaagggggauaugagccu

SEQ ID NO: 951344 - RNA, 22 nt, Human
guacauuuuacuuuguuugaau

SEQ ID NO: 951345 - RNA, 20 nt, Human
cugagcccccagccugcagg

SEQ ID NO: 951346 - RNA, 17 nt, Human
gggcagggacuccuggg

SEQ ID NO: 951347 - RNA, 22 nt, Human
cuauaauuaugcucaaaaugua

SEQ ID NO: 951348 - RNA, 22 nt, Human
cccugcagcuuuugcauaguca

SEQ ID NO: 951349 - RNA, 22 nt, Human
acaugauuggacuccuuccccu

SEQ ID NO: 951350 - RNA, 22 nt, Human
ccucaggauacaggagccacag

SEQ ID NO: 951351 - RNA, 22 nt, Human
caguacuuuucuggcuuucuac

SEQ ID NO: 951352 - RNA, 21 nt, Human
aaaguucaugcuuuaauauuc

SEQ ID NO: 951353 - RNA, 20 nt, Human
cuguggcucaugcaucugcc

SEQ ID NO: 951354 - RNA, 22 nt, Human
agcugagccagcagcaacagga

SEQ ID NO: 951355 - RNA, 22 nt, Human
uugaagcacaaugucuuuuauc

SEQ ID NO: 951356 - RNA, 22 nt, Human
acaggcuucucacagaaaaggg

SEQ ID NO: 951357 - RNA, 22 nt, Human
ccaggaguggcuggugaccuuc

SEQ ID NO: 951358 - RNA, 19 nt, Human
cugagagaugcuucacaca

SEQ ID NO: 951359 - RNA, 22 nt, Human
cugguucauccccuuccaggaa

SEQ ID NO: 951360 - RNA, 22 nt, Human
uagugcacacgcauguagcagu

SEQ ID NO: 951361 - RNA, 22 nt, Human
ugagauuuggaaaauuugauau

SEQ ID NO: 951362 - RNA, 22 nt, Human
gcugugagggcuucugaggcau

SEQ ID NO: 951363 - RNA, 22 nt, Human
ggcucagagaccugcgaucuga

SEQ ID NO: 951364 - RNA, 22 nt, Human
aaagaucagucugaagcaacau

SEQ ID NO: 951365 - RNA, 22 nt, Human
agccacaggaaacagagacagc

SEQ ID NO: 951366 - RNA, 22 nt, Human
uuucaauguaacauuuccaggc

SEQ ID NO: 951367 - RNA, 22 nt, Human
aagcagcacaguaauauuggug

SEQ ID NO: 951368 - RNA, 21 nt, Human
uucuucaugaugauuaauggc

SEQ ID NO: 951369 - RNA, 22 nt, Human
uggcuggggccugaauccugca

SEQ ID NO: 951370 - RNA, 22 nt, Human
uuugacagacauuuacuacauu

SEQ ID NO: 951371 - RNA, 20 nt, Human
agcugaggcaccugagguua

SEQ ID NO: 951372 - RNA, 22 nt, Human
cugaacucuuuaugacagcuug

SEQ ID NO: 951373 - RNA, 22 nt, Human
uaugcacacaucgcagcaggaa

SEQ ID NO: 951374 - RNA, 22 nt, Human
uggcagagagagugcagucgac

SEQ ID NO: 951375 - RNA, 22 nt, Human
gcugggagacagacuuggaacc

SEQ ID NO: 951376 - RNA, 22 nt, Human
agagccugcaucuagccucaga

SEQ ID NO: 951377 - RNA, 22 nt, Human
aaaguucugggggagaagaacg

SEQ ID NO: 951378 - RNA, 22 nt, Human
agugcuuuauguuguugugcaa

SEQ ID NO: 951379 - RNA, 22 nt, Human
uuccaggaauucagcucucagu

SEQ ID NO: 951380 - RNA, 22 nt, Human
ugcagcuguuacggacccuguc

SEQ ID NO: 951381 - RNA, 22 nt, Human
aauguguagcauuuaaugcagu

SEQ ID NO: 951382 - RNA, 21 nt, Human
aaggaaaagcuuggucucuga

SEQ ID NO: 951383 - RNA, 22 nt, Human
uccaggcugggcugaagggugc

SEQ ID NO: 951384 - RNA, 22 nt, Human
aggaugaggcuggcaggucuug

SEQ ID NO: 951385 - RNA, 22 nt, Human
acugggaggcaucuggagcuga

SEQ ID NO: 951386 - RNA, 22 nt, Human
uguggcugcucaggugcagacc

SEQ ID NO: 951387 - RNA, 22 nt, Human
uagaaacauguucuguucuguu

SEQ ID NO: 951388 - RNA, 22 nt, Human
agaccacagucaggcuccuggu

SEQ ID NO: 951389 - RNA, 22 nt, Human
caaauacucuggauguguuugu

SEQ ID NO: 951390 - RNA, 22 nt, Human
gaagcucucaaacucuccccuu

SEQ ID NO: 951391 - RNA, 22 nt, Human
uagaaaucagcaggcauaugua

SEQ ID NO: 951392 - RNA, 22 nt, Human
cggcuggggcuguccccaugac

SEQ ID NO: 951393 - RNA, 22 nt, Human
ugggggagauuagagcuucuua

SEQ ID NO: 951394 - RNA, 22 nt, Human
ucagagaaaugaaguagggauu

SEQ ID NO: 951395 - RNA, 19 nt, Human
auaaggcaauuggauuugg

SEQ ID NO: 951396 - RNA, 22 nt, Human
cagucuucuaaccuagcagccu

SEQ ID NO: 951397 - RNA, 22 nt, Human
uauuugcaacauaaaacucuga

SEQ ID NO: 951398 - RNA, 22 nt, Human
agguuuucagcuguauccugag

SEQ ID NO: 951399 - RNA, 22 nt, Human
ggccugcacagagguggcucua

SEQ ID NO: 951400 - RNA, 22 nt, Human
aaguugaagcaugaaccaaggu

SEQ ID NO: 951401 - RNA, 23 nt, Human
cagaagcaccuguugacugcugc

SEQ ID NO: 951402 - RNA, 22 nt, Human
agagugggccucugagucccag

SEQ ID NO: 951403 - RNA, 22 nt, Human
ggggauggugggaaggcaaucu

SEQ ID NO: 951404 - RNA, 22 nt, Human
agcagagccaggucucucugua

SEQ ID NO: 951405 - RNA, 22 nt, Human
acugugcaaugaguaauaaacu

SEQ ID NO: 951406 - RNA, 22 nt, Human
auggauaagaacaaauaucuga

SEQ ID NO: 951407 - RNA, 22 nt, Human
ggcagcauauauucagugggca

SEQ ID NO: 951408 - RNA, 19 nt, Human
ggcuccuguggcugcagcc

SEQ ID NO: 951409 - RNA, 22 nt, Human
ucuccugcucagaacagccuca

SEQ ID NO: 951410 - RNA, 22 nt, Human
gugugcaagggcauguacauug

SEQ ID NO: 951411 - RNA, 22 nt, Human
agaauuguaagcaauuugauua

SEQ ID NO: 951412 - RNA, 22 nt, Human
gaaggaaaggucucaugccuuu

SEQ ID NO: 951413 - RNA, 22 nt, Human
aaaaaugugaccacaggguguu

SEQ ID NO: 951414 - RNA, 22 nt, Human
ccugggagggcaagugcugaug

SEQ ID NO: 951415 - RNA, 22 nt, Human
uuuccuguugccaucaagaaug

SEQ ID NO: 951416 - RNA, 18 nt, Human
gggaagaggaucuggccc

SEQ ID NO: 951417 - RNA, 22 nt, Human
ugcuuuggaucuauuugcugag

SEQ ID NO: 951418 - RNA, 22 nt, Human
cgucccaguuccagccgcgcug

SEQ ID NO: 951419 - RNA, 22 nt, Human
ccuggccugugaaucugagagc

SEQ ID NO: 951420 - RNA, 22 nt, Human
aaagcccauguggaaguacagg

SEQ ID NO: 951421 - RNA, 22 nt, Human
gccccucccagucaggagcacu

SEQ ID NO: 951422 - RNA, 22 nt, Human
uccagucaucucccuucacauu

SEQ ID NO: 951423 - RNA, 22 nt, Human
gcucucuugguggcuguccugg

SEQ ID NO: 951424 - RNA, 20 nt, Human
ucuguaaagacuccagaagc

SEQ ID NO: 951425 - RNA, 17 nt, Human
gucauucucagaaaaug

SEQ ID NO: 951426 - RNA, 22 nt, Human
uggccuggaagagaggucgagg

SEQ ID NO: 951427 - RNA, 22 nt, Human
ugggcucugcugcguaccaguu

SEQ ID NO: 951428 - RNA, 21 nt, Human
gcagcaguguucuagaauacu

SEQ ID NO: 951429 - RNA, 22 nt, Human
caaaguccuagaacagugcuug

SEQ ID NO: 951430 - RNA, 19 nt, Human
accaggagacagugagcuu

SEQ ID NO: 951431 - RNA, 22 nt, Human
uccaguggagugugggggugaa

SEQ ID NO: 951432 - RNA, 22 nt, Human
gugggcuucuguuagggaggcu

SEQ ID NO: 951433 - RNA, 22 nt, Human
uaggcugggagccugaggcuag

SEQ ID NO: 951434 - RNA, 22 nt, Human
aaggccugaacaugaggagaug

SEQ ID NO: 951435 - RNA, 22 nt, Human
ggccucucucccuggcuugcag

SEQ ID NO: 951436 - RNA, 22 nt, Human
aggccugggucucgugccuacc

SEQ ID NO: 951437 - RNA, 22 nt, Human
gccuucccacccugcgaggcug

SEQ ID NO: 951438 - RNA, 22 nt, Human
ugccuuccuggagcugaaggcu

SEQ ID NO: 951439 - RNA, 22 nt, Human
caggcaggucagugaagaagga

SEQ ID NO: 951440 - RNA, 22 nt, Human
gccuggccgcuccgagcuccgc

SEQ ID NO: 951441 - RNA, 22 nt, Human
ucaggagaaggcaauguggaaa

SEQ ID NO: 951442 - RNA, 21 nt, Human
acagccugucaucucaugguc

SEQ ID NO: 951443 - RNA, 22 nt, Human
agccacagagguugaugugguu

SEQ ID NO: 951444 - RNA, 22 nt, Human
cagaggcacaagaaagcaaggc

SEQ ID NO: 951445 - RNA, 22 nt, Human
ugggcagagaucuggaucaaac

SEQ ID NO: 951446 - RNA, 22 nt, Human
acagggccucagcugauucugg

SEQ ID NO: 951447 - RNA, 22 nt, Human
gccugggagggcagcagugugg

SEQ ID NO: 951448 - RNA, 22 nt, Human
cagcucugaggaacacuccuuu

SEQ ID NO: 951449 - RNA, 22 nt, Human
aggcagcuuuguaguaaagcua

SEQ ID NO: 951450 - RNA, 22 nt, Human
gagcagcuggacaggccucccu

SEQ ID NO: 951451 - RNA, 22 nt, Human
gcagcuccuggcacaguuuuuu

SEQ ID NO: 951452 - RNA, 22 nt, Human
uucuuaaguauuucagagacug

SEQ ID NO: 951453 - RNA, 22 nt, Human
ccagcccugccagagagagcug

SEQ ID NO: 951454 - RNA, 22 nt, Human
uggaggaaaauuacuggggucu

SEQ ID NO: 951455 - RNA, 22 nt, Human
gccggggcuggggagagacaug

SEQ ID NO: 951456 - RNA, 22 nt, Human
ccugcagguccccggaugcgca

SEQ ID NO: 951457 - RNA, 22 nt, Human
agugugaccuuauuuggaaaca

SEQ ID NO: 951458 - RNA, 22 nt, Human
gucccuggggaaucagcuggag

SEQ ID NO: 951459 - RNA, 22 nt, Human
aggagucauugagagggguccu

SEQ ID NO: 951460 - RNA, 23 nt, Human
ugggccuggccucccaguccagc

SEQ ID NO: 951461 - RNA, 22 nt, Human
cugcugcauuccucuuuaugag

SEQ ID NO: 951462 - RNA, 22 nt, Human
aggguggccaugagggagagau

SEQ ID NO: 951463 - RNA, 22 nt, Human
cuuccugcaggacagccaucug

SEQ ID NO: 951464 - RNA, 22 nt, Human
cugcucuggggaagccagaugu

SEQ ID NO: 951465 - RNA, 19 nt, Human
ugcugcuguccuugcaggg

SEQ ID NO: 951466 - RNA, 22 nt, Human
accucugcuucccggguucaag

SEQ ID NO: 951467 - RNA, 22 nt, Human
uauuauguagaguaaggguuaa

SEQ ID NO: 951468 - RNA, 22 nt, Human
ugccuggcugggcugcucaugg

SEQ ID NO: 951469 - RNA, 21 nt, Human
agcucagccgggcacaguggc

SEQ ID NO: 951470 - RNA, 22 nt, Human
aagugguaggaagagagcacug

SEQ ID NO: 951471 - RNA, 22 nt, Human
uaaaugcaguacaaauuguucu

SEQ ID NO: 951472 - RNA, 22 nt, Human
cucagagaggcaguggaaguca

SEQ ID NO: 951473 - RNA, 22 nt, Human
gagcaacaguuuaugguuuuuc

SEQ ID NO: 951474 - RNA, 19 nt, Human
aaacacagauuucuuacca

SEQ ID NO: 951475 - RNA, 22 nt, Human
ugguccugccccgugcacagag

SEQ ID NO: 951476 - RNA, 22 nt, Human
uauuuuguuaauaauccagucc

SEQ ID NO: 951477 - RNA, 22 nt, Human
gcaggcaggcuuccuugaacug

SEQ ID NO: 951478 - RNA, 22 nt, Human
ggcagcaucacuugucuccagc

SEQ ID NO: 951479 - RNA, 19 nt, Human
ggcaggcuggauagagagg

SEQ ID NO: 951480 - RNA, 22 nt, Human
ugagcccagucugucugacaug

SEQ ID NO: 951481 - RNA, 22 nt, Human
cucuggccagagccugcgggaa

SEQ ID NO: 951482 - RNA, 22 nt, Human
gcauuccugagaaugcagagug

SEQ ID NO: 951483 - RNA, 22 nt, Human
agcucccugagaugccacagca

SEQ ID NO: 951484 - RNA, 22 nt, Human
cuggccuuuagccccagugucu

SEQ ID NO: 951485 - RNA, 22 nt, Human
uggccugcagaggcuguggggc

SEQ ID NO: 951486 - RNA, 22 nt, Human
uccugggcuguggccccgggca

SEQ ID NO: 951487 - RNA, 19 nt, Human
aggguggcaaaggagggug

SEQ ID NO: 951488 - RNA, 22 nt, Human
ucacaugcucaccuaagccaca

SEQ ID NO: 951489 - RNA, 22 nt, Human
ucuggcuccguguccgcuccca

SEQ ID NO: 951490 - RNA, 22 nt, Human
uaauacuuuugccuuguauuca

SEQ ID NO: 951491 - RNA, 22 nt, Human
ucaguuuucauuucaugagcag

SEQ ID NO: 951492 - RNA, 18 nt, Human
acagaggcagacauguau

SEQ ID NO: 951493 - RNA, 22 nt, Human
uuuugaauaauucagaaacagc

SEQ ID NO: 951494 - RNA, 22 nt, Human
gcugagaguguaggauguuuac

SEQ ID NO: 951495 - RNA, 22 nt, Human
gcugucucggggcuuucuccug

SEQ ID NO: 951496 - RNA, 22 nt, Human
ccuucugcucccuggccagggc

SEQ ID NO: 951497 - RNA, 22 nt, Human
uggcucaggauaauuuucccaa

SEQ ID NO: 951498 - RNA, 22 nt, Human
cagggcaggaauuugacauugc

SEQ ID NO: 951499 - RNA, 22 nt, Human
uacuuuaaaaacugauaauuca

SEQ ID NO: 951500 - RNA, 22 nt, Human
ugcagagggacagccacagcuc

SEQ ID NO: 951501 - RNA, 22 nt, Human
auacauuagaaucugguacuca

SEQ ID NO: 951502 - RNA, 22 nt, Human
augaugguuguccuaggugcau

SEQ ID NO: 951503 - RNA, 22 nt, Human
cuggccugagaaugcuacccuu

SEQ ID NO: 951504 - RNA, 22 nt, Human
aaaggucagcugccaucguucu

SEQ ID NO: 951505 - RNA, 22 nt, Human
caggcacugugcaagggucucg

SEQ ID NO: 951506 - RNA, 22 nt, Human
cagucauuggcuaaagcucccu

SEQ ID NO: 951507 - RNA, 22 nt, Human
uccugcagccacugcaggcaga

SEQ ID NO: 951508 - RNA, 22 nt, Human
uucaaugagcccaagaacguga

SEQ ID NO: 951509 - RNA, 22 nt, Human
uaucaucuuguugucaugcagc

SEQ ID NO: 951510 - RNA, 22 nt, Human
ccuggccuuaagggcagggagc

SEQ ID NO: 951511 - RNA, 22 nt, Human
ccugccaggacauugcuugaag

SEQ ID NO: 951512 - RNA, 22 nt, Human
cacagcuucugagugaggauuu

SEQ ID NO: 951513 - RNA, 22 nt, Human
uuaaauuuuagaaacagacucu

SEQ ID NO: 951514 - RNA, 22 nt, Human
auguuauuuuggaaaauacaaa

SEQ ID NO: 951515 - RNA, 22 nt, Human
ggcagcuccucucagcaaaaga

SEQ ID NO: 951516 - RNA, 22 nt, Human
gcuggccauagaagccaaagag

SEQ ID NO: 951517 - RNA, 22 nt, Human
ucacucugccuccauauuacua

SEQ ID NO: 951518 - RNA, 22 nt, Human
gaagaagcaggaguguguagca

SEQ ID NO: 951519 - RNA, 22 nt, Human
auacaaguugugauaauguaaa

SEQ ID NO: 951520 - RNA, 22 nt, Human
aaagcuauuuuauugcagcucu

SEQ ID NO: 951521 - RNA, 22 nt, Human
ccagcuggaagagugcagaacu

SEQ ID NO: 951522 - RNA, 22 nt, Human
uauuuguugaguuguuaugucu

SEQ ID NO: 951523 - RNA, 22 nt, Human
agggccuggcgcguggccgccg

SEQ ID NO: 951524 - RNA, 22 nt, Human
gcacugaaugcuuuuacuguaa

SEQ ID NO: 951525 - RNA, 22 nt, Human
ggugggcaggcgaggcccaggu

SEQ ID NO: 951526 - RNA, 20 nt, Human
aacacacugguggcaucagg

SEQ ID NO: 951527 - RNA, 22 nt, Human
ugagagaugaacucugauaugu

SEQ ID NO: 951528 - RNA, 22 nt, Human
aacauuucagcaaauaagaaca

SEQ ID NO: 951529 - RNA, 19 nt, Human
cccaaggcccugggcaggc

SEQ ID NO: 951530 - RNA, 22 nt, Human
aggcucagauucacauuugguu

SEQ ID NO: 951531 - RNA, 22 nt, Human
agcugcuguggggcucggccug

SEQ ID NO: 951532 - RNA, 22 nt, Human
acuauacauugaauguuaaggu

SEQ ID NO: 951533 - RNA, 22 nt, Human
uuucacaacugcuuauuugaga

SEQ ID NO: 951534 - RNA, 22 nt, Human
uuagaaagcuuuccauagucaa

SEQ ID NO: 951535 - RNA, 22 nt, Human
ccaaggcuggagugcaguggcg

SEQ ID NO: 951536 - RNA, 22 nt, Human
ccuggcaguggugaagaagagg

SEQ ID NO: 951537 - RNA, 22 nt, Human
cuggcucuaucuccaaggcugg

SEQ ID NO: 951538 - RNA, 20 nt, Human
auggccaaccugcuuaugac

SEQ ID NO: 951539 - RNA, 19 nt, Human
ccucugcgcuguccugcuc

SEQ ID NO: 951540 - RNA, 22 nt, Human
cugaggccagcugcagagcucu

SEQ ID NO: 951541 - RNA, 22 nt, Human
auaaacaguagagaaagguggu

SEQ ID NO: 951542 - RNA, 20 nt, Human
ccuggcugcauucaggacgg

SEQ ID NO: 951543 - RNA, 22 nt, Human
gacagaguuguugauguaugcu

SEQ ID NO: 951544 - RNA, 22 nt, Human
caggaccccauauucacugaac

SEQ ID NO: 951545 - RNA, 22 nt, Human
agccagcugccuuucacaucug

SEQ ID NO: 951546 - RNA, 22 nt, Human
agcuggagcuucaagcagguaa

SEQ ID NO: 951547 - RNA, 22 nt, Human
uuccucagaaaauacuguccaa

SEQ ID NO: 951548 - RNA, 22 nt, Human
gcacccagcccagggcgugaug

SEQ ID NO: 951549 - RNA, 22 nt, Human
guuuuauaggugaaauauuacu

SEQ ID NO: 951550 - RNA, 22 nt, Human
guuugcauggaagacagugagu

SEQ ID NO: 951551 - RNA, 22 nt, Human
aagaacauuuaugauggcauuu

SEQ ID NO: 951552 - RNA, 22 nt, Human
cuggggugugcucagagcaggg

SEQ ID NO: 951553 - RNA, 17 nt, Human
ugaaggccaugaccacg

SEQ ID NO: 951554 - RNA, 22 nt, Human
aagagcuggaguuugcagcccu

SEQ ID NO: 951555 - RNA, 22 nt, Human
uaggaugaucuuguagagagau

SEQ ID NO: 951556 - RNA, 22 nt, Human
gccaggugcuaucccugcgcug

SEQ ID NO: 951557 - RNA, 22 nt, Human
aacugcauuuaacaaauacucu

SEQ ID NO: 951558 - RNA, 22 nt, Human
uccugaggaaaguucaugaaug

SEQ ID NO: 951559 - RNA, 22 nt, Human
uccagggagagccgcugcucca

SEQ ID NO: 951560 - RNA, 22 nt, Human
agagaauuuuaaaagccuugaa

SEQ ID NO: 951561 - RNA, 22 nt, Human
cuggcuuccucaggagcagugg

SEQ ID NO: 951562 - RNA, 22 nt, Human
uagucucuggagacucuagggg

SEQ ID NO: 951563 - RNA, 22 nt, Human
agguacagaugaaagucuaguu

SEQ ID NO: 951564 - RNA, 22 nt, Human
cuaaaugacuuccagugguuau

SEQ ID NO: 951565 - RNA, 22 nt, Human
agauguaguagugggucuuuua

SEQ ID NO: 951566 - RNA, 22 nt, Human
cucuggccugcuuccucaggua

SEQ ID NO: 951567 - RNA, 20 nt, Human
aggcucagcugagcucuugg

SEQ ID NO: 951568 - RNA, 22 nt, Human
uauuaguagcuugaaauuggug

SEQ ID NO: 951569 - RNA, 22 nt, Human
cccaggaugucgaggcugcagu

SEQ ID NO: 951570 - RNA, 19 nt, Human
ggagccuggagcacgugcc

SEQ ID NO: 951571 - RNA, 22 nt, Human
cugcuuccauaaauaaugugcu

SEQ ID NO: 951572 - RNA, 22 nt, Human
gccuucaggaggguuccagaca

SEQ ID NO: 951573 - RNA, 22 nt, Human
ucccacucccaggcaggccucu

SEQ ID NO: 951574 - RNA, 22 nt, Human
aaggcagccucugccagccggg

SEQ ID NO: 951575 - RNA, 22 nt, Human
uuauuuucagcuaggaaagcca

SEQ ID NO: 951576 - RNA, 22 nt, Human
gugaggugggcuggccagagac

SEQ ID NO: 951577 - RNA, 22 nt, Human
aaauucagcagugaaaugcccc

SEQ ID NO: 951578 - RNA, 22 nt, Human
cccaggaggucgaagcugcagu

SEQ ID NO: 951579 - RNA, 22 nt, Human
cccagaaggucgaggcugcagu

SEQ ID NO: 951580 - RNA, 22 nt, Human
acagucuugagcaucagccaga

SEQ ID NO: 951581 - RNA, 22 nt, Human
uccaggagguagugcuuaauuu

SEQ ID NO: 951582 - RNA, 19 nt, Human
uuucuuaggccuuuggccu

SEQ ID NO: 951583 - RNA, 22 nt, Human
gcuugcucaacccccgucucuc

SEQ ID NO: 951584 - RNA, 22 nt, Human
gaagcagcuaggaucuucauuu

SEQ ID NO: 951585 - RNA, 22 nt, Human
aacaugaaguuuucuauaguga

SEQ ID NO: 951586 - RNA, 22 nt, Human
uccuggccuccguucucugcau

SEQ ID NO: 951587 - RNA, 22 nt, Human
uuccaggaggcacugacagagg

SEQ ID NO: 951588 - RNA, 22 nt, Human
ggaggccaaggcaggcggauca

SEQ ID NO: 951589 - RNA, 21 nt, Human
aaagagguuaauauuguaagu

SEQ ID NO: 951590 - RNA, 22 nt, Human
cuauuagguuggugcaaaagua

SEQ ID NO: 951591 - RNA, 22 nt, Human
gccuuugccugcgacguggcug

SEQ ID NO: 951592 - RNA, 22 nt, Human
gagagaaaugugcaguuugggc

SEQ ID NO: 951593 - RNA, 22 nt, Human
ugugaaagucaaauuaauugaa

SEQ ID NO: 951594 - RNA, 22 nt, Human
uaaugcacauagaaguacuuag

SEQ ID NO: 951595 - RNA, 22 nt, Human
aagggaggccagagguuuugca

SEQ ID NO: 951596 - RNA, 22 nt, Human
uggaggagaauuuauggucgaa

SEQ ID NO: 951597 - RNA, 22 nt, Human
uuugcagugauucuugcaguga

SEQ ID NO: 951598 - RNA, 22 nt, Human
gcugucccgcugacuuccagcu

SEQ ID NO: 951599 - RNA, 22 nt, Human
ucagagugaggcgucaacauga

SEQ ID NO: 951600 - RNA, 22 nt, Human
aauguuguuuuucugcaugucu

SEQ ID NO: 951601 - RNA, 22 nt, Human
ggcacugggcaccggcugaggg

SEQ ID NO: 951602 - RNA, 22 nt, Human
ggagaggaaaugccagcacuuc

SEQ ID NO: 951603 - RNA, 22 nt, Human
cagucccaggguugguucagcu

SEQ ID NO: 951604 - RNA, 22 nt, Human
gggacuggaacuacuggugcag

SEQ ID NO: 951605 - RNA, 22 nt, Human
ccagucugaggccuggugaggg

SEQ ID NO: 951606 - RNA, 22 nt, Human
cugggccauggaagucucugcc

SEQ ID NO: 951607 - RNA, 22 nt, Human
caggggcuagcacuuaauguuu

SEQ ID NO: 951608 - RNA, 21 nt, Human
ugaggcuguuguaccagggag

SEQ ID NO: 951609 - RNA, 22 nt, Human
ccuggcucuguccucgcgcaaa

SEQ ID NO: 951610 - RNA, 22 nt, Human
agucucugcacaguaagaagca

SEQ ID NO: 951611 - RNA, 21 nt, Human
ucaggggcuguguuuuccauc

SEQ ID NO: 951612 - RNA, 22 nt, Human
uggcagaguggaccauacucaa

SEQ ID NO: 951613 - RNA, 22 nt, Human
gguggagcuggaccaggagagg

SEQ ID NO: 951614 - RNA, 22 nt, Human
gaggucaauaauaugugcuuua

SEQ ID NO: 951615 - RNA, 22 nt, Human
gguggagcuguggacaggaagg

SEQ ID NO: 951616 - RNA, 22 nt, Human
cagugggaagggcagaggcuuu

SEQ ID NO: 951617 - RNA, 22 nt, Human
ucaggcugcccguucagggcuc

SEQ ID NO: 951618 - RNA, 20 nt, Human
uccuugaaagugggguauau

SEQ ID NO: 951619 - RNA, 22 nt, Human
ggugcagcugcagccugggagc

SEQ ID NO: 951620 - RNA, 20 nt, Human
ggccgaaauaauaguggcuu

SEQ ID NO: 951621 - RNA, 22 nt, Human
ugacauaaaccagugagcaaaa

SEQ ID NO: 951622 - RNA, 22 nt, Human
ugucacaaacauacauuauaga

SEQ ID NO: 951623 - RNA, 22 nt, Human
agccuuguuggucugaguuugg

SEQ ID NO: 951624 - RNA, 17 nt, Human
ggugaguguccaggugg

SEQ ID NO: 951625 - RNA, 22 nt, Human
acacauaagaaacuacaaagag

SEQ ID NO: 951626 - RNA, 22 nt, Human
ggcagcuuguccuucaggagag

SEQ ID NO: 951627 - RNA, 22 nt, Human
auccagagacccaaggacagaa

SEQ ID NO: 951628 - RNA, 22 nt, Human
auucuucauaccuacugagguu

SEQ ID NO: 951629 - RNA, 22 nt, Human
agcuccugaaaagcgcuugcuu

SEQ ID NO: 951630 - RNA, 22 nt, Human
ggauuuggaagaccgggucaca

SEQ ID NO: 951631 - RNA, 22 nt, Human
uggcagaguuggagguggaaga

SEQ ID NO: 951632 - RNA, 22 nt, Human
aaaugaacucuuccugcauccc

SEQ ID NO: 951633 - RNA, 22 nt, Human
cagcuggccaaucagggcgccc

SEQ ID NO: 951634 - RNA, 22 nt, Human
ucagaggagaaguugggaaaau

SEQ ID NO: 951635 - RNA, 22 nt, Human
acccaggacuuggcaaccucau

SEQ ID NO: 951636 - RNA, 22 nt, Human
cccaugagauucugaauuuggc

SEQ ID NO: 951637 - RNA, 22 nt, Human
auaagaaacauuauucuuucca

SEQ ID NO: 951638 - RNA, 23 nt, Human
agcuccagaacauagcacaggaa

SEQ ID NO: 951639 - RNA, 22 nt, Human
uccucuggggucagggcacuac

SEQ ID NO: 951640 - RNA, 22 nt, Human
guggauggacaugggcaagagg

SEQ ID NO: 951641 - RNA, 22 nt, Human
ccacuguuuuucaguuaacuuu

SEQ ID NO: 951642 - RNA, 22 nt, Human
uguauuagagcaguagaauuau

SEQ ID NO: 951643 - RNA, 22 nt, Human
gcuggccauauauuuugcuguu

SEQ ID NO: 951644 - RNA, 22 nt, Human
auggccaaagccacagcagagg

SEQ ID NO: 951645 - RNA, 22 nt, Human
uuuauuaauguagcauccaugg

SEQ ID NO: 951646 - RNA, 22 nt, Human
aucuuucuccauauacaucuuu

SEQ ID NO: 951647 - RNA, 22 nt, Human
uuaaaaugcagauuaugacuca

SEQ ID NO: 951648 - RNA, 22 nt, Human
uacaugcaugucacagaaugaa

SEQ ID NO: 951649 - RNA, 22 nt, Human
aggcugcucugcgaagucagcu

SEQ ID NO: 951650 - RNA, 22 nt, Human
ggccaggagcaagccaggcucu

SEQ ID NO: 951651 - RNA, 22 nt, Human
ucuuccucucuaauugaucaga

SEQ ID NO: 951652 - RNA, 22 nt, Human
acagaacugcaggaggaaaagc

SEQ ID NO: 951653 - RNA, 22 nt, Human
gauuuuauuagcccaaacuuug

SEQ ID NO: 951654 - RNA, 22 nt, Human
uggcagaguuauggguauuuau

SEQ ID NO: 951655 - RNA, 21 nt, Human
gugcuuuuccuuaauguucuu

SEQ ID NO: 951656 - RNA, 23 nt, Human
ccagcccuccaccagcucuaggc

SEQ ID NO: 951657 - RNA, 22 nt, Human
uggcuuccugcauggauccucu

SEQ ID NO: 951658 - RNA, 22 nt, Human
cugucucagcaggaagucauca

SEQ ID NO: 951659 - RNA, 22 nt, Human
cacacuagucuauccauuagcu

SEQ ID NO: 951660 - RNA, 22 nt, Human
augggagugacagggccacugg

SEQ ID NO: 951661 - RNA, 22 nt, Human
gcucuccaaacccuguggcuuu

SEQ ID NO: 951662 - RNA, 22 nt, Human
gggcagagacucagaaacagaa

SEQ ID NO: 951663 - RNA, 23 nt, Human
cuuuccuuucuuugacacccagc

SEQ ID NO: 951664 - RNA, 22 nt, Human
gagugcagaugaacagaagauu

SEQ ID NO: 951665 - RNA, 18 nt, Human
caugggugacagguggau

SEQ ID NO: 951666 - RNA, 22 nt, Human
ugucugagugugccugggcauu

SEQ ID NO: 951667 - RNA, 22 nt, Human
gccaggcaaauuaaggaaugca

SEQ ID NO: 951668 - RNA, 22 nt, Human
agucaaagcuacaggcauuuga

SEQ ID NO: 951669 - RNA, 22 nt, Human
cagccagguaugggcgugcggg

SEQ ID NO: 951670 - RNA, 22 nt, Human
gcaggcugaugacuggaguugg

SEQ ID NO: 951671 - RNA, 22 nt, Human
auguucuuucagccagugcauc

SEQ ID NO: 951672 - RNA, 22 nt, Human
ggcagagcugcaugagcacuca

SEQ ID NO: 951673 - RNA, 22 nt, Human
uucuuguauguaugcaaaauca

SEQ ID NO: 951674 - RNA, 22 nt, Human
guuugcauaucugugaaaugga

SEQ ID NO: 951675 - RNA, 22 nt, Human
uagugcuugagucucuccguac

SEQ ID NO: 951676 - RNA, 22 nt, Human
cugccugcacugccuggcucca

SEQ ID NO: 951677 - RNA, 22 nt, Human
ggagugggcagcacugcccugu

SEQ ID NO: 951678 - RNA, 20 nt, Human
uguuucuuuuaaugagcggc

SEQ ID NO: 951679 - RNA, 22 nt, Human
agagcccucucauuggcuuauu

SEQ ID NO: 951680 - RNA, 22 nt, Human
uagaauaaguugaugauauaug

SEQ ID NO: 951681 - RNA, 22 nt, Human
gcagcucccaucagggcacaga

SEQ ID NO: 951682 - RNA, 22 nt, Human
ucucuuucuauugcaccaugcu

SEQ ID NO: 951683 - RNA, 22 nt, Human
cauggcaggaggcugcuggcag

SEQ ID NO: 951684 - RNA, 20 nt, Human
uuucacaaugaacaugucuc

SEQ ID NO: 951685 - RNA, 22 nt, Human
uuucaggguacauggagcaaau

SEQ ID NO: 951686 - RNA, 22 nt, Human
cugggcacagcguugggcucuu

SEQ ID NO: 951687 - RNA, 22 nt, Human
auuaaaagcuucccaagaguua

SEQ ID NO: 951688 - RNA, 22 nt, Human
aaaguuugcaauuuauguuaau

SEQ ID NO: 951689 - RNA, 21 nt, Human
gccucugcugucuuauuguga

SEQ ID NO: 951690 - RNA, 22 nt, Human
cucucagacugaagggccugug

SEQ ID NO: 951691 - RNA, 22 nt, Human
ucuggccacuugcuucacacug

SEQ ID NO: 951692 - RNA, 22 nt, Human
aguuuauguagaauuggcaaua

SEQ ID NO: 951693 - RNA, 22 nt, Human
agccuucacugggaccuuggau

SEQ ID NO: 951694 - RNA, 22 nt, Human
uugaagcaugguacuuguucaa

SEQ ID NO: 951695 - RNA, 22 nt, Human
gaggaggcuaagugggcucugg

SEQ ID NO: 951696 - RNA, 22 nt, Human
cugccagcucaaagcgcagcua

SEQ ID NO: 951697 - RNA, 22 nt, Human
acauuucuuugcuagacagcag

SEQ ID NO: 951698 - RNA, 22 nt, Human
cagcuggcaaguggagcagggu

SEQ ID NO: 951699 - RNA, 22 nt, Human
uaauacagaaguguauuaaaau

SEQ ID NO: 951700 - RNA, 22 nt, Human
cagcacugcuucgcagccaggg

SEQ ID NO: 951701 - RNA, 22 nt, Human
acuaaauagccucugguaguug

SEQ ID NO: 951702 - RNA, 22 nt, Human
cugccagcagaggccagcgcug

SEQ ID NO: 951703 - RNA, 22 nt, Human
gaagagcuauguccagggagca

SEQ ID NO: 951704 - RNA, 22 nt, Human
aauauugagaaccagcauguuu

SEQ ID NO: 951705 - RNA, 22 nt, Human
aagcaccugcaguugacaaaaa

SEQ ID NO: 951706 - RNA, 22 nt, Human
ucuggcugcugcgugagugcuu

SEQ ID NO: 951707 - RNA, 22 nt, Human
cuggccuaaaauugcuucugca

SEQ ID NO: 951708 - RNA, 22 nt, Human
gcagcacauauaaacaaagaga

SEQ ID NO: 951709 - RNA, 22 nt, Human
ugaaaggugacauuucuuggau

SEQ ID NO: 951710 - RNA, 22 nt, Human
gccuggcaggaaucucagugcu

SEQ ID NO: 951711 - RNA, 22 nt, Human
uauugucuguccgggucaaagc

SEQ ID NO: 951712 - RNA, 22 nt, Human
aggcuggagggcaauggcaaga

SEQ ID NO: 951713 - RNA, 22 nt, Human
aggcccugggcaguucuguagc

SEQ ID NO: 951714 - RNA, 21 nt, Human
ugccaggccugagcugggguc

SEQ ID NO: 951715 - RNA, 22 nt, Human
acaagagauuaucuacagauga

SEQ ID NO: 951716 - RNA, 22 nt, Human
gcccccucuuuggagccagcca

SEQ ID NO: 951717 - RNA, 22 nt, Human
aguuugaauugaaaugcagaug

SEQ ID NO: 951718 - RNA, 22 nt, Human
auguuuauguugggcuauauuu

SEQ ID NO: 951719 - RNA, 22 nt, Human
ugcugugcuggcggcagaggcc

SEQ ID NO: 951720 - RNA, 22 nt, Human
ucugucccugagagcucaggag

SEQ ID NO: 951721 - RNA, 21 nt, Human
ugaaaguuggagucaaaugua

SEQ ID NO: 951722 - RNA, 22 nt, Human
ucaagagaagugcuccacagua

SEQ ID NO: 951723 - RNA, 22 nt, Human
cagcaguguacaaggugucaga

SEQ ID NO: 951724 - RNA, 22 nt, Human
uuauucaggcucucuuuggcua

SEQ ID NO: 951725 - RNA, 22 nt, Human
auuucuguaacuuaugaaaguu

SEQ ID NO: 951726 - RNA, 18 nt, Human
ggcagcuugacuagcaac

SEQ ID NO: 951727 - RNA, 23 nt, Human
gcucugcucuguuucauagacag

SEQ ID NO: 951728 - RNA, 22 nt, Human
cucucccagucaggcucaggau

SEQ ID NO: 951729 - RNA, 22 nt, Human
cucugggcaaagaugccucauc

SEQ ID NO: 951730 - RNA, 22 nt, Human
ucaggugguccuaagugccauc

SEQ ID NO: 951731 - RNA, 22 nt, Human
cagagccaggccugcccucuuu

SEQ ID NO: 951732 - RNA, 22 nt, Human
cacagccuccuucagagagcau

SEQ ID NO: 951733 - RNA, 22 nt, Human
agggagaaugaccaagguauau

SEQ ID NO: 951734 - RNA, 20 nt, Human
gaagcagcuucauguagaca

SEQ ID NO: 951735 - RNA, 22 nt, Human
ugggagcagcagggagaugcgg

SEQ ID NO: 951736 - RNA, 22 nt, Human
gguacaaggagugaagguuugg

SEQ ID NO: 951737 - RNA, 22 nt, Human
gcugggcuucucaaugcugccu

SEQ ID NO: 951738 - RNA, 22 nt, Human
auuaggaagaggaugucagcau

SEQ ID NO: 951739 - RNA, 22 nt, Human
gccagcaguccugcugugugcc

SEQ ID NO: 951740 - RNA, 22 nt, Human
ggaggccaaggagggcggauca

SEQ ID NO: 951741 - RNA, 22 nt, Human
ccuccuggccugugcagagccc

SEQ ID NO: 951742 - RNA, 22 nt, Human
uucaacuaauguuuauuuuaug

SEQ ID NO: 951743 - RNA, 22 nt, Human
ugaggggaaggcaugauaaaua

SEQ ID NO: 951744 - RNA, 22 nt, Human
uauuccuaagucccaacuacau

SEQ ID NO: 951745 - RNA, 22 nt, Human
agccucucugaugugacagcua

SEQ ID NO: 951746 - RNA, 22 nt, Human
uucucacuauguauguagauug

SEQ ID NO: 951747 - RNA, 22 nt, Human
gcucugucaacagcuagcugug

SEQ ID NO: 951748 - RNA, 22 nt, Human
gggcacugcuuugcucugucac

SEQ ID NO: 951749 - RNA, 22 nt, Human
cugaaggauuuaguucuuugcu

SEQ ID NO: 951750 - RNA, 21 nt, Human
gagugcagcaagguagagucu

SEQ ID NO: 951751 - RNA, 22 nt, Human
cagcaggguagguuguaucagu

SEQ ID NO: 951752 - RNA, 22 nt, Human
aagcagaauuucccacuaguug

SEQ ID NO: 951753 - RNA, 22 nt, Human
ccagggcuggguuugucggugu

SEQ ID NO: 951754 - RNA, 22 nt, Human
ccuuggcccuagccucaggcaa

SEQ ID NO: 951755 - RNA, 22 nt, Human
aaacacuucaaggacuucuguc

SEQ ID NO: 951756 - RNA, 22 nt, Human
caacaaguggguacuuuacagg

SEQ ID NO: 951757 - RNA, 22 nt, Human
gccaggcuccaggcccuccuga

SEQ ID NO: 951758 - RNA, 22 nt, Human
cuuugaagagauuacugugcuc

SEQ ID NO: 951759 - RNA, 22 nt, Human
caguucuuuguggggaguucuc

SEQ ID NO: 951760 - RNA, 22 nt, Human
gcccaucaucacuguggaggcu

SEQ ID NO: 951761 - RNA, 22 nt, Human
agccucugucaagcuuuucaaa

SEQ ID NO: 951762 - RNA, 22 nt, Human
caggguggggcuggcuaucaaa

SEQ ID NO: 951763 - RNA, 22 nt, Human
uaugucuugcauuuuucaaacu

SEQ ID NO: 951764 - RNA, 22 nt, Human
gcagggcagccacaggcccccu

SEQ ID NO: 951765 - RNA, 22 nt, Human
ugugaaaggagccauagacagu

SEQ ID NO: 951766 - RNA, 22 nt, Human
gacagccaugcacuucugcugu

SEQ ID NO: 951767 - RNA, 20 nt, Human
uguauauuuucugguguaaa

SEQ ID NO: 951768 - RNA, 22 nt, Human
agggagcugcucugcuuccgug

SEQ ID NO: 951769 - RNA, 22 nt, Human
ggucccaguugcccaggucagg

SEQ ID NO: 951770 - RNA, 22 nt, Human
ugcauccuuaaccagcaucacu

SEQ ID NO: 951771 - RNA, 22 nt, Human
ucuugggaucucuucaccaccu

SEQ ID NO: 951772 - RNA, 22 nt, Human
gaggccaggagugcuguaaguu

SEQ ID NO: 951773 - RNA, 23 nt, Human
uggauaaagcugugcugcauagg

SEQ ID NO: 951774 - RNA, 22 nt, Human
cuucucagaucucagcuuugag

SEQ ID NO: 951775 - RNA, 22 nt, Human
guucacaauggcuuuaccuaag

SEQ ID NO: 951776 - RNA, 22 nt, Human
agaacagaagggaggaaggccu

SEQ ID NO: 951777 - RNA, 22 nt, Human
auucuuauuuaaauagagucug

SEQ ID NO: 951778 - RNA, 22 nt, Human
uagcugucagcaaucaaguggu

SEQ ID NO: 951779 - RNA, 22 nt, Human
agagcagccugugaugaugcac

SEQ ID NO: 951780 - RNA, 19 nt, Human
uccuucagucagaucuggg

SEQ ID NO: 951781 - RNA, 22 nt, Human
ugugugcauucacaugcaugcc

SEQ ID NO: 951782 - RNA, 22 nt, Human
cccaggagguggaguucacagu

SEQ ID NO: 951783 - RNA, 22 nt, Human
aucaggaucacugggagucuug

SEQ ID NO: 951784 - RNA, 22 nt, Human
ugacuuccugcacucaggugau

SEQ ID NO: 951785 - RNA, 22 nt, Human
agcuaggaaauugaggcugaga

SEQ ID NO: 951786 - RNA, 18 nt, Human
cauuaugugguuauagaa

SEQ ID NO: 951787 - RNA, 22 nt, Human
agccucuggcccuagacugcuu

SEQ ID NO: 951788 - RNA, 22 nt, Human
uggcuguguuaccacuucaugu

SEQ ID NO: 951789 - RNA, 22 nt, Human
ucuggagcuggcagggcccugg

SEQ ID NO: 951790 - RNA, 22 nt, Human
gcuggcagguccaagauagagc

SEQ ID NO: 951791 - RNA, 22 nt, Human
aggccagcucuacccuuggacu

SEQ ID NO: 951792 - RNA, 22 nt, Human
caguggggaggccaggauagaa

SEQ ID NO: 951793 - RNA, 22 nt, Human
gcagggaaggggcaugcuggag

SEQ ID NO: 951794 - RNA, 22 nt, Human
cuguccuuacugcuucuggcuu

SEQ ID NO: 951795 - RNA, 22 nt, Human
cacuugggacaaagcuucugcu

SEQ ID NO: 951796 - RNA, 22 nt, Human
aaggagucucagcugggccuga

SEQ ID NO: 951797 - RNA, 22 nt, Human
ggagccugugcccaagcccaga

SEQ ID NO: 951798 - RNA, 19 nt, Human
uggcagaggcaguuuguac

SEQ ID NO: 951799 - RNA, 22 nt, Human
aaacucaaauuaaacuagcuua

SEQ ID NO: 951800 - RNA, 22 nt, Human
ccagcuuguuugaagcucguca

SEQ ID NO: 951801 - RNA, 22 nt, Human
aaacugcuuuccacaguggcua

SEQ ID NO: 951802 - RNA, 22 nt, Human
ucuguucaugucuuuuuaagug

SEQ ID NO: 951803 - RNA, 22 nt, Human
gaguuauuucagaaggaaagau

SEQ ID NO: 951804 - RNA, 22 nt, Human
aaaagagugacugauaaguaua

SEQ ID NO: 951805 - RNA, 22 nt, Human
cucaggauuuacuaauuucaag

SEQ ID NO: 951806 - RNA, 22 nt, Human
ucugcagcuugcacaggcaggc

SEQ ID NO: 951807 - RNA, 22 nt, Human
cagcauggugccagugagucca

SEQ ID NO: 951808 - RNA, 22 nt, Human
agggagagguugaaaccucagu

SEQ ID NO: 951809 - RNA, 22 nt, Human
guguuccauguuugagguaguu

SEQ ID NO: 951810 - RNA, 22 nt, Human
ugggguggauagaaagugaugu

SEQ ID NO: 951811 - RNA, 22 nt, Human
agggucaggagacacuggcaac

SEQ ID NO: 951812 - RNA, 22 nt, Human
aaaugcacugaacacauguugu

SEQ ID NO: 951813 - RNA, 22 nt, Human
cccugggcagucugcacuucag

SEQ ID NO: 951814 - RNA, 22 nt, Human
ccuccuggguucaagcgauucu

SEQ ID NO: 951815 - RNA, 22 nt, Human
accuuauuaaaaugaugaugua

SEQ ID NO: 951816 - RNA, 22 nt, Human
gcuugcuggugccugcaggcuc

SEQ ID NO: 951817 - RNA, 22 nt, Human
accugaggcuguuagucuaggu

SEQ ID NO: 951818 - RNA, 22 nt, Human
uuacauaacgguaugaaaaaug

SEQ ID NO: 951819 - RNA, 17 nt, Human
aguggcaggcagauggg

SEQ ID NO: 951820 - RNA, 19 nt, Human
uuggcagcugagauccugc

SEQ ID NO: 951821 - RNA, 22 nt, Human
gccugagcaggcguggaccaug

SEQ ID NO: 951822 - RNA, 22 nt, Human
aggucacacaacugucagaggc

SEQ ID NO: 951823 - RNA, 18 nt, Human
gagacacaagggccugga

SEQ ID NO: 951824 - RNA, 22 nt, Human
uggcagcucauuuggaaaugga

SEQ ID NO: 951825 - RNA, 22 nt, Human
aaaugucuuucuucugcuacgu

SEQ ID NO: 951826 - RNA, 22 nt, Human
ucaucacuguaucauugauaga

SEQ ID NO: 951827 - RNA, 22 nt, Human
aggcagacaaggucccuggucu

SEQ ID NO: 951828 - RNA, 22 nt, Human
auguggcauucuuggucauuuc

SEQ ID NO: 951829 - RNA, 17 nt, Human
ccaggagagaugcuugu

SEQ ID NO: 951830 - RNA, 22 nt, Human
uggguggcacuucuggggucca

SEQ ID NO: 951831 - RNA, 22 nt, Human
cugcagugcaagcccagaugga

SEQ ID NO: 951832 - RNA, 22 nt, Human
uucuucaauuauuggaaagaaa

SEQ ID NO: 951833 - RNA, 22 nt, Human
agcuauguuauagcauguauca

SEQ ID NO: 951834 - RNA, 22 nt, Human
caggaaagagcugccaggcagg

SEQ ID NO: 951835 - RNA, 22 nt, Human
uaagaacuucggacauguuauc

SEQ ID NO: 951836 - RNA, 22 nt, Human
ccuccuggaggcucuaagggag

SEQ ID NO: 951837 - RNA, 22 nt, Human
aguguguccagaaaucuguauu

SEQ ID NO: 951838 - RNA, 21 nt, Human
uccuggccagggcacuaggca

SEQ ID NO: 951839 - RNA, 21 nt, Human
acaggcucuggggaugcuggg

SEQ ID NO: 951840 - RNA, 22 nt, Human
auuccaggcagaccagagagau

SEQ ID NO: 951841 - RNA, 18 nt, Human
cugcccagagcacuugug

SEQ ID NO: 951842 - RNA, 22 nt, Human
cccuuccucccaggcuucugug

SEQ ID NO: 951843 - RNA, 22 nt, Human
gccaggcuggugucacaacucu

SEQ ID NO: 951844 - RNA, 22 nt, Human
gcacuugggcagagacgcacag

SEQ ID NO: 951845 - RNA, 22 nt, Human
agccuucaaccuagcuagagca

SEQ ID NO: 951846 - RNA, 22 nt, Human
ugcuggcccaguauggacugca

SEQ ID NO: 951847 - RNA, 22 nt, Human
gaaacuguauguaguuuuuggg

SEQ ID NO: 951848 - RNA, 22 nt, Human
aagaugcagcuuccacuuuugc

SEQ ID NO: 951849 - RNA, 22 nt, Human
acacuuuuagcuaugaguuaau

SEQ ID NO: 951850 - RNA, 23 nt, Human
gccaggcuccggucuguggccac

SEQ ID NO: 951851 - RNA, 22 nt, Human
cuggcugaguuacuccacugag

SEQ ID NO: 951852 - RNA, 22 nt, Human
aaagccuucaaguagauguaag

SEQ ID NO: 951853 - RNA, 19 nt, Human
acauuuagaauguacuugc

SEQ ID NO: 951854 - RNA, 22 nt, Human
uucaggauggaguaccuuuuau

SEQ ID NO: 951855 - RNA, 22 nt, Human
acacaugagaaacaucaguugu

SEQ ID NO: 951856 - RNA, 22 nt, Human
augcagaaggagccaugcuugc

SEQ ID NO: 951857 - RNA, 22 nt, Human
gccucucucuacccaguaugau

SEQ ID NO: 951858 - RNA, 22 nt, Human
uucaagaucuggguuuucagcu

SEQ ID NO: 951859 - RNA, 22 nt, Human
ucaucucaaaacccaaggggca

SEQ ID NO: 951860 - RNA, 22 nt, Human
uuucuggcagcgggacaggggu

SEQ ID NO: 951861 - RNA, 22 nt, Human
ucagagagugcaaaauauagcu

SEQ ID NO: 951862 - RNA, 22 nt, Human
ucugcgcugccuugauccuugg

SEQ ID NO: 951863 - RNA, 22 nt, Human
gccagcagguugucaaggagcu

SEQ ID NO: 951864 - RNA, 22 nt, Human
uguguuaaggugcaucuagugc

SEQ ID NO: 951865 - RNA, 23 nt, Human
uucuuauuuacuuuggaaucucc

SEQ ID NO: 951866 - RNA, 22 nt, Human
ugaggcaggagaaucaccggaa

SEQ ID NO: 951867 - RNA, 22 nt, Human
uuauauaaagauaacuuuucuu

SEQ ID NO: 951868 - RNA, 22 nt, Human
ucuccucugcgcggcagugccc

SEQ ID NO: 951869 - RNA, 22 nt, Human
uuaguuuucccaucuuuauggu

SEQ ID NO: 951870 - RNA, 22 nt, Human
auucuaggcuugaaacaugaag

SEQ ID NO: 951871 - RNA, 22 nt, Human
uuucuucagccuucacaaccug

SEQ ID NO: 951872 - RNA, 22 nt, Human
aaaguguacuaugucaugaaca

SEQ ID NO: 951873 - RNA, 21 nt, Human
ggccugagcaccuguccaccu

SEQ ID NO: 951874 - RNA, 22 nt, Human
ugaaaugauuauaugguguuug

SEQ ID NO: 951875 - RNA, 22 nt, Human
agugcuuugagcguuugaaaag

SEQ ID NO: 951876 - RNA, 22 nt, Human
uuuuaacuuaaaauacauagau

SEQ ID NO: 951877 - RNA, 22 nt, Human
auuuccuagccucucuugcagu

SEQ ID NO: 951878 - RNA, 22 nt, Human
agggcagaaguacagacacuua

SEQ ID NO: 951879 - RNA, 22 nt, Human
cugagauggaguuucgcucuuc

SEQ ID NO: 951880 - RNA, 22 nt, Human
guggagcccugccuugcucaug

SEQ ID NO: 951881 - RNA, 22 nt, Human
ccuuuggguucaaucucggucu

SEQ ID NO: 951882 - RNA, 22 nt, Human
cugugcuggcagaccuggaguu

SEQ ID NO: 951883 - RNA, 22 nt, Human
caagggcuucaaguggccaaga

SEQ ID NO: 951884 - RNA, 22 nt, Human
gcucagagcacucagacucagc

SEQ ID NO: 951885 - RNA, 20 nt, Human
uccaagcccuccuuccauuc

SEQ ID NO: 951886 - RNA, 22 nt, Human
ccuaggcccauuaauuccccuu

SEQ ID NO: 951887 - RNA, 22 nt, Human
agacgagggccuggcacacagu

SEQ ID NO: 951888 - RNA, 22 nt, Human
ucauuuaauaauuuuugaguag

SEQ ID NO: 951889 - RNA, 22 nt, Human
uuccaugugaguacacugugau

SEQ ID NO: 951890 - RNA, 22 nt, Human
ggcuucugaaaucucugugcgu

SEQ ID NO: 951891 - RNA, 22 nt, Human
cucaacagcucugccauacucc

SEQ ID NO: 951892 - RNA, 22 nt, Human
gcuuugaagacuuuuccagggu

SEQ ID NO: 951893 - RNA, 22 nt, Human
aagaagaugguuaacuuucagu

SEQ ID NO: 951894 - RNA, 22 nt, Human
ugagaauaggcauagaaccugg

SEQ ID NO: 951895 - RNA, 22 nt, Human
ugcaaacuauugguagagaugg

SEQ ID NO: 951896 - RNA, 17 nt, Human
cugaggcccagggccca

SEQ ID NO: 951897 - RNA, 22 nt, Human
gauuucuugaccccugucucag

SEQ ID NO: 951898 - RNA, 22 nt, Human
cucugugccagucugcacucgg

SEQ ID NO: 951899 - RNA, 22 nt, Human
ggaggcagaauagagugugggu

SEQ ID NO: 951900 - RNA, 22 nt, Human
caggaggaagaacucugcaaca

SEQ ID NO: 951901 - RNA, 22 nt, Human
ucugggaguuguaguccggugg

SEQ ID NO: 951902 - RNA, 22 nt, Human
aggcucugaugcaagcccaggg

SEQ ID NO: 951903 - RNA, 22 nt, Human
gcugccugggcaggaggcgcug

SEQ ID NO: 951904 - RNA, 22 nt, Human
uuaagucauuucugauuauaga

SEQ ID NO: 951905 - RNA, 22 nt, Human
ucccagggacugggcuaggcuu

SEQ ID NO: 951906 - RNA, 18 nt, Human
guucaaggucaagagaga

SEQ ID NO: 951907 - RNA, 22 nt, Human
cucccaggggaacuaucaagua

SEQ ID NO: 951908 - RNA, 22 nt, Human
cacugcaguaacucuaggacug

SEQ ID NO: 951909 - RNA, 21 nt, Human
ccugcugugaucuuagugagu

SEQ ID NO: 951910 - RNA, 18 nt, Human
ugcagcaagugcuaaaua

SEQ ID NO: 951911 - RNA, 22 nt, Human
cugggcagagcuaacaccugag

SEQ ID NO: 951912 - RNA, 22 nt, Human
ggucccaggaaucuguguucua

SEQ ID NO: 951913 - RNA, 22 nt, Human
gaggagcuggcugucgggaggc

SEQ ID NO: 951914 - RNA, 23 nt, Human
uguagcaucucuuauuucucagc

SEQ ID NO: 951915 - RNA, 22 nt, Human
cccagaggugcuucagaggugc

SEQ ID NO: 951916 - RNA, 22 nt, Human
aaaggccaagcaugagguggac

SEQ ID NO: 951917 - RNA, 18 nt, Human
aagccagagaccacugcc

SEQ ID NO: 951918 - RNA, 22 nt, Human
cuuggggcagugcuuggcacau

SEQ ID NO: 951919 - RNA, 22 nt, Human
accagcuguguccuggcugcag

SEQ ID NO: 951920 - RNA, 22 nt, Human
cauucuaucuuggacuggaucu

SEQ ID NO: 951921 - RNA, 22 nt, Human
uccauuggucucugugcccagg

SEQ ID NO: 951922 - RNA, 23 nt, Human
aagcuuccuucacgucuccuggg

SEQ ID NO: 951923 - RNA, 22 nt, Human
agcagcucugagaggccagcac

SEQ ID NO: 951924 - RNA, 22 nt, Human
ucugagagucucugaggcagau

SEQ ID NO: 951925 - RNA, 22 nt, Human
ucugaaaguaucuggaucuuuu

SEQ ID NO: 951926 - RNA, 22 nt, Human
uuugcagucaaauuugcuaaau

SEQ ID NO: 951927 - RNA, 22 nt, Human
cagcuuugauucuuucugccau

SEQ ID NO: 951928 - RNA, 22 nt, Human
gcucaggagcugacagccucaa

SEQ ID NO: 951929 - RNA, 22 nt, Human
agaaggggagaagcuaccagga

SEQ ID NO: 951930 - RNA, 22 nt, Human
gagagcugauagaugagcuacu

SEQ ID NO: 951931 - RNA, 22 nt, Human
aggcacugaaggaagcuugcgc

SEQ ID NO: 951932 - RNA, 22 nt, Human
ucacagaauagcacuguaagcg

SEQ ID NO: 951933 - RNA, 22 nt, Human
cauuacauuucaaaauguuucc

SEQ ID NO: 951934 - RNA, 22 nt, Human
ucagagugcagcgggaggcugg

SEQ ID NO: 951935 - RNA, 17 nt, Human
ugcauguccuuuguucc

SEQ ID NO: 951936 - RNA, 22 nt, Human
ugagggaggcccuuugagcaga

SEQ ID NO: 951937 - RNA, 22 nt, Human
ugugaaggagaugaagggagug

SEQ ID NO: 951938 - RNA, 22 nt, Human
accucugcaacccuggaauggg

SEQ ID NO: 951939 - RNA, 22 nt, Human
uaguccauuuucacacugcuga

SEQ ID NO: 951940 - RNA, 22 nt, Human
cagacuggccacaucugcacug

SEQ ID NO: 951941 - RNA, 22 nt, Human
acuccuggugcugaugaagaga

SEQ ID NO: 951942 - RNA, 22 nt, Human
ugagccaaacuucuccuugguc

SEQ ID NO: 951943 - RNA, 21 nt, Human
gggaaugagauucuuggagau

SEQ ID NO: 951944 - RNA, 22 nt, Human
cuuugcauacaauuuuuagaaa

SEQ ID NO: 951945 - RNA, 22 nt, Human
cacagaggcaaccuucuggggu

SEQ ID NO: 951946 - RNA, 22 nt, Human
ggagcagagcugggcuuggcug

SEQ ID NO: 951947 - RNA, 22 nt, Human
uacaguaucuucuggcaagcau

SEQ ID NO: 951948 - RNA, 20 nt, Human
ucagugauuaucucugagug

SEQ ID NO: 951949 - RNA, 22 nt, Human
ucugagagcuguagaagccuau

SEQ ID NO: 951950 - RNA, 22 nt, Human
cugugccuggggggcagagcug

SEQ ID NO: 951951 - RNA, 22 nt, Human
gugcuuccaucuagagggucac

SEQ ID NO: 951952 - RNA, 22 nt, Human
acauaacaaucauaggacauag

SEQ ID NO: 951953 - RNA, 22 nt, Human
agcacagauucugaagaguccu

SEQ ID NO: 951954 - RNA, 22 nt, Human
uauuucagggagaauaaauuug

SEQ ID NO: 951955 - RNA, 23 nt, Human
ccugugugcccuuaauucacagc

SEQ ID NO: 951956 - RNA, 22 nt, Human
aaacagaaauuuccucaugcuc

SEQ ID NO: 951957 - RNA, 22 nt, Human
uuagagucaagcugcauguucu

SEQ ID NO: 951958 - RNA, 22 nt, Human
uguguuaauuccacaaacauuc

SEQ ID NO: 951959 - RNA, 22 nt, Human
aggguaggaacugaguggaagg

SEQ ID NO: 951960 - RNA, 22 nt, Human
cccagcccccgagugucuggaa

SEQ ID NO: 951961 - RNA, 22 nt, Human
uggcagagaugaagaguuguuu

SEQ ID NO: 951962 - RNA, 20 nt, Human
ugcguguguauuuauuuucu

SEQ ID NO: 951963 - RNA, 22 nt, Human
uuugucuuauccaaucucucag

SEQ ID NO: 951964 - RNA, 22 nt, Human
gagguggccucaagcagucuuc

SEQ ID NO: 951965 - RNA, 22 nt, Human
ugcugccacugguagucucauu

SEQ ID NO: 951966 - RNA, 22 nt, Human
gcugucacaagcaucuggggca

SEQ ID NO: 951967 - RNA, 22 nt, Human
gcuggccugucuagagccuuac

SEQ ID NO: 951968 - RNA, 22 nt, Human
gcugccuugaacuuggccuggg

SEQ ID NO: 951969 - RNA, 22 nt, Human
ggcagcuggggcagugcccugu

SEQ ID NO: 951970 - RNA, 22 nt, Human
agagccagcauuugacacuggc

SEQ ID NO: 951971 - RNA, 20 nt, Human
cugggcagguguuugaucuc

SEQ ID NO: 951972 - RNA, 22 nt, Human
aaagauaugucuccaaagagau

SEQ ID NO: 951973 - RNA, 22 nt, Human
ucugccuuuucacugccacuaa

SEQ ID NO: 951974 - RNA, 22 nt, Human
gggcugggcaugguguucccuc

SEQ ID NO: 951975 - RNA, 22 nt, Human
cuggcccagucucagaguguca

SEQ ID NO: 951976 - RNA, 22 nt, Human
cccagcagccagaaugaggagc

SEQ ID NO: 951977 - RNA, 22 nt, Human
ucuuuuauccuacauuuagcuc

SEQ ID NO: 951978 - RNA, 22 nt, Human
uuggccaaggaccuuuuuggag

SEQ ID NO: 951979 - RNA, 22 nt, Human
cugggaggauacacaagaucag

SEQ ID NO: 951980 - RNA, 22 nt, Human
auucuagaugcuguaaguagca

SEQ ID NO: 951981 - RNA, 23 nt, Human
ucagaaugcacugaauuuacccu

SEQ ID NO: 951982 - RNA, 22 nt, Human
aaaugcagguaguauuuauuuu

SEQ ID NO: 951983 - RNA, 22 nt, Human
ugcuggaauaauuucauguuaa

SEQ ID NO: 951984 - RNA, 22 nt, Human
uuggcucaggaccccugugacu

SEQ ID NO: 951985 - RNA, 22 nt, Human
ggcuucccaaggagccaggaug

SEQ ID NO: 951986 - RNA, 22 nt, Human
gccucugcugacaagauggaca

SEQ ID NO: 951987 - RNA, 22 nt, Human
gcuggaccaggugugcacaggc

SEQ ID NO: 951988 - RNA, 22 nt, Human
guuucaaauagguuucagcaaa

SEQ ID NO: 951989 - RNA, 22 nt, Human
caagagcucagaaacccuugcu

SEQ ID NO: 951990 - RNA, 23 nt, Human
gugcugugagccccuuggccucc

SEQ ID NO: 951991 - RNA, 22 nt, Human
aggugccagcucucaggcagga

SEQ ID NO: 951992 - RNA, 22 nt, Human
agaggagguggugaugcuuuaa

SEQ ID NO: 951993 - RNA, 22 nt, Human
gaaggccuagggaugcucugcg

SEQ ID NO: 951994 - RNA, 22 nt, Human
ggcaaaaaccauaauuacuuuu

SEQ ID NO: 951995 - RNA, 22 nt, Human
ucagguggcuucggggaguggc

SEQ ID NO: 951996 - RNA, 21 nt, Human
aggcugcuggcucaggguccu

SEQ ID NO: 951997 - RNA, 22 nt, Human
gugcuuccugccuggugccuuu

SEQ ID NO: 951998 - RNA, 22 nt, Human
auguauguuaguguauuaucua

SEQ ID NO: 951999 - RNA, 22 nt, Human
ggagcaggagucucuugaauuu

SEQ ID NO: 952000 - RNA, 22 nt, Human
uccugcagagccgcccucaggu

SEQ ID NO: 952001 - RNA, 22 nt, Human
ucccaggauuuuaggcucucag

SEQ ID NO: 952002 - RNA, 22 nt, Human
uacauuccacuagugacuggcg

SEQ ID NO: 952003 - RNA, 19 nt, Human
acuuugcaugugugucuaa

SEQ ID NO: 952004 - RNA, 22 nt, Human
ggcccagcacagugcuuggggg

SEQ ID NO: 952005 - RNA, 22 nt, Human
uaggcacuuggcguguuggaga

SEQ ID NO: 952006 - RNA, 22 nt, Human
ugcugccacauuuaaagagggg

SEQ ID NO: 952007 - RNA, 22 nt, Human
uuaagacaguguauuuguuuuc

SEQ ID NO: 952008 - RNA, 22 nt, Human
cuguguuugaugagaagccacc

SEQ ID NO: 952009 - RNA, 21 nt, Human
uucaagauauuuaaaaggugg

SEQ ID NO: 952010 - RNA, 22 nt, Human
ucuuugaauucaaacuguucaa

SEQ ID NO: 952011 - RNA, 22 nt, Human
ugguccuggggaucugcaguga

SEQ ID NO: 952012 - RNA, 22 nt, Human
uccaagggcagccauagaacuu

SEQ ID NO: 952013 - RNA, 22 nt, Human
aggccugggcaagaaggggcgu

SEQ ID NO: 952014 - RNA, 22 nt, Human
ccaggccuagccccugagggua

SEQ ID NO: 952015 - RNA, 22 nt, Human
ggcucugcaugugagugggugg

SEQ ID NO: 952016 - RNA, 22 nt, Human
gagugcaucguggccauuuuaa

SEQ ID NO: 952017 - RNA, 22 nt, Human
ucacugaauacuugucucaucc

SEQ ID NO: 952018 - RNA, 22 nt, Human
gcugucaggccaugugggccuu

SEQ ID NO: 952019 - RNA, 22 nt, Human
gucauauacacugcauguaauc

SEQ ID NO: 952020 - RNA, 22 nt, Human
uuggcuucucuuaacccuaaag

SEQ ID NO: 952021 - RNA, 22 nt, Human
gaugaaaaucuugagaugucga

SEQ ID NO: 952022 - RNA, 22 nt, Human
agauggcaggcccugugggggu

SEQ ID NO: 952023 - RNA, 22 nt, Human
uauuugagcgaagcaguguuuu

SEQ ID NO: 952024 - RNA, 22 nt, Human
acugccuuauaugcugugugug

SEQ ID NO: 952025 - RNA, 22 nt, Human
uccuggcccacuaugccagcau

SEQ ID NO: 952026 - RNA, 22 nt, Human
ggcugcucugccuuccagcugg

SEQ ID NO: 952027 - RNA, 20 nt, Human
uccaagggcagcagaaucag

SEQ ID NO: 952028 - RNA, 22 nt, Human
uucagugugugauaccugcugu

SEQ ID NO: 952029 - RNA, 22 nt, Human
agcauccaacaggagggaaggg

SEQ ID NO: 952030 - RNA, 20 nt, Human
cacguuuuuccacuagcaaa

SEQ ID NO: 952031 - RNA, 22 nt, Human
gaaucacgguauucugcacggg

SEQ ID NO: 952032 - RNA, 22 nt, Human
cgaggcaggcaggcggaggaua

SEQ ID NO: 952033 - RNA, 22 nt, Human
ccugggcuucugucuagauguu

SEQ ID NO: 952034 - RNA, 22 nt, Human
ggagccuguggccgucacgacu

SEQ ID NO: 952035 - RNA, 19 nt, Human
aucugccuguuaucacaua

SEQ ID NO: 952036 - RNA, 22 nt, Human
ucugccagaaguucugagagua

SEQ ID NO: 952037 - RNA, 22 nt, Human
cugggagcuagcucugagcuga

SEQ ID NO: 952038 - RNA, 22 nt, Human
ugcuggcucaguuugcagacuc

SEQ ID NO: 952039 - RNA, 22 nt, Human
uaaauuauggcuggcagagcag

SEQ ID NO: 952040 - RNA, 22 nt, Human
uuucuuaaauauuugcaggaca

SEQ ID NO: 952041 - RNA, 23 nt, Human
ugcucugggaggcccuggagagc

SEQ ID NO: 952042 - RNA, 22 nt, Human
ucccagagcaguacuccaggag

SEQ ID NO: 952043 - RNA, 22 nt, Human
cuguauuuucaugccuacguac

SEQ ID NO: 952044 - RNA, 22 nt, Human
gaggcagcugaaggagugacag

SEQ ID NO: 952045 - RNA, 22 nt, Human
acagucuugcuguauggucagg

SEQ ID NO: 952046 - RNA, 22 nt, Human
aucacaggugguaggaaaagaa

SEQ ID NO: 952047 - RNA, 21 nt, Human
uuucacaaaaguaugugacaa

SEQ ID NO: 952048 - RNA, 22 nt, Human
aguggggacuuaugccagcauu

SEQ ID NO: 952049 - RNA, 22 nt, Human
ugggcagauguccucugaagug

SEQ ID NO: 952050 - RNA, 22 nt, Human
cccaggaggcagauguugcagu

SEQ ID NO: 952051 - RNA, 22 nt, Human
uagccucucuccuccacaaccu

SEQ ID NO: 952052 - RNA, 22 nt, Human
aagaaaugcagaaaugugcugg

SEQ ID NO: 952053 - RNA, 22 nt, Human
acaugauuuuaguaucauaaua

SEQ ID NO: 952054 - RNA, 22 nt, Human
uuugacaguaauaaagcacaag

SEQ ID NO: 952055 - RNA, 22 nt, Human
cagggccaaguuggugccuuuu

SEQ ID NO: 952056 - RNA, 22 nt, Human
gaggccaggggccuggagauga

SEQ ID NO: 952057 - RNA, 21 nt, Human
ucacucugauuaggugucucu

SEQ ID NO: 952058 - RNA, 22 nt, Human
ccagcucugccaagcgucagcu

SEQ ID NO: 952059 - RNA, 22 nt, Human
aaauguauugcauaggauauuu

SEQ ID NO: 952060 - RNA, 22 nt, Human
aaggucauuuaacaauuuauga

SEQ ID NO: 952061 - RNA, 22 nt, Human
gcagcuggugcaaaugucacuc

SEQ ID NO: 952062 - RNA, 22 nt, Human
auuuauuaugggauuuggcuca

SEQ ID NO: 952063 - RNA, 22 nt, Human
accagagcuggcucugagcacc

SEQ ID NO: 952064 - RNA, 22 nt, Human
uggcucugucacugugagcuau

SEQ ID NO: 952065 - RNA, 22 nt, Human
agaaaugaauauguagugguua

SEQ ID NO: 952066 - RNA, 22 nt, Human
uuacaguuuaguccaagccaga

SEQ ID NO: 952067 - RNA, 22 nt, Human
gcugcucugaaaaugacuguug

SEQ ID NO: 952068 - RNA, 22 nt, Human
agaccgagaaguucuccaggcc

SEQ ID NO: 952069 - RNA, 22 nt, Human
ugguggcaauguccuggagaag

SEQ ID NO: 952070 - RNA, 22 nt, Human
uagccuucucaagacaaaguug

SEQ ID NO: 952071 - RNA, 22 nt, Human
uggaagcagugauucuugucug

SEQ ID NO: 952072 - RNA, 22 nt, Human
ccaggcagagugcuccagaaag

SEQ ID NO: 952073 - RNA, 22 nt, Human
uauuuagaacagacaauagaaa

SEQ ID NO: 952074 - RNA, 22 nt, Human
uguggcuguguccaccugcugc

SEQ ID NO: 952075 - RNA, 22 nt, Human
uccugcaggccuguucccagua

SEQ ID NO: 952076 - RNA, 22 nt, Human
caggccagguggcaggcaaaac

SEQ ID NO: 952077 - RNA, 22 nt, Human
agagggauaauauguauuguaa

SEQ ID NO: 952078 - RNA, 22 nt, Human
ucauacaucuguccuggagcuc

SEQ ID NO: 952079 - RNA, 22 nt, Human
cuuuauguccuugaagaguugu

SEQ ID NO: 952080 - RNA, 22 nt, Human
agcagggggccacagucacagc

SEQ ID NO: 952081 - RNA, 22 nt, Human
uagaaacagagagauaugcccc

SEQ ID NO: 952082 - RNA, 22 nt, Human
gaguuauuuguagggauuauau

SEQ ID NO: 952083 - RNA, 22 nt, Human
cauugcuuccuaugucccuucu

SEQ ID NO: 952084 - RNA, 21 nt, Human
agacagaacaacugcucucca

SEQ ID NO: 952085 - RNA, 22 nt, Human
cagaaaaccugacucuagaacu

SEQ ID NO: 952086 - RNA, 22 nt, Human
uuuuccucuguuauuaguguga

SEQ ID NO: 952087 - RNA, 22 nt, Human
agagcugcccacacagcagauu

SEQ ID NO: 952088 - RNA, 22 nt, Human
auagucaaccuuguaauuagcc

SEQ ID NO: 952089 - RNA, 22 nt, Human
ugccacccagccaggaguggga

SEQ ID NO: 952090 - RNA, 22 nt, Human
ugaaagguagcuggccucauag

SEQ ID NO: 952091 - RNA, 22 nt, Human
ggacagcugcuuucaggccaca

SEQ ID NO: 952092 - RNA, 22 nt, Human
caagagcuggguggcaagcuag

SEQ ID NO: 952093 - RNA, 22 nt, Human
aagggccuccuggggagccugg

SEQ ID NO: 952094 - RNA, 22 nt, Human
aggcuauuuccacucuucucau

SEQ ID NO: 952095 - RNA, 22 nt, Human
cugggccagggaggugucugua

SEQ ID NO: 952096 - RNA, 22 nt, Human
gggcauggaggucugucugcag

SEQ ID NO: 952097 - RNA, 22 nt, Human
gcuggagccauuggcuuggccu

SEQ ID NO: 952098 - RNA, 22 nt, Human
auaucacaaacaagucuguacu

SEQ ID NO: 952099 - RNA, 22 nt, Human
acuuguguaacacagaaagaac

SEQ ID NO: 952100 - RNA, 22 nt, Human
ggugcugguucaggguggcugu

SEQ ID NO: 952101 - RNA, 22 nt, Human
gccacaggcacuuaagggcugg

SEQ ID NO: 952102 - RNA, 22 nt, Human
gggagggacacaaagaguuccc

SEQ ID NO: 952103 - RNA, 22 nt, Human
acauuucugcauguaggguaau

SEQ ID NO: 952104 - RNA, 22 nt, Human
acugcagggcauccuggccaag

SEQ ID NO: 952105 - RNA, 22 nt, Human
auucuucaaagagugucaaagu

SEQ ID NO: 952106 - RNA, 22 nt, Human
caucaguguggcaguucacugu

SEQ ID NO: 952107 - RNA, 22 nt, Human
ucuuuacaguccucugucaauc

SEQ ID NO: 952108 - RNA, 22 nt, Human
ggcugcuggggacgugggagag

SEQ ID NO: 952109 - RNA, 17 nt, Human
uucaagauauugaaaug

SEQ ID NO: 952110 - RNA, 21 nt, Human
aaguaaaucagagaaauaacc

SEQ ID NO: 952111 - RNA, 22 nt, Human
ccucccucuuucagucccacag

SEQ ID NO: 952112 - RNA, 22 nt, Human
agucucagaaaagaagcaugga

SEQ ID NO: 952113 - RNA, 22 nt, Human
gcaggguauaauacuuagguga

SEQ ID NO: 952114 - RNA, 22 nt, Human
uuguuuucacagcuuugcccgg

SEQ ID NO: 952115 - RNA, 22 nt, Human
cccaagggagugccuggucaac

SEQ ID NO: 952116 - RNA, 19 nt, Human
ucagaggauuuggcuauga

SEQ ID NO: 952117 - RNA, 22 nt, Human
ugaccaaagaguugcuuguauu

SEQ ID NO: 952118 - RNA, 22 nt, Human
caggacagguguucuagaucag

SEQ ID NO: 952119 - RNA, 22 nt, Human
agugaccauuuucagcuagagg

SEQ ID NO: 952120 - RNA, 22 nt, Human
ugugaacuggcagguggacggg

SEQ ID NO: 952121 - RNA, 22 nt, Human
cagccaggacagggaaacuagu

SEQ ID NO: 952122 - RNA, 23 nt, Human
agcagccauagggaagcaauaca

SEQ ID NO: 952123 - RNA, 22 nt, Human
aagcugcagacccccugucuca

SEQ ID NO: 952124 - RNA, 22 nt, Human
acagccagaggagccaggcugg

SEQ ID NO: 952125 - RNA, 22 nt, Human
gggugcaggcagcccaggcagg

SEQ ID NO: 952126 - RNA, 22 nt, Human
ucagauggguuuugaaggaugu

SEQ ID NO: 952127 - RNA, 22 nt, Human
agccaggaaugcaugcucugcu

SEQ ID NO: 952128 - RNA, 22 nt, Human
agaauccugaugaaaaggagag

SEQ ID NO: 952129 - RNA, 22 nt, Human
gagcugccuguugcauagcaac

SEQ ID NO: 952130 - RNA, 22 nt, Human
uacaaagccugguagauaucug

SEQ ID NO: 952131 - RNA, 22 nt, Human
uuuucauuguaaaucaggaaac

SEQ ID NO: 952132 - RNA, 22 nt, Human
ggaugcugacuuuggagcaugg

SEQ ID NO: 952133 - RNA, 22 nt, Human
agggcaguucaacuucauagug

SEQ ID NO: 952134 - RNA, 22 nt, Human
uguacaaugccgagacuaacuc

SEQ ID NO: 952135 - RNA, 19 nt, Human
aggcagaggcuuggcuagc

SEQ ID NO: 952136 - RNA, 22 nt, Human
ugggaugggaucucgcuguguc

SEQ ID NO: 952137 - RNA, 22 nt, Human
uccauucauucauugaugaaca

SEQ ID NO: 952138 - RNA, 22 nt, Human
accuugggcaaguuggaaacug

SEQ ID NO: 952139 - RNA, 22 nt, Human
ccuggccagcgccggcugcucg

SEQ ID NO: 952140 - RNA, 22 nt, Human
aggccagaugucgggcuagaag

SEQ ID NO: 952141 - RNA, 22 nt, Human
ccagccagccuugaucugagua

SEQ ID NO: 952142 - RNA, 22 nt, Human
agucaauucuuuucaacucaag

SEQ ID NO: 952143 - RNA, 22 nt, Human
ccagcucugcauguuucccuug

SEQ ID NO: 952144 - RNA, 22 nt, Human
gcugggaguuacugucuccuuu

SEQ ID NO: 952145 - RNA, 22 nt, Human
uuccucaucugugcaccucacu

SEQ ID NO: 952146 - RNA, 22 nt, Human
ucaguuuuuguuugccagauag

SEQ ID NO: 952147 - RNA, 22 nt, Human
ugggccacggggguggagagcu

SEQ ID NO: 952148 - RNA, 22 nt, Human
auuugcaugcuucuauugugaa

SEQ ID NO: 952149 - RNA, 22 nt, Human
cuccucagucaggucuaggguc

SEQ ID NO: 952150 - RNA, 22 nt, Human
accagguggccccagcgugguu

SEQ ID NO: 952151 - RNA, 22 nt, Human
ccaggcagcucugauuuauguc

SEQ ID NO: 952152 - RNA, 22 nt, Human
gaaauauucuugucuuguuuuc

SEQ ID NO: 952153 - RNA, 22 nt, Human
aaguucaagucugcaucuuuuu

SEQ ID NO: 952154 - RNA, 22 nt, Human
cagccaggagcucccccugcuc

SEQ ID NO: 952155 - RNA, 22 nt, Human
cugagaggaugcugcaguggag

SEQ ID NO: 952156 - RNA, 22 nt, Human
guagggagcccagagcccagug

SEQ ID NO: 952157 - RNA, 22 nt, Human
ucugggaacacacgucacuuca

SEQ ID NO: 952158 - RNA, 22 nt, Human
ccagagccccugagcuucccug

SEQ ID NO: 952159 - RNA, 22 nt, Human
auucuucaucacuaccuuguga

SEQ ID NO: 952160 - RNA, 22 nt, Human
caaggccacguucugcaugcgg

SEQ ID NO: 952161 - RNA, 22 nt, Human
uggcagcuugaaugcagucuuu

SEQ ID NO: 952162 - RNA, 22 nt, Human
ucaaagucauggcaggcucaga

SEQ ID NO: 952163 - RNA, 22 nt, Human
cugcagaggccucgccuccucu

SEQ ID NO: 952164 - RNA, 22 nt, Human
cugcccugccuggccagugugg

SEQ ID NO: 952165 - RNA, 22 nt, Human
ucaccuugaaugcagcagcgug

SEQ ID NO: 952166 - RNA, 23 nt, Human
acacauuuuucccguucugaggu

SEQ ID NO: 952167 - RNA, 22 nt, Human
cagcuucugcuaucgaacaucu

SEQ ID NO: 952168 - RNA, 22 nt, Human
ucagcaggcaggaggcaugcca

SEQ ID NO: 952169 - RNA, 22 nt, Human
ugggcacaggggaauggaugaa

SEQ ID NO: 952170 - RNA, 22 nt, Human
ucagaggaccuuacugagaacc

SEQ ID NO: 952171 - RNA, 22 nt, Human
uccaggacuagcauuucugaua

SEQ ID NO: 952172 - RNA, 22 nt, Human
cugcuuuguggaaucacacugg

SEQ ID NO: 952173 - RNA, 22 nt, Human
aacauuucugagaauaucaguu

SEQ ID NO: 952174 - RNA, 22 nt, Human
aggaagcucaaagccaugaugu

SEQ ID NO: 952175 - RNA, 22 nt, Human
aucuacagugcacaggacagcc

SEQ ID NO: 952176 - RNA, 22 nt, Human
ggggugggguuacucauugugc

SEQ ID NO: 952177 - RNA, 22 nt, Human
ugagccagccucagaagucacg

SEQ ID NO: 952178 - RNA, 22 nt, Human
cugggcacaaguggcccuggau

SEQ ID NO: 952179 - RNA, 22 nt, Human
uggcccuguguccugcugccag

SEQ ID NO: 952180 - RNA, 22 nt, Human
cugaggcuuugugugcaugccu

SEQ ID NO: 952181 - RNA, 18 nt, Human
cugcugugucgucugggc

SEQ ID NO: 952182 - RNA, 23 nt, Human
gacaccuuugccagaucaagaug

SEQ ID NO: 952183 - RNA, 22 nt, Human
ucaguuuugauuccugguucuc

SEQ ID NO: 952184 - RNA, 22 nt, Human
ccugcagagccacgugccagcg

SEQ ID NO: 952185 - RNA, 22 nt, Human
acaguggagaaggcaugaggcu

SEQ ID NO: 952186 - RNA, 19 nt, Human
gcuccugggccucacucau

SEQ ID NO: 952187 - RNA, 23 nt, Human
ucccaggaaucugcauuuuuaac

SEQ ID NO: 952188 - RNA, 22 nt, Human
ucuggcucaucucuccagguaa

SEQ ID NO: 952189 - RNA, 22 nt, Human
agcagccaagguaaccugugcu

SEQ ID NO: 952190 - RNA, 22 nt, Human
cagucccagcugcucagaaggc

SEQ ID NO: 952191 - RNA, 22 nt, Human
cccaggccagaacuugguugcu

SEQ ID NO: 952192 - RNA, 21 nt, Human
ccugccaggaaacugaguguc

SEQ ID NO: 952193 - RNA, 22 nt, Human
caggaggaaaugugacccugcu

SEQ ID NO: 952194 - RNA, 22 nt, Human
gauuucaccugaucuugucauc

SEQ ID NO: 952195 - RNA, 22 nt, Human
uggcaggggaggugcuugcuua

SEQ ID NO: 952196 - RNA, 19 nt, Human
cccaggagcaguauugaug

SEQ ID NO: 952197 - RNA, 22 nt, Human
auucuccaucaccacuggcacu

SEQ ID NO: 952198 - RNA, 22 nt, Human
ggagauggcucugcaaggucua

SEQ ID NO: 952199 - RNA, 22 nt, Human
ucuguccucuuugaagcugcuc

SEQ ID NO: 952200 - RNA, 22 nt, Human
ggcaggaggaagaguuagcacc

SEQ ID NO: 952201 - RNA, 22 nt, Human
ggcaggagaaaggucucuucuu

SEQ ID NO: 952202 - RNA, 22 nt, Human
gaggccuggcucugcccuccug

SEQ ID NO: 952203 - RNA, 22 nt, Human
acugucuucaaaugaauauauu

SEQ ID NO: 952204 - RNA, 21 nt, Human
ugggacagugauggcuccucc

SEQ ID NO: 952205 - RNA, 22 nt, Human
agcaccauugcaaauauggcag

SEQ ID NO: 952206 - RNA, 22 nt, Human
uuuacugugcauuagaaucacc

SEQ ID NO: 952207 - RNA, 22 nt, Human
uccacuuuagcaaugauugaau

SEQ ID NO: 952208 - RNA, 22 nt, Human
ugugugcagacagauauuacuu

SEQ ID NO: 952209 - RNA, 22 nt, Human
uuucacauuuuauacuuaagcc

SEQ ID NO: 952210 - RNA, 22 nt, Human
gucuuuauuugagauugucauu

SEQ ID NO: 952211 - RNA, 22 nt, Human
cuuagaaauuguuacucauuca

SEQ ID NO: 952212 - RNA, 22 nt, Human
ugaaagaacuagcaucuucaag

SEQ ID NO: 952213 - RNA, 23 nt, Human
uucuuucaagaaguucacagugc

SEQ ID NO: 952214 - RNA, 22 nt, Human
cuucuucaguugcauguauugg

SEQ ID NO: 952215 - RNA, 22 nt, Human
uuauguagugacugacuguuag

SEQ ID NO: 952216 - RNA, 22 nt, Human
agcaauauuuaaagguuugcaa

SEQ ID NO: 952217 - RNA, 22 nt, Human
cagcuggcauaccugggcccgg

SEQ ID NO: 952218 - RNA, 22 nt, Human
ccuuccaggugcaggcaagccu

SEQ ID NO: 952219 - RNA, 22 nt, Human
aaucucuuuggcucaaggaucc

SEQ ID NO: 952220 - RNA, 22 nt, Human
agaugcugugucuguucccuug

SEQ ID NO: 952221 - RNA, 20 nt, Human
gcauccagacacccagcugc

SEQ ID NO: 952222 - RNA, 22 nt, Human
aaagcucacaguaauacaaggc

SEQ ID NO: 952223 - RNA, 22 nt, Human
agggaagaagcugguaguaggu

SEQ ID NO: 952224 - RNA, 22 nt, Human
gcugucugucucugucccacca

SEQ ID NO: 952225 - RNA, 22 nt, Human
ugcugucccuaagucucuucaa

SEQ ID NO: 952226 - RNA, 22 nt, Human
ggcccagcugugcuuccagccc

SEQ ID NO: 952227 - RNA, 22 nt, Human
ccagcagcuuuauuggcucucc

SEQ ID NO: 952228 - RNA, 22 nt, Human
uuugaaaacuuaauuuggucgu

SEQ ID NO: 952229 - RNA, 22 nt, Human
ucugccagugguuuggcccuga

SEQ ID NO: 952230 - RNA, 22 nt, Human
aguuuuauuccaaugugcagca

SEQ ID NO: 952231 - RNA, 22 nt, Human
ccaaggagcaaguuuacaccug

SEQ ID NO: 952232 - RNA, 22 nt, Human
uuucaaaauuuugcagugguaa

SEQ ID NO: 952233 - RNA, 22 nt, Human
ccagggcugagcugugaccaug

SEQ ID NO: 952234 - RNA, 22 nt, Human
caaaguccauaguuuacaauag

SEQ ID NO: 952235 - RNA, 19 nt, Human
agguggucuaggcuggaga

SEQ ID NO: 952236 - RNA, 22 nt, Human
uucuuuggggaauauucugguu

SEQ ID NO: 952237 - RNA, 22 nt, Human
ggcuggcacagagggcuggugu

SEQ ID NO: 952238 - RNA, 22 nt, Human
uggaaugacagagagucugaau

SEQ ID NO: 952239 - RNA, 22 nt, Human
aucagcaaggcaaucacugcag

SEQ ID NO: 952240 - RNA, 22 nt, Human
cacaugaguccugccagguaug

SEQ ID NO: 952241 - RNA, 22 nt, Human
aaaaucuaaguagcgaguaagg

SEQ ID NO: 952242 - RNA, 22 nt, Human
gaggggcuggcacgauggcugc

SEQ ID NO: 952243 - RNA, 22 nt, Human
cacaguggcagguguggguugu

SEQ ID NO: 952244 - RNA, 22 nt, Human
guggcagagguuccucagugug

SEQ ID NO: 952245 - RNA, 22 nt, Human
caggaacacaaguucagggaug

SEQ ID NO: 952246 - RNA, 22 nt, Human
gcccucugcuggccucaccucg

SEQ ID NO: 952247 - RNA, 22 nt, Human
uggccuggaaaaaugcagaugg

SEQ ID NO: 952248 - RNA, 22 nt, Human
uaagauaauaaguaugucuaug

SEQ ID NO: 952249 - RNA, 22 nt, Human
guggccugggguuuguucugag

SEQ ID NO: 952250 - RNA, 22 nt, Human
aggaagcuccaugaaggcagag

SEQ ID NO: 952251 - RNA, 22 nt, Human
ucaucaaagucaaagaaugacu

SEQ ID NO: 952252 - RNA, 22 nt, Human
uaucuguuccaggcacucagcu

SEQ ID NO: 952253 - RNA, 22 nt, Human
gguuugcacgauauuuccaugg

SEQ ID NO: 952254 - RNA, 22 nt, Human
gccagcugaagcccugguggaa

SEQ ID NO: 952255 - RNA, 22 nt, Human
caucuuuuggccuauucugagg

SEQ ID NO: 952256 - RNA, 22 nt, Human
ucagagugugagacauauugga

SEQ ID NO: 952257 - RNA, 22 nt, Human
gacccuggaacuuucagcagag

SEQ ID NO: 952258 - RNA, 22 nt, Human
gguggggcccuggcacugguau

SEQ ID NO: 952259 - RNA, 22 nt, Human
aggcagccaaucagaggcugac

SEQ ID NO: 952260 - RNA, 22 nt, Human
gcaggcagucaucuuucauauu

SEQ ID NO: 952261 - RNA, 22 nt, Human
gaaaauguuuccuguuauuugc

SEQ ID NO: 952262 - RNA, 21 nt, Human
uaagaacauuaucuucuuccu

SEQ ID NO: 952263 - RNA, 19 nt, Human
uuugaaaggauuguuauuu

SEQ ID NO: 952264 - RNA, 22 nt, Human
ggaguaggaguagaacucauca

SEQ ID NO: 952265 - RNA, 22 nt, Human
gaagaacaagcagugcuuuccu

SEQ ID NO: 952266 - RNA, 22 nt, Human
cuuccugggcaauguucugcuu

SEQ ID NO: 952267 - RNA, 22 nt, Human
ccaggaagcggugagggcugcc

SEQ ID NO: 952268 - RNA, 23 nt, Human
gccugggacugguagugugaccu

SEQ ID NO: 952269 - RNA, 22 nt, Human
cagcuggcguggagugauugca

SEQ ID NO: 952270 - RNA, 22 nt, Human
uggcagcuacagacagagguga

SEQ ID NO: 952271 - RNA, 22 nt, Human
gggcucagccccauugaaccag

SEQ ID NO: 952272 - RNA, 22 nt, Human
ucuguucagaauuguaacacuc

SEQ ID NO: 952273 - RNA, 22 nt, Human
aggcagucuaucucuggagccu

SEQ ID NO: 952274 - RNA, 22 nt, Human
acagagcuucccagccugagca

SEQ ID NO: 952275 - RNA, 22 nt, Human
acauacauaugacaacuuuccu

SEQ ID NO: 952276 - RNA, 19 nt, Human
ucucagaggaaaaauugcu

SEQ ID NO: 952277 - RNA, 22 nt, Human
gcugcccaggguggagccggcu

SEQ ID NO: 952278 - RNA, 22 nt, Human
uaugucuuguguuugcuaaucu

SEQ ID NO: 952279 - RNA, 22 nt, Human
cuccugggagucuuccuggaug

SEQ ID NO: 952280 - RNA, 22 nt, Human
ucucaagaucucaagauggccc

SEQ ID NO: 952281 - RNA, 22 nt, Human
gcuccaggagagggaagcagau

SEQ ID NO: 952282 - RNA, 22 nt, Human
ucccagaggaaauggcagcuga

SEQ ID NO: 952283 - RNA, 22 nt, Human
ccuccagguguuacauaugacu

SEQ ID NO: 952284 - RNA, 19 nt, Human
uggcagggagaguuugaag

SEQ ID NO: 952285 - RNA, 22 nt, Human
cauuuaaagguuguggguaaaa

SEQ ID NO: 952286 - RNA, 22 nt, Human
ugccuucaaucaggauggucuc

SEQ ID NO: 952287 - RNA, 22 nt, Human
cucagagaaaaggagcaagggu

SEQ ID NO: 952288 - RNA, 22 nt, Human
ucagggacuuacaaaccagaag

SEQ ID NO: 952289 - RNA, 22 nt, Human
gggggcuggaauauccaucaac

SEQ ID NO: 952290 - RNA, 23 nt, Human
ccugucugugcuggguggacaca

SEQ ID NO: 952291 - RNA, 22 nt, Human
cuuucagagguuacucaggaaa

SEQ ID NO: 952292 - RNA, 22 nt, Human
uucuagaugauaaaccagcagc

SEQ ID NO: 952293 - RNA, 22 nt, Human
cuggccuggagccucugggugg

SEQ ID NO: 952294 - RNA, 22 nt, Human
auuuggaaaugcaucucuugag

SEQ ID NO: 952295 - RNA, 22 nt, Human
aaugaacaucaaaugccuacca

SEQ ID NO: 952296 - RNA, 18 nt, Human
uacaucuauauaguguuu

SEQ ID NO: 952297 - RNA, 21 nt, Human
uucaaaguuugccuaaagauu

SEQ ID NO: 952298 - RNA, 22 nt, Human
guuauuuucauuggcucagacu

SEQ ID NO: 952299 - RNA, 22 nt, Human
acauuuaaccaaacuguuuaau

SEQ ID NO: 952300 - RNA, 22 nt, Human
aagucacacuagacaacugagg

SEQ ID NO: 952301 - RNA, 22 nt, Human
uggagcauauucuggagcuugg

SEQ ID NO: 952302 - RNA, 22 nt, Human
uguuccauaaguggugcuuugu

SEQ ID NO: 952303 - RNA, 22 nt, Human
ugggcugcacccucagccucug

SEQ ID NO: 952304 - RNA, 22 nt, Human
agaggcugagaaacccucuucu

SEQ ID NO: 952305 - RNA, 22 nt, Human
agcugccacagagccuggccag

SEQ ID NO: 952306 - RNA, 22 nt, Human
aguucuuauuuuggaacugagg

SEQ ID NO: 952307 - RNA, 22 nt, Human
uggcaaggcugugggggcagag

SEQ ID NO: 952308 - RNA, 22 nt, Human
ugaaggccacuuccugugagcu

SEQ ID NO: 952309 - RNA, 22 nt, Human
auguuauuaaaguacagauucu

SEQ ID NO: 952310 - RNA, 23 nt, Human
ucacagggcacuggcugggguug

SEQ ID NO: 952311 - RNA, 22 nt, Human
aggggccugguuggccucuguu

SEQ ID NO: 952312 - RNA, 22 nt, Human
gcuggggaggcagcagagaaca

SEQ ID NO: 952313 - RNA, 22 nt, Human
accgaaggaaacuggaaccguu

SEQ ID NO: 952314 - RNA, 22 nt, Human
agccuugaacacugacugaagg

SEQ ID NO: 952315 - RNA, 22 nt, Human
agaaaaggauugauggaucaga

SEQ ID NO: 952316 - RNA, 22 nt, Human
ggacacaguggaagacagcuug

SEQ ID NO: 952317 - RNA, 22 nt, Human
auguucuguuuuguaauucaua

SEQ ID NO: 952318 - RNA, 22 nt, Human
caguaugucuacuggacaaagu

SEQ ID NO: 952319 - RNA, 22 nt, Human
cuguguggacugguugaggccc

SEQ ID NO: 952320 - RNA, 22 nt, Human
uguucuuuggcuucacagcucu

SEQ ID NO: 952321 - RNA, 22 nt, Human
gaaaggucuuccggucuuccag

SEQ ID NO: 952322 - RNA, 22 nt, Human
ugucucagaguaucccugaacu

SEQ ID NO: 952323 - RNA, 22 nt, Human
agcaggaaagaaaaaucugugu

SEQ ID NO: 952324 - RNA, 22 nt, Human
ugaaaugacaaagguuuuucuu

SEQ ID NO: 952325 - RNA, 22 nt, Human
uugcacuuuauagaaacuuuug

SEQ ID NO: 952326 - RNA, 22 nt, Human
ucuuguuaaagugaagauacug

SEQ ID NO: 952327 - RNA, 22 nt, Human
uagggaugacgaaaggacagag

SEQ ID NO: 952328 - RNA, 22 nt, Human
cagcugacccgugggaggcggg

SEQ ID NO: 952329 - RNA, 22 nt, Human
cagaacauuccaugugcccugc

SEQ ID NO: 952330 - RNA, 22 nt, Human
ccagcauggcaccugagaugag

SEQ ID NO: 952331 - RNA, 22 nt, Human
caguggguggcuaaguggcuga

SEQ ID NO: 952332 - RNA, 22 nt, Human
auggucuguuaggagcuacuuu

SEQ ID NO: 952333 - RNA, 22 nt, Human
cuuuggcaaugucauuuucaau

SEQ ID NO: 952334 - RNA, 22 nt, Human
gccaggcugcuggcugcugucc

SEQ ID NO: 952335 - RNA, 22 nt, Human
ucaggaauccagacagggcaca

SEQ ID NO: 952336 - RNA, 22 nt, Human
acaaaagugagugugucucaga

SEQ ID NO: 952337 - RNA, 20 nt, Human
ggucccugcccucugucauc

SEQ ID NO: 952338 - RNA, 19 nt, Human
uggggccuccugucccugg

SEQ ID NO: 952339 - RNA, 22 nt, Human
gcccaggauggcuggaggugcu

SEQ ID NO: 952340 - RNA, 22 nt, Human
aggcaguggaaggagaaagcaa

SEQ ID NO: 952341 - RNA, 21 nt, Human
aucuuuauuacgcagagaaga

SEQ ID NO: 952342 - RNA, 22 nt, Human
uguuuauugagugccuacuaua

SEQ ID NO: 952343 - RNA, 22 nt, Human
agccaucauuucugucacuggc

SEQ ID NO: 952344 - RNA, 22 nt, Human
acacaaauuguaggauaauugc

SEQ ID NO: 952345 - RNA, 22 nt, Human
auguucuuguucaaaugucagu

SEQ ID NO: 952346 - RNA, 20 nt, Human
agugugcauuuagagucugc

SEQ ID NO: 952347 - RNA, 22 nt, Human
uucuaaacuucaauucuaaauu

SEQ ID NO: 952348 - RNA, 22 nt, Human
acucugcuguuuacucucuaua

SEQ ID NO: 952349 - RNA, 22 nt, Human
uucaaugaggauagaacuggau

SEQ ID NO: 952350 - RNA, 22 nt, Human
aaaguuagaaugauaucaacga

SEQ ID NO: 952351 - RNA, 22 nt, Human
uaucuugagagacaacacagca

SEQ ID NO: 952352 - RNA, 22 nt, Human
cucuugggagugcucuggagaa

SEQ ID NO: 952353 - RNA, 22 nt, Human
ugccuugcgguguauuucuggg

SEQ ID NO: 952354 - RNA, 22 nt, Human
caugaaaauaacauuguuguga

SEQ ID NO: 952355 - RNA, 22 nt, Human
cccagagcuccgguccugccca

SEQ ID NO: 952356 - RNA, 21 nt, Human
uguaugcacgcacaugcacac

SEQ ID NO: 952357 - RNA, 22 nt, Human
uucauguauuuaucauguaaau

SEQ ID NO: 952358 - RNA, 22 nt, Human
ucucagaguuugaaucuggagu

SEQ ID NO: 952359 - RNA, 22 nt, Human
uuauacauguguuuugagauga

SEQ ID NO: 952360 - RNA, 22 nt, Human
gcagccuguuguaccagccugu

SEQ ID NO: 952361 - RNA, 22 nt, Human
uucucagaugauucagauaaac

SEQ ID NO: 952362 - RNA, 22 nt, Human
aucuagauuagguauaagagcu

SEQ ID NO: 952363 - RNA, 22 nt, Human
agugagaguauuaaugugaacu

SEQ ID NO: 952364 - RNA, 22 nt, Human
agcuuccuacaaccaucucaga

SEQ ID NO: 952365 - RNA, 22 nt, Human
uugaaagaggcaaaguuugauc

SEQ ID NO: 952366 - RNA, 22 nt, Human
uuucauuaguaugacagcacgc

SEQ ID NO: 952367 - RNA, 22 nt, Human
ucaggagagaaagaauacaauu

SEQ ID NO: 952368 - RNA, 22 nt, Human
ucugggagguggcagggugcau

SEQ ID NO: 952369 - RNA, 23 nt, Human
uaguuauuuucucuguaauuugc

SEQ ID NO: 952370 - RNA, 22 nt, Human
aaaggagacuucagaucuccuu

SEQ ID NO: 952371 - RNA, 22 nt, Human
ggcuguggucugggugcucccc

SEQ ID NO: 952372 - RNA, 23 nt, Human
acagaaaucauuuguaagguacc

SEQ ID NO: 952373 - RNA, 22 nt, Human
ccuuuuucaauauagaauugca

SEQ ID NO: 952374 - RNA, 22 nt, Human
aggcagcauccagaggagaaug

SEQ ID NO: 952375 - RNA, 22 nt, Human
gucugucucucuccagagugca

SEQ ID NO: 952376 - RNA, 20 nt, Human
aggaggggauagaaucaaag

SEQ ID NO: 952377 - RNA, 22 nt, Human
gcccaggagguugggcugugca

SEQ ID NO: 952378 - RNA, 22 nt, Human
ccaagaugaucuuuacaguguu

SEQ ID NO: 952379 - RNA, 22 nt, Human
accuuuuccagcuucuagaggc

SEQ ID NO: 952380 - RNA, 22 nt, Human
aucuggcuuacgaagcacuggu

SEQ ID NO: 952381 - RNA, 22 nt, Human
gcccucagaggacagcugacuu

SEQ ID NO: 952382 - RNA, 22 nt, Human
gaguggagcaaaagagguagau

SEQ ID NO: 952383 - RNA, 22 nt, Human
aggauauuugcuuaagauagcu

SEQ ID NO: 952384 - RNA, 22 nt, Human
cuugaauccaaaugggagauga

SEQ ID NO: 952385 - RNA, 22 nt, Human
caggaaaggugugucaugaugg

SEQ ID NO: 952386 - RNA, 22 nt, Human
cagaagcuuugcucauaaccau

SEQ ID NO: 952387 - RNA, 22 nt, Human
ucuuugaaagcuguucuagagu

SEQ ID NO: 952388 - RNA, 22 nt, Human
uagcugccuaugugauaagaga

SEQ ID NO: 952389 - RNA, 22 nt, Human
uuaucauugucgcagucuaauu

SEQ ID NO: 952390 - RNA, 22 nt, Human
ugccuugcuggaugucaguuuu

SEQ ID NO: 952391 - RNA, 22 nt, Human
acagccugagaguggagcuggc

SEQ ID NO: 952392 - RNA, 22 nt, Human
gaggcagcaggcugaggaggau

SEQ ID NO: 952393 - RNA, 18 nt, Human
ccucaggggaccuggcag

SEQ ID NO: 952394 - RNA, 22 nt, Human
aggccagguggucaugcuugcu

SEQ ID NO: 952395 - RNA, 22 nt, Human
gucccagaggcuuuggccacag

SEQ ID NO: 952396 - RNA, 22 nt, Human
gccuggaguagcauggcaagcc

SEQ ID NO: 952397 - RNA, 22 nt, Human
ugagcuuacgugggaacagacu

SEQ ID NO: 952398 - RNA, 22 nt, Human
cagcucugggugacaggagggc

SEQ ID NO: 952399 - RNA, 22 nt, Human
aucaggauagucuguaaauugu

SEQ ID NO: 952400 - RNA, 22 nt, Human
uacaaaugaguuguaugaacca

SEQ ID NO: 952401 - RNA, 22 nt, Human
ugaguagcggcuauguguaacu

SEQ ID NO: 952402 - RNA, 22 nt, Human
gaugggggccagggccugcuuu

SEQ ID NO: 952403 - RNA, 18 nt, Human
ucuccuggguaggggccu

SEQ ID NO: 952404 - RNA, 22 nt, Human
ggcagccuugacuagugacuua

SEQ ID NO: 952405 - RNA, 22 nt, Human
ugcacagagagaugagacacgu

SEQ ID NO: 952406 - RNA, 22 nt, Human
gggguggauuccuacaggucca

SEQ ID NO: 952407 - RNA, 22 nt, Human
uaucuuuaacuugcaguauuua

SEQ ID NO: 952408 - RNA, 22 nt, Human
gcagguggauuaucagaagugc

SEQ ID NO: 952409 - RNA, 22 nt, Human
ggcacugagcugccuuggggca

SEQ ID NO: 952410 - RNA, 22 nt, Human
gggcuucuagaccagcagugag

SEQ ID NO: 952411 - RNA, 22 nt, Human
uuucagaaaacuuaucaucagu

SEQ ID NO: 952412 - RNA, 22 nt, Human
uuaauuuauguccaaaccagau

SEQ ID NO: 952413 - RNA, 22 nt, Human
guaaaguucuauuugaauuuag

SEQ ID NO: 952414 - RNA, 22 nt, Human
uuuaacagaugugaaauuuuca

SEQ ID NO: 952415 - RNA, 22 nt, Human
ugggccuggaguuuguccagag

SEQ ID NO: 952416 - RNA, 22 nt, Human
gcaaggcuuugugaauuuuaaa

SEQ ID NO: 952417 - RNA, 21 nt, Human
ccugggagaauuggguguggc

SEQ ID NO: 952418 - RNA, 22 nt, Human
aggucaccauggcaugcuccac

SEQ ID NO: 952419 - RNA, 22 nt, Human
ucuggagagucacagugccaga

SEQ ID NO: 952420 - RNA, 22 nt, Human
gccuggagcagacgugucccgg

SEQ ID NO: 952421 - RNA, 22 nt, Human
auggaaagggaagcaaggaaca

SEQ ID NO: 952422 - RNA, 20 nt, Human
gcugccagugccugaugcuu

SEQ ID NO: 952423 - RNA, 22 nt, Human
auagaguccaaaguaugaauau

SEQ ID NO: 952424 - RNA, 22 nt, Human
gagaggccauggcugugcagug

SEQ ID NO: 952425 - RNA, 23 nt, Human
ggacagggcccugcccuauggcc

SEQ ID NO: 952426 - RNA, 22 nt, Human
caguacuuaacuuauaggagag

SEQ ID NO: 952427 - RNA, 22 nt, Human
ucuggcucuauaacuccuagcu

SEQ ID NO: 952428 - RNA, 22 nt, Human
gcagggacaaggcagguguucu

SEQ ID NO: 952429 - RNA, 22 nt, Human
ucagggcaggcgagcagcugcu

SEQ ID NO: 952430 - RNA, 22 nt, Human
gucaaacaaauuaacauaucca

SEQ ID NO: 952431 - RNA, 21 nt, Human
ggcagcguguggacaggaagg

SEQ ID NO: 952432 - RNA, 22 nt, Human
uacaaacuuguuuuaaguaagu

SEQ ID NO: 952433 - RNA, 22 nt, Human
ugaggcucaaggucugguggag

SEQ ID NO: 952434 - RNA, 22 nt, Human
accccagaggcggaggcugcag

SEQ ID NO: 952435 - RNA, 23 nt, Human
gcugucaguuguuuuugucucua

SEQ ID NO: 952436 - RNA, 22 nt, Human
agcacucuucugugauaguugu

SEQ ID NO: 952437 - RNA, 22 nt, Human
caaagugcuaggauuacaggcc

SEQ ID NO: 952438 - RNA, 22 nt, Human
auugucuguacuuuaaaaaugu

SEQ ID NO: 952439 - RNA, 22 nt, Human
cagaggcugcucuggguggcau

SEQ ID NO: 952440 - RNA, 22 nt, Human
uuauuccauucaguucaacaag

SEQ ID NO: 952441 - RNA, 22 nt, Human
uucucuuugacauuauucaggu

SEQ ID NO: 952442 - RNA, 22 nt, Human
cugcugugugcuuacuuggguu

SEQ ID NO: 952443 - RNA, 22 nt, Human
ugaacucucucaagugacagaa

SEQ ID NO: 952444 - RNA, 22 nt, Human
ccaggauggggagcagauagaa

SEQ ID NO: 952445 - RNA, 22 nt, Human
uugccaggagcucaucugaggg

SEQ ID NO: 952446 - RNA, 22 nt, Human
ccuucucuacuccugaugcaug

SEQ ID NO: 952447 - RNA, 22 nt, Human
gagcugccggcccacaguacua

SEQ ID NO: 952448 - RNA, 22 nt, Human
aagcuuccugaaugcucauuua

SEQ ID NO: 952449 - RNA, 22 nt, Human
ggcaacauucuccagauccuuu

SEQ ID NO: 952450 - RNA, 22 nt, Human
aaucagaaagaggucauguugc

SEQ ID NO: 952451 - RNA, 22 nt, Human
aggccugagguuccugugcuca

SEQ ID NO: 952452 - RNA, 22 nt, Human
gaugagcauuguuucauguguu

SEQ ID NO: 952453 - RNA, 22 nt, Human
accuggccauccagcuggcauc

SEQ ID NO: 952454 - RNA, 22 nt, Human
cuucuuuccuuccuccaguggc

SEQ ID NO: 952455 - RNA, 22 nt, Human
ccucuggguaucuguggaagua

SEQ ID NO: 952456 - RNA, 22 nt, Human
cagcaauaguguguuuguuuca

SEQ ID NO: 952457 - RNA, 22 nt, Human
ucaagagagugcugcuuggggu

SEQ ID NO: 952458 - RNA, 22 nt, Human
cugaaggacuuggugauaguug

SEQ ID NO: 952459 - RNA, 20 nt, Human
ccagaagagaugaucaucca

SEQ ID NO: 952460 - RNA, 22 nt, Human
uucagcaagaccaccauguacc

SEQ ID NO: 952461 - RNA, 22 nt, Human
ucucagggccucccucuguuuc

SEQ ID NO: 952462 - RNA, 22 nt, Human
uuuauuugaaucaggggagaau

SEQ ID NO: 952463 - RNA, 20 nt, Human
uuguuucugcuauuuucuaa

SEQ ID NO: 952464 - RNA, 22 nt, Human
ucauuuguacuugugugcuugu

SEQ ID NO: 952465 - RNA, 22 nt, Human
gaagcagcgaaguggaagggac

SEQ ID NO: 952466 - RNA, 22 nt, Human
uaagaagcuucugcuaaugccu

SEQ ID NO: 952467 - RNA, 22 nt, Human
caggguggcccuguggucucau

SEQ ID NO: 952468 - RNA, 22 nt, Human
acgcuuuuacuauuuugagcuc

SEQ ID NO: 952469 - RNA, 22 nt, Human
aauuugcaugaugagaacaaua

SEQ ID NO: 952470 - RNA, 22 nt, Human
gugcuucucuucacacccaacu

SEQ ID NO: 952471 - RNA, 22 nt, Human
auugaaaguccuaucuaaggga

SEQ ID NO: 952472 - RNA, 22 nt, Human
agcccagguugaggcugcagug

SEQ ID NO: 952473 - RNA, 22 nt, Human
ugcacccucaucagucaaaugg

SEQ ID NO: 952474 - RNA, 21 nt, Human
ccuguucacagaucuguaacu

SEQ ID NO: 952475 - RNA, 22 nt, Human
agcagccacagcagaucugagu

SEQ ID NO: 952476 - RNA, 22 nt, Human
ugcacacaaguuggagaaugaa

SEQ ID NO: 952477 - RNA, 22 nt, Human
gagcccugauuugcagcauuug

SEQ ID NO: 952478 - RNA, 22 nt, Human
gucuagagugcuuccuagucau

SEQ ID NO: 952479 - RNA, 22 nt, Human
ccuccugggccuugcucuguga

SEQ ID NO: 952480 - RNA, 22 nt, Human
uuacauuagacccacuuucaug

SEQ ID NO: 952481 - RNA, 22 nt, Human
gggcacugcuggaggcucccug

SEQ ID NO: 952482 - RNA, 21 nt, Human
ucuuuccugcccaguugcccu

SEQ ID NO: 952483 - RNA, 22 nt, Human
gaaaaguauguuuauuuugacu

SEQ ID NO: 952484 - RNA, 22 nt, Human
aacaugaagguaggaugguuuu

SEQ ID NO: 952485 - RNA, 22 nt, Human
uggccuggaaccuggcagggac

SEQ ID NO: 952486 - RNA, 15 nt, Human
uucaggauaugacuc

SEQ ID NO: 952487 - RNA, 22 nt, Human
uuuuaaucaugcuucuaugucc

SEQ ID NO: 952488 - RNA, 22 nt, Human
uucagaaagugaaucuuguuau

SEQ ID NO: 952489 - RNA, 22 nt, Human
ccagaggugccacagaaagagc

SEQ ID NO: 952490 - RNA, 17 nt, Human
uugggagagaaagguau

SEQ ID NO: 952491 - RNA, 22 nt, Human
uucuucucggcugucagauagu

SEQ ID NO: 952492 - RNA, 22 nt, Human
acaggcugcugggcuccgugcu

SEQ ID NO: 952493 - RNA, 22 nt, Human
cccuuucccuucuggcucaggg

SEQ ID NO: 952494 - RNA, 22 nt, Human
ugcaguggaagagguggagauc

SEQ ID NO: 952495 - RNA, 22 nt, Human
acccucccauuuccauguagca

SEQ ID NO: 952496 - RNA, 22 nt, Human
augcacagacccaaaggccauc

SEQ ID NO: 952497 - RNA, 22 nt, Human
cauucucaauaguagaugagua

SEQ ID NO: 952498 - RNA, 22 nt, Human
cacugcauggaugauggcugua

SEQ ID NO: 952499 - RNA, 22 nt, Human
cagagcaguccuugucaaucag

SEQ ID NO: 952500 - RNA, 23 nt, Human
cauccaggagcugagucugacug

SEQ ID NO: 952501 - RNA, 22 nt, Human
agagucuuuugucaguaauguu

SEQ ID NO: 952502 - RNA, 22 nt, Human
ucagaggucacacagcaaguuu

SEQ ID NO: 952503 - RNA, 22 nt, Human
cccuggaggucagaggccuggg

SEQ ID NO: 952504 - RNA, 22 nt, Human
agugacugggcagggcagggcc

SEQ ID NO: 952505 - RNA, 22 nt, Human
aaaauuauggaguaucccaaag

SEQ ID NO: 952506 - RNA, 22 nt, Human
uuggcauaccuuagugguggag

SEQ ID NO: 952507 - RNA, 23 nt, Human
ugauuaggucuacucuuggcucc

SEQ ID NO: 952508 - RNA, 22 nt, Human
ccagggugagaaaaggcuggau

SEQ ID NO: 952509 - RNA, 22 nt, Human
uccauuuucuaaguaucacuua

SEQ ID NO: 952510 - RNA, 22 nt, Human
agcugagcuaguaguuccagug

SEQ ID NO: 952511 - RNA, 22 nt, Human
cagucuuauccugaaaacaaca

SEQ ID NO: 952512 - RNA, 22 nt, Human
ccagucacuggaaaaugggaau

SEQ ID NO: 952513 - RNA, 22 nt, Human
gcacccaggccggcgacugcag

SEQ ID NO: 952514 - RNA, 22 nt, Human
aggggcugacuggaaagugcca

SEQ ID NO: 952515 - RNA, 22 nt, Human
agcuuuauucaugauuucaggg

SEQ ID NO: 952516 - RNA, 22 nt, Human
ucccaaagcuacucuucugacu

SEQ ID NO: 952517 - RNA, 22 nt, Human
uuucuucucacccaggacagag

SEQ ID NO: 952518 - RNA, 21 nt, Human
ggagucagggucuggcugggg

SEQ ID NO: 952519 - RNA, 22 nt, Human
ggaggugggagacauaggcggc

SEQ ID NO: 952520 - RNA, 22 nt, Human
uuaaauuccagccucauaauag

SEQ ID NO: 952521 - RNA, 22 nt, Human
ccuccuggauggauuuggugga

SEQ ID NO: 952522 - RNA, 22 nt, Human
ugagccugcugucgcuggaccc

SEQ ID NO: 952523 - RNA, 22 nt, Human
ugugugccugagccgugccugg

SEQ ID NO: 952524 - RNA, 22 nt, Human
uaaauacagucauuugagccau

SEQ ID NO: 952525 - RNA, 22 nt, Human
gggcugcuuuuuucuuagcaga

SEQ ID NO: 952526 - RNA, 22 nt, Human
cagagacagaaaauggaucuag

SEQ ID NO: 952527 - RNA, 22 nt, Human
cagaggcauacucccagucuug

SEQ ID NO: 952528 - RNA, 22 nt, Human
gcaggggcugcugggaacucgg

SEQ ID NO: 952529 - RNA, 22 nt, Human
cauuaaguauuucaguuacugu

SEQ ID NO: 952530 - RNA, 22 nt, Human
ggggauggauuccgggucccug

SEQ ID NO: 952531 - RNA, 22 nt, Human
gagggagggacuagcauucucu

SEQ ID NO: 952532 - RNA, 22 nt, Human
ugcaccauuuugucaggcuacu

SEQ ID NO: 952533 - RNA, 22 nt, Human
uguuuauaccuugguauaacca

SEQ ID NO: 952534 - RNA, 22 nt, Human
uuauuauuuuguguacagcaaa

SEQ ID NO: 952535 - RNA, 19 nt, Human
gcacacccugcaccaccau

SEQ ID NO: 952536 - RNA, 22 nt, Human
agagaaaacucauugagguguc

SEQ ID NO: 952537 - RNA, 22 nt, Human
aguuacaaccaugacacaagca

SEQ ID NO: 952538 - RNA, 22 nt, Human
uugcucugacuggagugcagug

SEQ ID NO: 952539 - RNA, 22 nt, Human
uggcucugccacuaacuuggua

SEQ ID NO: 952540 - RNA, 22 nt, Human
guucacaagcuggguuucugca

SEQ ID NO: 952541 - RNA, 22 nt, Human
agcaccugucacaagcagaagg

SEQ ID NO: 952542 - RNA, 22 nt, Human
aggcagaauguuggaaaggaag

SEQ ID NO: 952543 - RNA, 22 nt, Human
gcuggccugcgagggcaggcug

SEQ ID NO: 952544 - RNA, 22 nt, Human
ccuggagagagaggccaacugc

SEQ ID NO: 952545 - RNA, 22 nt, Human
gagaggggcgcgcagcucgcga

SEQ ID NO: 952546 - RNA, 22 nt, Human
cugaggccucucuccugggcuu

SEQ ID NO: 952547 - RNA, 22 nt, Human
cguggccuuugagugagcuccc

SEQ ID NO: 952548 - RNA, 22 nt, Human
uaaauaugcauguauccuuauc

SEQ ID NO: 952549 - RNA, 21 nt, Human
uggcugccuacaugcugcagg

SEQ ID NO: 952550 - RNA, 22 nt, Human
ugcuagaaaucugaaacuagca

SEQ ID NO: 952551 - RNA, 22 nt, Human
ggucugaaaauggugaccacca

SEQ ID NO: 952552 - RNA, 22 nt, Human
agggccagcugaugagaaugag

SEQ ID NO: 952553 - RNA, 20 nt, Human
ccuccaggcacacccaugug

SEQ ID NO: 952554 - RNA, 22 nt, Human
acagcagccugcagcccugugu

SEQ ID NO: 952555 - RNA, 22 nt, Human
ggucucagaucuuuauuaaggc

SEQ ID NO: 952556 - RNA, 22 nt, Human
cagggcacaguuauggaggugg

SEQ ID NO: 952557 - RNA, 22 nt, Human
uagaaauguuagauguauugag

SEQ ID NO: 952558 - RNA, 22 nt, Human
acauccugaagucagucauuug

SEQ ID NO: 952559 - RNA, 22 nt, Human
acucugcucccuaagccaugau

SEQ ID NO: 952560 - RNA, 22 nt, Human
aggcagccagauggcagccugc

SEQ ID NO: 952561 - RNA, 17 nt, Human
ggagagugggaauggcc

SEQ ID NO: 952562 - RNA, 22 nt, Human
aagcacagaaaaggagcaugga

SEQ ID NO: 952563 - RNA, 22 nt, Human
ugaaauguuugaagaccacuga

SEQ ID NO: 952564 - RNA, 22 nt, Human
cagggagcacugcgagcggcag

SEQ ID NO: 952565 - RNA, 22 nt, Human
gaggccuuagagcuuuucuaga

SEQ ID NO: 952566 - RNA, 21 nt, Human
gacaaagugaagcaggcagga

SEQ ID NO: 952567 - RNA, 21 nt, Human
ucuggagcccuaagcugagaa

SEQ ID NO: 952568 - RNA, 22 nt, Human
uugcauugaugucuauacgcug

SEQ ID NO: 952569 - RNA, 22 nt, Human
ucaucuucuauuaauagggaga

SEQ ID NO: 952570 - RNA, 22 nt, Human
uacauuaacuuacguccacaug

SEQ ID NO: 952571 - RNA, 21 nt, Human
uggagacucugguucuuugug

SEQ ID NO: 952572 - RNA, 22 nt, Human
gagauguacaauguguauuaau

SEQ ID NO: 952573 - RNA, 22 nt, Human
guaacauaguuugugcuucauc

SEQ ID NO: 952574 - RNA, 22 nt, Human
caugccaguuuugagaugcacc

SEQ ID NO: 952575 - RNA, 22 nt, Human
gagccuggauagccuuguucca

SEQ ID NO: 952576 - RNA, 22 nt, Human
gggcagcaucaggaggggcuuu

SEQ ID NO: 952577 - RNA, 22 nt, Human
uggcagcaaaaccagaaucaga

SEQ ID NO: 952578 - RNA, 22 nt, Human
uuaucacuuaugagcuuuuugc

SEQ ID NO: 952579 - RNA, 22 nt, Human
agggacacacuccaguguuauu

SEQ ID NO: 952580 - RNA, 22 nt, Human
gaggcagcugggcuggugguuu

SEQ ID NO: 952581 - RNA, 22 nt, Human
ucagagcuaaggggagagcaaa

SEQ ID NO: 952582 - RNA, 22 nt, Human
uccuauugguagacauuucugu

SEQ ID NO: 952583 - RNA, 22 nt, Human
cuucccagaccuuagagugcag

SEQ ID NO: 952584 - RNA, 17 nt, Human
ucagcaaagacaaagga

SEQ ID NO: 952585 - RNA, 22 nt, Human
cuggagccuagguugaccuggg

SEQ ID NO: 952586 - RNA, 22 nt, Human
aaguaaaauguuuccuuuauua

SEQ ID NO: 952587 - RNA, 22 nt, Human
uggagagguugaauaacuuguc

SEQ ID NO: 952588 - RNA, 22 nt, Human
aaauaaguaguuuaguguugug

SEQ ID NO: 952589 - RNA, 22 nt, Human
ggcugugccucaaggcuacuca

SEQ ID NO: 952590 - RNA, 22 nt, Human
uguaacaguaagccugugagcu

SEQ ID NO: 952591 - RNA, 22 nt, Human
gccuaauaugcaaaauugauac

SEQ ID NO: 952592 - RNA, 22 nt, Human
uuccuuguuuguagcucuggga

SEQ ID NO: 952593 - RNA, 22 nt, Human
ucaacugcaaguuugcuuaguu

SEQ ID NO: 952594 - RNA, 22 nt, Human
cugggcuccuaaccauccaggu

SEQ ID NO: 952595 - RNA, 22 nt, Human
aggcuuccuggaggaagaggua

SEQ ID NO: 952596 - RNA, 22 nt, Human
uucauucuuauuugugaucugg

SEQ ID NO: 952597 - RNA, 22 nt, Human
cagcauggacccaucgcugagu

SEQ ID NO: 952598 - RNA, 23 nt, Human
cuuugccacccagagccugacag

SEQ ID NO: 952599 - RNA, 22 nt, Human
cagcucugaagaaaggugucua

SEQ ID NO: 952600 - RNA, 22 nt, Human
ugcugugagguugagaaggaag

SEQ ID NO: 952601 - RNA, 22 nt, Human
cuuaacagcaagaucuguguca

SEQ ID NO: 952602 - RNA, 22 nt, Human
agaacagcaguuaugguucauu

SEQ ID NO: 952603 - RNA, 22 nt, Human
ucuggagauaagacagacagau

SEQ ID NO: 952604 - RNA, 22 nt, Human
uuuuggcacugcgucuacaugg

SEQ ID NO: 952605 - RNA, 22 nt, Human
cacaggaggaggccagagcgua

SEQ ID NO: 952606 - RNA, 22 nt, Human
aggcagagaaaaaccagauaug

SEQ ID NO: 952607 - RNA, 22 nt, Human
aauaaauguuaagauugucuca

SEQ ID NO: 952608 - RNA, 22 nt, Human
uuuuggucagguuggucucgaa

SEQ ID NO: 952609 - RNA, 22 nt, Human
ucuucagugcauguuaccuaua

SEQ ID NO: 952610 - RNA, 22 nt, Human
cuggcuucugggccagggcaga

SEQ ID NO: 952611 - RNA, 22 nt, Human
uugggcugaaguagagggcaga

SEQ ID NO: 952612 - RNA, 22 nt, Human
auuaauaugagaaaguggcaga

SEQ ID NO: 952613 - RNA, 22 nt, Human
agccuccacagaugcaaagggc

SEQ ID NO: 952614 - RNA, 22 nt, Human
ccacagggccuuuccugcuggc

SEQ ID NO: 952615 - RNA, 22 nt, Human
ucuacuguagugaugcugcagu

SEQ ID NO: 952616 - RNA, 22 nt, Human
uuugaacaagagcuucacauua

SEQ ID NO: 952617 - RNA, 22 nt, Human
ggggggugcugaucaguggagc

SEQ ID NO: 952618 - RNA, 22 nt, Human
uccuucaggccucauucucaua

SEQ ID NO: 952619 - RNA, 22 nt, Human
augcacuacuuggcuuuacuga

SEQ ID NO: 952620 - RNA, 22 nt, Human
uggcagcugucagaaugcaaau

SEQ ID NO: 952621 - RNA, 22 nt, Human
ggcagccagagggcagcuggau

SEQ ID NO: 952622 - RNA, 22 nt, Human
caggccucuauggucagcugag

SEQ ID NO: 952623 - RNA, 22 nt, Human
auggauaagucaaagaguaucc

SEQ ID NO: 952624 - RNA, 22 nt, Human
gcucucugccuuucucaaugac

SEQ ID NO: 952625 - RNA, 22 nt, Human
gaaauaagaguccaugccaggu

SEQ ID NO: 952626 - RNA, 22 nt, Human
gcuggccugaccugaggcuggg

SEQ ID NO: 952627 - RNA, 22 nt, Human
gguuggggcgagcuggaggccc

SEQ ID NO: 952628 - RNA, 20 nt, Human
cagcaggcuauggggcaccc

SEQ ID NO: 952629 - RNA, 22 nt, Human
cacauauuguaguucaccagga

SEQ ID NO: 952630 - RNA, 22 nt, Human
aggcucugcagugcuggaggac

SEQ ID NO: 952631 - RNA, 23 nt, Human
gaagcagaugucugaguaggcag

SEQ ID NO: 952632 - RNA, 22 nt, Human
gccuuggccaacaccuugcaaa

SEQ ID NO: 952633 - RNA, 22 nt, Human
gagccagcugagcugcacuguc

SEQ ID NO: 952634 - RNA, 22 nt, Human
ugauuuccaaaaggcuucuaag

SEQ ID NO: 952635 - RNA, 22 nt, Human
agcagcugaccagugaguccug

SEQ ID NO: 952636 - RNA, 22 nt, Human
gggcucuggaaggugcaccaug

SEQ ID NO: 952637 - RNA, 22 nt, Human
uuggaaggagucaaccagcuga

SEQ ID NO: 952638 - RNA, 22 nt, Human
uagggcuauucugaguaauaau

SEQ ID NO: 952639 - RNA, 22 nt, Human
gcucuauguugaccuucagugg

SEQ ID NO: 952640 - RNA, 22 nt, Human
uaaguucaguuggucgaaguag

SEQ ID NO: 952641 - RNA, 22 nt, Human
agccauuggcugccuggugcgu

SEQ ID NO: 952642 - RNA, 20 nt, Human
agagccuggaaaaagacauc

SEQ ID NO: 952643 - RNA, 22 nt, Human
gcagacagccagacugcacugg

SEQ ID NO: 952644 - RNA, 22 nt, Human
gccugaagaacagcugugagga

SEQ ID NO: 952645 - RNA, 19 nt, Human
augagcuggcauuucaggu

SEQ ID NO: 952646 - RNA, 21 nt, Human
gugugucuaauguaguggaaa

SEQ ID NO: 952647 - RNA, 22 nt, Human
augugucuucuaagccaagccu

SEQ ID NO: 952648 - RNA, 22 nt, Human
ccucagggaggccucuguggcu

SEQ ID NO: 952649 - RNA, 20 nt, Human
cccucugcacauggcugugg

SEQ ID NO: 952650 - RNA, 22 nt, Human
ugaaaauuguuguacuugauaa

SEQ ID NO: 952651 - RNA, 22 nt, Human
cuccagggagcugcgggagcca

SEQ ID NO: 952652 - RNA, 22 nt, Human
cauugaaaaacguugacugagu

SEQ ID NO: 952653 - RNA, 22 nt, Human
aaucuggcucagaagaagauga

SEQ ID NO: 952654 - RNA, 22 nt, Human
agguacagggugaaaguuuaug

SEQ ID NO: 952655 - RNA, 22 nt, Human
uuucauuauacagcuucauaaa

SEQ ID NO: 952656 - RNA, 22 nt, Human
gcagccaccucccauggcgggg

SEQ ID NO: 952657 - RNA, 22 nt, Human
augugucucuaccaaugcaauu

SEQ ID NO: 952658 - RNA, 22 nt, Human
gcagugugaccgagcuugcuuc

SEQ ID NO: 952659 - RNA, 23 nt, Human
cccaggaguuucacugcaaaggu

SEQ ID NO: 952660 - RNA, 22 nt, Human
gcccaggaucugcucagaucau

SEQ ID NO: 952661 - RNA, 22 nt, Human
uggcagcacuugaacuugagcc

SEQ ID NO: 952662 - RNA, 22 nt, Human
guggcccaggcuuggcgcuggc

SEQ ID NO: 952663 - RNA, 22 nt, Human
ccucagagaaagguauggcuga

SEQ ID NO: 952664 - RNA, 22 nt, Human
uucuuuucuuuaggcauugugu

SEQ ID NO: 952665 - RNA, 22 nt, Human
agcuucuguucaucuuccaggc

SEQ ID NO: 952666 - RNA, 22 nt, Human
guguguuuagcauuagcagggg

SEQ ID NO: 952667 - RNA, 22 nt, Human
ugcagagguuuccaggcaaguu

SEQ ID NO: 952668 - RNA, 22 nt, Human
cagaauaugacaagauuuuccu

SEQ ID NO: 952669 - RNA, 22 nt, Human
caguagcauguaauaaagacag

SEQ ID NO: 952670 - RNA, 22 nt, Human
uauuagguaaaggacuugcagg

SEQ ID NO: 952671 - RNA, 20 nt, Human
ugcagcugcaggaggguggg

SEQ ID NO: 952672 - RNA, 22 nt, Human
ugcccacaggaagacaccagcg

SEQ ID NO: 952673 - RNA, 22 nt, Human
cucuggaauguuuacaugcccu

SEQ ID NO: 952674 - RNA, 22 nt, Human
gucagcugucuccccagagugg

SEQ ID NO: 952675 - RNA, 22 nt, Human
cagcagcugggaaggaggcuga

SEQ ID NO: 952676 - RNA, 22 nt, Human
cacugggcguguccugggugag

SEQ ID NO: 952677 - RNA, 22 nt, Human
auuugcauaauagugauuugua

SEQ ID NO: 952678 - RNA, 21 nt, Human
ugucagaaauaagcaugugau

SEQ ID NO: 952679 - RNA, 22 nt, Human
gccgaagcugccgucugguccu

SEQ ID NO: 952680 - RNA, 22 nt, Human
ugagaaagugggugccuagcaa

SEQ ID NO: 952681 - RNA, 22 nt, Human
cuucucucccuggcacucagac

SEQ ID NO: 952682 - RNA, 22 nt, Human
ggucccugaagaggccuggggu

SEQ ID NO: 952683 - RNA, 22 nt, Human
ccuguuuacaucaucaaggacu

SEQ ID NO: 952684 - RNA, 22 nt, Human
aagcugaggcccauggcaaggu

SEQ ID NO: 952685 - RNA, 22 nt, Human
gagccuggggacccuccugagu

SEQ ID NO: 952686 - RNA, 22 nt, Human
caguacuuguccucagguguua

SEQ ID NO: 952687 - RNA, 22 nt, Human
ugucccaggcugaaguacagug

SEQ ID NO: 952688 - RNA, 22 nt, Human
aacaaauggaacacaaaucuuu

SEQ ID NO: 952689 - RNA, 22 nt, Human
agccugagccccauccagcuga

SEQ ID NO: 952690 - RNA, 22 nt, Human
acgcagaagggccuggcgugcc

SEQ ID NO: 952691 - RNA, 23 nt, Human
ucagcugcuuccuccugccugcc

SEQ ID NO: 952692 - RNA, 21 nt, Human
ucugggcccaugcugccucac

SEQ ID NO: 952693 - RNA, 22 nt, Human
aaaugcacaggagaaccaauuc

SEQ ID NO: 952694 - RNA, 22 nt, Human
uggcagcuuuuuguuucaggcu

SEQ ID NO: 952695 - RNA, 22 nt, Human
caguccaggccuggaggagcca

SEQ ID NO: 952696 - RNA, 22 nt, Human
uccuggccaaguuacucucugc

SEQ ID NO: 952697 - RNA, 18 nt, Human
aggcuucccaggcaggcc

SEQ ID NO: 952698 - RNA, 22 nt, Human
agcucccauuaucuucugaaac

SEQ ID NO: 952699 - RNA, 22 nt, Human
cagucacacaaguggacuuggg

SEQ ID NO: 952700 - RNA, 22 nt, Human
uacuuccagcaaucugcauauu

SEQ ID NO: 952701 - RNA, 22 nt, Human
cuuucacacacauacauuugga

SEQ ID NO: 952702 - RNA, 22 nt, Human
aaaugcacagaaaggaugugga

SEQ ID NO: 952703 - RNA, 22 nt, Human
aacuccuguucuaugacaagag

SEQ ID NO: 952704 - RNA, 19 nt, Human
cugaagucuuuucagcugg

SEQ ID NO: 952705 - RNA, 22 nt, Human
cugcucacgccaccguucauca

SEQ ID NO: 952706 - RNA, 22 nt, Human
aggaaaaaccuguuaaugguag

SEQ ID NO: 952707 - RNA, 22 nt, Human
ugcuccauucucuagccagugc

SEQ ID NO: 952708 - RNA, 22 nt, Human
uaaaugcaagugcuccugggag

SEQ ID NO: 952709 - RNA, 21 nt, Human
uggcucaguugcugggcacag

SEQ ID NO: 952710 - RNA, 19 nt, Human
cugugcuuuaaacuccuau

SEQ ID NO: 952711 - RNA, 22 nt, Human
aaaugugucaguuucauucucu

SEQ ID NO: 952712 - RNA, 22 nt, Human
ccugcccagcuucaccucaggc

SEQ ID NO: 952713 - RNA, 22 nt, Human
ucuucucccaucuccaggcagg

SEQ ID NO: 952714 - RNA, 23 nt, Human
ggcugagacuacaggcgcuugcc

SEQ ID NO: 952715 - RNA, 22 nt, Human
aggcaggcugcuauggaguaga

SEQ ID NO: 952716 - RNA, 22 nt, Human
agugucugccagcugccaggug

SEQ ID NO: 952717 - RNA, 19 nt, Human
ggcuggcaagugacagugu

SEQ ID NO: 952718 - RNA, 18 nt, Human
ucauuuguuuugcaugaa

SEQ ID NO: 952719 - RNA, 22 nt, Human
aauaauaagauacuaagggagu

SEQ ID NO: 952720 - RNA, 22 nt, Human
cacagaaguuucauagucucga

SEQ ID NO: 952721 - RNA, 22 nt, Human
cuucugaggcagcuauucaguu

SEQ ID NO: 952722 - RNA, 22 nt, Human
agacaugucaccaauucuuacu

SEQ ID NO: 952723 - RNA, 22 nt, Human
ucacauacacuaggauauuuuu

SEQ ID NO: 952724 - RNA, 22 nt, Human
cagggcagccaggccccguggg

SEQ ID NO: 952725 - RNA, 22 nt, Human
ucacacagauugguagagcuga

SEQ ID NO: 952726 - RNA, 22 nt, Human
ggguguguuccuaaggaaacca

SEQ ID NO: 952727 - RNA, 22 nt, Human
caguggaggccuugggaccuuu

SEQ ID NO: 952728 - RNA, 22 nt, Human
ggggauggaggcgugugguccu

SEQ ID NO: 952729 - RNA, 22 nt, Human
ugugaggagaggcccagcuccc

SEQ ID NO: 952730 - RNA, 22 nt, Human
caauaaguaauaggcaucuaau

SEQ ID NO: 952731 - RNA, 22 nt, Human
gacacuaaaguauaggguaucu

SEQ ID NO: 952732 - RNA, 22 nt, Human
aaacaccaagagcuagcuauua

SEQ ID NO: 952733 - RNA, 22 nt, Human
gaacaguaaauuuaugcagcac

SEQ ID NO: 952734 - RNA, 22 nt, Human
acagagguguuccagaccuagg

SEQ ID NO: 952735 - RNA, 20 nt, Human
uagaaaucuuauaaaagacu

SEQ ID NO: 952736 - RNA, 22 nt, Human
gugccuggcaugcgccggugcu

SEQ ID NO: 952737 - RNA, 18 nt, Human
ccuggcuuccaucuuggu

SEQ ID NO: 952738 - RNA, 22 nt, Human
aaaaguauuggccaccauuucu

SEQ ID NO: 952739 - RNA, 22 nt, Human
ugucaugcccaggagcaaggua

SEQ ID NO: 952740 - RNA, 23 nt, Human
auuguuuuuggcucucagggaau

SEQ ID NO: 952741 - RNA, 17 nt, Human
gucugggcuuuagagac

SEQ ID NO: 952742 - RNA, 22 nt, Human
ccagcucugcagggccuggggu

SEQ ID NO: 952743 - RNA, 22 nt, Human
gaggcaggguguugauuacaga

SEQ ID NO: 952744 - RNA, 22 nt, Human
uauuuguauguguguacauaua

SEQ ID NO: 952745 - RNA, 22 nt, Human
uauuucaacguaugaaaagcug

SEQ ID NO: 952746 - RNA, 22 nt, Human
augugcaugcacuuacaugugu

SEQ ID NO: 952747 - RNA, 22 nt, Human
gagcccuguagcaagucauguc

SEQ ID NO: 952748 - RNA, 22 nt, Human
uaaagacaugguguaggugaac

SEQ ID NO: 952749 - RNA, 22 nt, Human
gagacugauggggcucccagaa

SEQ ID NO: 952750 - RNA, 22 nt, Human
uggcugaacuaaugugcuguuu

SEQ ID NO: 952751 - RNA, 22 nt, Human
guggcaggagagacacagccau

SEQ ID NO: 952752 - RNA, 22 nt, Human
agcauuuauuucuuagaaauug

SEQ ID NO: 952753 - RNA, 22 nt, Human
ucuuagcacagcuauauaaguu

SEQ ID NO: 952754 - RNA, 19 nt, Human
uuugaauccagcugguaac

SEQ ID NO: 952755 - RNA, 22 nt, Human
uacaguaagaugaaauagcaau

SEQ ID NO: 952756 - RNA, 22 nt, Human
ccugagcuggaagagcuugugc

SEQ ID NO: 952757 - RNA, 22 nt, Human
gaggcaccucgcgggaggaggc

SEQ ID NO: 952758 - RNA, 22 nt, Human
uaauuuauuucaacugccaagg

SEQ ID NO: 952759 - RNA, 22 nt, Human
accaggggugucaacagcauuu

SEQ ID NO: 952760 - RNA, 22 nt, Human
cagcuggccccacaguagaggc

SEQ ID NO: 952761 - RNA, 22 nt, Human
uucacagaugccugaugugugg

SEQ ID NO: 952762 - RNA, 22 nt, Human
uaaggcauucucaugcugugaa

SEQ ID NO: 952763 - RNA, 22 nt, Human
gaggccacgguuuuccuugggg

SEQ ID NO: 952764 - RNA, 22 nt, Human
cugaggcucaagggcagguggg

SEQ ID NO: 952765 - RNA, 19 nt, Human
ccucugccagcccgccucu

SEQ ID NO: 952766 - RNA, 22 nt, Human
uuugaaagagcugauacaugaa

SEQ ID NO: 952767 - RNA, 22 nt, Human
cuguucauggaaaaauaguugg

SEQ ID NO: 952768 - RNA, 22 nt, Human
aaagcagauucugaugcaguag

SEQ ID NO: 952769 - RNA, 22 nt, Human
ccuccuggugggcgcuucuggc

SEQ ID NO: 952770 - RNA, 22 nt, Human
cuugaucuacauagugaaaccc

SEQ ID NO: 952771 - RNA, 22 nt, Human
agccaaagagaccccauaucca

SEQ ID NO: 952772 - RNA, 22 nt, Human
uggcacugggaugcuacuguua

SEQ ID NO: 952773 - RNA, 22 nt, Human
caagagagaugcagcucacuca

SEQ ID NO: 952774 - RNA, 22 nt, Human
gccuggcuccuaaggacuggcu

SEQ ID NO: 952775 - RNA, 22 nt, Human
gccuccccugcaauuguccuug

SEQ ID NO: 952776 - RNA, 22 nt, Human
gccuggcccagggcuccgcagg

SEQ ID NO: 952777 - RNA, 20 nt, Human
cuccagggaacagacuggag

SEQ ID NO: 952778 - RNA, 20 nt, Human
uuucagugguuugugccuag

SEQ ID NO: 952779 - RNA, 22 nt, Human
cagcagagguuggaacaguucu

SEQ ID NO: 952780 - RNA, 22 nt, Human
gcuggagccuucugcucuguug

SEQ ID NO: 952781 - RNA, 22 nt, Human
acagguggccccgagggagugg

SEQ ID NO: 952782 - RNA, 22 nt, Human
acagcauucaauaaauaauaac

SEQ ID NO: 952783 - RNA, 22 nt, Human
aaauguuagguuguacugaguc

SEQ ID NO: 952784 - RNA, 22 nt, Human
agacauuuauugaacaccuagc

SEQ ID NO: 952785 - RNA, 22 nt, Human
uucuucaguguagcaacuguau

SEQ ID NO: 952786 - RNA, 22 nt, Human
cccaggaguucgaggcuguagu

SEQ ID NO: 952787 - RNA, 23 nt, Human
cagaaaguuugagaagauacauc

SEQ ID NO: 952788 - RNA, 21 nt, Human
aggugcagagccagggaccag

SEQ ID NO: 952789 - RNA, 22 nt, Human
uugauaaaaugaugaaaucacu

SEQ ID NO: 952790 - RNA, 22 nt, Human
aucugccugcaguggagguggg

SEQ ID NO: 952791 - RNA, 22 nt, Human
cuuccugguuugaagcucgccg

SEQ ID NO: 952792 - RNA, 17 nt, Human
uuugaaaggaugucagu

SEQ ID NO: 952793 - RNA, 22 nt, Human
cucuggagguugagcccagcaa

SEQ ID NO: 952794 - RNA, 22 nt, Human
agagcagcugugacauggacag

SEQ ID NO: 952795 - RNA, 22 nt, Human
agcagaaccugcagaccugucu

SEQ ID NO: 952796 - RNA, 22 nt, Human
guuauaaaugacugcaaaaguu

SEQ ID NO: 952797 - RNA, 22 nt, Human
agcugccauccuguucagcacc

SEQ ID NO: 952798 - RNA, 20 nt, Human
cccugagaccagagagcagc

SEQ ID NO: 952799 - RNA, 22 nt, Human
ccagggcugcugugggacucca

SEQ ID NO: 952800 - RNA, 22 nt, Human
gcuccagaugaaaggccagagg

SEQ ID NO: 952801 - RNA, 22 nt, Human
ugcuggccaacaaggcuccaag

SEQ ID NO: 952802 - RNA, 22 nt, Human
cauuuucucaaugaacccucuu

SEQ ID NO: 952803 - RNA, 22 nt, Human
gaggggcagagguagagaacaa

SEQ ID NO: 952804 - RNA, 22 nt, Human
uaggauaggauggagacagaau

SEQ ID NO: 952805 - RNA, 22 nt, Human
ucugggagcacacgcagugauc

SEQ ID NO: 952806 - RNA, 22 nt, Human
uucaaaacagcuagauauugga

SEQ ID NO: 952807 - RNA, 22 nt, Human
cauugcacgggcgucugucugu

SEQ ID NO: 952808 - RNA, 22 nt, Human
uuuaaaaucagaugggaguugg

SEQ ID NO: 952809 - RNA, 22 nt, Human
agaggugacauaggagaggcuc

SEQ ID NO: 952810 - RNA, 22 nt, Human
ugucucagauacgccaucaagg

SEQ ID NO: 952811 - RNA, 22 nt, Human
ucucuggagcugcagauccagg

SEQ ID NO: 952812 - RNA, 22 nt, Human
gaagucuucauucucucugaga

SEQ ID NO: 952813 - RNA, 22 nt, Human
ggauguugauugaauggccauu

SEQ ID NO: 952814 - RNA, 22 nt, Human
uggcagcugauuagauggugcc

SEQ ID NO: 952815 - RNA, 22 nt, Human
gagccagguuugaaucucaguc

SEQ ID NO: 952816 - RNA, 22 nt, Human
ugugcagcuaguccuggacuug

SEQ ID NO: 952817 - RNA, 22 nt, Human
agaagucauuuauguuagauga

SEQ ID NO: 952818 - RNA, 22 nt, Human
ucuucaaguuccaaagugcagg

SEQ ID NO: 952819 - RNA, 22 nt, Human
cuggcuggucaucagcaguacg

SEQ ID NO: 952820 - RNA, 22 nt, Human
auagcuguuagauuggggucga

SEQ ID NO: 952821 - RNA, 22 nt, Human
uauguuauuuucauacaacaga

SEQ ID NO: 952822 - RNA, 22 nt, Human
uuggaaggcccugccuagcagg

SEQ ID NO: 952823 - RNA, 22 nt, Human
cagauggcugccaagaugggcu

SEQ ID NO: 952824 - RNA, 22 nt, Human
guggcagcggcccaggccgucu

SEQ ID NO: 952825 - RNA, 22 nt, Human
uuagaaacccagacucuuaggu

SEQ ID NO: 952826 - RNA, 22 nt, Human
aaagauuaaaucaaauugguca

SEQ ID NO: 952827 - RNA, 23 nt, Human
ggaguuggauuguacuugcugcu

SEQ ID NO: 952828 - RNA, 22 nt, Human
gacagcauggugucuguucagg

SEQ ID NO: 952829 - RNA, 21 nt, Human
uucaauacuauuucaauaguc

SEQ ID NO: 952830 - RNA, 22 nt, Human
cuccagggcagcauggcagugg

SEQ ID NO: 952831 - RNA, 23 nt, Human
agacaguggccgagagguacuag

SEQ ID NO: 952832 - RNA, 19 nt, Human
uagaggagaagggaagugg

SEQ ID NO: 952833 - RNA, 20 nt, Human
gugcuucagaagccauugcu

SEQ ID NO: 952834 - RNA, 22 nt, Human
uuucauguuuauggaaaaugag

SEQ ID NO: 952835 - RNA, 23 nt, Human
ggccuggcccagggcccugauga

SEQ ID NO: 952836 - RNA, 22 nt, Human
cccaaggccucuccuuggcuug

SEQ ID NO: 952837 - RNA, 22 nt, Human
aguaaaaucaccaucucuuugu

SEQ ID NO: 952838 - RNA, 22 nt, Human
uguggcugacuccuggucccca

SEQ ID NO: 952839 - RNA, 22 nt, Human
aaguuuguuguacauguuagua

SEQ ID NO: 952840 - RNA, 22 nt, Human
cuccugggcucaagugauccuc

SEQ ID NO: 952841 - RNA, 22 nt, Human
aaacaaguuuagaauaaugaau

SEQ ID NO: 952842 - RNA, 22 nt, Human
acaauguguuuuuauacauuug

SEQ ID NO: 952843 - RNA, 22 nt, Human
ccuggacucaggcugugggcac

SEQ ID NO: 952844 - RNA, 22 nt, Human
gcaaagucucaagacccaagug

SEQ ID NO: 952845 - RNA, 22 nt, Human
gggccuggggugacguaccccu

SEQ ID NO: 952846 - RNA, 22 nt, Human
uggcagcacaagguggcccaug

SEQ ID NO: 952847 - RNA, 22 nt, Human
caucaucaaaagugacagagaa

SEQ ID NO: 952848 - RNA, 22 nt, Human
guccagggaaauagcgacaggg

SEQ ID NO: 952849 - RNA, 21 nt, Human
uauacaugugugcauacgugu

SEQ ID NO: 952850 - RNA, 22 nt, Human
ccuccucugggaagauucagag

SEQ ID NO: 952851 - RNA, 22 nt, Human
gcuuuggaugugugccugaggu

SEQ ID NO: 952852 - RNA, 22 nt, Human
aggccuccuggcuccaggccuu

SEQ ID NO: 952853 - RNA, 22 nt, Human
cagcagcuuugccaagucagcc

SEQ ID NO: 952854 - RNA, 22 nt, Human
aaaauggucucagcuggcacca

SEQ ID NO: 952855 - RNA, 17 nt, Human
uagaauauggugggcug

SEQ ID NO: 952856 - RNA, 22 nt, Human
ugaggcagaaaauagcaguuca

SEQ ID NO: 952857 - RNA, 22 nt, Human
uugugguuaaccgcacauuuuu

SEQ ID NO: 952858 - RNA, 22 nt, Human
ccagagccuaagaucugauccu

SEQ ID NO: 952859 - RNA, 22 nt, Human
ggucccagguugacagggagac

SEQ ID NO: 952860 - RNA, 22 nt, Human
gcagcuuuuuggaugucaguua

SEQ ID NO: 952861 - RNA, 22 nt, Human
ggcugcuuuaucggcugcugaa

SEQ ID NO: 952862 - RNA, 22 nt, Human
gagcugccaagauuacaaucag

SEQ ID NO: 952863 - RNA, 22 nt, Human
ccagcuccagguagaugggcag

SEQ ID NO: 952864 - RNA, 22 nt, Human
acaggagacccugcugguucug

SEQ ID NO: 952865 - RNA, 22 nt, Human
gccuggcaggccucaugagggg

SEQ ID NO: 952866 - RNA, 22 nt, Human
gucacacuagggccaaguggag

SEQ ID NO: 952867 - RNA, 22 nt, Human
uuucuucaauugcuaacaagga

SEQ ID NO: 952868 - RNA, 22 nt, Human
aaagacugguguguuacauaua

SEQ ID NO: 952869 - RNA, 22 nt, Human
uugggcuggcagagguggucuu

SEQ ID NO: 952870 - RNA, 22 nt, Human
gugaaaucugaggcccaugaug

SEQ ID NO: 952871 - RNA, 22 nt, Human
uucuucaugcuguugcugcuug

SEQ ID NO: 952872 - RNA, 22 nt, Human
gggcagugguccaggcuacagc

SEQ ID NO: 952873 - RNA, 22 nt, Human
cggcuggguucggcugcaggcc

SEQ ID NO: 952874 - RNA, 22 nt, Human
auuacaguaacagcuacaaugc

SEQ ID NO: 952875 - RNA, 22 nt, Human
ccuugggacagccagcuucaga

SEQ ID NO: 952876 - RNA, 22 nt, Human
cuuauaguaugauguugagaau

SEQ ID NO: 952877 - RNA, 22 nt, Human
guguaauugaaauugagaacca

SEQ ID NO: 952878 - RNA, 22 nt, Human
uccagggaaggugugaggcugg

SEQ ID NO: 952879 - RNA, 22 nt, Human
gcagggccuuagcagcggcugc

SEQ ID NO: 952880 - RNA, 22 nt, Human
caaucuauaaauaucaguuucc

SEQ ID NO: 952881 - RNA, 22 nt, Human
agcuaccuggcuuaucacuguc

SEQ ID NO: 952882 - RNA, 18 nt, Human
guaggucaguaccaagca

SEQ ID NO: 952883 - RNA, 22 nt, Human
uauagaaguaagcauugugaug

SEQ ID NO: 952884 - RNA, 22 nt, Human
gugccagggggcacugaacaga

SEQ ID NO: 952885 - RNA, 22 nt, Human
uuugugaaaugaagucacaacu

SEQ ID NO: 952886 - RNA, 22 nt, Human
acauaaugaaaugcagaaauca

SEQ ID NO: 952887 - RNA, 22 nt, Human
cagcauggcuugaguguuuccu

SEQ ID NO: 952888 - RNA, 22 nt, Human
ccucucaucauuaucgcuuugu

SEQ ID NO: 952889 - RNA, 22 nt, Human
gggcaguggguggcugcagccu

SEQ ID NO: 952890 - RNA, 22 nt, Human
auuaggauuuuguccaaguagc

SEQ ID NO: 952891 - RNA, 22 nt, Human
accauccugaaaccuucaugcu

SEQ ID NO: 952892 - RNA, 22 nt, Human
agcugggucuugggccaggaga

SEQ ID NO: 952893 - RNA, 22 nt, Human
gccaggagagcuccuucagguu

SEQ ID NO: 952894 - RNA, 22 nt, Human
cuggguggcuguccagccagcc

SEQ ID NO: 952895 - RNA, 22 nt, Human
ggccuggagaaggcccagggag

SEQ ID NO: 952896 - RNA, 22 nt, Human
cuuauguaaaacggaaagggaa

SEQ ID NO: 952897 - RNA, 22 nt, Human
cauuuguaguuaaaaaugucuc

SEQ ID NO: 952898 - RNA, 22 nt, Human
uaauaauuggcuaacccuggga

SEQ ID NO: 952899 - RNA, 22 nt, Human
augcaaaagacuauuuguugcu

SEQ ID NO: 952900 - RNA, 22 nt, Human
aagaacuuccuaauauauuuuc

SEQ ID NO: 952901 - RNA, 22 nt, Human
cugggcugcaggaguggggcaa

SEQ ID NO: 952902 - RNA, 20 nt, Human
gggcagcuccccucauucug

SEQ ID NO: 952903 - RNA, 19 nt, Human
uggcuucuguuuucauguu

SEQ ID NO: 952904 - RNA, 22 nt, Human
gaugccugcauuucaggagagu

SEQ ID NO: 952905 - RNA, 22 nt, Human
ugcugggcuaggguggagcucu

SEQ ID NO: 952906 - RNA, 22 nt, Human
guuuuucuuugugugaagacaa

SEQ ID NO: 952907 - RNA, 22 nt, Human
ggugcuggacacguggcacucc

SEQ ID NO: 952908 - RNA, 22 nt, Human
ucaguguaaguuauguagaugu

SEQ ID NO: 952909 - RNA, 22 nt, Human
aggguccugggugcaguugcuu

SEQ ID NO: 952910 - RNA, 22 nt, Human
ccaaagucugcauuuuaacaug

SEQ ID NO: 952911 - RNA, 22 nt, Human
gucauggaggauugugaguggu

SEQ ID NO: 952912 - RNA, 22 nt, Human
uggaugcuguaggacacgcucu

SEQ ID NO: 952913 - RNA, 22 nt, Human
agcagcaugaugacagagucuc

SEQ ID NO: 952914 - RNA, 22 nt, Human
cagcaaaagccagcauaagcuc

SEQ ID NO: 952915 - RNA, 22 nt, Human
ucugucacccaggcuggagugc

SEQ ID NO: 952916 - RNA, 18 nt, Human
agaaggagcuaugggcag

SEQ ID NO: 952917 - RNA, 22 nt, Human
ucuucagugaauggcaagaucu

SEQ ID NO: 952918 - RNA, 21 nt, Human
gcacagugccaggcacacagu

SEQ ID NO: 952919 - RNA, 22 nt, Human
gccuggugcuaugagggccagc

SEQ ID NO: 952920 - RNA, 22 nt, Human
ggcuuggaccagucacaguggu

SEQ ID NO: 952921 - RNA, 22 nt, Human
uucagcagugcagacacccagu

SEQ ID NO: 952922 - RNA, 22 nt, Human
aaggcacuagcagaauuaguga

SEQ ID NO: 952923 - RNA, 22 nt, Human
agaguggggaagguguugagaa

SEQ ID NO: 952924 - RNA, 22 nt, Human
augugacaauauuuggucuuau

SEQ ID NO: 952925 - RNA, 18 nt, Human
acccaggcucaugguccu

SEQ ID NO: 952926 - RNA, 20 nt, Human
ccuggccaaugagauaggaa

SEQ ID NO: 952927 - RNA, 22 nt, Human
gugccuggcacacagaaggcaa

SEQ ID NO: 952928 - RNA, 17 nt, Human
aggcaggcagagcggga

SEQ ID NO: 952929 - RNA, 22 nt, Human
uaccaggcagcugcacagaggc

SEQ ID NO: 952930 - RNA, 22 nt, Human
aauguucaaacagaucacuuag

SEQ ID NO: 952931 - RNA, 22 nt, Human
uauuucuucgggauucaagcua

SEQ ID NO: 952932 - RNA, 23 nt, Human
ccugcagcugcuggggcuccacc

SEQ ID NO: 952933 - RNA, 22 nt, Human
aggcagcuggacauaacuaacc

SEQ ID NO: 952934 - RNA, 22 nt, Human
agggccugucagcgguguccug

SEQ ID NO: 952935 - RNA, 22 nt, Human
acacucuguaaugucacacucc

SEQ ID NO: 952936 - RNA, 22 nt, Human
uggcucagaaggcugccuucac

SEQ ID NO: 952937 - RNA, 22 nt, Human
uucuccucuguuggccuucccu

SEQ ID NO: 952938 - RNA, 20 nt, Human
ugcuuccuggccacugcggg

SEQ ID NO: 952939 - RNA, 22 nt, Human
ucaaaguuuuugagaauuacau

SEQ ID NO: 952940 - RNA, 22 nt, Human
auuucuguuugcuacuauaagu

SEQ ID NO: 952941 - RNA, 22 nt, Human
uucagaaguagcuaagcaguca

SEQ ID NO: 952942 - RNA, 22 nt, Human
agagacagaggcaauauagcuu

SEQ ID NO: 952943 - RNA, 22 nt, Human
cuugaaguugcaaaacauuaau

SEQ ID NO: 952944 - RNA, 22 nt, Human
gguggaaggccuggaaggaggc

SEQ ID NO: 952945 - RNA, 22 nt, Human
acaaaugugucuaauugugccu

SEQ ID NO: 952946 - RNA, 23 nt, Human
gcccaugcuguugggcccgagca

SEQ ID NO: 952947 - RNA, 22 nt, Human
gcaggggaguccacucuaugca

SEQ ID NO: 952948 - RNA, 22 nt, Human
gagggcugauaaaugcgcaugg

SEQ ID NO: 952949 - RNA, 22 nt, Human
aggcaguuuauccccagagccu

SEQ ID NO: 952950 - RNA, 21 nt, Human
guccaguggaggaggacagga

SEQ ID NO: 952951 - RNA, 22 nt, Human
ucugagccagccaccuccuuca

SEQ ID NO: 952952 - RNA, 22 nt, Human
ugacaugcuuguuuuccuugaa

SEQ ID NO: 952953 - RNA, 22 nt, Human
ccacagggauaggaauggggcu

SEQ ID NO: 952954 - RNA, 22 nt, Human
gccaggcuggccagcaccuucu

SEQ ID NO: 952955 - RNA, 22 nt, Human
ucaaugaugcugaagguagcgu

SEQ ID NO: 952956 - RNA, 22 nt, Human
gaagagcuguagccugcucuuu

SEQ ID NO: 952957 - RNA, 22 nt, Human
uggccucugugggagcugagca

SEQ ID NO: 952958 - RNA, 23 nt, Human
ucacaggggccagcgcucugugg

SEQ ID NO: 952959 - RNA, 22 nt, Human
cauuucuguucucuuccuguac

SEQ ID NO: 952960 - RNA, 19 nt, Human
gucacauuugucucccagg

SEQ ID NO: 952961 - RNA, 22 nt, Human
gcucugagucucagcuaccaca

SEQ ID NO: 952962 - RNA, 22 nt, Human
aggagaguaccauugggccgca

SEQ ID NO: 952963 - RNA, 22 nt, Human
ccuuuucuaaucuuaagaaugu

SEQ ID NO: 952964 - RNA, 22 nt, Human
uggcucagaagaaaagguaaac

SEQ ID NO: 952965 - RNA, 22 nt, Human
ugagaauuacaaaugagucaca

SEQ ID NO: 952966 - RNA, 22 nt, Human
ugcucccaggcucuguggucug

SEQ ID NO: 952967 - RNA, 22 nt, Human
cugcugugcuuguggccacccg

SEQ ID NO: 952968 - RNA, 22 nt, Human
gccagccugugcuuggccaggc

SEQ ID NO: 952969 - RNA, 22 nt, Human
ggccugagucacaucaggagag

SEQ ID NO: 952970 - RNA, 21 nt, Human
ugcuccuuagcugccccugcc

SEQ ID NO: 952971 - RNA, 22 nt, Human
acagcagagugugagauagcca

SEQ ID NO: 952972 - RNA, 22 nt, Human
ucuucucaguuucucuaggaug

SEQ ID NO: 952973 - RNA, 22 nt, Human
uucaaacaguguagaauauaug

SEQ ID NO: 952974 - RNA, 22 nt, Human
aggcagcuaagauggauaauga

SEQ ID NO: 952975 - RNA, 22 nt, Human
aucaggauccaccuugagccug

SEQ ID NO: 952976 - RNA, 19 nt, Human
gcucugagaggggcauggg

SEQ ID NO: 952977 - RNA, 23 nt, Human
ugaugggaaggaacgacuaccac

SEQ ID NO: 952978 - RNA, 21 nt, Human
acuguucaucuguucagaagc

SEQ ID NO: 952979 - RNA, 22 nt, Human
ucccuguccugggcaaucccag

SEQ ID NO: 952980 - RNA, 23 nt, Human
cccagcgcugagcccugcaggca

SEQ ID NO: 952981 - RNA, 22 nt, Human
acagaggcugcgcuugggaacg

SEQ ID NO: 952982 - RNA, 22 nt, Human
ugcucuagagcuauuggcuucc

SEQ ID NO: 952983 - RNA, 22 nt, Human
cuggugcaggaaggagcuggca

SEQ ID NO: 952984 - RNA, 22 nt, Human
uggcaaccagguggucuagggu

SEQ ID NO: 952985 - RNA, 22 nt, Human
agauuuagugguggaauuuugg

SEQ ID NO: 952986 - RNA, 22 nt, Human
cccagcuugcccaggacugagg

SEQ ID NO: 952987 - RNA, 22 nt, Human
uggccaaauuugguguaacuug

SEQ ID NO: 952988 - RNA, 22 nt, Human
guaaaguucuacuagaaucaac

SEQ ID NO: 952989 - RNA, 23 nt, Human
ggccucuguguucugcccacaug

SEQ ID NO: 952990 - RNA, 22 nt, Human
cccccaggcucugacacaggag
